United States Patent Application Publication US 2005/0255487 A1 - sequence listing, part 85

SEQ ID NO: 2336714 - RNA, 19 nt, Homo sapiens
  misc_RNA (1)...(19): siRNA sense strand
gcggaagagaaguccaaca

SEQ ID NO: 2336715 - RNA, 19 nt, Homo sapiens
  misc_RNA (1)...(19): siRNA sense strand
uuggugagacagaggagaa

SEQ ID NO: 2336716 - RNA, 19 nt, Homo sapiens
  misc_RNA (1)...(19): siRNA sense strand
ugugguacaugcagggaca

SEQ ID NO: 2336717 - RNA, 19 nt, Homo sapiens
  misc_RNA (1)...(19): siRNA sense strand
caccaauggcccacgaaau

SEQ ID NO: 2336718 - RNA, 19 nt, Homo sapiens
  misc_RNA (1)...(19): siRNA sense strand
ugauaguggcagugauagu

SEQ ID NO: 2336719 - RNA, 19 nt, Homo sapiens
  misc_RNA (1)...(19): siRNA sense strand
gaaggaagcagaagagccu

SEQ ID NO: 2336720 - RNA, 19 nt, Homo sapiens
  misc_RNA (1)...(19): siRNA sense strand
uggaagggaucaaccucaa

SEQ ID NO: 2336721 - RNA, 19 nt, Homo sapiens
  misc_RNA (1)...(19): siRNA sense strand
gccugaugauguauggcua

SEQ ID NO: 2336722 - RNA, 19 nt, Homo sapiens
  misc_RNA (1)...(19): siRNA sense strand
cccaaaggcuauggcacaa

SEQ ID NO: 2336723 - RNA, 19 nt, Homo sapiens
  misc_RNA (1)...(19): siRNA sense strand
caaugcaggugauggacca

SEQ ID NO: 2336724 - RNA, 19 nt, Homo sapiens
  misc_RNA (1)...(19): siRNA sense strand
guuaugauccgcagcucaa

SEQ ID NO: 2336725 - RNA, 19 nt, Homo sapiens
  misc_RNA (1)...(19): siRNA sense strand
uuaaagaaguggugagcca

SEQ ID NO: 2336726 - RNA, 19 nt, Homo sapiens
  misc_RNA (1)...(19): siRNA sense strand
aagagaaguccaacagaaa

SEQ ID NO: 2336727 - RNA, 19 nt, Homo sapiens
  misc_RNA (1)...(19): siRNA sense strand
ggaagguguacaagggaau

SEQ ID NO: 2336728 - RNA, 19 nt, Homo sapiens
  misc_RNA (1)...(19): siRNA sense strand
cugugauguuggagagaga

SEQ ID NO: 2336729 - RNA, 19 nt, Homo sapiens
  misc_RNA (1)...(19): siRNA sense strand
cggaagguguacaagggaa

SEQ ID NO: 2336730 - RNA, 19 nt, Homo sapiens
  misc_RNA (1)...(19): siRNA sense strand
ggacagauacaaacggaga

SEQ ID NO: 2336731 - RNA, 19 nt, Homo sapiens
  misc_RNA (1)...(19): siRNA sense strand
uggcaaggauccuggccua

SEQ ID NO: 2336732 - RNA, 19 nt, Homo sapiens
  misc_RNA (1)...(19): siRNA sense strand
agagagaagggauggguau

SEQ ID NO: 2336733 - RNA, 19 nt, Homo sapiens
  misc_RNA (1)...(19): siRNA sense strand
ccagacaagcggaagagaa

SEQ ID NO: 2336734 - RNA, 19 nt, Homo sapiens
  misc_RNA (1)...(19): siRNA sense strand
gggcguuaguggaucagaa

SEQ ID NO: 2336735 - RNA, 19 nt, Homo sapiens
  misc_RNA (1)...(19): siRNA sense strand
ccuacaugcugcugaugaa

SEQ ID NO: 2336736 - RNA, 19 nt, Homo sapiens
  misc_RNA (1)...(19): siRNA sense strand
cugaauugcuacggcgaua

SEQ ID NO: 2336737 - RNA, 19 nt, Homo sapiens
  misc_RNA (1)...(19): siRNA sense strand
auagugaaauugagaccaa

SEQ ID NO: 2336738 - RNA, 19 nt, Homo sapiens
  misc_RNA (1)...(19): siRNA sense strand
agaaauuucaugagggcca

SEQ ID NO: 2336739 - RNA, 19 nt, Homo sapiens
  misc_RNA (1)...(19): siRNA sense strand
cugcaugaccuucgagaga

SEQ ID NO: 2336740 - RNA, 19 nt, Homo sapiens
  misc_RNA (1)...(19): siRNA sense strand
gcauucuguuagagcacaa

SEQ ID NO: 2336741 - RNA, 19 nt, Homo sapiens
  misc_RNA (1)...(19): siRNA sense strand
ugacauuaauggugauacu

SEQ ID NO: 2336742 - RNA, 19 nt, Homo sapiens
  misc_RNA (1)...(19): siRNA sense strand
gagucuuuguccugagcaa

SEQ ID NO: 2336743 - RNA, 19 nt, Homo sapiens
  misc_RNA (1)...(19): siRNA sense strand
aguucauagcagugaggaa

SEQ ID NO: 2336744 - RNA, 19 nt, Homo sapiens
  misc_RNA (1)...(19): siRNA sense strand
gaaccagacaagcggaaga

SEQ ID NO: 2336745 - RNA, 19 nt, Homo sapiens
  misc_RNA (1)...(19): siRNA sense strand
acaugaagaagcagacauu

SEQ ID NO: 2336746 - RNA, 19 nt, Homo sapiens
  misc_RNA (1)...(19): siRNA sense strand
agccaagcauaaaggagaa

SEQ ID NO: 2336747 - RNA, 19 nt, Homo sapiens
  misc_RNA (1)...(19): siRNA sense strand
cagcaaugcaggugaugga

SEQ ID NO: 2336748 - RNA, 19 nt, Homo sapiens
  misc_RNA (1)...(19): siRNA sense strand
guguugugcuuguggcgua

SEQ ID NO: 2336749 - RNA, 19 nt, Homo sapiens
  misc_RNA (1)...(19): siRNA sense strand
gaguagacaucgagguccu

SEQ ID NO: 2336750 - RNA, 19 nt, Homo sapiens
  misc_RNA (1)...(19): siRNA sense strand
gcguaguaacaucggaaca

SEQ ID NO: 2336751 - RNA, 19 nt, Homo sapiens
  misc_RNA (1)...(19): siRNA sense strand
ccugaagacuggugagggu

SEQ ID NO: 2336752 - RNA, 19 nt, Homo sapiens
  misc_RNA (1)...(19): siRNA sense strand
uaguggaucuggacagcaa

SEQ ID NO: 2336753 - RNA, 19 nt, Homo sapiens
  misc_RNA (1)...(19): siRNA sense strand
uccucaaucuggagaaauu

SEQ ID NO: 2336754 - RNA, 19 nt, Homo sapiens
  misc_RNA (1)...(19): siRNA sense strand
gcgcaugagccuucgggau

SEQ ID NO: 2336755 - RNA, 19 nt, Homo sapiens
  misc_RNA (1)...(19): siRNA sense strand
ggagauggaugauaaggca

SEQ ID NO: 2336756 - RNA, 19 nt, Homo sapiens
  misc_RNA (1)...(19): siRNA sense strand
aguccaacagaaaguguaa

SEQ ID NO: 2336757 - RNA, 19 nt, Homo sapiens
  misc_RNA (1)...(19): siRNA sense strand
augcagggacagauacaaa

SEQ ID NO: 2336758 - RNA, 19 nt, Homo sapiens
  misc_RNA (1)...(19): siRNA sense strand
cuggacagcaauaggguga

SEQ ID NO: 2336759 - RNA, 19 nt, Homo sapiens
  misc_RNA (1)...(19): siRNA sense strand
ggaugauaaggcagcagua

SEQ ID NO: 2336760 - RNA, 19 nt, Homo sapiens
  misc_RNA (1)...(19): siRNA sense strand
acacagcccaacagugaaa

SEQ ID NO: 2336761 - RNA, 19 nt, Homo sapiens
  misc_RNA (1)...(19): siRNA sense strand
aagccaagcauaaaggaga

SEQ ID NO: 2336762 - RNA, 19 nt, Homo sapiens
  misc_RNA (1)...(19): siRNA sense strand
gagagagaagggaugggua

SEQ ID NO: 2336763 - RNA, 19 nt, Homo sapiens
  misc_RNA (1)...(19): siRNA sense strand
auguauggcuaguggaucu

SEQ ID NO: 2336764 - RNA, 19 nt, Homo sapiens
  misc_RNA (1)...(19): siRNA sense strand
gagaaguccaacagaaagu

SEQ ID NO: 2336765 - RNA, 19 nt, Homo sapiens
  misc_RNA (1)...(19): siRNA sense strand
caaaggugcccgagagaag

SEQ ID NO: 2336766 - RNA, 19 nt, Homo sapiens
  misc_RNA (1)...(19): siRNA sense strand
acccaaaggcuauggcaca

SEQ ID NO: 2336767 - RNA, 19 nt, Homo sapiens
  misc_RNA (1)...(19): siRNA sense strand
acagauacaaacggagaua

SEQ ID NO: 2336768 - RNA, 19 nt, Homo sapiens
  misc_RNA (1)...(19): siRNA sense strand
ggaggaucacacugaguuu

SEQ ID NO: 2336769 - RNA, 19 nt, Homo sapiens
  misc_RNA (1)...(19): siRNA sense strand
cagacaagcggaagagaag

SEQ ID NO: 2336770 - RNA, 19 nt, Homo sapiens
  misc_RNA (1)...(19): siRNA sense strand
cugcagaaucagaaggaag

SEQ ID NO: 2336771 - RNA, 19 nt, Homo sapiens
  misc_RNA (1)...(19): siRNA sense strand
gaaucagaaggaagcagaa

SEQ ID NO: 2336772 - RNA, 19 nt, Homo sapiens
  misc_RNA (1)...(19): siRNA sense strand
gggcagaagcgaguagaca

SEQ ID NO: 2336773 - RNA, 19 nt, Homo sapiens
  misc_RNA (1)...(19): siRNA sense strand
gagacuggcaagugacuca

SEQ ID NO: 2336774 - RNA, 19 nt, Homo sapiens
  misc_RNA (1)...(19): siRNA sense strand
gcggaagagaaguccaaca

SEQ ID NO: 2336775 - RNA, 19 nt, Homo sapiens
  misc_RNA (1)...(19): siRNA sense strand
uuggugagacagaggagaa

SEQ ID NO: 2336776 - RNA, 19 nt, Homo sapiens
  misc_RNA (1)...(19): siRNA sense strand
ugugguacaugcagggaca

SEQ ID NO: 2336777 - RNA, 19 nt, Homo sapiens
  misc_RNA (1)...(19): siRNA sense strand
caccaauggcccacgaaau

SEQ ID NO: 2336778 - RNA, 19 nt, Homo sapiens
  misc_RNA (1)...(19): siRNA sense strand
ugauaguggcagugauagu

SEQ ID NO: 2336779 - RNA, 19 nt, Homo sapiens
  misc_RNA (1)...(19): siRNA sense strand
gaaggaagcagaagagccu

SEQ ID NO: 2336780 - RNA, 19 nt, Homo sapiens
  misc_RNA (1)...(19): siRNA sense strand
uggaagggaucaaccucaa

SEQ ID NO: 2336781 - RNA, 19 nt, Homo sapiens
  misc_RNA (1)...(19): siRNA sense strand
gccugaugauguauggcua

SEQ ID NO: 2336782 - RNA, 19 nt, Homo sapiens
  misc_RNA (1)...(19): siRNA sense strand
cccaaaggcuauggcacaa

SEQ ID NO: 2336783 - RNA, 19 nt, Homo sapiens
  misc_RNA (1)...(19): siRNA sense strand
caaugcaggugauggacca

SEQ ID NO: 2336784 - RNA, 19 nt, Homo sapiens
  misc_RNA (1)...(19): siRNA sense strand
guuaugauccgcagcucaa

SEQ ID NO: 2336785 - RNA, 19 nt, Homo sapiens
  misc_RNA (1)...(19): siRNA sense strand
aagagaaguccaacagaaa

SEQ ID NO: 2336786 - RNA, 19 nt, Homo sapiens
  misc_RNA (1)...(19): siRNA sense strand
ggaagguguacaagggaau

SEQ ID NO: 2336787 - RNA, 19 nt, Homo sapiens
  misc_RNA (1)...(19): siRNA sense strand
cugugauguuggagagaga

SEQ ID NO: 2336788 - RNA, 19 nt, Homo sapiens
  misc_RNA (1)...(19): siRNA sense strand
cggaagguguacaagggaa

SEQ ID NO: 2336789 - RNA, 19 nt, Homo sapiens
  misc_RNA (1)...(19): siRNA sense strand
ggacagauacaaacggaga

SEQ ID NO: 2336790 - RNA, 19 nt, Homo sapiens
  misc_RNA (1)...(19): siRNA sense strand
uggcaaggauccuggccua

SEQ ID NO: 2336791 - RNA, 19 nt, Homo sapiens
  misc_RNA (1)...(19): siRNA sense strand
agagagaagggauggguau

SEQ ID NO: 2336792 - RNA, 19 nt, Homo sapiens
  misc_RNA (1)...(19): siRNA sense strand
ccagacaagcggaagagaa

SEQ ID NO: 2336793 - RNA, 19 nt, Homo sapiens
  misc_RNA (1)...(19): siRNA sense strand
gggcguuaguggaucagaa

SEQ ID NO: 2336794 - RNA, 19 nt, Homo sapiens
  misc_RNA (1)...(19): siRNA sense strand
ccuacaugcugcugaugaa

SEQ ID NO: 2336795 - RNA, 19 nt, Homo sapiens
  misc_RNA (1)...(19): siRNA sense strand
cugaauugcuacggcgaua

SEQ ID NO: 2336796 - RNA, 19 nt, Homo sapiens
  misc_RNA (1)...(19): siRNA sense strand
auagugaaauugagaccaa

SEQ ID NO: 2336797 - RNA, 19 nt, Homo sapiens
  misc_RNA (1)...(19): siRNA sense strand
agaaauuucaugagggcca

SEQ ID NO: 2336798 - RNA, 19 nt, Homo sapiens
  misc_RNA (1)...(19): siRNA sense strand
cugcaugaccuucgagaga

SEQ ID NO: 2336799 - RNA, 19 nt, Homo sapiens
  misc_RNA (1)...(19): siRNA sense strand
gcauucuguuagagcacaa

SEQ ID NO: 2336800 - RNA, 19 nt, Homo sapiens
  misc_RNA (1)...(19): siRNA sense strand
ugacauuaauggugauacu

SEQ ID NO: 2336801 - RNA, 19 nt, Homo sapiens
  misc_RNA (1)...(19): siRNA sense strand
gagucuuuguccugagcaa

SEQ ID NO: 2336802 - RNA, 19 nt, Homo sapiens
  misc_RNA (1)...(19): siRNA sense strand
gaaccagacaagcggaaga

SEQ ID NO: 2336803 - RNA, 19 nt, Homo sapiens
  misc_RNA (1)...(19): siRNA sense strand
acaugaagaagcagacauu

SEQ ID NO: 2336804 - RNA, 19 nt, Homo sapiens
  misc_RNA (1)...(19): siRNA sense strand
agccaagcauaaaggagaa

SEQ ID NO: 2336805 - RNA, 19 nt, Homo sapiens
  misc_RNA (1)...(19): siRNA sense strand
cagcaaugcaggugaugga

SEQ ID NO: 2336806 - RNA, 19 nt, Homo sapiens
  misc_RNA (1)...(19): siRNA sense strand
guguugugcuuguggcgua

SEQ ID NO: 2336807 - RNA, 19 nt, Homo sapiens
  misc_RNA (1)...(19): siRNA sense strand
gaguagacaucgagguccu

SEQ ID NO: 2336808 - RNA, 19 nt, Homo sapiens
  misc_RNA (1)...(19): siRNA sense strand
gcguaguaacaucggaaca

SEQ ID NO: 2336809 - RNA, 19 nt, Homo sapiens
  misc_RNA (1)...(19): siRNA sense strand
ccugaagacuggugagggu

SEQ ID NO: 2336810 - RNA, 19 nt, Homo sapiens
  misc_RNA (1)...(19): siRNA sense strand
uaguggaucuggacagcaa

SEQ ID NO: 2336811 - RNA, 19 nt, Homo sapiens
  misc_RNA (1)...(19): siRNA sense strand
uccucaaucuggagaaauu

SEQ ID NO: 2336812 - RNA, 19 nt, Homo sapiens
  misc_RNA (1)...(19): siRNA sense strand
gcgcaugagccuucgggau

SEQ ID NO: 2336813 - RNA, 19 nt, Homo sapiens
  misc_RNA (1)...(19): siRNA sense strand
ggagauggaugauaaggca

SEQ ID NO: 2336814 - RNA, 19 nt, Homo sapiens
  misc_RNA (1)...(19): siRNA sense strand
aguccaacagaaaguguaa

SEQ ID NO: 2336815 - RNA, 19 nt, Homo sapiens
  misc_RNA (1)...(19): siRNA sense strand
augcagggacagauacaaa

SEQ ID NO: 2336816 - RNA, 19 nt, Homo sapiens
  misc_RNA (1)...(19): siRNA sense strand
cuggacagcaauaggguga

SEQ ID NO: 2336817 - RNA, 19 nt, Homo sapiens
  misc_RNA (1)...(19): siRNA sense strand
ggaugauaaggcagcagua

SEQ ID NO: 2336818 - RNA, 19 nt, Homo sapiens
  misc_RNA (1)...(19): siRNA sense strand
acacagcccaacagugaaa

SEQ ID NO: 2336819 - RNA, 19 nt, Homo sapiens
  misc_RNA (1)...(19): siRNA sense strand
aagccaagcauaaaggaga

SEQ ID NO: 2336820 - RNA, 19 nt, Homo sapiens
  misc_RNA (1)...(19): siRNA sense strand
gagagagaagggaugggua

SEQ ID NO: 2336821 - RNA, 19 nt, Homo sapiens
  misc_RNA (1)...(19): siRNA sense strand
auguauggcuaguggaucu

SEQ ID NO: 2336822 - RNA, 19 nt, Homo sapiens
  misc_RNA (1)...(19): siRNA sense strand
gagaaguccaacagaaagu

SEQ ID NO: 2336823 - RNA, 19 nt, Homo sapiens
  misc_RNA (1)...(19): siRNA sense strand
caaaggugcccgagagaag

SEQ ID NO: 2336824 - RNA, 19 nt, Homo sapiens
  misc_RNA (1)...(19): siRNA sense strand
acccaaaggcuauggcaca

SEQ ID NO: 2336825 - RNA, 19 nt, Homo sapiens
  misc_RNA (1)...(19): siRNA sense strand
acagauacaaacggagaua

SEQ ID NO: 2336826 - RNA, 19 nt, Homo sapiens
  misc_RNA (1)...(19): siRNA sense strand
ggaggaucacacugaguuu

SEQ ID NO: 2336827 - RNA, 19 nt, Homo sapiens
  misc_RNA (1)...(19): siRNA sense strand
cagacaagcggaagagaag

SEQ ID NO: 2336828 - RNA, 19 nt, Homo sapiens
  misc_RNA (1)...(19): siRNA sense strand
cugcagaaucagaaggaag

SEQ ID NO: 2336829 - RNA, 19 nt, Homo sapiens
  misc_RNA (1)...(19): siRNA sense strand
gaaucagaaggaagcagaa

SEQ ID NO: 2336830 - RNA, 19 nt, Homo sapiens
  misc_RNA (1)...(19): siRNA sense strand
gggcagaagcgaguagaca

SEQ ID NO: 2336831 - RNA, 19 nt, Homo sapiens
  misc_RNA (1)...(19): siRNA sense strand
gagacuggcaagugacuca

SEQ ID NO: 2336832 - RNA, 19 nt, Homo sapiens
  misc_RNA (1)...(19): siRNA sense strand
gcggaagagaaguccaaca

SEQ ID NO: 2336833 - RNA, 19 nt, Homo sapiens
  misc_RNA (1)...(19): siRNA sense strand
uuggugagacagaggagaa

SEQ ID NO: 2336834 - RNA, 19 nt, Homo sapiens
  misc_RNA (1)...(19): siRNA sense strand
ugugguacaugcagggaca

SEQ ID NO: 2336835 - RNA, 19 nt, Homo sapiens
  misc_RNA (1)...(19): siRNA sense strand
ugauaguggcagugauagu

SEQ ID NO: 2336836 - RNA, 19 nt, Homo sapiens
  misc_RNA (1)...(19): siRNA sense strand
gaaggaagcagaagagccu

SEQ ID NO: 2336837 - RNA, 19 nt, Homo sapiens
  misc_RNA (1)...(19): siRNA sense strand
uggaagggaucaaccucaa

SEQ ID NO: 2336838 - RNA, 19 nt, Homo sapiens
  misc_RNA (1)...(19): siRNA sense strand
gccugaugauguauggcua

SEQ ID NO: 2336839 - RNA, 19 nt, Homo sapiens
  misc_RNA (1)...(19): siRNA sense strand
cccaaaggcuauggcacaa

SEQ ID NO: 2336840 - RNA, 19 nt, Homo sapiens
  misc_RNA (1)...(19): siRNA sense strand
caaugcaggugauggacca

SEQ ID NO: 2336841 - RNA, 19 nt, Homo sapiens
  misc_RNA (1)...(19): siRNA sense strand
guuaugauccgcagcucaa

SEQ ID NO: 2336842 - RNA, 19 nt, Homo sapiens
  misc_RNA (1)...(19): siRNA sense strand
ccaaaugcaauucugggaa

SEQ ID NO: 2336843 - RNA, 19 nt, Homo sapiens
  misc_RNA (1)...(19): siRNA sense strand
gcgccuggaagaugaugaa

SEQ ID NO: 2336844 - RNA, 19 nt, Homo sapiens
  misc_RNA (1)...(19): siRNA sense strand
cggcacaugaagaagcaga

SEQ ID NO: 2336845 - RNA, 19 nt, Homo sapiens
  misc_RNA (1)...(19): siRNA sense strand
aagagaaguccaacagaaa

SEQ ID NO: 2336846 - RNA, 19 nt, Homo sapiens
  misc_RNA (1)...(19): siRNA sense strand
ggaagguguacaagggaau

SEQ ID NO: 2336847 - RNA, 19 nt, Homo sapiens
  misc_RNA (1)...(19): siRNA sense strand
cugugauguuggagagaga

SEQ ID NO: 2336848 - RNA, 19 nt, Homo sapiens
  misc_RNA (1)...(19): siRNA sense strand
cggaagguguacaagggaa

SEQ ID NO: 2336849 - RNA, 19 nt, Homo sapiens
  misc_RNA (1)...(19): siRNA sense strand
ggacagauacaaacggaga

SEQ ID NO: 2336850 - RNA, 19 nt, Homo sapiens
  misc_RNA (1)...(19): siRNA sense strand
uggcaaggauccuggccua

SEQ ID NO: 2336851 - RNA, 19 nt, Homo sapiens
  misc_RNA (1)...(19): siRNA sense strand
agagagaagggauggguau

SEQ ID NO: 2336852 - RNA, 19 nt, Homo sapiens
  misc_RNA (1)...(19): siRNA sense strand
ccagacaagcggaagagaa

SEQ ID NO: 2336853 - RNA, 19 nt, Homo sapiens
  misc_RNA (1)...(19): siRNA sense strand
gggcguuaguggaucagaa

SEQ ID NO: 2336854 - RNA, 19 nt, Homo sapiens
  misc_RNA (1)...(19): siRNA sense strand
ccuacaugcugcugaugaa

SEQ ID NO: 2336855 - RNA, 19 nt, Homo sapiens
  misc_RNA (1)...(19): siRNA sense strand
cugaauugcuacggcgaua

SEQ ID NO: 2336856 - RNA, 19 nt, Homo sapiens
  misc_RNA (1)...(19): siRNA sense strand
auagugaaauugagaccaa

SEQ ID NO: 2336857 - RNA, 19 nt, Homo sapiens
  misc_RNA (1)...(19): siRNA sense strand
agaaauuucaugagggcca

SEQ ID NO: 2336858 - RNA, 19 nt, Homo sapiens
  misc_RNA (1)...(19): siRNA sense strand
cugcaugaccuucgagaga

SEQ ID NO: 2336859 - RNA, 19 nt, Homo sapiens
  misc_RNA (1)...(19): siRNA sense strand
gcauucuguuagagcacaa

SEQ ID NO: 2336860 - RNA, 19 nt, Homo sapiens
  misc_RNA (1)...(19): siRNA sense strand
ugacauuaauggugauacu

SEQ ID NO: 2336861 - RNA, 19 nt, Homo sapiens
  misc_RNA (1)...(19): siRNA sense strand
gagucuuuguccugagcaa

SEQ ID NO: 2336862 - RNA, 19 nt, Homo sapiens
  misc_RNA (1)...(19): siRNA sense strand
gaaccagacaagcggaaga

SEQ ID NO: 2336863 - RNA, 19 nt, Homo sapiens
  misc_RNA (1)...(19): siRNA sense strand
acaugaagaagcagacauu

SEQ ID NO: 2336864 - RNA, 19 nt, Homo sapiens
  misc_RNA (1)...(19): siRNA sense strand
agccaagcauaaaggagaa

SEQ ID NO: 2336865 - RNA, 19 nt, Homo sapiens
  misc_RNA (1)...(19): siRNA sense strand
cagcaaugcaggugaugga

SEQ ID NO: 2336866 - RNA, 19 nt, Homo sapiens
  misc_RNA (1)...(19): siRNA sense strand
guguugugcuuguggcgua

SEQ ID NO: 2336867 - RNA, 19 nt, Homo sapiens
  misc_RNA (1)...(19): siRNA sense strand
gaguagacaucgagguccu

SEQ ID NO: 2336868 - RNA, 19 nt, Homo sapiens
  misc_RNA (1)...(19): siRNA sense strand
gcguaguaacaucggaaca

SEQ ID NO: 2336869 - RNA, 19 nt, Homo sapiens
  misc_RNA (1)...(19): siRNA sense strand
ccugaagacuggugagggu

SEQ ID NO: 2336870 - RNA, 19 nt, Homo sapiens
  misc_RNA (1)...(19): siRNA sense strand
uaguggaucuggacagcaa

SEQ ID NO: 2336871 - RNA, 19 nt, Homo sapiens
  misc_RNA (1)...(19): siRNA sense strand
uccucaaucuggagaaauu

SEQ ID NO: 2336872 - RNA, 19 nt, Homo sapiens
  misc_RNA (1)...(19): siRNA sense strand
gcgcaugagccuucgggau

SEQ ID NO: 2336873 - RNA, 19 nt, Homo sapiens
  misc_RNA (1)...(19): siRNA sense strand
ggagauggaugauaaggca

SEQ ID NO: 2336874 - RNA, 19 nt, Homo sapiens
  misc_RNA (1)...(19): siRNA sense strand
aguccaacagaaaguguaa

SEQ ID NO: 2336875 - RNA, 19 nt, Homo sapiens
  misc_RNA (1)...(19): siRNA sense strand
augcagggacagauacaaa

SEQ ID NO: 2336876 - RNA, 19 nt, Homo sapiens
  misc_RNA (1)...(19): siRNA sense strand
cuggacagcaauaggguga

SEQ ID NO: 2336877 - RNA, 19 nt, Homo sapiens
  misc_RNA (1)...(19): siRNA sense strand
ggaugauaaggcagcagua

SEQ ID NO: 2336878 - RNA, 19 nt, Homo sapiens
  misc_RNA (1)...(19): siRNA sense strand
acacagcccaacagugaaa

SEQ ID NO: 2336879 - RNA, 19 nt, Homo sapiens
  misc_RNA (1)...(19): siRNA sense strand
aagccaagcauaaaggaga

SEQ ID NO: 2336880 - RNA, 19 nt, Homo sapiens
  misc_RNA (1)...(19): siRNA sense strand
gagagagaagggaugggua

SEQ ID NO: 2336881 - RNA, 19 nt, Homo sapiens
  misc_RNA (1)...(19): siRNA sense strand
auguauggcuaguggaucu

SEQ ID NO: 2336882 - RNA, 19 nt, Homo sapiens
  misc_RNA (1)...(19): siRNA sense strand
gagaaguccaacagaaagu

SEQ ID NO: 2336883 - RNA, 19 nt, Homo sapiens
  misc_RNA (1)...(19): siRNA sense strand
caaaggugcccgagagaag

SEQ ID NO: 2336884 - RNA, 19 nt, Homo sapiens
  misc_RNA (1)...(19): siRNA sense strand
acccaaaggcuauggcaca

SEQ ID NO: 2336885 - RNA, 19 nt, Homo sapiens
  misc_RNA (1)...(19): siRNA sense strand
acagauacaaacggagaua

SEQ ID NO: 2336886 - RNA, 19 nt, Homo sapiens
  misc_RNA (1)...(19): siRNA sense strand
ggaggaucacacugaguuu

SEQ ID NO: 2336887 - RNA, 19 nt, Homo sapiens
  misc_RNA (1)...(19): siRNA sense strand
cagacaagcggaagagaag

SEQ ID NO: 2336888 - RNA, 19 nt, Homo sapiens
  misc_RNA (1)...(19): siRNA sense strand
cugcagaaucagaaggaag

SEQ ID NO: 2336889 - RNA, 19 nt, Homo sapiens
  misc_RNA (1)...(19): siRNA sense strand
gaaucagaaggaagcagaa

SEQ ID NO: 2336890 - RNA, 19 nt, Homo sapiens
  misc_RNA (1)...(19): siRNA sense strand
gggcagaagcgaguagaca

SEQ ID NO: 2336891 - RNA, 19 nt, Homo sapiens
  misc_RNA (1)...(19): siRNA sense strand
gagacuggcaagugacuca

SEQ ID NO: 2336892 - RNA, 19 nt, Homo sapiens
  misc_RNA (1)...(19): siRNA sense strand
gcggaagagaaguccaaca

SEQ ID NO: 2336893 - RNA, 19 nt, Homo sapiens
  misc_RNA (1)...(19): siRNA sense strand
uuggugagacagaggagaa

SEQ ID NO: 2336894 - RNA, 19 nt, Homo sapiens
  misc_RNA (1)...(19): siRNA sense strand
ugugguacaugcagggaca

SEQ ID NO: 2336895 - RNA, 19 nt, Homo sapiens
  misc_RNA (1)...(19): siRNA sense strand
ugauaguggcagugauagu

SEQ ID NO: 2336896 - RNA, 19 nt, Homo sapiens
  misc_RNA (1)...(19): siRNA sense strand
gaaggaagcagaagagccu

SEQ ID NO: 2336897 - RNA, 19 nt, Homo sapiens
  misc_RNA (1)...(19): siRNA sense strand
uggaagggaucaaccucaa

SEQ ID NO: 2336898 - RNA, 19 nt, Homo sapiens
  misc_RNA (1)...(19): siRNA sense strand
gccugaugauguauggcua

SEQ ID NO: 2336899 - RNA, 19 nt, Homo sapiens
  misc_RNA (1)...(19): siRNA sense strand
cccaaaggcuauggcacaa

SEQ ID NO: 2336900 - RNA, 19 nt, Homo sapiens
  misc_RNA (1)...(19): siRNA sense strand
caaugcaggugauggacca

SEQ ID NO: 2336901 - RNA, 19 nt, Homo sapiens
  misc_RNA (1)...(19): siRNA sense strand
guuaugauccgcagcucaa

SEQ ID NO: 2336902 - RNA, 19 nt, Homo sapiens
  misc_RNA (1)...(19): siRNA sense strand
ccaaaugcaauucugggaa

SEQ ID NO: 2336903 - RNA, 19 nt, Homo sapiens
  misc_RNA (1)...(19): siRNA sense strand
gcgccuggaagaugaugaa

SEQ ID NO: 2336904 - RNA, 19 nt, Homo sapiens
  misc_RNA (1)...(19): siRNA sense strand
cggcacaugaagaagcaga

SEQ ID NO: 2336905 - RNA, 19 nt, Homo sapiens
  misc_RNA (1)...(19): siRNA sense strand
uuaaagaaguggugagcca

SEQ ID NO: 2336906 - RNA, 19 nt, Homo sapiens
  misc_RNA (1)...(19): siRNA sense strand
aagagaaguccaacagaaa

SEQ ID NO: 2336907 - RNA, 19 nt, Homo sapiens
  misc_RNA (1)...(19): siRNA sense strand
ggaagguguacaagggaau

SEQ ID NO: 2336908 - RNA, 19 nt, Homo sapiens
  misc_RNA (1)...(19): siRNA sense strand
cugugauguuggagagaga

SEQ ID NO: 2336909 - RNA, 19 nt, Homo sapiens
  misc_RNA (1)...(19): siRNA sense strand
cggaagguguacaagggaa

SEQ ID NO: 2336910 - RNA, 19 nt, Homo sapiens
  misc_RNA (1)...(19): siRNA sense strand
ggacagauacaaacggaga

SEQ ID NO: 2336911 - RNA, 19 nt, Homo sapiens
  misc_RNA (1)...(19): siRNA sense strand
uggcaaggauccuggccua

SEQ ID NO: 2336912 - RNA, 19 nt, Homo sapiens
  misc_RNA (1)...(19): siRNA sense strand
agagagaagggauggguau

SEQ ID NO: 2336913 - RNA, 19 nt, Homo sapiens
  misc_RNA (1)...(19): siRNA sense strand
ccagacaagcggaagagaa

SEQ ID NO: 2336914 - RNA, 19 nt, Homo sapiens
  misc_RNA (1)...(19): siRNA sense strand
gggcguuaguggaucagaa

SEQ ID NO: 2336915 - RNA, 19 nt, Homo sapiens
  misc_RNA (1)...(19): siRNA sense strand
ccuacaugcugcugaugaa

SEQ ID NO: 2336916 - RNA, 19 nt, Homo sapiens
  misc_RNA (1)...(19): siRNA sense strand
cugaauugcuacggcgaua

SEQ ID NO: 2336917 - RNA, 19 nt, Homo sapiens
  misc_RNA (1)...(19): siRNA sense strand
auagugaaauugagaccaa

SEQ ID NO: 2336918 - RNA, 19 nt, Homo sapiens
  misc_RNA (1)...(19): siRNA sense strand
agaaauuucaugagggcca

SEQ ID NO: 2336919 - RNA, 19 nt, Homo sapiens
  misc_RNA (1)...(19): siRNA sense strand
cugcaugaccuucgagaga

SEQ ID NO: 2336920 - RNA, 19 nt, Homo sapiens
  misc_RNA (1)...(19): siRNA sense strand
gcauucuguuagagcacaa

SEQ ID NO: 2336921 - RNA, 19 nt, Homo sapiens
  misc_RNA (1)...(19): siRNA sense strand
ugacauuaauggugauacu

SEQ ID NO: 2336922 - RNA, 19 nt, Homo sapiens
  misc_RNA (1)...(19): siRNA sense strand
gagucuuuguccugagcaa

SEQ ID NO: 2336923 - RNA, 19 nt, Homo sapiens
  misc_RNA (1)...(19): siRNA sense strand
aguucauagcagugaggaa

SEQ ID NO: 2336924 - RNA, 19 nt, Homo sapiens
  misc_RNA (1)...(19): siRNA sense strand
gaaccagacaagcggaaga

SEQ ID NO: 2336925 - RNA, 19 nt, Homo sapiens
  misc_RNA (1)...(19): siRNA sense strand
acaugaagaagcagacauu

SEQ ID NO: 2336926 - RNA, 19 nt, Homo sapiens
  misc_RNA (1)...(19): siRNA sense strand
agccaagcauaaaggagaa

SEQ ID NO: 2336927 - RNA, 19 nt, Homo sapiens
  misc_RNA (1)...(19): siRNA sense strand
cagcaaugcaggugaugga

SEQ ID NO: 2336928 - RNA, 19 nt, Homo sapiens
  misc_RNA (1)...(19): siRNA sense strand
guguugugcuuguggcgua

SEQ ID NO: 2336929 - RNA, 19 nt, Homo sapiens
  misc_RNA (1)...(19): siRNA sense strand
gaguagacaucgagguccu

SEQ ID NO: 2336930 - RNA, 19 nt, Homo sapiens
  misc_RNA (1)...(19): siRNA sense strand
gcguaguaacaucggaaca

SEQ ID NO: 2336931 - RNA, 19 nt, Homo sapiens
  misc_RNA (1)...(19): siRNA sense strand
ccugaagacuggugagggu

SEQ ID NO: 2336932 - RNA, 19 nt, Homo sapiens
  misc_RNA (1)...(19): siRNA sense strand
uaguggaucuggacagcaa

SEQ ID NO: 2336933 - RNA, 19 nt, Homo sapiens
  misc_RNA (1)...(19): siRNA sense strand
uccucaaucuggagaaauu

SEQ ID NO: 2336934 - RNA, 19 nt, Homo sapiens
  misc_RNA (1)...(19): siRNA sense strand
gcgcaugagccuucgggau

SEQ ID NO: 2336935 - RNA, 19 nt, Homo sapiens
  misc_RNA (1)...(19): siRNA sense strand
ggagauggaugauaaggca

SEQ ID NO: 2336936 - RNA, 19 nt, Homo sapiens
  misc_RNA (1)...(19): siRNA sense strand
aguccaacagaaaguguaa

SEQ ID NO: 2336937 - RNA, 19 nt, Homo sapiens
  misc_RNA (1)...(19): siRNA sense strand
augcagggacagauacaaa

SEQ ID NO: 2336938 - RNA, 19 nt, Homo sapiens
  misc_RNA (1)...(19): siRNA sense strand
cuggacagcaauaggguga

SEQ ID NO: 2336939 - RNA, 19 nt, Homo sapiens
  misc_RNA (1)...(19): siRNA sense strand
ggaugauaaggcagcagua

SEQ ID NO: 2336940 - RNA, 19 nt, Homo sapiens
  misc_RNA (1)...(19): siRNA sense strand
acacagcccaacagugaaa

SEQ ID NO: 2336941 - RNA, 19 nt, Homo sapiens
  misc_RNA (1)...(19): siRNA sense strand
aagccaagcauaaaggaga

SEQ ID NO: 2336942 - RNA, 19 nt, Homo sapiens
  misc_RNA (1)...(19): siRNA sense strand
gagagagaagggaugggua

SEQ ID NO: 2336943 - RNA, 19 nt, Homo sapiens
  misc_RNA (1)...(19): siRNA sense strand
auguauggcuaguggaucu

SEQ ID NO: 2336944 - RNA, 19 nt, Homo sapiens
  misc_RNA (1)...(19): siRNA sense strand
gagaaguccaacagaaagu

SEQ ID NO: 2336945 - RNA, 19 nt, Homo sapiens
  misc_RNA (1)...(19): siRNA sense strand
caaaggugcccgagagaag

SEQ ID NO: 2336946 - RNA, 19 nt, Homo sapiens
  misc_RNA (1)...(19): siRNA sense strand
acccaaaggcuauggcaca

SEQ ID NO: 2336947 - RNA, 19 nt, Homo sapiens
  misc_RNA (1)...(19): siRNA sense strand
acagauacaaacggagaua

SEQ ID NO: 2336948 - RNA, 19 nt, Homo sapiens
  misc_RNA (1)...(19): siRNA sense strand
ggaggaucacacugaguuu

SEQ ID NO: 2336949 - RNA, 19 nt, Homo sapiens
  misc_RNA (1)...(19): siRNA sense strand
cagacaagcggaagagaag

SEQ ID NO: 2336950 - RNA, 19 nt, Homo sapiens
  misc_RNA (1)...(19): siRNA sense strand
cugcagaaucagaaggaag

SEQ ID NO: 2336951 - RNA, 19 nt, Homo sapiens
  misc_RNA (1)...(19): siRNA sense strand
gaaucagaaggaagcagaa

SEQ ID NO: 2336952 - RNA, 19 nt, Homo sapiens
  misc_RNA (1)...(19): siRNA sense strand
gggcagaagcgaguagaca

SEQ ID NO: 2336953 - RNA, 19 nt, Homo sapiens
  misc_RNA (1)...(19): siRNA sense strand
gagacuggcaagugacuca

SEQ ID NO: 2336954 - RNA, 19 nt, Homo sapiens
  misc_RNA (1)...(19): siRNA sense strand
gcggaagagaaguccaaca

SEQ ID NO: 2336955 - RNA, 19 nt, Homo sapiens
  misc_RNA (1)...(19): siRNA sense strand
uuggugagacagaggagaa

SEQ ID NO: 2336956 - RNA, 19 nt, Homo sapiens
  misc_RNA (1)...(19): siRNA sense strand
ugugguacaugcagggaca

SEQ ID NO: 2336957 - RNA, 19 nt, Homo sapiens
  misc_RNA (1)...(19): siRNA sense strand
caccaauggcccacgaaau

SEQ ID NO: 2336958 - RNA, 19 nt, Homo sapiens
  misc_RNA (1)...(19): siRNA sense strand
ugauaguggcagugauagu

SEQ ID NO: 2336959 - RNA, 19 nt, Homo sapiens
  misc_RNA (1)...(19): siRNA sense strand
gaaggaagcagaagagccu

SEQ ID NO: 2336960 - RNA, 19 nt, Homo sapiens
  misc_RNA (1)...(19): siRNA sense strand
uggaagggaucaaccucaa

SEQ ID NO: 2336961 - RNA, 19 nt, Homo sapiens
  misc_RNA (1)...(19): siRNA sense strand
gccugaugauguauggcua

SEQ ID NO: 2336962 - RNA, 19 nt, Homo sapiens
  misc_RNA (1)...(19): siRNA sense strand
cccaaaggcuauggcacaa

SEQ ID NO: 2336963 - RNA, 19 nt, Homo sapiens
  misc_RNA (1)...(19): siRNA sense strand
caaugcaggugauggacca

SEQ ID NO: 2336964 - RNA, 19 nt, Homo sapiens
  misc_RNA (1)...(19): siRNA sense strand
guuaugauccgcagcucaa

SEQ ID NO: 2336965 - RNA, 19 nt, Homo sapiens
  misc_RNA (1)...(19): siRNA sense strand
ggaaagaacaagcggaaaa

SEQ ID NO: 2336966 - RNA, 19 nt, Homo sapiens
  misc_RNA (1)...(19): siRNA sense strand
ccgaaaugaagaugaacua

SEQ ID NO: 2336967 - RNA, 19 nt, Homo sapiens
  misc_RNA (1)...(19): siRNA sense strand
cuugaaagcaguagagaca

SEQ ID NO: 2336968 - RNA, 19 nt, Homo sapiens
  misc_RNA (1)...(19): siRNA sense strand
agugaaaccuaaaguggaa

SEQ ID NO: 2336969 - RNA, 19 nt, Homo sapiens
  misc_RNA (1)...(19): siRNA sense strand
cuaaacugcccgagaacaa

SEQ ID NO: 2336970 - RNA, 19 nt, Homo sapiens
  misc_RNA (1)...(19): siRNA sense strand
guggaaagaacaagcggaa

SEQ ID NO: 2336971 - RNA, 19 nt, Homo sapiens
  misc_RNA (1)...(19): siRNA sense strand
ccgaaauugaugauacaaa

SEQ ID NO: 2336972 - RNA, 19 nt, Homo sapiens
  misc_RNA (1)...(19): siRNA sense strand
agaacaacgugaaagggaa

SEQ ID NO: 2336973 - RNA, 19 nt, Homo sapiens
  misc_RNA (1)...(19): siRNA sense strand
cagaaguaugccagcgaaa

SEQ ID NO: 2336974 - RNA, 19 nt, Homo sapiens
  misc_RNA (1)...(19): siRNA sense strand
ccucaagcugcgaaaguaa

SEQ ID NO: 2336975 - RNA, 19 nt, Homo sapiens
  misc_RNA (1)...(19): siRNA sense strand
agagaaggaagaagaagaa

SEQ ID NO: 2336976 - RNA, 19 nt, Homo sapiens
  misc_RNA (1)...(19): siRNA sense strand
gcguguggcagaagugaaa

SEQ ID NO: 2336977 - RNA, 19 nt, Homo sapiens
  misc_RNA (1)...(19): siRNA sense strand
agaacaaacuggaaggaac

SEQ ID NO: 2336978 - RNA, 19 nt, Homo sapiens
  misc_RNA (1)...(19): siRNA sense strand
ggugauugauggucggaga

SEQ ID NO: 2336979 - RNA, 19 nt, Homo sapiens
  misc_RNA (1)...(19): siRNA sense strand
ggucaaagagggaaugcau

SEQ ID NO: 2336980 - RNA, 19 nt, Homo sapiens
  misc_RNA (1)...(19): siRNA sense strand
agaaggaagaagaagaaga

SEQ ID NO: 2336981 - RNA, 19 nt, Homo sapiens
  misc_RNA (1)...(19): siRNA sense strand
ugacagcagcagagagaga

SEQ ID NO: 2336982 - RNA, 19 nt, Homo sapiens
  misc_RNA (1)...(19): siRNA sense strand
cuuuagagaaggaagaaga

SEQ ID NO: 2336983 - RNA, 19 nt, Homo sapiens
  misc_RNA (1)...(19): siRNA sense strand
cuaucgagguugaaauuau

SEQ ID NO: 2336984 - RNA, 19 nt, Homo sapiens
  misc_RNA (1)...(19): siRNA sense strand
gagagguggacgagguauu

SEQ ID NO: 2336985 - RNA, 19 nt, Homo sapiens
  misc_RNA (1)...(19): siRNA sense strand
uagagaaggaagaagaaga

SEQ ID NO: 2336986 - RNA, 19 nt, Homo sapiens
  misc_RNA (1)...(19): siRNA sense strand
uaucaaagacagcaggauu

SEQ ID NO: 2336987 - RNA, 19 nt, Homo sapiens
  misc_RNA (1)...(19): siRNA sense strand
agaaagaagcagaugccau

SEQ ID NO: 2336988 - RNA, 19 nt, Homo sapiens
  misc_RNA (1)...(19): siRNA sense strand
aagaaagagagguggacga

SEQ ID NO: 2336989 - RNA, 19 nt, Homo sapiens
  misc_RNA (1)...(19): siRNA sense strand
cguaaaaugagaaaagcua

SEQ ID NO: 2336990 - RNA, 19 nt, Homo sapiens
  misc_RNA (1)...(19): siRNA sense strand
aggaauucaaccuguaaua

SEQ ID NO: 2336991 - RNA, 19 nt, Homo sapiens
  misc_RNA (1)...(19): siRNA sense strand
cgaaaguaaacaugacuga

SEQ ID NO: 2336992 - RNA, 19 nt, Homo sapiens
  misc_RNA (1)...(19): siRNA sense strand
ccaaacaagaaaacgaaaa

SEQ ID NO: 2336993 - RNA, 19 nt, Homo sapiens
  misc_RNA (1)...(19): siRNA sense strand
aagagaaggaagagaugau

SEQ ID NO: 2336994 - RNA, 19 nt, Homo sapiens
  misc_RNA (1)...(19): siRNA sense strand
ugaagaauugcgagauauu

SEQ ID NO: 2336995 - RNA, 19 nt, Homo sapiens
  misc_RNA (1)...(19): siRNA sense strand
aaacaaaauugcugacaca

SEQ ID NO: 2336996 - RNA, 19 nt, Homo sapiens
  misc_RNA (1)...(19): siRNA sense strand
gaaaagaaagaacgagaau

SEQ ID NO: 2336997 - RNA, 19 nt, Homo sapiens
  misc_RNA (1)...(19): siRNA sense strand
uuaagaaugucguacgaau

SEQ ID NO: 2336998 - RNA, 19 nt, Homo sapiens
  misc_RNA (1)...(19): siRNA sense strand
ggaaaagaaagaacgagaa

SEQ ID NO: 2336999 - RNA, 19 nt, Homo sapiens
  misc_RNA (1)...(19): siRNA sense strand
ugagcuggacaaagaaaua

SEQ ID NO: 2337000 - RNA, 19 nt, Homo sapiens
  misc_RNA (1)...(19): siRNA sense strand
gcuaaagagaauagugaag

SEQ ID NO: 2337001 - RNA, 19 nt, Homo sapiens
  misc_RNA (1)...(19): siRNA sense strand
caauggacgaacaggaaga

SEQ ID NO: 2337002 - RNA, 19 nt, Homo sapiens
  misc_RNA (1)...(19): siRNA sense strand
gaagaaaacaagggagcua

SEQ ID NO: 2337003 - RNA, 19 nt, Homo sapiens
  misc_RNA (1)...(19): siRNA sense strand
ucguacgaauguugguuaa

SEQ ID NO: 2337004 - RNA, 19 nt, Homo sapiens
  misc_RNA (1)...(19): siRNA sense strand
aggaagaagaagaagaaag

SEQ ID NO: 2337005 - RNA, 19 nt, Homo sapiens
  misc_RNA (1)...(19): siRNA sense strand
uaaaugaagaauugcgaga

SEQ ID NO: 2337006 - RNA, 19 nt, Homo sapiens
  misc_RNA (1)...(19): siRNA sense strand
cagaugaguucuuuggcau

SEQ ID NO: 2337007 - RNA, 19 nt, Homo sapiens
  misc_RNA (1)...(19): siRNA sense strand
ugucagaagccaaacaaga

SEQ ID NO: 2337008 - RNA, 19 nt, Homo sapiens
  misc_RNA (1)...(19): siRNA sense strand
aagacagcacugaggacaa

SEQ ID NO: 2337009 - RNA, 19 nt, Homo sapiens
  misc_RNA (1)...(19): siRNA sense strand
aauaaaggucaaagaggga

SEQ ID NO: 2337010 - RNA, 19 nt, Homo sapiens
  misc_RNA (1)...(19): siRNA sense strand
aagaagaagaagaaagaag

SEQ ID NO: 2337011 - RNA, 19 nt, Homo sapiens
  misc_RNA (1)...(19): siRNA sense strand
ugaaaugcuccgaaaugaa

SEQ ID NO: 2337012 - RNA, 19 nt, Homo sapiens
  misc_RNA (1)...(19): siRNA sense strand
gaaguuaagcaguggaaag

SEQ ID NO: 2337013 - RNA, 19 nt, Homo sapiens
  misc_RNA (1)...(19): siRNA sense strand
ggcuacuacuagauagaau

SEQ ID NO: 2337014 - RNA, 19 nt, Homo sapiens
  misc_RNA (1)...(19): siRNA sense strand
agacucaagagaaggaaga

SEQ ID NO: 2337015 - RNA, 19 nt, Homo sapiens
  misc_RNA (1)...(19): siRNA sense strand
caguauggaccgaaauuga

SEQ ID NO: 2337016 - RNA, 19 nt, Homo sapiens
  misc_RNA (1)...(19): siRNA sense strand
gcucaggagaaguguuuga

SEQ ID NO: 2337017 - RNA, 19 nt, Homo sapiens
  misc_RNA (1)...(19): siRNA sense strand
agagagagaccaaucacaa

SEQ ID NO: 2337018 - RNA, 19 nt, Homo sapiens
  misc_RNA (1)...(19): siRNA sense strand
uucuagaacaugaggguua

SEQ ID NO: 2337019 - RNA, 19 nt, Homo sapiens
  misc_RNA (1)...(19): siRNA sense strand
aggaagagcaagaagaagu

SEQ ID NO: 2337020 - RNA, 19 nt, Homo sapiens
  misc_RNA (1)...(19): siRNA sense strand
ugauauuuauggaggagau

SEQ ID NO: 2337021 - RNA, 19 nt, Homo sapiens
  misc_RNA (1)...(19): siRNA sense strand
auccaaaugggaagagaua

SEQ ID NO: 2337022 - RNA, 19 nt, Homo sapiens
  misc_RNA (1)...(19): siRNA sense strand
ggucaaaaggucaacuaaa

SEQ ID NO: 2337023 - RNA, 19 nt, Homo sapiens
  misc_RNA (1)...(19): siRNA sense strand
ugauaucacagcagaggaa

SEQ ID NO: 2337024 - RNA, 19 nt, Homo sapiens
  misc_RNA (1)...(19): siRNA sense strand
ccuugaacugaaagauuua

SEQ ID NO: 2337025 - RNA, 19 nt, Homo sapiens
  misc_RNA (1)...(19): siRNA sense strand
uauaaggagaagcgagaau

SEQ ID NO: 2337026 - RNA, 19 nt, Homo sapiens
  misc_RNA (1)...(19): siRNA sense strand
gugugcuguuaaugagaaa

SEQ ID NO: 2337027 - RNA, 19 nt, Homo sapiens
  misc_RNA (1)...(19): siRNA sense strand
cugacaagcugguccguga

SEQ ID NO: 2337028 - RNA, 19 nt, Homo sapiens
  misc_RNA (1)...(19): siRNA sense strand
uuuauaaggagaagcgaga

SEQ ID NO: 2337029 - RNA, 19 nt, Homo sapiens
  misc_RNA (1)...(19): siRNA sense strand
agcgagaaucuguuaguaa

SEQ ID NO: 2337030 - RNA, 19 nt, Homo sapiens
  misc_RNA (1)...(19): siRNA sense strand
guaaagaagaucuggcaag

SEQ ID NO: 2337031 - RNA, 19 nt, Homo sapiens
  misc_RNA (1)...(19): siRNA sense strand
agaucaaagaugccaagaa

SEQ ID NO: 2337032 - RNA, 19 nt, Homo sapiens
  misc_RNA (1)...(19): siRNA sense strand
uuguaaagggcuugcugua

SEQ ID NO: 2337033 - RNA, 19 nt, Homo sapiens
  misc_RNA (1)...(19): siRNA sense strand
auauagacucugucaguuu

SEQ ID NO: 2337034 - RNA, 19 nt, Homo sapiens
  misc_RNA (1)...(19): siRNA sense strand
auggacaagccgagugcua

SEQ ID NO: 2337035 - RNA, 19 nt, Homo sapiens
  misc_RNA (1)...(19): siRNA sense strand
gcauauggauccaccggca

SEQ ID NO: 2337036 - RNA, 19 nt, Homo sapiens
  misc_RNA (1)...(19): siRNA sense strand
ggugcuuacaaguuugaaa

SEQ ID NO: 2337037 - RNA, 19 nt, Homo sapiens
  misc_RNA (1)...(19): siRNA sense strand
gaacauuggcucaggaguc

SEQ ID NO: 2337038 - RNA, 19 nt, Homo sapiens
  misc_RNA (1)...(19): siRNA sense strand
ccgugauauuuauggagga

SEQ ID NO: 2337039 - RNA, 19 nt, Homo sapiens
  misc_RNA (1)...(19): siRNA sense strand
uaacauugguucuguggca

SEQ ID NO: 2337040 - RNA, 19 nt, Homo sapiens
  misc_RNA (1)...(19): siRNA sense strand
caacuauaaacgagugacu

SEQ ID NO: 2337041 - RNA, 19 nt, Homo sapiens
  misc_RNA (1)...(19): siRNA sense strand
ugaaagauuugguuugcca

SEQ ID NO: 2337042 - RNA, 19 nt, Homo sapiens
  misc_RNA (1)...(19): siRNA sense strand
aguaaagaagaucuggcaa

SEQ ID NO: 2337043 - RNA, 19 nt, Homo sapiens
  misc_RNA (1)...(19): siRNA sense strand
cugcaugaccagugccaaa

SEQ ID NO: 2337044 - RNA, 19 nt, Homo sapiens
  misc_RNA (1)...(19): siRNA sense strand
gcaaauacaugcugccuca

SEQ ID NO: 2337045 - RNA, 19 nt, Homo sapiens
  misc_RNA (1)...(19): siRNA sense strand
ucaagaagaagcugggcaa

SEQ ID NO: 2337046 - RNA, 19 nt, Homo sapiens
  misc_RNA (1)...(19): siRNA sense strand
ggacagugggcacaggcaa

SEQ ID NO: 2337047 - RNA, 19 nt, Homo sapiens
  misc_RNA (1)...(19): siRNA sense strand
caucagagcuccuugacca

SEQ ID NO: 2337048 - RNA, 19 nt, Homo sapiens
  misc_RNA (1)...(19): siRNA sense strand
gcaucaggacggaggagga

SEQ ID NO: 2337049 - RNA, 19 nt, Homo sapiens
  misc_RNA (1)...(19): siRNA sense strand
ucgucaaccugcugcgcaa

SEQ ID NO: 2337050 - RNA, 19 nt, Homo sapiens
  misc_RNA (1)...(19): siRNA sense strand
aggccauggugcuggagau

SEQ ID NO: 2337051 - RNA, 19 nt, Homo sapiens
  misc_RNA (1)...(19): siRNA sense strand
ggagauguuucgagaggag

SEQ ID NO: 2337052 - RNA, 19 nt, Homo sapiens
  misc_RNA (1)...(19): siRNA sense strand
ucuacauugugcuggguuu

SEQ ID NO: 2337053 - RNA, 19 nt, Homo sapiens
  misc_RNA (1)...(19): siRNA sense strand
gcaagaugguucuggacug

SEQ ID NO: 2337054 - RNA, 19 nt, Homo sapiens
  misc_RNA (1)...(19): siRNA sense strand
acgaugauguucuggacca

SEQ ID NO: 2337055 - RNA, 19 nt, Homo sapiens
  misc_RNA (1)...(19): siRNA sense strand
cugcaugaccagugccaaa

SEQ ID NO: 2337056 - RNA, 19 nt, Homo sapiens
  misc_RNA (1)...(19): siRNA sense strand
gcaaauacaugcugccuca

SEQ ID NO: 2337057 - RNA, 19 nt, Homo sapiens
  misc_RNA (1)...(19): siRNA sense strand
ucaagaagaagcugggcaa

SEQ ID NO: 2337058 - RNA, 19 nt, Homo sapiens
  misc_RNA (1)...(19): siRNA sense strand
ggacagugggcacaggcaa

SEQ ID NO: 2337059 - RNA, 19 nt, Homo sapiens
  misc_RNA (1)...(19): siRNA sense strand
caucagagcuccuugacca

SEQ ID NO: 2337060 - RNA, 19 nt, Homo sapiens
  misc_RNA (1)...(19): siRNA sense strand
gcaucaggacggaggagga

SEQ ID NO: 2337061 - RNA, 19 nt, Homo sapiens
  misc_RNA (1)...(19): siRNA sense strand
ucgucaaccugcugcgcaa

SEQ ID NO: 2337062 - RNA, 19 nt, Homo sapiens
  misc_RNA (1)...(19): siRNA sense strand
aggccauggugcuggagau

SEQ ID NO: 2337063 - RNA, 19 nt, Homo sapiens
  misc_RNA (1)...(19): siRNA sense strand
ggagauguuucgagaggag

SEQ ID NO: 2337064 - RNA, 19 nt, Homo sapiens
  misc_RNA (1)...(19): siRNA sense strand
ucuacauugugcuggguuu

SEQ ID NO: 2337065 - RNA, 19 nt, Homo sapiens
  misc_RNA (1)...(19): siRNA sense strand
gcaagaugguucuggacug

SEQ ID NO: 2337066 - RNA, 19 nt, Homo sapiens
  misc_RNA (1)...(19): siRNA sense strand
acgaugauguucuggacca

SEQ ID NO: 2337067 - RNA, 19 nt, Homo sapiens
  misc_RNA (1)...(19): siRNA sense strand
agacaaaguuggagccagu

SEQ ID NO: 2337068 - RNA, 19 nt, Homo sapiens
  misc_RNA (1)...(19): siRNA sense strand
aggucaacuucuugguaua

SEQ ID NO: 2337069 - RNA, 19 nt, Homo sapiens
  misc_RNA (1)...(19): siRNA sense strand
aguacaaacaagacaacaa

SEQ ID NO: 2337070 - RNA, 19 nt, Homo sapiens
  misc_RNA (1)...(19): siRNA sense strand
uguauuagaccuucggaaa

SEQ ID NO: 2337071 - RNA, 19 nt, Homo sapiens
  misc_RNA (1)...(19): siRNA sense strand
gaguaugaaacaagacaau

SEQ ID NO: 2337072 - RNA, 19 nt, Homo sapiens
  misc_RNA (1)...(19): siRNA sense strand
guucacagcuauaggggaa

SEQ ID NO: 2337073 - RNA, 19 nt, Homo sapiens
  misc_RNA (1)...(19): siRNA sense strand
ccaacaaggaucugcaaaa

SEQ ID NO: 2337074 - RNA, 19 nt, Homo sapiens
  misc_RNA (1)...(19): siRNA sense strand
cagcaaauggggaggagaa

SEQ ID NO: 2337075 - RNA, 19 nt, Homo sapiens
  misc_RNA (1)...(19): siRNA sense strand
uauacgagaaggagggcaa

SEQ ID NO: 2337076 - RNA, 19 nt, Homo sapiens
  misc_RNA (1)...(19): siRNA sense strand
gcaccuuagggcagcauaa

SEQ ID NO: 2337077 - RNA, 19 nt, Homo sapiens
  misc_RNA (1)...(19): siRNA sense strand
guauuagaccuucggaaau

SEQ ID NO: 2337078 - RNA, 19 nt, Homo sapiens
  misc_RNA (1)...(19): siRNA sense strand
agauauggaguaugaaaca

SEQ ID NO: 2337079 - RNA, 19 nt, Homo sapiens
  misc_RNA (1)...(19): siRNA sense strand
ggaguaugaaacaagacaa

SEQ ID NO: 2337080 - RNA, 19 nt, Homo sapiens
  misc_RNA (1)...(19): siRNA sense strand
uuggaauagugaagguaca

SEQ ID NO: 2337081 - RNA, 19 nt, Homo sapiens
  misc_RNA (1)...(19): siRNA sense strand
gcauccauaccuugacaaa

SEQ ID NO: 2337082 - RNA, 19 nt, Homo sapiens
  misc_RNA (1)...(19): siRNA sense strand
gcucuaguucacagcuaua

SEQ ID NO: 2337083 - RNA, 19 nt, Homo sapiens
  misc_RNA (1)...(19): siRNA sense strand
gagauaagcuugcacagca

SEQ ID NO: 2337084 - RNA, 19 nt, Homo sapiens
  misc_RNA (1)...(19): siRNA sense strand
agcacauacuauagcaaau

SEQ ID NO: 2337085 - RNA, 19 nt, Homo sapiens
  misc_RNA (1)...(19): siRNA sense strand
aggacauacgaaugaagua

SEQ ID NO: 2337086 - RNA, 19 nt, Homo sapiens
  misc_RNA (1)...(19): siRNA sense strand
gaguauaagcagugaugag

SEQ ID NO: 2337087 - RNA, 19 nt, Homo sapiens
  misc_RNA (1)...(19): siRNA sense strand
cuaauaauccaaaugccaa

SEQ ID NO: 2337088 - RNA, 19 nt, Homo sapiens
  misc_RNA (1)...(19): siRNA sense strand
caauauaaauggugcccuc

SEQ ID NO: 2337089 - RNA, 19 nt, Homo sapiens
  misc_RNA (1)...(19): siRNA sense strand
auuugaaguuugcuggaau

SEQ ID NO: 2337090 - RNA, 19 nt, Homo sapiens
  misc_RNA (1)...(19): siRNA sense strand
aguuggagccagugcauca

SEQ ID NO: 2337091 - RNA, 19 nt, Homo sapiens
  misc_RNA (1)...(19): siRNA sense strand
cuaauaaagcuguuguguu

SEQ ID NO: 2337092 - RNA, 19 nt, Homo sapiens
  misc_RNA (1)...(19): siRNA sense strand
ccguaaugccugauguagu

SEQ ID NO: 2337093 - RNA, 19 nt, Homo sapiens
  misc_RNA (1)...(19): siRNA sense strand
auauggaaucuuagugaga

SEQ ID NO: 2337094 - RNA, 19 nt, Homo sapiens
  misc_RNA (1)...(19): siRNA sense strand
ccuaagugcuggaguagac

SEQ ID NO: 2337095 - RNA, 19 nt, Homo sapiens
  misc_RNA (1)...(19): siRNA sense strand
aggacaagacagaccuauu

SEQ ID NO: 2337096 - RNA, 19 nt, Homo sapiens
  misc_RNA (1)...(19): siRNA sense strand
agaaggagggcaagauguu

SEQ ID NO: 2337097 - RNA, 19 nt, Homo sapiens
  misc_RNA (1)...(19): siRNA sense strand
gggccaugaaucugaaguu

SEQ ID NO: 2337098 - RNA, 19 nt, Homo sapiens
  misc_RNA (1)...(19): siRNA sense strand
ucuggagacucaacagcaa

SEQ ID NO: 2337099 - RNA, 19 nt, Homo sapiens
  misc_RNA (1)...(19): siRNA sense strand
caguuaguacuuagacauu

SEQ ID NO: 2337100 - RNA, 19 nt, Homo sapiens
  misc_RNA (1)...(19): siRNA sense strand
cagaauauggacuaaagau

SEQ ID NO: 2337101 - RNA, 19 nt, Homo sapiens
  misc_RNA (1)...(19): siRNA sense strand
gauucuacuguuagguuau

SEQ ID NO: 2337102 - RNA, 19 nt, Homo sapiens
  misc_RNA (1)...(19): siRNA sense strand
uaggggaacagguggaaua

SEQ ID NO: 2337103 - RNA, 19 nt, Homo sapiens
  misc_RNA (1)...(19): siRNA sense strand
guuaugggauguagaccga

SEQ ID NO: 2337104 - RNA, 19 nt, Homo sapiens
  misc_RNA (1)...(19): siRNA sense strand
uggagaaaacacagcaaau

SEQ ID NO: 2337105 - RNA, 19 nt, Homo sapiens
  misc_RNA (1)...(19): siRNA sense strand
cuugcaagagucaggauuu

SEQ ID NO: 2337106 - RNA, 19 nt, Homo sapiens
  misc_RNA (1)...(19): siRNA sense strand
ccuggaacccuguuaguga

SEQ ID NO: 2337107 - RNA, 19 nt, Homo sapiens
  misc_RNA (1)...(19): siRNA sense strand
cuggugaagccaagcaaca

SEQ ID NO: 2337108 - RNA, 19 nt, Homo sapiens
  misc_RNA (1)...(19): siRNA sense strand
acgaaugaaguaaaugcua

SEQ ID NO: 2337109 - RNA, 19 nt, Homo sapiens
  misc_RNA (1)...(19): siRNA sense strand
acuaauaauccaaaugcca

SEQ ID NO: 2337110 - RNA, 19 nt, Homo sapiens
  misc_RNA (1)...(19): siRNA sense strand
agguggaauauuugaaguu

SEQ ID NO: 2337111 - RNA, 19 nt, Homo sapiens
  misc_RNA (1)...(19): siRNA sense strand
ggaaaagacuaaaggaaca

SEQ ID NO: 2337112 - RNA, 19 nt, Homo sapiens
  misc_RNA (1)...(19): siRNA sense strand
aggaaaaguuaaaggagaa

SEQ ID NO: 2337113 - RNA, 19 nt, Homo sapiens
  misc_RNA (1)...(19): siRNA sense strand
agaagauggaggaggcaaa

SEQ ID NO: 2337114 - RNA, 19 nt, Homo sapiens
  misc_RNA (1)...(19): siRNA sense strand
gacuaaaggaacaggaaga

SEQ ID NO: 2337115 - RNA, 19 nt, Homo sapiens
  misc_RNA (1)...(19): siRNA sense strand
gaugcuuggcagugggaaa

SEQ ID NO: 2337116 - RNA, 19 nt, Homo sapiens
  misc_RNA (1)...(19): siRNA sense strand
gaacaaaaucaaacagaga

SEQ ID NO: 2337117 - RNA, 19 nt, Homo sapiens
  misc_RNA (1)...(19): siRNA sense strand
agaaccaguuacagaaauu

SEQ ID NO: 2337118 - RNA, 19 nt, Homo sapiens
  misc_RNA (1)...(19): siRNA sense strand
gaaaacaguagaagaacaa

SEQ ID NO: 2337119 - RNA, 19 nt, Homo sapiens
  misc_RNA (1)...(19): siRNA sense strand
gaugaagaaacuggagaaa

SEQ ID NO: 2337120 - RNA, 19 nt, Homo sapiens
  misc_RNA (1)...(19): siRNA sense strand
ugaugaagaaacuggagaa

SEQ ID NO: 2337121 - RNA, 19 nt, Homo sapiens
  misc_RNA (1)...(19): siRNA sense strand
cuguaaguuuggaggcaca

SEQ ID NO: 2337122 - RNA, 19 nt, Homo sapiens
  misc_RNA (1)...(19): siRNA sense strand
cuugauggcaggaaugaaa

SEQ ID NO: 2337123 - RNA, 19 nt, Homo sapiens
  misc_RNA (1)...(19): siRNA sense strand
gaugauaaugacaggccua

SEQ ID NO: 2337124 - RNA, 19 nt, Homo sapiens
  misc_RNA (1)...(19): siRNA sense strand
gggaaagagccgguuguaa

SEQ ID NO: 2337125 - RNA, 19 nt, Homo sapiens
  misc_RNA (1)...(19): siRNA sense strand
guagaagauacacaggaaa

SEQ ID NO: 2337126 - RNA, 19 nt, Homo sapiens
  misc_RNA (1)...(19): siRNA sense strand
aguccuaaacgcauggaua

SEQ ID NO: 2337127 - RNA, 19 nt, Homo sapiens
  misc_RNA (1)...(19): siRNA sense strand
gcugugaggagaaggaaaa

SEQ ID NO: 2337128 - RNA, 19 nt, Homo sapiens
  misc_RNA (1)...(19): siRNA sense strand
ugaugaaagugaaaagcaa

SEQ ID NO: 2337129 - RNA, 19 nt, Homo sapiens
  misc_RNA (1)...(19): siRNA sense strand
aaguagaagucaugacguu

SEQ ID NO: 2337130 - RNA, 19 nt, Homo sapiens
  misc_RNA (1)...(19): siRNA sense strand
uagaagauacacaggaaaa

SEQ ID NO: 2337131 - RNA, 19 nt, Homo sapiens
  misc_RNA (1)...(19): siRNA sense strand
guguguagcuuugggaaau

SEQ ID NO: 2337132 - RNA, 19 nt, Homo sapiens
  misc_RNA (1)...(19): siRNA sense strand
acaaauaucagcacgaaaa

SEQ ID NO: 2337133 - RNA, 19 nt, Homo sapiens
  misc_RNA (1)...(19): siRNA sense strand
ucgcaaagccagcauacaa

SEQ ID NO: 2337134 - RNA, 19 nt, Homo sapiens
  misc_RNA (1)...(19): siRNA sense strand
uggaaggugacgugaaaga

SEQ ID NO: 2337135 - RNA, 19 nt, Homo sapiens
  misc_RNA (1)...(19): siRNA sense strand
cuaaaggaacaggaagaaa

SEQ ID NO: 2337136 - RNA, 19 nt, Homo sapiens
  misc_RNA (1)...(19): siRNA sense strand
caggaaagugagauucuaa

SEQ ID NO: 2337137 - RNA, 19 nt, Homo sapiens
  misc_RNA (1)...(19): siRNA sense strand
uaucauaacugcuugcgaa

SEQ ID NO: 2337138 - RNA, 19 nt, Homo sapiens
  misc_RNA (1)...(19): siRNA sense strand
gagagugagucguugcgaa

SEQ ID NO: 2337139 - RNA, 19 nt, Homo sapiens
  misc_RNA (1)...(19): siRNA sense strand
ugaagaaacuggagaaaag

SEQ ID NO: 2337140 - RNA, 19 nt, Homo sapiens
  misc_RNA (1)...(19): siRNA sense strand
ugacccuaguggugagcaa

SEQ ID NO: 2337141 - RNA, 19 nt, Homo sapiens
  misc_RNA (1)...(19): siRNA sense strand
aaggaaaaguuaaaggaga

SEQ ID NO: 2337142 - RNA, 19 nt, Homo sapiens
  misc_RNA (1)...(19): siRNA sense strand
gguuccaguauuacagaua

SEQ ID NO: 2337143 - RNA, 19 nt, Homo sapiens
  misc_RNA (1)...(19): siRNA sense strand
uguguguagcuuugggaaa

SEQ ID NO: 2337144 - RNA, 19 nt, Homo sapiens
  misc_RNA (1)...(19): siRNA sense strand
agaaaacaguagaagaaca

SEQ ID NO: 2337145 - RNA, 19 nt, Homo sapiens
  misc_RNA (1)...(19): siRNA sense strand
guuuggaggcacaaggcaa

SEQ ID NO: 2337146 - RNA, 19 nt, Homo sapiens
  misc_RNA (1)...(19): siRNA sense strand
acaauaacuuaccagcaaa

SEQ ID NO: 2337147 - RNA, 19 nt, Homo sapiens
  misc_RNA (1)...(19): siRNA sense strand
uggcacaugcacaggacaa

SEQ ID NO: 2337148 - RNA, 19 nt, Homo sapiens
  misc_RNA (1)...(19): siRNA sense strand
aggaagaaaucaguagcaa

SEQ ID NO: 2337149 - RNA, 19 nt, Homo sapiens
  misc_RNA (1)...(19): siRNA sense strand
cagcaaaugaaaaccaaaa

SEQ ID NO: 2337150 - RNA, 19 nt, Homo sapiens
  misc_RNA (1)...(19): siRNA sense strand
agucaugacguuugcagaa

SEQ ID NO: 2337151 - RNA, 19 nt, Homo sapiens
  misc_RNA (1)...(19): siRNA sense strand
gagucaucccugugccaaa

SEQ ID NO: 2337152 - RNA, 19 nt, Homo sapiens
  misc_RNA (1)...(19): siRNA sense strand
aggagaaggaaaaguuaaa

SEQ ID NO: 2337153 - RNA, 19 nt, Homo sapiens
  misc_RNA (1)...(19): siRNA sense strand
ugaaaagggaauacagcaa

SEQ ID NO: 2337154 - RNA, 19 nt, Homo sapiens
  misc_RNA (1)...(19): siRNA sense strand
gggaauacagcaagacacu

SEQ ID NO: 2337155 - RNA, 19 nt, Homo sapiens
  misc_RNA (1)...(19): siRNA sense strand
uguaaagagccauguauca

SEQ ID NO: 2337156 - RNA, 19 nt, Homo sapiens
  misc_RNA (1)...(19): siRNA sense strand
cagaaauggaggacuuaga

SEQ ID NO: 2337157 - RNA, 19 nt, Homo sapiens
  misc_RNA (1)...(19): siRNA sense strand
gcuuugggaaauuuggaaa

SEQ ID NO: 2337158 - RNA, 19 nt, Homo sapiens
  misc_RNA (1)...(19): siRNA sense strand
gugauuaacccuaagacga

SEQ ID NO: 2337159 - RNA, 19 nt, Homo sapiens
  misc_RNA (1)...(19): siRNA sense strand
ggaaacugaccaaagugaa

SEQ ID NO: 2337160 - RNA, 19 nt, Homo sapiens
  misc_RNA (1)...(19): siRNA sense strand
aaucuugacuucuggaaca

SEQ ID NO: 2337161 - RNA, 19 nt, Homo sapiens
  misc_RNA (1)...(19): siRNA sense strand
gggaaaagacuaaaggaac

SEQ ID NO: 2337162 - RNA, 19 nt, Homo sapiens
  misc_RNA (1)...(19): siRNA sense strand
aaacaguagaagaacaaga

SEQ ID NO: 2337163 - RNA, 19 nt, Homo sapiens
  misc_RNA (1)...(19): siRNA sense strand
cuuaaagagggaagcugua

SEQ ID NO: 2337164 - RNA, 19 nt, Homo sapiens
  misc_RNA (1)...(19): siRNA sense strand
ccugaggagacuauacuaa

SEQ ID NO: 2337165 - RNA, 19 nt, Homo sapiens
  misc_RNA (1)...(19): siRNA sense strand
ugggaaaagacuaaaggaa

SEQ ID NO: 2337166 - RNA, 19 nt, Homo sapiens
  misc_RNA (1)...(19): siRNA sense strand
ggaaaaguuaaaggagaaa

SEQ ID NO: 2337167 - RNA, 19 nt, Homo sapiens
  misc_RNA (1)...(19): siRNA sense strand
uucaagaaccucucagaaa

SEQ ID NO: 2337168 - RNA, 19 nt, Homo sapiens
  misc_RNA (1)...(19): siRNA sense strand
cgguugcgccugaugauaa

SEQ ID NO: 2337169 - RNA, 19 nt, Homo sapiens
  misc_RNA (1)...(19): siRNA sense strand
gauggaggaggcaaagaaa

SEQ ID NO: 2337170 - RNA, 19 nt, Homo sapiens
  misc_RNA (1)...(19): siRNA sense strand
gugucaaagugcugcucaa

SEQ ID NO: 2337171 - RNA, 19 nt, Homo sapiens
  misc_RNA (1)...(19): siRNA sense strand
cggcaaagcuucaugagac

SEQ ID NO: 2337172 - RNA, 19 nt, Homo sapiens
  misc_RNA (1)...(19): siRNA sense strand
ccaacgugaaugcggcaaa

SEQ ID NO: 2337173 - RNA, 19 nt, Homo sapiens
  misc_RNA (1)...(19): siRNA sense strand
gggccaaucuggaagcgca

SEQ ID NO: 2337174 - RNA, 19 nt, Homo sapiens
  misc_RNA (1)...(19): siRNA sense strand
ccgccaagugcuucgagua

SEQ ID NO: 2337175 - RNA, 19 nt, Homo sapiens
  misc_RNA (1)...(19): siRNA sense strand
cugcaacagcugaucgaga

SEQ ID NO: 2337176 - RNA, 19 nt, Homo sapiens
  misc_RNA (1)...(19): siRNA sense strand
cgugaaugcggcaaagcuu

SEQ ID NO: 2337177 - RNA, 19 nt, Homo sapiens
  misc_RNA (1)...(19): siRNA sense strand
ggaaagauguguucggguu

SEQ ID NO: 2337178 - RNA, 19 nt, Homo sapiens
  misc_RNA (1)...(19): siRNA sense strand
ggucaagcugugugaaaau

SEQ ID NO: 2337179 - RNA, 19 nt, Homo sapiens
  misc_RNA (1)...(19): siRNA sense strand
ucugaauacaggagcgaca

SEQ ID NO: 2337180 - RNA, 19 nt, Homo sapiens
  misc_RNA (1)...(19): siRNA sense strand
cagcaagaggaaaggaaag

SEQ ID NO: 2337181 - RNA, 19 nt, Homo sapiens
  misc_RNA (1)...(19): siRNA sense strand
ccgaauguuccuucagaga

SEQ ID NO: 2337182 - RNA, 19 nt, Homo sapiens
  misc_RNA (1)...(19): siRNA sense strand
augguuuccuguugcgaua

SEQ ID NO: 2337183 - RNA, 19 nt, Homo sapiens
  misc_RNA (1)...(19): siRNA sense strand
cuuagaagacggacagacu

SEQ ID NO: 2337184 - RNA, 19 nt, Homo sapiens
  misc_RNA (1)...(19): siRNA sense strand
ugcgauacgccgugaucaa

SEQ ID NO: 2337185 - RNA, 19 nt, Homo sapiens
  misc_RNA (1)...(19): siRNA sense strand
aggaaaggaaagauguguu

SEQ ID NO: 2337186 - RNA, 19 nt, Homo sapiens
  misc_RNA (1)...(19): siRNA sense strand
agacuuaaucggaggcuuc

SEQ ID NO: 2337187 - RNA, 19 nt, Homo sapiens
  misc_RNA (1)...(19): siRNA sense strand
gaaggaacccugagcucca

SEQ ID NO: 2337188 - RNA, 19 nt, Homo sapiens
  misc_RNA (1)...(19): siRNA sense strand
agagaggggcagacacaaa

SEQ ID NO: 2337189 - RNA, 19 nt, Homo sapiens
  misc_RNA (1)...(19): siRNA sense strand
ggaaagauguguucggguu

SEQ ID NO: 2337190 - RNA, 19 nt, Homo sapiens
  misc_RNA (1)...(19): siRNA sense strand
ggucaagcugugugaaaau

SEQ ID NO: 2337191 - RNA, 19 nt, Homo sapiens
  misc_RNA (1)...(19): siRNA sense strand
ucugaauacaggagcgaca

SEQ ID NO: 2337192 - RNA, 19 nt, Homo sapiens
  misc_RNA (1)...(19): siRNA sense strand
cagcaagaggaaaggaaag

SEQ ID NO: 2337193 - RNA, 19 nt, Homo sapiens
  misc_RNA (1)...(19): siRNA sense strand
ccgaauguuccuucagaga

SEQ ID NO: 2337194 - RNA, 19 nt, Homo sapiens
  misc_RNA (1)...(19): siRNA sense strand
augguuuccuguugcgaua

SEQ ID NO: 2337195 - RNA, 19 nt, Homo sapiens
  misc_RNA (1)...(19): siRNA sense strand
cuuagaagacggacagacu

SEQ ID NO: 2337196 - RNA, 19 nt, Homo sapiens
  misc_RNA (1)...(19): siRNA sense strand
ugcgauacgccgugaucaa

SEQ ID NO: 2337197 - RNA, 19 nt, Homo sapiens
  misc_RNA (1)...(19): siRNA sense strand
aggaaaggaaagauguguu

SEQ ID NO: 2337198 - RNA, 19 nt, Homo sapiens
  misc_RNA (1)...(19): siRNA sense strand
agacuuaaucggaggcuuc

SEQ ID NO: 2337199 - RNA, 19 nt, Homo sapiens
  misc_RNA (1)...(19): siRNA sense strand
gaaggaacccugagcucca

SEQ ID NO: 2337200 - RNA, 19 nt, Homo sapiens
  misc_RNA (1)...(19): siRNA sense strand
agagaggggcagacacaaa

SEQ ID NO: 2337201 - RNA, 19 nt, Homo sapiens
  misc_RNA (1)...(19): siRNA sense strand
ugggaggagagaagagaaa

SEQ ID NO: 2337202 - RNA, 19 nt, Homo sapiens
  misc_RNA (1)...(19): siRNA sense strand
aguugaacccaaaggacaa

SEQ ID NO: 2337203 - RNA, 19 nt, Homo sapiens
  misc_RNA (1)...(19): siRNA sense strand
aaagaaacucagaggacuu

SEQ ID NO: 2337204 - RNA, 19 nt, Homo sapiens
  misc_RNA (1)...(19): siRNA sense strand
uguaaaugcugaaugccaa

SEQ ID NO: 2337205 - RNA, 19 nt, Homo sapiens
  misc_RNA (1)...(19): siRNA sense strand
guuaaugggaggagagaag

SEQ ID NO: 2337206 - RNA, 19 nt, Homo sapiens
  misc_RNA (1)...(19): siRNA sense strand
agguaaaacucuugccuau

SEQ ID NO: 2337207 - RNA, 19 nt, Homo sapiens
  misc_RNA (1)...(19): siRNA sense strand
ggaggagagaagagaaaau

SEQ ID NO: 2337208 - RNA, 19 nt, Homo sapiens
  misc_RNA (1)...(19): siRNA sense strand
gguuagcacaagugauaga

SEQ ID NO: 2337209 - RNA, 19 nt, Homo sapiens
  misc_RNA (1)...(19): siRNA sense strand
ccguacagcuggagccguu

SEQ ID NO: 2337210 - RNA, 19 nt, Homo sapiens
  misc_RNA (1)...(19): siRNA sense strand
uugaugaagcagacagaau

SEQ ID NO: 2337211 - RNA, 19 nt, Homo sapiens
  misc_RNA (1)...(19): siRNA sense strand
caguugaacccaaaggaca

SEQ ID NO: 2337212 - RNA, 19 nt, Homo sapiens
  misc_RNA (1)...(19): siRNA sense strand
uugcaauaccagagagucu

SEQ ID NO: 2337213 - RNA, 19 nt, Homo sapiens
  misc_RNA (1)...(19): siRNA sense strand
aagcauucgguuagcacaa

SEQ ID NO: 2337214 - RNA, 19 nt, Homo sapiens
  misc_RNA (1)...(19): siRNA sense strand
gauagaaaccaggaggaga

SEQ ID NO: 2337215 - RNA, 19 nt, Homo sapiens
  misc_RNA (1)...(19): siRNA sense strand
cgugccaacgagagagcua

SEQ ID NO: 2337216 - RNA, 19 nt, Homo sapiens
  misc_RNA (1)...(19): siRNA sense strand
caagcaaaggcuacgaaaa

SEQ ID NO: 2337217 - RNA, 19 nt, Homo sapiens
  misc_RNA (1)...(19): siRNA sense strand
ccacaauaaauacggucuu

SEQ ID NO: 2337218 - RNA, 19 nt, Homo sapiens
  misc_RNA (1)...(19): siRNA sense strand
cuguaaaugcugaaugcca

SEQ ID NO: 2337219 - RNA, 19 nt, Homo sapiens
  misc_RNA (1)...(19): siRNA sense strand
ggacaagagccaugaccag

SEQ ID NO: 2337220 - RNA, 19 nt, Homo sapiens
  misc_RNA (1)...(19): siRNA sense strand
aguuugaggaagaccagaa

SEQ ID NO: 2337221 - RNA, 19 nt, Homo sapiens
  misc_RNA (1)...(19): siRNA sense strand
cggcauggagcaggaggaa

SEQ ID NO: 2337222 - RNA, 19 nt, Homo sapiens
  misc_RNA (1)...(19): siRNA sense strand
ugggaggagagaagagaaa

SEQ ID NO: 2337223 - RNA, 19 nt, Homo sapiens
  misc_RNA (1)...(19): siRNA sense strand
aguugaacccaaaggacaa

SEQ ID NO: 2337224 - RNA, 19 nt, Homo sapiens
  misc_RNA (1)...(19): siRNA sense strand
aaagaaacucagaggacuu

SEQ ID NO: 2337225 - RNA, 19 nt, Homo sapiens
  misc_RNA (1)...(19): siRNA sense strand
uguaaaugcugaaugccaa

SEQ ID NO: 2337226 - RNA, 19 nt, Homo sapiens
  misc_RNA (1)...(19): siRNA sense strand
guuaaugggaggagagaag

SEQ ID NO: 2337227 - RNA, 19 nt, Homo sapiens
  misc_RNA (1)...(19): siRNA sense strand
agguaaaacucuugccuau

SEQ ID NO: 2337228 - RNA, 19 nt, Homo sapiens
  misc_RNA (1)...(19): siRNA sense strand
ggaggagagaagagaaaau

SEQ ID NO: 2337229 - RNA, 19 nt, Homo sapiens
  misc_RNA (1)...(19): siRNA sense strand
gguuagcacaagugauaga

SEQ ID NO: 2337230 - RNA, 19 nt, Homo sapiens
  misc_RNA (1)...(19): siRNA sense strand
ccguacagcuggagccguu

SEQ ID NO: 2337231 - RNA, 19 nt, Homo sapiens
  misc_RNA (1)...(19): siRNA sense strand
uugaugaagcagacagaau

SEQ ID NO: 2337232 - RNA, 19 nt, Homo sapiens
  misc_RNA (1)...(19): siRNA sense strand
caguugaacccaaaggaca

SEQ ID NO: 2337233 - RNA, 19 nt, Homo sapiens
  misc_RNA (1)...(19): siRNA sense strand
uugcaauaccagagagucu

SEQ ID NO: 2337234 - RNA, 19 nt, Homo sapiens
  misc_RNA (1)...(19): siRNA sense strand
aagcauucgguuagcacaa

SEQ ID NO: 2337235 - RNA, 19 nt, Homo sapiens
  misc_RNA (1)...(19): siRNA sense strand
gauagaaaccaggaggaga

SEQ ID NO: 2337236 - RNA, 19 nt, Homo sapiens
  misc_RNA (1)...(19): siRNA sense strand
cgugccaacgagagagcua

SEQ ID NO: 2337237 - RNA, 19 nt, Homo sapiens
  misc_RNA (1)...(19): siRNA sense strand
caagcaaaggcuacgaaaa

SEQ ID NO: 2337238 - RNA, 19 nt, Homo sapiens
  misc_RNA (1)...(19): siRNA sense strand
ccacaauaaauacggucuu

SEQ ID NO: 2337239 - RNA, 19 nt, Homo sapiens
  misc_RNA (1)...(19): siRNA sense strand
cuguaaaugcugaaugcca

SEQ ID NO: 2337240 - RNA, 19 nt, Homo sapiens
  misc_RNA (1)...(19): siRNA sense strand
ggacaagagccaugaccag

SEQ ID NO: 2337241 - RNA, 19 nt, Homo sapiens
  misc_RNA (1)...(19): siRNA sense strand
aguuugaggaagaccagaa

SEQ ID NO: 2337242 - RNA, 19 nt, Homo sapiens
  misc_RNA (1)...(19): siRNA sense strand
cggcauggagcaggaggaa

SEQ ID NO: 2337243 - RNA, 19 nt, Homo sapiens
  misc_RNA (1)...(19): siRNA sense strand
ggaacuacauagagggaac

SEQ ID NO: 2337244 - RNA, 19 nt, Homo sapiens
  misc_RNA (1)...(19): siRNA sense strand
ugacggagguagacgggaa

SEQ ID NO: 2337245 - RNA, 19 nt, Homo sapiens
  misc_RNA (1)...(19): siRNA sense strand
cgggaaacuuuauggacga

SEQ ID NO: 2337246 - RNA, 19 nt, Homo sapiens
  misc_RNA (1)...(19): siRNA sense strand
uggccgaguuauaggaaaa

SEQ ID NO: 2337247 - RNA, 19 nt, Homo sapiens
  misc_RNA (1)...(19): siRNA sense strand
ccaaaauguuccaggagau

SEQ ID NO: 2337248 - RNA, 19 nt, Homo sapiens
  misc_RNA (1)...(19): siRNA sense strand
cuucagagcccuggagcaa

SEQ ID NO: 2337249 - RNA, 19 nt, Homo sapiens
  misc_RNA (1)...(19): siRNA sense strand
gugcagacgcugaaggagu

SEQ ID NO: 2337250 - RNA, 19 nt, Homo sapiens
  misc_RNA (1)...(19): siRNA sense strand
uggucagagucuuccaaua

SEQ ID NO: 2337251 - RNA, 19 nt, Homo sapiens
  misc_RNA (1)...(19): siRNA sense strand
agccaaaggaagccagcaa

SEQ ID NO: 2337252 - RNA, 19 nt, Homo sapiens
  misc_RNA (1)...(19): siRNA sense strand
cggaauagcagccggguug

SEQ ID NO: 2337253 - RNA, 19 nt, Homo sapiens
  misc_RNA (1)...(19): siRNA sense strand
ccuagaagaauaccggaau

SEQ ID NO: 2337254 - RNA, 19 nt, Homo sapiens
  misc_RNA (1)...(19): siRNA sense strand
auacuaaggaggagauucu

SEQ ID NO: 2337255 - RNA, 19 nt, Homo sapiens
  misc_RNA (1)...(19): siRNA sense strand
agguagacgggaaacuuua

SEQ ID NO: 2337256 - RNA, 19 nt, Homo sapiens
  misc_RNA (1)...(19): siRNA sense strand
cauaccuggccgaguuaua

SEQ ID NO: 2337257 - RNA, 19 nt, Homo sapiens
  misc_RNA (1)...(19): siRNA sense strand
acuaaggaggagauucuaa

SEQ ID NO: 2337258 - RNA, 19 nt, Homo sapiens
  misc_RNA (1)...(19): siRNA sense strand
ggugaaaugcagagaccag

SEQ ID NO: 2337259 - RNA, 19 nt, Homo sapiens
  misc_RNA (1)...(19): siRNA sense strand
caccauuccaauugccaaa

SEQ ID NO: 2337260 - RNA, 19 nt, Homo sapiens
  misc_RNA (1)...(19): siRNA sense strand
cagcuaagguugaagccaa

SEQ ID NO: 2337261 - RNA, 19 nt, Homo sapiens
  misc_RNA (1)...(19): siRNA sense strand
cggacgaggauaugggauu

SEQ ID NO: 2337262 - RNA, 19 nt, Homo sapiens
  misc_RNA (1)...(19): siRNA sense strand
gggacauguugcuggccaa

SEQ ID NO: 2337263 - RNA, 19 nt, Homo sapiens
  misc_RNA (1)...(19): siRNA sense strand
gcuugauaucacagaggaa

SEQ ID NO: 2337264 - RNA, 19 nt, Homo sapiens
  misc_RNA (1)...(19): siRNA sense strand
agguugaagccaaggaaga

SEQ ID NO: 2337265 - RNA, 19 nt, Homo sapiens
  misc_RNA (1)...(19): siRNA sense strand
cuguggugcugaugggcaa

SEQ ID NO: 2337266 - RNA, 19 nt, Homo sapiens
  misc_RNA (1)...(19): siRNA sense strand
uggagaaacugcugccuca

SEQ ID NO: 2337267 - RNA, 19 nt, Homo sapiens
  misc_RNA (1)...(19): siRNA sense strand
aggagucggacgaggauau

SEQ ID NO: 2337268 - RNA, 19 nt, Homo sapiens
  misc_RNA (1)...(19): siRNA sense strand
acuaaaaucuccaggggca

SEQ ID NO: 2337269 - RNA, 19 nt, Homo sapiens
  misc_RNA (1)...(19): siRNA sense strand
aggaagagucggaggaguc

SEQ ID NO: 2337270 - RNA, 19 nt, Homo sapiens
  misc_RNA (1)...(19): siRNA sense strand
ccuuaagaucauccaacua

SEQ ID NO: 2337271 - RNA, 19 nt, Homo sapiens
  misc_RNA (1)...(19): siRNA sense strand
ccaaggaagagucggagga

SEQ ID NO: 2337272 - RNA, 19 nt, Homo sapiens
  misc_RNA (1)...(19): siRNA sense strand
agaacaccaugaugcgcaa

SEQ ID NO: 2337273 - RNA, 19 nt, Homo sapiens
  misc_RNA (1)...(19): siRNA sense strand
cagcuaagguugaagccaa

SEQ ID NO: 2337274 - RNA, 19 nt, Homo sapiens
  misc_RNA (1)...(19): siRNA sense strand
cggacgaggauaugggauu

SEQ ID NO: 2337275 - RNA, 19 nt, Homo sapiens
  misc_RNA (1)...(19): siRNA sense strand
gggacauguugcuggccaa

SEQ ID NO: 2337276 - RNA, 19 nt, Homo sapiens
  misc_RNA (1)...(19): siRNA sense strand
gcuugauaucacagaggaa

SEQ ID NO: 2337277 - RNA, 19 nt, Homo sapiens
  misc_RNA (1)...(19): siRNA sense strand
agguugaagccaaggaaga

SEQ ID NO: 2337278 - RNA, 19 nt, Homo sapiens
  misc_RNA (1)...(19): siRNA sense strand
cuguggugcugaugggcaa

SEQ ID NO: 2337279 - RNA, 19 nt, Homo sapiens
  misc_RNA (1)...(19): siRNA sense strand
uggagaaacugcugccuca

SEQ ID NO: 2337280 - RNA, 19 nt, Homo sapiens
  misc_RNA (1)...(19): siRNA sense strand
aggagucggacgaggauau

SEQ ID NO: 2337281 - RNA, 19 nt, Homo sapiens
  misc_RNA (1)...(19): siRNA sense strand
acuaaaaucuccaggggca

SEQ ID NO: 2337282 - RNA, 19 nt, Homo sapiens
  misc_RNA (1)...(19): siRNA sense strand
aggaagagucggaggaguc

SEQ ID NO: 2337283 - RNA, 19 nt, Homo sapiens
  misc_RNA (1)...(19): siRNA sense strand
ccuuaagaucauccaacua

SEQ ID NO: 2337284 - RNA, 19 nt, Homo sapiens
  misc_RNA (1)...(19): siRNA sense strand
ccaaggaagagucggagga

SEQ ID NO: 2337285 - RNA, 19 nt, Homo sapiens
  misc_RNA (1)...(19): siRNA sense strand
agaacaccaugaugcgcaa

SEQ ID NO: 2337286 - RNA, 19 nt, Homo sapiens
  misc_RNA (1)...(19): siRNA sense strand
ccgaaaggucugugauaau

SEQ ID NO: 2337287 - RNA, 19 nt, Homo sapiens
  misc_RNA (1)...(19): siRNA sense strand
gaaaguuaaaggagggaau

SEQ ID NO: 2337288 - RNA, 19 nt, Homo sapiens
  misc_RNA (1)...(19): siRNA sense strand
ugaagauauuccugacaaa

SEQ ID NO: 2337289 - RNA, 19 nt, Homo sapiens
  misc_RNA (1)...(19): siRNA sense strand
aaugauaccuugugagcau

SEQ ID NO: 2337290 - RNA, 19 nt, Homo sapiens
  misc_RNA (1)...(19): siRNA sense strand
gcuuaucugugaaggaaau

SEQ ID NO: 2337291 - RNA, 19 nt, Homo sapiens
  misc_RNA (1)...(19): siRNA sense strand
ccacaagagacgucauaau

SEQ ID NO: 2337292 - RNA, 19 nt, Homo sapiens
  misc_RNA (1)...(19): siRNA sense strand
ccucaaaaggaaaguuaaa

SEQ ID NO: 2337293 - RNA, 19 nt, Homo sapiens
  misc_RNA (1)...(19): siRNA sense strand
cuaagaaaauucagaguga

SEQ ID NO: 2337294 - RNA, 19 nt, Homo sapiens
  misc_RNA (1)...(19): siRNA sense strand
gguuauaaugauuggaacu

SEQ ID NO: 2337295 - RNA, 19 nt, Homo sapiens
  misc_RNA (1)...(19): siRNA sense strand
guuccauaccucaaggaua

SEQ ID NO: 2337296 - RNA, 19 nt, Homo sapiens
  misc_RNA (1)...(19): siRNA sense strand
gaagaaugggcuaagaaaa

SEQ ID NO: 2337297 - RNA, 19 nt, Homo sapiens
  misc_RNA (1)...(19): siRNA sense strand
uugaaggaauggagauuga

SEQ ID NO: 2337298 - RNA, 19 nt, Homo sapiens
  misc_RNA (1)...(19): siRNA sense strand
ccauguugggagaacgaaa

SEQ ID NO: 2337299 - RNA, 19 nt, Homo sapiens
  misc_RNA (1)...(19): siRNA sense strand
aguuaaaggagggaauaua

SEQ ID NO: 2337300 - RNA, 19 nt, Homo sapiens
  misc_RNA (1)...(19): siRNA sense strand
aggagggaauauagaugua

SEQ ID NO: 2337301 - RNA, 19 nt, Homo sapiens
  misc_RNA (1)...(19): siRNA sense strand
gaacugaaaaugaggaaca

SEQ ID NO: 2337302 - RNA, 19 nt, Homo sapiens
  misc_RNA (1)...(19): siRNA sense strand
ccucaaggauaaacuaaaa

SEQ ID NO: 2337303 - RNA, 19 nt, Homo sapiens
  misc_RNA (1)...(19): siRNA sense strand
cgugauucauugucaggaa

SEQ ID NO: 2337304 - RNA, 19 nt, Homo sapiens
  misc_RNA (1)...(19): siRNA sense strand
gcucugaaguuuaaggauc

SEQ ID NO: 2337305 - RNA, 19 nt, Homo sapiens
  misc_RNA (1)...(19): siRNA sense strand
gcaugauggaccaacuaaa

SEQ ID NO: 2337306 - RNA, 19 nt, Homo sapiens
  misc_RNA (1)...(19): siRNA sense strand
aggaauggagauugaugaa

SEQ ID NO: 2337307 - RNA, 19 nt, Homo sapiens
  misc_RNA (1)...(19): siRNA sense strand
uugaagaaacucagcauuu

SEQ ID NO: 2337308 - RNA, 19 nt, Homo sapiens
  misc_RNA (1)...(19): siRNA sense strand
ucaacaagaagaugaugaa

SEQ ID NO: 2337309 - RNA, 19 nt, Homo sapiens
  misc_RNA (1)...(19): siRNA sense strand
aagaaugggcuaagaaaau

SEQ ID NO: 2337310 - RNA, 19 nt, Homo sapiens
  misc_RNA (1)...(19): siRNA sense strand
gauauaacuucccuggcaa

SEQ ID NO: 2337311 - RNA, 19 nt, Homo sapiens
  misc_RNA (1)...(19): siRNA sense strand
cgucauaaucaaggaaaca

SEQ ID NO: 2337312 - RNA, 19 nt, Homo sapiens
  misc_RNA (1)...(19): siRNA sense strand
cggaauaugaugaagaaug

SEQ ID NO: 2337313 - RNA, 19 nt, Homo sapiens
  misc_RNA (1)...(19): siRNA sense strand
gagagaagacuggaagcaa

SEQ ID NO: 2337314 - RNA, 19 nt, Homo sapiens
  misc_RNA (1)...(19): siRNA sense strand
gugauugaauguuugggaa

SEQ ID NO: 2337315 - RNA, 19 nt, Homo sapiens
  misc_RNA (1)...(19): siRNA sense strand
ugaauuugugugucagaua

SEQ ID NO: 2337316 - RNA, 19 nt, Homo sapiens
  misc_RNA (1)...(19): siRNA sense strand
augaugaauuuguguguca

SEQ ID NO: 2337317 - RNA, 19 nt, Homo sapiens
  misc_RNA (1)...(19): siRNA sense strand
uggaugagagugagcagua

SEQ ID NO: 2337318 - RNA, 19 nt, Homo sapiens
  misc_RNA (1)...(19): siRNA sense strand
gguaaaacaggaacagcua

SEQ ID NO: 2337319 - RNA, 19 nt, Homo sapiens
  misc_RNA (1)...(19): siRNA sense strand
cugaagaugcucaugaaga

SEQ ID NO: 2337320 - RNA, 19 nt, Homo sapiens
  misc_RNA (1)...(19): siRNA sense strand
cauucaugaaggagauauu

SEQ ID NO: 2337321 - RNA, 19 nt, Homo sapiens
  misc_RNA (1)...(19): siRNA sense strand
acauuaaugacauggauga

SEQ ID NO: 2337322 - RNA, 19 nt, Homo sapiens
  misc_RNA (1)...(19): siRNA sense strand
gugucgaguuagcuacaaa

SEQ ID NO: 2337323 - RNA, 19 nt, Homo sapiens
  misc_RNA (1)...(19): siRNA sense strand
auacauucaugaaggagau

SEQ ID NO: 2337324 - RNA, 19 nt, Homo sapiens
  misc_RNA (1)...(19): siRNA sense strand
gugauucauugucaggaaa

SEQ ID NO: 2337325 - RNA, 19 nt, Homo sapiens
  misc_RNA (1)...(19): siRNA sense strand
cugauaacuuggaagaacu

SEQ ID NO: 2337326 - RNA, 19 nt, Homo sapiens
  misc_RNA (1)...(19): siRNA sense strand
ggcaagaagaacucucaaa

SEQ ID NO: 2337327 - RNA, 19 nt, Homo sapiens
  misc_RNA (1)...(19): siRNA sense strand
augaugaagaagaggaguu

SEQ ID NO: 2337328 - RNA, 19 nt, Homo sapiens
  misc_RNA (1)...(19): siRNA sense strand
aagcaagccuaaagaucca

SEQ ID NO: 2337329 - RNA, 19 nt, Homo sapiens
  misc_RNA (1)...(19): siRNA sense strand
gucagauggaugagaguga

SEQ ID NO: 2337330 - RNA, 19 nt, Homo sapiens
  misc_RNA (1)...(19): siRNA sense strand
aggcaaugacaacuacaaa

SEQ ID NO: 2337331 - RNA, 19 nt, Homo sapiens
  misc_RNA (1)...(19): siRNA sense strand
agaagaggaguuugugauu

SEQ ID NO: 2337332 - RNA, 19 nt, Homo sapiens
  misc_RNA (1)...(19): siRNA sense strand
cuacaaacaaauagcaaug

SEQ ID NO: 2337333 - RNA, 19 nt, Homo sapiens
  misc_RNA (1)...(19): siRNA sense strand
gagggaauauagauguaca

SEQ ID NO: 2337334 - RNA, 19 nt, Homo sapiens
  misc_RNA (1)...(19): siRNA sense strand
ucucuaaugaugaagaaga

SEQ ID NO: 2337335 - RNA, 19 nt, Homo sapiens
  misc_RNA (1)...(19): siRNA sense strand
gaacgaaaagaaugucaaa

SEQ ID NO: 2337336 - RNA, 19 nt, Homo sapiens
  misc_RNA (1)...(19): siRNA sense strand
aaaaccaaaccuugagaaa

SEQ ID NO: 2337337 - RNA, 19 nt, Homo sapiens
  misc_RNA (1)...(19): siRNA sense strand
ucucauagaccuaaugcau

SEQ ID NO: 2337338 - RNA, 19 nt, Homo sapiens
  misc_RNA (1)...(19): siRNA sense strand
agauugaugaaguugcuaa

SEQ ID NO: 2337339 - RNA, 19 nt, Homo sapiens
  misc_RNA (1)...(19): siRNA sense strand
ugucaugggagaaaggaaa

SEQ ID NO: 2337340 - RNA, 19 nt, Homo sapiens
  misc_RNA (1)...(19): siRNA sense strand
cagccuaugcagagaacaa

SEQ ID NO: 2337341 - RNA, 19 nt, Homo sapiens
  misc_RNA (1)...(19): siRNA sense strand
ccgaauggcaauuggugaa

SEQ ID NO: 2337342 - RNA, 19 nt, Homo sapiens
  misc_RNA (1)...(19): siRNA sense strand
ggacacaacagcagcguca

SEQ ID NO: 2337343 - RNA, 19 nt, Homo sapiens
  misc_RNA (1)...(19): siRNA sense strand
ccuaaguacucguugccaa

SEQ ID NO: 2337344 - RNA, 19 nt, Homo sapiens
  misc_RNA (1)...(19): siRNA sense strand
uaagaaauaaggaggucaa

SEQ ID NO: 2337345 - RNA, 19 nt, Homo sapiens
  misc_RNA (1)...(19): siRNA sense strand
caaacaagaagguggacga

SEQ ID NO: 2337346 - RNA, 19 nt, Homo sapiens
  misc_RNA (1)...(19): siRNA sense strand
acaagaagguggacgacca

SEQ ID NO: 2337347 - RNA, 19 nt, Homo sapiens
  misc_RNA (1)...(19): siRNA sense strand
uggugaaaguggacuacaa

SEQ ID NO: 2337348 - RNA, 19 nt, Homo sapiens
  misc_RNA (1)...(19): siRNA sense strand
acagaugggcuaagggaga

SEQ ID NO: 2337349 - RNA, 19 nt, Homo sapiens
  misc_RNA (1)...(19): siRNA sense strand
cccaagaaccugacagaga

SEQ ID NO: 2337350 - RNA, 19 nt, Homo sapiens
  misc_RNA (1)...(19): siRNA sense strand
augaaaagcugaaugacaa

SEQ ID NO: 2337351 - RNA, 19 nt, Homo sapiens
  misc_RNA (1)...(19): siRNA sense strand
gggcuaagggagaaguaca

SEQ ID NO: 2337352 - RNA, 19 nt, Homo sapiens
  misc_RNA (1)...(19): siRNA sense strand
gcgaaagcacaaaggagau

SEQ ID NO: 2337353 - RNA, 19 nt, Homo sapiens
  misc_RNA (1)...(19): siRNA sense strand
ggagaaaagauauuggcaa

SEQ ID NO: 2337354 - RNA, 19 nt, Homo sapiens
  misc_RNA (1)...(19): siRNA sense strand
ugaaugacaaaguggguuu

SEQ ID NO: 2337355 - RNA, 19 nt, Homo sapiens
  misc_RNA (1)...(19): siRNA sense strand
ccuuaacagcacuggguau

SEQ ID NO: 2337356 - RNA, 19 nt, Homo sapiens
  misc_RNA (1)...(19): siRNA sense strand
cuaaguacucguugccaaa

SEQ ID NO: 2337357 - RNA, 19 nt, Homo sapiens
  misc_RNA (1)...(19): siRNA sense strand
ggauuaacaucuaugcuca

SEQ ID NO: 2337358 - RNA, 19 nt, Homo sapiens
  misc_RNA (1)...(19): siRNA sense strand
caagagcagcagaggucua

SEQ ID NO: 2337359 - RNA, 19 nt, Homo sapiens
  misc_RNA (1)...(19): siRNA sense strand
acaaggagcaggagaugau

SEQ ID NO: 2337360 - RNA, 19 nt, Homo sapiens
  misc_RNA (1)...(19): siRNA sense strand
aggcaggaauggagaccca

SEQ ID NO: 2337361 - RNA, 19 nt, Homo sapiens
  misc_RNA (1)...(19): siRNA sense strand
uaucagaaguaucggcuca

SEQ ID NO: 2337362 - RNA, 19 nt, Homo sapiens
  misc_RNA (1)...(19): siRNA sense strand
acgacaaggagcaggagau

SEQ ID NO: 2337363 - RNA, 19 nt, Homo sapiens
  misc_RNA (1)...(19): siRNA sense strand
aagggauauuucuggcaaa

SEQ ID NO: 2337364 - RNA, 19 nt, Homo sapiens
  misc_RNA (1)...(19): siRNA sense strand
ggacugcagccuuggucaa

SEQ ID NO: 2337365 - RNA, 19 nt, Homo sapiens
  misc_RNA (1)...(19): siRNA sense strand
gagauggagagcagcauau

SEQ ID NO: 2337366 - RNA, 19 nt, Homo sapiens
  misc_RNA (1)...(19): siRNA sense strand
aggacugggugcuggccua

SEQ ID NO: 2337367 - RNA, 19 nt, Homo sapiens
  misc_RNA (1)...(19): siRNA sense strand
ugacuauggguaugagaga

SEQ ID NO: 2337368 - RNA, 19 nt, Homo sapiens
  misc_RNA (1)...(19): siRNA sense strand
aggcggaccuggugcacau

SEQ ID NO: 2337369 - RNA, 19 nt, Homo sapiens
  misc_RNA (1)...(19): siRNA sense strand
gaagagaggccuuugcuca

SEQ ID NO: 2337370 - RNA, 19 nt, Homo sapiens
  misc_RNA (1)...(19): siRNA sense strand
gcagaggucuaauggggaa

SEQ ID NO: 2337371 - RNA, 19 nt, Homo sapiens
  misc_RNA (1)...(19): siRNA sense strand
acuauggguaugagagaca

SEQ ID NO: 2337372 - RNA, 19 nt, Homo sapiens
  misc_RNA (1)...(19): siRNA sense strand
ggucagugagccaaaguga

SEQ ID NO: 2337373 - RNA, 19 nt, Homo sapiens
  misc_RNA (1)...(19): siRNA sense strand
cagguaacaacuaguggaa

SEQ ID NO: 2337374 - RNA, 19 nt, Homo sapiens
  misc_RNA (1)...(19): siRNA sense strand
aggccuuugcucagauaaa

SEQ ID NO: 2337375 - RNA, 19 nt, Homo sapiens
  misc_RNA (1)...(19): siRNA sense strand
ggugaucuacaaaggacaa

SEQ ID NO: 2337376 - RNA, 19 nt, Homo sapiens
  misc_RNA (1)...(19): siRNA sense strand
acagagaggaggaaaggca

SEQ ID NO: 2337377 - RNA, 19 nt, Homo sapiens
  misc_RNA (1)...(19): siRNA sense strand
cgagugugacuauggguau

SEQ ID NO: 2337378 - RNA, 19 nt, Homo sapiens
  misc_RNA (1)...(19): siRNA sense strand
ggaagaaucucuagcaagg

SEQ ID NO: 2337379 - RNA, 19 nt, Homo sapiens
  misc_RNA (1)...(19): siRNA sense strand
cagagaggaggaaaggcaa

SEQ ID NO: 2337380 - RNA, 19 nt, Homo sapiens
  misc_RNA (1)...(19): siRNA sense strand
gugucaugggagaaaggaa

SEQ ID NO: 2337381 - RNA, 19 nt, Homo sapiens
  misc_RNA (1)...(19): siRNA sense strand
agagaggaggaaaggcaau

SEQ ID NO: 2337382 - RNA, 19 nt, Homo sapiens
  misc_RNA (1)...(19): siRNA sense strand
acuauugcaaacagcgaaa

SEQ ID NO: 2337383 - RNA, 19 nt, Homo sapiens
  misc_RNA (1)...(19): siRNA sense strand
agcgaaagcacaaaggaga

SEQ ID NO: 2337384 - RNA, 19 nt, Homo sapiens
  misc_RNA (1)...(19): siRNA sense strand
gauuaacaucuaugcucaa

SEQ ID NO: 2337385 - RNA, 19 nt, Homo sapiens
  misc_RNA (1)...(19): siRNA sense strand
gcacaaaggagauccccaa

SEQ ID NO: 2337386 - RNA, 19 nt, Homo sapiens
  misc_RNA (1)...(19): siRNA sense strand
ggagaaaggaaaauauuca

SEQ ID NO: 2337387 - RNA, 19 nt, Homo sapiens
  misc_RNA (1)...(19): siRNA sense strand
caacugcacagaugggcua

SEQ ID NO: 2337388 - RNA, 19 nt, Homo sapiens
  misc_RNA (1)...(19): siRNA sense strand
caaccuuggcucagacaca

SEQ ID NO: 2337389 - RNA, 19 nt, Homo sapiens
  misc_RNA (1)...(19): siRNA sense strand
ccauaagaaauaaggaggu

SEQ ID NO: 2337390 - RNA, 19 nt, Homo sapiens
  misc_RNA (1)...(19): siRNA sense strand
uggcaaacaagaaggugga

SEQ ID NO: 2337391 - RNA, 19 nt, Homo sapiens
  misc_RNA (1)...(19): siRNA sense strand
gggagaaguacaccgccaa

SEQ ID NO: 2337392 - RNA, 19 nt, Homo sapiens
  misc_RNA (1)...(19): siRNA sense strand
cauuuguugccauaagaaa

SEQ ID NO: 2337393 - RNA, 19 nt, Homo sapiens
  misc_RNA (1)...(19): siRNA sense strand
ccugaguggagaaaagaua

SEQ ID NO: 2337394 - RNA, 19 nt, Homo sapiens
  misc_RNA (1)...(19): siRNA sense strand
ccaacaaaaggaagauuau

SEQ ID NO: 2337395 - RNA, 19 nt, Homo sapiens
  misc_RNA (1)...(19): siRNA sense strand
ccagcuacuacgugucuua

SEQ ID NO: 2337396 - RNA, 19 nt, Homo sapiens
  misc_RNA (1)...(19): siRNA sense strand
gagaacaucaagagcagca

SEQ ID NO: 2337397 - RNA, 19 nt, Homo sapiens
  misc_RNA (1)...(19): siRNA sense strand
ggcauuugugggugaguuu

SEQ ID NO: 2337398 - RNA, 19 nt, Homo sapiens
  misc_RNA (1)...(19): siRNA sense strand
gcggugagaugcaggugga

SEQ ID NO: 2337399 - RNA, 19 nt, Homo sapiens
  misc_RNA (1)...(19): siRNA sense strand
gcaggagaugauuggguca

SEQ ID NO: 2337400 - RNA, 19 nt, Homo sapiens
  misc_RNA (1)...(19): siRNA sense strand
gggagugggaagagugcaa

SEQ ID NO: 2337401 - RNA, 19 nt, Homo sapiens
  misc_RNA (1)...(19): siRNA sense strand
aggaagaagaauaugaaca

SEQ ID NO: 2337402 - RNA, 19 nt, Homo sapiens
  misc_RNA (1)...(19): siRNA sense strand
uggagaaaguugaagccau

SEQ ID NO: 2337403 - RNA, 19 nt, Homo sapiens
  misc_RNA (1)...(19): siRNA sense strand
uggaagacuaugugcgaga

SEQ ID NO: 2337404 - RNA, 19 nt, Homo sapiens
  misc_RNA (1)...(19): siRNA sense strand
ggucuaagggagaaagaac

SEQ ID NO: 2337405 - RNA, 19 nt, Homo sapiens
  misc_RNA (1)...(19): siRNA sense strand
gggaaaacgaaggagauua

SEQ ID NO: 2337406 - RNA, 19 nt, Homo sapiens
  misc_RNA (1)...(19): siRNA sense strand
aggaaaggcaaguaagcca

SEQ ID NO: 2337407 - RNA, 19 nt, Homo sapiens
  misc_RNA (1)...(19): siRNA sense strand
gcgagagcucauggagaaa

SEQ ID NO: 2337408 - RNA, 19 nt, Homo sapiens
  misc_RNA (1)...(19): siRNA sense strand
gcaaguaagccagggccaa

SEQ ID NO: 2337409 - RNA, 19 nt, Homo sapiens
  misc_RNA (1)...(19): siRNA sense strand
gguucacggaugaggauca

SEQ ID NO: 2337410 - RNA, 19 nt, Homo sapiens
  misc_RNA (1)...(19): siRNA sense strand
gggagaaagaacagaagac

SEQ ID NO: 2337411 - RNA, 19 nt, Homo sapiens
  misc_RNA (1)...(19): siRNA sense strand
agaacuacaggaaaggcaa

SEQ ID NO: 2337412 - RNA, 19 nt, Homo sapiens
  misc_RNA (1)...(19): siRNA sense strand
gggaaaacagggaguggga

SEQ ID NO: 2337413 - RNA, 19 nt, Homo sapiens
  misc_RNA (1)...(19): siRNA sense strand
cagaagagcugucccagga

SEQ ID NO: 2337414 - RNA, 19 nt, Homo sapiens
  misc_RNA (1)...(19): siRNA sense strand
ucccagauccagaaggaau

SEQ ID NO: 2337415 - RNA, 19 nt, Homo sapiens
  misc_RNA (1)...(19): siRNA sense strand
acuaugugcgagagaccaa

SEQ ID NO: 2337416 - RNA, 19 nt, Homo sapiens
  misc_RNA (1)...(19): siRNA sense strand
aaggagauuauuacagcaa

SEQ ID NO: 2337417 - RNA, 19 nt, Homo sapiens
  misc_RNA (1)...(19): siRNA sense strand
ucaggaggucuaagggaga

SEQ ID NO: 2337418 - RNA, 19 nt, Homo sapiens
  misc_RNA (1)...(19): siRNA sense strand
gggaaggagcuugagguga

SEQ ID NO: 2337419 - RNA, 19 nt, Homo sapiens
  misc_RNA (1)...(19): siRNA sense strand
gggagaagcugaagccaga

SEQ ID NO: 2337420 - RNA, 19 nt, Homo sapiens
  misc_RNA (1)...(19): siRNA sense strand
aauaagaccuggaaggaga

SEQ ID NO: 2337421 - RNA, 19 nt, Homo sapiens
  misc_RNA (1)...(19): siRNA sense strand
uggaaggagaugcgggcua

SEQ ID NO: 2337422 - RNA, 19 nt, Homo sapiens
  misc_RNA (1)...(19): siRNA sense strand
ccguaaugggcuccagaua

SEQ ID NO: 2337423 - RNA, 19 nt, Homo sapiens
  misc_RNA (1)...(19): siRNA sense strand
caggauaagcugugguucu

SEQ ID NO: 2337424 - RNA, 19 nt, Homo sapiens
  misc_RNA (1)...(19): siRNA sense strand
gcuccgggaagcagaacaa

SEQ ID NO: 2337425 - RNA, 19 nt, Homo sapiens
  misc_RNA (1)...(19): siRNA sense strand
ggagagucugcccgagcaa

SEQ ID NO: 2337426 - RNA, 19 nt, Homo sapiens
  misc_RNA (1)...(19): siRNA sense strand
acagcagccgcgaggacaa

SEQ ID NO: 2337427 - RNA, 19 nt, Homo sapiens
  misc_RNA (1)...(19): siRNA sense strand
agagauuguaggagagaaa

SEQ ID NO: 2337428 - RNA, 19 nt, Homo sapiens
  misc_RNA (1)...(19): siRNA sense strand
aggaaauccacaagaaauu

SEQ ID NO: 2337429 - RNA, 19 nt, Homo sapiens
  misc_RNA (1)...(19): siRNA sense strand
gccuaagaauaaagggaga

SEQ ID NO: 2337430 - RNA, 19 nt, Homo sapiens
  misc_RNA (1)...(19): siRNA sense strand
agacuaggaaacagcgaaa

SEQ ID NO: 2337431 - RNA, 19 nt, Homo sapiens
  misc_RNA (1)...(19): siRNA sense strand
caaagaaggaacaggacga

SEQ ID NO: 2337432 - RNA, 19 nt, Homo sapiens
  misc_RNA (1)...(19): siRNA sense strand
caagguuaaaugagacaaa

SEQ ID NO: 2337433 - RNA, 19 nt, Homo sapiens
  misc_RNA (1)...(19): siRNA sense strand
caggaaauccacaagaaau

SEQ ID NO: 2337434 - RNA, 19 nt, Homo sapiens
  misc_RNA (1)...(19): siRNA sense strand
cuaucagccuaaaggaaau

SEQ ID NO: 2337435 - RNA, 19 nt, Homo sapiens
  misc_RNA (1)...(19): siRNA sense strand
ucaaguacuacaagaacaa

SEQ ID NO: 2337436 - RNA, 19 nt, Homo sapiens
  misc_RNA (1)...(19): siRNA sense strand
gcuggaggagagaaggaaa

SEQ ID NO: 2337437 - RNA, 19 nt, Homo sapiens
  misc_RNA (1)...(19): siRNA sense strand
acagaagauaccucagaaa

SEQ ID NO: 2337438 - RNA, 19 nt, Homo sapiens
  misc_RNA (1)...(19): siRNA sense strand
ugaaaagguaccagagauu

SEQ ID NO: 2337439 - RNA, 19 nt, Homo sapiens
  misc_RNA (1)...(19): siRNA sense strand
gggaggcaaacgaggaauu

SEQ ID NO: 2337440 - RNA, 19 nt, Homo sapiens
  misc_RNA (1)...(19): siRNA sense strand
gaggaauugucaaggaacu

SEQ ID NO: 2337441 - RNA, 19 nt, Homo sapiens
  misc_RNA (1)...(19): siRNA sense strand
ugcaaggaccagaagauaa

SEQ ID NO: 2337442 - RNA, 19 nt, Homo sapiens
  misc_RNA (1)...(19): siRNA sense strand
cuggaggagagaaggaaau

SEQ ID NO: 2337443 - RNA, 19 nt, Homo sapiens
  misc_RNA (1)...(19): siRNA sense strand
cgaaaugagcaguaucaga

SEQ ID NO: 2337444 - RNA, 19 nt, Homo sapiens
  misc_RNA (1)...(19): siRNA sense strand
cuguauggcuguaauaaca

SEQ ID NO: 2337445 - RNA, 19 nt, Homo sapiens
  misc_RNA (1)...(19): siRNA sense strand
ucuaucagccuaaaggaaa

SEQ ID NO: 2337446 - RNA, 19 nt, Homo sapiens
  misc_RNA (1)...(19): siRNA sense strand
cagccuaaaggaaaugaaa

SEQ ID NO: 2337447 - RNA, 19 nt, Homo sapiens
  misc_RNA (1)...(19): siRNA sense strand
ugggaauccuaaacagcua

SEQ ID NO: 2337448 - RNA, 19 nt, Homo sapiens
  misc_RNA (1)...(19): siRNA sense strand
acaggaaauccacaagaaa

SEQ ID NO: 2337449 - RNA, 19 nt, Homo sapiens
  misc_RNA (1)...(19): siRNA sense strand
uaccagagauuguaggaga

SEQ ID NO: 2337450 - RNA, 19 nt, Homo sapiens
  misc_RNA (1)...(19): siRNA sense strand
ccuaagaauaaagggagaa

SEQ ID NO: 2337451 - RNA, 19 nt, Homo sapiens
  misc_RNA (1)...(19): siRNA sense strand
gugaggucaucaaggaaaa

SEQ ID NO: 2337452 - RNA, 19 nt, Homo sapiens
  misc_RNA (1)...(19): siRNA sense strand
ccaagauggccaauugaau

SEQ ID NO: 2337453 - RNA, 19 nt, Homo sapiens
  misc_RNA (1)...(19): siRNA sense strand
guaauaacaacaaucgcaa

SEQ ID NO: 2337454 - RNA, 19 nt, Homo sapiens
  misc_RNA (1)...(19): siRNA sense strand
augaguuggaugaaguaaa

SEQ ID NO: 2337455 - RNA, 19 nt, Homo sapiens
  misc_RNA (1)...(19): siRNA sense strand
gaauauuucuaucagccua

SEQ ID NO: 2337456 - RNA, 19 nt, Homo sapiens
  misc_RNA (1)...(19): siRNA sense strand
acgaggaauugucaaggaa

SEQ ID NO: 2337457 - RNA, 19 nt, Homo sapiens
  misc_RNA (1)...(19): siRNA sense strand
uuccagagugggaggcaaa

SEQ ID NO: 2337458 - RNA, 19 nt, Homo sapiens
  misc_RNA (1)...(19): siRNA sense strand
guuauguggcggaugggaa

SEQ ID NO: 2337459 - RNA, 19 nt, Homo sapiens
  misc_RNA (1)...(19): siRNA sense strand
caauugaaugugaggucau

SEQ ID NO: 2337460 - RNA, 19 nt, Homo sapiens
  misc_RNA (1)...(19): siRNA sense strand
acaagaaauuccaugaacu

SEQ ID NO: 2337461 - RNA, 19 nt, Homo sapiens
  misc_RNA (1)...(19): siRNA sense strand
ccaaacuggccuaggagca

SEQ ID NO: 2337462 - RNA, 19 nt, Homo sapiens
  misc_RNA (1)...(19): siRNA sense strand
uggccacagucguaagaau

SEQ ID NO: 2337463 - RNA, 19 nt, Homo sapiens
  misc_RNA (1)...(19): siRNA sense strand
agaaggaacaggacgaguu

SEQ ID NO: 2337464 - RNA, 19 nt, Homo sapiens
  misc_RNA (1)...(19): siRNA sense strand
cagaagauaccucagaaaa

SEQ ID NO: 2337465 - RNA, 19 nt, Homo sapiens
  misc_RNA (1)...(19): siRNA sense strand
ccucccagauucaaggauu

SEQ ID NO: 2337466 - RNA, 19 nt, Homo sapiens
  misc_RNA (1)...(19): siRNA sense strand
aguagacaccuaugaguau

SEQ ID NO: 2337467 - RNA, 19 nt, Homo sapiens
  misc_RNA (1)...(19): siRNA sense strand
aggagagaaggaaaugaaa

SEQ ID NO: 2337468 - RNA, 19 nt, Homo sapiens
  misc_RNA (1)...(19): siRNA sense strand
ggaaaugaaaucaaguacu

SEQ ID NO: 2337469 - RNA, 19 nt, Homo sapiens
  misc_RNA (1)...(19): siRNA sense strand
gccacagucguaagaauaa

SEQ ID NO: 2337470 - RNA, 19 nt, Homo sapiens
  misc_RNA (1)...(19): siRNA sense strand
ccacaagaaauuccaugaa

SEQ ID NO: 2337471 - RNA, 19 nt, Homo sapiens
  misc_RNA (1)...(19): siRNA sense strand
cuaagaauaaagggagaau

SEQ ID NO: 2337472 - RNA, 19 nt, Homo sapiens
  misc_RNA (1)...(19): siRNA sense strand
guugcaaggaccagaagau

SEQ ID NO: 2337473 - RNA, 19 nt, Homo sapiens
  misc_RNA (1)...(19): siRNA sense strand
cucaagaggcagcugcaaa

SEQ ID NO: 2337474 - RNA, 19 nt, Homo sapiens
  misc_RNA (1)...(19): siRNA sense strand
gcuccagguaugaagccaa

SEQ ID NO: 2337475 - RNA, 19 nt, Homo sapiens
  misc_RNA (1)...(19): siRNA sense strand
aggaacaguugucuaucaa

SEQ ID NO: 2337476 - RNA, 19 nt, Homo sapiens
  misc_RNA (1)...(19): siRNA sense strand
guucuguuguauugugauu

SEQ ID NO: 2337477 - RNA, 19 nt, Homo sapiens
  misc_RNA (1)...(19): siRNA sense strand
ugugaggucaucaaggaaa

SEQ ID NO: 2337478 - RNA, 19 nt, Homo sapiens
  misc_RNA (1)...(19): siRNA sense strand
aggaaaacauccaucauau

SEQ ID NO: 2337479 - RNA, 19 nt, Homo sapiens
  misc_RNA (1)...(19): siRNA sense strand
uguuaaauccagauggugu

SEQ ID NO: 2337480 - RNA, 19 nt, Homo sapiens
  misc_RNA (1)...(19): siRNA sense strand
acaccaggaacaugaucaa

SEQ ID NO: 2337481 - RNA, 19 nt, Homo sapiens
  misc_RNA (1)...(19): siRNA sense strand
cugcaagcuccaaacuuua

SEQ ID NO: 2337482 - RNA, 19 nt, Homo sapiens
  misc_RNA (1)...(19): siRNA sense strand
aaacauagcagaugagcug

SEQ ID NO: 2337483 - RNA, 19 nt, Homo sapiens
  misc_RNA (1)...(19): siRNA sense strand
cgaacugaccucuacacua

SEQ ID NO: 2337484 - RNA, 19 nt, Homo sapiens
  misc_RNA (1)...(19): siRNA sense strand
cagauagacaagaggaaau

SEQ ID NO: 2337485 - RNA, 19 nt, Homo sapiens
  misc_RNA (1)...(19): siRNA sense strand
cugucaaacuugugccuaa

SEQ ID NO: 2337486 - RNA, 19 nt, Homo sapiens
  misc_RNA (1)...(19): siRNA sense strand
gaagaaauauugaaggguu

SEQ ID NO: 2337487 - RNA, 19 nt, Homo sapiens
  misc_RNA (1)...(19): siRNA sense strand
gguuggaagaaguggcaau

SEQ ID NO: 2337488 - RNA, 19 nt, Homo sapiens
  misc_RNA (1)...(19): siRNA sense strand
cgauguaucaagaagcuaa

SEQ ID NO: 2337489 - RNA, 19 nt, Homo sapiens
  misc_RNA (1)...(19): siRNA sense strand
uggaacaaugagacggaaa

SEQ ID NO: 2337490 - RNA, 19 nt, Homo sapiens
  misc_RNA (1)...(19): siRNA sense strand
cggccaaacuguggagaga

SEQ ID NO: 2337491 - RNA, 19 nt, Homo sapiens
  misc_RNA (1)...(19): siRNA sense strand
gaacacauauucuggccua

SEQ ID NO: 2337492 - RNA, 19 nt, Homo sapiens
  misc_RNA (1)...(19): siRNA sense strand
cugcaucaguuuggagaaa

SEQ ID NO: 2337493 - RNA, 19 nt, Homo sapiens
  misc_RNA (1)...(19): siRNA sense strand
gcguaagauuucuaaggau

SEQ ID NO: 2337494 - RNA, 19 nt, Homo sapiens
  misc_RNA (1)...(19): siRNA sense strand
agacuaucaaccuggaaua

SEQ ID NO: 2337495 - RNA, 19 nt, Homo sapiens
  misc_RNA (1)...(19): siRNA sense strand
gugcaaauuaugaaacaga

SEQ ID NO: 2337496 - RNA, 19 nt, Homo sapiens
  misc_RNA (1)...(19): siRNA sense strand
acuugugccuaaagauaaa

SEQ ID NO: 2337497 - RNA, 19 nt, Homo sapiens
  misc_RNA (1)...(19): siRNA sense strand
ccagauagacaagaggaaa

SEQ ID NO: 2337498 - RNA, 19 nt, Homo sapiens
  misc_RNA (1)...(19): siRNA sense strand
gggcaggaacagaaacaca

SEQ ID NO: 2337499 - RNA, 19 nt, Homo sapiens
  misc_RNA (1)...(19): siRNA sense strand
uaauauuguggcagggcaa

SEQ ID NO: 2337500 - RNA, 19 nt, Homo sapiens
  misc_RNA (1)...(19): siRNA sense strand
cuguagccaugcuggaaua

SEQ ID NO: 2337501 - RNA, 19 nt, Homo sapiens
  misc_RNA (1)...(19): siRNA sense strand
ucauguaacuggacgcgua

SEQ ID NO: 2337502 - RNA, 19 nt, Homo sapiens
  misc_RNA (1)...(19): siRNA sense strand
auuuaaaguucgggaugaa

SEQ ID NO: 2337503 - RNA, 19 nt, Homo sapiens
  misc_RNA (1)...(19): siRNA sense strand
cguaagauuucuaaggaug

SEQ ID NO: 2337504 - RNA, 19 nt, Homo sapiens
  misc_RNA (1)...(19): siRNA sense strand
ggguaaaauucaccaaaga

SEQ ID NO: 2337505 - RNA, 19 nt, Homo sapiens
  misc_RNA (1)...(19): siRNA sense strand
uguuaaacucggagggauc

SEQ ID NO: 2337506 - RNA, 19 nt, Homo sapiens
  misc_RNA (1)...(19): siRNA sense strand
gacagaaaggguuggaaga

SEQ ID NO: 2337507 - RNA, 19 nt, Homo sapiens
  misc_RNA (1)...(19): siRNA sense strand
ccaguauggaggacggaau

SEQ ID NO: 2337508 - RNA, 19 nt, Homo sapiens
  misc_RNA (1)...(19): siRNA sense strand
aggacaaagcaaugggcga

SEQ ID NO: 2337509 - RNA, 19 nt, Homo sapiens
  misc_RNA (1)...(19): siRNA sense strand
uggaauuagacaagccaau

SEQ ID NO: 2337510 - RNA, 19 nt, Homo sapiens
  misc_RNA (1)...(19): siRNA sense strand
gaggcagugcagagaagaa

SEQ ID NO: 2337511 - RNA, 19 nt, Homo sapiens
  misc_RNA (1)...(19): siRNA sense strand
ugguaagaagugcaaauua

SEQ ID NO: 2337512 - RNA, 19 nt, Homo sapiens
  misc_RNA (1)...(19): siRNA sense strand
ggacagaaaggguuggaag

SEQ ID NO: 2337513 - RNA, 19 nt, Homo sapiens
  misc_RNA (1)...(19): siRNA sense strand
caagaagcuaacagacaau

SEQ ID NO: 2337514 - RNA, 19 nt, Homo sapiens
  misc_RNA (1)...(19): siRNA sense strand
acagaaaggguuggaagaa

SEQ ID NO: 2337515 - RNA, 19 nt, Homo sapiens
  misc_RNA (1)...(19): siRNA sense strand
gaaaucaaaaugugggcua

SEQ ID NO: 2337516 - RNA, 19 nt, Homo sapiens
  misc_RNA (1)...(19): siRNA sense strand
aguguaugcggaagugaaa

SEQ ID NO: 2337517 - RNA, 19 nt, Homo sapiens
  misc_RNA (1)...(19): siRNA sense strand
ccucaaacucugucaaacu

SEQ ID NO: 2337518 - RNA, 19 nt, Homo sapiens
  misc_RNA (1)...(19): siRNA sense strand
ggacaugcgagggaaacaa

SEQ ID NO: 2337519 - RNA, 19 nt, Homo sapiens
  misc_RNA (1)...(19): siRNA sense strand
aagugaaacguguaggaga

SEQ ID NO: 2337520 - RNA, 19 nt, Homo sapiens
  misc_RNA (1)...(19): siRNA sense strand
cuuucaaggugucaaucaa

SEQ ID NO: 2337521 - RNA, 19 nt, Homo sapiens
  misc_RNA (1)...(19): siRNA sense strand
caguguaugcggaagugaa

SEQ ID NO: 2337522 - RNA, 19 nt, Homo sapiens
  misc_RNA (1)...(19): siRNA sense strand
caguaagaguucagagacc

SEQ ID NO: 2337523 - RNA, 19 nt, Homo sapiens
  misc_RNA (1)...(19): siRNA sense strand
aggagaucauccaggacuu

SEQ ID NO: 2337524 - RNA, 19 nt, Homo sapiens
  misc_RNA (1)...(19): siRNA sense strand
agaacaugacagugcugaa

SEQ ID NO: 2337525 - RNA, 19 nt, Homo sapiens
  misc_RNA (1)...(19): siRNA sense strand
aagcaaugggcgagaucca

SEQ ID NO: 2337526 - RNA, 19 nt, Homo sapiens
  misc_RNA (1)...(19): siRNA sense strand
gccaaacuguggagagaac

SEQ ID NO: 2337527 - RNA, 19 nt, Homo sapiens
  misc_RNA (1)...(19): siRNA sense strand
ccacuaugaucaaggcaac

SEQ ID NO: 2337528 - RNA, 19 nt, Homo sapiens
  misc_RNA (1)...(19): siRNA sense strand
gaaucggacaguagcaaca

SEQ ID NO: 2337529 - RNA, 19 nt, Homo sapiens
  misc_RNA (1)...(19): siRNA sense strand
agugaaacguguaggagac

SEQ ID NO: 2337530 - RNA, 19 nt, Homo sapiens
  misc_RNA (1)...(19): siRNA sense strand
gagacacacuuuuggguau

SEQ ID NO: 2337531 - RNA, 19 nt, Homo sapiens
  misc_RNA (1)...(19): siRNA sense strand
ggagagaacaguagcgcag

SEQ ID NO: 2337532 - RNA, 19 nt, Homo sapiens
  misc_RNA (1)...(19): siRNA sense strand
gguagcauuuagagccaga

SEQ ID NO: 2337533 - RNA, 19 nt, Homo sapiens
  misc_RNA (1)...(19): siRNA sense strand
acugauucucaucggguaa

SEQ ID NO: 2337534 - RNA, 19 nt, Homo sapiens
  misc_RNA (1)...(19): siRNA sense strand
acuacuagcaauucgagaa

SEQ ID NO: 2337535 - RNA, 19 nt, Homo sapiens
  misc_RNA (1)...(19): siRNA sense strand
aagucacguuucaggacaa

SEQ ID NO: 2337536 - RNA, 19 nt, Homo sapiens
  misc_RNA (1)...(19): siRNA sense strand
ccaagauaccuuacgcaca

SEQ ID NO: 2337537 - RNA, 19 nt, Homo sapiens
  misc_RNA (1)...(19): siRNA sense strand
guguucaagucaagaaugu

SEQ ID NO: 2337538 - RNA, 19 nt, Homo sapiens
  misc_RNA (1)...(19): siRNA sense strand
aggcagugcagagaagaaa

SEQ ID NO: 2337539 - RNA, 19 nt, Homo sapiens
  misc_RNA (1)...(19): siRNA sense strand
gggcaguuuaggcagguau

SEQ ID NO: 2337540 - RNA, 19 nt, Homo sapiens
  misc_RNA (1)...(19): siRNA sense strand
cagauagacaagaggaaau

SEQ ID NO: 2337541 - RNA, 19 nt, Homo sapiens
  misc_RNA (1)...(19): siRNA sense strand
cugucaaacuugugccuaa

SEQ ID NO: 2337542 - RNA, 19 nt, Homo sapiens
  misc_RNA (1)...(19): siRNA sense strand
gaagaaauauugaaggguu

SEQ ID NO: 2337543 - RNA, 19 nt, Homo sapiens
  misc_RNA (1)...(19): siRNA sense strand
gguuggaagaaguggcaau

SEQ ID NO: 2337544 - RNA, 19 nt, Homo sapiens
  misc_RNA (1)...(19): siRNA sense strand
cgauguaucaagaagcuaa

SEQ ID NO: 2337545 - RNA, 19 nt, Homo sapiens
  misc_RNA (1)...(19): siRNA sense strand
uggaacaaugagacggaaa

SEQ ID NO: 2337546 - RNA, 19 nt, Homo sapiens
  misc_RNA (1)...(19): siRNA sense strand
cggccaaacuguggagaga

SEQ ID NO: 2337547 - RNA, 19 nt, Homo sapiens
  misc_RNA (1)...(19): siRNA sense strand
gaacacauauucuggccua

SEQ ID NO: 2337548 - RNA, 19 nt, Homo sapiens
  misc_RNA (1)...(19): siRNA sense strand
cugcaucaguuuggagaaa

SEQ ID NO: 2337549 - RNA, 19 nt, Homo sapiens
  misc_RNA (1)...(19): siRNA sense strand
gcguaagauuucuaaggau

SEQ ID NO: 2337550 - RNA, 19 nt, Homo sapiens
  misc_RNA (1)...(19): siRNA sense strand
agacuaucaaccuggaaua

SEQ ID NO: 2337551 - RNA, 19 nt, Homo sapiens
  misc_RNA (1)...(19): siRNA sense strand
gugcaaauuaugaaacaga

SEQ ID NO: 2337552 - RNA, 19 nt, Homo sapiens
  misc_RNA (1)...(19): siRNA sense strand
acuugugccuaaagauaaa

SEQ ID NO: 2337553 - RNA, 19 nt, Homo sapiens
  misc_RNA (1)...(19): siRNA sense strand
ccagauagacaagaggaaa

SEQ ID NO: 2337554 - RNA, 19 nt, Homo sapiens
  misc_RNA (1)...(19): siRNA sense strand
gggcaggaacagaaacaca

SEQ ID NO: 2337555 - RNA, 19 nt, Homo sapiens
  misc_RNA (1)...(19): siRNA sense strand
uaauauuguggcagggcaa

SEQ ID NO: 2337556 - RNA, 19 nt, Homo sapiens
  misc_RNA (1)...(19): siRNA sense strand
cuguagccaugcuggaaua

SEQ ID NO: 2337557 - RNA, 19 nt, Homo sapiens
  misc_RNA (1)...(19): siRNA sense strand
ucauguaacuggacgcgua

SEQ ID NO: 2337558 - RNA, 19 nt, Homo sapiens
  misc_RNA (1)...(19): siRNA sense strand
auuuaaaguucgggaugaa

SEQ ID NO: 2337559 - RNA, 19 nt, Homo sapiens
  misc_RNA (1)...(19): siRNA sense strand
cguaagauuucuaaggaug

SEQ ID NO: 2337560 - RNA, 19 nt, Homo sapiens
  misc_RNA (1)...(19): siRNA sense strand
ggguaaaauucaccaaaga

SEQ ID NO: 2337561 - RNA, 19 nt, Homo sapiens
  misc_RNA (1)...(19): siRNA sense strand
uguuaaacucggagggauc

SEQ ID NO: 2337562 - RNA, 19 nt, Homo sapiens
  misc_RNA (1)...(19): siRNA sense strand
gacagaaaggguuggaaga

SEQ ID NO: 2337563 - RNA, 19 nt, Homo sapiens
  misc_RNA (1)...(19): siRNA sense strand
ccaguauggaggacggaau

SEQ ID NO: 2337564 - RNA, 19 nt, Homo sapiens
  misc_RNA (1)...(19): siRNA sense strand
aggacaaagcaaugggcga

SEQ ID NO: 2337565 - RNA, 19 nt, Homo sapiens
  misc_RNA (1)...(19): siRNA sense strand
gaggcagugcagagaagaa

SEQ ID NO: 2337566 - RNA, 19 nt, Homo sapiens
  misc_RNA (1)...(19): siRNA sense strand
ugguaagaagugcaaauua

SEQ ID NO: 2337567 - RNA, 19 nt, Homo sapiens
  misc_RNA (1)...(19): siRNA sense strand
ggacagaaaggguuggaag

SEQ ID NO: 2337568 - RNA, 19 nt, Homo sapiens
  misc_RNA (1)...(19): siRNA sense strand
caagaagcuaacagacaau

SEQ ID NO: 2337569 - RNA, 19 nt, Homo sapiens
  misc_RNA (1)...(19): siRNA sense strand
acagaaaggguuggaagaa

SEQ ID NO: 2337570 - RNA, 19 nt, Homo sapiens
  misc_RNA (1)...(19): siRNA sense strand
gaaaucaaaaugugggcua

SEQ ID NO: 2337571 - RNA, 19 nt, Homo sapiens
  misc_RNA (1)...(19): siRNA sense strand
aguguaugcggaagugaaa

SEQ ID NO: 2337572 - RNA, 19 nt, Homo sapiens
  misc_RNA (1)...(19): siRNA sense strand
ccucaaacucugucaaacu

SEQ ID NO: 2337573 - RNA, 19 nt, Homo sapiens
  misc_RNA (1)...(19): siRNA sense strand
ggacaugcgagggaaacaa

SEQ ID NO: 2337574 - RNA, 19 nt, Homo sapiens
  misc_RNA (1)...(19): siRNA sense strand
aagugaaacguguaggaga

SEQ ID NO: 2337575 - RNA, 19 nt, Homo sapiens
  misc_RNA (1)...(19): siRNA sense strand
caguguaugcggaagugaa

SEQ ID NO: 2337576 - RNA, 19 nt, Homo sapiens
  misc_RNA (1)...(19): siRNA sense strand
caguaagaguucagagacc

SEQ ID NO: 2337577 - RNA, 19 nt, Homo sapiens
  misc_RNA (1)...(19): siRNA sense strand
aggagaucauccaggacuu

SEQ ID NO: 2337578 - RNA, 19 nt, Homo sapiens
  misc_RNA (1)...(19): siRNA sense strand
agaacaugacagugcugaa

SEQ ID NO: 2337579 - RNA, 19 nt, Homo sapiens
  misc_RNA (1)...(19): siRNA sense strand
aagcaaugggcgagaucca

SEQ ID NO: 2337580 - RNA, 19 nt, Homo sapiens
  misc_RNA (1)...(19): siRNA sense strand
gccaaacuguggagagaac

SEQ ID NO: 2337581 - RNA, 19 nt, Homo sapiens
  misc_RNA (1)...(19): siRNA sense strand
ccacuaugaucaaggcaac

SEQ ID NO: 2337582 - RNA, 19 nt, Homo sapiens
  misc_RNA (1)...(19): siRNA sense strand
gaaucggacaguagcaaca

SEQ ID NO: 2337583 - RNA, 19 nt, Homo sapiens
  misc_RNA (1)...(19): siRNA sense strand
agugaaacguguaggagac

SEQ ID NO: 2337584 - RNA, 19 nt, Homo sapiens
  misc_RNA (1)...(19): siRNA sense strand
gagacacacuuuuggguau

SEQ ID NO: 2337585 - RNA, 19 nt, Homo sapiens
  misc_RNA (1)...(19): siRNA sense strand
ggagagaacaguagcgcag

SEQ ID NO: 2337586 - RNA, 19 nt, Homo sapiens
  misc_RNA (1)...(19): siRNA sense strand
gguagcauuuagagccaga

SEQ ID NO: 2337587 - RNA, 19 nt, Homo sapiens
  misc_RNA (1)...(19): siRNA sense strand
acugauucucaucggguaa

SEQ ID NO: 2337588 - RNA, 19 nt, Homo sapiens
  misc_RNA (1)...(19): siRNA sense strand
acuacuagcaauucgagaa

SEQ ID NO: 2337589 - RNA, 19 nt, Homo sapiens
  misc_RNA (1)...(19): siRNA sense strand
aagucacguuucaggacaa

SEQ ID NO: 2337590 - RNA, 19 nt, Homo sapiens
  misc_RNA (1)...(19): siRNA sense strand
ccaagauaccuuacgcaca

SEQ ID NO: 2337591 - RNA, 19 nt, Homo sapiens
  misc_RNA (1)...(19): siRNA sense strand
guguucaagucaagaaugu

SEQ ID NO: 2337592 - RNA, 19 nt, Homo sapiens
  misc_RNA (1)...(19): siRNA sense strand
aggcagugcagagaagaaa

SEQ ID NO: 2337593 - RNA, 19 nt, Homo sapiens
  misc_RNA (1)...(19): siRNA sense strand
gggcaguuuaggcagguau

SEQ ID NO: 2337594 - RNA, 19 nt, Homo sapiens
  misc_RNA (1)...(19): siRNA sense strand
accagauagacaagaggaa

SEQ ID NO: 2337595 - RNA, 19 nt, Homo sapiens
  misc_RNA (1)...(19): siRNA sense strand
caagaggaaauuagcagau

SEQ ID NO: 2337596 - RNA, 19 nt, Homo sapiens
  misc_RNA (1)...(19): siRNA sense strand
gcacaaagacagaaggauc

SEQ ID NO: 2337597 - RNA, 19 nt, Homo sapiens
  misc_RNA (1)...(19): siRNA sense strand
cguaaguacccguugggaa

SEQ ID NO: 2337598 - RNA, 19 nt, Homo sapiens
  misc_RNA (1)...(19): siRNA sense strand
ccuaauauagucaggaaaa

SEQ ID NO: 2337599 - RNA, 19 nt, Homo sapiens
  misc_RNA (1)...(19): siRNA sense strand
agugucaagaugaaggaua

SEQ ID NO: 2337600 - RNA, 19 nt, Homo sapiens
  misc_RNA (1)...(19): siRNA sense strand
aagauggaaccaaggaaau

SEQ ID NO: 2337601 - RNA, 19 nt, Homo sapiens
  misc_RNA (1)...(19): siRNA sense strand
gaauaaagcacaaagacag

SEQ ID NO: 2337602 - RNA, 19 nt, Homo sapiens
  misc_RNA (1)...(19): siRNA sense strand
auucagaagcagauugaga

SEQ ID NO: 2337603 - RNA, 19 nt, Homo sapiens
  misc_RNA (1)...(19): siRNA sense strand
guaaguacccguugggaag

SEQ ID NO: 2337604 - RNA, 19 nt, Homo sapiens
  misc_RNA (1)...(19): siRNA sense strand
agcuugaguuacaggaaaa

SEQ ID NO: 2337605 - RNA, 19 nt, Homo sapiens
  misc_RNA (1)...(19): siRNA sense strand
aaagaaaagguuccggaaa

SEQ ID NO: 2337606 - RNA, 19 nt, Homo sapiens
  misc_RNA (1)...(19): siRNA sense strand
augcaguuguugaaguaga

SEQ ID NO: 2337607 - RNA, 19 nt, Homo sapiens
  misc_RNA (1)...(19): siRNA sense strand
uggaaauucagaagcagau

SEQ ID NO: 2337608 - RNA, 19 nt, Homo sapiens
  misc_RNA (1)...(19): siRNA sense strand
caaagaaaggagaagggaa

SEQ ID NO: 2337609 - RNA, 19 nt, Homo sapiens
  misc_RNA (1)...(19): siRNA sense strand
agggaaaagagcagcaaaa

SEQ ID NO: 2337610 - RNA, 19 nt, Homo sapiens
  misc_RNA (1)...(19): siRNA sense strand
cguggaaaggagaaaccaa

SEQ ID NO: 2337611 - RNA, 19 nt, Homo sapiens
  misc_RNA (1)...(19): siRNA sense strand
gugaacugcccuuggccaa

SEQ ID NO: 2337612 - RNA, 19 nt, Homo sapiens
  misc_RNA (1)...(19): siRNA sense strand
agucuaugaaaguggugaa

SEQ ID NO: 2337613 - RNA, 19 nt, Homo sapiens
  misc_RNA (1)...(19): siRNA sense strand
caaagaaaggagaagggaa

SEQ ID NO: 2337614 - RNA, 19 nt, Homo sapiens
  misc_RNA (1)...(19): siRNA sense strand
agggaaaagagcagcaaaa

SEQ ID NO: 2337615 - RNA, 19 nt, Homo sapiens
  misc_RNA (1)...(19): siRNA sense strand
cguggaaaggagaaaccaa

SEQ ID NO: 2337616 - RNA, 19 nt, Homo sapiens
  misc_RNA (1)...(19): siRNA sense strand
gugaacugcccuuggccaa

SEQ ID NO: 2337617 - RNA, 19 nt, Homo sapiens
  misc_RNA (1)...(19): siRNA sense strand
agucuaugaaaguggugaa

SEQ ID NO: 2337618 - RNA, 19 nt, Homo sapiens
  misc_RNA (1)...(19): siRNA sense strand
gcucagugauugcggacgu

SEQ ID NO: 2337619 - RNA, 19 nt, Homo sapiens
  misc_RNA (1)...(19): siRNA sense strand
ugauaaaguugaaggaagg

SEQ ID NO: 2337620 - RNA, 19 nt, Homo sapiens
  misc_RNA (1)...(19): siRNA sense strand
uugauaaaguugaaggaag

SEQ ID NO: 2337621 - RNA, 19 nt, Homo sapiens
  misc_RNA (1)...(19): siRNA sense strand
gcuuugaauacgugauguu

SEQ ID NO: 2337622 - RNA, 19 nt, Homo sapiens
  misc_RNA (1)...(19): siRNA sense strand
acgugauguucuacaauga

SEQ ID NO: 2337623 - RNA, 19 nt, Homo sapiens
  misc_RNA (1)...(19): siRNA sense strand
aggaagaggaggaggagga

SEQ ID NO: 2337624 - RNA, 19 nt, Homo sapiens
  misc_RNA (1)...(19): siRNA sense strand
acaaacagaucauccgcaa

SEQ ID NO: 2337625 - RNA, 19 nt, Homo sapiens
  misc_RNA (1)...(19): siRNA sense strand
aggaggaggaagaggagga

SEQ ID NO: 2337626 - RNA, 19 nt, Homo sapiens
  misc_RNA (1)...(19): siRNA sense strand
aggaggaagaggaggagga

SEQ ID NO: 2337627 - RNA, 19 nt, Homo sapiens
  misc_RNA (1)...(19): siRNA sense strand
gcgaggaacagaagugcga

SEQ ID NO: 2337628 - RNA, 19 nt, Homo sapiens
  misc_RNA (1)...(19): siRNA sense strand
gugcaaggccugaaccuga

SEQ ID NO: 2337629 - RNA, 19 nt, Homo sapiens
  misc_RNA (1)...(19): siRNA sense strand
gcuggaggucugcgaggaa

SEQ ID NO: 2337630 - RNA, 19 nt, Homo sapiens
  misc_RNA (1)...(19): siRNA sense strand
ccucuaagaugaaggagac

SEQ ID NO: 2337631 - RNA, 19 nt, Homo sapiens
  misc_RNA (1)...(19): siRNA sense strand
cuaagaugaaggagaccau

SEQ ID NO: 2337632 - RNA, 19 nt, Homo sapiens
  misc_RNA (1)...(19): siRNA sense strand
ccaaaaugccagaggcgga

SEQ ID NO: 2337633 - RNA, 19 nt, Homo sapiens
  misc_RNA (1)...(19): siRNA sense strand
ccgaggaggaggaagagga

SEQ ID NO: 2337634 - RNA, 19 nt, Homo sapiens
  misc_RNA (1)...(19): siRNA sense strand
aggaggaggaggaggugga

SEQ ID NO: 2337635 - RNA, 19 nt, Homo sapiens
  misc_RNA (1)...(19): siRNA sense strand
gccucuaagaugaaggaga

SEQ ID NO: 2337636 - RNA, 19 nt, Homo sapiens
  misc_RNA (1)...(19): siRNA sense strand
acuucaaaugugugcagaa

SEQ ID NO: 2337637 - RNA, 19 nt, Homo sapiens
  misc_RNA (1)...(19): siRNA sense strand
ugaacuaccuggaccgcuu

SEQ ID NO: 2337638 - RNA, 19 nt, Homo sapiens
  misc_RNA (1)...(19): siRNA sense strand
aggcggaggagaacaaaca

SEQ ID NO: 2337639 - RNA, 19 nt, Homo sapiens
  misc_RNA (1)...(19): siRNA sense strand
aggagaacaaacagaucau

SEQ ID NO: 2337640 - RNA, 19 nt, Homo sapiens
  misc_RNA (1)...(19): siRNA sense strand
gugaagaccccgaaggaaa

SEQ ID NO: 2337641 - RNA, 19 nt, Homo sapiens
  misc_RNA (1)...(19): siRNA sense strand
augucaaacccuagagcaa

SEQ ID NO: 2337642 - RNA, 19 nt, Homo sapiens
  misc_RNA (1)...(19): siRNA sense strand
cgaaggaaaaggaggaauu

SEQ ID NO: 2337643 - RNA, 19 nt, Homo sapiens
  misc_RNA (1)...(19): siRNA sense strand
agcaguugauacagagaaa

SEQ ID NO: 2337644 - RNA, 19 nt, Homo sapiens
  misc_RNA (1)...(19): siRNA sense strand
guugauauuugcuggaaaa

SEQ ID NO: 2337645 - RNA, 19 nt, Homo sapiens
  misc_RNA (1)...(19): siRNA sense strand
gcaaacaaauacagcugga

SEQ ID NO: 2337646 - RNA, 19 nt, Homo sapiens
  misc_RNA (1)...(19): siRNA sense strand
ggcucuugcuggaguaaau

SEQ ID NO: 2337647 - RNA, 19 nt, Homo sapiens
  misc_RNA (1)...(19): siRNA sense strand
uguugauauuugcuggaaa

SEQ ID NO: 2337648 - RNA, 19 nt, Homo sapiens
  misc_RNA (1)...(19): siRNA sense strand
uggaauucaugauggacuu

SEQ ID NO: 2337649 - RNA, 19 nt, Homo sapiens
  misc_RNA (1)...(19): siRNA sense strand
caaugaugcaggagaugau

SEQ ID NO: 2337650 - RNA, 19 nt, Homo sapiens
  misc_RNA (1)...(19): siRNA sense strand
ugagcaaccuagaaagcau

SEQ ID NO: 2337651 - RNA, 19 nt, Homo sapiens
  misc_RNA (1)...(19): siRNA sense strand
cugaaaugaugguccagau

SEQ ID NO: 2337652 - RNA, 19 nt, Homo sapiens
  misc_RNA (1)...(19): siRNA sense strand
gcuuuaaggcgcauguaca

SEQ ID NO: 2337653 - RNA, 19 nt, Homo sapiens
  misc_RNA (1)...(19): siRNA sense strand
ugaccugaugagacaguua

SEQ ID NO: 2337654 - RNA, 19 nt, Homo sapiens
  misc_RNA (1)...(19): siRNA sense strand
agagcaguuuggugguaau

SEQ ID NO: 2337655 - RNA, 19 nt, Homo sapiens
  misc_RNA (1)...(19): siRNA sense strand
gggccucaucccaggguuu

SEQ ID NO: 2337656 - RNA, 19 nt, Homo sapiens
  misc_RNA (1)...(19): siRNA sense strand
gacaguuaauuauggccaa

SEQ ID NO: 2337657 - RNA, 19 nt, Homo sapiens
  misc_RNA (1)...(19): siRNA sense strand
aggaagcacuggaggcucu

SEQ ID NO: 2337658 - RNA, 19 nt, Homo sapiens
  misc_RNA (1)...(19): siRNA sense strand
acuaauggaucuaacgcca

SEQ ID NO: 2337659 - RNA, 19 nt, Homo sapiens
  misc_RNA (1)...(19): siRNA sense strand
ucuaauagcaacaggaggu

SEQ ID NO: 2337660 - RNA, 19 nt, Homo sapiens
  misc_RNA (1)...(19): siRNA sense strand
auccagauauaaugagaca

SEQ ID NO: 2337661 - RNA, 19 nt, Homo sapiens
  misc_RNA (1)...(19): siRNA sense strand
acaaauaacugaaaaccca

SEQ ID NO: 2337662 - RNA, 19 nt, Homo sapiens
  misc_RNA (1)...(19): siRNA sense strand
ggaucauucagcucagcaa

SEQ ID NO: 2337663 - RNA, 19 nt, Homo sapiens
  misc_RNA (1)...(19): siRNA sense strand
ccuaauaguaacucuacau

SEQ ID NO: 2337664 - RNA, 19 nt, Homo sapiens
  misc_RNA (1)...(19): siRNA sense strand
aggaccgagcuuugagcaa

SEQ ID NO: 2337665 - RNA, 19 nt, Homo sapiens
  misc_RNA (1)...(19): siRNA sense strand
aggccuuguuacagauuca

SEQ ID NO: 2337666 - RNA, 19 nt, Homo sapiens
  misc_RNA (1)...(19): siRNA sense strand
acuggaggcucuucgggaa

SEQ ID NO: 2337667 - RNA, 19 nt, Homo sapiens
  misc_RNA (1)...(19): siRNA sense strand
aagucagauuucagcaaca

SEQ ID NO: 2337668 - RNA, 19 nt, Homo sapiens
  misc_RNA (1)...(19): siRNA sense strand
gugaagaccccgaaggaaa

SEQ ID NO: 2337669 - RNA, 19 nt, Homo sapiens
  misc_RNA (1)...(19): siRNA sense strand
augucaaacccuagagcaa

SEQ ID NO: 2337670 - RNA, 19 nt, Homo sapiens
  misc_RNA (1)...(19): siRNA sense strand
cgaaggaaaaggaggaauu

SEQ ID NO: 2337671 - RNA, 19 nt, Homo sapiens
  misc_RNA (1)...(19): siRNA sense strand
agcaguugauacagagaaa

SEQ ID NO: 2337672 - RNA, 19 nt, Homo sapiens
  misc_RNA (1)...(19): siRNA sense strand
guugauauuugcuggaaaa

SEQ ID NO: 2337673 - RNA, 19 nt, Homo sapiens
  misc_RNA (1)...(19): siRNA sense strand
gcaaacaaauacagcugga

SEQ ID NO: 2337674 - RNA, 19 nt, Homo sapiens
  misc_RNA (1)...(19): siRNA sense strand
ggcucuugcuggaguaaau

SEQ ID NO: 2337675 - RNA, 19 nt, Homo sapiens
  misc_RNA (1)...(19): siRNA sense strand
uguugauauuugcuggaaa

SEQ ID NO: 2337676 - RNA, 19 nt, Homo sapiens
  misc_RNA (1)...(19): siRNA sense strand
uggaauucaugauggacuu

SEQ ID NO: 2337677 - RNA, 19 nt, Homo sapiens
  misc_RNA (1)...(19): siRNA sense strand
caaugaugcaggagaugau

SEQ ID NO: 2337678 - RNA, 19 nt, Homo sapiens
  misc_RNA (1)...(19): siRNA sense strand
ugagcaaccuagaaagcau

SEQ ID NO: 2337679 - RNA, 19 nt, Homo sapiens
  misc_RNA (1)...(19): siRNA sense strand
cugaaaugaugguccagau

SEQ ID NO: 2337680 - RNA, 19 nt, Homo sapiens
  misc_RNA (1)...(19): siRNA sense strand
gcuuuaaggcgcauguaca

SEQ ID NO: 2337681 - RNA, 19 nt, Homo sapiens
  misc_RNA (1)...(19): siRNA sense strand
ugaccugaugagacaguua

SEQ ID NO: 2337682 - RNA, 19 nt, Homo sapiens
  misc_RNA (1)...(19): siRNA sense strand
agagcaguuuggugguaau

SEQ ID NO: 2337683 - RNA, 19 nt, Homo sapiens
  misc_RNA (1)...(19): siRNA sense strand
gggccucaucccaggguuu

SEQ ID NO: 2337684 - RNA, 19 nt, Homo sapiens
  misc_RNA (1)...(19): siRNA sense strand
gacaguuaauuauggccaa

SEQ ID NO: 2337685 - RNA, 19 nt, Homo sapiens
  misc_RNA (1)...(19): siRNA sense strand
aggaagcacuggaggcucu

SEQ ID NO: 2337686 - RNA, 19 nt, Homo sapiens
  misc_RNA (1)...(19): siRNA sense strand
acuaauggaucuaacgcca

SEQ ID NO: 2337687 - RNA, 19 nt, Homo sapiens
  misc_RNA (1)...(19): siRNA sense strand
ucuaauagcaacaggaggu

SEQ ID NO: 2337688 - RNA, 19 nt, Homo sapiens
  misc_RNA (1)...(19): siRNA sense strand
auccagauauaaugagaca

SEQ ID NO: 2337689 - RNA, 19 nt, Homo sapiens
  misc_RNA (1)...(19): siRNA sense strand
acaaauaacugaaaaccca

SEQ ID NO: 2337690 - RNA, 19 nt, Homo sapiens
  misc_RNA (1)...(19): siRNA sense strand
ggaucauucagcucagcaa

SEQ ID NO: 2337691 - RNA, 19 nt, Homo sapiens
  misc_RNA (1)...(19): siRNA sense strand
ccuaauaguaacucuacau

SEQ ID NO: 2337692 - RNA, 19 nt, Homo sapiens
  misc_RNA (1)...(19): siRNA sense strand
aggaccgagcuuugagcaa

SEQ ID NO: 2337693 - RNA, 19 nt, Homo sapiens
  misc_RNA (1)...(19): siRNA sense strand
aggccuuguuacagauuca

SEQ ID NO: 2337694 - RNA, 19 nt, Homo sapiens
  misc_RNA (1)...(19): siRNA sense strand
aagucagauuucagcaaca

SEQ ID NO: 2337695 - RNA, 19 nt, Homo sapiens
  misc_RNA (1)...(19): siRNA sense strand
ccaccauuagagagagaaa

SEQ ID NO: 2337696 - RNA, 19 nt, Homo sapiens
  misc_RNA (1)...(19): siRNA sense strand
gugugauacuggauggcaa

SEQ ID NO: 2337697 - RNA, 19 nt, Homo sapiens
  misc_RNA (1)...(19): siRNA sense strand
gagaacuugcagaggacaa

SEQ ID NO: 2337698 - RNA, 19 nt, Homo sapiens
  misc_RNA (1)...(19): siRNA sense strand
gcaaauaccagcagcagca

SEQ ID NO: 2337699 - RNA, 19 nt, Homo sapiens
  misc_RNA (1)...(19): siRNA sense strand
acgcaagguucuaggaaag

SEQ ID NO: 2337700 - RNA, 19 nt, Homo sapiens
  misc_RNA (1)...(19): siRNA sense strand
gggcugaaguagaaugcca

SEQ ID NO: 2337701 - RNA, 19 nt, Homo sapiens
  misc_RNA (1)...(19): siRNA sense strand
gggaaacucugaaugccaa

SEQ ID NO: 2337702 - RNA, 19 nt, Homo sapiens
  misc_RNA (1)...(19): siRNA sense strand
aguauucuccguagggaaa

SEQ ID NO: 2337703 - RNA, 19 nt, Homo sapiens
  misc_RNA (1)...(19): siRNA sense strand
agcuucaguuugugaguaa

SEQ ID NO: 2337704 - RNA, 19 nt, Homo sapiens
  misc_RNA (1)...(19): siRNA sense strand
cugguauacugcagccaaa

SEQ ID NO: 2337705 - RNA, 19 nt, Homo sapiens
  misc_RNA (1)...(19): siRNA sense strand
acucugaaugccaaagaaa

SEQ ID NO: 2337706 - RNA, 19 nt, Homo sapiens
  misc_RNA (1)...(19): siRNA sense strand
ggacaaagaugaaauccgu

SEQ ID NO: 2337707 - RNA, 19 nt, Homo sapiens
  misc_RNA (1)...(19): siRNA sense strand
aguagaaugccaacgacaa

SEQ ID NO: 2337708 - RNA, 19 nt, Homo sapiens
  misc_RNA (1)...(19): siRNA sense strand
agauugaacuuaagcggca

SEQ ID NO: 2337709 - RNA, 19 nt, Homo sapiens
  misc_RNA (1)...(19): siRNA sense strand
cguugagcauugaaaauaa

SEQ ID NO: 2337710 - RNA, 19 nt, Homo sapiens
  misc_RNA (1)...(19): siRNA sense strand
ccguauaccagaugucgaa

SEQ ID NO: 2337711 - RNA, 19 nt, Homo sapiens
  misc_RNA (1)...(19): siRNA sense strand
agaaguucaguguggcaaa

SEQ ID NO: 2337712 - RNA, 19 nt, Homo sapiens
  misc_RNA (1)...(19): siRNA sense strand
cagaggacaaagaugaaau

SEQ ID NO: 2337713 - RNA, 19 nt, Homo sapiens
  misc_RNA (1)...(19): siRNA sense strand
agaagaagauggcugcuga

SEQ ID NO: 2337714 - RNA, 19 nt, Homo sapiens
  misc_RNA (1)...(19): siRNA sense strand
cgauauugacuuccagaca

SEQ ID NO: 2337715 - RNA, 19 nt, Homo sapiens
  misc_RNA (1)...(19): siRNA sense strand
uugaauacccagugcagau

SEQ ID NO: 2337716 - RNA, 19 nt, Homo sapiens
  misc_RNA (1)...(19): siRNA sense strand
cggagaacuugcagaggac

SEQ ID NO: 2337717 - RNA, 19 nt, Homo sapiens
  misc_RNA (1)...(19): siRNA sense strand
agaaaugcgaugauguuca

SEQ ID NO: 2337718 - RNA, 19 nt, Homo sapiens
  misc_RNA (1)...(19): siRNA sense strand
ggaaacucugaaugccaaa

SEQ ID NO: 2337719 - RNA, 19 nt, Homo sapiens
  misc_RNA (1)...(19): siRNA sense strand
cagugcagaucgagccaga

SEQ ID NO: 2337720 - RNA, 19 nt, Homo sapiens
  misc_RNA (1)...(19): siRNA sense strand
agaagauggcugcugauau

SEQ ID NO: 2337721 - RNA, 19 nt, Homo sapiens
  misc_RNA (1)...(19): siRNA sense strand
aaguauucuccguagggaa

SEQ ID NO: 2337722 - RNA, 19 nt, Homo sapiens
  misc_RNA (1)...(19): siRNA sense strand
cgguaaagaacagguccaa

SEQ ID NO: 2337723 - RNA, 19 nt, Homo sapiens
  misc_RNA (1)...(19): siRNA sense strand
cagcaauaccuuucccgua

SEQ ID NO: 2337724 - RNA, 19 nt, Homo sapiens
  misc_RNA (1)...(19): siRNA sense strand
auaaugauuugauggcaga

SEQ ID NO: 2337725 - RNA, 19 nt, Homo sapiens
  misc_RNA (1)...(19): siRNA sense strand
acggagaacuugcagagga

SEQ ID NO: 2337726 - RNA, 19 nt, Homo sapiens
  misc_RNA (1)...(19): siRNA sense strand
ccaccauuagagagagaaa

SEQ ID NO: 2337727 - RNA, 19 nt, Homo sapiens
  misc_RNA (1)...(19): siRNA sense strand
gugugauacuggauggcaa

SEQ ID NO: 2337728 - RNA, 19 nt, Homo sapiens
  misc_RNA (1)...(19): siRNA sense strand
gagaacuugcagaggacaa

SEQ ID NO: 2337729 - RNA, 19 nt, Homo sapiens
  misc_RNA (1)...(19): siRNA sense strand
acgcaagguucuaggaaag

SEQ ID NO: 2337730 - RNA, 19 nt, Homo sapiens
  misc_RNA (1)...(19): siRNA sense strand
gggcugaaguagaaugcca

SEQ ID NO: 2337731 - RNA, 19 nt, Homo sapiens
  misc_RNA (1)...(19): siRNA sense strand
gggaaacucugaaugccaa

SEQ ID NO: 2337732 - RNA, 19 nt, Homo sapiens
  misc_RNA (1)...(19): siRNA sense strand
aguauucuccguagggaaa

SEQ ID NO: 2337733 - RNA, 19 nt, Homo sapiens
  misc_RNA (1)...(19): siRNA sense strand
agcuucaguuugugaguaa

SEQ ID NO: 2337734 - RNA, 19 nt, Homo sapiens
  misc_RNA (1)...(19): siRNA sense strand
cugguauacugcagccaaa

SEQ ID NO: 2337735 - RNA, 19 nt, Homo sapiens
  misc_RNA (1)...(19): siRNA sense strand
acucugaaugccaaagaaa

SEQ ID NO: 2337736 - RNA, 19 nt, Homo sapiens
  misc_RNA (1)...(19): siRNA sense strand
ggacaaagaugaaauccgu

SEQ ID NO: 2337737 - RNA, 19 nt, Homo sapiens
  misc_RNA (1)...(19): siRNA sense strand
aguagaaugccaacgacaa

SEQ ID NO: 2337738 - RNA, 19 nt, Homo sapiens
  misc_RNA (1)...(19): siRNA sense strand
agauugaacuuaagcggca

SEQ ID NO: 2337739 - RNA, 19 nt, Homo sapiens
  misc_RNA (1)...(19): siRNA sense strand
cguugagcauugaaaauaa

SEQ ID NO: 2337740 - RNA, 19 nt, Homo sapiens
  misc_RNA (1)...(19): siRNA sense strand
ccguauaccagaugucgaa

SEQ ID NO: 2337741 - RNA, 19 nt, Homo sapiens
  misc_RNA (1)...(19): siRNA sense strand
agaaguucaguguggcaaa

SEQ ID NO: 2337742 - RNA, 19 nt, Homo sapiens
  misc_RNA (1)...(19): siRNA sense strand
cagaggacaaagaugaaau

SEQ ID NO: 2337743 - RNA, 19 nt, Homo sapiens
  misc_RNA (1)...(19): siRNA sense strand
cgauauugacuuccagaca

SEQ ID NO: 2337744 - RNA, 19 nt, Homo sapiens
  misc_RNA (1)...(19): siRNA sense strand
uugaauacccagugcagau

SEQ ID NO: 2337745 - RNA, 19 nt, Homo sapiens
  misc_RNA (1)...(19): siRNA sense strand
cggagaacuugcagaggac

SEQ ID NO: 2337746 - RNA, 19 nt, Homo sapiens
  misc_RNA (1)...(19): siRNA sense strand
agaaaugcgaugauguuca

SEQ ID NO: 2337747 - RNA, 19 nt, Homo sapiens
  misc_RNA (1)...(19): siRNA sense strand
ggaaacucugaaugccaaa

SEQ ID NO: 2337748 - RNA, 19 nt, Homo sapiens
  misc_RNA (1)...(19): siRNA sense strand
cagugcagaucgagccaga

SEQ ID NO: 2337749 - RNA, 19 nt, Homo sapiens
  misc_RNA (1)...(19): siRNA sense strand
aaguauucuccguagggaa

SEQ ID NO: 2337750 - RNA, 19 nt, Homo sapiens
  misc_RNA (1)...(19): siRNA sense strand
cagcaauaccuuucccgua

SEQ ID NO: 2337751 - RNA, 19 nt, Homo sapiens
  misc_RNA (1)...(19): siRNA sense strand
auaaugauuugauggcaga

SEQ ID NO: 2337752 - RNA, 19 nt, Homo sapiens
  misc_RNA (1)...(19): siRNA sense strand
acggagaacuugcagagga

SEQ ID NO: 2337753 - RNA, 19 nt, Homo sapiens
  misc_RNA (1)...(19): siRNA sense strand
gcugagguuagaagggaaa

SEQ ID NO: 2337754 - RNA, 19 nt, Homo sapiens
  misc_RNA (1)...(19): siRNA sense strand
ggcugagguuagaagggaa

SEQ ID NO: 2337755 - RNA, 19 nt, Homo sapiens
  misc_RNA (1)...(19): siRNA sense strand
agguuagaagggaaagaau

SEQ ID NO: 2337756 - RNA, 19 nt, Homo sapiens
  misc_RNA (1)...(19): siRNA sense strand
guauuaaaccaaagcccaa

SEQ ID NO: 2337757 - RNA, 19 nt, Homo sapiens
  misc_RNA (1)...(19): siRNA sense strand
ccuggaagucauagugaau

SEQ ID NO: 2337758 - RNA, 19 nt, Homo sapiens
  misc_RNA (1)...(19): siRNA sense strand
ggaaaugucuccucggacu

SEQ ID NO: 2337759 - RNA, 19 nt, Homo sapiens
  misc_RNA (1)...(19): siRNA sense strand
ugugaaaaguguugagcga

SEQ ID NO: 2337760 - RNA, 19 nt, Homo sapiens
  misc_RNA (1)...(19): siRNA sense strand
guaugcagaccgaaggcaa

SEQ ID NO: 2337761 - RNA, 19 nt, Homo sapiens
  misc_RNA (1)...(19): siRNA sense strand
auguaugaagcaaggaaau

SEQ ID NO: 2337762 - RNA, 19 nt, Homo sapiens
  misc_RNA (1)...(19): siRNA sense strand
guuuauuuggguuggagua

SEQ ID NO: 2337763 - RNA, 19 nt, Homo sapiens
  misc_RNA (1)...(19): siRNA sense strand
ccaccuugcuccacgguca

SEQ ID NO: 2337764 - RNA, 19 nt, Homo sapiens
  misc_RNA (1)...(19): siRNA sense strand
ccgaaauggaauuggaccu

SEQ ID NO: 2337765 - RNA, 19 nt, Homo sapiens
  misc_RNA (1)...(19): siRNA sense strand
cuugggagguggaagcgaa

SEQ ID NO: 2337766 - RNA, 19 nt, Homo sapiens
  misc_RNA (1)...(19): siRNA sense strand
ccuuggacucacuggacua

SEQ ID NO: 2337767 - RNA, 19 nt, Homo sapiens
  misc_RNA (1)...(19): siRNA sense strand
uggaauuggaccuggaagu

SEQ ID NO: 2337768 - RNA, 19 nt, Homo sapiens
  misc_RNA (1)...(19): siRNA sense strand
ucugauaacuggagagacc

SEQ ID NO: 2337769 - RNA, 19 nt, Homo sapiens
  misc_RNA (1)...(19): siRNA sense strand
agcccuaagcguaaacaaa

SEQ ID NO: 2337770 - RNA, 19 nt, Homo sapiens
  misc_RNA (1)...(19): siRNA sense strand
uaugcagaccgaaggcaaa

SEQ ID NO: 2337771 - RNA, 19 nt, Homo sapiens
  misc_RNA (1)...(19): siRNA sense strand
gcugaaacuaucaaggagu

SEQ ID NO: 2337772 - RNA, 19 nt, Homo sapiens
  misc_RNA (1)...(19): siRNA sense strand
uugacuaugaacagaagaa

SEQ ID NO: 2337773 - RNA, 19 nt, Homo sapiens
  misc_RNA (1)...(19): siRNA sense strand
guggaagcgaaucugauaa

SEQ ID NO: 2337774 - RNA, 19 nt, Homo sapiens
  misc_RNA (1)...(19): siRNA sense strand
cuugaaagcagugggguua

SEQ ID NO: 2337775 - RNA, 19 nt, Homo sapiens
  misc_RNA (1)...(19): siRNA sense strand
aggcauuugacuaugaaca

SEQ ID NO: 2337776 - RNA, 19 nt, Homo sapiens
  misc_RNA (1)...(19): siRNA sense strand
ccgucaaggccuagaagaa

SEQ ID NO: 2337777 - RNA, 19 nt, Homo sapiens
  misc_RNA (1)...(19): siRNA sense strand
acaaauccgucaaggccua

SEQ ID NO: 2337778 - RNA, 19 nt, Homo sapiens
  misc_RNA (1)...(19): siRNA sense strand
cgaaauucuagcagcugaa

SEQ ID NO: 2337779 - RNA, 19 nt, Homo sapiens
  misc_RNA (1)...(19): siRNA sense strand
agacaaggguacaggacag

SEQ ID NO: 2337780 - RNA, 19 nt, Homo sapiens
  misc_RNA (1)...(19): siRNA sense strand
cuuacaugcaugaaggauu

SEQ ID NO: 2337781 - RNA, 19 nt, Homo sapiens
  misc_RNA (1)...(19): siRNA sense strand
ucgagaucuuggugcaauu

SEQ ID NO: 2337782 - RNA, 19 nt, Homo sapiens
  misc_RNA (1)...(19): siRNA sense strand
caucgaaauucuagcagcu

SEQ ID NO: 2337783 - RNA, 19 nt, Homo sapiens
  misc_RNA (1)...(19): siRNA sense strand
ggacaaaucaggaagugug

SEQ ID NO: 2337784 - RNA, 19 nt, Homo sapiens
  misc_RNA (1)...(19): siRNA sense strand
ccgucaaggccuagaagaa

SEQ ID NO: 2337785 - RNA, 19 nt, Homo sapiens
  misc_RNA (1)...(19): siRNA sense strand
acaaauccgucaaggccua

SEQ ID NO: 2337786 - RNA, 19 nt, Homo sapiens
  misc_RNA (1)...(19): siRNA sense strand
cgaaauucuagcagcugaa

SEQ ID NO: 2337787 - RNA, 19 nt, Homo sapiens
  misc_RNA (1)...(19): siRNA sense strand
agacaaggguacaggacag

SEQ ID NO: 2337788 - RNA, 19 nt, Homo sapiens
  misc_RNA (1)...(19): siRNA sense strand
cuuacaugcaugaaggauu

SEQ ID NO: 2337789 - RNA, 19 nt, Homo sapiens
  misc_RNA (1)...(19): siRNA sense strand
ucgagaucuuggugcaauu

SEQ ID NO: 2337790 - RNA, 19 nt, Homo sapiens
  misc_RNA (1)...(19): siRNA sense strand
caucgaaauucuagcagcu

SEQ ID NO: 2337791 - RNA, 19 nt, Homo sapiens
  misc_RNA (1)...(19): siRNA sense strand
ggacaaaucaggaagugug

SEQ ID NO: 2337792 - RNA, 19 nt, Homo sapiens
  misc_RNA (1)...(19): siRNA sense strand
ccgucaaggccuagaagaa

SEQ ID NO: 2337793 - RNA, 19 nt, Homo sapiens
  misc_RNA (1)...(19): siRNA sense strand
acaaauccgucaaggccua

SEQ ID NO: 2337794 - RNA, 19 nt, Homo sapiens
  misc_RNA (1)...(19): siRNA sense strand
cgaaauucuagcagcugaa

SEQ ID NO: 2337795 - RNA, 19 nt, Homo sapiens
  misc_RNA (1)...(19): siRNA sense strand
agacaaggguacaggacag

SEQ ID NO: 2337796 - RNA, 19 nt, Homo sapiens
  misc_RNA (1)...(19): siRNA sense strand
cuuacaugcaugaaggauu

SEQ ID NO: 2337797 - RNA, 19 nt, Homo sapiens
  misc_RNA (1)...(19): siRNA sense strand
ucgagaucuuggugcaauu

SEQ ID NO: 2337798 - RNA, 19 nt, Homo sapiens
  misc_RNA (1)...(19): siRNA sense strand
caucgaaauucuagcagcu

SEQ ID NO: 2337799 - RNA, 19 nt, Homo sapiens
  misc_RNA (1)...(19): siRNA sense strand
ggacaaaucaggaagugug

SEQ ID NO: 2337800 - RNA, 19 nt, Homo sapiens
  misc_RNA (1)...(19): siRNA sense strand
aggcaaagaaaaugaggaa

SEQ ID NO: 2337801 - RNA, 19 nt, Homo sapiens
  misc_RNA (1)...(19): siRNA sense strand
aagauugaagccagagaaa

SEQ ID NO: 2337802 - RNA, 19 nt, Homo sapiens
  misc_RNA (1)...(19): siRNA sense strand
aguuaugaaggcaaagaaa

SEQ ID NO: 2337803 - RNA, 19 nt, Homo sapiens
  misc_RNA (1)...(19): siRNA sense strand
caagaagauugaagccaga

SEQ ID NO: 2337804 - RNA, 19 nt, Homo sapiens
  misc_RNA (1)...(19): siRNA sense strand
gcaccugguacuaagggua

SEQ ID NO: 2337805 - RNA, 19 nt, Homo sapiens
  misc_RNA (1)...(19): siRNA sense strand
gaaaggaaagccaagauga

SEQ ID NO: 2337806 - RNA, 19 nt, Homo sapiens
  misc_RNA (1)...(19): siRNA sense strand
ccagagaaaggaaagccaa

SEQ ID NO: 2337807 - RNA, 19 nt, Homo sapiens
  misc_RNA (1)...(19): siRNA sense strand
gcaucuggcaagaaagcau

SEQ ID NO: 2337808 - RNA, 19 nt, Homo sapiens
  misc_RNA (1)...(19): siRNA sense strand
guuaugaaggcaaagaaaa

SEQ ID NO: 2337809 - RNA, 19 nt, Homo sapiens
  misc_RNA (1)...(19): siRNA sense strand
gagaaaggaaagccaagau

SEQ ID NO: 2337810 - RNA, 19 nt, Homo sapiens
  misc_RNA (1)...(19): siRNA sense strand
cuccaaaggcaucuggcaa

SEQ ID NO: 2337811 - RNA, 19 nt, Homo sapiens
  misc_RNA (1)...(19): siRNA sense strand
ggaaagccaagaugacaga

SEQ ID NO: 2337812 - RNA, 19 nt, Homo sapiens
  misc_RNA (1)...(19): siRNA sense strand
aagccaagaugacagauuu

SEQ ID NO: 2337813 - RNA, 19 nt, Homo sapiens
  misc_RNA (1)...(19): siRNA sense strand
aagaaaaugaggaacagaa

SEQ ID NO: 2337814 - RNA, 19 nt, Homo sapiens
  misc_RNA (1)...(19): siRNA sense strand
gauugaagccagagaaagg

SEQ ID NO: 2337815 - RNA, 19 nt, Homo sapiens
  misc_RNA (1)...(19): siRNA sense strand
ccaagaagauugaagccag

SEQ ID NO: 2337816 - RNA, 19 nt, Homo sapiens
  misc_RNA (1)...(19): siRNA sense strand
agaaaaugaggaacagaau

SEQ ID NO: 2337817 - RNA, 19 nt, Homo sapiens
  misc_RNA (1)...(19): siRNA sense strand
ccaaaggcaucuggcaaga

SEQ ID NO: 2337818 - RNA, 19 nt, Homo sapiens
  misc_RNA (1)...(19): siRNA sense strand
aaaggcaucuggcaagaaa

SEQ ID NO: 2337819 - RNA, 19 nt, Homo sapiens
  misc_RNA (1)...(19): siRNA sense strand
ggccagaaggagugugaua

SEQ ID NO: 2337820 - RNA, 19 nt, Homo sapiens
  misc_RNA (1)...(19): siRNA sense strand
acucaaaggugcugggcga

SEQ ID NO: 2337821 - RNA, 19 nt, Homo sapiens
  misc_RNA (1)...(19): siRNA sense strand
gggaaagugaucuggagaa

SEQ ID NO: 2337822 - RNA, 19 nt, Homo sapiens
  misc_RNA (1)...(19): siRNA sense strand
caguaaaagccguggaaga

SEQ ID NO: 2337823 - RNA, 19 nt, Homo sapiens
  misc_RNA (1)...(19): siRNA sense strand
aaaugaaagggaagaacaa

SEQ ID NO: 2337824 - RNA, 19 nt, Homo sapiens
  misc_RNA (1)...(19): siRNA sense strand
ggacagaggacucgggacu

SEQ ID NO: 2337825 - RNA, 19 nt, Homo sapiens
  misc_RNA (1)...(19): siRNA sense strand
ugagugagauugaggccaa

SEQ ID NO: 2337826 - RNA, 19 nt, Homo sapiens
  misc_RNA (1)...(19): siRNA sense strand
aaucaaagcaugagaucca

SEQ ID NO: 2337827 - RNA, 19 nt, Homo sapiens
  misc_RNA (1)...(19): siRNA sense strand
gagauuaccaagauggcua

SEQ ID NO: 2337828 - RNA, 19 nt, Homo sapiens
  misc_RNA (1)...(19): siRNA sense strand
gaagaucagcauugggaau

SEQ ID NO: 2337829 - RNA, 19 nt, Homo sapiens
  misc_RNA (1)...(19): siRNA sense strand
aggaguaugugaagcagaa

SEQ ID NO: 2337830 - RNA, 19 nt, Homo sapiens
  misc_RNA (1)...(19): siRNA sense strand
auuacaagcaugagggaca

SEQ ID NO: 2337831 - RNA, 19 nt, Homo sapiens
  misc_RNA (1)...(19): siRNA sense strand
acaaugagcagaagcacaa

SEQ ID NO: 2337832 - RNA, 19 nt, Homo sapiens
  misc_RNA (1)...(19): siRNA sense strand
agcagaagggagagcguaa

SEQ ID NO: 2337833 - RNA, 19 nt, Homo sapiens
  misc_RNA (1)...(19): siRNA sense strand
ccuuugaagagcaggagaa

SEQ ID NO: 2337834 - RNA, 19 nt, Homo sapiens
  misc_RNA (1)...(19): siRNA sense strand
cugggaaagcuuuggacua

SEQ ID NO: 2337835 - RNA, 19 nt, Homo sapiens
  misc_RNA (1)...(19): siRNA sense strand
cgaaggugcugguggagga

SEQ ID NO: 2337836 - RNA, 19 nt, Homo sapiens
  misc_RNA (1)...(19): siRNA sense strand
agagagaacuaguggccca

SEQ ID NO: 2337837 - RNA, 19 nt, Homo sapiens
  misc_RNA (1)...(19): siRNA sense strand
aagaagauggagaaacuaa

SEQ ID NO: 2337838 - RNA, 19 nt, Homo sapiens
  misc_RNA (1)...(19): siRNA sense strand
acacagaugaugaguugaa

SEQ ID NO: 2337839 - RNA, 19 nt, Homo sapiens
  misc_RNA (1)...(19): siRNA sense strand
gcugaagccaugaagggaa

SEQ ID NO: 2337840 - RNA, 19 nt, Homo sapiens
  misc_RNA (1)...(19): siRNA sense strand
gggcagcuggagugugaaa

SEQ ID NO: 2337841 - RNA, 19 nt, Homo sapiens
  misc_RNA (1)...(19): siRNA sense strand
acuaaucaacgcagugaaa

SEQ ID NO: 2337842 - RNA, 19 nt, Homo sapiens
  misc_RNA (1)...(19): siRNA sense strand
ccucuaaggccuggcguaa

SEQ ID NO: 2337843 - RNA, 19 nt, Homo sapiens
  misc_RNA (1)...(19): siRNA sense strand
gggccuucacagaggagaa

SEQ ID NO: 2337844 - RNA, 19 nt, Homo sapiens
  misc_RNA (1)...(19): siRNA sense strand
ccuugaacuuugaggagca

SEQ ID NO: 2337845 - RNA, 19 nt, Homo sapiens
  misc_RNA (1)...(19): siRNA sense strand
ccugcaaggucaaggcuga

SEQ ID NO: 2337846 - RNA, 19 nt, Homo sapiens
  misc_RNA (1)...(19): siRNA sense strand
acuauggaguacaggaaga

SEQ ID NO: 2337847 - RNA, 19 nt, Homo sapiens
  misc_RNA (1)...(19): siRNA sense strand
augugaagcagaagggaga

SEQ ID NO: 2337848 - RNA, 19 nt, Homo sapiens
  misc_RNA (1)...(19): siRNA sense strand
uaaucaacgcagugaaaga

SEQ ID NO: 2337849 - RNA, 19 nt, Homo sapiens
  misc_RNA (1)...(19): siRNA sense strand
gcagauaugcuucgggcuu

SEQ ID NO: 2337850 - RNA, 19 nt, Homo sapiens
  misc_RNA (1)...(19): siRNA sense strand
cagaugaguccuugaacuu

SEQ ID NO: 2337851 - RNA, 19 nt, Homo sapiens
  misc_RNA (1)...(19): siRNA sense strand
ccaagguccuggugcaaaa

SEQ ID NO: 2337852 - RNA, 19 nt, Homo sapiens
  misc_RNA (1)...(19): siRNA sense strand
cagugaaagauguagccaa

SEQ ID NO: 2337853 - RNA, 19 nt, Homo sapiens
  misc_RNA (1)...(19): siRNA sense strand
uggcaaaguuggagaugac

SEQ ID NO: 2337854 - RNA, 19 nt, Homo sapiens
  misc_RNA (1)...(19): siRNA sense strand
ggagaaacuaaagcagaaa

SEQ ID NO: 2337855 - RNA, 19 nt, Homo sapiens
  misc_RNA (1)...(19): siRNA sense strand
gaugaaaagaagauggaga

SEQ ID NO: 2337856 - RNA, 19 nt, Homo sapiens
  misc_RNA (1)...(19): siRNA sense strand
aaaagaagauggagaaacu

SEQ ID NO: 2337857 - RNA, 19 nt, Homo sapiens
  misc_RNA (1)...(19): siRNA sense strand
ccaaggaguaugugaagca

SEQ ID NO: 2337858 - RNA, 19 nt, Homo sapiens
  misc_RNA (1)...(19): siRNA sense strand
gauccuagcugaugccaca

SEQ ID NO: 2337859 - RNA, 19 nt, Homo sapiens
  misc_RNA (1)...(19): siRNA sense strand
uagccaaagcccugggaga

SEQ ID NO: 2337860 - RNA, 19 nt, Homo sapiens
  misc_RNA (1)...(19): siRNA sense strand
acaagauggaugaaucaaa

SEQ ID NO: 2337861 - RNA, 19 nt, Homo sapiens
  misc_RNA (1)...(19): siRNA sense strand
gcaccaaagccgugagcuc

SEQ ID NO: 2337862 - RNA, 19 nt, Homo sapiens
  misc_RNA (1)...(19): siRNA sense strand
ggacaggacuucagcaccu

SEQ ID NO: 2337863 - RNA, 19 nt, Homo sapiens
  misc_RNA (1)...(19): siRNA sense strand
ccagcuagaugaaggacca

SEQ ID NO: 2337864 - RNA, 19 nt, Homo sapiens
  misc_RNA (1)...(19): siRNA sense strand
gaguacaggaagaaacaga

SEQ ID NO: 2337865 - RNA, 19 nt, Homo sapiens
  misc_RNA (1)...(19): siRNA sense strand
agaagauggagaaacuaaa

SEQ ID NO: 2337866 - RNA, 19 nt, Homo sapiens
  misc_RNA (1)...(19): siRNA sense strand
guguaauggagaacucaaa

SEQ ID NO: 2337867 - RNA, 19 nt, Homo sapiens
  misc_RNA (1)...(19): siRNA sense strand
agacaauguuagagagugc

SEQ ID NO: 2337868 - RNA, 19 nt, Homo sapiens
  misc_RNA (1)...(19): siRNA sense strand
ugcugaaaaugaagagaua

SEQ ID NO: 2337869 - RNA, 19 nt, Homo sapiens
  misc_RNA (1)...(19): siRNA sense strand
agagcugauggaagagaaa

SEQ ID NO: 2337870 - RNA, 19 nt, Homo sapiens
  misc_RNA (1)...(19): siRNA sense strand
augaaaagaagauggagaa

SEQ ID NO: 2337871 - RNA, 19 nt, Homo sapiens
  misc_RNA (1)...(19): siRNA sense strand
aaacaagauggaugaauca

SEQ ID NO: 2337872 - RNA, 19 nt, Homo sapiens
  misc_RNA (1)...(19): siRNA sense strand
ggacauuucaagaagcuca

SEQ ID NO: 2337873 - RNA, 19 nt, Homo sapiens
  misc_RNA (1)...(19): siRNA sense strand
uguccaacuugaagggcau

SEQ ID NO: 2337874 - RNA, 19 nt, Homo sapiens
  misc_RNA (1)...(19): siRNA sense strand
ggacaaucugagugccuuu

SEQ ID NO: 2337875 - RNA, 19 nt, Homo sapiens
  misc_RNA (1)...(19): siRNA sense strand
auaucauccugaagaagaa

SEQ ID NO: 2337876 - RNA, 19 nt, Homo sapiens
  misc_RNA (1)...(19): siRNA sense strand
aggcaguggcagagcagau

SEQ ID NO: 2337877 - RNA, 19 nt, Homo sapiens
  misc_RNA (1)...(19): siRNA sense strand
gagcccaaguuguguccaa

SEQ ID NO: 2337878 - RNA, 19 nt, Homo sapiens
  misc_RNA (1)...(19): siRNA sense strand
uggacaguguaauggagaa

SEQ ID NO: 2337879 - RNA, 19 nt, Homo sapiens
  misc_RNA (1)...(19): siRNA sense strand
gaguggaugagaagaccaa

SEQ ID NO: 2337880 - RNA, 19 nt, Homo sapiens
  misc_RNA (1)...(19): siRNA sense strand
cugccuugcuggaggacga

SEQ ID NO: 2337881 - RNA, 19 nt, Homo sapiens
  misc_RNA (1)...(19): siRNA sense strand
cugcauaucugguuggugu

SEQ ID NO: 2337882 - RNA, 19 nt, Homo sapiens
  misc_RNA (1)...(19): siRNA sense strand
cagugguggugaaagagaa

SEQ ID NO: 2337883 - RNA, 19 nt, Homo sapiens
  misc_RNA (1)...(19): siRNA sense strand
acacuauggaguacaggaa

SEQ ID NO: 2337884 - RNA, 19 nt, Homo sapiens
  misc_RNA (1)...(19): siRNA sense strand
guaagaucuuccaggcaca

SEQ ID NO: 2337885 - RNA, 19 nt, Homo sapiens
  misc_RNA (1)...(19): siRNA sense strand
agaccaaggaagugaucca

SEQ ID NO: 2337886 - RNA, 19 nt, Homo sapiens
  misc_RNA (1)...(19): siRNA sense strand
ucgauaucauccugaagaa

SEQ ID NO: 2337887 - RNA, 19 nt, Homo sapiens
  misc_RNA (1)...(19): siRNA sense strand
gguaggagcagcagccaca

SEQ ID NO: 2337888 - RNA, 19 nt, Homo sapiens
  misc_RNA (1)...(19): siRNA sense strand
augaaggaccaauggguga

SEQ ID NO: 2337889 - RNA, 19 nt, Homo sapiens
  misc_RNA (1)...(19): siRNA sense strand
guggauuaccaaacaacua

SEQ ID NO: 2337890 - RNA, 19 nt, Homo sapiens
  misc_RNA (1)...(19): siRNA sense strand
gaagggaacagaaugggua

SEQ ID NO: 2337891 - RNA, 19 nt, Homo sapiens
  misc_RNA (1)...(19): siRNA sense strand
aggcagaugaccucagcaa

SEQ ID NO: 2337892 - RNA, 19 nt, Homo sapiens
  misc_RNA (1)...(19): siRNA sense strand
caguggagucauuguaaau

SEQ ID NO: 2337893 - RNA, 19 nt, Homo sapiens
  misc_RNA (1)...(19): siRNA sense strand
ggacaauauccuaacucca

SEQ ID NO: 2337894 - RNA, 19 nt, Homo sapiens
  misc_RNA (1)...(19): siRNA sense strand
acacggugcaccagggaca

SEQ ID NO: 2337895 - RNA, 19 nt, Homo sapiens
  misc_RNA (1)...(19): siRNA sense strand
cggacaaacucuucacgca

SEQ ID NO: 2337896 - RNA, 19 nt, Homo sapiens
  misc_RNA (1)...(19): siRNA sense strand
agaacuaugaccugaggau

SEQ ID NO: 2337897 - RNA, 19 nt, Homo sapiens
  misc_RNA (1)...(19): siRNA sense strand
gggcaagagacaagcacuc

SEQ ID NO: 2337898 - RNA, 19 nt, Homo sapiens
  misc_RNA (1)...(19): siRNA sense strand
gcagaagccuggagaccug

SEQ ID NO: 2337899 - RNA, 19 nt, Homo sapiens
  misc_RNA (1)...(19): siRNA sense strand
caacuuacacggugcacca

SEQ ID NO: 2337900 - RNA, 19 nt, Homo sapiens
  misc_RNA (1)...(19): siRNA sense strand
caguauaagaaauggcaua

SEQ ID NO: 2337901 - RNA, 19 nt, Homo sapiens
  misc_RNA (1)...(19): siRNA sense strand
gagauaaagccaaagagua

SEQ ID NO: 2337902 - RNA, 19 nt, Homo sapiens
  misc_RNA (1)...(19): siRNA sense strand
ggucuuauuuccaggucaa

SEQ ID NO: 2337903 - RNA, 19 nt, Homo sapiens
  misc_RNA (1)...(19): siRNA sense strand
agauaaagccaaagaguag

SEQ ID NO: 2337904 - RNA, 19 nt, Homo sapiens
  misc_RNA (1)...(19): siRNA sense strand
aagccaaagaguaggagaa

SEQ ID NO: 2337905 - RNA, 19 nt, Homo sapiens
  misc_RNA (1)...(19): siRNA sense strand
caacaaaggauucagauga

SEQ ID NO: 2337906 - RNA, 19 nt, Homo sapiens
  misc_RNA (1)...(19): siRNA sense strand
cagaaaggcauccuggaaa

SEQ ID NO: 2337907 - RNA, 19 nt, Homo sapiens
  misc_RNA (1)...(19): siRNA sense strand
uggaaaaucuucagggaca

SEQ ID NO: 2337908 - RNA, 19 nt, Homo sapiens
  misc_RNA (1)...(19): siRNA sense strand
agaaaggcauccuggaaaa

SEQ ID NO: 2337909 - RNA, 19 nt, Homo sapiens
  misc_RNA (1)...(19): siRNA sense strand
ccaaagaguaggagaaggu

SEQ ID NO: 2337910 - RNA, 19 nt, Homo sapiens
  misc_RNA (1)...(19): siRNA sense strand
ccaccuaauccauggucua

SEQ ID NO: 2337911 - RNA, 19 nt, Homo sapiens
  misc_RNA (1)...(19): siRNA sense strand
acuuaaagccugagaaccu

SEQ ID NO: 2337912 - RNA, 19 nt, Homo sapiens
  misc_RNA (1)...(19): siRNA sense strand
cagcuggccuggagcacaa

SEQ ID NO: 2337913 - RNA, 19 nt, Homo sapiens
  misc_RNA (1)...(19): siRNA sense strand
gagucugcuauaaggaaua

SEQ ID NO: 2337914 - RNA, 19 nt, Homo sapiens
  misc_RNA (1)...(19): siRNA sense strand
cugcaugggaccagaacuu

SEQ ID NO: 2337915 - RNA, 19 nt, Homo sapiens
  misc_RNA (1)...(19): siRNA sense strand
gggcugacuuggaugacuu

SEQ ID NO: 2337916 - RNA, 19 nt, Homo sapiens
  misc_RNA (1)...(19): siRNA sense strand
ccgagaaauacgaucaaaa

SEQ ID NO: 2337917 - RNA, 19 nt, Homo sapiens
  misc_RNA (1)...(19): siRNA sense strand
caguaaucagcaaaguaaa

SEQ ID NO: 2337918 - RNA, 19 nt, Homo sapiens
  misc_RNA (1)...(19): siRNA sense strand
ucaguaaucagcaaaguaa

SEQ ID NO: 2337919 - RNA, 19 nt, Homo sapiens
  misc_RNA (1)...(19): siRNA sense strand
acacaaaaccuucaggauu

SEQ ID NO: 2337920 - RNA, 19 nt, Homo sapiens
  misc_RNA (1)...(19): siRNA sense strand
gagacaugcuucaguggga

SEQ ID NO: 2337921 - RNA, 19 nt, Homo sapiens
  misc_RNA (1)...(19): siRNA sense strand
auggugagauaaagccaaa

SEQ ID NO: 2337922 - RNA, 19 nt, Homo sapiens
  misc_RNA (1)...(19): siRNA sense strand
ugggaucaguauaagaaau

SEQ ID NO: 2337923 - RNA, 19 nt, Homo sapiens
  misc_RNA (1)...(19): siRNA sense strand
ggaaaaucuucagggacaa

SEQ ID NO: 2337924 - RNA, 19 nt, Homo sapiens
  misc_RNA (1)...(19): siRNA sense strand
gugcauggccggacagacu

SEQ ID NO: 2337925 - RNA, 19 nt, Homo sapiens
  misc_RNA (1)...(19): siRNA sense strand
uggacugacuggaaacuau

SEQ ID NO: 2337926 - RNA, 19 nt, Homo sapiens
  misc_RNA (1)...(19): siRNA sense strand
acagaaaggcauccuggaa

SEQ ID NO: 2337927 - RNA, 19 nt, Homo sapiens
  misc_RNA (1)...(19): siRNA sense strand
caaugucaguaaucagcaa

SEQ ID NO: 2337928 - RNA, 19 nt, Homo sapiens
  misc_RNA (1)...(19): siRNA sense strand
agcucauuaaagagagaaa

SEQ ID NO: 2337929 - RNA, 19 nt, Homo sapiens
  misc_RNA (1)...(19): siRNA sense strand
ucauaucagcggcgagaca

SEQ ID NO: 2337930 - RNA, 19 nt, Homo sapiens
  misc_RNA (1)...(19): siRNA sense strand
cagaaguacuccugagguc

SEQ ID NO: 2337931 - RNA, 19 nt, Homo sapiens
  misc_RNA (1)...(19): siRNA sense strand
cagcaaaguaaauucaguu

SEQ ID NO: 2337932 - RNA, 19 nt, Homo sapiens
  misc_RNA (1)...(19): siRNA sense strand
cuaguggacugacuggaaa

SEQ ID NO: 2337933 - RNA, 19 nt, Homo sapiens
  misc_RNA (1)...(19): siRNA sense strand
aaaagaaguuaucagggaa

SEQ ID NO: 2337934 - RNA, 19 nt, Homo sapiens
  misc_RNA (1)...(19): siRNA sense strand
cccaauaacuuaaagaccu

SEQ ID NO: 2337935 - RNA, 19 nt, Homo sapiens
  misc_RNA (1)...(19): siRNA sense strand
ggacagaucacccaagcca

SEQ ID NO: 2337936 - RNA, 19 nt, Homo sapiens
  misc_RNA (1)...(19): siRNA sense strand
aacaaaggauucagaugau

SEQ ID NO: 2337937 - RNA, 19 nt, Homo sapiens
  misc_RNA (1)...(19): siRNA sense strand
acuuggaugacuuggauuu

SEQ ID NO: 2337938 - RNA, 19 nt, Homo sapiens
  misc_RNA (1)...(19): siRNA sense strand
cagccaagcagcacuauuu

SEQ ID NO: 2337939 - RNA, 19 nt, Homo sapiens
  misc_RNA (1)...(19): siRNA sense strand
acaagaaaagacagaguga

SEQ ID NO: 2337940 - RNA, 19 nt, Homo sapiens
  misc_RNA (1)...(19): siRNA sense strand
gguuccagcucuacaaguu

SEQ ID NO: 2337941 - RNA, 19 nt, Homo sapiens
  misc_RNA (1)...(19): siRNA sense strand
caguauaagaaauggcaua

SEQ ID NO: 2337942 - RNA, 19 nt, Homo sapiens
  misc_RNA (1)...(19): siRNA sense strand
gagauaaagccaaagagua

SEQ ID NO: 2337943 - RNA, 19 nt, Homo sapiens
  misc_RNA (1)...(19): siRNA sense strand
ggucuuauuuccaggucaa

SEQ ID NO: 2337944 - RNA, 19 nt, Homo sapiens
  misc_RNA (1)...(19): siRNA sense strand
agauaaagccaaagaguag

SEQ ID NO: 2337945 - RNA, 19 nt, Homo sapiens
  misc_RNA (1)...(19): siRNA sense strand
aagccaaagaguaggagaa

SEQ ID NO: 2337946 - RNA, 19 nt, Homo sapiens
  misc_RNA (1)...(19): siRNA sense strand
caacaaaggauucagauga

SEQ ID NO: 2337947 - RNA, 19 nt, Homo sapiens
  misc_RNA (1)...(19): siRNA sense strand
cagaaaggcauccuggaaa

SEQ ID NO: 2337948 - RNA, 19 nt, Homo sapiens
  misc_RNA (1)...(19): siRNA sense strand
uggaaaaucuucagggaca

SEQ ID NO: 2337949 - RNA, 19 nt, Homo sapiens
  misc_RNA (1)...(19): siRNA sense strand
agaaaggcauccuggaaaa

SEQ ID NO: 2337950 - RNA, 19 nt, Homo sapiens
  misc_RNA (1)...(19): siRNA sense strand
ccaaagaguaggagaaggu

SEQ ID NO: 2337951 - RNA, 19 nt, Homo sapiens
  misc_RNA (1)...(19): siRNA sense strand
ccaccuaauccauggucua

SEQ ID NO: 2337952 - RNA, 19 nt, Homo sapiens
  misc_RNA (1)...(19): siRNA sense strand
acuuaaagccugagaaccu

SEQ ID NO: 2337953 - RNA, 19 nt, Homo sapiens
  misc_RNA (1)...(19): siRNA sense strand
cagcuggccuggagcacaa

SEQ ID NO: 2337954 - RNA, 19 nt, Homo sapiens
  misc_RNA (1)...(19): siRNA sense strand
gagucugcuauaaggaaua

SEQ ID NO: 2337955 - RNA, 19 nt, Homo sapiens
  misc_RNA (1)...(19): siRNA sense strand
cugcaugggaccagaacuu

SEQ ID NO: 2337956 - RNA, 19 nt, Homo sapiens
  misc_RNA (1)...(19): siRNA sense strand
gggcugacuuggaugacuu

SEQ ID NO: 2337957 - RNA, 19 nt, Homo sapiens
  misc_RNA (1)...(19): siRNA sense strand
ccgagaaauacgaucaaaa

SEQ ID NO: 2337958 - RNA, 19 nt, Homo sapiens
  misc_RNA (1)...(19): siRNA sense strand
caguaaucagcaaaguaaa

SEQ ID NO: 2337959 - RNA, 19 nt, Homo sapiens
  misc_RNA (1)...(19): siRNA sense strand
ucaguaaucagcaaaguaa

SEQ ID NO: 2337960 - RNA, 19 nt, Homo sapiens
  misc_RNA (1)...(19): siRNA sense strand
acacaaaaccuucaggauu

SEQ ID NO: 2337961 - RNA, 19 nt, Homo sapiens
  misc_RNA (1)...(19): siRNA sense strand
gagacaugcuucaguggga

SEQ ID NO: 2337962 - RNA, 19 nt, Homo sapiens
  misc_RNA (1)...(19): siRNA sense strand
auggugagauaaagccaaa

SEQ ID NO: 2337963 - RNA, 19 nt, Homo sapiens
  misc_RNA (1)...(19): siRNA sense strand
ugggaucaguauaagaaau

SEQ ID NO: 2337964 - RNA, 19 nt, Homo sapiens
  misc_RNA (1)...(19): siRNA sense strand
ggaaaaucuucagggacaa

SEQ ID NO: 2337965 - RNA, 19 nt, Homo sapiens
  misc_RNA (1)...(19): siRNA sense strand
gugcauggccggacagacu

SEQ ID NO: 2337966 - RNA, 19 nt, Homo sapiens
  misc_RNA (1)...(19): siRNA sense strand
uggacugacuggaaacuau

SEQ ID NO: 2337967 - RNA, 19 nt, Homo sapiens
  misc_RNA (1)...(19): siRNA sense strand
acagaaaggcauccuggaa

SEQ ID NO: 2337968 - RNA, 19 nt, Homo sapiens
  misc_RNA (1)...(19): siRNA sense strand
caaugucaguaaucagcaa

SEQ ID NO: 2337969 - RNA, 19 nt, Homo sapiens
  misc_RNA (1)...(19): siRNA sense strand
agcucauuaaagagagaaa

SEQ ID NO: 2337970 - RNA, 19 nt, Homo sapiens
  misc_RNA (1)...(19): siRNA sense strand
ucauaucagcggcgagaca

SEQ ID NO: 2337971 - RNA, 19 nt, Homo sapiens
  misc_RNA (1)...(19): siRNA sense strand
cagaaguacuccugagguc

SEQ ID NO: 2337972 - RNA, 19 nt, Homo sapiens
  misc_RNA (1)...(19): siRNA sense strand
cagcaaaguaaauucaguu

SEQ ID NO: 2337973 - RNA, 19 nt, Homo sapiens
  misc_RNA (1)...(19): siRNA sense strand
cuaguggacugacuggaaa

SEQ ID NO: 2337974 - RNA, 19 nt, Homo sapiens
  misc_RNA (1)...(19): siRNA sense strand
aaaagaaguuaucagggaa

SEQ ID NO: 2337975 - RNA, 19 nt, Homo sapiens
  misc_RNA (1)...(19): siRNA sense strand
cccaauaacuuaaagaccu

SEQ ID NO: 2337976 - RNA, 19 nt, Homo sapiens
  misc_RNA (1)...(19): siRNA sense strand
ggacagaucacccaagcca

SEQ ID NO: 2337977 - RNA, 19 nt, Homo sapiens
  misc_RNA (1)...(19): siRNA sense strand
aacaaaggauucagaugau

SEQ ID NO: 2337978 - RNA, 19 nt, Homo sapiens
  misc_RNA (1)...(19): siRNA sense strand
acuuggaugacuuggauuu

SEQ ID NO: 2337979 - RNA, 19 nt, Homo sapiens
  misc_RNA (1)...(19): siRNA sense strand
cagccaagcagcacuauuu

SEQ ID NO: 2337980 - RNA, 19 nt, Homo sapiens
  misc_RNA (1)...(19): siRNA sense strand
acaagaaaagacagaguga

SEQ ID NO: 2337981 - RNA, 19 nt, Homo sapiens
  misc_RNA (1)...(19): siRNA sense strand
gguuccagcucuacaaguu

SEQ ID NO: 2337982 - RNA, 19 nt, Homo sapiens
  misc_RNA (1)...(19): siRNA sense strand
gcagagaaguaaaggcaga

SEQ ID NO: 2337983 - RNA, 19 nt, Homo sapiens
  misc_RNA (1)...(19): siRNA sense strand
ggcagagagcagugggaaa

SEQ ID NO: 2337984 - RNA, 19 nt, Homo sapiens
  misc_RNA (1)...(19): siRNA sense strand
aaguaaaggcagagagcag

SEQ ID NO: 2337985 - RNA, 19 nt, Homo sapiens
  misc_RNA (1)...(19): siRNA sense strand
cagugaggucagaguggaa

SEQ ID NO: 2337986 - RNA, 19 nt, Homo sapiens
  misc_RNA (1)...(19): siRNA sense strand
ggaaaaugccagaagaacu

SEQ ID NO: 2337987 - RNA, 19 nt, Homo sapiens
  misc_RNA (1)...(19): siRNA sense strand
ccgcagagaaguaaaggca

SEQ ID NO: 2337988 - RNA, 19 nt, Homo sapiens
  misc_RNA (1)...(19): siRNA sense strand
cugcagaaggcuaucagaa

SEQ ID NO: 2337989 - RNA, 19 nt, Homo sapiens
  misc_RNA (1)...(19): siRNA sense strand
gagcgaaccgggaaaggga

SEQ ID NO: 2337990 - RNA, 19 nt, Homo sapiens
  misc_RNA (1)...(19): siRNA sense strand
gcgaaccgggaaagggaga

SEQ ID NO: 2337991 - RNA, 19 nt, Homo sapiens
  misc_RNA (1)...(19): siRNA sense strand
gcagagaaguaaaggcaga

SEQ ID NO: 2337992 - RNA, 19 nt, Homo sapiens
  misc_RNA (1)...(19): siRNA sense strand
ggcagagagcagugggaaa

SEQ ID NO: 2337993 - RNA, 19 nt, Homo sapiens
  misc_RNA (1)...(19): siRNA sense strand
aaguaaaggcagagagcag

SEQ ID NO: 2337994 - RNA, 19 nt, Homo sapiens
  misc_RNA (1)...(19): siRNA sense strand
cagugaggucagaguggaa

SEQ ID NO: 2337995 - RNA, 19 nt, Homo sapiens
  misc_RNA (1)...(19): siRNA sense strand
ggaaaaugccagaagaacu

SEQ ID NO: 2337996 - RNA, 19 nt, Homo sapiens
  misc_RNA (1)...(19): siRNA sense strand
ccgcagagaaguaaaggca

SEQ ID NO: 2337997 - RNA, 19 nt, Homo sapiens
  misc_RNA (1)...(19): siRNA sense strand
cugcagaaggcuaucagaa

SEQ ID NO: 2337998 - RNA, 19 nt, Homo sapiens
  misc_RNA (1)...(19): siRNA sense strand
caucaguggaggaggcagu

SEQ ID NO: 2337999 - RNA, 19 nt, Homo sapiens
  misc_RNA (1)...(19): siRNA sense strand
gagcgaaccgggaaaggga

SEQ ID NO: 2338000 - RNA, 19 nt, Homo sapiens
  misc_RNA (1)...(19): siRNA sense strand
gcgaaccgggaaagggaga

SEQ ID NO: 2338001 - RNA, 19 nt, Homo sapiens
  misc_RNA (1)...(19): siRNA sense strand
uggaacaaucccaggaaau

SEQ ID NO: 2338002 - RNA, 19 nt, Homo sapiens
  misc_RNA (1)...(19): siRNA sense strand
ucuaauaccccaagcguua

SEQ ID NO: 2338003 - RNA, 19 nt, Homo sapiens
  misc_RNA (1)...(19): siRNA sense strand
ccucagaauccuucacaau

SEQ ID NO: 2338004 - RNA, 19 nt, Homo sapiens
  misc_RNA (1)...(19): siRNA sense strand
aggcaaaggaauagcugca

SEQ ID NO: 2338005 - RNA, 19 nt, Homo sapiens
  misc_RNA (1)...(19): siRNA sense strand
gaacagagaaugaagaccu

SEQ ID NO: 2338006 - RNA, 19 nt, Homo sapiens
  misc_RNA (1)...(19): siRNA sense strand
cuaacgaaggcaaaggaau

SEQ ID NO: 2338007 - RNA, 19 nt, Homo sapiens
  misc_RNA (1)...(19): siRNA sense strand
cgucaaaaccuauacagaa

SEQ ID NO: 2338008 - RNA, 19 nt, Homo sapiens
  misc_RNA (1)...(19): siRNA sense strand
gucaaaaccuauacagaau

SEQ ID NO: 2338009 - RNA, 19 nt, Homo sapiens
  misc_RNA (1)...(19): siRNA sense strand
uguaauugcugguggcucu

SEQ ID NO: 2338010 - RNA, 19 nt, Homo sapiens
  misc_RNA (1)...(19): siRNA sense strand
ucucuuaauccgucaguau

SEQ ID NO: 2338011 - RNA, 19 nt, Homo sapiens
  misc_RNA (1)...(19): siRNA sense strand
aggaaauccauaucccaaa

SEQ ID NO: 2338012 - RNA, 19 nt, Homo sapiens
  misc_RNA (1)...(19): siRNA sense strand
caggaaauccauaucccaa

SEQ ID NO: 2338013 - RNA, 19 nt, Homo sapiens
  misc_RNA (1)...(19): siRNA sense strand
cgguuuaucaucuggacuu

SEQ ID NO: 2338014 - RNA, 19 nt, Homo sapiens
  misc_RNA (1)...(19): siRNA sense strand
caaccaagccugucccaga

SEQ ID NO: 2338015 - RNA, 19 nt, Homo sapiens
  misc_RNA (1)...(19): siRNA sense strand
cagucaaggcaauuaauca

SEQ ID NO: 2338016 - RNA, 19 nt, Homo sapiens
  misc_RNA (1)...(19): siRNA sense strand
ccuuaauccugcauuguca

SEQ ID NO: 2338017 - RNA, 19 nt, Homo sapiens
  misc_RNA (1)...(19): siRNA sense strand
caccaagugcuuauaacaa

SEQ ID NO: 2338018 - RNA, 19 nt, Homo sapiens
  misc_RNA (1)...(19): siRNA sense strand
gcuucauugucaucaguuu

SEQ ID NO: 2338019 - RNA, 19 nt, Homo sapiens
  misc_RNA (1)...(19): siRNA sense strand
auguacuaacgaaggcaaa

SEQ ID NO: 2338020 - RNA, 19 nt, Homo sapiens
  misc_RNA (1)...(19): siRNA sense strand
agucaaggcaauuaaucau

SEQ ID NO: 2338021 - RNA, 19 nt, Homo sapiens
  misc_RNA (1)...(19): siRNA sense strand
uggaacaaucccaggaaau

SEQ ID NO: 2338022 - RNA, 19 nt, Homo sapiens
  misc_RNA (1)...(19): siRNA sense strand
ucuaauaccccaagcguua

SEQ ID NO: 2338023 - RNA, 19 nt, Homo sapiens
  misc_RNA (1)...(19): siRNA sense strand
ccucagaauccuucacaau

SEQ ID NO: 2338024 - RNA, 19 nt, Homo sapiens
  misc_RNA (1)...(19): siRNA sense strand
aggcaaaggaauagcugca

SEQ ID NO: 2338025 - RNA, 19 nt, Homo sapiens
  misc_RNA (1)...(19): siRNA sense strand
gaacagagaaugaagaccu

SEQ ID NO: 2338026 - RNA, 19 nt, Homo sapiens
  misc_RNA (1)...(19): siRNA sense strand
cuaacgaaggcaaaggaau

SEQ ID NO: 2338027 - RNA, 19 nt, Homo sapiens
  misc_RNA (1)...(19): siRNA sense strand
cgucaaaaccuauacagaa

SEQ ID NO: 2338028 - RNA, 19 nt, Homo sapiens
  misc_RNA (1)...(19): siRNA sense strand
gucaaaaccuauacagaau

SEQ ID NO: 2338029 - RNA, 19 nt, Homo sapiens
  misc_RNA (1)...(19): siRNA sense strand
uguaauugcugguggcucu

SEQ ID NO: 2338030 - RNA, 19 nt, Homo sapiens
  misc_RNA (1)...(19): siRNA sense strand
ucucuuaauccgucaguau

SEQ ID NO: 2338031 - RNA, 19 nt, Homo sapiens
  misc_RNA (1)...(19): siRNA sense strand
aggaaauccauaucccaaa

SEQ ID NO: 2338032 - RNA, 19 nt, Homo sapiens
  misc_RNA (1)...(19): siRNA sense strand
caggaaauccauaucccaa

SEQ ID NO: 2338033 - RNA, 19 nt, Homo sapiens
  misc_RNA (1)...(19): siRNA sense strand
cgguuuaucaucuggacuu

SEQ ID NO: 2338034 - RNA, 19 nt, Homo sapiens
  misc_RNA (1)...(19): siRNA sense strand
caaccaagccugucccaga

SEQ ID NO: 2338035 - RNA, 19 nt, Homo sapiens
  misc_RNA (1)...(19): siRNA sense strand
cagucaaggcaauuaauca

SEQ ID NO: 2338036 - RNA, 19 nt, Homo sapiens
  misc_RNA (1)...(19): siRNA sense strand
ccuuaauccugcauuguca

SEQ ID NO: 2338037 - RNA, 19 nt, Homo sapiens
  misc_RNA (1)...(19): siRNA sense strand
caccaagugcuuauaacaa

SEQ ID NO: 2338038 - RNA, 19 nt, Homo sapiens
  misc_RNA (1)...(19): siRNA sense strand
gcuucauugucaucaguuu

SEQ ID NO: 2338039 - RNA, 19 nt, Homo sapiens
  misc_RNA (1)...(19): siRNA sense strand
auguacuaacgaaggcaaa

SEQ ID NO: 2338040 - RNA, 19 nt, Homo sapiens
  misc_RNA (1)...(19): siRNA sense strand
agucaaggcaauuaaucau

SEQ ID NO: 2338041 - RNA, 19 nt, Homo sapiens
  misc_RNA (1)...(19): siRNA sense strand
ugaugaaguguccgagcaa

SEQ ID NO: 2338042 - RNA, 19 nt, Homo sapiens
  misc_RNA (1)...(19): siRNA sense strand
cuguauagacugcacaaca

SEQ ID NO: 2338043 - RNA, 19 nt, Homo sapiens
  misc_RNA (1)...(19): siRNA sense strand
gguuuggagcagaccguuu

SEQ ID NO: 2338044 - RNA, 19 nt, Homo sapiens
  misc_RNA (1)...(19): siRNA sense strand
ugaugaaguguccgagcaa

SEQ ID NO: 2338045 - RNA, 19 nt, Homo sapiens
  misc_RNA (1)...(19): siRNA sense strand
cuguauagacugcacaaca

SEQ ID NO: 2338046 - RNA, 19 nt, Homo sapiens
  misc_RNA (1)...(19): siRNA sense strand
gguuuggagcagaccguuu

SEQ ID NO: 2338047 - RNA, 19 nt, Homo sapiens
  misc_RNA (1)...(19): siRNA sense strand
cugucaacuucuugcacua

SEQ ID NO: 2338048 - RNA, 19 nt, Homo sapiens
  misc_RNA (1)...(19): siRNA sense strand
aggugauggcagaggacau

SEQ ID NO: 2338049 - RNA, 19 nt, Homo sapiens
  misc_RNA (1)...(19): siRNA sense strand
cccaaaaccuggcgagaca

SEQ ID NO: 2338050 - RNA, 19 nt, Homo sapiens
  misc_RNA (1)...(19): siRNA sense strand
ccuccaggccucugcacaa

SEQ ID NO: 2338051 - RNA, 19 nt, Homo sapiens
  misc_RNA (1)...(19): siRNA sense strand
ccaacaccauugagggacu

SEQ ID NO: 2338052 - RNA, 19 nt, Homo sapiens
  misc_RNA (1)...(19): siRNA sense strand
gggagaaggaugaugcaaa

SEQ ID NO: 2338053 - RNA, 19 nt, Homo sapiens
  misc_RNA (1)...(19): siRNA sense strand
cgagagaagcagaagcuaa

SEQ ID NO: 2338054 - RNA, 19 nt, Homo sapiens
  misc_RNA (1)...(19): siRNA sense strand
ccaaaggaacagagagaca

SEQ ID NO: 2338055 - RNA, 19 nt, Homo sapiens
  misc_RNA (1)...(19): siRNA sense strand
aggaugagaucguggagaa

SEQ ID NO: 2338056 - RNA, 19 nt, Homo sapiens
  misc_RNA (1)...(19): siRNA sense strand
gauaaagagaagaaagaga

SEQ ID NO: 2338057 - RNA, 19 nt, Homo sapiens
  misc_RNA (1)...(19): siRNA sense strand
aagagaagaaagagaacaa

SEQ ID NO: 2338058 - RNA, 19 nt, Homo sapiens
  misc_RNA (1)...(19): siRNA sense strand
ugcuaaggauaaagagaaa

SEQ ID NO: 2338059 - RNA, 19 nt, Homo sapiens
  misc_RNA (1)...(19): siRNA sense strand
acaugaugauggacggaaa

SEQ ID NO: 2338060 - RNA, 19 nt, Homo sapiens
  misc_RNA (1)...(19): siRNA sense strand
uggaagauaaagagaagaa

SEQ ID NO: 2338061 - RNA, 19 nt, Homo sapiens
  misc_RNA (1)...(19): siRNA sense strand
gaacgagaaaggagggaga

SEQ ID NO: 2338062 - RNA, 19 nt, Homo sapiens
  misc_RNA (1)...(19): siRNA sense strand
agauauaagcggaaauuga

SEQ ID NO: 2338063 - RNA, 19 nt, Homo sapiens
  misc_RNA (1)...(19): siRNA sense strand
gggugaauuccaaagguua

SEQ ID NO: 2338064 - RNA, 19 nt, Homo sapiens
  misc_RNA (1)...(19): siRNA sense strand
aggauaaagagaaaggcaa

SEQ ID NO: 2338065 - RNA, 19 nt, Homo sapiens
  misc_RNA (1)...(19): siRNA sense strand
guuggaagaucuaaggcaa

SEQ ID NO: 2338066 - RNA, 19 nt, Homo sapiens
  misc_RNA (1)...(19): siRNA sense strand
cuucauggcaccagaggaa

SEQ ID NO: 2338067 - RNA, 19 nt, Homo sapiens
  misc_RNA (1)...(19): siRNA sense strand
gaaaggagggagaaggaga

SEQ ID NO: 2338068 - RNA, 19 nt, Homo sapiens
  misc_RNA (1)...(19): siRNA sense strand
ccacaaagaaaccagacaa

SEQ ID NO: 2338069 - RNA, 19 nt, Homo sapiens
  misc_RNA (1)...(19): siRNA sense strand
gaauaugaggcuacaggaa

SEQ ID NO: 2338070 - RNA, 19 nt, Homo sapiens
  misc_RNA (1)...(19): siRNA sense strand
ugaagaagaacgagaacga

SEQ ID NO: 2338071 - RNA, 19 nt, Homo sapiens
  misc_RNA (1)...(19): siRNA sense strand
agaagaaagagaacaagaa

SEQ ID NO: 2338072 - RNA, 19 nt, Homo sapiens
  misc_RNA (1)...(19): siRNA sense strand
ggauagaauuugagcagac

SEQ ID NO: 2338073 - RNA, 19 nt, Homo sapiens
  misc_RNA (1)...(19): siRNA sense strand
gggaugaagaagaacgaga

SEQ ID NO: 2338074 - RNA, 19 nt, Homo sapiens
  misc_RNA (1)...(19): siRNA sense strand
cgggagaaggagaaggaga

SEQ ID NO: 2338075 - RNA, 19 nt, Homo sapiens
  misc_RNA (1)...(19): siRNA sense strand
augaauaaacgcaaggcaa

SEQ ID NO: 2338076 - RNA, 19 nt, Homo sapiens
  misc_RNA (1)...(19): siRNA sense strand
uaaagaugaccgagagaga

SEQ ID NO: 2338077 - RNA, 19 nt, Homo sapiens
  misc_RNA (1)...(19): siRNA sense strand
cgagaaagagaacgggaga

SEQ ID NO: 2338078 - RNA, 19 nt, Homo sapiens
  misc_RNA (1)...(19): siRNA sense strand
ggagaaggagagagaacga

SEQ ID NO: 2338079 - RNA, 19 nt, Homo sapiens
  misc_RNA (1)...(19): siRNA sense strand
agaagaagucuaaggcaga

SEQ ID NO: 2338080 - RNA, 19 nt, Homo sapiens
  misc_RNA (1)...(19): siRNA sense strand
ugaauaaacgcaaggcaau

SEQ ID NO: 2338081 - RNA, 19 nt, Homo sapiens
  misc_RNA (1)...(19): siRNA sense strand
ggagcaagucguuaaggaa

SEQ ID NO: 2338082 - RNA, 19 nt, Homo sapiens
  misc_RNA (1)...(19): siRNA sense strand
aaggagagggaacgagaaa

SEQ ID NO: 2338083 - RNA, 19 nt, Homo sapiens
  misc_RNA (1)...(19): siRNA sense strand
gagaacgggagaaggagaa

SEQ ID NO: 2338084 - RNA, 19 nt, Homo sapiens
  misc_RNA (1)...(19): siRNA sense strand
gggcaguggaggagcagau

SEQ ID NO: 2338085 - RNA, 19 nt, Homo sapiens
  misc_RNA (1)...(19): siRNA sense strand
auaugaggcuacaggaauu

SEQ ID NO: 2338086 - RNA, 19 nt, Homo sapiens
  misc_RNA (1)...(19): siRNA sense strand
gcuggagaccacaaagaaa

SEQ ID NO: 2338087 - RNA, 19 nt, Homo sapiens
  misc_RNA (1)...(19): siRNA sense strand
gagacaaaguucagcugau

SEQ ID NO: 2338088 - RNA, 19 nt, Homo sapiens
  misc_RNA (1)...(19): siRNA sense strand
ggaaacuggaagagaagga

SEQ ID NO: 2338089 - RNA, 19 nt, Homo sapiens
  misc_RNA (1)...(19): siRNA sense strand
aggcagaguuggaagaucu

SEQ ID NO: 2338090 - RNA, 19 nt, Homo sapiens
  misc_RNA (1)...(19): siRNA sense strand
aagcuaaacaguggagaua

SEQ ID NO: 2338091 - RNA, 19 nt, Homo sapiens
  misc_RNA (1)...(19): siRNA sense strand
gagaagaagucuaaggcag

SEQ ID NO: 2338092 - RNA, 19 nt, Homo sapiens
  misc_RNA (1)...(19): siRNA sense strand
cucggaaguuugaggaaau

SEQ ID NO: 2338093 - RNA, 19 nt, Homo sapiens
  misc_RNA (1)...(19): siRNA sense strand
cugcuaaggauaaagagaa

SEQ ID NO: 2338094 - RNA, 19 nt, Homo sapiens
  misc_RNA (1)...(19): siRNA sense strand
gggagaaagagcugggucu

SEQ ID NO: 2338095 - RNA, 19 nt, Homo sapiens
  misc_RNA (1)...(19): siRNA sense strand
ggugaauuccaaagguuau

SEQ ID NO: 2338096 - RNA, 19 nt, Homo sapiens
  misc_RNA (1)...(19): siRNA sense strand
aguaugaaaugcugaggau

SEQ ID NO: 2338097 - RNA, 19 nt, Homo sapiens
  misc_RNA (1)...(19): siRNA sense strand
aagaagaacgagaacgaga

SEQ ID NO: 2338098 - RNA, 19 nt, Homo sapiens
  misc_RNA (1)...(19): siRNA sense strand
ggagggagaaggagaggga

SEQ ID NO: 2338099 - RNA, 19 nt, Homo sapiens
  misc_RNA (1)...(19): siRNA sense strand
aggcaaacaugaugaugga

SEQ ID NO: 2338100 - RNA, 19 nt, Homo sapiens
  misc_RNA (1)...(19): siRNA sense strand
aaaggaacagagagacaaa

SEQ ID NO: 2338101 - RNA, 19 nt, Homo sapiens
  misc_RNA (1)...(19): siRNA sense strand
ugaaacuauugcuggauau

SEQ ID NO: 2338102 - RNA, 19 nt, Homo sapiens
  misc_RNA (1)...(19): siRNA sense strand
uggccaagcaggaagaaga

SEQ ID NO: 2338103 - RNA, 19 nt, Homo sapiens
  misc_RNA (1)...(19): siRNA sense strand
agaacaaagaguuggcuca

SEQ ID NO: 2338104 - RNA, 19 nt, Homo sapiens
  misc_RNA (1)...(19): siRNA sense strand
cauaagaagcugaggacug

SEQ ID NO: 2338105 - RNA, 19 nt, Homo sapiens
  misc_RNA (1)...(19): siRNA sense strand
agagagaacgagagaagca

SEQ ID NO: 2338106 - RNA, 19 nt, Homo sapiens
  misc_RNA (1)...(19): siRNA sense strand
guggaggagcagauagaau

SEQ ID NO: 2338107 - RNA, 19 nt, Homo sapiens
  misc_RNA (1)...(19): siRNA sense strand
auagcaaucaggagcguaa

SEQ ID NO: 2338108 - RNA, 19 nt, Homo sapiens
  misc_RNA (1)...(19): siRNA sense strand
cguaaagaugaccgagaga

SEQ ID NO: 2338109 - RNA, 19 nt, Homo sapiens
  misc_RNA (1)...(19): siRNA sense strand
caguggagcaagucguuaa

SEQ ID NO: 2338110 - RNA, 19 nt, Homo sapiens
  misc_RNA (1)...(19): siRNA sense strand
ggggagguccugagauaua

SEQ ID NO: 2338111 - RNA, 19 nt, Homo sapiens
  misc_RNA (1)...(19): siRNA sense strand
uuaaagaagagaaggagga

SEQ ID NO: 2338112 - RNA, 19 nt, Homo sapiens
  misc_RNA (1)...(19): siRNA sense strand
agaagaaacccgaagccaa

SEQ ID NO: 2338113 - RNA, 19 nt, Homo sapiens
  misc_RNA (1)...(19): siRNA sense strand
ggguaaccucaaagcuaaa

SEQ ID NO: 2338114 - RNA, 19 nt, Homo sapiens
  misc_RNA (1)...(19): siRNA sense strand
gguugaugcugguggcaag

SEQ ID NO: 2338115 - RNA, 19 nt, Homo sapiens
  misc_RNA (1)...(19): siRNA sense strand
cucacaaauugguguucua

SEQ ID NO: 2338116 - RNA, 19 nt, Homo sapiens
  misc_RNA (1)...(19): siRNA sense strand
gaagaaacccgaagccaag

SEQ ID NO: 2338117 - RNA, 19 nt, Homo sapiens
  misc_RNA (1)...(19): siRNA sense strand
auccaagguugaaaagaaa

SEQ ID NO: 2338118 - RNA, 19 nt, Homo sapiens
  misc_RNA (1)...(19): siRNA sense strand
gugcagaggagauggagga

SEQ ID NO: 2338119 - RNA, 19 nt, Homo sapiens
  misc_RNA (1)...(19): siRNA sense strand
uggauaaggcaguggccca

SEQ ID NO: 2338120 - RNA, 19 nt, Homo sapiens
  misc_RNA (1)...(19): siRNA sense strand
aggauggagcccagagcuu

SEQ ID NO: 2338121 - RNA, 19 nt, Homo sapiens
  misc_RNA (1)...(19): siRNA sense strand
ccaggacagcacagggaaa

SEQ ID NO: 2338122 - RNA, 19 nt, Homo sapiens
  misc_RNA (1)...(19): siRNA sense strand
agagaguauccuuggaaau

SEQ ID NO: 2338123 - RNA, 19 nt, Homo sapiens
  misc_RNA (1)...(19): siRNA sense strand
cuguuaagcuucuggacga

SEQ ID NO: 2338124 - RNA, 19 nt, Homo sapiens
  misc_RNA (1)...(19): siRNA sense strand
acagacacgaccagugaaa

SEQ ID NO: 2338125 - RNA, 19 nt, Homo sapiens
  misc_RNA (1)...(19): siRNA sense strand
agaacgacuacgagagcau

SEQ ID NO: 2338126 - RNA, 19 nt, Homo sapiens
  misc_RNA (1)...(19): siRNA sense strand
ucuaguugugacagggaaa

SEQ ID NO: 2338127 - RNA, 19 nt, Homo sapiens
  misc_RNA (1)...(19): siRNA sense strand
aagaaaacaugguggagga

SEQ ID NO: 2338128 - RNA, 19 nt, Homo sapiens
  misc_RNA (1)...(19): siRNA sense strand
aaacugugaaggagaucaa

SEQ ID NO: 2338129 - RNA, 19 nt, Homo sapiens
  misc_RNA (1)...(19): siRNA sense strand
gggaaaagaagccgcgaca

SEQ ID NO: 2338130 - RNA, 19 nt, Homo sapiens
  misc_RNA (1)...(19): siRNA sense strand
ggacauucuuucagaggac

SEQ ID NO: 2338131 - RNA, 19 nt, Homo sapiens
  misc_RNA (1)...(19): siRNA sense strand
augccucgguggacagaaa

SEQ ID NO: 2338132 - RNA, 19 nt, Homo sapiens
  misc_RNA (1)...(19): siRNA sense strand
cuucagacaaggagauguu

SEQ ID NO: 2338133 - RNA, 19 nt, Homo sapiens
  misc_RNA (1)...(19): siRNA sense strand
cuguuaaagacuucgaaaa

SEQ ID NO: 2338134 - RNA, 19 nt, Homo sapiens
  misc_RNA (1)...(19): siRNA sense strand
ucaacagagaggaagaaaa

SEQ ID NO: 2338135 - RNA, 19 nt, Homo sapiens
  misc_RNA (1)...(19): siRNA sense strand
ugaaggagaucaaggaggu

SEQ ID NO: 2338136 - RNA, 19 nt, Homo sapiens
  misc_RNA (1)...(19): siRNA sense strand
aaguguuaauguagagagu

SEQ ID NO: 2338137 - RNA, 19 nt, Homo sapiens
  misc_RNA (1)...(19): siRNA sense strand
uaugaaacugugaaggaga

SEQ ID NO: 2338138 - RNA, 19 nt, Homo sapiens
  misc_RNA (1)...(19): siRNA sense strand
augaaacugugaaggagau

SEQ ID NO: 2338139 - RNA, 19 nt, Homo sapiens
  misc_RNA (1)...(19): siRNA sense strand
gccccagacugaaggcaaa

SEQ ID NO: 2338140 - RNA, 19 nt, Homo sapiens
  misc_RNA (1)...(19): siRNA sense strand
gaauaugccucgguggaca

SEQ ID NO: 2338141 - RNA, 19 nt, Homo sapiens
  misc_RNA (1)...(19): siRNA sense strand
agacacgaccagugaaacu

SEQ ID NO: 2338142 - RNA, 19 nt, Homo sapiens
  misc_RNA (1)...(19): siRNA sense strand
ucacagaagaagagaucuc

SEQ ID NO: 2338143 - RNA, 19 nt, Homo sapiens
  misc_RNA (1)...(19): siRNA sense strand
ggccagaagcggaagguga

SEQ ID NO: 2338144 - RNA, 19 nt, Homo sapiens
  misc_RNA (1)...(19): siRNA sense strand
ccuccgaccucaagggcau

SEQ ID NO: 2338145 - RNA, 19 nt, Homo sapiens
  misc_RNA (1)...(19): siRNA sense strand
ucugagaucaagaggguga

SEQ ID NO: 2338146 - RNA, 19 nt, Homo sapiens
  misc_RNA (1)...(19): siRNA sense strand
cagccuugcgggagaucaa

SEQ ID NO: 2338147 - RNA, 19 nt, Homo sapiens
  misc_RNA (1)...(19): siRNA sense strand
ccaagaacagccagcccaa

SEQ ID NO: 2338148 - RNA, 19 nt, Homo sapiens
  misc_RNA (1)...(19): siRNA sense strand
agacggaguuugagcgcgu

SEQ ID NO: 2338149 - RNA, 19 nt, Homo sapiens
  misc_RNA (1)...(19): siRNA sense strand
aacuaugagcuguacgaaa

SEQ ID NO: 2338150 - RNA, 19 nt, Homo sapiens
  misc_RNA (1)...(19): siRNA sense strand
aagcggaaggugaaggaca

SEQ ID NO: 2338151 - RNA, 19 nt, Homo sapiens
  misc_RNA (1)...(19): siRNA sense strand
gggacaugaaggcugcuaa

SEQ ID NO: 2338152 - RNA, 19 nt, Homo sapiens
  misc_RNA (1)...(19): siRNA sense strand
uggacaacuaugagcugua

SEQ ID NO: 2338153 - RNA, 19 nt, Homo sapiens
  misc_RNA (1)...(19): siRNA sense strand
auuacagccuugcgggaga

SEQ ID NO: 2338154 - RNA, 19 nt, Homo sapiens
  misc_RNA (1)...(19): siRNA sense strand
ugucagaagaagauaaaca

SEQ ID NO: 2338155 - RNA, 19 nt, Homo sapiens
  misc_RNA (1)...(19): siRNA sense strand
uggacaaggaugugaagau

SEQ ID NO: 2338156 - RNA, 19 nt, Homo sapiens
  misc_RNA (1)...(19): siRNA sense strand
gcacagcagucaaagccau

SEQ ID NO: 2338157 - RNA, 19 nt, Homo sapiens
  misc_RNA (1)...(19): siRNA sense strand
ucauaguggaaccggagaa

SEQ ID NO: 2338158 - RNA, 19 nt, Homo sapiens
  misc_RNA (1)...(19): siRNA sense strand
cuaccaacgugacagguga

SEQ ID NO: 2338159 - RNA, 19 nt, Homo sapiens
  misc_RNA (1)...(19): siRNA sense strand
agaagagccccaauggaaa

SEQ ID NO: 2338160 - RNA, 19 nt, Homo sapiens
  misc_RNA (1)...(19): siRNA sense strand
caucaugccuaguggcgua

SEQ ID NO: 2338161 - RNA, 19 nt, Homo sapiens
  misc_RNA (1)...(19): siRNA sense strand
ccaagauugcccagaucaa

SEQ ID NO: 2338162 - RNA, 19 nt, Homo sapiens
  misc_RNA (1)...(19): siRNA sense strand
agauggacaaggagaccaa

SEQ ID NO: 2338163 - RNA, 19 nt, Homo sapiens
  misc_RNA (1)...(19): siRNA sense strand
cccaaagaagccagccaaa

SEQ ID NO: 2338164 - RNA, 19 nt, Homo sapiens
  misc_RNA (1)...(19): siRNA sense strand
gaacaagggacgcugacca

SEQ ID NO: 2338165 - RNA, 19 nt, Homo sapiens
  misc_RNA (1)...(19): siRNA sense strand
aggagaccaaagagaacaa

SEQ ID NO: 2338166 - RNA, 19 nt, Homo sapiens
  misc_RNA (1)...(19): siRNA sense strand
acaccuaccuggacagcca

SEQ ID NO: 2338167 - RNA, 19 nt, Homo sapiens
  misc_RNA (1)...(19): siRNA sense strand
gccuaguggcguauaagaa

SEQ ID NO: 2338168 - RNA, 19 nt, Homo sapiens
  misc_RNA (1)...(19): siRNA sense strand
aggcagaaacagagcggcu

SEQ ID NO: 2338169 - RNA, 19 nt, Homo sapiens
  misc_RNA (1)...(19): siRNA sense strand
acuugaacccugaugccaa

SEQ ID NO: 2338170 - RNA, 19 nt, Homo sapiens
  misc_RNA (1)...(19): siRNA sense strand
ccgagagcgcagacagcau

SEQ ID NO: 2338171 - RNA, 19 nt, Homo sapiens
  misc_RNA (1)...(19): siRNA sense strand
caucaugccuaguggcgua

SEQ ID NO: 2338172 - RNA, 19 nt, Homo sapiens
  misc_RNA (1)...(19): siRNA sense strand
ccaagauugcccagaucaa

SEQ ID NO: 2338173 - RNA, 19 nt, Homo sapiens
  misc_RNA (1)...(19): siRNA sense strand
agauggacaaggagaccaa

SEQ ID NO: 2338174 - RNA, 19 nt, Homo sapiens
  misc_RNA (1)...(19): siRNA sense strand
cccaaagaagccagccaaa

SEQ ID NO: 2338175 - RNA, 19 nt, Homo sapiens
  misc_RNA (1)...(19): siRNA sense strand
gaacaagggacgcugacca

SEQ ID NO: 2338176 - RNA, 19 nt, Homo sapiens
  misc_RNA (1)...(19): siRNA sense strand
aggagaccaaagagaacaa

SEQ ID NO: 2338177 - RNA, 19 nt, Homo sapiens
  misc_RNA (1)...(19): siRNA sense strand
acaccuaccuggacagcca

SEQ ID NO: 2338178 - RNA, 19 nt, Homo sapiens
  misc_RNA (1)...(19): siRNA sense strand
gccuaguggcguauaagaa

SEQ ID NO: 2338179 - RNA, 19 nt, Homo sapiens
  misc_RNA (1)...(19): siRNA sense strand
aggcagaaacagagcggcu

SEQ ID NO: 2338180 - RNA, 19 nt, Homo sapiens
  misc_RNA (1)...(19): siRNA sense strand
acuugaacccugaugccaa

SEQ ID NO: 2338181 - RNA, 19 nt, Homo sapiens
  misc_RNA (1)...(19): siRNA sense strand
ccgagagcgcagacagcau

SEQ ID NO: 2338182 - RNA, 19 nt, Homo sapiens
  misc_RNA (1)...(19): siRNA sense strand
gggaaagucagguggcaau

SEQ ID NO: 2338183 - RNA, 19 nt, Homo sapiens
  misc_RNA (1)...(19): siRNA sense strand
caggugugcaagagagaaa

SEQ ID NO: 2338184 - RNA, 19 nt, Homo sapiens
  misc_RNA (1)...(19): siRNA sense strand
caguaagacaacagccaaa

SEQ ID NO: 2338185 - RNA, 19 nt, Homo sapiens
  misc_RNA (1)...(19): siRNA sense strand
cgagaagcuuggaggcuca

SEQ ID NO: 2338186 - RNA, 19 nt, Homo sapiens
  misc_RNA (1)...(19): siRNA sense strand
agucaaugcaguagaagau

SEQ ID NO: 2338187 - RNA, 19 nt, Homo sapiens
  misc_RNA (1)...(19): siRNA sense strand
agugaaagccagugaggca

SEQ ID NO: 2338188 - RNA, 19 nt, Homo sapiens
  misc_RNA (1)...(19): siRNA sense strand
cagcugaagaacugcuaaa

SEQ ID NO: 2338189 - RNA, 19 nt, Homo sapiens
  misc_RNA (1)...(19): siRNA sense strand
cuucacaauuccugauaau

SEQ ID NO: 2338190 - RNA, 19 nt, Homo sapiens
  misc_RNA (1)...(19): siRNA sense strand
cgugaguagcggugaugua

SEQ ID NO: 2338191 - RNA, 19 nt, Homo sapiens
  misc_RNA (1)...(19): siRNA sense strand
uggcaauuugugauggaaa

SEQ ID NO: 2338192 - RNA, 19 nt, Homo sapiens
  misc_RNA (1)...(19): siRNA sense strand
gcguauucucagugacgua

SEQ ID NO: 2338193 - RNA, 19 nt, Homo sapiens
  misc_RNA (1)...(19): siRNA sense strand
gguauauguuggaaccaga

SEQ ID NO: 2338194 - RNA, 19 nt, Homo sapiens
  misc_RNA (1)...(19): siRNA sense strand
guuucaagaaugacaagua

SEQ ID NO: 2338195 - RNA, 19 nt, Homo sapiens
  misc_RNA (1)...(19): siRNA sense strand
caaccuguacaguggcaaa

SEQ ID NO: 2338196 - RNA, 19 nt, Homo sapiens
  misc_RNA (1)...(19): siRNA sense strand
gagucaaugcaguagaaga

SEQ ID NO: 2338197 - RNA, 19 nt, Homo sapiens
  misc_RNA (1)...(19): siRNA sense strand
uuucagggcacaagaauau

SEQ ID NO: 2338198 - RNA, 19 nt, Homo sapiens
  misc_RNA (1)...(19): siRNA sense strand
cuuucagggcacaagaaua

SEQ ID NO: 2338199 - RNA, 19 nt, Homo sapiens
  misc_RNA (1)...(19): siRNA sense strand
gagguggccaggugguaaa

SEQ ID NO: 2338200 - RNA, 19 nt, Homo sapiens
  misc_RNA (1)...(19): siRNA sense strand
ccacaaacugagggaguca

SEQ ID NO: 2338201 - RNA, 19 nt, Homo sapiens
  misc_RNA (1)...(19): siRNA sense strand
agccaaagguucagacaac

SEQ ID NO: 2338202 - RNA, 19 nt, Homo sapiens
  misc_RNA (1)...(19): siRNA sense strand
gcagcaacaacaacagcaa

SEQ ID NO: 2338203 - RNA, 19 nt, Homo sapiens
  misc_RNA (1)...(19): siRNA sense strand
aggcaaacaucccgagaag

SEQ ID NO: 2338204 - RNA, 19 nt, Homo sapiens
  misc_RNA (1)...(19): siRNA sense strand
ucacaguggacgagguguu

SEQ ID NO: 2338205 - RNA, 19 nt, Homo sapiens
  misc_RNA (1)...(19): siRNA sense strand
cagccaaaggccagacuga

SEQ ID NO: 2338206 - RNA, 19 nt, Homo sapiens
  misc_RNA (1)...(19): siRNA sense strand
ccagugaggcagcugcaaa

SEQ ID NO: 2338207 - RNA, 19 nt, Homo sapiens
  misc_RNA (1)...(19): siRNA sense strand
gccaaaggccagacugaca

SEQ ID NO: 2338208 - RNA, 19 nt, Homo sapiens
  misc_RNA (1)...(19): siRNA sense strand
cuuggauguuuguuguaua

SEQ ID NO: 2338209 - RNA, 19 nt, Homo sapiens
  misc_RNA (1)...(19): siRNA sense strand
ccacuauggcagcaggaca

SEQ ID NO: 2338210 - RNA, 19 nt, Homo sapiens
  misc_RNA (1)...(19): siRNA sense strand
cagaagggucuacguggaa

SEQ ID NO: 2338211 - RNA, 19 nt, Homo sapiens
  misc_RNA (1)...(19): siRNA sense strand
caacgugaguagcggugau

SEQ ID NO: 2338212 - RNA, 19 nt, Homo sapiens
  misc_RNA (1)...(19): siRNA sense strand
cagccaaagguucagacaa

SEQ ID NO: 2338213 - RNA, 19 nt, Homo sapiens
  misc_RNA (1)...(19): siRNA sense strand
ccuuugaugacgauaauuu

SEQ ID NO: 2338214 - RNA, 19 nt, Homo sapiens
  misc_RNA (1)...(19): siRNA sense strand
uaaacaaggacuuugccaa

SEQ ID NO: 2338215 - RNA, 19 nt, Homo sapiens
  misc_RNA (1)...(19): siRNA sense strand
acaacaacagcaacagcaa

SEQ ID NO: 2338216 - RNA, 19 nt, Homo sapiens
  misc_RNA (1)...(19): siRNA sense strand
augacaaguaccuaguuaa

SEQ ID NO: 2338217 - RNA, 19 nt, Homo sapiens
  misc_RNA (1)...(19): siRNA sense strand
ugcaguagaagaugagauu

SEQ ID NO: 2338218 - RNA, 19 nt, Homo sapiens
  misc_RNA (1)...(19): siRNA sense strand
ggcaauuugugauggaaac

SEQ ID NO: 2338219 - RNA, 19 nt, Homo sapiens
  misc_RNA (1)...(19): siRNA sense strand
gcugaagaacugcuaaaca

SEQ ID NO: 2338220 - RNA, 19 nt, Homo sapiens
  misc_RNA (1)...(19): siRNA sense strand
gaguuugaucccaggcuuu

SEQ ID NO: 2338221 - RNA, 19 nt, Homo sapiens
  misc_RNA (1)...(19): siRNA sense strand
cguuuauaauccuucagaa

SEQ ID NO: 2338222 - RNA, 19 nt, Homo sapiens
  misc_RNA (1)...(19): siRNA sense strand
uggacgagguguuggcgga

SEQ ID NO: 2338223 - RNA, 19 nt, Homo sapiens
  misc_RNA (1)...(19): siRNA sense strand
guauuucuggugaggacaa

SEQ ID NO: 2338224 - RNA, 19 nt, Homo sapiens
  misc_RNA (1)...(19): siRNA sense strand
gcucucaacagcagcuaau

SEQ ID NO: 2338225 - RNA, 19 nt, Homo sapiens
  misc_RNA (1)...(19): siRNA sense strand
ucaaguaccugaugcacca

SEQ ID NO: 2338226 - RNA, 19 nt, Homo sapiens
  misc_RNA (1)...(19): siRNA sense strand
aggacaugccagagagcga

SEQ ID NO: 2338227 - RNA, 19 nt, Homo sapiens
  misc_RNA (1)...(19): siRNA sense strand
augaaggauuggcaggaga

SEQ ID NO: 2338228 - RNA, 19 nt, Homo sapiens
  misc_RNA (1)...(19): siRNA sense strand
augagaaggacaacaccua

SEQ ID NO: 2338229 - RNA, 19 nt, Homo sapiens
  misc_RNA (1)...(19): siRNA sense strand
agauuauagcucuguauga

SEQ ID NO: 2338230 - RNA, 19 nt, Homo sapiens
  misc_RNA (1)...(19): siRNA sense strand
aggacaugccagagagcga

SEQ ID NO: 2338231 - RNA, 19 nt, Homo sapiens
  misc_RNA (1)...(19): siRNA sense strand
augaaggauuggcaggaga

SEQ ID NO: 2338232 - RNA, 19 nt, Homo sapiens
  misc_RNA (1)...(19): siRNA sense strand
augagaaggacaacaccua

SEQ ID NO: 2338233 - RNA, 19 nt, Homo sapiens
  misc_RNA (1)...(19): siRNA sense strand
agauuauagcucuguauga

SEQ ID NO: 2338234 - RNA, 19 nt, Homo sapiens
  misc_RNA (1)...(19): siRNA sense strand
cgaaaauguccgaggagaa

SEQ ID NO: 2338235 - RNA, 19 nt, Homo sapiens
  misc_RNA (1)...(19): siRNA sense strand
agaaagagcugauggugca

SEQ ID NO: 2338236 - RNA, 19 nt, Homo sapiens
  misc_RNA (1)...(19): siRNA sense strand
gcaaggaggaggagugcca

SEQ ID NO: 2338237 - RNA, 19 nt, Homo sapiens
  misc_RNA (1)...(19): siRNA sense strand
cugaauuccuccagcaaaa

SEQ ID NO: 2338238 - RNA, 19 nt, Homo sapiens
  misc_RNA (1)...(19): siRNA sense strand
aggacaugccagagagcga

SEQ ID NO: 2338239 - RNA, 19 nt, Homo sapiens
  misc_RNA (1)...(19): siRNA sense strand
ccugugaaccugaugggaa

SEQ ID NO: 2338240 - RNA, 19 nt, Homo sapiens
  misc_RNA (1)...(19): siRNA sense strand
ugaagaagcagauugccaa

SEQ ID NO: 2338241 - RNA, 19 nt, Homo sapiens
  misc_RNA (1)...(19): siRNA sense strand
cugaagaagcagauugcca

SEQ ID NO: 2338242 - RNA, 19 nt, Homo sapiens
  misc_RNA (1)...(19): siRNA sense strand
gggccagaccaaagagaag

SEQ ID NO: 2338243 - RNA, 19 nt, Homo sapiens
  misc_RNA (1)...(19): siRNA sense strand
augaaggauuggcaggaga

SEQ ID NO: 2338244 - RNA, 19 nt, Homo sapiens
  misc_RNA (1)...(19): siRNA sense strand
cugacaucuccaagaggua

SEQ ID NO: 2338245 - RNA, 19 nt, Homo sapiens
  misc_RNA (1)...(19): siRNA sense strand
cugugaaccugaugggaac

SEQ ID NO: 2338246 - RNA, 19 nt, Homo sapiens
  misc_RNA (1)...(19): siRNA sense strand
cagcaagaauacagccgca

SEQ ID NO: 2338247 - RNA, 19 nt, Homo sapiens
  misc_RNA (1)...(19): siRNA sense strand
ccgagaugcgggagcaguu

SEQ ID NO: 2338248 - RNA, 19 nt, Homo sapiens
  misc_RNA (1)...(19): siRNA sense strand
augagaaggacaacaccua

SEQ ID NO: 2338249 - RNA, 19 nt, Homo sapiens
  misc_RNA (1)...(19): siRNA sense strand
gaggagaacugcuggcccu

SEQ ID NO: 2338250 - RNA, 19 nt, Homo sapiens
  misc_RNA (1)...(19): siRNA sense strand
cgaguggaggacagggaca

SEQ ID NO: 2338251 - RNA, 19 nt, Homo sapiens
  misc_RNA (1)...(19): siRNA sense strand
agauuauagcucuguauga

SEQ ID NO: 2338252 - RNA, 19 nt, Homo sapiens
  misc_RNA (1)...(19): siRNA sense strand
gagaauauguaucuggaca

SEQ ID NO: 2338253 - RNA, 19 nt, Homo sapiens
  misc_RNA (1)...(19): siRNA sense strand
augacuacuuuguggcuaa

SEQ ID NO: 2338254 - RNA, 19 nt, Homo sapiens
  misc_RNA (1)...(19): siRNA sense strand
gauuagaggaagcagaaaa

SEQ ID NO: 2338255 - RNA, 19 nt, Homo sapiens
  misc_RNA (1)...(19): siRNA sense strand
auauaagagaagagcugaa

SEQ ID NO: 2338256 - RNA, 19 nt, Homo sapiens
  misc_RNA (1)...(19): siRNA sense strand
ucagagaccaacugggaau

SEQ ID NO: 2338257 - RNA, 19 nt, Homo sapiens
  misc_RNA (1)...(19): siRNA sense strand
caauauaagagaagagcug

SEQ ID NO: 2338258 - RNA, 19 nt, Homo sapiens
  misc_RNA (1)...(19): siRNA sense strand
aggauaaaaucaagaacga

SEQ ID NO: 2338259 - RNA, 19 nt, Homo sapiens
  misc_RNA (1)...(19): siRNA sense strand
aggugaaaggaaacggcua

SEQ ID NO: 2338260 - RNA, 19 nt, Homo sapiens
  misc_RNA (1)...(19): siRNA sense strand
ucaguuuggauuagaggaa

SEQ ID NO: 2338261 - RNA, 19 nt, Homo sapiens
  misc_RNA (1)...(19): siRNA sense strand
guugaagauauauccgaaa

SEQ ID NO: 2338262 - RNA, 19 nt, Homo sapiens
  misc_RNA (1)...(19): siRNA sense strand
ggucaauauaagagaagag

SEQ ID NO: 2338263 - RNA, 19 nt, Homo sapiens
  misc_RNA (1)...(19): siRNA sense strand
gcacaugcaauucagggaa

SEQ ID NO: 2338264 - RNA, 19 nt, Homo sapiens
  misc_RNA (1)...(19): siRNA sense strand
ccaugaacgaugugauugu

SEQ ID NO: 2338265 - RNA, 19 nt, Homo sapiens
  misc_RNA (1)...(19): siRNA sense strand
aguugaagauauauccgaa

SEQ ID NO: 2338266 - RNA, 19 nt, Homo sapiens
  misc_RNA (1)...(19): siRNA sense strand
cagcagcuucagagaccaa

SEQ ID NO: 2338267 - RNA, 19 nt, Homo sapiens
  misc_RNA (1)...(19): siRNA sense strand
caguggaagaucugcucaa

SEQ ID NO: 2338268 - RNA, 19 nt, Homo sapiens
  misc_RNA (1)...(19): siRNA sense strand
uggaggaaauuguggcugu

SEQ ID NO: 2338269 - RNA, 19 nt, Homo sapiens
  misc_RNA (1)...(19): siRNA sense strand
ggauaggcucaaugaugau

SEQ ID NO: 2338270 - RNA, 19 nt, Homo sapiens
  misc_RNA (1)...(19): siRNA sense strand
aagaggagggguagagcua

SEQ ID NO: 2338271 - RNA, 19 nt, Homo sapiens
  misc_RNA (1)...(19): siRNA sense strand
gguaugauuuuguggaagu

SEQ ID NO: 2338272 - RNA, 19 nt, Homo sapiens
  misc_RNA (1)...(19): siRNA sense strand
uaccauuauuagaggacga

SEQ ID NO: 2338273 - RNA, 19 nt, Homo sapiens
  misc_RNA (1)...(19): siRNA sense strand
aauuugauacaguggaaga

SEQ ID NO: 2338274 - RNA, 19 nt, Homo sapiens
  misc_RNA (1)...(19): siRNA sense strand
gcucaaugaugaugccaag

SEQ ID NO: 2338275 - RNA, 19 nt, Homo sapiens
  misc_RNA (1)...(19): siRNA sense strand
ggauuagaggaagcagaaa

SEQ ID NO: 2338276 - RNA, 19 nt, Homo sapiens
  misc_RNA (1)...(19): siRNA sense strand
uauuagaggacgauggugu

SEQ ID NO: 2338277 - RNA, 19 nt, Homo sapiens
  misc_RNA (1)...(19): siRNA sense strand
agucauggcaagaagaucu

SEQ ID NO: 2338278 - RNA, 19 nt, Homo sapiens
  misc_RNA (1)...(19): siRNA sense strand
gagaauauguaucuggaca

SEQ ID NO: 2338279 - RNA, 19 nt, Homo sapiens
  misc_RNA (1)...(19): siRNA sense strand
augacuacuuuguggcuaa

SEQ ID NO: 2338280 - RNA, 19 nt, Homo sapiens
  misc_RNA (1)...(19): siRNA sense strand
gauuagaggaagcagaaaa

SEQ ID NO: 2338281 - RNA, 19 nt, Homo sapiens
  misc_RNA (1)...(19): siRNA sense strand
auauaagagaagagcugaa

SEQ ID NO: 2338282 - RNA, 19 nt, Homo sapiens
  misc_RNA (1)...(19): siRNA sense strand
ucagagaccaacugggaau

SEQ ID NO: 2338283 - RNA, 19 nt, Homo sapiens
  misc_RNA (1)...(19): siRNA sense strand
caauauaagagaagagcug

SEQ ID NO: 2338284 - RNA, 19 nt, Homo sapiens
  misc_RNA (1)...(19): siRNA sense strand
aggauaaaaucaagaacga

SEQ ID NO: 2338285 - RNA, 19 nt, Homo sapiens
  misc_RNA (1)...(19): siRNA sense strand
aggugaaaggaaacggcua

SEQ ID NO: 2338286 - RNA, 19 nt, Homo sapiens
  misc_RNA (1)...(19): siRNA sense strand
ucaguuuggauuagaggaa

SEQ ID NO: 2338287 - RNA, 19 nt, Homo sapiens
  misc_RNA (1)...(19): siRNA sense strand
guugaagauauauccgaaa

SEQ ID NO: 2338288 - RNA, 19 nt, Homo sapiens
  misc_RNA (1)...(19): siRNA sense strand
ggucaauauaagagaagag

SEQ ID NO: 2338289 - RNA, 19 nt, Homo sapiens
  misc_RNA (1)...(19): siRNA sense strand
gcacaugcaauucagggaa

SEQ ID NO: 2338290 - RNA, 19 nt, Homo sapiens
  misc_RNA (1)...(19): siRNA sense strand
ccaugaacgaugugauugu

SEQ ID NO: 2338291 - RNA, 19 nt, Homo sapiens
  misc_RNA (1)...(19): siRNA sense strand
aguugaagauauauccgaa

SEQ ID NO: 2338292 - RNA, 19 nt, Homo sapiens
  misc_RNA (1)...(19): siRNA sense strand
cagcagcuucagagaccaa

SEQ ID NO: 2338293 - RNA, 19 nt, Homo sapiens
  misc_RNA (1)...(19): siRNA sense strand
caguggaagaucugcucaa

SEQ ID NO: 2338294 - RNA, 19 nt, Homo sapiens
  misc_RNA (1)...(19): siRNA sense strand
uggaggaaauuguggcugu

SEQ ID NO: 2338295 - RNA, 19 nt, Homo sapiens
  misc_RNA (1)...(19): siRNA sense strand
ggauaggcucaaugaugau

SEQ ID NO: 2338296 - RNA, 19 nt, Homo sapiens
  misc_RNA (1)...(19): siRNA sense strand
aagaggagggguagagcua

SEQ ID NO: 2338297 - RNA, 19 nt, Homo sapiens
  misc_RNA (1)...(19): siRNA sense strand
gguaugauuuuguggaagu

SEQ ID NO: 2338298 - RNA, 19 nt, Homo sapiens
  misc_RNA (1)...(19): siRNA sense strand
uaccauuauuagaggacga

SEQ ID NO: 2338299 - RNA, 19 nt, Homo sapiens
  misc_RNA (1)...(19): siRNA sense strand
aauuugauacaguggaaga

SEQ ID NO: 2338300 - RNA, 19 nt, Homo sapiens
  misc_RNA (1)...(19): siRNA sense strand
gcucaaugaugaugccaag

SEQ ID NO: 2338301 - RNA, 19 nt, Homo sapiens
  misc_RNA (1)...(19): siRNA sense strand
ggauuagaggaagcagaaa

SEQ ID NO: 2338302 - RNA, 19 nt, Homo sapiens
  misc_RNA (1)...(19): siRNA sense strand
uauuagaggacgauggugu

SEQ ID NO: 2338303 - RNA, 19 nt, Homo sapiens
  misc_RNA (1)...(19): siRNA sense strand
agucauggcaagaagaucu

SEQ ID NO: 2338304 - RNA, 19 nt, Homo sapiens
  misc_RNA (1)...(19): siRNA sense strand
gagcagaacuccugggugu

SEQ ID NO: 2338305 - RNA, 19 nt, Homo sapiens
  misc_RNA (1)...(19): siRNA sense strand
cgcuaugccuacagggaua

SEQ ID NO: 2338306 - RNA, 19 nt, Homo sapiens
  misc_RNA (1)...(19): siRNA sense strand
gauuaaaugcaaagagcuu

SEQ ID NO: 2338307 - RNA, 19 nt, Homo sapiens
  misc_RNA (1)...(19): siRNA sense strand
cggguaaaggagaagauua

SEQ ID NO: 2338308 - RNA, 19 nt, Homo sapiens
  misc_RNA (1)...(19): siRNA sense strand
aggagaaaguaaagaucga

SEQ ID NO: 2338309 - RNA, 19 nt, Homo sapiens
  misc_RNA (1)...(19): siRNA sense strand
gcucagaguucgugccagu

SEQ ID NO: 2338310 - RNA, 19 nt, Homo sapiens
  misc_RNA (1)...(19): siRNA sense strand
gcagcauugaggagaggaa

SEQ ID NO: 2338311 - RNA, 19 nt, Homo sapiens
  misc_RNA (1)...(19): siRNA sense strand
guggaaaacagauuggaaa

SEQ ID NO: 2338312 - RNA, 19 nt, Homo sapiens
  misc_RNA (1)...(19): siRNA sense strand
uauccaacugccagagaaa

SEQ ID NO: 2338313 - RNA, 19 nt, Homo sapiens
  misc_RNA (1)...(19): siRNA sense strand
gaguacaagaccuccgaua

SEQ ID NO: 2338314 - RNA, 19 nt, Homo sapiens
  misc_RNA (1)...(19): siRNA sense strand
guggacgugucaagcgaaa

SEQ ID NO: 2338315 - RNA, 19 nt, Homo sapiens
  misc_RNA (1)...(19): siRNA sense strand
guuuaaugaugcugccuau

SEQ ID NO: 2338316 - RNA, 19 nt, Homo sapiens
  misc_RNA (1)...(19): siRNA sense strand
uggacaaggcugagcgcga

SEQ ID NO: 2338317 - RNA, 19 nt, Homo sapiens
  misc_RNA (1)...(19): siRNA sense strand
gaaauaucaaggagcccaa

SEQ ID NO: 2338318 - RNA, 19 nt, Homo sapiens
  misc_RNA (1)...(19): siRNA sense strand
ccaacaacccgcugcucaa

SEQ ID NO: 2338319 - RNA, 19 nt, Homo sapiens
  misc_RNA (1)...(19): siRNA sense strand
gcaaacuggacaaggcuga

SEQ ID NO: 2338320 - RNA, 19 nt, Homo sapiens
  misc_RNA (1)...(19): siRNA sense strand
agcuagagauugcaaacaa

SEQ ID NO: 2338321 - RNA, 19 nt, Homo sapiens
  misc_RNA (1)...(19): siRNA sense strand
cagaaaguucggauuaaau

SEQ ID NO: 2338322 - RNA, 19 nt, Homo sapiens
  misc_RNA (1)...(19): siRNA sense strand
cagcacaguccaugggcuu

SEQ ID NO: 2338323 - RNA, 19 nt, Homo sapiens
  misc_RNA (1)...(19): siRNA sense strand
acagaaaucgauuggcuau

SEQ ID NO: 2338324 - RNA, 19 nt, Homo sapiens
  misc_RNA (1)...(19): siRNA sense strand
cgucaaggccaucgagauc

SEQ ID NO: 2338325 - RNA, 19 nt, Homo sapiens
  misc_RNA (1)...(19): siRNA sense strand
gcgggaugacagacagcua

SEQ ID NO: 2338326 - RNA, 19 nt, Homo sapiens
  misc_RNA (1)...(19): siRNA sense strand
cuguguacuguguggcaua

SEQ ID NO: 2338327 - RNA, 19 nt, Homo sapiens
  misc_RNA (1)...(19): siRNA sense strand
gcgaggagaaaguaaagau

SEQ ID NO: 2338328 - RNA, 19 nt, Homo sapiens
  misc_RNA (1)...(19): siRNA sense strand
ggguugacauguugaucga

SEQ ID NO: 2338329 - RNA, 19 nt, Homo sapiens
  misc_RNA (1)...(19): siRNA sense strand
ccaaagaaacaaagaugcu

SEQ ID NO: 2338330 - RNA, 19 nt, Homo sapiens
  misc_RNA (1)...(19): siRNA sense strand
acuuaucagacaugcauua

SEQ ID NO: 2338331 - RNA, 19 nt, Homo sapiens
  misc_RNA (1)...(19): siRNA sense strand
gcauugaggagaggaagaa

SEQ ID NO: 2338332 - RNA, 19 nt, Homo sapiens
  misc_RNA (1)...(19): siRNA sense strand
gugaggaguuggugcccuu

SEQ ID NO: 2338333 - RNA, 19 nt, Homo sapiens
  misc_RNA (1)...(19): siRNA sense strand
gagauaaagccgagcacug

SEQ ID NO: 2338334 - RNA, 19 nt, Homo sapiens
  misc_RNA (1)...(19): siRNA sense strand
aaacacaaaucaagcagca

SEQ ID NO: 2338335 - RNA, 19 nt, Homo sapiens
  misc_RNA (1)...(19): siRNA sense strand
acuaaaggcgaguacauuu

SEQ ID NO: 2338336 - RNA, 19 nt, Homo sapiens
  misc_RNA (1)...(19): siRNA sense strand
uugaguaugccaaggauuu

SEQ ID NO: 2338337 - RNA, 19 nt, Homo sapiens
  misc_RNA (1)...(19): siRNA sense strand
cagcaggagagcacgucaa

SEQ ID NO: 2338338 - RNA, 19 nt, Homo sapiens
  misc_RNA (1)...(19): siRNA sense strand
cauuuaagccugauggaac

SEQ ID NO: 2338339 - RNA, 19 nt, Homo sapiens
  misc_RNA (1)...(19): siRNA sense strand
caaacaaugccguggcgga

SEQ ID NO: 2338340 - RNA, 19 nt, Homo sapiens
  misc_RNA (1)...(19): siRNA sense strand
agcagaaaguucggauuaa

SEQ ID NO: 2338341 - RNA, 19 nt, Homo sapiens
  misc_RNA (1)...(19): siRNA sense strand
cgcuagaagguuuagauuu

SEQ ID NO: 2338342 - RNA, 19 nt, Homo sapiens
  misc_RNA (1)...(19): siRNA sense strand
guacaagaggagugggcac

SEQ ID NO: 2338343 - RNA, 19 nt, Homo sapiens
  misc_RNA (1)...(19): siRNA sense strand
aaaucaagcagcaagauca

SEQ ID NO: 2338344 - RNA, 19 nt, Homo sapiens
  misc_RNA (1)...(19): siRNA sense strand
gguucagacaagcaaguau

SEQ ID NO: 2338345 - RNA, 19 nt, Homo sapiens
  misc_RNA (1)...(19): siRNA sense strand
aguuguauucagaggacuu

SEQ ID NO: 2338346 - RNA, 19 nt, Homo sapiens
  misc_RNA (1)...(19): siRNA sense strand
gcgcuagaagguuuagauu

SEQ ID NO: 2338347 - RNA, 19 nt, Homo sapiens
  misc_RNA (1)...(19): siRNA sense strand
aagcgaaaccggauuccaa

SEQ ID NO: 2338348 - RNA, 19 nt, Homo sapiens
  misc_RNA (1)...(19): siRNA sense strand
uggccgugguagaugaaaa

SEQ ID NO: 2338349 - RNA, 19 nt, Homo sapiens
  misc_RNA (1)...(19): siRNA sense strand
gagagcacgucaaggccau

SEQ ID NO: 2338350 - RNA, 19 nt, Homo sapiens
  misc_RNA (1)...(19): siRNA sense strand
guugacguggagagauaaa

SEQ ID NO: 2338351 - RNA, 19 nt, Homo sapiens
  misc_RNA (1)...(19): siRNA sense strand
ggagugaaggagcgggagu

SEQ ID NO: 2338352 - RNA, 19 nt, Homo sapiens
  misc_RNA (1)...(19): siRNA sense strand
aaggagaagauuaucaaga

SEQ ID NO: 2338353 - RNA, 19 nt, Homo sapiens
  misc_RNA (1)...(19): siRNA sense strand
aggcugggcgacagagaga

SEQ ID NO: 2338354 - RNA, 19 nt, Homo sapiens
  misc_RNA (1)...(19): siRNA sense strand
cagagaaaauccucaucua

SEQ ID NO: 2338355 - RNA, 19 nt, Homo sapiens
  misc_RNA (1)...(19): siRNA sense strand
cgggaguggcagauggagu

SEQ ID NO: 2338356 - RNA, 19 nt, Homo sapiens
  misc_RNA (1)...(19): siRNA sense strand
gagcagaacuccugggugu

SEQ ID NO: 2338357 - RNA, 19 nt, Homo sapiens
  misc_RNA (1)...(19): siRNA sense strand
cgcuaugccuacagggaua

SEQ ID NO: 2338358 - RNA, 19 nt, Homo sapiens
  misc_RNA (1)...(19): siRNA sense strand
gauuaaaugcaaagagcuu

SEQ ID NO: 2338359 - RNA, 19 nt, Homo sapiens
  misc_RNA (1)...(19): siRNA sense strand
cggguaaaggagaagauua

SEQ ID NO: 2338360 - RNA, 19 nt, Homo sapiens
  misc_RNA (1)...(19): siRNA sense strand
aggagaaaguaaagaucga

SEQ ID NO: 2338361 - RNA, 19 nt, Homo sapiens
  misc_RNA (1)...(19): siRNA sense strand
gcucagaguucgugccagu

SEQ ID NO: 2338362 - RNA, 19 nt, Homo sapiens
  misc_RNA (1)...(19): siRNA sense strand
gcagcauugaggagaggaa

SEQ ID NO: 2338363 - RNA, 19 nt, Homo sapiens
  misc_RNA (1)...(19): siRNA sense strand
guggaaaacagauuggaaa

SEQ ID NO: 2338364 - RNA, 19 nt, Homo sapiens
  misc_RNA (1)...(19): siRNA sense strand
uauccaacugccagagaaa

SEQ ID NO: 2338365 - RNA, 19 nt, Homo sapiens
  misc_RNA (1)...(19): siRNA sense strand
gaguacaagaccuccgaua

SEQ ID NO: 2338366 - RNA, 19 nt, Homo sapiens
  misc_RNA (1)...(19): siRNA sense strand
guggacgugucaagcgaaa

SEQ ID NO: 2338367 - RNA, 19 nt, Homo sapiens
  misc_RNA (1)...(19): siRNA sense strand
guuuaaugaugcugccuau

SEQ ID NO: 2338368 - RNA, 19 nt, Homo sapiens
  misc_RNA (1)...(19): siRNA sense strand
uggacaaggcugagcgcga

SEQ ID NO: 2338369 - RNA, 19 nt, Homo sapiens
  misc_RNA (1)...(19): siRNA sense strand
gaaauaucaaggagcccaa

SEQ ID NO: 2338370 - RNA, 19 nt, Homo sapiens
  misc_RNA (1)...(19): siRNA sense strand
ccaacaacccgcugcucaa

SEQ ID NO: 2338371 - RNA, 19 nt, Homo sapiens
  misc_RNA (1)...(19): siRNA sense strand
gcaaacuggacaaggcuga

SEQ ID NO: 2338372 - RNA, 19 nt, Homo sapiens
  misc_RNA (1)...(19): siRNA sense strand
agcuagagauugcaaacaa

SEQ ID NO: 2338373 - RNA, 19 nt, Homo sapiens
  misc_RNA (1)...(19): siRNA sense strand
cagaaaguucggauuaaau

SEQ ID NO: 2338374 - RNA, 19 nt, Homo sapiens
  misc_RNA (1)...(19): siRNA sense strand
cagcacaguccaugggcuu

SEQ ID NO: 2338375 - RNA, 19 nt, Homo sapiens
  misc_RNA (1)...(19): siRNA sense strand
acagaaaucgauuggcuau

SEQ ID NO: 2338376 - RNA, 19 nt, Homo sapiens
  misc_RNA (1)...(19): siRNA sense strand
cgucaaggccaucgagauc

SEQ ID NO: 2338377 - RNA, 19 nt, Homo sapiens
  misc_RNA (1)...(19): siRNA sense strand
gcgggaugacagacagcua

SEQ ID NO: 2338378 - RNA, 19 nt, Homo sapiens
  misc_RNA (1)...(19): siRNA sense strand
cuguguacuguguggcaua

SEQ ID NO: 2338379 - RNA, 19 nt, Homo sapiens
  misc_RNA (1)...(19): siRNA sense strand
gcgaggagaaaguaaagau

SEQ ID NO: 2338380 - RNA, 19 nt, Homo sapiens
  misc_RNA (1)...(19): siRNA sense strand
ggguugacauguugaucga

SEQ ID NO: 2338381 - RNA, 19 nt, Homo sapiens
  misc_RNA (1)...(19): siRNA sense strand
ccaaagaaacaaagaugcu

SEQ ID NO: 2338382 - RNA, 19 nt, Homo sapiens
  misc_RNA (1)...(19): siRNA sense strand
acuuaucagacaugcauua

SEQ ID NO: 2338383 - RNA, 19 nt, Homo sapiens
  misc_RNA (1)...(19): siRNA sense strand
gcauugaggagaggaagaa

SEQ ID NO: 2338384 - RNA, 19 nt, Homo sapiens
  misc_RNA (1)...(19): siRNA sense strand
gugaggaguuggugcccuu

SEQ ID NO: 2338385 - RNA, 19 nt, Homo sapiens
  misc_RNA (1)...(19): siRNA sense strand
gagauaaagccgagcacug

SEQ ID NO: 2338386 - RNA, 19 nt, Homo sapiens
  misc_RNA (1)...(19): siRNA sense strand
aaacacaaaucaagcagca

SEQ ID NO: 2338387 - RNA, 19 nt, Homo sapiens
  misc_RNA (1)...(19): siRNA sense strand
acuaaaggcgaguacauuu

SEQ ID NO: 2338388 - RNA, 19 nt, Homo sapiens
  misc_RNA (1)...(19): siRNA sense strand
uugaguaugccaaggauuu

SEQ ID NO: 2338389 - RNA, 19 nt, Homo sapiens
  misc_RNA (1)...(19): siRNA sense strand
cagcaggagagcacgucaa

SEQ ID NO: 2338390 - RNA, 19 nt, Homo sapiens
  misc_RNA (1)...(19): siRNA sense strand
cauuuaagccugauggaac

SEQ ID NO: 2338391 - RNA, 19 nt, Homo sapiens
  misc_RNA (1)...(19): siRNA sense strand
caaacaaugccguggcgga

SEQ ID NO: 2338392 - RNA, 19 nt, Homo sapiens
  misc_RNA (1)...(19): siRNA sense strand
agcagaaaguucggauuaa

SEQ ID NO: 2338393 - RNA, 19 nt, Homo sapiens
  misc_RNA (1)...(19): siRNA sense strand
cgcuagaagguuuagauuu

SEQ ID NO: 2338394 - RNA, 19 nt, Homo sapiens
  misc_RNA (1)...(19): siRNA sense strand
guacaagaggagugggcac

SEQ ID NO: 2338395 - RNA, 19 nt, Homo sapiens
  misc_RNA (1)...(19): siRNA sense strand
aaaucaagcagcaagauca

SEQ ID NO: 2338396 - RNA, 19 nt, Homo sapiens
  misc_RNA (1)...(19): siRNA sense strand
gguucagacaagcaaguau

SEQ ID NO: 2338397 - RNA, 19 nt, Homo sapiens
  misc_RNA (1)...(19): siRNA sense strand
aguuguauucagaggacuu

SEQ ID NO: 2338398 - RNA, 19 nt, Homo sapiens
  misc_RNA (1)...(19): siRNA sense strand
gcgcuagaagguuuagauu

SEQ ID NO: 2338399 - RNA, 19 nt, Homo sapiens
  misc_RNA (1)...(19): siRNA sense strand
aagcgaaaccggauuccaa

SEQ ID NO: 2338400 - RNA, 19 nt, Homo sapiens
  misc_RNA (1)...(19): siRNA sense strand
uggccgugguagaugaaaa

SEQ ID NO: 2338401 - RNA, 19 nt, Homo sapiens
  misc_RNA (1)...(19): siRNA sense strand
gagagcacgucaaggccau

SEQ ID NO: 2338402 - RNA, 19 nt, Homo sapiens
  misc_RNA (1)...(19): siRNA sense strand
guugacguggagagauaaa

SEQ ID NO: 2338403 - RNA, 19 nt, Homo sapiens
  misc_RNA (1)...(19): siRNA sense strand
ggagugaaggagcgggagu

SEQ ID NO: 2338404 - RNA, 19 nt, Homo sapiens
  misc_RNA (1)...(19): siRNA sense strand
aaggagaagauuaucaaga

SEQ ID NO: 2338405 - RNA, 19 nt, Homo sapiens
  misc_RNA (1)...(19): siRNA sense strand
aggcugggcgacagagaga

SEQ ID NO: 2338406 - RNA, 19 nt, Homo sapiens
  misc_RNA (1)...(19): siRNA sense strand
cagagaaaauccucaucua

SEQ ID NO: 2338407 - RNA, 19 nt, Homo sapiens
  misc_RNA (1)...(19): siRNA sense strand
cgggaguggcagauggagu

SEQ ID NO: 2338408 - RNA, 19 nt, Homo sapiens
  misc_RNA (1)...(19): siRNA sense strand
gagcagaacuccugggugu

SEQ ID NO: 2338409 - RNA, 19 nt, Homo sapiens
  misc_RNA (1)...(19): siRNA sense strand
cgcuaugccuacagggaua

SEQ ID NO: 2338410 - RNA, 19 nt, Homo sapiens
  misc_RNA (1)...(19): siRNA sense strand
gauuaaaugcaaagagcuu

SEQ ID NO: 2338411 - RNA, 19 nt, Homo sapiens
  misc_RNA (1)...(19): siRNA sense strand
cggguaaaggagaagauua

SEQ ID NO: 2338412 - RNA, 19 nt, Homo sapiens
  misc_RNA (1)...(19): siRNA sense strand
aggagaaaguaaagaucga

SEQ ID NO: 2338413 - RNA, 19 nt, Homo sapiens
  misc_RNA (1)...(19): siRNA sense strand
gcucagaguucgugccagu

SEQ ID NO: 2338414 - RNA, 19 nt, Homo sapiens
  misc_RNA (1)...(19): siRNA sense strand
gcagcauugaggagaggaa

SEQ ID NO: 2338415 - RNA, 19 nt, Homo sapiens
  misc_RNA (1)...(19): siRNA sense strand
guggaaaacagauuggaaa

SEQ ID NO: 2338416 - RNA, 19 nt, Homo sapiens
  misc_RNA (1)...(19): siRNA sense strand
uauccaacugccagagaaa

SEQ ID NO: 2338417 - RNA, 19 nt, Homo sapiens
  misc_RNA (1)...(19): siRNA sense strand
gaguacaagaccuccgaua

SEQ ID NO: 2338418 - RNA, 19 nt, Homo sapiens
  misc_RNA (1)...(19): siRNA sense strand
guggacgugucaagcgaaa

SEQ ID NO: 2338419 - RNA, 19 nt, Homo sapiens
  misc_RNA (1)...(19): siRNA sense strand
guuuaaugaugcugccuau

SEQ ID NO: 2338420 - RNA, 19 nt, Homo sapiens
  misc_RNA (1)...(19): siRNA sense strand
uggacaaggcugagcgcga

SEQ ID NO: 2338421 - RNA, 19 nt, Homo sapiens
  misc_RNA (1)...(19): siRNA sense strand
gaaauaucaaggagcccaa

SEQ ID NO: 2338422 - RNA, 19 nt, Homo sapiens
  misc_RNA (1)...(19): siRNA sense strand
ccaacaacccgcugcucaa

SEQ ID NO: 2338423 - RNA, 19 nt, Homo sapiens
  misc_RNA (1)...(19): siRNA sense strand
gcaaacuggacaaggcuga

SEQ ID NO: 2338424 - RNA, 19 nt, Homo sapiens
  misc_RNA (1)...(19): siRNA sense strand
agcuagagauugcaaacaa

SEQ ID NO: 2338425 - RNA, 19 nt, Homo sapiens
  misc_RNA (1)...(19): siRNA sense strand
cagaaaguucggauuaaau

SEQ ID NO: 2338426 - RNA, 19 nt, Homo sapiens
  misc_RNA (1)...(19): siRNA sense strand
cagcacaguccaugggcuu

SEQ ID NO: 2338427 - RNA, 19 nt, Homo sapiens
  misc_RNA (1)...(19): siRNA sense strand
acagaaaucgauuggcuau

SEQ ID NO: 2338428 - RNA, 19 nt, Homo sapiens
  misc_RNA (1)...(19): siRNA sense strand
cgucaaggccaucgagauc

SEQ ID NO: 2338429 - RNA, 19 nt, Homo sapiens
  misc_RNA (1)...(19): siRNA sense strand
gcgggaugacagacagcua

SEQ ID NO: 2338430 - RNA, 19 nt, Homo sapiens
  misc_RNA (1)...(19): siRNA sense strand
cuguguacuguguggcaua

SEQ ID NO: 2338431 - RNA, 19 nt, Homo sapiens
  misc_RNA (1)...(19): siRNA sense strand
gcgaggagaaaguaaagau

SEQ ID NO: 2338432 - RNA, 19 nt, Homo sapiens
  misc_RNA (1)...(19): siRNA sense strand
ggguugacauguugaucga

SEQ ID NO: 2338433 - RNA, 19 nt, Homo sapiens
  misc_RNA (1)...(19): siRNA sense strand
ccaaagaaacaaagaugcu

SEQ ID NO: 2338434 - RNA, 19 nt, Homo sapiens
  misc_RNA (1)...(19): siRNA sense strand
acuuaucagacaugcauua

SEQ ID NO: 2338435 - RNA, 19 nt, Homo sapiens
  misc_RNA (1)...(19): siRNA sense strand
gcauugaggagaggaagaa

SEQ ID NO: 2338436 - RNA, 19 nt, Homo sapiens
  misc_RNA (1)...(19): siRNA sense strand
gugaggaguuggugcccuu

SEQ ID NO: 2338437 - RNA, 19 nt, Homo sapiens
  misc_RNA (1)...(19): siRNA sense strand
gagauaaagccgagcacug

SEQ ID NO: 2338438 - RNA, 19 nt, Homo sapiens
  misc_RNA (1)...(19): siRNA sense strand
aaacacaaaucaagcagca

SEQ ID NO: 2338439 - RNA, 19 nt, Homo sapiens
  misc_RNA (1)...(19): siRNA sense strand
acuaaaggcgaguacauuu

SEQ ID NO: 2338440 - RNA, 19 nt, Homo sapiens
  misc_RNA (1)...(19): siRNA sense strand
uugaguaugccaaggauuu

SEQ ID NO: 2338441 - RNA, 19 nt, Homo sapiens
  misc_RNA (1)...(19): siRNA sense strand
cagcaggagagcacgucaa

SEQ ID NO: 2338442 - RNA, 19 nt, Homo sapiens
  misc_RNA (1)...(19): siRNA sense strand
cauuuaagccugauggaac

SEQ ID NO: 2338443 - RNA, 19 nt, Homo sapiens
  misc_RNA (1)...(19): siRNA sense strand
caaacaaugccguggcgga

SEQ ID NO: 2338444 - RNA, 19 nt, Homo sapiens
  misc_RNA (1)...(19): siRNA sense strand
agcagaaaguucggauuaa

SEQ ID NO: 2338445 - RNA, 19 nt, Homo sapiens
  misc_RNA (1)...(19): siRNA sense strand
cgcuagaagguuuagauuu

SEQ ID NO: 2338446 - RNA, 19 nt, Homo sapiens
  misc_RNA (1)...(19): siRNA sense strand
guacaagaggagugggcac

SEQ ID NO: 2338447 - RNA, 19 nt, Homo sapiens
  misc_RNA (1)...(19): siRNA sense strand
aaaucaagcagcaagauca

SEQ ID NO: 2338448 - RNA, 19 nt, Homo sapiens
  misc_RNA (1)...(19): siRNA sense strand
gguucagacaagcaaguau

SEQ ID NO: 2338449 - RNA, 19 nt, Homo sapiens
  misc_RNA (1)...(19): siRNA sense strand
aguuguauucagaggacuu

SEQ ID NO: 2338450 - RNA, 19 nt, Homo sapiens
  misc_RNA (1)...(19): siRNA sense strand
gcgcuagaagguuuagauu

SEQ ID NO: 2338451 - RNA, 19 nt, Homo sapiens
  misc_RNA (1)...(19): siRNA sense strand
aagcgaaaccggauuccaa

SEQ ID NO: 2338452 - RNA, 19 nt, Homo sapiens
  misc_RNA (1)...(19): siRNA sense strand
uggccgugguagaugaaaa

SEQ ID NO: 2338453 - RNA, 19 nt, Homo sapiens
  misc_RNA (1)...(19): siRNA sense strand
gagagcacgucaaggccau

SEQ ID NO: 2338454 - RNA, 19 nt, Homo sapiens
  misc_RNA (1)...(19): siRNA sense strand
guugacguggagagauaaa

SEQ ID NO: 2338455 - RNA, 19 nt, Homo sapiens
  misc_RNA (1)...(19): siRNA sense strand
ggagugaaggagcgggagu

SEQ ID NO: 2338456 - RNA, 19 nt, Homo sapiens
  misc_RNA (1)...(19): siRNA sense strand
aaggagaagauuaucaaga

SEQ ID NO: 2338457 - RNA, 19 nt, Homo sapiens
  misc_RNA (1)...(19): siRNA sense strand
aggcugggcgacagagaga

SEQ ID NO: 2338458 - RNA, 19 nt, Homo sapiens
  misc_RNA (1)...(19): siRNA sense strand
cagagaaaauccucaucua

SEQ ID NO: 2338459 - RNA, 19 nt, Homo sapiens
  misc_RNA (1)...(19): siRNA sense strand
cgggaguggcagauggagu

SEQ ID NO: 2338460 - RNA, 19 nt, Homo sapiens
  misc_RNA (1)...(19): siRNA sense strand
gagcagaacuccugggugu

SEQ ID NO: 2338461 - RNA, 19 nt, Homo sapiens
  misc_RNA (1)...(19): siRNA sense strand
cgcuaugccuacagggaua

SEQ ID NO: 2338462 - RNA, 19 nt, Homo sapiens
  misc_RNA (1)...(19): siRNA sense strand
gauuaaaugcaaagagcuu

SEQ ID NO: 2338463 - RNA, 19 nt, Homo sapiens
  misc_RNA (1)...(19): siRNA sense strand
cggguaaaggagaagauua

SEQ ID NO: 2338464 - RNA, 19 nt, Homo sapiens
  misc_RNA (1)...(19): siRNA sense strand
aggagaaaguaaagaucga

SEQ ID NO: 2338465 - RNA, 19 nt, Homo sapiens
  misc_RNA (1)...(19): siRNA sense strand
gcucagaguucgugccagu

SEQ ID NO: 2338466 - RNA, 19 nt, Homo sapiens
  misc_RNA (1)...(19): siRNA sense strand
gcagcauugaggagaggaa

SEQ ID NO: 2338467 - RNA, 19 nt, Homo sapiens
  misc_RNA (1)...(19): siRNA sense strand
guggaaaacagauuggaaa

SEQ ID NO: 2338468 - RNA, 19 nt, Homo sapiens
  misc_RNA (1)...(19): siRNA sense strand
uauccaacugccagagaaa

SEQ ID NO: 2338469 - RNA, 19 nt, Homo sapiens
  misc_RNA (1)...(19): siRNA sense strand
gaguacaagaccuccgaua

SEQ ID NO: 2338470 - RNA, 19 nt, Homo sapiens
  misc_RNA (1)...(19): siRNA sense strand
guggacgugucaagcgaaa

SEQ ID NO: 2338471 - RNA, 19 nt, Homo sapiens
  misc_RNA (1)...(19): siRNA sense strand
guuuaaugaugcugccuau

SEQ ID NO: 2338472 - RNA, 19 nt, Homo sapiens
  misc_RNA (1)...(19): siRNA sense strand
uggacaaggcugagcgcga

SEQ ID NO: 2338473 - RNA, 19 nt, Homo sapiens
  misc_RNA (1)...(19): siRNA sense strand
gaaauaucaaggagcccaa

SEQ ID NO: 2338474 - RNA, 19 nt, Homo sapiens
  misc_RNA (1)...(19): siRNA sense strand
ccaacaacccgcugcucaa

SEQ ID NO: 2338475 - RNA, 19 nt, Homo sapiens
  misc_RNA (1)...(19): siRNA sense strand
gcaaacuggacaaggcuga

SEQ ID NO: 2338476 - RNA, 19 nt, Homo sapiens
  misc_RNA (1)...(19): siRNA sense strand
agcuagagauugcaaacaa

SEQ ID NO: 2338477 - RNA, 19 nt, Homo sapiens
  misc_RNA (1)...(19): siRNA sense strand
cagaaaguucggauuaaau

SEQ ID NO: 2338478 - RNA, 19 nt, Homo sapiens
  misc_RNA (1)...(19): siRNA sense strand
cagcacaguccaugggcuu

SEQ ID NO: 2338479 - RNA, 19 nt, Homo sapiens
  misc_RNA (1)...(19): siRNA sense strand
acagaaaucgauuggcuau

SEQ ID NO: 2338480 - RNA, 19 nt, Homo sapiens
  misc_RNA (1)...(19): siRNA sense strand
cgucaaggccaucgagauc

SEQ ID NO: 2338481 - RNA, 19 nt, Homo sapiens
  misc_RNA (1)...(19): siRNA sense strand
gcgggaugacagacagcua

SEQ ID NO: 2338482 - RNA, 19 nt, Homo sapiens
  misc_RNA (1)...(19): siRNA sense strand
cuguguacuguguggcaua

SEQ ID NO: 2338483 - RNA, 19 nt, Homo sapiens
  misc_RNA (1)...(19): siRNA sense strand
gcgaggagaaaguaaagau

SEQ ID NO: 2338484 - RNA, 19 nt, Homo sapiens
  misc_RNA (1)...(19): siRNA sense strand
ggguugacauguugaucga

SEQ ID NO: 2338485 - RNA, 19 nt, Homo sapiens
  misc_RNA (1)...(19): siRNA sense strand
ccaaagaaacaaagaugcu

SEQ ID NO: 2338486 - RNA, 19 nt, Homo sapiens
  misc_RNA (1)...(19): siRNA sense strand
acuuaucagacaugcauua

SEQ ID NO: 2338487 - RNA, 19 nt, Homo sapiens
  misc_RNA (1)...(19): siRNA sense strand
gcauugaggagaggaagaa

SEQ ID NO: 2338488 - RNA, 19 nt, Homo sapiens
  misc_RNA (1)...(19): siRNA sense strand
gugaggaguuggugcccuu

SEQ ID NO: 2338489 - RNA, 19 nt, Homo sapiens
  misc_RNA (1)...(19): siRNA sense strand
gagauaaagccgagcacug

SEQ ID NO: 2338490 - RNA, 19 nt, Homo sapiens
  misc_RNA (1)...(19): siRNA sense strand
aaacacaaaucaagcagca

SEQ ID NO: 2338491 - RNA, 19 nt, Homo sapiens
  misc_RNA (1)...(19): siRNA sense strand
acuaaaggcgaguacauuu

SEQ ID NO: 2338492 - RNA, 19 nt, Homo sapiens
  misc_RNA (1)...(19): siRNA sense strand
uugaguaugccaaggauuu

SEQ ID NO: 2338493 - RNA, 19 nt, Homo sapiens
  misc_RNA (1)...(19): siRNA sense strand
cagcaggagagcacgucaa

SEQ ID NO: 2338494 - RNA, 19 nt, Homo sapiens
  misc_RNA (1)...(19): siRNA sense strand
cauuuaagccugauggaac

SEQ ID NO: 2338495 - RNA, 19 nt, Homo sapiens
  misc_RNA (1)...(19): siRNA sense strand
caaacaaugccguggcgga

SEQ ID NO: 2338496 - RNA, 19 nt, Homo sapiens
  misc_RNA (1)...(19): siRNA sense strand
agcagaaaguucggauuaa

SEQ ID NO: 2338497 - RNA, 19 nt, Homo sapiens
  misc_RNA (1)...(19): siRNA sense strand
cgcuagaagguuuagauuu

SEQ ID NO: 2338498 - RNA, 19 nt, Homo sapiens
  misc_RNA (1)...(19): siRNA sense strand
guacaagaggagugggcac

SEQ ID NO: 2338499 - RNA, 19 nt, Homo sapiens
  misc_RNA (1)...(19): siRNA sense strand
aaaucaagcagcaagauca

SEQ ID NO: 2338500 - RNA, 19 nt, Homo sapiens
  misc_RNA (1)...(19): siRNA sense strand
gguucagacaagcaaguau

SEQ ID NO: 2338501 - RNA, 19 nt, Homo sapiens
  misc_RNA (1)...(19): siRNA sense strand
aguuguauucagaggacuu

SEQ ID NO: 2338502 - RNA, 19 nt, Homo sapiens
  misc_RNA (1)...(19): siRNA sense strand
gcgcuagaagguuuagauu

SEQ ID NO: 2338503 - RNA, 19 nt, Homo sapiens
  misc_RNA (1)...(19): siRNA sense strand
aagcgaaaccggauuccaa

SEQ ID NO: 2338504 - RNA, 19 nt, Homo sapiens
  misc_RNA (1)...(19): siRNA sense strand
uggccgugguagaugaaaa

SEQ ID NO: 2338505 - RNA, 19 nt, Homo sapiens
  misc_RNA (1)...(19): siRNA sense strand
gagagcacgucaaggccau

SEQ ID NO: 2338506 - RNA, 19 nt, Homo sapiens
  misc_RNA (1)...(19): siRNA sense strand
guugacguggagagauaaa

SEQ ID NO: 2338507 - RNA, 19 nt, Homo sapiens
  misc_RNA (1)...(19): siRNA sense strand
ggagugaaggagcgggagu

SEQ ID NO: 2338508 - RNA, 19 nt, Homo sapiens
  misc_RNA (1)...(19): siRNA sense strand
aaggagaagauuaucaaga

SEQ ID NO: 2338509 - RNA, 19 nt, Homo sapiens
  misc_RNA (1)...(19): siRNA sense strand
aggcugggcgacagagaga

SEQ ID NO: 2338510 - RNA, 19 nt, Homo sapiens
  misc_RNA (1)...(19): siRNA sense strand
cagagaaaauccucaucua

SEQ ID NO: 2338511 - RNA, 19 nt, Homo sapiens
  misc_RNA (1)...(19): siRNA sense strand
cgggaguggcagauggagu

SEQ ID NO: 2338512 - RNA, 19 nt, Homo sapiens
  misc_RNA (1)...(19): siRNA sense strand
gcuccaaggaucagcggau

SEQ ID NO: 2338513 - RNA, 19 nt, Homo sapiens
  misc_RNA (1)...(19): siRNA sense strand
gcuuggagagugugggcuu

SEQ ID NO: 2338514 - RNA, 19 nt, Homo sapiens
  misc_RNA (1)...(19): siRNA sense strand
ccgugugcuuggagagugu

SEQ ID NO: 2338515 - RNA, 19 nt, Homo sapiens
  misc_RNA (1)...(19): siRNA sense strand
cccugaagccgaaggcaga

SEQ ID NO: 2338516 - RNA, 19 nt, Homo sapiens
  misc_RNA (1)...(19): siRNA sense strand
aagauaaaguugaaggcua

SEQ ID NO: 2338517 - RNA, 19 nt, Homo sapiens
  misc_RNA (1)...(19): siRNA sense strand
guguuaagaagcagaagaa

SEQ ID NO: 2338518 - RNA, 19 nt, Homo sapiens
  misc_RNA (1)...(19): siRNA sense strand
ggucaugucuaaaggucau

SEQ ID NO: 2338519 - RNA, 19 nt, Homo sapiens
  misc_RNA (1)...(19): siRNA sense strand
agauaaaguugaaggcuac

SEQ ID NO: 2338520 - RNA, 19 nt, Homo sapiens
  misc_RNA (1)...(19): siRNA sense strand
aggucaucguauugaggaa

SEQ ID NO: 2338521 - RNA, 19 nt, Homo sapiens
  misc_RNA (1)...(19): siRNA sense strand
ccaaagagcccuucgagca

SEQ ID NO: 2338522 - RNA, 19 nt, Homo sapiens
  misc_RNA (1)...(19): siRNA sense strand
gucuaaaggucaucguauu

SEQ ID NO: 2338523 - RNA, 19 nt, Homo sapiens
  misc_RNA (1)...(19): siRNA sense strand
aguucgagguggugggacu

SEQ ID NO: 2338524 - RNA, 19 nt, Homo sapiens
  misc_RNA (1)...(19): siRNA sense strand
gagagcuggcaaaggcaaa

SEQ ID NO: 2338525 - RNA, 19 nt, Homo sapiens
  misc_RNA (1)...(19): siRNA sense strand
aagccaaaucagaugagaa

SEQ ID NO: 2338526 - RNA, 19 nt, Homo sapiens
  misc_RNA (1)...(19): siRNA sense strand
agaagccucuggugggaaa

SEQ ID NO: 2338527 - RNA, 19 nt, Homo sapiens
  misc_RNA (1)...(19): siRNA sense strand
agcuaaacccauaugcaaa

SEQ ID NO: 2338528 - RNA, 19 nt, Homo sapiens
  misc_RNA (1)...(19): siRNA sense strand
ugguagguaagaaaggaaa

SEQ ID NO: 2338529 - RNA, 19 nt, Homo sapiens
  misc_RNA (1)...(19): siRNA sense strand
cuaugcugucagugaauua

SEQ ID NO: 2338530 - RNA, 19 nt, Homo sapiens
  misc_RNA (1)...(19): siRNA sense strand
gguguuaagaagcagaaga

SEQ ID NO: 2338531 - RNA, 19 nt, Homo sapiens
  misc_RNA (1)...(19): siRNA sense strand
gccugugguagguaagaaa

SEQ ID NO: 2338532 - RNA, 19 nt, Homo sapiens
  misc_RNA (1)...(19): siRNA sense strand
aaagaagccugcagagaag

SEQ ID NO: 2338533 - RNA, 19 nt, Homo sapiens
  misc_RNA (1)...(19): siRNA sense strand
aauacagaucuuagcagaa

SEQ ID NO: 2338534 - RNA, 19 nt, Homo sapiens
  misc_RNA (1)...(19): siRNA sense strand
gugguagguaagaaaggaa

SEQ ID NO: 2338535 - RNA, 19 nt, Homo sapiens
  misc_RNA (1)...(19): siRNA sense strand
gcagagaagaaaccuacua

SEQ ID NO: 2338536 - RNA, 19 nt, Homo sapiens
  misc_RNA (1)...(19): siRNA sense strand
uggcaaaggcaaaaugaga

SEQ ID NO: 2338537 - RNA, 19 nt, Homo sapiens
  misc_RNA (1)...(19): siRNA sense strand
uaauacagaucuuagcaga

SEQ ID NO: 2338538 - RNA, 19 nt, Homo sapiens
  misc_RNA (1)...(19): siRNA sense strand
gcaagaagccugugguagg

SEQ ID NO: 2338539 - RNA, 19 nt, Homo sapiens
  misc_RNA (1)...(19): siRNA sense strand
gauccaucgcagaguccua

SEQ ID NO: 2338540 - RNA, 19 nt, Homo sapiens
  misc_RNA (1)...(19): siRNA sense strand
aaguugaaggcuacaagaa

SEQ ID NO: 2338541 - RNA, 19 nt, Homo sapiens
  misc_RNA (1)...(19): siRNA sense strand
agguaagaaaggaaagaag

SEQ ID NO: 2338542 - RNA, 19 nt, Homo sapiens
  misc_RNA (1)...(19): siRNA sense strand
gggauuacuuugagcggaa

SEQ ID NO: 2338543 - RNA, 19 nt, Homo sapiens
  misc_RNA (1)...(19): siRNA sense strand
cuuuaugaucuauggcaaa

SEQ ID NO: 2338544 - RNA, 19 nt, Homo sapiens
  misc_RNA (1)...(19): siRNA sense strand
aggacacauucaagacaaa

SEQ ID NO: 2338545 - RNA, 19 nt, Homo sapiens
  misc_RNA (1)...(19): siRNA sense strand
cguguggauuauuuggaaa

SEQ ID NO: 2338546 - RNA, 19 nt, Homo sapiens
  misc_RNA (1)...(19): siRNA sense strand
gcaaaagcguggaggcgga

SEQ ID NO: 2338547 - RNA, 19 nt, Homo sapiens
  misc_RNA (1)...(19): siRNA sense strand
gaggcaaaucagaaaguca

SEQ ID NO: 2338548 - RNA, 19 nt, Homo sapiens
  misc_RNA (1)...(19): siRNA sense strand
auucagaaacacaggacau

SEQ ID NO: 2338549 - RNA, 19 nt, Homo sapiens
  misc_RNA (1)...(19): siRNA sense strand
ucuuuaugaucuauggcaa

SEQ ID NO: 2338550 - RNA, 19 nt, Homo sapiens
  misc_RNA (1)...(19): siRNA sense strand
aaucagaaagucacgggaa

SEQ ID NO: 2338551 - RNA, 19 nt, Homo sapiens
  misc_RNA (1)...(19): siRNA sense strand
aucagaaagucacgggaau

SEQ ID NO: 2338552 - RNA, 19 nt, Homo sapiens
  misc_RNA (1)...(19): siRNA sense strand
ugagaaaggccaagcugga

SEQ ID NO: 2338553 - RNA, 19 nt, Homo sapiens
  misc_RNA (1)...(19): siRNA sense strand
cggaguacauggagcacgu

SEQ ID NO: 2338554 - RNA, 19 nt, Homo sapiens
  misc_RNA (1)...(19): siRNA sense strand
cguaugaauuaaucaggga

SEQ ID NO: 2338555 - RNA, 19 nt, Homo sapiens
  misc_RNA (1)...(19): siRNA sense strand
ggauagagcaguaugggac

SEQ ID NO: 2338556 - RNA, 19 nt, Homo sapiens
  misc_RNA (1)...(19): siRNA sense strand
aggaggaggcagaguggca

SEQ ID NO: 2338557 - RNA, 19 nt, Homo sapiens
  misc_RNA (1)...(19): siRNA sense strand
ggaugaagacuccgggaag

SEQ ID NO: 2338558 - RNA, 19 nt, Homo sapiens
  misc_RNA (1)...(19): siRNA sense strand
uucacaagguggaaggaca

SEQ ID NO: 2338559 - RNA, 19 nt, Homo sapiens
  misc_RNA (1)...(19): siRNA sense strand
guguggauuauuuggaaaa

SEQ ID NO: 2338560 - RNA, 19 nt, Homo sapiens
  misc_RNA (1)...(19): siRNA sense strand
ucaagaagcaggagaggag

SEQ ID NO: 2338561 - RNA, 19 nt, Homo sapiens
  misc_RNA (1)...(19): siRNA sense strand
gcggcauggagaauggcaa

SEQ ID NO: 2338562 - RNA, 19 nt, Homo sapiens
  misc_RNA (1)...(19): siRNA sense strand
gagaauggcaacauggauc

SEQ ID NO: 2338563 - RNA, 19 nt, Homo sapiens
  misc_RNA (1)...(19): siRNA sense strand
gauagagcaguaugggaca

SEQ ID NO: 2338564 - RNA, 19 nt, Homo sapiens
  misc_RNA (1)...(19): siRNA sense strand
gggauuacuuugagcggaa

SEQ ID NO: 2338565 - RNA, 19 nt, Homo sapiens
  misc_RNA (1)...(19): siRNA sense strand
cuuuaugaucuauggcaaa

SEQ ID NO: 2338566 - RNA, 19 nt, Homo sapiens
  misc_RNA (1)...(19): siRNA sense strand
aggacacauucaagacaaa

SEQ ID NO: 2338567 - RNA, 19 nt, Homo sapiens
  misc_RNA (1)...(19): siRNA sense strand
cguguggauuauuuggaaa

SEQ ID NO: 2338568 - RNA, 19 nt, Homo sapiens
  misc_RNA (1)...(19): siRNA sense strand
gcaaaagcguggaggcgga

SEQ ID NO: 2338569 - RNA, 19 nt, Homo sapiens
  misc_RNA (1)...(19): siRNA sense strand
gaggcaaaucagaaaguca

SEQ ID NO: 2338570 - RNA, 19 nt, Homo sapiens
  misc_RNA (1)...(19): siRNA sense strand
auucagaaacacaggacau

SEQ ID NO: 2338571 - RNA, 19 nt, Homo sapiens
  misc_RNA (1)...(19): siRNA sense strand
ucuuuaugaucuauggcaa

SEQ ID NO: 2338572 - RNA, 19 nt, Homo sapiens
  misc_RNA (1)...(19): siRNA sense strand
aaucagaaagucacgggaa

SEQ ID NO: 2338573 - RNA, 19 nt, Homo sapiens
  misc_RNA (1)...(19): siRNA sense strand
aucagaaagucacgggaau

SEQ ID NO: 2338574 - RNA, 19 nt, Homo sapiens
  misc_RNA (1)...(19): siRNA sense strand
ugagaaaggccaagcugga

SEQ ID NO: 2338575 - RNA, 19 nt, Homo sapiens
  misc_RNA (1)...(19): siRNA sense strand
cggaguacauggagcacgu

SEQ ID NO: 2338576 - RNA, 19 nt, Homo sapiens
  misc_RNA (1)...(19): siRNA sense strand
cguaugaauuaaucaggga

SEQ ID NO: 2338577 - RNA, 19 nt, Homo sapiens
  misc_RNA (1)...(19): siRNA sense strand
ggauagagcaguaugggac

SEQ ID NO: 2338578 - RNA, 19 nt, Homo sapiens
  misc_RNA (1)...(19): siRNA sense strand
aggaggaggcagaguggca

SEQ ID NO: 2338579 - RNA, 19 nt, Homo sapiens
  misc_RNA (1)...(19): siRNA sense strand
ggaugaagacuccgggaag

SEQ ID NO: 2338580 - RNA, 19 nt, Homo sapiens
  misc_RNA (1)...(19): siRNA sense strand
uucacaagguggaaggaca

SEQ ID NO: 2338581 - RNA, 19 nt, Homo sapiens
  misc_RNA (1)...(19): siRNA sense strand
guguggauuauuuggaaaa

SEQ ID NO: 2338582 - RNA, 19 nt, Homo sapiens
  misc_RNA (1)...(19): siRNA sense strand
ucaagaagcaggagaggag

SEQ ID NO: 2338583 - RNA, 19 nt, Homo sapiens
  misc_RNA (1)...(19): siRNA sense strand
gcggcauggagaauggcaa

SEQ ID NO: 2338584 - RNA, 19 nt, Homo sapiens
  misc_RNA (1)...(19): siRNA sense strand
gagaauggcaacauggauc

SEQ ID NO: 2338585 - RNA, 19 nt, Homo sapiens
  misc_RNA (1)...(19): siRNA sense strand
gauagagcaguaugggaca

SEQ ID NO: 2338586 - RNA, 19 nt, Homo sapiens
  misc_RNA (1)...(19): siRNA sense strand
cggaggaaguggagaggca

SEQ ID NO: 2338587 - RNA, 19 nt, Homo sapiens
  misc_RNA (1)...(19): siRNA sense strand
cugcaauggccgaggagau

SEQ ID NO: 2338588 - RNA, 19 nt, Homo sapiens
  misc_RNA (1)...(19): siRNA sense strand
agaagaagaucaauggcau

SEQ ID NO: 2338589 - RNA, 19 nt, Homo sapiens
  misc_RNA (1)...(19): siRNA sense strand
cuguacugguggacgauua

SEQ ID NO: 2338590 - RNA, 19 nt, Homo sapiens
  misc_RNA (1)...(19): siRNA sense strand
agaccaaguuugagcagca

SEQ ID NO: 2338591 - RNA, 19 nt, Homo sapiens
  misc_RNA (1)...(19): siRNA sense strand
gaauaaagccgguugguug

SEQ ID NO: 2338592 - RNA, 19 nt, Homo sapiens
  misc_RNA (1)...(19): siRNA sense strand
cugcuaaggaggugcucaa

SEQ ID NO: 2338593 - RNA, 19 nt, Homo sapiens
  misc_RNA (1)...(19): siRNA sense strand
cugccaagaagaagaucaa

SEQ ID NO: 2338594 - RNA, 19 nt, Homo sapiens
  misc_RNA (1)...(19): siRNA sense strand
agguuuacugcgaggaaau

SEQ ID NO: 2338595 - RNA, 19 nt, Homo sapiens
  misc_RNA (1)...(19): siRNA sense strand
gugccaagacugugaacca

SEQ ID NO: 2338596 - RNA, 19 nt, Homo sapiens
  misc_RNA (1)...(19): siRNA sense strand
ggagauuugaggagugcau

SEQ ID NO: 2338597 - RNA, 19 nt, Homo sapiens
  misc_RNA (1)...(19): siRNA sense strand
gugcggagucagauagaca

SEQ ID NO: 2338598 - RNA, 19 nt, Homo sapiens
  misc_RNA (1)...(19): siRNA sense strand
uguuugugcugguggccaa

SEQ ID NO: 2338599 - RNA, 19 nt, Homo sapiens
  misc_RNA (1)...(19): siRNA sense strand
gacacauggcugaggugaa

SEQ ID NO: 2338600 - RNA, 19 nt, Homo sapiens
  misc_RNA (1)...(19): siRNA sense strand
uuggaggagugguguggaa

SEQ ID NO: 2338601 - RNA, 19 nt, Homo sapiens
  misc_RNA (1)...(19): siRNA sense strand
ccgaguacauggaggaggu

SEQ ID NO: 2338602 - RNA, 19 nt, Homo sapiens
  misc_RNA (1)...(19): siRNA sense strand
uugaagacacguacaggaa

SEQ ID NO: 2338603 - RNA, 19 nt, Homo sapiens
  misc_RNA (1)...(19): siRNA sense strand
ccgagggcucagaggaaaa

SEQ ID NO: 2338604 - RNA, 19 nt, Homo sapiens
  misc_RNA (1)...(19): siRNA sense strand
ccacaaggugagugagcgu

SEQ ID NO: 2338605 - RNA, 19 nt, Homo sapiens
  misc_RNA (1)...(19): siRNA sense strand
gaggaaaagaggagugcca

SEQ ID NO: 2338606 - RNA, 19 nt, Homo sapiens
  misc_RNA (1)...(19): siRNA sense strand
aggacaugauagauggcuu

SEQ ID NO: 2338607 - RNA, 19 nt, Homo sapiens
  misc_RNA (1)...(19): siRNA sense strand
gggccaagcagauugcaga

SEQ ID NO: 2338608 - RNA, 19 nt, Homo sapiens
  misc_RNA (1)...(19): siRNA sense strand
agaccaugcagcaggacau

SEQ ID NO: 2338609 - RNA, 19 nt, Homo sapiens
  misc_RNA (1)...(19): siRNA sense strand
gguuggacagugagcucaa

SEQ ID NO: 2338610 - RNA, 19 nt, Homo sapiens
  misc_RNA (1)...(19): siRNA sense strand
ccacauagaggaaggacug

SEQ ID NO: 2338611 - RNA, 19 nt, Homo sapiens
  misc_RNA (1)...(19): siRNA sense strand
uugacucacuucagagcaa

SEQ ID NO: 2338612 - RNA, 19 nt, Homo sapiens
  misc_RNA (1)...(19): siRNA sense strand
agugaggauguuugaguuu

SEQ ID NO: 2338613 - RNA, 19 nt, Homo sapiens
  misc_RNA (1)...(19): siRNA sense strand
uccucaagguuuauaagaa

SEQ ID NO: 2338614 - RNA, 19 nt, Homo sapiens
  misc_RNA (1)...(19): siRNA sense strand
acccugaugcagacggaaa

SEQ ID NO: 2338615 - RNA, 19 nt, Homo sapiens
  misc_RNA (1)...(19): siRNA sense strand
agaaugagcugcaccgcca

SEQ ID NO: 2338616 - RNA, 19 nt, Homo sapiens
  misc_RNA (1)...(19): siRNA sense strand
gcaccgccacauagaggaa

SEQ ID NO: 2338617 - RNA, 19 nt, Homo sapiens
  misc_RNA (1)...(19): siRNA sense strand
cggacgagcaaugggaaga

SEQ ID NO: 2338618 - RNA, 19 nt, Homo sapiens
  misc_RNA (1)...(19): siRNA sense strand
ucucuguacugguggacga

SEQ ID NO: 2338619 - RNA, 19 nt, Homo sapiens
  misc_RNA (1)...(19): siRNA sense strand
acgauuaccagauggacuu

SEQ ID NO: 2338620 - RNA, 19 nt, Homo sapiens
  misc_RNA (1)...(19): siRNA sense strand
cgaaaugagaagaaggcuu

SEQ ID NO: 2338621 - RNA, 19 nt, Homo sapiens
  misc_RNA (1)...(19): siRNA sense strand
agagaagacugcugcggaa

SEQ ID NO: 2338622 - RNA, 19 nt, Homo sapiens
  misc_RNA (1)...(19): siRNA sense strand
gcgcgaugucgaaggagaa

SEQ ID NO: 2338623 - RNA, 19 nt, Homo sapiens
  misc_RNA (1)...(19): siRNA sense strand
gggaagauucagugcgcga

SEQ ID NO: 2338624 - RNA, 19 nt, Homo sapiens
  misc_RNA (1)...(19): siRNA sense strand
agaugugaagagaaagaaa

SEQ ID NO: 2338625 - RNA, 19 nt, Homo sapiens
  misc_RNA (1)...(19): siRNA sense strand
cggaagaaucagaggaagc

SEQ ID NO: 2338626 - RNA, 19 nt, Homo sapiens
  misc_RNA (1)...(19): siRNA sense strand
acaacgaagaauugaacau

SEQ ID NO: 2338627 - RNA, 19 nt, Homo sapiens
  misc_RNA (1)...(19): siRNA sense strand
cgcgcaacguacagagauu

SEQ ID NO: 2338628 - RNA, 19 nt, Homo sapiens
  misc_RNA (1)...(19): siRNA sense strand
gugagguggacgagcaaga

SEQ ID NO: 2338629 - RNA, 19 nt, Homo sapiens
  misc_RNA (1)...(19): siRNA sense strand
acaucaaauuagcuagaca

SEQ ID NO: 2338630 - RNA, 19 nt, Homo sapiens
  misc_RNA (1)...(19): siRNA sense strand
auuaauguggaaagagcua

SEQ ID NO: 2338631 - RNA, 19 nt, Homo sapiens
  misc_RNA (1)...(19): siRNA sense strand
ccacaaggcacgaacgaag

SEQ ID NO: 2338632 - RNA, 19 nt, Homo sapiens
  misc_RNA (1)...(19): siRNA sense strand
aagagaaagaaaucccaaa

SEQ ID NO: 2338633 - RNA, 19 nt, Homo sapiens
  misc_RNA (1)...(19): siRNA sense strand
gcugugagguggacgagca

SEQ ID NO: 2338634 - RNA, 19 nt, Homo sapiens
  misc_RNA (1)...(19): siRNA sense strand
caugagugugcaagauaau

SEQ ID NO: 2338635 - RNA, 19 nt, Homo sapiens
  misc_RNA (1)...(19): siRNA sense strand
aggagaagauucagugcgu

SEQ ID NO: 2338636 - RNA, 19 nt, Homo sapiens
  misc_RNA (1)...(19): siRNA sense strand
agacaauuaauguggaaag

SEQ ID NO: 2338637 - RNA, 19 nt, Homo sapiens
  misc_RNA (1)...(19): siRNA sense strand
gugaggccuacaugagaaa

SEQ ID NO: 2338638 - RNA, 19 nt, Homo sapiens
  misc_RNA (1)...(19): siRNA sense strand
ccuacaugagugugcaaga

SEQ ID NO: 2338639 - RNA, 19 nt, Homo sapiens
  misc_RNA (1)...(19): siRNA sense strand
caguucgaaaugagaagaa

SEQ ID NO: 2338640 - RNA, 19 nt, Homo sapiens
  misc_RNA (1)...(19): siRNA sense strand
agcuacaaagugaagauaa

SEQ ID NO: 2338641 - RNA, 19 nt, Homo sapiens
  misc_RNA (1)...(19): siRNA sense strand
cgaugucgaaggagaagau

SEQ ID NO: 2338642 - RNA, 19 nt, Homo sapiens
  misc_RNA (1)...(19): siRNA sense strand
gaagagaaagaaaucccaa

SEQ ID NO: 2338643 - RNA, 19 nt, Homo sapiens
  misc_RNA (1)...(19): siRNA sense strand
cggcaguucgaaaugagaa

SEQ ID NO: 2338644 - RNA, 19 nt, Homo sapiens
  misc_RNA (1)...(19): siRNA sense strand
aggcagugauggagaacau

SEQ ID NO: 2338645 - RNA, 19 nt, Homo sapiens
  misc_RNA (1)...(19): siRNA sense strand
gagacauccacgcgagaau

SEQ ID NO: 2338646 - RNA, 19 nt, Homo sapiens
  misc_RNA (1)...(19): siRNA sense strand
gcuuacaacuggaugcacu

SEQ ID NO: 2338647 - RNA, 19 nt, Homo sapiens
  misc_RNA (1)...(19): siRNA sense strand
gguaagggccugagccaug

SEQ ID NO: 2338648 - RNA, 19 nt, Homo sapiens
  misc_RNA (1)...(19): siRNA sense strand
ccucagccauacagggcau

SEQ ID NO: 2338649 - RNA, 19 nt, Homo sapiens
  misc_RNA (1)...(19): siRNA sense strand
gugggaagcugcagugcca

SEQ ID NO: 2338650 - RNA, 19 nt, Homo sapiens
  misc_RNA (1)...(19): siRNA sense strand
caggauacauagaaaccca

SEQ ID NO: 2338651 - RNA, 19 nt, Homo sapiens
  misc_RNA (1)...(19): siRNA sense strand
uggugaacucugcgggaga

SEQ ID NO: 2338652 - RNA, 19 nt, Homo sapiens
  misc_RNA (1)...(19): siRNA sense strand
caccgaaacuugaaccaca

SEQ ID NO: 2338653 - RNA, 19 nt, Homo sapiens
  misc_RNA (1)...(19): siRNA sense strand
gugggaagcugcagugcca

SEQ ID NO: 2338654 - RNA, 19 nt, Homo sapiens
  misc_RNA (1)...(19): siRNA sense strand
caggauacauagaaaccca

SEQ ID NO: 2338655 - RNA, 19 nt, Homo sapiens
  misc_RNA (1)...(19): siRNA sense strand
uggugaacucugcgggaga

SEQ ID NO: 2338656 - RNA, 19 nt, Homo sapiens
  misc_RNA (1)...(19): siRNA sense strand
caccgaaacuugaaccaca

SEQ ID NO: 2338657 - RNA, 19 nt, Homo sapiens
  misc_RNA (1)...(19): siRNA sense strand
cagaagagcuccagccgaa

SEQ ID NO: 2338658 - RNA, 19 nt, Homo sapiens
  misc_RNA (1)...(19): siRNA sense strand
cagaagaaguagaguggga

SEQ ID NO: 2338659 - RNA, 19 nt, Homo sapiens
  misc_RNA (1)...(19): siRNA sense strand
gggaagaauuugagagagc

SEQ ID NO: 2338660 - RNA, 19 nt, Homo sapiens
  misc_RNA (1)...(19): siRNA sense strand
gagucauguuccagggcaa

SEQ ID NO: 2338661 - RNA, 19 nt, Homo sapiens
  misc_RNA (1)...(19): siRNA sense strand
gaagcagggaugagggcaa

SEQ ID NO: 2338662 - RNA, 19 nt, Homo sapiens
  misc_RNA (1)...(19): siRNA sense strand
gcaugcaaucaaugggaaa

SEQ ID NO: 2338663 - RNA, 19 nt, Homo sapiens
  misc_RNA (1)...(19): siRNA sense strand
aaacuuucuuggagagcaa

SEQ ID NO: 2338664 - RNA, 19 nt, Homo sapiens
  misc_RNA (1)...(19): siRNA sense strand
aggcaaaguucgacaguac

SEQ ID NO: 2338665 - RNA, 19 nt, Homo sapiens
  misc_RNA (1)...(19): siRNA sense strand
uggcaugggcaaugaaauu

SEQ ID NO: 2338666 - RNA, 19 nt, Homo sapiens
  misc_RNA (1)...(19): siRNA sense strand
cagaggauauugagggcuu

SEQ ID NO: 2338667 - RNA, 19 nt, Homo sapiens
  misc_RNA (1)...(19): siRNA sense strand
ugccaagcccuuugagaaa

SEQ ID NO: 2338668 - RNA, 19 nt, Homo sapiens
  misc_RNA (1)...(19): siRNA sense strand
agacauuccaagagaagau

SEQ ID NO: 2338669 - RNA, 19 nt, Homo sapiens
  misc_RNA (1)...(19): siRNA sense strand
gggaguacugggaagaauu

SEQ ID NO: 2338670 - RNA, 19 nt, Homo sapiens
  misc_RNA (1)...(19): siRNA sense strand
gugcagauggcaagcagaa

SEQ ID NO: 2338671 - RNA, 19 nt, Homo sapiens
  misc_RNA (1)...(19): siRNA sense strand
gagaacaagagcugguaca

SEQ ID NO: 2338672 - RNA, 19 nt, Homo sapiens
  misc_RNA (1)...(19): siRNA sense strand
gggaauacacugaugguac

SEQ ID NO: 2338673 - RNA, 19 nt, Homo sapiens
  misc_RNA (1)...(19): siRNA sense strand
cuuacuggaaagugcgaua

SEQ ID NO: 2338674 - RNA, 19 nt, Homo sapiens
  misc_RNA (1)...(19): siRNA sense strand
gagaaagcuacgacgcaau

SEQ ID NO: 2338675 - RNA, 19 nt, Homo sapiens
  misc_RNA (1)...(19): siRNA sense strand
cuugguauuuggaggaaaa

SEQ ID NO: 2338676 - RNA, 19 nt, Homo sapiens
  misc_RNA (1)...(19): siRNA sense strand
gagacauugaagaaggcaa

SEQ ID NO: 2338677 - RNA, 19 nt, Homo sapiens
  misc_RNA (1)...(19): siRNA sense strand
cugggaagaauuugagaga

SEQ ID NO: 2338678 - RNA, 19 nt, Homo sapiens
  misc_RNA (1)...(19): siRNA sense strand
agaugcauuuggaggaaga

SEQ ID NO: 2338679 - RNA, 19 nt, Homo sapiens
  misc_RNA (1)...(19): siRNA sense strand
ccuugggacauuugagauu

SEQ ID NO: 2338680 - RNA, 19 nt, Homo sapiens
  misc_RNA (1)...(19): siRNA sense strand
uggagaugguggccagcaa

SEQ ID NO: 2338681 - RNA, 19 nt, Homo sapiens
  misc_RNA (1)...(19): siRNA sense strand
cuggaaagugcgauaugaa

SEQ ID NO: 2338682 - RNA, 19 nt, Homo sapiens
  misc_RNA (1)...(19): siRNA sense strand
ccagaagaacacuugggaa

SEQ ID NO: 2338683 - RNA, 19 nt, Homo sapiens
  misc_RNA (1)...(19): siRNA sense strand
gcagaaagggguggauaaa

SEQ ID NO: 2338684 - RNA, 19 nt, Homo sapiens
  misc_RNA (1)...(19): siRNA sense strand
aggugaaguuggugauauc

SEQ ID NO: 2338685 - RNA, 19 nt, Homo sapiens
  misc_RNA (1)...(19): siRNA sense strand
ccuuucaagaugagacauu

SEQ ID NO: 2338686 - RNA, 19 nt, Homo sapiens
  misc_RNA (1)...(19): siRNA sense strand
cgucaucaccaaagagacu

SEQ ID NO: 2338687 - RNA, 19 nt, Homo sapiens
  misc_RNA (1)...(19): siRNA sense strand
agagaaagcuacgacgcaa

SEQ ID NO: 2338688 - RNA, 19 nt, Homo sapiens
  misc_RNA (1)...(19): siRNA sense strand
gaagaauuugagagagcca

SEQ ID NO: 2338689 - RNA, 19 nt, Homo sapiens
  misc_RNA (1)...(19): siRNA sense strand
ggacauggcugaugcacug

SEQ ID NO: 2338690 - RNA, 19 nt, Homo sapiens
  misc_RNA (1)...(19): siRNA sense strand
agaagaugcauuuggagga

SEQ ID NO: 2338691 - RNA, 19 nt, Homo sapiens
  misc_RNA (1)...(19): siRNA sense strand
cuauaucauggcagaagaa

SEQ ID NO: 2338692 - RNA, 19 nt, Homo sapiens
  misc_RNA (1)...(19): siRNA sense strand
accaacaucgacagagaaa

SEQ ID NO: 2338693 - RNA, 19 nt, Homo sapiens
  misc_RNA (1)...(19): siRNA sense strand
agcagaaagggguggauaa

SEQ ID NO: 2338694 - RNA, 19 nt, Homo sapiens
  misc_RNA (1)...(19): siRNA sense strand
cugugcagcuucagggcau

SEQ ID NO: 2338695 - RNA, 19 nt, Homo sapiens
  misc_RNA (1)...(19): siRNA sense strand
caguauuaaccuacaggau

SEQ ID NO: 2338696 - RNA, 19 nt, Homo sapiens
  misc_RNA (1)...(19): siRNA sense strand
augggaaacucuaugccaa

SEQ ID NO: 2338697 - RNA, 19 nt, Homo sapiens
  misc_RNA (1)...(19): siRNA sense strand
ccgacugcuuucagaggau

SEQ ID NO: 2338698 - RNA, 19 nt, Homo sapiens
  misc_RNA (1)...(19): siRNA sense strand
augaaggcacuguguacaa

SEQ ID NO: 2338699 - RNA, 19 nt, Homo sapiens
  misc_RNA (1)...(19): siRNA sense strand
cugacaaccuugggacauu

SEQ ID NO: 2338700 - RNA, 19 nt, Homo sapiens
  misc_RNA (1)...(19): siRNA sense strand
gcuaccaagcugcaagaau

SEQ ID NO: 2338701 - RNA, 19 nt, Homo sapiens
  misc_RNA (1)...(19): siRNA sense strand
ccccagagacauugaagaa

SEQ ID NO: 2338702 - RNA, 19 nt, Homo sapiens
  misc_RNA (1)...(19): siRNA sense strand
gagaaagacuaugaaggca

SEQ ID NO: 2338703 - RNA, 19 nt, Homo sapiens
  misc_RNA (1)...(19): siRNA sense strand
gaagaaguagagugggacu

SEQ ID NO: 2338704 - RNA, 19 nt, Homo sapiens
  misc_RNA (1)...(19): siRNA sense strand
gggaauuugcauuguuguu

SEQ ID NO: 2338705 - RNA, 19 nt, Homo sapiens
  misc_RNA (1)...(19): siRNA sense strand
aagaaggcaaugugaagau

SEQ ID NO: 2338706 - RNA, 19 nt, Homo sapiens
  misc_RNA (1)...(19): siRNA sense strand
cauggaggacggagugaca

SEQ ID NO: 2338707 - RNA, 19 nt, Homo sapiens
  misc_RNA (1)...(19): siRNA sense strand
aggcagccaucgagaagca

SEQ ID NO: 2338708 - RNA, 19 nt, Homo sapiens
  misc_RNA (1)...(19): siRNA sense strand
cuuuugagguuguggagau

SEQ ID NO: 2338709 - RNA, 19 nt, Homo sapiens
  misc_RNA (1)...(19): siRNA sense strand
ugaagaaggcaaugugaag

SEQ ID NO: 2338710 - RNA, 19 nt, Homo sapiens
  misc_RNA (1)...(19): siRNA sense strand
cagaagagcuccagccgaa

SEQ ID NO: 2338711 - RNA, 19 nt, Homo sapiens
  misc_RNA (1)...(19): siRNA sense strand
cagaagaaguagaguggga

SEQ ID NO: 2338712 - RNA, 19 nt, Homo sapiens
  misc_RNA (1)...(19): siRNA sense strand
agacauuucaggagagcaa

SEQ ID NO: 2338713 - RNA, 19 nt, Homo sapiens
  misc_RNA (1)...(19): siRNA sense strand
gggaagaauuugagagagc

SEQ ID NO: 2338714 - RNA, 19 nt, Homo sapiens
  misc_RNA (1)...(19): siRNA sense strand
gagucauguuccagggcaa

SEQ ID NO: 2338715 - RNA, 19 nt, Homo sapiens
  misc_RNA (1)...(19): siRNA sense strand
gaagcagggaugagggcaa

SEQ ID NO: 2338716 - RNA, 19 nt, Homo sapiens
  misc_RNA (1)...(19): siRNA sense strand
gcaugcaaucaaugggaaa

SEQ ID NO: 2338717 - RNA, 19 nt, Homo sapiens
  misc_RNA (1)...(19): siRNA sense strand
aaacuuucuuggagagcaa

SEQ ID NO: 2338718 - RNA, 19 nt, Homo sapiens
  misc_RNA (1)...(19): siRNA sense strand
aggcaaaguucgacaguac

SEQ ID NO: 2338719 - RNA, 19 nt, Homo sapiens
  misc_RNA (1)...(19): siRNA sense strand
uggcaugggcaaugaaauu

SEQ ID NO: 2338720 - RNA, 19 nt, Homo sapiens
  misc_RNA (1)...(19): siRNA sense strand
cagaggauauugagggcuu

SEQ ID NO: 2338721 - RNA, 19 nt, Homo sapiens
  misc_RNA (1)...(19): siRNA sense strand
ugccaagcccuuugagaaa

SEQ ID NO: 2338722 - RNA, 19 nt, Homo sapiens
  misc_RNA (1)...(19): siRNA sense strand
agacauuccaagagaagau

SEQ ID NO: 2338723 - RNA, 19 nt, Homo sapiens
  misc_RNA (1)...(19): siRNA sense strand
agacauugcaacuggccua

SEQ ID NO: 2338724 - RNA, 19 nt, Homo sapiens
  misc_RNA (1)...(19): siRNA sense strand
gggaguacugggaagaauu

SEQ ID NO: 2338725 - RNA, 19 nt, Homo sapiens
  misc_RNA (1)...(19): siRNA sense strand
gugcagauggcaagcagaa

SEQ ID NO: 2338726 - RNA, 19 nt, Homo sapiens
  misc_RNA (1)...(19): siRNA sense strand
gagaacaagagcugguaca

SEQ ID NO: 2338727 - RNA, 19 nt, Homo sapiens
  misc_RNA (1)...(19): siRNA sense strand
gggaauacacugaugguac

SEQ ID NO: 2338728 - RNA, 19 nt, Homo sapiens
  misc_RNA (1)...(19): siRNA sense strand
cuuacuggaaagugcgaua

SEQ ID NO: 2338729 - RNA, 19 nt, Homo sapiens
  misc_RNA (1)...(19): siRNA sense strand
gagaaagcuacgacgcaau

SEQ ID NO: 2338730 - RNA, 19 nt, Homo sapiens
  misc_RNA (1)...(19): siRNA sense strand
cuugguauuuggaggaaaa

SEQ ID NO: 2338731 - RNA, 19 nt, Homo sapiens
  misc_RNA (1)...(19): siRNA sense strand
gagacauugaagaaggcaa

SEQ ID NO: 2338732 - RNA, 19 nt, Homo sapiens
  misc_RNA (1)...(19): siRNA sense strand
cugggaagaauuugagaga

SEQ ID NO: 2338733 - RNA, 19 nt, Homo sapiens
  misc_RNA (1)...(19): siRNA sense strand
agaugcauuuggaggaaga

SEQ ID NO: 2338734 - RNA, 19 nt, Homo sapiens
  misc_RNA (1)...(19): siRNA sense strand
ccuugggacauuugagauu

SEQ ID NO: 2338735 - RNA, 19 nt, Homo sapiens
  misc_RNA (1)...(19): siRNA sense strand
uggagaugguggccagcaa

SEQ ID NO: 2338736 - RNA, 19 nt, Homo sapiens
  misc_RNA (1)...(19): siRNA sense strand
gaugagacauuucaggaga

SEQ ID NO: 2338737 - RNA, 19 nt, Homo sapiens
  misc_RNA (1)...(19): siRNA sense strand
cuggaaagugcgauaugaa

SEQ ID NO: 2338738 - RNA, 19 nt, Homo sapiens
  misc_RNA (1)...(19): siRNA sense strand
ccagaagaacacuugggaa

SEQ ID NO: 2338739 - RNA, 19 nt, Homo sapiens
  misc_RNA (1)...(19): siRNA sense strand
gcagaaagggguggauaaa

SEQ ID NO: 2338740 - RNA, 19 nt, Homo sapiens
  misc_RNA (1)...(19): siRNA sense strand
aggugaaguuggugauauc

SEQ ID NO: 2338741 - RNA, 19 nt, Homo sapiens
  misc_RNA (1)...(19): siRNA sense strand
ccuuucaagaugagacauu

SEQ ID NO: 2338742 - RNA, 19 nt, Homo sapiens
  misc_RNA (1)...(19): siRNA sense strand
ggccaguguugcaggcuga

SEQ ID NO: 2338743 - RNA, 19 nt, Homo sapiens
  misc_RNA (1)...(19): siRNA sense strand
cgucaucaccaaagagacu

SEQ ID NO: 2338744 - RNA, 19 nt, Homo sapiens
  misc_RNA (1)...(19): siRNA sense strand
agagaaagcuacgacgcaa

SEQ ID NO: 2338745 - RNA, 19 nt, Homo sapiens
  misc_RNA (1)...(19): siRNA sense strand
gaggagcccuggaugggaa

SEQ ID NO: 2338746 - RNA, 19 nt, Homo sapiens
  misc_RNA (1)...(19): siRNA sense strand
acauuucaggagagcaaua

SEQ ID NO: 2338747 - RNA, 19 nt, Homo sapiens
  misc_RNA (1)...(19): siRNA sense strand
gaagaauuugagagagcca

SEQ ID NO: 2338748 - RNA, 19 nt, Homo sapiens
  misc_RNA (1)...(19): siRNA sense strand
ggacauggcugaugcacug

SEQ ID NO: 2338749 - RNA, 19 nt, Homo sapiens
  misc_RNA (1)...(19): siRNA sense strand
agaagaugcauuuggagga

SEQ ID NO: 2338750 - RNA, 19 nt, Homo sapiens
  misc_RNA (1)...(19): siRNA sense strand
cuauaucauggcagaagaa

SEQ ID NO: 2338751 - RNA, 19 nt, Homo sapiens
  misc_RNA (1)...(19): siRNA sense strand
accaacaucgacagagaaa

SEQ ID NO: 2338752 - RNA, 19 nt, Homo sapiens
  misc_RNA (1)...(19): siRNA sense strand
agcagaaagggguggauaa

SEQ ID NO: 2338753 - RNA, 19 nt, Homo sapiens
  misc_RNA (1)...(19): siRNA sense strand
cugugcagcuucagggcau

SEQ ID NO: 2338754 - RNA, 19 nt, Homo sapiens
  misc_RNA (1)...(19): siRNA sense strand
caguauuaaccuacaggau

SEQ ID NO: 2338755 - RNA, 19 nt, Homo sapiens
  misc_RNA (1)...(19): siRNA sense strand
augggaaacucuaugccaa

SEQ ID NO: 2338756 - RNA, 19 nt, Homo sapiens
  misc_RNA (1)...(19): siRNA sense strand
acacagaugaaguggccca

SEQ ID NO: 2338757 - RNA, 19 nt, Homo sapiens
  misc_RNA (1)...(19): siRNA sense strand
ccgacugcuuucagaggau

SEQ ID NO: 2338758 - RNA, 19 nt, Homo sapiens
  misc_RNA (1)...(19): siRNA sense strand
ucagugugguagaugagaa

SEQ ID NO: 2338759 - RNA, 19 nt, Homo sapiens
  misc_RNA (1)...(19): siRNA sense strand
gaaccuacaagaagaccau

SEQ ID NO: 2338760 - RNA, 19 nt, Homo sapiens
  misc_RNA (1)...(19): siRNA sense strand
augaaggcacuguguacaa

SEQ ID NO: 2338761 - RNA, 19 nt, Homo sapiens
  misc_RNA (1)...(19): siRNA sense strand
cugacaaccuugggacauu

SEQ ID NO: 2338762 - RNA, 19 nt, Homo sapiens
  misc_RNA (1)...(19): siRNA sense strand
gcuaccaagcugcaagaau

SEQ ID NO: 2338763 - RNA, 19 nt, Homo sapiens
  misc_RNA (1)...(19): siRNA sense strand
ccccagagacauugaagaa

SEQ ID NO: 2338764 - RNA, 19 nt, Homo sapiens
  misc_RNA (1)...(19): siRNA sense strand
acgccaggauguagaccau

SEQ ID NO: 2338765 - RNA, 19 nt, Homo sapiens
  misc_RNA (1)...(19): siRNA sense strand
agcaauaggaugcaugcaa

SEQ ID NO: 2338766 - RNA, 19 nt, Homo sapiens
  misc_RNA (1)...(19): siRNA sense strand
gagaaagacuaugaaggca

SEQ ID NO: 2338767 - RNA, 19 nt, Homo sapiens
  misc_RNA (1)...(19): siRNA sense strand
cugcuucaguggacaaaga

SEQ ID NO: 2338768 - RNA, 19 nt, Homo sapiens
  misc_RNA (1)...(19): siRNA sense strand
gaagaaguagagugggacu

SEQ ID NO: 2338769 - RNA, 19 nt, Homo sapiens
  misc_RNA (1)...(19): siRNA sense strand
gggaauuugcauuguuguu

SEQ ID NO: 2338770 - RNA, 19 nt, Homo sapiens
  misc_RNA (1)...(19): siRNA sense strand
aagaaggcaaugugaagau

SEQ ID NO: 2338771 - RNA, 19 nt, Homo sapiens
  misc_RNA (1)...(19): siRNA sense strand
ggaccauuccagaaggcca

SEQ ID NO: 2338772 - RNA, 19 nt, Homo sapiens
  misc_RNA (1)...(19): siRNA sense strand
gguagaagacaaaggacuu

SEQ ID NO: 2338773 - RNA, 19 nt, Homo sapiens
  misc_RNA (1)...(19): siRNA sense strand
agaacugauccaaggaaua

SEQ ID NO: 2338774 - RNA, 19 nt, Homo sapiens
  misc_RNA (1)...(19): siRNA sense strand
ugauacaagaccaaggaaa

SEQ ID NO: 2338775 - RNA, 19 nt, Homo sapiens
  misc_RNA (1)...(19): siRNA sense strand
caucgaaggaggaaggaga

SEQ ID NO: 2338776 - RNA, 19 nt, Homo sapiens
  misc_RNA (1)...(19): siRNA sense strand
cuaugagaaaccagaguua

SEQ ID NO: 2338777 - RNA, 19 nt, Homo sapiens
  misc_RNA (1)...(19): siRNA sense strand
guucaagcacgaugacaaa

SEQ ID NO: 2338778 - RNA, 19 nt, Homo sapiens
  misc_RNA (1)...(19): siRNA sense strand
uuauaagagcugugagaca

SEQ ID NO: 2338779 - RNA, 19 nt, Homo sapiens
  misc_RNA (1)...(19): siRNA sense strand
cugaagaccaugcuggaaa

SEQ ID NO: 2338780 - RNA, 19 nt, Homo sapiens
  misc_RNA (1)...(19): siRNA sense strand
guggaaucuugaugaacaa

SEQ ID NO: 2338781 - RNA, 19 nt, Homo sapiens
  misc_RNA (1)...(19): siRNA sense strand
uguaaagcagcgagaacaa

SEQ ID NO: 2338782 - RNA, 19 nt, Homo sapiens
  misc_RNA (1)...(19): siRNA sense strand
cguuagaugucaagaguac

SEQ ID NO: 2338783 - RNA, 19 nt, Homo sapiens
  misc_RNA (1)...(19): siRNA sense strand
ccgggaaauucuaguuaau

SEQ ID NO: 2338784 - RNA, 19 nt, Homo sapiens
  misc_RNA (1)...(19): siRNA sense strand
agaugaugguggugacuga

SEQ ID NO: 2338785 - RNA, 19 nt, Homo sapiens
  misc_RNA (1)...(19): siRNA sense strand
ggugacugauguuggagaa

SEQ ID NO: 2338786 - RNA, 19 nt, Homo sapiens
  misc_RNA (1)...(19): siRNA sense strand
ucaacaacucagaaugaua

SEQ ID NO: 2338787 - RNA, 19 nt, Homo sapiens
  misc_RNA (1)...(19): siRNA sense strand
agaagaagcuggauccuga

SEQ ID NO: 2338788 - RNA, 19 nt, Homo sapiens
  misc_RNA (1)...(19): siRNA sense strand
aguucaagcacgaugacaa

SEQ ID NO: 2338789 - RNA, 19 nt, Homo sapiens
  misc_RNA (1)...(19): siRNA sense strand
cuuuauaagagcugugaga

SEQ ID NO: 2338790 - RNA, 19 nt, Homo sapiens
  misc_RNA (1)...(19): siRNA sense strand
ccagauuccaugaaaguau

SEQ ID NO: 2338791 - RNA, 19 nt, Homo sapiens
  misc_RNA (1)...(19): siRNA sense strand
cagaacugauccaaggaau

SEQ ID NO: 2338792 - RNA, 19 nt, Homo sapiens
  misc_RNA (1)...(19): siRNA sense strand
cugcaauucgaguggguuu

SEQ ID NO: 2338793 - RNA, 19 nt, Homo sapiens
  misc_RNA (1)...(19): siRNA sense strand
auacagacaaagagaagau

SEQ ID NO: 2338794 - RNA, 19 nt, Homo sapiens
  misc_RNA (1)...(19): siRNA sense strand
ccagauggcaggcgcacaa

SEQ ID NO: 2338795 - RNA, 19 nt, Homo sapiens
  misc_RNA (1)...(19): siRNA sense strand
ccggaagaauugugcaagu

SEQ ID NO: 2338796 - RNA, 19 nt, Homo sapiens
  misc_RNA (1)...(19): siRNA sense strand
gguaaaucacggcgagagu

SEQ ID NO: 2338797 - RNA, 19 nt, Homo sapiens
  misc_RNA (1)...(19): siRNA sense strand
caagaagagacgucugcaa

SEQ ID NO: 2338798 - RNA, 19 nt, Homo sapiens
  misc_RNA (1)...(19): siRNA sense strand
ggaauauucuuacuggcua

SEQ ID NO: 2338799 - RNA, 19 nt, Homo sapiens
  misc_RNA (1)...(19): siRNA sense strand
guuaauacagacaaagaga

SEQ ID NO: 2338800 - RNA, 19 nt, Homo sapiens
  misc_RNA (1)...(19): siRNA sense strand
ccaugaaaguauugccagu

SEQ ID NO: 2338801 - RNA, 19 nt, Homo sapiens
  misc_RNA (1)...(19): siRNA sense strand
gcaacaggugcaaggccua

SEQ ID NO: 2338802 - RNA, 19 nt, Homo sapiens
  misc_RNA (1)...(19): siRNA sense strand
aggaauauuuaaugugcca

SEQ ID NO: 2338803 - RNA, 19 nt, Homo sapiens
  misc_RNA (1)...(19): siRNA sense strand
guuccugguagaagacaaa

SEQ ID NO: 2338804 - RNA, 19 nt, Homo sapiens
  misc_RNA (1)...(19): siRNA sense strand
gagauaucaguguggauuu

SEQ ID NO: 2338805 - RNA, 19 nt, Homo sapiens
  misc_RNA (1)...(19): siRNA sense strand
acugguuaauacagacaaa

SEQ ID NO: 2338806 - RNA, 19 nt, Homo sapiens
  misc_RNA (1)...(19): siRNA sense strand
aggcagugaccguggaguu

SEQ ID NO: 2338807 - RNA, 19 nt, Homo sapiens
  misc_RNA (1)...(19): siRNA sense strand
cuuacuggcuaauggucua

SEQ ID NO: 2338808 - RNA, 19 nt, Homo sapiens
  misc_RNA (1)...(19): siRNA sense strand
ccaucaguuuggucagaau

SEQ ID NO: 2338809 - RNA, 19 nt, Homo sapiens
  misc_RNA (1)...(19): siRNA sense strand
uuggauuauugcagaaaga

SEQ ID NO: 2338810 - RNA, 19 nt, Homo sapiens
  misc_RNA (1)...(19): siRNA sense strand
agacagaugcucuuaucaa

SEQ ID NO: 2338811 - RNA, 19 nt, Homo sapiens
  misc_RNA (1)...(19): siRNA sense strand
cagacaaagagaagauacu

SEQ ID NO: 2338812 - RNA, 19 nt, Homo sapiens
  misc_RNA (1)...(19): siRNA sense strand
ccucuuuccuagucaguau

SEQ ID NO: 2338813 - RNA, 19 nt, Homo sapiens
  misc_RNA (1)...(19): siRNA sense strand
caacaagguuacguggcua

SEQ ID NO: 2338814 - RNA, 19 nt, Homo sapiens
  misc_RNA (1)...(19): siRNA sense strand
caacaaaagaggccauauu

SEQ ID NO: 2338815 - RNA, 19 nt, Homo sapiens
  misc_RNA (1)...(19): siRNA sense strand
cuaugcaaaucaacagcua

SEQ ID NO: 2338816 - RNA, 19 nt, Homo sapiens
  misc_RNA (1)...(19): siRNA sense strand
cagcgagaacaaccagaaa

SEQ ID NO: 2338817 - RNA, 19 nt, Homo sapiens
  misc_RNA (1)...(19): siRNA sense strand
ccaaagauuuccaggcccu

SEQ ID NO: 2338818 - RNA, 19 nt, Homo sapiens
  misc_RNA (1)...(19): siRNA sense strand
ggugauugagaaugauaga

SEQ ID NO: 2338819 - RNA, 19 nt, Homo sapiens
  misc_RNA (1)...(19): siRNA sense strand
ggauuauugcagaaagagu

SEQ ID NO: 2338820 - RNA, 19 nt, Homo sapiens
  misc_RNA (1)...(19): siRNA sense strand
agaagagacgucugcaauu

SEQ ID NO: 2338821 - RNA, 19 nt, Homo sapiens
  misc_RNA (1)...(19): siRNA sense strand
aaguauugccaguguacau

SEQ ID NO: 2338822 - RNA, 19 nt, Homo sapiens
  misc_RNA (1)...(19): siRNA sense strand
cuacagauugcaugauaca

SEQ ID NO: 2338823 - RNA, 19 nt, Homo sapiens
  misc_RNA (1)...(19): siRNA sense strand
uugcaugauacaagaccaa

SEQ ID NO: 2338824 - RNA, 19 nt, Homo sapiens
  misc_RNA (1)...(19): siRNA sense strand
uugaaggucauccgggaaa

SEQ ID NO: 2338825 - RNA, 19 nt, Homo sapiens
  misc_RNA (1)...(19): siRNA sense strand
gaauggagcucaugccacu

SEQ ID NO: 2338826 - RNA, 19 nt, Homo sapiens
  misc_RNA (1)...(19): siRNA sense strand
ucucaacaacucagaauga

SEQ ID NO: 2338827 - RNA, 19 nt, Homo sapiens
  misc_RNA (1)...(19): siRNA sense strand
gcgagaacaaccagaaaug

SEQ ID NO: 2338828 - RNA, 19 nt, Homo sapiens
  misc_RNA (1)...(19): siRNA sense strand
auaccaacccucugcacaa

SEQ ID NO: 2338829 - RNA, 19 nt, Homo sapiens
  misc_RNA (1)...(19): siRNA sense strand
agccagcagaggaggacaa

SEQ ID NO: 2338830 - RNA, 19 nt, Homo sapiens
  misc_RNA (1)...(19): siRNA sense strand
uuuccaugcacgucagaua

SEQ ID NO: 2338831 - RNA, 19 nt, Homo sapiens
  misc_RNA (1)...(19): siRNA sense strand
ucgaaggaggaaggagaua

SEQ ID NO: 2338832 - RNA, 19 nt, Homo sapiens
  misc_RNA (1)...(19): siRNA sense strand
cgaaggaggaaggagauau

SEQ ID NO: 2338833 - RNA, 19 nt, Homo sapiens
  misc_RNA (1)...(19): siRNA sense strand
ugacaaacucagugaagac

SEQ ID NO: 2338834 - RNA, 19 nt, Homo sapiens
  misc_RNA (1)...(19): siRNA sense strand
ugguagaagacaaaggacu

SEQ ID NO: 2338835 - RNA, 19 nt, Homo sapiens
  misc_RNA (1)...(19): siRNA sense strand
cgagaguggaccagucaga

SEQ ID NO: 2338836 - RNA, 19 nt, Homo sapiens
  misc_RNA (1)...(19): siRNA sense strand
cuucaugauugauguuuca

SEQ ID NO: 2338837 - RNA, 19 nt, Homo sapiens
  misc_RNA (1)...(19): siRNA sense strand
ugguuaauacagacaaaga

SEQ ID NO: 2338838 - RNA, 19 nt, Homo sapiens
  misc_RNA (1)...(19): siRNA sense strand
aaacaaaugucuaugacuc

SEQ ID NO: 2338839 - RNA, 19 nt, Homo sapiens
  misc_RNA (1)...(19): siRNA sense strand
cuguggaacugcuggcuga

SEQ ID NO: 2338840 - RNA, 19 nt, Homo sapiens
  misc_RNA (1)...(19): siRNA sense strand
aguaacaagcugugccuga

SEQ ID NO: 2338841 - RNA, 19 nt, Homo sapiens
  misc_RNA (1)...(19): siRNA sense strand
cgugucugaaauugggaaa

SEQ ID NO: 2338842 - RNA, 19 nt, Homo sapiens
  misc_RNA (1)...(19): siRNA sense strand
gcucuuuauucucgggcca

SEQ ID NO: 2338843 - RNA, 19 nt, Homo sapiens
  misc_RNA (1)...(19): siRNA sense strand
ggacagaguuaucgaggca

SEQ ID NO: 2338844 - RNA, 19 nt, Homo sapiens
  misc_RNA (1)...(19): siRNA sense strand
acagaguuaucgaggcaca

SEQ ID NO: 2338845 - RNA, 19 nt, Homo sapiens
  misc_RNA (1)...(19): siRNA sense strand
cuucugugcaggagugcua

SEQ ID NO: 2338846 - RNA, 19 nt, Homo sapiens
  misc_RNA (1)...(19): siRNA sense strand
ggacagaguuaucgaggca

SEQ ID NO: 2338847 - RNA, 19 nt, Homo sapiens
  misc_RNA (1)...(19): siRNA sense strand
acagaguuaucgaggcaca

SEQ ID NO: 2338848 - RNA, 19 nt, Homo sapiens
  misc_RNA (1)...(19): siRNA sense strand
cuucugugcaggagugcua

SEQ ID NO: 2338849 - RNA, 19 nt, Homo sapiens
  misc_RNA (1)...(19): siRNA sense strand
gguugaagagagaggcaau

SEQ ID NO: 2338850 - RNA, 19 nt, Homo sapiens
  misc_RNA (1)...(19): siRNA sense strand
cggaaagcggcaaaaguua

SEQ ID NO: 2338851 - RNA, 19 nt, Homo sapiens
  misc_RNA (1)...(19): siRNA sense strand
agagauuugacgagacuga

SEQ ID NO: 2338852 - RNA, 19 nt, Homo sapiens
  misc_RNA (1)...(19): siRNA sense strand
ggcaaaaguuaaugcggga

SEQ ID NO: 2338853 - RNA, 19 nt, Homo sapiens
  misc_RNA (1)...(19): siRNA sense strand
uggcgguggaggugcgaau

SEQ ID NO: 2338854 - RNA, 19 nt, Homo sapiens
  misc_RNA (1)...(19): siRNA sense strand
gagucggagagaagggcau

SEQ ID NO: 2338855 - RNA, 19 nt, Homo sapiens
  misc_RNA (1)...(19): siRNA sense strand
gguugaagagagaggcaau

SEQ ID NO: 2338856 - RNA, 19 nt, Homo sapiens
  misc_RNA (1)...(19): siRNA sense strand
cggaaagcggcaaaaguua

SEQ ID NO: 2338857 - RNA, 19 nt, Homo sapiens
  misc_RNA (1)...(19): siRNA sense strand
agagauuugacgagacuga

SEQ ID NO: 2338858 - RNA, 19 nt, Homo sapiens
  misc_RNA (1)...(19): siRNA sense strand
ggcaaaaguuaaugcggga

SEQ ID NO: 2338859 - RNA, 19 nt, Homo sapiens
  misc_RNA (1)...(19): siRNA sense strand
uggcgguggaggugcgaau

SEQ ID NO: 2338860 - RNA, 19 nt, Homo sapiens
  misc_RNA (1)...(19): siRNA sense strand
gagucggagagaagggcau

SEQ ID NO: 2338861 - RNA, 19 nt, Homo sapiens
  misc_RNA (1)...(19): siRNA sense strand
gguugaagagagaggcaau

SEQ ID NO: 2338862 - RNA, 19 nt, Homo sapiens
  misc_RNA (1)...(19): siRNA sense strand
cggaaagcggcaaaaguua

SEQ ID NO: 2338863 - RNA, 19 nt, Homo sapiens
  misc_RNA (1)...(19): siRNA sense strand
agagauuugacgagacuga

SEQ ID NO: 2338864 - RNA, 19 nt, Homo sapiens
  misc_RNA (1)...(19): siRNA sense strand
ggcaaaaguuaaugcggga

SEQ ID NO: 2338865 - RNA, 19 nt, Homo sapiens
  misc_RNA (1)...(19): siRNA sense strand
uggcgguggaggugcgaau

SEQ ID NO: 2338866 - RNA, 19 nt, Homo sapiens
  misc_RNA (1)...(19): siRNA sense strand
ccccaucaguauugguaaa

SEQ ID NO: 2338867 - RNA, 19 nt, Homo sapiens
  misc_RNA (1)...(19): siRNA sense strand
gagucggagagaagggcau

SEQ ID NO: 2338868 - RNA, 19 nt, Homo sapiens
  misc_RNA (1)...(19): siRNA sense strand
cagaagagccugaagggaa

SEQ ID NO: 2338869 - RNA, 19 nt, Homo sapiens
  misc_RNA (1)...(19): siRNA sense strand
gaaagaaauuggucggugu

SEQ ID NO: 2338870 - RNA, 19 nt, Homo sapiens
  misc_RNA (1)...(19): siRNA sense strand
cagcaaugacaaagcaaca

SEQ ID NO: 2338871 - RNA, 19 nt, Homo sapiens
  misc_RNA (1)...(19): siRNA sense strand
ccugaagggaagagcuaau

SEQ ID NO: 2338872 - RNA, 19 nt, Homo sapiens
  misc_RNA (1)...(19): siRNA sense strand
cuaccauggcagacagaau

SEQ ID NO: 2338873 - RNA, 19 nt, Homo sapiens
  misc_RNA (1)...(19): siRNA sense strand
cccguaaagcuguggaauu

SEQ ID NO: 2338874 - RNA, 19 nt, Homo sapiens
  misc_RNA (1)...(19): siRNA sense strand
gcugaaaagaggacccaaa

SEQ ID NO: 2338875 - RNA, 19 nt, Homo sapiens
  misc_RNA (1)...(19): siRNA sense strand
cggagaacaaugagcaguu

SEQ ID NO: 2338876 - RNA, 19 nt, Homo sapiens
  misc_RNA (1)...(19): siRNA sense strand
gaaauauaguugaucgaac

SEQ ID NO: 2338877 - RNA, 19 nt, Homo sapiens
  misc_RNA (1)...(19): siRNA sense strand
uaaagaaauaugugccgua

SEQ ID NO: 2338878 - RNA, 19 nt, Homo sapiens
  misc_RNA (1)...(19): siRNA sense strand
agaagagccugaagggaag

SEQ ID NO: 2338879 - RNA, 19 nt, Homo sapiens
  misc_RNA (1)...(19): siRNA sense strand
gguuguaggugaccggguu

SEQ ID NO: 2338880 - RNA, 19 nt, Homo sapiens
  misc_RNA (1)...(19): siRNA sense strand
agccugaagggaagagcua

SEQ ID NO: 2338881 - RNA, 19 nt, Homo sapiens
  misc_RNA (1)...(19): siRNA sense strand
cugcaaguuuugacgaauu

SEQ ID NO: 2338882 - RNA, 19 nt, Homo sapiens
  misc_RNA (1)...(19): siRNA sense strand
guggcuugguuguagguga

SEQ ID NO: 2338883 - RNA, 19 nt, Homo sapiens
  misc_RNA (1)...(19): siRNA sense strand
uuaugaagcaccuggacaa

SEQ ID NO: 2338884 - RNA, 19 nt, Homo sapiens
  misc_RNA (1)...(19): siRNA sense strand
ccaaacuggacaaggagau

SEQ ID NO: 2338885 - RNA, 19 nt, Homo sapiens
  misc_RNA (1)...(19): siRNA sense strand
cccaaaucacaguggacau

SEQ ID NO: 2338886 - RNA, 19 nt, Homo sapiens
  misc_RNA (1)...(19): siRNA sense strand
guggcaaagcagaacccaa

SEQ ID NO: 2338887 - RNA, 19 nt, Homo sapiens
  misc_RNA (1)...(19): siRNA sense strand
cagaaguagccgagaggca

SEQ ID NO: 2338888 - RNA, 19 nt, Homo sapiens
  misc_RNA (1)...(19): siRNA sense strand
gagaagaggcuuaaggaug

SEQ ID NO: 2338889 - RNA, 19 nt, Homo sapiens
  misc_RNA (1)...(19): siRNA sense strand
gcagaaauacuguggacgu

SEQ ID NO: 2338890 - RNA, 19 nt, Homo sapiens
  misc_RNA (1)...(19): siRNA sense strand
ccaagaaggcagaguggcu

SEQ ID NO: 2338891 - RNA, 19 nt, Homo sapiens
  misc_RNA (1)...(19): siRNA sense strand
ggacaaggcugcagguucc

SEQ ID NO: 2338892 - RNA, 19 nt, Homo sapiens
  misc_RNA (1)...(19): siRNA sense strand
cgagaauggauccgagagu

SEQ ID NO: 2338893 - RNA, 19 nt, Homo sapiens
  misc_RNA (1)...(19): siRNA sense strand
agaauggauccgagagugu

SEQ ID NO: 2338894 - RNA, 19 nt, Homo sapiens
  misc_RNA (1)...(19): siRNA sense strand
acgagugaucugugacaau

SEQ ID NO: 2338895 - RNA, 19 nt, Homo sapiens
  misc_RNA (1)...(19): siRNA sense strand
aggaacagacgguugugaa

SEQ ID NO: 2338896 - RNA, 19 nt, Homo sapiens
  misc_RNA (1)...(19): siRNA sense strand
aggcagaguggcuggacca

SEQ ID NO: 2338897 - RNA, 19 nt, Homo sapiens
  misc_RNA (1)...(19): siRNA sense strand
ggacguccauacuugcaaa

SEQ ID NO: 2338898 - RNA, 19 nt, Homo sapiens
  misc_RNA (1)...(19): siRNA sense strand
cagaaguagccgagaggca

SEQ ID NO: 2338899 - RNA, 19 nt, Homo sapiens
  misc_RNA (1)...(19): siRNA sense strand
gagaagaggcuuaaggaug

SEQ ID NO: 2338900 - RNA, 19 nt, Homo sapiens
  misc_RNA (1)...(19): siRNA sense strand
gcagaaauacuguggacgu

SEQ ID NO: 2338901 - RNA, 19 nt, Homo sapiens
  misc_RNA (1)...(19): siRNA sense strand
ccaagaaggcagaguggcu

SEQ ID NO: 2338902 - RNA, 19 nt, Homo sapiens
  misc_RNA (1)...(19): siRNA sense strand
ggacaaggcugcagguucc

SEQ ID NO: 2338903 - RNA, 19 nt, Homo sapiens
  misc_RNA (1)...(19): siRNA sense strand
cgagaauggauccgagagu

SEQ ID NO: 2338904 - RNA, 19 nt, Homo sapiens
  misc_RNA (1)...(19): siRNA sense strand
agaauggauccgagagugu

SEQ ID NO: 2338905 - RNA, 19 nt, Homo sapiens
  misc_RNA (1)...(19): siRNA sense strand
acgagugaucugugacaau

SEQ ID NO: 2338906 - RNA, 19 nt, Homo sapiens
  misc_RNA (1)...(19): siRNA sense strand
aggaacagacgguugugaa

SEQ ID NO: 2338907 - RNA, 19 nt, Homo sapiens
  misc_RNA (1)...(19): siRNA sense strand
aggcagaguggcuggacca

SEQ ID NO: 2338908 - RNA, 19 nt, Homo sapiens
  misc_RNA (1)...(19): siRNA sense strand
ggacguccauacuugcaaa

SEQ ID NO: 2338909 - RNA, 19 nt, Homo sapiens
  misc_RNA (1)...(19): siRNA sense strand
acgcaguagcuuuggauau

SEQ ID NO: 2338910 - RNA, 19 nt, Homo sapiens
  misc_RNA (1)...(19): siRNA sense strand
uguucaacuuccagagaga

SEQ ID NO: 2338911 - RNA, 19 nt, Homo sapiens
  misc_RNA (1)...(19): siRNA sense strand
uggcgugauucauggaaau

SEQ ID NO: 2338912 - RNA, 19 nt, Homo sapiens
  misc_RNA (1)...(19): siRNA sense strand
aggucaaaccacaacuuaa

SEQ ID NO: 2338913 - RNA, 19 nt, Homo sapiens
  misc_RNA (1)...(19): siRNA sense strand
auaacauucccaaaggaua

SEQ ID NO: 2338914 - RNA, 19 nt, Homo sapiens
  misc_RNA (1)...(19): siRNA sense strand
gaguuaaaggugagcuguu

SEQ ID NO: 2338915 - RNA, 19 nt, Homo sapiens
  misc_RNA (1)...(19): siRNA sense strand
agaggaugaccaugaagaa

SEQ ID NO: 2338916 - RNA, 19 nt, Homo sapiens
  misc_RNA (1)...(19): siRNA sense strand
gugcuguauauguaguaaa

SEQ ID NO: 2338917 - RNA, 19 nt, Homo sapiens
  misc_RNA (1)...(19): siRNA sense strand
ucggcaagaucguggggaa

SEQ ID NO: 2338918 - RNA, 19 nt, Homo sapiens
  misc_RNA (1)...(19): siRNA sense strand
aaauuggaguuaaagguga

SEQ ID NO: 2338919 - RNA, 19 nt, Homo sapiens
  misc_RNA (1)...(19): siRNA sense strand
aucacaaggacgagucaua

SEQ ID NO: 2338920 - RNA, 19 nt, Homo sapiens
  misc_RNA (1)...(19): siRNA sense strand
ggagcagagucuugcccau

SEQ ID NO: 2338921 - RNA, 19 nt, Homo sapiens
  misc_RNA (1)...(19): siRNA sense strand
cuggcgugauucauggaaa

SEQ ID NO: 2338922 - RNA, 19 nt, Homo sapiens
  misc_RNA (1)...(19): siRNA sense strand
ccucugagcaucucggaca

SEQ ID NO: 2338923 - RNA, 19 nt, Homo sapiens
  misc_RNA (1)...(19): siRNA sense strand
ggcuaagaagaauuacaaa

SEQ ID NO: 2338924 - RNA, 19 nt, Homo sapiens
  misc_RNA (1)...(19): siRNA sense strand
agaccugcgagauggagaa

SEQ ID NO: 2338925 - RNA, 19 nt, Homo sapiens
  misc_RNA (1)...(19): siRNA sense strand
agaagaguggccagacaau

SEQ ID NO: 2338926 - RNA, 19 nt, Homo sapiens
  misc_RNA (1)...(19): siRNA sense strand
ugaggaaggucaaaccaca

SEQ ID NO: 2338927 - RNA, 19 nt, Homo sapiens
  misc_RNA (1)...(19): siRNA sense strand
ggauaauagcagugaagaa

SEQ ID NO: 2338928 - RNA, 19 nt, Homo sapiens
  misc_RNA (1)...(19): siRNA sense strand
aagaagaaagagagagaaa

SEQ ID NO: 2338929 - RNA, 19 nt, Homo sapiens
  misc_RNA (1)...(19): siRNA sense strand
aaauaaagauggaggagga

SEQ ID NO: 2338930 - RNA, 19 nt, Homo sapiens
  misc_RNA (1)...(19): siRNA sense strand
agguagaagcugaggaaga

SEQ ID NO: 2338931 - RNA, 19 nt, Homo sapiens
  misc_RNA (1)...(19): siRNA sense strand
gugaagaagaagaagaaau

SEQ ID NO: 2338932 - RNA, 19 nt, Homo sapiens
  misc_RNA (1)...(19): siRNA sense strand
cagucaaugucgauaguaa

SEQ ID NO: 2338933 - RNA, 19 nt, Homo sapiens
  misc_RNA (1)...(19): siRNA sense strand
acauaaagguagaagcuga

SEQ ID NO: 2338934 - RNA, 19 nt, Homo sapiens
  misc_RNA (1)...(19): siRNA sense strand
ggucaaguauucagggaca

SEQ ID NO: 2338935 - RNA, 19 nt, Homo sapiens
  misc_RNA (1)...(19): siRNA sense strand
caauguaaggagugugaaa

SEQ ID NO: 2338936 - RNA, 19 nt, Homo sapiens
  misc_RNA (1)...(19): siRNA sense strand
aagagaaggccaagaacaa

SEQ ID NO: 2338937 - RNA, 19 nt, Homo sapiens
  misc_RNA (1)...(19): siRNA sense strand
agauggaggaggagaggaa

SEQ ID NO: 2338938 - RNA, 19 nt, Homo sapiens
  misc_RNA (1)...(19): siRNA sense strand
uaaagaagaaagagagaga

SEQ ID NO: 2338939 - RNA, 19 nt, Homo sapiens
  misc_RNA (1)...(19): siRNA sense strand
gcagugaagcagaggaaga

SEQ ID NO: 2338940 - RNA, 19 nt, Homo sapiens
  misc_RNA (1)...(19): siRNA sense strand
aggaaaauguggaaagaau

SEQ ID NO: 2338941 - RNA, 19 nt, Homo sapiens
  misc_RNA (1)...(19): siRNA sense strand
cagaagaaagggagaacuu

SEQ ID NO: 2338942 - RNA, 19 nt, Homo sapiens
  misc_RNA (1)...(19): siRNA sense strand
agagaaaggaugucaagaa

SEQ ID NO: 2338943 - RNA, 19 nt, Homo sapiens
  misc_RNA (1)...(19): siRNA sense strand
gugaugaagaugaggauga

SEQ ID NO: 2338944 - RNA, 19 nt, Homo sapiens
  misc_RNA (1)...(19): siRNA sense strand
cguuuaaagaagaaagaga

SEQ ID NO: 2338945 - RNA, 19 nt, Homo sapiens
  misc_RNA (1)...(19): siRNA sense strand
aggaagaagaggaggagga

SEQ ID NO: 2338946 - RNA, 19 nt, Homo sapiens
  misc_RNA (1)...(19): siRNA sense strand
uaguaaacccauugaagaa

SEQ ID NO: 2338947 - RNA, 19 nt, Homo sapiens
  misc_RNA (1)...(19): siRNA sense strand
agaugaggaugauaggaaa

SEQ ID NO: 2338948 - RNA, 19 nt, Homo sapiens
  misc_RNA (1)...(19): siRNA sense strand
cagugaagaagaagaagaa

SEQ ID NO: 2338949 - RNA, 19 nt, Homo sapiens
  misc_RNA (1)...(19): siRNA sense strand
ggcacaaauaguagugaua

SEQ ID NO: 2338950 - RNA, 19 nt, Homo sapiens
  misc_RNA (1)...(19): siRNA sense strand
caguggaaguucaggauga

SEQ ID NO: 2338951 - RNA, 19 nt, Homo sapiens
  misc_RNA (1)...(19): siRNA sense strand
aaguggagcuguuuggaaa

SEQ ID NO: 2338952 - RNA, 19 nt, Homo sapiens
  misc_RNA (1)...(19): siRNA sense strand
uaguagugauagugaagaa

SEQ ID NO: 2338953 - RNA, 19 nt, Homo sapiens
  misc_RNA (1)...(19): siRNA sense strand
cuggaagacugaauugaaa

SEQ ID NO: 2338954 - RNA, 19 nt, Homo sapiens
  misc_RNA (1)...(19): siRNA sense strand
aagaaggacacaacagaua

SEQ ID NO: 2338955 - RNA, 19 nt, Homo sapiens
  misc_RNA (1)...(19): siRNA sense strand
acaaauagaggaagaagau

SEQ ID NO: 2338956 - RNA, 19 nt, Homo sapiens
  misc_RNA (1)...(19): siRNA sense strand
gcaguaauucagugcuaaa

SEQ ID NO: 2338957 - RNA, 19 nt, Homo sapiens
  misc_RNA (1)...(19): siRNA sense strand
aagcaacagugguaaacaa

SEQ ID NO: 2338958 - RNA, 19 nt, Homo sapiens
  misc_RNA (1)...(19): siRNA sense strand
gagaagacacugagacgau

SEQ ID NO: 2338959 - RNA, 19 nt, Homo sapiens
  misc_RNA (1)...(19): siRNA sense strand
gauaaaacaucggaagaaa

SEQ ID NO: 2338960 - RNA, 19 nt, Homo sapiens
  misc_RNA (1)...(19): siRNA sense strand
cagaugaagaugaagaaga

SEQ ID NO: 2338961 - RNA, 19 nt, Homo sapiens
  misc_RNA (1)...(19): siRNA sense strand
ccuccagucugaagggaau

SEQ ID NO: 2338962 - RNA, 19 nt, Homo sapiens
  misc_RNA (1)...(19): siRNA sense strand
cugaaaggagagaggcauu

SEQ ID NO: 2338963 - RNA, 19 nt, Homo sapiens
  misc_RNA (1)...(19): siRNA sense strand
uggcaguaauucagugcua

SEQ ID NO: 2338964 - RNA, 19 nt, Homo sapiens
  misc_RNA (1)...(19): siRNA sense strand
agaagaagaaauagaacca

SEQ ID NO: 2338965 - RNA, 19 nt, Homo sapiens
  misc_RNA (1)...(19): siRNA sense strand
ugauuguagugaugagauu

SEQ ID NO: 2338966 - RNA, 19 nt, Homo sapiens
  misc_RNA (1)...(19): siRNA sense strand
auggaggaggagaggaaua

SEQ ID NO: 2338967 - RNA, 19 nt, Homo sapiens
  misc_RNA (1)...(19): siRNA sense strand
aagaagaugaagucacaaa

SEQ ID NO: 2338968 - RNA, 19 nt, Homo sapiens
  misc_RNA (1)...(19): siRNA sense strand
agucaaugucgauaguaaa

SEQ ID NO: 2338969 - RNA, 19 nt, Homo sapiens
  misc_RNA (1)...(19): siRNA sense strand
gcagugaagaagaagaaga

SEQ ID NO: 2338970 - RNA, 19 nt, Homo sapiens
  misc_RNA (1)...(19): siRNA sense strand
gugcucaagacauggauaa

SEQ ID NO: 2338971 - RNA, 19 nt, Homo sapiens
  misc_RNA (1)...(19): siRNA sense strand
cauggauaauaauggcaaa

SEQ ID NO: 2338972 - RNA, 19 nt, Homo sapiens
  misc_RNA (1)...(19): siRNA sense strand
uuucaaaggaggaacagaa

SEQ ID NO: 2338973 - RNA, 19 nt, Homo sapiens
  misc_RNA (1)...(19): siRNA sense strand
auacaaugguuuggaggaa

SEQ ID NO: 2338974 - RNA, 19 nt, Homo sapiens
  misc_RNA (1)...(19): siRNA sense strand
auaaagcaacagugguaaa

SEQ ID NO: 2338975 - RNA, 19 nt, Homo sapiens
  misc_RNA (1)...(19): siRNA sense strand
acuaaagguaggagcuauu

SEQ ID NO: 2338976 - RNA, 19 nt, Homo sapiens
  misc_RNA (1)...(19): siRNA sense strand
gccaagaucaagacagcaa

SEQ ID NO: 2338977 - RNA, 19 nt, Homo sapiens
  misc_RNA (1)...(19): siRNA sense strand
uauccaaaccagugucaaa

SEQ ID NO: 2338978 - RNA, 19 nt, Homo sapiens
  misc_RNA (1)...(19): siRNA sense strand
uccagaaagauuaaggaaa

SEQ ID NO: 2338979 - RNA, 19 nt, Homo sapiens
  misc_RNA (1)...(19): siRNA sense strand
cagaaagauuaaggaaaga

SEQ ID NO: 2338980 - RNA, 19 nt, Homo sapiens
  misc_RNA (1)...(19): siRNA sense strand
ggccaagaacaaagaauca

SEQ ID NO: 2338981 - RNA, 19 nt, Homo sapiens
  misc_RNA (1)...(19): siRNA sense strand
aagaugaggaugauaggaa

SEQ ID NO: 2338982 - RNA, 19 nt, Homo sapiens
  misc_RNA (1)...(19): siRNA sense strand
cagaggaagaagaggagga

SEQ ID NO: 2338983 - RNA, 19 nt, Homo sapiens
  misc_RNA (1)...(19): siRNA sense strand
augaaaaucuggaugacaa

SEQ ID NO: 2338984 - RNA, 19 nt, Homo sapiens
  misc_RNA (1)...(19): siRNA sense strand
gagugaaacugauagcaca

SEQ ID NO: 2338985 - RNA, 19 nt, Homo sapiens
  misc_RNA (1)...(19): siRNA sense strand
gcagaaaagaagccauaaa

SEQ ID NO: 2338986 - RNA, 19 nt, Homo sapiens
  misc_RNA (1)...(19): siRNA sense strand
gagcuauuguggaagugaa

SEQ ID NO: 2338987 - RNA, 19 nt, Homo sapiens
  misc_RNA (1)...(19): siRNA sense strand
gcuacuaggcaaaguugua

SEQ ID NO: 2338988 - RNA, 19 nt, Homo sapiens
  misc_RNA (1)...(19): siRNA sense strand
ggauaauagcagugaagaa

SEQ ID NO: 2338989 - RNA, 19 nt, Homo sapiens
  misc_RNA (1)...(19): siRNA sense strand
aagaagaaagagagagaaa

SEQ ID NO: 2338990 - RNA, 19 nt, Homo sapiens
  misc_RNA (1)...(19): siRNA sense strand
aaauaaagauggaggagga

SEQ ID NO: 2338991 - RNA, 19 nt, Homo sapiens
  misc_RNA (1)...(19): siRNA sense strand
agguagaagcugaggaaga

SEQ ID NO: 2338992 - RNA, 19 nt, Homo sapiens
  misc_RNA (1)...(19): siRNA sense strand
gugaagaagaagaagaaau

SEQ ID NO: 2338993 - RNA, 19 nt, Homo sapiens
  misc_RNA (1)...(19): siRNA sense strand
cagucaaugucgauaguaa

SEQ ID NO: 2338994 - RNA, 19 nt, Homo sapiens
  misc_RNA (1)...(19): siRNA sense strand
acauaaagguagaagcuga

SEQ ID NO: 2338995 - RNA, 19 nt, Homo sapiens
  misc_RNA (1)...(19): siRNA sense strand
ggucaaguauucagggaca

SEQ ID NO: 2338996 - RNA, 19 nt, Homo sapiens
  misc_RNA (1)...(19): siRNA sense strand
caauguaaggagugugaaa

SEQ ID NO: 2338997 - RNA, 19 nt, Homo sapiens
  misc_RNA (1)...(19): siRNA sense strand
aagagaaggccaagaacaa

SEQ ID NO: 2338998 - RNA, 19 nt, Homo sapiens
  misc_RNA (1)...(19): siRNA sense strand
agauggaggaggagaggaa

SEQ ID NO: 2338999 - RNA, 19 nt, Homo sapiens
  misc_RNA (1)...(19): siRNA sense strand
uaaagaagaaagagagaga

SEQ ID NO: 2339000 - RNA, 19 nt, Homo sapiens
  misc_RNA (1)...(19): siRNA sense strand
gcagugaagcagaggaaga

SEQ ID NO: 2339001 - RNA, 19 nt, Homo sapiens
  misc_RNA (1)...(19): siRNA sense strand
aggaaaauguggaaagaau

SEQ ID NO: 2339002 - RNA, 19 nt, Homo sapiens
  misc_RNA (1)...(19): siRNA sense strand
cagaagaaagggagaacuu

SEQ ID NO: 2339003 - RNA, 19 nt, Homo sapiens
  misc_RNA (1)...(19): siRNA sense strand
agagaaaggaugucaagaa

SEQ ID NO: 2339004 - RNA, 19 nt, Homo sapiens
  misc_RNA (1)...(19): siRNA sense strand
gugaugaagaugaggauga

SEQ ID NO: 2339005 - RNA, 19 nt, Homo sapiens
  misc_RNA (1)...(19): siRNA sense strand
cguuuaaagaagaaagaga

SEQ ID NO: 2339006 - RNA, 19 nt, Homo sapiens
  misc_RNA (1)...(19): siRNA sense strand
aggaagaagaggaggagga

SEQ ID NO: 2339007 - RNA, 19 nt, Homo sapiens
  misc_RNA (1)...(19): siRNA sense strand
uaguaaacccauugaagaa

SEQ ID NO: 2339008 - RNA, 19 nt, Homo sapiens
  misc_RNA (1)...(19): siRNA sense strand
agaugaggaugauaggaaa

SEQ ID NO: 2339009 - RNA, 19 nt, Homo sapiens
  misc_RNA (1)...(19): siRNA sense strand
cagugaagaagaagaagaa

SEQ ID NO: 2339010 - RNA, 19 nt, Homo sapiens
  misc_RNA (1)...(19): siRNA sense strand
ggcacaaauaguagugaua

SEQ ID NO: 2339011 - RNA, 19 nt, Homo sapiens
  misc_RNA (1)...(19): siRNA sense strand
caguggaaguucaggauga

SEQ ID NO: 2339012 - RNA, 19 nt, Homo sapiens
  misc_RNA (1)...(19): siRNA sense strand
aaguggagcuguuuggaaa

SEQ ID NO: 2339013 - RNA, 19 nt, Homo sapiens
  misc_RNA (1)...(19): siRNA sense strand
uaguagugauagugaagaa

SEQ ID NO: 2339014 - RNA, 19 nt, Homo sapiens
  misc_RNA (1)...(19): siRNA sense strand
cuggaagacugaauugaaa

SEQ ID NO: 2339015 - RNA, 19 nt, Homo sapiens
  misc_RNA (1)...(19): siRNA sense strand
aagaaggacacaacagaua

SEQ ID NO: 2339016 - RNA, 19 nt, Homo sapiens
  misc_RNA (1)...(19): siRNA sense strand
acaaauagaggaagaagau

SEQ ID NO: 2339017 - RNA, 19 nt, Homo sapiens
  misc_RNA (1)...(19): siRNA sense strand
gcaguaauucagugcuaaa

SEQ ID NO: 2339018 - RNA, 19 nt, Homo sapiens
  misc_RNA (1)...(19): siRNA sense strand
aagcaacagugguaaacaa

SEQ ID NO: 2339019 - RNA, 19 nt, Homo sapiens
  misc_RNA (1)...(19): siRNA sense strand
gagaagacacugagacgau

SEQ ID NO: 2339020 - RNA, 19 nt, Homo sapiens
  misc_RNA (1)...(19): siRNA sense strand
gauaaaacaucggaagaaa

SEQ ID NO: 2339021 - RNA, 19 nt, Homo sapiens
  misc_RNA (1)...(19): siRNA sense strand
cagaugaagaugaagaaga

SEQ ID NO: 2339022 - RNA, 19 nt, Homo sapiens
  misc_RNA (1)...(19): siRNA sense strand
ccuccagucugaagggaau

SEQ ID NO: 2339023 - RNA, 19 nt, Homo sapiens
  misc_RNA (1)...(19): siRNA sense strand
cugaaaggagagaggcauu

SEQ ID NO: 2339024 - RNA, 19 nt, Homo sapiens
  misc_RNA (1)...(19): siRNA sense strand
uggcaguaauucagugcua

SEQ ID NO: 2339025 - RNA, 19 nt, Homo sapiens
  misc_RNA (1)...(19): siRNA sense strand
agaagaagaaauagaacca

SEQ ID NO: 2339026 - RNA, 19 nt, Homo sapiens
  misc_RNA (1)...(19): siRNA sense strand
ugauuguagugaugagauu

SEQ ID NO: 2339027 - RNA, 19 nt, Homo sapiens
  misc_RNA (1)...(19): siRNA sense strand
auggaggaggagaggaaua

SEQ ID NO: 2339028 - RNA, 19 nt, Homo sapiens
  misc_RNA (1)...(19): siRNA sense strand
aagaagaugaagucacaaa

SEQ ID NO: 2339029 - RNA, 19 nt, Homo sapiens
  misc_RNA (1)...(19): siRNA sense strand
agucaaugucgauaguaaa

SEQ ID NO: 2339030 - RNA, 19 nt, Homo sapiens
  misc_RNA (1)...(19): siRNA sense strand
gcagugaagaagaagaaga

SEQ ID NO: 2339031 - RNA, 19 nt, Homo sapiens
  misc_RNA (1)...(19): siRNA sense strand
gugcucaagacauggauaa

SEQ ID NO: 2339032 - RNA, 19 nt, Homo sapiens
  misc_RNA (1)...(19): siRNA sense strand
cauggauaauaauggcaaa

SEQ ID NO: 2339033 - RNA, 19 nt, Homo sapiens
  misc_RNA (1)...(19): siRNA sense strand
uuucaaaggaggaacagaa

SEQ ID NO: 2339034 - RNA, 19 nt, Homo sapiens
  misc_RNA (1)...(19): siRNA sense strand
auacaaugguuuggaggaa

SEQ ID NO: 2339035 - RNA, 19 nt, Homo sapiens
  misc_RNA (1)...(19): siRNA sense strand
auaaagcaacagugguaaa

SEQ ID NO: 2339036 - RNA, 19 nt, Homo sapiens
  misc_RNA (1)...(19): siRNA sense strand
acuaaagguaggagcuauu

SEQ ID NO: 2339037 - RNA, 19 nt, Homo sapiens
  misc_RNA (1)...(19): siRNA sense strand
gccaagaucaagacagcaa

SEQ ID NO: 2339038 - RNA, 19 nt, Homo sapiens
  misc_RNA (1)...(19): siRNA sense strand
uauccaaaccagugucaaa

SEQ ID NO: 2339039 - RNA, 19 nt, Homo sapiens
  misc_RNA (1)...(19): siRNA sense strand
uccagaaagauuaaggaaa

SEQ ID NO: 2339040 - RNA, 19 nt, Homo sapiens
  misc_RNA (1)...(19): siRNA sense strand
cagaaagauuaaggaaaga

SEQ ID NO: 2339041 - RNA, 19 nt, Homo sapiens
  misc_RNA (1)...(19): siRNA sense strand
ggccaagaacaaagaauca

SEQ ID NO: 2339042 - RNA, 19 nt, Homo sapiens
  misc_RNA (1)...(19): siRNA sense strand
aagaugaggaugauaggaa

SEQ ID NO: 2339043 - RNA, 19 nt, Homo sapiens
  misc_RNA (1)...(19): siRNA sense strand
cagaggaagaagaggagga

SEQ ID NO: 2339044 - RNA, 19 nt, Homo sapiens
  misc_RNA (1)...(19): siRNA sense strand
augaaaaucuggaugacaa

SEQ ID NO: 2339045 - RNA, 19 nt, Homo sapiens
  misc_RNA (1)...(19): siRNA sense strand
gagugaaacugauagcaca

SEQ ID NO: 2339046 - RNA, 19 nt, Homo sapiens
  misc_RNA (1)...(19): siRNA sense strand
gcagaaaagaagccauaaa

SEQ ID NO: 2339047 - RNA, 19 nt, Homo sapiens
  misc_RNA (1)...(19): siRNA sense strand
gagcuauuguggaagugaa

SEQ ID NO: 2339048 - RNA, 19 nt, Homo sapiens
  misc_RNA (1)...(19): siRNA sense strand
gcuacuaggcaaaguugua

SEQ ID NO: 2339049 - RNA, 19 nt, Homo sapiens
  misc_RNA (1)...(19): siRNA sense strand
gaagagaggaagaggagga

SEQ ID NO: 2339050 - RNA, 19 nt, Homo sapiens
  misc_RNA (1)...(19): siRNA sense strand
cuaaggagauugagcgcau

SEQ ID NO: 2339051 - RNA, 19 nt, Homo sapiens
  misc_RNA (1)...(19): siRNA sense strand
cgagaagagaggaagagga

SEQ ID NO: 2339052 - RNA, 19 nt, Homo sapiens
  misc_RNA (1)...(19): siRNA sense strand
caacaaaagaauccgguau

SEQ ID NO: 2339053 - RNA, 19 nt, Homo sapiens
  misc_RNA (1)...(19): siRNA sense strand
gcagagcaccugugaggca

SEQ ID NO: 2339054 - RNA, 19 nt, Homo sapiens
  misc_RNA (1)...(19): siRNA sense strand
gagaagagaggaagaggag

SEQ ID NO: 2339055 - RNA, 19 nt, Homo sapiens
  misc_RNA (1)...(19): siRNA sense strand
ggguaaaacggcuguggau

SEQ ID NO: 2339056 - RNA, 19 nt, Homo sapiens
  misc_RNA (1)...(19): siRNA sense strand
auaacaugcugcuggcuga

SEQ ID NO: 2339057 - RNA, 19 nt, Homo sapiens
  misc_RNA (1)...(19): siRNA sense strand
gcccgagaagagaggaaga

SEQ ID NO: 2339058 - RNA, 19 nt, Homo sapiens
  misc_RNA (1)...(19): siRNA sense strand
gguaaaacggcuguggaua

SEQ ID NO: 2339059 - RNA, 19 nt, Homo sapiens
  misc_RNA (1)...(19): siRNA sense strand
aggcccgagaagagaggaa

SEQ ID NO: 2339060 - RNA, 19 nt, Homo sapiens
  misc_RNA (1)...(19): siRNA sense strand
aggaagaggaggagcggug

SEQ ID NO: 2339061 - RNA, 19 nt, Homo sapiens
  misc_RNA (1)...(19): siRNA sense strand
cggaaaggcuucugggacu

SEQ ID NO: 2339062 - RNA, 19 nt, Homo sapiens
  misc_RNA (1)...(19): siRNA sense strand
gcuggaauuuggagggcuu

SEQ ID NO: 2339063 - RNA, 19 nt, Homo sapiens
  misc_RNA (1)...(19): siRNA sense strand
gggcuuugcugcagggacu

SEQ ID NO: 2339064 - RNA, 19 nt, Homo sapiens
  misc_RNA (1)...(19): siRNA sense strand
aggaguuggaggaggugaa

SEQ ID NO: 2339065 - RNA, 19 nt, Homo sapiens
  misc_RNA (1)...(19): siRNA sense strand
gggaagacaccaaggccca

SEQ ID NO: 2339066 - RNA, 19 nt, Homo sapiens
  misc_RNA (1)...(19): siRNA sense strand
cgauggaucugauggagca

SEQ ID NO: 2339067 - RNA, 19 nt, Homo sapiens
  misc_RNA (1)...(19): siRNA sense strand
aggaggaguuggaggaggu

SEQ ID NO: 2339068 - RNA, 19 nt, Homo sapiens
  misc_RNA (1)...(19): siRNA sense strand
cugaggagguccagcagca

SEQ ID NO: 2339069 - RNA, 19 nt, Homo sapiens
  misc_RNA (1)...(19): siRNA sense strand
caacaaacagacaguggca

SEQ ID NO: 2339070 - RNA, 19 nt, Homo sapiens
  misc_RNA (1)...(19): siRNA sense strand
gagcagauccaucagcaga

SEQ ID NO: 2339071 - RNA, 19 nt, Homo sapiens
  misc_RNA (1)...(19): siRNA sense strand
ggcagcaacugaagcccua

SEQ ID NO: 2339072 - RNA, 19 nt, Homo sapiens
  misc_RNA (1)...(19): siRNA sense strand
aggcacugggacugaggaa

SEQ ID NO: 2339073 - RNA, 19 nt, Homo sapiens
  misc_RNA (1)...(19): siRNA sense strand
cacaagacuuucaccauua

SEQ ID NO: 2339074 - RNA, 19 nt, Homo sapiens
  misc_RNA (1)...(19): siRNA sense strand
aggcauuggagaagaacca

SEQ ID NO: 2339075 - RNA, 19 nt, Homo sapiens
  misc_RNA (1)...(19): siRNA sense strand
aaaaggaggcauuggagaa

SEQ ID NO: 2339076 - RNA, 19 nt, Homo sapiens
  misc_RNA (1)...(19): siRNA sense strand
gccaagaaacaaaagcaaa

SEQ ID NO: 2339077 - RNA, 19 nt, Homo sapiens
  misc_RNA (1)...(19): siRNA sense strand
ucacaagacuuucaccauu

SEQ ID NO: 2339078 - RNA, 19 nt, Homo sapiens
  misc_RNA (1)...(19): siRNA sense strand
gguaguaaaaucagguaca

SEQ ID NO: 2339079 - RNA, 19 nt, Homo sapiens
  misc_RNA (1)...(19): siRNA sense strand
aaauagaauacguggagaa

SEQ ID NO: 2339080 - RNA, 19 nt, Homo sapiens
  misc_RNA (1)...(19): siRNA sense strand
acauggaaguggagaacau

SEQ ID NO: 2339081 - RNA, 19 nt, Homo sapiens
  misc_RNA (1)...(19): siRNA sense strand
auuguuaagcugugggaua

SEQ ID NO: 2339082 - RNA, 19 nt, Homo sapiens
  misc_RNA (1)...(19): siRNA sense strand
agacagaacaguugggacu

SEQ ID NO: 2339083 - RNA, 19 nt, Homo sapiens
  misc_RNA (1)...(19): siRNA sense strand
cagaugaagaagaugaaau

SEQ ID NO: 2339084 - RNA, 19 nt, Homo sapiens
  misc_RNA (1)...(19): siRNA sense strand
aaaucgaccaagaaagaaa

SEQ ID NO: 2339085 - RNA, 19 nt, Homo sapiens
  misc_RNA (1)...(19): siRNA sense strand
aaacaaagugaaagcccua

SEQ ID NO: 2339086 - RNA, 19 nt, Homo sapiens
  misc_RNA (1)...(19): siRNA sense strand
gaguggaggagcagacaau

SEQ ID NO: 2339087 - RNA, 19 nt, Homo sapiens
  misc_RNA (1)...(19): siRNA sense strand
aauuaaaggggcagaggaa

SEQ ID NO: 2339088 - RNA, 19 nt, Homo sapiens
  misc_RNA (1)...(19): siRNA sense strand
gcuucuacacugauaacaa

SEQ ID NO: 2339089 - RNA, 19 nt, Homo sapiens
  misc_RNA (1)...(19): siRNA sense strand
uggaauguagagagaaaca

SEQ ID NO: 2339090 - RNA, 19 nt, Homo sapiens
  misc_RNA (1)...(19): siRNA sense strand
cuggacagacacagggcua

SEQ ID NO: 2339091 - RNA, 19 nt, Homo sapiens
  misc_RNA (1)...(19): siRNA sense strand
aggucaugcuggaagugua

SEQ ID NO: 2339092 - RNA, 19 nt, Homo sapiens
  misc_RNA (1)...(19): siRNA sense strand
ggauaagaugcuaaagauc

SEQ ID NO: 2339093 - RNA, 19 nt, Homo sapiens
  misc_RNA (1)...(19): siRNA sense strand
augcuaaagaucuggucua

SEQ ID NO: 2339094 - RNA, 19 nt, Homo sapiens
  misc_RNA (1)...(19): siRNA sense strand
aguguagacuggacagaca

SEQ ID NO: 2339095 - RNA, 19 nt, Homo sapiens
  misc_RNA (1)...(19): siRNA sense strand
uaaugacaauugugggaca

SEQ ID NO: 2339096 - RNA, 19 nt, Homo sapiens
  misc_RNA (1)...(19): siRNA sense strand
cuguagaggucaugcugga

SEQ ID NO: 2339097 - RNA, 19 nt, Homo sapiens
  misc_RNA (1)...(19): siRNA sense strand
uuggaaggaaagucaauaa

SEQ ID NO: 2339098 - RNA, 19 nt, Homo sapiens
  misc_RNA (1)...(19): siRNA sense strand
uggacaaacacauggaagu

SEQ ID NO: 2339099 - RNA, 19 nt, Homo sapiens
  misc_RNA (1)...(19): siRNA sense strand
gggcagaggaauggaucuu

SEQ ID NO: 2339100 - RNA, 19 nt, Homo sapiens
  misc_RNA (1)...(19): siRNA sense strand
ugcgaaugcccuuggacaa

SEQ ID NO: 2339101 - RNA, 19 nt, Homo sapiens
  misc_RNA (1)...(19): siRNA sense strand
ugggauaagaugcuaaaga

SEQ ID NO: 2339102 - RNA, 19 nt, Homo sapiens
  misc_RNA (1)...(19): siRNA sense strand
cccuacagaugaagaagau

SEQ ID NO: 2339103 - RNA, 19 nt, Homo sapiens
  misc_RNA (1)...(19): siRNA sense strand
aagaagaugaaauggagga

SEQ ID NO: 2339104 - RNA, 19 nt, Homo sapiens
  misc_RNA (1)...(19): siRNA sense strand
agauguggccugggugaaa

SEQ ID NO: 2339105 - RNA, 19 nt, Homo sapiens
  misc_RNA (1)...(19): siRNA sense strand
cuucuauggaucagacuau

SEQ ID NO: 2339106 - RNA, 19 nt, Homo sapiens
  misc_RNA (1)...(19): siRNA sense strand
gaaacaaagugaaagcccu

SEQ ID NO: 2339107 - RNA, 19 nt, Homo sapiens
  misc_RNA (1)...(19): siRNA sense strand
agaaagaaacagaagacag

SEQ ID NO: 2339108 - RNA, 19 nt, Homo sapiens
  misc_RNA (1)...(19): siRNA sense strand
uaacaagaaauaugccgua

SEQ ID NO: 2339109 - RNA, 19 nt, Homo sapiens
  misc_RNA (1)...(19): siRNA sense strand
ugauaagacuucucggauc

SEQ ID NO: 2339110 - RNA, 19 nt, Homo sapiens
  misc_RNA (1)...(19): siRNA sense strand
augaagaagaugaaaugga

SEQ ID NO: 2339111 - RNA, 19 nt, Homo sapiens
  misc_RNA (1)...(19): siRNA sense strand
acaauuagagugugggaug

SEQ ID NO: 2339112 - RNA, 19 nt, Homo sapiens
  misc_RNA (1)...(19): siRNA sense strand
gguugggugacaucaguaa

SEQ ID NO: 2339113 - RNA, 19 nt, Homo sapiens
  misc_RNA (1)...(19): siRNA sense strand
caucagaagaaguugugga

SEQ ID NO: 2339114 - RNA, 19 nt, Homo sapiens
  misc_RNA (1)...(19): siRNA sense strand
acuucugaguggaggagca

SEQ ID NO: 2339115 - RNA, 19 nt, Homo sapiens
  misc_RNA (1)...(19): siRNA sense strand
aagaugaaauggaggaguc

SEQ ID NO: 2339116 - RNA, 19 nt, Homo sapiens
  misc_RNA (1)...(19): siRNA sense strand
ccaaaggccucgagugcga

SEQ ID NO: 2339117 - RNA, 19 nt, Homo sapiens
  misc_RNA (1)...(19): siRNA sense strand
gcuacagaaacuuggagaa

SEQ ID NO: 2339118 - RNA, 19 nt, Homo sapiens
  misc_RNA (1)...(19): siRNA sense strand
agaaguuauuuguggaaac

SEQ ID NO: 2339119 - RNA, 19 nt, Homo sapiens
  misc_RNA (1)...(19): siRNA sense strand
uuuaagacgaguaggcgaa

SEQ ID NO: 2339120 - RNA, 19 nt, Homo sapiens
  misc_RNA (1)...(19): siRNA sense strand
gggucuggucaaagagcuu

SEQ ID NO: 2339121 - RNA, 19 nt, Homo sapiens
  misc_RNA (1)...(19): siRNA sense strand
gaggaucggauuagagcga

SEQ ID NO: 2339122 - RNA, 19 nt, Homo sapiens
  misc_RNA (1)...(19): siRNA sense strand
guggaaacagggaaggcuu

SEQ ID NO: 2339123 - RNA, 19 nt, Homo sapiens
  misc_RNA (1)...(19): siRNA sense strand
uggaagaaaacgagacuca

SEQ ID NO: 2339124 - RNA, 19 nt, Homo sapiens
  misc_RNA (1)...(19): siRNA sense strand
ggaucggauuagagcgaag

SEQ ID NO: 2339125 - RNA, 19 nt, Homo sapiens
  misc_RNA (1)...(19): siRNA sense strand
agagaaguuauuuguggaa

SEQ ID NO: 2339126 - RNA, 19 nt, Homo sapiens
  misc_RNA (1)...(19): siRNA sense strand
agaaagaaguuccacagga

SEQ ID NO: 2339127 - RNA, 19 nt, Homo sapiens
  misc_RNA (1)...(19): siRNA sense strand
gaaagaaguuccacaggac

SEQ ID NO: 2339128 - RNA, 19 nt, Homo sapiens
  misc_RNA (1)...(19): siRNA sense strand
acuuggagaaacagaugaa

SEQ ID NO: 2339129 - RNA, 19 nt, Homo sapiens
  misc_RNA (1)...(19): siRNA sense strand
uuggagaaacagaugaaga

SEQ ID NO: 2339130 - RNA, 19 nt, Homo sapiens
  misc_RNA (1)...(19): siRNA sense strand
uggaaacagggaaggcuuu

SEQ ID NO: 2339131 - RNA, 19 nt, Homo sapiens
  misc_RNA (1)...(19): siRNA sense strand
ucgagugcgauauggcaaa

SEQ ID NO: 2339132 - RNA, 19 nt, Homo sapiens
  misc_RNA (1)...(19): siRNA sense strand
cuuuauuggcagaaggugu

SEQ ID NO: 2339133 - RNA, 19 nt, Homo sapiens
  misc_RNA (1)...(19): siRNA sense strand
gcacagaccacgagcugga

SEQ ID NO: 2339134 - RNA, 19 nt, Homo sapiens
  misc_RNA (1)...(19): siRNA sense strand
ggaaacuacauaagagcca

SEQ ID NO: 2339135 - RNA, 19 nt, Homo sapiens
  misc_RNA (1)...(19): siRNA sense strand
uggaggugauuaaggaaaa

SEQ ID NO: 2339136 - RNA, 19 nt, Homo sapiens
  misc_RNA (1)...(19): siRNA sense strand
agauggaagaggaguugaa

SEQ ID NO: 2339137 - RNA, 19 nt, Homo sapiens
  misc_RNA (1)...(19): siRNA sense strand
gcgucaacaaggagcauga

SEQ ID NO: 2339138 - RNA, 19 nt, Homo sapiens
  misc_RNA (1)...(19): siRNA sense strand
aggagauggaagaggaguu

SEQ ID NO: 2339139 - RNA, 19 nt, Homo sapiens
  misc_RNA (1)...(19): siRNA sense strand
ccucauaagaagagugcac

SEQ ID NO: 2339140 - RNA, 19 nt, Homo sapiens
  misc_RNA (1)...(19): siRNA sense strand
agugcuuggaggagggcaa

SEQ ID NO: 2339141 - RNA, 19 nt, Homo sapiens
  misc_RNA (1)...(19): siRNA sense strand
gagcaugagcacaagcuga

SEQ ID NO: 2339142 - RNA, 19 nt, Homo sapiens
  misc_RNA (1)...(19): siRNA sense strand
gcacagugaaauugcgcca

SEQ ID NO: 2339143 - RNA, 19 nt, Homo sapiens
  misc_RNA (1)...(19): siRNA sense strand
gagucagcccguacagcaa

SEQ ID NO: 2339144 - RNA, 19 nt, Homo sapiens
  misc_RNA (1)...(19): siRNA sense strand
gggagguguauguggggaa

SEQ ID NO: 2339145 - RNA, 19 nt, Homo sapiens
  misc_RNA (1)...(19): siRNA sense strand
accacgagcuggagaacca

SEQ ID NO: 2339146 - RNA, 19 nt, Homo sapiens
  misc_RNA (1)...(19): siRNA sense strand
gaggaauguuguacccaca

SEQ ID NO: 2339147 - RNA, 19 nt, Homo sapiens
  misc_RNA (1)...(19): siRNA sense strand
aggagaacaguguggaguu

SEQ ID NO: 2339148 - RNA, 19 nt, Homo sapiens
  misc_RNA (1)...(19): siRNA sense strand
acugcuuggaggugauuaa

SEQ ID NO: 2339149 - RNA, 19 nt, Homo sapiens
  misc_RNA (1)...(19): siRNA sense strand
ggguaaaggcacacucacu

SEQ ID NO: 2339150 - RNA, 19 nt, Homo sapiens
  misc_RNA (1)...(19): siRNA sense strand
uuggaggugauuaaggaaa

SEQ ID NO: 2339151 - RNA, 19 nt, Homo sapiens
  misc_RNA (1)...(19): siRNA sense strand
gcacagaccacgagcugga

SEQ ID NO: 2339152 - RNA, 19 nt, Homo sapiens
  misc_RNA (1)...(19): siRNA sense strand
ggaaacuacauaagagcca

SEQ ID NO: 2339153 - RNA, 19 nt, Homo sapiens
  misc_RNA (1)...(19): siRNA sense strand
uggaggugauuaaggaaaa

SEQ ID NO: 2339154 - RNA, 19 nt, Homo sapiens
  misc_RNA (1)...(19): siRNA sense strand
agauggaagaggaguugaa

SEQ ID NO: 2339155 - RNA, 19 nt, Homo sapiens
  misc_RNA (1)...(19): siRNA sense strand
gcgucaacaaggagcauga

SEQ ID NO: 2339156 - RNA, 19 nt, Homo sapiens
  misc_RNA (1)...(19): siRNA sense strand
aggagauggaagaggaguu

SEQ ID NO: 2339157 - RNA, 19 nt, Homo sapiens
  misc_RNA (1)...(19): siRNA sense strand
ccucauaagaagagugcac

SEQ ID NO: 2339158 - RNA, 19 nt, Homo sapiens
  misc_RNA (1)...(19): siRNA sense strand
agugcuuggaggagggcaa

SEQ ID NO: 2339159 - RNA, 19 nt, Homo sapiens
  misc_RNA (1)...(19): siRNA sense strand
gagcaugagcacaagcuga

SEQ ID NO: 2339160 - RNA, 19 nt, Homo sapiens
  misc_RNA (1)...(19): siRNA sense strand
gcacagugaaauugcgcca

SEQ ID NO: 2339161 - RNA, 19 nt, Homo sapiens
  misc_RNA (1)...(19): siRNA sense strand
gagucagcccguacagcaa

SEQ ID NO: 2339162 - RNA, 19 nt, Homo sapiens
  misc_RNA (1)...(19): siRNA sense strand
gggagguguauguggggaa

SEQ ID NO: 2339163 - RNA, 19 nt, Homo sapiens
  misc_RNA (1)...(19): siRNA sense strand
accacgagcuggagaacca

SEQ ID NO: 2339164 - RNA, 19 nt, Homo sapiens
  misc_RNA (1)...(19): siRNA sense strand
gaggaauguuguacccaca

SEQ ID NO: 2339165 - RNA, 19 nt, Homo sapiens
  misc_RNA (1)...(19): siRNA sense strand
aggagaacaguguggaguu

SEQ ID NO: 2339166 - RNA, 19 nt, Homo sapiens
  misc_RNA (1)...(19): siRNA sense strand
acugcuuggaggugauuaa

SEQ ID NO: 2339167 - RNA, 19 nt, Homo sapiens
  misc_RNA (1)...(19): siRNA sense strand
ggguaaaggcacacucacu

SEQ ID NO: 2339168 - RNA, 19 nt, Homo sapiens
  misc_RNA (1)...(19): siRNA sense strand
uuggaggugauuaaggaaa

SEQ ID NO: 2339169 - RNA, 19 nt, Homo sapiens
  misc_RNA (1)...(19): siRNA sense strand
acauaaggaugaagguaau

SEQ ID NO: 2339170 - RNA, 19 nt, Homo sapiens
  misc_RNA (1)...(19): siRNA sense strand
uacauaaggaugaagguaa

SEQ ID NO: 2339171 - RNA, 19 nt, Homo sapiens
  misc_RNA (1)...(19): siRNA sense strand
uggccagaaucuacagcua

SEQ ID NO: 2339172 - RNA, 19 nt, Homo sapiens
  misc_RNA (1)...(19): siRNA sense strand
ccuaugggacaguguacaa

SEQ ID NO: 2339173 - RNA, 19 nt, Homo sapiens
  misc_RNA (1)...(19): siRNA sense strand
guaccgagcucccgaaguu

SEQ ID NO: 2339174 - RNA, 19 nt, Homo sapiens
  misc_RNA (1)...(19): siRNA sense strand
caauggaggaggaggugga

SEQ ID NO: 2339175 - RNA, 19 nt, Homo sapiens
  misc_RNA (1)...(19): siRNA sense strand
aagccgaccaguugggcaa

SEQ ID NO: 2339176 - RNA, 19 nt, Homo sapiens
  misc_RNA (1)...(19): siRNA sense strand
gaccaggaccuaaggacau

SEQ ID NO: 2339177 - RNA, 19 nt, Homo sapiens
  misc_RNA (1)...(19): siRNA sense strand
uggaggaggagguggagga

SEQ ID NO: 2339178 - RNA, 19 nt, Homo sapiens
  misc_RNA (1)...(19): siRNA sense strand
agaccaggaccuaaggaca

SEQ ID NO: 2339179 - RNA, 19 nt, Homo sapiens
  misc_RNA (1)...(19): siRNA sense strand
augcaacaccuguggacau

SEQ ID NO: 2339180 - RNA, 19 nt, Homo sapiens
  misc_RNA (1)...(19): siRNA sense strand
cuacauaaggaugaaggua

SEQ ID NO: 2339181 - RNA, 19 nt, Homo sapiens
  misc_RNA (1)...(19): siRNA sense strand
gaacagucaagcuggcuga

SEQ ID NO: 2339182 - RNA, 19 nt, Homo sapiens
  misc_RNA (1)...(19): siRNA sense strand
cagcacaguucgugaggug

SEQ ID NO: 2339183 - RNA, 19 nt, Homo sapiens
  misc_RNA (1)...(19): siRNA sense strand
agguaacccugguguuuga

SEQ ID NO: 2339184 - RNA, 19 nt, Homo sapiens
  misc_RNA (1)...(19): siRNA sense strand
agaccauggaggagaagaa

SEQ ID NO: 2339185 - RNA, 19 nt, Homo sapiens
  misc_RNA (1)...(19): siRNA sense strand
gcgagaggcuugagcagca

SEQ ID NO: 2339186 - RNA, 19 nt, Homo sapiens
  misc_RNA (1)...(19): siRNA sense strand
ugaccaagggcaaaggcua

SEQ ID NO: 2339187 - RNA, 19 nt, Homo sapiens
  misc_RNA (1)...(19): siRNA sense strand
gaugaaugcaagaggcguu

SEQ ID NO: 2339188 - RNA, 19 nt, Homo sapiens
  misc_RNA (1)...(19): siRNA sense strand
ggcaagaagcagcuggaga

SEQ ID NO: 2339189 - RNA, 19 nt, Homo sapiens
  misc_RNA (1)...(19): siRNA sense strand
acaagaaggagguggugga

SEQ ID NO: 2339190 - RNA, 19 nt, Homo sapiens
  misc_RNA (1)...(19): siRNA sense strand
agaaauggcaggaugagga

SEQ ID NO: 2339191 - RNA, 19 nt, Homo sapiens
  misc_RNA (1)...(19): siRNA sense strand
gcgcugggcagaaaggcua

SEQ ID NO: 2339192 - RNA, 19 nt, Homo sapiens
  misc_RNA (1)...(19): siRNA sense strand
cagcaggcaucgugggaag

SEQ ID NO: 2339193 - RNA, 19 nt, Homo sapiens
  misc_RNA (1)...(19): siRNA sense strand
ccgaauugcaaaggaagaa

SEQ ID NO: 2339194 - RNA, 19 nt, Homo sapiens
  misc_RNA (1)...(19): siRNA sense strand
cgggauccaaggugaacaa

SEQ ID NO: 2339195 - RNA, 19 nt, Homo sapiens
  misc_RNA (1)...(19): siRNA sense strand
ggcaggaugaggauggcaa

SEQ ID NO: 2339196 - RNA, 19 nt, Homo sapiens
  misc_RNA (1)...(19): siRNA sense strand
aggaggugguggaggcugu

SEQ ID NO: 2339197 - RNA, 19 nt, Homo sapiens
  misc_RNA (1)...(19): siRNA sense strand
ucaugggaccacugaagaa

SEQ ID NO: 2339198 - RNA, 19 nt, Homo sapiens
  misc_RNA (1)...(19): siRNA sense strand
auaagauuggccagggcua

SEQ ID NO: 2339199 - RNA, 19 nt, Homo sapiens
  misc_RNA (1)...(19): siRNA sense strand
gcugaaaggcuguguggug

SEQ ID NO: 2339200 - RNA, 19 nt, Homo sapiens
  misc_RNA (1)...(19): siRNA sense strand
gaagaaagcauucauggga

SEQ ID NO: 2339201 - RNA, 19 nt, Homo sapiens
  misc_RNA (1)...(19): siRNA sense strand
uagaagaggccgugcggaa

SEQ ID NO: 2339202 - RNA, 19 nt, Homo sapiens
  misc_RNA (1)...(19): siRNA sense strand
gaacaaaggcuacggggaa

SEQ ID NO: 2339203 - RNA, 19 nt, Homo sapiens
  misc_RNA (1)...(19): siRNA sense strand
gugcagaggaagaggaacu

SEQ ID NO: 2339204 - RNA, 19 nt, Homo sapiens
  misc_RNA (1)...(19): siRNA sense strand
aauuauuggcccagaggaa

SEQ ID NO: 2339205 - RNA, 19 nt, Homo sapiens
  misc_RNA (1)...(19): siRNA sense strand
uguccaaguaugaggaaga

SEQ ID NO: 2339206 - RNA, 19 nt, Homo sapiens
  misc_RNA (1)...(19): siRNA sense strand
gaucaaagcccaaagccuu

SEQ ID NO: 2339207 - RNA, 19 nt, Homo sapiens
  misc_RNA (1)...(19): siRNA sense strand
cagcagaguucaagagccu

SEQ ID NO: 2339208 - RNA, 19 nt, Homo sapiens
  misc_RNA (1)...(19): siRNA sense strand
cugugaagcucaagaggca

SEQ ID NO: 2339209 - RNA, 19 nt, Homo sapiens
  misc_RNA (1)...(19): siRNA sense strand
gcuucugacuccaggaaca

SEQ ID NO: 2339210 - RNA, 19 nt, Homo sapiens
  misc_RNA (1)...(19): siRNA sense strand
agcaauuccaagaaagaaa

SEQ ID NO: 2339211 - RNA, 19 nt, Homo sapiens
  misc_RNA (1)...(19): siRNA sense strand
guaugugaaugaagcggua

SEQ ID NO: 2339212 - RNA, 19 nt, Homo sapiens
  misc_RNA (1)...(19): siRNA sense strand
uggaggacaagaagcgaaa

SEQ ID NO: 2339213 - RNA, 19 nt, Homo sapiens
  misc_RNA (1)...(19): siRNA sense strand
cagcgaaugaagaaggaga

SEQ ID NO: 2339214 - RNA, 19 nt, Homo sapiens
  misc_RNA (1)...(19): siRNA sense strand
uggaagauguggagaaccu

SEQ ID NO: 2339215 - RNA, 19 nt, Homo sapiens
  misc_RNA (1)...(19): siRNA sense strand
ggguagaacuggaugacuc

SEQ ID NO: 2339216 - RNA, 19 nt, Homo sapiens
  misc_RNA (1)...(19): siRNA sense strand
ggccagagcaggaagacau

SEQ ID NO: 2339217 - RNA, 19 nt, Homo sapiens
  misc_RNA (1)...(19): siRNA sense strand
agacagagccucagccuca

SEQ ID NO: 2339218 - RNA, 19 nt, Homo sapiens
  misc_RNA (1)...(19): siRNA sense strand
agaagcagcuagauggaca

SEQ ID NO: 2339219 - RNA, 19 nt, Homo sapiens
  misc_RNA (1)...(19): siRNA sense strand
aggaagaggaacugggugu

SEQ ID NO: 2339220 - RNA, 19 nt, Homo sapiens
  misc_RNA (1)...(19): siRNA sense strand
cgaagaugcccgugguguu

SEQ ID NO: 2339221 - RNA, 19 nt, Homo sapiens
  misc_RNA (1)...(19): siRNA sense strand
cagaguauagacagguuaa

SEQ ID NO: 2339222 - RNA, 19 nt, Homo sapiens
  misc_RNA (1)...(19): siRNA sense strand
gaaugaagaaggagaaccu

SEQ ID NO: 2339223 - RNA, 19 nt, Homo sapiens
  misc_RNA (1)...(19): siRNA sense strand
cugaagugccacagcaaga

SEQ ID NO: 2339224 - RNA, 19 nt, Homo sapiens
  misc_RNA (1)...(19): siRNA sense strand
ccucaaauacauugggaag

SEQ ID NO: 2339225 - RNA, 19 nt, Homo sapiens
  misc_RNA (1)...(19): siRNA sense strand
gccugaacucauagagauu

SEQ ID NO: 2339226 - RNA, 19 nt, Homo sapiens
  misc_RNA (1)...(19): siRNA sense strand
gugcagaaguuuaucagca

SEQ ID NO: 2339227 - RNA, 19 nt, Homo sapiens
  misc_RNA (1)...(19): siRNA sense strand
ggaugugguggcugggcua

SEQ ID NO: 2339228 - RNA, 19 nt, Homo sapiens
  misc_RNA (1)...(19): siRNA sense strand
gugguaaagcugaucaaau

SEQ ID NO: 2339229 - RNA, 19 nt, Homo sapiens
  misc_RNA (1)...(19): siRNA sense strand
cugagaugcuacaggcuga

SEQ ID NO: 2339230 - RNA, 19 nt, Homo sapiens
  misc_RNA (1)...(19): siRNA sense strand
cucaacaggcucaaggaua

SEQ ID NO: 2339231 - RNA, 19 nt, Homo sapiens
  misc_RNA (1)...(19): siRNA sense strand
guuuagagggcuaccagaa

SEQ ID NO: 2339232 - RNA, 19 nt, Homo sapiens
  misc_RNA (1)...(19): siRNA sense strand
ccuaagaccaagaagagca

SEQ ID NO: 2339233 - RNA, 19 nt, Homo sapiens
  misc_RNA (1)...(19): siRNA sense strand
accaagaagagcagcaauu

SEQ ID NO: 2339234 - RNA, 19 nt, Homo sapiens
  misc_RNA (1)...(19): siRNA sense strand
aggaccugcuggagaguga

SEQ ID NO: 2339235 - RNA, 19 nt, Homo sapiens
  misc_RNA (1)...(19): siRNA sense strand
aggaugccuuggaggacaa

SEQ ID NO: 2339236 - RNA, 19 nt, Homo sapiens
  misc_RNA (1)...(19): siRNA sense strand
ugaaagagggcgaccggau

SEQ ID NO: 2339237 - RNA, 19 nt, Homo sapiens
  misc_RNA (1)...(19): siRNA sense strand
agaugaaacggucucgaaa

SEQ ID NO: 2339238 - RNA, 19 nt, Homo sapiens
  misc_RNA (1)...(19): siRNA sense strand
uggaagugguaaagcugau

SEQ ID NO: 2339239 - RNA, 19 nt, Homo sapiens
  misc_RNA (1)...(19): siRNA sense strand
aagacuaugacccggguua

SEQ ID NO: 2339240 - RNA, 19 nt, Homo sapiens
  misc_RNA (1)...(19): siRNA sense strand
augugaaugaagcgguaaa

SEQ ID NO: 2339241 - RNA, 19 nt, Homo sapiens
  misc_RNA (1)...(19): siRNA sense strand
gguaaaacaaacagagaac

SEQ ID NO: 2339242 - RNA, 19 nt, Homo sapiens
  misc_RNA (1)...(19): siRNA sense strand
ggaagucaaaccaggcaau

SEQ ID NO: 2339243 - RNA, 19 nt, Homo sapiens
  misc_RNA (1)...(19): siRNA sense strand
aguauagacagguuaagua

SEQ ID NO: 2339244 - RNA, 19 nt, Homo sapiens
  misc_RNA (1)...(19): siRNA sense strand
agaaacaggaugagaagcu

SEQ ID NO: 2339245 - RNA, 19 nt, Homo sapiens
  misc_RNA (1)...(19): siRNA sense strand
ccagaguauagacagguua

SEQ ID NO: 2339246 - RNA, 19 nt, Homo sapiens
  misc_RNA (1)...(19): siRNA sense strand
gggaagagaugaaacgguc

SEQ ID NO: 2339247 - RNA, 19 nt, Homo sapiens
  misc_RNA (1)...(19): siRNA sense strand
cgguaaaacaaacagagaa

SEQ ID NO: 2339248 - RNA, 19 nt, Homo sapiens
  misc_RNA (1)...(19): siRNA sense strand
ccuagugcugcuacagaaa

SEQ ID NO: 2339249 - RNA, 19 nt, Homo sapiens
  misc_RNA (1)...(19): siRNA sense strand
ggguguagaucaaagccca

SEQ ID NO: 2339250 - RNA, 19 nt, Homo sapiens
  misc_RNA (1)...(19): siRNA sense strand
caguucacgcucagagauu

SEQ ID NO: 2339251 - RNA, 19 nt, Homo sapiens
  misc_RNA (1)...(19): siRNA sense strand
ggaccagugccgggagauu

SEQ ID NO: 2339252 - RNA, 19 nt, Homo sapiens
  misc_RNA (1)...(19): siRNA sense strand
gacaagaagcgaaacccua

SEQ ID NO: 2339253 - RNA, 19 nt, Homo sapiens
  misc_RNA (1)...(19): siRNA sense strand
gcagaggguccaagggaag

SEQ ID NO: 2339254 - RNA, 19 nt, Homo sapiens
  misc_RNA (1)...(19): siRNA sense strand
ggggaaagacaucuggaau

SEQ ID NO: 2339255 - RNA, 19 nt, Homo sapiens
  misc_RNA (1)...(19): siRNA sense strand
acucauagagauucacaau

SEQ ID NO: 2339256 - RNA, 19 nt, Homo sapiens
  misc_RNA (1)...(19): siRNA sense strand
gguagaacuggaugacuca

SEQ ID NO: 2339257 - RNA, 19 nt, Homo sapiens
  misc_RNA (1)...(19): siRNA sense strand
agcagaggguccaagggaa

SEQ ID NO: 2339258 - RNA, 19 nt, Homo sapiens
  misc_RNA (1)...(19): siRNA sense strand
gguuauuucaacaacgaga

SEQ ID NO: 2339259 - RNA, 19 nt, Homo sapiens
  misc_RNA (1)...(19): siRNA sense strand
cagccaugccugagaucca

SEQ ID NO: 2339260 - RNA, 19 nt, Homo sapiens
  misc_RNA (1)...(19): siRNA sense strand
gaaacggucucgaaaggca

SEQ ID NO: 2339261 - RNA, 19 nt, Homo sapiens
  misc_RNA (1)...(19): siRNA sense strand
cucuggaagauguggagaa

SEQ ID NO: 2339262 - RNA, 19 nt, Homo sapiens
  misc_RNA (1)...(19): siRNA sense strand
cagugcagaggaagaggaa

SEQ ID NO: 2339263 - RNA, 19 nt, Homo sapiens
  misc_RNA (1)...(19): siRNA sense strand
acgcaucacaggacccaaa

SEQ ID NO: 2339264 - RNA, 19 nt, Homo sapiens
  misc_RNA (1)...(19): siRNA sense strand
gauccgucuucgagaggca

SEQ ID NO: 2339265 - RNA, 19 nt, Homo sapiens
  misc_RNA (1)...(19): siRNA sense strand
caacgacucucgaccggaa

SEQ ID NO: 2339266 - RNA, 19 nt, Homo sapiens
  misc_RNA (1)...(19): siRNA sense strand
agcgaaugaagaaggagaa

SEQ ID NO: 2339267 - RNA, 19 nt, Homo sapiens
  misc_RNA (1)...(19): siRNA sense strand
uagaagaggccgugcggaa

SEQ ID NO: 2339268 - RNA, 19 nt, Homo sapiens
  misc_RNA (1)...(19): siRNA sense strand
gaacaaaggcuacggggaa

SEQ ID NO: 2339269 - RNA, 19 nt, Homo sapiens
  misc_RNA (1)...(19): siRNA sense strand
gugcagaggaagaggaacu

SEQ ID NO: 2339270 - RNA, 19 nt, Homo sapiens
  misc_RNA (1)...(19): siRNA sense strand
aauuauuggcccagaggaa

SEQ ID NO: 2339271 - RNA, 19 nt, Homo sapiens
  misc_RNA (1)...(19): siRNA sense strand
uguccaaguaugaggaaga

SEQ ID NO: 2339272 - RNA, 19 nt, Homo sapiens
  misc_RNA (1)...(19): siRNA sense strand
gaucaaagcccaaagccuu

SEQ ID NO: 2339273 - RNA, 19 nt, Homo sapiens
  misc_RNA (1)...(19): siRNA sense strand
cagcagaguucaagagccu

SEQ ID NO: 2339274 - RNA, 19 nt, Homo sapiens
  misc_RNA (1)...(19): siRNA sense strand
cugugaagcucaagaggca

SEQ ID NO: 2339275 - RNA, 19 nt, Homo sapiens
  misc_RNA (1)...(19): siRNA sense strand
gcuucugacuccaggaaca

SEQ ID NO: 2339276 - RNA, 19 nt, Homo sapiens
  misc_RNA (1)...(19): siRNA sense strand
agcaauuccaagaaagaaa

SEQ ID NO: 2339277 - RNA, 19 nt, Homo sapiens
  misc_RNA (1)...(19): siRNA sense strand
guaugugaaugaagcggua

SEQ ID NO: 2339278 - RNA, 19 nt, Homo sapiens
  misc_RNA (1)...(19): siRNA sense strand
uggaggacaagaagcgaaa

SEQ ID NO: 2339279 - RNA, 19 nt, Homo sapiens
  misc_RNA (1)...(19): siRNA sense strand
cagcgaaugaagaaggaga

SEQ ID NO: 2339280 - RNA, 19 nt, Homo sapiens
  misc_RNA (1)...(19): siRNA sense strand
uggaagauguggagaaccu

SEQ ID NO: 2339281 - RNA, 19 nt, Homo sapiens
  misc_RNA (1)...(19): siRNA sense strand
ggguagaacuggaugacuc

SEQ ID NO: 2339282 - RNA, 19 nt, Homo sapiens
  misc_RNA (1)...(19): siRNA sense strand
ggccagagcaggaagacau

SEQ ID NO: 2339283 - RNA, 19 nt, Homo sapiens
  misc_RNA (1)...(19): siRNA sense strand
agacagagccucagccuca

SEQ ID NO: 2339284 - RNA, 19 nt, Homo sapiens
  misc_RNA (1)...(19): siRNA sense strand
agaagcagcuagauggaca

SEQ ID NO: 2339285 - RNA, 19 nt, Homo sapiens
  misc_RNA (1)...(19): siRNA sense strand
aggaagaggaacugggugu

SEQ ID NO: 2339286 - RNA, 19 nt, Homo sapiens
  misc_RNA (1)...(19): siRNA sense strand
cgaagaugcccgugguguu

SEQ ID NO: 2339287 - RNA, 19 nt, Homo sapiens
  misc_RNA (1)...(19): siRNA sense strand
cagaguauagacagguuaa

SEQ ID NO: 2339288 - RNA, 19 nt, Homo sapiens
  misc_RNA (1)...(19): siRNA sense strand
gaaugaagaaggagaaccu

SEQ ID NO: 2339289 - RNA, 19 nt, Homo sapiens
  misc_RNA (1)...(19): siRNA sense strand
cugaagugccacagcaaga

SEQ ID NO: 2339290 - RNA, 19 nt, Homo sapiens
  misc_RNA (1)...(19): siRNA sense strand
ccucaaauacauugggaag

SEQ ID NO: 2339291 - RNA, 19 nt, Homo sapiens
  misc_RNA (1)...(19): siRNA sense strand
gccugaacucauagagauu

SEQ ID NO: 2339292 - RNA, 19 nt, Homo sapiens
  misc_RNA (1)...(19): siRNA sense strand
gugcagaaguuuaucagca

SEQ ID NO: 2339293 - RNA, 19 nt, Homo sapiens
  misc_RNA (1)...(19): siRNA sense strand
ggaugugguggcugggcua

SEQ ID NO: 2339294 - RNA, 19 nt, Homo sapiens
  misc_RNA (1)...(19): siRNA sense strand
gugguaaagcugaucaaau

SEQ ID NO: 2339295 - RNA, 19 nt, Homo sapiens
  misc_RNA (1)...(19): siRNA sense strand
cugagaugcuacaggcuga

SEQ ID NO: 2339296 - RNA, 19 nt, Homo sapiens
  misc_RNA (1)...(19): siRNA sense strand
cucaacaggcucaaggaua

SEQ ID NO: 2339297 - RNA, 19 nt, Homo sapiens
  misc_RNA (1)...(19): siRNA sense strand
guuuagagggcuaccagaa

SEQ ID NO: 2339298 - RNA, 19 nt, Homo sapiens
  misc_RNA (1)...(19): siRNA sense strand
ccuaagaccaagaagagca

SEQ ID NO: 2339299 - RNA, 19 nt, Homo sapiens
  misc_RNA (1)...(19): siRNA sense strand
accaagaagagcagcaauu

SEQ ID NO: 2339300 - RNA, 19 nt, Homo sapiens
  misc_RNA (1)...(19): siRNA sense strand
aggaccugcuggagaguga

SEQ ID NO: 2339301 - RNA, 19 nt, Homo sapiens
  misc_RNA (1)...(19): siRNA sense strand
aggaugccuuggaggacaa

SEQ ID NO: 2339302 - RNA, 19 nt, Homo sapiens
  misc_RNA (1)...(19): siRNA sense strand
ugaaagagggcgaccggau

SEQ ID NO: 2339303 - RNA, 19 nt, Homo sapiens
  misc_RNA (1)...(19): siRNA sense strand
agaugaaacggucucgaaa

SEQ ID NO: 2339304 - RNA, 19 nt, Homo sapiens
  misc_RNA (1)...(19): siRNA sense strand
uggaagugguaaagcugau

SEQ ID NO: 2339305 - RNA, 19 nt, Homo sapiens
  misc_RNA (1)...(19): siRNA sense strand
aagacuaugacccggguua

SEQ ID NO: 2339306 - RNA, 19 nt, Homo sapiens
  misc_RNA (1)...(19): siRNA sense strand
augugaaugaagcgguaaa

SEQ ID NO: 2339307 - RNA, 19 nt, Homo sapiens
  misc_RNA (1)...(19): siRNA sense strand
gguaaaacaaacagagaac

SEQ ID NO: 2339308 - RNA, 19 nt, Homo sapiens
  misc_RNA (1)...(19): siRNA sense strand
ggaagucaaaccaggcaau

SEQ ID NO: 2339309 - RNA, 19 nt, Homo sapiens
  misc_RNA (1)...(19): siRNA sense strand
aguauagacagguuaagua

SEQ ID NO: 2339310 - RNA, 19 nt, Homo sapiens
  misc_RNA (1)...(19): siRNA sense strand
agaaacaggaugagaagcu

SEQ ID NO: 2339311 - RNA, 19 nt, Homo sapiens
  misc_RNA (1)...(19): siRNA sense strand
ccagaguauagacagguua

SEQ ID NO: 2339312 - RNA, 19 nt, Homo sapiens
  misc_RNA (1)...(19): siRNA sense strand
gggaagagaugaaacgguc

SEQ ID NO: 2339313 - RNA, 19 nt, Homo sapiens
  misc_RNA (1)...(19): siRNA sense strand
cgguaaaacaaacagagaa

SEQ ID NO: 2339314 - RNA, 19 nt, Homo sapiens
  misc_RNA (1)...(19): siRNA sense strand
ccuagugcugcuacagaaa

SEQ ID NO: 2339315 - RNA, 19 nt, Homo sapiens
  misc_RNA (1)...(19): siRNA sense strand
ggguguagaucaaagccca

SEQ ID NO: 2339316 - RNA, 19 nt, Homo sapiens
  misc_RNA (1)...(19): siRNA sense strand
caguucacgcucagagauu

SEQ ID NO: 2339317 - RNA, 19 nt, Homo sapiens
  misc_RNA (1)...(19): siRNA sense strand
ggaccagugccgggagauu

SEQ ID NO: 2339318 - RNA, 19 nt, Homo sapiens
  misc_RNA (1)...(19): siRNA sense strand
gacaagaagcgaaacccua

SEQ ID NO: 2339319 - RNA, 19 nt, Homo sapiens
  misc_RNA (1)...(19): siRNA sense strand
gcagaggguccaagggaag

SEQ ID NO: 2339320 - RNA, 19 nt, Homo sapiens
  misc_RNA (1)...(19): siRNA sense strand
ggggaaagacaucuggaau

SEQ ID NO: 2339321 - RNA, 19 nt, Homo sapiens
  misc_RNA (1)...(19): siRNA sense strand
acucauagagauucacaau

SEQ ID NO: 2339322 - RNA, 19 nt, Homo sapiens
  misc_RNA (1)...(19): siRNA sense strand
gguagaacuggaugacuca

SEQ ID NO: 2339323 - RNA, 19 nt, Homo sapiens
  misc_RNA (1)...(19): siRNA sense strand
agcagaggguccaagggaa

SEQ ID NO: 2339324 - RNA, 19 nt, Homo sapiens
  misc_RNA (1)...(19): siRNA sense strand
gguuauuucaacaacgaga

SEQ ID NO: 2339325 - RNA, 19 nt, Homo sapiens
  misc_RNA (1)...(19): siRNA sense strand
cagccaugccugagaucca

SEQ ID NO: 2339326 - RNA, 19 nt, Homo sapiens
  misc_RNA (1)...(19): siRNA sense strand
gaaacggucucgaaaggca

SEQ ID NO: 2339327 - RNA, 19 nt, Homo sapiens
  misc_RNA (1)...(19): siRNA sense strand
cucuggaagauguggagaa

SEQ ID NO: 2339328 - RNA, 19 nt, Homo sapiens
  misc_RNA (1)...(19): siRNA sense strand
cagugcagaggaagaggaa

SEQ ID NO: 2339329 - RNA, 19 nt, Homo sapiens
  misc_RNA (1)...(19): siRNA sense strand
acgcaucacaggacccaaa

SEQ ID NO: 2339330 - RNA, 19 nt, Homo sapiens
  misc_RNA (1)...(19): siRNA sense strand
gauccgucuucgagaggca

SEQ ID NO: 2339331 - RNA, 19 nt, Homo sapiens
  misc_RNA (1)...(19): siRNA sense strand
caacgacucucgaccggaa

SEQ ID NO: 2339332 - RNA, 19 nt, Homo sapiens
  misc_RNA (1)...(19): siRNA sense strand
agcgaaugaagaaggagaa

SEQ ID NO: 2339333 - RNA, 19 nt, Homo sapiens
  misc_RNA (1)...(19): siRNA sense strand
caguauuggccaagcguau

SEQ ID NO: 2339334 - RNA, 19 nt, Homo sapiens
  misc_RNA (1)...(19): siRNA sense strand
ccaucgagcuccaaggaca

SEQ ID NO: 2339335 - RNA, 19 nt, Homo sapiens
  misc_RNA (1)...(19): siRNA sense strand
ugguacaaucucagaguuu

SEQ ID NO: 2339336 - RNA, 19 nt, Homo sapiens
  misc_RNA (1)...(19): siRNA sense strand
acauggacguggagaggca

SEQ ID NO: 2339337 - RNA, 19 nt, Homo sapiens
  misc_RNA (1)...(19): siRNA sense strand
agcaaaugugggacaguaa

SEQ ID NO: 2339338 - RNA, 19 nt, Homo sapiens
  misc_RNA (1)...(19): siRNA sense strand
gggacaucggugggagaaa

SEQ ID NO: 2339339 - RNA, 19 nt, Homo sapiens
  misc_RNA (1)...(19): siRNA sense strand
ggacagugauuccugccaa

SEQ ID NO: 2339340 - RNA, 19 nt, Homo sapiens
  misc_RNA (1)...(19): siRNA sense strand
ggucccaggagguggugaa

SEQ ID NO: 2339341 - RNA, 19 nt, Homo sapiens
  misc_RNA (1)...(19): siRNA sense strand
uccucaaacuggagcaaga

SEQ ID NO: 2339342 - RNA, 19 nt, Homo sapiens
  misc_RNA (1)...(19): siRNA sense strand
caguaagaaaauuggucua

SEQ ID NO: 2339343 - RNA, 19 nt, Homo sapiens
  misc_RNA (1)...(19): siRNA sense strand
gauuauaacaagaugacuc

SEQ ID NO: 2339344 - RNA, 19 nt, Homo sapiens
  misc_RNA (1)...(19): siRNA sense strand
aaugugggacaguaagaaa

SEQ ID NO: 2339345 - RNA, 19 nt, Homo sapiens
  misc_RNA (1)...(19): siRNA sense strand
aggucuagacaaugguaca

SEQ ID NO: 2339346 - RNA, 19 nt, Homo sapiens
  misc_RNA (1)...(19): siRNA sense strand
ccuccuaccuuaugggcua

SEQ ID NO: 2339347 - RNA, 19 nt, Homo sapiens
  misc_RNA (1)...(19): siRNA sense strand
ugguauaaguguuggccuu

SEQ ID NO: 2339348 - RNA, 19 nt, Homo sapiens
  misc_RNA (1)...(19): siRNA sense strand
acucagaaacagacaagaa

SEQ ID NO: 2339349 - RNA, 19 nt, Homo sapiens
  misc_RNA (1)...(19): siRNA sense strand
gggacuggacauuggacua

SEQ ID NO: 2339350 - RNA, 19 nt, Homo sapiens
  misc_RNA (1)...(19): siRNA sense strand
aggcugagaccgagaccaa

SEQ ID NO: 2339351 - RNA, 19 nt, Homo sapiens
  misc_RNA (1)...(19): siRNA sense strand
aggauuggcuucugggaga

SEQ ID NO: 2339352 - RNA, 19 nt, Homo sapiens
  misc_RNA (1)...(19): siRNA sense strand
ucuacaaggaggaaagauu

SEQ ID NO: 2339353 - RNA, 19 nt, Homo sapiens
  misc_RNA (1)...(19): siRNA sense strand
gguuagucguauuaagaca

SEQ ID NO: 2339354 - RNA, 19 nt, Homo sapiens
  misc_RNA (1)...(19): siRNA sense strand
cauaugauguuaagcguga

SEQ ID NO: 2339355 - RNA, 19 nt, Homo sapiens
  misc_RNA (1)...(19): siRNA sense strand
augaggagguggaggaagu

SEQ ID NO: 2339356 - RNA, 19 nt, Homo sapiens
  misc_RNA (1)...(19): siRNA sense strand
agucguauuaagacagaua

SEQ ID NO: 2339357 - RNA, 19 nt, Homo sapiens
  misc_RNA (1)...(19): siRNA sense strand
gggcaacagcaaugaagau

SEQ ID NO: 2339358 - RNA, 19 nt, Homo sapiens
  misc_RNA (1)...(19): siRNA sense strand
gcucuaaguccaggcgaaa

SEQ ID NO: 2339359 - RNA, 19 nt, Homo sapiens
  misc_RNA (1)...(19): siRNA sense strand
gagacagugauacgggaaa

SEQ ID NO: 2339360 - RNA, 19 nt, Homo sapiens
  misc_RNA (1)...(19): siRNA sense strand
auguuaagcgugaaguaua

SEQ ID NO: 2339361 - RNA, 19 nt, Homo sapiens
  misc_RNA (1)...(19): siRNA sense strand
ggagcuggaaucagaacaa

SEQ ID NO: 2339362 - RNA, 19 nt, Homo sapiens
  misc_RNA (1)...(19): siRNA sense strand
cauacucaccagagggcaa

SEQ ID NO: 2339363 - RNA, 19 nt, Homo sapiens
  misc_RNA (1)...(19): siRNA sense strand
ggucaaaucccuaacacca

SEQ ID NO: 2339364 - RNA, 19 nt, Homo sapiens
  misc_RNA (1)...(19): siRNA sense strand
acacagagcgauuugaaaa

SEQ ID NO: 2339365 - RNA, 19 nt, Homo sapiens
  misc_RNA (1)...(19): siRNA sense strand
gagcaugaacacaagccaa

SEQ ID NO: 2339366 - RNA, 19 nt, Homo sapiens
  misc_RNA (1)...(19): siRNA sense strand
cuucacaauuacaguguca

SEQ ID NO: 2339367 - RNA, 19 nt, Homo sapiens
  misc_RNA (1)...(19): siRNA sense strand
ugaucaacguucugaaagu

SEQ ID NO: 2339368 - RNA, 19 nt, Homo sapiens
  misc_RNA (1)...(19): siRNA sense strand
caacuagagaggagcgcca

SEQ ID NO: 2339369 - RNA, 19 nt, Homo sapiens
  misc_RNA (1)...(19): siRNA sense strand
aguaugaggagguggagga

SEQ ID NO: 2339370 - RNA, 19 nt, Homo sapiens
  misc_RNA (1)...(19): siRNA sense strand
cagcagcguuacuggccua

SEQ ID NO: 2339371 - RNA, 19 nt, Homo sapiens
  misc_RNA (1)...(19): siRNA sense strand
ggugcuauugcuaggacua

SEQ ID NO: 2339372 - RNA, 19 nt, Homo sapiens
  misc_RNA (1)...(19): siRNA sense strand
caccagagggcaacagcaa

SEQ ID NO: 2339373 - RNA, 19 nt, Homo sapiens
  misc_RNA (1)...(19): siRNA sense strand
uggaggaagacaacaguuu

SEQ ID NO: 2339374 - RNA, 19 nt, Homo sapiens
  misc_RNA (1)...(19): siRNA sense strand
aggaaagauuugcaggugu

SEQ ID NO: 2339375 - RNA, 19 nt, Homo sapiens
  misc_RNA (1)...(19): siRNA sense strand
gcuuucuguucuucgguaa

SEQ ID NO: 2339376 - RNA, 19 nt, Homo sapiens
  misc_RNA (1)...(19): siRNA sense strand
aaaucaagggcaacaguau

SEQ ID NO: 2339377 - RNA, 19 nt, Homo sapiens
  misc_RNA (1)...(19): siRNA sense strand
ggacauggucaguggagag

SEQ ID NO: 2339378 - RNA, 19 nt, Homo sapiens
  misc_RNA (1)...(19): siRNA sense strand
agcaugaacacaagccaaa

SEQ ID NO: 2339379 - RNA, 19 nt, Homo sapiens
  misc_RNA (1)...(19): siRNA sense strand
cgagacagugauacgggaa

SEQ ID NO: 2339380 - RNA, 19 nt, Homo sapiens
  misc_RNA (1)...(19): siRNA sense strand
gugauugcaaacaagauaa

SEQ ID NO: 2339381 - RNA, 19 nt, Homo sapiens
  misc_RNA (1)...(19): siRNA sense strand
ugauguuaagcgugaagua

SEQ ID NO: 2339382 - RNA, 19 nt, Homo sapiens
  misc_RNA (1)...(19): siRNA sense strand
agccugaaauggagcccaa

SEQ ID NO: 2339383 - RNA, 19 nt, Homo sapiens
  misc_RNA (1)...(19): siRNA sense strand
agccugagauggagcccaa

SEQ ID NO: 2339384 - RNA, 19 nt, Homo sapiens
  misc_RNA (1)...(19): siRNA sense strand
ugugauugcaaacaagaua

SEQ ID NO: 2339385 - RNA, 19 nt, Homo sapiens
  misc_RNA (1)...(19): siRNA sense strand
cugguauuauucugagcaa

SEQ ID NO: 2339386 - RNA, 19 nt, Homo sapiens
  misc_RNA (1)...(19): siRNA sense strand
guucguucacacagagcua

SEQ ID NO: 2339387 - RNA, 19 nt, Homo sapiens
  misc_RNA (1)...(19): siRNA sense strand
uuugagagcaugaacacaa

SEQ ID NO: 2339388 - RNA, 19 nt, Homo sapiens
  misc_RNA (1)...(19): siRNA sense strand
ucacaauuacagugucaau

SEQ ID NO: 2339389 - RNA, 19 nt, Homo sapiens
  misc_RNA (1)...(19): siRNA sense strand
ggugaagaugggacacuuu

SEQ ID NO: 2339390 - RNA, 19 nt, Homo sapiens
  misc_RNA (1)...(19): siRNA sense strand
ccaauaugacugugcucuu

SEQ ID NO: 2339391 - RNA, 19 nt, Homo sapiens
  misc_RNA (1)...(19): siRNA sense strand
ucagggcauuugagaggaa

SEQ ID NO: 2339392 - RNA, 19 nt, Homo sapiens
  misc_RNA (1)...(19): siRNA sense strand
agaccaagacccagaccga

SEQ ID NO: 2339393 - RNA, 19 nt, Homo sapiens
  misc_RNA (1)...(19): siRNA sense strand
agcucuaaguccaggcgaa

SEQ ID NO: 2339394 - RNA, 19 nt, Homo sapiens
  misc_RNA (1)...(19): siRNA sense strand
ugaguuaagcaucgaugaa

SEQ ID NO: 2339395 - RNA, 19 nt, Homo sapiens
  misc_RNA (1)...(19): siRNA sense strand
gaugaauccgagacaguga

SEQ ID NO: 2339396 - RNA, 19 nt, Homo sapiens
  misc_RNA (1)...(19): siRNA sense strand
gcucuuuggaugaugacau

SEQ ID NO: 2339397 - RNA, 19 nt, Homo sapiens
  misc_RNA (1)...(19): siRNA sense strand
cuguagaagaggagucgga

SEQ ID NO: 2339398 - RNA, 19 nt, Homo sapiens
  misc_RNA (1)...(19): siRNA sense strand
ggaacaugaacaucaacau

SEQ ID NO: 2339399 - RNA, 19 nt, Homo sapiens
  misc_RNA (1)...(19): siRNA sense strand
aaguguuggccuugugcaa

SEQ ID NO: 2339400 - RNA, 19 nt, Homo sapiens
  misc_RNA (1)...(19): siRNA sense strand
aagagguugauaugguaaa

SEQ ID NO: 2339401 - RNA, 19 nt, Homo sapiens
  misc_RNA (1)...(19): siRNA sense strand
gcugagaccgagaccaaga

SEQ ID NO: 2339402 - RNA, 19 nt, Homo sapiens
  misc_RNA (1)...(19): siRNA sense strand
ccuccuaccuuaugggcua

SEQ ID NO: 2339403 - RNA, 19 nt, Homo sapiens
  misc_RNA (1)...(19): siRNA sense strand
ugguauaaguguuggccuu

SEQ ID NO: 2339404 - RNA, 19 nt, Homo sapiens
  misc_RNA (1)...(19): siRNA sense strand
acucagaaacagacaagaa

SEQ ID NO: 2339405 - RNA, 19 nt, Homo sapiens
  misc_RNA (1)...(19): siRNA sense strand
gggacuggacauuggacua

SEQ ID NO: 2339406 - RNA, 19 nt, Homo sapiens
  misc_RNA (1)...(19): siRNA sense strand
aggcugagaccgagaccaa

SEQ ID NO: 2339407 - RNA, 19 nt, Homo sapiens
  misc_RNA (1)...(19): siRNA sense strand
aggauuggcuucugggaga

SEQ ID NO: 2339408 - RNA, 19 nt, Homo sapiens
  misc_RNA (1)...(19): siRNA sense strand
ucuacaaggaggaaagauu

SEQ ID NO: 2339409 - RNA, 19 nt, Homo sapiens
  misc_RNA (1)...(19): siRNA sense strand
gguuagucguauuaagaca

SEQ ID NO: 2339410 - RNA, 19 nt, Homo sapiens
  misc_RNA (1)...(19): siRNA sense strand
cauaugauguuaagcguga

SEQ ID NO: 2339411 - RNA, 19 nt, Homo sapiens
  misc_RNA (1)...(19): siRNA sense strand
augaggagguggaggaagu

SEQ ID NO: 2339412 - RNA, 19 nt, Homo sapiens
  misc_RNA (1)...(19): siRNA sense strand
agucguauuaagacagaua

SEQ ID NO: 2339413 - RNA, 19 nt, Homo sapiens
  misc_RNA (1)...(19): siRNA sense strand
gggcaacagcaaugaagau

SEQ ID NO: 2339414 - RNA, 19 nt, Homo sapiens
  misc_RNA (1)...(19): siRNA sense strand
gcucuaaguccaggcgaaa

SEQ ID NO: 2339415 - RNA, 19 nt, Homo sapiens
  misc_RNA (1)...(19): siRNA sense strand
gagacagugauacgggaaa

SEQ ID NO: 2339416 - RNA, 19 nt, Homo sapiens
  misc_RNA (1)...(19): siRNA sense strand
auguuaagcgugaaguaua

SEQ ID NO: 2339417 - RNA, 19 nt, Homo sapiens
  misc_RNA (1)...(19): siRNA sense strand
ggagcuggaaucagaacaa

SEQ ID NO: 2339418 - RNA, 19 nt, Homo sapiens
  misc_RNA (1)...(19): siRNA sense strand
cauacucaccagagggcaa

SEQ ID NO: 2339419 - RNA, 19 nt, Homo sapiens
  misc_RNA (1)...(19): siRNA sense strand
ggucaaaucccuaacacca

SEQ ID NO: 2339420 - RNA, 19 nt, Homo sapiens
  misc_RNA (1)...(19): siRNA sense strand
acacagagcgauuugaaaa

SEQ ID NO: 2339421 - RNA, 19 nt, Homo sapiens
  misc_RNA (1)...(19): siRNA sense strand
gagcaugaacacaagccaa

SEQ ID NO: 2339422 - RNA, 19 nt, Homo sapiens
  misc_RNA (1)...(19): siRNA sense strand
cuucacaauuacaguguca

SEQ ID NO: 2339423 - RNA, 19 nt, Homo sapiens
  misc_RNA (1)...(19): siRNA sense strand
ugaucaacguucugaaagu

SEQ ID NO: 2339424 - RNA, 19 nt, Homo sapiens
  misc_RNA (1)...(19): siRNA sense strand
caacuagagaggagcgcca

SEQ ID NO: 2339425 - RNA, 19 nt, Homo sapiens
  misc_RNA (1)...(19): siRNA sense strand
aguaugaggagguggagga

SEQ ID NO: 2339426 - RNA, 19 nt, Homo sapiens
  misc_RNA (1)...(19): siRNA sense strand
cagcagcguuacuggccua

SEQ ID NO: 2339427 - RNA, 19 nt, Homo sapiens
  misc_RNA (1)...(19): siRNA sense strand
ggugcuauugcuaggacua

SEQ ID NO: 2339428 - RNA, 19 nt, Homo sapiens
  misc_RNA (1)...(19): siRNA sense strand
caccagagggcaacagcaa

SEQ ID NO: 2339429 - RNA, 19 nt, Homo sapiens
  misc_RNA (1)...(19): siRNA sense strand
uggaggaagacaacaguuu

SEQ ID NO: 2339430 - RNA, 19 nt, Homo sapiens
  misc_RNA (1)...(19): siRNA sense strand
aggaaagauuugcaggugu

SEQ ID NO: 2339431 - RNA, 19 nt, Homo sapiens
  misc_RNA (1)...(19): siRNA sense strand
gcuuucuguucuucgguaa

SEQ ID NO: 2339432 - RNA, 19 nt, Homo sapiens
  misc_RNA (1)...(19): siRNA sense strand
aaaucaagggcaacaguau

SEQ ID NO: 2339433 - RNA, 19 nt, Homo sapiens
  misc_RNA (1)...(19): siRNA sense strand
ggacauggucaguggagag

SEQ ID NO: 2339434 - RNA, 19 nt, Homo sapiens
  misc_RNA (1)...(19): siRNA sense strand
agcaugaacacaagccaaa

SEQ ID NO: 2339435 - RNA, 19 nt, Homo sapiens
  misc_RNA (1)...(19): siRNA sense strand
cgagacagugauacgggaa

SEQ ID NO: 2339436 - RNA, 19 nt, Homo sapiens
  misc_RNA (1)...(19): siRNA sense strand
gugauugcaaacaagauaa

SEQ ID NO: 2339437 - RNA, 19 nt, Homo sapiens
  misc_RNA (1)...(19): siRNA sense strand
ugauguuaagcgugaagua

SEQ ID NO: 2339438 - RNA, 19 nt, Homo sapiens
  misc_RNA (1)...(19): siRNA sense strand
agccugaaauggagcccaa

SEQ ID NO: 2339439 - RNA, 19 nt, Homo sapiens
  misc_RNA (1)...(19): siRNA sense strand
agccugagauggagcccaa

SEQ ID NO: 2339440 - RNA, 19 nt, Homo sapiens
  misc_RNA (1)...(19): siRNA sense strand
ugugauugcaaacaagaua

SEQ ID NO: 2339441 - RNA, 19 nt, Homo sapiens
  misc_RNA (1)...(19): siRNA sense strand
cugguauuauucugagcaa

SEQ ID NO: 2339442 - RNA, 19 nt, Homo sapiens
  misc_RNA (1)...(19): siRNA sense strand
guucguucacacagagcua

SEQ ID NO: 2339443 - RNA, 19 nt, Homo sapiens
  misc_RNA (1)...(19): siRNA sense strand
uuugagagcaugaacacaa

SEQ ID NO: 2339444 - RNA, 19 nt, Homo sapiens
  misc_RNA (1)...(19): siRNA sense strand
ucacaauuacagugucaau

SEQ ID NO: 2339445 - RNA, 19 nt, Homo sapiens
  misc_RNA (1)...(19): siRNA sense strand
ggugaagaugggacacuuu

SEQ ID NO: 2339446 - RNA, 19 nt, Homo sapiens
  misc_RNA (1)...(19): siRNA sense strand
ccaauaugacugugcucuu

SEQ ID NO: 2339447 - RNA, 19 nt, Homo sapiens
  misc_RNA (1)...(19): siRNA sense strand
ucagggcauuugagaggaa

SEQ ID NO: 2339448 - RNA, 19 nt, Homo sapiens
  misc_RNA (1)...(19): siRNA sense strand
agaccaagacccagaccga

SEQ ID NO: 2339449 - RNA, 19 nt, Homo sapiens
  misc_RNA (1)...(19): siRNA sense strand
agcucuaaguccaggcgaa

SEQ ID NO: 2339450 - RNA, 19 nt, Homo sapiens
  misc_RNA (1)...(19): siRNA sense strand
ugaguuaagcaucgaugaa

SEQ ID NO: 2339451 - RNA, 19 nt, Homo sapiens
  misc_RNA (1)...(19): siRNA sense strand
gaugaauccgagacaguga

SEQ ID NO: 2339452 - RNA, 19 nt, Homo sapiens
  misc_RNA (1)...(19): siRNA sense strand
gcucuuuggaugaugacau

SEQ ID NO: 2339453 - RNA, 19 nt, Homo sapiens
  misc_RNA (1)...(19): siRNA sense strand
cuguagaagaggagucgga

SEQ ID NO: 2339454 - RNA, 19 nt, Homo sapiens
  misc_RNA (1)...(19): siRNA sense strand
ggaacaugaacaucaacau

SEQ ID NO: 2339455 - RNA, 19 nt, Homo sapiens
  misc_RNA (1)...(19): siRNA sense strand
aaguguuggccuugugcaa

SEQ ID NO: 2339456 - RNA, 19 nt, Homo sapiens
  misc_RNA (1)...(19): siRNA sense strand
aagagguugauaugguaaa

SEQ ID NO: 2339457 - RNA, 19 nt, Homo sapiens
  misc_RNA (1)...(19): siRNA sense strand
gcugagaccgagaccaaga

SEQ ID NO: 2339458 - RNA, 19 nt, Homo sapiens
  misc_RNA (1)...(19): siRNA sense strand
ccuuauuacgggaggguga

SEQ ID NO: 2339459 - RNA, 19 nt, Homo sapiens
  misc_RNA (1)...(19): siRNA sense strand
cuguguaguggcugaaaua

SEQ ID NO: 2339460 - RNA, 19 nt, Homo sapiens
  misc_RNA (1)...(19): siRNA sense strand
aaagaagacuguuggggua

SEQ ID NO: 2339461 - RNA, 19 nt, Homo sapiens
  misc_RNA (1)...(19): siRNA sense strand
uggacagagacaauggaaa

SEQ ID NO: 2339462 - RNA, 19 nt, Homo sapiens
  misc_RNA (1)...(19): siRNA sense strand
aagagagauguguggaaau

SEQ ID NO: 2339463 - RNA, 19 nt, Homo sapiens
  misc_RNA (1)...(19): siRNA sense strand
agagaagugaagagagaug

SEQ ID NO: 2339464 - RNA, 19 nt, Homo sapiens
  misc_RNA (1)...(19): siRNA sense strand
cgguugaaauugaagcucu

SEQ ID NO: 2339465 - RNA, 19 nt, Homo sapiens
  misc_RNA (1)...(19): siRNA sense strand
aauugaagcucuaacacca

SEQ ID NO: 2339466 - RNA, 19 nt, Homo sapiens
  misc_RNA (1)...(19): siRNA sense strand
uggcaacagcagugucuau

SEQ ID NO: 2339467 - RNA, 19 nt, Homo sapiens
  misc_RNA (1)...(19): siRNA sense strand
ccuuauuacgggaggguga

SEQ ID NO: 2339468 - RNA, 19 nt, Homo sapiens
  misc_RNA (1)...(19): siRNA sense strand
cuguguaguggcugaaaua

SEQ ID NO: 2339469 - RNA, 19 nt, Homo sapiens
  misc_RNA (1)...(19): siRNA sense strand
aaagaagacuguuggggua

SEQ ID NO: 2339470 - RNA, 19 nt, Homo sapiens
  misc_RNA (1)...(19): siRNA sense strand
uggacagagacaauggaaa

SEQ ID NO: 2339471 - RNA, 19 nt, Homo sapiens
  misc_RNA (1)...(19): siRNA sense strand
aagagagauguguggaaau

SEQ ID NO: 2339472 - RNA, 19 nt, Homo sapiens
  misc_RNA (1)...(19): siRNA sense strand
agagaagugaagagagaug

SEQ ID NO: 2339473 - RNA, 19 nt, Homo sapiens
  misc_RNA (1)...(19): siRNA sense strand
cgguugaaauugaagcucu

SEQ ID NO: 2339474 - RNA, 19 nt, Homo sapiens
  misc_RNA (1)...(19): siRNA sense strand
aauugaagcucuaacacca

SEQ ID NO: 2339475 - RNA, 19 nt, Homo sapiens
  misc_RNA (1)...(19): siRNA sense strand
uggcaacagcagugucuau

SEQ ID NO: 2339476 - RNA, 19 nt, Homo sapiens
  misc_RNA (1)...(19): siRNA sense strand
ccuuauuacgggaggguga

SEQ ID NO: 2339477 - RNA, 19 nt, Homo sapiens
  misc_RNA (1)...(19): siRNA sense strand
aaagaagacuguuggggua

SEQ ID NO: 2339478 - RNA, 19 nt, Homo sapiens
  misc_RNA (1)...(19): siRNA sense strand
uggacagagacaauggaaa

SEQ ID NO: 2339479 - RNA, 19 nt, Homo sapiens
  misc_RNA (1)...(19): siRNA sense strand
uggcaacagcagugucuau

SEQ ID NO: 2339480 - RNA, 19 nt, Homo sapiens
  misc_RNA (1)...(19): siRNA sense strand
cggacaaggaggagaacaa

SEQ ID NO: 2339481 - RNA, 19 nt, Homo sapiens
  misc_RNA (1)...(19): siRNA sense strand
aggaaauggcgguggaaga

SEQ ID NO: 2339482 - RNA, 19 nt, Homo sapiens
  misc_RNA (1)...(19): siRNA sense strand
gcacaaagcccaaggggau

SEQ ID NO: 2339483 - RNA, 19 nt, Homo sapiens
  misc_RNA (1)...(19): siRNA sense strand
gggaaaugaagacgagaca

SEQ ID NO: 2339484 - RNA, 19 nt, Homo sapiens
  misc_RNA (1)...(19): siRNA sense strand
cgccagaggaugugguuau

SEQ ID NO: 2339485 - RNA, 19 nt, Homo sapiens
  misc_RNA (1)...(19): siRNA sense strand
gggagaaggagaagcacga

SEQ ID NO: 2339486 - RNA, 19 nt, Homo sapiens
  misc_RNA (1)...(19): siRNA sense strand
uggagaagcugcaggagca

SEQ ID NO: 2339487 - RNA, 19 nt, Homo sapiens
  misc_RNA (1)...(19): siRNA sense strand
agaaggagcagguggcuga

SEQ ID NO: 2339488 - RNA, 19 nt, Homo sapiens
  misc_RNA (1)...(19): siRNA sense strand
gaaaggaaauggcggugga

SEQ ID NO: 2339489 - RNA, 19 nt, Homo sapiens
  misc_RNA (1)...(19): siRNA sense strand
gggaagucaucaagagccu

SEQ ID NO: 2339490 - RNA, 19 nt, Homo sapiens
  misc_RNA (1)...(19): siRNA sense strand
caggaaaugagaaggagga

SEQ ID NO: 2339491 - RNA, 19 nt, Homo sapiens
  misc_RNA (1)...(19): siRNA sense strand
ucaucaagagccuggacaa

SEQ ID NO: 2339492 - RNA, 19 nt, Homo sapiens
  misc_RNA (1)...(19): siRNA sense strand
augagaaggaggacgguga

SEQ ID NO: 2339493 - RNA, 19 nt, Homo sapiens
  misc_RNA (1)...(19): siRNA sense strand
aggcaaagaaggagcaggu

SEQ ID NO: 2339494 - RNA, 19 nt, Homo sapiens
  misc_RNA (1)...(19): siRNA sense strand
ggugggagaaggagaagca

SEQ ID NO: 2339495 - RNA, 19 nt, Homo sapiens
  misc_RNA (1)...(19): siRNA sense strand
ggcacugagagcaggaaau

SEQ ID NO: 2339496 - RNA, 19 nt, Homo sapiens
  misc_RNA (1)...(19): siRNA sense strand
uggaagagagggaagucau

SEQ ID NO: 2339497 - RNA, 19 nt, Homo sapiens
  misc_RNA (1)...(19): siRNA sense strand
augcugaagagaaggauca

SEQ ID NO: 2339498 - RNA, 19 nt, Homo sapiens
  misc_RNA (1)...(19): siRNA sense strand
caaaggagguuuuccggaa

SEQ ID NO: 2339499 - RNA, 19 nt, Homo sapiens
  misc_RNA (1)...(19): siRNA sense strand
aaugacuggcgaaaggaaa

SEQ ID NO: 2339500 - RNA, 19 nt, Homo sapiens
  misc_RNA (1)...(19): siRNA sense strand
cagacgaagauccaggcaa

SEQ ID NO: 2339501 - RNA, 19 nt, Homo sapiens
  misc_RNA (1)...(19): siRNA sense strand
ucagggugccaguggagaa

SEQ ID NO: 2339502 - RNA, 19 nt, Homo sapiens
  misc_RNA (1)...(19): siRNA sense strand
gagccaggugggagaagga

SEQ ID NO: 2339503 - RNA, 19 nt, Homo sapiens
  misc_RNA (1)...(19): siRNA sense strand
agagaaggaucacgccaga

SEQ ID NO: 2339504 - RNA, 19 nt, Homo sapiens
  misc_RNA (1)...(19): siRNA sense strand
guguagaagcugaagcaaa

SEQ ID NO: 2339505 - RNA, 19 nt, Homo sapiens
  misc_RNA (1)...(19): siRNA sense strand
agucugaaccugagagcaa

SEQ ID NO: 2339506 - RNA, 19 nt, Homo sapiens
  misc_RNA (1)...(19): siRNA sense strand
guuccaauaaugagaguaa

SEQ ID NO: 2339507 - RNA, 19 nt, Homo sapiens
  misc_RNA (1)...(19): siRNA sense strand
ugucuaaaguggcggaaau

SEQ ID NO: 2339508 - RNA, 19 nt, Homo sapiens
  misc_RNA (1)...(19): siRNA sense strand
ggaugucaguuaagggcaa

SEQ ID NO: 2339509 - RNA, 19 nt, Homo sapiens
  misc_RNA (1)...(19): siRNA sense strand
ggguacaagaagcaggaaa

SEQ ID NO: 2339510 - RNA, 19 nt, Homo sapiens
  misc_RNA (1)...(19): siRNA sense strand
ggaaauuaccugaugggau

SEQ ID NO: 2339511 - RNA, 19 nt, Homo sapiens
  misc_RNA (1)...(19): siRNA sense strand
cugcagaaauaaagaucau

SEQ ID NO: 2339512 - RNA, 19 nt, Homo sapiens
  misc_RNA (1)...(19): siRNA sense strand
agguugaguuuguggguga

SEQ ID NO: 2339513 - RNA, 19 nt, Homo sapiens
  misc_RNA (1)...(19): siRNA sense strand
acgagauagacguaagaaa

SEQ ID NO: 2339514 - RNA, 19 nt, Homo sapiens
  misc_RNA (1)...(19): siRNA sense strand
aauaacagcacuaggagaa

SEQ ID NO: 2339515 - RNA, 19 nt, Homo sapiens
  misc_RNA (1)...(19): siRNA sense strand
acucaaaacugaaguagaa

SEQ ID NO: 2339516 - RNA, 19 nt, Homo sapiens
  misc_RNA (1)...(19): siRNA sense strand
ggagaaaagcugaaugauu

SEQ ID NO: 2339517 - RNA, 19 nt, Homo sapiens
  misc_RNA (1)...(19): siRNA sense strand
gguuggaauuauagagugu

SEQ ID NO: 2339518 - RNA, 19 nt, Homo sapiens
  misc_RNA (1)...(19): siRNA sense strand
agguugaauugcuggaaau

SEQ ID NO: 2339519 - RNA, 19 nt, Homo sapiens
  misc_RNA (1)...(19): siRNA sense strand
gggcaaacaacaugggugu

SEQ ID NO: 2339520 - RNA, 19 nt, Homo sapiens
  misc_RNA (1)...(19): siRNA sense strand
guugaacaaaugagugaaa

SEQ ID NO: 2339521 - RNA, 19 nt, Homo sapiens
  misc_RNA (1)...(19): siRNA sense strand
cagcaagcuuuggaagaaa

SEQ ID NO: 2339522 - RNA, 19 nt, Homo sapiens
  misc_RNA (1)...(19): siRNA sense strand
cugaaguagaacaguuaaa

SEQ ID NO: 2339523 - RNA, 19 nt, Homo sapiens
  misc_RNA (1)...(19): siRNA sense strand
guucuaugcgucuggguaa

SEQ ID NO: 2339524 - RNA, 19 nt, Homo sapiens
  misc_RNA (1)...(19): siRNA sense strand
caauaguggcauucaacaa

SEQ ID NO: 2339525 - RNA, 19 nt, Homo sapiens
  misc_RNA (1)...(19): siRNA sense strand
acaagaagcaggaaaggau

SEQ ID NO: 2339526 - RNA, 19 nt, Homo sapiens
  misc_RNA (1)...(19): siRNA sense strand
aagaagaaacuguugaaga

SEQ ID NO: 2339527 - RNA, 19 nt, Homo sapiens
  misc_RNA (1)...(19): siRNA sense strand
gaaauuaccugaugggaug

SEQ ID NO: 2339528 - RNA, 19 nt, Homo sapiens
  misc_RNA (1)...(19): siRNA sense strand
ggaacaaauucuuaugcga

SEQ ID NO: 2339529 - RNA, 19 nt, Homo sapiens
  misc_RNA (1)...(19): siRNA sense strand
ucagaauucccgaggauuu

SEQ ID NO: 2339530 - RNA, 19 nt, Homo sapiens
  misc_RNA (1)...(19): siRNA sense strand
cgaggauuuagaugagaua

SEQ ID NO: 2339531 - RNA, 19 nt, Homo sapiens
  misc_RNA (1)...(19): siRNA sense strand
uggaaugaaaugaaaguga

SEQ ID NO: 2339532 - RNA, 19 nt, Homo sapiens
  misc_RNA (1)...(19): siRNA sense strand
cuguugaagacgagauaga

SEQ ID NO: 2339533 - RNA, 19 nt, Homo sapiens
  misc_RNA (1)...(19): siRNA sense strand
agaaauagaaaggcugaaa

SEQ ID NO: 2339534 - RNA, 19 nt, Homo sapiens
  misc_RNA (1)...(19): siRNA sense strand
ggauacuagaaaugaauga

SEQ ID NO: 2339535 - RNA, 19 nt, Homo sapiens
  misc_RNA (1)...(19): siRNA sense strand
ggaagaagggguacaagaa

SEQ ID NO: 2339536 - RNA, 19 nt, Homo sapiens
  misc_RNA (1)...(19): siRNA sense strand
aggaaaggauggaccagau

SEQ ID NO: 2339537 - RNA, 19 nt, Homo sapiens
  misc_RNA (1)...(19): siRNA sense strand
acaaaucaacagacggcaa

SEQ ID NO: 2339538 - RNA, 19 nt, Homo sapiens
  misc_RNA (1)...(19): siRNA sense strand
agaggauacuagaaaugaa

SEQ ID NO: 2339539 - RNA, 19 nt, Homo sapiens
  misc_RNA (1)...(19): siRNA sense strand
gcugaaugauuacuggaau

SEQ ID NO: 2339540 - RNA, 19 nt, Homo sapiens
  misc_RNA (1)...(19): siRNA sense strand
ggaucagacaaccggaaau

SEQ ID NO: 2339541 - RNA, 19 nt, Homo sapiens
  misc_RNA (1)...(19): siRNA sense strand
ugaaaucagaacagaguca

SEQ ID NO: 2339542 - RNA, 19 nt, Homo sapiens
  misc_RNA (1)...(19): siRNA sense strand
gaagaaauagaaaggcuga

SEQ ID NO: 2339543 - RNA, 19 nt, Homo sapiens
  misc_RNA (1)...(19): siRNA sense strand
aaucauauggauggagaaa

SEQ ID NO: 2339544 - RNA, 19 nt, Homo sapiens
  misc_RNA (1)...(19): siRNA sense strand
cagaaauagacucaucaaa

SEQ ID NO: 2339545 - RNA, 19 nt, Homo sapiens
  misc_RNA (1)...(19): siRNA sense strand
guguuggagugguuggaau

SEQ ID NO: 2339546 - RNA, 19 nt, Homo sapiens
  misc_RNA (1)...(19): siRNA sense strand
aagcaaagauacaugaaac

SEQ ID NO: 2339547 - RNA, 19 nt, Homo sapiens
  misc_RNA (1)...(19): siRNA sense strand
ucgaguuaacguaggacaa

SEQ ID NO: 2339548 - RNA, 19 nt, Homo sapiens
  misc_RNA (1)...(19): siRNA sense strand
aggugaugaugaugaugaa

SEQ ID NO: 2339549 - RNA, 19 nt, Homo sapiens
  misc_RNA (1)...(19): siRNA sense strand
gaguaaaagugaaauggau

SEQ ID NO: 2339550 - RNA, 19 nt, Homo sapiens
  misc_RNA (1)...(19): siRNA sense strand
gguacaagaagcaggaaag

SEQ ID NO: 2339551 - RNA, 19 nt, Homo sapiens
  misc_RNA (1)...(19): siRNA sense strand
cccgaugcgaccagggaaa

SEQ ID NO: 2339552 - RNA, 19 nt, Homo sapiens
  misc_RNA (1)...(19): siRNA sense strand
guuucaacaucaaguaaca

SEQ ID NO: 2339553 - RNA, 19 nt, Homo sapiens
  misc_RNA (1)...(19): siRNA sense strand
ugaugagauuuuaggacaa

SEQ ID NO: 2339554 - RNA, 19 nt, Homo sapiens
  misc_RNA (1)...(19): siRNA sense strand
uaucagaauucccgaggau

SEQ ID NO: 2339555 - RNA, 19 nt, Homo sapiens
  misc_RNA (1)...(19): siRNA sense strand
ccauaugguaucucaguau

SEQ ID NO: 2339556 - RNA, 19 nt, Homo sapiens
  misc_RNA (1)...(19): siRNA sense strand
uggaagaaauagaaaggcu

SEQ ID NO: 2339557 - RNA, 19 nt, Homo sapiens
  misc_RNA (1)...(19): siRNA sense strand
cgcuaaacaaauauggauu

SEQ ID NO: 2339558 - RNA, 19 nt, Homo sapiens
  misc_RNA (1)...(19): siRNA sense strand
uugugagguuccagaagaa

SEQ ID NO: 2339559 - RNA, 19 nt, Homo sapiens
  misc_RNA (1)...(19): siRNA sense strand
acagagucacguugagcaa

SEQ ID NO: 2339560 - RNA, 19 nt, Homo sapiens
  misc_RNA (1)...(19): siRNA sense strand
aagcugaagcaaagauaca

SEQ ID NO: 2339561 - RNA, 19 nt, Homo sapiens
  misc_RNA (1)...(19): siRNA sense strand
ggagaaagcaugagcgugg

SEQ ID NO: 2339562 - RNA, 19 nt, Homo sapiens
  misc_RNA (1)...(19): siRNA sense strand
caauaacagcacuaggaga

SEQ ID NO: 2339563 - RNA, 19 nt, Homo sapiens
  misc_RNA (1)...(19): siRNA sense strand
aagaugaggauuugguaca

SEQ ID NO: 2339564 - RNA, 19 nt, Homo sapiens
  misc_RNA (1)...(19): siRNA sense strand
auacaugaaacccaggaaa

SEQ ID NO: 2339565 - RNA, 19 nt, Homo sapiens
  misc_RNA (1)...(19): siRNA sense strand
gaggauacuagaaaugaau

SEQ ID NO: 2339566 - RNA, 19 nt, Homo sapiens
  misc_RNA (1)...(19): siRNA sense strand
uggcagagaugcagggcaa

SEQ ID NO: 2339567 - RNA, 19 nt, Homo sapiens
  misc_RNA (1)...(19): siRNA sense strand
ccuuagagcaugugcccaa

SEQ ID NO: 2339568 - RNA, 19 nt, Homo sapiens
  misc_RNA (1)...(19): siRNA sense strand
aggacgacuacgugggcua

SEQ ID NO: 2339569 - RNA, 19 nt, Homo sapiens
  misc_RNA (1)...(19): siRNA sense strand
cgaagaagccagcgccuca

SEQ ID NO: 2339570 - RNA, 19 nt, Homo sapiens
  misc_RNA (1)...(19): siRNA sense strand
uggaggaacugcaugguga

SEQ ID NO: 2339571 - RNA, 19 nt, Homo sapiens
  misc_RNA (1)...(19): siRNA sense strand
aggugugauuggagugaca

SEQ ID NO: 2339572 - RNA, 19 nt, Homo sapiens
  misc_RNA (1)...(19): siRNA sense strand
gagaggagaugcaagcuca

SEQ ID NO: 2339573 - RNA, 19 nt, Homo sapiens
  misc_RNA (1)...(19): siRNA sense strand
ugacagaggagcaggugca

SEQ ID NO: 2339574 - RNA, 19 nt, Homo sapiens
  misc_RNA (1)...(19): siRNA sense strand
ucagagagcagcagggcca

SEQ ID NO: 2339575 - RNA, 19 nt, Homo sapiens
  misc_RNA (1)...(19): siRNA sense strand
cagaggagcaggugcacca

SEQ ID NO: 2339576 - RNA, 19 nt, Homo sapiens
  misc_RNA (1)...(19): siRNA sense strand
acguauggugcuugguauu

SEQ ID NO: 2339577 - RNA, 19 nt, Homo sapiens
  misc_RNA (1)...(19): siRNA sense strand
agucagaguggcaaagcau

SEQ ID NO: 2339578 - RNA, 19 nt, Homo sapiens
  misc_RNA (1)...(19): siRNA sense strand
acaagaaggccaagggcaa

SEQ ID NO: 2339579 - RNA, 19 nt, Homo sapiens
  misc_RNA (1)...(19): siRNA sense strand
ccagauaccuuuagccuga

SEQ ID NO: 2339580 - RNA, 19 nt, Homo sapiens
  misc_RNA (1)...(19): siRNA sense strand
cacacaaagaacugauaaa

SEQ ID NO: 2339581 - RNA, 19 nt, Homo sapiens
  misc_RNA (1)...(19): siRNA sense strand
cugcagacaagaaggccaa

SEQ ID NO: 2339582 - RNA, 19 nt, Homo sapiens
  misc_RNA (1)...(19): siRNA sense strand
augccaaguuuguggaguu

SEQ ID NO: 2339583 - RNA, 19 nt, Homo sapiens
  misc_RNA (1)...(19): siRNA sense strand
ccggaaaagccacgagaau

SEQ ID NO: 2339584 - RNA, 19 nt, Homo sapiens
  misc_RNA (1)...(19): siRNA sense strand
uggcaaaaucugaacacaa

SEQ ID NO: 2339585 - RNA, 19 nt, Homo sapiens
  misc_RNA (1)...(19): siRNA sense strand
uggaggagauggagagcgu

SEQ ID NO: 2339586 - RNA, 19 nt, Homo sapiens
  misc_RNA (1)...(19): siRNA sense strand
uaaaggagcugaaggucca

SEQ ID NO: 2339587 - RNA, 19 nt, Homo sapiens
  misc_RNA (1)...(19): siRNA sense strand
gagcaugugcaguggagca

SEQ ID NO: 2339588 - RNA, 19 nt, Homo sapiens
  misc_RNA (1)...(19): siRNA sense strand
ccuacaccguggaggagau

SEQ ID NO: 2339589 - RNA, 19 nt, Homo sapiens
  misc_RNA (1)...(19): siRNA sense strand
ccgugucaguguccggaaa

SEQ ID NO: 2339590 - RNA, 19 nt, Homo sapiens
  misc_RNA (1)...(19): siRNA sense strand
gaguacaucacguuggaca

SEQ ID NO: 2339591 - RNA, 19 nt, Homo sapiens
  misc_RNA (1)...(19): siRNA sense strand
acaagaaggccaagggcaa

SEQ ID NO: 2339592 - RNA, 19 nt, Homo sapiens
  misc_RNA (1)...(19): siRNA sense strand
ccagauaccuuuagccuga

SEQ ID NO: 2339593 - RNA, 19 nt, Homo sapiens
  misc_RNA (1)...(19): siRNA sense strand
cacacaaagaacugauaaa

SEQ ID NO: 2339594 - RNA, 19 nt, Homo sapiens
  misc_RNA (1)...(19): siRNA sense strand
cugcagacaagaaggccaa

SEQ ID NO: 2339595 - RNA, 19 nt, Homo sapiens
  misc_RNA (1)...(19): siRNA sense strand
augccaaguuuguggaguu

SEQ ID NO: 2339596 - RNA, 19 nt, Homo sapiens
  misc_RNA (1)...(19): siRNA sense strand
ccggaaaagccacgagaau

SEQ ID NO: 2339597 - RNA, 19 nt, Homo sapiens
  misc_RNA (1)...(19): siRNA sense strand
uggcaaaaucugaacacaa

SEQ ID NO: 2339598 - RNA, 19 nt, Homo sapiens
  misc_RNA (1)...(19): siRNA sense strand
uggaggagauggagagcgu

SEQ ID NO: 2339599 - RNA, 19 nt, Homo sapiens
  misc_RNA (1)...(19): siRNA sense strand
uaaaggagcugaaggucca

SEQ ID NO: 2339600 - RNA, 19 nt, Homo sapiens
  misc_RNA (1)...(19): siRNA sense strand
gagcaugugcaguggagca

SEQ ID NO: 2339601 - RNA, 19 nt, Homo sapiens
  misc_RNA (1)...(19): siRNA sense strand
ccuacaccguggaggagau

SEQ ID NO: 2339602 - RNA, 19 nt, Homo sapiens
  misc_RNA (1)...(19): siRNA sense strand
ccgugucaguguccggaaa

SEQ ID NO: 2339603 - RNA, 19 nt, Homo sapiens
  misc_RNA (1)...(19): siRNA sense strand
gaguacaucacguuggaca

SEQ ID NO: 2339604 - RNA, 19 nt, Homo sapiens
  misc_RNA (1)...(19): siRNA sense strand
gguuauaaugcaaggcuga

SEQ ID NO: 2339605 - RNA, 19 nt, Homo sapiens
  misc_RNA (1)...(19): siRNA sense strand
uggugaagacuaugagaca

SEQ ID NO: 2339606 - RNA, 19 nt, Homo sapiens
  misc_RNA (1)...(19): siRNA sense strand
gugaagacuaugagacacu

SEQ ID NO: 2339607 - RNA, 19 nt, Homo sapiens
  misc_RNA (1)...(19): siRNA sense strand
agauugaaccgaaggggaa

SEQ ID NO: 2339608 - RNA, 19 nt, Homo sapiens
  misc_RNA (1)...(19): siRNA sense strand
cugaggaaggccugggaga

SEQ ID NO: 2339609 - RNA, 19 nt, Homo sapiens
  misc_RNA (1)...(19): siRNA sense strand
gggagaugaauuugaccuu

SEQ ID NO: 2339610 - RNA, 19 nt, Homo sapiens
  misc_RNA (1)...(19): siRNA sense strand
gcaaugugcucuaugccuu

SEQ ID NO: 2339611 - RNA, 19 nt, Homo sapiens
  misc_RNA (1)...(19): siRNA sense strand
aggccugggagaugaauuu

SEQ ID NO: 2339612 - RNA, 19 nt, Homo sapiens
  misc_RNA (1)...(19): siRNA sense strand
cugaagacucugugcaaac

SEQ ID NO: 2339613 - RNA, 19 nt, Homo sapiens
  misc_RNA (1)...(19): siRNA sense strand
gcgagaaacucaagggccu

SEQ ID NO: 2339614 - RNA, 19 nt, Homo sapiens
  misc_RNA (1)...(19): siRNA sense strand
gaggaggagacgugcgaga

SEQ ID NO: 2339615 - RNA, 19 nt, Homo sapiens
  misc_RNA (1)...(19): siRNA sense strand
ggucacgcacugaaggaga

SEQ ID NO: 2339616 - RNA, 19 nt, Homo sapiens
  misc_RNA (1)...(19): siRNA sense strand
gguaaagacgugcuggcga

SEQ ID NO: 2339617 - RNA, 19 nt, Homo sapiens
  misc_RNA (1)...(19): siRNA sense strand
augugaaaguagaacgaau

SEQ ID NO: 2339618 - RNA, 19 nt, Homo sapiens
  misc_RNA (1)...(19): siRNA sense strand
auuugaagcauuugagcau

SEQ ID NO: 2339619 - RNA, 19 nt, Homo sapiens
  misc_RNA (1)...(19): siRNA sense strand
ugguguugguauuaggaga

SEQ ID NO: 2339620 - RNA, 19 nt, Homo sapiens
  misc_RNA (1)...(19): siRNA sense strand
gguguugguauuaggagau

SEQ ID NO: 2339621 - RNA, 19 nt, Homo sapiens
  misc_RNA (1)...(19): siRNA sense strand
augugaaaguagaacgaau

SEQ ID NO: 2339622 - RNA, 19 nt, Homo sapiens
  misc_RNA (1)...(19): siRNA sense strand
auuugaagcauuugagcau

SEQ ID NO: 2339623 - RNA, 19 nt, Homo sapiens
  misc_RNA (1)...(19): siRNA sense strand
ugguguugguauuaggaga

SEQ ID NO: 2339624 - RNA, 19 nt, Homo sapiens
  misc_RNA (1)...(19): siRNA sense strand
gguguugguauuaggagau

SEQ ID NO: 2339625 - RNA, 19 nt, Homo sapiens
  misc_RNA (1)...(19): siRNA sense strand
ccaaggagguuaagcccaa

SEQ ID NO: 2339626 - RNA, 19 nt, Homo sapiens
  misc_RNA (1)...(19): siRNA sense strand
uaaagaagaugcaggccaa

SEQ ID NO: 2339627 - RNA, 19 nt, Homo sapiens
  misc_RNA (1)...(19): siRNA sense strand
cuaaagaagaugcaggcca

SEQ ID NO: 2339628 - RNA, 19 nt, Homo sapiens
  misc_RNA (1)...(19): siRNA sense strand
aggccaaggaucaaaccaa

SEQ ID NO: 2339629 - RNA, 19 nt, Homo sapiens
  misc_RNA (1)...(19): siRNA sense strand
ggaacaugcgcuuugccaa

SEQ ID NO: 2339630 - RNA, 19 nt, Homo sapiens
  misc_RNA (1)...(19): siRNA sense strand
uggaacaggaagagaagaa

SEQ ID NO: 2339631 - RNA, 19 nt, Homo sapiens
  misc_RNA (1)...(19): siRNA sense strand
acaccaaauggcagggaau

SEQ ID NO: 2339632 - RNA, 19 nt, Homo sapiens
  misc_RNA (1)...(19): siRNA sense strand
aguuuaaucagcugcgaaa

SEQ ID NO: 2339633 - RNA, 19 nt, Homo sapiens
  misc_RNA (1)...(19): siRNA sense strand
gaauuauagaagaggcuga

SEQ ID NO: 2339634 - RNA, 19 nt, Homo sapiens
  misc_RNA (1)...(19): siRNA sense strand
gggagguagauguggccaa

SEQ ID NO: 2339635 - RNA, 19 nt, Homo sapiens
  misc_RNA (1)...(19): siRNA sense strand
cagaguggauacuggguga

SEQ ID NO: 2339636 - RNA, 19 nt, Homo sapiens
  misc_RNA (1)...(19): siRNA sense strand
ggacauacgagaagaggug

SEQ ID NO: 2339637 - RNA, 19 nt, Homo sapiens
  misc_RNA (1)...(19): siRNA sense strand
guccaaagcuacuggguug

SEQ ID NO: 2339638 - RNA, 19 nt, Homo sapiens
  misc_RNA (1)...(19): siRNA sense strand
gcucaaaaucacagugcuu

SEQ ID NO: 2339639 - RNA, 19 nt, Homo sapiens
  misc_RNA (1)...(19): siRNA sense strand
gagguuugugggagcuaaa

SEQ ID NO: 2339640 - RNA, 19 nt, Homo sapiens
  misc_RNA (1)...(19): siRNA sense strand
gagcauagacuguggccac

SEQ ID NO: 2339641 - RNA, 19 nt, Homo sapiens
  misc_RNA (1)...(19): siRNA sense strand
caggagaaguuucaggagu

SEQ ID NO: 2339642 - RNA, 19 nt, Homo sapiens
  misc_RNA (1)...(19): siRNA sense strand
ugaagaacgaggagcagga

SEQ ID NO: 2339643 - RNA, 19 nt, Homo sapiens
  misc_RNA (1)...(19): siRNA sense strand
cccaggaguaccaggagaa

SEQ ID NO: 2339644 - RNA, 19 nt, Homo sapiens
  misc_RNA (1)...(19): siRNA sense strand
auacugggugauuggguua

SEQ ID NO: 2339645 - RNA, 19 nt, Homo sapiens
  misc_RNA (1)...(19): siRNA sense strand
uuauagaagaggcugagaa

SEQ ID NO: 2339646 - RNA, 19 nt, Homo sapiens
  misc_RNA (1)...(19): siRNA sense strand
ggugauuggguuacagcau

SEQ ID NO: 2339647 - RNA, 19 nt, Homo sapiens
  misc_RNA (1)...(19): siRNA sense strand
ggaagcagcugaaagcagu

SEQ ID NO: 2339648 - RNA, 19 nt, Homo sapiens
  misc_RNA (1)...(19): siRNA sense strand
aggagaaguuucaggaguc

SEQ ID NO: 2339649 - RNA, 19 nt, Homo sapiens
  misc_RNA (1)...(19): siRNA sense strand
aauccuugcaacuguguaa

SEQ ID NO: 2339650 - RNA, 19 nt, Homo sapiens
  misc_RNA (1)...(19): siRNA sense strand
gaggcggcucagagaggua

SEQ ID NO: 2339651 - RNA, 19 nt, Homo sapiens
  misc_RNA (1)...(19): siRNA sense strand
aggagguugcccaggagua

SEQ ID NO: 2339652 - RNA, 19 nt, Homo sapiens
  misc_RNA (1)...(19): siRNA sense strand
acgaggagcaggaagcuga

SEQ ID NO: 2339653 - RNA, 19 nt, Homo sapiens
  misc_RNA (1)...(19): siRNA sense strand
cugauaaacuagaacgaaa

SEQ ID NO: 2339654 - RNA, 19 nt, Homo sapiens
  misc_RNA (1)...(19): siRNA sense strand
ccgaaaaucaagagggaua

SEQ ID NO: 2339655 - RNA, 19 nt, Homo sapiens
  misc_RNA (1)...(19): siRNA sense strand
acccauaagcagagaguaa

SEQ ID NO: 2339656 - RNA, 19 nt, Homo sapiens
  misc_RNA (1)...(19): siRNA sense strand
cagaauugcuagagauaca

SEQ ID NO: 2339657 - RNA, 19 nt, Homo sapiens
  misc_RNA (1)...(19): siRNA sense strand
gcaccauaguugagccuaa

SEQ ID NO: 2339658 - RNA, 19 nt, Homo sapiens
  misc_RNA (1)...(19): siRNA sense strand
gggaauaugaagagcguga

SEQ ID NO: 2339659 - RNA, 19 nt, Homo sapiens
  misc_RNA (1)...(19): siRNA sense strand
acaaaaggaaagagagaaa

SEQ ID NO: 2339660 - RNA, 19 nt, Homo sapiens
  misc_RNA (1)...(19): siRNA sense strand
agguuaaacaguagugaua

SEQ ID NO: 2339661 - RNA, 19 nt, Homo sapiens
  misc_RNA (1)...(19): siRNA sense strand
ggacaaaaggaaagagaga

SEQ ID NO: 2339662 - RNA, 19 nt, Homo sapiens
  misc_RNA (1)...(19): siRNA sense strand
cagaaugagagcagaacaa

SEQ ID NO: 2339663 - RNA, 19 nt, Homo sapiens
  misc_RNA (1)...(19): siRNA sense strand
acaaaaggacagaggguaa

SEQ ID NO: 2339664 - RNA, 19 nt, Homo sapiens
  misc_RNA (1)...(19): siRNA sense strand
ggaaaaugucagugaacua

SEQ ID NO: 2339665 - RNA, 19 nt, Homo sapiens
  misc_RNA (1)...(19): siRNA sense strand
gagacaaaaucaagugaaa

SEQ ID NO: 2339666 - RNA, 19 nt, Homo sapiens
  misc_RNA (1)...(19): siRNA sense strand
uggcaugacuguagugcaa

SEQ ID NO: 2339667 - RNA, 19 nt, Homo sapiens
  misc_RNA (1)...(19): siRNA sense strand
gugaaaaggaguauaguaa

SEQ ID NO: 2339668 - RNA, 19 nt, Homo sapiens
  misc_RNA (1)...(19): siRNA sense strand
agaguaaaguagacacuaa

SEQ ID NO: 2339669 - RNA, 19 nt, Homo sapiens
  misc_RNA (1)...(19): siRNA sense strand
ccaaaugacaacaaacaaa

SEQ ID NO: 2339670 - RNA, 19 nt, Homo sapiens
  misc_RNA (1)...(19): siRNA sense strand
aggauuaguugaagaucua

SEQ ID NO: 2339671 - RNA, 19 nt, Homo sapiens
  misc_RNA (1)...(19): siRNA sense strand
ccauaagcagagaguaaua

SEQ ID NO: 2339672 - RNA, 19 nt, Homo sapiens
  misc_RNA (1)...(19): siRNA sense strand
ccuuaaaccuaucaagaau

SEQ ID NO: 2339673 - RNA, 19 nt, Homo sapiens
  misc_RNA (1)...(19): siRNA sense strand
gaugauaaagcuugggaau

SEQ ID NO: 2339674 - RNA, 19 nt, Homo sapiens
  misc_RNA (1)...(19): siRNA sense strand
agucuaugguaaaggacaa

SEQ ID NO: 2339675 - RNA, 19 nt, Homo sapiens
  misc_RNA (1)...(19): siRNA sense strand
cuuauuauggagagaguua

SEQ ID NO: 2339676 - RNA, 19 nt, Homo sapiens
  misc_RNA (1)...(19): siRNA sense strand
aggaacugcucuuaggaaa

SEQ ID NO: 2339677 - RNA, 19 nt, Homo sapiens
  misc_RNA (1)...(19): siRNA sense strand
gguaaaggacaaaaggaaa

SEQ ID NO: 2339678 - RNA, 19 nt, Homo sapiens
  misc_RNA (1)...(19): siRNA sense strand
ggauagaggaggaggcacu

SEQ ID NO: 2339679 - RNA, 19 nt, Homo sapiens
  misc_RNA (1)...(19): siRNA sense strand
augaaauguuugccagaaa

SEQ ID NO: 2339680 - RNA, 19 nt, Homo sapiens
  misc_RNA (1)...(19): siRNA sense strand
augcagagauacuggauau

SEQ ID NO: 2339681 - RNA, 19 nt, Homo sapiens
  misc_RNA (1)...(19): siRNA sense strand
ugaagagggcauuaagaaa

SEQ ID NO: 2339682 - RNA, 19 nt, Homo sapiens
  misc_RNA (1)...(19): siRNA sense strand
cagcagagacagaagauga

SEQ ID NO: 2339683 - RNA, 19 nt, Homo sapiens
  misc_RNA (1)...(19): siRNA sense strand
cgaaagacaaaguagaaaa

SEQ ID NO: 2339684 - RNA, 19 nt, Homo sapiens
  misc_RNA (1)...(19): siRNA sense strand
ggaagauauuguuggaagu

SEQ ID NO: 2339685 - RNA, 19 nt, Homo sapiens
  misc_RNA (1)...(19): siRNA sense strand
aaacagaaugagagcagaa

SEQ ID NO: 2339686 - RNA, 19 nt, Homo sapiens
  misc_RNA (1)...(19): siRNA sense strand
caggaagacuuaaaagaaa

SEQ ID NO: 2339687 - RNA, 19 nt, Homo sapiens
  misc_RNA (1)...(19): siRNA sense strand
gcagagaccugaugggcga

SEQ ID NO: 2339688 - RNA, 19 nt, Homo sapiens
  misc_RNA (1)...(19): siRNA sense strand
ugacaauaaaggugugaau

SEQ ID NO: 2339689 - RNA, 19 nt, Homo sapiens
  misc_RNA (1)...(19): siRNA sense strand
gcagauagagacuggaaga

SEQ ID NO: 2339690 - RNA, 19 nt, Homo sapiens
  misc_RNA (1)...(19): siRNA sense strand
gaaaaugagucaagcgaca

SEQ ID NO: 2339691 - RNA, 19 nt, Homo sapiens
  misc_RNA (1)...(19): siRNA sense strand
ugaugaagaagaagaagaa

SEQ ID NO: 2339692 - RNA, 19 nt, Homo sapiens
  misc_RNA (1)...(19): siRNA sense strand
cagaagaugaugaaaguga

SEQ ID NO: 2339693 - RNA, 19 nt, Homo sapiens
  misc_RNA (1)...(19): siRNA sense strand
ccgagaagcagcaguagaa

SEQ ID NO: 2339694 - RNA, 19 nt, Homo sapiens
  misc_RNA (1)...(19): siRNA sense strand
gcacaaaugcucggaacaa

SEQ ID NO: 2339695 - RNA, 19 nt, Homo sapiens
  misc_RNA (1)...(19): siRNA sense strand
acggaaacguguagauuca

SEQ ID NO: 2339696 - RNA, 19 nt, Homo sapiens
  misc_RNA (1)...(19): siRNA sense strand
ugaaaguagauuagcagaa

SEQ ID NO: 2339697 - RNA, 19 nt, Homo sapiens
  misc_RNA (1)...(19): siRNA sense strand
cugcaguauucucaagaua

SEQ ID NO: 2339698 - RNA, 19 nt, Homo sapiens
  misc_RNA (1)...(19): siRNA sense strand
ccuacgaguucuuggugaa

SEQ ID NO: 2339699 - RNA, 19 nt, Homo sapiens
  misc_RNA (1)...(19): siRNA sense strand
ucaaggagucuaugguaaa

SEQ ID NO: 2339700 - RNA, 19 nt, Homo sapiens
  misc_RNA (1)...(19): siRNA sense strand
aauaauggcagaucagaaa

SEQ ID NO: 2339701 - RNA, 19 nt, Homo sapiens
  misc_RNA (1)...(19): siRNA sense strand
aagcagagaguaauaguaa

SEQ ID NO: 2339702 - RNA, 19 nt, Homo sapiens
  misc_RNA (1)...(19): siRNA sense strand
agauagagacuggaagaaa

SEQ ID NO: 2339703 - RNA, 19 nt, Homo sapiens
  misc_RNA (1)...(19): siRNA sense strand
accgauugguggagacaaa

SEQ ID NO: 2339704 - RNA, 19 nt, Homo sapiens
  misc_RNA (1)...(19): siRNA sense strand
gccugaaacuccaaagcaa

SEQ ID NO: 2339705 - RNA, 19 nt, Homo sapiens
  misc_RNA (1)...(19): siRNA sense strand
uuaaagauagagaggacaa

SEQ ID NO: 2339706 - RNA, 19 nt, Homo sapiens
  misc_RNA (1)...(19): siRNA sense strand
aguaacaagucaacagaga

SEQ ID NO: 2339707 - RNA, 19 nt, Homo sapiens
  misc_RNA (1)...(19): siRNA sense strand
aggaagagccguuguuuau

SEQ ID NO: 2339708 - RNA, 19 nt, Homo sapiens
  misc_RNA (1)...(19): siRNA sense strand
ccugaaacuccaaagcaaa

SEQ ID NO: 2339709 - RNA, 19 nt, Homo sapiens
  misc_RNA (1)...(19): siRNA sense strand
ccugaaacuccaaagcaaa

SEQ ID NO: 2339710 - RNA, 19 nt, Homo sapiens
  misc_RNA (1)...(19): siRNA sense strand
cugaagaagaagaaagguu

SEQ ID NO: 2339711 - RNA, 19 nt, Homo sapiens
  misc_RNA (1)...(19): siRNA sense strand
gguucgaagaccagaaaca

SEQ ID NO: 2339712 - RNA, 19 nt, Homo sapiens
  misc_RNA (1)...(19): siRNA sense strand
ugacaauaaggcagaauuu

SEQ ID NO: 2339713 - RNA, 19 nt, Homo sapiens
  misc_RNA (1)...(19): siRNA sense strand
ggagaagaauauucaggau

SEQ ID NO: 2339714 - RNA, 19 nt, Homo sapiens
  misc_RNA (1)...(19): siRNA sense strand
ggaagaaaguugcaaaaca

SEQ ID NO: 2339715 - RNA, 19 nt, Homo sapiens
  misc_RNA (1)...(19): siRNA sense strand
caugacaauaggagggauu

SEQ ID NO: 2339716 - RNA, 19 nt, Homo sapiens
  misc_RNA (1)...(19): siRNA sense strand
gcuaggaaaaugaagaaaa

SEQ ID NO: 2339717 - RNA, 19 nt, Homo sapiens
  misc_RNA (1)...(19): siRNA sense strand
ggaaagcauaugaaccaaa

SEQ ID NO: 2339718 - RNA, 19 nt, Homo sapiens
  misc_RNA (1)...(19): siRNA sense strand
caauggguauaauggauaa

SEQ ID NO: 2339719 - RNA, 19 nt, Homo sapiens
  misc_RNA (1)...(19): siRNA sense strand
gagacaaagaaaauggaaa

SEQ ID NO: 2339720 - RNA, 19 nt, Homo sapiens
  misc_RNA (1)...(19): siRNA sense strand
gcaaaugugucccagggua

SEQ ID NO: 2339721 - RNA, 19 nt, Homo sapiens
  misc_RNA (1)...(19): siRNA sense strand
cugauaaacuagaacgaaa

SEQ ID NO: 2339722 - RNA, 19 nt, Homo sapiens
  misc_RNA (1)...(19): siRNA sense strand
ccgaaaaucaagagggaua

SEQ ID NO: 2339723 - RNA, 19 nt, Homo sapiens
  misc_RNA (1)...(19): siRNA sense strand
acccauaagcagagaguaa

SEQ ID NO: 2339724 - RNA, 19 nt, Homo sapiens
  misc_RNA (1)...(19): siRNA sense strand
cagaauugcuagagauaca

SEQ ID NO: 2339725 - RNA, 19 nt, Homo sapiens
  misc_RNA (1)...(19): siRNA sense strand
gcaccauaguugagccuaa

SEQ ID NO: 2339726 - RNA, 19 nt, Homo sapiens
  misc_RNA (1)...(19): siRNA sense strand
gggaauaugaagagcguga

SEQ ID NO: 2339727 - RNA, 19 nt, Homo sapiens
  misc_RNA (1)...(19): siRNA sense strand
acaaaaggaaagagagaaa

SEQ ID NO: 2339728 - RNA, 19 nt, Homo sapiens
  misc_RNA (1)...(19): siRNA sense strand
agguuaaacaguagugaua

SEQ ID NO: 2339729 - RNA, 19 nt, Homo sapiens
  misc_RNA (1)...(19): siRNA sense strand
ggacaaaaggaaagagaga

SEQ ID NO: 2339730 - RNA, 19 nt, Homo sapiens
  misc_RNA (1)...(19): siRNA sense strand
cagaaugagagcagaacaa

SEQ ID NO: 2339731 - RNA, 19 nt, Homo sapiens
  misc_RNA (1)...(19): siRNA sense strand
acaaaaggacagaggguaa

SEQ ID NO: 2339732 - RNA, 19 nt, Homo sapiens
  misc_RNA (1)...(19): siRNA sense strand
ggaaaaugucagugaacua

SEQ ID NO: 2339733 - RNA, 19 nt, Homo sapiens
  misc_RNA (1)...(19): siRNA sense strand
gagacaaaaucaagugaaa

SEQ ID NO: 2339734 - RNA, 19 nt, Homo sapiens
  misc_RNA (1)...(19): siRNA sense strand
uggcaugacuguagugcaa

SEQ ID NO: 2339735 - RNA, 19 nt, Homo sapiens
  misc_RNA (1)...(19): siRNA sense strand
gugaaaaggaguauaguaa

SEQ ID NO: 2339736 - RNA, 19 nt, Homo sapiens
  misc_RNA (1)...(19): siRNA sense strand
agaguaaaguagacacuaa

SEQ ID NO: 2339737 - RNA, 19 nt, Homo sapiens
  misc_RNA (1)...(19): siRNA sense strand
ccaaaugacaacaaacaaa

SEQ ID NO: 2339738 - RNA, 19 nt, Homo sapiens
  misc_RNA (1)...(19): siRNA sense strand
aggauuaguugaagaucua

SEQ ID NO: 2339739 - RNA, 19 nt, Homo sapiens
  misc_RNA (1)...(19): siRNA sense strand
ccauaagcagagaguaaua

SEQ ID NO: 2339740 - RNA, 19 nt, Homo sapiens
  misc_RNA (1)...(19): siRNA sense strand
ccuuaaaccuaucaagaau

SEQ ID NO: 2339741 - RNA, 19 nt, Homo sapiens
  misc_RNA (1)...(19): siRNA sense strand
gaugauaaagcuugggaau

SEQ ID NO: 2339742 - RNA, 19 nt, Homo sapiens
  misc_RNA (1)...(19): siRNA sense strand
agucuaugguaaaggacaa

SEQ ID NO: 2339743 - RNA, 19 nt, Homo sapiens
  misc_RNA (1)...(19): siRNA sense strand
cuuauuauggagagaguua

SEQ ID NO: 2339744 - RNA, 19 nt, Homo sapiens
  misc_RNA (1)...(19): siRNA sense strand
aggaacugcucuuaggaaa

SEQ ID NO: 2339745 - RNA, 19 nt, Homo sapiens
  misc_RNA (1)...(19): siRNA sense strand
gguaaaggacaaaaggaaa

SEQ ID NO: 2339746 - RNA, 19 nt, Homo sapiens
  misc_RNA (1)...(19): siRNA sense strand
ggauagaggaggaggcacu

SEQ ID NO: 2339747 - RNA, 19 nt, Homo sapiens
  misc_RNA (1)...(19): siRNA sense strand
augaaauguuugccagaaa

SEQ ID NO: 2339748 - RNA, 19 nt, Homo sapiens
  misc_RNA (1)...(19): siRNA sense strand
augcagagauacuggauau

SEQ ID NO: 2339749 - RNA, 19 nt, Homo sapiens
  misc_RNA (1)...(19): siRNA sense strand
ugaagagggcauuaagaaa

SEQ ID NO: 2339750 - RNA, 19 nt, Homo sapiens
  misc_RNA (1)...(19): siRNA sense strand
cagcagagacagaagauga

SEQ ID NO: 2339751 - RNA, 19 nt, Homo sapiens
  misc_RNA (1)...(19): siRNA sense strand
cgaaagacaaaguagaaaa

SEQ ID NO: 2339752 - RNA, 19 nt, Homo sapiens
  misc_RNA (1)...(19): siRNA sense strand
ggaagauauuguuggaagu

SEQ ID NO: 2339753 - RNA, 19 nt, Homo sapiens
  misc_RNA (1)...(19): siRNA sense strand
aaacagaaugagagcagaa

SEQ ID NO: 2339754 - RNA, 19 nt, Homo sapiens
  misc_RNA (1)...(19): siRNA sense strand
caggaagacuuaaaagaaa

SEQ ID NO: 2339755 - RNA, 19 nt, Homo sapiens
  misc_RNA (1)...(19): siRNA sense strand
gcagagaccugaugggcga

SEQ ID NO: 2339756 - RNA, 19 nt, Homo sapiens
  misc_RNA (1)...(19): siRNA sense strand
ugacaauaaaggugugaau

SEQ ID NO: 2339757 - RNA, 19 nt, Homo sapiens
  misc_RNA (1)...(19): siRNA sense strand
gcagauagagacuggaaga

SEQ ID NO: 2339758 - RNA, 19 nt, Homo sapiens
  misc_RNA (1)...(19): siRNA sense strand
gaaaaugagucaagcgaca

SEQ ID NO: 2339759 - RNA, 19 nt, Homo sapiens
  misc_RNA (1)...(19): siRNA sense strand
ugaugaagaagaagaagaa

SEQ ID NO: 2339760 - RNA, 19 nt, Homo sapiens
  misc_RNA (1)...(19): siRNA sense strand
cagaagaugaugaaaguga

SEQ ID NO: 2339761 - RNA, 19 nt, Homo sapiens
  misc_RNA (1)...(19): siRNA sense strand
ccgagaagcagcaguagaa

SEQ ID NO: 2339762 - RNA, 19 nt, Homo sapiens
  misc_RNA (1)...(19): siRNA sense strand
gcacaaaugcucggaacaa

SEQ ID NO: 2339763 - RNA, 19 nt, Homo sapiens
  misc_RNA (1)...(19): siRNA sense strand
acggaaacguguagauuca

SEQ ID NO: 2339764 - RNA, 19 nt, Homo sapiens
  misc_RNA (1)...(19): siRNA sense strand
ugaaaguagauuagcagaa

SEQ ID NO: 2339765 - RNA, 19 nt, Homo sapiens
  misc_RNA (1)...(19): siRNA sense strand
cugcaguauucucaagaua

SEQ ID NO: 2339766 - RNA, 19 nt, Homo sapiens
  misc_RNA (1)...(19): siRNA sense strand
ccuacgaguucuuggugaa

SEQ ID NO: 2339767 - RNA, 19 nt, Homo sapiens
  misc_RNA (1)...(19): siRNA sense strand
ucaaggagucuaugguaaa

SEQ ID NO: 2339768 - RNA, 19 nt, Homo sapiens
  misc_RNA (1)...(19): siRNA sense strand
aauaauggcagaucagaaa

SEQ ID NO: 2339769 - RNA, 19 nt, Homo sapiens
  misc_RNA (1)...(19): siRNA sense strand
aagcagagaguaauaguaa

SEQ ID NO: 2339770 - RNA, 19 nt, Homo sapiens
  misc_RNA (1)...(19): siRNA sense strand
agauagagacuggaagaaa

SEQ ID NO: 2339771 - RNA, 19 nt, Homo sapiens
  misc_RNA (1)...(19): siRNA sense strand
accgauugguggagacaaa

SEQ ID NO: 2339772 - RNA, 19 nt, Homo sapiens
  misc_RNA (1)...(19): siRNA sense strand
gccugaaacuccaaagcaa

SEQ ID NO: 2339773 - RNA, 19 nt, Homo sapiens
  misc_RNA (1)...(19): siRNA sense strand
uuaaagauagagaggacaa

SEQ ID NO: 2339774 - RNA, 19 nt, Homo sapiens
  misc_RNA (1)...(19): siRNA sense strand
aguaacaagucaacagaga

SEQ ID NO: 2339775 - RNA, 19 nt, Homo sapiens
  misc_RNA (1)...(19): siRNA sense strand
aggaagagccguuguuuau

SEQ ID NO: 2339776 - RNA, 19 nt, Homo sapiens
  misc_RNA (1)...(19): siRNA sense strand
ccugaaacuccaaagcaaa

SEQ ID NO: 2339777 - RNA, 19 nt, Homo sapiens
  misc_RNA (1)...(19): siRNA sense strand
ccugaaacuccaaagcaaa

SEQ ID NO: 2339778 - RNA, 19 nt, Homo sapiens
  misc_RNA (1)...(19): siRNA sense strand
cugaagaagaagaaagguu

SEQ ID NO: 2339779 - RNA, 19 nt, Homo sapiens
  misc_RNA (1)...(19): siRNA sense strand
gguucgaagaccagaaaca

SEQ ID NO: 2339780 - RNA, 19 nt, Homo sapiens
  misc_RNA (1)...(19): siRNA sense strand
ugacaauaaggcagaauuu

SEQ ID NO: 2339781 - RNA, 19 nt, Homo sapiens
  misc_RNA (1)...(19): siRNA sense strand
ggagaagaauauucaggau

SEQ ID NO: 2339782 - RNA, 19 nt, Homo sapiens
  misc_RNA (1)...(19): siRNA sense strand
ggaagaaaguugcaaaaca

SEQ ID NO: 2339783 - RNA, 19 nt, Homo sapiens
  misc_RNA (1)...(19): siRNA sense strand
caugacaauaggagggauu

SEQ ID NO: 2339784 - RNA, 19 nt, Homo sapiens
  misc_RNA (1)...(19): siRNA sense strand
gcuaggaaaaugaagaaaa

SEQ ID NO: 2339785 - RNA, 19 nt, Homo sapiens
  misc_RNA (1)...(19): siRNA sense strand
ggaaagcauaugaaccaaa

SEQ ID NO: 2339786 - RNA, 19 nt, Homo sapiens
  misc_RNA (1)...(19): siRNA sense strand
caauggguauaauggauaa

SEQ ID NO: 2339787 - RNA, 19 nt, Homo sapiens
  misc_RNA (1)...(19): siRNA sense strand
gagacaaagaaaauggaaa

SEQ ID NO: 2339788 - RNA, 19 nt, Homo sapiens
  misc_RNA (1)...(19): siRNA sense strand
gcaaaugugucccagggua

SEQ ID NO: 2339789 - RNA, 19 nt, Homo sapiens
  misc_RNA (1)...(19): siRNA sense strand
ccuucaacaacaagaacaa

SEQ ID NO: 2339790 - RNA, 19 nt, Homo sapiens
  misc_RNA (1)...(19): siRNA sense strand
gaccaaaagugaugcgaga

SEQ ID NO: 2339791 - RNA, 19 nt, Homo sapiens
  misc_RNA (1)...(19): siRNA sense strand
guguaggagaugauggaca

SEQ ID NO: 2339792 - RNA, 19 nt, Homo sapiens
  misc_RNA (1)...(19): siRNA sense strand
gccauauugccgugagaau

SEQ ID NO: 2339793 - RNA, 19 nt, Homo sapiens
  misc_RNA (1)...(19): siRNA sense strand
acaacaagaacaaggaacu

SEQ ID NO: 2339794 - RNA, 19 nt, Homo sapiens
  misc_RNA (1)...(19): siRNA sense strand
gaaaguaguuagcaggaag

SEQ ID NO: 2339795 - RNA, 19 nt, Homo sapiens
  misc_RNA (1)...(19): siRNA sense strand
ccaaaagugaugcgagaca

SEQ ID NO: 2339796 - RNA, 19 nt, Homo sapiens
  misc_RNA (1)...(19): siRNA sense strand
aggaauuacuuuucagaca

SEQ ID NO: 2339797 - RNA, 19 nt, Homo sapiens
  misc_RNA (1)...(19): siRNA sense strand
gagaaugugugucuggcuu

SEQ ID NO: 2339798 - RNA, 19 nt, Homo sapiens
  misc_RNA (1)...(19): siRNA sense strand
gugguugaaucauaggcaa

SEQ ID NO: 2339799 - RNA, 19 nt, Homo sapiens
  misc_RNA (1)...(19): siRNA sense strand
uggcaaaggcuggcugaau

SEQ ID NO: 2339800 - RNA, 19 nt, Homo sapiens
  misc_RNA (1)...(19): siRNA sense strand
ugaugaaaccuggaggaau

SEQ ID NO: 2339801 - RNA, 19 nt, Homo sapiens
  misc_RNA (1)...(19): siRNA sense strand
cagacaagccagaucacca

SEQ ID NO: 2339802 - RNA, 19 nt, Homo sapiens
  misc_RNA (1)...(19): siRNA sense strand
cggaaaguaguuagcagga

SEQ ID NO: 2339803 - RNA, 19 nt, Homo sapiens
  misc_RNA (1)...(19): siRNA sense strand
aggcaaagauagaggacga

SEQ ID NO: 2339804 - RNA, 19 nt, Homo sapiens
  misc_RNA (1)...(19): siRNA sense strand
ugaaagaacaaaugcgaca

SEQ ID NO: 2339805 - RNA, 19 nt, Homo sapiens
  misc_RNA (1)...(19): siRNA sense strand
agaacaaaugcgacagcaa

SEQ ID NO: 2339806 - RNA, 19 nt, Homo sapiens
  misc_RNA (1)...(19): siRNA sense strand
caaagauagaggacgagaa

SEQ ID NO: 2339807 - RNA, 19 nt, Homo sapiens
  misc_RNA (1)...(19): siRNA sense strand
uggcaaguacagaaguaaa

SEQ ID NO: 2339808 - RNA, 19 nt, Homo sapiens
  misc_RNA (1)...(19): siRNA sense strand
cugugaaggucaaggagga

SEQ ID NO: 2339809 - RNA, 19 nt, Homo sapiens
  misc_RNA (1)...(19): siRNA sense strand
ucgaauucacucaaagaaa

SEQ ID NO: 2339810 - RNA, 19 nt, Homo sapiens
  misc_RNA (1)...(19): siRNA sense strand
uugaggaagcagaggaaga

SEQ ID NO: 2339811 - RNA, 19 nt, Homo sapiens
  misc_RNA (1)...(19): siRNA sense strand
auguuacuuuagagggaaa

SEQ ID NO: 2339812 - RNA, 19 nt, Homo sapiens
  misc_RNA (1)...(19): siRNA sense strand
aggcagucaccuugaggaa

SEQ ID NO: 2339813 - RNA, 19 nt, Homo sapiens
  misc_RNA (1)...(19): siRNA sense strand
gagaaagggcaguggcaag

SEQ ID NO: 2339814 - RNA, 19 nt, Homo sapiens
  misc_RNA (1)...(19): siRNA sense strand
ccuugaggaagcagaggaa

SEQ ID NO: 2339815 - RNA, 19 nt, Homo sapiens
  misc_RNA (1)...(19): siRNA sense strand
aagaaaagcagaaguguga

SEQ ID NO: 2339816 - RNA, 19 nt, Homo sapiens
  misc_RNA (1)...(19): siRNA sense strand
aggacagaccucaggauga

SEQ ID NO: 2339817 - RNA, 19 nt, Homo sapiens
  misc_RNA (1)...(19): siRNA sense strand
uggaaguguuacugaaaau

SEQ ID NO: 2339818 - RNA, 19 nt, Homo sapiens
  misc_RNA (1)...(19): siRNA sense strand
ccauaaaacagcaacaaga

SEQ ID NO: 2339819 - RNA, 19 nt, Homo sapiens
  misc_RNA (1)...(19): siRNA sense strand
acgaaagacacuccaacua

SEQ ID NO: 2339820 - RNA, 19 nt, Homo sapiens
  misc_RNA (1)...(19): siRNA sense strand
ugugagacgcagacgcuua

SEQ ID NO: 2339821 - RNA, 19 nt, Homo sapiens
  misc_RNA (1)...(19): siRNA sense strand
ucauguuacuuuagaggga

SEQ ID NO: 2339822 - RNA, 19 nt, Homo sapiens
  misc_RNA (1)...(19): siRNA sense strand
augcucagauccaggaaau

SEQ ID NO: 2339823 - RNA, 19 nt, Homo sapiens
  misc_RNA (1)...(19): siRNA sense strand
cacauuaccaggagcacaa

SEQ ID NO: 2339824 - RNA, 19 nt, Homo sapiens
  misc_RNA (1)...(19): siRNA sense strand
aguggcaaguacagaagua

SEQ ID NO: 2339825 - RNA, 19 nt, Homo sapiens
  misc_RNA (1)...(19): siRNA sense strand
agauagaggacgagaaagg

SEQ ID NO: 2339826 - RNA, 19 nt, Homo sapiens
  misc_RNA (1)...(19): siRNA sense strand
agcagaaacuggagcagca

SEQ ID NO: 2339827 - RNA, 19 nt, Homo sapiens
  misc_RNA (1)...(19): siRNA sense strand
gugagaagcaauugcagca

SEQ ID NO: 2339828 - RNA, 19 nt, Homo sapiens
  misc_RNA (1)...(19): siRNA sense strand
uggcaacaaaagagagaau

SEQ ID NO: 2339829 - RNA, 19 nt, Homo sapiens
  misc_RNA (1)...(19): siRNA sense strand
aacaggaaguagagaggca

SEQ ID NO: 2339830 - RNA, 19 nt, Homo sapiens
  misc_RNA (1)...(19): siRNA sense strand
agaaaguggcagagaggag

SEQ ID NO: 2339831 - RNA, 19 nt, Homo sapiens
  misc_RNA (1)...(19): siRNA sense strand
aagcaauugcagcaggaau

SEQ ID NO: 2339832 - RNA, 19 nt, Homo sapiens
  misc_RNA (1)...(19): siRNA sense strand
cgagaaagggcaguggcaa

SEQ ID NO: 2339833 - RNA, 19 nt, Homo sapiens
  misc_RNA (1)...(19): siRNA sense strand
uuggagaagcagaagcaau

SEQ ID NO: 2339834 - RNA, 19 nt, Homo sapiens
  misc_RNA (1)...(19): siRNA sense strand
uagaaaaggagcagaaacu

SEQ ID NO: 2339835 - RNA, 19 nt, Homo sapiens
  misc_RNA (1)...(19): siRNA sense strand
caggagcacaagaugcaaa

SEQ ID NO: 2339836 - RNA, 19 nt, Homo sapiens
  misc_RNA (1)...(19): siRNA sense strand
gaauguuugaggugacaga

SEQ ID NO: 2339837 - RNA, 19 nt, Homo sapiens
  misc_RNA (1)...(19): siRNA sense strand
aggaacuucuagccauaaa

SEQ ID NO: 2339838 - RNA, 19 nt, Homo sapiens
  misc_RNA (1)...(19): siRNA sense strand
gcacaagaugcaaaggaug

SEQ ID NO: 2339839 - RNA, 19 nt, Homo sapiens
  misc_RNA (1)...(19): siRNA sense strand
uggaugacacacugggaca

SEQ ID NO: 2339840 - RNA, 19 nt, Homo sapiens
  misc_RNA (1)...(19): siRNA sense strand
aggaaccaguggacaguga

SEQ ID NO: 2339841 - RNA, 19 nt, Homo sapiens
  misc_RNA (1)...(19): siRNA sense strand
acuggaaguguuacugaaa

SEQ ID NO: 2339842 - RNA, 19 nt, Homo sapiens
  misc_RNA (1)...(19): siRNA sense strand
cauaaaacagcaacaagaa

SEQ ID NO: 2339843 - RNA, 19 nt, Homo sapiens
  misc_RNA (1)...(19): siRNA sense strand
gaaaagcagaagugugaga

SEQ ID NO: 2339844 - RNA, 19 nt, Homo sapiens
  misc_RNA (1)...(19): siRNA sense strand
aggcaaagauagaggacga

SEQ ID NO: 2339845 - RNA, 19 nt, Homo sapiens
  misc_RNA (1)...(19): siRNA sense strand
ugaaagaacaaaugcgaca

SEQ ID NO: 2339846 - RNA, 19 nt, Homo sapiens
  misc_RNA (1)...(19): siRNA sense strand
agaacaaaugcgacagcaa

SEQ ID NO: 2339847 - RNA, 19 nt, Homo sapiens
  misc_RNA (1)...(19): siRNA sense strand
caaagauagaggacgagaa

SEQ ID NO: 2339848 - RNA, 19 nt, Homo sapiens
  misc_RNA (1)...(19): siRNA sense strand
uggcaaguacagaaguaaa

SEQ ID NO: 2339849 - RNA, 19 nt, Homo sapiens
  misc_RNA (1)...(19): siRNA sense strand
cugugaaggucaaggagga

SEQ ID NO: 2339850 - RNA, 19 nt, Homo sapiens
  misc_RNA (1)...(19): siRNA sense strand
ucgaauucacucaaagaaa

SEQ ID NO: 2339851 - RNA, 19 nt, Homo sapiens
  misc_RNA (1)...(19): siRNA sense strand
uugaggaagcagaggaaga

SEQ ID NO: 2339852 - RNA, 19 nt, Homo sapiens
  misc_RNA (1)...(19): siRNA sense strand
auguuacuuuagagggaaa

SEQ ID NO: 2339853 - RNA, 19 nt, Homo sapiens
  misc_RNA (1)...(19): siRNA sense strand
aggcagucaccuugaggaa

SEQ ID NO: 2339854 - RNA, 19 nt, Homo sapiens
  misc_RNA (1)...(19): siRNA sense strand
gagaaagggcaguggcaag

SEQ ID NO: 2339855 - RNA, 19 nt, Homo sapiens
  misc_RNA (1)...(19): siRNA sense strand
ccuugaggaagcagaggaa

SEQ ID NO: 2339856 - RNA, 19 nt, Homo sapiens
  misc_RNA (1)...(19): siRNA sense strand
aagaaaagcagaaguguga

SEQ ID NO: 2339857 - RNA, 19 nt, Homo sapiens
  misc_RNA (1)...(19): siRNA sense strand
aggacagaccucaggauga

SEQ ID NO: 2339858 - RNA, 19 nt, Homo sapiens
  misc_RNA (1)...(19): siRNA sense strand
uggaaguguuacugaaaau

SEQ ID NO: 2339859 - RNA, 19 nt, Homo sapiens
  misc_RNA (1)...(19): siRNA sense strand
ccauaaaacagcaacaaga

SEQ ID NO: 2339860 - RNA, 19 nt, Homo sapiens
  misc_RNA (1)...(19): siRNA sense strand
acgaaagacacuccaacua

SEQ ID NO: 2339861 - RNA, 19 nt, Homo sapiens
  misc_RNA (1)...(19): siRNA sense strand
ugugagacgcagacgcuua

SEQ ID NO: 2339862 - RNA, 19 nt, Homo sapiens
  misc_RNA (1)...(19): siRNA sense strand
ucauguuacuuuagaggga

SEQ ID NO: 2339863 - RNA, 19 nt, Homo sapiens
  misc_RNA (1)...(19): siRNA sense strand
augcucagauccaggaaau

SEQ ID NO: 2339864 - RNA, 19 nt, Homo sapiens
  misc_RNA (1)...(19): siRNA sense strand
cacauuaccaggagcacaa

SEQ ID NO: 2339865 - RNA, 19 nt, Homo sapiens
  misc_RNA (1)...(19): siRNA sense strand
aguggcaaguacagaagua

SEQ ID NO: 2339866 - RNA, 19 nt, Homo sapiens
  misc_RNA (1)...(19): siRNA sense strand
agauagaggacgagaaagg

SEQ ID NO: 2339867 - RNA, 19 nt, Homo sapiens
  misc_RNA (1)...(19): siRNA sense strand
agcagaaacuggagcagca

SEQ ID NO: 2339868 - RNA, 19 nt, Homo sapiens
  misc_RNA (1)...(19): siRNA sense strand
gugagaagcaauugcagca

SEQ ID NO: 2339869 - RNA, 19 nt, Homo sapiens
  misc_RNA (1)...(19): siRNA sense strand
uggcaacaaaagagagaau

SEQ ID NO: 2339870 - RNA, 19 nt, Homo sapiens
  misc_RNA (1)...(19): siRNA sense strand
aacaggaaguagagaggca

SEQ ID NO: 2339871 - RNA, 19 nt, Homo sapiens
  misc_RNA (1)...(19): siRNA sense strand
agaaaguggcagagaggag

SEQ ID NO: 2339872 - RNA, 19 nt, Homo sapiens
  misc_RNA (1)...(19): siRNA sense strand
aagcaauugcagcaggaau

SEQ ID NO: 2339873 - RNA, 19 nt, Homo sapiens
  misc_RNA (1)...(19): siRNA sense strand
cgagaaagggcaguggcaa

SEQ ID NO: 2339874 - RNA, 19 nt, Homo sapiens
  misc_RNA (1)...(19): siRNA sense strand
uuggagaagcagaagcaau

SEQ ID NO: 2339875 - RNA, 19 nt, Homo sapiens
  misc_RNA (1)...(19): siRNA sense strand
uagaaaaggagcagaaacu

SEQ ID NO: 2339876 - RNA, 19 nt, Homo sapiens
  misc_RNA (1)...(19): siRNA sense strand
caggagcacaagaugcaaa

SEQ ID NO: 2339877 - RNA, 19 nt, Homo sapiens
  misc_RNA (1)...(19): siRNA sense strand
gaauguuugaggugacaga

SEQ ID NO: 2339878 - RNA, 19 nt, Homo sapiens
  misc_RNA (1)...(19): siRNA sense strand
aggaacuucuagccauaaa

SEQ ID NO: 2339879 - RNA, 19 nt, Homo sapiens
  misc_RNA (1)...(19): siRNA sense strand
gcacaagaugcaaaggaug

SEQ ID NO: 2339880 - RNA, 19 nt, Homo sapiens
  misc_RNA (1)...(19): siRNA sense strand
uggaugacacacugggaca

SEQ ID NO: 2339881 - RNA, 19 nt, Homo sapiens
  misc_RNA (1)...(19): siRNA sense strand
aggaaccaguggacaguga

SEQ ID NO: 2339882 - RNA, 19 nt, Homo sapiens
  misc_RNA (1)...(19): siRNA sense strand
acuggaaguguuacugaaa

SEQ ID NO: 2339883 - RNA, 19 nt, Homo sapiens
  misc_RNA (1)...(19): siRNA sense strand
cauaaaacagcaacaagaa

SEQ ID NO: 2339884 - RNA, 19 nt, Homo sapiens
  misc_RNA (1)...(19): siRNA sense strand
gaaaagcagaagugugaga

SEQ ID NO: 2339885 - RNA, 19 nt, Homo sapiens
  misc_RNA (1)...(19): siRNA sense strand
aggcaaagauagaggacga

SEQ ID NO: 2339886 - RNA, 19 nt, Homo sapiens
  misc_RNA (1)...(19): siRNA sense strand
ugaaagaacaaaugcgaca

SEQ ID NO: 2339887 - RNA, 19 nt, Homo sapiens
  misc_RNA (1)...(19): siRNA sense strand
agaacaaaugcgacagcaa

SEQ ID NO: 2339888 - RNA, 19 nt, Homo sapiens
  misc_RNA (1)...(19): siRNA sense strand
caaagauagaggacgagaa

SEQ ID NO: 2339889 - RNA, 19 nt, Homo sapiens
  misc_RNA (1)...(19): siRNA sense strand
uggcaaguacagaaguaaa

SEQ ID NO: 2339890 - RNA, 19 nt, Homo sapiens
  misc_RNA (1)...(19): siRNA sense strand
cugugaaggucaaggagga

SEQ ID NO: 2339891 - RNA, 19 nt, Homo sapiens
  misc_RNA (1)...(19): siRNA sense strand
ucgaauucacucaaagaaa

SEQ ID NO: 2339892 - RNA, 19 nt, Homo sapiens
  misc_RNA (1)...(19): siRNA sense strand
uugaggaagcagaggaaga

SEQ ID NO: 2339893 - RNA, 19 nt, Homo sapiens
  misc_RNA (1)...(19): siRNA sense strand
auguuacuuuagagggaaa

SEQ ID NO: 2339894 - RNA, 19 nt, Homo sapiens
  misc_RNA (1)...(19): siRNA sense strand
aggcagucaccuugaggaa

SEQ ID NO: 2339895 - RNA, 19 nt, Homo sapiens
  misc_RNA (1)...(19): siRNA sense strand
gagaaagggcaguggcaag

SEQ ID NO: 2339896 - RNA, 19 nt, Homo sapiens
  misc_RNA (1)...(19): siRNA sense strand
ccuugaggaagcagaggaa

SEQ ID NO: 2339897 - RNA, 19 nt, Homo sapiens
  misc_RNA (1)...(19): siRNA sense strand
aagaaaagcagaaguguga

SEQ ID NO: 2339898 - RNA, 19 nt, Homo sapiens
  misc_RNA (1)...(19): siRNA sense strand
aggacagaccucaggauga

SEQ ID NO: 2339899 - RNA, 19 nt, Homo sapiens
  misc_RNA (1)...(19): siRNA sense strand
uggaaguguuacugaaaau

SEQ ID NO: 2339900 - RNA, 19 nt, Homo sapiens
  misc_RNA (1)...(19): siRNA sense strand
ccauaaaacagcaacaaga

SEQ ID NO: 2339901 - RNA, 19 nt, Homo sapiens
  misc_RNA (1)...(19): siRNA sense strand
acgaaagacacuccaacua

SEQ ID NO: 2339902 - RNA, 19 nt, Homo sapiens
  misc_RNA (1)...(19): siRNA sense strand
ugugagacgcagacgcuua

SEQ ID NO: 2339903 - RNA, 19 nt, Homo sapiens
  misc_RNA (1)...(19): siRNA sense strand
ucauguuacuuuagaggga

SEQ ID NO: 2339904 - RNA, 19 nt, Homo sapiens
  misc_RNA (1)...(19): siRNA sense strand
augcucagauccaggaaau

SEQ ID NO: 2339905 - RNA, 19 nt, Homo sapiens
  misc_RNA (1)...(19): siRNA sense strand
cacauuaccaggagcacaa

SEQ ID NO: 2339906 - RNA, 19 nt, Homo sapiens
  misc_RNA (1)...(19): siRNA sense strand
aguggcaaguacagaagua

SEQ ID NO: 2339907 - RNA, 19 nt, Homo sapiens
  misc_RNA (1)...(19): siRNA sense strand
agauagaggacgagaaagg

SEQ ID NO: 2339908 - RNA, 19 nt, Homo sapiens
  misc_RNA (1)...(19): siRNA sense strand
agcagaaacuggagcagca

SEQ ID NO: 2339909 - RNA, 19 nt, Homo sapiens
  misc_RNA (1)...(19): siRNA sense strand
gugagaagcaauugcagca

SEQ ID NO: 2339910 - RNA, 19 nt, Homo sapiens
  misc_RNA (1)...(19): siRNA sense strand
uggcaacaaaagagagaau

SEQ ID NO: 2339911 - RNA, 19 nt, Homo sapiens
  misc_RNA (1)...(19): siRNA sense strand
aacaggaaguagagaggca

SEQ ID NO: 2339912 - RNA, 19 nt, Homo sapiens
  misc_RNA (1)...(19): siRNA sense strand
agaaaguggcagagaggag

SEQ ID NO: 2339913 - RNA, 19 nt, Homo sapiens
  misc_RNA (1)...(19): siRNA sense strand
aagcaauugcagcaggaau

SEQ ID NO: 2339914 - RNA, 19 nt, Homo sapiens
  misc_RNA (1)...(19): siRNA sense strand
cgagaaagggcaguggcaa

SEQ ID NO: 2339915 - RNA, 19 nt, Homo sapiens
  misc_RNA (1)...(19): siRNA sense strand
uuggagaagcagaagcaau

SEQ ID NO: 2339916 - RNA, 19 nt, Homo sapiens
  misc_RNA (1)...(19): siRNA sense strand
uagaaaaggagcagaaacu

SEQ ID NO: 2339917 - RNA, 19 nt, Homo sapiens
  misc_RNA (1)...(19): siRNA sense strand
caggagcacaagaugcaaa

SEQ ID NO: 2339918 - RNA, 19 nt, Homo sapiens
  misc_RNA (1)...(19): siRNA sense strand
gaauguuugaggugacaga

SEQ ID NO: 2339919 - RNA, 19 nt, Homo sapiens
  misc_RNA (1)...(19): siRNA sense strand
aggaacuucuagccauaaa

SEQ ID NO: 2339920 - RNA, 19 nt, Homo sapiens
  misc_RNA (1)...(19): siRNA sense strand
gcacaagaugcaaaggaug

SEQ ID NO: 2339921 - RNA, 19 nt, Homo sapiens
  misc_RNA (1)...(19): siRNA sense strand
uggaugacacacugggaca

SEQ ID NO: 2339922 - RNA, 19 nt, Homo sapiens
  misc_RNA (1)...(19): siRNA sense strand
aggaaccaguggacaguga

SEQ ID NO: 2339923 - RNA, 19 nt, Homo sapiens
  misc_RNA (1)...(19): siRNA sense strand
acuggaaguguuacugaaa

SEQ ID NO: 2339924 - RNA, 19 nt, Homo sapiens
  misc_RNA (1)...(19): siRNA sense strand
cauaaaacagcaacaagaa

SEQ ID NO: 2339925 - RNA, 19 nt, Homo sapiens
  misc_RNA (1)...(19): siRNA sense strand
gaaaagcagaagugugaga

SEQ ID NO: 2339926 - RNA, 19 nt, Homo sapiens
  misc_RNA (1)...(19): siRNA sense strand
aggcaaagauagaggacga

SEQ ID NO: 2339927 - RNA, 19 nt, Homo sapiens
  misc_RNA (1)...(19): siRNA sense strand
ugaaagaacaaaugcgaca

SEQ ID NO: 2339928 - RNA, 19 nt, Homo sapiens
  misc_RNA (1)...(19): siRNA sense strand
agaacaaaugcgacagcaa

SEQ ID NO: 2339929 - RNA, 19 nt, Homo sapiens
  misc_RNA (1)...(19): siRNA sense strand
caaagauagaggacgagaa

SEQ ID NO: 2339930 - RNA, 19 nt, Homo sapiens
  misc_RNA (1)...(19): siRNA sense strand
uggcaaguacagaaguaaa

SEQ ID NO: 2339931 - RNA, 19 nt, Homo sapiens
  misc_RNA (1)...(19): siRNA sense strand
cugugaaggucaaggagga

SEQ ID NO: 2339932 - RNA, 19 nt, Homo sapiens
  misc_RNA (1)...(19): siRNA sense strand
ucgaauucacucaaagaaa

SEQ ID NO: 2339933 - RNA, 19 nt, Homo sapiens
  misc_RNA (1)...(19): siRNA sense strand
uugaggaagcagaggaaga

SEQ ID NO: 2339934 - RNA, 19 nt, Homo sapiens
  misc_RNA (1)...(19): siRNA sense strand
auguuacuuuagagggaaa

SEQ ID NO: 2339935 - RNA, 19 nt, Homo sapiens
  misc_RNA (1)...(19): siRNA sense strand
aggcagucaccuugaggaa

SEQ ID NO: 2339936 - RNA, 19 nt, Homo sapiens
  misc_RNA (1)...(19): siRNA sense strand
gagaaagggcaguggcaag

SEQ ID NO: 2339937 - RNA, 19 nt, Homo sapiens
  misc_RNA (1)...(19): siRNA sense strand
ccuugaggaagcagaggaa

SEQ ID NO: 2339938 - RNA, 19 nt, Homo sapiens
  misc_RNA (1)...(19): siRNA sense strand
aagaaaagcagaaguguga

SEQ ID NO: 2339939 - RNA, 19 nt, Homo sapiens
  misc_RNA (1)...(19): siRNA sense strand
aggacagaccucaggauga

SEQ ID NO: 2339940 - RNA, 19 nt, Homo sapiens
  misc_RNA (1)...(19): siRNA sense strand
uggaaguguuacugaaaau

SEQ ID NO: 2339941 - RNA, 19 nt, Homo sapiens
  misc_RNA (1)...(19): siRNA sense strand
ccauaaaacagcaacaaga

SEQ ID NO: 2339942 - RNA, 19 nt, Homo sapiens
  misc_RNA (1)...(19): siRNA sense strand
acgaaagacacuccaacua

SEQ ID NO: 2339943 - RNA, 19 nt, Homo sapiens
  misc_RNA (1)...(19): siRNA sense strand
ugugagacgcagacgcuua

SEQ ID NO: 2339944 - RNA, 19 nt, Homo sapiens
  misc_RNA (1)...(19): siRNA sense strand
ucauguuacuuuagaggga

SEQ ID NO: 2339945 - RNA, 19 nt, Homo sapiens
  misc_RNA (1)...(19): siRNA sense strand
augcucagauccaggaaau

SEQ ID NO: 2339946 - RNA, 19 nt, Homo sapiens
  misc_RNA (1)...(19): siRNA sense strand
cacauuaccaggagcacaa

SEQ ID NO: 2339947 - RNA, 19 nt, Homo sapiens
  misc_RNA (1)...(19): siRNA sense strand
aguggcaaguacagaagua

SEQ ID NO: 2339948 - RNA, 19 nt, Homo sapiens
  misc_RNA (1)...(19): siRNA sense strand
agauagaggacgagaaagg

SEQ ID NO: 2339949 - RNA, 19 nt, Homo sapiens
  misc_RNA (1)...(19): siRNA sense strand
agcagaaacuggagcagca

SEQ ID NO: 2339950 - RNA, 19 nt, Homo sapiens
  misc_RNA (1)...(19): siRNA sense strand
gugagaagcaauugcagca

SEQ ID NO: 2339951 - RNA, 19 nt, Homo sapiens
  misc_RNA (1)...(19): siRNA sense strand
uggcaacaaaagagagaau

SEQ ID NO: 2339952 - RNA, 19 nt, Homo sapiens
  misc_RNA (1)...(19): siRNA sense strand
aacaggaaguagagaggca

SEQ ID NO: 2339953 - RNA, 19 nt, Homo sapiens
  misc_RNA (1)...(19): siRNA sense strand
agaaaguggcagagaggag

SEQ ID NO: 2339954 - RNA, 19 nt, Homo sapiens
  misc_RNA (1)...(19): siRNA sense strand
aagcaauugcagcaggaau

SEQ ID NO: 2339955 - RNA, 19 nt, Homo sapiens
  misc_RNA (1)...(19): siRNA sense strand
cgagaaagggcaguggcaa

SEQ ID NO: 2339956 - RNA, 19 nt, Homo sapiens
  misc_RNA (1)...(19): siRNA sense strand
uuggagaagcagaagcaau

SEQ ID NO: 2339957 - RNA, 19 nt, Homo sapiens
  misc_RNA (1)...(19): siRNA sense strand
uagaaaaggagcagaaacu

SEQ ID NO: 2339958 - RNA, 19 nt, Homo sapiens
  misc_RNA (1)...(19): siRNA sense strand
caggagcacaagaugcaaa

SEQ ID NO: 2339959 - RNA, 19 nt, Homo sapiens
  misc_RNA (1)...(19): siRNA sense strand
gaauguuugaggugacaga

SEQ ID NO: 2339960 - RNA, 19 nt, Homo sapiens
  misc_RNA (1)...(19): siRNA sense strand
aggaacuucuagccauaaa

SEQ ID NO: 2339961 - RNA, 19 nt, Homo sapiens
  misc_RNA (1)...(19): siRNA sense strand
gcacaagaugcaaaggaug

SEQ ID NO: 2339962 - RNA, 19 nt, Homo sapiens
  misc_RNA (1)...(19): siRNA sense strand
uggaugacacacugggaca

SEQ ID NO: 2339963 - RNA, 19 nt, Homo sapiens
  misc_RNA (1)...(19): siRNA sense strand
aggaaccaguggacaguga

SEQ ID NO: 2339964 - RNA, 19 nt, Homo sapiens
  misc_RNA (1)...(19): siRNA sense strand
acuggaaguguuacugaaa

SEQ ID NO: 2339965 - RNA, 19 nt, Homo sapiens
  misc_RNA (1)...(19): siRNA sense strand
cauaaaacagcaacaagaa

SEQ ID NO: 2339966 - RNA, 19 nt, Homo sapiens
  misc_RNA (1)...(19): siRNA sense strand
gaaaagcagaagugugaga

SEQ ID NO: 2339967 - RNA, 19 nt, Homo sapiens
  misc_RNA (1)...(19): siRNA sense strand
aggcaaagauagaggacga

SEQ ID NO: 2339968 - RNA, 19 nt, Homo sapiens
  misc_RNA (1)...(19): siRNA sense strand
ugaaagaacaaaugcgaca

SEQ ID NO: 2339969 - RNA, 19 nt, Homo sapiens
  misc_RNA (1)...(19): siRNA sense strand
agaacaaaugcgacagcaa

SEQ ID NO: 2339970 - RNA, 19 nt, Homo sapiens
  misc_RNA (1)...(19): siRNA sense strand
caaagauagaggacgagaa

SEQ ID NO: 2339971 - RNA, 19 nt, Homo sapiens
  misc_RNA (1)...(19): siRNA sense strand
uggcaaguacagaaguaaa

SEQ ID NO: 2339972 - RNA, 19 nt, Homo sapiens
  misc_RNA (1)...(19): siRNA sense strand
cugugaaggucaaggagga

SEQ ID NO: 2339973 - RNA, 19 nt, Homo sapiens
  misc_RNA (1)...(19): siRNA sense strand
ucgaauucacucaaagaaa

SEQ ID NO: 2339974 - RNA, 19 nt, Homo sapiens
  misc_RNA (1)...(19): siRNA sense strand
uugaggaagcagaggaaga

SEQ ID NO: 2339975 - RNA, 19 nt, Homo sapiens
  misc_RNA (1)...(19): siRNA sense strand
auguuacuuuagagggaaa

SEQ ID NO: 2339976 - RNA, 19 nt, Homo sapiens
  misc_RNA (1)...(19): siRNA sense strand
aggcagucaccuugaggaa

SEQ ID NO: 2339977 - RNA, 19 nt, Homo sapiens
  misc_RNA (1)...(19): siRNA sense strand
gagaaagggcaguggcaag

SEQ ID NO: 2339978 - RNA, 19 nt, Homo sapiens
  misc_RNA (1)...(19): siRNA sense strand
ccuugaggaagcagaggaa

SEQ ID NO: 2339979 - RNA, 19 nt, Homo sapiens
  misc_RNA (1)...(19): siRNA sense strand
aagaaaagcagaaguguga

SEQ ID NO: 2339980 - RNA, 19 nt, Homo sapiens
  misc_RNA (1)...(19): siRNA sense strand
aggacagaccucaggauga

SEQ ID NO: 2339981 - RNA, 19 nt, Homo sapiens
  misc_RNA (1)...(19): siRNA sense strand
uggaaguguuacugaaaau

SEQ ID NO: 2339982 - RNA, 19 nt, Homo sapiens
  misc_RNA (1)...(19): siRNA sense strand
ccauaaaacagcaacaaga

SEQ ID NO: 2339983 - RNA, 19 nt, Homo sapiens
  misc_RNA (1)...(19): siRNA sense strand
acgaaagacacuccaacua

SEQ ID NO: 2339984 - RNA, 19 nt, Homo sapiens
  misc_RNA (1)...(19): siRNA sense strand
ugugagacgcagacgcuua

SEQ ID NO: 2339985 - RNA, 19 nt, Homo sapiens
  misc_RNA (1)...(19): siRNA sense strand
ucauguuacuuuagaggga

SEQ ID NO: 2339986 - RNA, 19 nt, Homo sapiens
  misc_RNA (1)...(19): siRNA sense strand
augcucagauccaggaaau

SEQ ID NO: 2339987 - RNA, 19 nt, Homo sapiens
  misc_RNA (1)...(19): siRNA sense strand
cacauuaccaggagcacaa

SEQ ID NO: 2339988 - RNA, 19 nt, Homo sapiens
  misc_RNA (1)...(19): siRNA sense strand
aguggcaaguacagaagua

SEQ ID NO: 2339989 - RNA, 19 nt, Homo sapiens
  misc_RNA (1)...(19): siRNA sense strand
agauagaggacgagaaagg

SEQ ID NO: 2339990 - RNA, 19 nt, Homo sapiens
  misc_RNA (1)...(19): siRNA sense strand
agcagaaacuggagcagca

SEQ ID NO: 2339991 - RNA, 19 nt, Homo sapiens
  misc_RNA (1)...(19): siRNA sense strand
gugagaagcaauugcagca

SEQ ID NO: 2339992 - RNA, 19 nt, Homo sapiens
  misc_RNA (1)...(19): siRNA sense strand
uggcaacaaaagagagaau

SEQ ID NO: 2339993 - RNA, 19 nt, Homo sapiens
  misc_RNA (1)...(19): siRNA sense strand
aacaggaaguagagaggca

SEQ ID NO: 2339994 - RNA, 19 nt, Homo sapiens
  misc_RNA (1)...(19): siRNA sense strand
agaaaguggcagagaggag

SEQ ID NO: 2339995 - RNA, 19 nt, Homo sapiens
  misc_RNA (1)...(19): siRNA sense strand
aagcaauugcagcaggaau

SEQ ID NO: 2339996 - RNA, 19 nt, Homo sapiens
  misc_RNA (1)...(19): siRNA sense strand
cgagaaagggcaguggcaa

SEQ ID NO: 2339997 - RNA, 19 nt, Homo sapiens
  misc_RNA (1)...(19): siRNA sense strand
uuggagaagcagaagcaau

SEQ ID NO: 2339998 - RNA, 19 nt, Homo sapiens
  misc_RNA (1)...(19): siRNA sense strand
uagaaaaggagcagaaacu

SEQ ID NO: 2339999 - RNA, 19 nt, Homo sapiens
  misc_RNA (1)...(19): siRNA sense strand
caggagcacaagaugcaaa

SEQ ID NO: 2340000 - RNA, 19 nt, Homo sapiens
  misc_RNA (1)...(19): siRNA sense strand
gaauguuugaggugacaga

SEQ ID NO: 2340001 - RNA, 19 nt, Homo sapiens
  misc_RNA (1)...(19): siRNA sense strand
aggaacuucuagccauaaa

SEQ ID NO: 2340002 - RNA, 19 nt, Homo sapiens
  misc_RNA (1)...(19): siRNA sense strand
gcacaagaugcaaaggaug

SEQ ID NO: 2340003 - RNA, 19 nt, Homo sapiens
  misc_RNA (1)...(19): siRNA sense strand
uggaugacacacugggaca

SEQ ID NO: 2340004 - RNA, 19 nt, Homo sapiens
  misc_RNA (1)...(19): siRNA sense strand
aggaaccaguggacaguga

SEQ ID NO: 2340005 - RNA, 19 nt, Homo sapiens
  misc_RNA (1)...(19): siRNA sense strand
acuggaaguguuacugaaa

SEQ ID NO: 2340006 - RNA, 19 nt, Homo sapiens
  misc_RNA (1)...(19): siRNA sense strand
cauaaaacagcaacaagaa

SEQ ID NO: 2340007 - RNA, 19 nt, Homo sapiens
  misc_RNA (1)...(19): siRNA sense strand
gaaaagcagaagugugaga

SEQ ID NO: 2340008 - RNA, 19 nt, Homo sapiens
  misc_RNA (1)...(19): siRNA sense strand
ucaaagaauucaagcgucu

SEQ ID NO: 2340009 - RNA, 19 nt, Homo sapiens
  misc_RNA (1)...(19): siRNA sense strand
cagcagaauucucaggagu

SEQ ID NO: 2340010 - RNA, 19 nt, Homo sapiens
  misc_RNA (1)...(19): siRNA sense strand
gcuguaaccucuuugccaa

SEQ ID NO: 2340011 - RNA, 19 nt, Homo sapiens
  misc_RNA (1)...(19): siRNA sense strand
auacacaaaaggaggcaaa

SEQ ID NO: 2340012 - RNA, 19 nt, Homo sapiens
  misc_RNA (1)...(19): siRNA sense strand
uggagagaguauuggaaac

SEQ ID NO: 2340013 - RNA, 19 nt, Homo sapiens
  misc_RNA (1)...(19): siRNA sense strand
auggagagaguauuggaaa

SEQ ID NO: 2340014 - RNA, 19 nt, Homo sapiens
  misc_RNA (1)...(19): siRNA sense strand
gauuguagcuuguuaccca

SEQ ID NO: 2340015 - RNA, 19 nt, Homo sapiens
  misc_RNA (1)...(19): siRNA sense strand
uuauuaaaguugcugccaa

SEQ ID NO: 2340016 - RNA, 19 nt, Homo sapiens
  misc_RNA (1)...(19): siRNA sense strand
ugccuaugcccgugaagaa

SEQ ID NO: 2340017 - RNA, 19 nt, Homo sapiens
  misc_RNA (1)...(19): siRNA sense strand
cgugaagaauuuacccaca

SEQ ID NO: 2340018 - RNA, 19 nt, Homo sapiens
  misc_RNA (1)...(19): siRNA sense strand
uccugaagacaaagaaauu

SEQ ID NO: 2340019 - RNA, 19 nt, Homo sapiens
  misc_RNA (1)...(19): siRNA sense strand
acacaaaaggaggcaaaua

SEQ ID NO: 2340020 - RNA, 19 nt, Homo sapiens
  misc_RNA (1)...(19): siRNA sense strand
aauucaagcgucuggauga

SEQ ID NO: 2340021 - RNA, 19 nt, Homo sapiens
  misc_RNA (1)...(19): siRNA sense strand
gcucaaagaauucaagcgu

SEQ ID NO: 2340022 - RNA, 19 nt, Homo sapiens
  misc_RNA (1)...(19): siRNA sense strand
ccagacaacuauaagguga

SEQ ID NO: 2340023 - RNA, 19 nt, Homo sapiens
  misc_RNA (1)...(19): siRNA sense strand
gcaucuacgucaugggcuu

SEQ ID NO: 2340024 - RNA, 19 nt, Homo sapiens
  misc_RNA (1)...(19): siRNA sense strand
ccuuaaaccucauuggcuu

SEQ ID NO: 2340025 - RNA, 19 nt, Homo sapiens
  misc_RNA (1)...(19): siRNA sense strand
caguguuguuagagauaca

SEQ ID NO: 2340026 - RNA, 19 nt, Homo sapiens
  misc_RNA (1)...(19): siRNA sense strand
cagagaaucuugugcggga

SEQ ID NO: 2340027 - RNA, 19 nt, Homo sapiens
  misc_RNA (1)...(19): siRNA sense strand
ugaaaugagucacagguca

SEQ ID NO: 2340028 - RNA, 19 nt, Homo sapiens
  misc_RNA (1)...(19): siRNA sense strand
agcuaaggccgcagaagaa

SEQ ID NO: 2340029 - RNA, 19 nt, Homo sapiens
  misc_RNA (1)...(19): siRNA sense strand
ccaucaaaucucaaacaau

SEQ ID NO: 2340030 - RNA, 19 nt, Homo sapiens
  misc_RNA (1)...(19): siRNA sense strand
ccagaagaauguuggcucu

SEQ ID NO: 2340031 - RNA, 19 nt, Homo sapiens
  misc_RNA (1)...(19): siRNA sense strand
gcgcaaaugagacggugca

SEQ ID NO: 2340032 - RNA, 19 nt, Homo sapiens
  misc_RNA (1)...(19): siRNA sense strand
acucaguguuguuagagau

SEQ ID NO: 2340033 - RNA, 19 nt, Homo sapiens
  misc_RNA (1)...(19): siRNA sense strand
ccagacaacuauaagguga

SEQ ID NO: 2340034 - RNA, 19 nt, Homo sapiens
  misc_RNA (1)...(19): siRNA sense strand
gcaucuacgucaugggcuu

SEQ ID NO: 2340035 - RNA, 19 nt, Homo sapiens
  misc_RNA (1)...(19): siRNA sense strand
ccuuaaaccucauuggcuu

SEQ ID NO: 2340036 - RNA, 19 nt, Homo sapiens
  misc_RNA (1)...(19): siRNA sense strand
caguguuguuagagauaca

SEQ ID NO: 2340037 - RNA, 19 nt, Homo sapiens
  misc_RNA (1)...(19): siRNA sense strand
cagagaaucuugugcggga

SEQ ID NO: 2340038 - RNA, 19 nt, Homo sapiens
  misc_RNA (1)...(19): siRNA sense strand
ugaaaugagucacagguca

SEQ ID NO: 2340039 - RNA, 19 nt, Homo sapiens
  misc_RNA (1)...(19): siRNA sense strand
agcuaaggccgcagaagaa

SEQ ID NO: 2340040 - RNA, 19 nt, Homo sapiens
  misc_RNA (1)...(19): siRNA sense strand
ccaucaaaucucaaacaau

SEQ ID NO: 2340041 - RNA, 19 nt, Homo sapiens
  misc_RNA (1)...(19): siRNA sense strand
ccagaagaauguuggcucu

SEQ ID NO: 2340042 - RNA, 19 nt, Homo sapiens
  misc_RNA (1)...(19): siRNA sense strand
gcgcaaaugagacggugca

SEQ ID NO: 2340043 - RNA, 19 nt, Homo sapiens
  misc_RNA (1)...(19): siRNA sense strand
acucaguguuguuagagau

SEQ ID NO: 2340044 - RNA, 19 nt, Homo sapiens
  misc_RNA (1)...(19): siRNA sense strand
agaaaguaguggaggagaa

SEQ ID NO: 2340045 - RNA, 19 nt, Homo sapiens
  misc_RNA (1)...(19): siRNA sense strand
agaucaaagucuagaggaa

SEQ ID NO: 2340046 - RNA, 19 nt, Homo sapiens
  misc_RNA (1)...(19): siRNA sense strand
acacauauacagaggcaua

SEQ ID NO: 2340047 - RNA, 19 nt, Homo sapiens
  misc_RNA (1)...(19): siRNA sense strand
agauccaagucuagggaaa

SEQ ID NO: 2340048 - RNA, 19 nt, Homo sapiens
  misc_RNA (1)...(19): siRNA sense strand
cgaaagugaacaugguaua

SEQ ID NO: 2340049 - RNA, 19 nt, Homo sapiens
  misc_RNA (1)...(19): siRNA sense strand
augaagaaauagugcagaa

SEQ ID NO: 2340050 - RNA, 19 nt, Homo sapiens
  misc_RNA (1)...(19): siRNA sense strand
uaguaaggauacagaagaa

SEQ ID NO: 2340051 - RNA, 19 nt, Homo sapiens
  misc_RNA (1)...(19): siRNA sense strand
aagaaauagugcagaagau

SEQ ID NO: 2340052 - RNA, 19 nt, Homo sapiens
  misc_RNA (1)...(19): siRNA sense strand
ggauauuaaugaagcagau

SEQ ID NO: 2340053 - RNA, 19 nt, Homo sapiens
  misc_RNA (1)...(19): siRNA sense strand
uaacaaugucaguggagua

SEQ ID NO: 2340054 - RNA, 19 nt, Homo sapiens
  misc_RNA (1)...(19): siRNA sense strand
gggaaauuggugaagagaa

SEQ ID NO: 2340055 - RNA, 19 nt, Homo sapiens
  misc_RNA (1)...(19): siRNA sense strand
uaaagaaaguaguggagga

SEQ ID NO: 2340056 - RNA, 19 nt, Homo sapiens
  misc_RNA (1)...(19): siRNA sense strand
aggagaagcagcagaucaa

SEQ ID NO: 2340057 - RNA, 19 nt, Homo sapiens
  misc_RNA (1)...(19): siRNA sense strand
cgucggagucggagucaua

SEQ ID NO: 2340058 - RNA, 19 nt, Homo sapiens
  misc_RNA (1)...(19): siRNA sense strand
cggaugaagaggaagaaga

SEQ ID NO: 2340059 - RNA, 19 nt, Homo sapiens
  misc_RNA (1)...(19): siRNA sense strand
cgaccaacaucgagcagau

SEQ ID NO: 2340060 - RNA, 19 nt, Homo sapiens
  misc_RNA (1)...(19): siRNA sense strand
ugaaguuguuccagagaga

SEQ ID NO: 2340061 - RNA, 19 nt, Homo sapiens
  misc_RNA (1)...(19): siRNA sense strand
gaaucucguucuagggcaa

SEQ ID NO: 2340062 - RNA, 19 nt, Homo sapiens
  misc_RNA (1)...(19): siRNA sense strand
gaguaaagaagaugaugau

SEQ ID NO: 2340063 - RNA, 19 nt, Homo sapiens
  misc_RNA (1)...(19): siRNA sense strand
ggggagaaagagaagaaaa

SEQ ID NO: 2340064 - RNA, 19 nt, Homo sapiens
  misc_RNA (1)...(19): siRNA sense strand
guguuagagccuucagaaa

SEQ ID NO: 2340065 - RNA, 19 nt, Homo sapiens
  misc_RNA (1)...(19): siRNA sense strand
ccacaguugucgcaggaau

SEQ ID NO: 2340066 - RNA, 19 nt, Homo sapiens
  misc_RNA (1)...(19): siRNA sense strand
ggaaugaaggccagcugaa

SEQ ID NO: 2340067 - RNA, 19 nt, Homo sapiens
  misc_RNA (1)...(19): siRNA sense strand
cgaaguaagcguuccaaau

SEQ ID NO: 2340068 - RNA, 19 nt, Homo sapiens
  misc_RNA (1)...(19): siRNA sense strand
ugacaagaccgcaggaguu

SEQ ID NO: 2340069 - RNA, 19 nt, Homo sapiens
  misc_RNA (1)...(19): siRNA sense strand
cugaauggugaaacaaaua

SEQ ID NO: 2340070 - RNA, 19 nt, Homo sapiens
  misc_RNA (1)...(19): siRNA sense strand
cugcucagcccuaaagaaa

SEQ ID NO: 2340071 - RNA, 19 nt, Homo sapiens
  misc_RNA (1)...(19): siRNA sense strand
gcuauagaguccacaccaa

SEQ ID NO: 2340072 - RNA, 19 nt, Homo sapiens
  misc_RNA (1)...(19): siRNA sense strand
gagcacaucuccagagcca

SEQ ID NO: 2340073 - RNA, 19 nt, Homo sapiens
  misc_RNA (1)...(19): siRNA sense strand
caguaguagcagaagaaca

SEQ ID NO: 2340074 - RNA, 19 nt, Homo sapiens
  misc_RNA (1)...(19): siRNA sense strand
aguaguagcagaagaacau

SEQ ID NO: 2340075 - RNA, 19 nt, Homo sapiens
  misc_RNA (1)...(19): siRNA sense strand
cggauaguguuuauggaga

SEQ ID NO: 2340076 - RNA, 19 nt, Homo sapiens
  misc_RNA (1)...(19): siRNA sense strand
agaaauagugcagaagaua

SEQ ID NO: 2340077 - RNA, 19 nt, Homo sapiens
  misc_RNA (1)...(19): siRNA sense strand
agaugaagucugugcugaa

SEQ ID NO: 2340078 - RNA, 19 nt, Homo sapiens
  misc_RNA (1)...(19): siRNA sense strand
aggaagaagaucuguauca

SEQ ID NO: 2340079 - RNA, 19 nt, Homo sapiens
  misc_RNA (1)...(19): siRNA sense strand
agauuaaggcgaucaagaa

SEQ ID NO: 2340080 - RNA, 19 nt, Homo sapiens
  misc_RNA (1)...(19): siRNA sense strand
ccagcugaauggugaaaca

SEQ ID NO: 2340081 - RNA, 19 nt, Homo sapiens
  misc_RNA (1)...(19): siRNA sense strand
gcuaaagagauggaacaua

SEQ ID NO: 2340082 - RNA, 19 nt, Homo sapiens
  misc_RNA (1)...(19): siRNA sense strand
gagucuaccaaaugaagaa

SEQ ID NO: 2340083 - RNA, 19 nt, Homo sapiens
  misc_RNA (1)...(19): siRNA sense strand
gguggaacauccugggcau

SEQ ID NO: 2340084 - RNA, 19 nt, Homo sapiens
  misc_RNA (1)...(19): siRNA sense strand
agaucaaggucugugguaa

SEQ ID NO: 2340085 - RNA, 19 nt, Homo sapiens
  misc_RNA (1)...(19): siRNA sense strand
ggaugacaacgguggaaca

SEQ ID NO: 2340086 - RNA, 19 nt, Homo sapiens
  misc_RNA (1)...(19): siRNA sense strand
agauuuagugagaccguua

SEQ ID NO: 2340087 - RNA, 19 nt, Homo sapiens
  misc_RNA (1)...(19): siRNA sense strand
guuaaggacacucacgaaa

SEQ ID NO: 2340088 - RNA, 19 nt, Homo sapiens
  misc_RNA (1)...(19): siRNA sense strand
aucaaagucuagaggaaga

SEQ ID NO: 2340089 - RNA, 19 nt, Homo sapiens
  misc_RNA (1)...(19): siRNA sense strand
ucaaaagagaagcgcaaaa

SEQ ID NO: 2340090 - RNA, 19 nt, Homo sapiens
  misc_RNA (1)...(19): siRNA sense strand
gcuccagggauaaccgaaa

SEQ ID NO: 2340091 - RNA, 19 nt, Homo sapiens
  misc_RNA (1)...(19): siRNA sense strand
aggagcuacuauagaagaa

SEQ ID NO: 2340092 - RNA, 19 nt, Homo sapiens
  misc_RNA (1)...(19): siRNA sense strand
caucaacaacaauggauuu

SEQ ID NO: 2340093 - RNA, 19 nt, Homo sapiens
  misc_RNA (1)...(19): siRNA sense strand
uaucaaaagagaagcgcaa

SEQ ID NO: 2340094 - RNA, 19 nt, Homo sapiens
  misc_RNA (1)...(19): siRNA sense strand
aaauagugcagaagauaga

SEQ ID NO: 2340095 - RNA, 19 nt, Homo sapiens
  misc_RNA (1)...(19): siRNA sense strand
ugaugggaacauagauuua

SEQ ID NO: 2340096 - RNA, 19 nt, Homo sapiens
  misc_RNA (1)...(19): siRNA sense strand
cagaagaacaugaaguugu

SEQ ID NO: 2340097 - RNA, 19 nt, Homo sapiens
  misc_RNA (1)...(19): siRNA sense strand
ucaagacgcaggaggagaa

SEQ ID NO: 2340098 - RNA, 19 nt, Homo sapiens
  misc_RNA (1)...(19): siRNA sense strand
ggaacauaauacagugugu

SEQ ID NO: 2340099 - RNA, 19 nt, Homo sapiens
  misc_RNA (1)...(19): siRNA sense strand
gaucaagcuccagggauaa

SEQ ID NO: 2340100 - RNA, 19 nt, Homo sapiens
  misc_RNA (1)...(19): siRNA sense strand
acauguugccucagaagua

SEQ ID NO: 2340101 - RNA, 19 nt, Homo sapiens
  misc_RNA (1)...(19): siRNA sense strand
agaguaaagaagaugauga

SEQ ID NO: 2340102 - RNA, 19 nt, Homo sapiens
  misc_RNA (1)...(19): siRNA sense strand
ugcagaagauagaggaagu

SEQ ID NO: 2340103 - RNA, 19 nt, Homo sapiens
  misc_RNA (1)...(19): siRNA sense strand
agaaaguaguggaggagaa

SEQ ID NO: 2340104 - RNA, 19 nt, Homo sapiens
  misc_RNA (1)...(19): siRNA sense strand
agaucaaagucuagaggaa

SEQ ID NO: 2340105 - RNA, 19 nt, Homo sapiens
  misc_RNA (1)...(19): siRNA sense strand
acacauauacagaggcaua

SEQ ID NO: 2340106 - RNA, 19 nt, Homo sapiens
  misc_RNA (1)...(19): siRNA sense strand
agauccaagucuagggaaa

SEQ ID NO: 2340107 - RNA, 19 nt, Homo sapiens
  misc_RNA (1)...(19): siRNA sense strand
cgaaagugaacaugguaua

SEQ ID NO: 2340108 - RNA, 19 nt, Homo sapiens
  misc_RNA (1)...(19): siRNA sense strand
augaagaaauagugcagaa

SEQ ID NO: 2340109 - RNA, 19 nt, Homo sapiens
  misc_RNA (1)...(19): siRNA sense strand
uaguaaggauacagaagaa

SEQ ID NO: 2340110 - RNA, 19 nt, Homo sapiens
  misc_RNA (1)...(19): siRNA sense strand
aagaaauagugcagaagau

SEQ ID NO: 2340111 - RNA, 19 nt, Homo sapiens
  misc_RNA (1)...(19): siRNA sense strand
ggauauuaaugaagcagau

SEQ ID NO: 2340112 - RNA, 19 nt, Homo sapiens
  misc_RNA (1)...(19): siRNA sense strand
uaacaaugucaguggagua

SEQ ID NO: 2340113 - RNA, 19 nt, Homo sapiens
  misc_RNA (1)...(19): siRNA sense strand
gggaaauuggugaagagaa

SEQ ID NO: 2340114 - RNA, 19 nt, Homo sapiens
  misc_RNA (1)...(19): siRNA sense strand
uaaagaaaguaguggagga

SEQ ID NO: 2340115 - RNA, 19 nt, Homo sapiens
  misc_RNA (1)...(19): siRNA sense strand
aggagaagcagcagaucaa

SEQ ID NO: 2340116 - RNA, 19 nt, Homo sapiens
  misc_RNA (1)...(19): siRNA sense strand
cgucggagucggagucaua

SEQ ID NO: 2340117 - RNA, 19 nt, Homo sapiens
  misc_RNA (1)...(19): siRNA sense strand
cggaugaagaggaagaaga

SEQ ID NO: 2340118 - RNA, 19 nt, Homo sapiens
  misc_RNA (1)...(19): siRNA sense strand
cgaccaacaucgagcagau

SEQ ID NO: 2340119 - RNA, 19 nt, Homo sapiens
  misc_RNA (1)...(19): siRNA sense strand
ugaaguuguuccagagaga

SEQ ID NO: 2340120 - RNA, 19 nt, Homo sapiens
  misc_RNA (1)...(19): siRNA sense strand
gaaucucguucuagggcaa

SEQ ID NO: 2340121 - RNA, 19 nt, Homo sapiens
  misc_RNA (1)...(19): siRNA sense strand
gaguaaagaagaugaugau

SEQ ID NO: 2340122 - RNA, 19 nt, Homo sapiens
  misc_RNA (1)...(19): siRNA sense strand
ggggagaaagagaagaaaa

SEQ ID NO: 2340123 - RNA, 19 nt, Homo sapiens
  misc_RNA (1)...(19): siRNA sense strand
guguuagagccuucagaaa

SEQ ID NO: 2340124 - RNA, 19 nt, Homo sapiens
  misc_RNA (1)...(19): siRNA sense strand
ccacaguugucgcaggaau

SEQ ID NO: 2340125 - RNA, 19 nt, Homo sapiens
  misc_RNA (1)...(19): siRNA sense strand
ggaaugaaggccagcugaa

SEQ ID NO: 2340126 - RNA, 19 nt, Homo sapiens
  misc_RNA (1)...(19): siRNA sense strand
cgaaguaagcguuccaaau

SEQ ID NO: 2340127 - RNA, 19 nt, Homo sapiens
  misc_RNA (1)...(19): siRNA sense strand
ugacaagaccgcaggaguu

SEQ ID NO: 2340128 - RNA, 19 nt, Homo sapiens
  misc_RNA (1)...(19): siRNA sense strand
cugaauggugaaacaaaua

SEQ ID NO: 2340129 - RNA, 19 nt, Homo sapiens
  misc_RNA (1)...(19): siRNA sense strand
cugcucagcccuaaagaaa

SEQ ID NO: 2340130 - RNA, 19 nt, Homo sapiens
  misc_RNA (1)...(19): siRNA sense strand
gcuauagaguccacaccaa

SEQ ID NO: 2340131 - RNA, 19 nt, Homo sapiens
  misc_RNA (1)...(19): siRNA sense strand
gagcacaucuccagagcca

SEQ ID NO: 2340132 - RNA, 19 nt, Homo sapiens
  misc_RNA (1)...(19): siRNA sense strand
caguaguagcagaagaaca

SEQ ID NO: 2340133 - RNA, 19 nt, Homo sapiens
  misc_RNA (1)...(19): siRNA sense strand
aguaguagcagaagaacau

SEQ ID NO: 2340134 - RNA, 19 nt, Homo sapiens
  misc_RNA (1)...(19): siRNA sense strand
cggauaguguuuauggaga

SEQ ID NO: 2340135 - RNA, 19 nt, Homo sapiens
  misc_RNA (1)...(19): siRNA sense strand
agaaauagugcagaagaua

SEQ ID NO: 2340136 - RNA, 19 nt, Homo sapiens
  misc_RNA (1)...(19): siRNA sense strand
agaugaagucugugcugaa

SEQ ID NO: 2340137 - RNA, 19 nt, Homo sapiens
  misc_RNA (1)...(19): siRNA sense strand
aggaagaagaucuguauca

SEQ ID NO: 2340138 - RNA, 19 nt, Homo sapiens
  misc_RNA (1)...(19): siRNA sense strand
agauuaaggcgaucaagaa

SEQ ID NO: 2340139 - RNA, 19 nt, Homo sapiens
  misc_RNA (1)...(19): siRNA sense strand
ccagcugaauggugaaaca

SEQ ID NO: 2340140 - RNA, 19 nt, Homo sapiens
  misc_RNA (1)...(19): siRNA sense strand
gcuaaagagauggaacaua

SEQ ID NO: 2340141 - RNA, 19 nt, Homo sapiens
  misc_RNA (1)...(19): siRNA sense strand
gagucuaccaaaugaagaa

SEQ ID NO: 2340142 - RNA, 19 nt, Homo sapiens
  misc_RNA (1)...(19): siRNA sense strand
gguggaacauccugggcau

SEQ ID NO: 2340143 - RNA, 19 nt, Homo sapiens
  misc_RNA (1)...(19): siRNA sense strand
agaucaaggucugugguaa

SEQ ID NO: 2340144 - RNA, 19 nt, Homo sapiens
  misc_RNA (1)...(19): siRNA sense strand
ggaugacaacgguggaaca

SEQ ID NO: 2340145 - RNA, 19 nt, Homo sapiens
  misc_RNA (1)...(19): siRNA sense strand
agauuuagugagaccguua

SEQ ID NO: 2340146 - RNA, 19 nt, Homo sapiens
  misc_RNA (1)...(19): siRNA sense strand
guuaaggacacucacgaaa

SEQ ID NO: 2340147 - RNA, 19 nt, Homo sapiens
  misc_RNA (1)...(19): siRNA sense strand
aucaaagucuagaggaaga

SEQ ID NO: 2340148 - RNA, 19 nt, Homo sapiens
  misc_RNA (1)...(19): siRNA sense strand
ucaaaagagaagcgcaaaa

SEQ ID NO: 2340149 - RNA, 19 nt, Homo sapiens
  misc_RNA (1)...(19): siRNA sense strand
gcuccagggauaaccgaaa

SEQ ID NO: 2340150 - RNA, 19 nt, Homo sapiens
  misc_RNA (1)...(19): siRNA sense strand
aggagcuacuauagaagaa

SEQ ID NO: 2340151 - RNA, 19 nt, Homo sapiens
  misc_RNA (1)...(19): siRNA sense strand
caucaacaacaauggauuu

SEQ ID NO: 2340152 - RNA, 19 nt, Homo sapiens
  misc_RNA (1)...(19): siRNA sense strand
uaucaaaagagaagcgcaa

SEQ ID NO: 2340153 - RNA, 19 nt, Homo sapiens
  misc_RNA (1)...(19): siRNA sense strand
aaauagugcagaagauaga

SEQ ID NO: 2340154 - RNA, 19 nt, Homo sapiens
  misc_RNA (1)...(19): siRNA sense strand
ugaugggaacauagauuua

SEQ ID NO: 2340155 - RNA, 19 nt, Homo sapiens
  misc_RNA (1)...(19): siRNA sense strand
cagaagaacaugaaguugu

SEQ ID NO: 2340156 - RNA, 19 nt, Homo sapiens
  misc_RNA (1)...(19): siRNA sense strand
ucaagacgcaggaggagaa

SEQ ID NO: 2340157 - RNA, 19 nt, Homo sapiens
  misc_RNA (1)...(19): siRNA sense strand
ggaacauaauacagugugu

SEQ ID NO: 2340158 - RNA, 19 nt, Homo sapiens
  misc_RNA (1)...(19): siRNA sense strand
gaucaagcuccagggauaa

SEQ ID NO: 2340159 - RNA, 19 nt, Homo sapiens
  misc_RNA (1)...(19): siRNA sense strand
acauguugccucagaagua

SEQ ID NO: 2340160 - RNA, 19 nt, Homo sapiens
  misc_RNA (1)...(19): siRNA sense strand
agaguaaagaagaugauga

SEQ ID NO: 2340161 - RNA, 19 nt, Homo sapiens
  misc_RNA (1)...(19): siRNA sense strand
ugcagaagauagaggaagu

SEQ ID NO: 2340162 - RNA, 19 nt, Homo sapiens
  misc_RNA (1)...(19): siRNA sense strand
agaaaguaguggaggagaa

SEQ ID NO: 2340163 - RNA, 19 nt, Homo sapiens
  misc_RNA (1)...(19): siRNA sense strand
agaucaaagucuagaggaa

SEQ ID NO: 2340164 - RNA, 19 nt, Homo sapiens
  misc_RNA (1)...(19): siRNA sense strand
acacauauacagaggcaua

SEQ ID NO: 2340165 - RNA, 19 nt, Homo sapiens
  misc_RNA (1)...(19): siRNA sense strand
agauccaagucuagggaaa

SEQ ID NO: 2340166 - RNA, 19 nt, Homo sapiens
  misc_RNA (1)...(19): siRNA sense strand
cgaaagugaacaugguaua

SEQ ID NO: 2340167 - RNA, 19 nt, Homo sapiens
  misc_RNA (1)...(19): siRNA sense strand
augaagaaauagugcagaa

SEQ ID NO: 2340168 - RNA, 19 nt, Homo sapiens
  misc_RNA (1)...(19): siRNA sense strand
uaguaaggauacagaagaa

SEQ ID NO: 2340169 - RNA, 19 nt, Homo sapiens
  misc_RNA (1)...(19): siRNA sense strand
aagaaauagugcagaagau

SEQ ID NO: 2340170 - RNA, 19 nt, Homo sapiens
  misc_RNA (1)...(19): siRNA sense strand
ggauauuaaugaagcagau

SEQ ID NO: 2340171 - RNA, 19 nt, Homo sapiens
  misc_RNA (1)...(19): siRNA sense strand
uaacaaugucaguggagua

SEQ ID NO: 2340172 - RNA, 19 nt, Homo sapiens
  misc_RNA (1)...(19): siRNA sense strand
gggaaauuggugaagagaa

SEQ ID NO: 2340173 - RNA, 19 nt, Homo sapiens
  misc_RNA (1)...(19): siRNA sense strand
uaaagaaaguaguggagga

SEQ ID NO: 2340174 - RNA, 19 nt, Homo sapiens
  misc_RNA (1)...(19): siRNA sense strand
aggagaagcagcagaucaa

SEQ ID NO: 2340175 - RNA, 19 nt, Homo sapiens
  misc_RNA (1)...(19): siRNA sense strand
cgucggagucggagucaua

SEQ ID NO: 2340176 - RNA, 19 nt, Homo sapiens
  misc_RNA (1)...(19): siRNA sense strand
cgaccaacaucgagcagau

SEQ ID NO: 2340177 - RNA, 19 nt, Homo sapiens
  misc_RNA (1)...(19): siRNA sense strand
ugaaguuguuccagagaga

SEQ ID NO: 2340178 - RNA, 19 nt, Homo sapiens
  misc_RNA (1)...(19): siRNA sense strand
gaaucucguucuagggcaa

SEQ ID NO: 2340179 - RNA, 19 nt, Homo sapiens
  misc_RNA (1)...(19): siRNA sense strand
ggggagaaagagaagaaaa

SEQ ID NO: 2340180 - RNA, 19 nt, Homo sapiens
  misc_RNA (1)...(19): siRNA sense strand
guguuagagccuucagaaa

SEQ ID NO: 2340181 - RNA, 19 nt, Homo sapiens
  misc_RNA (1)...(19): siRNA sense strand
ccacaguugucgcaggaau

SEQ ID NO: 2340182 - RNA, 19 nt, Homo sapiens
  misc_RNA (1)...(19): siRNA sense strand
ggaaugaaggccagcugaa

SEQ ID NO: 2340183 - RNA, 19 nt, Homo sapiens
  misc_RNA (1)...(19): siRNA sense strand
cgaaguaagcguuccaaau

SEQ ID NO: 2340184 - RNA, 19 nt, Homo sapiens
  misc_RNA (1)...(19): siRNA sense strand
ugacaagaccgcaggaguu

SEQ ID NO: 2340185 - RNA, 19 nt, Homo sapiens
  misc_RNA (1)...(19): siRNA sense strand
cugaauggugaaacaaaua

SEQ ID NO: 2340186 - RNA, 19 nt, Homo sapiens
  misc_RNA (1)...(19): siRNA sense strand
cugcucagcccuaaagaaa

SEQ ID NO: 2340187 - RNA, 19 nt, Homo sapiens
  misc_RNA (1)...(19): siRNA sense strand
gcuauagaguccacaccaa

SEQ ID NO: 2340188 - RNA, 19 nt, Homo sapiens
  misc_RNA (1)...(19): siRNA sense strand
gagcacaucuccagagcca

SEQ ID NO: 2340189 - RNA, 19 nt, Homo sapiens
  misc_RNA (1)...(19): siRNA sense strand
caguaguagcagaagaaca

SEQ ID NO: 2340190 - RNA, 19 nt, Homo sapiens
  misc_RNA (1)...(19): siRNA sense strand
aguaguagcagaagaacau

SEQ ID NO: 2340191 - RNA, 19 nt, Homo sapiens
  misc_RNA (1)...(19): siRNA sense strand
agaaauagugcagaagaua

SEQ ID NO: 2340192 - RNA, 19 nt, Homo sapiens
  misc_RNA (1)...(19): siRNA sense strand
agaugaagucugugcugaa

SEQ ID NO: 2340193 - RNA, 19 nt, Homo sapiens
  misc_RNA (1)...(19): siRNA sense strand
aggaagaagaucuguauca

SEQ ID NO: 2340194 - RNA, 19 nt, Homo sapiens
  misc_RNA (1)...(19): siRNA sense strand
agauuaaggcgaucaagaa

SEQ ID NO: 2340195 - RNA, 19 nt, Homo sapiens
  misc_RNA (1)...(19): siRNA sense strand
ccagcugaauggugaaaca

SEQ ID NO: 2340196 - RNA, 19 nt, Homo sapiens
  misc_RNA (1)...(19): siRNA sense strand
gcuaaagagauggaacaua

SEQ ID NO: 2340197 - RNA, 19 nt, Homo sapiens
  misc_RNA (1)...(19): siRNA sense strand
gagucuaccaaaugaagaa

SEQ ID NO: 2340198 - RNA, 19 nt, Homo sapiens
  misc_RNA (1)...(19): siRNA sense strand
gguggaacauccugggcau

SEQ ID NO: 2340199 - RNA, 19 nt, Homo sapiens
  misc_RNA (1)...(19): siRNA sense strand
agaucaaggucugugguaa

SEQ ID NO: 2340200 - RNA, 19 nt, Homo sapiens
  misc_RNA (1)...(19): siRNA sense strand
ggaugacaacgguggaaca

SEQ ID NO: 2340201 - RNA, 19 nt, Homo sapiens
  misc_RNA (1)...(19): siRNA sense strand
agauuuagugagaccguua

SEQ ID NO: 2340202 - RNA, 19 nt, Homo sapiens
  misc_RNA (1)...(19): siRNA sense strand
guuaaggacacucacgaaa

SEQ ID NO: 2340203 - RNA, 19 nt, Homo sapiens
  misc_RNA (1)...(19): siRNA sense strand
aucaaagucuagaggaaga

SEQ ID NO: 2340204 - RNA, 19 nt, Homo sapiens
  misc_RNA (1)...(19): siRNA sense strand
ucaaaagagaagcgcaaaa

SEQ ID NO: 2340205 - RNA, 19 nt, Homo sapiens
  misc_RNA (1)...(19): siRNA sense strand
gcuccagggauaaccgaaa

SEQ ID NO: 2340206 - RNA, 19 nt, Homo sapiens
  misc_RNA (1)...(19): siRNA sense strand
aggagcuacuauagaagaa

SEQ ID NO: 2340207 - RNA, 19 nt, Homo sapiens
  misc_RNA (1)...(19): siRNA sense strand
caucaacaacaauggauuu

SEQ ID NO: 2340208 - RNA, 19 nt, Homo sapiens
  misc_RNA (1)...(19): siRNA sense strand
uaucaaaagagaagcgcaa

SEQ ID NO: 2340209 - RNA, 19 nt, Homo sapiens
  misc_RNA (1)...(19): siRNA sense strand
aaauagugcagaagauaga

SEQ ID NO: 2340210 - RNA, 19 nt, Homo sapiens
  misc_RNA (1)...(19): siRNA sense strand
ugaugggaacauagauuua

SEQ ID NO: 2340211 - RNA, 19 nt, Homo sapiens
  misc_RNA (1)...(19): siRNA sense strand
cagaagaacaugaaguugu

SEQ ID NO: 2340212 - RNA, 19 nt, Homo sapiens
  misc_RNA (1)...(19): siRNA sense strand
ucaagacgcaggaggagaa

SEQ ID NO: 2340213 - RNA, 19 nt, Homo sapiens
  misc_RNA (1)...(19): siRNA sense strand
ggaacauaauacagugugu

SEQ ID NO: 2340214 - RNA, 19 nt, Homo sapiens
  misc_RNA (1)...(19): siRNA sense strand
gaucaagcuccagggauaa

SEQ ID NO: 2340215 - RNA, 19 nt, Homo sapiens
  misc_RNA (1)...(19): siRNA sense strand
acauguugccucagaagua

SEQ ID NO: 2340216 - RNA, 19 nt, Homo sapiens
  misc_RNA (1)...(19): siRNA sense strand
ugcagaagauagaggaagu

SEQ ID NO: 2340217 - RNA, 19 nt, Homo sapiens
  misc_RNA (1)...(19): siRNA sense strand
gaugaugggaacauagauu

SEQ ID NO: 2340218 - RNA, 19 nt, Homo sapiens
  misc_RNA (1)...(19): siRNA sense strand
gugaagaaccacaugcuga

SEQ ID NO: 2340219 - RNA, 19 nt, Homo sapiens
  misc_RNA (1)...(19): siRNA sense strand
gguuguaaguaguaugcca

SEQ ID NO: 2340220 - RNA, 19 nt, Homo sapiens
  misc_RNA (1)...(19): siRNA sense strand
caguggaguaucagaugaa

SEQ ID NO: 2340221 - RNA, 19 nt, Homo sapiens
  misc_RNA (1)...(19): siRNA sense strand
gcugaaaauacuuggccua

SEQ ID NO: 2340222 - RNA, 19 nt, Homo sapiens
  misc_RNA (1)...(19): siRNA sense strand
ucacauguuaugaaaggaa

SEQ ID NO: 2340223 - RNA, 19 nt, Homo sapiens
  misc_RNA (1)...(19): siRNA sense strand
cuaaagagacacugccuga

SEQ ID NO: 2340224 - RNA, 19 nt, Homo sapiens
  misc_RNA (1)...(19): siRNA sense strand
agaaaguaguggaggagaa

SEQ ID NO: 2340225 - RNA, 19 nt, Homo sapiens
  misc_RNA (1)...(19): siRNA sense strand
agaucaaagucuagaggaa

SEQ ID NO: 2340226 - RNA, 19 nt, Homo sapiens
  misc_RNA (1)...(19): siRNA sense strand
acacauauacagaggcaua

SEQ ID NO: 2340227 - RNA, 19 nt, Homo sapiens
  misc_RNA (1)...(19): siRNA sense strand
agauccaagucuagggaaa

SEQ ID NO: 2340228 - RNA, 19 nt, Homo sapiens
  misc_RNA (1)...(19): siRNA sense strand
cgaaagugaacaugguaua

SEQ ID NO: 2340229 - RNA, 19 nt, Homo sapiens
  misc_RNA (1)...(19): siRNA sense strand
augaagaaauagugcagaa

SEQ ID NO: 2340230 - RNA, 19 nt, Homo sapiens
  misc_RNA (1)...(19): siRNA sense strand
uaguaaggauacagaagaa

SEQ ID NO: 2340231 - RNA, 19 nt, Homo sapiens
  misc_RNA (1)...(19): siRNA sense strand
aagaaauagugcagaagau

SEQ ID NO: 2340232 - RNA, 19 nt, Homo sapiens
  misc_RNA (1)...(19): siRNA sense strand
ggauauuaaugaagcagau

SEQ ID NO: 2340233 - RNA, 19 nt, Homo sapiens
  misc_RNA (1)...(19): siRNA sense strand
uaacaaugucaguggagua

SEQ ID NO: 2340234 - RNA, 19 nt, Homo sapiens
  misc_RNA (1)...(19): siRNA sense strand
gggaaauuggugaagagaa

SEQ ID NO: 2340235 - RNA, 19 nt, Homo sapiens
  misc_RNA (1)...(19): siRNA sense strand
uaaagaaaguaguggagga

SEQ ID NO: 2340236 - RNA, 19 nt, Homo sapiens
  misc_RNA (1)...(19): siRNA sense strand
aggagaagcagcagaucaa

SEQ ID NO: 2340237 - RNA, 19 nt, Homo sapiens
  misc_RNA (1)...(19): siRNA sense strand
cgucggagucggagucaua

SEQ ID NO: 2340238 - RNA, 19 nt, Homo sapiens
  misc_RNA (1)...(19): siRNA sense strand
cggaugaagaggaagaaga

SEQ ID NO: 2340239 - RNA, 19 nt, Homo sapiens
  misc_RNA (1)...(19): siRNA sense strand
cgaccaacaucgagcagau

SEQ ID NO: 2340240 - RNA, 19 nt, Homo sapiens
  misc_RNA (1)...(19): siRNA sense strand
ugaaguuguuccagagaga

SEQ ID NO: 2340241 - RNA, 19 nt, Homo sapiens
  misc_RNA (1)...(19): siRNA sense strand
gaaucucguucuagggcaa

SEQ ID NO: 2340242 - RNA, 19 nt, Homo sapiens
  misc_RNA (1)...(19): siRNA sense strand
gaguaaagaagaugaugau

SEQ ID NO: 2340243 - RNA, 19 nt, Homo sapiens
  misc_RNA (1)...(19): siRNA sense strand
ggggagaaagagaagaaaa

SEQ ID NO: 2340244 - RNA, 19 nt, Homo sapiens
  misc_RNA (1)...(19): siRNA sense strand
guguuagagccuucagaaa

SEQ ID NO: 2340245 - RNA, 19 nt, Homo sapiens
  misc_RNA (1)...(19): siRNA sense strand
ccacaguugucgcaggaau

SEQ ID NO: 2340246 - RNA, 19 nt, Homo sapiens
  misc_RNA (1)...(19): siRNA sense strand
ggaaugaaggccagcugaa

SEQ ID NO: 2340247 - RNA, 19 nt, Homo sapiens
  misc_RNA (1)...(19): siRNA sense strand
cgaaguaagcguuccaaau

SEQ ID NO: 2340248 - RNA, 19 nt, Homo sapiens
  misc_RNA (1)...(19): siRNA sense strand
ugacaagaccgcaggaguu

SEQ ID NO: 2340249 - RNA, 19 nt, Homo sapiens
  misc_RNA (1)...(19): siRNA sense strand
cugaauggugaaacaaaua

SEQ ID NO: 2340250 - RNA, 19 nt, Homo sapiens
  misc_RNA (1)...(19): siRNA sense strand
cugcucagcccuaaagaaa

SEQ ID NO: 2340251 - RNA, 19 nt, Homo sapiens
  misc_RNA (1)...(19): siRNA sense strand
gcuauagaguccacaccaa

SEQ ID NO: 2340252 - RNA, 19 nt, Homo sapiens
  misc_RNA (1)...(19): siRNA sense strand
gagcacaucuccagagcca

SEQ ID NO: 2340253 - RNA, 19 nt, Homo sapiens
  misc_RNA (1)...(19): siRNA sense strand
caguaguagcagaagaaca

SEQ ID NO: 2340254 - RNA, 19 nt, Homo sapiens
  misc_RNA (1)...(19): siRNA sense strand
aguaguagcagaagaacau

SEQ ID NO: 2340255 - RNA, 19 nt, Homo sapiens
  misc_RNA (1)...(19): siRNA sense strand
cggauaguguuuauggaga

SEQ ID NO: 2340256 - RNA, 19 nt, Homo sapiens
  misc_RNA (1)...(19): siRNA sense strand
agaaauagugcagaagaua

SEQ ID NO: 2340257 - RNA, 19 nt, Homo sapiens
  misc_RNA (1)...(19): siRNA sense strand
agaugaagucugugcugaa

SEQ ID NO: 2340258 - RNA, 19 nt, Homo sapiens
  misc_RNA (1)...(19): siRNA sense strand
aggaagaagaucuguauca

SEQ ID NO: 2340259 - RNA, 19 nt, Homo sapiens
  misc_RNA (1)...(19): siRNA sense strand
agauuaaggcgaucaagaa

SEQ ID NO: 2340260 - RNA, 19 nt, Homo sapiens
  misc_RNA (1)...(19): siRNA sense strand
ccagcugaauggugaaaca

SEQ ID NO: 2340261 - RNA, 19 nt, Homo sapiens
  misc_RNA (1)...(19): siRNA sense strand
gcuaaagagauggaacaua

SEQ ID NO: 2340262 - RNA, 19 nt, Homo sapiens
  misc_RNA (1)...(19): siRNA sense strand
gagucuaccaaaugaagaa

SEQ ID NO: 2340263 - RNA, 19 nt, Homo sapiens
  misc_RNA (1)...(19): siRNA sense strand
gguggaacauccugggcau

SEQ ID NO: 2340264 - RNA, 19 nt, Homo sapiens
  misc_RNA (1)...(19): siRNA sense strand
agaucaaggucugugguaa

SEQ ID NO: 2340265 - RNA, 19 nt, Homo sapiens
  misc_RNA (1)...(19): siRNA sense strand
ggaugacaacgguggaaca

SEQ ID NO: 2340266 - RNA, 19 nt, Homo sapiens
  misc_RNA (1)...(19): siRNA sense strand
agauuuagugagaccguua

SEQ ID NO: 2340267 - RNA, 19 nt, Homo sapiens
  misc_RNA (1)...(19): siRNA sense strand
guuaaggacacucacgaaa

SEQ ID NO: 2340268 - RNA, 19 nt, Homo sapiens
  misc_RNA (1)...(19): siRNA sense strand
aucaaagucuagaggaaga

SEQ ID NO: 2340269 - RNA, 19 nt, Homo sapiens
  misc_RNA (1)...(19): siRNA sense strand
ucaaaagagaagcgcaaaa

SEQ ID NO: 2340270 - RNA, 19 nt, Homo sapiens
  misc_RNA (1)...(19): siRNA sense strand
gcuccagggauaaccgaaa

SEQ ID NO: 2340271 - RNA, 19 nt, Homo sapiens
  misc_RNA (1)...(19): siRNA sense strand
aggagcuacuauagaagaa

SEQ ID NO: 2340272 - RNA, 19 nt, Homo sapiens
  misc_RNA (1)...(19): siRNA sense strand
caucaacaacaauggauuu

SEQ ID NO: 2340273 - RNA, 19 nt, Homo sapiens
  misc_RNA (1)...(19): siRNA sense strand
uaucaaaagagaagcgcaa

SEQ ID NO: 2340274 - RNA, 19 nt, Homo sapiens
  misc_RNA (1)...(19): siRNA sense strand
aaauagugcagaagauaga

SEQ ID NO: 2340275 - RNA, 19 nt, Homo sapiens
  misc_RNA (1)...(19): siRNA sense strand
ugaugggaacauagauuua

SEQ ID NO: 2340276 - RNA, 19 nt, Homo sapiens
  misc_RNA (1)...(19): siRNA sense strand
cagaagaacaugaaguugu

SEQ ID NO: 2340277 - RNA, 19 nt, Homo sapiens
  misc_RNA (1)...(19): siRNA sense strand
ucaagacgcaggaggagaa

SEQ ID NO: 2340278 - RNA, 19 nt, Homo sapiens
  misc_RNA (1)...(19): siRNA sense strand
ggaacauaauacagugugu

SEQ ID NO: 2340279 - RNA, 19 nt, Homo sapiens
  misc_RNA (1)...(19): siRNA sense strand
gaucaagcuccagggauaa

SEQ ID NO: 2340280 - RNA, 19 nt, Homo sapiens
  misc_RNA (1)...(19): siRNA sense strand
acauguugccucagaagua

SEQ ID NO: 2340281 - RNA, 19 nt, Homo sapiens
  misc_RNA (1)...(19): siRNA sense strand
agaguaaagaagaugauga

SEQ ID NO: 2340282 - RNA, 19 nt, Homo sapiens
  misc_RNA (1)...(19): siRNA sense strand
ugcagaagauagaggaagu

SEQ ID NO: 2340283 - RNA, 19 nt, Homo sapiens
  misc_RNA (1)...(19): siRNA sense strand
agaaaguaguggaggagaa

SEQ ID NO: 2340284 - RNA, 19 nt, Homo sapiens
  misc_RNA (1)...(19): siRNA sense strand
agaucaaagucuagaggaa

SEQ ID NO: 2340285 - RNA, 19 nt, Homo sapiens
  misc_RNA (1)...(19): siRNA sense strand
acacauauacagaggcaua

SEQ ID NO: 2340286 - RNA, 19 nt, Homo sapiens
  misc_RNA (1)...(19): siRNA sense strand
agauccaagucuagggaaa

SEQ ID NO: 2340287 - RNA, 19 nt, Homo sapiens
  misc_RNA (1)...(19): siRNA sense strand
cgaaagugaacaugguaua

SEQ ID NO: 2340288 - RNA, 19 nt, Homo sapiens
  misc_RNA (1)...(19): siRNA sense strand
augaagaaauagugcagaa

SEQ ID NO: 2340289 - RNA, 19 nt, Homo sapiens
  misc_RNA (1)...(19): siRNA sense strand
uaguaaggauacagaagaa

SEQ ID NO: 2340290 - RNA, 19 nt, Homo sapiens
  misc_RNA (1)...(19): siRNA sense strand
aagaaauagugcagaagau

SEQ ID NO: 2340291 - RNA, 19 nt, Homo sapiens
  misc_RNA (1)...(19): siRNA sense strand
ggauauuaaugaagcagau

SEQ ID NO: 2340292 - RNA, 19 nt, Homo sapiens
  misc_RNA (1)...(19): siRNA sense strand
uaacaaugucaguggagua

SEQ ID NO: 2340293 - RNA, 19 nt, Homo sapiens
  misc_RNA (1)...(19): siRNA sense strand
gggaaauuggugaagagaa

SEQ ID NO: 2340294 - RNA, 19 nt, Homo sapiens
  misc_RNA (1)...(19): siRNA sense strand
uaaagaaaguaguggagga

SEQ ID NO: 2340295 - RNA, 19 nt, Homo sapiens
  misc_RNA (1)...(19): siRNA sense strand
aggagaagcagcagaucaa

SEQ ID NO: 2340296 - RNA, 19 nt, Homo sapiens
  misc_RNA (1)...(19): siRNA sense strand
cgucggagucggagucaua

SEQ ID NO: 2340297 - RNA, 19 nt, Homo sapiens
  misc_RNA (1)...(19): siRNA sense strand
cggaugaagaggaagaaga

SEQ ID NO: 2340298 - RNA, 19 nt, Homo sapiens
  misc_RNA (1)...(19): siRNA sense strand
cgaccaacaucgagcagau

SEQ ID NO: 2340299 - RNA, 19 nt, Homo sapiens
  misc_RNA (1)...(19): siRNA sense strand
ugaaguuguuccagagaga

SEQ ID NO: 2340300 - RNA, 19 nt, Homo sapiens
  misc_RNA (1)...(19): siRNA sense strand
gaaucucguucuagggcaa

SEQ ID NO: 2340301 - RNA, 19 nt, Homo sapiens
  misc_RNA (1)...(19): siRNA sense strand
gaguaaagaagaugaugau

SEQ ID NO: 2340302 - RNA, 19 nt, Homo sapiens
  misc_RNA (1)...(19): siRNA sense strand
ggggagaaagagaagaaaa

SEQ ID NO: 2340303 - RNA, 19 nt, Homo sapiens
  misc_RNA (1)...(19): siRNA sense strand
guguuagagccuucagaaa

SEQ ID NO: 2340304 - RNA, 19 nt, Homo sapiens
  misc_RNA (1)...(19): siRNA sense strand
ccacaguugucgcaggaau

SEQ ID NO: 2340305 - RNA, 19 nt, Homo sapiens
  misc_RNA (1)...(19): siRNA sense strand
ggaaugaaggccagcugaa

SEQ ID NO: 2340306 - RNA, 19 nt, Homo sapiens
  misc_RNA (1)...(19): siRNA sense strand
cgaaguaagcguuccaaau

SEQ ID NO: 2340307 - RNA, 19 nt, Homo sapiens
  misc_RNA (1)...(19): siRNA sense strand
ugacaagaccgcaggaguu

SEQ ID NO: 2340308 - RNA, 19 nt, Homo sapiens
  misc_RNA (1)...(19): siRNA sense strand
cugaauggugaaacaaaua

SEQ ID NO: 2340309 - RNA, 19 nt, Homo sapiens
  misc_RNA (1)...(19): siRNA sense strand
cugcucagcccuaaagaaa

SEQ ID NO: 2340310 - RNA, 19 nt, Homo sapiens
  misc_RNA (1)...(19): siRNA sense strand
gcuauagaguccacaccaa

SEQ ID NO: 2340311 - RNA, 19 nt, Homo sapiens
  misc_RNA (1)...(19): siRNA sense strand
gagcacaucuccagagcca

SEQ ID NO: 2340312 - RNA, 19 nt, Homo sapiens
  misc_RNA (1)...(19): siRNA sense strand
caguaguagcagaagaaca

SEQ ID NO: 2340313 - RNA, 19 nt, Homo sapiens
  misc_RNA (1)...(19): siRNA sense strand
aguaguagcagaagaacau

SEQ ID NO: 2340314 - RNA, 19 nt, Homo sapiens
  misc_RNA (1)...(19): siRNA sense strand
cggauaguguuuauggaga

SEQ ID NO: 2340315 - RNA, 19 nt, Homo sapiens
  misc_RNA (1)...(19): siRNA sense strand
agaaauagugcagaagaua

SEQ ID NO: 2340316 - RNA, 19 nt, Homo sapiens
  misc_RNA (1)...(19): siRNA sense strand
agaugaagucugugcugaa

SEQ ID NO: 2340317 - RNA, 19 nt, Homo sapiens
  misc_RNA (1)...(19): siRNA sense strand
aggaagaagaucuguauca

SEQ ID NO: 2340318 - RNA, 19 nt, Homo sapiens
  misc_RNA (1)...(19): siRNA sense strand
agauuaaggcgaucaagaa

SEQ ID NO: 2340319 - RNA, 19 nt, Homo sapiens
  misc_RNA (1)...(19): siRNA sense strand
ccagcugaauggugaaaca

SEQ ID NO: 2340320 - RNA, 19 nt, Homo sapiens
  misc_RNA (1)...(19): siRNA sense strand
gcuaaagagauggaacaua

SEQ ID NO: 2340321 - RNA, 19 nt, Homo sapiens
  misc_RNA (1)...(19): siRNA sense strand
gagucuaccaaaugaagaa

SEQ ID NO: 2340322 - RNA, 19 nt, Homo sapiens
  misc_RNA (1)...(19): siRNA sense strand
gguggaacauccugggcau

SEQ ID NO: 2340323 - RNA, 19 nt, Homo sapiens
  misc_RNA (1)...(19): siRNA sense strand
agaucaaggucugugguaa

SEQ ID NO: 2340324 - RNA, 19 nt, Homo sapiens
  misc_RNA (1)...(19): siRNA sense strand
ggaugacaacgguggaaca

SEQ ID NO: 2340325 - RNA, 19 nt, Homo sapiens
  misc_RNA (1)...(19): siRNA sense strand
agauuuagugagaccguua

SEQ ID NO: 2340326 - RNA, 19 nt, Homo sapiens
  misc_RNA (1)...(19): siRNA sense strand
guuaaggacacucacgaaa

SEQ ID NO: 2340327 - RNA, 19 nt, Homo sapiens
  misc_RNA (1)...(19): siRNA sense strand
aucaaagucuagaggaaga

SEQ ID NO: 2340328 - RNA, 19 nt, Homo sapiens
  misc_RNA (1)...(19): siRNA sense strand
ucaaaagagaagcgcaaaa

SEQ ID NO: 2340329 - RNA, 19 nt, Homo sapiens
  misc_RNA (1)...(19): siRNA sense strand
gcuccagggauaaccgaaa

SEQ ID NO: 2340330 - RNA, 19 nt, Homo sapiens
  misc_RNA (1)...(19): siRNA sense strand
aggagcuacuauagaagaa

SEQ ID NO: 2340331 - RNA, 19 nt, Homo sapiens
  misc_RNA (1)...(19): siRNA sense strand
caucaacaacaauggauuu

SEQ ID NO: 2340332 - RNA, 19 nt, Homo sapiens
  misc_RNA (1)...(19): siRNA sense strand
uaucaaaagagaagcgcaa

SEQ ID NO: 2340333 - RNA, 19 nt, Homo sapiens
  misc_RNA (1)...(19): siRNA sense strand
aaauagugcagaagauaga

SEQ ID NO: 2340334 - RNA, 19 nt, Homo sapiens
  misc_RNA (1)...(19): siRNA sense strand
ugaugggaacauagauuua

SEQ ID NO: 2340335 - RNA, 19 nt, Homo sapiens
  misc_RNA (1)...(19): siRNA sense strand
cagaagaacaugaaguugu

SEQ ID NO: 2340336 - RNA, 19 nt, Homo sapiens
  misc_RNA (1)...(19): siRNA sense strand
ucaagacgcaggaggagaa

SEQ ID NO: 2340337 - RNA, 19 nt, Homo sapiens
  misc_RNA (1)...(19): siRNA sense strand
ggaacauaauacagugugu

SEQ ID NO: 2340338 - RNA, 19 nt, Homo sapiens
  misc_RNA (1)...(19): siRNA sense strand
gaucaagcuccagggauaa

SEQ ID NO: 2340339 - RNA, 19 nt, Homo sapiens
  misc_RNA (1)...(19): siRNA sense strand
acauguugccucagaagua

SEQ ID NO: 2340340 - RNA, 19 nt, Homo sapiens
  misc_RNA (1)...(19): siRNA sense strand
agaguaaagaagaugauga

SEQ ID NO: 2340341 - RNA, 19 nt, Homo sapiens
  misc_RNA (1)...(19): siRNA sense strand
ugcagaagauagaggaagu

SEQ ID NO: 2340342 - RNA, 19 nt, Homo sapiens
  misc_RNA (1)...(19): siRNA sense strand
agaaaguaguggaggagaa

SEQ ID NO: 2340343 - RNA, 19 nt, Homo sapiens
  misc_RNA (1)...(19): siRNA sense strand
agaucaaagucuagaggaa

SEQ ID NO: 2340344 - RNA, 19 nt, Homo sapiens
  misc_RNA (1)...(19): siRNA sense strand
acacauauacagaggcaua

SEQ ID NO: 2340345 - RNA, 19 nt, Homo sapiens
  misc_RNA (1)...(19): siRNA sense strand
agauccaagucuagggaaa

SEQ ID NO: 2340346 - RNA, 19 nt, Homo sapiens
  misc_RNA (1)...(19): siRNA sense strand
cgaaagugaacaugguaua

SEQ ID NO: 2340347 - RNA, 19 nt, Homo sapiens
  misc_RNA (1)...(19): siRNA sense strand
augaagaaauagugcagaa

SEQ ID NO: 2340348 - RNA, 19 nt, Homo sapiens
  misc_RNA (1)...(19): siRNA sense strand
uaguaaggauacagaagaa

SEQ ID NO: 2340349 - RNA, 19 nt, Homo sapiens
  misc_RNA (1)...(19): siRNA sense strand
aagaaauagugcagaagau

SEQ ID NO: 2340350 - RNA, 19 nt, Homo sapiens
  misc_RNA (1)...(19): siRNA sense strand
ggauauuaaugaagcagau

SEQ ID NO: 2340351 - RNA, 19 nt, Homo sapiens
  misc_RNA (1)...(19): siRNA sense strand
uaacaaugucaguggagua

SEQ ID NO: 2340352 - RNA, 19 nt, Homo sapiens
  misc_RNA (1)...(19): siRNA sense strand
gggaaauuggugaagagaa

SEQ ID NO: 2340353 - RNA, 19 nt, Homo sapiens
  misc_RNA (1)...(19): siRNA sense strand
uaaagaaaguaguggagga

SEQ ID NO: 2340354 - RNA, 19 nt, Homo sapiens
  misc_RNA (1)...(19): siRNA sense strand
aggagaagcagcagaucaa

SEQ ID NO: 2340355 - RNA, 19 nt, Homo sapiens
  misc_RNA (1)...(19): siRNA sense strand
cgucggagucggagucaua

SEQ ID NO: 2340356 - RNA, 19 nt, Homo sapiens
  misc_RNA (1)...(19): siRNA sense strand
cggaugaagaggaagaaga

SEQ ID NO: 2340357 - RNA, 19 nt, Homo sapiens
  misc_RNA (1)...(19): siRNA sense strand
cgaccaacaucgagcagau

SEQ ID NO: 2340358 - RNA, 19 nt, Homo sapiens
  misc_RNA (1)...(19): siRNA sense strand
ugaaguuguuccagagaga

SEQ ID NO: 2340359 - RNA, 19 nt, Homo sapiens
  misc_RNA (1)...(19): siRNA sense strand
gaaucucguucuagggcaa

SEQ ID NO: 2340360 - RNA, 19 nt, Homo sapiens
  misc_RNA (1)...(19): siRNA sense strand
gaguaaagaagaugaugau

SEQ ID NO: 2340361 - RNA, 19 nt, Homo sapiens
  misc_RNA (1)...(19): siRNA sense strand
ggggagaaagagaagaaaa

SEQ ID NO: 2340362 - RNA, 19 nt, Homo sapiens
  misc_RNA (1)...(19): siRNA sense strand
guguuagagccuucagaaa

SEQ ID NO: 2340363 - RNA, 19 nt, Homo sapiens
  misc_RNA (1)...(19): siRNA sense strand
ccacaguugucgcaggaau

SEQ ID NO: 2340364 - RNA, 19 nt, Homo sapiens
  misc_RNA (1)...(19): siRNA sense strand
ggaaugaaggccagcugaa

SEQ ID NO: 2340365 - RNA, 19 nt, Homo sapiens
  misc_RNA (1)...(19): siRNA sense strand
cgaaguaagcguuccaaau

SEQ ID NO: 2340366 - RNA, 19 nt, Homo sapiens
  misc_RNA (1)...(19): siRNA sense strand
ugacaagaccgcaggaguu

SEQ ID NO: 2340367 - RNA, 19 nt, Homo sapiens
  misc_RNA (1)...(19): siRNA sense strand
cugaauggugaaacaaaua

SEQ ID NO: 2340368 - RNA, 19 nt, Homo sapiens
  misc_RNA (1)...(19): siRNA sense strand
cugcucagcccuaaagaaa

SEQ ID NO: 2340369 - RNA, 19 nt, Homo sapiens
  misc_RNA (1)...(19): siRNA sense strand
gcuauagaguccacaccaa

SEQ ID NO: 2340370 - RNA, 19 nt, Homo sapiens
  misc_RNA (1)...(19): siRNA sense strand
gagcacaucuccagagcca

SEQ ID NO: 2340371 - RNA, 19 nt, Homo sapiens
  misc_RNA (1)...(19): siRNA sense strand
caguaguagcagaagaaca

SEQ ID NO: 2340372 - RNA, 19 nt, Homo sapiens
  misc_RNA (1)...(19): siRNA sense strand
aguaguagcagaagaacau

SEQ ID NO: 2340373 - RNA, 19 nt, Homo sapiens
  misc_RNA (1)...(19): siRNA sense strand
cggauaguguuuauggaga

SEQ ID NO: 2340374 - RNA, 19 nt, Homo sapiens
  misc_RNA (1)...(19): siRNA sense strand
agaaauagugcagaagaua

SEQ ID NO: 2340375 - RNA, 19 nt, Homo sapiens
  misc_RNA (1)...(19): siRNA sense strand
agaugaagucugugcugaa

SEQ ID NO: 2340376 - RNA, 19 nt, Homo sapiens
  misc_RNA (1)...(19): siRNA sense strand
aggaagaagaucuguauca

SEQ ID NO: 2340377 - RNA, 19 nt, Homo sapiens
  misc_RNA (1)...(19): siRNA sense strand
agauuaaggcgaucaagaa

SEQ ID NO: 2340378 - RNA, 19 nt, Homo sapiens
  misc_RNA (1)...(19): siRNA sense strand
ccagcugaauggugaaaca

SEQ ID NO: 2340379 - RNA, 19 nt, Homo sapiens
  misc_RNA (1)...(19): siRNA sense strand
gcuaaagagauggaacaua

SEQ ID NO: 2340380 - RNA, 19 nt, Homo sapiens
  misc_RNA (1)...(19): siRNA sense strand
gagucuaccaaaugaagaa

SEQ ID NO: 2340381 - RNA, 19 nt, Homo sapiens
  misc_RNA (1)...(19): siRNA sense strand
gguggaacauccugggcau

SEQ ID NO: 2340382 - RNA, 19 nt, Homo sapiens
  misc_RNA (1)...(19): siRNA sense strand
agaucaaggucugugguaa

SEQ ID NO: 2340383 - RNA, 19 nt, Homo sapiens
  misc_RNA (1)...(19): siRNA sense strand
ggaugacaacgguggaaca

SEQ ID NO: 2340384 - RNA, 19 nt, Homo sapiens
  misc_RNA (1)...(19): siRNA sense strand
agauuuagugagaccguua

SEQ ID NO: 2340385 - RNA, 19 nt, Homo sapiens
  misc_RNA (1)...(19): siRNA sense strand
guuaaggacacucacgaaa

SEQ ID NO: 2340386 - RNA, 19 nt, Homo sapiens
  misc_RNA (1)...(19): siRNA sense strand
aucaaagucuagaggaaga

SEQ ID NO: 2340387 - RNA, 19 nt, Homo sapiens
  misc_RNA (1)...(19): siRNA sense strand
ucaaaagagaagcgcaaaa

SEQ ID NO: 2340388 - RNA, 19 nt, Homo sapiens
  misc_RNA (1)...(19): siRNA sense strand
gcuccagggauaaccgaaa

SEQ ID NO: 2340389 - RNA, 19 nt, Homo sapiens
  misc_RNA (1)...(19): siRNA sense strand
aggagcuacuauagaagaa

SEQ ID NO: 2340390 - RNA, 19 nt, Homo sapiens
  misc_RNA (1)...(19): siRNA sense strand
caucaacaacaauggauuu

SEQ ID NO: 2340391 - RNA, 19 nt, Homo sapiens
  misc_RNA (1)...(19): siRNA sense strand
uaucaaaagagaagcgcaa

SEQ ID NO: 2340392 - RNA, 19 nt, Homo sapiens
  misc_RNA (1)...(19): siRNA sense strand
aaauagugcagaagauaga

SEQ ID NO: 2340393 - RNA, 19 nt, Homo sapiens
  misc_RNA (1)...(19): siRNA sense strand
ugaugggaacauagauuua

SEQ ID NO: 2340394 - RNA, 19 nt, Homo sapiens
  misc_RNA (1)...(19): siRNA sense strand
cagaagaacaugaaguugu

SEQ ID NO: 2340395 - RNA, 19 nt, Homo sapiens
  misc_RNA (1)...(19): siRNA sense strand
ucaagacgcaggaggagaa

SEQ ID NO: 2340396 - RNA, 19 nt, Homo sapiens
  misc_RNA (1)...(19): siRNA sense strand
ggaacauaauacagugugu

SEQ ID NO: 2340397 - RNA, 19 nt, Homo sapiens
  misc_RNA (1)...(19): siRNA sense strand
gaucaagcuccagggauaa

SEQ ID NO: 2340398 - RNA, 19 nt, Homo sapiens
  misc_RNA (1)...(19): siRNA sense strand
acauguugccucagaagua

SEQ ID NO: 2340399 - RNA, 19 nt, Homo sapiens
  misc_RNA (1)...(19): siRNA sense strand
agaguaaagaagaugauga

SEQ ID NO: 2340400 - RNA, 19 nt, Homo sapiens
  misc_RNA (1)...(19): siRNA sense strand
ugcagaagauagaggaagu

SEQ ID NO: 2340401 - RNA, 19 nt, Homo sapiens
  misc_RNA (1)...(19): siRNA sense strand
ugguaaagaaacagcuuaa

SEQ ID NO: 2340402 - RNA, 19 nt, Homo sapiens
  misc_RNA (1)...(19): siRNA sense strand
ccaugaaagaauugcacaa

SEQ ID NO: 2340403 - RNA, 19 nt, Homo sapiens
  misc_RNA (1)...(19): siRNA sense strand
ccgaagaggaagagcggga

SEQ ID NO: 2340404 - RNA, 19 nt, Homo sapiens
  misc_RNA (1)...(19): siRNA sense strand
uguuagagaagaugagaau

SEQ ID NO: 2340405 - RNA, 19 nt, Homo sapiens
  misc_RNA (1)...(19): siRNA sense strand
ugauaaugagccugguaaa

SEQ ID NO: 2340406 - RNA, 19 nt, Homo sapiens
  misc_RNA (1)...(19): siRNA sense strand
ggugaagaugaaauggaua

SEQ ID NO: 2340407 - RNA, 19 nt, Homo sapiens
  misc_RNA (1)...(19): siRNA sense strand
ccgccuuguuagagaagau

SEQ ID NO: 2340408 - RNA, 19 nt, Homo sapiens
  misc_RNA (1)...(19): siRNA sense strand
cgaugagaaacgccggaua

SEQ ID NO: 2340409 - RNA, 19 nt, Homo sapiens
  misc_RNA (1)...(19): siRNA sense strand
cuggagaacaggaugaaga

SEQ ID NO: 2340410 - RNA, 19 nt, Homo sapiens
  misc_RNA (1)...(19): siRNA sense strand
agauuaagacagaacucaa

SEQ ID NO: 2340411 - RNA, 19 nt, Homo sapiens
  misc_RNA (1)...(19): siRNA sense strand
aggacgaggaggaagaaaa

SEQ ID NO: 2340412 - RNA, 19 nt, Homo sapiens
  misc_RNA (1)...(19): siRNA sense strand
auggauauggaaagugaaa

SEQ ID NO: 2340413 - RNA, 19 nt, Homo sapiens
  misc_RNA (1)...(19): siRNA sense strand
aggagaaauuccagaugca

SEQ ID NO: 2340414 - RNA, 19 nt, Homo sapiens
  misc_RNA (1)...(19): siRNA sense strand
augaagaugacgaugagaa

SEQ ID NO: 2340415 - RNA, 19 nt, Homo sapiens
  misc_RNA (1)...(19): siRNA sense strand
ggaggaagaaaaugaagaa

SEQ ID NO: 2340416 - RNA, 19 nt, Homo sapiens
  misc_RNA (1)...(19): siRNA sense strand
caucagugaacauggugaa

SEQ ID NO: 2340417 - RNA, 19 nt, Homo sapiens
  misc_RNA (1)...(19): siRNA sense strand
aagaaacagcuuaaagaca

SEQ ID NO: 2340418 - RNA, 19 nt, Homo sapiens
  misc_RNA (1)...(19): siRNA sense strand
gugaauauguacuaccaga

SEQ ID NO: 2340419 - RNA, 19 nt, Homo sapiens
  misc_RNA (1)...(19): siRNA sense strand
gguauuggugaacgguaua

SEQ ID NO: 2340420 - RNA, 19 nt, Homo sapiens
  misc_RNA (1)...(19): siRNA sense strand
ggacgaggaggaagaaaau

SEQ ID NO: 2340421 - RNA, 19 nt, Homo sapiens
  misc_RNA (1)...(19): siRNA sense strand
gccaaagacugguggagcu

SEQ ID NO: 2340422 - RNA, 19 nt, Homo sapiens
  misc_RNA (1)...(19): siRNA sense strand
aggaagagcgggaacgcga

SEQ ID NO: 2340423 - RNA, 19 nt, Homo sapiens
  misc_RNA (1)...(19): siRNA sense strand
aagaaaagucacaaagaca

SEQ ID NO: 2340424 - RNA, 19 nt, Homo sapiens
  misc_RNA (1)...(19): siRNA sense strand
ugaaagauuagaagggucu

SEQ ID NO: 2340425 - RNA, 19 nt, Homo sapiens
  misc_RNA (1)...(19): siRNA sense strand
gggaacaggagcagauaag

SEQ ID NO: 2340426 - RNA, 19 nt, Homo sapiens
  misc_RNA (1)...(19): siRNA sense strand
aaucaagaagauggaguua

SEQ ID NO: 2340427 - RNA, 19 nt, Homo sapiens
  misc_RNA (1)...(19): siRNA sense strand
acucaucagcugaaaguga

SEQ ID NO: 2340428 - RNA, 19 nt, Homo sapiens
  misc_RNA (1)...(19): siRNA sense strand
ucgacagcagcaugagaaa

SEQ ID NO: 2340429 - RNA, 19 nt, Homo sapiens
  misc_RNA (1)...(19): siRNA sense strand
ggaacgacuccgaagagga

SEQ ID NO: 2340430 - RNA, 19 nt, Homo sapiens
  misc_RNA (1)...(19): siRNA sense strand
gggaacgcgaugaggagca

SEQ ID NO: 2340431 - RNA, 19 nt, Homo sapiens
  misc_RNA (1)...(19): siRNA sense strand
agaaaagucacaaagacaa

SEQ ID NO: 2340432 - RNA, 19 nt, Homo sapiens
  misc_RNA (1)...(19): siRNA sense strand
aaaucaagaagauggaguu

SEQ ID NO: 2340433 - RNA, 19 nt, Homo sapiens
  misc_RNA (1)...(19): siRNA sense strand
aguuaucaucagugaacau

SEQ ID NO: 2340434 - RNA, 19 nt, Homo sapiens
  misc_RNA (1)...(19): siRNA sense strand
augaugaagaugacgauga

SEQ ID NO: 2340435 - RNA, 19 nt, Homo sapiens
  misc_RNA (1)...(19): siRNA sense strand
cuuaaagacagguuggacu

SEQ ID NO: 2340436 - RNA, 19 nt, Homo sapiens
  misc_RNA (1)...(19): siRNA sense strand
auacaugcugcaaggaaaa

SEQ ID NO: 2340437 - RNA, 19 nt, Homo sapiens
  misc_RNA (1)...(19): siRNA sense strand
aaacaaaucgacagcagca

SEQ ID NO: 2340438 - RNA, 19 nt, Homo sapiens
  misc_RNA (1)...(19): siRNA sense strand
ugguaaagaaacagcuuaa

SEQ ID NO: 2340439 - RNA, 19 nt, Homo sapiens
  misc_RNA (1)...(19): siRNA sense strand
ccaugaaagaauugcacaa

SEQ ID NO: 2340440 - RNA, 19 nt, Homo sapiens
  misc_RNA (1)...(19): siRNA sense strand
ccgaagaggaagagcggga

SEQ ID NO: 2340441 - RNA, 19 nt, Homo sapiens
  misc_RNA (1)...(19): siRNA sense strand
uguuagagaagaugagaau

SEQ ID NO: 2340442 - RNA, 19 nt, Homo sapiens
  misc_RNA (1)...(19): siRNA sense strand
ugauaaugagccugguaaa

SEQ ID NO: 2340443 - RNA, 19 nt, Homo sapiens
  misc_RNA (1)...(19): siRNA sense strand
ggugaagaugaaauggaua

SEQ ID NO: 2340444 - RNA, 19 nt, Homo sapiens
  misc_RNA (1)...(19): siRNA sense strand
ccgccuuguuagagaagau

SEQ ID NO: 2340445 - RNA, 19 nt, Homo sapiens
  misc_RNA (1)...(19): siRNA sense strand
cgaugagaaacgccggaua

SEQ ID NO: 2340446 - RNA, 19 nt, Homo sapiens
  misc_RNA (1)...(19): siRNA sense strand
cuggagaacaggaugaaga

SEQ ID NO: 2340447 - RNA, 19 nt, Homo sapiens
  misc_RNA (1)...(19): siRNA sense strand
agauuaagacagaacucaa

SEQ ID NO: 2340448 - RNA, 19 nt, Homo sapiens
  misc_RNA (1)...(19): siRNA sense strand
aggacgaggaggaagaaaa

SEQ ID NO: 2340449 - RNA, 19 nt, Homo sapiens
  misc_RNA (1)...(19): siRNA sense strand
auggauauggaaagugaaa

SEQ ID NO: 2340450 - RNA, 19 nt, Homo sapiens
  misc_RNA (1)...(19): siRNA sense strand
aggagaaauuccagaugca

SEQ ID NO: 2340451 - RNA, 19 nt, Homo sapiens
  misc_RNA (1)...(19): siRNA sense strand
augaagaugacgaugagaa

SEQ ID NO: 2340452 - RNA, 19 nt, Homo sapiens
  misc_RNA (1)...(19): siRNA sense strand
ggaggaagaaaaugaagaa

SEQ ID NO: 2340453 - RNA, 19 nt, Homo sapiens
  misc_RNA (1)...(19): siRNA sense strand
caucagugaacauggugaa

SEQ ID NO: 2340454 - RNA, 19 nt, Homo sapiens
  misc_RNA (1)...(19): siRNA sense strand
aagaaacagcuuaaagaca

SEQ ID NO: 2340455 - RNA, 19 nt, Homo sapiens
  misc_RNA (1)...(19): siRNA sense strand
gugaauauguacuaccaga

SEQ ID NO: 2340456 - RNA, 19 nt, Homo sapiens
  misc_RNA (1)...(19): siRNA sense strand
gguauuggugaacgguaua

SEQ ID NO: 2340457 - RNA, 19 nt, Homo sapiens
  misc_RNA (1)...(19): siRNA sense strand
ggacgaggaggaagaaaau

SEQ ID NO: 2340458 - RNA, 19 nt, Homo sapiens
  misc_RNA (1)...(19): siRNA sense strand
gccaaagacugguggagcu

SEQ ID NO: 2340459 - RNA, 19 nt, Homo sapiens
  misc_RNA (1)...(19): siRNA sense strand
aggaagagcgggaacgcga

SEQ ID NO: 2340460 - RNA, 19 nt, Homo sapiens
  misc_RNA (1)...(19): siRNA sense strand
aagaaaagucacaaagaca

SEQ ID NO: 2340461 - RNA, 19 nt, Homo sapiens
  misc_RNA (1)...(19): siRNA sense strand
ugaaagauuagaagggucu

SEQ ID NO: 2340462 - RNA, 19 nt, Homo sapiens
  misc_RNA (1)...(19): siRNA sense strand
gggaacaggagcagauaag

SEQ ID NO: 2340463 - RNA, 19 nt, Homo sapiens
  misc_RNA (1)...(19): siRNA sense strand
aaucaagaagauggaguua

SEQ ID NO: 2340464 - RNA, 19 nt, Homo sapiens
  misc_RNA (1)...(19): siRNA sense strand
acucaucagcugaaaguga

SEQ ID NO: 2340465 - RNA, 19 nt, Homo sapiens
  misc_RNA (1)...(19): siRNA sense strand
ucgacagcagcaugagaaa

SEQ ID NO: 2340466 - RNA, 19 nt, Homo sapiens
  misc_RNA (1)...(19): siRNA sense strand
ggaacgacuccgaagagga

SEQ ID NO: 2340467 - RNA, 19 nt, Homo sapiens
  misc_RNA (1)...(19): siRNA sense strand
gggaacgcgaugaggagca

SEQ ID NO: 2340468 - RNA, 19 nt, Homo sapiens
  misc_RNA (1)...(19): siRNA sense strand
agaaaagucacaaagacaa

SEQ ID NO: 2340469 - RNA, 19 nt, Homo sapiens
  misc_RNA (1)...(19): siRNA sense strand
aaaucaagaagauggaguu

SEQ ID NO: 2340470 - RNA, 19 nt, Homo sapiens
  misc_RNA (1)...(19): siRNA sense strand
aguuaucaucagugaacau

SEQ ID NO: 2340471 - RNA, 19 nt, Homo sapiens
  misc_RNA (1)...(19): siRNA sense strand
augaugaagaugacgauga

SEQ ID NO: 2340472 - RNA, 19 nt, Homo sapiens
  misc_RNA (1)...(19): siRNA sense strand
cuuaaagacagguuggacu

SEQ ID NO: 2340473 - RNA, 19 nt, Homo sapiens
  misc_RNA (1)...(19): siRNA sense strand
auacaugcugcaaggaaaa

SEQ ID NO: 2340474 - RNA, 19 nt, Homo sapiens
  misc_RNA (1)...(19): siRNA sense strand
aaacaaaucgacagcagca

SEQ ID NO: 2340475 - RNA, 19 nt, Homo sapiens
  misc_RNA (1)...(19): siRNA sense strand
ugguaaagaaacagcuuaa

SEQ ID NO: 2340476 - RNA, 19 nt, Homo sapiens
  misc_RNA (1)...(19): siRNA sense strand
ccaugaaagaauugcacaa

SEQ ID NO: 2340477 - RNA, 19 nt, Homo sapiens
  misc_RNA (1)...(19): siRNA sense strand
ccgaagaggaagagcggga

SEQ ID NO: 2340478 - RNA, 19 nt, Homo sapiens
  misc_RNA (1)...(19): siRNA sense strand
uguuagagaagaugagaau

SEQ ID NO: 2340479 - RNA, 19 nt, Homo sapiens
  misc_RNA (1)...(19): siRNA sense strand
ugauaaugagccugguaaa

SEQ ID NO: 2340480 - RNA, 19 nt, Homo sapiens
  misc_RNA (1)...(19): siRNA sense strand
ggugaagaugaaauggaua

SEQ ID NO: 2340481 - RNA, 19 nt, Homo sapiens
  misc_RNA (1)...(19): siRNA sense strand
ccgccuuguuagagaagau

SEQ ID NO: 2340482 - RNA, 19 nt, Homo sapiens
  misc_RNA (1)...(19): siRNA sense strand
cgaugagaaacgccggaua

SEQ ID NO: 2340483 - RNA, 19 nt, Homo sapiens
  misc_RNA (1)...(19): siRNA sense strand
cuggagaacaggaugaaga

SEQ ID NO: 2340484 - RNA, 19 nt, Homo sapiens
  misc_RNA (1)...(19): siRNA sense strand
agauuaagacagaacucaa

SEQ ID NO: 2340485 - RNA, 19 nt, Homo sapiens
  misc_RNA (1)...(19): siRNA sense strand
aggacgaggaggaagaaaa

SEQ ID NO: 2340486 - RNA, 19 nt, Homo sapiens
  misc_RNA (1)...(19): siRNA sense strand
auggauauggaaagugaaa

SEQ ID NO: 2340487 - RNA, 19 nt, Homo sapiens
  misc_RNA (1)...(19): siRNA sense strand
aggagaaauuccagaugca

SEQ ID NO: 2340488 - RNA, 19 nt, Homo sapiens
  misc_RNA (1)...(19): siRNA sense strand
augaagaugacgaugagaa

SEQ ID NO: 2340489 - RNA, 19 nt, Homo sapiens
  misc_RNA (1)...(19): siRNA sense strand
ggaggaagaaaaugaagaa

SEQ ID NO: 2340490 - RNA, 19 nt, Homo sapiens
  misc_RNA (1)...(19): siRNA sense strand
caucagugaacauggugaa

SEQ ID NO: 2340491 - RNA, 19 nt, Homo sapiens
  misc_RNA (1)...(19): siRNA sense strand
aagaaacagcuuaaagaca

SEQ ID NO: 2340492 - RNA, 19 nt, Homo sapiens
  misc_RNA (1)...(19): siRNA sense strand
gugaauauguacuaccaga

SEQ ID NO: 2340493 - RNA, 19 nt, Homo sapiens
  misc_RNA (1)...(19): siRNA sense strand
gguauuggugaacgguaua

SEQ ID NO: 2340494 - RNA, 19 nt, Homo sapiens
  misc_RNA (1)...(19): siRNA sense strand
ggacgaggaggaagaaaau

SEQ ID NO: 2340495 - RNA, 19 nt, Homo sapiens
  misc_RNA (1)...(19): siRNA sense strand
gccaaagacugguggagcu

SEQ ID NO: 2340496 - RNA, 19 nt, Homo sapiens
  misc_RNA (1)...(19): siRNA sense strand
aggaagagcgggaacgcga

SEQ ID NO: 2340497 - RNA, 19 nt, Homo sapiens
  misc_RNA (1)...(19): siRNA sense strand
aagaaaagucacaaagaca

SEQ ID NO: 2340498 - RNA, 19 nt, Homo sapiens
  misc_RNA (1)...(19): siRNA sense strand
ugaaagauuagaagggucu

SEQ ID NO: 2340499 - RNA, 19 nt, Homo sapiens
  misc_RNA (1)...(19): siRNA sense strand
gggaacaggagcagauaag

SEQ ID NO: 2340500 - RNA, 19 nt, Homo sapiens
  misc_RNA (1)...(19): siRNA sense strand
aaucaagaagauggaguua

SEQ ID NO: 2340501 - RNA, 19 nt, Homo sapiens
  misc_RNA (1)...(19): siRNA sense strand
acucaucagcugaaaguga

SEQ ID NO: 2340502 - RNA, 19 nt, Homo sapiens
  misc_RNA (1)...(19): siRNA sense strand
ucgacagcagcaugagaaa

SEQ ID NO: 2340503 - RNA, 19 nt, Homo sapiens
  misc_RNA (1)...(19): siRNA sense strand
ggaacgacuccgaagagga

SEQ ID NO: 2340504 - RNA, 19 nt, Homo sapiens
  misc_RNA (1)...(19): siRNA sense strand
gggaacgcgaugaggagca

SEQ ID NO: 2340505 - RNA, 19 nt, Homo sapiens
  misc_RNA (1)...(19): siRNA sense strand
agaaaagucacaaagacaa

SEQ ID NO: 2340506 - RNA, 19 nt, Homo sapiens
  misc_RNA (1)...(19): siRNA sense strand
aaaucaagaagauggaguu

SEQ ID NO: 2340507 - RNA, 19 nt, Homo sapiens
  misc_RNA (1)...(19): siRNA sense strand
aguuaucaucagugaacau

SEQ ID NO: 2340508 - RNA, 19 nt, Homo sapiens
  misc_RNA (1)...(19): siRNA sense strand
augaugaagaugacgauga

SEQ ID NO: 2340509 - RNA, 19 nt, Homo sapiens
  misc_RNA (1)...(19): siRNA sense strand
cuuaaagacagguuggacu

SEQ ID NO: 2340510 - RNA, 19 nt, Homo sapiens
  misc_RNA (1)...(19): siRNA sense strand
auacaugcugcaaggaaaa

SEQ ID NO: 2340511 - RNA, 19 nt, Homo sapiens
  misc_RNA (1)...(19): siRNA sense strand
aaacaaaucgacagcagca

SEQ ID NO: 2340512 - RNA, 19 nt, Homo sapiens
  misc_RNA (1)...(19): siRNA sense strand
ugguaaagaaacagcuuaa

SEQ ID NO: 2340513 - RNA, 19 nt, Homo sapiens
  misc_RNA (1)...(19): siRNA sense strand
ccaugaaagaauugcacaa

SEQ ID NO: 2340514 - RNA, 19 nt, Homo sapiens
  misc_RNA (1)...(19): siRNA sense strand
ccgaagaggaagagcggga

SEQ ID NO: 2340515 - RNA, 19 nt, Homo sapiens
  misc_RNA (1)...(19): siRNA sense strand
uguuagagaagaugagaau

SEQ ID NO: 2340516 - RNA, 19 nt, Homo sapiens
  misc_RNA (1)...(19): siRNA sense strand
ugauaaugagccugguaaa

SEQ ID NO: 2340517 - RNA, 19 nt, Homo sapiens
  misc_RNA (1)...(19): siRNA sense strand
ggugaagaugaaauggaua

SEQ ID NO: 2340518 - RNA, 19 nt, Homo sapiens
  misc_RNA (1)...(19): siRNA sense strand
ccgccuuguuagagaagau

SEQ ID NO: 2340519 - RNA, 19 nt, Homo sapiens
  misc_RNA (1)...(19): siRNA sense strand
cgaugagaaacgccggaua

SEQ ID NO: 2340520 - RNA, 19 nt, Homo sapiens
  misc_RNA (1)...(19): siRNA sense strand
cuggagaacaggaugaaga

SEQ ID NO: 2340521 - RNA, 19 nt, Homo sapiens
  misc_RNA (1)...(19): siRNA sense strand
agauuaagacagaacucaa

SEQ ID NO: 2340522 - RNA, 19 nt, Homo sapiens
  misc_RNA (1)...(19): siRNA sense strand
aggacgaggaggaagaaaa

SEQ ID NO: 2340523 - RNA, 19 nt, Homo sapiens
  misc_RNA (1)...(19): siRNA sense strand
auggauauggaaagugaaa

SEQ ID NO: 2340524 - RNA, 19 nt, Homo sapiens
  misc_RNA (1)...(19): siRNA sense strand
aggagaaauuccagaugca

SEQ ID NO: 2340525 - RNA, 19 nt, Homo sapiens
  misc_RNA (1)...(19): siRNA sense strand
augaagaugacgaugagaa

SEQ ID NO: 2340526 - RNA, 19 nt, Homo sapiens
  misc_RNA (1)...(19): siRNA sense strand
ggaggaagaaaaugaagaa

SEQ ID NO: 2340527 - RNA, 19 nt, Homo sapiens
  misc_RNA (1)...(19): siRNA sense strand
caucagugaacauggugaa

SEQ ID NO: 2340528 - RNA, 19 nt, Homo sapiens
  misc_RNA (1)...(19): siRNA sense strand
aagaaacagcuuaaagaca

SEQ ID NO: 2340529 - RNA, 19 nt, Homo sapiens
  misc_RNA (1)...(19): siRNA sense strand
gugaauauguacuaccaga

SEQ ID NO: 2340530 - RNA, 19 nt, Homo sapiens
  misc_RNA (1)...(19): siRNA sense strand
gguauuggugaacgguaua

SEQ ID NO: 2340531 - RNA, 19 nt, Homo sapiens
  misc_RNA (1)...(19): siRNA sense strand
ggacgaggaggaagaaaau

SEQ ID NO: 2340532 - RNA, 19 nt, Homo sapiens
  misc_RNA (1)...(19): siRNA sense strand
gccaaagacugguggagcu

SEQ ID NO: 2340533 - RNA, 19 nt, Homo sapiens
  misc_RNA (1)...(19): siRNA sense strand
aggaagagcgggaacgcga

SEQ ID NO: 2340534 - RNA, 19 nt, Homo sapiens
  misc_RNA (1)...(19): siRNA sense strand
aagaaaagucacaaagaca

SEQ ID NO: 2340535 - RNA, 19 nt, Homo sapiens
  misc_RNA (1)...(19): siRNA sense strand
ugaaagauuagaagggucu

SEQ ID NO: 2340536 - RNA, 19 nt, Homo sapiens
  misc_RNA (1)...(19): siRNA sense strand
gggaacaggagcagauaag

SEQ ID NO: 2340537 - RNA, 19 nt, Homo sapiens
  misc_RNA (1)...(19): siRNA sense strand
aaucaagaagauggaguua

SEQ ID NO: 2340538 - RNA, 19 nt, Homo sapiens
  misc_RNA (1)...(19): siRNA sense strand
acucaucagcugaaaguga

SEQ ID NO: 2340539 - RNA, 19 nt, Homo sapiens
  misc_RNA (1)...(19): siRNA sense strand
ucgacagcagcaugagaaa

SEQ ID NO: 2340540 - RNA, 19 nt, Homo sapiens
  misc_RNA (1)...(19): siRNA sense strand
ggaacgacuccgaagagga

SEQ ID NO: 2340541 - RNA, 19 nt, Homo sapiens
  misc_RNA (1)...(19): siRNA sense strand
gggaacgcgaugaggagca

SEQ ID NO: 2340542 - RNA, 19 nt, Homo sapiens
  misc_RNA (1)...(19): siRNA sense strand
agaaaagucacaaagacaa

SEQ ID NO: 2340543 - RNA, 19 nt, Homo sapiens
  misc_RNA (1)...(19): siRNA sense strand
aaaucaagaagauggaguu

SEQ ID NO: 2340544 - RNA, 19 nt, Homo sapiens
  misc_RNA (1)...(19): siRNA sense strand
aguuaucaucagugaacau

SEQ ID NO: 2340545 - RNA, 19 nt, Homo sapiens
  misc_RNA (1)...(19): siRNA sense strand
augaugaagaugacgauga

SEQ ID NO: 2340546 - RNA, 19 nt, Homo sapiens
  misc_RNA (1)...(19): siRNA sense strand
cuuaaagacagguuggacu

SEQ ID NO: 2340547 - RNA, 19 nt, Homo sapiens
  misc_RNA (1)...(19): siRNA sense strand
auacaugcugcaaggaaaa

SEQ ID NO: 2340548 - RNA, 19 nt, Homo sapiens
  misc_RNA (1)...(19): siRNA sense strand
aaacaaaucgacagcagca

SEQ ID NO: 2340549 - RNA, 19 nt, Homo sapiens
  misc_RNA (1)...(19): siRNA sense strand
aagaagaaguggaggcagu

SEQ ID NO: 2340550 - RNA, 19 nt, Homo sapiens
  misc_RNA (1)...(19): siRNA sense strand
uccacaaggacaagagcaa

SEQ ID NO: 2340551 - RNA, 19 nt, Homo sapiens
  misc_RNA (1)...(19): siRNA sense strand
ggauagucgugaugcccau

SEQ ID NO: 2340552 - RNA, 19 nt, Homo sapiens
  misc_RNA (1)...(19): siRNA sense strand
gggacgugcaccauggcaa

SEQ ID NO: 2340553 - RNA, 19 nt, Homo sapiens
  misc_RNA (1)...(19): siRNA sense strand
ccuagaaagaacaguccau

SEQ ID NO: 2340554 - RNA, 19 nt, Homo sapiens
  misc_RNA (1)...(19): siRNA sense strand
cgcuauaagcccaagaagu

SEQ ID NO: 2340555 - RNA, 19 nt, Homo sapiens
  misc_RNA (1)...(19): siRNA sense strand
gggcugacaaagaagaagu

SEQ ID NO: 2340556 - RNA, 19 nt, Homo sapiens
  misc_RNA (1)...(19): siRNA sense strand
gcuggaaacagaaacccaa

SEQ ID NO: 2340557 - RNA, 19 nt, Homo sapiens
  misc_RNA (1)...(19): siRNA sense strand
aagaagaaguggaggcagu

SEQ ID NO: 2340558 - RNA, 19 nt, Homo sapiens
  misc_RNA (1)...(19): siRNA sense strand
uccacaaggacaagagcaa

SEQ ID NO: 2340559 - RNA, 19 nt, Homo sapiens
  misc_RNA (1)...(19): siRNA sense strand
ggauagucgugaugcccau

SEQ ID NO: 2340560 - RNA, 19 nt, Homo sapiens
  misc_RNA (1)...(19): siRNA sense strand
gggacgugcaccauggcaa

SEQ ID NO: 2340561 - RNA, 19 nt, Homo sapiens
  misc_RNA (1)...(19): siRNA sense strand
ccuagaaagaacaguccau

SEQ ID NO: 2340562 - RNA, 19 nt, Homo sapiens
  misc_RNA (1)...(19): siRNA sense strand
cgcuauaagcccaagaagu

SEQ ID NO: 2340563 - RNA, 19 nt, Homo sapiens
  misc_RNA (1)...(19): siRNA sense strand
gggcugacaaagaagaagu

SEQ ID NO: 2340564 - RNA, 19 nt, Homo sapiens
  misc_RNA (1)...(19): siRNA sense strand
gcuggaaacagaaacccaa

SEQ ID NO: 2340565 - RNA, 19 nt, Homo sapiens
  misc_RNA (1)...(19): siRNA sense strand
acaccaaguucgugcggga

SEQ ID NO: 2340566 - RNA, 19 nt, Homo sapiens
  misc_RNA (1)...(19): siRNA sense strand
cugaaggucuccaaggaca

SEQ ID NO: 2340567 - RNA, 19 nt, Homo sapiens
  misc_RNA (1)...(19): siRNA sense strand
gaggaaagcugcugccaag

SEQ ID NO: 2340568 - RNA, 19 nt, Homo sapiens
  misc_RNA (1)...(19): siRNA sense strand
ugaaggucuccaaggacaa

SEQ ID NO: 2340569 - RNA, 19 nt, Homo sapiens
  misc_RNA (1)...(19): siRNA sense strand
cccucaaauuuaucaagaa

SEQ ID NO: 2340570 - RNA, 19 nt, Homo sapiens
  misc_RNA (1)...(19): siRNA sense strand
acaccaaguucgugcggga

SEQ ID NO: 2340571 - RNA, 19 nt, Homo sapiens
  misc_RNA (1)...(19): siRNA sense strand
cugaaggucuccaaggaca

SEQ ID NO: 2340572 - RNA, 19 nt, Homo sapiens
  misc_RNA (1)...(19): siRNA sense strand
gaggaaagcugcugccaag

SEQ ID NO: 2340573 - RNA, 19 nt, Homo sapiens
  misc_RNA (1)...(19): siRNA sense strand
ugaaggucuccaaggacaa

SEQ ID NO: 2340574 - RNA, 19 nt, Homo sapiens
  misc_RNA (1)...(19): siRNA sense strand
cccucaaauuuaucaagaa

SEQ ID NO: 2340575 - RNA, 19 nt, Homo sapiens
  misc_RNA (1)...(19): siRNA sense strand
aggaaagcgauguggagau

SEQ ID NO: 2340576 - RNA, 19 nt, Homo sapiens
  misc_RNA (1)...(19): siRNA sense strand
ccaagaaguuugaggccuc

SEQ ID NO: 2340577 - RNA, 19 nt, Homo sapiens
  misc_RNA (1)...(19): siRNA sense strand
ccaccaauaugcaaggcuu

SEQ ID NO: 2340578 - RNA, 19 nt, Homo sapiens
  misc_RNA (1)...(19): siRNA sense strand
caugacaaugacaaggaaa

SEQ ID NO: 2340579 - RNA, 19 nt, Homo sapiens
  misc_RNA (1)...(19): siRNA sense strand
gcuuccacuccgaggacua

SEQ ID NO: 2340580 - RNA, 19 nt, Homo sapiens
  misc_RNA (1)...(19): siRNA sense strand
cugaugaggcugaugcaga

SEQ ID NO: 2340581 - RNA, 19 nt, Homo sapiens
  misc_RNA (1)...(19): siRNA sense strand
ggaccagauccgccagaca

SEQ ID NO: 2340582 - RNA, 19 nt, Homo sapiens
  misc_RNA (1)...(19): siRNA sense strand
ugacaggacugaugaggcu

SEQ ID NO: 2340583 - RNA, 19 nt, Homo sapiens
  misc_RNA (1)...(19): siRNA sense strand
cugcuggacauaugagaca

SEQ ID NO: 2340584 - RNA, 19 nt, Homo sapiens
  misc_RNA (1)...(19): siRNA sense strand
cagaacagcacguaccaga

SEQ ID NO: 2340585 - RNA, 19 nt, Homo sapiens
  misc_RNA (1)...(19): siRNA sense strand
ugagcaaccaagaguguca

SEQ ID NO: 2340586 - RNA, 19 nt, Homo sapiens
  misc_RNA (1)...(19): siRNA sense strand
cagaacagcacguaccaga

SEQ ID NO: 2340587 - RNA, 19 nt, Homo sapiens
  misc_RNA (1)...(19): siRNA sense strand
ugagcaaccaagaguguca

SEQ ID NO: 2340588 - RNA, 19 nt, Homo sapiens
  misc_RNA (1)...(19): siRNA sense strand
gaaggaaguaaguuggaga

SEQ ID NO: 2340589 - RNA, 19 nt, Homo sapiens
  misc_RNA (1)...(19): siRNA sense strand
cguuuguggaaaagagaaa

SEQ ID NO: 2340590 - RNA, 19 nt, Homo sapiens
  misc_RNA (1)...(19): siRNA sense strand
uggaaaagagaaaggccaa

SEQ ID NO: 2340591 - RNA, 19 nt, Homo sapiens
  misc_RNA (1)...(19): siRNA sense strand
auaucaaggaaaugcagaa

SEQ ID NO: 2340592 - RNA, 19 nt, Homo sapiens
  misc_RNA (1)...(19): siRNA sense strand
ggauaaggccuuugcagcu

SEQ ID NO: 2340593 - RNA, 19 nt, Homo sapiens
  misc_RNA (1)...(19): siRNA sense strand
aaggaaguaaguuggagaa

SEQ ID NO: 2340594 - RNA, 19 nt, Homo sapiens
  misc_RNA (1)...(19): siRNA sense strand
cauuaacagaaggaaguaa

SEQ ID NO: 2340595 - RNA, 19 nt, Homo sapiens
  misc_RNA (1)...(19): siRNA sense strand
ugaccgcguuuguggaaaa

SEQ ID NO: 2340596 - RNA, 19 nt, Homo sapiens
  misc_RNA (1)...(19): siRNA sense strand
uugcacagccggagaucuu

SEQ ID NO: 2340597 - RNA, 19 nt, Homo sapiens
  misc_RNA (1)...(19): siRNA sense strand
ugacauuaacagaaggaag

SEQ ID NO: 2340598 - RNA, 19 nt, Homo sapiens
  misc_RNA (1)...(19): siRNA sense strand
ccaucaauauccagggaga

SEQ ID NO: 2340599 - RNA, 19 nt, Homo sapiens
  misc_RNA (1)...(19): siRNA sense strand
agaggaaaggagacggaua

SEQ ID NO: 2340600 - RNA, 19 nt, Homo sapiens
  misc_RNA (1)...(19): siRNA sense strand
cagcaaaagcagcagauaa

SEQ ID NO: 2340601 - RNA, 19 nt, Homo sapiens
  misc_RNA (1)...(19): siRNA sense strand
ggaagagaaacguaggaga

SEQ ID NO: 2340602 - RNA, 19 nt, Homo sapiens
  misc_RNA (1)...(19): siRNA sense strand
uagagaaggaagagcaaga

SEQ ID NO: 2340603 - RNA, 19 nt, Homo sapiens
  misc_RNA (1)...(19): siRNA sense strand
aaugacaggaggagagaau

SEQ ID NO: 2340604 - RNA, 19 nt, Homo sapiens
  misc_RNA (1)...(19): siRNA sense strand
ggauagaagaagaaaggcu

SEQ ID NO: 2340605 - RNA, 19 nt, Homo sapiens
  misc_RNA (1)...(19): siRNA sense strand
acaaaauagagaaggaaga

SEQ ID NO: 2340606 - RNA, 19 nt, Homo sapiens
  misc_RNA (1)...(19): siRNA sense strand
gcgaugacgacgaggagga

SEQ ID NO: 2340607 - RNA, 19 nt, Homo sapiens
  misc_RNA (1)...(19): siRNA sense strand
ggaggaagaggaaaggaga

SEQ ID NO: 2340608 - RNA, 19 nt, Homo sapiens
  misc_RNA (1)...(19): siRNA sense strand
aggcagcauuacagaaaca

SEQ ID NO: 2340609 - RNA, 19 nt, Homo sapiens
  misc_RNA (1)...(19): siRNA sense strand
aaggagacggauagaagaa

SEQ ID NO: 2340610 - RNA, 19 nt, Homo sapiens
  misc_RNA (1)...(19): siRNA sense strand
gauagaagaagaaaggcuu

SEQ ID NO: 2340611 - RNA, 19 nt, Homo sapiens
  misc_RNA (1)...(19): siRNA sense strand
ggucaaaaucagucuacua

SEQ ID NO: 2340612 - RNA, 19 nt, Homo sapiens
  misc_RNA (1)...(19): siRNA sense strand
gagaagaagaggaaaggcu

SEQ ID NO: 2340613 - RNA, 19 nt, Homo sapiens
  misc_RNA (1)...(19): siRNA sense strand
gagacggauagaagaagaa

SEQ ID NO: 2340614 - RNA, 19 nt, Homo sapiens
  misc_RNA (1)...(19): siRNA sense strand
acgaggaggaagaagaaaa

SEQ ID NO: 2340615 - RNA, 19 nt, Homo sapiens
  misc_RNA (1)...(19): siRNA sense strand
agaaggaagagcaagaaaa

SEQ ID NO: 2340616 - RNA, 19 nt, Homo sapiens
  misc_RNA (1)...(19): siRNA sense strand
agauaauggcagcuuuaaa

SEQ ID NO: 2340617 - RNA, 19 nt, Homo sapiens
  misc_RNA (1)...(19): siRNA sense strand
gggaauuugccacagacaa

SEQ ID NO: 2340618 - RNA, 19 nt, Homo sapiens
  misc_RNA (1)...(19): siRNA sense strand
gggaaugacaggaggagag

SEQ ID NO: 2340619 - RNA, 19 nt, Homo sapiens
  misc_RNA (1)...(19): siRNA sense strand
agaucaaagacuucaaaga

SEQ ID NO: 2340620 - RNA, 19 nt, Homo sapiens
  misc_RNA (1)...(19): siRNA sense strand
acgacgaggaggaagaaga

SEQ ID NO: 2340621 - RNA, 19 nt, Homo sapiens
  misc_RNA (1)...(19): siRNA sense strand
aauagagaaggaagagcaa

SEQ ID NO: 2340622 - RNA, 19 nt, Homo sapiens
  misc_RNA (1)...(19): siRNA sense strand
aagagaagauucagcagga

SEQ ID NO: 2340623 - RNA, 19 nt, Homo sapiens
  misc_RNA (1)...(19): siRNA sense strand
aauugaagcuuguggcacu

SEQ ID NO: 2340624 - RNA, 19 nt, Homo sapiens
  misc_RNA (1)...(19): siRNA sense strand
ggagaauggaccaaaagaa

SEQ ID NO: 2340625 - RNA, 19 nt, Homo sapiens
  misc_RNA (1)...(19): siRNA sense strand
acuacgaacagcagcaaau

SEQ ID NO: 2340626 - RNA, 19 nt, Homo sapiens
  misc_RNA (1)...(19): siRNA sense strand
uuaaauagguguugccauc

SEQ ID NO: 2340627 - RNA, 19 nt, Homo sapiens
  misc_RNA (1)...(19): siRNA sense strand
aaauagagaaggaagagca

SEQ ID NO: 2340628 - RNA, 19 nt, Homo sapiens
  misc_RNA (1)...(19): siRNA sense strand
ccgugcaguuccagcagua

SEQ ID NO: 2340629 - RNA, 19 nt, Homo sapiens
  misc_RNA (1)...(19): siRNA sense strand
cagcauuacagaaacaaca

SEQ ID NO: 2340630 - RNA, 19 nt, Homo sapiens
  misc_RNA (1)...(19): siRNA sense strand
caguuaauggacaggccaa

SEQ ID NO: 2340631 - RNA, 19 nt, Homo sapiens
  misc_RNA (1)...(19): siRNA sense strand
augacgacgaggaggaaga

SEQ ID NO: 2340632 - RNA, 19 nt, Homo sapiens
  misc_RNA (1)...(19): siRNA sense strand
agaagaagaggaaaggcuu

SEQ ID NO: 2340633 - RNA, 19 nt, Homo sapiens
  misc_RNA (1)...(19): siRNA sense strand
ccaacaagccuuugcugga

SEQ ID NO: 2340634 - RNA, 19 nt, Homo sapiens
  misc_RNA (1)...(19): siRNA sense strand
agcaaaagcagcagauaau

SEQ ID NO: 2340635 - RNA, 19 nt, Homo sapiens
  misc_RNA (1)...(19): siRNA sense strand
ugcaaaaggaggaagagaa

SEQ ID NO: 2340636 - RNA, 19 nt, Homo sapiens
  misc_RNA (1)...(19): siRNA sense strand
gaagagaaacguaggagag

SEQ ID NO: 2340637 - RNA, 19 nt, Homo sapiens
  misc_RNA (1)...(19): siRNA sense strand
gaagaggaaaggagacgga

SEQ ID NO: 2340638 - RNA, 19 nt, Homo sapiens
  misc_RNA (1)...(19): siRNA sense strand
ccaacaguauccagggaac

SEQ ID NO: 2340639 - RNA, 19 nt, Homo sapiens
  misc_RNA (1)...(19): siRNA sense strand
ggaacuacgaacagcagca

SEQ ID NO: 2340640 - RNA, 19 nt, Homo sapiens
  misc_RNA (1)...(19): siRNA sense strand
agaaacaacaggaaguagu

SEQ ID NO: 2340641 - RNA, 19 nt, Homo sapiens
  misc_RNA (1)...(19): siRNA sense strand
uggcaaagcauuucaucca

SEQ ID NO: 2340642 - RNA, 19 nt, Homo sapiens
  misc_RNA (1)...(19): siRNA sense strand
uugugaagagaaagccaaa

SEQ ID NO: 2340643 - RNA, 19 nt, Homo sapiens
  misc_RNA (1)...(19): siRNA sense strand
aggaggaagaggagcgaag

SEQ ID NO: 2340644 - RNA, 19 nt, Homo sapiens
  misc_RNA (1)...(19): siRNA sense strand
agaggaagaaagagaacgu

SEQ ID NO: 2340645 - RNA, 19 nt, Homo sapiens
  misc_RNA (1)...(19): siRNA sense strand
uggcaauggucaugggaac

SEQ ID NO: 2340646 - RNA, 19 nt, Homo sapiens
  misc_RNA (1)...(19): siRNA sense strand
ccagaguccuguagggcca

SEQ ID NO: 2340647 - RNA, 19 nt, Homo sapiens
  misc_RNA (1)...(19): siRNA sense strand
cuguagggccagugaagau

SEQ ID NO: 2340648 - RNA, 19 nt, Homo sapiens
  misc_RNA (1)...(19): siRNA sense strand
ggagauaugaguuggacag

SEQ ID NO: 2340649 - RNA, 19 nt, Homo sapiens
  misc_RNA (1)...(19): siRNA sense strand
uggcaauggucaugggaac

SEQ ID NO: 2340650 - RNA, 19 nt, Homo sapiens
  misc_RNA (1)...(19): siRNA sense strand
ccagaguccuguagggcca

SEQ ID NO: 2340651 - RNA, 19 nt, Homo sapiens
  misc_RNA (1)...(19): siRNA sense strand
cuguagggccagugaagau

SEQ ID NO: 2340652 - RNA, 19 nt, Homo sapiens
  misc_RNA (1)...(19): siRNA sense strand
ggagauaugaguuggacag

SEQ ID NO: 2340653 - RNA, 19 nt, Homo sapiens
  misc_RNA (1)...(19): siRNA sense strand
ugauaaagaugguggccca

SEQ ID NO: 2340654 - RNA, 19 nt, Homo sapiens
  misc_RNA (1)...(19): siRNA sense strand
gcggacaacuccagccuca

SEQ ID NO: 2340655 - RNA, 19 nt, Homo sapiens
  misc_RNA (1)...(19): siRNA sense strand
cagcauacaccucgggcca

SEQ ID NO: 2340656 - RNA, 19 nt, Homo sapiens
  misc_RNA (1)...(19): siRNA sense strand
ugauaaagaugguggccca

SEQ ID NO: 2340657 - RNA, 19 nt, Homo sapiens
  misc_RNA (1)...(19): siRNA sense strand
gcggacaacuccagccuca

SEQ ID NO: 2340658 - RNA, 19 nt, Homo sapiens
  misc_RNA (1)...(19): siRNA sense strand
cagcauacaccucgggcca

SEQ ID NO: 2340659 - RNA, 19 nt, Homo sapiens
  misc_RNA (1)...(19): siRNA sense strand
agauaaggguggaggagga

SEQ ID NO: 2340660 - RNA, 19 nt, Homo sapiens
  misc_RNA (1)...(19): siRNA sense strand
cuuuaagaccaaggagaua

SEQ ID NO: 2340661 - RNA, 19 nt, Homo sapiens
  misc_RNA (1)...(19): siRNA sense strand
ggguggaggaggacacgaa

SEQ ID NO: 2340662 - RNA, 19 nt, Homo sapiens
  misc_RNA (1)...(19): siRNA sense strand
ggauggagggagagguugu

SEQ ID NO: 2340663 - RNA, 19 nt, Homo sapiens
  misc_RNA (1)...(19): siRNA sense strand
ccuucuacgcagagguuga

SEQ ID NO: 2340664 - RNA, 19 nt, Homo sapiens
  misc_RNA (1)...(19): siRNA sense strand
gggaaacgugaaugguaca

SEQ ID NO: 2340665 - RNA, 19 nt, Homo sapiens
  misc_RNA (1)...(19): siRNA sense strand
ccggauggagggagagguu

SEQ ID NO: 2340666 - RNA, 19 nt, Homo sapiens
  misc_RNA (1)...(19): siRNA sense strand
gugucagagcggaggcaca

SEQ ID NO: 2340667 - RNA, 19 nt, Homo sapiens
  misc_RNA (1)...(19): siRNA sense strand
agacgcaacugcaggcuga

SEQ ID NO: 2340668 - RNA, 19 nt, Homo sapiens
  misc_RNA (1)...(19): siRNA sense strand
aguacugcucugugaacaa

SEQ ID NO: 2340669 - RNA, 19 nt, Homo sapiens
  misc_RNA (1)...(19): siRNA sense strand
gcaccuucucagauggcua

SEQ ID NO: 2340670 - RNA, 19 nt, Homo sapiens
  misc_RNA (1)...(19): siRNA sense strand
ccgccacacuagugcugaa

SEQ ID NO: 2340671 - RNA, 19 nt, Homo sapiens
  misc_RNA (1)...(19): siRNA sense strand
gcgacaaggacgacauucu

SEQ ID NO: 2340672 - RNA, 19 nt, Homo sapiens
  misc_RNA (1)...(19): siRNA sense strand
gcucugugaacaaggacau

SEQ ID NO: 2340673 - RNA, 19 nt, Homo sapiens
  misc_RNA (1)...(19): siRNA sense strand
aggagaagucacugcuuga

SEQ ID NO: 2340674 - RNA, 19 nt, Homo sapiens
  misc_RNA (1)...(19): siRNA sense strand
aggacaucuuugaaguaga

SEQ ID NO: 2340675 - RNA, 19 nt, Homo sapiens
  misc_RNA (1)...(19): siRNA sense strand
agauaaggguggaggagga

SEQ ID NO: 2340676 - RNA, 19 nt, Homo sapiens
  misc_RNA (1)...(19): siRNA sense strand
cuuuaagaccaaggagaua

SEQ ID NO: 2340677 - RNA, 19 nt, Homo sapiens
  misc_RNA (1)...(19): siRNA sense strand
ggguggaggaggacacgaa

SEQ ID NO: 2340678 - RNA, 19 nt, Homo sapiens
  misc_RNA (1)...(19): siRNA sense strand
ggauggagggagagguugu

SEQ ID NO: 2340679 - RNA, 19 nt, Homo sapiens
  misc_RNA (1)...(19): siRNA sense strand
ccuucuacgcagagguuga

SEQ ID NO: 2340680 - RNA, 19 nt, Homo sapiens
  misc_RNA (1)...(19): siRNA sense strand
gggaaacgugaaugguaca

SEQ ID NO: 2340681 - RNA, 19 nt, Homo sapiens
  misc_RNA (1)...(19): siRNA sense strand
ccggauggagggagagguu

SEQ ID NO: 2340682 - RNA, 19 nt, Homo sapiens
  misc_RNA (1)...(19): siRNA sense strand
gugucagagcggaggcaca

SEQ ID NO: 2340683 - RNA, 19 nt, Homo sapiens
  misc_RNA (1)...(19): siRNA sense strand
agacgcaacugcaggcuga

SEQ ID NO: 2340684 - RNA, 19 nt, Homo sapiens
  misc_RNA (1)...(19): siRNA sense strand
aguacugcucugugaacaa

SEQ ID NO: 2340685 - RNA, 19 nt, Homo sapiens
  misc_RNA (1)...(19): siRNA sense strand
gcaccuucucagauggcua

SEQ ID NO: 2340686 - RNA, 19 nt, Homo sapiens
  misc_RNA (1)...(19): siRNA sense strand
ccgccacacuagugcugaa

SEQ ID NO: 2340687 - RNA, 19 nt, Homo sapiens
  misc_RNA (1)...(19): siRNA sense strand
gcgacaaggacgacauucu

SEQ ID NO: 2340688 - RNA, 19 nt, Homo sapiens
  misc_RNA (1)...(19): siRNA sense strand
gcucugugaacaaggacau

SEQ ID NO: 2340689 - RNA, 19 nt, Homo sapiens
  misc_RNA (1)...(19): siRNA sense strand
aggagaagucacugcuuga

SEQ ID NO: 2340690 - RNA, 19 nt, Homo sapiens
  misc_RNA (1)...(19): siRNA sense strand
aggacaucuuugaaguaga

SEQ ID NO: 2340691 - RNA, 19 nt, Homo sapiens
  misc_RNA (1)...(19): siRNA sense strand
agauaaggguggaggagga

SEQ ID NO: 2340692 - RNA, 19 nt, Homo sapiens
  misc_RNA (1)...(19): siRNA sense strand
cuuuaagaccaaggagaua

SEQ ID NO: 2340693 - RNA, 19 nt, Homo sapiens
  misc_RNA (1)...(19): siRNA sense strand
ggguggaggaggacacgaa

SEQ ID NO: 2340694 - RNA, 19 nt, Homo sapiens
  misc_RNA (1)...(19): siRNA sense strand
ggauggagggagagguugu

SEQ ID NO: 2340695 - RNA, 19 nt, Homo sapiens
  misc_RNA (1)...(19): siRNA sense strand
ccuucuacgcagagguuga

SEQ ID NO: 2340696 - RNA, 19 nt, Homo sapiens
  misc_RNA (1)...(19): siRNA sense strand
gggaaacgugaaugguaca

SEQ ID NO: 2340697 - RNA, 19 nt, Homo sapiens
  misc_RNA (1)...(19): siRNA sense strand
ccggauggagggagagguu

SEQ ID NO: 2340698 - RNA, 19 nt, Homo sapiens
  misc_RNA (1)...(19): siRNA sense strand
gugucagagcggaggcaca

SEQ ID NO: 2340699 - RNA, 19 nt, Homo sapiens
  misc_RNA (1)...(19): siRNA sense strand
agacgcaacugcaggcuga

SEQ ID NO: 2340700 - RNA, 19 nt, Homo sapiens
  misc_RNA (1)...(19): siRNA sense strand
aguacugcucugugaacaa

SEQ ID NO: 2340701 - RNA, 19 nt, Homo sapiens
  misc_RNA (1)...(19): siRNA sense strand
gcaccuucucagauggcua

SEQ ID NO: 2340702 - RNA, 19 nt, Homo sapiens
  misc_RNA (1)...(19): siRNA sense strand
ccgccacacuagugcugaa

SEQ ID NO: 2340703 - RNA, 19 nt, Homo sapiens
  misc_RNA (1)...(19): siRNA sense strand
gcgacaaggacgacauucu

SEQ ID NO: 2340704 - RNA, 19 nt, Homo sapiens
  misc_RNA (1)...(19): siRNA sense strand
gcucugugaacaaggacau

SEQ ID NO: 2340705 - RNA, 19 nt, Homo sapiens
  misc_RNA (1)...(19): siRNA sense strand
aggagaagucacugcuuga

SEQ ID NO: 2340706 - RNA, 19 nt, Homo sapiens
  misc_RNA (1)...(19): siRNA sense strand
aggacaucuuugaaguaga

SEQ ID NO: 2340707 - RNA, 19 nt, Homo sapiens
  misc_RNA (1)...(19): siRNA sense strand
aguacugcucugugaacaa

SEQ ID NO: 2340708 - RNA, 19 nt, Homo sapiens
  misc_RNA (1)...(19): siRNA sense strand
gcucugugaacaaggacau

SEQ ID NO: 2340709 - RNA, 19 nt, Homo sapiens
  misc_RNA (1)...(19): siRNA sense strand
aggacaucuuugaaguaga

SEQ ID NO: 2340710 - RNA, 19 nt, Homo sapiens
  misc_RNA (1)...(19): siRNA sense strand
gagaaggaguaucaggaga

SEQ ID NO: 2340711 - RNA, 19 nt, Homo sapiens
  misc_RNA (1)...(19): siRNA sense strand
cggccaagaacgacaugaa

SEQ ID NO: 2340712 - RNA, 19 nt, Homo sapiens
  misc_RNA (1)...(19): siRNA sense strand
cugacagcuccaugagaua

SEQ ID NO: 2340713 - RNA, 19 nt, Homo sapiens
  misc_RNA (1)...(19): siRNA sense strand
gggaggauuucucaggcua

SEQ ID NO: 2340714 - RNA, 19 nt, Homo sapiens
  misc_RNA (1)...(19): siRNA sense strand
aggaagauagccuggagaa

SEQ ID NO: 2340715 - RNA, 19 nt, Homo sapiens
  misc_RNA (1)...(19): siRNA sense strand
gggaugaggaggagagcac

SEQ ID NO: 2340716 - RNA, 19 nt, Homo sapiens
  misc_RNA (1)...(19): siRNA sense strand
gggaggagacugaggagac

SEQ ID NO: 2340717 - RNA, 19 nt, Homo sapiens
  misc_RNA (1)...(19): siRNA sense strand
gggagaaggaguaucagga

SEQ ID NO: 2340718 - RNA, 19 nt, Homo sapiens
  misc_RNA (1)...(19): siRNA sense strand
aggaguaucaggagaccau

SEQ ID NO: 2340719 - RNA, 19 nt, Homo sapiens
  misc_RNA (1)...(19): siRNA sense strand
cugcacgaguacauggaga

SEQ ID NO: 2340720 - RNA, 19 nt, Homo sapiens
  misc_RNA (1)...(19): siRNA sense strand
gagaaggaguaucaggaga

SEQ ID NO: 2340721 - RNA, 19 nt, Homo sapiens
  misc_RNA (1)...(19): siRNA sense strand
cggccaagaacgacaugaa

SEQ ID NO: 2340722 - RNA, 19 nt, Homo sapiens
  misc_RNA (1)...(19): siRNA sense strand
cugacagcuccaugagaua

SEQ ID NO: 2340723 - RNA, 19 nt, Homo sapiens
  misc_RNA (1)...(19): siRNA sense strand
gggaggauuucucaggcua

SEQ ID NO: 2340724 - RNA, 19 nt, Homo sapiens
  misc_RNA (1)...(19): siRNA sense strand
aggaagauagccuggagaa

SEQ ID NO: 2340725 - RNA, 19 nt, Homo sapiens
  misc_RNA (1)...(19): siRNA sense strand
gggaugaggaggagagcac

SEQ ID NO: 2340726 - RNA, 19 nt, Homo sapiens
  misc_RNA (1)...(19): siRNA sense strand
gggaggagacugaggagac

SEQ ID NO: 2340727 - RNA, 19 nt, Homo sapiens
  misc_RNA (1)...(19): siRNA sense strand
gggagaaggaguaucagga

SEQ ID NO: 2340728 - RNA, 19 nt, Homo sapiens
  misc_RNA (1)...(19): siRNA sense strand
aggaguaucaggagaccau

SEQ ID NO: 2340729 - RNA, 19 nt, Homo sapiens
  misc_RNA (1)...(19): siRNA sense strand
cugcacgaguacauggaga

SEQ ID NO: 2340730 - RNA, 19 nt, Homo sapiens
  misc_RNA (1)...(19): siRNA sense strand
aaacaauggaagagcggaa

SEQ ID NO: 2340731 - RNA, 19 nt, Homo sapiens
  misc_RNA (1)...(19): siRNA sense strand
gaguaaaagcacaggguuu

SEQ ID NO: 2340732 - RNA, 19 nt, Homo sapiens
  misc_RNA (1)...(19): siRNA sense strand
ggggaaugcaggagaaauu

SEQ ID NO: 2340733 - RNA, 19 nt, Homo sapiens
  misc_RNA (1)...(19): siRNA sense strand
cggaaagugaagaggagga

SEQ ID NO: 2340734 - RNA, 19 nt, Homo sapiens
  misc_RNA (1)...(19): siRNA sense strand
augccauuccagugaguaa

SEQ ID NO: 2340735 - RNA, 19 nt, Homo sapiens
  misc_RNA (1)...(19): siRNA sense strand
auggaagagcggaaaguga

SEQ ID NO: 2340736 - RNA, 19 nt, Homo sapiens
  misc_RNA (1)...(19): siRNA sense strand
ugaugaaagaaaagaccaa

SEQ ID NO: 2340737 - RNA, 19 nt, Homo sapiens
  misc_RNA (1)...(19): siRNA sense strand
guuccaaauacuucugcua

SEQ ID NO: 2340738 - RNA, 19 nt, Homo sapiens
  misc_RNA (1)...(19): siRNA sense strand
caaacauggugguggaaca

SEQ ID NO: 2340739 - RNA, 19 nt, Homo sapiens
  misc_RNA (1)...(19): siRNA sense strand
aggaagggaaggaaggaaa

SEQ ID NO: 2340740 - RNA, 19 nt, Homo sapiens
  misc_RNA (1)...(19): siRNA sense strand
gaggaauggaugaaguaua

SEQ ID NO: 2340741 - RNA, 19 nt, Homo sapiens
  misc_RNA (1)...(19): siRNA sense strand
aggaagaggaagaagaaga

SEQ ID NO: 2340742 - RNA, 19 nt, Homo sapiens
  misc_RNA (1)...(19): siRNA sense strand
gcaaguggcucauggguga

SEQ ID NO: 2340743 - RNA, 19 nt, Homo sapiens
  misc_RNA (1)...(19): siRNA sense strand
gagccuuaccaaagaguua

SEQ ID NO: 2340744 - RNA, 19 nt, Homo sapiens
  misc_RNA (1)...(19): siRNA sense strand
cuuaaaagguugaagauga

SEQ ID NO: 2340745 - RNA, 19 nt, Homo sapiens
  misc_RNA (1)...(19): siRNA sense strand
gcuaaugucagaugagaau

SEQ ID NO: 2340746 - RNA, 19 nt, Homo sapiens
  misc_RNA (1)...(19): siRNA sense strand
gugcagaagccuacgaaaa

SEQ ID NO: 2340747 - RNA, 19 nt, Homo sapiens
  misc_RNA (1)...(19): siRNA sense strand
ggucgagagcagcaggaaa

SEQ ID NO: 2340748 - RNA, 19 nt, Homo sapiens
  misc_RNA (1)...(19): siRNA sense strand
cagcaaacaugguggugga

SEQ ID NO: 2340749 - RNA, 19 nt, Homo sapiens
  misc_RNA (1)...(19): siRNA sense strand
gcauucagaaggaggacaa

SEQ ID NO: 2340750 - RNA, 19 nt, Homo sapiens
  misc_RNA (1)...(19): siRNA sense strand
ggaaggaaggaaacagcaa

SEQ ID NO: 2340751 - RNA, 19 nt, Homo sapiens
  misc_RNA (1)...(19): siRNA sense strand
ggauguagaugaagccaca

SEQ ID NO: 2340752 - RNA, 19 nt, Homo sapiens
  misc_RNA (1)...(19): siRNA sense strand
cagaaagagcagagaaaug

SEQ ID NO: 2340753 - RNA, 19 nt, Homo sapiens
  misc_RNA (1)...(19): siRNA sense strand
gugacaaucucguugggaa

SEQ ID NO: 2340754 - RNA, 19 nt, Homo sapiens
  misc_RNA (1)...(19): siRNA sense strand
agaagaaaaccgagagaga

SEQ ID NO: 2340755 - RNA, 19 nt, Homo sapiens
  misc_RNA (1)...(19): siRNA sense strand
gcgagaacaaaaugagaaa

SEQ ID NO: 2340756 - RNA, 19 nt, Homo sapiens
  misc_RNA (1)...(19): siRNA sense strand
acggcaaauugaagaagaa

SEQ ID NO: 2340757 - RNA, 19 nt, Homo sapiens
  misc_RNA (1)...(19): siRNA sense strand
cgauacaugaauucagaua

SEQ ID NO: 2340758 - RNA, 19 nt, Homo sapiens
  misc_RNA (1)...(19): siRNA sense strand
aggaagaagaagagaugga

SEQ ID NO: 2340759 - RNA, 19 nt, Homo sapiens
  misc_RNA (1)...(19): siRNA sense strand
acacagaagaggagaauuc

SEQ ID NO: 2340760 - RNA, 19 nt, Homo sapiens
  misc_RNA (1)...(19): siRNA sense strand
aucagaaagagcagagaaa

SEQ ID NO: 2340761 - RNA, 19 nt, Homo sapiens
  misc_RNA (1)...(19): siRNA sense strand
ugaagaugaaagaggaaga

SEQ ID NO: 2340762 - RNA, 19 nt, Homo sapiens
  misc_RNA (1)...(19): siRNA sense strand
ggaaacagcaagaagacca

SEQ ID NO: 2340763 - RNA, 19 nt, Homo sapiens
  misc_RNA (1)...(19): siRNA sense strand
ccaaggaagcuggaggaaa

SEQ ID NO: 2340764 - RNA, 19 nt, Homo sapiens
  misc_RNA (1)...(19): siRNA sense strand
uggaagcaauacagaagaa

SEQ ID NO: 2340765 - RNA, 19 nt, Homo sapiens
  misc_RNA (1)...(19): siRNA sense strand
cagaaggaggacaaauaua

SEQ ID NO: 2340766 - RNA, 19 nt, Homo sapiens
  misc_RNA (1)...(19): siRNA sense strand
gugaagaggcagacaggca

SEQ ID NO: 2340767 - RNA, 19 nt, Homo sapiens
  misc_RNA (1)...(19): siRNA sense strand
gggcauaaagcgagacaag

SEQ ID NO: 2340768 - RNA, 19 nt, Homo sapiens
  misc_RNA (1)...(19): siRNA sense strand
cugaagaacaagccaaauu

SEQ ID NO: 2340769 - RNA, 19 nt, Homo sapiens
  misc_RNA (1)...(19): siRNA sense strand
gcguaugaagacaaacaaa

SEQ ID NO: 2340770 - RNA, 19 nt, Homo sapiens
  misc_RNA (1)...(19): siRNA sense strand
agacaaacaaauacuggaa

SEQ ID NO: 2340771 - RNA, 19 nt, Homo sapiens
  misc_RNA (1)...(19): siRNA sense strand
aagaaaaccgagagagaga

SEQ ID NO: 2340772 - RNA, 19 nt, Homo sapiens
  misc_RNA (1)...(19): siRNA sense strand
gguugaagaugaaagagga

SEQ ID NO: 2340773 - RNA, 19 nt, Homo sapiens
  misc_RNA (1)...(19): siRNA sense strand
guugaagaugaaagaggaa

SEQ ID NO: 2340774 - RNA, 19 nt, Homo sapiens
  misc_RNA (1)...(19): siRNA sense strand
gggcaguuaagaagcacaa

SEQ ID NO: 2340775 - RNA, 19 nt, Homo sapiens
  misc_RNA (1)...(19): siRNA sense strand
agaugaacgcuuugagcuu

SEQ ID NO: 2340776 - RNA, 19 nt, Homo sapiens
  misc_RNA (1)...(19): siRNA sense strand
ucauugauggucugagaaa

SEQ ID NO: 2340777 - RNA, 19 nt, Homo sapiens
  misc_RNA (1)...(19): siRNA sense strand
cguaugaagacaaacaaau

SEQ ID NO: 2340778 - RNA, 19 nt, Homo sapiens
  misc_RNA (1)...(19): siRNA sense strand
aggaagauuuguugucaga

SEQ ID NO: 2340779 - RNA, 19 nt, Homo sapiens
  misc_RNA (1)...(19): siRNA sense strand
gugcugagcuugugcaacu

SEQ ID NO: 2340780 - RNA, 19 nt, Homo sapiens
  misc_RNA (1)...(19): siRNA sense strand
acaaacugauccagagcau

SEQ ID NO: 2340781 - RNA, 19 nt, Homo sapiens
  misc_RNA (1)...(19): siRNA sense strand
gaacagauuucagggccaa

SEQ ID NO: 2340782 - RNA, 19 nt, Homo sapiens
  misc_RNA (1)...(19): siRNA sense strand
uggaggaagaggaagaaga

SEQ ID NO: 2340783 - RNA, 19 nt, Homo sapiens
  misc_RNA (1)...(19): siRNA sense strand
auguggaggaagaggaaga

SEQ ID NO: 2340784 - RNA, 19 nt, Homo sapiens
  misc_RNA (1)...(19): siRNA sense strand
ggacacagaagaggagaau

SEQ ID NO: 2340785 - RNA, 19 nt, Homo sapiens
  misc_RNA (1)...(19): siRNA sense strand
caagaagaccauggagaau

SEQ ID NO: 2340786 - RNA, 19 nt, Homo sapiens
  misc_RNA (1)...(19): siRNA sense strand
aagaagaagagauggaugu

SEQ ID NO: 2340787 - RNA, 19 nt, Homo sapiens
  misc_RNA (1)...(19): siRNA sense strand
agaacagauuucagggcca

SEQ ID NO: 2340788 - RNA, 19 nt, Homo sapiens
  misc_RNA (1)...(19): siRNA sense strand
uuaaaugauaccuggguuu

SEQ ID NO: 2340789 - RNA, 19 nt, Homo sapiens
  misc_RNA (1)...(19): siRNA sense strand
gaggaagaauggcgagaag

SEQ ID NO: 2340790 - RNA, 19 nt, Homo sapiens
  misc_RNA (1)...(19): siRNA sense strand
gucaacaacaacugguaua

SEQ ID NO: 2340791 - RNA, 19 nt, Homo sapiens
  misc_RNA (1)...(19): siRNA sense strand
cggcaaauugaagaagaaa

SEQ ID NO: 2340792 - RNA, 19 nt, Homo sapiens
  misc_RNA (1)...(19): siRNA sense strand
ggcaaauugaagaagaaaa

SEQ ID NO: 2340793 - RNA, 19 nt, Homo sapiens
  misc_RNA (1)...(19): siRNA sense strand
gagagaaugggaacgggaa

SEQ ID NO: 2340794 - RNA, 19 nt, Homo sapiens
  misc_RNA (1)...(19): siRNA sense strand
auugauggucugagaaaga

SEQ ID NO: 2340795 - RNA, 19 nt, Homo sapiens
  misc_RNA (1)...(19): siRNA sense strand
ucagaugagaauugcuuua

SEQ ID NO: 2340796 - RNA, 19 nt, Homo sapiens
  misc_RNA (1)...(19): siRNA sense strand
gaguguagauucaagcuga

SEQ ID NO: 2340797 - RNA, 19 nt, Homo sapiens
  misc_RNA (1)...(19): siRNA sense strand
ccaccugagaagauggaaa

SEQ ID NO: 2340798 - RNA, 19 nt, Homo sapiens
  misc_RNA (1)...(19): siRNA sense strand
gcucagaaacagaagcaca

SEQ ID NO: 2340799 - RNA, 19 nt, Homo sapiens
  misc_RNA (1)...(19): siRNA sense strand
auacucaggcacagagaaa

SEQ ID NO: 2340800 - RNA, 19 nt, Homo sapiens
  misc_RNA (1)...(19): siRNA sense strand
ucuccaaggccaaggguuu

SEQ ID NO: 2340801 - RNA, 19 nt, Homo sapiens
  misc_RNA (1)...(19): siRNA sense strand
cugaagaacuggagagagg

SEQ ID NO: 2340802 - RNA, 19 nt, Homo sapiens
  misc_RNA (1)...(19): siRNA sense strand
ugaaggugcuggagagcca

SEQ ID NO: 2340803 - RNA, 19 nt, Homo sapiens
  misc_RNA (1)...(19): siRNA sense strand
acucaggcacagagaaauu

SEQ ID NO: 2340804 - RNA, 19 nt, Homo sapiens
  misc_RNA (1)...(19): siRNA sense strand
gccacaaccuacaggguca

SEQ ID NO: 2340805 - RNA, 19 nt, Homo sapiens
  misc_RNA (1)...(19): siRNA sense strand
gagcuuuggcagugggcuu

SEQ ID NO: 2340806 - RNA, 19 nt, Homo sapiens
  misc_RNA (1)...(19): siRNA sense strand
ugaauuacugucagaacaa

SEQ ID NO: 2340807 - RNA, 19 nt, Homo sapiens
  misc_RNA (1)...(19): siRNA sense strand
guccucagcccaagggaaa

SEQ ID NO: 2340808 - RNA, 19 nt, Homo sapiens
  misc_RNA (1)...(19): siRNA sense strand
gcucagaggaugaucgacu

SEQ ID NO: 2340809 - RNA, 19 nt, Homo sapiens
  misc_RNA (1)...(19): siRNA sense strand
caaaagaauuggaaggaug

SEQ ID NO: 2340810 - RNA, 19 nt, Homo sapiens
  misc_RNA (1)...(19): siRNA sense strand
guaucuggccacaggaaca

SEQ ID NO: 2340811 - RNA, 19 nt, Homo sapiens
  misc_RNA (1)...(19): siRNA sense strand
agucaagucaccacagaau

SEQ ID NO: 2340812 - RNA, 19 nt, Homo sapiens
  misc_RNA (1)...(19): siRNA sense strand
acacagaauauaagugacu

SEQ ID NO: 2340813 - RNA, 19 nt, Homo sapiens
  misc_RNA (1)...(19): siRNA sense strand
ggccuugggaucaggaaau

SEQ ID NO: 2340814 - RNA, 19 nt, Homo sapiens
  misc_RNA (1)...(19): siRNA sense strand
cugguggagugcugggcaa

SEQ ID NO: 2340815 - RNA, 19 nt, Homo sapiens
  misc_RNA (1)...(19): siRNA sense strand
gcucauaagcugcuggucu

SEQ ID NO: 2340816 - RNA, 19 nt, Homo sapiens
  misc_RNA (1)...(19): siRNA sense strand
caaauggauuagaagacca

SEQ ID NO: 2340817 - RNA, 19 nt, Homo sapiens
  misc_RNA (1)...(19): siRNA sense strand
guguguaccuguagccuga

SEQ ID NO: 2340818 - RNA, 19 nt, Homo sapiens
  misc_RNA (1)...(19): siRNA sense strand
acaguaaagaugagcuuca

SEQ ID NO: 2340819 - RNA, 19 nt, Homo sapiens
  misc_RNA (1)...(19): siRNA sense strand
ccuccaaacacaccacaaa

SEQ ID NO: 2340820 - RNA, 19 nt, Homo sapiens
  misc_RNA (1)...(19): siRNA sense strand
agcaaacacaggagcgcua

SEQ ID NO: 2340821 - RNA, 19 nt, Homo sapiens
  misc_RNA (1)...(19): siRNA sense strand
gugaaaagaugcuguggca

SEQ ID NO: 2340822 - RNA, 19 nt, Homo sapiens
  misc_RNA (1)...(19): siRNA sense strand
caucaguccuugaagagca

SEQ ID NO: 2340823 - RNA, 19 nt, Homo sapiens
  misc_RNA (1)...(19): siRNA sense strand
aggaacaagcugccagaga

SEQ ID NO: 2340824 - RNA, 19 nt, Homo sapiens
  misc_RNA (1)...(19): siRNA sense strand
gcauggaacaggagggcag

SEQ ID NO: 2340825 - RNA, 19 nt, Homo sapiens
  misc_RNA (1)...(19): siRNA sense strand
uaacaggagcuuggagcaa

SEQ ID NO: 2340826 - RNA, 19 nt, Homo sapiens
  misc_RNA (1)...(19): siRNA sense strand
caaaagauauugauggacu

SEQ ID NO: 2340827 - RNA, 19 nt, Homo sapiens
  misc_RNA (1)...(19): siRNA sense strand
gccaagaagaaaaccaaaa

SEQ ID NO: 2340828 - RNA, 19 nt, Homo sapiens
  misc_RNA (1)...(19): siRNA sense strand
cuacagggucacucaguau

SEQ ID NO: 2340829 - RNA, 19 nt, Homo sapiens
  misc_RNA (1)...(19): siRNA sense strand
gcaaguggcacaagcacca

SEQ ID NO: 2340830 - RNA, 19 nt, Homo sapiens
  misc_RNA (1)...(19): siRNA sense strand
gaaaagaugcuguggcagu

SEQ ID NO: 2340831 - RNA, 19 nt, Homo sapiens
  misc_RNA (1)...(19): siRNA sense strand
gcaaggcaguuguguggga

SEQ ID NO: 2340832 - RNA, 19 nt, Homo sapiens
  misc_RNA (1)...(19): siRNA sense strand
auacaguaaagaugagcuu

SEQ ID NO: 2340833 - RNA, 19 nt, Homo sapiens
  misc_RNA (1)...(19): siRNA sense strand
gugugggaucucaggaaga

SEQ ID NO: 2340834 - RNA, 19 nt, Homo sapiens
  misc_RNA (1)...(19): siRNA sense strand
ccucagaacaugacuccuu

SEQ ID NO: 2340835 - RNA, 19 nt, Homo sapiens
  misc_RNA (1)...(19): siRNA sense strand
cugaauaacuugaaugugc

SEQ ID NO: 2340836 - RNA, 19 nt, Homo sapiens
  misc_RNA (1)...(19): siRNA sense strand
cagaggacaucaaggcacu

SEQ ID NO: 2340837 - RNA, 19 nt, Homo sapiens
  misc_RNA (1)...(19): siRNA sense strand
gcucagaaacagaagcaca

SEQ ID NO: 2340838 - RNA, 19 nt, Homo sapiens
  misc_RNA (1)...(19): siRNA sense strand
ugaaggugcuggagagcca

SEQ ID NO: 2340839 - RNA, 19 nt, Homo sapiens
  misc_RNA (1)...(19): siRNA sense strand
gagcuuuggcagugggcuu

SEQ ID NO: 2340840 - RNA, 19 nt, Homo sapiens
  misc_RNA (1)...(19): siRNA sense strand
gcucagaggaugaucgacu

SEQ ID NO: 2340841 - RNA, 19 nt, Homo sapiens
  misc_RNA (1)...(19): siRNA sense strand
guaucuggccacaggaaca

SEQ ID NO: 2340842 - RNA, 19 nt, Homo sapiens
  misc_RNA (1)...(19): siRNA sense strand
gcaaggcaguuguguggga

SEQ ID NO: 2340843 - RNA, 19 nt, Homo sapiens
  misc_RNA (1)...(19): siRNA sense strand
gugugggaucucaggaaga

SEQ ID NO: 2340844 - RNA, 19 nt, Homo sapiens
  misc_RNA (1)...(19): siRNA sense strand
cugaauaacuugaaugugc

SEQ ID NO: 2340845 - RNA, 19 nt, Homo sapiens
  misc_RNA (1)...(19): siRNA sense strand
cagaggacaucaaggcacu

SEQ ID NO: 2340846 - RNA, 19 nt, Homo sapiens
  misc_RNA (1)...(19): siRNA sense strand
gguuaaaguccuauggcua

SEQ ID NO: 2340847 - RNA, 19 nt, Homo sapiens
  misc_RNA (1)...(19): siRNA sense strand
gcugggaaccugugggcaa

SEQ ID NO: 2340848 - RNA, 19 nt, Homo sapiens
  misc_RNA (1)...(19): siRNA sense strand
ugaaagggccgaugggaga

SEQ ID NO: 2340849 - RNA, 19 nt, Homo sapiens
  misc_RNA (1)...(19): siRNA sense strand
ccuuugaagaggugccaua

SEQ ID NO: 2340850 - RNA, 19 nt, Homo sapiens
  misc_RNA (1)...(19): siRNA sense strand
ccgugaaggcauugacaca

SEQ ID NO: 2340851 - RNA, 19 nt, Homo sapiens
  misc_RNA (1)...(19): siRNA sense strand
ggugacaaguauugggugu

SEQ ID NO: 2340852 - RNA, 19 nt, Homo sapiens
  misc_RNA (1)...(19): siRNA sense strand
cgaucgaguggaugaagaa

SEQ ID NO: 2340853 - RNA, 19 nt, Homo sapiens
  misc_RNA (1)...(19): siRNA sense strand
ugccauaccaugagaucaa

SEQ ID NO: 2340854 - RNA, 19 nt, Homo sapiens
  misc_RNA (1)...(19): siRNA sense strand
aggacgaucuccagggcau

SEQ ID NO: 2340855 - RNA, 19 nt, Homo sapiens
  misc_RNA (1)...(19): siRNA sense strand
agccguaggcggagaaaca

SEQ ID NO: 2340856 - RNA, 19 nt, Homo sapiens
  misc_RNA (1)...(19): siRNA sense strand
gcaauaaccgagugcagga

SEQ ID NO: 2340857 - RNA, 19 nt, Homo sapiens
  misc_RNA (1)...(19): siRNA sense strand
acgccaaccaugacgggaa

SEQ ID NO: 2340858 - RNA, 19 nt, Homo sapiens
  misc_RNA (1)...(19): siRNA sense strand
agaggaaacacgagcgcca

SEQ ID NO: 2340859 - RNA, 19 nt, Homo sapiens
  misc_RNA (1)...(19): siRNA sense strand
ucaucagcaaggaaggaua

SEQ ID NO: 2340860 - RNA, 19 nt, Homo sapiens
  misc_RNA (1)...(19): siRNA sense strand
agccauggacgcuaggaaa

SEQ ID NO: 2340861 - RNA, 19 nt, Homo sapiens
  misc_RNA (1)...(19): siRNA sense strand
aggaaggauauuacaccua

SEQ ID NO: 2340862 - RNA, 19 nt, Homo sapiens
  misc_RNA (1)...(19): siRNA sense strand
ccaacaucugugacggcaa

SEQ ID NO: 2340863 - RNA, 19 nt, Homo sapiens
  misc_RNA (1)...(19): siRNA sense strand
accgagugcaggagggcua

SEQ ID NO: 2340864 - RNA, 19 nt, Homo sapiens
  misc_RNA (1)...(19): siRNA sense strand
ucuucaaaggugacaagua

SEQ ID NO: 2340865 - RNA, 19 nt, Homo sapiens
  misc_RNA (1)...(19): siRNA sense strand
gcgcaauaaccgagugcag

SEQ ID NO: 2340866 - RNA, 19 nt, Homo sapiens
  misc_RNA (1)...(19): siRNA sense strand
gagccauggacgcuaggaa

SEQ ID NO: 2340867 - RNA, 19 nt, Homo sapiens
  misc_RNA (1)...(19): siRNA sense strand
cccuaugacucacgggcau

SEQ ID NO: 2340868 - RNA, 19 nt, Homo sapiens
  misc_RNA (1)...(19): siRNA sense strand
gguucuggcgucugcgcaa

SEQ ID NO: 2340869 - RNA, 19 nt, Homo sapiens
  misc_RNA (1)...(19): siRNA sense strand
acucaccaucggagaggaa

SEQ ID NO: 2340870 - RNA, 19 nt, Homo sapiens
  misc_RNA (1)...(19): siRNA sense strand
gcaucaagaccgagccgga

SEQ ID NO: 2340871 - RNA, 19 nt, Homo sapiens
  misc_RNA (1)...(19): siRNA sense strand
ccauaugacaagcccacaa

SEQ ID NO: 2340872 - RNA, 19 nt, Homo sapiens
  misc_RNA (1)...(19): siRNA sense strand
ccacagaacgggaagaccu

SEQ ID NO: 2340873 - RNA, 19 nt, Homo sapiens
  misc_RNA (1)...(19): siRNA sense strand
ccugagaaguugcgcgaug

SEQ ID NO: 2340874 - RNA, 19 nt, Homo sapiens
  misc_RNA (1)...(19): siRNA sense strand
gcaucaagaccgagccgga

SEQ ID NO: 2340875 - RNA, 19 nt, Homo sapiens
  misc_RNA (1)...(19): siRNA sense strand
ccauaugacaagcccacaa

SEQ ID NO: 2340876 - RNA, 19 nt, Homo sapiens
  misc_RNA (1)...(19): siRNA sense strand
ccacagaacgggaagaccu

SEQ ID NO: 2340877 - RNA, 19 nt, Homo sapiens
  misc_RNA (1)...(19): siRNA sense strand
ccugagaaguugcgcgaug

SEQ ID NO: 2340878 - RNA, 19 nt, Homo sapiens
  misc_RNA (1)...(19): siRNA sense strand
gguaagaaaccuaggacca

SEQ ID NO: 2340879 - RNA, 19 nt, Homo sapiens
  misc_RNA (1)...(19): siRNA sense strand
cuggagaaagaaagagaaa

SEQ ID NO: 2340880 - RNA, 19 nt, Homo sapiens
  misc_RNA (1)...(19): siRNA sense strand
agagaaugaaggaggcuaa

SEQ ID NO: 2340881 - RNA, 19 nt, Homo sapiens
  misc_RNA (1)...(19): siRNA sense strand
ugaaggaggcuaaggagaa

SEQ ID NO: 2340882 - RNA, 19 nt, Homo sapiens
  misc_RNA (1)...(19): siRNA sense strand
ggugaagaauggaaggguu

SEQ ID NO: 2340883 - RNA, 19 nt, Homo sapiens
  misc_RNA (1)...(19): siRNA sense strand
ccacagaaguugcugcuga

SEQ ID NO: 2340884 - RNA, 19 nt, Homo sapiens
  misc_RNA (1)...(19): siRNA sense strand
aggagaagcgccaggaaca

SEQ ID NO: 2340885 - RNA, 19 nt, Homo sapiens
  misc_RNA (1)...(19): siRNA sense strand
ccgaaucaguggugggaac

SEQ ID NO: 2340886 - RNA, 19 nt, Homo sapiens
  misc_RNA (1)...(19): siRNA sense strand
uguuacagaccaaggagaa

SEQ ID NO: 2340887 - RNA, 19 nt, Homo sapiens
  misc_RNA (1)...(19): siRNA sense strand
ggaacaaauugcgaagaga

SEQ ID NO: 2340888 - RNA, 19 nt, Homo sapiens
  misc_RNA (1)...(19): siRNA sense strand
gaccaaagcacccaagauu

SEQ ID NO: 2340889 - RNA, 19 nt, Homo sapiens
  misc_RNA (1)...(19): siRNA sense strand
ggagaagcgccaggaacaa

SEQ ID NO: 2340890 - RNA, 19 nt, Homo sapiens
  misc_RNA (1)...(19): siRNA sense strand
guaagaaaccuaggaccaa

SEQ ID NO: 2340891 - RNA, 19 nt, Homo sapiens
  misc_RNA (1)...(19): siRNA sense strand
augcuaaacuuuuggccaa

SEQ ID NO: 2340892 - RNA, 19 nt, Homo sapiens
  misc_RNA (1)...(19): siRNA sense strand
aggcuaaggagaagcgcca

SEQ ID NO: 2340893 - RNA, 19 nt, Homo sapiens
  misc_RNA (1)...(19): siRNA sense strand
agaacuggagaaagaaaga

SEQ ID NO: 2340894 - RNA, 19 nt, Homo sapiens
  misc_RNA (1)...(19): siRNA sense strand
cugaagaagcagcguacca

SEQ ID NO: 2340895 - RNA, 19 nt, Homo sapiens
  misc_RNA (1)...(19): siRNA sense strand
cugcugacgcucuggguga

SEQ ID NO: 2340896 - RNA, 19 nt, Homo sapiens
  misc_RNA (1)...(19): siRNA sense strand
cccaaaagagcuagcagaa

SEQ ID NO: 2340897 - RNA, 19 nt, Homo sapiens
  misc_RNA (1)...(19): siRNA sense strand
uaagaaaccuaggaccaaa

SEQ ID NO: 2340898 - RNA, 19 nt, Homo sapiens
  misc_RNA (1)...(19): siRNA sense strand
augaaggaggcuaaggaga

SEQ ID NO: 2340899 - RNA, 19 nt, Homo sapiens
  misc_RNA (1)...(19): siRNA sense strand
aggguuaugugguccgaau

SEQ ID NO: 2340900 - RNA, 19 nt, Homo sapiens
  misc_RNA (1)...(19): siRNA sense strand
ggaccaaagcacccaagau

SEQ ID NO: 2340901 - RNA, 19 nt, Homo sapiens
  misc_RNA (1)...(19): siRNA sense strand
gaaugaaggaggcuaagga

SEQ ID NO: 2340902 - RNA, 19 nt, Homo sapiens
  misc_RNA (1)...(19): siRNA sense strand
uggaagaugauaagagaaa

SEQ ID NO: 2340903 - RNA, 19 nt, Homo sapiens
  misc_RNA (1)...(19): siRNA sense strand
cagaauacugagagacaaa

SEQ ID NO: 2340904 - RNA, 19 nt, Homo sapiens
  misc_RNA (1)...(19): siRNA sense strand
gauuaaaggcgguggacuu

SEQ ID NO: 2340905 - RNA, 19 nt, Homo sapiens
  misc_RNA (1)...(19): siRNA sense strand
aucaagaggaagagagaaa

SEQ ID NO: 2340906 - RNA, 19 nt, Homo sapiens
  misc_RNA (1)...(19): siRNA sense strand
ccaagaaggaggucagcaa

SEQ ID NO: 2340907 - RNA, 19 nt, Homo sapiens
  misc_RNA (1)...(19): siRNA sense strand
agacaaggaacgcaagaaa

SEQ ID NO: 2340908 - RNA, 19 nt, Homo sapiens
  misc_RNA (1)...(19): siRNA sense strand
aggugaaggcagaggaaga

SEQ ID NO: 2340909 - RNA, 19 nt, Homo sapiens
  misc_RNA (1)...(19): siRNA sense strand
guguagaagaugaggacuu

SEQ ID NO: 2340910 - RNA, 19 nt, Homo sapiens
  misc_RNA (1)...(19): siRNA sense strand
aagaagaggaggaagagaa

SEQ ID NO: 2340911 - RNA, 19 nt, Homo sapiens
  misc_RNA (1)...(19): siRNA sense strand
aagcaaggaaagaggagaa

SEQ ID NO: 2340912 - RNA, 19 nt, Homo sapiens
  misc_RNA (1)...(19): siRNA sense strand
cuucauaguuccuagacaa

SEQ ID NO: 2340913 - RNA, 19 nt, Homo sapiens
  misc_RNA (1)...(19): siRNA sense strand
uggaaaugaaagugaagua

SEQ ID NO: 2340914 - RNA, 19 nt, Homo sapiens
  misc_RNA (1)...(19): siRNA sense strand
ggaaggugguauaugggaa

SEQ ID NO: 2340915 - RNA, 19 nt, Homo sapiens
  misc_RNA (1)...(19): siRNA sense strand
gcaaaagaaucuaaggaga

SEQ ID NO: 2340916 - RNA, 19 nt, Homo sapiens
  misc_RNA (1)...(19): siRNA sense strand
uggagcaaaugaugagaaa

SEQ ID NO: 2340917 - RNA, 19 nt, Homo sapiens
  misc_RNA (1)...(19): siRNA sense strand
agaacaagaagaugaggaa

SEQ ID NO: 2340918 - RNA, 19 nt, Homo sapiens
  misc_RNA (1)...(19): siRNA sense strand
cguuauguuugguggaaga

SEQ ID NO: 2340919 - RNA, 19 nt, Homo sapiens
  misc_RNA (1)...(19): siRNA sense strand
aggcagaggaagaaucaaa

SEQ ID NO: 2340920 - RNA, 19 nt, Homo sapiens
  misc_RNA (1)...(19): siRNA sense strand
caaaagaaucuaaggagaa

SEQ ID NO: 2340921 - RNA, 19 nt, Homo sapiens
  misc_RNA (1)...(19): siRNA sense strand
ccgagaagguuuugagaca

SEQ ID NO: 2340922 - RNA, 19 nt, Homo sapiens
  misc_RNA (1)...(19): siRNA sense strand
uuacagaacaacagagaga

SEQ ID NO: 2340923 - RNA, 19 nt, Homo sapiens
  misc_RNA (1)...(19): siRNA sense strand
cgucacaaugguagagaau

SEQ ID NO: 2340924 - RNA, 19 nt, Homo sapiens
  misc_RNA (1)...(19): siRNA sense strand
cagaagaagaggaggguuc

SEQ ID NO: 2340925 - RNA, 19 nt, Homo sapiens
  misc_RNA (1)...(19): siRNA sense strand
aagaagagaggaugagaau

SEQ ID NO: 2340926 - RNA, 19 nt, Homo sapiens
  misc_RNA (1)...(19): siRNA sense strand
agaggaagaaucaaagaaa

SEQ ID NO: 2340927 - RNA, 19 nt, Homo sapiens
  misc_RNA (1)...(19): siRNA sense strand
cagcaaguauggaagaaaa

SEQ ID NO: 2340928 - RNA, 19 nt, Homo sapiens
  misc_RNA (1)...(19): siRNA sense strand
cagaacaagaagagaggau

SEQ ID NO: 2340929 - RNA, 19 nt, Homo sapiens
  misc_RNA (1)...(19): siRNA sense strand
caaugaacggcaagaacaa

SEQ ID NO: 2340930 - RNA, 19 nt, Homo sapiens
  misc_RNA (1)...(19): siRNA sense strand
aagaaaaggugaaggcaga

SEQ ID NO: 2340931 - RNA, 19 nt, Homo sapiens
  misc_RNA (1)...(19): siRNA sense strand
gaggaagaaucaaagaaaa

SEQ ID NO: 2340932 - RNA, 19 nt, Homo sapiens
  misc_RNA (1)...(19): siRNA sense strand
agaaacaucaagaggaaga

SEQ ID NO: 2340933 - RNA, 19 nt, Homo sapiens
  misc_RNA (1)...(19): siRNA sense strand
uggccuaaauuuaagcaaa

SEQ ID NO: 2340934 - RNA, 19 nt, Homo sapiens
  misc_RNA (1)...(19): siRNA sense strand
ccaacaaagaugauaccaa

SEQ ID NO: 2340935 - RNA, 19 nt, Homo sapiens
  misc_RNA (1)...(19): siRNA sense strand
ggcugaaacagaagaacaa

SEQ ID NO: 2340936 - RNA, 19 nt, Homo sapiens
  misc_RNA (1)...(19): siRNA sense strand
agugaaaggcggacaguga

SEQ ID NO: 2340937 - RNA, 19 nt, Homo sapiens
  misc_RNA (1)...(19): siRNA sense strand
aguaaaugagccagaagaa

SEQ ID NO: 2340938 - RNA, 19 nt, Homo sapiens
  misc_RNA (1)...(19): siRNA sense strand
ggguggagaugaagcugaa

SEQ ID NO: 2340939 - RNA, 19 nt, Homo sapiens
  misc_RNA (1)...(19): siRNA sense strand
cauucaagcucuggauaaa

SEQ ID NO: 2340940 - RNA, 19 nt, Homo sapiens
  misc_RNA (1)...(19): siRNA sense strand
gugccaaguucuuaggaga

SEQ ID NO: 2340941 - RNA, 19 nt, Homo sapiens
  misc_RNA (1)...(19): siRNA sense strand
gggcugaaacagaagaaca

SEQ ID NO: 2340942 - RNA, 19 nt, Homo sapiens
  misc_RNA (1)...(19): siRNA sense strand
caagaagagaggaugagaa

SEQ ID NO: 2340943 - RNA, 19 nt, Homo sapiens
  misc_RNA (1)...(19): siRNA sense strand
gcuccagaauacugagaga

SEQ ID NO: 2340944 - RNA, 19 nt, Homo sapiens
  misc_RNA (1)...(19): siRNA sense strand
agaugaagaugcucggaau

SEQ ID NO: 2340945 - RNA, 19 nt, Homo sapiens
  misc_RNA (1)...(19): siRNA sense strand
uuaccaaacaacaaggaaa

SEQ ID NO: 2340946 - RNA, 19 nt, Homo sapiens
  misc_RNA (1)...(19): siRNA sense strand
auuagaggguggagaugaa

SEQ ID NO: 2340947 - RNA, 19 nt, Homo sapiens
  misc_RNA (1)...(19): siRNA sense strand
accaagaagugaaagacua

SEQ ID NO: 2340948 - RNA, 19 nt, Homo sapiens
  misc_RNA (1)...(19): siRNA sense strand
ccaagaagugaaagacuau

SEQ ID NO: 2340949 - RNA, 19 nt, Homo sapiens
  misc_RNA (1)...(19): siRNA sense strand
gaggaagagaauacagauu

SEQ ID NO: 2340950 - RNA, 19 nt, Homo sapiens
  misc_RNA (1)...(19): siRNA sense strand
gaaagaagcaagaagagca

SEQ ID NO: 2340951 - RNA, 19 nt, Homo sapiens
  misc_RNA (1)...(19): siRNA sense strand
ggacagccgaccagaggaa

SEQ ID NO: 2340952 - RNA, 19 nt, Homo sapiens
  misc_RNA (1)...(19): siRNA sense strand
guauaugggaagaugaaga

SEQ ID NO: 2340953 - RNA, 19 nt, Homo sapiens
  misc_RNA (1)...(19): siRNA sense strand
agaagaacaaucuggaaau

SEQ ID NO: 2340954 - RNA, 19 nt, Homo sapiens
  misc_RNA (1)...(19): siRNA sense strand
agagaaagaagcaagaaga

SEQ ID NO: 2340955 - RNA, 19 nt, Homo sapiens
  misc_RNA (1)...(19): siRNA sense strand
uugaagaggaugaagaaga

SEQ ID NO: 2340956 - RNA, 19 nt, Homo sapiens
  misc_RNA (1)...(19): siRNA sense strand
ugacuuggaaggugguaua

SEQ ID NO: 2340957 - RNA, 19 nt, Homo sapiens
  misc_RNA (1)...(19): siRNA sense strand
aggccuaguaaaugacaaa

SEQ ID NO: 2340958 - RNA, 19 nt, Homo sapiens
  misc_RNA (1)...(19): siRNA sense strand
agaagaggaggaagagaau

SEQ ID NO: 2340959 - RNA, 19 nt, Homo sapiens
  misc_RNA (1)...(19): siRNA sense strand
agaagaagagacuggaaga

SEQ ID NO: 2340960 - RNA, 19 nt, Homo sapiens
  misc_RNA (1)...(19): siRNA sense strand
aggaagacaaggaacgcaa

SEQ ID NO: 2340961 - RNA, 19 nt, Homo sapiens
  misc_RNA (1)...(19): siRNA sense strand
caagaggaagagagaaaga

SEQ ID NO: 2340962 - RNA, 19 nt, Homo sapiens
  misc_RNA (1)...(19): siRNA sense strand
ccuccuagugagauaauua

SEQ ID NO: 2340963 - RNA, 19 nt, Homo sapiens
  misc_RNA (1)...(19): siRNA sense strand
aagagaauacugagguaau

SEQ ID NO: 2340964 - RNA, 19 nt, Homo sapiens
  misc_RNA (1)...(19): siRNA sense strand
ccugaagacaagaagaaga

SEQ ID NO: 2340965 - RNA, 19 nt, Homo sapiens
  misc_RNA (1)...(19): siRNA sense strand
aggaugaagaagaagaaga

SEQ ID NO: 2340966 - RNA, 19 nt, Homo sapiens
  misc_RNA (1)...(19): siRNA sense strand
acacaaaagcaaacaggaa

SEQ ID NO: 2340967 - RNA, 19 nt, Homo sapiens
  misc_RNA (1)...(19): siRNA sense strand
ggauggaguguuagaagau

SEQ ID NO: 2340968 - RNA, 19 nt, Homo sapiens
  misc_RNA (1)...(19): siRNA sense strand
auaaagaguccaacaaaga

SEQ ID NO: 2340969 - RNA, 19 nt, Homo sapiens
  misc_RNA (1)...(19): siRNA sense strand
uggaagaugauaagagaaa

SEQ ID NO: 2340970 - RNA, 19 nt, Homo sapiens
  misc_RNA (1)...(19): siRNA sense strand
cagaauacugagagacaaa

SEQ ID NO: 2340971 - RNA, 19 nt, Homo sapiens
  misc_RNA (1)...(19): siRNA sense strand
gauuaaaggcgguggacuu

SEQ ID NO: 2340972 - RNA, 19 nt, Homo sapiens
  misc_RNA (1)...(19): siRNA sense strand
aucaagaggaagagagaaa

SEQ ID NO: 2340973 - RNA, 19 nt, Homo sapiens
  misc_RNA (1)...(19): siRNA sense strand
ccaagaaggaggucagcaa

SEQ ID NO: 2340974 - RNA, 19 nt, Homo sapiens
  misc_RNA (1)...(19): siRNA sense strand
agacaaggaacgcaagaaa

SEQ ID NO: 2340975 - RNA, 19 nt, Homo sapiens
  misc_RNA (1)...(19): siRNA sense strand
aggugaaggcagaggaaga

SEQ ID NO: 2340976 - RNA, 19 nt, Homo sapiens
  misc_RNA (1)...(19): siRNA sense strand
guguagaagaugaggacuu

SEQ ID NO: 2340977 - RNA, 19 nt, Homo sapiens
  misc_RNA (1)...(19): siRNA sense strand
aagaagaggaggaagagaa

SEQ ID NO: 2340978 - RNA, 19 nt, Homo sapiens
  misc_RNA (1)...(19): siRNA sense strand
aagcaaggaaagaggagaa

SEQ ID NO: 2340979 - RNA, 19 nt, Homo sapiens
  misc_RNA (1)...(19): siRNA sense strand
cuucauaguuccuagacaa

SEQ ID NO: 2340980 - RNA, 19 nt, Homo sapiens
  misc_RNA (1)...(19): siRNA sense strand
uggaaaugaaagugaagua

SEQ ID NO: 2340981 - RNA, 19 nt, Homo sapiens
  misc_RNA (1)...(19): siRNA sense strand
ggaaggugguauaugggaa

SEQ ID NO: 2340982 - RNA, 19 nt, Homo sapiens
  misc_RNA (1)...(19): siRNA sense strand
gcaaaagaaucuaaggaga

SEQ ID NO: 2340983 - RNA, 19 nt, Homo sapiens
  misc_RNA (1)...(19): siRNA sense strand
uggagcaaaugaugagaaa

SEQ ID NO: 2340984 - RNA, 19 nt, Homo sapiens
  misc_RNA (1)...(19): siRNA sense strand
agaacaagaagaugaggaa

SEQ ID NO: 2340985 - RNA, 19 nt, Homo sapiens
  misc_RNA (1)...(19): siRNA sense strand
cguuauguuugguggaaga

SEQ ID NO: 2340986 - RNA, 19 nt, Homo sapiens
  misc_RNA (1)...(19): siRNA sense strand
aggcagaggaagaaucaaa

SEQ ID NO: 2340987 - RNA, 19 nt, Homo sapiens
  misc_RNA (1)...(19): siRNA sense strand
caaaagaaucuaaggagaa

SEQ ID NO: 2340988 - RNA, 19 nt, Homo sapiens
  misc_RNA (1)...(19): siRNA sense strand
ccgagaagguuuugagaca

SEQ ID NO: 2340989 - RNA, 19 nt, Homo sapiens
  misc_RNA (1)...(19): siRNA sense strand
uuacagaacaacagagaga

SEQ ID NO: 2340990 - RNA, 19 nt, Homo sapiens
  misc_RNA (1)...(19): siRNA sense strand
cgucacaaugguagagaau

SEQ ID NO: 2340991 - RNA, 19 nt, Homo sapiens
  misc_RNA (1)...(19): siRNA sense strand
cagaagaagaggaggguuc

SEQ ID NO: 2340992 - RNA, 19 nt, Homo sapiens
  misc_RNA (1)...(19): siRNA sense strand
aagaagagaggaugagaau

SEQ ID NO: 2340993 - RNA, 19 nt, Homo sapiens
  misc_RNA (1)...(19): siRNA sense strand
agaggaagaaucaaagaaa

SEQ ID NO: 2340994 - RNA, 19 nt, Homo sapiens
  misc_RNA (1)...(19): siRNA sense strand
cagcaaguauggaagaaaa

SEQ ID NO: 2340995 - RNA, 19 nt, Homo sapiens
  misc_RNA (1)...(19): siRNA sense strand
cagaacaagaagagaggau

SEQ ID NO: 2340996 - RNA, 19 nt, Homo sapiens
  misc_RNA (1)...(19): siRNA sense strand
caaugaacggcaagaacaa

SEQ ID NO: 2340997 - RNA, 19 nt, Homo sapiens
  misc_RNA (1)...(19): siRNA sense strand
aagaaaaggugaaggcaga

SEQ ID NO: 2340998 - RNA, 19 nt, Homo sapiens
  misc_RNA (1)...(19): siRNA sense strand
gaggaagaaucaaagaaaa

SEQ ID NO: 2340999 - RNA, 19 nt, Homo sapiens
  misc_RNA (1)...(19): siRNA sense strand
agaaacaucaagaggaaga

SEQ ID NO: 2341000 - RNA, 19 nt, Homo sapiens
  misc_RNA (1)...(19): siRNA sense strand
uggccuaaauuuaagcaaa

SEQ ID NO: 2341001 - RNA, 19 nt, Homo sapiens
  misc_RNA (1)...(19): siRNA sense strand
ccaacaaagaugauaccaa

SEQ ID NO: 2341002 - RNA, 19 nt, Homo sapiens
  misc_RNA (1)...(19): siRNA sense strand
ggcugaaacagaagaacaa

SEQ ID NO: 2341003 - RNA, 19 nt, Homo sapiens
  misc_RNA (1)...(19): siRNA sense strand
agugaaaggcggacaguga

SEQ ID NO: 2341004 - RNA, 19 nt, Homo sapiens
  misc_RNA (1)...(19): siRNA sense strand
aguaaaugagccagaagaa

SEQ ID NO: 2341005 - RNA, 19 nt, Homo sapiens
  misc_RNA (1)...(19): siRNA sense strand
ggguggagaugaagcugaa

SEQ ID NO: 2341006 - RNA, 19 nt, Homo sapiens
  misc_RNA (1)...(19): siRNA sense strand
cauucaagcucuggauaaa

SEQ ID NO: 2341007 - RNA, 19 nt, Homo sapiens
  misc_RNA (1)...(19): siRNA sense strand
gugccaaguucuuaggaga

SEQ ID NO: 2341008 - RNA, 19 nt, Homo sapiens
  misc_RNA (1)...(19): siRNA sense strand
gggcugaaacagaagaaca

SEQ ID NO: 2341009 - RNA, 19 nt, Homo sapiens
  misc_RNA (1)...(19): siRNA sense strand
caagaagagaggaugagaa

SEQ ID NO: 2341010 - RNA, 19 nt, Homo sapiens
  misc_RNA (1)...(19): siRNA sense strand
gcuccagaauacugagaga

SEQ ID NO: 2341011 - RNA, 19 nt, Homo sapiens
  misc_RNA (1)...(19): siRNA sense strand
agaugaagaugcucggaau

SEQ ID NO: 2341012 - RNA, 19 nt, Homo sapiens
  misc_RNA (1)...(19): siRNA sense strand
uuaccaaacaacaaggaaa

SEQ ID NO: 2341013 - RNA, 19 nt, Homo sapiens
  misc_RNA (1)...(19): siRNA sense strand
auuagaggguggagaugaa

SEQ ID NO: 2341014 - RNA, 19 nt, Homo sapiens
  misc_RNA (1)...(19): siRNA sense strand
accaagaagugaaagacua

SEQ ID NO: 2341015 - RNA, 19 nt, Homo sapiens
  misc_RNA (1)...(19): siRNA sense strand
ccaagaagugaaagacuau

SEQ ID NO: 2341016 - RNA, 19 nt, Homo sapiens
  misc_RNA (1)...(19): siRNA sense strand
gaggaagagaauacagauu

SEQ ID NO: 2341017 - RNA, 19 nt, Homo sapiens
  misc_RNA (1)...(19): siRNA sense strand
gaaagaagcaagaagagca

SEQ ID NO: 2341018 - RNA, 19 nt, Homo sapiens
  misc_RNA (1)...(19): siRNA sense strand
ggacagccgaccagaggaa

SEQ ID NO: 2341019 - RNA, 19 nt, Homo sapiens
  misc_RNA (1)...(19): siRNA sense strand
guauaugggaagaugaaga

SEQ ID NO: 2341020 - RNA, 19 nt, Homo sapiens
  misc_RNA (1)...(19): siRNA sense strand
agaagaacaaucuggaaau

SEQ ID NO: 2341021 - RNA, 19 nt, Homo sapiens
  misc_RNA (1)...(19): siRNA sense strand
agagaaagaagcaagaaga

SEQ ID NO: 2341022 - RNA, 19 nt, Homo sapiens
  misc_RNA (1)...(19): siRNA sense strand
uugaagaggaugaagaaga

SEQ ID NO: 2341023 - RNA, 19 nt, Homo sapiens
  misc_RNA (1)...(19): siRNA sense strand
ugacuuggaaggugguaua

SEQ ID NO: 2341024 - RNA, 19 nt, Homo sapiens
  misc_RNA (1)...(19): siRNA sense strand
aggccuaguaaaugacaaa

SEQ ID NO: 2341025 - RNA, 19 nt, Homo sapiens
  misc_RNA (1)...(19): siRNA sense strand
agaagaggaggaagagaau

SEQ ID NO: 2341026 - RNA, 19 nt, Homo sapiens
  misc_RNA (1)...(19): siRNA sense strand
agaagaagagacuggaaga

SEQ ID NO: 2341027 - RNA, 19 nt, Homo sapiens
  misc_RNA (1)...(19): siRNA sense strand
aggaagacaaggaacgcaa

SEQ ID NO: 2341028 - RNA, 19 nt, Homo sapiens
  misc_RNA (1)...(19): siRNA sense strand
caagaggaagagagaaaga

SEQ ID NO: 2341029 - RNA, 19 nt, Homo sapiens
  misc_RNA (1)...(19): siRNA sense strand
ccuccuagugagauaauua

SEQ ID NO: 2341030 - RNA, 19 nt, Homo sapiens
  misc_RNA (1)...(19): siRNA sense strand
aagagaauacugagguaau

SEQ ID NO: 2341031 - RNA, 19 nt, Homo sapiens
  misc_RNA (1)...(19): siRNA sense strand
ccugaagacaagaagaaga

SEQ ID NO: 2341032 - RNA, 19 nt, Homo sapiens
  misc_RNA (1)...(19): siRNA sense strand
aggaugaagaagaagaaga

SEQ ID NO: 2341033 - RNA, 19 nt, Homo sapiens
  misc_RNA (1)...(19): siRNA sense strand
acacaaaagcaaacaggaa

SEQ ID NO: 2341034 - RNA, 19 nt, Homo sapiens
  misc_RNA (1)...(19): siRNA sense strand
ggauggaguguuagaagau

SEQ ID NO: 2341035 - RNA, 19 nt, Homo sapiens
  misc_RNA (1)...(19): siRNA sense strand
auaaagaguccaacaaaga

SEQ ID NO: 2341036 - RNA, 19 nt, Homo sapiens
  misc_RNA (1)...(19): siRNA sense strand
ugaagaugcuuguggccaa

SEQ ID NO: 2341037 - RNA, 19 nt, Homo sapiens
  misc_RNA (1)...(19): siRNA sense strand
uggugaauaucaaggccaa

SEQ ID NO: 2341038 - RNA, 19 nt, Homo sapiens
  misc_RNA (1)...(19): siRNA sense strand
acgccaaucaccagggcaa

SEQ ID NO: 2341039 - RNA, 19 nt, Homo sapiens
  misc_RNA (1)...(19): siRNA sense strand
auaucaaggccaaggugaa

SEQ ID NO: 2341040 - RNA, 19 nt, Homo sapiens
  misc_RNA (1)...(19): siRNA sense strand
gcguggagcuagugcagca

SEQ ID NO: 2341041 - RNA, 19 nt, Homo sapiens
  misc_RNA (1)...(19): siRNA sense strand
ccagcauggaggugggcau

SEQ ID NO: 2341042 - RNA, 19 nt, Homo sapiens
  misc_RNA (1)...(19): siRNA sense strand
guacagacgcggagagacc

SEQ ID NO: 2341043 - RNA, 19 nt, Homo sapiens
  misc_RNA (1)...(19): siRNA sense strand
guguuggacaaguggugaa

SEQ ID NO: 2341044 - RNA, 19 nt, Homo sapiens
  misc_RNA (1)...(19): siRNA sense strand
aggagaagauggagcacag

SEQ ID NO: 2341045 - RNA, 19 nt, Homo sapiens
  misc_RNA (1)...(19): siRNA sense strand
acgcugaaggccauugaaa

SEQ ID NO: 2341046 - RNA, 19 nt, Homo sapiens
  misc_RNA (1)...(19): siRNA sense strand
acauggagaugguggugca

SEQ ID NO: 2341047 - RNA, 19 nt, Homo sapiens
  misc_RNA (1)...(19): siRNA sense strand
cgcugaaggccauugaaau

SEQ ID NO: 2341048 - RNA, 19 nt, Homo sapiens
  misc_RNA (1)...(19): siRNA sense strand
ugaagaugcuuguggccaa

SEQ ID NO: 2341049 - RNA, 19 nt, Homo sapiens
  misc_RNA (1)...(19): siRNA sense strand
uggugaauaucaaggccaa

SEQ ID NO: 2341050 - RNA, 19 nt, Homo sapiens
  misc_RNA (1)...(19): siRNA sense strand
acgccaaucaccagggcaa

SEQ ID NO: 2341051 - RNA, 19 nt, Homo sapiens
  misc_RNA (1)...(19): siRNA sense strand
auaucaaggccaaggugaa

SEQ ID NO: 2341052 - RNA, 19 nt, Homo sapiens
  misc_RNA (1)...(19): siRNA sense strand
gcguggagcuagugcagca

SEQ ID NO: 2341053 - RNA, 19 nt, Homo sapiens
  misc_RNA (1)...(19): siRNA sense strand
ccagcauggaggugggcau

SEQ ID NO: 2341054 - RNA, 19 nt, Homo sapiens
  misc_RNA (1)...(19): siRNA sense strand
guacagacgcggagagacc

SEQ ID NO: 2341055 - RNA, 19 nt, Homo sapiens
  misc_RNA (1)...(19): siRNA sense strand
guguuggacaaguggugaa

SEQ ID NO: 2341056 - RNA, 19 nt, Homo sapiens
  misc_RNA (1)...(19): siRNA sense strand
aggagaagauggagcacag

SEQ ID NO: 2341057 - RNA, 19 nt, Homo sapiens
  misc_RNA (1)...(19): siRNA sense strand
acgcugaaggccauugaaa

SEQ ID NO: 2341058 - RNA, 19 nt, Homo sapiens
  misc_RNA (1)...(19): siRNA sense strand
acauggagaugguggugca

SEQ ID NO: 2341059 - RNA, 19 nt, Homo sapiens
  misc_RNA (1)...(19): siRNA sense strand
cgcugaaggccauugaaau

SEQ ID NO: 2341060 - RNA, 19 nt, Homo sapiens
  misc_RNA (1)...(19): siRNA sense strand
ugagaaaagagaagagaaa

SEQ ID NO: 2341061 - RNA, 19 nt, Homo sapiens
  misc_RNA (1)...(19): siRNA sense strand
gguccaaaggaaagcgcua

SEQ ID NO: 2341062 - RNA, 19 nt, Homo sapiens
  misc_RNA (1)...(19): siRNA sense strand
auauaaaggcaauggacuu

SEQ ID NO: 2341063 - RNA, 19 nt, Homo sapiens
  misc_RNA (1)...(19): siRNA sense strand
ggugaaugaagcaggugaa

SEQ ID NO: 2341064 - RNA, 19 nt, Homo sapiens
  misc_RNA (1)...(19): siRNA sense strand
gcaauauaucaguggacga

SEQ ID NO: 2341065 - RNA, 19 nt, Homo sapiens
  misc_RNA (1)...(19): siRNA sense strand
gaagaaacagcaagggagu

SEQ ID NO: 2341066 - RNA, 19 nt, Homo sapiens
  misc_RNA (1)...(19): siRNA sense strand
gauucugguccaaaggaaa

SEQ ID NO: 2341067 - RNA, 19 nt, Homo sapiens
  misc_RNA (1)...(19): siRNA sense strand
cggagacaaagucgggaaa

SEQ ID NO: 2341068 - RNA, 19 nt, Homo sapiens
  misc_RNA (1)...(19): siRNA sense strand
caagaaagacauuggccga

SEQ ID NO: 2341069 - RNA, 19 nt, Homo sapiens
  misc_RNA (1)...(19): siRNA sense strand
gagaagaaacagcaaggga

SEQ ID NO: 2341070 - RNA, 19 nt, Homo sapiens
  misc_RNA (1)...(19): siRNA sense strand
cugugaagcuacaugcgaa

SEQ ID NO: 2341071 - RNA, 19 nt, Homo sapiens
  misc_RNA (1)...(19): siRNA sense strand
agauaaugcuauuggcuuc

SEQ ID NO: 2341072 - RNA, 19 nt, Homo sapiens
  misc_RNA (1)...(19): siRNA sense strand
aggauagagaagaugauuu

SEQ ID NO: 2341073 - RNA, 19 nt, Homo sapiens
  misc_RNA (1)...(19): siRNA sense strand
agacacagaagaagggcca

SEQ ID NO: 2341074 - RNA, 19 nt, Homo sapiens
  misc_RNA (1)...(19): siRNA sense strand
ccggagacaaagucgggaa

SEQ ID NO: 2341075 - RNA, 19 nt, Homo sapiens
  misc_RNA (1)...(19): siRNA sense strand
ugcuacggcuggagaagaa

SEQ ID NO: 2341076 - RNA, 19 nt, Homo sapiens
  misc_RNA (1)...(19): siRNA sense strand
acuucgaguguuugugaaa

SEQ ID NO: 2341077 - RNA, 19 nt, Homo sapiens
  misc_RNA (1)...(19): siRNA sense strand
acuggaaacaggauagaga

SEQ ID NO: 2341078 - RNA, 19 nt, Homo sapiens
  misc_RNA (1)...(19): siRNA sense strand
aaaguggaagacagggaaa

SEQ ID NO: 2341079 - RNA, 19 nt, Homo sapiens
  misc_RNA (1)...(19): siRNA sense strand
cagaacguggcaagggcaa

SEQ ID NO: 2341080 - RNA, 19 nt, Homo sapiens
  misc_RNA (1)...(19): siRNA sense strand
gugcaaggcaucacggguu

SEQ ID NO: 2341081 - RNA, 19 nt, Homo sapiens
  misc_RNA (1)...(19): siRNA sense strand
augcaagcagggauauaaa

SEQ ID NO: 2341082 - RNA, 19 nt, Homo sapiens
  misc_RNA (1)...(19): siRNA sense strand
gggaaugaagagaaaauga

SEQ ID NO: 2341083 - RNA, 19 nt, Homo sapiens
  misc_RNA (1)...(19): siRNA sense strand
gaugugaaugaguguggaa

SEQ ID NO: 2341084 - RNA, 19 nt, Homo sapiens
  misc_RNA (1)...(19): siRNA sense strand
guaccaucaaagacagaau

SEQ ID NO: 2341085 - RNA, 19 nt, Homo sapiens
  misc_RNA (1)...(19): siRNA sense strand
gagauaaugcuauuggcuu

SEQ ID NO: 2341086 - RNA, 19 nt, Homo sapiens
  misc_RNA (1)...(19): siRNA sense strand
gauauaaaggcaauggacu

SEQ ID NO: 2341087 - RNA, 19 nt, Homo sapiens
  misc_RNA (1)...(19): siRNA sense strand
ccaaacuggaacauaaaga

SEQ ID NO: 2341088 - RNA, 19 nt, Homo sapiens
  misc_RNA (1)...(19): siRNA sense strand
ccacgagugaggaugaaaa

SEQ ID NO: 2341089 - RNA, 19 nt, Homo sapiens
  misc_RNA (1)...(19): siRNA sense strand
cuugcuuguuucaggcuua

SEQ ID NO: 2341090 - RNA, 19 nt, Homo sapiens
  misc_RNA (1)...(19): siRNA sense strand
cgggaaaaccugcagucaa

SEQ ID NO: 2341091 - RNA, 19 nt, Homo sapiens
  misc_RNA (1)...(19): siRNA sense strand
ccagaugcuacguguguga

SEQ ID NO: 2341092 - RNA, 19 nt, Homo sapiens
  misc_RNA (1)...(19): siRNA sense strand
aagcagggauauaaaggca

SEQ ID NO: 2341093 - RNA, 19 nt, Homo sapiens
  misc_RNA (1)...(19): siRNA sense strand
gaggaugaaaaguggaaga

SEQ ID NO: 2341094 - RNA, 19 nt, Homo sapiens
  misc_RNA (1)...(19): siRNA sense strand
cagcaagggagucugugaa

SEQ ID NO: 2341095 - RNA, 19 nt, Homo sapiens
  misc_RNA (1)...(19): siRNA sense strand
cugaaaauucugugaagga

SEQ ID NO: 2341096 - RNA, 19 nt, Homo sapiens
  misc_RNA (1)...(19): siRNA sense strand
gaagaaugacauagaggag

SEQ ID NO: 2341097 - RNA, 19 nt, Homo sapiens
  misc_RNA (1)...(19): siRNA sense strand
aggaacugaugcuaccaaa

SEQ ID NO: 2341098 - RNA, 19 nt, Homo sapiens
  misc_RNA (1)...(19): siRNA sense strand
cccaaauggaagagacugu

SEQ ID NO: 2341099 - RNA, 19 nt, Homo sapiens
  misc_RNA (1)...(19): siRNA sense strand
augaaugugccucugguaa

SEQ ID NO: 2341100 - RNA, 19 nt, Homo sapiens
  misc_RNA (1)...(19): siRNA sense strand
ccuucaaguguaaaugcaa

SEQ ID NO: 2341101 - RNA, 19 nt, Homo sapiens
  misc_RNA (1)...(19): siRNA sense strand
agaaagaagaggaggaaaa

SEQ ID NO: 2341102 - RNA, 19 nt, Homo sapiens
  misc_RNA (1)...(19): siRNA sense strand
agguggaggaagaaggaaa

SEQ ID NO: 2341103 - RNA, 19 nt, Homo sapiens
  misc_RNA (1)...(19): siRNA sense strand
ccuccaaauucuauggcua

SEQ ID NO: 2341104 - RNA, 19 nt, Homo sapiens
  misc_RNA (1)...(19): siRNA sense strand
aggaaaaggaagaaaacaa

SEQ ID NO: 2341105 - RNA, 19 nt, Homo sapiens
  misc_RNA (1)...(19): siRNA sense strand
cgaaggaugaaguggaaaa

SEQ ID NO: 2341106 - RNA, 19 nt, Homo sapiens
  misc_RNA (1)...(19): siRNA sense strand
aggagaaagaagaggagga

SEQ ID NO: 2341107 - RNA, 19 nt, Homo sapiens
  misc_RNA (1)...(19): siRNA sense strand
augaggaagaggagaaaga

SEQ ID NO: 2341108 - RNA, 19 nt, Homo sapiens
  misc_RNA (1)...(19): siRNA sense strand
aggaagaaaacaaggacua

SEQ ID NO: 2341109 - RNA, 19 nt, Homo sapiens
  misc_RNA (1)...(19): siRNA sense strand
ccgagagacaagugaagau

SEQ ID NO: 2341110 - RNA, 19 nt, Homo sapiens
  misc_RNA (1)...(19): siRNA sense strand
aggaggaaaaggaagaaaa

SEQ ID NO: 2341111 - RNA, 19 nt, Homo sapiens
  misc_RNA (1)...(19): siRNA sense strand
gagaugaggagaaggugga

SEQ ID NO: 2341112 - RNA, 19 nt, Homo sapiens
  misc_RNA (1)...(19): siRNA sense strand
gagcccgagaugaggagaa

SEQ ID NO: 2341113 - RNA, 19 nt, Homo sapiens
  misc_RNA (1)...(19): siRNA sense strand
aggaagaaggaaaugagga

SEQ ID NO: 2341114 - RNA, 19 nt, Homo sapiens
  misc_RNA (1)...(19): siRNA sense strand
ggaaaugaggaagaggaga

SEQ ID NO: 2341115 - RNA, 19 nt, Homo sapiens
  misc_RNA (1)...(19): siRNA sense strand
aaaugaggaagaggagaaa

SEQ ID NO: 2341116 - RNA, 19 nt, Homo sapiens
  misc_RNA (1)...(19): siRNA sense strand
ugggacugaccgagagaca

SEQ ID NO: 2341117 - RNA, 19 nt, Homo sapiens
  misc_RNA (1)...(19): siRNA sense strand
gaggaggaauucauggaaa

SEQ ID NO: 2341118 - RNA, 19 nt, Homo sapiens
  misc_RNA (1)...(19): siRNA sense strand
aggaggaauucauggaaau

SEQ ID NO: 2341119 - RNA, 19 nt, Homo sapiens
  misc_RNA (1)...(19): siRNA sense strand
ggaggaauucauggaaaua

SEQ ID NO: 2341120 - RNA, 19 nt, Homo sapiens
  misc_RNA (1)...(19): siRNA sense strand
cuacaggaggaacgugaaa

SEQ ID NO: 2341121 - RNA, 19 nt, Homo sapiens
  misc_RNA (1)...(19): siRNA sense strand
ccauacuagugguucgcua

SEQ ID NO: 2341122 - RNA, 19 nt, Homo sapiens
  misc_RNA (1)...(19): siRNA sense strand
ucauggaaauaaugguuga

SEQ ID NO: 2341123 - RNA, 19 nt, Homo sapiens
  misc_RNA (1)...(19): siRNA sense strand
gaggaauucauggaaauaa

SEQ ID NO: 2341124 - RNA, 19 nt, Homo sapiens
  misc_RNA (1)...(19): siRNA sense strand
cccuagaagguauaaacaa

SEQ ID NO: 2341125 - RNA, 19 nt, Homo sapiens
  misc_RNA (1)...(19): siRNA sense strand
aggaggaacagaucggcaa

SEQ ID NO: 2341126 - RNA, 19 nt, Homo sapiens
  misc_RNA (1)...(19): siRNA sense strand
aggucauggaggaaucaua

SEQ ID NO: 2341127 - RNA, 19 nt, Homo sapiens
  misc_RNA (1)...(19): siRNA sense strand
agguagaagaggaggacau

SEQ ID NO: 2341128 - RNA, 19 nt, Homo sapiens
  misc_RNA (1)...(19): siRNA sense strand
aguaauacauacggagaaa

SEQ ID NO: 2341129 - RNA, 19 nt, Homo sapiens
  misc_RNA (1)...(19): siRNA sense strand
ugaugaagacagagaaaca

SEQ ID NO: 2341130 - RNA, 19 nt, Homo sapiens
  misc_RNA (1)...(19): siRNA sense strand
aaauaugggagcaaggaaa

SEQ ID NO: 2341131 - RNA, 19 nt, Homo sapiens
  misc_RNA (1)...(19): siRNA sense strand
guguaaucacaguggcaaa

SEQ ID NO: 2341132 - RNA, 19 nt, Homo sapiens
  misc_RNA (1)...(19): siRNA sense strand
cuaucaaggaccacagaaa

SEQ ID NO: 2341133 - RNA, 19 nt, Homo sapiens
  misc_RNA (1)...(19): siRNA sense strand
gggagauaauguagaaaau

SEQ ID NO: 2341134 - RNA, 19 nt, Homo sapiens
  misc_RNA (1)...(19): siRNA sense strand
acagagaaacagaaagaau

SEQ ID NO: 2341135 - RNA, 19 nt, Homo sapiens
  misc_RNA (1)...(19): siRNA sense strand
gggcaagaucugugaagca

SEQ ID NO: 2341136 - RNA, 19 nt, Homo sapiens
  misc_RNA (1)...(19): siRNA sense strand
uuaaauugaaagagggaga

SEQ ID NO: 2341137 - RNA, 19 nt, Homo sapiens
  misc_RNA (1)...(19): siRNA sense strand
guacccaaguuguggaaaa

SEQ ID NO: 2341138 - RNA, 19 nt, Homo sapiens
  misc_RNA (1)...(19): siRNA sense strand
gcuuacauuuugagugaaa

SEQ ID NO: 2341139 - RNA, 19 nt, Homo sapiens
  misc_RNA (1)...(19): siRNA sense strand
ggcaaauaacuguguagaa

SEQ ID NO: 2341140 - RNA, 19 nt, Homo sapiens
  misc_RNA (1)...(19): siRNA sense strand
guuucaagaagaaggauau

SEQ ID NO: 2341141 - RNA, 19 nt, Homo sapiens
  misc_RNA (1)...(19): siRNA sense strand
ucucuaaggcagauggcua

SEQ ID NO: 2341142 - RNA, 19 nt, Homo sapiens
  misc_RNA (1)...(19): siRNA sense strand
auugaaagagggagauaau

SEQ ID NO: 2341143 - RNA, 19 nt, Homo sapiens
  misc_RNA (1)...(19): siRNA sense strand
agccaagagacaauggaaa

SEQ ID NO: 2341144 - RNA, 19 nt, Homo sapiens
  misc_RNA (1)...(19): siRNA sense strand
ccauaaauuuggaccagga

SEQ ID NO: 2341145 - RNA, 19 nt, Homo sapiens
  misc_RNA (1)...(19): siRNA sense strand
accuauucuugaugagaua

SEQ ID NO: 2341146 - RNA, 19 nt, Homo sapiens
  misc_RNA (1)...(19): siRNA sense strand
ccugaaagaaggugagaug

SEQ ID NO: 2341147 - RNA, 19 nt, Homo sapiens
  misc_RNA (1)...(19): siRNA sense strand
gcaagaucugugaagcaaa

SEQ ID NO: 2341148 - RNA, 19 nt, Homo sapiens
  misc_RNA (1)...(19): siRNA sense strand
gcuacagccaagagacaau

SEQ ID NO: 2341149 - RNA, 19 nt, Homo sapiens
  misc_RNA (1)...(19): siRNA sense strand
aagucaaguuucaaagaga

SEQ ID NO: 2341150 - RNA, 19 nt, Homo sapiens
  misc_RNA (1)...(19): siRNA sense strand
cuuuaagacaauucagcaa

SEQ ID NO: 2341151 - RNA, 19 nt, Homo sapiens
  misc_RNA (1)...(19): siRNA sense strand
auugaugaagacagagaaa

SEQ ID NO: 2341152 - RNA, 19 nt, Homo sapiens
  misc_RNA (1)...(19): siRNA sense strand
aaucacaguggcaaagaaa

SEQ ID NO: 2341153 - RNA, 19 nt, Homo sapiens
  misc_RNA (1)...(19): siRNA sense strand
uguuucaagaagaaggaua

SEQ ID NO: 2341154 - RNA, 19 nt, Homo sapiens
  misc_RNA (1)...(19): siRNA sense strand
aaagaaggugagauguaua

SEQ ID NO: 2341155 - RNA, 19 nt, Homo sapiens
  misc_RNA (1)...(19): siRNA sense strand
aaguaauacauacggagaa

SEQ ID NO: 2341156 - RNA, 19 nt, Homo sapiens
  misc_RNA (1)...(19): siRNA sense strand
cacucuauguccaggcaaa

SEQ ID NO: 2341157 - RNA, 19 nt, Homo sapiens
  misc_RNA (1)...(19): siRNA sense strand
cugaauuagacuugaagga

SEQ ID NO: 2341158 - RNA, 19 nt, Homo sapiens
  misc_RNA (1)...(19): siRNA sense strand
uggaugagaugaugaaaau

SEQ ID NO: 2341159 - RNA, 19 nt, Homo sapiens
  misc_RNA (1)...(19): siRNA sense strand
aggaagaaguuuaucguac

SEQ ID NO: 2341160 - RNA, 19 nt, Homo sapiens
  misc_RNA (1)...(19): siRNA sense strand
uaaauuuggaccaggaaga

SEQ ID NO: 2341161 - RNA, 19 nt, Homo sapiens
  misc_RNA (1)...(19): siRNA sense strand
aggaucgacuuguggaaca

SEQ ID NO: 2341162 - RNA, 19 nt, Homo sapiens
  misc_RNA (1)...(19): siRNA sense strand
cuacacaaucccaguaaaa

SEQ ID NO: 2341163 - RNA, 19 nt, Homo sapiens
  misc_RNA (1)...(19): siRNA sense strand
uguaacaaccuuuaagaca

SEQ ID NO: 2341164 - RNA, 19 nt, Homo sapiens
  misc_RNA (1)...(19): siRNA sense strand
gugcaaaauaugggagcaa

SEQ ID NO: 2341165 - RNA, 19 nt, Homo sapiens
  misc_RNA (1)...(19): siRNA sense strand
ucacaguggcaaagaaacu

SEQ ID NO: 2341166 - RNA, 19 nt, Homo sapiens
  misc_RNA (1)...(19): siRNA sense strand
acacaagaugcaaacacaa

SEQ ID NO: 2341167 - RNA, 19 nt, Homo sapiens
  misc_RNA (1)...(19): siRNA sense strand
aaauugaaagagggagaua

SEQ ID NO: 2341168 - RNA, 19 nt, Homo sapiens
  misc_RNA (1)...(19): siRNA sense strand
auaacuguguagaagcuaa

SEQ ID NO: 2341169 - RNA, 19 nt, Homo sapiens
  misc_RNA (1)...(19): siRNA sense strand
ccagaaagucccaguucca

SEQ ID NO: 2341170 - RNA, 19 nt, Homo sapiens
  misc_RNA (1)...(19): siRNA sense strand
agacaauggaaacaaguca

SEQ ID NO: 2341171 - RNA, 19 nt, Homo sapiens
  misc_RNA (1)...(19): siRNA sense strand
gagugaaauaugucgagau

SEQ ID NO: 2341172 - RNA, 19 nt, Homo sapiens
  misc_RNA (1)...(19): siRNA sense strand
aggauacacaagaugcaaa

SEQ ID NO: 2341173 - RNA, 19 nt, Homo sapiens
  misc_RNA (1)...(19): siRNA sense strand
cugauaacggagaauggaa

SEQ ID NO: 2341174 - RNA, 19 nt, Homo sapiens
  misc_RNA (1)...(19): siRNA sense strand
gcuaaaaucaccagauguu

SEQ ID NO: 2341175 - RNA, 19 nt, Homo sapiens
  misc_RNA (1)...(19): siRNA sense strand
aauuagacuugaaggauac

SEQ ID NO: 2341176 - RNA, 19 nt, Homo sapiens
  misc_RNA (1)...(19): siRNA sense strand
cuggaugagaugaugaaaa

SEQ ID NO: 2341177 - RNA, 19 nt, Homo sapiens
  misc_RNA (1)...(19): siRNA sense strand
auaaggagaaucugcgcua

SEQ ID NO: 2341178 - RNA, 19 nt, Homo sapiens
  misc_RNA (1)...(19): siRNA sense strand
gcaagaugugagauggaaa

SEQ ID NO: 2341179 - RNA, 19 nt, Homo sapiens
  misc_RNA (1)...(19): siRNA sense strand
gggaagugguggaaggacu

SEQ ID NO: 2341180 - RNA, 19 nt, Homo sapiens
  misc_RNA (1)...(19): siRNA sense strand
cgauauagagagagagaag

SEQ ID NO: 2341181 - RNA, 19 nt, Homo sapiens
  misc_RNA (1)...(19): siRNA sense strand
cuucagaggacauggaaaa

SEQ ID NO: 2341182 - RNA, 19 nt, Homo sapiens
  misc_RNA (1)...(19): siRNA sense strand
ggauugagcacuauggaga

SEQ ID NO: 2341183 - RNA, 19 nt, Homo sapiens
  misc_RNA (1)...(19): siRNA sense strand
ugaaauaugccaagagcca

SEQ ID NO: 2341184 - RNA, 19 nt, Homo sapiens
  misc_RNA (1)...(19): siRNA sense strand
gagcaaauccuaugccgaa

SEQ ID NO: 2341185 - RNA, 19 nt, Homo sapiens
  misc_RNA (1)...(19): siRNA sense strand
aaauaugccaagagccaaa

SEQ ID NO: 2341186 - RNA, 19 nt, Homo sapiens
  misc_RNA (1)...(19): siRNA sense strand
gcauagaccuugacaccga

SEQ ID NO: 2341187 - RNA, 19 nt, Homo sapiens
  misc_RNA (1)...(19): siRNA sense strand
gccgaaaggcuacgagcaa

SEQ ID NO: 2341188 - RNA, 19 nt, Homo sapiens
  misc_RNA (1)...(19): siRNA sense strand
uagaagaagcugaaauaca

SEQ ID NO: 2341189 - RNA, 19 nt, Homo sapiens
  misc_RNA (1)...(19): siRNA sense strand
ccuugauaguggucgggaa

SEQ ID NO: 2341190 - RNA, 19 nt, Homo sapiens
  misc_RNA (1)...(19): siRNA sense strand
cacuaaugcccaugagauu

SEQ ID NO: 2341191 - RNA, 19 nt, Homo sapiens
  misc_RNA (1)...(19): siRNA sense strand
ccaugagauugaaggcaca

SEQ ID NO: 2341192 - RNA, 19 nt, Homo sapiens
  misc_RNA (1)...(19): siRNA sense strand
gacgaugacucuuggguga

SEQ ID NO: 2341193 - RNA, 19 nt, Homo sapiens
  misc_RNA (1)...(19): siRNA sense strand
ccuauuuggaacuuagaaa

SEQ ID NO: 2341194 - RNA, 19 nt, Homo sapiens
  misc_RNA (1)...(19): siRNA sense strand
agauuuuggagaagagaaa

SEQ ID NO: 2341195 - RNA, 19 nt, Homo sapiens
  misc_RNA (1)...(19): siRNA sense strand
auuucaaacuggaagcaau

SEQ ID NO: 2341196 - RNA, 19 nt, Homo sapiens
  misc_RNA (1)...(19): siRNA sense strand
gagagaaacugaagcagcu

SEQ ID NO: 2341197 - RNA, 19 nt, Homo sapiens
  misc_RNA (1)...(19): siRNA sense strand
guguuugacaggaguggaa

SEQ ID NO: 2341198 - RNA, 19 nt, Homo sapiens
  misc_RNA (1)...(19): siRNA sense strand
gcaguauaucaaagcagaa

SEQ ID NO: 2341199 - RNA, 19 nt, Homo sapiens
  misc_RNA (1)...(19): siRNA sense strand
auggagagauugucaucaa

SEQ ID NO: 2341200 - RNA, 19 nt, Homo sapiens
  misc_RNA (1)...(19): siRNA sense strand
gccuguguauggagagcaa

SEQ ID NO: 2341201 - RNA, 19 nt, Homo sapiens
  misc_RNA (1)...(19): siRNA sense strand
gcaaggaagucgacaggac

SEQ ID NO: 2341202 - RNA, 19 nt, Homo sapiens
  misc_RNA (1)...(19): siRNA sense strand
acuuagaagaagcugaaau

SEQ ID NO: 2341203 - RNA, 19 nt, Homo sapiens
  misc_RNA (1)...(19): siRNA sense strand
uuagauaaugagagacaga

SEQ ID NO: 2341204 - RNA, 19 nt, Homo sapiens
  misc_RNA (1)...(19): siRNA sense strand
caagaugugagauggaaaa

SEQ ID NO: 2341205 - RNA, 19 nt, Homo sapiens
  misc_RNA (1)...(19): siRNA sense strand
ccuacugacacucgauuua

SEQ ID NO: 2341206 - RNA, 19 nt, Homo sapiens
  misc_RNA (1)...(19): siRNA sense strand
cagugaugucuguaaagaa

SEQ ID NO: 2341207 - RNA, 19 nt, Homo sapiens
  misc_RNA (1)...(19): siRNA sense strand
cgacaggacagcugggaag

SEQ ID NO: 2341208 - RNA, 19 nt, Homo sapiens
  misc_RNA (1)...(19): siRNA sense strand
gcuacugcaaagugaauuu

SEQ ID NO: 2341209 - RNA, 19 nt, Homo sapiens
  misc_RNA (1)...(19): siRNA sense strand
aggaagggaacuuagaaga

SEQ ID NO: 2341210 - RNA, 19 nt, Homo sapiens
  misc_RNA (1)...(19): siRNA sense strand
ggaacuuagaagaagcuga

SEQ ID NO: 2341211 - RNA, 19 nt, Homo sapiens
  misc_RNA (1)...(19): siRNA sense strand
gggcagagguggauugagc

SEQ ID NO: 2341212 - RNA, 19 nt, Homo sapiens
  misc_RNA (1)...(19): siRNA sense strand
cagcggagagagagaaacu

SEQ ID NO: 2341213 - RNA, 19 nt, Homo sapiens
  misc_RNA (1)...(19): siRNA sense strand
ggggcaaauccauggaaau

SEQ ID NO: 2341214 - RNA, 19 nt, Homo sapiens
  misc_RNA (1)...(19): siRNA sense strand
cuguguauggagagcaaau

SEQ ID NO: 2341215 - RNA, 19 nt, Homo sapiens
  misc_RNA (1)...(19): siRNA sense strand
ucaugucagcggagagaga

SEQ ID NO: 2341216 - RNA, 19 nt, Homo sapiens
  misc_RNA (1)...(19): siRNA sense strand
agaugaaaaccgagcucua

SEQ ID NO: 2341217 - RNA, 19 nt, Homo sapiens
  misc_RNA (1)...(19): siRNA sense strand
auguaucgucagaaugaaa

SEQ ID NO: 2341218 - RNA, 19 nt, Homo sapiens
  misc_RNA (1)...(19): siRNA sense strand
agagagagaaacugaagca

SEQ ID NO: 2341219 - RNA, 19 nt, Homo sapiens
  misc_RNA (1)...(19): siRNA sense strand
gcguaugcaucuagcuacu

SEQ ID NO: 2341220 - RNA, 19 nt, Homo sapiens
  misc_RNA (1)...(19): siRNA sense strand
cgcuggaauuaaaugaaau

SEQ ID NO: 2341221 - RNA, 19 nt, Homo sapiens
  misc_RNA (1)...(19): siRNA sense strand
ccgaaaggcuacgagcaau

SEQ ID NO: 2341222 - RNA, 19 nt, Homo sapiens
  misc_RNA (1)...(19): siRNA sense strand
auacaaaagcagaggauug

SEQ ID NO: 2341223 - RNA, 19 nt, Homo sapiens
  misc_RNA (1)...(19): siRNA sense strand
gggaucauuuugaguggaa

SEQ ID NO: 2341224 - RNA, 19 nt, Homo sapiens
  misc_RNA (1)...(19): siRNA sense strand
gcacaguguuugacaggag

SEQ ID NO: 2341225 - RNA, 19 nt, Homo sapiens
  misc_RNA (1)...(19): siRNA sense strand
ucaggaaauccgacgauga

SEQ ID NO: 2341226 - RNA, 19 nt, Homo sapiens
  misc_RNA (1)...(19): siRNA sense strand
uggcaagaugugagaugga

SEQ ID NO: 2341227 - RNA, 19 nt, Homo sapiens
  misc_RNA (1)...(19): siRNA sense strand
aaagcagaggauugaacaa

SEQ ID NO: 2341228 - RNA, 19 nt, Homo sapiens
  misc_RNA (1)...(19): siRNA sense strand
agccaaaccgauauagaga

SEQ ID NO: 2341229 - RNA, 19 nt, Homo sapiens
  misc_RNA (1)...(19): siRNA sense strand
gagagaagcugcauggcug

SEQ ID NO: 2341230 - RNA, 19 nt, Homo sapiens
  misc_RNA (1)...(19): siRNA sense strand
aggucaagucagaagaagu

SEQ ID NO: 2341231 - RNA, 19 nt, Homo sapiens
  misc_RNA (1)...(19): siRNA sense strand
gcaagaugugagauggaaa

SEQ ID NO: 2341232 - RNA, 19 nt, Homo sapiens
  misc_RNA (1)...(19): siRNA sense strand
gggaagugguggaaggacu

SEQ ID NO: 2341233 - RNA, 19 nt, Homo sapiens
  misc_RNA (1)...(19): siRNA sense strand
cgauauagagagagagaag

SEQ ID NO: 2341234 - RNA, 19 nt, Homo sapiens
  misc_RNA (1)...(19): siRNA sense strand
cuucagaggacauggaaaa

SEQ ID NO: 2341235 - RNA, 19 nt, Homo sapiens
  misc_RNA (1)...(19): siRNA sense strand
ggauugagcacuauggaga

SEQ ID NO: 2341236 - RNA, 19 nt, Homo sapiens
  misc_RNA (1)...(19): siRNA sense strand
ugaaauaugccaagagcca

SEQ ID NO: 2341237 - RNA, 19 nt, Homo sapiens
  misc_RNA (1)...(19): siRNA sense strand
gagcaaauccuaugccgaa

SEQ ID NO: 2341238 - RNA, 19 nt, Homo sapiens
  misc_RNA (1)...(19): siRNA sense strand
aaauaugccaagagccaaa

SEQ ID NO: 2341239 - RNA, 19 nt, Homo sapiens
  misc_RNA (1)...(19): siRNA sense strand
gcauagaccuugacaccga

SEQ ID NO: 2341240 - RNA, 19 nt, Homo sapiens
  misc_RNA (1)...(19): siRNA sense strand
gccgaaaggcuacgagcaa

SEQ ID NO: 2341241 - RNA, 19 nt, Homo sapiens
  misc_RNA (1)...(19): siRNA sense strand
uagaagaagcugaaauaca

SEQ ID NO: 2341242 - RNA, 19 nt, Homo sapiens
  misc_RNA (1)...(19): siRNA sense strand
ccuugauaguggucgggaa

SEQ ID NO: 2341243 - RNA, 19 nt, Homo sapiens
  misc_RNA (1)...(19): siRNA sense strand
cacuaaugcccaugagauu

SEQ ID NO: 2341244 - RNA, 19 nt, Homo sapiens
  misc_RNA (1)...(19): siRNA sense strand
ccaugagauugaaggcaca

SEQ ID NO: 2341245 - RNA, 19 nt, Homo sapiens
  misc_RNA (1)...(19): siRNA sense strand
gacgaugacucuuggguga

SEQ ID NO: 2341246 - RNA, 19 nt, Homo sapiens
  misc_RNA (1)...(19): siRNA sense strand
ccuauuuggaacuuagaaa

SEQ ID NO: 2341247 - RNA, 19 nt, Homo sapiens
  misc_RNA (1)...(19): siRNA sense strand
agauuuuggagaagagaaa

SEQ ID NO: 2341248 - RNA, 19 nt, Homo sapiens
  misc_RNA (1)...(19): siRNA sense strand
auuucaaacuggaagcaau

SEQ ID NO: 2341249 - RNA, 19 nt, Homo sapiens
  misc_RNA (1)...(19): siRNA sense strand
gagagaaacugaagcagcu

SEQ ID NO: 2341250 - RNA, 19 nt, Homo sapiens
  misc_RNA (1)...(19): siRNA sense strand
guguuugacaggaguggaa

SEQ ID NO: 2341251 - RNA, 19 nt, Homo sapiens
  misc_RNA (1)...(19): siRNA sense strand
gcaguauaucaaagcagaa

SEQ ID NO: 2341252 - RNA, 19 nt, Homo sapiens
  misc_RNA (1)...(19): siRNA sense strand
auggagagauugucaucaa

SEQ ID NO: 2341253 - RNA, 19 nt, Homo sapiens
  misc_RNA (1)...(19): siRNA sense strand
gccuguguauggagagcaa

SEQ ID NO: 2341254 - RNA, 19 nt, Homo sapiens
  misc_RNA (1)...(19): siRNA sense strand
gcaaggaagucgacaggac

SEQ ID NO: 2341255 - RNA, 19 nt, Homo sapiens
  misc_RNA (1)...(19): siRNA sense strand
acuuagaagaagcugaaau

SEQ ID NO: 2341256 - RNA, 19 nt, Homo sapiens
  misc_RNA (1)...(19): siRNA sense strand
uuagauaaugagagacaga

SEQ ID NO: 2341257 - RNA, 19 nt, Homo sapiens
  misc_RNA (1)...(19): siRNA sense strand
caagaugugagauggaaaa

SEQ ID NO: 2341258 - RNA, 19 nt, Homo sapiens
  misc_RNA (1)...(19): siRNA sense strand
ccuacugacacucgauuua

SEQ ID NO: 2341259 - RNA, 19 nt, Homo sapiens
  misc_RNA (1)...(19): siRNA sense strand
cagugaugucuguaaagaa

SEQ ID NO: 2341260 - RNA, 19 nt, Homo sapiens
  misc_RNA (1)...(19): siRNA sense strand
cgacaggacagcugggaag

SEQ ID NO: 2341261 - RNA, 19 nt, Homo sapiens
  misc_RNA (1)...(19): siRNA sense strand
gcuacugcaaagugaauuu

SEQ ID NO: 2341262 - RNA, 19 nt, Homo sapiens
  misc_RNA (1)...(19): siRNA sense strand
aggaagggaacuuagaaga

SEQ ID NO: 2341263 - RNA, 19 nt, Homo sapiens
  misc_RNA (1)...(19): siRNA sense strand
ggaacuuagaagaagcuga

SEQ ID NO: 2341264 - RNA, 19 nt, Homo sapiens
  misc_RNA (1)...(19): siRNA sense strand
gggcagagguggauugagc

SEQ ID NO: 2341265 - RNA, 19 nt, Homo sapiens
  misc_RNA (1)...(19): siRNA sense strand
cagcggagagagagaaacu

SEQ ID NO: 2341266 - RNA, 19 nt, Homo sapiens
  misc_RNA (1)...(19): siRNA sense strand
ggggcaaauccauggaaau

SEQ ID NO: 2341267 - RNA, 19 nt, Homo sapiens
  misc_RNA (1)...(19): siRNA sense strand
cuguguauggagagcaaau

SEQ ID NO: 2341268 - RNA, 19 nt, Homo sapiens
  misc_RNA (1)...(19): siRNA sense strand
ucaugucagcggagagaga

SEQ ID NO: 2341269 - RNA, 19 nt, Homo sapiens
  misc_RNA (1)...(19): siRNA sense strand
agaugaaaaccgagcucua

SEQ ID NO: 2341270 - RNA, 19 nt, Homo sapiens
  misc_RNA (1)...(19): siRNA sense strand
auguaucgucagaaugaaa

SEQ ID NO: 2341271 - RNA, 19 nt, Homo sapiens
  misc_RNA (1)...(19): siRNA sense strand
agagagagaaacugaagca

SEQ ID NO: 2341272 - RNA, 19 nt, Homo sapiens
  misc_RNA (1)...(19): siRNA sense strand
gcguaugcaucuagcuacu

SEQ ID NO: 2341273 - RNA, 19 nt, Homo sapiens
  misc_RNA (1)...(19): siRNA sense strand
cgcuggaauuaaaugaaau

SEQ ID NO: 2341274 - RNA, 19 nt, Homo sapiens
  misc_RNA (1)...(19): siRNA sense strand
ccgaaaggcuacgagcaau

SEQ ID NO: 2341275 - RNA, 19 nt, Homo sapiens
  misc_RNA (1)...(19): siRNA sense strand
auacaaaagcagaggauug

SEQ ID NO: 2341276 - RNA, 19 nt, Homo sapiens
  misc_RNA (1)...(19): siRNA sense strand
gggaucauuuugaguggaa

SEQ ID NO: 2341277 - RNA, 19 nt, Homo sapiens
  misc_RNA (1)...(19): siRNA sense strand
gcacaguguuugacaggag

SEQ ID NO: 2341278 - RNA, 19 nt, Homo sapiens
  misc_RNA (1)...(19): siRNA sense strand
ucaggaaauccgacgauga

SEQ ID NO: 2341279 - RNA, 19 nt, Homo sapiens
  misc_RNA (1)...(19): siRNA sense strand
uggcaagaugugagaugga

SEQ ID NO: 2341280 - RNA, 19 nt, Homo sapiens
  misc_RNA (1)...(19): siRNA sense strand
aaagcagaggauugaacaa

SEQ ID NO: 2341281 - RNA, 19 nt, Homo sapiens
  misc_RNA (1)...(19): siRNA sense strand
agccaaaccgauauagaga

SEQ ID NO: 2341282 - RNA, 19 nt, Homo sapiens
  misc_RNA (1)...(19): siRNA sense strand
gagagaagcugcauggcug

SEQ ID NO: 2341283 - RNA, 19 nt, Homo sapiens
  misc_RNA (1)...(19): siRNA sense strand
aggucaagucagaagaagu

SEQ ID NO: 2341284 - RNA, 19 nt, Homo sapiens
  misc_RNA (1)...(19): siRNA sense strand
gcaagaugugagauggaaa

SEQ ID NO: 2341285 - RNA, 19 nt, Homo sapiens
  misc_RNA (1)...(19): siRNA sense strand
gggaagugguggaaggacu

SEQ ID NO: 2341286 - RNA, 19 nt, Homo sapiens
  misc_RNA (1)...(19): siRNA sense strand
cgauauagagagagagaag

SEQ ID NO: 2341287 - RNA, 19 nt, Homo sapiens
  misc_RNA (1)...(19): siRNA sense strand
cuucagaggacauggaaaa

SEQ ID NO: 2341288 - RNA, 19 nt, Homo sapiens
  misc_RNA (1)...(19): siRNA sense strand
ggauugagcacuauggaga

SEQ ID NO: 2341289 - RNA, 19 nt, Homo sapiens
  misc_RNA (1)...(19): siRNA sense strand
ugaaauaugccaagagcca

SEQ ID NO: 2341290 - RNA, 19 nt, Homo sapiens
  misc_RNA (1)...(19): siRNA sense strand
gagcaaauccuaugccgaa

SEQ ID NO: 2341291 - RNA, 19 nt, Homo sapiens
  misc_RNA (1)...(19): siRNA sense strand
aaauaugccaagagccaaa

SEQ ID NO: 2341292 - RNA, 19 nt, Homo sapiens
  misc_RNA (1)...(19): siRNA sense strand
gcauagaccuugacaccga

SEQ ID NO: 2341293 - RNA, 19 nt, Homo sapiens
  misc_RNA (1)...(19): siRNA sense strand
gccgaaaggcuacgagcaa

SEQ ID NO: 2341294 - RNA, 19 nt, Homo sapiens
  misc_RNA (1)...(19): siRNA sense strand
uagaagaagcugaaauaca

SEQ ID NO: 2341295 - RNA, 19 nt, Homo sapiens
  misc_RNA (1)...(19): siRNA sense strand
ccuugauaguggucgggaa

SEQ ID NO: 2341296 - RNA, 19 nt, Homo sapiens
  misc_RNA (1)...(19): siRNA sense strand
cacuaaugcccaugagauu

SEQ ID NO: 2341297 - RNA, 19 nt, Homo sapiens
  misc_RNA (1)...(19): siRNA sense strand
ccaugagauugaaggcaca

SEQ ID NO: 2341298 - RNA, 19 nt, Homo sapiens
  misc_RNA (1)...(19): siRNA sense strand
gacgaugacucuuggguga

SEQ ID NO: 2341299 - RNA, 19 nt, Homo sapiens
  misc_RNA (1)...(19): siRNA sense strand
ccuauuuggaacuuagaaa

SEQ ID NO: 2341300 - RNA, 19 nt, Homo sapiens
  misc_RNA (1)...(19): siRNA sense strand
agauuuuggagaagagaaa

SEQ ID NO: 2341301 - RNA, 19 nt, Homo sapiens
  misc_RNA (1)...(19): siRNA sense strand
auuucaaacuggaagcaau

SEQ ID NO: 2341302 - RNA, 19 nt, Homo sapiens
  misc_RNA (1)...(19): siRNA sense strand
gagagaaacugaagcagcu

SEQ ID NO: 2341303 - RNA, 19 nt, Homo sapiens
  misc_RNA (1)...(19): siRNA sense strand
guguuugacaggaguggaa

SEQ ID NO: 2341304 - RNA, 19 nt, Homo sapiens
  misc_RNA (1)...(19): siRNA sense strand
gcaguauaucaaagcagaa

SEQ ID NO: 2341305 - RNA, 19 nt, Homo sapiens
  misc_RNA (1)...(19): siRNA sense strand
auggagagauugucaucaa

SEQ ID NO: 2341306 - RNA, 19 nt, Homo sapiens
  misc_RNA (1)...(19): siRNA sense strand
gccuguguauggagagcaa

SEQ ID NO: 2341307 - RNA, 19 nt, Homo sapiens
  misc_RNA (1)...(19): siRNA sense strand
gcaaggaagucgacaggac

SEQ ID NO: 2341308 - RNA, 19 nt, Homo sapiens
  misc_RNA (1)...(19): siRNA sense strand
acuuagaagaagcugaaau

SEQ ID NO: 2341309 - RNA, 19 nt, Homo sapiens
  misc_RNA (1)...(19): siRNA sense strand
uuagauaaugagagacaga

SEQ ID NO: 2341310 - RNA, 19 nt, Homo sapiens
  misc_RNA (1)...(19): siRNA sense strand
caagaugugagauggaaaa

SEQ ID NO: 2341311 - RNA, 19 nt, Homo sapiens
  misc_RNA (1)...(19): siRNA sense strand
ccuacugacacucgauuua

SEQ ID NO: 2341312 - RNA, 19 nt, Homo sapiens
  misc_RNA (1)...(19): siRNA sense strand
cagugaugucuguaaagaa

SEQ ID NO: 2341313 - RNA, 19 nt, Homo sapiens
  misc_RNA (1)...(19): siRNA sense strand
cgacaggacagcugggaag

SEQ ID NO: 2341314 - RNA, 19 nt, Homo sapiens
  misc_RNA (1)...(19): siRNA sense strand
gcuacugcaaagugaauuu

SEQ ID NO: 2341315 - RNA, 19 nt, Homo sapiens
  misc_RNA (1)...(19): siRNA sense strand
aggaagggaacuuagaaga

SEQ ID NO: 2341316 - RNA, 19 nt, Homo sapiens
  misc_RNA (1)...(19): siRNA sense strand
ggaacuuagaagaagcuga

SEQ ID NO: 2341317 - RNA, 19 nt, Homo sapiens
  misc_RNA (1)...(19): siRNA sense strand
gggcagagguggauugagc

SEQ ID NO: 2341318 - RNA, 19 nt, Homo sapiens
  misc_RNA (1)...(19): siRNA sense strand
cagcggagagagagaaacu

SEQ ID NO: 2341319 - RNA, 19 nt, Homo sapiens
  misc_RNA (1)...(19): siRNA sense strand
ggggcaaauccauggaaau

SEQ ID NO: 2341320 - RNA, 19 nt, Homo sapiens
  misc_RNA (1)...(19): siRNA sense strand
cuguguauggagagcaaau

SEQ ID NO: 2341321 - RNA, 19 nt, Homo sapiens
  misc_RNA (1)...(19): siRNA sense strand
ucaugucagcggagagaga

SEQ ID NO: 2341322 - RNA, 19 nt, Homo sapiens
  misc_RNA (1)...(19): siRNA sense strand
agaugaaaaccgagcucua

SEQ ID NO: 2341323 - RNA, 19 nt, Homo sapiens
  misc_RNA (1)...(19): siRNA sense strand
auguaucgucagaaugaaa

SEQ ID NO: 2341324 - RNA, 19 nt, Homo sapiens
  misc_RNA (1)...(19): siRNA sense strand
agagagagaaacugaagca

SEQ ID NO: 2341325 - RNA, 19 nt, Homo sapiens
  misc_RNA (1)...(19): siRNA sense strand
gcguaugcaucuagcuacu

SEQ ID NO: 2341326 - RNA, 19 nt, Homo sapiens
  misc_RNA (1)...(19): siRNA sense strand
cgcuggaauuaaaugaaau

SEQ ID NO: 2341327 - RNA, 19 nt, Homo sapiens
  misc_RNA (1)...(19): siRNA sense strand
ccgaaaggcuacgagcaau

SEQ ID NO: 2341328 - RNA, 19 nt, Homo sapiens
  misc_RNA (1)...(19): siRNA sense strand
auacaaaagcagaggauug

SEQ ID NO: 2341329 - RNA, 19 nt, Homo sapiens
  misc_RNA (1)...(19): siRNA sense strand
gggaucauuuugaguggaa

SEQ ID NO: 2341330 - RNA, 19 nt, Homo sapiens
  misc_RNA (1)...(19): siRNA sense strand
gcacaguguuugacaggag

SEQ ID NO: 2341331 - RNA, 19 nt, Homo sapiens
  misc_RNA (1)...(19): siRNA sense strand
ucaggaaauccgacgauga

SEQ ID NO: 2341332 - RNA, 19 nt, Homo sapiens
  misc_RNA (1)...(19): siRNA sense strand
uggcaagaugugagaugga

SEQ ID NO: 2341333 - RNA, 19 nt, Homo sapiens
  misc_RNA (1)...(19): siRNA sense strand
aaagcagaggauugaacaa

SEQ ID NO: 2341334 - RNA, 19 nt, Homo sapiens
  misc_RNA (1)...(19): siRNA sense strand
agccaaaccgauauagaga

SEQ ID NO: 2341335 - RNA, 19 nt, Homo sapiens
  misc_RNA (1)...(19): siRNA sense strand
gagagaagcugcauggcug

SEQ ID NO: 2341336 - RNA, 19 nt, Homo sapiens
  misc_RNA (1)...(19): siRNA sense strand
aggucaagucagaagaagu

SEQ ID NO: 2341337 - RNA, 19 nt, Homo sapiens
  misc_RNA (1)...(19): siRNA sense strand
gcaagaugugagauggaaa

SEQ ID NO: 2341338 - RNA, 19 nt, Homo sapiens
  misc_RNA (1)...(19): siRNA sense strand
gggaagugguggaaggacu

SEQ ID NO: 2341339 - RNA, 19 nt, Homo sapiens
  misc_RNA (1)...(19): siRNA sense strand
cgauauagagagagagaag

SEQ ID NO: 2341340 - RNA, 19 nt, Homo sapiens
  misc_RNA (1)...(19): siRNA sense strand
cuucagaggacauggaaaa

SEQ ID NO: 2341341 - RNA, 19 nt, Homo sapiens
  misc_RNA (1)...(19): siRNA sense strand
ggauugagcacuauggaga

SEQ ID NO: 2341342 - RNA, 19 nt, Homo sapiens
  misc_RNA (1)...(19): siRNA sense strand
ugaaauaugccaagagcca

SEQ ID NO: 2341343 - RNA, 19 nt, Homo sapiens
  misc_RNA (1)...(19): siRNA sense strand
gagcaaauccuaugccgaa

SEQ ID NO: 2341344 - RNA, 19 nt, Homo sapiens
  misc_RNA (1)...(19): siRNA sense strand
aaauaugccaagagccaaa

SEQ ID NO: 2341345 - RNA, 19 nt, Homo sapiens
  misc_RNA (1)...(19): siRNA sense strand
gcauagaccuugacaccga

SEQ ID NO: 2341346 - RNA, 19 nt, Homo sapiens
  misc_RNA (1)...(19): siRNA sense strand
gccgaaaggcuacgagcaa

SEQ ID NO: 2341347 - RNA, 19 nt, Homo sapiens
  misc_RNA (1)...(19): siRNA sense strand
uagaagaagcugaaauaca

SEQ ID NO: 2341348 - RNA, 19 nt, Homo sapiens
  misc_RNA (1)...(19): siRNA sense strand
ccuugauaguggucgggaa

SEQ ID NO: 2341349 - RNA, 19 nt, Homo sapiens
  misc_RNA (1)...(19): siRNA sense strand
cacuaaugcccaugagauu

SEQ ID NO: 2341350 - RNA, 19 nt, Homo sapiens
  misc_RNA (1)...(19): siRNA sense strand
ccaugagauugaaggcaca

SEQ ID NO: 2341351 - RNA, 19 nt, Homo sapiens
  misc_RNA (1)...(19): siRNA sense strand
gacgaugacucuuggguga

SEQ ID NO: 2341352 - RNA, 19 nt, Homo sapiens
  misc_RNA (1)...(19): siRNA sense strand
ccuauuuggaacuuagaaa

SEQ ID NO: 2341353 - RNA, 19 nt, Homo sapiens
  misc_RNA (1)...(19): siRNA sense strand
agauuuuggagaagagaaa

SEQ ID NO: 2341354 - RNA, 19 nt, Homo sapiens
  misc_RNA (1)...(19): siRNA sense strand
auuucaaacuggaagcaau

SEQ ID NO: 2341355 - RNA, 19 nt, Homo sapiens
  misc_RNA (1)...(19): siRNA sense strand
gagagaaacugaagcagcu

SEQ ID NO: 2341356 - RNA, 19 nt, Homo sapiens
  misc_RNA (1)...(19): siRNA sense strand
guguuugacaggaguggaa

SEQ ID NO: 2341357 - RNA, 19 nt, Homo sapiens
  misc_RNA (1)...(19): siRNA sense strand
gcaguauaucaaagcagaa

SEQ ID NO: 2341358 - RNA, 19 nt, Homo sapiens
  misc_RNA (1)...(19): siRNA sense strand
auggagagauugucaucaa

SEQ ID NO: 2341359 - RNA, 19 nt, Homo sapiens
  misc_RNA (1)...(19): siRNA sense strand
gccuguguauggagagcaa

SEQ ID NO: 2341360 - RNA, 19 nt, Homo sapiens
  misc_RNA (1)...(19): siRNA sense strand
gcaaggaagucgacaggac

SEQ ID NO: 2341361 - RNA, 19 nt, Homo sapiens
  misc_RNA (1)...(19): siRNA sense strand
acuuagaagaagcugaaau

SEQ ID NO: 2341362 - RNA, 19 nt, Homo sapiens
  misc_RNA (1)...(19): siRNA sense strand
uuagauaaugagagacaga

SEQ ID NO: 2341363 - RNA, 19 nt, Homo sapiens
  misc_RNA (1)...(19): siRNA sense strand
caagaugugagauggaaaa

SEQ ID NO: 2341364 - RNA, 19 nt, Homo sapiens
  misc_RNA (1)...(19): siRNA sense strand
ccuacugacacucgauuua

SEQ ID NO: 2341365 - RNA, 19 nt, Homo sapiens
  misc_RNA (1)...(19): siRNA sense strand
cagugaugucuguaaagaa

SEQ ID NO: 2341366 - RNA, 19 nt, Homo sapiens
  misc_RNA (1)...(19): siRNA sense strand
cgacaggacagcugggaag

SEQ ID NO: 2341367 - RNA, 19 nt, Homo sapiens
  misc_RNA (1)...(19): siRNA sense strand
gcuacugcaaagugaauuu

SEQ ID NO: 2341368 - RNA, 19 nt, Homo sapiens
  misc_RNA (1)...(19): siRNA sense strand
aggaagggaacuuagaaga

SEQ ID NO: 2341369 - RNA, 19 nt, Homo sapiens
  misc_RNA (1)...(19): siRNA sense strand
ggaacuuagaagaagcuga

SEQ ID NO: 2341370 - RNA, 19 nt, Homo sapiens
  misc_RNA (1)...(19): siRNA sense strand
gggcagagguggauugagc

SEQ ID NO: 2341371 - RNA, 19 nt, Homo sapiens
  misc_RNA (1)...(19): siRNA sense strand
cagcggagagagagaaacu

SEQ ID NO: 2341372 - RNA, 19 nt, Homo sapiens
  misc_RNA (1)...(19): siRNA sense strand
ggggcaaauccauggaaau

SEQ ID NO: 2341373 - RNA, 19 nt, Homo sapiens
  misc_RNA (1)...(19): siRNA sense strand
cuguguauggagagcaaau

SEQ ID NO: 2341374 - RNA, 19 nt, Homo sapiens
  misc_RNA (1)...(19): siRNA sense strand
ucaugucagcggagagaga

SEQ ID NO: 2341375 - RNA, 19 nt, Homo sapiens
  misc_RNA (1)...(19): siRNA sense strand
agaugaaaaccgagcucua

SEQ ID NO: 2341376 - RNA, 19 nt, Homo sapiens
  misc_RNA (1)...(19): siRNA sense strand
auguaucgucagaaugaaa

SEQ ID NO: 2341377 - RNA, 19 nt, Homo sapiens
  misc_RNA (1)...(19): siRNA sense strand
agagagagaaacugaagca

SEQ ID NO: 2341378 - RNA, 19 nt, Homo sapiens
  misc_RNA (1)...(19): siRNA sense strand
gcguaugcaucuagcuacu

SEQ ID NO: 2341379 - RNA, 19 nt, Homo sapiens
  misc_RNA (1)...(19): siRNA sense strand
cgcuggaauuaaaugaaau

SEQ ID NO: 2341380 - RNA, 19 nt, Homo sapiens
  misc_RNA (1)...(19): siRNA sense strand
ccgaaaggcuacgagcaau

SEQ ID NO: 2341381 - RNA, 19 nt, Homo sapiens
  misc_RNA (1)...(19): siRNA sense strand
auacaaaagcagaggauug

SEQ ID NO: 2341382 - RNA, 19 nt, Homo sapiens
  misc_RNA (1)...(19): siRNA sense strand
gggaucauuuugaguggaa

SEQ ID NO: 2341383 - RNA, 19 nt, Homo sapiens
  misc_RNA (1)...(19): siRNA sense strand
gcacaguguuugacaggag

SEQ ID NO: 2341384 - RNA, 19 nt, Homo sapiens
  misc_RNA (1)...(19): siRNA sense strand
ucaggaaauccgacgauga

SEQ ID NO: 2341385 - RNA, 19 nt, Homo sapiens
  misc_RNA (1)...(19): siRNA sense strand
uggcaagaugugagaugga

SEQ ID NO: 2341386 - RNA, 19 nt, Homo sapiens
  misc_RNA (1)...(19): siRNA sense strand
aaagcagaggauugaacaa

SEQ ID NO: 2341387 - RNA, 19 nt, Homo sapiens
  misc_RNA (1)...(19): siRNA sense strand
agccaaaccgauauagaga

SEQ ID NO: 2341388 - RNA, 19 nt, Homo sapiens
  misc_RNA (1)...(19): siRNA sense strand
gagagaagcugcauggcug

SEQ ID NO: 2341389 - RNA, 19 nt, Homo sapiens
  misc_RNA (1)...(19): siRNA sense strand
aggucaagucagaagaagu

SEQ ID NO: 2341390 - RNA, 19 nt, Homo sapiens
  misc_RNA (1)...(19): siRNA sense strand
gggaagugguggaaggacu

SEQ ID NO: 2341391 - RNA, 19 nt, Homo sapiens
  misc_RNA (1)...(19): siRNA sense strand
cgauauagagagagagaag

SEQ ID NO: 2341392 - RNA, 19 nt, Homo sapiens
  misc_RNA (1)...(19): siRNA sense strand
cuucagaggacauggaaaa

SEQ ID NO: 2341393 - RNA, 19 nt, Homo sapiens
  misc_RNA (1)...(19): siRNA sense strand
ugaaauaugccaagagcca

SEQ ID NO: 2341394 - RNA, 19 nt, Homo sapiens
  misc_RNA (1)...(19): siRNA sense strand
aaauaugccaagagccaaa

SEQ ID NO: 2341395 - RNA, 19 nt, Homo sapiens
  misc_RNA (1)...(19): siRNA sense strand
gcauagaccuugacaccga

SEQ ID NO: 2341396 - RNA, 19 nt, Homo sapiens
  misc_RNA (1)...(19): siRNA sense strand
ccuugauaguggucgggaa

SEQ ID NO: 2341397 - RNA, 19 nt, Homo sapiens
  misc_RNA (1)...(19): siRNA sense strand
agauuuuggagaagagaaa

SEQ ID NO: 2341398 - RNA, 19 nt, Homo sapiens
  misc_RNA (1)...(19): siRNA sense strand
auuucaaacuggaagcaau

SEQ ID NO: 2341399 - RNA, 19 nt, Homo sapiens
  misc_RNA (1)...(19): siRNA sense strand
gagagaaacugaagcagcu

SEQ ID NO: 2341400 - RNA, 19 nt, Homo sapiens
  misc_RNA (1)...(19): siRNA sense strand
gcaguauaucaaagcagaa

SEQ ID NO: 2341401 - RNA, 19 nt, Homo sapiens
  misc_RNA (1)...(19): siRNA sense strand
gcaaggaagucgacaggac

SEQ ID NO: 2341402 - RNA, 19 nt, Homo sapiens
  misc_RNA (1)...(19): siRNA sense strand
uuagauaaugagagacaga

SEQ ID NO: 2341403 - RNA, 19 nt, Homo sapiens
  misc_RNA (1)...(19): siRNA sense strand
cgacaggacagcugggaag

SEQ ID NO: 2341404 - RNA, 19 nt, Homo sapiens
  misc_RNA (1)...(19): siRNA sense strand
cagugaugucuguaaagaa

SEQ ID NO: 2341405 - RNA, 19 nt, Homo sapiens
  misc_RNA (1)...(19): siRNA sense strand
cagcggagagagagaaacu

SEQ ID NO: 2341406 - RNA, 19 nt, Homo sapiens
  misc_RNA (1)...(19): siRNA sense strand
ucaugucagcggagagaga

SEQ ID NO: 2341407 - RNA, 19 nt, Homo sapiens
  misc_RNA (1)...(19): siRNA sense strand
agaugaaaaccgagcucua

SEQ ID NO: 2341408 - RNA, 19 nt, Homo sapiens
  misc_RNA (1)...(19): siRNA sense strand
auguaucgucagaaugaaa

SEQ ID NO: 2341409 - RNA, 19 nt, Homo sapiens
  misc_RNA (1)...(19): siRNA sense strand
agagagagaaacugaagca

SEQ ID NO: 2341410 - RNA, 19 nt, Homo sapiens
  misc_RNA (1)...(19): siRNA sense strand
agccaaaccgauauagaga

SEQ ID NO: 2341411 - RNA, 19 nt, Homo sapiens
  misc_RNA (1)...(19): siRNA sense strand
gagagaagcugcauggcug

SEQ ID NO: 2341412 - RNA, 19 nt, Homo sapiens
  misc_RNA (1)...(19): siRNA sense strand
aggucaagucagaagaagu

SEQ ID NO: 2341413 - RNA, 19 nt, Homo sapiens
  misc_RNA (1)...(19): siRNA sense strand
ccaaagaccuggcgcacug

SEQ ID NO: 2341414 - RNA, 19 nt, Homo sapiens
  misc_RNA (1)...(19): siRNA sense strand
ugaagcagcugauggagca

SEQ ID NO: 2341415 - RNA, 19 nt, Homo sapiens
  misc_RNA (1)...(19): siRNA sense strand
gggaagugguggaaggacu

SEQ ID NO: 2341416 - RNA, 19 nt, Homo sapiens
  misc_RNA (1)...(19): siRNA sense strand
cgauauagagagagagaag

SEQ ID NO: 2341417 - RNA, 19 nt, Homo sapiens
  misc_RNA (1)...(19): siRNA sense strand
cuucagaggacauggaaaa

SEQ ID NO: 2341418 - RNA, 19 nt, Homo sapiens
  misc_RNA (1)...(19): siRNA sense strand
ugaaauaugccaagagcca

SEQ ID NO: 2341419 - RNA, 19 nt, Homo sapiens
  misc_RNA (1)...(19): siRNA sense strand
aaauaugccaagagccaaa

SEQ ID NO: 2341420 - RNA, 19 nt, Homo sapiens
  misc_RNA (1)...(19): siRNA sense strand
gcauagaccuugacaccga

SEQ ID NO: 2341421 - RNA, 19 nt, Homo sapiens
  misc_RNA (1)...(19): siRNA sense strand
ccuugauaguggucgggaa

SEQ ID NO: 2341422 - RNA, 19 nt, Homo sapiens
  misc_RNA (1)...(19): siRNA sense strand
agauuuuggagaagagaaa

SEQ ID NO: 2341423 - RNA, 19 nt, Homo sapiens
  misc_RNA (1)...(19): siRNA sense strand
auuucaaacuggaagcaau

SEQ ID NO: 2341424 - RNA, 19 nt, Homo sapiens
  misc_RNA (1)...(19): siRNA sense strand
gagagaaacugaagcagcu

SEQ ID NO: 2341425 - RNA, 19 nt, Homo sapiens
  misc_RNA (1)...(19): siRNA sense strand
gcaguauaucaaagcagaa

SEQ ID NO: 2341426 - RNA, 19 nt, Homo sapiens
  misc_RNA (1)...(19): siRNA sense strand
gcaaggaagucgacaggac

SEQ ID NO: 2341427 - RNA, 19 nt, Homo sapiens
  misc_RNA (1)...(19): siRNA sense strand
uuagauaaugagagacaga

SEQ ID NO: 2341428 - RNA, 19 nt, Homo sapiens
  misc_RNA (1)...(19): siRNA sense strand
cgacaggacagcugggaag

SEQ ID NO: 2341429 - RNA, 19 nt, Homo sapiens
  misc_RNA (1)...(19): siRNA sense strand
cagugaugucuguaaagaa

SEQ ID NO: 2341430 - RNA, 19 nt, Homo sapiens
  misc_RNA (1)...(19): siRNA sense strand
cagcggagagagagaaacu

SEQ ID NO: 2341431 - RNA, 19 nt, Homo sapiens
  misc_RNA (1)...(19): siRNA sense strand
ucaugucagcggagagaga

SEQ ID NO: 2341432 - RNA, 19 nt, Homo sapiens
  misc_RNA (1)...(19): siRNA sense strand
agaugaaaaccgagcucua

SEQ ID NO: 2341433 - RNA, 19 nt, Homo sapiens
  misc_RNA (1)...(19): siRNA sense strand
auguaucgucagaaugaaa

SEQ ID NO: 2341434 - RNA, 19 nt, Homo sapiens
  misc_RNA (1)...(19): siRNA sense strand
agagagagaaacugaagca

SEQ ID NO: 2341435 - RNA, 19 nt, Homo sapiens
  misc_RNA (1)...(19): siRNA sense strand
agccaaaccgauauagaga

SEQ ID NO: 2341436 - RNA, 19 nt, Homo sapiens
  misc_RNA (1)...(19): siRNA sense strand
gagagaagcugcauggcug

SEQ ID NO: 2341437 - RNA, 19 nt, Homo sapiens
  misc_RNA (1)...(19): siRNA sense strand
aggucaagucagaagaagu

SEQ ID NO: 2341438 - RNA, 19 nt, Homo sapiens
  misc_RNA (1)...(19): siRNA sense strand
ccaaagaccuggcgcacug

SEQ ID NO: 2341439 - RNA, 19 nt, Homo sapiens
  misc_RNA (1)...(19): siRNA sense strand
ugaagcagcugauggagca

SEQ ID NO: 2341440 - RNA, 19 nt, Homo sapiens
  misc_RNA (1)...(19): siRNA sense strand
cagggaagacucugggcau

SEQ ID NO: 2341441 - RNA, 19 nt, Homo sapiens
  misc_RNA (1)...(19): siRNA sense strand
uugcaugggacgaaagcuu

SEQ ID NO: 2341442 - RNA, 19 nt, Homo sapiens
  misc_RNA (1)...(19): siRNA sense strand
agggaagacucugggcauu

SEQ ID NO: 2341443 - RNA, 19 nt, Homo sapiens
  misc_RNA (1)...(19): siRNA sense strand
ccaccuagcaagaaggaga

SEQ ID NO: 2341444 - RNA, 19 nt, Homo sapiens
  misc_RNA (1)...(19): siRNA sense strand
cguaaauaccguagacagu

SEQ ID NO: 2341445 - RNA, 19 nt, Homo sapiens
  misc_RNA (1)...(19): siRNA sense strand
gguacauguccuagagcau

SEQ ID NO: 2341446 - RNA, 19 nt, Homo sapiens
  misc_RNA (1)...(19): siRNA sense strand
ccaaaauagaagaagaaga

SEQ ID NO: 2341447 - RNA, 19 nt, Homo sapiens
  misc_RNA (1)...(19): siRNA sense strand
aagagaaagaggaugaaaa

SEQ ID NO: 2341448 - RNA, 19 nt, Homo sapiens
  misc_RNA (1)...(19): siRNA sense strand
gguuacuaccugaaagaga

SEQ ID NO: 2341449 - RNA, 19 nt, Homo sapiens
  misc_RNA (1)...(19): siRNA sense strand
ucagaguaggaauggcaaa

SEQ ID NO: 2341450 - RNA, 19 nt, Homo sapiens
  misc_RNA (1)...(19): siRNA sense strand
ggcaaagauucaaaggaac

SEQ ID NO: 2341451 - RNA, 19 nt, Homo sapiens
  misc_RNA (1)...(19): siRNA sense strand
gaagaugguauuaaggguu

SEQ ID NO: 2341452 - RNA, 19 nt, Homo sapiens
  misc_RNA (1)...(19): siRNA sense strand
agcaauuccuagaaacaau

SEQ ID NO: 2341453 - RNA, 19 nt, Homo sapiens
  misc_RNA (1)...(19): siRNA sense strand
gauucaaaggaacgaguca

SEQ ID NO: 2341454 - RNA, 19 nt, Homo sapiens
  misc_RNA (1)...(19): siRNA sense strand
ccucagaguaggaauggca

SEQ ID NO: 2341455 - RNA, 19 nt, Homo sapiens
  misc_RNA (1)...(19): siRNA sense strand
aguaggaauggcaaagauu

SEQ ID NO: 2341456 - RNA, 19 nt, Homo sapiens
  misc_RNA (1)...(19): siRNA sense strand
aggaacgagucagcagaaa

SEQ ID NO: 2341457 - RNA, 19 nt, Homo sapiens
  misc_RNA (1)...(19): siRNA sense strand
caucuauaaagguggggaa

SEQ ID NO: 2341458 - RNA, 19 nt, Homo sapiens
  misc_RNA (1)...(19): siRNA sense strand
cguaaauaccguagacagu

SEQ ID NO: 2341459 - RNA, 19 nt, Homo sapiens
  misc_RNA (1)...(19): siRNA sense strand
gguacauguccuagagcau

SEQ ID NO: 2341460 - RNA, 19 nt, Homo sapiens
  misc_RNA (1)...(19): siRNA sense strand
ccaaaauagaagaagaaga

SEQ ID NO: 2341461 - RNA, 19 nt, Homo sapiens
  misc_RNA (1)...(19): siRNA sense strand
aagagaaagaggaugaaaa

SEQ ID NO: 2341462 - RNA, 19 nt, Homo sapiens
  misc_RNA (1)...(19): siRNA sense strand
gguuacuaccugaaagaga

SEQ ID NO: 2341463 - RNA, 19 nt, Homo sapiens
  misc_RNA (1)...(19): siRNA sense strand
ucagaguaggaauggcaaa

SEQ ID NO: 2341464 - RNA, 19 nt, Homo sapiens
  misc_RNA (1)...(19): siRNA sense strand
ggcaaagauucaaaggaac

SEQ ID NO: 2341465 - RNA, 19 nt, Homo sapiens
  misc_RNA (1)...(19): siRNA sense strand
gaagaugguauuaaggguu

SEQ ID NO: 2341466 - RNA, 19 nt, Homo sapiens
  misc_RNA (1)...(19): siRNA sense strand
agcaauuccuagaaacaau

SEQ ID NO: 2341467 - RNA, 19 nt, Homo sapiens
  misc_RNA (1)...(19): siRNA sense strand
gauucaaaggaacgaguca

SEQ ID NO: 2341468 - RNA, 19 nt, Homo sapiens
  misc_RNA (1)...(19): siRNA sense strand
ccucagaguaggaauggca

SEQ ID NO: 2341469 - RNA, 19 nt, Homo sapiens
  misc_RNA (1)...(19): siRNA sense strand
aguaggaauggcaaagauu

SEQ ID NO: 2341470 - RNA, 19 nt, Homo sapiens
  misc_RNA (1)...(19): siRNA sense strand
aggaacgagucagcagaaa

SEQ ID NO: 2341471 - RNA, 19 nt, Homo sapiens
  misc_RNA (1)...(19): siRNA sense strand
caucuauaaagguggggaa

SEQ ID NO: 2341472 - RNA, 19 nt, Homo sapiens
  misc_RNA (1)...(19): siRNA sense strand
gggcagauccucaagcaga

SEQ ID NO: 2341473 - RNA, 19 nt, Homo sapiens
  misc_RNA (1)...(19): siRNA sense strand
acacaaacucacacaacca

SEQ ID NO: 2341474 - RNA, 19 nt, Homo sapiens
  misc_RNA (1)...(19): siRNA sense strand
gggcagauccucaagcaga

SEQ ID NO: 2341475 - RNA, 19 nt, Homo sapiens
  misc_RNA (1)...(19): siRNA sense strand
acacaaacucacacaacca

SEQ ID NO: 2341476 - RNA, 19 nt, Homo sapiens
  misc_RNA (1)...(19): siRNA sense strand
gggcagauccucaagcaga

SEQ ID NO: 2341477 - RNA, 19 nt, Homo sapiens
  misc_RNA (1)...(19): siRNA sense strand
acguggaggccguggcuua

SEQ ID NO: 2341478 - RNA, 19 nt, Homo sapiens
  misc_RNA (1)...(19): siRNA sense strand
aaggaaacgagcagaugaa

SEQ ID NO: 2341479 - RNA, 19 nt, Homo sapiens
  misc_RNA (1)...(19): siRNA sense strand
acaagaagcgccuggccua

SEQ ID NO: 2341480 - RNA, 19 nt, Homo sapiens
  misc_RNA (1)...(19): siRNA sense strand
ccgaaggaaacgagcagau

SEQ ID NO: 2341481 - RNA, 19 nt, Homo sapiens
  misc_RNA (1)...(19): siRNA sense strand
ucaagauagcggagcugaa

SEQ ID NO: 2341482 - RNA, 19 nt, Homo sapiens
  misc_RNA (1)...(19): siRNA sense strand
ccucaaaaccgaaggaaac

SEQ ID NO: 2341483 - RNA, 19 nt, Homo sapiens
  misc_RNA (1)...(19): siRNA sense strand
gccucaaaaccgaaggaaa

SEQ ID NO: 2341484 - RNA, 19 nt, Homo sapiens
  misc_RNA (1)...(19): siRNA sense strand
ggagauauuugaagcggcu

SEQ ID NO: 2341485 - RNA, 19 nt, Homo sapiens
  misc_RNA (1)...(19): siRNA sense strand
gcaacagagccgcagccua

SEQ ID NO: 2341486 - RNA, 19 nt, Homo sapiens
  misc_RNA (1)...(19): siRNA sense strand
caacagagccgcagccuac

SEQ ID NO: 2341487 - RNA, 19 nt, Homo sapiens
  misc_RNA (1)...(19): siRNA sense strand
cauacaaguccaaccucaa

SEQ ID NO: 2341488 - RNA, 19 nt, Homo sapiens
  misc_RNA (1)...(19): siRNA sense strand
cuuugaagcugccgugcau

SEQ ID NO: 2341489 - RNA, 19 nt, Homo sapiens
  misc_RNA (1)...(19): siRNA sense strand
cagcagaugcagcagcaga

SEQ ID NO: 2341490 - RNA, 19 nt, Homo sapiens
  misc_RNA (1)...(19): siRNA sense strand
uggaggagguggugggaca

SEQ ID NO: 2341491 - RNA, 19 nt, Homo sapiens
  misc_RNA (1)...(19): siRNA sense strand
ccaucaugcagcagaauaa

SEQ ID NO: 2341492 - RNA, 19 nt, Homo sapiens
  misc_RNA (1)...(19): siRNA sense strand
ggauccagccagaggaaga

SEQ ID NO: 2341493 - RNA, 19 nt, Homo sapiens
  misc_RNA (1)...(19): siRNA sense strand
augccaagguacuggaauu

SEQ ID NO: 2341494 - RNA, 19 nt, Homo sapiens
  misc_RNA (1)...(19): siRNA sense strand
agacagacauccuggacga

SEQ ID NO: 2341495 - RNA, 19 nt, Homo sapiens
  misc_RNA (1)...(19): siRNA sense strand
cagaggaagaugaggggaa

SEQ ID NO: 2341496 - RNA, 19 nt, Homo sapiens
  misc_RNA (1)...(19): siRNA sense strand
gaaggaugucagugggaga

SEQ ID NO: 2341497 - RNA, 19 nt, Homo sapiens
  misc_RNA (1)...(19): siRNA sense strand
ucacgaagcuccaugccaa

SEQ ID NO: 2341498 - RNA, 19 nt, Homo sapiens
  misc_RNA (1)...(19): siRNA sense strand
aggauaagauugugcccau

SEQ ID NO: 2341499 - RNA, 19 nt, Homo sapiens
  misc_RNA (1)...(19): siRNA sense strand
cagccaaugaggagaacuu

SEQ ID NO: 2341500 - RNA, 19 nt, Homo sapiens
  misc_RNA (1)...(19): siRNA sense strand
ugaucgauuuccagaguau

SEQ ID NO: 2341501 - RNA, 19 nt, Homo sapiens
  misc_RNA (1)...(19): siRNA sense strand
ggucaauggaggaggcuac

SEQ ID NO: 2341502 - RNA, 19 nt, Homo sapiens
  misc_RNA (1)...(19): siRNA sense strand
acacauggcucaaugcaga

SEQ ID NO: 2341503 - RNA, 19 nt, Homo sapiens
  misc_RNA (1)...(19): siRNA sense strand
ucgaggagauggagggaac

SEQ ID NO: 2341504 - RNA, 19 nt, Homo sapiens
  misc_RNA (1)...(19): siRNA sense strand
acaucuugcugaagugcua

SEQ ID NO: 2341505 - RNA, 19 nt, Homo sapiens
  misc_RNA (1)...(19): siRNA sense strand
cgacaacuucagugggcau

SEQ ID NO: 2341506 - RNA, 19 nt, Homo sapiens
  misc_RNA (1)...(19): siRNA sense strand
gaggagaacuuccggagca

SEQ ID NO: 2341507 - RNA, 19 nt, Homo sapiens
  misc_RNA (1)...(19): siRNA sense strand
ccaucaaaaugaacaacaa

SEQ ID NO: 2341508 - RNA, 19 nt, Homo sapiens
  misc_RNA (1)...(19): siRNA sense strand
ccaaagaagguacgugcau

SEQ ID NO: 2341509 - RNA, 19 nt, Homo sapiens
  misc_RNA (1)...(19): siRNA sense strand
agggagacaucuugcugaa

SEQ ID NO: 2341510 - RNA, 19 nt, Homo sapiens
  misc_RNA (1)...(19): siRNA sense strand
gcuuuggcuuagagcgaga

SEQ ID NO: 2341511 - RNA, 19 nt, Homo sapiens
  misc_RNA (1)...(19): siRNA sense strand
cgagcgugucuguggacua

SEQ ID NO: 2341512 - RNA, 19 nt, Homo sapiens
  misc_RNA (1)...(19): siRNA sense strand
gagucaagcucaagggcug

SEQ ID NO: 2341513 - RNA, 19 nt, Homo sapiens
  misc_RNA (1)...(19): siRNA sense strand
cuaaggugaagaagaaaga

SEQ ID NO: 2341514 - RNA, 19 nt, Homo sapiens
  misc_RNA (1)...(19): siRNA sense strand
gguacaagccugagaucuc

SEQ ID NO: 2341515 - RNA, 19 nt, Homo sapiens
  misc_RNA (1)...(19): siRNA sense strand
aggagaacuuccggagcaa

SEQ ID NO: 2341516 - RNA, 19 nt, Homo sapiens
  misc_RNA (1)...(19): siRNA sense strand
ccacaggguagcaggggua

SEQ ID NO: 2341517 - RNA, 19 nt, Homo sapiens
  misc_RNA (1)...(19): siRNA sense strand
cuuacaugcacuacagcaa

SEQ ID NO: 2341518 - RNA, 19 nt, Homo sapiens
  misc_RNA (1)...(19): siRNA sense strand
ucuucauagcaaugcaaua

SEQ ID NO: 2341519 - RNA, 19 nt, Homo sapiens
  misc_RNA (1)...(19): siRNA sense strand
cgcagaugcucaaguccaa

SEQ ID NO: 2341520 - RNA, 19 nt, Homo sapiens
  misc_RNA (1)...(19): siRNA sense strand
ggguacaggcucgggagaa

SEQ ID NO: 2341521 - RNA, 19 nt, Homo sapiens
  misc_RNA (1)...(19): siRNA sense strand
cagagaaaauucaaggcau

SEQ ID NO: 2341522 - RNA, 19 nt, Homo sapiens
  misc_RNA (1)...(19): siRNA sense strand
ugucaaugguggggcguua

SEQ ID NO: 2341523 - RNA, 19 nt, Homo sapiens
  misc_RNA (1)...(19): siRNA sense strand
auugaacaguccaucgaaa

SEQ ID NO: 2341524 - RNA, 19 nt, Homo sapiens
  misc_RNA (1)...(19): siRNA sense strand
cgacaagaccgacgagccu

SEQ ID NO: 2341525 - RNA, 19 nt, Homo sapiens
  misc_RNA (1)...(19): siRNA sense strand
uggacgaugaauugccaaa

SEQ ID NO: 2341526 - RNA, 19 nt, Homo sapiens
  misc_RNA (1)...(19): siRNA sense strand
ccuccacgccagcaggaaa

SEQ ID NO: 2341527 - RNA, 19 nt, Homo sapiens
  misc_RNA (1)...(19): siRNA sense strand
ucaucaacucuguggacau

SEQ ID NO: 2341528 - RNA, 19 nt, Homo sapiens
  misc_RNA (1)...(19): siRNA sense strand
gugauggacaguaugagaa

SEQ ID NO: 2341529 - RNA, 19 nt, Homo sapiens
  misc_RNA (1)...(19): siRNA sense strand
cuuaugggccagagaaaau

SEQ ID NO: 2341530 - RNA, 19 nt, Homo sapiens
  misc_RNA (1)...(19): siRNA sense strand
uggcuuuggcuuagagcga

SEQ ID NO: 2341531 - RNA, 19 nt, Homo sapiens
  misc_RNA (1)...(19): siRNA sense strand
gaaagagcccacuuggaga

SEQ ID NO: 2341532 - RNA, 19 nt, Homo sapiens
  misc_RNA (1)...(19): siRNA sense strand
ccaucgaaacacucaauau

SEQ ID NO: 2341533 - RNA, 19 nt, Homo sapiens
  misc_RNA (1)...(19): siRNA sense strand
ccaaguacuccaugccaga

SEQ ID NO: 2341534 - RNA, 19 nt, Homo sapiens
  misc_RNA (1)...(19): siRNA sense strand
uggcuuagagcgagagaag

SEQ ID NO: 2341535 - RNA, 19 nt, Homo sapiens
  misc_RNA (1)...(19): siRNA sense strand
aggaaagaaaguggaugaa

SEQ ID NO: 2341536 - RNA, 19 nt, Homo sapiens
  misc_RNA (1)...(19): siRNA sense strand
gggaaauugaugaguauau

SEQ ID NO: 2341537 - RNA, 19 nt, Homo sapiens
  misc_RNA (1)...(19): siRNA sense strand
agaaugaauuggagaagau

SEQ ID NO: 2341538 - RNA, 19 nt, Homo sapiens
  misc_RNA (1)...(19): siRNA sense strand
cgcaaauacuuuaaggcaa

SEQ ID NO: 2341539 - RNA, 19 nt, Homo sapiens
  misc_RNA (1)...(19): siRNA sense strand
aguuaggcgauuagagaaa

SEQ ID NO: 2341540 - RNA, 19 nt, Homo sapiens
  misc_RNA (1)...(19): siRNA sense strand
cucaagaaaguuagagaaa

SEQ ID NO: 2341541 - RNA, 19 nt, Homo sapiens
  misc_RNA (1)...(19): siRNA sense strand
cugaagauggugagaagaa

SEQ ID NO: 2341542 - RNA, 19 nt, Homo sapiens
  misc_RNA (1)...(19): siRNA sense strand
ugacagaaccgaaagggaa

SEQ ID NO: 2341543 - RNA, 19 nt, Homo sapiens
  misc_RNA (1)...(19): siRNA sense strand
gauuagaaaaggagaacaa

SEQ ID NO: 2341544 - RNA, 19 nt, Homo sapiens
  misc_RNA (1)...(19): siRNA sense strand
cgaaagggaaagagcauga

SEQ ID NO: 2341545 - RNA, 19 nt, Homo sapiens
  misc_RNA (1)...(19): siRNA sense strand
ccuugaaucccgaggagua

SEQ ID NO: 2341546 - RNA, 19 nt, Homo sapiens
  misc_RNA (1)...(19): siRNA sense strand
gugggaaauugaugaguau

SEQ ID NO: 2341547 - RNA, 19 nt, Homo sapiens
  misc_RNA (1)...(19): siRNA sense strand
gcaaauacuuuaaggcaac

SEQ ID NO: 2341548 - RNA, 19 nt, Homo sapiens
  misc_RNA (1)...(19): siRNA sense strand
agacuaguguguuggaaau

SEQ ID NO: 2341549 - RNA, 19 nt, Homo sapiens
  misc_RNA (1)...(19): siRNA sense strand
gacagaaccgaaagggaaa

SEQ ID NO: 2341550 - RNA, 19 nt, Homo sapiens
  misc_RNA (1)...(19): siRNA sense strand
aguugaaguaucagagaau

SEQ ID NO: 2341551 - RNA, 19 nt, Homo sapiens
  misc_RNA (1)...(19): siRNA sense strand
cggaaugaacuauuugaaa

SEQ ID NO: 2341552 - RNA, 19 nt, Homo sapiens
  misc_RNA (1)...(19): siRNA sense strand
cugccagucuuuagugaaa

SEQ ID NO: 2341553 - RNA, 19 nt, Homo sapiens
  misc_RNA (1)...(19): siRNA sense strand
agcagauaauugaaggaaa

SEQ ID NO: 2341554 - RNA, 19 nt, Homo sapiens
  misc_RNA (1)...(19): siRNA sense strand
uguaaaaggcccuggacua

SEQ ID NO: 2341555 - RNA, 19 nt, Homo sapiens
  misc_RNA (1)...(19): siRNA sense strand
ggugagaagaagauuaaau

SEQ ID NO: 2341556 - RNA, 19 nt, Homo sapiens
  misc_RNA (1)...(19): siRNA sense strand
aggcaacaacuuacaaaua

SEQ ID NO: 2341557 - RNA, 19 nt, Homo sapiens
  misc_RNA (1)...(19): siRNA sense strand
aggcauggcuccugacaca

SEQ ID NO: 2341558 - RNA, 19 nt, Homo sapiens
  misc_RNA (1)...(19): siRNA sense strand
ucuugcaagugaugaaaua

SEQ ID NO: 2341559 - RNA, 19 nt, Homo sapiens
  misc_RNA (1)...(19): siRNA sense strand
ccucaagaaaguuagagaa

SEQ ID NO: 2341560 - RNA, 19 nt, Homo sapiens
  misc_RNA (1)...(19): siRNA sense strand
cugaaagcauugaagcuau

SEQ ID NO: 2341561 - RNA, 19 nt, Homo sapiens
  misc_RNA (1)...(19): siRNA sense strand
gauuaugaugccaguuaua

SEQ ID NO: 2341562 - RNA, 19 nt, Homo sapiens
  misc_RNA (1)...(19): siRNA sense strand
ccucauggaaggagaacca

SEQ ID NO: 2341563 - RNA, 19 nt, Homo sapiens
  misc_RNA (1)...(19): siRNA sense strand
ccaaaguagaccuggcaga

SEQ ID NO: 2341564 - RNA, 19 nt, Homo sapiens
  misc_RNA (1)...(19): siRNA sense strand
cgacacaaguggaaugacu

SEQ ID NO: 2341565 - RNA, 19 nt, Homo sapiens
  misc_RNA (1)...(19): siRNA sense strand
uuugaucaguggaaagaua

SEQ ID NO: 2341566 - RNA, 19 nt, Homo sapiens
  misc_RNA (1)...(19): siRNA sense strand
aaauuuaagccuugcagua

SEQ ID NO: 2341567 - RNA, 19 nt, Homo sapiens
  misc_RNA (1)...(19): siRNA sense strand
ggaaugacuuugcggagga

SEQ ID NO: 2341568 - RNA, 19 nt, Homo sapiens
  misc_RNA (1)...(19): siRNA sense strand
gcguucaacuggcggaaga

SEQ ID NO: 2341569 - RNA, 19 nt, Homo sapiens
  misc_RNA (1)...(19): siRNA sense strand
ccugacauugugugggaaa

SEQ ID NO: 2341570 - RNA, 19 nt, Homo sapiens
  misc_RNA (1)...(19): siRNA sense strand
ugacaaaggcauucaucau

SEQ ID NO: 2341571 - RNA, 19 nt, Homo sapiens
  misc_RNA (1)...(19): siRNA sense strand
aagacuaguguguuggaaa

SEQ ID NO: 2341572 - RNA, 19 nt, Homo sapiens
  misc_RNA (1)...(19): siRNA sense strand
aaguagaccuggcagagaa

SEQ ID NO: 2341573 - RNA, 19 nt, Homo sapiens
  misc_RNA (1)...(19): siRNA sense strand
cuaaagacaagcaugcuaa

SEQ ID NO: 2341574 - RNA, 19 nt, Homo sapiens
  misc_RNA (1)...(19): siRNA sense strand
gauggugagaagaagauua

SEQ ID NO: 2341575 - RNA, 19 nt, Homo sapiens
  misc_RNA (1)...(19): siRNA sense strand
gugacaagcauuuuagaaa

SEQ ID NO: 2341576 - RNA, 19 nt, Homo sapiens
  misc_RNA (1)...(19): siRNA sense strand
agaaagaugacaaaggcau

SEQ ID NO: 2341577 - RNA, 19 nt, Homo sapiens
  misc_RNA (1)...(19): siRNA sense strand
cgaauauucccaagaggau

SEQ ID NO: 2341578 - RNA, 19 nt, Homo sapiens
  misc_RNA (1)...(19): siRNA sense strand
aaagauaguucucgggagu

SEQ ID NO: 2341579 - RNA, 19 nt, Homo sapiens
  misc_RNA (1)...(19): siRNA sense strand
cuuuaugacagaaccgaaa

SEQ ID NO: 2341580 - RNA, 19 nt, Homo sapiens
  misc_RNA (1)...(19): siRNA sense strand
gaacuucgaaugaggaaaa

SEQ ID NO: 2341581 - RNA, 19 nt, Homo sapiens
  misc_RNA (1)...(19): siRNA sense strand
gauuaaggauacuuggcau

SEQ ID NO: 2341582 - RNA, 19 nt, Homo sapiens
  misc_RNA (1)...(19): siRNA sense strand
auaaauggauugugccuga

SEQ ID NO: 2341583 - RNA, 19 nt, Homo sapiens
  misc_RNA (1)...(19): siRNA sense strand
caguugaaguaucagagaa

SEQ ID NO: 2341584 - RNA, 19 nt, Homo sapiens
  misc_RNA (1)...(19): siRNA sense strand
gaagauggugagaagaaga

SEQ ID NO: 2341585 - RNA, 19 nt, Homo sapiens
  misc_RNA (1)...(19): siRNA sense strand
cugaaagugacaagcauuu

SEQ ID NO: 2341586 - RNA, 19 nt, Homo sapiens
  misc_RNA (1)...(19): siRNA sense strand
gaaaaggagaacaaagaau

SEQ ID NO: 2341587 - RNA, 19 nt, Homo sapiens
  misc_RNA (1)...(19): siRNA sense strand
ccauauucguuuugaccaa

SEQ ID NO: 2341588 - RNA, 19 nt, Homo sapiens
  misc_RNA (1)...(19): siRNA sense strand
ccuaaagacaagcaugcua

SEQ ID NO: 2341589 - RNA, 19 nt, Homo sapiens
  misc_RNA (1)...(19): siRNA sense strand
cugaauggaagaauaacua

SEQ ID NO: 2341590 - RNA, 19 nt, Homo sapiens
  misc_RNA (1)...(19): siRNA sense strand
ucucaaggauacugaaaau

SEQ ID NO: 2341591 - RNA, 19 nt, Homo sapiens
  misc_RNA (1)...(19): siRNA sense strand
ggaacagcucugaaagcau

SEQ ID NO: 2341592 - RNA, 19 nt, Homo sapiens
  misc_RNA (1)...(19): siRNA sense strand
caagcaugcuaaaggcaca

SEQ ID NO: 2341593 - RNA, 19 nt, Homo sapiens
  misc_RNA (1)...(19): siRNA sense strand
gaaaaugguacgagagucu

SEQ ID NO: 2341594 - RNA, 19 nt, Homo sapiens
  misc_RNA (1)...(19): siRNA sense strand
cugauuaugaugccaguua

SEQ ID NO: 2341595 - RNA, 19 nt, Homo sapiens
  misc_RNA (1)...(19): siRNA sense strand
agauaguucucgggaguuu

SEQ ID NO: 2341596 - RNA, 19 nt, Homo sapiens
  misc_RNA (1)...(19): siRNA sense strand
uguuaaagagguauuggaa

SEQ ID NO: 2341597 - RNA, 19 nt, Homo sapiens
  misc_RNA (1)...(19): siRNA sense strand
aagagguauuggaagauuu

SEQ ID NO: 2341598 - RNA, 19 nt, Homo sapiens
  misc_RNA (1)...(19): siRNA sense strand
gggaaauugaugaguauau

SEQ ID NO: 2341599 - RNA, 19 nt, Homo sapiens
  misc_RNA (1)...(19): siRNA sense strand
agaaugaauuggagaagau

SEQ ID NO: 2341600 - RNA, 19 nt, Homo sapiens
  misc_RNA (1)...(19): siRNA sense strand
cgcaaauacuuuaaggcaa

SEQ ID NO: 2341601 - RNA, 19 nt, Homo sapiens
  misc_RNA (1)...(19): siRNA sense strand
aguuaggcgauuagagaaa

SEQ ID NO: 2341602 - RNA, 19 nt, Homo sapiens
  misc_RNA (1)...(19): siRNA sense strand
cucaagaaaguuagagaaa

SEQ ID NO: 2341603 - RNA, 19 nt, Homo sapiens
  misc_RNA (1)...(19): siRNA sense strand
cugaagauggugagaagaa

SEQ ID NO: 2341604 - RNA, 19 nt, Homo sapiens
  misc_RNA (1)...(19): siRNA sense strand
ugacagaaccgaaagggaa

SEQ ID NO: 2341605 - RNA, 19 nt, Homo sapiens
  misc_RNA (1)...(19): siRNA sense strand
gauuagaaaaggagaacaa

SEQ ID NO: 2341606 - RNA, 19 nt, Homo sapiens
  misc_RNA (1)...(19): siRNA sense strand
cgaaagggaaagagcauga

SEQ ID NO: 2341607 - RNA, 19 nt, Homo sapiens
  misc_RNA (1)...(19): siRNA sense strand
ccuugaaucccgaggagua

SEQ ID NO: 2341608 - RNA, 19 nt, Homo sapiens
  misc_RNA (1)...(19): siRNA sense strand
gugggaaauugaugaguau

SEQ ID NO: 2341609 - RNA, 19 nt, Homo sapiens
  misc_RNA (1)...(19): siRNA sense strand
gcaaauacuuuaaggcaac

SEQ ID NO: 2341610 - RNA, 19 nt, Homo sapiens
  misc_RNA (1)...(19): siRNA sense strand
agacuaguguguuggaaau

SEQ ID NO: 2341611 - RNA, 19 nt, Homo sapiens
  misc_RNA (1)...(19): siRNA sense strand
gacagaaccgaaagggaaa

SEQ ID NO: 2341612 - RNA, 19 nt, Homo sapiens
  misc_RNA (1)...(19): siRNA sense strand
aguugaaguaucagagaau

SEQ ID NO: 2341613 - RNA, 19 nt, Homo sapiens
  misc_RNA (1)...(19): siRNA sense strand
cggaaugaacuauuugaaa

SEQ ID NO: 2341614 - RNA, 19 nt, Homo sapiens
  misc_RNA (1)...(19): siRNA sense strand
cugccagucuuuagugaaa

SEQ ID NO: 2341615 - RNA, 19 nt, Homo sapiens
  misc_RNA (1)...(19): siRNA sense strand
agcagauaauugaaggaaa

SEQ ID NO: 2341616 - RNA, 19 nt, Homo sapiens
  misc_RNA (1)...(19): siRNA sense strand
uguaaaaggcccuggacua

SEQ ID NO: 2341617 - RNA, 19 nt, Homo sapiens
  misc_RNA (1)...(19): siRNA sense strand
ggugagaagaagauuaaau

SEQ ID NO: 2341618 - RNA, 19 nt, Homo sapiens
  misc_RNA (1)...(19): siRNA sense strand
aggcaacaacuuacaaaua

SEQ ID NO: 2341619 - RNA, 19 nt, Homo sapiens
  misc_RNA (1)...(19): siRNA sense strand
aggcauggcuccugacaca

SEQ ID NO: 2341620 - RNA, 19 nt, Homo sapiens
  misc_RNA (1)...(19): siRNA sense strand
ucuugcaagugaugaaaua

SEQ ID NO: 2341621 - RNA, 19 nt, Homo sapiens
  misc_RNA (1)...(19): siRNA sense strand
ccucaagaaaguuagagaa

SEQ ID NO: 2341622 - RNA, 19 nt, Homo sapiens
  misc_RNA (1)...(19): siRNA sense strand
cugaaagcauugaagcuau

SEQ ID NO: 2341623 - RNA, 19 nt, Homo sapiens
  misc_RNA (1)...(19): siRNA sense strand
gauuaugaugccaguuaua

SEQ ID NO: 2341624 - RNA, 19 nt, Homo sapiens
  misc_RNA (1)...(19): siRNA sense strand
ccucauggaaggagaacca

SEQ ID NO: 2341625 - RNA, 19 nt, Homo sapiens
  misc_RNA (1)...(19): siRNA sense strand
ccaaaguagaccuggcaga

SEQ ID NO: 2341626 - RNA, 19 nt, Homo sapiens
  misc_RNA (1)...(19): siRNA sense strand
cgacacaaguggaaugacu

SEQ ID NO: 2341627 - RNA, 19 nt, Homo sapiens
  misc_RNA (1)...(19): siRNA sense strand
uuugaucaguggaaagaua

SEQ ID NO: 2341628 - RNA, 19 nt, Homo sapiens
  misc_RNA (1)...(19): siRNA sense strand
aaauuuaagccuugcagua

SEQ ID NO: 2341629 - RNA, 19 nt, Homo sapiens
  misc_RNA (1)...(19): siRNA sense strand
ggaaugacuuugcggagga

SEQ ID NO: 2341630 - RNA, 19 nt, Homo sapiens
  misc_RNA (1)...(19): siRNA sense strand
gcguucaacuggcggaaga

SEQ ID NO: 2341631 - RNA, 19 nt, Homo sapiens
  misc_RNA (1)...(19): siRNA sense strand
ccugacauugugugggaaa

SEQ ID NO: 2341632 - RNA, 19 nt, Homo sapiens
  misc_RNA (1)...(19): siRNA sense strand
ugacaaaggcauucaucau

SEQ ID NO: 2341633 - RNA, 19 nt, Homo sapiens
  misc_RNA (1)...(19): siRNA sense strand
aagacuaguguguuggaaa

SEQ ID NO: 2341634 - RNA, 19 nt, Homo sapiens
  misc_RNA (1)...(19): siRNA sense strand
aaguagaccuggcagagaa

SEQ ID NO: 2341635 - RNA, 19 nt, Homo sapiens
  misc_RNA (1)...(19): siRNA sense strand
cuaaagacaagcaugcuaa

SEQ ID NO: 2341636 - RNA, 19 nt, Homo sapiens
  misc_RNA (1)...(19): siRNA sense strand
gauggugagaagaagauua

SEQ ID NO: 2341637 - RNA, 19 nt, Homo sapiens
  misc_RNA (1)...(19): siRNA sense strand
gugacaagcauuuuagaaa

SEQ ID NO: 2341638 - RNA, 19 nt, Homo sapiens
  misc_RNA (1)...(19): siRNA sense strand
agaaagaugacaaaggcau

SEQ ID NO: 2341639 - RNA, 19 nt, Homo sapiens
  misc_RNA (1)...(19): siRNA sense strand
cgaauauucccaagaggau

SEQ ID NO: 2341640 - RNA, 19 nt, Homo sapiens
  misc_RNA (1)...(19): siRNA sense strand
aaagauaguucucgggagu

SEQ ID NO: 2341641 - RNA, 19 nt, Homo sapiens
  misc_RNA (1)...(19): siRNA sense strand
cuuuaugacagaaccgaaa

SEQ ID NO: 2341642 - RNA, 19 nt, Homo sapiens
  misc_RNA (1)...(19): siRNA sense strand
gaacuucgaaugaggaaaa

SEQ ID NO: 2341643 - RNA, 19 nt, Homo sapiens
  misc_RNA (1)...(19): siRNA sense strand
gauuaaggauacuuggcau

SEQ ID NO: 2341644 - RNA, 19 nt, Homo sapiens
  misc_RNA (1)...(19): siRNA sense strand
auaaauggauugugccuga

SEQ ID NO: 2341645 - RNA, 19 nt, Homo sapiens
  misc_RNA (1)...(19): siRNA sense strand
caguugaaguaucagagaa

SEQ ID NO: 2341646 - RNA, 19 nt, Homo sapiens
  misc_RNA (1)...(19): siRNA sense strand
gaagauggugagaagaaga

SEQ ID NO: 2341647 - RNA, 19 nt, Homo sapiens
  misc_RNA (1)...(19): siRNA sense strand
cugaaagugacaagcauuu

SEQ ID NO: 2341648 - RNA, 19 nt, Homo sapiens
  misc_RNA (1)...(19): siRNA sense strand
gaaaaggagaacaaagaau

SEQ ID NO: 2341649 - RNA, 19 nt, Homo sapiens
  misc_RNA (1)...(19): siRNA sense strand
ccauauucguuuugaccaa

SEQ ID NO: 2341650 - RNA, 19 nt, Homo sapiens
  misc_RNA (1)...(19): siRNA sense strand
ccuaaagacaagcaugcua

SEQ ID NO: 2341651 - RNA, 19 nt, Homo sapiens
  misc_RNA (1)...(19): siRNA sense strand
cugaauggaagaauaacua

SEQ ID NO: 2341652 - RNA, 19 nt, Homo sapiens
  misc_RNA (1)...(19): siRNA sense strand
ucucaaggauacugaaaau

SEQ ID NO: 2341653 - RNA, 19 nt, Homo sapiens
  misc_RNA (1)...(19): siRNA sense strand
ggaacagcucugaaagcau

SEQ ID NO: 2341654 - RNA, 19 nt, Homo sapiens
  misc_RNA (1)...(19): siRNA sense strand
caagcaugcuaaaggcaca

SEQ ID NO: 2341655 - RNA, 19 nt, Homo sapiens
  misc_RNA (1)...(19): siRNA sense strand
gaaaaugguacgagagucu

SEQ ID NO: 2341656 - RNA, 19 nt, Homo sapiens
  misc_RNA (1)...(19): siRNA sense strand
cugauuaugaugccaguua

SEQ ID NO: 2341657 - RNA, 19 nt, Homo sapiens
  misc_RNA (1)...(19): siRNA sense strand
agauaguucucgggaguuu

SEQ ID NO: 2341658 - RNA, 19 nt, Homo sapiens
  misc_RNA (1)...(19): siRNA sense strand
uguuaaagagguauuggaa

SEQ ID NO: 2341659 - RNA, 19 nt, Homo sapiens
  misc_RNA (1)...(19): siRNA sense strand
aagagguauuggaagauuu

SEQ ID NO: 2341660 - RNA, 19 nt, Homo sapiens
  misc_RNA (1)...(19): siRNA sense strand
gggaaauugaugaguauau

SEQ ID NO: 2341661 - RNA, 19 nt, Homo sapiens
  misc_RNA (1)...(19): siRNA sense strand
agaaugaauuggagaagau

SEQ ID NO: 2341662 - RNA, 19 nt, Homo sapiens
  misc_RNA (1)...(19): siRNA sense strand
cgcaaauacuuuaaggcaa

SEQ ID NO: 2341663 - RNA, 19 nt, Homo sapiens
  misc_RNA (1)...(19): siRNA sense strand
aguuaggcgauuagagaaa

SEQ ID NO: 2341664 - RNA, 19 nt, Homo sapiens
  misc_RNA (1)...(19): siRNA sense strand
cucaagaaaguuagagaaa

SEQ ID NO: 2341665 - RNA, 19 nt, Homo sapiens
  misc_RNA (1)...(19): siRNA sense strand
cugaagauggugagaagaa

SEQ ID NO: 2341666 - RNA, 19 nt, Homo sapiens
  misc_RNA (1)...(19): siRNA sense strand
ugacagaaccgaaagggaa

SEQ ID NO: 2341667 - RNA, 19 nt, Homo sapiens
  misc_RNA (1)...(19): siRNA sense strand
gauuagaaaaggagaacaa

SEQ ID NO: 2341668 - RNA, 19 nt, Homo sapiens
  misc_RNA (1)...(19): siRNA sense strand
cgaaagggaaagagcauga

SEQ ID NO: 2341669 - RNA, 19 nt, Homo sapiens
  misc_RNA (1)...(19): siRNA sense strand
ccuugaaucccgaggagua

SEQ ID NO: 2341670 - RNA, 19 nt, Homo sapiens
  misc_RNA (1)...(19): siRNA sense strand
gugggaaauugaugaguau

SEQ ID NO: 2341671 - RNA, 19 nt, Homo sapiens
  misc_RNA (1)...(19): siRNA sense strand
gcaaauacuuuaaggcaac

SEQ ID NO: 2341672 - RNA, 19 nt, Homo sapiens
  misc_RNA (1)...(19): siRNA sense strand
agacuaguguguuggaaau

SEQ ID NO: 2341673 - RNA, 19 nt, Homo sapiens
  misc_RNA (1)...(19): siRNA sense strand
gacagaaccgaaagggaaa

SEQ ID NO: 2341674 - RNA, 19 nt, Homo sapiens
  misc_RNA (1)...(19): siRNA sense strand
aguugaaguaucagagaau

SEQ ID NO: 2341675 - RNA, 19 nt, Homo sapiens
  misc_RNA (1)...(19): siRNA sense strand
cggaaugaacuauuugaaa

SEQ ID NO: 2341676 - RNA, 19 nt, Homo sapiens
  misc_RNA (1)...(19): siRNA sense strand
cugccagucuuuagugaaa

SEQ ID NO: 2341677 - RNA, 19 nt, Homo sapiens
  misc_RNA (1)...(19): siRNA sense strand
agcagauaauugaaggaaa

SEQ ID NO: 2341678 - RNA, 19 nt, Homo sapiens
  misc_RNA (1)...(19): siRNA sense strand
uguaaaaggcccuggacua

SEQ ID NO: 2341679 - RNA, 19 nt, Homo sapiens
  misc_RNA (1)...(19): siRNA sense strand
ggugagaagaagauuaaau

SEQ ID NO: 2341680 - RNA, 19 nt, Homo sapiens
  misc_RNA (1)...(19): siRNA sense strand
aggcaacaacuuacaaaua

SEQ ID NO: 2341681 - RNA, 19 nt, Homo sapiens
  misc_RNA (1)...(19): siRNA sense strand
aggcauggcuccugacaca

SEQ ID NO: 2341682 - RNA, 19 nt, Homo sapiens
  misc_RNA (1)...(19): siRNA sense strand
ucuugcaagugaugaaaua

SEQ ID NO: 2341683 - RNA, 19 nt, Homo sapiens
  misc_RNA (1)...(19): siRNA sense strand
ccucaagaaaguuagagaa

SEQ ID NO: 2341684 - RNA, 19 nt, Homo sapiens
  misc_RNA (1)...(19): siRNA sense strand
cugaaagcauugaagcuau

SEQ ID NO: 2341685 - RNA, 19 nt, Homo sapiens
  misc_RNA (1)...(19): siRNA sense strand
gauuaugaugccaguuaua

SEQ ID NO: 2341686 - RNA, 19 nt, Homo sapiens
  misc_RNA (1)...(19): siRNA sense strand
ccucauggaaggagaacca

SEQ ID NO: 2341687 - RNA, 19 nt, Homo sapiens
  misc_RNA (1)...(19): siRNA sense strand
ccaaaguagaccuggcaga

SEQ ID NO: 2341688 - RNA, 19 nt, Homo sapiens
  misc_RNA (1)...(19): siRNA sense strand
cgacacaaguggaaugacu

SEQ ID NO: 2341689 - RNA, 19 nt, Homo sapiens
  misc_RNA (1)...(19): siRNA sense strand
uuugaucaguggaaagaua

SEQ ID NO: 2341690 - RNA, 19 nt, Homo sapiens
  misc_RNA (1)...(19): siRNA sense strand
aaauuuaagccuugcagua

SEQ ID NO: 2341691 - RNA, 19 nt, Homo sapiens
  misc_RNA (1)...(19): siRNA sense strand
ggaaugacuuugcggagga

SEQ ID NO: 2341692 - RNA, 19 nt, Homo sapiens
  misc_RNA (1)...(19): siRNA sense strand
gcguucaacuggcggaaga

SEQ ID NO: 2341693 - RNA, 19 nt, Homo sapiens
  misc_RNA (1)...(19): siRNA sense strand
ccugacauugugugggaaa

SEQ ID NO: 2341694 - RNA, 19 nt, Homo sapiens
  misc_RNA (1)...(19): siRNA sense strand
ugacaaaggcauucaucau

SEQ ID NO: 2341695 - RNA, 19 nt, Homo sapiens
  misc_RNA (1)...(19): siRNA sense strand
aagacuaguguguuggaaa

SEQ ID NO: 2341696 - RNA, 19 nt, Homo sapiens
  misc_RNA (1)...(19): siRNA sense strand
aaguagaccuggcagagaa

SEQ ID NO: 2341697 - RNA, 19 nt, Homo sapiens
  misc_RNA (1)...(19): siRNA sense strand
cuaaagacaagcaugcuaa

SEQ ID NO: 2341698 - RNA, 19 nt, Homo sapiens
  misc_RNA (1)...(19): siRNA sense strand
gauggugagaagaagauua

SEQ ID NO: 2341699 - RNA, 19 nt, Homo sapiens
  misc_RNA (1)...(19): siRNA sense strand
gugacaagcauuuuagaaa

SEQ ID NO: 2341700 - RNA, 19 nt, Homo sapiens
  misc_RNA (1)...(19): siRNA sense strand
agaaagaugacaaaggcau

SEQ ID NO: 2341701 - RNA, 19 nt, Homo sapiens
  misc_RNA (1)...(19): siRNA sense strand
cgaauauucccaagaggau

SEQ ID NO: 2341702 - RNA, 19 nt, Homo sapiens
  misc_RNA (1)...(19): siRNA sense strand
aaagauaguucucgggagu

SEQ ID NO: 2341703 - RNA, 19 nt, Homo sapiens
  misc_RNA (1)...(19): siRNA sense strand
cuuuaugacagaaccgaaa

SEQ ID NO: 2341704 - RNA, 19 nt, Homo sapiens
  misc_RNA (1)...(19): siRNA sense strand
gaacuucgaaugaggaaaa

SEQ ID NO: 2341705 - RNA, 19 nt, Homo sapiens
  misc_RNA (1)...(19): siRNA sense strand
gauuaaggauacuuggcau

SEQ ID NO: 2341706 - RNA, 19 nt, Homo sapiens
  misc_RNA (1)...(19): siRNA sense strand
auaaauggauugugccuga

SEQ ID NO: 2341707 - RNA, 19 nt, Homo sapiens
  misc_RNA (1)...(19): siRNA sense strand
caguugaaguaucagagaa

SEQ ID NO: 2341708 - RNA, 19 nt, Homo sapiens
  misc_RNA (1)...(19): siRNA sense strand
gaagauggugagaagaaga

SEQ ID NO: 2341709 - RNA, 19 nt, Homo sapiens
  misc_RNA (1)...(19): siRNA sense strand
cugaaagugacaagcauuu

SEQ ID NO: 2341710 - RNA, 19 nt, Homo sapiens
  misc_RNA (1)...(19): siRNA sense strand
gaaaaggagaacaaagaau

SEQ ID NO: 2341711 - RNA, 19 nt, Homo sapiens
  misc_RNA (1)...(19): siRNA sense strand
ccauauucguuuugaccaa

SEQ ID NO: 2341712 - RNA, 19 nt, Homo sapiens
  misc_RNA (1)...(19): siRNA sense strand
ccuaaagacaagcaugcua

SEQ ID NO: 2341713 - RNA, 19 nt, Homo sapiens
  misc_RNA (1)...(19): siRNA sense strand
cugaauggaagaauaacua

SEQ ID NO: 2341714 - RNA, 19 nt, Homo sapiens
  misc_RNA (1)...(19): siRNA sense strand
ucucaaggauacugaaaau

SEQ ID NO: 2341715 - RNA, 19 nt, Homo sapiens
  misc_RNA (1)...(19): siRNA sense strand
ggaacagcucugaaagcau

SEQ ID NO: 2341716 - RNA, 19 nt, Homo sapiens
  misc_RNA (1)...(19): siRNA sense strand
caagcaugcuaaaggcaca

SEQ ID NO: 2341717 - RNA, 19 nt, Homo sapiens
  misc_RNA (1)...(19): siRNA sense strand
gaaaaugguacgagagucu

SEQ ID NO: 2341718 - RNA, 19 nt, Homo sapiens
  misc_RNA (1)...(19): siRNA sense strand
cugauuaugaugccaguua

SEQ ID NO: 2341719 - RNA, 19 nt, Homo sapiens
  misc_RNA (1)...(19): siRNA sense strand
agauaguucucgggaguuu

SEQ ID NO: 2341720 - RNA, 19 nt, Homo sapiens
  misc_RNA (1)...(19): siRNA sense strand
uguuaaagagguauuggaa

SEQ ID NO: 2341721 - RNA, 19 nt, Homo sapiens
  misc_RNA (1)...(19): siRNA sense strand
aagagguauuggaagauuu

SEQ ID NO: 2341722 - RNA, 19 nt, Homo sapiens
  misc_RNA (1)...(19): siRNA sense strand
gggaaauugaugaguauau

SEQ ID NO: 2341723 - RNA, 19 nt, Homo sapiens
  misc_RNA (1)...(19): siRNA sense strand
agaaugaauuggagaagau

SEQ ID NO: 2341724 - RNA, 19 nt, Homo sapiens
  misc_RNA (1)...(19): siRNA sense strand
cgcaaauacuuuaaggcaa

SEQ ID NO: 2341725 - RNA, 19 nt, Homo sapiens
  misc_RNA (1)...(19): siRNA sense strand
aguuaggcgauuagagaaa

SEQ ID NO: 2341726 - RNA, 19 nt, Homo sapiens
  misc_RNA (1)...(19): siRNA sense strand
cucaagaaaguuagagaaa

SEQ ID NO: 2341727 - RNA, 19 nt, Homo sapiens
  misc_RNA (1)...(19): siRNA sense strand
cugaagauggugagaagaa

SEQ ID NO: 2341728 - RNA, 19 nt, Homo sapiens
  misc_RNA (1)...(19): siRNA sense strand
ugacagaaccgaaagggaa

SEQ ID NO: 2341729 - RNA, 19 nt, Homo sapiens
  misc_RNA (1)...(19): siRNA sense strand
gauuagaaaaggagaacaa

SEQ ID NO: 2341730 - RNA, 19 nt, Homo sapiens
  misc_RNA (1)...(19): siRNA sense strand
cgaaagggaaagagcauga

SEQ ID NO: 2341731 - RNA, 19 nt, Homo sapiens
  misc_RNA (1)...(19): siRNA sense strand
ccuugaaucccgaggagua

SEQ ID NO: 2341732 - RNA, 19 nt, Homo sapiens
  misc_RNA (1)...(19): siRNA sense strand
gugggaaauugaugaguau

SEQ ID NO: 2341733 - RNA, 19 nt, Homo sapiens
  misc_RNA (1)...(19): siRNA sense strand
gcaaauacuuuaaggcaac

SEQ ID NO: 2341734 - RNA, 19 nt, Homo sapiens
  misc_RNA (1)...(19): siRNA sense strand
agacuaguguguuggaaau

SEQ ID NO: 2341735 - RNA, 19 nt, Homo sapiens
  misc_RNA (1)...(19): siRNA sense strand
gacagaaccgaaagggaaa

SEQ ID NO: 2341736 - RNA, 19 nt, Homo sapiens
  misc_RNA (1)...(19): siRNA sense strand
aguugaaguaucagagaau

SEQ ID NO: 2341737 - RNA, 19 nt, Homo sapiens
  misc_RNA (1)...(19): siRNA sense strand
cggaaugaacuauuugaaa

SEQ ID NO: 2341738 - RNA, 19 nt, Homo sapiens
  misc_RNA (1)...(19): siRNA sense strand
cugccagucuuuagugaaa

SEQ ID NO: 2341739 - RNA, 19 nt, Homo sapiens
  misc_RNA (1)...(19): siRNA sense strand
agcagauaauugaaggaaa

SEQ ID NO: 2341740 - RNA, 19 nt, Homo sapiens
  misc_RNA (1)...(19): siRNA sense strand
uguaaaaggcccuggacua

SEQ ID NO: 2341741 - RNA, 19 nt, Homo sapiens
  misc_RNA (1)...(19): siRNA sense strand
ggugagaagaagauuaaau

SEQ ID NO: 2341742 - RNA, 19 nt, Homo sapiens
  misc_RNA (1)...(19): siRNA sense strand
aggcaacaacuuacaaaua

SEQ ID NO: 2341743 - RNA, 19 nt, Homo sapiens
  misc_RNA (1)...(19): siRNA sense strand
aggcauggcuccugacaca

SEQ ID NO: 2341744 - RNA, 19 nt, Homo sapiens
  misc_RNA (1)...(19): siRNA sense strand
ucuugcaagugaugaaaua

SEQ ID NO: 2341745 - RNA, 19 nt, Homo sapiens
  misc_RNA (1)...(19): siRNA sense strand
ccucaagaaaguuagagaa

SEQ ID NO: 2341746 - RNA, 19 nt, Homo sapiens
  misc_RNA (1)...(19): siRNA sense strand
cugaaagcauugaagcuau

SEQ ID NO: 2341747 - RNA, 19 nt, Homo sapiens
  misc_RNA (1)...(19): siRNA sense strand
gauuaugaugccaguuaua

SEQ ID NO: 2341748 - RNA, 19 nt, Homo sapiens
  misc_RNA (1)...(19): siRNA sense strand
ccucauggaaggagaacca

SEQ ID NO: 2341749 - RNA, 19 nt, Homo sapiens
  misc_RNA (1)...(19): siRNA sense strand
ccaaaguagaccuggcaga

SEQ ID NO: 2341750 - RNA, 19 nt, Homo sapiens
  misc_RNA (1)...(19): siRNA sense strand
cgacacaaguggaaugacu

SEQ ID NO: 2341751 - RNA, 19 nt, Homo sapiens
  misc_RNA (1)...(19): siRNA sense strand
uuugaucaguggaaagaua

SEQ ID NO: 2341752 - RNA, 19 nt, Homo sapiens
  misc_RNA (1)...(19): siRNA sense strand
aaauuuaagccuugcagua

SEQ ID NO: 2341753 - RNA, 19 nt, Homo sapiens
  misc_RNA (1)...(19): siRNA sense strand
ggaaugacuuugcggagga

SEQ ID NO: 2341754 - RNA, 19 nt, Homo sapiens
  misc_RNA (1)...(19): siRNA sense strand
gcguucaacuggcggaaga

SEQ ID NO: 2341755 - RNA, 19 nt, Homo sapiens
  misc_RNA (1)...(19): siRNA sense strand
ccugacauugugugggaaa

SEQ ID NO: 2341756 - RNA, 19 nt, Homo sapiens
  misc_RNA (1)...(19): siRNA sense strand
ugacaaaggcauucaucau

SEQ ID NO: 2341757 - RNA, 19 nt, Homo sapiens
  misc_RNA (1)...(19): siRNA sense strand
aagacuaguguguuggaaa

SEQ ID NO: 2341758 - RNA, 19 nt, Homo sapiens
  misc_RNA (1)...(19): siRNA sense strand
aaguagaccuggcagagaa

SEQ ID NO: 2341759 - RNA, 19 nt, Homo sapiens
  misc_RNA (1)...(19): siRNA sense strand
cuaaagacaagcaugcuaa

SEQ ID NO: 2341760 - RNA, 19 nt, Homo sapiens
  misc_RNA (1)...(19): siRNA sense strand
gauggugagaagaagauua

SEQ ID NO: 2341761 - RNA, 19 nt, Homo sapiens
  misc_RNA (1)...(19): siRNA sense strand
gugacaagcauuuuagaaa

SEQ ID NO: 2341762 - RNA, 19 nt, Homo sapiens
  misc_RNA (1)...(19): siRNA sense strand
agaaagaugacaaaggcau

SEQ ID NO: 2341763 - RNA, 19 nt, Homo sapiens
  misc_RNA (1)...(19): siRNA sense strand
cgaauauucccaagaggau

SEQ ID NO: 2341764 - RNA, 19 nt, Homo sapiens
  misc_RNA (1)...(19): siRNA sense strand
aaagauaguucucgggagu

SEQ ID NO: 2341765 - RNA, 19 nt, Homo sapiens
  misc_RNA (1)...(19): siRNA sense strand
cuuuaugacagaaccgaaa

SEQ ID NO: 2341766 - RNA, 19 nt, Homo sapiens
  misc_RNA (1)...(19): siRNA sense strand
gaacuucgaaugaggaaaa

SEQ ID NO: 2341767 - RNA, 19 nt, Homo sapiens
  misc_RNA (1)...(19): siRNA sense strand
gauuaaggauacuuggcau

SEQ ID NO: 2341768 - RNA, 19 nt, Homo sapiens
  misc_RNA (1)...(19): siRNA sense strand
auaaauggauugugccuga

SEQ ID NO: 2341769 - RNA, 19 nt, Homo sapiens
  misc_RNA (1)...(19): siRNA sense strand
caguugaaguaucagagaa

SEQ ID NO: 2341770 - RNA, 19 nt, Homo sapiens
  misc_RNA (1)...(19): siRNA sense strand
gaagauggugagaagaaga

SEQ ID NO: 2341771 - RNA, 19 nt, Homo sapiens
  misc_RNA (1)...(19): siRNA sense strand
cugaaagugacaagcauuu

SEQ ID NO: 2341772 - RNA, 19 nt, Homo sapiens
  misc_RNA (1)...(19): siRNA sense strand
gaaaaggagaacaaagaau

SEQ ID NO: 2341773 - RNA, 19 nt, Homo sapiens
  misc_RNA (1)...(19): siRNA sense strand
ccauauucguuuugaccaa

SEQ ID NO: 2341774 - RNA, 19 nt, Homo sapiens
  misc_RNA (1)...(19): siRNA sense strand
ccuaaagacaagcaugcua

SEQ ID NO: 2341775 - RNA, 19 nt, Homo sapiens
  misc_RNA (1)...(19): siRNA sense strand
cugaauggaagaauaacua

SEQ ID NO: 2341776 - RNA, 19 nt, Homo sapiens
  misc_RNA (1)...(19): siRNA sense strand
ucucaaggauacugaaaau

SEQ ID NO: 2341777 - RNA, 19 nt, Homo sapiens
  misc_RNA (1)...(19): siRNA sense strand
ggaacagcucugaaagcau

SEQ ID NO: 2341778 - RNA, 19 nt, Homo sapiens
  misc_RNA (1)...(19): siRNA sense strand
caagcaugcuaaaggcaca

SEQ ID NO: 2341779 - RNA, 19 nt, Homo sapiens
  misc_RNA (1)...(19): siRNA sense strand
gaaaaugguacgagagucu

SEQ ID NO: 2341780 - RNA, 19 nt, Homo sapiens
  misc_RNA (1)...(19): siRNA sense strand
cugauuaugaugccaguua

SEQ ID NO: 2341781 - RNA, 19 nt, Homo sapiens
  misc_RNA (1)...(19): siRNA sense strand
agauaguucucgggaguuu

SEQ ID NO: 2341782 - RNA, 19 nt, Homo sapiens
  misc_RNA (1)...(19): siRNA sense strand
uguuaaagagguauuggaa

SEQ ID NO: 2341783 - RNA, 19 nt, Homo sapiens
  misc_RNA (1)...(19): siRNA sense strand
aagagguauuggaagauuu

SEQ ID NO: 2341784 - RNA, 19 nt, Homo sapiens
  misc_RNA (1)...(19): siRNA sense strand
gggaaauugaugaguauau

SEQ ID NO: 2341785 - RNA, 19 nt, Homo sapiens
  misc_RNA (1)...(19): siRNA sense strand
agaaugaauuggagaagau

SEQ ID NO: 2341786 - RNA, 19 nt, Homo sapiens
  misc_RNA (1)...(19): siRNA sense strand
cgcaaauacuuuaaggcaa

SEQ ID NO: 2341787 - RNA, 19 nt, Homo sapiens
  misc_RNA (1)...(19): siRNA sense strand
aguuaggcgauuagagaaa

SEQ ID NO: 2341788 - RNA, 19 nt, Homo sapiens
  misc_RNA (1)...(19): siRNA sense strand
cucaagaaaguuagagaaa

SEQ ID NO: 2341789 - RNA, 19 nt, Homo sapiens
  misc_RNA (1)...(19): siRNA sense strand
cugaagauggugagaagaa

SEQ ID NO: 2341790 - RNA, 19 nt, Homo sapiens
  misc_RNA (1)...(19): siRNA sense strand
ugacagaaccgaaagggaa

SEQ ID NO: 2341791 - RNA, 19 nt, Homo sapiens
  misc_RNA (1)...(19): siRNA sense strand
gauuagaaaaggagaacaa

SEQ ID NO: 2341792 - RNA, 19 nt, Homo sapiens
  misc_RNA (1)...(19): siRNA sense strand
cgaaagggaaagagcauga

SEQ ID NO: 2341793 - RNA, 19 nt, Homo sapiens
  misc_RNA (1)...(19): siRNA sense strand
ccuugaaucccgaggagua

SEQ ID NO: 2341794 - RNA, 19 nt, Homo sapiens
  misc_RNA (1)...(19): siRNA sense strand
gugggaaauugaugaguau

SEQ ID NO: 2341795 - RNA, 19 nt, Homo sapiens
  misc_RNA (1)...(19): siRNA sense strand
gcaaauacuuuaaggcaac

SEQ ID NO: 2341796 - RNA, 19 nt, Homo sapiens
  misc_RNA (1)...(19): siRNA sense strand
agacuaguguguuggaaau

SEQ ID NO: 2341797 - RNA, 19 nt, Homo sapiens
  misc_RNA (1)...(19): siRNA sense strand
gacagaaccgaaagggaaa

SEQ ID NO: 2341798 - RNA, 19 nt, Homo sapiens
  misc_RNA (1)...(19): siRNA sense strand
aguugaaguaucagagaau

SEQ ID NO: 2341799 - RNA, 19 nt, Homo sapiens
  misc_RNA (1)...(19): siRNA sense strand
cggaaugaacuauuugaaa

SEQ ID NO: 2341800 - RNA, 19 nt, Homo sapiens
  misc_RNA (1)...(19): siRNA sense strand
cugccagucuuuagugaaa

SEQ ID NO: 2341801 - RNA, 19 nt, Homo sapiens
  misc_RNA (1)...(19): siRNA sense strand
agcagauaauugaaggaaa

SEQ ID NO: 2341802 - RNA, 19 nt, Homo sapiens
  misc_RNA (1)...(19): siRNA sense strand
uguaaaaggcccuggacua

SEQ ID NO: 2341803 - RNA, 19 nt, Homo sapiens
  misc_RNA (1)...(19): siRNA sense strand
ggugagaagaagauuaaau

SEQ ID NO: 2341804 - RNA, 19 nt, Homo sapiens
  misc_RNA (1)...(19): siRNA sense strand
aggcaacaacuuacaaaua

SEQ ID NO: 2341805 - RNA, 19 nt, Homo sapiens
  misc_RNA (1)...(19): siRNA sense strand
aggcauggcuccugacaca

SEQ ID NO: 2341806 - RNA, 19 nt, Homo sapiens
  misc_RNA (1)...(19): siRNA sense strand
ucuugcaagugaugaaaua

SEQ ID NO: 2341807 - RNA, 19 nt, Homo sapiens
  misc_RNA (1)...(19): siRNA sense strand
ccucaagaaaguuagagaa

SEQ ID NO: 2341808 - RNA, 19 nt, Homo sapiens
  misc_RNA (1)...(19): siRNA sense strand
cugaaagcauugaagcuau

SEQ ID NO: 2341809 - RNA, 19 nt, Homo sapiens
  misc_RNA (1)...(19): siRNA sense strand
gauuaugaugccaguuaua

SEQ ID NO: 2341810 - RNA, 19 nt, Homo sapiens
  misc_RNA (1)...(19): siRNA sense strand
ccucauggaaggagaacca

SEQ ID NO: 2341811 - RNA, 19 nt, Homo sapiens
  misc_RNA (1)...(19): siRNA sense strand
ccaaaguagaccuggcaga

SEQ ID NO: 2341812 - RNA, 19 nt, Homo sapiens
  misc_RNA (1)...(19): siRNA sense strand
cgacacaaguggaaugacu

SEQ ID NO: 2341813 - RNA, 19 nt, Homo sapiens
  misc_RNA (1)...(19): siRNA sense strand
uuugaucaguggaaagaua

SEQ ID NO: 2341814 - RNA, 19 nt, Homo sapiens
  misc_RNA (1)...(19): siRNA sense strand
aaauuuaagccuugcagua

SEQ ID NO: 2341815 - RNA, 19 nt, Homo sapiens
  misc_RNA (1)...(19): siRNA sense strand
ggaaugacuuugcggagga

SEQ ID NO: 2341816 - RNA, 19 nt, Homo sapiens
  misc_RNA (1)...(19): siRNA sense strand
gcguucaacuggcggaaga

SEQ ID NO: 2341817 - RNA, 19 nt, Homo sapiens
  misc_RNA (1)...(19): siRNA sense strand
ccugacauugugugggaaa

SEQ ID NO: 2341818 - RNA, 19 nt, Homo sapiens
  misc_RNA (1)...(19): siRNA sense strand
ugacaaaggcauucaucau

SEQ ID NO: 2341819 - RNA, 19 nt, Homo sapiens
  misc_RNA (1)...(19): siRNA sense strand
aagacuaguguguuggaaa

SEQ ID NO: 2341820 - RNA, 19 nt, Homo sapiens
  misc_RNA (1)...(19): siRNA sense strand
aaguagaccuggcagagaa

SEQ ID NO: 2341821 - RNA, 19 nt, Homo sapiens
  misc_RNA (1)...(19): siRNA sense strand
cuaaagacaagcaugcuaa

SEQ ID NO: 2341822 - RNA, 19 nt, Homo sapiens
  misc_RNA (1)...(19): siRNA sense strand
gauggugagaagaagauua

SEQ ID NO: 2341823 - RNA, 19 nt, Homo sapiens
  misc_RNA (1)...(19): siRNA sense strand
gugacaagcauuuuagaaa

SEQ ID NO: 2341824 - RNA, 19 nt, Homo sapiens
  misc_RNA (1)...(19): siRNA sense strand
agaaagaugacaaaggcau

SEQ ID NO: 2341825 - RNA, 19 nt, Homo sapiens
  misc_RNA (1)...(19): siRNA sense strand
cgaauauucccaagaggau

SEQ ID NO: 2341826 - RNA, 19 nt, Homo sapiens
  misc_RNA (1)...(19): siRNA sense strand
aaagauaguucucgggagu

SEQ ID NO: 2341827 - RNA, 19 nt, Homo sapiens
  misc_RNA (1)...(19): siRNA sense strand
cuuuaugacagaaccgaaa

SEQ ID NO: 2341828 - RNA, 19 nt, Homo sapiens
  misc_RNA (1)...(19): siRNA sense strand
gaacuucgaaugaggaaaa

SEQ ID NO: 2341829 - RNA, 19 nt, Homo sapiens
  misc_RNA (1)...(19): siRNA sense strand
gauuaaggauacuuggcau

SEQ ID NO: 2341830 - RNA, 19 nt, Homo sapiens
  misc_RNA (1)...(19): siRNA sense strand
auaaauggauugugccuga

SEQ ID NO: 2341831 - RNA, 19 nt, Homo sapiens
  misc_RNA (1)...(19): siRNA sense strand
caguugaaguaucagagaa

SEQ ID NO: 2341832 - RNA, 19 nt, Homo sapiens
  misc_RNA (1)...(19): siRNA sense strand
gaagauggugagaagaaga

SEQ ID NO: 2341833 - RNA, 19 nt, Homo sapiens
  misc_RNA (1)...(19): siRNA sense strand
cugaaagugacaagcauuu

SEQ ID NO: 2341834 - RNA, 19 nt, Homo sapiens
  misc_RNA (1)...(19): siRNA sense strand
gaaaaggagaacaaagaau

SEQ ID NO: 2341835 - RNA, 19 nt, Homo sapiens
  misc_RNA (1)...(19): siRNA sense strand
ccauauucguuuugaccaa

SEQ ID NO: 2341836 - RNA, 19 nt, Homo sapiens
  misc_RNA (1)...(19): siRNA sense strand
ccuaaagacaagcaugcua

SEQ ID NO: 2341837 - RNA, 19 nt, Homo sapiens
  misc_RNA (1)...(19): siRNA sense strand
cugaauggaagaauaacua

SEQ ID NO: 2341838 - RNA, 19 nt, Homo sapiens
  misc_RNA (1)...(19): siRNA sense strand
ucucaaggauacugaaaau

SEQ ID NO: 2341839 - RNA, 19 nt, Homo sapiens
  misc_RNA (1)...(19): siRNA sense strand
ggaacagcucugaaagcau

SEQ ID NO: 2341840 - RNA, 19 nt, Homo sapiens
  misc_RNA (1)...(19): siRNA sense strand
caagcaugcuaaaggcaca

SEQ ID NO: 2341841 - RNA, 19 nt, Homo sapiens
  misc_RNA (1)...(19): siRNA sense strand
gaaaaugguacgagagucu

SEQ ID NO: 2341842 - RNA, 19 nt, Homo sapiens
  misc_RNA (1)...(19): siRNA sense strand
cugauuaugaugccaguua

SEQ ID NO: 2341843 - RNA, 19 nt, Homo sapiens
  misc_RNA (1)...(19): siRNA sense strand
agauaguucucgggaguuu

SEQ ID NO: 2341844 - RNA, 19 nt, Homo sapiens
  misc_RNA (1)...(19): siRNA sense strand
uguuaaagagguauuggaa

SEQ ID NO: 2341845 - RNA, 19 nt, Homo sapiens
  misc_RNA (1)...(19): siRNA sense strand
aagagguauuggaagauuu

SEQ ID NO: 2341846 - RNA, 19 nt, Homo sapiens
  misc_RNA (1)...(19): siRNA sense strand
gggaaauugaugaguauau

SEQ ID NO: 2341847 - RNA, 19 nt, Homo sapiens
  misc_RNA (1)...(19): siRNA sense strand
agaaugaauuggagaagau

SEQ ID NO: 2341848 - RNA, 19 nt, Homo sapiens
  misc_RNA (1)...(19): siRNA sense strand
cgcaaauacuuuaaggcaa

SEQ ID NO: 2341849 - RNA, 19 nt, Homo sapiens
  misc_RNA (1)...(19): siRNA sense strand
aguuaggcgauuagagaaa

SEQ ID NO: 2341850 - RNA, 19 nt, Homo sapiens
  misc_RNA (1)...(19): siRNA sense strand
cucaagaaaguuagagaaa

SEQ ID NO: 2341851 - RNA, 19 nt, Homo sapiens
  misc_RNA (1)...(19): siRNA sense strand
cugaagauggugagaagaa

SEQ ID NO: 2341852 - RNA, 19 nt, Homo sapiens
  misc_RNA (1)...(19): siRNA sense strand
ugacagaaccgaaagggaa

SEQ ID NO: 2341853 - RNA, 19 nt, Homo sapiens
  misc_RNA (1)...(19): siRNA sense strand
gauuagaaaaggagaacaa

SEQ ID NO: 2341854 - RNA, 19 nt, Homo sapiens
  misc_RNA (1)...(19): siRNA sense strand
cgaaagggaaagagcauga

SEQ ID NO: 2341855 - RNA, 19 nt, Homo sapiens
  misc_RNA (1)...(19): siRNA sense strand
ccuugaaucccgaggagua

SEQ ID NO: 2341856 - RNA, 19 nt, Homo sapiens
  misc_RNA (1)...(19): siRNA sense strand
gugggaaauugaugaguau

SEQ ID NO: 2341857 - RNA, 19 nt, Homo sapiens
  misc_RNA (1)...(19): siRNA sense strand
gcaaauacuuuaaggcaac

SEQ ID NO: 2341858 - RNA, 19 nt, Homo sapiens
  misc_RNA (1)...(19): siRNA sense strand
agacuaguguguuggaaau

SEQ ID NO: 2341859 - RNA, 19 nt, Homo sapiens
  misc_RNA (1)...(19): siRNA sense strand
gacagaaccgaaagggaaa

SEQ ID NO: 2341860 - RNA, 19 nt, Homo sapiens
  misc_RNA (1)...(19): siRNA sense strand
aguugaaguaucagagaau

SEQ ID NO: 2341861 - RNA, 19 nt, Homo sapiens
  misc_RNA (1)...(19): siRNA sense strand
cggaaugaacuauuugaaa

SEQ ID NO: 2341862 - RNA, 19 nt, Homo sapiens
  misc_RNA (1)...(19): siRNA sense strand
cugccagucuuuagugaaa

SEQ ID NO: 2341863 - RNA, 19 nt, Homo sapiens
  misc_RNA (1)...(19): siRNA sense strand
agcagauaauugaaggaaa

SEQ ID NO: 2341864 - RNA, 19 nt, Homo sapiens
  misc_RNA (1)...(19): siRNA sense strand
uguaaaaggcccuggacua

SEQ ID NO: 2341865 - RNA, 19 nt, Homo sapiens
  misc_RNA (1)...(19): siRNA sense strand
ggugagaagaagauuaaau

SEQ ID NO: 2341866 - RNA, 19 nt, Homo sapiens
  misc_RNA (1)...(19): siRNA sense strand
aggcaacaacuuacaaaua

SEQ ID NO: 2341867 - RNA, 19 nt, Homo sapiens
  misc_RNA (1)...(19): siRNA sense strand
aggcauggcuccugacaca

SEQ ID NO: 2341868 - RNA, 19 nt, Homo sapiens
  misc_RNA (1)...(19): siRNA sense strand
ucuugcaagugaugaaaua

SEQ ID NO: 2341869 - RNA, 19 nt, Homo sapiens
  misc_RNA (1)...(19): siRNA sense strand
ccucaagaaaguuagagaa

SEQ ID NO: 2341870 - RNA, 19 nt, Homo sapiens
  misc_RNA (1)...(19): siRNA sense strand
cugaaagcauugaagcuau

SEQ ID NO: 2341871 - RNA, 19 nt, Homo sapiens
  misc_RNA (1)...(19): siRNA sense strand
gauuaugaugccaguuaua

SEQ ID NO: 2341872 - RNA, 19 nt, Homo sapiens
  misc_RNA (1)...(19): siRNA sense strand
ccucauggaaggagaacca

SEQ ID NO: 2341873 - RNA, 19 nt, Homo sapiens
  misc_RNA (1)...(19): siRNA sense strand
ccaaaguagaccuggcaga

SEQ ID NO: 2341874 - RNA, 19 nt, Homo sapiens
  misc_RNA (1)...(19): siRNA sense strand
cgacacaaguggaaugacu

SEQ ID NO: 2341875 - RNA, 19 nt, Homo sapiens
  misc_RNA (1)...(19): siRNA sense strand
uuugaucaguggaaagaua

SEQ ID NO: 2341876 - RNA, 19 nt, Homo sapiens
  misc_RNA (1)...(19): siRNA sense strand
aaauuuaagccuugcagua

SEQ ID NO: 2341877 - RNA, 19 nt, Homo sapiens
  misc_RNA (1)...(19): siRNA sense strand
ggaaugacuuugcggagga

SEQ ID NO: 2341878 - RNA, 19 nt, Homo sapiens
  misc_RNA (1)...(19): siRNA sense strand
gcguucaacuggcggaaga

SEQ ID NO: 2341879 - RNA, 19 nt, Homo sapiens
  misc_RNA (1)...(19): siRNA sense strand
ccugacauugugugggaaa

SEQ ID NO: 2341880 - RNA, 19 nt, Homo sapiens
  misc_RNA (1)...(19): siRNA sense strand
ugacaaaggcauucaucau

SEQ ID NO: 2341881 - RNA, 19 nt, Homo sapiens
  misc_RNA (1)...(19): siRNA sense strand
aagacuaguguguuggaaa

SEQ ID NO: 2341882 - RNA, 19 nt, Homo sapiens
  misc_RNA (1)...(19): siRNA sense strand
aaguagaccuggcagagaa

SEQ ID NO: 2341883 - RNA, 19 nt, Homo sapiens
  misc_RNA (1)...(19): siRNA sense strand
cuaaagacaagcaugcuaa

SEQ ID NO: 2341884 - RNA, 19 nt, Homo sapiens
  misc_RNA (1)...(19): siRNA sense strand
gauggugagaagaagauua

SEQ ID NO: 2341885 - RNA, 19 nt, Homo sapiens
  misc_RNA (1)...(19): siRNA sense strand
gugacaagcauuuuagaaa

SEQ ID NO: 2341886 - RNA, 19 nt, Homo sapiens
  misc_RNA (1)...(19): siRNA sense strand
agaaagaugacaaaggcau

SEQ ID NO: 2341887 - RNA, 19 nt, Homo sapiens
  misc_RNA (1)...(19): siRNA sense strand
cgaauauucccaagaggau

SEQ ID NO: 2341888 - RNA, 19 nt, Homo sapiens
  misc_RNA (1)...(19): siRNA sense strand
aaagauaguucucgggagu

SEQ ID NO: 2341889 - RNA, 19 nt, Homo sapiens
  misc_RNA (1)...(19): siRNA sense strand
cuuuaugacagaaccgaaa

SEQ ID NO: 2341890 - RNA, 19 nt, Homo sapiens
  misc_RNA (1)...(19): siRNA sense strand
gaacuucgaaugaggaaaa

SEQ ID NO: 2341891 - RNA, 19 nt, Homo sapiens
  misc_RNA (1)...(19): siRNA sense strand
gauuaaggauacuuggcau

SEQ ID NO: 2341892 - RNA, 19 nt, Homo sapiens
  misc_RNA (1)...(19): siRNA sense strand
auaaauggauugugccuga

SEQ ID NO: 2341893 - RNA, 19 nt, Homo sapiens
  misc_RNA (1)...(19): siRNA sense strand
caguugaaguaucagagaa

SEQ ID NO: 2341894 - RNA, 19 nt, Homo sapiens
  misc_RNA (1)...(19): siRNA sense strand
gaagauggugagaagaaga

SEQ ID NO: 2341895 - RNA, 19 nt, Homo sapiens
  misc_RNA (1)...(19): siRNA sense strand
cugaaagugacaagcauuu

SEQ ID NO: 2341896 - RNA, 19 nt, Homo sapiens
  misc_RNA (1)...(19): siRNA sense strand
gaaaaggagaacaaagaau

SEQ ID NO: 2341897 - RNA, 19 nt, Homo sapiens
  misc_RNA (1)...(19): siRNA sense strand
ccauauucguuuugaccaa

SEQ ID NO: 2341898 - RNA, 19 nt, Homo sapiens
  misc_RNA (1)...(19): siRNA sense strand
ccuaaagacaagcaugcua

SEQ ID NO: 2341899 - RNA, 19 nt, Homo sapiens
  misc_RNA (1)...(19): siRNA sense strand
cugaauggaagaauaacua

SEQ ID NO: 2341900 - RNA, 19 nt, Homo sapiens
  misc_RNA (1)...(19): siRNA sense strand
ucucaaggauacugaaaau

SEQ ID NO: 2341901 - RNA, 19 nt, Homo sapiens
  misc_RNA (1)...(19): siRNA sense strand
ggaacagcucugaaagcau

SEQ ID NO: 2341902 - RNA, 19 nt, Homo sapiens
  misc_RNA (1)...(19): siRNA sense strand
caagcaugcuaaaggcaca

SEQ ID NO: 2341903 - RNA, 19 nt, Homo sapiens
  misc_RNA (1)...(19): siRNA sense strand
gaaaaugguacgagagucu

SEQ ID NO: 2341904 - RNA, 19 nt, Homo sapiens
  misc_RNA (1)...(19): siRNA sense strand
cugauuaugaugccaguua

SEQ ID NO: 2341905 - RNA, 19 nt, Homo sapiens
  misc_RNA (1)...(19): siRNA sense strand
agauaguucucgggaguuu

SEQ ID NO: 2341906 - RNA, 19 nt, Homo sapiens
  misc_RNA (1)...(19): siRNA sense strand
uguuaaagagguauuggaa

SEQ ID NO: 2341907 - RNA, 19 nt, Homo sapiens
  misc_RNA (1)...(19): siRNA sense strand
aagagguauuggaagauuu

SEQ ID NO: 2341908 - RNA, 19 nt, Homo sapiens
  misc_RNA (1)...(19): siRNA sense strand
gggaaauugaugaguauau

SEQ ID NO: 2341909 - RNA, 19 nt, Homo sapiens
  misc_RNA (1)...(19): siRNA sense strand
agaaugaauuggagaagau

SEQ ID NO: 2341910 - RNA, 19 nt, Homo sapiens
  misc_RNA (1)...(19): siRNA sense strand
cgcaaauacuuuaaggcaa

SEQ ID NO: 2341911 - RNA, 19 nt, Homo sapiens
  misc_RNA (1)...(19): siRNA sense strand
aguuaggcgauuagagaaa

SEQ ID NO: 2341912 - RNA, 19 nt, Homo sapiens
  misc_RNA (1)...(19): siRNA sense strand
cucaagaaaguuagagaaa

SEQ ID NO: 2341913 - RNA, 19 nt, Homo sapiens
  misc_RNA (1)...(19): siRNA sense strand
cugaagauggugagaagaa

SEQ ID NO: 2341914 - RNA, 19 nt, Homo sapiens
  misc_RNA (1)...(19): siRNA sense strand
ugacagaaccgaaagggaa

SEQ ID NO: 2341915 - RNA, 19 nt, Homo sapiens
  misc_RNA (1)...(19): siRNA sense strand
gauuagaaaaggagaacaa

SEQ ID NO: 2341916 - RNA, 19 nt, Homo sapiens
  misc_RNA (1)...(19): siRNA sense strand
cgaaagggaaagagcauga

SEQ ID NO: 2341917 - RNA, 19 nt, Homo sapiens
  misc_RNA (1)...(19): siRNA sense strand
ccuugaaucccgaggagua

SEQ ID NO: 2341918 - RNA, 19 nt, Homo sapiens
  misc_RNA (1)...(19): siRNA sense strand
gugggaaauugaugaguau

SEQ ID NO: 2341919 - RNA, 19 nt, Homo sapiens
  misc_RNA (1)...(19): siRNA sense strand
gcaaauacuuuaaggcaac

SEQ ID NO: 2341920 - RNA, 19 nt, Homo sapiens
  misc_RNA (1)...(19): siRNA sense strand
agacuaguguguuggaaau

SEQ ID NO: 2341921 - RNA, 19 nt, Homo sapiens
  misc_RNA (1)...(19): siRNA sense strand
gacagaaccgaaagggaaa

SEQ ID NO: 2341922 - RNA, 19 nt, Homo sapiens
  misc_RNA (1)...(19): siRNA sense strand
aguugaaguaucagagaau

SEQ ID NO: 2341923 - RNA, 19 nt, Homo sapiens
  misc_RNA (1)...(19): siRNA sense strand
cggaaugaacuauuugaaa

SEQ ID NO: 2341924 - RNA, 19 nt, Homo sapiens
  misc_RNA (1)...(19): siRNA sense strand
cugccagucuuuagugaaa

SEQ ID NO: 2341925 - RNA, 19 nt, Homo sapiens
  misc_RNA (1)...(19): siRNA sense strand
agcagauaauugaaggaaa

SEQ ID NO: 2341926 - RNA, 19 nt, Homo sapiens
  misc_RNA (1)...(19): siRNA sense strand
uguaaaaggcccuggacua

SEQ ID NO: 2341927 - RNA, 19 nt, Homo sapiens
  misc_RNA (1)...(19): siRNA sense strand
ggugagaagaagauuaaau

SEQ ID NO: 2341928 - RNA, 19 nt, Homo sapiens
  misc_RNA (1)...(19): siRNA sense strand
aggcaacaacuuacaaaua

SEQ ID NO: 2341929 - RNA, 19 nt, Homo sapiens
  misc_RNA (1)...(19): siRNA sense strand
aggcauggcuccugacaca

SEQ ID NO: 2341930 - RNA, 19 nt, Homo sapiens
  misc_RNA (1)...(19): siRNA sense strand
ucuugcaagugaugaaaua

SEQ ID NO: 2341931 - RNA, 19 nt, Homo sapiens
  misc_RNA (1)...(19): siRNA sense strand
ccucaagaaaguuagagaa

SEQ ID NO: 2341932 - RNA, 19 nt, Homo sapiens
  misc_RNA (1)...(19): siRNA sense strand
cugaaagcauugaagcuau

SEQ ID NO: 2341933 - RNA, 19 nt, Homo sapiens
  misc_RNA (1)...(19): siRNA sense strand
gauuaugaugccaguuaua

SEQ ID NO: 2341934 - RNA, 19 nt, Homo sapiens
  misc_RNA (1)...(19): siRNA sense strand
ccucauggaaggagaacca

SEQ ID NO: 2341935 - RNA, 19 nt, Homo sapiens
  misc_RNA (1)...(19): siRNA sense strand
ccaaaguagaccuggcaga

SEQ ID NO: 2341936 - RNA, 19 nt, Homo sapiens
  misc_RNA (1)...(19): siRNA sense strand
cgacacaaguggaaugacu

SEQ ID NO: 2341937 - RNA, 19 nt, Homo sapiens
  misc_RNA (1)...(19): siRNA sense strand
uuugaucaguggaaagaua

SEQ ID NO: 2341938 - RNA, 19 nt, Homo sapiens
  misc_RNA (1)...(19): siRNA sense strand
aaauuuaagccuugcagua

SEQ ID NO: 2341939 - RNA, 19 nt, Homo sapiens
  misc_RNA (1)...(19): siRNA sense strand
ggaaugacuuugcggagga

SEQ ID NO: 2341940 - RNA, 19 nt, Homo sapiens
  misc_RNA (1)...(19): siRNA sense strand
gcguucaacuggcggaaga

SEQ ID NO: 2341941 - RNA, 19 nt, Homo sapiens
  misc_RNA (1)...(19): siRNA sense strand
ccugacauugugugggaaa

SEQ ID NO: 2341942 - RNA, 19 nt, Homo sapiens
  misc_RNA (1)...(19): siRNA sense strand
ugacaaaggcauucaucau

SEQ ID NO: 2341943 - RNA, 19 nt, Homo sapiens
  misc_RNA (1)...(19): siRNA sense strand
aagacuaguguguuggaaa

SEQ ID NO: 2341944 - RNA, 19 nt, Homo sapiens
  misc_RNA (1)...(19): siRNA sense strand
aaguagaccuggcagagaa

SEQ ID NO: 2341945 - RNA, 19 nt, Homo sapiens
  misc_RNA (1)...(19): siRNA sense strand
cuaaagacaagcaugcuaa

SEQ ID NO: 2341946 - RNA, 19 nt, Homo sapiens
  misc_RNA (1)...(19): siRNA sense strand
gauggugagaagaagauua

SEQ ID NO: 2341947 - RNA, 19 nt, Homo sapiens
  misc_RNA (1)...(19): siRNA sense strand
gugacaagcauuuuagaaa

SEQ ID NO: 2341948 - RNA, 19 nt, Homo sapiens
  misc_RNA (1)...(19): siRNA sense strand
agaaagaugacaaaggcau

SEQ ID NO: 2341949 - RNA, 19 nt, Homo sapiens
  misc_RNA (1)...(19): siRNA sense strand
cgaauauucccaagaggau

SEQ ID NO: 2341950 - RNA, 19 nt, Homo sapiens
  misc_RNA (1)...(19): siRNA sense strand
aaagauaguucucgggagu

SEQ ID NO: 2341951 - RNA, 19 nt, Homo sapiens
  misc_RNA (1)...(19): siRNA sense strand
cuuuaugacagaaccgaaa

SEQ ID NO: 2341952 - RNA, 19 nt, Homo sapiens
  misc_RNA (1)...(19): siRNA sense strand
gaacuucgaaugaggaaaa

SEQ ID NO: 2341953 - RNA, 19 nt, Homo sapiens
  misc_RNA (1)...(19): siRNA sense strand
gauuaaggauacuuggcau

SEQ ID NO: 2341954 - RNA, 19 nt, Homo sapiens
  misc_RNA (1)...(19): siRNA sense strand
auaaauggauugugccuga

SEQ ID NO: 2341955 - RNA, 19 nt, Homo sapiens
  misc_RNA (1)...(19): siRNA sense strand
caguugaaguaucagagaa

SEQ ID NO: 2341956 - RNA, 19 nt, Homo sapiens
  misc_RNA (1)...(19): siRNA sense strand
gaagauggugagaagaaga

SEQ ID NO: 2341957 - RNA, 19 nt, Homo sapiens
  misc_RNA (1)...(19): siRNA sense strand
cugaaagugacaagcauuu

SEQ ID NO: 2341958 - RNA, 19 nt, Homo sapiens
  misc_RNA (1)...(19): siRNA sense strand
gaaaaggagaacaaagaau

SEQ ID NO: 2341959 - RNA, 19 nt, Homo sapiens
  misc_RNA (1)...(19): siRNA sense strand
ccauauucguuuugaccaa

SEQ ID NO: 2341960 - RNA, 19 nt, Homo sapiens
  misc_RNA (1)...(19): siRNA sense strand
ccuaaagacaagcaugcua

SEQ ID NO: 2341961 - RNA, 19 nt, Homo sapiens
  misc_RNA (1)...(19): siRNA sense strand
cugaauggaagaauaacua

SEQ ID NO: 2341962 - RNA, 19 nt, Homo sapiens
  misc_RNA (1)...(19): siRNA sense strand
ucucaaggauacugaaaau

SEQ ID NO: 2341963 - RNA, 19 nt, Homo sapiens
  misc_RNA (1)...(19): siRNA sense strand
ggaacagcucugaaagcau

SEQ ID NO: 2341964 - RNA, 19 nt, Homo sapiens
  misc_RNA (1)...(19): siRNA sense strand
caagcaugcuaaaggcaca

SEQ ID NO: 2341965 - RNA, 19 nt, Homo sapiens
  misc_RNA (1)...(19): siRNA sense strand
gaaaaugguacgagagucu

SEQ ID NO: 2341966 - RNA, 19 nt, Homo sapiens
  misc_RNA (1)...(19): siRNA sense strand
cugauuaugaugccaguua

SEQ ID NO: 2341967 - RNA, 19 nt, Homo sapiens
  misc_RNA (1)...(19): siRNA sense strand
agauaguucucgggaguuu

SEQ ID NO: 2341968 - RNA, 19 nt, Homo sapiens
  misc_RNA (1)...(19): siRNA sense strand
uguuaaagagguauuggaa

SEQ ID NO: 2341969 - RNA, 19 nt, Homo sapiens
  misc_RNA (1)...(19): siRNA sense strand
aagagguauuggaagauuu

SEQ ID NO: 2341970 - RNA, 19 nt, Homo sapiens
  misc_RNA (1)...(19): siRNA sense strand
gggaaauugaugaguauau

SEQ ID NO: 2341971 - RNA, 19 nt, Homo sapiens
  misc_RNA (1)...(19): siRNA sense strand
agaaugaauuggagaagau

SEQ ID NO: 2341972 - RNA, 19 nt, Homo sapiens
  misc_RNA (1)...(19): siRNA sense strand
cgcaaauacuuuaaggcaa

SEQ ID NO: 2341973 - RNA, 19 nt, Homo sapiens
  misc_RNA (1)...(19): siRNA sense strand
aguuaggcgauuagagaaa

SEQ ID NO: 2341974 - RNA, 19 nt, Homo sapiens
  misc_RNA (1)...(19): siRNA sense strand
cucaagaaaguuagagaaa

SEQ ID NO: 2341975 - RNA, 19 nt, Homo sapiens
  misc_RNA (1)...(19): siRNA sense strand
cugaagauggugagaagaa

SEQ ID NO: 2341976 - RNA, 19 nt, Homo sapiens
  misc_RNA (1)...(19): siRNA sense strand
ugacagaaccgaaagggaa

SEQ ID NO: 2341977 - RNA, 19 nt, Homo sapiens
  misc_RNA (1)...(19): siRNA sense strand
gauuagaaaaggagaacaa

SEQ ID NO: 2341978 - RNA, 19 nt, Homo sapiens
  misc_RNA (1)...(19): siRNA sense strand
cgaaagggaaagagcauga

SEQ ID NO: 2341979 - RNA, 19 nt, Homo sapiens
  misc_RNA (1)...(19): siRNA sense strand
ccuugaaucccgaggagua

SEQ ID NO: 2341980 - RNA, 19 nt, Homo sapiens
  misc_RNA (1)...(19): siRNA sense strand
gugggaaauugaugaguau

SEQ ID NO: 2341981 - RNA, 19 nt, Homo sapiens
  misc_RNA (1)...(19): siRNA sense strand
gcaaauacuuuaaggcaac

SEQ ID NO: 2341982 - RNA, 19 nt, Homo sapiens
  misc_RNA (1)...(19): siRNA sense strand
agacuaguguguuggaaau

SEQ ID NO: 2341983 - RNA, 19 nt, Homo sapiens
  misc_RNA (1)...(19): siRNA sense strand
gacagaaccgaaagggaaa

SEQ ID NO: 2341984 - RNA, 19 nt, Homo sapiens
  misc_RNA (1)...(19): siRNA sense strand
aguugaaguaucagagaau

SEQ ID NO: 2341985 - RNA, 19 nt, Homo sapiens
  misc_RNA (1)...(19): siRNA sense strand
cggaaugaacuauuugaaa

SEQ ID NO: 2341986 - RNA, 19 nt, Homo sapiens
  misc_RNA (1)...(19): siRNA sense strand
cugccagucuuuagugaaa

SEQ ID NO: 2341987 - RNA, 19 nt, Homo sapiens
  misc_RNA (1)...(19): siRNA sense strand
agcagauaauugaaggaaa

SEQ ID NO: 2341988 - RNA, 19 nt, Homo sapiens
  misc_RNA (1)...(19): siRNA sense strand
uguaaaaggcccuggacua

SEQ ID NO: 2341989 - RNA, 19 nt, Homo sapiens
  misc_RNA (1)...(19): siRNA sense strand
ggugagaagaagauuaaau

SEQ ID NO: 2341990 - RNA, 19 nt, Homo sapiens
  misc_RNA (1)...(19): siRNA sense strand
aggcaacaacuuacaaaua

SEQ ID NO: 2341991 - RNA, 19 nt, Homo sapiens
  misc_RNA (1)...(19): siRNA sense strand
aggcauggcuccugacaca

SEQ ID NO: 2341992 - RNA, 19 nt, Homo sapiens
  misc_RNA (1)...(19): siRNA sense strand
ucuugcaagugaugaaaua

SEQ ID NO: 2341993 - RNA, 19 nt, Homo sapiens
  misc_RNA (1)...(19): siRNA sense strand
ccucaagaaaguuagagaa

SEQ ID NO: 2341994 - RNA, 19 nt, Homo sapiens
  misc_RNA (1)...(19): siRNA sense strand
cugaaagcauugaagcuau

SEQ ID NO: 2341995 - RNA, 19 nt, Homo sapiens
  misc_RNA (1)...(19): siRNA sense strand
gauuaugaugccaguuaua

SEQ ID NO: 2341996 - RNA, 19 nt, Homo sapiens
  misc_RNA (1)...(19): siRNA sense strand
ccucauggaaggagaacca

SEQ ID NO: 2341997 - RNA, 19 nt, Homo sapiens
  misc_RNA (1)...(19): siRNA sense strand
ccaaaguagaccuggcaga

SEQ ID NO: 2341998 - RNA, 19 nt, Homo sapiens
  misc_RNA (1)...(19): siRNA sense strand
cgacacaaguggaaugacu

SEQ ID NO: 2341999 - RNA, 19 nt, Homo sapiens
  misc_RNA (1)...(19): siRNA sense strand
uuugaucaguggaaagaua

SEQ ID NO: 2342000 - RNA, 19 nt, Homo sapiens
  misc_RNA (1)...(19): siRNA sense strand
aaauuuaagccuugcagua

SEQ ID NO: 2342001 - RNA, 19 nt, Homo sapiens
  misc_RNA (1)...(19): siRNA sense strand
ggaaugacuuugcggagga

SEQ ID NO: 2342002 - RNA, 19 nt, Homo sapiens
  misc_RNA (1)...(19): siRNA sense strand
gcguucaacuggcggaaga

SEQ ID NO: 2342003 - RNA, 19 nt, Homo sapiens
  misc_RNA (1)...(19): siRNA sense strand
ccugacauugugugggaaa

SEQ ID NO: 2342004 - RNA, 19 nt, Homo sapiens
  misc_RNA (1)...(19): siRNA sense strand
ugacaaaggcauucaucau

SEQ ID NO: 2342005 - RNA, 19 nt, Homo sapiens
  misc_RNA (1)...(19): siRNA sense strand
aagacuaguguguuggaaa

SEQ ID NO: 2342006 - RNA, 19 nt, Homo sapiens
  misc_RNA (1)...(19): siRNA sense strand
aaguagaccuggcagagaa

SEQ ID NO: 2342007 - RNA, 19 nt, Homo sapiens
  misc_RNA (1)...(19): siRNA sense strand
cuaaagacaagcaugcuaa

SEQ ID NO: 2342008 - RNA, 19 nt, Homo sapiens
  misc_RNA (1)...(19): siRNA sense strand
gauggugagaagaagauua

SEQ ID NO: 2342009 - RNA, 19 nt, Homo sapiens
  misc_RNA (1)...(19): siRNA sense strand
gugacaagcauuuuagaaa

SEQ ID NO: 2342010 - RNA, 19 nt, Homo sapiens
  misc_RNA (1)...(19): siRNA sense strand
agaaagaugacaaaggcau

SEQ ID NO: 2342011 - RNA, 19 nt, Homo sapiens
  misc_RNA (1)...(19): siRNA sense strand
cgaauauucccaagaggau

SEQ ID NO: 2342012 - RNA, 19 nt, Homo sapiens
  misc_RNA (1)...(19): siRNA sense strand
aaagauaguucucgggagu

SEQ ID NO: 2342013 - RNA, 19 nt, Homo sapiens
  misc_RNA (1)...(19): siRNA sense strand
cuuuaugacagaaccgaaa

SEQ ID NO: 2342014 - RNA, 19 nt, Homo sapiens
  misc_RNA (1)...(19): siRNA sense strand
gaacuucgaaugaggaaaa

SEQ ID NO: 2342015 - RNA, 19 nt, Homo sapiens
  misc_RNA (1)...(19): siRNA sense strand
gauuaaggauacuuggcau

SEQ ID NO: 2342016 - RNA, 19 nt, Homo sapiens
  misc_RNA (1)...(19): siRNA sense strand
auaaauggauugugccuga

SEQ ID NO: 2342017 - RNA, 19 nt, Homo sapiens
  misc_RNA (1)...(19): siRNA sense strand
caguugaaguaucagagaa

SEQ ID NO: 2342018 - RNA, 19 nt, Homo sapiens
  misc_RNA (1)...(19): siRNA sense strand
gaagauggugagaagaaga

SEQ ID NO: 2342019 - RNA, 19 nt, Homo sapiens
  misc_RNA (1)...(19): siRNA sense strand
cugaaagugacaagcauuu

SEQ ID NO: 2342020 - RNA, 19 nt, Homo sapiens
  misc_RNA (1)...(19): siRNA sense strand
gaaaaggagaacaaagaau

SEQ ID NO: 2342021 - RNA, 19 nt, Homo sapiens
  misc_RNA (1)...(19): siRNA sense strand
ccauauucguuuugaccaa

SEQ ID NO: 2342022 - RNA, 19 nt, Homo sapiens
  misc_RNA (1)...(19): siRNA sense strand
ccuaaagacaagcaugcua

SEQ ID NO: 2342023 - RNA, 19 nt, Homo sapiens
  misc_RNA (1)...(19): siRNA sense strand
cugaauggaagaauaacua

SEQ ID NO: 2342024 - RNA, 19 nt, Homo sapiens
  misc_RNA (1)...(19): siRNA sense strand
ucucaaggauacugaaaau

SEQ ID NO: 2342025 - RNA, 19 nt, Homo sapiens
  misc_RNA (1)...(19): siRNA sense strand
ggaacagcucugaaagcau

SEQ ID NO: 2342026 - RNA, 19 nt, Homo sapiens
  misc_RNA (1)...(19): siRNA sense strand
caagcaugcuaaaggcaca

SEQ ID NO: 2342027 - RNA, 19 nt, Homo sapiens
  misc_RNA (1)...(19): siRNA sense strand
gaaaaugguacgagagucu

SEQ ID NO: 2342028 - RNA, 19 nt, Homo sapiens
  misc_RNA (1)...(19): siRNA sense strand
cugauuaugaugccaguua

SEQ ID NO: 2342029 - RNA, 19 nt, Homo sapiens
  misc_RNA (1)...(19): siRNA sense strand
agauaguucucgggaguuu

SEQ ID NO: 2342030 - RNA, 19 nt, Homo sapiens
  misc_RNA (1)...(19): siRNA sense strand
uguuaaagagguauuggaa

SEQ ID NO: 2342031 - RNA, 19 nt, Homo sapiens
  misc_RNA (1)...(19): siRNA sense strand
aagagguauuggaagauuu

SEQ ID NO: 2342032 - RNA, 19 nt, Homo sapiens
  misc_RNA (1)...(19): siRNA sense strand
cgauauccuuggugagaaa

SEQ ID NO: 2342033 - RNA, 19 nt, Homo sapiens
  misc_RNA (1)...(19): siRNA sense strand
cagcugaguauuagagaaa

SEQ ID NO: 2342034 - RNA, 19 nt, Homo sapiens
  misc_RNA (1)...(19): siRNA sense strand
aauaguagaaagugggaaa

SEQ ID NO: 2342035 - RNA, 19 nt, Homo sapiens
  misc_RNA (1)...(19): siRNA sense strand
ggagacaacaagugagaau

SEQ ID NO: 2342036 - RNA, 19 nt, Homo sapiens
  misc_RNA (1)...(19): siRNA sense strand
ccauauuggccaagaauuu

SEQ ID NO: 2342037 - RNA, 19 nt, Homo sapiens
  misc_RNA (1)...(19): siRNA sense strand
cuguaaacucgcagauaua

SEQ ID NO: 2342038 - RNA, 19 nt, Homo sapiens
  misc_RNA (1)...(19): siRNA sense strand
gcugaguauuagagaaaca

SEQ ID NO: 2342039 - RNA, 19 nt, Homo sapiens
  misc_RNA (1)...(19): siRNA sense strand
aggaacagcuauugaguca

SEQ ID NO: 2342040 - RNA, 19 nt, Homo sapiens
  misc_RNA (1)...(19): siRNA sense strand
cuguagaacaugcaagaaa

SEQ ID NO: 2342041 - RNA, 19 nt, Homo sapiens
  misc_RNA (1)...(19): siRNA sense strand
guuagguugugguggaaua

SEQ ID NO: 2342042 - RNA, 19 nt, Homo sapiens
  misc_RNA (1)...(19): siRNA sense strand
uauagaugauggagagcua

SEQ ID NO: 2342043 - RNA, 19 nt, Homo sapiens
  misc_RNA (1)...(19): siRNA sense strand
ggaagaaagagcaugaaga

SEQ ID NO: 2342044 - RNA, 19 nt, Homo sapiens
  misc_RNA (1)...(19): siRNA sense strand
ggaaacagucuuagaaaau

SEQ ID NO: 2342045 - RNA, 19 nt, Homo sapiens
  misc_RNA (1)...(19): siRNA sense strand
aggaagaaagagaagcuaa

SEQ ID NO: 2342046 - RNA, 19 nt, Homo sapiens
  misc_RNA (1)...(19): siRNA sense strand
gaguauuguccaagccaaa

SEQ ID NO: 2342047 - RNA, 19 nt, Homo sapiens
  misc_RNA (1)...(19): siRNA sense strand
agaagcaaguccagaggua

SEQ ID NO: 2342048 - RNA, 19 nt, Homo sapiens
  misc_RNA (1)...(19): siRNA sense strand
ccgagaagccacacaacaa

SEQ ID NO: 2342049 - RNA, 19 nt, Homo sapiens
  misc_RNA (1)...(19): siRNA sense strand
ucuuaauugcacugagaaa

SEQ ID NO: 2342050 - RNA, 19 nt, Homo sapiens
  misc_RNA (1)...(19): siRNA sense strand
ucuaaucagugaauggaaa

SEQ ID NO: 2342051 - RNA, 19 nt, Homo sapiens
  misc_RNA (1)...(19): siRNA sense strand
cagaauaaguuuuggaagu

SEQ ID NO: 2342052 - RNA, 19 nt, Homo sapiens
  misc_RNA (1)...(19): siRNA sense strand
gagcuaggccugugcaaau

SEQ ID NO: 2342053 - RNA, 19 nt, Homo sapiens
  misc_RNA (1)...(19): siRNA sense strand
aggaagagauugaacagau

SEQ ID NO: 2342054 - RNA, 19 nt, Homo sapiens
  misc_RNA (1)...(19): siRNA sense strand
augagauacuugaaagcaa

SEQ ID NO: 2342055 - RNA, 19 nt, Homo sapiens
  misc_RNA (1)...(19): siRNA sense strand
cuugaaagcaauaaagaga

SEQ ID NO: 2342056 - RNA, 19 nt, Homo sapiens
  misc_RNA (1)...(19): siRNA sense strand
ggugugaagaauuagauaa

SEQ ID NO: 2342057 - RNA, 19 nt, Homo sapiens
  misc_RNA (1)...(19): siRNA sense strand
gggaagaacaagcagcgaa

SEQ ID NO: 2342058 - RNA, 19 nt, Homo sapiens
  misc_RNA (1)...(19): siRNA sense strand
cugaaacccaugugugaaa

SEQ ID NO: 2342059 - RNA, 19 nt, Homo sapiens
  misc_RNA (1)...(19): siRNA sense strand
aagauuaguugcugaccaa

SEQ ID NO: 2342060 - RNA, 19 nt, Homo sapiens
  misc_RNA (1)...(19): siRNA sense strand
ucuguuauguucugggaua

SEQ ID NO: 2342061 - RNA, 19 nt, Homo sapiens
  misc_RNA (1)...(19): siRNA sense strand
uuuaauggcaugacgguua

SEQ ID NO: 2342062 - RNA, 19 nt, Homo sapiens
  misc_RNA (1)...(19): siRNA sense strand
cugaagaaauugacagucu

SEQ ID NO: 2342063 - RNA, 19 nt, Homo sapiens
  misc_RNA (1)...(19): siRNA sense strand
acagagagagacacagaaa

SEQ ID NO: 2342064 - RNA, 19 nt, Homo sapiens
  misc_RNA (1)...(19): siRNA sense strand
agagaucuguguugcgaaa

SEQ ID NO: 2342065 - RNA, 19 nt, Homo sapiens
  misc_RNA (1)...(19): siRNA sense strand
ggaacaggacauaaagaca

SEQ ID NO: 2342066 - RNA, 19 nt, Homo sapiens
  misc_RNA (1)...(19): siRNA sense strand
cuucagcauuauugagcaa

SEQ ID NO: 2342067 - RNA, 19 nt, Homo sapiens
  misc_RNA (1)...(19): siRNA sense strand
ucucaaaggaacagcuauu

SEQ ID NO: 2342068 - RNA, 19 nt, Homo sapiens
  misc_RNA (1)...(19): siRNA sense strand
gggaacagugccuggauuu

SEQ ID NO: 2342069 - RNA, 19 nt, Homo sapiens
  misc_RNA (1)...(19): siRNA sense strand
gugagaaauuggucaacuu

SEQ ID NO: 2342070 - RNA, 19 nt, Homo sapiens
  misc_RNA (1)...(19): siRNA sense strand
aggaaacagucuuagaaaa

SEQ ID NO: 2342071 - RNA, 19 nt, Homo sapiens
  misc_RNA (1)...(19): siRNA sense strand
cuguaaaucuaaucaguga

SEQ ID NO: 2342072 - RNA, 19 nt, Homo sapiens
  misc_RNA (1)...(19): siRNA sense strand
aagaacaagcagcgaacua

SEQ ID NO: 2342073 - RNA, 19 nt, Homo sapiens
  misc_RNA (1)...(19): siRNA sense strand
cugcagaacuccuugccaa

SEQ ID NO: 2342074 - RNA, 19 nt, Homo sapiens
  misc_RNA (1)...(19): siRNA sense strand
ugggaaagacugucagaga

SEQ ID NO: 2342075 - RNA, 19 nt, Homo sapiens
  misc_RNA (1)...(19): siRNA sense strand
cagaaggagagaagauuga

SEQ ID NO: 2342076 - RNA, 19 nt, Homo sapiens
  misc_RNA (1)...(19): siRNA sense strand
ggaaagacugucagagauc

SEQ ID NO: 2342077 - RNA, 19 nt, Homo sapiens
  misc_RNA (1)...(19): siRNA sense strand
ugaacgaaagucagagcaa

SEQ ID NO: 2342078 - RNA, 19 nt, Homo sapiens
  misc_RNA (1)...(19): siRNA sense strand
uuaaggaacaggacauaaa

SEQ ID NO: 2342079 - RNA, 19 nt, Homo sapiens
  misc_RNA (1)...(19): siRNA sense strand
gcagagagugagugggacu

SEQ ID NO: 2342080 - RNA, 19 nt, Homo sapiens
  misc_RNA (1)...(19): siRNA sense strand
ugacaaugauauggaaaga

SEQ ID NO: 2342081 - RNA, 19 nt, Homo sapiens
  misc_RNA (1)...(19): siRNA sense strand
gaacgacagugaaugggaa

SEQ ID NO: 2342082 - RNA, 19 nt, Homo sapiens
  misc_RNA (1)...(19): siRNA sense strand
agacaacaagugagaauca

SEQ ID NO: 2342083 - RNA, 19 nt, Homo sapiens
  misc_RNA (1)...(19): siRNA sense strand
uggagaacguacugauaca

SEQ ID NO: 2342084 - RNA, 19 nt, Homo sapiens
  misc_RNA (1)...(19): siRNA sense strand
gcagcgaacuaaagggaac

SEQ ID NO: 2342085 - RNA, 19 nt, Homo sapiens
  misc_RNA (1)...(19): siRNA sense strand
ccacaguaugaucaggaua

SEQ ID NO: 2342086 - RNA, 19 nt, Homo sapiens
  misc_RNA (1)...(19): siRNA sense strand
ugggaaaagaguaggagua

SEQ ID NO: 2342087 - RNA, 19 nt, Homo sapiens
  misc_RNA (1)...(19): siRNA sense strand
guacagagagagacacaga

SEQ ID NO: 2342088 - RNA, 19 nt, Homo sapiens
  misc_RNA (1)...(19): siRNA sense strand
cgaaaggaugcuugcuaau

SEQ ID NO: 2342089 - RNA, 19 nt, Homo sapiens
  misc_RNA (1)...(19): siRNA sense strand
uggcaaucuuccuguaaau

SEQ ID NO: 2342090 - RNA, 19 nt, Homo sapiens
  misc_RNA (1)...(19): siRNA sense strand
cacaguaugaucaggauaa

SEQ ID NO: 2342091 - RNA, 19 nt, Homo sapiens
  misc_RNA (1)...(19): siRNA sense strand
uggaauagguagagaggga

SEQ ID NO: 2342092 - RNA, 19 nt, Homo sapiens
  misc_RNA (1)...(19): siRNA sense strand
gaagauagcuccagcgaug

SEQ ID NO: 2342093 - RNA, 19 nt, Homo sapiens
  misc_RNA (1)...(19): siRNA sense strand
cggugauaacagacauuaa

SEQ ID NO: 2342094 - RNA, 19 nt, Homo sapiens
  misc_RNA (1)...(19): siRNA sense strand
uggcaagaaccauggacau

SEQ ID NO: 2342095 - RNA, 19 nt, Homo sapiens
  misc_RNA (1)...(19): siRNA sense strand
ggaagagauauuuggucca

SEQ ID NO: 2342096 - RNA, 19 nt, Homo sapiens
  misc_RNA (1)...(19): siRNA sense strand
guggaaaagacgagaucga

SEQ ID NO: 2342097 - RNA, 19 nt, Homo sapiens
  misc_RNA (1)...(19): siRNA sense strand
ccaggaaccaggcaggcua

SEQ ID NO: 2342098 - RNA, 19 nt, Homo sapiens
  misc_RNA (1)...(19): siRNA sense strand
agugccaaauaguggaaaa

SEQ ID NO: 2342099 - RNA, 19 nt, Homo sapiens
  misc_RNA (1)...(19): siRNA sense strand
ggaacacugugauagccaa

SEQ ID NO: 2342100 - RNA, 19 nt, Homo sapiens
  misc_RNA (1)...(19): siRNA sense strand
uggaauagguagagaggga

SEQ ID NO: 2342101 - RNA, 19 nt, Homo sapiens
  misc_RNA (1)...(19): siRNA sense strand
gaagauagcuccagcgaug

SEQ ID NO: 2342102 - RNA, 19 nt, Homo sapiens
  misc_RNA (1)...(19): siRNA sense strand
cggugauaacagacauuaa

SEQ ID NO: 2342103 - RNA, 19 nt, Homo sapiens
  misc_RNA (1)...(19): siRNA sense strand
uggcaagaaccauggacau

SEQ ID NO: 2342104 - RNA, 19 nt, Homo sapiens
  misc_RNA (1)...(19): siRNA sense strand
ggaagagauauuuggucca

SEQ ID NO: 2342105 - RNA, 19 nt, Homo sapiens
  misc_RNA (1)...(19): siRNA sense strand
guggaaaagacgagaucga

SEQ ID NO: 2342106 - RNA, 19 nt, Homo sapiens
  misc_RNA (1)...(19): siRNA sense strand
ccaggaaccaggcaggcua

SEQ ID NO: 2342107 - RNA, 19 nt, Homo sapiens
  misc_RNA (1)...(19): siRNA sense strand
agugccaaauaguggaaaa

SEQ ID NO: 2342108 - RNA, 19 nt, Homo sapiens
  misc_RNA (1)...(19): siRNA sense strand
ggaacacugugauagccaa

SEQ ID NO: 2342109 - RNA, 19 nt, Homo sapiens
  misc_RNA (1)...(19): siRNA sense strand
cuaaagaugaagaggagca

SEQ ID NO: 2342110 - RNA, 19 nt, Homo sapiens
  misc_RNA (1)...(19): siRNA sense strand
gagcagaaggucaaggcuu

SEQ ID NO: 2342111 - RNA, 19 nt, Homo sapiens
  misc_RNA (1)...(19): siRNA sense strand
agaaugaguuugcagccaa

SEQ ID NO: 2342112 - RNA, 19 nt, Homo sapiens
  misc_RNA (1)...(19): siRNA sense strand
augacaaucaccaggaauu

SEQ ID NO: 2342113 - RNA, 19 nt, Homo sapiens
  misc_RNA (1)...(19): siRNA sense strand
caacaagcgugcagagcag

SEQ ID NO: 2342114 - RNA, 19 nt, Homo sapiens
  misc_RNA (1)...(19): siRNA sense strand
agaaaucacccauuggcua

SEQ ID NO: 2342115 - RNA, 19 nt, Homo sapiens
  misc_RNA (1)...(19): siRNA sense strand
auaacaaauacgaagccaa

SEQ ID NO: 2342116 - RNA, 19 nt, Homo sapiens
  misc_RNA (1)...(19): siRNA sense strand
cgagcugaaccgaggagau

SEQ ID NO: 2342117 - RNA, 19 nt, Homo sapiens
  misc_RNA (1)...(19): siRNA sense strand
cuguaagcaucaggagcua

SEQ ID NO: 2342118 - RNA, 19 nt, Homo sapiens
  misc_RNA (1)...(19): siRNA sense strand
caacauaacaaauacgaag

SEQ ID NO: 2342119 - RNA, 19 nt, Homo sapiens
  misc_RNA (1)...(19): siRNA sense strand
uuucaugacccuucggaau

SEQ ID NO: 2342120 - RNA, 19 nt, Homo sapiens
  misc_RNA (1)...(19): siRNA sense strand
aagauugggaagagcuaga

SEQ ID NO: 2342121 - RNA, 19 nt, Homo sapiens
  misc_RNA (1)...(19): siRNA sense strand
cuaaagaugaagaggagca

SEQ ID NO: 2342122 - RNA, 19 nt, Homo sapiens
  misc_RNA (1)...(19): siRNA sense strand
gagcagaaggucaaggcuu

SEQ ID NO: 2342123 - RNA, 19 nt, Homo sapiens
  misc_RNA (1)...(19): siRNA sense strand
agaaugaguuugcagccaa

SEQ ID NO: 2342124 - RNA, 19 nt, Homo sapiens
  misc_RNA (1)...(19): siRNA sense strand
augacaaucaccaggaauu

SEQ ID NO: 2342125 - RNA, 19 nt, Homo sapiens
  misc_RNA (1)...(19): siRNA sense strand
caacaagcgugcagagcag

SEQ ID NO: 2342126 - RNA, 19 nt, Homo sapiens
  misc_RNA (1)...(19): siRNA sense strand
agaaaucacccauuggcua

SEQ ID NO: 2342127 - RNA, 19 nt, Homo sapiens
  misc_RNA (1)...(19): siRNA sense strand
auaacaaauacgaagccaa

SEQ ID NO: 2342128 - RNA, 19 nt, Homo sapiens
  misc_RNA (1)...(19): siRNA sense strand
cgagcugaaccgaggagau

SEQ ID NO: 2342129 - RNA, 19 nt, Homo sapiens
  misc_RNA (1)...(19): siRNA sense strand
cuguaagcaucaggagcua

SEQ ID NO: 2342130 - RNA, 19 nt, Homo sapiens
  misc_RNA (1)...(19): siRNA sense strand
caacauaacaaauacgaag

SEQ ID NO: 2342131 - RNA, 19 nt, Homo sapiens
  misc_RNA (1)...(19): siRNA sense strand
uuucaugacccuucggaau

SEQ ID NO: 2342132 - RNA, 19 nt, Homo sapiens
  misc_RNA (1)...(19): siRNA sense strand
aagauugggaagagcuaga

SEQ ID NO: 2342133 - RNA, 19 nt, Homo sapiens
  misc_RNA (1)...(19): siRNA sense strand
cuaaagaugaagaggagca

SEQ ID NO: 2342134 - RNA, 19 nt, Homo sapiens
  misc_RNA (1)...(19): siRNA sense strand
gagcagaaggucaaggcuu

SEQ ID NO: 2342135 - RNA, 19 nt, Homo sapiens
  misc_RNA (1)...(19): siRNA sense strand
agaaugaguuugcagccaa

SEQ ID NO: 2342136 - RNA, 19 nt, Homo sapiens
  misc_RNA (1)...(19): siRNA sense strand
augacaaucaccaggaauu

SEQ ID NO: 2342137 - RNA, 19 nt, Homo sapiens
  misc_RNA (1)...(19): siRNA sense strand
caacaagcgugcagagcag

SEQ ID NO: 2342138 - RNA, 19 nt, Homo sapiens
  misc_RNA (1)...(19): siRNA sense strand
agaaaucacccauuggcua

SEQ ID NO: 2342139 - RNA, 19 nt, Homo sapiens
  misc_RNA (1)...(19): siRNA sense strand
auaacaaauacgaagccaa

SEQ ID NO: 2342140 - RNA, 19 nt, Homo sapiens
  misc_RNA (1)...(19): siRNA sense strand
cgagcugaaccgaggagau

SEQ ID NO: 2342141 - RNA, 19 nt, Homo sapiens
  misc_RNA (1)...(19): siRNA sense strand
cuguaagcaucaggagcua

SEQ ID NO: 2342142 - RNA, 19 nt, Homo sapiens
  misc_RNA (1)...(19): siRNA sense strand
caacauaacaaauacgaag

SEQ ID NO: 2342143 - RNA, 19 nt, Homo sapiens
  misc_RNA (1)...(19): siRNA sense strand
uuucaugacccuucggaau

SEQ ID NO: 2342144 - RNA, 19 nt, Homo sapiens
  misc_RNA (1)...(19): siRNA sense strand
aagauugggaagagcuaga

SEQ ID NO: 2342145 - RNA, 19 nt, Homo sapiens
  misc_RNA (1)...(19): siRNA sense strand
ggacagagccagaggccaa

SEQ ID NO: 2342146 - RNA, 19 nt, Homo sapiens
  misc_RNA (1)...(19): siRNA sense strand
gggaauuacugcaggcugu

SEQ ID NO: 2342147 - RNA, 19 nt, Homo sapiens
  misc_RNA (1)...(19): siRNA sense strand
acaaagaggcagcaggaga

SEQ ID NO: 2342148 - RNA, 19 nt, Homo sapiens
  misc_RNA (1)...(19): siRNA sense strand
gggaugaagccuuucgcaa

SEQ ID NO: 2342149 - RNA, 19 nt, Homo sapiens
  misc_RNA (1)...(19): siRNA sense strand
cugcauugugugacagcaa

SEQ ID NO: 2342150 - RNA, 19 nt, Homo sapiens
  misc_RNA (1)...(19): siRNA sense strand
uggauuaagaagaaaggau

SEQ ID NO: 2342151 - RNA, 19 nt, Homo sapiens
  misc_RNA (1)...(19): siRNA sense strand
ugacaaagaggcagcagga

SEQ ID NO: 2342152 - RNA, 19 nt, Homo sapiens
  misc_RNA (1)...(19): siRNA sense strand
gaaaggauuagauugggua

SEQ ID NO: 2342153 - RNA, 19 nt, Homo sapiens
  misc_RNA (1)...(19): siRNA sense strand
agaacaaacuaccagcuga

SEQ ID NO: 2342154 - RNA, 19 nt, Homo sapiens
  misc_RNA (1)...(19): siRNA sense strand
gcaaguuccugaagggccu

SEQ ID NO: 2342155 - RNA, 19 nt, Homo sapiens
  misc_RNA (1)...(19): siRNA sense strand
acaugaagaaauugaccuu

SEQ ID NO: 2342156 - RNA, 19 nt, Homo sapiens
  misc_RNA (1)...(19): siRNA sense strand
caucaauacuggucagcuc

SEQ ID NO: 2342157 - RNA, 19 nt, Homo sapiens
  misc_RNA (1)...(19): siRNA sense strand
aaaggauuagauuggguaa

SEQ ID NO: 2342158 - RNA, 19 nt, Homo sapiens
  misc_RNA (1)...(19): siRNA sense strand
ggacagagccagaggccaa

SEQ ID NO: 2342159 - RNA, 19 nt, Homo sapiens
  misc_RNA (1)...(19): siRNA sense strand
gggaauuacugcaggcugu

SEQ ID NO: 2342160 - RNA, 19 nt, Homo sapiens
  misc_RNA (1)...(19): siRNA sense strand
acaaagaggcagcaggaga

SEQ ID NO: 2342161 - RNA, 19 nt, Homo sapiens
  misc_RNA (1)...(19): siRNA sense strand
gggaugaagccuuucgcaa

SEQ ID NO: 2342162 - RNA, 19 nt, Homo sapiens
  misc_RNA (1)...(19): siRNA sense strand
cugcauugugugacagcaa

SEQ ID NO: 2342163 - RNA, 19 nt, Homo sapiens
  misc_RNA (1)...(19): siRNA sense strand
uggauuaagaagaaaggau

SEQ ID NO: 2342164 - RNA, 19 nt, Homo sapiens
  misc_RNA (1)...(19): siRNA sense strand
ugacaaagaggcagcagga

SEQ ID NO: 2342165 - RNA, 19 nt, Homo sapiens
  misc_RNA (1)...(19): siRNA sense strand
gaaaggauuagauugggua

SEQ ID NO: 2342166 - RNA, 19 nt, Homo sapiens
  misc_RNA (1)...(19): siRNA sense strand
agaacaaacuaccagcuga

SEQ ID NO: 2342167 - RNA, 19 nt, Homo sapiens
  misc_RNA (1)...(19): siRNA sense strand
gcaaguuccugaagggccu

SEQ ID NO: 2342168 - RNA, 19 nt, Homo sapiens
  misc_RNA (1)...(19): siRNA sense strand
acaugaagaaauugaccuu

SEQ ID NO: 2342169 - RNA, 19 nt, Homo sapiens
  misc_RNA (1)...(19): siRNA sense strand
caucaauacuggucagcuc

SEQ ID NO: 2342170 - RNA, 19 nt, Homo sapiens
  misc_RNA (1)...(19): siRNA sense strand
aaaggauuagauuggguaa

SEQ ID NO: 2342171 - RNA, 19 nt, Homo sapiens
  misc_RNA (1)...(19): siRNA sense strand
ggacagagccagaggccaa

SEQ ID NO: 2342172 - RNA, 19 nt, Homo sapiens
  misc_RNA (1)...(19): siRNA sense strand
gggaauuacugcaggcugu

SEQ ID NO: 2342173 - RNA, 19 nt, Homo sapiens
  misc_RNA (1)...(19): siRNA sense strand
acaaagaggcagcaggaga

SEQ ID NO: 2342174 - RNA, 19 nt, Homo sapiens
  misc_RNA (1)...(19): siRNA sense strand
gggaugaagccuuucgcaa

SEQ ID NO: 2342175 - RNA, 19 nt, Homo sapiens
  misc_RNA (1)...(19): siRNA sense strand
cugcauugugugacagcaa

SEQ ID NO: 2342176 - RNA, 19 nt, Homo sapiens
  misc_RNA (1)...(19): siRNA sense strand
uggauuaagaagaaaggau

SEQ ID NO: 2342177 - RNA, 19 nt, Homo sapiens
  misc_RNA (1)...(19): siRNA sense strand
ugacaaagaggcagcagga

SEQ ID NO: 2342178 - RNA, 19 nt, Homo sapiens
  misc_RNA (1)...(19): siRNA sense strand
gaaaggauuagauugggua

SEQ ID NO: 2342179 - RNA, 19 nt, Homo sapiens
  misc_RNA (1)...(19): siRNA sense strand
agaacaaacuaccagcuga

SEQ ID NO: 2342180 - RNA, 19 nt, Homo sapiens
  misc_RNA (1)...(19): siRNA sense strand
gcaaguuccugaagggccu

SEQ ID NO: 2342181 - RNA, 19 nt, Homo sapiens
  misc_RNA (1)...(19): siRNA sense strand
acaugaagaaauugaccuu

SEQ ID NO: 2342182 - RNA, 19 nt, Homo sapiens
  misc_RNA (1)...(19): siRNA sense strand
caucaauacuggucagcuc

SEQ ID NO: 2342183 - RNA, 19 nt, Homo sapiens
  misc_RNA (1)...(19): siRNA sense strand
aaaggauuagauuggguaa

SEQ ID NO: 2342184 - RNA, 19 nt, Homo sapiens
  misc_RNA (1)...(19): siRNA sense strand
ggaaagagcaguauggaga

SEQ ID NO: 2342185 - RNA, 19 nt, Homo sapiens
  misc_RNA (1)...(19): siRNA sense strand
ugaaaguccuugaagacca

SEQ ID NO: 2342186 - RNA, 19 nt, Homo sapiens
  misc_RNA (1)...(19): siRNA sense strand
agucugugcuggucgggaa

SEQ ID NO: 2342187 - RNA, 19 nt, Homo sapiens
  misc_RNA (1)...(19): siRNA sense strand
ccgauguuacccaaggaaa

SEQ ID NO: 2342188 - RNA, 19 nt, Homo sapiens
  misc_RNA (1)...(19): siRNA sense strand
ccaauaacccagagagcug

SEQ ID NO: 2342189 - RNA, 19 nt, Homo sapiens
  misc_RNA (1)...(19): siRNA sense strand
acccaaggaaagagcagua

SEQ ID NO: 2342190 - RNA, 19 nt, Homo sapiens
  misc_RNA (1)...(19): siRNA sense strand
cuguuggagcugauagcaa

SEQ ID NO: 2342191 - RNA, 19 nt, Homo sapiens
  misc_RNA (1)...(19): siRNA sense strand
gggcagcuggauuggaaga

SEQ ID NO: 2342192 - RNA, 19 nt, Homo sapiens
  misc_RNA (1)...(19): siRNA sense strand
caacugaacaucaugcaga

SEQ ID NO: 2342193 - RNA, 19 nt, Homo sapiens
  misc_RNA (1)...(19): siRNA sense strand
cgauguuacccaaggaaag

SEQ ID NO: 2342194 - RNA, 19 nt, Homo sapiens
  misc_RNA (1)...(19): siRNA sense strand
ggaaagagcaguauggaga

SEQ ID NO: 2342195 - RNA, 19 nt, Homo sapiens
  misc_RNA (1)...(19): siRNA sense strand
ugaaaguccuugaagacca

SEQ ID NO: 2342196 - RNA, 19 nt, Homo sapiens
  misc_RNA (1)...(19): siRNA sense strand
agucugugcuggucgggaa

SEQ ID NO: 2342197 - RNA, 19 nt, Homo sapiens
  misc_RNA (1)...(19): siRNA sense strand
ccgauguuacccaaggaaa

SEQ ID NO: 2342198 - RNA, 19 nt, Homo sapiens
  misc_RNA (1)...(19): siRNA sense strand
ccaauaacccagagagcug

SEQ ID NO: 2342199 - RNA, 19 nt, Homo sapiens
  misc_RNA (1)...(19): siRNA sense strand
acccaaggaaagagcagua

SEQ ID NO: 2342200 - RNA, 19 nt, Homo sapiens
  misc_RNA (1)...(19): siRNA sense strand
gggcagcuggauuggaaga

SEQ ID NO: 2342201 - RNA, 19 nt, Homo sapiens
  misc_RNA (1)...(19): siRNA sense strand
caacugaacaucaugcaga

SEQ ID NO: 2342202 - RNA, 19 nt, Homo sapiens
  misc_RNA (1)...(19): siRNA sense strand
cgauguuacccaaggaaag

SEQ ID NO: 2342203 - RNA, 19 nt, Homo sapiens
  misc_RNA (1)...(19): siRNA sense strand
aggcaagaauggagggcca

SEQ ID NO: 2342204 - RNA, 19 nt, Homo sapiens
  misc_RNA (1)...(19): siRNA sense strand
cuaaaggagacaagggcuu

SEQ ID NO: 2342205 - RNA, 19 nt, Homo sapiens
  misc_RNA (1)...(19): siRNA sense strand
gcaaggaagccguacccaa

SEQ ID NO: 2342206 - RNA, 19 nt, Homo sapiens
  misc_RNA (1)...(19): siRNA sense strand
aggauuuccagguggcaaa

SEQ ID NO: 2342207 - RNA, 19 nt, Homo sapiens
  misc_RNA (1)...(19): siRNA sense strand
agaaauaccauuagccagu

SEQ ID NO: 2342208 - RNA, 19 nt, Homo sapiens
  misc_RNA (1)...(19): siRNA sense strand
cauuggaccaccugggauu

SEQ ID NO: 2342209 - RNA, 19 nt, Homo sapiens
  misc_RNA (1)...(19): siRNA sense strand
ccccaauauaugaaggaaa

SEQ ID NO: 2342210 - RNA, 19 nt, Homo sapiens
  misc_RNA (1)...(19): siRNA sense strand
agggaaacccggaguggca

SEQ ID NO: 2342211 - RNA, 19 nt, Homo sapiens
  misc_RNA (1)...(19): siRNA sense strand
ggcuaagaaaggcaagaau

SEQ ID NO: 2342212 - RNA, 19 nt, Homo sapiens
  misc_RNA (1)...(19): siRNA sense strand
agacaagggcuucgggaug

SEQ ID NO: 2342213 - RNA, 19 nt, Homo sapiens
  misc_RNA (1)...(19): siRNA sense strand
gagacaagggcuucgggau

SEQ ID NO: 2342214 - RNA, 19 nt, Homo sapiens
  misc_RNA (1)...(19): siRNA sense strand
accuggaauuaaaggaaaa

SEQ ID NO: 2342215 - RNA, 19 nt, Homo sapiens
  misc_RNA (1)...(19): siRNA sense strand
aauaggugccccaggaaua

SEQ ID NO: 2342216 - RNA, 19 nt, Homo sapiens
  misc_RNA (1)...(19): siRNA sense strand
aggugggauuguagggcca

SEQ ID NO: 2342217 - RNA, 19 nt, Homo sapiens
  misc_RNA (1)...(19): siRNA sense strand
agguuuccuuggugaagua

SEQ ID NO: 2342218 - RNA, 19 nt, Homo sapiens
  misc_RNA (1)...(19): siRNA sense strand
ccuaagggagagccaggaa

SEQ ID NO: 2342219 - RNA, 19 nt, Homo sapiens
  misc_RNA (1)...(19): siRNA sense strand
guauaacggcagacagaac

SEQ ID NO: 2342220 - RNA, 19 nt, Homo sapiens
  misc_RNA (1)...(19): siRNA sense strand
aggcaagaauggagggcca

SEQ ID NO: 2342221 - RNA, 19 nt, Homo sapiens
  misc_RNA (1)...(19): siRNA sense strand
cuaaaggagacaagggcuu

SEQ ID NO: 2342222 - RNA, 19 nt, Homo sapiens
  misc_RNA (1)...(19): siRNA sense strand
gcaaggaagccguacccaa

SEQ ID NO: 2342223 - RNA, 19 nt, Homo sapiens
  misc_RNA (1)...(19): siRNA sense strand
aggauuuccagguggcaaa

SEQ ID NO: 2342224 - RNA, 19 nt, Homo sapiens
  misc_RNA (1)...(19): siRNA sense strand
agaaauaccauuagccagu

SEQ ID NO: 2342225 - RNA, 19 nt, Homo sapiens
  misc_RNA (1)...(19): siRNA sense strand
cauuggaccaccugggauu

SEQ ID NO: 2342226 - RNA, 19 nt, Homo sapiens
  misc_RNA (1)...(19): siRNA sense strand
ccccaauauaugaaggaaa

SEQ ID NO: 2342227 - RNA, 19 nt, Homo sapiens
  misc_RNA (1)...(19): siRNA sense strand
agggaaacccggaguggca

SEQ ID NO: 2342228 - RNA, 19 nt, Homo sapiens
  misc_RNA (1)...(19): siRNA sense strand
ggcuaagaaaggcaagaau

SEQ ID NO: 2342229 - RNA, 19 nt, Homo sapiens
  misc_RNA (1)...(19): siRNA sense strand
agacaagggcuucgggaug

SEQ ID NO: 2342230 - RNA, 19 nt, Homo sapiens
  misc_RNA (1)...(19): siRNA sense strand
gagacaagggcuucgggau

SEQ ID NO: 2342231 - RNA, 19 nt, Homo sapiens
  misc_RNA (1)...(19): siRNA sense strand
accuggaauuaaaggaaaa

SEQ ID NO: 2342232 - RNA, 19 nt, Homo sapiens
  misc_RNA (1)...(19): siRNA sense strand
aauaggugccccaggaaua

SEQ ID NO: 2342233 - RNA, 19 nt, Homo sapiens
  misc_RNA (1)...(19): siRNA sense strand
aggugggauuguagggcca

SEQ ID NO: 2342234 - RNA, 19 nt, Homo sapiens
  misc_RNA (1)...(19): siRNA sense strand
agguuuccuuggugaagua

SEQ ID NO: 2342235 - RNA, 19 nt, Homo sapiens
  misc_RNA (1)...(19): siRNA sense strand
ccuaagggagagccaggaa

SEQ ID NO: 2342236 - RNA, 19 nt, Homo sapiens
  misc_RNA (1)...(19): siRNA sense strand
guauaacggcagacagaac

SEQ ID NO: 2342237 - RNA, 19 nt, Homo sapiens
  misc_RNA (1)...(19): siRNA sense strand
ucaagauguccaaggaaca

SEQ ID NO: 2342238 - RNA, 19 nt, Homo sapiens
  misc_RNA (1)...(19): siRNA sense strand
ccucaagacaccggaagaa

SEQ ID NO: 2342239 - RNA, 19 nt, Homo sapiens
  misc_RNA (1)...(19): siRNA sense strand
ucaagauguccaaggaaca

SEQ ID NO: 2342240 - RNA, 19 nt, Homo sapiens
  misc_RNA (1)...(19): siRNA sense strand
ccucaagacaccggaagaa

SEQ ID NO: 2342241 - RNA, 19 nt, Homo sapiens
  misc_RNA (1)...(19): siRNA sense strand
ggaaagugaaugugcggaa

SEQ ID NO: 2342242 - RNA, 19 nt, Homo sapiens
  misc_RNA (1)...(19): siRNA sense strand
aggaaauggaaguggauga

SEQ ID NO: 2342243 - RNA, 19 nt, Homo sapiens
  misc_RNA (1)...(19): siRNA sense strand
uaucaagacaagagggaca

SEQ ID NO: 2342244 - RNA, 19 nt, Homo sapiens
  misc_RNA (1)...(19): siRNA sense strand
uugaggaagaugagagaau

SEQ ID NO: 2342245 - RNA, 19 nt, Homo sapiens
  misc_RNA (1)...(19): siRNA sense strand
aacgcaaaguagaggaaau

SEQ ID NO: 2342246 - RNA, 19 nt, Homo sapiens
  misc_RNA (1)...(19): siRNA sense strand
agagaauuccaguacuaaa

SEQ ID NO: 2342247 - RNA, 19 nt, Homo sapiens
  misc_RNA (1)...(19): siRNA sense strand
aaguagaggaaauggaagu

SEQ ID NO: 2342248 - RNA, 19 nt, Homo sapiens
  misc_RNA (1)...(19): siRNA sense strand
ccuucaaaucagaauguuu

SEQ ID NO: 2342249 - RNA, 19 nt, Homo sapiens
  misc_RNA (1)...(19): siRNA sense strand
ggcucuauaaugaagauaa

SEQ ID NO: 2342250 - RNA, 19 nt, Homo sapiens
  misc_RNA (1)...(19): siRNA sense strand
gaggaagaugagagaauuc

SEQ ID NO: 2342251 - RNA, 19 nt, Homo sapiens
  misc_RNA (1)...(19): siRNA sense strand
gauaaguugaauugggauc

SEQ ID NO: 2342252 - RNA, 19 nt, Homo sapiens
  misc_RNA (1)...(19): siRNA sense strand
uuuugagaauggagagaau

SEQ ID NO: 2342253 - RNA, 19 nt, Homo sapiens
  misc_RNA (1)...(19): siRNA sense strand
cagcaagccagaagugcca

SEQ ID NO: 2342254 - RNA, 19 nt, Homo sapiens
  misc_RNA (1)...(19): siRNA sense strand
caaccuuuacccagaaaca

SEQ ID NO: 2342255 - RNA, 19 nt, Homo sapiens
  misc_RNA (1)...(19): siRNA sense strand
uguugaggaagaugagaga

SEQ ID NO: 2342256 - RNA, 19 nt, Homo sapiens
  misc_RNA (1)...(19): siRNA sense strand
cuguauggccugcaaccaa

SEQ ID NO: 2342257 - RNA, 19 nt, Homo sapiens
  misc_RNA (1)...(19): siRNA sense strand
caacaagauuccuggccua

SEQ ID NO: 2342258 - RNA, 19 nt, Homo sapiens
  misc_RNA (1)...(19): siRNA sense strand
uaucagaagcccauggaga

SEQ ID NO: 2342259 - RNA, 19 nt, Homo sapiens
  misc_RNA (1)...(19): siRNA sense strand
gcaggaagguucuagagga

SEQ ID NO: 2342260 - RNA, 19 nt, Homo sapiens
  misc_RNA (1)...(19): siRNA sense strand
gcugcuucgucaagugcaa

SEQ ID NO: 2342261 - RNA, 19 nt, Homo sapiens
  misc_RNA (1)...(19): siRNA sense strand
caggaagguucuagaggac

SEQ ID NO: 2342262 - RNA, 19 nt, Homo sapiens
  misc_RNA (1)...(19): siRNA sense strand
ccaacuacugcgaggagga

SEQ ID NO: 2342263 - RNA, 19 nt, Homo sapiens
  misc_RNA (1)...(19): siRNA sense strand
ccaagguguggcagugcaa

SEQ ID NO: 2342264 - RNA, 19 nt, Homo sapiens
  misc_RNA (1)...(19): siRNA sense strand
gcauacaggaggagagacu

SEQ ID NO: 2342265 - RNA, 19 nt, Homo sapiens
  misc_RNA (1)...(19): siRNA sense strand
ggagaaaaguggauggauc

SEQ ID NO: 2342266 - RNA, 19 nt, Homo sapiens
  misc_RNA (1)...(19): siRNA sense strand
agguuuacaaugaugguua

SEQ ID NO: 2342267 - RNA, 19 nt, Homo sapiens
  misc_RNA (1)...(19): siRNA sense strand
cugaaggacaucugacaau

SEQ ID NO: 2342268 - RNA, 19 nt, Homo sapiens
  misc_RNA (1)...(19): siRNA sense strand
caguggugccaaugaggua

SEQ ID NO: 2342269 - RNA, 19 nt, Homo sapiens
  misc_RNA (1)...(19): siRNA sense strand
agaagaccaaagauggaaa

SEQ ID NO: 2342270 - RNA, 19 nt, Homo sapiens
  misc_RNA (1)...(19): siRNA sense strand
ccuuuggacagguuguaaa

SEQ ID NO: 2342271 - RNA, 19 nt, Homo sapiens
  misc_RNA (1)...(19): siRNA sense strand
cugcuaauaccuuggacuu

SEQ ID NO: 2342272 - RNA, 19 nt, Homo sapiens
  misc_RNA (1)...(19): siRNA sense strand
gguaaccggaccaggccaa

SEQ ID NO: 2342273 - RNA, 19 nt, Homo sapiens
  misc_RNA (1)...(19): siRNA sense strand
gugccaaugagguagauca

SEQ ID NO: 2342274 - RNA, 19 nt, Homo sapiens
  misc_RNA (1)...(19): siRNA sense strand
auggaaaacgggaguacaa

SEQ ID NO: 2342275 - RNA, 19 nt, Homo sapiens
  misc_RNA (1)...(19): siRNA sense strand
guacaaaccaccaggaacc

SEQ ID NO: 2342276 - RNA, 19 nt, Homo sapiens
  misc_RNA (1)...(19): siRNA sense strand
aaagaagcgaagacaccaa

SEQ ID NO: 2342277 - RNA, 19 nt, Homo sapiens
  misc_RNA (1)...(19): siRNA sense strand
ggacagguuguaaaggcau

SEQ ID NO: 2342278 - RNA, 19 nt, Homo sapiens
  misc_RNA (1)...(19): siRNA sense strand
gcauacaggaggagagacu

SEQ ID NO: 2342279 - RNA, 19 nt, Homo sapiens
  misc_RNA (1)...(19): siRNA sense strand
ggagaaaaguggauggauc

SEQ ID NO: 2342280 - RNA, 19 nt, Homo sapiens
  misc_RNA (1)...(19): siRNA sense strand
agguuuacaaugaugguua

SEQ ID NO: 2342281 - RNA, 19 nt, Homo sapiens
  misc_RNA (1)...(19): siRNA sense strand
caguggugccaaugaggua

SEQ ID NO: 2342282 - RNA, 19 nt, Homo sapiens
  misc_RNA (1)...(19): siRNA sense strand
agaagaccaaagauggaaa

SEQ ID NO: 2342283 - RNA, 19 nt, Homo sapiens
  misc_RNA (1)...(19): siRNA sense strand
ccuuuggacagguuguaaa

SEQ ID NO: 2342284 - RNA, 19 nt, Homo sapiens
  misc_RNA (1)...(19): siRNA sense strand
gugccaaugagguagauca

SEQ ID NO: 2342285 - RNA, 19 nt, Homo sapiens
  misc_RNA (1)...(19): siRNA sense strand
auggaaaacgggaguacaa

SEQ ID NO: 2342286 - RNA, 19 nt, Homo sapiens
  misc_RNA (1)...(19): siRNA sense strand
guacaaaccaccaggaacc

SEQ ID NO: 2342287 - RNA, 19 nt, Homo sapiens
  misc_RNA (1)...(19): siRNA sense strand
aaagaagcgaagacaccaa

SEQ ID NO: 2342288 - RNA, 19 nt, Homo sapiens
  misc_RNA (1)...(19): siRNA sense strand
ggacagguuguaaaggcau

SEQ ID NO: 2342289 - RNA, 19 nt, Homo sapiens
  misc_RNA (1)...(19): siRNA sense strand
gcauacaggaggagagacu

SEQ ID NO: 2342290 - RNA, 19 nt, Homo sapiens
  misc_RNA (1)...(19): siRNA sense strand
ggagaaaaguggauggauc

SEQ ID NO: 2342291 - RNA, 19 nt, Homo sapiens
  misc_RNA (1)...(19): siRNA sense strand
agguuuacaaugaugguua

SEQ ID NO: 2342292 - RNA, 19 nt, Homo sapiens
  misc_RNA (1)...(19): siRNA sense strand
cugaaggacaucugacaau

SEQ ID NO: 2342293 - RNA, 19 nt, Homo sapiens
  misc_RNA (1)...(19): siRNA sense strand
caguggugccaaugaggua

SEQ ID NO: 2342294 - RNA, 19 nt, Homo sapiens
  misc_RNA (1)...(19): siRNA sense strand
agaagaccaaagauggaaa

SEQ ID NO: 2342295 - RNA, 19 nt, Homo sapiens
  misc_RNA (1)...(19): siRNA sense strand
ccuuuggacagguuguaaa

SEQ ID NO: 2342296 - RNA, 19 nt, Homo sapiens
  misc_RNA (1)...(19): siRNA sense strand
cugcuaauaccuuggacuu

SEQ ID NO: 2342297 - RNA, 19 nt, Homo sapiens
  misc_RNA (1)...(19): siRNA sense strand
gguaaccggaccaggccaa

SEQ ID NO: 2342298 - RNA, 19 nt, Homo sapiens
  misc_RNA (1)...(19): siRNA sense strand
gugccaaugagguagauca

SEQ ID NO: 2342299 - RNA, 19 nt, Homo sapiens
  misc_RNA (1)...(19): siRNA sense strand
auggaaaacgggaguacaa

SEQ ID NO: 2342300 - RNA, 19 nt, Homo sapiens
  misc_RNA (1)...(19): siRNA sense strand
guacaaaccaccaggaacc

SEQ ID NO: 2342301 - RNA, 19 nt, Homo sapiens
  misc_RNA (1)...(19): siRNA sense strand
aaagaagcgaagacaccaa

SEQ ID NO: 2342302 - RNA, 19 nt, Homo sapiens
  misc_RNA (1)...(19): siRNA sense strand
ggacagguuguaaaggcau

SEQ ID NO: 2342303 - RNA, 19 nt, Homo sapiens
  misc_RNA (1)...(19): siRNA sense strand
gcauacaggaggagagacu

SEQ ID NO: 2342304 - RNA, 19 nt, Homo sapiens
  misc_RNA (1)...(19): siRNA sense strand
ggagaaaaguggauggauc

SEQ ID NO: 2342305 - RNA, 19 nt, Homo sapiens
  misc_RNA (1)...(19): siRNA sense strand
agguuuacaaugaugguua

SEQ ID NO: 2342306 - RNA, 19 nt, Homo sapiens
  misc_RNA (1)...(19): siRNA sense strand
caguggugccaaugaggua

SEQ ID NO: 2342307 - RNA, 19 nt, Homo sapiens
  misc_RNA (1)...(19): siRNA sense strand
agaagaccaaagauggaaa

SEQ ID NO: 2342308 - RNA, 19 nt, Homo sapiens
  misc_RNA (1)...(19): siRNA sense strand
gugccaaugagguagauca

SEQ ID NO: 2342309 - RNA, 19 nt, Homo sapiens
  misc_RNA (1)...(19): siRNA sense strand
auggaaaacgggaguacaa

SEQ ID NO: 2342310 - RNA, 19 nt, Homo sapiens
  misc_RNA (1)...(19): siRNA sense strand
guacaaaccaccaggaacc

SEQ ID NO: 2342311 - RNA, 19 nt, Homo sapiens
  misc_RNA (1)...(19): siRNA sense strand
aaagaagcgaagacaccaa

SEQ ID NO: 2342312 - RNA, 19 nt, Homo sapiens
  misc_RNA (1)...(19): siRNA sense strand
ggacagguuguaaaggcau

SEQ ID NO: 2342313 - RNA, 19 nt, Homo sapiens
  misc_RNA (1)...(19): siRNA sense strand
gcauacaggaggagagacu

SEQ ID NO: 2342314 - RNA, 19 nt, Homo sapiens
  misc_RNA (1)...(19): siRNA sense strand
ggagaaaaguggauggauc

SEQ ID NO: 2342315 - RNA, 19 nt, Homo sapiens
  misc_RNA (1)...(19): siRNA sense strand
agguuuacaaugaugguua

SEQ ID NO: 2342316 - RNA, 19 nt, Homo sapiens
  misc_RNA (1)...(19): siRNA sense strand
caguggugccaaugaggua

SEQ ID NO: 2342317 - RNA, 19 nt, Homo sapiens
  misc_RNA (1)...(19): siRNA sense strand
agaagaccaaagauggaaa

SEQ ID NO: 2342318 - RNA, 19 nt, Homo sapiens
  misc_RNA (1)...(19): siRNA sense strand
ccuuuggacagguuguaaa

SEQ ID NO: 2342319 - RNA, 19 nt, Homo sapiens
  misc_RNA (1)...(19): siRNA sense strand
gugccaaugagguagauca

SEQ ID NO: 2342320 - RNA, 19 nt, Homo sapiens
  misc_RNA (1)...(19): siRNA sense strand
auggaaaacgggaguacaa

SEQ ID NO: 2342321 - RNA, 19 nt, Homo sapiens
  misc_RNA (1)...(19): siRNA sense strand
guacaaaccaccaggaacc

SEQ ID NO: 2342322 - RNA, 19 nt, Homo sapiens
  misc_RNA (1)...(19): siRNA sense strand
aaagaagcgaagacaccaa

SEQ ID NO: 2342323 - RNA, 19 nt, Homo sapiens
  misc_RNA (1)...(19): siRNA sense strand
ggacagguuguaaaggcau

SEQ ID NO: 2342324 - RNA, 19 nt, Homo sapiens
  misc_RNA (1)...(19): siRNA sense strand
ggauaaaggaaaagcaaaa

SEQ ID NO: 2342325 - RNA, 19 nt, Homo sapiens
  misc_RNA (1)...(19): siRNA sense strand
uagaaaagauggaggggaa

SEQ ID NO: 2342326 - RNA, 19 nt, Homo sapiens
  misc_RNA (1)...(19): siRNA sense strand
caguaaagggcgauggauu

SEQ ID NO: 2342327 - RNA, 19 nt, Homo sapiens
  misc_RNA (1)...(19): siRNA sense strand
ccauaaaguuguggauaau

SEQ ID NO: 2342328 - RNA, 19 nt, Homo sapiens
  misc_RNA (1)...(19): siRNA sense strand
cugaaacagaggaggacaa

SEQ ID NO: 2342329 - RNA, 19 nt, Homo sapiens
  misc_RNA (1)...(19): siRNA sense strand
guuuaaagguacuggucuu

SEQ ID NO: 2342330 - RNA, 19 nt, Homo sapiens
  misc_RNA (1)...(19): siRNA sense strand
aguaaagggcgauggauuu

SEQ ID NO: 2342331 - RNA, 19 nt, Homo sapiens
  misc_RNA (1)...(19): siRNA sense strand
gcauauuugguuaggagaa

SEQ ID NO: 2342332 - RNA, 19 nt, Homo sapiens
  misc_RNA (1)...(19): siRNA sense strand
aggacaaggaagaagcuaa

SEQ ID NO: 2342333 - RNA, 19 nt, Homo sapiens
  misc_RNA (1)...(19): siRNA sense strand
cuaaagaggcuuggagcaa

SEQ ID NO: 2342334 - RNA, 19 nt, Homo sapiens
  misc_RNA (1)...(19): siRNA sense strand
gugcaagauuuuagaaaga

SEQ ID NO: 2342335 - RNA, 19 nt, Homo sapiens
  misc_RNA (1)...(19): siRNA sense strand
cgagaauugaagugggaga

SEQ ID NO: 2342336 - RNA, 19 nt, Homo sapiens
  misc_RNA (1)...(19): siRNA sense strand
cagaggaggacaaggaaga

SEQ ID NO: 2342337 - RNA, 19 nt, Homo sapiens
  misc_RNA (1)...(19): siRNA sense strand
cugugaaagcccuguguaa

SEQ ID NO: 2342338 - RNA, 19 nt, Homo sapiens
  misc_RNA (1)...(19): siRNA sense strand
gcugagaugcguaagcaaa

SEQ ID NO: 2342339 - RNA, 19 nt, Homo sapiens
  misc_RNA (1)...(19): siRNA sense strand
acaacuagggauugaggaa

SEQ ID NO: 2342340 - RNA, 19 nt, Homo sapiens
  misc_RNA (1)...(19): siRNA sense strand
cagaacaaagcaacggaaa

SEQ ID NO: 2342341 - RNA, 19 nt, Homo sapiens
  misc_RNA (1)...(19): siRNA sense strand
cauauuugguuaggagaaa

SEQ ID NO: 2342342 - RNA, 19 nt, Homo sapiens
  misc_RNA (1)...(19): siRNA sense strand
agauggugaugcagaacaa

SEQ ID NO: 2342343 - RNA, 19 nt, Homo sapiens
  misc_RNA (1)...(19): siRNA sense strand
cagaaugcaacaagaaaga

SEQ ID NO: 2342344 - RNA, 19 nt, Homo sapiens
  misc_RNA (1)...(19): siRNA sense strand
guguaaggaauguguagua

SEQ ID NO: 2342345 - RNA, 19 nt, Homo sapiens
  misc_RNA (1)...(19): siRNA sense strand
cgguagcaccuuaaauaaa

SEQ ID NO: 2342346 - RNA, 19 nt, Homo sapiens
  misc_RNA (1)...(19): siRNA sense strand
guguccacauggugaguua

SEQ ID NO: 2342347 - RNA, 19 nt, Homo sapiens
  misc_RNA (1)...(19): siRNA sense strand
gugacuacaugcugggaga

SEQ ID NO: 2342348 - RNA, 19 nt, Homo sapiens
  misc_RNA (1)...(19): siRNA sense strand
cuucagaaacacaguauau

SEQ ID NO: 2342349 - RNA, 19 nt, Homo sapiens
  misc_RNA (1)...(19): siRNA sense strand
guuaggagaaauagaugaa

SEQ ID NO: 2342350 - RNA, 19 nt, Homo sapiens
  misc_RNA (1)...(19): siRNA sense strand
caaaacacgaagagguuaa

SEQ ID NO: 2342351 - RNA, 19 nt, Homo sapiens
  misc_RNA (1)...(19): siRNA sense strand
guuaaggagcuguaccaaa

SEQ ID NO: 2342352 - RNA, 19 nt, Homo sapiens
  misc_RNA (1)...(19): siRNA sense strand
cugcaaaggaaauccgaau

SEQ ID NO: 2342353 - RNA, 19 nt, Homo sapiens
  misc_RNA (1)...(19): siRNA sense strand
gguugguauuggugagcau

SEQ ID NO: 2342354 - RNA, 19 nt, Homo sapiens
  misc_RNA (1)...(19): siRNA sense strand
aagcuaaaccagauggaga

SEQ ID NO: 2342355 - RNA, 19 nt, Homo sapiens
  misc_RNA (1)...(19): siRNA sense strand
acgaagagguuaaggagcu

SEQ ID NO: 2342356 - RNA, 19 nt, Homo sapiens
  misc_RNA (1)...(19): siRNA sense strand
ggagaauaugccuauguaa

SEQ ID NO: 2342357 - RNA, 19 nt, Homo sapiens
  misc_RNA (1)...(19): siRNA sense strand
aagaugaaucaaaggaaga

SEQ ID NO: 2342358 - RNA, 19 nt, Homo sapiens
  misc_RNA (1)...(19): siRNA sense strand
cgugaaagauccacagucu

SEQ ID NO: 2342359 - RNA, 19 nt, Homo sapiens
  misc_RNA (1)...(19): siRNA sense strand
cgaauugcuugguugguau

SEQ ID NO: 2342360 - RNA, 19 nt, Homo sapiens
  misc_RNA (1)...(19): siRNA sense strand
gggccuggacacuggacaa

SEQ ID NO: 2342361 - RNA, 19 nt, Homo sapiens
  misc_RNA (1)...(19): siRNA sense strand
gcgagaacugucaaagcaa

SEQ ID NO: 2342362 - RNA, 19 nt, Homo sapiens
  misc_RNA (1)...(19): siRNA sense strand
aaagagaaggggaagaaaa

SEQ ID NO: 2342363 - RNA, 19 nt, Homo sapiens
  misc_RNA (1)...(19): siRNA sense strand
acgaaacugcaaaggaaau

SEQ ID NO: 2342364 - RNA, 19 nt, Homo sapiens
  misc_RNA (1)...(19): siRNA sense strand
aacuagggauugaggaaga

SEQ ID NO: 2342365 - RNA, 19 nt, Homo sapiens
  misc_RNA (1)...(19): siRNA sense strand
gacgaaacugcaaaggaaa

SEQ ID NO: 2342366 - RNA, 19 nt, Homo sapiens
  misc_RNA (1)...(19): siRNA sense strand
ugugaguaguucugaaaca

SEQ ID NO: 2342367 - RNA, 19 nt, Homo sapiens
  misc_RNA (1)...(19): siRNA sense strand
guuagaaagccuacaagau

SEQ ID NO: 2342368 - RNA, 19 nt, Homo sapiens
  misc_RNA (1)...(19): siRNA sense strand
caguaauaggcgauacauu

SEQ ID NO: 2342369 - RNA, 19 nt, Homo sapiens
  misc_RNA (1)...(19): siRNA sense strand
agcuaaaccagauggagaa

SEQ ID NO: 2342370 - RNA, 19 nt, Homo sapiens
  misc_RNA (1)...(19): siRNA sense strand
aguuaaauauccaaggcca

SEQ ID NO: 2342371 - RNA, 19 nt, Homo sapiens
  misc_RNA (1)...(19): siRNA sense strand
gaguuaugcauaucugaaa

SEQ ID NO: 2342372 - RNA, 19 nt, Homo sapiens
  misc_RNA (1)...(19): siRNA sense strand
aauugaagugggagaugua

SEQ ID NO: 2342373 - RNA, 19 nt, Homo sapiens
  misc_RNA (1)...(19): siRNA sense strand
aaguguggauaaaggaaaa

SEQ ID NO: 2342374 - RNA, 19 nt, Homo sapiens
  misc_RNA (1)...(19): siRNA sense strand
gguuaggagaaauagauga

SEQ ID NO: 2342375 - RNA, 19 nt, Homo sapiens
  misc_RNA (1)...(19): siRNA sense strand
gaaccaacuaaaugaagau

SEQ ID NO: 2342376 - RNA, 19 nt, Homo sapiens
  misc_RNA (1)...(19): siRNA sense strand
aggaagaagcuaaaccaga

SEQ ID NO: 2342377 - RNA, 19 nt, Homo sapiens
  misc_RNA (1)...(19): siRNA sense strand
uggaugagcaagaugguga

SEQ ID NO: 2342378 - RNA, 19 nt, Homo sapiens
  misc_RNA (1)...(19): siRNA sense strand
caagaaaagcccaacacua

SEQ ID NO: 2342379 - RNA, 19 nt, Homo sapiens
  misc_RNA (1)...(19): siRNA sense strand
ugaauaugcagcugacauu

SEQ ID NO: 2342380 - RNA, 19 nt, Homo sapiens
  misc_RNA (1)...(19): siRNA sense strand
uugaagugggagauguaaa

SEQ ID NO: 2342381 - RNA, 19 nt, Homo sapiens
  misc_RNA (1)...(19): siRNA sense strand
ugaaccaauugcagauuau

SEQ ID NO: 2342382 - RNA, 19 nt, Homo sapiens
  misc_RNA (1)...(19): siRNA sense strand
ugucagagaaggagagaau

SEQ ID NO: 2342383 - RNA, 19 nt, Homo sapiens
  misc_RNA (1)...(19): siRNA sense strand
agaaagagaugaucgggaa

SEQ ID NO: 2342384 - RNA, 19 nt, Homo sapiens
  misc_RNA (1)...(19): siRNA sense strand
aggagagagucuugaggaa

SEQ ID NO: 2342385 - RNA, 19 nt, Homo sapiens
  misc_RNA (1)...(19): siRNA sense strand
aggaaauggagcugagaau

SEQ ID NO: 2342386 - RNA, 19 nt, Homo sapiens
  misc_RNA (1)...(19): siRNA sense strand
uugaaagaacagcgagaaa

SEQ ID NO: 2342387 - RNA, 19 nt, Homo sapiens
  misc_RNA (1)...(19): siRNA sense strand
agaagaaugacaaggacaa

SEQ ID NO: 2342388 - RNA, 19 nt, Homo sapiens
  misc_RNA (1)...(19): siRNA sense strand
gaaugaaguugauggcaga

SEQ ID NO: 2342389 - RNA, 19 nt, Homo sapiens
  misc_RNA (1)...(19): siRNA sense strand
agaauaagaagguggccaa

SEQ ID NO: 2342390 - RNA, 19 nt, Homo sapiens
  misc_RNA (1)...(19): siRNA sense strand
uagaagugaaggaaagaaa

SEQ ID NO: 2342391 - RNA, 19 nt, Homo sapiens
  misc_RNA (1)...(19): siRNA sense strand
agauagaauccuuccgaaa

SEQ ID NO: 2342392 - RNA, 19 nt, Homo sapiens
  misc_RNA (1)...(19): siRNA sense strand
cauacaucuuagagaggaa

SEQ ID NO: 2342393 - RNA, 19 nt, Homo sapiens
  misc_RNA (1)...(19): siRNA sense strand
gaaagagaugaucgggaaa

SEQ ID NO: 2342394 - RNA, 19 nt, Homo sapiens
  misc_RNA (1)...(19): siRNA sense strand
agaacaaagaccugaaaga

SEQ ID NO: 2342395 - RNA, 19 nt, Homo sapiens
  misc_RNA (1)...(19): siRNA sense strand
agauagaggaacugaugaa

SEQ ID NO: 2342396 - RNA, 19 nt, Homo sapiens
  misc_RNA (1)...(19): siRNA sense strand
gcgaagaagagaucaaaca

SEQ ID NO: 2342397 - RNA, 19 nt, Homo sapiens
  misc_RNA (1)...(19): siRNA sense strand
agagaauaauugagcgcuu

SEQ ID NO: 2342398 - RNA, 19 nt, Homo sapiens
  misc_RNA (1)...(19): siRNA sense strand
uggcaaggcccaagcggaa

SEQ ID NO: 2342399 - RNA, 19 nt, Homo sapiens
  misc_RNA (1)...(19): siRNA sense strand
agguggagaaugagaagaa

SEQ ID NO: 2342400 - RNA, 19 nt, Homo sapiens
  misc_RNA (1)...(19): siRNA sense strand
ucgaaaugaaggacacaaa

SEQ ID NO: 2342401 - RNA, 19 nt, Homo sapiens
  misc_RNA (1)...(19): siRNA sense strand
agguagaugcgcugagauu

SEQ ID NO: 2342402 - RNA, 19 nt, Homo sapiens
  misc_RNA (1)...(19): siRNA sense strand
gaacgaaacauaagggauc

SEQ ID NO: 2342403 - RNA, 19 nt, Homo sapiens
  misc_RNA (1)...(19): siRNA sense strand
gcuugaaagaacagcgaga

SEQ ID NO: 2342404 - RNA, 19 nt, Homo sapiens
  misc_RNA (1)...(19): siRNA sense strand
agaacaacuuagggauaaa

SEQ ID NO: 2342405 - RNA, 19 nt, Homo sapiens
  misc_RNA (1)...(19): siRNA sense strand
uggccaaccucaagcacaa

SEQ ID NO: 2342406 - RNA, 19 nt, Homo sapiens
  misc_RNA (1)...(19): siRNA sense strand
gagaaugagaagaaugaca

SEQ ID NO: 2342407 - RNA, 19 nt, Homo sapiens
  misc_RNA (1)...(19): siRNA sense strand
gagaagaaugacaaggaca

SEQ ID NO: 2342408 - RNA, 19 nt, Homo sapiens
  misc_RNA (1)...(19): siRNA sense strand
cagcagacccagaacagaa

SEQ ID NO: 2342409 - RNA, 19 nt, Homo sapiens
  misc_RNA (1)...(19): siRNA sense strand
auugaaacgcagaaacaaa

SEQ ID NO: 2342410 - RNA, 19 nt, Homo sapiens
  misc_RNA (1)...(19): siRNA sense strand
gggauaaagacaagcaacu

SEQ ID NO: 2342411 - RNA, 19 nt, Homo sapiens
  misc_RNA (1)...(19): siRNA sense strand
ggacaagaagaucgcagaa

SEQ ID NO: 2342412 - RNA, 19 nt, Homo sapiens
  misc_RNA (1)...(19): siRNA sense strand
gcauaugaaagaucagaau

SEQ ID NO: 2342413 - RNA, 19 nt, Homo sapiens
  misc_RNA (1)...(19): siRNA sense strand
cuuaagaaggagagagucu

SEQ ID NO: 2342414 - RNA, 19 nt, Homo sapiens
  misc_RNA (1)...(19): siRNA sense strand
gagcaugacaggcaggcua

SEQ ID NO: 2342415 - RNA, 19 nt, Homo sapiens
  misc_RNA (1)...(19): siRNA sense strand
uguuagaagugaaggaaag

SEQ ID NO: 2342416 - RNA, 19 nt, Homo sapiens
  misc_RNA (1)...(19): siRNA sense strand
gauuacgacuggaagaaaa

SEQ ID NO: 2342417 - RNA, 19 nt, Homo sapiens
  misc_RNA (1)...(19): siRNA sense strand
caacuuagggauaaagaca

SEQ ID NO: 2342418 - RNA, 19 nt, Homo sapiens
  misc_RNA (1)...(19): siRNA sense strand
aggaagacauuagaggaaa

SEQ ID NO: 2342419 - RNA, 19 nt, Homo sapiens
  misc_RNA (1)...(19): siRNA sense strand
cgaagaagagaucaaacaa

SEQ ID NO: 2342420 - RNA, 19 nt, Homo sapiens
  misc_RNA (1)...(19): siRNA sense strand
ccaaguuuaugaagaccaa

SEQ ID NO: 2342421 - RNA, 19 nt, Homo sapiens
  misc_RNA (1)...(19): siRNA sense strand
uugagauguugcaaaguaa

SEQ ID NO: 2342422 - RNA, 19 nt, Homo sapiens
  misc_RNA (1)...(19): siRNA sense strand
ggaacgaaacauaagggau

SEQ ID NO: 2342423 - RNA, 19 nt, Homo sapiens
  misc_RNA (1)...(19): siRNA sense strand
aaacaaagcuugaaacccu

SEQ ID NO: 2342424 - RNA, 19 nt, Homo sapiens
  misc_RNA (1)...(19): siRNA sense strand
agagaaggucaaugcuuua

SEQ ID NO: 2342425 - RNA, 19 nt, Homo sapiens
  misc_RNA (1)...(19): siRNA sense strand
cugaacugacugagaaaga

SEQ ID NO: 2342426 - RNA, 19 nt, Homo sapiens
  misc_RNA (1)...(19): siRNA sense strand
uggagaaugagaagaauga

SEQ ID NO: 2342427 - RNA, 19 nt, Homo sapiens
  misc_RNA (1)...(19): siRNA sense strand
agaaugagaagaaugacaa

SEQ ID NO: 2342428 - RNA, 19 nt, Homo sapiens
  misc_RNA (1)...(19): siRNA sense strand
ugaugaaugcacuggagaa

SEQ ID NO: 2342429 - RNA, 19 nt, Homo sapiens
  misc_RNA (1)...(19): siRNA sense strand
aggaugacgaggagggcau

SEQ ID NO: 2342430 - RNA, 19 nt, Homo sapiens
  misc_RNA (1)...(19): siRNA sense strand
auucgugacaugaaagaua

SEQ ID NO: 2342431 - RNA, 19 nt, Homo sapiens
  misc_RNA (1)...(19): siRNA sense strand
ggcugaacugacugagaaa

SEQ ID NO: 2342432 - RNA, 19 nt, Homo sapiens
  misc_RNA (1)...(19): siRNA sense strand
aagacaagcaacugaccaa

SEQ ID NO: 2342433 - RNA, 19 nt, Homo sapiens
  misc_RNA (1)...(19): siRNA sense strand
ggucaaugcuuuacaggcu

SEQ ID NO: 2342434 - RNA, 19 nt, Homo sapiens
  misc_RNA (1)...(19): siRNA sense strand
guagcaaauuggaagcaca

SEQ ID NO: 2342435 - RNA, 19 nt, Homo sapiens
  misc_RNA (1)...(19): siRNA sense strand
cggugaaauucgugacaug

SEQ ID NO: 2342436 - RNA, 19 nt, Homo sapiens
  misc_RNA (1)...(19): siRNA sense strand
ccugaaagacagagugaag

SEQ ID NO: 2342437 - RNA, 19 nt, Homo sapiens
  misc_RNA (1)...(19): siRNA sense strand
ggaggaaacagcuggagga

SEQ ID NO: 2342438 - RNA, 19 nt, Homo sapiens
  misc_RNA (1)...(19): siRNA sense strand
caaagaaagagucggaacu

SEQ ID NO: 2342439 - RNA, 19 nt, Homo sapiens
  misc_RNA (1)...(19): siRNA sense strand
aagaacagcgagaaagaga

SEQ ID NO: 2342440 - RNA, 19 nt, Homo sapiens
  misc_RNA (1)...(19): siRNA sense strand
ccaaggaggugaaaggcaa

SEQ ID NO: 2342441 - RNA, 19 nt, Homo sapiens
  misc_RNA (1)...(19): siRNA sense strand
gggcaaaguguuggagaca

SEQ ID NO: 2342442 - RNA, 19 nt, Homo sapiens
  misc_RNA (1)...(19): siRNA sense strand
gaaaccgaccagagggcaa

SEQ ID NO: 2342443 - RNA, 19 nt, Homo sapiens
  misc_RNA (1)...(19): siRNA sense strand
gccaaaacagaauggaaaa

SEQ ID NO: 2342444 - RNA, 19 nt, Homo sapiens
  misc_RNA (1)...(19): siRNA sense strand
ugccaaaacagaauggaaa

SEQ ID NO: 2342445 - RNA, 19 nt, Homo sapiens
  misc_RNA (1)...(19): siRNA sense strand
gcugugaccuucuuggcua

SEQ ID NO: 2342446 - RNA, 19 nt, Homo sapiens
  misc_RNA (1)...(19): siRNA sense strand
ccuucucccuggaaagcaa

SEQ ID NO: 2342447 - RNA, 19 nt, Homo sapiens
  misc_RNA (1)...(19): siRNA sense strand
cugugaccuucuuggcuaa

SEQ ID NO: 2342448 - RNA, 19 nt, Homo sapiens
  misc_RNA (1)...(19): siRNA sense strand
augaagaguuugaggaccu

SEQ ID NO: 2342449 - RNA, 19 nt, Homo sapiens
  misc_RNA (1)...(19): siRNA sense strand
gcuucaaguccauggagga

SEQ ID NO: 2342450 - RNA, 19 nt, Homo sapiens
  misc_RNA (1)...(19): siRNA sense strand
ccgugaagaaccaguuaca

SEQ ID NO: 2342451 - RNA, 19 nt, Homo sapiens
  misc_RNA (1)...(19): siRNA sense strand
aggagaagccccaguguuu

SEQ ID NO: 2342452 - RNA, 19 nt, Homo sapiens
  misc_RNA (1)...(19): siRNA sense strand
ggaugaagaguuugaggac

SEQ ID NO: 2342453 - RNA, 19 nt, Homo sapiens
  misc_RNA (1)...(19): siRNA sense strand
augaagaguuugaggaccu

SEQ ID NO: 2342454 - RNA, 19 nt, Homo sapiens
  misc_RNA (1)...(19): siRNA sense strand
gcuucaaguccauggagga

SEQ ID NO: 2342455 - RNA, 19 nt, Homo sapiens
  misc_RNA (1)...(19): siRNA sense strand
ccgugaagaaccaguuaca

SEQ ID NO: 2342456 - RNA, 19 nt, Homo sapiens
  misc_RNA (1)...(19): siRNA sense strand
aggagaagccccaguguuu

SEQ ID NO: 2342457 - RNA, 19 nt, Homo sapiens
  misc_RNA (1)...(19): siRNA sense strand
ggaugaagaguuugaggac

SEQ ID NO: 2342458 - RNA, 19 nt, Homo sapiens
  misc_RNA (1)...(19): siRNA sense strand
acaacaaggagcagauaca

SEQ ID NO: 2342459 - RNA, 19 nt, Homo sapiens
  misc_RNA (1)...(19): siRNA sense strand
acagaagaucauugagaca

SEQ ID NO: 2342460 - RNA, 19 nt, Homo sapiens
  misc_RNA (1)...(19): siRNA sense strand
ggcaaagggaaaagaacua

SEQ ID NO: 2342461 - RNA, 19 nt, Homo sapiens
  misc_RNA (1)...(19): siRNA sense strand
uggagauggaguugaauga

SEQ ID NO: 2342462 - RNA, 19 nt, Homo sapiens
  misc_RNA (1)...(19): siRNA sense strand
ccgcaugguuggaggagug

SEQ ID NO: 2342463 - RNA, 19 nt, Homo sapiens
  misc_RNA (1)...(19): siRNA sense strand
agaacaacaaggagcagau

SEQ ID NO: 2342464 - RNA, 19 nt, Homo sapiens
  misc_RNA (1)...(19): siRNA sense strand
agcuucaggcaaagggaaa

SEQ ID NO: 2342465 - RNA, 19 nt, Homo sapiens
  misc_RNA (1)...(19): siRNA sense strand
ccgcuuuggagaacaacaa

SEQ ID NO: 2342466 - RNA, 19 nt, Homo sapiens
  misc_RNA (1)...(19): siRNA sense strand
acugaaggagguagaugaa

SEQ ID NO: 2342467 - RNA, 19 nt, Homo sapiens
  misc_RNA (1)...(19): siRNA sense strand
agaagaucauugagacacu

SEQ ID NO: 2342468 - RNA, 19 nt, Homo sapiens
  misc_RNA (1)...(19): siRNA sense strand
acauaaaccuugaagcuga

SEQ ID NO: 2342469 - RNA, 19 nt, Homo sapiens
  misc_RNA (1)...(19): siRNA sense strand
aagaagaaauugacgccuu

SEQ ID NO: 2342470 - RNA, 19 nt, Homo sapiens
  misc_RNA (1)...(19): siRNA sense strand
uguuagaagaagcaaagaa

SEQ ID NO: 2342471 - RNA, 19 nt, Homo sapiens
  misc_RNA (1)...(19): siRNA sense strand
uaaacaaauuugcacggaa

SEQ ID NO: 2342472 - RNA, 19 nt, Homo sapiens
  misc_RNA (1)...(19): siRNA sense strand
guagaaucacagagcugaa

SEQ ID NO: 2342473 - RNA, 19 nt, Homo sapiens
  misc_RNA (1)...(19): siRNA sense strand
augcaaaauucgggagcaa

SEQ ID NO: 2342474 - RNA, 19 nt, Homo sapiens
  misc_RNA (1)...(19): siRNA sense strand
gcaaaauucgggagcaaca

SEQ ID NO: 2342475 - RNA, 19 nt, Homo sapiens
  misc_RNA (1)...(19): siRNA sense strand
agaaauguuagaagaagca

SEQ ID NO: 2342476 - RNA, 19 nt, Homo sapiens
  misc_RNA (1)...(19): siRNA sense strand
ggucaagagucgugggaug

SEQ ID NO: 2342477 - RNA, 19 nt, Homo sapiens
  misc_RNA (1)...(19): siRNA sense strand
agaagauagaggugaggaa

SEQ ID NO: 2342478 - RNA, 19 nt, Homo sapiens
  misc_RNA (1)...(19): siRNA sense strand
auugaauagcagagagcaa

SEQ ID NO: 2342479 - RNA, 19 nt, Homo sapiens
  misc_RNA (1)...(19): siRNA sense strand
aggaaaggucucagaugaa

SEQ ID NO: 2342480 - RNA, 19 nt, Homo sapiens
  misc_RNA (1)...(19): siRNA sense strand
gcuaaagcauggauggacu

SEQ ID NO: 2342481 - RNA, 19 nt, Homo sapiens
  misc_RNA (1)...(19): siRNA sense strand
ggaucacaaugaaggccaa

SEQ ID NO: 2342482 - RNA, 19 nt, Homo sapiens
  misc_RNA (1)...(19): siRNA sense strand
cugccaaggaguucacaaa

SEQ ID NO: 2342483 - RNA, 19 nt, Homo sapiens
  misc_RNA (1)...(19): siRNA sense strand
cagaggagguagagagcag

SEQ ID NO: 2342484 - RNA, 19 nt, Homo sapiens
  misc_RNA (1)...(19): siRNA sense strand
acaaagacuuggagagcug

SEQ ID NO: 2342485 - RNA, 19 nt, Homo sapiens
  misc_RNA (1)...(19): siRNA sense strand
ucaacaagacugcggccaa

SEQ ID NO: 2342486 - RNA, 19 nt, Homo sapiens
  misc_RNA (1)...(19): siRNA sense strand
ggaugaaguuugcugagga

SEQ ID NO: 2342487 - RNA, 19 nt, Homo sapiens
  misc_RNA (1)...(19): siRNA sense strand
gcaagacacucauggggua

SEQ ID NO: 2342488 - RNA, 19 nt, Homo sapiens
  misc_RNA (1)...(19): siRNA sense strand
ggcgacaucaagaaggaaa

SEQ ID NO: 2342489 - RNA, 19 nt, Homo sapiens
  misc_RNA (1)...(19): siRNA sense strand
cugaaaggaaugaugcaga

SEQ ID NO: 2342490 - RNA, 19 nt, Homo sapiens
  misc_RNA (1)...(19): siRNA sense strand
ccucaggaaagggaagaaa

SEQ ID NO: 2342491 - RNA, 19 nt, Homo sapiens
  misc_RNA (1)...(19): siRNA sense strand
agaaaaggaggcagaaaga

SEQ ID NO: 2342492 - RNA, 19 nt, Homo sapiens
  misc_RNA (1)...(19): siRNA sense strand
ggacagaggagguagagag

SEQ ID NO: 2342493 - RNA, 19 nt, Homo sapiens
  misc_RNA (1)...(19): siRNA sense strand
gaagcagagagcagagcau

SEQ ID NO: 2342494 - RNA, 19 nt, Homo sapiens
  misc_RNA (1)...(19): siRNA sense strand
ccuagaagauagaggugag

SEQ ID NO: 2342495 - RNA, 19 nt, Homo sapiens
  misc_RNA (1)...(19): siRNA sense strand
gagguagagagcagggcau

SEQ ID NO: 2342496 - RNA, 19 nt, Homo sapiens
  misc_RNA (1)...(19): siRNA sense strand
cagaugaaagagaggguac

SEQ ID NO: 2342497 - RNA, 19 nt, Homo sapiens
  misc_RNA (1)...(19): siRNA sense strand
ugagaagcacccagaacau

SEQ ID NO: 2342498 - RNA, 19 nt, Homo sapiens
  misc_RNA (1)...(19): siRNA sense strand
cuuggaggaaggaggaaaa

SEQ ID NO: 2342499 - RNA, 19 nt, Homo sapiens
  misc_RNA (1)...(19): siRNA sense strand
cgaagaaagaagaggcagc

SEQ ID NO: 2342500 - RNA, 19 nt, Homo sapiens
  misc_RNA (1)...(19): siRNA sense strand
acucaggcucucaggguga

SEQ ID NO: 2342501 - RNA, 19 nt, Homo sapiens
  misc_RNA (1)...(19): siRNA sense strand
ccucaacugcagucagaga

SEQ ID NO: 2342502 - RNA, 19 nt, Homo sapiens
  misc_RNA (1)...(19): siRNA sense strand
agaaagaggaggaagaagc

SEQ ID NO: 2342503 - RNA, 19 nt, Homo sapiens
  misc_RNA (1)...(19): siRNA sense strand
gaggaagaagcuacagcau

SEQ ID NO: 2342504 - RNA, 19 nt, Homo sapiens
  misc_RNA (1)...(19): siRNA sense strand
agguagagagcagggcaua

SEQ ID NO: 2342505 - RNA, 19 nt, Homo sapiens
  misc_RNA (1)...(19): siRNA sense strand
gguagagagcagggcauau

SEQ ID NO: 2342506 - RNA, 19 nt, Homo sapiens
  misc_RNA (1)...(19): siRNA sense strand
cagguggagagaagccaaa

SEQ ID NO: 2342507 - RNA, 19 nt, Homo sapiens
  misc_RNA (1)...(19): siRNA sense strand
uggagagaagccaaacaaa

SEQ ID NO: 2342508 - RNA, 19 nt, Homo sapiens
  misc_RNA (1)...(19): siRNA sense strand
ggucaagagucgugggaug

SEQ ID NO: 2342509 - RNA, 19 nt, Homo sapiens
  misc_RNA (1)...(19): siRNA sense strand
gcuaaagcauggauggacu

SEQ ID NO: 2342510 - RNA, 19 nt, Homo sapiens
  misc_RNA (1)...(19): siRNA sense strand
cugccaaggaguucacaaa

SEQ ID NO: 2342511 - RNA, 19 nt, Homo sapiens
  misc_RNA (1)...(19): siRNA sense strand
ggaugaaguuugcugagga

SEQ ID NO: 2342512 - RNA, 19 nt, Homo sapiens
  misc_RNA (1)...(19): siRNA sense strand
ucaacaagacugcggccaa

SEQ ID NO: 2342513 - RNA, 19 nt, Homo sapiens
  misc_RNA (1)...(19): siRNA sense strand
gcaagacacucauggggua

SEQ ID NO: 2342514 - RNA, 19 nt, Homo sapiens
  misc_RNA (1)...(19): siRNA sense strand
acucaggcucucaggguga

SEQ ID NO: 2342515 - RNA, 19 nt, Homo sapiens
  misc_RNA (1)...(19): siRNA sense strand
ggucaagagucgugggaug

SEQ ID NO: 2342516 - RNA, 19 nt, Homo sapiens
  misc_RNA (1)...(19): siRNA sense strand
agaagauagaggugaggaa

SEQ ID NO: 2342517 - RNA, 19 nt, Homo sapiens
  misc_RNA (1)...(19): siRNA sense strand
auugaauagcagagagcaa

SEQ ID NO: 2342518 - RNA, 19 nt, Homo sapiens
  misc_RNA (1)...(19): siRNA sense strand
aggaaaggucucagaugaa

SEQ ID NO: 2342519 - RNA, 19 nt, Homo sapiens
  misc_RNA (1)...(19): siRNA sense strand
gcuaaagcauggauggacu

SEQ ID NO: 2342520 - RNA, 19 nt, Homo sapiens
  misc_RNA (1)...(19): siRNA sense strand
ggaucacaaugaaggccaa

SEQ ID NO: 2342521 - RNA, 19 nt, Homo sapiens
  misc_RNA (1)...(19): siRNA sense strand
cugccaaggaguucacaaa

SEQ ID NO: 2342522 - RNA, 19 nt, Homo sapiens
  misc_RNA (1)...(19): siRNA sense strand
cagaggagguagagagcag

SEQ ID NO: 2342523 - RNA, 19 nt, Homo sapiens
  misc_RNA (1)...(19): siRNA sense strand
acaaagacuuggagagcug

SEQ ID NO: 2342524 - RNA, 19 nt, Homo sapiens
  misc_RNA (1)...(19): siRNA sense strand
ucaacaagacugcggccaa

SEQ ID NO: 2342525 - RNA, 19 nt, Homo sapiens
  misc_RNA (1)...(19): siRNA sense strand
ggaugaaguuugcugagga

SEQ ID NO: 2342526 - RNA, 19 nt, Homo sapiens
  misc_RNA (1)...(19): siRNA sense strand
gcaagacacucauggggua

SEQ ID NO: 2342527 - RNA, 19 nt, Homo sapiens
  misc_RNA (1)...(19): siRNA sense strand
ggcgacaucaagaaggaaa

SEQ ID NO: 2342528 - RNA, 19 nt, Homo sapiens
  misc_RNA (1)...(19): siRNA sense strand
cugaaaggaaugaugcaga

SEQ ID NO: 2342529 - RNA, 19 nt, Homo sapiens
  misc_RNA (1)...(19): siRNA sense strand
ccucaggaaagggaagaaa

SEQ ID NO: 2342530 - RNA, 19 nt, Homo sapiens
  misc_RNA (1)...(19): siRNA sense strand
agaaaaggaggcagaaaga

SEQ ID NO: 2342531 - RNA, 19 nt, Homo sapiens
  misc_RNA (1)...(19): siRNA sense strand
ggacagaggagguagagag

SEQ ID NO: 2342532 - RNA, 19 nt, Homo sapiens
  misc_RNA (1)...(19): siRNA sense strand
gaagcagagagcagagcau

SEQ ID NO: 2342533 - RNA, 19 nt, Homo sapiens
  misc_RNA (1)...(19): siRNA sense strand
ccuagaagauagaggugag

SEQ ID NO: 2342534 - RNA, 19 nt, Homo sapiens
  misc_RNA (1)...(19): siRNA sense strand
gagguagagagcagggcau

SEQ ID NO: 2342535 - RNA, 19 nt, Homo sapiens
  misc_RNA (1)...(19): siRNA sense strand
cagaugaaagagaggguac

SEQ ID NO: 2342536 - RNA, 19 nt, Homo sapiens
  misc_RNA (1)...(19): siRNA sense strand
ugagaagcacccagaacau

SEQ ID NO: 2342537 - RNA, 19 nt, Homo sapiens
  misc_RNA (1)...(19): siRNA sense strand
cuuggaggaaggaggaaaa

SEQ ID NO: 2342538 - RNA, 19 nt, Homo sapiens
  misc_RNA (1)...(19): siRNA sense strand
cgaagaaagaagaggcagc

SEQ ID NO: 2342539 - RNA, 19 nt, Homo sapiens
  misc_RNA (1)...(19): siRNA sense strand
acucaggcucucaggguga

SEQ ID NO: 2342540 - RNA, 19 nt, Homo sapiens
  misc_RNA (1)...(19): siRNA sense strand
ccucaacugcagucagaga

SEQ ID NO: 2342541 - RNA, 19 nt, Homo sapiens
  misc_RNA (1)...(19): siRNA sense strand
agaaagaggaggaagaagc

SEQ ID NO: 2342542 - RNA, 19 nt, Homo sapiens
  misc_RNA (1)...(19): siRNA sense strand
gaggaagaagcuacagcau

SEQ ID NO: 2342543 - RNA, 19 nt, Homo sapiens
  misc_RNA (1)...(19): siRNA sense strand
agguagagagcagggcaua

SEQ ID NO: 2342544 - RNA, 19 nt, Homo sapiens
  misc_RNA (1)...(19): siRNA sense strand
gguagagagcagggcauau

SEQ ID NO: 2342545 - RNA, 19 nt, Homo sapiens
  misc_RNA (1)...(19): siRNA sense strand
cagguggagagaagccaaa

SEQ ID NO: 2342546 - RNA, 19 nt, Homo sapiens
  misc_RNA (1)...(19): siRNA sense strand
uggagagaagccaaacaaa

SEQ ID NO: 2342547 - RNA, 19 nt, Homo sapiens
  misc_RNA (1)...(19): siRNA sense strand
cacaaaagaggguggcaaa

SEQ ID NO: 2342548 - RNA, 19 nt, Homo sapiens
  misc_RNA (1)...(19): siRNA sense strand
gcacaaaagaggguggcaa

SEQ ID NO: 2342549 - RNA, 19 nt, Homo sapiens
  misc_RNA (1)...(19): siRNA sense strand
ccgugaaacaauccgaaaa

SEQ ID NO: 2342550 - RNA, 19 nt, Homo sapiens
  misc_RNA (1)...(19): siRNA sense strand
gcgcgaacaucgacgccua

SEQ ID NO: 2342551 - RNA, 19 nt, Homo sapiens
  misc_RNA (1)...(19): siRNA sense strand
ccaagaacgccuacggcau

SEQ ID NO: 2342552 - RNA, 19 nt, Homo sapiens
  misc_RNA (1)...(19): siRNA sense strand
acgcggaggccgugaagau

SEQ ID NO: 2342553 - RNA, 19 nt, Homo sapiens
  misc_RNA (1)...(19): siRNA sense strand
gaagaggccuugaagacca

SEQ ID NO: 2342554 - RNA, 19 nt, Homo sapiens
  misc_RNA (1)...(19): siRNA sense strand
guggacaguuggaggccuu

SEQ ID NO: 2342555 - RNA, 19 nt, Homo sapiens
  misc_RNA (1)...(19): siRNA sense strand
ccugcaagaaugagcauga

SEQ ID NO: 2342556 - RNA, 19 nt, Homo sapiens
  misc_RNA (1)...(19): siRNA sense strand
ucaucaaggagaaggcaga

SEQ ID NO: 2342557 - RNA, 19 nt, Homo sapiens
  misc_RNA (1)...(19): siRNA sense strand
ccaugaucaaggaagggaa

SEQ ID NO: 2342558 - RNA, 19 nt, Homo sapiens
  misc_RNA (1)...(19): siRNA sense strand
ccgugaagauucuggugca

SEQ ID NO: 2342559 - RNA, 19 nt, Homo sapiens
  misc_RNA (1)...(19): siRNA sense strand
aguuggaggccuugagguu

SEQ ID NO: 2342560 - RNA, 19 nt, Homo sapiens
  misc_RNA (1)...(19): siRNA sense strand
agaaugagcaugaggaggu

SEQ ID NO: 2342561 - RNA, 19 nt, Homo sapiens
  misc_RNA (1)...(19): siRNA sense strand
augcagaaauacagcagca

SEQ ID NO: 2342562 - RNA, 19 nt, Homo sapiens
  misc_RNA (1)...(19): siRNA sense strand
ugaucaaggaagggaagaa

SEQ ID NO: 2342563 - RNA, 19 nt, Homo sapiens
  misc_RNA (1)...(19): siRNA sense strand
ccuugagguucuuagccaa

SEQ ID NO: 2342564 - RNA, 19 nt, Homo sapiens
  misc_RNA (1)...(19): siRNA sense strand
acuacaggaucgugcagau

SEQ ID NO: 2342565 - RNA, 19 nt, Homo sapiens
  misc_RNA (1)...(19): siRNA sense strand
cugcggaccccuugauaaa

SEQ ID NO: 2342566 - RNA, 19 nt, Homo sapiens
  misc_RNA (1)...(19): siRNA sense strand
gcaagaaugagcaugagga

SEQ ID NO: 2342567 - RNA, 19 nt, Homo sapiens
  misc_RNA (1)...(19): siRNA sense strand
gcaaaugaccgguggguac

SEQ ID NO: 2342568 - RNA, 19 nt, Homo sapiens
  misc_RNA (1)...(19): siRNA sense strand
accugaaagaugauggaaa

SEQ ID NO: 2342569 - RNA, 19 nt, Homo sapiens
  misc_RNA (1)...(19): siRNA sense strand
acggaaacuagaaggacau

SEQ ID NO: 2342570 - RNA, 19 nt, Homo sapiens
  misc_RNA (1)...(19): siRNA sense strand
gggcaucagaauugggugu

SEQ ID NO: 2342571 - RNA, 19 nt, Homo sapiens
  misc_RNA (1)...(19): siRNA sense strand
augauaaaauggugagguu

SEQ ID NO: 2342572 - RNA, 19 nt, Homo sapiens
  misc_RNA (1)...(19): siRNA sense strand
cccaagaaguucaggagcu

SEQ ID NO: 2342573 - RNA, 19 nt, Homo sapiens
  misc_RNA (1)...(19): siRNA sense strand
cgagggucaacgagaaaga

SEQ ID NO: 2342574 - RNA, 19 nt, Homo sapiens
  misc_RNA (1)...(19): siRNA sense strand
ccuuuggaauauggauaaa

SEQ ID NO: 2342575 - RNA, 19 nt, Homo sapiens
  misc_RNA (1)...(19): siRNA sense strand
uguuuuagcugcugggaca

SEQ ID NO: 2342576 - RNA, 19 nt, Homo sapiens
  misc_RNA (1)...(19): siRNA sense strand
gggucaacgagaaagagau

SEQ ID NO: 2342577 - RNA, 19 nt, Homo sapiens
  misc_RNA (1)...(19): siRNA sense strand
guucagucggagccaguaa

SEQ ID NO: 2342578 - RNA, 19 nt, Homo sapiens
  misc_RNA (1)...(19): siRNA sense strand
augucaauccgaagaguga

SEQ ID NO: 2342579 - RNA, 19 nt, Homo sapiens
  misc_RNA (1)...(19): siRNA sense strand
cccgagggucaacgagaaa

SEQ ID NO: 2342580 - RNA, 19 nt, Homo sapiens
  misc_RNA (1)...(19): siRNA sense strand
accugaaagaugauggaaa

SEQ ID NO: 2342581 - RNA, 19 nt, Homo sapiens
  misc_RNA (1)...(19): siRNA sense strand
gggcaucagaauugggugu

SEQ ID NO: 2342582 - RNA, 19 nt, Homo sapiens
  misc_RNA (1)...(19): siRNA sense strand
cgagggucaacgagaaaga

SEQ ID NO: 2342583 - RNA, 19 nt, Homo sapiens
  misc_RNA (1)...(19): siRNA sense strand
gggucaacgagaaagagau

SEQ ID NO: 2342584 - RNA, 19 nt, Homo sapiens
  misc_RNA (1)...(19): siRNA sense strand
guucagucggagccaguaa

SEQ ID NO: 2342585 - RNA, 19 nt, Homo sapiens
  misc_RNA (1)...(19): siRNA sense strand
cccgagggucaacgagaaa

SEQ ID NO: 2342586 - RNA, 19 nt, Homo sapiens
  misc_RNA (1)...(19): siRNA sense strand
gcaaaugaccgguggguac

SEQ ID NO: 2342587 - RNA, 19 nt, Homo sapiens
  misc_RNA (1)...(19): siRNA sense strand
accugaaagaugauggaaa

SEQ ID NO: 2342588 - RNA, 19 nt, Homo sapiens
  misc_RNA (1)...(19): siRNA sense strand
acggaaacuagaaggacau

SEQ ID NO: 2342589 - RNA, 19 nt, Homo sapiens
  misc_RNA (1)...(19): siRNA sense strand
gggcaucagaauugggugu

SEQ ID NO: 2342590 - RNA, 19 nt, Homo sapiens
  misc_RNA (1)...(19): siRNA sense strand
augauaaaauggugagguu

SEQ ID NO: 2342591 - RNA, 19 nt, Homo sapiens
  misc_RNA (1)...(19): siRNA sense strand
cccaagaaguucaggagcu

SEQ ID NO: 2342592 - RNA, 19 nt, Homo sapiens
  misc_RNA (1)...(19): siRNA sense strand
cgagggucaacgagaaaga

SEQ ID NO: 2342593 - RNA, 19 nt, Homo sapiens
  misc_RNA (1)...(19): siRNA sense strand
ccuuuggaauauggauaaa

SEQ ID NO: 2342594 - RNA, 19 nt, Homo sapiens
  misc_RNA (1)...(19): siRNA sense strand
uguuuuagcugcugggaca

SEQ ID NO: 2342595 - RNA, 19 nt, Homo sapiens
  misc_RNA (1)...(19): siRNA sense strand
gggucaacgagaaagagau

SEQ ID NO: 2342596 - RNA, 19 nt, Homo sapiens
  misc_RNA (1)...(19): siRNA sense strand
guucagucggagccaguaa

SEQ ID NO: 2342597 - RNA, 19 nt, Homo sapiens
  misc_RNA (1)...(19): siRNA sense strand
augucaauccgaagaguga

SEQ ID NO: 2342598 - RNA, 19 nt, Homo sapiens
  misc_RNA (1)...(19): siRNA sense strand
cggcagaaggagauggaga

SEQ ID NO: 2342599 - RNA, 19 nt, Homo sapiens
  misc_RNA (1)...(19): siRNA sense strand
gagcaauaccugauggcuu

SEQ ID NO: 2342600 - RNA, 19 nt, Homo sapiens
  misc_RNA (1)...(19): siRNA sense strand
ggcaagggauggaaggcca

SEQ ID NO: 2342601 - RNA, 19 nt, Homo sapiens
  misc_RNA (1)...(19): siRNA sense strand
aggaccacgaagugcguaa

SEQ ID NO: 2342602 - RNA, 19 nt, Homo sapiens
  misc_RNA (1)...(19): siRNA sense strand
aaggagauggagagcaaga

SEQ ID NO: 2342603 - RNA, 19 nt, Homo sapiens
  misc_RNA (1)...(19): siRNA sense strand
ccacgaagugcguaaggca

SEQ ID NO: 2342604 - RNA, 19 nt, Homo sapiens
  misc_RNA (1)...(19): siRNA sense strand
ggacauaacaacugcaacc

SEQ ID NO: 2342605 - RNA, 19 nt, Homo sapiens
  misc_RNA (1)...(19): siRNA sense strand
ggaaaucaaggcaagggau

SEQ ID NO: 2342606 - RNA, 19 nt, Homo sapiens
  misc_RNA (1)...(19): siRNA sense strand
gagcaauaccugauggcuu

SEQ ID NO: 2342607 - RNA, 19 nt, Homo sapiens
  misc_RNA (1)...(19): siRNA sense strand
ggcaagggauggaaggcca

SEQ ID NO: 2342608 - RNA, 19 nt, Homo sapiens
  misc_RNA (1)...(19): siRNA sense strand
aggaccacgaagugcguaa

SEQ ID NO: 2342609 - RNA, 19 nt, Homo sapiens
  misc_RNA (1)...(19): siRNA sense strand
ccacgaagugcguaaggca

SEQ ID NO: 2342610 - RNA, 19 nt, Homo sapiens
  misc_RNA (1)...(19): siRNA sense strand
ggaaaucaaggcaagggau

SEQ ID NO: 2342611 - RNA, 19 nt, Homo sapiens
  misc_RNA (1)...(19): siRNA sense strand
cggcagaaggagauggaga

SEQ ID NO: 2342612 - RNA, 19 nt, Homo sapiens
  misc_RNA (1)...(19): siRNA sense strand
gagcaauaccugauggcuu

SEQ ID NO: 2342613 - RNA, 19 nt, Homo sapiens
  misc_RNA (1)...(19): siRNA sense strand
ggcaagggauggaaggcca

SEQ ID NO: 2342614 - RNA, 19 nt, Homo sapiens
  misc_RNA (1)...(19): siRNA sense strand
aggaccacgaagugcguaa

SEQ ID NO: 2342615 - RNA, 19 nt, Homo sapiens
  misc_RNA (1)...(19): siRNA sense strand
aaggagauggagagcaaga

SEQ ID NO: 2342616 - RNA, 19 nt, Homo sapiens
  misc_RNA (1)...(19): siRNA sense strand
ccacgaagugcguaaggca

SEQ ID NO: 2342617 - RNA, 19 nt, Homo sapiens
  misc_RNA (1)...(19): siRNA sense strand
ggacauaacaacugcaacc

SEQ ID NO: 2342618 - RNA, 19 nt, Homo sapiens
  misc_RNA (1)...(19): siRNA sense strand
ggaaaucaaggcaagggau

SEQ ID NO: 2342619 - RNA, 19 nt, Homo sapiens
  misc_RNA (1)...(19): siRNA sense strand
gugagagacuagugagcaa

SEQ ID NO: 2342620 - RNA, 19 nt, Homo sapiens
  misc_RNA (1)...(19): siRNA sense strand
gugaagaaacugaagacaa

SEQ ID NO: 2342621 - RNA, 19 nt, Homo sapiens
  misc_RNA (1)...(19): siRNA sense strand
cagaaguggcagaggaaga

SEQ ID NO: 2342622 - RNA, 19 nt, Homo sapiens
  misc_RNA (1)...(19): siRNA sense strand
gcgcuaaggucauugggaa

SEQ ID NO: 2342623 - RNA, 19 nt, Homo sapiens
  misc_RNA (1)...(19): siRNA sense strand
ggacauaccuauuggcucu

SEQ ID NO: 2342624 - RNA, 19 nt, Homo sapiens
  misc_RNA (1)...(19): siRNA sense strand
gcgauauagugaagcucua

SEQ ID NO: 2342625 - RNA, 19 nt, Homo sapiens
  misc_RNA (1)...(19): siRNA sense strand
acaugaugaugaagaagaa

SEQ ID NO: 2342626 - RNA, 19 nt, Homo sapiens
  misc_RNA (1)...(19): siRNA sense strand
gggaugaacugaaacguga

SEQ ID NO: 2342627 - RNA, 19 nt, Homo sapiens
  misc_RNA (1)...(19): siRNA sense strand
gugaagaggaggaagagau

SEQ ID NO: 2342628 - RNA, 19 nt, Homo sapiens
  misc_RNA (1)...(19): siRNA sense strand
cagaaauacggaagagcau

SEQ ID NO: 2342629 - RNA, 19 nt, Homo sapiens
  misc_RNA (1)...(19): siRNA sense strand
aggagcagauugagaaaga

SEQ ID NO: 2342630 - RNA, 19 nt, Homo sapiens
  misc_RNA (1)...(19): siRNA sense strand
cggaauauucuauggacau

SEQ ID NO: 2342631 - RNA, 19 nt, Homo sapiens
  misc_RNA (1)...(19): siRNA sense strand
ugaugaacaccuuaggaaa

SEQ ID NO: 2342632 - RNA, 19 nt, Homo sapiens
  misc_RNA (1)...(19): siRNA sense strand
ugccaugagucuucagaaa

SEQ ID NO: 2342633 - RNA, 19 nt, Homo sapiens
  misc_RNA (1)...(19): siRNA sense strand
cuggaaagaaucaacguua

SEQ ID NO: 2342634 - RNA, 19 nt, Homo sapiens
  misc_RNA (1)...(19): siRNA sense strand
guauuaaagagaaugggua

SEQ ID NO: 2342635 - RNA, 19 nt, Homo sapiens
  misc_RNA (1)...(19): siRNA sense strand
gaucagaaguggcagagga

SEQ ID NO: 2342636 - RNA, 19 nt, Homo sapiens
  misc_RNA (1)...(19): siRNA sense strand
ccaaagaaggacauaccua

SEQ ID NO: 2342637 - RNA, 19 nt, Homo sapiens
  misc_RNA (1)...(19): siRNA sense strand
uuauugauucagugggaaa

SEQ ID NO: 2342638 - RNA, 19 nt, Homo sapiens
  misc_RNA (1)...(19): siRNA sense strand
cgggaaggcucaugcggau

SEQ ID NO: 2342639 - RNA, 19 nt, Homo sapiens
  misc_RNA (1)...(19): siRNA sense strand
ccgcagaacagcaggaauc

SEQ ID NO: 2342640 - RNA, 19 nt, Homo sapiens
  misc_RNA (1)...(19): siRNA sense strand
gcuucuuaauugucugaaa

SEQ ID NO: 2342641 - RNA, 19 nt, Homo sapiens
  misc_RNA (1)...(19): siRNA sense strand
agaauagcaauguuggaaa

SEQ ID NO: 2342642 - RNA, 19 nt, Homo sapiens
  misc_RNA (1)...(19): siRNA sense strand
uggaaagaaucaacguuau

SEQ ID NO: 2342643 - RNA, 19 nt, Homo sapiens
  misc_RNA (1)...(19): siRNA sense strand
cagcaaugccguucaguga

SEQ ID NO: 2342644 - RNA, 19 nt, Homo sapiens
  misc_RNA (1)...(19): siRNA sense strand
cuauggaacuauuagaaca

SEQ ID NO: 2342645 - RNA, 19 nt, Homo sapiens
  misc_RNA (1)...(19): siRNA sense strand
gucugaaauuacuggacaa

SEQ ID NO: 2342646 - RNA, 19 nt, Homo sapiens
  misc_RNA (1)...(19): siRNA sense strand
acggaagagcauuacgaua

SEQ ID NO: 2342647 - RNA, 19 nt, Homo sapiens
  misc_RNA (1)...(19): siRNA sense strand
caaaagaagaccaggagau

SEQ ID NO: 2342648 - RNA, 19 nt, Homo sapiens
  misc_RNA (1)...(19): siRNA sense strand
ggcaauuauuccagucaau

SEQ ID NO: 2342649 - RNA, 19 nt, Homo sapiens
  misc_RNA (1)...(19): siRNA sense strand
auugggaacacgagacaua

SEQ ID NO: 2342650 - RNA, 19 nt, Homo sapiens
  misc_RNA (1)...(19): siRNA sense strand
caaaccaauuaaugugcua

SEQ ID NO: 2342651 - RNA, 19 nt, Homo sapiens
  misc_RNA (1)...(19): siRNA sense strand
aaagcaaguggcagcgaua

SEQ ID NO: 2342652 - RNA, 19 nt, Homo sapiens
  misc_RNA (1)...(19): siRNA sense strand
guuacgagagagugccaaa

SEQ ID NO: 2342653 - RNA, 19 nt, Homo sapiens
  misc_RNA (1)...(19): siRNA sense strand
cauauuuggaggaggcaga

SEQ ID NO: 2342654 - RNA, 19 nt, Homo sapiens
  misc_RNA (1)...(19): siRNA sense strand
auagugaagaggaggaaga

SEQ ID NO: 2342655 - RNA, 19 nt, Homo sapiens
  misc_RNA (1)...(19): siRNA sense strand
caagucuguuggagaacua

SEQ ID NO: 2342656 - RNA, 19 nt, Homo sapiens
  misc_RNA (1)...(19): siRNA sense strand
cggaagagcauuacgauac

SEQ ID NO: 2342657 - RNA, 19 nt, Homo sapiens
  misc_RNA (1)...(19): siRNA sense strand
gcaagucgcacgugagcau

SEQ ID NO: 2342658 - RNA, 19 nt, Homo sapiens
  misc_RNA (1)...(19): siRNA sense strand
agggauaacaacaaaccaa

SEQ ID NO: 2342659 - RNA, 19 nt, Homo sapiens
  misc_RNA (1)...(19): siRNA sense strand
ugaacugaaacgugaauuu

SEQ ID NO: 2342660 - RNA, 19 nt, Homo sapiens
  misc_RNA (1)...(19): siRNA sense strand
agcaaguggcagcgauaua

SEQ ID NO: 2342661 - RNA, 19 nt, Homo sapiens
  misc_RNA (1)...(19): siRNA sense strand
agaugauagcaaagcagua

SEQ ID NO: 2342662 - RNA, 19 nt, Homo sapiens
  misc_RNA (1)...(19): siRNA sense strand
gggaaaugauguggauguu

SEQ ID NO: 2342663 - RNA, 19 nt, Homo sapiens
  misc_RNA (1)...(19): siRNA sense strand
gggcaauuauuccagucaa

SEQ ID NO: 2342664 - RNA, 19 nt, Homo sapiens
  misc_RNA (1)...(19): siRNA sense strand
agggagaauccgaggaauc

SEQ ID NO: 2342665 - RNA, 19 nt, Homo sapiens
  misc_RNA (1)...(19): siRNA sense strand
ggagcuuauagaagaauuu

SEQ ID NO: 2342666 - RNA, 19 nt, Homo sapiens
  misc_RNA (1)...(19): siRNA sense strand
ggauaacaacaaaccaauu

SEQ ID NO: 2342667 - RNA, 19 nt, Homo sapiens
  misc_RNA (1)...(19): siRNA sense strand
aagaaacacuauggaacua

SEQ ID NO: 2342668 - RNA, 19 nt, Homo sapiens
  misc_RNA (1)...(19): siRNA sense strand
gugaugaacaccuuaggaa

SEQ ID NO: 2342669 - RNA, 19 nt, Homo sapiens
  misc_RNA (1)...(19): siRNA sense strand
uggcauggcauaugacuuu

SEQ ID NO: 2342670 - RNA, 19 nt, Homo sapiens
  misc_RNA (1)...(19): siRNA sense strand
ucggaauauucuauggaca

SEQ ID NO: 2342671 - RNA, 19 nt, Homo sapiens
  misc_RNA (1)...(19): siRNA sense strand
gcuaacuggaauugacuau

SEQ ID NO: 2342672 - RNA, 19 nt, Homo sapiens
  misc_RNA (1)...(19): siRNA sense strand
uggacaugguugaaagagu

SEQ ID NO: 2342673 - RNA, 19 nt, Homo sapiens
  misc_RNA (1)...(19): siRNA sense strand
uuacaugcuuucagaacuu

SEQ ID NO: 2342674 - RNA, 19 nt, Homo sapiens
  misc_RNA (1)...(19): siRNA sense strand
agacagaagaaauucccaa

SEQ ID NO: 2342675 - RNA, 19 nt, Homo sapiens
  misc_RNA (1)...(19): siRNA sense strand
ccagaaugcaaauaauaga

SEQ ID NO: 2342676 - RNA, 19 nt, Homo sapiens
  misc_RNA (1)...(19): siRNA sense strand
ugggaaaugauguggaugu

SEQ ID NO: 2342677 - RNA, 19 nt, Homo sapiens
  misc_RNA (1)...(19): siRNA sense strand
ccaguucagaucagacaaa

SEQ ID NO: 2342678 - RNA, 19 nt, Homo sapiens
  misc_RNA (1)...(19): siRNA sense strand
gggauaacaacaaaccaau

SEQ ID NO: 2342679 - RNA, 19 nt, Homo sapiens
  misc_RNA (1)...(19): siRNA sense strand
aauaaagggaggagaugaa

SEQ ID NO: 2342680 - RNA, 19 nt, Homo sapiens
  misc_RNA (1)...(19): siRNA sense strand
uggaauaaagggaggagau

SEQ ID NO: 2342681 - RNA, 19 nt, Homo sapiens
  misc_RNA (1)...(19): siRNA sense strand
uggaagaaauggauggguu

SEQ ID NO: 2342682 - RNA, 19 nt, Homo sapiens
  misc_RNA (1)...(19): siRNA sense strand
gggauuuggagaagaugaa

SEQ ID NO: 2342683 - RNA, 19 nt, Homo sapiens
  misc_RNA (1)...(19): siRNA sense strand
aggagagacaggaggauga

SEQ ID NO: 2342684 - RNA, 19 nt, Homo sapiens
  misc_RNA (1)...(19): siRNA sense strand
ggaccagauggaagaauau

SEQ ID NO: 2342685 - RNA, 19 nt, Homo sapiens
  misc_RNA (1)...(19): siRNA sense strand
aauucaagccauucaguaa

SEQ ID NO: 2342686 - RNA, 19 nt, Homo sapiens
  misc_RNA (1)...(19): siRNA sense strand
uggagaucguaaugggaau

SEQ ID NO: 2342687 - RNA, 19 nt, Homo sapiens
  misc_RNA (1)...(19): siRNA sense strand
agcaaaguccugugacaaa

SEQ ID NO: 2342688 - RNA, 19 nt, Homo sapiens
  misc_RNA (1)...(19): siRNA sense strand
ggaaagaaacgaagggagc

SEQ ID NO: 2342689 - RNA, 19 nt, Homo sapiens
  misc_RNA (1)...(19): siRNA sense strand
ugacaaaguggaagagauc

SEQ ID NO: 2342690 - RNA, 19 nt, Homo sapiens
  misc_RNA (1)...(19): siRNA sense strand
agaugaaagaggacugcua

SEQ ID NO: 2342691 - RNA, 19 nt, Homo sapiens
  misc_RNA (1)...(19): siRNA sense strand
agaagaugaacuaggugaa

SEQ ID NO: 2342692 - RNA, 19 nt, Homo sapiens
  misc_RNA (1)...(19): siRNA sense strand
agaauaugacaaaguggaa

SEQ ID NO: 2342693 - RNA, 19 nt, Homo sapiens
  misc_RNA (1)...(19): siRNA sense strand
guggaagagaucagcagaa

SEQ ID NO: 2342694 - RNA, 19 nt, Homo sapiens
  misc_RNA (1)...(19): siRNA sense strand
gggaggagaugaaagagga

SEQ ID NO: 2342695 - RNA, 19 nt, Homo sapiens
  misc_RNA (1)...(19): siRNA sense strand
gagaagaugaacuagguga

SEQ ID NO: 2342696 - RNA, 19 nt, Homo sapiens
  misc_RNA (1)...(19): siRNA sense strand
augacaaaguggaagagau

SEQ ID NO: 2342697 - RNA, 19 nt, Homo sapiens
  misc_RNA (1)...(19): siRNA sense strand
caucuugggauuuggagaa

SEQ ID NO: 2342698 - RNA, 19 nt, Homo sapiens
  misc_RNA (1)...(19): siRNA sense strand
agauggaagaauaugacaa

SEQ ID NO: 2342699 - RNA, 19 nt, Homo sapiens
  misc_RNA (1)...(19): siRNA sense strand
uucuuaggguuguggaaua

SEQ ID NO: 2342700 - RNA, 19 nt, Homo sapiens
  misc_RNA (1)...(19): siRNA sense strand
auggauggguuaagugauu

SEQ ID NO: 2342701 - RNA, 19 nt, Homo sapiens
  misc_RNA (1)...(19): siRNA sense strand
aaccaagaacggugggcua

SEQ ID NO: 2342702 - RNA, 19 nt, Homo sapiens
  misc_RNA (1)...(19): siRNA sense strand
cagaaagauuguauggaag

SEQ ID NO: 2342703 - RNA, 19 nt, Homo sapiens
  misc_RNA (1)...(19): siRNA sense strand
ggacagaaacauccgcaga

SEQ ID NO: 2342704 - RNA, 19 nt, Homo sapiens
  misc_RNA (1)...(19): siRNA sense strand
gggaaguuacuggaggaaa

SEQ ID NO: 2342705 - RNA, 19 nt, Homo sapiens
  misc_RNA (1)...(19): siRNA sense strand
aggcagaugugcuguggau

SEQ ID NO: 2342706 - RNA, 19 nt, Homo sapiens
  misc_RNA (1)...(19): siRNA sense strand
gaagcuacguguuuggaga

SEQ ID NO: 2342707 - RNA, 19 nt, Homo sapiens
  misc_RNA (1)...(19): siRNA sense strand
cuuuaaugccugaggaaug

SEQ ID NO: 2342708 - RNA, 19 nt, Homo sapiens
  misc_RNA (1)...(19): siRNA sense strand
ggagcaaggaggagaaggu

SEQ ID NO: 2342709 - RNA, 19 nt, Homo sapiens
  misc_RNA (1)...(19): siRNA sense strand
aagaaaagaugguggguug

SEQ ID NO: 2342710 - RNA, 19 nt, Homo sapiens
  misc_RNA (1)...(19): siRNA sense strand
uggaagaauaugacaaagu

SEQ ID NO: 2342711 - RNA, 19 nt, Homo sapiens
  misc_RNA (1)...(19): siRNA sense strand
cagcaaaguccugugacaa

SEQ ID NO: 2342712 - RNA, 19 nt, Homo sapiens
  misc_RNA (1)...(19): siRNA sense strand
ccugaggaaugcagagcca

SEQ ID NO: 2342713 - RNA, 19 nt, Homo sapiens
  misc_RNA (1)...(19): siRNA sense strand
gcgccuggagaauaagaua

SEQ ID NO: 2342714 - RNA, 19 nt, Homo sapiens
  misc_RNA (1)...(19): siRNA sense strand
aauaugacaaaguggaaga

SEQ ID NO: 2342715 - RNA, 19 nt, Homo sapiens
  misc_RNA (1)...(19): siRNA sense strand
gugggaaguuacuggagga

SEQ ID NO: 2342716 - RNA, 19 nt, Homo sapiens
  misc_RNA (1)...(19): siRNA sense strand
ggaugauuacacuggauga

SEQ ID NO: 2342717 - RNA, 19 nt, Homo sapiens
  misc_RNA (1)...(19): siRNA sense strand
gaaggugccugaaugggaa

SEQ ID NO: 2342718 - RNA, 19 nt, Homo sapiens
  misc_RNA (1)...(19): siRNA sense strand
gaugcuaaguuuggggaaa

SEQ ID NO: 2342719 - RNA, 19 nt, Homo sapiens
  misc_RNA (1)...(19): siRNA sense strand
aaacagaucaucagccaga

SEQ ID NO: 2342720 - RNA, 19 nt, Homo sapiens
  misc_RNA (1)...(19): siRNA sense strand
agucagaggaccagcaucu

SEQ ID NO: 2342721 - RNA, 19 nt, Homo sapiens
  misc_RNA (1)...(19): siRNA sense strand
ccggucacaucuugggauu

SEQ ID NO: 2342722 - RNA, 19 nt, Homo sapiens
  misc_RNA (1)...(19): siRNA sense strand
uagacaucccacugauaua

SEQ ID NO: 2342723 - RNA, 19 nt, Homo sapiens
  misc_RNA (1)...(19): siRNA sense strand
agauuaugaaagugagcca

SEQ ID NO: 2342724 - RNA, 19 nt, Homo sapiens
  misc_RNA (1)...(19): siRNA sense strand
uuucacaggcucagugcua

SEQ ID NO: 2342725 - RNA, 19 nt, Homo sapiens
  misc_RNA (1)...(19): siRNA sense strand
gcuccacgauccaggcaga

SEQ ID NO: 2342726 - RNA, 19 nt, Homo sapiens
  misc_RNA (1)...(19): siRNA sense strand
gugacaaagcaguggcaag

SEQ ID NO: 2342727 - RNA, 19 nt, Homo sapiens
  misc_RNA (1)...(19): siRNA sense strand
caguaaugguccuuugguu

SEQ ID NO: 2342728 - RNA, 19 nt, Homo sapiens
  misc_RNA (1)...(19): siRNA sense strand
auuuggagaagaugaacua

SEQ ID NO: 2342729 - RNA, 19 nt, Homo sapiens
  misc_RNA (1)...(19): siRNA sense strand
gggaaagaaacgaagggag

SEQ ID NO: 2342730 - RNA, 19 nt, Homo sapiens
  misc_RNA (1)...(19): siRNA sense strand
gcggaugaguuuugcuuuu

SEQ ID NO: 2342731 - RNA, 19 nt, Homo sapiens
  misc_RNA (1)...(19): siRNA sense strand
caucuaacuacuuggacca

SEQ ID NO: 2342732 - RNA, 19 nt, Homo sapiens
  misc_RNA (1)...(19): siRNA sense strand
gaggagaaggugccugaau

SEQ ID NO: 2342733 - RNA, 19 nt, Homo sapiens
  misc_RNA (1)...(19): siRNA sense strand
ucaaaguggaauaaaggga

SEQ ID NO: 2342734 - RNA, 19 nt, Homo sapiens
  misc_RNA (1)...(19): siRNA sense strand
cuugggauuuggagaagau

SEQ ID NO: 2342735 - RNA, 19 nt, Homo sapiens
  misc_RNA (1)...(19): siRNA sense strand
cugaagaagaaaaggcuaa

SEQ ID NO: 2342736 - RNA, 19 nt, Homo sapiens
  misc_RNA (1)...(19): siRNA sense strand
gcgacgaagaggagcugaa

SEQ ID NO: 2342737 - RNA, 19 nt, Homo sapiens
  misc_RNA (1)...(19): siRNA sense strand
gcuucuacaccaagaggaa

SEQ ID NO: 2342738 - RNA, 19 nt, Homo sapiens
  misc_RNA (1)...(19): siRNA sense strand
cuccgaaagaagagcauua

SEQ ID NO: 2342739 - RNA, 19 nt, Homo sapiens
  misc_RNA (1)...(19): siRNA sense strand
acuuugaggugcagcggua

SEQ ID NO: 2342740 - RNA, 19 nt, Homo sapiens
  misc_RNA (1)...(19): siRNA sense strand
gcgacaaggucaagagcag

SEQ ID NO: 2342741 - RNA, 19 nt, Homo sapiens
  misc_RNA (1)...(19): siRNA sense strand
cuggagaaccacacagcaa

SEQ ID NO: 2342742 - RNA, 19 nt, Homo sapiens
  misc_RNA (1)...(19): siRNA sense strand
cguucguggucaacaggaa

SEQ ID NO: 2342743 - RNA, 19 nt, Homo sapiens
  misc_RNA (1)...(19): siRNA sense strand
agaaaucagaagagggaag

SEQ ID NO: 2342744 - RNA, 19 nt, Homo sapiens
  misc_RNA (1)...(19): siRNA sense strand
aggacaacuuugaggugca

SEQ ID NO: 2342745 - RNA, 19 nt, Homo sapiens
  misc_RNA (1)...(19): siRNA sense strand
gggaauugacaucggugau

SEQ ID NO: 2342746 - RNA, 19 nt, Homo sapiens
  misc_RNA (1)...(19): siRNA sense strand
uaagaaaucagaagaggga

SEQ ID NO: 2342747 - RNA, 19 nt, Homo sapiens
  misc_RNA (1)...(19): siRNA sense strand
acaucaaacaggacaacuu

SEQ ID NO: 2342748 - RNA, 19 nt, Homo sapiens
  misc_RNA (1)...(19): siRNA sense strand
acaacaucaaacaggacaa

SEQ ID NO: 2342749 - RNA, 19 nt, Homo sapiens
  misc_RNA (1)...(19): siRNA sense strand
ccaaguguaaggagcucaa

SEQ ID NO: 2342750 - RNA, 19 nt, Homo sapiens
  misc_RNA (1)...(19): siRNA sense strand
gagcggaagaagaagccau

SEQ ID NO: 2342751 - RNA, 19 nt, Homo sapiens
  misc_RNA (1)...(19): siRNA sense strand
aggaaaucauucuggugga

SEQ ID NO: 2342752 - RNA, 19 nt, Homo sapiens
  misc_RNA (1)...(19): siRNA sense strand
gaggaaugcucuucgcguu

SEQ ID NO: 2342753 - RNA, 19 nt, Homo sapiens
  misc_RNA (1)...(19): siRNA sense strand
uggcccacauugagcggaa

SEQ ID NO: 2342754 - RNA, 19 nt, Homo sapiens
  misc_RNA (1)...(19): siRNA sense strand
gcugcucguucguggucaa

SEQ ID NO: 2342755 - RNA, 19 nt, Homo sapiens
  misc_RNA (1)...(19): siRNA sense strand
cggugaugucuccgaaaga

SEQ ID NO: 2342756 - RNA, 19 nt, Homo sapiens
  misc_RNA (1)...(19): siRNA sense strand
gagaagagucaaagugcug

SEQ ID NO: 2342757 - RNA, 19 nt, Homo sapiens
  misc_RNA (1)...(19): siRNA sense strand
ggaugacaacagcgacgaa

SEQ ID NO: 2342758 - RNA, 19 nt, Homo sapiens
  misc_RNA (1)...(19): siRNA sense strand
acgaagaggagcugaaggu

SEQ ID NO: 2342759 - RNA, 19 nt, Homo sapiens
  misc_RNA (1)...(19): siRNA sense strand
aggccuaugccaagguaaa

SEQ ID NO: 2342760 - RNA, 19 nt, Homo sapiens
  misc_RNA (1)...(19): siRNA sense strand
acacagaucuggauggagu

SEQ ID NO: 2342761 - RNA, 19 nt, Homo sapiens
  misc_RNA (1)...(19): siRNA sense strand
agagaagagugcugggacu

SEQ ID NO: 2342762 - RNA, 19 nt, Homo sapiens
  misc_RNA (1)...(19): siRNA sense strand
agaaguuggugaagggcca

SEQ ID NO: 2342763 - RNA, 19 nt, Homo sapiens
  misc_RNA (1)...(19): siRNA sense strand
ccguacacuugaagcguga

SEQ ID NO: 2342764 - RNA, 19 nt, Homo sapiens
  misc_RNA (1)...(19): siRNA sense strand
cagaagaggagauugacga

SEQ ID NO: 2342765 - RNA, 19 nt, Homo sapiens
  misc_RNA (1)...(19): siRNA sense strand
aguucaacauccuguggaa

SEQ ID NO: 2342766 - RNA, 19 nt, Homo sapiens
  misc_RNA (1)...(19): siRNA sense strand
ccaucaaguaccugggcca

SEQ ID NO: 2342767 - RNA, 19 nt, Homo sapiens
  misc_RNA (1)...(19): siRNA sense strand
ccuccaagaccuauggcau

SEQ ID NO: 2342768 - RNA, 19 nt, Homo sapiens
  misc_RNA (1)...(19): siRNA sense strand
aggagauugacgagaacuu

SEQ ID NO: 2342769 - RNA, 19 nt, Homo sapiens
  misc_RNA (1)...(19): siRNA sense strand
agaucagcgugaaggaguu

SEQ ID NO: 2342770 - RNA, 19 nt, Homo sapiens
  misc_RNA (1)...(19): siRNA sense strand
cuguggagcuggaugacca

SEQ ID NO: 2342771 - RNA, 19 nt, Homo sapiens
  misc_RNA (1)...(19): siRNA sense strand
uugagaaggccuaugccaa

SEQ ID NO: 2342772 - RNA, 19 nt, Homo sapiens
  misc_RNA (1)...(19): siRNA sense strand
ggauggagcuacccgcaca

SEQ ID NO: 2342773 - RNA, 19 nt, Homo sapiens
  misc_RNA (1)...(19): siRNA sense strand
cggccagagcuuccagaau

SEQ ID NO: 2342774 - RNA, 19 nt, Homo sapiens
  misc_RNA (1)...(19): siRNA sense strand
gugacuucuuccuggccaa

SEQ ID NO: 2342775 - RNA, 19 nt, Homo sapiens
  misc_RNA (1)...(19): siRNA sense strand
cauggaucgugauggcaau

SEQ ID NO: 2342776 - RNA, 19 nt, Homo sapiens
  misc_RNA (1)...(19): siRNA sense strand
auuaaaugguggaggagga

SEQ ID NO: 2342777 - RNA, 19 nt, Homo sapiens
  misc_RNA (1)...(19): siRNA sense strand
cggucaagaaagaguagaa

SEQ ID NO: 2342778 - RNA, 19 nt, Homo sapiens
  misc_RNA (1)...(19): siRNA sense strand
aggauuaaaugguggagga

SEQ ID NO: 2342779 - RNA, 19 nt, Homo sapiens
  misc_RNA (1)...(19): siRNA sense strand
agcaaguagcggaggcaua

SEQ ID NO: 2342780 - RNA, 19 nt, Homo sapiens
  misc_RNA (1)...(19): siRNA sense strand
agaauaaagaagaagcaga

SEQ ID NO: 2342781 - RNA, 19 nt, Homo sapiens
  misc_RNA (1)...(19): siRNA sense strand
aggaggagguggaagucau

SEQ ID NO: 2342782 - RNA, 19 nt, Homo sapiens
  misc_RNA (1)...(19): siRNA sense strand
uggaggaggagguggaagu

SEQ ID NO: 2342783 - RNA, 19 nt, Homo sapiens
  misc_RNA (1)...(19): siRNA sense strand
agagaaaauucaagcaagu

SEQ ID NO: 2342784 - RNA, 19 nt, Homo sapiens
  misc_RNA (1)...(19): siRNA sense strand
gaauaaagaagaagcagag

SEQ ID NO: 2342785 - RNA, 19 nt, Homo sapiens
  misc_RNA (1)...(19): siRNA sense strand
cuaugacaaauauggcaaa

SEQ ID NO: 2342786 - RNA, 19 nt, Homo sapiens
  misc_RNA (1)...(19): siRNA sense strand
ugagaauaaagaagaagca

SEQ ID NO: 2342787 - RNA, 19 nt, Homo sapiens
  misc_RNA (1)...(19): siRNA sense strand
gaugcuaagaaacgggaca

SEQ ID NO: 2342788 - RNA, 19 nt, Homo sapiens
  misc_RNA (1)...(19): siRNA sense strand
cagaugaugucuucaggga

SEQ ID NO: 2342789 - RNA, 19 nt, Homo sapiens
  misc_RNA (1)...(19): siRNA sense strand
ccgaggaagcagaagccga

SEQ ID NO: 2342790 - RNA, 19 nt, Homo sapiens
  misc_RNA (1)...(19): siRNA sense strand
aagcagaagccgagggacg

SEQ ID NO: 2342791 - RNA, 19 nt, Homo sapiens
  misc_RNA (1)...(19): siRNA sense strand
uaaaaugguuaauggcaga

SEQ ID NO: 2342792 - RNA, 19 nt, Homo sapiens
  misc_RNA (1)...(19): siRNA sense strand
auuaaaugguggaggagga

SEQ ID NO: 2342793 - RNA, 19 nt, Homo sapiens
  misc_RNA (1)...(19): siRNA sense strand
cggucaagaaagaguagaa

SEQ ID NO: 2342794 - RNA, 19 nt, Homo sapiens
  misc_RNA (1)...(19): siRNA sense strand
aggauuaaaugguggagga

SEQ ID NO: 2342795 - RNA, 19 nt, Homo sapiens
  misc_RNA (1)...(19): siRNA sense strand
agcaaguagcggaggcaua

SEQ ID NO: 2342796 - RNA, 19 nt, Homo sapiens
  misc_RNA (1)...(19): siRNA sense strand
agaauaaagaagaagcaga

SEQ ID NO: 2342797 - RNA, 19 nt, Homo sapiens
  misc_RNA (1)...(19): siRNA sense strand
aggaggagguggaagucau

SEQ ID NO: 2342798 - RNA, 19 nt, Homo sapiens
  misc_RNA (1)...(19): siRNA sense strand
uggaggaggagguggaagu

SEQ ID NO: 2342799 - RNA, 19 nt, Homo sapiens
  misc_RNA (1)...(19): siRNA sense strand
agagaaaauucaagcaagu

SEQ ID NO: 2342800 - RNA, 19 nt, Homo sapiens
  misc_RNA (1)...(19): siRNA sense strand
gaauaaagaagaagcagag

SEQ ID NO: 2342801 - RNA, 19 nt, Homo sapiens
  misc_RNA (1)...(19): siRNA sense strand
cuaugacaaauauggcaaa

SEQ ID NO: 2342802 - RNA, 19 nt, Homo sapiens
  misc_RNA (1)...(19): siRNA sense strand
ugagaauaaagaagaagca

SEQ ID NO: 2342803 - RNA, 19 nt, Homo sapiens
  misc_RNA (1)...(19): siRNA sense strand
gaugcuaagaaacgggaca

SEQ ID NO: 2342804 - RNA, 19 nt, Homo sapiens
  misc_RNA (1)...(19): siRNA sense strand
cagaugaugucuucaggga

SEQ ID NO: 2342805 - RNA, 19 nt, Homo sapiens
  misc_RNA (1)...(19): siRNA sense strand
ccgaggaagcagaagccga

SEQ ID NO: 2342806 - RNA, 19 nt, Homo sapiens
  misc_RNA (1)...(19): siRNA sense strand
aagcagaagccgagggacg

SEQ ID NO: 2342807 - RNA, 19 nt, Homo sapiens
  misc_RNA (1)...(19): siRNA sense strand
uaaaaugguuaauggcaga

SEQ ID NO: 2342808 - RNA, 19 nt, Homo sapiens
  misc_RNA (1)...(19): siRNA sense strand
uggcgaaggcguuggacaa

SEQ ID NO: 2342809 - RNA, 19 nt, Homo sapiens
  misc_RNA (1)...(19): siRNA sense strand
gcaccaagacugugaggca

SEQ ID NO: 2342810 - RNA, 19 nt, Homo sapiens
  misc_RNA (1)...(19): siRNA sense strand
gcaucaucgcugaggucaa

SEQ ID NO: 2342811 - RNA, 19 nt, Homo sapiens
  misc_RNA (1)...(19): siRNA sense strand
aggagauugcugagaucaa

SEQ ID NO: 2342812 - RNA, 19 nt, Homo sapiens
  misc_RNA (1)...(19): siRNA sense strand
agguugaacugcaagccaa

SEQ ID NO: 2342813 - RNA, 19 nt, Homo sapiens
  misc_RNA (1)...(19): siRNA sense strand
agaacaagcuggaagggcu

SEQ ID NO: 2342814 - RNA, 19 nt, Homo sapiens
  misc_RNA (1)...(19): siRNA sense strand
agaucaagacccucaacaa

SEQ ID NO: 2342815 - RNA, 19 nt, Homo sapiens
  misc_RNA (1)...(19): siRNA sense strand
uggcaguggucuuggcguu

SEQ ID NO: 2342816 - RNA, 19 nt, Homo sapiens
  misc_RNA (1)...(19): siRNA sense strand
gcugaauggcgaaggcguu

SEQ ID NO: 2342817 - RNA, 19 nt, Homo sapiens
  misc_RNA (1)...(19): siRNA sense strand
ggcagaaccuggagccguu

SEQ ID NO: 2342818 - RNA, 19 nt, Homo sapiens
  misc_RNA (1)...(19): siRNA sense strand
gucaagaagcagugcgcca

SEQ ID NO: 2342819 - RNA, 19 nt, Homo sapiens
  misc_RNA (1)...(19): siRNA sense strand
ugaacaagguugaacugca

SEQ ID NO: 2342820 - RNA, 19 nt, Homo sapiens
  misc_RNA (1)...(19): siRNA sense strand
caacaagcgcacagcagca

SEQ ID NO: 2342821 - RNA, 19 nt, Homo sapiens
  misc_RNA (1)...(19): siRNA sense strand
ggguggugcauguggagga

SEQ ID NO: 2342822 - RNA, 19 nt, Homo sapiens
  misc_RNA (1)...(19): siRNA sense strand
ccuacaugaacaagguuga

SEQ ID NO: 2342823 - RNA, 19 nt, Homo sapiens
  misc_RNA (1)...(19): siRNA sense strand
ucgcugaggucaaggccca

SEQ ID NO: 2342824 - RNA, 19 nt, Homo sapiens
  misc_RNA (1)...(19): siRNA sense strand
ccuccagcaggaagagcua

SEQ ID NO: 2342825 - RNA, 19 nt, Homo sapiens
  misc_RNA (1)...(19): siRNA sense strand
uggaagggcuggaggaugc

SEQ ID NO: 2342826 - RNA, 19 nt, Homo sapiens
  misc_RNA (1)...(19): siRNA sense strand
gagcagaucaagacccuca

SEQ ID NO: 2342827 - RNA, 19 nt, Homo sapiens
  misc_RNA (1)...(19): siRNA sense strand
agccguuguucgagcagua

SEQ ID NO: 2342828 - RNA, 19 nt, Homo sapiens
  misc_RNA (1)...(19): siRNA sense strand
ugauagaacuagagccaga

SEQ ID NO: 2342829 - RNA, 19 nt, Homo sapiens
  misc_RNA (1)...(19): siRNA sense strand
ggaaagagaugaagcugca

SEQ ID NO: 2342830 - RNA, 19 nt, Homo sapiens
  misc_RNA (1)...(19): siRNA sense strand
auguagggaaagagacaaa

SEQ ID NO: 2342831 - RNA, 19 nt, Homo sapiens
  misc_RNA (1)...(19): siRNA sense strand
acucaauagauguagggaa

SEQ ID NO: 2342832 - RNA, 19 nt, Homo sapiens
  misc_RNA (1)...(19): siRNA sense strand
agauguagggaaagagaca

SEQ ID NO: 2342833 - RNA, 19 nt, Homo sapiens
  misc_RNA (1)...(19): siRNA sense strand
augaauaggacaaagaaca

SEQ ID NO: 2342834 - RNA, 19 nt, Homo sapiens
  misc_RNA (1)...(19): siRNA sense strand
aggucaagccaaagcagaa

SEQ ID NO: 2342835 - RNA, 19 nt, Homo sapiens
  misc_RNA (1)...(19): siRNA sense strand
gcuuacuucuguugggaca

SEQ ID NO: 2342836 - RNA, 19 nt, Homo sapiens
  misc_RNA (1)...(19): siRNA sense strand
gcuucuacguggacgcaga

SEQ ID NO: 2342837 - RNA, 19 nt, Homo sapiens
  misc_RNA (1)...(19): siRNA sense strand
aaguaagacccaagccaga

SEQ ID NO: 2342838 - RNA, 19 nt, Homo sapiens
  misc_RNA (1)...(19): siRNA sense strand
ggaaagagacaaaagagga

SEQ ID NO: 2342839 - RNA, 19 nt, Homo sapiens
  misc_RNA (1)...(19): siRNA sense strand
gaggaaaagcgguggaaag

SEQ ID NO: 2342840 - RNA, 19 nt, Homo sapiens
  misc_RNA (1)...(19): siRNA sense strand
auugauagaacuagagcca

SEQ ID NO: 2342841 - RNA, 19 nt, Homo sapiens
  misc_RNA (1)...(19): siRNA sense strand
aagaagaacuauacaggac

SEQ ID NO: 2342842 - RNA, 19 nt, Homo sapiens
  misc_RNA (1)...(19): siRNA sense strand
cagcugaacagaagccaca

SEQ ID NO: 2342843 - RNA, 19 nt, Homo sapiens
  misc_RNA (1)...(19): siRNA sense strand
agccacaaccagcaaguaa

SEQ ID NO: 2342844 - RNA, 19 nt, Homo sapiens
  misc_RNA (1)...(19): siRNA sense strand
aagagacaaaagaggaaaa

SEQ ID NO: 2342845 - RNA, 19 nt, Homo sapiens
  misc_RNA (1)...(19): siRNA sense strand
guaugauuugccaggaauu

SEQ ID NO: 2342846 - RNA, 19 nt, Homo sapiens
  misc_RNA (1)...(19): siRNA sense strand
gagacuaccuaaaggccaa

SEQ ID NO: 2342847 - RNA, 19 nt, Homo sapiens
  misc_RNA (1)...(19): siRNA sense strand
gggcauaugcugugcugca

SEQ ID NO: 2342848 - RNA, 19 nt, Homo sapiens
  misc_RNA (1)...(19): siRNA sense strand
cugccuggucagugaacaa

SEQ ID NO: 2342849 - RNA, 19 nt, Homo sapiens
  misc_RNA (1)...(19): siRNA sense strand
augaaaaggacaugcaaau

SEQ ID NO: 2342850 - RNA, 19 nt, Homo sapiens
  misc_RNA (1)...(19): siRNA sense strand
gcugagaagugcuaccaga

SEQ ID NO: 2342851 - RNA, 19 nt, Homo sapiens
  misc_RNA (1)...(19): siRNA sense strand
uaacaggucccaaggccua

SEQ ID NO: 2342852 - RNA, 19 nt, Homo sapiens
  misc_RNA (1)...(19): siRNA sense strand
agaagugcuaccagagaga

SEQ ID NO: 2342853 - RNA, 19 nt, Homo sapiens
  misc_RNA (1)...(19): siRNA sense strand
ggucauaagcagcuguaac

SEQ ID NO: 2342854 - RNA, 19 nt, Homo sapiens
  misc_RNA (1)...(19): siRNA sense strand
gagacuaccuaaaggccaa

SEQ ID NO: 2342855 - RNA, 19 nt, Homo sapiens
  misc_RNA (1)...(19): siRNA sense strand
gggcauaugcugugcugca

SEQ ID NO: 2342856 - RNA, 19 nt, Homo sapiens
  misc_RNA (1)...(19): siRNA sense strand
cugccuggucagugaacaa

SEQ ID NO: 2342857 - RNA, 19 nt, Homo sapiens
  misc_RNA (1)...(19): siRNA sense strand
augaaaaggacaugcaaau

SEQ ID NO: 2342858 - RNA, 19 nt, Homo sapiens
  misc_RNA (1)...(19): siRNA sense strand
gcugagaagugcuaccaga

SEQ ID NO: 2342859 - RNA, 19 nt, Homo sapiens
  misc_RNA (1)...(19): siRNA sense strand
uaacaggucccaaggccua

SEQ ID NO: 2342860 - RNA, 19 nt, Homo sapiens
  misc_RNA (1)...(19): siRNA sense strand
agaagugcuaccagagaga

SEQ ID NO: 2342861 - RNA, 19 nt, Homo sapiens
  misc_RNA (1)...(19): siRNA sense strand
ggucauaagcagcuguaac

SEQ ID NO: 2342862 - RNA, 19 nt, Homo sapiens
  misc_RNA (1)...(19): siRNA sense strand
guucaaggguucuggcuga

SEQ ID NO: 2342863 - RNA, 19 nt, Homo sapiens
  misc_RNA (1)...(19): siRNA sense strand
agggagacgaaauggacaa

SEQ ID NO: 2342864 - RNA, 19 nt, Homo sapiens
  misc_RNA (1)...(19): siRNA sense strand
cagaaaccuggcagcgaaa

SEQ ID NO: 2342865 - RNA, 19 nt, Homo sapiens
  misc_RNA (1)...(19): siRNA sense strand
cgaaauggacaaaguggca

SEQ ID NO: 2342866 - RNA, 19 nt, Homo sapiens
  misc_RNA (1)...(19): siRNA sense strand
acagaaaccuggcagcgaa

SEQ ID NO: 2342867 - RNA, 19 nt, Homo sapiens
  misc_RNA (1)...(19): siRNA sense strand
acaaccaguaugaggcaau

SEQ ID NO: 2342868 - RNA, 19 nt, Homo sapiens
  misc_RNA (1)...(19): siRNA sense strand
uggcaaauuuaccaagcau

SEQ ID NO: 2342869 - RNA, 19 nt, Homo sapiens
  misc_RNA (1)...(19): siRNA sense strand
gguuuacugcuguggaaca

SEQ ID NO: 2342870 - RNA, 19 nt, Homo sapiens
  misc_RNA (1)...(19): siRNA sense strand
cagaaaccuggcagcgaaa

SEQ ID NO: 2342871 - RNA, 19 nt, Homo sapiens
  misc_RNA (1)...(19): siRNA sense strand
acagaaaccuggcagcgaa

SEQ ID NO: 2342872 - RNA, 19 nt, Homo sapiens
  misc_RNA (1)...(19): siRNA sense strand
uggcaaauuuaccaagcau

SEQ ID NO: 2342873 - RNA, 19 nt, Homo sapiens
  misc_RNA (1)...(19): siRNA sense strand
gcgagauccucacggacga

SEQ ID NO: 2342874 - RNA, 19 nt, Homo sapiens
  misc_RNA (1)...(19): siRNA sense strand
auaagaaugccgacgggaa

SEQ ID NO: 2342875 - RNA, 19 nt, Homo sapiens
  misc_RNA (1)...(19): siRNA sense strand
gggaaauccaacagcaagu

SEQ ID NO: 2342876 - RNA, 19 nt, Homo sapiens
  misc_RNA (1)...(19): siRNA sense strand
ccgaaguuguggaggagcu

SEQ ID NO: 2342877 - RNA, 19 nt, Homo sapiens
  misc_RNA (1)...(19): siRNA sense strand
aggaaugagaugcuggaca

SEQ ID NO: 2342878 - RNA, 19 nt, Homo sapiens
  misc_RNA (1)...(19): siRNA sense strand
agaagaucuacaagcaauu

SEQ ID NO: 2342879 - RNA, 19 nt, Homo sapiens
  misc_RNA (1)...(19): siRNA sense strand
gagaaagagaagagggaca

SEQ ID NO: 2342880 - RNA, 19 nt, Homo sapiens
  misc_RNA (1)...(19): siRNA sense strand
uguccaaggaagagaaaga

SEQ ID NO: 2342881 - RNA, 19 nt, Homo sapiens
  misc_RNA (1)...(19): siRNA sense strand
gagaagagggacaaagcca

SEQ ID NO: 2342882 - RNA, 19 nt, Homo sapiens
  misc_RNA (1)...(19): siRNA sense strand
aagagaaagagaagaggga

SEQ ID NO: 2342883 - RNA, 19 nt, Homo sapiens
  misc_RNA (1)...(19): siRNA sense strand
gcacagagcaggaugaccu

SEQ ID NO: 2342884 - RNA, 19 nt, Homo sapiens
  misc_RNA (1)...(19): siRNA sense strand
gcaugacgcuaguggagca

SEQ ID NO: 2342885 - RNA, 19 nt, Homo sapiens
  misc_RNA (1)...(19): siRNA sense strand
aggaagagaaagagaagag

SEQ ID NO: 2342886 - RNA, 19 nt, Homo sapiens
  misc_RNA (1)...(19): siRNA sense strand
uggagcagcccaaggguga

SEQ ID NO: 2342887 - RNA, 19 nt, Homo sapiens
  misc_RNA (1)...(19): siRNA sense strand
uggacagacacgcgggaga

SEQ ID NO: 2342888 - RNA, 19 nt, Homo sapiens
  misc_RNA (1)...(19): siRNA sense strand
ggaugauggccuggaugaa

SEQ ID NO: 2342889 - RNA, 19 nt, Homo sapiens
  misc_RNA (1)...(19): siRNA sense strand
gggacaagccugacagcag

SEQ ID NO: 2342890 - RNA, 19 nt, Homo sapiens
  misc_RNA (1)...(19): siRNA sense strand
ggcagguguccaaggaaga

SEQ ID NO: 2342891 - RNA, 19 nt, Homo sapiens
  misc_RNA (1)...(19): siRNA sense strand
cggaagaagcagcuggcaa

SEQ ID NO: 2342892 - RNA, 19 nt, Homo sapiens
  misc_RNA (1)...(19): siRNA sense strand
cugcaaacugaguaugaaa

SEQ ID NO: 2342893 - RNA, 19 nt, Homo sapiens
  misc_RNA (1)...(19): siRNA sense strand
gaacauuccuggaggggau

SEQ ID NO: 2342894 - RNA, 19 nt, Homo sapiens
  misc_RNA (1)...(19): siRNA sense strand
augacaagcccgugugcaa

SEQ ID NO: 2342895 - RNA, 19 nt, Homo sapiens
  misc_RNA (1)...(19): siRNA sense strand
ugaagaaauauaagagcga

SEQ ID NO: 2342896 - RNA, 19 nt, Homo sapiens
  misc_RNA (1)...(19): siRNA sense strand
aacuaaagucagauggaau

SEQ ID NO: 2342897 - RNA, 19 nt, Homo sapiens
  misc_RNA (1)...(19): siRNA sense strand
augauguccucuugagcaa

SEQ ID NO: 2342898 - RNA, 19 nt, Homo sapiens
  misc_RNA (1)...(19): siRNA sense strand
uggaagaaugagaagcuau

SEQ ID NO: 2342899 - RNA, 19 nt, Homo sapiens
  misc_RNA (1)...(19): siRNA sense strand
cauucuagcuggggagaua

SEQ ID NO: 2342900 - RNA, 19 nt, Homo sapiens
  misc_RNA (1)...(19): siRNA sense strand
ccagaagugcagcggguga

SEQ ID NO: 2342901 - RNA, 19 nt, Homo sapiens
  misc_RNA (1)...(19): siRNA sense strand
gagcaguuugugaagaaau

SEQ ID NO: 2342902 - RNA, 19 nt, Homo sapiens
  misc_RNA (1)...(19): siRNA sense strand
gagauauacgugaugguca

SEQ ID NO: 2342903 - RNA, 19 nt, Homo sapiens
  misc_RNA (1)...(19): siRNA sense strand
ccacaaugccaucgaccca

SEQ ID NO: 2342904 - RNA, 19 nt, Homo sapiens
  misc_RNA (1)...(19): siRNA sense strand
uugcaaaacuaaagucaga

SEQ ID NO: 2342905 - RNA, 19 nt, Homo sapiens
  misc_RNA (1)...(19): siRNA sense strand
aagaaauauaagagcgaag

SEQ ID NO: 2342906 - RNA, 19 nt, Homo sapiens
  misc_RNA (1)...(19): siRNA sense strand
gaagcuauacuguggcaga

SEQ ID NO: 2342907 - RNA, 19 nt, Homo sapiens
  misc_RNA (1)...(19): siRNA sense strand
caaugaagaggaucgaaaa

SEQ ID NO: 2342908 - RNA, 19 nt, Homo sapiens
  misc_RNA (1)...(19): siRNA sense strand
gggcacaguaccggaagaa

SEQ ID NO: 2342909 - RNA, 19 nt, Homo sapiens
  misc_RNA (1)...(19): siRNA sense strand
uggaauguaagaagaggau

SEQ ID NO: 2342910 - RNA, 19 nt, Homo sapiens
  misc_RNA (1)...(19): siRNA sense strand
uuugaagacaccaaguaua

SEQ ID NO: 2342911 - RNA, 19 nt, Homo sapiens
  misc_RNA (1)...(19): siRNA sense strand
aggugaaggagauggagca

SEQ ID NO: 2342912 - RNA, 19 nt, Homo sapiens
  misc_RNA (1)...(19): siRNA sense strand
ccaucaauacaguuaccua

SEQ ID NO: 2342913 - RNA, 19 nt, Homo sapiens
  misc_RNA (1)...(19): siRNA sense strand
cuucaaagugccaugaguu

SEQ ID NO: 2342914 - RNA, 19 nt, Homo sapiens
  misc_RNA (1)...(19): siRNA sense strand
ggaucgaaaagugggaaaa

SEQ ID NO: 2342915 - RNA, 19 nt, Homo sapiens
  misc_RNA (1)...(19): siRNA sense strand
gaguaggagaugucaaacu

SEQ ID NO: 2342916 - RNA, 19 nt, Homo sapiens
  misc_RNA (1)...(19): siRNA sense strand
cggaagaagcagcuggcaa

SEQ ID NO: 2342917 - RNA, 19 nt, Homo sapiens
  misc_RNA (1)...(19): siRNA sense strand
cugcaaacugaguaugaaa

SEQ ID NO: 2342918 - RNA, 19 nt, Homo sapiens
  misc_RNA (1)...(19): siRNA sense strand
gaacauuccuggaggggau

SEQ ID NO: 2342919 - RNA, 19 nt, Homo sapiens
  misc_RNA (1)...(19): siRNA sense strand
augacaagcccgugugcaa

SEQ ID NO: 2342920 - RNA, 19 nt, Homo sapiens
  misc_RNA (1)...(19): siRNA sense strand
ugaagaaauauaagagcga

SEQ ID NO: 2342921 - RNA, 19 nt, Homo sapiens
  misc_RNA (1)...(19): siRNA sense strand
aacuaaagucagauggaau

SEQ ID NO: 2342922 - RNA, 19 nt, Homo sapiens
  misc_RNA (1)...(19): siRNA sense strand
augauguccucuugagcaa

SEQ ID NO: 2342923 - RNA, 19 nt, Homo sapiens
  misc_RNA (1)...(19): siRNA sense strand
uggaagaaugagaagcuau

SEQ ID NO: 2342924 - RNA, 19 nt, Homo sapiens
  misc_RNA (1)...(19): siRNA sense strand
cauucuagcuggggagaua

SEQ ID NO: 2342925 - RNA, 19 nt, Homo sapiens
  misc_RNA (1)...(19): siRNA sense strand
ccagaagugcagcggguga

SEQ ID NO: 2342926 - RNA, 19 nt, Homo sapiens
  misc_RNA (1)...(19): siRNA sense strand
gagcaguuugugaagaaau

SEQ ID NO: 2342927 - RNA, 19 nt, Homo sapiens
  misc_RNA (1)...(19): siRNA sense strand
gagauauacgugaugguca

SEQ ID NO: 2342928 - RNA, 19 nt, Homo sapiens
  misc_RNA (1)...(19): siRNA sense strand
ccacaaugccaucgaccca

SEQ ID NO: 2342929 - RNA, 19 nt, Homo sapiens
  misc_RNA (1)...(19): siRNA sense strand
uugcaaaacuaaagucaga

SEQ ID NO: 2342930 - RNA, 19 nt, Homo sapiens
  misc_RNA (1)...(19): siRNA sense strand
aagaaauauaagagcgaag

SEQ ID NO: 2342931 - RNA, 19 nt, Homo sapiens
  misc_RNA (1)...(19): siRNA sense strand
gaagcuauacuguggcaga

SEQ ID NO: 2342932 - RNA, 19 nt, Homo sapiens
  misc_RNA (1)...(19): siRNA sense strand
caaugaagaggaucgaaaa

SEQ ID NO: 2342933 - RNA, 19 nt, Homo sapiens
  misc_RNA (1)...(19): siRNA sense strand
gggcacaguaccggaagaa

SEQ ID NO: 2342934 - RNA, 19 nt, Homo sapiens
  misc_RNA (1)...(19): siRNA sense strand
uggaauguaagaagaggau

SEQ ID NO: 2342935 - RNA, 19 nt, Homo sapiens
  misc_RNA (1)...(19): siRNA sense strand
uuugaagacaccaaguaua

SEQ ID NO: 2342936 - RNA, 19 nt, Homo sapiens
  misc_RNA (1)...(19): siRNA sense strand
aggugaaggagauggagca

SEQ ID NO: 2342937 - RNA, 19 nt, Homo sapiens
  misc_RNA (1)...(19): siRNA sense strand
ccaucaauacaguuaccua

SEQ ID NO: 2342938 - RNA, 19 nt, Homo sapiens
  misc_RNA (1)...(19): siRNA sense strand
cuucaaagugccaugaguu

SEQ ID NO: 2342939 - RNA, 19 nt, Homo sapiens
  misc_RNA (1)...(19): siRNA sense strand
ggaucgaaaagugggaaaa

SEQ ID NO: 2342940 - RNA, 19 nt, Homo sapiens
  misc_RNA (1)...(19): siRNA sense strand
gaguaggagaugucaaacu

SEQ ID NO: 2342941 - RNA, 19 nt, Homo sapiens
  misc_RNA (1)...(19): siRNA sense strand
ggagaaagaaaaugagaaa

SEQ ID NO: 2342942 - RNA, 19 nt, Homo sapiens
  misc_RNA (1)...(19): siRNA sense strand
uugcagaagcggagagaau

SEQ ID NO: 2342943 - RNA, 19 nt, Homo sapiens
  misc_RNA (1)...(19): siRNA sense strand
agucaaagugaaagaacua

SEQ ID NO: 2342944 - RNA, 19 nt, Homo sapiens
  misc_RNA (1)...(19): siRNA sense strand
agaguggacugaagggaaa

SEQ ID NO: 2342945 - RNA, 19 nt, Homo sapiens
  misc_RNA (1)...(19): siRNA sense strand
cugaagaacaggccagaaa

SEQ ID NO: 2342946 - RNA, 19 nt, Homo sapiens
  misc_RNA (1)...(19): siRNA sense strand
gccugaaugaggagagaaa

SEQ ID NO: 2342947 - RNA, 19 nt, Homo sapiens
  misc_RNA (1)...(19): siRNA sense strand
guuagaaaauggagaggua

SEQ ID NO: 2342948 - RNA, 19 nt, Homo sapiens
  misc_RNA (1)...(19): siRNA sense strand
gggaagaagucuagggagc

SEQ ID NO: 2342949 - RNA, 19 nt, Homo sapiens
  misc_RNA (1)...(19): siRNA sense strand
gcuuuguaagugagagaaa

SEQ ID NO: 2342950 - RNA, 19 nt, Homo sapiens
  misc_RNA (1)...(19): siRNA sense strand
caucaaauccaguggcaga

SEQ ID NO: 2342951 - RNA, 19 nt, Homo sapiens
  misc_RNA (1)...(19): siRNA sense strand
cguuggaagaagagcuuaa

SEQ ID NO: 2342952 - RNA, 19 nt, Homo sapiens
  misc_RNA (1)...(19): siRNA sense strand
ccuaaagcagguagagaau

SEQ ID NO: 2342953 - RNA, 19 nt, Homo sapiens
  misc_RNA (1)...(19): siRNA sense strand
gagacaaucagguggaaaa

SEQ ID NO: 2342954 - RNA, 19 nt, Homo sapiens
  misc_RNA (1)...(19): siRNA sense strand
agucaaagaccuuaaccaa

SEQ ID NO: 2342955 - RNA, 19 nt, Homo sapiens
  misc_RNA (1)...(19): siRNA sense strand
aggagaaacuugaagagga

SEQ ID NO: 2342956 - RNA, 19 nt, Homo sapiens
  misc_RNA (1)...(19): siRNA sense strand
aaggcaaagacgaggaaau

SEQ ID NO: 2342957 - RNA, 19 nt, Homo sapiens
  misc_RNA (1)...(19): siRNA sense strand
cagcaguugugauggaaga

SEQ ID NO: 2342958 - RNA, 19 nt, Homo sapiens
  misc_RNA (1)...(19): siRNA sense strand
aagaaaugaccuacggauu

SEQ ID NO: 2342959 - RNA, 19 nt, Homo sapiens
  misc_RNA (1)...(19): siRNA sense strand
gccaacuggaggagauaaa

SEQ ID NO: 2342960 - RNA, 19 nt, Homo sapiens
  misc_RNA (1)...(19): siRNA sense strand
gcauguuggcggagauuga

SEQ ID NO: 2342961 - RNA, 19 nt, Homo sapiens
  misc_RNA (1)...(19): siRNA sense strand
ggauaauuaccuaagugaa

SEQ ID NO: 2342962 - RNA, 19 nt, Homo sapiens
  misc_RNA (1)...(19): siRNA sense strand
cuggaaaugcucagaguca

SEQ ID NO: 2342963 - RNA, 19 nt, Homo sapiens
  misc_RNA (1)...(19): siRNA sense strand
gagcuuuguaagugagaga

SEQ ID NO: 2342964 - RNA, 19 nt, Homo sapiens
  misc_RNA (1)...(19): siRNA sense strand
accaagagauugagaaacu

SEQ ID NO: 2342965 - RNA, 19 nt, Homo sapiens
  misc_RNA (1)...(19): siRNA sense strand
gagaguggacugaagggaa

SEQ ID NO: 2342966 - RNA, 19 nt, Homo sapiens
  misc_RNA (1)...(19): siRNA sense strand
guagaagccaagagaacau

SEQ ID NO: 2342967 - RNA, 19 nt, Homo sapiens
  misc_RNA (1)...(19): siRNA sense strand
aggcaaagacgaggaaauu

SEQ ID NO: 2342968 - RNA, 19 nt, Homo sapiens
  misc_RNA (1)...(19): siRNA sense strand
ccuccaagagcgaagggaa

SEQ ID NO: 2342969 - RNA, 19 nt, Homo sapiens
  misc_RNA (1)...(19): siRNA sense strand
uggaagaagagcuuaagaa

SEQ ID NO: 2342970 - RNA, 19 nt, Homo sapiens
  misc_RNA (1)...(19): siRNA sense strand
cuguagaagccaagagaac

SEQ ID NO: 2342971 - RNA, 19 nt, Homo sapiens
  misc_RNA (1)...(19): siRNA sense strand
agaccuuaaccaagagauu

SEQ ID NO: 2342972 - RNA, 19 nt, Homo sapiens
  misc_RNA (1)...(19): siRNA sense strand
ggaaaaguggagaagacaa

SEQ ID NO: 2342973 - RNA, 19 nt, Homo sapiens
  misc_RNA (1)...(19): siRNA sense strand
gagucaaagugaaagaacu

SEQ ID NO: 2342974 - RNA, 19 nt, Homo sapiens
  misc_RNA (1)...(19): siRNA sense strand
gagaaaucugaccaagaaa

SEQ ID NO: 2342975 - RNA, 19 nt, Homo sapiens
  misc_RNA (1)...(19): siRNA sense strand
agugaaagaacuagaaucu

SEQ ID NO: 2342976 - RNA, 19 nt, Homo sapiens
  misc_RNA (1)...(19): siRNA sense strand
cugaggaccgccuggauaa

SEQ ID NO: 2342977 - RNA, 19 nt, Homo sapiens
  misc_RNA (1)...(19): siRNA sense strand
agaaacagaaagaguuaga

SEQ ID NO: 2342978 - RNA, 19 nt, Homo sapiens
  misc_RNA (1)...(19): siRNA sense strand
gagaaacuuaagacgcaaa

SEQ ID NO: 2342979 - RNA, 19 nt, Homo sapiens
  misc_RNA (1)...(19): siRNA sense strand
uuuacaagcuacaaggaga

SEQ ID NO: 2342980 - RNA, 19 nt, Homo sapiens
  misc_RNA (1)...(19): siRNA sense strand
caacaggagggcagcaaaa

SEQ ID NO: 2342981 - RNA, 19 nt, Homo sapiens
  misc_RNA (1)...(19): siRNA sense strand
ccgagauuauacaaggaau

SEQ ID NO: 2342982 - RNA, 19 nt, Homo sapiens
  misc_RNA (1)...(19): siRNA sense strand
gaguacagacagugggacu

SEQ ID NO: 2342983 - RNA, 19 nt, Homo sapiens
  misc_RNA (1)...(19): siRNA sense strand
aauuaagagagcagaggau

SEQ ID NO: 2342984 - RNA, 19 nt, Homo sapiens
  misc_RNA (1)...(19): siRNA sense strand
agaaacuugaagaggaaga

SEQ ID NO: 2342985 - RNA, 19 nt, Homo sapiens
  misc_RNA (1)...(19): siRNA sense strand
aggaagacaacaaagucaa

SEQ ID NO: 2342986 - RNA, 19 nt, Homo sapiens
  misc_RNA (1)...(19): siRNA sense strand
guagagaaugaaacaagaa

SEQ ID NO: 2342987 - RNA, 19 nt, Homo sapiens
  misc_RNA (1)...(19): siRNA sense strand
gauaauuaccuaagugaac

SEQ ID NO: 2342988 - RNA, 19 nt, Homo sapiens
  misc_RNA (1)...(19): siRNA sense strand
uccagaaagcagaggauga

SEQ ID NO: 2342989 - RNA, 19 nt, Homo sapiens
  misc_RNA (1)...(19): siRNA sense strand
ccaaagaaucaagaaggaa

SEQ ID NO: 2342990 - RNA, 19 nt, Homo sapiens
  misc_RNA (1)...(19): siRNA sense strand
cuccagagccagagcccaa

SEQ ID NO: 2342991 - RNA, 19 nt, Homo sapiens
  misc_RNA (1)...(19): siRNA sense strand
augcuggaauggagaauga

SEQ ID NO: 2342992 - RNA, 19 nt, Homo sapiens
  misc_RNA (1)...(19): siRNA sense strand
agaaugaaucugugaaauc

SEQ ID NO: 2342993 - RNA, 19 nt, Homo sapiens
  misc_RNA (1)...(19): siRNA sense strand
cugaauuagagaagcuaga

SEQ ID NO: 2342994 - RNA, 19 nt, Homo sapiens
  misc_RNA (1)...(19): siRNA sense strand
ugaaugaaaaggagaaaga

SEQ ID NO: 2342995 - RNA, 19 nt, Homo sapiens
  misc_RNA (1)...(19): siRNA sense strand
agagaggcguugcggucua

SEQ ID NO: 2342996 - RNA, 19 nt, Homo sapiens
  misc_RNA (1)...(19): siRNA sense strand
cugaaugaggagagaaauc

SEQ ID NO: 2342997 - RNA, 19 nt, Homo sapiens
  misc_RNA (1)...(19): siRNA sense strand
uggaggagauaaagcuaca

SEQ ID NO: 2342998 - RNA, 19 nt, Homo sapiens
  misc_RNA (1)...(19): siRNA sense strand
uggaagaguaggcgagacu

SEQ ID NO: 2342999 - RNA, 19 nt, Homo sapiens
  misc_RNA (1)...(19): siRNA sense strand
gggcuaaggacgagcgcaa

SEQ ID NO: 2343000 - RNA, 19 nt, Homo sapiens
  misc_RNA (1)...(19): siRNA sense strand
acaugaaggugaagggcga

SEQ ID NO: 2343001 - RNA, 19 nt, Homo sapiens
  misc_RNA (1)...(19): siRNA sense strand
gcuuucauggugugggcua

SEQ ID NO: 2343002 - RNA, 19 nt, Homo sapiens
  misc_RNA (1)...(19): siRNA sense strand
agacagucagacagggaau

SEQ ID NO: 2343003 - RNA, 19 nt, Homo sapiens
  misc_RNA (1)...(19): siRNA sense strand
ggagcaagaccaaguggca

SEQ ID NO: 2343004 - RNA, 19 nt, Homo sapiens
  misc_RNA (1)...(19): siRNA sense strand
gagcagucguuaugcagca

SEQ ID NO: 2343005 - RNA, 19 nt, Homo sapiens
  misc_RNA (1)...(19): siRNA sense strand
uggcacagacagucagaca

SEQ ID NO: 2343006 - RNA, 19 nt, Homo sapiens
  misc_RNA (1)...(19): siRNA sense strand
agcaagaccaaguggcaga

SEQ ID NO: 2343007 - RNA, 19 nt, Homo sapiens
  misc_RNA (1)...(19): siRNA sense strand
agaggagagccguguucaa

SEQ ID NO: 2343008 - RNA, 19 nt, Homo sapiens
  misc_RNA (1)...(19): siRNA sense strand
agggaaugaugaagaggcu

SEQ ID NO: 2343009 - RNA, 19 nt, Homo sapiens
  misc_RNA (1)...(19): siRNA sense strand
agacagucagacagggaau

SEQ ID NO: 2343010 - RNA, 19 nt, Homo sapiens
  misc_RNA (1)...(19): siRNA sense strand
ggagcaagaccaaguggca

SEQ ID NO: 2343011 - RNA, 19 nt, Homo sapiens
  misc_RNA (1)...(19): siRNA sense strand
gagcagucguuaugcagca

SEQ ID NO: 2343012 - RNA, 19 nt, Homo sapiens
  misc_RNA (1)...(19): siRNA sense strand
uggcacagacagucagaca

SEQ ID NO: 2343013 - RNA, 19 nt, Homo sapiens
  misc_RNA (1)...(19): siRNA sense strand
agcaagaccaaguggcaga

SEQ ID NO: 2343014 - RNA, 19 nt, Homo sapiens
  misc_RNA (1)...(19): siRNA sense strand
agaggagagccguguucaa

SEQ ID NO: 2343015 - RNA, 19 nt, Homo sapiens
  misc_RNA (1)...(19): siRNA sense strand
ggugugaagggaagggacu

SEQ ID NO: 2343016 - RNA, 19 nt, Homo sapiens
  misc_RNA (1)...(19): siRNA sense strand
agggaaugaugaagaggcu

SEQ ID NO: 2343017 - RNA, 19 nt, Homo sapiens
  misc_RNA (1)...(19): siRNA sense strand
cgggaaagacacugaggca

SEQ ID NO: 2343018 - RNA, 19 nt, Homo sapiens
  misc_RNA (1)...(19): siRNA sense strand
uugcagaaguggcuggcua

SEQ ID NO: 2343019 - RNA, 19 nt, Homo sapiens
  misc_RNA (1)...(19): siRNA sense strand
cgggaaagacacugaggca

SEQ ID NO: 2343020 - RNA, 19 nt, Homo sapiens
  misc_RNA (1)...(19): siRNA sense strand
uugcagaaguggcuggcua

SEQ ID NO: 2343021 - RNA, 19 nt, Homo sapiens
  misc_RNA (1)...(19): siRNA sense strand
cgggaaagacacugaggca

SEQ ID NO: 2343022 - RNA, 19 nt, Homo sapiens
  misc_RNA (1)...(19): siRNA sense strand
uugcagaaguggcuggcua

SEQ ID NO: 2343023 - RNA, 19 nt, Homo sapiens
  misc_RNA (1)...(19): siRNA sense strand
cgggaaagacacugaggca

SEQ ID NO: 2343024 - RNA, 19 nt, Homo sapiens
  misc_RNA (1)...(19): siRNA sense strand
uugcagaaguggcuggcua

SEQ ID NO: 2343025 - RNA, 19 nt, Homo sapiens
  misc_RNA (1)...(19): siRNA sense strand
aggaguaccucgagcgcca

SEQ ID NO: 2343026 - RNA, 19 nt, Homo sapiens
  misc_RNA (1)...(19): siRNA sense strand
auagaagagugccgggaca

SEQ ID NO: 2343027 - RNA, 19 nt, Homo sapiens
  misc_RNA (1)...(19): siRNA sense strand
agaccaagaagguggaucu

SEQ ID NO: 2343028 - RNA, 19 nt, Homo sapiens
  misc_RNA (1)...(19): siRNA sense strand
gcgacgaggaagaggaaaa

SEQ ID NO: 2343029 - RNA, 19 nt, Homo sapiens
  misc_RNA (1)...(19): siRNA sense strand
ccauauugggagugugauu

SEQ ID NO: 2343030 - RNA, 19 nt, Homo sapiens
  misc_RNA (1)...(19): siRNA sense strand
ugugagaagaacugugaaa

SEQ ID NO: 2343031 - RNA, 19 nt, Homo sapiens
  misc_RNA (1)...(19): siRNA sense strand
ugguugaacagcuggacaa

SEQ ID NO: 2343032 - RNA, 19 nt, Homo sapiens
  misc_RNA (1)...(19): siRNA sense strand
aggaugaagacgaugauga

SEQ ID NO: 2343033 - RNA, 19 nt, Homo sapiens
  misc_RNA (1)...(19): siRNA sense strand
uugacgaggaagugaauau

SEQ ID NO: 2343034 - RNA, 19 nt, Homo sapiens
  misc_RNA (1)...(19): siRNA sense strand
caauaagccaugugggaag

SEQ ID NO: 2343035 - RNA, 19 nt, Homo sapiens
  misc_RNA (1)...(19): siRNA sense strand
acacagaaccaauaagcca

SEQ ID NO: 2343036 - RNA, 19 nt, Homo sapiens
  misc_RNA (1)...(19): siRNA sense strand
caacagaaccauauuggga

SEQ ID NO: 2343037 - RNA, 19 nt, Homo sapiens
  misc_RNA (1)...(19): siRNA sense strand
ggaaaaggaugaagaggac

SEQ ID NO: 2343038 - RNA, 19 nt, Homo sapiens
  misc_RNA (1)...(19): siRNA sense strand
aggaaaaggaugaagagga

SEQ ID NO: 2343039 - RNA, 19 nt, Homo sapiens
  misc_RNA (1)...(19): siRNA sense strand
gugacaaggaaaaggauga

SEQ ID NO: 2343040 - RNA, 19 nt, Homo sapiens
  misc_RNA (1)...(19): siRNA sense strand
ccaauaagccaugugggaa

SEQ ID NO: 2343041 - RNA, 19 nt, Homo sapiens
  misc_RNA (1)...(19): siRNA sense strand
cauuuguggaagcaggaaa

SEQ ID NO: 2343042 - RNA, 19 nt, Homo sapiens
  misc_RNA (1)...(19): siRNA sense strand
ccuucugauuaguaagaca

SEQ ID NO: 2343043 - RNA, 19 nt, Homo sapiens
  misc_RNA (1)...(19): siRNA sense strand
gugaaaagagcaugguuga

SEQ ID NO: 2343044 - RNA, 19 nt, Homo sapiens
  misc_RNA (1)...(19): siRNA sense strand
auauugggagugugauuaa

SEQ ID NO: 2343045 - RNA, 19 nt, Homo sapiens
  misc_RNA (1)...(19): siRNA sense strand
ucgaaaaugaggaugaaga

SEQ ID NO: 2343046 - RNA, 19 nt, Homo sapiens
  misc_RNA (1)...(19): siRNA sense strand
augauauggaugaagauga

SEQ ID NO: 2343047 - RNA, 19 nt, Homo sapiens
  misc_RNA (1)...(19): siRNA sense strand
uggaugaagaugagguuuu

SEQ ID NO: 2343048 - RNA, 19 nt, Homo sapiens
  misc_RNA (1)...(19): siRNA sense strand
gcgacgaggaagaggaaaa

SEQ ID NO: 2343049 - RNA, 19 nt, Homo sapiens
  misc_RNA (1)...(19): siRNA sense strand
ccauauugggagugugauu

SEQ ID NO: 2343050 - RNA, 19 nt, Homo sapiens
  misc_RNA (1)...(19): siRNA sense strand
ugugagaagaacugugaaa

SEQ ID NO: 2343051 - RNA, 19 nt, Homo sapiens
  misc_RNA (1)...(19): siRNA sense strand
ugguugaacagcuggacaa

SEQ ID NO: 2343052 - RNA, 19 nt, Homo sapiens
  misc_RNA (1)...(19): siRNA sense strand
aggaugaagacgaugauga

SEQ ID NO: 2343053 - RNA, 19 nt, Homo sapiens
  misc_RNA (1)...(19): siRNA sense strand
uugacgaggaagugaauau

SEQ ID NO: 2343054 - RNA, 19 nt, Homo sapiens
  misc_RNA (1)...(19): siRNA sense strand
caauaagccaugugggaag

SEQ ID NO: 2343055 - RNA, 19 nt, Homo sapiens
  misc_RNA (1)...(19): siRNA sense strand
acacagaaccaauaagcca

SEQ ID NO: 2343056 - RNA, 19 nt, Homo sapiens
  misc_RNA (1)...(19): siRNA sense strand
caacagaaccauauuggga

SEQ ID NO: 2343057 - RNA, 19 nt, Homo sapiens
  misc_RNA (1)...(19): siRNA sense strand
ggaaaaggaugaagaggac

SEQ ID NO: 2343058 - RNA, 19 nt, Homo sapiens
  misc_RNA (1)...(19): siRNA sense strand
aggaaaaggaugaagagga

SEQ ID NO: 2343059 - RNA, 19 nt, Homo sapiens
  misc_RNA (1)...(19): siRNA sense strand
gugacaaggaaaaggauga

SEQ ID NO: 2343060 - RNA, 19 nt, Homo sapiens
  misc_RNA (1)...(19): siRNA sense strand
ccaauaagccaugugggaa

SEQ ID NO: 2343061 - RNA, 19 nt, Homo sapiens
  misc_RNA (1)...(19): siRNA sense strand
cauuuguggaagcaggaaa

SEQ ID NO: 2343062 - RNA, 19 nt, Homo sapiens
  misc_RNA (1)...(19): siRNA sense strand
ccuucugauuaguaagaca

SEQ ID NO: 2343063 - RNA, 19 nt, Homo sapiens
  misc_RNA (1)...(19): siRNA sense strand
gugaaaagagcaugguuga

SEQ ID NO: 2343064 - RNA, 19 nt, Homo sapiens
  misc_RNA (1)...(19): siRNA sense strand
auauugggagugugauuaa

SEQ ID NO: 2343065 - RNA, 19 nt, Homo sapiens
  misc_RNA (1)...(19): siRNA sense strand
ucgaaaaugaggaugaaga

SEQ ID NO: 2343066 - RNA, 19 nt, Homo sapiens
  misc_RNA (1)...(19): siRNA sense strand
augauauggaugaagauga

SEQ ID NO: 2343067 - RNA, 19 nt, Homo sapiens
  misc_RNA (1)...(19): siRNA sense strand
uggaugaagaugagguuuu

SEQ ID NO: 2343068 - RNA, 19 nt, Homo sapiens
  misc_RNA (1)...(19): siRNA sense strand
gcgacgaggaagaggaaaa

SEQ ID NO: 2343069 - RNA, 19 nt, Homo sapiens
  misc_RNA (1)...(19): siRNA sense strand
ccauauugggagugugauu

SEQ ID NO: 2343070 - RNA, 19 nt, Homo sapiens
  misc_RNA (1)...(19): siRNA sense strand
ugugagaagaacugugaaa

SEQ ID NO: 2343071 - RNA, 19 nt, Homo sapiens
  misc_RNA (1)...(19): siRNA sense strand
ugguugaacagcuggacaa

SEQ ID NO: 2343072 - RNA, 19 nt, Homo sapiens
  misc_RNA (1)...(19): siRNA sense strand
aggaugaagacgaugauga

SEQ ID NO: 2343073 - RNA, 19 nt, Homo sapiens
  misc_RNA (1)...(19): siRNA sense strand
uugacgaggaagugaauau

SEQ ID NO: 2343074 - RNA, 19 nt, Homo sapiens
  misc_RNA (1)...(19): siRNA sense strand
caauaagccaugugggaag

SEQ ID NO: 2343075 - RNA, 19 nt, Homo sapiens
  misc_RNA (1)...(19): siRNA sense strand
acacagaaccaauaagcca

SEQ ID NO: 2343076 - RNA, 19 nt, Homo sapiens
  misc_RNA (1)...(19): siRNA sense strand
caacagaaccauauuggga

SEQ ID NO: 2343077 - RNA, 19 nt, Homo sapiens
  misc_RNA (1)...(19): siRNA sense strand
ggaaaaggaugaagaggac

SEQ ID NO: 2343078 - RNA, 19 nt, Homo sapiens
  misc_RNA (1)...(19): siRNA sense strand
aggaaaaggaugaagagga

SEQ ID NO: 2343079 - RNA, 19 nt, Homo sapiens
  misc_RNA (1)...(19): siRNA sense strand
gugacaaggaaaaggauga

SEQ ID NO: 2343080 - RNA, 19 nt, Homo sapiens
  misc_RNA (1)...(19): siRNA sense strand
ccaauaagccaugugggaa

SEQ ID NO: 2343081 - RNA, 19 nt, Homo sapiens
  misc_RNA (1)...(19): siRNA sense strand
cauuuguggaagcaggaaa

SEQ ID NO: 2343082 - RNA, 19 nt, Homo sapiens
  misc_RNA (1)...(19): siRNA sense strand
ccuucugauuaguaagaca

SEQ ID NO: 2343083 - RNA, 19 nt, Homo sapiens
  misc_RNA (1)...(19): siRNA sense strand
gugaaaagagcaugguuga

SEQ ID NO: 2343084 - RNA, 19 nt, Homo sapiens
  misc_RNA (1)...(19): siRNA sense strand
auauugggagugugauuaa

SEQ ID NO: 2343085 - RNA, 19 nt, Homo sapiens
  misc_RNA (1)...(19): siRNA sense strand
ucgaaaaugaggaugaaga

SEQ ID NO: 2343086 - RNA, 19 nt, Homo sapiens
  misc_RNA (1)...(19): siRNA sense strand
augauauggaugaagauga

SEQ ID NO: 2343087 - RNA, 19 nt, Homo sapiens
  misc_RNA (1)...(19): siRNA sense strand
uggaugaagaugagguuuu

SEQ ID NO: 2343088 - RNA, 19 nt, Homo sapiens
  misc_RNA (1)...(19): siRNA sense strand
aggaggaggacgagagcau

SEQ ID NO: 2343089 - RNA, 19 nt, Homo sapiens
  misc_RNA (1)...(19): siRNA sense strand
agaagaaggaggagcgcga

SEQ ID NO: 2343090 - RNA, 19 nt, Homo sapiens
  misc_RNA (1)...(19): siRNA sense strand
ccgccaagaaggaggagga

SEQ ID NO: 2343091 - RNA, 19 nt, Homo sapiens
  misc_RNA (1)...(19): siRNA sense strand
gcaucaagaagaaggagga

SEQ ID NO: 2343092 - RNA, 19 nt, Homo sapiens
  misc_RNA (1)...(19): siRNA sense strand
ccaccaaggacauggggaa

SEQ ID NO: 2343093 - RNA, 19 nt, Homo sapiens
  misc_RNA (1)...(19): siRNA sense strand
aggaggagcgcaaggccaa

SEQ ID NO: 2343094 - RNA, 19 nt, Homo sapiens
  misc_RNA (1)...(19): siRNA sense strand
agguggaggaggaggacga

SEQ ID NO: 2343095 - RNA, 19 nt, Homo sapiens
  misc_RNA (1)...(19): siRNA sense strand
agaaggaggaggagcggca

SEQ ID NO: 2343096 - RNA, 19 nt, Homo sapiens
  misc_RNA (1)...(19): siRNA sense strand
ccaacagaacagaagaaaa

SEQ ID NO: 2343097 - RNA, 19 nt, Homo sapiens
  misc_RNA (1)...(19): siRNA sense strand
acucaaaacaaaagagcca

SEQ ID NO: 2343098 - RNA, 19 nt, Homo sapiens
  misc_RNA (1)...(19): siRNA sense strand
gugucuaacgggagcccua

SEQ ID NO: 2343099 - RNA, 19 nt, Homo sapiens
  misc_RNA (1)...(19): siRNA sense strand
agccaacagaacagaagaa

SEQ ID NO: 2343100 - RNA, 19 nt, Homo sapiens
  misc_RNA (1)...(19): siRNA sense strand
cggcuaacucugaggacac

SEQ ID NO: 2343101 - RNA, 19 nt, Homo sapiens
  misc_RNA (1)...(19): siRNA sense strand
gaaagaagauuuaaggaga

SEQ ID NO: 2343102 - RNA, 19 nt, Homo sapiens
  misc_RNA (1)...(19): siRNA sense strand
ucucaagaguggauggaua

SEQ ID NO: 2343103 - RNA, 19 nt, Homo sapiens
  misc_RNA (1)...(19): siRNA sense strand
gugacaugcuacuggguaa

SEQ ID NO: 2343104 - RNA, 19 nt, Homo sapiens
  misc_RNA (1)...(19): siRNA sense strand
agacaauagaugaggauga

SEQ ID NO: 2343105 - RNA, 19 nt, Homo sapiens
  misc_RNA (1)...(19): siRNA sense strand
aagcauauggaguggaaua

SEQ ID NO: 2343106 - RNA, 19 nt, Homo sapiens
  misc_RNA (1)...(19): siRNA sense strand
gacugaaauuagagaacaa

SEQ ID NO: 2343107 - RNA, 19 nt, Homo sapiens
  misc_RNA (1)...(19): siRNA sense strand
uagaugaaauggagagaga

SEQ ID NO: 2343108 - RNA, 19 nt, Homo sapiens
  misc_RNA (1)...(19): siRNA sense strand
gugcaauguuuguggcuuu

SEQ ID NO: 2343109 - RNA, 19 nt, Homo sapiens
  misc_RNA (1)...(19): siRNA sense strand
ggaaugaggaugauggaca

SEQ ID NO: 2343110 - RNA, 19 nt, Homo sapiens
  misc_RNA (1)...(19): siRNA sense strand
gcuaaaaggcucuacaaaa

SEQ ID NO: 2343111 - RNA, 19 nt, Homo sapiens
  misc_RNA (1)...(19): siRNA sense strand
gugugaagaaagugaguuu

SEQ ID NO: 2343112 - RNA, 19 nt, Homo sapiens
  misc_RNA (1)...(19): siRNA sense strand
gaagauuuaaggagaacaa

SEQ ID NO: 2343113 - RNA, 19 nt, Homo sapiens
  misc_RNA (1)...(19): siRNA sense strand
ugauaauagagcugagauu

SEQ ID NO: 2343114 - RNA, 19 nt, Homo sapiens
  misc_RNA (1)...(19): siRNA sense strand
gcacuuaacacaaaagaaa

SEQ ID NO: 2343115 - RNA, 19 nt, Homo sapiens
  misc_RNA (1)...(19): siRNA sense strand
gugcagaggugaagccuga

SEQ ID NO: 2343116 - RNA, 19 nt, Homo sapiens
  misc_RNA (1)...(19): siRNA sense strand
aggaauuaccacugaauau

SEQ ID NO: 2343117 - RNA, 19 nt, Homo sapiens
  misc_RNA (1)...(19): siRNA sense strand
gguaugauccagaaggcua

SEQ ID NO: 2343118 - RNA, 19 nt, Homo sapiens
  misc_RNA (1)...(19): siRNA sense strand
acucgaugcuguugaacua

SEQ ID NO: 2343119 - RNA, 19 nt, Homo sapiens
  misc_RNA (1)...(19): siRNA sense strand
aggcugaagugcugaguga

SEQ ID NO: 2343120 - RNA, 19 nt, Homo sapiens
  misc_RNA (1)...(19): siRNA sense strand
cugaagaagaucauggcua

SEQ ID NO: 2343121 - RNA, 19 nt, Homo sapiens
  misc_RNA (1)...(19): siRNA sense strand
cugagaaauuccagcaaca

SEQ ID NO: 2343122 - RNA, 19 nt, Homo sapiens
  misc_RNA (1)...(19): siRNA sense strand
acaucaaaccaaagccaaa

SEQ ID NO: 2343123 - RNA, 19 nt, Homo sapiens
  misc_RNA (1)...(19): siRNA sense strand
cauauaacccagucacaaa

SEQ ID NO: 2343124 - RNA, 19 nt, Homo sapiens
  misc_RNA (1)...(19): siRNA sense strand
cgauauucuaagacugaaa

SEQ ID NO: 2343125 - RNA, 19 nt, Homo sapiens
  misc_RNA (1)...(19): siRNA sense strand
ccaaacaguugcagcacau

SEQ ID NO: 2343126 - RNA, 19 nt, Homo sapiens
  misc_RNA (1)...(19): siRNA sense strand
guggaauacccaaaugaaa

SEQ ID NO: 2343127 - RNA, 19 nt, Homo sapiens
  misc_RNA (1)...(19): siRNA sense strand
ggaaaauaucacucaguua

SEQ ID NO: 2343128 - RNA, 19 nt, Homo sapiens
  misc_RNA (1)...(19): siRNA sense strand
gaaggaacucccaggaaau

SEQ ID NO: 2343129 - RNA, 19 nt, Homo sapiens
  misc_RNA (1)...(19): siRNA sense strand
gagauuaagaguugagagu

SEQ ID NO: 2343130 - RNA, 19 nt, Homo sapiens
  misc_RNA (1)...(19): siRNA sense strand
uggagaaugaguugagcua

SEQ ID NO: 2343131 - RNA, 19 nt, Homo sapiens
  misc_RNA (1)...(19): siRNA sense strand
ucauaagagaguuggaaca

SEQ ID NO: 2343132 - RNA, 19 nt, Homo sapiens
  misc_RNA (1)...(19): siRNA sense strand
caauagaugaggaugaaga

SEQ ID NO: 2343133 - RNA, 19 nt, Homo sapiens
  misc_RNA (1)...(19): siRNA sense strand
gagagaggcuggauggcuu

SEQ ID NO: 2343134 - RNA, 19 nt, Homo sapiens
  misc_RNA (1)...(19): siRNA sense strand
caaauuucuuagugaguca

SEQ ID NO: 2343135 - RNA, 19 nt, Homo sapiens
  misc_RNA (1)...(19): siRNA sense strand
cuggcggaauuaagagaaa

SEQ ID NO: 2343136 - RNA, 19 nt, Homo sapiens
  misc_RNA (1)...(19): siRNA sense strand
acaagaagccuaagaacca

SEQ ID NO: 2343137 - RNA, 19 nt, Homo sapiens
  misc_RNA (1)...(19): siRNA sense strand
uggcaauauucuuccuaaa

SEQ ID NO: 2343138 - RNA, 19 nt, Homo sapiens
  misc_RNA (1)...(19): siRNA sense strand
caggaggcaugaagaggaa

SEQ ID NO: 2343139 - RNA, 19 nt, Homo sapiens
  misc_RNA (1)...(19): siRNA sense strand
ucaacgaaucccugauaaa

SEQ ID NO: 2343140 - RNA, 19 nt, Homo sapiens
  misc_RNA (1)...(19): siRNA sense strand
gauaguauugaaagagcaa

SEQ ID NO: 2343141 - RNA, 19 nt, Homo sapiens
  misc_RNA (1)...(19): siRNA sense strand
gaagaugcaaugaaagaau

SEQ ID NO: 2343142 - RNA, 19 nt, Homo sapiens
  misc_RNA (1)...(19): siRNA sense strand
aaauggagagagaggcuaa

SEQ ID NO: 2343143 - RNA, 19 nt, Homo sapiens
  misc_RNA (1)...(19): siRNA sense strand
uagaagaugcaaugaaaga

SEQ ID NO: 2343144 - RNA, 19 nt, Homo sapiens
  misc_RNA (1)...(19): siRNA sense strand
acaaaggcaauaauggaaa

SEQ ID NO: 2343145 - RNA, 19 nt, Homo sapiens
  misc_RNA (1)...(19): siRNA sense strand
cucaagaguggauggauaa

SEQ ID NO: 2343146 - RNA, 19 nt, Homo sapiens
  misc_RNA (1)...(19): siRNA sense strand
acaggauaguauugaaaga

SEQ ID NO: 2343147 - RNA, 19 nt, Homo sapiens
  misc_RNA (1)...(19): siRNA sense strand
agugcaagaccaagaacaa

SEQ ID NO: 2343148 - RNA, 19 nt, Homo sapiens
  misc_RNA (1)...(19): siRNA sense strand
gugaagaaagugaguuuga

SEQ ID NO: 2343149 - RNA, 19 nt, Homo sapiens
  misc_RNA (1)...(19): siRNA sense strand
aggcacugcaaaugaauua

SEQ ID NO: 2343150 - RNA, 19 nt, Homo sapiens
  misc_RNA (1)...(19): siRNA sense strand
gcauuauguucucaaggaa

SEQ ID NO: 2343151 - RNA, 19 nt, Homo sapiens
  misc_RNA (1)...(19): siRNA sense strand
ccagaauacucuaaggaac

SEQ ID NO: 2343152 - RNA, 19 nt, Homo sapiens
  misc_RNA (1)...(19): siRNA sense strand
gauacgaagaacagggcau

SEQ ID NO: 2343153 - RNA, 19 nt, Homo sapiens
  misc_RNA (1)...(19): siRNA sense strand
ccucuaacaucgagccuga

SEQ ID NO: 2343154 - RNA, 19 nt, Homo sapiens
  misc_RNA (1)...(19): siRNA sense strand
gagugaauggagcaggaaa

SEQ ID NO: 2343155 - RNA, 19 nt, Homo sapiens
  misc_RNA (1)...(19): siRNA sense strand
ccuauuggaaggagcgauu

SEQ ID NO: 2343156 - RNA, 19 nt, Homo sapiens
  misc_RNA (1)...(19): siRNA sense strand
ggguaguaauuuuggauga

SEQ ID NO: 2343157 - RNA, 19 nt, Homo sapiens
  misc_RNA (1)...(19): siRNA sense strand
aaaccuauguuguugggaa

SEQ ID NO: 2343158 - RNA, 19 nt, Homo sapiens
  misc_RNA (1)...(19): siRNA sense strand
ggauaguauugaaagagca

SEQ ID NO: 2343159 - RNA, 19 nt, Homo sapiens
  misc_RNA (1)...(19): siRNA sense strand
acaugaagaugaugggugu

SEQ ID NO: 2343160 - RNA, 19 nt, Homo sapiens
  misc_RNA (1)...(19): siRNA sense strand
cgguuauugccaugagcua

SEQ ID NO: 2343161 - RNA, 19 nt, Homo sapiens
  misc_RNA (1)...(19): siRNA sense strand
ugguuacaguggagaauga

SEQ ID NO: 2343162 - RNA, 19 nt, Homo sapiens
  misc_RNA (1)...(19): siRNA sense strand
ggguaacaaacuucauuua

SEQ ID NO: 2343163 - RNA, 19 nt, Homo sapiens
  misc_RNA (1)...(19): siRNA sense strand
ccugcauucuacagugaaa

SEQ ID NO: 2343164 - RNA, 19 nt, Homo sapiens
  misc_RNA (1)...(19): siRNA sense strand
augaaaccuuugagaugaa

SEQ ID NO: 2343165 - RNA, 19 nt, Homo sapiens
  misc_RNA (1)...(19): siRNA sense strand
gauuaagaguugagagugg

SEQ ID NO: 2343166 - RNA, 19 nt, Homo sapiens
  misc_RNA (1)...(19): siRNA sense strand
cagcaggaggagucgcaaa

SEQ ID NO: 2343167 - RNA, 19 nt, Homo sapiens
  misc_RNA (1)...(19): siRNA sense strand
gaaagaagauuuaaggaga

SEQ ID NO: 2343168 - RNA, 19 nt, Homo sapiens
  misc_RNA (1)...(19): siRNA sense strand
ucucaagaguggauggaua

SEQ ID NO: 2343169 - RNA, 19 nt, Homo sapiens
  misc_RNA (1)...(19): siRNA sense strand
gugacaugcuacuggguaa

SEQ ID NO: 2343170 - RNA, 19 nt, Homo sapiens
  misc_RNA (1)...(19): siRNA sense strand
agacaauagaugaggauga

SEQ ID NO: 2343171 - RNA, 19 nt, Homo sapiens
  misc_RNA (1)...(19): siRNA sense strand
aagcauauggaguggaaua

SEQ ID NO: 2343172 - RNA, 19 nt, Homo sapiens
  misc_RNA (1)...(19): siRNA sense strand
gacugaaauuagagaacaa

SEQ ID NO: 2343173 - RNA, 19 nt, Homo sapiens
  misc_RNA (1)...(19): siRNA sense strand
uagaugaaauggagagaga

SEQ ID NO: 2343174 - RNA, 19 nt, Homo sapiens
  misc_RNA (1)...(19): siRNA sense strand
gugcaauguuuguggcuuu

SEQ ID NO: 2343175 - RNA, 19 nt, Homo sapiens
  misc_RNA (1)...(19): siRNA sense strand
ggaaugaggaugauggaca

SEQ ID NO: 2343176 - RNA, 19 nt, Homo sapiens
  misc_RNA (1)...(19): siRNA sense strand
gcuaaaaggcucuacaaaa

SEQ ID NO: 2343177 - RNA, 19 nt, Homo sapiens
  misc_RNA (1)...(19): siRNA sense strand
gugugaagaaagugaguuu

SEQ ID NO: 2343178 - RNA, 19 nt, Homo sapiens
  misc_RNA (1)...(19): siRNA sense strand
gaagauuuaaggagaacaa

SEQ ID NO: 2343179 - RNA, 19 nt, Homo sapiens
  misc_RNA (1)...(19): siRNA sense strand
ugauaauagagcugagauu

SEQ ID NO: 2343180 - RNA, 19 nt, Homo sapiens
  misc_RNA (1)...(19): siRNA sense strand
gcacuuaacacaaaagaaa

SEQ ID NO: 2343181 - RNA, 19 nt, Homo sapiens
  misc_RNA (1)...(19): siRNA sense strand
gugcagaggugaagccuga

SEQ ID NO: 2343182 - RNA, 19 nt, Homo sapiens
  misc_RNA (1)...(19): siRNA sense strand
aggaauuaccacugaauau

SEQ ID NO: 2343183 - RNA, 19 nt, Homo sapiens
  misc_RNA (1)...(19): siRNA sense strand
gguaugauccagaaggcua

SEQ ID NO: 2343184 - RNA, 19 nt, Homo sapiens
  misc_RNA (1)...(19): siRNA sense strand
acucgaugcuguugaacua

SEQ ID NO: 2343185 - RNA, 19 nt, Homo sapiens
  misc_RNA (1)...(19): siRNA sense strand
aggcugaagugcugaguga

SEQ ID NO: 2343186 - RNA, 19 nt, Homo sapiens
  misc_RNA (1)...(19): siRNA sense strand
cugaagaagaucauggcua

SEQ ID NO: 2343187 - RNA, 19 nt, Homo sapiens
  misc_RNA (1)...(19): siRNA sense strand
cugagaaauuccagcaaca

SEQ ID NO: 2343188 - RNA, 19 nt, Homo sapiens
  misc_RNA (1)...(19): siRNA sense strand
acaucaaaccaaagccaaa

SEQ ID NO: 2343189 - RNA, 19 nt, Homo sapiens
  misc_RNA (1)...(19): siRNA sense strand
cauauaacccagucacaaa

SEQ ID NO: 2343190 - RNA, 19 nt, Homo sapiens
  misc_RNA (1)...(19): siRNA sense strand
cgauauucuaagacugaaa

SEQ ID NO: 2343191 - RNA, 19 nt, Homo sapiens
  misc_RNA (1)...(19): siRNA sense strand
ccaaacaguugcagcacau

SEQ ID NO: 2343192 - RNA, 19 nt, Homo sapiens
  misc_RNA (1)...(19): siRNA sense strand
guggaauacccaaaugaaa

SEQ ID NO: 2343193 - RNA, 19 nt, Homo sapiens
  misc_RNA (1)...(19): siRNA sense strand
ggaaaauaucacucaguua

SEQ ID NO: 2343194 - RNA, 19 nt, Homo sapiens
  misc_RNA (1)...(19): siRNA sense strand
gaaggaacucccaggaaau

SEQ ID NO: 2343195 - RNA, 19 nt, Homo sapiens
  misc_RNA (1)...(19): siRNA sense strand
gagauuaagaguugagagu

SEQ ID NO: 2343196 - RNA, 19 nt, Homo sapiens
  misc_RNA (1)...(19): siRNA sense strand
uggagaaugaguugagcua

SEQ ID NO: 2343197 - RNA, 19 nt, Homo sapiens
  misc_RNA (1)...(19): siRNA sense strand
ucauaagagaguuggaaca

SEQ ID NO: 2343198 - RNA, 19 nt, Homo sapiens
  misc_RNA (1)...(19): siRNA sense strand
caauagaugaggaugaaga

SEQ ID NO: 2343199 - RNA, 19 nt, Homo sapiens
  misc_RNA (1)...(19): siRNA sense strand
gagagaggcuggauggcuu

SEQ ID NO: 2343200 - RNA, 19 nt, Homo sapiens
  misc_RNA (1)...(19): siRNA sense strand
caaauuucuuagugaguca

SEQ ID NO: 2343201 - RNA, 19 nt, Homo sapiens
  misc_RNA (1)...(19): siRNA sense strand
cuggcggaauuaagagaaa

SEQ ID NO: 2343202 - RNA, 19 nt, Homo sapiens
  misc_RNA (1)...(19): siRNA sense strand
acaagaagccuaagaacca

SEQ ID NO: 2343203 - RNA, 19 nt, Homo sapiens
  misc_RNA (1)...(19): siRNA sense strand
uggcaauauucuuccuaaa

SEQ ID NO: 2343204 - RNA, 19 nt, Homo sapiens
  misc_RNA (1)...(19): siRNA sense strand
caggaggcaugaagaggaa

SEQ ID NO: 2343205 - RNA, 19 nt, Homo sapiens
  misc_RNA (1)...(19): siRNA sense strand
ucaacgaaucccugauaaa

SEQ ID NO: 2343206 - RNA, 19 nt, Homo sapiens
  misc_RNA (1)...(19): siRNA sense strand
gauaguauugaaagagcaa

SEQ ID NO: 2343207 - RNA, 19 nt, Homo sapiens
  misc_RNA (1)...(19): siRNA sense strand
gaagaugcaaugaaagaau

SEQ ID NO: 2343208 - RNA, 19 nt, Homo sapiens
  misc_RNA (1)...(19): siRNA sense strand
aaauggagagagaggcuaa

SEQ ID NO: 2343209 - RNA, 19 nt, Homo sapiens
  misc_RNA (1)...(19): siRNA sense strand
uagaagaugcaaugaaaga

SEQ ID NO: 2343210 - RNA, 19 nt, Homo sapiens
  misc_RNA (1)...(19): siRNA sense strand
acaaaggcaauaauggaaa

SEQ ID NO: 2343211 - RNA, 19 nt, Homo sapiens
  misc_RNA (1)...(19): siRNA sense strand
cucaagaguggauggauaa

SEQ ID NO: 2343212 - RNA, 19 nt, Homo sapiens
  misc_RNA (1)...(19): siRNA sense strand
acaggauaguauugaaaga

SEQ ID NO: 2343213 - RNA, 19 nt, Homo sapiens
  misc_RNA (1)...(19): siRNA sense strand
agugcaagaccaagaacaa

SEQ ID NO: 2343214 - RNA, 19 nt, Homo sapiens
  misc_RNA (1)...(19): siRNA sense strand
gugaagaaagugaguuuga

SEQ ID NO: 2343215 - RNA, 19 nt, Homo sapiens
  misc_RNA (1)...(19): siRNA sense strand
aggcacugcaaaugaauua

SEQ ID NO: 2343216 - RNA, 19 nt, Homo sapiens
  misc_RNA (1)...(19): siRNA sense strand
gcauuauguucucaaggaa

SEQ ID NO: 2343217 - RNA, 19 nt, Homo sapiens
  misc_RNA (1)...(19): siRNA sense strand
ccagaauacucuaaggaac

SEQ ID NO: 2343218 - RNA, 19 nt, Homo sapiens
  misc_RNA (1)...(19): siRNA sense strand
gauacgaagaacagggcau

SEQ ID NO: 2343219 - RNA, 19 nt, Homo sapiens
  misc_RNA (1)...(19): siRNA sense strand
ccucuaacaucgagccuga

SEQ ID NO: 2343220 - RNA, 19 nt, Homo sapiens
  misc_RNA (1)...(19): siRNA sense strand
gagugaauggagcaggaaa

SEQ ID NO: 2343221 - RNA, 19 nt, Homo sapiens
  misc_RNA (1)...(19): siRNA sense strand
ccuauuggaaggagcgauu

SEQ ID NO: 2343222 - RNA, 19 nt, Homo sapiens
  misc_RNA (1)...(19): siRNA sense strand
ggguaguaauuuuggauga

SEQ ID NO: 2343223 - RNA, 19 nt, Homo sapiens
  misc_RNA (1)...(19): siRNA sense strand
aaaccuauguuguugggaa

SEQ ID NO: 2343224 - RNA, 19 nt, Homo sapiens
  misc_RNA (1)...(19): siRNA sense strand
ggauaguauugaaagagca

SEQ ID NO: 2343225 - RNA, 19 nt, Homo sapiens
  misc_RNA (1)...(19): siRNA sense strand
acaugaagaugaugggugu

SEQ ID NO: 2343226 - RNA, 19 nt, Homo sapiens
  misc_RNA (1)...(19): siRNA sense strand
cgguuauugccaugagcua

SEQ ID NO: 2343227 - RNA, 19 nt, Homo sapiens
  misc_RNA (1)...(19): siRNA sense strand
ugguuacaguggagaauga

SEQ ID NO: 2343228 - RNA, 19 nt, Homo sapiens
  misc_RNA (1)...(19): siRNA sense strand
ggguaacaaacuucauuua

SEQ ID NO: 2343229 - RNA, 19 nt, Homo sapiens
  misc_RNA (1)...(19): siRNA sense strand
ccugcauucuacagugaaa

SEQ ID NO: 2343230 - RNA, 19 nt, Homo sapiens
  misc_RNA (1)...(19): siRNA sense strand
augaaaccuuugagaugaa

SEQ ID NO: 2343231 - RNA, 19 nt, Homo sapiens
  misc_RNA (1)...(19): siRNA sense strand
gauuaagaguugagagugg

SEQ ID NO: 2343232 - RNA, 19 nt, Homo sapiens
  misc_RNA (1)...(19): siRNA sense strand
cagcaggaggagucgcaaa

SEQ ID NO: 2343233 - RNA, 19 nt, Homo sapiens
  misc_RNA (1)...(19): siRNA sense strand
gcacagagggugaaggaga

SEQ ID NO: 2343234 - RNA, 19 nt, Homo sapiens
  misc_RNA (1)...(19): siRNA sense strand
gaaucauccuggugggcaa

SEQ ID NO: 2343235 - RNA, 19 nt, Homo sapiens
  misc_RNA (1)...(19): siRNA sense strand
ggaucagaugaaagaguaa

SEQ ID NO: 2343236 - RNA, 19 nt, Homo sapiens
  misc_RNA (1)...(19): siRNA sense strand
agaugaaagaguaaaggaa

SEQ ID NO: 2343237 - RNA, 19 nt, Homo sapiens
  misc_RNA (1)...(19): siRNA sense strand
ugaaggagaucuuuggaga

SEQ ID NO: 2343238 - RNA, 19 nt, Homo sapiens
  misc_RNA (1)...(19): siRNA sense strand
gagaggaugccaugggaca

SEQ ID NO: 2343239 - RNA, 19 nt, Homo sapiens
  misc_RNA (1)...(19): siRNA sense strand
acaaagaggugcagaggug

SEQ ID NO: 2343240 - RNA, 19 nt, Homo sapiens
  misc_RNA (1)...(19): siRNA sense strand
caaaacaggaacuggcaaa

SEQ ID NO: 2343241 - RNA, 19 nt, Homo sapiens
  misc_RNA (1)...(19): siRNA sense strand
auaacaaagcccuaagcaa

SEQ ID NO: 2343242 - RNA, 19 nt, Homo sapiens
  misc_RNA (1)...(19): siRNA sense strand
agaucugagcugagaauca

SEQ ID NO: 2343243 - RNA, 19 nt, Homo sapiens
  misc_RNA (1)...(19): siRNA sense strand
cgcaagacuccuagguuau

SEQ ID NO: 2343244 - RNA, 19 nt, Homo sapiens
  misc_RNA (1)...(19): siRNA sense strand
gcaaagggccaaugugcca

SEQ ID NO: 2343245 - RNA, 19 nt, Homo sapiens
  misc_RNA (1)...(19): siRNA sense strand
cuuuaauaaccgugcugaa

SEQ ID NO: 2343246 - RNA, 19 nt, Homo sapiens
  misc_RNA (1)...(19): siRNA sense strand
uuauuagacuagaacgcaa

SEQ ID NO: 2343247 - RNA, 19 nt, Homo sapiens
  misc_RNA (1)...(19): siRNA sense strand
cuggggaaauagagagauu

SEQ ID NO: 2343248 - RNA, 19 nt, Homo sapiens
  misc_RNA (1)...(19): siRNA sense strand
caaaagugcugcagggaac

SEQ ID NO: 2343249 - RNA, 19 nt, Homo sapiens
  misc_RNA (1)...(19): siRNA sense strand
gaggaucuguugauggaga

SEQ ID NO: 2343250 - RNA, 19 nt, Homo sapiens
  misc_RNA (1)...(19): siRNA sense strand
gcaaaagugcugcagggaa

SEQ ID NO: 2343251 - RNA, 19 nt, Homo sapiens
  misc_RNA (1)...(19): siRNA sense strand
uaacaaagcccuaagcaag

SEQ ID NO: 2343252 - RNA, 19 nt, Homo sapiens
  misc_RNA (1)...(19): siRNA sense strand
aggaacuaauggacuguau

SEQ ID NO: 2343253 - RNA, 19 nt, Homo sapiens
  misc_RNA (1)...(19): siRNA sense strand
caaagaaguuacacagccu

SEQ ID NO: 2343254 - RNA, 19 nt, Homo sapiens
  misc_RNA (1)...(19): siRNA sense strand
aggaugaccaagugaagga

SEQ ID NO: 2343255 - RNA, 19 nt, Homo sapiens
  misc_RNA (1)...(19): siRNA sense strand
aggaucuguugauggagaa

SEQ ID NO: 2343256 - RNA, 19 nt, Homo sapiens
  misc_RNA (1)...(19): siRNA sense strand
agccuaauacagaggucua

SEQ ID NO: 2343257 - RNA, 19 nt, Homo sapiens
  misc_RNA (1)...(19): siRNA sense strand
ugguagaaccuaucggcaa

SEQ ID NO: 2343258 - RNA, 19 nt, Homo sapiens
  misc_RNA (1)...(19): siRNA sense strand
agucgagaauucagagagu

SEQ ID NO: 2343259 - RNA, 19 nt, Homo sapiens
  misc_RNA (1)...(19): siRNA sense strand
gguagaaccuaucggcaac

SEQ ID NO: 2343260 - RNA, 19 nt, Homo sapiens
  misc_RNA (1)...(19): siRNA sense strand
agaaaaugaagcucugaaa

SEQ ID NO: 2343261 - RNA, 19 nt, Homo sapiens
  misc_RNA (1)...(19): siRNA sense strand
cuuaaguccaagucgagaa

SEQ ID NO: 2343262 - RNA, 19 nt, Homo sapiens
  misc_RNA (1)...(19): siRNA sense strand
ccuaaagaugguagaaccu

SEQ ID NO: 2343263 - RNA, 19 nt, Homo sapiens
  misc_RNA (1)...(19): siRNA sense strand
uguacagagcaaagaaguu

SEQ ID NO: 2343264 - RNA, 19 nt, Homo sapiens
  misc_RNA (1)...(19): siRNA sense strand
acgagaacgaggagcagaa

SEQ ID NO: 2343265 - RNA, 19 nt, Homo sapiens
  misc_RNA (1)...(19): siRNA sense strand
cggacaaggagacggccaa

SEQ ID NO: 2343266 - RNA, 19 nt, Homo sapiens
  misc_RNA (1)...(19): siRNA sense strand
cggccaacaacgagaacga

SEQ ID NO: 2343267 - RNA, 19 nt, Homo sapiens
  misc_RNA (1)...(19): siRNA sense strand
gagcagaacucgggcacca

SEQ ID NO: 2343268 - RNA, 19 nt, Homo sapiens
  misc_RNA (1)...(19): siRNA sense strand
gcaccaccaucaaggccaa

SEQ ID NO: 2343269 - RNA, 19 nt, Homo sapiens
  misc_RNA (1)...(19): siRNA sense strand
acaacgagaacgaggagca

SEQ ID NO: 2343270 - RNA, 19 nt, Homo sapiens
  misc_RNA (1)...(19): siRNA sense strand
uggacgagucugagauguu

SEQ ID NO: 2343271 - RNA, 19 nt, Homo sapiens
  misc_RNA (1)...(19): siRNA sense strand
ggacauggguggaaggauc

SEQ ID NO: 2343272 - RNA, 19 nt, Homo sapiens
  misc_RNA (1)...(19): siRNA sense strand
ggucaaggacguaacgcua

SEQ ID NO: 2343273 - RNA, 19 nt, Homo sapiens
  misc_RNA (1)...(19): siRNA sense strand
ccugugaggucgaugggaa

SEQ ID NO: 2343274 - RNA, 19 nt, Homo sapiens
  misc_RNA (1)...(19): siRNA sense strand
uuacuuggcuggagggaac

SEQ ID NO: 2343275 - RNA, 19 nt, Homo sapiens
  misc_RNA (1)...(19): siRNA sense strand
acaucggccugucgagcaa

SEQ ID NO: 2343276 - RNA, 19 nt, Homo sapiens
  misc_RNA (1)...(19): siRNA sense strand
gcgaguacaacgugcagga

SEQ ID NO: 2343277 - RNA, 19 nt, Homo sapiens
  misc_RNA (1)...(19): siRNA sense strand
gagcucagguugugggaga

SEQ ID NO: 2343278 - RNA, 19 nt, Homo sapiens
  misc_RNA (1)...(19): siRNA sense strand
cgaaggaucuugacgagga

SEQ ID NO: 2343279 - RNA, 19 nt, Homo sapiens
  misc_RNA (1)...(19): siRNA sense strand
ccaacuugacugugcgaga

SEQ ID NO: 2343280 - RNA, 19 nt, Homo sapiens
  misc_RNA (1)...(19): siRNA sense strand
uauggaaagcagagacgaa

SEQ ID NO: 2343281 - RNA, 19 nt, Homo sapiens
  misc_RNA (1)...(19): siRNA sense strand
acaaaaggguggaggacgu

SEQ ID NO: 2343282 - RNA, 19 nt, Homo sapiens
  misc_RNA (1)...(19): siRNA sense strand
gaauuggccaccagggaga

SEQ ID NO: 2343283 - RNA, 19 nt, Homo sapiens
  misc_RNA (1)...(19): siRNA sense strand
ccaccagggagaaggcuca

SEQ ID NO: 2343284 - RNA, 19 nt, Homo sapiens
  misc_RNA (1)...(19): siRNA sense strand
cgucagauuuccaacgacu

SEQ ID NO: 2343285 - RNA, 19 nt, Homo sapiens
  misc_RNA (1)...(19): siRNA sense strand
caaacagaaaccaagucaa

SEQ ID NO: 2343286 - RNA, 19 nt, Homo sapiens
  misc_RNA (1)...(19): siRNA sense strand
ccagaauucuugugagcug

SEQ ID NO: 2343287 - RNA, 19 nt, Homo sapiens
  misc_RNA (1)...(19): siRNA sense strand
auucaguucagcagaagaa

SEQ ID NO: 2343288 - RNA, 19 nt, Homo sapiens
  misc_RNA (1)...(19): siRNA sense strand
ugguguggcugguggucuu

SEQ ID NO: 2343289 - RNA, 19 nt, Homo sapiens
  misc_RNA (1)...(19): siRNA sense strand
guccauauuucuuugccaa

SEQ ID NO: 2343290 - RNA, 19 nt, Homo sapiens
  misc_RNA (1)...(19): siRNA sense strand
uggagaagauggagggagu

SEQ ID NO: 2343291 - RNA, 19 nt, Homo sapiens
  misc_RNA (1)...(19): siRNA sense strand
gggcaggagggaaaggcaa

SEQ ID NO: 2343292 - RNA, 19 nt, Homo sapiens
  misc_RNA (1)...(19): siRNA sense strand
ggugaaggagggaggcaga

SEQ ID NO: 2343293 - RNA, 19 nt, Homo sapiens
  misc_RNA (1)...(19): siRNA sense strand
acgccggaauggugggauu

SEQ ID NO: 2343294 - RNA, 19 nt, Homo sapiens
  misc_RNA (1)...(19): siRNA sense strand
gcgagaaccuggagcagcu

SEQ ID NO: 2343295 - RNA, 19 nt, Homo sapiens
  misc_RNA (1)...(19): siRNA sense strand
ggacuaucggagagugcuu

SEQ ID NO: 2343296 - RNA, 19 nt, Homo sapiens
  misc_RNA (1)...(19): siRNA sense strand
gaggcagaguuguggccga

SEQ ID NO: 2343297 - RNA, 19 nt, Homo sapiens
  misc_RNA (1)...(19): siRNA sense strand
gcgugggagaugaguacau

SEQ ID NO: 2343298 - RNA, 19 nt, Homo sapiens
  misc_RNA (1)...(19): siRNA sense strand
ggaccguguuucagggcgu

SEQ ID NO: 2343299 - RNA, 19 nt, Homo sapiens
  misc_RNA (1)...(19): siRNA sense strand
ucgccaagcaucaggaacu

SEQ ID NO: 2343300 - RNA, 19 nt, Homo sapiens
  misc_RNA (1)...(19): siRNA sense strand
cagaagaugcagacgguga

SEQ ID NO: 2343301 - RNA, 19 nt, Homo sapiens
  misc_RNA (1)...(19): siRNA sense strand
acgaggaggaggaggauga

SEQ ID NO: 2343302 - RNA, 19 nt, Homo sapiens
  misc_RNA (1)...(19): siRNA sense strand
ccauugacgaggaggagga

SEQ ID NO: 2343303 - RNA, 19 nt, Homo sapiens
  misc_RNA (1)...(19): siRNA sense strand
ggguguacgagucggccaa

SEQ ID NO: 2343304 - RNA, 19 nt, Homo sapiens
  misc_RNA (1)...(19): siRNA sense strand
aggaggaggaggaugacau

SEQ ID NO: 2343305 - RNA, 19 nt, Homo sapiens
  misc_RNA (1)...(19): siRNA sense strand
uggaagagcucguggcgug

SEQ ID NO: 2343306 - RNA, 19 nt, Homo sapiens
  misc_RNA (1)...(19): siRNA sense strand
ugaugaauguggacccaga

SEQ ID NO: 2343307 - RNA, 19 nt, Homo sapiens
  misc_RNA (1)...(19): siRNA sense strand
acugcaagguggagcgcaa

SEQ ID NO: 2343308 - RNA, 19 nt, Homo sapiens
  misc_RNA (1)...(19): siRNA sense strand
acaagaaggucacaggcaa

SEQ ID NO: 2343309 - RNA, 19 nt, Homo sapiens
  misc_RNA (1)...(19): siRNA sense strand
ucaugaaggccgaggacga

SEQ ID NO: 2343310 - RNA, 19 nt, Homo sapiens
  misc_RNA (1)...(19): siRNA sense strand
gcaaacggaaagugggugu

SEQ ID NO: 2343311 - RNA, 19 nt, Homo sapiens
  misc_RNA (1)...(19): siRNA sense strand
aggccgaggacgacugcaa

SEQ ID NO: 2343312 - RNA, 19 nt, Homo sapiens
  misc_RNA (1)...(19): siRNA sense strand
ggugcauggaggagaagga

SEQ ID NO: 2343313 - RNA, 19 nt, Homo sapiens
  misc_RNA (1)...(19): siRNA sense strand
cggacuacgagaacgauga

SEQ ID NO: 2343314 - RNA, 19 nt, Homo sapiens
  misc_RNA (1)...(19): siRNA sense strand
cagcuguacaagaagguca

SEQ ID NO: 2343315 - RNA, 19 nt, Homo sapiens
  misc_RNA (1)...(19): siRNA sense strand
ggcucaaggaggagugcga

SEQ ID NO: 2343316 - RNA, 19 nt, Homo sapiens
  misc_RNA (1)...(19): siRNA sense strand
acugcaagguggagcgcaa

SEQ ID NO: 2343317 - RNA, 19 nt, Homo sapiens
  misc_RNA (1)...(19): siRNA sense strand
acaagaaggucacaggcaa

SEQ ID NO: 2343318 - RNA, 19 nt, Homo sapiens
  misc_RNA (1)...(19): siRNA sense strand
ucaugaaggccgaggacga

SEQ ID NO: 2343319 - RNA, 19 nt, Homo sapiens
  misc_RNA (1)...(19): siRNA sense strand
gcaaacggaaagugggugu

SEQ ID NO: 2343320 - RNA, 19 nt, Homo sapiens
  misc_RNA (1)...(19): siRNA sense strand
aggccgaggacgacugcaa

SEQ ID NO: 2343321 - RNA, 19 nt, Homo sapiens
  misc_RNA (1)...(19): siRNA sense strand
ggugcauggaggagaagga

SEQ ID NO: 2343322 - RNA, 19 nt, Homo sapiens
  misc_RNA (1)...(19): siRNA sense strand
cggacuacgagaacgauga

SEQ ID NO: 2343323 - RNA, 19 nt, Homo sapiens
  misc_RNA (1)...(19): siRNA sense strand
cagcuguacaagaagguca

SEQ ID NO: 2343324 - RNA, 19 nt, Homo sapiens
  misc_RNA (1)...(19): siRNA sense strand
gcgagaaggcggaugagcu

SEQ ID NO: 2343325 - RNA, 19 nt, Homo sapiens
  misc_RNA (1)...(19): siRNA sense strand
ggcucaaggaggagugcga

SEQ ID NO: 2343326 - RNA, 19 nt, Homo sapiens
  misc_RNA (1)...(19): siRNA sense strand
acugcaagguggagcgcaa

SEQ ID NO: 2343327 - RNA, 19 nt, Homo sapiens
  misc_RNA (1)...(19): siRNA sense strand
acaagaaggucacaggcaa

SEQ ID NO: 2343328 - RNA, 19 nt, Homo sapiens
  misc_RNA (1)...(19): siRNA sense strand
ucaugaaggccgaggacga

SEQ ID NO: 2343329 - RNA, 19 nt, Homo sapiens
  misc_RNA (1)...(19): siRNA sense strand
gcaaacggaaagugggugu

SEQ ID NO: 2343330 - RNA, 19 nt, Homo sapiens
  misc_RNA (1)...(19): siRNA sense strand
aggccgaggacgacugcaa

SEQ ID NO: 2343331 - RNA, 19 nt, Homo sapiens
  misc_RNA (1)...(19): siRNA sense strand
ggugcauggaggagaagga

SEQ ID NO: 2343332 - RNA, 19 nt, Homo sapiens
  misc_RNA (1)...(19): siRNA sense strand
cggacuacgagaacgauga

SEQ ID NO: 2343333 - RNA, 19 nt, Homo sapiens
  misc_RNA (1)...(19): siRNA sense strand
cagcuguacaagaagguca

SEQ ID NO: 2343334 - RNA, 19 nt, Homo sapiens
  misc_RNA (1)...(19): siRNA sense strand
gcgagaaggcggaugagcu

SEQ ID NO: 2343335 - RNA, 19 nt, Homo sapiens
  misc_RNA (1)...(19): siRNA sense strand
ggcucaaggaggagugcga

SEQ ID NO: 2343336 - RNA, 19 nt, Homo sapiens
  misc_RNA (1)...(19): siRNA sense strand
cggcuuugcugcuggggaa

SEQ ID NO: 2343337 - RNA, 19 nt, Homo sapiens
  misc_RNA (1)...(19): siRNA sense strand
ggaauuuacuucugcugca

SEQ ID NO: 2343338 - RNA, 19 nt, Homo sapiens
  misc_RNA (1)...(19): siRNA sense strand
gcuaauuacuggagggcug

SEQ ID NO: 2343339 - RNA, 19 nt, Homo sapiens
  misc_RNA (1)...(19): siRNA sense strand
cggcuuugcugcuggggaa

SEQ ID NO: 2343340 - RNA, 19 nt, Homo sapiens
  misc_RNA (1)...(19): siRNA sense strand
ccuacagcgacguggaaca

SEQ ID NO: 2343341 - RNA, 19 nt, Homo sapiens
  misc_RNA (1)...(19): siRNA sense strand
aguggaucauguuggaaau

SEQ ID NO: 2343342 - RNA, 19 nt, Homo sapiens
  misc_RNA (1)...(19): siRNA sense strand
ggaucauguuggaaaugca

SEQ ID NO: 2343343 - RNA, 19 nt, Homo sapiens
  misc_RNA (1)...(19): siRNA sense strand
ggaauuuacuucugcugca

SEQ ID NO: 2343344 - RNA, 19 nt, Homo sapiens
  misc_RNA (1)...(19): siRNA sense strand
uauagaaugugaagaccca

SEQ ID NO: 2343345 - RNA, 19 nt, Homo sapiens
  misc_RNA (1)...(19): siRNA sense strand
uggaaauuuaccagggaaa

SEQ ID NO: 2343346 - RNA, 19 nt, Homo sapiens
  misc_RNA (1)...(19): siRNA sense strand
ugaagacagaguugggaaa

SEQ ID NO: 2343347 - RNA, 19 nt, Homo sapiens
  misc_RNA (1)...(19): siRNA sense strand
gggcaaugggaaugggagu

SEQ ID NO: 2343348 - RNA, 19 nt, Homo sapiens
  misc_RNA (1)...(19): siRNA sense strand
cagcuugggcaaugggaau

SEQ ID NO: 2343349 - RNA, 19 nt, Homo sapiens
  misc_RNA (1)...(19): siRNA sense strand
ccgaaggagaagagaguac

SEQ ID NO: 2343350 - RNA, 19 nt, Homo sapiens
  misc_RNA (1)...(19): siRNA sense strand
gcacuuuauggauggaaau

SEQ ID NO: 2343351 - RNA, 19 nt, Homo sapiens
  misc_RNA (1)...(19): siRNA sense strand
ggauuuauuuccagggaug

SEQ ID NO: 2343352 - RNA, 19 nt, Homo sapiens
  misc_RNA (1)...(19): siRNA sense strand
ccuaaauaugacaggaagu

SEQ ID NO: 2343353 - RNA, 19 nt, Homo sapiens
  misc_RNA (1)...(19): siRNA sense strand
ggccgaaggagaagagagu

SEQ ID NO: 2343354 - RNA, 19 nt, Homo sapiens
  misc_RNA (1)...(19): siRNA sense strand
gggaccagcaauucagcaa

SEQ ID NO: 2343355 - RNA, 19 nt, Homo sapiens
  misc_RNA (1)...(19): siRNA sense strand
agccuaaauaugacaggaa

SEQ ID NO: 2343356 - RNA, 19 nt, Homo sapiens
  misc_RNA (1)...(19): siRNA sense strand
auuacauggccgaaggaga

SEQ ID NO: 2343357 - RNA, 19 nt, Homo sapiens
  misc_RNA (1)...(19): siRNA sense strand
gcuucuacaagauuugaaa

SEQ ID NO: 2343358 - RNA, 19 nt, Homo sapiens
  misc_RNA (1)...(19): siRNA sense strand
cacauuuggaacagaguau

SEQ ID NO: 2343359 - RNA, 19 nt, Homo sapiens
  misc_RNA (1)...(19): siRNA sense strand
gaaaauuugaggugcugaa

SEQ ID NO: 2343360 - RNA, 19 nt, Homo sapiens
  misc_RNA (1)...(19): siRNA sense strand
ugaucauagcuuugcaaaa

SEQ ID NO: 2343361 - RNA, 19 nt, Homo sapiens
  misc_RNA (1)...(19): siRNA sense strand
cgaucaagcaggcagcuga

SEQ ID NO: 2343362 - RNA, 19 nt, Homo sapiens
  misc_RNA (1)...(19): siRNA sense strand
uaugacaggaagugguauu

SEQ ID NO: 2343363 - RNA, 19 nt, Homo sapiens
  misc_RNA (1)...(19): siRNA sense strand
augaagacagaguugggaa

SEQ ID NO: 2343364 - RNA, 19 nt, Homo sapiens
  misc_RNA (1)...(19): siRNA sense strand
uggaaauuuaccagggaaa

SEQ ID NO: 2343365 - RNA, 19 nt, Homo sapiens
  misc_RNA (1)...(19): siRNA sense strand
ugaagacagaguugggaaa

SEQ ID NO: 2343366 - RNA, 19 nt, Homo sapiens
  misc_RNA (1)...(19): siRNA sense strand
gggcaaugggaaugggagu

SEQ ID NO: 2343367 - RNA, 19 nt, Homo sapiens
  misc_RNA (1)...(19): siRNA sense strand
cagcuugggcaaugggaau

SEQ ID NO: 2343368 - RNA, 19 nt, Homo sapiens
  misc_RNA (1)...(19): siRNA sense strand
ccgaaggagaagagaguac

SEQ ID NO: 2343369 - RNA, 19 nt, Homo sapiens
  misc_RNA (1)...(19): siRNA sense strand
gcacuuuauggauggaaau

SEQ ID NO: 2343370 - RNA, 19 nt, Homo sapiens
  misc_RNA (1)...(19): siRNA sense strand
ggauuuauuuccagggaug

SEQ ID NO: 2343371 - RNA, 19 nt, Homo sapiens
  misc_RNA (1)...(19): siRNA sense strand
ccuaaauaugacaggaagu

SEQ ID NO: 2343372 - RNA, 19 nt, Homo sapiens
  misc_RNA (1)...(19): siRNA sense strand
ggccgaaggagaagagagu

SEQ ID NO: 2343373 - RNA, 19 nt, Homo sapiens
  misc_RNA (1)...(19): siRNA sense strand
gggaccagcaauucagcaa

SEQ ID NO: 2343374 - RNA, 19 nt, Homo sapiens
  misc_RNA (1)...(19): siRNA sense strand
agccuaaauaugacaggaa

SEQ ID NO: 2343375 - RNA, 19 nt, Homo sapiens
  misc_RNA (1)...(19): siRNA sense strand
auuacauggccgaaggaga

SEQ ID NO: 2343376 - RNA, 19 nt, Homo sapiens
  misc_RNA (1)...(19): siRNA sense strand
gcuucuacaagauuugaaa

SEQ ID NO: 2343377 - RNA, 19 nt, Homo sapiens
  misc_RNA (1)...(19): siRNA sense strand
cacauuuggaacagaguau

SEQ ID NO: 2343378 - RNA, 19 nt, Homo sapiens
  misc_RNA (1)...(19): siRNA sense strand
gaaaauuugaggugcugaa

SEQ ID NO: 2343379 - RNA, 19 nt, Homo sapiens
  misc_RNA (1)...(19): siRNA sense strand
ugaucauagcuuugcaaaa

SEQ ID NO: 2343380 - RNA, 19 nt, Homo sapiens
  misc_RNA (1)...(19): siRNA sense strand
uaugacaggaagugguauu

SEQ ID NO: 2343381 - RNA, 19 nt, Homo sapiens
  misc_RNA (1)...(19): siRNA sense strand
augaagacagaguugggaa

SEQ ID NO: 2343382 - RNA, 19 nt, Homo sapiens
  misc_RNA (1)...(19): siRNA sense strand
cgaucaagcaggcagcuga

SEQ ID NO: 2343383 - RNA, 19 nt, Homo sapiens
  misc_RNA (1)...(19): siRNA sense strand
ccacgguguuugagcggua

SEQ ID NO: 2343384 - RNA, 19 nt, Homo sapiens
  misc_RNA (1)...(19): siRNA sense strand
gggaagacgucgcugcuga

SEQ ID NO: 2343385 - RNA, 19 nt, Homo sapiens
  misc_RNA (1)...(19): siRNA sense strand
ccugcaagugaaaggcaaa

SEQ ID NO: 2343386 - RNA, 19 nt, Homo sapiens
  misc_RNA (1)...(19): siRNA sense strand
uggucaaccugcaagugaa

SEQ ID NO: 2343387 - RNA, 19 nt, Homo sapiens
  misc_RNA (1)...(19): siRNA sense strand
gaccagauguguucgggaa

SEQ ID NO: 2343388 - RNA, 19 nt, Homo sapiens
  misc_RNA (1)...(19): siRNA sense strand
acaugaggaaacugggcua

SEQ ID NO: 2343389 - RNA, 19 nt, Homo sapiens
  misc_RNA (1)...(19): siRNA sense strand
gagccaagaugugcggcaa

SEQ ID NO: 2343390 - RNA, 19 nt, Homo sapiens
  misc_RNA (1)...(19): siRNA sense strand
cgcccaguuuccagaguau

SEQ ID NO: 2343391 - RNA, 19 nt, Homo sapiens
  misc_RNA (1)...(19): siRNA sense strand
aggugguggcucaggguga

SEQ ID NO: 2343392 - RNA, 19 nt, Homo sapiens
  misc_RNA (1)...(19): siRNA sense strand
cggcugaagaaguaugaaa

SEQ ID NO: 2343393 - RNA, 19 nt, Homo sapiens
  misc_RNA (1)...(19): siRNA sense strand
acuuaauaguccaggauca

SEQ ID NO: 2343394 - RNA, 19 nt, Homo sapiens
  misc_RNA (1)...(19): siRNA sense strand
agugauguauggagagaau

SEQ ID NO: 2343395 - RNA, 19 nt, Homo sapiens
  misc_RNA (1)...(19): siRNA sense strand
ggcaauuggaaauggcaua

SEQ ID NO: 2343396 - RNA, 19 nt, Homo sapiens
  misc_RNA (1)...(19): siRNA sense strand
ggagcaauugggagaacaa

SEQ ID NO: 2343397 - RNA, 19 nt, Homo sapiens
  misc_RNA (1)...(19): siRNA sense strand
cuuccaagccucucagaaa

SEQ ID NO: 2343398 - RNA, 19 nt, Homo sapiens
  misc_RNA (1)...(19): siRNA sense strand
gcguuuggcaauuggaaau

SEQ ID NO: 2343399 - RNA, 19 nt, Homo sapiens
  misc_RNA (1)...(19): siRNA sense strand
ucaaauaauguuaggggaa

SEQ ID NO: 2343400 - RNA, 19 nt, Homo sapiens
  misc_RNA (1)...(19): siRNA sense strand
uggcauacggagugaugua

SEQ ID NO: 2343401 - RNA, 19 nt, Homo sapiens
  misc_RNA (1)...(19): siRNA sense strand
aagcaaacgucuauggugu

SEQ ID NO: 2343402 - RNA, 19 nt, Homo sapiens
  misc_RNA (1)...(19): siRNA sense strand
ugauguauggagagaauuu

SEQ ID NO: 2343403 - RNA, 19 nt, Homo sapiens
  misc_RNA (1)...(19): siRNA sense strand
ggaccguacuggagacacu

SEQ ID NO: 2343404 - RNA, 19 nt, Homo sapiens
  misc_RNA (1)...(19): siRNA sense strand
caaaagacaaccucggaaa

SEQ ID NO: 2343405 - RNA, 19 nt, Homo sapiens
  misc_RNA (1)...(19): siRNA sense strand
ucuaagagagaaggagaaa

SEQ ID NO: 2343406 - RNA, 19 nt, Homo sapiens
  misc_RNA (1)...(19): siRNA sense strand
uguugaagguggugcucau

SEQ ID NO: 2343407 - RNA, 19 nt, Homo sapiens
  misc_RNA (1)...(19): siRNA sense strand
ucaguauauuggagaacuu

SEQ ID NO: 2343408 - RNA, 19 nt, Homo sapiens
  misc_RNA (1)...(19): siRNA sense strand
agguguaauuucacucaaa

SEQ ID NO: 2343409 - RNA, 19 nt, Homo sapiens
  misc_RNA (1)...(19): siRNA sense strand
aaucuaagagagaaggaga

SEQ ID NO: 2343410 - RNA, 19 nt, Homo sapiens
  misc_RNA (1)...(19): siRNA sense strand
cgucuaugguguggcuaua

SEQ ID NO: 2343411 - RNA, 19 nt, Homo sapiens
  misc_RNA (1)...(19): siRNA sense strand
ccuaucaggauguagacaa

SEQ ID NO: 2343412 - RNA, 19 nt, Homo sapiens
  misc_RNA (1)...(19): siRNA sense strand
guuucaguauauuggagaa

SEQ ID NO: 2343413 - RNA, 19 nt, Homo sapiens
  misc_RNA (1)...(19): siRNA sense strand
uauaaaggugugugaacuu

SEQ ID NO: 2343414 - RNA, 19 nt, Homo sapiens
  misc_RNA (1)...(19): siRNA sense strand
cauaaggugcguuuggcaa

SEQ ID NO: 2343415 - RNA, 19 nt, Homo sapiens
  misc_RNA (1)...(19): siRNA sense strand
auucuugagucaugccaaa

SEQ ID NO: 2343416 - RNA, 19 nt, Homo sapiens
  misc_RNA (1)...(19): siRNA sense strand
uuggaacgguagaagaaau

SEQ ID NO: 2343417 - RNA, 19 nt, Homo sapiens
  misc_RNA (1)...(19): siRNA sense strand
gagaaggagaaaaggauca

SEQ ID NO: 2343418 - RNA, 19 nt, Homo sapiens
  misc_RNA (1)...(19): siRNA sense strand
aauggaagcaacaggaaca

SEQ ID NO: 2343419 - RNA, 19 nt, Homo sapiens
  misc_RNA (1)...(19): siRNA sense strand
uggugacugugcuggauaa

SEQ ID NO: 2343420 - RNA, 19 nt, Homo sapiens
  misc_RNA (1)...(19): siRNA sense strand
uggaaauggcauacggagu

SEQ ID NO: 2343421 - RNA, 19 nt, Homo sapiens
  misc_RNA (1)...(19): siRNA sense strand
cuuguguguuaaagaagaa

SEQ ID NO: 2343422 - RNA, 19 nt, Homo sapiens
  misc_RNA (1)...(19): siRNA sense strand
aaacaaucuaagagagaag

SEQ ID NO: 2343423 - RNA, 19 nt, Homo sapiens
  misc_RNA (1)...(19): siRNA sense strand
acggagugauguauggaga

SEQ ID NO: 2343424 - RNA, 19 nt, Homo sapiens
  misc_RNA (1)...(19): siRNA sense strand
gaagaaguaugaaaagaga

SEQ ID NO: 2343425 - RNA, 19 nt, Homo sapiens
  misc_RNA (1)...(19): siRNA sense strand
cagauggaaaggagaaaau

SEQ ID NO: 2343426 - RNA, 19 nt, Homo sapiens
  misc_RNA (1)...(19): siRNA sense strand
guuauuggaauguuggauu

SEQ ID NO: 2343427 - RNA, 19 nt, Homo sapiens
  misc_RNA (1)...(19): siRNA sense strand
ggcuauaucagguuaugaa

SEQ ID NO: 2343428 - RNA, 19 nt, Homo sapiens
  misc_RNA (1)...(19): siRNA sense strand
gcgcagauuugcuuggaac

SEQ ID NO: 2343429 - RNA, 19 nt, Homo sapiens
  misc_RNA (1)...(19): siRNA sense strand
agauuugcuuggaacggua

SEQ ID NO: 2343430 - RNA, 19 nt, Homo sapiens
  misc_RNA (1)...(19): siRNA sense strand
uugcaaacaaucuaagaga

SEQ ID NO: 2343431 - RNA, 19 nt, Homo sapiens
  misc_RNA (1)...(19): siRNA sense strand
aucuaagagagaaggagaa

SEQ ID NO: 2343432 - RNA, 19 nt, Homo sapiens
  misc_RNA (1)...(19): siRNA sense strand
ggcugaagaaguaugaaaa

SEQ ID NO: 2343433 - RNA, 19 nt, Homo sapiens
  misc_RNA (1)...(19): siRNA sense strand
agcaucaguugguggaaga

SEQ ID NO: 2343434 - RNA, 19 nt, Homo sapiens
  misc_RNA (1)...(19): siRNA sense strand
uuauaauucggcugaagaa

SEQ ID NO: 2343435 - RNA, 19 nt, Homo sapiens
  misc_RNA (1)...(19): siRNA sense strand
ugaacuacacugggagaau

SEQ ID NO: 2343436 - RNA, 19 nt, Homo sapiens
  misc_RNA (1)...(19): siRNA sense strand
auuucauacaggaagcaaa

SEQ ID NO: 2343437 - RNA, 19 nt, Homo sapiens
  misc_RNA (1)...(19): siRNA sense strand
agugcgagaucgugggcaa

SEQ ID NO: 2343438 - RNA, 19 nt, Homo sapiens
  misc_RNA (1)...(19): siRNA sense strand
cagcacaggcagaaggcau

SEQ ID NO: 2343439 - RNA, 19 nt, Homo sapiens
  misc_RNA (1)...(19): siRNA sense strand
aguacauggagcagaguuu

SEQ ID NO: 2343440 - RNA, 19 nt, Homo sapiens
  misc_RNA (1)...(19): siRNA sense strand
ugucaaagcagacgggcga

SEQ ID NO: 2343441 - RNA, 19 nt, Homo sapiens
  misc_RNA (1)...(19): siRNA sense strand
ggcgaagguuccaaggaca

SEQ ID NO: 2343442 - RNA, 19 nt, Homo sapiens
  misc_RNA (1)...(19): siRNA sense strand
ccaacgacuucaagccaca

SEQ ID NO: 2343443 - RNA, 19 nt, Homo sapiens
  misc_RNA (1)...(19): siRNA sense strand
acuucaagccacaggacuu

SEQ ID NO: 2343444 - RNA, 19 nt, Homo sapiens
  misc_RNA (1)...(19): siRNA sense strand
gcugcaagugccaguacaa

SEQ ID NO: 2343445 - RNA, 19 nt, Homo sapiens
  misc_RNA (1)...(19): siRNA sense strand
uaugauaacgugcggguga

SEQ ID NO: 2343446 - RNA, 19 nt, Homo sapiens
  misc_RNA (1)...(19): siRNA sense strand
cagcaggcauuguggugga

SEQ ID NO: 2343447 - RNA, 19 nt, Homo sapiens
  misc_RNA (1)...(19): siRNA sense strand
gacaacaaccugcggguca

SEQ ID NO: 2343448 - RNA, 19 nt, Homo sapiens
  misc_RNA (1)...(19): siRNA sense strand
acgaccauuuccagggcua

SEQ ID NO: 2343449 - RNA, 19 nt, Homo sapiens
  misc_RNA (1)...(19): siRNA sense strand
cucaaggccuacugggaga

SEQ ID NO: 2343450 - RNA, 19 nt, Homo sapiens
  misc_RNA (1)...(19): siRNA sense strand
agacaguucagcagggcga

SEQ ID NO: 2343451 - RNA, 19 nt, Homo sapiens
  misc_RNA (1)...(19): siRNA sense strand
gagaaaggaaggcagagga

SEQ ID NO: 2343452 - RNA, 19 nt, Homo sapiens
  misc_RNA (1)...(19): siRNA sense strand
aagcagugccagcaggaga

SEQ ID NO: 2343453 - RNA, 19 nt, Homo sapiens
  misc_RNA (1)...(19): siRNA sense strand
gugcagaacauuugaggaa

SEQ ID NO: 2343454 - RNA, 19 nt, Homo sapiens
  misc_RNA (1)...(19): siRNA sense strand
ugacaauugaagacagaaa

SEQ ID NO: 2343455 - RNA, 19 nt, Homo sapiens
  misc_RNA (1)...(19): siRNA sense strand
agaugaaagucuuggacau

SEQ ID NO: 2343456 - RNA, 19 nt, Homo sapiens
  misc_RNA (1)...(19): siRNA sense strand
auaugaaaccagaggagua

SEQ ID NO: 2343457 - RNA, 19 nt, Homo sapiens
  misc_RNA (1)...(19): siRNA sense strand
gugaugaagaugaggauga

SEQ ID NO: 2343458 - RNA, 19 nt, Homo sapiens
  misc_RNA (1)...(19): siRNA sense strand
aggaggaacuguugacaau

SEQ ID NO: 2343459 - RNA, 19 nt, Homo sapiens
  misc_RNA (1)...(19): siRNA sense strand
gcgcuuucccaguggauua

SEQ ID NO: 2343460 - RNA, 19 nt, Homo sapiens
  misc_RNA (1)...(19): siRNA sense strand
cugcagaggugaaggagca

SEQ ID NO: 2343461 - RNA, 19 nt, Homo sapiens
  misc_RNA (1)...(19): siRNA sense strand
guaucguguuauuggauua

SEQ ID NO: 2343462 - RNA, 19 nt, Homo sapiens
  misc_RNA (1)...(19): siRNA sense strand
agaagaugcugguguucaa

SEQ ID NO: 2343463 - RNA, 19 nt, Homo sapiens
  misc_RNA (1)...(19): siRNA sense strand
ggguggugaugaugaguau

SEQ ID NO: 2343464 - RNA, 19 nt, Homo sapiens
  misc_RNA (1)...(19): siRNA sense strand
ccuacaaauuaaugacaca

SEQ ID NO: 2343465 - RNA, 19 nt, Homo sapiens
  misc_RNA (1)...(19): siRNA sense strand
aggauugugcagaaagaaa

SEQ ID NO: 2343466 - RNA, 19 nt, Homo sapiens
  misc_RNA (1)...(19): siRNA sense strand
agccaaaucuggagaagga

SEQ ID NO: 2343467 - RNA, 19 nt, Homo sapiens
  misc_RNA (1)...(19): siRNA sense strand
guauugugauggugaugaa

SEQ ID NO: 2343468 - RNA, 19 nt, Homo sapiens
  misc_RNA (1)...(19): siRNA sense strand
uggaaaugaaucaggugua

SEQ ID NO: 2343469 - RNA, 19 nt, Homo sapiens
  misc_RNA (1)...(19): siRNA sense strand
ugucaaguccugugauauu

SEQ ID NO: 2343470 - RNA, 19 nt, Homo sapiens
  misc_RNA (1)...(19): siRNA sense strand
gcucauaagauuuuggaau

SEQ ID NO: 2343471 - RNA, 19 nt, Homo sapiens
  misc_RNA (1)...(19): siRNA sense strand
agaacguguuugugcagaa

SEQ ID NO: 2343472 - RNA, 19 nt, Homo sapiens
  misc_RNA (1)...(19): siRNA sense strand
gcguauacucaucuugaaa

SEQ ID NO: 2343473 - RNA, 19 nt, Homo sapiens
  misc_RNA (1)...(19): siRNA sense strand
aagccaaagcugaagaaca

SEQ ID NO: 2343474 - RNA, 19 nt, Homo sapiens
  misc_RNA (1)...(19): siRNA sense strand
uggaugaaacagauagauu

SEQ ID NO: 2343475 - RNA, 19 nt, Homo sapiens
  misc_RNA (1)...(19): siRNA sense strand
gagaaauauugccaagcau

SEQ ID NO: 2343476 - RNA, 19 nt, Homo sapiens
  misc_RNA (1)...(19): siRNA sense strand
cugcagaaaacaauggaaa

SEQ ID NO: 2343477 - RNA, 19 nt, Homo sapiens
  misc_RNA (1)...(19): siRNA sense strand
ccaaggaucacuuagacaa

SEQ ID NO: 2343478 - RNA, 19 nt, Homo sapiens
  misc_RNA (1)...(19): siRNA sense strand
aaaacaaagcacugcaaaa

SEQ ID NO: 2343479 - RNA, 19 nt, Homo sapiens
  misc_RNA (1)...(19): siRNA sense strand
guguaagagagcuacuaaa

SEQ ID NO: 2343480 - RNA, 19 nt, Homo sapiens
  misc_RNA (1)...(19): siRNA sense strand
gaacauuugaggaaguaca

SEQ ID NO: 2343481 - RNA, 19 nt, Homo sapiens
  misc_RNA (1)...(19): siRNA sense strand
ggagaauaacucaucagaa

SEQ ID NO: 2343482 - RNA, 19 nt, Homo sapiens
  misc_RNA (1)...(19): siRNA sense strand
gggaauucguggaggcccu

SEQ ID NO: 2343483 - RNA, 19 nt, Homo sapiens
  misc_RNA (1)...(19): siRNA sense strand
ggucuggauauuaaagaau

SEQ ID NO: 2343484 - RNA, 19 nt, Homo sapiens
  misc_RNA (1)...(19): siRNA sense strand
cagaauucaaggaacuuua

SEQ ID NO: 2343485 - RNA, 19 nt, Homo sapiens
  misc_RNA (1)...(19): siRNA sense strand
gaggaggaacuguugacaa

SEQ ID NO: 2343486 - RNA, 19 nt, Homo sapiens
  misc_RNA (1)...(19): siRNA sense strand
guugacaauugaagacaga

SEQ ID NO: 2343487 - RNA, 19 nt, Homo sapiens
  misc_RNA (1)...(19): siRNA sense strand
ccaacaaagaagcagugua

SEQ ID NO: 2343488 - RNA, 19 nt, Homo sapiens
  misc_RNA (1)...(19): siRNA sense strand
ccucagauacugggacuaa

SEQ ID NO: 2343489 - RNA, 19 nt, Homo sapiens
  misc_RNA (1)...(19): siRNA sense strand
ugaugaggguggugaugau

SEQ ID NO: 2343490 - RNA, 19 nt, Homo sapiens
  misc_RNA (1)...(19): siRNA sense strand
uggagaagaugcugguguu

SEQ ID NO: 2343491 - RNA, 19 nt, Homo sapiens
  misc_RNA (1)...(19): siRNA sense strand
augaagaugaggaugauuu

SEQ ID NO: 2343492 - RNA, 19 nt, Homo sapiens
  misc_RNA (1)...(19): siRNA sense strand
guuagagacgucuuggaua

SEQ ID NO: 2343493 - RNA, 19 nt, Homo sapiens
  misc_RNA (1)...(19): siRNA sense strand
aauaacaucaugaggcauu

SEQ ID NO: 2343494 - RNA, 19 nt, Homo sapiens
  misc_RNA (1)...(19): siRNA sense strand
agcuauacauuguguucaa

SEQ ID NO: 2343495 - RNA, 19 nt, Homo sapiens
  misc_RNA (1)...(19): siRNA sense strand
ggaauuuuguagugguuuu

SEQ ID NO: 2343496 - RNA, 19 nt, Homo sapiens
  misc_RNA (1)...(19): siRNA sense strand
ggauugugcagaaagaaaa

SEQ ID NO: 2343497 - RNA, 19 nt, Homo sapiens
  misc_RNA (1)...(19): siRNA sense strand
agacacaaguuuggcagaa

SEQ ID NO: 2343498 - RNA, 19 nt, Homo sapiens
  misc_RNA (1)...(19): siRNA sense strand
aaaugaaucagguguaaga

SEQ ID NO: 2343499 - RNA, 19 nt, Homo sapiens
  misc_RNA (1)...(19): siRNA sense strand
auaauaacaucaugaggca

SEQ ID NO: 2343500 - RNA, 19 nt, Homo sapiens
  misc_RNA (1)...(19): siRNA sense strand
agccaaagcugaagaacac

SEQ ID NO: 2343501 - RNA, 19 nt, Homo sapiens
  misc_RNA (1)...(19): siRNA sense strand
gcucagaaagcaaugcaga

SEQ ID NO: 2343502 - RNA, 19 nt, Homo sapiens
  misc_RNA (1)...(19): siRNA sense strand
gggucaagucagagagaua

SEQ ID NO: 2343503 - RNA, 19 nt, Homo sapiens
  misc_RNA (1)...(19): siRNA sense strand
cagaaugggcugugcgcua

SEQ ID NO: 2343504 - RNA, 19 nt, Homo sapiens
  misc_RNA (1)...(19): siRNA sense strand
gguauggcuuugagggugu

SEQ ID NO: 2343505 - RNA, 19 nt, Homo sapiens
  misc_RNA (1)...(19): siRNA sense strand
agagcagcccugagaagaa

SEQ ID NO: 2343506 - RNA, 19 nt, Homo sapiens
  misc_RNA (1)...(19): siRNA sense strand
gguacagccucaaagcgua

SEQ ID NO: 2343507 - RNA, 19 nt, Homo sapiens
  misc_RNA (1)...(19): siRNA sense strand
uguucagggcugugcagaa

SEQ ID NO: 2343508 - RNA, 19 nt, Homo sapiens
  misc_RNA (1)...(19): siRNA sense strand
ggacggaagauaaugggua

SEQ ID NO: 2343509 - RNA, 19 nt, Homo sapiens
  misc_RNA (1)...(19): siRNA sense strand
cagaacaacuaaugcguca

SEQ ID NO: 2343510 - RNA, 19 nt, Homo sapiens
  misc_RNA (1)...(19): siRNA sense strand
agguguuacuucugggcua

SEQ ID NO: 2343511 - RNA, 19 nt, Homo sapiens
  misc_RNA (1)...(19): siRNA sense strand
gcaaccgccucaagggcaa

SEQ ID NO: 2343512 - RNA, 19 nt, Homo sapiens
  misc_RNA (1)...(19): siRNA sense strand
acaggaaagucuaagggau

SEQ ID NO: 2343513 - RNA, 19 nt, Homo sapiens
  misc_RNA (1)...(19): siRNA sense strand
ccagauuggaccuuguaaa

SEQ ID NO: 2343514 - RNA, 19 nt, Homo sapiens
  misc_RNA (1)...(19): siRNA sense strand
accaaauuauggagugcaa

SEQ ID NO: 2343515 - RNA, 19 nt, Homo sapiens
  misc_RNA (1)...(19): siRNA sense strand
agauaauggguaaggaagu

SEQ ID NO: 2343516 - RNA, 19 nt, Homo sapiens
  misc_RNA (1)...(19): siRNA sense strand
gucaaagugaauugggcaa

SEQ ID NO: 2343517 - RNA, 19 nt, Homo sapiens
  misc_RNA (1)...(19): siRNA sense strand
guggcuugguggaagacaa

SEQ ID NO: 2343518 - RNA, 19 nt, Homo sapiens
  misc_RNA (1)...(19): siRNA sense strand
gugaaaugcuauuggggca

SEQ ID NO: 2343519 - RNA, 19 nt, Homo sapiens
  misc_RNA (1)...(19): siRNA sense strand
guaucgaguggcaggguau

SEQ ID NO: 2343520 - RNA, 19 nt, Homo sapiens
  misc_RNA (1)...(19): siRNA sense strand
gucaaauaccaaacagcua

SEQ ID NO: 2343521 - RNA, 19 nt, Homo sapiens
  misc_RNA (1)...(19): siRNA sense strand
aggaaagucuaagggauau

SEQ ID NO: 2343522 - RNA, 19 nt, Homo sapiens
  misc_RNA (1)...(19): siRNA sense strand
agacauggcaacaggaaag

SEQ ID NO: 2343523 - RNA, 19 nt, Homo sapiens
  misc_RNA (1)...(19): siRNA sense strand
gggccagugguauggaaau

SEQ ID NO: 2343524 - RNA, 19 nt, Homo sapiens
  misc_RNA (1)...(19): siRNA sense strand
gcaccauuuggaagaauau

SEQ ID NO: 2343525 - RNA, 19 nt, Homo sapiens
  misc_RNA (1)...(19): siRNA sense strand
acaaaugggaugcugaaaa

SEQ ID NO: 2343526 - RNA, 19 nt, Homo sapiens
  misc_RNA (1)...(19): siRNA sense strand
uggcuugguggaagacaaa

SEQ ID NO: 2343527 - RNA, 19 nt, Homo sapiens
  misc_RNA (1)...(19): siRNA sense strand
aaagaguacauaugaguca

SEQ ID NO: 2343528 - RNA, 19 nt, Homo sapiens
  misc_RNA (1)...(19): siRNA sense strand
gcuaugaauggacggaaga

SEQ ID NO: 2343529 - RNA, 19 nt, Homo sapiens
  misc_RNA (1)...(19): siRNA sense strand
gauuauggauacagcugga

SEQ ID NO: 2343530 - RNA, 19 nt, Homo sapiens
  misc_RNA (1)...(19): siRNA sense strand
aagacauggcaacaggaaa

SEQ ID NO: 2343531 - RNA, 19 nt, Homo sapiens
  misc_RNA (1)...(19): siRNA sense strand
cagauuggaccuuguaaaa

SEQ ID NO: 2343532 - RNA, 19 nt, Homo sapiens
  misc_RNA (1)...(19): siRNA sense strand
cauaugagucaaauaccaa

SEQ ID NO: 2343533 - RNA, 19 nt, Homo sapiens
  misc_RNA (1)...(19): siRNA sense strand
uggcaacaggaaagucuaa

SEQ ID NO: 2343534 - RNA, 19 nt, Homo sapiens
  misc_RNA (1)...(19): siRNA sense strand
cugcaacucuuuagccaga

SEQ ID NO: 2343535 - RNA, 19 nt, Homo sapiens
  misc_RNA (1)...(19): siRNA sense strand
gguaucgaguggcagggua

SEQ ID NO: 2343536 - RNA, 19 nt, Homo sapiens
  misc_RNA (1)...(19): siRNA sense strand
guacuaccauugaagguca

SEQ ID NO: 2343537 - RNA, 19 nt, Homo sapiens
  misc_RNA (1)...(19): siRNA sense strand
acauaugagucaaauacca

SEQ ID NO: 2343538 - RNA, 19 nt, Homo sapiens
  misc_RNA (1)...(19): siRNA sense strand
cagcagaaucaaauuggau

SEQ ID NO: 2343539 - RNA, 19 nt, Homo sapiens
  misc_RNA (1)...(19): siRNA sense strand
agucuaagggauauggcuu

SEQ ID NO: 2343540 - RNA, 19 nt, Homo sapiens
  misc_RNA (1)...(19): siRNA sense strand
gguaaaagacauggcaaca

SEQ ID NO: 2343541 - RNA, 19 nt, Homo sapiens
  misc_RNA (1)...(19): siRNA sense strand
ccgugcaacagcagaauca

SEQ ID NO: 2343542 - RNA, 19 nt, Homo sapiens
  misc_RNA (1)...(19): siRNA sense strand
agcagaaucaaauuggaua

SEQ ID NO: 2343543 - RNA, 19 nt, Homo sapiens
  misc_RNA (1)...(19): siRNA sense strand
gugguauggaaaugcacaa

SEQ ID NO: 2343544 - RNA, 19 nt, Homo sapiens
  misc_RNA (1)...(19): siRNA sense strand
ggacggaagauaaugggua

SEQ ID NO: 2343545 - RNA, 19 nt, Homo sapiens
  misc_RNA (1)...(19): siRNA sense strand
cagaacaacuaaugcguca

SEQ ID NO: 2343546 - RNA, 19 nt, Homo sapiens
  misc_RNA (1)...(19): siRNA sense strand
agguguuacuucugggcua

SEQ ID NO: 2343547 - RNA, 19 nt, Homo sapiens
  misc_RNA (1)...(19): siRNA sense strand
gcaaccgccucaagggcaa

SEQ ID NO: 2343548 - RNA, 19 nt, Homo sapiens
  misc_RNA (1)...(19): siRNA sense strand
acaggaaagucuaagggau

SEQ ID NO: 2343549 - RNA, 19 nt, Homo sapiens
  misc_RNA (1)...(19): siRNA sense strand
ccagauuggaccuuguaaa

SEQ ID NO: 2343550 - RNA, 19 nt, Homo sapiens
  misc_RNA (1)...(19): siRNA sense strand
accaaauuauggagugcaa

SEQ ID NO: 2343551 - RNA, 19 nt, Homo sapiens
  misc_RNA (1)...(19): siRNA sense strand
agauaauggguaaggaagu

SEQ ID NO: 2343552 - RNA, 19 nt, Homo sapiens
  misc_RNA (1)...(19): siRNA sense strand
gucaaagugaauugggcaa

SEQ ID NO: 2343553 - RNA, 19 nt, Homo sapiens
  misc_RNA (1)...(19): siRNA sense strand
guggcuugguggaagacaa

SEQ ID NO: 2343554 - RNA, 19 nt, Homo sapiens
  misc_RNA (1)...(19): siRNA sense strand
gugaaaugcuauuggggca

SEQ ID NO: 2343555 - RNA, 19 nt, Homo sapiens
  misc_RNA (1)...(19): siRNA sense strand
guaucgaguggcaggguau

SEQ ID NO: 2343556 - RNA, 19 nt, Homo sapiens
  misc_RNA (1)...(19): siRNA sense strand
gucaaauaccaaacagcua

SEQ ID NO: 2343557 - RNA, 19 nt, Homo sapiens
  misc_RNA (1)...(19): siRNA sense strand
aggaaagucuaagggauau

SEQ ID NO: 2343558 - RNA, 19 nt, Homo sapiens
  misc_RNA (1)...(19): siRNA sense strand
agacauggcaacaggaaag

SEQ ID NO: 2343559 - RNA, 19 nt, Homo sapiens
  misc_RNA (1)...(19): siRNA sense strand
gggccagugguauggaaau

SEQ ID NO: 2343560 - RNA, 19 nt, Homo sapiens
  misc_RNA (1)...(19): siRNA sense strand
gcaccauuuggaagaauau

SEQ ID NO: 2343561 - RNA, 19 nt, Homo sapiens
  misc_RNA (1)...(19): siRNA sense strand
acaaaugggaugcugaaaa

SEQ ID NO: 2343562 - RNA, 19 nt, Homo sapiens
  misc_RNA (1)...(19): siRNA sense strand
uggcuugguggaagacaaa

SEQ ID NO: 2343563 - RNA, 19 nt, Homo sapiens
  misc_RNA (1)...(19): siRNA sense strand
aaagaguacauaugaguca

SEQ ID NO: 2343564 - RNA, 19 nt, Homo sapiens
  misc_RNA (1)...(19): siRNA sense strand
gcuaugaauggacggaaga

SEQ ID NO: 2343565 - RNA, 19 nt, Homo sapiens
  misc_RNA (1)...(19): siRNA sense strand
gauuauggauacagcugga

SEQ ID NO: 2343566 - RNA, 19 nt, Homo sapiens
  misc_RNA (1)...(19): siRNA sense strand
aagacauggcaacaggaaa

SEQ ID NO: 2343567 - RNA, 19 nt, Homo sapiens
  misc_RNA (1)...(19): siRNA sense strand
cagauuggaccuuguaaaa

SEQ ID NO: 2343568 - RNA, 19 nt, Homo sapiens
  misc_RNA (1)...(19): siRNA sense strand
cauaugagucaaauaccaa

SEQ ID NO: 2343569 - RNA, 19 nt, Homo sapiens
  misc_RNA (1)...(19): siRNA sense strand
uggcaacaggaaagucuaa

SEQ ID NO: 2343570 - RNA, 19 nt, Homo sapiens
  misc_RNA (1)...(19): siRNA sense strand
cugcaacucuuuagccaga

SEQ ID NO: 2343571 - RNA, 19 nt, Homo sapiens
  misc_RNA (1)...(19): siRNA sense strand
gguaucgaguggcagggua

SEQ ID NO: 2343572 - RNA, 19 nt, Homo sapiens
  misc_RNA (1)...(19): siRNA sense strand
guacuaccauugaagguca

SEQ ID NO: 2343573 - RNA, 19 nt, Homo sapiens
  misc_RNA (1)...(19): siRNA sense strand
acauaugagucaaauacca

SEQ ID NO: 2343574 - RNA, 19 nt, Homo sapiens
  misc_RNA (1)...(19): siRNA sense strand
cagcagaaucaaauuggau

SEQ ID NO: 2343575 - RNA, 19 nt, Homo sapiens
  misc_RNA (1)...(19): siRNA sense strand
agucuaagggauauggcuu

SEQ ID NO: 2343576 - RNA, 19 nt, Homo sapiens
  misc_RNA (1)...(19): siRNA sense strand
gguaaaagacauggcaaca

SEQ ID NO: 2343577 - RNA, 19 nt, Homo sapiens
  misc_RNA (1)...(19): siRNA sense strand
ccgugcaacagcagaauca

SEQ ID NO: 2343578 - RNA, 19 nt, Homo sapiens
  misc_RNA (1)...(19): siRNA sense strand
agcagaaucaaauuggaua

SEQ ID NO: 2343579 - RNA, 19 nt, Homo sapiens
  misc_RNA (1)...(19): siRNA sense strand
gugguauggaaaugcacaa

SEQ ID NO: 2343580 - RNA, 19 nt, Homo sapiens
  misc_RNA (1)...(19): siRNA sense strand
ggaauaaaguuguugggaa

SEQ ID NO: 2343581 - RNA, 19 nt, Homo sapiens
  misc_RNA (1)...(19): siRNA sense strand
cccuagaacaccagcggaa

SEQ ID NO: 2343582 - RNA, 19 nt, Homo sapiens
  misc_RNA (1)...(19): siRNA sense strand
aaggaugagcccuggaaau

SEQ ID NO: 2343583 - RNA, 19 nt, Homo sapiens
  misc_RNA (1)...(19): siRNA sense strand
ccgcagaagagaaccgcaa

SEQ ID NO: 2343584 - RNA, 19 nt, Homo sapiens
  misc_RNA (1)...(19): siRNA sense strand
cagaagaguuugugcgcag

SEQ ID NO: 2343585 - RNA, 19 nt, Homo sapiens
  misc_RNA (1)...(19): siRNA sense strand
uguaauuaugacugggauu

SEQ ID NO: 2343586 - RNA, 19 nt, Homo sapiens
  misc_RNA (1)...(19): siRNA sense strand
acgaugaugcagagguuga

SEQ ID NO: 2343587 - RNA, 19 nt, Homo sapiens
  misc_RNA (1)...(19): siRNA sense strand
ucaucuucaucaugggcaa

SEQ ID NO: 2343588 - RNA, 19 nt, Homo sapiens
  misc_RNA (1)...(19): siRNA sense strand
gaagaagccucgagcacug

SEQ ID NO: 2343589 - RNA, 19 nt, Homo sapiens
  misc_RNA (1)...(19): siRNA sense strand
ucuggaaagugcuggggaa

SEQ ID NO: 2343590 - RNA, 19 nt, Homo sapiens
  misc_RNA (1)...(19): siRNA sense strand
cgguggaguaugaguucuu

SEQ ID NO: 2343591 - RNA, 19 nt, Homo sapiens
  misc_RNA (1)...(19): siRNA sense strand
ucacauaucaagaggaaaa

SEQ ID NO: 2343592 - RNA, 19 nt, Homo sapiens
  misc_RNA (1)...(19): siRNA sense strand
aguuugaagaggaaggaaa

SEQ ID NO: 2343593 - RNA, 19 nt, Homo sapiens
  misc_RNA (1)...(19): siRNA sense strand
uggaagaguaucaggagua

SEQ ID NO: 2343594 - RNA, 19 nt, Homo sapiens
  misc_RNA (1)...(19): siRNA sense strand
aaacuauugcccagagaaa

SEQ ID NO: 2343595 - RNA, 19 nt, Homo sapiens
  misc_RNA (1)...(19): siRNA sense strand
aguaugaagcugaaggaau

SEQ ID NO: 2343596 - RNA, 19 nt, Homo sapiens
  misc_RNA (1)...(19): siRNA sense strand
agaugaaagcacuaguaaa

SEQ ID NO: 2343597 - RNA, 19 nt, Homo sapiens
  misc_RNA (1)...(19): siRNA sense strand
cugaugaauuguauggaau

SEQ ID NO: 2343598 - RNA, 19 nt, Homo sapiens
  misc_RNA (1)...(19): siRNA sense strand
gggaagaaguaucugcuga

SEQ ID NO: 2343599 - RNA, 19 nt, Homo sapiens
  misc_RNA (1)...(19): siRNA sense strand
uggcauuauuacaggcauu

SEQ ID NO: 2343600 - RNA, 19 nt, Homo sapiens
  misc_RNA (1)...(19): siRNA sense strand
caggagaacuacaagcaga

SEQ ID NO: 2343601 - RNA, 19 nt, Homo sapiens
  misc_RNA (1)...(19): siRNA sense strand
ggguaugggaugaugggau

SEQ ID NO: 2343602 - RNA, 19 nt, Homo sapiens
  misc_RNA (1)...(19): siRNA sense strand
aggcauuggaagaguauca

SEQ ID NO: 2343603 - RNA, 19 nt, Homo sapiens
  misc_RNA (1)...(19): siRNA sense strand
uggaauaguuggugcuaac

SEQ ID NO: 2343604 - RNA, 19 nt, Homo sapiens
  misc_RNA (1)...(19): siRNA sense strand
uaugguugguagagaguau

SEQ ID NO: 2343605 - RNA, 19 nt, Homo sapiens
  misc_RNA (1)...(19): siRNA sense strand
augaacgaguggagcauau

SEQ ID NO: 2343606 - RNA, 19 nt, Homo sapiens
  misc_RNA (1)...(19): siRNA sense strand
ccuuacuauuccagcgcaa

SEQ ID NO: 2343607 - RNA, 19 nt, Homo sapiens
  misc_RNA (1)...(19): siRNA sense strand
cgucaaaggaggugccuac

SEQ ID NO: 2343608 - RNA, 19 nt, Homo sapiens
  misc_RNA (1)...(19): siRNA sense strand
uuaagaaguuugaagagga

SEQ ID NO: 2343609 - RNA, 19 nt, Homo sapiens
  misc_RNA (1)...(19): siRNA sense strand
ccagagaaagaauugacaa

SEQ ID NO: 2343610 - RNA, 19 nt, Homo sapiens
  misc_RNA (1)...(19): siRNA sense strand
guagagaguaugaagcuga

SEQ ID NO: 2343611 - RNA, 19 nt, Homo sapiens
  misc_RNA (1)...(19): siRNA sense strand
acuauugcccagagaaaga

SEQ ID NO: 2343612 - RNA, 19 nt, Homo sapiens
  misc_RNA (1)...(19): siRNA sense strand
uauuacaggcauuggaaga

SEQ ID NO: 2343613 - RNA, 19 nt, Homo sapiens
  misc_RNA (1)...(19): siRNA sense strand
aguuaugcugccaaagaaa

SEQ ID NO: 2343614 - RNA, 19 nt, Homo sapiens
  misc_RNA (1)...(19): siRNA sense strand
agaacuacaagcagaugaa

SEQ ID NO: 2343615 - RNA, 19 nt, Homo sapiens
  misc_RNA (1)...(19): siRNA sense strand
gaggagagcaggcagccaa

SEQ ID NO: 2343616 - RNA, 19 nt, Homo sapiens
  misc_RNA (1)...(19): siRNA sense strand
guuaccaguuauaugacaa

SEQ ID NO: 2343617 - RNA, 19 nt, Homo sapiens
  misc_RNA (1)...(19): siRNA sense strand
cccucuaccaggagaacua

SEQ ID NO: 2343618 - RNA, 19 nt, Homo sapiens
  misc_RNA (1)...(19): siRNA sense strand
gguaugggaugaugggauc

SEQ ID NO: 2343619 - RNA, 19 nt, Homo sapiens
  misc_RNA (1)...(19): siRNA sense strand
ccacgauaacaaaggacca

SEQ ID NO: 2343620 - RNA, 19 nt, Homo sapiens
  misc_RNA (1)...(19): siRNA sense strand
uaucaggaguagaaugcau

SEQ ID NO: 2343621 - RNA, 19 nt, Homo sapiens
  misc_RNA (1)...(19): siRNA sense strand
gagcauacuuaccucgaca

SEQ ID NO: 2343622 - RNA, 19 nt, Homo sapiens
  misc_RNA (1)...(19): siRNA sense strand
agaaauuggaugucaccau

SEQ ID NO: 2343623 - RNA, 19 nt, Homo sapiens
  misc_RNA (1)...(19): siRNA sense strand
caaugaugccaccgucaaa

SEQ ID NO: 2343624 - RNA, 19 nt, Homo sapiens
  misc_RNA (1)...(19): siRNA sense strand
caccaauagagaagacuga

SEQ ID NO: 2343625 - RNA, 19 nt, Homo sapiens
  misc_RNA (1)...(19): siRNA sense strand
gcauauaaaacuaggaggu

SEQ ID NO: 2343626 - RNA, 19 nt, Homo sapiens
  misc_RNA (1)...(19): siRNA sense strand
cugccauggcugaugaaaa

SEQ ID NO: 2343627 - RNA, 19 nt, Homo sapiens
  misc_RNA (1)...(19): siRNA sense strand
gugcuaaccuuaagaggag

SEQ ID NO: 2343628 - RNA, 19 nt, Homo sapiens
  misc_RNA (1)...(19): siRNA sense strand
ccgagaggucauugcuaga

SEQ ID NO: 2343629 - RNA, 19 nt, Homo sapiens
  misc_RNA (1)...(19): siRNA sense strand
uuaugcugccaaagaaaua

SEQ ID NO: 2343630 - RNA, 19 nt, Homo sapiens
  misc_RNA (1)...(19): siRNA sense strand
guggauggaagcagauuca

SEQ ID NO: 2343631 - RNA, 19 nt, Homo sapiens
  misc_RNA (1)...(19): siRNA sense strand
ugucagaaacagaagguga

SEQ ID NO: 2343632 - RNA, 19 nt, Homo sapiens
  misc_RNA (1)...(19): siRNA sense strand
gacuaaauuuacagguaca

SEQ ID NO: 2343633 - RNA, 19 nt, Homo sapiens
  misc_RNA (1)...(19): siRNA sense strand
aaacaaaaggagauggaau

SEQ ID NO: 2343634 - RNA, 19 nt, Homo sapiens
  misc_RNA (1)...(19): siRNA sense strand
ggaaacagugaauugggaa

SEQ ID NO: 2343635 - RNA, 19 nt, Homo sapiens
  misc_RNA (1)...(19): siRNA sense strand
ccgcuuacagaaagaacua

SEQ ID NO: 2343636 - RNA, 19 nt, Homo sapiens
  misc_RNA (1)...(19): siRNA sense strand
accaagagacacugaagaa

SEQ ID NO: 2343637 - RNA, 19 nt, Homo sapiens
  misc_RNA (1)...(19): siRNA sense strand
aaguagcagaaguggcaua

SEQ ID NO: 2343638 - RNA, 19 nt, Homo sapiens
  misc_RNA (1)...(19): siRNA sense strand
auuugauagccuagaggaa

SEQ ID NO: 2343639 - RNA, 19 nt, Homo sapiens
  misc_RNA (1)...(19): siRNA sense strand
cugaagaaucacuggaugu

SEQ ID NO: 2343640 - RNA, 19 nt, Homo sapiens
  misc_RNA (1)...(19): siRNA sense strand
gucagaaacagaaggugaa

SEQ ID NO: 2343641 - RNA, 19 nt, Homo sapiens
  misc_RNA (1)...(19): siRNA sense strand
gugauggaagaaagagcua

SEQ ID NO: 2343642 - RNA, 19 nt, Homo sapiens
  misc_RNA (1)...(19): siRNA sense strand
ggacuaaauuuacagguac

SEQ ID NO: 2343643 - RNA, 19 nt, Homo sapiens
  misc_RNA (1)...(19): siRNA sense strand
cuuuagaagagacaaacua

SEQ ID NO: 2343644 - RNA, 19 nt, Homo sapiens
  misc_RNA (1)...(19): siRNA sense strand
guuccugaucaaauggaua

SEQ ID NO: 2343645 - RNA, 19 nt, Homo sapiens
  misc_RNA (1)...(19): siRNA sense strand
cuuuagaaccugaagaauc

SEQ ID NO: 2343646 - RNA, 19 nt, Homo sapiens
  misc_RNA (1)...(19): siRNA sense strand
gaugaagaaucuagagcug

SEQ ID NO: 2343647 - RNA, 19 nt, Homo sapiens
  misc_RNA (1)...(19): siRNA sense strand
ggacauugcuaacugccuu

SEQ ID NO: 2343648 - RNA, 19 nt, Homo sapiens
  misc_RNA (1)...(19): siRNA sense strand
ugaagugauggaagaaaga

SEQ ID NO: 2343649 - RNA, 19 nt, Homo sapiens
  misc_RNA (1)...(19): siRNA sense strand
agauggaaucacuaaagaa

SEQ ID NO: 2343650 - RNA, 19 nt, Homo sapiens
  misc_RNA (1)...(19): siRNA sense strand
agaaguagcagaaguggca

SEQ ID NO: 2343651 - RNA, 19 nt, Homo sapiens
  misc_RNA (1)...(19): siRNA sense strand
cugugaaacuuuagaagag

SEQ ID NO: 2343652 - RNA, 19 nt, Homo sapiens
  misc_RNA (1)...(19): siRNA sense strand
acacuuuagagaacagaau

SEQ ID NO: 2343653 - RNA, 19 nt, Homo sapiens
  misc_RNA (1)...(19): siRNA sense strand
cagacaauuaggauuacaa

SEQ ID NO: 2343654 - RNA, 19 nt, Homo sapiens
  misc_RNA (1)...(19): siRNA sense strand
ccuugcagugagagaauuu

SEQ ID NO: 2343655 - RNA, 19 nt, Homo sapiens
  misc_RNA (1)...(19): siRNA sense strand
ucacuggaugugucagaaa

SEQ ID NO: 2343656 - RNA, 19 nt, Homo sapiens
  misc_RNA (1)...(19): siRNA sense strand
caguuagaagacucaaaua

SEQ ID NO: 2343657 - RNA, 19 nt, Homo sapiens
  misc_RNA (1)...(19): siRNA sense strand
ggguaauuuuaaacagaca

SEQ ID NO: 2343658 - RNA, 19 nt, Homo sapiens
  misc_RNA (1)...(19): siRNA sense strand
cuagaggaaagcagggcau

SEQ ID NO: 2343659 - RNA, 19 nt, Homo sapiens
  misc_RNA (1)...(19): siRNA sense strand
aagacucaaauauggguaa

SEQ ID NO: 2343660 - RNA, 19 nt, Homo sapiens
  misc_RNA (1)...(19): siRNA sense strand
cggaaacagugaauuggga

SEQ ID NO: 2343661 - RNA, 19 nt, Homo sapiens
  misc_RNA (1)...(19): siRNA sense strand
aagacagacaauuaggauu

SEQ ID NO: 2343662 - RNA, 19 nt, Homo sapiens
  misc_RNA (1)...(19): siRNA sense strand
gcaacuucauauagacacu

SEQ ID NO: 2343663 - RNA, 19 nt, Homo sapiens
  misc_RNA (1)...(19): siRNA sense strand
acuuuagagaacagaauca

SEQ ID NO: 2343664 - RNA, 19 nt, Homo sapiens
  misc_RNA (1)...(19): siRNA sense strand
cagagauagaaguagcaga

SEQ ID NO: 2343665 - RNA, 19 nt, Homo sapiens
  misc_RNA (1)...(19): siRNA sense strand
ugucagaaacagaagguga

SEQ ID NO: 2343666 - RNA, 19 nt, Homo sapiens
  misc_RNA (1)...(19): siRNA sense strand
gacuaaauuuacagguaca

SEQ ID NO: 2343667 - RNA, 19 nt, Homo sapiens
  misc_RNA (1)...(19): siRNA sense strand
aaacaaaaggagauggaau

SEQ ID NO: 2343668 - RNA, 19 nt, Homo sapiens
  misc_RNA (1)...(19): siRNA sense strand
ggaaacagugaauugggaa

SEQ ID NO: 2343669 - RNA, 19 nt, Homo sapiens
  misc_RNA (1)...(19): siRNA sense strand
ccgcuuacagaaagaacua

SEQ ID NO: 2343670 - RNA, 19 nt, Homo sapiens
  misc_RNA (1)...(19): siRNA sense strand
accaagagacacugaagaa

SEQ ID NO: 2343671 - RNA, 19 nt, Homo sapiens
  misc_RNA (1)...(19): siRNA sense strand
aaguagcagaaguggcaua

SEQ ID NO: 2343672 - RNA, 19 nt, Homo sapiens
  misc_RNA (1)...(19): siRNA sense strand
auuugauagccuagaggaa

SEQ ID NO: 2343673 - RNA, 19 nt, Homo sapiens
  misc_RNA (1)...(19): siRNA sense strand
cugaagaaucacuggaugu

SEQ ID NO: 2343674 - RNA, 19 nt, Homo sapiens
  misc_RNA (1)...(19): siRNA sense strand
gucagaaacagaaggugaa

SEQ ID NO: 2343675 - RNA, 19 nt, Homo sapiens
  misc_RNA (1)...(19): siRNA sense strand
gugauggaagaaagagcua

SEQ ID NO: 2343676 - RNA, 19 nt, Homo sapiens
  misc_RNA (1)...(19): siRNA sense strand
ggacuaaauuuacagguac

SEQ ID NO: 2343677 - RNA, 19 nt, Homo sapiens
  misc_RNA (1)...(19): siRNA sense strand
cuuuagaagagacaaacua

SEQ ID NO: 2343678 - RNA, 19 nt, Homo sapiens
  misc_RNA (1)...(19): siRNA sense strand
guuccugaucaaauggaua

SEQ ID NO: 2343679 - RNA, 19 nt, Homo sapiens
  misc_RNA (1)...(19): siRNA sense strand
cuuuagaaccugaagaauc

SEQ ID NO: 2343680 - RNA, 19 nt, Homo sapiens
  misc_RNA (1)...(19): siRNA sense strand
gaugaagaaucuagagcug

SEQ ID NO: 2343681 - RNA, 19 nt, Homo sapiens
  misc_RNA (1)...(19): siRNA sense strand
ggacauugcuaacugccuu

SEQ ID NO: 2343682 - RNA, 19 nt, Homo sapiens
  misc_RNA (1)...(19): siRNA sense strand
ugaagugauggaagaaaga

SEQ ID NO: 2343683 - RNA, 19 nt, Homo sapiens
  misc_RNA (1)...(19): siRNA sense strand
agauggaaucacuaaagaa

SEQ ID NO: 2343684 - RNA, 19 nt, Homo sapiens
  misc_RNA (1)...(19): siRNA sense strand
agaaguagcagaaguggca

SEQ ID NO: 2343685 - RNA, 19 nt, Homo sapiens
  misc_RNA (1)...(19): siRNA sense strand
cugugaaacuuuagaagag

SEQ ID NO: 2343686 - RNA, 19 nt, Homo sapiens
  misc_RNA (1)...(19): siRNA sense strand
acacuuuagagaacagaau

SEQ ID NO: 2343687 - RNA, 19 nt, Homo sapiens
  misc_RNA (1)...(19): siRNA sense strand
cagacaauuaggauuacaa

SEQ ID NO: 2343688 - RNA, 19 nt, Homo sapiens
  misc_RNA (1)...(19): siRNA sense strand
ccuugcagugagagaauuu

SEQ ID NO: 2343689 - RNA, 19 nt, Homo sapiens
  misc_RNA (1)...(19): siRNA sense strand
ucacuggaugugucagaaa

SEQ ID NO: 2343690 - RNA, 19 nt, Homo sapiens
  misc_RNA (1)...(19): siRNA sense strand
caguuagaagacucaaaua

SEQ ID NO: 2343691 - RNA, 19 nt, Homo sapiens
  misc_RNA (1)...(19): siRNA sense strand
ggguaauuuuaaacagaca

SEQ ID NO: 2343692 - RNA, 19 nt, Homo sapiens
  misc_RNA (1)...(19): siRNA sense strand
cuagaggaaagcagggcau

SEQ ID NO: 2343693 - RNA, 19 nt, Homo sapiens
  misc_RNA (1)...(19): siRNA sense strand
aagacucaaauauggguaa

SEQ ID NO: 2343694 - RNA, 19 nt, Homo sapiens
  misc_RNA (1)...(19): siRNA sense strand
cggaaacagugaauuggga

SEQ ID NO: 2343695 - RNA, 19 nt, Homo sapiens
  misc_RNA (1)...(19): siRNA sense strand
aagacagacaauuaggauu

SEQ ID NO: 2343696 - RNA, 19 nt, Homo sapiens
  misc_RNA (1)...(19): siRNA sense strand
gcaacuucauauagacacu

SEQ ID NO: 2343697 - RNA, 19 nt, Homo sapiens
  misc_RNA (1)...(19): siRNA sense strand
acuuuagagaacagaauca

SEQ ID NO: 2343698 - RNA, 19 nt, Homo sapiens
  misc_RNA (1)...(19): siRNA sense strand
cagagauagaaguagcaga

SEQ ID NO: 2343699 - RNA, 19 nt, Homo sapiens
  misc_RNA (1)...(19): siRNA sense strand
ugucagaaacagaagguga

SEQ ID NO: 2343700 - RNA, 19 nt, Homo sapiens
  misc_RNA (1)...(19): siRNA sense strand
gacuaaauuuacagguaca

SEQ ID NO: 2343701 - RNA, 19 nt, Homo sapiens
  misc_RNA (1)...(19): siRNA sense strand
aaacaaaaggagauggaau

SEQ ID NO: 2343702 - RNA, 19 nt, Homo sapiens
  misc_RNA (1)...(19): siRNA sense strand
ggaaacagugaauugggaa

SEQ ID NO: 2343703 - RNA, 19 nt, Homo sapiens
  misc_RNA (1)...(19): siRNA sense strand
ccgcuuacagaaagaacua

SEQ ID NO: 2343704 - RNA, 19 nt, Homo sapiens
  misc_RNA (1)...(19): siRNA sense strand
accaagagacacugaagaa

SEQ ID NO: 2343705 - RNA, 19 nt, Homo sapiens
  misc_RNA (1)...(19): siRNA sense strand
aaguagcagaaguggcaua

SEQ ID NO: 2343706 - RNA, 19 nt, Homo sapiens
  misc_RNA (1)...(19): siRNA sense strand
auuugauagccuagaggaa

SEQ ID NO: 2343707 - RNA, 19 nt, Homo sapiens
  misc_RNA (1)...(19): siRNA sense strand
cugaagaaucacuggaugu

SEQ ID NO: 2343708 - RNA, 19 nt, Homo sapiens
  misc_RNA (1)...(19): siRNA sense strand
gucagaaacagaaggugaa

SEQ ID NO: 2343709 - RNA, 19 nt, Homo sapiens
  misc_RNA (1)...(19): siRNA sense strand
gugauggaagaaagagcua

SEQ ID NO: 2343710 - RNA, 19 nt, Homo sapiens
  misc_RNA (1)...(19): siRNA sense strand
ggacuaaauuuacagguac

SEQ ID NO: 2343711 - RNA, 19 nt, Homo sapiens
  misc_RNA (1)...(19): siRNA sense strand
cuuuagaagagacaaacua

SEQ ID NO: 2343712 - RNA, 19 nt, Homo sapiens
  misc_RNA (1)...(19): siRNA sense strand
guuccugaucaaauggaua

SEQ ID NO: 2343713 - RNA, 19 nt, Homo sapiens
  misc_RNA (1)...(19): siRNA sense strand
cuuuagaaccugaagaauc

SEQ ID NO: 2343714 - RNA, 19 nt, Homo sapiens
  misc_RNA (1)...(19): siRNA sense strand
gaugaagaaucuagagcug

SEQ ID NO: 2343715 - RNA, 19 nt, Homo sapiens
  misc_RNA (1)...(19): siRNA sense strand
ggacauugcuaacugccuu

SEQ ID NO: 2343716 - RNA, 19 nt, Homo sapiens
  misc_RNA (1)...(19): siRNA sense strand
ugaagugauggaagaaaga

SEQ ID NO: 2343717 - RNA, 19 nt, Homo sapiens
  misc_RNA (1)...(19): siRNA sense strand
agauggaaucacuaaagaa

SEQ ID NO: 2343718 - RNA, 19 nt, Homo sapiens
  misc_RNA (1)...(19): siRNA sense strand
agaaguagcagaaguggca

SEQ ID NO: 2343719 - RNA, 19 nt, Homo sapiens
  misc_RNA (1)...(19): siRNA sense strand
cugugaaacuuuagaagag

SEQ ID NO: 2343720 - RNA, 19 nt, Homo sapiens
  misc_RNA (1)...(19): siRNA sense strand
acacuuuagagaacagaau

SEQ ID NO: 2343721 - RNA, 19 nt, Homo sapiens
  misc_RNA (1)...(19): siRNA sense strand
cagacaauuaggauuacaa

SEQ ID NO: 2343722 - RNA, 19 nt, Homo sapiens
  misc_RNA (1)...(19): siRNA sense strand
ccuugcagugagagaauuu

SEQ ID NO: 2343723 - RNA, 19 nt, Homo sapiens
  misc_RNA (1)...(19): siRNA sense strand
ucacuggaugugucagaaa

SEQ ID NO: 2343724 - RNA, 19 nt, Homo sapiens
  misc_RNA (1)...(19): siRNA sense strand
caguuagaagacucaaaua

SEQ ID NO: 2343725 - RNA, 19 nt, Homo sapiens
  misc_RNA (1)...(19): siRNA sense strand
ggguaauuuuaaacagaca

SEQ ID NO: 2343726 - RNA, 19 nt, Homo sapiens
  misc_RNA (1)...(19): siRNA sense strand
cuagaggaaagcagggcau

SEQ ID NO: 2343727 - RNA, 19 nt, Homo sapiens
  misc_RNA (1)...(19): siRNA sense strand
aagacucaaauauggguaa

SEQ ID NO: 2343728 - RNA, 19 nt, Homo sapiens
  misc_RNA (1)...(19): siRNA sense strand
cggaaacagugaauuggga

SEQ ID NO: 2343729 - RNA, 19 nt, Homo sapiens
  misc_RNA (1)...(19): siRNA sense strand
aagacagacaauuaggauu

SEQ ID NO: 2343730 - RNA, 19 nt, Homo sapiens
  misc_RNA (1)...(19): siRNA sense strand
gcaacuucauauagacacu

SEQ ID NO: 2343731 - RNA, 19 nt, Homo sapiens
  misc_RNA (1)...(19): siRNA sense strand
acuuuagagaacagaauca

SEQ ID NO: 2343732 - RNA, 19 nt, Homo sapiens
  misc_RNA (1)...(19): siRNA sense strand
cagagauagaaguagcaga

SEQ ID NO: 2343733 - RNA, 19 nt, Homo sapiens
  misc_RNA (1)...(19): siRNA sense strand
cuacagacauacaaggaga

SEQ ID NO: 2343734 - RNA, 19 nt, Homo sapiens
  misc_RNA (1)...(19): siRNA sense strand
ccuaugcuguggaggguga

SEQ ID NO: 2343735 - RNA, 19 nt, Homo sapiens
  misc_RNA (1)...(19): siRNA sense strand
ugaggaagucugugagcca

SEQ ID NO: 2343736 - RNA, 19 nt, Homo sapiens
  misc_RNA (1)...(19): siRNA sense strand
ccgagaagggugaugagga

SEQ ID NO: 2343737 - RNA, 19 nt, Homo sapiens
  misc_RNA (1)...(19): siRNA sense strand
ugguauaccgccugcguga

SEQ ID NO: 2343738 - RNA, 19 nt, Homo sapiens
  misc_RNA (1)...(19): siRNA sense strand
cugugaaacgaaugaguau

SEQ ID NO: 2343739 - RNA, 19 nt, Homo sapiens
  misc_RNA (1)...(19): siRNA sense strand
acauggauaaggauggaaa

SEQ ID NO: 2343740 - RNA, 19 nt, Homo sapiens
  misc_RNA (1)...(19): siRNA sense strand
augagaaacagcaguggaa

SEQ ID NO: 2343741 - RNA, 19 nt, Homo sapiens
  misc_RNA (1)...(19): siRNA sense strand
aacaaaggaucaaaggaga

SEQ ID NO: 2343742 - RNA, 19 nt, Homo sapiens
  misc_RNA (1)...(19): siRNA sense strand
ggauaaggauggaaagugg

SEQ ID NO: 2343743 - RNA, 19 nt, Homo sapiens
  misc_RNA (1)...(19): siRNA sense strand
gggaaauucucucaggaag

SEQ ID NO: 2343744 - RNA, 19 nt, Homo sapiens
  misc_RNA (1)...(19): siRNA sense strand
ccaguuaccuguugggaug

SEQ ID NO: 2343745 - RNA, 19 nt, Homo sapiens
  misc_RNA (1)...(19): siRNA sense strand
ccucugucuucgaugagaa

SEQ ID NO: 2343746 - RNA, 19 nt, Homo sapiens
  misc_RNA (1)...(19): siRNA sense strand
uguacaacggccaguggaa

SEQ ID NO: 2343747 - RNA, 19 nt, Homo sapiens
  misc_RNA (1)...(19): siRNA sense strand
cagaggaggaagaggagga

SEQ ID NO: 2343748 - RNA, 19 nt, Homo sapiens
  misc_RNA (1)...(19): siRNA sense strand
ugacagaggaggaagagga

SEQ ID NO: 2343749 - RNA, 19 nt, Homo sapiens
  misc_RNA (1)...(19): siRNA sense strand
ggaagaaccggaagacgca

SEQ ID NO: 2343750 - RNA, 19 nt, Homo sapiens
  misc_RNA (1)...(19): siRNA sense strand
gagaggacgugcaaggugu

SEQ ID NO: 2343751 - RNA, 19 nt, Homo sapiens
  misc_RNA (1)...(19): siRNA sense strand
gcaugggcucugaggaguu

SEQ ID NO: 2343752 - RNA, 19 nt, Homo sapiens
  misc_RNA (1)...(19): siRNA sense strand
gcucugaggaguugcgucu

SEQ ID NO: 2343753 - RNA, 19 nt, Homo sapiens
  misc_RNA (1)...(19): siRNA sense strand
cagaggaggaagaggagga

SEQ ID NO: 2343754 - RNA, 19 nt, Homo sapiens
  misc_RNA (1)...(19): siRNA sense strand
ugacagaggaggaagagga

SEQ ID NO: 2343755 - RNA, 19 nt, Homo sapiens
  misc_RNA (1)...(19): siRNA sense strand
ggaagaaccggaagacgca

SEQ ID NO: 2343756 - RNA, 19 nt, Homo sapiens
  misc_RNA (1)...(19): siRNA sense strand
gagaggacgugcaaggugu

SEQ ID NO: 2343757 - RNA, 19 nt, Homo sapiens
  misc_RNA (1)...(19): siRNA sense strand
gcaugggcucugaggaguu

SEQ ID NO: 2343758 - RNA, 19 nt, Homo sapiens
  misc_RNA (1)...(19): siRNA sense strand
gcucugaggaguugcgucu

SEQ ID NO: 2343759 - RNA, 19 nt, Homo sapiens
  misc_RNA (1)...(19): siRNA sense strand
gcgaggagaacaagggcau

SEQ ID NO: 2343760 - RNA, 19 nt, Homo sapiens
  misc_RNA (1)...(19): siRNA sense strand
gcgaggagaacaagggcau

SEQ ID NO: 2343761 - RNA, 19 nt, Homo sapiens
  misc_RNA (1)...(19): siRNA sense strand
cggcaacacaccagugcaa

SEQ ID NO: 2343762 - RNA, 19 nt, Homo sapiens
  misc_RNA (1)...(19): siRNA sense strand
uguuugauucucagggaaa

SEQ ID NO: 2343763 - RNA, 19 nt, Homo sapiens
  misc_RNA (1)...(19): siRNA sense strand
ggagaaagcaguuaagcug

SEQ ID NO: 2343764 - RNA, 19 nt, Homo sapiens
  misc_RNA (1)...(19): siRNA sense strand
cauagauguuuuggagaaa

SEQ ID NO: 2343765 - RNA, 19 nt, Homo sapiens
  misc_RNA (1)...(19): siRNA sense strand
guguuugauucucagggaa

SEQ ID NO: 2343766 - RNA, 19 nt, Homo sapiens
  misc_RNA (1)...(19): siRNA sense strand
ggagaaagcaguuaagcug

SEQ ID NO: 2343767 - RNA, 19 nt, Homo sapiens
  misc_RNA (1)...(19): siRNA sense strand
cauagauguuuuggagaaa

SEQ ID NO: 2343768 - RNA, 19 nt, Homo sapiens
  misc_RNA (1)...(19): siRNA sense strand
ggaaggaacggaugggccu

SEQ ID NO: 2343769 - RNA, 19 nt, Homo sapiens
  misc_RNA (1)...(19): siRNA sense strand
ccagagacauccugccaga

SEQ ID NO: 2343770 - RNA, 19 nt, Homo sapiens
  misc_RNA (1)...(19): siRNA sense strand
gaaagaaccuggaagacag

SEQ ID NO: 2343771 - RNA, 19 nt, Homo sapiens
  misc_RNA (1)...(19): siRNA sense strand
aggccagagaaguguacaa

SEQ ID NO: 2343772 - RNA, 19 nt, Homo sapiens
  misc_RNA (1)...(19): siRNA sense strand
ugguggaagacuugcagaa

SEQ ID NO: 2343773 - RNA, 19 nt, Homo sapiens
  misc_RNA (1)...(19): siRNA sense strand
ccagagacauccugccaga

SEQ ID NO: 2343774 - RNA, 19 nt, Homo sapiens
  misc_RNA (1)...(19): siRNA sense strand
gaaagaaccuggaagacag

SEQ ID NO: 2343775 - RNA, 19 nt, Homo sapiens
  misc_RNA (1)...(19): siRNA sense strand
aggccagagaaguguacaa

SEQ ID NO: 2343776 - RNA, 19 nt, Homo sapiens
  misc_RNA (1)...(19): siRNA sense strand
ugguggaagacuugcagaa

SEQ ID NO: 2343777 - RNA, 19 nt, Homo sapiens
  misc_RNA (1)...(19): siRNA sense strand
ccagagacauccugccaga

SEQ ID NO: 2343778 - RNA, 19 nt, Homo sapiens
  misc_RNA (1)...(19): siRNA sense strand
gaaagaaccuggaagacag

SEQ ID NO: 2343779 - RNA, 19 nt, Homo sapiens
  misc_RNA (1)...(19): siRNA sense strand
aggccagagaaguguacaa

SEQ ID NO: 2343780 - RNA, 19 nt, Homo sapiens
  misc_RNA (1)...(19): siRNA sense strand
ugguggaagacuugcagaa

SEQ ID NO: 2343781 - RNA, 19 nt, Homo sapiens
  misc_RNA (1)...(19): siRNA sense strand
ccagagacauccugccaga

SEQ ID NO: 2343782 - RNA, 19 nt, Homo sapiens
  misc_RNA (1)...(19): siRNA sense strand
gaaagaaccuggaagacag

SEQ ID NO: 2343783 - RNA, 19 nt, Homo sapiens
  misc_RNA (1)...(19): siRNA sense strand
aggccagagaaguguacaa

SEQ ID NO: 2343784 - RNA, 19 nt, Homo sapiens
  misc_RNA (1)...(19): siRNA sense strand
ugguggaagacuugcagaa

SEQ ID NO: 2343785 - RNA, 19 nt, Homo sapiens
  misc_RNA (1)...(19): siRNA sense strand
ccagagacauccugccaga

SEQ ID NO: 2343786 - RNA, 19 nt, Homo sapiens
  misc_RNA (1)...(19): siRNA sense strand
gaaagaaccuggaagacag

SEQ ID NO: 2343787 - RNA, 19 nt, Homo sapiens
  misc_RNA (1)...(19): siRNA sense strand
aggccagagaaguguacaa

SEQ ID NO: 2343788 - RNA, 19 nt, Homo sapiens
  misc_RNA (1)...(19): siRNA sense strand
ugguggaagacuugcagaa

SEQ ID NO: 2343789 - RNA, 19 nt, Homo sapiens
  misc_RNA (1)...(19): siRNA sense strand
ccagagacauccugccaga

SEQ ID NO: 2343790 - RNA, 19 nt, Homo sapiens
  misc_RNA (1)...(19): siRNA sense strand
cugauguggcucugggaau

SEQ ID NO: 2343791 - RNA, 19 nt, Homo sapiens
  misc_RNA (1)...(19): siRNA sense strand
gaaagaaccuggaagacag

SEQ ID NO: 2343792 - RNA, 19 nt, Homo sapiens
  misc_RNA (1)...(19): siRNA sense strand
aggccagagaaguguacaa

SEQ ID NO: 2343793 - RNA, 19 nt, Homo sapiens
  misc_RNA (1)...(19): siRNA sense strand
ugguggaagacuugcagaa

SEQ ID NO: 2343794 - RNA, 19 nt, Homo sapiens
  misc_RNA (1)...(19): siRNA sense strand
agauuugggaugaggauaa

SEQ ID NO: 2343795 - RNA, 19 nt, Homo sapiens
  misc_RNA (1)...(19): siRNA sense strand
acguuaacauggagagaga

SEQ ID NO: 2343796 - RNA, 19 nt, Homo sapiens
  misc_RNA (1)...(19): siRNA sense strand
ucaaggaaguggaaggaca

SEQ ID NO: 2343797 - RNA, 19 nt, Homo sapiens
  misc_RNA (1)...(19): siRNA sense strand
agagaagaauggaggggaa

SEQ ID NO: 2343798 - RNA, 19 nt, Homo sapiens
  misc_RNA (1)...(19): siRNA sense strand
gggagauggacaaguggaa

SEQ ID NO: 2343799 - RNA, 19 nt, Homo sapiens
  misc_RNA (1)...(19): siRNA sense strand
guggaaagggauagagcca

SEQ ID NO: 2343800 - RNA, 19 nt, Homo sapiens
  misc_RNA (1)...(19): siRNA sense strand
cagcagucacccagagcaa

SEQ ID NO: 2343801 - RNA, 19 nt, Homo sapiens
  misc_RNA (1)...(19): siRNA sense strand
gggaugaggauaaugaaaa

SEQ ID NO: 2343802 - RNA, 19 nt, Homo sapiens
  misc_RNA (1)...(19): siRNA sense strand
ggauauuuaccaaaggaga

SEQ ID NO: 2343803 - RNA, 19 nt, Homo sapiens
  misc_RNA (1)...(19): siRNA sense strand
gcaucgaauccuagaaagu

SEQ ID NO: 2343804 - RNA, 19 nt, Homo sapiens
  misc_RNA (1)...(19): siRNA sense strand
uguucaaagaagagcaaga

SEQ ID NO: 2343805 - RNA, 19 nt, Homo sapiens
  misc_RNA (1)...(19): siRNA sense strand
ggagagaagugugcggaca

SEQ ID NO: 2343806 - RNA, 19 nt, Homo sapiens
  misc_RNA (1)...(19): siRNA sense strand
gcuccuuccugguggacau

SEQ ID NO: 2343807 - RNA, 19 nt, Homo sapiens
  misc_RNA (1)...(19): siRNA sense strand
ugggaugaggauaaugaaa

SEQ ID NO: 2343808 - RNA, 19 nt, Homo sapiens
  misc_RNA (1)...(19): siRNA sense strand
cgugauacuaagauggcau

SEQ ID NO: 2343809 - RNA, 19 nt, Homo sapiens
  misc_RNA (1)...(19): siRNA sense strand
gggauagagccaggagaga

SEQ ID NO: 2343810 - RNA, 19 nt, Homo sapiens
  misc_RNA (1)...(19): siRNA sense strand
acauggagagagagcaaaa

SEQ ID NO: 2343811 - RNA, 19 nt, Homo sapiens
  misc_RNA (1)...(19): siRNA sense strand
gagcaagauguugggauau

SEQ ID NO: 2343812 - RNA, 19 nt, Homo sapiens
  misc_RNA (1)...(19): siRNA sense strand
uggugaaccgugauacuaa

SEQ ID NO: 2343813 - RNA, 19 nt, Homo sapiens
  misc_RNA (1)...(19): siRNA sense strand
cagacauggugaaccguga

SEQ ID NO: 2343814 - RNA, 19 nt, Homo sapiens
  misc_RNA (1)...(19): siRNA sense strand
ggacagaagcccagugugc

SEQ ID NO: 2343815 - RNA, 19 nt, Homo sapiens
  misc_RNA (1)...(19): siRNA sense strand
uucaaggauagcaggaaua

SEQ ID NO: 2343816 - RNA, 19 nt, Homo sapiens
  misc_RNA (1)...(19): siRNA sense strand
ucgccuaugcacugaagaa

SEQ ID NO: 2343817 - RNA, 19 nt, Homo sapiens
  misc_RNA (1)...(19): siRNA sense strand
gaagaaugucaguggcaag

SEQ ID NO: 2343818 - RNA, 19 nt, Homo sapiens
  misc_RNA (1)...(19): siRNA sense strand
cugcaggggagauggacaa

SEQ ID NO: 2343819 - RNA, 19 nt, Homo sapiens
  misc_RNA (1)...(19): siRNA sense strand
gcaagauggagaugcagca

SEQ ID NO: 2343820 - RNA, 19 nt, Homo sapiens
  misc_RNA (1)...(19): siRNA sense strand
cccuauaaucggaaaggca

SEQ ID NO: 2343821 - RNA, 19 nt, Homo sapiens
  misc_RNA (1)...(19): siRNA sense strand
aaaagguggagcagauaaa

SEQ ID NO: 2343822 - RNA, 19 nt, Homo sapiens
  misc_RNA (1)...(19): siRNA sense strand
caugaagagaacauaccua

SEQ ID NO: 2343823 - RNA, 19 nt, Homo sapiens
  misc_RNA (1)...(19): siRNA sense strand
cguauuaccacguggagaa

SEQ ID NO: 2343824 - RNA, 19 nt, Homo sapiens
  misc_RNA (1)...(19): siRNA sense strand
ucaaggaaguggaaggaca

SEQ ID NO: 2343825 - RNA, 19 nt, Homo sapiens
  misc_RNA (1)...(19): siRNA sense strand
augcgaaagaagaaugaaa

SEQ ID NO: 2343826 - RNA, 19 nt, Homo sapiens
  misc_RNA (1)...(19): siRNA sense strand
ccugaagaucauugaaaga

SEQ ID NO: 2343827 - RNA, 19 nt, Homo sapiens
  misc_RNA (1)...(19): siRNA sense strand
guguggugccagacggaaa

SEQ ID NO: 2343828 - RNA, 19 nt, Homo sapiens
  misc_RNA (1)...(19): siRNA sense strand
ggaugaaacuggagugguc

SEQ ID NO: 2343829 - RNA, 19 nt, Homo sapiens
  misc_RNA (1)...(19): siRNA sense strand
ucuaaagaagugugggaca

SEQ ID NO: 2343830 - RNA, 19 nt, Homo sapiens
  misc_RNA (1)...(19): siRNA sense strand
agcuauggcuagaagggaa

SEQ ID NO: 2343831 - RNA, 19 nt, Homo sapiens
  misc_RNA (1)...(19): siRNA sense strand
agaacacacaggauggaua

SEQ ID NO: 2343832 - RNA, 19 nt, Homo sapiens
  misc_RNA (1)...(19): siRNA sense strand
aagaaagaaaggugggagu

SEQ ID NO: 2343833 - RNA, 19 nt, Homo sapiens
  misc_RNA (1)...(19): siRNA sense strand
ucuuugaacuugugcaaca

SEQ ID NO: 2343834 - RNA, 19 nt, Homo sapiens
  misc_RNA (1)...(19): siRNA sense strand
gggaguugggcaaggugaa

SEQ ID NO: 2343835 - RNA, 19 nt, Homo sapiens
  misc_RNA (1)...(19): siRNA sense strand
aggaacugguuuaagguca

SEQ ID NO: 2343836 - RNA, 19 nt, Homo sapiens
  misc_RNA (1)...(19): siRNA sense strand
gugcaaguacuuugaggau

SEQ ID NO: 2343837 - RNA, 19 nt, Homo sapiens
  misc_RNA (1)...(19): siRNA sense strand
cccaggagcagcaggaaau

SEQ ID NO: 2343838 - RNA, 19 nt, Homo sapiens
  misc_RNA (1)...(19): siRNA sense strand
ugaaagggcugaagcucga

SEQ ID NO: 2343839 - RNA, 19 nt, Homo sapiens
  misc_RNA (1)...(19): siRNA sense strand
gauuuaugaugaugagaac

SEQ ID NO: 2343840 - RNA, 19 nt, Homo sapiens
  misc_RNA (1)...(19): siRNA sense strand
uuugaggauagcaggaaua

SEQ ID NO: 2343841 - RNA, 19 nt, Homo sapiens
  misc_RNA (1)...(19): siRNA sense strand
gugaagacgaaauccguau

SEQ ID NO: 2343842 - RNA, 19 nt, Homo sapiens
  misc_RNA (1)...(19): siRNA sense strand
cgcccuacucugugaagaa

SEQ ID NO: 2343843 - RNA, 19 nt, Homo sapiens
  misc_RNA (1)...(19): siRNA sense strand
cugugaagaauaaguugaa

SEQ ID NO: 2343844 - RNA, 19 nt, Homo sapiens
  misc_RNA (1)...(19): siRNA sense strand
cgaagaaacugcauggcug

SEQ ID NO: 2343845 - RNA, 19 nt, Homo sapiens
  misc_RNA (1)...(19): siRNA sense strand
gcgcacaaaacgugacauu

SEQ ID NO: 2343846 - RNA, 19 nt, Homo sapiens
  misc_RNA (1)...(19): siRNA sense strand
cuuugaggauagcaggaau

SEQ ID NO: 2343847 - RNA, 19 nt, Homo sapiens
  misc_RNA (1)...(19): siRNA sense strand
aagaauaaguugaagccag

SEQ ID NO: 2343848 - RNA, 19 nt, Homo sapiens
  misc_RNA (1)...(19): siRNA sense strand
ucacuaugcuccagaccga

SEQ ID NO: 2343849 - RNA, 19 nt, Homo sapiens
  misc_RNA (1)...(19): siRNA sense strand
acucuaaagaaguguggga

SEQ ID NO: 2343850 - RNA, 19 nt, Homo sapiens
  misc_RNA (1)...(19): siRNA sense strand
aagaagaaugaaauggcau

SEQ ID NO: 2343851 - RNA, 19 nt, Homo sapiens
  misc_RNA (1)...(19): siRNA sense strand
uacacaaggaacugguuua

SEQ ID NO: 2343852 - RNA, 19 nt, Homo sapiens
  misc_RNA (1)...(19): siRNA sense strand
gauagcaggaauaugaaaa

SEQ ID NO: 2343853 - RNA, 19 nt, Homo sapiens
  misc_RNA (1)...(19): siRNA sense strand
agaugagggauguccacaa

SEQ ID NO: 2343854 - RNA, 19 nt, Homo sapiens
  misc_RNA (1)...(19): siRNA sense strand
cuaaugaauucaauccaga

SEQ ID NO: 2343855 - RNA, 19 nt, Homo sapiens
  misc_RNA (1)...(19): siRNA sense strand
augcuaaagcugaccauga

SEQ ID NO: 2343856 - RNA, 19 nt, Homo sapiens
  misc_RNA (1)...(19): siRNA sense strand
ugaugagaaccaaaagaua

SEQ ID NO: 2343857 - RNA, 19 nt, Homo sapiens
  misc_RNA (1)...(19): siRNA sense strand
cguauuaccacguggagaa

SEQ ID NO: 2343858 - RNA, 19 nt, Homo sapiens
  misc_RNA (1)...(19): siRNA sense strand
ucaaggaaguggaaggaca

SEQ ID NO: 2343859 - RNA, 19 nt, Homo sapiens
  misc_RNA (1)...(19): siRNA sense strand
augcgaaagaagaaugaaa

SEQ ID NO: 2343860 - RNA, 19 nt, Homo sapiens
  misc_RNA (1)...(19): siRNA sense strand
ccugaagaucauugaaaga

SEQ ID NO: 2343861 - RNA, 19 nt, Homo sapiens
  misc_RNA (1)...(19): siRNA sense strand
guguggugccagacggaaa

SEQ ID NO: 2343862 - RNA, 19 nt, Homo sapiens
  misc_RNA (1)...(19): siRNA sense strand
ggaugaaacuggagugguc

SEQ ID NO: 2343863 - RNA, 19 nt, Homo sapiens
  misc_RNA (1)...(19): siRNA sense strand
ucuaaagaagugugggaca

SEQ ID NO: 2343864 - RNA, 19 nt, Homo sapiens
  misc_RNA (1)...(19): siRNA sense strand
agcuauggcuagaagggaa

SEQ ID NO: 2343865 - RNA, 19 nt, Homo sapiens
  misc_RNA (1)...(19): siRNA sense strand
agaacacacaggauggaua

SEQ ID NO: 2343866 - RNA, 19 nt, Homo sapiens
  misc_RNA (1)...(19): siRNA sense strand
aagaaagaaaggugggagu

SEQ ID NO: 2343867 - RNA, 19 nt, Homo sapiens
  misc_RNA (1)...(19): siRNA sense strand
ucuuugaacuugugcaaca

SEQ ID NO: 2343868 - RNA, 19 nt, Homo sapiens
  misc_RNA (1)...(19): siRNA sense strand
gggaguugggcaaggugaa

SEQ ID NO: 2343869 - RNA, 19 nt, Homo sapiens
  misc_RNA (1)...(19): siRNA sense strand
aggaacugguuuaagguca

SEQ ID NO: 2343870 - RNA, 19 nt, Homo sapiens
  misc_RNA (1)...(19): siRNA sense strand
gugcaaguacuuugaggau

SEQ ID NO: 2343871 - RNA, 19 nt, Homo sapiens
  misc_RNA (1)...(19): siRNA sense strand
cccaggagcagcaggaaau

SEQ ID NO: 2343872 - RNA, 19 nt, Homo sapiens
  misc_RNA (1)...(19): siRNA sense strand
ugaaagggcugaagcucga

SEQ ID NO: 2343873 - RNA, 19 nt, Homo sapiens
  misc_RNA (1)...(19): siRNA sense strand
gauuuaugaugaugagaac

SEQ ID NO: 2343874 - RNA, 19 nt, Homo sapiens
  misc_RNA (1)...(19): siRNA sense strand
uuugaggauagcaggaaua

SEQ ID NO: 2343875 - RNA, 19 nt, Homo sapiens
  misc_RNA (1)...(19): siRNA sense strand
gugaagacgaaauccguau

SEQ ID NO: 2343876 - RNA, 19 nt, Homo sapiens
  misc_RNA (1)...(19): siRNA sense strand
cgcccuacucugugaagaa

SEQ ID NO: 2343877 - RNA, 19 nt, Homo sapiens
  misc_RNA (1)...(19): siRNA sense strand
cugugaagaauaaguugaa

SEQ ID NO: 2343878 - RNA, 19 nt, Homo sapiens
  misc_RNA (1)...(19): siRNA sense strand
cgaagaaacugcauggcug

SEQ ID NO: 2343879 - RNA, 19 nt, Homo sapiens
  misc_RNA (1)...(19): siRNA sense strand
gcgcacaaaacgugacauu

SEQ ID NO: 2343880 - RNA, 19 nt, Homo sapiens
  misc_RNA (1)...(19): siRNA sense strand
cuuugaggauagcaggaau

SEQ ID NO: 2343881 - RNA, 19 nt, Homo sapiens
  misc_RNA (1)...(19): siRNA sense strand
aagaauaaguugaagccag

SEQ ID NO: 2343882 - RNA, 19 nt, Homo sapiens
  misc_RNA (1)...(19): siRNA sense strand
ucacuaugcuccagaccga

SEQ ID NO: 2343883 - RNA, 19 nt, Homo sapiens
  misc_RNA (1)...(19): siRNA sense strand
acucuaaagaaguguggga

SEQ ID NO: 2343884 - RNA, 19 nt, Homo sapiens
  misc_RNA (1)...(19): siRNA sense strand
aagaagaaugaaauggcau

SEQ ID NO: 2343885 - RNA, 19 nt, Homo sapiens
  misc_RNA (1)...(19): siRNA sense strand
uacacaaggaacugguuua

SEQ ID NO: 2343886 - RNA, 19 nt, Homo sapiens
  misc_RNA (1)...(19): siRNA sense strand
gauagcaggaauaugaaaa

SEQ ID NO: 2343887 - RNA, 19 nt, Homo sapiens
  misc_RNA (1)...(19): siRNA sense strand
agaugagggauguccacaa

SEQ ID NO: 2343888 - RNA, 19 nt, Homo sapiens
  misc_RNA (1)...(19): siRNA sense strand
cuaaugaauucaauccaga

SEQ ID NO: 2343889 - RNA, 19 nt, Homo sapiens
  misc_RNA (1)...(19): siRNA sense strand
augcuaaagcugaccauga

SEQ ID NO: 2343890 - RNA, 19 nt, Homo sapiens
  misc_RNA (1)...(19): siRNA sense strand
ugaugagaaccaaaagaua

SEQ ID NO: 2343891 - RNA, 19 nt, Homo sapiens
  misc_RNA (1)...(19): siRNA sense strand
ccgcaaugccagagaggac

SEQ ID NO: 2343892 - RNA, 19 nt, Homo sapiens
  misc_RNA (1)...(19): siRNA sense strand
cggcgacaguaggaggaaa

SEQ ID NO: 2343893 - RNA, 19 nt, Homo sapiens
  misc_RNA (1)...(19): siRNA sense strand
ggcgacaguaggaggaaaa

SEQ ID NO: 2343894 - RNA, 19 nt, Homo sapiens
  misc_RNA (1)...(19): siRNA sense strand
ccauugaaggcuggagcua

SEQ ID NO: 2343895 - RNA, 19 nt, Homo sapiens
  misc_RNA (1)...(19): siRNA sense strand
ucaacuggaugcugcgcaa

SEQ ID NO: 2343896 - RNA, 19 nt, Homo sapiens
  misc_RNA (1)...(19): siRNA sense strand
cagaagcagcugucggaga

SEQ ID NO: 2343897 - RNA, 19 nt, Homo sapiens
  misc_RNA (1)...(19): siRNA sense strand
aggcaaagccaggaagcaa

SEQ ID NO: 2343898 - RNA, 19 nt, Homo sapiens
  misc_RNA (1)...(19): siRNA sense strand
ccaagauggcagugaucga

SEQ ID NO: 2343899 - RNA, 19 nt, Homo sapiens
  misc_RNA (1)...(19): siRNA sense strand
gcauccaucuguugcggaa

SEQ ID NO: 2343900 - RNA, 19 nt, Homo sapiens
  misc_RNA (1)...(19): siRNA sense strand
ccacacagcucaaacacca

SEQ ID NO: 2343901 - RNA, 19 nt, Homo sapiens
  misc_RNA (1)...(19): siRNA sense strand
gcacgaacgcaucgaggca

SEQ ID NO: 2343902 - RNA, 19 nt, Homo sapiens
  misc_RNA (1)...(19): siRNA sense strand
agcucaaacaccagggauu

SEQ ID NO: 2343903 - RNA, 19 nt, Homo sapiens
  misc_RNA (1)...(19): siRNA sense strand
ugaucgaguauaaagggaa

SEQ ID NO: 2343904 - RNA, 19 nt, Homo sapiens
  misc_RNA (1)...(19): siRNA sense strand
agaaaguuugggagggaua

SEQ ID NO: 2343905 - RNA, 19 nt, Homo sapiens
  misc_RNA (1)...(19): siRNA sense strand
gggaagaaacagagagcuc

SEQ ID NO: 2343906 - RNA, 19 nt, Homo sapiens
  misc_RNA (1)...(19): siRNA sense strand
gaagaaaguuugggaggga

SEQ ID NO: 2343907 - RNA, 19 nt, Homo sapiens
  misc_RNA (1)...(19): siRNA sense strand
guucauaacuggaaagcug

SEQ ID NO: 2343908 - RNA, 19 nt, Homo sapiens
  misc_RNA (1)...(19): siRNA sense strand
gguagaagaugaacgcagu

SEQ ID NO: 2343909 - RNA, 19 nt, Homo sapiens
  misc_RNA (1)...(19): siRNA sense strand
augucaagcgaaaggauuu

SEQ ID NO: 2343910 - RNA, 19 nt, Homo sapiens
  misc_RNA (1)...(19): siRNA sense strand
cugcauaucuucugggccu

SEQ ID NO: 2343911 - RNA, 19 nt, Homo sapiens
  misc_RNA (1)...(19): siRNA sense strand
uggaaagcugguagaagau

SEQ ID NO: 2343912 - RNA, 19 nt, Homo sapiens
  misc_RNA (1)...(19): siRNA sense strand
agaaaguuugggagggaua

SEQ ID NO: 2343913 - RNA, 19 nt, Homo sapiens
  misc_RNA (1)...(19): siRNA sense strand
gggaagaaacagagagcuc

SEQ ID NO: 2343914 - RNA, 19 nt, Homo sapiens
  misc_RNA (1)...(19): siRNA sense strand
gaagaaaguuugggaggga

SEQ ID NO: 2343915 - RNA, 19 nt, Homo sapiens
  misc_RNA (1)...(19): siRNA sense strand
guucauaacuggaaagcug

SEQ ID NO: 2343916 - RNA, 19 nt, Homo sapiens
  misc_RNA (1)...(19): siRNA sense strand
ccgagaagccagcuggaga

SEQ ID NO: 2343917 - RNA, 19 nt, Homo sapiens
  misc_RNA (1)...(19): siRNA sense strand
gguagaagaugaacgcagu

SEQ ID NO: 2343918 - RNA, 19 nt, Homo sapiens
  misc_RNA (1)...(19): siRNA sense strand
augucaagcgaaaggauuu

SEQ ID NO: 2343919 - RNA, 19 nt, Homo sapiens
  misc_RNA (1)...(19): siRNA sense strand
cugcauaucuucugggccu

SEQ ID NO: 2343920 - RNA, 19 nt, Homo sapiens
  misc_RNA (1)...(19): siRNA sense strand
uggaaagcugguagaagau

SEQ ID NO: 2343921 - RNA, 19 nt, Homo sapiens
  misc_RNA (1)...(19): siRNA sense strand
agguggaaguagagcuuuu

SEQ ID NO: 2343922 - RNA, 19 nt, Homo sapiens
  misc_RNA (1)...(19): siRNA sense strand
agaaaguuugggagggaua

SEQ ID NO: 2343923 - RNA, 19 nt, Homo sapiens
  misc_RNA (1)...(19): siRNA sense strand
gggaagaaacagagagcuc

SEQ ID NO: 2343924 - RNA, 19 nt, Homo sapiens
  misc_RNA (1)...(19): siRNA sense strand
gaagaaaguuugggaggga

SEQ ID NO: 2343925 - RNA, 19 nt, Homo sapiens
  misc_RNA (1)...(19): siRNA sense strand
guucauaacuggaaagcug

SEQ ID NO: 2343926 - RNA, 19 nt, Homo sapiens
  misc_RNA (1)...(19): siRNA sense strand
ccgagaagccagcuggaga

SEQ ID NO: 2343927 - RNA, 19 nt, Homo sapiens
  misc_RNA (1)...(19): siRNA sense strand
gguagaagaugaacgcagu

SEQ ID NO: 2343928 - RNA, 19 nt, Homo sapiens
  misc_RNA (1)...(19): siRNA sense strand
augucaagcgaaaggauuu

SEQ ID NO: 2343929 - RNA, 19 nt, Homo sapiens
  misc_RNA (1)...(19): siRNA sense strand
cugcauaucuucugggccu

SEQ ID NO: 2343930 - RNA, 19 nt, Homo sapiens
  misc_RNA (1)...(19): siRNA sense strand
uggaaagcugguagaagau

SEQ ID NO: 2343931 - RNA, 19 nt, Homo sapiens
  misc_RNA (1)...(19): siRNA sense strand
agguggaaguagagcuuuu

SEQ ID NO: 2343932 - RNA, 19 nt, Homo sapiens
  misc_RNA (1)...(19): siRNA sense strand
aucagaaaucgguguguua

SEQ ID NO: 2343933 - RNA, 19 nt, Homo sapiens
  misc_RNA (1)...(19): siRNA sense strand
cuggaggcuuagucguaua

SEQ ID NO: 2343934 - RNA, 19 nt, Homo sapiens
  misc_RNA (1)...(19): siRNA sense strand
auuaauucacucaggaaga

SEQ ID NO: 2343935 - RNA, 19 nt, Homo sapiens
  misc_RNA (1)...(19): siRNA sense strand
aggauguggcugaugaaga

SEQ ID NO: 2343936 - RNA, 19 nt, Homo sapiens
  misc_RNA (1)...(19): siRNA sense strand
cgaugugaagagacgaaaa

SEQ ID NO: 2343937 - RNA, 19 nt, Homo sapiens
  misc_RNA (1)...(19): siRNA sense strand
gggaaagaugacagagaga

SEQ ID NO: 2343938 - RNA, 19 nt, Homo sapiens
  misc_RNA (1)...(19): siRNA sense strand
gaacagaagccaaagccua

SEQ ID NO: 2343939 - RNA, 19 nt, Homo sapiens
  misc_RNA (1)...(19): siRNA sense strand
gguaaagaacagaagccaa

SEQ ID NO: 2343940 - RNA, 19 nt, Homo sapiens
  misc_RNA (1)...(19): siRNA sense strand
gagcagaagucuagcgaag

SEQ ID NO: 2343941 - RNA, 19 nt, Homo sapiens
  misc_RNA (1)...(19): siRNA sense strand
gcaggaagcuaaauggaga

SEQ ID NO: 2343942 - RNA, 19 nt, Homo sapiens
  misc_RNA (1)...(19): siRNA sense strand
guuucuaagcucagguaaa

SEQ ID NO: 2343943 - RNA, 19 nt, Homo sapiens
  misc_RNA (1)...(19): siRNA sense strand
agcaaagaguucaggaaaa

SEQ ID NO: 2343944 - RNA, 19 nt, Homo sapiens
  misc_RNA (1)...(19): siRNA sense strand
agaugaagaugaagccaga

SEQ ID NO: 2343945 - RNA, 19 nt, Homo sapiens
  misc_RNA (1)...(19): siRNA sense strand
gagaguaaguuggagggaa

SEQ ID NO: 2343946 - RNA, 19 nt, Homo sapiens
  misc_RNA (1)...(19): siRNA sense strand
uuguacaaguauaggaaca

SEQ ID NO: 2343947 - RNA, 19 nt, Homo sapiens
  misc_RNA (1)...(19): siRNA sense strand
aaaggguagaauugagaaa

SEQ ID NO: 2343948 - RNA, 19 nt, Homo sapiens
  misc_RNA (1)...(19): siRNA sense strand
agccaaagccuaaagaaaa

SEQ ID NO: 2343949 - RNA, 19 nt, Homo sapiens
  misc_RNA (1)...(19): siRNA sense strand
agccugaaugugaggguua

SEQ ID NO: 2343950 - RNA, 19 nt, Homo sapiens
  misc_RNA (1)...(19): siRNA sense strand
agggauaaaggguagaauu

SEQ ID NO: 2343951 - RNA, 19 nt, Homo sapiens
  misc_RNA (1)...(19): siRNA sense strand
ccagcaaagaguucaggaa

SEQ ID NO: 2343952 - RNA, 19 nt, Homo sapiens
  misc_RNA (1)...(19): siRNA sense strand
gaccaagggauaaagggua

SEQ ID NO: 2343953 - RNA, 19 nt, Homo sapiens
  misc_RNA (1)...(19): siRNA sense strand
ccaucaaacccaccagcaa

SEQ ID NO: 2343954 - RNA, 19 nt, Homo sapiens
  misc_RNA (1)...(19): siRNA sense strand
gcacaagagaccagcucca

SEQ ID NO: 2343955 - RNA, 19 nt, Homo sapiens
  misc_RNA (1)...(19): siRNA sense strand
cugggaaagaugacagaga

SEQ ID NO: 2343956 - RNA, 19 nt, Homo sapiens
  misc_RNA (1)...(19): siRNA sense strand
acaaaggcgacccgagcaa

SEQ ID NO: 2343957 - RNA, 19 nt, Homo sapiens
  misc_RNA (1)...(19): siRNA sense strand
cgagggaggcuuuuggaaa

SEQ ID NO: 2343958 - RNA, 19 nt, Homo sapiens
  misc_RNA (1)...(19): siRNA sense strand
aagaaugguuucauggcga

SEQ ID NO: 2343959 - RNA, 19 nt, Homo sapiens
  misc_RNA (1)...(19): siRNA sense strand
ccuaaagaaaagaugaaga

SEQ ID NO: 2343960 - RNA, 19 nt, Homo sapiens
  misc_RNA (1)...(19): siRNA sense strand
ccaguaagcaggagcccga

SEQ ID NO: 2343961 - RNA, 19 nt, Homo sapiens
  misc_RNA (1)...(19): siRNA sense strand
ggaaaggcggcucaggaca

SEQ ID NO: 2343962 - RNA, 19 nt, Homo sapiens
  misc_RNA (1)...(19): siRNA sense strand
aguaaugacuguauccuca

SEQ ID NO: 2343963 - RNA, 19 nt, Homo sapiens
  misc_RNA (1)...(19): siRNA sense strand
ccacagugaagaaggcagu

SEQ ID NO: 2343964 - RNA, 19 nt, Homo sapiens
  misc_RNA (1)...(19): siRNA sense strand
agcaggagcccgagaacga

SEQ ID NO: 2343965 - RNA, 19 nt, Homo sapiens
  misc_RNA (1)...(19): siRNA sense strand
caaacacgccgcagcgaca

SEQ ID NO: 2343966 - RNA, 19 nt, Homo sapiens
  misc_RNA (1)...(19): siRNA sense strand
ggaaagcgcuucugagacc

SEQ ID NO: 2343967 - RNA, 19 nt, Homo sapiens
  misc_RNA (1)...(19): siRNA sense strand
gggaaagaugacagagaga

SEQ ID NO: 2343968 - RNA, 19 nt, Homo sapiens
  misc_RNA (1)...(19): siRNA sense strand
gaacagaagccaaagccua

SEQ ID NO: 2343969 - RNA, 19 nt, Homo sapiens
  misc_RNA (1)...(19): siRNA sense strand
gguaaagaacagaagccaa

SEQ ID NO: 2343970 - RNA, 19 nt, Homo sapiens
  misc_RNA (1)...(19): siRNA sense strand
gagcagaagucuagcgaag

SEQ ID NO: 2343971 - RNA, 19 nt, Homo sapiens
  misc_RNA (1)...(19): siRNA sense strand
gcaggaagcuaaauggaga

SEQ ID NO: 2343972 - RNA, 19 nt, Homo sapiens
  misc_RNA (1)...(19): siRNA sense strand
guuucuaagcucagguaaa

SEQ ID NO: 2343973 - RNA, 19 nt, Homo sapiens
  misc_RNA (1)...(19): siRNA sense strand
agcaaagaguucaggaaaa

SEQ ID NO: 2343974 - RNA, 19 nt, Homo sapiens
  misc_RNA (1)...(19): siRNA sense strand
agaugaagaugaagccaga

SEQ ID NO: 2343975 - RNA, 19 nt, Homo sapiens
  misc_RNA (1)...(19): siRNA sense strand
gagaguaaguuggagggaa

SEQ ID NO: 2343976 - RNA, 19 nt, Homo sapiens
  misc_RNA (1)...(19): siRNA sense strand
uuguacaaguauaggaaca

SEQ ID NO: 2343977 - RNA, 19 nt, Homo sapiens
  misc_RNA (1)...(19): siRNA sense strand
aaaggguagaauugagaaa

SEQ ID NO: 2343978 - RNA, 19 nt, Homo sapiens
  misc_RNA (1)...(19): siRNA sense strand
agccaaagccuaaagaaaa

SEQ ID NO: 2343979 - RNA, 19 nt, Homo sapiens
  misc_RNA (1)...(19): siRNA sense strand
agccugaaugugaggguua

SEQ ID NO: 2343980 - RNA, 19 nt, Homo sapiens
  misc_RNA (1)...(19): siRNA sense strand
agggauaaaggguagaauu

SEQ ID NO: 2343981 - RNA, 19 nt, Homo sapiens
  misc_RNA (1)...(19): siRNA sense strand
ccagcaaagaguucaggaa

SEQ ID NO: 2343982 - RNA, 19 nt, Homo sapiens
  misc_RNA (1)...(19): siRNA sense strand
gaccaagggauaaagggua

SEQ ID NO: 2343983 - RNA, 19 nt, Homo sapiens
  misc_RNA (1)...(19): siRNA sense strand
ccaucaaacccaccagcaa

SEQ ID NO: 2343984 - RNA, 19 nt, Homo sapiens
  misc_RNA (1)...(19): siRNA sense strand
gcacaagagaccagcucca

SEQ ID NO: 2343985 - RNA, 19 nt, Homo sapiens
  misc_RNA (1)...(19): siRNA sense strand
cugggaaagaugacagaga

SEQ ID NO: 2343986 - RNA, 19 nt, Homo sapiens
  misc_RNA (1)...(19): siRNA sense strand
acaaaggcgacccgagcaa

SEQ ID NO: 2343987 - RNA, 19 nt, Homo sapiens
  misc_RNA (1)...(19): siRNA sense strand
cgagggaggcuuuuggaaa

SEQ ID NO: 2343988 - RNA, 19 nt, Homo sapiens
  misc_RNA (1)...(19): siRNA sense strand
aagaaugguuucauggcga

SEQ ID NO: 2343989 - RNA, 19 nt, Homo sapiens
  misc_RNA (1)...(19): siRNA sense strand
ccuaaagaaaagaugaaga

SEQ ID NO: 2343990 - RNA, 19 nt, Homo sapiens
  misc_RNA (1)...(19): siRNA sense strand
ccaguaagcaggagcccga

SEQ ID NO: 2343991 - RNA, 19 nt, Homo sapiens
  misc_RNA (1)...(19): siRNA sense strand
ggaaaggcggcucaggaca

SEQ ID NO: 2343992 - RNA, 19 nt, Homo sapiens
  misc_RNA (1)...(19): siRNA sense strand
aguaaugacuguauccuca

SEQ ID NO: 2343993 - RNA, 19 nt, Homo sapiens
  misc_RNA (1)...(19): siRNA sense strand
ccacagugaagaaggcagu

SEQ ID NO: 2343994 - RNA, 19 nt, Homo sapiens
  misc_RNA (1)...(19): siRNA sense strand
agcaggagcccgagaacga

SEQ ID NO: 2343995 - RNA, 19 nt, Homo sapiens
  misc_RNA (1)...(19): siRNA sense strand
caaacacgccgcagcgaca

SEQ ID NO: 2343996 - RNA, 19 nt, Homo sapiens
  misc_RNA (1)...(19): siRNA sense strand
ggaaagcgcuucugagacc

SEQ ID NO: 2343997 - RNA, 19 nt, Homo sapiens
  misc_RNA (1)...(19): siRNA sense strand
gggaaagaugacagagaga

SEQ ID NO: 2343998 - RNA, 19 nt, Homo sapiens
  misc_RNA (1)...(19): siRNA sense strand
gaacagaagccaaagccua

SEQ ID NO: 2343999 - RNA, 19 nt, Homo sapiens
  misc_RNA (1)...(19): siRNA sense strand
gguaaagaacagaagccaa

SEQ ID NO: 2344000 - RNA, 19 nt, Homo sapiens
  misc_RNA (1)...(19): siRNA sense strand
gagcagaagucuagcgaag

SEQ ID NO: 2344001 - RNA, 19 nt, Homo sapiens
  misc_RNA (1)...(19): siRNA sense strand
gcaggaagcuaaauggaga

SEQ ID NO: 2344002 - RNA, 19 nt, Homo sapiens
  misc_RNA (1)...(19): siRNA sense strand
guuucuaagcucagguaaa

SEQ ID NO: 2344003 - RNA, 19 nt, Homo sapiens
  misc_RNA (1)...(19): siRNA sense strand
agcaaagaguucaggaaaa

SEQ ID NO: 2344004 - RNA, 19 nt, Homo sapiens
  misc_RNA (1)...(19): siRNA sense strand
agaugaagaugaagccaga

SEQ ID NO: 2344005 - RNA, 19 nt, Homo sapiens
  misc_RNA (1)...(19): siRNA sense strand
gagaguaaguuggagggaa

SEQ ID NO: 2344006 - RNA, 19 nt, Homo sapiens
  misc_RNA (1)...(19): siRNA sense strand
uuguacaaguauaggaaca

SEQ ID NO: 2344007 - RNA, 19 nt, Homo sapiens
  misc_RNA (1)...(19): siRNA sense strand
aaaggguagaauugagaaa

SEQ ID NO: 2344008 - RNA, 19 nt, Homo sapiens
  misc_RNA (1)...(19): siRNA sense strand
agccaaagccuaaagaaaa

SEQ ID NO: 2344009 - RNA, 19 nt, Homo sapiens
  misc_RNA (1)...(19): siRNA sense strand
agccugaaugugaggguua

SEQ ID NO: 2344010 - RNA, 19 nt, Homo sapiens
  misc_RNA (1)...(19): siRNA sense strand
agggauaaaggguagaauu

SEQ ID NO: 2344011 - RNA, 19 nt, Homo sapiens
  misc_RNA (1)...(19): siRNA sense strand
ccagcaaagaguucaggaa

SEQ ID NO: 2344012 - RNA, 19 nt, Homo sapiens
  misc_RNA (1)...(19): siRNA sense strand
gaccaagggauaaagggua

SEQ ID NO: 2344013 - RNA, 19 nt, Homo sapiens
  misc_RNA (1)...(19): siRNA sense strand
ccaucaaacccaccagcaa

SEQ ID NO: 2344014 - RNA, 19 nt, Homo sapiens
  misc_RNA (1)...(19): siRNA sense strand
gcacaagagaccagcucca

SEQ ID NO: 2344015 - RNA, 19 nt, Homo sapiens
  misc_RNA (1)...(19): siRNA sense strand
cugggaaagaugacagaga

SEQ ID NO: 2344016 - RNA, 19 nt, Homo sapiens
  misc_RNA (1)...(19): siRNA sense strand
acaaaggcgacccgagcaa

SEQ ID NO: 2344017 - RNA, 19 nt, Homo sapiens
  misc_RNA (1)...(19): siRNA sense strand
cgagggaggcuuuuggaaa

SEQ ID NO: 2344018 - RNA, 19 nt, Homo sapiens
  misc_RNA (1)...(19): siRNA sense strand
aagaaugguuucauggcga

SEQ ID NO: 2344019 - RNA, 19 nt, Homo sapiens
  misc_RNA (1)...(19): siRNA sense strand
ccuaaagaaaagaugaaga

SEQ ID NO: 2344020 - RNA, 19 nt, Homo sapiens
  misc_RNA (1)...(19): siRNA sense strand
ccaguaagcaggagcccga

SEQ ID NO: 2344021 - RNA, 19 nt, Homo sapiens
  misc_RNA (1)...(19): siRNA sense strand
ggaaaggcggcucaggaca

SEQ ID NO: 2344022 - RNA, 19 nt, Homo sapiens
  misc_RNA (1)...(19): siRNA sense strand
aguaaugacuguauccuca

SEQ ID NO: 2344023 - RNA, 19 nt, Homo sapiens
  misc_RNA (1)...(19): siRNA sense strand
ccacagugaagaaggcagu

SEQ ID NO: 2344024 - RNA, 19 nt, Homo sapiens
  misc_RNA (1)...(19): siRNA sense strand
agcaggagcccgagaacga

SEQ ID NO: 2344025 - RNA, 19 nt, Homo sapiens
  misc_RNA (1)...(19): siRNA sense strand
caaacacgccgcagcgaca

SEQ ID NO: 2344026 - RNA, 19 nt, Homo sapiens
  misc_RNA (1)...(19): siRNA sense strand
ggaaagcgcuucugagacc

SEQ ID NO: 2344027 - RNA, 19 nt, Homo sapiens
  misc_RNA (1)...(19): siRNA sense strand
aggaagaacuagaggaaga

SEQ ID NO: 2344028 - RNA, 19 nt, Homo sapiens
  misc_RNA (1)...(19): siRNA sense strand
agaagaaacagaugagaaa

SEQ ID NO: 2344029 - RNA, 19 nt, Homo sapiens
  misc_RNA (1)...(19): siRNA sense strand
aggaagaggaggagaaaga

SEQ ID NO: 2344030 - RNA, 19 nt, Homo sapiens
  misc_RNA (1)...(19): siRNA sense strand
uugagaaagaggagagaaa

SEQ ID NO: 2344031 - RNA, 19 nt, Homo sapiens
  misc_RNA (1)...(19): siRNA sense strand
gguagagaaagaagagaaa

SEQ ID NO: 2344032 - RNA, 19 nt, Homo sapiens
  misc_RNA (1)...(19): siRNA sense strand
cgucuaagucucagguaaa

SEQ ID NO: 2344033 - RNA, 19 nt, Homo sapiens
  misc_RNA (1)...(19): siRNA sense strand
ugaggaaggaagugaguua

SEQ ID NO: 2344034 - RNA, 19 nt, Homo sapiens
  misc_RNA (1)...(19): siRNA sense strand
cagacaaggaagaggaaga

SEQ ID NO: 2344035 - RNA, 19 nt, Homo sapiens
  misc_RNA (1)...(19): siRNA sense strand
agaaggaacugcaggaaaa

SEQ ID NO: 2344036 - RNA, 19 nt, Homo sapiens
  misc_RNA (1)...(19): siRNA sense strand
aagaagagaaagaggaaga

SEQ ID NO: 2344037 - RNA, 19 nt, Homo sapiens
  misc_RNA (1)...(19): siRNA sense strand
aggaggaagaagaaggaaa

SEQ ID NO: 2344038 - RNA, 19 nt, Homo sapiens
  misc_RNA (1)...(19): siRNA sense strand
agaagagaagguagagaaa

SEQ ID NO: 2344039 - RNA, 19 nt, Homo sapiens
  misc_RNA (1)...(19): siRNA sense strand
cugaagaagaagaagaaau

SEQ ID NO: 2344040 - RNA, 19 nt, Homo sapiens
  misc_RNA (1)...(19): siRNA sense strand
ccacgaggaaggaaagaaa

SEQ ID NO: 2344041 - RNA, 19 nt, Homo sapiens
  misc_RNA (1)...(19): siRNA sense strand
aaacagaagcagagugaca

SEQ ID NO: 2344042 - RNA, 19 nt, Homo sapiens
  misc_RNA (1)...(19): siRNA sense strand
cagaagaaacagaugagaa

SEQ ID NO: 2344043 - RNA, 19 nt, Homo sapiens
  misc_RNA (1)...(19): siRNA sense strand
agagaaagaggaagaacua

SEQ ID NO: 2344044 - RNA, 19 nt, Homo sapiens
  misc_RNA (1)...(19): siRNA sense strand
agaaagaagaggaggagga

SEQ ID NO: 2344045 - RNA, 19 nt, Homo sapiens
  misc_RNA (1)...(19): siRNA sense strand
cggcaaaggaaucgucuaa

SEQ ID NO: 2344046 - RNA, 19 nt, Homo sapiens
  misc_RNA (1)...(19): siRNA sense strand
auggaaaggaagagcuaaa

SEQ ID NO: 2344047 - RNA, 19 nt, Homo sapiens
  misc_RNA (1)...(19): siRNA sense strand
ggaggaaaauaaagagaau

SEQ ID NO: 2344048 - RNA, 19 nt, Homo sapiens
  misc_RNA (1)...(19): siRNA sense strand
uagagaaagaagagaaaga

SEQ ID NO: 2344049 - RNA, 19 nt, Homo sapiens
  misc_RNA (1)...(19): siRNA sense strand
gggcacugauggaaaggaa

SEQ ID NO: 2344050 - RNA, 19 nt, Homo sapiens
  misc_RNA (1)...(19): siRNA sense strand
agaugaugaugaagaagaa

SEQ ID NO: 2344051 - RNA, 19 nt, Homo sapiens
  misc_RNA (1)...(19): siRNA sense strand
ggaaaaucuugaagcgcaa

SEQ ID NO: 2344052 - RNA, 19 nt, Homo sapiens
  misc_RNA (1)...(19): siRNA sense strand
aggaggaggaagaggaaga

SEQ ID NO: 2344053 - RNA, 19 nt, Homo sapiens
  misc_RNA (1)...(19): siRNA sense strand
gcaaacuggaugaggauga

SEQ ID NO: 2344054 - RNA, 19 nt, Homo sapiens
  misc_RNA (1)...(19): siRNA sense strand
ggaaccacgaggaaggaaa

SEQ ID NO: 2344055 - RNA, 19 nt, Homo sapiens
  misc_RNA (1)...(19): siRNA sense strand
agaggaagaacuagaggaa

SEQ ID NO: 2344056 - RNA, 19 nt, Homo sapiens
  misc_RNA (1)...(19): siRNA sense strand
cgucauuucacaagaggaa

SEQ ID NO: 2344057 - RNA, 19 nt, Homo sapiens
  misc_RNA (1)...(19): siRNA sense strand
cagauuaaguaaagaagca

SEQ ID NO: 2344058 - RNA, 19 nt, Homo sapiens
  misc_RNA (1)...(19): siRNA sense strand
uucuaagaguucagggaaa

SEQ ID NO: 2344059 - RNA, 19 nt, Homo sapiens
  misc_RNA (1)...(19): siRNA sense strand
agguagagaaagaagagaa

SEQ ID NO: 2344060 - RNA, 19 nt, Homo sapiens
  misc_RNA (1)...(19): siRNA sense strand
ccgaaacagaggacacaaa

SEQ ID NO: 2344061 - RNA, 19 nt, Homo sapiens
  misc_RNA (1)...(19): siRNA sense strand
gugacaagaaagagaacau

SEQ ID NO: 2344062 - RNA, 19 nt, Homo sapiens
  misc_RNA (1)...(19): siRNA sense strand
caauaagagcagcuguaaa

SEQ ID NO: 2344063 - RNA, 19 nt, Homo sapiens
  misc_RNA (1)...(19): siRNA sense strand
cagaugagaaaguggaaga

SEQ ID NO: 2344064 - RNA, 19 nt, Homo sapiens
  misc_RNA (1)...(19): siRNA sense strand
agauaaugaagauggguuu

SEQ ID NO: 2344065 - RNA, 19 nt, Homo sapiens
  misc_RNA (1)...(19): siRNA sense strand
aagacgaggaggaggaauu

SEQ ID NO: 2344066 - RNA, 19 nt, Homo sapiens
  misc_RNA (1)...(19): siRNA sense strand
ggaaagaaaggcagccaga

SEQ ID NO: 2344067 - RNA, 19 nt, Homo sapiens
  misc_RNA (1)...(19): siRNA sense strand
agcuagaaauucaggagaa

SEQ ID NO: 2344068 - RNA, 19 nt, Homo sapiens
  misc_RNA (1)...(19): siRNA sense strand
uagaggaagaggaggagaa

SEQ ID NO: 2344069 - RNA, 19 nt, Homo sapiens
  misc_RNA (1)...(19): siRNA sense strand
cguaauugaugaaguacuu

SEQ ID NO: 2344070 - RNA, 19 nt, Homo sapiens
  misc_RNA (1)...(19): siRNA sense strand
ccucgaaauucaagaaacu

SEQ ID NO: 2344071 - RNA, 19 nt, Homo sapiens
  misc_RNA (1)...(19): siRNA sense strand
gcuaaaagcagauguggua

SEQ ID NO: 2344072 - RNA, 19 nt, Homo sapiens
  misc_RNA (1)...(19): siRNA sense strand
aaugauggcaguagugaaa

SEQ ID NO: 2344073 - RNA, 19 nt, Homo sapiens
  misc_RNA (1)...(19): siRNA sense strand
guuaaaagcuaaacugcaa

SEQ ID NO: 2344074 - RNA, 19 nt, Homo sapiens
  misc_RNA (1)...(19): siRNA sense strand
gcagacaacaggugcagaa

SEQ ID NO: 2344075 - RNA, 19 nt, Homo sapiens
  misc_RNA (1)...(19): siRNA sense strand
agaaacagaagcagaguga

SEQ ID NO: 2344076 - RNA, 19 nt, Homo sapiens
  misc_RNA (1)...(19): siRNA sense strand
aggaggaagaggaagaaau

SEQ ID NO: 2344077 - RNA, 19 nt, Homo sapiens
  misc_RNA (1)...(19): siRNA sense strand
agaaagaggaagaacuaga

SEQ ID NO: 2344078 - RNA, 19 nt, Homo sapiens
  misc_RNA (1)...(19): siRNA sense strand
ccaagaaaguuacagccaa

SEQ ID NO: 2344079 - RNA, 19 nt, Homo sapiens
  misc_RNA (1)...(19): siRNA sense strand
aaucauagacacugcaaau

SEQ ID NO: 2344080 - RNA, 19 nt, Homo sapiens
  misc_RNA (1)...(19): siRNA sense strand
uagaaauucaggagaaaca

SEQ ID NO: 2344081 - RNA, 19 nt, Homo sapiens
  misc_RNA (1)...(19): siRNA sense strand
aagauggguuugaggaaga

SEQ ID NO: 2344082 - RNA, 19 nt, Homo sapiens
  misc_RNA (1)...(19): siRNA sense strand
aggagaaagaagaggagga

SEQ ID NO: 2344083 - RNA, 19 nt, Homo sapiens
  misc_RNA (1)...(19): siRNA sense strand
ggcaaaugagguugaggaa

SEQ ID NO: 2344084 - RNA, 19 nt, Homo sapiens
  misc_RNA (1)...(19): siRNA sense strand
gguuggaggaugaaaauaa

SEQ ID NO: 2344085 - RNA, 19 nt, Homo sapiens
  misc_RNA (1)...(19): siRNA sense strand
aggaagauggagaagagaa

SEQ ID NO: 2344086 - RNA, 19 nt, Homo sapiens
  misc_RNA (1)...(19): siRNA sense strand
aggaagacgaggaggagga

SEQ ID NO: 2344087 - RNA, 19 nt, Homo sapiens
  misc_RNA (1)...(19): siRNA sense strand
gcaaaugagguugaggaaa

SEQ ID NO: 2344088 - RNA, 19 nt, Homo sapiens
  misc_RNA (1)...(19): siRNA sense strand
gggaagcgaagaugaguau

SEQ ID NO: 2344089 - RNA, 19 nt, Homo sapiens
  misc_RNA (1)...(19): siRNA sense strand
augaggaacugcagaguca

SEQ ID NO: 2344090 - RNA, 19 nt, Homo sapiens
  misc_RNA (1)...(19): siRNA sense strand
gaaaauuacagcugaagaa

SEQ ID NO: 2344091 - RNA, 19 nt, Homo sapiens
  misc_RNA (1)...(19): siRNA sense strand
cagacagugaugaaaguua

SEQ ID NO: 2344092 - RNA, 19 nt, Homo sapiens
  misc_RNA (1)...(19): siRNA sense strand
aagaaggaacugcaggaaa

SEQ ID NO: 2344093 - RNA, 19 nt, Homo sapiens
  misc_RNA (1)...(19): siRNA sense strand
aaagaaaggcagccagauu

SEQ ID NO: 2344094 - RNA, 19 nt, Homo sapiens
  misc_RNA (1)...(19): siRNA sense strand
gguuugaggaagaggagga

SEQ ID NO: 2344095 - RNA, 19 nt, Homo sapiens
  misc_RNA (1)...(19): siRNA sense strand
cugcagaagcugaagguuc

SEQ ID NO: 2344096 - RNA, 19 nt, Homo sapiens
  misc_RNA (1)...(19): siRNA sense strand
ggcccuggaucgugagcau

SEQ ID NO: 2344097 - RNA, 19 nt, Homo sapiens
  misc_RNA (1)...(19): siRNA sense strand
guuuagaaguguggagcaa

SEQ ID NO: 2344098 - RNA, 19 nt, Homo sapiens
  misc_RNA (1)...(19): siRNA sense strand
cgacauuaagacaaagaau

SEQ ID NO: 2344099 - RNA, 19 nt, Homo sapiens
  misc_RNA (1)...(19): siRNA sense strand
cuggaugaucagaggauau

SEQ ID NO: 2344100 - RNA, 19 nt, Homo sapiens
  misc_RNA (1)...(19): siRNA sense strand
ucuugaaauagaagggaau

SEQ ID NO: 2344101 - RNA, 19 nt, Homo sapiens
  misc_RNA (1)...(19): siRNA sense strand
ugauaagaccacaagaaaa

SEQ ID NO: 2344102 - RNA, 19 nt, Homo sapiens
  misc_RNA (1)...(19): siRNA sense strand
cuggaaaacuggacucaaa

SEQ ID NO: 2344103 - RNA, 19 nt, Homo sapiens
  misc_RNA (1)...(19): siRNA sense strand
gaccaaggauggagcagga

SEQ ID NO: 2344104 - RNA, 19 nt, Homo sapiens
  misc_RNA (1)...(19): siRNA sense strand
acccgaaucaugagaacua

SEQ ID NO: 2344105 - RNA, 19 nt, Homo sapiens
  misc_RNA (1)...(19): siRNA sense strand
ccuacuucuuugugggcau

SEQ ID NO: 2344106 - RNA, 19 nt, Homo sapiens
  misc_RNA (1)...(19): siRNA sense strand
acaaagaauauuacccgaa

SEQ ID NO: 2344107 - RNA, 19 nt, Homo sapiens
  misc_RNA (1)...(19): siRNA sense strand
agggaaucaucuuguucaa

SEQ ID NO: 2344108 - RNA, 19 nt, Homo sapiens
  misc_RNA (1)...(19): siRNA sense strand
cucuugaaauagaagggaa

SEQ ID NO: 2344109 - RNA, 19 nt, Homo sapiens
  misc_RNA (1)...(19): siRNA sense strand
gggucuggguggugacacu

SEQ ID NO: 2344110 - RNA, 19 nt, Homo sapiens
  misc_RNA (1)...(19): siRNA sense strand
uucaggaggcauaaagaua

SEQ ID NO: 2344111 - RNA, 19 nt, Homo sapiens
  misc_RNA (1)...(19): siRNA sense strand
gaugacaaaauucgggaaa

SEQ ID NO: 2344112 - RNA, 19 nt, Homo sapiens
  misc_RNA (1)...(19): siRNA sense strand
cugcuguggaugaggcuau

SEQ ID NO: 2344113 - RNA, 19 nt, Homo sapiens
  misc_RNA (1)...(19): siRNA sense strand
aggcuauccaagaagguuu

SEQ ID NO: 2344114 - RNA, 19 nt, Homo sapiens
  misc_RNA (1)...(19): siRNA sense strand
ugacccaaaccauggacaa

SEQ ID NO: 2344115 - RNA, 19 nt, Homo sapiens
  misc_RNA (1)...(19): siRNA sense strand
aagaauauuacccgaauca

SEQ ID NO: 2344116 - RNA, 19 nt, Homo sapiens
  misc_RNA (1)...(19): siRNA sense strand
ggaugauaucaauggaauc

SEQ ID NO: 2344117 - RNA, 19 nt, Homo sapiens
  misc_RNA (1)...(19): siRNA sense strand
ccaaggauggagcaggauu

SEQ ID NO: 2344118 - RNA, 19 nt, Homo sapiens
  misc_RNA (1)...(19): siRNA sense strand
cagccguggaucaaagcaa

SEQ ID NO: 2344119 - RNA, 19 nt, Homo sapiens
  misc_RNA (1)...(19): siRNA sense strand
augcaaagaaccaaagaac

SEQ ID NO: 2344120 - RNA, 19 nt, Homo sapiens
  misc_RNA (1)...(19): siRNA sense strand
ggauauggcacgagcugcu

SEQ ID NO: 2344121 - RNA, 19 nt, Homo sapiens
  misc_RNA (1)...(19): siRNA sense strand
gacccaaaccauggacaaa

SEQ ID NO: 2344122 - RNA, 19 nt, Homo sapiens
  misc_RNA (1)...(19): siRNA sense strand
guuucaaugcaaagaacca

SEQ ID NO: 2344123 - RNA, 19 nt, Homo sapiens
  misc_RNA (1)...(19): siRNA sense strand
ccgccauagaccaggauaa

SEQ ID NO: 2344124 - RNA, 19 nt, Homo sapiens
  misc_RNA (1)...(19): siRNA sense strand
gcaccaacaucuacgagca

SEQ ID NO: 2344125 - RNA, 19 nt, Homo sapiens
  misc_RNA (1)...(19): siRNA sense strand
gcaucuuugcccuggacua

SEQ ID NO: 2344126 - RNA, 19 nt, Homo sapiens
  misc_RNA (1)...(19): siRNA sense strand
agguguacuugguggggaa

SEQ ID NO: 2344127 - RNA, 19 nt, Homo sapiens
  misc_RNA (1)...(19): siRNA sense strand
ccaaugagagugugccuga

SEQ ID NO: 2344128 - RNA, 19 nt, Homo sapiens
  misc_RNA (1)...(19): siRNA sense strand
ccgccauagaccaggauaa

SEQ ID NO: 2344129 - RNA, 19 nt, Homo sapiens
  misc_RNA (1)...(19): siRNA sense strand
gcaccaacaucuacgagca

SEQ ID NO: 2344130 - RNA, 19 nt, Homo sapiens
  misc_RNA (1)...(19): siRNA sense strand
gcaucuuugcccuggacua

SEQ ID NO: 2344131 - RNA, 19 nt, Homo sapiens
  misc_RNA (1)...(19): siRNA sense strand
agguguacuugguggggaa

SEQ ID NO: 2344132 - RNA, 19 nt, Homo sapiens
  misc_RNA (1)...(19): siRNA sense strand
ccaaugagagugugccuga

SEQ ID NO: 2344133 - RNA, 19 nt, Homo sapiens
  misc_RNA (1)...(19): siRNA sense strand
ugucauuagcagagccaaa

SEQ ID NO: 2344134 - RNA, 19 nt, Homo sapiens
  misc_RNA (1)...(19): siRNA sense strand
gcaaugaaagugaggcuga

SEQ ID NO: 2344135 - RNA, 19 nt, Homo sapiens
  misc_RNA (1)...(19): siRNA sense strand
cagagaaagucaaggcugu

SEQ ID NO: 2344136 - RNA, 19 nt, Homo sapiens
  misc_RNA (1)...(19): siRNA sense strand
gcaaugacguccauggugu

SEQ ID NO: 2344137 - RNA, 19 nt, Homo sapiens
  misc_RNA (1)...(19): siRNA sense strand
uauuggcuuuggagggaaa

SEQ ID NO: 2344138 - RNA, 19 nt, Homo sapiens
  misc_RNA (1)...(19): siRNA sense strand
gguguguaagguuggcaaa

SEQ ID NO: 2344139 - RNA, 19 nt, Homo sapiens
  misc_RNA (1)...(19): siRNA sense strand
ccuuggaagacaugcucaa

SEQ ID NO: 2344140 - RNA, 19 nt, Homo sapiens
  misc_RNA (1)...(19): siRNA sense strand
aagucaaggcuguggauac

SEQ ID NO: 2344141 - RNA, 19 nt, Homo sapiens
  misc_RNA (1)...(19): siRNA sense strand
ccauaaaggagaaaggcaa

SEQ ID NO: 2344142 - RNA, 19 nt, Homo sapiens
  misc_RNA (1)...(19): siRNA sense strand
cggagaagagguagaaaau

SEQ ID NO: 2344143 - RNA, 19 nt, Homo sapiens
  misc_RNA (1)...(19): siRNA sense strand
gcugacaccuuuacggcaa

SEQ ID NO: 2344144 - RNA, 19 nt, Homo sapiens
  misc_RNA (1)...(19): siRNA sense strand
aggaaggauccaaggcaga

SEQ ID NO: 2344145 - RNA, 19 nt, Homo sapiens
  misc_RNA (1)...(19): siRNA sense strand
ucggagaagagguagaaaa

SEQ ID NO: 2344146 - RNA, 19 nt, Homo sapiens
  misc_RNA (1)...(19): siRNA sense strand
auucuuucuucguggacaa

SEQ ID NO: 2344147 - RNA, 19 nt, Homo sapiens
  misc_RNA (1)...(19): siRNA sense strand
gcagaggccauaaaggaga

SEQ ID NO: 2344148 - RNA, 19 nt, Homo sapiens
  misc_RNA (1)...(19): siRNA sense strand
caaauuuccugaagcacga

SEQ ID NO: 2344149 - RNA, 19 nt, Homo sapiens
  misc_RNA (1)...(19): siRNA sense strand
uggccaacuuaaagccgaa

SEQ ID NO: 2344150 - RNA, 19 nt, Homo sapiens
  misc_RNA (1)...(19): siRNA sense strand
ccgcuugggcuuugaggga

SEQ ID NO: 2344151 - RNA, 19 nt, Homo sapiens
  misc_RNA (1)...(19): siRNA sense strand
agguagaaaauguggcaga

SEQ ID NO: 2344152 - RNA, 19 nt, Homo sapiens
  misc_RNA (1)...(19): siRNA sense strand
ggagagaagaccaagaggu

SEQ ID NO: 2344153 - RNA, 19 nt, Homo sapiens
  misc_RNA (1)...(19): siRNA sense strand
cugcaguaucuuauugauu

SEQ ID NO: 2344154 - RNA, 19 nt, Homo sapiens
  misc_RNA (1)...(19): siRNA sense strand
cagaagggagugcagggaa

SEQ ID NO: 2344155 - RNA, 19 nt, Homo sapiens
  misc_RNA (1)...(19): siRNA sense strand
agggaaucaucgucgugaa

SEQ ID NO: 2344156 - RNA, 19 nt, Homo sapiens
  misc_RNA (1)...(19): siRNA sense strand
cagaagggagugcagggaa

SEQ ID NO: 2344157 - RNA, 19 nt, Homo sapiens
  misc_RNA (1)...(19): siRNA sense strand
agggaaucaucgucgugaa

SEQ ID NO: 2344158 - RNA, 19 nt, Homo sapiens
  misc_RNA (1)...(19): siRNA sense strand
gguuacagauccaaggaga

SEQ ID NO: 2344159 - RNA, 19 nt, Homo sapiens
  misc_RNA (1)...(19): siRNA sense strand
guuacagauccaaggagaa

SEQ ID NO: 2344160 - RNA, 19 nt, Homo sapiens
  misc_RNA (1)...(19): siRNA sense strand
cuacaagaccauugcccga

SEQ ID NO: 2344161 - RNA, 19 nt, Homo sapiens
  misc_RNA (1)...(19): siRNA sense strand
cauaaggaguguacggcua

SEQ ID NO: 2344162 - RNA, 19 nt, Homo sapiens
  misc_RNA (1)...(19): siRNA sense strand
ggacauugcagaaggcaga

SEQ ID NO: 2344163 - RNA, 19 nt, Homo sapiens
  misc_RNA (1)...(19): siRNA sense strand
aggcagaaaacaagauaaa

SEQ ID NO: 2344164 - RNA, 19 nt, Homo sapiens
  misc_RNA (1)...(19): siRNA sense strand
acggcuagucagagacaaa

SEQ ID NO: 2344165 - RNA, 19 nt, Homo sapiens
  misc_RNA (1)...(19): siRNA sense strand
agucagagacaaagacaca

SEQ ID NO: 2344166 - RNA, 19 nt, Homo sapiens
  misc_RNA (1)...(19): siRNA sense strand
acacagcauacguaggaaa

SEQ ID NO: 2344167 - RNA, 19 nt, Homo sapiens
  misc_RNA (1)...(19): siRNA sense strand
guguacggcuagucagaga

SEQ ID NO: 2344168 - RNA, 19 nt, Homo sapiens
  misc_RNA (1)...(19): siRNA sense strand
auguagaauucgaugaagu

SEQ ID NO: 2344169 - RNA, 19 nt, Homo sapiens
  misc_RNA (1)...(19): siRNA sense strand
ccaacauggauuucagaga

SEQ ID NO: 2344170 - RNA, 19 nt, Homo sapiens
  misc_RNA (1)...(19): siRNA sense strand
ccucaaucaaguagccaau

SEQ ID NO: 2344171 - RNA, 19 nt, Homo sapiens
  misc_RNA (1)...(19): siRNA sense strand
agaggaaagagcacagaga

SEQ ID NO: 2344172 - RNA, 19 nt, Homo sapiens
  misc_RNA (1)...(19): siRNA sense strand
guucaaaaggagcaagaau

SEQ ID NO: 2344173 - RNA, 19 nt, Homo sapiens
  misc_RNA (1)...(19): siRNA sense strand
ccacagaagaggaaagagc

SEQ ID NO: 2344174 - RNA, 19 nt, Homo sapiens
  misc_RNA (1)...(19): siRNA sense strand
gcuuaaaccucgaacaguc

SEQ ID NO: 2344175 - RNA, 19 nt, Homo sapiens
  misc_RNA (1)...(19): siRNA sense strand
ucaauacgguucagggcga

SEQ ID NO: 2344176 - RNA, 19 nt, Homo sapiens
  misc_RNA (1)...(19): siRNA sense strand
cuagagaggaagucguuca

SEQ ID NO: 2344177 - RNA, 19 nt, Homo sapiens
  misc_RNA (1)...(19): siRNA sense strand
ggaaagagcacagagacca

SEQ ID NO: 2344178 - RNA, 19 nt, Homo sapiens
  misc_RNA (1)...(19): siRNA sense strand
cauaaggaguguacggcua

SEQ ID NO: 2344179 - RNA, 19 nt, Homo sapiens
  misc_RNA (1)...(19): siRNA sense strand
ggacauugcagaaggcaga

SEQ ID NO: 2344180 - RNA, 19 nt, Homo sapiens
  misc_RNA (1)...(19): siRNA sense strand
aggcagaaaacaagauaaa

SEQ ID NO: 2344181 - RNA, 19 nt, Homo sapiens
  misc_RNA (1)...(19): siRNA sense strand
acggcuagucagagacaaa

SEQ ID NO: 2344182 - RNA, 19 nt, Homo sapiens
  misc_RNA (1)...(19): siRNA sense strand
agucagagacaaagacaca

SEQ ID NO: 2344183 - RNA, 19 nt, Homo sapiens
  misc_RNA (1)...(19): siRNA sense strand
acacagcauacguaggaaa

SEQ ID NO: 2344184 - RNA, 19 nt, Homo sapiens
  misc_RNA (1)...(19): siRNA sense strand
guguacggcuagucagaga

SEQ ID NO: 2344185 - RNA, 19 nt, Homo sapiens
  misc_RNA (1)...(19): siRNA sense strand
auguagaauucgaugaagu

SEQ ID NO: 2344186 - RNA, 19 nt, Homo sapiens
  misc_RNA (1)...(19): siRNA sense strand
ccaacauggauuucagaga

SEQ ID NO: 2344187 - RNA, 19 nt, Homo sapiens
  misc_RNA (1)...(19): siRNA sense strand
ccucaaucaaguagccaau

SEQ ID NO: 2344188 - RNA, 19 nt, Homo sapiens
  misc_RNA (1)...(19): siRNA sense strand
agaggaaagagcacagaga

SEQ ID NO: 2344189 - RNA, 19 nt, Homo sapiens
  misc_RNA (1)...(19): siRNA sense strand
guucaaaaggagcaagaau

SEQ ID NO: 2344190 - RNA, 19 nt, Homo sapiens
  misc_RNA (1)...(19): siRNA sense strand
ccacagaagaggaaagagc

SEQ ID NO: 2344191 - RNA, 19 nt, Homo sapiens
  misc_RNA (1)...(19): siRNA sense strand
gcuuaaaccucgaacaguc

SEQ ID NO: 2344192 - RNA, 19 nt, Homo sapiens
  misc_RNA (1)...(19): siRNA sense strand
ucaauacgguucagggcga

SEQ ID NO: 2344193 - RNA, 19 nt, Homo sapiens
  misc_RNA (1)...(19): siRNA sense strand
cuagagaggaagucguuca

SEQ ID NO: 2344194 - RNA, 19 nt, Homo sapiens
  misc_RNA (1)...(19): siRNA sense strand
ggaaagagcacagagacca

SEQ ID NO: 2344195 - RNA, 19 nt, Homo sapiens
  misc_RNA (1)...(19): siRNA sense strand
gcugaaaaggagaaggaaa

SEQ ID NO: 2344196 - RNA, 19 nt, Homo sapiens
  misc_RNA (1)...(19): siRNA sense strand
cugaaaaggagaaggaaau

SEQ ID NO: 2344197 - RNA, 19 nt, Homo sapiens
  misc_RNA (1)...(19): siRNA sense strand
aggaagcccagguggagaa

SEQ ID NO: 2344198 - RNA, 19 nt, Homo sapiens
  misc_RNA (1)...(19): siRNA sense strand
gcaagaaggugaagugcag

SEQ ID NO: 2344199 - RNA, 19 nt, Homo sapiens
  misc_RNA (1)...(19): siRNA sense strand
cggugcagacugugggcau

SEQ ID NO: 2344200 - RNA, 19 nt, Homo sapiens
  misc_RNA (1)...(19): siRNA sense strand
ugaaagagcagaaggguca

SEQ ID NO: 2344201 - RNA, 19 nt, Homo sapiens
  misc_RNA (1)...(19): siRNA sense strand
agagcauguucguggagaa

SEQ ID NO: 2344202 - RNA, 19 nt, Homo sapiens
  misc_RNA (1)...(19): siRNA sense strand
ccgaaggagcuuacgacau

SEQ ID NO: 2344203 - RNA, 19 nt, Homo sapiens
  misc_RNA (1)...(19): siRNA sense strand
cagaagggucagagcaugu

SEQ ID NO: 2344204 - RNA, 19 nt, Homo sapiens
  misc_RNA (1)...(19): siRNA sense strand
gcacaaaguuccguccgaa

SEQ ID NO: 2344205 - RNA, 19 nt, Homo sapiens
  misc_RNA (1)...(19): siRNA sense strand
ggcaagaacucucaggucu

SEQ ID NO: 2344206 - RNA, 19 nt, Homo sapiens
  misc_RNA (1)...(19): siRNA sense strand
ccgaaagacggcaagaacu

SEQ ID NO: 2344207 - RNA, 19 nt, Homo sapiens
  misc_RNA (1)...(19): siRNA sense strand
ucauguauacuuacggcaa

SEQ ID NO: 2344208 - RNA, 19 nt, Homo sapiens
  misc_RNA (1)...(19): siRNA sense strand
ugaaagagcagaaggguca

SEQ ID NO: 2344209 - RNA, 19 nt, Homo sapiens
  misc_RNA (1)...(19): siRNA sense strand
agagcauguucguggagaa

SEQ ID NO: 2344210 - RNA, 19 nt, Homo sapiens
  misc_RNA (1)...(19): siRNA sense strand
ccgaaggagcuuacgacau

SEQ ID NO: 2344211 - RNA, 19 nt, Homo sapiens
  misc_RNA (1)...(19): siRNA sense strand
cagaagggucagagcaugu

SEQ ID NO: 2344212 - RNA, 19 nt, Homo sapiens
  misc_RNA (1)...(19): siRNA sense strand
gcacaaaguuccguccgaa

SEQ ID NO: 2344213 - RNA, 19 nt, Homo sapiens
  misc_RNA (1)...(19): siRNA sense strand
ggcaagaacucucaggucu

SEQ ID NO: 2344214 - RNA, 19 nt, Homo sapiens
  misc_RNA (1)...(19): siRNA sense strand
ccgaaagacggcaagaacu

SEQ ID NO: 2344215 - RNA, 19 nt, Homo sapiens
  misc_RNA (1)...(19): siRNA sense strand
ucauguauacuuacggcaa

SEQ ID NO: 2344216 - RNA, 19 nt, Homo sapiens
  misc_RNA (1)...(19): siRNA sense strand
cgguaaugguuaugagaga

SEQ ID NO: 2344217 - RNA, 19 nt, Homo sapiens
  misc_RNA (1)...(19): siRNA sense strand
agauugaacuugaagggau

SEQ ID NO: 2344218 - RNA, 19 nt, Homo sapiens
  misc_RNA (1)...(19): siRNA sense strand
agcacaugauacagaaaua

SEQ ID NO: 2344219 - RNA, 19 nt, Homo sapiens
  misc_RNA (1)...(19): siRNA sense strand
cgugacuguugguggagaa

SEQ ID NO: 2344220 - RNA, 19 nt, Homo sapiens
  misc_RNA (1)...(19): siRNA sense strand
agaaauugucaaagagugu

SEQ ID NO: 2344221 - RNA, 19 nt, Homo sapiens
  misc_RNA (1)...(19): siRNA sense strand
ucggaauuguggagauaga

SEQ ID NO: 2344222 - RNA, 19 nt, Homo sapiens
  misc_RNA (1)...(19): siRNA sense strand
ugucaaagaguguagcaau

SEQ ID NO: 2344223 - RNA, 19 nt, Homo sapiens
  misc_RNA (1)...(19): siRNA sense strand
gguggagaagagagaguuu

SEQ ID NO: 2344224 - RNA, 19 nt, Homo sapiens
  misc_RNA (1)...(19): siRNA sense strand
cuuuaagcaugccgagaau

SEQ ID NO: 2344225 - RNA, 19 nt, Homo sapiens
  misc_RNA (1)...(19): siRNA sense strand
cuugaagggauaucgguaa

SEQ ID NO: 2344226 - RNA, 19 nt, Homo sapiens
  misc_RNA (1)...(19): siRNA sense strand
cugcauugcugcugagaac

SEQ ID NO: 2344227 - RNA, 19 nt, Homo sapiens
  misc_RNA (1)...(19): siRNA sense strand
accauuaguacgagaaauu

SEQ ID NO: 2344228 - RNA, 19 nt, Homo sapiens
  misc_RNA (1)...(19): siRNA sense strand
aguaugauccagaugcaaa

SEQ ID NO: 2344229 - RNA, 19 nt, Homo sapiens
  misc_RNA (1)...(19): siRNA sense strand
guaaugguuaugagagaga

SEQ ID NO: 2344230 - RNA, 19 nt, Homo sapiens
  misc_RNA (1)...(19): siRNA sense strand
ggcuaaaugaagauacaau

SEQ ID NO: 2344231 - RNA, 19 nt, Homo sapiens
  misc_RNA (1)...(19): siRNA sense strand
aguacgagaaauugucaaa

SEQ ID NO: 2344232 - RNA, 19 nt, Homo sapiens
  misc_RNA (1)...(19): siRNA sense strand
cagcaaggcuuauuccgua

SEQ ID NO: 2344233 - RNA, 19 nt, Homo sapiens
  misc_RNA (1)...(19): siRNA sense strand
ccuuuaagcaugccgagaa

SEQ ID NO: 2344234 - RNA, 19 nt, Homo sapiens
  misc_RNA (1)...(19): siRNA sense strand
aaacguuggcaaugaaaga

SEQ ID NO: 2344235 - RNA, 19 nt, Homo sapiens
  misc_RNA (1)...(19): siRNA sense strand
acaucaggacaaaguuaaa

SEQ ID NO: 2344236 - RNA, 19 nt, Homo sapiens
  misc_RNA (1)...(19): siRNA sense strand
agaaguuaaacguuggcaa

SEQ ID NO: 2344237 - RNA, 19 nt, Homo sapiens
  misc_RNA (1)...(19): siRNA sense strand
aggagaucccggugcagaa

SEQ ID NO: 2344238 - RNA, 19 nt, Homo sapiens
  misc_RNA (1)...(19): siRNA sense strand
auggauagcacaugauaca

SEQ ID NO: 2344239 - RNA, 19 nt, Homo sapiens
  misc_RNA (1)...(19): siRNA sense strand
ggaucuaucuuaacgacca

SEQ ID NO: 2344240 - RNA, 19 nt, Homo sapiens
  misc_RNA (1)...(19): siRNA sense strand
uugaagggauaucgguaau

SEQ ID NO: 2344241 - RNA, 19 nt, Homo sapiens
  misc_RNA (1)...(19): siRNA sense strand
ccauggaguguuacgauau

SEQ ID NO: 2344242 - RNA, 19 nt, Homo sapiens
  misc_RNA (1)...(19): siRNA sense strand
aguuaaacguuggcaauga

SEQ ID NO: 2344243 - RNA, 19 nt, Homo sapiens
  misc_RNA (1)...(19): siRNA sense strand
cagaaauaagaaaggucca

SEQ ID NO: 2344244 - RNA, 19 nt, Homo sapiens
  misc_RNA (1)...(19): siRNA sense strand
gagaaaaguaugauccaga

SEQ ID NO: 2344245 - RNA, 19 nt, Homo sapiens
  misc_RNA (1)...(19): siRNA sense strand
acguuggcaaugaaagaua

SEQ ID NO: 2344246 - RNA, 19 nt, Homo sapiens
  misc_RNA (1)...(19): siRNA sense strand
augaacgaggcaagacaua

SEQ ID NO: 2344247 - RNA, 19 nt, Homo sapiens
  misc_RNA (1)...(19): siRNA sense strand
agauacaauccaagauguu

SEQ ID NO: 2344248 - RNA, 19 nt, Homo sapiens
  misc_RNA (1)...(19): siRNA sense strand
ccaagauguuguucaggca

SEQ ID NO: 2344249 - RNA, 19 nt, Homo sapiens
  misc_RNA (1)...(19): siRNA sense strand
ccucaaaagcuuaaagaag

SEQ ID NO: 2344250 - RNA, 19 nt, Homo sapiens
  misc_RNA (1)...(19): siRNA sense strand
cuugcaaguccgaguucua

SEQ ID NO: 2344251 - RNA, 19 nt, Homo sapiens
  misc_RNA (1)...(19): siRNA sense strand
agauagaugggaugcugua

SEQ ID NO: 2344252 - RNA, 19 nt, Homo sapiens
  misc_RNA (1)...(19): siRNA sense strand
cagaaagaucggcugcuau

SEQ ID NO: 2344253 - RNA, 19 nt, Homo sapiens
  misc_RNA (1)...(19): siRNA sense strand
cgagaaauugucaaagagu

SEQ ID NO: 2344254 - RNA, 19 nt, Homo sapiens
  misc_RNA (1)...(19): siRNA sense strand
uggagaagagagaguuuca

SEQ ID NO: 2344255 - RNA, 19 nt, Homo sapiens
  misc_RNA (1)...(19): siRNA sense strand
guaugauccagaugcaaau

SEQ ID NO: 2344256 - RNA, 19 nt, Homo sapiens
  misc_RNA (1)...(19): siRNA sense strand
gugcgugaguuuaaaagaa

SEQ ID NO: 2344257 - RNA, 19 nt, Homo sapiens
  misc_RNA (1)...(19): siRNA sense strand
gaucaggcuaaaugaagau

SEQ ID NO: 2344258 - RNA, 19 nt, Homo sapiens
  misc_RNA (1)...(19): siRNA sense strand
ccacagaauaccuggagac

SEQ ID NO: 2344259 - RNA, 19 nt, Homo sapiens
  misc_RNA (1)...(19): siRNA sense strand
uguugguggagaagagaga

SEQ ID NO: 2344260 - RNA, 19 nt, Homo sapiens
  misc_RNA (1)...(19): siRNA sense strand
aagacauaacuucggaauu

SEQ ID NO: 2344261 - RNA, 19 nt, Homo sapiens
  misc_RNA (1)...(19): siRNA sense strand
ggaggagaggauggugaaa

SEQ ID NO: 2344262 - RNA, 19 nt, Homo sapiens
  misc_RNA (1)...(19): siRNA sense strand
acuacgugcgugaguuuaa

SEQ ID NO: 2344263 - RNA, 19 nt, Homo sapiens
  misc_RNA (1)...(19): siRNA sense strand
cgugagaugcugaaggcca

SEQ ID NO: 2344264 - RNA, 19 nt, Homo sapiens
  misc_RNA (1)...(19): siRNA sense strand
cgugagaugcugaaggcca

SEQ ID NO: 2344265 - RNA, 19 nt, Homo sapiens
  misc_RNA (1)...(19): siRNA sense strand
agauagagcagcuggccaa

SEQ ID NO: 2344266 - RNA, 19 nt, Homo sapiens
  misc_RNA (1)...(19): siRNA sense strand
uggagcaggugaagggcua

SEQ ID NO: 2344267 - RNA, 19 nt, Homo sapiens
  misc_RNA (1)...(19): siRNA sense strand
ccaagcaaauacagcgaga

SEQ ID NO: 2344268 - RNA, 19 nt, Homo sapiens
  misc_RNA (1)...(19): siRNA sense strand
gcuugaagaaggugagucu

SEQ ID NO: 2344269 - RNA, 19 nt, Homo sapiens
  misc_RNA (1)...(19): siRNA sense strand
gcuuggaaucggagcuaga

SEQ ID NO: 2344270 - RNA, 19 nt, Homo sapiens
  misc_RNA (1)...(19): siRNA sense strand
gcuacgaugaggaguguga

SEQ ID NO: 2344271 - RNA, 19 nt, Homo sapiens
  misc_RNA (1)...(19): siRNA sense strand
agacgauugccgugugcua

SEQ ID NO: 2344272 - RNA, 19 nt, Homo sapiens
  misc_RNA (1)...(19): siRNA sense strand
ugcuuaucguggagggaau

SEQ ID NO: 2344273 - RNA, 19 nt, Homo sapiens
  misc_RNA (1)...(19): siRNA sense strand
guguacgggcugaggagau

SEQ ID NO: 2344274 - RNA, 19 nt, Homo sapiens
  misc_RNA (1)...(19): siRNA sense strand
gaaagugaccuuaaggcca

SEQ ID NO: 2344275 - RNA, 19 nt, Homo sapiens
  misc_RNA (1)...(19): siRNA sense strand
gcaccgaguccacuggcaa

SEQ ID NO: 2344276 - RNA, 19 nt, Homo sapiens
  misc_RNA (1)...(19): siRNA sense strand
agggccagcucgugaccaa

SEQ ID NO: 2344277 - RNA, 19 nt, Homo sapiens
  misc_RNA (1)...(19): siRNA sense strand
gagauuugaaagugaccuu

SEQ ID NO: 2344278 - RNA, 19 nt, Homo sapiens
  misc_RNA (1)...(19): siRNA sense strand
augaaaacugcuugaagaa

SEQ ID NO: 2344279 - RNA, 19 nt, Homo sapiens
  misc_RNA (1)...(19): siRNA sense strand
agauagagcagcuggccaa

SEQ ID NO: 2344280 - RNA, 19 nt, Homo sapiens
  misc_RNA (1)...(19): siRNA sense strand
uggagcaggugaagggcua

SEQ ID NO: 2344281 - RNA, 19 nt, Homo sapiens
  misc_RNA (1)...(19): siRNA sense strand
ccaagcaaauacagcgaga

SEQ ID NO: 2344282 - RNA, 19 nt, Homo sapiens
  misc_RNA (1)...(19): siRNA sense strand
gcuugaagaaggugagucu

SEQ ID NO: 2344283 - RNA, 19 nt, Homo sapiens
  misc_RNA (1)...(19): siRNA sense strand
gcuuggaaucggagcuaga

SEQ ID NO: 2344284 - RNA, 19 nt, Homo sapiens
  misc_RNA (1)...(19): siRNA sense strand
gcuacgaugaggaguguga

SEQ ID NO: 2344285 - RNA, 19 nt, Homo sapiens
  misc_RNA (1)...(19): siRNA sense strand
agacgauugccgugugcua

SEQ ID NO: 2344286 - RNA, 19 nt, Homo sapiens
  misc_RNA (1)...(19): siRNA sense strand
ugcuuaucguggagggaau

SEQ ID NO: 2344287 - RNA, 19 nt, Homo sapiens
  misc_RNA (1)...(19): siRNA sense strand
guguacgggcugaggagau

SEQ ID NO: 2344288 - RNA, 19 nt, Homo sapiens
  misc_RNA (1)...(19): siRNA sense strand
gaaagugaccuuaaggcca

SEQ ID NO: 2344289 - RNA, 19 nt, Homo sapiens
  misc_RNA (1)...(19): siRNA sense strand
gcaccgaguccacuggcaa

SEQ ID NO: 2344290 - RNA, 19 nt, Homo sapiens
  misc_RNA (1)...(19): siRNA sense strand
agggccagcucgugaccaa

SEQ ID NO: 2344291 - RNA, 19 nt, Homo sapiens
  misc_RNA (1)...(19): siRNA sense strand
gagauuugaaagugaccuu

SEQ ID NO: 2344292 - RNA, 19 nt, Homo sapiens
  misc_RNA (1)...(19): siRNA sense strand
augaaaacugcuugaagaa

SEQ ID NO: 2344293 - RNA, 19 nt, Homo sapiens
  misc_RNA (1)...(19): siRNA sense strand
ggcaaagggaauauggaaa

SEQ ID NO: 2344294 - RNA, 19 nt, Homo sapiens
  misc_RNA (1)...(19): siRNA sense strand
ggaaaguggaagagagaag

SEQ ID NO: 2344295 - RNA, 19 nt, Homo sapiens
  misc_RNA (1)...(19): siRNA sense strand
cuucuuagcaaguuggaaa

SEQ ID NO: 2344296 - RNA, 19 nt, Homo sapiens
  misc_RNA (1)...(19): siRNA sense strand
cugagaaguuauuggcaga

SEQ ID NO: 2344297 - RNA, 19 nt, Homo sapiens
  misc_RNA (1)...(19): siRNA sense strand
cuggaaaguggaagagaga

SEQ ID NO: 2344298 - RNA, 19 nt, Homo sapiens
  misc_RNA (1)...(19): siRNA sense strand
acagaggagcagaggaaaa

SEQ ID NO: 2344299 - RNA, 19 nt, Homo sapiens
  misc_RNA (1)...(19): siRNA sense strand
agggaaagugcguaaggaa

SEQ ID NO: 2344300 - RNA, 19 nt, Homo sapiens
  misc_RNA (1)...(19): siRNA sense strand
aggcaaagggaauauggaa

SEQ ID NO: 2344301 - RNA, 19 nt, Homo sapiens
  misc_RNA (1)...(19): siRNA sense strand
agagaaagcacgugcagca

SEQ ID NO: 2344302 - RNA, 19 nt, Homo sapiens
  misc_RNA (1)...(19): siRNA sense strand
ccagaagauaugaugucaa

SEQ ID NO: 2344303 - RNA, 19 nt, Homo sapiens
  misc_RNA (1)...(19): siRNA sense strand
ccacagaagaaaaggagau

SEQ ID NO: 2344304 - RNA, 19 nt, Homo sapiens
  misc_RNA (1)...(19): siRNA sense strand
ccgcagagcucuacacgca

SEQ ID NO: 2344305 - RNA, 19 nt, Homo sapiens
  misc_RNA (1)...(19): siRNA sense strand
gaaaugaccaccaaggaca

SEQ ID NO: 2344306 - RNA, 19 nt, Homo sapiens
  misc_RNA (1)...(19): siRNA sense strand
gaguuaugaguuaggucaa

SEQ ID NO: 2344307 - RNA, 19 nt, Homo sapiens
  misc_RNA (1)...(19): siRNA sense strand
gcccaggacagaaggaaga

SEQ ID NO: 2344308 - RNA, 19 nt, Homo sapiens
  misc_RNA (1)...(19): siRNA sense strand
gggaaagugcguaaggaac

SEQ ID NO: 2344309 - RNA, 19 nt, Homo sapiens
  misc_RNA (1)...(19): siRNA sense strand
ccuacuggaaaguggaaga

SEQ ID NO: 2344310 - RNA, 19 nt, Homo sapiens
  misc_RNA (1)...(19): siRNA sense strand
acccaaagcagcagaagau

SEQ ID NO: 2344311 - RNA, 19 nt, Homo sapiens
  misc_RNA (1)...(19): siRNA sense strand
ugagaaagaaggaagugau

SEQ ID NO: 2344312 - RNA, 19 nt, Homo sapiens
  misc_RNA (1)...(19): siRNA sense strand
ugaacucucagaagggaaa

SEQ ID NO: 2344313 - RNA, 19 nt, Homo sapiens
  misc_RNA (1)...(19): siRNA sense strand
cagccaguccacagaagaa

SEQ ID NO: 2344314 - RNA, 19 nt, Homo sapiens
  misc_RNA (1)...(19): siRNA sense strand
cuuguaagccagugagcca

SEQ ID NO: 2344315 - RNA, 19 nt, Homo sapiens
  misc_RNA (1)...(19): siRNA sense strand
uucacuaccucguggcaaa

SEQ ID NO: 2344316 - RNA, 19 nt, Homo sapiens
  misc_RNA (1)...(19): siRNA sense strand
auugaagagaaucgacaaa

SEQ ID NO: 2344317 - RNA, 19 nt, Homo sapiens
  misc_RNA (1)...(19): siRNA sense strand
cgcaauuacgcaagagcuu

SEQ ID NO: 2344318 - RNA, 19 nt, Homo sapiens
  misc_RNA (1)...(19): siRNA sense strand
aaagaguucccaagagaca

SEQ ID NO: 2344319 - RNA, 19 nt, Homo sapiens
  misc_RNA (1)...(19): siRNA sense strand
agaaguuauuggcagaaca

SEQ ID NO: 2344320 - RNA, 19 nt, Homo sapiens
  misc_RNA (1)...(19): siRNA sense strand
ugaucaacauugucagcuu

SEQ ID NO: 2344321 - RNA, 19 nt, Homo sapiens
  misc_RNA (1)...(19): siRNA sense strand
gcgcaagauaguggugauu

SEQ ID NO: 2344322 - RNA, 19 nt, Homo sapiens
  misc_RNA (1)...(19): siRNA sense strand
cagcaagaauuaugauccu

SEQ ID NO: 2344323 - RNA, 19 nt, Homo sapiens
  misc_RNA (1)...(19): siRNA sense strand
cucauaagccucuggccaa

SEQ ID NO: 2344324 - RNA, 19 nt, Homo sapiens
  misc_RNA (1)...(19): siRNA sense strand
uggccaaaccaaagaguuc

SEQ ID NO: 2344325 - RNA, 19 nt, Homo sapiens
  misc_RNA (1)...(19): siRNA sense strand
ugggagacacccuggauga

SEQ ID NO: 2344326 - RNA, 19 nt, Homo sapiens
  misc_RNA (1)...(19): siRNA sense strand
ccaagagacaccagcucau

SEQ ID NO: 2344327 - RNA, 19 nt, Homo sapiens
  misc_RNA (1)...(19): siRNA sense strand
gugaacucucagaagggaa

SEQ ID NO: 2344328 - RNA, 19 nt, Homo sapiens
  misc_RNA (1)...(19): siRNA sense strand
gguacaaugcggaacucau

SEQ ID NO: 2344329 - RNA, 19 nt, Homo sapiens
  misc_RNA (1)...(19): siRNA sense strand
gggaagaccauccaagcca

SEQ ID NO: 2344330 - RNA, 19 nt, Homo sapiens
  misc_RNA (1)...(19): siRNA sense strand
gcaucaacgucguggugac

SEQ ID NO: 2344331 - RNA, 19 nt, Homo sapiens
  misc_RNA (1)...(19): siRNA sense strand
guuucaugccuuuggacuu

SEQ ID NO: 2344332 - RNA, 19 nt, Homo sapiens
  misc_RNA (1)...(19): siRNA sense strand
caguaaacuaauugcaaag

SEQ ID NO: 2344333 - RNA, 19 nt, Homo sapiens
  misc_RNA (1)...(19): siRNA sense strand
agaccagcuccgugggcau

SEQ ID NO: 2344334 - RNA, 19 nt, Homo sapiens
  misc_RNA (1)...(19): siRNA sense strand
ggcaaagggcacagcugau

SEQ ID NO: 2344335 - RNA, 19 nt, Homo sapiens
  misc_RNA (1)...(19): siRNA sense strand
ccaaagcagcagaagaucu

SEQ ID NO: 2344336 - RNA, 19 nt, Homo sapiens
  misc_RNA (1)...(19): siRNA sense strand
aggaacaucuggaaguagu

SEQ ID NO: 2344337 - RNA, 19 nt, Homo sapiens
  misc_RNA (1)...(19): siRNA sense strand
aggucaagcuaguggauuu

SEQ ID NO: 2344338 - RNA, 19 nt, Homo sapiens
  misc_RNA (1)...(19): siRNA sense strand
gagaaagaggagacagaau

SEQ ID NO: 2344339 - RNA, 19 nt, Homo sapiens
  misc_RNA (1)...(19): siRNA sense strand
cagagaaugcugaggucaa

SEQ ID NO: 2344340 - RNA, 19 nt, Homo sapiens
  misc_RNA (1)...(19): siRNA sense strand
gugagaaagaggagacaga

SEQ ID NO: 2344341 - RNA, 19 nt, Homo sapiens
  misc_RNA (1)...(19): siRNA sense strand
gccuauaucugcagggaga

SEQ ID NO: 2344342 - RNA, 19 nt, Homo sapiens
  misc_RNA (1)...(19): siRNA sense strand
cggaggacgaggaggaaga

SEQ ID NO: 2344343 - RNA, 19 nt, Homo sapiens
  misc_RNA (1)...(19): siRNA sense strand
ggaagcagcuggaggagca

SEQ ID NO: 2344344 - RNA, 19 nt, Homo sapiens
  misc_RNA (1)...(19): siRNA sense strand
acgaggaggaagagaucaa

SEQ ID NO: 2344345 - RNA, 19 nt, Homo sapiens
  misc_RNA (1)...(19): siRNA sense strand
gaagaagcggggugagaaa

SEQ ID NO: 2344346 - RNA, 19 nt, Homo sapiens
  misc_RNA (1)...(19): siRNA sense strand
gaauaugaguacagcggca

SEQ ID NO: 2344347 - RNA, 19 nt, Homo sapiens
  misc_RNA (1)...(19): siRNA sense strand
ggaauaaagccaagcccga

SEQ ID NO: 2344348 - RNA, 19 nt, Homo sapiens
  misc_RNA (1)...(19): siRNA sense strand
ccgagagguagaagagaga

SEQ ID NO: 2344349 - RNA, 19 nt, Homo sapiens
  misc_RNA (1)...(19): siRNA sense strand
gcuacgaggacgagggugu

SEQ ID NO: 2344350 - RNA, 19 nt, Homo sapiens
  misc_RNA (1)...(19): siRNA sense strand
gagguagaagagagaacaa

SEQ ID NO: 2344351 - RNA, 19 nt, Homo sapiens
  misc_RNA (1)...(19): siRNA sense strand
cgagaacagcaaaggccaa

SEQ ID NO: 2344352 - RNA, 19 nt, Homo sapiens
  misc_RNA (1)...(19): siRNA sense strand
ggaaggguucuguggucaa

SEQ ID NO: 2344353 - RNA, 19 nt, Homo sapiens
  misc_RNA (1)...(19): siRNA sense strand
agcggaagcugcaggagaa

SEQ ID NO: 2344354 - RNA, 19 nt, Homo sapiens
  misc_RNA (1)...(19): siRNA sense strand
caucaccaucucagggaaa

SEQ ID NO: 2344355 - RNA, 19 nt, Homo sapiens
  misc_RNA (1)...(19): siRNA sense strand
acaagagccugguggcaca

SEQ ID NO: 2344356 - RNA, 19 nt, Homo sapiens
  misc_RNA (1)...(19): siRNA sense strand
cagcaaaggccaaagccca

SEQ ID NO: 2344357 - RNA, 19 nt, Homo sapiens
  misc_RNA (1)...(19): siRNA sense strand
aggaagagaucaaacagga

SEQ ID NO: 2344358 - RNA, 19 nt, Homo sapiens
  misc_RNA (1)...(19): siRNA sense strand
agaaugugcugcugacaga

SEQ ID NO: 2344359 - RNA, 19 nt, Homo sapiens
  misc_RNA (1)...(19): siRNA sense strand
cagaaguggagaagaagca

SEQ ID NO: 2344360 - RNA, 19 nt, Homo sapiens
  misc_RNA (1)...(19): siRNA sense strand
cggauuaaguuccugguca

SEQ ID NO: 2344361 - RNA, 19 nt, Homo sapiens
  misc_RNA (1)...(19): siRNA sense strand
gcauccagcuuaaggacca

SEQ ID NO: 2344362 - RNA, 19 nt, Homo sapiens
  misc_RNA (1)...(19): siRNA sense strand
uuguggagguggucggcaa

SEQ ID NO: 2344363 - RNA, 19 nt, Homo sapiens
  misc_RNA (1)...(19): siRNA sense strand
ucacggaggacgaggagga

SEQ ID NO: 2344364 - RNA, 19 nt, Homo sapiens
  misc_RNA (1)...(19): siRNA sense strand
cgacgaggaggaaggcgaa

SEQ ID NO: 2344365 - RNA, 19 nt, Homo sapiens
  misc_RNA (1)...(19): siRNA sense strand
gcaauggaaccuacggaca

SEQ ID NO: 2344366 - RNA, 19 nt, Homo sapiens
  misc_RNA (1)...(19): siRNA sense strand
cggagcgcgagcaggaaua

SEQ ID NO: 2344367 - RNA, 19 nt, Homo sapiens
  misc_RNA (1)...(19): siRNA sense strand
gagagguagaagagagaac

SEQ ID NO: 2344368 - RNA, 19 nt, Homo sapiens
  misc_RNA (1)...(19): siRNA sense strand
gcgaggagguggaaagcag

SEQ ID NO: 2344369 - RNA, 19 nt, Homo sapiens
  misc_RNA (1)...(19): siRNA sense strand
gugaggacgacgaggagga

SEQ ID NO: 2344370 - RNA, 19 nt, Homo sapiens
  misc_RNA (1)...(19): siRNA sense strand
ggaacagcuaugacaucua

SEQ ID NO: 2344371 - RNA, 19 nt, Homo sapiens
  misc_RNA (1)...(19): siRNA sense strand
ccuacggacagguguacaa

SEQ ID NO: 2344372 - RNA, 19 nt, Homo sapiens
  misc_RNA (1)...(19): siRNA sense strand
cggaaguacaagaagcgau

SEQ ID NO: 2344373 - RNA, 19 nt, Homo sapiens
  misc_RNA (1)...(19): siRNA sense strand
ggcucaaguuccuguguga

SEQ ID NO: 2344374 - RNA, 19 nt, Homo sapiens
  misc_RNA (1)...(19): siRNA sense strand
agagaacaaggaugaacaa

SEQ ID NO: 2344375 - RNA, 19 nt, Homo sapiens
  misc_RNA (1)...(19): siRNA sense strand
uggaaagcagugaggacga

SEQ ID NO: 2344376 - RNA, 19 nt, Homo sapiens
  misc_RNA (1)...(19): siRNA sense strand
ccugagauccggaaguaca

SEQ ID NO: 2344377 - RNA, 19 nt, Homo sapiens
  misc_RNA (1)...(19): siRNA sense strand
agagcaacucagaggcuuu

SEQ ID NO: 2344378 - RNA, 19 nt, Homo sapiens
  misc_RNA (1)...(19): siRNA sense strand
ucacgauguuuguggaucu

SEQ ID NO: 2344379 - RNA, 19 nt, Homo sapiens
  misc_RNA (1)...(19): siRNA sense strand
gugagaaagccauugagau

SEQ ID NO: 2344380 - RNA, 19 nt, Homo sapiens
  misc_RNA (1)...(19): siRNA sense strand
uggagaggaaggagagcca

SEQ ID NO: 2344381 - RNA, 19 nt, Homo sapiens
  misc_RNA (1)...(19): siRNA sense strand
ugcaguacgacgugaggaa

SEQ ID NO: 2344382 - RNA, 19 nt, Homo sapiens
  misc_RNA (1)...(19): siRNA sense strand
aggacgaggaggaagagau

SEQ ID NO: 2344383 - RNA, 19 nt, Homo sapiens
  misc_RNA (1)...(19): siRNA sense strand
gaagagaucaaacaggaga

SEQ ID NO: 2344384 - RNA, 19 nt, Homo sapiens
  misc_RNA (1)...(19): siRNA sense strand
gugcacauccagagccaga

SEQ ID NO: 2344385 - RNA, 19 nt, Homo sapiens
  misc_RNA (1)...(19): siRNA sense strand
aggaggaagaugacagcca

SEQ ID NO: 2344386 - RNA, 19 nt, Homo sapiens
  misc_RNA (1)...(19): siRNA sense strand
gguggaaagcagugaggac

SEQ ID NO: 2344387 - RNA, 19 nt, Homo sapiens
  misc_RNA (1)...(19): siRNA sense strand
aggaggaagagaucaaaca

SEQ ID NO: 2344388 - RNA, 19 nt, Homo sapiens
  misc_RNA (1)...(19): siRNA sense strand
guucuguggugcugguuca

SEQ ID NO: 2344389 - RNA, 19 nt, Homo sapiens
  misc_RNA (1)...(19): siRNA sense strand
gcagcagcagcuucagaaa

SEQ ID NO: 2344390 - RNA, 19 nt, Homo sapiens
  misc_RNA (1)...(19): siRNA sense strand
agaaacagcagcagcagca

SEQ ID NO: 2344391 - RNA, 19 nt, Homo sapiens
  misc_RNA (1)...(19): siRNA sense strand
gcagugaggacgacgagga

SEQ ID NO: 2344392 - RNA, 19 nt, Homo sapiens
  misc_RNA (1)...(19): siRNA sense strand
aggucaagcuaguggauuu

SEQ ID NO: 2344393 - RNA, 19 nt, Homo sapiens
  misc_RNA (1)...(19): siRNA sense strand
gagaaagaggagacagaau

SEQ ID NO: 2344394 - RNA, 19 nt, Homo sapiens
  misc_RNA (1)...(19): siRNA sense strand
cagagaaugcugaggucaa

SEQ ID NO: 2344395 - RNA, 19 nt, Homo sapiens
  misc_RNA (1)...(19): siRNA sense strand
gugagaaagaggagacaga

SEQ ID NO: 2344396 - RNA, 19 nt, Homo sapiens
  misc_RNA (1)...(19): siRNA sense strand
gccuauaucugcagggaga

SEQ ID NO: 2344397 - RNA, 19 nt, Homo sapiens
  misc_RNA (1)...(19): siRNA sense strand
cggaggacgaggaggaaga

SEQ ID NO: 2344398 - RNA, 19 nt, Homo sapiens
  misc_RNA (1)...(19): siRNA sense strand
ggaagcagcuggaggagca

SEQ ID NO: 2344399 - RNA, 19 nt, Homo sapiens
  misc_RNA (1)...(19): siRNA sense strand
acgaggaggaagagaucaa

SEQ ID NO: 2344400 - RNA, 19 nt, Homo sapiens
  misc_RNA (1)...(19): siRNA sense strand
gaagaagcggggugagaaa

SEQ ID NO: 2344401 - RNA, 19 nt, Homo sapiens
  misc_RNA (1)...(19): siRNA sense strand
gaauaugaguacagcggca

SEQ ID NO: 2344402 - RNA, 19 nt, Homo sapiens
  misc_RNA (1)...(19): siRNA sense strand
ggaauaaagccaagcccga

SEQ ID NO: 2344403 - RNA, 19 nt, Homo sapiens
  misc_RNA (1)...(19): siRNA sense strand
ccgagagguagaagagaga

SEQ ID NO: 2344404 - RNA, 19 nt, Homo sapiens
  misc_RNA (1)...(19): siRNA sense strand
gcuacgaggacgagggugu

SEQ ID NO: 2344405 - RNA, 19 nt, Homo sapiens
  misc_RNA (1)...(19): siRNA sense strand
gagguagaagagagaacaa

SEQ ID NO: 2344406 - RNA, 19 nt, Homo sapiens
  misc_RNA (1)...(19): siRNA sense strand
cgagaacagcaaaggccaa

SEQ ID NO: 2344407 - RNA, 19 nt, Homo sapiens
  misc_RNA (1)...(19): siRNA sense strand
ggaaggguucuguggucaa

SEQ ID NO: 2344408 - RNA, 19 nt, Homo sapiens
  misc_RNA (1)...(19): siRNA sense strand
agcggaagcugcaggagaa

SEQ ID NO: 2344409 - RNA, 19 nt, Homo sapiens
  misc_RNA (1)...(19): siRNA sense strand
caucaccaucucagggaaa

SEQ ID NO: 2344410 - RNA, 19 nt, Homo sapiens
  misc_RNA (1)...(19): siRNA sense strand
acaagagccugguggcaca

SEQ ID NO: 2344411 - RNA, 19 nt, Homo sapiens
  misc_RNA (1)...(19): siRNA sense strand
cagcaaaggccaaagccca

SEQ ID NO: 2344412 - RNA, 19 nt, Homo sapiens
  misc_RNA (1)...(19): siRNA sense strand
aggaagagaucaaacagga

SEQ ID NO: 2344413 - RNA, 19 nt, Homo sapiens
  misc_RNA (1)...(19): siRNA sense strand
agaaugugcugcugacaga

SEQ ID NO: 2344414 - RNA, 19 nt, Homo sapiens
  misc_RNA (1)...(19): siRNA sense strand
cagaaguggagaagaagca

SEQ ID NO: 2344415 - RNA, 19 nt, Homo sapiens
  misc_RNA (1)...(19): siRNA sense strand
cggauuaaguuccugguca

SEQ ID NO: 2344416 - RNA, 19 nt, Homo sapiens
  misc_RNA (1)...(19): siRNA sense strand
gcauccagcuuaaggacca

SEQ ID NO: 2344417 - RNA, 19 nt, Homo sapiens
  misc_RNA (1)...(19): siRNA sense strand
uuguggagguggucggcaa

SEQ ID NO: 2344418 - RNA, 19 nt, Homo sapiens
  misc_RNA (1)...(19): siRNA sense strand
ucacggaggacgaggagga

SEQ ID NO: 2344419 - RNA, 19 nt, Homo sapiens
  misc_RNA (1)...(19): siRNA sense strand
cgacgaggaggaaggcgaa

SEQ ID NO: 2344420 - RNA, 19 nt, Homo sapiens
  misc_RNA (1)...(19): siRNA sense strand
gcaauggaaccuacggaca

SEQ ID NO: 2344421 - RNA, 19 nt, Homo sapiens
  misc_RNA (1)...(19): siRNA sense strand
cggagcgcgagcaggaaua

SEQ ID NO: 2344422 - RNA, 19 nt, Homo sapiens
  misc_RNA (1)...(19): siRNA sense strand
gagagguagaagagagaac

SEQ ID NO: 2344423 - RNA, 19 nt, Homo sapiens
  misc_RNA (1)...(19): siRNA sense strand
gcgaggagguggaaagcag

SEQ ID NO: 2344424 - RNA, 19 nt, Homo sapiens
  misc_RNA (1)...(19): siRNA sense strand
gugaggacgacgaggagga

SEQ ID NO: 2344425 - RNA, 19 nt, Homo sapiens
  misc_RNA (1)...(19): siRNA sense strand
ggaacagcuaugacaucua

SEQ ID NO: 2344426 - RNA, 19 nt, Homo sapiens
  misc_RNA (1)...(19): siRNA sense strand
ccuacggacagguguacaa

SEQ ID NO: 2344427 - RNA, 19 nt, Homo sapiens
  misc_RNA (1)...(19): siRNA sense strand
cggaaguacaagaagcgau

SEQ ID NO: 2344428 - RNA, 19 nt, Homo sapiens
  misc_RNA (1)...(19): siRNA sense strand
ggcucaaguuccuguguga

SEQ ID NO: 2344429 - RNA, 19 nt, Homo sapiens
  misc_RNA (1)...(19): siRNA sense strand
agagaacaaggaugaacaa

SEQ ID NO: 2344430 - RNA, 19 nt, Homo sapiens
  misc_RNA (1)...(19): siRNA sense strand
uggaaagcagugaggacga

SEQ ID NO: 2344431 - RNA, 19 nt, Homo sapiens
  misc_RNA (1)...(19): siRNA sense strand
ccugagauccggaaguaca

SEQ ID NO: 2344432 - RNA, 19 nt, Homo sapiens
  misc_RNA (1)...(19): siRNA sense strand
agagcaacucagaggcuuu

SEQ ID NO: 2344433 - RNA, 19 nt, Homo sapiens
  misc_RNA (1)...(19): siRNA sense strand
ucacgauguuuguggaucu

SEQ ID NO: 2344434 - RNA, 19 nt, Homo sapiens
  misc_RNA (1)...(19): siRNA sense strand
gugagaaagccauugagau

SEQ ID NO: 2344435 - RNA, 19 nt, Homo sapiens
  misc_RNA (1)...(19): siRNA sense strand
uggagaggaaggagagcca

SEQ ID NO: 2344436 - RNA, 19 nt, Homo sapiens
  misc_RNA (1)...(19): siRNA sense strand
ugcaguacgacgugaggaa

SEQ ID NO: 2344437 - RNA, 19 nt, Homo sapiens
  misc_RNA (1)...(19): siRNA sense strand
aggacgaggaggaagagau

SEQ ID NO: 2344438 - RNA, 19 nt, Homo sapiens
  misc_RNA (1)...(19): siRNA sense strand
gaagagaucaaacaggaga

SEQ ID NO: 2344439 - RNA, 19 nt, Homo sapiens
  misc_RNA (1)...(19): siRNA sense strand
gugcacauccagagccaga

SEQ ID NO: 2344440 - RNA, 19 nt, Homo sapiens
  misc_RNA (1)...(19): siRNA sense strand
aggaggaagaugacagcca

SEQ ID NO: 2344441 - RNA, 19 nt, Homo sapiens
  misc_RNA (1)...(19): siRNA sense strand
gguggaaagcagugaggac

SEQ ID NO: 2344442 - RNA, 19 nt, Homo sapiens
  misc_RNA (1)...(19): siRNA sense strand
aggaggaagagaucaaaca

SEQ ID NO: 2344443 - RNA, 19 nt, Homo sapiens
  misc_RNA (1)...(19): siRNA sense strand
guucuguggugcugguuca

SEQ ID NO: 2344444 - RNA, 19 nt, Homo sapiens
  misc_RNA (1)...(19): siRNA sense strand
gcagcagcagcuucagaaa

SEQ ID NO: 2344445 - RNA, 19 nt, Homo sapiens
  misc_RNA (1)...(19): siRNA sense strand
agaaacagcagcagcagca

SEQ ID NO: 2344446 - RNA, 19 nt, Homo sapiens
  misc_RNA (1)...(19): siRNA sense strand
gcagugaggacgacgagga

SEQ ID NO: 2344447 - RNA, 19 nt, Homo sapiens
  misc_RNA (1)...(19): siRNA sense strand
aggucaagcuaguggauuu

SEQ ID NO: 2344448 - RNA, 19 nt, Homo sapiens
  misc_RNA (1)...(19): siRNA sense strand
gagaaagaggagacagaau

SEQ ID NO: 2344449 - RNA, 19 nt, Homo sapiens
  misc_RNA (1)...(19): siRNA sense strand
cagagaaugcugaggucaa

SEQ ID NO: 2344450 - RNA, 19 nt, Homo sapiens
  misc_RNA (1)...(19): siRNA sense strand
gugagaaagaggagacaga

SEQ ID NO: 2344451 - RNA, 19 nt, Homo sapiens
  misc_RNA (1)...(19): siRNA sense strand
gccuauaucugcagggaga

SEQ ID NO: 2344452 - RNA, 19 nt, Homo sapiens
  misc_RNA (1)...(19): siRNA sense strand
cggaggacgaggaggaaga

SEQ ID NO: 2344453 - RNA, 19 nt, Homo sapiens
  misc_RNA (1)...(19): siRNA sense strand
ggaagcagcuggaggagca

SEQ ID NO: 2344454 - RNA, 19 nt, Homo sapiens
  misc_RNA (1)...(19): siRNA sense strand
acgaggaggaagagaucaa

SEQ ID NO: 2344455 - RNA, 19 nt, Homo sapiens
  misc_RNA (1)...(19): siRNA sense strand
gaagaagcggggugagaaa

SEQ ID NO: 2344456 - RNA, 19 nt, Homo sapiens
  misc_RNA (1)...(19): siRNA sense strand
gaauaugaguacagcggca

SEQ ID NO: 2344457 - RNA, 19 nt, Homo sapiens
  misc_RNA (1)...(19): siRNA sense strand
ggaauaaagccaagcccga

SEQ ID NO: 2344458 - RNA, 19 nt, Homo sapiens
  misc_RNA (1)...(19): siRNA sense strand
ccgagagguagaagagaga

SEQ ID NO: 2344459 - RNA, 19 nt, Homo sapiens
  misc_RNA (1)...(19): siRNA sense strand
gcuacgaggacgagggugu

SEQ ID NO: 2344460 - RNA, 19 nt, Homo sapiens
  misc_RNA (1)...(19): siRNA sense strand
gagguagaagagagaacaa

SEQ ID NO: 2344461 - RNA, 19 nt, Homo sapiens
  misc_RNA (1)...(19): siRNA sense strand
cgagaacagcaaaggccaa

SEQ ID NO: 2344462 - RNA, 19 nt, Homo sapiens
  misc_RNA (1)...(19): siRNA sense strand
ggaaggguucuguggucaa

SEQ ID NO: 2344463 - RNA, 19 nt, Homo sapiens
  misc_RNA (1)...(19): siRNA sense strand
agcggaagcugcaggagaa

SEQ ID NO: 2344464 - RNA, 19 nt, Homo sapiens
  misc_RNA (1)...(19): siRNA sense strand
caucaccaucucagggaaa

SEQ ID NO: 2344465 - RNA, 19 nt, Homo sapiens
  misc_RNA (1)...(19): siRNA sense strand
acaagagccugguggcaca

SEQ ID NO: 2344466 - RNA, 19 nt, Homo sapiens
  misc_RNA (1)...(19): siRNA sense strand
cagcaaaggccaaagccca

SEQ ID NO: 2344467 - RNA, 19 nt, Homo sapiens
  misc_RNA (1)...(19): siRNA sense strand
aggaagagaucaaacagga

SEQ ID NO: 2344468 - RNA, 19 nt, Homo sapiens
  misc_RNA (1)...(19): siRNA sense strand
agaaugugcugcugacaga

SEQ ID NO: 2344469 - RNA, 19 nt, Homo sapiens
  misc_RNA (1)...(19): siRNA sense strand
cagaaguggagaagaagca

SEQ ID NO: 2344470 - RNA, 19 nt, Homo sapiens
  misc_RNA (1)...(19): siRNA sense strand
cggauuaaguuccugguca

SEQ ID NO: 2344471 - RNA, 19 nt, Homo sapiens
  misc_RNA (1)...(19): siRNA sense strand
gcauccagcuuaaggacca

SEQ ID NO: 2344472 - RNA, 19 nt, Homo sapiens
  misc_RNA (1)...(19): siRNA sense strand
uuguggagguggucggcaa

SEQ ID NO: 2344473 - RNA, 19 nt, Homo sapiens
  misc_RNA (1)...(19): siRNA sense strand
ucacggaggacgaggagga

SEQ ID NO: 2344474 - RNA, 19 nt, Homo sapiens
  misc_RNA (1)...(19): siRNA sense strand
cgacgaggaggaaggcgaa

SEQ ID NO: 2344475 - RNA, 19 nt, Homo sapiens
  misc_RNA (1)...(19): siRNA sense strand
gcaauggaaccuacggaca

SEQ ID NO: 2344476 - RNA, 19 nt, Homo sapiens
  misc_RNA (1)...(19): siRNA sense strand
cggagcgcgagcaggaaua

SEQ ID NO: 2344477 - RNA, 19 nt, Homo sapiens
  misc_RNA (1)...(19): siRNA sense strand
gagagguagaagagagaac

SEQ ID NO: 2344478 - RNA, 19 nt, Homo sapiens
  misc_RNA (1)...(19): siRNA sense strand
gcgaggagguggaaagcag

SEQ ID NO: 2344479 - RNA, 19 nt, Homo sapiens
  misc_RNA (1)...(19): siRNA sense strand
gugaggacgacgaggagga

SEQ ID NO: 2344480 - RNA, 19 nt, Homo sapiens
  misc_RNA (1)...(19): siRNA sense strand
ggaacagcuaugacaucua

SEQ ID NO: 2344481 - RNA, 19 nt, Homo sapiens
  misc_RNA (1)...(19): siRNA sense strand
ccuacggacagguguacaa

SEQ ID NO: 2344482 - RNA, 19 nt, Homo sapiens
  misc_RNA (1)...(19): siRNA sense strand
cggaaguacaagaagcgau

SEQ ID NO: 2344483 - RNA, 19 nt, Homo sapiens
  misc_RNA (1)...(19): siRNA sense strand
ggcucaaguuccuguguga

SEQ ID NO: 2344484 - RNA, 19 nt, Homo sapiens
  misc_RNA (1)...(19): siRNA sense strand
agagaacaaggaugaacaa

SEQ ID NO: 2344485 - RNA, 19 nt, Homo sapiens
  misc_RNA (1)...(19): siRNA sense strand
uggaaagcagugaggacga

SEQ ID NO: 2344486 - RNA, 19 nt, Homo sapiens
  misc_RNA (1)...(19): siRNA sense strand
ccugagauccggaaguaca

SEQ ID NO: 2344487 - RNA, 19 nt, Homo sapiens
  misc_RNA (1)...(19): siRNA sense strand
agagcaacucagaggcuuu

SEQ ID NO: 2344488 - RNA, 19 nt, Homo sapiens
  misc_RNA (1)...(19): siRNA sense strand
ucacgauguuuguggaucu

SEQ ID NO: 2344489 - RNA, 19 nt, Homo sapiens
  misc_RNA (1)...(19): siRNA sense strand
gugagaaagccauugagau

SEQ ID NO: 2344490 - RNA, 19 nt, Homo sapiens
  misc_RNA (1)...(19): siRNA sense strand
uggagaggaaggagagcca

SEQ ID NO: 2344491 - RNA, 19 nt, Homo sapiens
  misc_RNA (1)...(19): siRNA sense strand
ugcaguacgacgugaggaa

SEQ ID NO: 2344492 - RNA, 19 nt, Homo sapiens
  misc_RNA (1)...(19): siRNA sense strand
aggacgaggaggaagagau

SEQ ID NO: 2344493 - RNA, 19 nt, Homo sapiens
  misc_RNA (1)...(19): siRNA sense strand
gaagagaucaaacaggaga

SEQ ID NO: 2344494 - RNA, 19 nt, Homo sapiens
  misc_RNA (1)...(19): siRNA sense strand
gugcacauccagagccaga

SEQ ID NO: 2344495 - RNA, 19 nt, Homo sapiens
  misc_RNA (1)...(19): siRNA sense strand
aggaggaagaugacagcca

SEQ ID NO: 2344496 - RNA, 19 nt, Homo sapiens
  misc_RNA (1)...(19): siRNA sense strand
gguggaaagcagugaggac

SEQ ID NO: 2344497 - RNA, 19 nt, Homo sapiens
  misc_RNA (1)...(19): siRNA sense strand
aggaggaagagaucaaaca

SEQ ID NO: 2344498 - RNA, 19 nt, Homo sapiens
  misc_RNA (1)...(19): siRNA sense strand
guucuguggugcugguuca

SEQ ID NO: 2344499 - RNA, 19 nt, Homo sapiens
  misc_RNA (1)...(19): siRNA sense strand
gcagcagcagcuucagaaa

SEQ ID NO: 2344500 - RNA, 19 nt, Homo sapiens
  misc_RNA (1)...(19): siRNA sense strand
agaaacagcagcagcagca

SEQ ID NO: 2344501 - RNA, 19 nt, Homo sapiens
  misc_RNA (1)...(19): siRNA sense strand
gcagugaggacgacgagga

SEQ ID NO: 2344502 - RNA, 19 nt, Homo sapiens
  misc_RNA (1)...(19): siRNA sense strand
gcucaauaaugaaauggau

SEQ ID NO: 2344503 - RNA, 19 nt, Homo sapiens
  misc_RNA (1)...(19): siRNA sense strand
cgacgaucauggugggcca

SEQ ID NO: 2344504 - RNA, 19 nt, Homo sapiens
  misc_RNA (1)...(19): siRNA sense strand
cagcaucaccaacgaguuu

SEQ ID NO: 2344505 - RNA, 19 nt, Homo sapiens
  misc_RNA (1)...(19): siRNA sense strand
agagaaacauugaccagga

SEQ ID NO: 2344506 - RNA, 19 nt, Homo sapiens
  misc_RNA (1)...(19): siRNA sense strand
auggaugacuucagcucua

SEQ ID NO: 2344507 - RNA, 19 nt, Homo sapiens
  misc_RNA (1)...(19): siRNA sense strand
ugaagugggccguggagga

SEQ ID NO: 2344508 - RNA, 19 nt, Homo sapiens
  misc_RNA (1)...(19): siRNA sense strand
acaaccagcuucugcccaa

SEQ ID NO: 2344509 - RNA, 19 nt, Homo sapiens
  misc_RNA (1)...(19): siRNA sense strand
acgacaguggagagaaaca

SEQ ID NO: 2344510 - RNA, 19 nt, Homo sapiens
  misc_RNA (1)...(19): siRNA sense strand
gcucaauaaugaaauggau

SEQ ID NO: 2344511 - RNA, 19 nt, Homo sapiens
  misc_RNA (1)...(19): siRNA sense strand
cgacgaucauggugggcca

SEQ ID NO: 2344512 - RNA, 19 nt, Homo sapiens
  misc_RNA (1)...(19): siRNA sense strand
cagcaucaccaacgaguuu

SEQ ID NO: 2344513 - RNA, 19 nt, Homo sapiens
  misc_RNA (1)...(19): siRNA sense strand
agagaaacauugaccagga

SEQ ID NO: 2344514 - RNA, 19 nt, Homo sapiens
  misc_RNA (1)...(19): siRNA sense strand
auggaugacuucagcucua

SEQ ID NO: 2344515 - RNA, 19 nt, Homo sapiens
  misc_RNA (1)...(19): siRNA sense strand
ugaagugggccguggagga

SEQ ID NO: 2344516 - RNA, 19 nt, Homo sapiens
  misc_RNA (1)...(19): siRNA sense strand
acaaccagcuucugcccaa

SEQ ID NO: 2344517 - RNA, 19 nt, Homo sapiens
  misc_RNA (1)...(19): siRNA sense strand
acgacaguggagagaaaca

SEQ ID NO: 2344518 - RNA, 19 nt, Homo sapiens
  misc_RNA (1)...(19): siRNA sense strand
gcucaauaaugaaauggau

SEQ ID NO: 2344519 - RNA, 19 nt, Homo sapiens
  misc_RNA (1)...(19): siRNA sense strand
cgacgaucauggugggcca

SEQ ID NO: 2344520 - RNA, 19 nt, Homo sapiens
  misc_RNA (1)...(19): siRNA sense strand
cagcaucaccaacgaguuu

SEQ ID NO: 2344521 - RNA, 19 nt, Homo sapiens
  misc_RNA (1)...(19): siRNA sense strand
agagaaacauugaccagga

SEQ ID NO: 2344522 - RNA, 19 nt, Homo sapiens
  misc_RNA (1)...(19): siRNA sense strand
auggaugacuucagcucua

SEQ ID NO: 2344523 - RNA, 19 nt, Homo sapiens
  misc_RNA (1)...(19): siRNA sense strand
ugaagugggccguggagga

SEQ ID NO: 2344524 - RNA, 19 nt, Homo sapiens
  misc_RNA (1)...(19): siRNA sense strand
acaaccagcuucugcccaa

SEQ ID NO: 2344525 - RNA, 19 nt, Homo sapiens
  misc_RNA (1)...(19): siRNA sense strand
acgacaguggagagaaaca

SEQ ID NO: 2344526 - RNA, 19 nt, Homo sapiens
  misc_RNA (1)...(19): siRNA sense strand
gcaccauaucagauguaaa

SEQ ID NO: 2344527 - RNA, 19 nt, Homo sapiens
  misc_RNA (1)...(19): siRNA sense strand
cccaaaucccagaguuaaa

SEQ ID NO: 2344528 - RNA, 19 nt, Homo sapiens
  misc_RNA (1)...(19): siRNA sense strand
guucagauccagaugguga

SEQ ID NO: 2344529 - RNA, 19 nt, Homo sapiens
  misc_RNA (1)...(19): siRNA sense strand
auuccaaagaccugguaua

SEQ ID NO: 2344530 - RNA, 19 nt, Homo sapiens
  misc_RNA (1)...(19): siRNA sense strand
gcugaaaggucguguggac

SEQ ID NO: 2344531 - RNA, 19 nt, Homo sapiens
  misc_RNA (1)...(19): siRNA sense strand
ugcccaaaucccagaguua

SEQ ID NO: 2344532 - RNA, 19 nt, Homo sapiens
  misc_RNA (1)...(19): siRNA sense strand
cuuaacaagaaguugggaa

SEQ ID NO: 2344533 - RNA, 19 nt, Homo sapiens
  misc_RNA (1)...(19): siRNA sense strand
agggcagcuuggagaauau

SEQ ID NO: 2344534 - RNA, 19 nt, Homo sapiens
  misc_RNA (1)...(19): siRNA sense strand
ccaguguggagaaggccaa

SEQ ID NO: 2344535 - RNA, 19 nt, Homo sapiens
  misc_RNA (1)...(19): siRNA sense strand
uggagaaggccaacgcaca

SEQ ID NO: 2344536 - RNA, 19 nt, Homo sapiens
  misc_RNA (1)...(19): siRNA sense strand
cggugaccucagagaguga

SEQ ID NO: 2344537 - RNA, 19 nt, Homo sapiens
  misc_RNA (1)...(19): siRNA sense strand
gagaaagggaagucgggaa

SEQ ID NO: 2344538 - RNA, 19 nt, Homo sapiens
  misc_RNA (1)...(19): siRNA sense strand
gggaaaagggaggaagaaa

SEQ ID NO: 2344539 - RNA, 19 nt, Homo sapiens
  misc_RNA (1)...(19): siRNA sense strand
agaaaggcgagaagggaga

SEQ ID NO: 2344540 - RNA, 19 nt, Homo sapiens
  misc_RNA (1)...(19): siRNA sense strand
ccauaggagagaaagggaa

SEQ ID NO: 2344541 - RNA, 19 nt, Homo sapiens
  misc_RNA (1)...(19): siRNA sense strand
gggaggaugaagaaggaga

SEQ ID NO: 2344542 - RNA, 19 nt, Homo sapiens
  misc_RNA (1)...(19): siRNA sense strand
uccuggugcuggagagaaa

SEQ ID NO: 2344543 - RNA, 19 nt, Homo sapiens
  misc_RNA (1)...(19): siRNA sense strand
gcagaaaggagaugacgga

SEQ ID NO: 2344544 - RNA, 19 nt, Homo sapiens
  misc_RNA (1)...(19): siRNA sense strand
gggacccauaggagagaaa

SEQ ID NO: 2344545 - RNA, 19 nt, Homo sapiens
  misc_RNA (1)...(19): siRNA sense strand
guaaaggcgauaaaggaga

SEQ ID NO: 2344546 - RNA, 19 nt, Homo sapiens
  misc_RNA (1)...(19): siRNA sense strand
aggcagagaaggggagaaa

SEQ ID NO: 2344547 - RNA, 19 nt, Homo sapiens
  misc_RNA (1)...(19): siRNA sense strand
agaaaggagaugacggagu

SEQ ID NO: 2344548 - RNA, 19 nt, Homo sapiens
  misc_RNA (1)...(19): siRNA sense strand
cgggacucguucaggguuu

SEQ ID NO: 2344549 - RNA, 19 nt, Homo sapiens
  misc_RNA (1)...(19): siRNA sense strand
aggagaggagggagcagaa

SEQ ID NO: 2344550 - RNA, 19 nt, Homo sapiens
  misc_RNA (1)...(19): siRNA sense strand
acacuggaccuaaggguga

SEQ ID NO: 2344551 - RNA, 19 nt, Homo sapiens
  misc_RNA (1)...(19): siRNA sense strand
uggagagaaaggagcaaaa

SEQ ID NO: 2344552 - RNA, 19 nt, Homo sapiens
  misc_RNA (1)...(19): siRNA sense strand
cuacuggcuuaaaggguga

SEQ ID NO: 2344553 - RNA, 19 nt, Homo sapiens
  misc_RNA (1)...(19): siRNA sense strand
ggcggaaggggaagggaaa

SEQ ID NO: 2344554 - RNA, 19 nt, Homo sapiens
  misc_RNA (1)...(19): siRNA sense strand
ccagaggacuccagagggu

SEQ ID NO: 2344555 - RNA, 19 nt, Homo sapiens
  misc_RNA (1)...(19): siRNA sense strand
ggaaaagggaggaagaaag

SEQ ID NO: 2344556 - RNA, 19 nt, Homo sapiens
  misc_RNA (1)...(19): siRNA sense strand
cagccagggaggaugaaga

SEQ ID NO: 2344557 - RNA, 19 nt, Homo sapiens
  misc_RNA (1)...(19): siRNA sense strand
gaaagaagggccagcugga

SEQ ID NO: 2344558 - RNA, 19 nt, Homo sapiens
  misc_RNA (1)...(19): siRNA sense strand
ggggaguaaaggcgauaaa

SEQ ID NO: 2344559 - RNA, 19 nt, Homo sapiens
  misc_RNA (1)...(19): siRNA sense strand
gggucgagaaggcagagaa

SEQ ID NO: 2344560 - RNA, 19 nt, Homo sapiens
  misc_RNA (1)...(19): siRNA sense strand
ccacaugggucgagaaggc

SEQ ID NO: 2344561 - RNA, 19 nt, Homo sapiens
  misc_RNA (1)...(19): siRNA sense strand
gcaccugccugauggggaa

SEQ ID NO: 2344562 - RNA, 19 nt, Homo sapiens
  misc_RNA (1)...(19): siRNA sense strand
aggagagcccgcagugauu

SEQ ID NO: 2344563 - RNA, 19 nt, Homo sapiens
  misc_RNA (1)...(19): siRNA sense strand
cuccgggacagcagggaaa

SEQ ID NO: 2344564 - RNA, 19 nt, Homo sapiens
  misc_RNA (1)...(19): siRNA sense strand
gcugauaagcccagauccu

SEQ ID NO: 2344565 - RNA, 19 nt, Homo sapiens
  misc_RNA (1)...(19): siRNA sense strand
agagaggagaacugggcuu

SEQ ID NO: 2344566 - RNA, 19 nt, Homo sapiens
  misc_RNA (1)...(19): siRNA sense strand
gcagagaaccagaccucca

SEQ ID NO: 2344567 - RNA, 19 nt, Homo sapiens
  misc_RNA (1)...(19): siRNA sense strand
agaaaggagcaaaaggaga

SEQ ID NO: 2344568 - RNA, 19 nt, Homo sapiens
  misc_RNA (1)...(19): siRNA sense strand
uggaggaguuggucagcca

SEQ ID NO: 2344569 - RNA, 19 nt, Homo sapiens
  misc_RNA (1)...(19): siRNA sense strand
cgggagaagcuggugagaa

SEQ ID NO: 2344570 - RNA, 19 nt, Homo sapiens
  misc_RNA (1)...(19): siRNA sense strand
uggaccuccuggugaacaa

SEQ ID NO: 2344571 - RNA, 19 nt, Homo sapiens
  misc_RNA (1)...(19): siRNA sense strand
uggacgaagccacggguga

SEQ ID NO: 2344572 - RNA, 19 nt, Homo sapiens
  misc_RNA (1)...(19): siRNA sense strand
ccugggaucccuggagaaa

SEQ ID NO: 2344573 - RNA, 19 nt, Homo sapiens
  misc_RNA (1)...(19): siRNA sense strand
ccgacaagaaguuugagau

SEQ ID NO: 2344574 - RNA, 19 nt, Homo sapiens
  misc_RNA (1)...(19): siRNA sense strand
uuguggagacugugagcaa

SEQ ID NO: 2344575 - RNA, 19 nt, Homo sapiens
  misc_RNA (1)...(19): siRNA sense strand
gcgccaaguugcugcugga

SEQ ID NO: 2344576 - RNA, 19 nt, Homo sapiens
  misc_RNA (1)...(19): siRNA sense strand
ccaacaugauuguggagac

SEQ ID NO: 2344577 - RNA, 19 nt, Homo sapiens
  misc_RNA (1)...(19): siRNA sense strand
ggguguagcaaaagugaaa

SEQ ID NO: 2344578 - RNA, 19 nt, Homo sapiens
  misc_RNA (1)...(19): siRNA sense strand
gaucagacauccuggccca

SEQ ID NO: 2344579 - RNA, 19 nt, Homo sapiens
  misc_RNA (1)...(19): siRNA sense strand
augcagaugcugaugaaga

SEQ ID NO: 2344580 - RNA, 19 nt, Homo sapiens
  misc_RNA (1)...(19): siRNA sense strand
cgguggagacgaucagaca

SEQ ID NO: 2344581 - RNA, 19 nt, Homo sapiens
  misc_RNA (1)...(19): siRNA sense strand
cagccaaggaggagcgcaa

SEQ ID NO: 2344582 - RNA, 19 nt, Homo sapiens
  misc_RNA (1)...(19): siRNA sense strand
ucaucaagacacagacaga

SEQ ID NO: 2344583 - RNA, 19 nt, Homo sapiens
  misc_RNA (1)...(19): siRNA sense strand
cugcagccacccagaggaa

SEQ ID NO: 2344584 - RNA, 19 nt, Homo sapiens
  misc_RNA (1)...(19): siRNA sense strand
aggaagaagaggaggaaga

SEQ ID NO: 2344585 - RNA, 19 nt, Homo sapiens
  misc_RNA (1)...(19): siRNA sense strand
aggaagaggaagaggagga

SEQ ID NO: 2344586 - RNA, 19 nt, Homo sapiens
  misc_RNA (1)...(19): siRNA sense strand
ccacagaaauaaugccaca

SEQ ID NO: 2344587 - RNA, 19 nt, Homo sapiens
  misc_RNA (1)...(19): siRNA sense strand
aagaggaagaggaggaaga

SEQ ID NO: 2344588 - RNA, 19 nt, Homo sapiens
  misc_RNA (1)...(19): siRNA sense strand
cacagaaagucgaggcaca

SEQ ID NO: 2344589 - RNA, 19 nt, Homo sapiens
  misc_RNA (1)...(19): siRNA sense strand
uugaugagaaugagaacaa

SEQ ID NO: 2344590 - RNA, 19 nt, Homo sapiens
  misc_RNA (1)...(19): siRNA sense strand
guaauguguuccaggccaa

SEQ ID NO: 2344591 - RNA, 19 nt, Homo sapiens
  misc_RNA (1)...(19): siRNA sense strand
auuuaugaccagaggaaaa

SEQ ID NO: 2344592 - RNA, 19 nt, Homo sapiens
  misc_RNA (1)...(19): siRNA sense strand
acaagggaggcgugguaaa

SEQ ID NO: 2344593 - RNA, 19 nt, Homo sapiens
  misc_RNA (1)...(19): siRNA sense strand
ugacaaaagagaaagagaa

SEQ ID NO: 2344594 - RNA, 19 nt, Homo sapiens
  misc_RNA (1)...(19): siRNA sense strand
gagaaaucauccugccaga

SEQ ID NO: 2344595 - RNA, 19 nt, Homo sapiens
  misc_RNA (1)...(19): siRNA sense strand
gcacagacacagagagcuc

SEQ ID NO: 2344596 - RNA, 19 nt, Homo sapiens
  misc_RNA (1)...(19): siRNA sense strand
guacagcgcaagcgggcua

SEQ ID NO: 2344597 - RNA, 19 nt, Homo sapiens
  misc_RNA (1)...(19): siRNA sense strand
aagagaaagagaagaaagu

SEQ ID NO: 2344598 - RNA, 19 nt, Homo sapiens
  misc_RNA (1)...(19): siRNA sense strand
aggaggaagaagaggagga

SEQ ID NO: 2344599 - RNA, 19 nt, Homo sapiens
  misc_RNA (1)...(19): siRNA sense strand
gguggugacaaaagagaaa

SEQ ID NO: 2344600 - RNA, 19 nt, Homo sapiens
  misc_RNA (1)...(19): siRNA sense strand
gcugaagaggggagggaga

SEQ ID NO: 2344601 - RNA, 19 nt, Homo sapiens
  misc_RNA (1)...(19): siRNA sense strand
agaacaagcgggagcggga

SEQ ID NO: 2344602 - RNA, 19 nt, Homo sapiens
  misc_RNA (1)...(19): siRNA sense strand
cagcaaagggagcagcaca

SEQ ID NO: 2344603 - RNA, 19 nt, Homo sapiens
  misc_RNA (1)...(19): siRNA sense strand
gcauugaaguggaggccuc

SEQ ID NO: 2344604 - RNA, 19 nt, Homo sapiens
  misc_RNA (1)...(19): siRNA sense strand
caguaaaaggcgucaauuu

SEQ ID NO: 2344605 - RNA, 19 nt, Homo sapiens
  misc_RNA (1)...(19): siRNA sense strand
cgucgaaacugguggugac

SEQ ID NO: 2344606 - RNA, 19 nt, Homo sapiens
  misc_RNA (1)...(19): siRNA sense strand
agaucaguuuguaaggauu

SEQ ID NO: 2344607 - RNA, 19 nt, Homo sapiens
  misc_RNA (1)...(19): siRNA sense strand
agaggaaaauugaugagaa

SEQ ID NO: 2344608 - RNA, 19 nt, Homo sapiens
  misc_RNA (1)...(19): siRNA sense strand
acacaucggacgaggagga

SEQ ID NO: 2344609 - RNA, 19 nt, Homo sapiens
  misc_RNA (1)...(19): siRNA sense strand
ccgcucagaggaagaggaa

SEQ ID NO: 2344610 - RNA, 19 nt, Homo sapiens
  misc_RNA (1)...(19): siRNA sense strand
guuacaaugaugaagacau

SEQ ID NO: 2344611 - RNA, 19 nt, Homo sapiens
  misc_RNA (1)...(19): siRNA sense strand
ccaugaccgcucagaggaa

SEQ ID NO: 2344612 - RNA, 19 nt, Homo sapiens
  misc_RNA (1)...(19): siRNA sense strand
cagaggaagaggaagagga

SEQ ID NO: 2344613 - RNA, 19 nt, Homo sapiens
  misc_RNA (1)...(19): siRNA sense strand
gagucuuugugcagcguuu

SEQ ID NO: 2344614 - RNA, 19 nt, Homo sapiens
  misc_RNA (1)...(19): siRNA sense strand
ccacugagcugacaggguu

SEQ ID NO: 2344615 - RNA, 19 nt, Homo sapiens
  misc_RNA (1)...(19): siRNA sense strand
auggaguacucaagaaguu

SEQ ID NO: 2344616 - RNA, 19 nt, Homo sapiens
  misc_RNA (1)...(19): siRNA sense strand
augcaucaccugagacaga

SEQ ID NO: 2344617 - RNA, 19 nt, Homo sapiens
  misc_RNA (1)...(19): siRNA sense strand
acacagagagcucagguga

SEQ ID NO: 2344618 - RNA, 19 nt, Homo sapiens
  misc_RNA (1)...(19): siRNA sense strand
gagcagcacagauggcaga

SEQ ID NO: 2344619 - RNA, 19 nt, Homo sapiens
  misc_RNA (1)...(19): siRNA sense strand
gcagguucgaguagcagaa

SEQ ID NO: 2344620 - RNA, 19 nt, Homo sapiens
  misc_RNA (1)...(19): siRNA sense strand
aggugaagaugcaguuguu

SEQ ID NO: 2344621 - RNA, 19 nt, Homo sapiens
  misc_RNA (1)...(19): siRNA sense strand
guauacgaucuaugugaau

SEQ ID NO: 2344622 - RNA, 19 nt, Homo sapiens
  misc_RNA (1)...(19): siRNA sense strand
ggguggacgagaucaguuu

SEQ ID NO: 2344623 - RNA, 19 nt, Homo sapiens
  misc_RNA (1)...(19): siRNA sense strand
gaguuuguggugagcggua

SEQ ID NO: 2344624 - RNA, 19 nt, Homo sapiens
  misc_RNA (1)...(19): siRNA sense strand
ccucagacacaucggacga

SEQ ID NO: 2344625 - RNA, 19 nt, Homo sapiens
  misc_RNA (1)...(19): siRNA sense strand
ugaagguggugguguggga

SEQ ID NO: 2344626 - RNA, 19 nt, Homo sapiens
  misc_RNA (1)...(19): siRNA sense strand
gccuagaccaugaugugaa

SEQ ID NO: 2344627 - RNA, 19 nt, Homo sapiens
  misc_RNA (1)...(19): siRNA sense strand
agacuuagcuaauggaagc

SEQ ID NO: 2344628 - RNA, 19 nt, Homo sapiens
  misc_RNA (1)...(19): siRNA sense strand
acuacaaaccacagaggaa

SEQ ID NO: 2344629 - RNA, 19 nt, Homo sapiens
  misc_RNA (1)...(19): siRNA sense strand
ccuuagaagagaaugaaau

SEQ ID NO: 2344630 - RNA, 19 nt, Homo sapiens
  misc_RNA (1)...(19): siRNA sense strand
gcucaugaacacuggaaaa

SEQ ID NO: 2344631 - RNA, 19 nt, Homo sapiens
  misc_RNA (1)...(19): siRNA sense strand
augcagagagacagggcaa

SEQ ID NO: 2344632 - RNA, 19 nt, Homo sapiens
  misc_RNA (1)...(19): siRNA sense strand
gagccuuagaagagaauga

SEQ ID NO: 2344633 - RNA, 19 nt, Homo sapiens
  misc_RNA (1)...(19): siRNA sense strand
acggaggauuacagaauau

SEQ ID NO: 2344634 - RNA, 19 nt, Homo sapiens
  misc_RNA (1)...(19): siRNA sense strand
aagcaaaggaauuacaaca

SEQ ID NO: 2344635 - RNA, 19 nt, Homo sapiens
  misc_RNA (1)...(19): siRNA sense strand
gaacucggauugagggcuu

SEQ ID NO: 2344636 - RNA, 19 nt, Homo sapiens
  misc_RNA (1)...(19): siRNA sense strand
cgucguaaagcaaaggaau

SEQ ID NO: 2344637 - RNA, 19 nt, Homo sapiens
  misc_RNA (1)...(19): siRNA sense strand
gcacugggauaccgggaga

SEQ ID NO: 2344638 - RNA, 19 nt, Homo sapiens
  misc_RNA (1)...(19): siRNA sense strand
cuaccagccuauggagaaa

SEQ ID NO: 2344639 - RNA, 19 nt, Homo sapiens
  misc_RNA (1)...(19): siRNA sense strand
cucaagaacgugaagcuaa

SEQ ID NO: 2344640 - RNA, 19 nt, Homo sapiens
  misc_RNA (1)...(19): siRNA sense strand
gagccaaaggaaaggaagu

SEQ ID NO: 2344641 - RNA, 19 nt, Homo sapiens
  misc_RNA (1)...(19): siRNA sense strand
ccugaagaauccagagaag

SEQ ID NO: 2344642 - RNA, 19 nt, Homo sapiens
  misc_RNA (1)...(19): siRNA sense strand
gcuaaaguggagacuacaa

SEQ ID NO: 2344643 - RNA, 19 nt, Homo sapiens
  misc_RNA (1)...(19): siRNA sense strand
acaugacagucgacgaaau

SEQ ID NO: 2344644 - RNA, 19 nt, Homo sapiens
  misc_RNA (1)...(19): siRNA sense strand
aaauugucgcacugggaua

SEQ ID NO: 2344645 - RNA, 19 nt, Homo sapiens
  misc_RNA (1)...(19): siRNA sense strand
gucguaaagcaaaggaauu

SEQ ID NO: 2344646 - RNA, 19 nt, Homo sapiens
  misc_RNA (1)...(19): siRNA sense strand
guagauaacuuuguggaca

SEQ ID NO: 2344647 - RNA, 19 nt, Homo sapiens
  misc_RNA (1)...(19): siRNA sense strand
cucgacaguuuguggaaau

SEQ ID NO: 2344648 - RNA, 19 nt, Homo sapiens
  misc_RNA (1)...(19): siRNA sense strand
aggaaaggaaguagauaac

SEQ ID NO: 2344649 - RNA, 19 nt, Homo sapiens
  misc_RNA (1)...(19): siRNA sense strand
gcagagagacagggcaaaa

SEQ ID NO: 2344650 - RNA, 19 nt, Homo sapiens
  misc_RNA (1)...(19): siRNA sense strand
agaauaugagcuacaagaa

SEQ ID NO: 2344651 - RNA, 19 nt, Homo sapiens
  misc_RNA (1)...(19): siRNA sense strand
cagcaacauuuuagaagau

SEQ ID NO: 2344652 - RNA, 19 nt, Homo sapiens
  misc_RNA (1)...(19): siRNA sense strand
cuacaaaccacagaggaau

SEQ ID NO: 2344653 - RNA, 19 nt, Homo sapiens
  misc_RNA (1)...(19): siRNA sense strand
aagagugaucccugaauau

SEQ ID NO: 2344654 - RNA, 19 nt, Homo sapiens
  misc_RNA (1)...(19): siRNA sense strand
acaacaggcccgaagagau

SEQ ID NO: 2344655 - RNA, 19 nt, Homo sapiens
  misc_RNA (1)...(19): siRNA sense strand
agaaaggggugcagcuaca

SEQ ID NO: 2344656 - RNA, 19 nt, Homo sapiens
  misc_RNA (1)...(19): siRNA sense strand
ugggauaccgggagaaugu

SEQ ID NO: 2344657 - RNA, 19 nt, Homo sapiens
  misc_RNA (1)...(19): siRNA sense strand
cuauggagaaacuguauau

SEQ ID NO: 2344658 - RNA, 19 nt, Homo sapiens
  misc_RNA (1)...(19): siRNA sense strand
gccugugauugaugccaaa

SEQ ID NO: 2344659 - RNA, 19 nt, Homo sapiens
  misc_RNA (1)...(19): siRNA sense strand
gcuacagacccauccaaau

SEQ ID NO: 2344660 - RNA, 19 nt, Homo sapiens
  misc_RNA (1)...(19): siRNA sense strand
ccauggaguuacagggcuu

SEQ ID NO: 2344661 - RNA, 19 nt, Homo sapiens
  misc_RNA (1)...(19): siRNA sense strand
agaaggaaaugaaggcaca

SEQ ID NO: 2344662 - RNA, 19 nt, Homo sapiens
  misc_RNA (1)...(19): siRNA sense strand
ccauugagaaggaggucuu

SEQ ID NO: 2344663 - RNA, 19 nt, Homo sapiens
  misc_RNA (1)...(19): siRNA sense strand
aaaugaaggcacaggagca

SEQ ID NO: 2344664 - RNA, 19 nt, Homo sapiens
  misc_RNA (1)...(19): siRNA sense strand
ugaccaagguggaggaacc

SEQ ID NO: 2344665 - RNA, 19 nt, Homo sapiens
  misc_RNA (1)...(19): siRNA sense strand
uaguuaaugaugagcucua

SEQ ID NO: 2344666 - RNA, 19 nt, Homo sapiens
  misc_RNA (1)...(19): siRNA sense strand
ccauggaguuacagggcuu

SEQ ID NO: 2344667 - RNA, 19 nt, Homo sapiens
  misc_RNA (1)...(19): siRNA sense strand
agaaggaaaugaaggcaca

SEQ ID NO: 2344668 - RNA, 19 nt, Homo sapiens
  misc_RNA (1)...(19): siRNA sense strand
ccauugagaaggaggucuu

SEQ ID NO: 2344669 - RNA, 19 nt, Homo sapiens
  misc_RNA (1)...(19): siRNA sense strand
aaaugaaggcacaggagca

SEQ ID NO: 2344670 - RNA, 19 nt, Homo sapiens
  misc_RNA (1)...(19): siRNA sense strand
ugaccaagguggaggaacc

SEQ ID NO: 2344671 - RNA, 19 nt, Homo sapiens
  misc_RNA (1)...(19): siRNA sense strand
uaguuaaugaugagcucua

SEQ ID NO: 2344672 - RNA, 19 nt, Homo sapiens
  misc_RNA (1)...(19): siRNA sense strand
cauacaccguagugggaau

SEQ ID NO: 2344673 - RNA, 19 nt, Homo sapiens
  misc_RNA (1)...(19): siRNA sense strand
ccagcagagucgugugcau

SEQ ID NO: 2344674 - RNA, 19 nt, Homo sapiens
  misc_RNA (1)...(19): siRNA sense strand
ugaccucuguggugggcaa

SEQ ID NO: 2344675 - RNA, 19 nt, Homo sapiens
  misc_RNA (1)...(19): siRNA sense strand
augagaaaguguaccacau

SEQ ID NO: 2344676 - RNA, 19 nt, Homo sapiens
  misc_RNA (1)...(19): siRNA sense strand
cgaacuauuuucuggugaa

SEQ ID NO: 2344677 - RNA, 19 nt, Homo sapiens
  misc_RNA (1)...(19): siRNA sense strand
cauacaccguagugggaau

SEQ ID NO: 2344678 - RNA, 19 nt, Homo sapiens
  misc_RNA (1)...(19): siRNA sense strand
ccagcagagucgugugcau

SEQ ID NO: 2344679 - RNA, 19 nt, Homo sapiens
  misc_RNA (1)...(19): siRNA sense strand
ugaccucuguggugggcaa

SEQ ID NO: 2344680 - RNA, 19 nt, Homo sapiens
  misc_RNA (1)...(19): siRNA sense strand
augagaaaguguaccacau

SEQ ID NO: 2344681 - RNA, 19 nt, Homo sapiens
  misc_RNA (1)...(19): siRNA sense strand
cgaacuauuuucuggugaa

SEQ ID NO: 2344682 - RNA, 19 nt, Homo sapiens
  misc_RNA (1)...(19): siRNA sense strand
acucacacguggagggcaa

SEQ ID NO: 2344683 - RNA, 19 nt, Homo sapiens
  misc_RNA (1)...(19): siRNA sense strand
gcgccaacaccaugggcua

SEQ ID NO: 2344684 - RNA, 19 nt, Homo sapiens
  misc_RNA (1)...(19): siRNA sense strand
ccccaaagauggcggacaa

SEQ ID NO: 2344685 - RNA, 19 nt, Homo sapiens
  misc_RNA (1)...(19): siRNA sense strand
aggaagaagaaguggacac

SEQ ID NO: 2344686 - RNA, 19 nt, Homo sapiens
  misc_RNA (1)...(19): siRNA sense strand
ugacauuagcccagggaag

SEQ ID NO: 2344687 - RNA, 19 nt, Homo sapiens
  misc_RNA (1)...(19): siRNA sense strand
ugaagcagguggagcggga

SEQ ID NO: 2344688 - RNA, 19 nt, Homo sapiens
  misc_RNA (1)...(19): siRNA sense strand
acgugaagccggugaucca

SEQ ID NO: 2344689 - RNA, 19 nt, Homo sapiens
  misc_RNA (1)...(19): siRNA sense strand
ccgcugaccauguggacca

SEQ ID NO: 2344690 - RNA, 19 nt, Homo sapiens
  misc_RNA (1)...(19): siRNA sense strand
ucacguggaugaaggacga

SEQ ID NO: 2344691 - RNA, 19 nt, Homo sapiens
  misc_RNA (1)...(19): siRNA sense strand
agacagagggagacggaga

SEQ ID NO: 2344692 - RNA, 19 nt, Homo sapiens
  misc_RNA (1)...(19): siRNA sense strand
ccauagagcagcagaggca

SEQ ID NO: 2344693 - RNA, 19 nt, Homo sapiens
  misc_RNA (1)...(19): siRNA sense strand
gcacauacacccugcguca

SEQ ID NO: 2344694 - RNA, 19 nt, Homo sapiens
  misc_RNA (1)...(19): siRNA sense strand
uguuacaguugcagggaga

SEQ ID NO: 2344695 - RNA, 19 nt, Homo sapiens
  misc_RNA (1)...(19): siRNA sense strand
agggagaguagcugaagaa

SEQ ID NO: 2344696 - RNA, 19 nt, Homo sapiens
  misc_RNA (1)...(19): siRNA sense strand
cuaaauggugucaggaaca

SEQ ID NO: 2344697 - RNA, 19 nt, Homo sapiens
  misc_RNA (1)...(19): siRNA sense strand
cagaggaagccuuugacaa

SEQ ID NO: 2344698 - RNA, 19 nt, Homo sapiens
  misc_RNA (1)...(19): siRNA sense strand
gcugaaaacucugggacaa

SEQ ID NO: 2344699 - RNA, 19 nt, Homo sapiens
  misc_RNA (1)...(19): siRNA sense strand
guaaauuugcuguggagga

SEQ ID NO: 2344700 - RNA, 19 nt, Homo sapiens
  misc_RNA (1)...(19): siRNA sense strand
ggucguagucgcucgggaa

SEQ ID NO: 2344701 - RNA, 19 nt, Homo sapiens
  misc_RNA (1)...(19): siRNA sense strand
gcucaauauauaugaagca

SEQ ID NO: 2344702 - RNA, 19 nt, Homo sapiens
  misc_RNA (1)...(19): siRNA sense strand
ugaaacaggaugugggaag

SEQ ID NO: 2344703 - RNA, 19 nt, Homo sapiens
  misc_RNA (1)...(19): siRNA sense strand
cgucaguccucuaugcaga

SEQ ID NO: 2344704 - RNA, 19 nt, Homo sapiens
  misc_RNA (1)...(19): siRNA sense strand
aaaugaaaccagugaucca

SEQ ID NO: 2344705 - RNA, 19 nt, Homo sapiens
  misc_RNA (1)...(19): siRNA sense strand
ugggaagagcacacagauu

SEQ ID NO: 2344706 - RNA, 19 nt, Homo sapiens
  misc_RNA (1)...(19): siRNA sense strand
aaggaagagugguaggagu

SEQ ID NO: 2344707 - RNA, 19 nt, Homo sapiens
  misc_RNA (1)...(19): siRNA sense strand
cugucgaaacuguggugaa

SEQ ID NO: 2344708 - RNA, 19 nt, Homo sapiens
  misc_RNA (1)...(19): siRNA sense strand
agcugaaggaagaguggua

SEQ ID NO: 2344709 - RNA, 19 nt, Homo sapiens
  misc_RNA (1)...(19): siRNA sense strand
ggagaguagcugaagaaag

SEQ ID NO: 2344710 - RNA, 19 nt, Homo sapiens
  misc_RNA (1)...(19): siRNA sense strand
ucgaaacuguggugaaaau

SEQ ID NO: 2344711 - RNA, 19 nt, Homo sapiens
  misc_RNA (1)...(19): siRNA sense strand
ccaggaagagguagaaacu

SEQ ID NO: 2344712 - RNA, 19 nt, Homo sapiens
  misc_RNA (1)...(19): siRNA sense strand
gauuguagcuucagccacu

SEQ ID NO: 2344713 - RNA, 19 nt, Homo sapiens
  misc_RNA (1)...(19): siRNA sense strand
ugaaaguguuugaaagggu

SEQ ID NO: 2344714 - RNA, 19 nt, Homo sapiens
  misc_RNA (1)...(19): siRNA sense strand
cagcacagucgaugguuca

SEQ ID NO: 2344715 - RNA, 19 nt, Homo sapiens
  misc_RNA (1)...(19): siRNA sense strand
gggaaaauguuaucgccuu

SEQ ID NO: 2344716 - RNA, 19 nt, Homo sapiens
  misc_RNA (1)...(19): siRNA sense strand
ccaaaagggccaaggucca

SEQ ID NO: 2344717 - RNA, 19 nt, Homo sapiens
  misc_RNA (1)...(19): siRNA sense strand
ucgccuuuauacagaggaa

SEQ ID NO: 2344718 - RNA, 19 nt, Homo sapiens
  misc_RNA (1)...(19): siRNA sense strand
aaccagaagucucacgcaa

SEQ ID NO: 2344719 - RNA, 19 nt, Homo sapiens
  misc_RNA (1)...(19): siRNA sense strand
cgguauucaagcuuaggaa

SEQ ID NO: 2344720 - RNA, 19 nt, Homo sapiens
  misc_RNA (1)...(19): siRNA sense strand
caguggugauuguugguga

SEQ ID NO: 2344721 - RNA, 19 nt, Homo sapiens
  misc_RNA (1)...(19): siRNA sense strand
ccgugggaccggugaaguu

SEQ ID NO: 2344722 - RNA, 19 nt, Homo sapiens
  misc_RNA (1)...(19): siRNA sense strand
aguggugauuguuggugaa

SEQ ID NO: 2344723 - RNA, 19 nt, Homo sapiens
  misc_RNA (1)...(19): siRNA sense strand
cgacuguaagagaacaauu

SEQ ID NO: 2344724 - RNA, 19 nt, Homo sapiens
  misc_RNA (1)...(19): siRNA sense strand
gugaaaaugaugagagauu

SEQ ID NO: 2344725 - RNA, 19 nt, Homo sapiens
  misc_RNA (1)...(19): siRNA sense strand
augaagccuuggagauaaa

SEQ ID NO: 2344726 - RNA, 19 nt, Homo sapiens
  misc_RNA (1)...(19): siRNA sense strand
aagccuggagagagagaaa

SEQ ID NO: 2344727 - RNA, 19 nt, Homo sapiens
  misc_RNA (1)...(19): siRNA sense strand
aggcaaagugucucagaau

SEQ ID NO: 2344728 - RNA, 19 nt, Homo sapiens
  misc_RNA (1)...(19): siRNA sense strand
ucagauuccaauaggcaaa

SEQ ID NO: 2344729 - RNA, 19 nt, Homo sapiens
  misc_RNA (1)...(19): siRNA sense strand
cagugaaaaugaugagaga

SEQ ID NO: 2344730 - RNA, 19 nt, Homo sapiens
  misc_RNA (1)...(19): siRNA sense strand
cagaaacagcagaccgaga

SEQ ID NO: 2344731 - RNA, 19 nt, Homo sapiens
  misc_RNA (1)...(19): siRNA sense strand
ccagggaagcagugaaaau

SEQ ID NO: 2344732 - RNA, 19 nt, Homo sapiens
  misc_RNA (1)...(19): siRNA sense strand
aagcaauagcauaugcauu

SEQ ID NO: 2344733 - RNA, 19 nt, Homo sapiens
  misc_RNA (1)...(19): siRNA sense strand
aaugcaaaguauggcgaaa

SEQ ID NO: 2344734 - RNA, 19 nt, Homo sapiens
  misc_RNA (1)...(19): siRNA sense strand
cagcagagaugaaugcagu

SEQ ID NO: 2344735 - RNA, 19 nt, Homo sapiens
  misc_RNA (1)...(19): siRNA sense strand
ccugaagagaggagacagu

SEQ ID NO: 2344736 - RNA, 19 nt, Homo sapiens
  misc_RNA (1)...(19): siRNA sense strand
gcaauaaugcagaaagccu

SEQ ID NO: 2344737 - RNA, 19 nt, Homo sapiens
  misc_RNA (1)...(19): siRNA sense strand
gguucuucaucgugcuauu

SEQ ID NO: 2344738 - RNA, 19 nt, Homo sapiens
  misc_RNA (1)...(19): siRNA sense strand
aggcagucuuagcaaagua

SEQ ID NO: 2344739 - RNA, 19 nt, Homo sapiens
  misc_RNA (1)...(19): siRNA sense strand
ggugacaggacgagagccu

SEQ ID NO: 2344740 - RNA, 19 nt, Homo sapiens
  misc_RNA (1)...(19): siRNA sense strand
ggaccagggaagcagugaa

SEQ ID NO: 2344741 - RNA, 19 nt, Homo sapiens
  misc_RNA (1)...(19): siRNA sense strand
gaacauauccugaagagag

SEQ ID NO: 2344742 - RNA, 19 nt, Homo sapiens
  misc_RNA (1)...(19): siRNA sense strand
ugaagagaggagacaguga

SEQ ID NO: 2344743 - RNA, 19 nt, Homo sapiens
  misc_RNA (1)...(19): siRNA sense strand
caguuuacccaaagaagga

SEQ ID NO: 2344744 - RNA, 19 nt, Homo sapiens
  misc_RNA (1)...(19): siRNA sense strand
gcucaugaagccuuggaga

SEQ ID NO: 2344745 - RNA, 19 nt, Homo sapiens
  misc_RNA (1)...(19): siRNA sense strand
cuuauauucucuuggcuga

SEQ ID NO: 2344746 - RNA, 19 nt, Homo sapiens
  misc_RNA (1)...(19): siRNA sense strand
ugaaugcaguagaggccau

SEQ ID NO: 2344747 - RNA, 19 nt, Homo sapiens
  misc_RNA (1)...(19): siRNA sense strand
gugaaaaugaugagagauu

SEQ ID NO: 2344748 - RNA, 19 nt, Homo sapiens
  misc_RNA (1)...(19): siRNA sense strand
augaagccuuggagauaaa

SEQ ID NO: 2344749 - RNA, 19 nt, Homo sapiens
  misc_RNA (1)...(19): siRNA sense strand
aagccuggagagagagaaa

SEQ ID NO: 2344750 - RNA, 19 nt, Homo sapiens
  misc_RNA (1)...(19): siRNA sense strand
aggcaaagugucucagaau

SEQ ID NO: 2344751 - RNA, 19 nt, Homo sapiens
  misc_RNA (1)...(19): siRNA sense strand
ucagauuccaauaggcaaa

SEQ ID NO: 2344752 - RNA, 19 nt, Homo sapiens
  misc_RNA (1)...(19): siRNA sense strand
cagugaaaaugaugagaga

SEQ ID NO: 2344753 - RNA, 19 nt, Homo sapiens
  misc_RNA (1)...(19): siRNA sense strand
cagaaacagcagaccgaga

SEQ ID NO: 2344754 - RNA, 19 nt, Homo sapiens
  misc_RNA (1)...(19): siRNA sense strand
ccagggaagcagugaaaau

SEQ ID NO: 2344755 - RNA, 19 nt, Homo sapiens
  misc_RNA (1)...(19): siRNA sense strand
aagcaauagcauaugcauu

SEQ ID NO: 2344756 - RNA, 19 nt, Homo sapiens
  misc_RNA (1)...(19): siRNA sense strand
aaugcaaaguauggcgaaa

SEQ ID NO: 2344757 - RNA, 19 nt, Homo sapiens
  misc_RNA (1)...(19): siRNA sense strand
cagcagagaugaaugcagu

SEQ ID NO: 2344758 - RNA, 19 nt, Homo sapiens
  misc_RNA (1)...(19): siRNA sense strand
ccugaagagaggagacagu

SEQ ID NO: 2344759 - RNA, 19 nt, Homo sapiens
  misc_RNA (1)...(19): siRNA sense strand
gcaauaaugcagaaagccu

SEQ ID NO: 2344760 - RNA, 19 nt, Homo sapiens
  misc_RNA (1)...(19): siRNA sense strand
gguucuucaucgugcuauu

SEQ ID NO: 2344761 - RNA, 19 nt, Homo sapiens
  misc_RNA (1)...(19): siRNA sense strand
aggcagucuuagcaaagua

SEQ ID NO: 2344762 - RNA, 19 nt, Homo sapiens
  misc_RNA (1)...(19): siRNA sense strand
ggugacaggacgagagccu

SEQ ID NO: 2344763 - RNA, 19 nt, Homo sapiens
  misc_RNA (1)...(19): siRNA sense strand
ggaccagggaagcagugaa

SEQ ID NO: 2344764 - RNA, 19 nt, Homo sapiens
  misc_RNA (1)...(19): siRNA sense strand
gaacauauccugaagagag

SEQ ID NO: 2344765 - RNA, 19 nt, Homo sapiens
  misc_RNA (1)...(19): siRNA sense strand
ugaagagaggagacaguga

SEQ ID NO: 2344766 - RNA, 19 nt, Homo sapiens
  misc_RNA (1)...(19): siRNA sense strand
caguuuacccaaagaagga

SEQ ID NO: 2344767 - RNA, 19 nt, Homo sapiens
  misc_RNA (1)...(19): siRNA sense strand
gcucaugaagccuuggaga

SEQ ID NO: 2344768 - RNA, 19 nt, Homo sapiens
  misc_RNA (1)...(19): siRNA sense strand
cuuauauucucuuggcuga

SEQ ID NO: 2344769 - RNA, 19 nt, Homo sapiens
  misc_RNA (1)...(19): siRNA sense strand
ugaaugcaguagaggccau

SEQ ID NO: 2344770 - RNA, 19 nt, Homo sapiens
  misc_RNA (1)...(19): siRNA sense strand
aggaagaggaggaggacaa

SEQ ID NO: 2344771 - RNA, 19 nt, Homo sapiens
  misc_RNA (1)...(19): siRNA sense strand
ccacacaaucucagggaaa

SEQ ID NO: 2344772 - RNA, 19 nt, Homo sapiens
  misc_RNA (1)...(19): siRNA sense strand
cggcaaagugucugguaaa

SEQ ID NO: 2344773 - RNA, 19 nt, Homo sapiens
  misc_RNA (1)...(19): siRNA sense strand
aggaaagacccaagaggaa

SEQ ID NO: 2344774 - RNA, 19 nt, Homo sapiens
  misc_RNA (1)...(19): siRNA sense strand
ccgaauagucccagcacaa

SEQ ID NO: 2344775 - RNA, 19 nt, Homo sapiens
  misc_RNA (1)...(19): siRNA sense strand
cuggaugagcucagggaua

SEQ ID NO: 2344776 - RNA, 19 nt, Homo sapiens
  misc_RNA (1)...(19): siRNA sense strand
cugcugaggaggagaacaa

SEQ ID NO: 2344777 - RNA, 19 nt, Homo sapiens
  misc_RNA (1)...(19): siRNA sense strand
acaccaaagccaagagaga

SEQ ID NO: 2344778 - RNA, 19 nt, Homo sapiens
  misc_RNA (1)...(19): siRNA sense strand
aggaggaagucgaggagga

SEQ ID NO: 2344779 - RNA, 19 nt, Homo sapiens
  misc_RNA (1)...(19): siRNA sense strand
aggaagaugaugagacaga

SEQ ID NO: 2344780 - RNA, 19 nt, Homo sapiens
  misc_RNA (1)...(19): siRNA sense strand
cgaugacagugaugggauu

SEQ ID NO: 2344781 - RNA, 19 nt, Homo sapiens
  misc_RNA (1)...(19): siRNA sense strand
agguguaaccagugccaaa

SEQ ID NO: 2344782 - RNA, 19 nt, Homo sapiens
  misc_RNA (1)...(19): siRNA sense strand
aggaagucgaggaggaaga

SEQ ID NO: 2344783 - RNA, 19 nt, Homo sapiens
  misc_RNA (1)...(19): siRNA sense strand
ccagauugcacaagcagaa

SEQ ID NO: 2344784 - RNA, 19 nt, Homo sapiens
  misc_RNA (1)...(19): siRNA sense strand
aggaggugcugauggagaa

SEQ ID NO: 2344785 - RNA, 19 nt, Homo sapiens
  misc_RNA (1)...(19): siRNA sense strand
ccaagagagaacuggucaa

SEQ ID NO: 2344786 - RNA, 19 nt, Homo sapiens
  misc_RNA (1)...(19): siRNA sense strand
aagaagggccgucgaggaa

SEQ ID NO: 2344787 - RNA, 19 nt, Homo sapiens
  misc_RNA (1)...(19): siRNA sense strand
gcagacaagcacauggcaa

SEQ ID NO: 2344788 - RNA, 19 nt, Homo sapiens
  misc_RNA (1)...(19): siRNA sense strand
ccgaaaucgagcaagagua

SEQ ID NO: 2344789 - RNA, 19 nt, Homo sapiens
  misc_RNA (1)...(19): siRNA sense strand
caaucagaucugcggcaaa

SEQ ID NO: 2344790 - RNA, 19 nt, Homo sapiens
  misc_RNA (1)...(19): siRNA sense strand
ugaaaguagcaaugcaaaa

SEQ ID NO: 2344791 - RNA, 19 nt, Homo sapiens
  misc_RNA (1)...(19): siRNA sense strand
ugaacggacacgugaagaa

SEQ ID NO: 2344792 - RNA, 19 nt, Homo sapiens
  misc_RNA (1)...(19): siRNA sense strand
acuggaggcuaguggaaga

SEQ ID NO: 2344793 - RNA, 19 nt, Homo sapiens
  misc_RNA (1)...(19): siRNA sense strand
ccauggugguacaagagaa

SEQ ID NO: 2344794 - RNA, 19 nt, Homo sapiens
  misc_RNA (1)...(19): siRNA sense strand
acgaugaggaacagauuau

SEQ ID NO: 2344795 - RNA, 19 nt, Homo sapiens
  misc_RNA (1)...(19): siRNA sense strand
gcagcaagcucaaggaggu

SEQ ID NO: 2344796 - RNA, 19 nt, Homo sapiens
  misc_RNA (1)...(19): siRNA sense strand
ucaaggaagaggaggagga

SEQ ID NO: 2344797 - RNA, 19 nt, Homo sapiens
  misc_RNA (1)...(19): siRNA sense strand
gcucagucucagccgaaua

SEQ ID NO: 2344798 - RNA, 19 nt, Homo sapiens
  misc_RNA (1)...(19): siRNA sense strand
cauccaaaacugugaagua

SEQ ID NO: 2344799 - RNA, 19 nt, Homo sapiens
  misc_RNA (1)...(19): siRNA sense strand
gugacuauucccuggcuaa

SEQ ID NO: 2344800 - RNA, 19 nt, Homo sapiens
  misc_RNA (1)...(19): siRNA sense strand
ucacauacaccaaagccaa

SEQ ID NO: 2344801 - RNA, 19 nt, Homo sapiens
  misc_RNA (1)...(19): siRNA sense strand
aggagaacaagcuggaaga

SEQ ID NO: 2344802 - RNA, 19 nt, Homo sapiens
  misc_RNA (1)...(19): siRNA sense strand
caguaaacccacaccaaaa

SEQ ID NO: 2344803 - RNA, 19 nt, Homo sapiens
  misc_RNA (1)...(19): siRNA sense strand
ccaagaggagacuggaaga

SEQ ID NO: 2344804 - RNA, 19 nt, Homo sapiens
  misc_RNA (1)...(19): siRNA sense strand
gcaucagaacagucagaga

SEQ ID NO: 2344805 - RNA, 19 nt, Homo sapiens
  misc_RNA (1)...(19): siRNA sense strand
ggaggaagucgaggaggaa

SEQ ID NO: 2344806 - RNA, 19 nt, Homo sapiens
  misc_RNA (1)...(19): siRNA sense strand
ggagacuggaagaggcaca

SEQ ID NO: 2344807 - RNA, 19 nt, Homo sapiens
  misc_RNA (1)...(19): siRNA sense strand
uggucaaggaagaggagga

SEQ ID NO: 2344808 - RNA, 19 nt, Homo sapiens
  misc_RNA (1)...(19): siRNA sense strand
ggcucaggacuuacggaaa

SEQ ID NO: 2344809 - RNA, 19 nt, Homo sapiens
  misc_RNA (1)...(19): siRNA sense strand
acugaaaguagcaaugcaa

SEQ ID NO: 2344810 - RNA, 19 nt, Homo sapiens
  misc_RNA (1)...(19): siRNA sense strand
ugaaguugauguaccgcua

SEQ ID NO: 2344811 - RNA, 19 nt, Homo sapiens
  misc_RNA (1)...(19): siRNA sense strand
gaagaagggccgucgagga

SEQ ID NO: 2344812 - RNA, 19 nt, Homo sapiens
  misc_RNA (1)...(19): siRNA sense strand
aacccaaagucaugcacua

SEQ ID NO: 2344813 - RNA, 19 nt, Homo sapiens
  misc_RNA (1)...(19): siRNA sense strand
aggcacaccaggcggagaa

SEQ ID NO: 2344814 - RNA, 19 nt, Homo sapiens
  misc_RNA (1)...(19): siRNA sense strand
guacuggaggcuaguggaa

SEQ ID NO: 2344815 - RNA, 19 nt, Homo sapiens
  misc_RNA (1)...(19): siRNA sense strand
caagaguacuggaggcuag

SEQ ID NO: 2344816 - RNA, 19 nt, Homo sapiens
  misc_RNA (1)...(19): siRNA sense strand
ccgcaaaggagaagcacag

SEQ ID NO: 2344817 - RNA, 19 nt, Homo sapiens
  misc_RNA (1)...(19): siRNA sense strand
cagagaacgaccaccacaa

SEQ ID NO: 2344818 - RNA, 19 nt, Homo sapiens
  misc_RNA (1)...(19): siRNA sense strand
ggcuaguggaagagaagga

SEQ ID NO: 2344819 - RNA, 19 nt, Homo sapiens
  misc_RNA (1)...(19): siRNA sense strand
aggcauggauggaaccuca

SEQ ID NO: 2344820 - RNA, 19 nt, Homo sapiens
  misc_RNA (1)...(19): siRNA sense strand
ggaaaugaagcgucgccau

SEQ ID NO: 2344821 - RNA, 19 nt, Homo sapiens
  misc_RNA (1)...(19): siRNA sense strand
ccaagcugcaggaggccua

SEQ ID NO: 2344822 - RNA, 19 nt, Homo sapiens
  misc_RNA (1)...(19): siRNA sense strand
cuggaaggccacacagaga

SEQ ID NO: 2344823 - RNA, 19 nt, Homo sapiens
  misc_RNA (1)...(19): siRNA sense strand
agccuaagacagaagauuu

SEQ ID NO: 2344824 - RNA, 19 nt, Homo sapiens
  misc_RNA (1)...(19): siRNA sense strand
cugaaaguagcaaugcaaa

SEQ ID NO: 2344825 - RNA, 19 nt, Homo sapiens
  misc_RNA (1)...(19): siRNA sense strand
caauaaaguuugugggaac

SEQ ID NO: 2344826 - RNA, 19 nt, Homo sapiens
  misc_RNA (1)...(19): siRNA sense strand
ccuuuaaacugcagcguca

SEQ ID NO: 2344827 - RNA, 19 nt, Homo sapiens
  misc_RNA (1)...(19): siRNA sense strand
augaagaacacguguaaau

SEQ ID NO: 2344828 - RNA, 19 nt, Homo sapiens
  misc_RNA (1)...(19): siRNA sense strand
gcaauaaaguuugugggaa

SEQ ID NO: 2344829 - RNA, 19 nt, Homo sapiens
  misc_RNA (1)...(19): siRNA sense strand
aggcuauggaauacagaua

SEQ ID NO: 2344830 - RNA, 19 nt, Homo sapiens
  misc_RNA (1)...(19): siRNA sense strand
uuucaagaacgcagcaaua

SEQ ID NO: 2344831 - RNA, 19 nt, Homo sapiens
  misc_RNA (1)...(19): siRNA sense strand
cgaauauaacauagagcca

SEQ ID NO: 2344832 - RNA, 19 nt, Homo sapiens
  misc_RNA (1)...(19): siRNA sense strand
guuaguagacagagaacca

SEQ ID NO: 2344833 - RNA, 19 nt, Homo sapiens
  misc_RNA (1)...(19): siRNA sense strand
cuauaagaccauugaaagu

SEQ ID NO: 2344834 - RNA, 19 nt, Homo sapiens
  misc_RNA (1)...(19): siRNA sense strand
gcaucauguaucugaacaa

SEQ ID NO: 2344835 - RNA, 19 nt, Homo sapiens
  misc_RNA (1)...(19): siRNA sense strand
ucguggugguggaugguaa

SEQ ID NO: 2344836 - RNA, 19 nt, Homo sapiens
  misc_RNA (1)...(19): siRNA sense strand
auacaugggcagaggggaa

SEQ ID NO: 2344837 - RNA, 19 nt, Homo sapiens
  misc_RNA (1)...(19): siRNA sense strand
gcuaauugacagaguugau

SEQ ID NO: 2344838 - RNA, 19 nt, Homo sapiens
  misc_RNA (1)...(19): siRNA sense strand
ggauaaugcagguuuuaaa

SEQ ID NO: 2344839 - RNA, 19 nt, Homo sapiens
  misc_RNA (1)...(19): siRNA sense strand
guuaaugauaccaaagaca

SEQ ID NO: 2344840 - RNA, 19 nt, Homo sapiens
  misc_RNA (1)...(19): siRNA sense strand
guggcgaucacgagaacaa

SEQ ID NO: 2344841 - RNA, 19 nt, Homo sapiens
  misc_RNA (1)...(19): siRNA sense strand
gugaaaagcacuacaacau

SEQ ID NO: 2344842 - RNA, 19 nt, Homo sapiens
  misc_RNA (1)...(19): siRNA sense strand
caaguguaaggaugggaaa

SEQ ID NO: 2344843 - RNA, 19 nt, Homo sapiens
  misc_RNA (1)...(19): siRNA sense strand
aggauguaauugaacgauu

SEQ ID NO: 2344844 - RNA, 19 nt, Homo sapiens
  misc_RNA (1)...(19): siRNA sense strand
aggauggguuugagaagga

SEQ ID NO: 2344845 - RNA, 19 nt, Homo sapiens
  misc_RNA (1)...(19): siRNA sense strand
aauuauuggugguagcaga

SEQ ID NO: 2344846 - RNA, 19 nt, Homo sapiens
  misc_RNA (1)...(19): siRNA sense strand
gggcagaggggaagagagu

SEQ ID NO: 2344847 - RNA, 19 nt, Homo sapiens
  misc_RNA (1)...(19): siRNA sense strand
augaaggagaagaguguga

SEQ ID NO: 2344848 - RNA, 19 nt, Homo sapiens
  misc_RNA (1)...(19): siRNA sense strand
gagccugacucuaggguuc

SEQ ID NO: 2344849 - RNA, 19 nt, Homo sapiens
  misc_RNA (1)...(19): siRNA sense strand
acauaauuuuggagcagaa

SEQ ID NO: 2344850 - RNA, 19 nt, Homo sapiens
  misc_RNA (1)...(19): siRNA sense strand
caaucaaucuauaagacca

SEQ ID NO: 2344851 - RNA, 19 nt, Homo sapiens
  misc_RNA (1)...(19): siRNA sense strand
agaaacgaguacaggaugu

SEQ ID NO: 2344852 - RNA, 19 nt, Homo sapiens
  misc_RNA (1)...(19): siRNA sense strand
gcaaguguaaggaugggaa

SEQ ID NO: 2344853 - RNA, 19 nt, Homo sapiens
  misc_RNA (1)...(19): siRNA sense strand
gcaucaauacuuuuggaaa

SEQ ID NO: 2344854 - RNA, 19 nt, Homo sapiens
  misc_RNA (1)...(19): siRNA sense strand
agacagagaaccaccugaa

SEQ ID NO: 2344855 - RNA, 19 nt, Homo sapiens
  misc_RNA (1)...(19): siRNA sense strand
ggggaagagaguacaacua

SEQ ID NO: 2344856 - RNA, 19 nt, Homo sapiens
  misc_RNA (1)...(19): siRNA sense strand
augugaagauguugcuaga

SEQ ID NO: 2344857 - RNA, 19 nt, Homo sapiens
  misc_RNA (1)...(19): siRNA sense strand
ugagaaacgaguacaggau

SEQ ID NO: 2344858 - RNA, 19 nt, Homo sapiens
  misc_RNA (1)...(19): siRNA sense strand
acccagaucccaugaagaa

SEQ ID NO: 2344859 - RNA, 19 nt, Homo sapiens
  misc_RNA (1)...(19): siRNA sense strand
cgaggguggaugaaggaga

SEQ ID NO: 2344860 - RNA, 19 nt, Homo sapiens
  misc_RNA (1)...(19): siRNA sense strand
augaauggcaaaugugaga

SEQ ID NO: 2344861 - RNA, 19 nt, Homo sapiens
  misc_RNA (1)...(19): siRNA sense strand
cagcaaagaaacagagugc

SEQ ID NO: 2344862 - RNA, 19 nt, Homo sapiens
  misc_RNA (1)...(19): siRNA sense strand
aaggguuaguagacagaga

SEQ ID NO: 2344863 - RNA, 19 nt, Homo sapiens
  misc_RNA (1)...(19): siRNA sense strand
guaaauuauuggugguagc

SEQ ID NO: 2344864 - RNA, 19 nt, Homo sapiens
  misc_RNA (1)...(19): siRNA sense strand
agauagagcagauucgcau

SEQ ID NO: 2344865 - RNA, 19 nt, Homo sapiens
  misc_RNA (1)...(19): siRNA sense strand
cuuugauauagcugaggaa

SEQ ID NO: 2344866 - RNA, 19 nt, Homo sapiens
  misc_RNA (1)...(19): siRNA sense strand
caacucaugaauugggaca

SEQ ID NO: 2344867 - RNA, 19 nt, Homo sapiens
  misc_RNA (1)...(19): siRNA sense strand
cguggugguggaugguaaa

SEQ ID NO: 2344868 - RNA, 19 nt, Homo sapiens
  misc_RNA (1)...(19): siRNA sense strand
gggccgaauauaacauaga

SEQ ID NO: 2344869 - RNA, 19 nt, Homo sapiens
  misc_RNA (1)...(19): siRNA sense strand
gaaaagaagagcugaccca

SEQ ID NO: 2344870 - RNA, 19 nt, Homo sapiens
  misc_RNA (1)...(19): siRNA sense strand
ugaggaccagggagggaaa

SEQ ID NO: 2344871 - RNA, 19 nt, Homo sapiens
  misc_RNA (1)...(19): siRNA sense strand
uguccaaaggcuuauuaua

SEQ ID NO: 2344872 - RNA, 19 nt, Homo sapiens
  misc_RNA (1)...(19): siRNA sense strand
gagcagaacaugauccgga

SEQ ID NO: 2344873 - RNA, 19 nt, Homo sapiens
  misc_RNA (1)...(19): siRNA sense strand
cagcuggaguccugugcau

SEQ ID NO: 2344874 - RNA, 19 nt, Homo sapiens
  misc_RNA (1)...(19): siRNA sense strand
gcccuguacaguaggauuu

SEQ ID NO: 2344875 - RNA, 19 nt, Homo sapiens
  misc_RNA (1)...(19): siRNA sense strand
caauaaaguuugugggaac

SEQ ID NO: 2344876 - RNA, 19 nt, Homo sapiens
  misc_RNA (1)...(19): siRNA sense strand
augaagaacacguguaaau

SEQ ID NO: 2344877 - RNA, 19 nt, Homo sapiens
  misc_RNA (1)...(19): siRNA sense strand
gcaauaaaguuugugggaa

SEQ ID NO: 2344878 - RNA, 19 nt, Homo sapiens
  misc_RNA (1)...(19): siRNA sense strand
aggcuauggaauacagaua

SEQ ID NO: 2344879 - RNA, 19 nt, Homo sapiens
  misc_RNA (1)...(19): siRNA sense strand
uuucaagaacgcagcaaua

SEQ ID NO: 2344880 - RNA, 19 nt, Homo sapiens
  misc_RNA (1)...(19): siRNA sense strand
cgaauauaacauagagcca

SEQ ID NO: 2344881 - RNA, 19 nt, Homo sapiens
  misc_RNA (1)...(19): siRNA sense strand
guuaguagacagagaacca

SEQ ID NO: 2344882 - RNA, 19 nt, Homo sapiens
  misc_RNA (1)...(19): siRNA sense strand
cuauaagaccauugaaagu

SEQ ID NO: 2344883 - RNA, 19 nt, Homo sapiens
  misc_RNA (1)...(19): siRNA sense strand
gcaucauguaucugaacaa

SEQ ID NO: 2344884 - RNA, 19 nt, Homo sapiens
  misc_RNA (1)...(19): siRNA sense strand
ucguggugguggaugguaa

SEQ ID NO: 2344885 - RNA, 19 nt, Homo sapiens
  misc_RNA (1)...(19): siRNA sense strand
auacaugggcagaggggaa

SEQ ID NO: 2344886 - RNA, 19 nt, Homo sapiens
  misc_RNA (1)...(19): siRNA sense strand
gcuaauugacagaguugau

SEQ ID NO: 2344887 - RNA, 19 nt, Homo sapiens
  misc_RNA (1)...(19): siRNA sense strand
ggauaaugcagguuuuaaa

SEQ ID NO: 2344888 - RNA, 19 nt, Homo sapiens
  misc_RNA (1)...(19): siRNA sense strand
guuaaugauaccaaagaca

SEQ ID NO: 2344889 - RNA, 19 nt, Homo sapiens
  misc_RNA (1)...(19): siRNA sense strand
guggcgaucacgagaacaa

SEQ ID NO: 2344890 - RNA, 19 nt, Homo sapiens
  misc_RNA (1)...(19): siRNA sense strand
gugaaaagcacuacaacau

SEQ ID NO: 2344891 - RNA, 19 nt, Homo sapiens
  misc_RNA (1)...(19): siRNA sense strand
caaguguaaggaugggaaa

SEQ ID NO: 2344892 - RNA, 19 nt, Homo sapiens
  misc_RNA (1)...(19): siRNA sense strand
aggauguaauugaacgauu

SEQ ID NO: 2344893 - RNA, 19 nt, Homo sapiens
  misc_RNA (1)...(19): siRNA sense strand
aauuauuggugguagcaga

SEQ ID NO: 2344894 - RNA, 19 nt, Homo sapiens
  misc_RNA (1)...(19): siRNA sense strand
gggcagaggggaagagagu

SEQ ID NO: 2344895 - RNA, 19 nt, Homo sapiens
  misc_RNA (1)...(19): siRNA sense strand
augaaggagaagaguguga

SEQ ID NO: 2344896 - RNA, 19 nt, Homo sapiens
  misc_RNA (1)...(19): siRNA sense strand
gagccugacucuaggguuc

SEQ ID NO: 2344897 - RNA, 19 nt, Homo sapiens
  misc_RNA (1)...(19): siRNA sense strand
acauaauuuuggagcagaa

SEQ ID NO: 2344898 - RNA, 19 nt, Homo sapiens
  misc_RNA (1)...(19): siRNA sense strand
caaucaaucuauaagacca

SEQ ID NO: 2344899 - RNA, 19 nt, Homo sapiens
  misc_RNA (1)...(19): siRNA sense strand
agaaacgaguacaggaugu

SEQ ID NO: 2344900 - RNA, 19 nt, Homo sapiens
  misc_RNA (1)...(19): siRNA sense strand
gcaaguguaaggaugggaa

SEQ ID NO: 2344901 - RNA, 19 nt, Homo sapiens
  misc_RNA (1)...(19): siRNA sense strand
gcaucaauacuuuuggaaa

SEQ ID NO: 2344902 - RNA, 19 nt, Homo sapiens
  misc_RNA (1)...(19): siRNA sense strand
agacagagaaccaccugaa

SEQ ID NO: 2344903 - RNA, 19 nt, Homo sapiens
  misc_RNA (1)...(19): siRNA sense strand
ggggaagagaguacaacua

SEQ ID NO: 2344904 - RNA, 19 nt, Homo sapiens
  misc_RNA (1)...(19): siRNA sense strand
augugaagauguugcuaga

SEQ ID NO: 2344905 - RNA, 19 nt, Homo sapiens
  misc_RNA (1)...(19): siRNA sense strand
ugagaaacgaguacaggau

SEQ ID NO: 2344906 - RNA, 19 nt, Homo sapiens
  misc_RNA (1)...(19): siRNA sense strand
acccagaucccaugaagaa

SEQ ID NO: 2344907 - RNA, 19 nt, Homo sapiens
  misc_RNA (1)...(19): siRNA sense strand
cgaggguggaugaaggaga

SEQ ID NO: 2344908 - RNA, 19 nt, Homo sapiens
  misc_RNA (1)...(19): siRNA sense strand
augaauggcaaaugugaga

SEQ ID NO: 2344909 - RNA, 19 nt, Homo sapiens
  misc_RNA (1)...(19): siRNA sense strand
aaggguuaguagacagaga

SEQ ID NO: 2344910 - RNA, 19 nt, Homo sapiens
  misc_RNA (1)...(19): siRNA sense strand
guaaauuauuggugguagc

SEQ ID NO: 2344911 - RNA, 19 nt, Homo sapiens
  misc_RNA (1)...(19): siRNA sense strand
agauagagcagauucgcau

SEQ ID NO: 2344912 - RNA, 19 nt, Homo sapiens
  misc_RNA (1)...(19): siRNA sense strand
cuuugauauagcugaggaa

SEQ ID NO: 2344913 - RNA, 19 nt, Homo sapiens
  misc_RNA (1)...(19): siRNA sense strand
caacucaugaauugggaca

SEQ ID NO: 2344914 - RNA, 19 nt, Homo sapiens
  misc_RNA (1)...(19): siRNA sense strand
cguggugguggaugguaaa

SEQ ID NO: 2344915 - RNA, 19 nt, Homo sapiens
  misc_RNA (1)...(19): siRNA sense strand
gggccgaauauaacauaga

SEQ ID NO: 2344916 - RNA, 19 nt, Homo sapiens
  misc_RNA (1)...(19): siRNA sense strand
gaaaagaagagcugaccca

SEQ ID NO: 2344917 - RNA, 19 nt, Homo sapiens
  misc_RNA (1)...(19): siRNA sense strand
ugaggaccagggagggaaa

SEQ ID NO: 2344918 - RNA, 19 nt, Homo sapiens
  misc_RNA (1)...(19): siRNA sense strand
uguccaaaggcuuauuaua

SEQ ID NO: 2344919 - RNA, 19 nt, Homo sapiens
  misc_RNA (1)...(19): siRNA sense strand
gagcagaacaugauccgga

SEQ ID NO: 2344920 - RNA, 19 nt, Homo sapiens
  misc_RNA (1)...(19): siRNA sense strand
cagcuggaguccugugcau

SEQ ID NO: 2344921 - RNA, 19 nt, Homo sapiens
  misc_RNA (1)...(19): siRNA sense strand
gcccuguacaguaggauuu

SEQ ID NO: 2344922 - RNA, 19 nt, Homo sapiens
  misc_RNA (1)...(19): siRNA sense strand
aggagaacuuucagggcaa

SEQ ID NO: 2344923 - RNA, 19 nt, Homo sapiens
  misc_RNA (1)...(19): siRNA sense strand
ccaucuaugaucaggagaa

SEQ ID NO: 2344924 - RNA, 19 nt, Homo sapiens
  misc_RNA (1)...(19): siRNA sense strand
cuggauugguuaugagcau

SEQ ID NO: 2344925 - RNA, 19 nt, Homo sapiens
  misc_RNA (1)...(19): siRNA sense strand
gggagaucucugacgacua

SEQ ID NO: 2344926 - RNA, 19 nt, Homo sapiens
  misc_RNA (1)...(19): siRNA sense strand
acuauaaacauuggagaga

SEQ ID NO: 2344927 - RNA, 19 nt, Homo sapiens
  misc_RNA (1)...(19): siRNA sense strand
caggagaacuuucagggca

SEQ ID NO: 2344928 - RNA, 19 nt, Homo sapiens
  misc_RNA (1)...(19): siRNA sense strand
ccaucuuugagaaggaaaa

SEQ ID NO: 2344929 - RNA, 19 nt, Homo sapiens
  misc_RNA (1)...(19): siRNA sense strand
gggccauggaagauaacca

SEQ ID NO: 2344930 - RNA, 19 nt, Homo sapiens
  misc_RNA (1)...(19): siRNA sense strand
gggacuuuguugagggcua

SEQ ID NO: 2344931 - RNA, 19 nt, Homo sapiens
  misc_RNA (1)...(19): siRNA sense strand
ccgcagugaaagacaguau

SEQ ID NO: 2344932 - RNA, 19 nt, Homo sapiens
  misc_RNA (1)...(19): siRNA sense strand
caggaagaugcaaguggaa

SEQ ID NO: 2344933 - RNA, 19 nt, Homo sapiens
  misc_RNA (1)...(19): siRNA sense strand
ccacaugauaugaagccau

SEQ ID NO: 2344934 - RNA, 19 nt, Homo sapiens
  misc_RNA (1)...(19): siRNA sense strand
gcuucagacacuggauaua

SEQ ID NO: 2344935 - RNA, 19 nt, Homo sapiens
  misc_RNA (1)...(19): siRNA sense strand
ucggaaugggacagaccua

SEQ ID NO: 2344936 - RNA, 19 nt, Homo sapiens
  misc_RNA (1)...(19): siRNA sense strand
cgauauuagcaaaggagaa

SEQ ID NO: 2344937 - RNA, 19 nt, Homo sapiens
  misc_RNA (1)...(19): siRNA sense strand
ucucagaagacaagagcaa

SEQ ID NO: 2344938 - RNA, 19 nt, Homo sapiens
  misc_RNA (1)...(19): siRNA sense strand
gcauaugaauggaacgaca

SEQ ID NO: 2344939 - RNA, 19 nt, Homo sapiens
  misc_RNA (1)...(19): siRNA sense strand
ccaugaagcuguuggggaa

SEQ ID NO: 2344940 - RNA, 19 nt, Homo sapiens
  misc_RNA (1)...(19): siRNA sense strand
agcaagaaguggagaaaau

SEQ ID NO: 2344941 - RNA, 19 nt, Homo sapiens
  misc_RNA (1)...(19): siRNA sense strand
aaauaaacuuccugcucaa

SEQ ID NO: 2344942 - RNA, 19 nt, Homo sapiens
  misc_RNA (1)...(19): siRNA sense strand
ggaaaauguuguaggagca

SEQ ID NO: 2344943 - RNA, 19 nt, Homo sapiens
  misc_RNA (1)...(19): siRNA sense strand
ggcugaaagaccagaacaa

SEQ ID NO: 2344944 - RNA, 19 nt, Homo sapiens
  misc_RNA (1)...(19): siRNA sense strand
ggugggagaugaagcgaga

SEQ ID NO: 2344945 - RNA, 19 nt, Homo sapiens
  misc_RNA (1)...(19): siRNA sense strand
ugagauggcaagagcaaau

SEQ ID NO: 2344946 - RNA, 19 nt, Homo sapiens
  misc_RNA (1)...(19): siRNA sense strand
ggguagauggcuaugacua

SEQ ID NO: 2344947 - RNA, 19 nt, Homo sapiens
  misc_RNA (1)...(19): siRNA sense strand
ugauugaagauguggaaca

SEQ ID NO: 2344948 - RNA, 19 nt, Homo sapiens
  misc_RNA (1)...(19): siRNA sense strand
cccaaagaccaguggauga

SEQ ID NO: 2344949 - RNA, 19 nt, Homo sapiens
  misc_RNA (1)...(19): siRNA sense strand
gcuaacggacccaggaaau

SEQ ID NO: 2344950 - RNA, 19 nt, Homo sapiens
  misc_RNA (1)...(19): siRNA sense strand
cugaaagaccagaacaaga

SEQ ID NO: 2344951 - RNA, 19 nt, Homo sapiens
  misc_RNA (1)...(19): siRNA sense strand
uggcaagagcaaaucauua

SEQ ID NO: 2344952 - RNA, 19 nt, Homo sapiens
  misc_RNA (1)...(19): siRNA sense strand
ccagauaauccacaagaau

SEQ ID NO: 2344953 - RNA, 19 nt, Homo sapiens
  misc_RNA (1)...(19): siRNA sense strand
cuaaauacaaugagcacca

SEQ ID NO: 2344954 - RNA, 19 nt, Homo sapiens
  misc_RNA (1)...(19): siRNA sense strand
gggaggaggaugugcgagu

SEQ ID NO: 2344955 - RNA, 19 nt, Homo sapiens
  misc_RNA (1)...(19): siRNA sense strand
ccaauauuacugaagagaa

SEQ ID NO: 2344956 - RNA, 19 nt, Homo sapiens
  misc_RNA (1)...(19): siRNA sense strand
uuagagaaguggaggugga

SEQ ID NO: 2344957 - RNA, 19 nt, Homo sapiens
  misc_RNA (1)...(19): siRNA sense strand
aaauaaagcaagaagugga

SEQ ID NO: 2344958 - RNA, 19 nt, Homo sapiens
  misc_RNA (1)...(19): siRNA sense strand
guggcuaauuugaaaccaa

SEQ ID NO: 2344959 - RNA, 19 nt, Homo sapiens
  misc_RNA (1)...(19): siRNA sense strand
ggccauuauaugaagagua

SEQ ID NO: 2344960 - RNA, 19 nt, Homo sapiens
  misc_RNA (1)...(19): siRNA sense strand
aaugagauggcaagagcaa

SEQ ID NO: 2344961 - RNA, 19 nt, Homo sapiens
  misc_RNA (1)...(19): siRNA sense strand
gagugauagugguuggcau

SEQ ID NO: 2344962 - RNA, 19 nt, Homo sapiens
  misc_RNA (1)...(19): siRNA sense strand
ugggaugcacagagaauau

SEQ ID NO: 2344963 - RNA, 19 nt, Homo sapiens
  misc_RNA (1)...(19): siRNA sense strand
cuaauaugacucaaggauu

SEQ ID NO: 2344964 - RNA, 19 nt, Homo sapiens
  misc_RNA (1)...(19): siRNA sense strand
aggaugugcgaguggcuaa

SEQ ID NO: 2344965 - RNA, 19 nt, Homo sapiens
  misc_RNA (1)...(19): siRNA sense strand
uaaagcaagaaguggagaa

SEQ ID NO: 2344966 - RNA, 19 nt, Homo sapiens
  misc_RNA (1)...(19): siRNA sense strand
cugaagagaauguccaaaa

SEQ ID NO: 2344967 - RNA, 19 nt, Homo sapiens
  misc_RNA (1)...(19): siRNA sense strand
caucuacaguacuggaaaa

SEQ ID NO: 2344968 - RNA, 19 nt, Homo sapiens
  misc_RNA (1)...(19): siRNA sense strand
gaaauaaacuuccugcuca

SEQ ID NO: 2344969 - RNA, 19 nt, Homo sapiens
  misc_RNA (1)...(19): siRNA sense strand
agaugaagcgagagauagu

SEQ ID NO: 2344970 - RNA, 19 nt, Homo sapiens
  misc_RNA (1)...(19): siRNA sense strand
ucuuggagauaaagcauau

SEQ ID NO: 2344971 - RNA, 19 nt, Homo sapiens
  misc_RNA (1)...(19): siRNA sense strand
aguugugaugggagugaua

SEQ ID NO: 2344972 - RNA, 19 nt, Homo sapiens
  misc_RNA (1)...(19): siRNA sense strand
ccugggaugcacagagaau

SEQ ID NO: 2344973 - RNA, 19 nt, Homo sapiens
  misc_RNA (1)...(19): siRNA sense strand
agugauagugguuggcauu

SEQ ID NO: 2344974 - RNA, 19 nt, Homo sapiens
  misc_RNA (1)...(19): siRNA sense strand
agcaaacgguugaacacaa

SEQ ID NO: 2344975 - RNA, 19 nt, Homo sapiens
  misc_RNA (1)...(19): siRNA sense strand
caaaguugaugaaugccua

SEQ ID NO: 2344976 - RNA, 19 nt, Homo sapiens
  misc_RNA (1)...(19): siRNA sense strand
gcucauuugcuuggugaua

SEQ ID NO: 2344977 - RNA, 19 nt, Homo sapiens
  misc_RNA (1)...(19): siRNA sense strand
aagaagacaaugaaacaga

SEQ ID NO: 2344978 - RNA, 19 nt, Homo sapiens
  misc_RNA (1)...(19): siRNA sense strand
gaggauaagccuaaaauca

SEQ ID NO: 2344979 - RNA, 19 nt, Homo sapiens
  misc_RNA (1)...(19): siRNA sense strand
aagaaauggagcuaaugaa

SEQ ID NO: 2344980 - RNA, 19 nt, Homo sapiens
  misc_RNA (1)...(19): siRNA sense strand
aaagcaagaaguggagaaa

SEQ ID NO: 2344981 - RNA, 19 nt, Homo sapiens
  misc_RNA (1)...(19): siRNA sense strand
gguugaacacaauucuaaa

SEQ ID NO: 2344982 - RNA, 19 nt, Homo sapiens
  misc_RNA (1)...(19): siRNA sense strand
gaauauucaaggaggccga

SEQ ID NO: 2344983 - RNA, 19 nt, Homo sapiens
  misc_RNA (1)...(19): siRNA sense strand
ugggagaugaagcgagaga

SEQ ID NO: 2344984 - RNA, 19 nt, Homo sapiens
  misc_RNA (1)...(19): siRNA sense strand
cgguugaacacaauucuaa

SEQ ID NO: 2344985 - RNA, 19 nt, Homo sapiens
  misc_RNA (1)...(19): siRNA sense strand
aggcucugggcuugggaaa

SEQ ID NO: 2344986 - RNA, 19 nt, Homo sapiens
  misc_RNA (1)...(19): siRNA sense strand
cauaugaauggaacgacaa

SEQ ID NO: 2344987 - RNA, 19 nt, Homo sapiens
  misc_RNA (1)...(19): siRNA sense strand
ggacccuagcauuggaaaa

SEQ ID NO: 2344988 - RNA, 19 nt, Homo sapiens
  misc_RNA (1)...(19): siRNA sense strand
augaauggaacgacaauga

SEQ ID NO: 2344989 - RNA, 19 nt, Homo sapiens
  misc_RNA (1)...(19): siRNA sense strand
ggagaucugaggucggcaa

SEQ ID NO: 2344990 - RNA, 19 nt, Homo sapiens
  misc_RNA (1)...(19): siRNA sense strand
ugggguagauuuuggacaa

SEQ ID NO: 2344991 - RNA, 19 nt, Homo sapiens
  misc_RNA (1)...(19): siRNA sense strand
ccuaauaugacucaaggau

SEQ ID NO: 2344992 - RNA, 19 nt, Homo sapiens
  misc_RNA (1)...(19): siRNA sense strand
aauugaagguggaggaaca

SEQ ID NO: 2344993 - RNA, 19 nt, Homo sapiens
  misc_RNA (1)...(19): siRNA sense strand
gggcaaaagaugaugauau

SEQ ID NO: 2344994 - RNA, 19 nt, Homo sapiens
  misc_RNA (1)...(19): siRNA sense strand
ccaugaaggugcugggagu

SEQ ID NO: 2344995 - RNA, 19 nt, Homo sapiens
  misc_RNA (1)...(19): siRNA sense strand
acucugugguccugggaua

SEQ ID NO: 2344996 - RNA, 19 nt, Homo sapiens
  misc_RNA (1)...(19): siRNA sense strand
aagaaaauguguaggaaca

SEQ ID NO: 2344997 - RNA, 19 nt, Homo sapiens
  misc_RNA (1)...(19): siRNA sense strand
gaagaaaccucaaaggcca

SEQ ID NO: 2344998 - RNA, 19 nt, Homo sapiens
  misc_RNA (1)...(19): siRNA sense strand
cugaagaagaucccagaaa

SEQ ID NO: 2344999 - RNA, 19 nt, Homo sapiens
  misc_RNA (1)...(19): siRNA sense strand
gauugaaggaauugagcau

SEQ ID NO: 2345000 - RNA, 19 nt, Homo sapiens
  misc_RNA (1)...(19): siRNA sense strand
ccaccaaggacaagaagau

SEQ ID NO: 2345001 - RNA, 19 nt, Homo sapiens
  misc_RNA (1)...(19): siRNA sense strand
cugcagaggcucaaagaga

SEQ ID NO: 2345002 - RNA, 19 nt, Homo sapiens
  misc_RNA (1)...(19): siRNA sense strand
ccagaaacaguuaaggcaa

SEQ ID NO: 2345003 - RNA, 19 nt, Homo sapiens
  misc_RNA (1)...(19): siRNA sense strand
cagcacuggacgagaguuu

SEQ ID NO: 2345004 - RNA, 19 nt, Homo sapiens
  misc_RNA (1)...(19): siRNA sense strand
aggcaaucauagagcgcuu

SEQ ID NO: 2345005 - RNA, 19 nt, Homo sapiens
  misc_RNA (1)...(19): siRNA sense strand
cuuugaagauucuggccaa

SEQ ID NO: 2345006 - RNA, 19 nt, Homo sapiens
  misc_RNA (1)...(19): siRNA sense strand
uugaagaagccuacgagaa

SEQ ID NO: 2345007 - RNA, 19 nt, Homo sapiens
  misc_RNA (1)...(19): siRNA sense strand
cauuaagggcuuggcgaaa

SEQ ID NO: 2345008 - RNA, 19 nt, Homo sapiens
  misc_RNA (1)...(19): siRNA sense strand
caacuuaauugaaggugga

SEQ ID NO: 2345009 - RNA, 19 nt, Homo sapiens
  misc_RNA (1)...(19): siRNA sense strand
gcuuggagcaggaguugaa

SEQ ID NO: 2345010 - RNA, 19 nt, Homo sapiens
  misc_RNA (1)...(19): siRNA sense strand
acaaggagauugaaggagu

SEQ ID NO: 2345011 - RNA, 19 nt, Homo sapiens
  misc_RNA (1)...(19): siRNA sense strand
ugaacuuguuggaugaaau

SEQ ID NO: 2345012 - RNA, 19 nt, Homo sapiens
  misc_RNA (1)...(19): siRNA sense strand
caaauugugaagaggucua

SEQ ID NO: 2345013 - RNA, 19 nt, Homo sapiens
  misc_RNA (1)...(19): siRNA sense strand
cugcaaacgggaugagcuu

SEQ ID NO: 2345014 - RNA, 19 nt, Homo sapiens
  misc_RNA (1)...(19): siRNA sense strand
caagugugagggagauaaa

SEQ ID NO: 2345015 - RNA, 19 nt, Homo sapiens
  misc_RNA (1)...(19): siRNA sense strand
gugcauauucagaucaauu

SEQ ID NO: 2345016 - RNA, 19 nt, Homo sapiens
  misc_RNA (1)...(19): siRNA sense strand
accaaggacaagaagauaa

SEQ ID NO: 2345017 - RNA, 19 nt, Homo sapiens
  misc_RNA (1)...(19): siRNA sense strand
gugcagcguaacaaggaaa

SEQ ID NO: 2345018 - RNA, 19 nt, Homo sapiens
  misc_RNA (1)...(19): siRNA sense strand
cuauagucggaguggagaa

SEQ ID NO: 2345019 - RNA, 19 nt, Homo sapiens
  misc_RNA (1)...(19): siRNA sense strand
cccaaacagcugaggccaa

SEQ ID NO: 2345020 - RNA, 19 nt, Homo sapiens
  misc_RNA (1)...(19): siRNA sense strand
gccgaguugugcagcguaa

SEQ ID NO: 2345021 - RNA, 19 nt, Homo sapiens
  misc_RNA (1)...(19): siRNA sense strand
cugaguacuuggauaugaa

SEQ ID NO: 2345022 - RNA, 19 nt, Homo sapiens
  misc_RNA (1)...(19): siRNA sense strand
ucauuaagggcuuggcgaa

SEQ ID NO: 2345023 - RNA, 19 nt, Homo sapiens
  misc_RNA (1)...(19): siRNA sense strand
ggugggaaauacagaagca

SEQ ID NO: 2345024 - RNA, 19 nt, Homo sapiens
  misc_RNA (1)...(19): siRNA sense strand
uggaguuacuguuugacaa

SEQ ID NO: 2345025 - RNA, 19 nt, Homo sapiens
  misc_RNA (1)...(19): siRNA sense strand
ggugaagauccaagauguu

SEQ ID NO: 2345026 - RNA, 19 nt, Homo sapiens
  misc_RNA (1)...(19): siRNA sense strand
uuaacugaguacuuggaua

SEQ ID NO: 2345027 - RNA, 19 nt, Homo sapiens
  misc_RNA (1)...(19): siRNA sense strand
gauugaaggagucacuaaa

SEQ ID NO: 2345028 - RNA, 19 nt, Homo sapiens
  misc_RNA (1)...(19): siRNA sense strand
gcugagaucaacaaggaga

SEQ ID NO: 2345029 - RNA, 19 nt, Homo sapiens
  misc_RNA (1)...(19): siRNA sense strand
agauugaaggagucacuaa

SEQ ID NO: 2345030 - RNA, 19 nt, Homo sapiens
  misc_RNA (1)...(19): siRNA sense strand
cugaaguucuuauugggaa

SEQ ID NO: 2345031 - RNA, 19 nt, Homo sapiens
  misc_RNA (1)...(19): siRNA sense strand
ggaagauaucaaacuguau

SEQ ID NO: 2345032 - RNA, 19 nt, Homo sapiens
  misc_RNA (1)...(19): siRNA sense strand
aauuggauccagaggaaaa

SEQ ID NO: 2345033 - RNA, 19 nt, Homo sapiens
  misc_RNA (1)...(19): siRNA sense strand
agcaggaguugaagcaaau

SEQ ID NO: 2345034 - RNA, 19 nt, Homo sapiens
  misc_RNA (1)...(19): siRNA sense strand
ucucagugaacuugccaaa

SEQ ID NO: 2345035 - RNA, 19 nt, Homo sapiens
  misc_RNA (1)...(19): siRNA sense strand
cuuaauugaagguggagga

SEQ ID NO: 2345036 - RNA, 19 nt, Homo sapiens
  misc_RNA (1)...(19): siRNA sense strand
aagucuuggcugagaucaa

SEQ ID NO: 2345037 - RNA, 19 nt, Homo sapiens
  misc_RNA (1)...(19): siRNA sense strand
agcacaaguuccaguauau

SEQ ID NO: 2345038 - RNA, 19 nt, Homo sapiens
  misc_RNA (1)...(19): siRNA sense strand
guuggaugaaauugagaau

SEQ ID NO: 2345039 - RNA, 19 nt, Homo sapiens
  misc_RNA (1)...(19): siRNA sense strand
ucauagagcgcuuggagca

SEQ ID NO: 2345040 - RNA, 19 nt, Homo sapiens
  misc_RNA (1)...(19): siRNA sense strand
gagugcauauucagaucaa

SEQ ID NO: 2345041 - RNA, 19 nt, Homo sapiens
  misc_RNA (1)...(19): siRNA sense strand
auguggaaaguauggauua

SEQ ID NO: 2345042 - RNA, 19 nt, Homo sapiens
  misc_RNA (1)...(19): siRNA sense strand
gauuuauucaggagauuga

SEQ ID NO: 2345043 - RNA, 19 nt, Homo sapiens
  misc_RNA (1)...(19): siRNA sense strand
acagaagcacagucagcaa

SEQ ID NO: 2345044 - RNA, 19 nt, Homo sapiens
  misc_RNA (1)...(19): siRNA sense strand
aguacuacgagaugcuuua

SEQ ID NO: 2345045 - RNA, 19 nt, Homo sapiens
  misc_RNA (1)...(19): siRNA sense strand
caguuaaggcaaucauaga

SEQ ID NO: 2345046 - RNA, 19 nt, Homo sapiens
  misc_RNA (1)...(19): siRNA sense strand
acuguggauugaaggaauu

SEQ ID NO: 2345047 - RNA, 19 nt, Homo sapiens
  misc_RNA (1)...(19): siRNA sense strand
agaacguuacuguggagaa

SEQ ID NO: 2345048 - RNA, 19 nt, Homo sapiens
  misc_RNA (1)...(19): siRNA sense strand
uggcagauguaugggugaa

SEQ ID NO: 2345049 - RNA, 19 nt, Homo sapiens
  misc_RNA (1)...(19): siRNA sense strand
auguaugggugaagaucca

SEQ ID NO: 2345050 - RNA, 19 nt, Homo sapiens
  misc_RNA (1)...(19): siRNA sense strand
ccaucaagcaagccaccaa

SEQ ID NO: 2345051 - RNA, 19 nt, Homo sapiens
  misc_RNA (1)...(19): siRNA sense strand
cguacggagaggugagaaa

SEQ ID NO: 2345052 - RNA, 19 nt, Homo sapiens
  misc_RNA (1)...(19): siRNA sense strand
cagcaaagccagugccuac

SEQ ID NO: 2345053 - RNA, 19 nt, Homo sapiens
  misc_RNA (1)...(19): siRNA sense strand
acuacuaugccaagcgcaa

SEQ ID NO: 2345054 - RNA, 19 nt, Homo sapiens
  misc_RNA (1)...(19): siRNA sense strand
ccugaagaagugugaggau

SEQ ID NO: 2345055 - RNA, 19 nt, Homo sapiens
  misc_RNA (1)...(19): siRNA sense strand
gugagaaacagcaaagcca

SEQ ID NO: 2345056 - RNA, 19 nt, Homo sapiens
  misc_RNA (1)...(19): siRNA sense strand
aagaacaccucaugaaaua

SEQ ID NO: 2345057 - RNA, 19 nt, Homo sapiens
  misc_RNA (1)...(19): siRNA sense strand
caaagaacaccucaugaaa

SEQ ID NO: 2345058 - RNA, 19 nt, Homo sapiens
  misc_RNA (1)...(19): siRNA sense strand
ucaaagaacaccucaugaa

SEQ ID NO: 2345059 - RNA, 19 nt, Homo sapiens
  misc_RNA (1)...(19): siRNA sense strand
ugccagaagucuagcagau

SEQ ID NO: 2345060 - RNA, 19 nt, Homo sapiens
  misc_RNA (1)...(19): siRNA sense strand
gagccauccucuugagcga

SEQ ID NO: 2345061 - RNA, 19 nt, Homo sapiens
  misc_RNA (1)...(19): siRNA sense strand
acaaugagagggagaaaau

SEQ ID NO: 2345062 - RNA, 19 nt, Homo sapiens
  misc_RNA (1)...(19): siRNA sense strand
cagcaaacugaaagaaauc

SEQ ID NO: 2345063 - RNA, 19 nt, Homo sapiens
  misc_RNA (1)...(19): siRNA sense strand
cuucuuacagaguuggaaa

SEQ ID NO: 2345064 - RNA, 19 nt, Homo sapiens
  misc_RNA (1)...(19): siRNA sense strand
ugcuacaucuuuaggaaau

SEQ ID NO: 2345065 - RNA, 19 nt, Homo sapiens
  misc_RNA (1)...(19): siRNA sense strand
acuuggagaucgugcacau

SEQ ID NO: 2345066 - RNA, 19 nt, Homo sapiens
  misc_RNA (1)...(19): siRNA sense strand
cuggacaaugagagggaga

SEQ ID NO: 2345067 - RNA, 19 nt, Homo sapiens
  misc_RNA (1)...(19): siRNA sense strand
ugggagaguugcugcuaca

SEQ ID NO: 2345068 - RNA, 19 nt, Homo sapiens
  misc_RNA (1)...(19): siRNA sense strand
cugcuacaucuuuaggaaa

SEQ ID NO: 2345069 - RNA, 19 nt, Homo sapiens
  misc_RNA (1)...(19): siRNA sense strand
acacaaauaagaaggccca

SEQ ID NO: 2345070 - RNA, 19 nt, Homo sapiens
  misc_RNA (1)...(19): siRNA sense strand
auuccaagacgaacugaua

SEQ ID NO: 2345071 - RNA, 19 nt, Homo sapiens
  misc_RNA (1)...(19): siRNA sense strand
ucaugaaagaauuggagca

SEQ ID NO: 2345072 - RNA, 19 nt, Homo sapiens
  misc_RNA (1)...(19): siRNA sense strand
uaaugagaagagaaagcaa

SEQ ID NO: 2345073 - RNA, 19 nt, Homo sapiens
  misc_RNA (1)...(19): siRNA sense strand
uggauacauaccagggaau

SEQ ID NO: 2345074 - RNA, 19 nt, Homo sapiens
  misc_RNA (1)...(19): siRNA sense strand
cuuccagauucaagcccua

SEQ ID NO: 2345075 - RNA, 19 nt, Homo sapiens
  misc_RNA (1)...(19): siRNA sense strand
aggggaaguacgugaagaa

SEQ ID NO: 2345076 - RNA, 19 nt, Homo sapiens
  misc_RNA (1)...(19): siRNA sense strand
ccggcaugguccaacaauu

SEQ ID NO: 2345077 - RNA, 19 nt, Homo sapiens
  misc_RNA (1)...(19): siRNA sense strand
augagaagagaaagcaaca

SEQ ID NO: 2345078 - RNA, 19 nt, Homo sapiens
  misc_RNA (1)...(19): siRNA sense strand
ggaagaguauauaugggaa

SEQ ID NO: 2345079 - RNA, 19 nt, Homo sapiens
  misc_RNA (1)...(19): siRNA sense strand
ccauggcaaaggagggaaa

SEQ ID NO: 2345080 - RNA, 19 nt, Homo sapiens
  misc_RNA (1)...(19): siRNA sense strand
cagacauggaagaguauau

SEQ ID NO: 2345081 - RNA, 19 nt, Homo sapiens
  misc_RNA (1)...(19): siRNA sense strand
ucucugcagucgagggcaa

SEQ ID NO: 2345082 - RNA, 19 nt, Homo sapiens
  misc_RNA (1)...(19): siRNA sense strand
agaugaaagcugcugagaa

SEQ ID NO: 2345083 - RNA, 19 nt, Homo sapiens
  misc_RNA (1)...(19): siRNA sense strand
auuuaaacccucugcagua

SEQ ID NO: 2345084 - RNA, 19 nt, Homo sapiens
  misc_RNA (1)...(19): siRNA sense strand
cgugaagagacuauuaaau

SEQ ID NO: 2345085 - RNA, 19 nt, Homo sapiens
  misc_RNA (1)...(19): siRNA sense strand
aauacugaagaaugggaaa

SEQ ID NO: 2345086 - RNA, 19 nt, Homo sapiens
  misc_RNA (1)...(19): siRNA sense strand
acgagaaaugugagaagca

SEQ ID NO: 2345087 - RNA, 19 nt, Homo sapiens
  misc_RNA (1)...(19): siRNA sense strand
agucuuaagaguaaagcuu

SEQ ID NO: 2345088 - RNA, 19 nt, Homo sapiens
  misc_RNA (1)...(19): siRNA sense strand
gagcgauacugcaagacca

SEQ ID NO: 2345089 - RNA, 19 nt, Homo sapiens
  misc_RNA (1)...(19): siRNA sense strand
cugaagcagacauggaaga

SEQ ID NO: 2345090 - RNA, 19 nt, Homo sapiens
  misc_RNA (1)...(19): siRNA sense strand
aagaagagcuccuugguac

SEQ ID NO: 2345091 - RNA, 19 nt, Homo sapiens
  misc_RNA (1)...(19): siRNA sense strand
cacgcaaagaagaaauuaa

SEQ ID NO: 2345092 - RNA, 19 nt, Homo sapiens
  misc_RNA (1)...(19): siRNA sense strand
aaaguaagacugaagcaga

SEQ ID NO: 2345093 - RNA, 19 nt, Homo sapiens
  misc_RNA (1)...(19): siRNA sense strand
cugugaagcccuuaaagau

SEQ ID NO: 2345094 - RNA, 19 nt, Homo sapiens
  misc_RNA (1)...(19): siRNA sense strand
gaauacugaagaaugggaa

SEQ ID NO: 2345095 - RNA, 19 nt, Homo sapiens
  misc_RNA (1)...(19): siRNA sense strand
ggcacuaccuccuaggaca

SEQ ID NO: 2345096 - RNA, 19 nt, Homo sapiens
  misc_RNA (1)...(19): siRNA sense strand
auuuagaugaucacgcaaa

SEQ ID NO: 2345097 - RNA, 19 nt, Homo sapiens
  misc_RNA (1)...(19): siRNA sense strand
ccgugaagagacuauuaaa

SEQ ID NO: 2345098 - RNA, 19 nt, Homo sapiens
  misc_RNA (1)...(19): siRNA sense strand
ccccagagcacgaguagua

SEQ ID NO: 2345099 - RNA, 19 nt, Homo sapiens
  misc_RNA (1)...(19): siRNA sense strand
gaucacgcaaagaagaaau

SEQ ID NO: 2345100 - RNA, 19 nt, Homo sapiens
  misc_RNA (1)...(19): siRNA sense strand
aauuaaacuuguaggagag

SEQ ID NO: 2345101 - RNA, 19 nt, Homo sapiens
  misc_RNA (1)...(19): siRNA sense strand
gagacuauuaaaugugaca

SEQ ID NO: 2345102 - RNA, 19 nt, Homo sapiens
  misc_RNA (1)...(19): siRNA sense strand
guuaugagguggagcgcau

SEQ ID NO: 2345103 - RNA, 19 nt, Homo sapiens
  misc_RNA (1)...(19): siRNA sense strand
ggaggaagcugcaucguga

SEQ ID NO: 2345104 - RNA, 19 nt, Homo sapiens
  misc_RNA (1)...(19): siRNA sense strand
gggauggacuagaugagca

SEQ ID NO: 2345105 - RNA, 19 nt, Homo sapiens
  misc_RNA (1)...(19): siRNA sense strand
gcacaaaguguacaaggga

SEQ ID NO: 2345106 - RNA, 19 nt, Homo sapiens
  misc_RNA (1)...(19): siRNA sense strand
gcaaguucguguacagcca

SEQ ID NO: 2345107 - RNA, 19 nt, Homo sapiens
  misc_RNA (1)...(19): siRNA sense strand
cagcacuguuggagcaagu

SEQ ID NO: 2345108 - RNA, 19 nt, Homo sapiens
  misc_RNA (1)...(19): siRNA sense strand
gugcccaggaaauggcuaa

SEQ ID NO: 2345109 - RNA, 19 nt, Homo sapiens
  misc_RNA (1)...(19): siRNA sense strand
agguggagcgcaugcacaa

SEQ ID NO: 2345110 - RNA, 19 nt, Homo sapiens
  misc_RNA (1)...(19): siRNA sense strand
agguguauuccgaacuuaa

SEQ ID NO: 2345111 - RNA, 19 nt, Homo sapiens
  misc_RNA (1)...(19): siRNA sense strand
cggaauaccgucuggcugu

SEQ ID NO: 2345112 - RNA, 19 nt, Homo sapiens
  misc_RNA (1)...(19): siRNA sense strand
gggacaccuuuguggacca

SEQ ID NO: 2345113 - RNA, 19 nt, Homo sapiens
  misc_RNA (1)...(19): siRNA sense strand
gggugaacguggagagacu

SEQ ID NO: 2345114 - RNA, 19 nt, Homo sapiens
  misc_RNA (1)...(19): siRNA sense strand
aagaagaacugguggagca

SEQ ID NO: 2345115 - RNA, 19 nt, Homo sapiens
  misc_RNA (1)...(19): siRNA sense strand
uggaaaggaugguggacga

SEQ ID NO: 2345116 - RNA, 19 nt, Homo sapiens
  misc_RNA (1)...(19): siRNA sense strand
ugggcaacguggugagaga

SEQ ID NO: 2345117 - RNA, 19 nt, Homo sapiens
  misc_RNA (1)...(19): siRNA sense strand
agagaggccugaagggaca

SEQ ID NO: 2345118 - RNA, 19 nt, Homo sapiens
  misc_RNA (1)...(19): siRNA sense strand
ggcuuaggcccgagagaga

SEQ ID NO: 2345119 - RNA, 19 nt, Homo sapiens
  misc_RNA (1)...(19): siRNA sense strand
agagcaaggagaagaaaca

SEQ ID NO: 2345120 - RNA, 19 nt, Homo sapiens
  misc_RNA (1)...(19): siRNA sense strand
gggugaucguggugagacu

SEQ ID NO: 2345121 - RNA, 19 nt, Homo sapiens
  misc_RNA (1)...(19): siRNA sense strand
cugcuggagucaaggguga

SEQ ID NO: 2345122 - RNA, 19 nt, Homo sapiens
  misc_RNA (1)...(19): siRNA sense strand
gggaguaaugcaaggacca

SEQ ID NO: 2345123 - RNA, 19 nt, Homo sapiens
  misc_RNA (1)...(19): siRNA sense strand
ccuggagacaucaaggaua

SEQ ID NO: 2345124 - RNA, 19 nt, Homo sapiens
  misc_RNA (1)...(19): siRNA sense strand
cggaaggcucccagaacau

SEQ ID NO: 2345125 - RNA, 19 nt, Homo sapiens
  misc_RNA (1)...(19): siRNA sense strand
uggcaagcaaggagacaga

SEQ ID NO: 2345126 - RNA, 19 nt, Homo sapiens
  misc_RNA (1)...(19): siRNA sense strand
aggccuuccuggugucaaa

SEQ ID NO: 2345127 - RNA, 19 nt, Homo sapiens
  misc_RNA (1)...(19): siRNA sense strand
cgaaaggucagacggguga

SEQ ID NO: 2345128 - RNA, 19 nt, Homo sapiens
  misc_RNA (1)...(19): siRNA sense strand
cagcuauggagaugacaau

SEQ ID NO: 2345129 - RNA, 19 nt, Homo sapiens
  misc_RNA (1)...(19): siRNA sense strand
cuggaggauuugaugaaaa

SEQ ID NO: 2345130 - RNA, 19 nt, Homo sapiens
  misc_RNA (1)...(19): siRNA sense strand
aggcaauccuggugaaccu

SEQ ID NO: 2345131 - RNA, 19 nt, Homo sapiens
  misc_RNA (1)...(19): siRNA sense strand
ccaaaggugccaacgguga

SEQ ID NO: 2345132 - RNA, 19 nt, Homo sapiens
  misc_RNA (1)...(19): siRNA sense strand
cuccaggucuucagggaau

SEQ ID NO: 2345133 - RNA, 19 nt, Homo sapiens
  misc_RNA (1)...(19): siRNA sense strand
aggaauucgguguggacau

SEQ ID NO: 2345134 - RNA, 19 nt, Homo sapiens
  misc_RNA (1)...(19): siRNA sense strand
aggaccaaagggacagaaa

SEQ ID NO: 2345135 - RNA, 19 nt, Homo sapiens
  misc_RNA (1)...(19): siRNA sense strand
caaaggucacagagguuau

SEQ ID NO: 2345136 - RNA, 19 nt, Homo sapiens
  misc_RNA (1)...(19): siRNA sense strand
cucaaggauuucaaggcaa

SEQ ID NO: 2345137 - RNA, 19 nt, Homo sapiens
  misc_RNA (1)...(19): siRNA sense strand
caacguggugagagaggau

SEQ ID NO: 2345138 - RNA, 19 nt, Homo sapiens
  misc_RNA (1)...(19): siRNA sense strand
caaagggacagaaaggaga

SEQ ID NO: 2345139 - RNA, 19 nt, Homo sapiens
  misc_RNA (1)...(19): siRNA sense strand
cgucggucccucuggcaaa

SEQ ID NO: 2345140 - RNA, 19 nt, Homo sapiens
  misc_RNA (1)...(19): siRNA sense strand
ggcuggaggauuugaugaa

SEQ ID NO: 2345141 - RNA, 19 nt, Homo sapiens
  misc_RNA (1)...(19): siRNA sense strand
agauccgggcagagggcaa

SEQ ID NO: 2345142 - RNA, 19 nt, Homo sapiens
  misc_RNA (1)...(19): siRNA sense strand
gaagaaggcaagagaggug

SEQ ID NO: 2345143 - RNA, 19 nt, Homo sapiens
  misc_RNA (1)...(19): siRNA sense strand
gguggagcagcaagagcaa

SEQ ID NO: 2345144 - RNA, 19 nt, Homo sapiens
  misc_RNA (1)...(19): siRNA sense strand
ccucaaggauuucaaggca

SEQ ID NO: 2345145 - RNA, 19 nt, Homo sapiens
  misc_RNA (1)...(19): siRNA sense strand
caaaggugcucgaggagac

SEQ ID NO: 2345146 - RNA, 19 nt, Homo sapiens
  misc_RNA (1)...(19): siRNA sense strand
acaaaggagaggcuggaga

SEQ ID NO: 2345147 - RNA, 19 nt, Homo sapiens
  misc_RNA (1)...(19): siRNA sense strand
gucaaaggucacagagguu

SEQ ID NO: 2345148 - RNA, 19 nt, Homo sapiens
  misc_RNA (1)...(19): siRNA sense strand
gugaagggugagagugguu

SEQ ID NO: 2345149 - RNA, 19 nt, Homo sapiens
  misc_RNA (1)...(19): siRNA sense strand
ccgcuggugaagaaggcaa

SEQ ID NO: 2345150 - RNA, 19 nt, Homo sapiens
  misc_RNA (1)...(19): siRNA sense strand
ccaagggagccaacgguga

SEQ ID NO: 2345151 - RNA, 19 nt, Homo sapiens
  misc_RNA (1)...(19): siRNA sense strand
ccguggacgaucaggcgaa

SEQ ID NO: 2345152 - RNA, 19 nt, Homo sapiens
  misc_RNA (1)...(19): siRNA sense strand
gggacagaaaggagaaccu

SEQ ID NO: 2345153 - RNA, 19 nt, Homo sapiens
  misc_RNA (1)...(19): siRNA sense strand
cccuggaacagauggaauu

SEQ ID NO: 2345154 - RNA, 19 nt, Homo sapiens
  misc_RNA (1)...(19): siRNA sense strand
aggcaacgauggucagcca

SEQ ID NO: 2345155 - RNA, 19 nt, Homo sapiens
  misc_RNA (1)...(19): siRNA sense strand
ccagaggugacaaaggaga

SEQ ID NO: 2345156 - RNA, 19 nt, Homo sapiens
  misc_RNA (1)...(19): siRNA sense strand
ucaagaaggcccugcucau

SEQ ID NO: 2345157 - RNA, 19 nt, Homo sapiens
  misc_RNA (1)...(19): siRNA sense strand
aggggaucguggugacaaa

SEQ ID NO: 2345158 - RNA, 19 nt, Homo sapiens
  misc_RNA (1)...(19): siRNA sense strand
aaccaggaccaaagggaca

SEQ ID NO: 2345159 - RNA, 19 nt, Homo sapiens
  misc_RNA (1)...(19): siRNA sense strand
uggugaaccuggugaaccu

SEQ ID NO: 2345160 - RNA, 19 nt, Homo sapiens
  misc_RNA (1)...(19): siRNA sense strand
uggugaagaaggcaagaga

SEQ ID NO: 2345161 - RNA, 19 nt, Homo sapiens
  misc_RNA (1)...(19): siRNA sense strand
aagaacugguggagcagca

SEQ ID NO: 2345162 - RNA, 19 nt, Homo sapiens
  misc_RNA (1)...(19): siRNA sense strand
gggugaacguggagagacu

SEQ ID NO: 2345163 - RNA, 19 nt, Homo sapiens
  misc_RNA (1)...(19): siRNA sense strand
aagaagaacugguggagca

SEQ ID NO: 2345164 - RNA, 19 nt, Homo sapiens
  misc_RNA (1)...(19): siRNA sense strand
uggaaaggaugguggacga

SEQ ID NO: 2345165 - RNA, 19 nt, Homo sapiens
  misc_RNA (1)...(19): siRNA sense strand
ugggcaacguggugagaga

SEQ ID NO: 2345166 - RNA, 19 nt, Homo sapiens
  misc_RNA (1)...(19): siRNA sense strand
agagaggccugaagggaca

SEQ ID NO: 2345167 - RNA, 19 nt, Homo sapiens
  misc_RNA (1)...(19): siRNA sense strand
ggcuuaggcccgagagaga

SEQ ID NO: 2345168 - RNA, 19 nt, Homo sapiens
  misc_RNA (1)...(19): siRNA sense strand
agagcaaggagaagaaaca

SEQ ID NO: 2345169 - RNA, 19 nt, Homo sapiens
  misc_RNA (1)...(19): siRNA sense strand
gggugaucguggugagacu

SEQ ID NO: 2345170 - RNA, 19 nt, Homo sapiens
  misc_RNA (1)...(19): siRNA sense strand
cugcuggagucaaggguga

SEQ ID NO: 2345171 - RNA, 19 nt, Homo sapiens
  misc_RNA (1)...(19): siRNA sense strand
gggaguaaugcaaggacca

SEQ ID NO: 2345172 - RNA, 19 nt, Homo sapiens
  misc_RNA (1)...(19): siRNA sense strand
ccuggagacaucaaggaua

SEQ ID NO: 2345173 - RNA, 19 nt, Homo sapiens
  misc_RNA (1)...(19): siRNA sense strand
cggaaggcucccagaacau

SEQ ID NO: 2345174 - RNA, 19 nt, Homo sapiens
  misc_RNA (1)...(19): siRNA sense strand
uggcaagcaaggagacaga

SEQ ID NO: 2345175 - RNA, 19 nt, Homo sapiens
  misc_RNA (1)...(19): siRNA sense strand
aggccuuccuggugucaaa

SEQ ID NO: 2345176 - RNA, 19 nt, Homo sapiens
  misc_RNA (1)...(19): siRNA sense strand
cgaaaggucagacggguga

SEQ ID NO: 2345177 - RNA, 19 nt, Homo sapiens
  misc_RNA (1)...(19): siRNA sense strand
cagcuauggagaugacaau

SEQ ID NO: 2345178 - RNA, 19 nt, Homo sapiens
  misc_RNA (1)...(19): siRNA sense strand
cuggaggauuugaugaaaa

SEQ ID NO: 2345179 - RNA, 19 nt, Homo sapiens
  misc_RNA (1)...(19): siRNA sense strand
aggcaauccuggugaaccu

SEQ ID NO: 2345180 - RNA, 19 nt, Homo sapiens
  misc_RNA (1)...(19): siRNA sense strand
ccaaaggugccaacgguga

SEQ ID NO: 2345181 - RNA, 19 nt, Homo sapiens
  misc_RNA (1)...(19): siRNA sense strand
cuccaggucuucagggaau

SEQ ID NO: 2345182 - RNA, 19 nt, Homo sapiens
  misc_RNA (1)...(19): siRNA sense strand
aggaauucgguguggacau

SEQ ID NO: 2345183 - RNA, 19 nt, Homo sapiens
  misc_RNA (1)...(19): siRNA sense strand
aggaccaaagggacagaaa

SEQ ID NO: 2345184 - RNA, 19 nt, Homo sapiens
  misc_RNA (1)...(19): siRNA sense strand
caaaggucacagagguuau

SEQ ID NO: 2345185 - RNA, 19 nt, Homo sapiens
  misc_RNA (1)...(19): siRNA sense strand
cucaaggauuucaaggcaa

SEQ ID NO: 2345186 - RNA, 19 nt, Homo sapiens
  misc_RNA (1)...(19): siRNA sense strand
caacguggugagagaggau

SEQ ID NO: 2345187 - RNA, 19 nt, Homo sapiens
  misc_RNA (1)...(19): siRNA sense strand
caaagggacagaaaggaga

SEQ ID NO: 2345188 - RNA, 19 nt, Homo sapiens
  misc_RNA (1)...(19): siRNA sense strand
cgucggucccucuggcaaa

SEQ ID NO: 2345189 - RNA, 19 nt, Homo sapiens
  misc_RNA (1)...(19): siRNA sense strand
ggcuggaggauuugaugaa

SEQ ID NO: 2345190 - RNA, 19 nt, Homo sapiens
  misc_RNA (1)...(19): siRNA sense strand
agauccgggcagagggcaa

SEQ ID NO: 2345191 - RNA, 19 nt, Homo sapiens
  misc_RNA (1)...(19): siRNA sense strand
gaagaaggcaagagaggug

SEQ ID NO: 2345192 - RNA, 19 nt, Homo sapiens
  misc_RNA (1)...(19): siRNA sense strand
gguggagcagcaagagcaa

SEQ ID NO: 2345193 - RNA, 19 nt, Homo sapiens
  misc_RNA (1)...(19): siRNA sense strand
ccucaaggauuucaaggca

SEQ ID NO: 2345194 - RNA, 19 nt, Homo sapiens
  misc_RNA (1)...(19): siRNA sense strand
caaaggugcucgaggagac

SEQ ID NO: 2345195 - RNA, 19 nt, Homo sapiens
  misc_RNA (1)...(19): siRNA sense strand
acaaaggagaggcuggaga

SEQ ID NO: 2345196 - RNA, 19 nt, Homo sapiens
  misc_RNA (1)...(19): siRNA sense strand
gucaaaggucacagagguu

SEQ ID NO: 2345197 - RNA, 19 nt, Homo sapiens
  misc_RNA (1)...(19): siRNA sense strand
gugaagggugagagugguu

SEQ ID NO: 2345198 - RNA, 19 nt, Homo sapiens
  misc_RNA (1)...(19): siRNA sense strand
ccgcuggugaagaaggcaa

SEQ ID NO: 2345199 - RNA, 19 nt, Homo sapiens
  misc_RNA (1)...(19): siRNA sense strand
ccaagggagccaacgguga

SEQ ID NO: 2345200 - RNA, 19 nt, Homo sapiens
  misc_RNA (1)...(19): siRNA sense strand
ccguggacgaucaggcgaa

SEQ ID NO: 2345201 - RNA, 19 nt, Homo sapiens
  misc_RNA (1)...(19): siRNA sense strand
gggacagaaaggagaaccu

SEQ ID NO: 2345202 - RNA, 19 nt, Homo sapiens
  misc_RNA (1)...(19): siRNA sense strand
cccuggaacagauggaauu

SEQ ID NO: 2345203 - RNA, 19 nt, Homo sapiens
  misc_RNA (1)...(19): siRNA sense strand
aggcaacgauggucagcca

SEQ ID NO: 2345204 - RNA, 19 nt, Homo sapiens
  misc_RNA (1)...(19): siRNA sense strand
ccagaggugacaaaggaga

SEQ ID NO: 2345205 - RNA, 19 nt, Homo sapiens
  misc_RNA (1)...(19): siRNA sense strand
ucaagaaggcccugcucau

SEQ ID NO: 2345206 - RNA, 19 nt, Homo sapiens
  misc_RNA (1)...(19): siRNA sense strand
aggggaucguggugacaaa

SEQ ID NO: 2345207 - RNA, 19 nt, Homo sapiens
  misc_RNA (1)...(19): siRNA sense strand
aaccaggaccaaagggaca

SEQ ID NO: 2345208 - RNA, 19 nt, Homo sapiens
  misc_RNA (1)...(19): siRNA sense strand
uggugaaccuggugaaccu

SEQ ID NO: 2345209 - RNA, 19 nt, Homo sapiens
  misc_RNA (1)...(19): siRNA sense strand
uggugaagaaggcaagaga

SEQ ID NO: 2345210 - RNA, 19 nt, Homo sapiens
  misc_RNA (1)...(19): siRNA sense strand
aagaacugguggagcagca

SEQ ID NO: 2345211 - RNA, 19 nt, Homo sapiens
  misc_RNA (1)...(19): siRNA sense strand
cagagaaauuucauggaca

SEQ ID NO: 2345212 - RNA, 19 nt, Homo sapiens
  misc_RNA (1)...(19): siRNA sense strand
aagacacagaagagaauaa

SEQ ID NO: 2345213 - RNA, 19 nt, Homo sapiens
  misc_RNA (1)...(19): siRNA sense strand
uccaguuauuacagagaaa

SEQ ID NO: 2345214 - RNA, 19 nt, Homo sapiens
  misc_RNA (1)...(19): siRNA sense strand
uuggauauuuagaggacau

SEQ ID NO: 2345215 - RNA, 19 nt, Homo sapiens
  misc_RNA (1)...(19): siRNA sense strand
uugaagacacagaagagaa

SEQ ID NO: 2345216 - RNA, 19 nt, Homo sapiens
  misc_RNA (1)...(19): siRNA sense strand
aggaugaaguggcugguga

SEQ ID NO: 2345217 - RNA, 19 nt, Homo sapiens
  misc_RNA (1)...(19): siRNA sense strand
ccacaacauuacagcacca

SEQ ID NO: 2345218 - RNA, 19 nt, Homo sapiens
  misc_RNA (1)...(19): siRNA sense strand
ccauaaggaugaaguggcu

SEQ ID NO: 2345219 - RNA, 19 nt, Homo sapiens
  misc_RNA (1)...(19): siRNA sense strand
augaagagcugaaugccaa

SEQ ID NO: 2345220 - RNA, 19 nt, Homo sapiens
  misc_RNA (1)...(19): siRNA sense strand
ugaaagaggaagaagugga

SEQ ID NO: 2345221 - RNA, 19 nt, Homo sapiens
  misc_RNA (1)...(19): siRNA sense strand
caaggaaggcaauggcaca

SEQ ID NO: 2345222 - RNA, 19 nt, Homo sapiens
  misc_RNA (1)...(19): siRNA sense strand
gugaaaagaugaaagagga

SEQ ID NO: 2345223 - RNA, 19 nt, Homo sapiens
  misc_RNA (1)...(19): siRNA sense strand
agaugaaagaggaagaagu

SEQ ID NO: 2345224 - RNA, 19 nt, Homo sapiens
  misc_RNA (1)...(19): siRNA sense strand
ugaaaagaugaaagaggaa

SEQ ID NO: 2345225 - RNA, 19 nt, Homo sapiens
  misc_RNA (1)...(19): siRNA sense strand
aggaagaaguggaagcccu

SEQ ID NO: 2345226 - RNA, 19 nt, Homo sapiens
  misc_RNA (1)...(19): siRNA sense strand
ccuuaagccaggucgguga

SEQ ID NO: 2345227 - RNA, 19 nt, Homo sapiens
  misc_RNA (1)...(19): siRNA sense strand
gagcugaaugccaagaaaa

SEQ ID NO: 2345228 - RNA, 19 nt, Homo sapiens
  misc_RNA (1)...(19): siRNA sense strand
aaaagaugaaagaggaaga

SEQ ID NO: 2345229 - RNA, 19 nt, Homo sapiens
  misc_RNA (1)...(19): siRNA sense strand
augaagagcugaaugccaa

SEQ ID NO: 2345230 - RNA, 19 nt, Homo sapiens
  misc_RNA (1)...(19): siRNA sense strand
ugaaagaggaagaagugga

SEQ ID NO: 2345231 - RNA, 19 nt, Homo sapiens
  misc_RNA (1)...(19): siRNA sense strand
caaggaaggcaauggcaca

SEQ ID NO: 2345232 - RNA, 19 nt, Homo sapiens
  misc_RNA (1)...(19): siRNA sense strand
gugaaaagaugaaagagga

SEQ ID NO: 2345233 - RNA, 19 nt, Homo sapiens
  misc_RNA (1)...(19): siRNA sense strand
agaugaaagaggaagaagu

SEQ ID NO: 2345234 - RNA, 19 nt, Homo sapiens
  misc_RNA (1)...(19): siRNA sense strand
ugaaaagaugaaagaggaa

SEQ ID NO: 2345235 - RNA, 19 nt, Homo sapiens
  misc_RNA (1)...(19): siRNA sense strand
aggaagaaguggaagcccu

SEQ ID NO: 2345236 - RNA, 19 nt, Homo sapiens
  misc_RNA (1)...(19): siRNA sense strand
ccuuaagccaggucgguga

SEQ ID NO: 2345237 - RNA, 19 nt, Homo sapiens
  misc_RNA (1)...(19): siRNA sense strand
gagcugaaugccaagaaaa

SEQ ID NO: 2345238 - RNA, 19 nt, Homo sapiens
  misc_RNA (1)...(19): siRNA sense strand
aaaagaugaaagaggaaga

SEQ ID NO: 2345239 - RNA, 19 nt, Homo sapiens
  misc_RNA (1)...(19): siRNA sense strand
augaagagcugaaggacga

SEQ ID NO: 2345240 - RNA, 19 nt, Homo sapiens
  misc_RNA (1)...(19): siRNA sense strand
ucuacaugcugaagggcaa

SEQ ID NO: 2345241 - RNA, 19 nt, Homo sapiens
  misc_RNA (1)...(19): siRNA sense strand
gcugugaggaugacggcua

SEQ ID NO: 2345242 - RNA, 19 nt, Homo sapiens
  misc_RNA (1)...(19): siRNA sense strand
aggcuauggaagaagauau

SEQ ID NO: 2345243 - RNA, 19 nt, Homo sapiens
  misc_RNA (1)...(19): siRNA sense strand
ugacugugcuagaugcaga

SEQ ID NO: 2345244 - RNA, 19 nt, Homo sapiens
  misc_RNA (1)...(19): siRNA sense strand
aguaugaagagcugaagga

SEQ ID NO: 2345245 - RNA, 19 nt, Homo sapiens
  misc_RNA (1)...(19): siRNA sense strand
uuguggaggcuauggaaga

SEQ ID NO: 2345246 - RNA, 19 nt, Homo sapiens
  misc_RNA (1)...(19): siRNA sense strand
augaagagcugaaggacga

SEQ ID NO: 2345247 - RNA, 19 nt, Homo sapiens
  misc_RNA (1)...(19): siRNA sense strand
ucuacaugcugaagggcaa

SEQ ID NO: 2345248 - RNA, 19 nt, Homo sapiens
  misc_RNA (1)...(19): siRNA sense strand
gcugugaggaugacggcua

SEQ ID NO: 2345249 - RNA, 19 nt, Homo sapiens
  misc_RNA (1)...(19): siRNA sense strand
aggcuauggaagaagauau

SEQ ID NO: 2345250 - RNA, 19 nt, Homo sapiens
  misc_RNA (1)...(19): siRNA sense strand
ugacugugcuagaugcaga

SEQ ID NO: 2345251 - RNA, 19 nt, Homo sapiens
  misc_RNA (1)...(19): siRNA sense strand
aguaugaagagcugaagga

SEQ ID NO: 2345252 - RNA, 19 nt, Homo sapiens
  misc_RNA (1)...(19): siRNA sense strand
uuguggaggcuauggaaga

SEQ ID NO: 2345253 - RNA, 19 nt, Homo sapiens
  misc_RNA (1)...(19): siRNA sense strand
augaagagcugaaggacga

SEQ ID NO: 2345254 - RNA, 19 nt, Homo sapiens
  misc_RNA (1)...(19): siRNA sense strand
ucuacaugcugaagggcaa

SEQ ID NO: 2345255 - RNA, 19 nt, Homo sapiens
  misc_RNA (1)...(19): siRNA sense strand
gcugugaggaugacggcua

SEQ ID NO: 2345256 - RNA, 19 nt, Homo sapiens
  misc_RNA (1)...(19): siRNA sense strand
aggcuauggaagaagauau

SEQ ID NO: 2345257 - RNA, 19 nt, Homo sapiens
  misc_RNA (1)...(19): siRNA sense strand
ugacugugcuagaugcaga

SEQ ID NO: 2345258 - RNA, 19 nt, Homo sapiens
  misc_RNA (1)...(19): siRNA sense strand
aguaugaagagcugaagga

SEQ ID NO: 2345259 - RNA, 19 nt, Homo sapiens
  misc_RNA (1)...(19): siRNA sense strand
uuguggaggcuauggaaga

SEQ ID NO: 2345260 - RNA, 19 nt, Homo sapiens
  misc_RNA (1)...(19): siRNA sense strand
ccacuauuccacagagaaa

SEQ ID NO: 2345261 - RNA, 19 nt, Homo sapiens
  misc_RNA (1)...(19): siRNA sense strand
ccagcaagaaaguggcaaa

SEQ ID NO: 2345262 - RNA, 19 nt, Homo sapiens
  misc_RNA (1)...(19): siRNA sense strand
aggcagaacgcauggguuu

SEQ ID NO: 2345263 - RNA, 19 nt, Homo sapiens
  misc_RNA (1)...(19): siRNA sense strand
agggcaagcuacagaaaga

SEQ ID NO: 2345264 - RNA, 19 nt, Homo sapiens
  misc_RNA (1)...(19): siRNA sense strand
acaagaagcgagagaggau

SEQ ID NO: 2345265 - RNA, 19 nt, Homo sapiens
  misc_RNA (1)...(19): siRNA sense strand
uggccgagaucaaggagaa

SEQ ID NO: 2345266 - RNA, 19 nt, Homo sapiens
  misc_RNA (1)...(19): siRNA sense strand
ggcuaugggaacuggauua

SEQ ID NO: 2345267 - RNA, 19 nt, Homo sapiens
  misc_RNA (1)...(19): siRNA sense strand
gggagaacgagaaggcaga

SEQ ID NO: 2345268 - RNA, 19 nt, Homo sapiens
  misc_RNA (1)...(19): siRNA sense strand
ccauauggcauuugacaga

SEQ ID NO: 2345269 - RNA, 19 nt, Homo sapiens
  misc_RNA (1)...(19): siRNA sense strand
acagaaagaggcaggaaca

SEQ ID NO: 2345270 - RNA, 19 nt, Homo sapiens
  misc_RNA (1)...(19): siRNA sense strand
gaagcaagaaaguggccaa

SEQ ID NO: 2345271 - RNA, 19 nt, Homo sapiens
  misc_RNA (1)...(19): siRNA sense strand
cuaugaaagccaugacaau

SEQ ID NO: 2345272 - RNA, 19 nt, Homo sapiens
  misc_RNA (1)...(19): siRNA sense strand
ggauaugggcuaugggaac

SEQ ID NO: 2345273 - RNA, 19 nt, Homo sapiens
  misc_RNA (1)...(19): siRNA sense strand
gcuucaacacucugacuaa

SEQ ID NO: 2345274 - RNA, 19 nt, Homo sapiens
  misc_RNA (1)...(19): siRNA sense strand
cagcuugggaacagggaau

SEQ ID NO: 2345275 - RNA, 19 nt, Homo sapiens
  misc_RNA (1)...(19): siRNA sense strand
cuacagugaguuaaugaaa

SEQ ID NO: 2345276 - RNA, 19 nt, Homo sapiens
  misc_RNA (1)...(19): siRNA sense strand
gccugaaggauaugggcua

SEQ ID NO: 2345277 - RNA, 19 nt, Homo sapiens
  misc_RNA (1)...(19): siRNA sense strand
gggacuccgaagaaagaaa

SEQ ID NO: 2345278 - RNA, 19 nt, Homo sapiens
  misc_RNA (1)...(19): siRNA sense strand
agaaagaaaucaaucgagu

SEQ ID NO: 2345279 - RNA, 19 nt, Homo sapiens
  misc_RNA (1)...(19): siRNA sense strand
ugacagacaagaagcgaga

SEQ ID NO: 2345280 - RNA, 19 nt, Homo sapiens
  misc_RNA (1)...(19): siRNA sense strand
caaagaagggcaagcuaca

SEQ ID NO: 2345281 - RNA, 19 nt, Homo sapiens
  misc_RNA (1)...(19): siRNA sense strand
uagacauggccgagaucaa

SEQ ID NO: 2345282 - RNA, 19 nt, Homo sapiens
  misc_RNA (1)...(19): siRNA sense strand
agagaaagaaucagagaag

SEQ ID NO: 2345283 - RNA, 19 nt, Homo sapiens
  misc_RNA (1)...(19): siRNA sense strand
agaaagaaucagagaagac

SEQ ID NO: 2345284 - RNA, 19 nt, Homo sapiens
  misc_RNA (1)...(19): siRNA sense strand
ggagaaaaucugcgacuau

SEQ ID NO: 2345285 - RNA, 19 nt, Homo sapiens
  misc_RNA (1)...(19): siRNA sense strand
aggcaauccgggaagacua

SEQ ID NO: 2345286 - RNA, 19 nt, Homo sapiens
  misc_RNA (1)...(19): siRNA sense strand
ggaaccugucauaaaguua

SEQ ID NO: 2345287 - RNA, 19 nt, Homo sapiens
  misc_RNA (1)...(19): siRNA sense strand
cagagaaagaaucagagaa

SEQ ID NO: 2345288 - RNA, 19 nt, Homo sapiens
  misc_RNA (1)...(19): siRNA sense strand
gaauaugcccaguucgcua

SEQ ID NO: 2345289 - RNA, 19 nt, Homo sapiens
  misc_RNA (1)...(19): siRNA sense strand
gugcuaauugacauggaaa

SEQ ID NO: 2345290 - RNA, 19 nt, Homo sapiens
  misc_RNA (1)...(19): siRNA sense strand
agaaaguggcaaagcagau

SEQ ID NO: 2345291 - RNA, 19 nt, Homo sapiens
  misc_RNA (1)...(19): siRNA sense strand
ccgcagaggaagccaugaa

SEQ ID NO: 2345292 - RNA, 19 nt, Homo sapiens
  misc_RNA (1)...(19): siRNA sense strand
ggagaacggagaaggcaca

SEQ ID NO: 2345293 - RNA, 19 nt, Homo sapiens
  misc_RNA (1)...(19): siRNA sense strand
cgggaagacuaaggagaca

SEQ ID NO: 2345294 - RNA, 19 nt, Homo sapiens
  misc_RNA (1)...(19): siRNA sense strand
ugacagagugccagcugaa

SEQ ID NO: 2345295 - RNA, 19 nt, Homo sapiens
  misc_RNA (1)...(19): siRNA sense strand
agaaccagcaagacugaaa

SEQ ID NO: 2345296 - RNA, 19 nt, Homo sapiens
  misc_RNA (1)...(19): siRNA sense strand
agccaaggacaguggaaaa

SEQ ID NO: 2345297 - RNA, 19 nt, Homo sapiens
  misc_RNA (1)...(19): siRNA sense strand
ccuacaagaaacugacaga

SEQ ID NO: 2345298 - RNA, 19 nt, Homo sapiens
  misc_RNA (1)...(19): siRNA sense strand
acaucaaaugccucaaaua

SEQ ID NO: 2345299 - RNA, 19 nt, Homo sapiens
  misc_RNA (1)...(19): siRNA sense strand
gcuaugaaagccaugacaa

SEQ ID NO: 2345300 - RNA, 19 nt, Homo sapiens
  misc_RNA (1)...(19): siRNA sense strand
gcaucugacccgugcuauu

SEQ ID NO: 2345301 - RNA, 19 nt, Homo sapiens
  misc_RNA (1)...(19): siRNA sense strand
aagcgagagaggaugcaaa

SEQ ID NO: 2345302 - RNA, 19 nt, Homo sapiens
  misc_RNA (1)...(19): siRNA sense strand
uggaaaaucagaagaauca

SEQ ID NO: 2345303 - RNA, 19 nt, Homo sapiens
  misc_RNA (1)...(19): siRNA sense strand
acgagaaggcagaacgcau

SEQ ID NO: 2345304 - RNA, 19 nt, Homo sapiens
  misc_RNA (1)...(19): siRNA sense strand
gggaagacuaaggagacaa

SEQ ID NO: 2345305 - RNA, 19 nt, Homo sapiens
  misc_RNA (1)...(19): siRNA sense strand
acgagacggccaagaacua

SEQ ID NO: 2345306 - RNA, 19 nt, Homo sapiens
  misc_RNA (1)...(19): siRNA sense strand
gcaaaccccaggaggaaaa

SEQ ID NO: 2345307 - RNA, 19 nt, Homo sapiens
  misc_RNA (1)...(19): siRNA sense strand
gacaauucugcuagaggaa

SEQ ID NO: 2345308 - RNA, 19 nt, Homo sapiens
  misc_RNA (1)...(19): siRNA sense strand
caaagaaggcccugcccau

SEQ ID NO: 2345309 - RNA, 19 nt, Homo sapiens
  misc_RNA (1)...(19): siRNA sense strand
ggguauucccucagcggau

SEQ ID NO: 2345310 - RNA, 19 nt, Homo sapiens
  misc_RNA (1)...(19): siRNA sense strand
ccaagaaagcugcccguga

SEQ ID NO: 2345311 - RNA, 19 nt, Homo sapiens
  misc_RNA (1)...(19): siRNA sense strand
agaaaguggccaagcagga

SEQ ID NO: 2345312 - RNA, 19 nt, Homo sapiens
  misc_RNA (1)...(19): siRNA sense strand
cagaagaaucaucccacua

SEQ ID NO: 2345313 - RNA, 19 nt, Homo sapiens
  misc_RNA (1)...(19): siRNA sense strand
acuaaggagacaagcguca

SEQ ID NO: 2345314 - RNA, 19 nt, Homo sapiens
  misc_RNA (1)...(19): siRNA sense strand
acaugaucugucugggaaa

SEQ ID NO: 2345315 - RNA, 19 nt, Homo sapiens
  misc_RNA (1)...(19): siRNA sense strand
uggaaccggaagacagaaa

SEQ ID NO: 2345316 - RNA, 19 nt, Homo sapiens
  misc_RNA (1)...(19): siRNA sense strand
acagacaagaagcgagaga

SEQ ID NO: 2345317 - RNA, 19 nt, Homo sapiens
  misc_RNA (1)...(19): siRNA sense strand
uguaauauacccacaucaa

SEQ ID NO: 2345318 - RNA, 19 nt, Homo sapiens
  misc_RNA (1)...(19): siRNA sense strand
gccucaaauaacaugguaa

SEQ ID NO: 2345319 - RNA, 19 nt, Homo sapiens
  misc_RNA (1)...(19): siRNA sense strand
gcuaugaccuggagauccu

SEQ ID NO: 2345320 - RNA, 19 nt, Homo sapiens
  misc_RNA (1)...(19): siRNA sense strand
acagcaagaagcaaggcaa

SEQ ID NO: 2345321 - RNA, 19 nt, Homo sapiens
  misc_RNA (1)...(19): siRNA sense strand
ucccagacugcgaaggaua

SEQ ID NO: 2345322 - RNA, 19 nt, Homo sapiens
  misc_RNA (1)...(19): siRNA sense strand
gugucuggcugauggcuau

SEQ ID NO: 2345323 - RNA, 19 nt, Homo sapiens
  misc_RNA (1)...(19): siRNA sense strand
ggacgguaccagaggcacu

SEQ ID NO: 2345324 - RNA, 19 nt, Homo sapiens
  misc_RNA (1)...(19): siRNA sense strand
ggcaaagaagggcaagcua

SEQ ID NO: 2345325 - RNA, 19 nt, Homo sapiens
  misc_RNA (1)...(19): siRNA sense strand
cagagugccagcugaagaa

SEQ ID NO: 2345326 - RNA, 19 nt, Homo sapiens
  misc_RNA (1)...(19): siRNA sense strand
ccacuauuccacagagaaa

SEQ ID NO: 2345327 - RNA, 19 nt, Homo sapiens
  misc_RNA (1)...(19): siRNA sense strand
ccagcaagaaaguggcaaa

SEQ ID NO: 2345328 - RNA, 19 nt, Homo sapiens
  misc_RNA (1)...(19): siRNA sense strand
aggcagaacgcauggguuu

SEQ ID NO: 2345329 - RNA, 19 nt, Homo sapiens
  misc_RNA (1)...(19): siRNA sense strand
agggcaagcuacagaaaga

SEQ ID NO: 2345330 - RNA, 19 nt, Homo sapiens
  misc_RNA (1)...(19): siRNA sense strand
acaagaagcgagagaggau

SEQ ID NO: 2345331 - RNA, 19 nt, Homo sapiens
  misc_RNA (1)...(19): siRNA sense strand
uggccgagaucaaggagaa

SEQ ID NO: 2345332 - RNA, 19 nt, Homo sapiens
  misc_RNA (1)...(19): siRNA sense strand
ggcuaugggaacuggauua

SEQ ID NO: 2345333 - RNA, 19 nt, Homo sapiens
  misc_RNA (1)...(19): siRNA sense strand
gggagaacgagaaggcaga

SEQ ID NO: 2345334 - RNA, 19 nt, Homo sapiens
  misc_RNA (1)...(19): siRNA sense strand
ccauauggcauuugacaga

SEQ ID NO: 2345335 - RNA, 19 nt, Homo sapiens
  misc_RNA (1)...(19): siRNA sense strand
acagaaagaggcaggaaca

SEQ ID NO: 2345336 - RNA, 19 nt, Homo sapiens
  misc_RNA (1)...(19): siRNA sense strand
gaagcaagaaaguggccaa

SEQ ID NO: 2345337 - RNA, 19 nt, Homo sapiens
  misc_RNA (1)...(19): siRNA sense strand
cuaugaaagccaugacaau

SEQ ID NO: 2345338 - RNA, 19 nt, Homo sapiens
  misc_RNA (1)...(19): siRNA sense strand
ggauaugggcuaugggaac

SEQ ID NO: 2345339 - RNA, 19 nt, Homo sapiens
  misc_RNA (1)...(19): siRNA sense strand
gcuucaacacucugacuaa

SEQ ID NO: 2345340 - RNA, 19 nt, Homo sapiens
  misc_RNA (1)...(19): siRNA sense strand
cagcuugggaacagggaau

SEQ ID NO: 2345341 - RNA, 19 nt, Homo sapiens
  misc_RNA (1)...(19): siRNA sense strand
cuacagugaguuaaugaaa

SEQ ID NO: 2345342 - RNA, 19 nt, Homo sapiens
  misc_RNA (1)...(19): siRNA sense strand
gccugaaggauaugggcua

SEQ ID NO: 2345343 - RNA, 19 nt, Homo sapiens
  misc_RNA (1)...(19): siRNA sense strand
gggacuccgaagaaagaaa

SEQ ID NO: 2345344 - RNA, 19 nt, Homo sapiens
  misc_RNA (1)...(19): siRNA sense strand
agaaagaaaucaaucgagu

SEQ ID NO: 2345345 - RNA, 19 nt, Homo sapiens
  misc_RNA (1)...(19): siRNA sense strand
ugacagacaagaagcgaga

SEQ ID NO: 2345346 - RNA, 19 nt, Homo sapiens
  misc_RNA (1)...(19): siRNA sense strand
caaagaagggcaagcuaca

SEQ ID NO: 2345347 - RNA, 19 nt, Homo sapiens
  misc_RNA (1)...(19): siRNA sense strand
uagacauggccgagaucaa

SEQ ID NO: 2345348 - RNA, 19 nt, Homo sapiens
  misc_RNA (1)...(19): siRNA sense strand
agagaaagaaucagagaag

SEQ ID NO: 2345349 - RNA, 19 nt, Homo sapiens
  misc_RNA (1)...(19): siRNA sense strand
agaaagaaucagagaagac

SEQ ID NO: 2345350 - RNA, 19 nt, Homo sapiens
  misc_RNA (1)...(19): siRNA sense strand
ggagaaaaucugcgacuau

SEQ ID NO: 2345351 - RNA, 19 nt, Homo sapiens
  misc_RNA (1)...(19): siRNA sense strand
aggcaauccgggaagacua

SEQ ID NO: 2345352 - RNA, 19 nt, Homo sapiens
  misc_RNA (1)...(19): siRNA sense strand
ggaaccugucauaaaguua

SEQ ID NO: 2345353 - RNA, 19 nt, Homo sapiens
  misc_RNA (1)...(19): siRNA sense strand
cagagaaagaaucagagaa

SEQ ID NO: 2345354 - RNA, 19 nt, Homo sapiens
  misc_RNA (1)...(19): siRNA sense strand
gaauaugcccaguucgcua

SEQ ID NO: 2345355 - RNA, 19 nt, Homo sapiens
  misc_RNA (1)...(19): siRNA sense strand
gugcuaauugacauggaaa

SEQ ID NO: 2345356 - RNA, 19 nt, Homo sapiens
  misc_RNA (1)...(19): siRNA sense strand
agaaaguggcaaagcagau

SEQ ID NO: 2345357 - RNA, 19 nt, Homo sapiens
  misc_RNA (1)...(19): siRNA sense strand
ccgcagaggaagccaugaa

SEQ ID NO: 2345358 - RNA, 19 nt, Homo sapiens
  misc_RNA (1)...(19): siRNA sense strand
ggagaacggagaaggcaca

SEQ ID NO: 2345359 - RNA, 19 nt, Homo sapiens
  misc_RNA (1)...(19): siRNA sense strand
cgggaagacuaaggagaca

SEQ ID NO: 2345360 - RNA, 19 nt, Homo sapiens
  misc_RNA (1)...(19): siRNA sense strand
ugacagagugccagcugaa

SEQ ID NO: 2345361 - RNA, 19 nt, Homo sapiens
  misc_RNA (1)...(19): siRNA sense strand
agaaccagcaagacugaaa

SEQ ID NO: 2345362 - RNA, 19 nt, Homo sapiens
  misc_RNA (1)...(19): siRNA sense strand
agccaaggacaguggaaaa

SEQ ID NO: 2345363 - RNA, 19 nt, Homo sapiens
  misc_RNA (1)...(19): siRNA sense strand
ccuacaagaaacugacaga

SEQ ID NO: 2345364 - RNA, 19 nt, Homo sapiens
  misc_RNA (1)...(19): siRNA sense strand
acaucaaaugccucaaaua

SEQ ID NO: 2345365 - RNA, 19 nt, Homo sapiens
  misc_RNA (1)...(19): siRNA sense strand
gcuaugaaagccaugacaa

SEQ ID NO: 2345366 - RNA, 19 nt, Homo sapiens
  misc_RNA (1)...(19): siRNA sense strand
gcaucugacccgugcuauu

SEQ ID NO: 2345367 - RNA, 19 nt, Homo sapiens
  misc_RNA (1)...(19): siRNA sense strand
aagcgagagaggaugcaaa

SEQ ID NO: 2345368 - RNA, 19 nt, Homo sapiens
  misc_RNA (1)...(19): siRNA sense strand
uggaaaaucagaagaauca

SEQ ID NO: 2345369 - RNA, 19 nt, Homo sapiens
  misc_RNA (1)...(19): siRNA sense strand
acgagaaggcagaacgcau

SEQ ID NO: 2345370 - RNA, 19 nt, Homo sapiens
  misc_RNA (1)...(19): siRNA sense strand
gggaagacuaaggagacaa

SEQ ID NO: 2345371 - RNA, 19 nt, Homo sapiens
  misc_RNA (1)...(19): siRNA sense strand
acgagacggccaagaacua

SEQ ID NO: 2345372 - RNA, 19 nt, Homo sapiens
  misc_RNA (1)...(19): siRNA sense strand
gcaaaccccaggaggaaaa

SEQ ID NO: 2345373 - RNA, 19 nt, Homo sapiens
  misc_RNA (1)...(19): siRNA sense strand
gacaauucugcuagaggaa

SEQ ID NO: 2345374 - RNA, 19 nt, Homo sapiens
  misc_RNA (1)...(19): siRNA sense strand
caaagaaggcccugcccau

SEQ ID NO: 2345375 - RNA, 19 nt, Homo sapiens
  misc_RNA (1)...(19): siRNA sense strand
ggguauucccucagcggau

SEQ ID NO: 2345376 - RNA, 19 nt, Homo sapiens
  misc_RNA (1)...(19): siRNA sense strand
ccaagaaagcugcccguga

SEQ ID NO: 2345377 - RNA, 19 nt, Homo sapiens
  misc_RNA (1)...(19): siRNA sense strand
agaaaguggccaagcagga

SEQ ID NO: 2345378 - RNA, 19 nt, Homo sapiens
  misc_RNA (1)...(19): siRNA sense strand
cagaagaaucaucccacua

SEQ ID NO: 2345379 - RNA, 19 nt, Homo sapiens
  misc_RNA (1)...(19): siRNA sense strand
acuaaggagacaagcguca

SEQ ID NO: 2345380 - RNA, 19 nt, Homo sapiens
  misc_RNA (1)...(19): siRNA sense strand
acaugaucugucugggaaa

SEQ ID NO: 2345381 - RNA, 19 nt, Homo sapiens
  misc_RNA (1)...(19): siRNA sense strand
uggaaccggaagacagaaa

SEQ ID NO: 2345382 - RNA, 19 nt, Homo sapiens
  misc_RNA (1)...(19): siRNA sense strand
acagacaagaagcgagaga

SEQ ID NO: 2345383 - RNA, 19 nt, Homo sapiens
  misc_RNA (1)...(19): siRNA sense strand
uguaauauacccacaucaa

SEQ ID NO: 2345384 - RNA, 19 nt, Homo sapiens
  misc_RNA (1)...(19): siRNA sense strand
gccucaaauaacaugguaa

SEQ ID NO: 2345385 - RNA, 19 nt, Homo sapiens
  misc_RNA (1)...(19): siRNA sense strand
gcuaugaccuggagauccu

SEQ ID NO: 2345386 - RNA, 19 nt, Homo sapiens
  misc_RNA (1)...(19): siRNA sense strand
acagcaagaagcaaggcaa

SEQ ID NO: 2345387 - RNA, 19 nt, Homo sapiens
  misc_RNA (1)...(19): siRNA sense strand
ucccagacugcgaaggaua

SEQ ID NO: 2345388 - RNA, 19 nt, Homo sapiens
  misc_RNA (1)...(19): siRNA sense strand
gugucuggcugauggcuau

SEQ ID NO: 2345389 - RNA, 19 nt, Homo sapiens
  misc_RNA (1)...(19): siRNA sense strand
ggacgguaccagaggcacu

SEQ ID NO: 2345390 - RNA, 19 nt, Homo sapiens
  misc_RNA (1)...(19): siRNA sense strand
ggcaaagaagggcaagcua

SEQ ID NO: 2345391 - RNA, 19 nt, Homo sapiens
  misc_RNA (1)...(19): siRNA sense strand
cagagugccagcugaagaa

SEQ ID NO: 2345392 - RNA, 19 nt, Homo sapiens
  misc_RNA (1)...(19): siRNA sense strand
ccacuauuccacagagaaa

SEQ ID NO: 2345393 - RNA, 19 nt, Homo sapiens
  misc_RNA (1)...(19): siRNA sense strand
ccagcaagaaaguggcaaa

SEQ ID NO: 2345394 - RNA, 19 nt, Homo sapiens
  misc_RNA (1)...(19): siRNA sense strand
aggcagaacgcauggguuu

SEQ ID NO: 2345395 - RNA, 19 nt, Homo sapiens
  misc_RNA (1)...(19): siRNA sense strand
agggcaagcuacagaaaga

SEQ ID NO: 2345396 - RNA, 19 nt, Homo sapiens
  misc_RNA (1)...(19): siRNA sense strand
acaagaagcgagagaggau

SEQ ID NO: 2345397 - RNA, 19 nt, Homo sapiens
  misc_RNA (1)...(19): siRNA sense strand
uggccgagaucaaggagaa

SEQ ID NO: 2345398 - RNA, 19 nt, Homo sapiens
  misc_RNA (1)...(19): siRNA sense strand
ggcuaugggaacuggauua

SEQ ID NO: 2345399 - RNA, 19 nt, Homo sapiens
  misc_RNA (1)...(19): siRNA sense strand
gggagaacgagaaggcaga

SEQ ID NO: 2345400 - RNA, 19 nt, Homo sapiens
  misc_RNA (1)...(19): siRNA sense strand
ccauauggcauuugacaga

SEQ ID NO: 2345401 - RNA, 19 nt, Homo sapiens
  misc_RNA (1)...(19): siRNA sense strand
acagaaagaggcaggaaca

SEQ ID NO: 2345402 - RNA, 19 nt, Homo sapiens
  misc_RNA (1)...(19): siRNA sense strand
gaagcaagaaaguggccaa

SEQ ID NO: 2345403 - RNA, 19 nt, Homo sapiens
  misc_RNA (1)...(19): siRNA sense strand
cuaugaaagccaugacaau

SEQ ID NO: 2345404 - RNA, 19 nt, Homo sapiens
  misc_RNA (1)...(19): siRNA sense strand
ggauaugggcuaugggaac

SEQ ID NO: 2345405 - RNA, 19 nt, Homo sapiens
  misc_RNA (1)...(19): siRNA sense strand
gcuucaacacucugacuaa

SEQ ID NO: 2345406 - RNA, 19 nt, Homo sapiens
  misc_RNA (1)...(19): siRNA sense strand
cagcuugggaacagggaau

SEQ ID NO: 2345407 - RNA, 19 nt, Homo sapiens
  misc_RNA (1)...(19): siRNA sense strand
cuacagugaguuaaugaaa

SEQ ID NO: 2345408 - RNA, 19 nt, Homo sapiens
  misc_RNA (1)...(19): siRNA sense strand
gccugaaggauaugggcua

SEQ ID NO: 2345409 - RNA, 19 nt, Homo sapiens
  misc_RNA (1)...(19): siRNA sense strand
gggacuccgaagaaagaaa

SEQ ID NO: 2345410 - RNA, 19 nt, Homo sapiens
  misc_RNA (1)...(19): siRNA sense strand
agaaagaaaucaaucgagu

SEQ ID NO: 2345411 - RNA, 19 nt, Homo sapiens
  misc_RNA (1)...(19): siRNA sense strand
ugacagacaagaagcgaga

SEQ ID NO: 2345412 - RNA, 19 nt, Homo sapiens
  misc_RNA (1)...(19): siRNA sense strand
caaagaagggcaagcuaca

SEQ ID NO: 2345413 - RNA, 19 nt, Homo sapiens
  misc_RNA (1)...(19): siRNA sense strand
uagacauggccgagaucaa

SEQ ID NO: 2345414 - RNA, 19 nt, Homo sapiens
  misc_RNA (1)...(19): siRNA sense strand
agagaaagaaucagagaag

SEQ ID NO: 2345415 - RNA, 19 nt, Homo sapiens
  misc_RNA (1)...(19): siRNA sense strand
agaaagaaucagagaagac

SEQ ID NO: 2345416 - RNA, 19 nt, Homo sapiens
  misc_RNA (1)...(19): siRNA sense strand
ggagaaaaucugcgacuau

SEQ ID NO: 2345417 - RNA, 19 nt, Homo sapiens
  misc_RNA (1)...(19): siRNA sense strand
aggcaauccgggaagacua

SEQ ID NO: 2345418 - RNA, 19 nt, Homo sapiens
  misc_RNA (1)...(19): siRNA sense strand
ggaaccugucauaaaguua

SEQ ID NO: 2345419 - RNA, 19 nt, Homo sapiens
  misc_RNA (1)...(19): siRNA sense strand
cagagaaagaaucagagaa

SEQ ID NO: 2345420 - RNA, 19 nt, Homo sapiens
  misc_RNA (1)...(19): siRNA sense strand
gaauaugcccaguucgcua

SEQ ID NO: 2345421 - RNA, 19 nt, Homo sapiens
  misc_RNA (1)...(19): siRNA sense strand
gugcuaauugacauggaaa

SEQ ID NO: 2345422 - RNA, 19 nt, Homo sapiens
  misc_RNA (1)...(19): siRNA sense strand
agaaaguggcaaagcagau

SEQ ID NO: 2345423 - RNA, 19 nt, Homo sapiens
  misc_RNA (1)...(19): siRNA sense strand
ccgcagaggaagccaugaa

SEQ ID NO: 2345424 - RNA, 19 nt, Homo sapiens
  misc_RNA (1)...(19): siRNA sense strand
ggagaacggagaaggcaca

SEQ ID NO: 2345425 - RNA, 19 nt, Homo sapiens
  misc_RNA (1)...(19): siRNA sense strand
cgggaagacuaaggagaca

SEQ ID NO: 2345426 - RNA, 19 nt, Homo sapiens
  misc_RNA (1)...(19): siRNA sense strand
ugacagagugccagcugaa

SEQ ID NO: 2345427 - RNA, 19 nt, Homo sapiens
  misc_RNA (1)...(19): siRNA sense strand
agaaccagcaagacugaaa

SEQ ID NO: 2345428 - RNA, 19 nt, Homo sapiens
  misc_RNA (1)...(19): siRNA sense strand
agccaaggacaguggaaaa

SEQ ID NO: 2345429 - RNA, 19 nt, Homo sapiens
  misc_RNA (1)...(19): siRNA sense strand
ccuacaagaaacugacaga

SEQ ID NO: 2345430 - RNA, 19 nt, Homo sapiens
  misc_RNA (1)...(19): siRNA sense strand
acaucaaaugccucaaaua

SEQ ID NO: 2345431 - RNA, 19 nt, Homo sapiens
  misc_RNA (1)...(19): siRNA sense strand
gcuaugaaagccaugacaa

SEQ ID NO: 2345432 - RNA, 19 nt, Homo sapiens
  misc_RNA (1)...(19): siRNA sense strand
gcaucugacccgugcuauu

SEQ ID NO: 2345433 - RNA, 19 nt, Homo sapiens
  misc_RNA (1)...(19): siRNA sense strand
aagcgagagaggaugcaaa

SEQ ID NO: 2345434 - RNA, 19 nt, Homo sapiens
  misc_RNA (1)...(19): siRNA sense strand
uggaaaaucagaagaauca

SEQ ID NO: 2345435 - RNA, 19 nt, Homo sapiens
  misc_RNA (1)...(19): siRNA sense strand
acgagaaggcagaacgcau

SEQ ID NO: 2345436 - RNA, 19 nt, Homo sapiens
  misc_RNA (1)...(19): siRNA sense strand
gggaagacuaaggagacaa

SEQ ID NO: 2345437 - RNA, 19 nt, Homo sapiens
  misc_RNA (1)...(19): siRNA sense strand
acgagacggccaagaacua

SEQ ID NO: 2345438 - RNA, 19 nt, Homo sapiens
  misc_RNA (1)...(19): siRNA sense strand
gcaaaccccaggaggaaaa

SEQ ID NO: 2345439 - RNA, 19 nt, Homo sapiens
  misc_RNA (1)...(19): siRNA sense strand
gacaauucugcuagaggaa

SEQ ID NO: 2345440 - RNA, 19 nt, Homo sapiens
  misc_RNA (1)...(19): siRNA sense strand
caaagaaggcccugcccau

SEQ ID NO: 2345441 - RNA, 19 nt, Homo sapiens
  misc_RNA (1)...(19): siRNA sense strand
ggguauucccucagcggau

SEQ ID NO: 2345442 - RNA, 19 nt, Homo sapiens
  misc_RNA (1)...(19): siRNA sense strand
ccaagaaagcugcccguga

SEQ ID NO: 2345443 - RNA, 19 nt, Homo sapiens
  misc_RNA (1)...(19): siRNA sense strand
agaaaguggccaagcagga

SEQ ID NO: 2345444 - RNA, 19 nt, Homo sapiens
  misc_RNA (1)...(19): siRNA sense strand
cagaagaaucaucccacua

SEQ ID NO: 2345445 - RNA, 19 nt, Homo sapiens
  misc_RNA (1)...(19): siRNA sense strand
acuaaggagacaagcguca

SEQ ID NO: 2345446 - RNA, 19 nt, Homo sapiens
  misc_RNA (1)...(19): siRNA sense strand
acaugaucugucugggaaa

SEQ ID NO: 2345447 - RNA, 19 nt, Homo sapiens
  misc_RNA (1)...(19): siRNA sense strand
uggaaccggaagacagaaa

SEQ ID NO: 2345448 - RNA, 19 nt, Homo sapiens
  misc_RNA (1)...(19): siRNA sense strand
acagacaagaagcgagaga

SEQ ID NO: 2345449 - RNA, 19 nt, Homo sapiens
  misc_RNA (1)...(19): siRNA sense strand
uguaauauacccacaucaa

SEQ ID NO: 2345450 - RNA, 19 nt, Homo sapiens
  misc_RNA (1)...(19): siRNA sense strand
gccucaaauaacaugguaa

SEQ ID NO: 2345451 - RNA, 19 nt, Homo sapiens
  misc_RNA (1)...(19): siRNA sense strand
gcuaugaccuggagauccu

SEQ ID NO: 2345452 - RNA, 19 nt, Homo sapiens
  misc_RNA (1)...(19): siRNA sense strand
acagcaagaagcaaggcaa

SEQ ID NO: 2345453 - RNA, 19 nt, Homo sapiens
  misc_RNA (1)...(19): siRNA sense strand
ucccagacugcgaaggaua

SEQ ID NO: 2345454 - RNA, 19 nt, Homo sapiens
  misc_RNA (1)...(19): siRNA sense strand
gugucuggcugauggcuau

SEQ ID NO: 2345455 - RNA, 19 nt, Homo sapiens
  misc_RNA (1)...(19): siRNA sense strand
ggacgguaccagaggcacu

SEQ ID NO: 2345456 - RNA, 19 nt, Homo sapiens
  misc_RNA (1)...(19): siRNA sense strand
ggcaaagaagggcaagcua

SEQ ID NO: 2345457 - RNA, 19 nt, Homo sapiens
  misc_RNA (1)...(19): siRNA sense strand
cagagugccagcugaagaa

SEQ ID NO: 2345458 - RNA, 19 nt, Homo sapiens
  misc_RNA (1)...(19): siRNA sense strand
cagaagaguuggaggggua

SEQ ID NO: 2345459 - RNA, 19 nt, Homo sapiens
  misc_RNA (1)...(19): siRNA sense strand
gagaacugcuggaagguga

SEQ ID NO: 2345460 - RNA, 19 nt, Homo sapiens
  misc_RNA (1)...(19): siRNA sense strand
cagacaagaugaagccaga

SEQ ID NO: 2345461 - RNA, 19 nt, Homo sapiens
  misc_RNA (1)...(19): siRNA sense strand
agcaggagccggaggagaa

SEQ ID NO: 2345462 - RNA, 19 nt, Homo sapiens
  misc_RNA (1)...(19): siRNA sense strand
agcaggagccggaggagaa

SEQ ID NO: 2345463 - RNA, 19 nt, Homo sapiens
  misc_RNA (1)...(19): siRNA sense strand
gcuugaaggaaaagaccaa

SEQ ID NO: 2345464 - RNA, 19 nt, Homo sapiens
  misc_RNA (1)...(19): siRNA sense strand
cugcccugcuggaggagaa

SEQ ID NO: 2345465 - RNA, 19 nt, Homo sapiens
  misc_RNA (1)...(19): siRNA sense strand
ucaccagcuugaaggaaaa

SEQ ID NO: 2345466 - RNA, 19 nt, Homo sapiens
  misc_RNA (1)...(19): siRNA sense strand
cacuaguggacgaggugaa

SEQ ID NO: 2345467 - RNA, 19 nt, Homo sapiens
  misc_RNA (1)...(19): siRNA sense strand
gcggaugagcugugcacca

SEQ ID NO: 2345468 - RNA, 19 nt, Homo sapiens
  misc_RNA (1)...(19): siRNA sense strand
aucaccagcuugaaggaaa

SEQ ID NO: 2345469 - RNA, 19 nt, Homo sapiens
  misc_RNA (1)...(19): siRNA sense strand
uggaggagaagcugcgcua

SEQ ID NO: 2345470 - RNA, 19 nt, Homo sapiens
  misc_RNA (1)...(19): siRNA sense strand
gcgugguggugaagacgau

SEQ ID NO: 2345471 - RNA, 19 nt, Homo sapiens
  misc_RNA (1)...(19): siRNA sense strand
gagaaggcggcaagaggca

SEQ ID NO: 2345472 - RNA, 19 nt, Homo sapiens
  misc_RNA (1)...(19): siRNA sense strand
aggagaagcaggagccgga

SEQ ID NO: 2345473 - RNA, 19 nt, Homo sapiens
  misc_RNA (1)...(19): siRNA sense strand
aggagaagcaggagccgga

SEQ ID NO: 2345474 - RNA, 19 nt, Homo sapiens
  misc_RNA (1)...(19): siRNA sense strand
gugaagacgaucuggcagu

SEQ ID NO: 2345475 - RNA, 19 nt, Homo sapiens
  misc_RNA (1)...(19): siRNA sense strand
acgugagcgagcaggaauu

SEQ ID NO: 2345476 - RNA, 19 nt, Homo sapiens
  misc_RNA (1)...(19): siRNA sense strand
aggaauugcagaagcuguu

SEQ ID NO: 2345477 - RNA, 19 nt, Homo sapiens
  misc_RNA (1)...(19): siRNA sense strand
agaagaaggaagagagauu

SEQ ID NO: 2345478 - RNA, 19 nt, Homo sapiens
  misc_RNA (1)...(19): siRNA sense strand
cacaaauaccagugggaau

SEQ ID NO: 2345479 - RNA, 19 nt, Homo sapiens
  misc_RNA (1)...(19): siRNA sense strand
cagaaaauggagagagauu

SEQ ID NO: 2345480 - RNA, 19 nt, Homo sapiens
  misc_RNA (1)...(19): siRNA sense strand
ggaacuucguuuagaggau

SEQ ID NO: 2345481 - RNA, 19 nt, Homo sapiens
  misc_RNA (1)...(19): siRNA sense strand
aagcaagucacuagaggaa

SEQ ID NO: 2345482 - RNA, 19 nt, Homo sapiens
  misc_RNA (1)...(19): siRNA sense strand
ccgagaagaaauagaaaau

SEQ ID NO: 2345483 - RNA, 19 nt, Homo sapiens
  misc_RNA (1)...(19): siRNA sense strand
gcauauggucagaacaaaa

SEQ ID NO: 2345484 - RNA, 19 nt, Homo sapiens
  misc_RNA (1)...(19): siRNA sense strand
gugcauauccggaggaaag

SEQ ID NO: 2345485 - RNA, 19 nt, Homo sapiens
  misc_RNA (1)...(19): siRNA sense strand
augaagaggaggaggagca

SEQ ID NO: 2345486 - RNA, 19 nt, Homo sapiens
  misc_RNA (1)...(19): siRNA sense strand
cuggaggccucuuuggaaa

SEQ ID NO: 2345487 - RNA, 19 nt, Homo sapiens
  misc_RNA (1)...(19): siRNA sense strand
aaauaaaccaacuggcuuu

SEQ ID NO: 2345488 - RNA, 19 nt, Homo sapiens
  misc_RNA (1)...(19): siRNA sense strand
cgaaaugggcuggaaggaa

SEQ ID NO: 2345489 - RNA, 19 nt, Homo sapiens
  misc_RNA (1)...(19): siRNA sense strand
uugaaggagaugugaauuu

SEQ ID NO: 2345490 - RNA, 19 nt, Homo sapiens
  misc_RNA (1)...(19): siRNA sense strand
caacaauacuggaggccuc

SEQ ID NO: 2345491 - RNA, 19 nt, Homo sapiens
  misc_RNA (1)...(19): siRNA sense strand
ccuccaacugguacagaua

SEQ ID NO: 2345492 - RNA, 19 nt, Homo sapiens
  misc_RNA (1)...(19): siRNA sense strand
uugcauauggucagaacaa

SEQ ID NO: 2345493 - RNA, 19 nt, Homo sapiens
  misc_RNA (1)...(19): siRNA sense strand
agaaguugguuuugaagaa

SEQ ID NO: 2345494 - RNA, 19 nt, Homo sapiens
  misc_RNA (1)...(19): siRNA sense strand
gaaacugguucuugggugu

SEQ ID NO: 2345495 - RNA, 19 nt, Homo sapiens
  misc_RNA (1)...(19): siRNA sense strand
cuaugaaggaagauuggaa

SEQ ID NO: 2345496 - RNA, 19 nt, Homo sapiens
  misc_RNA (1)...(19): siRNA sense strand
acaaagaaguugaagacug

SEQ ID NO: 2345497 - RNA, 19 nt, Homo sapiens
  misc_RNA (1)...(19): siRNA sense strand
aagaagagcauuaagaagu

SEQ ID NO: 2345498 - RNA, 19 nt, Homo sapiens
  misc_RNA (1)...(19): siRNA sense strand
ucaggaugaccgagaagaa

SEQ ID NO: 2345499 - RNA, 19 nt, Homo sapiens
  misc_RNA (1)...(19): siRNA sense strand
cugaugaagaggaggagga

SEQ ID NO: 2345500 - RNA, 19 nt, Homo sapiens
  misc_RNA (1)...(19): siRNA sense strand
aguacaaagaaguugaaga

SEQ ID NO: 2345501 - RNA, 19 nt, Homo sapiens
  misc_RNA (1)...(19): siRNA sense strand
uuggaaauucacagacuaa

SEQ ID NO: 2345502 - RNA, 19 nt, Homo sapiens
  misc_RNA (1)...(19): siRNA sense strand
gaaaugggcuggaaggaag

SEQ ID NO: 2345503 - RNA, 19 nt, Homo sapiens
  misc_RNA (1)...(19): siRNA sense strand
cggaaagguuaugguucaa

SEQ ID NO: 2345504 - RNA, 19 nt, Homo sapiens
  misc_RNA (1)...(19): siRNA sense strand
caaaccuguugaugagaau

SEQ ID NO: 2345505 - RNA, 19 nt, Homo sapiens
  misc_RNA (1)...(19): siRNA sense strand
ggagaugugaauuugacaa

SEQ ID NO: 2345506 - RNA, 19 nt, Homo sapiens
  misc_RNA (1)...(19): siRNA sense strand
ccuaagaagaaggaagaga

SEQ ID NO: 2345507 - RNA, 19 nt, Homo sapiens
  misc_RNA (1)...(19): siRNA sense strand
uaagaagaaggaagagaga

SEQ ID NO: 2345508 - RNA, 19 nt, Homo sapiens
  misc_RNA (1)...(19): siRNA sense strand
aaagaauaccggccugaaa

SEQ ID NO: 2345509 - RNA, 19 nt, Homo sapiens
  misc_RNA (1)...(19): siRNA sense strand
cuaccagccucuucagcaa

SEQ ID NO: 2345510 - RNA, 19 nt, Homo sapiens
  misc_RNA (1)...(19): siRNA sense strand
aaacacagcaacagcaaca

SEQ ID NO: 2345511 - RNA, 19 nt, Homo sapiens
  misc_RNA (1)...(19): siRNA sense strand
aggaugaccgagaagaaau

SEQ ID NO: 2345512 - RNA, 19 nt, Homo sapiens
  misc_RNA (1)...(19): siRNA sense strand
aagaaggaagagagauuga

SEQ ID NO: 2345513 - RNA, 19 nt, Homo sapiens
  misc_RNA (1)...(19): siRNA sense strand
gcauuaagaaguugguuuu

SEQ ID NO: 2345514 - RNA, 19 nt, Homo sapiens
  misc_RNA (1)...(19): siRNA sense strand
cuggaaauaaacacagcaa

SEQ ID NO: 2345515 - RNA, 19 nt, Homo sapiens
  misc_RNA (1)...(19): siRNA sense strand
agacuaaaccaggaggauu

SEQ ID NO: 2345516 - RNA, 19 nt, Homo sapiens
  misc_RNA (1)...(19): siRNA sense strand
caucaauagucuaacauac

SEQ ID NO: 2345517 - RNA, 19 nt, Homo sapiens
  misc_RNA (1)...(19): siRNA sense strand
ccacuagaguccggccaaa

SEQ ID NO: 2345518 - RNA, 19 nt, Homo sapiens
  misc_RNA (1)...(19): siRNA sense strand
aaggaaacagggagcucaa

SEQ ID NO: 2345519 - RNA, 19 nt, Homo sapiens
  misc_RNA (1)...(19): siRNA sense strand
gggcagaccaauacuggau

SEQ ID NO: 2345520 - RNA, 19 nt, Homo sapiens
  misc_RNA (1)...(19): siRNA sense strand
gcacaaauaccagugggaa

SEQ ID NO: 2345521 - RNA, 19 nt, Homo sapiens
  misc_RNA (1)...(19): siRNA sense strand
ccuacugggacuacuauua

SEQ ID NO: 2345522 - RNA, 19 nt, Homo sapiens
  misc_RNA (1)...(19): siRNA sense strand
ugggacagcauuuggaaca

SEQ ID NO: 2345523 - RNA, 19 nt, Homo sapiens
  misc_RNA (1)...(19): siRNA sense strand
gaacaggucucuuugggca

SEQ ID NO: 2345524 - RNA, 19 nt, Homo sapiens
  misc_RNA (1)...(19): siRNA sense strand
guuuggaacugcaagcaca

SEQ ID NO: 2345525 - RNA, 19 nt, Homo sapiens
  misc_RNA (1)...(19): siRNA sense strand
gguacagauacuaugguca

SEQ ID NO: 2345526 - RNA, 19 nt, Homo sapiens
  misc_RNA (1)...(19): siRNA sense strand
ugggcuuggugcaggauuu

SEQ ID NO: 2345527 - RNA, 19 nt, Homo sapiens
  misc_RNA (1)...(19): siRNA sense strand
gcaggauggagaugaagau

SEQ ID NO: 2345528 - RNA, 19 nt, Homo sapiens
  misc_RNA (1)...(19): siRNA sense strand
gacuaaaccaggaggauug

SEQ ID NO: 2345529 - RNA, 19 nt, Homo sapiens
  misc_RNA (1)...(19): siRNA sense strand
uagaggauuaucaggcuaa

SEQ ID NO: 2345530 - RNA, 19 nt, Homo sapiens
  misc_RNA (1)...(19): siRNA sense strand
accugugggugaagggcua

SEQ ID NO: 2345531 - RNA, 19 nt, Homo sapiens
  misc_RNA (1)...(19): siRNA sense strand
aguuuggccaacagauaaa

SEQ ID NO: 2345532 - RNA, 19 nt, Homo sapiens
  misc_RNA (1)...(19): siRNA sense strand
agaagaaggaagagagauu

SEQ ID NO: 2345533 - RNA, 19 nt, Homo sapiens
  misc_RNA (1)...(19): siRNA sense strand
cacaaauaccagugggaau

SEQ ID NO: 2345534 - RNA, 19 nt, Homo sapiens
  misc_RNA (1)...(19): siRNA sense strand
cagaaaauggagagagauu

SEQ ID NO: 2345535 - RNA, 19 nt, Homo sapiens
  misc_RNA (1)...(19): siRNA sense strand
ggaacuucguuuagaggau

SEQ ID NO: 2345536 - RNA, 19 nt, Homo sapiens
  misc_RNA (1)...(19): siRNA sense strand
aagcaagucacuagaggaa

SEQ ID NO: 2345537 - RNA, 19 nt, Homo sapiens
  misc_RNA (1)...(19): siRNA sense strand
ccgagaagaaauagaaaau

SEQ ID NO: 2345538 - RNA, 19 nt, Homo sapiens
  misc_RNA (1)...(19): siRNA sense strand
gcauauggucagaacaaaa

SEQ ID NO: 2345539 - RNA, 19 nt, Homo sapiens
  misc_RNA (1)...(19): siRNA sense strand
gugcauauccggaggaaag

SEQ ID NO: 2345540 - RNA, 19 nt, Homo sapiens
  misc_RNA (1)...(19): siRNA sense strand
augaagaggaggaggagca

SEQ ID NO: 2345541 - RNA, 19 nt, Homo sapiens
  misc_RNA (1)...(19): siRNA sense strand
cuggaggccucuuuggaaa

SEQ ID NO: 2345542 - RNA, 19 nt, Homo sapiens
  misc_RNA (1)...(19): siRNA sense strand
aaauaaaccaacuggcuuu

SEQ ID NO: 2345543 - RNA, 19 nt, Homo sapiens
  misc_RNA (1)...(19): siRNA sense strand
cgaaaugggcuggaaggaa

SEQ ID NO: 2345544 - RNA, 19 nt, Homo sapiens
  misc_RNA (1)...(19): siRNA sense strand
uugaaggagaugugaauuu

SEQ ID NO: 2345545 - RNA, 19 nt, Homo sapiens
  misc_RNA (1)...(19): siRNA sense strand
caacaauacuggaggccuc

SEQ ID NO: 2345546 - RNA, 19 nt, Homo sapiens
  misc_RNA (1)...(19): siRNA sense strand
ccuccaacugguacagaua

SEQ ID NO: 2345547 - RNA, 19 nt, Homo sapiens
  misc_RNA (1)...(19): siRNA sense strand
uugcauauggucagaacaa

SEQ ID NO: 2345548 - RNA, 19 nt, Homo sapiens
  misc_RNA (1)...(19): siRNA sense strand
agaaguugguuuugaagaa

SEQ ID NO: 2345549 - RNA, 19 nt, Homo sapiens
  misc_RNA (1)...(19): siRNA sense strand
gaaacugguucuugggugu

SEQ ID NO: 2345550 - RNA, 19 nt, Homo sapiens
  misc_RNA (1)...(19): siRNA sense strand
cuaugaaggaagauuggaa

SEQ ID NO: 2345551 - RNA, 19 nt, Homo sapiens
  misc_RNA (1)...(19): siRNA sense strand
acaaagaaguugaagacug

SEQ ID NO: 2345552 - RNA, 19 nt, Homo sapiens
  misc_RNA (1)...(19): siRNA sense strand
aagaagagcauuaagaagu

SEQ ID NO: 2345553 - RNA, 19 nt, Homo sapiens
  misc_RNA (1)...(19): siRNA sense strand
ucaggaugaccgagaagaa

SEQ ID NO: 2345554 - RNA, 19 nt, Homo sapiens
  misc_RNA (1)...(19): siRNA sense strand
cugaugaagaggaggagga

SEQ ID NO: 2345555 - RNA, 19 nt, Homo sapiens
  misc_RNA (1)...(19): siRNA sense strand
aguacaaagaaguugaaga

SEQ ID NO: 2345556 - RNA, 19 nt, Homo sapiens
  misc_RNA (1)...(19): siRNA sense strand
uuggaaauucacagacuaa

SEQ ID NO: 2345557 - RNA, 19 nt, Homo sapiens
  misc_RNA (1)...(19): siRNA sense strand
gaaaugggcuggaaggaag

SEQ ID NO: 2345558 - RNA, 19 nt, Homo sapiens
  misc_RNA (1)...(19): siRNA sense strand
cggaaagguuaugguucaa

SEQ ID NO: 2345559 - RNA, 19 nt, Homo sapiens
  misc_RNA (1)...(19): siRNA sense strand
caaaccuguugaugagaau

SEQ ID NO: 2345560 - RNA, 19 nt, Homo sapiens
  misc_RNA (1)...(19): siRNA sense strand
ggagaugugaauuugacaa

SEQ ID NO: 2345561 - RNA, 19 nt, Homo sapiens
  misc_RNA (1)...(19): siRNA sense strand
ccuaagaagaaggaagaga

SEQ ID NO: 2345562 - RNA, 19 nt, Homo sapiens
  misc_RNA (1)...(19): siRNA sense strand
uaagaagaaggaagagaga

SEQ ID NO: 2345563 - RNA, 19 nt, Homo sapiens
  misc_RNA (1)...(19): siRNA sense strand
aaagaauaccggccugaaa

SEQ ID NO: 2345564 - RNA, 19 nt, Homo sapiens
  misc_RNA (1)...(19): siRNA sense strand
cuaccagccucuucagcaa

SEQ ID NO: 2345565 - RNA, 19 nt, Homo sapiens
  misc_RNA (1)...(19): siRNA sense strand
aaacacagcaacagcaaca

SEQ ID NO: 2345566 - RNA, 19 nt, Homo sapiens
  misc_RNA (1)...(19): siRNA sense strand
aggaugaccgagaagaaau

SEQ ID NO: 2345567 - RNA, 19 nt, Homo sapiens
  misc_RNA (1)...(19): siRNA sense strand
aagaaggaagagagauuga

SEQ ID NO: 2345568 - RNA, 19 nt, Homo sapiens
  misc_RNA (1)...(19): siRNA sense strand
gcauuaagaaguugguuuu

SEQ ID NO: 2345569 - RNA, 19 nt, Homo sapiens
  misc_RNA (1)...(19): siRNA sense strand
cuggaaauaaacacagcaa

SEQ ID NO: 2345570 - RNA, 19 nt, Homo sapiens
  misc_RNA (1)...(19): siRNA sense strand
agacuaaaccaggaggauu

SEQ ID NO: 2345571 - RNA, 19 nt, Homo sapiens
  misc_RNA (1)...(19): siRNA sense strand
caucaauagucuaacauac

SEQ ID NO: 2345572 - RNA, 19 nt, Homo sapiens
  misc_RNA (1)...(19): siRNA sense strand
ccacuagaguccggccaaa

SEQ ID NO: 2345573 - RNA, 19 nt, Homo sapiens
  misc_RNA (1)...(19): siRNA sense strand
aaggaaacagggagcucaa

SEQ ID NO: 2345574 - RNA, 19 nt, Homo sapiens
  misc_RNA (1)...(19): siRNA sense strand
gggcagaccaauacuggau

SEQ ID NO: 2345575 - RNA, 19 nt, Homo sapiens
  misc_RNA (1)...(19): siRNA sense strand
gcacaaauaccagugggaa

SEQ ID NO: 2345576 - RNA, 19 nt, Homo sapiens
  misc_RNA (1)...(19): siRNA sense strand
ccuacugggacuacuauua

SEQ ID NO: 2345577 - RNA, 19 nt, Homo sapiens
  misc_RNA (1)...(19): siRNA sense strand
ugggacagcauuuggaaca

SEQ ID NO: 2345578 - RNA, 19 nt, Homo sapiens
  misc_RNA (1)...(19): siRNA sense strand
gaacaggucucuuugggca

SEQ ID NO: 2345579 - RNA, 19 nt, Homo sapiens
  misc_RNA (1)...(19): siRNA sense strand
guuuggaacugcaagcaca

SEQ ID NO: 2345580 - RNA, 19 nt, Homo sapiens
  misc_RNA (1)...(19): siRNA sense strand
gguacagauacuaugguca

SEQ ID NO: 2345581 - RNA, 19 nt, Homo sapiens
  misc_RNA (1)...(19): siRNA sense strand
ugggcuuggugcaggauuu

SEQ ID NO: 2345582 - RNA, 19 nt, Homo sapiens
  misc_RNA (1)...(19): siRNA sense strand
gcaggauggagaugaagau

SEQ ID NO: 2345583 - RNA, 19 nt, Homo sapiens
  misc_RNA (1)...(19): siRNA sense strand
gacuaaaccaggaggauug

SEQ ID NO: 2345584 - RNA, 19 nt, Homo sapiens
  misc_RNA (1)...(19): siRNA sense strand
uagaggauuaucaggcuaa

SEQ ID NO: 2345585 - RNA, 19 nt, Homo sapiens
  misc_RNA (1)...(19): siRNA sense strand
accugugggugaagggcua

SEQ ID NO: 2345586 - RNA, 19 nt, Homo sapiens
  misc_RNA (1)...(19): siRNA sense strand
aguuuggccaacagauaaa

SEQ ID NO: 2345587 - RNA, 19 nt, Homo sapiens
  misc_RNA (1)...(19): siRNA sense strand
agaagaaggaagagagauu

SEQ ID NO: 2345588 - RNA, 19 nt, Homo sapiens
  misc_RNA (1)...(19): siRNA sense strand
cacaaauaccagugggaau

SEQ ID NO: 2345589 - RNA, 19 nt, Homo sapiens
  misc_RNA (1)...(19): siRNA sense strand
cagaaaauggagagagauu

SEQ ID NO: 2345590 - RNA, 19 nt, Homo sapiens
  misc_RNA (1)...(19): siRNA sense strand
ggaacuucguuuagaggau

SEQ ID NO: 2345591 - RNA, 19 nt, Homo sapiens
  misc_RNA (1)...(19): siRNA sense strand
aagcaagucacuagaggaa

SEQ ID NO: 2345592 - RNA, 19 nt, Homo sapiens
  misc_RNA (1)...(19): siRNA sense strand
ccgagaagaaauagaaaau

SEQ ID NO: 2345593 - RNA, 19 nt, Homo sapiens
  misc_RNA (1)...(19): siRNA sense strand
gcauauggucagaacaaaa

SEQ ID NO: 2345594 - RNA, 19 nt, Homo sapiens
  misc_RNA (1)...(19): siRNA sense strand
gugcauauccggaggaaag

SEQ ID NO: 2345595 - RNA, 19 nt, Homo sapiens
  misc_RNA (1)...(19): siRNA sense strand
augaagaggaggaggagca

SEQ ID NO: 2345596 - RNA, 19 nt, Homo sapiens
  misc_RNA (1)...(19): siRNA sense strand
cuggaggccucuuuggaaa

SEQ ID NO: 2345597 - RNA, 19 nt, Homo sapiens
  misc_RNA (1)...(19): siRNA sense strand
aaauaaaccaacuggcuuu

SEQ ID NO: 2345598 - RNA, 19 nt, Homo sapiens
  misc_RNA (1)...(19): siRNA sense strand
cgaaaugggcuggaaggaa

SEQ ID NO: 2345599 - RNA, 19 nt, Homo sapiens
  misc_RNA (1)...(19): siRNA sense strand
uugaaggagaugugaauuu

SEQ ID NO: 2345600 - RNA, 19 nt, Homo sapiens
  misc_RNA (1)...(19): siRNA sense strand
caacaauacuggaggccuc

SEQ ID NO: 2345601 - RNA, 19 nt, Homo sapiens
  misc_RNA (1)...(19): siRNA sense strand
ccuccaacugguacagaua

SEQ ID NO: 2345602 - RNA, 19 nt, Homo sapiens
  misc_RNA (1)...(19): siRNA sense strand
uugcauauggucagaacaa

SEQ ID NO: 2345603 - RNA, 19 nt, Homo sapiens
  misc_RNA (1)...(19): siRNA sense strand
agaaguugguuuugaagaa

SEQ ID NO: 2345604 - RNA, 19 nt, Homo sapiens
  misc_RNA (1)...(19): siRNA sense strand
gaaacugguucuugggugu

SEQ ID NO: 2345605 - RNA, 19 nt, Homo sapiens
  misc_RNA (1)...(19): siRNA sense strand
cuaugaaggaagauuggaa

SEQ ID NO: 2345606 - RNA, 19 nt, Homo sapiens
  misc_RNA (1)...(19): siRNA sense strand
acaaagaaguugaagacug

SEQ ID NO: 2345607 - RNA, 19 nt, Homo sapiens
  misc_RNA (1)...(19): siRNA sense strand
aagaagagcauuaagaagu

SEQ ID NO: 2345608 - RNA, 19 nt, Homo sapiens
  misc_RNA (1)...(19): siRNA sense strand
ucaggaugaccgagaagaa

SEQ ID NO: 2345609 - RNA, 19 nt, Homo sapiens
  misc_RNA (1)...(19): siRNA sense strand
cugaugaagaggaggagga

SEQ ID NO: 2345610 - RNA, 19 nt, Homo sapiens
  misc_RNA (1)...(19): siRNA sense strand
aguacaaagaaguugaaga

SEQ ID NO: 2345611 - RNA, 19 nt, Homo sapiens
  misc_RNA (1)...(19): siRNA sense strand
uuggaaauucacagacuaa

SEQ ID NO: 2345612 - RNA, 19 nt, Homo sapiens
  misc_RNA (1)...(19): siRNA sense strand
gaaaugggcuggaaggaag

SEQ ID NO: 2345613 - RNA, 19 nt, Homo sapiens
  misc_RNA (1)...(19): siRNA sense strand
cggaaagguuaugguucaa

SEQ ID NO: 2345614 - RNA, 19 nt, Homo sapiens
  misc_RNA (1)...(19): siRNA sense strand
caaaccuguugaugagaau

SEQ ID NO: 2345615 - RNA, 19 nt, Homo sapiens
  misc_RNA (1)...(19): siRNA sense strand
ggagaugugaauuugacaa

SEQ ID NO: 2345616 - RNA, 19 nt, Homo sapiens
  misc_RNA (1)...(19): siRNA sense strand
ccuaagaagaaggaagaga

SEQ ID NO: 2345617 - RNA, 19 nt, Homo sapiens
  misc_RNA (1)...(19): siRNA sense strand
uaagaagaaggaagagaga

SEQ ID NO: 2345618 - RNA, 19 nt, Homo sapiens
  misc_RNA (1)...(19): siRNA sense strand
aaagaauaccggccugaaa

SEQ ID NO: 2345619 - RNA, 19 nt, Homo sapiens
  misc_RNA (1)...(19): siRNA sense strand
cuaccagccucuucagcaa

SEQ ID NO: 2345620 - RNA, 19 nt, Homo sapiens
  misc_RNA (1)...(19): siRNA sense strand
aaacacagcaacagcaaca

SEQ ID NO: 2345621 - RNA, 19 nt, Homo sapiens
  misc_RNA (1)...(19): siRNA sense strand
aggaugaccgagaagaaau

SEQ ID NO: 2345622 - RNA, 19 nt, Homo sapiens
  misc_RNA (1)...(19): siRNA sense strand
aagaaggaagagagauuga

SEQ ID NO: 2345623 - RNA, 19 nt, Homo sapiens
  misc_RNA (1)...(19): siRNA sense strand
gcauuaagaaguugguuuu

SEQ ID NO: 2345624 - RNA, 19 nt, Homo sapiens
  misc_RNA (1)...(19): siRNA sense strand
cuggaaauaaacacagcaa

SEQ ID NO: 2345625 - RNA, 19 nt, Homo sapiens
  misc_RNA (1)...(19): siRNA sense strand
agacuaaaccaggaggauu

SEQ ID NO: 2345626 - RNA, 19 nt, Homo sapiens
  misc_RNA (1)...(19): siRNA sense strand
caucaauagucuaacauac

SEQ ID NO: 2345627 - RNA, 19 nt, Homo sapiens
  misc_RNA (1)...(19): siRNA sense strand
ccacuagaguccggccaaa

SEQ ID NO: 2345628 - RNA, 19 nt, Homo sapiens
  misc_RNA (1)...(19): siRNA sense strand
aaggaaacagggagcucaa

SEQ ID NO: 2345629 - RNA, 19 nt, Homo sapiens
  misc_RNA (1)...(19): siRNA sense strand
gggcagaccaauacuggau

SEQ ID NO: 2345630 - RNA, 19 nt, Homo sapiens
  misc_RNA (1)...(19): siRNA sense strand
gcacaaauaccagugggaa

SEQ ID NO: 2345631 - RNA, 19 nt, Homo sapiens
  misc_RNA (1)...(19): siRNA sense strand
ccuacugggacuacuauua

SEQ ID NO: 2345632 - RNA, 19 nt, Homo sapiens
  misc_RNA (1)...(19): siRNA sense strand
ugggacagcauuuggaaca

SEQ ID NO: 2345633 - RNA, 19 nt, Homo sapiens
  misc_RNA (1)...(19): siRNA sense strand
gaacaggucucuuugggca

SEQ ID NO: 2345634 - RNA, 19 nt, Homo sapiens
  misc_RNA (1)...(19): siRNA sense strand
guuuggaacugcaagcaca

SEQ ID NO: 2345635 - RNA, 19 nt, Homo sapiens
  misc_RNA (1)...(19): siRNA sense strand
gguacagauacuaugguca

SEQ ID NO: 2345636 - RNA, 19 nt, Homo sapiens
  misc_RNA (1)...(19): siRNA sense strand
ugggcuuggugcaggauuu

SEQ ID NO: 2345637 - RNA, 19 nt, Homo sapiens
  misc_RNA (1)...(19): siRNA sense strand
gcaggauggagaugaagau

SEQ ID NO: 2345638 - RNA, 19 nt, Homo sapiens
  misc_RNA (1)...(19): siRNA sense strand
gacuaaaccaggaggauug

SEQ ID NO: 2345639 - RNA, 19 nt, Homo sapiens
  misc_RNA (1)...(19): siRNA sense strand
uagaggauuaucaggcuaa

SEQ ID NO: 2345640 - RNA, 19 nt, Homo sapiens
  misc_RNA (1)...(19): siRNA sense strand
accugugggugaagggcua

SEQ ID NO: 2345641 - RNA, 19 nt, Homo sapiens
  misc_RNA (1)...(19): siRNA sense strand
aguuuggccaacagauaaa

SEQ ID NO: 2345642 - RNA, 19 nt, Homo sapiens
  misc_RNA (1)...(19): siRNA sense strand
agaagaaggaagagagauu

SEQ ID NO: 2345643 - RNA, 19 nt, Homo sapiens
  misc_RNA (1)...(19): siRNA sense strand
cacaaauaccagugggaau

SEQ ID NO: 2345644 - RNA, 19 nt, Homo sapiens
  misc_RNA (1)...(19): siRNA sense strand
cagaaaauggagagagauu

SEQ ID NO: 2345645 - RNA, 19 nt, Homo sapiens
  misc_RNA (1)...(19): siRNA sense strand
ggaacuucguuuagaggau

SEQ ID NO: 2345646 - RNA, 19 nt, Homo sapiens
  misc_RNA (1)...(19): siRNA sense strand
aagcaagucacuagaggaa

SEQ ID NO: 2345647 - RNA, 19 nt, Homo sapiens
  misc_RNA (1)...(19): siRNA sense strand
ccgagaagaaauagaaaau

SEQ ID NO: 2345648 - RNA, 19 nt, Homo sapiens
  misc_RNA (1)...(19): siRNA sense strand
gcauauggucagaacaaaa

SEQ ID NO: 2345649 - RNA, 19 nt, Homo sapiens
  misc_RNA (1)...(19): siRNA sense strand
gugcauauccggaggaaag

SEQ ID NO: 2345650 - RNA, 19 nt, Homo sapiens
  misc_RNA (1)...(19): siRNA sense strand
augaagaggaggaggagca

SEQ ID NO: 2345651 - RNA, 19 nt, Homo sapiens
  misc_RNA (1)...(19): siRNA sense strand
cuggaggccucuuuggaaa

SEQ ID NO: 2345652 - RNA, 19 nt, Homo sapiens
  misc_RNA (1)...(19): siRNA sense strand
aaauaaaccaacuggcuuu

SEQ ID NO: 2345653 - RNA, 19 nt, Homo sapiens
  misc_RNA (1)...(19): siRNA sense strand
cgaaaugggcuggaaggaa

SEQ ID NO: 2345654 - RNA, 19 nt, Homo sapiens
  misc_RNA (1)...(19): siRNA sense strand
uugaaggagaugugaauuu

SEQ ID NO: 2345655 - RNA, 19 nt, Homo sapiens
  misc_RNA (1)...(19): siRNA sense strand
caacaauacuggaggccuc

SEQ ID NO: 2345656 - RNA, 19 nt, Homo sapiens
  misc_RNA (1)...(19): siRNA sense strand
ccuccaacugguacagaua

SEQ ID NO: 2345657 - RNA, 19 nt, Homo sapiens
  misc_RNA (1)...(19): siRNA sense strand
uugcauauggucagaacaa

SEQ ID NO: 2345658 - RNA, 19 nt, Homo sapiens
  misc_RNA (1)...(19): siRNA sense strand
agaaguugguuuugaagaa

SEQ ID NO: 2345659 - RNA, 19 nt, Homo sapiens
  misc_RNA (1)...(19): siRNA sense strand
gaaacugguucuugggugu

SEQ ID NO: 2345660 - RNA, 19 nt, Homo sapiens
  misc_RNA (1)...(19): siRNA sense strand
cuaugaaggaagauuggaa

SEQ ID NO: 2345661 - RNA, 19 nt, Homo sapiens
  misc_RNA (1)...(19): siRNA sense strand
acaaagaaguugaagacug

SEQ ID NO: 2345662 - RNA, 19 nt, Homo sapiens
  misc_RNA (1)...(19): siRNA sense strand
aagaagagcauuaagaagu

SEQ ID NO: 2345663 - RNA, 19 nt, Homo sapiens
  misc_RNA (1)...(19): siRNA sense strand
ucaggaugaccgagaagaa

SEQ ID NO: 2345664 - RNA, 19 nt, Homo sapiens
  misc_RNA (1)...(19): siRNA sense strand
cugaugaagaggaggagga

SEQ ID NO: 2345665 - RNA, 19 nt, Homo sapiens
  misc_RNA (1)...(19): siRNA sense strand
aguacaaagaaguugaaga

SEQ ID NO: 2345666 - RNA, 19 nt, Homo sapiens
  misc_RNA (1)...(19): siRNA sense strand
uuggaaauucacagacuaa

SEQ ID NO: 2345667 - RNA, 19 nt, Homo sapiens
  misc_RNA (1)...(19): siRNA sense strand
gaaaugggcuggaaggaag

SEQ ID NO: 2345668 - RNA, 19 nt, Homo sapiens
  misc_RNA (1)...(19): siRNA sense strand
cggaaagguuaugguucaa

SEQ ID NO: 2345669 - RNA, 19 nt, Homo sapiens
  misc_RNA (1)...(19): siRNA sense strand
caaaccuguugaugagaau

SEQ ID NO: 2345670 - RNA, 19 nt, Homo sapiens
  misc_RNA (1)...(19): siRNA sense strand
ggagaugugaauuugacaa

SEQ ID NO: 2345671 - RNA, 19 nt, Homo sapiens
  misc_RNA (1)...(19): siRNA sense strand
ccuaagaagaaggaagaga

SEQ ID NO: 2345672 - RNA, 19 nt, Homo sapiens
  misc_RNA (1)...(19): siRNA sense strand
uaagaagaaggaagagaga

SEQ ID NO: 2345673 - RNA, 19 nt, Homo sapiens
  misc_RNA (1)...(19): siRNA sense strand
aaagaauaccggccugaaa

SEQ ID NO: 2345674 - RNA, 19 nt, Homo sapiens
  misc_RNA (1)...(19): siRNA sense strand
cuaccagccucuucagcaa

SEQ ID NO: 2345675 - RNA, 19 nt, Homo sapiens
  misc_RNA (1)...(19): siRNA sense strand
aaacacagcaacagcaaca

SEQ ID NO: 2345676 - RNA, 19 nt, Homo sapiens
  misc_RNA (1)...(19): siRNA sense strand
aggaugaccgagaagaaau

SEQ ID NO: 2345677 - RNA, 19 nt, Homo sapiens
  misc_RNA (1)...(19): siRNA sense strand
aagaaggaagagagauuga

SEQ ID NO: 2345678 - RNA, 19 nt, Homo sapiens
  misc_RNA (1)...(19): siRNA sense strand
gcauuaagaaguugguuuu

SEQ ID NO: 2345679 - RNA, 19 nt, Homo sapiens
  misc_RNA (1)...(19): siRNA sense strand
cuggaaauaaacacagcaa

SEQ ID NO: 2345680 - RNA, 19 nt, Homo sapiens
  misc_RNA (1)...(19): siRNA sense strand
agacuaaaccaggaggauu

SEQ ID NO: 2345681 - RNA, 19 nt, Homo sapiens
  misc_RNA (1)...(19): siRNA sense strand
caucaauagucuaacauac

SEQ ID NO: 2345682 - RNA, 19 nt, Homo sapiens
  misc_RNA (1)...(19): siRNA sense strand
ccacuagaguccggccaaa

SEQ ID NO: 2345683 - RNA, 19 nt, Homo sapiens
  misc_RNA (1)...(19): siRNA sense strand
aaggaaacagggagcucaa

SEQ ID NO: 2345684 - RNA, 19 nt, Homo sapiens
  misc_RNA (1)...(19): siRNA sense strand
gggcagaccaauacuggau

SEQ ID NO: 2345685 - RNA, 19 nt, Homo sapiens
  misc_RNA (1)...(19): siRNA sense strand
gcacaaauaccagugggaa

SEQ ID NO: 2345686 - RNA, 19 nt, Homo sapiens
  misc_RNA (1)...(19): siRNA sense strand
ccuacugggacuacuauua

SEQ ID NO: 2345687 - RNA, 19 nt, Homo sapiens
  misc_RNA (1)...(19): siRNA sense strand
ugggacagcauuuggaaca

SEQ ID NO: 2345688 - RNA, 19 nt, Homo sapiens
  misc_RNA (1)...(19): siRNA sense strand
gaacaggucucuuugggca

SEQ ID NO: 2345689 - RNA, 19 nt, Homo sapiens
  misc_RNA (1)...(19): siRNA sense strand
guuuggaacugcaagcaca

SEQ ID NO: 2345690 - RNA, 19 nt, Homo sapiens
  misc_RNA (1)...(19): siRNA sense strand
gguacagauacuaugguca

SEQ ID NO: 2345691 - RNA, 19 nt, Homo sapiens
  misc_RNA (1)...(19): siRNA sense strand
ugggcuuggugcaggauuu

SEQ ID NO: 2345692 - RNA, 19 nt, Homo sapiens
  misc_RNA (1)...(19): siRNA sense strand
gcaggauggagaugaagau

SEQ ID NO: 2345693 - RNA, 19 nt, Homo sapiens
  misc_RNA (1)...(19): siRNA sense strand
gacuaaaccaggaggauug

SEQ ID NO: 2345694 - RNA, 19 nt, Homo sapiens
  misc_RNA (1)...(19): siRNA sense strand
uagaggauuaucaggcuaa

SEQ ID NO: 2345695 - RNA, 19 nt, Homo sapiens
  misc_RNA (1)...(19): siRNA sense strand
accugugggugaagggcua

SEQ ID NO: 2345696 - RNA, 19 nt, Homo sapiens
  misc_RNA (1)...(19): siRNA sense strand
aguuuggccaacagauaaa

SEQ ID NO: 2345697 - RNA, 19 nt, Homo sapiens
  misc_RNA (1)...(19): siRNA sense strand
cugcaaaagaagaggaaaa

SEQ ID NO: 2345698 - RNA, 19 nt, Homo sapiens
  misc_RNA (1)...(19): siRNA sense strand
aguagaugauguaaggaaa

SEQ ID NO: 2345699 - RNA, 19 nt, Homo sapiens
  misc_RNA (1)...(19): siRNA sense strand
ccgaauggaauuugaagaa

SEQ ID NO: 2345700 - RNA, 19 nt, Homo sapiens
  misc_RNA (1)...(19): siRNA sense strand
uggaacagagugugggaua

SEQ ID NO: 2345701 - RNA, 19 nt, Homo sapiens
  misc_RNA (1)...(19): siRNA sense strand
ccuaagagaaagaagaaaa

SEQ ID NO: 2345702 - RNA, 19 nt, Homo sapiens
  misc_RNA (1)...(19): siRNA sense strand
cguuugaacaucugguaua

SEQ ID NO: 2345703 - RNA, 19 nt, Homo sapiens
  misc_RNA (1)...(19): siRNA sense strand
ccuuuaaagcauugugcaa

SEQ ID NO: 2345704 - RNA, 19 nt, Homo sapiens
  misc_RNA (1)...(19): siRNA sense strand
acauaaaggucaagaagcu

SEQ ID NO: 2345705 - RNA, 19 nt, Homo sapiens
  misc_RNA (1)...(19): siRNA sense strand
agccauuuguccagaauaa

SEQ ID NO: 2345706 - RNA, 19 nt, Homo sapiens
  misc_RNA (1)...(19): siRNA sense strand
acucaaaguugcuggagga

SEQ ID NO: 2345707 - RNA, 19 nt, Homo sapiens
  misc_RNA (1)...(19): siRNA sense strand
ggucaaugaaugugaucuu

SEQ ID NO: 2345708 - RNA, 19 nt, Homo sapiens
  misc_RNA (1)...(19): siRNA sense strand
ugugagaaugugacagaaa

SEQ ID NO: 2345709 - RNA, 19 nt, Homo sapiens
  misc_RNA (1)...(19): siRNA sense strand
ucuaggauuaagaggguua

SEQ ID NO: 2345710 - RNA, 19 nt, Homo sapiens
  misc_RNA (1)...(19): siRNA sense strand
guagaugauguaaggaaau

SEQ ID NO: 2345711 - RNA, 19 nt, Homo sapiens
  misc_RNA (1)...(19): siRNA sense strand
ugugaagcgcugugggaau

SEQ ID NO: 2345712 - RNA, 19 nt, Homo sapiens
  misc_RNA (1)...(19): siRNA sense strand
ugaagaaggagaagagugu

SEQ ID NO: 2345713 - RNA, 19 nt, Homo sapiens
  misc_RNA (1)...(19): siRNA sense strand
aagaaggagaagaguguga

SEQ ID NO: 2345714 - RNA, 19 nt, Homo sapiens
  misc_RNA (1)...(19): siRNA sense strand
acaccguaguugugcaauu

SEQ ID NO: 2345715 - RNA, 19 nt, Homo sapiens
  misc_RNA (1)...(19): siRNA sense strand
ggaauucccuguaaggaga

SEQ ID NO: 2345716 - RNA, 19 nt, Homo sapiens
  misc_RNA (1)...(19): siRNA sense strand
cuaucaugguuauguggaa

SEQ ID NO: 2345717 - RNA, 19 nt, Homo sapiens
  misc_RNA (1)...(19): siRNA sense strand
ggaauauacuguagagagg

SEQ ID NO: 2345718 - RNA, 19 nt, Homo sapiens
  misc_RNA (1)...(19): siRNA sense strand
ugagaaugugacagaaauu

SEQ ID NO: 2345719 - RNA, 19 nt, Homo sapiens
  misc_RNA (1)...(19): siRNA sense strand
aguggaagucggagaacau

SEQ ID NO: 2345720 - RNA, 19 nt, Homo sapiens
  misc_RNA (1)...(19): siRNA sense strand
ugggaaugguguuguugaa

SEQ ID NO: 2345721 - RNA, 19 nt, Homo sapiens
  misc_RNA (1)...(19): siRNA sense strand
gaaagauggaacagagugu

SEQ ID NO: 2345722 - RNA, 19 nt, Homo sapiens
  misc_RNA (1)...(19): siRNA sense strand
agauggacagugaggagaa

SEQ ID NO: 2345723 - RNA, 19 nt, Homo sapiens
  misc_RNA (1)...(19): siRNA sense strand
uugaaacaguacacacaaa

SEQ ID NO: 2345724 - RNA, 19 nt, Homo sapiens
  misc_RNA (1)...(19): siRNA sense strand
uaguagaugauguaaggaa

SEQ ID NO: 2345725 - RNA, 19 nt, Homo sapiens
  misc_RNA (1)...(19): siRNA sense strand
guucaaacuccaucugcaa

SEQ ID NO: 2345726 - RNA, 19 nt, Homo sapiens
  misc_RNA (1)...(19): siRNA sense strand
augaaaggaacgacucaaa

SEQ ID NO: 2345727 - RNA, 19 nt, Homo sapiens
  misc_RNA (1)...(19): siRNA sense strand
cuguauugcaaguggaagu

SEQ ID NO: 2345728 - RNA, 19 nt, Homo sapiens
  misc_RNA (1)...(19): siRNA sense strand
cauuguaguagaugaugua

SEQ ID NO: 2345729 - RNA, 19 nt, Homo sapiens
  misc_RNA (1)...(19): siRNA sense strand
gcuugaaacaguacacaca

SEQ ID NO: 2345730 - RNA, 19 nt, Homo sapiens
  misc_RNA (1)...(19): siRNA sense strand
uggaagucggagaacauua

SEQ ID NO: 2345731 - RNA, 19 nt, Homo sapiens
  misc_RNA (1)...(19): siRNA sense strand
agaaaggaggucaaugaau

SEQ ID NO: 2345732 - RNA, 19 nt, Homo sapiens
  misc_RNA (1)...(19): siRNA sense strand
uggacagugaggagaaaca

SEQ ID NO: 2345733 - RNA, 19 nt, Homo sapiens
  misc_RNA (1)...(19): siRNA sense strand
gggaccugauauuggugaa

SEQ ID NO: 2345734 - RNA, 19 nt, Homo sapiens
  misc_RNA (1)...(19): siRNA sense strand
gaucauauaugcauccaca

SEQ ID NO: 2345735 - RNA, 19 nt, Homo sapiens
  misc_RNA (1)...(19): siRNA sense strand
uuguagucgucauugauaa

SEQ ID NO: 2345736 - RNA, 19 nt, Homo sapiens
  misc_RNA (1)...(19): siRNA sense strand
cuuuaaagcauugugcaaa

SEQ ID NO: 2345737 - RNA, 19 nt, Homo sapiens
  misc_RNA (1)...(19): siRNA sense strand
ggaugaagggaccugauau

SEQ ID NO: 2345738 - RNA, 19 nt, Homo sapiens
  misc_RNA (1)...(19): siRNA sense strand
caucacugccauugcaauu

SEQ ID NO: 2345739 - RNA, 19 nt, Homo sapiens
  misc_RNA (1)...(19): siRNA sense strand
ucacaaccuagaugcauaa

SEQ ID NO: 2345740 - RNA, 19 nt, Homo sapiens
  misc_RNA (1)...(19): siRNA sense strand
cuguggaccuuuaaagcau

SEQ ID NO: 2345741 - RNA, 19 nt, Homo sapiens
  misc_RNA (1)...(19): siRNA sense strand
gauccggauuuaugcaaaa

SEQ ID NO: 2345742 - RNA, 19 nt, Homo sapiens
  misc_RNA (1)...(19): siRNA sense strand
caauuguaguuauggugau

SEQ ID NO: 2345743 - RNA, 19 nt, Homo sapiens
  misc_RNA (1)...(19): siRNA sense strand
gcuacaaagaauugaacac

SEQ ID NO: 2345744 - RNA, 19 nt, Homo sapiens
  misc_RNA (1)...(19): siRNA sense strand
ugaagugaaagauggaaca

SEQ ID NO: 2345745 - RNA, 19 nt, Homo sapiens
  misc_RNA (1)...(19): siRNA sense strand
caguacacacaaaggacau

SEQ ID NO: 2345746 - RNA, 19 nt, Homo sapiens
  misc_RNA (1)...(19): siRNA sense strand
aaugaacaguguaggagga

SEQ ID NO: 2345747 - RNA, 19 nt, Homo sapiens
  misc_RNA (1)...(19): siRNA sense strand
gauaaaaggcuauggaggu

SEQ ID NO: 2345748 - RNA, 19 nt, Homo sapiens
  misc_RNA (1)...(19): siRNA sense strand
gguguuaagguguuauuau

SEQ ID NO: 2345749 - RNA, 19 nt, Homo sapiens
  misc_RNA (1)...(19): siRNA sense strand
cauaaugcaugaaggcaac

SEQ ID NO: 2345750 - RNA, 19 nt, Homo sapiens
  misc_RNA (1)...(19): siRNA sense strand
auaacaugccgaauggaau

SEQ ID NO: 2345751 - RNA, 19 nt, Homo sapiens
  misc_RNA (1)...(19): siRNA sense strand
uguguagaaaggaggucaa

SEQ ID NO: 2345752 - RNA, 19 nt, Homo sapiens
  misc_RNA (1)...(19): siRNA sense strand
caauaaacaucacugccau

SEQ ID NO: 2345753 - RNA, 19 nt, Homo sapiens
  misc_RNA (1)...(19): siRNA sense strand
aauaacaugccgaauggaa

SEQ ID NO: 2345754 - RNA, 19 nt, Homo sapiens
  misc_RNA (1)...(19): siRNA sense strand
uguuguugaagaaggagaa

SEQ ID NO: 2345755 - RNA, 19 nt, Homo sapiens
  misc_RNA (1)...(19): siRNA sense strand
auaaaaggcuauggaggua

SEQ ID NO: 2345756 - RNA, 19 nt, Homo sapiens
  misc_RNA (1)...(19): siRNA sense strand
cugcaaaagaagaggaaaa

SEQ ID NO: 2345757 - RNA, 19 nt, Homo sapiens
  misc_RNA (1)...(19): siRNA sense strand
aguagaugauguaaggaaa

SEQ ID NO: 2345758 - RNA, 19 nt, Homo sapiens
  misc_RNA (1)...(19): siRNA sense strand
ccgaauggaauuugaagaa

SEQ ID NO: 2345759 - RNA, 19 nt, Homo sapiens
  misc_RNA (1)...(19): siRNA sense strand
uggaacagagugugggaua

SEQ ID NO: 2345760 - RNA, 19 nt, Homo sapiens
  misc_RNA (1)...(19): siRNA sense strand
ccuaagagaaagaagaaaa

SEQ ID NO: 2345761 - RNA, 19 nt, Homo sapiens
  misc_RNA (1)...(19): siRNA sense strand
cguuugaacaucugguaua

SEQ ID NO: 2345762 - RNA, 19 nt, Homo sapiens
  misc_RNA (1)...(19): siRNA sense strand
ccuuuaaagcauugugcaa

SEQ ID NO: 2345763 - RNA, 19 nt, Homo sapiens
  misc_RNA (1)...(19): siRNA sense strand
acauaaaggucaagaagcu

SEQ ID NO: 2345764 - RNA, 19 nt, Homo sapiens
  misc_RNA (1)...(19): siRNA sense strand
agccauuuguccagaauaa

SEQ ID NO: 2345765 - RNA, 19 nt, Homo sapiens
  misc_RNA (1)...(19): siRNA sense strand
acucaaaguugcuggagga

SEQ ID NO: 2345766 - RNA, 19 nt, Homo sapiens
  misc_RNA (1)...(19): siRNA sense strand
ggucaaugaaugugaucuu

SEQ ID NO: 2345767 - RNA, 19 nt, Homo sapiens
  misc_RNA (1)...(19): siRNA sense strand
ugugagaaugugacagaaa

SEQ ID NO: 2345768 - RNA, 19 nt, Homo sapiens
  misc_RNA (1)...(19): siRNA sense strand
ucuaggauuaagaggguua

SEQ ID NO: 2345769 - RNA, 19 nt, Homo sapiens
  misc_RNA (1)...(19): siRNA sense strand
guagaugauguaaggaaau

SEQ ID NO: 2345770 - RNA, 19 nt, Homo sapiens
  misc_RNA (1)...(19): siRNA sense strand
ugugaagcgcugugggaau

SEQ ID NO: 2345771 - RNA, 19 nt, Homo sapiens
  misc_RNA (1)...(19): siRNA sense strand
ugaagaaggagaagagugu

SEQ ID NO: 2345772 - RNA, 19 nt, Homo sapiens
  misc_RNA (1)...(19): siRNA sense strand
aagaaggagaagaguguga

SEQ ID NO: 2345773 - RNA, 19 nt, Homo sapiens
  misc_RNA (1)...(19): siRNA sense strand
acaccguaguugugcaauu

SEQ ID NO: 2345774 - RNA, 19 nt, Homo sapiens
  misc_RNA (1)...(19): siRNA sense strand
ggaauucccuguaaggaga

SEQ ID NO: 2345775 - RNA, 19 nt, Homo sapiens
  misc_RNA (1)...(19): siRNA sense strand
cuaucaugguuauguggaa

SEQ ID NO: 2345776 - RNA, 19 nt, Homo sapiens
  misc_RNA (1)...(19): siRNA sense strand
ggaauauacuguagagagg

SEQ ID NO: 2345777 - RNA, 19 nt, Homo sapiens
  misc_RNA (1)...(19): siRNA sense strand
ugagaaugugacagaaauu

SEQ ID NO: 2345778 - RNA, 19 nt, Homo sapiens
  misc_RNA (1)...(19): siRNA sense strand
aguggaagucggagaacau

SEQ ID NO: 2345779 - RNA, 19 nt, Homo sapiens
  misc_RNA (1)...(19): siRNA sense strand
ugggaaugguguuguugaa

SEQ ID NO: 2345780 - RNA, 19 nt, Homo sapiens
  misc_RNA (1)...(19): siRNA sense strand
gaaagauggaacagagugu

SEQ ID NO: 2345781 - RNA, 19 nt, Homo sapiens
  misc_RNA (1)...(19): siRNA sense strand
agauggacagugaggagaa

SEQ ID NO: 2345782 - RNA, 19 nt, Homo sapiens
  misc_RNA (1)...(19): siRNA sense strand
uugaaacaguacacacaaa

SEQ ID NO: 2345783 - RNA, 19 nt, Homo sapiens
  misc_RNA (1)...(19): siRNA sense strand
uaguagaugauguaaggaa

SEQ ID NO: 2345784 - RNA, 19 nt, Homo sapiens
  misc_RNA (1)...(19): siRNA sense strand
guucaaacuccaucugcaa

SEQ ID NO: 2345785 - RNA, 19 nt, Homo sapiens
  misc_RNA (1)...(19): siRNA sense strand
augaaaggaacgacucaaa

SEQ ID NO: 2345786 - RNA, 19 nt, Homo sapiens
  misc_RNA (1)...(19): siRNA sense strand
cuguauugcaaguggaagu

SEQ ID NO: 2345787 - RNA, 19 nt, Homo sapiens
  misc_RNA (1)...(19): siRNA sense strand
cauuguaguagaugaugua

SEQ ID NO: 2345788 - RNA, 19 nt, Homo sapiens
  misc_RNA (1)...(19): siRNA sense strand
gcuugaaacaguacacaca

SEQ ID NO: 2345789 - RNA, 19 nt, Homo sapiens
  misc_RNA (1)...(19): siRNA sense strand
uggaagucggagaacauua

SEQ ID NO: 2345790 - RNA, 19 nt, Homo sapiens
  misc_RNA (1)...(19): siRNA sense strand
agaaaggaggucaaugaau

SEQ ID NO: 2345791 - RNA, 19 nt, Homo sapiens
  misc_RNA (1)...(19): siRNA sense strand
uggacagugaggagaaaca

SEQ ID NO: 2345792 - RNA, 19 nt, Homo sapiens
  misc_RNA (1)...(19): siRNA sense strand
gggaccugauauuggugaa

SEQ ID NO: 2345793 - RNA, 19 nt, Homo sapiens
  misc_RNA (1)...(19): siRNA sense strand
gaucauauaugcauccaca

SEQ ID NO: 2345794 - RNA, 19 nt, Homo sapiens
  misc_RNA (1)...(19): siRNA sense strand
uuguagucgucauugauaa

SEQ ID NO: 2345795 - RNA, 19 nt, Homo sapiens
  misc_RNA (1)...(19): siRNA sense strand
cuuuaaagcauugugcaaa

SEQ ID NO: 2345796 - RNA, 19 nt, Homo sapiens
  misc_RNA (1)...(19): siRNA sense strand
ggaugaagggaccugauau

SEQ ID NO: 2345797 - RNA, 19 nt, Homo sapiens
  misc_RNA (1)...(19): siRNA sense strand
caucacugccauugcaauu

SEQ ID NO: 2345798 - RNA, 19 nt, Homo sapiens
  misc_RNA (1)...(19): siRNA sense strand
ucacaaccuagaugcauaa

SEQ ID NO: 2345799 - RNA, 19 nt, Homo sapiens
  misc_RNA (1)...(19): siRNA sense strand
cuguggaccuuuaaagcau

SEQ ID NO: 2345800 - RNA, 19 nt, Homo sapiens
  misc_RNA (1)...(19): siRNA sense strand
gauccggauuuaugcaaaa

SEQ ID NO: 2345801 - RNA, 19 nt, Homo sapiens
  misc_RNA (1)...(19): siRNA sense strand
caauuguaguuauggugau

SEQ ID NO: 2345802 - RNA, 19 nt, Homo sapiens
  misc_RNA (1)...(19): siRNA sense strand
gcuacaaagaauugaacac

SEQ ID NO: 2345803 - RNA, 19 nt, Homo sapiens
  misc_RNA (1)...(19): siRNA sense strand
ugaagugaaagauggaaca

SEQ ID NO: 2345804 - RNA, 19 nt, Homo sapiens
  misc_RNA (1)...(19): siRNA sense strand
caguacacacaaaggacau

SEQ ID NO: 2345805 - RNA, 19 nt, Homo sapiens
  misc_RNA (1)...(19): siRNA sense strand
aaugaacaguguaggagga

SEQ ID NO: 2345806 - RNA, 19 nt, Homo sapiens
  misc_RNA (1)...(19): siRNA sense strand
gauaaaaggcuauggaggu

SEQ ID NO: 2345807 - RNA, 19 nt, Homo sapiens
  misc_RNA (1)...(19): siRNA sense strand
gguguuaagguguuauuau

SEQ ID NO: 2345808 - RNA, 19 nt, Homo sapiens
  misc_RNA (1)...(19): siRNA sense strand
cauaaugcaugaaggcaac

SEQ ID NO: 2345809 - RNA, 19 nt, Homo sapiens
  misc_RNA (1)...(19): siRNA sense strand
auaacaugccgaauggaau

SEQ ID NO: 2345810 - RNA, 19 nt, Homo sapiens
  misc_RNA (1)...(19): siRNA sense strand
uguguagaaaggaggucaa

SEQ ID NO: 2345811 - RNA, 19 nt, Homo sapiens
  misc_RNA (1)...(19): siRNA sense strand
caauaaacaucacugccau

SEQ ID NO: 2345812 - RNA, 19 nt, Homo sapiens
  misc_RNA (1)...(19): siRNA sense strand
aauaacaugccgaauggaa

SEQ ID NO: 2345813 - RNA, 19 nt, Homo sapiens
  misc_RNA (1)...(19): siRNA sense strand
uguuguugaagaaggagaa

SEQ ID NO: 2345814 - RNA, 19 nt, Homo sapiens
  misc_RNA (1)...(19): siRNA sense strand
auaaaaggcuauggaggua

SEQ ID NO: 2345815 - RNA, 19 nt, Homo sapiens
  misc_RNA (1)...(19): siRNA sense strand
cugcaaaagaagaggaaaa

SEQ ID NO: 2345816 - RNA, 19 nt, Homo sapiens
  misc_RNA (1)...(19): siRNA sense strand
aguagaugauguaaggaaa

SEQ ID NO: 2345817 - RNA, 19 nt, Homo sapiens
  misc_RNA (1)...(19): siRNA sense strand
ccgaauggaauuugaagaa

SEQ ID NO: 2345818 - RNA, 19 nt, Homo sapiens
  misc_RNA (1)...(19): siRNA sense strand
uggaacagagugugggaua

SEQ ID NO: 2345819 - RNA, 19 nt, Homo sapiens
  misc_RNA (1)...(19): siRNA sense strand
ccuaagagaaagaagaaaa

SEQ ID NO: 2345820 - RNA, 19 nt, Homo sapiens
  misc_RNA (1)...(19): siRNA sense strand
cguuugaacaucugguaua

SEQ ID NO: 2345821 - RNA, 19 nt, Homo sapiens
  misc_RNA (1)...(19): siRNA sense strand
ccuuuaaagcauugugcaa

SEQ ID NO: 2345822 - RNA, 19 nt, Homo sapiens
  misc_RNA (1)...(19): siRNA sense strand
acauaaaggucaagaagcu

SEQ ID NO: 2345823 - RNA, 19 nt, Homo sapiens
  misc_RNA (1)...(19): siRNA sense strand
agccauuuguccagaauaa

SEQ ID NO: 2345824 - RNA, 19 nt, Homo sapiens
  misc_RNA (1)...(19): siRNA sense strand
acucaaaguugcuggagga

SEQ ID NO: 2345825 - RNA, 19 nt, Homo sapiens
  misc_RNA (1)...(19): siRNA sense strand
ggucaaugaaugugaucuu

SEQ ID NO: 2345826 - RNA, 19 nt, Homo sapiens
  misc_RNA (1)...(19): siRNA sense strand
ugugagaaugugacagaaa

SEQ ID NO: 2345827 - RNA, 19 nt, Homo sapiens
  misc_RNA (1)...(19): siRNA sense strand
ucuaggauuaagaggguua

SEQ ID NO: 2345828 - RNA, 19 nt, Homo sapiens
  misc_RNA (1)...(19): siRNA sense strand
guagaugauguaaggaaau

SEQ ID NO: 2345829 - RNA, 19 nt, Homo sapiens
  misc_RNA (1)...(19): siRNA sense strand
ugugaagcgcugugggaau

SEQ ID NO: 2345830 - RNA, 19 nt, Homo sapiens
  misc_RNA (1)...(19): siRNA sense strand
ugaagaaggagaagagugu

SEQ ID NO: 2345831 - RNA, 19 nt, Homo sapiens
  misc_RNA (1)...(19): siRNA sense strand
aagaaggagaagaguguga

SEQ ID NO: 2345832 - RNA, 19 nt, Homo sapiens
  misc_RNA (1)...(19): siRNA sense strand
acaccguaguugugcaauu

SEQ ID NO: 2345833 - RNA, 19 nt, Homo sapiens
  misc_RNA (1)...(19): siRNA sense strand
ggaauucccuguaaggaga

SEQ ID NO: 2345834 - RNA, 19 nt, Homo sapiens
  misc_RNA (1)...(19): siRNA sense strand
cuaucaugguuauguggaa

SEQ ID NO: 2345835 - RNA, 19 nt, Homo sapiens
  misc_RNA (1)...(19): siRNA sense strand
ggaauauacuguagagagg

SEQ ID NO: 2345836 - RNA, 19 nt, Homo sapiens
  misc_RNA (1)...(19): siRNA sense strand
ugagaaugugacagaaauu

SEQ ID NO: 2345837 - RNA, 19 nt, Homo sapiens
  misc_RNA (1)...(19): siRNA sense strand
aguggaagucggagaacau

SEQ ID NO: 2345838 - RNA, 19 nt, Homo sapiens
  misc_RNA (1)...(19): siRNA sense strand
ugggaaugguguuguugaa

SEQ ID NO: 2345839 - RNA, 19 nt, Homo sapiens
  misc_RNA (1)...(19): siRNA sense strand
gaaagauggaacagagugu

SEQ ID NO: 2345840 - RNA, 19 nt, Homo sapiens
  misc_RNA (1)...(19): siRNA sense strand
agauggacagugaggagaa

SEQ ID NO: 2345841 - RNA, 19 nt, Homo sapiens
  misc_RNA (1)...(19): siRNA sense strand
uugaaacaguacacacaaa

SEQ ID NO: 2345842 - RNA, 19 nt, Homo sapiens
  misc_RNA (1)...(19): siRNA sense strand
uaguagaugauguaaggaa

SEQ ID NO: 2345843 - RNA, 19 nt, Homo sapiens
  misc_RNA (1)...(19): siRNA sense strand
guucaaacuccaucugcaa

SEQ ID NO: 2345844 - RNA, 19 nt, Homo sapiens
  misc_RNA (1)...(19): siRNA sense strand
augaaaggaacgacucaaa

SEQ ID NO: 2345845 - RNA, 19 nt, Homo sapiens
  misc_RNA (1)...(19): siRNA sense strand
cuguauugcaaguggaagu

SEQ ID NO: 2345846 - RNA, 19 nt, Homo sapiens
  misc_RNA (1)...(19): siRNA sense strand
cauuguaguagaugaugua

SEQ ID NO: 2345847 - RNA, 19 nt, Homo sapiens
  misc_RNA (1)...(19): siRNA sense strand
gcuugaaacaguacacaca

SEQ ID NO: 2345848 - RNA, 19 nt, Homo sapiens
  misc_RNA (1)...(19): siRNA sense strand
uggaagucggagaacauua

SEQ ID NO: 2345849 - RNA, 19 nt, Homo sapiens
  misc_RNA (1)...(19): siRNA sense strand
agaaaggaggucaaugaau

SEQ ID NO: 2345850 - RNA, 19 nt, Homo sapiens
  misc_RNA (1)...(19): siRNA sense strand
uggacagugaggagaaaca

SEQ ID NO: 2345851 - RNA, 19 nt, Homo sapiens
  misc_RNA (1)...(19): siRNA sense strand
gggaccugauauuggugaa

SEQ ID NO: 2345852 - RNA, 19 nt, Homo sapiens
  misc_RNA (1)...(19): siRNA sense strand
gaucauauaugcauccaca

SEQ ID NO: 2345853 - RNA, 19 nt, Homo sapiens
  misc_RNA (1)...(19): siRNA sense strand
uuguagucgucauugauaa

SEQ ID NO: 2345854 - RNA, 19 nt, Homo sapiens
  misc_RNA (1)...(19): siRNA sense strand
cuuuaaagcauugugcaaa

SEQ ID NO: 2345855 - RNA, 19 nt, Homo sapiens
  misc_RNA (1)...(19): siRNA sense strand
ggaugaagggaccugauau

SEQ ID NO: 2345856 - RNA, 19 nt, Homo sapiens
  misc_RNA (1)...(19): siRNA sense strand
caucacugccauugcaauu

SEQ ID NO: 2345857 - RNA, 19 nt, Homo sapiens
  misc_RNA (1)...(19): siRNA sense strand
ucacaaccuagaugcauaa

SEQ ID NO: 2345858 - RNA, 19 nt, Homo sapiens
  misc_RNA (1)...(19): siRNA sense strand
cuguggaccuuuaaagcau

SEQ ID NO: 2345859 - RNA, 19 nt, Homo sapiens
  misc_RNA (1)...(19): siRNA sense strand
gauccggauuuaugcaaaa

SEQ ID NO: 2345860 - RNA, 19 nt, Homo sapiens
  misc_RNA (1)...(19): siRNA sense strand
caauuguaguuauggugau

SEQ ID NO: 2345861 - RNA, 19 nt, Homo sapiens
  misc_RNA (1)...(19): siRNA sense strand
gcuacaaagaauugaacac

SEQ ID NO: 2345862 - RNA, 19 nt, Homo sapiens
  misc_RNA (1)...(19): siRNA sense strand
ugaagugaaagauggaaca

SEQ ID NO: 2345863 - RNA, 19 nt, Homo sapiens
  misc_RNA (1)...(19): siRNA sense strand
caguacacacaaaggacau

SEQ ID NO: 2345864 - RNA, 19 nt, Homo sapiens
  misc_RNA (1)...(19): siRNA sense strand
aaugaacaguguaggagga

SEQ ID NO: 2345865 - RNA, 19 nt, Homo sapiens
  misc_RNA (1)...(19): siRNA sense strand
gauaaaaggcuauggaggu

SEQ ID NO: 2345866 - RNA, 19 nt, Homo sapiens
  misc_RNA (1)...(19): siRNA sense strand
gguguuaagguguuauuau

SEQ ID NO: 2345867 - RNA, 19 nt, Homo sapiens
  misc_RNA (1)...(19): siRNA sense strand
cauaaugcaugaaggcaac

SEQ ID NO: 2345868 - RNA, 19 nt, Homo sapiens
  misc_RNA (1)...(19): siRNA sense strand
auaacaugccgaauggaau

SEQ ID NO: 2345869 - RNA, 19 nt, Homo sapiens
  misc_RNA (1)...(19): siRNA sense strand
uguguagaaaggaggucaa

SEQ ID NO: 2345870 - RNA, 19 nt, Homo sapiens
  misc_RNA (1)...(19): siRNA sense strand
caauaaacaucacugccau

SEQ ID NO: 2345871 - RNA, 19 nt, Homo sapiens
  misc_RNA (1)...(19): siRNA sense strand
aauaacaugccgaauggaa

SEQ ID NO: 2345872 - RNA, 19 nt, Homo sapiens
  misc_RNA (1)...(19): siRNA sense strand
uguuguugaagaaggagaa

SEQ ID NO: 2345873 - RNA, 19 nt, Homo sapiens
  misc_RNA (1)...(19): siRNA sense strand
auaaaaggcuauggaggua

SEQ ID NO: 2345874 - RNA, 19 nt, Homo sapiens
  misc_RNA (1)...(19): siRNA sense strand
gcacagagcuggaccugca

SEQ ID NO: 2345875 - RNA, 19 nt, Homo sapiens
  misc_RNA (1)...(19): siRNA sense strand
ugagcuuaguggaggcaga

SEQ ID NO: 2345876 - RNA, 19 nt, Homo sapiens
  misc_RNA (1)...(19): siRNA sense strand
cccaagugagugagaacau

SEQ ID NO: 2345877 - RNA, 19 nt, Homo sapiens
  misc_RNA (1)...(19): siRNA sense strand
aggaagaaucugaagcaaa

SEQ ID NO: 2345878 - RNA, 19 nt, Homo sapiens
  misc_RNA (1)...(19): siRNA sense strand
agauauaugcagugccaaa

SEQ ID NO: 2345879 - RNA, 19 nt, Homo sapiens
  misc_RNA (1)...(19): siRNA sense strand
aggaagaaucuaaagcaaa

SEQ ID NO: 2345880 - RNA, 19 nt, Homo sapiens
  misc_RNA (1)...(19): siRNA sense strand
aggaagaaucuaaagcaaa

SEQ ID NO: 2345881 - RNA, 19 nt, Homo sapiens
  misc_RNA (1)...(19): siRNA sense strand
agaaagagcaguuugggaa

SEQ ID NO: 2345882 - RNA, 19 nt, Homo sapiens
  misc_RNA (1)...(19): siRNA sense strand
aaauaauaucccaggacua

SEQ ID NO: 2345883 - RNA, 19 nt, Homo sapiens
  misc_RNA (1)...(19): siRNA sense strand
agcaaagagugucaagaaa

SEQ ID NO: 2345884 - RNA, 19 nt, Homo sapiens
  misc_RNA (1)...(19): siRNA sense strand
ccuuaagucucuuggcgaa

SEQ ID NO: 2345885 - RNA, 19 nt, Homo sapiens
  misc_RNA (1)...(19): siRNA sense strand
gcuuaagugaugaugaaau

SEQ ID NO: 2345886 - RNA, 19 nt, Homo sapiens
  misc_RNA (1)...(19): siRNA sense strand
gcuuaagagauguggaaac

SEQ ID NO: 2345887 - RNA, 19 nt, Homo sapiens
  misc_RNA (1)...(19): siRNA sense strand
gugcuuaagagauguggaa

SEQ ID NO: 2345888 - RNA, 19 nt, Homo sapiens
  misc_RNA (1)...(19): siRNA sense strand
acaaaauacgcguuggaua

SEQ ID NO: 2345889 - RNA, 19 nt, Homo sapiens
  misc_RNA (1)...(19): siRNA sense strand
uguguaggcaggaaggaaa

SEQ ID NO: 2345890 - RNA, 19 nt, Homo sapiens
  misc_RNA (1)...(19): siRNA sense strand
cagaggagugucagaaaga

SEQ ID NO: 2345891 - RNA, 19 nt, Homo sapiens
  misc_RNA (1)...(19): siRNA sense strand
ugaaaguaaacgacccaaa

SEQ ID NO: 2345892 - RNA, 19 nt, Homo sapiens
  misc_RNA (1)...(19): siRNA sense strand
gggucaugcuguaggaaug

SEQ ID NO: 2345893 - RNA, 19 nt, Homo sapiens
  misc_RNA (1)...(19): siRNA sense strand
aggacuagguuaugugcuu

SEQ ID NO: 2345894 - RNA, 19 nt, Homo sapiens
  misc_RNA (1)...(19): siRNA sense strand
aggaaaugaaugugaccuu

SEQ ID NO: 2345895 - RNA, 19 nt, Homo sapiens
  misc_RNA (1)...(19): siRNA sense strand
cuugaaguauggacagauu

SEQ ID NO: 2345896 - RNA, 19 nt, Homo sapiens
  misc_RNA (1)...(19): siRNA sense strand
gauuacaggaauucgaaau

SEQ ID NO: 2345897 - RNA, 19 nt, Homo sapiens
  misc_RNA (1)...(19): siRNA sense strand
uugcauggucguuuggaaa

SEQ ID NO: 2345898 - RNA, 19 nt, Homo sapiens
  misc_RNA (1)...(19): siRNA sense strand
cugaacaggaagaaucuaa

SEQ ID NO: 2345899 - RNA, 19 nt, Homo sapiens
  misc_RNA (1)...(19): siRNA sense strand
caggaagaaucuaaaacaa

SEQ ID NO: 2345900 - RNA, 19 nt, Homo sapiens
  misc_RNA (1)...(19): siRNA sense strand
caggaagaaucuaaaacaa

SEQ ID NO: 2345901 - RNA, 19 nt, Homo sapiens
  misc_RNA (1)...(19): siRNA sense strand
aguaaacgacccaaagcaa

SEQ ID NO: 2345902 - RNA, 19 nt, Homo sapiens
  misc_RNA (1)...(19): siRNA sense strand
ggguuuagcaauugcaguu

SEQ ID NO: 2345903 - RNA, 19 nt, Homo sapiens
  misc_RNA (1)...(19): siRNA sense strand
ccagauauaugcagugcca

SEQ ID NO: 2345904 - RNA, 19 nt, Homo sapiens
  misc_RNA (1)...(19): siRNA sense strand
ucgucuaucuccugaagaa

SEQ ID NO: 2345905 - RNA, 19 nt, Homo sapiens
  misc_RNA (1)...(19): siRNA sense strand
ugucacaugaugaacaaua

SEQ ID NO: 2345906 - RNA, 19 nt, Homo sapiens
  misc_RNA (1)...(19): siRNA sense strand
cgcacuggguuuagcaauu

SEQ ID NO: 2345907 - RNA, 19 nt, Homo sapiens
  misc_RNA (1)...(19): siRNA sense strand
guguauaaauguugaaacc

SEQ ID NO: 2345908 - RNA, 19 nt, Homo sapiens
  misc_RNA (1)...(19): siRNA sense strand
guguaggcaggaaggaaau

SEQ ID NO: 2345909 - RNA, 19 nt, Homo sapiens
  misc_RNA (1)...(19): siRNA sense strand
agguauagguuugugaaca

SEQ ID NO: 2345910 - RNA, 19 nt, Homo sapiens
  misc_RNA (1)...(19): siRNA sense strand
gguuaugugcuuaagagau

SEQ ID NO: 2345911 - RNA, 19 nt, Homo sapiens
  misc_RNA (1)...(19): siRNA sense strand
caacuguagcauuggacuu

SEQ ID NO: 2345912 - RNA, 19 nt, Homo sapiens
  misc_RNA (1)...(19): siRNA sense strand
cagaguacugcgacgggaa

SEQ ID NO: 2345913 - RNA, 19 nt, Homo sapiens
  misc_RNA (1)...(19): siRNA sense strand
cuuaaaacccaaacaggaa

SEQ ID NO: 2345914 - RNA, 19 nt, Homo sapiens
  misc_RNA (1)...(19): siRNA sense strand
cuguacaggaagaaucuaa

SEQ ID NO: 2345915 - RNA, 19 nt, Homo sapiens
  misc_RNA (1)...(19): siRNA sense strand
ccuaccuacugcaguuaaa

SEQ ID NO: 2345916 - RNA, 19 nt, Homo sapiens
  misc_RNA (1)...(19): siRNA sense strand
cuaugaugcaguuaacuua

SEQ ID NO: 2345917 - RNA, 19 nt, Homo sapiens
  misc_RNA (1)...(19): siRNA sense strand
gaugaaauagaauggcaga

SEQ ID NO: 2345918 - RNA, 19 nt, Homo sapiens
  misc_RNA (1)...(19): siRNA sense strand
ggauacacuuaaaggcucu

SEQ ID NO: 2345919 - RNA, 19 nt, Homo sapiens
  misc_RNA (1)...(19): siRNA sense strand
aauucaaguuccugcccaa

SEQ ID NO: 2345920 - RNA, 19 nt, Homo sapiens
  misc_RNA (1)...(19): siRNA sense strand
aggaaggaaaugaauguga

SEQ ID NO: 2345921 - RNA, 19 nt, Homo sapiens
  misc_RNA (1)...(19): siRNA sense strand
caauuuggguuguguccau

SEQ ID NO: 2345922 - RNA, 19 nt, Homo sapiens
  misc_RNA (1)...(19): siRNA sense strand
caggaagaaucugaagcaa

SEQ ID NO: 2345923 - RNA, 19 nt, Homo sapiens
  misc_RNA (1)...(19): siRNA sense strand
cugucaugauugucgguuu

SEQ ID NO: 2345924 - RNA, 19 nt, Homo sapiens
  misc_RNA (1)...(19): siRNA sense strand
ucaaaguagguauagguuu

SEQ ID NO: 2345925 - RNA, 19 nt, Homo sapiens
  misc_RNA (1)...(19): siRNA sense strand
gggagcaacaugucuaaau

SEQ ID NO: 2345926 - RNA, 19 nt, Homo sapiens
  misc_RNA (1)...(19): siRNA sense strand
ugacuguuugccugagaaa

SEQ ID NO: 2345927 - RNA, 19 nt, Homo sapiens
  misc_RNA (1)...(19): siRNA sense strand
aagagugucaagaaacaaa

SEQ ID NO: 2345928 - RNA, 19 nt, Homo sapiens
  misc_RNA (1)...(19): siRNA sense strand
cacagaggagugucagaaa

SEQ ID NO: 2345929 - RNA, 19 nt, Homo sapiens
  misc_RNA (1)...(19): siRNA sense strand
gcuaugaugcaguuaacuu

SEQ ID NO: 2345930 - RNA, 19 nt, Homo sapiens
  misc_RNA (1)...(19): siRNA sense strand
cggaagagcuuaaugugga

SEQ ID NO: 2345931 - RNA, 19 nt, Homo sapiens
  misc_RNA (1)...(19): siRNA sense strand
ccaacaugaauuacgacaa

SEQ ID NO: 2345932 - RNA, 19 nt, Homo sapiens
  misc_RNA (1)...(19): siRNA sense strand
ggagagaggguuugugcca

SEQ ID NO: 2345933 - RNA, 19 nt, Homo sapiens
  misc_RNA (1)...(19): siRNA sense strand
acaagaacaucauccgcaa

SEQ ID NO: 2345934 - RNA, 19 nt, Homo sapiens
  misc_RNA (1)...(19): siRNA sense strand
agagaggguuugugccaga

SEQ ID NO: 2345935 - RNA, 19 nt, Homo sapiens
  misc_RNA (1)...(19): siRNA sense strand
cgcaagaacaagaccaaca

SEQ ID NO: 2345936 - RNA, 19 nt, Homo sapiens
  misc_RNA (1)...(19): siRNA sense strand
acuacuaugacaagaacau

SEQ ID NO: 2345937 - RNA, 19 nt, Homo sapiens
  misc_RNA (1)...(19): siRNA sense strand
aguagaagggcccaaggaa

SEQ ID NO: 2345938 - RNA, 19 nt, Homo sapiens
  misc_RNA (1)...(19): siRNA sense strand
gcacagcacuggaagagga

SEQ ID NO: 2345939 - RNA, 19 nt, Homo sapiens
  misc_RNA (1)...(19): siRNA sense strand
uggaagaggaggaaaagaa

SEQ ID NO: 2345940 - RNA, 19 nt, Homo sapiens
  misc_RNA (1)...(19): siRNA sense strand
aggcaccagcacagaguua

SEQ ID NO: 2345941 - RNA, 19 nt, Homo sapiens
  misc_RNA (1)...(19): siRNA sense strand
gggagaaauacaggaucaa

SEQ ID NO: 2345942 - RNA, 19 nt, Homo sapiens
  misc_RNA (1)...(19): siRNA sense strand
cacuggaagaggaggaaaa

SEQ ID NO: 2345943 - RNA, 19 nt, Homo sapiens
  misc_RNA (1)...(19): siRNA sense strand
ccgcauuugugcaggccca

SEQ ID NO: 2345944 - RNA, 19 nt, Homo sapiens
  misc_RNA (1)...(19): siRNA sense strand
gcacaguacugcacagcac

SEQ ID NO: 2345945 - RNA, 19 nt, Homo sapiens
  misc_RNA (1)...(19): siRNA sense strand
cagcacuggaagaggagga

SEQ ID NO: 2345946 - RNA, 19 nt, Homo sapiens
  misc_RNA (1)...(19): siRNA sense strand
ccuuuagccagcagcggaa

SEQ ID NO: 2345947 - RNA, 19 nt, Homo sapiens
  misc_RNA (1)...(19): siRNA sense strand
gaaagaauguguaggccuu

SEQ ID NO: 2345948 - RNA, 19 nt, Homo sapiens
  misc_RNA (1)...(19): siRNA sense strand
augcaaugauagaggugua

SEQ ID NO: 2345949 - RNA, 19 nt, Homo sapiens
  misc_RNA (1)...(19): siRNA sense strand
ggaagaugugugaugcaaa

SEQ ID NO: 2345950 - RNA, 19 nt, Homo sapiens
  misc_RNA (1)...(19): siRNA sense strand
agccaaaagauguggauaa

SEQ ID NO: 2345951 - RNA, 19 nt, Homo sapiens
  misc_RNA (1)...(19): siRNA sense strand
guacagacacauuuggcaa

SEQ ID NO: 2345952 - RNA, 19 nt, Homo sapiens
  misc_RNA (1)...(19): siRNA sense strand
ccccauaauuuuagaguuu

SEQ ID NO: 2345953 - RNA, 19 nt, Homo sapiens
  misc_RNA (1)...(19): siRNA sense strand
ggaauuugccagugaucau

SEQ ID NO: 2345954 - RNA, 19 nt, Homo sapiens
  misc_RNA (1)...(19): siRNA sense strand
cauuaugaauccagaagca

SEQ ID NO: 2345955 - RNA, 19 nt, Homo sapiens
  misc_RNA (1)...(19): siRNA sense strand
cuguauagauggaguuugu

SEQ ID NO: 2345956 - RNA, 19 nt, Homo sapiens
  misc_RNA (1)...(19): siRNA sense strand
gaaucaaagaugugugagu

SEQ ID NO: 2345957 - RNA, 19 nt, Homo sapiens
  misc_RNA (1)...(19): siRNA sense strand
ggaauugaaucgcaggcau

SEQ ID NO: 2345958 - RNA, 19 nt, Homo sapiens
  misc_RNA (1)...(19): siRNA sense strand
uuauaguggcacaggaauu

SEQ ID NO: 2345959 - RNA, 19 nt, Homo sapiens
  misc_RNA (1)...(19): siRNA sense strand
uggcacaggaauuaugaaa

SEQ ID NO: 2345960 - RNA, 19 nt, Homo sapiens
  misc_RNA (1)...(19): siRNA sense strand
gccaaaagauguggauaaa

SEQ ID NO: 2345961 - RNA, 19 nt, Homo sapiens
  misc_RNA (1)...(19): siRNA sense strand
gagugaaccuaaaggguag

SEQ ID NO: 2345962 - RNA, 19 nt, Homo sapiens
  misc_RNA (1)...(19): siRNA sense strand
gggaagaugugugaugcaa

SEQ ID NO: 2345963 - RNA, 19 nt, Homo sapiens
  misc_RNA (1)...(19): siRNA sense strand
aauuacaguuccggagaaa

SEQ ID NO: 2345964 - RNA, 19 nt, Homo sapiens
  misc_RNA (1)...(19): siRNA sense strand
aguuauaguggcacaggaa

SEQ ID NO: 2345965 - RNA, 19 nt, Homo sapiens
  misc_RNA (1)...(19): siRNA sense strand
aagcaggagaggaguguga

SEQ ID NO: 2345966 - RNA, 19 nt, Homo sapiens
  misc_RNA (1)...(19): siRNA sense strand
uaugaaaccacuugaccaa

SEQ ID NO: 2345967 - RNA, 19 nt, Homo sapiens
  misc_RNA (1)...(19): siRNA sense strand
gcaagcagugugugguaau

SEQ ID NO: 2345968 - RNA, 19 nt, Homo sapiens
  misc_RNA (1)...(19): siRNA sense strand
cuauucaagcgaugagcaa

SEQ ID NO: 2345969 - RNA, 19 nt, Homo sapiens
  misc_RNA (1)...(19): siRNA sense strand
cagcaagcaguguguggua

SEQ ID NO: 2345970 - RNA, 19 nt, Homo sapiens
  misc_RNA (1)...(19): siRNA sense strand
ggacugaaucaauggaucu

SEQ ID NO: 2345971 - RNA, 19 nt, Homo sapiens
  misc_RNA (1)...(19): siRNA sense strand
gaucaugcagacagccaaa

SEQ ID NO: 2345972 - RNA, 19 nt, Homo sapiens
  misc_RNA (1)...(19): siRNA sense strand
uuacaaauuccaagagcca

SEQ ID NO: 2345973 - RNA, 19 nt, Homo sapiens
  misc_RNA (1)...(19): siRNA sense strand
ggucaauaauaaaggaagg

SEQ ID NO: 2345974 - RNA, 19 nt, Homo sapiens
  misc_RNA (1)...(19): siRNA sense strand
guucuucauacuuggguua

SEQ ID NO: 2345975 - RNA, 19 nt, Homo sapiens
  misc_RNA (1)...(19): siRNA sense strand
agagugaaccuaaagggua

SEQ ID NO: 2345976 - RNA, 19 nt, Homo sapiens
  misc_RNA (1)...(19): siRNA sense strand
aauggagaacugaggacua

SEQ ID NO: 2345977 - RNA, 19 nt, Homo sapiens
  misc_RNA (1)...(19): siRNA sense strand
aggguauauugaagguuau

SEQ ID NO: 2345978 - RNA, 19 nt, Homo sapiens
  misc_RNA (1)...(19): siRNA sense strand
ggacaguaauuuugauagu

SEQ ID NO: 2345979 - RNA, 19 nt, Homo sapiens
  misc_RNA (1)...(19): siRNA sense strand
gguauaagugauucaggau

SEQ ID NO: 2345980 - RNA, 19 nt, Homo sapiens
  misc_RNA (1)...(19): siRNA sense strand
ugaccaagauuuucagaau

SEQ ID NO: 2345981 - RNA, 19 nt, Homo sapiens
  misc_RNA (1)...(19): siRNA sense strand
ccacuauuauuuaugccaa

SEQ ID NO: 2345982 - RNA, 19 nt, Homo sapiens
  misc_RNA (1)...(19): siRNA sense strand
ccugaaagugagagugaac

SEQ ID NO: 2345983 - RNA, 19 nt, Homo sapiens
  misc_RNA (1)...(19): siRNA sense strand
aagugagagugaaccuaaa

SEQ ID NO: 2345984 - RNA, 19 nt, Homo sapiens
  misc_RNA (1)...(19): siRNA sense strand
aaacugugcugaaggacca

SEQ ID NO: 2345985 - RNA, 19 nt, Homo sapiens
  misc_RNA (1)...(19): siRNA sense strand
guuuacaguuauaguggca

SEQ ID NO: 2345986 - RNA, 19 nt, Homo sapiens
  misc_RNA (1)...(19): siRNA sense strand
cuucgaagacuuugcacau

SEQ ID NO: 2345987 - RNA, 19 nt, Homo sapiens
  misc_RNA (1)...(19): siRNA sense strand
agguguaugcaauaacaaa

SEQ ID NO: 2345988 - RNA, 19 nt, Homo sapiens
  misc_RNA (1)...(19): siRNA sense strand
ggcgcuacauugagaacau

SEQ ID NO: 2345989 - RNA, 19 nt, Homo sapiens
  misc_RNA (1)...(19): siRNA sense strand
guauagauggaguuuguau

SEQ ID NO: 2345990 - RNA, 19 nt, Homo sapiens
  misc_RNA (1)...(19): siRNA sense strand
auuacaaagcgcagagcca

SEQ ID NO: 2345991 - RNA, 19 nt, Homo sapiens
  misc_RNA (1)...(19): siRNA sense strand
aaacuaugcaggagguguu

SEQ ID NO: 2345992 - RNA, 19 nt, Homo sapiens
  misc_RNA (1)...(19): siRNA sense strand
cugaaaggcgcuacauuga

SEQ ID NO: 2345993 - RNA, 19 nt, Homo sapiens
  misc_RNA (1)...(19): siRNA sense strand
gcuacauugagaacauuua

SEQ ID NO: 2345994 - RNA, 19 nt, Homo sapiens
  misc_RNA (1)...(19): siRNA sense strand
uuacaguuauaguggcaca

SEQ ID NO: 2345995 - RNA, 19 nt, Homo sapiens
  misc_RNA (1)...(19): siRNA sense strand
ugaauauugcaauggauca

SEQ ID NO: 2345996 - RNA, 19 nt, Homo sapiens
  misc_RNA (1)...(19): siRNA sense strand
ugguauaagugauucagga

SEQ ID NO: 2345997 - RNA, 19 nt, Homo sapiens
  misc_RNA (1)...(19): siRNA sense strand
aaccauaagucuggaauca

SEQ ID NO: 2345998 - RNA, 19 nt, Homo sapiens
  misc_RNA (1)...(19): siRNA sense strand
ggagugugacugugggacu

SEQ ID NO: 2345999 - RNA, 19 nt, Homo sapiens
  misc_RNA (1)...(19): siRNA sense strand
ugauauugccacauguaga

SEQ ID NO: 2346000 - RNA, 19 nt, Homo sapiens
  misc_RNA (1)...(19): siRNA sense strand
ggcugcggauggacaguaa

SEQ ID NO: 2346001 - RNA, 19 nt, Homo sapiens
  misc_RNA (1)...(19): siRNA sense strand
uugcuauaauggugaaagu

SEQ ID NO: 2346002 - RNA, 19 nt, Homo sapiens
  misc_RNA (1)...(19): siRNA sense strand
gaagaugugugaugcaaac

SEQ ID NO: 2346003 - RNA, 19 nt, Homo sapiens
  misc_RNA (1)...(19): siRNA sense strand
ugguaguggucguggauaa

SEQ ID NO: 2346004 - RNA, 19 nt, Homo sapiens
  misc_RNA (1)...(19): siRNA sense strand
aagaagaugaagaaggaua

SEQ ID NO: 2346005 - RNA, 19 nt, Homo sapiens
  misc_RNA (1)...(19): siRNA sense strand
agaagaugaagaaggauaa

SEQ ID NO: 2346006 - RNA, 19 nt, Homo sapiens
  misc_RNA (1)...(19): siRNA sense strand
uggguuaacagaagagaaa

SEQ ID NO: 2346007 - RNA, 19 nt, Homo sapiens
  misc_RNA (1)...(19): siRNA sense strand
uuggaaugcuacagauaaa

SEQ ID NO: 2346008 - RNA, 19 nt, Homo sapiens
  misc_RNA (1)...(19): siRNA sense strand
ggacaaaggcuauggaggu

SEQ ID NO: 2346009 - RNA, 19 nt, Homo sapiens
  misc_RNA (1)...(19): siRNA sense strand
ggauuaaaugugaugggaa

SEQ ID NO: 2346010 - RNA, 19 nt, Homo sapiens
  misc_RNA (1)...(19): siRNA sense strand
ccuuaauaaucgacuacaa

SEQ ID NO: 2346011 - RNA, 19 nt, Homo sapiens
  misc_RNA (1)...(19): siRNA sense strand
caguggagaccuagauaau

SEQ ID NO: 2346012 - RNA, 19 nt, Homo sapiens
  misc_RNA (1)...(19): siRNA sense strand
accuaugagauguggguua

SEQ ID NO: 2346013 - RNA, 19 nt, Homo sapiens
  misc_RNA (1)...(19): siRNA sense strand
gguuaacagaagagaaaau

SEQ ID NO: 2346014 - RNA, 19 nt, Homo sapiens
  misc_RNA (1)...(19): siRNA sense strand
ugccuauguuaaaggaaua

SEQ ID NO: 2346015 - RNA, 19 nt, Homo sapiens
  misc_RNA (1)...(19): siRNA sense strand
ugauauuggugaggugaaa

SEQ ID NO: 2346016 - RNA, 19 nt, Homo sapiens
  misc_RNA (1)...(19): siRNA sense strand
caauauugggacaguacua

SEQ ID NO: 2346017 - RNA, 19 nt, Homo sapiens
  misc_RNA (1)...(19): siRNA sense strand
aaaucaacacccaaggaaa

SEQ ID NO: 2346018 - RNA, 19 nt, Homo sapiens
  misc_RNA (1)...(19): siRNA sense strand
gggcagaggugcaaaggcu

SEQ ID NO: 2346019 - RNA, 19 nt, Homo sapiens
  misc_RNA (1)...(19): siRNA sense strand
cugcaaggacaaaggcuau

SEQ ID NO: 2346020 - RNA, 19 nt, Homo sapiens
  misc_RNA (1)...(19): siRNA sense strand
cuuuggagguugauguaau

SEQ ID NO: 2346021 - RNA, 19 nt, Homo sapiens
  misc_RNA (1)...(19): siRNA sense strand
gggcuuucuuggaaugcua

SEQ ID NO: 2346022 - RNA, 19 nt, Homo sapiens
  misc_RNA (1)...(19): siRNA sense strand
acugaaguacugugggaau

SEQ ID NO: 2346023 - RNA, 19 nt, Homo sapiens
  misc_RNA (1)...(19): siRNA sense strand
cauuugaacaccuaguaua

SEQ ID NO: 2346024 - RNA, 19 nt, Homo sapiens
  misc_RNA (1)...(19): siRNA sense strand
gugaaagauggcacaguau

SEQ ID NO: 2346025 - RNA, 19 nt, Homo sapiens
  misc_RNA (1)...(19): siRNA sense strand
cagugaugauacacaguuu

SEQ ID NO: 2346026 - RNA, 19 nt, Homo sapiens
  misc_RNA (1)...(19): siRNA sense strand
aguaauucccaaucugaua

SEQ ID NO: 2346027 - RNA, 19 nt, Homo sapiens
  misc_RNA (1)...(19): siRNA sense strand
cuauggagguagugcugau

SEQ ID NO: 2346028 - RNA, 19 nt, Homo sapiens
  misc_RNA (1)...(19): siRNA sense strand
uggaauugauauauggacu

SEQ ID NO: 2346029 - RNA, 19 nt, Homo sapiens
  misc_RNA (1)...(19): siRNA sense strand
guuaaaggaauaugccaga

SEQ ID NO: 2346030 - RNA, 19 nt, Homo sapiens
  misc_RNA (1)...(19): siRNA sense strand
agacugaaguacuguggga

SEQ ID NO: 2346031 - RNA, 19 nt, Homo sapiens
  misc_RNA (1)...(19): siRNA sense strand
caguaguggauuauguauu

SEQ ID NO: 2346032 - RNA, 19 nt, Homo sapiens
  misc_RNA (1)...(19): siRNA sense strand
cagccuaagaccugcaaca

SEQ ID NO: 2346033 - RNA, 19 nt, Homo sapiens
  misc_RNA (1)...(19): siRNA sense strand
ucuuggaaugcuacagaua

SEQ ID NO: 2346034 - RNA, 19 nt, Homo sapiens
  misc_RNA (1)...(19): siRNA sense strand
gaggaaugugacuguggaa

SEQ ID NO: 2346035 - RNA, 19 nt, Homo sapiens
  misc_RNA (1)...(19): siRNA sense strand
aggcacaacauauguaaaa

SEQ ID NO: 2346036 - RNA, 19 nt, Homo sapiens
  misc_RNA (1)...(19): siRNA sense strand
ugaaaaugugggaguaauu

SEQ ID NO: 2346037 - RNA, 19 nt, Homo sapiens
  misc_RNA (1)...(19): siRNA sense strand
ugaugggaaaguugcguua

SEQ ID NO: 2346038 - RNA, 19 nt, Homo sapiens
  misc_RNA (1)...(19): siRNA sense strand
uggaguugcaauugucaua

SEQ ID NO: 2346039 - RNA, 19 nt, Homo sapiens
  misc_RNA (1)...(19): siRNA sense strand
ccaguggagaccuagauaa

SEQ ID NO: 2346040 - RNA, 19 nt, Homo sapiens
  misc_RNA (1)...(19): siRNA sense strand
uugccuauguuaaaggaau

SEQ ID NO: 2346041 - RNA, 19 nt, Homo sapiens
  misc_RNA (1)...(19): siRNA sense strand
uagaaaggugacaacuaaa

SEQ ID NO: 2346042 - RNA, 19 nt, Homo sapiens
  misc_RNA (1)...(19): siRNA sense strand
acugcaaggacaaaggcua

SEQ ID NO: 2346043 - RNA, 19 nt, Homo sapiens
  misc_RNA (1)...(19): siRNA sense strand
ccuaagaacaacauggaag

SEQ ID NO: 2346044 - RNA, 19 nt, Homo sapiens
  misc_RNA (1)...(19): siRNA sense strand
uggccaagaugcaaggagu

SEQ ID NO: 2346045 - RNA, 19 nt, Homo sapiens
  misc_RNA (1)...(19): siRNA sense strand
ggguaaauaagcuguuguu

SEQ ID NO: 2346046 - RNA, 19 nt, Homo sapiens
  misc_RNA (1)...(19): siRNA sense strand
cugauauuggugaggugaa

SEQ ID NO: 2346047 - RNA, 19 nt, Homo sapiens
  misc_RNA (1)...(19): siRNA sense strand
ucacaagccugucagccua

SEQ ID NO: 2346048 - RNA, 19 nt, Homo sapiens
  misc_RNA (1)...(19): siRNA sense strand
guuuaugaaaucaagccaa

SEQ ID NO: 2346049 - RNA, 19 nt, Homo sapiens
  misc_RNA (1)...(19): siRNA sense strand
ugguguugccuauguuaaa

SEQ ID NO: 2346050 - RNA, 19 nt, Homo sapiens
  misc_RNA (1)...(19): siRNA sense strand
guaaagaagaugaagaagg

SEQ ID NO: 2346051 - RNA, 19 nt, Homo sapiens
  misc_RNA (1)...(19): siRNA sense strand
caguaugguucaucuguca

SEQ ID NO: 2346052 - RNA, 19 nt, Homo sapiens
  misc_RNA (1)...(19): siRNA sense strand
uaaugcaugccuauagaaa

SEQ ID NO: 2346053 - RNA, 19 nt, Homo sapiens
  misc_RNA (1)...(19): siRNA sense strand
ggaacuuuauguagacaac

SEQ ID NO: 2346054 - RNA, 19 nt, Homo sapiens
  misc_RNA (1)...(19): siRNA sense strand
ccugauaucauguguggga

SEQ ID NO: 2346055 - RNA, 19 nt, Homo sapiens
  misc_RNA (1)...(19): siRNA sense strand
uaaaggaauaugccagaau

SEQ ID NO: 2346056 - RNA, 19 nt, Homo sapiens
  misc_RNA (1)...(19): siRNA sense strand
ccuccauauccagggaaua

SEQ ID NO: 2346057 - RNA, 19 nt, Homo sapiens
  misc_RNA (1)...(19): siRNA sense strand
gaaaagaucugcauccgua

SEQ ID NO: 2346058 - RNA, 19 nt, Homo sapiens
  misc_RNA (1)...(19): siRNA sense strand
acaucgaagcucagaacaa

SEQ ID NO: 2346059 - RNA, 19 nt, Homo sapiens
  misc_RNA (1)...(19): siRNA sense strand
ggaaagaccuucuacucca

SEQ ID NO: 2346060 - RNA, 19 nt, Homo sapiens
  misc_RNA (1)...(19): siRNA sense strand
ccuucaaaguagugcugga

SEQ ID NO: 2346061 - RNA, 19 nt, Homo sapiens
  misc_RNA (1)...(19): siRNA sense strand
aagugcaagaagaagauua

SEQ ID NO: 2346062 - RNA, 19 nt, Homo sapiens
  misc_RNA (1)...(19): siRNA sense strand
agaagaagauuacaggcga

SEQ ID NO: 2346063 - RNA, 19 nt, Homo sapiens
  misc_RNA (1)...(19): siRNA sense strand
cugcuucgucugugcgaua

SEQ ID NO: 2346064 - RNA, 19 nt, Homo sapiens
  misc_RNA (1)...(19): siRNA sense strand
cugcguuugccgagcgcua

SEQ ID NO: 2346065 - RNA, 19 nt, Homo sapiens
  misc_RNA (1)...(19): siRNA sense strand
gugcgauaugucagaucaa

SEQ ID NO: 2346066 - RNA, 19 nt, Homo sapiens
  misc_RNA (1)...(19): siRNA sense strand
guguguagccaguguggga

SEQ ID NO: 2346067 - RNA, 19 nt, Homo sapiens
  misc_RNA (1)...(19): siRNA sense strand
gagaagauguuuggcacga

SEQ ID NO: 2346068 - RNA, 19 nt, Homo sapiens
  misc_RNA (1)...(19): siRNA sense strand
caugcuaugacgugcgcua

SEQ ID NO: 2346069 - RNA, 19 nt, Homo sapiens
  misc_RNA (1)...(19): siRNA sense strand
gagaaugcggguagccuca

SEQ ID NO: 2346070 - RNA, 19 nt, Homo sapiens
  misc_RNA (1)...(19): siRNA sense strand
cggaugaggagcaccugaa

SEQ ID NO: 2346071 - RNA, 19 nt, Homo sapiens
  misc_RNA (1)...(19): siRNA sense strand
acaucgaagcucagaacaa

SEQ ID NO: 2346072 - RNA, 19 nt, Homo sapiens
  misc_RNA (1)...(19): siRNA sense strand
ggaaagaccuucuacucca

SEQ ID NO: 2346073 - RNA, 19 nt, Homo sapiens
  misc_RNA (1)...(19): siRNA sense strand
ccuucaaaguagugcugga

SEQ ID NO: 2346074 - RNA, 19 nt, Homo sapiens
  misc_RNA (1)...(19): siRNA sense strand
aagugcaagaagaagauua

SEQ ID NO: 2346075 - RNA, 19 nt, Homo sapiens
  misc_RNA (1)...(19): siRNA sense strand
agaagaagauuacaggcga

SEQ ID NO: 2346076 - RNA, 19 nt, Homo sapiens
  misc_RNA (1)...(19): siRNA sense strand
cugcuucgucugugcgaua

SEQ ID NO: 2346077 - RNA, 19 nt, Homo sapiens
  misc_RNA (1)...(19): siRNA sense strand
cugcguuugccgagcgcua

SEQ ID NO: 2346078 - RNA, 19 nt, Homo sapiens
  misc_RNA (1)...(19): siRNA sense strand
gugcgauaugucagaucaa

SEQ ID NO: 2346079 - RNA, 19 nt, Homo sapiens
  misc_RNA (1)...(19): siRNA sense strand
guguguagccaguguggga

SEQ ID NO: 2346080 - RNA, 19 nt, Homo sapiens
  misc_RNA (1)...(19): siRNA sense strand
gagaagauguuuggcacga

SEQ ID NO: 2346081 - RNA, 19 nt, Homo sapiens
  misc_RNA (1)...(19): siRNA sense strand
caugcuaugacgugcgcua

SEQ ID NO: 2346082 - RNA, 19 nt, Homo sapiens
  misc_RNA (1)...(19): siRNA sense strand
gagaaugcggguagccuca

SEQ ID NO: 2346083 - RNA, 19 nt, Homo sapiens
  misc_RNA (1)...(19): siRNA sense strand
cggaugaggagcaccugaa

SEQ ID NO: 2346084 - RNA, 19 nt, Homo sapiens
  misc_RNA (1)...(19): siRNA sense strand
acaucgaagcucagaacaa

SEQ ID NO: 2346085 - RNA, 19 nt, Homo sapiens
  misc_RNA (1)...(19): siRNA sense strand
ccuucaaaguagugcugga

SEQ ID NO: 2346086 - RNA, 19 nt, Homo sapiens
  misc_RNA (1)...(19): siRNA sense strand
gagaaugcggguagccuca

SEQ ID NO: 2346087 - RNA, 19 nt, Homo sapiens
  misc_RNA (1)...(19): siRNA sense strand
agacggaagcgguggagau

SEQ ID NO: 2346088 - RNA, 19 nt, Homo sapiens
  misc_RNA (1)...(19): siRNA sense strand
cggucaaggugcagcgaac

SEQ ID NO: 2346089 - RNA, 19 nt, Homo sapiens
  misc_RNA (1)...(19): siRNA sense strand
ccacaggggaagugcggua

SEQ ID NO: 2346090 - RNA, 19 nt, Homo sapiens
  misc_RNA (1)...(19): siRNA sense strand
gggcaaauacgcagagcug

SEQ ID NO: 2346091 - RNA, 19 nt, Homo sapiens
  misc_RNA (1)...(19): siRNA sense strand
ccgucauugcauucggaaa

SEQ ID NO: 2346092 - RNA, 19 nt, Homo sapiens
  misc_RNA (1)...(19): siRNA sense strand
ggacaagcugugcuggaga

SEQ ID NO: 2346093 - RNA, 19 nt, Homo sapiens
  misc_RNA (1)...(19): siRNA sense strand
ggguguaugaugaccucaa

SEQ ID NO: 2346094 - RNA, 19 nt, Homo sapiens
  misc_RNA (1)...(19): siRNA sense strand
gugaguucuugcugcggua

SEQ ID NO: 2346095 - RNA, 19 nt, Homo sapiens
  misc_RNA (1)...(19): siRNA sense strand
cgugcagagggauggacaa

SEQ ID NO: 2346096 - RNA, 19 nt, Homo sapiens
  misc_RNA (1)...(19): siRNA sense strand
gagaagaugaagagggcau

SEQ ID NO: 2346097 - RNA, 19 nt, Homo sapiens
  misc_RNA (1)...(19): siRNA sense strand
gcaacaaguucauagccua

SEQ ID NO: 2346098 - RNA, 19 nt, Homo sapiens
  misc_RNA (1)...(19): siRNA sense strand
cggcauagcaagacccaga

SEQ ID NO: 2346099 - RNA, 19 nt, Homo sapiens
  misc_RNA (1)...(19): siRNA sense strand
agagcaacaugaagcgcua

SEQ ID NO: 2346100 - RNA, 19 nt, Homo sapiens
  misc_RNA (1)...(19): siRNA sense strand
acaugaagcgcuacggcaa

SEQ ID NO: 2346101 - RNA, 19 nt, Homo sapiens
  misc_RNA (1)...(19): siRNA sense strand
agaaggauccacaggucaa

SEQ ID NO: 2346102 - RNA, 19 nt, Homo sapiens
  misc_RNA (1)...(19): siRNA sense strand
ccgacaagcagauucuaaa

SEQ ID NO: 2346103 - RNA, 19 nt, Homo sapiens
  misc_RNA (1)...(19): siRNA sense strand
gggacuuuguacugauuau

SEQ ID NO: 2346104 - RNA, 19 nt, Homo sapiens
  misc_RNA (1)...(19): siRNA sense strand
uugagcaggcagagagcaa

SEQ ID NO: 2346105 - RNA, 19 nt, Homo sapiens
  misc_RNA (1)...(19): siRNA sense strand
aagagaagcuucacgcaga

SEQ ID NO: 2346106 - RNA, 19 nt, Homo sapiens
  misc_RNA (1)...(19): siRNA sense strand
agaccaaacuggagaugcu

SEQ ID NO: 2346107 - RNA, 19 nt, Homo sapiens
  misc_RNA (1)...(19): siRNA sense strand
ggaaccuggagaagagaga

SEQ ID NO: 2346108 - RNA, 19 nt, Homo sapiens
  misc_RNA (1)...(19): siRNA sense strand
agaaggacacacagaccaa

SEQ ID NO: 2346109 - RNA, 19 nt, Homo sapiens
  misc_RNA (1)...(19): siRNA sense strand
ccugaaaaccggaagguca

SEQ ID NO: 2346110 - RNA, 19 nt, Homo sapiens
  misc_RNA (1)...(19): siRNA sense strand
cucgaaggccgcagcgaua

SEQ ID NO: 2346111 - RNA, 19 nt, Homo sapiens
  misc_RNA (1)...(19): siRNA sense strand
caucaugagugguaccuga

SEQ ID NO: 2346112 - RNA, 19 nt, Homo sapiens
  misc_RNA (1)...(19): siRNA sense strand
ucgacaaggagcuggugaa

SEQ ID NO: 2346113 - RNA, 19 nt, Homo sapiens
  misc_RNA (1)...(19): siRNA sense strand
gagcaguaccggcagguca

SEQ ID NO: 2346114 - RNA, 19 nt, Homo sapiens
  misc_RNA (1)...(19): siRNA sense strand
gagcaggcagagagcaaca

SEQ ID NO: 2346115 - RNA, 19 nt, Homo sapiens
  misc_RNA (1)...(19): siRNA sense strand
gcaagauccucaugcacca

SEQ ID NO: 2346116 - RNA, 19 nt, Homo sapiens
  misc_RNA (1)...(19): siRNA sense strand
agaugcuguuuaagaagaa

SEQ ID NO: 2346117 - RNA, 19 nt, Homo sapiens
  misc_RNA (1)...(19): siRNA sense strand
aggcagagagcaacaugaa

SEQ ID NO: 2346118 - RNA, 19 nt, Homo sapiens
  misc_RNA (1)...(19): siRNA sense strand
gaggaggacugcaaggagu

SEQ ID NO: 2346119 - RNA, 19 nt, Homo sapiens
  misc_RNA (1)...(19): siRNA sense strand
accggaaggucauggauau

SEQ ID NO: 2346120 - RNA, 19 nt, Homo sapiens
  misc_RNA (1)...(19): siRNA sense strand
ccucaagcauaucgagaac

SEQ ID NO: 2346121 - RNA, 19 nt, Homo sapiens
  misc_RNA (1)...(19): siRNA sense strand
aagcauaucgagaacaaga

SEQ ID NO: 2346122 - RNA, 19 nt, Homo sapiens
  misc_RNA (1)...(19): siRNA sense strand
ggauguaguggaugugcuu

SEQ ID NO: 2346123 - RNA, 19 nt, Homo sapiens
  misc_RNA (1)...(19): siRNA sense strand
acaugcagcacgagcagua

SEQ ID NO: 2346124 - RNA, 19 nt, Homo sapiens
  misc_RNA (1)...(19): siRNA sense strand
aggaggacugcaaggagua

SEQ ID NO: 2346125 - RNA, 19 nt, Homo sapiens
  misc_RNA (1)...(19): siRNA sense strand
cccuguaucuggcggagaa

SEQ ID NO: 2346126 - RNA, 19 nt, Homo sapiens
  misc_RNA (1)...(19): siRNA sense strand
agauccagcuagaagacau

SEQ ID NO: 2346127 - RNA, 19 nt, Homo sapiens
  misc_RNA (1)...(19): siRNA sense strand
ugagugaagugcagccaga

SEQ ID NO: 2346128 - RNA, 19 nt, Homo sapiens
  misc_RNA (1)...(19): siRNA sense strand
aggagauccaagagcucaa

SEQ ID NO: 2346129 - RNA, 19 nt, Homo sapiens
  misc_RNA (1)...(19): siRNA sense strand
uuacauugaacaaaggaga

SEQ ID NO: 2346130 - RNA, 19 nt, Homo sapiens
  misc_RNA (1)...(19): siRNA sense strand
cauccuaugugauccgcaa

SEQ ID NO: 2346131 - RNA, 19 nt, Homo sapiens
  misc_RNA (1)...(19): siRNA sense strand
uccuagagcacaugaguga

SEQ ID NO: 2346132 - RNA, 19 nt, Homo sapiens
  misc_RNA (1)...(19): siRNA sense strand
cuacuuuggcagagguguu

SEQ ID NO: 2346133 - RNA, 19 nt, Homo sapiens
  misc_RNA (1)...(19): siRNA sense strand
agaacugggcccacgagaa

SEQ ID NO: 2346134 - RNA, 19 nt, Homo sapiens
  misc_RNA (1)...(19): siRNA sense strand
cuacaaacuacgggugaca

SEQ ID NO: 2346135 - RNA, 19 nt, Homo sapiens
  misc_RNA (1)...(19): siRNA sense strand
agaucuggaaccuggagaa

SEQ ID NO: 2346136 - RNA, 19 nt, Homo sapiens
  misc_RNA (1)...(19): siRNA sense strand
augcacaucaugaguggua

SEQ ID NO: 2346137 - RNA, 19 nt, Homo sapiens
  misc_RNA (1)...(19): siRNA sense strand
gcguggaguuggacaccca

SEQ ID NO: 2346138 - RNA, 19 nt, Homo sapiens
  misc_RNA (1)...(19): siRNA sense strand
cuuugaggauguaguggau

SEQ ID NO: 2346139 - RNA, 19 nt, Homo sapiens
  misc_RNA (1)...(19): siRNA sense strand
gagccuggucuuuggagau

SEQ ID NO: 2346140 - RNA, 19 nt, Homo sapiens
  misc_RNA (1)...(19): siRNA sense strand
gagaaggauccacagguca

SEQ ID NO: 2346141 - RNA, 19 nt, Homo sapiens
  misc_RNA (1)...(19): siRNA sense strand
guaacagugccuuggaguu

SEQ ID NO: 2346142 - RNA, 19 nt, Homo sapiens
  misc_RNA (1)...(19): siRNA sense strand
augcaaaggacauguuaaa

SEQ ID NO: 2346143 - RNA, 19 nt, Homo sapiens
  misc_RNA (1)...(19): siRNA sense strand
uguuauaagugaagaacca

SEQ ID NO: 2346144 - RNA, 19 nt, Homo sapiens
  misc_RNA (1)...(19): siRNA sense strand
ugaagauuuagcagagaua

SEQ ID NO: 2346145 - RNA, 19 nt, Homo sapiens
  misc_RNA (1)...(19): siRNA sense strand
agacaauggaaaugaagau

SEQ ID NO: 2346146 - RNA, 19 nt, Homo sapiens
  misc_RNA (1)...(19): siRNA sense strand
cagagaugccagaaccaaa

SEQ ID NO: 2346147 - RNA, 19 nt, Homo sapiens
  misc_RNA (1)...(19): siRNA sense strand
gaaccaaaguggaccgaac

SEQ ID NO: 2346148 - RNA, 19 nt, Homo sapiens
  misc_RNA (1)...(19): siRNA sense strand
aggucaagaugaugaaguu

SEQ ID NO: 2346149 - RNA, 19 nt, Homo sapiens
  misc_RNA (1)...(19): siRNA sense strand
aguaguggccacagaagaa

SEQ ID NO: 2346150 - RNA, 19 nt, Homo sapiens
  misc_RNA (1)...(19): siRNA sense strand
caauaguuacagauggaau

SEQ ID NO: 2346151 - RNA, 19 nt, Homo sapiens
  misc_RNA (1)...(19): siRNA sense strand
ggguggaaucugcagaaau

SEQ ID NO: 2346152 - RNA, 19 nt, Homo sapiens
  misc_RNA (1)...(19): siRNA sense strand
uggaauucagcuuggaaau

SEQ ID NO: 2346153 - RNA, 19 nt, Homo sapiens
  misc_RNA (1)...(19): siRNA sense strand
aucaagaggugguggaacu

SEQ ID NO: 2346154 - RNA, 19 nt, Homo sapiens
  misc_RNA (1)...(19): siRNA sense strand
ccaccagcuaagagacaau

SEQ ID NO: 2346155 - RNA, 19 nt, Homo sapiens
  misc_RNA (1)...(19): siRNA sense strand
cccugguagauuugggaaa

SEQ ID NO: 2346156 - RNA, 19 nt, Homo sapiens
  misc_RNA (1)...(19): siRNA sense strand
ccacagaagaaguaguuac

SEQ ID NO: 2346157 - RNA, 19 nt, Homo sapiens
  misc_RNA (1)...(19): siRNA sense strand
acacaaacccagagagucc

SEQ ID NO: 2346158 - RNA, 19 nt, Homo sapiens
  misc_RNA (1)...(19): siRNA sense strand
ccagcauaguagagguuuu

SEQ ID NO: 2346159 - RNA, 19 nt, Homo sapiens
  misc_RNA (1)...(19): siRNA sense strand
acuacagacuggcugggaa

SEQ ID NO: 2346160 - RNA, 19 nt, Homo sapiens
  misc_RNA (1)...(19): siRNA sense strand
gcugauguacacacgcaaa

SEQ ID NO: 2346161 - RNA, 19 nt, Homo sapiens
  misc_RNA (1)...(19): siRNA sense strand
auguacacacgcaaaguaa

SEQ ID NO: 2346162 - RNA, 19 nt, Homo sapiens
  misc_RNA (1)...(19): siRNA sense strand
augcagaaccaaaucaaca

SEQ ID NO: 2346163 - RNA, 19 nt, Homo sapiens
  misc_RNA (1)...(19): siRNA sense strand
acgagcaggucaagaugau

SEQ ID NO: 2346164 - RNA, 19 nt, Homo sapiens
  misc_RNA (1)...(19): siRNA sense strand
augcaaaggacauguuaaa

SEQ ID NO: 2346165 - RNA, 19 nt, Homo sapiens
  misc_RNA (1)...(19): siRNA sense strand
uguuauaagugaagaacca

SEQ ID NO: 2346166 - RNA, 19 nt, Homo sapiens
  misc_RNA (1)...(19): siRNA sense strand
ugaagauuuagcagagaua

SEQ ID NO: 2346167 - RNA, 19 nt, Homo sapiens
  misc_RNA (1)...(19): siRNA sense strand
agacaauggaaaugaagau

SEQ ID NO: 2346168 - RNA, 19 nt, Homo sapiens
  misc_RNA (1)...(19): siRNA sense strand
cagagaugccagaaccaaa

SEQ ID NO: 2346169 - RNA, 19 nt, Homo sapiens
  misc_RNA (1)...(19): siRNA sense strand
gaaccaaaguggaccgaac

SEQ ID NO: 2346170 - RNA, 19 nt, Homo sapiens
  misc_RNA (1)...(19): siRNA sense strand
aggucaagaugaugaaguu

SEQ ID NO: 2346171 - RNA, 19 nt, Homo sapiens
  misc_RNA (1)...(19): siRNA sense strand
aguaguggccacagaagaa

SEQ ID NO: 2346172 - RNA, 19 nt, Homo sapiens
  misc_RNA (1)...(19): siRNA sense strand
caauaguuacagauggaau

SEQ ID NO: 2346173 - RNA, 19 nt, Homo sapiens
  misc_RNA (1)...(19): siRNA sense strand
ggguggaaucugcagaaau

SEQ ID NO: 2346174 - RNA, 19 nt, Homo sapiens
  misc_RNA (1)...(19): siRNA sense strand
uggaauucagcuuggaaau

SEQ ID NO: 2346175 - RNA, 19 nt, Homo sapiens
  misc_RNA (1)...(19): siRNA sense strand
aucaagaggugguggaacu

SEQ ID NO: 2346176 - RNA, 19 nt, Homo sapiens
  misc_RNA (1)...(19): siRNA sense strand
ccaccagcuaagagacaau

SEQ ID NO: 2346177 - RNA, 19 nt, Homo sapiens
  misc_RNA (1)...(19): siRNA sense strand
cccugguagauuugggaaa

SEQ ID NO: 2346178 - RNA, 19 nt, Homo sapiens
  misc_RNA (1)...(19): siRNA sense strand
ccacagaagaaguaguuac

SEQ ID NO: 2346179 - RNA, 19 nt, Homo sapiens
  misc_RNA (1)...(19): siRNA sense strand
acacaaacccagagagucc

SEQ ID NO: 2346180 - RNA, 19 nt, Homo sapiens
  misc_RNA (1)...(19): siRNA sense strand
ccagcauaguagagguuuu

SEQ ID NO: 2346181 - RNA, 19 nt, Homo sapiens
  misc_RNA (1)...(19): siRNA sense strand
acuacagacuggcugggaa

SEQ ID NO: 2346182 - RNA, 19 nt, Homo sapiens
  misc_RNA (1)...(19): siRNA sense strand
gcugauguacacacgcaaa

SEQ ID NO: 2346183 - RNA, 19 nt, Homo sapiens
  misc_RNA (1)...(19): siRNA sense strand
auguacacacgcaaaguaa

SEQ ID NO: 2346184 - RNA, 19 nt, Homo sapiens
  misc_RNA (1)...(19): siRNA sense strand
augcagaaccaaaucaaca

SEQ ID NO: 2346185 - RNA, 19 nt, Homo sapiens
  misc_RNA (1)...(19): siRNA sense strand
acgagcaggucaagaugau

SEQ ID NO: 2346186 - RNA, 19 nt, Homo sapiens
  misc_RNA (1)...(19): siRNA sense strand
augcaaaggacauguuaaa

SEQ ID NO: 2346187 - RNA, 19 nt, Homo sapiens
  misc_RNA (1)...(19): siRNA sense strand
uguuauaagugaagaacca

SEQ ID NO: 2346188 - RNA, 19 nt, Homo sapiens
  misc_RNA (1)...(19): siRNA sense strand
ugaagauuuagcagagaua

SEQ ID NO: 2346189 - RNA, 19 nt, Homo sapiens
  misc_RNA (1)...(19): siRNA sense strand
agacaauggaaaugaagau

SEQ ID NO: 2346190 - RNA, 19 nt, Homo sapiens
  misc_RNA (1)...(19): siRNA sense strand
cagagaugccagaaccaaa

SEQ ID NO: 2346191 - RNA, 19 nt, Homo sapiens
  misc_RNA (1)...(19): siRNA sense strand
gaaccaaaguggaccgaac

SEQ ID NO: 2346192 - RNA, 19 nt, Homo sapiens
  misc_RNA (1)...(19): siRNA sense strand
aggucaagaugaugaaguu

SEQ ID NO: 2346193 - RNA, 19 nt, Homo sapiens
  misc_RNA (1)...(19): siRNA sense strand
aguaguggccacagaagaa

SEQ ID NO: 2346194 - RNA, 19 nt, Homo sapiens
  misc_RNA (1)...(19): siRNA sense strand
caauaguuacagauggaau

SEQ ID NO: 2346195 - RNA, 19 nt, Homo sapiens
  misc_RNA (1)...(19): siRNA sense strand
ggguggaaucugcagaaau

SEQ ID NO: 2346196 - RNA, 19 nt, Homo sapiens
  misc_RNA (1)...(19): siRNA sense strand
uggaauucagcuuggaaau

SEQ ID NO: 2346197 - RNA, 19 nt, Homo sapiens
  misc_RNA (1)...(19): siRNA sense strand
aucaagaggugguggaacu

SEQ ID NO: 2346198 - RNA, 19 nt, Homo sapiens
  misc_RNA (1)...(19): siRNA sense strand
ccaccagcuaagagacaau

SEQ ID NO: 2346199 - RNA, 19 nt, Homo sapiens
  misc_RNA (1)...(19): siRNA sense strand
cccugguagauuugggaaa

SEQ ID NO: 2346200 - RNA, 19 nt, Homo sapiens
  misc_RNA (1)...(19): siRNA sense strand
ccacagaagaaguaguuac

SEQ ID NO: 2346201 - RNA, 19 nt, Homo sapiens
  misc_RNA (1)...(19): siRNA sense strand
acacaaacccagagagucc

SEQ ID NO: 2346202 - RNA, 19 nt, Homo sapiens
  misc_RNA (1)...(19): siRNA sense strand
ccagcauaguagagguuuu

SEQ ID NO: 2346203 - RNA, 19 nt, Homo sapiens
  misc_RNA (1)...(19): siRNA sense strand
acuacagacuggcugggaa

SEQ ID NO: 2346204 - RNA, 19 nt, Homo sapiens
  misc_RNA (1)...(19): siRNA sense strand
gcugauguacacacgcaaa

SEQ ID NO: 2346205 - RNA, 19 nt, Homo sapiens
  misc_RNA (1)...(19): siRNA sense strand
auguacacacgcaaaguaa

SEQ ID NO: 2346206 - RNA, 19 nt, Homo sapiens
  misc_RNA (1)...(19): siRNA sense strand
augcagaaccaaaucaaca

SEQ ID NO: 2346207 - RNA, 19 nt, Homo sapiens
  misc_RNA (1)...(19): siRNA sense strand
acgagcaggucaagaugau

SEQ ID NO: 2346208 - RNA, 19 nt, Homo sapiens
  misc_RNA (1)...(19): siRNA sense strand
augcaaaggacauguuaaa

SEQ ID NO: 2346209 - RNA, 19 nt, Homo sapiens
  misc_RNA (1)...(19): siRNA sense strand
uguuauaagugaagaacca

SEQ ID NO: 2346210 - RNA, 19 nt, Homo sapiens
  misc_RNA (1)...(19): siRNA sense strand
ugaagauuuagcagagaua

SEQ ID NO: 2346211 - RNA, 19 nt, Homo sapiens
  misc_RNA (1)...(19): siRNA sense strand
agacaauggaaaugaagau

SEQ ID NO: 2346212 - RNA, 19 nt, Homo sapiens
  misc_RNA (1)...(19): siRNA sense strand
cagagaugccagaaccaaa

SEQ ID NO: 2346213 - RNA, 19 nt, Homo sapiens
  misc_RNA (1)...(19): siRNA sense strand
gaaccaaaguggaccgaac

SEQ ID NO: 2346214 - RNA, 19 nt, Homo sapiens
  misc_RNA (1)...(19): siRNA sense strand
aggucaagaugaugaaguu

SEQ ID NO: 2346215 - RNA, 19 nt, Homo sapiens
  misc_RNA (1)...(19): siRNA sense strand
aguaguggccacagaagaa

SEQ ID NO: 2346216 - RNA, 19 nt, Homo sapiens
  misc_RNA (1)...(19): siRNA sense strand
caauaguuacagauggaau

SEQ ID NO: 2346217 - RNA, 19 nt, Homo sapiens
  misc_RNA (1)...(19): siRNA sense strand
ggguggaaucugcagaaau

SEQ ID NO: 2346218 - RNA, 19 nt, Homo sapiens
  misc_RNA (1)...(19): siRNA sense strand
uggaauucagcuuggaaau

SEQ ID NO: 2346219 - RNA, 19 nt, Homo sapiens
  misc_RNA (1)...(19): siRNA sense strand
aucaagaggugguggaacu

SEQ ID NO: 2346220 - RNA, 19 nt, Homo sapiens
  misc_RNA (1)...(19): siRNA sense strand
ccaccagcuaagagacaau

SEQ ID NO: 2346221 - RNA, 19 nt, Homo sapiens
  misc_RNA (1)...(19): siRNA sense strand
cccugguagauuugggaaa

SEQ ID NO: 2346222 - RNA, 19 nt, Homo sapiens
  misc_RNA (1)...(19): siRNA sense strand
ccacagaagaaguaguuac

SEQ ID NO: 2346223 - RNA, 19 nt, Homo sapiens
  misc_RNA (1)...(19): siRNA sense strand
acacaaacccagagagucc

SEQ ID NO: 2346224 - RNA, 19 nt, Homo sapiens
  misc_RNA (1)...(19): siRNA sense strand
ccagcauaguagagguuuu

SEQ ID NO: 2346225 - RNA, 19 nt, Homo sapiens
  misc_RNA (1)...(19): siRNA sense strand
acuacagacuggcugggaa

SEQ ID NO: 2346226 - RNA, 19 nt, Homo sapiens
  misc_RNA (1)...(19): siRNA sense strand
gcugauguacacacgcaaa

SEQ ID NO: 2346227 - RNA, 19 nt, Homo sapiens
  misc_RNA (1)...(19): siRNA sense strand
auguacacacgcaaaguaa

SEQ ID NO: 2346228 - RNA, 19 nt, Homo sapiens
  misc_RNA (1)...(19): siRNA sense strand
augcagaaccaaaucaaca

SEQ ID NO: 2346229 - RNA, 19 nt, Homo sapiens
  misc_RNA (1)...(19): siRNA sense strand
acgagcaggucaagaugau

SEQ ID NO: 2346230 - RNA, 19 nt, Homo sapiens
  misc_RNA (1)...(19): siRNA sense strand
augcaaaggacauguuaaa

SEQ ID NO: 2346231 - RNA, 19 nt, Homo sapiens
  misc_RNA (1)...(19): siRNA sense strand
uguuauaagugaagaacca

SEQ ID NO: 2346232 - RNA, 19 nt, Homo sapiens
  misc_RNA (1)...(19): siRNA sense strand
ugaagauuuagcagagaua

SEQ ID NO: 2346233 - RNA, 19 nt, Homo sapiens
  misc_RNA (1)...(19): siRNA sense strand
agacaauggaaaugaagau

SEQ ID NO: 2346234 - RNA, 19 nt, Homo sapiens
  misc_RNA (1)...(19): siRNA sense strand
cagagaugccagaaccaaa

SEQ ID NO: 2346235 - RNA, 19 nt, Homo sapiens
  misc_RNA (1)...(19): siRNA sense strand
gaaccaaaguggaccgaac

SEQ ID NO: 2346236 - RNA, 19 nt, Homo sapiens
  misc_RNA (1)...(19): siRNA sense strand
aggucaagaugaugaaguu

SEQ ID NO: 2346237 - RNA, 19 nt, Homo sapiens
  misc_RNA (1)...(19): siRNA sense strand
aguaguggccacagaagaa

SEQ ID NO: 2346238 - RNA, 19 nt, Homo sapiens
  misc_RNA (1)...(19): siRNA sense strand
caauaguuacagauggaau

SEQ ID NO: 2346239 - RNA, 19 nt, Homo sapiens
  misc_RNA (1)...(19): siRNA sense strand
ggguggaaucugcagaaau

SEQ ID NO: 2346240 - RNA, 19 nt, Homo sapiens
  misc_RNA (1)...(19): siRNA sense strand
uggaauucagcuuggaaau

SEQ ID NO: 2346241 - RNA, 19 nt, Homo sapiens
  misc_RNA (1)...(19): siRNA sense strand
aucaagaggugguggaacu

SEQ ID NO: 2346242 - RNA, 19 nt, Homo sapiens
  misc_RNA (1)...(19): siRNA sense strand
ccaccagcuaagagacaau

SEQ ID NO: 2346243 - RNA, 19 nt, Homo sapiens
  misc_RNA (1)...(19): siRNA sense strand
cccugguagauuugggaaa

SEQ ID NO: 2346244 - RNA, 19 nt, Homo sapiens
  misc_RNA (1)...(19): siRNA sense strand
ccacagaagaaguaguuac

SEQ ID NO: 2346245 - RNA, 19 nt, Homo sapiens
  misc_RNA (1)...(19): siRNA sense strand
acacaaacccagagagucc

SEQ ID NO: 2346246 - RNA, 19 nt, Homo sapiens
  misc_RNA (1)...(19): siRNA sense strand
ccagcauaguagagguuuu

SEQ ID NO: 2346247 - RNA, 19 nt, Homo sapiens
  misc_RNA (1)...(19): siRNA sense strand
acuacagacuggcugggaa

SEQ ID NO: 2346248 - RNA, 19 nt, Homo sapiens
  misc_RNA (1)...(19): siRNA sense strand
gcugauguacacacgcaaa

SEQ ID NO: 2346249 - RNA, 19 nt, Homo sapiens
  misc_RNA (1)...(19): siRNA sense strand
auguacacacgcaaaguaa

SEQ ID NO: 2346250 - RNA, 19 nt, Homo sapiens
  misc_RNA (1)...(19): siRNA sense strand
augcagaaccaaaucaaca

SEQ ID NO: 2346251 - RNA, 19 nt, Homo sapiens
  misc_RNA (1)...(19): siRNA sense strand
acgagcaggucaagaugau

SEQ ID NO: 2346252 - RNA, 19 nt, Homo sapiens
  misc_RNA (1)...(19): siRNA sense strand
aggaguaagcacagugaaa

SEQ ID NO: 2346253 - RNA, 19 nt, Homo sapiens
  misc_RNA (1)...(19): siRNA sense strand
cuggaaucguugagaguau

SEQ ID NO: 2346254 - RNA, 19 nt, Homo sapiens
  misc_RNA (1)...(19): siRNA sense strand
cguugagaguauuggagaa

SEQ ID NO: 2346255 - RNA, 19 nt, Homo sapiens
  misc_RNA (1)...(19): siRNA sense strand
gcauaaagguuguggccac

SEQ ID NO: 2346256 - RNA, 19 nt, Homo sapiens
  misc_RNA (1)...(19): siRNA sense strand
ccuaauuagcuguggcuuu

SEQ ID NO: 2346257 - RNA, 19 nt, Homo sapiens
  misc_RNA (1)...(19): siRNA sense strand
agucgcuccucuagagaaa

SEQ ID NO: 2346258 - RNA, 19 nt, Homo sapiens
  misc_RNA (1)...(19): siRNA sense strand
gccugaauucugagggcaa

SEQ ID NO: 2346259 - RNA, 19 nt, Homo sapiens
  misc_RNA (1)...(19): siRNA sense strand
aggcaaaggagguucgcau

SEQ ID NO: 2346260 - RNA, 19 nt, Homo sapiens
  misc_RNA (1)...(19): siRNA sense strand
gaauguaccucuugccuga

SEQ ID NO: 2346261 - RNA, 19 nt, Homo sapiens
  misc_RNA (1)...(19): siRNA sense strand
cuuugaggccauuggaaau

SEQ ID NO: 2346262 - RNA, 19 nt, Homo sapiens
  misc_RNA (1)...(19): siRNA sense strand
ugaaaguguuggggaguaa

SEQ ID NO: 2346263 - RNA, 19 nt, Homo sapiens
  misc_RNA (1)...(19): siRNA sense strand
gguuuaccugcaagggaaa

SEQ ID NO: 2346264 - RNA, 19 nt, Homo sapiens
  misc_RNA (1)...(19): siRNA sense strand
ggacguucuuugaaggguu

SEQ ID NO: 2346265 - RNA, 19 nt, Homo sapiens
  misc_RNA (1)...(19): siRNA sense strand
augucaacaaggagaaauu

SEQ ID NO: 2346266 - RNA, 19 nt, Homo sapiens
  misc_RNA (1)...(19): siRNA sense strand
ccuccugcaaugagagcua

SEQ ID NO: 2346267 - RNA, 19 nt, Homo sapiens
  misc_RNA (1)...(19): siRNA sense strand
uuguaaagcagcaggagca

SEQ ID NO: 2346268 - RNA, 19 nt, Homo sapiens
  misc_RNA (1)...(19): siRNA sense strand
ggaguaaacacuuggaccu

SEQ ID NO: 2346269 - RNA, 19 nt, Homo sapiens
  misc_RNA (1)...(19): siRNA sense strand
agaaauuuaagaaggcaca

SEQ ID NO: 2346270 - RNA, 19 nt, Homo sapiens
  misc_RNA (1)...(19): siRNA sense strand
gguacagagaugaaagugu

SEQ ID NO: 2346271 - RNA, 19 nt, Homo sapiens
  misc_RNA (1)...(19): siRNA sense strand
uggagaaggaguaagcaca

SEQ ID NO: 2346272 - RNA, 19 nt, Homo sapiens
  misc_RNA (1)...(19): siRNA sense strand
cccucaggacuuaaagaaa

SEQ ID NO: 2346273 - RNA, 19 nt, Homo sapiens
  misc_RNA (1)...(19): siRNA sense strand
auuauauggcagagaaguu

SEQ ID NO: 2346274 - RNA, 19 nt, Homo sapiens
  misc_RNA (1)...(19): siRNA sense strand
gaaaacuggaaaaugguaa

SEQ ID NO: 2346275 - RNA, 19 nt, Homo sapiens
  misc_RNA (1)...(19): siRNA sense strand
ucauuggaguggaugucaa

SEQ ID NO: 2346276 - RNA, 19 nt, Homo sapiens
  misc_RNA (1)...(19): siRNA sense strand
aggaaaucucaguugccaa

SEQ ID NO: 2346277 - RNA, 19 nt, Homo sapiens
  misc_RNA (1)...(19): siRNA sense strand
auacacagugauaaaggaa

SEQ ID NO: 2346278 - RNA, 19 nt, Homo sapiens
  misc_RNA (1)...(19): siRNA sense strand
aggaauugggugcgacuga

SEQ ID NO: 2346279 - RNA, 19 nt, Homo sapiens
  misc_RNA (1)...(19): siRNA sense strand
ggaugucaacaaggagaaa

SEQ ID NO: 2346280 - RNA, 19 nt, Homo sapiens
  misc_RNA (1)...(19): siRNA sense strand
cugcaagggaaaaucaaua

SEQ ID NO: 2346281 - RNA, 19 nt, Homo sapiens
  misc_RNA (1)...(19): siRNA sense strand
caccaaaggcaaaggaggu

SEQ ID NO: 2346282 - RNA, 19 nt, Homo sapiens
  misc_RNA (1)...(19): siRNA sense strand
gcacagugaaaccagguga

SEQ ID NO: 2346283 - RNA, 19 nt, Homo sapiens
  misc_RNA (1)...(19): siRNA sense strand
ugacgaggagagagagcuu

SEQ ID NO: 2346284 - RNA, 19 nt, Homo sapiens
  misc_RNA (1)...(19): siRNA sense strand
ugauaaggaaaauggagaa

SEQ ID NO: 2346285 - RNA, 19 nt, Homo sapiens
  misc_RNA (1)...(19): siRNA sense strand
aggaggagcugcaggccaa

SEQ ID NO: 2346286 - RNA, 19 nt, Homo sapiens
  misc_RNA (1)...(19): siRNA sense strand
cagcaagguggaggagaaa

SEQ ID NO: 2346287 - RNA, 19 nt, Homo sapiens
  misc_RNA (1)...(19): siRNA sense strand
gagaaggcggugaggcuga

SEQ ID NO: 2346288 - RNA, 19 nt, Homo sapiens
  misc_RNA (1)...(19): siRNA sense strand
acaagaaggaggcuggaga

SEQ ID NO: 2346289 - RNA, 19 nt, Homo sapiens
  misc_RNA (1)...(19): siRNA sense strand
aagcgaacggacaggagaa

SEQ ID NO: 2346290 - RNA, 19 nt, Homo sapiens
  misc_RNA (1)...(19): siRNA sense strand
acgugaagguaaacggcga

SEQ ID NO: 2346291 - RNA, 19 nt, Homo sapiens
  misc_RNA (1)...(19): siRNA sense strand
cuuccaaagcgaacggaca

SEQ ID NO: 2346292 - RNA, 19 nt, Homo sapiens
  misc_RNA (1)...(19): siRNA sense strand
uggagaaggcggugaggcu

SEQ ID NO: 2346293 - RNA, 19 nt, Homo sapiens
  misc_RNA (1)...(19): siRNA sense strand
aggcagcagcagagagauu

SEQ ID NO: 2346294 - RNA, 19 nt, Homo sapiens
  misc_RNA (1)...(19): siRNA sense strand
ggugguagcuguaguggca

SEQ ID NO: 2346295 - RNA, 19 nt, Homo sapiens
  misc_RNA (1)...(19): siRNA sense strand
agaacuuaccaaagcagaa

SEQ ID NO: 2346296 - RNA, 19 nt, Homo sapiens
  misc_RNA (1)...(19): siRNA sense strand
cagcugacuaaaagaguaa

SEQ ID NO: 2346297 - RNA, 19 nt, Homo sapiens
  misc_RNA (1)...(19): siRNA sense strand
ggaaacaaaacuagagacu

SEQ ID NO: 2346298 - RNA, 19 nt, Homo sapiens
  misc_RNA (1)...(19): siRNA sense strand
acgaaaggagugaagacuu

SEQ ID NO: 2346299 - RNA, 19 nt, Homo sapiens
  misc_RNA (1)...(19): siRNA sense strand
agauggagagcuacgacaa

SEQ ID NO: 2346300 - RNA, 19 nt, Homo sapiens
  misc_RNA (1)...(19): siRNA sense strand
agaggaaacugaaugacca

SEQ ID NO: 2346301 - RNA, 19 nt, Homo sapiens
  misc_RNA (1)...(19): siRNA sense strand
acucagggaaacauggcua

SEQ ID NO: 2346302 - RNA, 19 nt, Homo sapiens
  misc_RNA (1)...(19): siRNA sense strand
aggcagcagcagagagauu

SEQ ID NO: 2346303 - RNA, 19 nt, Homo sapiens
  misc_RNA (1)...(19): siRNA sense strand
ggugguagcuguaguggca

SEQ ID NO: 2346304 - RNA, 19 nt, Homo sapiens
  misc_RNA (1)...(19): siRNA sense strand
agaacuuaccaaagcagaa

SEQ ID NO: 2346305 - RNA, 19 nt, Homo sapiens
  misc_RNA (1)...(19): siRNA sense strand
cagcugacuaaaagaguaa

SEQ ID NO: 2346306 - RNA, 19 nt, Homo sapiens
  misc_RNA (1)...(19): siRNA sense strand
ggaaacaaaacuagagacu

SEQ ID NO: 2346307 - RNA, 19 nt, Homo sapiens
  misc_RNA (1)...(19): siRNA sense strand
acgaaaggagugaagacuu

SEQ ID NO: 2346308 - RNA, 19 nt, Homo sapiens
  misc_RNA (1)...(19): siRNA sense strand
agauggagagcuacgacaa

SEQ ID NO: 2346309 - RNA, 19 nt, Homo sapiens
  misc_RNA (1)...(19): siRNA sense strand
agaggaaacugaaugacca

SEQ ID NO: 2346310 - RNA, 19 nt, Homo sapiens
  misc_RNA (1)...(19): siRNA sense strand
acucagggaaacauggcua

SEQ ID NO: 2346311 - RNA, 19 nt, Homo sapiens
  misc_RNA (1)...(19): siRNA sense strand
ccuaaaucaguuugguaua

SEQ ID NO: 2346312 - RNA, 19 nt, Homo sapiens
  misc_RNA (1)...(19): siRNA sense strand
ccagauacuaauagcacaa

SEQ ID NO: 2346313 - RNA, 19 nt, Homo sapiens
  misc_RNA (1)...(19): siRNA sense strand
accaagaugaauagcaaua

SEQ ID NO: 2346314 - RNA, 19 nt, Homo sapiens
  misc_RNA (1)...(19): siRNA sense strand
ugcuauaaugcuaggaaau

SEQ ID NO: 2346315 - RNA, 19 nt, Homo sapiens
  misc_RNA (1)...(19): siRNA sense strand
cagagagacagaggagaaa

SEQ ID NO: 2346316 - RNA, 19 nt, Homo sapiens
  misc_RNA (1)...(19): siRNA sense strand
uugcuauaaugcuaggaaa

SEQ ID NO: 2346317 - RNA, 19 nt, Homo sapiens
  misc_RNA (1)...(19): siRNA sense strand
ccuuagacaucgaaguagu

SEQ ID NO: 2346318 - RNA, 19 nt, Homo sapiens
  misc_RNA (1)...(19): siRNA sense strand
ucgaaugggauuuuggaaa

SEQ ID NO: 2346319 - RNA, 19 nt, Homo sapiens
  misc_RNA (1)...(19): siRNA sense strand
caucucaguaggugccaaa

SEQ ID NO: 2346320 - RNA, 19 nt, Homo sapiens
  misc_RNA (1)...(19): siRNA sense strand
uagacuaucuucaaggaga

SEQ ID NO: 2346321 - RNA, 19 nt, Homo sapiens
  misc_RNA (1)...(19): siRNA sense strand
ccauauucucuguucacaa

SEQ ID NO: 2346322 - RNA, 19 nt, Homo sapiens
  misc_RNA (1)...(19): siRNA sense strand
ccucacacgcuguucgaau

SEQ ID NO: 2346323 - RNA, 19 nt, Homo sapiens
  misc_RNA (1)...(19): siRNA sense strand
uaggaaaugcuuuggucau

SEQ ID NO: 2346324 - RNA, 19 nt, Homo sapiens
  misc_RNA (1)...(19): siRNA sense strand
aaggaugaagguagugaau

SEQ ID NO: 2346325 - RNA, 19 nt, Homo sapiens
  misc_RNA (1)...(19): siRNA sense strand
cagucaucuuagucgcuua

SEQ ID NO: 2346326 - RNA, 19 nt, Homo sapiens
  misc_RNA (1)...(19): siRNA sense strand
ccuuucauucagagagaca

SEQ ID NO: 2346327 - RNA, 19 nt, Homo sapiens
  misc_RNA (1)...(19): siRNA sense strand
gguucaauuccuuugucaa

SEQ ID NO: 2346328 - RNA, 19 nt, Homo sapiens
  misc_RNA (1)...(19): siRNA sense strand
gagacagaggagaaagagu

SEQ ID NO: 2346329 - RNA, 19 nt, Homo sapiens
  misc_RNA (1)...(19): siRNA sense strand
cugcuuagagccaggagau

SEQ ID NO: 2346330 - RNA, 19 nt, Homo sapiens
  misc_RNA (1)...(19): siRNA sense strand
ggaaagaggcccugcggaa

SEQ ID NO: 2346331 - RNA, 19 nt, Homo sapiens
  misc_RNA (1)...(19): siRNA sense strand
ggguagaagcagaugccaa

SEQ ID NO: 2346332 - RNA, 19 nt, Homo sapiens
  misc_RNA (1)...(19): siRNA sense strand
aggaaugggaauugaagaa

SEQ ID NO: 2346333 - RNA, 19 nt, Homo sapiens
  misc_RNA (1)...(19): siRNA sense strand
gucgaaagucacugggaaa

SEQ ID NO: 2346334 - RNA, 19 nt, Homo sapiens
  misc_RNA (1)...(19): siRNA sense strand
aggagcaagugaagaggaa

SEQ ID NO: 2346335 - RNA, 19 nt, Homo sapiens
  misc_RNA (1)...(19): siRNA sense strand
gagcaguggcugaagguga

SEQ ID NO: 2346336 - RNA, 19 nt, Homo sapiens
  misc_RNA (1)...(19): siRNA sense strand
gggaggguguuguggaaaa

SEQ ID NO: 2346337 - RNA, 19 nt, Homo sapiens
  misc_RNA (1)...(19): siRNA sense strand
guuccaaaucagaggccaa

SEQ ID NO: 2346338 - RNA, 19 nt, Homo sapiens
  misc_RNA (1)...(19): siRNA sense strand
caucagucugggaaagaaa

SEQ ID NO: 2346339 - RNA, 19 nt, Homo sapiens
  misc_RNA (1)...(19): siRNA sense strand
gggcagguggauugggauu

SEQ ID NO: 2346340 - RNA, 19 nt, Homo sapiens
  misc_RNA (1)...(19): siRNA sense strand
aagaggaggaggaugggaa

SEQ ID NO: 2346341 - RNA, 19 nt, Homo sapiens
  misc_RNA (1)...(19): siRNA sense strand
caagugaagaggaagaaaa

SEQ ID NO: 2346342 - RNA, 19 nt, Homo sapiens
  misc_RNA (1)...(19): siRNA sense strand
ugaagcagcuggaggagga

SEQ ID NO: 2346343 - RNA, 19 nt, Homo sapiens
  misc_RNA (1)...(19): siRNA sense strand
ggaccgaccugaagaccca

SEQ ID NO: 2346344 - RNA, 19 nt, Homo sapiens
  misc_RNA (1)...(19): siRNA sense strand
aggagcugcugaagaggaa

SEQ ID NO: 2346345 - RNA, 19 nt, Homo sapiens
  misc_RNA (1)...(19): siRNA sense strand
agaaggaggcggagcgugu

SEQ ID NO: 2346346 - RNA, 19 nt, Homo sapiens
  misc_RNA (1)...(19): siRNA sense strand
ggaagaagcgguucggcca

SEQ ID NO: 2346347 - RNA, 19 nt, Homo sapiens
  misc_RNA (1)...(19): siRNA sense strand
cguaugaugaagaggagga

SEQ ID NO: 2346348 - RNA, 19 nt, Homo sapiens
  misc_RNA (1)...(19): siRNA sense strand
ugucgaaagucacugggaa

SEQ ID NO: 2346349 - RNA, 19 nt, Homo sapiens
  misc_RNA (1)...(19): siRNA sense strand
agaucaucagucugggaaa

SEQ ID NO: 2346350 - RNA, 19 nt, Homo sapiens
  misc_RNA (1)...(19): siRNA sense strand
acuccaaggcuguaacauu

SEQ ID NO: 2346351 - RNA, 19 nt, Homo sapiens
  misc_RNA (1)...(19): siRNA sense strand
ccaaagaggaggagcugcu

SEQ ID NO: 2346352 - RNA, 19 nt, Homo sapiens
  misc_RNA (1)...(19): siRNA sense strand
ccggaauacaucacaucaa

SEQ ID NO: 2346353 - RNA, 19 nt, Homo sapiens
  misc_RNA (1)...(19): siRNA sense strand
gugaagaggaagaaaaguu

SEQ ID NO: 2346354 - RNA, 19 nt, Homo sapiens
  misc_RNA (1)...(19): siRNA sense strand
auggaaaggagcaagugaa

SEQ ID NO: 2346355 - RNA, 19 nt, Homo sapiens
  misc_RNA (1)...(19): siRNA sense strand
augaugaagaggaggagga

SEQ ID NO: 2346356 - RNA, 19 nt, Homo sapiens
  misc_RNA (1)...(19): siRNA sense strand
gaugggaaggggaagaaaa

SEQ ID NO: 2346357 - RNA, 19 nt, Homo sapiens
  misc_RNA (1)...(19): siRNA sense strand
agaccaaagaggaggagcu

SEQ ID NO: 2346358 - RNA, 19 nt, Homo sapiens
  misc_RNA (1)...(19): siRNA sense strand
cugcggaaggccaaggaau

SEQ ID NO: 2346359 - RNA, 19 nt, Homo sapiens
  misc_RNA (1)...(19): siRNA sense strand
acguacaucccgaaagaca

SEQ ID NO: 2346360 - RNA, 19 nt, Homo sapiens
  misc_RNA (1)...(19): siRNA sense strand
aaucagaggccaagggcac

SEQ ID NO: 2346361 - RNA, 19 nt, Homo sapiens
  misc_RNA (1)...(19): siRNA sense strand
ugaaagauaacaagcucau

SEQ ID NO: 2346362 - RNA, 19 nt, Homo sapiens
  misc_RNA (1)...(19): siRNA sense strand
aggccaaggaaugggaauu

SEQ ID NO: 2346363 - RNA, 19 nt, Homo sapiens
  misc_RNA (1)...(19): siRNA sense strand
gugaaagauaacaagcuca

SEQ ID NO: 2346364 - RNA, 19 nt, Homo sapiens
  misc_RNA (1)...(19): siRNA sense strand
ccaugaauaucuaaccuca

SEQ ID NO: 2346365 - RNA, 19 nt, Homo sapiens
  misc_RNA (1)...(19): siRNA sense strand
caguacaaguauggcaaga

SEQ ID NO: 2346366 - RNA, 19 nt, Homo sapiens
  misc_RNA (1)...(19): siRNA sense strand
cggccaggagguugcagua

SEQ ID NO: 2346367 - RNA, 19 nt, Homo sapiens
  misc_RNA (1)...(19): siRNA sense strand
agacaugggcagguggauu

SEQ ID NO: 2346368 - RNA, 19 nt, Homo sapiens
  misc_RNA (1)...(19): siRNA sense strand
cuaauggggucacaggaaa

SEQ ID NO: 2346369 - RNA, 19 nt, Homo sapiens
  misc_RNA (1)...(19): siRNA sense strand
ggaaagaggcccugcggaa

SEQ ID NO: 2346370 - RNA, 19 nt, Homo sapiens
  misc_RNA (1)...(19): siRNA sense strand
ggguagaagcagaugccaa

SEQ ID NO: 2346371 - RNA, 19 nt, Homo sapiens
  misc_RNA (1)...(19): siRNA sense strand
aggaaugggaauugaagaa

SEQ ID NO: 2346372 - RNA, 19 nt, Homo sapiens
  misc_RNA (1)...(19): siRNA sense strand
gucgaaagucacugggaaa

SEQ ID NO: 2346373 - RNA, 19 nt, Homo sapiens
  misc_RNA (1)...(19): siRNA sense strand
aggagcaagugaagaggaa

SEQ ID NO: 2346374 - RNA, 19 nt, Homo sapiens
  misc_RNA (1)...(19): siRNA sense strand
gagcaguggcugaagguga

SEQ ID NO: 2346375 - RNA, 19 nt, Homo sapiens
  misc_RNA (1)...(19): siRNA sense strand
gggaggguguuguggaaaa

SEQ ID NO: 2346376 - RNA, 19 nt, Homo sapiens
  misc_RNA (1)...(19): siRNA sense strand
guuccaaaucagaggccaa

SEQ ID NO: 2346377 - RNA, 19 nt, Homo sapiens
  misc_RNA (1)...(19): siRNA sense strand
caucagucugggaaagaaa

SEQ ID NO: 2346378 - RNA, 19 nt, Homo sapiens
  misc_RNA (1)...(19): siRNA sense strand
gggcagguggauugggauu

SEQ ID NO: 2346379 - RNA, 19 nt, Homo sapiens
  misc_RNA (1)...(19): siRNA sense strand
aagaggaggaggaugggaa

SEQ ID NO: 2346380 - RNA, 19 nt, Homo sapiens
  misc_RNA (1)...(19): siRNA sense strand
caagugaagaggaagaaaa

SEQ ID NO: 2346381 - RNA, 19 nt, Homo sapiens
  misc_RNA (1)...(19): siRNA sense strand
ugaagcagcuggaggagga

SEQ ID NO: 2346382 - RNA, 19 nt, Homo sapiens
  misc_RNA (1)...(19): siRNA sense strand
ggaccgaccugaagaccca

SEQ ID NO: 2346383 - RNA, 19 nt, Homo sapiens
  misc_RNA (1)...(19): siRNA sense strand
aggagcugcugaagaggaa

SEQ ID NO: 2346384 - RNA, 19 nt, Homo sapiens
  misc_RNA (1)...(19): siRNA sense strand
agaaggaggcggagcgugu

SEQ ID NO: 2346385 - RNA, 19 nt, Homo sapiens
  misc_RNA (1)...(19): siRNA sense strand
ggaagaagcgguucggcca

SEQ ID NO: 2346386 - RNA, 19 nt, Homo sapiens
  misc_RNA (1)...(19): siRNA sense strand
cguaugaugaagaggagga

SEQ ID NO: 2346387 - RNA, 19 nt, Homo sapiens
  misc_RNA (1)...(19): siRNA sense strand
ugucgaaagucacugggaa

SEQ ID NO: 2346388 - RNA, 19 nt, Homo sapiens
  misc_RNA (1)...(19): siRNA sense strand
agaucaucagucugggaaa

SEQ ID NO: 2346389 - RNA, 19 nt, Homo sapiens
  misc_RNA (1)...(19): siRNA sense strand
acuccaaggcuguaacauu

SEQ ID NO: 2346390 - RNA, 19 nt, Homo sapiens
  misc_RNA (1)...(19): siRNA sense strand
ccaaagaggaggagcugcu

SEQ ID NO: 2346391 - RNA, 19 nt, Homo sapiens
  misc_RNA (1)...(19): siRNA sense strand
ccggaauacaucacaucaa

SEQ ID NO: 2346392 - RNA, 19 nt, Homo sapiens
  misc_RNA (1)...(19): siRNA sense strand
gugaagaggaagaaaaguu

SEQ ID NO: 2346393 - RNA, 19 nt, Homo sapiens
  misc_RNA (1)...(19): siRNA sense strand
auggaaaggagcaagugaa

SEQ ID NO: 2346394 - RNA, 19 nt, Homo sapiens
  misc_RNA (1)...(19): siRNA sense strand
augaugaagaggaggagga

SEQ ID NO: 2346395 - RNA, 19 nt, Homo sapiens
  misc_RNA (1)...(19): siRNA sense strand
gaugggaaggggaagaaaa

SEQ ID NO: 2346396 - RNA, 19 nt, Homo sapiens
  misc_RNA (1)...(19): siRNA sense strand
agaccaaagaggaggagcu

SEQ ID NO: 2346397 - RNA, 19 nt, Homo sapiens
  misc_RNA (1)...(19): siRNA sense strand
cugcggaaggccaaggaau

SEQ ID NO: 2346398 - RNA, 19 nt, Homo sapiens
  misc_RNA (1)...(19): siRNA sense strand
acguacaucccgaaagaca

SEQ ID NO: 2346399 - RNA, 19 nt, Homo sapiens
  misc_RNA (1)...(19): siRNA sense strand
aaucagaggccaagggcac

SEQ ID NO: 2346400 - RNA, 19 nt, Homo sapiens
  misc_RNA (1)...(19): siRNA sense strand
ugaaagauaacaagcucau

SEQ ID NO: 2346401 - RNA, 19 nt, Homo sapiens
  misc_RNA (1)...(19): siRNA sense strand
aggccaaggaaugggaauu

SEQ ID NO: 2346402 - RNA, 19 nt, Homo sapiens
  misc_RNA (1)...(19): siRNA sense strand
gugaaagauaacaagcuca

SEQ ID NO: 2346403 - RNA, 19 nt, Homo sapiens
  misc_RNA (1)...(19): siRNA sense strand
ccaugaauaucuaaccuca

SEQ ID NO: 2346404 - RNA, 19 nt, Homo sapiens
  misc_RNA (1)...(19): siRNA sense strand
caguacaaguauggcaaga

SEQ ID NO: 2346405 - RNA, 19 nt, Homo sapiens
  misc_RNA (1)...(19): siRNA sense strand
cggccaggagguugcagua

SEQ ID NO: 2346406 - RNA, 19 nt, Homo sapiens
  misc_RNA (1)...(19): siRNA sense strand
agacaugggcagguggauu

SEQ ID NO: 2346407 - RNA, 19 nt, Homo sapiens
  misc_RNA (1)...(19): siRNA sense strand
cuaauggggucacaggaaa

SEQ ID NO: 2346408 - RNA, 19 nt, Homo sapiens
  misc_RNA (1)...(19): siRNA sense strand
ggaucaaguuggagcugga

SEQ ID NO: 2346409 - RNA, 19 nt, Homo sapiens
  misc_RNA (1)...(19): siRNA sense strand
aagcaaaugccauggacau

SEQ ID NO: 2346410 - RNA, 19 nt, Homo sapiens
  misc_RNA (1)...(19): siRNA sense strand
caggaaugucgaagcaaau

SEQ ID NO: 2346411 - RNA, 19 nt, Homo sapiens
  misc_RNA (1)...(19): siRNA sense strand
aguuggagcuggacgguga

SEQ ID NO: 2346412 - RNA, 19 nt, Homo sapiens
  misc_RNA (1)...(19): siRNA sense strand
cugaggagcagcaggcaga

SEQ ID NO: 2346413 - RNA, 19 nt, Homo sapiens
  misc_RNA (1)...(19): siRNA sense strand
ucucaggaggugugaacau

SEQ ID NO: 2346414 - RNA, 19 nt, Homo sapiens
  misc_RNA (1)...(19): siRNA sense strand
gcccagaaauaccgggacu

SEQ ID NO: 2346415 - RNA, 19 nt, Homo sapiens
  misc_RNA (1)...(19): siRNA sense strand
ucuuauugguccuggugau

SEQ ID NO: 2346416 - RNA, 19 nt, Homo sapiens
  misc_RNA (1)...(19): siRNA sense strand
ggguggucagugagggaca

SEQ ID NO: 2346417 - RNA, 19 nt, Homo sapiens
  misc_RNA (1)...(19): siRNA sense strand
agggacacacuuuggagaa

SEQ ID NO: 2346418 - RNA, 19 nt, Homo sapiens
  misc_RNA (1)...(19): siRNA sense strand
gggaaaugcuuuugggagc

SEQ ID NO: 2346419 - RNA, 19 nt, Homo sapiens
  misc_RNA (1)...(19): siRNA sense strand
ggaucuacucugggagaca

SEQ ID NO: 2346420 - RNA, 19 nt, Homo sapiens
  misc_RNA (1)...(19): siRNA sense strand
agggaagagugcggggaua

SEQ ID NO: 2346421 - RNA, 19 nt, Homo sapiens
  misc_RNA (1)...(19): siRNA sense strand
gggaagagugcggggauau

SEQ ID NO: 2346422 - RNA, 19 nt, Homo sapiens
  misc_RNA (1)...(19): siRNA sense strand
cuguggaguuggugauugu

SEQ ID NO: 2346423 - RNA, 19 nt, Homo sapiens
  misc_RNA (1)...(19): siRNA sense strand
gcggaaauauguuugugga

SEQ ID NO: 2346424 - RNA, 19 nt, Homo sapiens
  misc_RNA (1)...(19): siRNA sense strand
ggacauggggucugugaca

SEQ ID NO: 2346425 - RNA, 19 nt, Homo sapiens
  misc_RNA (1)...(19): siRNA sense strand
ccugaauguacgaguggca

SEQ ID NO: 2346426 - RNA, 19 nt, Homo sapiens
  misc_RNA (1)...(19): siRNA sense strand
ccaugauuugccugggaau

SEQ ID NO: 2346427 - RNA, 19 nt, Homo sapiens
  misc_RNA (1)...(19): siRNA sense strand
ugucauaccuggaaagcaa

SEQ ID NO: 2346428 - RNA, 19 nt, Homo sapiens
  misc_RNA (1)...(19): siRNA sense strand
uagaagaggcugugggaga

SEQ ID NO: 2346429 - RNA, 19 nt, Homo sapiens
  misc_RNA (1)...(19): siRNA sense strand
caacaaaccuguagcaccu

SEQ ID NO: 2346430 - RNA, 19 nt, Homo sapiens
  misc_RNA (1)...(19): siRNA sense strand
gaacccaccuucaugaaua

SEQ ID NO: 2346431 - RNA, 19 nt, Homo sapiens
  misc_RNA (1)...(19): siRNA sense strand
ggccagagccuaauggaga

SEQ ID NO: 2346432 - RNA, 19 nt, Homo sapiens
  misc_RNA (1)...(19): siRNA sense strand
ccgacgaaucagugggcau

SEQ ID NO: 2346433 - RNA, 19 nt, Homo sapiens
  misc_RNA (1)...(19): siRNA sense strand
gcugaaaccuuccaccaua

SEQ ID NO: 2346434 - RNA, 19 nt, Homo sapiens
  misc_RNA (1)...(19): siRNA sense strand
gggugaugacucaggcauu

SEQ ID NO: 2346435 - RNA, 19 nt, Homo sapiens
  misc_RNA (1)...(19): siRNA sense strand
ugcgugugcuagaggaaua

SEQ ID NO: 2346436 - RNA, 19 nt, Homo sapiens
  misc_RNA (1)...(19): siRNA sense strand
uaucagugcaggagaggau

SEQ ID NO: 2346437 - RNA, 19 nt, Homo sapiens
  misc_RNA (1)...(19): siRNA sense strand
gcaugguuauccuggguuu

SEQ ID NO: 2346438 - RNA, 19 nt, Homo sapiens
  misc_RNA (1)...(19): siRNA sense strand
guguaaagcgugugggcac

SEQ ID NO: 2346439 - RNA, 19 nt, Homo sapiens
  misc_RNA (1)...(19): siRNA sense strand
ugguuaagguagacccaga

SEQ ID NO: 2346440 - RNA, 19 nt, Homo sapiens
  misc_RNA (1)...(19): siRNA sense strand
cugaaaccuuccaccauaa

SEQ ID NO: 2346441 - RNA, 19 nt, Homo sapiens
  misc_RNA (1)...(19): siRNA sense strand
uggagaugcuacagcuaga

SEQ ID NO: 2346442 - RNA, 19 nt, Homo sapiens
  misc_RNA (1)...(19): siRNA sense strand
gggaaggugcacagcuuga

SEQ ID NO: 2346443 - RNA, 19 nt, Homo sapiens
  misc_RNA (1)...(19): siRNA sense strand
ccguaguaggccagguaca

SEQ ID NO: 2346444 - RNA, 19 nt, Homo sapiens
  misc_RNA (1)...(19): siRNA sense strand
gggcugagaugcacugcuu

SEQ ID NO: 2346445 - RNA, 19 nt, Homo sapiens
  misc_RNA (1)...(19): siRNA sense strand
cagaaguccugucgaggca

SEQ ID NO: 2346446 - RNA, 19 nt, Homo sapiens
  misc_RNA (1)...(19): siRNA sense strand
caacugugguggagggcac

SEQ ID NO: 2346447 - RNA, 19 nt, Homo sapiens
  misc_RNA (1)...(19): siRNA sense strand
gggcauucucugauacuga

SEQ ID NO: 2346448 - RNA, 19 nt, Homo sapiens
  misc_RNA (1)...(19): siRNA sense strand
cugggaaggugcacagcuu

SEQ ID NO: 2346449 - RNA, 19 nt, Homo sapiens
  misc_RNA (1)...(19): siRNA sense strand
aagcagagauggcacacau

SEQ ID NO: 2346450 - RNA, 19 nt, Homo sapiens
  misc_RNA (1)...(19): siRNA sense strand
ccaugguggcuauguguau

SEQ ID NO: 2346451 - RNA, 19 nt, Homo sapiens
  misc_RNA (1)...(19): siRNA sense strand
gcaccugaccgacgaauca

SEQ ID NO: 2346452 - RNA, 19 nt, Homo sapiens
  misc_RNA (1)...(19): siRNA sense strand
gugagauccuccaggccuu

SEQ ID NO: 2346453 - RNA, 19 nt, Homo sapiens
  misc_RNA (1)...(19): siRNA sense strand
augaguuugugguguggaa

SEQ ID NO: 2346454 - RNA, 19 nt, Homo sapiens
  misc_RNA (1)...(19): siRNA sense strand
uguaguggguagugguagu

SEQ ID NO: 2346455 - RNA, 19 nt, Homo sapiens
  misc_RNA (1)...(19): siRNA sense strand
gagccaugaaggugagauc

SEQ ID NO: 2346456 - RNA, 19 nt, Homo sapiens
  misc_RNA (1)...(19): siRNA sense strand
auaaacauuuccaguccua

SEQ ID NO: 2346457 - RNA, 19 nt, Homo sapiens
  misc_RNA (1)...(19): siRNA sense strand
gucaggggcuugagguuua

SEQ ID NO: 2346458 - RNA, 19 nt, Homo sapiens
  misc_RNA (1)...(19): siRNA sense strand
ggaaggaaggagugccuca

SEQ ID NO: 2346459 - RNA, 19 nt, Homo sapiens
  misc_RNA (1)...(19): siRNA sense strand
cuaugagagaggcgaggaa

SEQ ID NO: 2346460 - RNA, 19 nt, Homo sapiens
  misc_RNA (1)...(19): siRNA sense strand
cuuuaaagauaacgacacu

SEQ ID NO: 2346461 - RNA, 19 nt, Homo sapiens
  misc_RNA (1)...(19): siRNA sense strand
ggauguaagaaaagcauga

SEQ ID NO: 2346462 - RNA, 19 nt, Homo sapiens
  misc_RNA (1)...(19): siRNA sense strand
cuggaugggucucgcaaaa

SEQ ID NO: 2346463 - RNA, 19 nt, Homo sapiens
  misc_RNA (1)...(19): siRNA sense strand
ggcaguacugguuuggaaa

SEQ ID NO: 2346464 - RNA, 19 nt, Homo sapiens
  misc_RNA (1)...(19): siRNA sense strand
guguauaccugcaaggccu

SEQ ID NO: 2346465 - RNA, 19 nt, Homo sapiens
  misc_RNA (1)...(19): siRNA sense strand
ggaaggaaggagugccuca

SEQ ID NO: 2346466 - RNA, 19 nt, Homo sapiens
  misc_RNA (1)...(19): siRNA sense strand
cuaugagagaggcgaggaa

SEQ ID NO: 2346467 - RNA, 19 nt, Homo sapiens
  misc_RNA (1)...(19): siRNA sense strand
cuuuaaagauaacgacacu

SEQ ID NO: 2346468 - RNA, 19 nt, Homo sapiens
  misc_RNA (1)...(19): siRNA sense strand
ggauguaagaaaagcauga

SEQ ID NO: 2346469 - RNA, 19 nt, Homo sapiens
  misc_RNA (1)...(19): siRNA sense strand
cuggaugggucucgcaaaa

SEQ ID NO: 2346470 - RNA, 19 nt, Homo sapiens
  misc_RNA (1)...(19): siRNA sense strand
ggcaguacugguuuggaaa

SEQ ID NO: 2346471 - RNA, 19 nt, Homo sapiens
  misc_RNA (1)...(19): siRNA sense strand
guguauaccugcaaggccu

SEQ ID NO: 2346472 - RNA, 19 nt, Homo sapiens
  misc_RNA (1)...(19): siRNA sense strand
aggaugaaguggaagaaaa

SEQ ID NO: 2346473 - RNA, 19 nt, Homo sapiens
  misc_RNA (1)...(19): siRNA sense strand
cggaggaugaaguggaaga

SEQ ID NO: 2346474 - RNA, 19 nt, Homo sapiens
  misc_RNA (1)...(19): siRNA sense strand
ggaugaaguggaagaaaau

SEQ ID NO: 2346475 - RNA, 19 nt, Homo sapiens
  misc_RNA (1)...(19): siRNA sense strand
gugaagacgugguaccaga

SEQ ID NO: 2346476 - RNA, 19 nt, Homo sapiens
  misc_RNA (1)...(19): siRNA sense strand
ggaagaaaauagugcugca

SEQ ID NO: 2346477 - RNA, 19 nt, Homo sapiens
  misc_RNA (1)...(19): siRNA sense strand
cagaauagaucuugcugag

SEQ ID NO: 2346478 - RNA, 19 nt, Homo sapiens
  misc_RNA (1)...(19): siRNA sense strand
ccggaaacaucgugcgcca

SEQ ID NO: 2346479 - RNA, 19 nt, Homo sapiens
  misc_RNA (1)...(19): siRNA sense strand
aggacauggugguggacga

SEQ ID NO: 2346480 - RNA, 19 nt, Homo sapiens
  misc_RNA (1)...(19): siRNA sense strand
ccaacuacugccaggguca

SEQ ID NO: 2346481 - RNA, 19 nt, Homo sapiens
  misc_RNA (1)...(19): siRNA sense strand
ggauaauggucauggggaa

SEQ ID NO: 2346482 - RNA, 19 nt, Homo sapiens
  misc_RNA (1)...(19): siRNA sense strand
cagcuguggagaagggaaa

SEQ ID NO: 2346483 - RNA, 19 nt, Homo sapiens
  misc_RNA (1)...(19): siRNA sense strand
cggcaguggucuaaagcau

SEQ ID NO: 2346484 - RNA, 19 nt, Homo sapiens
  misc_RNA (1)...(19): siRNA sense strand
caguacacgaugagggaau

SEQ ID NO: 2346485 - RNA, 19 nt, Homo sapiens
  misc_RNA (1)...(19): siRNA sense strand
ggaaguacugugaaggcaa

SEQ ID NO: 2346486 - RNA, 19 nt, Homo sapiens
  misc_RNA (1)...(19): siRNA sense strand
cugugauccuuuaaagaaa

SEQ ID NO: 2346487 - RNA, 19 nt, Homo sapiens
  misc_RNA (1)...(19): siRNA sense strand
ccuuagagcaagacauuau

SEQ ID NO: 2346488 - RNA, 19 nt, Homo sapiens
  misc_RNA (1)...(19): siRNA sense strand
ugaacaaaaccgacagaaa

SEQ ID NO: 2346489 - RNA, 19 nt, Homo sapiens
  misc_RNA (1)...(19): siRNA sense strand
uguucuaagucaugugaau

SEQ ID NO: 2346490 - RNA, 19 nt, Homo sapiens
  misc_RNA (1)...(19): siRNA sense strand
aaaccaugcuuguggcaga

SEQ ID NO: 2346491 - RNA, 19 nt, Homo sapiens
  misc_RNA (1)...(19): siRNA sense strand
cccaaagaauggagggaag

SEQ ID NO: 2346492 - RNA, 19 nt, Homo sapiens
  misc_RNA (1)...(19): siRNA sense strand
ccaacaucgaagugaaaca

SEQ ID NO: 2346493 - RNA, 19 nt, Homo sapiens
  misc_RNA (1)...(19): siRNA sense strand
ucguaaagaagaagaagga

SEQ ID NO: 2346494 - RNA, 19 nt, Homo sapiens
  misc_RNA (1)...(19): siRNA sense strand
agaccgaagacgaggacga

SEQ ID NO: 2346495 - RNA, 19 nt, Homo sapiens
  misc_RNA (1)...(19): siRNA sense strand
acgaagggacugagggcga

SEQ ID NO: 2346496 - RNA, 19 nt, Homo sapiens
  misc_RNA (1)...(19): siRNA sense strand
acuggaagcauaagaaaga

SEQ ID NO: 2346497 - RNA, 19 nt, Homo sapiens
  misc_RNA (1)...(19): siRNA sense strand
uggugaagaucuuggucau

SEQ ID NO: 2346498 - RNA, 19 nt, Homo sapiens
  misc_RNA (1)...(19): siRNA sense strand
ggggaauguuugauggaca

SEQ ID NO: 2346499 - RNA, 19 nt, Homo sapiens
  misc_RNA (1)...(19): siRNA sense strand
ggaucaguuacuagugcaa

SEQ ID NO: 2346500 - RNA, 19 nt, Homo sapiens
  misc_RNA (1)...(19): siRNA sense strand
acggcaagugugugaacaa

SEQ ID NO: 2346501 - RNA, 19 nt, Homo sapiens
  misc_RNA (1)...(19): siRNA sense strand
caccaacaucgaagugaaa

SEQ ID NO: 2346502 - RNA, 19 nt, Homo sapiens
  misc_RNA (1)...(19): siRNA sense strand
agaccugugggaaggguua

SEQ ID NO: 2346503 - RNA, 19 nt, Homo sapiens
  misc_RNA (1)...(19): siRNA sense strand
cagccagauuguacaaaca

SEQ ID NO: 2346504 - RNA, 19 nt, Homo sapiens
  misc_RNA (1)...(19): siRNA sense strand
gugacaacccagucccaaa

SEQ ID NO: 2346505 - RNA, 19 nt, Homo sapiens
  misc_RNA (1)...(19): siRNA sense strand
gugugugauccgagcagaa

SEQ ID NO: 2346506 - RNA, 19 nt, Homo sapiens
  misc_RNA (1)...(19): siRNA sense strand
ucgaagugaaacagcggaa

SEQ ID NO: 2346507 - RNA, 19 nt, Homo sapiens
  misc_RNA (1)...(19): siRNA sense strand
acaggaacuggaagcauaa

SEQ ID NO: 2346508 - RNA, 19 nt, Homo sapiens
  misc_RNA (1)...(19): siRNA sense strand
aauuaggccacguguuuaa

SEQ ID NO: 2346509 - RNA, 19 nt, Homo sapiens
  misc_RNA (1)...(19): siRNA sense strand
agacaggacuugugugggu

SEQ ID NO: 2346510 - RNA, 19 nt, Homo sapiens
  misc_RNA (1)...(19): siRNA sense strand
agacauuaauggacagccu

SEQ ID NO: 2346511 - RNA, 19 nt, Homo sapiens
  misc_RNA (1)...(19): siRNA sense strand
aaggcaaacgagugcgcua

SEQ ID NO: 2346512 - RNA, 19 nt, Homo sapiens
  misc_RNA (1)...(19): siRNA sense strand
uguaaaagcugguugugau

SEQ ID NO: 2346513 - RNA, 19 nt, Homo sapiens
  misc_RNA (1)...(19): siRNA sense strand
cagagaagacugguagaau

SEQ ID NO: 2346514 - RNA, 19 nt, Homo sapiens
  misc_RNA (1)...(19): siRNA sense strand
cagcggaaccagaggggau

SEQ ID NO: 2346515 - RNA, 19 nt, Homo sapiens
  misc_RNA (1)...(19): siRNA sense strand
cugggaaagcggagaccga

SEQ ID NO: 2346516 - RNA, 19 nt, Homo sapiens
  misc_RNA (1)...(19): siRNA sense strand
agacgaggacgaagggacu

SEQ ID NO: 2346517 - RNA, 19 nt, Homo sapiens
  misc_RNA (1)...(19): siRNA sense strand
gaugcaaagcagugugcca

SEQ ID NO: 2346518 - RNA, 19 nt, Homo sapiens
  misc_RNA (1)...(19): siRNA sense strand
caacccagucccaaagaau

SEQ ID NO: 2346519 - RNA, 19 nt, Homo sapiens
  misc_RNA (1)...(19): siRNA sense strand
cugcggcauuggaaagaau

SEQ ID NO: 2346520 - RNA, 19 nt, Homo sapiens
  misc_RNA (1)...(19): siRNA sense strand
ccuaaacauuucauagacu

SEQ ID NO: 2346521 - RNA, 19 nt, Homo sapiens
  misc_RNA (1)...(19): siRNA sense strand
gugaaacagcggaaccaga

SEQ ID NO: 2346522 - RNA, 19 nt, Homo sapiens
  misc_RNA (1)...(19): siRNA sense strand
aagcagugugccagccuua

SEQ ID NO: 2346523 - RNA, 19 nt, Homo sapiens
  misc_RNA (1)...(19): siRNA sense strand
ccauacagcucccaggcga

SEQ ID NO: 2346524 - RNA, 19 nt, Homo sapiens
  misc_RNA (1)...(19): siRNA sense strand
gccgagacauuaauggaca

SEQ ID NO: 2346525 - RNA, 19 nt, Homo sapiens
  misc_RNA (1)...(19): siRNA sense strand
cgugcagaguggagggaga

SEQ ID NO: 2346526 - RNA, 19 nt, Homo sapiens
  misc_RNA (1)...(19): siRNA sense strand
gcagauggcucguucggaa

SEQ ID NO: 2346527 - RNA, 19 nt, Homo sapiens
  misc_RNA (1)...(19): siRNA sense strand
gcauggaggaggugggcau

SEQ ID NO: 2346528 - RNA, 19 nt, Homo sapiens
  misc_RNA (1)...(19): siRNA sense strand
uggugaaggucaacgacaa

SEQ ID NO: 2346529 - RNA, 19 nt, Homo sapiens
  misc_RNA (1)...(19): siRNA sense strand
gguccaacuucgagcggau

SEQ ID NO: 2346530 - RNA, 19 nt, Homo sapiens
  misc_RNA (1)...(19): siRNA sense strand
gggacacagcugagccaaa

SEQ ID NO: 2346531 - RNA, 19 nt, Homo sapiens
  misc_RNA (1)...(19): siRNA sense strand
acggagaggcugaagaaga

SEQ ID NO: 2346532 - RNA, 19 nt, Homo sapiens
  misc_RNA (1)...(19): siRNA sense strand
agaagaagcugucggagca

SEQ ID NO: 2346533 - RNA, 19 nt, Homo sapiens
  misc_RNA (1)...(19): siRNA sense strand
cagagagagaagagggcga

SEQ ID NO: 2346534 - RNA, 19 nt, Homo sapiens
  misc_RNA (1)...(19): siRNA sense strand
ccaaggaaaagaagagcua

SEQ ID NO: 2346535 - RNA, 19 nt, Homo sapiens
  misc_RNA (1)...(19): siRNA sense strand
uggcuagcgaggagacuua

SEQ ID NO: 2346536 - RNA, 19 nt, Homo sapiens
  misc_RNA (1)...(19): siRNA sense strand
aguccaugacggugaagaa

SEQ ID NO: 2346537 - RNA, 19 nt, Homo sapiens
  misc_RNA (1)...(19): siRNA sense strand
ccggacagcaagagacaga

SEQ ID NO: 2346538 - RNA, 19 nt, Homo sapiens
  misc_RNA (1)...(19): siRNA sense strand
agggcuuggagaugagaaa

SEQ ID NO: 2346539 - RNA, 19 nt, Homo sapiens
  misc_RNA (1)...(19): siRNA sense strand
cagagaaggaggcagucaa

SEQ ID NO: 2346540 - RNA, 19 nt, Homo sapiens
  misc_RNA (1)...(19): siRNA sense strand
ccuucgacgucaauaacaa

SEQ ID NO: 2346541 - RNA, 19 nt, Homo sapiens
  misc_RNA (1)...(19): siRNA sense strand
ccaacuucgcagagggcau

SEQ ID NO: 2346542 - RNA, 19 nt, Homo sapiens
  misc_RNA (1)...(19): siRNA sense strand
agugacauccagagagaga

SEQ ID NO: 2346543 - RNA, 19 nt, Homo sapiens
  misc_RNA (1)...(19): siRNA sense strand
uggcagagaaggaggcagu

SEQ ID NO: 2346544 - RNA, 19 nt, Homo sapiens
  misc_RNA (1)...(19): siRNA sense strand
cggcaguccaugacgguga

SEQ ID NO: 2346545 - RNA, 19 nt, Homo sapiens
  misc_RNA (1)...(19): siRNA sense strand
gagaagugcugucaggcca

SEQ ID NO: 2346546 - RNA, 19 nt, Homo sapiens
  misc_RNA (1)...(19): siRNA sense strand
gguggauuccuuuggguau

SEQ ID NO: 2346547 - RNA, 19 nt, Homo sapiens
  misc_RNA (1)...(19): siRNA sense strand
gaaguaaagcucucgguca

SEQ ID NO: 2346548 - RNA, 19 nt, Homo sapiens
  misc_RNA (1)...(19): siRNA sense strand
caugaaugggaucgaagua

SEQ ID NO: 2346549 - RNA, 19 nt, Homo sapiens
  misc_RNA (1)...(19): siRNA sense strand
uggaaaagggcuuggagau

SEQ ID NO: 2346550 - RNA, 19 nt, Homo sapiens
  misc_RNA (1)...(19): siRNA sense strand
cagaguggagggagaacau

SEQ ID NO: 2346551 - RNA, 19 nt, Homo sapiens
  misc_RNA (1)...(19): siRNA sense strand
aggugaaccaggagcgcuu

SEQ ID NO: 2346552 - RNA, 19 nt, Homo sapiens
  misc_RNA (1)...(19): siRNA sense strand
ccgcauguuccgggacaaa

SEQ ID NO: 2346553 - RNA, 19 nt, Homo sapiens
  misc_RNA (1)...(19): siRNA sense strand
gcgaggguucuccggguaa

SEQ ID NO: 2346554 - RNA, 19 nt, Homo sapiens
  misc_RNA (1)...(19): siRNA sense strand
acgaggacgccgaguugaa

SEQ ID NO: 2346555 - RNA, 19 nt, Homo sapiens
  misc_RNA (1)...(19): siRNA sense strand
cagccuucgacgucaauaa

SEQ ID NO: 2346556 - RNA, 19 nt, Homo sapiens
  misc_RNA (1)...(19): siRNA sense strand
ccaagaacucucuggaaac

SEQ ID NO: 2346557 - RNA, 19 nt, Homo sapiens
  misc_RNA (1)...(19): siRNA sense strand
ugacggugaagaagggaga

SEQ ID NO: 2346558 - RNA, 19 nt, Homo sapiens
  misc_RNA (1)...(19): siRNA sense strand
gccagugcguggaggagau

SEQ ID NO: 2346559 - RNA, 19 nt, Homo sapiens
  misc_RNA (1)...(19): siRNA sense strand
uggaaauggcugagaagug

SEQ ID NO: 2346560 - RNA, 19 nt, Homo sapiens
  misc_RNA (1)...(19): siRNA sense strand
gaagcaacaaagaugccaa

SEQ ID NO: 2346561 - RNA, 19 nt, Homo sapiens
  misc_RNA (1)...(19): siRNA sense strand
gugcagaguggagggagaa

SEQ ID NO: 2346562 - RNA, 19 nt, Homo sapiens
  misc_RNA (1)...(19): siRNA sense strand
acggaguugccauggaaau

SEQ ID NO: 2346563 - RNA, 19 nt, Homo sapiens
  misc_RNA (1)...(19): siRNA sense strand
ccacggacauccaggcacu

SEQ ID NO: 2346564 - RNA, 19 nt, Homo sapiens
  misc_RNA (1)...(19): siRNA sense strand
auaagaugucccugcacaa

SEQ ID NO: 2346565 - RNA, 19 nt, Homo sapiens
  misc_RNA (1)...(19): siRNA sense strand
cugcagacguugcuggcca

SEQ ID NO: 2346566 - RNA, 19 nt, Homo sapiens
  misc_RNA (1)...(19): siRNA sense strand
cgugcagaguggagggaga

SEQ ID NO: 2346567 - RNA, 19 nt, Homo sapiens
  misc_RNA (1)...(19): siRNA sense strand
gcagauggcucguucggaa

SEQ ID NO: 2346568 - RNA, 19 nt, Homo sapiens
  misc_RNA (1)...(19): siRNA sense strand
gcauggaggaggugggcau

SEQ ID NO: 2346569 - RNA, 19 nt, Homo sapiens
  misc_RNA (1)...(19): siRNA sense strand
uggugaaggucaacgacaa

SEQ ID NO: 2346570 - RNA, 19 nt, Homo sapiens
  misc_RNA (1)...(19): siRNA sense strand
gguccaacuucgagcggau

SEQ ID NO: 2346571 - RNA, 19 nt, Homo sapiens
  misc_RNA (1)...(19): siRNA sense strand
gggacacagcugagccaaa

SEQ ID NO: 2346572 - RNA, 19 nt, Homo sapiens
  misc_RNA (1)...(19): siRNA sense strand
acggagaggcugaagaaga

SEQ ID NO: 2346573 - RNA, 19 nt, Homo sapiens
  misc_RNA (1)...(19): siRNA sense strand
agaagaagcugucggagca

SEQ ID NO: 2346574 - RNA, 19 nt, Homo sapiens
  misc_RNA (1)...(19): siRNA sense strand
cagagagagaagagggcga

SEQ ID NO: 2346575 - RNA, 19 nt, Homo sapiens
  misc_RNA (1)...(19): siRNA sense strand
ccaaggaaaagaagagcua

SEQ ID NO: 2346576 - RNA, 19 nt, Homo sapiens
  misc_RNA (1)...(19): siRNA sense strand
uggcuagcgaggagacuua

SEQ ID NO: 2346577 - RNA, 19 nt, Homo sapiens
  misc_RNA (1)...(19): siRNA sense strand
aguccaugacggugaagaa

SEQ ID NO: 2346578 - RNA, 19 nt, Homo sapiens
  misc_RNA (1)...(19): siRNA sense strand
ccggacagcaagagacaga

SEQ ID NO: 2346579 - RNA, 19 nt, Homo sapiens
  misc_RNA (1)...(19): siRNA sense strand
agggcuuggagaugagaaa

SEQ ID NO: 2346580 - RNA, 19 nt, Homo sapiens
  misc_RNA (1)...(19): siRNA sense strand
cagagaaggaggcagucaa

SEQ ID NO: 2346581 - RNA, 19 nt, Homo sapiens
  misc_RNA (1)...(19): siRNA sense strand
ccuucgacgucaauaacaa

SEQ ID NO: 2346582 - RNA, 19 nt, Homo sapiens
  misc_RNA (1)...(19): siRNA sense strand
ccaacuucgcagagggcau

SEQ ID NO: 2346583 - RNA, 19 nt, Homo sapiens
  misc_RNA (1)...(19): siRNA sense strand
agugacauccagagagaga

SEQ ID NO: 2346584 - RNA, 19 nt, Homo sapiens
  misc_RNA (1)...(19): siRNA sense strand
uggcagagaaggaggcagu

SEQ ID NO: 2346585 - RNA, 19 nt, Homo sapiens
  misc_RNA (1)...(19): siRNA sense strand
cggcaguccaugacgguga

SEQ ID NO: 2346586 - RNA, 19 nt, Homo sapiens
  misc_RNA (1)...(19): siRNA sense strand
gagaagugcugucaggcca

SEQ ID NO: 2346587 - RNA, 19 nt, Homo sapiens
  misc_RNA (1)...(19): siRNA sense strand
gguggauuccuuuggguau

SEQ ID NO: 2346588 - RNA, 19 nt, Homo sapiens
  misc_RNA (1)...(19): siRNA sense strand
gaaguaaagcucucgguca

SEQ ID NO: 2346589 - RNA, 19 nt, Homo sapiens
  misc_RNA (1)...(19): siRNA sense strand
caugaaugggaucgaagua

SEQ ID NO: 2346590 - RNA, 19 nt, Homo sapiens
  misc_RNA (1)...(19): siRNA sense strand
uggaaaagggcuuggagau

SEQ ID NO: 2346591 - RNA, 19 nt, Homo sapiens
  misc_RNA (1)...(19): siRNA sense strand
cagaguggagggagaacau

SEQ ID NO: 2346592 - RNA, 19 nt, Homo sapiens
  misc_RNA (1)...(19): siRNA sense strand
aggugaaccaggagcgcuu

SEQ ID NO: 2346593 - RNA, 19 nt, Homo sapiens
  misc_RNA (1)...(19): siRNA sense strand
ccgcauguuccgggacaaa

SEQ ID NO: 2346594 - RNA, 19 nt, Homo sapiens
  misc_RNA (1)...(19): siRNA sense strand
gcgaggguucuccggguaa

SEQ ID NO: 2346595 - RNA, 19 nt, Homo sapiens
  misc_RNA (1)...(19): siRNA sense strand
acgaggacgccgaguugaa

SEQ ID NO: 2346596 - RNA, 19 nt, Homo sapiens
  misc_RNA (1)...(19): siRNA sense strand
cagccuucgacgucaauaa

SEQ ID NO: 2346597 - RNA, 19 nt, Homo sapiens
  misc_RNA (1)...(19): siRNA sense strand
ccaagaacucucuggaaac

SEQ ID NO: 2346598 - RNA, 19 nt, Homo sapiens
  misc_RNA (1)...(19): siRNA sense strand
ugacggugaagaagggaga

SEQ ID NO: 2346599 - RNA, 19 nt, Homo sapiens
  misc_RNA (1)...(19): siRNA sense strand
gccagugcguggaggagau

SEQ ID NO: 2346600 - RNA, 19 nt, Homo sapiens
  misc_RNA (1)...(19): siRNA sense strand
uggaaauggcugagaagug

SEQ ID NO: 2346601 - RNA, 19 nt, Homo sapiens
  misc_RNA (1)...(19): siRNA sense strand
gaagcaacaaagaugccaa

SEQ ID NO: 2346602 - RNA, 19 nt, Homo sapiens
  misc_RNA (1)...(19): siRNA sense strand
gugcagaguggagggagaa

SEQ ID NO: 2346603 - RNA, 19 nt, Homo sapiens
  misc_RNA (1)...(19): siRNA sense strand
acggaguugccauggaaau

SEQ ID NO: 2346604 - RNA, 19 nt, Homo sapiens
  misc_RNA (1)...(19): siRNA sense strand
ccacggacauccaggcacu

SEQ ID NO: 2346605 - RNA, 19 nt, Homo sapiens
  misc_RNA (1)...(19): siRNA sense strand
auaagaugucccugcacaa

SEQ ID NO: 2346606 - RNA, 19 nt, Homo sapiens
  misc_RNA (1)...(19): siRNA sense strand
cugcagacguugcuggcca

SEQ ID NO: 2346607 - RNA, 19 nt, Homo sapiens
  misc_RNA (1)...(19): siRNA sense strand
cggaaugcacagauggcua

SEQ ID NO: 2346608 - RNA, 19 nt, Homo sapiens
  misc_RNA (1)...(19): siRNA sense strand
aggcaaaucaacaacguca

SEQ ID NO: 2346609 - RNA, 19 nt, Homo sapiens
  misc_RNA (1)...(19): siRNA sense strand
gggaguacgugcuggaccu

SEQ ID NO: 2346610 - RNA, 19 nt, Homo sapiens
  misc_RNA (1)...(19): siRNA sense strand
ggggaaaugaagugcauca

SEQ ID NO: 2346611 - RNA, 19 nt, Homo sapiens
  misc_RNA (1)...(19): siRNA sense strand
cagugauauugaugagugu

SEQ ID NO: 2346612 - RNA, 19 nt, Homo sapiens
  misc_RNA (1)...(19): siRNA sense strand
gcuaugagcugcaucggga

SEQ ID NO: 2346613 - RNA, 19 nt, Homo sapiens
  misc_RNA (1)...(19): siRNA sense strand
acauuaggcaaaucaacaa

SEQ ID NO: 2346614 - RNA, 19 nt, Homo sapiens
  misc_RNA (1)...(19): siRNA sense strand
cggcauagccuguccgaga

SEQ ID NO: 2346615 - RNA, 19 nt, Homo sapiens
  misc_RNA (1)...(19): siRNA sense strand
aguauaagacguacggaga

SEQ ID NO: 2346616 - RNA, 19 nt, Homo sapiens
  misc_RNA (1)...(19): siRNA sense strand
agggaagcagagagaauau

SEQ ID NO: 2346617 - RNA, 19 nt, Homo sapiens
  misc_RNA (1)...(19): siRNA sense strand
aggaaucccaagaagcaaa

SEQ ID NO: 2346618 - RNA, 19 nt, Homo sapiens
  misc_RNA (1)...(19): siRNA sense strand
ggguaugcauggaagguuc

SEQ ID NO: 2346619 - RNA, 19 nt, Homo sapiens
  misc_RNA (1)...(19): siRNA sense strand
agacguacggagagaggga

SEQ ID NO: 2346620 - RNA, 19 nt, Homo sapiens
  misc_RNA (1)...(19): siRNA sense strand
agagggacuggguggcaaa

SEQ ID NO: 2346621 - RNA, 19 nt, Homo sapiens
  misc_RNA (1)...(19): siRNA sense strand
caguccagaucgagggcca

SEQ ID NO: 2346622 - RNA, 19 nt, Homo sapiens
  misc_RNA (1)...(19): siRNA sense strand
gcauggaagguucuggcaa

SEQ ID NO: 2346623 - RNA, 19 nt, Homo sapiens
  misc_RNA (1)...(19): siRNA sense strand
cacaguaccuaaagggcca

SEQ ID NO: 2346624 - RNA, 19 nt, Homo sapiens
  misc_RNA (1)...(19): siRNA sense strand
cuccaaagugagaucgauu

SEQ ID NO: 2346625 - RNA, 19 nt, Homo sapiens
  misc_RNA (1)...(19): siRNA sense strand
gcuacagauaugucaccaa

SEQ ID NO: 2346626 - RNA, 19 nt, Homo sapiens
  misc_RNA (1)...(19): siRNA sense strand
cggaaguccugcaaccuga

SEQ ID NO: 2346627 - RNA, 19 nt, Homo sapiens
  misc_RNA (1)...(19): siRNA sense strand
cugaaggaccugcgggagu

SEQ ID NO: 2346628 - RNA, 19 nt, Homo sapiens
  misc_RNA (1)...(19): siRNA sense strand
cugaaggaccugcgggagu

SEQ ID NO: 2346629 - RNA, 19 nt, Homo sapiens
  misc_RNA (1)...(19): siRNA sense strand
gaaccgaggccaaggcaca

SEQ ID NO: 2346630 - RNA, 19 nt, Homo sapiens
  misc_RNA (1)...(19): siRNA sense strand
ucuccaaaguggugaucga

SEQ ID NO: 2346631 - RNA, 19 nt, Homo sapiens
  misc_RNA (1)...(19): siRNA sense strand
agaagaugacugaggagga

SEQ ID NO: 2346632 - RNA, 19 nt, Homo sapiens
  misc_RNA (1)...(19): siRNA sense strand
gcaagauccuguacagcca

SEQ ID NO: 2346633 - RNA, 19 nt, Homo sapiens
  misc_RNA (1)...(19): siRNA sense strand
gcaucaacuacgaggccuu

SEQ ID NO: 2346634 - RNA, 19 nt, Homo sapiens
  misc_RNA (1)...(19): siRNA sense strand
aggauguucccgugaagaa

SEQ ID NO: 2346635 - RNA, 19 nt, Homo sapiens
  misc_RNA (1)...(19): siRNA sense strand
aggaggagguggagaccgu

SEQ ID NO: 2346636 - RNA, 19 nt, Homo sapiens
  misc_RNA (1)...(19): siRNA sense strand
cggcaaagucaugggagca

SEQ ID NO: 2346637 - RNA, 19 nt, Homo sapiens
  misc_RNA (1)...(19): siRNA sense strand
ugacugaggaggaggugga

SEQ ID NO: 2346638 - RNA, 19 nt, Homo sapiens
  misc_RNA (1)...(19): siRNA sense strand
caggacacgaggacagcaa

SEQ ID NO: 2346639 - RNA, 19 nt, Homo sapiens
  misc_RNA (1)...(19): siRNA sense strand
gagagaagaugacugagga

SEQ ID NO: 2346640 - RNA, 19 nt, Homo sapiens
  misc_RNA (1)...(19): siRNA sense strand
uguuugacaaggaaggaaa

SEQ ID NO: 2346641 - RNA, 19 nt, Homo sapiens
  misc_RNA (1)...(19): siRNA sense strand
augugaaggugcuggacuu

SEQ ID NO: 2346642 - RNA, 19 nt, Homo sapiens
  misc_RNA (1)...(19): siRNA sense strand
gcaagauccuguacagcca

SEQ ID NO: 2346643 - RNA, 19 nt, Homo sapiens
  misc_RNA (1)...(19): siRNA sense strand
ccgaacaggugauggcaag

SEQ ID NO: 2346644 - RNA, 19 nt, Homo sapiens
  misc_RNA (1)...(19): siRNA sense strand
uguuugacaaggaaggaaa

SEQ ID NO: 2346645 - RNA, 19 nt, Homo sapiens
  misc_RNA (1)...(19): siRNA sense strand
augugaaggugcuggacuu

SEQ ID NO: 2346646 - RNA, 19 nt, Homo sapiens
  misc_RNA (1)...(19): siRNA sense strand
uguuugacaaggaaggaaa

SEQ ID NO: 2346647 - RNA, 19 nt, Homo sapiens
  misc_RNA (1)...(19): siRNA sense strand
augugaaggugcuggacuu

SEQ ID NO: 2346648 - RNA, 19 nt, Homo sapiens
  misc_RNA (1)...(19): siRNA sense strand
agaagaugacagaggaaga

SEQ ID NO: 2346649 - RNA, 19 nt, Homo sapiens
  misc_RNA (1)...(19): siRNA sense strand
ugacagaggaagaaguaga

SEQ ID NO: 2346650 - RNA, 19 nt, Homo sapiens
  misc_RNA (1)...(19): siRNA sense strand
aggaagaaguagagaugcu

SEQ ID NO: 2346651 - RNA, 19 nt, Homo sapiens
  misc_RNA (1)...(19): siRNA sense strand
ggauuaugucgaaggacuu

SEQ ID NO: 2346652 - RNA, 19 nt, Homo sapiens
  misc_RNA (1)...(19): siRNA sense strand
uguuugacaaggaaggaaa

SEQ ID NO: 2346653 - RNA, 19 nt, Homo sapiens
  misc_RNA (1)...(19): siRNA sense strand
ugagaagaugacagaggaa

SEQ ID NO: 2346654 - RNA, 19 nt, Homo sapiens
  misc_RNA (1)...(19): siRNA sense strand
augugaaggugcuggacuu

SEQ ID NO: 2346655 - RNA, 19 nt, Homo sapiens
  misc_RNA (1)...(19): siRNA sense strand
aggauuaugucgaaggacu

SEQ ID NO: 2346656 - RNA, 19 nt, Homo sapiens
  misc_RNA (1)...(19): siRNA sense strand
gaugacagaggaagaagua

SEQ ID NO: 2346657 - RNA, 19 nt, Homo sapiens
  misc_RNA (1)...(19): siRNA sense strand
gcaagauccuguacagcca

SEQ ID NO: 2346658 - RNA, 19 nt, Homo sapiens
  misc_RNA (1)...(19): siRNA sense strand
cagaggaagaaguagagau

SEQ ID NO: 2346659 - RNA, 19 nt, Homo sapiens
  misc_RNA (1)...(19): siRNA sense strand
ccgaacaggugauggcaag

SEQ ID NO: 2346660 - RNA, 19 nt, Homo sapiens
  misc_RNA (1)...(19): siRNA sense strand
gaagaugacagaggaagaa

SEQ ID NO: 2346661 - RNA, 19 nt, Homo sapiens
  misc_RNA (1)...(19): siRNA sense strand
uggccaagaacaaggacca

SEQ ID NO: 2346662 - RNA, 19 nt, Homo sapiens
  misc_RNA (1)...(19): siRNA sense strand
cuaugaggauuaugucgaa

SEQ ID NO: 2346663 - RNA, 19 nt, Homo sapiens
  misc_RNA (1)...(19): siRNA sense strand
agaggaagaaguagagaug

SEQ ID NO: 2346664 - RNA, 19 nt, Homo sapiens
  misc_RNA (1)...(19): siRNA sense strand
agaacaaggaccagggcac

SEQ ID NO: 2346665 - RNA, 19 nt, Homo sapiens
  misc_RNA (1)...(19): siRNA sense strand
gcaaagagaaacacggcaa

SEQ ID NO: 2346666 - RNA, 19 nt, Homo sapiens
  misc_RNA (1)...(19): siRNA sense strand
aggacaaagccaagaacua

SEQ ID NO: 2346667 - RNA, 19 nt, Homo sapiens
  misc_RNA (1)...(19): siRNA sense strand
uuuacgaagcaaagagaaa

SEQ ID NO: 2346668 - RNA, 19 nt, Homo sapiens
  misc_RNA (1)...(19): siRNA sense strand
acuuugggcaagagaguua

SEQ ID NO: 2346669 - RNA, 19 nt, Homo sapiens
  misc_RNA (1)...(19): siRNA sense strand
ggauuauuuacgaagcaaa

SEQ ID NO: 2346670 - RNA, 19 nt, Homo sapiens
  misc_RNA (1)...(19): siRNA sense strand
gaauaacaaugaugggacu

SEQ ID NO: 2346671 - RNA, 19 nt, Homo sapiens
  misc_RNA (1)...(19): siRNA sense strand
agaaccagagugagggcaa

SEQ ID NO: 2346672 - RNA, 19 nt, Homo sapiens
  misc_RNA (1)...(19): siRNA sense strand
gggcagugacagugacagu

SEQ ID NO: 2346673 - RNA, 19 nt, Homo sapiens
  misc_RNA (1)...(19): siRNA sense strand
cagaggaggacaaagccaa

SEQ ID NO: 2346674 - RNA, 19 nt, Homo sapiens
  misc_RNA (1)...(19): siRNA sense strand
ggaaauccuaccuggccaa

SEQ ID NO: 2346675 - RNA, 19 nt, Homo sapiens
  misc_RNA (1)...(19): siRNA sense strand
aagccacagaggaggacaa

SEQ ID NO: 2346676 - RNA, 19 nt, Homo sapiens
  misc_RNA (1)...(19): siRNA sense strand
gugccgucgugauggagaa

SEQ ID NO: 2346677 - RNA, 19 nt, Homo sapiens
  misc_RNA (1)...(19): siRNA sense strand
cgaaagccacagaggagga

SEQ ID NO: 2346678 - RNA, 19 nt, Homo sapiens
  misc_RNA (1)...(19): siRNA sense strand
aaacggaguucuuggucca

SEQ ID NO: 2346679 - RNA, 19 nt, Homo sapiens
  misc_RNA (1)...(19): siRNA sense strand
gggaaauccuaccuggcca

SEQ ID NO: 2346680 - RNA, 19 nt, Homo sapiens
  misc_RNA (1)...(19): siRNA sense strand
cccggaagacggaaggcua

SEQ ID NO: 2346681 - RNA, 19 nt, Homo sapiens
  misc_RNA (1)...(19): siRNA sense strand
cuaucaaguaugaggccca

SEQ ID NO: 2346682 - RNA, 19 nt, Homo sapiens
  misc_RNA (1)...(19): siRNA sense strand
gcgacaaggccaaggagag

SEQ ID NO: 2346683 - RNA, 19 nt, Homo sapiens
  misc_RNA (1)...(19): siRNA sense strand
gagaugacuuggauggaug

SEQ ID NO: 2346684 - RNA, 19 nt, Homo sapiens
  misc_RNA (1)...(19): siRNA sense strand
cucagaggacuuugggcaa

SEQ ID NO: 2346685 - RNA, 19 nt, Homo sapiens
  misc_RNA (1)...(19): siRNA sense strand
aguaagaguaugugaagca

SEQ ID NO: 2346686 - RNA, 19 nt, Homo sapiens
  misc_RNA (1)...(19): siRNA sense strand
cguugcaggccuugggaga

SEQ ID NO: 2346687 - RNA, 19 nt, Homo sapiens
  misc_RNA (1)...(19): siRNA sense strand
guggaaugaaauacgaaga

SEQ ID NO: 2346688 - RNA, 19 nt, Homo sapiens
  misc_RNA (1)...(19): siRNA sense strand
ucaaagauuccaacgguca

SEQ ID NO: 2346689 - RNA, 19 nt, Homo sapiens
  misc_RNA (1)...(19): siRNA sense strand
uggaagucacauacaagaa

SEQ ID NO: 2346690 - RNA, 19 nt, Homo sapiens
  misc_RNA (1)...(19): siRNA sense strand
ugaaauacgaagaugcagu

SEQ ID NO: 2346691 - RNA, 19 nt, Homo sapiens
  misc_RNA (1)...(19): siRNA sense strand
auuccaacggucauagaaa

SEQ ID NO: 2346692 - RNA, 19 nt, Homo sapiens
  misc_RNA (1)...(19): siRNA sense strand
gguucagauugcaguggaa

SEQ ID NO: 2346693 - RNA, 19 nt, Homo sapiens
  misc_RNA (1)...(19): siRNA sense strand
ugaacucggaagaggacua

SEQ ID NO: 2346694 - RNA, 19 nt, Homo sapiens
  misc_RNA (1)...(19): siRNA sense strand
uggauagcauugaagccaa

SEQ ID NO: 2346695 - RNA, 19 nt, Homo sapiens
  misc_RNA (1)...(19): siRNA sense strand
gagaagacggacaggugca

SEQ ID NO: 2346696 - RNA, 19 nt, Homo sapiens
  misc_RNA (1)...(19): siRNA sense strand
ggcugggcgacgagaacaa

SEQ ID NO: 2346697 - RNA, 19 nt, Homo sapiens
  misc_RNA (1)...(19): siRNA sense strand
cggaagaggacuaccccaa

SEQ ID NO: 2346698 - RNA, 19 nt, Homo sapiens
  misc_RNA (1)...(19): siRNA sense strand
ccuucagagccgaugauga

SEQ ID NO: 2346699 - RNA, 19 nt, Homo sapiens
  misc_RNA (1)...(19): siRNA sense strand
cuuguaaauccuuagaaga

SEQ ID NO: 2346700 - RNA, 19 nt, Homo sapiens
  misc_RNA (1)...(19): siRNA sense strand
gguucagauugcaguggaa

SEQ ID NO: 2346701 - RNA, 19 nt, Homo sapiens
  misc_RNA (1)...(19): siRNA sense strand
ugaacucggaagaggacua

SEQ ID NO: 2346702 - RNA, 19 nt, Homo sapiens
  misc_RNA (1)...(19): siRNA sense strand
uggauagcauugaagccaa

SEQ ID NO: 2346703 - RNA, 19 nt, Homo sapiens
  misc_RNA (1)...(19): siRNA sense strand
gagaagacggacaggugca

SEQ ID NO: 2346704 - RNA, 19 nt, Homo sapiens
  misc_RNA (1)...(19): siRNA sense strand
ggcugggcgacgagaacaa

SEQ ID NO: 2346705 - RNA, 19 nt, Homo sapiens
  misc_RNA (1)...(19): siRNA sense strand
cggaagaggacuaccccaa

SEQ ID NO: 2346706 - RNA, 19 nt, Homo sapiens
  misc_RNA (1)...(19): siRNA sense strand
ccuucagagccgaugauga

SEQ ID NO: 2346707 - RNA, 19 nt, Homo sapiens
  misc_RNA (1)...(19): siRNA sense strand
cuuguaaauccuuagaaga

SEQ ID NO: 2346708 - RNA, 19 nt, Homo sapiens
  misc_RNA (1)...(19): siRNA sense strand
aagaagagaaagagggcaa

SEQ ID NO: 2346709 - RNA, 19 nt, Homo sapiens
  misc_RNA (1)...(19): siRNA sense strand
aagcuuaagcaaaggaaau

SEQ ID NO: 2346710 - RNA, 19 nt, Homo sapiens
  misc_RNA (1)...(19): siRNA sense strand
cggucagcaucgaggucaa

SEQ ID NO: 2346711 - RNA, 19 nt, Homo sapiens
  misc_RNA (1)...(19): siRNA sense strand
cggugagaagagcgggaaa

SEQ ID NO: 2346712 - RNA, 19 nt, Homo sapiens
  misc_RNA (1)...(19): siRNA sense strand
ggagaaaaguccugggaag

SEQ ID NO: 2346713 - RNA, 19 nt, Homo sapiens
  misc_RNA (1)...(19): siRNA sense strand
aggucaaggaaguggugaa

SEQ ID NO: 2346714 - RNA, 19 nt, Homo sapiens
  misc_RNA (1)...(19): siRNA sense strand
aggugaagaaagauaagaa

SEQ ID NO: 2346715 - RNA, 19 nt, Homo sapiens
  misc_RNA (1)...(19): siRNA sense strand
gggaaaggacugaagaccu

SEQ ID NO: 2346716 - RNA, 19 nt, Homo sapiens
  misc_RNA (1)...(19): siRNA sense strand
ggaaaggacugaagaccug

SEQ ID NO: 2346717 - RNA, 19 nt, Homo sapiens
  misc_RNA (1)...(19): siRNA sense strand
gcgucugcaaagaggagaa

SEQ ID NO: 2346718 - RNA, 19 nt, Homo sapiens
  misc_RNA (1)...(19): siRNA sense strand
gagaagagcgggaaaggac

SEQ ID NO: 2346719 - RNA, 19 nt, Homo sapiens
  misc_RNA (1)...(19): siRNA sense strand
agagaaagagggcaagcau

SEQ ID NO: 2346720 - RNA, 19 nt, Homo sapiens
  misc_RNA (1)...(19): siRNA sense strand
ucugcaaagaggagaagau

SEQ ID NO: 2346721 - RNA, 19 nt, Homo sapiens
  misc_RNA (1)...(19): siRNA sense strand
agucagaagaccaggaccu

SEQ ID NO: 2346722 - RNA, 19 nt, Homo sapiens
  misc_RNA (1)...(19): siRNA sense strand
gggaagaaaagucagaaga

SEQ ID NO: 2346723 - RNA, 19 nt, Homo sapiens
  misc_RNA (1)...(19): siRNA sense strand
ccugaaggcuggacacgga

SEQ ID NO: 2346724 - RNA, 19 nt, Homo sapiens
  misc_RNA (1)...(19): siRNA sense strand
cgaaaagguaggcgacaca

SEQ ID NO: 2346725 - RNA, 19 nt, Homo sapiens
  misc_RNA (1)...(19): siRNA sense strand
aaaagaaagccgugaagga

SEQ ID NO: 2346726 - RNA, 19 nt, Homo sapiens
  misc_RNA (1)...(19): siRNA sense strand
gagaagaugcccagaggag

SEQ ID NO: 2346727 - RNA, 19 nt, Homo sapiens
  misc_RNA (1)...(19): siRNA sense strand
ccgcagaaaaguacaaaca

SEQ ID NO: 2346728 - RNA, 19 nt, Homo sapiens
  misc_RNA (1)...(19): siRNA sense strand
ccaccuaagaagcccaaau

SEQ ID NO: 2346729 - RNA, 19 nt, Homo sapiens
  misc_RNA (1)...(19): siRNA sense strand
agagacaucagaaggguca

SEQ ID NO: 2346730 - RNA, 19 nt, Homo sapiens
  misc_RNA (1)...(19): siRNA sense strand
cgucagagggugugcaggu

SEQ ID NO: 2346731 - RNA, 19 nt, Homo sapiens
  misc_RNA (1)...(19): siRNA sense strand
aagaaaagucagaagacca

SEQ ID NO: 2346732 - RNA, 19 nt, Homo sapiens
  misc_RNA (1)...(19): siRNA sense strand
agggagagcgcaaagacau

SEQ ID NO: 2346733 - RNA, 19 nt, Homo sapiens
  misc_RNA (1)...(19): siRNA sense strand
ggagagaggaguuaggaga

SEQ ID NO: 2346734 - RNA, 19 nt, Homo sapiens
  misc_RNA (1)...(19): siRNA sense strand
aggcagcuguagugagaca

SEQ ID NO: 2346735 - RNA, 19 nt, Homo sapiens
  misc_RNA (1)...(19): siRNA sense strand
cggugaaugccgaugccua

SEQ ID NO: 2346736 - RNA, 19 nt, Homo sapiens
  misc_RNA (1)...(19): siRNA sense strand
cugaagauguagacccuca

SEQ ID NO: 2346737 - RNA, 19 nt, Homo sapiens
  misc_RNA (1)...(19): siRNA sense strand
ggagagaggaguuaggaga

SEQ ID NO: 2346738 - RNA, 19 nt, Homo sapiens
  misc_RNA (1)...(19): siRNA sense strand
aggcagcuguagugagaca

SEQ ID NO: 2346739 - RNA, 19 nt, Homo sapiens
  misc_RNA (1)...(19): siRNA sense strand
cggugaaugccgaugccua

SEQ ID NO: 2346740 - RNA, 19 nt, Homo sapiens
  misc_RNA (1)...(19): siRNA sense strand
cugaagauguagacccuca

SEQ ID NO: 2346741 - RNA, 19 nt, Homo sapiens
  misc_RNA (1)...(19): siRNA sense strand
gcaagagaguagagaggga

SEQ ID NO: 2346742 - RNA, 19 nt, Homo sapiens
  misc_RNA (1)...(19): siRNA sense strand
ggaaagacauggagggccu

SEQ ID NO: 2346743 - RNA, 19 nt, Homo sapiens
  misc_RNA (1)...(19): siRNA sense strand
gcuggaagcugaugcggaa

SEQ ID NO: 2346744 - RNA, 19 nt, Homo sapiens
  misc_RNA (1)...(19): siRNA sense strand
ccaagaaauuugaagagca

SEQ ID NO: 2346745 - RNA, 19 nt, Homo sapiens
  misc_RNA (1)...(19): siRNA sense strand
acgaaaggcuggagguuuu

SEQ ID NO: 2346746 - RNA, 19 nt, Homo sapiens
  misc_RNA (1)...(19): siRNA sense strand
gcggaaauacugagagaac

SEQ ID NO: 2346747 - RNA, 19 nt, Homo sapiens
  misc_RNA (1)...(19): siRNA sense strand
gcgacuacauggagccaga

SEQ ID NO: 2346748 - RNA, 19 nt, Homo sapiens
  misc_RNA (1)...(19): siRNA sense strand
ccucacagacaaugggaga

SEQ ID NO: 2346749 - RNA, 19 nt, Homo sapiens
  misc_RNA (1)...(19): siRNA sense strand
cuuaaagagcagagccaca

SEQ ID NO: 2346750 - RNA, 19 nt, Homo sapiens
  misc_RNA (1)...(19): siRNA sense strand
gggacauucugcugaacau

SEQ ID NO: 2346751 - RNA, 19 nt, Homo sapiens
  misc_RNA (1)...(19): siRNA sense strand
gcaucaaggugcuggacgu

SEQ ID NO: 2346752 - RNA, 19 nt, Homo sapiens
  misc_RNA (1)...(19): siRNA sense strand
augaggaggagcugauuaa

SEQ ID NO: 2346753 - RNA, 19 nt, Homo sapiens
  misc_RNA (1)...(19): siRNA sense strand
ggaaggagcuccagguggu

SEQ ID NO: 2346754 - RNA, 19 nt, Homo sapiens
  misc_RNA (1)...(19): siRNA sense strand
aggcgcugauggagagauu

SEQ ID NO: 2346755 - RNA, 19 nt, Homo sapiens
  misc_RNA (1)...(19): siRNA sense strand
ccuccaaugcagagaaagu

SEQ ID NO: 2346756 - RNA, 19 nt, Homo sapiens
  misc_RNA (1)...(19): siRNA sense strand
uuggagaaggccagagcaa

SEQ ID NO: 2346757 - RNA, 19 nt, Homo sapiens
  misc_RNA (1)...(19): siRNA sense strand
uggugaacuuggucaaauu

SEQ ID NO: 2346758 - RNA, 19 nt, Homo sapiens
  misc_RNA (1)...(19): siRNA sense strand
cguccuguauguuggagaa

SEQ ID NO: 2346759 - RNA, 19 nt, Homo sapiens
  misc_RNA (1)...(19): siRNA sense strand
ccaggucugcagaggguaa

SEQ ID NO: 2346760 - RNA, 19 nt, Homo sapiens
  misc_RNA (1)...(19): siRNA sense strand
caagaaauuugaagagcac

SEQ ID NO: 2346761 - RNA, 19 nt, Homo sapiens
  misc_RNA (1)...(19): siRNA sense strand
ggacguugaggcagcgcua

SEQ ID NO: 2346762 - RNA, 19 nt, Homo sapiens
  misc_RNA (1)...(19): siRNA sense strand
ccaucaagggccaguucaa

SEQ ID NO: 2346763 - RNA, 19 nt, Homo sapiens
  misc_RNA (1)...(19): siRNA sense strand
ucaucaagaaguauaggaa

SEQ ID NO: 2346764 - RNA, 19 nt, Homo sapiens
  misc_RNA (1)...(19): siRNA sense strand
gagccuugcuggaagcuga

SEQ ID NO: 2346765 - RNA, 19 nt, Homo sapiens
  misc_RNA (1)...(19): siRNA sense strand
gggcaagagaguagagagg

SEQ ID NO: 2346766 - RNA, 19 nt, Homo sapiens
  misc_RNA (1)...(19): siRNA sense strand
ggcuugaaggagaaguuua

SEQ ID NO: 2346767 - RNA, 19 nt, Homo sapiens
  misc_RNA (1)...(19): siRNA sense strand
cugggaacaccgaggccaa

SEQ ID NO: 2346768 - RNA, 19 nt, Homo sapiens
  misc_RNA (1)...(19): siRNA sense strand
aggauggagucgugcgguu

SEQ ID NO: 2346769 - RNA, 19 nt, Homo sapiens
  misc_RNA (1)...(19): siRNA sense strand
uggacaugauggcucgaua

SEQ ID NO: 2346770 - RNA, 19 nt, Homo sapiens
  misc_RNA (1)...(19): siRNA sense strand
cgguggaggagcuguguga

SEQ ID NO: 2346771 - RNA, 19 nt, Homo sapiens
  misc_RNA (1)...(19): siRNA sense strand
cugcaggcgcugauggaga

SEQ ID NO: 2346772 - RNA, 19 nt, Homo sapiens
  misc_RNA (1)...(19): siRNA sense strand
ccaucaacgucaaggagcu

SEQ ID NO: 2346773 - RNA, 19 nt, Homo sapiens
  misc_RNA (1)...(19): siRNA sense strand
ugauuaacucaguggucau

SEQ ID NO: 2346774 - RNA, 19 nt, Homo sapiens
  misc_RNA (1)...(19): siRNA sense strand
gaguagagagggacgccuu

SEQ ID NO: 2346775 - RNA, 19 nt, Homo sapiens
  misc_RNA (1)...(19): siRNA sense strand
gccuuaaagagcagagcca

SEQ ID NO: 2346776 - RNA, 19 nt, Homo sapiens
  misc_RNA (1)...(19): siRNA sense strand
ccugagucccugcgcuaua

SEQ ID NO: 2346777 - RNA, 19 nt, Homo sapiens
  misc_RNA (1)...(19): siRNA sense strand
ugaagagcacgcaguggaa

SEQ ID NO: 2346778 - RNA, 19 nt, Homo sapiens
  misc_RNA (1)...(19): siRNA sense strand
ucacagacaaugggagaca

SEQ ID NO: 2346779 - RNA, 19 nt, Homo sapiens
  misc_RNA (1)...(19): siRNA sense strand
aggcucaucaagaaguaua

SEQ ID NO: 2346780 - RNA, 19 nt, Homo sapiens
  misc_RNA (1)...(19): siRNA sense strand
ggacguguguggugaggac

SEQ ID NO: 2346781 - RNA, 19 nt, Homo sapiens
  misc_RNA (1)...(19): siRNA sense strand
gcaagagaguagagaggga

SEQ ID NO: 2346782 - RNA, 19 nt, Homo sapiens
  misc_RNA (1)...(19): siRNA sense strand
ggaaagacauggagggccu

SEQ ID NO: 2346783 - RNA, 19 nt, Homo sapiens
  misc_RNA (1)...(19): siRNA sense strand
gcuggaagcugaugcggaa

SEQ ID NO: 2346784 - RNA, 19 nt, Homo sapiens
  misc_RNA (1)...(19): siRNA sense strand
ccaagaaauuugaagagca

SEQ ID NO: 2346785 - RNA, 19 nt, Homo sapiens
  misc_RNA (1)...(19): siRNA sense strand
acgaaaggcuggagguuuu

SEQ ID NO: 2346786 - RNA, 19 nt, Homo sapiens
  misc_RNA (1)...(19): siRNA sense strand
gcggaaauacugagagaac

SEQ ID NO: 2346787 - RNA, 19 nt, Homo sapiens
  misc_RNA (1)...(19): siRNA sense strand
gcgacuacauggagccaga

SEQ ID NO: 2346788 - RNA, 19 nt, Homo sapiens
  misc_RNA (1)...(19): siRNA sense strand
ccucacagacaaugggaga

SEQ ID NO: 2346789 - RNA, 19 nt, Homo sapiens
  misc_RNA (1)...(19): siRNA sense strand
cuuaaagagcagagccaca

SEQ ID NO: 2346790 - RNA, 19 nt, Homo sapiens
  misc_RNA (1)...(19): siRNA sense strand
gggacauucugcugaacau

SEQ ID NO: 2346791 - RNA, 19 nt, Homo sapiens
  misc_RNA (1)...(19): siRNA sense strand
gcaucaaggugcuggacgu

SEQ ID NO: 2346792 - RNA, 19 nt, Homo sapiens
  misc_RNA (1)...(19): siRNA sense strand
augaggaggagcugauuaa

SEQ ID NO: 2346793 - RNA, 19 nt, Homo sapiens
  misc_RNA (1)...(19): siRNA sense strand
ggaaggagcuccagguggu

SEQ ID NO: 2346794 - RNA, 19 nt, Homo sapiens
  misc_RNA (1)...(19): siRNA sense strand
aggcgcugauggagagauu

SEQ ID NO: 2346795 - RNA, 19 nt, Homo sapiens
  misc_RNA (1)...(19): siRNA sense strand
ccuccaaugcagagaaagu

SEQ ID NO: 2346796 - RNA, 19 nt, Homo sapiens
  misc_RNA (1)...(19): siRNA sense strand
uuggagaaggccagagcaa

SEQ ID NO: 2346797 - RNA, 19 nt, Homo sapiens
  misc_RNA (1)...(19): siRNA sense strand
uggugaacuuggucaaauu

SEQ ID NO: 2346798 - RNA, 19 nt, Homo sapiens
  misc_RNA (1)...(19): siRNA sense strand
cguccuguauguuggagaa

SEQ ID NO: 2346799 - RNA, 19 nt, Homo sapiens
  misc_RNA (1)...(19): siRNA sense strand
ccaggucugcagaggguaa

SEQ ID NO: 2346800 - RNA, 19 nt, Homo sapiens
  misc_RNA (1)...(19): siRNA sense strand
caagaaauuugaagagcac

SEQ ID NO: 2346801 - RNA, 19 nt, Homo sapiens
  misc_RNA (1)...(19): siRNA sense strand
ggacguugaggcagcgcua

SEQ ID NO: 2346802 - RNA, 19 nt, Homo sapiens
  misc_RNA (1)...(19): siRNA sense strand
ccaucaagggccaguucaa

SEQ ID NO: 2346803 - RNA, 19 nt, Homo sapiens
  misc_RNA (1)...(19): siRNA sense strand
ucaucaagaaguauaggaa

SEQ ID NO: 2346804 - RNA, 19 nt, Homo sapiens
  misc_RNA (1)...(19): siRNA sense strand
gagccuugcuggaagcuga

SEQ ID NO: 2346805 - RNA, 19 nt, Homo sapiens
  misc_RNA (1)...(19): siRNA sense strand
gggcaagagaguagagagg

SEQ ID NO: 2346806 - RNA, 19 nt, Homo sapiens
  misc_RNA (1)...(19): siRNA sense strand
ggcuugaaggagaaguuua

SEQ ID NO: 2346807 - RNA, 19 nt, Homo sapiens
  misc_RNA (1)...(19): siRNA sense strand
cugggaacaccgaggccaa

SEQ ID NO: 2346808 - RNA, 19 nt, Homo sapiens
  misc_RNA (1)...(19): siRNA sense strand
aggauggagucgugcgguu

SEQ ID NO: 2346809 - RNA, 19 nt, Homo sapiens
  misc_RNA (1)...(19): siRNA sense strand
uggacaugauggcucgaua

SEQ ID NO: 2346810 - RNA, 19 nt, Homo sapiens
  misc_RNA (1)...(19): siRNA sense strand
cgguggaggagcuguguga

SEQ ID NO: 2346811 - RNA, 19 nt, Homo sapiens
  misc_RNA (1)...(19): siRNA sense strand
cugcaggcgcugauggaga

SEQ ID NO: 2346812 - RNA, 19 nt, Homo sapiens
  misc_RNA (1)...(19): siRNA sense strand
ccaucaacgucaaggagcu

SEQ ID NO: 2346813 - RNA, 19 nt, Homo sapiens
  misc_RNA (1)...(19): siRNA sense strand
ugauuaacucaguggucau

SEQ ID NO: 2346814 - RNA, 19 nt, Homo sapiens
  misc_RNA (1)...(19): siRNA sense strand
gaguagagagggacgccuu

SEQ ID NO: 2346815 - RNA, 19 nt, Homo sapiens
  misc_RNA (1)...(19): siRNA sense strand
gccuuaaagagcagagcca

SEQ ID NO: 2346816 - RNA, 19 nt, Homo sapiens
  misc_RNA (1)...(19): siRNA sense strand
ccugagucccugcgcuaua

SEQ ID NO: 2346817 - RNA, 19 nt, Homo sapiens
  misc_RNA (1)...(19): siRNA sense strand
ugaagagcacgcaguggaa

SEQ ID NO: 2346818 - RNA, 19 nt, Homo sapiens
  misc_RNA (1)...(19): siRNA sense strand
ucacagacaaugggagaca

SEQ ID NO: 2346819 - RNA, 19 nt, Homo sapiens
  misc_RNA (1)...(19): siRNA sense strand
aggcucaucaagaaguaua

SEQ ID NO: 2346820 - RNA, 19 nt, Homo sapiens
  misc_RNA (1)...(19): siRNA sense strand
ggacguguguggugaggac

SEQ ID NO: 2346821 - RNA, 19 nt, Homo sapiens
  misc_RNA (1)...(19): siRNA sense strand
gcaagagaguagagaggga

SEQ ID NO: 2346822 - RNA, 19 nt, Homo sapiens
  misc_RNA (1)...(19): siRNA sense strand
ggaaagacauggagggccu

SEQ ID NO: 2346823 - RNA, 19 nt, Homo sapiens
  misc_RNA (1)...(19): siRNA sense strand
gcuggaagcugaugcggaa

SEQ ID NO: 2346824 - RNA, 19 nt, Homo sapiens
  misc_RNA (1)...(19): siRNA sense strand
ccaagaaauuugaagagca

SEQ ID NO: 2346825 - RNA, 19 nt, Homo sapiens
  misc_RNA (1)...(19): siRNA sense strand
acgaaaggcuggagguuuu

SEQ ID NO: 2346826 - RNA, 19 nt, Homo sapiens
  misc_RNA (1)...(19): siRNA sense strand
gcggaaauacugagagaac

SEQ ID NO: 2346827 - RNA, 19 nt, Homo sapiens
  misc_RNA (1)...(19): siRNA sense strand
gcgacuacauggagccaga

SEQ ID NO: 2346828 - RNA, 19 nt, Homo sapiens
  misc_RNA (1)...(19): siRNA sense strand
ccucacagacaaugggaga

SEQ ID NO: 2346829 - RNA, 19 nt, Homo sapiens
  misc_RNA (1)...(19): siRNA sense strand
cuuaaagagcagagccaca

SEQ ID NO: 2346830 - RNA, 19 nt, Homo sapiens
  misc_RNA (1)...(19): siRNA sense strand
gggacauucugcugaacau

SEQ ID NO: 2346831 - RNA, 19 nt, Homo sapiens
  misc_RNA (1)...(19): siRNA sense strand
gcaucaaggugcuggacgu

SEQ ID NO: 2346832 - RNA, 19 nt, Homo sapiens
  misc_RNA (1)...(19): siRNA sense strand
augaggaggagcugauuaa

SEQ ID NO: 2346833 - RNA, 19 nt, Homo sapiens
  misc_RNA (1)...(19): siRNA sense strand
ggaaggagcuccagguggu

SEQ ID NO: 2346834 - RNA, 19 nt, Homo sapiens
  misc_RNA (1)...(19): siRNA sense strand
aggcgcugauggagagauu

SEQ ID NO: 2346835 - RNA, 19 nt, Homo sapiens
  misc_RNA (1)...(19): siRNA sense strand
ccuccaaugcagagaaagu

SEQ ID NO: 2346836 - RNA, 19 nt, Homo sapiens
  misc_RNA (1)...(19): siRNA sense strand
uuggagaaggccagagcaa

SEQ ID NO: 2346837 - RNA, 19 nt, Homo sapiens
  misc_RNA (1)...(19): siRNA sense strand
uggugaacuuggucaaauu

SEQ ID NO: 2346838 - RNA, 19 nt, Homo sapiens
  misc_RNA (1)...(19): siRNA sense strand
cguccuguauguuggagaa

SEQ ID NO: 2346839 - RNA, 19 nt, Homo sapiens
  misc_RNA (1)...(19): siRNA sense strand
ccaggucugcagaggguaa

SEQ ID NO: 2346840 - RNA, 19 nt, Homo sapiens
  misc_RNA (1)...(19): siRNA sense strand
caagaaauuugaagagcac

SEQ ID NO: 2346841 - RNA, 19 nt, Homo sapiens
  misc_RNA (1)...(19): siRNA sense strand
ggacguugaggcagcgcua

SEQ ID NO: 2346842 - RNA, 19 nt, Homo sapiens
  misc_RNA (1)...(19): siRNA sense strand
ccaucaagggccaguucaa

SEQ ID NO: 2346843 - RNA, 19 nt, Homo sapiens
  misc_RNA (1)...(19): siRNA sense strand
ucaucaagaaguauaggaa

SEQ ID NO: 2346844 - RNA, 19 nt, Homo sapiens
  misc_RNA (1)...(19): siRNA sense strand
gagccuugcuggaagcuga

SEQ ID NO: 2346845 - RNA, 19 nt, Homo sapiens
  misc_RNA (1)...(19): siRNA sense strand
gggcaagagaguagagagg

SEQ ID NO: 2346846 - RNA, 19 nt, Homo sapiens
  misc_RNA (1)...(19): siRNA sense strand
ggcuugaaggagaaguuua

SEQ ID NO: 2346847 - RNA, 19 nt, Homo sapiens
  misc_RNA (1)...(19): siRNA sense strand
cugggaacaccgaggccaa

SEQ ID NO: 2346848 - RNA, 19 nt, Homo sapiens
  misc_RNA (1)...(19): siRNA sense strand
aggauggagucgugcgguu

SEQ ID NO: 2346849 - RNA, 19 nt, Homo sapiens
  misc_RNA (1)...(19): siRNA sense strand
uggacaugauggcucgaua

SEQ ID NO: 2346850 - RNA, 19 nt, Homo sapiens
  misc_RNA (1)...(19): siRNA sense strand
cgguggaggagcuguguga

SEQ ID NO: 2346851 - RNA, 19 nt, Homo sapiens
  misc_RNA (1)...(19): siRNA sense strand
cugcaggcgcugauggaga

SEQ ID NO: 2346852 - RNA, 19 nt, Homo sapiens
  misc_RNA (1)...(19): siRNA sense strand
ccaucaacgucaaggagcu

SEQ ID NO: 2346853 - RNA, 19 nt, Homo sapiens
  misc_RNA (1)...(19): siRNA sense strand
ugauuaacucaguggucau

SEQ ID NO: 2346854 - RNA, 19 nt, Homo sapiens
  misc_RNA (1)...(19): siRNA sense strand
gaguagagagggacgccuu

SEQ ID NO: 2346855 - RNA, 19 nt, Homo sapiens
  misc_RNA (1)...(19): siRNA sense strand
gccuuaaagagcagagcca

SEQ ID NO: 2346856 - RNA, 19 nt, Homo sapiens
  misc_RNA (1)...(19): siRNA sense strand
ccugagucccugcgcuaua

SEQ ID NO: 2346857 - RNA, 19 nt, Homo sapiens
  misc_RNA (1)...(19): siRNA sense strand
ugaagagcacgcaguggaa

SEQ ID NO: 2346858 - RNA, 19 nt, Homo sapiens
  misc_RNA (1)...(19): siRNA sense strand
ucacagacaaugggagaca

SEQ ID NO: 2346859 - RNA, 19 nt, Homo sapiens
  misc_RNA (1)...(19): siRNA sense strand
aggcucaucaagaaguaua

SEQ ID NO: 2346860 - RNA, 19 nt, Homo sapiens
  misc_RNA (1)...(19): siRNA sense strand
ggacguguguggugaggac

SEQ ID NO: 2346861 - RNA, 19 nt, Homo sapiens
  misc_RNA (1)...(19): siRNA sense strand
gcaucuugccacagggcuu

SEQ ID NO: 2346862 - RNA, 19 nt, Homo sapiens
  misc_RNA (1)...(19): siRNA sense strand
ggaugaaagaaaagaaacu

SEQ ID NO: 2346863 - RNA, 19 nt, Homo sapiens
  misc_RNA (1)...(19): siRNA sense strand
caggaugaaagaaaagaaa

SEQ ID NO: 2346864 - RNA, 19 nt, Homo sapiens
  misc_RNA (1)...(19): siRNA sense strand
gagaagagcagcagcgcag

SEQ ID NO: 2346865 - RNA, 19 nt, Homo sapiens
  misc_RNA (1)...(19): siRNA sense strand
aggcagaaacgcaaggaau

SEQ ID NO: 2346866 - RNA, 19 nt, Homo sapiens
  misc_RNA (1)...(19): siRNA sense strand
gcuucaaggacgacaccaa

SEQ ID NO: 2346867 - RNA, 19 nt, Homo sapiens
  misc_RNA (1)...(19): siRNA sense strand
cuucacugcccgacgguaa

SEQ ID NO: 2346868 - RNA, 19 nt, Homo sapiens
  misc_RNA (1)...(19): siRNA sense strand
gcaagaagcggaaacccua

SEQ ID NO: 2346869 - RNA, 19 nt, Homo sapiens
  misc_RNA (1)...(19): siRNA sense strand
cggaguuggagaacgaauu

SEQ ID NO: 2346870 - RNA, 19 nt, Homo sapiens
  misc_RNA (1)...(19): siRNA sense strand
acucaaagaauguggcaga

SEQ ID NO: 2346871 - RNA, 19 nt, Homo sapiens
  misc_RNA (1)...(19): siRNA sense strand
aagaauauccagaagguga

SEQ ID NO: 2346872 - RNA, 19 nt, Homo sapiens
  misc_RNA (1)...(19): siRNA sense strand
gccgaaaccucgauggcuu

SEQ ID NO: 2346873 - RNA, 19 nt, Homo sapiens
  misc_RNA (1)...(19): siRNA sense strand
gugacguggccgaagguau

SEQ ID NO: 2346874 - RNA, 19 nt, Homo sapiens
  misc_RNA (1)...(19): siRNA sense strand
gccaagaauaucuggaaac

SEQ ID NO: 2346875 - RNA, 19 nt, Homo sapiens
  misc_RNA (1)...(19): siRNA sense strand
gagcuagccucguggguca

SEQ ID NO: 2346876 - RNA, 19 nt, Homo sapiens
  misc_RNA (1)...(19): siRNA sense strand
agacagcagaggaggugaa

SEQ ID NO: 2346877 - RNA, 19 nt, Homo sapiens
  misc_RNA (1)...(19): siRNA sense strand
gcaugugggagcugggcau

SEQ ID NO: 2346878 - RNA, 19 nt, Homo sapiens
  misc_RNA (1)...(19): siRNA sense strand
cagaggaggugaagggcug

SEQ ID NO: 2346879 - RNA, 19 nt, Homo sapiens
  misc_RNA (1)...(19): siRNA sense strand
ucggacaacuucugggcau

SEQ ID NO: 2346880 - RNA, 19 nt, Homo sapiens
  misc_RNA (1)...(19): siRNA sense strand
ggauuacaaacgugagaac

SEQ ID NO: 2346881 - RNA, 19 nt, Homo sapiens
  misc_RNA (1)...(19): siRNA sense strand
agaggaagcaauugccaca

SEQ ID NO: 2346882 - RNA, 19 nt, Homo sapiens
  misc_RNA (1)...(19): siRNA sense strand
ccacagacauggcggguca

SEQ ID NO: 2346883 - RNA, 19 nt, Homo sapiens
  misc_RNA (1)...(19): siRNA sense strand
gaugaagacaugcgggaca

SEQ ID NO: 2346884 - RNA, 19 nt, Homo sapiens
  misc_RNA (1)...(19): siRNA sense strand
ccaucaucguagugcagaa

SEQ ID NO: 2346885 - RNA, 19 nt, Homo sapiens
  misc_RNA (1)...(19): siRNA sense strand
cggacgaggaugaagacau

SEQ ID NO: 2346886 - RNA, 19 nt, Homo sapiens
  misc_RNA (1)...(19): siRNA sense strand
ucuucgugguagaggagua

SEQ ID NO: 2346887 - RNA, 19 nt, Homo sapiens
  misc_RNA (1)...(19): siRNA sense strand
ccgacucagacgaggguga

SEQ ID NO: 2346888 - RNA, 19 nt, Homo sapiens
  misc_RNA (1)...(19): siRNA sense strand
uggccauggaggcggacaa

SEQ ID NO: 2346889 - RNA, 19 nt, Homo sapiens
  misc_RNA (1)...(19): siRNA sense strand
gugugaaggcugaggacuc

SEQ ID NO: 2346890 - RNA, 19 nt, Homo sapiens
  misc_RNA (1)...(19): siRNA sense strand
augaagacaugcgggacaa

SEQ ID NO: 2346891 - RNA, 19 nt, Homo sapiens
  misc_RNA (1)...(19): siRNA sense strand
ccuacaggcacgucgguga

SEQ ID NO: 2346892 - RNA, 19 nt, Homo sapiens
  misc_RNA (1)...(19): siRNA sense strand
cgccauugaccgcgaauca

SEQ ID NO: 2346893 - RNA, 19 nt, Homo sapiens
  misc_RNA (1)...(19): siRNA sense strand
aggacucagacgugggaga

SEQ ID NO: 2346894 - RNA, 19 nt, Homo sapiens
  misc_RNA (1)...(19): siRNA sense strand
cgucggugaugcaggugau

SEQ ID NO: 2346895 - RNA, 19 nt, Homo sapiens
  misc_RNA (1)...(19): siRNA sense strand
ugacaggauucuacaacaa

SEQ ID NO: 2346896 - RNA, 19 nt, Homo sapiens
  misc_RNA (1)...(19): siRNA sense strand
gguuaaagagggaagccca

SEQ ID NO: 2346897 - RNA, 19 nt, Homo sapiens
  misc_RNA (1)...(19): siRNA sense strand
guucauucugacugaggaa

SEQ ID NO: 2346898 - RNA, 19 nt, Homo sapiens
  misc_RNA (1)...(19): siRNA sense strand
ccgucugguuaaagaggga

SEQ ID NO: 2346899 - RNA, 19 nt, Homo sapiens
  misc_RNA (1)...(19): siRNA sense strand
cugaggaaggagaccacaa

SEQ ID NO: 2346900 - RNA, 19 nt, Homo sapiens
  misc_RNA (1)...(19): siRNA sense strand
gcucagaugcuauggcucu

SEQ ID NO: 2346901 - RNA, 19 nt, Homo sapiens
  misc_RNA (1)...(19): siRNA sense strand
gguuaaagagggaagccca

SEQ ID NO: 2346902 - RNA, 19 nt, Homo sapiens
  misc_RNA (1)...(19): siRNA sense strand
guucauucugacugaggaa

SEQ ID NO: 2346903 - RNA, 19 nt, Homo sapiens
  misc_RNA (1)...(19): siRNA sense strand
ccgucugguuaaagaggga

SEQ ID NO: 2346904 - RNA, 19 nt, Homo sapiens
  misc_RNA (1)...(19): siRNA sense strand
cugaggaaggagaccacaa

SEQ ID NO: 2346905 - RNA, 19 nt, Homo sapiens
  misc_RNA (1)...(19): siRNA sense strand
gcucagaugcuauggcucu

SEQ ID NO: 2346906 - RNA, 19 nt, Homo sapiens
  misc_RNA (1)...(19): siRNA sense strand
ugacaggauucuacaacaa

SEQ ID NO: 2346907 - RNA, 19 nt, Homo sapiens
  misc_RNA (1)...(19): siRNA sense strand
gguuaaagagggaagccca

SEQ ID NO: 2346908 - RNA, 19 nt, Homo sapiens
  misc_RNA (1)...(19): siRNA sense strand
guucauucugacugaggaa

SEQ ID NO: 2346909 - RNA, 19 nt, Homo sapiens
  misc_RNA (1)...(19): siRNA sense strand
ccgucugguuaaagaggga

SEQ ID NO: 2346910 - RNA, 19 nt, Homo sapiens
  misc_RNA (1)...(19): siRNA sense strand
cugaggaaggagaccacaa

SEQ ID NO: 2346911 - RNA, 19 nt, Homo sapiens
  misc_RNA (1)...(19): siRNA sense strand
gcucagaugcuauggcucu

SEQ ID NO: 2346912 - RNA, 19 nt, Homo sapiens
  misc_RNA (1)...(19): siRNA sense strand
gguuaaagagggaagccca

SEQ ID NO: 2346913 - RNA, 19 nt, Homo sapiens
  misc_RNA (1)...(19): siRNA sense strand
guucauucugacugaggaa

SEQ ID NO: 2346914 - RNA, 19 nt, Homo sapiens
  misc_RNA (1)...(19): siRNA sense strand
ccgucugguuaaagaggga

SEQ ID NO: 2346915 - RNA, 19 nt, Homo sapiens
  misc_RNA (1)...(19): siRNA sense strand
cugaggaaggagaccacaa

SEQ ID NO: 2346916 - RNA, 19 nt, Homo sapiens
  misc_RNA (1)...(19): siRNA sense strand
gcucagaugcuauggcucu

SEQ ID NO: 2346917 - RNA, 19 nt, Homo sapiens
  misc_RNA (1)...(19): siRNA sense strand
gcaucaaggcggagcgcaa

SEQ ID NO: 2346918 - RNA, 19 nt, Homo sapiens
  misc_RNA (1)...(19): siRNA sense strand
aggauuuacacaagcagaa

SEQ ID NO: 2346919 - RNA, 19 nt, Homo sapiens
  misc_RNA (1)...(19): siRNA sense strand
ccaagugccgcaagcgcaa

SEQ ID NO: 2346920 - RNA, 19 nt, Homo sapiens
  misc_RNA (1)...(19): siRNA sense strand
cgucaaggcccuggaggau

SEQ ID NO: 2346921 - RNA, 19 nt, Homo sapiens
  misc_RNA (1)...(19): siRNA sense strand
aggaguucgccgagggcuu

SEQ ID NO: 2346922 - RNA, 19 nt, Homo sapiens
  misc_RNA (1)...(19): siRNA sense strand
aagagaaagugaagacccu

SEQ ID NO: 2346923 - RNA, 19 nt, Homo sapiens
  misc_RNA (1)...(19): siRNA sense strand
uggaagagaaagugaagac

SEQ ID NO: 2346924 - RNA, 19 nt, Homo sapiens
  misc_RNA (1)...(19): siRNA sense strand
ucaagaaacuggaggagca

SEQ ID NO: 2346925 - RNA, 19 nt, Homo sapiens
  misc_RNA (1)...(19): siRNA sense strand
cggacgacucagagcaaga

SEQ ID NO: 2346926 - RNA, 19 nt, Homo sapiens
  misc_RNA (1)...(19): siRNA sense strand
aaguggacauagagggcau

SEQ ID NO: 2346927 - RNA, 19 nt, Homo sapiens
  misc_RNA (1)...(19): siRNA sense strand
cagagcaagaaguggacau

SEQ ID NO: 2346928 - RNA, 19 nt, Homo sapiens
  misc_RNA (1)...(19): siRNA sense strand
acucagagcaagaagugga

SEQ ID NO: 2346929 - RNA, 19 nt, Homo sapiens
  misc_RNA (1)...(19): siRNA sense strand
ugauaucagaggagaggaa

SEQ ID NO: 2346930 - RNA, 19 nt, Homo sapiens
  misc_RNA (1)...(19): siRNA sense strand
gguuauuggaugagcaaac

SEQ ID NO: 2346931 - RNA, 19 nt, Homo sapiens
  misc_RNA (1)...(19): siRNA sense strand
cagaauggcuacugcagca

SEQ ID NO: 2346932 - RNA, 19 nt, Homo sapiens
  misc_RNA (1)...(19): siRNA sense strand
agaaggagcuggaagugga

SEQ ID NO: 2346933 - RNA, 19 nt, Homo sapiens
  misc_RNA (1)...(19): siRNA sense strand
gcuguaaggaccaggagga

SEQ ID NO: 2346934 - RNA, 19 nt, Homo sapiens
  misc_RNA (1)...(19): siRNA sense strand
gcaagaagcgcaaugacca

SEQ ID NO: 2346935 - RNA, 19 nt, Homo sapiens
  misc_RNA (1)...(19): siRNA sense strand
gugacaagagcuuaggaga

SEQ ID NO: 2346936 - RNA, 19 nt, Homo sapiens
  misc_RNA (1)...(19): siRNA sense strand
gugacaacuacuauggaga

SEQ ID NO: 2346937 - RNA, 19 nt, Homo sapiens
  misc_RNA (1)...(19): siRNA sense strand
gaauauugccaacagccua

SEQ ID NO: 2346938 - RNA, 19 nt, Homo sapiens
  misc_RNA (1)...(19): siRNA sense strand
agaagaaaguggacaggug

SEQ ID NO: 2346939 - RNA, 19 nt, Homo sapiens
  misc_RNA (1)...(19): siRNA sense strand
gcgagaagaaaguggacag

SEQ ID NO: 2346940 - RNA, 19 nt, Homo sapiens
  misc_RNA (1)...(19): siRNA sense strand
aggaccaggaggauggcua

SEQ ID NO: 2346941 - RNA, 19 nt, Homo sapiens
  misc_RNA (1)...(19): siRNA sense strand
gagcaaaccagcacccuca

SEQ ID NO: 2346942 - RNA, 19 nt, Homo sapiens
  misc_RNA (1)...(19): siRNA sense strand
ugacaagagcuuaggagag

SEQ ID NO: 2346943 - RNA, 19 nt, Homo sapiens
  misc_RNA (1)...(19): siRNA sense strand
cagcagaucuugagggagu

SEQ ID NO: 2346944 - RNA, 19 nt, Homo sapiens
  misc_RNA (1)...(19): siRNA sense strand
gaacagaagcugcaggaga

SEQ ID NO: 2346945 - RNA, 19 nt, Homo sapiens
  misc_RNA (1)...(19): siRNA sense strand
gggaggaccuagagaggga

SEQ ID NO: 2346946 - RNA, 19 nt, Homo sapiens
  misc_RNA (1)...(19): siRNA sense strand
aagaagaggaacaggacau

SEQ ID NO: 2346947 - RNA, 19 nt, Homo sapiens
  misc_RNA (1)...(19): siRNA sense strand
uggaaaagaacuucagcaa

SEQ ID NO: 2346948 - RNA, 19 nt, Homo sapiens
  misc_RNA (1)...(19): siRNA sense strand
gacuggaagaagaggaaca

SEQ ID NO: 2346949 - RNA, 19 nt, Homo sapiens
  misc_RNA (1)...(19): siRNA sense strand
acaucaaggugaaacccaa

SEQ ID NO: 2346950 - RNA, 19 nt, Homo sapiens
  misc_RNA (1)...(19): siRNA sense strand
gaagaagccuggugagcuc

SEQ ID NO: 2346951 - RNA, 19 nt, Homo sapiens
  misc_RNA (1)...(19): siRNA sense strand
gcgucaaguucguggagac

SEQ ID NO: 2346952 - RNA, 19 nt, Homo sapiens
  misc_RNA (1)...(19): siRNA sense strand
acgacuggaagaagaggaa

SEQ ID NO: 2346953 - RNA, 19 nt, Homo sapiens
  misc_RNA (1)...(19): siRNA sense strand
augaagagcagcagguguu

SEQ ID NO: 2346954 - RNA, 19 nt, Homo sapiens
  misc_RNA (1)...(19): siRNA sense strand
uggaagaagaggaacagga

SEQ ID NO: 2346955 - RNA, 19 nt, Homo sapiens
  misc_RNA (1)...(19): siRNA sense strand
cacaggaguacaaggaaaa

SEQ ID NO: 2346956 - RNA, 19 nt, Homo sapiens
  misc_RNA (1)...(19): siRNA sense strand
gcagcgacuccgagaaaau

SEQ ID NO: 2346957 - RNA, 19 nt, Homo sapiens
  misc_RNA (1)...(19): siRNA sense strand
gaggaucguaagagcguca

SEQ ID NO: 2346958 - RNA, 19 nt, Homo sapiens
  misc_RNA (1)...(19): siRNA sense strand
uggagaacuuacaggugga

SEQ ID NO: 2346959 - RNA, 19 nt, Homo sapiens
  misc_RNA (1)...(19): siRNA sense strand
gaagaagaggaacaggaca

SEQ ID NO: 2346960 - RNA, 19 nt, Homo sapiens
  misc_RNA (1)...(19): siRNA sense strand
cagcagaucuugagggagu

SEQ ID NO: 2346961 - RNA, 19 nt, Homo sapiens
  misc_RNA (1)...(19): siRNA sense strand
gaacagaagcugcaggaga

SEQ ID NO: 2346962 - RNA, 19 nt, Homo sapiens
  misc_RNA (1)...(19): siRNA sense strand
gggaggaccuagagaggga

SEQ ID NO: 2346963 - RNA, 19 nt, Homo sapiens
  misc_RNA (1)...(19): siRNA sense strand
aagaagaggaacaggacau

SEQ ID NO: 2346964 - RNA, 19 nt, Homo sapiens
  misc_RNA (1)...(19): siRNA sense strand
uggaaaagaacuucagcaa

SEQ ID NO: 2346965 - RNA, 19 nt, Homo sapiens
  misc_RNA (1)...(19): siRNA sense strand
gacuggaagaagaggaaca

SEQ ID NO: 2346966 - RNA, 19 nt, Homo sapiens
  misc_RNA (1)...(19): siRNA sense strand
acaucaaggugaaacccaa

SEQ ID NO: 2346967 - RNA, 19 nt, Homo sapiens
  misc_RNA (1)...(19): siRNA sense strand
gaagaagccuggugagcuc

SEQ ID NO: 2346968 - RNA, 19 nt, Homo sapiens
  misc_RNA (1)...(19): siRNA sense strand
gcgucaaguucguggagac

SEQ ID NO: 2346969 - RNA, 19 nt, Homo sapiens
  misc_RNA (1)...(19): siRNA sense strand
acgacuggaagaagaggaa

SEQ ID NO: 2346970 - RNA, 19 nt, Homo sapiens
  misc_RNA (1)...(19): siRNA sense strand
augaagagcagcagguguu

SEQ ID NO: 2346971 - RNA, 19 nt, Homo sapiens
  misc_RNA (1)...(19): siRNA sense strand
uggaagaagaggaacagga

SEQ ID NO: 2346972 - RNA, 19 nt, Homo sapiens
  misc_RNA (1)...(19): siRNA sense strand
cacaggaguacaaggaaaa

SEQ ID NO: 2346973 - RNA, 19 nt, Homo sapiens
  misc_RNA (1)...(19): siRNA sense strand
gcagcgacuccgagaaaau

SEQ ID NO: 2346974 - RNA, 19 nt, Homo sapiens
  misc_RNA (1)...(19): siRNA sense strand
gaggaucguaagagcguca

SEQ ID NO: 2346975 - RNA, 19 nt, Homo sapiens
  misc_RNA (1)...(19): siRNA sense strand
uggagaacuuacaggugga

SEQ ID NO: 2346976 - RNA, 19 nt, Homo sapiens
  misc_RNA (1)...(19): siRNA sense strand
gaagaagaggaacaggaca

SEQ ID NO: 2346977 - RNA, 19 nt, Homo sapiens
  misc_RNA (1)...(19): siRNA sense strand
ggagcaagcuggaggccau

SEQ ID NO: 2346978 - RNA, 19 nt, Homo sapiens
  misc_RNA (1)...(19): siRNA sense strand
ucaucaaggagguggcuga

SEQ ID NO: 2346979 - RNA, 19 nt, Homo sapiens
  misc_RNA (1)...(19): siRNA sense strand
gggagguccgagagaaguu

SEQ ID NO: 2346980 - RNA, 19 nt, Homo sapiens
  misc_RNA (1)...(19): siRNA sense strand
cggagaaggagcagccacu

SEQ ID NO: 2346981 - RNA, 19 nt, Homo sapiens
  misc_RNA (1)...(19): siRNA sense strand
ggagcaagcuggaggccau

SEQ ID NO: 2346982 - RNA, 19 nt, Homo sapiens
  misc_RNA (1)...(19): siRNA sense strand
ucaucaaggagguggcuga

SEQ ID NO: 2346983 - RNA, 19 nt, Homo sapiens
  misc_RNA (1)...(19): siRNA sense strand
gggagguccgagagaaguu

SEQ ID NO: 2346984 - RNA, 19 nt, Homo sapiens
  misc_RNA (1)...(19): siRNA sense strand
cggagaaggagcagccacu

SEQ ID NO: 2346985 - RNA, 19 nt, Homo sapiens
  misc_RNA (1)...(19): siRNA sense strand
ggagcaagcuggaggccau

SEQ ID NO: 2346986 - RNA, 19 nt, Homo sapiens
  misc_RNA (1)...(19): siRNA sense strand
ucaucaaggagguggcuga

SEQ ID NO: 2346987 - RNA, 19 nt, Homo sapiens
  misc_RNA (1)...(19): siRNA sense strand
gggagguccgagagaaguu

SEQ ID NO: 2346988 - RNA, 19 nt, Homo sapiens
  misc_RNA (1)...(19): siRNA sense strand
cggagaaggagcagccacu

SEQ ID NO: 2346989 - RNA, 19 nt, Homo sapiens
  misc_RNA (1)...(19): siRNA sense strand
uggagaguuucuaggguga

SEQ ID NO: 2346990 - RNA, 19 nt, Homo sapiens
  misc_RNA (1)...(19): siRNA sense strand
gauccauguucuugggacu

SEQ ID NO: 2346991 - RNA, 19 nt, Homo sapiens
  misc_RNA (1)...(19): siRNA sense strand
guuucuagggugaugguau

SEQ ID NO: 2346992 - RNA, 19 nt, Homo sapiens
  misc_RNA (1)...(19): siRNA sense strand
cguaagacuaaguaggaaa

SEQ ID NO: 2346993 - RNA, 19 nt, Homo sapiens
  misc_RNA (1)...(19): siRNA sense strand
acgugaaggaagaggauuu

SEQ ID NO: 2346994 - RNA, 19 nt, Homo sapiens
  misc_RNA (1)...(19): siRNA sense strand
aggaaguggaaauuggaaa

SEQ ID NO: 2346995 - RNA, 19 nt, Homo sapiens
  misc_RNA (1)...(19): siRNA sense strand
ucaacaagaggaagggcaa

SEQ ID NO: 2346996 - RNA, 19 nt, Homo sapiens
  misc_RNA (1)...(19): siRNA sense strand
aagaauucaacaagaggaa

SEQ ID NO: 2346997 - RNA, 19 nt, Homo sapiens
  misc_RNA (1)...(19): siRNA sense strand
gggcaaaaucaaaguuuca

SEQ ID NO: 2346998 - RNA, 19 nt, Homo sapiens
  misc_RNA (1)...(19): siRNA sense strand
uugagaaggcacaccguaa

SEQ ID NO: 2346999 - RNA, 19 nt, Homo sapiens
  misc_RNA (1)...(19): siRNA sense strand
auucaauaggacuggauau

SEQ ID NO: 2347000 - RNA, 19 nt, Homo sapiens
  misc_RNA (1)...(19): siRNA sense strand
aaucauggggccuggaaaa

SEQ ID NO: 2347001 - RNA, 19 nt, Homo sapiens
  misc_RNA (1)...(19): siRNA sense strand
ccguaagacuaaguaggaa

SEQ ID NO: 2347002 - RNA, 19 nt, Homo sapiens
  misc_RNA (1)...(19): siRNA sense strand
aauuacagacuuuggugaa

SEQ ID NO: 2347003 - RNA, 19 nt, Homo sapiens
  misc_RNA (1)...(19): siRNA sense strand
ggaucaagguacagggcgc

SEQ ID NO: 2347004 - RNA, 19 nt, Homo sapiens
  misc_RNA (1)...(19): siRNA sense strand
ugacugaggacgcagguga

SEQ ID NO: 2347005 - RNA, 19 nt, Homo sapiens
  misc_RNA (1)...(19): siRNA sense strand
aauuauagugugacggcga

SEQ ID NO: 2347006 - RNA, 19 nt, Homo sapiens
  misc_RNA (1)...(19): siRNA sense strand
guaagacuaaguaggaaaa

SEQ ID NO: 2347007 - RNA, 19 nt, Homo sapiens
  misc_RNA (1)...(19): siRNA sense strand
cguaagacuaaguaggaaa

SEQ ID NO: 2347008 - RNA, 19 nt, Homo sapiens
  misc_RNA (1)...(19): siRNA sense strand
acgugaaggaagaggauuu

SEQ ID NO: 2347009 - RNA, 19 nt, Homo sapiens
  misc_RNA (1)...(19): siRNA sense strand
aggaaguggaaauuggaaa

SEQ ID NO: 2347010 - RNA, 19 nt, Homo sapiens
  misc_RNA (1)...(19): siRNA sense strand
ucaacaagaggaagggcaa

SEQ ID NO: 2347011 - RNA, 19 nt, Homo sapiens
  misc_RNA (1)...(19): siRNA sense strand
aagaauucaacaagaggaa

SEQ ID NO: 2347012 - RNA, 19 nt, Homo sapiens
  misc_RNA (1)...(19): siRNA sense strand
gggcaaaaucaaaguuuca

SEQ ID NO: 2347013 - RNA, 19 nt, Homo sapiens
  misc_RNA (1)...(19): siRNA sense strand
uugagaaggcacaccguaa

SEQ ID NO: 2347014 - RNA, 19 nt, Homo sapiens
  misc_RNA (1)...(19): siRNA sense strand
auucaauaggacuggauau

SEQ ID NO: 2347015 - RNA, 19 nt, Homo sapiens
  misc_RNA (1)...(19): siRNA sense strand
aaucauggggccuggaaaa

SEQ ID NO: 2347016 - RNA, 19 nt, Homo sapiens
  misc_RNA (1)...(19): siRNA sense strand
ccguaagacuaaguaggaa

SEQ ID NO: 2347017 - RNA, 19 nt, Homo sapiens
  misc_RNA (1)...(19): siRNA sense strand
aauuacagacuuuggugaa

SEQ ID NO: 2347018 - RNA, 19 nt, Homo sapiens
  misc_RNA (1)...(19): siRNA sense strand
ggaucaagguacagggcgc

SEQ ID NO: 2347019 - RNA, 19 nt, Homo sapiens
  misc_RNA (1)...(19): siRNA sense strand
ugacugaggacgcagguga

SEQ ID NO: 2347020 - RNA, 19 nt, Homo sapiens
  misc_RNA (1)...(19): siRNA sense strand
aauuauagugugacggcga

SEQ ID NO: 2347021 - RNA, 19 nt, Homo sapiens
  misc_RNA (1)...(19): siRNA sense strand
guaagacuaaguaggaaaa

SEQ ID NO: 2347022 - RNA, 19 nt, Homo sapiens
  misc_RNA (1)...(19): siRNA sense strand
auucaauaggacuggauau

SEQ ID NO: 2347023 - RNA, 19 nt, Homo sapiens
  misc_RNA (1)...(19): siRNA sense strand
aaucauggggccuggaaaa

SEQ ID NO: 2347024 - RNA, 19 nt, Homo sapiens
  misc_RNA (1)...(19): siRNA sense strand
ggaucaagguacagggcgc

SEQ ID NO: 2347025 - RNA, 19 nt, Homo sapiens
  misc_RNA (1)...(19): siRNA sense strand
ugacugaggacgcagguga

SEQ ID NO: 2347026 - RNA, 19 nt, Homo sapiens
  misc_RNA (1)...(19): siRNA sense strand
aauuauagugugacggcga

SEQ ID NO: 2347027 - RNA, 19 nt, Homo sapiens
  misc_RNA (1)...(19): siRNA sense strand
caagagaacaucaaggaga

SEQ ID NO: 2347028 - RNA, 19 nt, Homo sapiens
  misc_RNA (1)...(19): siRNA sense strand
gcaaggaugaagaugggaa

SEQ ID NO: 2347029 - RNA, 19 nt, Homo sapiens
  misc_RNA (1)...(19): siRNA sense strand
agaacaaggcaaaguccaa

SEQ ID NO: 2347030 - RNA, 19 nt, Homo sapiens
  misc_RNA (1)...(19): siRNA sense strand
gaugaagaugggaaggaau

SEQ ID NO: 2347031 - RNA, 19 nt, Homo sapiens
  misc_RNA (1)...(19): siRNA sense strand
cuauagagauugaauggga

SEQ ID NO: 2347032 - RNA, 19 nt, Homo sapiens
  misc_RNA (1)...(19): siRNA sense strand
augaagaugggaaggaauu

SEQ ID NO: 2347033 - RNA, 19 nt, Homo sapiens
  misc_RNA (1)...(19): siRNA sense strand
guuucaaccaagagaacau

SEQ ID NO: 2347034 - RNA, 19 nt, Homo sapiens
  misc_RNA (1)...(19): siRNA sense strand
ccuucauguuugagggcca

SEQ ID NO: 2347035 - RNA, 19 nt, Homo sapiens
  misc_RNA (1)...(19): siRNA sense strand
acauaagagcagaagcuga

SEQ ID NO: 2347036 - RNA, 19 nt, Homo sapiens
  misc_RNA (1)...(19): siRNA sense strand
gcaugaagacauugaccca

SEQ ID NO: 2347037 - RNA, 19 nt, Homo sapiens
  misc_RNA (1)...(19): siRNA sense strand
ccacauauccccagggcuu

SEQ ID NO: 2347038 - RNA, 19 nt, Homo sapiens
  misc_RNA (1)...(19): siRNA sense strand
ucgccauggcugagaugaa

SEQ ID NO: 2347039 - RNA, 19 nt, Homo sapiens
  misc_RNA (1)...(19): siRNA sense strand
gaaagcaauugucaggaga

SEQ ID NO: 2347040 - RNA, 19 nt, Homo sapiens
  misc_RNA (1)...(19): siRNA sense strand
acccagaauaccaggaaca

SEQ ID NO: 2347041 - RNA, 19 nt, Homo sapiens
  misc_RNA (1)...(19): siRNA sense strand
cggaagagggcaugaagac

SEQ ID NO: 2347042 - RNA, 19 nt, Homo sapiens
  misc_RNA (1)...(19): siRNA sense strand
gugaauauauugccgccau

SEQ ID NO: 2347043 - RNA, 19 nt, Homo sapiens
  misc_RNA (1)...(19): siRNA sense strand
aggaauugucugaugagga

SEQ ID NO: 2347044 - RNA, 19 nt, Homo sapiens
  misc_RNA (1)...(19): siRNA sense strand
gugugaacaucaugcacga

SEQ ID NO: 2347045 - RNA, 19 nt, Homo sapiens
  misc_RNA (1)...(19): siRNA sense strand
uccucaagaacaaggcaaa

SEQ ID NO: 2347046 - RNA, 19 nt, Homo sapiens
  misc_RNA (1)...(19): siRNA sense strand
cauugaaccccgcaggaaa

SEQ ID NO: 2347047 - RNA, 19 nt, Homo sapiens
  misc_RNA (1)...(19): siRNA sense strand
ggcaagaagugcaagagcu

SEQ ID NO: 2347048 - RNA, 19 nt, Homo sapiens
  misc_RNA (1)...(19): siRNA sense strand
aagaaguggugcaggagca

SEQ ID NO: 2347049 - RNA, 19 nt, Homo sapiens
  misc_RNA (1)...(19): siRNA sense strand
gcgaaaucaccaagaugca

SEQ ID NO: 2347050 - RNA, 19 nt, Homo sapiens
  misc_RNA (1)...(19): siRNA sense strand
uacaagaaguggugcagga

SEQ ID NO: 2347051 - RNA, 19 nt, Homo sapiens
  misc_RNA (1)...(19): siRNA sense strand
ugugguacgugcuggucaa

SEQ ID NO: 2347052 - RNA, 19 nt, Homo sapiens
  misc_RNA (1)...(19): siRNA sense strand
aaaguaaggaucugagcga

SEQ ID NO: 2347053 - RNA, 19 nt, Homo sapiens
  misc_RNA (1)...(19): siRNA sense strand
acaggguggcgcugagcaa

SEQ ID NO: 2347054 - RNA, 19 nt, Homo sapiens
  misc_RNA (1)...(19): siRNA sense strand
auacagaagaugcagaaaa

SEQ ID NO: 2347055 - RNA, 19 nt, Homo sapiens
  misc_RNA (1)...(19): siRNA sense strand
gcuaugaagcugauggucu

SEQ ID NO: 2347056 - RNA, 19 nt, Homo sapiens
  misc_RNA (1)...(19): siRNA sense strand
cauccuaaacugaaaacaa

SEQ ID NO: 2347057 - RNA, 19 nt, Homo sapiens
  misc_RNA (1)...(19): siRNA sense strand
uugcaaaacuugggucaaa

SEQ ID NO: 2347058 - RNA, 19 nt, Homo sapiens
  misc_RNA (1)...(19): siRNA sense strand
ggucaaaagccauagaauc

SEQ ID NO: 2347059 - RNA, 19 nt, Homo sapiens
  misc_RNA (1)...(19): siRNA sense strand
gguuugugaccuugcucaa

SEQ ID NO: 2347060 - RNA, 19 nt, Homo sapiens
  misc_RNA (1)...(19): siRNA sense strand
uuaacaaucaccugggaau

SEQ ID NO: 2347061 - RNA, 19 nt, Homo sapiens
  misc_RNA (1)...(19): siRNA sense strand
cagcacuguaacugacaaa

SEQ ID NO: 2347062 - RNA, 19 nt, Homo sapiens
  misc_RNA (1)...(19): siRNA sense strand
cugcaauccaagcaugaaa

SEQ ID NO: 2347063 - RNA, 19 nt, Homo sapiens
  misc_RNA (1)...(19): siRNA sense strand
cccuucagcuauugggaau

SEQ ID NO: 2347064 - RNA, 19 nt, Homo sapiens
  misc_RNA (1)...(19): siRNA sense strand
gaaaaggauucuaaaggga

SEQ ID NO: 2347065 - RNA, 19 nt, Homo sapiens
  misc_RNA (1)...(19): siRNA sense strand
agauguugguuaugggucu

SEQ ID NO: 2347066 - RNA, 19 nt, Homo sapiens
  misc_RNA (1)...(19): siRNA sense strand
ggcugaugccuguggacau

SEQ ID NO: 2347067 - RNA, 19 nt, Homo sapiens
  misc_RNA (1)...(19): siRNA sense strand
auacaguugcauugguuau

SEQ ID NO: 2347068 - RNA, 19 nt, Homo sapiens
  misc_RNA (1)...(19): siRNA sense strand
cggacaagacccuggugaa

SEQ ID NO: 2347069 - RNA, 19 nt, Homo sapiens
  misc_RNA (1)...(19): siRNA sense strand
cguacaaccuggugcgcga

SEQ ID NO: 2347070 - RNA, 19 nt, Homo sapiens
  misc_RNA (1)...(19): siRNA sense strand
gcacagaugacguccgguu

SEQ ID NO: 2347071 - RNA, 19 nt, Homo sapiens
  misc_RNA (1)...(19): siRNA sense strand
ucaucaagagcgagcugaa

SEQ ID NO: 2347072 - RNA, 19 nt, Homo sapiens
  misc_RNA (1)...(19): siRNA sense strand
uggaggaagauuucaucaa

SEQ ID NO: 2347073 - RNA, 19 nt, Homo sapiens
  misc_RNA (1)...(19): siRNA sense strand
agaauuucgcuaaggaguu

SEQ ID NO: 2347074 - RNA, 19 nt, Homo sapiens
  misc_RNA (1)...(19): siRNA sense strand
ggacaugauuggucagcca

SEQ ID NO: 2347075 - RNA, 19 nt, Homo sapiens
  misc_RNA (1)...(19): siRNA sense strand
ggguaaucauucaagccaa

SEQ ID NO: 2347076 - RNA, 19 nt, Homo sapiens
  misc_RNA (1)...(19): siRNA sense strand
cagaaauggauuacagcau

SEQ ID NO: 2347077 - RNA, 19 nt, Homo sapiens
  misc_RNA (1)...(19): siRNA sense strand
ucuuaagagcccagguaau

SEQ ID NO: 2347078 - RNA, 19 nt, Homo sapiens
  misc_RNA (1)...(19): siRNA sense strand
cugauuuagacaauggaaa

SEQ ID NO: 2347079 - RNA, 19 nt, Homo sapiens
  misc_RNA (1)...(19): siRNA sense strand
ugaaacucaagaaggaaua

SEQ ID NO: 2347080 - RNA, 19 nt, Homo sapiens
  misc_RNA (1)...(19): siRNA sense strand
acucaagaaggaauaguua

SEQ ID NO: 2347081 - RNA, 19 nt, Homo sapiens
  misc_RNA (1)...(19): siRNA sense strand
gagacuuauguuugugaaa

SEQ ID NO: 2347082 - RNA, 19 nt, Homo sapiens
  misc_RNA (1)...(19): siRNA sense strand
cagaaaacucucaaacaaa

SEQ ID NO: 2347083 - RNA, 19 nt, Homo sapiens
  misc_RNA (1)...(19): siRNA sense strand
ggguggagaagaagauaca

SEQ ID NO: 2347084 - RNA, 19 nt, Homo sapiens
  misc_RNA (1)...(19): siRNA sense strand
aggaaauucauucuggaaa

SEQ ID NO: 2347085 - RNA, 19 nt, Homo sapiens
  misc_RNA (1)...(19): siRNA sense strand
aggaugaaagcuaugauua

SEQ ID NO: 2347086 - RNA, 19 nt, Homo sapiens
  misc_RNA (1)...(19): siRNA sense strand
ucucaaacaaagaaaguca

SEQ ID NO: 2347087 - RNA, 19 nt, Homo sapiens
  misc_RNA (1)...(19): siRNA sense strand
guuaaugacaauaagccua

SEQ ID NO: 2347088 - RNA, 19 nt, Homo sapiens
  misc_RNA (1)...(19): siRNA sense strand
cuacgguauuagagcaaaa

SEQ ID NO: 2347089 - RNA, 19 nt, Homo sapiens
  misc_RNA (1)...(19): siRNA sense strand
guaccagaggaaaugaaua

SEQ ID NO: 2347090 - RNA, 19 nt, Homo sapiens
  misc_RNA (1)...(19): siRNA sense strand
agucugaguuugucaucaa

SEQ ID NO: 2347091 - RNA, 19 nt, Homo sapiens
  misc_RNA (1)...(19): siRNA sense strand
ccuaaguauuacagccaca

SEQ ID NO: 2347092 - RNA, 19 nt, Homo sapiens
  misc_RNA (1)...(19): siRNA sense strand
agaaugcagaaauggauua

SEQ ID NO: 2347093 - RNA, 19 nt, Homo sapiens
  misc_RNA (1)...(19): siRNA sense strand
ggaagauguugaugagccu

SEQ ID NO: 2347094 - RNA, 19 nt, Homo sapiens
  misc_RNA (1)...(19): siRNA sense strand
ccaugggauucaagacaga

SEQ ID NO: 2347095 - RNA, 19 nt, Homo sapiens
  misc_RNA (1)...(19): siRNA sense strand
ggaugaaagcuaugauuac

SEQ ID NO: 2347096 - RNA, 19 nt, Homo sapiens
  misc_RNA (1)...(19): siRNA sense strand
aaacaaagaaagucaagca

SEQ ID NO: 2347097 - RNA, 19 nt, Homo sapiens
  misc_RNA (1)...(19): siRNA sense strand
aguauuacagccacagaaa

SEQ ID NO: 2347098 - RNA, 19 nt, Homo sapiens
  misc_RNA (1)...(19): siRNA sense strand
guggagaagaagauacaga

SEQ ID NO: 2347099 - RNA, 19 nt, Homo sapiens
  misc_RNA (1)...(19): siRNA sense strand
cugaggaguaguaccauaa

SEQ ID NO: 2347100 - RNA, 19 nt, Homo sapiens
  misc_RNA (1)...(19): siRNA sense strand
cugaucaggaugaaagcua

SEQ ID NO: 2347101 - RNA, 19 nt, Homo sapiens
  misc_RNA (1)...(19): siRNA sense strand
aagaagauacagaggccuu

SEQ ID NO: 2347102 - RNA, 19 nt, Homo sapiens
  misc_RNA (1)...(19): siRNA sense strand
gacccagacaauaggaaau

SEQ ID NO: 2347103 - RNA, 19 nt, Homo sapiens
  misc_RNA (1)...(19): siRNA sense strand
agacccagacaauaggaaa

SEQ ID NO: 2347104 - RNA, 19 nt, Homo sapiens
  misc_RNA (1)...(19): siRNA sense strand
gguaauagacaucgcuacu

SEQ ID NO: 2347105 - RNA, 19 nt, Homo sapiens
  misc_RNA (1)...(19): siRNA sense strand
cagaaggaacauuaguuau

SEQ ID NO: 2347106 - RNA, 19 nt, Homo sapiens
  misc_RNA (1)...(19): siRNA sense strand
gagaaugcagaaauggauu

SEQ ID NO: 2347107 - RNA, 19 nt, Homo sapiens
  misc_RNA (1)...(19): siRNA sense strand
cuguagaagacacuaacaa

SEQ ID NO: 2347108 - RNA, 19 nt, Homo sapiens
  misc_RNA (1)...(19): siRNA sense strand
auagcagagcugaggagua

SEQ ID NO: 2347109 - RNA, 19 nt, Homo sapiens
  misc_RNA (1)...(19): siRNA sense strand
accaacaacaggagucaua

SEQ ID NO: 2347110 - RNA, 19 nt, Homo sapiens
  misc_RNA (1)...(19): siRNA sense strand
uaaugacauaggagagaau

SEQ ID NO: 2347111 - RNA, 19 nt, Homo sapiens
  misc_RNA (1)...(19): siRNA sense strand
gagcugaggaguaguacca

SEQ ID NO: 2347112 - RNA, 19 nt, Homo sapiens
  misc_RNA (1)...(19): siRNA sense strand
aacaggagucauaagaaua

SEQ ID NO: 2347113 - RNA, 19 nt, Homo sapiens
  misc_RNA (1)...(19): siRNA sense strand
ugaagaggaugauucgcaa

SEQ ID NO: 2347114 - RNA, 19 nt, Homo sapiens
  misc_RNA (1)...(19): siRNA sense strand
gaagaggaugauucgcaaa

SEQ ID NO: 2347115 - RNA, 19 nt, Homo sapiens
  misc_RNA (1)...(19): siRNA sense strand
gaacgcaagacucggaaaa

SEQ ID NO: 2347116 - RNA, 19 nt, Homo sapiens
  misc_RNA (1)...(19): siRNA sense strand
ucaaugacaaugaaccaaa

SEQ ID NO: 2347117 - RNA, 19 nt, Homo sapiens
  misc_RNA (1)...(19): siRNA sense strand
gcaagaugaguauugggua

SEQ ID NO: 2347118 - RNA, 19 nt, Homo sapiens
  misc_RNA (1)...(19): siRNA sense strand
cauaggagagaaugcagaa

SEQ ID NO: 2347119 - RNA, 19 nt, Homo sapiens
  misc_RNA (1)...(19): siRNA sense strand
ccaucuuaauugccgacaa

SEQ ID NO: 2347120 - RNA, 19 nt, Homo sapiens
  misc_RNA (1)...(19): siRNA sense strand
gagagaaugcagaaaugga

SEQ ID NO: 2347121 - RNA, 19 nt, Homo sapiens
  misc_RNA (1)...(19): siRNA sense strand
ugcaguggauagagaugaa

SEQ ID NO: 2347122 - RNA, 19 nt, Homo sapiens
  misc_RNA (1)...(19): siRNA sense strand
cggauaucaaugacaauga

SEQ ID NO: 2347123 - RNA, 19 nt, Homo sapiens
  misc_RNA (1)...(19): siRNA sense strand
aggagagaaugcagaaaug

SEQ ID NO: 2347124 - RNA, 19 nt, Homo sapiens
  misc_RNA (1)...(19): siRNA sense strand
cgacaauggaaucccguca

SEQ ID NO: 2347125 - RNA, 19 nt, Homo sapiens
  misc_RNA (1)...(19): siRNA sense strand
cagugcagucaaauaauua

SEQ ID NO: 2347126 - RNA, 19 nt, Homo sapiens
  misc_RNA (1)...(19): siRNA sense strand
cuucaaggccagccauauu

SEQ ID NO: 2347127 - RNA, 19 nt, Homo sapiens
  misc_RNA (1)...(19): siRNA sense strand
uggcauaugauaaugacau

SEQ ID NO: 2347128 - RNA, 19 nt, Homo sapiens
  misc_RNA (1)...(19): siRNA sense strand
augaaacucaagaaggaau

SEQ ID NO: 2347129 - RNA, 19 nt, Homo sapiens
  misc_RNA (1)...(19): siRNA sense strand
caggaaauucauucuggaa

SEQ ID NO: 2347130 - RNA, 19 nt, Homo sapiens
  misc_RNA (1)...(19): siRNA sense strand
ugucuuggagcaacagaaa

SEQ ID NO: 2347131 - RNA, 19 nt, Homo sapiens
  misc_RNA (1)...(19): siRNA sense strand
uuacagcauugaagaggau

SEQ ID NO: 2347132 - RNA, 19 nt, Homo sapiens
  misc_RNA (1)...(19): siRNA sense strand
uguugaaugccgagauaua

SEQ ID NO: 2347133 - RNA, 19 nt, Homo sapiens
  misc_RNA (1)...(19): siRNA sense strand
cuucaggagcagagaguuu

SEQ ID NO: 2347134 - RNA, 19 nt, Homo sapiens
  misc_RNA (1)...(19): siRNA sense strand
gcuuauagaaaguguugaa

SEQ ID NO: 2347135 - RNA, 19 nt, Homo sapiens
  misc_RNA (1)...(19): siRNA sense strand
aaggagagcaggaggaaga

SEQ ID NO: 2347136 - RNA, 19 nt, Homo sapiens
  misc_RNA (1)...(19): siRNA sense strand
cagacauguuaguggaaga

SEQ ID NO: 2347137 - RNA, 19 nt, Homo sapiens
  misc_RNA (1)...(19): siRNA sense strand
uugagauacaggaggguaa

SEQ ID NO: 2347138 - RNA, 19 nt, Homo sapiens
  misc_RNA (1)...(19): siRNA sense strand
guaaauaguggcaaggaca

SEQ ID NO: 2347139 - RNA, 19 nt, Homo sapiens
  misc_RNA (1)...(19): siRNA sense strand
agucagaagccgugcugua

SEQ ID NO: 2347140 - RNA, 19 nt, Homo sapiens
  misc_RNA (1)...(19): siRNA sense strand
cugcauagccacucaggaa

SEQ ID NO: 2347141 - RNA, 19 nt, Homo sapiens
  misc_RNA (1)...(19): siRNA sense strand
ccauuacagcuuauagaaa

SEQ ID NO: 2347142 - RNA, 19 nt, Homo sapiens
  misc_RNA (1)...(19): siRNA sense strand
ccaacaucaaugagaagua

SEQ ID NO: 2347143 - RNA, 19 nt, Homo sapiens
  misc_RNA (1)...(19): siRNA sense strand
cugcgaaugcccagaguau

SEQ ID NO: 2347144 - RNA, 19 nt, Homo sapiens
  misc_RNA (1)...(19): siRNA sense strand
cagggcaggcauugagaua

SEQ ID NO: 2347145 - RNA, 19 nt, Homo sapiens
  misc_RNA (1)...(19): siRNA sense strand
gguacagucaguagccaaa

SEQ ID NO: 2347146 - RNA, 19 nt, Homo sapiens
  misc_RNA (1)...(19): siRNA sense strand
uggagagagcacagaguuu

SEQ ID NO: 2347147 - RNA, 19 nt, Homo sapiens
  misc_RNA (1)...(19): siRNA sense strand
cuaccaaagacuagaucau

SEQ ID NO: 2347148 - RNA, 19 nt, Homo sapiens
  misc_RNA (1)...(19): siRNA sense strand
guuucgaauagaagagauu

SEQ ID NO: 2347149 - RNA, 19 nt, Homo sapiens
  misc_RNA (1)...(19): siRNA sense strand
gaauagaagagauugcaga

SEQ ID NO: 2347150 - RNA, 19 nt, Homo sapiens
  misc_RNA (1)...(19): siRNA sense strand
agauuguggcauuggcuaa

SEQ ID NO: 2347151 - RNA, 19 nt, Homo sapiens
  misc_RNA (1)...(19): siRNA sense strand
aagcauuccuugugaaacu

SEQ ID NO: 2347152 - RNA, 19 nt, Homo sapiens
  misc_RNA (1)...(19): siRNA sense strand
aaaacgagguggagaggau

SEQ ID NO: 2347153 - RNA, 19 nt, Homo sapiens
  misc_RNA (1)...(19): siRNA sense strand
ucuacaggcaccagagcaa

SEQ ID NO: 2347154 - RNA, 19 nt, Homo sapiens
  misc_RNA (1)...(19): siRNA sense strand
gggcaggcaacaaggcuuu

SEQ ID NO: 2347155 - RNA, 19 nt, Homo sapiens
  misc_RNA (1)...(19): siRNA sense strand
cugcaaaguuaucaggugu

SEQ ID NO: 2347156 - RNA, 19 nt, Homo sapiens
  misc_RNA (1)...(19): siRNA sense strand
agacuagaucauacgacaa

SEQ ID NO: 2347157 - RNA, 19 nt, Homo sapiens
  misc_RNA (1)...(19): siRNA sense strand
guggacaguucuacagaca

SEQ ID NO: 2347158 - RNA, 19 nt, Homo sapiens
  misc_RNA (1)...(19): siRNA sense strand
ggcugaagagacugaacaa

SEQ ID NO: 2347159 - RNA, 19 nt, Homo sapiens
  misc_RNA (1)...(19): siRNA sense strand
gcccagaguauuacccaaa

SEQ ID NO: 2347160 - RNA, 19 nt, Homo sapiens
  misc_RNA (1)...(19): siRNA sense strand
agaaacaaguccaggagcu

SEQ ID NO: 2347161 - RNA, 19 nt, Homo sapiens
  misc_RNA (1)...(19): siRNA sense strand
acaucaaugagaaguacaa

SEQ ID NO: 2347162 - RNA, 19 nt, Homo sapiens
  misc_RNA (1)...(19): siRNA sense strand
aagaguggcugaagagacu

SEQ ID NO: 2347163 - RNA, 19 nt, Homo sapiens
  misc_RNA (1)...(19): siRNA sense strand
ggcgaaaugcagaugauga

SEQ ID NO: 2347164 - RNA, 19 nt, Homo sapiens
  misc_RNA (1)...(19): siRNA sense strand
cugugugccaugugcguaa

SEQ ID NO: 2347165 - RNA, 19 nt, Homo sapiens
  misc_RNA (1)...(19): siRNA sense strand
ugaagcauuccuugugaaa

SEQ ID NO: 2347166 - RNA, 19 nt, Homo sapiens
  misc_RNA (1)...(19): siRNA sense strand
uggcuaagcucuugcugga

SEQ ID NO: 2347167 - RNA, 19 nt, Homo sapiens
  misc_RNA (1)...(19): siRNA sense strand
caucauagaucuugccuug

SEQ ID NO: 2347168 - RNA, 19 nt, Homo sapiens
  misc_RNA (1)...(19): siRNA sense strand
uaguggaagauaaggugaa

SEQ ID NO: 2347169 - RNA, 19 nt, Homo sapiens
  misc_RNA (1)...(19): siRNA sense strand
agguggagaggauggguuu

SEQ ID NO: 2347170 - RNA, 19 nt, Homo sapiens
  misc_RNA (1)...(19): siRNA sense strand
agccaaagcuugugccucu

SEQ ID NO: 2347171 - RNA, 19 nt, Homo sapiens
  misc_RNA (1)...(19): siRNA sense strand
gggagaacucggaugaucu

SEQ ID NO: 2347172 - RNA, 19 nt, Homo sapiens
  misc_RNA (1)...(19): siRNA sense strand
gaugaagagacucggcaca

SEQ ID NO: 2347173 - RNA, 19 nt, Homo sapiens
  misc_RNA (1)...(19): siRNA sense strand
gagcagagaguuuagccau

SEQ ID NO: 2347174 - RNA, 19 nt, Homo sapiens
  misc_RNA (1)...(19): siRNA sense strand
aagacuagaucauacgaca

SEQ ID NO: 2347175 - RNA, 19 nt, Homo sapiens
  misc_RNA (1)...(19): siRNA sense strand
cuuugaacccagucgagua

SEQ ID NO: 2347176 - RNA, 19 nt, Homo sapiens
  misc_RNA (1)...(19): siRNA sense strand
uggagaacaucuugcagga

SEQ ID NO: 2347177 - RNA, 19 nt, Homo sapiens
  misc_RNA (1)...(19): siRNA sense strand
cugaagagucgccuggaga

SEQ ID NO: 2347178 - RNA, 19 nt, Homo sapiens
  misc_RNA (1)...(19): siRNA sense strand
cauucuauucggaggaguu

SEQ ID NO: 2347179 - RNA, 19 nt, Homo sapiens
  misc_RNA (1)...(19): siRNA sense strand
cgccaaggagagaggggaa

SEQ ID NO: 2347180 - RNA, 19 nt, Homo sapiens
  misc_RNA (1)...(19): siRNA sense strand
agaagagauugcagagggu

SEQ ID NO: 2347181 - RNA, 19 nt, Homo sapiens
  misc_RNA (1)...(19): siRNA sense strand
cuacagacauguuagugga

SEQ ID NO: 2347182 - RNA, 19 nt, Homo sapiens
  misc_RNA (1)...(19): siRNA sense strand
cgacagugccuucuggcuu

SEQ ID NO: 2347183 - RNA, 19 nt, Homo sapiens
  misc_RNA (1)...(19): siRNA sense strand
uugugaaacuggugcagca

SEQ ID NO: 2347184 - RNA, 19 nt, Homo sapiens
  misc_RNA (1)...(19): siRNA sense strand
gaaaaggagagcaggagga

SEQ ID NO: 2347185 - RNA, 19 nt, Homo sapiens
  misc_RNA (1)...(19): siRNA sense strand
ggguagggaggaagcaguu

SEQ ID NO: 2347186 - RNA, 19 nt, Homo sapiens
  misc_RNA (1)...(19): siRNA sense strand
caucagcuucagaggcaau

SEQ ID NO: 2347187 - RNA, 19 nt, Homo sapiens
  misc_RNA (1)...(19): siRNA sense strand
ggagagaggggaaaagcau

SEQ ID NO: 2347188 - RNA, 19 nt, Homo sapiens
  misc_RNA (1)...(19): siRNA sense strand
ggacgacagcugugcacca

SEQ ID NO: 2347189 - RNA, 19 nt, Homo sapiens
  misc_RNA (1)...(19): siRNA sense strand
uguugaaugccgagauaua

SEQ ID NO: 2347190 - RNA, 19 nt, Homo sapiens
  misc_RNA (1)...(19): siRNA sense strand
cuucaggagcagagaguuu

SEQ ID NO: 2347191 - RNA, 19 nt, Homo sapiens
  misc_RNA (1)...(19): siRNA sense strand
gcuuauagaaaguguugaa

SEQ ID NO: 2347192 - RNA, 19 nt, Homo sapiens
  misc_RNA (1)...(19): siRNA sense strand
aaggagagcaggaggaaga

SEQ ID NO: 2347193 - RNA, 19 nt, Homo sapiens
  misc_RNA (1)...(19): siRNA sense strand
cagacauguuaguggaaga

SEQ ID NO: 2347194 - RNA, 19 nt, Homo sapiens
  misc_RNA (1)...(19): siRNA sense strand
uugagauacaggaggguaa

SEQ ID NO: 2347195 - RNA, 19 nt, Homo sapiens
  misc_RNA (1)...(19): siRNA sense strand
guaaauaguggcaaggaca

SEQ ID NO: 2347196 - RNA, 19 nt, Homo sapiens
  misc_RNA (1)...(19): siRNA sense strand
agucagaagccgugcugua

SEQ ID NO: 2347197 - RNA, 19 nt, Homo sapiens
  misc_RNA (1)...(19): siRNA sense strand
cugcauagccacucaggaa

SEQ ID NO: 2347198 - RNA, 19 nt, Homo sapiens
  misc_RNA (1)...(19): siRNA sense strand
ccauuacagcuuauagaaa

SEQ ID NO: 2347199 - RNA, 19 nt, Homo sapiens
  misc_RNA (1)...(19): siRNA sense strand
ccaacaucaaugagaagua

SEQ ID NO: 2347200 - RNA, 19 nt, Homo sapiens
  misc_RNA (1)...(19): siRNA sense strand
cugcgaaugcccagaguau

SEQ ID NO: 2347201 - RNA, 19 nt, Homo sapiens
  misc_RNA (1)...(19): siRNA sense strand
cagggcaggcauugagaua

SEQ ID NO: 2347202 - RNA, 19 nt, Homo sapiens
  misc_RNA (1)...(19): siRNA sense strand
gguacagucaguagccaaa

SEQ ID NO: 2347203 - RNA, 19 nt, Homo sapiens
  misc_RNA (1)...(19): siRNA sense strand
uggagagagcacagaguuu

SEQ ID NO: 2347204 - RNA, 19 nt, Homo sapiens
  misc_RNA (1)...(19): siRNA sense strand
cuaccaaagacuagaucau

SEQ ID NO: 2347205 - RNA, 19 nt, Homo sapiens
  misc_RNA (1)...(19): siRNA sense strand
guuucgaauagaagagauu

SEQ ID NO: 2347206 - RNA, 19 nt, Homo sapiens
  misc_RNA (1)...(19): siRNA sense strand
gaauagaagagauugcaga

SEQ ID NO: 2347207 - RNA, 19 nt, Homo sapiens
  misc_RNA (1)...(19): siRNA sense strand
agauuguggcauuggcuaa

SEQ ID NO: 2347208 - RNA, 19 nt, Homo sapiens
  misc_RNA (1)...(19): siRNA sense strand
aagcauuccuugugaaacu

SEQ ID NO: 2347209 - RNA, 19 nt, Homo sapiens
  misc_RNA (1)...(19): siRNA sense strand
aaaacgagguggagaggau

SEQ ID NO: 2347210 - RNA, 19 nt, Homo sapiens
  misc_RNA (1)...(19): siRNA sense strand
ucuacaggcaccagagcaa

SEQ ID NO: 2347211 - RNA, 19 nt, Homo sapiens
  misc_RNA (1)...(19): siRNA sense strand
gggcaggcaacaaggcuuu

SEQ ID NO: 2347212 - RNA, 19 nt, Homo sapiens
  misc_RNA (1)...(19): siRNA sense strand
cugcaaaguuaucaggugu

SEQ ID NO: 2347213 - RNA, 19 nt, Homo sapiens
  misc_RNA (1)...(19): siRNA sense strand
agacuagaucauacgacaa

SEQ ID NO: 2347214 - RNA, 19 nt, Homo sapiens
  misc_RNA (1)...(19): siRNA sense strand
guggacaguucuacagaca

SEQ ID NO: 2347215 - RNA, 19 nt, Homo sapiens
  misc_RNA (1)...(19): siRNA sense strand
ggcugaagagacugaacaa

SEQ ID NO: 2347216 - RNA, 19 nt, Homo sapiens
  misc_RNA (1)...(19): siRNA sense strand
gcccagaguauuacccaaa

SEQ ID NO: 2347217 - RNA, 19 nt, Homo sapiens
  misc_RNA (1)...(19): siRNA sense strand
agaaacaaguccaggagcu

SEQ ID NO: 2347218 - RNA, 19 nt, Homo sapiens
  misc_RNA (1)...(19): siRNA sense strand
acaucaaugagaaguacaa

SEQ ID NO: 2347219 - RNA, 19 nt, Homo sapiens
  misc_RNA (1)...(19): siRNA sense strand
aagaguggcugaagagacu

SEQ ID NO: 2347220 - RNA, 19 nt, Homo sapiens
  misc_RNA (1)...(19): siRNA sense strand
ggcgaaaugcagaugauga

SEQ ID NO: 2347221 - RNA, 19 nt, Homo sapiens
  misc_RNA (1)...(19): siRNA sense strand
cugugugccaugugcguaa

SEQ ID NO: 2347222 - RNA, 19 nt, Homo sapiens
  misc_RNA (1)...(19): siRNA sense strand
ugaagcauuccuugugaaa

SEQ ID NO: 2347223 - RNA, 19 nt, Homo sapiens
  misc_RNA (1)...(19): siRNA sense strand
uggcuaagcucuugcugga

SEQ ID NO: 2347224 - RNA, 19 nt, Homo sapiens
  misc_RNA (1)...(19): siRNA sense strand
caucauagaucuugccuug

SEQ ID NO: 2347225 - RNA, 19 nt, Homo sapiens
  misc_RNA (1)...(19): siRNA sense strand
uaguggaagauaaggugaa

SEQ ID NO: 2347226 - RNA, 19 nt, Homo sapiens
  misc_RNA (1)...(19): siRNA sense strand
agguggagaggauggguuu

SEQ ID NO: 2347227 - RNA, 19 nt, Homo sapiens
  misc_RNA (1)...(19): siRNA sense strand
agccaaagcuugugccucu

SEQ ID NO: 2347228 - RNA, 19 nt, Homo sapiens
  misc_RNA (1)...(19): siRNA sense strand
gggagaacucggaugaucu

SEQ ID NO: 2347229 - RNA, 19 nt, Homo sapiens
  misc_RNA (1)...(19): siRNA sense strand
gaugaagagacucggcaca

SEQ ID NO: 2347230 - RNA, 19 nt, Homo sapiens
  misc_RNA (1)...(19): siRNA sense strand
gagcagagaguuuagccau

SEQ ID NO: 2347231 - RNA, 19 nt, Homo sapiens
  misc_RNA (1)...(19): siRNA sense strand
aagacuagaucauacgaca

SEQ ID NO: 2347232 - RNA, 19 nt, Homo sapiens
  misc_RNA (1)...(19): siRNA sense strand
cuuugaacccagucgagua

SEQ ID NO: 2347233 - RNA, 19 nt, Homo sapiens
  misc_RNA (1)...(19): siRNA sense strand
uggagaacaucuugcagga

SEQ ID NO: 2347234 - RNA, 19 nt, Homo sapiens
  misc_RNA (1)...(19): siRNA sense strand
cugaagagucgccuggaga

SEQ ID NO: 2347235 - RNA, 19 nt, Homo sapiens
  misc_RNA (1)...(19): siRNA sense strand
cauucuauucggaggaguu

SEQ ID NO: 2347236 - RNA, 19 nt, Homo sapiens
  misc_RNA (1)...(19): siRNA sense strand
cgccaaggagagaggggaa

SEQ ID NO: 2347237 - RNA, 19 nt, Homo sapiens
  misc_RNA (1)...(19): siRNA sense strand
agaagagauugcagagggu

SEQ ID NO: 2347238 - RNA, 19 nt, Homo sapiens
  misc_RNA (1)...(19): siRNA sense strand
cuacagacauguuagugga

SEQ ID NO: 2347239 - RNA, 19 nt, Homo sapiens
  misc_RNA (1)...(19): siRNA sense strand
cgacagugccuucuggcuu

SEQ ID NO: 2347240 - RNA, 19 nt, Homo sapiens
  misc_RNA (1)...(19): siRNA sense strand
uugugaaacuggugcagca

SEQ ID NO: 2347241 - RNA, 19 nt, Homo sapiens
  misc_RNA (1)...(19): siRNA sense strand
gaaaaggagagcaggagga

SEQ ID NO: 2347242 - RNA, 19 nt, Homo sapiens
  misc_RNA (1)...(19): siRNA sense strand
ggguagggaggaagcaguu

SEQ ID NO: 2347243 - RNA, 19 nt, Homo sapiens
  misc_RNA (1)...(19): siRNA sense strand
caucagcuucagaggcaau

SEQ ID NO: 2347244 - RNA, 19 nt, Homo sapiens
  misc_RNA (1)...(19): siRNA sense strand
ggagagaggggaaaagcau

SEQ ID NO: 2347245 - RNA, 19 nt, Homo sapiens
  misc_RNA (1)...(19): siRNA sense strand
ggacgacagcugugcacca

SEQ ID NO: 2347246 - RNA, 19 nt, Homo sapiens
  misc_RNA (1)...(19): siRNA sense strand
uguugaaugccgagauaua

SEQ ID NO: 2347247 - RNA, 19 nt, Homo sapiens
  misc_RNA (1)...(19): siRNA sense strand
cuucaggagcagagaguuu

SEQ ID NO: 2347248 - RNA, 19 nt, Homo sapiens
  misc_RNA (1)...(19): siRNA sense strand
gcuuauagaaaguguugaa

SEQ ID NO: 2347249 - RNA, 19 nt, Homo sapiens
  misc_RNA (1)...(19): siRNA sense strand
aaggagagcaggaggaaga

SEQ ID NO: 2347250 - RNA, 19 nt, Homo sapiens
  misc_RNA (1)...(19): siRNA sense strand
cagacauguuaguggaaga

SEQ ID NO: 2347251 - RNA, 19 nt, Homo sapiens
  misc_RNA (1)...(19): siRNA sense strand
uugagauacaggaggguaa

SEQ ID NO: 2347252 - RNA, 19 nt, Homo sapiens
  misc_RNA (1)...(19): siRNA sense strand
guaaauaguggcaaggaca

SEQ ID NO: 2347253 - RNA, 19 nt, Homo sapiens
  misc_RNA (1)...(19): siRNA sense strand
agucagaagccgugcugua

SEQ ID NO: 2347254 - RNA, 19 nt, Homo sapiens
  misc_RNA (1)...(19): siRNA sense strand
cugcauagccacucaggaa

SEQ ID NO: 2347255 - RNA, 19 nt, Homo sapiens
  misc_RNA (1)...(19): siRNA sense strand
ccauuacagcuuauagaaa

SEQ ID NO: 2347256 - RNA, 19 nt, Homo sapiens
  misc_RNA (1)...(19): siRNA sense strand
ccaacaucaaugagaagua

SEQ ID NO: 2347257 - RNA, 19 nt, Homo sapiens
  misc_RNA (1)...(19): siRNA sense strand
cugcgaaugcccagaguau

SEQ ID NO: 2347258 - RNA, 19 nt, Homo sapiens
  misc_RNA (1)...(19): siRNA sense strand
cagggcaggcauugagaua

SEQ ID NO: 2347259 - RNA, 19 nt, Homo sapiens
  misc_RNA (1)...(19): siRNA sense strand
gguacagucaguagccaaa

SEQ ID NO: 2347260 - RNA, 19 nt, Homo sapiens
  misc_RNA (1)...(19): siRNA sense strand
uggagagagcacagaguuu

SEQ ID NO: 2347261 - RNA, 19 nt, Homo sapiens
  misc_RNA (1)...(19): siRNA sense strand
cuaccaaagacuagaucau

SEQ ID NO: 2347262 - RNA, 19 nt, Homo sapiens
  misc_RNA (1)...(19): siRNA sense strand
guuucgaauagaagagauu

SEQ ID NO: 2347263 - RNA, 19 nt, Homo sapiens
  misc_RNA (1)...(19): siRNA sense strand
gaauagaagagauugcaga

SEQ ID NO: 2347264 - RNA, 19 nt, Homo sapiens
  misc_RNA (1)...(19): siRNA sense strand
agauuguggcauuggcuaa

SEQ ID NO: 2347265 - RNA, 19 nt, Homo sapiens
  misc_RNA (1)...(19): siRNA sense strand
aagcauuccuugugaaacu

SEQ ID NO: 2347266 - RNA, 19 nt, Homo sapiens
  misc_RNA (1)...(19): siRNA sense strand
aaaacgagguggagaggau

SEQ ID NO: 2347267 - RNA, 19 nt, Homo sapiens
  misc_RNA (1)...(19): siRNA sense strand
ucuacaggcaccagagcaa

SEQ ID NO: 2347268 - RNA, 19 nt, Homo sapiens
  misc_RNA (1)...(19): siRNA sense strand
gggcaggcaacaaggcuuu

SEQ ID NO: 2347269 - RNA, 19 nt, Homo sapiens
  misc_RNA (1)...(19): siRNA sense strand
cugcaaaguuaucaggugu

SEQ ID NO: 2347270 - RNA, 19 nt, Homo sapiens
  misc_RNA (1)...(19): siRNA sense strand
agacuagaucauacgacaa

SEQ ID NO: 2347271 - RNA, 19 nt, Homo sapiens
  misc_RNA (1)...(19): siRNA sense strand
guggacaguucuacagaca

SEQ ID NO: 2347272 - RNA, 19 nt, Homo sapiens
  misc_RNA (1)...(19): siRNA sense strand
ggcugaagagacugaacaa

SEQ ID NO: 2347273 - RNA, 19 nt, Homo sapiens
  misc_RNA (1)...(19): siRNA sense strand
gcccagaguauuacccaaa

SEQ ID NO: 2347274 - RNA, 19 nt, Homo sapiens
  misc_RNA (1)...(19): siRNA sense strand
agaaacaaguccaggagcu

SEQ ID NO: 2347275 - RNA, 19 nt, Homo sapiens
  misc_RNA (1)...(19): siRNA sense strand
acaucaaugagaaguacaa

SEQ ID NO: 2347276 - RNA, 19 nt, Homo sapiens
  misc_RNA (1)...(19): siRNA sense strand
aagaguggcugaagagacu

SEQ ID NO: 2347277 - RNA, 19 nt, Homo sapiens
  misc_RNA (1)...(19): siRNA sense strand
ggcgaaaugcagaugauga

SEQ ID NO: 2347278 - RNA, 19 nt, Homo sapiens
  misc_RNA (1)...(19): siRNA sense strand
cugugugccaugugcguaa

SEQ ID NO: 2347279 - RNA, 19 nt, Homo sapiens
  misc_RNA (1)...(19): siRNA sense strand
ugaagcauuccuugugaaa

SEQ ID NO: 2347280 - RNA, 19 nt, Homo sapiens
  misc_RNA (1)...(19): siRNA sense strand
uggcuaagcucuugcugga

SEQ ID NO: 2347281 - RNA, 19 nt, Homo sapiens
  misc_RNA (1)...(19): siRNA sense strand
caucauagaucuugccuug

SEQ ID NO: 2347282 - RNA, 19 nt, Homo sapiens
  misc_RNA (1)...(19): siRNA sense strand
uaguggaagauaaggugaa

SEQ ID NO: 2347283 - RNA, 19 nt, Homo sapiens
  misc_RNA (1)...(19): siRNA sense strand
agguggagaggauggguuu

SEQ ID NO: 2347284 - RNA, 19 nt, Homo sapiens
  misc_RNA (1)...(19): siRNA sense strand
agccaaagcuugugccucu

SEQ ID NO: 2347285 - RNA, 19 nt, Homo sapiens
  misc_RNA (1)...(19): siRNA sense strand
gggagaacucggaugaucu

SEQ ID NO: 2347286 - RNA, 19 nt, Homo sapiens
  misc_RNA (1)...(19): siRNA sense strand
gaugaagagacucggcaca

SEQ ID NO: 2347287 - RNA, 19 nt, Homo sapiens
  misc_RNA (1)...(19): siRNA sense strand
gagcagagaguuuagccau

SEQ ID NO: 2347288 - RNA, 19 nt, Homo sapiens
  misc_RNA (1)...(19): siRNA sense strand
aagacuagaucauacgaca

SEQ ID NO: 2347289 - RNA, 19 nt, Homo sapiens
  misc_RNA (1)...(19): siRNA sense strand
cuuugaacccagucgagua

SEQ ID NO: 2347290 - RNA, 19 nt, Homo sapiens
  misc_RNA (1)...(19): siRNA sense strand
uggagaacaucuugcagga

SEQ ID NO: 2347291 - RNA, 19 nt, Homo sapiens
  misc_RNA (1)...(19): siRNA sense strand
cugaagagucgccuggaga

SEQ ID NO: 2347292 - RNA, 19 nt, Homo sapiens
  misc_RNA (1)...(19): siRNA sense strand
cauucuauucggaggaguu

SEQ ID NO: 2347293 - RNA, 19 nt, Homo sapiens
  misc_RNA (1)...(19): siRNA sense strand
cgccaaggagagaggggaa

SEQ ID NO: 2347294 - RNA, 19 nt, Homo sapiens
  misc_RNA (1)...(19): siRNA sense strand
agaagagauugcagagggu

SEQ ID NO: 2347295 - RNA, 19 nt, Homo sapiens
  misc_RNA (1)...(19): siRNA sense strand
cuacagacauguuagugga

SEQ ID NO: 2347296 - RNA, 19 nt, Homo sapiens
  misc_RNA (1)...(19): siRNA sense strand
cgacagugccuucuggcuu

SEQ ID NO: 2347297 - RNA, 19 nt, Homo sapiens
  misc_RNA (1)...(19): siRNA sense strand
uugugaaacuggugcagca

SEQ ID NO: 2347298 - RNA, 19 nt, Homo sapiens
  misc_RNA (1)...(19): siRNA sense strand
gaaaaggagagcaggagga

SEQ ID NO: 2347299 - RNA, 19 nt, Homo sapiens
  misc_RNA (1)...(19): siRNA sense strand
ggguagggaggaagcaguu

SEQ ID NO: 2347300 - RNA, 19 nt, Homo sapiens
  misc_RNA (1)...(19): siRNA sense strand
caucagcuucagaggcaau

SEQ ID NO: 2347301 - RNA, 19 nt, Homo sapiens
  misc_RNA (1)...(19): siRNA sense strand
ggagagaggggaaaagcau

SEQ ID NO: 2347302 - RNA, 19 nt, Homo sapiens
  misc_RNA (1)...(19): siRNA sense strand
ggacgacagcugugcacca

SEQ ID NO: 2347303 - RNA, 19 nt, Homo sapiens
  misc_RNA (1)...(19): siRNA sense strand
cugugauggcaaugagauu

SEQ ID NO: 2347304 - RNA, 19 nt, Homo sapiens
  misc_RNA (1)...(19): siRNA sense strand
gccgaugggagguggaaga

SEQ ID NO: 2347305 - RNA, 19 nt, Homo sapiens
  misc_RNA (1)...(19): siRNA sense strand
gaugggagguggaagagga

SEQ ID NO: 2347306 - RNA, 19 nt, Homo sapiens
  misc_RNA (1)...(19): siRNA sense strand
gacugguggaagaguguaa

SEQ ID NO: 2347307 - RNA, 19 nt, Homo sapiens
  misc_RNA (1)...(19): siRNA sense strand
uguccaaaguggugccguu

SEQ ID NO: 2347308 - RNA, 19 nt, Homo sapiens
  misc_RNA (1)...(19): siRNA sense strand
aggcccgacugguggaaga

SEQ ID NO: 2347309 - RNA, 19 nt, Homo sapiens
  misc_RNA (1)...(19): siRNA sense strand
cugcugauccggagaacca

SEQ ID NO: 2347310 - RNA, 19 nt, Homo sapiens
  misc_RNA (1)...(19): siRNA sense strand
ucuucuacuuguacaggaa

SEQ ID NO: 2347311 - RNA, 19 nt, Homo sapiens
  misc_RNA (1)...(19): siRNA sense strand
acuuguacaggaaagguua

SEQ ID NO: 2347312 - RNA, 19 nt, Homo sapiens
  misc_RNA (1)...(19): siRNA sense strand
caaaagaagagguggguga

SEQ ID NO: 2347313 - RNA, 19 nt, Homo sapiens
  misc_RNA (1)...(19): siRNA sense strand
cggcagaguggaaggccaa

SEQ ID NO: 2347314 - RNA, 19 nt, Homo sapiens
  misc_RNA (1)...(19): siRNA sense strand
agaaagaggaggagacgga

SEQ ID NO: 2347315 - RNA, 19 nt, Homo sapiens
  misc_RNA (1)...(19): siRNA sense strand
aaagaggaggagacggaaa

SEQ ID NO: 2347316 - RNA, 19 nt, Homo sapiens
  misc_RNA (1)...(19): siRNA sense strand
aggagaagaaagaggagga

SEQ ID NO: 2347317 - RNA, 19 nt, Homo sapiens
  misc_RNA (1)...(19): siRNA sense strand
uggacgaggagaagaaaga

SEQ ID NO: 2347318 - RNA, 19 nt, Homo sapiens
  misc_RNA (1)...(19): siRNA sense strand
cauuacgaccauaggguau

SEQ ID NO: 2347319 - RNA, 19 nt, Homo sapiens
  misc_RNA (1)...(19): siRNA sense strand
ggaauuacucccuggacga

SEQ ID NO: 2347320 - RNA, 19 nt, Homo sapiens
  misc_RNA (1)...(19): siRNA sense strand
gagucaguccaauaggaaa

SEQ ID NO: 2347321 - RNA, 19 nt, Homo sapiens
  misc_RNA (1)...(19): siRNA sense strand
uggaaccaucuuugggaaa

SEQ ID NO: 2347322 - RNA, 19 nt, Homo sapiens
  misc_RNA (1)...(19): siRNA sense strand
aauuaucgggagugguaua

SEQ ID NO: 2347323 - RNA, 19 nt, Homo sapiens
  misc_RNA (1)...(19): siRNA sense strand
ggaaugauacccacggaca

SEQ ID NO: 2347324 - RNA, 19 nt, Homo sapiens
  misc_RNA (1)...(19): siRNA sense strand
cauuacuugaagacagaaa

SEQ ID NO: 2347325 - RNA, 19 nt, Homo sapiens
  misc_RNA (1)...(19): siRNA sense strand
uugcaagaguggagaaggu

SEQ ID NO: 2347326 - RNA, 19 nt, Homo sapiens
  misc_RNA (1)...(19): siRNA sense strand
ccucaucccaggagagcau

SEQ ID NO: 2347327 - RNA, 19 nt, Homo sapiens
  misc_RNA (1)...(19): siRNA sense strand
agaagaaagaggaggagac

SEQ ID NO: 2347328 - RNA, 19 nt, Homo sapiens
  misc_RNA (1)...(19): siRNA sense strand
agacucaccaagaggaaaa

SEQ ID NO: 2347329 - RNA, 19 nt, Homo sapiens
  misc_RNA (1)...(19): siRNA sense strand
cccuggacgaggagaagaa

SEQ ID NO: 2347330 - RNA, 19 nt, Homo sapiens
  misc_RNA (1)...(19): siRNA sense strand
gagaagaaagaggaggaga

SEQ ID NO: 2347331 - RNA, 19 nt, Homo sapiens
  misc_RNA (1)...(19): siRNA sense strand
ggaagacggugguugccau

SEQ ID NO: 2347332 - RNA, 19 nt, Homo sapiens
  misc_RNA (1)...(19): siRNA sense strand
ugggaaaagcauugcaaga

SEQ ID NO: 2347333 - RNA, 19 nt, Homo sapiens
  misc_RNA (1)...(19): siRNA sense strand
agacggaaaagauguguaa

SEQ ID NO: 2347334 - RNA, 19 nt, Homo sapiens
  misc_RNA (1)...(19): siRNA sense strand
ccagacucaccaagaggaa

SEQ ID NO: 2347335 - RNA, 19 nt, Homo sapiens
  misc_RNA (1)...(19): siRNA sense strand
aagaggaggagacggaaaa

SEQ ID NO: 2347336 - RNA, 19 nt, Homo sapiens
  misc_RNA (1)...(19): siRNA sense strand
gcauugcaagaguggagaa

SEQ ID NO: 2347337 - RNA, 19 nt, Homo sapiens
  misc_RNA (1)...(19): siRNA sense strand
ggucuugucuuccgggcau

SEQ ID NO: 2347338 - RNA, 19 nt, Homo sapiens
  misc_RNA (1)...(19): siRNA sense strand
auaccaucgccuuggagaa

SEQ ID NO: 2347339 - RNA, 19 nt, Homo sapiens
  misc_RNA (1)...(19): siRNA sense strand
cugaguuggagaacggaau

SEQ ID NO: 2347340 - RNA, 19 nt, Homo sapiens
  misc_RNA (1)...(19): siRNA sense strand
caaaagaagagguggguga

SEQ ID NO: 2347341 - RNA, 19 nt, Homo sapiens
  misc_RNA (1)...(19): siRNA sense strand
cggcagaguggaaggccaa

SEQ ID NO: 2347342 - RNA, 19 nt, Homo sapiens
  misc_RNA (1)...(19): siRNA sense strand
agaaagaggaggagacgga

SEQ ID NO: 2347343 - RNA, 19 nt, Homo sapiens
  misc_RNA (1)...(19): siRNA sense strand
aaagaggaggagacggaaa

SEQ ID NO: 2347344 - RNA, 19 nt, Homo sapiens
  misc_RNA (1)...(19): siRNA sense strand
aggagaagaaagaggagga

SEQ ID NO: 2347345 - RNA, 19 nt, Homo sapiens
  misc_RNA (1)...(19): siRNA sense strand
uggacgaggagaagaaaga

SEQ ID NO: 2347346 - RNA, 19 nt, Homo sapiens
  misc_RNA (1)...(19): siRNA sense strand
cauuacgaccauaggguau

SEQ ID NO: 2347347 - RNA, 19 nt, Homo sapiens
  misc_RNA (1)...(19): siRNA sense strand
ggaauuacucccuggacga

SEQ ID NO: 2347348 - RNA, 19 nt, Homo sapiens
  misc_RNA (1)...(19): siRNA sense strand
gagucaguccaauaggaaa

SEQ ID NO: 2347349 - RNA, 19 nt, Homo sapiens
  misc_RNA (1)...(19): siRNA sense strand
uggaaccaucuuugggaaa

SEQ ID NO: 2347350 - RNA, 19 nt, Homo sapiens
  misc_RNA (1)...(19): siRNA sense strand
aauuaucgggagugguaua

SEQ ID NO: 2347351 - RNA, 19 nt, Homo sapiens
  misc_RNA (1)...(19): siRNA sense strand
ggaaugauacccacggaca

SEQ ID NO: 2347352 - RNA, 19 nt, Homo sapiens
  misc_RNA (1)...(19): siRNA sense strand
cauuacuugaagacagaaa

SEQ ID NO: 2347353 - RNA, 19 nt, Homo sapiens
  misc_RNA (1)...(19): siRNA sense strand
uugcaagaguggagaaggu

SEQ ID NO: 2347354 - RNA, 19 nt, Homo sapiens
  misc_RNA (1)...(19): siRNA sense strand
ccucaucccaggagagcau

SEQ ID NO: 2347355 - RNA, 19 nt, Homo sapiens
  misc_RNA (1)...(19): siRNA sense strand
agaagaaagaggaggagac

SEQ ID NO: 2347356 - RNA, 19 nt, Homo sapiens
  misc_RNA (1)...(19): siRNA sense strand
agacucaccaagaggaaaa

SEQ ID NO: 2347357 - RNA, 19 nt, Homo sapiens
  misc_RNA (1)...(19): siRNA sense strand
cccuggacgaggagaagaa

SEQ ID NO: 2347358 - RNA, 19 nt, Homo sapiens
  misc_RNA (1)...(19): siRNA sense strand
gagaagaaagaggaggaga

SEQ ID NO: 2347359 - RNA, 19 nt, Homo sapiens
  misc_RNA (1)...(19): siRNA sense strand
ggaagacggugguugccau

SEQ ID NO: 2347360 - RNA, 19 nt, Homo sapiens
  misc_RNA (1)...(19): siRNA sense strand
ugggaaaagcauugcaaga

SEQ ID NO: 2347361 - RNA, 19 nt, Homo sapiens
  misc_RNA (1)...(19): siRNA sense strand
agacggaaaagauguguaa

SEQ ID NO: 2347362 - RNA, 19 nt, Homo sapiens
  misc_RNA (1)...(19): siRNA sense strand
ccagacucaccaagaggaa

SEQ ID NO: 2347363 - RNA, 19 nt, Homo sapiens
  misc_RNA (1)...(19): siRNA sense strand
aagaggaggagacggaaaa

SEQ ID NO: 2347364 - RNA, 19 nt, Homo sapiens
  misc_RNA (1)...(19): siRNA sense strand
gcauugcaagaguggagaa

SEQ ID NO: 2347365 - RNA, 19 nt, Homo sapiens
  misc_RNA (1)...(19): siRNA sense strand
ggucuugucuuccgggcau

SEQ ID NO: 2347366 - RNA, 19 nt, Homo sapiens
  misc_RNA (1)...(19): siRNA sense strand
auaccaucgccuuggagaa

SEQ ID NO: 2347367 - RNA, 19 nt, Homo sapiens
  misc_RNA (1)...(19): siRNA sense strand
cugaguuggagaacggaau

SEQ ID NO: 2347368 - RNA, 19 nt, Homo sapiens
  misc_RNA (1)...(19): siRNA sense strand
caaaagaagagguggguga

SEQ ID NO: 2347369 - RNA, 19 nt, Homo sapiens
  misc_RNA (1)...(19): siRNA sense strand
cggcagaguggaaggccaa

SEQ ID NO: 2347370 - RNA, 19 nt, Homo sapiens
  misc_RNA (1)...(19): siRNA sense strand
agaaagaggaggagacgga

SEQ ID NO: 2347371 - RNA, 19 nt, Homo sapiens
  misc_RNA (1)...(19): siRNA sense strand
aaagaggaggagacggaaa

SEQ ID NO: 2347372 - RNA, 19 nt, Homo sapiens
  misc_RNA (1)...(19): siRNA sense strand
aggagaagaaagaggagga

SEQ ID NO: 2347373 - RNA, 19 nt, Homo sapiens
  misc_RNA (1)...(19): siRNA sense strand
uggacgaggagaagaaaga

SEQ ID NO: 2347374 - RNA, 19 nt, Homo sapiens
  misc_RNA (1)...(19): siRNA sense strand
cauuacgaccauaggguau

SEQ ID NO: 2347375 - RNA, 19 nt, Homo sapiens
  misc_RNA (1)...(19): siRNA sense strand
ggaauuacucccuggacga

SEQ ID NO: 2347376 - RNA, 19 nt, Homo sapiens
  misc_RNA (1)...(19): siRNA sense strand
gagucaguccaauaggaaa

SEQ ID NO: 2347377 - RNA, 19 nt, Homo sapiens
  misc_RNA (1)...(19): siRNA sense strand
uggaaccaucuuugggaaa

SEQ ID NO: 2347378 - RNA, 19 nt, Homo sapiens
  misc_RNA (1)...(19): siRNA sense strand
aauuaucgggagugguaua

SEQ ID NO: 2347379 - RNA, 19 nt, Homo sapiens
  misc_RNA (1)...(19): siRNA sense strand
ggaaugauacccacggaca

SEQ ID NO: 2347380 - RNA, 19 nt, Homo sapiens
  misc_RNA (1)...(19): siRNA sense strand
cauuacuugaagacagaaa

SEQ ID NO: 2347381 - RNA, 19 nt, Homo sapiens
  misc_RNA (1)...(19): siRNA sense strand
uugcaagaguggagaaggu

SEQ ID NO: 2347382 - RNA, 19 nt, Homo sapiens
  misc_RNA (1)...(19): siRNA sense strand
ccucaucccaggagagcau

SEQ ID NO: 2347383 - RNA, 19 nt, Homo sapiens
  misc_RNA (1)...(19): siRNA sense strand
agaagaaagaggaggagac

SEQ ID NO: 2347384 - RNA, 19 nt, Homo sapiens
  misc_RNA (1)...(19): siRNA sense strand
agacucaccaagaggaaaa

SEQ ID NO: 2347385 - RNA, 19 nt, Homo sapiens
  misc_RNA (1)...(19): siRNA sense strand
cccuggacgaggagaagaa

SEQ ID NO: 2347386 - RNA, 19 nt, Homo sapiens
  misc_RNA (1)...(19): siRNA sense strand
gagaagaaagaggaggaga

SEQ ID NO: 2347387 - RNA, 19 nt, Homo sapiens
  misc_RNA (1)...(19): siRNA sense strand
ggaagacggugguugccau

SEQ ID NO: 2347388 - RNA, 19 nt, Homo sapiens
  misc_RNA (1)...(19): siRNA sense strand
ugggaaaagcauugcaaga

SEQ ID NO: 2347389 - RNA, 19 nt, Homo sapiens
  misc_RNA (1)...(19): siRNA sense strand
agacggaaaagauguguaa

SEQ ID NO: 2347390 - RNA, 19 nt, Homo sapiens
  misc_RNA (1)...(19): siRNA sense strand
ccagacucaccaagaggaa

SEQ ID NO: 2347391 - RNA, 19 nt, Homo sapiens
  misc_RNA (1)...(19): siRNA sense strand
aagaggaggagacggaaaa

SEQ ID NO: 2347392 - RNA, 19 nt, Homo sapiens
  misc_RNA (1)...(19): siRNA sense strand
gcauugcaagaguggagaa

SEQ ID NO: 2347393 - RNA, 19 nt, Homo sapiens
  misc_RNA (1)...(19): siRNA sense strand
ggucuugucuuccgggcau

SEQ ID NO: 2347394 - RNA, 19 nt, Homo sapiens
  misc_RNA (1)...(19): siRNA sense strand
auaccaucgccuuggagaa

SEQ ID NO: 2347395 - RNA, 19 nt, Homo sapiens
  misc_RNA (1)...(19): siRNA sense strand
cugaguuggagaacggaau

SEQ ID NO: 2347396 - RNA, 19 nt, Homo sapiens
  misc_RNA (1)...(19): siRNA sense strand
guguaaugaaugugggaaa

SEQ ID NO: 2347397 - RNA, 19 nt, Homo sapiens
  misc_RNA (1)...(19): siRNA sense strand
agacaaacauucaaggcaa

SEQ ID NO: 2347398 - RNA, 19 nt, Homo sapiens
  misc_RNA (1)...(19): siRNA sense strand
auguaaugaaugugggaaa

SEQ ID NO: 2347399 - RNA, 19 nt, Homo sapiens
  misc_RNA (1)...(19): siRNA sense strand
auguaaugaaugugggaaa

SEQ ID NO: 2347400 - RNA, 19 nt, Homo sapiens
  misc_RNA (1)...(19): siRNA sense strand
auguaaugaaugugggaaa

SEQ ID NO: 2347401 - RNA, 19 nt, Homo sapiens
  misc_RNA (1)...(19): siRNA sense strand
auguaaugaaugugggaaa

SEQ ID NO: 2347402 - RNA, 19 nt, Homo sapiens
  misc_RNA (1)...(19): siRNA sense strand
auguaauguaugugggaaa

SEQ ID NO: 2347403 - RNA, 19 nt, Homo sapiens
  misc_RNA (1)...(19): siRNA sense strand
ccuuauggauguagcgaau

SEQ ID NO: 2347404 - RNA, 19 nt, Homo sapiens
  misc_RNA (1)...(19): siRNA sense strand
ccaagaaaacgaagacaaa

SEQ ID NO: 2347405 - RNA, 19 nt, Homo sapiens
  misc_RNA (1)...(19): siRNA sense strand
gcauggaagccuuagacaa

SEQ ID NO: 2347406 - RNA, 19 nt, Homo sapiens
  misc_RNA (1)...(19): siRNA sense strand
auguaaugaauguggcaaa

SEQ ID NO: 2347407 - RNA, 19 nt, Homo sapiens
  misc_RNA (1)...(19): siRNA sense strand
aacauaucauggagagaaa

SEQ ID NO: 2347408 - RNA, 19 nt, Homo sapiens
  misc_RNA (1)...(19): siRNA sense strand
auguaacgaaugugggaaa

SEQ ID NO: 2347409 - RNA, 19 nt, Homo sapiens
  misc_RNA (1)...(19): siRNA sense strand
aagccauucaggagagaaa

SEQ ID NO: 2347410 - RNA, 19 nt, Homo sapiens
  misc_RNA (1)...(19): siRNA sense strand
guggauaaugggaggugaa

SEQ ID NO: 2347411 - RNA, 19 nt, Homo sapiens
  misc_RNA (1)...(19): siRNA sense strand
augugauguuggagaacua

SEQ ID NO: 2347412 - RNA, 19 nt, Homo sapiens
  misc_RNA (1)...(19): siRNA sense strand
guguagcgagugugggaaa

SEQ ID NO: 2347413 - RNA, 19 nt, Homo sapiens
  misc_RNA (1)...(19): siRNA sense strand
cuucauuagacaucggaaa

SEQ ID NO: 2347414 - RNA, 19 nt, Homo sapiens
  misc_RNA (1)...(19): siRNA sense strand
cauggaagccuuagacaau

SEQ ID NO: 2347415 - RNA, 19 nt, Homo sapiens
  misc_RNA (1)...(19): siRNA sense strand
aguacacacagaagagaaa

SEQ ID NO: 2347416 - RNA, 19 nt, Homo sapiens
  misc_RNA (1)...(19): siRNA sense strand
gaagauaacuuacagggau

SEQ ID NO: 2347417 - RNA, 19 nt, Homo sapiens
  misc_RNA (1)...(19): siRNA sense strand
aauucauucaggagagaaa

SEQ ID NO: 2347418 - RNA, 19 nt, Homo sapiens
  misc_RNA (1)...(19): siRNA sense strand
ccugaugaguguaaugaau

SEQ ID NO: 2347419 - RNA, 19 nt, Homo sapiens
  misc_RNA (1)...(19): siRNA sense strand
ggaaauccuacuaccgaaa

SEQ ID NO: 2347420 - RNA, 19 nt, Homo sapiens
  misc_RNA (1)...(19): siRNA sense strand
cugaagagaaagagaauac

SEQ ID NO: 2347421 - RNA, 19 nt, Homo sapiens
  misc_RNA (1)...(19): siRNA sense strand
ggagagaaaaugugugaau

SEQ ID NO: 2347422 - RNA, 19 nt, Homo sapiens
  misc_RNA (1)...(19): siRNA sense strand
gaauguaguaaauguggaa

SEQ ID NO: 2347423 - RNA, 19 nt, Homo sapiens
  misc_RNA (1)...(19): siRNA sense strand
aacccugacugaagagaaa

SEQ ID NO: 2347424 - RNA, 19 nt, Homo sapiens
  misc_RNA (1)...(19): siRNA sense strand
ggcucacacaggagagaaa

SEQ ID NO: 2347425 - RNA, 19 nt, Homo sapiens
  misc_RNA (1)...(19): siRNA sense strand
cccuaugaauguaguaaau

SEQ ID NO: 2347426 - RNA, 19 nt, Homo sapiens
  misc_RNA (1)...(19): siRNA sense strand
gagaauucauagaagagga

SEQ ID NO: 2347427 - RNA, 19 nt, Homo sapiens
  misc_RNA (1)...(19): siRNA sense strand
auguagcgaaugugggaaa

SEQ ID NO: 2347428 - RNA, 19 nt, Homo sapiens
  misc_RNA (1)...(19): siRNA sense strand
auguagcgaaugugggaaa

SEQ ID NO: 2347429 - RNA, 19 nt, Homo sapiens
  misc_RNA (1)...(19): siRNA sense strand
gggaaauccuacuaccgaa

SEQ ID NO: 2347430 - RNA, 19 nt, Homo sapiens
  misc_RNA (1)...(19): siRNA sense strand
aagucauucagaagagaaa

SEQ ID NO: 2347431 - RNA, 19 nt, Homo sapiens
  misc_RNA (1)...(19): siRNA sense strand
gcauaucagagaucacaaa

SEQ ID NO: 2347432 - RNA, 19 nt, Homo sapiens
  misc_RNA (1)...(19): siRNA sense strand
cagagaucacaaauggaaa

SEQ ID NO: 2347433 - RNA, 19 nt, Homo sapiens
  misc_RNA (1)...(19): siRNA sense strand
gaauguaauguauguggaa

SEQ ID NO: 2347434 - RNA, 19 nt, Homo sapiens
  misc_RNA (1)...(19): siRNA sense strand
ucaauagccaucagagaau

SEQ ID NO: 2347435 - RNA, 19 nt, Homo sapiens
  misc_RNA (1)...(19): siRNA sense strand
guugaugaccugauagaga

SEQ ID NO: 2347436 - RNA, 19 nt, Homo sapiens
  misc_RNA (1)...(19): siRNA sense strand
ugacugaagagaaagagaa

SEQ ID NO: 2347437 - RNA, 19 nt, Homo sapiens
  misc_RNA (1)...(19): siRNA sense strand
acuuagaggagaagcccua

SEQ ID NO: 2347438 - RNA, 19 nt, Homo sapiens
  misc_RNA (1)...(19): siRNA sense strand
aguacacacaggcgagaaa

SEQ ID NO: 2347439 - RNA, 19 nt, Homo sapiens
  misc_RNA (1)...(19): siRNA sense strand
gacugaagagaaagagaau

SEQ ID NO: 2347440 - RNA, 19 nt, Homo sapiens
  misc_RNA (1)...(19): siRNA sense strand
cccuaugaguggaaugauu

SEQ ID NO: 2347441 - RNA, 19 nt, Homo sapiens
  misc_RNA (1)...(19): siRNA sense strand
gcuuguaucaauagcaaaa

SEQ ID NO: 2347442 - RNA, 19 nt, Homo sapiens
  misc_RNA (1)...(19): siRNA sense strand
cgaaagucuacucugauua

SEQ ID NO: 2347443 - RNA, 19 nt, Homo sapiens
  misc_RNA (1)...(19): siRNA sense strand
cuucaauagccaucagaga

SEQ ID NO: 2347444 - RNA, 19 nt, Homo sapiens
  misc_RNA (1)...(19): siRNA sense strand
ggaagcuaugcuaggacaa

SEQ ID NO: 2347445 - RNA, 19 nt, Homo sapiens
  misc_RNA (1)...(19): siRNA sense strand
ccuaagaacucauucagga

SEQ ID NO: 2347446 - RNA, 19 nt, Homo sapiens
  misc_RNA (1)...(19): siRNA sense strand
auagagagaauccaagaaa

SEQ ID NO: 2347447 - RNA, 19 nt, Homo sapiens
  misc_RNA (1)...(19): siRNA sense strand
augcagugaauguggaaaa

SEQ ID NO: 2347448 - RNA, 19 nt, Homo sapiens
  misc_RNA (1)...(19): siRNA sense strand
ucccaugaauguagugaau

SEQ ID NO: 2347449 - RNA, 19 nt, Homo sapiens
  misc_RNA (1)...(19): siRNA sense strand
agagaucacaaauggaaau

SEQ ID NO: 2347450 - RNA, 19 nt, Homo sapiens
  misc_RNA (1)...(19): siRNA sense strand
uaguagugauggaagcuau

SEQ ID NO: 2347451 - RNA, 19 nt, Homo sapiens
  misc_RNA (1)...(19): siRNA sense strand
gugacuacccaguggugaa

SEQ ID NO: 2347452 - RNA, 19 nt, Homo sapiens
  misc_RNA (1)...(19): siRNA sense strand
guacuaauagcuugggaca

SEQ ID NO: 2347453 - RNA, 19 nt, Homo sapiens
  misc_RNA (1)...(19): siRNA sense strand
aggagacugugaagggcua

SEQ ID NO: 2347454 - RNA, 19 nt, Homo sapiens
  misc_RNA (1)...(19): siRNA sense strand
ggaacuucagauugccaaa

SEQ ID NO: 2347455 - RNA, 19 nt, Homo sapiens
  misc_RNA (1)...(19): siRNA sense strand
aguuggaguugaaggagca

SEQ ID NO: 2347456 - RNA, 19 nt, Homo sapiens
  misc_RNA (1)...(19): siRNA sense strand
ucucagucgaagaagaaau

SEQ ID NO: 2347457 - RNA, 19 nt, Homo sapiens
  misc_RNA (1)...(19): siRNA sense strand
ggcaacuagggaugugaaa

SEQ ID NO: 2347458 - RNA, 19 nt, Homo sapiens
  misc_RNA (1)...(19): siRNA sense strand
cuguaaaccucaaccagga

SEQ ID NO: 2347459 - RNA, 19 nt, Homo sapiens
  misc_RNA (1)...(19): siRNA sense strand
aggugguuacagagaggaa

SEQ ID NO: 2347460 - RNA, 19 nt, Homo sapiens
  misc_RNA (1)...(19): siRNA sense strand
acagaucacuggagaccga

SEQ ID NO: 2347461 - RNA, 19 nt, Homo sapiens
  misc_RNA (1)...(19): siRNA sense strand
ccauuuacguggaggucuc

SEQ ID NO: 2347462 - RNA, 19 nt, Homo sapiens
  misc_RNA (1)...(19): siRNA sense strand
caagacagaucacuggaga

SEQ ID NO: 2347463 - RNA, 19 nt, Homo sapiens
  misc_RNA (1)...(19): siRNA sense strand
acccuacaguggagaaaca

SEQ ID NO: 2347464 - RNA, 19 nt, Homo sapiens
  misc_RNA (1)...(19): siRNA sense strand
acgcaaacuaugauggaaa

SEQ ID NO: 2347465 - RNA, 19 nt, Homo sapiens
  misc_RNA (1)...(19): siRNA sense strand
cgaugagauugaagagcau

SEQ ID NO: 2347466 - RNA, 19 nt, Homo sapiens
  misc_RNA (1)...(19): siRNA sense strand
aagugaaguuccaggccaa

SEQ ID NO: 2347467 - RNA, 19 nt, Homo sapiens
  misc_RNA (1)...(19): siRNA sense strand
caagaaacucauuggcaca

SEQ ID NO: 2347468 - RNA, 19 nt, Homo sapiens
  misc_RNA (1)...(19): siRNA sense strand
ccaugagacugaugcccaa

SEQ ID NO: 2347469 - RNA, 19 nt, Homo sapiens
  misc_RNA (1)...(19): siRNA sense strand
agaagauggguguugacaa

SEQ ID NO: 2347470 - RNA, 19 nt, Homo sapiens
  misc_RNA (1)...(19): siRNA sense strand
ucaacaaauccaagaaacu

SEQ ID NO: 2347471 - RNA, 19 nt, Homo sapiens
  misc_RNA (1)...(19): siRNA sense strand
cuguagagaaauuagugaa

SEQ ID NO: 2347472 - RNA, 19 nt, Homo sapiens
  misc_RNA (1)...(19): siRNA sense strand
cugaggacgaugagauuga

SEQ ID NO: 2347473 - RNA, 19 nt, Homo sapiens
  misc_RNA (1)...(19): siRNA sense strand
acgaugagauugaagagca

SEQ ID NO: 2347474 - RNA, 19 nt, Homo sapiens
  misc_RNA (1)...(19): siRNA sense strand
caggagcaugaaagugaaa

SEQ ID NO: 2347475 - RNA, 19 nt, Homo sapiens
  misc_RNA (1)...(19): siRNA sense strand
aacaagaagaccaggacga

SEQ ID NO: 2347476 - RNA, 19 nt, Homo sapiens
  misc_RNA (1)...(19): siRNA sense strand
acucauuggcacagcaguu

SEQ ID NO: 2347477 - RNA, 19 nt, Homo sapiens
  misc_RNA (1)...(19): siRNA sense strand
caguggaugggcuggagaa

SEQ ID NO: 2347478 - RNA, 19 nt, Homo sapiens
  misc_RNA (1)...(19): siRNA sense strand
aaacggugcuggaggguca

SEQ ID NO: 2347479 - RNA, 19 nt, Homo sapiens
  misc_RNA (1)...(19): siRNA sense strand
gggaacaacugaugcacca

SEQ ID NO: 2347480 - RNA, 19 nt, Homo sapiens
  misc_RNA (1)...(19): siRNA sense strand
acguggagguggugaacga

SEQ ID NO: 2347481 - RNA, 19 nt, Homo sapiens
  misc_RNA (1)...(19): siRNA sense strand
agauaacagcagaagucaa

SEQ ID NO: 2347482 - RNA, 19 nt, Homo sapiens
  misc_RNA (1)...(19): siRNA sense strand
aggaggaauucuacagcau

SEQ ID NO: 2347483 - RNA, 19 nt, Homo sapiens
  misc_RNA (1)...(19): siRNA sense strand
ccaacguggagguggugaa

SEQ ID NO: 2347484 - RNA, 19 nt, Homo sapiens
  misc_RNA (1)...(19): siRNA sense strand
gggaaauccaaggaggaau

SEQ ID NO: 2347485 - RNA, 19 nt, Homo sapiens
  misc_RNA (1)...(19): siRNA sense strand
cggaugagauugaggcccu

SEQ ID NO: 2347486 - RNA, 19 nt, Homo sapiens
  misc_RNA (1)...(19): siRNA sense strand
cugaggaacuagaugucau

SEQ ID NO: 2347487 - RNA, 19 nt, Homo sapiens
  misc_RNA (1)...(19): siRNA sense strand
ggaaaggggcagucagcau

SEQ ID NO: 2347488 - RNA, 19 nt, Homo sapiens
  misc_RNA (1)...(19): siRNA sense strand
ugguggaugaugaggccaa

SEQ ID NO: 2347489 - RNA, 19 nt, Homo sapiens
  misc_RNA (1)...(19): siRNA sense strand
ucauccaggccaagggcua

SEQ ID NO: 2347490 - RNA, 19 nt, Homo sapiens
  misc_RNA (1)...(19): siRNA sense strand
gcaccaggcuguugaggac

SEQ ID NO: 2347491 - RNA, 19 nt, Homo sapiens
  misc_RNA (1)...(19): siRNA sense strand
ggaacguggugguggucgu

SEQ ID NO: 2347492 - RNA, 19 nt, Homo sapiens
  misc_RNA (1)...(19): siRNA sense strand
augucuaugagaagggcaa

SEQ ID NO: 2347493 - RNA, 19 nt, Homo sapiens
  misc_RNA (1)...(19): siRNA sense strand
uaaagcuggacgugggcaa

SEQ ID NO: 2347494 - RNA, 19 nt, Homo sapiens
  misc_RNA (1)...(19): siRNA sense strand
ggacagggaacgugguggu

SEQ ID NO: 2347495 - RNA, 19 nt, Homo sapiens
  misc_RNA (1)...(19): siRNA sense strand
ucuaaggaagagugggaaa

SEQ ID NO: 2347496 - RNA, 19 nt, Homo sapiens
  misc_RNA (1)...(19): siRNA sense strand
agagaaaguaugaggccau

SEQ ID NO: 2347497 - RNA, 19 nt, Homo sapiens
  misc_RNA (1)...(19): siRNA sense strand
guguauaugaagagaaagu

SEQ ID NO: 2347498 - RNA, 19 nt, Homo sapiens
  misc_RNA (1)...(19): siRNA sense strand
cucaaauaccagagaagau

SEQ ID NO: 2347499 - RNA, 19 nt, Homo sapiens
  misc_RNA (1)...(19): siRNA sense strand
ucggcaggcuccagggaau

SEQ ID NO: 2347500 - RNA, 19 nt, Homo sapiens
  misc_RNA (1)...(19): siRNA sense strand
auaccagagaagauacaaa

SEQ ID NO: 2347501 - RNA, 19 nt, Homo sapiens
  misc_RNA (1)...(19): siRNA sense strand
ccaagaagccagcagagga

SEQ ID NO: 2347502 - RNA, 19 nt, Homo sapiens
  misc_RNA (1)...(19): siRNA sense strand
agccagcagaggaaggaaa

SEQ ID NO: 2347503 - RNA, 19 nt, Homo sapiens
  misc_RNA (1)...(19): siRNA sense strand
aaguaugaggccaugacua

SEQ ID NO: 2347504 - RNA, 19 nt, Homo sapiens
  misc_RNA (1)...(19): siRNA sense strand
ucuaaggaagagugggaaa

SEQ ID NO: 2347505 - RNA, 19 nt, Homo sapiens
  misc_RNA (1)...(19): siRNA sense strand
agagaaaguaugaggccau

SEQ ID NO: 2347506 - RNA, 19 nt, Homo sapiens
  misc_RNA (1)...(19): siRNA sense strand
guguauaugaagagaaagu

SEQ ID NO: 2347507 - RNA, 19 nt, Homo sapiens
  misc_RNA (1)...(19): siRNA sense strand
cucaaauaccagagaagau

SEQ ID NO: 2347508 - RNA, 19 nt, Homo sapiens
  misc_RNA (1)...(19): siRNA sense strand
ucggcaggcuccagggaau

SEQ ID NO: 2347509 - RNA, 19 nt, Homo sapiens
  misc_RNA (1)...(19): siRNA sense strand
auaccagagaagauacaaa

SEQ ID NO: 2347510 - RNA, 19 nt, Homo sapiens
  misc_RNA (1)...(19): siRNA sense strand
ccaagaagccagcagagga

SEQ ID NO: 2347511 - RNA, 19 nt, Homo sapiens
  misc_RNA (1)...(19): siRNA sense strand
agccagcagaggaaggaaa

SEQ ID NO: 2347512 - RNA, 19 nt, Homo sapiens
  misc_RNA (1)...(19): siRNA sense strand
aaguaugaggccaugacua

SEQ ID NO: 2347513 - RNA, 19 nt, Homo sapiens
  misc_RNA (1)...(19): siRNA sense strand
ccuucaacuuccagggcaa

SEQ ID NO: 2347514 - RNA, 19 nt, Homo sapiens
  misc_RNA (1)...(19): siRNA sense strand
gguagagaauggagccgaa

SEQ ID NO: 2347515 - RNA, 19 nt, Homo sapiens
  misc_RNA (1)...(19): siRNA sense strand
uggaaaugccagagaagga

SEQ ID NO: 2347516 - RNA, 19 nt, Homo sapiens
  misc_RNA (1)...(19): siRNA sense strand
agguggagcugguggacau

SEQ ID NO: 2347517 - RNA, 19 nt, Homo sapiens
  misc_RNA (1)...(19): siRNA sense strand
cagcaauaacacaggggaa

SEQ ID NO: 2347518 - RNA, 19 nt, Homo sapiens
  misc_RNA (1)...(19): siRNA sense strand
ccgaauacaucuuggagac

SEQ ID NO: 2347519 - RNA, 19 nt, Homo sapiens
  misc_RNA (1)...(19): siRNA sense strand
ccguggacuuugcgcacaa

SEQ ID NO: 2347520 - RNA, 19 nt, Homo sapiens
  misc_RNA (1)...(19): siRNA sense strand
cagaagcacucguggguag

SEQ ID NO: 2347521 - RNA, 19 nt, Homo sapiens
  misc_RNA (1)...(19): siRNA sense strand
agacggaucccgaggcuga

SEQ ID NO: 2347522 - RNA, 19 nt, Homo sapiens
  misc_RNA (1)...(19): siRNA sense strand
gcgcacaaguucugccguu

SEQ ID NO: 2347523 - RNA, 19 nt, Homo sapiens
  misc_RNA (1)...(19): siRNA sense strand
ccagagaaggauaacacau

SEQ ID NO: 2347524 - RNA, 19 nt, Homo sapiens
  misc_RNA (1)...(19): siRNA sense strand
ccggugacagugaggaaga

SEQ ID NO: 2347525 - RNA, 19 nt, Homo sapiens
  misc_RNA (1)...(19): siRNA sense strand
ggaacagggugcagagacg

SEQ ID NO: 2347526 - RNA, 19 nt, Homo sapiens
  misc_RNA (1)...(19): siRNA sense strand
ccaccaugccccuggaaau

SEQ ID NO: 2347527 - RNA, 19 nt, Homo sapiens
  misc_RNA (1)...(19): siRNA sense strand
cguccucaagguagagaau

SEQ ID NO: 2347528 - RNA, 19 nt, Homo sapiens
  misc_RNA (1)...(19): siRNA sense strand
uagagaauggagccgaaua

SEQ ID NO: 2347529 - RNA, 19 nt, Homo sapiens
  misc_RNA (1)...(19): siRNA sense strand
ggaaagagguucagccaga

SEQ ID NO: 2347530 - RNA, 19 nt, Homo sapiens
  misc_RNA (1)...(19): siRNA sense strand
ccaacaugagggugcagaa

SEQ ID NO: 2347531 - RNA, 19 nt, Homo sapiens
  misc_RNA (1)...(19): siRNA sense strand
gggaugaagugggccgaga

SEQ ID NO: 2347532 - RNA, 19 nt, Homo sapiens
  misc_RNA (1)...(19): siRNA sense strand
gcggaaagagguucagcca

SEQ ID NO: 2347533 - RNA, 19 nt, Homo sapiens
  misc_RNA (1)...(19): siRNA sense strand
ggaugaggcucuacgggaa

SEQ ID NO: 2347534 - RNA, 19 nt, Homo sapiens
  misc_RNA (1)...(19): siRNA sense strand
ccacaguagaagugacaga

SEQ ID NO: 2347535 - RNA, 19 nt, Homo sapiens
  misc_RNA (1)...(19): siRNA sense strand
ugacaagggaauugggaug

SEQ ID NO: 2347536 - RNA, 19 nt, Homo sapiens
  misc_RNA (1)...(19): siRNA sense strand
acaaggaagaaguugccua

SEQ ID NO: 2347537 - RNA, 19 nt, Homo sapiens
  misc_RNA (1)...(19): siRNA sense strand
gaagauggcucucugcaga

SEQ ID NO: 2347538 - RNA, 19 nt, Homo sapiens
  misc_RNA (1)...(19): siRNA sense strand
aagaaguugccuaugaaga

SEQ ID NO: 2347539 - RNA, 19 nt, Homo sapiens
  misc_RNA (1)...(19): siRNA sense strand
ucaacaagcugcugggcaa

SEQ ID NO: 2347540 - RNA, 19 nt, Homo sapiens
  misc_RNA (1)...(19): siRNA sense strand
uggcaagcagggaggcaaa

SEQ ID NO: 2347541 - RNA, 19 nt, Homo sapiens
  misc_RNA (1)...(19): siRNA sense strand
accacaaggcgaagggcaa

SEQ ID NO: 2347542 - RNA, 19 nt, Homo sapiens
  misc_RNA (1)...(19): siRNA sense strand
ccgccgagauccuggaacu

SEQ ID NO: 2347543 - RNA, 19 nt, Homo sapiens
  misc_RNA (1)...(19): siRNA sense strand
acgacgaggagcucaacaa

SEQ ID NO: 2347544 - RNA, 19 nt, Homo sapiens
  misc_RNA (1)...(19): siRNA sense strand
cguccaaggccaugggcau

SEQ ID NO: 2347545 - RNA, 19 nt, Homo sapiens
  misc_RNA (1)...(19): siRNA sense strand
cgcagaagaaagacggcaa

SEQ ID NO: 2347546 - RNA, 19 nt, Homo sapiens
  misc_RNA (1)...(19): siRNA sense strand
gugacuaaggcgcagaaga

SEQ ID NO: 2347547 - RNA, 19 nt, Homo sapiens
  misc_RNA (1)...(19): siRNA sense strand
aagcaaaguaucagggcaa

SEQ ID NO: 2347548 - RNA, 19 nt, Homo sapiens
  misc_RNA (1)...(19): siRNA sense strand
cggaguuccuagugcaaau

SEQ ID NO: 2347549 - RNA, 19 nt, Homo sapiens
  misc_RNA (1)...(19): siRNA sense strand
agggcaaaguguacagaau

SEQ ID NO: 2347550 - RNA, 19 nt, Homo sapiens
  misc_RNA (1)...(19): siRNA sense strand
guguagacaaugauggaau

SEQ ID NO: 2347551 - RNA, 19 nt, Homo sapiens
  misc_RNA (1)...(19): siRNA sense strand
uaggcgaagauuugagaaa

SEQ ID NO: 2347552 - RNA, 19 nt, Homo sapiens
  misc_RNA (1)...(19): siRNA sense strand
uguuauagaacgaccaaau

SEQ ID NO: 2347553 - RNA, 19 nt, Homo sapiens
  misc_RNA (1)...(19): siRNA sense strand
aauaugaagcacaggguga

SEQ ID NO: 2347554 - RNA, 19 nt, Homo sapiens
  misc_RNA (1)...(19): siRNA sense strand
aggaaaguacagucagcua

SEQ ID NO: 2347555 - RNA, 19 nt, Homo sapiens
  misc_RNA (1)...(19): siRNA sense strand
agccaaagaagcacugaaa

SEQ ID NO: 2347556 - RNA, 19 nt, Homo sapiens
  misc_RNA (1)...(19): siRNA sense strand
cagcagaugagaaggggaa

SEQ ID NO: 2347557 - RNA, 19 nt, Homo sapiens
  misc_RNA (1)...(19): siRNA sense strand
ccaacuugccagagagaac

SEQ ID NO: 2347558 - RNA, 19 nt, Homo sapiens
  misc_RNA (1)...(19): siRNA sense strand
gaggaaaacagaugguuau

SEQ ID NO: 2347559 - RNA, 19 nt, Homo sapiens
  misc_RNA (1)...(19): siRNA sense strand
uggcuaggugaaagugaaa

SEQ ID NO: 2347560 - RNA, 19 nt, Homo sapiens
  misc_RNA (1)...(19): siRNA sense strand
ggaagcagacuuucgggaa

SEQ ID NO: 2347561 - RNA, 19 nt, Homo sapiens
  misc_RNA (1)...(19): siRNA sense strand
aagacaaggcugggaacua

SEQ ID NO: 2347562 - RNA, 19 nt, Homo sapiens
  misc_RNA (1)...(19): siRNA sense strand
ggucacuaucuaacacaaa

SEQ ID NO: 2347563 - RNA, 19 nt, Homo sapiens
  misc_RNA (1)...(19): siRNA sense strand
uggacuugaaggagccaaa

SEQ ID NO: 2347564 - RNA, 19 nt, Homo sapiens
  misc_RNA (1)...(19): siRNA sense strand
cuaaaggaguaccugaaaa

SEQ ID NO: 2347565 - RNA, 19 nt, Homo sapiens
  misc_RNA (1)...(19): siRNA sense strand
aagcagcgcaagaagacaa

SEQ ID NO: 2347566 - RNA, 19 nt, Homo sapiens
  misc_RNA (1)...(19): siRNA sense strand
ugaagcacagggugauaaa

SEQ ID NO: 2347567 - RNA, 19 nt, Homo sapiens
  misc_RNA (1)...(19): siRNA sense strand
gaaugacagugauggggaa

SEQ ID NO: 2347568 - RNA, 19 nt, Homo sapiens
  misc_RNA (1)...(19): siRNA sense strand
ggauggaugucccuggaga

SEQ ID NO: 2347569 - RNA, 19 nt, Homo sapiens
  misc_RNA (1)...(19): siRNA sense strand
gcacagggugauaaagcca

SEQ ID NO: 2347570 - RNA, 19 nt, Homo sapiens
  misc_RNA (1)...(19): siRNA sense strand
cguuaaauaugaagcacag

SEQ ID NO: 2347571 - RNA, 19 nt, Homo sapiens
  misc_RNA (1)...(19): siRNA sense strand
ugccauuguuauagaacga

SEQ ID NO: 2347572 - RNA, 19 nt, Homo sapiens
  misc_RNA (1)...(19): siRNA sense strand
cuagcaaagcagcgcaaga

SEQ ID NO: 2347573 - RNA, 19 nt, Homo sapiens
  misc_RNA (1)...(19): siRNA sense strand
aagaagacaaggcugggaa

SEQ ID NO: 2347574 - RNA, 19 nt, Homo sapiens
  misc_RNA (1)...(19): siRNA sense strand
aaaugaaagugaagccgca

SEQ ID NO: 2347575 - RNA, 19 nt, Homo sapiens
  misc_RNA (1)...(19): siRNA sense strand
ucuaaguggcuaggugaaa

SEQ ID NO: 2347576 - RNA, 19 nt, Homo sapiens
  misc_RNA (1)...(19): siRNA sense strand
cguagaauuaagacggagu

SEQ ID NO: 2347577 - RNA, 19 nt, Homo sapiens
  misc_RNA (1)...(19): siRNA sense strand
cgggaacuugggaggaaaa

SEQ ID NO: 2347578 - RNA, 19 nt, Homo sapiens
  misc_RNA (1)...(19): siRNA sense strand
cgaccaaaugugaaaugga

SEQ ID NO: 2347579 - RNA, 19 nt, Homo sapiens
  misc_RNA (1)...(19): siRNA sense strand
ucacagauaaagagaacaa

SEQ ID NO: 2347580 - RNA, 19 nt, Homo sapiens
  misc_RNA (1)...(19): siRNA sense strand
agccaauaauccagauaua

SEQ ID NO: 2347581 - RNA, 19 nt, Homo sapiens
  misc_RNA (1)...(19): siRNA sense strand
gggaauugugcaagccaua

SEQ ID NO: 2347582 - RNA, 19 nt, Homo sapiens
  misc_RNA (1)...(19): siRNA sense strand
guuaaaucucccaaggaaa

SEQ ID NO: 2347583 - RNA, 19 nt, Homo sapiens
  misc_RNA (1)...(19): siRNA sense strand
gggaguggaacgagugauu

SEQ ID NO: 2347584 - RNA, 19 nt, Homo sapiens
  misc_RNA (1)...(19): siRNA sense strand
caagcauccagaagagaaa

SEQ ID NO: 2347585 - RNA, 19 nt, Homo sapiens
  misc_RNA (1)...(19): siRNA sense strand
agaaagacgacaagccaau

SEQ ID NO: 2347586 - RNA, 19 nt, Homo sapiens
  misc_RNA (1)...(19): siRNA sense strand
uaucaaacaaagugagcau

SEQ ID NO: 2347587 - RNA, 19 nt, Homo sapiens
  misc_RNA (1)...(19): siRNA sense strand
gagaaagacgacaagccaa

SEQ ID NO: 2347588 - RNA, 19 nt, Homo sapiens
  misc_RNA (1)...(19): siRNA sense strand
gggauguauucacggaaga

SEQ ID NO: 2347589 - RNA, 19 nt, Homo sapiens
  misc_RNA (1)...(19): siRNA sense strand
ccccacaauugaaggaaaa

SEQ ID NO: 2347590 - RNA, 19 nt, Homo sapiens
  misc_RNA (1)...(19): siRNA sense strand
ggauacagggauugcuaca

SEQ ID NO: 2347591 - RNA, 19 nt, Homo sapiens
  misc_RNA (1)...(19): siRNA sense strand
aucauaaugccgagaacaa

SEQ ID NO: 2347592 - RNA, 19 nt, Homo sapiens
  misc_RNA (1)...(19): siRNA sense strand
ugucacagauaaagagaac

SEQ ID NO: 2347593 - RNA, 19 nt, Homo sapiens
  misc_RNA (1)...(19): siRNA sense strand
uccuaagacuagccaauaa

SEQ ID NO: 2347594 - RNA, 19 nt, Homo sapiens
  misc_RNA (1)...(19): siRNA sense strand
auggagaccaagaaggcaa

SEQ ID NO: 2347595 - RNA, 19 nt, Homo sapiens
  misc_RNA (1)...(19): siRNA sense strand
cugauagguauguaggauu

SEQ ID NO: 2347596 - RNA, 19 nt, Homo sapiens
  misc_RNA (1)...(19): siRNA sense strand
agaccaagaaggcaagaga

SEQ ID NO: 2347597 - RNA, 19 nt, Homo sapiens
  misc_RNA (1)...(19): siRNA sense strand
agcuauugcuugugcugaa

SEQ ID NO: 2347598 - RNA, 19 nt, Homo sapiens
  misc_RNA (1)...(19): siRNA sense strand
gaucaagcucggcuaggaa

SEQ ID NO: 2347599 - RNA, 19 nt, Homo sapiens
  misc_RNA (1)...(19): siRNA sense strand
ccuaugaagaugauguuga

SEQ ID NO: 2347600 - RNA, 19 nt, Homo sapiens
  misc_RNA (1)...(19): siRNA sense strand
agaagagaaagcaucauaa

SEQ ID NO: 2347601 - RNA, 19 nt, Homo sapiens
  misc_RNA (1)...(19): siRNA sense strand
aaaaggaaguagagagauc

SEQ ID NO: 2347602 - RNA, 19 nt, Homo sapiens
  misc_RNA (1)...(19): siRNA sense strand
ccacaaaguaauuaaagcu

SEQ ID NO: 2347603 - RNA, 19 nt, Homo sapiens
  misc_RNA (1)...(19): siRNA sense strand
aggaaugugcagacagcuu

SEQ ID NO: 2347604 - RNA, 19 nt, Homo sapiens
  misc_RNA (1)...(19): siRNA sense strand
caagaugaauaucacggua

SEQ ID NO: 2347605 - RNA, 19 nt, Homo sapiens
  misc_RNA (1)...(19): siRNA sense strand
agauguagcacguaauuca

SEQ ID NO: 2347606 - RNA, 19 nt, Homo sapiens
  misc_RNA (1)...(19): siRNA sense strand
agacacaccucuaaggaac

SEQ ID NO: 2347607 - RNA, 19 nt, Homo sapiens
  misc_RNA (1)...(19): siRNA sense strand
guuacuaucucaugggauc

SEQ ID NO: 2347608 - RNA, 19 nt, Homo sapiens
  misc_RNA (1)...(19): siRNA sense strand
agcauuuggcauaggaauu

SEQ ID NO: 2347609 - RNA, 19 nt, Homo sapiens
  misc_RNA (1)...(19): siRNA sense strand
aggaaaucauccauuguga

SEQ ID NO: 2347610 - RNA, 19 nt, Homo sapiens
  misc_RNA (1)...(19): siRNA sense strand
cugaugugucgcaguuaaa

SEQ ID NO: 2347611 - RNA, 19 nt, Homo sapiens
  misc_RNA (1)...(19): siRNA sense strand
gccagugggcugagcaaga

SEQ ID NO: 2347612 - RNA, 19 nt, Homo sapiens
  misc_RNA (1)...(19): siRNA sense strand
cagcauuuggcauaggaau

SEQ ID NO: 2347613 - RNA, 19 nt, Homo sapiens
  misc_RNA (1)...(19): siRNA sense strand
cggaagcucgagaguguuu

SEQ ID NO: 2347614 - RNA, 19 nt, Homo sapiens
  misc_RNA (1)...(19): siRNA sense strand
gaaagcaacuucuucguga

SEQ ID NO: 2347615 - RNA, 19 nt, Homo sapiens
  misc_RNA (1)...(19): siRNA sense strand
agguaguagcuguggauac

SEQ ID NO: 2347616 - RNA, 19 nt, Homo sapiens
  misc_RNA (1)...(19): siRNA sense strand
caagagacugguugacaca

SEQ ID NO: 2347617 - RNA, 19 nt, Homo sapiens
  misc_RNA (1)...(19): siRNA sense strand
gucuggaggucuuggagau

SEQ ID NO: 2347618 - RNA, 19 nt, Homo sapiens
  misc_RNA (1)...(19): siRNA sense strand
aguuaaagagcgaggaguc

SEQ ID NO: 2347619 - RNA, 19 nt, Homo sapiens
  misc_RNA (1)...(19): siRNA sense strand
aggauuacaucaacggguu

SEQ ID NO: 2347620 - RNA, 19 nt, Homo sapiens
  misc_RNA (1)...(19): siRNA sense strand
ggauuacaucaacggguuu

SEQ ID NO: 2347621 - RNA, 19 nt, Homo sapiens
  misc_RNA (1)...(19): siRNA sense strand
uucaaauagcacuuggaaa

SEQ ID NO: 2347622 - RNA, 19 nt, Homo sapiens
  misc_RNA (1)...(19): siRNA sense strand
aaaacuagccaaaggugaa

SEQ ID NO: 2347623 - RNA, 19 nt, Homo sapiens
  misc_RNA (1)...(19): siRNA sense strand
aguauaaagggcagguagu

SEQ ID NO: 2347624 - RNA, 19 nt, Homo sapiens
  misc_RNA (1)...(19): siRNA sense strand
cggcaagcauccagaagag

SEQ ID NO: 2347625 - RNA, 19 nt, Homo sapiens
  misc_RNA (1)...(19): siRNA sense strand
auguauucacggaagagaa

SEQ ID NO: 2347626 - RNA, 19 nt, Homo sapiens
  misc_RNA (1)...(19): siRNA sense strand
gcccauucaagaagucaua

SEQ ID NO: 2347627 - RNA, 19 nt, Homo sapiens
  misc_RNA (1)...(19): siRNA sense strand
caaagaagcuucagaaccc

SEQ ID NO: 2347628 - RNA, 19 nt, Homo sapiens
  misc_RNA (1)...(19): siRNA sense strand
ugacuguguaucaaacaaa

SEQ ID NO: 2347629 - RNA, 19 nt, Homo sapiens
  misc_RNA (1)...(19): siRNA sense strand
ucauauuccaggugaucau

SEQ ID NO: 2347630 - RNA, 19 nt, Homo sapiens
  misc_RNA (1)...(19): siRNA sense strand
ucacagauaaagagaacaa

SEQ ID NO: 2347631 - RNA, 19 nt, Homo sapiens
  misc_RNA (1)...(19): siRNA sense strand
agccaauaauccagauaua

SEQ ID NO: 2347632 - RNA, 19 nt, Homo sapiens
  misc_RNA (1)...(19): siRNA sense strand
gggaauugugcaagccaua

SEQ ID NO: 2347633 - RNA, 19 nt, Homo sapiens
  misc_RNA (1)...(19): siRNA sense strand
guuaaaucucccaaggaaa

SEQ ID NO: 2347634 - RNA, 19 nt, Homo sapiens
  misc_RNA (1)...(19): siRNA sense strand
cagaagcggaagaggauau

SEQ ID NO: 2347635 - RNA, 19 nt, Homo sapiens
  misc_RNA (1)...(19): siRNA sense strand
gggaguggaacgagugauu

SEQ ID NO: 2347636 - RNA, 19 nt, Homo sapiens
  misc_RNA (1)...(19): siRNA sense strand
caagcauccagaagagaaa

SEQ ID NO: 2347637 - RNA, 19 nt, Homo sapiens
  misc_RNA (1)...(19): siRNA sense strand
agaaagacgacaagccaau

SEQ ID NO: 2347638 - RNA, 19 nt, Homo sapiens
  misc_RNA (1)...(19): siRNA sense strand
uaucaaacaaagugagcau

SEQ ID NO: 2347639 - RNA, 19 nt, Homo sapiens
  misc_RNA (1)...(19): siRNA sense strand
gagaaagacgacaagccaa

SEQ ID NO: 2347640 - RNA, 19 nt, Homo sapiens
  misc_RNA (1)...(19): siRNA sense strand
gggauguauucacggaaga

SEQ ID NO: 2347641 - RNA, 19 nt, Homo sapiens
  misc_RNA (1)...(19): siRNA sense strand
ccccacaauugaaggaaaa

SEQ ID NO: 2347642 - RNA, 19 nt, Homo sapiens
  misc_RNA (1)...(19): siRNA sense strand
ccguguucaaagagcaaua

SEQ ID NO: 2347643 - RNA, 19 nt, Homo sapiens
  misc_RNA (1)...(19): siRNA sense strand
ggauacagggauugcuaca

SEQ ID NO: 2347644 - RNA, 19 nt, Homo sapiens
  misc_RNA (1)...(19): siRNA sense strand
aucauaaugccgagaacaa

SEQ ID NO: 2347645 - RNA, 19 nt, Homo sapiens
  misc_RNA (1)...(19): siRNA sense strand
ugucacagauaaagagaac

SEQ ID NO: 2347646 - RNA, 19 nt, Homo sapiens
  misc_RNA (1)...(19): siRNA sense strand
gcuuccuccuuguaagaaa

SEQ ID NO: 2347647 - RNA, 19 nt, Homo sapiens
  misc_RNA (1)...(19): siRNA sense strand
uccuaagacuagccaauaa

SEQ ID NO: 2347648 - RNA, 19 nt, Homo sapiens
  misc_RNA (1)...(19): siRNA sense strand
auggagaccaagaaggcaa

SEQ ID NO: 2347649 - RNA, 19 nt, Homo sapiens
  misc_RNA (1)...(19): siRNA sense strand
cugauagguauguaggauu

SEQ ID NO: 2347650 - RNA, 19 nt, Homo sapiens
  misc_RNA (1)...(19): siRNA sense strand
agaccaagaaggcaagaga

SEQ ID NO: 2347651 - RNA, 19 nt, Homo sapiens
  misc_RNA (1)...(19): siRNA sense strand
agcuauugcuugugcugaa

SEQ ID NO: 2347652 - RNA, 19 nt, Homo sapiens
  misc_RNA (1)...(19): siRNA sense strand
gaucaagcucggcuaggaa

SEQ ID NO: 2347653 - RNA, 19 nt, Homo sapiens
  misc_RNA (1)...(19): siRNA sense strand
ccuaugaagaugauguuga

SEQ ID NO: 2347654 - RNA, 19 nt, Homo sapiens
  misc_RNA (1)...(19): siRNA sense strand
agaagagaaagcaucauaa

SEQ ID NO: 2347655 - RNA, 19 nt, Homo sapiens
  misc_RNA (1)...(19): siRNA sense strand
aaaaggaaguagagagauc

SEQ ID NO: 2347656 - RNA, 19 nt, Homo sapiens
  misc_RNA (1)...(19): siRNA sense strand
ccacaaaguaauuaaagcu

SEQ ID NO: 2347657 - RNA, 19 nt, Homo sapiens
  misc_RNA (1)...(19): siRNA sense strand
aggaaugugcagacagcuu

SEQ ID NO: 2347658 - RNA, 19 nt, Homo sapiens
  misc_RNA (1)...(19): siRNA sense strand
caagaugaauaucacggua

SEQ ID NO: 2347659 - RNA, 19 nt, Homo sapiens
  misc_RNA (1)...(19): siRNA sense strand
agauguagcacguaauuca

SEQ ID NO: 2347660 - RNA, 19 nt, Homo sapiens
  misc_RNA (1)...(19): siRNA sense strand
agacacaccucuaaggaac

SEQ ID NO: 2347661 - RNA, 19 nt, Homo sapiens
  misc_RNA (1)...(19): siRNA sense strand
guuacuaucucaugggauc

SEQ ID NO: 2347662 - RNA, 19 nt, Homo sapiens
  misc_RNA (1)...(19): siRNA sense strand
agcauuuggcauaggaauu

SEQ ID NO: 2347663 - RNA, 19 nt, Homo sapiens
  misc_RNA (1)...(19): siRNA sense strand
aggaaaucauccauuguga

SEQ ID NO: 2347664 - RNA, 19 nt, Homo sapiens
  misc_RNA (1)...(19): siRNA sense strand
cugaugugucgcaguuaaa

SEQ ID NO: 2347665 - RNA, 19 nt, Homo sapiens
  misc_RNA (1)...(19): siRNA sense strand
gccagugggcugagcaaga

SEQ ID NO: 2347666 - RNA, 19 nt, Homo sapiens
  misc_RNA (1)...(19): siRNA sense strand
cagcauuuggcauaggaau

SEQ ID NO: 2347667 - RNA, 19 nt, Homo sapiens
  misc_RNA (1)...(19): siRNA sense strand
aagcggaagaggauauauu

SEQ ID NO: 2347668 - RNA, 19 nt, Homo sapiens
  misc_RNA (1)...(19): siRNA sense strand
cggaagcucgagaguguuu

SEQ ID NO: 2347669 - RNA, 19 nt, Homo sapiens
  misc_RNA (1)...(19): siRNA sense strand
gaaagcaacuucuucguga

SEQ ID NO: 2347670 - RNA, 19 nt, Homo sapiens
  misc_RNA (1)...(19): siRNA sense strand
agguaguagcuguggauac

SEQ ID NO: 2347671 - RNA, 19 nt, Homo sapiens
  misc_RNA (1)...(19): siRNA sense strand
caagagacugguugacaca

SEQ ID NO: 2347672 - RNA, 19 nt, Homo sapiens
  misc_RNA (1)...(19): siRNA sense strand
gucuggaggucuuggagau

SEQ ID NO: 2347673 - RNA, 19 nt, Homo sapiens
  misc_RNA (1)...(19): siRNA sense strand
aguuaaagagcgaggaguc

SEQ ID NO: 2347674 - RNA, 19 nt, Homo sapiens
  misc_RNA (1)...(19): siRNA sense strand
aaaacuagccaaaggugaa

SEQ ID NO: 2347675 - RNA, 19 nt, Homo sapiens
  misc_RNA (1)...(19): siRNA sense strand
aggauuacaucaacggguu

SEQ ID NO: 2347676 - RNA, 19 nt, Homo sapiens
  misc_RNA (1)...(19): siRNA sense strand
ggauuacaucaacggguuu

SEQ ID NO: 2347677 - RNA, 19 nt, Homo sapiens
  misc_RNA (1)...(19): siRNA sense strand
uucaaauagcacuuggaaa

SEQ ID NO: 2347678 - RNA, 19 nt, Homo sapiens
  misc_RNA (1)...(19): siRNA sense strand
ucacagauaaagagaacaa

SEQ ID NO: 2347679 - RNA, 19 nt, Homo sapiens
  misc_RNA (1)...(19): siRNA sense strand
agccaauaauccagauaua

SEQ ID NO: 2347680 - RNA, 19 nt, Homo sapiens
  misc_RNA (1)...(19): siRNA sense strand
gggaauugugcaagccaua

SEQ ID NO: 2347681 - RNA, 19 nt, Homo sapiens
  misc_RNA (1)...(19): siRNA sense strand
guuaaaucucccaaggaaa

SEQ ID NO: 2347682 - RNA, 19 nt, Homo sapiens
  misc_RNA (1)...(19): siRNA sense strand
cagaagcggaagaggauau

SEQ ID NO: 2347683 - RNA, 19 nt, Homo sapiens
  misc_RNA (1)...(19): siRNA sense strand
gggaguggaacgagugauu

SEQ ID NO: 2347684 - RNA, 19 nt, Homo sapiens
  misc_RNA (1)...(19): siRNA sense strand
caagcauccagaagagaaa

SEQ ID NO: 2347685 - RNA, 19 nt, Homo sapiens
  misc_RNA (1)...(19): siRNA sense strand
agaaagacgacaagccaau

SEQ ID NO: 2347686 - RNA, 19 nt, Homo sapiens
  misc_RNA (1)...(19): siRNA sense strand
uaucaaacaaagugagcau

SEQ ID NO: 2347687 - RNA, 19 nt, Homo sapiens
  misc_RNA (1)...(19): siRNA sense strand
gagaaagacgacaagccaa

SEQ ID NO: 2347688 - RNA, 19 nt, Homo sapiens
  misc_RNA (1)...(19): siRNA sense strand
gggauguauucacggaaga

SEQ ID NO: 2347689 - RNA, 19 nt, Homo sapiens
  misc_RNA (1)...(19): siRNA sense strand
ccccacaauugaaggaaaa

SEQ ID NO: 2347690 - RNA, 19 nt, Homo sapiens
  misc_RNA (1)...(19): siRNA sense strand
ccguguucaaagagcaaua

SEQ ID NO: 2347691 - RNA, 19 nt, Homo sapiens
  misc_RNA (1)...(19): siRNA sense strand
ggauacagggauugcuaca

SEQ ID NO: 2347692 - RNA, 19 nt, Homo sapiens
  misc_RNA (1)...(19): siRNA sense strand
aucauaaugccgagaacaa

SEQ ID NO: 2347693 - RNA, 19 nt, Homo sapiens
  misc_RNA (1)...(19): siRNA sense strand
ugucacagauaaagagaac

SEQ ID NO: 2347694 - RNA, 19 nt, Homo sapiens
  misc_RNA (1)...(19): siRNA sense strand
gcuuccuccuuguaagaaa

SEQ ID NO: 2347695 - RNA, 19 nt, Homo sapiens
  misc_RNA (1)...(19): siRNA sense strand
uccuaagacuagccaauaa

SEQ ID NO: 2347696 - RNA, 19 nt, Homo sapiens
  misc_RNA (1)...(19): siRNA sense strand
auggagaccaagaaggcaa

SEQ ID NO: 2347697 - RNA, 19 nt, Homo sapiens
  misc_RNA (1)...(19): siRNA sense strand
cugauagguauguaggauu

SEQ ID NO: 2347698 - RNA, 19 nt, Homo sapiens
  misc_RNA (1)...(19): siRNA sense strand
agaccaagaaggcaagaga

SEQ ID NO: 2347699 - RNA, 19 nt, Homo sapiens
  misc_RNA (1)...(19): siRNA sense strand
agcuauugcuugugcugaa

SEQ ID NO: 2347700 - RNA, 19 nt, Homo sapiens
  misc_RNA (1)...(19): siRNA sense strand
gaucaagcucggcuaggaa

SEQ ID NO: 2347701 - RNA, 19 nt, Homo sapiens
  misc_RNA (1)...(19): siRNA sense strand
ccuaugaagaugauguuga

SEQ ID NO: 2347702 - RNA, 19 nt, Homo sapiens
  misc_RNA (1)...(19): siRNA sense strand
agaagagaaagcaucauaa

SEQ ID NO: 2347703 - RNA, 19 nt, Homo sapiens
  misc_RNA (1)...(19): siRNA sense strand
aaaaggaaguagagagauc

SEQ ID NO: 2347704 - RNA, 19 nt, Homo sapiens
  misc_RNA (1)...(19): siRNA sense strand
ccacaaaguaauuaaagcu

SEQ ID NO: 2347705 - RNA, 19 nt, Homo sapiens
  misc_RNA (1)...(19): siRNA sense strand
aggaaugugcagacagcuu

SEQ ID NO: 2347706 - RNA, 19 nt, Homo sapiens
  misc_RNA (1)...(19): siRNA sense strand
caagaugaauaucacggua

SEQ ID NO: 2347707 - RNA, 19 nt, Homo sapiens
  misc_RNA (1)...(19): siRNA sense strand
agauguagcacguaauuca

SEQ ID NO: 2347708 - RNA, 19 nt, Homo sapiens
  misc_RNA (1)...(19): siRNA sense strand
agacacaccucuaaggaac

SEQ ID NO: 2347709 - RNA, 19 nt, Homo sapiens
  misc_RNA (1)...(19): siRNA sense strand
guuacuaucucaugggauc

SEQ ID NO: 2347710 - RNA, 19 nt, Homo sapiens
  misc_RNA (1)...(19): siRNA sense strand
agcauuuggcauaggaauu

SEQ ID NO: 2347711 - RNA, 19 nt, Homo sapiens
  misc_RNA (1)...(19): siRNA sense strand
aggaaaucauccauuguga

SEQ ID NO: 2347712 - RNA, 19 nt, Homo sapiens
  misc_RNA (1)...(19): siRNA sense strand
cugaugugucgcaguuaaa

SEQ ID NO: 2347713 - RNA, 19 nt, Homo sapiens
  misc_RNA (1)...(19): siRNA sense strand
gccagugggcugagcaaga

SEQ ID NO: 2347714 - RNA, 19 nt, Homo sapiens
  misc_RNA (1)...(19): siRNA sense strand
cagcauuuggcauaggaau

SEQ ID NO: 2347715 - RNA, 19 nt, Homo sapiens
  misc_RNA (1)...(19): siRNA sense strand
aagcggaagaggauauauu

SEQ ID NO: 2347716 - RNA, 19 nt, Homo sapiens
  misc_RNA (1)...(19): siRNA sense strand
cggaagcucgagaguguuu

SEQ ID NO: 2347717 - RNA, 19 nt, Homo sapiens
  misc_RNA (1)...(19): siRNA sense strand
gaaagcaacuucuucguga

SEQ ID NO: 2347718 - RNA, 19 nt, Homo sapiens
  misc_RNA (1)...(19): siRNA sense strand
agguaguagcuguggauac

SEQ ID NO: 2347719 - RNA, 19 nt, Homo sapiens
  misc_RNA (1)...(19): siRNA sense strand
caagagacugguugacaca

SEQ ID NO: 2347720 - RNA, 19 nt, Homo sapiens
  misc_RNA (1)...(19): siRNA sense strand
gucuggaggucuuggagau

SEQ ID NO: 2347721 - RNA, 19 nt, Homo sapiens
  misc_RNA (1)...(19): siRNA sense strand
aguuaaagagcgaggaguc

SEQ ID NO: 2347722 - RNA, 19 nt, Homo sapiens
  misc_RNA (1)...(19): siRNA sense strand
aaaacuagccaaaggugaa

SEQ ID NO: 2347723 - RNA, 19 nt, Homo sapiens
  misc_RNA (1)...(19): siRNA sense strand
aggauuacaucaacggguu

SEQ ID NO: 2347724 - RNA, 19 nt, Homo sapiens
  misc_RNA (1)...(19): siRNA sense strand
ggauuacaucaacggguuu

SEQ ID NO: 2347725 - RNA, 19 nt, Homo sapiens
  misc_RNA (1)...(19): siRNA sense strand
uucaaauagcacuuggaaa

SEQ ID NO: 2347726 - RNA, 19 nt, Homo sapiens
  misc_RNA (1)...(19): siRNA sense strand
aucaaauacaugugggauu

SEQ ID NO: 2347727 - RNA, 19 nt, Homo sapiens
  misc_RNA (1)...(19): siRNA sense strand
cugaugaauacaaagacaa

SEQ ID NO: 2347728 - RNA, 19 nt, Homo sapiens
  misc_RNA (1)...(19): siRNA sense strand
cugacuacgaggugugcaa

SEQ ID NO: 2347729 - RNA, 19 nt, Homo sapiens
  misc_RNA (1)...(19): siRNA sense strand
ccaacaugaggaacagcaa

SEQ ID NO: 2347730 - RNA, 19 nt, Homo sapiens
  misc_RNA (1)...(19): siRNA sense strand
gguuccagcagaugggaga

SEQ ID NO: 2347731 - RNA, 19 nt, Homo sapiens
  misc_RNA (1)...(19): siRNA sense strand
gcaaaagguugagggguga

SEQ ID NO: 2347732 - RNA, 19 nt, Homo sapiens
  misc_RNA (1)...(19): siRNA sense strand
cggaacgccuggaagcaca

SEQ ID NO: 2347733 - RNA, 19 nt, Homo sapiens
  misc_RNA (1)...(19): siRNA sense strand
aggugaugaugguggccuu

SEQ ID NO: 2347734 - RNA, 19 nt, Homo sapiens
  misc_RNA (1)...(19): siRNA sense strand
agaaagucuccuuaaccaa

SEQ ID NO: 2347735 - RNA, 19 nt, Homo sapiens
  misc_RNA (1)...(19): siRNA sense strand
uucacgaaauacacagaaa

SEQ ID NO: 2347736 - RNA, 19 nt, Homo sapiens
  misc_RNA (1)...(19): siRNA sense strand
ggaagauguccgagcaacu

SEQ ID NO: 2347737 - RNA, 19 nt, Homo sapiens
  misc_RNA (1)...(19): siRNA sense strand
gugucuguagugagagaaa

SEQ ID NO: 2347738 - RNA, 19 nt, Homo sapiens
  misc_RNA (1)...(19): siRNA sense strand
cugaugaagagcagcgaga

SEQ ID NO: 2347739 - RNA, 19 nt, Homo sapiens
  misc_RNA (1)...(19): siRNA sense strand
acacuaaagaauuccggaa

SEQ ID NO: 2347740 - RNA, 19 nt, Homo sapiens
  misc_RNA (1)...(19): siRNA sense strand
ccgagaacgagcugggagu

SEQ ID NO: 2347741 - RNA, 19 nt, Homo sapiens
  misc_RNA (1)...(19): siRNA sense strand
gucuguagugagagaaaca

SEQ ID NO: 2347742 - RNA, 19 nt, Homo sapiens
  misc_RNA (1)...(19): siRNA sense strand
ugugagaugcagugcccua

SEQ ID NO: 2347743 - RNA, 19 nt, Homo sapiens
  misc_RNA (1)...(19): siRNA sense strand
ggaaagagguggcaggccu

SEQ ID NO: 2347744 - RNA, 19 nt, Homo sapiens
  misc_RNA (1)...(19): siRNA sense strand
gaguucaaugagaggacaa

SEQ ID NO: 2347745 - RNA, 19 nt, Homo sapiens
  misc_RNA (1)...(19): siRNA sense strand
aaugagaggacaaaggaca

SEQ ID NO: 2347746 - RNA, 19 nt, Homo sapiens
  misc_RNA (1)...(19): siRNA sense strand
ccucaguucagaagagcuu

SEQ ID NO: 2347747 - RNA, 19 nt, Homo sapiens
  misc_RNA (1)...(19): siRNA sense strand
ggaaagagguggcaggccu

SEQ ID NO: 2347748 - RNA, 19 nt, Homo sapiens
  misc_RNA (1)...(19): siRNA sense strand
gaguucaaugagaggacaa

SEQ ID NO: 2347749 - RNA, 19 nt, Homo sapiens
  misc_RNA (1)...(19): siRNA sense strand
aaugagaggacaaaggaca

SEQ ID NO: 2347750 - RNA, 19 nt, Homo sapiens
  misc_RNA (1)...(19): siRNA sense strand
ccucaguucagaagagcuu

SEQ ID NO: 2347751 - RNA, 19 nt, Homo sapiens
  misc_RNA (1)...(19): siRNA sense strand
ggaaagagguggcaggccu

SEQ ID NO: 2347752 - RNA, 19 nt, Homo sapiens
  misc_RNA (1)...(19): siRNA sense strand
gaguucaaugagaggacaa

SEQ ID NO: 2347753 - RNA, 19 nt, Homo sapiens
  misc_RNA (1)...(19): siRNA sense strand
aaugagaggacaaaggaca

SEQ ID NO: 2347754 - RNA, 19 nt, Homo sapiens
  misc_RNA (1)...(19): siRNA sense strand
gugcaaacguggagccagu

SEQ ID NO: 2347755 - RNA, 19 nt, Homo sapiens
  misc_RNA (1)...(19): siRNA sense strand
uuauaagagaggagcaaau

SEQ ID NO: 2347756 - RNA, 19 nt, Homo sapiens
  misc_RNA (1)...(19): siRNA sense strand
gaggggaagauguggaaaa

SEQ ID NO: 2347757 - RNA, 19 nt, Homo sapiens
  misc_RNA (1)...(19): siRNA sense strand
cuaaaggagcagaugucaa

SEQ ID NO: 2347758 - RNA, 19 nt, Homo sapiens
  misc_RNA (1)...(19): siRNA sense strand
ggaaaaugaggaagaugaa

SEQ ID NO: 2347759 - RNA, 19 nt, Homo sapiens
  misc_RNA (1)...(19): siRNA sense strand
acacagacagugauggcaa

SEQ ID NO: 2347760 - RNA, 19 nt, Homo sapiens
  misc_RNA (1)...(19): siRNA sense strand
gagaagaagcacuuggguu

SEQ ID NO: 2347761 - RNA, 19 nt, Homo sapiens
  misc_RNA (1)...(19): siRNA sense strand
caagagagaucuagaggac

SEQ ID NO: 2347762 - RNA, 19 nt, Homo sapiens
  misc_RNA (1)...(19): siRNA sense strand
aaugugaauuugaggcgaa

SEQ ID NO: 2347763 - RNA, 19 nt, Homo sapiens
  misc_RNA (1)...(19): siRNA sense strand
gugaauuugaggcgaaaga

SEQ ID NO: 2347764 - RNA, 19 nt, Homo sapiens
  misc_RNA (1)...(19): siRNA sense strand
cuuuauaagagaggagcaa

SEQ ID NO: 2347765 - RNA, 19 nt, Homo sapiens
  misc_RNA (1)...(19): siRNA sense strand
gaauuugaggcgaaagaca

SEQ ID NO: 2347766 - RNA, 19 nt, Homo sapiens
  misc_RNA (1)...(19): siRNA sense strand
cauagagauuaaugacaca

SEQ ID NO: 2347767 - RNA, 19 nt, Homo sapiens
  misc_RNA (1)...(19): siRNA sense strand
agagagaucuagaggaccu

SEQ ID NO: 2347768 - RNA, 19 nt, Homo sapiens
  misc_RNA (1)...(19): siRNA sense strand
ggcgaaagacaaaggagga

SEQ ID NO: 2347769 - RNA, 19 nt, Homo sapiens
  misc_RNA (1)...(19): siRNA sense strand
aaguggacgacuaagauua

SEQ ID NO: 2347770 - RNA, 19 nt, Homo sapiens
  misc_RNA (1)...(19): siRNA sense strand
aauuugaggcgaaagacaa

SEQ ID NO: 2347771 - RNA, 19 nt, Homo sapiens
  misc_RNA (1)...(19): siRNA sense strand
gagauuaaugacacagaca

SEQ ID NO: 2347772 - RNA, 19 nt, Homo sapiens
  misc_RNA (1)...(19): siRNA sense strand
cuaugagaagcaagaagua

SEQ ID NO: 2347773 - RNA, 19 nt, Homo sapiens
  misc_RNA (1)...(19): siRNA sense strand
acuacagaacacagaauau

SEQ ID NO: 2347774 - RNA, 19 nt, Homo sapiens
  misc_RNA (1)...(19): siRNA sense strand
gauuaaugacacagacagu

SEQ ID NO: 2347775 - RNA, 19 nt, Homo sapiens
  misc_RNA (1)...(19): siRNA sense strand
ucauggagccaaagaagau

SEQ ID NO: 2347776 - RNA, 19 nt, Homo sapiens
  misc_RNA (1)...(19): siRNA sense strand
ugguaaggucaaagcccua

SEQ ID NO: 2347777 - RNA, 19 nt, Homo sapiens
  misc_RNA (1)...(19): siRNA sense strand
ugacaauaugggcagaaau

SEQ ID NO: 2347778 - RNA, 19 nt, Homo sapiens
  misc_RNA (1)...(19): siRNA sense strand
cugcaguggaagacaauca

SEQ ID NO: 2347779 - RNA, 19 nt, Homo sapiens
  misc_RNA (1)...(19): siRNA sense strand
cacagacagugauggcaaa

SEQ ID NO: 2347780 - RNA, 19 nt, Homo sapiens
  misc_RNA (1)...(19): siRNA sense strand
gcuaaaguucauccggaau

SEQ ID NO: 2347781 - RNA, 19 nt, Homo sapiens
  misc_RNA (1)...(19): siRNA sense strand
acacaaaacuacagaacac

SEQ ID NO: 2347782 - RNA, 19 nt, Homo sapiens
  misc_RNA (1)...(19): siRNA sense strand
cuccagaugaggaaacuaa

SEQ ID NO: 2347783 - RNA, 19 nt, Homo sapiens
  misc_RNA (1)...(19): siRNA sense strand
cuauaggacgcuucggaau

SEQ ID NO: 2347784 - RNA, 19 nt, Homo sapiens
  misc_RNA (1)...(19): siRNA sense strand
gcgaaagacaaaggaggau

SEQ ID NO: 2347785 - RNA, 19 nt, Homo sapiens
  misc_RNA (1)...(19): siRNA sense strand
caguacagauuguggggau

SEQ ID NO: 2347786 - RNA, 19 nt, Homo sapiens
  misc_RNA (1)...(19): siRNA sense strand
uggaaaaugaggaagauga

SEQ ID NO: 2347787 - RNA, 19 nt, Homo sapiens
  misc_RNA (1)...(19): siRNA sense strand
uuugacaaguggacgacua

SEQ ID NO: 2347788 - RNA, 19 nt, Homo sapiens
  misc_RNA (1)...(19): siRNA sense strand
agcaagaaguagcugugaa

SEQ ID NO: 2347789 - RNA, 19 nt, Homo sapiens
  misc_RNA (1)...(19): siRNA sense strand
ggaugugcacagaggggaa

SEQ ID NO: 2347790 - RNA, 19 nt, Homo sapiens
  misc_RNA (1)...(19): siRNA sense strand
cggaaugugggaaaugaau

SEQ ID NO: 2347791 - RNA, 19 nt, Homo sapiens
  misc_RNA (1)...(19): siRNA sense strand
caucaaaacacgaaaaucu

SEQ ID NO: 2347792 - RNA, 19 nt, Homo sapiens
  misc_RNA (1)...(19): siRNA sense strand
cuaaaguucauccggaauu

SEQ ID NO: 2347793 - RNA, 19 nt, Homo sapiens
  misc_RNA (1)...(19): siRNA sense strand
cacagaauauagaaagcau

SEQ ID NO: 2347794 - RNA, 19 nt, Homo sapiens
  misc_RNA (1)...(19): siRNA sense strand
ggagaaagagggaagacuc

SEQ ID NO: 2347795 - RNA, 19 nt, Homo sapiens
  misc_RNA (1)...(19): siRNA sense strand
ugcuaaaguucauccggaa

SEQ ID NO: 2347796 - RNA, 19 nt, Homo sapiens
  misc_RNA (1)...(19): siRNA sense strand
ggaauuugggagaacacau

SEQ ID NO: 2347797 - RNA, 19 nt, Homo sapiens
  misc_RNA (1)...(19): siRNA sense strand
aucaagagcggcugaggaa

SEQ ID NO: 2347798 - RNA, 19 nt, Homo sapiens
  misc_RNA (1)...(19): siRNA sense strand
caggaagucaagagagauc

SEQ ID NO: 2347799 - RNA, 19 nt, Homo sapiens
  misc_RNA (1)...(19): siRNA sense strand
cgacaucaaaacacgaaaa

SEQ ID NO: 2347800 - RNA, 19 nt, Homo sapiens
  misc_RNA (1)...(19): siRNA sense strand
gcaucaagugggcuggaga

SEQ ID NO: 2347801 - RNA, 19 nt, Homo sapiens
  misc_RNA (1)...(19): siRNA sense strand
uggcaguggagaagaagca

SEQ ID NO: 2347802 - RNA, 19 nt, Homo sapiens
  misc_RNA (1)...(19): siRNA sense strand
aaggacacguagaggucuu

SEQ ID NO: 2347803 - RNA, 19 nt, Homo sapiens
  misc_RNA (1)...(19): siRNA sense strand
gcugauuaaagcuguucaa

SEQ ID NO: 2347804 - RNA, 19 nt, Homo sapiens
  misc_RNA (1)...(19): siRNA sense strand
agguggagccaauguuaau

SEQ ID NO: 2347805 - RNA, 19 nt, Homo sapiens
  misc_RNA (1)...(19): siRNA sense strand
guacaaaugagcagggagg

SEQ ID NO: 2347806 - RNA, 19 nt, Homo sapiens
  misc_RNA (1)...(19): siRNA sense strand
cuguguaugguaaggucaa

SEQ ID NO: 2347807 - RNA, 19 nt, Homo sapiens
  misc_RNA (1)...(19): siRNA sense strand
ggaauuaccucgagggcau

SEQ ID NO: 2347808 - RNA, 19 nt, Homo sapiens
  misc_RNA (1)...(19): siRNA sense strand
gagaggcagcagaggcaga

SEQ ID NO: 2347809 - RNA, 19 nt, Homo sapiens
  misc_RNA (1)...(19): siRNA sense strand
aggguggaccucaggaauu

SEQ ID NO: 2347810 - RNA, 19 nt, Homo sapiens
  misc_RNA (1)...(19): siRNA sense strand
gguugugcugacugagaaa

SEQ ID NO: 2347811 - RNA, 19 nt, Homo sapiens
  misc_RNA (1)...(19): siRNA sense strand
gcaaggaagugcugcugga

SEQ ID NO: 2347812 - RNA, 19 nt, Homo sapiens
  misc_RNA (1)...(19): siRNA sense strand
caggcaagggauugaaaca

SEQ ID NO: 2347813 - RNA, 19 nt, Homo sapiens
  misc_RNA (1)...(19): siRNA sense strand
agagcaagaaacaguggaa

SEQ ID NO: 2347814 - RNA, 19 nt, Homo sapiens
  misc_RNA (1)...(19): siRNA sense strand
aagugaaguacaugcgaga

SEQ ID NO: 2347815 - RNA, 19 nt, Homo sapiens
  misc_RNA (1)...(19): siRNA sense strand
ggagcauaguacaggguug

SEQ ID NO: 2347816 - RNA, 19 nt, Homo sapiens
  misc_RNA (1)...(19): siRNA sense strand
ccugcugacccgagugauu

SEQ ID NO: 2347817 - RNA, 19 nt, Homo sapiens
  misc_RNA (1)...(19): siRNA sense strand
auacagucuccuuaugaaa

SEQ ID NO: 2347818 - RNA, 19 nt, Homo sapiens
  misc_RNA (1)...(19): siRNA sense strand
uccgagauugggugggaaa

SEQ ID NO: 2347819 - RNA, 19 nt, Homo sapiens
  misc_RNA (1)...(19): siRNA sense strand
ucagagagcagcuggggaa

SEQ ID NO: 2347820 - RNA, 19 nt, Homo sapiens
  misc_RNA (1)...(19): siRNA sense strand
agcaagaaacaguggaaac

SEQ ID NO: 2347821 - RNA, 19 nt, Homo sapiens
  misc_RNA (1)...(19): siRNA sense strand
gugaaguacaugcgagaag

SEQ ID NO: 2347822 - RNA, 19 nt, Homo sapiens
  misc_RNA (1)...(19): siRNA sense strand
cgagauugggugggaaaca

SEQ ID NO: 2347823 - RNA, 19 nt, Homo sapiens
  misc_RNA (1)...(19): siRNA sense strand
cagaaaaggugccagggga

SEQ ID NO: 2347824 - RNA, 19 nt, Homo sapiens
  misc_RNA (1)...(19): siRNA sense strand
cuaaaguggaugaggaaca

SEQ ID NO: 2347825 - RNA, 19 nt, Homo sapiens
  misc_RNA (1)...(19): siRNA sense strand
ccgcuauggaagugauaua

SEQ ID NO: 2347826 - RNA, 19 nt, Homo sapiens
  misc_RNA (1)...(19): siRNA sense strand
ggauauuauucaaggguuc

SEQ ID NO: 2347827 - RNA, 19 nt, Homo sapiens
  misc_RNA (1)...(19): siRNA sense strand
gaacaagcaaagaagguga

SEQ ID NO: 2347828 - RNA, 19 nt, Homo sapiens
  misc_RNA (1)...(19): siRNA sense strand
uggaggacauugaaagcaa

SEQ ID NO: 2347829 - RNA, 19 nt, Homo sapiens
  misc_RNA (1)...(19): siRNA sense strand
aggaauuaccgaacagcaa

SEQ ID NO: 2347830 - RNA, 19 nt, Homo sapiens
  misc_RNA (1)...(19): siRNA sense strand
cuuccguguucuagugaaa

SEQ ID NO: 2347831 - RNA, 19 nt, Homo sapiens
  misc_RNA (1)...(19): siRNA sense strand
aaguuugagaagaggcaua

SEQ ID NO: 2347832 - RNA, 19 nt, Homo sapiens
  misc_RNA (1)...(19): siRNA sense strand
gcuuaugacaaaagagcua

SEQ ID NO: 2347833 - RNA, 19 nt, Homo sapiens
  misc_RNA (1)...(19): siRNA sense strand
aauauaaaucggaggggaa

SEQ ID NO: 2347834 - RNA, 19 nt, Homo sapiens
  misc_RNA (1)...(19): siRNA sense strand
cuauaaggauugcagccua

SEQ ID NO: 2347835 - RNA, 19 nt, Homo sapiens
  misc_RNA (1)...(19): siRNA sense strand
caaagaaagaugagaagac

SEQ ID NO: 2347836 - RNA, 19 nt, Homo sapiens
  misc_RNA (1)...(19): siRNA sense strand
aagcaaagaaggugauaac

SEQ ID NO: 2347837 - RNA, 19 nt, Homo sapiens
  misc_RNA (1)...(19): siRNA sense strand
uugauuugcuggaggacau

SEQ ID NO: 2347838 - RNA, 19 nt, Homo sapiens
  misc_RNA (1)...(19): siRNA sense strand
gcaaaagucagcuggauau

SEQ ID NO: 2347839 - RNA, 19 nt, Homo sapiens
  misc_RNA (1)...(19): siRNA sense strand
cucuaaaguggaugaggaa

SEQ ID NO: 2347840 - RNA, 19 nt, Homo sapiens
  misc_RNA (1)...(19): siRNA sense strand
gggaaauuguuguccagga

SEQ ID NO: 2347841 - RNA, 19 nt, Homo sapiens
  misc_RNA (1)...(19): siRNA sense strand
aagauggguuggaugaaau

SEQ ID NO: 2347842 - RNA, 19 nt, Homo sapiens
  misc_RNA (1)...(19): siRNA sense strand
ccaccgaggcacaguugaa

SEQ ID NO: 2347843 - RNA, 19 nt, Homo sapiens
  misc_RNA (1)...(19): siRNA sense strand
ucagaagagcagcgcuuua

SEQ ID NO: 2347844 - RNA, 19 nt, Homo sapiens
  misc_RNA (1)...(19): siRNA sense strand
uucaagagaaaguggaaau

SEQ ID NO: 2347845 - RNA, 19 nt, Homo sapiens
  misc_RNA (1)...(19): siRNA sense strand
auucuacaggagagaguua

SEQ ID NO: 2347846 - RNA, 19 nt, Homo sapiens
  misc_RNA (1)...(19): siRNA sense strand
ucucuaaaguggaugagga

SEQ ID NO: 2347847 - RNA, 19 nt, Homo sapiens
  misc_RNA (1)...(19): siRNA sense strand
ugggaaaucaaguucuaaa

SEQ ID NO: 2347848 - RNA, 19 nt, Homo sapiens
  misc_RNA (1)...(19): siRNA sense strand
agcaagagaugaugaggca

SEQ ID NO: 2347849 - RNA, 19 nt, Homo sapiens
  misc_RNA (1)...(19): siRNA sense strand
ccuucaagagaaaguggaa

SEQ ID NO: 2347850 - RNA, 19 nt, Homo sapiens
  misc_RNA (1)...(19): siRNA sense strand
acaugaaacaauaggaaag

SEQ ID NO: 2347851 - RNA, 19 nt, Homo sapiens
  misc_RNA (1)...(19): siRNA sense strand
aaagaugagaagacagaca

SEQ ID NO: 2347852 - RNA, 19 nt, Homo sapiens
  misc_RNA (1)...(19): siRNA sense strand
agacaaaccaaguggagac

SEQ ID NO: 2347853 - RNA, 19 nt, Homo sapiens
  misc_RNA (1)...(19): siRNA sense strand
ccauguuuguacagcgaca

SEQ ID NO: 2347854 - RNA, 19 nt, Homo sapiens
  misc_RNA (1)...(19): siRNA sense strand
gugaaaauggugaugauau

SEQ ID NO: 2347855 - RNA, 19 nt, Homo sapiens
  misc_RNA (1)...(19): siRNA sense strand
ucauaaaucacaucgaaca

SEQ ID NO: 2347856 - RNA, 19 nt, Homo sapiens
  misc_RNA (1)...(19): siRNA sense strand
aggucuugagauagugaaa

SEQ ID NO: 2347857 - RNA, 19 nt, Homo sapiens
  misc_RNA (1)...(19): siRNA sense strand
gaugaggaacaaaugaaau

SEQ ID NO: 2347858 - RNA, 19 nt, Homo sapiens
  misc_RNA (1)...(19): siRNA sense strand
ccucgauuucagagauuau

SEQ ID NO: 2347859 - RNA, 19 nt, Homo sapiens
  misc_RNA (1)...(19): siRNA sense strand
gugaaacagaagaaggcca

SEQ ID NO: 2347860 - RNA, 19 nt, Homo sapiens
  misc_RNA (1)...(19): siRNA sense strand
aggaaagaaguuugagaag

SEQ ID NO: 2347861 - RNA, 19 nt, Homo sapiens
  misc_RNA (1)...(19): siRNA sense strand
uggcaaggaagauggaagu

SEQ ID NO: 2347862 - RNA, 19 nt, Homo sapiens
  misc_RNA (1)...(19): siRNA sense strand
ucuacaggagagaguuaaa

SEQ ID NO: 2347863 - RNA, 19 nt, Homo sapiens
  misc_RNA (1)...(19): siRNA sense strand
uggacgauuuauuggacau

SEQ ID NO: 2347864 - RNA, 19 nt, Homo sapiens
  misc_RNA (1)...(19): siRNA sense strand
ugauaucuuuagaagguga

SEQ ID NO: 2347865 - RNA, 19 nt, Homo sapiens
  misc_RNA (1)...(19): siRNA sense strand
aagaaaauugagaggcauu

SEQ ID NO: 2347866 - RNA, 19 nt, Homo sapiens
  misc_RNA (1)...(19): siRNA sense strand
uggaugaggaacaaaugaa

SEQ ID NO: 2347867 - RNA, 19 nt, Homo sapiens
  misc_RNA (1)...(19): siRNA sense strand
cuugaagacuuguuuccaa

SEQ ID NO: 2347868 - RNA, 19 nt, Homo sapiens
  misc_RNA (1)...(19): siRNA sense strand
ucugaucaccaaagaggaa

SEQ ID NO: 2347869 - RNA, 19 nt, Homo sapiens
  misc_RNA (1)...(19): siRNA sense strand
uuucagaagagcagcgcuu

SEQ ID NO: 2347870 - RNA, 19 nt, Homo sapiens
  misc_RNA (1)...(19): siRNA sense strand
cuucaagagaaaguggaaa

SEQ ID NO: 2347871 - RNA, 19 nt, Homo sapiens
  misc_RNA (1)...(19): siRNA sense strand
ugagaacaaggaugagauu

SEQ ID NO: 2347872 - RNA, 19 nt, Homo sapiens
  misc_RNA (1)...(19): siRNA sense strand
agcaaaagucagcuggaua

SEQ ID NO: 2347873 - RNA, 19 nt, Homo sapiens
  misc_RNA (1)...(19): siRNA sense strand
caagcaaagaaggugauaa

SEQ ID NO: 2347874 - RNA, 19 nt, Homo sapiens
  misc_RNA (1)...(19): siRNA sense strand
ccauuaaguuuucagaaga

SEQ ID NO: 2347875 - RNA, 19 nt, Homo sapiens
  misc_RNA (1)...(19): siRNA sense strand
ggaauuacucugaucacca

SEQ ID NO: 2347876 - RNA, 19 nt, Homo sapiens
  misc_RNA (1)...(19): siRNA sense strand
uugcugagaacaaggauga

SEQ ID NO: 2347877 - RNA, 19 nt, Homo sapiens
  misc_RNA (1)...(19): siRNA sense strand
gucuugagauagugaaaau

SEQ ID NO: 2347878 - RNA, 19 nt, Homo sapiens
  misc_RNA (1)...(19): siRNA sense strand
agagauuauuucagugucu

SEQ ID NO: 2347879 - RNA, 19 nt, Homo sapiens
  misc_RNA (1)...(19): siRNA sense strand
ucaacaagcuucugggcaa

SEQ ID NO: 2347880 - RNA, 19 nt, Homo sapiens
  misc_RNA (1)...(19): siRNA sense strand
ugguaagcagggaggcaaa

SEQ ID NO: 2347881 - RNA, 19 nt, Homo sapiens
  misc_RNA (1)...(19): siRNA sense strand
caaagaaaacugagagcca

SEQ ID NO: 2347882 - RNA, 19 nt, Homo sapiens
  misc_RNA (1)...(19): siRNA sense strand
aggcaaagcucgcgccaag

SEQ ID NO: 2347883 - RNA, 19 nt, Homo sapiens
  misc_RNA (1)...(19): siRNA sense strand
aggccgugcugcugccaaa

SEQ ID NO: 2347884 - RNA, 19 nt, Homo sapiens
  misc_RNA (1)...(19): siRNA sense strand
ccacuaaggcggcucgcaa

SEQ ID NO: 2347885 - RNA, 19 nt, Homo sapiens
  misc_RNA (1)...(19): siRNA sense strand
acgccaagcgagugacuau

SEQ ID NO: 2347886 - RNA, 19 nt, Homo sapiens
  misc_RNA (1)...(19): siRNA sense strand
cuaucaugcccaaggacau

SEQ ID NO: 2347887 - RNA, 19 nt, Homo sapiens
  misc_RNA (1)...(19): siRNA sense strand
gcaaacagcucguaagucc

SEQ ID NO: 2347888 - RNA, 19 nt, Homo sapiens
  misc_RNA (1)...(19): siRNA sense strand
gugagaucgcgcaggacuu

SEQ ID NO: 2347889 - RNA, 19 nt, Homo sapiens
  misc_RNA (1)...(19): siRNA sense strand
gcaacgaagacaaggagga

SEQ ID NO: 2347890 - RNA, 19 nt, Homo sapiens
  misc_RNA (1)...(19): siRNA sense strand
augaaaaggaaguggucaa

SEQ ID NO: 2347891 - RNA, 19 nt, Homo sapiens
  misc_RNA (1)...(19): siRNA sense strand
acgaagacaaggaggaguu

SEQ ID NO: 2347892 - RNA, 19 nt, Homo sapiens
  misc_RNA (1)...(19): siRNA sense strand
gagcagggcuucagaggcu

SEQ ID NO: 2347893 - RNA, 19 nt, Homo sapiens
  misc_RNA (1)...(19): siRNA sense strand
ggucaaguucucagccuca

SEQ ID NO: 2347894 - RNA, 19 nt, Homo sapiens
  misc_RNA (1)...(19): siRNA sense strand
gcaacgaagacaaggagga

SEQ ID NO: 2347895 - RNA, 19 nt, Homo sapiens
  misc_RNA (1)...(19): siRNA sense strand
augaaaaggaaguggucaa

SEQ ID NO: 2347896 - RNA, 19 nt, Homo sapiens
  misc_RNA (1)...(19): siRNA sense strand
acgaagacaaggaggaguu

SEQ ID NO: 2347897 - RNA, 19 nt, Homo sapiens
  misc_RNA (1)...(19): siRNA sense strand
gagcagggcuucagaggcu

SEQ ID NO: 2347898 - RNA, 19 nt, Homo sapiens
  misc_RNA (1)...(19): siRNA sense strand
ggucaaguucucagccuca

SEQ ID NO: 2347899 - RNA, 19 nt, Homo sapiens
  misc_RNA (1)...(19): siRNA sense strand
ccgacauagcugaggacuu

SEQ ID NO: 2347900 - RNA, 19 nt, Homo sapiens
  misc_RNA (1)...(19): siRNA sense strand
gcaaugaauucaagggcag

SEQ ID NO: 2347901 - RNA, 19 nt, Homo sapiens
  misc_RNA (1)...(19): siRNA sense strand
caguauacccugaaggaug

SEQ ID NO: 2347902 - RNA, 19 nt, Homo sapiens
  misc_RNA (1)...(19): siRNA sense strand
gcaagaucuucucugggaa

SEQ ID NO: 2347903 - RNA, 19 nt, Homo sapiens
  misc_RNA (1)...(19): siRNA sense strand
uggugaagcugguggaggu

SEQ ID NO: 2347904 - RNA, 19 nt, Homo sapiens
  misc_RNA (1)...(19): siRNA sense strand
ccauugagcagguguacca

SEQ ID NO: 2347905 - RNA, 19 nt, Homo sapiens
  misc_RNA (1)...(19): siRNA sense strand
cugacuuuggugugagcaa

SEQ ID NO: 2347906 - RNA, 19 nt, Homo sapiens
  misc_RNA (1)...(19): siRNA sense strand
cauucauggacgagcggau

SEQ ID NO: 2347907 - RNA, 19 nt, Homo sapiens
  misc_RNA (1)...(19): siRNA sense strand
ccgacauagcugaggacuu

SEQ ID NO: 2347908 - RNA, 19 nt, Homo sapiens
  misc_RNA (1)...(19): siRNA sense strand
gcaaugaauucaagggcag

SEQ ID NO: 2347909 - RNA, 19 nt, Homo sapiens
  misc_RNA (1)...(19): siRNA sense strand
caguauacccugaaggaug

SEQ ID NO: 2347910 - RNA, 19 nt, Homo sapiens
  misc_RNA (1)...(19): siRNA sense strand
gcaagaucuucucugggaa

SEQ ID NO: 2347911 - RNA, 19 nt, Homo sapiens
  misc_RNA (1)...(19): siRNA sense strand
uggugaagcugguggaggu

SEQ ID NO: 2347912 - RNA, 19 nt, Homo sapiens
  misc_RNA (1)...(19): siRNA sense strand
ccauugagcagguguacca

SEQ ID NO: 2347913 - RNA, 19 nt, Homo sapiens
  misc_RNA (1)...(19): siRNA sense strand
cugacuuuggugugagcaa

SEQ ID NO: 2347914 - RNA, 19 nt, Homo sapiens
  misc_RNA (1)...(19): siRNA sense strand
cauucauggacgagcggau

SEQ ID NO: 2347915 - RNA, 19 nt, Homo sapiens
  misc_RNA (1)...(19): siRNA sense strand
ccgacauagcugaggacuu

SEQ ID NO: 2347916 - RNA, 19 nt, Homo sapiens
  misc_RNA (1)...(19): siRNA sense strand
gcaaugaauucaagggcag

SEQ ID NO: 2347917 - RNA, 19 nt, Homo sapiens
  misc_RNA (1)...(19): siRNA sense strand
caguauacccugaaggaug

SEQ ID NO: 2347918 - RNA, 19 nt, Homo sapiens
  misc_RNA (1)...(19): siRNA sense strand
gcaagaucuucucugggaa

SEQ ID NO: 2347919 - RNA, 19 nt, Homo sapiens
  misc_RNA (1)...(19): siRNA sense strand
uggugaagcugguggaggu

SEQ ID NO: 2347920 - RNA, 19 nt, Homo sapiens
  misc_RNA (1)...(19): siRNA sense strand
ccauugagcagguguacca

SEQ ID NO: 2347921 - RNA, 19 nt, Homo sapiens
  misc_RNA (1)...(19): siRNA sense strand
cugacuuuggugugagcaa

SEQ ID NO: 2347922 - RNA, 19 nt, Homo sapiens
  misc_RNA (1)...(19): siRNA sense strand
cauucauggacgagcggau

SEQ ID NO: 2347923 - RNA, 19 nt, Homo sapiens
  misc_RNA (1)...(19): siRNA sense strand
ccgacauagcugaggacuu

SEQ ID NO: 2347924 - RNA, 19 nt, Homo sapiens
  misc_RNA (1)...(19): siRNA sense strand
gcaaugaauucaagggcag

SEQ ID NO: 2347925 - RNA, 19 nt, Homo sapiens
  misc_RNA (1)...(19): siRNA sense strand
caguauacccugaaggaug

SEQ ID NO: 2347926 - RNA, 19 nt, Homo sapiens
  misc_RNA (1)...(19): siRNA sense strand
gcaagaucuucucugggaa

SEQ ID NO: 2347927 - RNA, 19 nt, Homo sapiens
  misc_RNA (1)...(19): siRNA sense strand
uggugaagcugguggaggu

SEQ ID NO: 2347928 - RNA, 19 nt, Homo sapiens
  misc_RNA (1)...(19): siRNA sense strand
ccauugagcagguguacca

SEQ ID NO: 2347929 - RNA, 19 nt, Homo sapiens
  misc_RNA (1)...(19): siRNA sense strand
cugacuuuggugugagcaa

SEQ ID NO: 2347930 - RNA, 19 nt, Homo sapiens
  misc_RNA (1)...(19): siRNA sense strand
cauucauggacgagcggau

SEQ ID NO: 2347931 - RNA, 19 nt, Homo sapiens
  misc_RNA (1)...(19): siRNA sense strand
ccgacauagcugaggacuu

SEQ ID NO: 2347932 - RNA, 19 nt, Homo sapiens
  misc_RNA (1)...(19): siRNA sense strand
gcaaugaauucaagggcag

SEQ ID NO: 2347933 - RNA, 19 nt, Homo sapiens
  misc_RNA (1)...(19): siRNA sense strand
caguauacccugaaggaug

SEQ ID NO: 2347934 - RNA, 19 nt, Homo sapiens
  misc_RNA (1)...(19): siRNA sense strand
gcaagaucuucucugggaa

SEQ ID NO: 2347935 - RNA, 19 nt, Homo sapiens
  misc_RNA (1)...(19): siRNA sense strand
uggugaagcugguggaggu

SEQ ID NO: 2347936 - RNA, 19 nt, Homo sapiens
  misc_RNA (1)...(19): siRNA sense strand
ccauugagcagguguacca

SEQ ID NO: 2347937 - RNA, 19 nt, Homo sapiens
  misc_RNA (1)...(19): siRNA sense strand
cugacuuuggugugagcaa

SEQ ID NO: 2347938 - RNA, 19 nt, Homo sapiens
  misc_RNA (1)...(19): siRNA sense strand
cauucauggacgagcggau

SEQ ID NO: 2347939 - RNA, 19 nt, Homo sapiens
  misc_RNA (1)...(19): siRNA sense strand
ccgacauagcugaggacuu

SEQ ID NO: 2347940 - RNA, 19 nt, Homo sapiens
  misc_RNA (1)...(19): siRNA sense strand
gcaaugaauucaagggcag

SEQ ID NO: 2347941 - RNA, 19 nt, Homo sapiens
  misc_RNA (1)...(19): siRNA sense strand
caguauacccugaaggaug

SEQ ID NO: 2347942 - RNA, 19 nt, Homo sapiens
  misc_RNA (1)...(19): siRNA sense strand
gcaagaucuucucugggaa

SEQ ID NO: 2347943 - RNA, 19 nt, Homo sapiens
  misc_RNA (1)...(19): siRNA sense strand
uggugaagcugguggaggu

SEQ ID NO: 2347944 - RNA, 19 nt, Homo sapiens
  misc_RNA (1)...(19): siRNA sense strand
ccauugagcagguguacca

SEQ ID NO: 2347945 - RNA, 19 nt, Homo sapiens
  misc_RNA (1)...(19): siRNA sense strand
cugacuuuggugugagcaa

SEQ ID NO: 2347946 - RNA, 19 nt, Homo sapiens
  misc_RNA (1)...(19): siRNA sense strand
cauucauggacgagcggau

SEQ ID NO: 2347947 - RNA, 19 nt, Homo sapiens
  misc_RNA (1)...(19): siRNA sense strand
ccgacauagcugaggacuu

SEQ ID NO: 2347948 - RNA, 19 nt, Homo sapiens
  misc_RNA (1)...(19): siRNA sense strand
gcaaugaauucaagggcag

SEQ ID NO: 2347949 - RNA, 19 nt, Homo sapiens
  misc_RNA (1)...(19): siRNA sense strand
caguauacccugaaggaug

SEQ ID NO: 2347950 - RNA, 19 nt, Homo sapiens
  misc_RNA (1)...(19): siRNA sense strand
gcaagaucuucucugggaa

SEQ ID NO: 2347951 - RNA, 19 nt, Homo sapiens
  misc_RNA (1)...(19): siRNA sense strand
uggugaagcugguggaggu

SEQ ID NO: 2347952 - RNA, 19 nt, Homo sapiens
  misc_RNA (1)...(19): siRNA sense strand
ccauugagcagguguacca

SEQ ID NO: 2347953 - RNA, 19 nt, Homo sapiens
  misc_RNA (1)...(19): siRNA sense strand
cugacuuuggugugagcaa

SEQ ID NO: 2347954 - RNA, 19 nt, Homo sapiens
  misc_RNA (1)...(19): siRNA sense strand
cauucauggacgagcggau

SEQ ID NO: 2347955 - RNA, 19 nt, Homo sapiens
  misc_RNA (1)...(19): siRNA sense strand
agacaaaugaugugcgaga

SEQ ID NO: 2347956 - RNA, 19 nt, Homo sapiens
  misc_RNA (1)...(19): siRNA sense strand
ugaugaaggauuugggcua

SEQ ID NO: 2347957 - RNA, 19 nt, Homo sapiens
  misc_RNA (1)...(19): siRNA sense strand
gacagaugcuacagggcaa

SEQ ID NO: 2347958 - RNA, 19 nt, Homo sapiens
  misc_RNA (1)...(19): siRNA sense strand
cuguaagaagagugggcaa

SEQ ID NO: 2347959 - RNA, 19 nt, Homo sapiens
  misc_RNA (1)...(19): siRNA sense strand
ggauaaagcaguagacacc

SEQ ID NO: 2347960 - RNA, 19 nt, Homo sapiens
  misc_RNA (1)...(19): siRNA sense strand
ccagcaacagcaagaaaca

SEQ ID NO: 2347961 - RNA, 19 nt, Homo sapiens
  misc_RNA (1)...(19): siRNA sense strand
ccacugacccucugagcca

SEQ ID NO: 2347962 - RNA, 19 nt, Homo sapiens
  misc_RNA (1)...(19): siRNA sense strand
caagacaaaugaugugcga

SEQ ID NO: 2347963 - RNA, 19 nt, Homo sapiens
  misc_RNA (1)...(19): siRNA sense strand
uguaagaagagugggcaau

SEQ ID NO: 2347964 - RNA, 19 nt, Homo sapiens
  misc_RNA (1)...(19): siRNA sense strand
aggauuugggcuauggcaa

SEQ ID NO: 2347965 - RNA, 19 nt, Homo sapiens
  misc_RNA (1)...(19): siRNA sense strand
gcgagaugucauaaaacaa

SEQ ID NO: 2347966 - RNA, 19 nt, Homo sapiens
  misc_RNA (1)...(19): siRNA sense strand
guagauuucuucaagcaga

SEQ ID NO: 2347967 - RNA, 19 nt, Homo sapiens
  misc_RNA (1)...(19): siRNA sense strand
ugucauaaaacaagcucaa

SEQ ID NO: 2347968 - RNA, 19 nt, Homo sapiens
  misc_RNA (1)...(19): siRNA sense strand
agacaaaugaugugcgaga

SEQ ID NO: 2347969 - RNA, 19 nt, Homo sapiens
  misc_RNA (1)...(19): siRNA sense strand
ugaugaaggauuugggcua

SEQ ID NO: 2347970 - RNA, 19 nt, Homo sapiens
  misc_RNA (1)...(19): siRNA sense strand
gacagaugcuacagggcaa

SEQ ID NO: 2347971 - RNA, 19 nt, Homo sapiens
  misc_RNA (1)...(19): siRNA sense strand
cuguaagaagagugggcaa

SEQ ID NO: 2347972 - RNA, 19 nt, Homo sapiens
  misc_RNA (1)...(19): siRNA sense strand
ggauaaagcaguagacacc

SEQ ID NO: 2347973 - RNA, 19 nt, Homo sapiens
  misc_RNA (1)...(19): siRNA sense strand
ccagcaacagcaagaaaca

SEQ ID NO: 2347974 - RNA, 19 nt, Homo sapiens
  misc_RNA (1)...(19): siRNA sense strand
ccacugacccucugagcca

SEQ ID NO: 2347975 - RNA, 19 nt, Homo sapiens
  misc_RNA (1)...(19): siRNA sense strand
caagacaaaugaugugcga

SEQ ID NO: 2347976 - RNA, 19 nt, Homo sapiens
  misc_RNA (1)...(19): siRNA sense strand
uguaagaagagugggcaau

SEQ ID NO: 2347977 - RNA, 19 nt, Homo sapiens
  misc_RNA (1)...(19): siRNA sense strand
aggauuugggcuauggcaa

SEQ ID NO: 2347978 - RNA, 19 nt, Homo sapiens
  misc_RNA (1)...(19): siRNA sense strand
gcgagaugucauaaaacaa

SEQ ID NO: 2347979 - RNA, 19 nt, Homo sapiens
  misc_RNA (1)...(19): siRNA sense strand
guagauuucuucaagcaga

SEQ ID NO: 2347980 - RNA, 19 nt, Homo sapiens
  misc_RNA (1)...(19): siRNA sense strand
ugucauaaaacaagcucaa

SEQ ID NO: 2347981 - RNA, 19 nt, Homo sapiens
  misc_RNA (1)...(19): siRNA sense strand
acuugaaggagaagguaau

SEQ ID NO: 2347982 - RNA, 19 nt, Homo sapiens
  misc_RNA (1)...(19): siRNA sense strand
acuaagagggacauaggaa

SEQ ID NO: 2347983 - RNA, 19 nt, Homo sapiens
  misc_RNA (1)...(19): siRNA sense strand
agccagaguaccucagaua

SEQ ID NO: 2347984 - RNA, 19 nt, Homo sapiens
  misc_RNA (1)...(19): siRNA sense strand
cacuugaaggagaagguaa

SEQ ID NO: 2347985 - RNA, 19 nt, Homo sapiens
  misc_RNA (1)...(19): siRNA sense strand
cugcugugaugaagacaau

SEQ ID NO: 2347986 - RNA, 19 nt, Homo sapiens
  misc_RNA (1)...(19): siRNA sense strand
gagcagacaucgaccagca

SEQ ID NO: 2347987 - RNA, 19 nt, Homo sapiens
  misc_RNA (1)...(19): siRNA sense strand
augagaauucaaagggaga

SEQ ID NO: 2347988 - RNA, 19 nt, Homo sapiens
  misc_RNA (1)...(19): siRNA sense strand
agaaaaugagugaccauaa

SEQ ID NO: 2347989 - RNA, 19 nt, Homo sapiens
  misc_RNA (1)...(19): siRNA sense strand
ggagaaaaugagugaccau

SEQ ID NO: 2347990 - RNA, 19 nt, Homo sapiens
  misc_RNA (1)...(19): siRNA sense strand
gugagugacuacagccaga

SEQ ID NO: 2347991 - RNA, 19 nt, Homo sapiens
  misc_RNA (1)...(19): siRNA sense strand
ccucagauacuauugaaaa

SEQ ID NO: 2347992 - RNA, 19 nt, Homo sapiens
  misc_RNA (1)...(19): siRNA sense strand
auucaaagggagacagacu

SEQ ID NO: 2347993 - RNA, 19 nt, Homo sapiens
  misc_RNA (1)...(19): siRNA sense strand
caaguuuggccaagggcuu

SEQ ID NO: 2347994 - RNA, 19 nt, Homo sapiens
  misc_RNA (1)...(19): siRNA sense strand
aggaagaggguacuggaga

SEQ ID NO: 2347995 - RNA, 19 nt, Homo sapiens
  misc_RNA (1)...(19): siRNA sense strand
gguccagcugggugaguga

SEQ ID NO: 2347996 - RNA, 19 nt, Homo sapiens
  misc_RNA (1)...(19): siRNA sense strand
gagaauucaaagggagaca

SEQ ID NO: 2347997 - RNA, 19 nt, Homo sapiens
  misc_RNA (1)...(19): siRNA sense strand
cggcauuccugcuggcugu

SEQ ID NO: 2347998 - RNA, 19 nt, Homo sapiens
  misc_RNA (1)...(19): siRNA sense strand
guugggacuaagagggaca

SEQ ID NO: 2347999 - RNA, 19 nt, Homo sapiens
  misc_RNA (1)...(19): siRNA sense strand
gugugaagucccuagugaa

SEQ ID NO: 2348000 - RNA, 19 nt, Homo sapiens
  misc_RNA (1)...(19): siRNA sense strand
uggcaagcugcuagcaaaa

SEQ ID NO: 2348001 - RNA, 19 nt, Homo sapiens
  misc_RNA (1)...(19): siRNA sense strand
cucucuaagccuauggaaa

SEQ ID NO: 2348002 - RNA, 19 nt, Homo sapiens
  misc_RNA (1)...(19): siRNA sense strand
ccuaugauccauugcccaa

SEQ ID NO: 2348003 - RNA, 19 nt, Homo sapiens
  misc_RNA (1)...(19): siRNA sense strand
cccaacagucauggagaaa

SEQ ID NO: 2348004 - RNA, 19 nt, Homo sapiens
  misc_RNA (1)...(19): siRNA sense strand
ucagaaaacagaugcagaa

SEQ ID NO: 2348005 - RNA, 19 nt, Homo sapiens
  misc_RNA (1)...(19): siRNA sense strand
cuacagauacagaggcuac

SEQ ID NO: 2348006 - RNA, 19 nt, Homo sapiens
  misc_RNA (1)...(19): siRNA sense strand
gcaaugaggaccugcccau

SEQ ID NO: 2348007 - RNA, 19 nt, Homo sapiens
  misc_RNA (1)...(19): siRNA sense strand
gugcuuuggagaagagguu

SEQ ID NO: 2348008 - RNA, 19 nt, Homo sapiens
  misc_RNA (1)...(19): siRNA sense strand
cacaaaagcaauuaagaga

SEQ ID NO: 2348009 - RNA, 19 nt, Homo sapiens
  misc_RNA (1)...(19): siRNA sense strand
aggaucugguagagaacaa

SEQ ID NO: 2348010 - RNA, 19 nt, Homo sapiens
  misc_RNA (1)...(19): siRNA sense strand
aggagaagaaccaguacaa

SEQ ID NO: 2348011 - RNA, 19 nt, Homo sapiens
  misc_RNA (1)...(19): siRNA sense strand
acgagaagucacagcgcua

SEQ ID NO: 2348012 - RNA, 19 nt, Homo sapiens
  misc_RNA (1)...(19): siRNA sense strand
aggaugaggcggacggaga

SEQ ID NO: 2348013 - RNA, 19 nt, Homo sapiens
  misc_RNA (1)...(19): siRNA sense strand
ccgaggagggcgaguacau

SEQ ID NO: 2348014 - RNA, 19 nt, Homo sapiens
  misc_RNA (1)...(19): siRNA sense strand
acuuugagaucguggucau

SEQ ID NO: 2348015 - RNA, 19 nt, Homo sapiens
  misc_RNA (1)...(19): siRNA sense strand
ccgugcucuucgaggagaa

SEQ ID NO: 2348016 - RNA, 19 nt, Homo sapiens
  misc_RNA (1)...(19): siRNA sense strand
acgaggaggaugaggcgga

SEQ ID NO: 2348017 - RNA, 19 nt, Homo sapiens
  misc_RNA (1)...(19): siRNA sense strand
agaagaaccaugaggagga

SEQ ID NO: 2348018 - RNA, 19 nt, Homo sapiens
  misc_RNA (1)...(19): siRNA sense strand
accaugaggaggagguuaa

SEQ ID NO: 2348019 - RNA, 19 nt, Homo sapiens
  misc_RNA (1)...(19): siRNA sense strand
cagaggaaggagagacuca

SEQ ID NO: 2348020 - RNA, 19 nt, Homo sapiens
  misc_RNA (1)...(19): siRNA sense strand
ggacugcagaggaaggaga

SEQ ID NO: 2348021 - RNA, 19 nt, Homo sapiens
  misc_RNA (1)...(19): siRNA sense strand
gugcagagccugaucacca

SEQ ID NO: 2348022 - RNA, 19 nt, Homo sapiens
  misc_RNA (1)...(19): siRNA sense strand
ggcuggagugugagaucaa

SEQ ID NO: 2348023 - RNA, 19 nt, Homo sapiens
  misc_RNA (1)...(19): siRNA sense strand
ccgcagggaaguggagcaa

SEQ ID NO: 2348024 - RNA, 19 nt, Homo sapiens
  misc_RNA (1)...(19): siRNA sense strand
gaaaacacgcugacggaga

SEQ ID NO: 2348025 - RNA, 19 nt, Homo sapiens
  misc_RNA (1)...(19): siRNA sense strand
agaucgagcugcaggccca

SEQ ID NO: 2348026 - RNA, 19 nt, Homo sapiens
  misc_RNA (1)...(19): siRNA sense strand
gagcagucccugaggcugu

SEQ ID NO: 2348027 - RNA, 19 nt, Homo sapiens
  misc_RNA (1)...(19): siRNA sense strand
caccaaugcuaguggcaac

SEQ ID NO: 2348028 - RNA, 19 nt, Homo sapiens
  misc_RNA (1)...(19): siRNA sense strand
cagucaacgcccuggagau

SEQ ID NO: 2348029 - RNA, 19 nt, Homo sapiens
  misc_RNA (1)...(19): siRNA sense strand
aguccuacuucaagaccau

SEQ ID NO: 2348030 - RNA, 19 nt, Homo sapiens
  misc_RNA (1)...(19): siRNA sense strand
ugguggagucggacaucaa

SEQ ID NO: 2348031 - RNA, 19 nt, Homo sapiens
  misc_RNA (1)...(19): siRNA sense strand
ucucaagaguccucaggga

SEQ ID NO: 2348032 - RNA, 19 nt, Homo sapiens
  misc_RNA (1)...(19): siRNA sense strand
guggcaagaucgucggcaa

SEQ ID NO: 2348033 - RNA, 19 nt, Homo sapiens
  misc_RNA (1)...(19): siRNA sense strand
gguaugugcaagaggugaa

SEQ ID NO: 2348034 - RNA, 19 nt, Homo sapiens
  misc_RNA (1)...(19): siRNA sense strand
gcgugaaaguucuaggcau

SEQ ID NO: 2348035 - RNA, 19 nt, Homo sapiens
  misc_RNA (1)...(19): siRNA sense strand
gugcaagaggugaaauaau

SEQ ID NO: 2348036 - RNA, 19 nt, Homo sapiens
  misc_RNA (1)...(19): siRNA sense strand
cuaagaaaacgaauggaaa

SEQ ID NO: 2348037 - RNA, 19 nt, Homo sapiens
  misc_RNA (1)...(19): siRNA sense strand
aagcaagguaugugcaaga

SEQ ID NO: 2348038 - RNA, 19 nt, Homo sapiens
  misc_RNA (1)...(19): siRNA sense strand
augugcaagaggugaaaua

SEQ ID NO: 2348039 - RNA, 19 nt, Homo sapiens
  misc_RNA (1)...(19): siRNA sense strand
cuggaaagucauugccauu

SEQ ID NO: 2348040 - RNA, 19 nt, Homo sapiens
  misc_RNA (1)...(19): siRNA sense strand
ugcaagaggugaaauaauu

SEQ ID NO: 2348041 - RNA, 19 nt, Homo sapiens
  misc_RNA (1)...(19): siRNA sense strand
ugauaaacauacuggcugu

SEQ ID NO: 2348042 - RNA, 19 nt, Homo sapiens
  misc_RNA (1)...(19): siRNA sense strand
gugaaauaauuggcgugaa

SEQ ID NO: 2348043 - RNA, 19 nt, Homo sapiens
  misc_RNA (1)...(19): siRNA sense strand
aaauaauuggcgugaaagu

SEQ ID NO: 2348044 - RNA, 19 nt, Homo sapiens
  misc_RNA (1)...(19): siRNA sense strand
guucuaggcauauuggcua

SEQ ID NO: 2348045 - RNA, 19 nt, Homo sapiens
  misc_RNA (1)...(19): siRNA sense strand
agaaaaugaguuugcguuu

SEQ ID NO: 2348046 - RNA, 19 nt, Homo sapiens
  misc_RNA (1)...(19): siRNA sense strand
acuaagaaaacgaauggaa

SEQ ID NO: 2348047 - RNA, 19 nt, Homo sapiens
  misc_RNA (1)...(19): siRNA sense strand
ggagauugcuacaaaggac

SEQ ID NO: 2348048 - RNA, 19 nt, Homo sapiens
  misc_RNA (1)...(19): siRNA sense strand
acucaugaccauuggaaag

SEQ ID NO: 2348049 - RNA, 19 nt, Homo sapiens
  misc_RNA (1)...(19): siRNA sense strand
uuggaaagcauuagugacu

SEQ ID NO: 2348050 - RNA, 19 nt, Homo sapiens
  misc_RNA (1)...(19): siRNA sense strand
cgccagaagcagugaagaa

SEQ ID NO: 2348051 - RNA, 19 nt, Homo sapiens
  misc_RNA (1)...(19): siRNA sense strand
gaguuaugucagagaagaa

SEQ ID NO: 2348052 - RNA, 19 nt, Homo sapiens
  misc_RNA (1)...(19): siRNA sense strand
cagugaagaaggaggcaga

SEQ ID NO: 2348053 - RNA, 19 nt, Homo sapiens
  misc_RNA (1)...(19): siRNA sense strand
aguccaugauauugaaaga

SEQ ID NO: 2348054 - RNA, 19 nt, Homo sapiens
  misc_RNA (1)...(19): siRNA sense strand
cacugaugaccuugagaaa

SEQ ID NO: 2348055 - RNA, 19 nt, Homo sapiens
  misc_RNA (1)...(19): siRNA sense strand
uugaaagaucugaagaaga

SEQ ID NO: 2348056 - RNA, 19 nt, Homo sapiens
  misc_RNA (1)...(19): siRNA sense strand
caaagauggaaaagcauaa

SEQ ID NO: 2348057 - RNA, 19 nt, Homo sapiens
  misc_RNA (1)...(19): siRNA sense strand
ccuggaaugcagaguagaa

SEQ ID NO: 2348058 - RNA, 19 nt, Homo sapiens
  misc_RNA (1)...(19): siRNA sense strand
cgauaugggcuaagcagca

SEQ ID NO: 2348059 - RNA, 19 nt, Homo sapiens
  misc_RNA (1)...(19): siRNA sense strand
acacaagaucacaaaccaa

SEQ ID NO: 2348060 - RNA, 19 nt, Homo sapiens
  misc_RNA (1)...(19): siRNA sense strand
ccaaguaauccgcuggaga

SEQ ID NO: 2348061 - RNA, 19 nt, Homo sapiens
  misc_RNA (1)...(19): siRNA sense strand
caaauguguccauggaaaa

SEQ ID NO: 2348062 - RNA, 19 nt, Homo sapiens
  misc_RNA (1)...(19): siRNA sense strand
aggguaauggguugcgaua

SEQ ID NO: 2348063 - RNA, 19 nt, Homo sapiens
  misc_RNA (1)...(19): siRNA sense strand
gguuuacuuuguaggaaca

SEQ ID NO: 2348064 - RNA, 19 nt, Homo sapiens
  misc_RNA (1)...(19): siRNA sense strand
agacaacaugagugugauu

SEQ ID NO: 2348065 - RNA, 19 nt, Homo sapiens
  misc_RNA (1)...(19): siRNA sense strand
cuguaaugauucagcgugu

SEQ ID NO: 2348066 - RNA, 19 nt, Homo sapiens
  misc_RNA (1)...(19): siRNA sense strand
ccaaagauggaaaagcaua

SEQ ID NO: 2348067 - RNA, 19 nt, Homo sapiens
  misc_RNA (1)...(19): siRNA sense strand
ggucaacagcuguaggugu

SEQ ID NO: 2348068 - RNA, 19 nt, Homo sapiens
  misc_RNA (1)...(19): siRNA sense strand
gccugaaguccaugauauu

SEQ ID NO: 2348069 - RNA, 19 nt, Homo sapiens
  misc_RNA (1)...(19): siRNA sense strand
aaugaagagcucugugauu

SEQ ID NO: 2348070 - RNA, 19 nt, Homo sapiens
  misc_RNA (1)...(19): siRNA sense strand
gcaaugaaguagucgacac

SEQ ID NO: 2348071 - RNA, 19 nt, Homo sapiens
  misc_RNA (1)...(19): siRNA sense strand
ggauguuaugggaaaugaa

SEQ ID NO: 2348072 - RNA, 19 nt, Homo sapiens
  misc_RNA (1)...(19): siRNA sense strand
aaguaauccgcuggagaaa

SEQ ID NO: 2348073 - RNA, 19 nt, Homo sapiens
  misc_RNA (1)...(19): siRNA sense strand
uggagacucaagagguuua

SEQ ID NO: 2348074 - RNA, 19 nt, Homo sapiens
  misc_RNA (1)...(19): siRNA sense strand
agauagaagugggucaaca

SEQ ID NO: 2348075 - RNA, 19 nt, Homo sapiens
  misc_RNA (1)...(19): siRNA sense strand
agaaggaggcagaguugga

SEQ ID NO: 2348076 - RNA, 19 nt, Homo sapiens
  misc_RNA (1)...(19): siRNA sense strand
gacaagccaaagauggaaa

SEQ ID NO: 2348077 - RNA, 19 nt, Homo sapiens
  misc_RNA (1)...(19): siRNA sense strand
uauaagggaagucgagaca

SEQ ID NO: 2348078 - RNA, 19 nt, Homo sapiens
  misc_RNA (1)...(19): siRNA sense strand
aggaggcagaguuggacaa

SEQ ID NO: 2348079 - RNA, 19 nt, Homo sapiens
  misc_RNA (1)...(19): siRNA sense strand
cgccagaagcagugaagaa

SEQ ID NO: 2348080 - RNA, 19 nt, Homo sapiens
  misc_RNA (1)...(19): siRNA sense strand
gaguuaugucagagaagaa

SEQ ID NO: 2348081 - RNA, 19 nt, Homo sapiens
  misc_RNA (1)...(19): siRNA sense strand
cagugaagaaggaggcaga

SEQ ID NO: 2348082 - RNA, 19 nt, Homo sapiens
  misc_RNA (1)...(19): siRNA sense strand
aguccaugauauugaaaga

SEQ ID NO: 2348083 - RNA, 19 nt, Homo sapiens
  misc_RNA (1)...(19): siRNA sense strand
cacugaugaccuugagaaa

SEQ ID NO: 2348084 - RNA, 19 nt, Homo sapiens
  misc_RNA (1)...(19): siRNA sense strand
uugaaagaucugaagaaga

SEQ ID NO: 2348085 - RNA, 19 nt, Homo sapiens
  misc_RNA (1)...(19): siRNA sense strand
caaagauggaaaagcauaa

SEQ ID NO: 2348086 - RNA, 19 nt, Homo sapiens
  misc_RNA (1)...(19): siRNA sense strand
ccuggaaugcagaguagaa

SEQ ID NO: 2348087 - RNA, 19 nt, Homo sapiens
  misc_RNA (1)...(19): siRNA sense strand
cgauaugggcuaagcagca

SEQ ID NO: 2348088 - RNA, 19 nt, Homo sapiens
  misc_RNA (1)...(19): siRNA sense strand
acacaagaucacaaaccaa

SEQ ID NO: 2348089 - RNA, 19 nt, Homo sapiens
  misc_RNA (1)...(19): siRNA sense strand
ccaaguaauccgcuggaga

SEQ ID NO: 2348090 - RNA, 19 nt, Homo sapiens
  misc_RNA (1)...(19): siRNA sense strand
caaauguguccauggaaaa

SEQ ID NO: 2348091 - RNA, 19 nt, Homo sapiens
  misc_RNA (1)...(19): siRNA sense strand
aggguaauggguugcgaua

SEQ ID NO: 2348092 - RNA, 19 nt, Homo sapiens
  misc_RNA (1)...(19): siRNA sense strand
gguuuacuuuguaggaaca

SEQ ID NO: 2348093 - RNA, 19 nt, Homo sapiens
  misc_RNA (1)...(19): siRNA sense strand
agacaacaugagugugauu

SEQ ID NO: 2348094 - RNA, 19 nt, Homo sapiens
  misc_RNA (1)...(19): siRNA sense strand
cuguaaugauucagcgugu

SEQ ID NO: 2348095 - RNA, 19 nt, Homo sapiens
  misc_RNA (1)...(19): siRNA sense strand
ccaaagauggaaaagcaua

SEQ ID NO: 2348096 - RNA, 19 nt, Homo sapiens
  misc_RNA (1)...(19): siRNA sense strand
ggucaacagcuguaggugu

SEQ ID NO: 2348097 - RNA, 19 nt, Homo sapiens
  misc_RNA (1)...(19): siRNA sense strand
gccugaaguccaugauauu

SEQ ID NO: 2348098 - RNA, 19 nt, Homo sapiens
  misc_RNA (1)...(19): siRNA sense strand
aaugaagagcucugugauu

SEQ ID NO: 2348099 - RNA, 19 nt, Homo sapiens
  misc_RNA (1)...(19): siRNA sense strand
gcaaugaaguagucgacac

SEQ ID NO: 2348100 - RNA, 19 nt, Homo sapiens
  misc_RNA (1)...(19): siRNA sense strand
ggauguuaugggaaaugaa

SEQ ID NO: 2348101 - RNA, 19 nt, Homo sapiens
  misc_RNA (1)...(19): siRNA sense strand
aaguaauccgcuggagaaa

SEQ ID NO: 2348102 - RNA, 19 nt, Homo sapiens
  misc_RNA (1)...(19): siRNA sense strand
uggagacucaagagguuua

SEQ ID NO: 2348103 - RNA, 19 nt, Homo sapiens
  misc_RNA (1)...(19): siRNA sense strand
agauagaagugggucaaca

SEQ ID NO: 2348104 - RNA, 19 nt, Homo sapiens
  misc_RNA (1)...(19): siRNA sense strand
agaaggaggcagaguugga

SEQ ID NO: 2348105 - RNA, 19 nt, Homo sapiens
  misc_RNA (1)...(19): siRNA sense strand
gacaagccaaagauggaaa

SEQ ID NO: 2348106 - RNA, 19 nt, Homo sapiens
  misc_RNA (1)...(19): siRNA sense strand
uauaagggaagucgagaca

SEQ ID NO: 2348107 - RNA, 19 nt, Homo sapiens
  misc_RNA (1)...(19): siRNA sense strand
aggaggcagaguuggacaa

SEQ ID NO: 2348108 - RNA, 19 nt, Homo sapiens
  misc_RNA (1)...(19): siRNA sense strand
cgccagaagcagugaagaa

SEQ ID NO: 2348109 - RNA, 19 nt, Homo sapiens
  misc_RNA (1)...(19): siRNA sense strand
gaguuaugucagagaagaa

SEQ ID NO: 2348110 - RNA, 19 nt, Homo sapiens
  misc_RNA (1)...(19): siRNA sense strand
cagugaagaaggaggcaga

SEQ ID NO: 2348111 - RNA, 19 nt, Homo sapiens
  misc_RNA (1)...(19): siRNA sense strand
aguccaugauauugaaaga

SEQ ID NO: 2348112 - RNA, 19 nt, Homo sapiens
  misc_RNA (1)...(19): siRNA sense strand
cacugaugaccuugagaaa

SEQ ID NO: 2348113 - RNA, 19 nt, Homo sapiens
  misc_RNA (1)...(19): siRNA sense strand
uugaaagaucugaagaaga

SEQ ID NO: 2348114 - RNA, 19 nt, Homo sapiens
  misc_RNA (1)...(19): siRNA sense strand
caaagauggaaaagcauaa

SEQ ID NO: 2348115 - RNA, 19 nt, Homo sapiens
  misc_RNA (1)...(19): siRNA sense strand
ccuggaaugcagaguagaa

SEQ ID NO: 2348116 - RNA, 19 nt, Homo sapiens
  misc_RNA (1)...(19): siRNA sense strand
cgauaugggcuaagcagca

SEQ ID NO: 2348117 - RNA, 19 nt, Homo sapiens
  misc_RNA (1)...(19): siRNA sense strand
acacaagaucacaaaccaa

SEQ ID NO: 2348118 - RNA, 19 nt, Homo sapiens
  misc_RNA (1)...(19): siRNA sense strand
ccaaguaauccgcuggaga

SEQ ID NO: 2348119 - RNA, 19 nt, Homo sapiens
  misc_RNA (1)...(19): siRNA sense strand
caaauguguccauggaaaa

SEQ ID NO: 2348120 - RNA, 19 nt, Homo sapiens
  misc_RNA (1)...(19): siRNA sense strand
aggguaauggguugcgaua

SEQ ID NO: 2348121 - RNA, 19 nt, Homo sapiens
  misc_RNA (1)...(19): siRNA sense strand
gguuuacuuuguaggaaca

SEQ ID NO: 2348122 - RNA, 19 nt, Homo sapiens
  misc_RNA (1)...(19): siRNA sense strand
agacaacaugagugugauu

SEQ ID NO: 2348123 - RNA, 19 nt, Homo sapiens
  misc_RNA (1)...(19): siRNA sense strand
cuguaaugauucagcgugu

SEQ ID NO: 2348124 - RNA, 19 nt, Homo sapiens
  misc_RNA (1)...(19): siRNA sense strand
ccaaagauggaaaagcaua

SEQ ID NO: 2348125 - RNA, 19 nt, Homo sapiens
  misc_RNA (1)...(19): siRNA sense strand
ggucaacagcuguaggugu

SEQ ID NO: 2348126 - RNA, 19 nt, Homo sapiens
  misc_RNA (1)...(19): siRNA sense strand
gccugaaguccaugauauu

SEQ ID NO: 2348127 - RNA, 19 nt, Homo sapiens
  misc_RNA (1)...(19): siRNA sense strand
aaugaagagcucugugauu

SEQ ID NO: 2348128 - RNA, 19 nt, Homo sapiens
  misc_RNA (1)...(19): siRNA sense strand
gcaaugaaguagucgacac

SEQ ID NO: 2348129 - RNA, 19 nt, Homo sapiens
  misc_RNA (1)...(19): siRNA sense strand
ggauguuaugggaaaugaa

SEQ ID NO: 2348130 - RNA, 19 nt, Homo sapiens
  misc_RNA (1)...(19): siRNA sense strand
aaguaauccgcuggagaaa

SEQ ID NO: 2348131 - RNA, 19 nt, Homo sapiens
  misc_RNA (1)...(19): siRNA sense strand
uggagacucaagagguuua

SEQ ID NO: 2348132 - RNA, 19 nt, Homo sapiens
  misc_RNA (1)...(19): siRNA sense strand
agauagaagugggucaaca

SEQ ID NO: 2348133 - RNA, 19 nt, Homo sapiens
  misc_RNA (1)...(19): siRNA sense strand
agaaggaggcagaguugga

SEQ ID NO: 2348134 - RNA, 19 nt, Homo sapiens
  misc_RNA (1)...(19): siRNA sense strand
gacaagccaaagauggaaa

SEQ ID NO: 2348135 - RNA, 19 nt, Homo sapiens
  misc_RNA (1)...(19): siRNA sense strand
uauaagggaagucgagaca

SEQ ID NO: 2348136 - RNA, 19 nt, Homo sapiens
  misc_RNA (1)...(19): siRNA sense strand
aggaggcagaguuggacaa

SEQ ID NO: 2348137 - RNA, 19 nt, Homo sapiens
  misc_RNA (1)...(19): siRNA sense strand
acaauuagauucagcggau

SEQ ID NO: 2348138 - RNA, 19 nt, Homo sapiens
  misc_RNA (1)...(19): siRNA sense strand
augguaugaugaagugaaa

SEQ ID NO: 2348139 - RNA, 19 nt, Homo sapiens
  misc_RNA (1)...(19): siRNA sense strand
gaauauaugguuugggaug

SEQ ID NO: 2348140 - RNA, 19 nt, Homo sapiens
  misc_RNA (1)...(19): siRNA sense strand
aauuagauucagcggauau

SEQ ID NO: 2348141 - RNA, 19 nt, Homo sapiens
  misc_RNA (1)...(19): siRNA sense strand
cagaaugacaugaucgcca

SEQ ID NO: 2348142 - RNA, 19 nt, Homo sapiens
  misc_RNA (1)...(19): siRNA sense strand
auauaugguuugggaugaa

SEQ ID NO: 2348143 - RNA, 19 nt, Homo sapiens
  misc_RNA (1)...(19): siRNA sense strand
acgcagaugguuugggcca

SEQ ID NO: 2348144 - RNA, 19 nt, Homo sapiens
  misc_RNA (1)...(19): siRNA sense strand
uggaauauaugguuuggga

SEQ ID NO: 2348145 - RNA, 19 nt, Homo sapiens
  misc_RNA (1)...(19): siRNA sense strand
caggaaacaucaaggacca

SEQ ID NO: 2348146 - RNA, 19 nt, Homo sapiens
  misc_RNA (1)...(19): siRNA sense strand
cuauggugaccgaggacuu

SEQ ID NO: 2348147 - RNA, 19 nt, Homo sapiens
  misc_RNA (1)...(19): siRNA sense strand
cagaagaaggacgggaaga

SEQ ID NO: 2348148 - RNA, 19 nt, Homo sapiens
  misc_RNA (1)...(19): siRNA sense strand
cucagaagaaggacgggaa

SEQ ID NO: 2348149 - RNA, 19 nt, Homo sapiens
  misc_RNA (1)...(19): siRNA sense strand
acgacaucuucgagcgcau

SEQ ID NO: 2348150 - RNA, 19 nt, Homo sapiens
  misc_RNA (1)...(19): siRNA sense strand
cagaagaaggacgggaaga

SEQ ID NO: 2348151 - RNA, 19 nt, Homo sapiens
  misc_RNA (1)...(19): siRNA sense strand
cucagaagaaggacgggaa

SEQ ID NO: 2348152 - RNA, 19 nt, Homo sapiens
  misc_RNA (1)...(19): siRNA sense strand
acgacaucuucgagcgcau

SEQ ID NO: 2348153 - RNA, 19 nt, Homo sapiens
  misc_RNA (1)...(19): siRNA sense strand
gguaagaagcguaagcgca

SEQ ID NO: 2348154 - RNA, 19 nt, Homo sapiens
  misc_RNA (1)...(19): siRNA sense strand
aggaugguaagaagcguaa

SEQ ID NO: 2348155 - RNA, 19 nt, Homo sapiens
  misc_RNA (1)...(19): siRNA sense strand
acgacaucuucgagcgcau

SEQ ID NO: 2348156 - RNA, 19 nt, Homo sapiens
  misc_RNA (1)...(19): siRNA sense strand
ccuucaaccuggaggaaua

SEQ ID NO: 2348157 - RNA, 19 nt, Homo sapiens
  misc_RNA (1)...(19): siRNA sense strand
gcauaauggagcugguaaa

SEQ ID NO: 2348158 - RNA, 19 nt, Homo sapiens
  misc_RNA (1)...(19): siRNA sense strand
acuuaaggcuccugugaaa

SEQ ID NO: 2348159 - RNA, 19 nt, Homo sapiens
  misc_RNA (1)...(19): siRNA sense strand
ucuugaaccuagaaggaaa

SEQ ID NO: 2348160 - RNA, 19 nt, Homo sapiens
  misc_RNA (1)...(19): siRNA sense strand
acacaauggagcugguaaa

SEQ ID NO: 2348161 - RNA, 19 nt, Homo sapiens
  misc_RNA (1)...(19): siRNA sense strand
cguuaauaauacaggauca

SEQ ID NO: 2348162 - RNA, 19 nt, Homo sapiens
  misc_RNA (1)...(19): siRNA sense strand
ccgaagaagaagaugaaga

SEQ ID NO: 2348163 - RNA, 19 nt, Homo sapiens
  misc_RNA (1)...(19): siRNA sense strand
uggaaaugaaguauggaaa

SEQ ID NO: 2348164 - RNA, 19 nt, Homo sapiens
  misc_RNA (1)...(19): siRNA sense strand
aaguggaacaagagguaaa

SEQ ID NO: 2348165 - RNA, 19 nt, Homo sapiens
  misc_RNA (1)...(19): siRNA sense strand
caacagaaagugaagaaaa

SEQ ID NO: 2348166 - RNA, 19 nt, Homo sapiens
  misc_RNA (1)...(19): siRNA sense strand
gaugaagagaccauggaua

SEQ ID NO: 2348167 - RNA, 19 nt, Homo sapiens
  misc_RNA (1)...(19): siRNA sense strand
aguuagaggcgaugaaaca

SEQ ID NO: 2348168 - RNA, 19 nt, Homo sapiens
  misc_RNA (1)...(19): siRNA sense strand
cugcaauacuugggcauaa

SEQ ID NO: 2348169 - RNA, 19 nt, Homo sapiens
  misc_RNA (1)...(19): siRNA sense strand
agccaaaggaaguggaaca

SEQ ID NO: 2348170 - RNA, 19 nt, Homo sapiens
  misc_RNA (1)...(19): siRNA sense strand
agucuggacaauagaauaa

SEQ ID NO: 2348171 - RNA, 19 nt, Homo sapiens
  misc_RNA (1)...(19): siRNA sense strand
augaagagaccauggauau

SEQ ID NO: 2348172 - RNA, 19 nt, Homo sapiens
  misc_RNA (1)...(19): siRNA sense strand
ggauauagaacuuccaaaa

SEQ ID NO: 2348173 - RNA, 19 nt, Homo sapiens
  misc_RNA (1)...(19): siRNA sense strand
agagaaaaccucaggguau

SEQ ID NO: 2348174 - RNA, 19 nt, Homo sapiens
  misc_RNA (1)...(19): siRNA sense strand
ggguauuggauaucauuua

SEQ ID NO: 2348175 - RNA, 19 nt, Homo sapiens
  misc_RNA (1)...(19): siRNA sense strand
cauugggaaacaagagaaa

SEQ ID NO: 2348176 - RNA, 19 nt, Homo sapiens
  misc_RNA (1)...(19): siRNA sense strand
gguaaaaguacuuccauua

SEQ ID NO: 2348177 - RNA, 19 nt, Homo sapiens
  misc_RNA (1)...(19): siRNA sense strand
gggcagaagagaaaacuaa

SEQ ID NO: 2348178 - RNA, 19 nt, Homo sapiens
  misc_RNA (1)...(19): siRNA sense strand
guuacuaguacuuggaauu

SEQ ID NO: 2348179 - RNA, 19 nt, Homo sapiens
  misc_RNA (1)...(19): siRNA sense strand
agaaaauagccaucagaaa

SEQ ID NO: 2348180 - RNA, 19 nt, Homo sapiens
  misc_RNA (1)...(19): siRNA sense strand
uggaaagacuggaaaagua

SEQ ID NO: 2348181 - RNA, 19 nt, Homo sapiens
  misc_RNA (1)...(19): siRNA sense strand
ccucaggguauuugcuaaa

SEQ ID NO: 2348182 - RNA, 19 nt, Homo sapiens
  misc_RNA (1)...(19): siRNA sense strand
auuaaauguugcaagggaa

SEQ ID NO: 2348183 - RNA, 19 nt, Homo sapiens
  misc_RNA (1)...(19): siRNA sense strand
uuaaauguugcaagggaaa

SEQ ID NO: 2348184 - RNA, 19 nt, Homo sapiens
  misc_RNA (1)...(19): siRNA sense strand
guggugggcagaagagaaa

SEQ ID NO: 2348185 - RNA, 19 nt, Homo sapiens
  misc_RNA (1)...(19): siRNA sense strand
cagaaauggcucagaugau

SEQ ID NO: 2348186 - RNA, 19 nt, Homo sapiens
  misc_RNA (1)...(19): siRNA sense strand
guuaaggcgugaaaggaga

SEQ ID NO: 2348187 - RNA, 19 nt, Homo sapiens
  misc_RNA (1)...(19): siRNA sense strand
cguguaauaccaagaaauu

SEQ ID NO: 2348188 - RNA, 19 nt, Homo sapiens
  misc_RNA (1)...(19): siRNA sense strand
guaaaucaacacugcuaaa

SEQ ID NO: 2348189 - RNA, 19 nt, Homo sapiens
  misc_RNA (1)...(19): siRNA sense strand
aggaaugaaaugugugaca

SEQ ID NO: 2348190 - RNA, 19 nt, Homo sapiens
  misc_RNA (1)...(19): siRNA sense strand
guauaaaguaacucgugaa

SEQ ID NO: 2348191 - RNA, 19 nt, Homo sapiens
  misc_RNA (1)...(19): siRNA sense strand
caguaaggcaacagcauga

SEQ ID NO: 2348192 - RNA, 19 nt, Homo sapiens
  misc_RNA (1)...(19): siRNA sense strand
cugugaaaggacugggcaa

SEQ ID NO: 2348193 - RNA, 19 nt, Homo sapiens
  misc_RNA (1)...(19): siRNA sense strand
aagagcaggagcugggaaa

SEQ ID NO: 2348194 - RNA, 19 nt, Homo sapiens
  misc_RNA (1)...(19): siRNA sense strand
gcguguaauaccaagaaau

SEQ ID NO: 2348195 - RNA, 19 nt, Homo sapiens
  misc_RNA (1)...(19): siRNA sense strand
gcccaagcuuacaaugaaa

SEQ ID NO: 2348196 - RNA, 19 nt, Homo sapiens
  misc_RNA (1)...(19): siRNA sense strand
caugaaauggugggaguua

SEQ ID NO: 2348197 - RNA, 19 nt, Homo sapiens
  misc_RNA (1)...(19): siRNA sense strand
aagaacagucauugggaca

SEQ ID NO: 2348198 - RNA, 19 nt, Homo sapiens
  misc_RNA (1)...(19): siRNA sense strand
guugcaagggaaagaggaa

SEQ ID NO: 2348199 - RNA, 19 nt, Homo sapiens
  misc_RNA (1)...(19): siRNA sense strand
cucuuaagcuccaggaaca

SEQ ID NO: 2348200 - RNA, 19 nt, Homo sapiens
  misc_RNA (1)...(19): siRNA sense strand
ucauaaggugucuggaaau

SEQ ID NO: 2348201 - RNA, 19 nt, Homo sapiens
  misc_RNA (1)...(19): siRNA sense strand
uuacaaggcagcagagcau

SEQ ID NO: 2348202 - RNA, 19 nt, Homo sapiens
  misc_RNA (1)...(19): siRNA sense strand
cuggaaaaguagaagcauu

SEQ ID NO: 2348203 - RNA, 19 nt, Homo sapiens
  misc_RNA (1)...(19): siRNA sense strand
uggcaaaguacuggcuaaa

SEQ ID NO: 2348204 - RNA, 19 nt, Homo sapiens
  misc_RNA (1)...(19): siRNA sense strand
aggacagaucacugcaaua

SEQ ID NO: 2348205 - RNA, 19 nt, Homo sapiens
  misc_RNA (1)...(19): siRNA sense strand
aaaacuaacacuagggauu

SEQ ID NO: 2348206 - RNA, 19 nt, Homo sapiens
  misc_RNA (1)...(19): siRNA sense strand
aagaagaagaugaagaugu

SEQ ID NO: 2348207 - RNA, 19 nt, Homo sapiens
  misc_RNA (1)...(19): siRNA sense strand
aggcugaggcuguguguga

SEQ ID NO: 2348208 - RNA, 19 nt, Homo sapiens
  misc_RNA (1)...(19): siRNA sense strand
uuggcaaaguacuggcuaa

SEQ ID NO: 2348209 - RNA, 19 nt, Homo sapiens
  misc_RNA (1)...(19): siRNA sense strand
ccucaugaguguuuuaaua

SEQ ID NO: 2348210 - RNA, 19 nt, Homo sapiens
  misc_RNA (1)...(19): siRNA sense strand
ucuaaugggaaguugaaau

SEQ ID NO: 2348211 - RNA, 19 nt, Homo sapiens
  misc_RNA (1)...(19): siRNA sense strand
gggaaaucagacagaguaa

SEQ ID NO: 2348212 - RNA, 19 nt, Homo sapiens
  misc_RNA (1)...(19): siRNA sense strand
cagaagagccugaaggaga

SEQ ID NO: 2348213 - RNA, 19 nt, Homo sapiens
  misc_RNA (1)...(19): siRNA sense strand
ggacaaaauaggaaacuaa

SEQ ID NO: 2348214 - RNA, 19 nt, Homo sapiens
  misc_RNA (1)...(19): siRNA sense strand
acacaauggagcugguaaa

SEQ ID NO: 2348215 - RNA, 19 nt, Homo sapiens
  misc_RNA (1)...(19): siRNA sense strand
cagagggaauaaagcgaaa

SEQ ID NO: 2348216 - RNA, 19 nt, Homo sapiens
  misc_RNA (1)...(19): siRNA sense strand
cugaaggagaggaggaaga

SEQ ID NO: 2348217 - RNA, 19 nt, Homo sapiens
  misc_RNA (1)...(19): siRNA sense strand
guuucgaccuggaggagua

SEQ ID NO: 2348218 - RNA, 19 nt, Homo sapiens
  misc_RNA (1)...(19): siRNA sense strand
ugaugaguguguugauaaa

SEQ ID NO: 2348219 - RNA, 19 nt, Homo sapiens
  misc_RNA (1)...(19): siRNA sense strand
caauagacgcagugagagu

SEQ ID NO: 2348220 - RNA, 19 nt, Homo sapiens
  misc_RNA (1)...(19): siRNA sense strand
gcgacagaacauagcuaua

SEQ ID NO: 2348221 - RNA, 19 nt, Homo sapiens
  misc_RNA (1)...(19): siRNA sense strand
ggugugauccagagaguau

SEQ ID NO: 2348222 - RNA, 19 nt, Homo sapiens
  misc_RNA (1)...(19): siRNA sense strand
gcagcaggucugugcaaua

SEQ ID NO: 2348223 - RNA, 19 nt, Homo sapiens
  misc_RNA (1)...(19): siRNA sense strand
aggaagaaacuaaugagaa

SEQ ID NO: 2348224 - RNA, 19 nt, Homo sapiens
  misc_RNA (1)...(19): siRNA sense strand
agucaauguuacacaagaa

SEQ ID NO: 2348225 - RNA, 19 nt, Homo sapiens
  misc_RNA (1)...(19): siRNA sense strand
ggaaggaauaugcaggcaa

SEQ ID NO: 2348226 - RNA, 19 nt, Homo sapiens
  misc_RNA (1)...(19): siRNA sense strand
caaaacuacccaagagaua

SEQ ID NO: 2348227 - RNA, 19 nt, Homo sapiens
  misc_RNA (1)...(19): siRNA sense strand
agaaagagguacaacgagu

SEQ ID NO: 2348228 - RNA, 19 nt, Homo sapiens
  misc_RNA (1)...(19): siRNA sense strand
agaccuugucagagggaau

SEQ ID NO: 2348229 - RNA, 19 nt, Homo sapiens
  misc_RNA (1)...(19): siRNA sense strand
gcaacaaaucauucaguga

SEQ ID NO: 2348230 - RNA, 19 nt, Homo sapiens
  misc_RNA (1)...(19): siRNA sense strand
cuauagaaguggaugccuu

SEQ ID NO: 2348231 - RNA, 19 nt, Homo sapiens
  misc_RNA (1)...(19): siRNA sense strand
gcauggaugaauuggauuu

SEQ ID NO: 2348232 - RNA, 19 nt, Homo sapiens
  misc_RNA (1)...(19): siRNA sense strand
auauggauuucuagggcua

SEQ ID NO: 2348233 - RNA, 19 nt, Homo sapiens
  misc_RNA (1)...(19): siRNA sense strand
aagaaugagaacagugaau

SEQ ID NO: 2348234 - RNA, 19 nt, Homo sapiens
  misc_RNA (1)...(19): siRNA sense strand
aaggagaggaggaagauau

SEQ ID NO: 2348235 - RNA, 19 nt, Homo sapiens
  misc_RNA (1)...(19): siRNA sense strand
gugagagaguagaagcuuu

SEQ ID NO: 2348236 - RNA, 19 nt, Homo sapiens
  misc_RNA (1)...(19): siRNA sense strand
aaacauacuuaguggguug

SEQ ID NO: 2348237 - RNA, 19 nt, Homo sapiens
  misc_RNA (1)...(19): siRNA sense strand
caauguuacacaagaaaga

SEQ ID NO: 2348238 - RNA, 19 nt, Homo sapiens
  misc_RNA (1)...(19): siRNA sense strand
uggaaaggacaaacaaauu

SEQ ID NO: 2348239 - RNA, 19 nt, Homo sapiens
  misc_RNA (1)...(19): siRNA sense strand
gugugguguuugacauaua

SEQ ID NO: 2348240 - RNA, 19 nt, Homo sapiens
  misc_RNA (1)...(19): siRNA sense strand
caagaauggcugauauaga

SEQ ID NO: 2348241 - RNA, 19 nt, Homo sapiens
  misc_RNA (1)...(19): siRNA sense strand
caucaauaagacaggguca

SEQ ID NO: 2348242 - RNA, 19 nt, Homo sapiens
  misc_RNA (1)...(19): siRNA sense strand
agagauaguuaaacagagu

SEQ ID NO: 2348243 - RNA, 19 nt, Homo sapiens
  misc_RNA (1)...(19): siRNA sense strand
agaugaagcugaagaaccu

SEQ ID NO: 2348244 - RNA, 19 nt, Homo sapiens
  misc_RNA (1)...(19): siRNA sense strand
cagcaaguucacuggauuu

SEQ ID NO: 2348245 - RNA, 19 nt, Homo sapiens
  misc_RNA (1)...(19): siRNA sense strand
uaaccaaggcauugaggau

SEQ ID NO: 2348246 - RNA, 19 nt, Homo sapiens
  misc_RNA (1)...(19): siRNA sense strand
caauggacuacuuggaauu

SEQ ID NO: 2348247 - RNA, 19 nt, Homo sapiens
  misc_RNA (1)...(19): siRNA sense strand
cugaugaguguguugauaa

SEQ ID NO: 2348248 - RNA, 19 nt, Homo sapiens
  misc_RNA (1)...(19): siRNA sense strand
gaaugaaaggugugaucca

SEQ ID NO: 2348249 - RNA, 19 nt, Homo sapiens
  misc_RNA (1)...(19): siRNA sense strand
cauagaaaucgcaacaaau

SEQ ID NO: 2348250 - RNA, 19 nt, Homo sapiens
  misc_RNA (1)...(19): siRNA sense strand
gaaacuaaugagaaaggau

SEQ ID NO: 2348251 - RNA, 19 nt, Homo sapiens
  misc_RNA (1)...(19): siRNA sense strand
ugucaagcagugaaugaaa

SEQ ID NO: 2348252 - RNA, 19 nt, Homo sapiens
  misc_RNA (1)...(19): siRNA sense strand
ucacaguggagcuggaaaa

SEQ ID NO: 2348253 - RNA, 19 nt, Homo sapiens
  misc_RNA (1)...(19): siRNA sense strand
cuuaagugguggacaaaau

SEQ ID NO: 2348254 - RNA, 19 nt, Homo sapiens
  misc_RNA (1)...(19): siRNA sense strand
aggcugaggcgguguguga

SEQ ID NO: 2348255 - RNA, 19 nt, Homo sapiens
  misc_RNA (1)...(19): siRNA sense strand
gggaagugugagagaguag

SEQ ID NO: 2348256 - RNA, 19 nt, Homo sapiens
  misc_RNA (1)...(19): siRNA sense strand
ggacaaacaaauuuccaga

SEQ ID NO: 2348257 - RNA, 19 nt, Homo sapiens
  misc_RNA (1)...(19): siRNA sense strand
cugcaagaacugucucaaa

SEQ ID NO: 2348258 - RNA, 19 nt, Homo sapiens
  misc_RNA (1)...(19): siRNA sense strand
gguuaguggaugcgcucaa

SEQ ID NO: 2348259 - RNA, 19 nt, Homo sapiens
  misc_RNA (1)...(19): siRNA sense strand
ugaugaaagagcacagaga

SEQ ID NO: 2348260 - RNA, 19 nt, Homo sapiens
  misc_RNA (1)...(19): siRNA sense strand
ggaaaauauucaagacauc

SEQ ID NO: 2348261 - RNA, 19 nt, Homo sapiens
  misc_RNA (1)...(19): siRNA sense strand
ggucugugcaauagcaaaa

SEQ ID NO: 2348262 - RNA, 19 nt, Homo sapiens
  misc_RNA (1)...(19): siRNA sense strand
cugaagaaccuggcacaaa

SEQ ID NO: 2348263 - RNA, 19 nt, Homo sapiens
  misc_RNA (1)...(19): siRNA sense strand
gugaaaggucucaggaaag

SEQ ID NO: 2348264 - RNA, 19 nt, Homo sapiens
  misc_RNA (1)...(19): siRNA sense strand
cagcacaaagugaagaaaa

SEQ ID NO: 2348265 - RNA, 19 nt, Homo sapiens
  misc_RNA (1)...(19): siRNA sense strand
uuauaggacuguuaggaca

SEQ ID NO: 2348266 - RNA, 19 nt, Homo sapiens
  misc_RNA (1)...(19): siRNA sense strand
gaaagagcacagagaccau

SEQ ID NO: 2348267 - RNA, 19 nt, Homo sapiens
  misc_RNA (1)...(19): siRNA sense strand
ucaugugguccuugagaau

SEQ ID NO: 2348268 - RNA, 19 nt, Homo sapiens
  misc_RNA (1)...(19): siRNA sense strand
ugaaguggagaaagaggua

SEQ ID NO: 2348269 - RNA, 19 nt, Homo sapiens
  misc_RNA (1)...(19): siRNA sense strand
caggaauuagaaauggaaa

SEQ ID NO: 2348270 - RNA, 19 nt, Homo sapiens
  misc_RNA (1)...(19): siRNA sense strand
cuacgagucauaucagaaa

SEQ ID NO: 2348271 - RNA, 19 nt, Homo sapiens
  misc_RNA (1)...(19): siRNA sense strand
gggaaaucagacagaguaa

SEQ ID NO: 2348272 - RNA, 19 nt, Homo sapiens
  misc_RNA (1)...(19): siRNA sense strand
cagaagagccugaaggaga

SEQ ID NO: 2348273 - RNA, 19 nt, Homo sapiens
  misc_RNA (1)...(19): siRNA sense strand
ggacaaaauaggaaacuaa

SEQ ID NO: 2348274 - RNA, 19 nt, Homo sapiens
  misc_RNA (1)...(19): siRNA sense strand
acacaauggagcugguaaa

SEQ ID NO: 2348275 - RNA, 19 nt, Homo sapiens
  misc_RNA (1)...(19): siRNA sense strand
cagagggaauaaagcgaaa

SEQ ID NO: 2348276 - RNA, 19 nt, Homo sapiens
  misc_RNA (1)...(19): siRNA sense strand
cugaaggagaggaggaaga

SEQ ID NO: 2348277 - RNA, 19 nt, Homo sapiens
  misc_RNA (1)...(19): siRNA sense strand
ugaugaguguguugauaaa

SEQ ID NO: 2348278 - RNA, 19 nt, Homo sapiens
  misc_RNA (1)...(19): siRNA sense strand
caauagacgcagugagagu

SEQ ID NO: 2348279 - RNA, 19 nt, Homo sapiens
  misc_RNA (1)...(19): siRNA sense strand
gcgacagaacauagcuaua

SEQ ID NO: 2348280 - RNA, 19 nt, Homo sapiens
  misc_RNA (1)...(19): siRNA sense strand
ggugugauccagagaguau

SEQ ID NO: 2348281 - RNA, 19 nt, Homo sapiens
  misc_RNA (1)...(19): siRNA sense strand
gcagcaggucugugcaaua

SEQ ID NO: 2348282 - RNA, 19 nt, Homo sapiens
  misc_RNA (1)...(19): siRNA sense strand
aggaagaaacuaaugagaa

SEQ ID NO: 2348283 - RNA, 19 nt, Homo sapiens
  misc_RNA (1)...(19): siRNA sense strand
agucaauguuacacaagaa

SEQ ID NO: 2348284 - RNA, 19 nt, Homo sapiens
  misc_RNA (1)...(19): siRNA sense strand
ggaaggaauaugcaggcaa

SEQ ID NO: 2348285 - RNA, 19 nt, Homo sapiens
  misc_RNA (1)...(19): siRNA sense strand
caaaacuacccaagagaua

SEQ ID NO: 2348286 - RNA, 19 nt, Homo sapiens
  misc_RNA (1)...(19): siRNA sense strand
agaaagagguacaacgagu

SEQ ID NO: 2348287 - RNA, 19 nt, Homo sapiens
  misc_RNA (1)...(19): siRNA sense strand
agaccuugucagagggaau

SEQ ID NO: 2348288 - RNA, 19 nt, Homo sapiens
  misc_RNA (1)...(19): siRNA sense strand
gcaacaaaucauucaguga

SEQ ID NO: 2348289 - RNA, 19 nt, Homo sapiens
  misc_RNA (1)...(19): siRNA sense strand
cuauagaaguggaugccuu

SEQ ID NO: 2348290 - RNA, 19 nt, Homo sapiens
  misc_RNA (1)...(19): siRNA sense strand
gcauggaugaauuggauuu

SEQ ID NO: 2348291 - RNA, 19 nt, Homo sapiens
  misc_RNA (1)...(19): siRNA sense strand
auauggauuucuagggcua

SEQ ID NO: 2348292 - RNA, 19 nt, Homo sapiens
  misc_RNA (1)...(19): siRNA sense strand
aagaaugagaacagugaau

SEQ ID NO: 2348293 - RNA, 19 nt, Homo sapiens
  misc_RNA (1)...(19): siRNA sense strand
aaggagaggaggaagauau

SEQ ID NO: 2348294 - RNA, 19 nt, Homo sapiens
  misc_RNA (1)...(19): siRNA sense strand
gugagagaguagaagcuuu

SEQ ID NO: 2348295 - RNA, 19 nt, Homo sapiens
  misc_RNA (1)...(19): siRNA sense strand
aaacauacuuaguggguug

SEQ ID NO: 2348296 - RNA, 19 nt, Homo sapiens
  misc_RNA (1)...(19): siRNA sense strand
caauguuacacaagaaaga

SEQ ID NO: 2348297 - RNA, 19 nt, Homo sapiens
  misc_RNA (1)...(19): siRNA sense strand
uggaaaggacaaacaaauu

SEQ ID NO: 2348298 - RNA, 19 nt, Homo sapiens
  misc_RNA (1)...(19): siRNA sense strand
gugugguguuugacauaua

SEQ ID NO: 2348299 - RNA, 19 nt, Homo sapiens
  misc_RNA (1)...(19): siRNA sense strand
caagaauggcugauauaga

SEQ ID NO: 2348300 - RNA, 19 nt, Homo sapiens
  misc_RNA (1)...(19): siRNA sense strand
caucaauaagacaggguca

SEQ ID NO: 2348301 - RNA, 19 nt, Homo sapiens
  misc_RNA (1)...(19): siRNA sense strand
cagcaaguucacuggauuu

SEQ ID NO: 2348302 - RNA, 19 nt, Homo sapiens
  misc_RNA (1)...(19): siRNA sense strand
uaaccaaggcauugaggau

SEQ ID NO: 2348303 - RNA, 19 nt, Homo sapiens
  misc_RNA (1)...(19): siRNA sense strand
caauggacuacuuggaauu

SEQ ID NO: 2348304 - RNA, 19 nt, Homo sapiens
  misc_RNA (1)...(19): siRNA sense strand
cugaugaguguguugauaa

SEQ ID NO: 2348305 - RNA, 19 nt, Homo sapiens
  misc_RNA (1)...(19): siRNA sense strand
gaaugaaaggugugaucca

SEQ ID NO: 2348306 - RNA, 19 nt, Homo sapiens
  misc_RNA (1)...(19): siRNA sense strand
cauagaaaucgcaacaaau

SEQ ID NO: 2348307 - RNA, 19 nt, Homo sapiens
  misc_RNA (1)...(19): siRNA sense strand
gaaacuaaugagaaaggau

SEQ ID NO: 2348308 - RNA, 19 nt, Homo sapiens
  misc_RNA (1)...(19): siRNA sense strand
ugucaagcagugaaugaaa

SEQ ID NO: 2348309 - RNA, 19 nt, Homo sapiens
  misc_RNA (1)...(19): siRNA sense strand
ucacaguggagcuggaaaa

SEQ ID NO: 2348310 - RNA, 19 nt, Homo sapiens
  misc_RNA (1)...(19): siRNA sense strand
cuuaagugguggacaaaau

SEQ ID NO: 2348311 - RNA, 19 nt, Homo sapiens
  misc_RNA (1)...(19): siRNA sense strand
cugcaagaacugucucaaa

SEQ ID NO: 2348312 - RNA, 19 nt, Homo sapiens
  misc_RNA (1)...(19): siRNA sense strand
gggaagugugagagaguag

SEQ ID NO: 2348313 - RNA, 19 nt, Homo sapiens
  misc_RNA (1)...(19): siRNA sense strand
ggacaaacaaauuuccaga

SEQ ID NO: 2348314 - RNA, 19 nt, Homo sapiens
  misc_RNA (1)...(19): siRNA sense strand
gguuaguggaugcgcucaa

SEQ ID NO: 2348315 - RNA, 19 nt, Homo sapiens
  misc_RNA (1)...(19): siRNA sense strand
ugaugaaagagcacagaga

SEQ ID NO: 2348316 - RNA, 19 nt, Homo sapiens
  misc_RNA (1)...(19): siRNA sense strand
ggaaaauauucaagacauc

SEQ ID NO: 2348317 - RNA, 19 nt, Homo sapiens
  misc_RNA (1)...(19): siRNA sense strand
ggucugugcaauagcaaaa

SEQ ID NO: 2348318 - RNA, 19 nt, Homo sapiens
  misc_RNA (1)...(19): siRNA sense strand
gugaaaggucucaggaaag

SEQ ID NO: 2348319 - RNA, 19 nt, Homo sapiens
  misc_RNA (1)...(19): siRNA sense strand
cagcacaaagugaagaaaa

SEQ ID NO: 2348320 - RNA, 19 nt, Homo sapiens
  misc_RNA (1)...(19): siRNA sense strand
uuauaggacuguuaggaca

SEQ ID NO: 2348321 - RNA, 19 nt, Homo sapiens
  misc_RNA (1)...(19): siRNA sense strand
gaaagagcacagagaccau

SEQ ID NO: 2348322 - RNA, 19 nt, Homo sapiens
  misc_RNA (1)...(19): siRNA sense strand
ucaugugguccuugagaau

SEQ ID NO: 2348323 - RNA, 19 nt, Homo sapiens
  misc_RNA (1)...(19): siRNA sense strand
ugaaguggagaaagaggua

SEQ ID NO: 2348324 - RNA, 19 nt, Homo sapiens
  misc_RNA (1)...(19): siRNA sense strand
caggaauuagaaauggaaa

SEQ ID NO: 2348325 - RNA, 19 nt, Homo sapiens
  misc_RNA (1)...(19): siRNA sense strand
cuacgagucauaucagaaa

SEQ ID NO: 2348326 - RNA, 19 nt, Homo sapiens
  misc_RNA (1)...(19): siRNA sense strand
ccagauggaaagaaugaga

SEQ ID NO: 2348327 - RNA, 19 nt, Homo sapiens
  misc_RNA (1)...(19): siRNA sense strand
agacaauacauuacgucau

SEQ ID NO: 2348328 - RNA, 19 nt, Homo sapiens
  misc_RNA (1)...(19): siRNA sense strand
cagggaagugugagagagu

SEQ ID NO: 2348329 - RNA, 19 nt, Homo sapiens
  misc_RNA (1)...(19): siRNA sense strand
guucauauccaaugggaag

SEQ ID NO: 2348330 - RNA, 19 nt, Homo sapiens
  misc_RNA (1)...(19): siRNA sense strand
ccaacauaguggagagacu

SEQ ID NO: 2348331 - RNA, 19 nt, Homo sapiens
  misc_RNA (1)...(19): siRNA sense strand
cagcagaagcaguugguga

SEQ ID NO: 2348332 - RNA, 19 nt, Homo sapiens
  misc_RNA (1)...(19): siRNA sense strand
agguacaaacugagagaca

SEQ ID NO: 2348333 - RNA, 19 nt, Homo sapiens
  misc_RNA (1)...(19): siRNA sense strand
ugaagaaggaagaggagga

SEQ ID NO: 2348334 - RNA, 19 nt, Homo sapiens
  misc_RNA (1)...(19): siRNA sense strand
cugcaggacaugaguggaa

SEQ ID NO: 2348335 - RNA, 19 nt, Homo sapiens
  misc_RNA (1)...(19): siRNA sense strand
aggaagaggaggaagcuga

SEQ ID NO: 2348336 - RNA, 19 nt, Homo sapiens
  misc_RNA (1)...(19): siRNA sense strand
gauuggaagaagaagaaaa

SEQ ID NO: 2348337 - RNA, 19 nt, Homo sapiens
  misc_RNA (1)...(19): siRNA sense strand
uggaagaagaagaaaagaa

SEQ ID NO: 2348338 - RNA, 19 nt, Homo sapiens
  misc_RNA (1)...(19): siRNA sense strand
ggauaaguuugcagaggcu

SEQ ID NO: 2348339 - RNA, 19 nt, Homo sapiens
  misc_RNA (1)...(19): siRNA sense strand
ugucggagucaguggucaa

SEQ ID NO: 2348340 - RNA, 19 nt, Homo sapiens
  misc_RNA (1)...(19): siRNA sense strand
aggaaugucaggagaaacu

SEQ ID NO: 2348341 - RNA, 19 nt, Homo sapiens
  misc_RNA (1)...(19): siRNA sense strand
ucuguaaggaggauaggaa

SEQ ID NO: 2348342 - RNA, 19 nt, Homo sapiens
  misc_RNA (1)...(19): siRNA sense strand
cuaaucagcaucuggccaa

SEQ ID NO: 2348343 - RNA, 19 nt, Homo sapiens
  misc_RNA (1)...(19): siRNA sense strand
gcugcaaagauuggaagaa

SEQ ID NO: 2348344 - RNA, 19 nt, Homo sapiens
  misc_RNA (1)...(19): siRNA sense strand
cugcaggacaugaguggaa

SEQ ID NO: 2348345 - RNA, 19 nt, Homo sapiens
  misc_RNA (1)...(19): siRNA sense strand
ccaacauaguggagagacu

SEQ ID NO: 2348346 - RNA, 19 nt, Homo sapiens
  misc_RNA (1)...(19): siRNA sense strand
cagcagaagcaguugguga

SEQ ID NO: 2348347 - RNA, 19 nt, Homo sapiens
  misc_RNA (1)...(19): siRNA sense strand
agguacaaacugagagaca

SEQ ID NO: 2348348 - RNA, 19 nt, Homo sapiens
  misc_RNA (1)...(19): siRNA sense strand
ugaagaaggaagaggagga

SEQ ID NO: 2348349 - RNA, 19 nt, Homo sapiens
  misc_RNA (1)...(19): siRNA sense strand
cugcaggacaugaguggaa

SEQ ID NO: 2348350 - RNA, 19 nt, Homo sapiens
  misc_RNA (1)...(19): siRNA sense strand
aggaagaggaggaagcuga

SEQ ID NO: 2348351 - RNA, 19 nt, Homo sapiens
  misc_RNA (1)...(19): siRNA sense strand
gauuggaagaagaagaaaa

SEQ ID NO: 2348352 - RNA, 19 nt, Homo sapiens
  misc_RNA (1)...(19): siRNA sense strand
uggaagaagaagaaaagaa

SEQ ID NO: 2348353 - RNA, 19 nt, Homo sapiens
  misc_RNA (1)...(19): siRNA sense strand
ggauaaguuugcagaggcu

SEQ ID NO: 2348354 - RNA, 19 nt, Homo sapiens
  misc_RNA (1)...(19): siRNA sense strand
ugucggagucaguggucaa

SEQ ID NO: 2348355 - RNA, 19 nt, Homo sapiens
  misc_RNA (1)...(19): siRNA sense strand
aggaaugucaggagaaacu

SEQ ID NO: 2348356 - RNA, 19 nt, Homo sapiens
  misc_RNA (1)...(19): siRNA sense strand
ucuguaaggaggauaggaa

SEQ ID NO: 2348357 - RNA, 19 nt, Homo sapiens
  misc_RNA (1)...(19): siRNA sense strand
cuaaucagcaucuggccaa

SEQ ID NO: 2348358 - RNA, 19 nt, Homo sapiens
  misc_RNA (1)...(19): siRNA sense strand
gcugcaaagauuggaagaa

SEQ ID NO: 2348359 - RNA, 19 nt, Homo sapiens
  misc_RNA (1)...(19): siRNA sense strand
agacacaaagccagagaaa

SEQ ID NO: 2348360 - RNA, 19 nt, Homo sapiens
  misc_RNA (1)...(19): siRNA sense strand
gguuaagaaaguagcucaa

SEQ ID NO: 2348361 - RNA, 19 nt, Homo sapiens
  misc_RNA (1)...(19): siRNA sense strand
uggauuaagcaguaugaaa

SEQ ID NO: 2348362 - RNA, 19 nt, Homo sapiens
  misc_RNA (1)...(19): siRNA sense strand
caagagaaucuguuggcua

SEQ ID NO: 2348363 - RNA, 19 nt, Homo sapiens
  misc_RNA (1)...(19): siRNA sense strand
agaugaaagcagauaaaga

SEQ ID NO: 2348364 - RNA, 19 nt, Homo sapiens
  misc_RNA (1)...(19): siRNA sense strand
uuguagaaggagugguuaa

SEQ ID NO: 2348365 - RNA, 19 nt, Homo sapiens
  misc_RNA (1)...(19): siRNA sense strand
acgaaagaaugcaggaagu

SEQ ID NO: 2348366 - RNA, 19 nt, Homo sapiens
  misc_RNA (1)...(19): siRNA sense strand
auaaugaagaggagaugaa

SEQ ID NO: 2348367 - RNA, 19 nt, Homo sapiens
  misc_RNA (1)...(19): siRNA sense strand
guaugaaacacuagccgaa

SEQ ID NO: 2348368 - RNA, 19 nt, Homo sapiens
  misc_RNA (1)...(19): siRNA sense strand
cggcaacuucaaagaacaa

SEQ ID NO: 2348369 - RNA, 19 nt, Homo sapiens
  misc_RNA (1)...(19): siRNA sense strand
uggcugauguauuggaaga

SEQ ID NO: 2348370 - RNA, 19 nt, Homo sapiens
  misc_RNA (1)...(19): siRNA sense strand
acacaaagccagagaaaac

SEQ ID NO: 2348371 - RNA, 19 nt, Homo sapiens
  misc_RNA (1)...(19): siRNA sense strand
cgugaaagcauuacggguu

SEQ ID NO: 2348372 - RNA, 19 nt, Homo sapiens
  misc_RNA (1)...(19): siRNA sense strand
aguauaaugaagaggagau

SEQ ID NO: 2348373 - RNA, 19 nt, Homo sapiens
  misc_RNA (1)...(19): siRNA sense strand
ucagcaaacaugggagaaa

SEQ ID NO: 2348374 - RNA, 19 nt, Homo sapiens
  misc_RNA (1)...(19): siRNA sense strand
cuuugaagaaacugagaga

SEQ ID NO: 2348375 - RNA, 19 nt, Homo sapiens
  misc_RNA (1)...(19): siRNA sense strand
auguauuggaagauagcaa

SEQ ID NO: 2348376 - RNA, 19 nt, Homo sapiens
  misc_RNA (1)...(19): siRNA sense strand
uugaagaaacugagagaag

SEQ ID NO: 2348377 - RNA, 19 nt, Homo sapiens
  misc_RNA (1)...(19): siRNA sense strand
uaacaagguuccaguggga

SEQ ID NO: 2348378 - RNA, 19 nt, Homo sapiens
  misc_RNA (1)...(19): siRNA sense strand
ugaaauaauugccaaggga

SEQ ID NO: 2348379 - RNA, 19 nt, Homo sapiens
  misc_RNA (1)...(19): siRNA sense strand
uguucuugauucagaguau

SEQ ID NO: 2348380 - RNA, 19 nt, Homo sapiens
  misc_RNA (1)...(19): siRNA sense strand
gauuaagcaguaugaaaca

SEQ ID NO: 2348381 - RNA, 19 nt, Homo sapiens
  misc_RNA (1)...(19): siRNA sense strand
cagcagugcagcagcuauu

SEQ ID NO: 2348382 - RNA, 19 nt, Homo sapiens
  misc_RNA (1)...(19): siRNA sense strand
uggaagauagcaaagacaa

SEQ ID NO: 2348383 - RNA, 19 nt, Homo sapiens
  misc_RNA (1)...(19): siRNA sense strand
caauaaccugaaaggaaau

SEQ ID NO: 2348384 - RNA, 19 nt, Homo sapiens
  misc_RNA (1)...(19): siRNA sense strand
cagugaacuuccaagcaau

SEQ ID NO: 2348385 - RNA, 19 nt, Homo sapiens
  misc_RNA (1)...(19): siRNA sense strand
gcggcaacuucaaagaaca

SEQ ID NO: 2348386 - RNA, 19 nt, Homo sapiens
  misc_RNA (1)...(19): siRNA sense strand
aaggagugguuaagaaagu

SEQ ID NO: 2348387 - RNA, 19 nt, Homo sapiens
  misc_RNA (1)...(19): siRNA sense strand
aggagaugaaagcagauaa

SEQ ID NO: 2348388 - RNA, 19 nt, Homo sapiens
  misc_RNA (1)...(19): siRNA sense strand
aaauaauugccaagggagu

SEQ ID NO: 2348389 - RNA, 19 nt, Homo sapiens
  misc_RNA (1)...(19): siRNA sense strand
guauaaacaucuagacagc

SEQ ID NO: 2348390 - RNA, 19 nt, Homo sapiens
  misc_RNA (1)...(19): siRNA sense strand
acaaaguucaagagaaucu

SEQ ID NO: 2348391 - RNA, 19 nt, Homo sapiens
  misc_RNA (1)...(19): siRNA sense strand
augaaacacuagccgaaau

SEQ ID NO: 2348392 - RNA, 19 nt, Homo sapiens
  misc_RNA (1)...(19): siRNA sense strand
uaguaguucccaaguuaaa

SEQ ID NO: 2348393 - RNA, 19 nt, Homo sapiens
  misc_RNA (1)...(19): siRNA sense strand
aagaggagaugaaagcaga

SEQ ID NO: 2348394 - RNA, 19 nt, Homo sapiens
  misc_RNA (1)...(19): siRNA sense strand
agcaaacaugggagaaauu

SEQ ID NO: 2348395 - RNA, 19 nt, Homo sapiens
  misc_RNA (1)...(19): siRNA sense strand
uucagaauuuggaacgaaa

SEQ ID NO: 2348396 - RNA, 19 nt, Homo sapiens
  misc_RNA (1)...(19): siRNA sense strand
acaagguuccagugggaca

SEQ ID NO: 2348397 - RNA, 19 nt, Homo sapiens
  misc_RNA (1)...(19): siRNA sense strand
ggcuaaacuggaugcauuu

SEQ ID NO: 2348398 - RNA, 19 nt, Homo sapiens
  misc_RNA (1)...(19): siRNA sense strand
uggcuaauggaguggacuu

SEQ ID NO: 2348399 - RNA, 19 nt, Homo sapiens
  misc_RNA (1)...(19): siRNA sense strand
cagaauuuggaacgaaaga

SEQ ID NO: 2348400 - RNA, 19 nt, Homo sapiens
  misc_RNA (1)...(19): siRNA sense strand
cgaaagaaugcaggaaguu

SEQ ID NO: 2348401 - RNA, 19 nt, Homo sapiens
  misc_RNA (1)...(19): siRNA sense strand
cuucagaauuuggaacgaa

SEQ ID NO: 2348402 - RNA, 19 nt, Homo sapiens
  misc_RNA (1)...(19): siRNA sense strand
caacaacaucuuugagcca

SEQ ID NO: 2348403 - RNA, 19 nt, Homo sapiens
  misc_RNA (1)...(19): siRNA sense strand
cguaccugauugagaacau

SEQ ID NO: 2348404 - RNA, 19 nt, Homo sapiens
  misc_RNA (1)...(19): siRNA sense strand
acaacaucuuugagccaca

SEQ ID NO: 2348405 - RNA, 19 nt, Homo sapiens
  misc_RNA (1)...(19): siRNA sense strand
ucuucaaugucaaggaacu

SEQ ID NO: 2348406 - RNA, 19 nt, Homo sapiens
  misc_RNA (1)...(19): siRNA sense strand
cggcaguucucguaccuga

SEQ ID NO: 2348407 - RNA, 19 nt, Homo sapiens
  misc_RNA (1)...(19): siRNA sense strand
ggguuauauuauggguaaa

SEQ ID NO: 2348408 - RNA, 19 nt, Homo sapiens
  misc_RNA (1)...(19): siRNA sense strand
uggaguuacuagaggagau

SEQ ID NO: 2348409 - RNA, 19 nt, Homo sapiens
  misc_RNA (1)...(19): siRNA sense strand
agggauacugagaagaaau

SEQ ID NO: 2348410 - RNA, 19 nt, Homo sapiens
  misc_RNA (1)...(19): siRNA sense strand
gggaagaauggcacgggca

SEQ ID NO: 2348411 - RNA, 19 nt, Homo sapiens
  misc_RNA (1)...(19): siRNA sense strand
uuacagaaacuuaugggau

SEQ ID NO: 2348412 - RNA, 19 nt, Homo sapiens
  misc_RNA (1)...(19): siRNA sense strand
gcucaguagcuagggaaga

SEQ ID NO: 2348413 - RNA, 19 nt, Homo sapiens
  misc_RNA (1)...(19): siRNA sense strand
ggguuauauuauggguaaa

SEQ ID NO: 2348414 - RNA, 19 nt, Homo sapiens
  misc_RNA (1)...(19): siRNA sense strand
uggaguuacuagaggagau

SEQ ID NO: 2348415 - RNA, 19 nt, Homo sapiens
  misc_RNA (1)...(19): siRNA sense strand
agggauacugagaagaaau

SEQ ID NO: 2348416 - RNA, 19 nt, Homo sapiens
  misc_RNA (1)...(19): siRNA sense strand
gggaagaauggcacgggca

SEQ ID NO: 2348417 - RNA, 19 nt, Homo sapiens
  misc_RNA (1)...(19): siRNA sense strand
uuacagaaacuuaugggau

SEQ ID NO: 2348418 - RNA, 19 nt, Homo sapiens
  misc_RNA (1)...(19): siRNA sense strand
gcucaguagcuagggaaga

SEQ ID NO: 2348419 - RNA, 19 nt, Homo sapiens
  misc_RNA (1)...(19): siRNA sense strand
ggguuauauuauggguaaa

SEQ ID NO: 2348420 - RNA, 19 nt, Homo sapiens
  misc_RNA (1)...(19): siRNA sense strand
uggaguuacuagaggagau

SEQ ID NO: 2348421 - RNA, 19 nt, Homo sapiens
  misc_RNA (1)...(19): siRNA sense strand
gggaagaauggcacgggca

SEQ ID NO: 2348422 - RNA, 19 nt, Homo sapiens
  misc_RNA (1)...(19): siRNA sense strand
uuacagaaacuuaugggau

SEQ ID NO: 2348423 - RNA, 19 nt, Homo sapiens
  misc_RNA (1)...(19): siRNA sense strand
gcucaguagcuagggaaga

SEQ ID NO: 2348424 - RNA, 19 nt, Homo sapiens
  misc_RNA (1)...(19): siRNA sense strand
ggaaacaacuucuggugga

SEQ ID NO: 2348425 - RNA, 19 nt, Homo sapiens
  misc_RNA (1)...(19): siRNA sense strand
guccuuugcugguggaaaa

SEQ ID NO: 2348426 - RNA, 19 nt, Homo sapiens
  misc_RNA (1)...(19): siRNA sense strand
acucagucuuuaaggcaga

SEQ ID NO: 2348427 - RNA, 19 nt, Homo sapiens
  misc_RNA (1)...(19): siRNA sense strand
ccagaggccuagagcccau

SEQ ID NO: 2348428 - RNA, 19 nt, Homo sapiens
  misc_RNA (1)...(19): siRNA sense strand
agucuuuaaggcagaacaa

SEQ ID NO: 2348429 - RNA, 19 nt, Homo sapiens
  misc_RNA (1)...(19): siRNA sense strand
cugcugaucgugggagaaa

SEQ ID NO: 2348430 - RNA, 19 nt, Homo sapiens
  misc_RNA (1)...(19): siRNA sense strand
caacauacccagcuccgua

SEQ ID NO: 2348431 - RNA, 19 nt, Homo sapiens
  misc_RNA (1)...(19): siRNA sense strand
gaugauaucaagaggguca

SEQ ID NO: 2348432 - RNA, 19 nt, Homo sapiens
  misc_RNA (1)...(19): siRNA sense strand
cgaucgagaaagugcgcaa

SEQ ID NO: 2348433 - RNA, 19 nt, Homo sapiens
  misc_RNA (1)...(19): siRNA sense strand
uggacaugcaugacgauaa

SEQ ID NO: 2348434 - RNA, 19 nt, Homo sapiens
  misc_RNA (1)...(19): siRNA sense strand
cgcaaaugggagaagaaau

SEQ ID NO: 2348435 - RNA, 19 nt, Homo sapiens
  misc_RNA (1)...(19): siRNA sense strand
agcccaagguugaugacaa

SEQ ID NO: 2348436 - RNA, 19 nt, Homo sapiens
  misc_RNA (1)...(19): siRNA sense strand
ugggagaagaaauggguga

SEQ ID NO: 2348437 - RNA, 19 nt, Homo sapiens
  misc_RNA (1)...(19): siRNA sense strand
cagagaaaguagaucggca

SEQ ID NO: 2348438 - RNA, 19 nt, Homo sapiens
  misc_RNA (1)...(19): siRNA sense strand
ggacgagaaguguggcuca

SEQ ID NO: 2348439 - RNA, 19 nt, Homo sapiens
  misc_RNA (1)...(19): siRNA sense strand
uggaugaggcccaggcuga

SEQ ID NO: 2348440 - RNA, 19 nt, Homo sapiens
  misc_RNA (1)...(19): siRNA sense strand
agaugaaacuggaggccuc

SEQ ID NO: 2348441 - RNA, 19 nt, Homo sapiens
  misc_RNA (1)...(19): siRNA sense strand
ccaucaaacaggagaacag

SEQ ID NO: 2348442 - RNA, 19 nt, Homo sapiens
  misc_RNA (1)...(19): siRNA sense strand
caggagaacagcagcaacu

SEQ ID NO: 2348443 - RNA, 19 nt, Homo sapiens
  misc_RNA (1)...(19): siRNA sense strand
ccaagguggaugaggccca

SEQ ID NO: 2348444 - RNA, 19 nt, Homo sapiens
  misc_RNA (1)...(19): siRNA sense strand
ggaucuggaaggagugcca

SEQ ID NO: 2348445 - RNA, 19 nt, Homo sapiens
  misc_RNA (1)...(19): siRNA sense strand
gggugaaugaggaggauca

SEQ ID NO: 2348446 - RNA, 19 nt, Homo sapiens
  misc_RNA (1)...(19): siRNA sense strand
ggacguuacuauaggcuca

SEQ ID NO: 2348447 - RNA, 19 nt, Homo sapiens
  misc_RNA (1)...(19): siRNA sense strand
gcuacuuugaugagaggua

SEQ ID NO: 2348448 - RNA, 19 nt, Homo sapiens
  misc_RNA (1)...(19): siRNA sense strand
cuggagaugaggagaccua

SEQ ID NO: 2348449 - RNA, 19 nt, Homo sapiens
  misc_RNA (1)...(19): siRNA sense strand
ucaucaagacugugggcau

SEQ ID NO: 2348450 - RNA, 19 nt, Homo sapiens
  misc_RNA (1)...(19): siRNA sense strand
acaacaaugagaagagcuu

SEQ ID NO: 2348451 - RNA, 19 nt, Homo sapiens
  misc_RNA (1)...(19): siRNA sense strand
gugagaugacagaggcuga

SEQ ID NO: 2348452 - RNA, 19 nt, Homo sapiens
  misc_RNA (1)...(19): siRNA sense strand
gggcaugguggcuggagau

SEQ ID NO: 2348453 - RNA, 19 nt, Homo sapiens
  misc_RNA (1)...(19): siRNA sense strand
ccuaugagguauuugcuga

SEQ ID NO: 2348454 - RNA, 19 nt, Homo sapiens
  misc_RNA (1)...(19): siRNA sense strand
uggagagaggccaggauau

SEQ ID NO: 2348455 - RNA, 19 nt, Homo sapiens
  misc_RNA (1)...(19): siRNA sense strand
agguggagcuggugcaacu

SEQ ID NO: 2348456 - RNA, 19 nt, Homo sapiens
  misc_RNA (1)...(19): siRNA sense strand
aaucagagguggagcuggu

SEQ ID NO: 2348457 - RNA, 19 nt, Homo sapiens
  misc_RNA (1)...(19): siRNA sense strand
cagcaggaauggcucgaga

SEQ ID NO: 2348458 - RNA, 19 nt, Homo sapiens
  misc_RNA (1)...(19): siRNA sense strand
gcaaaucagagguggagcu

SEQ ID NO: 2348459 - RNA, 19 nt, Homo sapiens
  misc_RNA (1)...(19): siRNA sense strand
uggaaugagcguuugggau

SEQ ID NO: 2348460 - RNA, 19 nt, Homo sapiens
  misc_RNA (1)...(19): siRNA sense strand
ugaguggccugaaggguga

SEQ ID NO: 2348461 - RNA, 19 nt, Homo sapiens
  misc_RNA (1)...(19): siRNA sense strand
gggaagaccacaaaggccu

SEQ ID NO: 2348462 - RNA, 19 nt, Homo sapiens
  misc_RNA (1)...(19): siRNA sense strand
acgagagggaagaccacaa

SEQ ID NO: 2348463 - RNA, 19 nt, Homo sapiens
  misc_RNA (1)...(19): siRNA sense strand
ucaugauggagcugaguga

SEQ ID NO: 2348464 - RNA, 19 nt, Homo sapiens
  misc_RNA (1)...(19): siRNA sense strand
ggaaagagcugaugaggcu

SEQ ID NO: 2348465 - RNA, 19 nt, Homo sapiens
  misc_RNA (1)...(19): siRNA sense strand
gggaagacaaccaggaccu

SEQ ID NO: 2348466 - RNA, 19 nt, Homo sapiens
  misc_RNA (1)...(19): siRNA sense strand
ugugaaagcaacagagaau

SEQ ID NO: 2348467 - RNA, 19 nt, Homo sapiens
  misc_RNA (1)...(19): siRNA sense strand
gggcgaggugugugugaaa

SEQ ID NO: 2348468 - RNA, 19 nt, Homo sapiens
  misc_RNA (1)...(19): siRNA sense strand
ggguagugguggugcacga

SEQ ID NO: 2348469 - RNA, 19 nt, Homo sapiens
  misc_RNA (1)...(19): siRNA sense strand
cuugaaggacccagcgaaa

SEQ ID NO: 2348470 - RNA, 19 nt, Homo sapiens
  misc_RNA (1)...(19): siRNA sense strand
cagaaauaaggaugucaaa

SEQ ID NO: 2348471 - RNA, 19 nt, Homo sapiens
  misc_RNA (1)...(19): siRNA sense strand
cagaauugucggagugcau

SEQ ID NO: 2348472 - RNA, 19 nt, Homo sapiens
  misc_RNA (1)...(19): siRNA sense strand
gcaugaaggcgauggagga

SEQ ID NO: 2348473 - RNA, 19 nt, Homo sapiens
  misc_RNA (1)...(19): siRNA sense strand
ucgaagauauggugagacu

SEQ ID NO: 2348474 - RNA, 19 nt, Homo sapiens
  misc_RNA (1)...(19): siRNA sense strand
gugggugauuauugaacaa

SEQ ID NO: 2348475 - RNA, 19 nt, Homo sapiens
  misc_RNA (1)...(19): siRNA sense strand
ggggaauacaggugucaaa

SEQ ID NO: 2348476 - RNA, 19 nt, Homo sapiens
  misc_RNA (1)...(19): siRNA sense strand
gcugugucauggagcuaaa

SEQ ID NO: 2348477 - RNA, 19 nt, Homo sapiens
  misc_RNA (1)...(19): siRNA sense strand
gaaaauaucuacaugcgaa

SEQ ID NO: 2348478 - RNA, 19 nt, Homo sapiens
  misc_RNA (1)...(19): siRNA sense strand
gcaacagagaauacaguca

SEQ ID NO: 2348479 - RNA, 19 nt, Homo sapiens
  misc_RNA (1)...(19): siRNA sense strand
ccaacacgcuuaugggcuu

SEQ ID NO: 2348480 - RNA, 19 nt, Homo sapiens
  misc_RNA (1)...(19): siRNA sense strand
cauauaaacagguugcaga

SEQ ID NO: 2348481 - RNA, 19 nt, Homo sapiens
  misc_RNA (1)...(19): siRNA sense strand
auauaaacagguugcagaa

SEQ ID NO: 2348482 - RNA, 19 nt, Homo sapiens
  misc_RNA (1)...(19): siRNA sense strand
cuuauuagaggguguagaa

SEQ ID NO: 2348483 - RNA, 19 nt, Homo sapiens
  misc_RNA (1)...(19): siRNA sense strand
uuaugauacccuuggaaau

SEQ ID NO: 2348484 - RNA, 19 nt, Homo sapiens
  misc_RNA (1)...(19): siRNA sense strand
ggguguagaaaauaaguua

SEQ ID NO: 2348485 - RNA, 19 nt, Homo sapiens
  misc_RNA (1)...(19): siRNA sense strand
cccauauguuugagagagu

SEQ ID NO: 2348486 - RNA, 19 nt, Homo sapiens
  misc_RNA (1)...(19): siRNA sense strand
gaaaauuaucgaccggaaa

SEQ ID NO: 2348487 - RNA, 19 nt, Homo sapiens
  misc_RNA (1)...(19): siRNA sense strand
ucucauugcaauuguggua

SEQ ID NO: 2348488 - RNA, 19 nt, Homo sapiens
  misc_RNA (1)...(19): siRNA sense strand
uuguuuaggcucucggaaa

SEQ ID NO: 2348489 - RNA, 19 nt, Homo sapiens
  misc_RNA (1)...(19): siRNA sense strand
uauuagaggguguagaaaa

SEQ ID NO: 2348490 - RNA, 19 nt, Homo sapiens
  misc_RNA (1)...(19): siRNA sense strand
auuagaggguguagaaaau

SEQ ID NO: 2348491 - RNA, 19 nt, Homo sapiens
  misc_RNA (1)...(19): siRNA sense strand
ccaagaggaaagaagcaga

SEQ ID NO: 2348492 - RNA, 19 nt, Homo sapiens
  misc_RNA (1)...(19): siRNA sense strand
uuguugauguggaagaaau

SEQ ID NO: 2348493 - RNA, 19 nt, Homo sapiens
  misc_RNA (1)...(19): siRNA sense strand
ccgcacuacuugacagcga

SEQ ID NO: 2348494 - RNA, 19 nt, Homo sapiens
  misc_RNA (1)...(19): siRNA sense strand
ccagaugauacuuugauau

SEQ ID NO: 2348495 - RNA, 19 nt, Homo sapiens
  misc_RNA (1)...(19): siRNA sense strand
accugaagaucuugcagua

SEQ ID NO: 2348496 - RNA, 19 nt, Homo sapiens
  misc_RNA (1)...(19): siRNA sense strand
ccaacagacggaagcccaa

SEQ ID NO: 2348497 - RNA, 19 nt, Homo sapiens
  misc_RNA (1)...(19): siRNA sense strand
accgaaacauagugagcga

SEQ ID NO: 2348498 - RNA, 19 nt, Homo sapiens
  misc_RNA (1)...(19): siRNA sense strand
acacaggggacauuggaaa

SEQ ID NO: 2348499 - RNA, 19 nt, Homo sapiens
  misc_RNA (1)...(19): siRNA sense strand
cgacaauggccuucugacu

SEQ ID NO: 2348500 - RNA, 19 nt, Homo sapiens
  misc_RNA (1)...(19): siRNA sense strand
cgauggaggaccugggaag

SEQ ID NO: 2348501 - RNA, 19 nt, Homo sapiens
  misc_RNA (1)...(19): siRNA sense strand
ugaaggauacggacagaca

SEQ ID NO: 2348502 - RNA, 19 nt, Homo sapiens
  misc_RNA (1)...(19): siRNA sense strand
aggcauuucucauugcaau

SEQ ID NO: 2348503 - RNA, 19 nt, Homo sapiens
  misc_RNA (1)...(19): siRNA sense strand
caguggaaguggcggguag

SEQ ID NO: 2348504 - RNA, 19 nt, Homo sapiens
  misc_RNA (1)...(19): siRNA sense strand
ugaaaauuaucgaccggaa

SEQ ID NO: 2348505 - RNA, 19 nt, Homo sapiens
  misc_RNA (1)...(19): siRNA sense strand
cgaaaacagcagaagcuuu

SEQ ID NO: 2348506 - RNA, 19 nt, Homo sapiens
  misc_RNA (1)...(19): siRNA sense strand
agagaguuguagagugugu

SEQ ID NO: 2348507 - RNA, 19 nt, Homo sapiens
  misc_RNA (1)...(19): siRNA sense strand
aagcaaacaccacgcugaa

SEQ ID NO: 2348508 - RNA, 19 nt, Homo sapiens
  misc_RNA (1)...(19): siRNA sense strand
gugaaagcaacagagaaua

SEQ ID NO: 2348509 - RNA, 19 nt, Homo sapiens
  misc_RNA (1)...(19): siRNA sense strand
agcgauggcucuuggacuu

SEQ ID NO: 2348510 - RNA, 19 nt, Homo sapiens
  misc_RNA (1)...(19): siRNA sense strand
ggauacggacagacagagu

SEQ ID NO: 2348511 - RNA, 19 nt, Homo sapiens
  misc_RNA (1)...(19): siRNA sense strand
cccaugagcuguuccggua

SEQ ID NO: 2348512 - RNA, 19 nt, Homo sapiens
  misc_RNA (1)...(19): siRNA sense strand
gagcaaauacggacgggua

SEQ ID NO: 2348513 - RNA, 19 nt, Homo sapiens
  misc_RNA (1)...(19): siRNA sense strand
aaaggaagauuguacgcaa

SEQ ID NO: 2348514 - RNA, 19 nt, Homo sapiens
  misc_RNA (1)...(19): siRNA sense strand
gagaaacccuccugcccaa

SEQ ID NO: 2348515 - RNA, 19 nt, Homo sapiens
  misc_RNA (1)...(19): siRNA sense strand
agcaaauacggacggguaa

SEQ ID NO: 2348516 - RNA, 19 nt, Homo sapiens
  misc_RNA (1)...(19): siRNA sense strand
caguaaaggaagauuguac

SEQ ID NO: 2348517 - RNA, 19 nt, Homo sapiens
  misc_RNA (1)...(19): siRNA sense strand
ccaacaauuacaaugccua

SEQ ID NO: 2348518 - RNA, 19 nt, Homo sapiens
  misc_RNA (1)...(19): siRNA sense strand
acucaauaaagaaggucaa

SEQ ID NO: 2348519 - RNA, 19 nt, Homo sapiens
  misc_RNA (1)...(19): siRNA sense strand
guacagagaaccaucgcua

SEQ ID NO: 2348520 - RNA, 19 nt, Homo sapiens
  misc_RNA (1)...(19): siRNA sense strand
gcuacaugaaauuggagaa

SEQ ID NO: 2348521 - RNA, 19 nt, Homo sapiens
  misc_RNA (1)...(19): siRNA sense strand
ugacaagguuauucagcca

SEQ ID NO: 2348522 - RNA, 19 nt, Homo sapiens
  misc_RNA (1)...(19): siRNA sense strand
uauucagccagcagggaua

SEQ ID NO: 2348523 - RNA, 19 nt, Homo sapiens
  misc_RNA (1)...(19): siRNA sense strand
gagcuugguuucugggacu

SEQ ID NO: 2348524 - RNA, 19 nt, Homo sapiens
  misc_RNA (1)...(19): siRNA sense strand
agggauacuuccugcagau

SEQ ID NO: 2348525 - RNA, 19 nt, Homo sapiens
  misc_RNA (1)...(19): siRNA sense strand
ggucaaauuaugaagggga

SEQ ID NO: 2348526 - RNA, 19 nt, Homo sapiens
  misc_RNA (1)...(19): siRNA sense strand
aggaaucuguguuugaaaa

SEQ ID NO: 2348527 - RNA, 19 nt, Homo sapiens
  misc_RNA (1)...(19): siRNA sense strand
gucaaauuaugaaggggaa

SEQ ID NO: 2348528 - RNA, 19 nt, Homo sapiens
  misc_RNA (1)...(19): siRNA sense strand
acucaauaaagaaggucaa

SEQ ID NO: 2348529 - RNA, 19 nt, Homo sapiens
  misc_RNA (1)...(19): siRNA sense strand
guacagagaaccaucgcua

SEQ ID NO: 2348530 - RNA, 19 nt, Homo sapiens
  misc_RNA (1)...(19): siRNA sense strand
gcuacaugaaauuggagaa

SEQ ID NO: 2348531 - RNA, 19 nt, Homo sapiens
  misc_RNA (1)...(19): siRNA sense strand
ugacaagguuauucagcca

SEQ ID NO: 2348532 - RNA, 19 nt, Homo sapiens
  misc_RNA (1)...(19): siRNA sense strand
uauucagccagcagggaua

SEQ ID NO: 2348533 - RNA, 19 nt, Homo sapiens
  misc_RNA (1)...(19): siRNA sense strand
gagcuugguuucugggacu

SEQ ID NO: 2348534 - RNA, 19 nt, Homo sapiens
  misc_RNA (1)...(19): siRNA sense strand
agggauacuuccugcagau

SEQ ID NO: 2348535 - RNA, 19 nt, Homo sapiens
  misc_RNA (1)...(19): siRNA sense strand
ggucaaauuaugaagggga

SEQ ID NO: 2348536 - RNA, 19 nt, Homo sapiens
  misc_RNA (1)...(19): siRNA sense strand
aggaaucuguguuugaaaa

SEQ ID NO: 2348537 - RNA, 19 nt, Homo sapiens
  misc_RNA (1)...(19): siRNA sense strand
gucaaauuaugaaggggaa

SEQ ID NO: 2348538 - RNA, 19 nt, Homo sapiens
  misc_RNA (1)...(19): siRNA sense strand
cuaagaagacggagagcca

SEQ ID NO: 2348539 - RNA, 19 nt, Homo sapiens
  misc_RNA (1)...(19): siRNA sense strand
ucuuagagcuagcuggcaa

SEQ ID NO: 2348540 - RNA, 19 nt, Homo sapiens
  misc_RNA (1)...(19): siRNA sense strand
accauaaggccaagggcaa

SEQ ID NO: 2348541 - RNA, 19 nt, Homo sapiens
  misc_RNA (1)...(19): siRNA sense strand
uggaaagcaaggcggcaaa

SEQ ID NO: 2348542 - RNA, 19 nt, Homo sapiens
  misc_RNA (1)...(19): siRNA sense strand
ggccgagaucuuagagcua

SEQ ID NO: 2348543 - RNA, 19 nt, Homo sapiens
  misc_RNA (1)...(19): siRNA sense strand
cugccuaagaagacggaga

SEQ ID NO: 2348544 - RNA, 19 nt, Homo sapiens
  misc_RNA (1)...(19): siRNA sense strand
gucuggacguggaaagcaa

SEQ ID NO: 2348545 - RNA, 19 nt, Homo sapiens
  misc_RNA (1)...(19): siRNA sense strand
guggaaagcaaggcggcaa

SEQ ID NO: 2348546 - RNA, 19 nt, Homo sapiens
  misc_RNA (1)...(19): siRNA sense strand
gcggcaaagcucgggcaaa

SEQ ID NO: 2348547 - RNA, 19 nt, Homo sapiens
  misc_RNA (1)...(19): siRNA sense strand
uggaauaucugacggccga

SEQ ID NO: 2348548 - RNA, 19 nt, Homo sapiens
  misc_RNA (1)...(19): siRNA sense strand
cuaaacaaguugcugggua

SEQ ID NO: 2348549 - RNA, 19 nt, Homo sapiens
  misc_RNA (1)...(19): siRNA sense strand
accacaaggccaagggcaa

SEQ ID NO: 2348550 - RNA, 19 nt, Homo sapiens
  misc_RNA (1)...(19): siRNA sense strand
gcggcaagcaaggcggaaa

SEQ ID NO: 2348551 - RNA, 19 nt, Homo sapiens
  misc_RNA (1)...(19): siRNA sense strand
acgacgaggagcuaaacaa

SEQ ID NO: 2348552 - RNA, 19 nt, Homo sapiens
  misc_RNA (1)...(19): siRNA sense strand
gagaauuuccagaggcaaa

SEQ ID NO: 2348553 - RNA, 19 nt, Homo sapiens
  misc_RNA (1)...(19): siRNA sense strand
cagcaaauguggcaggcaa

SEQ ID NO: 2348554 - RNA, 19 nt, Homo sapiens
  misc_RNA (1)...(19): siRNA sense strand
acgucaaacuaaaguguua

SEQ ID NO: 2348555 - RNA, 19 nt, Homo sapiens
  misc_RNA (1)...(19): siRNA sense strand
acgaaauacuucuggaaaa

SEQ ID NO: 2348556 - RNA, 19 nt, Homo sapiens
  misc_RNA (1)...(19): siRNA sense strand
ugcuaagguuauugagaaa

SEQ ID NO: 2348557 - RNA, 19 nt, Homo sapiens
  misc_RNA (1)...(19): siRNA sense strand
ucaaagaggaagaagaaaa

SEQ ID NO: 2348558 - RNA, 19 nt, Homo sapiens
  misc_RNA (1)...(19): siRNA sense strand
agaaagaaaucgaugcuga

SEQ ID NO: 2348559 - RNA, 19 nt, Homo sapiens
  misc_RNA (1)...(19): siRNA sense strand
aagaacaggaaguaggaaa

SEQ ID NO: 2348560 - RNA, 19 nt, Homo sapiens
  misc_RNA (1)...(19): siRNA sense strand
agaagaacccauagaugaa

SEQ ID NO: 2348561 - RNA, 19 nt, Homo sapiens
  misc_RNA (1)...(19): siRNA sense strand
ccacagggcagcagcaaau

SEQ ID NO: 2348562 - RNA, 19 nt, Homo sapiens
  misc_RNA (1)...(19): siRNA sense strand
uuaugaaacuggaaggaca

SEQ ID NO: 2348563 - RNA, 19 nt, Homo sapiens
  misc_RNA (1)...(19): siRNA sense strand
caucaauaacacagaauca

SEQ ID NO: 2348564 - RNA, 19 nt, Homo sapiens
  misc_RNA (1)...(19): siRNA sense strand
uuucaaagaggaagaagaa

SEQ ID NO: 2348565 - RNA, 19 nt, Homo sapiens
  misc_RNA (1)...(19): siRNA sense strand
gagcuaaaagugaaggaaa

SEQ ID NO: 2348566 - RNA, 19 nt, Homo sapiens
  misc_RNA (1)...(19): siRNA sense strand
ccauagaugaagaugaaga

SEQ ID NO: 2348567 - RNA, 19 nt, Homo sapiens
  misc_RNA (1)...(19): siRNA sense strand
agaacaggaaguaggaaau

SEQ ID NO: 2348568 - RNA, 19 nt, Homo sapiens
  misc_RNA (1)...(19): siRNA sense strand
agaaaauagcagcaagaaa

SEQ ID NO: 2348569 - RNA, 19 nt, Homo sapiens
  misc_RNA (1)...(19): siRNA sense strand
ucacaguggagcuggcaaa

SEQ ID NO: 2348570 - RNA, 19 nt, Homo sapiens
  misc_RNA (1)...(19): siRNA sense strand
caggagcacuacagagaau

SEQ ID NO: 2348571 - RNA, 19 nt, Homo sapiens
  misc_RNA (1)...(19): siRNA sense strand
gaaagaaaagaaugcgaaa

SEQ ID NO: 2348572 - RNA, 19 nt, Homo sapiens
  misc_RNA (1)...(19): siRNA sense strand
ggagaugauaagagacuca

SEQ ID NO: 2348573 - RNA, 19 nt, Homo sapiens
  misc_RNA (1)...(19): siRNA sense strand
gaaaagaucgauugggaau

SEQ ID NO: 2348574 - RNA, 19 nt, Homo sapiens
  misc_RNA (1)...(19): siRNA sense strand
ugagagaccaggagcacua

SEQ ID NO: 2348575 - RNA, 19 nt, Homo sapiens
  misc_RNA (1)...(19): siRNA sense strand
gaucauguccaaugggaga

SEQ ID NO: 2348576 - RNA, 19 nt, Homo sapiens
  misc_RNA (1)...(19): siRNA sense strand
ucgaacaaguggagaugau

SEQ ID NO: 2348577 - RNA, 19 nt, Homo sapiens
  misc_RNA (1)...(19): siRNA sense strand
aggacuaaugcuaagguua

SEQ ID NO: 2348578 - RNA, 19 nt, Homo sapiens
  misc_RNA (1)...(19): siRNA sense strand
aagaaauggaggaugaaaa

SEQ ID NO: 2348579 - RNA, 19 nt, Homo sapiens
  misc_RNA (1)...(19): siRNA sense strand
uuuaagugaaggacagaaa

SEQ ID NO: 2348580 - RNA, 19 nt, Homo sapiens
  misc_RNA (1)...(19): siRNA sense strand
cuggagagguggaacugaa

SEQ ID NO: 2348581 - RNA, 19 nt, Homo sapiens
  misc_RNA (1)...(19): siRNA sense strand
agaaauuaacagcaggaau

SEQ ID NO: 2348582 - RNA, 19 nt, Homo sapiens
  misc_RNA (1)...(19): siRNA sense strand
agguauuccucuuuguuaa

SEQ ID NO: 2348583 - RNA, 19 nt, Homo sapiens
  misc_RNA (1)...(19): siRNA sense strand
gugaaggacagaaaagaaa

SEQ ID NO: 2348584 - RNA, 19 nt, Homo sapiens
  misc_RNA (1)...(19): siRNA sense strand
gcacacuggagaagguauu

SEQ ID NO: 2348585 - RNA, 19 nt, Homo sapiens
  misc_RNA (1)...(19): siRNA sense strand
cgaaauacuucuggaaaau

SEQ ID NO: 2348586 - RNA, 19 nt, Homo sapiens
  misc_RNA (1)...(19): siRNA sense strand
cagagaauuuccagaggca

SEQ ID NO: 2348587 - RNA, 19 nt, Homo sapiens
  misc_RNA (1)...(19): siRNA sense strand
aauuagaagcagugaagca

SEQ ID NO: 2348588 - RNA, 19 nt, Homo sapiens
  misc_RNA (1)...(19): siRNA sense strand
gcuauaacuaugaagacau

SEQ ID NO: 2348589 - RNA, 19 nt, Homo sapiens
  misc_RNA (1)...(19): siRNA sense strand
cuggaaaaguggaagcauu

SEQ ID NO: 2348590 - RNA, 19 nt, Homo sapiens
  misc_RNA (1)...(19): siRNA sense strand
acccaauggugcuggaaaa

SEQ ID NO: 2348591 - RNA, 19 nt, Homo sapiens
  misc_RNA (1)...(19): siRNA sense strand
ggaugaaaagagagagcuu

SEQ ID NO: 2348592 - RNA, 19 nt, Homo sapiens
  misc_RNA (1)...(19): siRNA sense strand
agggauucaucuaaaggaa

SEQ ID NO: 2348593 - RNA, 19 nt, Homo sapiens
  misc_RNA (1)...(19): siRNA sense strand
aucuaaaggaaguggaaca

SEQ ID NO: 2348594 - RNA, 19 nt, Homo sapiens
  misc_RNA (1)...(19): siRNA sense strand
aacaagagguacaacgaau

SEQ ID NO: 2348595 - RNA, 19 nt, Homo sapiens
  misc_RNA (1)...(19): siRNA sense strand
agugacagguuaugacauu

SEQ ID NO: 2348596 - RNA, 19 nt, Homo sapiens
  misc_RNA (1)...(19): siRNA sense strand
acuuggaggaaaucagaaa

SEQ ID NO: 2348597 - RNA, 19 nt, Homo sapiens
  misc_RNA (1)...(19): siRNA sense strand
gaagaaaauagcagcaaga

SEQ ID NO: 2348598 - RNA, 19 nt, Homo sapiens
  misc_RNA (1)...(19): siRNA sense strand
caauguaacaaaagagaga

SEQ ID NO: 2348599 - RNA, 19 nt, Homo sapiens
  misc_RNA (1)...(19): siRNA sense strand
caucagaaucagaaauguu

SEQ ID NO: 2348600 - RNA, 19 nt, Homo sapiens
  misc_RNA (1)...(19): siRNA sense strand
uggaauuggacaugcaaaa

SEQ ID NO: 2348601 - RNA, 19 nt, Homo sapiens
  misc_RNA (1)...(19): siRNA sense strand
uugaccaaauacuggaaua

SEQ ID NO: 2348602 - RNA, 19 nt, Homo sapiens
  misc_RNA (1)...(19): siRNA sense strand
augauaagagacucagaaa

SEQ ID NO: 2348603 - RNA, 19 nt, Homo sapiens
  misc_RNA (1)...(19): siRNA sense strand
cugguaaacaaaaggauua

SEQ ID NO: 2348604 - RNA, 19 nt, Homo sapiens
  misc_RNA (1)...(19): siRNA sense strand
acauauucgaauugaguca

SEQ ID NO: 2348605 - RNA, 19 nt, Homo sapiens
  misc_RNA (1)...(19): siRNA sense strand
ucugggaaggguagauaaa

SEQ ID NO: 2348606 - RNA, 19 nt, Homo sapiens
  misc_RNA (1)...(19): siRNA sense strand
acgaaauacuucuggaaaa

SEQ ID NO: 2348607 - RNA, 19 nt, Homo sapiens
  misc_RNA (1)...(19): siRNA sense strand
ugcuaagguuauugagaaa

SEQ ID NO: 2348608 - RNA, 19 nt, Homo sapiens
  misc_RNA (1)...(19): siRNA sense strand
agaaagaaaucgaugcuga

SEQ ID NO: 2348609 - RNA, 19 nt, Homo sapiens
  misc_RNA (1)...(19): siRNA sense strand
ucacaguggagcuggcaaa

SEQ ID NO: 2348610 - RNA, 19 nt, Homo sapiens
  misc_RNA (1)...(19): siRNA sense strand
aagaaauggaggaugaaaa

SEQ ID NO: 2348611 - RNA, 19 nt, Homo sapiens
  misc_RNA (1)...(19): siRNA sense strand
aggacuaaugcuaagguua

SEQ ID NO: 2348612 - RNA, 19 nt, Homo sapiens
  misc_RNA (1)...(19): siRNA sense strand
uuuaagugaaggacagaaa

SEQ ID NO: 2348613 - RNA, 19 nt, Homo sapiens
  misc_RNA (1)...(19): siRNA sense strand
gugaaggacagaaaagaaa

SEQ ID NO: 2348614 - RNA, 19 nt, Homo sapiens
  misc_RNA (1)...(19): siRNA sense strand
cgaaauacuucuggaaaau

SEQ ID NO: 2348615 - RNA, 19 nt, Homo sapiens
  misc_RNA (1)...(19): siRNA sense strand
gcuauaacuaugaagacau

SEQ ID NO: 2348616 - RNA, 19 nt, Homo sapiens
  misc_RNA (1)...(19): siRNA sense strand
cuggaaaaguggaagcauu

SEQ ID NO: 2348617 - RNA, 19 nt, Homo sapiens
  misc_RNA (1)...(19): siRNA sense strand
ggaugaaaagagagagcuu

SEQ ID NO: 2348618 - RNA, 19 nt, Homo sapiens
  misc_RNA (1)...(19): siRNA sense strand
agggauucaucuaaaggaa

SEQ ID NO: 2348619 - RNA, 19 nt, Homo sapiens
  misc_RNA (1)...(19): siRNA sense strand
aucuaaaggaaguggaaca

SEQ ID NO: 2348620 - RNA, 19 nt, Homo sapiens
  misc_RNA (1)...(19): siRNA sense strand
aacaagagguacaacgaau

SEQ ID NO: 2348621 - RNA, 19 nt, Homo sapiens
  misc_RNA (1)...(19): siRNA sense strand
acuuggaggaaaucagaaa

SEQ ID NO: 2348622 - RNA, 19 nt, Homo sapiens
  misc_RNA (1)...(19): siRNA sense strand
caauguaacaaaagagaga

SEQ ID NO: 2348623 - RNA, 19 nt, Homo sapiens
  misc_RNA (1)...(19): siRNA sense strand
caucagaaucagaaauguu

SEQ ID NO: 2348624 - RNA, 19 nt, Homo sapiens
  misc_RNA (1)...(19): siRNA sense strand
uggaauuggacaugcaaaa

SEQ ID NO: 2348625 - RNA, 19 nt, Homo sapiens
  misc_RNA (1)...(19): siRNA sense strand
uugaccaaauacuggaaua

SEQ ID NO: 2348626 - RNA, 19 nt, Homo sapiens
  misc_RNA (1)...(19): siRNA sense strand
ucugggaaggguagauaaa

SEQ ID NO: 2348627 - RNA, 19 nt, Homo sapiens
  misc_RNA (1)...(19): siRNA sense strand
cagaaauguuaagaaggaa

SEQ ID NO: 2348628 - RNA, 19 nt, Homo sapiens
  misc_RNA (1)...(19): siRNA sense strand
aauuuaacccagcagauaa

SEQ ID NO: 2348629 - RNA, 19 nt, Homo sapiens
  misc_RNA (1)...(19): siRNA sense strand
aaguggaacaagagguaca

SEQ ID NO: 2348630 - RNA, 19 nt, Homo sapiens
  misc_RNA (1)...(19): siRNA sense strand
cuuuaaugguuguguauac

SEQ ID NO: 2348631 - RNA, 19 nt, Homo sapiens
  misc_RNA (1)...(19): siRNA sense strand
auagaggauuuguggcuuu

SEQ ID NO: 2348632 - RNA, 19 nt, Homo sapiens
  misc_RNA (1)...(19): siRNA sense strand
gagugugcuguuaaagaaa

SEQ ID NO: 2348633 - RNA, 19 nt, Homo sapiens
  misc_RNA (1)...(19): siRNA sense strand
uggcauuauacuuugacaa

SEQ ID NO: 2348634 - RNA, 19 nt, Homo sapiens
  misc_RNA (1)...(19): siRNA sense strand
gauuauaacuugaauggug

SEQ ID NO: 2348635 - RNA, 19 nt, Homo sapiens
  misc_RNA (1)...(19): siRNA sense strand
ucuacuugcuauuggcauu

SEQ ID NO: 2348636 - RNA, 19 nt, Homo sapiens
  misc_RNA (1)...(19): siRNA sense strand
aggcuugcucuuugacaua

SEQ ID NO: 2348637 - RNA, 19 nt, Homo sapiens
  misc_RNA (1)...(19): siRNA sense strand
gaauagaggauuuguggcu

SEQ ID NO: 2348638 - RNA, 19 nt, Homo sapiens
  misc_RNA (1)...(19): siRNA sense strand
gguuauugagaaagaaauc

SEQ ID NO: 2348639 - RNA, 19 nt, Homo sapiens
  misc_RNA (1)...(19): siRNA sense strand
cuucacaaugagauguuua

SEQ ID NO: 2348640 - RNA, 19 nt, Homo sapiens
  misc_RNA (1)...(19): siRNA sense strand
cuuuacuacuggaaugauu

SEQ ID NO: 2348641 - RNA, 19 nt, Homo sapiens
  misc_RNA (1)...(19): siRNA sense strand
cauccuggcugauagaaaa

SEQ ID NO: 2348642 - RNA, 19 nt, Homo sapiens
  misc_RNA (1)...(19): siRNA sense strand
ggacagaaaagaaagcuga

SEQ ID NO: 2348643 - RNA, 19 nt, Homo sapiens
  misc_RNA (1)...(19): siRNA sense strand
ucucaauacuucuaggacu

SEQ ID NO: 2348644 - RNA, 19 nt, Homo sapiens
  misc_RNA (1)...(19): siRNA sense strand
uugaaaggaacaaguguca

SEQ ID NO: 2348645 - RNA, 19 nt, Homo sapiens
  misc_RNA (1)...(19): siRNA sense strand
ucuaaaggaaguggaacaa

SEQ ID NO: 2348646 - RNA, 19 nt, Homo sapiens
  misc_RNA (1)...(19): siRNA sense strand
uugaauauuuguagcccuu

SEQ ID NO: 2348647 - RNA, 19 nt, Homo sapiens
  misc_RNA (1)...(19): siRNA sense strand
acauuuaagugaaggacag

SEQ ID NO: 2348648 - RNA, 19 nt, Homo sapiens
  misc_RNA (1)...(19): siRNA sense strand
acauccuggcugauagaaa

SEQ ID NO: 2348649 - RNA, 19 nt, Homo sapiens
  misc_RNA (1)...(19): siRNA sense strand
gcguguaucagcaaaccaa

SEQ ID NO: 2348650 - RNA, 19 nt, Homo sapiens
  misc_RNA (1)...(19): siRNA sense strand
aaauacuggaauagaggau

SEQ ID NO: 2348651 - RNA, 19 nt, Homo sapiens
  misc_RNA (1)...(19): siRNA sense strand
uggaguggauuuugaauau

SEQ ID NO: 2348652 - RNA, 19 nt, Homo sapiens
  misc_RNA (1)...(19): siRNA sense strand
caggagacucauauacaau

SEQ ID NO: 2348653 - RNA, 19 nt, Homo sapiens
  misc_RNA (1)...(19): siRNA sense strand
augaaaagagagagcuuau

SEQ ID NO: 2348654 - RNA, 19 nt, Homo sapiens
  misc_RNA (1)...(19): siRNA sense strand
cuucaucucuggaguggau

SEQ ID NO: 2348655 - RNA, 19 nt, Homo sapiens
  misc_RNA (1)...(19): siRNA sense strand
gcucuuugacauauaugaa

SEQ ID NO: 2348656 - RNA, 19 nt, Homo sapiens
  misc_RNA (1)...(19): siRNA sense strand
ucaucuaaaggaaguggaa

SEQ ID NO: 2348657 - RNA, 19 nt, Homo sapiens
  misc_RNA (1)...(19): siRNA sense strand
aggcugacauccuggcuga

SEQ ID NO: 2348658 - RNA, 19 nt, Homo sapiens
  misc_RNA (1)...(19): siRNA sense strand
aguugaagcuggaggagga

SEQ ID NO: 2348659 - RNA, 19 nt, Homo sapiens
  misc_RNA (1)...(19): siRNA sense strand
gugaaggagcggagagaac

SEQ ID NO: 2348660 - RNA, 19 nt, Homo sapiens
  misc_RNA (1)...(19): siRNA sense strand
gggaaaaggcgaggggcaa

SEQ ID NO: 2348661 - RNA, 19 nt, Homo sapiens
  misc_RNA (1)...(19): siRNA sense strand
ccagaaaacugcaggagga

SEQ ID NO: 2348662 - RNA, 19 nt, Homo sapiens
  misc_RNA (1)...(19): siRNA sense strand
gguacaaguugaagcugga

SEQ ID NO: 2348663 - RNA, 19 nt, Homo sapiens
  misc_RNA (1)...(19): siRNA sense strand
agaggaaccugcugcccaa

SEQ ID NO: 2348664 - RNA, 19 nt, Homo sapiens
  misc_RNA (1)...(19): siRNA sense strand
aggaccgauuuguggcuua

SEQ ID NO: 2348665 - RNA, 19 nt, Homo sapiens
  misc_RNA (1)...(19): siRNA sense strand
uggaagaagagcagaggcu

SEQ ID NO: 2348666 - RNA, 19 nt, Homo sapiens
  misc_RNA (1)...(19): siRNA sense strand
gggaggugggcaugaacau

SEQ ID NO: 2348667 - RNA, 19 nt, Homo sapiens
  misc_RNA (1)...(19): siRNA sense strand
acagugaccauguggguga

SEQ ID NO: 2348668 - RNA, 19 nt, Homo sapiens
  misc_RNA (1)...(19): siRNA sense strand
cggaagaagaggagacugc

SEQ ID NO: 2348669 - RNA, 19 nt, Homo sapiens
  misc_RNA (1)...(19): siRNA sense strand
uagccgaguggcagggcaa

SEQ ID NO: 2348670 - RNA, 19 nt, Homo sapiens
  misc_RNA (1)...(19): siRNA sense strand
ugcuggaguuugagaagau

SEQ ID NO: 2348671 - RNA, 19 nt, Homo sapiens
  misc_RNA (1)...(19): siRNA sense strand
accucuaccugguggaaga

SEQ ID NO: 2348672 - RNA, 19 nt, Homo sapiens
  misc_RNA (1)...(19): siRNA sense strand
gaucaccaggacagggaau

SEQ ID NO: 2348673 - RNA, 19 nt, Homo sapiens
  misc_RNA (1)...(19): siRNA sense strand
acuacugggaggugggcau

SEQ ID NO: 2348674 - RNA, 19 nt, Homo sapiens
  misc_RNA (1)...(19): siRNA sense strand
agacacaacucaaggcuca

SEQ ID NO: 2348675 - RNA, 19 nt, Homo sapiens
  misc_RNA (1)...(19): siRNA sense strand
agaaagaggcugcccgaga

SEQ ID NO: 2348676 - RNA, 19 nt, Homo sapiens
  misc_RNA (1)...(19): siRNA sense strand
cagaagcuuaagaagggaa

SEQ ID NO: 2348677 - RNA, 19 nt, Homo sapiens
  misc_RNA (1)...(19): siRNA sense strand
agacacaacucaaggcuca

SEQ ID NO: 2348678 - RNA, 19 nt, Homo sapiens
  misc_RNA (1)...(19): siRNA sense strand
agaaagaggcugcccgaga

SEQ ID NO: 2348679 - RNA, 19 nt, Homo sapiens
  misc_RNA (1)...(19): siRNA sense strand
cagaagcuuaagaagggaa

SEQ ID NO: 2348680 - RNA, 19 nt, Homo sapiens
  misc_RNA (1)...(19): siRNA sense strand
aggcagaggaggagcgaga

SEQ ID NO: 2348681 - RNA, 19 nt, Homo sapiens
  misc_RNA (1)...(19): siRNA sense strand
acaucgagcuggacggcaa

SEQ ID NO: 2348682 - RNA, 19 nt, Homo sapiens
  misc_RNA (1)...(19): siRNA sense strand
ucaaugagcucuucggcaa

SEQ ID NO: 2348683 - RNA, 19 nt, Homo sapiens
  misc_RNA (1)...(19): siRNA sense strand
gaugacaagcggagggcau

SEQ ID NO: 2348684 - RNA, 19 nt, Homo sapiens
  misc_RNA (1)...(19): siRNA sense strand
guuacggacaugagaggaa

SEQ ID NO: 2348685 - RNA, 19 nt, Homo sapiens
  misc_RNA (1)...(19): siRNA sense strand
ccauggagaugaaggagga

SEQ ID NO: 2348686 - RNA, 19 nt, Homo sapiens
  misc_RNA (1)...(19): siRNA sense strand
ggaaaauguucaaggccga

SEQ ID NO: 2348687 - RNA, 19 nt, Homo sapiens
  misc_RNA (1)...(19): siRNA sense strand
aggaggagcgagaggacau

SEQ ID NO: 2348688 - RNA, 19 nt, Homo sapiens
  misc_RNA (1)...(19): siRNA sense strand
uugacgagcucauggaaaa

SEQ ID NO: 2348689 - RNA, 19 nt, Homo sapiens
  misc_RNA (1)...(19): siRNA sense strand
aagucagugucaagggcaa

SEQ ID NO: 2348690 - RNA, 19 nt, Homo sapiens
  misc_RNA (1)...(19): siRNA sense strand
aggacauagagaagaucaa

SEQ ID NO: 2348691 - RNA, 19 nt, Homo sapiens
  misc_RNA (1)...(19): siRNA sense strand
aggcaggacugauggaaac

SEQ ID NO: 2348692 - RNA, 19 nt, Homo sapiens
  misc_RNA (1)...(19): siRNA sense strand
aggaugagaacgagaagca

SEQ ID NO: 2348693 - RNA, 19 nt, Homo sapiens
  misc_RNA (1)...(19): siRNA sense strand
agauuuacauccagaggca

SEQ ID NO: 2348694 - RNA, 19 nt, Homo sapiens
  misc_RNA (1)...(19): siRNA sense strand
augaauuagccacggagaa

SEQ ID NO: 2348695 - RNA, 19 nt, Homo sapiens
  misc_RNA (1)...(19): siRNA sense strand
gggaagguucauaucacaa

SEQ ID NO: 2348696 - RNA, 19 nt, Homo sapiens
  misc_RNA (1)...(19): siRNA sense strand
aggacauggagaaggugaa

SEQ ID NO: 2348697 - RNA, 19 nt, Homo sapiens
  misc_RNA (1)...(19): siRNA sense strand
agaaggugaagcuggacaa

SEQ ID NO: 2348698 - RNA, 19 nt, Homo sapiens
  misc_RNA (1)...(19): siRNA sense strand
uggagaaggugaagcugga

SEQ ID NO: 2348699 - RNA, 19 nt, Homo sapiens
  misc_RNA (1)...(19): siRNA sense strand
uggagaugaaggaggacuu

SEQ ID NO: 2348700 - RNA, 19 nt, Homo sapiens
  misc_RNA (1)...(19): siRNA sense strand
ccugcgaggacgaugacaa

SEQ ID NO: 2348701 - RNA, 19 nt, Homo sapiens
  misc_RNA (1)...(19): siRNA sense strand
aaggcaggacugauggaaa

SEQ ID NO: 2348702 - RNA, 19 nt, Homo sapiens
  misc_RNA (1)...(19): siRNA sense strand
ggcuggaggaugagaacga

SEQ ID NO: 2348703 - RNA, 19 nt, Homo sapiens
  misc_RNA (1)...(19): siRNA sense strand
agcgagaggacauggagaa

SEQ ID NO: 2348704 - RNA, 19 nt, Homo sapiens
  misc_RNA (1)...(19): siRNA sense strand
guucauaucacaaagacga

SEQ ID NO: 2348705 - RNA, 19 nt, Homo sapiens
  misc_RNA (1)...(19): siRNA sense strand
ggauuuuccacaagauuua

SEQ ID NO: 2348706 - RNA, 19 nt, Homo sapiens
  misc_RNA (1)...(19): siRNA sense strand
uuacaaggacauagagaag

SEQ ID NO: 2348707 - RNA, 19 nt, Homo sapiens
  misc_RNA (1)...(19): siRNA sense strand
ggccauaggcuuugggcuc

SEQ ID NO: 2348708 - RNA, 19 nt, Homo sapiens
  misc_RNA (1)...(19): siRNA sense strand
uuaagaacagccucggaaa

SEQ ID NO: 2348709 - RNA, 19 nt, Homo sapiens
  misc_RNA (1)...(19): siRNA sense strand
aggcaaagucagugucaag

SEQ ID NO: 2348710 - RNA, 19 nt, Homo sapiens
  misc_RNA (1)...(19): siRNA sense strand
acaaacaugucgaacggga

SEQ ID NO: 2348711 - RNA, 19 nt, Homo sapiens
  misc_RNA (1)...(19): siRNA sense strand
guggccagucggauggaua

SEQ ID NO: 2348712 - RNA, 19 nt, Homo sapiens
  misc_RNA (1)...(19): siRNA sense strand
ugacaagcggagggcauua

SEQ ID NO: 2348713 - RNA, 19 nt, Homo sapiens
  misc_RNA (1)...(19): siRNA sense strand
agacagagcuggagauggc

SEQ ID NO: 2348714 - RNA, 19 nt, Homo sapiens
  misc_RNA (1)...(19): siRNA sense strand
ccgagguggaucugaacau

SEQ ID NO: 2348715 - RNA, 19 nt, Homo sapiens
  misc_RNA (1)...(19): siRNA sense strand
uuuacaaggacauagagaa

SEQ ID NO: 2348716 - RNA, 19 nt, Homo sapiens
  misc_RNA (1)...(19): siRNA sense strand
gcgaaugguaccagcgugu

SEQ ID NO: 2348717 - RNA, 19 nt, Homo sapiens
  misc_RNA (1)...(19): siRNA sense strand
cagaaggcaaugaccgcua

SEQ ID NO: 2348718 - RNA, 19 nt, Homo sapiens
  misc_RNA (1)...(19): siRNA sense strand
gaacaugcguuuucugaua

SEQ ID NO: 2348719 - RNA, 19 nt, Homo sapiens
  misc_RNA (1)...(19): siRNA sense strand
ccuaugagaacaugcguuu

SEQ ID NO: 2348720 - RNA, 19 nt, Homo sapiens
  misc_RNA (1)...(19): siRNA sense strand
cagagauaccaaugggcau

SEQ ID NO: 2348721 - RNA, 19 nt, Homo sapiens
  misc_RNA (1)...(19): siRNA sense strand
gaacaugcguuuucugaua

SEQ ID NO: 2348722 - RNA, 19 nt, Homo sapiens
  misc_RNA (1)...(19): siRNA sense strand
ccuaugagaacaugcguuu

SEQ ID NO: 2348723 - RNA, 19 nt, Homo sapiens
  misc_RNA (1)...(19): siRNA sense strand
cagagauaccaaugggcau

SEQ ID NO: 2348724 - RNA, 19 nt, Homo sapiens
  misc_RNA (1)...(19): siRNA sense strand
ccgcaugcuuggagguaaa

SEQ ID NO: 2348725 - RNA, 19 nt, Homo sapiens
  misc_RNA (1)...(19): siRNA sense strand
ccaaacaggagaagaagaa

SEQ ID NO: 2348726 - RNA, 19 nt, Homo sapiens
  misc_RNA (1)...(19): siRNA sense strand
uggccaaacaggagaagaa

SEQ ID NO: 2348727 - RNA, 19 nt, Homo sapiens
  misc_RNA (1)...(19): siRNA sense strand
gagguaaaguccaugguuc

SEQ ID NO: 2348728 - RNA, 19 nt, Homo sapiens
  misc_RNA (1)...(19): siRNA sense strand
gccaaacaggagaagaaga

SEQ ID NO: 2348729 - RNA, 19 nt, Homo sapiens
  misc_RNA (1)...(19): siRNA sense strand
caaagaagaugcugccaau

SEQ ID NO: 2348730 - RNA, 19 nt, Homo sapiens
  misc_RNA (1)...(19): siRNA sense strand
gcaacuuaucacaggcaaa

SEQ ID NO: 2348731 - RNA, 19 nt, Homo sapiens
  misc_RNA (1)...(19): siRNA sense strand
gcaaagaagaugcugccaa

SEQ ID NO: 2348732 - RNA, 19 nt, Homo sapiens
  misc_RNA (1)...(19): siRNA sense strand
aagaagaugcugccaauaa

SEQ ID NO: 2348733 - RNA, 19 nt, Homo sapiens
  misc_RNA (1)...(19): siRNA sense strand
gaauagguuaauaggucaa

SEQ ID NO: 2348734 - RNA, 19 nt, Homo sapiens
  misc_RNA (1)...(19): siRNA sense strand
cagcuguaguugagcccua

SEQ ID NO: 2348735 - RNA, 19 nt, Homo sapiens
  misc_RNA (1)...(19): siRNA sense strand
cuguugaaggagaggguga

SEQ ID NO: 2348736 - RNA, 19 nt, Homo sapiens
  misc_RNA (1)...(19): siRNA sense strand
ugaauagguuaauagguca

SEQ ID NO: 2348737 - RNA, 19 nt, Homo sapiens
  misc_RNA (1)...(19): siRNA sense strand
cugagaaagccuaccauga

SEQ ID NO: 2348738 - RNA, 19 nt, Homo sapiens
  misc_RNA (1)...(19): siRNA sense strand
ugguagacaaugaggccau

SEQ ID NO: 2348739 - RNA, 19 nt, Homo sapiens
  misc_RNA (1)...(19): siRNA sense strand
cugaauagguuaauagguc

SEQ ID NO: 2348740 - RNA, 19 nt, Homo sapiens
  misc_RNA (1)...(19): siRNA sense strand
uaucacaggcaaagaagau

SEQ ID NO: 2348741 - RNA, 19 nt, Homo sapiens
  misc_RNA (1)...(19): siRNA sense strand
gugccuucaugguagacaa

SEQ ID NO: 2348742 - RNA, 19 nt, Homo sapiens
  misc_RNA (1)...(19): siRNA sense strand
gcuucaagguuggcaucaa

SEQ ID NO: 2348743 - RNA, 19 nt, Homo sapiens
  misc_RNA (1)...(19): siRNA sense strand
ugagaaagccuaccaugaa

SEQ ID NO: 2348744 - RNA, 19 nt, Homo sapiens
  misc_RNA (1)...(19): siRNA sense strand
gauuauggcaagaagucca

SEQ ID NO: 2348745 - RNA, 19 nt, Homo sapiens
  misc_RNA (1)...(19): siRNA sense strand
ccaucaagaccaagcguac

SEQ ID NO: 2348746 - RNA, 19 nt, Homo sapiens
  misc_RNA (1)...(19): siRNA sense strand
auuaaaugggccagauaua

SEQ ID NO: 2348747 - RNA, 19 nt, Homo sapiens
  misc_RNA (1)...(19): siRNA sense strand
gaaaggugcuucauggaga

SEQ ID NO: 2348748 - RNA, 19 nt, Homo sapiens
  misc_RNA (1)...(19): siRNA sense strand
ugacagagaucacucgcua

SEQ ID NO: 2348749 - RNA, 19 nt, Homo sapiens
  misc_RNA (1)...(19): siRNA sense strand
uguuggaguugcuggugaa

SEQ ID NO: 2348750 - RNA, 19 nt, Homo sapiens
  misc_RNA (1)...(19): siRNA sense strand
gguccaagugaguucaaga

SEQ ID NO: 2348751 - RNA, 19 nt, Homo sapiens
  misc_RNA (1)...(19): siRNA sense strand
aauccagaaugaagagagu

SEQ ID NO: 2348752 - RNA, 19 nt, Homo sapiens
  misc_RNA (1)...(19): siRNA sense strand
gaucaaagaaagaaggcau

SEQ ID NO: 2348753 - RNA, 19 nt, Homo sapiens
  misc_RNA (1)...(19): siRNA sense strand
gaaagaaggcauacgcaga

SEQ ID NO: 2348754 - RNA, 19 nt, Homo sapiens
  misc_RNA (1)...(19): siRNA sense strand
aucaaagaaagaaggcaua

SEQ ID NO: 2348755 - RNA, 19 nt, Homo sapiens
  misc_RNA (1)...(19): siRNA sense strand
gguaucuuucagaguguaa

SEQ ID NO: 2348756 - RNA, 19 nt, Homo sapiens
  misc_RNA (1)...(19): siRNA sense strand
uggccaggcgucugcgaaa

SEQ ID NO: 2348757 - RNA, 19 nt, Homo sapiens
  misc_RNA (1)...(19): siRNA sense strand
gaacagacucgcagggcaa

SEQ ID NO: 2348758 - RNA, 19 nt, Homo sapiens
  misc_RNA (1)...(19): siRNA sense strand
ucacagauuucaugggcca

SEQ ID NO: 2348759 - RNA, 19 nt, Homo sapiens
  misc_RNA (1)...(19): siRNA sense strand
ugggaagacuguuggguac

SEQ ID NO: 2348760 - RNA, 19 nt, Homo sapiens
  misc_RNA (1)...(19): siRNA sense strand
ggucuuuacuucacgggau

SEQ ID NO: 2348761 - RNA, 19 nt, Homo sapiens
  misc_RNA (1)...(19): siRNA sense strand
gcgugagagggaagggcau

SEQ ID NO: 2348762 - RNA, 19 nt, Homo sapiens
  misc_RNA (1)...(19): siRNA sense strand
aggaagaaaaggagaggca

SEQ ID NO: 2348763 - RNA, 19 nt, Homo sapiens
  misc_RNA (1)...(19): siRNA sense strand
cugggaagacuguugggua

SEQ ID NO: 2348764 - RNA, 19 nt, Homo sapiens
  misc_RNA (1)...(19): siRNA sense strand
gacaacagcgugagaggga

SEQ ID NO: 2348765 - RNA, 19 nt, Homo sapiens
  misc_RNA (1)...(19): siRNA sense strand
gguacagaauuccagguca

SEQ ID NO: 2348766 - RNA, 19 nt, Homo sapiens
  misc_RNA (1)...(19): siRNA sense strand
uggcaaugcagggagcaaa

SEQ ID NO: 2348767 - RNA, 19 nt, Homo sapiens
  misc_RNA (1)...(19): siRNA sense strand
ggcaaugcagggagcaaaa

SEQ ID NO: 2348768 - RNA, 19 nt, Homo sapiens
  misc_RNA (1)...(19): siRNA sense strand
agauggaauguacgaguau

SEQ ID NO: 2348769 - RNA, 19 nt, Homo sapiens
  misc_RNA (1)...(19): siRNA sense strand
uaguagcaguagaggaaaa

SEQ ID NO: 2348770 - RNA, 19 nt, Homo sapiens
  misc_RNA (1)...(19): siRNA sense strand
ugaugaaagauuugggcuu

SEQ ID NO: 2348771 - RNA, 19 nt, Homo sapiens
  misc_RNA (1)...(19): siRNA sense strand
ggaaguauucacagcccaa

SEQ ID NO: 2348772 - RNA, 19 nt, Homo sapiens
  misc_RNA (1)...(19): siRNA sense strand
gaagaucuauauaggccaa

SEQ ID NO: 2348773 - RNA, 19 nt, Homo sapiens
  misc_RNA (1)...(19): siRNA sense strand
agggaagaacuaaagagaa

SEQ ID NO: 2348774 - RNA, 19 nt, Homo sapiens
  misc_RNA (1)...(19): siRNA sense strand
aguacaagauccucagcau

SEQ ID NO: 2348775 - RNA, 19 nt, Homo sapiens
  misc_RNA (1)...(19): siRNA sense strand
cggucuugguauggagauu

SEQ ID NO: 2348776 - RNA, 19 nt, Homo sapiens
  misc_RNA (1)...(19): siRNA sense strand
ccugcuuaauaaugcuaua

SEQ ID NO: 2348777 - RNA, 19 nt, Homo sapiens
  misc_RNA (1)...(19): siRNA sense strand
gauuaguagcaguagagga

SEQ ID NO: 2348778 - RNA, 19 nt, Homo sapiens
  misc_RNA (1)...(19): siRNA sense strand
ccuuuaguaccuuggaaga

SEQ ID NO: 2348779 - RNA, 19 nt, Homo sapiens
  misc_RNA (1)...(19): siRNA sense strand
ccagcaacaaggaacagaa

SEQ ID NO: 2348780 - RNA, 19 nt, Homo sapiens
  misc_RNA (1)...(19): siRNA sense strand
acaacuuacguuugaugaa

SEQ ID NO: 2348781 - RNA, 19 nt, Homo sapiens
  misc_RNA (1)...(19): siRNA sense strand
uuguagaaguugaggaacc

SEQ ID NO: 2348782 - RNA, 19 nt, Homo sapiens
  misc_RNA (1)...(19): siRNA sense strand
ucaaugugucccaagcaaa

SEQ ID NO: 2348783 - RNA, 19 nt, Homo sapiens
  misc_RNA (1)...(19): siRNA sense strand
ggaacugagggaagagaau

SEQ ID NO: 2348784 - RNA, 19 nt, Homo sapiens
  misc_RNA (1)...(19): siRNA sense strand
agugagauuccgaaagaaa

SEQ ID NO: 2348785 - RNA, 19 nt, Homo sapiens
  misc_RNA (1)...(19): siRNA sense strand
uggacugggcucagagaaa

SEQ ID NO: 2348786 - RNA, 19 nt, Homo sapiens
  misc_RNA (1)...(19): siRNA sense strand
acgaagagaacaauggcaa

SEQ ID NO: 2348787 - RNA, 19 nt, Homo sapiens
  misc_RNA (1)...(19): siRNA sense strand
acaagaaccuaaagccgaa

SEQ ID NO: 2348788 - RNA, 19 nt, Homo sapiens
  misc_RNA (1)...(19): siRNA sense strand
guccuaacgaagagaacaa

SEQ ID NO: 2348789 - RNA, 19 nt, Homo sapiens
  misc_RNA (1)...(19): siRNA sense strand
cguccauugcgcagacaaa

SEQ ID NO: 2348790 - RNA, 19 nt, Homo sapiens
  misc_RNA (1)...(19): siRNA sense strand
aagccauacaugacaguua

SEQ ID NO: 2348791 - RNA, 19 nt, Homo sapiens
  misc_RNA (1)...(19): siRNA sense strand
gggcgagcgaagacaggaa

SEQ ID NO: 2348792 - RNA, 19 nt, Homo sapiens
  misc_RNA (1)...(19): siRNA sense strand
gcaaaguucugaaaccgaa

SEQ ID NO: 2348793 - RNA, 19 nt, Homo sapiens
  misc_RNA (1)...(19): siRNA sense strand
aggaaaugguugugcuauc

SEQ ID NO: 2348794 - RNA, 19 nt, Homo sapiens
  misc_RNA (1)...(19): siRNA sense strand
ucgccaacucagcggguua

SEQ ID NO: 2348795 - RNA, 19 nt, Homo sapiens
  misc_RNA (1)...(19): siRNA sense strand
uuggagaagcagaccguua

SEQ ID NO: 2348796 - RNA, 19 nt, Homo sapiens
  misc_RNA (1)...(19): siRNA sense strand
ugguaaaacccaagaggau

SEQ ID NO: 2348797 - RNA, 19 nt, Homo sapiens
  misc_RNA (1)...(19): siRNA sense strand
cagcgguucaagacagaaa

SEQ ID NO: 2348798 - RNA, 19 nt, Homo sapiens
  misc_RNA (1)...(19): siRNA sense strand
ccaggaaaugguugugcua

SEQ ID NO: 2348799 - RNA, 19 nt, Homo sapiens
  misc_RNA (1)...(19): siRNA sense strand
acacacgcccauagagauu

SEQ ID NO: 2348800 - RNA, 19 nt, Homo sapiens
  misc_RNA (1)...(19): siRNA sense strand
cuaaagaggagaaaccaga

SEQ ID NO: 2348801 - RNA, 19 nt, Homo sapiens
  misc_RNA (1)...(19): siRNA sense strand
gcaccaaguuacauccaga

SEQ ID NO: 2348802 - RNA, 19 nt, Homo sapiens
  misc_RNA (1)...(19): siRNA sense strand
accaaagacgucacagaua

SEQ ID NO: 2348803 - RNA, 19 nt, Homo sapiens
  misc_RNA (1)...(19): siRNA sense strand
cuaccgaacuguaugcaga

SEQ ID NO: 2348804 - RNA, 19 nt, Homo sapiens
  misc_RNA (1)...(19): siRNA sense strand
cggaguuccacaagcacua

SEQ ID NO: 2348805 - RNA, 19 nt, Homo sapiens
  misc_RNA (1)...(19): siRNA sense strand
gagaaaccagagaggagau

SEQ ID NO: 2348806 - RNA, 19 nt, Homo sapiens
  misc_RNA (1)...(19): siRNA sense strand
cuaagcuggcaaagagaau

SEQ ID NO: 2348807 - RNA, 19 nt, Homo sapiens
  misc_RNA (1)...(19): siRNA sense strand
ccaacuggaaucaagggaa

SEQ ID NO: 2348808 - RNA, 19 nt, Homo sapiens
  misc_RNA (1)...(19): siRNA sense strand
aggagaaaccagagaggag

SEQ ID NO: 2348809 - RNA, 19 nt, Homo sapiens
  misc_RNA (1)...(19): siRNA sense strand
caacuggaaucaagggaag

SEQ ID NO: 2348810 - RNA, 19 nt, Homo sapiens
  misc_RNA (1)...(19): siRNA sense strand
ggaugaacagcgagagggu

SEQ ID NO: 2348811 - RNA, 19 nt, Homo sapiens
  misc_RNA (1)...(19): siRNA sense strand
aagagaaucccuugaacca

SEQ ID NO: 2348812 - RNA, 19 nt, Homo sapiens
  misc_RNA (1)...(19): siRNA sense strand
gagaaucccuugaaccaca

SEQ ID NO: 2348813 - RNA, 19 nt, Homo sapiens
  misc_RNA (1)...(19): siRNA sense strand
ucuagguggccuuggguuu

SEQ ID NO: 2348814 - RNA, 19 nt, Homo sapiens
  misc_RNA (1)...(19): siRNA sense strand
cacuaacguuucaggguca

SEQ ID NO: 2348815 - RNA, 19 nt, Homo sapiens
  misc_RNA (1)...(19): siRNA sense strand
gugacuuccacgaaacuua

SEQ ID NO: 2348816 - RNA, 19 nt, Homo sapiens
  misc_RNA (1)...(19): siRNA sense strand
ggagaaaccagagaggaga

SEQ ID NO: 2348817 - RNA, 19 nt, Homo sapiens
  misc_RNA (1)...(19): siRNA sense strand
cagcagagaguguuggcca

SEQ ID NO: 2348818 - RNA, 19 nt, Homo sapiens
  misc_RNA (1)...(19): siRNA sense strand
agagaaaggucgggaggcu

SEQ ID NO: 2348819 - RNA, 19 nt, Homo sapiens
  misc_RNA (1)...(19): siRNA sense strand
auccagagaugcaguucaa

SEQ ID NO: 2348820 - RNA, 19 nt, Homo sapiens
  misc_RNA (1)...(19): siRNA sense strand
cuucaguugcccugucaaa

SEQ ID NO: 2348821 - RNA, 19 nt, Homo sapiens
  misc_RNA (1)...(19): siRNA sense strand
ccacagcagcggaguucau

SEQ ID NO: 2348822 - RNA, 19 nt, Homo sapiens
  misc_RNA (1)...(19): siRNA sense strand
ugcuguaacuuuugguaaa

SEQ ID NO: 2348823 - RNA, 19 nt, Homo sapiens
  misc_RNA (1)...(19): siRNA sense strand
ugagauuccgaaagaaaca

SEQ ID NO: 2348824 - RNA, 19 nt, Homo sapiens
  misc_RNA (1)...(19): siRNA sense strand
acaucaauggugcuaguua

SEQ ID NO: 2348825 - RNA, 19 nt, Homo sapiens
  misc_RNA (1)...(19): siRNA sense strand
agauuacuaaagaggagaa

SEQ ID NO: 2348826 - RNA, 19 nt, Homo sapiens
  misc_RNA (1)...(19): siRNA sense strand
cagcuuugcagcagagagu

SEQ ID NO: 2348827 - RNA, 19 nt, Homo sapiens
  misc_RNA (1)...(19): siRNA sense strand
agauggagcugaugaggcu

SEQ ID NO: 2348828 - RNA, 19 nt, Homo sapiens
  misc_RNA (1)...(19): siRNA sense strand
gauuacuaaagaggagaaa

SEQ ID NO: 2348829 - RNA, 19 nt, Homo sapiens
  misc_RNA (1)...(19): siRNA sense strand
ggaacugagggaagagaau

SEQ ID NO: 2348830 - RNA, 19 nt, Homo sapiens
  misc_RNA (1)...(19): siRNA sense strand
agugagauuccgaaagaaa

SEQ ID NO: 2348831 - RNA, 19 nt, Homo sapiens
  misc_RNA (1)...(19): siRNA sense strand
uggacugggcucagagaaa

SEQ ID NO: 2348832 - RNA, 19 nt, Homo sapiens
  misc_RNA (1)...(19): siRNA sense strand
acgaagagaacaauggcaa

SEQ ID NO: 2348833 - RNA, 19 nt, Homo sapiens
  misc_RNA (1)...(19): siRNA sense strand
acaagaaccuaaagccgaa

SEQ ID NO: 2348834 - RNA, 19 nt, Homo sapiens
  misc_RNA (1)...(19): siRNA sense strand
guccuaacgaagagaacaa

SEQ ID NO: 2348835 - RNA, 19 nt, Homo sapiens
  misc_RNA (1)...(19): siRNA sense strand
cguccauugcgcagacaaa

SEQ ID NO: 2348836 - RNA, 19 nt, Homo sapiens
  misc_RNA (1)...(19): siRNA sense strand
aagccauacaugacaguua

SEQ ID NO: 2348837 - RNA, 19 nt, Homo sapiens
  misc_RNA (1)...(19): siRNA sense strand
gggcgagcgaagacaggaa

SEQ ID NO: 2348838 - RNA, 19 nt, Homo sapiens
  misc_RNA (1)...(19): siRNA sense strand
gcaaaguucugaaaccgaa

SEQ ID NO: 2348839 - RNA, 19 nt, Homo sapiens
  misc_RNA (1)...(19): siRNA sense strand
aggaaaugguugugcuauc

SEQ ID NO: 2348840 - RNA, 19 nt, Homo sapiens
  misc_RNA (1)...(19): siRNA sense strand
ucgccaacucagcggguua

SEQ ID NO: 2348841 - RNA, 19 nt, Homo sapiens
  misc_RNA (1)...(19): siRNA sense strand
uuggagaagcagaccguua

SEQ ID NO: 2348842 - RNA, 19 nt, Homo sapiens
  misc_RNA (1)...(19): siRNA sense strand
ugguaaaacccaagaggau

SEQ ID NO: 2348843 - RNA, 19 nt, Homo sapiens
  misc_RNA (1)...(19): siRNA sense strand
cagcgguucaagacagaaa

SEQ ID NO: 2348844 - RNA, 19 nt, Homo sapiens
  misc_RNA (1)...(19): siRNA sense strand
ccaggaaaugguugugcua

SEQ ID NO: 2348845 - RNA, 19 nt, Homo sapiens
  misc_RNA (1)...(19): siRNA sense strand
acacacgcccauagagauu

SEQ ID NO: 2348846 - RNA, 19 nt, Homo sapiens
  misc_RNA (1)...(19): siRNA sense strand
cuaaagaggagaaaccaga

SEQ ID NO: 2348847 - RNA, 19 nt, Homo sapiens
  misc_RNA (1)...(19): siRNA sense strand
gcaccaaguuacauccaga

SEQ ID NO: 2348848 - RNA, 19 nt, Homo sapiens
  misc_RNA (1)...(19): siRNA sense strand
accaaagacgucacagaua

SEQ ID NO: 2348849 - RNA, 19 nt, Homo sapiens
  misc_RNA (1)...(19): siRNA sense strand
cuaccgaacuguaugcaga

SEQ ID NO: 2348850 - RNA, 19 nt, Homo sapiens
  misc_RNA (1)...(19): siRNA sense strand
cggaguuccacaagcacua

SEQ ID NO: 2348851 - RNA, 19 nt, Homo sapiens
  misc_RNA (1)...(19): siRNA sense strand
gagaaaccagagaggagau

SEQ ID NO: 2348852 - RNA, 19 nt, Homo sapiens
  misc_RNA (1)...(19): siRNA sense strand
cuaagcuggcaaagagaau

SEQ ID NO: 2348853 - RNA, 19 nt, Homo sapiens
  misc_RNA (1)...(19): siRNA sense strand
ccaacuggaaucaagggaa

SEQ ID NO: 2348854 - RNA, 19 nt, Homo sapiens
  misc_RNA (1)...(19): siRNA sense strand
aggagaaaccagagaggag

SEQ ID NO: 2348855 - RNA, 19 nt, Homo sapiens
  misc_RNA (1)...(19): siRNA sense strand
caacuggaaucaagggaag

SEQ ID NO: 2348856 - RNA, 19 nt, Homo sapiens
  misc_RNA (1)...(19): siRNA sense strand
ggaugaacagcgagagggu

SEQ ID NO: 2348857 - RNA, 19 nt, Homo sapiens
  misc_RNA (1)...(19): siRNA sense strand
aagagaaucccuugaacca

SEQ ID NO: 2348858 - RNA, 19 nt, Homo sapiens
  misc_RNA (1)...(19): siRNA sense strand
gagaaucccuugaaccaca

SEQ ID NO: 2348859 - RNA, 19 nt, Homo sapiens
  misc_RNA (1)...(19): siRNA sense strand
ucuagguggccuuggguuu

SEQ ID NO: 2348860 - RNA, 19 nt, Homo sapiens
  misc_RNA (1)...(19): siRNA sense strand
cacuaacguuucaggguca

SEQ ID NO: 2348861 - RNA, 19 nt, Homo sapiens
  misc_RNA (1)...(19): siRNA sense strand
gugacuuccacgaaacuua

SEQ ID NO: 2348862 - RNA, 19 nt, Homo sapiens
  misc_RNA (1)...(19): siRNA sense strand
ggagaaaccagagaggaga

SEQ ID NO: 2348863 - RNA, 19 nt, Homo sapiens
  misc_RNA (1)...(19): siRNA sense strand
cagcagagaguguuggcca

SEQ ID NO: 2348864 - RNA, 19 nt, Homo sapiens
  misc_RNA (1)...(19): siRNA sense strand
agagaaaggucgggaggcu

SEQ ID NO: 2348865 - RNA, 19 nt, Homo sapiens
  misc_RNA (1)...(19): siRNA sense strand
auccagagaugcaguucaa

SEQ ID NO: 2348866 - RNA, 19 nt, Homo sapiens
  misc_RNA (1)...(19): siRNA sense strand
cuucaguugcccugucaaa

SEQ ID NO: 2348867 - RNA, 19 nt, Homo sapiens
  misc_RNA (1)...(19): siRNA sense strand
ccacagcagcggaguucau

SEQ ID NO: 2348868 - RNA, 19 nt, Homo sapiens
  misc_RNA (1)...(19): siRNA sense strand
ugcuguaacuuuugguaaa

SEQ ID NO: 2348869 - RNA, 19 nt, Homo sapiens
  misc_RNA (1)...(19): siRNA sense strand
ugagauuccgaaagaaaca

SEQ ID NO: 2348870 - RNA, 19 nt, Homo sapiens
  misc_RNA (1)...(19): siRNA sense strand
acaucaauggugcuaguua

SEQ ID NO: 2348871 - RNA, 19 nt, Homo sapiens
  misc_RNA (1)...(19): siRNA sense strand
agauuacuaaagaggagaa

SEQ ID NO: 2348872 - RNA, 19 nt, Homo sapiens
  misc_RNA (1)...(19): siRNA sense strand
cagcuuugcagcagagagu

SEQ ID NO: 2348873 - RNA, 19 nt, Homo sapiens
  misc_RNA (1)...(19): siRNA sense strand
agauggagcugaugaggcu

SEQ ID NO: 2348874 - RNA, 19 nt, Homo sapiens
  misc_RNA (1)...(19): siRNA sense strand
gauuacuaaagaggagaaa

SEQ ID NO: 2348875 - RNA, 19 nt, Homo sapiens
  misc_RNA (1)...(19): siRNA sense strand
acaucuaugaggugguaaa

SEQ ID NO: 2348876 - RNA, 19 nt, Homo sapiens
  misc_RNA (1)...(19): siRNA sense strand
acaugaaggcacagggcau

SEQ ID NO: 2348877 - RNA, 19 nt, Homo sapiens
  misc_RNA (1)...(19): siRNA sense strand
cggacauggcgcagaccaa

SEQ ID NO: 2348878 - RNA, 19 nt, Homo sapiens
  misc_RNA (1)...(19): siRNA sense strand
aggcagaguucgacgccau

SEQ ID NO: 2348879 - RNA, 19 nt, Homo sapiens
  misc_RNA (1)...(19): siRNA sense strand
ggaaagaaauguggcacca

SEQ ID NO: 2348880 - RNA, 19 nt, Homo sapiens
  misc_RNA (1)...(19): siRNA sense strand
gugccaacaagcuggacaa

SEQ ID NO: 2348881 - RNA, 19 nt, Homo sapiens
  misc_RNA (1)...(19): siRNA sense strand
gcgcaaguucauuguggau

SEQ ID NO: 2348882 - RNA, 19 nt, Homo sapiens
  misc_RNA (1)...(19): siRNA sense strand
cugcacccuuggagagauu

SEQ ID NO: 2348883 - RNA, 19 nt, Homo sapiens
  misc_RNA (1)...(19): siRNA sense strand
ugguggagcuggauggcga

SEQ ID NO: 2348884 - RNA, 19 nt, Homo sapiens
  misc_RNA (1)...(19): siRNA sense strand
aagcuggacaagaaagauu

SEQ ID NO: 2348885 - RNA, 19 nt, Homo sapiens
  misc_RNA (1)...(19): siRNA sense strand
aaggagggacccagaucaa

SEQ ID NO: 2348886 - RNA, 19 nt, Homo sapiens
  misc_RNA (1)...(19): siRNA sense strand
acggcauccuggaggccua

SEQ ID NO: 2348887 - RNA, 19 nt, Homo sapiens
  misc_RNA (1)...(19): siRNA sense strand
uguccuacaugaaggcaca

SEQ ID NO: 2348888 - RNA, 19 nt, Homo sapiens
  misc_RNA (1)...(19): siRNA sense strand
augcacaaucggagacaaa

SEQ ID NO: 2348889 - RNA, 19 nt, Homo sapiens
  misc_RNA (1)...(19): siRNA sense strand
cggcggagccaauggaaaa

SEQ ID NO: 2348890 - RNA, 19 nt, Homo sapiens
  misc_RNA (1)...(19): siRNA sense strand
cugagcuaguguuggauaa

SEQ ID NO: 2348891 - RNA, 19 nt, Homo sapiens
  misc_RNA (1)...(19): siRNA sense strand
augagaagcuagaucgaga

SEQ ID NO: 2348892 - RNA, 19 nt, Homo sapiens
  misc_RNA (1)...(19): siRNA sense strand
auaaagagcuggaucggga

SEQ ID NO: 2348893 - RNA, 19 nt, Homo sapiens
  misc_RNA (1)...(19): siRNA sense strand
ggaaacaaugggaagacga

SEQ ID NO: 2348894 - RNA, 19 nt, Homo sapiens
  misc_RNA (1)...(19): siRNA sense strand
auggaaaacccuuuagaaa

SEQ ID NO: 2348895 - RNA, 19 nt, Homo sapiens
  misc_RNA (1)...(19): siRNA sense strand
gaagaaacggagagaggcu

SEQ ID NO: 2348896 - RNA, 19 nt, Homo sapiens
  misc_RNA (1)...(19): siRNA sense strand
acugagggugauagauaua

SEQ ID NO: 2348897 - RNA, 19 nt, Homo sapiens
  misc_RNA (1)...(19): siRNA sense strand
gagauuggauggaugcaca

SEQ ID NO: 2348898 - RNA, 19 nt, Homo sapiens
  misc_RNA (1)...(19): siRNA sense strand
uggaaaacccuuuagaaau

SEQ ID NO: 2348899 - RNA, 19 nt, Homo sapiens
  misc_RNA (1)...(19): siRNA sense strand
caacuaagauuaacccuga

SEQ ID NO: 2348900 - RNA, 19 nt, Homo sapiens
  misc_RNA (1)...(19): siRNA sense strand
aguaaaacuuuggagguaa

SEQ ID NO: 2348901 - RNA, 19 nt, Homo sapiens
  misc_RNA (1)...(19): siRNA sense strand
cgucuuaugaagugcgcau

SEQ ID NO: 2348902 - RNA, 19 nt, Homo sapiens
  misc_RNA (1)...(19): siRNA sense strand
ugguggacgugaaugacaa

SEQ ID NO: 2348903 - RNA, 19 nt, Homo sapiens
  misc_RNA (1)...(19): siRNA sense strand
gaagcuagaucgagaggag

SEQ ID NO: 2348904 - RNA, 19 nt, Homo sapiens
  misc_RNA (1)...(19): siRNA sense strand
gggugauagauauaaauga

SEQ ID NO: 2348905 - RNA, 19 nt, Homo sapiens
  misc_RNA (1)...(19): siRNA sense strand
aggaagcaauaauguucaa

SEQ ID NO: 2348906 - RNA, 19 nt, Homo sapiens
  misc_RNA (1)...(19): siRNA sense strand
ggguugggguugacagaga

SEQ ID NO: 2348907 - RNA, 19 nt, Homo sapiens
  misc_RNA (1)...(19): siRNA sense strand
caaucggagacaaaggcaa

SEQ ID NO: 2348908 - RNA, 19 nt, Homo sapiens
  misc_RNA (1)...(19): siRNA sense strand
uggugcuggucaaggacaa

SEQ ID NO: 2348909 - RNA, 19 nt, Homo sapiens
  misc_RNA (1)...(19): siRNA sense strand
caggcugaacugaggguga

SEQ ID NO: 2348910 - RNA, 19 nt, Homo sapiens
  misc_RNA (1)...(19): siRNA sense strand
aggugguggacgugaauga

SEQ ID NO: 2348911 - RNA, 19 nt, Homo sapiens
  misc_RNA (1)...(19): siRNA sense strand
uggaagaaacggagagagg

SEQ ID NO: 2348912 - RNA, 19 nt, Homo sapiens
  misc_RNA (1)...(19): siRNA sense strand
uguggcaaaucuaggaaaa

SEQ ID NO: 2348913 - RNA, 19 nt, Homo sapiens
  misc_RNA (1)...(19): siRNA sense strand
acuacauuuccaaguguua

SEQ ID NO: 2348914 - RNA, 19 nt, Homo sapiens
  misc_RNA (1)...(19): siRNA sense strand
agcuaguguuggauaaaga

SEQ ID NO: 2348915 - RNA, 19 nt, Homo sapiens
  misc_RNA (1)...(19): siRNA sense strand
ggcugaaaacggagcacaa

SEQ ID NO: 2348916 - RNA, 19 nt, Homo sapiens
  misc_RNA (1)...(19): siRNA sense strand
cgccacagacagagacuca

SEQ ID NO: 2348917 - RNA, 19 nt, Homo sapiens
  misc_RNA (1)...(19): siRNA sense strand
ggcugguggugcuggucaa

SEQ ID NO: 2348918 - RNA, 19 nt, Homo sapiens
  misc_RNA (1)...(19): siRNA sense strand
aagcaaguagauuucgaaa

SEQ ID NO: 2348919 - RNA, 19 nt, Homo sapiens
  misc_RNA (1)...(19): siRNA sense strand
gagaagagcuuuaucguca

SEQ ID NO: 2348920 - RNA, 19 nt, Homo sapiens
  misc_RNA (1)...(19): siRNA sense strand
caacaaagaucacaggcuu

SEQ ID NO: 2348921 - RNA, 19 nt, Homo sapiens
  misc_RNA (1)...(19): siRNA sense strand
agcaagagcuucaggccaa

SEQ ID NO: 2348922 - RNA, 19 nt, Homo sapiens
  misc_RNA (1)...(19): siRNA sense strand
ggaucuuaccagaggcauu

SEQ ID NO: 2348923 - RNA, 19 nt, Homo sapiens
  misc_RNA (1)...(19): siRNA sense strand
aagaaugagugccgggaga

SEQ ID NO: 2348924 - RNA, 19 nt, Homo sapiens
  misc_RNA (1)...(19): siRNA sense strand
ucgaggaaguccaaggaga

SEQ ID NO: 2348925 - RNA, 19 nt, Homo sapiens
  misc_RNA (1)...(19): siRNA sense strand
ccgcaagagcaucgcaaca

SEQ ID NO: 2348926 - RNA, 19 nt, Homo sapiens
  misc_RNA (1)...(19): siRNA sense strand
uggucaacaaacagacaaa

SEQ ID NO: 2348927 - RNA, 19 nt, Homo sapiens
  misc_RNA (1)...(19): siRNA sense strand
ggccagaaauuaugagcgu

SEQ ID NO: 2348928 - RNA, 19 nt, Homo sapiens
  misc_RNA (1)...(19): siRNA sense strand
ccucacugcugaagagacu

SEQ ID NO: 2348929 - RNA, 19 nt, Homo sapiens
  misc_RNA (1)...(19): siRNA sense strand
gaucacaggcuucuggcaa

SEQ ID NO: 2348930 - RNA, 19 nt, Homo sapiens
  misc_RNA (1)...(19): siRNA sense strand
cguugauuguucugugauu

SEQ ID NO: 2348931 - RNA, 19 nt, Homo sapiens
  misc_RNA (1)...(19): siRNA sense strand
ggcguagagaagagcuuua

SEQ ID NO: 2348932 - RNA, 19 nt, Homo sapiens
  misc_RNA (1)...(19): siRNA sense strand
agacaaaagacuaugcuga

SEQ ID NO: 2348933 - RNA, 19 nt, Homo sapiens
  misc_RNA (1)...(19): siRNA sense strand
ugggcaugguaguggacuu

SEQ ID NO: 2348934 - RNA, 19 nt, Homo sapiens
  misc_RNA (1)...(19): siRNA sense strand
ggagaaggaacgugaggag

SEQ ID NO: 2348935 - RNA, 19 nt, Homo sapiens
  misc_RNA (1)...(19): siRNA sense strand
cagcaaacagccagccuca

SEQ ID NO: 2348936 - RNA, 19 nt, Homo sapiens
  misc_RNA (1)...(19): siRNA sense strand
ccuauguacaggagagaag

SEQ ID NO: 2348937 - RNA, 19 nt, Homo sapiens
  misc_RNA (1)...(19): siRNA sense strand
uugcgggaccacagacaua

SEQ ID NO: 2348938 - RNA, 19 nt, Homo sapiens
  misc_RNA (1)...(19): siRNA sense strand
aagucagucucgugcaaaa

SEQ ID NO: 2348939 - RNA, 19 nt, Homo sapiens
  misc_RNA (1)...(19): siRNA sense strand
gaggaaauccagagacgcu

SEQ ID NO: 2348940 - RNA, 19 nt, Homo sapiens
  misc_RNA (1)...(19): siRNA sense strand
ccucuucaauaguggcaca

SEQ ID NO: 2348941 - RNA, 19 nt, Homo sapiens
  misc_RNA (1)...(19): siRNA sense strand
ucacaguggaagaggcaaa

SEQ ID NO: 2348942 - RNA, 19 nt, Homo sapiens
  misc_RNA (1)...(19): siRNA sense strand
gcagauugauuuagggacu

SEQ ID NO: 2348943 - RNA, 19 nt, Homo sapiens
  misc_RNA (1)...(19): siRNA sense strand
gugaucaccaacagggaaa

SEQ ID NO: 2348944 - RNA, 19 nt, Homo sapiens
  misc_RNA (1)...(19): siRNA sense strand
cugugggagugaagggaau

SEQ ID NO: 2348945 - RNA, 19 nt, Homo sapiens
  misc_RNA (1)...(19): siRNA sense strand
guugcugaagagagagaua

SEQ ID NO: 2348946 - RNA, 19 nt, Homo sapiens
  misc_RNA (1)...(19): siRNA sense strand
ggaagauuacugugggagu

SEQ ID NO: 2348947 - RNA, 19 nt, Homo sapiens
  misc_RNA (1)...(19): siRNA sense strand
ggcaauuuguguaugguga

SEQ ID NO: 2348948 - RNA, 19 nt, Homo sapiens
  misc_RNA (1)...(19): siRNA sense strand
gugcaaagugaggaagauu

SEQ ID NO: 2348949 - RNA, 19 nt, Homo sapiens
  misc_RNA (1)...(19): siRNA sense strand
cuggagaugagguaaagaa

SEQ ID NO: 2348950 - RNA, 19 nt, Homo sapiens
  misc_RNA (1)...(19): siRNA sense strand
gaggaagauuacuguggga

SEQ ID NO: 2348951 - RNA, 19 nt, Homo sapiens
  misc_RNA (1)...(19): siRNA sense strand
uggcaauaaaccuuggauu

SEQ ID NO: 2348952 - RNA, 19 nt, Homo sapiens
  misc_RNA (1)...(19): siRNA sense strand
caggaauagacucaaguau

SEQ ID NO: 2348953 - RNA, 19 nt, Homo sapiens
  misc_RNA (1)...(19): siRNA sense strand
ccccacaagcugagggaau

SEQ ID NO: 2348954 - RNA, 19 nt, Homo sapiens
  misc_RNA (1)...(19): siRNA sense strand
ucgacuuacuguugcugaa

SEQ ID NO: 2348955 - RNA, 19 nt, Homo sapiens
  misc_RNA (1)...(19): siRNA sense strand
aguugugcaaagugaggaa

SEQ ID NO: 2348956 - RNA, 19 nt, Homo sapiens
  misc_RNA (1)...(19): siRNA sense strand
cagugaugaaagugggauu

SEQ ID NO: 2348957 - RNA, 19 nt, Homo sapiens
  misc_RNA (1)...(19): siRNA sense strand
gcugcagacaagugguuaa

SEQ ID NO: 2348958 - RNA, 19 nt, Homo sapiens
  misc_RNA (1)...(19): siRNA sense strand
cccuuaauagagagaguua

SEQ ID NO: 2348959 - RNA, 19 nt, Homo sapiens
  misc_RNA (1)...(19): siRNA sense strand
ccguaaucacuguagaaaa

SEQ ID NO: 2348960 - RNA, 19 nt, Homo sapiens
  misc_RNA (1)...(19): siRNA sense strand
cauauugagcagaggacca

SEQ ID NO: 2348961 - RNA, 19 nt, Homo sapiens
  misc_RNA (1)...(19): siRNA sense strand
ccaaauggcaacaacccua

SEQ ID NO: 2348962 - RNA, 19 nt, Homo sapiens
  misc_RNA (1)...(19): siRNA sense strand
cuuuguaagguguuugaaa

SEQ ID NO: 2348963 - RNA, 19 nt, Homo sapiens
  misc_RNA (1)...(19): siRNA sense strand
cagcgagcgcagccagaaa

SEQ ID NO: 2348964 - RNA, 19 nt, Homo sapiens
  misc_RNA (1)...(19): siRNA sense strand
gcucaugauaucacagcuu

SEQ ID NO: 2348965 - RNA, 19 nt, Homo sapiens
  misc_RNA (1)...(19): siRNA sense strand
acacgaauggggagaagaa

SEQ ID NO: 2348966 - RNA, 19 nt, Homo sapiens
  misc_RNA (1)...(19): siRNA sense strand
auuaaugcucccuggaaau

SEQ ID NO: 2348967 - RNA, 19 nt, Homo sapiens
  misc_RNA (1)...(19): siRNA sense strand
uuggagaagagaugaugaa

SEQ ID NO: 2348968 - RNA, 19 nt, Homo sapiens
  misc_RNA (1)...(19): siRNA sense strand
aagaaaaggccguuaagau

SEQ ID NO: 2348969 - RNA, 19 nt, Homo sapiens
  misc_RNA (1)...(19): siRNA sense strand
cuuccagguauuagcacaa

SEQ ID NO: 2348970 - RNA, 19 nt, Homo sapiens
  misc_RNA (1)...(19): siRNA sense strand
agcccuuacuugagagcau

SEQ ID NO: 2348971 - RNA, 19 nt, Homo sapiens
  misc_RNA (1)...(19): siRNA sense strand
gaugaugaagagagcacuu

SEQ ID NO: 2348972 - RNA, 19 nt, Homo sapiens
  misc_RNA (1)...(19): siRNA sense strand
cauaauagaagaugauccu

SEQ ID NO: 2348973 - RNA, 19 nt, Homo sapiens
  misc_RNA (1)...(19): siRNA sense strand
uuuaacaaguucaggguac

SEQ ID NO: 2348974 - RNA, 19 nt, Homo sapiens
  misc_RNA (1)...(19): siRNA sense strand
uggguugagaauaggauuu

SEQ ID NO: 2348975 - RNA, 19 nt, Homo sapiens
  misc_RNA (1)...(19): siRNA sense strand
uggcuaaaacaguuacaaa

SEQ ID NO: 2348976 - RNA, 19 nt, Homo sapiens
  misc_RNA (1)...(19): siRNA sense strand
cagugaugaaagugggauu

SEQ ID NO: 2348977 - RNA, 19 nt, Homo sapiens
  misc_RNA (1)...(19): siRNA sense strand
gcugcagacaagugguuaa

SEQ ID NO: 2348978 - RNA, 19 nt, Homo sapiens
  misc_RNA (1)...(19): siRNA sense strand
cccuuaauagagagaguua

SEQ ID NO: 2348979 - RNA, 19 nt, Homo sapiens
  misc_RNA (1)...(19): siRNA sense strand
ccguaaucacuguagaaaa

SEQ ID NO: 2348980 - RNA, 19 nt, Homo sapiens
  misc_RNA (1)...(19): siRNA sense strand
cauauugagcagaggacca

SEQ ID NO: 2348981 - RNA, 19 nt, Homo sapiens
  misc_RNA (1)...(19): siRNA sense strand
ccaaauggcaacaacccua

SEQ ID NO: 2348982 - RNA, 19 nt, Homo sapiens
  misc_RNA (1)...(19): siRNA sense strand
cuuuguaagguguuugaaa

SEQ ID NO: 2348983 - RNA, 19 nt, Homo sapiens
  misc_RNA (1)...(19): siRNA sense strand
cagcgagcgcagccagaaa

SEQ ID NO: 2348984 - RNA, 19 nt, Homo sapiens
  misc_RNA (1)...(19): siRNA sense strand
gcucaugauaucacagcuu

SEQ ID NO: 2348985 - RNA, 19 nt, Homo sapiens
  misc_RNA (1)...(19): siRNA sense strand
acacgaauggggagaagaa

SEQ ID NO: 2348986 - RNA, 19 nt, Homo sapiens
  misc_RNA (1)...(19): siRNA sense strand
auuaaugcucccuggaaau

SEQ ID NO: 2348987 - RNA, 19 nt, Homo sapiens
  misc_RNA (1)...(19): siRNA sense strand
uuggagaagagaugaugaa

SEQ ID NO: 2348988 - RNA, 19 nt, Homo sapiens
  misc_RNA (1)...(19): siRNA sense strand
aagaaaaggccguuaagau

SEQ ID NO: 2348989 - RNA, 19 nt, Homo sapiens
  misc_RNA (1)...(19): siRNA sense strand
cuuccagguauuagcacaa

SEQ ID NO: 2348990 - RNA, 19 nt, Homo sapiens
  misc_RNA (1)...(19): siRNA sense strand
agcccuuacuugagagcau

SEQ ID NO: 2348991 - RNA, 19 nt, Homo sapiens
  misc_RNA (1)...(19): siRNA sense strand
gaugaugaagagagcacuu

SEQ ID NO: 2348992 - RNA, 19 nt, Homo sapiens
  misc_RNA (1)...(19): siRNA sense strand
cauaauagaagaugauccu

SEQ ID NO: 2348993 - RNA, 19 nt, Homo sapiens
  misc_RNA (1)...(19): siRNA sense strand
uuuaacaaguucaggguac

SEQ ID NO: 2348994 - RNA, 19 nt, Homo sapiens
  misc_RNA (1)...(19): siRNA sense strand
uggguugagaauaggauuu

SEQ ID NO: 2348995 - RNA, 19 nt, Homo sapiens
  misc_RNA (1)...(19): siRNA sense strand
uggcuaaaacaguuacaaa

SEQ ID NO: 2348996 - RNA, 19 nt, Homo sapiens
  misc_RNA (1)...(19): siRNA sense strand
gggaagagguggcuggaga

SEQ ID NO: 2348997 - RNA, 19 nt, Homo sapiens
  misc_RNA (1)...(19): siRNA sense strand
aggaagaugaggagaagaa

SEQ ID NO: 2348998 - RNA, 19 nt, Homo sapiens
  misc_RNA (1)...(19): siRNA sense strand
gggugggaacugugagaua

SEQ ID NO: 2348999 - RNA, 19 nt, Homo sapiens
  misc_RNA (1)...(19): siRNA sense strand
aggaggaagaugaggagaa

SEQ ID NO: 2349000 - RNA, 19 nt, Homo sapiens
  misc_RNA (1)...(19): siRNA sense strand
aggaggagcaggaggagua

SEQ ID NO: 2349001 - RNA, 19 nt, Homo sapiens
  misc_RNA (1)...(19): siRNA sense strand
gggagaacaucuucgggaa

SEQ ID NO: 2349002 - RNA, 19 nt, Homo sapiens
  misc_RNA (1)...(19): siRNA sense strand
agaccaagcgcaagaggaa

SEQ ID NO: 2349003 - RNA, 19 nt, Homo sapiens
  misc_RNA (1)...(19): siRNA sense strand
ccauggagguguugggcuu

SEQ ID NO: 2349004 - RNA, 19 nt, Homo sapiens
  misc_RNA (1)...(19): siRNA sense strand
agacaaugcgagagaagau

SEQ ID NO: 2349005 - RNA, 19 nt, Homo sapiens
  misc_RNA (1)...(19): siRNA sense strand
aagaagaggacgaggagga

SEQ ID NO: 2349006 - RNA, 19 nt, Homo sapiens
  misc_RNA (1)...(19): siRNA sense strand
cugagaagccugaagaaga

SEQ ID NO: 2349007 - RNA, 19 nt, Homo sapiens
  misc_RNA (1)...(19): siRNA sense strand
aggugaagcuguuugggaa

SEQ ID NO: 2349008 - RNA, 19 nt, Homo sapiens
  misc_RNA (1)...(19): siRNA sense strand
ucaaagugaccgagacaau

SEQ ID NO: 2349009 - RNA, 19 nt, Homo sapiens
  misc_RNA (1)...(19): siRNA sense strand
gcccaaagagggacagcaa

SEQ ID NO: 2349010 - RNA, 19 nt, Homo sapiens
  misc_RNA (1)...(19): siRNA sense strand
ccaaaaugcucgaugccaa

SEQ ID NO: 2349011 - RNA, 19 nt, Homo sapiens
  misc_RNA (1)...(19): siRNA sense strand
ugcaagaggcugagaccua

SEQ ID NO: 2349012 - RNA, 19 nt, Homo sapiens
  misc_RNA (1)...(19): siRNA sense strand
ggaccguggccaugaagaa

SEQ ID NO: 2349013 - RNA, 19 nt, Homo sapiens
  misc_RNA (1)...(19): siRNA sense strand
uugggaaguuuguggaaau

SEQ ID NO: 2349014 - RNA, 19 nt, Homo sapiens
  misc_RNA (1)...(19): siRNA sense strand
cacucaaguucgagaauga

SEQ ID NO: 2349015 - RNA, 19 nt, Homo sapiens
  misc_RNA (1)...(19): siRNA sense strand
cggacgaagaagaggacga

SEQ ID NO: 2349016 - RNA, 19 nt, Homo sapiens
  misc_RNA (1)...(19): siRNA sense strand
acucaugaauugaugguga

SEQ ID NO: 2349017 - RNA, 19 nt, Homo sapiens
  misc_RNA (1)...(19): siRNA sense strand
augaauugauggugaaguu

SEQ ID NO: 2349018 - RNA, 19 nt, Homo sapiens
  misc_RNA (1)...(19): siRNA sense strand
ggaucguguuucaggccaa

SEQ ID NO: 2349019 - RNA, 19 nt, Homo sapiens
  misc_RNA (1)...(19): siRNA sense strand
ugugcaaagucaugccaaa

SEQ ID NO: 2349020 - RNA, 19 nt, Homo sapiens
  misc_RNA (1)...(19): siRNA sense strand
gcuacaagcuggcuggcau

SEQ ID NO: 2349021 - RNA, 19 nt, Homo sapiens
  misc_RNA (1)...(19): siRNA sense strand
agauuagauuugaacggaa

SEQ ID NO: 2349022 - RNA, 19 nt, Homo sapiens
  misc_RNA (1)...(19): siRNA sense strand
gggaaguccaggaguacau

SEQ ID NO: 2349023 - RNA, 19 nt, Homo sapiens
  misc_RNA (1)...(19): siRNA sense strand
cagaagaccaagcgcaaga

SEQ ID NO: 2349024 - RNA, 19 nt, Homo sapiens
  misc_RNA (1)...(19): siRNA sense strand
cagauagacuggcaggaga

SEQ ID NO: 2349025 - RNA, 19 nt, Homo sapiens
  misc_RNA (1)...(19): siRNA sense strand
ccucagagauggagcaggu

SEQ ID NO: 2349026 - RNA, 19 nt, Homo sapiens
  misc_RNA (1)...(19): siRNA sense strand
aguucgagaaugagcuaua

SEQ ID NO: 2349027 - RNA, 19 nt, Homo sapiens
  misc_RNA (1)...(19): siRNA sense strand
aagaagacgcugucggaga

SEQ ID NO: 2349028 - RNA, 19 nt, Homo sapiens
  misc_RNA (1)...(19): siRNA sense strand
ccagaaccuuggaggacau

SEQ ID NO: 2349029 - RNA, 19 nt, Homo sapiens
  misc_RNA (1)...(19): siRNA sense strand
acugugagauagcaggaaa

SEQ ID NO: 2349030 - RNA, 19 nt, Homo sapiens
  misc_RNA (1)...(19): siRNA sense strand
ggugagugcccgagagauc

SEQ ID NO: 2349031 - RNA, 19 nt, Homo sapiens
  misc_RNA (1)...(19): siRNA sense strand
acacauacauugggagcau

SEQ ID NO: 2349032 - RNA, 19 nt, Homo sapiens
  misc_RNA (1)...(19): siRNA sense strand
cgacauguuccuagcugua

SEQ ID NO: 2349033 - RNA, 19 nt, Homo sapiens
  misc_RNA (1)...(19): siRNA sense strand
cccagaagaccaagcgcaa

SEQ ID NO: 2349034 - RNA, 19 nt, Homo sapiens
  misc_RNA (1)...(19): siRNA sense strand
ccuacaaacgcuucggcua

SEQ ID NO: 2349035 - RNA, 19 nt, Homo sapiens
  misc_RNA (1)...(19): siRNA sense strand
ugcacaaguuccuggacaa

SEQ ID NO: 2349036 - RNA, 19 nt, Homo sapiens
  misc_RNA (1)...(19): siRNA sense strand
uguacgggcuugagggcuu

SEQ ID NO: 2349037 - RNA, 19 nt, Homo sapiens
  misc_RNA (1)...(19): siRNA sense strand
cuucaaagugaccgagaca

SEQ ID NO: 2349038 - RNA, 19 nt, Homo sapiens
  misc_RNA (1)...(19): siRNA sense strand
ccaaacagaaccagugcau

SEQ ID NO: 2349039 - RNA, 19 nt, Homo sapiens
  misc_RNA (1)...(19): siRNA sense strand
gcuuugagcagcuguguau

SEQ ID NO: 2349040 - RNA, 19 nt, Homo sapiens
  misc_RNA (1)...(19): siRNA sense strand
gcuacuaccuggaucccua

SEQ ID NO: 2349041 - RNA, 19 nt, Homo sapiens
  misc_RNA (1)...(19): siRNA sense strand
aggaugguguggaggacau

SEQ ID NO: 2349042 - RNA, 19 nt, Homo sapiens
  misc_RNA (1)...(19): siRNA sense strand
aggaaagagcgaugcagau

SEQ ID NO: 2349043 - RNA, 19 nt, Homo sapiens
  misc_RNA (1)...(19): siRNA sense strand
ggagaagccaacagccauu

SEQ ID NO: 2349044 - RNA, 19 nt, Homo sapiens
  misc_RNA (1)...(19): siRNA sense strand
gcauagagcuucgggccau

SEQ ID NO: 2349045 - RNA, 19 nt, Homo sapiens
  misc_RNA (1)...(19): siRNA sense strand
ccgaggaucccuacgacua

SEQ ID NO: 2349046 - RNA, 19 nt, Homo sapiens
  misc_RNA (1)...(19): siRNA sense strand
acgaagaagaggacgagga

SEQ ID NO: 2349047 - RNA, 19 nt, Homo sapiens
  misc_RNA (1)...(19): siRNA sense strand
agaaagggaagaaggggaa

SEQ ID NO: 2349048 - RNA, 19 nt, Homo sapiens
  misc_RNA (1)...(19): siRNA sense strand
cgaaggaggaagaugagga

SEQ ID NO: 2349049 - RNA, 19 nt, Homo sapiens
  misc_RNA (1)...(19): siRNA sense strand
ggagacauucugaggcaca

SEQ ID NO: 2349050 - RNA, 19 nt, Homo sapiens
  misc_RNA (1)...(19): siRNA sense strand
guacaaauggggagacuga

SEQ ID NO: 2349051 - RNA, 19 nt, Homo sapiens
  misc_RNA (1)...(19): siRNA sense strand
ggaugaauguuacugccaa

SEQ ID NO: 2349052 - RNA, 19 nt, Homo sapiens
  misc_RNA (1)...(19): siRNA sense strand
cugacuaccugaagggacu

SEQ ID NO: 2349053 - RNA, 19 nt, Homo sapiens
  misc_RNA (1)...(19): siRNA sense strand
cggugaacccauaccaaau

SEQ ID NO: 2349054 - RNA, 19 nt, Homo sapiens
  misc_RNA (1)...(19): siRNA sense strand
caggaaagagcgaugcaga

SEQ ID NO: 2349055 - RNA, 19 nt, Homo sapiens
  misc_RNA (1)...(19): siRNA sense strand
gggacucggaugaggacau

SEQ ID NO: 2349056 - RNA, 19 nt, Homo sapiens
  misc_RNA (1)...(19): siRNA sense strand
cccuggacgugguggaaga

SEQ ID NO: 2349057 - RNA, 19 nt, Homo sapiens
  misc_RNA (1)...(19): siRNA sense strand
ccacagauccugcacgaca

SEQ ID NO: 2349058 - RNA, 19 nt, Homo sapiens
  misc_RNA (1)...(19): siRNA sense strand
aggagaagaaagccaagaa

SEQ ID NO: 2349059 - RNA, 19 nt, Homo sapiens
  misc_RNA (1)...(19): siRNA sense strand
acaacuauccuauggccaa

SEQ ID NO: 2349060 - RNA, 19 nt, Homo sapiens
  misc_RNA (1)...(19): siRNA sense strand
auccagagcugcagcaaca

SEQ ID NO: 2349061 - RNA, 19 nt, Homo sapiens
  misc_RNA (1)...(19): siRNA sense strand
ggauguccucccagagcaa

SEQ ID NO: 2349062 - RNA, 19 nt, Homo sapiens
  misc_RNA (1)...(19): siRNA sense strand
gugaagauccuggaggcaa

SEQ ID NO: 2349063 - RNA, 19 nt, Homo sapiens
  misc_RNA (1)...(19): siRNA sense strand
cggaagaggagguggccaa

SEQ ID NO: 2349064 - RNA, 19 nt, Homo sapiens
  misc_RNA (1)...(19): siRNA sense strand
ccaacaugcaggacagcaa

SEQ ID NO: 2349065 - RNA, 19 nt, Homo sapiens
  misc_RNA (1)...(19): siRNA sense strand
gcaaacaaggagagcagca

SEQ ID NO: 2349066 - RNA, 19 nt, Homo sapiens
  misc_RNA (1)...(19): siRNA sense strand
ugaucaaauccaagacaga

SEQ ID NO: 2349067 - RNA, 19 nt, Homo sapiens
  misc_RNA (1)...(19): siRNA sense strand
cagaagaagcuggcggaga

SEQ ID NO: 2349068 - RNA, 19 nt, Homo sapiens
  misc_RNA (1)...(19): siRNA sense strand
ccacuaaagaguuggaccu

SEQ ID NO: 2349069 - RNA, 19 nt, Homo sapiens
  misc_RNA (1)...(19): siRNA sense strand
auuuagaacucaaagacca

SEQ ID NO: 2349070 - RNA, 19 nt, Homo sapiens
  misc_RNA (1)...(19): siRNA sense strand
acugaugaaacuagcaaau

SEQ ID NO: 2349071 - RNA, 19 nt, Homo sapiens
  misc_RNA (1)...(19): siRNA sense strand
agaagaagcuggcggagac

SEQ ID NO: 2349072 - RNA, 19 nt, Homo sapiens
  misc_RNA (1)...(19): siRNA sense strand
aggcaaacaaggagagcag

SEQ ID NO: 2349073 - RNA, 19 nt, Homo sapiens
  misc_RNA (1)...(19): siRNA sense strand
uggcagaccucuacgagca

SEQ ID NO: 2349074 - RNA, 19 nt, Homo sapiens
  misc_RNA (1)...(19): siRNA sense strand
caaagaaacacucagcaga

SEQ ID NO: 2349075 - RNA, 19 nt, Homo sapiens
  misc_RNA (1)...(19): siRNA sense strand
gcgcaggcaaacaaggaga

SEQ ID NO: 2349076 - RNA, 19 nt, Homo sapiens
  misc_RNA (1)...(19): siRNA sense strand
ucaaagaccacgagggcag

SEQ ID NO: 2349077 - RNA, 19 nt, Homo sapiens
  misc_RNA (1)...(19): siRNA sense strand
ccugaggugacgaugacaa

SEQ ID NO: 2349078 - RNA, 19 nt, Homo sapiens
  misc_RNA (1)...(19): siRNA sense strand
caaaggaauccaaagagga

SEQ ID NO: 2349079 - RNA, 19 nt, Homo sapiens
  misc_RNA (1)...(19): siRNA sense strand
agacagaguacccgcuaca

SEQ ID NO: 2349080 - RNA, 19 nt, Homo sapiens
  misc_RNA (1)...(19): siRNA sense strand
gaagcugaaugaagcggau

SEQ ID NO: 2349081 - RNA, 19 nt, Homo sapiens
  misc_RNA (1)...(19): siRNA sense strand
ggacaagaguggcuggagc

SEQ ID NO: 2349082 - RNA, 19 nt, Homo sapiens
  misc_RNA (1)...(19): siRNA sense strand
gcagaggagcugaaugcca

SEQ ID NO: 2349083 - RNA, 19 nt, Homo sapiens
  misc_RNA (1)...(19): siRNA sense strand
cggaagaggagguggccaa

SEQ ID NO: 2349084 - RNA, 19 nt, Homo sapiens
  misc_RNA (1)...(19): siRNA sense strand
ccaacaugcaggacagcaa

SEQ ID NO: 2349085 - RNA, 19 nt, Homo sapiens
  misc_RNA (1)...(19): siRNA sense strand
gcaaacaaggagagcagca

SEQ ID NO: 2349086 - RNA, 19 nt, Homo sapiens
  misc_RNA (1)...(19): siRNA sense strand
ugaucaaauccaagacaga

SEQ ID NO: 2349087 - RNA, 19 nt, Homo sapiens
  misc_RNA (1)...(19): siRNA sense strand
cagaagaagcuggcggaga

SEQ ID NO: 2349088 - RNA, 19 nt, Homo sapiens
  misc_RNA (1)...(19): siRNA sense strand
ccacuaaagaguuggaccu

SEQ ID NO: 2349089 - RNA, 19 nt, Homo sapiens
  misc_RNA (1)...(19): siRNA sense strand
auuuagaacucaaagacca

SEQ ID NO: 2349090 - RNA, 19 nt, Homo sapiens
  misc_RNA (1)...(19): siRNA sense strand
acugaugaaacuagcaaau

SEQ ID NO: 2349091 - RNA, 19 nt, Homo sapiens
  misc_RNA (1)...(19): siRNA sense strand
agaagaagcuggcggagac

SEQ ID NO: 2349092 - RNA, 19 nt, Homo sapiens
  misc_RNA (1)...(19): siRNA sense strand
aggcaaacaaggagagcag

SEQ ID NO: 2349093 - RNA, 19 nt, Homo sapiens
  misc_RNA (1)...(19): siRNA sense strand
uggcagaccucuacgagca

SEQ ID NO: 2349094 - RNA, 19 nt, Homo sapiens
  misc_RNA (1)...(19): siRNA sense strand
caaagaaacacucagcaga

SEQ ID NO: 2349095 - RNA, 19 nt, Homo sapiens
  misc_RNA (1)...(19): siRNA sense strand
gcgcaggcaaacaaggaga

SEQ ID NO: 2349096 - RNA, 19 nt, Homo sapiens
  misc_RNA (1)...(19): siRNA sense strand
ucaaagaccacgagggcag

SEQ ID NO: 2349097 - RNA, 19 nt, Homo sapiens
  misc_RNA (1)...(19): siRNA sense strand
ccugaggugacgaugacaa

SEQ ID NO: 2349098 - RNA, 19 nt, Homo sapiens
  misc_RNA (1)...(19): siRNA sense strand
caaaggaauccaaagagga

SEQ ID NO: 2349099 - RNA, 19 nt, Homo sapiens
  misc_RNA (1)...(19): siRNA sense strand
agacagaguacccgcuaca

SEQ ID NO: 2349100 - RNA, 19 nt, Homo sapiens
  misc_RNA (1)...(19): siRNA sense strand
gaagcugaaugaagcggau

SEQ ID NO: 2349101 - RNA, 19 nt, Homo sapiens
  misc_RNA (1)...(19): siRNA sense strand
ggacaagaguggcuggagc

SEQ ID NO: 2349102 - RNA, 19 nt, Homo sapiens
  misc_RNA (1)...(19): siRNA sense strand
gcagaggagcugaaugcca

SEQ ID NO: 2349103 - RNA, 19 nt, Homo sapiens
  misc_RNA (1)...(19): siRNA sense strand
caucacugccaaagcgaaa

SEQ ID NO: 2349104 - RNA, 19 nt, Homo sapiens
  misc_RNA (1)...(19): siRNA sense strand
uggacaaccuuuacggcua

SEQ ID NO: 2349105 - RNA, 19 nt, Homo sapiens
  misc_RNA (1)...(19): siRNA sense strand
cuugaaacccagagugaga

SEQ ID NO: 2349106 - RNA, 19 nt, Homo sapiens
  misc_RNA (1)...(19): siRNA sense strand
gggccuaagaacaccguua

SEQ ID NO: 2349107 - RNA, 19 nt, Homo sapiens
  misc_RNA (1)...(19): siRNA sense strand
agaugaagcagcuggaaca

SEQ ID NO: 2349108 - RNA, 19 nt, Homo sapiens
  misc_RNA (1)...(19): siRNA sense strand
ccagcugggcagugaacua

SEQ ID NO: 2349109 - RNA, 19 nt, Homo sapiens
  misc_RNA (1)...(19): siRNA sense strand
cggucugcgucauguuaaa

SEQ ID NO: 2349110 - RNA, 19 nt, Homo sapiens
  misc_RNA (1)...(19): siRNA sense strand
acaacuugaacgagauauu

SEQ ID NO: 2349111 - RNA, 19 nt, Homo sapiens
  misc_RNA (1)...(19): siRNA sense strand
agagaucacuaccgggcaa

SEQ ID NO: 2349112 - RNA, 19 nt, Homo sapiens
  misc_RNA (1)...(19): siRNA sense strand
uugcacaacuugaacgaga

SEQ ID NO: 2349113 - RNA, 19 nt, Homo sapiens
  misc_RNA (1)...(19): siRNA sense strand
ugguagaaugccugcggaa

SEQ ID NO: 2349114 - RNA, 19 nt, Homo sapiens
  misc_RNA (1)...(19): siRNA sense strand
gaucuuacauggagggcac

SEQ ID NO: 2349115 - RNA, 19 nt, Homo sapiens
  misc_RNA (1)...(19): siRNA sense strand
ggccaaguacacucggaua

SEQ ID NO: 2349116 - RNA, 19 nt, Homo sapiens
  misc_RNA (1)...(19): siRNA sense strand
cgccaaaacuggugaucca

SEQ ID NO: 2349117 - RNA, 19 nt, Homo sapiens
  misc_RNA (1)...(19): siRNA sense strand
ggcuugaaacccagaguga

SEQ ID NO: 2349118 - RNA, 19 nt, Homo sapiens
  misc_RNA (1)...(19): siRNA sense strand
ccacaaaugauaucgcuca

SEQ ID NO: 2349119 - RNA, 19 nt, Homo sapiens
  misc_RNA (1)...(19): siRNA sense strand
gccaaguacacucggauau

SEQ ID NO: 2349120 - RNA, 19 nt, Homo sapiens
  misc_RNA (1)...(19): siRNA sense strand
acacuuugcgggagacuau

SEQ ID NO: 2349121 - RNA, 19 nt, Homo sapiens
  misc_RNA (1)...(19): siRNA sense strand
uggccugguccaaguauaa

SEQ ID NO: 2349122 - RNA, 19 nt, Homo sapiens
  misc_RNA (1)...(19): siRNA sense strand
ggauauuggcagacaaggu

SEQ ID NO: 2349123 - RNA, 19 nt, Homo sapiens
  misc_RNA (1)...(19): siRNA sense strand
cagacaaggucggcugcaa

SEQ ID NO: 2349124 - RNA, 19 nt, Homo sapiens
  misc_RNA (1)...(19): siRNA sense strand
auugaaaccaaacgagauu

SEQ ID NO: 2349125 - RNA, 19 nt, Homo sapiens
  misc_RNA (1)...(19): siRNA sense strand
ugaaguucguggacggcau

SEQ ID NO: 2349126 - RNA, 19 nt, Homo sapiens
  misc_RNA (1)...(19): siRNA sense strand
cauugaaaccaaacgagau

SEQ ID NO: 2349127 - RNA, 19 nt, Homo sapiens
  misc_RNA (1)...(19): siRNA sense strand
ucugggaauacuaggguuu

SEQ ID NO: 2349128 - RNA, 19 nt, Homo sapiens
  misc_RNA (1)...(19): siRNA sense strand
gguccaaguauaaucccaa

SEQ ID NO: 2349129 - RNA, 19 nt, Homo sapiens
  misc_RNA (1)...(19): siRNA sense strand
cauauuggcuugaaaccca

SEQ ID NO: 2349130 - RNA, 19 nt, Homo sapiens
  misc_RNA (1)...(19): siRNA sense strand
gugagucgcugcaggcaca

SEQ ID NO: 2349131 - RNA, 19 nt, Homo sapiens
  misc_RNA (1)...(19): siRNA sense strand
auucaugaucagaacagua

SEQ ID NO: 2349132 - RNA, 19 nt, Homo sapiens
  misc_RNA (1)...(19): siRNA sense strand
uuaacuaccgucugggaau

SEQ ID NO: 2349133 - RNA, 19 nt, Homo sapiens
  misc_RNA (1)...(19): siRNA sense strand
cauuccaccacuagaguau

SEQ ID NO: 2349134 - RNA, 19 nt, Homo sapiens
  misc_RNA (1)...(19): siRNA sense strand
caucacugccaaagcgaaa

SEQ ID NO: 2349135 - RNA, 19 nt, Homo sapiens
  misc_RNA (1)...(19): siRNA sense strand
uggacaaccuuuacggcua

SEQ ID NO: 2349136 - RNA, 19 nt, Homo sapiens
  misc_RNA (1)...(19): siRNA sense strand
cuugaaacccagagugaga

SEQ ID NO: 2349137 - RNA, 19 nt, Homo sapiens
  misc_RNA (1)...(19): siRNA sense strand
gggccuaagaacaccguua

SEQ ID NO: 2349138 - RNA, 19 nt, Homo sapiens
  misc_RNA (1)...(19): siRNA sense strand
agaugaagcagcuggaaca

SEQ ID NO: 2349139 - RNA, 19 nt, Homo sapiens
  misc_RNA (1)...(19): siRNA sense strand
ccagcugggcagugaacua

SEQ ID NO: 2349140 - RNA, 19 nt, Homo sapiens
  misc_RNA (1)...(19): siRNA sense strand
cggucugcgucauguuaaa

SEQ ID NO: 2349141 - RNA, 19 nt, Homo sapiens
  misc_RNA (1)...(19): siRNA sense strand
acaacuugaacgagauauu

SEQ ID NO: 2349142 - RNA, 19 nt, Homo sapiens
  misc_RNA (1)...(19): siRNA sense strand
agagaucacuaccgggcaa

SEQ ID NO: 2349143 - RNA, 19 nt, Homo sapiens
  misc_RNA (1)...(19): siRNA sense strand
uugcacaacuugaacgaga

SEQ ID NO: 2349144 - RNA, 19 nt, Homo sapiens
  misc_RNA (1)...(19): siRNA sense strand
ugguagaaugccugcggaa

SEQ ID NO: 2349145 - RNA, 19 nt, Homo sapiens
  misc_RNA (1)...(19): siRNA sense strand
gaucuuacauggagggcac

SEQ ID NO: 2349146 - RNA, 19 nt, Homo sapiens
  misc_RNA (1)...(19): siRNA sense strand
ggccaaguacacucggaua

SEQ ID NO: 2349147 - RNA, 19 nt, Homo sapiens
  misc_RNA (1)...(19): siRNA sense strand
cgccaaaacuggugaucca

SEQ ID NO: 2349148 - RNA, 19 nt, Homo sapiens
  misc_RNA (1)...(19): siRNA sense strand
ggcuugaaacccagaguga

SEQ ID NO: 2349149 - RNA, 19 nt, Homo sapiens
  misc_RNA (1)...(19): siRNA sense strand
ccacaaaugauaucgcuca

SEQ ID NO: 2349150 - RNA, 19 nt, Homo sapiens
  misc_RNA (1)...(19): siRNA sense strand
gccaaguacacucggauau

SEQ ID NO: 2349151 - RNA, 19 nt, Homo sapiens
  misc_RNA (1)...(19): siRNA sense strand
acacuuugcgggagacuau

SEQ ID NO: 2349152 - RNA, 19 nt, Homo sapiens
  misc_RNA (1)...(19): siRNA sense strand
uggccugguccaaguauaa

SEQ ID NO: 2349153 - RNA, 19 nt, Homo sapiens
  misc_RNA (1)...(19): siRNA sense strand
ggauauuggcagacaaggu

SEQ ID NO: 2349154 - RNA, 19 nt, Homo sapiens
  misc_RNA (1)...(19): siRNA sense strand
cagacaaggucggcugcaa

SEQ ID NO: 2349155 - RNA, 19 nt, Homo sapiens
  misc_RNA (1)...(19): siRNA sense strand
auugaaaccaaacgagauu

SEQ ID NO: 2349156 - RNA, 19 nt, Homo sapiens
  misc_RNA (1)...(19): siRNA sense strand
ugaaguucguggacggcau

SEQ ID NO: 2349157 - RNA, 19 nt, Homo sapiens
  misc_RNA (1)...(19): siRNA sense strand
cauugaaaccaaacgagau

SEQ ID NO: 2349158 - RNA, 19 nt, Homo sapiens
  misc_RNA (1)...(19): siRNA sense strand
ucugggaauacuaggguuu

SEQ ID NO: 2349159 - RNA, 19 nt, Homo sapiens
  misc_RNA (1)...(19): siRNA sense strand
gguccaaguauaaucccaa

SEQ ID NO: 2349160 - RNA, 19 nt, Homo sapiens
  misc_RNA (1)...(19): siRNA sense strand
cauauuggcuugaaaccca

SEQ ID NO: 2349161 - RNA, 19 nt, Homo sapiens
  misc_RNA (1)...(19): siRNA sense strand
gugagucgcugcaggcaca

SEQ ID NO: 2349162 - RNA, 19 nt, Homo sapiens
  misc_RNA (1)...(19): siRNA sense strand
auucaugaucagaacagua

SEQ ID NO: 2349163 - RNA, 19 nt, Homo sapiens
  misc_RNA (1)...(19): siRNA sense strand
uuaacuaccgucugggaau

SEQ ID NO: 2349164 - RNA, 19 nt, Homo sapiens
  misc_RNA (1)...(19): siRNA sense strand
cauuccaccacuagaguau

SEQ ID NO: 2349165 - RNA, 19 nt, Homo sapiens
  misc_RNA (1)...(19): siRNA sense strand
ccaaggagcuggaugccua

SEQ ID NO: 2349166 - RNA, 19 nt, Homo sapiens
  misc_RNA (1)...(19): siRNA sense strand
acccuaaggaggaggacaa

SEQ ID NO: 2349167 - RNA, 19 nt, Homo sapiens
  misc_RNA (1)...(19): siRNA sense strand
ccuacacaaaggagagcaa

SEQ ID NO: 2349168 - RNA, 19 nt, Homo sapiens
  misc_RNA (1)...(19): siRNA sense strand
acgagaaggagcaggagau

SEQ ID NO: 2349169 - RNA, 19 nt, Homo sapiens
  misc_RNA (1)...(19): siRNA sense strand
augaauuuguccugaugaa

SEQ ID NO: 2349170 - RNA, 19 nt, Homo sapiens
  misc_RNA (1)...(19): siRNA sense strand
ccaacaagaggaaggucau

SEQ ID NO: 2349171 - RNA, 19 nt, Homo sapiens
  misc_RNA (1)...(19): siRNA sense strand
ugcaagagcgagugaccaa

SEQ ID NO: 2349172 - RNA, 19 nt, Homo sapiens
  misc_RNA (1)...(19): siRNA sense strand
gugcaggagugguaccaga

SEQ ID NO: 2349173 - RNA, 19 nt, Homo sapiens
  misc_RNA (1)...(19): siRNA sense strand
cuacaaguucaaaaggaaa

SEQ ID NO: 2349174 - RNA, 19 nt, Homo sapiens
  misc_RNA (1)...(19): siRNA sense strand
cccaaaugcacaacgagaa

SEQ ID NO: 2349175 - RNA, 19 nt, Homo sapiens
  misc_RNA (1)...(19): siRNA sense strand
ggcgagaacagcagcguga

SEQ ID NO: 2349176 - RNA, 19 nt, Homo sapiens
  misc_RNA (1)...(19): siRNA sense strand
gggacgagacgcuggucau

SEQ ID NO: 2349177 - RNA, 19 nt, Homo sapiens
  misc_RNA (1)...(19): siRNA sense strand
uguuugaggaagagcauca

SEQ ID NO: 2349178 - RNA, 19 nt, Homo sapiens
  misc_RNA (1)...(19): siRNA sense strand
ucuccaaccugcagggcga

SEQ ID NO: 2349179 - RNA, 19 nt, Homo sapiens
  misc_RNA (1)...(19): siRNA sense strand
uggacaugcagcagaguca

SEQ ID NO: 2349180 - RNA, 19 nt, Homo sapiens
  misc_RNA (1)...(19): siRNA sense strand
gcccaaaugcacaacgaga

SEQ ID NO: 2349181 - RNA, 19 nt, Homo sapiens
  misc_RNA (1)...(19): siRNA sense strand
gcggcagguguuugaggaa

SEQ ID NO: 2349182 - RNA, 19 nt, Homo sapiens
  misc_RNA (1)...(19): siRNA sense strand
gagugguaccagauggaca

SEQ ID NO: 2349183 - RNA, 19 nt, Homo sapiens
  misc_RNA (1)...(19): siRNA sense strand
ucuacaaguucaaaaggaa

SEQ ID NO: 2349184 - RNA, 19 nt, Homo sapiens
  misc_RNA (1)...(19): siRNA sense strand
acaauugcuccgagaagau

SEQ ID NO: 2349185 - RNA, 19 nt, Homo sapiens
  misc_RNA (1)...(19): siRNA sense strand
uggcggugcaggaguggua

SEQ ID NO: 2349186 - RNA, 19 nt, Homo sapiens
  misc_RNA (1)...(19): siRNA sense strand
cuggauaauucugugacaa

SEQ ID NO: 2349187 - RNA, 19 nt, Homo sapiens
  misc_RNA (1)...(19): siRNA sense strand
caucaaagcugaaggccuu

SEQ ID NO: 2349188 - RNA, 19 nt, Homo sapiens
  misc_RNA (1)...(19): siRNA sense strand
guaagagcuucaugcgcaa

SEQ ID NO: 2349189 - RNA, 19 nt, Homo sapiens
  misc_RNA (1)...(19): siRNA sense strand
ccaccggaguccaaggaga

SEQ ID NO: 2349190 - RNA, 19 nt, Homo sapiens
  misc_RNA (1)...(19): siRNA sense strand
aggcagggccagaggaaag

SEQ ID NO: 2349191 - RNA, 19 nt, Homo sapiens
  misc_RNA (1)...(19): siRNA sense strand
gcaagagcuucauccgcaa

SEQ ID NO: 2349192 - RNA, 19 nt, Homo sapiens
  misc_RNA (1)...(19): siRNA sense strand
cagugaagagccugguauu

SEQ ID NO: 2349193 - RNA, 19 nt, Homo sapiens
  misc_RNA (1)...(19): siRNA sense strand
gggccagaggaaagugaga

SEQ ID NO: 2349194 - RNA, 19 nt, Homo sapiens
  misc_RNA (1)...(19): siRNA sense strand
ggaacauaauacagaggac

SEQ ID NO: 2349195 - RNA, 19 nt, Homo sapiens
  misc_RNA (1)...(19): siRNA sense strand
uaaugaaacaccagcgcau

SEQ ID NO: 2349196 - RNA, 19 nt, Homo sapiens
  misc_RNA (1)...(19): siRNA sense strand
aggagagugacguguacaa

SEQ ID NO: 2349197 - RNA, 19 nt, Homo sapiens
  misc_RNA (1)...(19): siRNA sense strand
aguaagagcuucaugcgca

SEQ ID NO: 2349198 - RNA, 19 nt, Homo sapiens
  misc_RNA (1)...(19): siRNA sense strand
gauucaaccagaaggggaa

SEQ ID NO: 2349199 - RNA, 19 nt, Homo sapiens
  misc_RNA (1)...(19): siRNA sense strand
cggaguccaaggagaguga

SEQ ID NO: 2349200 - RNA, 19 nt, Homo sapiens
  misc_RNA (1)...(19): siRNA sense strand
ggaaccagcuggagggcaa

SEQ ID NO: 2349201 - RNA, 19 nt, Homo sapiens
  misc_RNA (1)...(19): siRNA sense strand
caucaaagcugaaggccuu

SEQ ID NO: 2349202 - RNA, 19 nt, Homo sapiens
  misc_RNA (1)...(19): siRNA sense strand
agaauaucaugaagggcaa

SEQ ID NO: 2349203 - RNA, 19 nt, Homo sapiens
  misc_RNA (1)...(19): siRNA sense strand
uggagaaccugcugcgcaa

SEQ ID NO: 2349204 - RNA, 19 nt, Homo sapiens
  misc_RNA (1)...(19): siRNA sense strand
guaagagcuucaugcgcaa

SEQ ID NO: 2349205 - RNA, 19 nt, Homo sapiens
  misc_RNA (1)...(19): siRNA sense strand
ccaccggaguccaaggaga

SEQ ID NO: 2349206 - RNA, 19 nt, Homo sapiens
  misc_RNA (1)...(19): siRNA sense strand
aggcagggccagaggaaag

SEQ ID NO: 2349207 - RNA, 19 nt, Homo sapiens
  misc_RNA (1)...(19): siRNA sense strand
gcaagagcuucauccgcaa

SEQ ID NO: 2349208 - RNA, 19 nt, Homo sapiens
  misc_RNA (1)...(19): siRNA sense strand
cagggacagcagagaagaa

SEQ ID NO: 2349209 - RNA, 19 nt, Homo sapiens
  misc_RNA (1)...(19): siRNA sense strand
ggcuggagaacuuggagaa

SEQ ID NO: 2349210 - RNA, 19 nt, Homo sapiens
  misc_RNA (1)...(19): siRNA sense strand
cagugaagagccugguauu

SEQ ID NO: 2349211 - RNA, 19 nt, Homo sapiens
  misc_RNA (1)...(19): siRNA sense strand
gggccagaggaaagugaga

SEQ ID NO: 2349212 - RNA, 19 nt, Homo sapiens
  misc_RNA (1)...(19): siRNA sense strand
aagaauaucaugaagggca

SEQ ID NO: 2349213 - RNA, 19 nt, Homo sapiens
  misc_RNA (1)...(19): siRNA sense strand
ggaacauaauacagaggac

SEQ ID NO: 2349214 - RNA, 19 nt, Homo sapiens
  misc_RNA (1)...(19): siRNA sense strand
uggagaacuuggagaaccu

SEQ ID NO: 2349215 - RNA, 19 nt, Homo sapiens
  misc_RNA (1)...(19): siRNA sense strand
ccagguauuaagggagaua

SEQ ID NO: 2349216 - RNA, 19 nt, Homo sapiens
  misc_RNA (1)...(19): siRNA sense strand
uaaugaaacaccagcgcau

SEQ ID NO: 2349217 - RNA, 19 nt, Homo sapiens
  misc_RNA (1)...(19): siRNA sense strand
aggagagugacguguacaa

SEQ ID NO: 2349218 - RNA, 19 nt, Homo sapiens
  misc_RNA (1)...(19): siRNA sense strand
aguaagagcuucaugcgca

SEQ ID NO: 2349219 - RNA, 19 nt, Homo sapiens
  misc_RNA (1)...(19): siRNA sense strand
cagcagcaaaugaggcaca

SEQ ID NO: 2349220 - RNA, 19 nt, Homo sapiens
  misc_RNA (1)...(19): siRNA sense strand
gauucaaccagaaggggaa

SEQ ID NO: 2349221 - RNA, 19 nt, Homo sapiens
  misc_RNA (1)...(19): siRNA sense strand
cuauagagaggaaggugga

SEQ ID NO: 2349222 - RNA, 19 nt, Homo sapiens
  misc_RNA (1)...(19): siRNA sense strand
cggaguccaaggagaguga

SEQ ID NO: 2349223 - RNA, 19 nt, Homo sapiens
  misc_RNA (1)...(19): siRNA sense strand
uggacaaccuguauggcua

SEQ ID NO: 2349224 - RNA, 19 nt, Homo sapiens
  misc_RNA (1)...(19): siRNA sense strand
gcucaauccgccagacaca

SEQ ID NO: 2349225 - RNA, 19 nt, Homo sapiens
  misc_RNA (1)...(19): siRNA sense strand
gcacauaggccugaagcca

SEQ ID NO: 2349226 - RNA, 19 nt, Homo sapiens
  misc_RNA (1)...(19): siRNA sense strand
aggaggugguguggagcaa

SEQ ID NO: 2349227 - RNA, 19 nt, Homo sapiens
  misc_RNA (1)...(19): siRNA sense strand
gcucaguccuggcugccua

SEQ ID NO: 2349228 - RNA, 19 nt, Homo sapiens
  misc_RNA (1)...(19): siRNA sense strand
cgaccgggacaauggcgaa

SEQ ID NO: 2349229 - RNA, 19 nt, Homo sapiens
  misc_RNA (1)...(19): siRNA sense strand
aauucaacagcaaggagaa

SEQ ID NO: 2349230 - RNA, 19 nt, Homo sapiens
  misc_RNA (1)...(19): siRNA sense strand
gcaaggugcuagugcgagu

SEQ ID NO: 2349231 - RNA, 19 nt, Homo sapiens
  misc_RNA (1)...(19): siRNA sense strand
agaucgaggugcuggacau

SEQ ID NO: 2349232 - RNA, 19 nt, Homo sapiens
  misc_RNA (1)...(19): siRNA sense strand
agugcgagcuacugggaga

SEQ ID NO: 2349233 - RNA, 19 nt, Homo sapiens
  misc_RNA (1)...(19): siRNA sense strand
cgguacaggaggagcagga

SEQ ID NO: 2349234 - RNA, 19 nt, Homo sapiens
  misc_RNA (1)...(19): siRNA sense strand
gcaccaacuccuugcgcga

SEQ ID NO: 2349235 - RNA, 19 nt, Homo sapiens
  misc_RNA (1)...(19): siRNA sense strand
agguacaagugucggaugu

SEQ ID NO: 2349236 - RNA, 19 nt, Homo sapiens
  misc_RNA (1)...(19): siRNA sense strand
gguuucagacggugcccaa

SEQ ID NO: 2349237 - RNA, 19 nt, Homo sapiens
  misc_RNA (1)...(19): siRNA sense strand
cugagcuggugcuggagaa

SEQ ID NO: 2349238 - RNA, 19 nt, Homo sapiens
  misc_RNA (1)...(19): siRNA sense strand
aaguguacgugcaagccaa

SEQ ID NO: 2349239 - RNA, 19 nt, Homo sapiens
  misc_RNA (1)...(19): siRNA sense strand
gauaucaucuccaacggaa

SEQ ID NO: 2349240 - RNA, 19 nt, Homo sapiens
  misc_RNA (1)...(19): siRNA sense strand
cagaccugacgguggaaau

SEQ ID NO: 2349241 - RNA, 19 nt, Homo sapiens
  misc_RNA (1)...(19): siRNA sense strand
gcaaggugcuagugcgagu

SEQ ID NO: 2349242 - RNA, 19 nt, Homo sapiens
  misc_RNA (1)...(19): siRNA sense strand
agaucgaggugcuggacau

SEQ ID NO: 2349243 - RNA, 19 nt, Homo sapiens
  misc_RNA (1)...(19): siRNA sense strand
agugcgagcuacugggaga

SEQ ID NO: 2349244 - RNA, 19 nt, Homo sapiens
  misc_RNA (1)...(19): siRNA sense strand
cgguacaggaggagcagga

SEQ ID NO: 2349245 - RNA, 19 nt, Homo sapiens
  misc_RNA (1)...(19): siRNA sense strand
gcaccaacuccuugcgcga

SEQ ID NO: 2349246 - RNA, 19 nt, Homo sapiens
  misc_RNA (1)...(19): siRNA sense strand
agguacaagugucggaugu

SEQ ID NO: 2349247 - RNA, 19 nt, Homo sapiens
  misc_RNA (1)...(19): siRNA sense strand
gguuucagacggugcccaa

SEQ ID NO: 2349248 - RNA, 19 nt, Homo sapiens
  misc_RNA (1)...(19): siRNA sense strand
cugagcuggugcuggagaa

SEQ ID NO: 2349249 - RNA, 19 nt, Homo sapiens
  misc_RNA (1)...(19): siRNA sense strand
aaguguacgugcaagccaa

SEQ ID NO: 2349250 - RNA, 19 nt, Homo sapiens
  misc_RNA (1)...(19): siRNA sense strand
gauaucaucuccaacggaa

SEQ ID NO: 2349251 - RNA, 19 nt, Homo sapiens
  misc_RNA (1)...(19): siRNA sense strand
cagaccugacgguggaaau

SEQ ID NO: 2349252 - RNA, 19 nt, Homo sapiens
  misc_RNA (1)...(19): siRNA sense strand
cggcagaggagaagcagaa

SEQ ID NO: 2349253 - RNA, 19 nt, Homo sapiens
  misc_RNA (1)...(19): siRNA sense strand
acuucaagcugguggagaa

SEQ ID NO: 2349254 - RNA, 19 nt, Homo sapiens
  misc_RNA (1)...(19): siRNA sense strand
ggguggagauucuggccaa

SEQ ID NO: 2349255 - RNA, 19 nt, Homo sapiens
  misc_RNA (1)...(19): siRNA sense strand
ccaagacggcagaggagaa

SEQ ID NO: 2349256 - RNA, 19 nt, Homo sapiens
  misc_RNA (1)...(19): siRNA sense strand
cagaaagaagaguguacaa

SEQ ID NO: 2349257 - RNA, 19 nt, Homo sapiens
  misc_RNA (1)...(19): siRNA sense strand
gaagagagcgagauggaca

SEQ ID NO: 2349258 - RNA, 19 nt, Homo sapiens
  misc_RNA (1)...(19): siRNA sense strand
caacugaagagcaggguca

SEQ ID NO: 2349259 - RNA, 19 nt, Homo sapiens
  misc_RNA (1)...(19): siRNA sense strand
acaucgaggagaagaacaa

SEQ ID NO: 2349260 - RNA, 19 nt, Homo sapiens
  misc_RNA (1)...(19): siRNA sense strand
ccacggacaucaugcggaa

SEQ ID NO: 2349261 - RNA, 19 nt, Homo sapiens
  misc_RNA (1)...(19): siRNA sense strand
cugcaagggacuuuguuaa

SEQ ID NO: 2349262 - RNA, 19 nt, Homo sapiens
  misc_RNA (1)...(19): siRNA sense strand
cggaagaaggagucaacuu

SEQ ID NO: 2349263 - RNA, 19 nt, Homo sapiens
  misc_RNA (1)...(19): siRNA sense strand
aagcggaaauccaggguca

SEQ ID NO: 2349264 - RNA, 19 nt, Homo sapiens
  misc_RNA (1)...(19): siRNA sense strand
ccgacaagcaccaguucaa

SEQ ID NO: 2349265 - RNA, 19 nt, Homo sapiens
  misc_RNA (1)...(19): siRNA sense strand
ccaagauccucgaggccuu

SEQ ID NO: 2349266 - RNA, 19 nt, Homo sapiens
  misc_RNA (1)...(19): siRNA sense strand
gcuccuagaaauuggugaa

SEQ ID NO: 2349267 - RNA, 19 nt, Homo sapiens
  misc_RNA (1)...(19): siRNA sense strand
gggcuuucgaagagaccaa

SEQ ID NO: 2349268 - RNA, 19 nt, Homo sapiens
  misc_RNA (1)...(19): siRNA sense strand
ggaccagcagcaagaacaa

SEQ ID NO: 2349269 - RNA, 19 nt, Homo sapiens
  misc_RNA (1)...(19): siRNA sense strand
gugaagagagcgagaugga

SEQ ID NO: 2349270 - RNA, 19 nt, Homo sapiens
  misc_RNA (1)...(19): siRNA sense strand
gcaucaagaaggugugcuu

SEQ ID NO: 2349271 - RNA, 19 nt, Homo sapiens
  misc_RNA (1)...(19): siRNA sense strand
agguggagaauguggaaga

SEQ ID NO: 2349272 - RNA, 19 nt, Homo sapiens
  misc_RNA (1)...(19): siRNA sense strand
ccaacaucaaugagaccaa

SEQ ID NO: 2349273 - RNA, 19 nt, Homo sapiens
  misc_RNA (1)...(19): siRNA sense strand
cagcaagacggaagaagga

SEQ ID NO: 2349274 - RNA, 19 nt, Homo sapiens
  misc_RNA (1)...(19): siRNA sense strand
cugaaggagaugaagcaau

SEQ ID NO: 2349275 - RNA, 19 nt, Homo sapiens
  misc_RNA (1)...(19): siRNA sense strand
caucugacaagcaggacaa

SEQ ID NO: 2349276 - RNA, 19 nt, Homo sapiens
  misc_RNA (1)...(19): siRNA sense strand
gauauguggaagaugggaa

SEQ ID NO: 2349277 - RNA, 19 nt, Homo sapiens
  misc_RNA (1)...(19): siRNA sense strand
uggaaguucauaaggauuu

SEQ ID NO: 2349278 - RNA, 19 nt, Homo sapiens
  misc_RNA (1)...(19): siRNA sense strand
ggagcaagcugguggacug

SEQ ID NO: 2349279 - RNA, 19 nt, Homo sapiens
  misc_RNA (1)...(19): siRNA sense strand
acgagaacuauguggccaa

SEQ ID NO: 2349280 - RNA, 19 nt, Homo sapiens
  misc_RNA (1)...(19): siRNA sense strand
ucuucuaccucgacagcua

SEQ ID NO: 2349281 - RNA, 19 nt, Homo sapiens
  misc_RNA (1)...(19): siRNA sense strand
gcacagacacggagcugca

SEQ ID NO: 2349282 - RNA, 19 nt, Homo sapiens
  misc_RNA (1)...(19): siRNA sense strand
gaauguggaagaugggaca

SEQ ID NO: 2349283 - RNA, 19 nt, Homo sapiens
  misc_RNA (1)...(19): siRNA sense strand
aagucauggagguggagaa

SEQ ID NO: 2349284 - RNA, 19 nt, Homo sapiens
  misc_RNA (1)...(19): siRNA sense strand
acgucaugauugcggagaa

SEQ ID NO: 2349285 - RNA, 19 nt, Homo sapiens
  misc_RNA (1)...(19): siRNA sense strand
cagcaagaacaaacagcuu

SEQ ID NO: 2349286 - RNA, 19 nt, Homo sapiens
  misc_RNA (1)...(19): siRNA sense strand
acaucaaccucauggaagu

SEQ ID NO: 2349287 - RNA, 19 nt, Homo sapiens
  misc_RNA (1)...(19): siRNA sense strand
ccuuuaagcagcuggacga

SEQ ID NO: 2349288 - RNA, 19 nt, Homo sapiens
  misc_RNA (1)...(19): siRNA sense strand
cgguaaagauagaccagcu

SEQ ID NO: 2349289 - RNA, 19 nt, Homo sapiens
  misc_RNA (1)...(19): siRNA sense strand
ggaagaugggacagcggau

SEQ ID NO: 2349290 - RNA, 19 nt, Homo sapiens
  misc_RNA (1)...(19): siRNA sense strand
ugaugaacaagaaggugaa

SEQ ID NO: 2349291 - RNA, 19 nt, Homo sapiens
  misc_RNA (1)...(19): siRNA sense strand
agaacaaacagcuucgcaa

SEQ ID NO: 2349292 - RNA, 19 nt, Homo sapiens
  misc_RNA (1)...(19): siRNA sense strand
gcaaguggcuggagcaggu

SEQ ID NO: 2349293 - RNA, 19 nt, Homo sapiens
  misc_RNA (1)...(19): siRNA sense strand
cggccaagaauaagugguu

SEQ ID NO: 2349294 - RNA, 19 nt, Homo sapiens
  misc_RNA (1)...(19): siRNA sense strand
gcuuacaagaguuuaaaca

SEQ ID NO: 2349295 - RNA, 19 nt, Homo sapiens
  misc_RNA (1)...(19): siRNA sense strand
agcaagaaguccaccaaga

SEQ ID NO: 2349296 - RNA, 19 nt, Homo sapiens
  misc_RNA (1)...(19): siRNA sense strand
augaugaacaagaagguga

SEQ ID NO: 2349297 - RNA, 19 nt, Homo sapiens
  misc_RNA (1)...(19): siRNA sense strand
aggaggaagaccaggcuga

SEQ ID NO: 2349298 - RNA, 19 nt, Homo sapiens
  misc_RNA (1)...(19): siRNA sense strand
cggcgugguguaugaguau

SEQ ID NO: 2349299 - RNA, 19 nt, Homo sapiens
  misc_RNA (1)...(19): siRNA sense strand
ccgcaaacucagggcauuu

SEQ ID NO: 2349300 - RNA, 19 nt, Homo sapiens
  misc_RNA (1)...(19): siRNA sense strand
cugaagucauggaggugga

SEQ ID NO: 2349301 - RNA, 19 nt, Homo sapiens
  misc_RNA (1)...(19): siRNA sense strand
ucaagcugguggagaacau

SEQ ID NO: 2349302 - RNA, 19 nt, Homo sapiens
  misc_RNA (1)...(19): siRNA sense strand
uggccgacucaguggagaa

SEQ ID NO: 2349303 - RNA, 19 nt, Homo sapiens
  misc_RNA (1)...(19): siRNA sense strand
ccuggaaguucauaaggau

SEQ ID NO: 2349304 - RNA, 19 nt, Homo sapiens
  misc_RNA (1)...(19): siRNA sense strand
gagcugaacaagaucccua

SEQ ID NO: 2349305 - RNA, 19 nt, Homo sapiens
  misc_RNA (1)...(19): siRNA sense strand
gaguuuaaacagaaagaag

SEQ ID NO: 2349306 - RNA, 19 nt, Homo sapiens
  misc_RNA (1)...(19): siRNA sense strand
uggaagaugggaagaacca

SEQ ID NO: 2349307 - RNA, 19 nt, Homo sapiens
  misc_RNA (1)...(19): siRNA sense strand
gaaucaacacugaagucau

SEQ ID NO: 2349308 - RNA, 19 nt, Homo sapiens
  misc_RNA (1)...(19): siRNA sense strand
cggcauuccugcaucgcau

SEQ ID NO: 2349309 - RNA, 19 nt, Homo sapiens
  misc_RNA (1)...(19): siRNA sense strand
cggagaaagcugagcacug

SEQ ID NO: 2349310 - RNA, 19 nt, Homo sapiens
  misc_RNA (1)...(19): siRNA sense strand
accacaugaugaugaacaa

SEQ ID NO: 2349311 - RNA, 19 nt, Homo sapiens
  misc_RNA (1)...(19): siRNA sense strand
aggauuugcagcaggacau

SEQ ID NO: 2349312 - RNA, 19 nt, Homo sapiens
  misc_RNA (1)...(19): siRNA sense strand
uaaagaucucugcgggcaa

SEQ ID NO: 2349313 - RNA, 19 nt, Homo sapiens
  misc_RNA (1)...(19): siRNA sense strand
uugacaucgaggagaagaa

SEQ ID NO: 2349314 - RNA, 19 nt, Homo sapiens
  misc_RNA (1)...(19): siRNA sense strand
gcggaauugcaguguggaa

SEQ ID NO: 2349315 - RNA, 19 nt, Homo sapiens
  misc_RNA (1)...(19): siRNA sense strand
auaaagcagaugugggaca

SEQ ID NO: 2349316 - RNA, 19 nt, Homo sapiens
  misc_RNA (1)...(19): siRNA sense strand
ggaacaugcucgggaggca

SEQ ID NO: 2349317 - RNA, 19 nt, Homo sapiens
  misc_RNA (1)...(19): siRNA sense strand
ucacaacccucaaaggaca

SEQ ID NO: 2349318 - RNA, 19 nt, Homo sapiens
  misc_RNA (1)...(19): siRNA sense strand
acaacaucacugcaggaaa

SEQ ID NO: 2349319 - RNA, 19 nt, Homo sapiens
  misc_RNA (1)...(19): siRNA sense strand
uuguaaagaucugggacau

SEQ ID NO: 2349320 - RNA, 19 nt, Homo sapiens
  misc_RNA (1)...(19): siRNA sense strand
aaacauaacauuucccaca

SEQ ID NO: 2349321 - RNA, 19 nt, Homo sapiens
  misc_RNA (1)...(19): siRNA sense strand
gcaucugacaacagcauca

SEQ ID NO: 2349322 - RNA, 19 nt, Homo sapiens
  misc_RNA (1)...(19): siRNA sense strand
ggaaaugcgggcaggcugu

SEQ ID NO: 2349323 - RNA, 19 nt, Homo sapiens
  misc_RNA (1)...(19): siRNA sense strand
auuguaaagaucugggaca

SEQ ID NO: 2349324 - RNA, 19 nt, Homo sapiens
  misc_RNA (1)...(19): siRNA sense strand
gcggaauugcaguguggaa

SEQ ID NO: 2349325 - RNA, 19 nt, Homo sapiens
  misc_RNA (1)...(19): siRNA sense strand
auaaagcagaugugggaca

SEQ ID NO: 2349326 - RNA, 19 nt, Homo sapiens
  misc_RNA (1)...(19): siRNA sense strand
ggaacaugcucgggaggca

SEQ ID NO: 2349327 - RNA, 19 nt, Homo sapiens
  misc_RNA (1)...(19): siRNA sense strand
ucacaacccucaaaggaca

SEQ ID NO: 2349328 - RNA, 19 nt, Homo sapiens
  misc_RNA (1)...(19): siRNA sense strand
acaacaucacugcaggaaa

SEQ ID NO: 2349329 - RNA, 19 nt, Homo sapiens
  misc_RNA (1)...(19): siRNA sense strand
uuguaaagaucugggacau

SEQ ID NO: 2349330 - RNA, 19 nt, Homo sapiens
  misc_RNA (1)...(19): siRNA sense strand
aaacauaacauuucccaca

SEQ ID NO: 2349331 - RNA, 19 nt, Homo sapiens
  misc_RNA (1)...(19): siRNA sense strand
gcaucugacaacagcauca

SEQ ID NO: 2349332 - RNA, 19 nt, Homo sapiens
  misc_RNA (1)...(19): siRNA sense strand
ggaaaugcgggcaggcugu

SEQ ID NO: 2349333 - RNA, 19 nt, Homo sapiens
  misc_RNA (1)...(19): siRNA sense strand
auuguaaagaucugggaca

SEQ ID NO: 2349334 - RNA, 19 nt, Homo sapiens
  misc_RNA (1)...(19): siRNA sense strand
cugcaauauuagagggaga

SEQ ID NO: 2349335 - RNA, 19 nt, Homo sapiens
  misc_RNA (1)...(19): siRNA sense strand
cauaaaugccaaagaccaa

SEQ ID NO: 2349336 - RNA, 19 nt, Homo sapiens
  misc_RNA (1)...(19): siRNA sense strand
acaagaagaaagaaaggaa

SEQ ID NO: 2349337 - RNA, 19 nt, Homo sapiens
  misc_RNA (1)...(19): siRNA sense strand
ggggaaaagugaagaaagu

SEQ ID NO: 2349338 - RNA, 19 nt, Homo sapiens
  misc_RNA (1)...(19): siRNA sense strand
ggaaacuuaaacugggaaa

SEQ ID NO: 2349339 - RNA, 19 nt, Homo sapiens
  misc_RNA (1)...(19): siRNA sense strand
aaaccaaguacaagaagaa

SEQ ID NO: 2349340 - RNA, 19 nt, Homo sapiens
  misc_RNA (1)...(19): siRNA sense strand
uggaagaagcucaaagaca

SEQ ID NO: 2349341 - RNA, 19 nt, Homo sapiens
  misc_RNA (1)...(19): siRNA sense strand
ugaagaacuuggagaggca

SEQ ID NO: 2349342 - RNA, 19 nt, Homo sapiens
  misc_RNA (1)...(19): siRNA sense strand
guuaaagauucgugguacu

SEQ ID NO: 2349343 - RNA, 19 nt, Homo sapiens
  misc_RNA (1)...(19): siRNA sense strand
uuggaaggucauugggaua

SEQ ID NO: 2349344 - RNA, 19 nt, Homo sapiens
  misc_RNA (1)...(19): siRNA sense strand
aaacaaacacaggaagaaa

SEQ ID NO: 2349345 - RNA, 19 nt, Homo sapiens
  misc_RNA (1)...(19): siRNA sense strand
caagaagaaagaaaggaau

SEQ ID NO: 2349346 - RNA, 19 nt, Homo sapiens
  misc_RNA (1)...(19): siRNA sense strand
ugaacagagccaugaagaa

SEQ ID NO: 2349347 - RNA, 19 nt, Homo sapiens
  misc_RNA (1)...(19): siRNA sense strand
agaaagugacacagauaca

SEQ ID NO: 2349348 - RNA, 19 nt, Homo sapiens
  misc_RNA (1)...(19): siRNA sense strand
agccaaagggacugaagaa

SEQ ID NO: 2349349 - RNA, 19 nt, Homo sapiens
  misc_RNA (1)...(19): siRNA sense strand
caaugaucagagaaggaaa

SEQ ID NO: 2349350 - RNA, 19 nt, Homo sapiens
  misc_RNA (1)...(19): siRNA sense strand
ucagagaaggaaaggaaca

SEQ ID NO: 2349351 - RNA, 19 nt, Homo sapiens
  misc_RNA (1)...(19): siRNA sense strand
uagugaaauugaacgacaa

SEQ ID NO: 2349352 - RNA, 19 nt, Homo sapiens
  misc_RNA (1)...(19): siRNA sense strand
gaguagugacuguguuaau

SEQ ID NO: 2349353 - RNA, 19 nt, Homo sapiens
  misc_RNA (1)...(19): siRNA sense strand
ccauaaaugccaaagacca

SEQ ID NO: 2349354 - RNA, 19 nt, Homo sapiens
  misc_RNA (1)...(19): siRNA sense strand
gcuucuuggugauagcaaa

SEQ ID NO: 2349355 - RNA, 19 nt, Homo sapiens
  misc_RNA (1)...(19): siRNA sense strand
gaagaaaagaaaagagcca

SEQ ID NO: 2349356 - RNA, 19 nt, Homo sapiens
  misc_RNA (1)...(19): siRNA sense strand
ggaaaagugaagaaaguga

SEQ ID NO: 2349357 - RNA, 19 nt, Homo sapiens
  misc_RNA (1)...(19): siRNA sense strand
cuggauaaacuuucagauu

SEQ ID NO: 2349358 - RNA, 19 nt, Homo sapiens
  misc_RNA (1)...(19): siRNA sense strand
uugaaagagggaaggaaga

SEQ ID NO: 2349359 - RNA, 19 nt, Homo sapiens
  misc_RNA (1)...(19): siRNA sense strand
gugaagaaagugacacaga

SEQ ID NO: 2349360 - RNA, 19 nt, Homo sapiens
  misc_RNA (1)...(19): siRNA sense strand
aggaauucuuuaugguaca

SEQ ID NO: 2349361 - RNA, 19 nt, Homo sapiens
  misc_RNA (1)...(19): siRNA sense strand
agaaguauguuuuggaaga

SEQ ID NO: 2349362 - RNA, 19 nt, Homo sapiens
  misc_RNA (1)...(19): siRNA sense strand
ggaauagaacugggagaca

SEQ ID NO: 2349363 - RNA, 19 nt, Homo sapiens
  misc_RNA (1)...(19): siRNA sense strand
ugaaauugaacgacaacau

SEQ ID NO: 2349364 - RNA, 19 nt, Homo sapiens
  misc_RNA (1)...(19): siRNA sense strand
auaaugaggugauggggaa

SEQ ID NO: 2349365 - RNA, 19 nt, Homo sapiens
  misc_RNA (1)...(19): siRNA sense strand
acagaagaaaguagcaaaa

SEQ ID NO: 2349366 - RNA, 19 nt, Homo sapiens
  misc_RNA (1)...(19): siRNA sense strand
agaaagacaagaugacuca

SEQ ID NO: 2349367 - RNA, 19 nt, Homo sapiens
  misc_RNA (1)...(19): siRNA sense strand
aauuugaagaacagggaga

SEQ ID NO: 2349368 - RNA, 19 nt, Homo sapiens
  misc_RNA (1)...(19): siRNA sense strand
cuucugaaugccugugaaa

SEQ ID NO: 2349369 - RNA, 19 nt, Homo sapiens
  misc_RNA (1)...(19): siRNA sense strand
aaggaauagaacugggaga

SEQ ID NO: 2349370 - RNA, 19 nt, Homo sapiens
  misc_RNA (1)...(19): siRNA sense strand
ccaaagggacugaagaaac

SEQ ID NO: 2349371 - RNA, 19 nt, Homo sapiens
  misc_RNA (1)...(19): siRNA sense strand
cuugaauagaggugaagau

SEQ ID NO: 2349372 - RNA, 19 nt, Homo sapiens
  misc_RNA (1)...(19): siRNA sense strand
ggaaggugcuggauggaug

SEQ ID NO: 2349373 - RNA, 19 nt, Homo sapiens
  misc_RNA (1)...(19): siRNA sense strand
agaaacuguaucugaagaa

SEQ ID NO: 2349374 - RNA, 19 nt, Homo sapiens
  misc_RNA (1)...(19): siRNA sense strand
auguaaugacaaugccaua

SEQ ID NO: 2349375 - RNA, 19 nt, Homo sapiens
  misc_RNA (1)...(19): siRNA sense strand
gagucagcgccaaggaaaa

SEQ ID NO: 2349376 - RNA, 19 nt, Homo sapiens
  misc_RNA (1)...(19): siRNA sense strand
gccaaagggacugaagaaa

SEQ ID NO: 2349377 - RNA, 19 nt, Homo sapiens
  misc_RNA (1)...(19): siRNA sense strand
caaagauguccuugggcca

SEQ ID NO: 2349378 - RNA, 19 nt, Homo sapiens
  misc_RNA (1)...(19): siRNA sense strand
agagcaagucugaaucuaa

SEQ ID NO: 2349379 - RNA, 19 nt, Homo sapiens
  misc_RNA (1)...(19): siRNA sense strand
aagugaagaaagugacaca

SEQ ID NO: 2349380 - RNA, 19 nt, Homo sapiens
  misc_RNA (1)...(19): siRNA sense strand
guuugaagaaaguagugaa

SEQ ID NO: 2349381 - RNA, 19 nt, Homo sapiens
  misc_RNA (1)...(19): siRNA sense strand
agagggagaagcacgguua

SEQ ID NO: 2349382 - RNA, 19 nt, Homo sapiens
  misc_RNA (1)...(19): siRNA sense strand
caacagaagaaaguagcaa

SEQ ID NO: 2349383 - RNA, 19 nt, Homo sapiens
  misc_RNA (1)...(19): siRNA sense strand
ccgagcuacuucagaguca

SEQ ID NO: 2349384 - RNA, 19 nt, Homo sapiens
  misc_RNA (1)...(19): siRNA sense strand
uuucuugaauagaggugaa

SEQ ID NO: 2349385 - RNA, 19 nt, Homo sapiens
  misc_RNA (1)...(19): siRNA sense strand
aauagaacugggagacauu

SEQ ID NO: 2349386 - RNA, 19 nt, Homo sapiens
  misc_RNA (1)...(19): siRNA sense strand
agauacaucagaaagacaa

SEQ ID NO: 2349387 - RNA, 19 nt, Homo sapiens
  misc_RNA (1)...(19): siRNA sense strand
acucauauaucgaaccuga

SEQ ID NO: 2349388 - RNA, 19 nt, Homo sapiens
  misc_RNA (1)...(19): siRNA sense strand
aaagagggaaggaagauau

SEQ ID NO: 2349389 - RNA, 19 nt, Homo sapiens
  misc_RNA (1)...(19): siRNA sense strand
uuucuaugucaaagagcaa

SEQ ID NO: 2349390 - RNA, 19 nt, Homo sapiens
  misc_RNA (1)...(19): siRNA sense strand
ugucaaagagcaagucuga

SEQ ID NO: 2349391 - RNA, 19 nt, Homo sapiens
  misc_RNA (1)...(19): siRNA sense strand
ggauuuugccuuagcggua

SEQ ID NO: 2349392 - RNA, 19 nt, Homo sapiens
  misc_RNA (1)...(19): siRNA sense strand
uggaagagauugaagccua

SEQ ID NO: 2349393 - RNA, 19 nt, Homo sapiens
  misc_RNA (1)...(19): siRNA sense strand
ccgaagacaaagugccaaa

SEQ ID NO: 2349394 - RNA, 19 nt, Homo sapiens
  misc_RNA (1)...(19): siRNA sense strand
agacaacaggaucgagaaa

SEQ ID NO: 2349395 - RNA, 19 nt, Homo sapiens
  misc_RNA (1)...(19): siRNA sense strand
guugaaaauucgagacaca

SEQ ID NO: 2349396 - RNA, 19 nt, Homo sapiens
  misc_RNA (1)...(19): siRNA sense strand
cguauuacuggaagagauu

SEQ ID NO: 2349397 - RNA, 19 nt, Homo sapiens
  misc_RNA (1)...(19): siRNA sense strand
cagcaguucccgaagacaa

SEQ ID NO: 2349398 - RNA, 19 nt, Homo sapiens
  misc_RNA (1)...(19): siRNA sense strand
aggccuggcuguugugcaa

SEQ ID NO: 2349399 - RNA, 19 nt, Homo sapiens
  misc_RNA (1)...(19): siRNA sense strand
ggaagaaauuaguggccug

SEQ ID NO: 2349400 - RNA, 19 nt, Homo sapiens
  misc_RNA (1)...(19): siRNA sense strand
agacaaagugccaaagcca

SEQ ID NO: 2349401 - RNA, 19 nt, Homo sapiens
  misc_RNA (1)...(19): siRNA sense strand
acuuaaaugaaaugcccaa

SEQ ID NO: 2349402 - RNA, 19 nt, Homo sapiens
  misc_RNA (1)...(19): siRNA sense strand
ucuucaugccauagaauau

SEQ ID NO: 2349403 - RNA, 19 nt, Homo sapiens
  misc_RNA (1)...(19): siRNA sense strand
cuuagaauaugauggggaa

SEQ ID NO: 2349404 - RNA, 19 nt, Homo sapiens
  misc_RNA (1)...(19): siRNA sense strand
cuggagaaacacuggacuu

SEQ ID NO: 2349405 - RNA, 19 nt, Homo sapiens
  misc_RNA (1)...(19): siRNA sense strand
gaaauuaguggccuggcaa

SEQ ID NO: 2349406 - RNA, 19 nt, Homo sapiens
  misc_RNA (1)...(19): siRNA sense strand
caagacaacaggaucgaga

SEQ ID NO: 2349407 - RNA, 19 nt, Homo sapiens
  misc_RNA (1)...(19): siRNA sense strand
gguacagacugacggccau

SEQ ID NO: 2349408 - RNA, 19 nt, Homo sapiens
  misc_RNA (1)...(19): siRNA sense strand
uaucacuauucaaggcaau

SEQ ID NO: 2349409 - RNA, 19 nt, Homo sapiens
  misc_RNA (1)...(19): siRNA sense strand
ccucuuugcugaugggaag

SEQ ID NO: 2349410 - RNA, 19 nt, Homo sapiens
  misc_RNA (1)...(19): siRNA sense strand
ggaagagauugaagccuac

SEQ ID NO: 2349411 - RNA, 19 nt, Homo sapiens
  misc_RNA (1)...(19): siRNA sense strand
ggcaaugaaucgcagcaca

SEQ ID NO: 2349412 - RNA, 19 nt, Homo sapiens
  misc_RNA (1)...(19): siRNA sense strand
gugcauuuagcauggauga

SEQ ID NO: 2349413 - RNA, 19 nt, Homo sapiens
  misc_RNA (1)...(19): siRNA sense strand
aaggacgguuuaaggaaca

SEQ ID NO: 2349414 - RNA, 19 nt, Homo sapiens
  misc_RNA (1)...(19): siRNA sense strand
uggaagagauugaagccua

SEQ ID NO: 2349415 - RNA, 19 nt, Homo sapiens
  misc_RNA (1)...(19): siRNA sense strand
ccgaagacaaagugccaaa

SEQ ID NO: 2349416 - RNA, 19 nt, Homo sapiens
  misc_RNA (1)...(19): siRNA sense strand
agacaacaggaucgagaaa

SEQ ID NO: 2349417 - RNA, 19 nt, Homo sapiens
  misc_RNA (1)...(19): siRNA sense strand
guugaaaauucgagacaca

SEQ ID NO: 2349418 - RNA, 19 nt, Homo sapiens
  misc_RNA (1)...(19): siRNA sense strand
cguauuacuggaagagauu

SEQ ID NO: 2349419 - RNA, 19 nt, Homo sapiens
  misc_RNA (1)...(19): siRNA sense strand
cagcaguucccgaagacaa

SEQ ID NO: 2349420 - RNA, 19 nt, Homo sapiens
  misc_RNA (1)...(19): siRNA sense strand
aggccuggcuguugugcaa

SEQ ID NO: 2349421 - RNA, 19 nt, Homo sapiens
  misc_RNA (1)...(19): siRNA sense strand
ggaagaaauuaguggccug

SEQ ID NO: 2349422 - RNA, 19 nt, Homo sapiens
  misc_RNA (1)...(19): siRNA sense strand
agacaaagugccaaagcca

SEQ ID NO: 2349423 - RNA, 19 nt, Homo sapiens
  misc_RNA (1)...(19): siRNA sense strand
acuuaaaugaaaugcccaa

SEQ ID NO: 2349424 - RNA, 19 nt, Homo sapiens
  misc_RNA (1)...(19): siRNA sense strand
ucuucaugccauagaauau

SEQ ID NO: 2349425 - RNA, 19 nt, Homo sapiens
  misc_RNA (1)...(19): siRNA sense strand
cuuagaauaugauggggaa

SEQ ID NO: 2349426 - RNA, 19 nt, Homo sapiens
  misc_RNA (1)...(19): siRNA sense strand
cuggagaaacacuggacuu

SEQ ID NO: 2349427 - RNA, 19 nt, Homo sapiens
  misc_RNA (1)...(19): siRNA sense strand
gaaauuaguggccuggcaa

SEQ ID NO: 2349428 - RNA, 19 nt, Homo sapiens
  misc_RNA (1)...(19): siRNA sense strand
caagacaacaggaucgaga

SEQ ID NO: 2349429 - RNA, 19 nt, Homo sapiens
  misc_RNA (1)...(19): siRNA sense strand
gguacagacugacggccau

SEQ ID NO: 2349430 - RNA, 19 nt, Homo sapiens
  misc_RNA (1)...(19): siRNA sense strand
uaucacuauucaaggcaau

SEQ ID NO: 2349431 - RNA, 19 nt, Homo sapiens
  misc_RNA (1)...(19): siRNA sense strand
ccucuuugcugaugggaag

SEQ ID NO: 2349432 - RNA, 19 nt, Homo sapiens
  misc_RNA (1)...(19): siRNA sense strand
ggaagagauugaagccuac

SEQ ID NO: 2349433 - RNA, 19 nt, Homo sapiens
  misc_RNA (1)...(19): siRNA sense strand
ggcaaugaaucgcagcaca

SEQ ID NO: 2349434 - RNA, 19 nt, Homo sapiens
  misc_RNA (1)...(19): siRNA sense strand
gugcauuuagcauggauga

SEQ ID NO: 2349435 - RNA, 19 nt, Homo sapiens
  misc_RNA (1)...(19): siRNA sense strand
aaggacgguuuaaggaaca

SEQ ID NO: 2349436 - RNA, 19 nt, Homo sapiens
  misc_RNA (1)...(19): siRNA sense strand
uggaagagauugaagccua

SEQ ID NO: 2349437 - RNA, 19 nt, Homo sapiens
  misc_RNA (1)...(19): siRNA sense strand
ccgaagacaaagugccaaa

SEQ ID NO: 2349438 - RNA, 19 nt, Homo sapiens
  misc_RNA (1)...(19): siRNA sense strand
agacaacaggaucgagaaa

SEQ ID NO: 2349439 - RNA, 19 nt, Homo sapiens
  misc_RNA (1)...(19): siRNA sense strand
guugaaaauucgagacaca

SEQ ID NO: 2349440 - RNA, 19 nt, Homo sapiens
  misc_RNA (1)...(19): siRNA sense strand
cguauuacuggaagagauu

SEQ ID NO: 2349441 - RNA, 19 nt, Homo sapiens
  misc_RNA (1)...(19): siRNA sense strand
cagcaguucccgaagacaa

SEQ ID NO: 2349442 - RNA, 19 nt, Homo sapiens
  misc_RNA (1)...(19): siRNA sense strand
aggccuggcuguugugcaa

SEQ ID NO: 2349443 - RNA, 19 nt, Homo sapiens
  misc_RNA (1)...(19): siRNA sense strand
ggaagaaauuaguggccug

SEQ ID NO: 2349444 - RNA, 19 nt, Homo sapiens
  misc_RNA (1)...(19): siRNA sense strand
agacaaagugccaaagcca

SEQ ID NO: 2349445 - RNA, 19 nt, Homo sapiens
  misc_RNA (1)...(19): siRNA sense strand
acuuaaaugaaaugcccaa

SEQ ID NO: 2349446 - RNA, 19 nt, Homo sapiens
  misc_RNA (1)...(19): siRNA sense strand
ucuucaugccauagaauau

SEQ ID NO: 2349447 - RNA, 19 nt, Homo sapiens
  misc_RNA (1)...(19): siRNA sense strand
cuuagaauaugauggggaa

SEQ ID NO: 2349448 - RNA, 19 nt, Homo sapiens
  misc_RNA (1)...(19): siRNA sense strand
cuggagaaacacuggacuu

SEQ ID NO: 2349449 - RNA, 19 nt, Homo sapiens
  misc_RNA (1)...(19): siRNA sense strand
gaaauuaguggccuggcaa

SEQ ID NO: 2349450 - RNA, 19 nt, Homo sapiens
  misc_RNA (1)...(19): siRNA sense strand
caagacaacaggaucgaga

SEQ ID NO: 2349451 - RNA, 19 nt, Homo sapiens
  misc_RNA (1)...(19): siRNA sense strand
gguacagacugacggccau

SEQ ID NO: 2349452 - RNA, 19 nt, Homo sapiens
  misc_RNA (1)...(19): siRNA sense strand
uaucacuauucaaggcaau

SEQ ID NO: 2349453 - RNA, 19 nt, Homo sapiens
  misc_RNA (1)...(19): siRNA sense strand
ccucuuugcugaugggaag

SEQ ID NO: 2349454 - RNA, 19 nt, Homo sapiens
  misc_RNA (1)...(19): siRNA sense strand
ggaagagauugaagccuac

SEQ ID NO: 2349455 - RNA, 19 nt, Homo sapiens
  misc_RNA (1)...(19): siRNA sense strand
ggcaaugaaucgcagcaca

SEQ ID NO: 2349456 - RNA, 19 nt, Homo sapiens
  misc_RNA (1)...(19): siRNA sense strand
gugcauuuagcauggauga

SEQ ID NO: 2349457 - RNA, 19 nt, Homo sapiens
  misc_RNA (1)...(19): siRNA sense strand
aaggacgguuuaaggaaca

SEQ ID NO: 2349458 - RNA, 19 nt, Homo sapiens
  misc_RNA (1)...(19): siRNA sense strand
uggaagagauugaagccua

SEQ ID NO: 2349459 - RNA, 19 nt, Homo sapiens
  misc_RNA (1)...(19): siRNA sense strand
ccgaagacaaagugccaaa

SEQ ID NO: 2349460 - RNA, 19 nt, Homo sapiens
  misc_RNA (1)...(19): siRNA sense strand
agacaacaggaucgagaaa

SEQ ID NO: 2349461 - RNA, 19 nt, Homo sapiens
  misc_RNA (1)...(19): siRNA sense strand
guugaaaauucgagacaca

SEQ ID NO: 2349462 - RNA, 19 nt, Homo sapiens
  misc_RNA (1)...(19): siRNA sense strand
cguauuacuggaagagauu

SEQ ID NO: 2349463 - RNA, 19 nt, Homo sapiens
  misc_RNA (1)...(19): siRNA sense strand
cagcaguucccgaagacaa

SEQ ID NO: 2349464 - RNA, 19 nt, Homo sapiens
  misc_RNA (1)...(19): siRNA sense strand
aggccuggcuguugugcaa

SEQ ID NO: 2349465 - RNA, 19 nt, Homo sapiens
  misc_RNA (1)...(19): siRNA sense strand
ggaagaaauuaguggccug

SEQ ID NO: 2349466 - RNA, 19 nt, Homo sapiens
  misc_RNA (1)...(19): siRNA sense strand
agacaaagugccaaagcca

SEQ ID NO: 2349467 - RNA, 19 nt, Homo sapiens
  misc_RNA (1)...(19): siRNA sense strand
acuuaaaugaaaugcccaa

SEQ ID NO: 2349468 - RNA, 19 nt, Homo sapiens
  misc_RNA (1)...(19): siRNA sense strand
ucuucaugccauagaauau

SEQ ID NO: 2349469 - RNA, 19 nt, Homo sapiens
  misc_RNA (1)...(19): siRNA sense strand
cuuagaauaugauggggaa

SEQ ID NO: 2349470 - RNA, 19 nt, Homo sapiens
  misc_RNA (1)...(19): siRNA sense strand
cuggagaaacacuggacuu

SEQ ID NO: 2349471 - RNA, 19 nt, Homo sapiens
  misc_RNA (1)...(19): siRNA sense strand
gaaauuaguggccuggcaa

SEQ ID NO: 2349472 - RNA, 19 nt, Homo sapiens
  misc_RNA (1)...(19): siRNA sense strand
caagacaacaggaucgaga

SEQ ID NO: 2349473 - RNA, 19 nt, Homo sapiens
  misc_RNA (1)...(19): siRNA sense strand
gguacagacugacggccau

SEQ ID NO: 2349474 - RNA, 19 nt, Homo sapiens
  misc_RNA (1)...(19): siRNA sense strand
uaucacuauucaaggcaau

SEQ ID NO: 2349475 - RNA, 19 nt, Homo sapiens
  misc_RNA (1)...(19): siRNA sense strand
ccucuuugcugaugggaag

SEQ ID NO: 2349476 - RNA, 19 nt, Homo sapiens
  misc_RNA (1)...(19): siRNA sense strand
ggaagagauugaagccuac

SEQ ID NO: 2349477 - RNA, 19 nt, Homo sapiens
  misc_RNA (1)...(19): siRNA sense strand
ggcaaugaaucgcagcaca

SEQ ID NO: 2349478 - RNA, 19 nt, Homo sapiens
  misc_RNA (1)...(19): siRNA sense strand
gugcauuuagcauggauga

SEQ ID NO: 2349479 - RNA, 19 nt, Homo sapiens
  misc_RNA (1)...(19): siRNA sense strand
aaggacgguuuaaggaaca

SEQ ID NO: 2349480 - RNA, 19 nt, Homo sapiens
  misc_RNA (1)...(19): siRNA sense strand
uggaagagauugaagccua

SEQ ID NO: 2349481 - RNA, 19 nt, Homo sapiens
  misc_RNA (1)...(19): siRNA sense strand
ccgaagacaaagugccaaa

SEQ ID NO: 2349482 - RNA, 19 nt, Homo sapiens
  misc_RNA (1)...(19): siRNA sense strand
agacaacaggaucgagaaa

SEQ ID NO: 2349483 - RNA, 19 nt, Homo sapiens
  misc_RNA (1)...(19): siRNA sense strand
guugaaaauucgagacaca

SEQ ID NO: 2349484 - RNA, 19 nt, Homo sapiens
  misc_RNA (1)...(19): siRNA sense strand
cguauuacuggaagagauu

SEQ ID NO: 2349485 - RNA, 19 nt, Homo sapiens
  misc_RNA (1)...(19): siRNA sense strand
cagcaguucccgaagacaa

SEQ ID NO: 2349486 - RNA, 19 nt, Homo sapiens
  misc_RNA (1)...(19): siRNA sense strand
aggccuggcuguugugcaa

SEQ ID NO: 2349487 - RNA, 19 nt, Homo sapiens
  misc_RNA (1)...(19): siRNA sense strand
ggaagaaauuaguggccug

SEQ ID NO: 2349488 - RNA, 19 nt, Homo sapiens
  misc_RNA (1)...(19): siRNA sense strand
agacaaagugccaaagcca

SEQ ID NO: 2349489 - RNA, 19 nt, Homo sapiens
  misc_RNA (1)...(19): siRNA sense strand
acuuaaaugaaaugcccaa

SEQ ID NO: 2349490 - RNA, 19 nt, Homo sapiens
  misc_RNA (1)...(19): siRNA sense strand
ucuucaugccauagaauau

SEQ ID NO: 2349491 - RNA, 19 nt, Homo sapiens
  misc_RNA (1)...(19): siRNA sense strand
cuuagaauaugauggggaa

SEQ ID NO: 2349492 - RNA, 19 nt, Homo sapiens
  misc_RNA (1)...(19): siRNA sense strand
cuggagaaacacuggacuu

SEQ ID NO: 2349493 - RNA, 19 nt, Homo sapiens
  misc_RNA (1)...(19): siRNA sense strand
gaaauuaguggccuggcaa

SEQ ID NO: 2349494 - RNA, 19 nt, Homo sapiens
  misc_RNA (1)...(19): siRNA sense strand
caagacaacaggaucgaga

SEQ ID NO: 2349495 - RNA, 19 nt, Homo sapiens
  misc_RNA (1)...(19): siRNA sense strand
gguacagacugacggccau

SEQ ID NO: 2349496 - RNA, 19 nt, Homo sapiens
  misc_RNA (1)...(19): siRNA sense strand
uaucacuauucaaggcaau

SEQ ID NO: 2349497 - RNA, 19 nt, Homo sapiens
  misc_RNA (1)...(19): siRNA sense strand
ccucuuugcugaugggaag

SEQ ID NO: 2349498 - RNA, 19 nt, Homo sapiens
  misc_RNA (1)...(19): siRNA sense strand
ggaagagauugaagccuac

SEQ ID NO: 2349499 - RNA, 19 nt, Homo sapiens
  misc_RNA (1)...(19): siRNA sense strand
ggcaaugaaucgcagcaca

SEQ ID NO: 2349500 - RNA, 19 nt, Homo sapiens
  misc_RNA (1)...(19): siRNA sense strand
gugcauuuagcauggauga

SEQ ID NO: 2349501 - RNA, 19 nt, Homo sapiens
  misc_RNA (1)...(19): siRNA sense strand
aaggacgguuuaaggaaca

SEQ ID NO: 2349502 - RNA, 19 nt, Homo sapiens
  misc_RNA (1)...(19): siRNA sense strand
uggaagagauugaagccua

SEQ ID NO: 2349503 - RNA, 19 nt, Homo sapiens
  misc_RNA (1)...(19): siRNA sense strand
ccgaagacaaagugccaaa

SEQ ID NO: 2349504 - RNA, 19 nt, Homo sapiens
  misc_RNA (1)...(19): siRNA sense strand
agacaacaggaucgagaaa

SEQ ID NO: 2349505 - RNA, 19 nt, Homo sapiens
  misc_RNA (1)...(19): siRNA sense strand
guugaaaauucgagacaca

SEQ ID NO: 2349506 - RNA, 19 nt, Homo sapiens
  misc_RNA (1)...(19): siRNA sense strand
cguauuacuggaagagauu

SEQ ID NO: 2349507 - RNA, 19 nt, Homo sapiens
  misc_RNA (1)...(19): siRNA sense strand
cagcaguucccgaagacaa

SEQ ID NO: 2349508 - RNA, 19 nt, Homo sapiens
  misc_RNA (1)...(19): siRNA sense strand
aggccuggcuguugugcaa

SEQ ID NO: 2349509 - RNA, 19 nt, Homo sapiens
  misc_RNA (1)...(19): siRNA sense strand
ggaagaaauuaguggccug

SEQ ID NO: 2349510 - RNA, 19 nt, Homo sapiens
  misc_RNA (1)...(19): siRNA sense strand
agacaaagugccaaagcca

SEQ ID NO: 2349511 - RNA, 19 nt, Homo sapiens
  misc_RNA (1)...(19): siRNA sense strand
acuuaaaugaaaugcccaa

SEQ ID NO: 2349512 - RNA, 19 nt, Homo sapiens
  misc_RNA (1)...(19): siRNA sense strand
ucuucaugccauagaauau

SEQ ID NO: 2349513 - RNA, 19 nt, Homo sapiens
  misc_RNA (1)...(19): siRNA sense strand
cuuagaauaugauggggaa

SEQ ID NO: 2349514 - RNA, 19 nt, Homo sapiens
  misc_RNA (1)...(19): siRNA sense strand
cuggagaaacacuggacuu

SEQ ID NO: 2349515 - RNA, 19 nt, Homo sapiens
  misc_RNA (1)...(19): siRNA sense strand
gaaauuaguggccuggcaa

SEQ ID NO: 2349516 - RNA, 19 nt, Homo sapiens
  misc_RNA (1)...(19): siRNA sense strand
caagacaacaggaucgaga

SEQ ID NO: 2349517 - RNA, 19 nt, Homo sapiens
  misc_RNA (1)...(19): siRNA sense strand
gguacagacugacggccau

SEQ ID NO: 2349518 - RNA, 19 nt, Homo sapiens
  misc_RNA (1)...(19): siRNA sense strand
uaucacuauucaaggcaau

SEQ ID NO: 2349519 - RNA, 19 nt, Homo sapiens
  misc_RNA (1)...(19): siRNA sense strand
ccucuuugcugaugggaag

SEQ ID NO: 2349520 - RNA, 19 nt, Homo sapiens
  misc_RNA (1)...(19): siRNA sense strand
ggaagagauugaagccuac

SEQ ID NO: 2349521 - RNA, 19 nt, Homo sapiens
  misc_RNA (1)...(19): siRNA sense strand
ggcaaugaaucgcagcaca

SEQ ID NO: 2349522 - RNA, 19 nt, Homo sapiens
  misc_RNA (1)...(19): siRNA sense strand
gugcauuuagcauggauga

SEQ ID NO: 2349523 - RNA, 19 nt, Homo sapiens
  misc_RNA (1)...(19): siRNA sense strand
aaggacgguuuaaggaaca

SEQ ID NO: 2349524 - RNA, 19 nt, Homo sapiens
  misc_RNA (1)...(19): siRNA sense strand
cuuacaaacugcagagcaa

SEQ ID NO: 2349525 - RNA, 19 nt, Homo sapiens
  misc_RNA (1)...(19): siRNA sense strand
uugucauaauggagagaaa

SEQ ID NO: 2349526 - RNA, 19 nt, Homo sapiens
  misc_RNA (1)...(19): siRNA sense strand
uggaauugaaguagaggaa

SEQ ID NO: 2349527 - RNA, 19 nt, Homo sapiens
  misc_RNA (1)...(19): siRNA sense strand
augaaguagaagugcaaua

SEQ ID NO: 2349528 - RNA, 19 nt, Homo sapiens
  misc_RNA (1)...(19): siRNA sense strand
uuacagaagaagacagauu

SEQ ID NO: 2349529 - RNA, 19 nt, Homo sapiens
  misc_RNA (1)...(19): siRNA sense strand
cagaacaggaauuggaaca

SEQ ID NO: 2349530 - RNA, 19 nt, Homo sapiens
  misc_RNA (1)...(19): siRNA sense strand
caguaaaccaguucaggaa

SEQ ID NO: 2349531 - RNA, 19 nt, Homo sapiens
  misc_RNA (1)...(19): siRNA sense strand
acauauaacgauugaggau

SEQ ID NO: 2349532 - RNA, 19 nt, Homo sapiens
  misc_RNA (1)...(19): siRNA sense strand
acaaaauucuggaagcaaa

SEQ ID NO: 2349533 - RNA, 19 nt, Homo sapiens
  misc_RNA (1)...(19): siRNA sense strand
gaugaaagauuuagagagc

SEQ ID NO: 2349534 - RNA, 19 nt, Homo sapiens
  misc_RNA (1)...(19): siRNA sense strand
acaugaaguagaagugcaa

SEQ ID NO: 2349535 - RNA, 19 nt, Homo sapiens
  misc_RNA (1)...(19): siRNA sense strand
aaacauuaucuccgcgaaa

SEQ ID NO: 2349536 - RNA, 19 nt, Homo sapiens
  misc_RNA (1)...(19): siRNA sense strand
acagaagaagacagauuua

SEQ ID NO: 2349537 - RNA, 19 nt, Homo sapiens
  misc_RNA (1)...(19): siRNA sense strand
acgcagaauaagacaucaa

SEQ ID NO: 2349538 - RNA, 19 nt, Homo sapiens
  misc_RNA (1)...(19): siRNA sense strand
gcuaagggagggagcugaa

SEQ ID NO: 2349539 - RNA, 19 nt, Homo sapiens
  misc_RNA (1)...(19): siRNA sense strand
cuucaguccugcaagcaaa

SEQ ID NO: 2349540 - RNA, 19 nt, Homo sapiens
  misc_RNA (1)...(19): siRNA sense strand
acagaaacuaagaguauga

SEQ ID NO: 2349541 - RNA, 19 nt, Homo sapiens
  misc_RNA (1)...(19): siRNA sense strand
cauaacuggaugaaagauu

SEQ ID NO: 2349542 - RNA, 19 nt, Homo sapiens
  misc_RNA (1)...(19): siRNA sense strand
gcuaaagaugaggcagaaa

SEQ ID NO: 2349543 - RNA, 19 nt, Homo sapiens
  misc_RNA (1)...(19): siRNA sense strand
gaccggagucacagacaaa

SEQ ID NO: 2349544 - RNA, 19 nt, Homo sapiens
  misc_RNA (1)...(19): siRNA sense strand
uugaaaaggcacaggaaga

SEQ ID NO: 2349545 - RNA, 19 nt, Homo sapiens
  misc_RNA (1)...(19): siRNA sense strand
gcgaaagauaucaagagau

SEQ ID NO: 2349546 - RNA, 19 nt, Homo sapiens
  misc_RNA (1)...(19): siRNA sense strand
cugcaagcaaaguguacaa

SEQ ID NO: 2349547 - RNA, 19 nt, Homo sapiens
  misc_RNA (1)...(19): siRNA sense strand
cgauugaggauuuauggaa

SEQ ID NO: 2349548 - RNA, 19 nt, Homo sapiens
  misc_RNA (1)...(19): siRNA sense strand
agcaaaauuuagagcgcaa

SEQ ID NO: 2349549 - RNA, 19 nt, Homo sapiens
  misc_RNA (1)...(19): siRNA sense strand
uugcuaaagaugaggcaga

SEQ ID NO: 2349550 - RNA, 19 nt, Homo sapiens
  misc_RNA (1)...(19): siRNA sense strand
ugagaagaucuguggcuuu

SEQ ID NO: 2349551 - RNA, 19 nt, Homo sapiens
  misc_RNA (1)...(19): siRNA sense strand
gcaaaguguacaauggcau

SEQ ID NO: 2349552 - RNA, 19 nt, Homo sapiens
  misc_RNA (1)...(19): siRNA sense strand
cuucagugguugauagagu

SEQ ID NO: 2349553 - RNA, 19 nt, Homo sapiens
  misc_RNA (1)...(19): siRNA sense strand
aguagaggaaagugaugaa

SEQ ID NO: 2349554 - RNA, 19 nt, Homo sapiens
  misc_RNA (1)...(19): siRNA sense strand
cuaaagaugaggcagaaaa

SEQ ID NO: 2349555 - RNA, 19 nt, Homo sapiens
  misc_RNA (1)...(19): siRNA sense strand
agaugguggaauugaagua

SEQ ID NO: 2349556 - RNA, 19 nt, Homo sapiens
  misc_RNA (1)...(19): siRNA sense strand
aacaaauggaugaugacaa

SEQ ID NO: 2349557 - RNA, 19 nt, Homo sapiens
  misc_RNA (1)...(19): siRNA sense strand
caacaaauugagaagaucu

SEQ ID NO: 2349558 - RNA, 19 nt, Homo sapiens
  misc_RNA (1)...(19): siRNA sense strand
aguugaugacuuagaugaa

SEQ ID NO: 2349559 - RNA, 19 nt, Homo sapiens
  misc_RNA (1)...(19): siRNA sense strand
uccuuuaagccucgagaua

SEQ ID NO: 2349560 - RNA, 19 nt, Homo sapiens
  misc_RNA (1)...(19): siRNA sense strand
cagcuggcaacgacaguaa

SEQ ID NO: 2349561 - RNA, 19 nt, Homo sapiens
  misc_RNA (1)...(19): siRNA sense strand
gauuuagagagcuuacaaa

SEQ ID NO: 2349562 - RNA, 19 nt, Homo sapiens
  misc_RNA (1)...(19): siRNA sense strand
gggagggagcugaauguga

SEQ ID NO: 2349563 - RNA, 19 nt, Homo sapiens
  misc_RNA (1)...(19): siRNA sense strand
aagaggaggaagaggccau

SEQ ID NO: 2349564 - RNA, 19 nt, Homo sapiens
  misc_RNA (1)...(19): siRNA sense strand
uugaaguagaggaaaguga

SEQ ID NO: 2349565 - RNA, 19 nt, Homo sapiens
  misc_RNA (1)...(19): siRNA sense strand
aggaggaagaggccauuua

SEQ ID NO: 2349566 - RNA, 19 nt, Homo sapiens
  misc_RNA (1)...(19): siRNA sense strand
gaaauguugcuguagaaaa

SEQ ID NO: 2349567 - RNA, 19 nt, Homo sapiens
  misc_RNA (1)...(19): siRNA sense strand
cuggaggaguugaugacuu

SEQ ID NO: 2349568 - RNA, 19 nt, Homo sapiens
  misc_RNA (1)...(19): siRNA sense strand
augcaaaggaggaggcuug

SEQ ID NO: 2349569 - RNA, 19 nt, Homo sapiens
  misc_RNA (1)...(19): siRNA sense strand
cugaaaugcagcuagcuau

SEQ ID NO: 2349570 - RNA, 19 nt, Homo sapiens
  misc_RNA (1)...(19): siRNA sense strand
uuuauggaaacgauggaaa

SEQ ID NO: 2349571 - RNA, 19 nt, Homo sapiens
  misc_RNA (1)...(19): siRNA sense strand
acaacaaugucaaaggaac

SEQ ID NO: 2349572 - RNA, 19 nt, Homo sapiens
  misc_RNA (1)...(19): siRNA sense strand
ugaaaugcagcuagcuauu

SEQ ID NO: 2349573 - RNA, 19 nt, Homo sapiens
  misc_RNA (1)...(19): siRNA sense strand
ggaauugaaguagaggaaa

SEQ ID NO: 2349574 - RNA, 19 nt, Homo sapiens
  misc_RNA (1)...(19): siRNA sense strand
aggcauuggaugugguuuu

SEQ ID NO: 2349575 - RNA, 19 nt, Homo sapiens
  misc_RNA (1)...(19): siRNA sense strand
ucaauuaugcaaaggagga

SEQ ID NO: 2349576 - RNA, 19 nt, Homo sapiens
  misc_RNA (1)...(19): siRNA sense strand
cuuuacagaagaagacaga

SEQ ID NO: 2349577 - RNA, 19 nt, Homo sapiens
  misc_RNA (1)...(19): siRNA sense strand
aguuaacacaugaaguaga

SEQ ID NO: 2349578 - RNA, 19 nt, Homo sapiens
  misc_RNA (1)...(19): siRNA sense strand
aggaagaggccauuuacuu

SEQ ID NO: 2349579 - RNA, 19 nt, Homo sapiens
  misc_RNA (1)...(19): siRNA sense strand
ggaugaacgacgagaagaa

SEQ ID NO: 2349580 - RNA, 19 nt, Homo sapiens
  misc_RNA (1)...(19): siRNA sense strand
aguaauaaguggugaaacu

SEQ ID NO: 2349581 - RNA, 19 nt, Homo sapiens
  misc_RNA (1)...(19): siRNA sense strand
ugugauagauggaggaaaa

SEQ ID NO: 2349582 - RNA, 19 nt, Homo sapiens
  misc_RNA (1)...(19): siRNA sense strand
agauggaacuuuagaccaa

SEQ ID NO: 2349583 - RNA, 19 nt, Homo sapiens
  misc_RNA (1)...(19): siRNA sense strand
ccguauuuguccaguguua

SEQ ID NO: 2349584 - RNA, 19 nt, Homo sapiens
  misc_RNA (1)...(19): siRNA sense strand
ugguaauaguacuggauau

SEQ ID NO: 2349585 - RNA, 19 nt, Homo sapiens
  misc_RNA (1)...(19): siRNA sense strand
cuacauugaaagaggaaaa

SEQ ID NO: 2349586 - RNA, 19 nt, Homo sapiens
  misc_RNA (1)...(19): siRNA sense strand
aagaagaauuagugccauu

SEQ ID NO: 2349587 - RNA, 19 nt, Homo sapiens
  misc_RNA (1)...(19): siRNA sense strand
gaucauauauugaccgaga

SEQ ID NO: 2349588 - RNA, 19 nt, Homo sapiens
  misc_RNA (1)...(19): siRNA sense strand
uauaauggucuuagagcaa

SEQ ID NO: 2349589 - RNA, 19 nt, Homo sapiens
  misc_RNA (1)...(19): siRNA sense strand
cugcaagagaagauugaaa

SEQ ID NO: 2349590 - RNA, 19 nt, Homo sapiens
  misc_RNA (1)...(19): siRNA sense strand
caccuaaagaugagaacaa

SEQ ID NO: 2349591 - RNA, 19 nt, Homo sapiens
  misc_RNA (1)...(19): siRNA sense strand
guucaagcgaagaaugaua

SEQ ID NO: 2349592 - RNA, 19 nt, Homo sapiens
  misc_RNA (1)...(19): siRNA sense strand
gagaaaaggucgagcugga

SEQ ID NO: 2349593 - RNA, 19 nt, Homo sapiens
  misc_RNA (1)...(19): siRNA sense strand
ugaugaaauccaugaaaga

SEQ ID NO: 2349594 - RNA, 19 nt, Homo sapiens
  misc_RNA (1)...(19): siRNA sense strand
caggaaaagaaguugauaa

SEQ ID NO: 2349595 - RNA, 19 nt, Homo sapiens
  misc_RNA (1)...(19): siRNA sense strand
guaauauugaugagugcaa

SEQ ID NO: 2349596 - RNA, 19 nt, Homo sapiens
  misc_RNA (1)...(19): siRNA sense strand
aaaugauggaggaugauaa

SEQ ID NO: 2349597 - RNA, 19 nt, Homo sapiens
  misc_RNA (1)...(19): siRNA sense strand
ccgcugaguggguuaguaa

SEQ ID NO: 2349598 - RNA, 19 nt, Homo sapiens
  misc_RNA (1)...(19): siRNA sense strand
ugaacgacgagaagaacaa

SEQ ID NO: 2349599 - RNA, 19 nt, Homo sapiens
  misc_RNA (1)...(19): siRNA sense strand
ccaucagguaacaguaaua

SEQ ID NO: 2349600 - RNA, 19 nt, Homo sapiens
  misc_RNA (1)...(19): siRNA sense strand
cgacuaaauuuggguaaaa

SEQ ID NO: 2349601 - RNA, 19 nt, Homo sapiens
  misc_RNA (1)...(19): siRNA sense strand
ugaucaaaacacaggaaaa

SEQ ID NO: 2349602 - RNA, 19 nt, Homo sapiens
  misc_RNA (1)...(19): siRNA sense strand
acaaggaagcggagaggca

SEQ ID NO: 2349603 - RNA, 19 nt, Homo sapiens
  misc_RNA (1)...(19): siRNA sense strand
cagaacaauaucaguacaa

SEQ ID NO: 2349604 - RNA, 19 nt, Homo sapiens
  misc_RNA (1)...(19): siRNA sense strand
guauaauggucuuagagca

SEQ ID NO: 2349605 - RNA, 19 nt, Homo sapiens
  misc_RNA (1)...(19): siRNA sense strand
gcgaagaaugauaaagagu

SEQ ID NO: 2349606 - RNA, 19 nt, Homo sapiens
  misc_RNA (1)...(19): siRNA sense strand
ccaagaagaauuagugcca

SEQ ID NO: 2349607 - RNA, 19 nt, Homo sapiens
  misc_RNA (1)...(19): siRNA sense strand
gcgaaaucggcauguggua

SEQ ID NO: 2349608 - RNA, 19 nt, Homo sapiens
  misc_RNA (1)...(19): siRNA sense strand
agaagaaaggaauuggcaa

SEQ ID NO: 2349609 - RNA, 19 nt, Homo sapiens
  misc_RNA (1)...(19): siRNA sense strand
agaacaaacuugacaucca

SEQ ID NO: 2349610 - RNA, 19 nt, Homo sapiens
  misc_RNA (1)...(19): siRNA sense strand
ggaacugcgaagaagguau

SEQ ID NO: 2349611 - RNA, 19 nt, Homo sapiens
  misc_RNA (1)...(19): siRNA sense strand
aaggauaacgaucaggaaa

SEQ ID NO: 2349612 - RNA, 19 nt, Homo sapiens
  misc_RNA (1)...(19): siRNA sense strand
ugauaaagagucagaagca

SEQ ID NO: 2349613 - RNA, 19 nt, Homo sapiens
  misc_RNA (1)...(19): siRNA sense strand
ugcaaaaggaauugguaaa

SEQ ID NO: 2349614 - RNA, 19 nt, Homo sapiens
  misc_RNA (1)...(19): siRNA sense strand
gggcagaagaacaaggaag

SEQ ID NO: 2349615 - RNA, 19 nt, Homo sapiens
  misc_RNA (1)...(19): siRNA sense strand
auaaagagucagaagcaca

SEQ ID NO: 2349616 - RNA, 19 nt, Homo sapiens
  misc_RNA (1)...(19): siRNA sense strand
agcugaacgcuuuggauaa

SEQ ID NO: 2349617 - RNA, 19 nt, Homo sapiens
  misc_RNA (1)...(19): siRNA sense strand
cggcaugugguacgcgaaa

SEQ ID NO: 2349618 - RNA, 19 nt, Homo sapiens
  misc_RNA (1)...(19): siRNA sense strand
augcaagaagaaaggaauu

SEQ ID NO: 2349619 - RNA, 19 nt, Homo sapiens
  misc_RNA (1)...(19): siRNA sense strand
caccaugcucagagaacaa

SEQ ID NO: 2349620 - RNA, 19 nt, Homo sapiens
  misc_RNA (1)...(19): siRNA sense strand
uuauagaaaugauggagga

SEQ ID NO: 2349621 - RNA, 19 nt, Homo sapiens
  misc_RNA (1)...(19): siRNA sense strand
aagcgaagaaugauaaaga

SEQ ID NO: 2349622 - RNA, 19 nt, Homo sapiens
  misc_RNA (1)...(19): siRNA sense strand
gaugcaagaagaaaggaau

SEQ ID NO: 2349623 - RNA, 19 nt, Homo sapiens
  misc_RNA (1)...(19): siRNA sense strand
acucagaacaauaucagua

SEQ ID NO: 2349624 - RNA, 19 nt, Homo sapiens
  misc_RNA (1)...(19): siRNA sense strand
ucgacuaaauuuggguaaa

SEQ ID NO: 2349625 - RNA, 19 nt, Homo sapiens
  misc_RNA (1)...(19): siRNA sense strand
ugguaacuguccaaugaua

SEQ ID NO: 2349626 - RNA, 19 nt, Homo sapiens
  misc_RNA (1)...(19): siRNA sense strand
aggucgagcuggaagaguu

SEQ ID NO: 2349627 - RNA, 19 nt, Homo sapiens
  misc_RNA (1)...(19): siRNA sense strand
aagaugagaacaagcagua

SEQ ID NO: 2349628 - RNA, 19 nt, Homo sapiens
  misc_RNA (1)...(19): siRNA sense strand
cuaucaacugccagaaauu

SEQ ID NO: 2349629 - RNA, 19 nt, Homo sapiens
  misc_RNA (1)...(19): siRNA sense strand
aggaauuggcaaaggauac

SEQ ID NO: 2349630 - RNA, 19 nt, Homo sapiens
  misc_RNA (1)...(19): siRNA sense strand
aaugauggaggaugauaaa

SEQ ID NO: 2349631 - RNA, 19 nt, Homo sapiens
  misc_RNA (1)...(19): siRNA sense strand
agaugcaagaagaaaggaa

SEQ ID NO: 2349632 - RNA, 19 nt, Homo sapiens
  misc_RNA (1)...(19): siRNA sense strand
uagaaauccuaaagaucca

SEQ ID NO: 2349633 - RNA, 19 nt, Homo sapiens
  misc_RNA (1)...(19): siRNA sense strand
ccaucuuguuaaggaauua

SEQ ID NO: 2349634 - RNA, 19 nt, Homo sapiens
  misc_RNA (1)...(19): siRNA sense strand
agucagaagcacagauauc

SEQ ID NO: 2349635 - RNA, 19 nt, Homo sapiens
  misc_RNA (1)...(19): siRNA sense strand
acacauggaugaacgacga

SEQ ID NO: 2349636 - RNA, 19 nt, Homo sapiens
  misc_RNA (1)...(19): siRNA sense strand
aaggaauuggcaaaggaua

SEQ ID NO: 2349637 - RNA, 19 nt, Homo sapiens
  misc_RNA (1)...(19): siRNA sense strand
gcaagagaagauugaaagu

SEQ ID NO: 2349638 - RNA, 19 nt, Homo sapiens
  misc_RNA (1)...(19): siRNA sense strand
gacacuaaauccagagacu

SEQ ID NO: 2349639 - RNA, 19 nt, Homo sapiens
  misc_RNA (1)...(19): siRNA sense strand
acucagccaagaagaauua

SEQ ID NO: 2349640 - RNA, 19 nt, Homo sapiens
  misc_RNA (1)...(19): siRNA sense strand
cuaaugccaaacagagaaa

SEQ ID NO: 2349641 - RNA, 19 nt, Homo sapiens
  misc_RNA (1)...(19): siRNA sense strand
cuguuaauguggagcaaac

SEQ ID NO: 2349642 - RNA, 19 nt, Homo sapiens
  misc_RNA (1)...(19): siRNA sense strand
auauauugcuggaagggaa

SEQ ID NO: 2349643 - RNA, 19 nt, Homo sapiens
  misc_RNA (1)...(19): siRNA sense strand
agaauuuagaggugaagaa

SEQ ID NO: 2349644 - RNA, 19 nt, Homo sapiens
  misc_RNA (1)...(19): siRNA sense strand
ggcaaaacuucgagaauca

SEQ ID NO: 2349645 - RNA, 19 nt, Homo sapiens
  misc_RNA (1)...(19): siRNA sense strand
aagaaaagcgagaaagaau

SEQ ID NO: 2349646 - RNA, 19 nt, Homo sapiens
  misc_RNA (1)...(19): siRNA sense strand
uauggaagugacagggaaa

SEQ ID NO: 2349647 - RNA, 19 nt, Homo sapiens
  misc_RNA (1)...(19): siRNA sense strand
aacaaagagaauagagaga

SEQ ID NO: 2349648 - RNA, 19 nt, Homo sapiens
  misc_RNA (1)...(19): siRNA sense strand
agagaagaaaagcgagaaa

SEQ ID NO: 2349649 - RNA, 19 nt, Homo sapiens
  misc_RNA (1)...(19): siRNA sense strand
agaagaaaagcgagaaaga

SEQ ID NO: 2349650 - RNA, 19 nt, Homo sapiens
  misc_RNA (1)...(19): siRNA sense strand
cggcuacaguacagguuau

SEQ ID NO: 2349651 - RNA, 19 nt, Homo sapiens
  misc_RNA (1)...(19): siRNA sense strand
gacacaacuucaugggaga

SEQ ID NO: 2349652 - RNA, 19 nt, Homo sapiens
  misc_RNA (1)...(19): siRNA sense strand
aguugaaagcuccgaguuu

SEQ ID NO: 2349653 - RNA, 19 nt, Homo sapiens
  misc_RNA (1)...(19): siRNA sense strand
ggaaaugccugguucagca

SEQ ID NO: 2349654 - RNA, 19 nt, Homo sapiens
  misc_RNA (1)...(19): siRNA sense strand
acacagcagaauaguacaa

SEQ ID NO: 2349655 - RNA, 19 nt, Homo sapiens
  misc_RNA (1)...(19): siRNA sense strand
gguacaggcaacagcugaa

SEQ ID NO: 2349656 - RNA, 19 nt, Homo sapiens
  misc_RNA (1)...(19): siRNA sense strand
cacagaaacaagugguaca

SEQ ID NO: 2349657 - RNA, 19 nt, Homo sapiens
  misc_RNA (1)...(19): siRNA sense strand
ccagcaggccagugguuau

SEQ ID NO: 2349658 - RNA, 19 nt, Homo sapiens
  misc_RNA (1)...(19): siRNA sense strand
agcagaugucacaggauua

SEQ ID NO: 2349659 - RNA, 19 nt, Homo sapiens
  misc_RNA (1)...(19): siRNA sense strand
agagaauagagagaagaaa

SEQ ID NO: 2349660 - RNA, 19 nt, Homo sapiens
  misc_RNA (1)...(19): siRNA sense strand
gcagagaauuuagagguga

SEQ ID NO: 2349661 - RNA, 19 nt, Homo sapiens
  misc_RNA (1)...(19): siRNA sense strand
gugcauaacaggaucccau

SEQ ID NO: 2349662 - RNA, 19 nt, Homo sapiens
  misc_RNA (1)...(19): siRNA sense strand
ggcaaucguggcagagaau

SEQ ID NO: 2349663 - RNA, 19 nt, Homo sapiens
  misc_RNA (1)...(19): siRNA sense strand
uggaaacaacaaccggaaa

SEQ ID NO: 2349664 - RNA, 19 nt, Homo sapiens
  misc_RNA (1)...(19): siRNA sense strand
uggacauggugguggucga

SEQ ID NO: 2349665 - RNA, 19 nt, Homo sapiens
  misc_RNA (1)...(19): siRNA sense strand
cuuggugaccucaggcaaa

SEQ ID NO: 2349666 - RNA, 19 nt, Homo sapiens
  misc_RNA (1)...(19): siRNA sense strand
acuguaggguguaagaaaa

SEQ ID NO: 2349667 - RNA, 19 nt, Homo sapiens
  misc_RNA (1)...(19): siRNA sense strand
guggaaacaacaaccggaa

SEQ ID NO: 2349668 - RNA, 19 nt, Homo sapiens
  misc_RNA (1)...(19): siRNA sense strand
agagagaagaaaagcgaga

SEQ ID NO: 2349669 - RNA, 19 nt, Homo sapiens
  misc_RNA (1)...(19): siRNA sense strand
gaaacaagugguacaggca

SEQ ID NO: 2349670 - RNA, 19 nt, Homo sapiens
  misc_RNA (1)...(19): siRNA sense strand
cgagaugggagccuagcua

SEQ ID NO: 2349671 - RNA, 19 nt, Homo sapiens
  misc_RNA (1)...(19): siRNA sense strand
acagauuucagcagcacaa

SEQ ID NO: 2349672 - RNA, 19 nt, Homo sapiens
  misc_RNA (1)...(19): siRNA sense strand
cagaaaacaaagagaauag

SEQ ID NO: 2349673 - RNA, 19 nt, Homo sapiens
  misc_RNA (1)...(19): siRNA sense strand
ggaaaggaagaggcggcaa

SEQ ID NO: 2349674 - RNA, 19 nt, Homo sapiens
  misc_RNA (1)...(19): siRNA sense strand
agaugggagccuagcuaau

SEQ ID NO: 2349675 - RNA, 19 nt, Homo sapiens
  misc_RNA (1)...(19): siRNA sense strand
cuggaagggaauucagaca

SEQ ID NO: 2349676 - RNA, 19 nt, Homo sapiens
  misc_RNA (1)...(19): siRNA sense strand
auugcaaucaaguggacaa

SEQ ID NO: 2349677 - RNA, 19 nt, Homo sapiens
  misc_RNA (1)...(19): siRNA sense strand
cagcuucugcaguggaaau

SEQ ID NO: 2349678 - RNA, 19 nt, Homo sapiens
  misc_RNA (1)...(19): siRNA sense strand
caguggacuacuauggaau

SEQ ID NO: 2349679 - RNA, 19 nt, Homo sapiens
  misc_RNA (1)...(19): siRNA sense strand
acaugauuguaauggagau

SEQ ID NO: 2349680 - RNA, 19 nt, Homo sapiens
  misc_RNA (1)...(19): siRNA sense strand
gagaaagaaucgagucgug

SEQ ID NO: 2349681 - RNA, 19 nt, Homo sapiens
  misc_RNA (1)...(19): siRNA sense strand
aggugaagaaaauggaauu

SEQ ID NO: 2349682 - RNA, 19 nt, Homo sapiens
  misc_RNA (1)...(19): siRNA sense strand
cucaggauuuggagagcuu

SEQ ID NO: 2349683 - RNA, 19 nt, Homo sapiens
  misc_RNA (1)...(19): siRNA sense strand
gacaacagcaccagagcca

SEQ ID NO: 2349684 - RNA, 19 nt, Homo sapiens
  misc_RNA (1)...(19): siRNA sense strand
auucgaagucuuuaaguga

SEQ ID NO: 2349685 - RNA, 19 nt, Homo sapiens
  misc_RNA (1)...(19): siRNA sense strand
acuagacacuccaaagaca

SEQ ID NO: 2349686 - RNA, 19 nt, Homo sapiens
  misc_RNA (1)...(19): siRNA sense strand
auauauugcuggaagggaa

SEQ ID NO: 2349687 - RNA, 19 nt, Homo sapiens
  misc_RNA (1)...(19): siRNA sense strand
agaauuuagaggugaagaa

SEQ ID NO: 2349688 - RNA, 19 nt, Homo sapiens
  misc_RNA (1)...(19): siRNA sense strand
ggcaaaacuucgagaauca

SEQ ID NO: 2349689 - RNA, 19 nt, Homo sapiens
  misc_RNA (1)...(19): siRNA sense strand
aagaaaagcgagaaagaau

SEQ ID NO: 2349690 - RNA, 19 nt, Homo sapiens
  misc_RNA (1)...(19): siRNA sense strand
uauggaagugacagggaaa

SEQ ID NO: 2349691 - RNA, 19 nt, Homo sapiens
  misc_RNA (1)...(19): siRNA sense strand
aacaaagagaauagagaga

SEQ ID NO: 2349692 - RNA, 19 nt, Homo sapiens
  misc_RNA (1)...(19): siRNA sense strand
agagaagaaaagcgagaaa

SEQ ID NO: 2349693 - RNA, 19 nt, Homo sapiens
  misc_RNA (1)...(19): siRNA sense strand
agaagaaaagcgagaaaga

SEQ ID NO: 2349694 - RNA, 19 nt, Homo sapiens
  misc_RNA (1)...(19): siRNA sense strand
cggcuacaguacagguuau

SEQ ID NO: 2349695 - RNA, 19 nt, Homo sapiens
  misc_RNA (1)...(19): siRNA sense strand
gacacaacuucaugggaga

SEQ ID NO: 2349696 - RNA, 19 nt, Homo sapiens
  misc_RNA (1)...(19): siRNA sense strand
aguugaaagcuccgaguuu

SEQ ID NO: 2349697 - RNA, 19 nt, Homo sapiens
  misc_RNA (1)...(19): siRNA sense strand
ggaaaugccugguucagca

SEQ ID NO: 2349698 - RNA, 19 nt, Homo sapiens
  misc_RNA (1)...(19): siRNA sense strand
acacagcagaauaguacaa

SEQ ID NO: 2349699 - RNA, 19 nt, Homo sapiens
  misc_RNA (1)...(19): siRNA sense strand
gguacaggcaacagcugaa

SEQ ID NO: 2349700 - RNA, 19 nt, Homo sapiens
  misc_RNA (1)...(19): siRNA sense strand
cacagaaacaagugguaca

SEQ ID NO: 2349701 - RNA, 19 nt, Homo sapiens
  misc_RNA (1)...(19): siRNA sense strand
ccagcaggccagugguuau

SEQ ID NO: 2349702 - RNA, 19 nt, Homo sapiens
  misc_RNA (1)...(19): siRNA sense strand
agcagaugucacaggauua

SEQ ID NO: 2349703 - RNA, 19 nt, Homo sapiens
  misc_RNA (1)...(19): siRNA sense strand
agagaauagagagaagaaa

SEQ ID NO: 2349704 - RNA, 19 nt, Homo sapiens
  misc_RNA (1)...(19): siRNA sense strand
gcagagaauuuagagguga

SEQ ID NO: 2349705 - RNA, 19 nt, Homo sapiens
  misc_RNA (1)...(19): siRNA sense strand
gugcauaacaggaucccau

SEQ ID NO: 2349706 - RNA, 19 nt, Homo sapiens
  misc_RNA (1)...(19): siRNA sense strand
ggcaaucguggcagagaau

SEQ ID NO: 2349707 - RNA, 19 nt, Homo sapiens
  misc_RNA (1)...(19): siRNA sense strand
uggaaacaacaaccggaaa

SEQ ID NO: 2349708 - RNA, 19 nt, Homo sapiens
  misc_RNA (1)...(19): siRNA sense strand
uggacauggugguggucga

SEQ ID NO: 2349709 - RNA, 19 nt, Homo sapiens
  misc_RNA (1)...(19): siRNA sense strand
cuuggugaccucaggcaaa

SEQ ID NO: 2349710 - RNA, 19 nt, Homo sapiens
  misc_RNA (1)...(19): siRNA sense strand
acuguaggguguaagaaaa

SEQ ID NO: 2349711 - RNA, 19 nt, Homo sapiens
  misc_RNA (1)...(19): siRNA sense strand
guggaaacaacaaccggaa

SEQ ID NO: 2349712 - RNA, 19 nt, Homo sapiens
  misc_RNA (1)...(19): siRNA sense strand
agagagaagaaaagcgaga

SEQ ID NO: 2349713 - RNA, 19 nt, Homo sapiens
  misc_RNA (1)...(19): siRNA sense strand
gaaacaagugguacaggca

SEQ ID NO: 2349714 - RNA, 19 nt, Homo sapiens
  misc_RNA (1)...(19): siRNA sense strand
cgagaugggagccuagcua

SEQ ID NO: 2349715 - RNA, 19 nt, Homo sapiens
  misc_RNA (1)...(19): siRNA sense strand
acagauuucagcagcacaa

SEQ ID NO: 2349716 - RNA, 19 nt, Homo sapiens
  misc_RNA (1)...(19): siRNA sense strand
cagaaaacaaagagaauag

SEQ ID NO: 2349717 - RNA, 19 nt, Homo sapiens
  misc_RNA (1)...(19): siRNA sense strand
ggaaaggaagaggcggcaa

SEQ ID NO: 2349718 - RNA, 19 nt, Homo sapiens
  misc_RNA (1)...(19): siRNA sense strand
agaugggagccuagcuaau

SEQ ID NO: 2349719 - RNA, 19 nt, Homo sapiens
  misc_RNA (1)...(19): siRNA sense strand
cuggaagggaauucagaca

SEQ ID NO: 2349720 - RNA, 19 nt, Homo sapiens
  misc_RNA (1)...(19): siRNA sense strand
auugcaaucaaguggacaa

SEQ ID NO: 2349721 - RNA, 19 nt, Homo sapiens
  misc_RNA (1)...(19): siRNA sense strand
cagcuucugcaguggaaau

SEQ ID NO: 2349722 - RNA, 19 nt, Homo sapiens
  misc_RNA (1)...(19): siRNA sense strand
caguggacuacuauggaau

SEQ ID NO: 2349723 - RNA, 19 nt, Homo sapiens
  misc_RNA (1)...(19): siRNA sense strand
acaugauuguaauggagau

SEQ ID NO: 2349724 - RNA, 19 nt, Homo sapiens
  misc_RNA (1)...(19): siRNA sense strand
gagaaagaaucgagucgug

SEQ ID NO: 2349725 - RNA, 19 nt, Homo sapiens
  misc_RNA (1)...(19): siRNA sense strand
aggugaagaaaauggaauu

SEQ ID NO: 2349726 - RNA, 19 nt, Homo sapiens
  misc_RNA (1)...(19): siRNA sense strand
cucaggauuuggagagcuu

SEQ ID NO: 2349727 - RNA, 19 nt, Homo sapiens
  misc_RNA (1)...(19): siRNA sense strand
gacaacagcaccagagcca

SEQ ID NO: 2349728 - RNA, 19 nt, Homo sapiens
  misc_RNA (1)...(19): siRNA sense strand
auucgaagucuuuaaguga

SEQ ID NO: 2349729 - RNA, 19 nt, Homo sapiens
  misc_RNA (1)...(19): siRNA sense strand
acuagacacuccaaagaca

SEQ ID NO: 2349730 - RNA, 19 nt, Homo sapiens
  misc_RNA (1)...(19): siRNA sense strand
auauauugcuggaagggaa

SEQ ID NO: 2349731 - RNA, 19 nt, Homo sapiens
  misc_RNA (1)...(19): siRNA sense strand
agaauuuagaggugaagaa

SEQ ID NO: 2349732 - RNA, 19 nt, Homo sapiens
  misc_RNA (1)...(19): siRNA sense strand
aagaaaagcgagaaagaau

SEQ ID NO: 2349733 - RNA, 19 nt, Homo sapiens
  misc_RNA (1)...(19): siRNA sense strand
uauggaagugacagggaaa

SEQ ID NO: 2349734 - RNA, 19 nt, Homo sapiens
  misc_RNA (1)...(19): siRNA sense strand
aacaaagagaauagagaga

SEQ ID NO: 2349735 - RNA, 19 nt, Homo sapiens
  misc_RNA (1)...(19): siRNA sense strand
agagaagaaaagcgagaaa

SEQ ID NO: 2349736 - RNA, 19 nt, Homo sapiens
  misc_RNA (1)...(19): siRNA sense strand
agaagaaaagcgagaaaga

SEQ ID NO: 2349737 - RNA, 19 nt, Homo sapiens
  misc_RNA (1)...(19): siRNA sense strand
gacacaacuucaugggaga

SEQ ID NO: 2349738 - RNA, 19 nt, Homo sapiens
  misc_RNA (1)...(19): siRNA sense strand
gguacaggcaacagcugaa

SEQ ID NO: 2349739 - RNA, 19 nt, Homo sapiens
  misc_RNA (1)...(19): siRNA sense strand
cacagaaacaagugguaca

SEQ ID NO: 2349740 - RNA, 19 nt, Homo sapiens
  misc_RNA (1)...(19): siRNA sense strand
agagaauagagagaagaaa

SEQ ID NO: 2349741 - RNA, 19 nt, Homo sapiens
  misc_RNA (1)...(19): siRNA sense strand
gcagagaauuuagagguga

SEQ ID NO: 2349742 - RNA, 19 nt, Homo sapiens
  misc_RNA (1)...(19): siRNA sense strand
ggcaaucguggcagagaau

SEQ ID NO: 2349743 - RNA, 19 nt, Homo sapiens
  misc_RNA (1)...(19): siRNA sense strand
uggaaacaacaaccggaaa

SEQ ID NO: 2349744 - RNA, 19 nt, Homo sapiens
  misc_RNA (1)...(19): siRNA sense strand
acuguaggguguaagaaaa

SEQ ID NO: 2349745 - RNA, 19 nt, Homo sapiens
  misc_RNA (1)...(19): siRNA sense strand
guggaaacaacaaccggaa

SEQ ID NO: 2349746 - RNA, 19 nt, Homo sapiens
  misc_RNA (1)...(19): siRNA sense strand
agagagaagaaaagcgaga

SEQ ID NO: 2349747 - RNA, 19 nt, Homo sapiens
  misc_RNA (1)...(19): siRNA sense strand
gaaacaagugguacaggca

SEQ ID NO: 2349748 - RNA, 19 nt, Homo sapiens
  misc_RNA (1)...(19): siRNA sense strand
acagauuucagcagcacaa

SEQ ID NO: 2349749 - RNA, 19 nt, Homo sapiens
  misc_RNA (1)...(19): siRNA sense strand
cagaaaacaaagagaauag

SEQ ID NO: 2349750 - RNA, 19 nt, Homo sapiens
  misc_RNA (1)...(19): siRNA sense strand
ggaaaggaagaggcggcaa

SEQ ID NO: 2349751 - RNA, 19 nt, Homo sapiens
  misc_RNA (1)...(19): siRNA sense strand
cuggaagggaauucagaca

SEQ ID NO: 2349752 - RNA, 19 nt, Homo sapiens
  misc_RNA (1)...(19): siRNA sense strand
auugcaaucaaguggacaa

SEQ ID NO: 2349753 - RNA, 19 nt, Homo sapiens
  misc_RNA (1)...(19): siRNA sense strand
acaugauuguaauggagau

SEQ ID NO: 2349754 - RNA, 19 nt, Homo sapiens
  misc_RNA (1)...(19): siRNA sense strand
gagaaagaaucgagucgug

SEQ ID NO: 2349755 - RNA, 19 nt, Homo sapiens
  misc_RNA (1)...(19): siRNA sense strand
aggugaagaaaauggaauu

SEQ ID NO: 2349756 - RNA, 19 nt, Homo sapiens
  misc_RNA (1)...(19): siRNA sense strand
ggaaggacauggagcccaa

SEQ ID NO: 2349757 - RNA, 19 nt, Homo sapiens
  misc_RNA (1)...(19): siRNA sense strand
aggcgcagaaggagaacua

SEQ ID NO: 2349758 - RNA, 19 nt, Homo sapiens
  misc_RNA (1)...(19): siRNA sense strand
cggaagacggagaguggca

SEQ ID NO: 2349759 - RNA, 19 nt, Homo sapiens
  misc_RNA (1)...(19): siRNA sense strand
cagugucagaggagaacaa

SEQ ID NO: 2349760 - RNA, 19 nt, Homo sapiens
  misc_RNA (1)...(19): siRNA sense strand
gacaagucggagagagaga

SEQ ID NO: 2349761 - RNA, 19 nt, Homo sapiens
  misc_RNA (1)...(19): siRNA sense strand
cgguggaggaggaugccua

SEQ ID NO: 2349762 - RNA, 19 nt, Homo sapiens
  misc_RNA (1)...(19): siRNA sense strand
ccaucgagugugcgaagaa

SEQ ID NO: 2349763 - RNA, 19 nt, Homo sapiens
  misc_RNA (1)...(19): siRNA sense strand
gaaagaucacgucgggaga

SEQ ID NO: 2349764 - RNA, 19 nt, Homo sapiens
  misc_RNA (1)...(19): siRNA sense strand
acgaggagcaggaugguga

SEQ ID NO: 2349765 - RNA, 19 nt, Homo sapiens
  misc_RNA (1)...(19): siRNA sense strand
uacaagaagcccaagggaa

SEQ ID NO: 2349766 - RNA, 19 nt, Homo sapiens
  misc_RNA (1)...(19): siRNA sense strand
agucagauaccgagaccca

SEQ ID NO: 2349767 - RNA, 19 nt, Homo sapiens
  misc_RNA (1)...(19): siRNA sense strand
cgucccagguggagacagu

SEQ ID NO: 2349768 - RNA, 19 nt, Homo sapiens
  misc_RNA (1)...(19): siRNA sense strand
agaacaacuuccaggccca

SEQ ID NO: 2349769 - RNA, 19 nt, Homo sapiens
  misc_RNA (1)...(19): siRNA sense strand
gagagaacccugaggaguc

SEQ ID NO: 2349770 - RNA, 19 nt, Homo sapiens
  misc_RNA (1)...(19): siRNA sense strand
ucgagugugcgaagaacaa

SEQ ID NO: 2349771 - RNA, 19 nt, Homo sapiens
  misc_RNA (1)...(19): siRNA sense strand
gcccagagcucucagacga

SEQ ID NO: 2349772 - RNA, 19 nt, Homo sapiens
  misc_RNA (1)...(19): siRNA sense strand
gagaacuaccggcaggaga

SEQ ID NO: 2349773 - RNA, 19 nt, Homo sapiens
  misc_RNA (1)...(19): siRNA sense strand
ucgcccaguuugagcaaga

SEQ ID NO: 2349774 - RNA, 19 nt, Homo sapiens
  misc_RNA (1)...(19): siRNA sense strand
aauucaaacucaagcccuu

SEQ ID NO: 2349775 - RNA, 19 nt, Homo sapiens
  misc_RNA (1)...(19): siRNA sense strand
aaggaggaagggagcggaa

SEQ ID NO: 2349776 - RNA, 19 nt, Homo sapiens
  misc_RNA (1)...(19): siRNA sense strand
ucucagacgaggagcagga

SEQ ID NO: 2349777 - RNA, 19 nt, Homo sapiens
  misc_RNA (1)...(19): siRNA sense strand
ggaaggacauggagcccaa

SEQ ID NO: 2349778 - RNA, 19 nt, Homo sapiens
  misc_RNA (1)...(19): siRNA sense strand
aggcgcagaaggagaacua

SEQ ID NO: 2349779 - RNA, 19 nt, Homo sapiens
  misc_RNA (1)...(19): siRNA sense strand
cggaagacggagaguggca

SEQ ID NO: 2349780 - RNA, 19 nt, Homo sapiens
  misc_RNA (1)...(19): siRNA sense strand
cagugucagaggagaacaa

SEQ ID NO: 2349781 - RNA, 19 nt, Homo sapiens
  misc_RNA (1)...(19): siRNA sense strand
gacaagucggagagagaga

SEQ ID NO: 2349782 - RNA, 19 nt, Homo sapiens
  misc_RNA (1)...(19): siRNA sense strand
cgguggaggaggaugccua

SEQ ID NO: 2349783 - RNA, 19 nt, Homo sapiens
  misc_RNA (1)...(19): siRNA sense strand
ccaucgagugugcgaagaa

SEQ ID NO: 2349784 - RNA, 19 nt, Homo sapiens
  misc_RNA (1)...(19): siRNA sense strand
gaaagaucacgucgggaga

SEQ ID NO: 2349785 - RNA, 19 nt, Homo sapiens
  misc_RNA (1)...(19): siRNA sense strand
acgaggagcaggaugguga

SEQ ID NO: 2349786 - RNA, 19 nt, Homo sapiens
  misc_RNA (1)...(19): siRNA sense strand
uacaagaagcccaagggaa

SEQ ID NO: 2349787 - RNA, 19 nt, Homo sapiens
  misc_RNA (1)...(19): siRNA sense strand
agucagauaccgagaccca

SEQ ID NO: 2349788 - RNA, 19 nt, Homo sapiens
  misc_RNA (1)...(19): siRNA sense strand
cgucccagguggagacagu

SEQ ID NO: 2349789 - RNA, 19 nt, Homo sapiens
  misc_RNA (1)...(19): siRNA sense strand
agaacaacuuccaggccca

SEQ ID NO: 2349790 - RNA, 19 nt, Homo sapiens
  misc_RNA (1)...(19): siRNA sense strand
gagagaacccugaggaguc

SEQ ID NO: 2349791 - RNA, 19 nt, Homo sapiens
  misc_RNA (1)...(19): siRNA sense strand
ucgagugugcgaagaacaa

SEQ ID NO: 2349792 - RNA, 19 nt, Homo sapiens
  misc_RNA (1)...(19): siRNA sense strand
gcccagagcucucagacga

SEQ ID NO: 2349793 - RNA, 19 nt, Homo sapiens
  misc_RNA (1)...(19): siRNA sense strand
gagaacuaccggcaggaga

SEQ ID NO: 2349794 - RNA, 19 nt, Homo sapiens
  misc_RNA (1)...(19): siRNA sense strand
ucgcccaguuugagcaaga

SEQ ID NO: 2349795 - RNA, 19 nt, Homo sapiens
  misc_RNA (1)...(19): siRNA sense strand
aauucaaacucaagcccuu

SEQ ID NO: 2349796 - RNA, 19 nt, Homo sapiens
  misc_RNA (1)...(19): siRNA sense strand
aaggaggaagggagcggaa

SEQ ID NO: 2349797 - RNA, 19 nt, Homo sapiens
  misc_RNA (1)...(19): siRNA sense strand
ucucagacgaggagcagga

SEQ ID NO: 2349798 - RNA, 19 nt, Homo sapiens
  misc_RNA (1)...(19): siRNA sense strand
agauaaaggagauggaaau

SEQ ID NO: 2349799 - RNA, 19 nt, Homo sapiens
  misc_RNA (1)...(19): siRNA sense strand
aggcaagagaagacaguaa

SEQ ID NO: 2349800 - RNA, 19 nt, Homo sapiens
  misc_RNA (1)...(19): siRNA sense strand
ugacaaaagaugacgguaa

SEQ ID NO: 2349801 - RNA, 19 nt, Homo sapiens
  misc_RNA (1)...(19): siRNA sense strand
aagauaaaggagauggaaa

SEQ ID NO: 2349802 - RNA, 19 nt, Homo sapiens
  misc_RNA (1)...(19): siRNA sense strand
cauucaugcugcaaagaaa

SEQ ID NO: 2349803 - RNA, 19 nt, Homo sapiens
  misc_RNA (1)...(19): siRNA sense strand
ccagacaugagcagagaaa

SEQ ID NO: 2349804 - RNA, 19 nt, Homo sapiens
  misc_RNA (1)...(19): siRNA sense strand
agacaugagcagagaaaau

SEQ ID NO: 2349805 - RNA, 19 nt, Homo sapiens
  misc_RNA (1)...(19): siRNA sense strand
caguaaacuuagacgggau

SEQ ID NO: 2349806 - RNA, 19 nt, Homo sapiens
  misc_RNA (1)...(19): siRNA sense strand
cauugaagaggcaaagaaa

SEQ ID NO: 2349807 - RNA, 19 nt, Homo sapiens
  misc_RNA (1)...(19): siRNA sense strand
ccauaugauucgcuggcaa

SEQ ID NO: 2349808 - RNA, 19 nt, Homo sapiens
  misc_RNA (1)...(19): siRNA sense strand
ggauacacaggaagggauu

SEQ ID NO: 2349809 - RNA, 19 nt, Homo sapiens
  misc_RNA (1)...(19): siRNA sense strand
cuugauagaaguagaugaa

SEQ ID NO: 2349810 - RNA, 19 nt, Homo sapiens
  misc_RNA (1)...(19): siRNA sense strand
gggaaaauauugauguaca

SEQ ID NO: 2349811 - RNA, 19 nt, Homo sapiens
  misc_RNA (1)...(19): siRNA sense strand
cugucagugucauggauaa

SEQ ID NO: 2349812 - RNA, 19 nt, Homo sapiens
  misc_RNA (1)...(19): siRNA sense strand
cagaaauggaguauagcau

SEQ ID NO: 2349813 - RNA, 19 nt, Homo sapiens
  misc_RNA (1)...(19): siRNA sense strand
ggucaaaauaucuguggaa

SEQ ID NO: 2349814 - RNA, 19 nt, Homo sapiens
  misc_RNA (1)...(19): siRNA sense strand
ugaaaauacaggagacauu

SEQ ID NO: 2349815 - RNA, 19 nt, Homo sapiens
  misc_RNA (1)...(19): siRNA sense strand
acacacaauauguaggcaa

SEQ ID NO: 2349816 - RNA, 19 nt, Homo sapiens
  misc_RNA (1)...(19): siRNA sense strand
ucacacugaccaagauaaa

SEQ ID NO: 2349817 - RNA, 19 nt, Homo sapiens
  misc_RNA (1)...(19): siRNA sense strand
ucaaugacaaugagccaaa

SEQ ID NO: 2349818 - RNA, 19 nt, Homo sapiens
  misc_RNA (1)...(19): siRNA sense strand
gagaaaauagagagcagua

SEQ ID NO: 2349819 - RNA, 19 nt, Homo sapiens
  misc_RNA (1)...(19): siRNA sense strand
gaaucaucuccuuggcaua

SEQ ID NO: 2349820 - RNA, 19 nt, Homo sapiens
  misc_RNA (1)...(19): siRNA sense strand
ugccaaggcuauagacaga

SEQ ID NO: 2349821 - RNA, 19 nt, Homo sapiens
  misc_RNA (1)...(19): siRNA sense strand
ggauuauaacugucaaaca

SEQ ID NO: 2349822 - RNA, 19 nt, Homo sapiens
  misc_RNA (1)...(19): siRNA sense strand
gcugcauugaagaggcaaa

SEQ ID NO: 2349823 - RNA, 19 nt, Homo sapiens
  misc_RNA (1)...(19): siRNA sense strand
ggucuauagcauauugcaa

SEQ ID NO: 2349824 - RNA, 19 nt, Homo sapiens
  misc_RNA (1)...(19): siRNA sense strand
ucaaaauaucuguggaaga

SEQ ID NO: 2349825 - RNA, 19 nt, Homo sapiens
  misc_RNA (1)...(19): siRNA sense strand
gggugaugauagugaccga

SEQ ID NO: 2349826 - RNA, 19 nt, Homo sapiens
  misc_RNA (1)...(19): siRNA sense strand
cagaaauaaguaacccaaa

SEQ ID NO: 2349827 - RNA, 19 nt, Homo sapiens
  misc_RNA (1)...(19): siRNA sense strand
agauaauacagcaggaauc

SEQ ID NO: 2349828 - RNA, 19 nt, Homo sapiens
  misc_RNA (1)...(19): siRNA sense strand
agauagcgggucugacaaa

SEQ ID NO: 2349829 - RNA, 19 nt, Homo sapiens
  misc_RNA (1)...(19): siRNA sense strand
auacauacuaacaggagau

SEQ ID NO: 2349830 - RNA, 19 nt, Homo sapiens
  misc_RNA (1)...(19): siRNA sense strand
auucaaagcagcacuggua

SEQ ID NO: 2349831 - RNA, 19 nt, Homo sapiens
  misc_RNA (1)...(19): siRNA sense strand
auguaaugccugaaacuau

SEQ ID NO: 2349832 - RNA, 19 nt, Homo sapiens
  misc_RNA (1)...(19): siRNA sense strand
ccaagauaaaggagaugga

SEQ ID NO: 2349833 - RNA, 19 nt, Homo sapiens
  misc_RNA (1)...(19): siRNA sense strand
aagagaagacaguaaacuu

SEQ ID NO: 2349834 - RNA, 19 nt, Homo sapiens
  misc_RNA (1)...(19): siRNA sense strand
uuggaagaguacacaggua

SEQ ID NO: 2349835 - RNA, 19 nt, Homo sapiens
  misc_RNA (1)...(19): siRNA sense strand
ggauguaaugccugaaacu

SEQ ID NO: 2349836 - RNA, 19 nt, Homo sapiens
  misc_RNA (1)...(19): siRNA sense strand
auuaaggaauccagaggca

SEQ ID NO: 2349837 - RNA, 19 nt, Homo sapiens
  misc_RNA (1)...(19): siRNA sense strand
aagauacagcuguggucaa

SEQ ID NO: 2349838 - RNA, 19 nt, Homo sapiens
  misc_RNA (1)...(19): siRNA sense strand
caguaucauuggacagguu

SEQ ID NO: 2349839 - RNA, 19 nt, Homo sapiens
  misc_RNA (1)...(19): siRNA sense strand
gggaaaaugcagaaaugga

SEQ ID NO: 2349840 - RNA, 19 nt, Homo sapiens
  misc_RNA (1)...(19): siRNA sense strand
uggcagucuauuuguuaua

SEQ ID NO: 2349841 - RNA, 19 nt, Homo sapiens
  misc_RNA (1)...(19): siRNA sense strand
gauccagaugccaggaaca

SEQ ID NO: 2349842 - RNA, 19 nt, Homo sapiens
  misc_RNA (1)...(19): siRNA sense strand
cagccacagaaauaaguaa

SEQ ID NO: 2349843 - RNA, 19 nt, Homo sapiens
  misc_RNA (1)...(19): siRNA sense strand
aggaaucaugacucggaaa

SEQ ID NO: 2349844 - RNA, 19 nt, Homo sapiens
  misc_RNA (1)...(19): siRNA sense strand
gugggaaaauauugaugua

SEQ ID NO: 2349845 - RNA, 19 nt, Homo sapiens
  misc_RNA (1)...(19): siRNA sense strand
acucaucuuggaaggauaa

SEQ ID NO: 2349846 - RNA, 19 nt, Homo sapiens
  misc_RNA (1)...(19): siRNA sense strand
agggauuauaacugucaaa

SEQ ID NO: 2349847 - RNA, 19 nt, Homo sapiens
  misc_RNA (1)...(19): siRNA sense strand
uggcuacagucgcaacaaa

SEQ ID NO: 2349848 - RNA, 19 nt, Homo sapiens
  misc_RNA (1)...(19): siRNA sense strand
cugcgauaaucaaggaaac

SEQ ID NO: 2349849 - RNA, 19 nt, Homo sapiens
  misc_RNA (1)...(19): siRNA sense strand
ugcaaagaaacuagacaga

SEQ ID NO: 2349850 - RNA, 19 nt, Homo sapiens
  misc_RNA (1)...(19): siRNA sense strand
uaucaaugacaaugagcca

SEQ ID NO: 2349851 - RNA, 19 nt, Homo sapiens
  misc_RNA (1)...(19): siRNA sense strand
aagauaauacagcaggaau

SEQ ID NO: 2349852 - RNA, 19 nt, Homo sapiens
  misc_RNA (1)...(19): siRNA sense strand
gcaccuacuuauugccgau

SEQ ID NO: 2349853 - RNA, 19 nt, Homo sapiens
  misc_RNA (1)...(19): siRNA sense strand
ccugcgauaaucaaggaaa

SEQ ID NO: 2349854 - RNA, 19 nt, Homo sapiens
  misc_RNA (1)...(19): siRNA sense strand
ggaaucaucuccuuggcau

SEQ ID NO: 2349855 - RNA, 19 nt, Homo sapiens
  misc_RNA (1)...(19): siRNA sense strand
ccgcagaagcccugauccu

SEQ ID NO: 2349856 - RNA, 19 nt, Homo sapiens
  misc_RNA (1)...(19): siRNA sense strand
ggaccaaagcauuccggaa

SEQ ID NO: 2349857 - RNA, 19 nt, Homo sapiens
  misc_RNA (1)...(19): siRNA sense strand
cuaucaaauaccagcgaga

SEQ ID NO: 2349858 - RNA, 19 nt, Homo sapiens
  misc_RNA (1)...(19): siRNA sense strand
agaaaaugguacagcaguu

SEQ ID NO: 2349859 - RNA, 19 nt, Homo sapiens
  misc_RNA (1)...(19): siRNA sense strand
augaagagaguugaagaaa

SEQ ID NO: 2349860 - RNA, 19 nt, Homo sapiens
  misc_RNA (1)...(19): siRNA sense strand
gagcuauggaauaaaacua

SEQ ID NO: 2349861 - RNA, 19 nt, Homo sapiens
  misc_RNA (1)...(19): siRNA sense strand
ccagcgagagcuauggaau

SEQ ID NO: 2349862 - RNA, 19 nt, Homo sapiens
  misc_RNA (1)...(19): siRNA sense strand
aaaucaaacagaagcgcca

SEQ ID NO: 2349863 - RNA, 19 nt, Homo sapiens
  misc_RNA (1)...(19): siRNA sense strand
gugaaaaccacaugaggaa

SEQ ID NO: 2349864 - RNA, 19 nt, Homo sapiens
  misc_RNA (1)...(19): siRNA sense strand
ccagaagaaucauggcaca

SEQ ID NO: 2349865 - RNA, 19 nt, Homo sapiens
  misc_RNA (1)...(19): siRNA sense strand
ggguaguacauuugaagau

SEQ ID NO: 2349866 - RNA, 19 nt, Homo sapiens
  misc_RNA (1)...(19): siRNA sense strand
gguuaauuugcaugagaga

SEQ ID NO: 2349867 - RNA, 19 nt, Homo sapiens
  misc_RNA (1)...(19): siRNA sense strand
acacagaugguaaugggua

SEQ ID NO: 2349868 - RNA, 19 nt, Homo sapiens
  misc_RNA (1)...(19): siRNA sense strand
gaauaguggaaguuugcau

SEQ ID NO: 2349869 - RNA, 19 nt, Homo sapiens
  misc_RNA (1)...(19): siRNA sense strand
cuaugaagucuguuacaca

SEQ ID NO: 2349870 - RNA, 19 nt, Homo sapiens
  misc_RNA (1)...(19): siRNA sense strand
gauuacuccaacugaagaa

SEQ ID NO: 2349871 - RNA, 19 nt, Homo sapiens
  misc_RNA (1)...(19): siRNA sense strand
guaugaaaauggugugacu

SEQ ID NO: 2349872 - RNA, 19 nt, Homo sapiens
  misc_RNA (1)...(19): siRNA sense strand
guguauuggugaagagacu

SEQ ID NO: 2349873 - RNA, 19 nt, Homo sapiens
  misc_RNA (1)...(19): siRNA sense strand
gugaaaaccacaugaggaa

SEQ ID NO: 2349874 - RNA, 19 nt, Homo sapiens
  misc_RNA (1)...(19): siRNA sense strand
ccagaagaaucauggcaca

SEQ ID NO: 2349875 - RNA, 19 nt, Homo sapiens
  misc_RNA (1)...(19): siRNA sense strand
ggguaguacauuugaagau

SEQ ID NO: 2349876 - RNA, 19 nt, Homo sapiens
  misc_RNA (1)...(19): siRNA sense strand
gguuaauuugcaugagaga

SEQ ID NO: 2349877 - RNA, 19 nt, Homo sapiens
  misc_RNA (1)...(19): siRNA sense strand
gguaacaucaucaagggaa

SEQ ID NO: 2349878 - RNA, 19 nt, Homo sapiens
  misc_RNA (1)...(19): siRNA sense strand
uccuguuacuccagagaaa

SEQ ID NO: 2349879 - RNA, 19 nt, Homo sapiens
  misc_RNA (1)...(19): siRNA sense strand
acacagaugguaaugggua

SEQ ID NO: 2349880 - RNA, 19 nt, Homo sapiens
  misc_RNA (1)...(19): siRNA sense strand
agggaagaagcuuggauca

SEQ ID NO: 2349881 - RNA, 19 nt, Homo sapiens
  misc_RNA (1)...(19): siRNA sense strand
uggaaaugguccuguuacu

SEQ ID NO: 2349882 - RNA, 19 nt, Homo sapiens
  misc_RNA (1)...(19): siRNA sense strand
gaauaguggaaguuugcau

SEQ ID NO: 2349883 - RNA, 19 nt, Homo sapiens
  misc_RNA (1)...(19): siRNA sense strand
gauccuaauacuuggccau

SEQ ID NO: 2349884 - RNA, 19 nt, Homo sapiens
  misc_RNA (1)...(19): siRNA sense strand
acaaaguaugaacugguaa

SEQ ID NO: 2349885 - RNA, 19 nt, Homo sapiens
  misc_RNA (1)...(19): siRNA sense strand
guaacaucaucaagggaag

SEQ ID NO: 2349886 - RNA, 19 nt, Homo sapiens
  misc_RNA (1)...(19): siRNA sense strand
cuaugaagucuguuacaca

SEQ ID NO: 2349887 - RNA, 19 nt, Homo sapiens
  misc_RNA (1)...(19): siRNA sense strand
aaauuguguaccugggcaa

SEQ ID NO: 2349888 - RNA, 19 nt, Homo sapiens
  misc_RNA (1)...(19): siRNA sense strand
gauuacuccaacugaagaa

SEQ ID NO: 2349889 - RNA, 19 nt, Homo sapiens
  misc_RNA (1)...(19): siRNA sense strand
guaugaaaauggugugacu

SEQ ID NO: 2349890 - RNA, 19 nt, Homo sapiens
  misc_RNA (1)...(19): siRNA sense strand
gagaaaugguucaugguga

SEQ ID NO: 2349891 - RNA, 19 nt, Homo sapiens
  misc_RNA (1)...(19): siRNA sense strand
gggacgauguuguggcuga

SEQ ID NO: 2349892 - RNA, 19 nt, Homo sapiens
  misc_RNA (1)...(19): siRNA sense strand
aagcaaauuuccaccgcaa

SEQ ID NO: 2349893 - RNA, 19 nt, Homo sapiens
  misc_RNA (1)...(19): siRNA sense strand
agaaugaaaaugaggacaa

SEQ ID NO: 2349894 - RNA, 19 nt, Homo sapiens
  misc_RNA (1)...(19): siRNA sense strand
ccaaaggcgaugugggagu

SEQ ID NO: 2349895 - RNA, 19 nt, Homo sapiens
  misc_RNA (1)...(19): siRNA sense strand
uggcaacgaaacagagaau

SEQ ID NO: 2349896 - RNA, 19 nt, Homo sapiens
  misc_RNA (1)...(19): siRNA sense strand
aggaggaagaggaggacga

SEQ ID NO: 2349897 - RNA, 19 nt, Homo sapiens
  misc_RNA (1)...(19): siRNA sense strand
aggaagaggaggacgagga

SEQ ID NO: 2349898 - RNA, 19 nt, Homo sapiens
  misc_RNA (1)...(19): siRNA sense strand
aaaugaggacaaugagaau

SEQ ID NO: 2349899 - RNA, 19 nt, Homo sapiens
  misc_RNA (1)...(19): siRNA sense strand
acaaguggcagcuggacaa

SEQ ID NO: 2349900 - RNA, 19 nt, Homo sapiens
  misc_RNA (1)...(19): siRNA sense strand
gggaagacagaaaguggau

SEQ ID NO: 2349901 - RNA, 19 nt, Homo sapiens
  misc_RNA (1)...(19): siRNA sense strand
agacccuggcuguggauua

SEQ ID NO: 2349902 - RNA, 19 nt, Homo sapiens
  misc_RNA (1)...(19): siRNA sense strand
ccaucaugacugaguucaa

SEQ ID NO: 2349903 - RNA, 19 nt, Homo sapiens
  misc_RNA (1)...(19): siRNA sense strand
agaaaguggaugauggcga

SEQ ID NO: 2349904 - RNA, 19 nt, Homo sapiens
  misc_RNA (1)...(19): siRNA sense strand
aguggaugauggcgaggaa

SEQ ID NO: 2349905 - RNA, 19 nt, Homo sapiens
  misc_RNA (1)...(19): siRNA sense strand
cgaaacagagaaugaaaau

SEQ ID NO: 2349906 - RNA, 19 nt, Homo sapiens
  misc_RNA (1)...(19): siRNA sense strand
ccuacaugaugguguggau

SEQ ID NO: 2349907 - RNA, 19 nt, Homo sapiens
  misc_RNA (1)...(19): siRNA sense strand
uugauaaacagcagggcuu

SEQ ID NO: 2349908 - RNA, 19 nt, Homo sapiens
  misc_RNA (1)...(19): siRNA sense strand
aggacgaggaugaugauga

SEQ ID NO: 2349909 - RNA, 19 nt, Homo sapiens
  misc_RNA (1)...(19): siRNA sense strand
caucgugggcucagcggua

SEQ ID NO: 2349910 - RNA, 19 nt, Homo sapiens
  misc_RNA (1)...(19): siRNA sense strand
ccaugugcucugugccaua

SEQ ID NO: 2349911 - RNA, 19 nt, Homo sapiens
  misc_RNA (1)...(19): siRNA sense strand
augaggacaaugagaauga

SEQ ID NO: 2349912 - RNA, 19 nt, Homo sapiens
  misc_RNA (1)...(19): siRNA sense strand
gcuacuuaagaaagcaaau

SEQ ID NO: 2349913 - RNA, 19 nt, Homo sapiens
  misc_RNA (1)...(19): siRNA sense strand
augaggaggaagaggagga

SEQ ID NO: 2349914 - RNA, 19 nt, Homo sapiens
  misc_RNA (1)...(19): siRNA sense strand
caccaaaggcgauguggga

SEQ ID NO: 2349915 - RNA, 19 nt, Homo sapiens
  misc_RNA (1)...(19): siRNA sense strand
uugaucaaugagagacaaa

SEQ ID NO: 2349916 - RNA, 19 nt, Homo sapiens
  misc_RNA (1)...(19): siRNA sense strand
gggaaucugagguggccau

SEQ ID NO: 2349917 - RNA, 19 nt, Homo sapiens
  misc_RNA (1)...(19): siRNA sense strand
augagaaugaugaggagga

SEQ ID NO: 2349918 - RNA, 19 nt, Homo sapiens
  misc_RNA (1)...(19): siRNA sense strand
uguugaucaaugagagaca

SEQ ID NO: 2349919 - RNA, 19 nt, Homo sapiens
  misc_RNA (1)...(19): siRNA sense strand
acgaaacagagaaugaaaa

SEQ ID NO: 2349920 - RNA, 19 nt, Homo sapiens
  misc_RNA (1)...(19): siRNA sense strand
cgaggaagcugaugcaggu

SEQ ID NO: 2349921 - RNA, 19 nt, Homo sapiens
  misc_RNA (1)...(19): siRNA sense strand
aggaggacgaggaugauga

SEQ ID NO: 2349922 - RNA, 19 nt, Homo sapiens
  misc_RNA (1)...(19): siRNA sense strand
ccacuaagacggagccgaa

SEQ ID NO: 2349923 - RNA, 19 nt, Homo sapiens
  misc_RNA (1)...(19): siRNA sense strand
ggaaagccguugugagcca

SEQ ID NO: 2349924 - RNA, 19 nt, Homo sapiens
  misc_RNA (1)...(19): siRNA sense strand
agcccagagcugagagaaa

SEQ ID NO: 2349925 - RNA, 19 nt, Homo sapiens
  misc_RNA (1)...(19): siRNA sense strand
gcuguaucgcagaaagaaa

SEQ ID NO: 2349926 - RNA, 19 nt, Homo sapiens
  misc_RNA (1)...(19): siRNA sense strand
ccgaaaauggggagaucaa

SEQ ID NO: 2349927 - RNA, 19 nt, Homo sapiens
  misc_RNA (1)...(19): siRNA sense strand
cguuagagagacagacgaa

SEQ ID NO: 2349928 - RNA, 19 nt, Homo sapiens
  misc_RNA (1)...(19): siRNA sense strand
ggaagaagcuggugcucgu

SEQ ID NO: 2349929 - RNA, 19 nt, Homo sapiens
  misc_RNA (1)...(19): siRNA sense strand
uggagauaaacaaaggaaa

SEQ ID NO: 2349930 - RNA, 19 nt, Homo sapiens
  misc_RNA (1)...(19): siRNA sense strand
guuucaaaucuguggccaa

SEQ ID NO: 2349931 - RNA, 19 nt, Homo sapiens
  misc_RNA (1)...(19): siRNA sense strand
gguagauauggcugaggaa

SEQ ID NO: 2349932 - RNA, 19 nt, Homo sapiens
  misc_RNA (1)...(19): siRNA sense strand
aggcaaagccagaagcacu

SEQ ID NO: 2349933 - RNA, 19 nt, Homo sapiens
  misc_RNA (1)...(19): siRNA sense strand
ucgcagaaagaaagacaau

SEQ ID NO: 2349934 - RNA, 19 nt, Homo sapiens
  misc_RNA (1)...(19): siRNA sense strand
ggaaucagaaagacgguga

SEQ ID NO: 2349935 - RNA, 19 nt, Homo sapiens
  misc_RNA (1)...(19): siRNA sense strand
ccaacggcagagaggcaaa

SEQ ID NO: 2349936 - RNA, 19 nt, Homo sapiens
  misc_RNA (1)...(19): siRNA sense strand
cuagagaaauauuugcaga

SEQ ID NO: 2349937 - RNA, 19 nt, Homo sapiens
  misc_RNA (1)...(19): siRNA sense strand
cagaagaggccucagcaca

SEQ ID NO: 2349938 - RNA, 19 nt, Homo sapiens
  misc_RNA (1)...(19): siRNA sense strand
agguggaggagguagauau

SEQ ID NO: 2349939 - RNA, 19 nt, Homo sapiens
  misc_RNA (1)...(19): siRNA sense strand
gagaguaaugacaacgaau

SEQ ID NO: 2349940 - RNA, 19 nt, Homo sapiens
  misc_RNA (1)...(19): siRNA sense strand
cgagacuacaagagaagau

SEQ ID NO: 2349941 - RNA, 19 nt, Homo sapiens
  misc_RNA (1)...(19): siRNA sense strand
cagcuguaucgcagaaaga

SEQ ID NO: 2349942 - RNA, 19 nt, Homo sapiens
  misc_RNA (1)...(19): siRNA sense strand
ccuacgaucaguugcggaa

SEQ ID NO: 2349943 - RNA, 19 nt, Homo sapiens
  misc_RNA (1)...(19): siRNA sense strand
cacugcacuuggagauaaa

SEQ ID NO: 2349944 - RNA, 19 nt, Homo sapiens
  misc_RNA (1)...(19): siRNA sense strand
cagacgaauuacggaggaa

SEQ ID NO: 2349945 - RNA, 19 nt, Homo sapiens
  misc_RNA (1)...(19): siRNA sense strand
cuucaaggaggcaagagaa

SEQ ID NO: 2349946 - RNA, 19 nt, Homo sapiens
  misc_RNA (1)...(19): siRNA sense strand
aagagaagucugcaggaga

SEQ ID NO: 2349947 - RNA, 19 nt, Homo sapiens
  misc_RNA (1)...(19): siRNA sense strand
cugagguggaggagguaga

SEQ ID NO: 2349948 - RNA, 19 nt, Homo sapiens
  misc_RNA (1)...(19): siRNA sense strand
gcaaacgaauccaagggca

SEQ ID NO: 2349949 - RNA, 19 nt, Homo sapiens
  misc_RNA (1)...(19): siRNA sense strand
ccaugaccucccaggcaaa

SEQ ID NO: 2349950 - RNA, 19 nt, Homo sapiens
  misc_RNA (1)...(19): siRNA sense strand
ucucugagguggaggaggu

SEQ ID NO: 2349951 - RNA, 19 nt, Homo sapiens
  misc_RNA (1)...(19): siRNA sense strand
cgcacucguuagagagaca

SEQ ID NO: 2349952 - RNA, 19 nt, Homo sapiens
  misc_RNA (1)...(19): siRNA sense strand
ccgcugauggccaaggcaa

SEQ ID NO: 2349953 - RNA, 19 nt, Homo sapiens
  misc_RNA (1)...(19): siRNA sense strand
ccuacuuugaucagggaga

SEQ ID NO: 2349954 - RNA, 19 nt, Homo sapiens
  misc_RNA (1)...(19): siRNA sense strand
ccuugugugcccagggaga

SEQ ID NO: 2349955 - RNA, 19 nt, Homo sapiens
  misc_RNA (1)...(19): siRNA sense strand
aggcaauucgagacuacaa

SEQ ID NO: 2349956 - RNA, 19 nt, Homo sapiens
  misc_RNA (1)...(19): siRNA sense strand
cagaauagccccagcugau

SEQ ID NO: 2349957 - RNA, 19 nt, Homo sapiens
  misc_RNA (1)...(19): siRNA sense strand
uggucaaagaagauagaga

SEQ ID NO: 2349958 - RNA, 19 nt, Homo sapiens
  misc_RNA (1)...(19): siRNA sense strand
gagacuuaugcuacguaaa

SEQ ID NO: 2349959 - RNA, 19 nt, Homo sapiens
  misc_RNA (1)...(19): siRNA sense strand
acguaaaggagcugggcgu

SEQ ID NO: 2349960 - RNA, 19 nt, Homo sapiens
  misc_RNA (1)...(19): siRNA sense strand
cggguuauuccuggagaua

SEQ ID NO: 2349961 - RNA, 19 nt, Homo sapiens
  misc_RNA (1)...(19): siRNA sense strand
caaauuacugccauggaga

SEQ ID NO: 2349962 - RNA, 19 nt, Homo sapiens
  misc_RNA (1)...(19): siRNA sense strand
cugucugccaucaaagaaa

SEQ ID NO: 2349963 - RNA, 19 nt, Homo sapiens
  misc_RNA (1)...(19): siRNA sense strand
ccaucaaagaaagggaaca

SEQ ID NO: 2349964 - RNA, 19 nt, Homo sapiens
  misc_RNA (1)...(19): siRNA sense strand
ggucaaagaagauagagac

SEQ ID NO: 2349965 - RNA, 19 nt, Homo sapiens
  misc_RNA (1)...(19): siRNA sense strand
gaucagaggaugcuggcuu

SEQ ID NO: 2349966 - RNA, 19 nt, Homo sapiens
  misc_RNA (1)...(19): siRNA sense strand
gcuccaaagaagagggaaa

SEQ ID NO: 2349967 - RNA, 19 nt, Homo sapiens
  misc_RNA (1)...(19): siRNA sense strand
ggaagaacgacaagcgcaa

SEQ ID NO: 2349968 - RNA, 19 nt, Homo sapiens
  misc_RNA (1)...(19): siRNA sense strand
ggguggagacgaagggcaa

SEQ ID NO: 2349969 - RNA, 19 nt, Homo sapiens
  misc_RNA (1)...(19): siRNA sense strand
gcaaauaacaagaggcaug

SEQ ID NO: 2349970 - RNA, 19 nt, Homo sapiens
  misc_RNA (1)...(19): siRNA sense strand
gggcaaauaacaagaggca

SEQ ID NO: 2349971 - RNA, 19 nt, Homo sapiens
  misc_RNA (1)...(19): siRNA sense strand
ggauauggcuguaccgugu

SEQ ID NO: 2349972 - RNA, 19 nt, Homo sapiens
  misc_RNA (1)...(19): siRNA sense strand
guguagaugcuaaagaaaa

SEQ ID NO: 2349973 - RNA, 19 nt, Homo sapiens
  misc_RNA (1)...(19): siRNA sense strand
uauucugguccgugggaua

SEQ ID NO: 2349974 - RNA, 19 nt, Homo sapiens
  misc_RNA (1)...(19): siRNA sense strand
ccuacaugggcgaguggaa

SEQ ID NO: 2349975 - RNA, 19 nt, Homo sapiens
  misc_RNA (1)...(19): siRNA sense strand
ccaaagaaagcaaagcuga

SEQ ID NO: 2349976 - RNA, 19 nt, Homo sapiens
  misc_RNA (1)...(19): siRNA sense strand
gggagaagguggacagagc

SEQ ID NO: 2349977 - RNA, 19 nt, Homo sapiens
  misc_RNA (1)...(19): siRNA sense strand
ccagaaccaaaguggaaau

SEQ ID NO: 2349978 - RNA, 19 nt, Homo sapiens
  misc_RNA (1)...(19): siRNA sense strand
ccccaaagccccugaagaa

SEQ ID NO: 2349979 - RNA, 19 nt, Homo sapiens
  misc_RNA (1)...(19): siRNA sense strand
agaauuaguuccagcgaug

SEQ ID NO: 2349980 - RNA, 19 nt, Homo sapiens
  misc_RNA (1)...(19): siRNA sense strand
ugacaaaaccaguugccaa

SEQ ID NO: 2349981 - RNA, 19 nt, Homo sapiens
  misc_RNA (1)...(19): siRNA sense strand
uugucaugcuguugaauau

SEQ ID NO: 2349982 - RNA, 19 nt, Homo sapiens
  misc_RNA (1)...(19): siRNA sense strand
acgaagggcaaguggaugu

SEQ ID NO: 2349983 - RNA, 19 nt, Homo sapiens
  misc_RNA (1)...(19): siRNA sense strand
gcaacaccuaccagggcua

SEQ ID NO: 2349984 - RNA, 19 nt, Homo sapiens
  misc_RNA (1)...(19): siRNA sense strand
cccaagaucuccugaggca

SEQ ID NO: 2349985 - RNA, 19 nt, Homo sapiens
  misc_RNA (1)...(19): siRNA sense strand
gaaggaggcaggagcgguu

SEQ ID NO: 2349986 - RNA, 19 nt, Homo sapiens
  misc_RNA (1)...(19): siRNA sense strand
aaacagagauuucaggaag

SEQ ID NO: 2349987 - RNA, 19 nt, Homo sapiens
  misc_RNA (1)...(19): siRNA sense strand
gugcacaagccauccgcua

SEQ ID NO: 2349988 - RNA, 19 nt, Homo sapiens
  misc_RNA (1)...(19): siRNA sense strand
gcuaacaaguggagucccu

SEQ ID NO: 2349989 - RNA, 19 nt, Homo sapiens
  misc_RNA (1)...(19): siRNA sense strand
ugccauggccagaaccaaa

SEQ ID NO: 2349990 - RNA, 19 nt, Homo sapiens
  misc_RNA (1)...(19): siRNA sense strand
auaccaaagaauccagcaa

SEQ ID NO: 2349991 - RNA, 19 nt, Homo sapiens
  misc_RNA (1)...(19): siRNA sense strand
guguaaugugugugggaaa

SEQ ID NO: 2349992 - RNA, 19 nt, Homo sapiens
  misc_RNA (1)...(19): siRNA sense strand
augcaauauaugugggaaa

SEQ ID NO: 2349993 - RNA, 19 nt, Homo sapiens
  misc_RNA (1)...(19): siRNA sense strand
auguaaugaaugugggaaa

SEQ ID NO: 2349994 - RNA, 19 nt, Homo sapiens
  misc_RNA (1)...(19): siRNA sense strand
gugugaugacugugggaaa

SEQ ID NO: 2349995 - RNA, 19 nt, Homo sapiens
  misc_RNA (1)...(19): siRNA sense strand
augugaagaaugugggaaa

SEQ ID NO: 2349996 - RNA, 19 nt, Homo sapiens
  misc_RNA (1)...(19): siRNA sense strand
aacacauacuggagagaaa

SEQ ID NO: 2349997 - RNA, 19 nt, Homo sapiens
  misc_RNA (1)...(19): siRNA sense strand
ccaaaguacccaugccaaa

SEQ ID NO: 2349998 - RNA, 19 nt, Homo sapiens
  misc_RNA (1)...(19): siRNA sense strand
gggaaagccuucagccaga

SEQ ID NO: 2349999 - RNA, 19 nt, Homo sapiens
  misc_RNA (1)...(19): siRNA sense strand
ccuacaauguugagaagga

SEQ ID NO: 2350000 - RNA, 19 nt, Homo sapiens
  misc_RNA (1)...(19): siRNA sense strand
gggaaagcauucagccaga

SEQ ID NO: 2350001 - RNA, 19 nt, Homo sapiens
  misc_RNA (1)...(19): siRNA sense strand
augcagugugugugggaaa

SEQ ID NO: 2350002 - RNA, 19 nt, Homo sapiens
  misc_RNA (1)...(19): siRNA sense strand
augcaaugaauguuggaaa

SEQ ID NO: 2350003 - RNA, 19 nt, Homo sapiens
  misc_RNA (1)...(19): siRNA sense strand
gagaaugcacacuggagaa

SEQ ID NO: 2350004 - RNA, 19 nt, Homo sapiens
  misc_RNA (1)...(19): siRNA sense strand
cacucacacuggagagaaa

SEQ ID NO: 2350005 - RNA, 19 nt, Homo sapiens
  misc_RNA (1)...(19): siRNA sense strand
ggaagaccccagaggaaaa

SEQ ID NO: 2350006 - RNA, 19 nt, Homo sapiens
  misc_RNA (1)...(19): siRNA sense strand
ugggaaagcauauagacaa

SEQ ID NO: 2350007 - RNA, 19 nt, Homo sapiens
  misc_RNA (1)...(19): siRNA sense strand
ugguauuguacauaggaaa

SEQ ID NO: 2350008 - RNA, 19 nt, Homo sapiens
  misc_RNA (1)...(19): siRNA sense strand
gggaaagcauauagacaag

SEQ ID NO: 2350009 - RNA, 19 nt, Homo sapiens
  misc_RNA (1)...(19): siRNA sense strand
gcauauagacaaggcgcaa

SEQ ID NO: 2350010 - RNA, 19 nt, Homo sapiens
  misc_RNA (1)...(19): siRNA sense strand
aauucacacaggagagaaa

SEQ ID NO: 2350011 - RNA, 19 nt, Homo sapiens
  misc_RNA (1)...(19): siRNA sense strand
agacuagagaggcgaggaa

SEQ ID NO: 2350012 - RNA, 19 nt, Homo sapiens
  misc_RNA (1)...(19): siRNA sense strand
caucaaauuagaagacuca

SEQ ID NO: 2350013 - RNA, 19 nt, Homo sapiens
  misc_RNA (1)...(19): siRNA sense strand
gaggaagaccccagaggaa

SEQ ID NO: 2350014 - RNA, 19 nt, Homo sapiens
  misc_RNA (1)...(19): siRNA sense strand
uauaaugaaggcagggcaa

SEQ ID NO: 2350015 - RNA, 19 nt, Homo sapiens
  misc_RNA (1)...(19): siRNA sense strand
gguauuguacauaggaaaa

SEQ ID NO: 2350016 - RNA, 19 nt, Homo sapiens
  misc_RNA (1)...(19): siRNA sense strand
ccaagauaccccagaggaa

SEQ ID NO: 2350017 - RNA, 19 nt, Homo sapiens
  misc_RNA (1)...(19): siRNA sense strand
ucacaaaggaagaaaccca

SEQ ID NO: 2350018 - RNA, 19 nt, Homo sapiens
  misc_RNA (1)...(19): siRNA sense strand
acuagagaggcgaggaaaa

SEQ ID NO: 2350019 - RNA, 19 nt, Homo sapiens
  misc_RNA (1)...(19): siRNA sense strand
auaugauccuacagaagaa

SEQ ID NO: 2350020 - RNA, 19 nt, Homo sapiens
  misc_RNA (1)...(19): siRNA sense strand
agaaugugggaaagaguuu

SEQ ID NO: 2350021 - RNA, 19 nt, Homo sapiens
  misc_RNA (1)...(19): siRNA sense strand
agucagaguacuuaccuua

SEQ ID NO: 2350022 - RNA, 19 nt, Homo sapiens
  misc_RNA (1)...(19): siRNA sense strand
cucgaaaggcauugaguca

SEQ ID NO: 2350023 - RNA, 19 nt, Homo sapiens
  misc_RNA (1)...(19): siRNA sense strand
caguggaggauaugucuaa

SEQ ID NO: 2350024 - RNA, 19 nt, Homo sapiens
  misc_RNA (1)...(19): siRNA sense strand
uagaagacucauaugacua

SEQ ID NO: 2350025 - RNA, 19 nt, Homo sapiens
  misc_RNA (1)...(19): siRNA sense strand
gauuuuagccagagaacau

SEQ ID NO: 2350026 - RNA, 19 nt, Homo sapiens
  misc_RNA (1)...(19): siRNA sense strand
guccagaaugggaaacuaa

SEQ ID NO: 2350027 - RNA, 19 nt, Homo sapiens
  misc_RNA (1)...(19): siRNA sense strand
gugaagaaugugggaaaga

SEQ ID NO: 2350028 - RNA, 19 nt, Homo sapiens
  misc_RNA (1)...(19): siRNA sense strand
augcuuggaaugugguaaa

SEQ ID NO: 2350029 - RNA, 19 nt, Homo sapiens
  misc_RNA (1)...(19): siRNA sense strand
gugggaaagcauauagaca

SEQ ID NO: 2350030 - RNA, 19 nt, Homo sapiens
  misc_RNA (1)...(19): siRNA sense strand
aauacauacugggaagaaa

SEQ ID NO: 2350031 - RNA, 19 nt, Homo sapiens
  misc_RNA (1)...(19): siRNA sense strand
guguuuagucagaguacuu

SEQ ID NO: 2350032 - RNA, 19 nt, Homo sapiens
  misc_RNA (1)...(19): siRNA sense strand
guacaaaccuuauucagca

SEQ ID NO: 2350033 - RNA, 19 nt, Homo sapiens
  misc_RNA (1)...(19): siRNA sense strand
ccuuauugcacaucagaga

SEQ ID NO: 2350034 - RNA, 19 nt, Homo sapiens
  misc_RNA (1)...(19): siRNA sense strand
uacccaugccaaagagaaa

SEQ ID NO: 2350035 - RNA, 19 nt, Homo sapiens
  misc_RNA (1)...(19): siRNA sense strand
ugggaagaaaccauauaaa

SEQ ID NO: 2350036 - RNA, 19 nt, Homo sapiens
  misc_RNA (1)...(19): siRNA sense strand
aaggauucauacuggagaa

SEQ ID NO: 2350037 - RNA, 19 nt, Homo sapiens
  misc_RNA (1)...(19): siRNA sense strand
aacucauacuggagagaga

SEQ ID NO: 2350038 - RNA, 19 nt, Homo sapiens
  misc_RNA (1)...(19): siRNA sense strand
gcgaggaagcagugacucu

SEQ ID NO: 2350039 - RNA, 19 nt, Homo sapiens
  misc_RNA (1)...(19): siRNA sense strand
gaagaaugugggaaagagu

SEQ ID NO: 2350040 - RNA, 19 nt, Homo sapiens
  misc_RNA (1)...(19): siRNA sense strand
aaagguggcuucuggaaaa

SEQ ID NO: 2350041 - RNA, 19 nt, Homo sapiens
  misc_RNA (1)...(19): siRNA sense strand
cuacaauguugagaaggaa

SEQ ID NO: 2350042 - RNA, 19 nt, Homo sapiens
  misc_RNA (1)...(19): siRNA sense strand
guacuuaccuuauucgaca

SEQ ID NO: 2350043 - RNA, 19 nt, Homo sapiens
  misc_RNA (1)...(19): siRNA sense strand
ucagauucuagaagaggaa

SEQ ID NO: 2350044 - RNA, 19 nt, Homo sapiens
  misc_RNA (1)...(19): siRNA sense strand
acaauguugagaaggaaau

SEQ ID NO: 2350045 - RNA, 19 nt, Homo sapiens
  misc_RNA (1)...(19): siRNA sense strand
gcaccaaggaggagggcaa

SEQ ID NO: 2350046 - RNA, 19 nt, Homo sapiens
  misc_RNA (1)...(19): siRNA sense strand
gggaaaacgggcuggagua

SEQ ID NO: 2350047 - RNA, 19 nt, Homo sapiens
  misc_RNA (1)...(19): siRNA sense strand
aggaggagaagcugagcaa

SEQ ID NO: 2350048 - RNA, 19 nt, Homo sapiens
  misc_RNA (1)...(19): siRNA sense strand
aggaggagggcaaguacaa

SEQ ID NO: 2350049 - RNA, 19 nt, Homo sapiens
  misc_RNA (1)...(19): siRNA sense strand
agaaaagacgcuacagcaa

SEQ ID NO: 2350050 - RNA, 19 nt, Homo sapiens
  misc_RNA (1)...(19): siRNA sense strand
ccaccaucgccaagcagaa

SEQ ID NO: 2350051 - RNA, 19 nt, Homo sapiens
  misc_RNA (1)...(19): siRNA sense strand
ggcucaaguacgagggcga

SEQ ID NO: 2350052 - RNA, 19 nt, Homo sapiens
  misc_RNA (1)...(19): siRNA sense strand
cagcaagauccgcgagaag

SEQ ID NO: 2350053 - RNA, 19 nt, Homo sapiens
  misc_RNA (1)...(19): siRNA sense strand
ccuacgugggcgaguggaa

SEQ ID NO: 2350054 - RNA, 19 nt, Homo sapiens
  misc_RNA (1)...(19): siRNA sense strand
agggcaaguacaagcagaa

SEQ ID NO: 2350055 - RNA, 19 nt, Homo sapiens
  misc_RNA (1)...(19): siRNA sense strand
ucgccaagcagaaggcuga

SEQ ID NO: 2350056 - RNA, 19 nt, Homo sapiens
  misc_RNA (1)...(19): siRNA sense strand
acgaagggaccuggagcaa

SEQ ID NO: 2350057 - RNA, 19 nt, Homo sapiens
  misc_RNA (1)...(19): siRNA sense strand
ggauggagaugaaacccuu

SEQ ID NO: 2350058 - RNA, 19 nt, Homo sapiens
  misc_RNA (1)...(19): siRNA sense strand
cccagaacaaggagaacuu

SEQ ID NO: 2350059 - RNA, 19 nt, Homo sapiens
  misc_RNA (1)...(19): siRNA sense strand
cgccaggaucacugccaaa

SEQ ID NO: 2350060 - RNA, 19 nt, Homo sapiens
  misc_RNA (1)...(19): siRNA sense strand
uggagcugcaggaggagaa

SEQ ID NO: 2350061 - RNA, 19 nt, Homo sapiens
  misc_RNA (1)...(19): siRNA sense strand
aggcccagaacaaggagaa

SEQ ID NO: 2350062 - RNA, 19 nt, Homo sapiens
  misc_RNA (1)...(19): siRNA sense strand
gggaaagcacagugaggau

SEQ ID NO: 2350063 - RNA, 19 nt, Homo sapiens
  misc_RNA (1)...(19): siRNA sense strand
ggagaaggacucugggugu

SEQ ID NO: 2350064 - RNA, 19 nt, Homo sapiens
  misc_RNA (1)...(19): siRNA sense strand
acaugaagcugcaaggugu

SEQ ID NO: 2350065 - RNA, 19 nt, Homo sapiens
  misc_RNA (1)...(19): siRNA sense strand
uguuuggacagaagaagaa

SEQ ID NO: 2350066 - RNA, 19 nt, Homo sapiens
  misc_RNA (1)...(19): siRNA sense strand
cgacauuggccaugggauc

SEQ ID NO: 2350067 - RNA, 19 nt, Homo sapiens
  misc_RNA (1)...(19): siRNA sense strand
uggccuaccaggugggcaa

SEQ ID NO: 2350068 - RNA, 19 nt, Homo sapiens
  misc_RNA (1)...(19): siRNA sense strand
cugacuacugcgaggacaa

SEQ ID NO: 2350069 - RNA, 19 nt, Homo sapiens
  misc_RNA (1)...(19): siRNA sense strand
acaccagccagaaggacaa

SEQ ID NO: 2350070 - RNA, 19 nt, Homo sapiens
  misc_RNA (1)...(19): siRNA sense strand
gugaacaugcauauggaga

SEQ ID NO: 2350071 - RNA, 19 nt, Homo sapiens
  misc_RNA (1)...(19): siRNA sense strand
aaucaacagcagaagaaau

SEQ ID NO: 2350072 - RNA, 19 nt, Homo sapiens
  misc_RNA (1)...(19): siRNA sense strand
agaagaaauaccaagagga

SEQ ID NO: 2350073 - RNA, 19 nt, Homo sapiens
  misc_RNA (1)...(19): siRNA sense strand
gaagaaauaccaagaggag

SEQ ID NO: 2350074 - RNA, 19 nt, Homo sapiens
  misc_RNA (1)...(19): siRNA sense strand
uugcuauaguaauuggcua

SEQ ID NO: 2350075 - RNA, 19 nt, Homo sapiens
  misc_RNA (1)...(19): siRNA sense strand
gucuaaagccccaggaaaa

SEQ ID NO: 2350076 - RNA, 19 nt, Homo sapiens
  misc_RNA (1)...(19): siRNA sense strand
aaucaacagcagaagaaau

SEQ ID NO: 2350077 - RNA, 19 nt, Homo sapiens
  misc_RNA (1)...(19): siRNA sense strand
agaagaaauaccaagagga

SEQ ID NO: 2350078 - RNA, 19 nt, Homo sapiens
  misc_RNA (1)...(19): siRNA sense strand
gaagaaauaccaagaggag

SEQ ID NO: 2350079 - RNA, 19 nt, Homo sapiens
  misc_RNA (1)...(19): siRNA sense strand
uugcuauaguaauuggcua

SEQ ID NO: 2350080 - RNA, 19 nt, Homo sapiens
  misc_RNA (1)...(19): siRNA sense strand
aaucaacagcagaagaaau

SEQ ID NO: 2350081 - RNA, 19 nt, Homo sapiens
  misc_RNA (1)...(19): siRNA sense strand
agaagaaauaccaagagga

SEQ ID NO: 2350082 - RNA, 19 nt, Homo sapiens
  misc_RNA (1)...(19): siRNA sense strand
gaagaaauaccaagaggag

SEQ ID NO: 2350083 - RNA, 19 nt, Homo sapiens
  misc_RNA (1)...(19): siRNA sense strand
uugcuauaguaauuggcua

SEQ ID NO: 2350084 - RNA, 19 nt, Homo sapiens
  misc_RNA (1)...(19): siRNA sense strand
ggacacaagcugagaccca

SEQ ID NO: 2350085 - RNA, 19 nt, Homo sapiens
  misc_RNA (1)...(19): siRNA sense strand
ccaggaagccagagccaca

SEQ ID NO: 2350086 - RNA, 19 nt, Homo sapiens
  misc_RNA (1)...(19): siRNA sense strand
ggauugaaauauuugcuga

SEQ ID NO: 2350087 - RNA, 19 nt, Homo sapiens
  misc_RNA (1)...(19): siRNA sense strand
augaaauggcuuuuggaaa

SEQ ID NO: 2350088 - RNA, 19 nt, Homo sapiens
  misc_RNA (1)...(19): siRNA sense strand
ggacuugauucucagccaa

SEQ ID NO: 2350089 - RNA, 19 nt, Homo sapiens
  misc_RNA (1)...(19): siRNA sense strand
auaugcagguggauggaga

SEQ ID NO: 2350090 - RNA, 19 nt, Homo sapiens
  misc_RNA (1)...(19): siRNA sense strand
gcugaaugacacuggaugu

SEQ ID NO: 2350091 - RNA, 19 nt, Homo sapiens
  misc_RNA (1)...(19): siRNA sense strand
agggugggcacaagaguuu

SEQ ID NO: 2350092 - RNA, 19 nt, Homo sapiens
  misc_RNA (1)...(19): siRNA sense strand
agccaaagaaggaggaauu

SEQ ID NO: 2350093 - RNA, 19 nt, Homo sapiens
  misc_RNA (1)...(19): siRNA sense strand
cgggauuuauggagccaaa

SEQ ID NO: 2350094 - RNA, 19 nt, Homo sapiens
  misc_RNA (1)...(19): siRNA sense strand
caucauuacuguugaggga

SEQ ID NO: 2350095 - RNA, 19 nt, Homo sapiens
  misc_RNA (1)...(19): siRNA sense strand
agacaagcgaaaagggaua

SEQ ID NO: 2350096 - RNA, 19 nt, Homo sapiens
  misc_RNA (1)...(19): siRNA sense strand
gcgaaaagggauaggggau

SEQ ID NO: 2350097 - RNA, 19 nt, Homo sapiens
  misc_RNA (1)...(19): siRNA sense strand
agcaggagguagagaguga

SEQ ID NO: 2350098 - RNA, 19 nt, Homo sapiens
  misc_RNA (1)...(19): siRNA sense strand
aggaaaagcugcugcucaa

SEQ ID NO: 2350099 - RNA, 19 nt, Homo sapiens
  misc_RNA (1)...(19): siRNA sense strand
ggcaaggagcaguaugaaa

SEQ ID NO: 2350100 - RNA, 19 nt, Homo sapiens
  misc_RNA (1)...(19): siRNA sense strand
auggagaagagcagggauu

SEQ ID NO: 2350101 - RNA, 19 nt, Homo sapiens
  misc_RNA (1)...(19): siRNA sense strand
ucaguuaccuuaaggguga

SEQ ID NO: 2350102 - RNA, 19 nt, Homo sapiens
  misc_RNA (1)...(19): siRNA sense strand
agguagagagugaggagga

SEQ ID NO: 2350103 - RNA, 19 nt, Homo sapiens
  misc_RNA (1)...(19): siRNA sense strand
agucauagacccagggaug

SEQ ID NO: 2350104 - RNA, 19 nt, Homo sapiens
  misc_RNA (1)...(19): siRNA sense strand
acgaugagauggaaggcga

SEQ ID NO: 2350105 - RNA, 19 nt, Homo sapiens
  misc_RNA (1)...(19): siRNA sense strand
ggacuuagaaaacgagcaa

SEQ ID NO: 2350106 - RNA, 19 nt, Homo sapiens
  misc_RNA (1)...(19): siRNA sense strand
aaguggacgucaagguuau

SEQ ID NO: 2350107 - RNA, 19 nt, Homo sapiens
  misc_RNA (1)...(19): siRNA sense strand
gaucagaagauauggcugu

SEQ ID NO: 2350108 - RNA, 19 nt, Homo sapiens
  misc_RNA (1)...(19): siRNA sense strand
ugguaggaucagaagauau

SEQ ID NO: 2350109 - RNA, 19 nt, Homo sapiens
  misc_RNA (1)...(19): siRNA sense strand
uaugaaaggcugaagcuga

SEQ ID NO: 2350110 - RNA, 19 nt, Homo sapiens
  misc_RNA (1)...(19): siRNA sense strand
uuacuagggaauaggaaaa

SEQ ID NO: 2350111 - RNA, 19 nt, Homo sapiens
  misc_RNA (1)...(19): siRNA sense strand
guagagagugaggaggaaa

SEQ ID NO: 2350112 - RNA, 19 nt, Homo sapiens
  misc_RNA (1)...(19): siRNA sense strand
ucaggaauuuggagagcca

SEQ ID NO: 2350113 - RNA, 19 nt, Homo sapiens
  misc_RNA (1)...(19): siRNA sense strand
cuguugagggacuuagaaa

SEQ ID NO: 2350114 - RNA, 19 nt, Homo sapiens
  misc_RNA (1)...(19): siRNA sense strand
agguuuacuuguucggauu

SEQ ID NO: 2350115 - RNA, 19 nt, Homo sapiens
  misc_RNA (1)...(19): siRNA sense strand
ggauauugacagugaagac

SEQ ID NO: 2350116 - RNA, 19 nt, Homo sapiens
  misc_RNA (1)...(19): siRNA sense strand
ccgcaggccagaugugauu

SEQ ID NO: 2350117 - RNA, 19 nt, Homo sapiens
  misc_RNA (1)...(19): siRNA sense strand
ccggaagcucggagacuga

SEQ ID NO: 2350118 - RNA, 19 nt, Homo sapiens
  misc_RNA (1)...(19): siRNA sense strand
aaauauuacccauuggaga

SEQ ID NO: 2350119 - RNA, 19 nt, Homo sapiens
  misc_RNA (1)...(19): siRNA sense strand
cugaacagauaaagcagga

SEQ ID NO: 2350120 - RNA, 19 nt, Homo sapiens
  misc_RNA (1)...(19): siRNA sense strand
uuuacuagggaauaggaaa

SEQ ID NO: 2350121 - RNA, 19 nt, Homo sapiens
  misc_RNA (1)...(19): siRNA sense strand
ggagagaaguugucugccu

SEQ ID NO: 2350122 - RNA, 19 nt, Homo sapiens
  misc_RNA (1)...(19): siRNA sense strand
gaaaauaaaagcagccuca

SEQ ID NO: 2350123 - RNA, 19 nt, Homo sapiens
  misc_RNA (1)...(19): siRNA sense strand
ccauggaauuaaaagagaa

SEQ ID NO: 2350124 - RNA, 19 nt, Homo sapiens
  misc_RNA (1)...(19): siRNA sense strand
gguauacucccgugagcau

SEQ ID NO: 2350125 - RNA, 19 nt, Homo sapiens
  misc_RNA (1)...(19): siRNA sense strand
cuucagaauccuugaccga

SEQ ID NO: 2350126 - RNA, 19 nt, Homo sapiens
  misc_RNA (1)...(19): siRNA sense strand
uggcuguggaccagaguau

SEQ ID NO: 2350127 - RNA, 19 nt, Homo sapiens
  misc_RNA (1)...(19): siRNA sense strand
cagcagauggcaaggagca

SEQ ID NO: 2350128 - RNA, 19 nt, Homo sapiens
  misc_RNA (1)...(19): siRNA sense strand
gagcaguaugaaaggcuga

SEQ ID NO: 2350129 - RNA, 19 nt, Homo sapiens
  misc_RNA (1)...(19): siRNA sense strand
cgauggagucauagaccca

SEQ ID NO: 2350130 - RNA, 19 nt, Homo sapiens
  misc_RNA (1)...(19): siRNA sense strand
uagagagugaggaggaaaa

SEQ ID NO: 2350131 - RNA, 19 nt, Homo sapiens
  misc_RNA (1)...(19): siRNA sense strand
gagccaaagaaggaggaau

SEQ ID NO: 2350132 - RNA, 19 nt, Homo sapiens
  misc_RNA (1)...(19): siRNA sense strand
cgaucaacuccauguguca

SEQ ID NO: 2350133 - RNA, 19 nt, Homo sapiens
  misc_RNA (1)...(19): siRNA sense strand
ccguucaggugcucaggaa

SEQ ID NO: 2350134 - RNA, 19 nt, Homo sapiens
  misc_RNA (1)...(19): siRNA sense strand
uggaaucugccauggaauu

SEQ ID NO: 2350135 - RNA, 19 nt, Homo sapiens
  misc_RNA (1)...(19): siRNA sense strand
aagauauggcuguggacca

SEQ ID NO: 2350136 - RNA, 19 nt, Homo sapiens
  misc_RNA (1)...(19): siRNA sense strand
gucaguagcuucugggcca

SEQ ID NO: 2350137 - RNA, 19 nt, Homo sapiens
  misc_RNA (1)...(19): siRNA sense strand
cgaaaagggauaggggauu

SEQ ID NO: 2350138 - RNA, 19 nt, Homo sapiens
  misc_RNA (1)...(19): siRNA sense strand
acgucuaccugguggagca

SEQ ID NO: 2350139 - RNA, 19 nt, Homo sapiens
  misc_RNA (1)...(19): siRNA sense strand
ccuuaagggugauaauuuu

SEQ ID NO: 2350140 - RNA, 19 nt, Homo sapiens
  misc_RNA (1)...(19): siRNA sense strand
acugaaacgcaaacugauu

SEQ ID NO: 2350141 - RNA, 19 nt, Homo sapiens
  misc_RNA (1)...(19): siRNA sense strand
cagauggcaaggagcagua

SEQ ID NO: 2350142 - RNA, 19 nt, Homo sapiens
  misc_RNA (1)...(19): siRNA sense strand
gccucuacuuugaaaauaa

SEQ ID NO: 2350143 - RNA, 19 nt, Homo sapiens
  misc_RNA (1)...(19): siRNA sense strand
agaaggacacaaagccgaa

SEQ ID NO: 2350144 - RNA, 19 nt, Homo sapiens
  misc_RNA (1)...(19): siRNA sense strand
caggcgugauuaugaaaca

SEQ ID NO: 2350145 - RNA, 19 nt, Homo sapiens
  misc_RNA (1)...(19): siRNA sense strand
agccaaagaaggaggaauu

SEQ ID NO: 2350146 - RNA, 19 nt, Homo sapiens
  misc_RNA (1)...(19): siRNA sense strand
cgggauuuauggagccaaa

SEQ ID NO: 2350147 - RNA, 19 nt, Homo sapiens
  misc_RNA (1)...(19): siRNA sense strand
caucauuacuguugaggga

SEQ ID NO: 2350148 - RNA, 19 nt, Homo sapiens
  misc_RNA (1)...(19): siRNA sense strand
agacaagcgaaaagggaua

SEQ ID NO: 2350149 - RNA, 19 nt, Homo sapiens
  misc_RNA (1)...(19): siRNA sense strand
gcgaaaagggauaggggau

SEQ ID NO: 2350150 - RNA, 19 nt, Homo sapiens
  misc_RNA (1)...(19): siRNA sense strand
agcaggagguagagaguga

SEQ ID NO: 2350151 - RNA, 19 nt, Homo sapiens
  misc_RNA (1)...(19): siRNA sense strand
aggaaaagcugcugcucaa

SEQ ID NO: 2350152 - RNA, 19 nt, Homo sapiens
  misc_RNA (1)...(19): siRNA sense strand
auggagaagagcagggauu

SEQ ID NO: 2350153 - RNA, 19 nt, Homo sapiens
  misc_RNA (1)...(19): siRNA sense strand
agguagagagugaggagga

SEQ ID NO: 2350154 - RNA, 19 nt, Homo sapiens
  misc_RNA (1)...(19): siRNA sense strand
agucauagacccagggaug

SEQ ID NO: 2350155 - RNA, 19 nt, Homo sapiens
  misc_RNA (1)...(19): siRNA sense strand
acgaugagauggaaggcga

SEQ ID NO: 2350156 - RNA, 19 nt, Homo sapiens
  misc_RNA (1)...(19): siRNA sense strand
ggacuuagaaaacgagcaa

SEQ ID NO: 2350157 - RNA, 19 nt, Homo sapiens
  misc_RNA (1)...(19): siRNA sense strand
aaguggacgucaagguuau

SEQ ID NO: 2350158 - RNA, 19 nt, Homo sapiens
  misc_RNA (1)...(19): siRNA sense strand
gaucagaagauauggcugu

SEQ ID NO: 2350159 - RNA, 19 nt, Homo sapiens
  misc_RNA (1)...(19): siRNA sense strand
ugguaggaucagaagauau

SEQ ID NO: 2350160 - RNA, 19 nt, Homo sapiens
  misc_RNA (1)...(19): siRNA sense strand
uuacuagggaauaggaaaa

SEQ ID NO: 2350161 - RNA, 19 nt, Homo sapiens
  misc_RNA (1)...(19): siRNA sense strand
guagagagugaggaggaaa

SEQ ID NO: 2350162 - RNA, 19 nt, Homo sapiens
  misc_RNA (1)...(19): siRNA sense strand
ucaggaauuuggagagcca

SEQ ID NO: 2350163 - RNA, 19 nt, Homo sapiens
  misc_RNA (1)...(19): siRNA sense strand
cuguugagggacuuagaaa

SEQ ID NO: 2350164 - RNA, 19 nt, Homo sapiens
  misc_RNA (1)...(19): siRNA sense strand
ggauauugacagugaagac

SEQ ID NO: 2350165 - RNA, 19 nt, Homo sapiens
  misc_RNA (1)...(19): siRNA sense strand
ccgcaggccagaugugauu

SEQ ID NO: 2350166 - RNA, 19 nt, Homo sapiens
  misc_RNA (1)...(19): siRNA sense strand
ccggaagcucggagacuga

SEQ ID NO: 2350167 - RNA, 19 nt, Homo sapiens
  misc_RNA (1)...(19): siRNA sense strand
aaauauuacccauuggaga

SEQ ID NO: 2350168 - RNA, 19 nt, Homo sapiens
  misc_RNA (1)...(19): siRNA sense strand
cugaacagauaaagcagga

SEQ ID NO: 2350169 - RNA, 19 nt, Homo sapiens
  misc_RNA (1)...(19): siRNA sense strand
uuuacuagggaauaggaaa

SEQ ID NO: 2350170 - RNA, 19 nt, Homo sapiens
  misc_RNA (1)...(19): siRNA sense strand
ggagagaaguugucugccu

SEQ ID NO: 2350171 - RNA, 19 nt, Homo sapiens
  misc_RNA (1)...(19): siRNA sense strand
gaaaauaaaagcagccuca

SEQ ID NO: 2350172 - RNA, 19 nt, Homo sapiens
  misc_RNA (1)...(19): siRNA sense strand
ccauggaauuaaaagagaa

SEQ ID NO: 2350173 - RNA, 19 nt, Homo sapiens
  misc_RNA (1)...(19): siRNA sense strand
gguauacucccgugagcau

SEQ ID NO: 2350174 - RNA, 19 nt, Homo sapiens
  misc_RNA (1)...(19): siRNA sense strand
cuucagaauccuugaccga

SEQ ID NO: 2350175 - RNA, 19 nt, Homo sapiens
  misc_RNA (1)...(19): siRNA sense strand
uggcuguggaccagaguau

SEQ ID NO: 2350176 - RNA, 19 nt, Homo sapiens
  misc_RNA (1)...(19): siRNA sense strand
cgauggagucauagaccca

SEQ ID NO: 2350177 - RNA, 19 nt, Homo sapiens
  misc_RNA (1)...(19): siRNA sense strand
uagagagugaggaggaaaa

SEQ ID NO: 2350178 - RNA, 19 nt, Homo sapiens
  misc_RNA (1)...(19): siRNA sense strand
gagccaaagaaggaggaau

SEQ ID NO: 2350179 - RNA, 19 nt, Homo sapiens
  misc_RNA (1)...(19): siRNA sense strand
cgaucaacuccauguguca

SEQ ID NO: 2350180 - RNA, 19 nt, Homo sapiens
  misc_RNA (1)...(19): siRNA sense strand
ccguucaggugcucaggaa

SEQ ID NO: 2350181 - RNA, 19 nt, Homo sapiens
  misc_RNA (1)...(19): siRNA sense strand
uggaaucugccauggaauu

SEQ ID NO: 2350182 - RNA, 19 nt, Homo sapiens
  misc_RNA (1)...(19): siRNA sense strand
aagauauggcuguggacca

SEQ ID NO: 2350183 - RNA, 19 nt, Homo sapiens
  misc_RNA (1)...(19): siRNA sense strand
gucaguagcuucugggcca

SEQ ID NO: 2350184 - RNA, 19 nt, Homo sapiens
  misc_RNA (1)...(19): siRNA sense strand
cgaaaagggauaggggauu

SEQ ID NO: 2350185 - RNA, 19 nt, Homo sapiens
  misc_RNA (1)...(19): siRNA sense strand
acgucuaccugguggagca

SEQ ID NO: 2350186 - RNA, 19 nt, Homo sapiens
  misc_RNA (1)...(19): siRNA sense strand
acugaaacgcaaacugauu

SEQ ID NO: 2350187 - RNA, 19 nt, Homo sapiens
  misc_RNA (1)...(19): siRNA sense strand
gccucuacuuugaaaauaa

SEQ ID NO: 2350188 - RNA, 19 nt, Homo sapiens
  misc_RNA (1)...(19): siRNA sense strand
agaaggacacaaagccgaa

SEQ ID NO: 2350189 - RNA, 19 nt, Homo sapiens
  misc_RNA (1)...(19): siRNA sense strand
caggcgugauuaugaaaca

SEQ ID NO: 2350190 - RNA, 19 nt, Homo sapiens
  misc_RNA (1)...(19): siRNA sense strand
cugaaagaggcgauugaaa

SEQ ID NO: 2350191 - RNA, 19 nt, Homo sapiens
  misc_RNA (1)...(19): siRNA sense strand
cuggaaucuuugagaccaa

SEQ ID NO: 2350192 - RNA, 19 nt, Homo sapiens
  misc_RNA (1)...(19): siRNA sense strand
agaaaguccuugcugggaa

SEQ ID NO: 2350193 - RNA, 19 nt, Homo sapiens
  misc_RNA (1)...(19): siRNA sense strand
ccugcauguuaauggguuu

SEQ ID NO: 2350194 - RNA, 19 nt, Homo sapiens
  misc_RNA (1)...(19): siRNA sense strand
ccaaguacuucauucgaga

SEQ ID NO: 2350195 - RNA, 19 nt, Homo sapiens
  misc_RNA (1)...(19): siRNA sense strand
uggucauccgggaggacaa

SEQ ID NO: 2350196 - RNA, 19 nt, Homo sapiens
  misc_RNA (1)...(19): siRNA sense strand
cugaaagaggcgauugaaa

SEQ ID NO: 2350197 - RNA, 19 nt, Homo sapiens
  misc_RNA (1)...(19): siRNA sense strand
cuggaaucuuugagaccaa

SEQ ID NO: 2350198 - RNA, 19 nt, Homo sapiens
  misc_RNA (1)...(19): siRNA sense strand
agaaaguccuugcugggaa

SEQ ID NO: 2350199 - RNA, 19 nt, Homo sapiens
  misc_RNA (1)...(19): siRNA sense strand
agaucugcucgcugagaaa

SEQ ID NO: 2350200 - RNA, 19 nt, Homo sapiens
  misc_RNA (1)...(19): siRNA sense strand
ccugcauguuaauggguuu

SEQ ID NO: 2350201 - RNA, 19 nt, Homo sapiens
  misc_RNA (1)...(19): siRNA sense strand
ccaaguacuucauucgaga

SEQ ID NO: 2350202 - RNA, 19 nt, Homo sapiens
  misc_RNA (1)...(19): siRNA sense strand
ugaucaagcaggcugacua

SEQ ID NO: 2350203 - RNA, 19 nt, Homo sapiens
  misc_RNA (1)...(19): siRNA sense strand
gaucaagcaggcugacuau

SEQ ID NO: 2350204 - RNA, 19 nt, Homo sapiens
  misc_RNA (1)...(19): siRNA sense strand
cuguggacacugagaacau

SEQ ID NO: 2350205 - RNA, 19 nt, Homo sapiens
  misc_RNA (1)...(19): siRNA sense strand
uggucauccgggaggacaa

SEQ ID NO: 2350206 - RNA, 19 nt, Homo sapiens
  misc_RNA (1)...(19): siRNA sense strand
cugaaagaggcgauugaaa

SEQ ID NO: 2350207 - RNA, 19 nt, Homo sapiens
  misc_RNA (1)...(19): siRNA sense strand
cuggaaucuuugagaccaa

SEQ ID NO: 2350208 - RNA, 19 nt, Homo sapiens
  misc_RNA (1)...(19): siRNA sense strand
agaaaguccuugcugggaa

SEQ ID NO: 2350209 - RNA, 19 nt, Homo sapiens
  misc_RNA (1)...(19): siRNA sense strand
ccugcauguuaauggguuu

SEQ ID NO: 2350210 - RNA, 19 nt, Homo sapiens
  misc_RNA (1)...(19): siRNA sense strand
ccaaguacuucauucgaga

SEQ ID NO: 2350211 - RNA, 19 nt, Homo sapiens
  misc_RNA (1)...(19): siRNA sense strand
uggucauccgggaggacaa

SEQ ID NO: 2350212 - RNA, 19 nt, Homo sapiens
  misc_RNA (1)...(19): siRNA sense strand
guucauaggccgagcagca

SEQ ID NO: 2350213 - RNA, 19 nt, Homo sapiens
  misc_RNA (1)...(19): siRNA sense strand
gcccauuguacgugcuaaa

SEQ ID NO: 2350214 - RNA, 19 nt, Homo sapiens
  misc_RNA (1)...(19): siRNA sense strand
cgaaauggacagaagguac

SEQ ID NO: 2350215 - RNA, 19 nt, Homo sapiens
  misc_RNA (1)...(19): siRNA sense strand
agagcuacuuugaggagau

SEQ ID NO: 2350216 - RNA, 19 nt, Homo sapiens
  misc_RNA (1)...(19): siRNA sense strand
ggaacaaggcacugggcac

SEQ ID NO: 2350217 - RNA, 19 nt, Homo sapiens
  misc_RNA (1)...(19): siRNA sense strand
acguaaggaugacgcaaaa

SEQ ID NO: 2350218 - RNA, 19 nt, Homo sapiens
  misc_RNA (1)...(19): siRNA sense strand
acgcaaaaguucacaagau

SEQ ID NO: 2350219 - RNA, 19 nt, Homo sapiens
  misc_RNA (1)...(19): siRNA sense strand
ccgcugaagcacaugguga

SEQ ID NO: 2350220 - RNA, 19 nt, Homo sapiens
  misc_RNA (1)...(19): siRNA sense strand
cgcugaagcacauggugaa

SEQ ID NO: 2350221 - RNA, 19 nt, Homo sapiens
  misc_RNA (1)...(19): siRNA sense strand
aggaggaggcucuggcuga

SEQ ID NO: 2350222 - RNA, 19 nt, Homo sapiens
  misc_RNA (1)...(19): siRNA sense strand
uggagaaggaagugcccau

SEQ ID NO: 2350223 - RNA, 19 nt, Homo sapiens
  misc_RNA (1)...(19): siRNA sense strand
ccgaaauggacagaaggua

SEQ ID NO: 2350224 - RNA, 19 nt, Homo sapiens
  misc_RNA (1)...(19): siRNA sense strand
gugaaugcccagcuggaga

SEQ ID NO: 2350225 - RNA, 19 nt, Homo sapiens
  misc_RNA (1)...(19): siRNA sense strand
gcaaggcaaaugagcccaa

SEQ ID NO: 2350226 - RNA, 19 nt, Homo sapiens
  misc_RNA (1)...(19): siRNA sense strand
guucauaggccgagcagca

SEQ ID NO: 2350227 - RNA, 19 nt, Homo sapiens
  misc_RNA (1)...(19): siRNA sense strand
gcccauuguacgugcuaaa

SEQ ID NO: 2350228 - RNA, 19 nt, Homo sapiens
  misc_RNA (1)...(19): siRNA sense strand
cuguucaccucgagagaga

SEQ ID NO: 2350229 - RNA, 19 nt, Homo sapiens
  misc_RNA (1)...(19): siRNA sense strand
cgaaauggacagaagguac

SEQ ID NO: 2350230 - RNA, 19 nt, Homo sapiens
  misc_RNA (1)...(19): siRNA sense strand
agagcuacuuugaggagau

SEQ ID NO: 2350231 - RNA, 19 nt, Homo sapiens
  misc_RNA (1)...(19): siRNA sense strand
ggaacaaggcacugggcac

SEQ ID NO: 2350232 - RNA, 19 nt, Homo sapiens
  misc_RNA (1)...(19): siRNA sense strand
acguaaggaugacgcaaaa

SEQ ID NO: 2350233 - RNA, 19 nt, Homo sapiens
  misc_RNA (1)...(19): siRNA sense strand
acgcaaaaguucacaagau

SEQ ID NO: 2350234 - RNA, 19 nt, Homo sapiens
  misc_RNA (1)...(19): siRNA sense strand
ccgcugaagcacaugguga

SEQ ID NO: 2350235 - RNA, 19 nt, Homo sapiens
  misc_RNA (1)...(19): siRNA sense strand
cgcugaagcacauggugaa

SEQ ID NO: 2350236 - RNA, 19 nt, Homo sapiens
  misc_RNA (1)...(19): siRNA sense strand
cucgagagagagagagaga

SEQ ID NO: 2350237 - RNA, 19 nt, Homo sapiens
  misc_RNA (1)...(19): siRNA sense strand
aggaggaggcucuggcuga

SEQ ID NO: 2350238 - RNA, 19 nt, Homo sapiens
  misc_RNA (1)...(19): siRNA sense strand
uggagaaggaagugcccau

SEQ ID NO: 2350239 - RNA, 19 nt, Homo sapiens
  misc_RNA (1)...(19): siRNA sense strand
ccgaaauggacagaaggua

SEQ ID NO: 2350240 - RNA, 19 nt, Homo sapiens
  misc_RNA (1)...(19): siRNA sense strand
gugaaugcccagcuggaga

SEQ ID NO: 2350241 - RNA, 19 nt, Homo sapiens
  misc_RNA (1)...(19): siRNA sense strand
gcaaggcaaaugagcccaa

SEQ ID NO: 2350242 - RNA, 19 nt, Homo sapiens
  misc_RNA (1)...(19): siRNA sense strand
gggcauuugaggaaagcaa

SEQ ID NO: 2350243 - RNA, 19 nt, Homo sapiens
  misc_RNA (1)...(19): siRNA sense strand
cgucugaugauaaggaaau

SEQ ID NO: 2350244 - RNA, 19 nt, Homo sapiens
  misc_RNA (1)...(19): siRNA sense strand
guuuauuccuggauggaga

SEQ ID NO: 2350245 - RNA, 19 nt, Homo sapiens
  misc_RNA (1)...(19): siRNA sense strand
gcaaaauagaugagcacca

SEQ ID NO: 2350246 - RNA, 19 nt, Homo sapiens
  misc_RNA (1)...(19): siRNA sense strand
cgaaaugguacaaagucau

SEQ ID NO: 2350247 - RNA, 19 nt, Homo sapiens
  misc_RNA (1)...(19): siRNA sense strand
accaacaaagaaugggaaa

SEQ ID NO: 2350248 - RNA, 19 nt, Homo sapiens
  misc_RNA (1)...(19): siRNA sense strand
ugguguuggacuaggauuu

SEQ ID NO: 2350249 - RNA, 19 nt, Homo sapiens
  misc_RNA (1)...(19): siRNA sense strand
aagaacugcaaaaggaaaa

SEQ ID NO: 2350250 - RNA, 19 nt, Homo sapiens
  misc_RNA (1)...(19): siRNA sense strand
uggauauaggccaaguuua

SEQ ID NO: 2350251 - RNA, 19 nt, Homo sapiens
  misc_RNA (1)...(19): siRNA sense strand
uggauggagaggaagaaaa

SEQ ID NO: 2350252 - RNA, 19 nt, Homo sapiens
  misc_RNA (1)...(19): siRNA sense strand
uaaggaaauuaguugcaga

SEQ ID NO: 2350253 - RNA, 19 nt, Homo sapiens
  misc_RNA (1)...(19): siRNA sense strand
cugcaaguuggaauugaua

SEQ ID NO: 2350254 - RNA, 19 nt, Homo sapiens
  misc_RNA (1)...(19): siRNA sense strand
acaaaguuccagagcuaca

SEQ ID NO: 2350255 - RNA, 19 nt, Homo sapiens
  misc_RNA (1)...(19): siRNA sense strand
ccagaaagcugauggugug

SEQ ID NO: 2350256 - RNA, 19 nt, Homo sapiens
  misc_RNA (1)...(19): siRNA sense strand
gccuauagcccgcagggau

SEQ ID NO: 2350257 - RNA, 19 nt, Homo sapiens
  misc_RNA (1)...(19): siRNA sense strand
cuacaaguuuaguggcuuc

SEQ ID NO: 2350258 - RNA, 19 nt, Homo sapiens
  misc_RNA (1)...(19): siRNA sense strand
ccgacaaggaggaggagga

SEQ ID NO: 2350259 - RNA, 19 nt, Homo sapiens
  misc_RNA (1)...(19): siRNA sense strand
ccaucauaauugugagcca

SEQ ID NO: 2350260 - RNA, 19 nt, Homo sapiens
  misc_RNA (1)...(19): siRNA sense strand
aggaggaggaggacacuga

SEQ ID NO: 2350261 - RNA, 19 nt, Homo sapiens
  misc_RNA (1)...(19): siRNA sense strand
ucucaaucaagcaguguau

SEQ ID NO: 2350262 - RNA, 19 nt, Homo sapiens
  misc_RNA (1)...(19): siRNA sense strand
cacaaauucaccagaucaa

SEQ ID NO: 2350263 - RNA, 19 nt, Homo sapiens
  misc_RNA (1)...(19): siRNA sense strand
cacaaauucaccagaucaa

SEQ ID NO: 2350264 - RNA, 19 nt, Homo sapiens
  misc_RNA (1)...(19): siRNA sense strand
cacaaauucaccagaucaa

SEQ ID NO: 2350265 - RNA, 19 nt, Homo sapiens
  misc_RNA (1)...(19): siRNA sense strand
acgccaaggcauuaagaaa

SEQ ID NO: 2350266 - RNA, 19 nt, Homo sapiens
  misc_RNA (1)...(19): siRNA sense strand
aggcagacgccaaggcauu

SEQ ID NO: 2350267 - RNA, 19 nt, Homo sapiens
  misc_RNA (1)...(19): siRNA sense strand
ccagaaacacggaggcugu

SEQ ID NO: 2350268 - RNA, 19 nt, Homo sapiens
  misc_RNA (1)...(19): siRNA sense strand
cgccaaggcauuaagaaaa

SEQ ID NO: 2350269 - RNA, 19 nt, Homo sapiens
  misc_RNA (1)...(19): siRNA sense strand
uggaaagucaucaggcaga

SEQ ID NO: 2350270 - RNA, 19 nt, Homo sapiens
  misc_RNA (1)...(19): siRNA sense strand
gguggaaagucaucaggca

SEQ ID NO: 2350271 - RNA, 19 nt, Homo sapiens
  misc_RNA (1)...(19): siRNA sense strand
uuaagaaaauggaagguca

SEQ ID NO: 2350272 - RNA, 19 nt, Homo sapiens
  misc_RNA (1)...(19): siRNA sense strand
ccagaaacacggaggcugu

SEQ ID NO: 2350273 - RNA, 19 nt, Homo sapiens
  misc_RNA (1)...(19): siRNA sense strand
acgccaaggcauuaagaaa

SEQ ID NO: 2350274 - RNA, 19 nt, Homo sapiens
  misc_RNA (1)...(19): siRNA sense strand
aggcagacgccaaggcauu

SEQ ID NO: 2350275 - RNA, 19 nt, Homo sapiens
  misc_RNA (1)...(19): siRNA sense strand
cgccaaggcauuaagaaaa

SEQ ID NO: 2350276 - RNA, 19 nt, Homo sapiens
  misc_RNA (1)...(19): siRNA sense strand
uggaaagucaucaggcaga

SEQ ID NO: 2350277 - RNA, 19 nt, Homo sapiens
  misc_RNA (1)...(19): siRNA sense strand
gguggaaagucaucaggca

SEQ ID NO: 2350278 - RNA, 19 nt, Homo sapiens
  misc_RNA (1)...(19): siRNA sense strand
uuaagaaaauggaagguca

SEQ ID NO: 2350279 - RNA, 19 nt, Homo sapiens
  misc_RNA (1)...(19): siRNA sense strand
ggugacagcuuuaggcaac

SEQ ID NO: 2350280 - RNA, 19 nt, Homo sapiens
  misc_RNA (1)...(19): siRNA sense strand
ccucauguggcuaaauauu

SEQ ID NO: 2350281 - RNA, 19 nt, Homo sapiens
  misc_RNA (1)...(19): siRNA sense strand
cuaucaaguuggccaagau

SEQ ID NO: 2350282 - RNA, 19 nt, Homo sapiens
  misc_RNA (1)...(19): siRNA sense strand
ggugacagcuuuaggcaac

SEQ ID NO: 2350283 - RNA, 19 nt, Homo sapiens
  misc_RNA (1)...(19): siRNA sense strand
ccucauguggcuaaauauu

SEQ ID NO: 2350284 - RNA, 19 nt, Homo sapiens
  misc_RNA (1)...(19): siRNA sense strand
cuaucaaguuggccaagau

SEQ ID NO: 2350285 - RNA, 19 nt, Homo sapiens
  misc_RNA (1)...(19): siRNA sense strand
ggugacagcuuuaggcaac

SEQ ID NO: 2350286 - RNA, 19 nt, Homo sapiens
  misc_RNA (1)...(19): siRNA sense strand
ggccaagaucugaccguga

SEQ ID NO: 2350287 - RNA, 19 nt, Homo sapiens
  misc_RNA (1)...(19): siRNA sense strand
cuaucaaguuggccaagau

SEQ ID NO: 2350288 - RNA, 19 nt, Homo sapiens
  misc_RNA (1)...(19): siRNA sense strand
ggugacagcuuuaggcaac

SEQ ID NO: 2350289 - RNA, 19 nt, Homo sapiens
  misc_RNA (1)...(19): siRNA sense strand
cuaucaaguuggccaagau

SEQ ID NO: 2350290 - RNA, 19 nt, Homo sapiens
  misc_RNA (1)...(19): siRNA sense strand
cagagauagagaugagaca

SEQ ID NO: 2350291 - RNA, 19 nt, Homo sapiens
  misc_RNA (1)...(19): siRNA sense strand
aagugaagccucuggccua

SEQ ID NO: 2350292 - RNA, 19 nt, Homo sapiens
  misc_RNA (1)...(19): siRNA sense strand
acgaugaguaugaagucaa

SEQ ID NO: 2350293 - RNA, 19 nt, Homo sapiens
  misc_RNA (1)...(19): siRNA sense strand
aggcagaaggcaaacuaau

SEQ ID NO: 2350294 - RNA, 19 nt, Homo sapiens
  misc_RNA (1)...(19): siRNA sense strand
uugagaaggaggugggcca

SEQ ID NO: 2350295 - RNA, 19 nt, Homo sapiens
  misc_RNA (1)...(19): siRNA sense strand
cgauaggaaaggaagaucu

SEQ ID NO: 2350296 - RNA, 19 nt, Homo sapiens
  misc_RNA (1)...(19): siRNA sense strand
cgucacuguuggaagaagu

SEQ ID NO: 2350297 - RNA, 19 nt, Homo sapiens
  misc_RNA (1)...(19): siRNA sense strand
acauaagugucaugcagca

SEQ ID NO: 2350298 - RNA, 19 nt, Homo sapiens
  misc_RNA (1)...(19): siRNA sense strand
guaugaagucaaagugaag

SEQ ID NO: 2350299 - RNA, 19 nt, Homo sapiens
  misc_RNA (1)...(19): siRNA sense strand
agucagaaggugugaauca

SEQ ID NO: 2350300 - RNA, 19 nt, Homo sapiens
  misc_RNA (1)...(19): siRNA sense strand
caucaugaccacagugcaa

SEQ ID NO: 2350301 - RNA, 19 nt, Homo sapiens
  misc_RNA (1)...(19): siRNA sense strand
ggugauagcuccagcccuu

SEQ ID NO: 2350302 - RNA, 19 nt, Homo sapiens
  misc_RNA (1)...(19): siRNA sense strand
cugagaacauugaagguga

SEQ ID NO: 2350303 - RNA, 19 nt, Homo sapiens
  misc_RNA (1)...(19): siRNA sense strand
gagagauguuggagagcgu

SEQ ID NO: 2350304 - RNA, 19 nt, Homo sapiens
  misc_RNA (1)...(19): siRNA sense strand
gacaaugagauuuggaaca

SEQ ID NO: 2350305 - RNA, 19 nt, Homo sapiens
  misc_RNA (1)...(19): siRNA sense strand
gaaugaagucagaaggugu

SEQ ID NO: 2350306 - RNA, 19 nt, Homo sapiens
  misc_RNA (1)...(19): siRNA sense strand
cagaaacggcacauggaau

SEQ ID NO: 2350307 - RNA, 19 nt, Homo sapiens
  misc_RNA (1)...(19): siRNA sense strand
gguucaguucaaagauuua

SEQ ID NO: 2350308 - RNA, 19 nt, Homo sapiens
  misc_RNA (1)...(19): siRNA sense strand
ugacgaaagaagaaauuca

SEQ ID NO: 2350309 - RNA, 19 nt, Homo sapiens
  misc_RNA (1)...(19): siRNA sense strand
cuggaagacgagaugcaaa

SEQ ID NO: 2350310 - RNA, 19 nt, Homo sapiens
  misc_RNA (1)...(19): siRNA sense strand
uggaagacgagaugcaaaa

SEQ ID NO: 2350311 - RNA, 19 nt, Homo sapiens
  misc_RNA (1)...(19): siRNA sense strand
agaauauuguugaugccua

SEQ ID NO: 2350312 - RNA, 19 nt, Homo sapiens
  misc_RNA (1)...(19): siRNA sense strand
gagaguuacaggaagccaa

SEQ ID NO: 2350313 - RNA, 19 nt, Homo sapiens
  misc_RNA (1)...(19): siRNA sense strand
gcagagagauguuggagag

SEQ ID NO: 2350314 - RNA, 19 nt, Homo sapiens
  misc_RNA (1)...(19): siRNA sense strand
ggugugaucaacagggaga

SEQ ID NO: 2350315 - RNA, 19 nt, Homo sapiens
  misc_RNA (1)...(19): siRNA sense strand
augugaggcuggaagauuu

SEQ ID NO: 2350316 - RNA, 19 nt, Homo sapiens
  misc_RNA (1)...(19): siRNA sense strand
ugucggugauccugggaau

SEQ ID NO: 2350317 - RNA, 19 nt, Homo sapiens
  misc_RNA (1)...(19): siRNA sense strand
ucuacaaacaucagcaaga

SEQ ID NO: 2350318 - RNA, 19 nt, Homo sapiens
  misc_RNA (1)...(19): siRNA sense strand
ucggauugguucaguucaa

SEQ ID NO: 2350319 - RNA, 19 nt, Homo sapiens
  misc_RNA (1)...(19): siRNA sense strand
agaacugacagaacugaaa

SEQ ID NO: 2350320 - RNA, 19 nt, Homo sapiens
  misc_RNA (1)...(19): siRNA sense strand
uggaggauccugugacgaa

SEQ ID NO: 2350321 - RNA, 19 nt, Homo sapiens
  misc_RNA (1)...(19): siRNA sense strand
gcgaaucugccgaggaaac

SEQ ID NO: 2350322 - RNA, 19 nt, Homo sapiens
  misc_RNA (1)...(19): siRNA sense strand
ggcagaaaaucaagaagau

SEQ ID NO: 2350323 - RNA, 19 nt, Homo sapiens
  misc_RNA (1)...(19): siRNA sense strand
caagagggcacuggagcaa

SEQ ID NO: 2350324 - RNA, 19 nt, Homo sapiens
  misc_RNA (1)...(19): siRNA sense strand
cccagaagacagacaauga

SEQ ID NO: 2350325 - RNA, 19 nt, Homo sapiens
  misc_RNA (1)...(19): siRNA sense strand
ccguuuauucuuagagcca

SEQ ID NO: 2350326 - RNA, 19 nt, Homo sapiens
  misc_RNA (1)...(19): siRNA sense strand
ugaucaacagggagaggau

SEQ ID NO: 2350327 - RNA, 19 nt, Homo sapiens
  misc_RNA (1)...(19): siRNA sense strand
ucaaggugcagaagaugaa

SEQ ID NO: 2350328 - RNA, 19 nt, Homo sapiens
  misc_RNA (1)...(19): siRNA sense strand
cggcagcuaccgggagaua

SEQ ID NO: 2350329 - RNA, 19 nt, Homo sapiens
  misc_RNA (1)...(19): siRNA sense strand
cugaagugcucuggacuau

SEQ ID NO: 2350330 - RNA, 19 nt, Homo sapiens
  misc_RNA (1)...(19): siRNA sense strand
guuuggagacuguggucau

SEQ ID NO: 2350331 - RNA, 19 nt, Homo sapiens
  misc_RNA (1)...(19): siRNA sense strand
cgaccauggagaagaguuc

SEQ ID NO: 2350332 - RNA, 19 nt, Homo sapiens
  misc_RNA (1)...(19): siRNA sense strand
ucugaagugcucuggacua

SEQ ID NO: 2350333 - RNA, 19 nt, Homo sapiens
  misc_RNA (1)...(19): siRNA sense strand
agaagaugccacugagaac

SEQ ID NO: 2350334 - RNA, 19 nt, Homo sapiens
  misc_RNA (1)...(19): siRNA sense strand
cugaaauaccuccugaaga

SEQ ID NO: 2350335 - RNA, 19 nt, Homo sapiens
  misc_RNA (1)...(19): siRNA sense strand
gugcagaagaugaaagcug

SEQ ID NO: 2350336 - RNA, 19 nt, Homo sapiens
  misc_RNA (1)...(19): siRNA sense strand
cagaagacagacaaugaga

SEQ ID NO: 2350337 - RNA, 19 nt, Homo sapiens
  misc_RNA (1)...(19): siRNA sense strand
ugugauggguuucgagcca

SEQ ID NO: 2350338 - RNA, 19 nt, Homo sapiens
  misc_RNA (1)...(19): siRNA sense strand
auaugaaugugaacagcuu

SEQ ID NO: 2350339 - RNA, 19 nt, Homo sapiens
  misc_RNA (1)...(19): siRNA sense strand
agucagaaggugugaauca

SEQ ID NO: 2350340 - RNA, 19 nt, Homo sapiens
  misc_RNA (1)...(19): siRNA sense strand
caucaugaccacagugcaa

SEQ ID NO: 2350341 - RNA, 19 nt, Homo sapiens
  misc_RNA (1)...(19): siRNA sense strand
ggugauagcuccagcccuu

SEQ ID NO: 2350342 - RNA, 19 nt, Homo sapiens
  misc_RNA (1)...(19): siRNA sense strand
cugagaacauugaagguga

SEQ ID NO: 2350343 - RNA, 19 nt, Homo sapiens
  misc_RNA (1)...(19): siRNA sense strand
gagagauguuggagagcgu

SEQ ID NO: 2350344 - RNA, 19 nt, Homo sapiens
  misc_RNA (1)...(19): siRNA sense strand
gacaaugagauuuggaaca

SEQ ID NO: 2350345 - RNA, 19 nt, Homo sapiens
  misc_RNA (1)...(19): siRNA sense strand
gaaugaagucagaaggugu

SEQ ID NO: 2350346 - RNA, 19 nt, Homo sapiens
  misc_RNA (1)...(19): siRNA sense strand
cagaaacggcacauggaau

SEQ ID NO: 2350347 - RNA, 19 nt, Homo sapiens
  misc_RNA (1)...(19): siRNA sense strand
gguucaguucaaagauuua

SEQ ID NO: 2350348 - RNA, 19 nt, Homo sapiens
  misc_RNA (1)...(19): siRNA sense strand
ugacgaaagaagaaauuca

SEQ ID NO: 2350349 - RNA, 19 nt, Homo sapiens
  misc_RNA (1)...(19): siRNA sense strand
cuggaagacgagaugcaaa

SEQ ID NO: 2350350 - RNA, 19 nt, Homo sapiens
  misc_RNA (1)...(19): siRNA sense strand
uggaagacgagaugcaaaa

SEQ ID NO: 2350351 - RNA, 19 nt, Homo sapiens
  misc_RNA (1)...(19): siRNA sense strand
agaauauuguugaugccua

SEQ ID NO: 2350352 - RNA, 19 nt, Homo sapiens
  misc_RNA (1)...(19): siRNA sense strand
gagaguuacaggaagccaa

SEQ ID NO: 2350353 - RNA, 19 nt, Homo sapiens
  misc_RNA (1)...(19): siRNA sense strand
gcagagagauguuggagag

SEQ ID NO: 2350354 - RNA, 19 nt, Homo sapiens
  misc_RNA (1)...(19): siRNA sense strand
ggugugaucaacagggaga

SEQ ID NO: 2350355 - RNA, 19 nt, Homo sapiens
  misc_RNA (1)...(19): siRNA sense strand
augugaggcuggaagauuu

SEQ ID NO: 2350356 - RNA, 19 nt, Homo sapiens
  misc_RNA (1)...(19): siRNA sense strand
ugucggugauccugggaau

SEQ ID NO: 2350357 - RNA, 19 nt, Homo sapiens
  misc_RNA (1)...(19): siRNA sense strand
ucuacaaacaucagcaaga

SEQ ID NO: 2350358 - RNA, 19 nt, Homo sapiens
  misc_RNA (1)...(19): siRNA sense strand
ucggauugguucaguucaa

SEQ ID NO: 2350359 - RNA, 19 nt, Homo sapiens
  misc_RNA (1)...(19): siRNA sense strand
agaacugacagaacugaaa

SEQ ID NO: 2350360 - RNA, 19 nt, Homo sapiens
  misc_RNA (1)...(19): siRNA sense strand
uggaggauccugugacgaa

SEQ ID NO: 2350361 - RNA, 19 nt, Homo sapiens
  misc_RNA (1)...(19): siRNA sense strand
gcgaaucugccgaggaaac

SEQ ID NO: 2350362 - RNA, 19 nt, Homo sapiens
  misc_RNA (1)...(19): siRNA sense strand
ggcagaaaaucaagaagau

SEQ ID NO: 2350363 - RNA, 19 nt, Homo sapiens
  misc_RNA (1)...(19): siRNA sense strand
caagagggcacuggagcaa

SEQ ID NO: 2350364 - RNA, 19 nt, Homo sapiens
  misc_RNA (1)...(19): siRNA sense strand
cccagaagacagacaauga

SEQ ID NO: 2350365 - RNA, 19 nt, Homo sapiens
  misc_RNA (1)...(19): siRNA sense strand
ccguuuauucuuagagcca

SEQ ID NO: 2350366 - RNA, 19 nt, Homo sapiens
  misc_RNA (1)...(19): siRNA sense strand
ugaucaacagggagaggau

SEQ ID NO: 2350367 - RNA, 19 nt, Homo sapiens
  misc_RNA (1)...(19): siRNA sense strand
ucaaggugcagaagaugaa

SEQ ID NO: 2350368 - RNA, 19 nt, Homo sapiens
  misc_RNA (1)...(19): siRNA sense strand
cggcagcuaccgggagaua

SEQ ID NO: 2350369 - RNA, 19 nt, Homo sapiens
  misc_RNA (1)...(19): siRNA sense strand
cugaagugcucuggacuau

SEQ ID NO: 2350370 - RNA, 19 nt, Homo sapiens
  misc_RNA (1)...(19): siRNA sense strand
guuuggagacuguggucau

SEQ ID NO: 2350371 - RNA, 19 nt, Homo sapiens
  misc_RNA (1)...(19): siRNA sense strand
cgaccauggagaagaguuc

SEQ ID NO: 2350372 - RNA, 19 nt, Homo sapiens
  misc_RNA (1)...(19): siRNA sense strand
ucugaagugcucuggacua

SEQ ID NO: 2350373 - RNA, 19 nt, Homo sapiens
  misc_RNA (1)...(19): siRNA sense strand
agaagaugccacugagaac

SEQ ID NO: 2350374 - RNA, 19 nt, Homo sapiens
  misc_RNA (1)...(19): siRNA sense strand
cugaaauaccuccugaaga

SEQ ID NO: 2350375 - RNA, 19 nt, Homo sapiens
  misc_RNA (1)...(19): siRNA sense strand
gugcagaagaugaaagcug

SEQ ID NO: 2350376 - RNA, 19 nt, Homo sapiens
  misc_RNA (1)...(19): siRNA sense strand
cagaagacagacaaugaga

SEQ ID NO: 2350377 - RNA, 19 nt, Homo sapiens
  misc_RNA (1)...(19): siRNA sense strand
ugugauggguuucgagcca

SEQ ID NO: 2350378 - RNA, 19 nt, Homo sapiens
  misc_RNA (1)...(19): siRNA sense strand
auaugaaugugaacagcuu

SEQ ID NO: 2350379 - RNA, 19 nt, Homo sapiens
  misc_RNA (1)...(19): siRNA sense strand
agucagaaggugugaauca

SEQ ID NO: 2350380 - RNA, 19 nt, Homo sapiens
  misc_RNA (1)...(19): siRNA sense strand
caucaugaccacagugcaa

SEQ ID NO: 2350381 - RNA, 19 nt, Homo sapiens
  misc_RNA (1)...(19): siRNA sense strand
ggugauagcuccagcccuu

SEQ ID NO: 2350382 - RNA, 19 nt, Homo sapiens
  misc_RNA (1)...(19): siRNA sense strand
cugagaacauugaagguga

SEQ ID NO: 2350383 - RNA, 19 nt, Homo sapiens
  misc_RNA (1)...(19): siRNA sense strand
gagagauguuggagagcgu

SEQ ID NO: 2350384 - RNA, 19 nt, Homo sapiens
  misc_RNA (1)...(19): siRNA sense strand
gacaaugagauuuggaaca

SEQ ID NO: 2350385 - RNA, 19 nt, Homo sapiens
  misc_RNA (1)...(19): siRNA sense strand
gaaugaagucagaaggugu

SEQ ID NO: 2350386 - RNA, 19 nt, Homo sapiens
  misc_RNA (1)...(19): siRNA sense strand
cagaaacggcacauggaau

SEQ ID NO: 2350387 - RNA, 19 nt, Homo sapiens
  misc_RNA (1)...(19): siRNA sense strand
gguucaguucaaagauuua

SEQ ID NO: 2350388 - RNA, 19 nt, Homo sapiens
  misc_RNA (1)...(19): siRNA sense strand
ugacgaaagaagaaauuca

SEQ ID NO: 2350389 - RNA, 19 nt, Homo sapiens
  misc_RNA (1)...(19): siRNA sense strand
cuggaagacgagaugcaaa

SEQ ID NO: 2350390 - RNA, 19 nt, Homo sapiens
  misc_RNA (1)...(19): siRNA sense strand
uggaagacgagaugcaaaa

SEQ ID NO: 2350391 - RNA, 19 nt, Homo sapiens
  misc_RNA (1)...(19): siRNA sense strand
agaauauuguugaugccua

SEQ ID NO: 2350392 - RNA, 19 nt, Homo sapiens
  misc_RNA (1)...(19): siRNA sense strand
gagaguuacaggaagccaa

SEQ ID NO: 2350393 - RNA, 19 nt, Homo sapiens
  misc_RNA (1)...(19): siRNA sense strand
gcagagagauguuggagag

SEQ ID NO: 2350394 - RNA, 19 nt, Homo sapiens
  misc_RNA (1)...(19): siRNA sense strand
ggugugaucaacagggaga

SEQ ID NO: 2350395 - RNA, 19 nt, Homo sapiens
  misc_RNA (1)...(19): siRNA sense strand
augugaggcuggaagauuu

SEQ ID NO: 2350396 - RNA, 19 nt, Homo sapiens
  misc_RNA (1)...(19): siRNA sense strand
ugucggugauccugggaau

SEQ ID NO: 2350397 - RNA, 19 nt, Homo sapiens
  misc_RNA (1)...(19): siRNA sense strand
ucuacaaacaucagcaaga

SEQ ID NO: 2350398 - RNA, 19 nt, Homo sapiens
  misc_RNA (1)...(19): siRNA sense strand
ucggauugguucaguucaa

SEQ ID NO: 2350399 - RNA, 19 nt, Homo sapiens
  misc_RNA (1)...(19): siRNA sense strand
agaacugacagaacugaaa

SEQ ID NO: 2350400 - RNA, 19 nt, Homo sapiens
  misc_RNA (1)...(19): siRNA sense strand
uggaggauccugugacgaa

SEQ ID NO: 2350401 - RNA, 19 nt, Homo sapiens
  misc_RNA (1)...(19): siRNA sense strand
gcgaaucugccgaggaaac

SEQ ID NO: 2350402 - RNA, 19 nt, Homo sapiens
  misc_RNA (1)...(19): siRNA sense strand
ggcagaaaaucaagaagau

SEQ ID NO: 2350403 - RNA, 19 nt, Homo sapiens
  misc_RNA (1)...(19): siRNA sense strand
caagagggcacuggagcaa

SEQ ID NO: 2350404 - RNA, 19 nt, Homo sapiens
  misc_RNA (1)...(19): siRNA sense strand
cccagaagacagacaauga

SEQ ID NO: 2350405 - RNA, 19 nt, Homo sapiens
  misc_RNA (1)...(19): siRNA sense strand
ccguuuauucuuagagcca

SEQ ID NO: 2350406 - RNA, 19 nt, Homo sapiens
  misc_RNA (1)...(19): siRNA sense strand
ugaucaacagggagaggau

SEQ ID NO: 2350407 - RNA, 19 nt, Homo sapiens
  misc_RNA (1)...(19): siRNA sense strand
ucaaggugcagaagaugaa

SEQ ID NO: 2350408 - RNA, 19 nt, Homo sapiens
  misc_RNA (1)...(19): siRNA sense strand
cggcagcuaccgggagaua

SEQ ID NO: 2350409 - RNA, 19 nt, Homo sapiens
  misc_RNA (1)...(19): siRNA sense strand
cugaagugcucuggacuau

SEQ ID NO: 2350410 - RNA, 19 nt, Homo sapiens
  misc_RNA (1)...(19): siRNA sense strand
guuuggagacuguggucau

SEQ ID NO: 2350411 - RNA, 19 nt, Homo sapiens
  misc_RNA (1)...(19): siRNA sense strand
cgaccauggagaagaguuc

SEQ ID NO: 2350412 - RNA, 19 nt, Homo sapiens
  misc_RNA (1)...(19): siRNA sense strand
ucugaagugcucuggacua

SEQ ID NO: 2350413 - RNA, 19 nt, Homo sapiens
  misc_RNA (1)...(19): siRNA sense strand
agaagaugccacugagaac

SEQ ID NO: 2350414 - RNA, 19 nt, Homo sapiens
  misc_RNA (1)...(19): siRNA sense strand
cugaaauaccuccugaaga

SEQ ID NO: 2350415 - RNA, 19 nt, Homo sapiens
  misc_RNA (1)...(19): siRNA sense strand
gugcagaagaugaaagcug

SEQ ID NO: 2350416 - RNA, 19 nt, Homo sapiens
  misc_RNA (1)...(19): siRNA sense strand
cagaagacagacaaugaga

SEQ ID NO: 2350417 - RNA, 19 nt, Homo sapiens
  misc_RNA (1)...(19): siRNA sense strand
ugugauggguuucgagcca

SEQ ID NO: 2350418 - RNA, 19 nt, Homo sapiens
  misc_RNA (1)...(19): siRNA sense strand
auaugaaugugaacagcuu

SEQ ID NO: 2350419 - RNA, 19 nt, Homo sapiens
  misc_RNA (1)...(19): siRNA sense strand
uguaauggcuugaaagaaa

SEQ ID NO: 2350420 - RNA, 19 nt, Homo sapiens
  misc_RNA (1)...(19): siRNA sense strand
guauagagcucccgaauua

SEQ ID NO: 2350421 - RNA, 19 nt, Homo sapiens
  misc_RNA (1)...(19): siRNA sense strand
gaucaaagucagaguuauu

SEQ ID NO: 2350422 - RNA, 19 nt, Homo sapiens
  misc_RNA (1)...(19): siRNA sense strand
ucaggaaagaugaaagaaa

SEQ ID NO: 2350423 - RNA, 19 nt, Homo sapiens
  misc_RNA (1)...(19): siRNA sense strand
guaugaaacccuuggaaaa

SEQ ID NO: 2350424 - RNA, 19 nt, Homo sapiens
  misc_RNA (1)...(19): siRNA sense strand
gucauggacuagagaguaa

SEQ ID NO: 2350425 - RNA, 19 nt, Homo sapiens
  misc_RNA (1)...(19): siRNA sense strand
gaacagucaugaaauguaa

SEQ ID NO: 2350426 - RNA, 19 nt, Homo sapiens
  misc_RNA (1)...(19): siRNA sense strand
gauaguggccauuaagaua

SEQ ID NO: 2350427 - RNA, 19 nt, Homo sapiens
  misc_RNA (1)...(19): siRNA sense strand
caaaggaggaagaggagau

SEQ ID NO: 2350428 - RNA, 19 nt, Homo sapiens
  misc_RNA (1)...(19): siRNA sense strand
gagaucaaagucagaguua

SEQ ID NO: 2350429 - RNA, 19 nt, Homo sapiens
  misc_RNA (1)...(19): siRNA sense strand
agucaaaggaggaagagga

SEQ ID NO: 2350430 - RNA, 19 nt, Homo sapiens
  misc_RNA (1)...(19): siRNA sense strand
agaacaaucugucaacaaa

SEQ ID NO: 2350431 - RNA, 19 nt, Homo sapiens
  misc_RNA (1)...(19): siRNA sense strand
ugccagaacugaaagcuaa

SEQ ID NO: 2350432 - RNA, 19 nt, Homo sapiens
  misc_RNA (1)...(19): siRNA sense strand
caacaggaugcaaaugaaa

SEQ ID NO: 2350433 - RNA, 19 nt, Homo sapiens
  misc_RNA (1)...(19): siRNA sense strand
ugagauggccacuggaaau

SEQ ID NO: 2350434 - RNA, 19 nt, Homo sapiens
  misc_RNA (1)...(19): siRNA sense strand
cauccuaugucuccagaua

SEQ ID NO: 2350435 - RNA, 19 nt, Homo sapiens
  misc_RNA (1)...(19): siRNA sense strand
acauuauugucauggacua

SEQ ID NO: 2350436 - RNA, 19 nt, Homo sapiens
  misc_RNA (1)...(19): siRNA sense strand
aaaauugcgaugagagaaa

SEQ ID NO: 2350437 - RNA, 19 nt, Homo sapiens
  misc_RNA (1)...(19): siRNA sense strand
uguaugaaacccuuggaaa

SEQ ID NO: 2350438 - RNA, 19 nt, Homo sapiens
  misc_RNA (1)...(19): siRNA sense strand
ccagauccuucgagcaauu

SEQ ID NO: 2350439 - RNA, 19 nt, Homo sapiens
  misc_RNA (1)...(19): siRNA sense strand
caguauuagaugaguuaca

SEQ ID NO: 2350440 - RNA, 19 nt, Homo sapiens
  misc_RNA (1)...(19): siRNA sense strand
uaagaauacugggcagaua

SEQ ID NO: 2350441 - RNA, 19 nt, Homo sapiens
  misc_RNA (1)...(19): siRNA sense strand
uauuaaagucaaaggagga

SEQ ID NO: 2350442 - RNA, 19 nt, Homo sapiens
  misc_RNA (1)...(19): siRNA sense strand
uugacuaucuucacaguaa

SEQ ID NO: 2350443 - RNA, 19 nt, Homo sapiens
  misc_RNA (1)...(19): siRNA sense strand
agauauaguucaugcuugu

SEQ ID NO: 2350444 - RNA, 19 nt, Homo sapiens
  misc_RNA (1)...(19): siRNA sense strand
ggaacagucaugaaaugua

SEQ ID NO: 2350445 - RNA, 19 nt, Homo sapiens
  misc_RNA (1)...(19): siRNA sense strand
agaaaaugaacucaggaaa

SEQ ID NO: 2350446 - RNA, 19 nt, Homo sapiens
  misc_RNA (1)...(19): siRNA sense strand
acacaguauuagaugaguu

SEQ ID NO: 2350447 - RNA, 19 nt, Homo sapiens
  misc_RNA (1)...(19): siRNA sense strand
auggaaaaccuguggauau

SEQ ID NO: 2350448 - RNA, 19 nt, Homo sapiens
  misc_RNA (1)...(19): siRNA sense strand
agagggaaguuacggaaca

SEQ ID NO: 2350449 - RNA, 19 nt, Homo sapiens
  misc_RNA (1)...(19): siRNA sense strand
ggcagauaguggccauuaa

SEQ ID NO: 2350450 - RNA, 19 nt, Homo sapiens
  misc_RNA (1)...(19): siRNA sense strand
acucaggaaagaugaaaga

SEQ ID NO: 2350451 - RNA, 19 nt, Homo sapiens
  misc_RNA (1)...(19): siRNA sense strand
uuaugagagaccagaacaa

SEQ ID NO: 2350452 - RNA, 19 nt, Homo sapiens
  misc_RNA (1)...(19): siRNA sense strand
cacaguauuagaugaguua

SEQ ID NO: 2350453 - RNA, 19 nt, Homo sapiens
  misc_RNA (1)...(19): siRNA sense strand
ggagagggaaguuacggaa

SEQ ID NO: 2350454 - RNA, 19 nt, Homo sapiens
  misc_RNA (1)...(19): siRNA sense strand
cugcuaaguaguucaguuu

SEQ ID NO: 2350455 - RNA, 19 nt, Homo sapiens
  misc_RNA (1)...(19): siRNA sense strand
uggaaaagugggagaggga

SEQ ID NO: 2350456 - RNA, 19 nt, Homo sapiens
  misc_RNA (1)...(19): siRNA sense strand
ccuucgagcaauugacuau

SEQ ID NO: 2350457 - RNA, 19 nt, Homo sapiens
  misc_RNA (1)...(19): siRNA sense strand
ugaagguggacuuggucaa

SEQ ID NO: 2350458 - RNA, 19 nt, Homo sapiens
  misc_RNA (1)...(19): siRNA sense strand
gcuuugggcuguaugauca

SEQ ID NO: 2350459 - RNA, 19 nt, Homo sapiens
  misc_RNA (1)...(19): siRNA sense strand
gcggagguucugugacaau

SEQ ID NO: 2350460 - RNA, 19 nt, Homo sapiens
  misc_RNA (1)...(19): siRNA sense strand
gcugcaaaucucaguucaa

SEQ ID NO: 2350461 - RNA, 19 nt, Homo sapiens
  misc_RNA (1)...(19): siRNA sense strand
ggaaguuacggaacaguca

SEQ ID NO: 2350462 - RNA, 19 nt, Homo sapiens
  misc_RNA (1)...(19): siRNA sense strand
cuaaauuacugcaggaagc

SEQ ID NO: 2350463 - RNA, 19 nt, Homo sapiens
  misc_RNA (1)...(19): siRNA sense strand
gaaagaguaugaaggugga

SEQ ID NO: 2350464 - RNA, 19 nt, Homo sapiens
  misc_RNA (1)...(19): siRNA sense strand
acaaaauugcgaugagaga

SEQ ID NO: 2350465 - RNA, 19 nt, Homo sapiens
  misc_RNA (1)...(19): siRNA sense strand
gaaaauaccucuuccagau

SEQ ID NO: 2350466 - RNA, 19 nt, Homo sapiens
  misc_RNA (1)...(19): siRNA sense strand
ugggagaggaaauagaaaa

SEQ ID NO: 2350467 - RNA, 19 nt, Homo sapiens
  misc_RNA (1)...(19): siRNA sense strand
gccagaacugaaagcuaaa

SEQ ID NO: 2350468 - RNA, 19 nt, Homo sapiens
  misc_RNA (1)...(19): siRNA sense strand
ucaacaggaugcaaaugaa

SEQ ID NO: 2350469 - RNA, 19 nt, Homo sapiens
  misc_RNA (1)...(19): siRNA sense strand
ccuaucaaucccagcacua

SEQ ID NO: 2350470 - RNA, 19 nt, Homo sapiens
  misc_RNA (1)...(19): siRNA sense strand
guaauggcuugaaagaaaa

SEQ ID NO: 2350471 - RNA, 19 nt, Homo sapiens
  misc_RNA (1)...(19): siRNA sense strand
ggacauuuauacggacuau

SEQ ID NO: 2350472 - RNA, 19 nt, Homo sapiens
  misc_RNA (1)...(19): siRNA sense strand
ucaccucacuugcagaaua

SEQ ID NO: 2350473 - RNA, 19 nt, Homo sapiens
  misc_RNA (1)...(19): siRNA sense strand
auuacuaagcucugugauu

SEQ ID NO: 2350474 - RNA, 19 nt, Homo sapiens
  misc_RNA (1)...(19): siRNA sense strand
gguauagagcucccgaauu

SEQ ID NO: 2350475 - RNA, 19 nt, Homo sapiens
  misc_RNA (1)...(19): siRNA sense strand
aauuacugcaggaagcaaa

SEQ ID NO: 2350476 - RNA, 19 nt, Homo sapiens
  misc_RNA (1)...(19): siRNA sense strand
aggaggaagaggagauauc

SEQ ID NO: 2350477 - RNA, 19 nt, Homo sapiens
  misc_RNA (1)...(19): siRNA sense strand
aagcuaaauuacugcagga

SEQ ID NO: 2350478 - RNA, 19 nt, Homo sapiens
  misc_RNA (1)...(19): siRNA sense strand
acuuguaaccauugaacca

SEQ ID NO: 2350479 - RNA, 19 nt, Homo sapiens
  misc_RNA (1)...(19): siRNA sense strand
uugcggagguucugugaca

SEQ ID NO: 2350480 - RNA, 19 nt, Homo sapiens
  misc_RNA (1)...(19): siRNA sense strand
gaacaaucugucaacaaaa

SEQ ID NO: 2350481 - RNA, 19 nt, Homo sapiens
  misc_RNA (1)...(19): siRNA sense strand
augccagaacugaaagcua

SEQ ID NO: 2350482 - RNA, 19 nt, Homo sapiens
  misc_RNA (1)...(19): siRNA sense strand
gggacauuuauacggacua

SEQ ID NO: 2350483 - RNA, 19 nt, Homo sapiens
  misc_RNA (1)...(19): siRNA sense strand
uaaagucaaaggaggaaga

SEQ ID NO: 2350484 - RNA, 19 nt, Homo sapiens
  misc_RNA (1)...(19): siRNA sense strand
cauaagaauacugggcaga

SEQ ID NO: 2350485 - RNA, 19 nt, Homo sapiens
  misc_RNA (1)...(19): siRNA sense strand
gaaaagugggagagggaag

SEQ ID NO: 2350486 - RNA, 19 nt, Homo sapiens
  misc_RNA (1)...(19): siRNA sense strand
gcacuaacuguaauggcuu

SEQ ID NO: 2350487 - RNA, 19 nt, Homo sapiens
  misc_RNA (1)...(19): siRNA sense strand
uaacuguaauggcuugaaa

SEQ ID NO: 2350488 - RNA, 19 nt, Homo sapiens
  misc_RNA (1)...(19): siRNA sense strand
ugacaaugccacccaucaa

SEQ ID NO: 2350489 - RNA, 19 nt, Homo sapiens
  misc_RNA (1)...(19): siRNA sense strand
caucaugaguucagaagaa

SEQ ID NO: 2350490 - RNA, 19 nt, Homo sapiens
  misc_RNA (1)...(19): siRNA sense strand
cgaagaaggaggugcacaa

SEQ ID NO: 2350491 - RNA, 19 nt, Homo sapiens
  misc_RNA (1)...(19): siRNA sense strand
ccacaagguucaacaauuu

SEQ ID NO: 2350492 - RNA, 19 nt, Homo sapiens
  misc_RNA (1)...(19): siRNA sense strand
acaugaaacucaacaguau

SEQ ID NO: 2350493 - RNA, 19 nt, Homo sapiens
  misc_RNA (1)...(19): siRNA sense strand
gagaagacccaauggccua

SEQ ID NO: 2350494 - RNA, 19 nt, Homo sapiens
  misc_RNA (1)...(19): siRNA sense strand
cugaauuagcugauguuua

SEQ ID NO: 2350495 - RNA, 19 nt, Homo sapiens
  misc_RNA (1)...(19): siRNA sense strand
ggaagucugcagagauuaa

SEQ ID NO: 2350496 - RNA, 19 nt, Homo sapiens
  misc_RNA (1)...(19): siRNA sense strand
ugggaagucugcagagauu

SEQ ID NO: 2350497 - RNA, 19 nt, Homo sapiens
  misc_RNA (1)...(19): siRNA sense strand
ccaaaggcccugagaacga

SEQ ID NO: 2350498 - RNA, 19 nt, Homo sapiens
  misc_RNA (1)...(19): siRNA sense strand
gaagaagcaaccauggaua

SEQ ID NO: 2350499 - RNA, 19 nt, Homo sapiens
  misc_RNA (1)...(19): siRNA sense strand
cuagauacggcuuuggaaa

SEQ ID NO: 2350500 - RNA, 19 nt, Homo sapiens
  misc_RNA (1)...(19): siRNA sense strand
guuugagccuugagacaau

SEQ ID NO: 2350501 - RNA, 19 nt, Homo sapiens
  misc_RNA (1)...(19): siRNA sense strand
gaacgaagaaggaggugca

SEQ ID NO: 2350502 - RNA, 19 nt, Homo sapiens
  misc_RNA (1)...(19): siRNA sense strand
caagagaacaugaaacuca

SEQ ID NO: 2350503 - RNA, 19 nt, Homo sapiens
  misc_RNA (1)...(19): siRNA sense strand
cagggaagaugaagggacu

SEQ ID NO: 2350504 - RNA, 19 nt, Homo sapiens
  misc_RNA (1)...(19): siRNA sense strand
acaaugagacaguugggaa

SEQ ID NO: 2350505 - RNA, 19 nt, Homo sapiens
  misc_RNA (1)...(19): siRNA sense strand
agaaguggcaggcgggaga

SEQ ID NO: 2350506 - RNA, 19 nt, Homo sapiens
  misc_RNA (1)...(19): siRNA sense strand
cuuccauggaugaggccaa

SEQ ID NO: 2350507 - RNA, 19 nt, Homo sapiens
  misc_RNA (1)...(19): siRNA sense strand
gaugaggccaagagaacau

SEQ ID NO: 2350508 - RNA, 19 nt, Homo sapiens
  misc_RNA (1)...(19): siRNA sense strand
caccaaaggcccugagaac

SEQ ID NO: 2350509 - RNA, 19 nt, Homo sapiens
  misc_RNA (1)...(19): siRNA sense strand
uggaugaggccaagagaac

SEQ ID NO: 2350510 - RNA, 19 nt, Homo sapiens
  misc_RNA (1)...(19): siRNA sense strand
gccaagagaacaugaaacu

SEQ ID NO: 2350511 - RNA, 19 nt, Homo sapiens
  misc_RNA (1)...(19): siRNA sense strand
ggaccaaugccacaaaaua

SEQ ID NO: 2350512 - RNA, 19 nt, Homo sapiens
  misc_RNA (1)...(19): siRNA sense strand
gaccaaugccacaaaauaa

SEQ ID NO: 2350513 - RNA, 19 nt, Homo sapiens
  misc_RNA (1)...(19): siRNA sense strand
aaacauccaugccaggaaa

SEQ ID NO: 2350514 - RNA, 19 nt, Homo sapiens
  misc_RNA (1)...(19): siRNA sense strand
ucaacagccaggacugaaa

SEQ ID NO: 2350515 - RNA, 19 nt, Homo sapiens
  misc_RNA (1)...(19): siRNA sense strand
aaacacacuuucucaguau

SEQ ID NO: 2350516 - RNA, 19 nt, Homo sapiens
  misc_RNA (1)...(19): siRNA sense strand
aagagaacaugaaacucaa

SEQ ID NO: 2350517 - RNA, 19 nt, Homo sapiens
  misc_RNA (1)...(19): siRNA sense strand
gagccauguuuccaggauu

SEQ ID NO: 2350518 - RNA, 19 nt, Homo sapiens
  misc_RNA (1)...(19): siRNA sense strand
agccauguuuccaggauuu

SEQ ID NO: 2350519 - RNA, 19 nt, Homo sapiens
  misc_RNA (1)...(19): siRNA sense strand
acugaugaccccugaauua

SEQ ID NO: 2350520 - RNA, 19 nt, Homo sapiens
  misc_RNA (1)...(19): siRNA sense strand
uaguuugagccuugagaca

SEQ ID NO: 2350521 - RNA, 19 nt, Homo sapiens
  misc_RNA (1)...(19): siRNA sense strand
gccuugagacaaugagaca

SEQ ID NO: 2350522 - RNA, 19 nt, Homo sapiens
  misc_RNA (1)...(19): siRNA sense strand
uccuaugccuccuggaaau

SEQ ID NO: 2350523 - RNA, 19 nt, Homo sapiens
  misc_RNA (1)...(19): siRNA sense strand
gagcaaaucaauugaaugc

SEQ ID NO: 2350524 - RNA, 19 nt, Homo sapiens
  misc_RNA (1)...(19): siRNA sense strand
cccaggagcccgagaugau

SEQ ID NO: 2350525 - RNA, 19 nt, Homo sapiens
  misc_RNA (1)...(19): siRNA sense strand
gaauguuguacgugccuuu

SEQ ID NO: 2350526 - RNA, 19 nt, Homo sapiens
  misc_RNA (1)...(19): siRNA sense strand
ggaagaagcaaccauggau

SEQ ID NO: 2350527 - RNA, 19 nt, Homo sapiens
  misc_RNA (1)...(19): siRNA sense strand
ggaaagagaagaugcccua

SEQ ID NO: 2350528 - RNA, 19 nt, Homo sapiens
  misc_RNA (1)...(19): siRNA sense strand
aggccaagcggcagagauu

SEQ ID NO: 2350529 - RNA, 19 nt, Homo sapiens
  misc_RNA (1)...(19): siRNA sense strand
cccuagagcaggaggccaa

SEQ ID NO: 2350530 - RNA, 19 nt, Homo sapiens
  misc_RNA (1)...(19): siRNA sense strand
ggaagaaucaucuggcaca

SEQ ID NO: 2350531 - RNA, 19 nt, Homo sapiens
  misc_RNA (1)...(19): siRNA sense strand
aaguucaagcaguggguua

SEQ ID NO: 2350532 - RNA, 19 nt, Homo sapiens
  misc_RNA (1)...(19): siRNA sense strand
aguccagagcgguuagaua

SEQ ID NO: 2350533 - RNA, 19 nt, Homo sapiens
  misc_RNA (1)...(19): siRNA sense strand
cuucuuuguaggagaguuu

SEQ ID NO: 2350534 - RNA, 19 nt, Homo sapiens
  misc_RNA (1)...(19): siRNA sense strand
agagagaaagaaagcaaaa

SEQ ID NO: 2350535 - RNA, 19 nt, Homo sapiens
  misc_RNA (1)...(19): siRNA sense strand
cuucagacuggucaagaaa

SEQ ID NO: 2350536 - RNA, 19 nt, Homo sapiens
  misc_RNA (1)...(19): siRNA sense strand
aucaaagcacggaaggaaa

SEQ ID NO: 2350537 - RNA, 19 nt, Homo sapiens
  misc_RNA (1)...(19): siRNA sense strand
agaagaugcccuaaggcuu

SEQ ID NO: 2350538 - RNA, 19 nt, Homo sapiens
  misc_RNA (1)...(19): siRNA sense strand
ggugcuuggagaagagaca

SEQ ID NO: 2350539 - RNA, 19 nt, Homo sapiens
  misc_RNA (1)...(19): siRNA sense strand
uggucaagaaagagcuaga

SEQ ID NO: 2350540 - RNA, 19 nt, Homo sapiens
  misc_RNA (1)...(19): siRNA sense strand
acaucuugcugaagcccaa

SEQ ID NO: 2350541 - RNA, 19 nt, Homo sapiens
  misc_RNA (1)...(19): siRNA sense strand
aaacaugcuucuaacccua

SEQ ID NO: 2350542 - RNA, 19 nt, Homo sapiens
  misc_RNA (1)...(19): siRNA sense strand
agaccuggugcuuggagaa

SEQ ID NO: 2350543 - RNA, 19 nt, Homo sapiens
  misc_RNA (1)...(19): siRNA sense strand
agaaagagcuagaccuggu

SEQ ID NO: 2350544 - RNA, 19 nt, Homo sapiens
  misc_RNA (1)...(19): siRNA sense strand
ugucagcaacuaaggaaca

SEQ ID NO: 2350545 - RNA, 19 nt, Homo sapiens
  misc_RNA (1)...(19): siRNA sense strand
uagauaaaguuguccagga

SEQ ID NO: 2350546 - RNA, 19 nt, Homo sapiens
  misc_RNA (1)...(19): siRNA sense strand
ggaaacgauucuuugccuu

SEQ ID NO: 2350547 - RNA, 19 nt, Homo sapiens
  misc_RNA (1)...(19): siRNA sense strand
ggaaagagaagaugcccua

SEQ ID NO: 2350548 - RNA, 19 nt, Homo sapiens
  misc_RNA (1)...(19): siRNA sense strand
aggccaagcggcagagauu

SEQ ID NO: 2350549 - RNA, 19 nt, Homo sapiens
  misc_RNA (1)...(19): siRNA sense strand
cccuagagcaggaggccaa

SEQ ID NO: 2350550 - RNA, 19 nt, Homo sapiens
  misc_RNA (1)...(19): siRNA sense strand
ggaagaaucaucuggcaca

SEQ ID NO: 2350551 - RNA, 19 nt, Homo sapiens
  misc_RNA (1)...(19): siRNA sense strand
aaguucaagcaguggguua

SEQ ID NO: 2350552 - RNA, 19 nt, Homo sapiens
  misc_RNA (1)...(19): siRNA sense strand
aguccagagcgguuagaua

SEQ ID NO: 2350553 - RNA, 19 nt, Homo sapiens
  misc_RNA (1)...(19): siRNA sense strand
agagagaaagaaagcaaaa

SEQ ID NO: 2350554 - RNA, 19 nt, Homo sapiens
  misc_RNA (1)...(19): siRNA sense strand
cuucagacuggucaagaaa

SEQ ID NO: 2350555 - RNA, 19 nt, Homo sapiens
  misc_RNA (1)...(19): siRNA sense strand
aucaaagcacggaaggaaa

SEQ ID NO: 2350556 - RNA, 19 nt, Homo sapiens
  misc_RNA (1)...(19): siRNA sense strand
agaagaugcccuaaggcuu

SEQ ID NO: 2350557 - RNA, 19 nt, Homo sapiens
  misc_RNA (1)...(19): siRNA sense strand
ggugcuuggagaagagaca

SEQ ID NO: 2350558 - RNA, 19 nt, Homo sapiens
  misc_RNA (1)...(19): siRNA sense strand
uggucaagaaagagcuaga

SEQ ID NO: 2350559 - RNA, 19 nt, Homo sapiens
  misc_RNA (1)...(19): siRNA sense strand
acaucuugcugaagcccaa

SEQ ID NO: 2350560 - RNA, 19 nt, Homo sapiens
  misc_RNA (1)...(19): siRNA sense strand
agaccuggugcuuggagaa

SEQ ID NO: 2350561 - RNA, 19 nt, Homo sapiens
  misc_RNA (1)...(19): siRNA sense strand
agaaagagcuagaccuggu

SEQ ID NO: 2350562 - RNA, 19 nt, Homo sapiens
  misc_RNA (1)...(19): siRNA sense strand
uagauaaaguuguccagga

SEQ ID NO: 2350563 - RNA, 19 nt, Homo sapiens
  misc_RNA (1)...(19): siRNA sense strand
ggaaacgauucuuugccuu

SEQ ID NO: 2350564 - RNA, 19 nt, Homo sapiens
  misc_RNA (1)...(19): siRNA sense strand
ggugaagauaauaccuaaa

SEQ ID NO: 2350565 - RNA, 19 nt, Homo sapiens
  misc_RNA (1)...(19): siRNA sense strand
acacaaacacagaaccaca

SEQ ID NO: 2350566 - RNA, 19 nt, Homo sapiens
  misc_RNA (1)...(19): siRNA sense strand
acacagaaccacacagcca

SEQ ID NO: 2350567 - RNA, 19 nt, Homo sapiens
  misc_RNA (1)...(19): siRNA sense strand
agacagaagaagaucagga

SEQ ID NO: 2350568 - RNA, 19 nt, Homo sapiens
  misc_RNA (1)...(19): siRNA sense strand
agauaauaccuaaagagga

SEQ ID NO: 2350569 - RNA, 19 nt, Homo sapiens
  misc_RNA (1)...(19): siRNA sense strand
agucaaacaccggggauaa

SEQ ID NO: 2350570 - RNA, 19 nt, Homo sapiens
  misc_RNA (1)...(19): siRNA sense strand
acacacaaacacagaacca

SEQ ID NO: 2350571 - RNA, 19 nt, Homo sapiens
  misc_RNA (1)...(19): siRNA sense strand
agacagaagaagaucagga

SEQ ID NO: 2350572 - RNA, 19 nt, Homo sapiens
  misc_RNA (1)...(19): siRNA sense strand
agucaaacaccggggauaa

SEQ ID NO: 2350573 - RNA, 19 nt, Homo sapiens
  misc_RNA (1)...(19): siRNA sense strand
ggugaagauaauaccuaaa

SEQ ID NO: 2350574 - RNA, 19 nt, Homo sapiens
  misc_RNA (1)...(19): siRNA sense strand
acacagaaccacacagcca

SEQ ID NO: 2350575 - RNA, 19 nt, Homo sapiens
  misc_RNA (1)...(19): siRNA sense strand
acacaaacacagaaccaca

SEQ ID NO: 2350576 - RNA, 19 nt, Homo sapiens
  misc_RNA (1)...(19): siRNA sense strand
agacagaagaagaucagga

SEQ ID NO: 2350577 - RNA, 19 nt, Homo sapiens
  misc_RNA (1)...(19): siRNA sense strand
agauaauaccuaaagagga

SEQ ID NO: 2350578 - RNA, 19 nt, Homo sapiens
  misc_RNA (1)...(19): siRNA sense strand
agucaaacaccggggauaa

SEQ ID NO: 2350579 - RNA, 19 nt, Homo sapiens
  misc_RNA (1)...(19): siRNA sense strand
acacacaaacacagaacca

SEQ ID NO: 2350580 - RNA, 19 nt, Homo sapiens
  misc_RNA (1)...(19): siRNA sense strand
ccagaaugaaugaagaaca

SEQ ID NO: 2350581 - RNA, 19 nt, Homo sapiens
  misc_RNA (1)...(19): siRNA sense strand
aagacaaucguuagaggaa

SEQ ID NO: 2350582 - RNA, 19 nt, Homo sapiens
  misc_RNA (1)...(19): siRNA sense strand
ccuacuauucugaggugaa

SEQ ID NO: 2350583 - RNA, 19 nt, Homo sapiens
  misc_RNA (1)...(19): siRNA sense strand
gacuaugacaggaggccaa

SEQ ID NO: 2350584 - RNA, 19 nt, Homo sapiens
  misc_RNA (1)...(19): siRNA sense strand
uagaaaugauugauggcga

SEQ ID NO: 2350585 - RNA, 19 nt, Homo sapiens
  misc_RNA (1)...(19): siRNA sense strand
gcguacagugaaagugaau

SEQ ID NO: 2350586 - RNA, 19 nt, Homo sapiens
  misc_RNA (1)...(19): siRNA sense strand
ccgagaaacacacagggaa

SEQ ID NO: 2350587 - RNA, 19 nt, Homo sapiens
  misc_RNA (1)...(19): siRNA sense strand
ggccaaagccuauggugga

SEQ ID NO: 2350588 - RNA, 19 nt, Homo sapiens
  misc_RNA (1)...(19): siRNA sense strand
aagaggugccgaagaggaa

SEQ ID NO: 2350589 - RNA, 19 nt, Homo sapiens
  misc_RNA (1)...(19): siRNA sense strand
aaugaagaacagauagcua

SEQ ID NO: 2350590 - RNA, 19 nt, Homo sapiens
  misc_RNA (1)...(19): siRNA sense strand
gagcaacagcccaggaacu

SEQ ID NO: 2350591 - RNA, 19 nt, Homo sapiens
  misc_RNA (1)...(19): siRNA sense strand
accucaaagucaaagcaaa

SEQ ID NO: 2350592 - RNA, 19 nt, Homo sapiens
  misc_RNA (1)...(19): siRNA sense strand
caccagaaugaaugaagaa

SEQ ID NO: 2350593 - RNA, 19 nt, Homo sapiens
  misc_RNA (1)...(19): siRNA sense strand
augcaucgccaccgagaaa

SEQ ID NO: 2350594 - RNA, 19 nt, Homo sapiens
  misc_RNA (1)...(19): siRNA sense strand
aaucguuagaggaaacaaa

SEQ ID NO: 2350595 - RNA, 19 nt, Homo sapiens
  misc_RNA (1)...(19): siRNA sense strand
gcugacuacacgaccgaaa

SEQ ID NO: 2350596 - RNA, 19 nt, Homo sapiens
  misc_RNA (1)...(19): siRNA sense strand
ccagggaauacuuggccaa

SEQ ID NO: 2350597 - RNA, 19 nt, Homo sapiens
  misc_RNA (1)...(19): siRNA sense strand
gcuccaacucccuaaggaa

SEQ ID NO: 2350598 - RNA, 19 nt, Homo sapiens
  misc_RNA (1)...(19): siRNA sense strand
cuucauaaccaaggaguga

SEQ ID NO: 2350599 - RNA, 19 nt, Homo sapiens
  misc_RNA (1)...(19): siRNA sense strand
aggugaagccuuugaaauc

SEQ ID NO: 2350600 - RNA, 19 nt, Homo sapiens
  misc_RNA (1)...(19): siRNA sense strand
gugaauacagugaccucaa

SEQ ID NO: 2350601 - RNA, 19 nt, Homo sapiens
  misc_RNA (1)...(19): siRNA sense strand
ccaaggagagccuggcgua

SEQ ID NO: 2350602 - RNA, 19 nt, Homo sapiens
  misc_RNA (1)...(19): siRNA sense strand
gauccguauuauagaggca

SEQ ID NO: 2350603 - RNA, 19 nt, Homo sapiens
  misc_RNA (1)...(19): siRNA sense strand
accgaaaaguacagggaga

SEQ ID NO: 2350604 - RNA, 19 nt, Homo sapiens
  misc_RNA (1)...(19): siRNA sense strand
acuugauguuggugaggga

SEQ ID NO: 2350605 - RNA, 19 nt, Homo sapiens
  misc_RNA (1)...(19): siRNA sense strand
gcagcuaccuugucggcga

SEQ ID NO: 2350606 - RNA, 19 nt, Homo sapiens
  misc_RNA (1)...(19): siRNA sense strand
ccaaagucuucguaccuga

SEQ ID NO: 2350607 - RNA, 19 nt, Homo sapiens
  misc_RNA (1)...(19): siRNA sense strand
ucauaaccaaggagugauu

SEQ ID NO: 2350608 - RNA, 19 nt, Homo sapiens
  misc_RNA (1)...(19): siRNA sense strand
ccgaaaaguacagggagaa

SEQ ID NO: 2350609 - RNA, 19 nt, Homo sapiens
  misc_RNA (1)...(19): siRNA sense strand
ccuacaacuccuacaccua

SEQ ID NO: 2350610 - RNA, 19 nt, Homo sapiens
  misc_RNA (1)...(19): siRNA sense strand
gcaacagagacgagaacug

SEQ ID NO: 2350611 - RNA, 19 nt, Homo sapiens
  misc_RNA (1)...(19): siRNA sense strand
uaggcuaccuuaugggaca

SEQ ID NO: 2350612 - RNA, 19 nt, Homo sapiens
  misc_RNA (1)...(19): siRNA sense strand
cuccaacucccuaaggaaa

SEQ ID NO: 2350613 - RNA, 19 nt, Homo sapiens
  misc_RNA (1)...(19): siRNA sense strand
cugagcaaaccaagugaau

SEQ ID NO: 2350614 - RNA, 19 nt, Homo sapiens
  misc_RNA (1)...(19): siRNA sense strand
ccaggagaccccagggaau

SEQ ID NO: 2350615 - RNA, 19 nt, Homo sapiens
  misc_RNA (1)...(19): siRNA sense strand
aacaaguugcagugaagaa

SEQ ID NO: 2350616 - RNA, 19 nt, Homo sapiens
  misc_RNA (1)...(19): siRNA sense strand
agccuggcguacagugaaa

SEQ ID NO: 2350617 - RNA, 19 nt, Homo sapiens
  misc_RNA (1)...(19): siRNA sense strand
ccagaaugaaugaagaaca

SEQ ID NO: 2350618 - RNA, 19 nt, Homo sapiens
  misc_RNA (1)...(19): siRNA sense strand
aagacaaucguuagaggaa

SEQ ID NO: 2350619 - RNA, 19 nt, Homo sapiens
  misc_RNA (1)...(19): siRNA sense strand
ccuacuauucugaggugaa

SEQ ID NO: 2350620 - RNA, 19 nt, Homo sapiens
  misc_RNA (1)...(19): siRNA sense strand
gacuaugacaggaggccaa

SEQ ID NO: 2350621 - RNA, 19 nt, Homo sapiens
  misc_RNA (1)...(19): siRNA sense strand
uagaaaugauugauggcga

SEQ ID NO: 2350622 - RNA, 19 nt, Homo sapiens
  misc_RNA (1)...(19): siRNA sense strand
gcguacagugaaagugaau

SEQ ID NO: 2350623 - RNA, 19 nt, Homo sapiens
  misc_RNA (1)...(19): siRNA sense strand
ccgagaaacacacagggaa

SEQ ID NO: 2350624 - RNA, 19 nt, Homo sapiens
  misc_RNA (1)...(19): siRNA sense strand
ggccaaagccuauggugga

SEQ ID NO: 2350625 - RNA, 19 nt, Homo sapiens
  misc_RNA (1)...(19): siRNA sense strand
aagaggugccgaagaggaa

SEQ ID NO: 2350626 - RNA, 19 nt, Homo sapiens
  misc_RNA (1)...(19): siRNA sense strand
aaugaagaacagauagcua

SEQ ID NO: 2350627 - RNA, 19 nt, Homo sapiens
  misc_RNA (1)...(19): siRNA sense strand
gagcaacagcccaggaacu

SEQ ID NO: 2350628 - RNA, 19 nt, Homo sapiens
  misc_RNA (1)...(19): siRNA sense strand
accucaaagucaaagcaaa

SEQ ID NO: 2350629 - RNA, 19 nt, Homo sapiens
  misc_RNA (1)...(19): siRNA sense strand
caccagaaugaaugaagaa

SEQ ID NO: 2350630 - RNA, 19 nt, Homo sapiens
  misc_RNA (1)...(19): siRNA sense strand
augcaucgccaccgagaaa

SEQ ID NO: 2350631 - RNA, 19 nt, Homo sapiens
  misc_RNA (1)...(19): siRNA sense strand
aaucguuagaggaaacaaa

SEQ ID NO: 2350632 - RNA, 19 nt, Homo sapiens
  misc_RNA (1)...(19): siRNA sense strand
gcugacuacacgaccgaaa

SEQ ID NO: 2350633 - RNA, 19 nt, Homo sapiens
  misc_RNA (1)...(19): siRNA sense strand
ccagggaauacuuggccaa

SEQ ID NO: 2350634 - RNA, 19 nt, Homo sapiens
  misc_RNA (1)...(19): siRNA sense strand
gcuccaacucccuaaggaa

SEQ ID NO: 2350635 - RNA, 19 nt, Homo sapiens
  misc_RNA (1)...(19): siRNA sense strand
cuucauaaccaaggaguga

SEQ ID NO: 2350636 - RNA, 19 nt, Homo sapiens
  misc_RNA (1)...(19): siRNA sense strand
aggugaagccuuugaaauc

SEQ ID NO: 2350637 - RNA, 19 nt, Homo sapiens
  misc_RNA (1)...(19): siRNA sense strand
gugaauacagugaccucaa

SEQ ID NO: 2350638 - RNA, 19 nt, Homo sapiens
  misc_RNA (1)...(19): siRNA sense strand
ccaaggagagccuggcgua

SEQ ID NO: 2350639 - RNA, 19 nt, Homo sapiens
  misc_RNA (1)...(19): siRNA sense strand
gauccguauuauagaggca

SEQ ID NO: 2350640 - RNA, 19 nt, Homo sapiens
  misc_RNA (1)...(19): siRNA sense strand
accgaaaaguacagggaga

SEQ ID NO: 2350641 - RNA, 19 nt, Homo sapiens
  misc_RNA (1)...(19): siRNA sense strand
acuugauguuggugaggga

SEQ ID NO: 2350642 - RNA, 19 nt, Homo sapiens
  misc_RNA (1)...(19): siRNA sense strand
gcagcuaccuugucggcga

SEQ ID NO: 2350643 - RNA, 19 nt, Homo sapiens
  misc_RNA (1)...(19): siRNA sense strand
ccaaagucuucguaccuga

SEQ ID NO: 2350644 - RNA, 19 nt, Homo sapiens
  misc_RNA (1)...(19): siRNA sense strand
ucauaaccaaggagugauu

SEQ ID NO: 2350645 - RNA, 19 nt, Homo sapiens
  misc_RNA (1)...(19): siRNA sense strand
ccgaaaaguacagggagaa

SEQ ID NO: 2350646 - RNA, 19 nt, Homo sapiens
  misc_RNA (1)...(19): siRNA sense strand
ccuacaacuccuacaccua

SEQ ID NO: 2350647 - RNA, 19 nt, Homo sapiens
  misc_RNA (1)...(19): siRNA sense strand
gcaacagagacgagaacug

SEQ ID NO: 2350648 - RNA, 19 nt, Homo sapiens
  misc_RNA (1)...(19): siRNA sense strand
uaggcuaccuuaugggaca

SEQ ID NO: 2350649 - RNA, 19 nt, Homo sapiens
  misc_RNA (1)...(19): siRNA sense strand
cuccaacucccuaaggaaa

SEQ ID NO: 2350650 - RNA, 19 nt, Homo sapiens
  misc_RNA (1)...(19): siRNA sense strand
cugagcaaaccaagugaau

SEQ ID NO: 2350651 - RNA, 19 nt, Homo sapiens
  misc_RNA (1)...(19): siRNA sense strand
ccaggagaccccagggaau

SEQ ID NO: 2350652 - RNA, 19 nt, Homo sapiens
  misc_RNA (1)...(19): siRNA sense strand
aacaaguugcagugaagaa

SEQ ID NO: 2350653 - RNA, 19 nt, Homo sapiens
  misc_RNA (1)...(19): siRNA sense strand
agccuggcguacagugaaa

SEQ ID NO: 2350654 - RNA, 19 nt, Homo sapiens
  misc_RNA (1)...(19): siRNA sense strand
uggugacgguggaggcaga

SEQ ID NO: 2350655 - RNA, 19 nt, Homo sapiens
  misc_RNA (1)...(19): siRNA sense strand
gaacaacaguccagggcca

SEQ ID NO: 2350656 - RNA, 19 nt, Homo sapiens
  misc_RNA (1)...(19): siRNA sense strand
gggaaaacggauucgauaa

SEQ ID NO: 2350657 - RNA, 19 nt, Homo sapiens
  misc_RNA (1)...(19): siRNA sense strand
cagucacagaggagaauaa

SEQ ID NO: 2350658 - RNA, 19 nt, Homo sapiens
  misc_RNA (1)...(19): siRNA sense strand
cggaacugcccgaaggcua

SEQ ID NO: 2350659 - RNA, 19 nt, Homo sapiens
  misc_RNA (1)...(19): siRNA sense strand
gauuaaaagauaccggaua

SEQ ID NO: 2350660 - RNA, 19 nt, Homo sapiens
  misc_RNA (1)...(19): siRNA sense strand
gaugaagaaaggagggcca

SEQ ID NO: 2350661 - RNA, 19 nt, Homo sapiens
  misc_RNA (1)...(19): siRNA sense strand
guguggaaccauaagaaaa

SEQ ID NO: 2350662 - RNA, 19 nt, Homo sapiens
  misc_RNA (1)...(19): siRNA sense strand
cgaaagagaucuaguccag

SEQ ID NO: 2350663 - RNA, 19 nt, Homo sapiens
  misc_RNA (1)...(19): siRNA sense strand
aaugaagaugcgaccgaaa

SEQ ID NO: 2350664 - RNA, 19 nt, Homo sapiens
  misc_RNA (1)...(19): siRNA sense strand
ggagaauaagaaagaauac

SEQ ID NO: 2350665 - RNA, 19 nt, Homo sapiens
  misc_RNA (1)...(19): siRNA sense strand
agaaagaauacguccgguu

SEQ ID NO: 2350666 - RNA, 19 nt, Homo sapiens
  misc_RNA (1)...(19): siRNA sense strand
cguguggaaccauaagaaa

SEQ ID NO: 2350667 - RNA, 19 nt, Homo sapiens
  misc_RNA (1)...(19): siRNA sense strand
acugaaacccaauggcaga

SEQ ID NO: 2350668 - RNA, 19 nt, Homo sapiens
  misc_RNA (1)...(19): siRNA sense strand
caucaagauccgucugaca

SEQ ID NO: 2350669 - RNA, 19 nt, Homo sapiens
  misc_RNA (1)...(19): siRNA sense strand
agucuuaccgccagauaau

SEQ ID NO: 2350670 - RNA, 19 nt, Homo sapiens
  misc_RNA (1)...(19): siRNA sense strand
aucaaagacuucaggcaca

SEQ ID NO: 2350671 - RNA, 19 nt, Homo sapiens
  misc_RNA (1)...(19): siRNA sense strand
aggcacagcggcuucgaaa

SEQ ID NO: 2350672 - RNA, 19 nt, Homo sapiens
  misc_RNA (1)...(19): siRNA sense strand
uugcaaagauugucgugga

SEQ ID NO: 2350673 - RNA, 19 nt, Homo sapiens
  misc_RNA (1)...(19): siRNA sense strand
ggcuacgaacaaagaacaa

SEQ ID NO: 2350674 - RNA, 19 nt, Homo sapiens
  misc_RNA (1)...(19): siRNA sense strand
uggagguuuaugagaggaa

SEQ ID NO: 2350675 - RNA, 19 nt, Homo sapiens
  misc_RNA (1)...(19): siRNA sense strand
ccuucugcguggaacacaa

SEQ ID NO: 2350676 - RNA, 19 nt, Homo sapiens
  misc_RNA (1)...(19): siRNA sense strand
ugcagaggacuguuagaaa

SEQ ID NO: 2350677 - RNA, 19 nt, Homo sapiens
  misc_RNA (1)...(19): siRNA sense strand
augaaggaacgguguauga

SEQ ID NO: 2350678 - RNA, 19 nt, Homo sapiens
  misc_RNA (1)...(19): siRNA sense strand
cuacgaacaaagaacaaca

SEQ ID NO: 2350679 - RNA, 19 nt, Homo sapiens
  misc_RNA (1)...(19): siRNA sense strand
guuuaugagaggaaucgaa

SEQ ID NO: 2350680 - RNA, 19 nt, Homo sapiens
  misc_RNA (1)...(19): siRNA sense strand
cgguggagacguucgauga

SEQ ID NO: 2350681 - RNA, 19 nt, Homo sapiens
  misc_RNA (1)...(19): siRNA sense strand
cuccaaggcuucaaggcuu

SEQ ID NO: 2350682 - RNA, 19 nt, Homo sapiens
  misc_RNA (1)...(19): siRNA sense strand
gagucuuaccgccagauaa

SEQ ID NO: 2350683 - RNA, 19 nt, Homo sapiens
  misc_RNA (1)...(19): siRNA sense strand
gaacaacaguccagggcca

SEQ ID NO: 2350684 - RNA, 19 nt, Homo sapiens
  misc_RNA (1)...(19): siRNA sense strand
gggaaaacggauucgauaa

SEQ ID NO: 2350685 - RNA, 19 nt, Homo sapiens
  misc_RNA (1)...(19): siRNA sense strand
cagucacagaggagaauaa

SEQ ID NO: 2350686 - RNA, 19 nt, Homo sapiens
  misc_RNA (1)...(19): siRNA sense strand
cggaacugcccgaaggcua

SEQ ID NO: 2350687 - RNA, 19 nt, Homo sapiens
  misc_RNA (1)...(19): siRNA sense strand
gauuaaaagauaccggaua

SEQ ID NO: 2350688 - RNA, 19 nt, Homo sapiens
  misc_RNA (1)...(19): siRNA sense strand
gaugaagaaaggagggcca

SEQ ID NO: 2350689 - RNA, 19 nt, Homo sapiens
  misc_RNA (1)...(19): siRNA sense strand
guguggaaccauaagaaaa

SEQ ID NO: 2350690 - RNA, 19 nt, Homo sapiens
  misc_RNA (1)...(19): siRNA sense strand
cgaaagagaucuaguccag

SEQ ID NO: 2350691 - RNA, 19 nt, Homo sapiens
  misc_RNA (1)...(19): siRNA sense strand
aaugaagaugcgaccgaaa

SEQ ID NO: 2350692 - RNA, 19 nt, Homo sapiens
  misc_RNA (1)...(19): siRNA sense strand
ggagaauaagaaagaauac

SEQ ID NO: 2350693 - RNA, 19 nt, Homo sapiens
  misc_RNA (1)...(19): siRNA sense strand
agaaagaauacguccgguu

SEQ ID NO: 2350694 - RNA, 19 nt, Homo sapiens
  misc_RNA (1)...(19): siRNA sense strand
cguguggaaccauaagaaa

SEQ ID NO: 2350695 - RNA, 19 nt, Homo sapiens
  misc_RNA (1)...(19): siRNA sense strand
acugaaacccaauggcaga

SEQ ID NO: 2350696 - RNA, 19 nt, Homo sapiens
  misc_RNA (1)...(19): siRNA sense strand
caucaagauccgucugaca

SEQ ID NO: 2350697 - RNA, 19 nt, Homo sapiens
  misc_RNA (1)...(19): siRNA sense strand
agucuuaccgccagauaau

SEQ ID NO: 2350698 - RNA, 19 nt, Homo sapiens
  misc_RNA (1)...(19): siRNA sense strand
aucaaagacuucaggcaca

SEQ ID NO: 2350699 - RNA, 19 nt, Homo sapiens
  misc_RNA (1)...(19): siRNA sense strand
aggcacagcggcuucgaaa

SEQ ID NO: 2350700 - RNA, 19 nt, Homo sapiens
  misc_RNA (1)...(19): siRNA sense strand
uugcaaagauugucgugga

SEQ ID NO: 2350701 - RNA, 19 nt, Homo sapiens
  misc_RNA (1)...(19): siRNA sense strand
ggcuacgaacaaagaacaa

SEQ ID NO: 2350702 - RNA, 19 nt, Homo sapiens
  misc_RNA (1)...(19): siRNA sense strand
uggagguuuaugagaggaa

SEQ ID NO: 2350703 - RNA, 19 nt, Homo sapiens
  misc_RNA (1)...(19): siRNA sense strand
ccuucugcguggaacacaa

SEQ ID NO: 2350704 - RNA, 19 nt, Homo sapiens
  misc_RNA (1)...(19): siRNA sense strand
ugcagaggacuguuagaaa

SEQ ID NO: 2350705 - RNA, 19 nt, Homo sapiens
  misc_RNA (1)...(19): siRNA sense strand
augaaggaacgguguauga

SEQ ID NO: 2350706 - RNA, 19 nt, Homo sapiens
  misc_RNA (1)...(19): siRNA sense strand
cuacgaacaaagaacaaca

SEQ ID NO: 2350707 - RNA, 19 nt, Homo sapiens
  misc_RNA (1)...(19): siRNA sense strand
guuuaugagaggaaucgaa

SEQ ID NO: 2350708 - RNA, 19 nt, Homo sapiens
  misc_RNA (1)...(19): siRNA sense strand
cgguggagacguucgauga

SEQ ID NO: 2350709 - RNA, 19 nt, Homo sapiens
  misc_RNA (1)...(19): siRNA sense strand
cuccaaggcuucaaggcuu

SEQ ID NO: 2350710 - RNA, 19 nt, Homo sapiens
  misc_RNA (1)...(19): siRNA sense strand
gagucuuaccgccagauaa

SEQ ID NO: 2350711 - RNA, 19 nt, Homo sapiens
  misc_RNA (1)...(19): siRNA sense strand
cggaaacaccuuugaggga

SEQ ID NO: 2350712 - RNA, 19 nt, Homo sapiens
  misc_RNA (1)...(19): siRNA sense strand
gcuuugagguggcaggugu

SEQ ID NO: 2350713 - RNA, 19 nt, Homo sapiens
  misc_RNA (1)...(19): siRNA sense strand
gcaccgagaccuaugcuga

SEQ ID NO: 2350714 - RNA, 19 nt, Homo sapiens
  misc_RNA (1)...(19): siRNA sense strand
ggcugggcauagagaccaa

SEQ ID NO: 2350715 - RNA, 19 nt, Homo sapiens
  misc_RNA (1)...(19): siRNA sense strand
cggaaacaccuuugaggga

SEQ ID NO: 2350716 - RNA, 19 nt, Homo sapiens
  misc_RNA (1)...(19): siRNA sense strand
gcuuugagguggcaggugu

SEQ ID NO: 2350717 - RNA, 19 nt, Homo sapiens
  misc_RNA (1)...(19): siRNA sense strand
gcaccgagaccuaugcuga

SEQ ID NO: 2350718 - RNA, 19 nt, Homo sapiens
  misc_RNA (1)...(19): siRNA sense strand
ggcugggcauagagaccaa

SEQ ID NO: 2350719 - RNA, 19 nt, Homo sapiens
  misc_RNA (1)...(19): siRNA sense strand
agaagaucaaggagggcua

SEQ ID NO: 2350720 - RNA, 19 nt, Homo sapiens
  misc_RNA (1)...(19): siRNA sense strand
ucagaaaccucuagaccca

SEQ ID NO: 2350721 - RNA, 19 nt, Homo sapiens
  misc_RNA (1)...(19): siRNA sense strand
ucuugucggcagugaaaua

SEQ ID NO: 2350722 - RNA, 19 nt, Homo sapiens
  misc_RNA (1)...(19): siRNA sense strand
gcaaagacugacugggaag

SEQ ID NO: 2350723 - RNA, 19 nt, Homo sapiens
  misc_RNA (1)...(19): siRNA sense strand
gggucgaaaggaagaagau

SEQ ID NO: 2350724 - RNA, 19 nt, Homo sapiens
  misc_RNA (1)...(19): siRNA sense strand
aagcaaagacugacuggga

SEQ ID NO: 2350725 - RNA, 19 nt, Homo sapiens
  misc_RNA (1)...(19): siRNA sense strand
gccugaaacucaagccuca

SEQ ID NO: 2350726 - RNA, 19 nt, Homo sapiens
  misc_RNA (1)...(19): siRNA sense strand
acauugggagcaaaggaaa

SEQ ID NO: 2350727 - RNA, 19 nt, Homo sapiens
  misc_RNA (1)...(19): siRNA sense strand
gggacagcagccuggagaa

SEQ ID NO: 2350728 - RNA, 19 nt, Homo sapiens
  misc_RNA (1)...(19): siRNA sense strand
gccugaacauugggagcaa

SEQ ID NO: 2350729 - RNA, 19 nt, Homo sapiens
  misc_RNA (1)...(19): siRNA sense strand
ggaagaagaugacugcagu

SEQ ID NO: 2350730 - RNA, 19 nt, Homo sapiens
  misc_RNA (1)...(19): siRNA sense strand
agcaaagacugacugggaa

SEQ ID NO: 2350731 - RNA, 19 nt, Homo sapiens
  misc_RNA (1)...(19): siRNA sense strand
cagccuggagaaugagauu

SEQ ID NO: 2350732 - RNA, 19 nt, Homo sapiens
  misc_RNA (1)...(19): siRNA sense strand
uggaagaaacagaccacca

SEQ ID NO: 2350733 - RNA, 19 nt, Homo sapiens
  misc_RNA (1)...(19): siRNA sense strand
aguuaaagccagacagaaa

SEQ ID NO: 2350734 - RNA, 19 nt, Homo sapiens
  misc_RNA (1)...(19): siRNA sense strand
cugaaaauacagagagaaa

SEQ ID NO: 2350735 - RNA, 19 nt, Homo sapiens
  misc_RNA (1)...(19): siRNA sense strand
gaagcaaaucagagagcaa

SEQ ID NO: 2350736 - RNA, 19 nt, Homo sapiens
  misc_RNA (1)...(19): siRNA sense strand
cagcagaauagguagcaaa

SEQ ID NO: 2350737 - RNA, 19 nt, Homo sapiens
  misc_RNA (1)...(19): siRNA sense strand
aguuaggacuucaggaauu

SEQ ID NO: 2350738 - RNA, 19 nt, Homo sapiens
  misc_RNA (1)...(19): siRNA sense strand
agaauaugguccagagcuu

SEQ ID NO: 2350739 - RNA, 19 nt, Homo sapiens
  misc_RNA (1)...(19): siRNA sense strand
gagaagucgaagagaugaa

SEQ ID NO: 2350740 - RNA, 19 nt, Homo sapiens
  misc_RNA (1)...(19): siRNA sense strand
augaagaauugcagaagau

SEQ ID NO: 2350741 - RNA, 19 nt, Homo sapiens
  misc_RNA (1)...(19): siRNA sense strand
ggacauugugauacaggaa

SEQ ID NO: 2350742 - RNA, 19 nt, Homo sapiens
  misc_RNA (1)...(19): siRNA sense strand
ugguguagcugaaggugaa

SEQ ID NO: 2350743 - RNA, 19 nt, Homo sapiens
  misc_RNA (1)...(19): siRNA sense strand
agucaaguguauuggugaa

SEQ ID NO: 2350744 - RNA, 19 nt, Homo sapiens
  misc_RNA (1)...(19): siRNA sense strand
uguuugugguaaagugaaa

SEQ ID NO: 2350745 - RNA, 19 nt, Homo sapiens
  misc_RNA (1)...(19): siRNA sense strand
cuggaaaacuaaugaaaga

SEQ ID NO: 2350746 - RNA, 19 nt, Homo sapiens
  misc_RNA (1)...(19): siRNA sense strand
cugccauagugaugaguau

SEQ ID NO: 2350747 - RNA, 19 nt, Homo sapiens
  misc_RNA (1)...(19): siRNA sense strand
guguaaacuagaacagcua

SEQ ID NO: 2350748 - RNA, 19 nt, Homo sapiens
  misc_RNA (1)...(19): siRNA sense strand
cauuaauucuugugagucu

SEQ ID NO: 2350749 - RNA, 19 nt, Homo sapiens
  misc_RNA (1)...(19): siRNA sense strand
gaagcauauagaagugaua

SEQ ID NO: 2350750 - RNA, 19 nt, Homo sapiens
  misc_RNA (1)...(19): siRNA sense strand
agugauaguuaaagccaga

SEQ ID NO: 2350751 - RNA, 19 nt, Homo sapiens
  misc_RNA (1)...(19): siRNA sense strand
agguauuguuguaauggaa

SEQ ID NO: 2350752 - RNA, 19 nt, Homo sapiens
  misc_RNA (1)...(19): siRNA sense strand
cuggaaauguauacugauu

SEQ ID NO: 2350753 - RNA, 19 nt, Homo sapiens
  misc_RNA (1)...(19): siRNA sense strand
ccucugaaaggaaggagaa

SEQ ID NO: 2350754 - RNA, 19 nt, Homo sapiens
  misc_RNA (1)...(19): siRNA sense strand
aagaaaugauagaagagca

SEQ ID NO: 2350755 - RNA, 19 nt, Homo sapiens
  misc_RNA (1)...(19): siRNA sense strand
agucaaagagggaagaguu

SEQ ID NO: 2350756 - RNA, 19 nt, Homo sapiens
  misc_RNA (1)...(19): siRNA sense strand
agauacuaccagauguaaa

SEQ ID NO: 2350757 - RNA, 19 nt, Homo sapiens
  misc_RNA (1)...(19): siRNA sense strand
guuugacuguggaggaauu

SEQ ID NO: 2350758 - RNA, 19 nt, Homo sapiens
  misc_RNA (1)...(19): siRNA sense strand
acagaaaaggggagaauca

SEQ ID NO: 2350759 - RNA, 19 nt, Homo sapiens
  misc_RNA (1)...(19): siRNA sense strand
uaauuaugguguagcugaa

SEQ ID NO: 2350760 - RNA, 19 nt, Homo sapiens
  misc_RNA (1)...(19): siRNA sense strand
aaauacagagagaaagcaa

SEQ ID NO: 2350761 - RNA, 19 nt, Homo sapiens
  misc_RNA (1)...(19): siRNA sense strand
aagaauugcugaaggccca

SEQ ID NO: 2350762 - RNA, 19 nt, Homo sapiens
  misc_RNA (1)...(19): siRNA sense strand
gggagaaucauuuggaauc

SEQ ID NO: 2350763 - RNA, 19 nt, Homo sapiens
  misc_RNA (1)...(19): siRNA sense strand
aagagaaaggucagcauuu

SEQ ID NO: 2350764 - RNA, 19 nt, Homo sapiens
  misc_RNA (1)...(19): siRNA sense strand
auacagagagaaagcaaaa

SEQ ID NO: 2350765 - RNA, 19 nt, Homo sapiens
  misc_RNA (1)...(19): siRNA sense strand
aaaccaaguaugaaagcau

SEQ ID NO: 2350766 - RNA, 19 nt, Homo sapiens
  misc_RNA (1)...(19): siRNA sense strand
guuugauggcuuacagcaa

SEQ ID NO: 2350767 - RNA, 19 nt, Homo sapiens
  misc_RNA (1)...(19): siRNA sense strand
uuugagaagucgaagagau

SEQ ID NO: 2350768 - RNA, 19 nt, Homo sapiens
  misc_RNA (1)...(19): siRNA sense strand
guauuguuguaauggaaga

SEQ ID NO: 2350769 - RNA, 19 nt, Homo sapiens
  misc_RNA (1)...(19): siRNA sense strand
cugugcuguuugugguaaa

SEQ ID NO: 2350770 - RNA, 19 nt, Homo sapiens
  misc_RNA (1)...(19): siRNA sense strand
agaacugaguaauagucaa

SEQ ID NO: 2350771 - RNA, 19 nt, Homo sapiens
  misc_RNA (1)...(19): siRNA sense strand
gaaagagaaaggucagcau

SEQ ID NO: 2350772 - RNA, 19 nt, Homo sapiens
  misc_RNA (1)...(19): siRNA sense strand
caucaucucuuaaugggaa

SEQ ID NO: 2350773 - RNA, 19 nt, Homo sapiens
  misc_RNA (1)...(19): siRNA sense strand
uuugcagaaccuagaaaua

SEQ ID NO: 2350774 - RNA, 19 nt, Homo sapiens
  misc_RNA (1)...(19): siRNA sense strand
uaaugaaagagaaagguca

SEQ ID NO: 2350775 - RNA, 19 nt, Homo sapiens
  misc_RNA (1)...(19): siRNA sense strand
ucuccaaagccuaaaccaa

SEQ ID NO: 2350776 - RNA, 19 nt, Homo sapiens
  misc_RNA (1)...(19): siRNA sense strand
caauaagguacaaaaggaa

SEQ ID NO: 2350777 - RNA, 19 nt, Homo sapiens
  misc_RNA (1)...(19): siRNA sense strand
cagcaaugaagcauauaga

SEQ ID NO: 2350778 - RNA, 19 nt, Homo sapiens
  misc_RNA (1)...(19): siRNA sense strand
aagccagacagaaaguaaa

SEQ ID NO: 2350779 - RNA, 19 nt, Homo sapiens
  misc_RNA (1)...(19): siRNA sense strand
gugaugaguauuucagaca

SEQ ID NO: 2350780 - RNA, 19 nt, Homo sapiens
  misc_RNA (1)...(19): siRNA sense strand
ggggagaaucauuuggaau

SEQ ID NO: 2350781 - RNA, 19 nt, Homo sapiens
  misc_RNA (1)...(19): siRNA sense strand
aauacagagagaaagcaaa

SEQ ID NO: 2350782 - RNA, 19 nt, Homo sapiens
  misc_RNA (1)...(19): siRNA sense strand
aauacaaacccaagcaguu

SEQ ID NO: 2350783 - RNA, 19 nt, Homo sapiens
  misc_RNA (1)...(19): siRNA sense strand
aaagccagacagaaaguaa

SEQ ID NO: 2350784 - RNA, 19 nt, Homo sapiens
  misc_RNA (1)...(19): siRNA sense strand
cugaaggugaagaugauuu

SEQ ID NO: 2350785 - RNA, 19 nt, Homo sapiens
  misc_RNA (1)...(19): siRNA sense strand
ggucauuuguugcuggagu

SEQ ID NO: 2350786 - RNA, 19 nt, Homo sapiens
  misc_RNA (1)...(19): siRNA sense strand
auagaagagcaguuggaca

SEQ ID NO: 2350787 - RNA, 19 nt, Homo sapiens
  misc_RNA (1)...(19): siRNA sense strand
guaaacuagaacagcuauu

SEQ ID NO: 2350788 - RNA, 19 nt, Homo sapiens
  misc_RNA (1)...(19): siRNA sense strand
aguuaaagccagacagaaa

SEQ ID NO: 2350789 - RNA, 19 nt, Homo sapiens
  misc_RNA (1)...(19): siRNA sense strand
cugaaaauacagagagaaa

SEQ ID NO: 2350790 - RNA, 19 nt, Homo sapiens
  misc_RNA (1)...(19): siRNA sense strand
gaagcaaaucagagagcaa

SEQ ID NO: 2350791 - RNA, 19 nt, Homo sapiens
  misc_RNA (1)...(19): siRNA sense strand
cagcagaauagguagcaaa

SEQ ID NO: 2350792 - RNA, 19 nt, Homo sapiens
  misc_RNA (1)...(19): siRNA sense strand
aguuaggacuucaggaauu

SEQ ID NO: 2350793 - RNA, 19 nt, Homo sapiens
  misc_RNA (1)...(19): siRNA sense strand
agaauaugguccagagcuu

SEQ ID NO: 2350794 - RNA, 19 nt, Homo sapiens
  misc_RNA (1)...(19): siRNA sense strand
gagaagucgaagagaugaa

SEQ ID NO: 2350795 - RNA, 19 nt, Homo sapiens
  misc_RNA (1)...(19): siRNA sense strand
augaagaauugcagaagau

SEQ ID NO: 2350796 - RNA, 19 nt, Homo sapiens
  misc_RNA (1)...(19): siRNA sense strand
ggacauugugauacaggaa

SEQ ID NO: 2350797 - RNA, 19 nt, Homo sapiens
  misc_RNA (1)...(19): siRNA sense strand
ugguguagcugaaggugaa

SEQ ID NO: 2350798 - RNA, 19 nt, Homo sapiens
  misc_RNA (1)...(19): siRNA sense strand
agucaaguguauuggugaa

SEQ ID NO: 2350799 - RNA, 19 nt, Homo sapiens
  misc_RNA (1)...(19): siRNA sense strand
uguuugugguaaagugaaa

SEQ ID NO: 2350800 - RNA, 19 nt, Homo sapiens
  misc_RNA (1)...(19): siRNA sense strand
cuggaaaacuaaugaaaga

SEQ ID NO: 2350801 - RNA, 19 nt, Homo sapiens
  misc_RNA (1)...(19): siRNA sense strand
cugccauagugaugaguau

SEQ ID NO: 2350802 - RNA, 19 nt, Homo sapiens
  misc_RNA (1)...(19): siRNA sense strand
guguaaacuagaacagcua

SEQ ID NO: 2350803 - RNA, 19 nt, Homo sapiens
  misc_RNA (1)...(19): siRNA sense strand
cauuaauucuugugagucu

SEQ ID NO: 2350804 - RNA, 19 nt, Homo sapiens
  misc_RNA (1)...(19): siRNA sense strand
gaagcauauagaagugaua

SEQ ID NO: 2350805 - RNA, 19 nt, Homo sapiens
  misc_RNA (1)...(19): siRNA sense strand
agugauaguuaaagccaga

SEQ ID NO: 2350806 - RNA, 19 nt, Homo sapiens
  misc_RNA (1)...(19): siRNA sense strand
agguauuguuguaauggaa

SEQ ID NO: 2350807 - RNA, 19 nt, Homo sapiens
  misc_RNA (1)...(19): siRNA sense strand
cuggaaauguauacugauu

SEQ ID NO: 2350808 - RNA, 19 nt, Homo sapiens
  misc_RNA (1)...(19): siRNA sense strand
ccucugaaaggaaggagaa

SEQ ID NO: 2350809 - RNA, 19 nt, Homo sapiens
  misc_RNA (1)...(19): siRNA sense strand
aagaaaugauagaagagca

SEQ ID NO: 2350810 - RNA, 19 nt, Homo sapiens
  misc_RNA (1)...(19): siRNA sense strand
agucaaagagggaagaguu

SEQ ID NO: 2350811 - RNA, 19 nt, Homo sapiens
  misc_RNA (1)...(19): siRNA sense strand
agauacuaccagauguaaa

SEQ ID NO: 2350812 - RNA, 19 nt, Homo sapiens
  misc_RNA (1)...(19): siRNA sense strand
guuugacuguggaggaauu

SEQ ID NO: 2350813 - RNA, 19 nt, Homo sapiens
  misc_RNA (1)...(19): siRNA sense strand
acagaaaaggggagaauca

SEQ ID NO: 2350814 - RNA, 19 nt, Homo sapiens
  misc_RNA (1)...(19): siRNA sense strand
uaauuaugguguagcugaa

SEQ ID NO: 2350815 - RNA, 19 nt, Homo sapiens
  misc_RNA (1)...(19): siRNA sense strand
aaauacagagagaaagcaa

SEQ ID NO: 2350816 - RNA, 19 nt, Homo sapiens
  misc_RNA (1)...(19): siRNA sense strand
aagaauugcugaaggccca

SEQ ID NO: 2350817 - RNA, 19 nt, Homo sapiens
  misc_RNA (1)...(19): siRNA sense strand
gggagaaucauuuggaauc

SEQ ID NO: 2350818 - RNA, 19 nt, Homo sapiens
  misc_RNA (1)...(19): siRNA sense strand
aagagaaaggucagcauuu

SEQ ID NO: 2350819 - RNA, 19 nt, Homo sapiens
  misc_RNA (1)...(19): siRNA sense strand
auacagagagaaagcaaaa

SEQ ID NO: 2350820 - RNA, 19 nt, Homo sapiens
  misc_RNA (1)...(19): siRNA sense strand
aaaccaaguaugaaagcau

SEQ ID NO: 2350821 - RNA, 19 nt, Homo sapiens
  misc_RNA (1)...(19): siRNA sense strand
guuugauggcuuacagcaa

SEQ ID NO: 2350822 - RNA, 19 nt, Homo sapiens
  misc_RNA (1)...(19): siRNA sense strand
uuugagaagucgaagagau

SEQ ID NO: 2350823 - RNA, 19 nt, Homo sapiens
  misc_RNA (1)...(19): siRNA sense strand
guauuguuguaauggaaga

SEQ ID NO: 2350824 - RNA, 19 nt, Homo sapiens
  misc_RNA (1)...(19): siRNA sense strand
cugugcuguuugugguaaa

SEQ ID NO: 2350825 - RNA, 19 nt, Homo sapiens
  misc_RNA (1)...(19): siRNA sense strand
agaacugaguaauagucaa

SEQ ID NO: 2350826 - RNA, 19 nt, Homo sapiens
  misc_RNA (1)...(19): siRNA sense strand
gaaagagaaaggucagcau

SEQ ID NO: 2350827 - RNA, 19 nt, Homo sapiens
  misc_RNA (1)...(19): siRNA sense strand
caucaucucuuaaugggaa

SEQ ID NO: 2350828 - RNA, 19 nt, Homo sapiens
  misc_RNA (1)...(19): siRNA sense strand
uuugcagaaccuagaaaua

SEQ ID NO: 2350829 - RNA, 19 nt, Homo sapiens
  misc_RNA (1)...(19): siRNA sense strand
uaaugaaagagaaagguca

SEQ ID NO: 2350830 - RNA, 19 nt, Homo sapiens
  misc_RNA (1)...(19): siRNA sense strand
ucuccaaagccuaaaccaa

SEQ ID NO: 2350831 - RNA, 19 nt, Homo sapiens
  misc_RNA (1)...(19): siRNA sense strand
caauaagguacaaaaggaa

SEQ ID NO: 2350832 - RNA, 19 nt, Homo sapiens
  misc_RNA (1)...(19): siRNA sense strand
cagcaaugaagcauauaga

SEQ ID NO: 2350833 - RNA, 19 nt, Homo sapiens
  misc_RNA (1)...(19): siRNA sense strand
aagccagacagaaaguaaa

SEQ ID NO: 2350834 - RNA, 19 nt, Homo sapiens
  misc_RNA (1)...(19): siRNA sense strand
gugaugaguauuucagaca

SEQ ID NO: 2350835 - RNA, 19 nt, Homo sapiens
  misc_RNA (1)...(19): siRNA sense strand
ggggagaaucauuuggaau

SEQ ID NO: 2350836 - RNA, 19 nt, Homo sapiens
  misc_RNA (1)...(19): siRNA sense strand
aauacagagagaaagcaaa

SEQ ID NO: 2350837 - RNA, 19 nt, Homo sapiens
  misc_RNA (1)...(19): siRNA sense strand
aauacaaacccaagcaguu

SEQ ID NO: 2350838 - RNA, 19 nt, Homo sapiens
  misc_RNA (1)...(19): siRNA sense strand
aaagccagacagaaaguaa

SEQ ID NO: 2350839 - RNA, 19 nt, Homo sapiens
  misc_RNA (1)...(19): siRNA sense strand
cugaaggugaagaugauuu

SEQ ID NO: 2350840 - RNA, 19 nt, Homo sapiens
  misc_RNA (1)...(19): siRNA sense strand
ggucauuuguugcuggagu

SEQ ID NO: 2350841 - RNA, 19 nt, Homo sapiens
  misc_RNA (1)...(19): siRNA sense strand
auagaagagcaguuggaca

SEQ ID NO: 2350842 - RNA, 19 nt, Homo sapiens
  misc_RNA (1)...(19): siRNA sense strand
guaaacuagaacagcuauu

SEQ ID NO: 2350843 - RNA, 19 nt, Homo sapiens
  misc_RNA (1)...(19): siRNA sense strand
agggaaugacagaaacaua

SEQ ID NO: 2350844 - RNA, 19 nt, Homo sapiens
  misc_RNA (1)...(19): siRNA sense strand
agaugaaggaggugaagga

SEQ ID NO: 2350845 - RNA, 19 nt, Homo sapiens
  misc_RNA (1)...(19): siRNA sense strand
gcaucaucgucuugggcuu

SEQ ID NO: 2350846 - RNA, 19 nt, Homo sapiens
  misc_RNA (1)...(19): siRNA sense strand
cgugaaaagcggaaucaua

SEQ ID NO: 2350847 - RNA, 19 nt, Homo sapiens
  misc_RNA (1)...(19): siRNA sense strand
ugccacaagggaagggaaa

SEQ ID NO: 2350848 - RNA, 19 nt, Homo sapiens
  misc_RNA (1)...(19): siRNA sense strand
acuacaacauggaugaaaa

SEQ ID NO: 2350849 - RNA, 19 nt, Homo sapiens
  misc_RNA (1)...(19): siRNA sense strand
aggugaaggaacaguguga

SEQ ID NO: 2350850 - RNA, 19 nt, Homo sapiens
  misc_RNA (1)...(19): siRNA sense strand
cagcagaaacugagaggag

SEQ ID NO: 2350851 - RNA, 19 nt, Homo sapiens
  misc_RNA (1)...(19): siRNA sense strand
acaaguugagaaagaggaa

SEQ ID NO: 2350852 - RNA, 19 nt, Homo sapiens
  misc_RNA (1)...(19): siRNA sense strand
uugagaaagaggaaaccaa

SEQ ID NO: 2350853 - RNA, 19 nt, Homo sapiens
  misc_RNA (1)...(19): siRNA sense strand
ugagaggagaagaugacua

SEQ ID NO: 2350854 - RNA, 19 nt, Homo sapiens
  misc_RNA (1)...(19): siRNA sense strand
gcgccguggagcugaagaa

SEQ ID NO: 2350855 - RNA, 19 nt, Homo sapiens
  misc_RNA (1)...(19): siRNA sense strand
cagaggugccacaagggaa

SEQ ID NO: 2350856 - RNA, 19 nt, Homo sapiens
  misc_RNA (1)...(19): siRNA sense strand
ugucagugagccaggaaaa

SEQ ID NO: 2350857 - RNA, 19 nt, Homo sapiens
  misc_RNA (1)...(19): siRNA sense strand
ccaaugagauccagguggu

SEQ ID NO: 2350858 - RNA, 19 nt, Homo sapiens
  misc_RNA (1)...(19): siRNA sense strand
gagcugaagaagaacgagu

SEQ ID NO: 2350859 - RNA, 19 nt, Homo sapiens
  misc_RNA (1)...(19): siRNA sense strand
gcgggagcagcuugacaaa

SEQ ID NO: 2350860 - RNA, 19 nt, Homo sapiens
  misc_RNA (1)...(19): siRNA sense strand
aggcgguuuuggugaauaa

SEQ ID NO: 2350861 - RNA, 19 nt, Homo sapiens
  misc_RNA (1)...(19): siRNA sense strand
gguaacagcaagucccaga

SEQ ID NO: 2350862 - RNA, 19 nt, Homo sapiens
  misc_RNA (1)...(19): siRNA sense strand
uuacuugaucagcgugaaa

SEQ ID NO: 2350863 - RNA, 19 nt, Homo sapiens
  misc_RNA (1)...(19): siRNA sense strand
agggagaaaccagcagaaa

SEQ ID NO: 2350864 - RNA, 19 nt, Homo sapiens
  misc_RNA (1)...(19): siRNA sense strand
agaaaagagacaccauaaa

SEQ ID NO: 2350865 - RNA, 19 nt, Homo sapiens
  misc_RNA (1)...(19): siRNA sense strand
cuuccagagaccugaguga

SEQ ID NO: 2350866 - RNA, 19 nt, Homo sapiens
  misc_RNA (1)...(19): siRNA sense strand
agggaaugacagaaacaua

SEQ ID NO: 2350867 - RNA, 19 nt, Homo sapiens
  misc_RNA (1)...(19): siRNA sense strand
agaugaaggaggugaagga

SEQ ID NO: 2350868 - RNA, 19 nt, Homo sapiens
  misc_RNA (1)...(19): siRNA sense strand
gcaucaucgucuugggcuu

SEQ ID NO: 2350869 - RNA, 19 nt, Homo sapiens
  misc_RNA (1)...(19): siRNA sense strand
cgugaaaagcggaaucaua

SEQ ID NO: 2350870 - RNA, 19 nt, Homo sapiens
  misc_RNA (1)...(19): siRNA sense strand
ugccacaagggaagggaaa

SEQ ID NO: 2350871 - RNA, 19 nt, Homo sapiens
  misc_RNA (1)...(19): siRNA sense strand
acuacaacauggaugaaaa

SEQ ID NO: 2350872 - RNA, 19 nt, Homo sapiens
  misc_RNA (1)...(19): siRNA sense strand
aggugaaggaacaguguga

SEQ ID NO: 2350873 - RNA, 19 nt, Homo sapiens
  misc_RNA (1)...(19): siRNA sense strand
cagcagaaacugagaggag

SEQ ID NO: 2350874 - RNA, 19 nt, Homo sapiens
  misc_RNA (1)...(19): siRNA sense strand
acaaguugagaaagaggaa

SEQ ID NO: 2350875 - RNA, 19 nt, Homo sapiens
  misc_RNA (1)...(19): siRNA sense strand
uugagaaagaggaaaccaa

SEQ ID NO: 2350876 - RNA, 19 nt, Homo sapiens
  misc_RNA (1)...(19): siRNA sense strand
ugagaggagaagaugacua

SEQ ID NO: 2350877 - RNA, 19 nt, Homo sapiens
  misc_RNA (1)...(19): siRNA sense strand
gcgccguggagcugaagaa

SEQ ID NO: 2350878 - RNA, 19 nt, Homo sapiens
  misc_RNA (1)...(19): siRNA sense strand
cagaggugccacaagggaa

SEQ ID NO: 2350879 - RNA, 19 nt, Homo sapiens
  misc_RNA (1)...(19): siRNA sense strand
ugucagugagccaggaaaa

SEQ ID NO: 2350880 - RNA, 19 nt, Homo sapiens
  misc_RNA (1)...(19): siRNA sense strand
ccaaugagauccagguggu

SEQ ID NO: 2350881 - RNA, 19 nt, Homo sapiens
  misc_RNA (1)...(19): siRNA sense strand
gagcugaagaagaacgagu

SEQ ID NO: 2350882 - RNA, 19 nt, Homo sapiens
  misc_RNA (1)...(19): siRNA sense strand
gcgggagcagcuugacaaa

SEQ ID NO: 2350883 - RNA, 19 nt, Homo sapiens
  misc_RNA (1)...(19): siRNA sense strand
aggcgguuuuggugaauaa

SEQ ID NO: 2350884 - RNA, 19 nt, Homo sapiens
  misc_RNA (1)...(19): siRNA sense strand
gguaacagcaagucccaga

SEQ ID NO: 2350885 - RNA, 19 nt, Homo sapiens
  misc_RNA (1)...(19): siRNA sense strand
uuacuugaucagcgugaaa

SEQ ID NO: 2350886 - RNA, 19 nt, Homo sapiens
  misc_RNA (1)...(19): siRNA sense strand
agggagaaaccagcagaaa

SEQ ID NO: 2350887 - RNA, 19 nt, Homo sapiens
  misc_RNA (1)...(19): siRNA sense strand
agaaaagagacaccauaaa

SEQ ID NO: 2350888 - RNA, 19 nt, Homo sapiens
  misc_RNA (1)...(19): siRNA sense strand
cuuccagagaccugaguga

SEQ ID NO: 2350889 - RNA, 19 nt, Homo sapiens
  misc_RNA (1)...(19): siRNA sense strand
cggagaaacuggaaggagc

SEQ ID NO: 2350890 - RNA, 19 nt, Homo sapiens
  misc_RNA (1)...(19): siRNA sense strand
cggagaaacuggaaggagc

SEQ ID NO: 2350891 - RNA, 19 nt, Homo sapiens
  misc_RNA (1)...(19): siRNA sense strand
caaacaagauguaugcgaa

SEQ ID NO: 2350892 - RNA, 19 nt, Homo sapiens
  misc_RNA (1)...(19): siRNA sense strand
uguacaaaggacagacaau

SEQ ID NO: 2350893 - RNA, 19 nt, Homo sapiens
  misc_RNA (1)...(19): siRNA sense strand
gaauaaacgcuuucccuga

SEQ ID NO: 2350894 - RNA, 19 nt, Homo sapiens
  misc_RNA (1)...(19): siRNA sense strand
ucccaaaaucagagaagaa

SEQ ID NO: 2350895 - RNA, 19 nt, Homo sapiens
  misc_RNA (1)...(19): siRNA sense strand
acagacaaugccaggacaa

SEQ ID NO: 2350896 - RNA, 19 nt, Homo sapiens
  misc_RNA (1)...(19): siRNA sense strand
gugaauuccaagaaaggga

SEQ ID NO: 2350897 - RNA, 19 nt, Homo sapiens
  misc_RNA (1)...(19): siRNA sense strand
aagaaagggauguguguac

SEQ ID NO: 2350898 - RNA, 19 nt, Homo sapiens
  misc_RNA (1)...(19): siRNA sense strand
caaacaagauguaugcgaa

SEQ ID NO: 2350899 - RNA, 19 nt, Homo sapiens
  misc_RNA (1)...(19): siRNA sense strand
uguacaaaggacagacaau

SEQ ID NO: 2350900 - RNA, 19 nt, Homo sapiens
  misc_RNA (1)...(19): siRNA sense strand
gaauaaacgcuuucccuga

SEQ ID NO: 2350901 - RNA, 19 nt, Homo sapiens
  misc_RNA (1)...(19): siRNA sense strand
ucccaaaaucagagaagaa

SEQ ID NO: 2350902 - RNA, 19 nt, Homo sapiens
  misc_RNA (1)...(19): siRNA sense strand
acagacaaugccaggacaa

SEQ ID NO: 2350903 - RNA, 19 nt, Homo sapiens
  misc_RNA (1)...(19): siRNA sense strand
gugaauuccaagaaaggga

SEQ ID NO: 2350904 - RNA, 19 nt, Homo sapiens
  misc_RNA (1)...(19): siRNA sense strand
aagaaagggauguguguac

SEQ ID NO: 2350905 - RNA, 19 nt, Homo sapiens
  misc_RNA (1)...(19): siRNA sense strand
agaugaagacagugggaaa

SEQ ID NO: 2350906 - RNA, 19 nt, Homo sapiens
  misc_RNA (1)...(19): siRNA sense strand
agaaagaaugggugaagaa

SEQ ID NO: 2350907 - RNA, 19 nt, Homo sapiens
  misc_RNA (1)...(19): siRNA sense strand
ggacugaagcagauggcaa

SEQ ID NO: 2350908 - RNA, 19 nt, Homo sapiens
  misc_RNA (1)...(19): siRNA sense strand
cggcugaacuggaggagca

SEQ ID NO: 2350909 - RNA, 19 nt, Homo sapiens
  misc_RNA (1)...(19): siRNA sense strand
cgguauaugacaaccaaua

SEQ ID NO: 2350910 - RNA, 19 nt, Homo sapiens
  misc_RNA (1)...(19): siRNA sense strand
ccaacagaauagacagaga

SEQ ID NO: 2350911 - RNA, 19 nt, Homo sapiens
  misc_RNA (1)...(19): siRNA sense strand
ccagaguauuugacagaga

SEQ ID NO: 2350912 - RNA, 19 nt, Homo sapiens
  misc_RNA (1)...(19): siRNA sense strand
ugcagaugcuggagagaau

SEQ ID NO: 2350913 - RNA, 19 nt, Homo sapiens
  misc_RNA (1)...(19): siRNA sense strand
uggaaugaacgcugaacua

SEQ ID NO: 2350914 - RNA, 19 nt, Homo sapiens
  misc_RNA (1)...(19): siRNA sense strand
cuucaaugguguacagcau

SEQ ID NO: 2350915 - RNA, 19 nt, Homo sapiens
  misc_RNA (1)...(19): siRNA sense strand
uuaaaugggcagaguguuu

SEQ ID NO: 2350916 - RNA, 19 nt, Homo sapiens
  misc_RNA (1)...(19): siRNA sense strand
aguauuugacagagaagaa

SEQ ID NO: 2350917 - RNA, 19 nt, Homo sapiens
  misc_RNA (1)...(19): siRNA sense strand
uuacacuauuagagaggaa

SEQ ID NO: 2350918 - RNA, 19 nt, Homo sapiens
  misc_RNA (1)...(19): siRNA sense strand
ccuggaaagaagacagcaa

SEQ ID NO: 2350919 - RNA, 19 nt, Homo sapiens
  misc_RNA (1)...(19): siRNA sense strand
cagagaagaacaagaacga

SEQ ID NO: 2350920 - RNA, 19 nt, Homo sapiens
  misc_RNA (1)...(19): siRNA sense strand
cagaaaacacuuugaucaa

SEQ ID NO: 2350921 - RNA, 19 nt, Homo sapiens
  misc_RNA (1)...(19): siRNA sense strand
ggacaagaggacugaagca

SEQ ID NO: 2350922 - RNA, 19 nt, Homo sapiens
  misc_RNA (1)...(19): siRNA sense strand
ugguaaggguuaagcuuga

SEQ ID NO: 2350923 - RNA, 19 nt, Homo sapiens
  misc_RNA (1)...(19): siRNA sense strand
ccaacaacauucaagccua

SEQ ID NO: 2350924 - RNA, 19 nt, Homo sapiens
  misc_RNA (1)...(19): siRNA sense strand
aaggaggcuucaagacaaa

SEQ ID NO: 2350925 - RNA, 19 nt, Homo sapiens
  misc_RNA (1)...(19): siRNA sense strand
cugcagugacaguggucua

SEQ ID NO: 2350926 - RNA, 19 nt, Homo sapiens
  misc_RNA (1)...(19): siRNA sense strand
cugaggagaaugaguguuu

SEQ ID NO: 2350927 - RNA, 19 nt, Homo sapiens
  misc_RNA (1)...(19): siRNA sense strand
ucuuugaucuggaccgaaa

SEQ ID NO: 2350928 - RNA, 19 nt, Homo sapiens
  misc_RNA (1)...(19): siRNA sense strand
ccccaaaccaggagaacaa

SEQ ID NO: 2350929 - RNA, 19 nt, Homo sapiens
  misc_RNA (1)...(19): siRNA sense strand
gcaccaaagaauucagcuu

SEQ ID NO: 2350930 - RNA, 19 nt, Homo sapiens
  misc_RNA (1)...(19): siRNA sense strand
uggauagagaacagaaaga

SEQ ID NO: 2350931 - RNA, 19 nt, Homo sapiens
  misc_RNA (1)...(19): siRNA sense strand
agaauaaagcugugacucu

SEQ ID NO: 2350932 - RNA, 19 nt, Homo sapiens
  misc_RNA (1)...(19): siRNA sense strand
guguacagcauuaugaauu

SEQ ID NO: 2350933 - RNA, 19 nt, Homo sapiens
  misc_RNA (1)...(19): siRNA sense strand
agacauuguuuaucagcuu

SEQ ID NO: 2350934 - RNA, 19 nt, Homo sapiens
  misc_RNA (1)...(19): siRNA sense strand
cguguauuuaucugagaaa

SEQ ID NO: 2350935 - RNA, 19 nt, Homo sapiens
  misc_RNA (1)...(19): siRNA sense strand
ugucaaagccacugaugga

SEQ ID NO: 2350936 - RNA, 19 nt, Homo sapiens
  misc_RNA (1)...(19): siRNA sense strand
gagcaagcaaggugccgaa

SEQ ID NO: 2350937 - RNA, 19 nt, Homo sapiens
  misc_RNA (1)...(19): siRNA sense strand
ggacaggaacauaggggau

SEQ ID NO: 2350938 - RNA, 19 nt, Homo sapiens
  misc_RNA (1)...(19): siRNA sense strand
ccaaggaggcuucaagaca

SEQ ID NO: 2350939 - RNA, 19 nt, Homo sapiens
  misc_RNA (1)...(19): siRNA sense strand
caucaauggcaccguguau

SEQ ID NO: 2350940 - RNA, 19 nt, Homo sapiens
  misc_RNA (1)...(19): siRNA sense strand
agccacugauggaggacaa

SEQ ID NO: 2350941 - RNA, 19 nt, Homo sapiens
  misc_RNA (1)...(19): siRNA sense strand
gaaacauaccaaaggaucu

SEQ ID NO: 2350942 - RNA, 19 nt, Homo sapiens
  misc_RNA (1)...(19): siRNA sense strand
caguaagugauguaaauga

SEQ ID NO: 2350943 - RNA, 19 nt, Homo sapiens
  misc_RNA (1)...(19): siRNA sense strand
ccuaucaaugggacaauaa

SEQ ID NO: 2350944 - RNA, 19 nt, Homo sapiens
  misc_RNA (1)...(19): siRNA sense strand
gagcaaaguauaggaagau

SEQ ID NO: 2350945 - RNA, 19 nt, Homo sapiens
  misc_RNA (1)...(19): siRNA sense strand
ccauaggaaacauaccaaa

SEQ ID NO: 2350946 - RNA, 19 nt, Homo sapiens
  misc_RNA (1)...(19): siRNA sense strand
caaggauaccaaugauaau

SEQ ID NO: 2350947 - RNA, 19 nt, Homo sapiens
  misc_RNA (1)...(19): siRNA sense strand
cagaugcuggagagaauaa

SEQ ID NO: 2350948 - RNA, 19 nt, Homo sapiens
  misc_RNA (1)...(19): siRNA sense strand
cagaaagaaugggugaaga

SEQ ID NO: 2350949 - RNA, 19 nt, Homo sapiens
  misc_RNA (1)...(19): siRNA sense strand
cuggagucauaaagucaaa

SEQ ID NO: 2350950 - RNA, 19 nt, Homo sapiens
  misc_RNA (1)...(19): siRNA sense strand
uauagugaguggaaacaau

SEQ ID NO: 2350951 - RNA, 19 nt, Homo sapiens
  misc_RNA (1)...(19): siRNA sense strand
aggaacucccuuuggacaa

SEQ ID NO: 2350952 - RNA, 19 nt, Homo sapiens
  misc_RNA (1)...(19): siRNA sense strand
aacagaauagacagagaaa

SEQ ID NO: 2350953 - RNA, 19 nt, Homo sapiens
  misc_RNA (1)...(19): siRNA sense strand
ccgcaauagcucaagaacu

SEQ ID NO: 2350954 - RNA, 19 nt, Homo sapiens
  misc_RNA (1)...(19): siRNA sense strand
uugacagccuccagaguau

SEQ ID NO: 2350955 - RNA, 19 nt, Homo sapiens
  misc_RNA (1)...(19): siRNA sense strand
cuaucaacgucauggaugu

SEQ ID NO: 2350956 - RNA, 19 nt, Homo sapiens
  misc_RNA (1)...(19): siRNA sense strand
acacuauuagagaggaauu

SEQ ID NO: 2350957 - RNA, 19 nt, Homo sapiens
  misc_RNA (1)...(19): siRNA sense strand
uggaaagaagacagcaaca

SEQ ID NO: 2350958 - RNA, 19 nt, Homo sapiens
  misc_RNA (1)...(19): siRNA sense strand
ucugaagucuuauaagcaa

SEQ ID NO: 2350959 - RNA, 19 nt, Homo sapiens
  misc_RNA (1)...(19): siRNA sense strand
gugaaaguauccagcagca

SEQ ID NO: 2350960 - RNA, 19 nt, Homo sapiens
  misc_RNA (1)...(19): siRNA sense strand
uauuagugccacagaugaa

SEQ ID NO: 2350961 - RNA, 19 nt, Homo sapiens
  misc_RNA (1)...(19): siRNA sense strand
cuuggauagagaacagaaa

SEQ ID NO: 2350962 - RNA, 19 nt, Homo sapiens
  misc_RNA (1)...(19): siRNA sense strand
aagaagacagcaacaggaa

SEQ ID NO: 2350963 - RNA, 19 nt, Homo sapiens
  misc_RNA (1)...(19): siRNA sense strand
agaugaagacagugggaaa

SEQ ID NO: 2350964 - RNA, 19 nt, Homo sapiens
  misc_RNA (1)...(19): siRNA sense strand
agaaagaaugggugaagaa

SEQ ID NO: 2350965 - RNA, 19 nt, Homo sapiens
  misc_RNA (1)...(19): siRNA sense strand
ggacugaagcagauggcaa

SEQ ID NO: 2350966 - RNA, 19 nt, Homo sapiens
  misc_RNA (1)...(19): siRNA sense strand
cggcugaacuggaggagca

SEQ ID NO: 2350967 - RNA, 19 nt, Homo sapiens
  misc_RNA (1)...(19): siRNA sense strand
cgguauaugacaaccaaua

SEQ ID NO: 2350968 - RNA, 19 nt, Homo sapiens
  misc_RNA (1)...(19): siRNA sense strand
ccaacagaauagacagaga

SEQ ID NO: 2350969 - RNA, 19 nt, Homo sapiens
  misc_RNA (1)...(19): siRNA sense strand
ccagaguauuugacagaga

SEQ ID NO: 2350970 - RNA, 19 nt, Homo sapiens
  misc_RNA (1)...(19): siRNA sense strand
ugcagaugcuggagagaau

SEQ ID NO: 2350971 - RNA, 19 nt, Homo sapiens
  misc_RNA (1)...(19): siRNA sense strand
uggaaugaacgcugaacua

SEQ ID NO: 2350972 - RNA, 19 nt, Homo sapiens
  misc_RNA (1)...(19): siRNA sense strand
cuucaaugguguacagcau

SEQ ID NO: 2350973 - RNA, 19 nt, Homo sapiens
  misc_RNA (1)...(19): siRNA sense strand
uuaaaugggcagaguguuu

SEQ ID NO: 2350974 - RNA, 19 nt, Homo sapiens
  misc_RNA (1)...(19): siRNA sense strand
aguauuugacagagaagaa

SEQ ID NO: 2350975 - RNA, 19 nt, Homo sapiens
  misc_RNA (1)...(19): siRNA sense strand
uuacacuauuagagaggaa

SEQ ID NO: 2350976 - RNA, 19 nt, Homo sapiens
  misc_RNA (1)...(19): siRNA sense strand
ccuggaaagaagacagcaa

SEQ ID NO: 2350977 - RNA, 19 nt, Homo sapiens
  misc_RNA (1)...(19): siRNA sense strand
cagagaagaacaagaacga

SEQ ID NO: 2350978 - RNA, 19 nt, Homo sapiens
  misc_RNA (1)...(19): siRNA sense strand
cagaaaacacuuugaucaa

SEQ ID NO: 2350979 - RNA, 19 nt, Homo sapiens
  misc_RNA (1)...(19): siRNA sense strand
ggacaagaggacugaagca

SEQ ID NO: 2350980 - RNA, 19 nt, Homo sapiens
  misc_RNA (1)...(19): siRNA sense strand
ugguaaggguuaagcuuga

SEQ ID NO: 2350981 - RNA, 19 nt, Homo sapiens
  misc_RNA (1)...(19): siRNA sense strand
ccaacaacauucaagccua

SEQ ID NO: 2350982 - RNA, 19 nt, Homo sapiens
  misc_RNA (1)...(19): siRNA sense strand
aaggaggcuucaagacaaa

SEQ ID NO: 2350983 - RNA, 19 nt, Homo sapiens
  misc_RNA (1)...(19): siRNA sense strand
cugcagugacaguggucua

SEQ ID NO: 2350984 - RNA, 19 nt, Homo sapiens
  misc_RNA (1)...(19): siRNA sense strand
cugaggagaaugaguguuu

SEQ ID NO: 2350985 - RNA, 19 nt, Homo sapiens
  misc_RNA (1)...(19): siRNA sense strand
ucuuugaucuggaccgaaa

SEQ ID NO: 2350986 - RNA, 19 nt, Homo sapiens
  misc_RNA (1)...(19): siRNA sense strand
ccccaaaccaggagaacaa

SEQ ID NO: 2350987 - RNA, 19 nt, Homo sapiens
  misc_RNA (1)...(19): siRNA sense strand
gcaccaaagaauucagcuu

SEQ ID NO: 2350988 - RNA, 19 nt, Homo sapiens
  misc_RNA (1)...(19): siRNA sense strand
uggauagagaacagaaaga

SEQ ID NO: 2350989 - RNA, 19 nt, Homo sapiens
  misc_RNA (1)...(19): siRNA sense strand
agaauaaagcugugacucu

SEQ ID NO: 2350990 - RNA, 19 nt, Homo sapiens
  misc_RNA (1)...(19): siRNA sense strand
guguacagcauuaugaauu

SEQ ID NO: 2350991 - RNA, 19 nt, Homo sapiens
  misc_RNA (1)...(19): siRNA sense strand
agacauuguuuaucagcuu

SEQ ID NO: 2350992 - RNA, 19 nt, Homo sapiens
  misc_RNA (1)...(19): siRNA sense strand
cguguauuuaucugagaaa

SEQ ID NO: 2350993 - RNA, 19 nt, Homo sapiens
  misc_RNA (1)...(19): siRNA sense strand
ugucaaagccacugaugga

SEQ ID NO: 2350994 - RNA, 19 nt, Homo sapiens
  misc_RNA (1)...(19): siRNA sense strand
gagcaagcaaggugccgaa

SEQ ID NO: 2350995 - RNA, 19 nt, Homo sapiens
  misc_RNA (1)...(19): siRNA sense strand
ggacaggaacauaggggau

SEQ ID NO: 2350996 - RNA, 19 nt, Homo sapiens
  misc_RNA (1)...(19): siRNA sense strand
ccaaggaggcuucaagaca

SEQ ID NO: 2350997 - RNA, 19 nt, Homo sapiens
  misc_RNA (1)...(19): siRNA sense strand
caucaauggcaccguguau

SEQ ID NO: 2350998 - RNA, 19 nt, Homo sapiens
  misc_RNA (1)...(19): siRNA sense strand
agccacugauggaggacaa

SEQ ID NO: 2350999 - RNA, 19 nt, Homo sapiens
  misc_RNA (1)...(19): siRNA sense strand
gaaacauaccaaaggaucu

SEQ ID NO: 2351000 - RNA, 19 nt, Homo sapiens
  misc_RNA (1)...(19): siRNA sense strand
caguaagugauguaaauga

SEQ ID NO: 2351001 - RNA, 19 nt, Homo sapiens
  misc_RNA (1)...(19): siRNA sense strand
ccuaucaaugggacaauaa

SEQ ID NO: 2351002 - RNA, 19 nt, Homo sapiens
  misc_RNA (1)...(19): siRNA sense strand
gagcaaaguauaggaagau

SEQ ID NO: 2351003 - RNA, 19 nt, Homo sapiens
  misc_RNA (1)...(19): siRNA sense strand
ccauaggaaacauaccaaa

SEQ ID NO: 2351004 - RNA, 19 nt, Homo sapiens
  misc_RNA (1)...(19): siRNA sense strand
caaggauaccaaugauaau

SEQ ID NO: 2351005 - RNA, 19 nt, Homo sapiens
  misc_RNA (1)...(19): siRNA sense strand
cagaugcuggagagaauaa

SEQ ID NO: 2351006 - RNA, 19 nt, Homo sapiens
  misc_RNA (1)...(19): siRNA sense strand
cagaaagaaugggugaaga

SEQ ID NO: 2351007 - RNA, 19 nt, Homo sapiens
  misc_RNA (1)...(19): siRNA sense strand
cuggagucauaaagucaaa

SEQ ID NO: 2351008 - RNA, 19 nt, Homo sapiens
  misc_RNA (1)...(19): siRNA sense strand
uauagugaguggaaacaau

SEQ ID NO: 2351009 - RNA, 19 nt, Homo sapiens
  misc_RNA (1)...(19): siRNA sense strand
aggaacucccuuuggacaa

SEQ ID NO: 2351010 - RNA, 19 nt, Homo sapiens
  misc_RNA (1)...(19): siRNA sense strand
aacagaauagacagagaaa

SEQ ID NO: 2351011 - RNA, 19 nt, Homo sapiens
  misc_RNA (1)...(19): siRNA sense strand
ccgcaauagcucaagaacu

SEQ ID NO: 2351012 - RNA, 19 nt, Homo sapiens
  misc_RNA (1)...(19): siRNA sense strand
uugacagccuccagaguau

SEQ ID NO: 2351013 - RNA, 19 nt, Homo sapiens
  misc_RNA (1)...(19): siRNA sense strand
cuaucaacgucauggaugu

SEQ ID NO: 2351014 - RNA, 19 nt, Homo sapiens
  misc_RNA (1)...(19): siRNA sense strand
acacuauuagagaggaauu

SEQ ID NO: 2351015 - RNA, 19 nt, Homo sapiens
  misc_RNA (1)...(19): siRNA sense strand
uggaaagaagacagcaaca

SEQ ID NO: 2351016 - RNA, 19 nt, Homo sapiens
  misc_RNA (1)...(19): siRNA sense strand
ucugaagucuuauaagcaa

SEQ ID NO: 2351017 - RNA, 19 nt, Homo sapiens
  misc_RNA (1)...(19): siRNA sense strand
gugaaaguauccagcagca

SEQ ID NO: 2351018 - RNA, 19 nt, Homo sapiens
  misc_RNA (1)...(19): siRNA sense strand
uauuagugccacagaugaa

SEQ ID NO: 2351019 - RNA, 19 nt, Homo sapiens
  misc_RNA (1)...(19): siRNA sense strand
cuuggauagagaacagaaa

SEQ ID NO: 2351020 - RNA, 19 nt, Homo sapiens
  misc_RNA (1)...(19): siRNA sense strand
aagaagacagcaacaggaa

SEQ ID NO: 2351021 - RNA, 19 nt, Homo sapiens
  misc_RNA (1)...(19): siRNA sense strand
cugaggaaacagagaacaa

SEQ ID NO: 2351022 - RNA, 19 nt, Homo sapiens
  misc_RNA (1)...(19): siRNA sense strand
ggcuagaacaccaaggaau

SEQ ID NO: 2351023 - RNA, 19 nt, Homo sapiens
  misc_RNA (1)...(19): siRNA sense strand
ccuuuaagcaaccuggaaa

SEQ ID NO: 2351024 - RNA, 19 nt, Homo sapiens
  misc_RNA (1)...(19): siRNA sense strand
gaaagaggcuagaacacca

SEQ ID NO: 2351025 - RNA, 19 nt, Homo sapiens
  misc_RNA (1)...(19): siRNA sense strand
gaggaagaccggagguacu

SEQ ID NO: 2351026 - RNA, 19 nt, Homo sapiens
  misc_RNA (1)...(19): siRNA sense strand
aaacagaaacaaucgccaa

SEQ ID NO: 2351027 - RNA, 19 nt, Homo sapiens
  misc_RNA (1)...(19): siRNA sense strand
uuaagauggaagugggcau

SEQ ID NO: 2351028 - RNA, 19 nt, Homo sapiens
  misc_RNA (1)...(19): siRNA sense strand
agugcuuguugaugaggaa

SEQ ID NO: 2351029 - RNA, 19 nt, Homo sapiens
  misc_RNA (1)...(19): siRNA sense strand
acuucaaacagcaggagau

SEQ ID NO: 2351030 - RNA, 19 nt, Homo sapiens
  misc_RNA (1)...(19): siRNA sense strand
ugaaauaauggauggugca

SEQ ID NO: 2351031 - RNA, 19 nt, Homo sapiens
  misc_RNA (1)...(19): siRNA sense strand
cacaacagaaacagaaaca

SEQ ID NO: 2351032 - RNA, 19 nt, Homo sapiens
  misc_RNA (1)...(19): siRNA sense strand
cuggaaagaggcuagaaca

SEQ ID NO: 2351033 - RNA, 19 nt, Homo sapiens
  misc_RNA (1)...(19): siRNA sense strand
uggaguuacagcugaucaa

SEQ ID NO: 2351034 - RNA, 19 nt, Homo sapiens
  misc_RNA (1)...(19): siRNA sense strand
cugaagauggcaaaguaga

SEQ ID NO: 2351035 - RNA, 19 nt, Homo sapiens
  misc_RNA (1)...(19): siRNA sense strand
cagauuugguaaaagagua

SEQ ID NO: 2351036 - RNA, 19 nt, Homo sapiens
  misc_RNA (1)...(19): siRNA sense strand
caguaaaaggugaaucaau

SEQ ID NO: 2351037 - RNA, 19 nt, Homo sapiens
  misc_RNA (1)...(19): siRNA sense strand
ccgaagacaaggagggcaa

SEQ ID NO: 2351038 - RNA, 19 nt, Homo sapiens
  misc_RNA (1)...(19): siRNA sense strand
ucaaggagcuggaggagga

SEQ ID NO: 2351039 - RNA, 19 nt, Homo sapiens
  misc_RNA (1)...(19): siRNA sense strand
guguggaggccgaagacaa

SEQ ID NO: 2351040 - RNA, 19 nt, Homo sapiens
  misc_RNA (1)...(19): siRNA sense strand
aguacaugaucaaggccaa

SEQ ID NO: 2351041 - RNA, 19 nt, Homo sapiens
  misc_RNA (1)...(19): siRNA sense strand
gaggagagcauccgggaca

SEQ ID NO: 2351042 - RNA, 19 nt, Homo sapiens
  misc_RNA (1)...(19): siRNA sense strand
gcaaauccguggagcugga

SEQ ID NO: 2351043 - RNA, 19 nt, Homo sapiens
  misc_RNA (1)...(19): siRNA sense strand
cagccaacaacguggagau

SEQ ID NO: 2351044 - RNA, 19 nt, Homo sapiens
  misc_RNA (1)...(19): siRNA sense strand
ugauggagaaggaggagga

SEQ ID NO: 2351045 - RNA, 19 nt, Homo sapiens
  misc_RNA (1)...(19): siRNA sense strand
agaaggaggaggaggggau

SEQ ID NO: 2351046 - RNA, 19 nt, Homo sapiens
  misc_RNA (1)...(19): siRNA sense strand
ugcuggaccugaagggcaa

SEQ ID NO: 2351047 - RNA, 19 nt, Homo sapiens
  misc_RNA (1)...(19): siRNA sense strand
ucuacgagcugcuggacga

SEQ ID NO: 2351048 - RNA, 19 nt, Homo sapiens
  misc_RNA (1)...(19): siRNA sense strand
agucggugaucgagaagca

SEQ ID NO: 2351049 - RNA, 19 nt, Homo sapiens
  misc_RNA (1)...(19): siRNA sense strand
ucuauaagguggugcaggu

SEQ ID NO: 2351050 - RNA, 19 nt, Homo sapiens
  misc_RNA (1)...(19): siRNA sense strand
ccugaagaucauugagaag

SEQ ID NO: 2351051 - RNA, 19 nt, Homo sapiens
  misc_RNA (1)...(19): siRNA sense strand
agacaggaccaaagggaga

SEQ ID NO: 2351052 - RNA, 19 nt, Homo sapiens
  misc_RNA (1)...(19): siRNA sense strand
caaugggcuccaagggcua

SEQ ID NO: 2351053 - RNA, 19 nt, Homo sapiens
  misc_RNA (1)...(19): siRNA sense strand
agacaggaccaaagggaga

SEQ ID NO: 2351054 - RNA, 19 nt, Homo sapiens
  misc_RNA (1)...(19): siRNA sense strand
caaugggcuccaagggcua

SEQ ID NO: 2351055 - RNA, 19 nt, Homo sapiens
  misc_RNA (1)...(19): siRNA sense strand
agacaggaccaaagggaga

SEQ ID NO: 2351056 - RNA, 19 nt, Homo sapiens
  misc_RNA (1)...(19): siRNA sense strand
caaugggcuccaagggcua

SEQ ID NO: 2351057 - RNA, 19 nt, Homo sapiens
  misc_RNA (1)...(19): siRNA sense strand
agacaggaccaaagggaga

SEQ ID NO: 2351058 - RNA, 19 nt, Homo sapiens
  misc_RNA (1)...(19): siRNA sense strand
caaugggcuccaagggcua

SEQ ID NO: 2351059 - RNA, 19 nt, Homo sapiens
  misc_RNA (1)...(19): siRNA sense strand
agacaggaccaaagggaga

SEQ ID NO: 2351060 - RNA, 19 nt, Homo sapiens
  misc_RNA (1)...(19): siRNA sense strand
caaugggcuccaagggcua

SEQ ID NO: 2351061 - RNA, 19 nt, Homo sapiens
  misc_RNA (1)...(19): siRNA sense strand
agacaggaccaaagggaga

SEQ ID NO: 2351062 - RNA, 19 nt, Homo sapiens
  misc_RNA (1)...(19): siRNA sense strand
caaugggcuccaagggcua

SEQ ID NO: 2351063 - RNA, 19 nt, Homo sapiens
  misc_RNA (1)...(19): siRNA sense strand
agacaggaccaaagggaga

SEQ ID NO: 2351064 - RNA, 19 nt, Homo sapiens
  misc_RNA (1)...(19): siRNA sense strand
caaugggcuccaagggcua

SEQ ID NO: 2351065 - RNA, 19 nt, Homo sapiens
  misc_RNA (1)...(19): siRNA sense strand
agacaggaccaaagggaga

SEQ ID NO: 2351066 - RNA, 19 nt, Homo sapiens
  misc_RNA (1)...(19): siRNA sense strand
caaugggcuccaagggcua

SEQ ID NO: 2351067 - RNA, 19 nt, Homo sapiens
  misc_RNA (1)...(19): siRNA sense strand
cugagggccgugaggagaa

SEQ ID NO: 2351068 - RNA, 19 nt, Homo sapiens
  misc_RNA (1)...(19): siRNA sense strand
aggcaaauuuagagaagca

SEQ ID NO: 2351069 - RNA, 19 nt, Homo sapiens
  misc_RNA (1)...(19): siRNA sense strand
uggugaagccuguggaaau

SEQ ID NO: 2351070 - RNA, 19 nt, Homo sapiens
  misc_RNA (1)...(19): siRNA sense strand
acggaaacaaguaaggaaa

SEQ ID NO: 2351071 - RNA, 19 nt, Homo sapiens
  misc_RNA (1)...(19): siRNA sense strand
cugaagaauuacaugaaca

SEQ ID NO: 2351072 - RNA, 19 nt, Homo sapiens
  misc_RNA (1)...(19): siRNA sense strand
ccuggaacuguuugagaaa

SEQ ID NO: 2351073 - RNA, 19 nt, Homo sapiens
  misc_RNA (1)...(19): siRNA sense strand
cuuuguuacugaagaagaa

SEQ ID NO: 2351074 - RNA, 19 nt, Homo sapiens
  misc_RNA (1)...(19): siRNA sense strand
uggauuugaguuugggaaa

SEQ ID NO: 2351075 - RNA, 19 nt, Homo sapiens
  misc_RNA (1)...(19): siRNA sense strand
cggaaacaaguaaggaaaa

SEQ ID NO: 2351076 - RNA, 19 nt, Homo sapiens
  misc_RNA (1)...(19): siRNA sense strand
uuaaagugucugaggauga

SEQ ID NO: 2351077 - RNA, 19 nt, Homo sapiens
  misc_RNA (1)...(19): siRNA sense strand
cagucuuugcuaugggaaa

SEQ ID NO: 2351078 - RNA, 19 nt, Homo sapiens
  misc_RNA (1)...(19): siRNA sense strand
uuacugaagaagaaggaau

SEQ ID NO: 2351079 - RNA, 19 nt, Homo sapiens
  misc_RNA (1)...(19): siRNA sense strand
cugaagaagaaggaauuaa

SEQ ID NO: 2351080 - RNA, 19 nt, Homo sapiens
  misc_RNA (1)...(19): siRNA sense strand
uggaguuggauuugaguuu

SEQ ID NO: 2351081 - RNA, 19 nt, Homo sapiens
  misc_RNA (1)...(19): siRNA sense strand
auagagaaagcaagaauca

SEQ ID NO: 2351082 - RNA, 19 nt, Homo sapiens
  misc_RNA (1)...(19): siRNA sense strand
cugaggaugaccuggagaa

SEQ ID NO: 2351083 - RNA, 19 nt, Homo sapiens
  misc_RNA (1)...(19): siRNA sense strand
cggaagaauuugcguagac

SEQ ID NO: 2351084 - RNA, 19 nt, Homo sapiens
  misc_RNA (1)...(19): siRNA sense strand
caaaccugaacguuggaaa

SEQ ID NO: 2351085 - RNA, 19 nt, Homo sapiens
  misc_RNA (1)...(19): siRNA sense strand
aaaccugaacguuggaaaa

SEQ ID NO: 2351086 - RNA, 19 nt, Homo sapiens
  misc_RNA (1)...(19): siRNA sense strand
ggcaacugacugaagaauu

SEQ ID NO: 2351087 - RNA, 19 nt, Homo sapiens
  misc_RNA (1)...(19): siRNA sense strand
uuggauuggaguuggauuu

SEQ ID NO: 2351088 - RNA, 19 nt, Homo sapiens
  misc_RNA (1)...(19): siRNA sense strand
ccgaaugaccuuuguuacu

SEQ ID NO: 2351089 - RNA, 19 nt, Homo sapiens
  misc_RNA (1)...(19): siRNA sense strand
gggaaaauggggacuguca

SEQ ID NO: 2351090 - RNA, 19 nt, Homo sapiens
  misc_RNA (1)...(19): siRNA sense strand
agauuaaagugucugagga

SEQ ID NO: 2351091 - RNA, 19 nt, Homo sapiens
  misc_RNA (1)...(19): siRNA sense strand
ggaucaaggggaaguacaa

SEQ ID NO: 2351092 - RNA, 19 nt, Homo sapiens
  misc_RNA (1)...(19): siRNA sense strand
aggagaaacucaaagccga

SEQ ID NO: 2351093 - RNA, 19 nt, Homo sapiens
  misc_RNA (1)...(19): siRNA sense strand
auuaagaagugcuguggca

SEQ ID NO: 2351094 - RNA, 19 nt, Homo sapiens
  misc_RNA (1)...(19): siRNA sense strand
acaucagcagcgaggacua

SEQ ID NO: 2351095 - RNA, 19 nt, Homo sapiens
  misc_RNA (1)...(19): siRNA sense strand
ugaacaccuucgugcgcua

SEQ ID NO: 2351096 - RNA, 19 nt, Homo sapiens
  misc_RNA (1)...(19): siRNA sense strand
ccggaaaccgcaacagcau

SEQ ID NO: 2351097 - RNA, 19 nt, Homo sapiens
  misc_RNA (1)...(19): siRNA sense strand
gggccaaacuucaggguga

SEQ ID NO: 2351098 - RNA, 19 nt, Homo sapiens
  misc_RNA (1)...(19): siRNA sense strand
gggcagggcaaguggaaaa

SEQ ID NO: 2351099 - RNA, 19 nt, Homo sapiens
  misc_RNA (1)...(19): siRNA sense strand
aaagaaugggauagagaga

SEQ ID NO: 2351100 - RNA, 19 nt, Homo sapiens
  misc_RNA (1)...(19): siRNA sense strand
gagacgagaacgagaaaau

SEQ ID NO: 2351101 - RNA, 19 nt, Homo sapiens
  misc_RNA (1)...(19): siRNA sense strand
ggaagagacgagaacgaga

SEQ ID NO: 2351102 - RNA, 19 nt, Homo sapiens
  misc_RNA (1)...(19): siRNA sense strand
gcaucauccaggaaagaau

SEQ ID NO: 2351103 - RNA, 19 nt, Homo sapiens
  misc_RNA (1)...(19): siRNA sense strand
aaaucaaagcacuagcaaa

SEQ ID NO: 2351104 - RNA, 19 nt, Homo sapiens
  misc_RNA (1)...(19): siRNA sense strand
acgcagaaaaucagggcaa

SEQ ID NO: 2351105 - RNA, 19 nt, Homo sapiens
  misc_RNA (1)...(19): siRNA sense strand
agggaaaggcccgaaguaa

SEQ ID NO: 2351106 - RNA, 19 nt, Homo sapiens
  misc_RNA (1)...(19): siRNA sense strand
aaguaaaaguccugaaagu

SEQ ID NO: 2351107 - RNA, 19 nt, Homo sapiens
  misc_RNA (1)...(19): siRNA sense strand
gcauauucauuuaaccaga

SEQ ID NO: 2351108 - RNA, 19 nt, Homo sapiens
  misc_RNA (1)...(19): siRNA sense strand
ggggaagagacgagaacga

SEQ ID NO: 2351109 - RNA, 19 nt, Homo sapiens
  misc_RNA (1)...(19): siRNA sense strand
ccuuggucacucuggguaa

SEQ ID NO: 2351110 - RNA, 19 nt, Homo sapiens
  misc_RNA (1)...(19): siRNA sense strand
auucaaagagucuggaguu

SEQ ID NO: 2351111 - RNA, 19 nt, Homo sapiens
  misc_RNA (1)...(19): siRNA sense strand
gugaaaggagcuaaaacua

SEQ ID NO: 2351112 - RNA, 19 nt, Homo sapiens
  misc_RNA (1)...(19): siRNA sense strand
gggacgaagacgaggaguc

SEQ ID NO: 2351113 - RNA, 19 nt, Homo sapiens
  misc_RNA (1)...(19): siRNA sense strand
gacgaggagucuacggaca

SEQ ID NO: 2351114 - RNA, 19 nt, Homo sapiens
  misc_RNA (1)...(19): siRNA sense strand
gacugugaaaggagcuaaa

SEQ ID NO: 2351115 - RNA, 19 nt, Homo sapiens
  misc_RNA (1)...(19): siRNA sense strand
agggugauucagaggucaa

SEQ ID NO: 2351116 - RNA, 19 nt, Homo sapiens
  misc_RNA (1)...(19): siRNA sense strand
gugcagauggcugggcuaa

SEQ ID NO: 2351117 - RNA, 19 nt, Homo sapiens
  misc_RNA (1)...(19): siRNA sense strand
aagauuaagacguacauca

SEQ ID NO: 2351118 - RNA, 19 nt, Homo sapiens
  misc_RNA (1)...(19): siRNA sense strand
uuguaaaguaccaucagaa

SEQ ID NO: 2351119 - RNA, 19 nt, Homo sapiens
  misc_RNA (1)...(19): siRNA sense strand
ugggaaaucacuucaccaa

SEQ ID NO: 2351120 - RNA, 19 nt, Homo sapiens
  misc_RNA (1)...(19): siRNA sense strand
caggaaagaauucagcaga

SEQ ID NO: 2351121 - RNA, 19 nt, Homo sapiens
  misc_RNA (1)...(19): siRNA sense strand
aguauaaccuggaaagcaa

SEQ ID NO: 2351122 - RNA, 19 nt, Homo sapiens
  misc_RNA (1)...(19): siRNA sense strand
ugaagagagccgagacaaa

SEQ ID NO: 2351123 - RNA, 19 nt, Homo sapiens
  misc_RNA (1)...(19): siRNA sense strand
uguuggaacuacacggaaa

SEQ ID NO: 2351124 - RNA, 19 nt, Homo sapiens
  misc_RNA (1)...(19): siRNA sense strand
ugauaaaugagcugcgcua

SEQ ID NO: 2351125 - RNA, 19 nt, Homo sapiens
  misc_RNA (1)...(19): siRNA sense strand
ggcuaauggaugagaacau

SEQ ID NO: 2351126 - RNA, 19 nt, Homo sapiens
  misc_RNA (1)...(19): siRNA sense strand
guuaaguggaacugaauuu

SEQ ID NO: 2351127 - RNA, 19 nt, Homo sapiens
  misc_RNA (1)...(19): siRNA sense strand
caaauaugugacagaacua

SEQ ID NO: 2351128 - RNA, 19 nt, Homo sapiens
  misc_RNA (1)...(19): siRNA sense strand
cggaaaucccgguauacaa

SEQ ID NO: 2351129 - RNA, 19 nt, Homo sapiens
  misc_RNA (1)...(19): siRNA sense strand
gaagaagauuucaagggau

SEQ ID NO: 2351130 - RNA, 19 nt, Homo sapiens
  misc_RNA (1)...(19): siRNA sense strand
ugauaaugcuagugcucuu

SEQ ID NO: 2351131 - RNA, 19 nt, Homo sapiens
  misc_RNA (1)...(19): siRNA sense strand
gggcauuucaagacuuaua

SEQ ID NO: 2351132 - RNA, 19 nt, Homo sapiens
  misc_RNA (1)...(19): siRNA sense strand
aguuacugcuugaagacaa

SEQ ID NO: 2351133 - RNA, 19 nt, Homo sapiens
  misc_RNA (1)...(19): siRNA sense strand
gcuuagaaauacuugacuu

SEQ ID NO: 2351134 - RNA, 19 nt, Homo sapiens
  misc_RNA (1)...(19): siRNA sense strand
cgacuaucaacuuggguau

SEQ ID NO: 2351135 - RNA, 19 nt, Homo sapiens
  misc_RNA (1)...(19): siRNA sense strand
agaauaucaccguugguaa

SEQ ID NO: 2351136 - RNA, 19 nt, Homo sapiens
  misc_RNA (1)...(19): siRNA sense strand
ugucuagaggagagggauu

SEQ ID NO: 2351137 - RNA, 19 nt, Homo sapiens
  misc_RNA (1)...(19): siRNA sense strand
uggcaaacucugagaaaug

SEQ ID NO: 2351138 - RNA, 19 nt, Homo sapiens
  misc_RNA (1)...(19): siRNA sense strand
gauaaguauaaccuggaaa

SEQ ID NO: 2351139 - RNA, 19 nt, Homo sapiens
  misc_RNA (1)...(19): siRNA sense strand
ccaggaacucagagaagau

SEQ ID NO: 2351140 - RNA, 19 nt, Homo sapiens
  misc_RNA (1)...(19): siRNA sense strand
guucuagaucucagcuaua

SEQ ID NO: 2351141 - RNA, 19 nt, Homo sapiens
  misc_RNA (1)...(19): siRNA sense strand
uggcaaucgccuugacauu

SEQ ID NO: 2351142 - RNA, 19 nt, Homo sapiens
  misc_RNA (1)...(19): siRNA sense strand
cugcaaaaucucacuaaaa

SEQ ID NO: 2351143 - RNA, 19 nt, Homo sapiens
  misc_RNA (1)...(19): siRNA sense strand
gcaaaaugacucaguuauu

SEQ ID NO: 2351144 - RNA, 19 nt, Homo sapiens
  misc_RNA (1)...(19): siRNA sense strand
caacauaacuaaagagggc

SEQ ID NO: 2351145 - RNA, 19 nt, Homo sapiens
  misc_RNA (1)...(19): siRNA sense strand
guacagcaccagaacggaa

SEQ ID NO: 2351146 - RNA, 19 nt, Homo sapiens
  misc_RNA (1)...(19): siRNA sense strand
auuuaagccucaacaguau

SEQ ID NO: 2351147 - RNA, 19 nt, Homo sapiens
  misc_RNA (1)...(19): siRNA sense strand
agggaagaguauugugagu

SEQ ID NO: 2351148 - RNA, 19 nt, Homo sapiens
  misc_RNA (1)...(19): siRNA sense strand
caucaaccaaagcaagaaa

SEQ ID NO: 2351149 - RNA, 19 nt, Homo sapiens
  misc_RNA (1)...(19): siRNA sense strand
aguguuaaguggaacugaa

SEQ ID NO: 2351150 - RNA, 19 nt, Homo sapiens
  misc_RNA (1)...(19): siRNA sense strand
agaaauagccucuggggca

SEQ ID NO: 2351151 - RNA, 19 nt, Homo sapiens
  misc_RNA (1)...(19): siRNA sense strand
cuauccuugugaugagaaa

SEQ ID NO: 2351152 - RNA, 19 nt, Homo sapiens
  misc_RNA (1)...(19): siRNA sense strand
uuacugacugggugauaaa

SEQ ID NO: 2351153 - RNA, 19 nt, Homo sapiens
  misc_RNA (1)...(19): siRNA sense strand
cugacaacccgaaggcaga

SEQ ID NO: 2351154 - RNA, 19 nt, Homo sapiens
  misc_RNA (1)...(19): siRNA sense strand
agccauuccucaugucaaa

SEQ ID NO: 2351155 - RNA, 19 nt, Homo sapiens
  misc_RNA (1)...(19): siRNA sense strand
uuucagaauagcaggcgua

SEQ ID NO: 2351156 - RNA, 19 nt, Homo sapiens
  misc_RNA (1)...(19): siRNA sense strand
aagcaaaaugacucaguua

SEQ ID NO: 2351157 - RNA, 19 nt, Homo sapiens
  misc_RNA (1)...(19): siRNA sense strand
acuaagaccaccaccaaau

SEQ ID NO: 2351158 - RNA, 19 nt, Homo sapiens
  misc_RNA (1)...(19): siRNA sense strand
gcuaauaucugguuccugu

SEQ ID NO: 2351159 - RNA, 19 nt, Homo sapiens
  misc_RNA (1)...(19): siRNA sense strand
ugaaaaucuuccugacauu

SEQ ID NO: 2351160 - RNA, 19 nt, Homo sapiens
  misc_RNA (1)...(19): siRNA sense strand
uguuuaaaucugucugcaa

SEQ ID NO: 2351161 - RNA, 19 nt, Homo sapiens
  misc_RNA (1)...(19): siRNA sense strand
cagcuauaauucacacuau

SEQ ID NO: 2351162 - RNA, 19 nt, Homo sapiens
  misc_RNA (1)...(19): siRNA sense strand
aucaaagagggaagaguau

SEQ ID NO: 2351163 - RNA, 19 nt, Homo sapiens
  misc_RNA (1)...(19): siRNA sense strand
acauaacuaaagagggcau

SEQ ID NO: 2351164 - RNA, 19 nt, Homo sapiens
  misc_RNA (1)...(19): siRNA sense strand
ugagcaacacccagaucaa

SEQ ID NO: 2351165 - RNA, 19 nt, Homo sapiens
  misc_RNA (1)...(19): siRNA sense strand
gggaguuauccacagcaua

SEQ ID NO: 2351166 - RNA, 19 nt, Homo sapiens
  misc_RNA (1)...(19): siRNA sense strand
ggagauuuccgaagaugga

SEQ ID NO: 2351167 - RNA, 19 nt, Homo sapiens
  misc_RNA (1)...(19): siRNA sense strand
caucacacacauaacgaau

SEQ ID NO: 2351168 - RNA, 19 nt, Homo sapiens
  misc_RNA (1)...(19): siRNA sense strand
ugacaaauuuggaguugcu

SEQ ID NO: 2351169 - RNA, 19 nt, Homo sapiens
  misc_RNA (1)...(19): siRNA sense strand
guuacugacugggugauaa

SEQ ID NO: 2351170 - RNA, 19 nt, Homo sapiens
  misc_RNA (1)...(19): siRNA sense strand
cugacugggugauaaauga

SEQ ID NO: 2351171 - RNA, 19 nt, Homo sapiens
  misc_RNA (1)...(19): siRNA sense strand
cgguauaacaauauguaug

SEQ ID NO: 2351172 - RNA, 19 nt, Homo sapiens
  misc_RNA (1)...(19): siRNA sense strand
acacacauaacgaaugaau

SEQ ID NO: 2351173 - RNA, 19 nt, Homo sapiens
  misc_RNA (1)...(19): siRNA sense strand
ugccagagucuuugacaga

SEQ ID NO: 2351174 - RNA, 19 nt, Homo sapiens
  misc_RNA (1)...(19): siRNA sense strand
aguauaaccuggaaagcaa

SEQ ID NO: 2351175 - RNA, 19 nt, Homo sapiens
  misc_RNA (1)...(19): siRNA sense strand
ugaagagagccgagacaaa

SEQ ID NO: 2351176 - RNA, 19 nt, Homo sapiens
  misc_RNA (1)...(19): siRNA sense strand
uguuggaacuacacggaaa

SEQ ID NO: 2351177 - RNA, 19 nt, Homo sapiens
  misc_RNA (1)...(19): siRNA sense strand
ugauaaaugagcugcgcua

SEQ ID NO: 2351178 - RNA, 19 nt, Homo sapiens
  misc_RNA (1)...(19): siRNA sense strand
ggcuaauggaugagaacau

SEQ ID NO: 2351179 - RNA, 19 nt, Homo sapiens
  misc_RNA (1)...(19): siRNA sense strand
guuaaguggaacugaauuu

SEQ ID NO: 2351180 - RNA, 19 nt, Homo sapiens
  misc_RNA (1)...(19): siRNA sense strand
caaauaugugacagaacua

SEQ ID NO: 2351181 - RNA, 19 nt, Homo sapiens
  misc_RNA (1)...(19): siRNA sense strand
cggaaaucccgguauacaa

SEQ ID NO: 2351182 - RNA, 19 nt, Homo sapiens
  misc_RNA (1)...(19): siRNA sense strand
gaagaagauuucaagggau

SEQ ID NO: 2351183 - RNA, 19 nt, Homo sapiens
  misc_RNA (1)...(19): siRNA sense strand
ugauaaugcuagugcucuu

SEQ ID NO: 2351184 - RNA, 19 nt, Homo sapiens
  misc_RNA (1)...(19): siRNA sense strand
gggcauuucaagacuuaua

SEQ ID NO: 2351185 - RNA, 19 nt, Homo sapiens
  misc_RNA (1)...(19): siRNA sense strand
aguuacugcuugaagacaa

SEQ ID NO: 2351186 - RNA, 19 nt, Homo sapiens
  misc_RNA (1)...(19): siRNA sense strand
gcuuagaaauacuugacuu

SEQ ID NO: 2351187 - RNA, 19 nt, Homo sapiens
  misc_RNA (1)...(19): siRNA sense strand
cgacuaucaacuuggguau

SEQ ID NO: 2351188 - RNA, 19 nt, Homo sapiens
  misc_RNA (1)...(19): siRNA sense strand
agaauaucaccguugguaa

SEQ ID NO: 2351189 - RNA, 19 nt, Homo sapiens
  misc_RNA (1)...(19): siRNA sense strand
ugucuagaggagagggauu

SEQ ID NO: 2351190 - RNA, 19 nt, Homo sapiens
  misc_RNA (1)...(19): siRNA sense strand
uggcaaacucugagaaaug

SEQ ID NO: 2351191 - RNA, 19 nt, Homo sapiens
  misc_RNA (1)...(19): siRNA sense strand
gauaaguauaaccuggaaa

SEQ ID NO: 2351192 - RNA, 19 nt, Homo sapiens
  misc_RNA (1)...(19): siRNA sense strand
ccaggaacucagagaagau

SEQ ID NO: 2351193 - RNA, 19 nt, Homo sapiens
  misc_RNA (1)...(19): siRNA sense strand
guucuagaucucagcuaua

SEQ ID NO: 2351194 - RNA, 19 nt, Homo sapiens
  misc_RNA (1)...(19): siRNA sense strand
uggcaaucgccuugacauu

SEQ ID NO: 2351195 - RNA, 19 nt, Homo sapiens
  misc_RNA (1)...(19): siRNA sense strand
cugcaaaaucucacuaaaa

SEQ ID NO: 2351196 - RNA, 19 nt, Homo sapiens
  misc_RNA (1)...(19): siRNA sense strand
gcaaaaugacucaguuauu

SEQ ID NO: 2351197 - RNA, 19 nt, Homo sapiens
  misc_RNA (1)...(19): siRNA sense strand
caacauaacuaaagagggc

SEQ ID NO: 2351198 - RNA, 19 nt, Homo sapiens
  misc_RNA (1)...(19): siRNA sense strand
guacagcaccagaacggaa

SEQ ID NO: 2351199 - RNA, 19 nt, Homo sapiens
  misc_RNA (1)...(19): siRNA sense strand
auuuaagccucaacaguau

SEQ ID NO: 2351200 - RNA, 19 nt, Homo sapiens
  misc_RNA (1)...(19): siRNA sense strand
agggaagaguauugugagu

SEQ ID NO: 2351201 - RNA, 19 nt, Homo sapiens
  misc_RNA (1)...(19): siRNA sense strand
caucaaccaaagcaagaaa

SEQ ID NO: 2351202 - RNA, 19 nt, Homo sapiens
  misc_RNA (1)...(19): siRNA sense strand
aguguuaaguggaacugaa

SEQ ID NO: 2351203 - RNA, 19 nt, Homo sapiens
  misc_RNA (1)...(19): siRNA sense strand
agaaauagccucuggggca

SEQ ID NO: 2351204 - RNA, 19 nt, Homo sapiens
  misc_RNA (1)...(19): siRNA sense strand
cuauccuugugaugagaaa

SEQ ID NO: 2351205 - RNA, 19 nt, Homo sapiens
  misc_RNA (1)...(19): siRNA sense strand
uuacugacugggugauaaa

SEQ ID NO: 2351206 - RNA, 19 nt, Homo sapiens
  misc_RNA (1)...(19): siRNA sense strand
cugacaacccgaaggcaga

SEQ ID NO: 2351207 - RNA, 19 nt, Homo sapiens
  misc_RNA (1)...(19): siRNA sense strand
agccauuccucaugucaaa

SEQ ID NO: 2351208 - RNA, 19 nt, Homo sapiens
  misc_RNA (1)...(19): siRNA sense strand
uuucagaauagcaggcgua

SEQ ID NO: 2351209 - RNA, 19 nt, Homo sapiens
  misc_RNA (1)...(19): siRNA sense strand
aagcaaaaugacucaguua

SEQ ID NO: 2351210 - RNA, 19 nt, Homo sapiens
  misc_RNA (1)...(19): siRNA sense strand
acuaagaccaccaccaaau

SEQ ID NO: 2351211 - RNA, 19 nt, Homo sapiens
  misc_RNA (1)...(19): siRNA sense strand
gcuaauaucugguuccugu

SEQ ID NO: 2351212 - RNA, 19 nt, Homo sapiens
  misc_RNA (1)...(19): siRNA sense strand
ugaaaaucuuccugacauu

SEQ ID NO: 2351213 - RNA, 19 nt, Homo sapiens
  misc_RNA (1)...(19): siRNA sense strand
uguuuaaaucugucugcaa

SEQ ID NO: 2351214 - RNA, 19 nt, Homo sapiens
  misc_RNA (1)...(19): siRNA sense strand
cagcuauaauucacacuau

SEQ ID NO: 2351215 - RNA, 19 nt, Homo sapiens
  misc_RNA (1)...(19): siRNA sense strand
aucaaagagggaagaguau

SEQ ID NO: 2351216 - RNA, 19 nt, Homo sapiens
  misc_RNA (1)...(19): siRNA sense strand
acauaacuaaagagggcau

SEQ ID NO: 2351217 - RNA, 19 nt, Homo sapiens
  misc_RNA (1)...(19): siRNA sense strand
ugagcaacacccagaucaa

SEQ ID NO: 2351218 - RNA, 19 nt, Homo sapiens
  misc_RNA (1)...(19): siRNA sense strand
gggaguuauccacagcaua

SEQ ID NO: 2351219 - RNA, 19 nt, Homo sapiens
  misc_RNA (1)...(19): siRNA sense strand
ggagauuuccgaagaugga

SEQ ID NO: 2351220 - RNA, 19 nt, Homo sapiens
  misc_RNA (1)...(19): siRNA sense strand
caucacacacauaacgaau

SEQ ID NO: 2351221 - RNA, 19 nt, Homo sapiens
  misc_RNA (1)...(19): siRNA sense strand
ugacaaauuuggaguugcu

SEQ ID NO: 2351222 - RNA, 19 nt, Homo sapiens
  misc_RNA (1)...(19): siRNA sense strand
guuacugacugggugauaa

SEQ ID NO: 2351223 - RNA, 19 nt, Homo sapiens
  misc_RNA (1)...(19): siRNA sense strand
cugacugggugauaaauga

SEQ ID NO: 2351224 - RNA, 19 nt, Homo sapiens
  misc_RNA (1)...(19): siRNA sense strand
cgguauaacaauauguaug

SEQ ID NO: 2351225 - RNA, 19 nt, Homo sapiens
  misc_RNA (1)...(19): siRNA sense strand
acacacauaacgaaugaau

SEQ ID NO: 2351226 - RNA, 19 nt, Homo sapiens
  misc_RNA (1)...(19): siRNA sense strand
ugccagagucuuugacaga

SEQ ID NO: 2351227 - RNA, 19 nt, Homo sapiens
  misc_RNA (1)...(19): siRNA sense strand
cauacaaguuugaggagga

SEQ ID NO: 2351228 - RNA, 19 nt, Homo sapiens
  misc_RNA (1)...(19): siRNA sense strand
ucaacaucucagagggaaa

SEQ ID NO: 2351229 - RNA, 19 nt, Homo sapiens
  misc_RNA (1)...(19): siRNA sense strand
cgggaagaaaggagaaacu

SEQ ID NO: 2351230 - RNA, 19 nt, Homo sapiens
  misc_RNA (1)...(19): siRNA sense strand
acaaguuugaggaggauau

SEQ ID NO: 2351231 - RNA, 19 nt, Homo sapiens
  misc_RNA (1)...(19): siRNA sense strand
ccuacacaauccagggaca

SEQ ID NO: 2351232 - RNA, 19 nt, Homo sapiens
  misc_RNA (1)...(19): siRNA sense strand
ggagaguggugcaaggauc

SEQ ID NO: 2351233 - RNA, 19 nt, Homo sapiens
  misc_RNA (1)...(19): siRNA sense strand
gaucaacaucucagaggga

SEQ ID NO: 2351234 - RNA, 19 nt, Homo sapiens
  misc_RNA (1)...(19): siRNA sense strand
cugugaagaagaugcguga

SEQ ID NO: 2351235 - RNA, 19 nt, Homo sapiens
  misc_RNA (1)...(19): siRNA sense strand
caucgggaagaaaggagaa

SEQ ID NO: 2351236 - RNA, 19 nt, Homo sapiens
  misc_RNA (1)...(19): siRNA sense strand
ggguggauccugaggccaa

SEQ ID NO: 2351237 - RNA, 19 nt, Homo sapiens
  misc_RNA (1)...(19): siRNA sense strand
gagaaggaggcgacggaga

SEQ ID NO: 2351238 - RNA, 19 nt, Homo sapiens
  misc_RNA (1)...(19): siRNA sense strand
ggaguuugguggaggcagu

SEQ ID NO: 2351239 - RNA, 19 nt, Homo sapiens
  misc_RNA (1)...(19): siRNA sense strand
ccugcagccuggagaccaa

SEQ ID NO: 2351240 - RNA, 19 nt, Homo sapiens
  misc_RNA (1)...(19): siRNA sense strand
ggacaaauuccaugagcug

SEQ ID NO: 2351241 - RNA, 19 nt, Homo sapiens
  misc_RNA (1)...(19): siRNA sense strand
ccagugaggaaauggccaa

SEQ ID NO: 2351242 - RNA, 19 nt, Homo sapiens
  misc_RNA (1)...(19): siRNA sense strand
cgggauuccuccaggcuca

SEQ ID NO: 2351243 - RNA, 19 nt, Homo sapiens
  misc_RNA (1)...(19): siRNA sense strand
augcauaaguaccagccaa

SEQ ID NO: 2351244 - RNA, 19 nt, Homo sapiens
  misc_RNA (1)...(19): siRNA sense strand
cuguggacaacaagaggua

SEQ ID NO: 2351245 - RNA, 19 nt, Homo sapiens
  misc_RNA (1)...(19): siRNA sense strand
acaacaagagguaccgcua

SEQ ID NO: 2351246 - RNA, 19 nt, Homo sapiens
  misc_RNA (1)...(19): siRNA sense strand
acucaaugcauaaguacca

SEQ ID NO: 2351247 - RNA, 19 nt, Homo sapiens
  misc_RNA (1)...(19): siRNA sense strand
accugaagucugaagaauu

SEQ ID NO: 2351248 - RNA, 19 nt, Homo sapiens
  misc_RNA (1)...(19): siRNA sense strand
gcaagaaggcugagcggca

SEQ ID NO: 2351249 - RNA, 19 nt, Homo sapiens
  misc_RNA (1)...(19): siRNA sense strand
gcacauaucaagaucggga

SEQ ID NO: 2351250 - RNA, 19 nt, Homo sapiens
  misc_RNA (1)...(19): siRNA sense strand
cuuucaaacuggaugagga

SEQ ID NO: 2351251 - RNA, 19 nt, Homo sapiens
  misc_RNA (1)...(19): siRNA sense strand
agagcgagcuguuacggua

SEQ ID NO: 2351252 - RNA, 19 nt, Homo sapiens
  misc_RNA (1)...(19): siRNA sense strand
ggaaaugucuccaggccuc

SEQ ID NO: 2351253 - RNA, 19 nt, Homo sapiens
  misc_RNA (1)...(19): siRNA sense strand
gcaagaaggcugagcggca

SEQ ID NO: 2351254 - RNA, 19 nt, Homo sapiens
  misc_RNA (1)...(19): siRNA sense strand
gggcgagacuguaaagcga

SEQ ID NO: 2351255 - RNA, 19 nt, Homo sapiens
  misc_RNA (1)...(19): siRNA sense strand
gcacauaucaagaucggga

SEQ ID NO: 2351256 - RNA, 19 nt, Homo sapiens
  misc_RNA (1)...(19): siRNA sense strand
cuuucaaacuggaugagga

SEQ ID NO: 2351257 - RNA, 19 nt, Homo sapiens
  misc_RNA (1)...(19): siRNA sense strand
agagcgagcuguuacggua

SEQ ID NO: 2351258 - RNA, 19 nt, Homo sapiens
  misc_RNA (1)...(19): siRNA sense strand
ggaaaugucuccaggccuc

SEQ ID NO: 2351259 - RNA, 19 nt, Homo sapiens
  misc_RNA (1)...(19): siRNA sense strand
ggaugcugaugcacgggaa

SEQ ID NO: 2351260 - RNA, 19 nt, Homo sapiens
  misc_RNA (1)...(19): siRNA sense strand
gcaagaaggcugagcggca

SEQ ID NO: 2351261 - RNA, 19 nt, Homo sapiens
  misc_RNA (1)...(19): siRNA sense strand
gcacauaucaagaucggga

SEQ ID NO: 2351262 - RNA, 19 nt, Homo sapiens
  misc_RNA (1)...(19): siRNA sense strand
cuuucaaacuggaugagga

SEQ ID NO: 2351263 - RNA, 19 nt, Homo sapiens
  misc_RNA (1)...(19): siRNA sense strand
agagcgagcuguuacggua

SEQ ID NO: 2351264 - RNA, 19 nt, Homo sapiens
  misc_RNA (1)...(19): siRNA sense strand
ggaaaugucuccaggccuc

SEQ ID NO: 2351265 - RNA, 19 nt, Homo sapiens
  misc_RNA (1)...(19): siRNA sense strand
gcaagaaggcugagcggca

SEQ ID NO: 2351266 - RNA, 19 nt, Homo sapiens
  misc_RNA (1)...(19): siRNA sense strand
gggcgagacuguaaagcga

SEQ ID NO: 2351267 - RNA, 19 nt, Homo sapiens
  misc_RNA (1)...(19): siRNA sense strand
gcacauaucaagaucggga

SEQ ID NO: 2351268 - RNA, 19 nt, Homo sapiens
  misc_RNA (1)...(19): siRNA sense strand
cuuucaaacuggaugagga

SEQ ID NO: 2351269 - RNA, 19 nt, Homo sapiens
  misc_RNA (1)...(19): siRNA sense strand
agagcgagcuguuacggua

SEQ ID NO: 2351270 - RNA, 19 nt, Homo sapiens
  misc_RNA (1)...(19): siRNA sense strand
ggaaaugucuccaggccuc

SEQ ID NO: 2351271 - RNA, 19 nt, Homo sapiens
  misc_RNA (1)...(19): siRNA sense strand
ggaugcugaugcacgggaa

SEQ ID NO: 2351272 - RNA, 19 nt, Homo sapiens
  misc_RNA (1)...(19): siRNA sense strand
aggaggaggaggagggaaa

SEQ ID NO: 2351273 - RNA, 19 nt, Homo sapiens
  misc_RNA (1)...(19): siRNA sense strand
cagaagaagaagaagacaa

SEQ ID NO: 2351274 - RNA, 19 nt, Homo sapiens
  misc_RNA (1)...(19): siRNA sense strand
aggaagcacccaagagaaa

SEQ ID NO: 2351275 - RNA, 19 nt, Homo sapiens
  misc_RNA (1)...(19): siRNA sense strand
ugagacaggaagugggaaa

SEQ ID NO: 2351276 - RNA, 19 nt, Homo sapiens
  misc_RNA (1)...(19): siRNA sense strand
guggcaaauuucagacaaa

SEQ ID NO: 2351277 - RNA, 19 nt, Homo sapiens
  misc_RNA (1)...(19): siRNA sense strand
cagaagaagaggaggagga

SEQ ID NO: 2351278 - RNA, 19 nt, Homo sapiens
  misc_RNA (1)...(19): siRNA sense strand
gcaagaagaacgucggaga

SEQ ID NO: 2351279 - RNA, 19 nt, Homo sapiens
  misc_RNA (1)...(19): siRNA sense strand
uugugagacugaugagaaa

SEQ ID NO: 2351280 - RNA, 19 nt, Homo sapiens
  misc_RNA (1)...(19): siRNA sense strand
aagaagaagaagacaaaga

SEQ ID NO: 2351281 - RNA, 19 nt, Homo sapiens
  misc_RNA (1)...(19): siRNA sense strand
aagcagaagaagaagaaga

SEQ ID NO: 2351282 - RNA, 19 nt, Homo sapiens
  misc_RNA (1)...(19): siRNA sense strand
aagaagaggaggaggagga

SEQ ID NO: 2351283 - RNA, 19 nt, Homo sapiens
  misc_RNA (1)...(19): siRNA sense strand
cagccaaguacaagugcaa

SEQ ID NO: 2351284 - RNA, 19 nt, Homo sapiens
  misc_RNA (1)...(19): siRNA sense strand
aaucaaaguugugggaaaa

SEQ ID NO: 2351285 - RNA, 19 nt, Homo sapiens
  misc_RNA (1)...(19): siRNA sense strand
ucuccaagcagaagaagaa

SEQ ID NO: 2351286 - RNA, 19 nt, Homo sapiens
  misc_RNA (1)...(19): siRNA sense strand
auacuguaauugagaguga

SEQ ID NO: 2351287 - RNA, 19 nt, Homo sapiens
  misc_RNA (1)...(19): siRNA sense strand
agaaugagaaugaggagga

SEQ ID NO: 2351288 - RNA, 19 nt, Homo sapiens
  misc_RNA (1)...(19): siRNA sense strand
augagaaugaggaggaaaa

SEQ ID NO: 2351289 - RNA, 19 nt, Homo sapiens
  misc_RNA (1)...(19): siRNA sense strand
ggccugaggaugugaucaa

SEQ ID NO: 2351290 - RNA, 19 nt, Homo sapiens
  misc_RNA (1)...(19): siRNA sense strand
ggccagguuuacaggaauu

SEQ ID NO: 2351291 - RNA, 19 nt, Homo sapiens
  misc_RNA (1)...(19): siRNA sense strand
aauacaacccaaagagaca

SEQ ID NO: 2351292 - RNA, 19 nt, Homo sapiens
  misc_RNA (1)...(19): siRNA sense strand
gcuuugaggaauugacaga

SEQ ID NO: 2351293 - RNA, 19 nt, Homo sapiens
  misc_RNA (1)...(19): siRNA sense strand
gccaaguacaagugcaaau

SEQ ID NO: 2351294 - RNA, 19 nt, Homo sapiens
  misc_RNA (1)...(19): siRNA sense strand
uggugugcuuugaggaauu

SEQ ID NO: 2351295 - RNA, 19 nt, Homo sapiens
  misc_RNA (1)...(19): siRNA sense strand
caccagaagcagaggcuca

SEQ ID NO: 2351296 - RNA, 19 nt, Homo sapiens
  misc_RNA (1)...(19): siRNA sense strand
ugaccggaugguugagaaa

SEQ ID NO: 2351297 - RNA, 19 nt, Homo sapiens
  misc_RNA (1)...(19): siRNA sense strand
acaccaagaaaauggauaa

SEQ ID NO: 2351298 - RNA, 19 nt, Homo sapiens
  misc_RNA (1)...(19): siRNA sense strand
agaagaacgucggagacaa

SEQ ID NO: 2351299 - RNA, 19 nt, Homo sapiens
  misc_RNA (1)...(19): siRNA sense strand
uuucagaagaagaggagga

SEQ ID NO: 2351300 - RNA, 19 nt, Homo sapiens
  misc_RNA (1)...(19): siRNA sense strand
ccuguaaggcauauccaaa

SEQ ID NO: 2351301 - RNA, 19 nt, Homo sapiens
  misc_RNA (1)...(19): siRNA sense strand
agacaaagggaaucaaagu

SEQ ID NO: 2351302 - RNA, 19 nt, Homo sapiens
  misc_RNA (1)...(19): siRNA sense strand
cgcagaaacagcagaggau

SEQ ID NO: 2351303 - RNA, 19 nt, Homo sapiens
  misc_RNA (1)...(19): siRNA sense strand
gggucuggauauuccuaaa

SEQ ID NO: 2351304 - RNA, 19 nt, Homo sapiens
  misc_RNA (1)...(19): siRNA sense strand
cagucaagcuguggcaaau

SEQ ID NO: 2351305 - RNA, 19 nt, Homo sapiens
  misc_RNA (1)...(19): siRNA sense strand
ugguaguggaugaggcuga

SEQ ID NO: 2351306 - RNA, 19 nt, Homo sapiens
  misc_RNA (1)...(19): siRNA sense strand
uuacaaaacgcucaagaaa

SEQ ID NO: 2351307 - RNA, 19 nt, Homo sapiens
  misc_RNA (1)...(19): siRNA sense strand
guggagacgcuaacagaga

SEQ ID NO: 2351308 - RNA, 19 nt, Homo sapiens
  misc_RNA (1)...(19): siRNA sense strand
acaagcuguuucagaagaa

SEQ ID NO: 2351309 - RNA, 19 nt, Homo sapiens
  misc_RNA (1)...(19): siRNA sense strand
ugaaagauccugagcugga

SEQ ID NO: 2351310 - RNA, 19 nt, Homo sapiens
  misc_RNA (1)...(19): siRNA sense strand
aggcugaagcugagucuga

SEQ ID NO: 2351311 - RNA, 19 nt, Homo sapiens
  misc_RNA (1)...(19): siRNA sense strand
cagauggacagauggauga

SEQ ID NO: 2351312 - RNA, 19 nt, Homo sapiens
  misc_RNA (1)...(19): siRNA sense strand
agccaagacuggaggcacu

SEQ ID NO: 2351313 - RNA, 19 nt, Homo sapiens
  misc_RNA (1)...(19): siRNA sense strand
aacaggaguuggaugacaa

SEQ ID NO: 2351314 - RNA, 19 nt, Homo sapiens
  misc_RNA (1)...(19): siRNA sense strand
gugagacugaugagaaaga

SEQ ID NO: 2351315 - RNA, 19 nt, Homo sapiens
  misc_RNA (1)...(19): siRNA sense strand
uuugaggaauugacagauu

SEQ ID NO: 2351316 - RNA, 19 nt, Homo sapiens
  misc_RNA (1)...(19): siRNA sense strand
ugggaaaacucuugccuuu

SEQ ID NO: 2351317 - RNA, 19 nt, Homo sapiens
  misc_RNA (1)...(19): siRNA sense strand
uggaugacuuggugugcuu

SEQ ID NO: 2351318 - RNA, 19 nt, Homo sapiens
  misc_RNA (1)...(19): siRNA sense strand
ccaagaaaauggauaaaac

SEQ ID NO: 2351319 - RNA, 19 nt, Homo sapiens
  misc_RNA (1)...(19): siRNA sense strand
cauguauaagggaggaaaa

SEQ ID NO: 2351320 - RNA, 19 nt, Homo sapiens
  misc_RNA (1)...(19): siRNA sense strand
aggcguugcucuuugguga

SEQ ID NO: 2351321 - RNA, 19 nt, Homo sapiens
  misc_RNA (1)...(19): siRNA sense strand
cggcugugggaauuaauua

SEQ ID NO: 2351322 - RNA, 19 nt, Homo sapiens
  misc_RNA (1)...(19): siRNA sense strand
agcauuaucauuugaggaa

SEQ ID NO: 2351323 - RNA, 19 nt, Homo sapiens
  misc_RNA (1)...(19): siRNA sense strand
gcgaauccguuuagcucga

SEQ ID NO: 2351324 - RNA, 19 nt, Homo sapiens
  misc_RNA (1)...(19): siRNA sense strand
ugaagaaggagcugcgcca

SEQ ID NO: 2351325 - RNA, 19 nt, Homo sapiens
  misc_RNA (1)...(19): siRNA sense strand
ggaaagucuagcucaccaa

SEQ ID NO: 2351326 - RNA, 19 nt, Homo sapiens
  misc_RNA (1)...(19): siRNA sense strand
agugaaagauccugagcug

SEQ ID NO: 2351327 - RNA, 19 nt, Homo sapiens
  misc_RNA (1)...(19): siRNA sense strand
ucccaaacagaaugagaau

SEQ ID NO: 2351328 - RNA, 19 nt, Homo sapiens
  misc_RNA (1)...(19): siRNA sense strand
gacacaaaaucaaggccaa

SEQ ID NO: 2351329 - RNA, 19 nt, Homo sapiens
  misc_RNA (1)...(19): siRNA sense strand
ggagauugagcuggaagaa

SEQ ID NO: 2351330 - RNA, 19 nt, Homo sapiens
  misc_RNA (1)...(19): siRNA sense strand
caggcaaggcugaagcuga

SEQ ID NO: 2351331 - RNA, 19 nt, Homo sapiens
  misc_RNA (1)...(19): siRNA sense strand
ggauaaaacagccaaacuu

SEQ ID NO: 2351332 - RNA, 19 nt, Homo sapiens
  misc_RNA (1)...(19): siRNA sense strand
augcagucuuugugggaaa

SEQ ID NO: 2351333 - RNA, 19 nt, Homo sapiens
  misc_RNA (1)...(19): siRNA sense strand
aggcuaagacugugagcuu

SEQ ID NO: 2351334 - RNA, 19 nt, Homo sapiens
  misc_RNA (1)...(19): siRNA sense strand
auuuaaggcuagaagcaau

SEQ ID NO: 2351335 - RNA, 19 nt, Homo sapiens
  misc_RNA (1)...(19): siRNA sense strand
caaccaauuccgagugcau

SEQ ID NO: 2351336 - RNA, 19 nt, Homo sapiens
  misc_RNA (1)...(19): siRNA sense strand
guguauuggaugugaccau

SEQ ID NO: 2351337 - RNA, 19 nt, Homo sapiens
  misc_RNA (1)...(19): siRNA sense strand
agggagacaaagaagauau

SEQ ID NO: 2351338 - RNA, 19 nt, Homo sapiens
  misc_RNA (1)...(19): siRNA sense strand
agcaauuagagcugaguau

SEQ ID NO: 2351339 - RNA, 19 nt, Homo sapiens
  misc_RNA (1)...(19): siRNA sense strand
cugaacgaaaugugccaua

SEQ ID NO: 2351340 - RNA, 19 nt, Homo sapiens
  misc_RNA (1)...(19): siRNA sense strand
cauuugaagaagauggcuu

SEQ ID NO: 2351341 - RNA, 19 nt, Homo sapiens
  misc_RNA (1)...(19): siRNA sense strand
acucacagggagacaaaga

SEQ ID NO: 2351342 - RNA, 19 nt, Homo sapiens
  misc_RNA (1)...(19): siRNA sense strand
gcugaggaacaccgggaga

SEQ ID NO: 2351343 - RNA, 19 nt, Homo sapiens
  misc_RNA (1)...(19): siRNA sense strand
aaagaaggggaaagaaauu

SEQ ID NO: 2351344 - RNA, 19 nt, Homo sapiens
  misc_RNA (1)...(19): siRNA sense strand
acagaaaccugaaugugga

SEQ ID NO: 2351345 - RNA, 19 nt, Homo sapiens
  misc_RNA (1)...(19): siRNA sense strand
ccaaaauggcucauaggau

SEQ ID NO: 2351346 - RNA, 19 nt, Homo sapiens
  misc_RNA (1)...(19): siRNA sense strand
auggagauuuuaagaggaa

SEQ ID NO: 2351347 - RNA, 19 nt, Homo sapiens
  misc_RNA (1)...(19): siRNA sense strand
gaggaauguaugaggagcu

SEQ ID NO: 2351348 - RNA, 19 nt, Homo sapiens
  misc_RNA (1)...(19): siRNA sense strand
uguaugaggagcugaacga

SEQ ID NO: 2351349 - RNA, 19 nt, Homo sapiens
  misc_RNA (1)...(19): siRNA sense strand
agacuuucaccucgggcaa

SEQ ID NO: 2351350 - RNA, 19 nt, Homo sapiens
  misc_RNA (1)...(19): siRNA sense strand
ggggagaauuuuaaggaca

SEQ ID NO: 2351351 - RNA, 19 nt, Homo sapiens
  misc_RNA (1)...(19): siRNA sense strand
ccuuauaagaaguccacau

SEQ ID NO: 2351352 - RNA, 19 nt, Homo sapiens
  misc_RNA (1)...(19): siRNA sense strand
caauaaugcuccuggacag

SEQ ID NO: 2351353 - RNA, 19 nt, Homo sapiens
  misc_RNA (1)...(19): siRNA sense strand
gaaaacuucaagagagaau

SEQ ID NO: 2351354 - RNA, 19 nt, Homo sapiens
  misc_RNA (1)...(19): siRNA sense strand
aggaacugcacaauugaaa

SEQ ID NO: 2351355 - RNA, 19 nt, Homo sapiens
  misc_RNA (1)...(19): siRNA sense strand
gugugguugagaaaggaaa

SEQ ID NO: 2351356 - RNA, 19 nt, Homo sapiens
  misc_RNA (1)...(19): siRNA sense strand
aauaacaacagcaggaacu

SEQ ID NO: 2351357 - RNA, 19 nt, Homo sapiens
  misc_RNA (1)...(19): siRNA sense strand
ucuggggagucuugggaaa

SEQ ID NO: 2351358 - RNA, 19 nt, Homo sapiens
  misc_RNA (1)...(19): siRNA sense strand
augugauguuagagaacua

SEQ ID NO: 2351359 - RNA, 19 nt, Homo sapiens
  misc_RNA (1)...(19): siRNA sense strand
uuaaggaaugacugggaaa

SEQ ID NO: 2351360 - RNA, 19 nt, Homo sapiens
  misc_RNA (1)...(19): siRNA sense strand
cggaguuuguauagggaug

SEQ ID NO: 2351361 - RNA, 19 nt, Homo sapiens
  misc_RNA (1)...(19): siRNA sense strand
cuuaaggaaugacugggaa

SEQ ID NO: 2351362 - RNA, 19 nt, Homo sapiens
  misc_RNA (1)...(19): siRNA sense strand
ggaugugauguuagagaac

SEQ ID NO: 2351363 - RNA, 19 nt, Homo sapiens
  misc_RNA (1)...(19): siRNA sense strand
acacagagaagacagccaa

SEQ ID NO: 2351364 - RNA, 19 nt, Homo sapiens
  misc_RNA (1)...(19): siRNA sense strand
cuggagaagagcagagaua

SEQ ID NO: 2351365 - RNA, 19 nt, Homo sapiens
  misc_RNA (1)...(19): siRNA sense strand
ggagaagagcagagauaca

SEQ ID NO: 2351366 - RNA, 19 nt, Homo sapiens
  misc_RNA (1)...(19): siRNA sense strand
uggagaacgggaaggacaa

SEQ ID NO: 2351367 - RNA, 19 nt, Homo sapiens
  misc_RNA (1)...(19): siRNA sense strand
gaggaagaguucaggugga

SEQ ID NO: 2351368 - RNA, 19 nt, Homo sapiens
  misc_RNA (1)...(19): siRNA sense strand
gaagaguucagguggaaaa

SEQ ID NO: 2351369 - RNA, 19 nt, Homo sapiens
  misc_RNA (1)...(19): siRNA sense strand
gcacagacugaccgagaga

SEQ ID NO: 2351370 - RNA, 19 nt, Homo sapiens
  misc_RNA (1)...(19): siRNA sense strand
gugauguguaggaggaaga

SEQ ID NO: 2351371 - RNA, 19 nt, Homo sapiens
  misc_RNA (1)...(19): siRNA sense strand
aggaagaguucagguggaa

SEQ ID NO: 2351372 - RNA, 19 nt, Homo sapiens
  misc_RNA (1)...(19): siRNA sense strand
gcuucaucucagugggcua

SEQ ID NO: 2351373 - RNA, 19 nt, Homo sapiens
  misc_RNA (1)...(19): siRNA sense strand
cuggagaacgggaaggaca

SEQ ID NO: 2351374 - RNA, 19 nt, Homo sapiens
  misc_RNA (1)...(19): siRNA sense strand
cagaccagcaggagauaga

SEQ ID NO: 2351375 - RNA, 19 nt, Homo sapiens
  misc_RNA (1)...(19): siRNA sense strand
gcugugauguguaggagga

SEQ ID NO: 2351376 - RNA, 19 nt, Homo sapiens
  misc_RNA (1)...(19): siRNA sense strand
ucuacaaggcccaggcaca

SEQ ID NO: 2351377 - RNA, 19 nt, Homo sapiens
  misc_RNA (1)...(19): siRNA sense strand
gaguauugggaccggaaca

SEQ ID NO: 2351378 - RNA, 19 nt, Homo sapiens
  misc_RNA (1)...(19): siRNA sense strand
acacccaguucgugagguu

SEQ ID NO: 2351379 - RNA, 19 nt, Homo sapiens
  misc_RNA (1)...(19): siRNA sense strand
gcuacuacaaccagagcga

SEQ ID NO: 2351380 - RNA, 19 nt, Homo sapiens
  misc_RNA (1)...(19): siRNA sense strand
acacugagcuuguggagac

SEQ ID NO: 2351381 - RNA, 19 nt, Homo sapiens
  misc_RNA (1)...(19): siRNA sense strand
ggaagaguucagguggaaa

SEQ ID NO: 2351382 - RNA, 19 nt, Homo sapiens
  misc_RNA (1)...(19): siRNA sense strand
aggcacagacugaccgaga

SEQ ID NO: 2351383 - RNA, 19 nt, Homo sapiens
  misc_RNA (1)...(19): siRNA sense strand
gaccagaccagcaggagau

SEQ ID NO: 2351384 - RNA, 19 nt, Homo sapiens
  misc_RNA (1)...(19): siRNA sense strand
gcagauaccuggagaacgg

SEQ ID NO: 2351385 - RNA, 19 nt, Homo sapiens
  misc_RNA (1)...(19): siRNA sense strand
gagauagaaccuuccagaa

SEQ ID NO: 2351386 - RNA, 19 nt, Homo sapiens
  misc_RNA (1)...(19): siRNA sense strand
ggagauagaaccuuccaga

SEQ ID NO: 2351387 - RNA, 19 nt, Homo sapiens
  misc_RNA (1)...(19): siRNA sense strand
ggaccaaacucaggacacu

SEQ ID NO: 2351388 - RNA, 19 nt, Homo sapiens
  misc_RNA (1)...(19): siRNA sense strand
cggaguauugggaccggaa

SEQ ID NO: 2351389 - RNA, 19 nt, Homo sapiens
  misc_RNA (1)...(19): siRNA sense strand
gaaaggacacucuggacuu

SEQ ID NO: 2351390 - RNA, 19 nt, Homo sapiens
  misc_RNA (1)...(19): siRNA sense strand
ggaucagagaauuaacaaa

SEQ ID NO: 2351391 - RNA, 19 nt, Homo sapiens
  misc_RNA (1)...(19): siRNA sense strand
augcuggaucagagaauua

SEQ ID NO: 2351392 - RNA, 19 nt, Homo sapiens
  misc_RNA (1)...(19): siRNA sense strand
cuggaaagguuguucgagu

SEQ ID NO: 2351393 - RNA, 19 nt, Homo sapiens
  misc_RNA (1)...(19): siRNA sense strand
ccgccuaaagauccggaaa

SEQ ID NO: 2351394 - RNA, 19 nt, Homo sapiens
  misc_RNA (1)...(19): siRNA sense strand
cgccuaaagauccggaaau

SEQ ID NO: 2351395 - RNA, 19 nt, Homo sapiens
  misc_RNA (1)...(19): siRNA sense strand
uugcccacauggagacaaa

SEQ ID NO: 2351396 - RNA, 19 nt, Homo sapiens
  misc_RNA (1)...(19): siRNA sense strand
aauacgaccuuuauggaca

SEQ ID NO: 2351397 - RNA, 19 nt, Homo sapiens
  misc_RNA (1)...(19): siRNA sense strand
gccauuaagcagaguggga

SEQ ID NO: 2351398 - RNA, 19 nt, Homo sapiens
  misc_RNA (1)...(19): siRNA sense strand
aggcuggauuugaugugaa

SEQ ID NO: 2351399 - RNA, 19 nt, Homo sapiens
  misc_RNA (1)...(19): siRNA sense strand
gcugcugaacuauggguau

SEQ ID NO: 2351400 - RNA, 19 nt, Homo sapiens
  misc_RNA (1)...(19): siRNA sense strand
gguaugacacagagcgaug

SEQ ID NO: 2351401 - RNA, 19 nt, Homo sapiens
  misc_RNA (1)...(19): siRNA sense strand
ggaagaagcgauugaggga

SEQ ID NO: 2351402 - RNA, 19 nt, Homo sapiens
  misc_RNA (1)...(19): siRNA sense strand
agaaaaggcaagagaaaga

SEQ ID NO: 2351403 - RNA, 19 nt, Homo sapiens
  misc_RNA (1)...(19): siRNA sense strand
cugcaaggaagaagcgauu

SEQ ID NO: 2351404 - RNA, 19 nt, Homo sapiens
  misc_RNA (1)...(19): siRNA sense strand
uuaccacaucugagagaaa

SEQ ID NO: 2351405 - RNA, 19 nt, Homo sapiens
  misc_RNA (1)...(19): siRNA sense strand
cagugauccuuaauagaau

SEQ ID NO: 2351406 - RNA, 19 nt, Homo sapiens
  misc_RNA (1)...(19): siRNA sense strand
ggcaagagaaagaccguga

SEQ ID NO: 2351407 - RNA, 19 nt, Homo sapiens
  misc_RNA (1)...(19): siRNA sense strand
ggccuuugggugaggagaa

SEQ ID NO: 2351408 - RNA, 19 nt, Homo sapiens
  misc_RNA (1)...(19): siRNA sense strand
cauuguggccuuuggguga

SEQ ID NO: 2351409 - RNA, 19 nt, Homo sapiens
  misc_RNA (1)...(19): siRNA sense strand
aaaccugacaugugggcau

SEQ ID NO: 2351410 - RNA, 19 nt, Homo sapiens
  misc_RNA (1)...(19): siRNA sense strand
aggagaaaggcuggcuaua

SEQ ID NO: 2351411 - RNA, 19 nt, Homo sapiens
  misc_RNA (1)...(19): siRNA sense strand
ggaagaagcgauugaggga

SEQ ID NO: 2351412 - RNA, 19 nt, Homo sapiens
  misc_RNA (1)...(19): siRNA sense strand
agaaaaggcaagagaaaga

SEQ ID NO: 2351413 - RNA, 19 nt, Homo sapiens
  misc_RNA (1)...(19): siRNA sense strand
cugcaaggaagaagcgauu

SEQ ID NO: 2351414 - RNA, 19 nt, Homo sapiens
  misc_RNA (1)...(19): siRNA sense strand
uuaccacaucugagagaaa

SEQ ID NO: 2351415 - RNA, 19 nt, Homo sapiens
  misc_RNA (1)...(19): siRNA sense strand
cagugauccuuaauagaau

SEQ ID NO: 2351416 - RNA, 19 nt, Homo sapiens
  misc_RNA (1)...(19): siRNA sense strand
ggcaagagaaagaccguga

SEQ ID NO: 2351417 - RNA, 19 nt, Homo sapiens
  misc_RNA (1)...(19): siRNA sense strand
ggccuuugggugaggagaa

SEQ ID NO: 2351418 - RNA, 19 nt, Homo sapiens
  misc_RNA (1)...(19): siRNA sense strand
cauuguggccuuuggguga

SEQ ID NO: 2351419 - RNA, 19 nt, Homo sapiens
  misc_RNA (1)...(19): siRNA sense strand
aaaccugacaugugggcau

SEQ ID NO: 2351420 - RNA, 19 nt, Homo sapiens
  misc_RNA (1)...(19): siRNA sense strand
aggagaaaggcuggcuaua

SEQ ID NO: 2351421 - RNA, 19 nt, Homo sapiens
  misc_RNA (1)...(19): siRNA sense strand
ugacaaauuaagaagggaa

SEQ ID NO: 2351422 - RNA, 19 nt, Homo sapiens
  misc_RNA (1)...(19): siRNA sense strand
ccacauauuuguuggcuca

SEQ ID NO: 2351423 - RNA, 19 nt, Homo sapiens
  misc_RNA (1)...(19): siRNA sense strand
aguuugugccauuggauua

SEQ ID NO: 2351424 - RNA, 19 nt, Homo sapiens
  misc_RNA (1)...(19): siRNA sense strand
ccaugacagccgacagcaa

SEQ ID NO: 2351425 - RNA, 19 nt, Homo sapiens
  misc_RNA (1)...(19): siRNA sense strand
aauuauuccucguggucau

SEQ ID NO: 2351426 - RNA, 19 nt, Homo sapiens
  misc_RNA (1)...(19): siRNA sense strand
cuacacaagcugaucaaaa

SEQ ID NO: 2351427 - RNA, 19 nt, Homo sapiens
  misc_RNA (1)...(19): siRNA sense strand
cugggugcguggugaagaa

SEQ ID NO: 2351428 - RNA, 19 nt, Homo sapiens
  misc_RNA (1)...(19): siRNA sense strand
aaaucacagcuguuggaaa

SEQ ID NO: 2351429 - RNA, 19 nt, Homo sapiens
  misc_RNA (1)...(19): siRNA sense strand
auuaagaagggaaaggcuu

SEQ ID NO: 2351430 - RNA, 19 nt, Homo sapiens
  misc_RNA (1)...(19): siRNA sense strand
acgaggagagcgaggucau

SEQ ID NO: 2351431 - RNA, 19 nt, Homo sapiens
  misc_RNA (1)...(19): siRNA sense strand
gggccaugacuaagcacaa

SEQ ID NO: 2351432 - RNA, 19 nt, Homo sapiens
  misc_RNA (1)...(19): siRNA sense strand
aggagaugagcgaggagaa

SEQ ID NO: 2351433 - RNA, 19 nt, Homo sapiens
  misc_RNA (1)...(19): siRNA sense strand
ucucggaggaggagcgcaa

SEQ ID NO: 2351434 - RNA, 19 nt, Homo sapiens
  misc_RNA (1)...(19): siRNA sense strand
aaauggaggaugaggcuga

SEQ ID NO: 2351435 - RNA, 19 nt, Homo sapiens
  misc_RNA (1)...(19): siRNA sense strand
ggcagugacgacagcgaaa

SEQ ID NO: 2351436 - RNA, 19 nt, Homo sapiens
  misc_RNA (1)...(19): siRNA sense strand
gugucaucuucgugaggau

SEQ ID NO: 2351437 - RNA, 19 nt, Homo sapiens
  misc_RNA (1)...(19): siRNA sense strand
cggcuuugcuauuguggca

SEQ ID NO: 2351438 - RNA, 19 nt, Homo sapiens
  misc_RNA (1)...(19): siRNA sense strand
ccagcauccucaugggcau

SEQ ID NO: 2351439 - RNA, 19 nt, Homo sapiens
  misc_RNA (1)...(19): siRNA sense strand
gcacaagacucgggaggag

SEQ ID NO: 2351440 - RNA, 19 nt, Homo sapiens
  misc_RNA (1)...(19): siRNA sense strand
auuugaagcaggagugaaa

SEQ ID NO: 2351441 - RNA, 19 nt, Homo sapiens
  misc_RNA (1)...(19): siRNA sense strand
agacaauugaacagaagaa

SEQ ID NO: 2351442 - RNA, 19 nt, Homo sapiens
  misc_RNA (1)...(19): siRNA sense strand
uauuagaccugcuuggcaa

SEQ ID NO: 2351443 - RNA, 19 nt, Homo sapiens
  misc_RNA (1)...(19): siRNA sense strand
gcggaaaaggacagcaauu

SEQ ID NO: 2351444 - RNA, 19 nt, Homo sapiens
  misc_RNA (1)...(19): siRNA sense strand
ugaucaaagagaagcuauu

SEQ ID NO: 2351445 - RNA, 19 nt, Homo sapiens
  misc_RNA (1)...(19): siRNA sense strand
aaauaugggaaguguuaca

SEQ ID NO: 2351446 - RNA, 19 nt, Homo sapiens
  misc_RNA (1)...(19): siRNA sense strand
acucaggcgaggauggcaa

SEQ ID NO: 2351447 - RNA, 19 nt, Homo sapiens
  misc_RNA (1)...(19): siRNA sense strand
ggggagagacagaggaaac

SEQ ID NO: 2351448 - RNA, 19 nt, Homo sapiens
  misc_RNA (1)...(19): siRNA sense strand
gcaaagaggaggacgaagg

SEQ ID NO: 2351449 - RNA, 19 nt, Homo sapiens
  misc_RNA (1)...(19): siRNA sense strand
augccaaaccacucugaaa

SEQ ID NO: 2351450 - RNA, 19 nt, Homo sapiens
  misc_RNA (1)...(19): siRNA sense strand
cguaugaaguugcugccuu

SEQ ID NO: 2351451 - RNA, 19 nt, Homo sapiens
  misc_RNA (1)...(19): siRNA sense strand
acgaugagaaugugaguac

SEQ ID NO: 2351452 - RNA, 19 nt, Homo sapiens
  misc_RNA (1)...(19): siRNA sense strand
auuugaagcaggagugaaa

SEQ ID NO: 2351453 - RNA, 19 nt, Homo sapiens
  misc_RNA (1)...(19): siRNA sense strand
agacaauugaacagaagaa

SEQ ID NO: 2351454 - RNA, 19 nt, Homo sapiens
  misc_RNA (1)...(19): siRNA sense strand
uauuagaccugcuuggcaa

SEQ ID NO: 2351455 - RNA, 19 nt, Homo sapiens
  misc_RNA (1)...(19): siRNA sense strand
gcggaaaaggacagcaauu

SEQ ID NO: 2351456 - RNA, 19 nt, Homo sapiens
  misc_RNA (1)...(19): siRNA sense strand
ugaucaaagagaagcuauu

SEQ ID NO: 2351457 - RNA, 19 nt, Homo sapiens
  misc_RNA (1)...(19): siRNA sense strand
aaauaugggaaguguuaca

SEQ ID NO: 2351458 - RNA, 19 nt, Homo sapiens
  misc_RNA (1)...(19): siRNA sense strand
acucaggcgaggauggcaa

SEQ ID NO: 2351459 - RNA, 19 nt, Homo sapiens
  misc_RNA (1)...(19): siRNA sense strand
ggggagagacagaggaaac

SEQ ID NO: 2351460 - RNA, 19 nt, Homo sapiens
  misc_RNA (1)...(19): siRNA sense strand
gcaaagaggaggacgaagg

SEQ ID NO: 2351461 - RNA, 19 nt, Homo sapiens
  misc_RNA (1)...(19): siRNA sense strand
augccaaaccacucugaaa

SEQ ID NO: 2351462 - RNA, 19 nt, Homo sapiens
  misc_RNA (1)...(19): siRNA sense strand
cguaugaaguugcugccuu

SEQ ID NO: 2351463 - RNA, 19 nt, Homo sapiens
  misc_RNA (1)...(19): siRNA sense strand
acgaugagaaugugaguac

SEQ ID NO: 2351464 - RNA, 19 nt, Homo sapiens
  misc_RNA (1)...(19): siRNA sense strand
guguaaggauauuaggaau

SEQ ID NO: 2351465 - RNA, 19 nt, Homo sapiens
  misc_RNA (1)...(19): siRNA sense strand
ccucuguaauagugaacaa

SEQ ID NO: 2351466 - RNA, 19 nt, Homo sapiens
  misc_RNA (1)...(19): siRNA sense strand
gaguauagaaggcagggaa

SEQ ID NO: 2351467 - RNA, 19 nt, Homo sapiens
  misc_RNA (1)...(19): siRNA sense strand
cuggagaauaacaaagaua

SEQ ID NO: 2351468 - RNA, 19 nt, Homo sapiens
  misc_RNA (1)...(19): siRNA sense strand
ugagagaaucauuacgaaa

SEQ ID NO: 2351469 - RNA, 19 nt, Homo sapiens
  misc_RNA (1)...(19): siRNA sense strand
uugaaguccuuguggagaa

SEQ ID NO: 2351470 - RNA, 19 nt, Homo sapiens
  misc_RNA (1)...(19): siRNA sense strand
aggcaaaggguggagguua

SEQ ID NO: 2351471 - RNA, 19 nt, Homo sapiens
  misc_RNA (1)...(19): siRNA sense strand
gaguggaaagcgaagcaaa

SEQ ID NO: 2351472 - RNA, 19 nt, Homo sapiens
  misc_RNA (1)...(19): siRNA sense strand
gaagcaaagaagaugaaaa

SEQ ID NO: 2351473 - RNA, 19 nt, Homo sapiens
  misc_RNA (1)...(19): siRNA sense strand
guggagaaagaauggcuaa

SEQ ID NO: 2351474 - RNA, 19 nt, Homo sapiens
  misc_RNA (1)...(19): siRNA sense strand
uggccaaagauguaacuua

SEQ ID NO: 2351475 - RNA, 19 nt, Homo sapiens
  misc_RNA (1)...(19): siRNA sense strand
agugaacaacagagaggaa

SEQ ID NO: 2351476 - RNA, 19 nt, Homo sapiens
  misc_RNA (1)...(19): siRNA sense strand
ggauauuacauaaggugga

SEQ ID NO: 2351477 - RNA, 19 nt, Homo sapiens
  misc_RNA (1)...(19): siRNA sense strand
ugaacaacagagaggaaaa

SEQ ID NO: 2351478 - RNA, 19 nt, Homo sapiens
  misc_RNA (1)...(19): siRNA sense strand
gauccauauuugagaaucu

SEQ ID NO: 2351479 - RNA, 19 nt, Homo sapiens
  misc_RNA (1)...(19): siRNA sense strand
acagagaggaaaagagaau

SEQ ID NO: 2351480 - RNA, 19 nt, Homo sapiens
  misc_RNA (1)...(19): siRNA sense strand
acaaagaaguauucccuga

SEQ ID NO: 2351481 - RNA, 19 nt, Homo sapiens
  misc_RNA (1)...(19): siRNA sense strand
agcaaauauuccugaugaa

SEQ ID NO: 2351482 - RNA, 19 nt, Homo sapiens
  misc_RNA (1)...(19): siRNA sense strand
cuaucaaaaugcugaacua

SEQ ID NO: 2351483 - RNA, 19 nt, Homo sapiens
  misc_RNA (1)...(19): siRNA sense strand
gaggaacuacagagagaga

SEQ ID NO: 2351484 - RNA, 19 nt, Homo sapiens
  misc_RNA (1)...(19): siRNA sense strand
auauuaaagacauggccaa

SEQ ID NO: 2351485 - RNA, 19 nt, Homo sapiens
  misc_RNA (1)...(19): siRNA sense strand
ggaaucuacucauuggcua

SEQ ID NO: 2351486 - RNA, 19 nt, Homo sapiens
  misc_RNA (1)...(19): siRNA sense strand
aguauagaaggcagggaau

SEQ ID NO: 2351487 - RNA, 19 nt, Homo sapiens
  misc_RNA (1)...(19): siRNA sense strand
gugaagaugccuaucaaaa

SEQ ID NO: 2351488 - RNA, 19 nt, Homo sapiens
  misc_RNA (1)...(19): siRNA sense strand
gcggacaagaagauccaua

SEQ ID NO: 2351489 - RNA, 19 nt, Homo sapiens
  misc_RNA (1)...(19): siRNA sense strand
guauagaaggcagggaauu

SEQ ID NO: 2351490 - RNA, 19 nt, Homo sapiens
  misc_RNA (1)...(19): siRNA sense strand
gcccaugguuggagugagu

SEQ ID NO: 2351491 - RNA, 19 nt, Homo sapiens
  misc_RNA (1)...(19): siRNA sense strand
gucacgaauuauagguuau

SEQ ID NO: 2351492 - RNA, 19 nt, Homo sapiens
  misc_RNA (1)...(19): siRNA sense strand
gagauaagaaccaugcaga

SEQ ID NO: 2351493 - RNA, 19 nt, Homo sapiens
  misc_RNA (1)...(19): siRNA sense strand
cagggaauuccaaaugaaa

SEQ ID NO: 2351494 - RNA, 19 nt, Homo sapiens
  misc_RNA (1)...(19): siRNA sense strand
agauaagaaccaugcagau

SEQ ID NO: 2351495 - RNA, 19 nt, Homo sapiens
  misc_RNA (1)...(19): siRNA sense strand
uggagugaguggaaagcga

SEQ ID NO: 2351496 - RNA, 19 nt, Homo sapiens
  misc_RNA (1)...(19): siRNA sense strand
gugaacaacagagaggaaa

SEQ ID NO: 2351497 - RNA, 19 nt, Homo sapiens
  misc_RNA (1)...(19): siRNA sense strand
caaaugaaagcuggagaau

SEQ ID NO: 2351498 - RNA, 19 nt, Homo sapiens
  misc_RNA (1)...(19): siRNA sense strand
uggaaagcgaagcaaagaa

SEQ ID NO: 2351499 - RNA, 19 nt, Homo sapiens
  misc_RNA (1)...(19): siRNA sense strand
uauuaaagacauggccaaa

SEQ ID NO: 2351500 - RNA, 19 nt, Homo sapiens
  misc_RNA (1)...(19): siRNA sense strand
guggcauccuucagaucaa

SEQ ID NO: 2351501 - RNA, 19 nt, Homo sapiens
  misc_RNA (1)...(19): siRNA sense strand
ugcucauguuggauggaua

SEQ ID NO: 2351502 - RNA, 19 nt, Homo sapiens
  misc_RNA (1)...(19): siRNA sense strand
cggacaagaagauccauau

SEQ ID NO: 2351503 - RNA, 19 nt, Homo sapiens
  misc_RNA (1)...(19): siRNA sense strand
gcuucuagucgaggugaaa

SEQ ID NO: 2351504 - RNA, 19 nt, Homo sapiens
  misc_RNA (1)...(19): siRNA sense strand
agaauuaaagagaguggca

SEQ ID NO: 2351505 - RNA, 19 nt, Homo sapiens
  misc_RNA (1)...(19): siRNA sense strand
guguuaaugcuguugccaa

SEQ ID NO: 2351506 - RNA, 19 nt, Homo sapiens
  misc_RNA (1)...(19): siRNA sense strand
ggaugaaaccacaggaacc

SEQ ID NO: 2351507 - RNA, 19 nt, Homo sapiens
  misc_RNA (1)...(19): siRNA sense strand
agaguuggccauggagaua

SEQ ID NO: 2351508 - RNA, 19 nt, Homo sapiens
  misc_RNA (1)...(19): siRNA sense strand
agguuaugaaagugaagau

SEQ ID NO: 2351509 - RNA, 19 nt, Homo sapiens
  misc_RNA (1)...(19): siRNA sense strand
agggaagacgucuguggua

SEQ ID NO: 2351510 - RNA, 19 nt, Homo sapiens
  misc_RNA (1)...(19): siRNA sense strand
gaauuuacgauuugcucau

SEQ ID NO: 2351511 - RNA, 19 nt, Homo sapiens
  misc_RNA (1)...(19): siRNA sense strand
cuucaagcuaucauggauu

SEQ ID NO: 2351512 - RNA, 19 nt, Homo sapiens
  misc_RNA (1)...(19): siRNA sense strand
ugaaagugaagaugccuau

SEQ ID NO: 2351513 - RNA, 19 nt, Homo sapiens
  misc_RNA (1)...(19): siRNA sense strand
acgaaaacuuaaggagauu

SEQ ID NO: 2351514 - RNA, 19 nt, Homo sapiens
  misc_RNA (1)...(19): siRNA sense strand
ggaagacgucugugguagu

SEQ ID NO: 2351515 - RNA, 19 nt, Homo sapiens
  misc_RNA (1)...(19): siRNA sense strand
cuaaacgagcagagcuuca

SEQ ID NO: 2351516 - RNA, 19 nt, Homo sapiens
  misc_RNA (1)...(19): siRNA sense strand
aguuagcagaaauggaaga

SEQ ID NO: 2351517 - RNA, 19 nt, Homo sapiens
  misc_RNA (1)...(19): siRNA sense strand
uguguaaggauauuaggaa

SEQ ID NO: 2351518 - RNA, 19 nt, Homo sapiens
  misc_RNA (1)...(19): siRNA sense strand
uaauagugaacaacagaga

SEQ ID NO: 2351519 - RNA, 19 nt, Homo sapiens
  misc_RNA (1)...(19): siRNA sense strand
guguaaggauauuaggaau

SEQ ID NO: 2351520 - RNA, 19 nt, Homo sapiens
  misc_RNA (1)...(19): siRNA sense strand
ccucuguaauagugaacaa

SEQ ID NO: 2351521 - RNA, 19 nt, Homo sapiens
  misc_RNA (1)...(19): siRNA sense strand
gaguauagaaggcagggaa

SEQ ID NO: 2351522 - RNA, 19 nt, Homo sapiens
  misc_RNA (1)...(19): siRNA sense strand
cuggagaauaacaaagaua

SEQ ID NO: 2351523 - RNA, 19 nt, Homo sapiens
  misc_RNA (1)...(19): siRNA sense strand
ugagagaaucauuacgaaa

SEQ ID NO: 2351524 - RNA, 19 nt, Homo sapiens
  misc_RNA (1)...(19): siRNA sense strand
uugaaguccuuguggagaa

SEQ ID NO: 2351525 - RNA, 19 nt, Homo sapiens
  misc_RNA (1)...(19): siRNA sense strand
aggcaaaggguggagguua

SEQ ID NO: 2351526 - RNA, 19 nt, Homo sapiens
  misc_RNA (1)...(19): siRNA sense strand
gaguggaaagcgaagcaaa

SEQ ID NO: 2351527 - RNA, 19 nt, Homo sapiens
  misc_RNA (1)...(19): siRNA sense strand
gaagcaaagaagaugaaaa

SEQ ID NO: 2351528 - RNA, 19 nt, Homo sapiens
  misc_RNA (1)...(19): siRNA sense strand
guggagaaagaauggcuaa

SEQ ID NO: 2351529 - RNA, 19 nt, Homo sapiens
  misc_RNA (1)...(19): siRNA sense strand
uggccaaagauguaacuua

SEQ ID NO: 2351530 - RNA, 19 nt, Homo sapiens
  misc_RNA (1)...(19): siRNA sense strand
agugaacaacagagaggaa

SEQ ID NO: 2351531 - RNA, 19 nt, Homo sapiens
  misc_RNA (1)...(19): siRNA sense strand
ggauauuacauaaggugga

SEQ ID NO: 2351532 - RNA, 19 nt, Homo sapiens
  misc_RNA (1)...(19): siRNA sense strand
ugaacaacagagaggaaaa

SEQ ID NO: 2351533 - RNA, 19 nt, Homo sapiens
  misc_RNA (1)...(19): siRNA sense strand
gauccauauuugagaaucu

SEQ ID NO: 2351534 - RNA, 19 nt, Homo sapiens
  misc_RNA (1)...(19): siRNA sense strand
acagagaggaaaagagaau

SEQ ID NO: 2351535 - RNA, 19 nt, Homo sapiens
  misc_RNA (1)...(19): siRNA sense strand
acaaagaaguauucccuga

SEQ ID NO: 2351536 - RNA, 19 nt, Homo sapiens
  misc_RNA (1)...(19): siRNA sense strand
agcaaauauuccugaugaa

SEQ ID NO: 2351537 - RNA, 19 nt, Homo sapiens
  misc_RNA (1)...(19): siRNA sense strand
cuaucaaaaugcugaacua

SEQ ID NO: 2351538 - RNA, 19 nt, Homo sapiens
  misc_RNA (1)...(19): siRNA sense strand
gaggaacuacagagagaga

SEQ ID NO: 2351539 - RNA, 19 nt, Homo sapiens
  misc_RNA (1)...(19): siRNA sense strand
auauuaaagacauggccaa

SEQ ID NO: 2351540 - RNA, 19 nt, Homo sapiens
  misc_RNA (1)...(19): siRNA sense strand
ggaaucuacucauuggcua

SEQ ID NO: 2351541 - RNA, 19 nt, Homo sapiens
  misc_RNA (1)...(19): siRNA sense strand
aguauagaaggcagggaau

SEQ ID NO: 2351542 - RNA, 19 nt, Homo sapiens
  misc_RNA (1)...(19): siRNA sense strand
gugaagaugccuaucaaaa

SEQ ID NO: 2351543 - RNA, 19 nt, Homo sapiens
  misc_RNA (1)...(19): siRNA sense strand
gcggacaagaagauccaua

SEQ ID NO: 2351544 - RNA, 19 nt, Homo sapiens
  misc_RNA (1)...(19): siRNA sense strand
guauagaaggcagggaauu

SEQ ID NO: 2351545 - RNA, 19 nt, Homo sapiens
  misc_RNA (1)...(19): siRNA sense strand
gcccaugguuggagugagu

SEQ ID NO: 2351546 - RNA, 19 nt, Homo sapiens
  misc_RNA (1)...(19): siRNA sense strand
gucacgaauuauagguuau

SEQ ID NO: 2351547 - RNA, 19 nt, Homo sapiens
  misc_RNA (1)...(19): siRNA sense strand
gagauaagaaccaugcaga

SEQ ID NO: 2351548 - RNA, 19 nt, Homo sapiens
  misc_RNA (1)...(19): siRNA sense strand
cagggaauuccaaaugaaa

SEQ ID NO: 2351549 - RNA, 19 nt, Homo sapiens
  misc_RNA (1)...(19): siRNA sense strand
agauaagaaccaugcagau

SEQ ID NO: 2351550 - RNA, 19 nt, Homo sapiens
  misc_RNA (1)...(19): siRNA sense strand
uggagugaguggaaagcga

SEQ ID NO: 2351551 - RNA, 19 nt, Homo sapiens
  misc_RNA (1)...(19): siRNA sense strand
gugaacaacagagaggaaa

SEQ ID NO: 2351552 - RNA, 19 nt, Homo sapiens
  misc_RNA (1)...(19): siRNA sense strand
caaaugaaagcuggagaau

SEQ ID NO: 2351553 - RNA, 19 nt, Homo sapiens
  misc_RNA (1)...(19): siRNA sense strand
uggaaagcgaagcaaagaa

SEQ ID NO: 2351554 - RNA, 19 nt, Homo sapiens
  misc_RNA (1)...(19): siRNA sense strand
guggcauccuucagaucaa

SEQ ID NO: 2351555 - RNA, 19 nt, Homo sapiens
  misc_RNA (1)...(19): siRNA sense strand
ugcucauguuggauggaua

SEQ ID NO: 2351556 - RNA, 19 nt, Homo sapiens
  misc_RNA (1)...(19): siRNA sense strand
uauuaaagacauggccaaa

SEQ ID NO: 2351557 - RNA, 19 nt, Homo sapiens
  misc_RNA (1)...(19): siRNA sense strand
cggacaagaagauccauau

SEQ ID NO: 2351558 - RNA, 19 nt, Homo sapiens
  misc_RNA (1)...(19): siRNA sense strand
gcuucuagucgaggugaaa

SEQ ID NO: 2351559 - RNA, 19 nt, Homo sapiens
  misc_RNA (1)...(19): siRNA sense strand
agaauuaaagagaguggca

SEQ ID NO: 2351560 - RNA, 19 nt, Homo sapiens
  misc_RNA (1)...(19): siRNA sense strand
guguuaaugcuguugccaa

SEQ ID NO: 2351561 - RNA, 19 nt, Homo sapiens
  misc_RNA (1)...(19): siRNA sense strand
ggaugaaaccacaggaacc

SEQ ID NO: 2351562 - RNA, 19 nt, Homo sapiens
  misc_RNA (1)...(19): siRNA sense strand
agaguuggccauggagaua

SEQ ID NO: 2351563 - RNA, 19 nt, Homo sapiens
  misc_RNA (1)...(19): siRNA sense strand
agguuaugaaagugaagau

SEQ ID NO: 2351564 - RNA, 19 nt, Homo sapiens
  misc_RNA (1)...(19): siRNA sense strand
agggaagacgucuguggua

SEQ ID NO: 2351565 - RNA, 19 nt, Homo sapiens
  misc_RNA (1)...(19): siRNA sense strand
gaauuuacgauuugcucau

SEQ ID NO: 2351566 - RNA, 19 nt, Homo sapiens
  misc_RNA (1)...(19): siRNA sense strand
cuucaagcuaucauggauu

SEQ ID NO: 2351567 - RNA, 19 nt, Homo sapiens
  misc_RNA (1)...(19): siRNA sense strand
ugaaagugaagaugccuau

SEQ ID NO: 2351568 - RNA, 19 nt, Homo sapiens
  misc_RNA (1)...(19): siRNA sense strand
acgaaaacuuaaggagauu

SEQ ID NO: 2351569 - RNA, 19 nt, Homo sapiens
  misc_RNA (1)...(19): siRNA sense strand
ggaagacgucugugguagu

SEQ ID NO: 2351570 - RNA, 19 nt, Homo sapiens
  misc_RNA (1)...(19): siRNA sense strand
cuaaacgagcagagcuuca

SEQ ID NO: 2351571 - RNA, 19 nt, Homo sapiens
  misc_RNA (1)...(19): siRNA sense strand
uguguaaggauauuaggaa

SEQ ID NO: 2351572 - RNA, 19 nt, Homo sapiens
  misc_RNA (1)...(19): siRNA sense strand
uaauagugaacaacagaga

SEQ ID NO: 2351573 - RNA, 19 nt, Homo sapiens
  misc_RNA (1)...(19): siRNA sense strand
guguaaggauauuaggaau

SEQ ID NO: 2351574 - RNA, 19 nt, Homo sapiens
  misc_RNA (1)...(19): siRNA sense strand
ccucuguaauagugaacaa

SEQ ID NO: 2351575 - RNA, 19 nt, Homo sapiens
  misc_RNA (1)...(19): siRNA sense strand
gaguauagaaggcagggaa

SEQ ID NO: 2351576 - RNA, 19 nt, Homo sapiens
  misc_RNA (1)...(19): siRNA sense strand
cuggagaauaacaaagaua

SEQ ID NO: 2351577 - RNA, 19 nt, Homo sapiens
  misc_RNA (1)...(19): siRNA sense strand
ugagagaaucauuacgaaa

SEQ ID NO: 2351578 - RNA, 19 nt, Homo sapiens
  misc_RNA (1)...(19): siRNA sense strand
uugaaguccuuguggagaa

SEQ ID NO: 2351579 - RNA, 19 nt, Homo sapiens
  misc_RNA (1)...(19): siRNA sense strand
aggcaaaggguggagguua

SEQ ID NO: 2351580 - RNA, 19 nt, Homo sapiens
  misc_RNA (1)...(19): siRNA sense strand
gaguggaaagcgaagcaaa

SEQ ID NO: 2351581 - RNA, 19 nt, Homo sapiens
  misc_RNA (1)...(19): siRNA sense strand
gaagcaaagaagaugaaaa

SEQ ID NO: 2351582 - RNA, 19 nt, Homo sapiens
  misc_RNA (1)...(19): siRNA sense strand
guggagaaagaauggcuaa

SEQ ID NO: 2351583 - RNA, 19 nt, Homo sapiens
  misc_RNA (1)...(19): siRNA sense strand
uggccaaagauguaacuua

SEQ ID NO: 2351584 - RNA, 19 nt, Homo sapiens
  misc_RNA (1)...(19): siRNA sense strand
agugaacaacagagaggaa

SEQ ID NO: 2351585 - RNA, 19 nt, Homo sapiens
  misc_RNA (1)...(19): siRNA sense strand
ggauauuacauaaggugga

SEQ ID NO: 2351586 - RNA, 19 nt, Homo sapiens
  misc_RNA (1)...(19): siRNA sense strand
ugaacaacagagaggaaaa

SEQ ID NO: 2351587 - RNA, 19 nt, Homo sapiens
  misc_RNA (1)...(19): siRNA sense strand
gauccauauuugagaaucu

SEQ ID NO: 2351588 - RNA, 19 nt, Homo sapiens
  misc_RNA (1)...(19): siRNA sense strand
acagagaggaaaagagaau

SEQ ID NO: 2351589 - RNA, 19 nt, Homo sapiens
  misc_RNA (1)...(19): siRNA sense strand
acaaagaaguauucccuga

SEQ ID NO: 2351590 - RNA, 19 nt, Homo sapiens
  misc_RNA (1)...(19): siRNA sense strand
agcaaauauuccugaugaa

SEQ ID NO: 2351591 - RNA, 19 nt, Homo sapiens
  misc_RNA (1)...(19): siRNA sense strand
cuaucaaaaugcugaacua

SEQ ID NO: 2351592 - RNA, 19 nt, Homo sapiens
  misc_RNA (1)...(19): siRNA sense strand
gaggaacuacagagagaga

SEQ ID NO: 2351593 - RNA, 19 nt, Homo sapiens
  misc_RNA (1)...(19): siRNA sense strand
auauuaaagacauggccaa

SEQ ID NO: 2351594 - RNA, 19 nt, Homo sapiens
  misc_RNA (1)...(19): siRNA sense strand
ggaaucuacucauuggcua

SEQ ID NO: 2351595 - RNA, 19 nt, Homo sapiens
  misc_RNA (1)...(19): siRNA sense strand
aguauagaaggcagggaau

SEQ ID NO: 2351596 - RNA, 19 nt, Homo sapiens
  misc_RNA (1)...(19): siRNA sense strand
gugaagaugccuaucaaaa

SEQ ID NO: 2351597 - RNA, 19 nt, Homo sapiens
  misc_RNA (1)...(19): siRNA sense strand
gcggacaagaagauccaua

SEQ ID NO: 2351598 - RNA, 19 nt, Homo sapiens
  misc_RNA (1)...(19): siRNA sense strand
guauagaaggcagggaauu

SEQ ID NO: 2351599 - RNA, 19 nt, Homo sapiens
  misc_RNA (1)...(19): siRNA sense strand
gcccaugguuggagugagu

SEQ ID NO: 2351600 - RNA, 19 nt, Homo sapiens
  misc_RNA (1)...(19): siRNA sense strand
gucacgaauuauagguuau

SEQ ID NO: 2351601 - RNA, 19 nt, Homo sapiens
  misc_RNA (1)...(19): siRNA sense strand
gagauaagaaccaugcaga

SEQ ID NO: 2351602 - RNA, 19 nt, Homo sapiens
  misc_RNA (1)...(19): siRNA sense strand
cagggaauuccaaaugaaa

SEQ ID NO: 2351603 - RNA, 19 nt, Homo sapiens
  misc_RNA (1)...(19): siRNA sense strand
agauaagaaccaugcagau

SEQ ID NO: 2351604 - RNA, 19 nt, Homo sapiens
  misc_RNA (1)...(19): siRNA sense strand
uggagugaguggaaagcga

SEQ ID NO: 2351605 - RNA, 19 nt, Homo sapiens
  misc_RNA (1)...(19): siRNA sense strand
gugaacaacagagaggaaa

SEQ ID NO: 2351606 - RNA, 19 nt, Homo sapiens
  misc_RNA (1)...(19): siRNA sense strand
caaaugaaagcuggagaau

SEQ ID NO: 2351607 - RNA, 19 nt, Homo sapiens
  misc_RNA (1)...(19): siRNA sense strand
uggaaagcgaagcaaagaa

SEQ ID NO: 2351608 - RNA, 19 nt, Homo sapiens
  misc_RNA (1)...(19): siRNA sense strand
guggcauccuucagaucaa

SEQ ID NO: 2351609 - RNA, 19 nt, Homo sapiens
  misc_RNA (1)...(19): siRNA sense strand
ugcucauguuggauggaua

SEQ ID NO: 2351610 - RNA, 19 nt, Homo sapiens
  misc_RNA (1)...(19): siRNA sense strand
uauuaaagacauggccaaa

SEQ ID NO: 2351611 - RNA, 19 nt, Homo sapiens
  misc_RNA (1)...(19): siRNA sense strand
cggacaagaagauccauau

SEQ ID NO: 2351612 - RNA, 19 nt, Homo sapiens
  misc_RNA (1)...(19): siRNA sense strand
gcuucuagucgaggugaaa

SEQ ID NO: 2351613 - RNA, 19 nt, Homo sapiens
  misc_RNA (1)...(19): siRNA sense strand
agaauuaaagagaguggca

SEQ ID NO: 2351614 - RNA, 19 nt, Homo sapiens
  misc_RNA (1)...(19): siRNA sense strand
guguuaaugcuguugccaa

SEQ ID NO: 2351615 - RNA, 19 nt, Homo sapiens
  misc_RNA (1)...(19): siRNA sense strand
ggaugaaaccacaggaacc

SEQ ID NO: 2351616 - RNA, 19 nt, Homo sapiens
  misc_RNA (1)...(19): siRNA sense strand
agaguuggccauggagaua

SEQ ID NO: 2351617 - RNA, 19 nt, Homo sapiens
  misc_RNA (1)...(19): siRNA sense strand
agguuaugaaagugaagau

SEQ ID NO: 2351618 - RNA, 19 nt, Homo sapiens
  misc_RNA (1)...(19): siRNA sense strand
agggaagacgucuguggua

SEQ ID NO: 2351619 - RNA, 19 nt, Homo sapiens
  misc_RNA (1)...(19): siRNA sense strand
gaauuuacgauuugcucau

SEQ ID NO: 2351620 - RNA, 19 nt, Homo sapiens
  misc_RNA (1)...(19): siRNA sense strand
cuucaagcuaucauggauu

SEQ ID NO: 2351621 - RNA, 19 nt, Homo sapiens
  misc_RNA (1)...(19): siRNA sense strand
ugaaagugaagaugccuau

SEQ ID NO: 2351622 - RNA, 19 nt, Homo sapiens
  misc_RNA (1)...(19): siRNA sense strand
acgaaaacuuaaggagauu

SEQ ID NO: 2351623 - RNA, 19 nt, Homo sapiens
  misc_RNA (1)...(19): siRNA sense strand
ggaagacgucugugguagu

SEQ ID NO: 2351624 - RNA, 19 nt, Homo sapiens
  misc_RNA (1)...(19): siRNA sense strand
cuaaacgagcagagcuuca

SEQ ID NO: 2351625 - RNA, 19 nt, Homo sapiens
  misc_RNA (1)...(19): siRNA sense strand
uguguaaggauauuaggaa

SEQ ID NO: 2351626 - RNA, 19 nt, Homo sapiens
  misc_RNA (1)...(19): siRNA sense strand
uaauagugaacaacagaga

SEQ ID NO: 2351627 - RNA, 19 nt, Homo sapiens
  misc_RNA (1)...(19): siRNA sense strand
ggagcagggcagugaggau

SEQ ID NO: 2351628 - RNA, 19 nt, Homo sapiens
  misc_RNA (1)...(19): siRNA sense strand
cggccucgaaggugcauaa

SEQ ID NO: 2351629 - RNA, 19 nt, Homo sapiens
  misc_RNA (1)...(19): siRNA sense strand
guuucaaaguggagaacca

SEQ ID NO: 2351630 - RNA, 19 nt, Homo sapiens
  misc_RNA (1)...(19): siRNA sense strand
ggagacaacaucagcggua

SEQ ID NO: 2351631 - RNA, 19 nt, Homo sapiens
  misc_RNA (1)...(19): siRNA sense strand
agggcaaacaggagggcga

SEQ ID NO: 2351632 - RNA, 19 nt, Homo sapiens
  misc_RNA (1)...(19): siRNA sense strand
ccgugaaacaugacuccaa

SEQ ID NO: 2351633 - RNA, 19 nt, Homo sapiens
  misc_RNA (1)...(19): siRNA sense strand
gggagauugcgauggaguu

SEQ ID NO: 2351634 - RNA, 19 nt, Homo sapiens
  misc_RNA (1)...(19): siRNA sense strand
ggaugaagggcaaacagga

SEQ ID NO: 2351635 - RNA, 19 nt, Homo sapiens
  misc_RNA (1)...(19): siRNA sense strand
cuggagaagcaguggacgu

SEQ ID NO: 2351636 - RNA, 19 nt, Homo sapiens
  misc_RNA (1)...(19): siRNA sense strand
gcaagaacgacgugggagg

SEQ ID NO: 2351637 - RNA, 19 nt, Homo sapiens
  misc_RNA (1)...(19): siRNA sense strand
gcgccuugccggaugacau

SEQ ID NO: 2351638 - RNA, 19 nt, Homo sapiens
  misc_RNA (1)...(19): siRNA sense strand
ggagacaacaucagcggua

SEQ ID NO: 2351639 - RNA, 19 nt, Homo sapiens
  misc_RNA (1)...(19): siRNA sense strand
agggcaaacaggagggcga

SEQ ID NO: 2351640 - RNA, 19 nt, Homo sapiens
  misc_RNA (1)...(19): siRNA sense strand
ccgugaaacaugacuccaa

SEQ ID NO: 2351641 - RNA, 19 nt, Homo sapiens
  misc_RNA (1)...(19): siRNA sense strand
gggagauugcgauggaguu

SEQ ID NO: 2351642 - RNA, 19 nt, Homo sapiens
  misc_RNA (1)...(19): siRNA sense strand
ggaugaagggcaaacagga

SEQ ID NO: 2351643 - RNA, 19 nt, Homo sapiens
  misc_RNA (1)...(19): siRNA sense strand
cuggagaagcaguggacgu

SEQ ID NO: 2351644 - RNA, 19 nt, Homo sapiens
  misc_RNA (1)...(19): siRNA sense strand
gcaagaacgacgugggagg

SEQ ID NO: 2351645 - RNA, 19 nt, Homo sapiens
  misc_RNA (1)...(19): siRNA sense strand
gcgccuugccggaugacau

SEQ ID NO: 2351646 - RNA, 19 nt, Homo sapiens
  misc_RNA (1)...(19): siRNA sense strand
ggagacaacaucagcggua

SEQ ID NO: 2351647 - RNA, 19 nt, Homo sapiens
  misc_RNA (1)...(19): siRNA sense strand
agggcaaacaggagggcga

SEQ ID NO: 2351648 - RNA, 19 nt, Homo sapiens
  misc_RNA (1)...(19): siRNA sense strand
ccgugaaacaugacuccaa

SEQ ID NO: 2351649 - RNA, 19 nt, Homo sapiens
  misc_RNA (1)...(19): siRNA sense strand
gggagauugcgauggaguu

SEQ ID NO: 2351650 - RNA, 19 nt, Homo sapiens
  misc_RNA (1)...(19): siRNA sense strand
ggaugaagggcaaacagga

SEQ ID NO: 2351651 - RNA, 19 nt, Homo sapiens
  misc_RNA (1)...(19): siRNA sense strand
cuggagaagcaguggacgu

SEQ ID NO: 2351652 - RNA, 19 nt, Homo sapiens
  misc_RNA (1)...(19): siRNA sense strand
gcaagaacgacgugggagg

SEQ ID NO: 2351653 - RNA, 19 nt, Homo sapiens
  misc_RNA (1)...(19): siRNA sense strand
gcgccuugccggaugacau

SEQ ID NO: 2351654 - RNA, 19 nt, Homo sapiens
  misc_RNA (1)...(19): siRNA sense strand
gggugaauauccaggccaa

SEQ ID NO: 2351655 - RNA, 19 nt, Homo sapiens
  misc_RNA (1)...(19): siRNA sense strand
cguccaacaaugagaccua

SEQ ID NO: 2351656 - RNA, 19 nt, Homo sapiens
  misc_RNA (1)...(19): siRNA sense strand
ccagggaacuucucggaca

SEQ ID NO: 2351657 - RNA, 19 nt, Homo sapiens
  misc_RNA (1)...(19): siRNA sense strand
cguccagugaccaggagaa

SEQ ID NO: 2351658 - RNA, 19 nt, Homo sapiens
  misc_RNA (1)...(19): siRNA sense strand
cagcacaaccaguggccca

SEQ ID NO: 2351659 - RNA, 19 nt, Homo sapiens
  misc_RNA (1)...(19): siRNA sense strand
gagcacagcaucaaggagu

SEQ ID NO: 2351660 - RNA, 19 nt, Homo sapiens
  misc_RNA (1)...(19): siRNA sense strand
acucagagccagggaacuu

SEQ ID NO: 2351661 - RNA, 19 nt, Homo sapiens
  misc_RNA (1)...(19): siRNA sense strand
cagggaacuucucggacau

SEQ ID NO: 2351662 - RNA, 19 nt, Homo sapiens
  misc_RNA (1)...(19): siRNA sense strand
acaaaagcguccugcucua

SEQ ID NO: 2351663 - RNA, 19 nt, Homo sapiens
  misc_RNA (1)...(19): siRNA sense strand
aggccaagaccacaggcua

SEQ ID NO: 2351664 - RNA, 19 nt, Homo sapiens
  misc_RNA (1)...(19): siRNA sense strand
uggcggugcugcuggacau

SEQ ID NO: 2351665 - RNA, 19 nt, Homo sapiens
  misc_RNA (1)...(19): siRNA sense strand
cuucaauacugcaggaaca

SEQ ID NO: 2351666 - RNA, 19 nt, Homo sapiens
  misc_RNA (1)...(19): siRNA sense strand
ggucagaagaaaacagaaa

SEQ ID NO: 2351667 - RNA, 19 nt, Homo sapiens
  misc_RNA (1)...(19): siRNA sense strand
gggcaaaauauguggauga

SEQ ID NO: 2351668 - RNA, 19 nt, Homo sapiens
  misc_RNA (1)...(19): siRNA sense strand
aguaaggcuguuagggaua

SEQ ID NO: 2351669 - RNA, 19 nt, Homo sapiens
  misc_RNA (1)...(19): siRNA sense strand
caugaaacuucuaagguca

SEQ ID NO: 2351670 - RNA, 19 nt, Homo sapiens
  misc_RNA (1)...(19): siRNA sense strand
caguaaggcuguuagggau

SEQ ID NO: 2351671 - RNA, 19 nt, Homo sapiens
  misc_RNA (1)...(19): siRNA sense strand
caggagauggaaauggaaa

SEQ ID NO: 2351672 - RNA, 19 nt, Homo sapiens
  misc_RNA (1)...(19): siRNA sense strand
guggagaaauugugcagga

SEQ ID NO: 2351673 - RNA, 19 nt, Homo sapiens
  misc_RNA (1)...(19): siRNA sense strand
ugauaagaagauugugcaa

SEQ ID NO: 2351674 - RNA, 19 nt, Homo sapiens
  misc_RNA (1)...(19): siRNA sense strand
gaaacuggucagaagaaaa

SEQ ID NO: 2351675 - RNA, 19 nt, Homo sapiens
  misc_RNA (1)...(19): siRNA sense strand
agaguuugggaaugggaua

SEQ ID NO: 2351676 - RNA, 19 nt, Homo sapiens
  misc_RNA (1)...(19): siRNA sense strand
aaaacaggaagaagagaaa

SEQ ID NO: 2351677 - RNA, 19 nt, Homo sapiens
  misc_RNA (1)...(19): siRNA sense strand
cugaugaagauaagcaaaa

SEQ ID NO: 2351678 - RNA, 19 nt, Homo sapiens
  misc_RNA (1)...(19): siRNA sense strand
agaaaacagaaaagaggaa

SEQ ID NO: 2351679 - RNA, 19 nt, Homo sapiens
  misc_RNA (1)...(19): siRNA sense strand
aggagauggaaauggaaaa

SEQ ID NO: 2351680 - RNA, 19 nt, Homo sapiens
  misc_RNA (1)...(19): siRNA sense strand
uaucuuaagcucugggaca

SEQ ID NO: 2351681 - RNA, 19 nt, Homo sapiens
  misc_RNA (1)...(19): siRNA sense strand
guggaugagaauaggagau

SEQ ID NO: 2351682 - RNA, 19 nt, Homo sapiens
  misc_RNA (1)...(19): siRNA sense strand
ccugaugaagauaagcaaa

SEQ ID NO: 2351683 - RNA, 19 nt, Homo sapiens
  misc_RNA (1)...(19): siRNA sense strand
ccuuuaggacacagcaaau

SEQ ID NO: 2351684 - RNA, 19 nt, Homo sapiens
  misc_RNA (1)...(19): siRNA sense strand
ggaugaaaucacagcaaag

SEQ ID NO: 2351685 - RNA, 19 nt, Homo sapiens
  misc_RNA (1)...(19): siRNA sense strand
cauaacaugugguugggau

SEQ ID NO: 2351686 - RNA, 19 nt, Homo sapiens
  misc_RNA (1)...(19): siRNA sense strand
ccgucaaagaaguucagua

SEQ ID NO: 2351687 - RNA, 19 nt, Homo sapiens
  misc_RNA (1)...(19): siRNA sense strand
ucaucaagugucugcuaaa

SEQ ID NO: 2351688 - RNA, 19 nt, Homo sapiens
  misc_RNA (1)...(19): siRNA sense strand
cuguagaagaagcugaaaa

SEQ ID NO: 2351689 - RNA, 19 nt, Homo sapiens
  misc_RNA (1)...(19): siRNA sense strand
gguguuaaucuacggucaa

SEQ ID NO: 2351690 - RNA, 19 nt, Homo sapiens
  misc_RNA (1)...(19): siRNA sense strand
gcucugggacacugagaca

SEQ ID NO: 2351691 - RNA, 19 nt, Homo sapiens
  misc_RNA (1)...(19): siRNA sense strand
agccuaagaguuugggaau

SEQ ID NO: 2351692 - RNA, 19 nt, Homo sapiens
  misc_RNA (1)...(19): siRNA sense strand
aaucaauggacaaccaaau

SEQ ID NO: 2351693 - RNA, 19 nt, Homo sapiens
  misc_RNA (1)...(19): siRNA sense strand
agauaaucaucaagugucu

SEQ ID NO: 2351694 - RNA, 19 nt, Homo sapiens
  misc_RNA (1)...(19): siRNA sense strand
aaggaaaacaggaagaaga

SEQ ID NO: 2351695 - RNA, 19 nt, Homo sapiens
  misc_RNA (1)...(19): siRNA sense strand
ugauaaaagccuaagaguu

SEQ ID NO: 2351696 - RNA, 19 nt, Homo sapiens
  misc_RNA (1)...(19): siRNA sense strand
acuaaaucgccuucaucaa

SEQ ID NO: 2351697 - RNA, 19 nt, Homo sapiens
  misc_RNA (1)...(19): siRNA sense strand
agguggcaguuaaggaaga

SEQ ID NO: 2351698 - RNA, 19 nt, Homo sapiens
  misc_RNA (1)...(19): siRNA sense strand
aaggagaacuuuugcaaca

SEQ ID NO: 2351699 - RNA, 19 nt, Homo sapiens
  misc_RNA (1)...(19): siRNA sense strand
gcaggaauaugaucggcau

SEQ ID NO: 2351700 - RNA, 19 nt, Homo sapiens
  misc_RNA (1)...(19): siRNA sense strand
uaugggagguuuauggaga

SEQ ID NO: 2351701 - RNA, 19 nt, Homo sapiens
  misc_RNA (1)...(19): siRNA sense strand
aagccuaagaguuugggaa

SEQ ID NO: 2351702 - RNA, 19 nt, Homo sapiens
  misc_RNA (1)...(19): siRNA sense strand
ggucauaacaugugguugg

SEQ ID NO: 2351703 - RNA, 19 nt, Homo sapiens
  misc_RNA (1)...(19): siRNA sense strand
gcgucagugcagucagauu

SEQ ID NO: 2351704 - RNA, 19 nt, Homo sapiens
  misc_RNA (1)...(19): siRNA sense strand
augggagguuuauggagaa

SEQ ID NO: 2351705 - RNA, 19 nt, Homo sapiens
  misc_RNA (1)...(19): siRNA sense strand
ucaggauguugguguuaau

SEQ ID NO: 2351706 - RNA, 19 nt, Homo sapiens
  misc_RNA (1)...(19): siRNA sense strand
uuucaaguacauagcagaa

SEQ ID NO: 2351707 - RNA, 19 nt, Homo sapiens
  misc_RNA (1)...(19): siRNA sense strand
guuaaggaagauuuggaga

SEQ ID NO: 2351708 - RNA, 19 nt, Homo sapiens
  misc_RNA (1)...(19): siRNA sense strand
uggagaaauugugcaggaa

SEQ ID NO: 2351709 - RNA, 19 nt, Homo sapiens
  misc_RNA (1)...(19): siRNA sense strand
caaucaauggacaaccaaa

SEQ ID NO: 2351710 - RNA, 19 nt, Homo sapiens
  misc_RNA (1)...(19): siRNA sense strand
cgggaaagggagagagaaa

SEQ ID NO: 2351711 - RNA, 19 nt, Homo sapiens
  misc_RNA (1)...(19): siRNA sense strand
ggucaauaguagagaagau

SEQ ID NO: 2351712 - RNA, 19 nt, Homo sapiens
  misc_RNA (1)...(19): siRNA sense strand
agagaaagcuagagcaaaa

SEQ ID NO: 2351713 - RNA, 19 nt, Homo sapiens
  misc_RNA (1)...(19): siRNA sense strand
ucuuauugcuggacagaaa

SEQ ID NO: 2351714 - RNA, 19 nt, Homo sapiens
  misc_RNA (1)...(19): siRNA sense strand
acagaaagugauagugaaa

SEQ ID NO: 2351715 - RNA, 19 nt, Homo sapiens
  misc_RNA (1)...(19): siRNA sense strand
gcaaggaaggagagccaaa

SEQ ID NO: 2351716 - RNA, 19 nt, Homo sapiens
  misc_RNA (1)...(19): siRNA sense strand
ucuaaugaaucuugagcaa

SEQ ID NO: 2351717 - RNA, 19 nt, Homo sapiens
  misc_RNA (1)...(19): siRNA sense strand
cauugaagcauguggcaua

SEQ ID NO: 2351718 - RNA, 19 nt, Homo sapiens
  misc_RNA (1)...(19): siRNA sense strand
ggagagagagaccgggaaa

SEQ ID NO: 2351719 - RNA, 19 nt, Homo sapiens
  misc_RNA (1)...(19): siRNA sense strand
caccaaaagaagaggaaaa

SEQ ID NO: 2351720 - RNA, 19 nt, Homo sapiens
  misc_RNA (1)...(19): siRNA sense strand
agggagagagaaagggaaa

SEQ ID NO: 2351721 - RNA, 19 nt, Homo sapiens
  misc_RNA (1)...(19): siRNA sense strand
gguaaauggcugcggugaa

SEQ ID NO: 2351722 - RNA, 19 nt, Homo sapiens
  misc_RNA (1)...(19): siRNA sense strand
gcgagaagagagaggauga

SEQ ID NO: 2351723 - RNA, 19 nt, Homo sapiens
  misc_RNA (1)...(19): siRNA sense strand
acagauuggaauuggguaa

SEQ ID NO: 2351724 - RNA, 19 nt, Homo sapiens
  misc_RNA (1)...(19): siRNA sense strand
caguggaaauggagugaau

SEQ ID NO: 2351725 - RNA, 19 nt, Homo sapiens
  misc_RNA (1)...(19): siRNA sense strand
ugucaaaacugguggaaca

SEQ ID NO: 2351726 - RNA, 19 nt, Homo sapiens
  misc_RNA (1)...(19): siRNA sense strand
agggaaaugaggaggagua

SEQ ID NO: 2351727 - RNA, 19 nt, Homo sapiens
  misc_RNA (1)...(19): siRNA sense strand
gcugaaacagaaagugaua

SEQ ID NO: 2351728 - RNA, 19 nt, Homo sapiens
  misc_RNA (1)...(19): siRNA sense strand
cuguaauguaugagaguuu

SEQ ID NO: 2351729 - RNA, 19 nt, Homo sapiens
  misc_RNA (1)...(19): siRNA sense strand
aguuugagauuacgggaaa

SEQ ID NO: 2351730 - RNA, 19 nt, Homo sapiens
  misc_RNA (1)...(19): siRNA sense strand
gggaagaucguaaccgaaa

SEQ ID NO: 2351731 - RNA, 19 nt, Homo sapiens
  misc_RNA (1)...(19): siRNA sense strand
ggguauugauaaugaagau

SEQ ID NO: 2351732 - RNA, 19 nt, Homo sapiens
  misc_RNA (1)...(19): siRNA sense strand
uggcaggauucuuggacua

SEQ ID NO: 2351733 - RNA, 19 nt, Homo sapiens
  misc_RNA (1)...(19): siRNA sense strand
ugauaauaaugauggguca

SEQ ID NO: 2351734 - RNA, 19 nt, Homo sapiens
  misc_RNA (1)...(19): siRNA sense strand
gggacaacaugaugagcau

SEQ ID NO: 2351735 - RNA, 19 nt, Homo sapiens
  misc_RNA (1)...(19): siRNA sense strand
caguguagcuuuaugggaa

SEQ ID NO: 2351736 - RNA, 19 nt, Homo sapiens
  misc_RNA (1)...(19): siRNA sense strand
ugucauuauucgagaacuu

SEQ ID NO: 2351737 - RNA, 19 nt, Homo sapiens
  misc_RNA (1)...(19): siRNA sense strand
gaacuuuaucaguggaaau

SEQ ID NO: 2351738 - RNA, 19 nt, Homo sapiens
  misc_RNA (1)...(19): siRNA sense strand
agaaagugauagugaaagu

SEQ ID NO: 2351739 - RNA, 19 nt, Homo sapiens
  misc_RNA (1)...(19): siRNA sense strand
guagagaagaugagcauga

SEQ ID NO: 2351740 - RNA, 19 nt, Homo sapiens
  misc_RNA (1)...(19): siRNA sense strand
ggguggaagugguggagga

SEQ ID NO: 2351741 - RNA, 19 nt, Homo sapiens
  misc_RNA (1)...(19): siRNA sense strand
gggagaaauguaaauguaa

SEQ ID NO: 2351742 - RNA, 19 nt, Homo sapiens
  misc_RNA (1)...(19): siRNA sense strand
gggcagugguguagcacga

SEQ ID NO: 2351743 - RNA, 19 nt, Homo sapiens
  misc_RNA (1)...(19): siRNA sense strand
acucauugccuuauaguua

SEQ ID NO: 2351744 - RNA, 19 nt, Homo sapiens
  misc_RNA (1)...(19): siRNA sense strand
ugaaagaacuccaaaacaa

SEQ ID NO: 2351745 - RNA, 19 nt, Homo sapiens
  misc_RNA (1)...(19): siRNA sense strand
ccaaccagcaauaaagaaa

SEQ ID NO: 2351746 - RNA, 19 nt, Homo sapiens
  misc_RNA (1)...(19): siRNA sense strand
uggguaaaccugauaauaa

SEQ ID NO: 2351747 - RNA, 19 nt, Homo sapiens
  misc_RNA (1)...(19): siRNA sense strand
gagaugaagaacaggauga

SEQ ID NO: 2351748 - RNA, 19 nt, Homo sapiens
  misc_RNA (1)...(19): siRNA sense strand
agguuacaguggauagaaa

SEQ ID NO: 2351749 - RNA, 19 nt, Homo sapiens
  misc_RNA (1)...(19): siRNA sense strand
cagcagacaacauuggaua

SEQ ID NO: 2351750 - RNA, 19 nt, Homo sapiens
  misc_RNA (1)...(19): siRNA sense strand
ugccaaaucuagaguguau

SEQ ID NO: 2351751 - RNA, 19 nt, Homo sapiens
  misc_RNA (1)...(19): siRNA sense strand
cagcaaggaaggagagcca

SEQ ID NO: 2351752 - RNA, 19 nt, Homo sapiens
  misc_RNA (1)...(19): siRNA sense strand
ugauaaggauggaacaaaa

SEQ ID NO: 2351753 - RNA, 19 nt, Homo sapiens
  misc_RNA (1)...(19): siRNA sense strand
aggaaaaggugaaugaaga

SEQ ID NO: 2351754 - RNA, 19 nt, Homo sapiens
  misc_RNA (1)...(19): siRNA sense strand
ugguagaguuugcaggauu

SEQ ID NO: 2351755 - RNA, 19 nt, Homo sapiens
  misc_RNA (1)...(19): siRNA sense strand
aagcagaacaggaaaauaa

SEQ ID NO: 2351756 - RNA, 19 nt, Homo sapiens
  misc_RNA (1)...(19): siRNA sense strand
gagcaugacagaacgacaa

SEQ ID NO: 2351757 - RNA, 19 nt, Homo sapiens
  misc_RNA (1)...(19): siRNA sense strand
caaacuuggauaagaagaa

SEQ ID NO: 2351758 - RNA, 19 nt, Homo sapiens
  misc_RNA (1)...(19): siRNA sense strand
gaaaagcagaacaggaaaa

SEQ ID NO: 2351759 - RNA, 19 nt, Homo sapiens
  misc_RNA (1)...(19): siRNA sense strand
uggaaugccuugaaaucua

SEQ ID NO: 2351760 - RNA, 19 nt, Homo sapiens
  misc_RNA (1)...(19): siRNA sense strand
acauagaacaggagaccuu

SEQ ID NO: 2351761 - RNA, 19 nt, Homo sapiens
  misc_RNA (1)...(19): siRNA sense strand
ucaaaauuccgcagagaaa

SEQ ID NO: 2351762 - RNA, 19 nt, Homo sapiens
  misc_RNA (1)...(19): siRNA sense strand
gcuuuauccucguguacaa

SEQ ID NO: 2351763 - RNA, 19 nt, Homo sapiens
  misc_RNA (1)...(19): siRNA sense strand
uggaagaugucaagaaugu

SEQ ID NO: 2351764 - RNA, 19 nt, Homo sapiens
  misc_RNA (1)...(19): siRNA sense strand
cggugaagucaaugugcaa

SEQ ID NO: 2351765 - RNA, 19 nt, Homo sapiens
  misc_RNA (1)...(19): siRNA sense strand
caguacagccagacagauu

SEQ ID NO: 2351766 - RNA, 19 nt, Homo sapiens
  misc_RNA (1)...(19): siRNA sense strand
cgagaacuucagagaacaa

SEQ ID NO: 2351767 - RNA, 19 nt, Homo sapiens
  misc_RNA (1)...(19): siRNA sense strand
augaagaacaggaugauau

SEQ ID NO: 2351768 - RNA, 19 nt, Homo sapiens
  misc_RNA (1)...(19): siRNA sense strand
acguuaugguucugcauua

SEQ ID NO: 2351769 - RNA, 19 nt, Homo sapiens
  misc_RNA (1)...(19): siRNA sense strand
agaaauaggacuuacugaa

SEQ ID NO: 2351770 - RNA, 19 nt, Homo sapiens
  misc_RNA (1)...(19): siRNA sense strand
agaagaagguggaggacag

SEQ ID NO: 2351771 - RNA, 19 nt, Homo sapiens
  misc_RNA (1)...(19): siRNA sense strand
uccuaaaguuggugucuua

SEQ ID NO: 2351772 - RNA, 19 nt, Homo sapiens
  misc_RNA (1)...(19): siRNA sense strand
cagaaauauuagcagugaa

SEQ ID NO: 2351773 - RNA, 19 nt, Homo sapiens
  misc_RNA (1)...(19): siRNA sense strand
aaguaauggcccagguaau

SEQ ID NO: 2351774 - RNA, 19 nt, Homo sapiens
  misc_RNA (1)...(19): siRNA sense strand
gaaucagggaagaucguaa

SEQ ID NO: 2351775 - RNA, 19 nt, Homo sapiens
  misc_RNA (1)...(19): siRNA sense strand
gcaaugaaucagcagacaa

SEQ ID NO: 2351776 - RNA, 19 nt, Homo sapiens
  misc_RNA (1)...(19): siRNA sense strand
cuuugaauguauuggaaca

SEQ ID NO: 2351777 - RNA, 19 nt, Homo sapiens
  misc_RNA (1)...(19): siRNA sense strand
aggccauucuggacagcaa

SEQ ID NO: 2351778 - RNA, 19 nt, Homo sapiens
  misc_RNA (1)...(19): siRNA sense strand
ccagauggauuguggggaa

SEQ ID NO: 2351779 - RNA, 19 nt, Homo sapiens
  misc_RNA (1)...(19): siRNA sense strand
ggaacuaccuaccuggaga

SEQ ID NO: 2351780 - RNA, 19 nt, Homo sapiens
  misc_RNA (1)...(19): siRNA sense strand
gggaaggugauugggacaa

SEQ ID NO: 2351781 - RNA, 19 nt, Homo sapiens
  misc_RNA (1)...(19): siRNA sense strand
acugcuaaagugagaguga

SEQ ID NO: 2351782 - RNA, 19 nt, Homo sapiens
  misc_RNA (1)...(19): siRNA sense strand
acgagcaaagcaugugaaa

SEQ ID NO: 2351783 - RNA, 19 nt, Homo sapiens
  misc_RNA (1)...(19): siRNA sense strand
ggggaaggugauugggaca

SEQ ID NO: 2351784 - RNA, 19 nt, Homo sapiens
  misc_RNA (1)...(19): siRNA sense strand
agaccaaauacaagcagaa

SEQ ID NO: 2351785 - RNA, 19 nt, Homo sapiens
  misc_RNA (1)...(19): siRNA sense strand
uauaaggaagaaagggaau

SEQ ID NO: 2351786 - RNA, 19 nt, Homo sapiens
  misc_RNA (1)...(19): siRNA sense strand
uaugaaaagaagagaccaa

SEQ ID NO: 2351787 - RNA, 19 nt, Homo sapiens
  misc_RNA (1)...(19): siRNA sense strand
aguuaggagacgauaucaa

SEQ ID NO: 2351788 - RNA, 19 nt, Homo sapiens
  misc_RNA (1)...(19): siRNA sense strand
aaggaaugguggaacgcuu

SEQ ID NO: 2351789 - RNA, 19 nt, Homo sapiens
  misc_RNA (1)...(19): siRNA sense strand
uuauaaggaagaaagggaa

SEQ ID NO: 2351790 - RNA, 19 nt, Homo sapiens
  misc_RNA (1)...(19): siRNA sense strand
gggcaaaccgucagagcug

SEQ ID NO: 2351791 - RNA, 19 nt, Homo sapiens
  misc_RNA (1)...(19): siRNA sense strand
auaaggaagaaagggaaua

SEQ ID NO: 2351792 - RNA, 19 nt, Homo sapiens
  misc_RNA (1)...(19): siRNA sense strand
cagagaauuuauaaggaag

SEQ ID NO: 2351793 - RNA, 19 nt, Homo sapiens
  misc_RNA (1)...(19): siRNA sense strand
gggaaaacuggaagaagca

SEQ ID NO: 2351794 - RNA, 19 nt, Homo sapiens
  misc_RNA (1)...(19): siRNA sense strand
cgucagagcuguugcgucc

SEQ ID NO: 2351795 - RNA, 19 nt, Homo sapiens
  misc_RNA (1)...(19): siRNA sense strand
gaaccagauuuaaaggauc

SEQ ID NO: 2351796 - RNA, 19 nt, Homo sapiens
  misc_RNA (1)...(19): siRNA sense strand
ugaaguuaggagacgauau

SEQ ID NO: 2351797 - RNA, 19 nt, Homo sapiens
  misc_RNA (1)...(19): siRNA sense strand
aaguugaaguuuugaccua

SEQ ID NO: 2351798 - RNA, 19 nt, Homo sapiens
  misc_RNA (1)...(19): siRNA sense strand
uguuaauggguguuaugaa

SEQ ID NO: 2351799 - RNA, 19 nt, Homo sapiens
  misc_RNA (1)...(19): siRNA sense strand
agaccaaauacaagcagaa

SEQ ID NO: 2351800 - RNA, 19 nt, Homo sapiens
  misc_RNA (1)...(19): siRNA sense strand
uauaaggaagaaagggaau

SEQ ID NO: 2351801 - RNA, 19 nt, Homo sapiens
  misc_RNA (1)...(19): siRNA sense strand
uaugaaaagaagagaccaa

SEQ ID NO: 2351802 - RNA, 19 nt, Homo sapiens
  misc_RNA (1)...(19): siRNA sense strand
aguuaggagacgauaucaa

SEQ ID NO: 2351803 - RNA, 19 nt, Homo sapiens
  misc_RNA (1)...(19): siRNA sense strand
aaggaaugguggaacgcuu

SEQ ID NO: 2351804 - RNA, 19 nt, Homo sapiens
  misc_RNA (1)...(19): siRNA sense strand
uuauaaggaagaaagggaa

SEQ ID NO: 2351805 - RNA, 19 nt, Homo sapiens
  misc_RNA (1)...(19): siRNA sense strand
gggcaaaccgucagagcug

SEQ ID NO: 2351806 - RNA, 19 nt, Homo sapiens
  misc_RNA (1)...(19): siRNA sense strand
auaaggaagaaagggaaua

SEQ ID NO: 2351807 - RNA, 19 nt, Homo sapiens
  misc_RNA (1)...(19): siRNA sense strand
cagagaauuuauaaggaag

SEQ ID NO: 2351808 - RNA, 19 nt, Homo sapiens
  misc_RNA (1)...(19): siRNA sense strand
gggaaaacuggaagaagca

SEQ ID NO: 2351809 - RNA, 19 nt, Homo sapiens
  misc_RNA (1)...(19): siRNA sense strand
cgucagagcuguugcgucc

SEQ ID NO: 2351810 - RNA, 19 nt, Homo sapiens
  misc_RNA (1)...(19): siRNA sense strand
gaaccagauuuaaaggauc

SEQ ID NO: 2351811 - RNA, 19 nt, Homo sapiens
  misc_RNA (1)...(19): siRNA sense strand
ugaaguuaggagacgauau

SEQ ID NO: 2351812 - RNA, 19 nt, Homo sapiens
  misc_RNA (1)...(19): siRNA sense strand
aaguugaaguuuugaccua

SEQ ID NO: 2351813 - RNA, 19 nt, Homo sapiens
  misc_RNA (1)...(19): siRNA sense strand
uguuaauggguguuaugaa

SEQ ID NO: 2351814 - RNA, 19 nt, Homo sapiens
  misc_RNA (1)...(19): siRNA sense strand
aaaccgaggcagagagcua

SEQ ID NO: 2351815 - RNA, 19 nt, Homo sapiens
  misc_RNA (1)...(19): siRNA sense strand
ggaauuaacuugagaggag

SEQ ID NO: 2351816 - RNA, 19 nt, Homo sapiens
  misc_RNA (1)...(19): siRNA sense strand
gagaaaagccacagagcca

SEQ ID NO: 2351817 - RNA, 19 nt, Homo sapiens
  misc_RNA (1)...(19): siRNA sense strand
augaggaagaggaggaaga

SEQ ID NO: 2351818 - RNA, 19 nt, Homo sapiens
  misc_RNA (1)...(19): siRNA sense strand
aggaagaggaggaagagga

SEQ ID NO: 2351819 - RNA, 19 nt, Homo sapiens
  misc_RNA (1)...(19): siRNA sense strand
gagaaaugacugcuggaca

SEQ ID NO: 2351820 - RNA, 19 nt, Homo sapiens
  misc_RNA (1)...(19): siRNA sense strand
aggaugaggaagaggagga

SEQ ID NO: 2351821 - RNA, 19 nt, Homo sapiens
  misc_RNA (1)...(19): siRNA sense strand
ggccauugaaacuggaauu

SEQ ID NO: 2351822 - RNA, 19 nt, Homo sapiens
  misc_RNA (1)...(19): siRNA sense strand
cguccuggugugugagauu

SEQ ID NO: 2351823 - RNA, 19 nt, Homo sapiens
  misc_RNA (1)...(19): siRNA sense strand
gugagauugcagagggcau

SEQ ID NO: 2351824 - RNA, 19 nt, Homo sapiens
  misc_RNA (1)...(19): siRNA sense strand
ucaucagggugaggagaua

SEQ ID NO: 2351825 - RNA, 19 nt, Homo sapiens
  misc_RNA (1)...(19): siRNA sense strand
ccgaaaccguagaaggacu

SEQ ID NO: 2351826 - RNA, 19 nt, Homo sapiens
  misc_RNA (1)...(19): siRNA sense strand
cugagagcgaggaggauga

SEQ ID NO: 2351827 - RNA, 19 nt, Homo sapiens
  misc_RNA (1)...(19): siRNA sense strand
gugcauguguggugcucau

SEQ ID NO: 2351828 - RNA, 19 nt, Homo sapiens
  misc_RNA (1)...(19): siRNA sense strand
ggaaggacauucagggcac

SEQ ID NO: 2351829 - RNA, 19 nt, Homo sapiens
  misc_RNA (1)...(19): siRNA sense strand
gugcaaaagcuaagcgagu

SEQ ID NO: 2351830 - RNA, 19 nt, Homo sapiens
  misc_RNA (1)...(19): siRNA sense strand
agagcgaggaggaugacaa

SEQ ID NO: 2351831 - RNA, 19 nt, Homo sapiens
  misc_RNA (1)...(19): siRNA sense strand
uggaaaucgcccagcugaa

SEQ ID NO: 2351832 - RNA, 19 nt, Homo sapiens
  misc_RNA (1)...(19): siRNA sense strand
agaaaugacugcuggacag

SEQ ID NO: 2351833 - RNA, 19 nt, Homo sapiens
  misc_RNA (1)...(19): siRNA sense strand
cagcugagagcgaggagga

SEQ ID NO: 2351834 - RNA, 19 nt, Homo sapiens
  misc_RNA (1)...(19): siRNA sense strand
gauuuaaccuggacccuga

SEQ ID NO: 2351835 - RNA, 19 nt, Homo sapiens
  misc_RNA (1)...(19): siRNA sense strand
gcuccaaggugcacaucca

SEQ ID NO: 2351836 - RNA, 19 nt, Homo sapiens
  misc_RNA (1)...(19): siRNA sense strand
cccuaauggucuccaacua

SEQ ID NO: 2351837 - RNA, 19 nt, Homo sapiens
  misc_RNA (1)...(19): siRNA sense strand
ugugggaggcccuggaaau

SEQ ID NO: 2351838 - RNA, 19 nt, Homo sapiens
  misc_RNA (1)...(19): siRNA sense strand
cagaccaagauuuacaaua

SEQ ID NO: 2351839 - RNA, 19 nt, Homo sapiens
  misc_RNA (1)...(19): siRNA sense strand
aggaagaggaggcagcuga

SEQ ID NO: 2351840 - RNA, 19 nt, Homo sapiens
  misc_RNA (1)...(19): siRNA sense strand
ucgauaagccagagaagcu

SEQ ID NO: 2351841 - RNA, 19 nt, Homo sapiens
  misc_RNA (1)...(19): siRNA sense strand
acacagacuccaacaacau

SEQ ID NO: 2351842 - RNA, 19 nt, Homo sapiens
  misc_RNA (1)...(19): siRNA sense strand
uggaaguccgaauggagua

SEQ ID NO: 2351843 - RNA, 19 nt, Homo sapiens
  misc_RNA (1)...(19): siRNA sense strand
ggagcaauacagaccaaga

SEQ ID NO: 2351844 - RNA, 19 nt, Homo sapiens
  misc_RNA (1)...(19): siRNA sense strand
cccugaagccggugcugaa

SEQ ID NO: 2351845 - RNA, 19 nt, Homo sapiens
  misc_RNA (1)...(19): siRNA sense strand
ggacauuucugcaagcauc

SEQ ID NO: 2351846 - RNA, 19 nt, Homo sapiens
  misc_RNA (1)...(19): siRNA sense strand
caacgguacaagaugguca

SEQ ID NO: 2351847 - RNA, 19 nt, Homo sapiens
  misc_RNA (1)...(19): siRNA sense strand
ggaugaggaagaggaggaa

SEQ ID NO: 2351848 - RNA, 19 nt, Homo sapiens
  misc_RNA (1)...(19): siRNA sense strand
ucgaauacacagacuccaa

SEQ ID NO: 2351849 - RNA, 19 nt, Homo sapiens
  misc_RNA (1)...(19): siRNA sense strand
gggcuaugccaguacagau

SEQ ID NO: 2351850 - RNA, 19 nt, Homo sapiens
  misc_RNA (1)...(19): siRNA sense strand
aggaccaagagcuggagaa

SEQ ID NO: 2351851 - RNA, 19 nt, Homo sapiens
  misc_RNA (1)...(19): siRNA sense strand
ccaaagaacuggccagacc

SEQ ID NO: 2351852 - RNA, 19 nt, Homo sapiens
  misc_RNA (1)...(19): siRNA sense strand
uggcauugacauccgcaaa

SEQ ID NO: 2351853 - RNA, 19 nt, Homo sapiens
  misc_RNA (1)...(19): siRNA sense strand
accuggacccugagaggaa

SEQ ID NO: 2351854 - RNA, 19 nt, Homo sapiens
  misc_RNA (1)...(19): siRNA sense strand
gcaucuucaucauggacga

SEQ ID NO: 2351855 - RNA, 19 nt, Homo sapiens
  misc_RNA (1)...(19): siRNA sense strand
cugcucagccggaaggaca

SEQ ID NO: 2351856 - RNA, 19 nt, Homo sapiens
  misc_RNA (1)...(19): siRNA sense strand
caaccuaugaagagggaca

SEQ ID NO: 2351857 - RNA, 19 nt, Homo sapiens
  misc_RNA (1)...(19): siRNA sense strand
gagaagagucaccuggcaa

SEQ ID NO: 2351858 - RNA, 19 nt, Homo sapiens
  misc_RNA (1)...(19): siRNA sense strand
gcuuggaggaagacgagaa

SEQ ID NO: 2351859 - RNA, 19 nt, Homo sapiens
  misc_RNA (1)...(19): siRNA sense strand
aggaagacgagaaugaaaa

SEQ ID NO: 2351860 - RNA, 19 nt, Homo sapiens
  misc_RNA (1)...(19): siRNA sense strand
aauauuggaaagagagaca

SEQ ID NO: 2351861 - RNA, 19 nt, Homo sapiens
  misc_RNA (1)...(19): siRNA sense strand
cuaugaagagggacaucaa

SEQ ID NO: 2351862 - RNA, 19 nt, Homo sapiens
  misc_RNA (1)...(19): siRNA sense strand
aagcagaguaccugaacca

SEQ ID NO: 2351863 - RNA, 19 nt, Homo sapiens
  misc_RNA (1)...(19): siRNA sense strand
cuugagauccuuaugggua

SEQ ID NO: 2351864 - RNA, 19 nt, Homo sapiens
  misc_RNA (1)...(19): siRNA sense strand
agauuguccgaguggaaau

SEQ ID NO: 2351865 - RNA, 19 nt, Homo sapiens
  misc_RNA (1)...(19): siRNA sense strand
gagacagagauguggccua

SEQ ID NO: 2351866 - RNA, 19 nt, Homo sapiens
  misc_RNA (1)...(19): siRNA sense strand
cagaagagcuccuggccac

SEQ ID NO: 2351867 - RNA, 19 nt, Homo sapiens
  misc_RNA (1)...(19): siRNA sense strand
cgcugaaagugcugagauu

SEQ ID NO: 2351868 - RNA, 19 nt, Homo sapiens
  misc_RNA (1)...(19): siRNA sense strand
cgcgaagagaagaaggaaa

SEQ ID NO: 2351869 - RNA, 19 nt, Homo sapiens
  misc_RNA (1)...(19): siRNA sense strand
cugaaagugcugagauuga

SEQ ID NO: 2351870 - RNA, 19 nt, Homo sapiens
  misc_RNA (1)...(19): siRNA sense strand
agacagaaucgccgcacaa

SEQ ID NO: 2351871 - RNA, 19 nt, Homo sapiens
  misc_RNA (1)...(19): siRNA sense strand
gagaagaaggaaagccuca

SEQ ID NO: 2351872 - RNA, 19 nt, Homo sapiens
  misc_RNA (1)...(19): siRNA sense strand
ggaccaaacagaaaaggaa

SEQ ID NO: 2351873 - RNA, 19 nt, Homo sapiens
  misc_RNA (1)...(19): siRNA sense strand
ggaaauaaacaacagcuca

SEQ ID NO: 2351874 - RNA, 19 nt, Homo sapiens
  misc_RNA (1)...(19): siRNA sense strand
ugcaaagaccaaagagaca

SEQ ID NO: 2351875 - RNA, 19 nt, Homo sapiens
  misc_RNA (1)...(19): siRNA sense strand
uggcagucaugaagacaau

SEQ ID NO: 2351876 - RNA, 19 nt, Homo sapiens
  misc_RNA (1)...(19): siRNA sense strand
agaaauaaguccaagacag

SEQ ID NO: 2351877 - RNA, 19 nt, Homo sapiens
  misc_RNA (1)...(19): siRNA sense strand
aaccaagaaacaagcguaa

SEQ ID NO: 2351878 - RNA, 19 nt, Homo sapiens
  misc_RNA (1)...(19): siRNA sense strand
agaugaaauccacaguaaa

SEQ ID NO: 2351879 - RNA, 19 nt, Homo sapiens
  misc_RNA (1)...(19): siRNA sense strand
gcugcaaagaccaaagaga

SEQ ID NO: 2351880 - RNA, 19 nt, Homo sapiens
  misc_RNA (1)...(19): siRNA sense strand
cagaaaaggaaauagauga

SEQ ID NO: 2351881 - RNA, 19 nt, Homo sapiens
  misc_RNA (1)...(19): siRNA sense strand
gaaccaagaaacaagcgua

SEQ ID NO: 2351882 - RNA, 19 nt, Homo sapiens
  misc_RNA (1)...(19): siRNA sense strand
cugggaagcaucacauaaa

SEQ ID NO: 2351883 - RNA, 19 nt, Homo sapiens
  misc_RNA (1)...(19): siRNA sense strand
uggaauuugcuucgaguau

SEQ ID NO: 2351884 - RNA, 19 nt, Homo sapiens
  misc_RNA (1)...(19): siRNA sense strand
aauaaguccaagacagaau

SEQ ID NO: 2351885 - RNA, 19 nt, Homo sapiens
  misc_RNA (1)...(19): siRNA sense strand
caugaagacaauagaugau

SEQ ID NO: 2351886 - RNA, 19 nt, Homo sapiens
  misc_RNA (1)...(19): siRNA sense strand
acaaguuacuaaaguggau

SEQ ID NO: 2351887 - RNA, 19 nt, Homo sapiens
  misc_RNA (1)...(19): siRNA sense strand
aggaaauagaugaaaucca

SEQ ID NO: 2351888 - RNA, 19 nt, Homo sapiens
  misc_RNA (1)...(19): siRNA sense strand
cagaggaauuggaaccuga

SEQ ID NO: 2351889 - RNA, 19 nt, Homo sapiens
  misc_RNA (1)...(19): siRNA sense strand
aauuggaaccugacagaga

SEQ ID NO: 2351890 - RNA, 19 nt, Homo sapiens
  misc_RNA (1)...(19): siRNA sense strand
ggaaauagaugaaauccac

SEQ ID NO: 2351891 - RNA, 19 nt, Homo sapiens
  misc_RNA (1)...(19): siRNA sense strand
acaagaaaauugcuggaau

SEQ ID NO: 2351892 - RNA, 19 nt, Homo sapiens
  misc_RNA (1)...(19): siRNA sense strand
guuuaucacgcgaagagaa

SEQ ID NO: 2351893 - RNA, 19 nt, Homo sapiens
  misc_RNA (1)...(19): siRNA sense strand
aagcaggggagcagguuaa

SEQ ID NO: 2351894 - RNA, 19 nt, Homo sapiens
  misc_RNA (1)...(19): siRNA sense strand
guacaaugcccaaugcgau

SEQ ID NO: 2351895 - RNA, 19 nt, Homo sapiens
  misc_RNA (1)...(19): siRNA sense strand
gaccaaacagaaaaggaaa

SEQ ID NO: 2351896 - RNA, 19 nt, Homo sapiens
  misc_RNA (1)...(19): siRNA sense strand
cuagaaaaggauacaagaa

SEQ ID NO: 2351897 - RNA, 19 nt, Homo sapiens
  misc_RNA (1)...(19): siRNA sense strand
ugggacaggaagauaauau

SEQ ID NO: 2351898 - RNA, 19 nt, Homo sapiens
  misc_RNA (1)...(19): siRNA sense strand
gggguuaacauuccagaaa

SEQ ID NO: 2351899 - RNA, 19 nt, Homo sapiens
  misc_RNA (1)...(19): siRNA sense strand
uaucacgcgaagagaagaa

SEQ ID NO: 2351900 - RNA, 19 nt, Homo sapiens
  misc_RNA (1)...(19): siRNA sense strand
aaaggaagccgcugcccaa

SEQ ID NO: 2351901 - RNA, 19 nt, Homo sapiens
  misc_RNA (1)...(19): siRNA sense strand
gcgucuugaagcuaguaaa

SEQ ID NO: 2351902 - RNA, 19 nt, Homo sapiens
  misc_RNA (1)...(19): siRNA sense strand
uguccaacuugcuguguga

SEQ ID NO: 2351903 - RNA, 19 nt, Homo sapiens
  misc_RNA (1)...(19): siRNA sense strand
accaagaauuuguacacau

SEQ ID NO: 2351904 - RNA, 19 nt, Homo sapiens
  misc_RNA (1)...(19): siRNA sense strand
ccaaacagaaaaggaaaua

SEQ ID NO: 2351905 - RNA, 19 nt, Homo sapiens
  misc_RNA (1)...(19): siRNA sense strand
ugguggaucaggcuagaaa

SEQ ID NO: 2351906 - RNA, 19 nt, Homo sapiens
  misc_RNA (1)...(19): siRNA sense strand
gaguauuucaacauugcaa

SEQ ID NO: 2351907 - RNA, 19 nt, Homo sapiens
  misc_RNA (1)...(19): siRNA sense strand
gaaauugccugcaggguga

SEQ ID NO: 2351908 - RNA, 19 nt, Homo sapiens
  misc_RNA (1)...(19): siRNA sense strand
caugcagauugaagauaaa

SEQ ID NO: 2351909 - RNA, 19 nt, Homo sapiens
  misc_RNA (1)...(19): siRNA sense strand
acauggguguggaggcaaa

SEQ ID NO: 2351910 - RNA, 19 nt, Homo sapiens
  misc_RNA (1)...(19): siRNA sense strand
gcuuagaauugcagcagga

SEQ ID NO: 2351911 - RNA, 19 nt, Homo sapiens
  misc_RNA (1)...(19): siRNA sense strand
auagugaggcugacagaaa

SEQ ID NO: 2351912 - RNA, 19 nt, Homo sapiens
  misc_RNA (1)...(19): siRNA sense strand
acaaaagggaaucggaaua

SEQ ID NO: 2351913 - RNA, 19 nt, Homo sapiens
  misc_RNA (1)...(19): siRNA sense strand
caauuagagacauggguau

SEQ ID NO: 2351914 - RNA, 19 nt, Homo sapiens
  misc_RNA (1)...(19): siRNA sense strand
gagaaggugcucaggccaa

SEQ ID NO: 2351915 - RNA, 19 nt, Homo sapiens
  misc_RNA (1)...(19): siRNA sense strand
ggugaugcgcacagccaaa

SEQ ID NO: 2351916 - RNA, 19 nt, Homo sapiens
  misc_RNA (1)...(19): siRNA sense strand
gcaauuagagacaugggua

SEQ ID NO: 2351917 - RNA, 19 nt, Homo sapiens
  misc_RNA (1)...(19): siRNA sense strand
acgaaguuuccgugcauua

SEQ ID NO: 2351918 - RNA, 19 nt, Homo sapiens
  misc_RNA (1)...(19): siRNA sense strand
acaaagugaaagcgggaga

SEQ ID NO: 2351919 - RNA, 19 nt, Homo sapiens
  misc_RNA (1)...(19): siRNA sense strand
ggacauggguguggaggca

SEQ ID NO: 2351920 - RNA, 19 nt, Homo sapiens
  misc_RNA (1)...(19): siRNA sense strand
gagaaagccaugaccgaca

SEQ ID NO: 2351921 - RNA, 19 nt, Homo sapiens
  misc_RNA (1)...(19): siRNA sense strand
agacaaagugaaagcggga

SEQ ID NO: 2351922 - RNA, 19 nt, Homo sapiens
  misc_RNA (1)...(19): siRNA sense strand
auguagaaguccagguguu

SEQ ID NO: 2351923 - RNA, 19 nt, Homo sapiens
  misc_RNA (1)...(19): siRNA sense strand
aguaaagcgaagcugauua

SEQ ID NO: 2351924 - RNA, 19 nt, Homo sapiens
  misc_RNA (1)...(19): siRNA sense strand
cauugcaaacagaggagaa

SEQ ID NO: 2351925 - RNA, 19 nt, Homo sapiens
  misc_RNA (1)...(19): siRNA sense strand
ugcaaacagaggagaaauu

SEQ ID NO: 2351926 - RNA, 19 nt, Homo sapiens
  misc_RNA (1)...(19): siRNA sense strand
ucaagaacaguuagaguca

SEQ ID NO: 2351927 - RNA, 19 nt, Homo sapiens
  misc_RNA (1)...(19): siRNA sense strand
uguacuuguuugaaagaga

SEQ ID NO: 2351928 - RNA, 19 nt, Homo sapiens
  misc_RNA (1)...(19): siRNA sense strand
ccuuugagccaggaagaaa

SEQ ID NO: 2351929 - RNA, 19 nt, Homo sapiens
  misc_RNA (1)...(19): siRNA sense strand
caggauugaaacuggagua

SEQ ID NO: 2351930 - RNA, 19 nt, Homo sapiens
  misc_RNA (1)...(19): siRNA sense strand
aauuagagacauggguaua

SEQ ID NO: 2351931 - RNA, 19 nt, Homo sapiens
  misc_RNA (1)...(19): siRNA sense strand
ggaaaaggaaugaggauug

SEQ ID NO: 2351932 - RNA, 19 nt, Homo sapiens
  misc_RNA (1)...(19): siRNA sense strand
cacaacagccacaggaaga

SEQ ID NO: 2351933 - RNA, 19 nt, Homo sapiens
  misc_RNA (1)...(19): siRNA sense strand
guggaagaagacugaauau

SEQ ID NO: 2351934 - RNA, 19 nt, Homo sapiens
  misc_RNA (1)...(19): siRNA sense strand
aggcaaagaaccaugaagu

SEQ ID NO: 2351935 - RNA, 19 nt, Homo sapiens
  misc_RNA (1)...(19): siRNA sense strand
uauaaagagcacauccaaa

SEQ ID NO: 2351936 - RNA, 19 nt, Homo sapiens
  misc_RNA (1)...(19): siRNA sense strand
agacugaauaucucguaua

SEQ ID NO: 2351937 - RNA, 19 nt, Homo sapiens
  misc_RNA (1)...(19): siRNA sense strand
uguaaauuauguuggagca

SEQ ID NO: 2351938 - RNA, 19 nt, Homo sapiens
  misc_RNA (1)...(19): siRNA sense strand
agacgaaguuuccgugcau

SEQ ID NO: 2351939 - RNA, 19 nt, Homo sapiens
  misc_RNA (1)...(19): siRNA sense strand
gaaucagacaaaagggaau

SEQ ID NO: 2351940 - RNA, 19 nt, Homo sapiens
  misc_RNA (1)...(19): siRNA sense strand
agauauggcagaugaagca

SEQ ID NO: 2351941 - RNA, 19 nt, Homo sapiens
  misc_RNA (1)...(19): siRNA sense strand
ugaaacuggaguacggcaa

SEQ ID NO: 2351942 - RNA, 19 nt, Homo sapiens
  misc_RNA (1)...(19): siRNA sense strand
guguggaggcaaagaacca

SEQ ID NO: 2351943 - RNA, 19 nt, Homo sapiens
  misc_RNA (1)...(19): siRNA sense strand
gcucaggccaacagacaca

SEQ ID NO: 2351944 - RNA, 19 nt, Homo sapiens
  misc_RNA (1)...(19): siRNA sense strand
uuuguaagcaagaaggaau

SEQ ID NO: 2351945 - RNA, 19 nt, Homo sapiens
  misc_RNA (1)...(19): siRNA sense strand
uaccuguuguggaggguua

SEQ ID NO: 2351946 - RNA, 19 nt, Homo sapiens
  misc_RNA (1)...(19): siRNA sense strand
ccgggguggaggaggaaaa

SEQ ID NO: 2351947 - RNA, 19 nt, Homo sapiens
  misc_RNA (1)...(19): siRNA sense strand
aggagaaagccaugaccga

SEQ ID NO: 2351948 - RNA, 19 nt, Homo sapiens
  misc_RNA (1)...(19): siRNA sense strand
gcuaguaaagcgaagcuga

SEQ ID NO: 2351949 - RNA, 19 nt, Homo sapiens
  misc_RNA (1)...(19): siRNA sense strand
agcuggagacaaagugaaa

SEQ ID NO: 2351950 - RNA, 19 nt, Homo sapiens
  misc_RNA (1)...(19): siRNA sense strand
uagucgaguuugaggagga

SEQ ID NO: 2351951 - RNA, 19 nt, Homo sapiens
  misc_RNA (1)...(19): siRNA sense strand
cauaauggcugcugcugga

SEQ ID NO: 2351952 - RNA, 19 nt, Homo sapiens
  misc_RNA (1)...(19): siRNA sense strand
gcaauaacuucaugccugu

SEQ ID NO: 2351953 - RNA, 19 nt, Homo sapiens
  misc_RNA (1)...(19): siRNA sense strand
uuguaagcaagaaggaauu

SEQ ID NO: 2351954 - RNA, 19 nt, Homo sapiens
  misc_RNA (1)...(19): siRNA sense strand
gagaggaaccgguggcauc

SEQ ID NO: 2351955 - RNA, 19 nt, Homo sapiens
  misc_RNA (1)...(19): siRNA sense strand
ccaucugcaauuagagaca

SEQ ID NO: 2351956 - RNA, 19 nt, Homo sapiens
  misc_RNA (1)...(19): siRNA sense strand
gaggaaaaggaaugaggau

SEQ ID NO: 2351957 - RNA, 19 nt, Homo sapiens
  misc_RNA (1)...(19): siRNA sense strand
aggaggaagaaucagacaa

SEQ ID NO: 2351958 - RNA, 19 nt, Homo sapiens
  misc_RNA (1)...(19): siRNA sense strand
gguauaaagagcacaucca

SEQ ID NO: 2351959 - RNA, 19 nt, Homo sapiens
  misc_RNA (1)...(19): siRNA sense strand
aggaaugaggauuguuaga

SEQ ID NO: 2351960 - RNA, 19 nt, Homo sapiens
  misc_RNA (1)...(19): siRNA sense strand
ggaaguauugagauugaca

SEQ ID NO: 2351961 - RNA, 19 nt, Homo sapiens
  misc_RNA (1)...(19): siRNA sense strand
agacaaaagggaaucggaa

SEQ ID NO: 2351962 - RNA, 19 nt, Homo sapiens
  misc_RNA (1)...(19): siRNA sense strand
uggagauguacaagagcua

SEQ ID NO: 2351963 - RNA, 19 nt, Homo sapiens
  misc_RNA (1)...(19): siRNA sense strand
augaagaggcuccgggaca

SEQ ID NO: 2351964 - RNA, 19 nt, Homo sapiens
  misc_RNA (1)...(19): siRNA sense strand
acuucaacgugguggagau

SEQ ID NO: 2351965 - RNA, 19 nt, Homo sapiens
  misc_RNA (1)...(19): siRNA sense strand
gagacuuccuggagcggau

SEQ ID NO: 2351966 - RNA, 19 nt, Homo sapiens
  misc_RNA (1)...(19): siRNA sense strand
agagcuaccuggugggcga

SEQ ID NO: 2351967 - RNA, 19 nt, Homo sapiens
  misc_RNA (1)...(19): siRNA sense strand
ccgucaagaugauggaccu

SEQ ID NO: 2351968 - RNA, 19 nt, Homo sapiens
  misc_RNA (1)...(19): siRNA sense strand
agaugauggaccucaggaa

SEQ ID NO: 2351969 - RNA, 19 nt, Homo sapiens
  misc_RNA (1)...(19): siRNA sense strand
aagacgucccuaagaggaa

SEQ ID NO: 2351970 - RNA, 19 nt, Homo sapiens
  misc_RNA (1)...(19): siRNA sense strand
acgcaaagccucuugggaa

SEQ ID NO: 2351971 - RNA, 19 nt, Homo sapiens
  misc_RNA (1)...(19): siRNA sense strand
uaaucaaggucuuugcaaa

SEQ ID NO: 2351972 - RNA, 19 nt, Homo sapiens
  misc_RNA (1)...(19): siRNA sense strand
cguaaaauuuugacaccaa

SEQ ID NO: 2351973 - RNA, 19 nt, Homo sapiens
  misc_RNA (1)...(19): siRNA sense strand
cagagaaccaaguggcaca

SEQ ID NO: 2351974 - RNA, 19 nt, Homo sapiens
  misc_RNA (1)...(19): siRNA sense strand
ccgaaugauacaaguuuau

SEQ ID NO: 2351975 - RNA, 19 nt, Homo sapiens
  misc_RNA (1)...(19): siRNA sense strand
aaucaaggucuuugcaaaa

SEQ ID NO: 2351976 - RNA, 19 nt, Homo sapiens
  misc_RNA (1)...(19): siRNA sense strand
agauauagauaaacgugga

SEQ ID NO: 2351977 - RNA, 19 nt, Homo sapiens
  misc_RNA (1)...(19): siRNA sense strand
auguguuagcugaagauaa

SEQ ID NO: 2351978 - RNA, 19 nt, Homo sapiens
  misc_RNA (1)...(19): siRNA sense strand
cauuuauggaugaggaagu

SEQ ID NO: 2351979 - RNA, 19 nt, Homo sapiens
  misc_RNA (1)...(19): siRNA sense strand
augaggaaguucaaagcau

SEQ ID NO: 2351980 - RNA, 19 nt, Homo sapiens
  misc_RNA (1)...(19): siRNA sense strand
uggaagagcgaguaccaau

SEQ ID NO: 2351981 - RNA, 19 nt, Homo sapiens
  misc_RNA (1)...(19): siRNA sense strand
aggaacagaaacaaccaaa

SEQ ID NO: 2351982 - RNA, 19 nt, Homo sapiens
  misc_RNA (1)...(19): siRNA sense strand
cgcaaagccucuugggaag

SEQ ID NO: 2351983 - RNA, 19 nt, Homo sapiens
  misc_RNA (1)...(19): siRNA sense strand
cuacauuuauggaugagga

SEQ ID NO: 2351984 - RNA, 19 nt, Homo sapiens
  misc_RNA (1)...(19): siRNA sense strand
gcagaagacuuuuaagcca

SEQ ID NO: 2351985 - RNA, 19 nt, Homo sapiens
  misc_RNA (1)...(19): siRNA sense strand
gccagauuccacagaguau

SEQ ID NO: 2351986 - RNA, 19 nt, Homo sapiens
  misc_RNA (1)...(19): siRNA sense strand
uugaccagauucagagaga

SEQ ID NO: 2351987 - RNA, 19 nt, Homo sapiens
  misc_RNA (1)...(19): siRNA sense strand
cagcuauacaagaacugaa

SEQ ID NO: 2351988 - RNA, 19 nt, Homo sapiens
  misc_RNA (1)...(19): siRNA sense strand
uuuggaaggaacagaaaca

SEQ ID NO: 2351989 - RNA, 19 nt, Homo sapiens
  misc_RNA (1)...(19): siRNA sense strand
gauauagauaaacguggaa

SEQ ID NO: 2351990 - RNA, 19 nt, Homo sapiens
  misc_RNA (1)...(19): siRNA sense strand
aggcaaagaaguugggaau

SEQ ID NO: 2351991 - RNA, 19 nt, Homo sapiens
  misc_RNA (1)...(19): siRNA sense strand
gauuaaaggcagagaucau

SEQ ID NO: 2351992 - RNA, 19 nt, Homo sapiens
  misc_RNA (1)...(19): siRNA sense strand
ggaacaaacuguauggcuu

SEQ ID NO: 2351993 - RNA, 19 nt, Homo sapiens
  misc_RNA (1)...(19): siRNA sense strand
cuauagaguauuagagaga

SEQ ID NO: 2351994 - RNA, 19 nt, Homo sapiens
  misc_RNA (1)...(19): siRNA sense strand
cagccuuauuccagggaua

SEQ ID NO: 2351995 - RNA, 19 nt, Homo sapiens
  misc_RNA (1)...(19): siRNA sense strand
gaguauaggaaguggaagu

SEQ ID NO: 2351996 - RNA, 19 nt, Homo sapiens
  misc_RNA (1)...(19): siRNA sense strand
cugcaauaugcuagguuua

SEQ ID NO: 2351997 - RNA, 19 nt, Homo sapiens
  misc_RNA (1)...(19): siRNA sense strand
ggaaaaugcucuuggaaac

SEQ ID NO: 2351998 - RNA, 19 nt, Homo sapiens
  misc_RNA (1)...(19): siRNA sense strand
uaugaaugcacgagaggaa

SEQ ID NO: 2351999 - RNA, 19 nt, Homo sapiens
  misc_RNA (1)...(19): siRNA sense strand
cauuuaaacugguucggaa

SEQ ID NO: 2352000 - RNA, 19 nt, Homo sapiens
  misc_RNA (1)...(19): siRNA sense strand
aaauagagucuuugggcau

SEQ ID NO: 2352001 - RNA, 19 nt, Homo sapiens
  misc_RNA (1)...(19): siRNA sense strand
uugcagauuuccugguaua

SEQ ID NO: 2352002 - RNA, 19 nt, Homo sapiens
  misc_RNA (1)...(19): siRNA sense strand
gaggaggaguauaggaagu

SEQ ID NO: 2352003 - RNA, 19 nt, Homo sapiens
  misc_RNA (1)...(19): siRNA sense strand
ggaucaucuaggaggcuua

SEQ ID NO: 2352004 - RNA, 19 nt, Homo sapiens
  misc_RNA (1)...(19): siRNA sense strand
gcguagucacgaaggaaau

SEQ ID NO: 2352005 - RNA, 19 nt, Homo sapiens
  misc_RNA (1)...(19): siRNA sense strand
ccgaauuccaguugcuuua

SEQ ID NO: 2352006 - RNA, 19 nt, Homo sapiens
  misc_RNA (1)...(19): siRNA sense strand
gcagagucuaagaaauaaa

SEQ ID NO: 2352007 - RNA, 19 nt, Homo sapiens
  misc_RNA (1)...(19): siRNA sense strand
uauaggaaguggaagucaa

SEQ ID NO: 2352008 - RNA, 19 nt, Homo sapiens
  misc_RNA (1)...(19): siRNA sense strand
augaaaugcaccugagaga

SEQ ID NO: 2352009 - RNA, 19 nt, Homo sapiens
  misc_RNA (1)...(19): siRNA sense strand
ggugaaaacggaaguuaua

SEQ ID NO: 2352010 - RNA, 19 nt, Homo sapiens
  misc_RNA (1)...(19): siRNA sense strand
aaacagaguggguuggcua

SEQ ID NO: 2352011 - RNA, 19 nt, Homo sapiens
  misc_RNA (1)...(19): siRNA sense strand
aagagagguuauagcauau

SEQ ID NO: 2352012 - RNA, 19 nt, Homo sapiens
  misc_RNA (1)...(19): siRNA sense strand
gugccaagagagaacauua

SEQ ID NO: 2352013 - RNA, 19 nt, Homo sapiens
  misc_RNA (1)...(19): siRNA sense strand
cagcauaguccuaaaagaa

SEQ ID NO: 2352014 - RNA, 19 nt, Homo sapiens
  misc_RNA (1)...(19): siRNA sense strand
aguggaagucaaugagcaa

SEQ ID NO: 2352015 - RNA, 19 nt, Homo sapiens
  misc_RNA (1)...(19): siRNA sense strand
ucuaggaggcuuauauaaa

SEQ ID NO: 2352016 - RNA, 19 nt, Homo sapiens
  misc_RNA (1)...(19): siRNA sense strand
agggauauggucugcaaua

SEQ ID NO: 2352017 - RNA, 19 nt, Homo sapiens
  misc_RNA (1)...(19): siRNA sense strand
ggaugaaugcaauugguuu

SEQ ID NO: 2352018 - RNA, 19 nt, Homo sapiens
  misc_RNA (1)...(19): siRNA sense strand
agacgcaacugcagagcau

SEQ ID NO: 2352019 - RNA, 19 nt, Homo sapiens
  misc_RNA (1)...(19): siRNA sense strand
ugagauauguauuggagca

SEQ ID NO: 2352020 - RNA, 19 nt, Homo sapiens
  misc_RNA (1)...(19): siRNA sense strand
ggaaauggaauuaugagga

SEQ ID NO: 2352021 - RNA, 19 nt, Homo sapiens
  misc_RNA (1)...(19): siRNA sense strand
aagagcaaguagagaagau

SEQ ID NO: 2352022 - RNA, 19 nt, Homo sapiens
  misc_RNA (1)...(19): siRNA sense strand
guaaauaauucgggugcca

SEQ ID NO: 2352023 - RNA, 19 nt, Homo sapiens
  misc_RNA (1)...(19): siRNA sense strand
uggaaaaugcucuuggaaa

SEQ ID NO: 2352024 - RNA, 19 nt, Homo sapiens
  misc_RNA (1)...(19): siRNA sense strand
auuuaaacugguucggaaa

SEQ ID NO: 2352025 - RNA, 19 nt, Homo sapiens
  misc_RNA (1)...(19): siRNA sense strand
cuguauggcuucaggaucu

SEQ ID NO: 2352026 - RNA, 19 nt, Homo sapiens
  misc_RNA (1)...(19): siRNA sense strand
gugacuuugugaaggaaaa

SEQ ID NO: 2352027 - RNA, 19 nt, Homo sapiens
  misc_RNA (1)...(19): siRNA sense strand
agagagaacauuacagcau

SEQ ID NO: 2352028 - RNA, 19 nt, Homo sapiens
  misc_RNA (1)...(19): siRNA sense strand
acuguauccugaaggcaaa

SEQ ID NO: 2352029 - RNA, 19 nt, Homo sapiens
  misc_RNA (1)...(19): siRNA sense strand
uggagaagauuuugacaau

SEQ ID NO: 2352030 - RNA, 19 nt, Homo sapiens
  misc_RNA (1)...(19): siRNA sense strand
gaaauagagucuuugggca

SEQ ID NO: 2352031 - RNA, 19 nt, Homo sapiens
  misc_RNA (1)...(19): siRNA sense strand
aauaaugugccucaggaaa

SEQ ID NO: 2352032 - RNA, 19 nt, Homo sapiens
  misc_RNA (1)...(19): siRNA sense strand
uggaggaggaguauaggaa

SEQ ID NO: 2352033 - RNA, 19 nt, Homo sapiens
  misc_RNA (1)...(19): siRNA sense strand
ccuucuaaauguuguccua

SEQ ID NO: 2352034 - RNA, 19 nt, Homo sapiens
  misc_RNA (1)...(19): siRNA sense strand
gcgugaaagagcaaguaga

SEQ ID NO: 2352035 - RNA, 19 nt, Homo sapiens
  misc_RNA (1)...(19): siRNA sense strand
ccugagagaccgcgcauuu

SEQ ID NO: 2352036 - RNA, 19 nt, Homo sapiens
  misc_RNA (1)...(19): siRNA sense strand
ucgaagagguggugaaaac

SEQ ID NO: 2352037 - RNA, 19 nt, Homo sapiens
  misc_RNA (1)...(19): siRNA sense strand
cagauugauuggcagacua

SEQ ID NO: 2352038 - RNA, 19 nt, Homo sapiens
  misc_RNA (1)...(19): siRNA sense strand
ccuuuagugccaagagaga

SEQ ID NO: 2352039 - RNA, 19 nt, Homo sapiens
  misc_RNA (1)...(19): siRNA sense strand
gcauaguccuaaaagaauu

SEQ ID NO: 2352040 - RNA, 19 nt, Homo sapiens
  misc_RNA (1)...(19): siRNA sense strand
aggaaguggaagucaauga

SEQ ID NO: 2352041 - RNA, 19 nt, Homo sapiens
  misc_RNA (1)...(19): siRNA sense strand
caggcaaagaaguugggaa

SEQ ID NO: 2352042 - RNA, 19 nt, Homo sapiens
  misc_RNA (1)...(19): siRNA sense strand
guggauaccuucaggccca

SEQ ID NO: 2352043 - RNA, 19 nt, Homo sapiens
  misc_RNA (1)...(19): siRNA sense strand
cgauacgauggcuggcaaa

SEQ ID NO: 2352044 - RNA, 19 nt, Homo sapiens
  misc_RNA (1)...(19): siRNA sense strand
cuggagauucaaugaguuu

SEQ ID NO: 2352045 - RNA, 19 nt, Homo sapiens
  misc_RNA (1)...(19): siRNA sense strand
ugacagcgugaaagagcaa

SEQ ID NO: 2352046 - RNA, 19 nt, Homo sapiens
  misc_RNA (1)...(19): siRNA sense strand
gcaagagagguuauagcau

SEQ ID NO: 2352047 - RNA, 19 nt, Homo sapiens
  misc_RNA (1)...(19): siRNA sense strand
guguggagcucauggccuu

SEQ ID NO: 2352048 - RNA, 19 nt, Homo sapiens
  misc_RNA (1)...(19): siRNA sense strand
uuacaaggguguucgagau

SEQ ID NO: 2352049 - RNA, 19 nt, Homo sapiens
  misc_RNA (1)...(19): siRNA sense strand
ccuggcauguuuauggaua

SEQ ID NO: 2352050 - RNA, 19 nt, Homo sapiens
  misc_RNA (1)...(19): siRNA sense strand
ccuuccaguauuugauaua

SEQ ID NO: 2352051 - RNA, 19 nt, Homo sapiens
  misc_RNA (1)...(19): siRNA sense strand
gaucgaauugugaguguca

SEQ ID NO: 2352052 - RNA, 19 nt, Homo sapiens
  misc_RNA (1)...(19): siRNA sense strand
aggacugauuaaaggcaga

SEQ ID NO: 2352053 - RNA, 19 nt, Homo sapiens
  misc_RNA (1)...(19): siRNA sense strand
ccugaaaugcgcuaugaau

SEQ ID NO: 2352054 - RNA, 19 nt, Homo sapiens
  misc_RNA (1)...(19): siRNA sense strand
cuuggcaguuucaggcaaa

SEQ ID NO: 2352055 - RNA, 19 nt, Homo sapiens
  misc_RNA (1)...(19): siRNA sense strand
aaaccuaguaucagacuuu

SEQ ID NO: 2352056 - RNA, 19 nt, Homo sapiens
  misc_RNA (1)...(19): siRNA sense strand
auguauuggagcagccuua

SEQ ID NO: 2352057 - RNA, 19 nt, Homo sapiens
  misc_RNA (1)...(19): siRNA sense strand
aggcaaagaaguugggaau

SEQ ID NO: 2352058 - RNA, 19 nt, Homo sapiens
  misc_RNA (1)...(19): siRNA sense strand
gauuaaaggcagagaucau

SEQ ID NO: 2352059 - RNA, 19 nt, Homo sapiens
  misc_RNA (1)...(19): siRNA sense strand
ggaacaaacuguauggcuu

SEQ ID NO: 2352060 - RNA, 19 nt, Homo sapiens
  misc_RNA (1)...(19): siRNA sense strand
cuauagaguauuagagaga

SEQ ID NO: 2352061 - RNA, 19 nt, Homo sapiens
  misc_RNA (1)...(19): siRNA sense strand
cagccuuauuccagggaua

SEQ ID NO: 2352062 - RNA, 19 nt, Homo sapiens
  misc_RNA (1)...(19): siRNA sense strand
gaguauaggaaguggaagu

SEQ ID NO: 2352063 - RNA, 19 nt, Homo sapiens
  misc_RNA (1)...(19): siRNA sense strand
cugcaauaugcuagguuua

SEQ ID NO: 2352064 - RNA, 19 nt, Homo sapiens
  misc_RNA (1)...(19): siRNA sense strand
ggaaaaugcucuuggaaac

SEQ ID NO: 2352065 - RNA, 19 nt, Homo sapiens
  misc_RNA (1)...(19): siRNA sense strand
uaugaaugcacgagaggaa

SEQ ID NO: 2352066 - RNA, 19 nt, Homo sapiens
  misc_RNA (1)...(19): siRNA sense strand
cauuuaaacugguucggaa

SEQ ID NO: 2352067 - RNA, 19 nt, Homo sapiens
  misc_RNA (1)...(19): siRNA sense strand
aaauagagucuuugggcau

SEQ ID NO: 2352068 - RNA, 19 nt, Homo sapiens
  misc_RNA (1)...(19): siRNA sense strand
uugcagauuuccugguaua

SEQ ID NO: 2352069 - RNA, 19 nt, Homo sapiens
  misc_RNA (1)...(19): siRNA sense strand
gaggaggaguauaggaagu

SEQ ID NO: 2352070 - RNA, 19 nt, Homo sapiens
  misc_RNA (1)...(19): siRNA sense strand
ggaucaucuaggaggcuua

SEQ ID NO: 2352071 - RNA, 19 nt, Homo sapiens
  misc_RNA (1)...(19): siRNA sense strand
gcguagucacgaaggaaau

SEQ ID NO: 2352072 - RNA, 19 nt, Homo sapiens
  misc_RNA (1)...(19): siRNA sense strand
ccgaauuccaguugcuuua

SEQ ID NO: 2352073 - RNA, 19 nt, Homo sapiens
  misc_RNA (1)...(19): siRNA sense strand
gcagagucuaagaaauaaa

SEQ ID NO: 2352074 - RNA, 19 nt, Homo sapiens
  misc_RNA (1)...(19): siRNA sense strand
uauaggaaguggaagucaa

SEQ ID NO: 2352075 - RNA, 19 nt, Homo sapiens
  misc_RNA (1)...(19): siRNA sense strand
augaaaugcaccugagaga

SEQ ID NO: 2352076 - RNA, 19 nt, Homo sapiens
  misc_RNA (1)...(19): siRNA sense strand
ggugaaaacggaaguuaua

SEQ ID NO: 2352077 - RNA, 19 nt, Homo sapiens
  misc_RNA (1)...(19): siRNA sense strand
aaacagaguggguuggcua

SEQ ID NO: 2352078 - RNA, 19 nt, Homo sapiens
  misc_RNA (1)...(19): siRNA sense strand
aagagagguuauagcauau

SEQ ID NO: 2352079 - RNA, 19 nt, Homo sapiens
  misc_RNA (1)...(19): siRNA sense strand
gugccaagagagaacauua

SEQ ID NO: 2352080 - RNA, 19 nt, Homo sapiens
  misc_RNA (1)...(19): siRNA sense strand
cagcauaguccuaaaagaa

SEQ ID NO: 2352081 - RNA, 19 nt, Homo sapiens
  misc_RNA (1)...(19): siRNA sense strand
aguggaagucaaugagcaa

SEQ ID NO: 2352082 - RNA, 19 nt, Homo sapiens
  misc_RNA (1)...(19): siRNA sense strand
ucuaggaggcuuauauaaa

SEQ ID NO: 2352083 - RNA, 19 nt, Homo sapiens
  misc_RNA (1)...(19): siRNA sense strand
agggauauggucugcaaua

SEQ ID NO: 2352084 - RNA, 19 nt, Homo sapiens
  misc_RNA (1)...(19): siRNA sense strand
ggaugaaugcaauugguuu

SEQ ID NO: 2352085 - RNA, 19 nt, Homo sapiens
  misc_RNA (1)...(19): siRNA sense strand
agacgcaacugcagagcau

SEQ ID NO: 2352086 - RNA, 19 nt, Homo sapiens
  misc_RNA (1)...(19): siRNA sense strand
ugagauauguauuggagca

SEQ ID NO: 2352087 - RNA, 19 nt, Homo sapiens
  misc_RNA (1)...(19): siRNA sense strand
ggaaauggaauuaugagga

SEQ ID NO: 2352088 - RNA, 19 nt, Homo sapiens
  misc_RNA (1)...(19): siRNA sense strand
aagagcaaguagagaagau

SEQ ID NO: 2352089 - RNA, 19 nt, Homo sapiens
  misc_RNA (1)...(19): siRNA sense strand
guaaauaauucgggugcca

SEQ ID NO: 2352090 - RNA, 19 nt, Homo sapiens
  misc_RNA (1)...(19): siRNA sense strand
uggaaaaugcucuuggaaa

SEQ ID NO: 2352091 - RNA, 19 nt, Homo sapiens
  misc_RNA (1)...(19): siRNA sense strand
auuuaaacugguucggaaa

SEQ ID NO: 2352092 - RNA, 19 nt, Homo sapiens
  misc_RNA (1)...(19): siRNA sense strand
cuguauggcuucaggaucu

SEQ ID NO: 2352093 - RNA, 19 nt, Homo sapiens
  misc_RNA (1)...(19): siRNA sense strand
gugacuuugugaaggaaaa

SEQ ID NO: 2352094 - RNA, 19 nt, Homo sapiens
  misc_RNA (1)...(19): siRNA sense strand
agagagaacauuacagcau

SEQ ID NO: 2352095 - RNA, 19 nt, Homo sapiens
  misc_RNA (1)...(19): siRNA sense strand
acuguauccugaaggcaaa

SEQ ID NO: 2352096 - RNA, 19 nt, Homo sapiens
  misc_RNA (1)...(19): siRNA sense strand
uggagaagauuuugacaau

SEQ ID NO: 2352097 - RNA, 19 nt, Homo sapiens
  misc_RNA (1)...(19): siRNA sense strand
gaaauagagucuuugggca

SEQ ID NO: 2352098 - RNA, 19 nt, Homo sapiens
  misc_RNA (1)...(19): siRNA sense strand
aauaaugugccucaggaaa

SEQ ID NO: 2352099 - RNA, 19 nt, Homo sapiens
  misc_RNA (1)...(19): siRNA sense strand
uggaggaggaguauaggaa

SEQ ID NO: 2352100 - RNA, 19 nt, Homo sapiens
  misc_RNA (1)...(19): siRNA sense strand
ccuucuaaauguuguccua

SEQ ID NO: 2352101 - RNA, 19 nt, Homo sapiens
  misc_RNA (1)...(19): siRNA sense strand
gcgugaaagagcaaguaga

SEQ ID NO: 2352102 - RNA, 19 nt, Homo sapiens
  misc_RNA (1)...(19): siRNA sense strand
ccugagagaccgcgcauuu

SEQ ID NO: 2352103 - RNA, 19 nt, Homo sapiens
  misc_RNA (1)...(19): siRNA sense strand
ucgaagagguggugaaaac

SEQ ID NO: 2352104 - RNA, 19 nt, Homo sapiens
  misc_RNA (1)...(19): siRNA sense strand
cagauugauuggcagacua

SEQ ID NO: 2352105 - RNA, 19 nt, Homo sapiens
  misc_RNA (1)...(19): siRNA sense strand
ccuuuagugccaagagaga

SEQ ID NO: 2352106 - RNA, 19 nt, Homo sapiens
  misc_RNA (1)...(19): siRNA sense strand
gcauaguccuaaaagaauu

SEQ ID NO: 2352107 - RNA, 19 nt, Homo sapiens
  misc_RNA (1)...(19): siRNA sense strand
aggaaguggaagucaauga

SEQ ID NO: 2352108 - RNA, 19 nt, Homo sapiens
  misc_RNA (1)...(19): siRNA sense strand
caggcaaagaaguugggaa

SEQ ID NO: 2352109 - RNA, 19 nt, Homo sapiens
  misc_RNA (1)...(19): siRNA sense strand
guggauaccuucaggccca

SEQ ID NO: 2352110 - RNA, 19 nt, Homo sapiens
  misc_RNA (1)...(19): siRNA sense strand
cgauacgauggcuggcaaa

SEQ ID NO: 2352111 - RNA, 19 nt, Homo sapiens
  misc_RNA (1)...(19): siRNA sense strand
cuggagauucaaugaguuu

SEQ ID NO: 2352112 - RNA, 19 nt, Homo sapiens
  misc_RNA (1)...(19): siRNA sense strand
ugacagcgugaaagagcaa

SEQ ID NO: 2352113 - RNA, 19 nt, Homo sapiens
  misc_RNA (1)...(19): siRNA sense strand
gcaagagagguuauagcau

SEQ ID NO: 2352114 - RNA, 19 nt, Homo sapiens
  misc_RNA (1)...(19): siRNA sense strand
guguggagcucauggccuu

SEQ ID NO: 2352115 - RNA, 19 nt, Homo sapiens
  misc_RNA (1)...(19): siRNA sense strand
uuacaaggguguucgagau

SEQ ID NO: 2352116 - RNA, 19 nt, Homo sapiens
  misc_RNA (1)...(19): siRNA sense strand
ccuggcauguuuauggaua

SEQ ID NO: 2352117 - RNA, 19 nt, Homo sapiens
  misc_RNA (1)...(19): siRNA sense strand
ccuuccaguauuugauaua

SEQ ID NO: 2352118 - RNA, 19 nt, Homo sapiens
  misc_RNA (1)...(19): siRNA sense strand
gaucgaauugugaguguca

SEQ ID NO: 2352119 - RNA, 19 nt, Homo sapiens
  misc_RNA (1)...(19): siRNA sense strand
aggacugauuaaaggcaga

SEQ ID NO: 2352120 - RNA, 19 nt, Homo sapiens
  misc_RNA (1)...(19): siRNA sense strand
ccugaaaugcgcuaugaau

SEQ ID NO: 2352121 - RNA, 19 nt, Homo sapiens
  misc_RNA (1)...(19): siRNA sense strand
cuuggcaguuucaggcaaa

SEQ ID NO: 2352122 - RNA, 19 nt, Homo sapiens
  misc_RNA (1)...(19): siRNA sense strand
aaaccuaguaucagacuuu

SEQ ID NO: 2352123 - RNA, 19 nt, Homo sapiens
  misc_RNA (1)...(19): siRNA sense strand
auguauuggagcagccuua

SEQ ID NO: 2352124 - RNA, 19 nt, Homo sapiens
  misc_RNA (1)...(19): siRNA sense strand
ggucgaagcuggagcaggu

SEQ ID NO: 2352125 - RNA, 19 nt, Homo sapiens
  misc_RNA (1)...(19): siRNA sense strand
aguacaagauggacggcau

SEQ ID NO: 2352126 - RNA, 19 nt, Homo sapiens
  misc_RNA (1)...(19): siRNA sense strand
agagagaaucacuggccaa

SEQ ID NO: 2352127 - RNA, 19 nt, Homo sapiens
  misc_RNA (1)...(19): siRNA sense strand
cauccagcgccgugagaau

SEQ ID NO: 2352128 - RNA, 19 nt, Homo sapiens
  misc_RNA (1)...(19): siRNA sense strand
agacaaggcaggaggcgga

SEQ ID NO: 2352129 - RNA, 19 nt, Homo sapiens
  misc_RNA (1)...(19): siRNA sense strand
ggauaggggcugcgagaca

SEQ ID NO: 2352130 - RNA, 19 nt, Homo sapiens
  misc_RNA (1)...(19): siRNA sense strand
agcaaauggcccagaauca

SEQ ID NO: 2352131 - RNA, 19 nt, Homo sapiens
  misc_RNA (1)...(19): siRNA sense strand
agaccaagcagcaggagga

SEQ ID NO: 2352132 - RNA, 19 nt, Homo sapiens
  misc_RNA (1)...(19): siRNA sense strand
ugaccgacauggaggcuca

SEQ ID NO: 2352133 - RNA, 19 nt, Homo sapiens
  misc_RNA (1)...(19): siRNA sense strand
gugcagagauccagcgcuc

SEQ ID NO: 2352134 - RNA, 19 nt, Homo sapiens
  misc_RNA (1)...(19): siRNA sense strand
acaaacagggcuucggaga

SEQ ID NO: 2352135 - RNA, 19 nt, Homo sapiens
  misc_RNA (1)...(19): siRNA sense strand
aggauuacaaacagggcuu

SEQ ID NO: 2352136 - RNA, 19 nt, Homo sapiens
  misc_RNA (1)...(19): siRNA sense strand
ccaccugggcagugagaac

SEQ ID NO: 2352137 - RNA, 19 nt, Homo sapiens
  misc_RNA (1)...(19): siRNA sense strand
ugagaauggcaccgugaau

SEQ ID NO: 2352138 - RNA, 19 nt, Homo sapiens
  misc_RNA (1)...(19): siRNA sense strand
acaacaaguacaagaugga

SEQ ID NO: 2352139 - RNA, 19 nt, Homo sapiens
  misc_RNA (1)...(19): siRNA sense strand
ugaagaagcuagagagggc

SEQ ID NO: 2352140 - RNA, 19 nt, Homo sapiens
  misc_RNA (1)...(19): siRNA sense strand
cauaauggcaggugagcag

SEQ ID NO: 2352141 - RNA, 19 nt, Homo sapiens
  misc_RNA (1)...(19): siRNA sense strand
ugucaaaccucaacggcgu

SEQ ID NO: 2352142 - RNA, 19 nt, Homo sapiens
  misc_RNA (1)...(19): siRNA sense strand
aggugaaacagcuggagca

SEQ ID NO: 2352143 - RNA, 19 nt, Homo sapiens
  misc_RNA (1)...(19): siRNA sense strand
acuggaaggauuacaaaca

SEQ ID NO: 2352144 - RNA, 19 nt, Homo sapiens
  misc_RNA (1)...(19): siRNA sense strand
gggcagugagaaccagcua

SEQ ID NO: 2352145 - RNA, 19 nt, Homo sapiens
  misc_RNA (1)...(19): siRNA sense strand
uggagaagcuagaaggcaa

SEQ ID NO: 2352146 - RNA, 19 nt, Homo sapiens
  misc_RNA (1)...(19): siRNA sense strand
uggaaggugcagaggauaa

SEQ ID NO: 2352147 - RNA, 19 nt, Homo sapiens
  misc_RNA (1)...(19): siRNA sense strand
ugacagaggcgaaggcaga

SEQ ID NO: 2352148 - RNA, 19 nt, Homo sapiens
  misc_RNA (1)...(19): siRNA sense strand
uagccaaggcagaggguga

SEQ ID NO: 2352149 - RNA, 19 nt, Homo sapiens
  misc_RNA (1)...(19): siRNA sense strand
auacuaagguggaugccaa

SEQ ID NO: 2352150 - RNA, 19 nt, Homo sapiens
  misc_RNA (1)...(19): siRNA sense strand
caaaugaaauugaaggacu

SEQ ID NO: 2352151 - RNA, 19 nt, Homo sapiens
  misc_RNA (1)...(19): siRNA sense strand
ugaagcagguggagggcau

SEQ ID NO: 2352152 - RNA, 19 nt, Homo sapiens
  misc_RNA (1)...(19): siRNA sense strand
gaguggaguucguggggaa

SEQ ID NO: 2352153 - RNA, 19 nt, Homo sapiens
  misc_RNA (1)...(19): siRNA sense strand
acacaaggcuucagcagca

SEQ ID NO: 2352154 - RNA, 19 nt, Homo sapiens
  misc_RNA (1)...(19): siRNA sense strand
acaaaggaguaguagcuga

SEQ ID NO: 2352155 - RNA, 19 nt, Homo sapiens
  misc_RNA (1)...(19): siRNA sense strand
acuccaagacagagacaga

SEQ ID NO: 2352156 - RNA, 19 nt, Homo sapiens
  misc_RNA (1)...(19): siRNA sense strand
gaggacauuuggugggcuu

SEQ ID NO: 2352157 - RNA, 19 nt, Homo sapiens
  misc_RNA (1)...(19): siRNA sense strand
ccuuccagguaaagcaaau

SEQ ID NO: 2352158 - RNA, 19 nt, Homo sapiens
  misc_RNA (1)...(19): siRNA sense strand
gagagauggagaagcuaga

SEQ ID NO: 2352159 - RNA, 19 nt, Homo sapiens
  misc_RNA (1)...(19): siRNA sense strand
ugggagagauggagaagcu

SEQ ID NO: 2352160 - RNA, 19 nt, Homo sapiens
  misc_RNA (1)...(19): siRNA sense strand
ccuaugugguccagaagca

SEQ ID NO: 2352161 - RNA, 19 nt, Homo sapiens
  misc_RNA (1)...(19): siRNA sense strand
ucaagaugguccugggugu

SEQ ID NO: 2352162 - RNA, 19 nt, Homo sapiens
  misc_RNA (1)...(19): siRNA sense strand
agaaggugcaggugacaga

SEQ ID NO: 2352163 - RNA, 19 nt, Homo sapiens
  misc_RNA (1)...(19): siRNA sense strand
auacgaaugaugucagauu

SEQ ID NO: 2352164 - RNA, 19 nt, Homo sapiens
  misc_RNA (1)...(19): siRNA sense strand
ggaucaugggugucaucua

SEQ ID NO: 2352165 - RNA, 19 nt, Homo sapiens
  misc_RNA (1)...(19): siRNA sense strand
guacugggaucaugggugu

SEQ ID NO: 2352166 - RNA, 19 nt, Homo sapiens
  misc_RNA (1)...(19): siRNA sense strand
cagagaaggugcaggugac

SEQ ID NO: 2352167 - RNA, 19 nt, Homo sapiens
  misc_RNA (1)...(19): siRNA sense strand
gcagcuacucagaggagga

SEQ ID NO: 2352168 - RNA, 19 nt, Homo sapiens
  misc_RNA (1)...(19): siRNA sense strand
gcuacucagaggaggacau

SEQ ID NO: 2352169 - RNA, 19 nt, Homo sapiens
  misc_RNA (1)...(19): siRNA sense strand
aaggcaaagugcacaugaa

SEQ ID NO: 2352170 - RNA, 19 nt, Homo sapiens
  misc_RNA (1)...(19): siRNA sense strand
agauuggagagaagggcau

SEQ ID NO: 2352171 - RNA, 19 nt, Homo sapiens
  misc_RNA (1)...(19): siRNA sense strand
cagacaguagacagaacaa

SEQ ID NO: 2352172 - RNA, 19 nt, Homo sapiens
  misc_RNA (1)...(19): siRNA sense strand
acaccuuagugcagcgcuu

SEQ ID NO: 2352173 - RNA, 19 nt, Homo sapiens
  misc_RNA (1)...(19): siRNA sense strand
aaaugaaauugaaggacuc

SEQ ID NO: 2352174 - RNA, 19 nt, Homo sapiens
  misc_RNA (1)...(19): siRNA sense strand
cagaguguggaaagaaaga

SEQ ID NO: 2352175 - RNA, 19 nt, Homo sapiens
  misc_RNA (1)...(19): siRNA sense strand
aaggaguaguagcugaauu

SEQ ID NO: 2352176 - RNA, 19 nt, Homo sapiens
  misc_RNA (1)...(19): siRNA sense strand
cccuaaaggaagaggacag

SEQ ID NO: 2352177 - RNA, 19 nt, Homo sapiens
  misc_RNA (1)...(19): siRNA sense strand
gcuagaaggcaaagugcac

SEQ ID NO: 2352178 - RNA, 19 nt, Homo sapiens
  misc_RNA (1)...(19): siRNA sense strand
uugaagacacacucagcaa

SEQ ID NO: 2352179 - RNA, 19 nt, Homo sapiens
  misc_RNA (1)...(19): siRNA sense strand
uggagaagcuagaaggcaa

SEQ ID NO: 2352180 - RNA, 19 nt, Homo sapiens
  misc_RNA (1)...(19): siRNA sense strand
uggaaggugcagaggauaa

SEQ ID NO: 2352181 - RNA, 19 nt, Homo sapiens
  misc_RNA (1)...(19): siRNA sense strand
ugacagaggcgaaggcaga

SEQ ID NO: 2352182 - RNA, 19 nt, Homo sapiens
  misc_RNA (1)...(19): siRNA sense strand
uagccaaggcagaggguga

SEQ ID NO: 2352183 - RNA, 19 nt, Homo sapiens
  misc_RNA (1)...(19): siRNA sense strand
auacuaagguggaugccaa

SEQ ID NO: 2352184 - RNA, 19 nt, Homo sapiens
  misc_RNA (1)...(19): siRNA sense strand
caaaugaaauugaaggacu

SEQ ID NO: 2352185 - RNA, 19 nt, Homo sapiens
  misc_RNA (1)...(19): siRNA sense strand
ugaagcagguggagggcau

SEQ ID NO: 2352186 - RNA, 19 nt, Homo sapiens
  misc_RNA (1)...(19): siRNA sense strand
acacaaggcuucagcagca

SEQ ID NO: 2352187 - RNA, 19 nt, Homo sapiens
  misc_RNA (1)...(19): siRNA sense strand
ccuuccagguaaagcaaau

SEQ ID NO: 2352188 - RNA, 19 nt, Homo sapiens
  misc_RNA (1)...(19): siRNA sense strand
gagagauggagaagcuaga

SEQ ID NO: 2352189 - RNA, 19 nt, Homo sapiens
  misc_RNA (1)...(19): siRNA sense strand
ugggagagauggagaagcu

SEQ ID NO: 2352190 - RNA, 19 nt, Homo sapiens
  misc_RNA (1)...(19): siRNA sense strand
ccuaugugguccagaagca

SEQ ID NO: 2352191 - RNA, 19 nt, Homo sapiens
  misc_RNA (1)...(19): siRNA sense strand
ucaagaugguccugggugu

SEQ ID NO: 2352192 - RNA, 19 nt, Homo sapiens
  misc_RNA (1)...(19): siRNA sense strand
agaaggugcaggugacaga

SEQ ID NO: 2352193 - RNA, 19 nt, Homo sapiens
  misc_RNA (1)...(19): siRNA sense strand
ggaucaugggugucaucua

SEQ ID NO: 2352194 - RNA, 19 nt, Homo sapiens
  misc_RNA (1)...(19): siRNA sense strand
guacugggaucaugggugu

SEQ ID NO: 2352195 - RNA, 19 nt, Homo sapiens
  misc_RNA (1)...(19): siRNA sense strand
cagagaaggugcaggugac

SEQ ID NO: 2352196 - RNA, 19 nt, Homo sapiens
  misc_RNA (1)...(19): siRNA sense strand
aaggcaaagugcacaugaa

SEQ ID NO: 2352197 - RNA, 19 nt, Homo sapiens
  misc_RNA (1)...(19): siRNA sense strand
agauuggagagaagggcau

SEQ ID NO: 2352198 - RNA, 19 nt, Homo sapiens
  misc_RNA (1)...(19): siRNA sense strand
cagacaguagacagaacaa

SEQ ID NO: 2352199 - RNA, 19 nt, Homo sapiens
  misc_RNA (1)...(19): siRNA sense strand
acaccuuagugcagcgcuu

SEQ ID NO: 2352200 - RNA, 19 nt, Homo sapiens
  misc_RNA (1)...(19): siRNA sense strand
aaaugaaauugaaggacuc

SEQ ID NO: 2352201 - RNA, 19 nt, Homo sapiens
  misc_RNA (1)...(19): siRNA sense strand
cagaguguggaaagaaaga

SEQ ID NO: 2352202 - RNA, 19 nt, Homo sapiens
  misc_RNA (1)...(19): siRNA sense strand
cccuaaaggaagaggacag

SEQ ID NO: 2352203 - RNA, 19 nt, Homo sapiens
  misc_RNA (1)...(19): siRNA sense strand
gcuagaaggcaaagugcac

SEQ ID NO: 2352204 - RNA, 19 nt, Homo sapiens
  misc_RNA (1)...(19): siRNA sense strand
uugaagacacacucagcaa

SEQ ID NO: 2352205 - RNA, 19 nt, Homo sapiens
  misc_RNA (1)...(19): siRNA sense strand
uagccaaggcagaggguga

SEQ ID NO: 2352206 - RNA, 19 nt, Homo sapiens
  misc_RNA (1)...(19): siRNA sense strand
caaaugaaauugaaggacu

SEQ ID NO: 2352207 - RNA, 19 nt, Homo sapiens
  misc_RNA (1)...(19): siRNA sense strand
acacaaggcuucagcagca

SEQ ID NO: 2352208 - RNA, 19 nt, Homo sapiens
  misc_RNA (1)...(19): siRNA sense strand
ccuuccagguaaagcaaau

SEQ ID NO: 2352209 - RNA, 19 nt, Homo sapiens
  misc_RNA (1)...(19): siRNA sense strand
ucaagaugguccugggugu

SEQ ID NO: 2352210 - RNA, 19 nt, Homo sapiens
  misc_RNA (1)...(19): siRNA sense strand
ggaucaugggugucaucua

SEQ ID NO: 2352211 - RNA, 19 nt, Homo sapiens
  misc_RNA (1)...(19): siRNA sense strand
guacugggaucaugggugu

SEQ ID NO: 2352212 - RNA, 19 nt, Homo sapiens
  misc_RNA (1)...(19): siRNA sense strand
aaaugaaauugaaggacuc

SEQ ID NO: 2352213 - RNA, 19 nt, Homo sapiens
  misc_RNA (1)...(19): siRNA sense strand
cccuaaaggaagaggacag

SEQ ID NO: 2352214 - RNA, 19 nt, Homo sapiens
  misc_RNA (1)...(19): siRNA sense strand
aagagaaggacgaggaucu

SEQ ID NO: 2352215 - RNA, 19 nt, Homo sapiens
  misc_RNA (1)...(19): siRNA sense strand
uggaugagagagagcgaga

SEQ ID NO: 2352216 - RNA, 19 nt, Homo sapiens
  misc_RNA (1)...(19): siRNA sense strand
cugagaaggacuuggagca

SEQ ID NO: 2352217 - RNA, 19 nt, Homo sapiens
  misc_RNA (1)...(19): siRNA sense strand
cugcuaaucuucuggcuga

SEQ ID NO: 2352218 - RNA, 19 nt, Homo sapiens
  misc_RNA (1)...(19): siRNA sense strand
cuaaaauguugaugggcga

SEQ ID NO: 2352219 - RNA, 19 nt, Homo sapiens
  misc_RNA (1)...(19): siRNA sense strand
cagagcuggaugagagaga

SEQ ID NO: 2352220 - RNA, 19 nt, Homo sapiens
  misc_RNA (1)...(19): siRNA sense strand
ggacuuggagcaaaggaga

SEQ ID NO: 2352221 - RNA, 19 nt, Homo sapiens
  misc_RNA (1)...(19): siRNA sense strand
cugaagagaaggacgagga

SEQ ID NO: 2352222 - RNA, 19 nt, Homo sapiens
  misc_RNA (1)...(19): siRNA sense strand
uggaacuacugguggaacu

SEQ ID NO: 2352223 - RNA, 19 nt, Homo sapiens
  misc_RNA (1)...(19): siRNA sense strand
agauaauguagcagguguu

SEQ ID NO: 2352224 - RNA, 19 nt, Homo sapiens
  misc_RNA (1)...(19): siRNA sense strand
gaaagauaauguagcaggu

SEQ ID NO: 2352225 - RNA, 19 nt, Homo sapiens
  misc_RNA (1)...(19): siRNA sense strand
gcaaaggagagcagcugga

SEQ ID NO: 2352226 - RNA, 19 nt, Homo sapiens
  misc_RNA (1)...(19): siRNA sense strand
ugagaaggacuuggagcaa

SEQ ID NO: 2352227 - RNA, 19 nt, Homo sapiens
  misc_RNA (1)...(19): siRNA sense strand
uggcugaagagaaggacga

SEQ ID NO: 2352228 - RNA, 19 nt, Homo sapiens
  misc_RNA (1)...(19): siRNA sense strand
aaaugucaauaaagcgcaa

SEQ ID NO: 2352229 - RNA, 19 nt, Homo sapiens
  misc_RNA (1)...(19): siRNA sense strand
augccaaagcaguggaacu

SEQ ID NO: 2352230 - RNA, 19 nt, Homo sapiens
  misc_RNA (1)...(19): siRNA sense strand
ucacagagcuggaugagag

SEQ ID NO: 2352231 - RNA, 19 nt, Homo sapiens
  misc_RNA (1)...(19): siRNA sense strand
uuuaaagggagcacagaca

SEQ ID NO: 2352232 - RNA, 19 nt, Homo sapiens
  misc_RNA (1)...(19): siRNA sense strand
ggaauuaugccaaagcagu

SEQ ID NO: 2352233 - RNA, 19 nt, Homo sapiens
  misc_RNA (1)...(19): siRNA sense strand
gagagcagcuggagaggug

SEQ ID NO: 2352234 - RNA, 19 nt, Homo sapiens
  misc_RNA (1)...(19): siRNA sense strand
ccauugaacaugucaucau

SEQ ID NO: 2352235 - RNA, 19 nt, Homo sapiens
  misc_RNA (1)...(19): siRNA sense strand
ggaaagagaacuaagggaa

SEQ ID NO: 2352236 - RNA, 19 nt, Homo sapiens
  misc_RNA (1)...(19): siRNA sense strand
agauaaugccagagcucaa

SEQ ID NO: 2352237 - RNA, 19 nt, Homo sapiens
  misc_RNA (1)...(19): siRNA sense strand
cagaauaaugagugcaaaa

SEQ ID NO: 2352238 - RNA, 19 nt, Homo sapiens
  misc_RNA (1)...(19): siRNA sense strand
gaacaaaagaauagagcca

SEQ ID NO: 2352239 - RNA, 19 nt, Homo sapiens
  misc_RNA (1)...(19): siRNA sense strand
aagaaggagaagaaggcaa

SEQ ID NO: 2352240 - RNA, 19 nt, Homo sapiens
  misc_RNA (1)...(19): siRNA sense strand
uuuaagggaaagagaacua

SEQ ID NO: 2352241 - RNA, 19 nt, Homo sapiens
  misc_RNA (1)...(19): siRNA sense strand
ggacaauacaagauggaag

SEQ ID NO: 2352242 - RNA, 19 nt, Homo sapiens
  misc_RNA (1)...(19): siRNA sense strand
cuugagaagcaguuggcua

SEQ ID NO: 2352243 - RNA, 19 nt, Homo sapiens
  misc_RNA (1)...(19): siRNA sense strand
gggaaagagaacuaaggga

SEQ ID NO: 2352244 - RNA, 19 nt, Homo sapiens
  misc_RNA (1)...(19): siRNA sense strand
acaccaaccgcaagagaca

SEQ ID NO: 2352245 - RNA, 19 nt, Homo sapiens
  misc_RNA (1)...(19): siRNA sense strand
acagauagucucagggucu

SEQ ID NO: 2352246 - RNA, 19 nt, Homo sapiens
  misc_RNA (1)...(19): siRNA sense strand
gaacagaugcugaaaggac

SEQ ID NO: 2352247 - RNA, 19 nt, Homo sapiens
  misc_RNA (1)...(19): siRNA sense strand
ccccagagauagaggcuga

SEQ ID NO: 2352248 - RNA, 19 nt, Homo sapiens
  misc_RNA (1)...(19): siRNA sense strand
acagaugcugaaaggacaa

SEQ ID NO: 2352249 - RNA, 19 nt, Homo sapiens
  misc_RNA (1)...(19): siRNA sense strand
acaagauggaagacuguau

SEQ ID NO: 2352250 - RNA, 19 nt, Homo sapiens
  misc_RNA (1)...(19): siRNA sense strand
ugccauagauaaugccaga

SEQ ID NO: 2352251 - RNA, 19 nt, Homo sapiens
  misc_RNA (1)...(19): siRNA sense strand
guucaaaagaggcuaaaga

SEQ ID NO: 2352252 - RNA, 19 nt, Homo sapiens
  misc_RNA (1)...(19): siRNA sense strand
uugaaaguugccauagaua

SEQ ID NO: 2352253 - RNA, 19 nt, Homo sapiens
  misc_RNA (1)...(19): siRNA sense strand
gcuauggaacaaaagaaua

SEQ ID NO: 2352254 - RNA, 19 nt, Homo sapiens
  misc_RNA (1)...(19): siRNA sense strand
aagaaggcaaagagaaaau

SEQ ID NO: 2352255 - RNA, 19 nt, Homo sapiens
  misc_RNA (1)...(19): siRNA sense strand
cggucuacaccaagcugaa

SEQ ID NO: 2352256 - RNA, 19 nt, Homo sapiens
  misc_RNA (1)...(19): siRNA sense strand
acaccaagcugaagcggcu

SEQ ID NO: 2352257 - RNA, 19 nt, Homo sapiens
  misc_RNA (1)...(19): siRNA sense strand
ggaaagagaacuaagggaa

SEQ ID NO: 2352258 - RNA, 19 nt, Homo sapiens
  misc_RNA (1)...(19): siRNA sense strand
agauaaugccagagcucaa

SEQ ID NO: 2352259 - RNA, 19 nt, Homo sapiens
  misc_RNA (1)...(19): siRNA sense strand
cagaauaaugagugcaaaa

SEQ ID NO: 2352260 - RNA, 19 nt, Homo sapiens
  misc_RNA (1)...(19): siRNA sense strand
gaacaaaagaauagagcca

SEQ ID NO: 2352261 - RNA, 19 nt, Homo sapiens
  misc_RNA (1)...(19): siRNA sense strand
aagaaggagaagaaggcaa

SEQ ID NO: 2352262 - RNA, 19 nt, Homo sapiens
  misc_RNA (1)...(19): siRNA sense strand
uuuaagggaaagagaacua

SEQ ID NO: 2352263 - RNA, 19 nt, Homo sapiens
  misc_RNA (1)...(19): siRNA sense strand
ggacaauacaagauggaag

SEQ ID NO: 2352264 - RNA, 19 nt, Homo sapiens
  misc_RNA (1)...(19): siRNA sense strand
cuugagaagcaguuggcua

SEQ ID NO: 2352265 - RNA, 19 nt, Homo sapiens
  misc_RNA (1)...(19): siRNA sense strand
gggaaagagaacuaaggga

SEQ ID NO: 2352266 - RNA, 19 nt, Homo sapiens
  misc_RNA (1)...(19): siRNA sense strand
acaccaaccgcaagagaca

SEQ ID NO: 2352267 - RNA, 19 nt, Homo sapiens
  misc_RNA (1)...(19): siRNA sense strand
acagauagucucagggucu

SEQ ID NO: 2352268 - RNA, 19 nt, Homo sapiens
  misc_RNA (1)...(19): siRNA sense strand
gaacagaugcugaaaggac

SEQ ID NO: 2352269 - RNA, 19 nt, Homo sapiens
  misc_RNA (1)...(19): siRNA sense strand
ccccagagauagaggcuga

SEQ ID NO: 2352270 - RNA, 19 nt, Homo sapiens
  misc_RNA (1)...(19): siRNA sense strand
acagaugcugaaaggacaa

SEQ ID NO: 2352271 - RNA, 19 nt, Homo sapiens
  misc_RNA (1)...(19): siRNA sense strand
acaagauggaagacuguau

SEQ ID NO: 2352272 - RNA, 19 nt, Homo sapiens
  misc_RNA (1)...(19): siRNA sense strand
ugccauagauaaugccaga

SEQ ID NO: 2352273 - RNA, 19 nt, Homo sapiens
  misc_RNA (1)...(19): siRNA sense strand
guucaaaagaggcuaaaga

SEQ ID NO: 2352274 - RNA, 19 nt, Homo sapiens
  misc_RNA (1)...(19): siRNA sense strand
uugaaaguugccauagaua

SEQ ID NO: 2352275 - RNA, 19 nt, Homo sapiens
  misc_RNA (1)...(19): siRNA sense strand
gcuauggaacaaaagaaua

SEQ ID NO: 2352276 - RNA, 19 nt, Homo sapiens
  misc_RNA (1)...(19): siRNA sense strand
aagaaggcaaagagaaaau

SEQ ID NO: 2352277 - RNA, 19 nt, Homo sapiens
  misc_RNA (1)...(19): siRNA sense strand
cggucuacaccaagcugaa

SEQ ID NO: 2352278 - RNA, 19 nt, Homo sapiens
  misc_RNA (1)...(19): siRNA sense strand
acaccaagcugaagcggcu

SEQ ID NO: 2352279 - RNA, 19 nt, Homo sapiens
  misc_RNA (1)...(19): siRNA sense strand
ggaaagagaacuaagggaa

SEQ ID NO: 2352280 - RNA, 19 nt, Homo sapiens
  misc_RNA (1)...(19): siRNA sense strand
agauaaugccagagcucaa

SEQ ID NO: 2352281 - RNA, 19 nt, Homo sapiens
  misc_RNA (1)...(19): siRNA sense strand
cagaauaaugagugcaaaa

SEQ ID NO: 2352282 - RNA, 19 nt, Homo sapiens
  misc_RNA (1)...(19): siRNA sense strand
gaacaaaagaauagagcca

SEQ ID NO: 2352283 - RNA, 19 nt, Homo sapiens
  misc_RNA (1)...(19): siRNA sense strand
aagaaggagaagaaggcaa

SEQ ID NO: 2352284 - RNA, 19 nt, Homo sapiens
  misc_RNA (1)...(19): siRNA sense strand
uuuaagggaaagagaacua

SEQ ID NO: 2352285 - RNA, 19 nt, Homo sapiens
  misc_RNA (1)...(19): siRNA sense strand
ggacaauacaagauggaag

SEQ ID NO: 2352286 - RNA, 19 nt, Homo sapiens
  misc_RNA (1)...(19): siRNA sense strand
cuugagaagcaguuggcua

SEQ ID NO: 2352287 - RNA, 19 nt, Homo sapiens
  misc_RNA (1)...(19): siRNA sense strand
gggaaagagaacuaaggga

SEQ ID NO: 2352288 - RNA, 19 nt, Homo sapiens
  misc_RNA (1)...(19): siRNA sense strand
acaccaaccgcaagagaca

SEQ ID NO: 2352289 - RNA, 19 nt, Homo sapiens
  misc_RNA (1)...(19): siRNA sense strand
acagauagucucagggucu

SEQ ID NO: 2352290 - RNA, 19 nt, Homo sapiens
  misc_RNA (1)...(19): siRNA sense strand
gaacagaugcugaaaggac

SEQ ID NO: 2352291 - RNA, 19 nt, Homo sapiens
  misc_RNA (1)...(19): siRNA sense strand
ccccagagauagaggcuga

SEQ ID NO: 2352292 - RNA, 19 nt, Homo sapiens
  misc_RNA (1)...(19): siRNA sense strand
acagaugcugaaaggacaa

SEQ ID NO: 2352293 - RNA, 19 nt, Homo sapiens
  misc_RNA (1)...(19): siRNA sense strand
acaagauggaagacuguau

SEQ ID NO: 2352294 - RNA, 19 nt, Homo sapiens
  misc_RNA (1)...(19): siRNA sense strand
ugccauagauaaugccaga

SEQ ID NO: 2352295 - RNA, 19 nt, Homo sapiens
  misc_RNA (1)...(19): siRNA sense strand
guucaaaagaggcuaaaga

SEQ ID NO: 2352296 - RNA, 19 nt, Homo sapiens
  misc_RNA (1)...(19): siRNA sense strand
uugaaaguugccauagaua

SEQ ID NO: 2352297 - RNA, 19 nt, Homo sapiens
  misc_RNA (1)...(19): siRNA sense strand
gcuauggaacaaaagaaua

SEQ ID NO: 2352298 - RNA, 19 nt, Homo sapiens
  misc_RNA (1)...(19): siRNA sense strand
aagaaggcaaagagaaaau

SEQ ID NO: 2352299 - RNA, 19 nt, Homo sapiens
  misc_RNA (1)...(19): siRNA sense strand
cggucuacaccaagcugaa

SEQ ID NO: 2352300 - RNA, 19 nt, Homo sapiens
  misc_RNA (1)...(19): siRNA sense strand
acaccaagcugaagcggcu

SEQ ID NO: 2352301 - RNA, 19 nt, Homo sapiens
  misc_RNA (1)...(19): siRNA sense strand
aggaagaagaagaggaaga

SEQ ID NO: 2352302 - RNA, 19 nt, Homo sapiens
  misc_RNA (1)...(19): siRNA sense strand
acauaaaugcaguggacaa

SEQ ID NO: 2352303 - RNA, 19 nt, Homo sapiens
  misc_RNA (1)...(19): siRNA sense strand
cugagaaucuugagggaga

SEQ ID NO: 2352304 - RNA, 19 nt, Homo sapiens
  misc_RNA (1)...(19): siRNA sense strand
aggaagaggaagaagaaga

SEQ ID NO: 2352305 - RNA, 19 nt, Homo sapiens
  misc_RNA (1)...(19): siRNA sense strand
gugaagaggaggaggagga

SEQ ID NO: 2352306 - RNA, 19 nt, Homo sapiens
  misc_RNA (1)...(19): siRNA sense strand
aggaggaagaggaggaaga

SEQ ID NO: 2352307 - RNA, 19 nt, Homo sapiens
  misc_RNA (1)...(19): siRNA sense strand
aggaggaggaagaggaaga

SEQ ID NO: 2352308 - RNA, 19 nt, Homo sapiens
  misc_RNA (1)...(19): siRNA sense strand
aagaagaggaagaggagga

SEQ ID NO: 2352309 - RNA, 19 nt, Homo sapiens
  misc_RNA (1)...(19): siRNA sense strand
ccaugaacaucgaucgcaa

SEQ ID NO: 2352310 - RNA, 19 nt, Homo sapiens
  misc_RNA (1)...(19): siRNA sense strand
ccaagaagaaauggcgaaa

SEQ ID NO: 2352311 - RNA, 19 nt, Homo sapiens
  misc_RNA (1)...(19): siRNA sense strand
gugaagaaacccugcccaa

SEQ ID NO: 2352312 - RNA, 19 nt, Homo sapiens
  misc_RNA (1)...(19): siRNA sense strand
caacaaggauggagaggug

SEQ ID NO: 2352313 - RNA, 19 nt, Homo sapiens
  misc_RNA (1)...(19): siRNA sense strand
ugauggaggccguggugaa

SEQ ID NO: 2352314 - RNA, 19 nt, Homo sapiens
  misc_RNA (1)...(19): siRNA sense strand
aggaagaagaagaagagga

SEQ ID NO: 2352315 - RNA, 19 nt, Homo sapiens
  misc_RNA (1)...(19): siRNA sense strand
aggaggaagaagaagaaga

SEQ ID NO: 2352316 - RNA, 19 nt, Homo sapiens
  misc_RNA (1)...(19): siRNA sense strand
aggaggaagaggaagaaga

SEQ ID NO: 2352317 - RNA, 19 nt, Homo sapiens
  misc_RNA (1)...(19): siRNA sense strand
cugcagagcacaagcacau

SEQ ID NO: 2352318 - RNA, 19 nt, Homo sapiens
  misc_RNA (1)...(19): siRNA sense strand
ucacugacaacgaggagaa

SEQ ID NO: 2352319 - RNA, 19 nt, Homo sapiens
  misc_RNA (1)...(19): siRNA sense strand
cugacaacgaggagaacau

SEQ ID NO: 2352320 - RNA, 19 nt, Homo sapiens
  misc_RNA (1)...(19): siRNA sense strand
ggcgcaaggccaagaagaa

SEQ ID NO: 2352321 - RNA, 19 nt, Homo sapiens
  misc_RNA (1)...(19): siRNA sense strand
gcguggacuccgacagcaa

SEQ ID NO: 2352322 - RNA, 19 nt, Homo sapiens
  misc_RNA (1)...(19): siRNA sense strand
aagaagaagaggaagagga

SEQ ID NO: 2352323 - RNA, 19 nt, Homo sapiens
  misc_RNA (1)...(19): siRNA sense strand
aggaggaggaagaggagga

SEQ ID NO: 2352324 - RNA, 19 nt, Homo sapiens
  misc_RNA (1)...(19): siRNA sense strand
aagaggaggaagaagaaga

SEQ ID NO: 2352325 - RNA, 19 nt, Homo sapiens
  misc_RNA (1)...(19): siRNA sense strand
cgggagaccaugaggccau

SEQ ID NO: 2352326 - RNA, 19 nt, Homo sapiens
  misc_RNA (1)...(19): siRNA sense strand
caacauaaaugcaguggac

SEQ ID NO: 2352327 - RNA, 19 nt, Homo sapiens
  misc_RNA (1)...(19): siRNA sense strand
gugcauggccacugagagu

SEQ ID NO: 2352328 - RNA, 19 nt, Homo sapiens
  misc_RNA (1)...(19): siRNA sense strand
agaugaggagucagggaau

SEQ ID NO: 2352329 - RNA, 19 nt, Homo sapiens
  misc_RNA (1)...(19): siRNA sense strand
gcacaggacagguggacgu

SEQ ID NO: 2352330 - RNA, 19 nt, Homo sapiens
  misc_RNA (1)...(19): siRNA sense strand
aagaagaggaagaugagga

SEQ ID NO: 2352331 - RNA, 19 nt, Homo sapiens
  misc_RNA (1)...(19): siRNA sense strand
cugagaguguggacggaga

SEQ ID NO: 2352332 - RNA, 19 nt, Homo sapiens
  misc_RNA (1)...(19): siRNA sense strand
aagaggaagaggaggagga

SEQ ID NO: 2352333 - RNA, 19 nt, Homo sapiens
  misc_RNA (1)...(19): siRNA sense strand
acaaggauggagaggugua

SEQ ID NO: 2352334 - RNA, 19 nt, Homo sapiens
  misc_RNA (1)...(19): siRNA sense strand
gggccaugccacaaaguca

SEQ ID NO: 2352335 - RNA, 19 nt, Homo sapiens
  misc_RNA (1)...(19): siRNA sense strand
aaagacagcccauggguga

SEQ ID NO: 2352336 - RNA, 19 nt, Homo sapiens
  misc_RNA (1)...(19): siRNA sense strand
gagucagagaggcggaaga

SEQ ID NO: 2352337 - RNA, 19 nt, Homo sapiens
  misc_RNA (1)...(19): siRNA sense strand
agagcgaccagcagagcaa

SEQ ID NO: 2352338 - RNA, 19 nt, Homo sapiens
  misc_RNA (1)...(19): siRNA sense strand
gggugaagccgucucggaa

SEQ ID NO: 2352339 - RNA, 19 nt, Homo sapiens
  misc_RNA (1)...(19): siRNA sense strand
uggaggccguggugaacaa

SEQ ID NO: 2352340 - RNA, 19 nt, Homo sapiens
  misc_RNA (1)...(19): siRNA sense strand
gcaaggaggaggacgguuc

SEQ ID NO: 2352341 - RNA, 19 nt, Homo sapiens
  misc_RNA (1)...(19): siRNA sense strand
gucugaaguugaagcucua

SEQ ID NO: 2352342 - RNA, 19 nt, Homo sapiens
  misc_RNA (1)...(19): siRNA sense strand
cgcaaggccaagaagaaau

SEQ ID NO: 2352343 - RNA, 19 nt, Homo sapiens
  misc_RNA (1)...(19): siRNA sense strand
agaggaggaggaagaggaa

SEQ ID NO: 2352344 - RNA, 19 nt, Homo sapiens
  misc_RNA (1)...(19): siRNA sense strand
uggaaaaggcccuggucau

SEQ ID NO: 2352345 - RNA, 19 nt, Homo sapiens
  misc_RNA (1)...(19): siRNA sense strand
acaacuaagugaagaggag

SEQ ID NO: 2352346 - RNA, 19 nt, Homo sapiens
  misc_RNA (1)...(19): siRNA sense strand
uccugaugcuguuggacaa

SEQ ID NO: 2352347 - RNA, 19 nt, Homo sapiens
  misc_RNA (1)...(19): siRNA sense strand
gcuaugagaacgugcccau

SEQ ID NO: 2352348 - RNA, 19 nt, Homo sapiens
  misc_RNA (1)...(19): siRNA sense strand
ucuucgacuuagacaacaa

SEQ ID NO: 2352349 - RNA, 19 nt, Homo sapiens
  misc_RNA (1)...(19): siRNA sense strand
agcccugcccugaggauua

SEQ ID NO: 2352350 - RNA, 19 nt, Homo sapiens
  misc_RNA (1)...(19): siRNA sense strand
agcucuaacugaacaacua

SEQ ID NO: 2352351 - RNA, 19 nt, Homo sapiens
  misc_RNA (1)...(19): siRNA sense strand
aggaggaggaggaagagga

SEQ ID NO: 2352352 - RNA, 19 nt, Homo sapiens
  misc_RNA (1)...(19): siRNA sense strand
cugaugugagagaggauga

SEQ ID NO: 2352353 - RNA, 19 nt, Homo sapiens
  misc_RNA (1)...(19): siRNA sense strand
gcaaauauuucaccugcca

SEQ ID NO: 2352354 - RNA, 19 nt, Homo sapiens
  misc_RNA (1)...(19): siRNA sense strand
ccaaaaggaggaagcugaa

SEQ ID NO: 2352355 - RNA, 19 nt, Homo sapiens
  misc_RNA (1)...(19): siRNA sense strand
aagaugaggagucagggaa

SEQ ID NO: 2352356 - RNA, 19 nt, Homo sapiens
  misc_RNA (1)...(19): siRNA sense strand
aagaaauggcgaaaagaca

SEQ ID NO: 2352357 - RNA, 19 nt, Homo sapiens
  misc_RNA (1)...(19): siRNA sense strand
aggaagaagaagaggaaga

SEQ ID NO: 2352358 - RNA, 19 nt, Homo sapiens
  misc_RNA (1)...(19): siRNA sense strand
acauaaaugcaguggacaa

SEQ ID NO: 2352359 - RNA, 19 nt, Homo sapiens
  misc_RNA (1)...(19): siRNA sense strand
cugagaaucuugagggaga

SEQ ID NO: 2352360 - RNA, 19 nt, Homo sapiens
  misc_RNA (1)...(19): siRNA sense strand
aggaagaggaagaagaaga

SEQ ID NO: 2352361 - RNA, 19 nt, Homo sapiens
  misc_RNA (1)...(19): siRNA sense strand
gugaagaggaggaggagga

SEQ ID NO: 2352362 - RNA, 19 nt, Homo sapiens
  misc_RNA (1)...(19): siRNA sense strand
aggaggaagaggaggaaga

SEQ ID NO: 2352363 - RNA, 19 nt, Homo sapiens
  misc_RNA (1)...(19): siRNA sense strand
aggaggaggaagaggaaga

SEQ ID NO: 2352364 - RNA, 19 nt, Homo sapiens
  misc_RNA (1)...(19): siRNA sense strand
aagaagaggaagaggagga

SEQ ID NO: 2352365 - RNA, 19 nt, Homo sapiens
  misc_RNA (1)...(19): siRNA sense strand
ccaugaacaucgaucgcaa

SEQ ID NO: 2352366 - RNA, 19 nt, Homo sapiens
  misc_RNA (1)...(19): siRNA sense strand
ccaagaagaaauggcgaaa

SEQ ID NO: 2352367 - RNA, 19 nt, Homo sapiens
  misc_RNA (1)...(19): siRNA sense strand
gugaagaaacccugcccaa

SEQ ID NO: 2352368 - RNA, 19 nt, Homo sapiens
  misc_RNA (1)...(19): siRNA sense strand
caacaaggauggagaggug

SEQ ID NO: 2352369 - RNA, 19 nt, Homo sapiens
  misc_RNA (1)...(19): siRNA sense strand
ugauggaggccguggugaa

SEQ ID NO: 2352370 - RNA, 19 nt, Homo sapiens
  misc_RNA (1)...(19): siRNA sense strand
aggaagaagaagaagagga

SEQ ID NO: 2352371 - RNA, 19 nt, Homo sapiens
  misc_RNA (1)...(19): siRNA sense strand
aggaggaagaagaagaaga

SEQ ID NO: 2352372 - RNA, 19 nt, Homo sapiens
  misc_RNA (1)...(19): siRNA sense strand
aggaggaagaggaagaaga

SEQ ID NO: 2352373 - RNA, 19 nt, Homo sapiens
  misc_RNA (1)...(19): siRNA sense strand
cugcagagcacaagcacau

SEQ ID NO: 2352374 - RNA, 19 nt, Homo sapiens
  misc_RNA (1)...(19): siRNA sense strand
ucacugacaacgaggagaa

SEQ ID NO: 2352375 - RNA, 19 nt, Homo sapiens
  misc_RNA (1)...(19): siRNA sense strand
cugacaacgaggagaacau

SEQ ID NO: 2352376 - RNA, 19 nt, Homo sapiens
  misc_RNA (1)...(19): siRNA sense strand
ggcgcaaggccaagaagaa

SEQ ID NO: 2352377 - RNA, 19 nt, Homo sapiens
  misc_RNA (1)...(19): siRNA sense strand
gcguggacuccgacagcaa

SEQ ID NO: 2352378 - RNA, 19 nt, Homo sapiens
  misc_RNA (1)...(19): siRNA sense strand
aagaagaagaggaagagga

SEQ ID NO: 2352379 - RNA, 19 nt, Homo sapiens
  misc_RNA (1)...(19): siRNA sense strand
aggaggaggaagaggagga

SEQ ID NO: 2352380 - RNA, 19 nt, Homo sapiens
  misc_RNA (1)...(19): siRNA sense strand
aagaggaggaagaagaaga

SEQ ID NO: 2352381 - RNA, 19 nt, Homo sapiens
  misc_RNA (1)...(19): siRNA sense strand
cgggagaccaugaggccau

SEQ ID NO: 2352382 - RNA, 19 nt, Homo sapiens
  misc_RNA (1)...(19): siRNA sense strand
caacauaaaugcaguggac

SEQ ID NO: 2352383 - RNA, 19 nt, Homo sapiens
  misc_RNA (1)...(19): siRNA sense strand
gugcauggccacugagagu

SEQ ID NO: 2352384 - RNA, 19 nt, Homo sapiens
  misc_RNA (1)...(19): siRNA sense strand
agaugaggagucagggaau

SEQ ID NO: 2352385 - RNA, 19 nt, Homo sapiens
  misc_RNA (1)...(19): siRNA sense strand
gcacaggacagguggacgu

SEQ ID NO: 2352386 - RNA, 19 nt, Homo sapiens
  misc_RNA (1)...(19): siRNA sense strand
aagaagaggaagaugagga

SEQ ID NO: 2352387 - RNA, 19 nt, Homo sapiens
  misc_RNA (1)...(19): siRNA sense strand
cugagaguguggacggaga

SEQ ID NO: 2352388 - RNA, 19 nt, Homo sapiens
  misc_RNA (1)...(19): siRNA sense strand
aagaggaagaggaggagga

SEQ ID NO: 2352389 - RNA, 19 nt, Homo sapiens
  misc_RNA (1)...(19): siRNA sense strand
acaaggauggagaggugua

SEQ ID NO: 2352390 - RNA, 19 nt, Homo sapiens
  misc_RNA (1)...(19): siRNA sense strand
gggccaugccacaaaguca

SEQ ID NO: 2352391 - RNA, 19 nt, Homo sapiens
  misc_RNA (1)...(19): siRNA sense strand
aaagacagcccauggguga

SEQ ID NO: 2352392 - RNA, 19 nt, Homo sapiens
  misc_RNA (1)...(19): siRNA sense strand
gagucagagaggcggaaga

SEQ ID NO: 2352393 - RNA, 19 nt, Homo sapiens
  misc_RNA (1)...(19): siRNA sense strand
agagcgaccagcagagcaa

SEQ ID NO: 2352394 - RNA, 19 nt, Homo sapiens
  misc_RNA (1)...(19): siRNA sense strand
gggugaagccgucucggaa

SEQ ID NO: 2352395 - RNA, 19 nt, Homo sapiens
  misc_RNA (1)...(19): siRNA sense strand
uggaggccguggugaacaa

SEQ ID NO: 2352396 - RNA, 19 nt, Homo sapiens
  misc_RNA (1)...(19): siRNA sense strand
gcaaggaggaggacgguuc

SEQ ID NO: 2352397 - RNA, 19 nt, Homo sapiens
  misc_RNA (1)...(19): siRNA sense strand
gucugaaguugaagcucua

SEQ ID NO: 2352398 - RNA, 19 nt, Homo sapiens
  misc_RNA (1)...(19): siRNA sense strand
cgcaaggccaagaagaaau

SEQ ID NO: 2352399 - RNA, 19 nt, Homo sapiens
  misc_RNA (1)...(19): siRNA sense strand
agaggaggaggaagaggaa

SEQ ID NO: 2352400 - RNA, 19 nt, Homo sapiens
  misc_RNA (1)...(19): siRNA sense strand
uggaaaaggcccuggucau

SEQ ID NO: 2352401 - RNA, 19 nt, Homo sapiens
  misc_RNA (1)...(19): siRNA sense strand
acaacuaagugaagaggag

SEQ ID NO: 2352402 - RNA, 19 nt, Homo sapiens
  misc_RNA (1)...(19): siRNA sense strand
uccugaugcuguuggacaa

SEQ ID NO: 2352403 - RNA, 19 nt, Homo sapiens
  misc_RNA (1)...(19): siRNA sense strand
gcuaugagaacgugcccau

SEQ ID NO: 2352404 - RNA, 19 nt, Homo sapiens
  misc_RNA (1)...(19): siRNA sense strand
ucuucgacuuagacaacaa

SEQ ID NO: 2352405 - RNA, 19 nt, Homo sapiens
  misc_RNA (1)...(19): siRNA sense strand
agcccugcccugaggauua

SEQ ID NO: 2352406 - RNA, 19 nt, Homo sapiens
  misc_RNA (1)...(19): siRNA sense strand
agcucuaacugaacaacua

SEQ ID NO: 2352407 - RNA, 19 nt, Homo sapiens
  misc_RNA (1)...(19): siRNA sense strand
aggaggaggaggaagagga

SEQ ID NO: 2352408 - RNA, 19 nt, Homo sapiens
  misc_RNA (1)...(19): siRNA sense strand
cugaugugagagaggauga

SEQ ID NO: 2352409 - RNA, 19 nt, Homo sapiens
  misc_RNA (1)...(19): siRNA sense strand
gcaaauauuucaccugcca

SEQ ID NO: 2352410 - RNA, 19 nt, Homo sapiens
  misc_RNA (1)...(19): siRNA sense strand
ccaaaaggaggaagcugaa

SEQ ID NO: 2352411 - RNA, 19 nt, Homo sapiens
  misc_RNA (1)...(19): siRNA sense strand
aagaugaggagucagggaa

SEQ ID NO: 2352412 - RNA, 19 nt, Homo sapiens
  misc_RNA (1)...(19): siRNA sense strand
aagaaauggcgaaaagaca

SEQ ID NO: 2352413 - RNA, 19 nt, Homo sapiens
  misc_RNA (1)...(19): siRNA sense strand
gggaaaaugaauuggcaaa

SEQ ID NO: 2352414 - RNA, 19 nt, Homo sapiens
  misc_RNA (1)...(19): siRNA sense strand
gguucauggucaaggagaa

SEQ ID NO: 2352415 - RNA, 19 nt, Homo sapiens
  misc_RNA (1)...(19): siRNA sense strand
ccaaacaaguagaugacga

SEQ ID NO: 2352416 - RNA, 19 nt, Homo sapiens
  misc_RNA (1)...(19): siRNA sense strand
aggagaaaauggagcacaa

SEQ ID NO: 2352417 - RNA, 19 nt, Homo sapiens
  misc_RNA (1)...(19): siRNA sense strand
aggaacgacagcugggaaa

SEQ ID NO: 2352418 - RNA, 19 nt, Homo sapiens
  misc_RNA (1)...(19): siRNA sense strand
gcauaaaggagaagggcag

SEQ ID NO: 2352419 - RNA, 19 nt, Homo sapiens
  misc_RNA (1)...(19): siRNA sense strand
caugugaggaagagaaaga

SEQ ID NO: 2352420 - RNA, 19 nt, Homo sapiens
  misc_RNA (1)...(19): siRNA sense strand
agaaagagccugaaccaca

SEQ ID NO: 2352421 - RNA, 19 nt, Homo sapiens
  misc_RNA (1)...(19): siRNA sense strand
auacaaaucuugauaggga

SEQ ID NO: 2352422 - RNA, 19 nt, Homo sapiens
  misc_RNA (1)...(19): siRNA sense strand
acaaaucuugauagggaaa

SEQ ID NO: 2352423 - RNA, 19 nt, Homo sapiens
  misc_RNA (1)...(19): siRNA sense strand
aggaagagaaagagccuga

SEQ ID NO: 2352424 - RNA, 19 nt, Homo sapiens
  misc_RNA (1)...(19): siRNA sense strand
cauuauagaucgucggucu

SEQ ID NO: 2352425 - RNA, 19 nt, Homo sapiens
  misc_RNA (1)...(19): siRNA sense strand
augaagaugcugagcuaau

SEQ ID NO: 2352426 - RNA, 19 nt, Homo sapiens
  misc_RNA (1)...(19): siRNA sense strand
guucauggucaaggagaaa

SEQ ID NO: 2352427 - RNA, 19 nt, Homo sapiens
  misc_RNA (1)...(19): siRNA sense strand
agaaaaucccauuguguua

SEQ ID NO: 2352428 - RNA, 19 nt, Homo sapiens
  misc_RNA (1)...(19): siRNA sense strand
cuacagugucacaucgaaa

SEQ ID NO: 2352429 - RNA, 19 nt, Homo sapiens
  misc_RNA (1)...(19): siRNA sense strand
uggacagcauaaaggagaa

SEQ ID NO: 2352430 - RNA, 19 nt, Homo sapiens
  misc_RNA (1)...(19): siRNA sense strand
ggaacauguaaaugaagau

SEQ ID NO: 2352431 - RNA, 19 nt, Homo sapiens
  misc_RNA (1)...(19): siRNA sense strand
ggaaaaugaauuggcaaaa

SEQ ID NO: 2352432 - RNA, 19 nt, Homo sapiens
  misc_RNA (1)...(19): siRNA sense strand
acagaagaacauacaagaa

SEQ ID NO: 2352433 - RNA, 19 nt, Homo sapiens
  misc_RNA (1)...(19): siRNA sense strand
aauuugagaagcagaggaa

SEQ ID NO: 2352434 - RNA, 19 nt, Homo sapiens
  misc_RNA (1)...(19): siRNA sense strand
acuuucaguaggagguaua

SEQ ID NO: 2352435 - RNA, 19 nt, Homo sapiens
  misc_RNA (1)...(19): siRNA sense strand
agaacauacaagaaaccaa

SEQ ID NO: 2352436 - RNA, 19 nt, Homo sapiens
  misc_RNA (1)...(19): siRNA sense strand
acgaagaugcugagcucau

SEQ ID NO: 2352437 - RNA, 19 nt, Homo sapiens
  misc_RNA (1)...(19): siRNA sense strand
agagaaagagccugaacca

SEQ ID NO: 2352438 - RNA, 19 nt, Homo sapiens
  misc_RNA (1)...(19): siRNA sense strand
guuuaagaagccuaagcaa

SEQ ID NO: 2352439 - RNA, 19 nt, Homo sapiens
  misc_RNA (1)...(19): siRNA sense strand
aaucaugugaggaagagaa

SEQ ID NO: 2352440 - RNA, 19 nt, Homo sapiens
  misc_RNA (1)...(19): siRNA sense strand
gagaagcagaggaacgaca

SEQ ID NO: 2352441 - RNA, 19 nt, Homo sapiens
  misc_RNA (1)...(19): siRNA sense strand
ccaugaaaacacaaagaau

SEQ ID NO: 2352442 - RNA, 19 nt, Homo sapiens
  misc_RNA (1)...(19): siRNA sense strand
caucagaagcagugaccgu

SEQ ID NO: 2352443 - RNA, 19 nt, Homo sapiens
  misc_RNA (1)...(19): siRNA sense strand
acaaugaauacucagcaaa

SEQ ID NO: 2352444 - RNA, 19 nt, Homo sapiens
  misc_RNA (1)...(19): siRNA sense strand
agccugaaccacagaagaa

SEQ ID NO: 2352445 - RNA, 19 nt, Homo sapiens
  misc_RNA (1)...(19): siRNA sense strand
auuuggaauuugagaagca

SEQ ID NO: 2352446 - RNA, 19 nt, Homo sapiens
  misc_RNA (1)...(19): siRNA sense strand
cauacaagaaaccaaacaa

SEQ ID NO: 2352447 - RNA, 19 nt, Homo sapiens
  misc_RNA (1)...(19): siRNA sense strand
caucaaauguuuaagaagc

SEQ ID NO: 2352448 - RNA, 19 nt, Homo sapiens
  misc_RNA (1)...(19): siRNA sense strand
cauuaagccauguucagaa

SEQ ID NO: 2352449 - RNA, 19 nt, Homo sapiens
  misc_RNA (1)...(19): siRNA sense strand
gcuucguucccuucagaua

SEQ ID NO: 2352450 - RNA, 19 nt, Homo sapiens
  misc_RNA (1)...(19): siRNA sense strand
cagcaaaguacacccucaa

SEQ ID NO: 2352451 - RNA, 19 nt, Homo sapiens
  misc_RNA (1)...(19): siRNA sense strand
gaacagaagacucacacca

SEQ ID NO: 2352452 - RNA, 19 nt, Homo sapiens
  misc_RNA (1)...(19): siRNA sense strand
cuuucgaaguaaacagcau

SEQ ID NO: 2352453 - RNA, 19 nt, Homo sapiens
  misc_RNA (1)...(19): siRNA sense strand
ugacgaagaugcugagcuc

SEQ ID NO: 2352454 - RNA, 19 nt, Homo sapiens
  misc_RNA (1)...(19): siRNA sense strand
gugaagcaucauuuggaau

SEQ ID NO: 2352455 - RNA, 19 nt, Homo sapiens
  misc_RNA (1)...(19): siRNA sense strand
ccgaugacguggaguuuaa

SEQ ID NO: 2352456 - RNA, 19 nt, Homo sapiens
  misc_RNA (1)...(19): siRNA sense strand
cagcugaccugguuggaga

SEQ ID NO: 2352457 - RNA, 19 nt, Homo sapiens
  misc_RNA (1)...(19): siRNA sense strand
guucagaggagcuggacca

SEQ ID NO: 2352458 - RNA, 19 nt, Homo sapiens
  misc_RNA (1)...(19): siRNA sense strand
ccgugagggcagagaacca

SEQ ID NO: 2352459 - RNA, 19 nt, Homo sapiens
  misc_RNA (1)...(19): siRNA sense strand
ccugguuggagaauggaaa

SEQ ID NO: 2352460 - RNA, 19 nt, Homo sapiens
  misc_RNA (1)...(19): siRNA sense strand
ggaucuaaugaacggaaca

SEQ ID NO: 2352461 - RNA, 19 nt, Homo sapiens
  misc_RNA (1)...(19): siRNA sense strand
gagaaauaacacaggacac

SEQ ID NO: 2352462 - RNA, 19 nt, Homo sapiens
  misc_RNA (1)...(19): siRNA sense strand
cagaccucacaaagagaaa

SEQ ID NO: 2352463 - RNA, 19 nt, Homo sapiens
  misc_RNA (1)...(19): siRNA sense strand
ccgaaucagacagaagaaa

SEQ ID NO: 2352464 - RNA, 19 nt, Homo sapiens
  misc_RNA (1)...(19): siRNA sense strand
gugaaguuccggaaaggga

SEQ ID NO: 2352465 - RNA, 19 nt, Homo sapiens
  misc_RNA (1)...(19): siRNA sense strand
gaggaggagcugcagguga

SEQ ID NO: 2352466 - RNA, 19 nt, Homo sapiens
  misc_RNA (1)...(19): siRNA sense strand
ccgccaaagauggagggaa

SEQ ID NO: 2352467 - RNA, 19 nt, Homo sapiens
  misc_RNA (1)...(19): siRNA sense strand
ccgccaaagauggagggaa

SEQ ID NO: 2352468 - RNA, 19 nt, Homo sapiens
  misc_RNA (1)...(19): siRNA sense strand
agugaaugguauagagaaa

SEQ ID NO: 2352469 - RNA, 19 nt, Homo sapiens
  misc_RNA (1)...(19): siRNA sense strand
ggauaaauacgcagccgaa

SEQ ID NO: 2352470 - RNA, 19 nt, Homo sapiens
  misc_RNA (1)...(19): siRNA sense strand
ccgaagugucuuuaaggaa

SEQ ID NO: 2352471 - RNA, 19 nt, Homo sapiens
  misc_RNA (1)...(19): siRNA sense strand
caaaucagaugaaugggua

SEQ ID NO: 2352472 - RNA, 19 nt, Homo sapiens
  misc_RNA (1)...(19): siRNA sense strand
aaaucagaugaauggguaa

SEQ ID NO: 2352473 - RNA, 19 nt, Homo sapiens
  misc_RNA (1)...(19): siRNA sense strand
ccuaaauaccacacgcaga

SEQ ID NO: 2352474 - RNA, 19 nt, Homo sapiens
  misc_RNA (1)...(19): siRNA sense strand
cagacugaauugagggaug

SEQ ID NO: 2352475 - RNA, 19 nt, Homo sapiens
  misc_RNA (1)...(19): siRNA sense strand
aguuagaguacucaggauu

SEQ ID NO: 2352476 - RNA, 19 nt, Homo sapiens
  misc_RNA (1)...(19): siRNA sense strand
ugagacagugaaugguaua

SEQ ID NO: 2352477 - RNA, 19 nt, Homo sapiens
  misc_RNA (1)...(19): siRNA sense strand
cuagaauugaacaguggaa

SEQ ID NO: 2352478 - RNA, 19 nt, Homo sapiens
  misc_RNA (1)...(19): siRNA sense strand
ccgaucucuuaaacagaaa

SEQ ID NO: 2352479 - RNA, 19 nt, Homo sapiens
  misc_RNA (1)...(19): siRNA sense strand
gagacucagcacaggaaga

SEQ ID NO: 2352480 - RNA, 19 nt, Homo sapiens
  misc_RNA (1)...(19): siRNA sense strand
cugaauugagggaugguca

SEQ ID NO: 2352481 - RNA, 19 nt, Homo sapiens
  misc_RNA (1)...(19): siRNA sense strand
acucagcacaggaagacua

SEQ ID NO: 2352482 - RNA, 19 nt, Homo sapiens
  misc_RNA (1)...(19): siRNA sense strand
cgacagaaaagacgguuau

SEQ ID NO: 2352483 - RNA, 19 nt, Homo sapiens
  misc_RNA (1)...(19): siRNA sense strand
aaaacuagucggagcagaa

SEQ ID NO: 2352484 - RNA, 19 nt, Homo sapiens
  misc_RNA (1)...(19): siRNA sense strand
auugagggauggucagcua

SEQ ID NO: 2352485 - RNA, 19 nt, Homo sapiens
  misc_RNA (1)...(19): siRNA sense strand
cugagacagugaaugguau

SEQ ID NO: 2352486 - RNA, 19 nt, Homo sapiens
  misc_RNA (1)...(19): siRNA sense strand
cgaagugucuuuaaggaac

SEQ ID NO: 2352487 - RNA, 19 nt, Homo sapiens
  misc_RNA (1)...(19): siRNA sense strand
cagaagugccgacagaaaa

SEQ ID NO: 2352488 - RNA, 19 nt, Homo sapiens
  misc_RNA (1)...(19): siRNA sense strand
auucuaacacuuugcacaa

SEQ ID NO: 2352489 - RNA, 19 nt, Homo sapiens
  misc_RNA (1)...(19): siRNA sense strand
ccgacagaaaagacgguua

SEQ ID NO: 2352490 - RNA, 19 nt, Homo sapiens
  misc_RNA (1)...(19): siRNA sense strand
caguauagaagauagugau

SEQ ID NO: 2352491 - RNA, 19 nt, Homo sapiens
  misc_RNA (1)...(19): siRNA sense strand
caguggaaucacaacuuua

SEQ ID NO: 2352492 - RNA, 19 nt, Homo sapiens
  misc_RNA (1)...(19): siRNA sense strand
agaucauuccugugggcau

SEQ ID NO: 2352493 - RNA, 19 nt, Homo sapiens
  misc_RNA (1)...(19): siRNA sense strand
agugaaugguauagagaaa

SEQ ID NO: 2352494 - RNA, 19 nt, Homo sapiens
  misc_RNA (1)...(19): siRNA sense strand
ggauaaauacgcagccgaa

SEQ ID NO: 2352495 - RNA, 19 nt, Homo sapiens
  misc_RNA (1)...(19): siRNA sense strand
ccgaagugucuuuaaggaa

SEQ ID NO: 2352496 - RNA, 19 nt, Homo sapiens
  misc_RNA (1)...(19): siRNA sense strand
caaaucagaugaaugggua

SEQ ID NO: 2352497 - RNA, 19 nt, Homo sapiens
  misc_RNA (1)...(19): siRNA sense strand
aaaucagaugaauggguaa

SEQ ID NO: 2352498 - RNA, 19 nt, Homo sapiens
  misc_RNA (1)...(19): siRNA sense strand
ccuaaauaccacacgcaga

SEQ ID NO: 2352499 - RNA, 19 nt, Homo sapiens
  misc_RNA (1)...(19): siRNA sense strand
cagacugaauugagggaug

SEQ ID NO: 2352500 - RNA, 19 nt, Homo sapiens
  misc_RNA (1)...(19): siRNA sense strand
aguuagaguacucaggauu

SEQ ID NO: 2352501 - RNA, 19 nt, Homo sapiens
  misc_RNA (1)...(19): siRNA sense strand
ugagacagugaaugguaua

SEQ ID NO: 2352502 - RNA, 19 nt, Homo sapiens
  misc_RNA (1)...(19): siRNA sense strand
cuagaauugaacaguggaa

SEQ ID NO: 2352503 - RNA, 19 nt, Homo sapiens
  misc_RNA (1)...(19): siRNA sense strand
ccgaucucuuaaacagaaa

SEQ ID NO: 2352504 - RNA, 19 nt, Homo sapiens
  misc_RNA (1)...(19): siRNA sense strand
gagacucagcacaggaaga

SEQ ID NO: 2352505 - RNA, 19 nt, Homo sapiens
  misc_RNA (1)...(19): siRNA sense strand
cugaauugagggaugguca

SEQ ID NO: 2352506 - RNA, 19 nt, Homo sapiens
  misc_RNA (1)...(19): siRNA sense strand
acucagcacaggaagacua

SEQ ID NO: 2352507 - RNA, 19 nt, Homo sapiens
  misc_RNA (1)...(19): siRNA sense strand
cgacagaaaagacgguuau

SEQ ID NO: 2352508 - RNA, 19 nt, Homo sapiens
  misc_RNA (1)...(19): siRNA sense strand
aaaacuagucggagcagaa

SEQ ID NO: 2352509 - RNA, 19 nt, Homo sapiens
  misc_RNA (1)...(19): siRNA sense strand
auugagggauggucagcua

SEQ ID NO: 2352510 - RNA, 19 nt, Homo sapiens
  misc_RNA (1)...(19): siRNA sense strand
cugagacagugaaugguau

SEQ ID NO: 2352511 - RNA, 19 nt, Homo sapiens
  misc_RNA (1)...(19): siRNA sense strand
cgaagugucuuuaaggaac

SEQ ID NO: 2352512 - RNA, 19 nt, Homo sapiens
  misc_RNA (1)...(19): siRNA sense strand
cagaagugccgacagaaaa

SEQ ID NO: 2352513 - RNA, 19 nt, Homo sapiens
  misc_RNA (1)...(19): siRNA sense strand
auucuaacacuuugcacaa

SEQ ID NO: 2352514 - RNA, 19 nt, Homo sapiens
  misc_RNA (1)...(19): siRNA sense strand
ccgacagaaaagacgguua

SEQ ID NO: 2352515 - RNA, 19 nt, Homo sapiens
  misc_RNA (1)...(19): siRNA sense strand
caguauagaagauagugau

SEQ ID NO: 2352516 - RNA, 19 nt, Homo sapiens
  misc_RNA (1)...(19): siRNA sense strand
caguggaaucacaacuuua

SEQ ID NO: 2352517 - RNA, 19 nt, Homo sapiens
  misc_RNA (1)...(19): siRNA sense strand
agaucauuccugugggcau

SEQ ID NO: 2352518 - RNA, 19 nt, Homo sapiens
  misc_RNA (1)...(19): siRNA sense strand
ccucagguuuggagcgaga

SEQ ID NO: 2352519 - RNA, 19 nt, Homo sapiens
  misc_RNA (1)...(19): siRNA sense strand
ugacauacgaagaggagcu

SEQ ID NO: 2352520 - RNA, 19 nt, Homo sapiens
  misc_RNA (1)...(19): siRNA sense strand
gguccgaggaagaagagga

SEQ ID NO: 2352521 - RNA, 19 nt, Homo sapiens
  misc_RNA (1)...(19): siRNA sense strand
ucgcugaccaggaugggaa

SEQ ID NO: 2352522 - RNA, 19 nt, Homo sapiens
  misc_RNA (1)...(19): siRNA sense strand
acacauauucagaggucaa

SEQ ID NO: 2352523 - RNA, 19 nt, Homo sapiens
  misc_RNA (1)...(19): siRNA sense strand
cuauaaaagagaagaggaa

SEQ ID NO: 2352524 - RNA, 19 nt, Homo sapiens
  misc_RNA (1)...(19): siRNA sense strand
cugaggaaggagaggguuu

SEQ ID NO: 2352525 - RNA, 19 nt, Homo sapiens
  misc_RNA (1)...(19): siRNA sense strand
ccuuaagggaacugggaca

SEQ ID NO: 2352526 - RNA, 19 nt, Homo sapiens
  misc_RNA (1)...(19): siRNA sense strand
auucagaggucaaggagga

SEQ ID NO: 2352527 - RNA, 19 nt, Homo sapiens
  misc_RNA (1)...(19): siRNA sense strand
ggaacaagcuauuuggaag

SEQ ID NO: 2352528 - RNA, 19 nt, Homo sapiens
  misc_RNA (1)...(19): siRNA sense strand
gauugaugcuguaggcuca

SEQ ID NO: 2352529 - RNA, 19 nt, Homo sapiens
  misc_RNA (1)...(19): siRNA sense strand
augagaaggaacaggaaaa

SEQ ID NO: 2352530 - RNA, 19 nt, Homo sapiens
  misc_RNA (1)...(19): siRNA sense strand
aggcuggguuucaggagaa

SEQ ID NO: 2352531 - RNA, 19 nt, Homo sapiens
  misc_RNA (1)...(19): siRNA sense strand
cagucaagcugauccgcua

SEQ ID NO: 2352532 - RNA, 19 nt, Homo sapiens
  misc_RNA (1)...(19): siRNA sense strand
gaguagugucccagauuga

SEQ ID NO: 2352533 - RNA, 19 nt, Homo sapiens
  misc_RNA (1)...(19): siRNA sense strand
ggacauaccacucgcagga

SEQ ID NO: 2352534 - RNA, 19 nt, Homo sapiens
  misc_RNA (1)...(19): siRNA sense strand
gcgugaaggaacaagcuau

SEQ ID NO: 2352535 - RNA, 19 nt, Homo sapiens
  misc_RNA (1)...(19): siRNA sense strand
ccauuguggcugugggcuu

SEQ ID NO: 2352536 - RNA, 19 nt, Homo sapiens
  misc_RNA (1)...(19): siRNA sense strand
aggaggagcuggcuggaca

SEQ ID NO: 2352537 - RNA, 19 nt, Homo sapiens
  misc_RNA (1)...(19): siRNA sense strand
cgugaaggaacaagcuauu

SEQ ID NO: 2352538 - RNA, 19 nt, Homo sapiens
  misc_RNA (1)...(19): siRNA sense strand
ggaugagaaggaacaggaa

SEQ ID NO: 2352539 - RNA, 19 nt, Homo sapiens
  misc_RNA (1)...(19): siRNA sense strand
uggaagagauccuggagcu

SEQ ID NO: 2352540 - RNA, 19 nt, Homo sapiens
  misc_RNA (1)...(19): siRNA sense strand
ggguuucggaugugcagaa

SEQ ID NO: 2352541 - RNA, 19 nt, Homo sapiens
  misc_RNA (1)...(19): siRNA sense strand
cuacaugcucacaaggaga

SEQ ID NO: 2352542 - RNA, 19 nt, Homo sapiens
  misc_RNA (1)...(19): siRNA sense strand
acuaugugguggaagagau

SEQ ID NO: 2352543 - RNA, 19 nt, Homo sapiens
  misc_RNA (1)...(19): siRNA sense strand
gaagaauucuacaugcuca

SEQ ID NO: 2352544 - RNA, 19 nt, Homo sapiens
  misc_RNA (1)...(19): siRNA sense strand
agggugggcaggagaguga

SEQ ID NO: 2352545 - RNA, 19 nt, Homo sapiens
  misc_RNA (1)...(19): siRNA sense strand
cagacaaagaagaacaacu

SEQ ID NO: 2352546 - RNA, 19 nt, Homo sapiens
  misc_RNA (1)...(19): siRNA sense strand
aaagagaagaggaagccuu

SEQ ID NO: 2352547 - RNA, 19 nt, Homo sapiens
  misc_RNA (1)...(19): siRNA sense strand
aggagaggguuucggaugu

SEQ ID NO: 2352548 - RNA, 19 nt, Homo sapiens
  misc_RNA (1)...(19): siRNA sense strand
caccaacaccuuaagggaa

SEQ ID NO: 2352549 - RNA, 19 nt, Homo sapiens
  misc_RNA (1)...(19): siRNA sense strand
guuugacagagaugggaau

SEQ ID NO: 2352550 - RNA, 19 nt, Homo sapiens
  misc_RNA (1)...(19): siRNA sense strand
uggaaggaguaguguccca

SEQ ID NO: 2352551 - RNA, 19 nt, Homo sapiens
  misc_RNA (1)...(19): siRNA sense strand
ccaacguugcagaggaguu

SEQ ID NO: 2352552 - RNA, 19 nt, Homo sapiens
  misc_RNA (1)...(19): siRNA sense strand
uggcagacacaguacaaca

SEQ ID NO: 2352553 - RNA, 19 nt, Homo sapiens
  misc_RNA (1)...(19): siRNA sense strand
caucaaugacacauauuca

SEQ ID NO: 2352554 - RNA, 19 nt, Homo sapiens
  misc_RNA (1)...(19): siRNA sense strand
ggguuucaggagaagaauu

SEQ ID NO: 2352555 - RNA, 19 nt, Homo sapiens
  misc_RNA (1)...(19): siRNA sense strand
gcuguaggcucaaagcuga

SEQ ID NO: 2352556 - RNA, 19 nt, Homo sapiens
  misc_RNA (1)...(19): siRNA sense strand
aggaacaagcuauuuggaa

SEQ ID NO: 2352557 - RNA, 19 nt, Homo sapiens
  misc_RNA (1)...(19): siRNA sense strand
uuacauacuccaucagaca

SEQ ID NO: 2352558 - RNA, 19 nt, Homo sapiens
  misc_RNA (1)...(19): siRNA sense strand
acuacaaugcuaucgacaa

SEQ ID NO: 2352559 - RNA, 19 nt, Homo sapiens
  misc_RNA (1)...(19): siRNA sense strand
acacaaauagagagacaau

SEQ ID NO: 2352560 - RNA, 19 nt, Homo sapiens
  misc_RNA (1)...(19): siRNA sense strand
gcucacacaaauagagaga

SEQ ID NO: 2352561 - RNA, 19 nt, Homo sapiens
  misc_RNA (1)...(19): siRNA sense strand
uguagaaacaggagcuauu

SEQ ID NO: 2352562 - RNA, 19 nt, Homo sapiens
  misc_RNA (1)...(19): siRNA sense strand
cuaaauaccuagaacagca

SEQ ID NO: 2352563 - RNA, 19 nt, Homo sapiens
  misc_RNA (1)...(19): siRNA sense strand
gguuaugggcuuaggcugu

SEQ ID NO: 2352564 - RNA, 19 nt, Homo sapiens
  misc_RNA (1)...(19): siRNA sense strand
guguacaaaggaaguuaaa

SEQ ID NO: 2352565 - RNA, 19 nt, Homo sapiens
  misc_RNA (1)...(19): siRNA sense strand
uagaacagcaauauggaau

SEQ ID NO: 2352566 - RNA, 19 nt, Homo sapiens
  misc_RNA (1)...(19): siRNA sense strand
agauguuucuguuggcaau

SEQ ID NO: 2352567 - RNA, 19 nt, Homo sapiens
  misc_RNA (1)...(19): siRNA sense strand
guucuugggcugugcgaca

SEQ ID NO: 2352568 - RNA, 19 nt, Homo sapiens
  misc_RNA (1)...(19): siRNA sense strand
ccuugaugcuccaguacuu

SEQ ID NO: 2352569 - RNA, 19 nt, Homo sapiens
  misc_RNA (1)...(19): siRNA sense strand
guauucaaacaucaggaaa

SEQ ID NO: 2352570 - RNA, 19 nt, Homo sapiens
  misc_RNA (1)...(19): siRNA sense strand
uggcauuggaugugugguu

SEQ ID NO: 2352571 - RNA, 19 nt, Homo sapiens
  misc_RNA (1)...(19): siRNA sense strand
gcauuggaugugugguuau

SEQ ID NO: 2352572 - RNA, 19 nt, Homo sapiens
  misc_RNA (1)...(19): siRNA sense strand
gaugugugguuaugggcuu

SEQ ID NO: 2352573 - RNA, 19 nt, Homo sapiens
  misc_RNA (1)...(19): siRNA sense strand
auauauugggcuuguagaa

SEQ ID NO: 2352574 - RNA, 19 nt, Homo sapiens
  misc_RNA (1)...(19): siRNA sense strand
cucuugagguguaugaaau

SEQ ID NO: 2352575 - RNA, 19 nt, Homo sapiens
  misc_RNA (1)...(19): siRNA sense strand
aguucaaugcauucguuaa

SEQ ID NO: 2352576 - RNA, 19 nt, Homo sapiens
  misc_RNA (1)...(19): siRNA sense strand
aagcuuugagauuggaaau

SEQ ID NO: 2352577 - RNA, 19 nt, Homo sapiens
  misc_RNA (1)...(19): siRNA sense strand
cuucaguuguuggaauaaa

SEQ ID NO: 2352578 - RNA, 19 nt, Homo sapiens
  misc_RNA (1)...(19): siRNA sense strand
acacaaauagagagacaau

SEQ ID NO: 2352579 - RNA, 19 nt, Homo sapiens
  misc_RNA (1)...(19): siRNA sense strand
gcucacacaaauagagaga

SEQ ID NO: 2352580 - RNA, 19 nt, Homo sapiens
  misc_RNA (1)...(19): siRNA sense strand
uguagaaacaggagcuauu

SEQ ID NO: 2352581 - RNA, 19 nt, Homo sapiens
  misc_RNA (1)...(19): siRNA sense strand
cuaaauaccuagaacagca

SEQ ID NO: 2352582 - RNA, 19 nt, Homo sapiens
  misc_RNA (1)...(19): siRNA sense strand
gguuaugggcuuaggcugu

SEQ ID NO: 2352583 - RNA, 19 nt, Homo sapiens
  misc_RNA (1)...(19): siRNA sense strand
guguacaaaggaaguuaaa

SEQ ID NO: 2352584 - RNA, 19 nt, Homo sapiens
  misc_RNA (1)...(19): siRNA sense strand
uagaacagcaauauggaau

SEQ ID NO: 2352585 - RNA, 19 nt, Homo sapiens
  misc_RNA (1)...(19): siRNA sense strand
agauguuucuguuggcaau

SEQ ID NO: 2352586 - RNA, 19 nt, Homo sapiens
  misc_RNA (1)...(19): siRNA sense strand
guucuugggcugugcgaca

SEQ ID NO: 2352587 - RNA, 19 nt, Homo sapiens
  misc_RNA (1)...(19): siRNA sense strand
ccuugaugcuccaguacuu

SEQ ID NO: 2352588 - RNA, 19 nt, Homo sapiens
  misc_RNA (1)...(19): siRNA sense strand
guauucaaacaucaggaaa

SEQ ID NO: 2352589 - RNA, 19 nt, Homo sapiens
  misc_RNA (1)...(19): siRNA sense strand
uggcauuggaugugugguu

SEQ ID NO: 2352590 - RNA, 19 nt, Homo sapiens
  misc_RNA (1)...(19): siRNA sense strand
gcauuggaugugugguuau

SEQ ID NO: 2352591 - RNA, 19 nt, Homo sapiens
  misc_RNA (1)...(19): siRNA sense strand
gaugugugguuaugggcuu

SEQ ID NO: 2352592 - RNA, 19 nt, Homo sapiens
  misc_RNA (1)...(19): siRNA sense strand
auauauugggcuuguagaa

SEQ ID NO: 2352593 - RNA, 19 nt, Homo sapiens
  misc_RNA (1)...(19): siRNA sense strand
cucuugagguguaugaaau

SEQ ID NO: 2352594 - RNA, 19 nt, Homo sapiens
  misc_RNA (1)...(19): siRNA sense strand
aguucaaugcauucguuaa

SEQ ID NO: 2352595 - RNA, 19 nt, Homo sapiens
  misc_RNA (1)...(19): siRNA sense strand
aagcuuugagauuggaaau

SEQ ID NO: 2352596 - RNA, 19 nt, Homo sapiens
  misc_RNA (1)...(19): siRNA sense strand
cuucaguuguuggaauaaa

SEQ ID NO: 2352597 - RNA, 19 nt, Homo sapiens
  misc_RNA (1)...(19): siRNA sense strand
acacaaauagagagacaau

SEQ ID NO: 2352598 - RNA, 19 nt, Homo sapiens
  misc_RNA (1)...(19): siRNA sense strand
gcucacacaaauagagaga

SEQ ID NO: 2352599 - RNA, 19 nt, Homo sapiens
  misc_RNA (1)...(19): siRNA sense strand
uguagaaacaggagcuauu

SEQ ID NO: 2352600 - RNA, 19 nt, Homo sapiens
  misc_RNA (1)...(19): siRNA sense strand
cuaaauaccuagaacagca

SEQ ID NO: 2352601 - RNA, 19 nt, Homo sapiens
  misc_RNA (1)...(19): siRNA sense strand
gguuaugggcuuaggcugu

SEQ ID NO: 2352602 - RNA, 19 nt, Homo sapiens
  misc_RNA (1)...(19): siRNA sense strand
guguacaaaggaaguuaaa

SEQ ID NO: 2352603 - RNA, 19 nt, Homo sapiens
  misc_RNA (1)...(19): siRNA sense strand
uagaacagcaauauggaau

SEQ ID NO: 2352604 - RNA, 19 nt, Homo sapiens
  misc_RNA (1)...(19): siRNA sense strand
agauguuucuguuggcaau

SEQ ID NO: 2352605 - RNA, 19 nt, Homo sapiens
  misc_RNA (1)...(19): siRNA sense strand
guucuugggcugugcgaca

SEQ ID NO: 2352606 - RNA, 19 nt, Homo sapiens
  misc_RNA (1)...(19): siRNA sense strand
ccuugaugcuccaguacuu

SEQ ID NO: 2352607 - RNA, 19 nt, Homo sapiens
  misc_RNA (1)...(19): siRNA sense strand
guauucaaacaucaggaaa

SEQ ID NO: 2352608 - RNA, 19 nt, Homo sapiens
  misc_RNA (1)...(19): siRNA sense strand
uggcauuggaugugugguu

SEQ ID NO: 2352609 - RNA, 19 nt, Homo sapiens
  misc_RNA (1)...(19): siRNA sense strand
gcauuggaugugugguuau

SEQ ID NO: 2352610 - RNA, 19 nt, Homo sapiens
  misc_RNA (1)...(19): siRNA sense strand
gaugugugguuaugggcuu

SEQ ID NO: 2352611 - RNA, 19 nt, Homo sapiens
  misc_RNA (1)...(19): siRNA sense strand
auauauugggcuuguagaa

SEQ ID NO: 2352612 - RNA, 19 nt, Homo sapiens
  misc_RNA (1)...(19): siRNA sense strand
cucuugagguguaugaaau

SEQ ID NO: 2352613 - RNA, 19 nt, Homo sapiens
  misc_RNA (1)...(19): siRNA sense strand
aguucaaugcauucguuaa

SEQ ID NO: 2352614 - RNA, 19 nt, Homo sapiens
  misc_RNA (1)...(19): siRNA sense strand
aagcuuugagauuggaaau

SEQ ID NO: 2352615 - RNA, 19 nt, Homo sapiens
  misc_RNA (1)...(19): siRNA sense strand
cuucaguuguuggaauaaa

SEQ ID NO: 2352616 - RNA, 19 nt, Homo sapiens
  misc_RNA (1)...(19): siRNA sense strand
acaccaaggucucagccua

SEQ ID NO: 2352617 - RNA, 19 nt, Homo sapiens
  misc_RNA (1)...(19): siRNA sense strand
ccuguaggcagaugggcua

SEQ ID NO: 2352618 - RNA, 19 nt, Homo sapiens
  misc_RNA (1)...(19): siRNA sense strand
ucacagaagcucucgcuga

SEQ ID NO: 2352619 - RNA, 19 nt, Homo sapiens
  misc_RNA (1)...(19): siRNA sense strand
ccuguaggcagaugggcua

SEQ ID NO: 2352620 - RNA, 19 nt, Homo sapiens
  misc_RNA (1)...(19): siRNA sense strand
ucacagaagcucucgcuga

SEQ ID NO: 2352621 - RNA, 19 nt, Homo sapiens
  misc_RNA (1)...(19): siRNA sense strand
aggcuaagugugaguguca

SEQ ID NO: 2352622 - RNA, 19 nt, Homo sapiens
  misc_RNA (1)...(19): siRNA sense strand
guuucuuggagcaggcuaa

SEQ ID NO: 2352623 - RNA, 19 nt, Homo sapiens
  misc_RNA (1)...(19): siRNA sense strand
gcaauggagugcacggucu

SEQ ID NO: 2352624 - RNA, 19 nt, Homo sapiens
  misc_RNA (1)...(19): siRNA sense strand
caacaggacucgugagcug

SEQ ID NO: 2352625 - RNA, 19 nt, Homo sapiens
  misc_RNA (1)...(19): siRNA sense strand
ggagguuccuacauggcaa

SEQ ID NO: 2352626 - RNA, 19 nt, Homo sapiens
  misc_RNA (1)...(19): siRNA sense strand
ggaaagugcuggauggcga

SEQ ID NO: 2352627 - RNA, 19 nt, Homo sapiens
  misc_RNA (1)...(19): siRNA sense strand
ggagacagguacugggugu

SEQ ID NO: 2352628 - RNA, 19 nt, Homo sapiens
  misc_RNA (1)...(19): siRNA sense strand
auaacguagaggaaggaua

SEQ ID NO: 2352629 - RNA, 19 nt, Homo sapiens
  misc_RNA (1)...(19): siRNA sense strand
ggguguucaaggacaauaa

SEQ ID NO: 2352630 - RNA, 19 nt, Homo sapiens
  misc_RNA (1)...(19): siRNA sense strand
ucuuuaaaggagacaggua

SEQ ID NO: 2352631 - RNA, 19 nt, Homo sapiens
  misc_RNA (1)...(19): siRNA sense strand
acuggguguucaaggacaa

SEQ ID NO: 2352632 - RNA, 19 nt, Homo sapiens
  misc_RNA (1)...(19): siRNA sense strand
cucaaggucuggagcgaca

SEQ ID NO: 2352633 - RNA, 19 nt, Homo sapiens
  misc_RNA (1)...(19): siRNA sense strand
acaauaacguagaggaagg

SEQ ID NO: 2352634 - RNA, 19 nt, Homo sapiens
  misc_RNA (1)...(19): siRNA sense strand
cggcacagaugcaccgcuu

SEQ ID NO: 2352635 - RNA, 19 nt, Homo sapiens
  misc_RNA (1)...(19): siRNA sense strand
ucuuuaaggaccagcugua

SEQ ID NO: 2352636 - RNA, 19 nt, Homo sapiens
  misc_RNA (1)...(19): siRNA sense strand
gcaagauccucaugggcga

SEQ ID NO: 2352637 - RNA, 19 nt, Homo sapiens
  misc_RNA (1)...(19): siRNA sense strand
ggagggagaaguauggcaa

SEQ ID NO: 2352638 - RNA, 19 nt, Homo sapiens
  misc_RNA (1)...(19): siRNA sense strand
gcagcaaggagcacgggaa

SEQ ID NO: 2352639 - RNA, 19 nt, Homo sapiens
  misc_RNA (1)...(19): siRNA sense strand
auguauagcauccgggaca

SEQ ID NO: 2352640 - RNA, 19 nt, Homo sapiens
  misc_RNA (1)...(19): siRNA sense strand
gagaaggccauccgggaga

SEQ ID NO: 2352641 - RNA, 19 nt, Homo sapiens
  misc_RNA (1)...(19): siRNA sense strand
ugaccaugcaggagcugaa

SEQ ID NO: 2352642 - RNA, 19 nt, Homo sapiens
  misc_RNA (1)...(19): siRNA sense strand
guggauggccucagcguca

SEQ ID NO: 2352643 - RNA, 19 nt, Homo sapiens
  misc_RNA (1)...(19): siRNA sense strand
ccaagggauccaugggcuu

SEQ ID NO: 2352644 - RNA, 19 nt, Homo sapiens
  misc_RNA (1)...(19): siRNA sense strand
gcaacguguucaagacgca

SEQ ID NO: 2352645 - RNA, 19 nt, Homo sapiens
  misc_RNA (1)...(19): siRNA sense strand
ugggcaagcaccuggccaa

SEQ ID NO: 2352646 - RNA, 19 nt, Homo sapiens
  misc_RNA (1)...(19): siRNA sense strand
agucggagcaggaggccua

SEQ ID NO: 2352647 - RNA, 19 nt, Homo sapiens
  misc_RNA (1)...(19): siRNA sense strand
cuucaaaacaccaagagua

SEQ ID NO: 2352648 - RNA, 19 nt, Homo sapiens
  misc_RNA (1)...(19): siRNA sense strand
uggugaaacugcaggugga

SEQ ID NO: 2352649 - RNA, 19 nt, Homo sapiens
  misc_RNA (1)...(19): siRNA sense strand
gaugaaguguggcagguga

SEQ ID NO: 2352650 - RNA, 19 nt, Homo sapiens
  misc_RNA (1)...(19): siRNA sense strand
aaaugaauucagaggagga

SEQ ID NO: 2352651 - RNA, 19 nt, Homo sapiens
  misc_RNA (1)...(19): siRNA sense strand
aggaagaugaaguguggca

SEQ ID NO: 2352652 - RNA, 19 nt, Homo sapiens
  misc_RNA (1)...(19): siRNA sense strand
cagaggaggaagaugaagu

SEQ ID NO: 2352653 - RNA, 19 nt, Homo sapiens
  misc_RNA (1)...(19): siRNA sense strand
auaucaaacuggcgcagau

SEQ ID NO: 2352654 - RNA, 19 nt, Homo sapiens
  misc_RNA (1)...(19): siRNA sense strand
agauagaagagcuccguca

SEQ ID NO: 2352655 - RNA, 19 nt, Homo sapiens
  misc_RNA (1)...(19): siRNA sense strand
agucggagcaggaggccua

SEQ ID NO: 2352656 - RNA, 19 nt, Homo sapiens
  misc_RNA (1)...(19): siRNA sense strand
cuucaaaacaccaagagua

SEQ ID NO: 2352657 - RNA, 19 nt, Homo sapiens
  misc_RNA (1)...(19): siRNA sense strand
uggugaaacugcaggugga

SEQ ID NO: 2352658 - RNA, 19 nt, Homo sapiens
  misc_RNA (1)...(19): siRNA sense strand
gaugaaguguggcagguga

SEQ ID NO: 2352659 - RNA, 19 nt, Homo sapiens
  misc_RNA (1)...(19): siRNA sense strand
aaaugaauucagaggagga

SEQ ID NO: 2352660 - RNA, 19 nt, Homo sapiens
  misc_RNA (1)...(19): siRNA sense strand
aggaagaugaaguguggca

SEQ ID NO: 2352661 - RNA, 19 nt, Homo sapiens
  misc_RNA (1)...(19): siRNA sense strand
cagaggaggaagaugaagu

SEQ ID NO: 2352662 - RNA, 19 nt, Homo sapiens
  misc_RNA (1)...(19): siRNA sense strand
auaucaaacuggcgcagau

SEQ ID NO: 2352663 - RNA, 19 nt, Homo sapiens
  misc_RNA (1)...(19): siRNA sense strand
agauagaagagcuccguca

SEQ ID NO: 2352664 - RNA, 19 nt, Homo sapiens
  misc_RNA (1)...(19): siRNA sense strand
agucggagcaggaggccua

SEQ ID NO: 2352665 - RNA, 19 nt, Homo sapiens
  misc_RNA (1)...(19): siRNA sense strand
cuucaaaacaccaagagua

SEQ ID NO: 2352666 - RNA, 19 nt, Homo sapiens
  misc_RNA (1)...(19): siRNA sense strand
uggugaaacugcaggugga

SEQ ID NO: 2352667 - RNA, 19 nt, Homo sapiens
  misc_RNA (1)...(19): siRNA sense strand
gaugaaguguggcagguga

SEQ ID NO: 2352668 - RNA, 19 nt, Homo sapiens
  misc_RNA (1)...(19): siRNA sense strand
aaaugaauucagaggagga

SEQ ID NO: 2352669 - RNA, 19 nt, Homo sapiens
  misc_RNA (1)...(19): siRNA sense strand
aggaagaugaaguguggca

SEQ ID NO: 2352670 - RNA, 19 nt, Homo sapiens
  misc_RNA (1)...(19): siRNA sense strand
cagaggaggaagaugaagu

SEQ ID NO: 2352671 - RNA, 19 nt, Homo sapiens
  misc_RNA (1)...(19): siRNA sense strand
auaucaaacuggcgcagau

SEQ ID NO: 2352672 - RNA, 19 nt, Homo sapiens
  misc_RNA (1)...(19): siRNA sense strand
agauagaagagcuccguca

SEQ ID NO: 2352673 - RNA, 19 nt, Homo sapiens
  misc_RNA (1)...(19): siRNA sense strand
gugaagacauuguggcuga

SEQ ID NO: 2352674 - RNA, 19 nt, Homo sapiens
  misc_RNA (1)...(19): siRNA sense strand
gugaagacauuguggcuga

SEQ ID NO: 2352675 - RNA, 19 nt, Homo sapiens
  misc_RNA (1)...(19): siRNA sense strand
caagaaaguucaacgagga

SEQ ID NO: 2352676 - RNA, 19 nt, Homo sapiens
  misc_RNA (1)...(19): siRNA sense strand
cugaauggacaggaggaaa

SEQ ID NO: 2352677 - RNA, 19 nt, Homo sapiens
  misc_RNA (1)...(19): siRNA sense strand
augcacaggaggagcaaga

SEQ ID NO: 2352678 - RNA, 19 nt, Homo sapiens
  misc_RNA (1)...(19): siRNA sense strand
agcgcuuccuggagagaua

SEQ ID NO: 2352679 - RNA, 19 nt, Homo sapiens
  misc_RNA (1)...(19): siRNA sense strand
aggaaugcuacgcguuuaa

SEQ ID NO: 2352680 - RNA, 19 nt, Homo sapiens
  misc_RNA (1)...(19): siRNA sense strand
ugaauggacaggaggaaac

SEQ ID NO: 2352681 - RNA, 19 nt, Homo sapiens
  misc_RNA (1)...(19): siRNA sense strand
ggaggaaaggccagacuca

SEQ ID NO: 2352682 - RNA, 19 nt, Homo sapiens
  misc_RNA (1)...(19): siRNA sense strand
aggaaaggccagacucaca

SEQ ID NO: 2352683 - RNA, 19 nt, Homo sapiens
  misc_RNA (1)...(19): siRNA sense strand
gguuacgagcaaagggaau

SEQ ID NO: 2352684 - RNA, 19 nt, Homo sapiens
  misc_RNA (1)...(19): siRNA sense strand
agaaaguagaagugauuga

SEQ ID NO: 2352685 - RNA, 19 nt, Homo sapiens
  misc_RNA (1)...(19): siRNA sense strand
uccaacagccuaagggaaa

SEQ ID NO: 2352686 - RNA, 19 nt, Homo sapiens
  misc_RNA (1)...(19): siRNA sense strand
acccaaucuuugugugaaa

SEQ ID NO: 2352687 - RNA, 19 nt, Homo sapiens
  misc_RNA (1)...(19): siRNA sense strand
agggaaagccauagccaca

SEQ ID NO: 2352688 - RNA, 19 nt, Homo sapiens
  misc_RNA (1)...(19): siRNA sense strand
cugaugaagaggaagaaga

SEQ ID NO: 2352689 - RNA, 19 nt, Homo sapiens
  misc_RNA (1)...(19): siRNA sense strand
ccggaucauucuagagcuu

SEQ ID NO: 2352690 - RNA, 19 nt, Homo sapiens
  misc_RNA (1)...(19): siRNA sense strand
agcaaagggaauaaggaau

SEQ ID NO: 2352691 - RNA, 19 nt, Homo sapiens
  misc_RNA (1)...(19): siRNA sense strand
aguagaagugauugaccua

SEQ ID NO: 2352692 - RNA, 19 nt, Homo sapiens
  misc_RNA (1)...(19): siRNA sense strand
gguaaaaugcggcugacaa

SEQ ID NO: 2352693 - RNA, 19 nt, Homo sapiens
  misc_RNA (1)...(19): siRNA sense strand
cuguaguccugcugugcaa

SEQ ID NO: 2352694 - RNA, 19 nt, Homo sapiens
  misc_RNA (1)...(19): siRNA sense strand
gguuaugagccuuagaguu

SEQ ID NO: 2352695 - RNA, 19 nt, Homo sapiens
  misc_RNA (1)...(19): siRNA sense strand
ucacaaaagcccugcauuu

SEQ ID NO: 2352696 - RNA, 19 nt, Homo sapiens
  misc_RNA (1)...(19): siRNA sense strand
cggacagugcggaacuaaa

SEQ ID NO: 2352697 - RNA, 19 nt, Homo sapiens
  misc_RNA (1)...(19): siRNA sense strand
gggaauaaggaauccggau

SEQ ID NO: 2352698 - RNA, 19 nt, Homo sapiens
  misc_RNA (1)...(19): siRNA sense strand
gcaucauaccagacauuau

SEQ ID NO: 2352699 - RNA, 19 nt, Homo sapiens
  misc_RNA (1)...(19): siRNA sense strand
ccacuaaauaauaaaggca

SEQ ID NO: 2352700 - RNA, 19 nt, Homo sapiens
  misc_RNA (1)...(19): siRNA sense strand
guuacgagcaaagggaaua

SEQ ID NO: 2352701 - RNA, 19 nt, Homo sapiens
  misc_RNA (1)...(19): siRNA sense strand
guuaagugcaggaggcagu

SEQ ID NO: 2352702 - RNA, 19 nt, Homo sapiens
  misc_RNA (1)...(19): siRNA sense strand
aucaguaguuccauggaua

SEQ ID NO: 2352703 - RNA, 19 nt, Homo sapiens
  misc_RNA (1)...(19): siRNA sense strand
cagcaaaucaguaguucca

SEQ ID NO: 2352704 - RNA, 19 nt, Homo sapiens
  misc_RNA (1)...(19): siRNA sense strand
agacagugaaauagcuaca

SEQ ID NO: 2352705 - RNA, 19 nt, Homo sapiens
  misc_RNA (1)...(19): siRNA sense strand
gaaacaagcacggacgcaa

SEQ ID NO: 2352706 - RNA, 19 nt, Homo sapiens
  misc_RNA (1)...(19): siRNA sense strand
acuauguccacuugguaaa

SEQ ID NO: 2352707 - RNA, 19 nt, Homo sapiens
  misc_RNA (1)...(19): siRNA sense strand
cuuacgacuuacaaggauu

SEQ ID NO: 2352708 - RNA, 19 nt, Homo sapiens
  misc_RNA (1)...(19): siRNA sense strand
guaaaaugcggcugacaau

SEQ ID NO: 2352709 - RNA, 19 nt, Homo sapiens
  misc_RNA (1)...(19): siRNA sense strand
aagaagagccaucugccaa

SEQ ID NO: 2352710 - RNA, 19 nt, Homo sapiens
  misc_RNA (1)...(19): siRNA sense strand
ggaauaaggaauccggauc

SEQ ID NO: 2352711 - RNA, 19 nt, Homo sapiens
  misc_RNA (1)...(19): siRNA sense strand
ugaccuaaccauagacagu

SEQ ID NO: 2352712 - RNA, 19 nt, Homo sapiens
  misc_RNA (1)...(19): siRNA sense strand
uggcaguauaucuuguaaa

SEQ ID NO: 2352713 - RNA, 19 nt, Homo sapiens
  misc_RNA (1)...(19): siRNA sense strand
agugauugaccuaaccaua

SEQ ID NO: 2352714 - RNA, 19 nt, Homo sapiens
  misc_RNA (1)...(19): siRNA sense strand
agccuaagggaaagccaua

SEQ ID NO: 2352715 - RNA, 19 nt, Homo sapiens
  misc_RNA (1)...(19): siRNA sense strand
ugaagaggaagaagagcca

SEQ ID NO: 2352716 - RNA, 19 nt, Homo sapiens
  misc_RNA (1)...(19): siRNA sense strand
cauccaagacuauaggcau

SEQ ID NO: 2352717 - RNA, 19 nt, Homo sapiens
  misc_RNA (1)...(19): siRNA sense strand
uuucuuaucaggagacaau

SEQ ID NO: 2352718 - RNA, 19 nt, Homo sapiens
  misc_RNA (1)...(19): siRNA sense strand
gcggauccagacagugaaa

SEQ ID NO: 2352719 - RNA, 19 nt, Homo sapiens
  misc_RNA (1)...(19): siRNA sense strand
ccagacagugaaauagcua

SEQ ID NO: 2352720 - RNA, 19 nt, Homo sapiens
  misc_RNA (1)...(19): siRNA sense strand
aaaaggaaguacaggaagu

SEQ ID NO: 2352721 - RNA, 19 nt, Homo sapiens
  misc_RNA (1)...(19): siRNA sense strand
uggaagcaguaguggcagu

SEQ ID NO: 2352722 - RNA, 19 nt, Homo sapiens
  misc_RNA (1)...(19): siRNA sense strand
acaaagagaagaaagggaa

SEQ ID NO: 2352723 - RNA, 19 nt, Homo sapiens
  misc_RNA (1)...(19): siRNA sense strand
acgucaagucugagccaaa

SEQ ID NO: 2352724 - RNA, 19 nt, Homo sapiens
  misc_RNA (1)...(19): siRNA sense strand
agcagugcguggagcgaaa

SEQ ID NO: 2352725 - RNA, 19 nt, Homo sapiens
  misc_RNA (1)...(19): siRNA sense strand
gggauggagcggaggucau

SEQ ID NO: 2352726 - RNA, 19 nt, Homo sapiens
  misc_RNA (1)...(19): siRNA sense strand
acuggaagaagaaggagaa

SEQ ID NO: 2352727 - RNA, 19 nt, Homo sapiens
  misc_RNA (1)...(19): siRNA sense strand
ccucgaacgucaagggccu

SEQ ID NO: 2352728 - RNA, 19 nt, Homo sapiens
  misc_RNA (1)...(19): siRNA sense strand
acgagaugcccaauggcua

SEQ ID NO: 2352729 - RNA, 19 nt, Homo sapiens
  misc_RNA (1)...(19): siRNA sense strand
gacaaagagaagaaaggga

SEQ ID NO: 2352730 - RNA, 19 nt, Homo sapiens
  misc_RNA (1)...(19): siRNA sense strand
gggagcuguuccaggagau

SEQ ID NO: 2352731 - RNA, 19 nt, Homo sapiens
  misc_RNA (1)...(19): siRNA sense strand
agcugauguucgagcagua

SEQ ID NO: 2352732 - RNA, 19 nt, Homo sapiens
  misc_RNA (1)...(19): siRNA sense strand
cugacaggcucaaucgaga

SEQ ID NO: 2352733 - RNA, 19 nt, Homo sapiens
  misc_RNA (1)...(19): siRNA sense strand
gggacaaagagaagaaagg

SEQ ID NO: 2352734 - RNA, 19 nt, Homo sapiens
  misc_RNA (1)...(19): siRNA sense strand
gcaucaugaccgugaggaa

SEQ ID NO: 2352735 - RNA, 19 nt, Homo sapiens
  misc_RNA (1)...(19): siRNA sense strand
cgcaacaccuuuagggaga

SEQ ID NO: 2352736 - RNA, 19 nt, Homo sapiens
  misc_RNA (1)...(19): siRNA sense strand
ucgucuacucggagagcaa

SEQ ID NO: 2352737 - RNA, 19 nt, Homo sapiens
  misc_RNA (1)...(19): siRNA sense strand
acggcaugaacuugggaua

SEQ ID NO: 2352738 - RNA, 19 nt, Homo sapiens
  misc_RNA (1)...(19): siRNA sense strand
cgucaagcgcauagcagca

SEQ ID NO: 2352739 - RNA, 19 nt, Homo sapiens
  misc_RNA (1)...(19): siRNA sense strand
gugcacaacucgcgccuca

SEQ ID NO: 2352740 - RNA, 19 nt, Homo sapiens
  misc_RNA (1)...(19): siRNA sense strand
aagagaagcuggagcgaga

SEQ ID NO: 2352741 - RNA, 19 nt, Homo sapiens
  misc_RNA (1)...(19): siRNA sense strand
ccgaagaggagcugcgcaa

SEQ ID NO: 2352742 - RNA, 19 nt, Homo sapiens
  misc_RNA (1)...(19): siRNA sense strand
ccaccuaugaggaggccaa

SEQ ID NO: 2352743 - RNA, 19 nt, Homo sapiens
  misc_RNA (1)...(19): siRNA sense strand
uggagaagaccaugcggaa

SEQ ID NO: 2352744 - RNA, 19 nt, Homo sapiens
  misc_RNA (1)...(19): siRNA sense strand
ccgggaucuuagagagaga

SEQ ID NO: 2352745 - RNA, 19 nt, Homo sapiens
  misc_RNA (1)...(19): siRNA sense strand
ugucagaacaacugcgaga

SEQ ID NO: 2352746 - RNA, 19 nt, Homo sapiens
  misc_RNA (1)...(19): siRNA sense strand
uugagaagcuggaaagcga

SEQ ID NO: 2352747 - RNA, 19 nt, Homo sapiens
  misc_RNA (1)...(19): siRNA sense strand
cagacaugguggagauacu

SEQ ID NO: 2352748 - RNA, 19 nt, Homo sapiens
  misc_RNA (1)...(19): siRNA sense strand
augccaggcugcagagaga

SEQ ID NO: 2352749 - RNA, 19 nt, Homo sapiens
  misc_RNA (1)...(19): siRNA sense strand
aguugucccuggagaggaa

SEQ ID NO: 2352750 - RNA, 19 nt, Homo sapiens
  misc_RNA (1)...(19): siRNA sense strand
uggagaaaguggagcggcu

SEQ ID NO: 2352751 - RNA, 19 nt, Homo sapiens
  misc_RNA (1)...(19): siRNA sense strand
aacaagauggacagugaaa

SEQ ID NO: 2352752 - RNA, 19 nt, Homo sapiens
  misc_RNA (1)...(19): siRNA sense strand
gugagaaccaccuggcaga

SEQ ID NO: 2352753 - RNA, 19 nt, Homo sapiens
  misc_RNA (1)...(19): siRNA sense strand
cugcagagggagcuggaga

SEQ ID NO: 2352754 - RNA, 19 nt, Homo sapiens
  misc_RNA (1)...(19): siRNA sense strand
gucaggacaugguggccaa

SEQ ID NO: 2352755 - RNA, 19 nt, Homo sapiens
  misc_RNA (1)...(19): siRNA sense strand
agaacaacugcgagagaag

SEQ ID NO: 2352756 - RNA, 19 nt, Homo sapiens
  misc_RNA (1)...(19): siRNA sense strand
ucuuagagagagauuggaa

SEQ ID NO: 2352757 - RNA, 19 nt, Homo sapiens
  misc_RNA (1)...(19): siRNA sense strand
acgaacagcagcaggagca

SEQ ID NO: 2352758 - RNA, 19 nt, Homo sapiens
  misc_RNA (1)...(19): siRNA sense strand
gagcagaaguauuuggagg

SEQ ID NO: 2352759 - RNA, 19 nt, Homo sapiens
  misc_RNA (1)...(19): siRNA sense strand
gcaagacacaggaggccca

SEQ ID NO: 2352760 - RNA, 19 nt, Homo sapiens
  misc_RNA (1)...(19): siRNA sense strand
gcuacgaacagcagcagga

SEQ ID NO: 2352761 - RNA, 19 nt, Homo sapiens
  misc_RNA (1)...(19): siRNA sense strand
ucuucuagugagcgacaaa

SEQ ID NO: 2352762 - RNA, 19 nt, Homo sapiens
  misc_RNA (1)...(19): siRNA sense strand
aggcuggagcugagggaga

SEQ ID NO: 2352763 - RNA, 19 nt, Homo sapiens
  misc_RNA (1)...(19): siRNA sense strand
ccaaggaguaugaagccua

SEQ ID NO: 2352764 - RNA, 19 nt, Homo sapiens
  misc_RNA (1)...(19): siRNA sense strand
cugaagauguuucuggaga

SEQ ID NO: 2352765 - RNA, 19 nt, Homo sapiens
  misc_RNA (1)...(19): siRNA sense strand
ggauagugcuacagagacc

SEQ ID NO: 2352766 - RNA, 19 nt, Homo sapiens
  misc_RNA (1)...(19): siRNA sense strand
agaacgugaagguggauuu

SEQ ID NO: 2352767 - RNA, 19 nt, Homo sapiens
  misc_RNA (1)...(19): siRNA sense strand
caggaugagggcugggaga

SEQ ID NO: 2352768 - RNA, 19 nt, Homo sapiens
  misc_RNA (1)...(19): siRNA sense strand
uggagaacgugaaggugga

SEQ ID NO: 2352769 - RNA, 19 nt, Homo sapiens
  misc_RNA (1)...(19): siRNA sense strand
ugggauagugcuacagaga

SEQ ID NO: 2352770 - RNA, 19 nt, Homo sapiens
  misc_RNA (1)...(19): siRNA sense strand
ugaaaggaagcguggucau

SEQ ID NO: 2352771 - RNA, 19 nt, Homo sapiens
  misc_RNA (1)...(19): siRNA sense strand
augaagccuacgaguguaa

SEQ ID NO: 2352772 - RNA, 19 nt, Homo sapiens
  misc_RNA (1)...(19): siRNA sense strand
cggacgaggaugaggacuu

SEQ ID NO: 2352773 - RNA, 19 nt, Homo sapiens
  misc_RNA (1)...(19): siRNA sense strand
acacggugguggaggccaa

SEQ ID NO: 2352774 - RNA, 19 nt, Homo sapiens
  misc_RNA (1)...(19): siRNA sense strand
ggaucguggagguggagaa

SEQ ID NO: 2352775 - RNA, 19 nt, Homo sapiens
  misc_RNA (1)...(19): siRNA sense strand
ucguggagguggagaacca

SEQ ID NO: 2352776 - RNA, 19 nt, Homo sapiens
  misc_RNA (1)...(19): siRNA sense strand
caugguggcuggugaguca

SEQ ID NO: 2352777 - RNA, 19 nt, Homo sapiens
  misc_RNA (1)...(19): siRNA sense strand
ccaaccaggugcaccgcaa

SEQ ID NO: 2352778 - RNA, 19 nt, Homo sapiens
  misc_RNA (1)...(19): siRNA sense strand
acauugaggagaagggagu

SEQ ID NO: 2352779 - RNA, 19 nt, Homo sapiens
  misc_RNA (1)...(19): siRNA sense strand
gcgacgugcacuacgagaa

SEQ ID NO: 2352780 - RNA, 19 nt, Homo sapiens
  misc_RNA (1)...(19): siRNA sense strand
aggcauugcaugagaaggu

SEQ ID NO: 2352781 - RNA, 19 nt, Homo sapiens
  misc_RNA (1)...(19): siRNA sense strand
cagaggacaagcaggacau

SEQ ID NO: 2352782 - RNA, 19 nt, Homo sapiens
  misc_RNA (1)...(19): siRNA sense strand
ccagaggacaagcaggaca

SEQ ID NO: 2352783 - RNA, 19 nt, Homo sapiens
  misc_RNA (1)...(19): siRNA sense strand
cagcagaugaccagcaaac

SEQ ID NO: 2352784 - RNA, 19 nt, Homo sapiens
  misc_RNA (1)...(19): siRNA sense strand
caggacagccgcauggaga

SEQ ID NO: 2352785 - RNA, 19 nt, Homo sapiens
  misc_RNA (1)...(19): siRNA sense strand
aggaggaggcagaggugua

SEQ ID NO: 2352786 - RNA, 19 nt, Homo sapiens
  misc_RNA (1)...(19): siRNA sense strand
uguccaacaucuacggcaa

SEQ ID NO: 2352787 - RNA, 19 nt, Homo sapiens
  misc_RNA (1)...(19): siRNA sense strand
cggcuacagcacagagaca

SEQ ID NO: 2352788 - RNA, 19 nt, Homo sapiens
  misc_RNA (1)...(19): siRNA sense strand
acaacgagccuguagccaa

SEQ ID NO: 2352789 - RNA, 19 nt, Homo sapiens
  misc_RNA (1)...(19): siRNA sense strand
augaggaggaggaggcaga

SEQ ID NO: 2352790 - RNA, 19 nt, Homo sapiens
  misc_RNA (1)...(19): siRNA sense strand
cuuuggaugccgagagcga

SEQ ID NO: 2352791 - RNA, 19 nt, Homo sapiens
  misc_RNA (1)...(19): siRNA sense strand
uggcaucgucauccagaaa

SEQ ID NO: 2352792 - RNA, 19 nt, Homo sapiens
  misc_RNA (1)...(19): siRNA sense strand
ccaucuaugucuucagcca

SEQ ID NO: 2352793 - RNA, 19 nt, Homo sapiens
  misc_RNA (1)...(19): siRNA sense strand
aggaggaggcagaggugua

SEQ ID NO: 2352794 - RNA, 19 nt, Homo sapiens
  misc_RNA (1)...(19): siRNA sense strand
uguccaacaucuacggcaa

SEQ ID NO: 2352795 - RNA, 19 nt, Homo sapiens
  misc_RNA (1)...(19): siRNA sense strand
cggcuacagcacagagaca

SEQ ID NO: 2352796 - RNA, 19 nt, Homo sapiens
  misc_RNA (1)...(19): siRNA sense strand
acaacgagccuguagccaa

SEQ ID NO: 2352797 - RNA, 19 nt, Homo sapiens
  misc_RNA (1)...(19): siRNA sense strand
augaggaggaggaggcaga

SEQ ID NO: 2352798 - RNA, 19 nt, Homo sapiens
  misc_RNA (1)...(19): siRNA sense strand
cuuuggaugccgagagcga

SEQ ID NO: 2352799 - RNA, 19 nt, Homo sapiens
  misc_RNA (1)...(19): siRNA sense strand
uggcaucgucauccagaaa

SEQ ID NO: 2352800 - RNA, 19 nt, Homo sapiens
  misc_RNA (1)...(19): siRNA sense strand
ccaucuaugucuucagcca

SEQ ID NO: 2352801 - RNA, 19 nt, Homo sapiens
  misc_RNA (1)...(19): siRNA sense strand
aggaggaggcagaggugua

SEQ ID NO: 2352802 - RNA, 19 nt, Homo sapiens
  misc_RNA (1)...(19): siRNA sense strand
uguccaacaucuacggcaa

SEQ ID NO: 2352803 - RNA, 19 nt, Homo sapiens
  misc_RNA (1)...(19): siRNA sense strand
cggcuacagcacagagaca

SEQ ID NO: 2352804 - RNA, 19 nt, Homo sapiens
  misc_RNA (1)...(19): siRNA sense strand
acaacgagccuguagccaa

SEQ ID NO: 2352805 - RNA, 19 nt, Homo sapiens
  misc_RNA (1)...(19): siRNA sense strand
augaggaggaggaggcaga

SEQ ID NO: 2352806 - RNA, 19 nt, Homo sapiens
  misc_RNA (1)...(19): siRNA sense strand
cuuuggaugccgagagcga

SEQ ID NO: 2352807 - RNA, 19 nt, Homo sapiens
  misc_RNA (1)...(19): siRNA sense strand
uggcaucgucauccagaaa

SEQ ID NO: 2352808 - RNA, 19 nt, Homo sapiens
  misc_RNA (1)...(19): siRNA sense strand
ccaucuaugucuucagcca

SEQ ID NO: 2352809 - RNA, 19 nt, Homo sapiens
  misc_RNA (1)...(19): siRNA sense strand
uggcaucgucauccagaaa

SEQ ID NO: 2352810 - RNA, 19 nt, Homo sapiens
  misc_RNA (1)...(19): siRNA sense strand
ccaucuaugucuucagcca

SEQ ID NO: 2352811 - RNA, 19 nt, Homo sapiens
  misc_RNA (1)...(19): siRNA sense strand
gaaugaaugacaaaggaga

SEQ ID NO: 2352812 - RNA, 19 nt, Homo sapiens
  misc_RNA (1)...(19): siRNA sense strand
aaugaaugacaaaggagaa

SEQ ID NO: 2352813 - RNA, 19 nt, Homo sapiens
  misc_RNA (1)...(19): siRNA sense strand
aggagaacucuauggauca

SEQ ID NO: 2352814 - RNA, 19 nt, Homo sapiens
  misc_RNA (1)...(19): siRNA sense strand
uuugaagagaacugguaua

SEQ ID NO: 2352815 - RNA, 19 nt, Homo sapiens
  misc_RNA (1)...(19): siRNA sense strand
aaggagaacucuauggauc

SEQ ID NO: 2352816 - RNA, 19 nt, Homo sapiens
  misc_RNA (1)...(19): siRNA sense strand
ccgaaugcaucuuuaggga

SEQ ID NO: 2352817 - RNA, 19 nt, Homo sapiens
  misc_RNA (1)...(19): siRNA sense strand
uaacaaagacggaacucca

SEQ ID NO: 2352818 - RNA, 19 nt, Homo sapiens
  misc_RNA (1)...(19): siRNA sense strand
ucuuggaaugaaugacaaa

SEQ ID NO: 2352819 - RNA, 19 nt, Homo sapiens
  misc_RNA (1)...(19): siRNA sense strand
ggucaguauuagaggugug

SEQ ID NO: 2352820 - RNA, 19 nt, Homo sapiens
  misc_RNA (1)...(19): siRNA sense strand
agagaaacuuacuuccgaa

SEQ ID NO: 2352821 - RNA, 19 nt, Homo sapiens
  misc_RNA (1)...(19): siRNA sense strand
gggaaagaccacugggaca

SEQ ID NO: 2352822 - RNA, 19 nt, Homo sapiens
  misc_RNA (1)...(19): siRNA sense strand
gggaaucucaugaggacga

SEQ ID NO: 2352823 - RNA, 19 nt, Homo sapiens
  misc_RNA (1)...(19): siRNA sense strand
aggcugauguuaauggaga

SEQ ID NO: 2352824 - RNA, 19 nt, Homo sapiens
  misc_RNA (1)...(19): siRNA sense strand
ccugcaucuucuugaggaa

SEQ ID NO: 2352825 - RNA, 19 nt, Homo sapiens
  misc_RNA (1)...(19): siRNA sense strand
cggagauggaacugauuga

SEQ ID NO: 2352826 - RNA, 19 nt, Homo sapiens
  misc_RNA (1)...(19): siRNA sense strand
ugggacaagaugagauuga

SEQ ID NO: 2352827 - RNA, 19 nt, Homo sapiens
  misc_RNA (1)...(19): siRNA sense strand
gguuacaugcccacggaga

SEQ ID NO: 2352828 - RNA, 19 nt, Homo sapiens
  misc_RNA (1)...(19): siRNA sense strand
gggagaucucugagguugu

SEQ ID NO: 2352829 - RNA, 19 nt, Homo sapiens
  misc_RNA (1)...(19): siRNA sense strand
aggaaguccauuagagaaa

SEQ ID NO: 2352830 - RNA, 19 nt, Homo sapiens
  misc_RNA (1)...(19): siRNA sense strand
guguagaugaauuggaaua

SEQ ID NO: 2352831 - RNA, 19 nt, Homo sapiens
  misc_RNA (1)...(19): siRNA sense strand
guaagauguacgagagcaa

SEQ ID NO: 2352832 - RNA, 19 nt, Homo sapiens
  misc_RNA (1)...(19): siRNA sense strand
augaagagcuagagagacu

SEQ ID NO: 2352833 - RNA, 19 nt, Homo sapiens
  misc_RNA (1)...(19): siRNA sense strand
cugaagaaagaguuggaua

SEQ ID NO: 2352834 - RNA, 19 nt, Homo sapiens
  misc_RNA (1)...(19): siRNA sense strand
gaaagauagugaugggcuu

SEQ ID NO: 2352835 - RNA, 19 nt, Homo sapiens
  misc_RNA (1)...(19): siRNA sense strand
ggacaagcguuucaggaga

SEQ ID NO: 2352836 - RNA, 19 nt, Homo sapiens
  misc_RNA (1)...(19): siRNA sense strand
aggagagaguuuggagaua

SEQ ID NO: 2352837 - RNA, 19 nt, Homo sapiens
  misc_RNA (1)...(19): siRNA sense strand
cugcgggacuugagagaca

SEQ ID NO: 2352838 - RNA, 19 nt, Homo sapiens
  misc_RNA (1)...(19): siRNA sense strand
gagaaguaugggugaaaca

SEQ ID NO: 2352839 - RNA, 19 nt, Homo sapiens
  misc_RNA (1)...(19): siRNA sense strand
acaugaagagcuagagaga

SEQ ID NO: 2352840 - RNA, 19 nt, Homo sapiens
  misc_RNA (1)...(19): siRNA sense strand
cauuagagaaagauaguga

SEQ ID NO: 2352841 - RNA, 19 nt, Homo sapiens
  misc_RNA (1)...(19): siRNA sense strand
aguuaucaguguagaugaa

SEQ ID NO: 2352842 - RNA, 19 nt, Homo sapiens
  misc_RNA (1)...(19): siRNA sense strand
agagggacuucaaggacaa

SEQ ID NO: 2352843 - RNA, 19 nt, Homo sapiens
  misc_RNA (1)...(19): siRNA sense strand
aagguauaguagagugcaa

SEQ ID NO: 2352844 - RNA, 19 nt, Homo sapiens
  misc_RNA (1)...(19): siRNA sense strand
acagaaagccaaaguggau

SEQ ID NO: 2352845 - RNA, 19 nt, Homo sapiens
  misc_RNA (1)...(19): siRNA sense strand
gagagggacuucaaggaca

SEQ ID NO: 2352846 - RNA, 19 nt, Homo sapiens
  misc_RNA (1)...(19): siRNA sense strand
ccgaagaggaugaagugga

SEQ ID NO: 2352847 - RNA, 19 nt, Homo sapiens
  misc_RNA (1)...(19): siRNA sense strand
aggagaaguaugggugaaa

SEQ ID NO: 2352848 - RNA, 19 nt, Homo sapiens
  misc_RNA (1)...(19): siRNA sense strand
uagaagauguuuugggaga

SEQ ID NO: 2352849 - RNA, 19 nt, Homo sapiens
  misc_RNA (1)...(19): siRNA sense strand
aguggaaagucugaagaaa

SEQ ID NO: 2352850 - RNA, 19 nt, Homo sapiens
  misc_RNA (1)...(19): siRNA sense strand
ugaaacagaaaguggagau

SEQ ID NO: 2352851 - RNA, 19 nt, Homo sapiens
  misc_RNA (1)...(19): siRNA sense strand
gagaguuuggagauaguaa

SEQ ID NO: 2352852 - RNA, 19 nt, Homo sapiens
  misc_RNA (1)...(19): siRNA sense strand
uggcagaacaccuagaaga

SEQ ID NO: 2352853 - RNA, 19 nt, Homo sapiens
  misc_RNA (1)...(19): siRNA sense strand
acacagaagaagaaccaga

SEQ ID NO: 2352854 - RNA, 19 nt, Homo sapiens
  misc_RNA (1)...(19): siRNA sense strand
ccguuacaccaaagaacaa

SEQ ID NO: 2352855 - RNA, 19 nt, Homo sapiens
  misc_RNA (1)...(19): siRNA sense strand
ucaacaagcuagugagcac

SEQ ID NO: 2352856 - RNA, 19 nt, Homo sapiens
  misc_RNA (1)...(19): siRNA sense strand
gcgauaaggaccugcggga

SEQ ID NO: 2352857 - RNA, 19 nt, Homo sapiens
  misc_RNA (1)...(19): siRNA sense strand
gauaaggaccugcgggacu

SEQ ID NO: 2352858 - RNA, 19 nt, Homo sapiens
  misc_RNA (1)...(19): siRNA sense strand
uggugagcguagaagaaau

SEQ ID NO: 2352859 - RNA, 19 nt, Homo sapiens
  misc_RNA (1)...(19): siRNA sense strand
agaagaucacaaagggaga

SEQ ID NO: 2352860 - RNA, 19 nt, Homo sapiens
  misc_RNA (1)...(19): siRNA sense strand
gccgaaaccuugaaagcca

SEQ ID NO: 2352861 - RNA, 19 nt, Homo sapiens
  misc_RNA (1)...(19): siRNA sense strand
acuagaagaagaucacaaa

SEQ ID NO: 2352862 - RNA, 19 nt, Homo sapiens
  misc_RNA (1)...(19): siRNA sense strand
gcuugaagguugaccagca

SEQ ID NO: 2352863 - RNA, 19 nt, Homo sapiens
  misc_RNA (1)...(19): siRNA sense strand
ggcaacagcgagugaccaa

SEQ ID NO: 2352864 - RNA, 19 nt, Homo sapiens
  misc_RNA (1)...(19): siRNA sense strand
acuucaaggacaagcguuu

SEQ ID NO: 2352865 - RNA, 19 nt, Homo sapiens
  misc_RNA (1)...(19): siRNA sense strand
gggucaaccaguucagaga

SEQ ID NO: 2352866 - RNA, 19 nt, Homo sapiens
  misc_RNA (1)...(19): siRNA sense strand
ugaagaaagaguuggauac

SEQ ID NO: 2352867 - RNA, 19 nt, Homo sapiens
  misc_RNA (1)...(19): siRNA sense strand
gugugaaagaagaugacuu

SEQ ID NO: 2352868 - RNA, 19 nt, Homo sapiens
  misc_RNA (1)...(19): siRNA sense strand
agaccaugcugaaaauaaa

SEQ ID NO: 2352869 - RNA, 19 nt, Homo sapiens
  misc_RNA (1)...(19): siRNA sense strand
caguggaaagucugaagaa

SEQ ID NO: 2352870 - RNA, 19 nt, Homo sapiens
  misc_RNA (1)...(19): siRNA sense strand
guggaaagucugaagaaag

SEQ ID NO: 2352871 - RNA, 19 nt, Homo sapiens
  misc_RNA (1)...(19): siRNA sense strand
agacagagaccgagagagg

SEQ ID NO: 2352872 - RNA, 19 nt, Homo sapiens
  misc_RNA (1)...(19): siRNA sense strand
gcguuucaggagagaguuu

SEQ ID NO: 2352873 - RNA, 19 nt, Homo sapiens
  misc_RNA (1)...(19): siRNA sense strand
caggagagaguuuggagau

SEQ ID NO: 2352874 - RNA, 19 nt, Homo sapiens
  misc_RNA (1)...(19): siRNA sense strand
agaaagccaaaguggauuu

SEQ ID NO: 2352875 - RNA, 19 nt, Homo sapiens
  misc_RNA (1)...(19): siRNA sense strand
cugaagggcuugaagguug

SEQ ID NO: 2352876 - RNA, 19 nt, Homo sapiens
  misc_RNA (1)...(19): siRNA sense strand
gaggauacucagaaggcca

SEQ ID NO: 2352877 - RNA, 19 nt, Homo sapiens
  misc_RNA (1)...(19): siRNA sense strand
ccgccaaaguuaucagugu

SEQ ID NO: 2352878 - RNA, 19 nt, Homo sapiens
  misc_RNA (1)...(19): siRNA sense strand
gcuugguggacguaggauu

SEQ ID NO: 2352879 - RNA, 19 nt, Homo sapiens
  misc_RNA (1)...(19): siRNA sense strand
ggagauaguaagcgugucu

SEQ ID NO: 2352880 - RNA, 19 nt, Homo sapiens
  misc_RNA (1)...(19): siRNA sense strand
acagagaccgagagaggga

SEQ ID NO: 2352881 - RNA, 19 nt, Homo sapiens
  misc_RNA (1)...(19): siRNA sense strand
aggaguggccgaagaggau

SEQ ID NO: 2352882 - RNA, 19 nt, Homo sapiens
  misc_RNA (1)...(19): siRNA sense strand
uuucaguggaggagguaga

SEQ ID NO: 2352883 - RNA, 19 nt, Homo sapiens
  misc_RNA (1)...(19): siRNA sense strand
cuaccuucgcccaagaaua

SEQ ID NO: 2352884 - RNA, 19 nt, Homo sapiens
  misc_RNA (1)...(19): siRNA sense strand
caggguugguacagaggau

SEQ ID NO: 2352885 - RNA, 19 nt, Homo sapiens
  misc_RNA (1)...(19): siRNA sense strand
gggccuugccaaaugguuu

SEQ ID NO: 2352886 - RNA, 19 nt, Homo sapiens
  misc_RNA (1)...(19): siRNA sense strand
agaagaugacuuagauguu

SEQ ID NO: 2352887 - RNA, 19 nt, Homo sapiens
  misc_RNA (1)...(19): siRNA sense strand
caggaaguccauuagagaa

SEQ ID NO: 2352888 - RNA, 19 nt, Homo sapiens
  misc_RNA (1)...(19): siRNA sense strand
gggacuugagagacagaga

SEQ ID NO: 2352889 - RNA, 19 nt, Homo sapiens
  misc_RNA (1)...(19): siRNA sense strand
aagaacaaggcgacggaca

SEQ ID NO: 2352890 - RNA, 19 nt, Homo sapiens
  misc_RNA (1)...(19): siRNA sense strand
cuugagagacagagaccga

SEQ ID NO: 2352891 - RNA, 19 nt, Homo sapiens
  misc_RNA (1)...(19): siRNA sense strand
gagcagaucaggaagccga

SEQ ID NO: 2352892 - RNA, 19 nt, Homo sapiens
  misc_RNA (1)...(19): siRNA sense strand
aguccauuagagaaagaua

SEQ ID NO: 2352893 - RNA, 19 nt, Homo sapiens
  misc_RNA (1)...(19): siRNA sense strand
gaagaagaucacaaaggga

SEQ ID NO: 2352894 - RNA, 19 nt, Homo sapiens
  misc_RNA (1)...(19): siRNA sense strand
ccgaagagacagagacaga

SEQ ID NO: 2352895 - RNA, 19 nt, Homo sapiens
  misc_RNA (1)...(19): siRNA sense strand
cgaccgaggaacugaauau

SEQ ID NO: 2352896 - RNA, 19 nt, Homo sapiens
  misc_RNA (1)...(19): siRNA sense strand
caagaaagaacaaggggaa

SEQ ID NO: 2352897 - RNA, 19 nt, Homo sapiens
  misc_RNA (1)...(19): siRNA sense strand
ucuaaggacuggaagguca

SEQ ID NO: 2352898 - RNA, 19 nt, Homo sapiens
  misc_RNA (1)...(19): siRNA sense strand
agaacaacaccgccagaaa

SEQ ID NO: 2352899 - RNA, 19 nt, Homo sapiens
  misc_RNA (1)...(19): siRNA sense strand
ugacaugggaggagaaacu

SEQ ID NO: 2352900 - RNA, 19 nt, Homo sapiens
  misc_RNA (1)...(19): siRNA sense strand
uggaaaaggaugccaauaa

SEQ ID NO: 2352901 - RNA, 19 nt, Homo sapiens
  misc_RNA (1)...(19): siRNA sense strand
ccgaaggacuugggcaaau

SEQ ID NO: 2352902 - RNA, 19 nt, Homo sapiens
  misc_RNA (1)...(19): siRNA sense strand
agucagaagcuaaguuuua

SEQ ID NO: 2352903 - RNA, 19 nt, Homo sapiens
  misc_RNA (1)...(19): siRNA sense strand
ucaacagguccuucggaaa

SEQ ID NO: 2352904 - RNA, 19 nt, Homo sapiens
  misc_RNA (1)...(19): siRNA sense strand
ggaugagccugcuggggaa

SEQ ID NO: 2352905 - RNA, 19 nt, Homo sapiens
  misc_RNA (1)...(19): siRNA sense strand
ucgauauagaggauggcaa

SEQ ID NO: 2352906 - RNA, 19 nt, Homo sapiens
  misc_RNA (1)...(19): siRNA sense strand
uuguaaggcaggagaaagu

SEQ ID NO: 2352907 - RNA, 19 nt, Homo sapiens
  misc_RNA (1)...(19): siRNA sense strand
guucagugguuuaugcuca

SEQ ID NO: 2352908 - RNA, 19 nt, Homo sapiens
  misc_RNA (1)...(19): siRNA sense strand
uugucuaucugguggaaaa

SEQ ID NO: 2352909 - RNA, 19 nt, Homo sapiens
  misc_RNA (1)...(19): siRNA sense strand
cuggacauguuguguagaa

SEQ ID NO: 2352910 - RNA, 19 nt, Homo sapiens
  misc_RNA (1)...(19): siRNA sense strand
ggcaaaucacaucagauaa

SEQ ID NO: 2352911 - RNA, 19 nt, Homo sapiens
  misc_RNA (1)...(19): siRNA sense strand
cgaucaucucagagcauuu

SEQ ID NO: 2352912 - RNA, 19 nt, Homo sapiens
  misc_RNA (1)...(19): siRNA sense strand
agagaaaauaacagcagaa

SEQ ID NO: 2352913 - RNA, 19 nt, Homo sapiens
  misc_RNA (1)...(19): siRNA sense strand
ucaaguggcuccagaggca

SEQ ID NO: 2352914 - RNA, 19 nt, Homo sapiens
  misc_RNA (1)...(19): siRNA sense strand
gguugcuguugucgauaua

SEQ ID NO: 2352915 - RNA, 19 nt, Homo sapiens
  misc_RNA (1)...(19): siRNA sense strand
gcaugaaggauguggaguc

SEQ ID NO: 2352916 - RNA, 19 nt, Homo sapiens
  misc_RNA (1)...(19): siRNA sense strand
ccucaaaaguucucagcca

SEQ ID NO: 2352917 - RNA, 19 nt, Homo sapiens
  misc_RNA (1)...(19): siRNA sense strand
cagcagaacaugagaccac

SEQ ID NO: 2352918 - RNA, 19 nt, Homo sapiens
  misc_RNA (1)...(19): siRNA sense strand
ccaauuagucaaagcgaug

SEQ ID NO: 2352919 - RNA, 19 nt, Homo sapiens
  misc_RNA (1)...(19): siRNA sense strand
ccauggugccgaaggacuu

SEQ ID NO: 2352920 - RNA, 19 nt, Homo sapiens
  misc_RNA (1)...(19): siRNA sense strand
ucaagcagucagaagcuaa

SEQ ID NO: 2352921 - RNA, 19 nt, Homo sapiens
  misc_RNA (1)...(19): siRNA sense strand
uauacaacuuucagggagu

SEQ ID NO: 2352922 - RNA, 19 nt, Homo sapiens
  misc_RNA (1)...(19): siRNA sense strand
cgauauagaggauggcaag

SEQ ID NO: 2352923 - RNA, 19 nt, Homo sapiens
  misc_RNA (1)...(19): siRNA sense strand
gaguauuaagagccgacaa

SEQ ID NO: 2352924 - RNA, 19 nt, Homo sapiens
  misc_RNA (1)...(19): siRNA sense strand
agccaaaaccagugauaga

SEQ ID NO: 2352925 - RNA, 19 nt, Homo sapiens
  misc_RNA (1)...(19): siRNA sense strand
auugacaacuauuggcuau

SEQ ID NO: 2352926 - RNA, 19 nt, Homo sapiens
  misc_RNA (1)...(19): siRNA sense strand
aagcaacacaggugccaau

SEQ ID NO: 2352927 - RNA, 19 nt, Homo sapiens
  misc_RNA (1)...(19): siRNA sense strand
gagcgagugcgcauggcua

SEQ ID NO: 2352928 - RNA, 19 nt, Homo sapiens
  misc_RNA (1)...(19): siRNA sense strand
ccaaagugcagaagagcug

SEQ ID NO: 2352929 - RNA, 19 nt, Homo sapiens
  misc_RNA (1)...(19): siRNA sense strand
aaauaacagcagaacauga

SEQ ID NO: 2352930 - RNA, 19 nt, Homo sapiens
  misc_RNA (1)...(19): siRNA sense strand
cuaucaaagcccuguggau

SEQ ID NO: 2352931 - RNA, 19 nt, Homo sapiens
  misc_RNA (1)...(19): siRNA sense strand
uggcucagguuuugcauua

SEQ ID NO: 2352932 - RNA, 19 nt, Homo sapiens
  misc_RNA (1)...(19): siRNA sense strand
ggaaaagggcaaaucacau

SEQ ID NO: 2352933 - RNA, 19 nt, Homo sapiens
  misc_RNA (1)...(19): siRNA sense strand
agaagagccgagagaaaau

SEQ ID NO: 2352934 - RNA, 19 nt, Homo sapiens
  misc_RNA (1)...(19): siRNA sense strand
cagaaacacuuugagaaaa

SEQ ID NO: 2352935 - RNA, 19 nt, Homo sapiens
  misc_RNA (1)...(19): siRNA sense strand
acaauauucugcuggucau

SEQ ID NO: 2352936 - RNA, 19 nt, Homo sapiens
  misc_RNA (1)...(19): siRNA sense strand
gccaauuagucaaagcgau

SEQ ID NO: 2352937 - RNA, 19 nt, Homo sapiens
  misc_RNA (1)...(19): siRNA sense strand
gcugaauagcuuggcgaau

SEQ ID NO: 2352938 - RNA, 19 nt, Homo sapiens
  misc_RNA (1)...(19): siRNA sense strand
ccaaagaagcuguggagga

SEQ ID NO: 2352939 - RNA, 19 nt, Homo sapiens
  misc_RNA (1)...(19): siRNA sense strand
gguuaaaguaucugcacca

SEQ ID NO: 2352940 - RNA, 19 nt, Homo sapiens
  misc_RNA (1)...(19): siRNA sense strand
cugacaaggcagacauauu

SEQ ID NO: 2352941 - RNA, 19 nt, Homo sapiens
  misc_RNA (1)...(19): siRNA sense strand
agaaacugcuucauggaga

SEQ ID NO: 2352942 - RNA, 19 nt, Homo sapiens
  misc_RNA (1)...(19): siRNA sense strand
uuucaagacaccaagcaaa

SEQ ID NO: 2352943 - RNA, 19 nt, Homo sapiens
  misc_RNA (1)...(19): siRNA sense strand
gaagaacgauauaaagcca

SEQ ID NO: 2352944 - RNA, 19 nt, Homo sapiens
  misc_RNA (1)...(19): siRNA sense strand
acugcuucauggagacaua

SEQ ID NO: 2352945 - RNA, 19 nt, Homo sapiens
  misc_RNA (1)...(19): siRNA sense strand
aguaauuucaagacaccaa

SEQ ID NO: 2352946 - RNA, 19 nt, Homo sapiens
  misc_RNA (1)...(19): siRNA sense strand
guguaucaaaagagacuaa

SEQ ID NO: 2352947 - RNA, 19 nt, Homo sapiens
  misc_RNA (1)...(19): siRNA sense strand
uguuguaauuaaaggcgau

SEQ ID NO: 2352948 - RNA, 19 nt, Homo sapiens
  misc_RNA (1)...(19): siRNA sense strand
auauggaagaacuggauga

SEQ ID NO: 2352949 - RNA, 19 nt, Homo sapiens
  misc_RNA (1)...(19): siRNA sense strand
cggaaaccgauguggaaga

SEQ ID NO: 2352950 - RNA, 19 nt, Homo sapiens
  misc_RNA (1)...(19): siRNA sense strand
cggaaaccgauguggaaga

SEQ ID NO: 2352951 - RNA, 19 nt, Homo sapiens
  misc_RNA (1)...(19): siRNA sense strand
aggagaaagugcagagcuu

SEQ ID NO: 2352952 - RNA, 19 nt, Homo sapiens
  misc_RNA (1)...(19): siRNA sense strand
gagaauaacucuuuccuca

SEQ ID NO: 2352953 - RNA, 19 nt, Homo sapiens
  misc_RNA (1)...(19): siRNA sense strand
uggcaacaagggacagaaa

SEQ ID NO: 2352954 - RNA, 19 nt, Homo sapiens
  misc_RNA (1)...(19): siRNA sense strand
cuucgugagauuacagaaa

SEQ ID NO: 2352955 - RNA, 19 nt, Homo sapiens
  misc_RNA (1)...(19): siRNA sense strand
cagugauuauggaagaaau

SEQ ID NO: 2352956 - RNA, 19 nt, Homo sapiens
  misc_RNA (1)...(19): siRNA sense strand
auggaaacaucucgccaaa

SEQ ID NO: 2352957 - RNA, 19 nt, Homo sapiens
  misc_RNA (1)...(19): siRNA sense strand
acggauuggcugaaggaga

SEQ ID NO: 2352958 - RNA, 19 nt, Homo sapiens
  misc_RNA (1)...(19): siRNA sense strand
gccaagaaggacacggauu

SEQ ID NO: 2352959 - RNA, 19 nt, Homo sapiens
  misc_RNA (1)...(19): siRNA sense strand
acgacacccuggaggauau

SEQ ID NO: 2352960 - RNA, 19 nt, Homo sapiens
  misc_RNA (1)...(19): siRNA sense strand
ugaauaauacccuggccaa

SEQ ID NO: 2352961 - RNA, 19 nt, Homo sapiens
  misc_RNA (1)...(19): siRNA sense strand
gggacagaaaggagagaag

SEQ ID NO: 2352962 - RNA, 19 nt, Homo sapiens
  misc_RNA (1)...(19): siRNA sense strand
caacaagauuugaugaggu

SEQ ID NO: 2352963 - RNA, 19 nt, Homo sapiens
  misc_RNA (1)...(19): siRNA sense strand
acacaauguaccaaaugua

SEQ ID NO: 2352964 - RNA, 19 nt, Homo sapiens
  misc_RNA (1)...(19): siRNA sense strand
caguagccauuuugggaua

SEQ ID NO: 2352965 - RNA, 19 nt, Homo sapiens
  misc_RNA (1)...(19): siRNA sense strand
guggacaggcagagucaau

SEQ ID NO: 2352966 - RNA, 19 nt, Homo sapiens
  misc_RNA (1)...(19): siRNA sense strand
cagaggaggaggaggugca

SEQ ID NO: 2352967 - RNA, 19 nt, Homo sapiens
  misc_RNA (1)...(19): siRNA sense strand
gcagagaauagaacagcca

SEQ ID NO: 2352968 - RNA, 19 nt, Homo sapiens
  misc_RNA (1)...(19): siRNA sense strand
ucgcagaggaggaggaggu

SEQ ID NO: 2352969 - RNA, 19 nt, Homo sapiens
  misc_RNA (1)...(19): siRNA sense strand
aggaccacuugcacagaua

SEQ ID NO: 2352970 - RNA, 19 nt, Homo sapiens
  misc_RNA (1)...(19): siRNA sense strand
ccaagaggugacagaggau

SEQ ID NO: 2352971 - RNA, 19 nt, Homo sapiens
  misc_RNA (1)...(19): siRNA sense strand
cuaaaugaagucaggacca

SEQ ID NO: 2352972 - RNA, 19 nt, Homo sapiens
  misc_RNA (1)...(19): siRNA sense strand
gagcagaaccugaaagacc

SEQ ID NO: 2352973 - RNA, 19 nt, Homo sapiens
  misc_RNA (1)...(19): siRNA sense strand
ggguccaagaggugacaga

SEQ ID NO: 2352974 - RNA, 19 nt, Homo sapiens
  misc_RNA (1)...(19): siRNA sense strand
gggaagaaagcuaucagca

SEQ ID NO: 2352975 - RNA, 19 nt, Homo sapiens
  misc_RNA (1)...(19): siRNA sense strand
gcguauaauggcuauguca

SEQ ID NO: 2352976 - RNA, 19 nt, Homo sapiens
  misc_RNA (1)...(19): siRNA sense strand
aggaacacaauguaccaaa

SEQ ID NO: 2352977 - RNA, 19 nt, Homo sapiens
  misc_RNA (1)...(19): siRNA sense strand
uuacaagcgguuugguauu

SEQ ID NO: 2352978 - RNA, 19 nt, Homo sapiens
  misc_RNA (1)...(19): siRNA sense strand
caacuggcaacaagggaca

SEQ ID NO: 2352979 - RNA, 19 nt, Homo sapiens
  misc_RNA (1)...(19): siRNA sense strand
ggaagaaagcuaucagcac

SEQ ID NO: 2352980 - RNA, 19 nt, Homo sapiens
  misc_RNA (1)...(19): siRNA sense strand
agggcaaucugcagaacca

SEQ ID NO: 2352981 - RNA, 19 nt, Homo sapiens
  misc_RNA (1)...(19): siRNA sense strand
caagauuugaugaggucga

SEQ ID NO: 2352982 - RNA, 19 nt, Homo sapiens
  misc_RNA (1)...(19): siRNA sense strand
ggcagagucaauugaaaga

SEQ ID NO: 2352983 - RNA, 19 nt, Homo sapiens
  misc_RNA (1)...(19): siRNA sense strand
uugugaacaucauuagcaa

SEQ ID NO: 2352984 - RNA, 19 nt, Homo sapiens
  misc_RNA (1)...(19): siRNA sense strand
aggagaaagugcagagcuu

SEQ ID NO: 2352985 - RNA, 19 nt, Homo sapiens
  misc_RNA (1)...(19): siRNA sense strand
gagaauaacucuuuccuca

SEQ ID NO: 2352986 - RNA, 19 nt, Homo sapiens
  misc_RNA (1)...(19): siRNA sense strand
uggcaacaagggacagaaa

SEQ ID NO: 2352987 - RNA, 19 nt, Homo sapiens
  misc_RNA (1)...(19): siRNA sense strand
cuucgugagauuacagaaa

SEQ ID NO: 2352988 - RNA, 19 nt, Homo sapiens
  misc_RNA (1)...(19): siRNA sense strand
cagugauuauggaagaaau

SEQ ID NO: 2352989 - RNA, 19 nt, Homo sapiens
  misc_RNA (1)...(19): siRNA sense strand
auggaaacaucucgccaaa

SEQ ID NO: 2352990 - RNA, 19 nt, Homo sapiens
  misc_RNA (1)...(19): siRNA sense strand
acggauuggcugaaggaga

SEQ ID NO: 2352991 - RNA, 19 nt, Homo sapiens
  misc_RNA (1)...(19): siRNA sense strand
gccaagaaggacacggauu

SEQ ID NO: 2352992 - RNA, 19 nt, Homo sapiens
  misc_RNA (1)...(19): siRNA sense strand
acgacacccuggaggauau

SEQ ID NO: 2352993 - RNA, 19 nt, Homo sapiens
  misc_RNA (1)...(19): siRNA sense strand
ugaauaauacccuggccaa

SEQ ID NO: 2352994 - RNA, 19 nt, Homo sapiens
  misc_RNA (1)...(19): siRNA sense strand
gggacagaaaggagagaag

SEQ ID NO: 2352995 - RNA, 19 nt, Homo sapiens
  misc_RNA (1)...(19): siRNA sense strand
aggaacagcaauggauaaa

SEQ ID NO: 2352996 - RNA, 19 nt, Homo sapiens
  misc_RNA (1)...(19): siRNA sense strand
caacaagauuugaugaggu

SEQ ID NO: 2352997 - RNA, 19 nt, Homo sapiens
  misc_RNA (1)...(19): siRNA sense strand
acacaauguaccaaaugua

SEQ ID NO: 2352998 - RNA, 19 nt, Homo sapiens
  misc_RNA (1)...(19): siRNA sense strand
caguagccauuuugggaua

SEQ ID NO: 2352999 - RNA, 19 nt, Homo sapiens
  misc_RNA (1)...(19): siRNA sense strand
guggacaggcagagucaau

SEQ ID NO: 2353000 - RNA, 19 nt, Homo sapiens
  misc_RNA (1)...(19): siRNA sense strand
agaggaacagcaauggaua

SEQ ID NO: 2353001 - RNA, 19 nt, Homo sapiens
  misc_RNA (1)...(19): siRNA sense strand
cagaggaggaggaggugca

SEQ ID NO: 2353002 - RNA, 19 nt, Homo sapiens
  misc_RNA (1)...(19): siRNA sense strand
gcagagaauagaacagcca

SEQ ID NO: 2353003 - RNA, 19 nt, Homo sapiens
  misc_RNA (1)...(19): siRNA sense strand
ucgcagaggaggaggaggu

SEQ ID NO: 2353004 - RNA, 19 nt, Homo sapiens
  misc_RNA (1)...(19): siRNA sense strand
aggaccacuugcacagaua

SEQ ID NO: 2353005 - RNA, 19 nt, Homo sapiens
  misc_RNA (1)...(19): siRNA sense strand
ccaagaggugacagaggau

SEQ ID NO: 2353006 - RNA, 19 nt, Homo sapiens
  misc_RNA (1)...(19): siRNA sense strand
cuaaaugaagucaggacca

SEQ ID NO: 2353007 - RNA, 19 nt, Homo sapiens
  misc_RNA (1)...(19): siRNA sense strand
gagcagaaccugaaagacc

SEQ ID NO: 2353008 - RNA, 19 nt, Homo sapiens
  misc_RNA (1)...(19): siRNA sense strand
ggguccaagaggugacaga

SEQ ID NO: 2353009 - RNA, 19 nt, Homo sapiens
  misc_RNA (1)...(19): siRNA sense strand
gggaagaaagcuaucagca

SEQ ID NO: 2353010 - RNA, 19 nt, Homo sapiens
  misc_RNA (1)...(19): siRNA sense strand
gcguauaauggcuauguca

SEQ ID NO: 2353011 - RNA, 19 nt, Homo sapiens
  misc_RNA (1)...(19): siRNA sense strand
cagaugguagggagagaga

SEQ ID NO: 2353012 - RNA, 19 nt, Homo sapiens
  misc_RNA (1)...(19): siRNA sense strand
aggaacacaauguaccaaa

SEQ ID NO: 2353013 - RNA, 19 nt, Homo sapiens
  misc_RNA (1)...(19): siRNA sense strand
uuacaagcgguuugguauu

SEQ ID NO: 2353014 - RNA, 19 nt, Homo sapiens
  misc_RNA (1)...(19): siRNA sense strand
caacuggcaacaagggaca

SEQ ID NO: 2353015 - RNA, 19 nt, Homo sapiens
  misc_RNA (1)...(19): siRNA sense strand
ggaagaaagcuaucagcac

SEQ ID NO: 2353016 - RNA, 19 nt, Homo sapiens
  misc_RNA (1)...(19): siRNA sense strand
ggaaguggcuggaugggac

SEQ ID NO: 2353017 - RNA, 19 nt, Homo sapiens
  misc_RNA (1)...(19): siRNA sense strand
agggcaaucugcagaacca

SEQ ID NO: 2353018 - RNA, 19 nt, Homo sapiens
  misc_RNA (1)...(19): siRNA sense strand
caagauuugaugaggucga

SEQ ID NO: 2353019 - RNA, 19 nt, Homo sapiens
  misc_RNA (1)...(19): siRNA sense strand
cacuagagaggaacagcaa

SEQ ID NO: 2353020 - RNA, 19 nt, Homo sapiens
  misc_RNA (1)...(19): siRNA sense strand
ggcagagucaauugaaaga

SEQ ID NO: 2353021 - RNA, 19 nt, Homo sapiens
  misc_RNA (1)...(19): siRNA sense strand
uugugaacaucauuagcaa

SEQ ID NO: 2353022 - RNA, 19 nt, Homo sapiens
  misc_RNA (1)...(19): siRNA sense strand
ugguagggagagagagcca

SEQ ID NO: 2353023 - RNA, 19 nt, Homo sapiens
  misc_RNA (1)...(19): siRNA sense strand
ccaugaucguggaggagau

SEQ ID NO: 2353024 - RNA, 19 nt, Homo sapiens
  misc_RNA (1)...(19): siRNA sense strand
aagaggaccuggcggguga

SEQ ID NO: 2353025 - RNA, 19 nt, Homo sapiens
  misc_RNA (1)...(19): siRNA sense strand
gccagaacucagagagcau

SEQ ID NO: 2353026 - RNA, 19 nt, Homo sapiens
  misc_RNA (1)...(19): siRNA sense strand
cgggugacgacgaggacau

SEQ ID NO: 2353027 - RNA, 19 nt, Homo sapiens
  misc_RNA (1)...(19): siRNA sense strand
ugaucguggaggagaugaa

SEQ ID NO: 2353028 - RNA, 19 nt, Homo sapiens
  misc_RNA (1)...(19): siRNA sense strand
uggaggagaugaaggcagu

SEQ ID NO: 2353029 - RNA, 19 nt, Homo sapiens
  misc_RNA (1)...(19): siRNA sense strand
agaugaaggcaguggacac

SEQ ID NO: 2353030 - RNA, 19 nt, Homo sapiens
  misc_RNA (1)...(19): siRNA sense strand
uggagaaauccuucgcaau

SEQ ID NO: 2353031 - RNA, 19 nt, Homo sapiens
  misc_RNA (1)...(19): siRNA sense strand
auccgaaagcccugaacaa

SEQ ID NO: 2353032 - RNA, 19 nt, Homo sapiens
  misc_RNA (1)...(19): siRNA sense strand
ccgaaagcccugaacaacu

SEQ ID NO: 2353033 - RNA, 19 nt, Homo sapiens
  misc_RNA (1)...(19): siRNA sense strand
agacuggagaggcggucaa

SEQ ID NO: 2353034 - RNA, 19 nt, Homo sapiens
  misc_RNA (1)...(19): siRNA sense strand
auggagaaauccuucgcaa

SEQ ID NO: 2353035 - RNA, 19 nt, Homo sapiens
  misc_RNA (1)...(19): siRNA sense strand
agacagacgaggagacccu

SEQ ID NO: 2353036 - RNA, 19 nt, Homo sapiens
  misc_RNA (1)...(19): siRNA sense strand
ccaugaucguggaggagau

SEQ ID NO: 2353037 - RNA, 19 nt, Homo sapiens
  misc_RNA (1)...(19): siRNA sense strand
aagaggaccuggcggguga

SEQ ID NO: 2353038 - RNA, 19 nt, Homo sapiens
  misc_RNA (1)...(19): siRNA sense strand
gccagaacucagagagcau

SEQ ID NO: 2353039 - RNA, 19 nt, Homo sapiens
  misc_RNA (1)...(19): siRNA sense strand
cgggugacgacgaggacau

SEQ ID NO: 2353040 - RNA, 19 nt, Homo sapiens
  misc_RNA (1)...(19): siRNA sense strand
ugaucguggaggagaugaa

SEQ ID NO: 2353041 - RNA, 19 nt, Homo sapiens
  misc_RNA (1)...(19): siRNA sense strand
uggaggagaugaaggcagu

SEQ ID NO: 2353042 - RNA, 19 nt, Homo sapiens
  misc_RNA (1)...(19): siRNA sense strand
agaugaaggcaguggacac

SEQ ID NO: 2353043 - RNA, 19 nt, Homo sapiens
  misc_RNA (1)...(19): siRNA sense strand
uggagaaauccuucgcaau

SEQ ID NO: 2353044 - RNA, 19 nt, Homo sapiens
  misc_RNA (1)...(19): siRNA sense strand
auccgaaagcccugaacaa

SEQ ID NO: 2353045 - RNA, 19 nt, Homo sapiens
  misc_RNA (1)...(19): siRNA sense strand
ccgaaagcccugaacaacu

SEQ ID NO: 2353046 - RNA, 19 nt, Homo sapiens
  misc_RNA (1)...(19): siRNA sense strand
agacuggagaggcggucaa

SEQ ID NO: 2353047 - RNA, 19 nt, Homo sapiens
  misc_RNA (1)...(19): siRNA sense strand
auggagaaauccuucgcaa

SEQ ID NO: 2353048 - RNA, 19 nt, Homo sapiens
  misc_RNA (1)...(19): siRNA sense strand
agacagacgaggagacccu

SEQ ID NO: 2353049 - RNA, 19 nt, Homo sapiens
  misc_RNA (1)...(19): siRNA sense strand
cgcccugaguccagauuau

SEQ ID NO: 2353050 - RNA, 19 nt, Homo sapiens
  misc_RNA (1)...(19): siRNA sense strand
gcagagagcuacagggaga

SEQ ID NO: 2353051 - RNA, 19 nt, Homo sapiens
  misc_RNA (1)...(19): siRNA sense strand
cgagaaaucuugaggcaca

SEQ ID NO: 2353052 - RNA, 19 nt, Homo sapiens
  misc_RNA (1)...(19): siRNA sense strand
agcacgaaacggagagaua

SEQ ID NO: 2353053 - RNA, 19 nt, Homo sapiens
  misc_RNA (1)...(19): siRNA sense strand
cuguauucgucaagccaaa

SEQ ID NO: 2353054 - RNA, 19 nt, Homo sapiens
  misc_RNA (1)...(19): siRNA sense strand
ccauaaugacagaacaaga

SEQ ID NO: 2353055 - RNA, 19 nt, Homo sapiens
  misc_RNA (1)...(19): siRNA sense strand
agcaacaaugagagaauua

SEQ ID NO: 2353056 - RNA, 19 nt, Homo sapiens
  misc_RNA (1)...(19): siRNA sense strand
ccaaggaaaucaaacguca

SEQ ID NO: 2353057 - RNA, 19 nt, Homo sapiens
  misc_RNA (1)...(19): siRNA sense strand
ucgucaagccaaagaaaca

SEQ ID NO: 2353058 - RNA, 19 nt, Homo sapiens
  misc_RNA (1)...(19): siRNA sense strand
ucagcaacaaugagagaau

SEQ ID NO: 2353059 - RNA, 19 nt, Homo sapiens
  misc_RNA (1)...(19): siRNA sense strand
gaauuguggcagaaaucaa

SEQ ID NO: 2353060 - RNA, 19 nt, Homo sapiens
  misc_RNA (1)...(19): siRNA sense strand
cgaaacggagagauagcaa

SEQ ID NO: 2353061 - RNA, 19 nt, Homo sapiens
  misc_RNA (1)...(19): siRNA sense strand
cuccauaaugacagaacaa

SEQ ID NO: 2353062 - RNA, 19 nt, Homo sapiens
  misc_RNA (1)...(19): siRNA sense strand
gggaauuguggcagaaauc

SEQ ID NO: 2353063 - RNA, 19 nt, Homo sapiens
  misc_RNA (1)...(19): siRNA sense strand
caaucaaguagccgccaaa

SEQ ID NO: 2353064 - RNA, 19 nt, Homo sapiens
  misc_RNA (1)...(19): siRNA sense strand
gagcagagagcuacaggga

SEQ ID NO: 2353065 - RNA, 19 nt, Homo sapiens
  misc_RNA (1)...(19): siRNA sense strand
gcaaucaaguagccgccaa

SEQ ID NO: 2353066 - RNA, 19 nt, Homo sapiens
  misc_RNA (1)...(19): siRNA sense strand
agggaauuguggcagaaau

SEQ ID NO: 2353067 - RNA, 19 nt, Homo sapiens
  misc_RNA (1)...(19): siRNA sense strand
cuuggaagaaggccagaaa

SEQ ID NO: 2353068 - RNA, 19 nt, Homo sapiens
  misc_RNA (1)...(19): siRNA sense strand
gcuacaagccaaugacacu

SEQ ID NO: 2353069 - RNA, 19 nt, Homo sapiens
  misc_RNA (1)...(19): siRNA sense strand
aacaaacagcaguggcuua

SEQ ID NO: 2353070 - RNA, 19 nt, Homo sapiens
  misc_RNA (1)...(19): siRNA sense strand
caccgggagcagagagcua

SEQ ID NO: 2353071 - RNA, 19 nt, Homo sapiens
  misc_RNA (1)...(19): siRNA sense strand
cggugaaaguaacgucuga

SEQ ID NO: 2353072 - RNA, 19 nt, Homo sapiens
  misc_RNA (1)...(19): siRNA sense strand
agaaagacucccugaucga

SEQ ID NO: 2353073 - RNA, 19 nt, Homo sapiens
  misc_RNA (1)...(19): siRNA sense strand
ugaaagaccuccugcugga

SEQ ID NO: 2353074 - RNA, 19 nt, Homo sapiens
  misc_RNA (1)...(19): siRNA sense strand
gcuuaacuguauucgucaa

SEQ ID NO: 2353075 - RNA, 19 nt, Homo sapiens
  misc_RNA (1)...(19): siRNA sense strand
ccuaguaauaaacggguca

SEQ ID NO: 2353076 - RNA, 19 nt, Homo sapiens
  misc_RNA (1)...(19): siRNA sense strand
cagcaggcacggugaaagu

SEQ ID NO: 2353077 - RNA, 19 nt, Homo sapiens
  misc_RNA (1)...(19): siRNA sense strand
ccaaagcucugcuggacca

SEQ ID NO: 2353078 - RNA, 19 nt, Homo sapiens
  misc_RNA (1)...(19): siRNA sense strand
ccaaucggacagugaguca

SEQ ID NO: 2353079 - RNA, 19 nt, Homo sapiens
  misc_RNA (1)...(19): siRNA sense strand
acgcugaggagccuaguaa

SEQ ID NO: 2353080 - RNA, 19 nt, Homo sapiens
  misc_RNA (1)...(19): siRNA sense strand
agagcuacagggagaaaca

SEQ ID NO: 2353081 - RNA, 19 nt, Homo sapiens
  misc_RNA (1)...(19): siRNA sense strand
uaugauagcuacugcagca

SEQ ID NO: 2353082 - RNA, 19 nt, Homo sapiens
  misc_RNA (1)...(19): siRNA sense strand
aagacuugauagaagacuu

SEQ ID NO: 2353083 - RNA, 19 nt, Homo sapiens
  misc_RNA (1)...(19): siRNA sense strand
acuuggaagaagcuauaaa

SEQ ID NO: 2353084 - RNA, 19 nt, Homo sapiens
  misc_RNA (1)...(19): siRNA sense strand
gcuaccagcuguaccguca

SEQ ID NO: 2353085 - RNA, 19 nt, Homo sapiens
  misc_RNA (1)...(19): siRNA sense strand
gcuacagggagaaacaaaa

SEQ ID NO: 2353086 - RNA, 19 nt, Homo sapiens
  misc_RNA (1)...(19): siRNA sense strand
ugguagacgaagaggaaga

SEQ ID NO: 2353087 - RNA, 19 nt, Homo sapiens
  misc_RNA (1)...(19): siRNA sense strand
acgauaacuuacagagaca

SEQ ID NO: 2353088 - RNA, 19 nt, Homo sapiens
  misc_RNA (1)...(19): siRNA sense strand
ggaggaagacagagccgaa

SEQ ID NO: 2353089 - RNA, 19 nt, Homo sapiens
  misc_RNA (1)...(19): siRNA sense strand
caggagaaugaaauggaaa

SEQ ID NO: 2353090 - RNA, 19 nt, Homo sapiens
  misc_RNA (1)...(19): siRNA sense strand
aggaaaacaacaaggacaa

SEQ ID NO: 2353091 - RNA, 19 nt, Homo sapiens
  misc_RNA (1)...(19): siRNA sense strand
aggagaaugaaauggaaaa

SEQ ID NO: 2353092 - RNA, 19 nt, Homo sapiens
  misc_RNA (1)...(19): siRNA sense strand
uagacgaagaggaagacaa

SEQ ID NO: 2353093 - RNA, 19 nt, Homo sapiens
  misc_RNA (1)...(19): siRNA sense strand
uugaagaaggacagagaaa

SEQ ID NO: 2353094 - RNA, 19 nt, Homo sapiens
  misc_RNA (1)...(19): siRNA sense strand
uggcagaggagcuggguuu

SEQ ID NO: 2353095 - RNA, 19 nt, Homo sapiens
  misc_RNA (1)...(19): siRNA sense strand
guauaauagcauuggcaga

SEQ ID NO: 2353096 - RNA, 19 nt, Homo sapiens
  misc_RNA (1)...(19): siRNA sense strand
gagcaguaugaguggauau

SEQ ID NO: 2353097 - RNA, 19 nt, Homo sapiens
  misc_RNA (1)...(19): siRNA sense strand
ccucgaaagcucauggcua

SEQ ID NO: 2353098 - RNA, 19 nt, Homo sapiens
  misc_RNA (1)...(19): siRNA sense strand
acagagaaaccaugggaca

SEQ ID NO: 2353099 - RNA, 19 nt, Homo sapiens
  misc_RNA (1)...(19): siRNA sense strand
ccgaugaagugaugcgcuu

SEQ ID NO: 2353100 - RNA, 19 nt, Homo sapiens
  misc_RNA (1)...(19): siRNA sense strand
agaaacacaaggaaagaau

SEQ ID NO: 2353101 - RNA, 19 nt, Homo sapiens
  misc_RNA (1)...(19): siRNA sense strand
uggcuauaaugauggauau

SEQ ID NO: 2353102 - RNA, 19 nt, Homo sapiens
  misc_RNA (1)...(19): siRNA sense strand
caagaguagccgagcugaa

SEQ ID NO: 2353103 - RNA, 19 nt, Homo sapiens
  misc_RNA (1)...(19): siRNA sense strand
ugccuaugguggaggguau

SEQ ID NO: 2353104 - RNA, 19 nt, Homo sapiens
  misc_RNA (1)...(19): siRNA sense strand
uggcaaaagacaaagcuaa

SEQ ID NO: 2353105 - RNA, 19 nt, Homo sapiens
  misc_RNA (1)...(19): siRNA sense strand
ccaaaugaugggagggaug

SEQ ID NO: 2353106 - RNA, 19 nt, Homo sapiens
  misc_RNA (1)...(19): siRNA sense strand
agaauagggcacagguaca

SEQ ID NO: 2353107 - RNA, 19 nt, Homo sapiens
  misc_RNA (1)...(19): siRNA sense strand
cuuugaagaaggacagaga

SEQ ID NO: 2353108 - RNA, 19 nt, Homo sapiens
  misc_RNA (1)...(19): siRNA sense strand
aggaagugaaauuggcuuu

SEQ ID NO: 2353109 - RNA, 19 nt, Homo sapiens
  misc_RNA (1)...(19): siRNA sense strand
guggcuauaaugauggaua

SEQ ID NO: 2353110 - RNA, 19 nt, Homo sapiens
  misc_RNA (1)...(19): siRNA sense strand
aaaccaugggacacagaua

SEQ ID NO: 2353111 - RNA, 19 nt, Homo sapiens
  misc_RNA (1)...(19): siRNA sense strand
gggagggguucguggugaa

SEQ ID NO: 2353112 - RNA, 19 nt, Homo sapiens
  misc_RNA (1)...(19): siRNA sense strand
ggcaaaagacaaagcuaau

SEQ ID NO: 2353113 - RNA, 19 nt, Homo sapiens
  misc_RNA (1)...(19): siRNA sense strand
gaccaaguucugcaggaaa

SEQ ID NO: 2353114 - RNA, 19 nt, Homo sapiens
  misc_RNA (1)...(19): siRNA sense strand
gcuuugggucugauagauu

SEQ ID NO: 2353115 - RNA, 19 nt, Homo sapiens
  misc_RNA (1)...(19): siRNA sense strand
gugcuuacgaucacagcua

SEQ ID NO: 2353116 - RNA, 19 nt, Homo sapiens
  misc_RNA (1)...(19): siRNA sense strand
cggccaggucccuaugaua

SEQ ID NO: 2353117 - RNA, 19 nt, Homo sapiens
  misc_RNA (1)...(19): siRNA sense strand
uggugaagcauuuguugaa

SEQ ID NO: 2353118 - RNA, 19 nt, Homo sapiens
  misc_RNA (1)...(19): siRNA sense strand
cagagaaggcagaccaagu

SEQ ID NO: 2353119 - RNA, 19 nt, Homo sapiens
  misc_RNA (1)...(19): siRNA sense strand
aaucugaagaggaagugaa

SEQ ID NO: 2353120 - RNA, 19 nt, Homo sapiens
  misc_RNA (1)...(19): siRNA sense strand
guagcaaggaagagauugu

SEQ ID NO: 2353121 - RNA, 19 nt, Homo sapiens
  misc_RNA (1)...(19): siRNA sense strand
cuuaaagaaacacaaggaa

SEQ ID NO: 2353122 - RNA, 19 nt, Homo sapiens
  misc_RNA (1)...(19): siRNA sense strand
cagaguuaccggugaggca

SEQ ID NO: 2353123 - RNA, 19 nt, Homo sapiens
  misc_RNA (1)...(19): siRNA sense strand
ugguuauggaggugguuau

SEQ ID NO: 2353124 - RNA, 19 nt, Homo sapiens
  misc_RNA (1)...(19): siRNA sense strand
caggaaaacuccagugacu

SEQ ID NO: 2353125 - RNA, 19 nt, Homo sapiens
  misc_RNA (1)...(19): siRNA sense strand
gugaaauuggcuuugaaga

SEQ ID NO: 2353126 - RNA, 19 nt, Homo sapiens
  misc_RNA (1)...(19): siRNA sense strand
accaaguucugcaggaaaa

SEQ ID NO: 2353127 - RNA, 19 nt, Homo sapiens
  misc_RNA (1)...(19): siRNA sense strand
uggaggguauggaggcuau

SEQ ID NO: 2353128 - RNA, 19 nt, Homo sapiens
  misc_RNA (1)...(19): siRNA sense strand
guugaaauggauugggugu

SEQ ID NO: 2353129 - RNA, 19 nt, Homo sapiens
  misc_RNA (1)...(19): siRNA sense strand
cuuaaauucuacugcagga

SEQ ID NO: 2353130 - RNA, 19 nt, Homo sapiens
  misc_RNA (1)...(19): siRNA sense strand
gaagaaggacagagaaacc

SEQ ID NO: 2353131 - RNA, 19 nt, Homo sapiens
  misc_RNA (1)...(19): siRNA sense strand
cuguagcaaggaagagauu

SEQ ID NO: 2353132 - RNA, 19 nt, Homo sapiens
  misc_RNA (1)...(19): siRNA sense strand
gcagaggguauaauagcau

SEQ ID NO: 2353133 - RNA, 19 nt, Homo sapiens
  misc_RNA (1)...(19): siRNA sense strand
uuggaagagaccucaauua

SEQ ID NO: 2353134 - RNA, 19 nt, Homo sapiens
  misc_RNA (1)...(19): siRNA sense strand
ggguauaauagcauuggca

SEQ ID NO: 2353135 - RNA, 19 nt, Homo sapiens
  misc_RNA (1)...(19): siRNA sense strand
ccgggagaaucacgagcaa

SEQ ID NO: 2353136 - RNA, 19 nt, Homo sapiens
  misc_RNA (1)...(19): siRNA sense strand
guguguaucccgggagaau

SEQ ID NO: 2353137 - RNA, 19 nt, Homo sapiens
  misc_RNA (1)...(19): siRNA sense strand
guguaucccgggagaauca

SEQ ID NO: 2353138 - RNA, 19 nt, Homo sapiens
  misc_RNA (1)...(19): siRNA sense strand
ccgggagaaucacgagcaa

SEQ ID NO: 2353139 - RNA, 19 nt, Homo sapiens
  misc_RNA (1)...(19): siRNA sense strand
guguguaucccgggagaau

SEQ ID NO: 2353140 - RNA, 19 nt, Homo sapiens
  misc_RNA (1)...(19): siRNA sense strand
guguaucccgggagaauca

SEQ ID NO: 2353141 - RNA, 19 nt, Homo sapiens
  misc_RNA (1)...(19): siRNA sense strand
ccgggagaaucacgagcaa

SEQ ID NO: 2353142 - RNA, 19 nt, Homo sapiens
  misc_RNA (1)...(19): siRNA sense strand
guguguaucccgggagaau

SEQ ID NO: 2353143 - RNA, 19 nt, Homo sapiens
  misc_RNA (1)...(19): siRNA sense strand
guguaucccgggagaauca

SEQ ID NO: 2353144 - RNA, 19 nt, Homo sapiens
  misc_RNA (1)...(19): siRNA sense strand
ugguugaagaugaggauau

SEQ ID NO: 2353145 - RNA, 19 nt, Homo sapiens
  misc_RNA (1)...(19): siRNA sense strand
guauauacccuucuggaca

SEQ ID NO: 2353146 - RNA, 19 nt, Homo sapiens
  misc_RNA (1)...(19): siRNA sense strand
cauccuugugauugguaua

SEQ ID NO: 2353147 - RNA, 19 nt, Homo sapiens
  misc_RNA (1)...(19): siRNA sense strand
aucaagaacgugagugcua

SEQ ID NO: 2353148 - RNA, 19 nt, Homo sapiens
  misc_RNA (1)...(19): siRNA sense strand
ggugcaaaguggaacucga

SEQ ID NO: 2353149 - RNA, 19 nt, Homo sapiens
  misc_RNA (1)...(19): siRNA sense strand
cuacuugagcauuggagau

SEQ ID NO: 2353150 - RNA, 19 nt, Homo sapiens
  misc_RNA (1)...(19): siRNA sense strand
ccgugggcgugcugaucaa

SEQ ID NO: 2353151 - RNA, 19 nt, Homo sapiens
  misc_RNA (1)...(19): siRNA sense strand
cugaggacagugagggcau

SEQ ID NO: 2353152 - RNA, 19 nt, Homo sapiens
  misc_RNA (1)...(19): siRNA sense strand
acgcuuuccucauggccaa

SEQ ID NO: 2353153 - RNA, 19 nt, Homo sapiens
  misc_RNA (1)...(19): siRNA sense strand
ccuccgagaugcuggccuu

SEQ ID NO: 2353154 - RNA, 19 nt, Homo sapiens
  misc_RNA (1)...(19): siRNA sense strand
ugcuaacauucaugaacaa

SEQ ID NO: 2353155 - RNA, 19 nt, Homo sapiens
  misc_RNA (1)...(19): siRNA sense strand
ccauaagaaauuugacaag

SEQ ID NO: 2353156 - RNA, 19 nt, Homo sapiens
  misc_RNA (1)...(19): siRNA sense strand
caucaaggccuacgggauc

SEQ ID NO: 2353157 - RNA, 19 nt, Homo sapiens
  misc_RNA (1)...(19): siRNA sense strand
ucaucaaggccuacgggau

SEQ ID NO: 2353158 - RNA, 19 nt, Homo sapiens
  misc_RNA (1)...(19): siRNA sense strand
gucuacagccauaagaaau

SEQ ID NO: 2353159 - RNA, 19 nt, Homo sapiens
  misc_RNA (1)...(19): siRNA sense strand
ugcuaacauucaugaacaa

SEQ ID NO: 2353160 - RNA, 19 nt, Homo sapiens
  misc_RNA (1)...(19): siRNA sense strand
ccauaagaaauuugacaag

SEQ ID NO: 2353161 - RNA, 19 nt, Homo sapiens
  misc_RNA (1)...(19): siRNA sense strand
caucaaggccuacgggauc

SEQ ID NO: 2353162 - RNA, 19 nt, Homo sapiens
  misc_RNA (1)...(19): siRNA sense strand
ucaucaaggccuacgggau

SEQ ID NO: 2353163 - RNA, 19 nt, Homo sapiens
  misc_RNA (1)...(19): siRNA sense strand
gucuacagccauaagaaau

SEQ ID NO: 2353164 - RNA, 19 nt, Homo sapiens
  misc_RNA (1)...(19): siRNA sense strand
ugcuaacauucaugaacaa

SEQ ID NO: 2353165 - RNA, 19 nt, Homo sapiens
  misc_RNA (1)...(19): siRNA sense strand
ccauaagaaauuugacaag

SEQ ID NO: 2353166 - RNA, 19 nt, Homo sapiens
  misc_RNA (1)...(19): siRNA sense strand
caucaaggccuacgggauc

SEQ ID NO: 2353167 - RNA, 19 nt, Homo sapiens
  misc_RNA (1)...(19): siRNA sense strand
ucaucaaggccuacgggau

SEQ ID NO: 2353168 - RNA, 19 nt, Homo sapiens
  misc_RNA (1)...(19): siRNA sense strand
gucuacagccauaagaaau

SEQ ID NO: 2353169 - RNA, 19 nt, Homo sapiens
  misc_RNA (1)...(19): siRNA sense strand
ugcuaacauucaugaacaa

SEQ ID NO: 2353170 - RNA, 19 nt, Homo sapiens
  misc_RNA (1)...(19): siRNA sense strand
ccauaagaaauuugacaag

SEQ ID NO: 2353171 - RNA, 19 nt, Homo sapiens
  misc_RNA (1)...(19): siRNA sense strand
caucaaggccuacgggauc

SEQ ID NO: 2353172 - RNA, 19 nt, Homo sapiens
  misc_RNA (1)...(19): siRNA sense strand
ucaucaaggccuacgggau

SEQ ID NO: 2353173 - RNA, 19 nt, Homo sapiens
  misc_RNA (1)...(19): siRNA sense strand
gucuacagccauaagaaau

SEQ ID NO: 2353174 - RNA, 19 nt, Homo sapiens
  misc_RNA (1)...(19): siRNA sense strand
ugcuaacauucaugaacaa

SEQ ID NO: 2353175 - RNA, 19 nt, Homo sapiens
  misc_RNA (1)...(19): siRNA sense strand
ccauaagaaauuugacaag

SEQ ID NO: 2353176 - RNA, 19 nt, Homo sapiens
  misc_RNA (1)...(19): siRNA sense strand
caucaaggccuacgggauc

SEQ ID NO: 2353177 - RNA, 19 nt, Homo sapiens
  misc_RNA (1)...(19): siRNA sense strand
ucaucaaggccuacgggau

SEQ ID NO: 2353178 - RNA, 19 nt, Homo sapiens
  misc_RNA (1)...(19): siRNA sense strand
gucuacagccauaagaaau

SEQ ID NO: 2353179 - RNA, 19 nt, Homo sapiens
  misc_RNA (1)...(19): siRNA sense strand
ugcuaacauucaugaacaa

SEQ ID NO: 2353180 - RNA, 19 nt, Homo sapiens
  misc_RNA (1)...(19): siRNA sense strand
ccauaagaaauuugacaag

SEQ ID NO: 2353181 - RNA, 19 nt, Homo sapiens
  misc_RNA (1)...(19): siRNA sense strand
caucaaggccuacgggauc

SEQ ID NO: 2353182 - RNA, 19 nt, Homo sapiens
  misc_RNA (1)...(19): siRNA sense strand
ucaucaaggccuacgggau

SEQ ID NO: 2353183 - RNA, 19 nt, Homo sapiens
  misc_RNA (1)...(19): siRNA sense strand
gucuacagccauaagaaau

SEQ ID NO: 2353184 - RNA, 19 nt, Homo sapiens
  misc_RNA (1)...(19): siRNA sense strand
aggccaaaguggucagaau

SEQ ID NO: 2353185 - RNA, 19 nt, Homo sapiens
  misc_RNA (1)...(19): siRNA sense strand
uggaaauauuggacaucaa

SEQ ID NO: 2353186 - RNA, 19 nt, Homo sapiens
  misc_RNA (1)...(19): siRNA sense strand
ccgagauaauggagagcca

SEQ ID NO: 2353187 - RNA, 19 nt, Homo sapiens
  misc_RNA (1)...(19): siRNA sense strand
cuguggaggcucaggacaa

SEQ ID NO: 2353188 - RNA, 19 nt, Homo sapiens
  misc_RNA (1)...(19): siRNA sense strand
ucuacauacaggagaacaa

SEQ ID NO: 2353189 - RNA, 19 nt, Homo sapiens
  misc_RNA (1)...(19): siRNA sense strand
agguggaaauauuggacau

SEQ ID NO: 2353190 - RNA, 19 nt, Homo sapiens
  misc_RNA (1)...(19): siRNA sense strand
gggcaaaaugcuuggcuuu

SEQ ID NO: 2353191 - RNA, 19 nt, Homo sapiens
  misc_RNA (1)...(19): siRNA sense strand
acaggagaaauuaggacua

SEQ ID NO: 2353192 - RNA, 19 nt, Homo sapiens
  misc_RNA (1)...(19): siRNA sense strand
cguggugguccgagauaau

SEQ ID NO: 2353193 - RNA, 19 nt, Homo sapiens
  misc_RNA (1)...(19): siRNA sense strand
ggaaagugagccugggucu

SEQ ID NO: 2353194 - RNA, 19 nt, Homo sapiens
  misc_RNA (1)...(19): siRNA sense strand
gcgccguugagguggaaau

SEQ ID NO: 2353195 - RNA, 19 nt, Homo sapiens
  misc_RNA (1)...(19): siRNA sense strand
guaaagugcuugagcuggu

SEQ ID NO: 2353196 - RNA, 19 nt, Homo sapiens
  misc_RNA (1)...(19): siRNA sense strand
uaugagaaguuucgggagu

SEQ ID NO: 2353197 - RNA, 19 nt, Homo sapiens
  misc_RNA (1)...(19): siRNA sense strand
cuaccaggaagaugggaga

SEQ ID NO: 2353198 - RNA, 19 nt, Homo sapiens
  misc_RNA (1)...(19): siRNA sense strand
uguacaaacaagccaacaa

SEQ ID NO: 2353199 - RNA, 19 nt, Homo sapiens
  misc_RNA (1)...(19): siRNA sense strand
caggaaucucacaggccaa

SEQ ID NO: 2353200 - RNA, 19 nt, Homo sapiens
  misc_RNA (1)...(19): siRNA sense strand
cauugguggugaagcugaa

SEQ ID NO: 2353201 - RNA, 19 nt, Homo sapiens
  misc_RNA (1)...(19): siRNA sense strand
gaaauuaggacuaccagga

SEQ ID NO: 2353202 - RNA, 19 nt, Homo sapiens
  misc_RNA (1)...(19): siRNA sense strand
ccuuugacuaugagaaguu

SEQ ID NO: 2353203 - RNA, 19 nt, Homo sapiens
  misc_RNA (1)...(19): siRNA sense strand
ucuuuaagguagagcugca

SEQ ID NO: 2353204 - RNA, 19 nt, Homo sapiens
  misc_RNA (1)...(19): siRNA sense strand
ucguggacgugaaugacaa

SEQ ID NO: 2353205 - RNA, 19 nt, Homo sapiens
  misc_RNA (1)...(19): siRNA sense strand
gcuuggaagugcuggcgca

SEQ ID NO: 2353206 - RNA, 19 nt, Homo sapiens
  misc_RNA (1)...(19): siRNA sense strand
acaucguggacgugaauga

SEQ ID NO: 2353207 - RNA, 19 nt, Homo sapiens
  misc_RNA (1)...(19): siRNA sense strand
gacugaauggcuuuggaaa

SEQ ID NO: 2353208 - RNA, 19 nt, Homo sapiens
  misc_RNA (1)...(19): siRNA sense strand
uguuaagagcccucggaca

SEQ ID NO: 2353209 - RNA, 19 nt, Homo sapiens
  misc_RNA (1)...(19): siRNA sense strand
cauuaagcacagugucuuu

SEQ ID NO: 2353210 - RNA, 19 nt, Homo sapiens
  misc_RNA (1)...(19): siRNA sense strand
caguaaagugcuugagcug

SEQ ID NO: 2353211 - RNA, 19 nt, Homo sapiens
  misc_RNA (1)...(19): siRNA sense strand
uggacaucguggacgugaa

SEQ ID NO: 2353212 - RNA, 19 nt, Homo sapiens
  misc_RNA (1)...(19): siRNA sense strand
gcgcuuucacauagagagu

SEQ ID NO: 2353213 - RNA, 19 nt, Homo sapiens
  misc_RNA (1)...(19): siRNA sense strand
aggccaaaguggucagaau

SEQ ID NO: 2353214 - RNA, 19 nt, Homo sapiens
  misc_RNA (1)...(19): siRNA sense strand
uggaaauauuggacaucaa

SEQ ID NO: 2353215 - RNA, 19 nt, Homo sapiens
  misc_RNA (1)...(19): siRNA sense strand
ccgagauaauggagagcca

SEQ ID NO: 2353216 - RNA, 19 nt, Homo sapiens
  misc_RNA (1)...(19): siRNA sense strand
cuguggaggcucaggacaa

SEQ ID NO: 2353217 - RNA, 19 nt, Homo sapiens
  misc_RNA (1)...(19): siRNA sense strand
ucuacauacaggagaacaa

SEQ ID NO: 2353218 - RNA, 19 nt, Homo sapiens
  misc_RNA (1)...(19): siRNA sense strand
agguggaaauauuggacau

SEQ ID NO: 2353219 - RNA, 19 nt, Homo sapiens
  misc_RNA (1)...(19): siRNA sense strand
gggcaaaaugcuuggcuuu

SEQ ID NO: 2353220 - RNA, 19 nt, Homo sapiens
  misc_RNA (1)...(19): siRNA sense strand
acaggagaaauuaggacua

SEQ ID NO: 2353221 - RNA, 19 nt, Homo sapiens
  misc_RNA (1)...(19): siRNA sense strand
cguggugguccgagauaau

SEQ ID NO: 2353222 - RNA, 19 nt, Homo sapiens
  misc_RNA (1)...(19): siRNA sense strand
ggaaagugagccugggucu

SEQ ID NO: 2353223 - RNA, 19 nt, Homo sapiens
  misc_RNA (1)...(19): siRNA sense strand
gcgccguugagguggaaau

SEQ ID NO: 2353224 - RNA, 19 nt, Homo sapiens
  misc_RNA (1)...(19): siRNA sense strand
guaaagugcuugagcuggu

SEQ ID NO: 2353225 - RNA, 19 nt, Homo sapiens
  misc_RNA (1)...(19): siRNA sense strand
uaugagaaguuucgggagu

SEQ ID NO: 2353226 - RNA, 19 nt, Homo sapiens
  misc_RNA (1)...(19): siRNA sense strand
cuaccaggaagaugggaga

SEQ ID NO: 2353227 - RNA, 19 nt, Homo sapiens
  misc_RNA (1)...(19): siRNA sense strand
uguacaaacaagccaacaa

SEQ ID NO: 2353228 - RNA, 19 nt, Homo sapiens
  misc_RNA (1)...(19): siRNA sense strand
caggaaucucacaggccaa

SEQ ID NO: 2353229 - RNA, 19 nt, Homo sapiens
  misc_RNA (1)...(19): siRNA sense strand
cauugguggugaagcugaa

SEQ ID NO: 2353230 - RNA, 19 nt, Homo sapiens
  misc_RNA (1)...(19): siRNA sense strand
gaaauuaggacuaccagga

SEQ ID NO: 2353231 - RNA, 19 nt, Homo sapiens
  misc_RNA (1)...(19): siRNA sense strand
ccuuugacuaugagaaguu

SEQ ID NO: 2353232 - RNA, 19 nt, Homo sapiens
  misc_RNA (1)...(19): siRNA sense strand
ucuuuaagguagagcugca

SEQ ID NO: 2353233 - RNA, 19 nt, Homo sapiens
  misc_RNA (1)...(19): siRNA sense strand
ucguggacgugaaugacaa

SEQ ID NO: 2353234 - RNA, 19 nt, Homo sapiens
  misc_RNA (1)...(19): siRNA sense strand
gcuuggaagugcuggcgca

SEQ ID NO: 2353235 - RNA, 19 nt, Homo sapiens
  misc_RNA (1)...(19): siRNA sense strand
acaucguggacgugaauga

SEQ ID NO: 2353236 - RNA, 19 nt, Homo sapiens
  misc_RNA (1)...(19): siRNA sense strand
gacugaauggcuuuggaaa

SEQ ID NO: 2353237 - RNA, 19 nt, Homo sapiens
  misc_RNA (1)...(19): siRNA sense strand
uguuaagagcccucggaca

SEQ ID NO: 2353238 - RNA, 19 nt, Homo sapiens
  misc_RNA (1)...(19): siRNA sense strand
cauuaagcacagugucuuu

SEQ ID NO: 2353239 - RNA, 19 nt, Homo sapiens
  misc_RNA (1)...(19): siRNA sense strand
caguaaagugcuugagcug

SEQ ID NO: 2353240 - RNA, 19 nt, Homo sapiens
  misc_RNA (1)...(19): siRNA sense strand
uggacaucguggacgugaa

SEQ ID NO: 2353241 - RNA, 19 nt, Homo sapiens
  misc_RNA (1)...(19): siRNA sense strand
gcgcuuucacauagagagu

SEQ ID NO: 2353242 - RNA, 19 nt, Homo sapiens
  misc_RNA (1)...(19): siRNA sense strand
cggaguugguguuggagaa

SEQ ID NO: 2353243 - RNA, 19 nt, Homo sapiens
  misc_RNA (1)...(19): siRNA sense strand
cuuuagaauuucagccaau

SEQ ID NO: 2353244 - RNA, 19 nt, Homo sapiens
  misc_RNA (1)...(19): siRNA sense strand
ccgcuaaacugcuggugga

SEQ ID NO: 2353245 - RNA, 19 nt, Homo sapiens
  misc_RNA (1)...(19): siRNA sense strand
ucacaaaagugguagcaga

SEQ ID NO: 2353246 - RNA, 19 nt, Homo sapiens
  misc_RNA (1)...(19): siRNA sense strand
gugaaugacaauacaccaa

SEQ ID NO: 2353247 - RNA, 19 nt, Homo sapiens
  misc_RNA (1)...(19): siRNA sense strand
ggaucuacccagcggcaau

SEQ ID NO: 2353248 - RNA, 19 nt, Homo sapiens
  misc_RNA (1)...(19): siRNA sense strand
gguagauaggaaugacaau

SEQ ID NO: 2353249 - RNA, 19 nt, Homo sapiens
  misc_RNA (1)...(19): siRNA sense strand
gauucuaaugguaggguca

SEQ ID NO: 2353250 - RNA, 19 nt, Homo sapiens
  misc_RNA (1)...(19): siRNA sense strand
guguaaaggaugaagaccu

SEQ ID NO: 2353251 - RNA, 19 nt, Homo sapiens
  misc_RNA (1)...(19): siRNA sense strand
gaacagcugugcagggcca

SEQ ID NO: 2353252 - RNA, 19 nt, Homo sapiens
  misc_RNA (1)...(19): siRNA sense strand
caccaagguuccagagacu

SEQ ID NO: 2353253 - RNA, 19 nt, Homo sapiens
  misc_RNA (1)...(19): siRNA sense strand
uguuugugguagauaggaa

SEQ ID NO: 2353254 - RNA, 19 nt, Homo sapiens
  misc_RNA (1)...(19): siRNA sense strand
ucacuacaguugagagacu

SEQ ID NO: 2353255 - RNA, 19 nt, Homo sapiens
  misc_RNA (1)...(19): siRNA sense strand
guuuuauguuuguggguuu

SEQ ID NO: 2353256 - RNA, 19 nt, Homo sapiens
  misc_RNA (1)...(19): siRNA sense strand
cuuugaagaugucugggaa

SEQ ID NO: 2353257 - RNA, 19 nt, Homo sapiens
  misc_RNA (1)...(19): siRNA sense strand
guuucaaauccuugcauga

SEQ ID NO: 2353258 - RNA, 19 nt, Homo sapiens
  misc_RNA (1)...(19): siRNA sense strand
aaacgcucuuggaggcaua

SEQ ID NO: 2353259 - RNA, 19 nt, Homo sapiens
  misc_RNA (1)...(19): siRNA sense strand
cuggacacuuggucacaaa

SEQ ID NO: 2353260 - RNA, 19 nt, Homo sapiens
  misc_RNA (1)...(19): siRNA sense strand
ggaguugguguuggagaaa

SEQ ID NO: 2353261 - RNA, 19 nt, Homo sapiens
  misc_RNA (1)...(19): siRNA sense strand
ugucacuacaguugagaga

SEQ ID NO: 2353262 - RNA, 19 nt, Homo sapiens
  misc_RNA (1)...(19): siRNA sense strand
cuuagcacccgaaggacaa

SEQ ID NO: 2353263 - RNA, 19 nt, Homo sapiens
  misc_RNA (1)...(19): siRNA sense strand
cugccugcgucuugaccua

SEQ ID NO: 2353264 - RNA, 19 nt, Homo sapiens
  misc_RNA (1)...(19): siRNA sense strand
cgggagcagaucagugaau

SEQ ID NO: 2353265 - RNA, 19 nt, Homo sapiens
  misc_RNA (1)...(19): siRNA sense strand
cagaagugcaacagugacu

SEQ ID NO: 2353266 - RNA, 19 nt, Homo sapiens
  misc_RNA (1)...(19): siRNA sense strand
agaaagcacuggaucgcga

SEQ ID NO: 2353267 - RNA, 19 nt, Homo sapiens
  misc_RNA (1)...(19): siRNA sense strand
gguucuaaugccuggcuuu

SEQ ID NO: 2353268 - RNA, 19 nt, Homo sapiens
  misc_RNA (1)...(19): siRNA sense strand
cggaguugguguuggagaa

SEQ ID NO: 2353269 - RNA, 19 nt, Homo sapiens
  misc_RNA (1)...(19): siRNA sense strand
cuuuagaauuucagccaau

SEQ ID NO: 2353270 - RNA, 19 nt, Homo sapiens
  misc_RNA (1)...(19): siRNA sense strand
ccgcuaaacugcuggugga

SEQ ID NO: 2353271 - RNA, 19 nt, Homo sapiens
  misc_RNA (1)...(19): siRNA sense strand
ucacaaaagugguagcaga

SEQ ID NO: 2353272 - RNA, 19 nt, Homo sapiens
  misc_RNA (1)...(19): siRNA sense strand
gugaaugacaauacaccaa

SEQ ID NO: 2353273 - RNA, 19 nt, Homo sapiens
  misc_RNA (1)...(19): siRNA sense strand
ggaucuacccagcggcaau

SEQ ID NO: 2353274 - RNA, 19 nt, Homo sapiens
  misc_RNA (1)...(19): siRNA sense strand
gguagauaggaaugacaau

SEQ ID NO: 2353275 - RNA, 19 nt, Homo sapiens
  misc_RNA (1)...(19): siRNA sense strand
gauucuaaugguaggguca

SEQ ID NO: 2353276 - RNA, 19 nt, Homo sapiens
  misc_RNA (1)...(19): siRNA sense strand
guguaaaggaugaagaccu

SEQ ID NO: 2353277 - RNA, 19 nt, Homo sapiens
  misc_RNA (1)...(19): siRNA sense strand
gaacagcugugcagggcca

SEQ ID NO: 2353278 - RNA, 19 nt, Homo sapiens
  misc_RNA (1)...(19): siRNA sense strand
caccaagguuccagagacu

SEQ ID NO: 2353279 - RNA, 19 nt, Homo sapiens
  misc_RNA (1)...(19): siRNA sense strand
uguuugugguagauaggaa

SEQ ID NO: 2353280 - RNA, 19 nt, Homo sapiens
  misc_RNA (1)...(19): siRNA sense strand
ucacuacaguugagagacu

SEQ ID NO: 2353281 - RNA, 19 nt, Homo sapiens
  misc_RNA (1)...(19): siRNA sense strand
guuuuauguuuguggguuu

SEQ ID NO: 2353282 - RNA, 19 nt, Homo sapiens
  misc_RNA (1)...(19): siRNA sense strand
cuuugaagaugucugggaa

SEQ ID NO: 2353283 - RNA, 19 nt, Homo sapiens
  misc_RNA (1)...(19): siRNA sense strand
guuucaaauccuugcauga

SEQ ID NO: 2353284 - RNA, 19 nt, Homo sapiens
  misc_RNA (1)...(19): siRNA sense strand
aaacgcucuuggaggcaua

SEQ ID NO: 2353285 - RNA, 19 nt, Homo sapiens
  misc_RNA (1)...(19): siRNA sense strand
cuggacacuuggucacaaa

SEQ ID NO: 2353286 - RNA, 19 nt, Homo sapiens
  misc_RNA (1)...(19): siRNA sense strand
ggaguugguguuggagaaa

SEQ ID NO: 2353287 - RNA, 19 nt, Homo sapiens
  misc_RNA (1)...(19): siRNA sense strand
ugucacuacaguugagaga

SEQ ID NO: 2353288 - RNA, 19 nt, Homo sapiens
  misc_RNA (1)...(19): siRNA sense strand
cuuagcacccgaaggacaa

SEQ ID NO: 2353289 - RNA, 19 nt, Homo sapiens
  misc_RNA (1)...(19): siRNA sense strand
cugccugcgucuugaccua

SEQ ID NO: 2353290 - RNA, 19 nt, Homo sapiens
  misc_RNA (1)...(19): siRNA sense strand
cgggagcagaucagugaau

SEQ ID NO: 2353291 - RNA, 19 nt, Homo sapiens
  misc_RNA (1)...(19): siRNA sense strand
cagaagugcaacagugacu

SEQ ID NO: 2353292 - RNA, 19 nt, Homo sapiens
  misc_RNA (1)...(19): siRNA sense strand
agaaagcacuggaucgcga

SEQ ID NO: 2353293 - RNA, 19 nt, Homo sapiens
  misc_RNA (1)...(19): siRNA sense strand
gguucuaaugccuggcuuu

SEQ ID NO: 2353294 - RNA, 19 nt, Homo sapiens
  misc_RNA (1)...(19): siRNA sense strand
ccauauucccugaaagcaa

SEQ ID NO: 2353295 - RNA, 19 nt, Homo sapiens
  misc_RNA (1)...(19): siRNA sense strand
acgaauaaucauugcagaa

SEQ ID NO: 2353296 - RNA, 19 nt, Homo sapiens
  misc_RNA (1)...(19): siRNA sense strand
acaaaacagucuugagcaa

SEQ ID NO: 2353297 - RNA, 19 nt, Homo sapiens
  misc_RNA (1)...(19): siRNA sense strand
acucagaaugcuugaaaga

SEQ ID NO: 2353298 - RNA, 19 nt, Homo sapiens
  misc_RNA (1)...(19): siRNA sense strand
gaggugaaggugagggaca

SEQ ID NO: 2353299 - RNA, 19 nt, Homo sapiens
  misc_RNA (1)...(19): siRNA sense strand
aggcaguugacaaaggaaa

SEQ ID NO: 2353300 - RNA, 19 nt, Homo sapiens
  misc_RNA (1)...(19): siRNA sense strand
cguggaggcaguugacaaa

SEQ ID NO: 2353301 - RNA, 19 nt, Homo sapiens
  misc_RNA (1)...(19): siRNA sense strand
cgguguucgugaaggaaaa

SEQ ID NO: 2353302 - RNA, 19 nt, Homo sapiens
  misc_RNA (1)...(19): siRNA sense strand
ccguggaggcaguugacaa

SEQ ID NO: 2353303 - RNA, 19 nt, Homo sapiens
  misc_RNA (1)...(19): siRNA sense strand
ggcaguugacaaaggaaau

SEQ ID NO: 2353304 - RNA, 19 nt, Homo sapiens
  misc_RNA (1)...(19): siRNA sense strand
acgcggacgcacaggagaa

SEQ ID NO: 2353305 - RNA, 19 nt, Homo sapiens
  misc_RNA (1)...(19): siRNA sense strand
auggaacauuagugaucaa

SEQ ID NO: 2353306 - RNA, 19 nt, Homo sapiens
  misc_RNA (1)...(19): siRNA sense strand
caauggagaaauuaggaca

SEQ ID NO: 2353307 - RNA, 19 nt, Homo sapiens
  misc_RNA (1)...(19): siRNA sense strand
aauccgaacaauggagaaa

SEQ ID NO: 2353308 - RNA, 19 nt, Homo sapiens
  misc_RNA (1)...(19): siRNA sense strand
auggagaaauuaggacaaa

SEQ ID NO: 2353309 - RNA, 19 nt, Homo sapiens
  misc_RNA (1)...(19): siRNA sense strand
uggccgacgugaacgacaa

SEQ ID NO: 2353310 - RNA, 19 nt, Homo sapiens
  misc_RNA (1)...(19): siRNA sense strand
cagagaggaaauucaggaa

SEQ ID NO: 2353311 - RNA, 19 nt, Homo sapiens
  misc_RNA (1)...(19): siRNA sense strand
gcuaaaugccacagauccu

SEQ ID NO: 2353312 - RNA, 19 nt, Homo sapiens
  misc_RNA (1)...(19): siRNA sense strand
cugaaagcaagaaacgaau

SEQ ID NO: 2353313 - RNA, 19 nt, Homo sapiens
  misc_RNA (1)...(19): siRNA sense strand
guuuauaaagugacggugu

SEQ ID NO: 2353314 - RNA, 19 nt, Homo sapiens
  misc_RNA (1)...(19): siRNA sense strand
aauggagaaauuaggacaa

SEQ ID NO: 2353315 - RNA, 19 nt, Homo sapiens
  misc_RNA (1)...(19): siRNA sense strand
cggagagcggcaaggugua

SEQ ID NO: 2353316 - RNA, 19 nt, Homo sapiens
  misc_RNA (1)...(19): siRNA sense strand
agacggaccucauggccuu

SEQ ID NO: 2353317 - RNA, 19 nt, Homo sapiens
  misc_RNA (1)...(19): siRNA sense strand
ucacuuguacugaggaaaa

SEQ ID NO: 2353318 - RNA, 19 nt, Homo sapiens
  misc_RNA (1)...(19): siRNA sense strand
auaaagugacgguguuaga

SEQ ID NO: 2353319 - RNA, 19 nt, Homo sapiens
  misc_RNA (1)...(19): siRNA sense strand
aauuaggacaaaaggcaaa

SEQ ID NO: 2353320 - RNA, 19 nt, Homo sapiens
  misc_RNA (1)...(19): siRNA sense strand
aggugaaggugagggacau

SEQ ID NO: 2353321 - RNA, 19 nt, Homo sapiens
  misc_RNA (1)...(19): siRNA sense strand
cggcgcugguggaugucaa

SEQ ID NO: 2353322 - RNA, 19 nt, Homo sapiens
  misc_RNA (1)...(19): siRNA sense strand
cgacuggaucccaacgauu

SEQ ID NO: 2353323 - RNA, 19 nt, Homo sapiens
  misc_RNA (1)...(19): siRNA sense strand
uaucacuuguacugaggaa

SEQ ID NO: 2353324 - RNA, 19 nt, Homo sapiens
  misc_RNA (1)...(19): siRNA sense strand
gcgagagcguaucagccua

SEQ ID NO: 2353325 - RNA, 19 nt, Homo sapiens
  misc_RNA (1)...(19): siRNA sense strand
ccuaugaacugguggugac

SEQ ID NO: 2353326 - RNA, 19 nt, Homo sapiens
  misc_RNA (1)...(19): siRNA sense strand
ccauauucccugaaagcaa

SEQ ID NO: 2353327 - RNA, 19 nt, Homo sapiens
  misc_RNA (1)...(19): siRNA sense strand
acgaauaaucauugcagaa

SEQ ID NO: 2353328 - RNA, 19 nt, Homo sapiens
  misc_RNA (1)...(19): siRNA sense strand
acaaaacagucuugagcaa

SEQ ID NO: 2353329 - RNA, 19 nt, Homo sapiens
  misc_RNA (1)...(19): siRNA sense strand
acucagaaugcuugaaaga

SEQ ID NO: 2353330 - RNA, 19 nt, Homo sapiens
  misc_RNA (1)...(19): siRNA sense strand
gaggugaaggugagggaca

SEQ ID NO: 2353331 - RNA, 19 nt, Homo sapiens
  misc_RNA (1)...(19): siRNA sense strand
aggcaguugacaaaggaaa

SEQ ID NO: 2353332 - RNA, 19 nt, Homo sapiens
  misc_RNA (1)...(19): siRNA sense strand
cguggaggcaguugacaaa

SEQ ID NO: 2353333 - RNA, 19 nt, Homo sapiens
  misc_RNA (1)...(19): siRNA sense strand
cgguguucgugaaggaaaa

SEQ ID NO: 2353334 - RNA, 19 nt, Homo sapiens
  misc_RNA (1)...(19): siRNA sense strand
ccguggaggcaguugacaa

SEQ ID NO: 2353335 - RNA, 19 nt, Homo sapiens
  misc_RNA (1)...(19): siRNA sense strand
ggcaguugacaaaggaaau

SEQ ID NO: 2353336 - RNA, 19 nt, Homo sapiens
  misc_RNA (1)...(19): siRNA sense strand
acgcggacgcacaggagaa

SEQ ID NO: 2353337 - RNA, 19 nt, Homo sapiens
  misc_RNA (1)...(19): siRNA sense strand
auggaacauuagugaucaa

SEQ ID NO: 2353338 - RNA, 19 nt, Homo sapiens
  misc_RNA (1)...(19): siRNA sense strand
caauggagaaauuaggaca

SEQ ID NO: 2353339 - RNA, 19 nt, Homo sapiens
  misc_RNA (1)...(19): siRNA sense strand
aauccgaacaauggagaaa

SEQ ID NO: 2353340 - RNA, 19 nt, Homo sapiens
  misc_RNA (1)...(19): siRNA sense strand
auggagaaauuaggacaaa

SEQ ID NO: 2353341 - RNA, 19 nt, Homo sapiens
  misc_RNA (1)...(19): siRNA sense strand
uggccgacgugaacgacaa

SEQ ID NO: 2353342 - RNA, 19 nt, Homo sapiens
  misc_RNA (1)...(19): siRNA sense strand
cagagaggaaauucaggaa

SEQ ID NO: 2353343 - RNA, 19 nt, Homo sapiens
  misc_RNA (1)...(19): siRNA sense strand
gcuaaaugccacagauccu

SEQ ID NO: 2353344 - RNA, 19 nt, Homo sapiens
  misc_RNA (1)...(19): siRNA sense strand
cugaaagcaagaaacgaau

SEQ ID NO: 2353345 - RNA, 19 nt, Homo sapiens
  misc_RNA (1)...(19): siRNA sense strand
guuuauaaagugacggugu

SEQ ID NO: 2353346 - RNA, 19 nt, Homo sapiens
  misc_RNA (1)...(19): siRNA sense strand
aauggagaaauuaggacaa

SEQ ID NO: 2353347 - RNA, 19 nt, Homo sapiens
  misc_RNA (1)...(19): siRNA sense strand
cggagagcggcaaggugua

SEQ ID NO: 2353348 - RNA, 19 nt, Homo sapiens
  misc_RNA (1)...(19): siRNA sense strand
agacggaccucauggccuu

SEQ ID NO: 2353349 - RNA, 19 nt, Homo sapiens
  misc_RNA (1)...(19): siRNA sense strand
ucacuuguacugaggaaaa

SEQ ID NO: 2353350 - RNA, 19 nt, Homo sapiens
  misc_RNA (1)...(19): siRNA sense strand
auaaagugacgguguuaga

SEQ ID NO: 2353351 - RNA, 19 nt, Homo sapiens
  misc_RNA (1)...(19): siRNA sense strand
aauuaggacaaaaggcaaa

SEQ ID NO: 2353352 - RNA, 19 nt, Homo sapiens
  misc_RNA (1)...(19): siRNA sense strand
aggugaaggugagggacau

SEQ ID NO: 2353353 - RNA, 19 nt, Homo sapiens
  misc_RNA (1)...(19): siRNA sense strand
cggcgcugguggaugucaa

SEQ ID NO: 2353354 - RNA, 19 nt, Homo sapiens
  misc_RNA (1)...(19): siRNA sense strand
cgacuggaucccaacgauu

SEQ ID NO: 2353355 - RNA, 19 nt, Homo sapiens
  misc_RNA (1)...(19): siRNA sense strand
uaucacuuguacugaggaa

SEQ ID NO: 2353356 - RNA, 19 nt, Homo sapiens
  misc_RNA (1)...(19): siRNA sense strand
gcgagagcguaucagccua

SEQ ID NO: 2353357 - RNA, 19 nt, Homo sapiens
  misc_RNA (1)...(19): siRNA sense strand
ccuaugaacugguggugac

SEQ ID NO: 2353358 - RNA, 19 nt, Homo sapiens
  misc_RNA (1)...(19): siRNA sense strand
aggacuuaauggagaaauu

SEQ ID NO: 2353359 - RNA, 19 nt, Homo sapiens
  misc_RNA (1)...(19): siRNA sense strand
guuauuggacagagagcaa

SEQ ID NO: 2353360 - RNA, 19 nt, Homo sapiens
  misc_RNA (1)...(19): siRNA sense strand
acgaaggacuuaauggaga

SEQ ID NO: 2353361 - RNA, 19 nt, Homo sapiens
  misc_RNA (1)...(19): siRNA sense strand
cagaggaggcagagggugu

SEQ ID NO: 2353362 - RNA, 19 nt, Homo sapiens
  misc_RNA (1)...(19): siRNA sense strand
acguggaggugaaggacau

SEQ ID NO: 2353363 - RNA, 19 nt, Homo sapiens
  misc_RNA (1)...(19): siRNA sense strand
caguguucgugaaggagaa

SEQ ID NO: 2353364 - RNA, 19 nt, Homo sapiens
  misc_RNA (1)...(19): siRNA sense strand
ccgucuacgaggaggccaa

SEQ ID NO: 2353365 - RNA, 19 nt, Homo sapiens
  misc_RNA (1)...(19): siRNA sense strand
agguuaacgccauugauaa

SEQ ID NO: 2353366 - RNA, 19 nt, Homo sapiens
  misc_RNA (1)...(19): siRNA sense strand
cugaauuaguucuucggaa

SEQ ID NO: 2353367 - RNA, 19 nt, Homo sapiens
  misc_RNA (1)...(19): siRNA sense strand
auguggacguggaggugaa

SEQ ID NO: 2353368 - RNA, 19 nt, Homo sapiens
  misc_RNA (1)...(19): siRNA sense strand
cgguaaaccagaacuaaca

SEQ ID NO: 2353369 - RNA, 19 nt, Homo sapiens
  misc_RNA (1)...(19): siRNA sense strand
gugaaggacauuaacgaca

SEQ ID NO: 2353370 - RNA, 19 nt, Homo sapiens
  misc_RNA (1)...(19): siRNA sense strand
ggacagagagcaaacgcca

SEQ ID NO: 2353371 - RNA, 19 nt, Homo sapiens
  misc_RNA (1)...(19): siRNA sense strand
ggagaaauuuccuauggga

SEQ ID NO: 2353372 - RNA, 19 nt, Homo sapiens
  misc_RNA (1)...(19): siRNA sense strand
gagaaauuuccuaugggau

SEQ ID NO: 2353373 - RNA, 19 nt, Homo sapiens
  misc_RNA (1)...(19): siRNA sense strand
ggugauuaucggaccaaga

SEQ ID NO: 2353374 - RNA, 19 nt, Homo sapiens
  misc_RNA (1)...(19): siRNA sense strand
uggccgacgugaacgacaa

SEQ ID NO: 2353375 - RNA, 19 nt, Homo sapiens
  misc_RNA (1)...(19): siRNA sense strand
cggagagcggcaaggugua

SEQ ID NO: 2353376 - RNA, 19 nt, Homo sapiens
  misc_RNA (1)...(19): siRNA sense strand
agacggaccucauggccuu

SEQ ID NO: 2353377 - RNA, 19 nt, Homo sapiens
  misc_RNA (1)...(19): siRNA sense strand
acuaaaugcuuccgaucca

SEQ ID NO: 2353378 - RNA, 19 nt, Homo sapiens
  misc_RNA (1)...(19): siRNA sense strand
cugaaaauguccaaaacga

SEQ ID NO: 2353379 - RNA, 19 nt, Homo sapiens
  misc_RNA (1)...(19): siRNA sense strand
agaaauuuccuaugggauc

SEQ ID NO: 2353380 - RNA, 19 nt, Homo sapiens
  misc_RNA (1)...(19): siRNA sense strand
uggcgguaaaccagaacua

SEQ ID NO: 2353381 - RNA, 19 nt, Homo sapiens
  misc_RNA (1)...(19): siRNA sense strand
uggaggugaaggacauuaa

SEQ ID NO: 2353382 - RNA, 19 nt, Homo sapiens
  misc_RNA (1)...(19): siRNA sense strand
cgacaaugcgccugcguuc

SEQ ID NO: 2353383 - RNA, 19 nt, Homo sapiens
  misc_RNA (1)...(19): siRNA sense strand
ucagagaaagggaacaaaa

SEQ ID NO: 2353384 - RNA, 19 nt, Homo sapiens
  misc_RNA (1)...(19): siRNA sense strand
cgauccagacgaaggacuu

SEQ ID NO: 2353385 - RNA, 19 nt, Homo sapiens
  misc_RNA (1)...(19): siRNA sense strand
acacaggugaaauuagaau

SEQ ID NO: 2353386 - RNA, 19 nt, Homo sapiens
  misc_RNA (1)...(19): siRNA sense strand
uugaagagaauaaugccua

SEQ ID NO: 2353387 - RNA, 19 nt, Homo sapiens
  misc_RNA (1)...(19): siRNA sense strand
ccuaugagcugguggugac

SEQ ID NO: 2353388 - RNA, 19 nt, Homo sapiens
  misc_RNA (1)...(19): siRNA sense strand
aggacuuaauggagaaauu

SEQ ID NO: 2353389 - RNA, 19 nt, Homo sapiens
  misc_RNA (1)...(19): siRNA sense strand
guuauuggacagagagcaa

SEQ ID NO: 2353390 - RNA, 19 nt, Homo sapiens
  misc_RNA (1)...(19): siRNA sense strand
acgaaggacuuaauggaga

SEQ ID NO: 2353391 - RNA, 19 nt, Homo sapiens
  misc_RNA (1)...(19): siRNA sense strand
cagaggaggcagagggugu

SEQ ID NO: 2353392 - RNA, 19 nt, Homo sapiens
  misc_RNA (1)...(19): siRNA sense strand
acguggaggugaaggacau

SEQ ID NO: 2353393 - RNA, 19 nt, Homo sapiens
  misc_RNA (1)...(19): siRNA sense strand
caguguucgugaaggagaa

SEQ ID NO: 2353394 - RNA, 19 nt, Homo sapiens
  misc_RNA (1)...(19): siRNA sense strand
ccgucuacgaggaggccaa

SEQ ID NO: 2353395 - RNA, 19 nt, Homo sapiens
  misc_RNA (1)...(19): siRNA sense strand
agguuaacgccauugauaa

SEQ ID NO: 2353396 - RNA, 19 nt, Homo sapiens
  misc_RNA (1)...(19): siRNA sense strand
cugaauuaguucuucggaa

SEQ ID NO: 2353397 - RNA, 19 nt, Homo sapiens
  misc_RNA (1)...(19): siRNA sense strand
auguggacguggaggugaa

SEQ ID NO: 2353398 - RNA, 19 nt, Homo sapiens
  misc_RNA (1)...(19): siRNA sense strand
cgguaaaccagaacuaaca

SEQ ID NO: 2353399 - RNA, 19 nt, Homo sapiens
  misc_RNA (1)...(19): siRNA sense strand
gugaaggacauuaacgaca

SEQ ID NO: 2353400 - RNA, 19 nt, Homo sapiens
  misc_RNA (1)...(19): siRNA sense strand
ggacagagagcaaacgcca

SEQ ID NO: 2353401 - RNA, 19 nt, Homo sapiens
  misc_RNA (1)...(19): siRNA sense strand
ggagaaauuuccuauggga

SEQ ID NO: 2353402 - RNA, 19 nt, Homo sapiens
  misc_RNA (1)...(19): siRNA sense strand
gagaaauuuccuaugggau

SEQ ID NO: 2353403 - RNA, 19 nt, Homo sapiens
  misc_RNA (1)...(19): siRNA sense strand
ggugauuaucggaccaaga

SEQ ID NO: 2353404 - RNA, 19 nt, Homo sapiens
  misc_RNA (1)...(19): siRNA sense strand
uggccgacgugaacgacaa

SEQ ID NO: 2353405 - RNA, 19 nt, Homo sapiens
  misc_RNA (1)...(19): siRNA sense strand
cggagagcggcaaggugua

SEQ ID NO: 2353406 - RNA, 19 nt, Homo sapiens
  misc_RNA (1)...(19): siRNA sense strand
agacggaccucauggccuu

SEQ ID NO: 2353407 - RNA, 19 nt, Homo sapiens
  misc_RNA (1)...(19): siRNA sense strand
acuaaaugcuuccgaucca

SEQ ID NO: 2353408 - RNA, 19 nt, Homo sapiens
  misc_RNA (1)...(19): siRNA sense strand
cugaaaauguccaaaacga

SEQ ID NO: 2353409 - RNA, 19 nt, Homo sapiens
  misc_RNA (1)...(19): siRNA sense strand
agaaauuuccuaugggauc

SEQ ID NO: 2353410 - RNA, 19 nt, Homo sapiens
  misc_RNA (1)...(19): siRNA sense strand
uggcgguaaaccagaacua

SEQ ID NO: 2353411 - RNA, 19 nt, Homo sapiens
  misc_RNA (1)...(19): siRNA sense strand
uggaggugaaggacauuaa

SEQ ID NO: 2353412 - RNA, 19 nt, Homo sapiens
  misc_RNA (1)...(19): siRNA sense strand
cgacaaugcgccugcguuc

SEQ ID NO: 2353413 - RNA, 19 nt, Homo sapiens
  misc_RNA (1)...(19): siRNA sense strand
ucagagaaagggaacaaaa

SEQ ID NO: 2353414 - RNA, 19 nt, Homo sapiens
  misc_RNA (1)...(19): siRNA sense strand
cgauccagacgaaggacuu

SEQ ID NO: 2353415 - RNA, 19 nt, Homo sapiens
  misc_RNA (1)...(19): siRNA sense strand
acacaggugaaauuagaau

SEQ ID NO: 2353416 - RNA, 19 nt, Homo sapiens
  misc_RNA (1)...(19): siRNA sense strand
uugaagagaauaaugccua

SEQ ID NO: 2353417 - RNA, 19 nt, Homo sapiens
  misc_RNA (1)...(19): siRNA sense strand
ccuaugagcugguggugac

SEQ ID NO: 2353418 - RNA, 19 nt, Homo sapiens
  misc_RNA (1)...(19): siRNA sense strand
augugaacguggaggugaa

SEQ ID NO: 2353419 - RNA, 19 nt, Homo sapiens
  misc_RNA (1)...(19): siRNA sense strand
acgaaggagucaauggaga

SEQ ID NO: 2353420 - RNA, 19 nt, Homo sapiens
  misc_RNA (1)...(19): siRNA sense strand
acguggaggugaaggacau

SEQ ID NO: 2353421 - RNA, 19 nt, Homo sapiens
  misc_RNA (1)...(19): siRNA sense strand
ccguguucgugaaggagaa

SEQ ID NO: 2353422 - RNA, 19 nt, Homo sapiens
  misc_RNA (1)...(19): siRNA sense strand
guacagucuggguggaaau

SEQ ID NO: 2353423 - RNA, 19 nt, Homo sapiens
  misc_RNA (1)...(19): siRNA sense strand
gcgagaacgugugggccua

SEQ ID NO: 2353424 - RNA, 19 nt, Homo sapiens
  misc_RNA (1)...(19): siRNA sense strand
gugaaggacauuaacgaca

SEQ ID NO: 2353425 - RNA, 19 nt, Homo sapiens
  misc_RNA (1)...(19): siRNA sense strand
aggugagccuuauggaaaa

SEQ ID NO: 2353426 - RNA, 19 nt, Homo sapiens
  misc_RNA (1)...(19): siRNA sense strand
cgccacagaccgagacgaa

SEQ ID NO: 2353427 - RNA, 19 nt, Homo sapiens
  misc_RNA (1)...(19): siRNA sense strand
aauuaagcccaauggaaga

SEQ ID NO: 2353428 - RNA, 19 nt, Homo sapiens
  misc_RNA (1)...(19): siRNA sense strand
cagaauauaaggugagccu

SEQ ID NO: 2353429 - RNA, 19 nt, Homo sapiens
  misc_RNA (1)...(19): siRNA sense strand
ccaacaaaugguaagcaga

SEQ ID NO: 2353430 - RNA, 19 nt, Homo sapiens
  misc_RNA (1)...(19): siRNA sense strand
uggccgacgugaacgacaa

SEQ ID NO: 2353431 - RNA, 19 nt, Homo sapiens
  misc_RNA (1)...(19): siRNA sense strand
cgggaggcgcaguuaacaa

SEQ ID NO: 2353432 - RNA, 19 nt, Homo sapiens
  misc_RNA (1)...(19): siRNA sense strand
ggguggaaaucuuggacac

SEQ ID NO: 2353433 - RNA, 19 nt, Homo sapiens
  misc_RNA (1)...(19): siRNA sense strand
uaguacuggugaaggauca

SEQ ID NO: 2353434 - RNA, 19 nt, Homo sapiens
  misc_RNA (1)...(19): siRNA sense strand
cggagagcggcaaggugua

SEQ ID NO: 2353435 - RNA, 19 nt, Homo sapiens
  misc_RNA (1)...(19): siRNA sense strand
agacggaccucauggccuu

SEQ ID NO: 2353436 - RNA, 19 nt, Homo sapiens
  misc_RNA (1)...(19): siRNA sense strand
ugauccagaguuugauaaa

SEQ ID NO: 2353437 - RNA, 19 nt, Homo sapiens
  misc_RNA (1)...(19): siRNA sense strand
caauuaagcccaauggaag

SEQ ID NO: 2353438 - RNA, 19 nt, Homo sapiens
  misc_RNA (1)...(19): siRNA sense strand
uggaggugaaggacauuaa

SEQ ID NO: 2353439 - RNA, 19 nt, Homo sapiens
  misc_RNA (1)...(19): siRNA sense strand
gcucaaacuaaacgccaca

SEQ ID NO: 2353440 - RNA, 19 nt, Homo sapiens
  misc_RNA (1)...(19): siRNA sense strand
cgacaaugcgccugcguuc

SEQ ID NO: 2353441 - RNA, 19 nt, Homo sapiens
  misc_RNA (1)...(19): siRNA sense strand
ugaauaaagaggaggaagg

SEQ ID NO: 2353442 - RNA, 19 nt, Homo sapiens
  misc_RNA (1)...(19): siRNA sense strand
ccuaugaacugguggugac

SEQ ID NO: 2353443 - RNA, 19 nt, Homo sapiens
  misc_RNA (1)...(19): siRNA sense strand
augugaacguggaggugaa

SEQ ID NO: 2353444 - RNA, 19 nt, Homo sapiens
  misc_RNA (1)...(19): siRNA sense strand
acgaaggagucaauggaga

SEQ ID NO: 2353445 - RNA, 19 nt, Homo sapiens
  misc_RNA (1)...(19): siRNA sense strand
acguggaggugaaggacau

SEQ ID NO: 2353446 - RNA, 19 nt, Homo sapiens
  misc_RNA (1)...(19): siRNA sense strand
ccguguucgugaaggagaa

SEQ ID NO: 2353447 - RNA, 19 nt, Homo sapiens
  misc_RNA (1)...(19): siRNA sense strand
guacagucuggguggaaau

SEQ ID NO: 2353448 - RNA, 19 nt, Homo sapiens
  misc_RNA (1)...(19): siRNA sense strand
gcgagaacgugugggccua

SEQ ID NO: 2353449 - RNA, 19 nt, Homo sapiens
  misc_RNA (1)...(19): siRNA sense strand
gugaaggacauuaacgaca

SEQ ID NO: 2353450 - RNA, 19 nt, Homo sapiens
  misc_RNA (1)...(19): siRNA sense strand
aggugagccuuauggaaaa

SEQ ID NO: 2353451 - RNA, 19 nt, Homo sapiens
  misc_RNA (1)...(19): siRNA sense strand
cgccacagaccgagacgaa

SEQ ID NO: 2353452 - RNA, 19 nt, Homo sapiens
  misc_RNA (1)...(19): siRNA sense strand
aauuaagcccaauggaaga

SEQ ID NO: 2353453 - RNA, 19 nt, Homo sapiens
  misc_RNA (1)...(19): siRNA sense strand
cagaauauaaggugagccu

SEQ ID NO: 2353454 - RNA, 19 nt, Homo sapiens
  misc_RNA (1)...(19): siRNA sense strand
ccaacaaaugguaagcaga

SEQ ID NO: 2353455 - RNA, 19 nt, Homo sapiens
  misc_RNA (1)...(19): siRNA sense strand
uggccgacgugaacgacaa

SEQ ID NO: 2353456 - RNA, 19 nt, Homo sapiens
  misc_RNA (1)...(19): siRNA sense strand
cgggaggcgcaguuaacaa

SEQ ID NO: 2353457 - RNA, 19 nt, Homo sapiens
  misc_RNA (1)...(19): siRNA sense strand
ggguggaaaucuuggacac

SEQ ID NO: 2353458 - RNA, 19 nt, Homo sapiens
  misc_RNA (1)...(19): siRNA sense strand
uaguacuggugaaggauca

SEQ ID NO: 2353459 - RNA, 19 nt, Homo sapiens
  misc_RNA (1)...(19): siRNA sense strand
cggagagcggcaaggugua

SEQ ID NO: 2353460 - RNA, 19 nt, Homo sapiens
  misc_RNA (1)...(19): siRNA sense strand
agacggaccucauggccuu

SEQ ID NO: 2353461 - RNA, 19 nt, Homo sapiens
  misc_RNA (1)...(19): siRNA sense strand
ugauccagaguuugauaaa

SEQ ID NO: 2353462 - RNA, 19 nt, Homo sapiens
  misc_RNA (1)...(19): siRNA sense strand
caauuaagcccaauggaag

SEQ ID NO: 2353463 - RNA, 19 nt, Homo sapiens
  misc_RNA (1)...(19): siRNA sense strand
uggaggugaaggacauuaa

SEQ ID NO: 2353464 - RNA, 19 nt, Homo sapiens
  misc_RNA (1)...(19): siRNA sense strand
gcucaaacuaaacgccaca

SEQ ID NO: 2353465 - RNA, 19 nt, Homo sapiens
  misc_RNA (1)...(19): siRNA sense strand
cgacaaugcgccugcguuc

SEQ ID NO: 2353466 - RNA, 19 nt, Homo sapiens
  misc_RNA (1)...(19): siRNA sense strand
ugaauaaagaggaggaagg

SEQ ID NO: 2353467 - RNA, 19 nt, Homo sapiens
  misc_RNA (1)...(19): siRNA sense strand
ccuaugaacugguggugac

SEQ ID NO: 2353468 - RNA, 19 nt, Homo sapiens
  misc_RNA (1)...(19): siRNA sense strand
cgggagaaauaaaaguaaa

SEQ ID NO: 2353469 - RNA, 19 nt, Homo sapiens
  misc_RNA (1)...(19): siRNA sense strand
cgguguucgugaaggagaa

SEQ ID NO: 2353470 - RNA, 19 nt, Homo sapiens
  misc_RNA (1)...(19): siRNA sense strand
acguggaagugaaggacau

SEQ ID NO: 2353471 - RNA, 19 nt, Homo sapiens
  misc_RNA (1)...(19): siRNA sense strand
agcaacugauggaggcaaa

SEQ ID NO: 2353472 - RNA, 19 nt, Homo sapiens
  misc_RNA (1)...(19): siRNA sense strand
cggaugaaggaauaaacaa

SEQ ID NO: 2353473 - RNA, 19 nt, Homo sapiens
  misc_RNA (1)...(19): siRNA sense strand
agugaaagaagaugcucaa

SEQ ID NO: 2353474 - RNA, 19 nt, Homo sapiens
  misc_RNA (1)...(19): siRNA sense strand
aacgaaaggacgggagaaa

SEQ ID NO: 2353475 - RNA, 19 nt, Homo sapiens
  misc_RNA (1)...(19): siRNA sense strand
auguuacagauaagggaaa

SEQ ID NO: 2353476 - RNA, 19 nt, Homo sapiens
  misc_RNA (1)...(19): siRNA sense strand
uggaacuacuggaugaaaa

SEQ ID NO: 2353477 - RNA, 19 nt, Homo sapiens
  misc_RNA (1)...(19): siRNA sense strand
gugaaggacauuaacgaca

SEQ ID NO: 2353478 - RNA, 19 nt, Homo sapiens
  misc_RNA (1)...(19): siRNA sense strand
uggccgacgugaacgacaa

SEQ ID NO: 2353479 - RNA, 19 nt, Homo sapiens
  misc_RNA (1)...(19): siRNA sense strand
ggaagcugcuggaucguga

SEQ ID NO: 2353480 - RNA, 19 nt, Homo sapiens
  misc_RNA (1)...(19): siRNA sense strand
cagugaaagaagaugcuca

SEQ ID NO: 2353481 - RNA, 19 nt, Homo sapiens
  misc_RNA (1)...(19): siRNA sense strand
cggagagcggcaaggugua

SEQ ID NO: 2353482 - RNA, 19 nt, Homo sapiens
  misc_RNA (1)...(19): siRNA sense strand
aaguuguuguugacagcaa

SEQ ID NO: 2353483 - RNA, 19 nt, Homo sapiens
  misc_RNA (1)...(19): siRNA sense strand
ggaacuacuggaugaaaau

SEQ ID NO: 2353484 - RNA, 19 nt, Homo sapiens
  misc_RNA (1)...(19): siRNA sense strand
gcuggaucgugaagaaaau

SEQ ID NO: 2353485 - RNA, 19 nt, Homo sapiens
  misc_RNA (1)...(19): siRNA sense strand
auguggacguggaagugaa

SEQ ID NO: 2353486 - RNA, 19 nt, Homo sapiens
  misc_RNA (1)...(19): siRNA sense strand
cugcacgguccuaguggaa

SEQ ID NO: 2353487 - RNA, 19 nt, Homo sapiens
  misc_RNA (1)...(19): siRNA sense strand
guguuagaugccaaugaua

SEQ ID NO: 2353488 - RNA, 19 nt, Homo sapiens
  misc_RNA (1)...(19): siRNA sense strand
ccuaugagcugguggugac

SEQ ID NO: 2353489 - RNA, 19 nt, Homo sapiens
  misc_RNA (1)...(19): siRNA sense strand
cgggagaaauaaaaguaaa

SEQ ID NO: 2353490 - RNA, 19 nt, Homo sapiens
  misc_RNA (1)...(19): siRNA sense strand
cgguguucgugaaggagaa

SEQ ID NO: 2353491 - RNA, 19 nt, Homo sapiens
  misc_RNA (1)...(19): siRNA sense strand
acguggaagugaaggacau

SEQ ID NO: 2353492 - RNA, 19 nt, Homo sapiens
  misc_RNA (1)...(19): siRNA sense strand
agcaacugauggaggcaaa

SEQ ID NO: 2353493 - RNA, 19 nt, Homo sapiens
  misc_RNA (1)...(19): siRNA sense strand
cggaugaaggaauaaacaa

SEQ ID NO: 2353494 - RNA, 19 nt, Homo sapiens
  misc_RNA (1)...(19): siRNA sense strand
agugaaagaagaugcucaa

SEQ ID NO: 2353495 - RNA, 19 nt, Homo sapiens
  misc_RNA (1)...(19): siRNA sense strand
aacgaaaggacgggagaaa

SEQ ID NO: 2353496 - RNA, 19 nt, Homo sapiens
  misc_RNA (1)...(19): siRNA sense strand
auguuacagauaagggaaa

SEQ ID NO: 2353497 - RNA, 19 nt, Homo sapiens
  misc_RNA (1)...(19): siRNA sense strand
uggaacuacuggaugaaaa

SEQ ID NO: 2353498 - RNA, 19 nt, Homo sapiens
  misc_RNA (1)...(19): siRNA sense strand
gugaaggacauuaacgaca

SEQ ID NO: 2353499 - RNA, 19 nt, Homo sapiens
  misc_RNA (1)...(19): siRNA sense strand
uggccgacgugaacgacaa

SEQ ID NO: 2353500 - RNA, 19 nt, Homo sapiens
  misc_RNA (1)...(19): siRNA sense strand
ggaagcugcuggaucguga

SEQ ID NO: 2353501 - RNA, 19 nt, Homo sapiens
  misc_RNA (1)...(19): siRNA sense strand
cagugaaagaagaugcuca

SEQ ID NO: 2353502 - RNA, 19 nt, Homo sapiens
  misc_RNA (1)...(19): siRNA sense strand
cggagagcggcaaggugua

SEQ ID NO: 2353503 - RNA, 19 nt, Homo sapiens
  misc_RNA (1)...(19): siRNA sense strand
aaguuguuguugacagcaa

SEQ ID NO: 2353504 - RNA, 19 nt, Homo sapiens
  misc_RNA (1)...(19): siRNA sense strand
ggaacuacuggaugaaaau

SEQ ID NO: 2353505 - RNA, 19 nt, Homo sapiens
  misc_RNA (1)...(19): siRNA sense strand
gcuggaucgugaagaaaau

SEQ ID NO: 2353506 - RNA, 19 nt, Homo sapiens
  misc_RNA (1)...(19): siRNA sense strand
auguggacguggaagugaa

SEQ ID NO: 2353507 - RNA, 19 nt, Homo sapiens
  misc_RNA (1)...(19): siRNA sense strand
cugcacgguccuaguggaa

SEQ ID NO: 2353508 - RNA, 19 nt, Homo sapiens
  misc_RNA (1)...(19): siRNA sense strand
guguuagaugccaaugaua

SEQ ID NO: 2353509 - RNA, 19 nt, Homo sapiens
  misc_RNA (1)...(19): siRNA sense strand
ccuaugagcugguggugac

SEQ ID NO: 2353510 - RNA, 19 nt, Homo sapiens
  misc_RNA (1)...(19): siRNA sense strand
cgggagaaauaaaaguaaa

SEQ ID NO: 2353511 - RNA, 19 nt, Homo sapiens
  misc_RNA (1)...(19): siRNA sense strand
cgguguucgugaaggagaa

SEQ ID NO: 2353512 - RNA, 19 nt, Homo sapiens
  misc_RNA (1)...(19): siRNA sense strand
acguggaagugaaggacau

SEQ ID NO: 2353513 - RNA, 19 nt, Homo sapiens
  misc_RNA (1)...(19): siRNA sense strand
agcaacugauggaggcaaa

SEQ ID NO: 2353514 - RNA, 19 nt, Homo sapiens
  misc_RNA (1)...(19): siRNA sense strand
cggaugaaggaauaaacaa

SEQ ID NO: 2353515 - RNA, 19 nt, Homo sapiens
  misc_RNA (1)...(19): siRNA sense strand
agugaaagaagaugcucaa

SEQ ID NO: 2353516 - RNA, 19 nt, Homo sapiens
  misc_RNA (1)...(19): siRNA sense strand
aacgaaaggacgggagaaa

SEQ ID NO: 2353517 - RNA, 19 nt, Homo sapiens
  misc_RNA (1)...(19): siRNA sense strand
auguuacagauaagggaaa

SEQ ID NO: 2353518 - RNA, 19 nt, Homo sapiens
  misc_RNA (1)...(19): siRNA sense strand
uggaacuacuggaugaaaa

SEQ ID NO: 2353519 - RNA, 19 nt, Homo sapiens
  misc_RNA (1)...(19): siRNA sense strand
gugaaggacauuaacgaca

SEQ ID NO: 2353520 - RNA, 19 nt, Homo sapiens
  misc_RNA (1)...(19): siRNA sense strand
uggccgacgugaacgacaa

SEQ ID NO: 2353521 - RNA, 19 nt, Homo sapiens
  misc_RNA (1)...(19): siRNA sense strand
ggaagcugcuggaucguga

SEQ ID NO: 2353522 - RNA, 19 nt, Homo sapiens
  misc_RNA (1)...(19): siRNA sense strand
cagugaaagaagaugcuca

SEQ ID NO: 2353523 - RNA, 19 nt, Homo sapiens
  misc_RNA (1)...(19): siRNA sense strand
cggagagcggcaaggugua

SEQ ID NO: 2353524 - RNA, 19 nt, Homo sapiens
  misc_RNA (1)...(19): siRNA sense strand
aaguuguuguugacagcaa

SEQ ID NO: 2353525 - RNA, 19 nt, Homo sapiens
  misc_RNA (1)...(19): siRNA sense strand
ggaacuacuggaugaaaau

SEQ ID NO: 2353526 - RNA, 19 nt, Homo sapiens
  misc_RNA (1)...(19): siRNA sense strand
gcuggaucgugaagaaaau

SEQ ID NO: 2353527 - RNA, 19 nt, Homo sapiens
  misc_RNA (1)...(19): siRNA sense strand
auguggacguggaagugaa

SEQ ID NO: 2353528 - RNA, 19 nt, Homo sapiens
  misc_RNA (1)...(19): siRNA sense strand
cugcacgguccuaguggaa

SEQ ID NO: 2353529 - RNA, 19 nt, Homo sapiens
  misc_RNA (1)...(19): siRNA sense strand
guguuagaugccaaugaua

SEQ ID NO: 2353530 - RNA, 19 nt, Homo sapiens
  misc_RNA (1)...(19): siRNA sense strand
ccuaugagcugguggugac

SEQ ID NO: 2353531 - RNA, 19 nt, Homo sapiens
  misc_RNA (1)...(19): siRNA sense strand
cugaauacgaaguaagaau

SEQ ID NO: 2353532 - RNA, 19 nt, Homo sapiens
  misc_RNA (1)...(19): siRNA sense strand
cgguguucgugaaggagaa

SEQ ID NO: 2353533 - RNA, 19 nt, Homo sapiens
  misc_RNA (1)...(19): siRNA sense strand
auguggacguggaggugaa

SEQ ID NO: 2353534 - RNA, 19 nt, Homo sapiens
  misc_RNA (1)...(19): siRNA sense strand
acuuuagcauagaucgaaa

SEQ ID NO: 2353535 - RNA, 19 nt, Homo sapiens
  misc_RNA (1)...(19): siRNA sense strand
aggugaaggauguuaauga

SEQ ID NO: 2353536 - RNA, 19 nt, Homo sapiens
  misc_RNA (1)...(19): siRNA sense strand
acguggaggugaaggaugu

SEQ ID NO: 2353537 - RNA, 19 nt, Homo sapiens
  misc_RNA (1)...(19): siRNA sense strand
uggccgacgugaacgacaa

SEQ ID NO: 2353538 - RNA, 19 nt, Homo sapiens
  misc_RNA (1)...(19): siRNA sense strand
agaauaaacugguugagcu

SEQ ID NO: 2353539 - RNA, 19 nt, Homo sapiens
  misc_RNA (1)...(19): siRNA sense strand
ccacuuuagcauagaucga

SEQ ID NO: 2353540 - RNA, 19 nt, Homo sapiens
  misc_RNA (1)...(19): siRNA sense strand
gcaccguuuuagugagaau

SEQ ID NO: 2353541 - RNA, 19 nt, Homo sapiens
  misc_RNA (1)...(19): siRNA sense strand
cggagagcggcaaggugua

SEQ ID NO: 2353542 - RNA, 19 nt, Homo sapiens
  misc_RNA (1)...(19): siRNA sense strand
agacggaccucauggccuu

SEQ ID NO: 2353543 - RNA, 19 nt, Homo sapiens
  misc_RNA (1)...(19): siRNA sense strand
gaauaaacugguugagcuc

SEQ ID NO: 2353544 - RNA, 19 nt, Homo sapiens
  misc_RNA (1)...(19): siRNA sense strand
uucaaagaacgaugagaau

SEQ ID NO: 2353545 - RNA, 19 nt, Homo sapiens
  misc_RNA (1)...(19): siRNA sense strand
uggugaaggaucaugguga

SEQ ID NO: 2353546 - RNA, 19 nt, Homo sapiens
  misc_RNA (1)...(19): siRNA sense strand
caacagccgcagagggugu

SEQ ID NO: 2353547 - RNA, 19 nt, Homo sapiens
  misc_RNA (1)...(19): siRNA sense strand
cggcgcugguggaugucaa

SEQ ID NO: 2353548 - RNA, 19 nt, Homo sapiens
  misc_RNA (1)...(19): siRNA sense strand
uggaggugaaggauguuaa

SEQ ID NO: 2353549 - RNA, 19 nt, Homo sapiens
  misc_RNA (1)...(19): siRNA sense strand
cgccaguguuccggguaaa

SEQ ID NO: 2353550 - RNA, 19 nt, Homo sapiens
  misc_RNA (1)...(19): siRNA sense strand
ucauugacgccacggacaa

SEQ ID NO: 2353551 - RNA, 19 nt, Homo sapiens
  misc_RNA (1)...(19): siRNA sense strand
cugaauacgaaguaagaau

SEQ ID NO: 2353552 - RNA, 19 nt, Homo sapiens
  misc_RNA (1)...(19): siRNA sense strand
cgguguucgugaaggagaa

SEQ ID NO: 2353553 - RNA, 19 nt, Homo sapiens
  misc_RNA (1)...(19): siRNA sense strand
auguggacguggaggugaa

SEQ ID NO: 2353554 - RNA, 19 nt, Homo sapiens
  misc_RNA (1)...(19): siRNA sense strand
acuuuagcauagaucgaaa

SEQ ID NO: 2353555 - RNA, 19 nt, Homo sapiens
  misc_RNA (1)...(19): siRNA sense strand
aggugaaggauguuaauga

SEQ ID NO: 2353556 - RNA, 19 nt, Homo sapiens
  misc_RNA (1)...(19): siRNA sense strand
acguggaggugaaggaugu

SEQ ID NO: 2353557 - RNA, 19 nt, Homo sapiens
  misc_RNA (1)...(19): siRNA sense strand
uggccgacgugaacgacaa

SEQ ID NO: 2353558 - RNA, 19 nt, Homo sapiens
  misc_RNA (1)...(19): siRNA sense strand
agaauaaacugguugagcu

SEQ ID NO: 2353559 - RNA, 19 nt, Homo sapiens
  misc_RNA (1)...(19): siRNA sense strand
ccacuuuagcauagaucga

SEQ ID NO: 2353560 - RNA, 19 nt, Homo sapiens
  misc_RNA (1)...(19): siRNA sense strand
gcaccguuuuagugagaau

SEQ ID NO: 2353561 - RNA, 19 nt, Homo sapiens
  misc_RNA (1)...(19): siRNA sense strand
cggagagcggcaaggugua

SEQ ID NO: 2353562 - RNA, 19 nt, Homo sapiens
  misc_RNA (1)...(19): siRNA sense strand
agacggaccucauggccuu

SEQ ID NO: 2353563 - RNA, 19 nt, Homo sapiens
  misc_RNA (1)...(19): siRNA sense strand
gaauaaacugguugagcuc

SEQ ID NO: 2353564 - RNA, 19 nt, Homo sapiens
  misc_RNA (1)...(19): siRNA sense strand
uucaaagaacgaugagaau

SEQ ID NO: 2353565 - RNA, 19 nt, Homo sapiens
  misc_RNA (1)...(19): siRNA sense strand
uggugaaggaucaugguga

SEQ ID NO: 2353566 - RNA, 19 nt, Homo sapiens
  misc_RNA (1)...(19): siRNA sense strand
caacagccgcagagggugu

SEQ ID NO: 2353567 - RNA, 19 nt, Homo sapiens
  misc_RNA (1)...(19): siRNA sense strand
cggcgcugguggaugucaa

SEQ ID NO: 2353568 - RNA, 19 nt, Homo sapiens
  misc_RNA (1)...(19): siRNA sense strand
uggaggugaaggauguuaa

SEQ ID NO: 2353569 - RNA, 19 nt, Homo sapiens
  misc_RNA (1)...(19): siRNA sense strand
cgccaguguuccggguaaa

SEQ ID NO: 2353570 - RNA, 19 nt, Homo sapiens
  misc_RNA (1)...(19): siRNA sense strand
ucauugacgccacggacaa

SEQ ID NO: 2353571 - RNA, 19 nt, Homo sapiens
  misc_RNA (1)...(19): siRNA sense strand
cgguguucgugaaggagaa

SEQ ID NO: 2353572 - RNA, 19 nt, Homo sapiens
  misc_RNA (1)...(19): siRNA sense strand
agacagaccucauggccuu

SEQ ID NO: 2353573 - RNA, 19 nt, Homo sapiens
  misc_RNA (1)...(19): siRNA sense strand
acguggaggugaaggacau

SEQ ID NO: 2353574 - RNA, 19 nt, Homo sapiens
  misc_RNA (1)...(19): siRNA sense strand
auguggacguggaggugaa

SEQ ID NO: 2353575 - RNA, 19 nt, Homo sapiens
  misc_RNA (1)...(19): siRNA sense strand
ugaagaaaguagagcacac

SEQ ID NO: 2353576 - RNA, 19 nt, Homo sapiens
  misc_RNA (1)...(19): siRNA sense strand
cggugaaauuaccagaaaa

SEQ ID NO: 2353577 - RNA, 19 nt, Homo sapiens
  misc_RNA (1)...(19): siRNA sense strand
gugaaggacauuaacgaca

SEQ ID NO: 2353578 - RNA, 19 nt, Homo sapiens
  misc_RNA (1)...(19): siRNA sense strand
uggacuuguauuacggaaa

SEQ ID NO: 2353579 - RNA, 19 nt, Homo sapiens
  misc_RNA (1)...(19): siRNA sense strand
gugcaaauuccguggggau

SEQ ID NO: 2353580 - RNA, 19 nt, Homo sapiens
  misc_RNA (1)...(19): siRNA sense strand
uuguacaguucuuguggaa

SEQ ID NO: 2353581 - RNA, 19 nt, Homo sapiens
  misc_RNA (1)...(19): siRNA sense strand
acuuuuagacagagaagaa

SEQ ID NO: 2353582 - RNA, 19 nt, Homo sapiens
  misc_RNA (1)...(19): siRNA sense strand
gaguauacgguguucguga

SEQ ID NO: 2353583 - RNA, 19 nt, Homo sapiens
  misc_RNA (1)...(19): siRNA sense strand
ucaucacgguacuggacaa

SEQ ID NO: 2353584 - RNA, 19 nt, Homo sapiens
  misc_RNA (1)...(19): siRNA sense strand
uggccgacgugaacgacaa

SEQ ID NO: 2353585 - RNA, 19 nt, Homo sapiens
  misc_RNA (1)...(19): siRNA sense strand
cagauuuagacgaaggcuu

SEQ ID NO: 2353586 - RNA, 19 nt, Homo sapiens
  misc_RNA (1)...(19): siRNA sense strand
acggaaacuuuuagacaga

SEQ ID NO: 2353587 - RNA, 19 nt, Homo sapiens
  misc_RNA (1)...(19): siRNA sense strand
ccccaaugccucagauuua

SEQ ID NO: 2353588 - RNA, 19 nt, Homo sapiens
  misc_RNA (1)...(19): siRNA sense strand
cggagagcggcaaggugua

SEQ ID NO: 2353589 - RNA, 19 nt, Homo sapiens
  misc_RNA (1)...(19): siRNA sense strand
cagcacgacacgagcccua

SEQ ID NO: 2353590 - RNA, 19 nt, Homo sapiens
  misc_RNA (1)...(19): siRNA sense strand
uuguggaaguuguggaugu

SEQ ID NO: 2353591 - RNA, 19 nt, Homo sapiens
  misc_RNA (1)...(19): siRNA sense strand
uggaggugaaggacauuaa

SEQ ID NO: 2353592 - RNA, 19 nt, Homo sapiens
  misc_RNA (1)...(19): siRNA sense strand
cccuguauacggugaaauu

SEQ ID NO: 2353593 - RNA, 19 nt, Homo sapiens
  misc_RNA (1)...(19): siRNA sense strand
ccgagcugguggaugucaa

SEQ ID NO: 2353594 - RNA, 19 nt, Homo sapiens
  misc_RNA (1)...(19): siRNA sense strand
ggaaacuuuuagacagaga

SEQ ID NO: 2353595 - RNA, 19 nt, Homo sapiens
  misc_RNA (1)...(19): siRNA sense strand
cgguguucgugaaggagaa

SEQ ID NO: 2353596 - RNA, 19 nt, Homo sapiens
  misc_RNA (1)...(19): siRNA sense strand
agacagaccucauggccuu

SEQ ID NO: 2353597 - RNA, 19 nt, Homo sapiens
  misc_RNA (1)...(19): siRNA sense strand
acguggaggugaaggacau

SEQ ID NO: 2353598 - RNA, 19 nt, Homo sapiens
  misc_RNA (1)...(19): siRNA sense strand
auguggacguggaggugaa

SEQ ID NO: 2353599 - RNA, 19 nt, Homo sapiens
  misc_RNA (1)...(19): siRNA sense strand
ugaagaaaguagagcacac

SEQ ID NO: 2353600 - RNA, 19 nt, Homo sapiens
  misc_RNA (1)...(19): siRNA sense strand
cggugaaauuaccagaaaa

SEQ ID NO: 2353601 - RNA, 19 nt, Homo sapiens
  misc_RNA (1)...(19): siRNA sense strand
gugaaggacauuaacgaca

SEQ ID NO: 2353602 - RNA, 19 nt, Homo sapiens
  misc_RNA (1)...(19): siRNA sense strand
uggacuuguauuacggaaa

SEQ ID NO: 2353603 - RNA, 19 nt, Homo sapiens
  misc_RNA (1)...(19): siRNA sense strand
gugcaaauuccguggggau

SEQ ID NO: 2353604 - RNA, 19 nt, Homo sapiens
  misc_RNA (1)...(19): siRNA sense strand
uuguacaguucuuguggaa

SEQ ID NO: 2353605 - RNA, 19 nt, Homo sapiens
  misc_RNA (1)...(19): siRNA sense strand
acuuuuagacagagaagaa

SEQ ID NO: 2353606 - RNA, 19 nt, Homo sapiens
  misc_RNA (1)...(19): siRNA sense strand
gaguauacgguguucguga

SEQ ID NO: 2353607 - RNA, 19 nt, Homo sapiens
  misc_RNA (1)...(19): siRNA sense strand
ucaucacgguacuggacaa

SEQ ID NO: 2353608 - RNA, 19 nt, Homo sapiens
  misc_RNA (1)...(19): siRNA sense strand
uggccgacgugaacgacaa

SEQ ID NO: 2353609 - RNA, 19 nt, Homo sapiens
  misc_RNA (1)...(19): siRNA sense strand
cagauuuagacgaaggcuu

SEQ ID NO: 2353610 - RNA, 19 nt, Homo sapiens
  misc_RNA (1)...(19): siRNA sense strand
acggaaacuuuuagacaga

SEQ ID NO: 2353611 - RNA, 19 nt, Homo sapiens
  misc_RNA (1)...(19): siRNA sense strand
ccccaaugccucagauuua

SEQ ID NO: 2353612 - RNA, 19 nt, Homo sapiens
  misc_RNA (1)...(19): siRNA sense strand
cggagagcggcaaggugua

SEQ ID NO: 2353613 - RNA, 19 nt, Homo sapiens
  misc_RNA (1)...(19): siRNA sense strand
cagcacgacacgagcccua

SEQ ID NO: 2353614 - RNA, 19 nt, Homo sapiens
  misc_RNA (1)...(19): siRNA sense strand
uuguggaaguuguggaugu

SEQ ID NO: 2353615 - RNA, 19 nt, Homo sapiens
  misc_RNA (1)...(19): siRNA sense strand
uggaggugaaggacauuaa

SEQ ID NO: 2353616 - RNA, 19 nt, Homo sapiens
  misc_RNA (1)...(19): siRNA sense strand
cccuguauacggugaaauu

SEQ ID NO: 2353617 - RNA, 19 nt, Homo sapiens
  misc_RNA (1)...(19): siRNA sense strand
ccgagcugguggaugucaa

SEQ ID NO: 2353618 - RNA, 19 nt, Homo sapiens
  misc_RNA (1)...(19): siRNA sense strand
ggaaacuuuuagacagaga

SEQ ID NO: 2353619 - RNA, 19 nt, Homo sapiens
  misc_RNA (1)...(19): siRNA sense strand
cugaauacgaaguaagaau

SEQ ID NO: 2353620 - RNA, 19 nt, Homo sapiens
  misc_RNA (1)...(19): siRNA sense strand
cggaggauagauugggaaa

SEQ ID NO: 2353621 - RNA, 19 nt, Homo sapiens
  misc_RNA (1)...(19): siRNA sense strand
uuaaagaaauccuuggaca

SEQ ID NO: 2353622 - RNA, 19 nt, Homo sapiens
  misc_RNA (1)...(19): siRNA sense strand
caguguucgugaaggagaa

SEQ ID NO: 2353623 - RNA, 19 nt, Homo sapiens
  misc_RNA (1)...(19): siRNA sense strand
cgguagaggaacaaagagu

SEQ ID NO: 2353624 - RNA, 19 nt, Homo sapiens
  misc_RNA (1)...(19): siRNA sense strand
ccaaagaccgcgaggaccu

SEQ ID NO: 2353625 - RNA, 19 nt, Homo sapiens
  misc_RNA (1)...(19): siRNA sense strand
acuuuagcauagaucgaaa

SEQ ID NO: 2353626 - RNA, 19 nt, Homo sapiens
  misc_RNA (1)...(19): siRNA sense strand
gggcuagaugugaaaauaa

SEQ ID NO: 2353627 - RNA, 19 nt, Homo sapiens
  misc_RNA (1)...(19): siRNA sense strand
cgaugcagauguuggcuca

SEQ ID NO: 2353628 - RNA, 19 nt, Homo sapiens
  misc_RNA (1)...(19): siRNA sense strand
gcacacaacuuauuccuga

SEQ ID NO: 2353629 - RNA, 19 nt, Homo sapiens
  misc_RNA (1)...(19): siRNA sense strand
ccacuuuagcauagaucga

SEQ ID NO: 2353630 - RNA, 19 nt, Homo sapiens
  misc_RNA (1)...(19): siRNA sense strand
gcaccguuuuagugagaau

SEQ ID NO: 2353631 - RNA, 19 nt, Homo sapiens
  misc_RNA (1)...(19): siRNA sense strand
cggagagcggcaaggugua

SEQ ID NO: 2353632 - RNA, 19 nt, Homo sapiens
  misc_RNA (1)...(19): siRNA sense strand
cagugaugacaauaaacaa

SEQ ID NO: 2353633 - RNA, 19 nt, Homo sapiens
  misc_RNA (1)...(19): siRNA sense strand
ucauugacgccacggacaa

SEQ ID NO: 2353634 - RNA, 19 nt, Homo sapiens
  misc_RNA (1)...(19): siRNA sense strand
cugaauacgaaguaagaau

SEQ ID NO: 2353635 - RNA, 19 nt, Homo sapiens
  misc_RNA (1)...(19): siRNA sense strand
cggaggauagauugggaaa

SEQ ID NO: 2353636 - RNA, 19 nt, Homo sapiens
  misc_RNA (1)...(19): siRNA sense strand
uuaaagaaauccuuggaca

SEQ ID NO: 2353637 - RNA, 19 nt, Homo sapiens
  misc_RNA (1)...(19): siRNA sense strand
caguguucgugaaggagaa

SEQ ID NO: 2353638 - RNA, 19 nt, Homo sapiens
  misc_RNA (1)...(19): siRNA sense strand
cgguagaggaacaaagagu

SEQ ID NO: 2353639 - RNA, 19 nt, Homo sapiens
  misc_RNA (1)...(19): siRNA sense strand
ccaaagaccgcgaggaccu

SEQ ID NO: 2353640 - RNA, 19 nt, Homo sapiens
  misc_RNA (1)...(19): siRNA sense strand
acuuuagcauagaucgaaa

SEQ ID NO: 2353641 - RNA, 19 nt, Homo sapiens
  misc_RNA (1)...(19): siRNA sense strand
gggcuagaugugaaaauaa

SEQ ID NO: 2353642 - RNA, 19 nt, Homo sapiens
  misc_RNA (1)...(19): siRNA sense strand
cgaugcagauguuggcuca

SEQ ID NO: 2353643 - RNA, 19 nt, Homo sapiens
  misc_RNA (1)...(19): siRNA sense strand
gcacacaacuuauuccuga

SEQ ID NO: 2353644 - RNA, 19 nt, Homo sapiens
  misc_RNA (1)...(19): siRNA sense strand
ccacuuuagcauagaucga

SEQ ID NO: 2353645 - RNA, 19 nt, Homo sapiens
  misc_RNA (1)...(19): siRNA sense strand
gcaccguuuuagugagaau

SEQ ID NO: 2353646 - RNA, 19 nt, Homo sapiens
  misc_RNA (1)...(19): siRNA sense strand
cggagagcggcaaggugua

SEQ ID NO: 2353647 - RNA, 19 nt, Homo sapiens
  misc_RNA (1)...(19): siRNA sense strand
cagugaugacaauaaacaa

SEQ ID NO: 2353648 - RNA, 19 nt, Homo sapiens
  misc_RNA (1)...(19): siRNA sense strand
ucauugacgccacggacaa

SEQ ID NO: 2353649 - RNA, 19 nt, Homo sapiens
  misc_RNA (1)...(19): siRNA sense strand
cugaauacgaaguaagaau

SEQ ID NO: 2353650 - RNA, 19 nt, Homo sapiens
  misc_RNA (1)...(19): siRNA sense strand
cggaggauagauugggaaa

SEQ ID NO: 2353651 - RNA, 19 nt, Homo sapiens
  misc_RNA (1)...(19): siRNA sense strand
uuaaagaaauccuuggaca

SEQ ID NO: 2353652 - RNA, 19 nt, Homo sapiens
  misc_RNA (1)...(19): siRNA sense strand
caguguucgugaaggagaa

SEQ ID NO: 2353653 - RNA, 19 nt, Homo sapiens
  misc_RNA (1)...(19): siRNA sense strand
cgguagaggaacaaagagu

SEQ ID NO: 2353654 - RNA, 19 nt, Homo sapiens
  misc_RNA (1)...(19): siRNA sense strand
ccaaagaccgcgaggaccu

SEQ ID NO: 2353655 - RNA, 19 nt, Homo sapiens
  misc_RNA (1)...(19): siRNA sense strand
acuuuagcauagaucgaaa

SEQ ID NO: 2353656 - RNA, 19 nt, Homo sapiens
  misc_RNA (1)...(19): siRNA sense strand
gggcuagaugugaaaauaa

SEQ ID NO: 2353657 - RNA, 19 nt, Homo sapiens
  misc_RNA (1)...(19): siRNA sense strand
cgaugcagauguuggcuca

SEQ ID NO: 2353658 - RNA, 19 nt, Homo sapiens
  misc_RNA (1)...(19): siRNA sense strand
gcacacaacuuauuccuga

SEQ ID NO: 2353659 - RNA, 19 nt, Homo sapiens
  misc_RNA (1)...(19): siRNA sense strand
ccacuuuagcauagaucga

SEQ ID NO: 2353660 - RNA, 19 nt, Homo sapiens
  misc_RNA (1)...(19): siRNA sense strand
gcaccguuuuagugagaau

SEQ ID NO: 2353661 - RNA, 19 nt, Homo sapiens
  misc_RNA (1)...(19): siRNA sense strand
cggagagcggcaaggugua

SEQ ID NO: 2353662 - RNA, 19 nt, Homo sapiens
  misc_RNA (1)...(19): siRNA sense strand
cagugaugacaauaaacaa

SEQ ID NO: 2353663 - RNA, 19 nt, Homo sapiens
  misc_RNA (1)...(19): siRNA sense strand
ucauugacgccacggacaa

SEQ ID NO: 2353664 - RNA, 19 nt, Homo sapiens
  misc_RNA (1)...(19): siRNA sense strand
cuguaaaguaguagugaaa

SEQ ID NO: 2353665 - RNA, 19 nt, Homo sapiens
  misc_RNA (1)...(19): siRNA sense strand
aauaaaaguuaacggggaa

SEQ ID NO: 2353666 - RNA, 19 nt, Homo sapiens
  misc_RNA (1)...(19): siRNA sense strand
ccguguucgugaaggagaa

SEQ ID NO: 2353667 - RNA, 19 nt, Homo sapiens
  misc_RNA (1)...(19): siRNA sense strand
aaacagaccucauggccuu

SEQ ID NO: 2353668 - RNA, 19 nt, Homo sapiens
  misc_RNA (1)...(19): siRNA sense strand
ggauuuggauauuggagca

SEQ ID NO: 2353669 - RNA, 19 nt, Homo sapiens
  misc_RNA (1)...(19): siRNA sense strand
cagaggagacagagggugu

SEQ ID NO: 2353670 - RNA, 19 nt, Homo sapiens
  misc_RNA (1)...(19): siRNA sense strand
acuguaaaguaguagugaa

SEQ ID NO: 2353671 - RNA, 19 nt, Homo sapiens
  misc_RNA (1)...(19): siRNA sense strand
cuuagauagagaagaaaca

SEQ ID NO: 2353672 - RNA, 19 nt, Homo sapiens
  misc_RNA (1)...(19): siRNA sense strand
uggaaguggccgacgugaa

SEQ ID NO: 2353673 - RNA, 19 nt, Homo sapiens
  misc_RNA (1)...(19): siRNA sense strand
agguuaaauccaaacgaau

SEQ ID NO: 2353674 - RNA, 19 nt, Homo sapiens
  misc_RNA (1)...(19): siRNA sense strand
gagcugguuuugaggaaau

SEQ ID NO: 2353675 - RNA, 19 nt, Homo sapiens
  misc_RNA (1)...(19): siRNA sense strand
agaagaaacacaagaacac

SEQ ID NO: 2353676 - RNA, 19 nt, Homo sapiens
  misc_RNA (1)...(19): siRNA sense strand
aaauaaaaguuaacgggga

SEQ ID NO: 2353677 - RNA, 19 nt, Homo sapiens
  misc_RNA (1)...(19): siRNA sense strand
uggccgacgugaacgacaa

SEQ ID NO: 2353678 - RNA, 19 nt, Homo sapiens
  misc_RNA (1)...(19): siRNA sense strand
augaagaagaaacgaacuu

SEQ ID NO: 2353679 - RNA, 19 nt, Homo sapiens
  misc_RNA (1)...(19): siRNA sense strand
uggcagugaaggacaucaa

SEQ ID NO: 2353680 - RNA, 19 nt, Homo sapiens
  misc_RNA (1)...(19): siRNA sense strand
ugcaacugauggaggaaaa

SEQ ID NO: 2353681 - RNA, 19 nt, Homo sapiens
  misc_RNA (1)...(19): siRNA sense strand
augucagauuguuggaaaa

SEQ ID NO: 2353682 - RNA, 19 nt, Homo sapiens
  misc_RNA (1)...(19): siRNA sense strand
cggagagcggcaaggugua

SEQ ID NO: 2353683 - RNA, 19 nt, Homo sapiens
  misc_RNA (1)...(19): siRNA sense strand
ggauauuggagcaaaugca

SEQ ID NO: 2353684 - RNA, 19 nt, Homo sapiens
  misc_RNA (1)...(19): siRNA sense strand
caguauaccguguucguga

SEQ ID NO: 2353685 - RNA, 19 nt, Homo sapiens
  misc_RNA (1)...(19): siRNA sense strand
gauugcaacugauggagga

SEQ ID NO: 2353686 - RNA, 19 nt, Homo sapiens
  misc_RNA (1)...(19): siRNA sense strand
uauuggagcaaaugcacaa

SEQ ID NO: 2353687 - RNA, 19 nt, Homo sapiens
  misc_RNA (1)...(19): siRNA sense strand
ucgcagcagaggagacaga

SEQ ID NO: 2353688 - RNA, 19 nt, Homo sapiens
  misc_RNA (1)...(19): siRNA sense strand
cuguaaaguaguagugaaa

SEQ ID NO: 2353689 - RNA, 19 nt, Homo sapiens
  misc_RNA (1)...(19): siRNA sense strand
aauaaaaguuaacggggaa

SEQ ID NO: 2353690 - RNA, 19 nt, Homo sapiens
  misc_RNA (1)...(19): siRNA sense strand
ccguguucgugaaggagaa

SEQ ID NO: 2353691 - RNA, 19 nt, Homo sapiens
  misc_RNA (1)...(19): siRNA sense strand
aaacagaccucauggccuu

SEQ ID NO: 2353692 - RNA, 19 nt, Homo sapiens
  misc_RNA (1)...(19): siRNA sense strand
ggauuuggauauuggagca

SEQ ID NO: 2353693 - RNA, 19 nt, Homo sapiens
  misc_RNA (1)...(19): siRNA sense strand
cagaggagacagagggugu

SEQ ID NO: 2353694 - RNA, 19 nt, Homo sapiens
  misc_RNA (1)...(19): siRNA sense strand
acuguaaaguaguagugaa

SEQ ID NO: 2353695 - RNA, 19 nt, Homo sapiens
  misc_RNA (1)...(19): siRNA sense strand
cuuagauagagaagaaaca

SEQ ID NO: 2353696 - RNA, 19 nt, Homo sapiens
  misc_RNA (1)...(19): siRNA sense strand
uggaaguggccgacgugaa

SEQ ID NO: 2353697 - RNA, 19 nt, Homo sapiens
  misc_RNA (1)...(19): siRNA sense strand
agguuaaauccaaacgaau

SEQ ID NO: 2353698 - RNA, 19 nt, Homo sapiens
  misc_RNA (1)...(19): siRNA sense strand
gagcugguuuugaggaaau

SEQ ID NO: 2353699 - RNA, 19 nt, Homo sapiens
  misc_RNA (1)...(19): siRNA sense strand
agaagaaacacaagaacac

SEQ ID NO: 2353700 - RNA, 19 nt, Homo sapiens
  misc_RNA (1)...(19): siRNA sense strand
aaauaaaaguuaacgggga

SEQ ID NO: 2353701 - RNA, 19 nt, Homo sapiens
  misc_RNA (1)...(19): siRNA sense strand
uggccgacgugaacgacaa

SEQ ID NO: 2353702 - RNA, 19 nt, Homo sapiens
  misc_RNA (1)...(19): siRNA sense strand
augaagaagaaacgaacuu

SEQ ID NO: 2353703 - RNA, 19 nt, Homo sapiens
  misc_RNA (1)...(19): siRNA sense strand
uggcagugaaggacaucaa

SEQ ID NO: 2353704 - RNA, 19 nt, Homo sapiens
  misc_RNA (1)...(19): siRNA sense strand
ugcaacugauggaggaaaa

SEQ ID NO: 2353705 - RNA, 19 nt, Homo sapiens
  misc_RNA (1)...(19): siRNA sense strand
augucagauuguuggaaaa

SEQ ID NO: 2353706 - RNA, 19 nt, Homo sapiens
  misc_RNA (1)...(19): siRNA sense strand
cggagagcggcaaggugua

SEQ ID NO: 2353707 - RNA, 19 nt, Homo sapiens
  misc_RNA (1)...(19): siRNA sense strand
ggauauuggagcaaaugca

SEQ ID NO: 2353708 - RNA, 19 nt, Homo sapiens
  misc_RNA (1)...(19): siRNA sense strand
caguauaccguguucguga

SEQ ID NO: 2353709 - RNA, 19 nt, Homo sapiens
  misc_RNA (1)...(19): siRNA sense strand
gauugcaacugauggagga

SEQ ID NO: 2353710 - RNA, 19 nt, Homo sapiens
  misc_RNA (1)...(19): siRNA sense strand
uauuggagcaaaugcacaa

SEQ ID NO: 2353711 - RNA, 19 nt, Homo sapiens
  misc_RNA (1)...(19): siRNA sense strand
ucgcagcagaggagacaga

SEQ ID NO: 2353712 - RNA, 19 nt, Homo sapiens
  misc_RNA (1)...(19): siRNA sense strand
gguaaaaggucuugggcuu

SEQ ID NO: 2353713 - RNA, 19 nt, Homo sapiens
  misc_RNA (1)...(19): siRNA sense strand
uuguagaguuauuguggaa

SEQ ID NO: 2353714 - RNA, 19 nt, Homo sapiens
  misc_RNA (1)...(19): siRNA sense strand
ucacaguacuggaugccaa

SEQ ID NO: 2353715 - RNA, 19 nt, Homo sapiens
  misc_RNA (1)...(19): siRNA sense strand
uggaaguagaagacaacaa

SEQ ID NO: 2353716 - RNA, 19 nt, Homo sapiens
  misc_RNA (1)...(19): siRNA sense strand
cagauuuagacgaaggauu

SEQ ID NO: 2353717 - RNA, 19 nt, Homo sapiens
  misc_RNA (1)...(19): siRNA sense strand
caguguucgugaaggagaa

SEQ ID NO: 2353718 - RNA, 19 nt, Homo sapiens
  misc_RNA (1)...(19): siRNA sense strand
cugaugacgagcugguaaa

SEQ ID NO: 2353719 - RNA, 19 nt, Homo sapiens
  misc_RNA (1)...(19): siRNA sense strand
aaauuauuguagagggcau

SEQ ID NO: 2353720 - RNA, 19 nt, Homo sapiens
  misc_RNA (1)...(19): siRNA sense strand
uuaccugacucuagggaca

SEQ ID NO: 2353721 - RNA, 19 nt, Homo sapiens
  misc_RNA (1)...(19): siRNA sense strand
agccacugauggaggcaaa

SEQ ID NO: 2353722 - RNA, 19 nt, Homo sapiens
  misc_RNA (1)...(19): siRNA sense strand
ggugagauuacuagaaaau

SEQ ID NO: 2353723 - RNA, 19 nt, Homo sapiens
  misc_RNA (1)...(19): siRNA sense strand
ccgacaaagacaugggugu

SEQ ID NO: 2353724 - RNA, 19 nt, Homo sapiens
  misc_RNA (1)...(19): siRNA sense strand
uuguagagggcauugauaa

SEQ ID NO: 2353725 - RNA, 19 nt, Homo sapiens
  misc_RNA (1)...(19): siRNA sense strand
gcugcagacaacugaggaa

SEQ ID NO: 2353726 - RNA, 19 nt, Homo sapiens
  misc_RNA (1)...(19): siRNA sense strand
acuuacagacugagcccaa

SEQ ID NO: 2353727 - RNA, 19 nt, Homo sapiens
  misc_RNA (1)...(19): siRNA sense strand
ccugaugacgagcugguaa

SEQ ID NO: 2353728 - RNA, 19 nt, Homo sapiens
  misc_RNA (1)...(19): siRNA sense strand
aguuauuguggaaguagaa

SEQ ID NO: 2353729 - RNA, 19 nt, Homo sapiens
  misc_RNA (1)...(19): siRNA sense strand
cgauaaugucccagauuug

SEQ ID NO: 2353730 - RNA, 19 nt, Homo sapiens
  misc_RNA (1)...(19): siRNA sense strand
cggagagcggcaaggugua

SEQ ID NO: 2353731 - RNA, 19 nt, Homo sapiens
  misc_RNA (1)...(19): siRNA sense strand
uggccauuguagaguuauu

SEQ ID NO: 2353732 - RNA, 19 nt, Homo sapiens
  misc_RNA (1)...(19): siRNA sense strand
aaguagaagacaacaacga

SEQ ID NO: 2353733 - RNA, 19 nt, Homo sapiens
  misc_RNA (1)...(19): siRNA sense strand
agaccgaccucauggccuu

SEQ ID NO: 2353734 - RNA, 19 nt, Homo sapiens
  misc_RNA (1)...(19): siRNA sense strand
aggugagauuacuagaaaa

SEQ ID NO: 2353735 - RNA, 19 nt, Homo sapiens
  misc_RNA (1)...(19): siRNA sense strand
ccuaugagcugguggugac

SEQ ID NO: 2353736 - RNA, 19 nt, Homo sapiens
  misc_RNA (1)...(19): siRNA sense strand
gguaaaaggucuugggcuu

SEQ ID NO: 2353737 - RNA, 19 nt, Homo sapiens
  misc_RNA (1)...(19): siRNA sense strand
uuguagaguuauuguggaa

SEQ ID NO: 2353738 - RNA, 19 nt, Homo sapiens
  misc_RNA (1)...(19): siRNA sense strand
ucacaguacuggaugccaa

SEQ ID NO: 2353739 - RNA, 19 nt, Homo sapiens
  misc_RNA (1)...(19): siRNA sense strand
uggaaguagaagacaacaa

SEQ ID NO: 2353740 - RNA, 19 nt, Homo sapiens
  misc_RNA (1)...(19): siRNA sense strand
cagauuuagacgaaggauu

SEQ ID NO: 2353741 - RNA, 19 nt, Homo sapiens
  misc_RNA (1)...(19): siRNA sense strand
caguguucgugaaggagaa

SEQ ID NO: 2353742 - RNA, 19 nt, Homo sapiens
  misc_RNA (1)...(19): siRNA sense strand
cugaugacgagcugguaaa

SEQ ID NO: 2353743 - RNA, 19 nt, Homo sapiens
  misc_RNA (1)...(19): siRNA sense strand
aaauuauuguagagggcau

SEQ ID NO: 2353744 - RNA, 19 nt, Homo sapiens
  misc_RNA (1)...(19): siRNA sense strand
uuaccugacucuagggaca

SEQ ID NO: 2353745 - RNA, 19 nt, Homo sapiens
  misc_RNA (1)...(19): siRNA sense strand
agccacugauggaggcaaa

SEQ ID NO: 2353746 - RNA, 19 nt, Homo sapiens
  misc_RNA (1)...(19): siRNA sense strand
ggugagauuacuagaaaau

SEQ ID NO: 2353747 - RNA, 19 nt, Homo sapiens
  misc_RNA (1)...(19): siRNA sense strand
ccgacaaagacaugggugu

SEQ ID NO: 2353748 - RNA, 19 nt, Homo sapiens
  misc_RNA (1)...(19): siRNA sense strand
uuguagagggcauugauaa

SEQ ID NO: 2353749 - RNA, 19 nt, Homo sapiens
  misc_RNA (1)...(19): siRNA sense strand
gcugcagacaacugaggaa

SEQ ID NO: 2353750 - RNA, 19 nt, Homo sapiens
  misc_RNA (1)...(19): siRNA sense strand
acuuacagacugagcccaa

SEQ ID NO: 2353751 - RNA, 19 nt, Homo sapiens
  misc_RNA (1)...(19): siRNA sense strand
ccugaugacgagcugguaa

SEQ ID NO: 2353752 - RNA, 19 nt, Homo sapiens
  misc_RNA (1)...(19): siRNA sense strand
aguuauuguggaaguagaa

SEQ ID NO: 2353753 - RNA, 19 nt, Homo sapiens
  misc_RNA (1)...(19): siRNA sense strand
cgauaaugucccagauuug

SEQ ID NO: 2353754 - RNA, 19 nt, Homo sapiens
  misc_RNA (1)...(19): siRNA sense strand
cggagagcggcaaggugua

SEQ ID NO: 2353755 - RNA, 19 nt, Homo sapiens
  misc_RNA (1)...(19): siRNA sense strand
uggccauuguagaguuauu

SEQ ID NO: 2353756 - RNA, 19 nt, Homo sapiens
  misc_RNA (1)...(19): siRNA sense strand
aaguagaagacaacaacga

SEQ ID NO: 2353757 - RNA, 19 nt, Homo sapiens
  misc_RNA (1)...(19): siRNA sense strand
agaccgaccucauggccuu

SEQ ID NO: 2353758 - RNA, 19 nt, Homo sapiens
  misc_RNA (1)...(19): siRNA sense strand
aggugagauuacuagaaaa

SEQ ID NO: 2353759 - RNA, 19 nt, Homo sapiens
  misc_RNA (1)...(19): siRNA sense strand
ccuaugagcugguggugac

SEQ ID NO: 2353760 - RNA, 19 nt, Homo sapiens
  misc_RNA (1)...(19): siRNA sense strand
agcaauugauggugggaaa

SEQ ID NO: 2353761 - RNA, 19 nt, Homo sapiens
  misc_RNA (1)...(19): siRNA sense strand
gggauagagaggagaaaca

SEQ ID NO: 2353762 - RNA, 19 nt, Homo sapiens
  misc_RNA (1)...(19): siRNA sense strand
agguagaagccacggauaa

SEQ ID NO: 2353763 - RNA, 19 nt, Homo sapiens
  misc_RNA (1)...(19): siRNA sense strand
agguggaagugaaggacau

SEQ ID NO: 2353764 - RNA, 19 nt, Homo sapiens
  misc_RNA (1)...(19): siRNA sense strand
cgguguucgugaaggagaa

SEQ ID NO: 2353765 - RNA, 19 nt, Homo sapiens
  misc_RNA (1)...(19): siRNA sense strand
ucgaaauuguggacaucaa

SEQ ID NO: 2353766 - RNA, 19 nt, Homo sapiens
  misc_RNA (1)...(19): siRNA sense strand
ucggauagaccgcgaggaa

SEQ ID NO: 2353767 - RNA, 19 nt, Homo sapiens
  misc_RNA (1)...(19): siRNA sense strand
ccuuggacguuaaaagaaa

SEQ ID NO: 2353768 - RNA, 19 nt, Homo sapiens
  misc_RNA (1)...(19): siRNA sense strand
auguggagguggaagugaa

SEQ ID NO: 2353769 - RNA, 19 nt, Homo sapiens
  misc_RNA (1)...(19): siRNA sense strand
aaauuuaaaucgagaggac

SEQ ID NO: 2353770 - RNA, 19 nt, Homo sapiens
  misc_RNA (1)...(19): siRNA sense strand
cugcacugguggaugucaa

SEQ ID NO: 2353771 - RNA, 19 nt, Homo sapiens
  misc_RNA (1)...(19): siRNA sense strand
uggccgacgugaacgacaa

SEQ ID NO: 2353772 - RNA, 19 nt, Homo sapiens
  misc_RNA (1)...(19): siRNA sense strand
uguccaauuagccgggaua

SEQ ID NO: 2353773 - RNA, 19 nt, Homo sapiens
  misc_RNA (1)...(19): siRNA sense strand
agaaacaggauguggacgu

SEQ ID NO: 2353774 - RNA, 19 nt, Homo sapiens
  misc_RNA (1)...(19): siRNA sense strand
cgagcuacgugucgguaca

SEQ ID NO: 2353775 - RNA, 19 nt, Homo sapiens
  misc_RNA (1)...(19): siRNA sense strand
uuugagaggacgaucuaua

SEQ ID NO: 2353776 - RNA, 19 nt, Homo sapiens
  misc_RNA (1)...(19): siRNA sense strand
cggagagcggcaaggugua

SEQ ID NO: 2353777 - RNA, 19 nt, Homo sapiens
  misc_RNA (1)...(19): siRNA sense strand
cguugaucucucagccaaa

SEQ ID NO: 2353778 - RNA, 19 nt, Homo sapiens
  misc_RNA (1)...(19): siRNA sense strand
aagccacggauaaaggaaa

SEQ ID NO: 2353779 - RNA, 19 nt, Homo sapiens
  misc_RNA (1)...(19): siRNA sense strand
agccacggauaaaggaaau

SEQ ID NO: 2353780 - RNA, 19 nt, Homo sapiens
  misc_RNA (1)...(19): siRNA sense strand
agaugcagauaucggaaca

SEQ ID NO: 2353781 - RNA, 19 nt, Homo sapiens
  misc_RNA (1)...(19): siRNA sense strand
ccgauuuggaugaaggagu

SEQ ID NO: 2353782 - RNA, 19 nt, Homo sapiens
  misc_RNA (1)...(19): siRNA sense strand
uaaauaaggauaucgcgua

SEQ ID NO: 2353783 - RNA, 19 nt, Homo sapiens
  misc_RNA (1)...(19): siRNA sense strand
cggacaugucagcagauau

SEQ ID NO: 2353784 - RNA, 19 nt, Homo sapiens
  misc_RNA (1)...(19): siRNA sense strand
cagguagaagccacggaua

SEQ ID NO: 2353785 - RNA, 19 nt, Homo sapiens
  misc_RNA (1)...(19): siRNA sense strand
ccgggauagagaggagaaa

SEQ ID NO: 2353786 - RNA, 19 nt, Homo sapiens
  misc_RNA (1)...(19): siRNA sense strand
ccuaugagcugguggugac

SEQ ID NO: 2353787 - RNA, 19 nt, Homo sapiens
  misc_RNA (1)...(19): siRNA sense strand
gggcuguacacgggagaga

SEQ ID NO: 2353788 - RNA, 19 nt, Homo sapiens
  misc_RNA (1)...(19): siRNA sense strand
agcaauugauggugggaaa

SEQ ID NO: 2353789 - RNA, 19 nt, Homo sapiens
  misc_RNA (1)...(19): siRNA sense strand
gggauagagaggagaaaca

SEQ ID NO: 2353790 - RNA, 19 nt, Homo sapiens
  misc_RNA (1)...(19): siRNA sense strand
agguagaagccacggauaa

SEQ ID NO: 2353791 - RNA, 19 nt, Homo sapiens
  misc_RNA (1)...(19): siRNA sense strand
agguggaagugaaggacau

SEQ ID NO: 2353792 - RNA, 19 nt, Homo sapiens
  misc_RNA (1)...(19): siRNA sense strand
cgguguucgugaaggagaa

SEQ ID NO: 2353793 - RNA, 19 nt, Homo sapiens
  misc_RNA (1)...(19): siRNA sense strand
ucgaaauuguggacaucaa

SEQ ID NO: 2353794 - RNA, 19 nt, Homo sapiens
  misc_RNA (1)...(19): siRNA sense strand
ucggauagaccgcgaggaa

SEQ ID NO: 2353795 - RNA, 19 nt, Homo sapiens
  misc_RNA (1)...(19): siRNA sense strand
ccuuggacguuaaaagaaa

SEQ ID NO: 2353796 - RNA, 19 nt, Homo sapiens
  misc_RNA (1)...(19): siRNA sense strand
auguggagguggaagugaa

SEQ ID NO: 2353797 - RNA, 19 nt, Homo sapiens
  misc_RNA (1)...(19): siRNA sense strand
aaauuuaaaucgagaggac

SEQ ID NO: 2353798 - RNA, 19 nt, Homo sapiens
  misc_RNA (1)...(19): siRNA sense strand
cugcacugguggaugucaa

SEQ ID NO: 2353799 - RNA, 19 nt, Homo sapiens
  misc_RNA (1)...(19): siRNA sense strand
uggccgacgugaacgacaa

SEQ ID NO: 2353800 - RNA, 19 nt, Homo sapiens
  misc_RNA (1)...(19): siRNA sense strand
uguccaauuagccgggaua

SEQ ID NO: 2353801 - RNA, 19 nt, Homo sapiens
  misc_RNA (1)...(19): siRNA sense strand
agaaacaggauguggacgu

SEQ ID NO: 2353802 - RNA, 19 nt, Homo sapiens
  misc_RNA (1)...(19): siRNA sense strand
cgagcuacgugucgguaca

SEQ ID NO: 2353803 - RNA, 19 nt, Homo sapiens
  misc_RNA (1)...(19): siRNA sense strand
uuugagaggacgaucuaua

SEQ ID NO: 2353804 - RNA, 19 nt, Homo sapiens
  misc_RNA (1)...(19): siRNA sense strand
cggagagcggcaaggugua

SEQ ID NO: 2353805 - RNA, 19 nt, Homo sapiens
  misc_RNA (1)...(19): siRNA sense strand
cguugaucucucagccaaa

SEQ ID NO: 2353806 - RNA, 19 nt, Homo sapiens
  misc_RNA (1)...(19): siRNA sense strand
aagccacggauaaaggaaa

SEQ ID NO: 2353807 - RNA, 19 nt, Homo sapiens
  misc_RNA (1)...(19): siRNA sense strand
agccacggauaaaggaaau

SEQ ID NO: 2353808 - RNA, 19 nt, Homo sapiens
  misc_RNA (1)...(19): siRNA sense strand
agaugcagauaucggaaca

SEQ ID NO: 2353809 - RNA, 19 nt, Homo sapiens
  misc_RNA (1)...(19): siRNA sense strand
ccgauuuggaugaaggagu

SEQ ID NO: 2353810 - RNA, 19 nt, Homo sapiens
  misc_RNA (1)...(19): siRNA sense strand
uaaauaaggauaucgcgua

SEQ ID NO: 2353811 - RNA, 19 nt, Homo sapiens
  misc_RNA (1)...(19): siRNA sense strand
cggacaugucagcagauau

SEQ ID NO: 2353812 - RNA, 19 nt, Homo sapiens
  misc_RNA (1)...(19): siRNA sense strand
cagguagaagccacggaua

SEQ ID NO: 2353813 - RNA, 19 nt, Homo sapiens
  misc_RNA (1)...(19): siRNA sense strand
ccgggauagagaggagaaa

SEQ ID NO: 2353814 - RNA, 19 nt, Homo sapiens
  misc_RNA (1)...(19): siRNA sense strand
ccuaugagcugguggugac

SEQ ID NO: 2353815 - RNA, 19 nt, Homo sapiens
  misc_RNA (1)...(19): siRNA sense strand
gggcuguacacgggagaga

SEQ ID NO: 2353816 - RNA, 19 nt, Homo sapiens
  misc_RNA (1)...(19): siRNA sense strand
aaucagaauacguaggaaa

SEQ ID NO: 2353817 - RNA, 19 nt, Homo sapiens
  misc_RNA (1)...(19): siRNA sense strand
cauuaaaacuuguggacau

SEQ ID NO: 2353818 - RNA, 19 nt, Homo sapiens
  misc_RNA (1)...(19): siRNA sense strand
aggaaacugcugagguuaa

SEQ ID NO: 2353819 - RNA, 19 nt, Homo sapiens
  misc_RNA (1)...(19): siRNA sense strand
aaaucagaacuaagggaaa

SEQ ID NO: 2353820 - RNA, 19 nt, Homo sapiens
  misc_RNA (1)...(19): siRNA sense strand
auguggaaguggaggugaa

SEQ ID NO: 2353821 - RNA, 19 nt, Homo sapiens
  misc_RNA (1)...(19): siRNA sense strand
uguuagagaauacggcaaa

SEQ ID NO: 2353822 - RNA, 19 nt, Homo sapiens
  misc_RNA (1)...(19): siRNA sense strand
aaguggaggugaaggacau

SEQ ID NO: 2353823 - RNA, 19 nt, Homo sapiens
  misc_RNA (1)...(19): siRNA sense strand
gaagcaaaguccuacgaga

SEQ ID NO: 2353824 - RNA, 19 nt, Homo sapiens
  misc_RNA (1)...(19): siRNA sense strand
gaaaucagaacuaagggaa

SEQ ID NO: 2353825 - RNA, 19 nt, Homo sapiens
  misc_RNA (1)...(19): siRNA sense strand
augaagaagcaaaguccua

SEQ ID NO: 2353826 - RNA, 19 nt, Homo sapiens
  misc_RNA (1)...(19): siRNA sense strand
aaucagaacuaagggaaaa

SEQ ID NO: 2353827 - RNA, 19 nt, Homo sapiens
  misc_RNA (1)...(19): siRNA sense strand
uccuagauauacaggcaaa

SEQ ID NO: 2353828 - RNA, 19 nt, Homo sapiens
  misc_RNA (1)...(19): siRNA sense strand
gugaaggacauuaacgaca

SEQ ID NO: 2353829 - RNA, 19 nt, Homo sapiens
  misc_RNA (1)...(19): siRNA sense strand
uggaaguggaggugaagga

SEQ ID NO: 2353830 - RNA, 19 nt, Homo sapiens
  misc_RNA (1)...(19): siRNA sense strand
uguaaaugacaaugaacca

SEQ ID NO: 2353831 - RNA, 19 nt, Homo sapiens
  misc_RNA (1)...(19): siRNA sense strand
ggugaaggaccacggcgaa

SEQ ID NO: 2353832 - RNA, 19 nt, Homo sapiens
  misc_RNA (1)...(19): siRNA sense strand
gaaccagcguugacagcca

SEQ ID NO: 2353833 - RNA, 19 nt, Homo sapiens
  misc_RNA (1)...(19): siRNA sense strand
aaugaugaacuaagcgaau

SEQ ID NO: 2353834 - RNA, 19 nt, Homo sapiens
  misc_RNA (1)...(19): siRNA sense strand
uggccgacgugaacgacaa

SEQ ID NO: 2353835 - RNA, 19 nt, Homo sapiens
  misc_RNA (1)...(19): siRNA sense strand
caguaaagacuauccgguu

SEQ ID NO: 2353836 - RNA, 19 nt, Homo sapiens
  misc_RNA (1)...(19): siRNA sense strand
cggagagcggcaaggugua

SEQ ID NO: 2353837 - RNA, 19 nt, Homo sapiens
  misc_RNA (1)...(19): siRNA sense strand
agacggaccucauggccuu

SEQ ID NO: 2353838 - RNA, 19 nt, Homo sapiens
  misc_RNA (1)...(19): siRNA sense strand
gguggaaaguggccaggca

SEQ ID NO: 2353839 - RNA, 19 nt, Homo sapiens
  misc_RNA (1)...(19): siRNA sense strand
ggaaaucagaacuaaggga

SEQ ID NO: 2353840 - RNA, 19 nt, Homo sapiens
  misc_RNA (1)...(19): siRNA sense strand
uggaggugaaggacauuaa

SEQ ID NO: 2353841 - RNA, 19 nt, Homo sapiens
  misc_RNA (1)...(19): siRNA sense strand
augcagauauaggaguaaa

SEQ ID NO: 2353842 - RNA, 19 nt, Homo sapiens
  misc_RNA (1)...(19): siRNA sense strand
uauucgugaaggagaacaa

SEQ ID NO: 2353843 - RNA, 19 nt, Homo sapiens
  misc_RNA (1)...(19): siRNA sense strand
gagaauacggcaaauggga

SEQ ID NO: 2353844 - RNA, 19 nt, Homo sapiens
  misc_RNA (1)...(19): siRNA sense strand
gcgagagcgugucagccua

SEQ ID NO: 2353845 - RNA, 19 nt, Homo sapiens
  misc_RNA (1)...(19): siRNA sense strand
ccuaugagcugguggugac

SEQ ID NO: 2353846 - RNA, 19 nt, Homo sapiens
  misc_RNA (1)...(19): siRNA sense strand
aaucagaauacguaggaaa

SEQ ID NO: 2353847 - RNA, 19 nt, Homo sapiens
  misc_RNA (1)...(19): siRNA sense strand
cauuaaaacuuguggacau

SEQ ID NO: 2353848 - RNA, 19 nt, Homo sapiens
  misc_RNA (1)...(19): siRNA sense strand
aggaaacugcugagguuaa

SEQ ID NO: 2353849 - RNA, 19 nt, Homo sapiens
  misc_RNA (1)...(19): siRNA sense strand
aaaucagaacuaagggaaa

SEQ ID NO: 2353850 - RNA, 19 nt, Homo sapiens
  misc_RNA (1)...(19): siRNA sense strand
auguggaaguggaggugaa

SEQ ID NO: 2353851 - RNA, 19 nt, Homo sapiens
  misc_RNA (1)...(19): siRNA sense strand
uguuagagaauacggcaaa

SEQ ID NO: 2353852 - RNA, 19 nt, Homo sapiens
  misc_RNA (1)...(19): siRNA sense strand
aaguggaggugaaggacau

SEQ ID NO: 2353853 - RNA, 19 nt, Homo sapiens
  misc_RNA (1)...(19): siRNA sense strand
gaagcaaaguccuacgaga

SEQ ID NO: 2353854 - RNA, 19 nt, Homo sapiens
  misc_RNA (1)...(19): siRNA sense strand
gaaaucagaacuaagggaa

SEQ ID NO: 2353855 - RNA, 19 nt, Homo sapiens
  misc_RNA (1)...(19): siRNA sense strand
augaagaagcaaaguccua

SEQ ID NO: 2353856 - RNA, 19 nt, Homo sapiens
  misc_RNA (1)...(19): siRNA sense strand
aaucagaacuaagggaaaa

SEQ ID NO: 2353857 - RNA, 19 nt, Homo sapiens
  misc_RNA (1)...(19): siRNA sense strand
uccuagauauacaggcaaa

SEQ ID NO: 2353858 - RNA, 19 nt, Homo sapiens
  misc_RNA (1)...(19): siRNA sense strand
gugaaggacauuaacgaca

SEQ ID NO: 2353859 - RNA, 19 nt, Homo sapiens
  misc_RNA (1)...(19): siRNA sense strand
uggaaguggaggugaagga

SEQ ID NO: 2353860 - RNA, 19 nt, Homo sapiens
  misc_RNA (1)...(19): siRNA sense strand
uguaaaugacaaugaacca

SEQ ID NO: 2353861 - RNA, 19 nt, Homo sapiens
  misc_RNA (1)...(19): siRNA sense strand
ggugaaggaccacggcgaa

SEQ ID NO: 2353862 - RNA, 19 nt, Homo sapiens
  misc_RNA (1)...(19): siRNA sense strand
gaaccagcguugacagcca

SEQ ID NO: 2353863 - RNA, 19 nt, Homo sapiens
  misc_RNA (1)...(19): siRNA sense strand
aaugaugaacuaagcgaau

SEQ ID NO: 2353864 - RNA, 19 nt, Homo sapiens
  misc_RNA (1)...(19): siRNA sense strand
uggccgacgugaacgacaa

SEQ ID NO: 2353865 - RNA, 19 nt, Homo sapiens
  misc_RNA (1)...(19): siRNA sense strand
caguaaagacuauccgguu

SEQ ID NO: 2353866 - RNA, 19 nt, Homo sapiens
  misc_RNA (1)...(19): siRNA sense strand
cggagagcggcaaggugua

SEQ ID NO: 2353867 - RNA, 19 nt, Homo sapiens
  misc_RNA (1)...(19): siRNA sense strand
agacggaccucauggccuu

SEQ ID NO: 2353868 - RNA, 19 nt, Homo sapiens
  misc_RNA (1)...(19): siRNA sense strand
gguggaaaguggccaggca

SEQ ID NO: 2353869 - RNA, 19 nt, Homo sapiens
  misc_RNA (1)...(19): siRNA sense strand
ggaaaucagaacuaaggga

SEQ ID NO: 2353870 - RNA, 19 nt, Homo sapiens
  misc_RNA (1)...(19): siRNA sense strand
uggaggugaaggacauuaa

SEQ ID NO: 2353871 - RNA, 19 nt, Homo sapiens
  misc_RNA (1)...(19): siRNA sense strand
augcagauauaggaguaaa

SEQ ID NO: 2353872 - RNA, 19 nt, Homo sapiens
  misc_RNA (1)...(19): siRNA sense strand
uauucgugaaggagaacaa

SEQ ID NO: 2353873 - RNA, 19 nt, Homo sapiens
  misc_RNA (1)...(19): siRNA sense strand
gagaauacggcaaauggga

SEQ ID NO: 2353874 - RNA, 19 nt, Homo sapiens
  misc_RNA (1)...(19): siRNA sense strand
gcgagagcgugucagccua

SEQ ID NO: 2353875 - RNA, 19 nt, Homo sapiens
  misc_RNA (1)...(19): siRNA sense strand
ccuaugagcugguggugac

SEQ ID NO: 2353876 - RNA, 19 nt, Homo sapiens
  misc_RNA (1)...(19): siRNA sense strand
aaucagaauacguaggaaa

SEQ ID NO: 2353877 - RNA, 19 nt, Homo sapiens
  misc_RNA (1)...(19): siRNA sense strand
cauuaaaacuuguggacau

SEQ ID NO: 2353878 - RNA, 19 nt, Homo sapiens
  misc_RNA (1)...(19): siRNA sense strand
aggaaacugcugagguuaa

SEQ ID NO: 2353879 - RNA, 19 nt, Homo sapiens
  misc_RNA (1)...(19): siRNA sense strand
aaaucagaacuaagggaaa

SEQ ID NO: 2353880 - RNA, 19 nt, Homo sapiens
  misc_RNA (1)...(19): siRNA sense strand
auguggaaguggaggugaa

SEQ ID NO: 2353881 - RNA, 19 nt, Homo sapiens
  misc_RNA (1)...(19): siRNA sense strand
uguuagagaauacggcaaa

SEQ ID NO: 2353882 - RNA, 19 nt, Homo sapiens
  misc_RNA (1)...(19): siRNA sense strand
aaguggaggugaaggacau

SEQ ID NO: 2353883 - RNA, 19 nt, Homo sapiens
  misc_RNA (1)...(19): siRNA sense strand
gaagcaaaguccuacgaga

SEQ ID NO: 2353884 - RNA, 19 nt, Homo sapiens
  misc_RNA (1)...(19): siRNA sense strand
gaaaucagaacuaagggaa

SEQ ID NO: 2353885 - RNA, 19 nt, Homo sapiens
  misc_RNA (1)...(19): siRNA sense strand
augaagaagcaaaguccua

SEQ ID NO: 2353886 - RNA, 19 nt, Homo sapiens
  misc_RNA (1)...(19): siRNA sense strand
aaucagaacuaagggaaaa

SEQ ID NO: 2353887 - RNA, 19 nt, Homo sapiens
  misc_RNA (1)...(19): siRNA sense strand
uccuagauauacaggcaaa

SEQ ID NO: 2353888 - RNA, 19 nt, Homo sapiens
  misc_RNA (1)...(19): siRNA sense strand
gugaaggacauuaacgaca

SEQ ID NO: 2353889 - RNA, 19 nt, Homo sapiens
  misc_RNA (1)...(19): siRNA sense strand
uggaaguggaggugaagga

SEQ ID NO: 2353890 - RNA, 19 nt, Homo sapiens
  misc_RNA (1)...(19): siRNA sense strand
uguaaaugacaaugaacca

SEQ ID NO: 2353891 - RNA, 19 nt, Homo sapiens
  misc_RNA (1)...(19): siRNA sense strand
ggugaaggaccacggcgaa

SEQ ID NO: 2353892 - RNA, 19 nt, Homo sapiens
  misc_RNA (1)...(19): siRNA sense strand
gaaccagcguugacagcca

SEQ ID NO: 2353893 - RNA, 19 nt, Homo sapiens
  misc_RNA (1)...(19): siRNA sense strand
aaugaugaacuaagcgaau

SEQ ID NO: 2353894 - RNA, 19 nt, Homo sapiens
  misc_RNA (1)...(19): siRNA sense strand
uggccgacgugaacgacaa

SEQ ID NO: 2353895 - RNA, 19 nt, Homo sapiens
  misc_RNA (1)...(19): siRNA sense strand
caguaaagacuauccgguu

SEQ ID NO: 2353896 - RNA, 19 nt, Homo sapiens
  misc_RNA (1)...(19): siRNA sense strand
cggagagcggcaaggugua

SEQ ID NO: 2353897 - RNA, 19 nt, Homo sapiens
  misc_RNA (1)...(19): siRNA sense strand
agacggaccucauggccuu

SEQ ID NO: 2353898 - RNA, 19 nt, Homo sapiens
  misc_RNA (1)...(19): siRNA sense strand
gguggaaaguggccaggca

SEQ ID NO: 2353899 - RNA, 19 nt, Homo sapiens
  misc_RNA (1)...(19): siRNA sense strand
ggaaaucagaacuaaggga

SEQ ID NO: 2353900 - RNA, 19 nt, Homo sapiens
  misc_RNA (1)...(19): siRNA sense strand
uggaggugaaggacauuaa

SEQ ID NO: 2353901 - RNA, 19 nt, Homo sapiens
  misc_RNA (1)...(19): siRNA sense strand
augcagauauaggaguaaa

SEQ ID NO: 2353902 - RNA, 19 nt, Homo sapiens
  misc_RNA (1)...(19): siRNA sense strand
uauucgugaaggagaacaa

SEQ ID NO: 2353903 - RNA, 19 nt, Homo sapiens
  misc_RNA (1)...(19): siRNA sense strand
gagaauacggcaaauggga

SEQ ID NO: 2353904 - RNA, 19 nt, Homo sapiens
  misc_RNA (1)...(19): siRNA sense strand
gcgagagcgugucagccua

SEQ ID NO: 2353905 - RNA, 19 nt, Homo sapiens
  misc_RNA (1)...(19): siRNA sense strand
ccuaugagcugguggugac

SEQ ID NO: 2353906 - RNA, 19 nt, Homo sapiens
  misc_RNA (1)...(19): siRNA sense strand
gaguaaaucucuuuggcuu

SEQ ID NO: 2353907 - RNA, 19 nt, Homo sapiens
  misc_RNA (1)...(19): siRNA sense strand
aggugaaggugaaagacau

SEQ ID NO: 2353908 - RNA, 19 nt, Homo sapiens
  misc_RNA (1)...(19): siRNA sense strand
ggugaaggugaaagacauu

SEQ ID NO: 2353909 - RNA, 19 nt, Homo sapiens
  misc_RNA (1)...(19): siRNA sense strand
agugaugaacugaguaaau

SEQ ID NO: 2353910 - RNA, 19 nt, Homo sapiens
  misc_RNA (1)...(19): siRNA sense strand
auguggaggugaaggugaa

SEQ ID NO: 2353911 - RNA, 19 nt, Homo sapiens
  misc_RNA (1)...(19): siRNA sense strand
cuucaggggcagagaacaa

SEQ ID NO: 2353912 - RNA, 19 nt, Homo sapiens
  misc_RNA (1)...(19): siRNA sense strand
uguagaggcaagugaugaa

SEQ ID NO: 2353913 - RNA, 19 nt, Homo sapiens
  misc_RNA (1)...(19): siRNA sense strand
uggcuugaauugagaaaau

SEQ ID NO: 2353914 - RNA, 19 nt, Homo sapiens
  misc_RNA (1)...(19): siRNA sense strand
ggauagagaagaaacacca

SEQ ID NO: 2353915 - RNA, 19 nt, Homo sapiens
  misc_RNA (1)...(19): siRNA sense strand
uggugaaagugcuggaugu

SEQ ID NO: 2353916 - RNA, 19 nt, Homo sapiens
  misc_RNA (1)...(19): siRNA sense strand
acgcucagcccgagugauu

SEQ ID NO: 2353917 - RNA, 19 nt, Homo sapiens
  misc_RNA (1)...(19): siRNA sense strand
cgaagguguaaauggugaa

SEQ ID NO: 2353918 - RNA, 19 nt, Homo sapiens
  misc_RNA (1)...(19): siRNA sense strand
acgaagguguaaaugguga

SEQ ID NO: 2353919 - RNA, 19 nt, Homo sapiens
  misc_RNA (1)...(19): siRNA sense strand
uggccgacgugaaugacaa

SEQ ID NO: 2353920 - RNA, 19 nt, Homo sapiens
  misc_RNA (1)...(19): siRNA sense strand
uggaggugaaggugaaaga

SEQ ID NO: 2353921 - RNA, 19 nt, Homo sapiens
  misc_RNA (1)...(19): siRNA sense strand
cgaaauucaaguaaaggca

SEQ ID NO: 2353922 - RNA, 19 nt, Homo sapiens
  misc_RNA (1)...(19): siRNA sense strand
cggagagcggcaaggugua

SEQ ID NO: 2353923 - RNA, 19 nt, Homo sapiens
  misc_RNA (1)...(19): siRNA sense strand
cgauagaaggagcugcuga

SEQ ID NO: 2353924 - RNA, 19 nt, Homo sapiens
  misc_RNA (1)...(19): siRNA sense strand
acuguaagguuuuggugaa

SEQ ID NO: 2353925 - RNA, 19 nt, Homo sapiens
  misc_RNA (1)...(19): siRNA sense strand
gacuacagcaaauggaaca

SEQ ID NO: 2353926 - RNA, 19 nt, Homo sapiens
  misc_RNA (1)...(19): siRNA sense strand
ggcaguugauaaaggaagu

SEQ ID NO: 2353927 - RNA, 19 nt, Homo sapiens
  misc_RNA (1)...(19): siRNA sense strand
uguaaaugauaaugcucca

SEQ ID NO: 2353928 - RNA, 19 nt, Homo sapiens
  misc_RNA (1)...(19): siRNA sense strand
gcuggauguaaaugauaau

SEQ ID NO: 2353929 - RNA, 19 nt, Homo sapiens
  misc_RNA (1)...(19): siRNA sense strand
uauucgugaaggagaacaa

SEQ ID NO: 2353930 - RNA, 19 nt, Homo sapiens
  misc_RNA (1)...(19): siRNA sense strand
cucaggagaaauuagguua

SEQ ID NO: 2353931 - RNA, 19 nt, Homo sapiens
  misc_RNA (1)...(19): siRNA sense strand
gaguaaaucucuuuggcuu

SEQ ID NO: 2353932 - RNA, 19 nt, Homo sapiens
  misc_RNA (1)...(19): siRNA sense strand
aggugaaggugaaagacau

SEQ ID NO: 2353933 - RNA, 19 nt, Homo sapiens
  misc_RNA (1)...(19): siRNA sense strand
ggugaaggugaaagacauu

SEQ ID NO: 2353934 - RNA, 19 nt, Homo sapiens
  misc_RNA (1)...(19): siRNA sense strand
agugaugaacugaguaaau

SEQ ID NO: 2353935 - RNA, 19 nt, Homo sapiens
  misc_RNA (1)...(19): siRNA sense strand
auguggaggugaaggugaa

SEQ ID NO: 2353936 - RNA, 19 nt, Homo sapiens
  misc_RNA (1)...(19): siRNA sense strand
cuucaggggcagagaacaa

SEQ ID NO: 2353937 - RNA, 19 nt, Homo sapiens
  misc_RNA (1)...(19): siRNA sense strand
uguagaggcaagugaugaa

SEQ ID NO: 2353938 - RNA, 19 nt, Homo sapiens
  misc_RNA (1)...(19): siRNA sense strand
uggcuugaauugagaaaau

SEQ ID NO: 2353939 - RNA, 19 nt, Homo sapiens
  misc_RNA (1)...(19): siRNA sense strand
ggauagagaagaaacacca

SEQ ID NO: 2353940 - RNA, 19 nt, Homo sapiens
  misc_RNA (1)...(19): siRNA sense strand
uggugaaagugcuggaugu

SEQ ID NO: 2353941 - RNA, 19 nt, Homo sapiens
  misc_RNA (1)...(19): siRNA sense strand
acgcucagcccgagugauu

SEQ ID NO: 2353942 - RNA, 19 nt, Homo sapiens
  misc_RNA (1)...(19): siRNA sense strand
cgaagguguaaauggugaa

SEQ ID NO: 2353943 - RNA, 19 nt, Homo sapiens
  misc_RNA (1)...(19): siRNA sense strand
acgaagguguaaaugguga

SEQ ID NO: 2353944 - RNA, 19 nt, Homo sapiens
  misc_RNA (1)...(19): siRNA sense strand
uggccgacgugaaugacaa

SEQ ID NO: 2353945 - RNA, 19 nt, Homo sapiens
  misc_RNA (1)...(19): siRNA sense strand
uggaggugaaggugaaaga

SEQ ID NO: 2353946 - RNA, 19 nt, Homo sapiens
  misc_RNA (1)...(19): siRNA sense strand
cgaaauucaaguaaaggca

SEQ ID NO: 2353947 - RNA, 19 nt, Homo sapiens
  misc_RNA (1)...(19): siRNA sense strand
cggagagcggcaaggugua

SEQ ID NO: 2353948 - RNA, 19 nt, Homo sapiens
  misc_RNA (1)...(19): siRNA sense strand
cgauagaaggagcugcuga

SEQ ID NO: 2353949 - RNA, 19 nt, Homo sapiens
  misc_RNA (1)...(19): siRNA sense strand
acuguaagguuuuggugaa

SEQ ID NO: 2353950 - RNA, 19 nt, Homo sapiens
  misc_RNA (1)...(19): siRNA sense strand
gacuacagcaaauggaaca

SEQ ID NO: 2353951 - RNA, 19 nt, Homo sapiens
  misc_RNA (1)...(19): siRNA sense strand
ggcaguugauaaaggaagu

SEQ ID NO: 2353952 - RNA, 19 nt, Homo sapiens
  misc_RNA (1)...(19): siRNA sense strand
uguaaaugauaaugcucca

SEQ ID NO: 2353953 - RNA, 19 nt, Homo sapiens
  misc_RNA (1)...(19): siRNA sense strand
gcuggauguaaaugauaau

SEQ ID NO: 2353954 - RNA, 19 nt, Homo sapiens
  misc_RNA (1)...(19): siRNA sense strand
uauucgugaaggagaacaa

SEQ ID NO: 2353955 - RNA, 19 nt, Homo sapiens
  misc_RNA (1)...(19): siRNA sense strand
cucaggagaaauuagguua

SEQ ID NO: 2353956 - RNA, 19 nt, Homo sapiens
  misc_RNA (1)...(19): siRNA sense strand
gaguaaaucucuuuggcuu

SEQ ID NO: 2353957 - RNA, 19 nt, Homo sapiens
  misc_RNA (1)...(19): siRNA sense strand
aggugaaggugaaagacau

SEQ ID NO: 2353958 - RNA, 19 nt, Homo sapiens
  misc_RNA (1)...(19): siRNA sense strand
ggugaaggugaaagacauu

SEQ ID NO: 2353959 - RNA, 19 nt, Homo sapiens
  misc_RNA (1)...(19): siRNA sense strand
agugaugaacugaguaaau

SEQ ID NO: 2353960 - RNA, 19 nt, Homo sapiens
  misc_RNA (1)...(19): siRNA sense strand
auguggaggugaaggugaa

SEQ ID NO: 2353961 - RNA, 19 nt, Homo sapiens
  misc_RNA (1)...(19): siRNA sense strand
cuucaggggcagagaacaa

SEQ ID NO: 2353962 - RNA, 19 nt, Homo sapiens
  misc_RNA (1)...(19): siRNA sense strand
uguagaggcaagugaugaa

SEQ ID NO: 2353963 - RNA, 19 nt, Homo sapiens
  misc_RNA (1)...(19): siRNA sense strand
uggcuugaauugagaaaau

SEQ ID NO: 2353964 - RNA, 19 nt, Homo sapiens
  misc_RNA (1)...(19): siRNA sense strand
ggauagagaagaaacacca

SEQ ID NO: 2353965 - RNA, 19 nt, Homo sapiens
  misc_RNA (1)...(19): siRNA sense strand
uggugaaagugcuggaugu

SEQ ID NO: 2353966 - RNA, 19 nt, Homo sapiens
  misc_RNA (1)...(19): siRNA sense strand
acgcucagcccgagugauu

SEQ ID NO: 2353967 - RNA, 19 nt, Homo sapiens
  misc_RNA (1)...(19): siRNA sense strand
cgaagguguaaauggugaa

SEQ ID NO: 2353968 - RNA, 19 nt, Homo sapiens
  misc_RNA (1)...(19): siRNA sense strand
acgaagguguaaaugguga

SEQ ID NO: 2353969 - RNA, 19 nt, Homo sapiens
  misc_RNA (1)...(19): siRNA sense strand
uggccgacgugaaugacaa

SEQ ID NO: 2353970 - RNA, 19 nt, Homo sapiens
  misc_RNA (1)...(19): siRNA sense strand
uggaggugaaggugaaaga

SEQ ID NO: 2353971 - RNA, 19 nt, Homo sapiens
  misc_RNA (1)...(19): siRNA sense strand
cgaaauucaaguaaaggca

SEQ ID NO: 2353972 - RNA, 19 nt, Homo sapiens
  misc_RNA (1)...(19): siRNA sense strand
cggagagcggcaaggugua

SEQ ID NO: 2353973 - RNA, 19 nt, Homo sapiens
  misc_RNA (1)...(19): siRNA sense strand
cgauagaaggagcugcuga

SEQ ID NO: 2353974 - RNA, 19 nt, Homo sapiens
  misc_RNA (1)...(19): siRNA sense strand
acuguaagguuuuggugaa

SEQ ID NO: 2353975 - RNA, 19 nt, Homo sapiens
  misc_RNA (1)...(19): siRNA sense strand
gacuacagcaaauggaaca

SEQ ID NO: 2353976 - RNA, 19 nt, Homo sapiens
  misc_RNA (1)...(19): siRNA sense strand
ggcaguugauaaaggaagu

SEQ ID NO: 2353977 - RNA, 19 nt, Homo sapiens
  misc_RNA (1)...(19): siRNA sense strand
uguaaaugauaaugcucca

SEQ ID NO: 2353978 - RNA, 19 nt, Homo sapiens
  misc_RNA (1)...(19): siRNA sense strand
gcuggauguaaaugauaau

SEQ ID NO: 2353979 - RNA, 19 nt, Homo sapiens
  misc_RNA (1)...(19): siRNA sense strand
uauucgugaaggagaacaa

SEQ ID NO: 2353980 - RNA, 19 nt, Homo sapiens
  misc_RNA (1)...(19): siRNA sense strand
cucaggagaaauuagguua

SEQ ID NO: 2353981 - RNA, 19 nt, Homo sapiens
  misc_RNA (1)...(19): siRNA sense strand
ggaaggauccggaggcaga

SEQ ID NO: 2353982 - RNA, 19 nt, Homo sapiens
  misc_RNA (1)...(19): siRNA sense strand
ccugaaggcccgagagcau

SEQ ID NO: 2353983 - RNA, 19 nt, Homo sapiens
  misc_RNA (1)...(19): siRNA sense strand
ggaagaugguagaggaggu

SEQ ID NO: 2353984 - RNA, 19 nt, Homo sapiens
  misc_RNA (1)...(19): siRNA sense strand
cuguggagaucgugggcau

SEQ ID NO: 2353985 - RNA, 19 nt, Homo sapiens
  misc_RNA (1)...(19): siRNA sense strand
ggauguuugaugagcgaau

SEQ ID NO: 2353986 - RNA, 19 nt, Homo sapiens
  misc_RNA (1)...(19): siRNA sense strand
gggaaugcucggucagaca

SEQ ID NO: 2353987 - RNA, 19 nt, Homo sapiens
  misc_RNA (1)...(19): siRNA sense strand
gcacagagaaggggagaau

SEQ ID NO: 2353988 - RNA, 19 nt, Homo sapiens
  misc_RNA (1)...(19): siRNA sense strand
ugguagaggagguguuuga

SEQ ID NO: 2353989 - RNA, 19 nt, Homo sapiens
  misc_RNA (1)...(19): siRNA sense strand
gugcaauggccaauguaca

SEQ ID NO: 2353990 - RNA, 19 nt, Homo sapiens
  misc_RNA (1)...(19): siRNA sense strand
cugaugaagaugacgccaa

SEQ ID NO: 2353991 - RNA, 19 nt, Homo sapiens
  misc_RNA (1)...(19): siRNA sense strand
uucccaagcgcaagagaaa

SEQ ID NO: 2353992 - RNA, 19 nt, Homo sapiens
  misc_RNA (1)...(19): siRNA sense strand
ccgaaggccagccgaguau

SEQ ID NO: 2353993 - RNA, 19 nt, Homo sapiens
  misc_RNA (1)...(19): siRNA sense strand
gaggauguuugaugagcga

SEQ ID NO: 2353994 - RNA, 19 nt, Homo sapiens
  misc_RNA (1)...(19): siRNA sense strand
gcagcauucccaagcgcaa

SEQ ID NO: 2353995 - RNA, 19 nt, Homo sapiens
  misc_RNA (1)...(19): siRNA sense strand
auguguaccuucugcggaa

SEQ ID NO: 2353996 - RNA, 19 nt, Homo sapiens
  misc_RNA (1)...(19): siRNA sense strand
caauaagaaauacggggaa

SEQ ID NO: 2353997 - RNA, 19 nt, Homo sapiens
  misc_RNA (1)...(19): siRNA sense strand
aggaaaccgaggacaucaa

SEQ ID NO: 2353998 - RNA, 19 nt, Homo sapiens
  misc_RNA (1)...(19): siRNA sense strand
ccuugaccuugcugggaau

SEQ ID NO: 2353999 - RNA, 19 nt, Homo sapiens
  misc_RNA (1)...(19): siRNA sense strand
agaaauacggugaggcccu

SEQ ID NO: 2354000 - RNA, 19 nt, Homo sapiens
  misc_RNA (1)...(19): siRNA sense strand
ccggaaggagcuacaguca

SEQ ID NO: 2354001 - RNA, 19 nt, Homo sapiens
  misc_RNA (1)...(19): siRNA sense strand
ggaaggauccggaggcaga

SEQ ID NO: 2354002 - RNA, 19 nt, Homo sapiens
  misc_RNA (1)...(19): siRNA sense strand
ccugaaggcccgagagcau

SEQ ID NO: 2354003 - RNA, 19 nt, Homo sapiens
  misc_RNA (1)...(19): siRNA sense strand
ggaagaugguagaggaggu

SEQ ID NO: 2354004 - RNA, 19 nt, Homo sapiens
  misc_RNA (1)...(19): siRNA sense strand
cuguggagaucgugggcau

SEQ ID NO: 2354005 - RNA, 19 nt, Homo sapiens
  misc_RNA (1)...(19): siRNA sense strand
ggauguuugaugagcgaau

SEQ ID NO: 2354006 - RNA, 19 nt, Homo sapiens
  misc_RNA (1)...(19): siRNA sense strand
gggaaugcucggucagaca

SEQ ID NO: 2354007 - RNA, 19 nt, Homo sapiens
  misc_RNA (1)...(19): siRNA sense strand
gcacagagaaggggagaau

SEQ ID NO: 2354008 - RNA, 19 nt, Homo sapiens
  misc_RNA (1)...(19): siRNA sense strand
ugguagaggagguguuuga

SEQ ID NO: 2354009 - RNA, 19 nt, Homo sapiens
  misc_RNA (1)...(19): siRNA sense strand
gugcaauggccaauguaca

SEQ ID NO: 2354010 - RNA, 19 nt, Homo sapiens
  misc_RNA (1)...(19): siRNA sense strand
cugaugaagaugacgccaa

SEQ ID NO: 2354011 - RNA, 19 nt, Homo sapiens
  misc_RNA (1)...(19): siRNA sense strand
uucccaagcgcaagagaaa

SEQ ID NO: 2354012 - RNA, 19 nt, Homo sapiens
  misc_RNA (1)...(19): siRNA sense strand
ccgaaggccagccgaguau

SEQ ID NO: 2354013 - RNA, 19 nt, Homo sapiens
  misc_RNA (1)...(19): siRNA sense strand
gaggauguuugaugagcga

SEQ ID NO: 2354014 - RNA, 19 nt, Homo sapiens
  misc_RNA (1)...(19): siRNA sense strand
gcagcauucccaagcgcaa

SEQ ID NO: 2354015 - RNA, 19 nt, Homo sapiens
  misc_RNA (1)...(19): siRNA sense strand
auguguaccuucugcggaa

SEQ ID NO: 2354016 - RNA, 19 nt, Homo sapiens
  misc_RNA (1)...(19): siRNA sense strand
caauaagaaauacggggaa

SEQ ID NO: 2354017 - RNA, 19 nt, Homo sapiens
  misc_RNA (1)...(19): siRNA sense strand
aggaaaccgaggacaucaa

SEQ ID NO: 2354018 - RNA, 19 nt, Homo sapiens
  misc_RNA (1)...(19): siRNA sense strand
ccuugaccuugcugggaau

SEQ ID NO: 2354019 - RNA, 19 nt, Homo sapiens
  misc_RNA (1)...(19): siRNA sense strand
agaaauacggugaggcccu

SEQ ID NO: 2354020 - RNA, 19 nt, Homo sapiens
  misc_RNA (1)...(19): siRNA sense strand
ccggaaggagcuacaguca

SEQ ID NO: 2354021 - RNA, 19 nt, Homo sapiens
  misc_RNA (1)...(19): siRNA sense strand
ccgaggaggcagagcacaa

SEQ ID NO: 2354022 - RNA, 19 nt, Homo sapiens
  misc_RNA (1)...(19): siRNA sense strand
ucucagaggugcuggccaa

SEQ ID NO: 2354023 - RNA, 19 nt, Homo sapiens
  misc_RNA (1)...(19): siRNA sense strand
ggauggauguccuggccaa

SEQ ID NO: 2354024 - RNA, 19 nt, Homo sapiens
  misc_RNA (1)...(19): siRNA sense strand
ccaggaaacuucuaggaca

SEQ ID NO: 2354025 - RNA, 19 nt, Homo sapiens
  misc_RNA (1)...(19): siRNA sense strand
gcaccuacuucuacgccaa

SEQ ID NO: 2354026 - RNA, 19 nt, Homo sapiens
  misc_RNA (1)...(19): siRNA sense strand
ccaaugaggccaagugcga

SEQ ID NO: 2354027 - RNA, 19 nt, Homo sapiens
  misc_RNA (1)...(19): siRNA sense strand
gggcugagauugaggacug

SEQ ID NO: 2354028 - RNA, 19 nt, Homo sapiens
  misc_RNA (1)...(19): siRNA sense strand
ugauggaggugcugcccua

SEQ ID NO: 2354029 - RNA, 19 nt, Homo sapiens
  misc_RNA (1)...(19): siRNA sense strand
acuauggaguggaggagga

SEQ ID NO: 2354030 - RNA, 19 nt, Homo sapiens
  misc_RNA (1)...(19): siRNA sense strand
cugaggaggaggagcuaca

SEQ ID NO: 2354031 - RNA, 19 nt, Homo sapiens
  misc_RNA (1)...(19): siRNA sense strand
cuucuaggacagaggcuau

SEQ ID NO: 2354032 - RNA, 19 nt, Homo sapiens
  misc_RNA (1)...(19): siRNA sense strand
caggaaacuucuaggacag

SEQ ID NO: 2354033 - RNA, 19 nt, Homo sapiens
  misc_RNA (1)...(19): siRNA sense strand
ccaggaugcuacagcggau

SEQ ID NO: 2354034 - RNA, 19 nt, Homo sapiens
  misc_RNA (1)...(19): siRNA sense strand
uggacuacguguuggagga

SEQ ID NO: 2354035 - RNA, 19 nt, Homo sapiens
  misc_RNA (1)...(19): siRNA sense strand
acgccaaggccaaggugau

SEQ ID NO: 2354036 - RNA, 19 nt, Homo sapiens
  misc_RNA (1)...(19): siRNA sense strand
gagcacaaggagauggagu

SEQ ID NO: 2354037 - RNA, 19 nt, Homo sapiens
  misc_RNA (1)...(19): siRNA sense strand
gugcagaucgccacgggaa

SEQ ID NO: 2354038 - RNA, 19 nt, Homo sapiens
  misc_RNA (1)...(19): siRNA sense strand
guacauucucccugcguga

SEQ ID NO: 2354039 - RNA, 19 nt, Homo sapiens
  misc_RNA (1)...(19): siRNA sense strand
uggacagagcccuggguga

SEQ ID NO: 2354040 - RNA, 19 nt, Homo sapiens
  misc_RNA (1)...(19): siRNA sense strand
ggugaaaaguuguggcaga

SEQ ID NO: 2354041 - RNA, 19 nt, Homo sapiens
  misc_RNA (1)...(19): siRNA sense strand
ccaacaaauacauggugaa

SEQ ID NO: 2354042 - RNA, 19 nt, Homo sapiens
  misc_RNA (1)...(19): siRNA sense strand
uugaagacaugguggccaa

SEQ ID NO: 2354043 - RNA, 19 nt, Homo sapiens
  misc_RNA (1)...(19): siRNA sense strand
gcgaggugccuuuggaaaa

SEQ ID NO: 2354044 - RNA, 19 nt, Homo sapiens
  misc_RNA (1)...(19): siRNA sense strand
cugacgaauuugaagacau

SEQ ID NO: 2354045 - RNA, 19 nt, Homo sapiens
  misc_RNA (1)...(19): siRNA sense strand
aguuuaaugcugacgaauu

SEQ ID NO: 2354046 - RNA, 19 nt, Homo sapiens
  misc_RNA (1)...(19): siRNA sense strand
acauggugucugaugaaua

SEQ ID NO: 2354047 - RNA, 19 nt, Homo sapiens
  misc_RNA (1)...(19): siRNA sense strand
cuggguagaaagaaggcaa

SEQ ID NO: 2354048 - RNA, 19 nt, Homo sapiens
  misc_RNA (1)...(19): siRNA sense strand
ucacgaaguuuaaugcuga

SEQ ID NO: 2354049 - RNA, 19 nt, Homo sapiens
  misc_RNA (1)...(19): siRNA sense strand
gccaacaaauacaugguga

SEQ ID NO: 2354050 - RNA, 19 nt, Homo sapiens
  misc_RNA (1)...(19): siRNA sense strand
aagaacaagccguacccaa

SEQ ID NO: 2354051 - RNA, 19 nt, Homo sapiens
  misc_RNA (1)...(19): siRNA sense strand
agguaaagggccugaaaga

SEQ ID NO: 2354052 - RNA, 19 nt, Homo sapiens
  misc_RNA (1)...(19): siRNA sense strand
aaucaauaguggaugaaca

SEQ ID NO: 2354053 - RNA, 19 nt, Homo sapiens
  misc_RNA (1)...(19): siRNA sense strand
guaugaaaggaaugaggua

SEQ ID NO: 2354054 - RNA, 19 nt, Homo sapiens
  misc_RNA (1)...(19): siRNA sense strand
ccaaggaagcacaggcgaa

SEQ ID NO: 2354055 - RNA, 19 nt, Homo sapiens
  misc_RNA (1)...(19): siRNA sense strand
aggcaaagccacagccaga

SEQ ID NO: 2354056 - RNA, 19 nt, Homo sapiens
  misc_RNA (1)...(19): siRNA sense strand
cagaagaaacccaggucau

SEQ ID NO: 2354057 - RNA, 19 nt, Homo sapiens
  misc_RNA (1)...(19): siRNA sense strand
gaaaugaagaucaaggaca

SEQ ID NO: 2354058 - RNA, 19 nt, Homo sapiens
  misc_RNA (1)...(19): siRNA sense strand
gggacuaccugaucgggaa

SEQ ID NO: 2354059 - RNA, 19 nt, Homo sapiens
  misc_RNA (1)...(19): siRNA sense strand
agucgaagcggcagaagaa

SEQ ID NO: 2354060 - RNA, 19 nt, Homo sapiens
  misc_RNA (1)...(19): siRNA sense strand
acaagaugcugauggccaa

SEQ ID NO: 2354061 - RNA, 19 nt, Homo sapiens
  misc_RNA (1)...(19): siRNA sense strand
aagaaaaggccauggauuu

SEQ ID NO: 2354062 - RNA, 19 nt, Homo sapiens
  misc_RNA (1)...(19): siRNA sense strand
gaguauucccagaaagaca

SEQ ID NO: 2354063 - RNA, 19 nt, Homo sapiens
  misc_RNA (1)...(19): siRNA sense strand
agagaguaacaaagaagaa

SEQ ID NO: 2354064 - RNA, 19 nt, Homo sapiens
  misc_RNA (1)...(19): siRNA sense strand
augaaaggaaugagguaga

SEQ ID NO: 2354065 - RNA, 19 nt, Homo sapiens
  misc_RNA (1)...(19): siRNA sense strand
ccuaaaagcagcuccaaaa

SEQ ID NO: 2354066 - RNA, 19 nt, Homo sapiens
  misc_RNA (1)...(19): siRNA sense strand
cgaucgauggccagcaaua

SEQ ID NO: 2354067 - RNA, 19 nt, Homo sapiens
  misc_RNA (1)...(19): siRNA sense strand
gguuaagcgaucucagcaa

SEQ ID NO: 2354068 - RNA, 19 nt, Homo sapiens
  misc_RNA (1)...(19): siRNA sense strand
caauaguggaugaacaaga

SEQ ID NO: 2354069 - RNA, 19 nt, Homo sapiens
  misc_RNA (1)...(19): siRNA sense strand
gggagacagcugugggcau

SEQ ID NO: 2354070 - RNA, 19 nt, Homo sapiens
  misc_RNA (1)...(19): siRNA sense strand
gcaaacagggcgcaggaga

SEQ ID NO: 2354071 - RNA, 19 nt, Homo sapiens
  misc_RNA (1)...(19): siRNA sense strand
gggucagcguguucggcua

SEQ ID NO: 2354072 - RNA, 19 nt, Homo sapiens
  misc_RNA (1)...(19): siRNA sense strand
ccaaagagggaaaaggaga

SEQ ID NO: 2354073 - RNA, 19 nt, Homo sapiens
  misc_RNA (1)...(19): siRNA sense strand
uggagcagguggaagaaaa

SEQ ID NO: 2354074 - RNA, 19 nt, Homo sapiens
  misc_RNA (1)...(19): siRNA sense strand
uggcuuaauauuuggucua

SEQ ID NO: 2354075 - RNA, 19 nt, Homo sapiens
  misc_RNA (1)...(19): siRNA sense strand
gcagaaugucagcugguau

SEQ ID NO: 2354076 - RNA, 19 nt, Homo sapiens
  misc_RNA (1)...(19): siRNA sense strand
gaguuugauauuaguggaa

SEQ ID NO: 2354077 - RNA, 19 nt, Homo sapiens
  misc_RNA (1)...(19): siRNA sense strand
cagagacagcugauaacaa

SEQ ID NO: 2354078 - RNA, 19 nt, Homo sapiens
  misc_RNA (1)...(19): siRNA sense strand
gccugaaagaggaagguga

SEQ ID NO: 2354079 - RNA, 19 nt, Homo sapiens
  misc_RNA (1)...(19): siRNA sense strand
uugcuaaugaagagacaau

SEQ ID NO: 2354080 - RNA, 19 nt, Homo sapiens
  misc_RNA (1)...(19): siRNA sense strand
gcgcaggagacacagagaa

SEQ ID NO: 2354081 - RNA, 19 nt, Homo sapiens
  misc_RNA (1)...(19): siRNA sense strand
gcauugaauucaugaggcu

SEQ ID NO: 2354082 - RNA, 19 nt, Homo sapiens
  misc_RNA (1)...(19): siRNA sense strand
gcgaagaagcugacagagc

SEQ ID NO: 2354083 - RNA, 19 nt, Homo sapiens
  misc_RNA (1)...(19): siRNA sense strand
aucaauaguggaugaacaa

SEQ ID NO: 2354084 - RNA, 19 nt, Homo sapiens
  misc_RNA (1)...(19): siRNA sense strand
gagaagucgaagcggcaga

SEQ ID NO: 2354085 - RNA, 19 nt, Homo sapiens
  misc_RNA (1)...(19): siRNA sense strand
gcuugcuaaugaagagaca

SEQ ID NO: 2354086 - RNA, 19 nt, Homo sapiens
  misc_RNA (1)...(19): siRNA sense strand
ggaaugaucuggaugggcu

SEQ ID NO: 2354087 - RNA, 19 nt, Homo sapiens
  misc_RNA (1)...(19): siRNA sense strand
uggcgaagaagcugacaga

SEQ ID NO: 2354088 - RNA, 19 nt, Homo sapiens
  misc_RNA (1)...(19): siRNA sense strand
gcugauaacaaauaugcau

SEQ ID NO: 2354089 - RNA, 19 nt, Homo sapiens
  misc_RNA (1)...(19): siRNA sense strand
uguaaaaggcaaagccaca

SEQ ID NO: 2354090 - RNA, 19 nt, Homo sapiens
  misc_RNA (1)...(19): siRNA sense strand
aggagaagucgaagcggca

SEQ ID NO: 2354091 - RNA, 19 nt, Homo sapiens
  misc_RNA (1)...(19): siRNA sense strand
agguagagaucgugauguc

SEQ ID NO: 2354092 - RNA, 19 nt, Homo sapiens
  misc_RNA (1)...(19): siRNA sense strand
gagacaauaaagaacauca

SEQ ID NO: 2354093 - RNA, 19 nt, Homo sapiens
  misc_RNA (1)...(19): siRNA sense strand
gggacuuggaggcuggauu

SEQ ID NO: 2354094 - RNA, 19 nt, Homo sapiens
  misc_RNA (1)...(19): siRNA sense strand
cuccaagagaccauugaaa

SEQ ID NO: 2354095 - RNA, 19 nt, Homo sapiens
  misc_RNA (1)...(19): siRNA sense strand
ccaagugcuccgugaaguu

SEQ ID NO: 2354096 - RNA, 19 nt, Homo sapiens
  misc_RNA (1)...(19): siRNA sense strand
ggugaugagcagcaacgua

SEQ ID NO: 2354097 - RNA, 19 nt, Homo sapiens
  misc_RNA (1)...(19): siRNA sense strand
ggagaaagcgcgacgagag

SEQ ID NO: 2354098 - RNA, 19 nt, Homo sapiens
  misc_RNA (1)...(19): siRNA sense strand
ugggaaaggggaaaggcaa

SEQ ID NO: 2354099 - RNA, 19 nt, Homo sapiens
  misc_RNA (1)...(19): siRNA sense strand
cagccugauuauugucauu

SEQ ID NO: 2354100 - RNA, 19 nt, Homo sapiens
  misc_RNA (1)...(19): siRNA sense strand
ccaccagcuucaaggaauc

SEQ ID NO: 2354101 - RNA, 19 nt, Homo sapiens
  misc_RNA (1)...(19): siRNA sense strand
gaugaacaagagaguaaca

SEQ ID NO: 2354102 - RNA, 19 nt, Homo sapiens
  misc_RNA (1)...(19): siRNA sense strand
ugacaggcugggaaggaga

SEQ ID NO: 2354103 - RNA, 19 nt, Homo sapiens
  misc_RNA (1)...(19): siRNA sense strand
gcauuaaugugcugcgccu

SEQ ID NO: 2354104 - RNA, 19 nt, Homo sapiens
  misc_RNA (1)...(19): siRNA sense strand
aagaagaggaugcagaaaa

SEQ ID NO: 2354105 - RNA, 19 nt, Homo sapiens
  misc_RNA (1)...(19): siRNA sense strand
gacaagaagaggaugcaga

SEQ ID NO: 2354106 - RNA, 19 nt, Homo sapiens
  misc_RNA (1)...(19): siRNA sense strand
augcaaacacuuaugugaa

SEQ ID NO: 2354107 - RNA, 19 nt, Homo sapiens
  misc_RNA (1)...(19): siRNA sense strand
gggaauguuugcaugagca

SEQ ID NO: 2354108 - RNA, 19 nt, Homo sapiens
  misc_RNA (1)...(19): siRNA sense strand
guagaaaugcucagggcaa

SEQ ID NO: 2354109 - RNA, 19 nt, Homo sapiens
  misc_RNA (1)...(19): siRNA sense strand
cgucaaaggaaauagaaaa

SEQ ID NO: 2354110 - RNA, 19 nt, Homo sapiens
  misc_RNA (1)...(19): siRNA sense strand
ggagcuaaccugaagcgua

SEQ ID NO: 2354111 - RNA, 19 nt, Homo sapiens
  misc_RNA (1)...(19): siRNA sense strand
cuauaucgucaaaggaaau

SEQ ID NO: 2354112 - RNA, 19 nt, Homo sapiens
  misc_RNA (1)...(19): siRNA sense strand
ucgucaaaggaaauagaaa

SEQ ID NO: 2354113 - RNA, 19 nt, Homo sapiens
  misc_RNA (1)...(19): siRNA sense strand
gagcuaaccugaagcguag

SEQ ID NO: 2354114 - RNA, 19 nt, Homo sapiens
  misc_RNA (1)...(19): siRNA sense strand
cggucgagcaugucaucaa

SEQ ID NO: 2354115 - RNA, 19 nt, Homo sapiens
  misc_RNA (1)...(19): siRNA sense strand
acagagagugcauggagau

SEQ ID NO: 2354116 - RNA, 19 nt, Homo sapiens
  misc_RNA (1)...(19): siRNA sense strand
uggacaaugaggagaguga

SEQ ID NO: 2354117 - RNA, 19 nt, Homo sapiens
  misc_RNA (1)...(19): siRNA sense strand
gcgagacagagcuggacaa

SEQ ID NO: 2354118 - RNA, 19 nt, Homo sapiens
  misc_RNA (1)...(19): siRNA sense strand
agaaauuuguccagcacca

SEQ ID NO: 2354119 - RNA, 19 nt, Homo sapiens
  misc_RNA (1)...(19): siRNA sense strand
ucaacuggguggagcacga

SEQ ID NO: 2354120 - RNA, 19 nt, Homo sapiens
  misc_RNA (1)...(19): siRNA sense strand
agcagaaggaccugaguga

SEQ ID NO: 2354121 - RNA, 19 nt, Homo sapiens
  misc_RNA (1)...(19): siRNA sense strand
guaucaagaccuucagcau

SEQ ID NO: 2354122 - RNA, 19 nt, Homo sapiens
  misc_RNA (1)...(19): siRNA sense strand
gaagaaagaugaagucgcu

SEQ ID NO: 2354123 - RNA, 19 nt, Homo sapiens
  misc_RNA (1)...(19): siRNA sense strand
agaaacagcagaaggaccu

SEQ ID NO: 2354124 - RNA, 19 nt, Homo sapiens
  misc_RNA (1)...(19): siRNA sense strand
aaguacagcuggagcccuu

SEQ ID NO: 2354125 - RNA, 19 nt, Homo sapiens
  misc_RNA (1)...(19): siRNA sense strand
aaguacagcuggagcccuu

SEQ ID NO: 2354126 - RNA, 19 nt, Homo sapiens
  misc_RNA (1)...(19): siRNA sense strand
acuuugaggcucugaugaa

SEQ ID NO: 2354127 - RNA, 19 nt, Homo sapiens
  misc_RNA (1)...(19): siRNA sense strand
aggaaguaaccaaacaaga

SEQ ID NO: 2354128 - RNA, 19 nt, Homo sapiens
  misc_RNA (1)...(19): siRNA sense strand
ccaaacaagaagaccucau

SEQ ID NO: 2354129 - RNA, 19 nt, Homo sapiens
  misc_RNA (1)...(19): siRNA sense strand
aaguacagcuggagcccuu

SEQ ID NO: 2354130 - RNA, 19 nt, Homo sapiens
  misc_RNA (1)...(19): siRNA sense strand
aaguacagcuggagcccuu

SEQ ID NO: 2354131 - RNA, 19 nt, Homo sapiens
  misc_RNA (1)...(19): siRNA sense strand
acuuugaggcucugaugaa

SEQ ID NO: 2354132 - RNA, 19 nt, Homo sapiens
  misc_RNA (1)...(19): siRNA sense strand
aggaaguaaccaaacaaga

SEQ ID NO: 2354133 - RNA, 19 nt, Homo sapiens
  misc_RNA (1)...(19): siRNA sense strand
ccaaacaagaagaccucau

SEQ ID NO: 2354134 - RNA, 19 nt, Homo sapiens
  misc_RNA (1)...(19): siRNA sense strand
gcaaauaccaggagagcga

SEQ ID NO: 2354135 - RNA, 19 nt, Homo sapiens
  misc_RNA (1)...(19): siRNA sense strand
gcaagucggucgugggcuu

SEQ ID NO: 2354136 - RNA, 19 nt, Homo sapiens
  misc_RNA (1)...(19): siRNA sense strand
uggcugaaucugaagagaa

SEQ ID NO: 2354137 - RNA, 19 nt, Homo sapiens
  misc_RNA (1)...(19): siRNA sense strand
aagagaagguggugggcac

SEQ ID NO: 2354138 - RNA, 19 nt, Homo sapiens
  misc_RNA (1)...(19): siRNA sense strand
gcaccguggucaggggaua

SEQ ID NO: 2354139 - RNA, 19 nt, Homo sapiens
  misc_RNA (1)...(19): siRNA sense strand
gggaaauaucaacagcaaa

SEQ ID NO: 2354140 - RNA, 19 nt, Homo sapiens
  misc_RNA (1)...(19): siRNA sense strand
ggaagauguaaaugacaau

SEQ ID NO: 2354141 - RNA, 19 nt, Homo sapiens
  misc_RNA (1)...(19): siRNA sense strand
aguuaaaguccuugagaac

SEQ ID NO: 2354142 - RNA, 19 nt, Homo sapiens
  misc_RNA (1)...(19): siRNA sense strand
agggcuauauugugggcaa

SEQ ID NO: 2354143 - RNA, 19 nt, Homo sapiens
  misc_RNA (1)...(19): siRNA sense strand
cggaaaaguggcauacaaa

SEQ ID NO: 2354144 - RNA, 19 nt, Homo sapiens
  misc_RNA (1)...(19): siRNA sense strand
agugaaacuguacggaaua

SEQ ID NO: 2354145 - RNA, 19 nt, Homo sapiens
  misc_RNA (1)...(19): siRNA sense strand
gcgaccuggaugagggaau

SEQ ID NO: 2354146 - RNA, 19 nt, Homo sapiens
  misc_RNA (1)...(19): siRNA sense strand
cgguggaagauguaaauga

SEQ ID NO: 2354147 - RNA, 19 nt, Homo sapiens
  misc_RNA (1)...(19): siRNA sense strand
augagggaaucaacggaaa

SEQ ID NO: 2354148 - RNA, 19 nt, Homo sapiens
  misc_RNA (1)...(19): siRNA sense strand
gugccugaagagacagaaa

SEQ ID NO: 2354149 - RNA, 19 nt, Homo sapiens
  misc_RNA (1)...(19): siRNA sense strand
ggauagaccgggaggagcu

SEQ ID NO: 2354150 - RNA, 19 nt, Homo sapiens
  misc_RNA (1)...(19): siRNA sense strand
auucaaggccagugagcca

SEQ ID NO: 2354151 - RNA, 19 nt, Homo sapiens
  misc_RNA (1)...(19): siRNA sense strand
acuguacggaauagaaaua

SEQ ID NO: 2354152 - RNA, 19 nt, Homo sapiens
  misc_RNA (1)...(19): siRNA sense strand
uaaugaaaauacuggggaa

SEQ ID NO: 2354153 - RNA, 19 nt, Homo sapiens
  misc_RNA (1)...(19): siRNA sense strand
gauugaaaggguggacaaa

SEQ ID NO: 2354154 - RNA, 19 nt, Homo sapiens
  misc_RNA (1)...(19): siRNA sense strand
cgaaagucuggaaguaaaa

SEQ ID NO: 2354155 - RNA, 19 nt, Homo sapiens
  misc_RNA (1)...(19): siRNA sense strand
cagucuaccucccggaaaa

SEQ ID NO: 2354156 - RNA, 19 nt, Homo sapiens
  misc_RNA (1)...(19): siRNA sense strand
cccaaauucuugaccgaga

SEQ ID NO: 2354157 - RNA, 19 nt, Homo sapiens
  misc_RNA (1)...(19): siRNA sense strand
caguuuagagauuugcaaa

SEQ ID NO: 2354158 - RNA, 19 nt, Homo sapiens
  misc_RNA (1)...(19): siRNA sense strand
gggcccugcuagauagaga

SEQ ID NO: 2354159 - RNA, 19 nt, Homo sapiens
  misc_RNA (1)...(19): siRNA sense strand
uggaaauacaagcugaaga

SEQ ID NO: 2354160 - RNA, 19 nt, Homo sapiens
  misc_RNA (1)...(19): siRNA sense strand
uguuuagcccagugagaga

SEQ ID NO: 2354161 - RNA, 19 nt, Homo sapiens
  misc_RNA (1)...(19): siRNA sense strand
ggacagagacucaggccag

SEQ ID NO: 2354162 - RNA, 19 nt, Homo sapiens
  misc_RNA (1)...(19): siRNA sense strand
aaacaacgccagagguacu

SEQ ID NO: 2354163 - RNA, 19 nt, Homo sapiens
  misc_RNA (1)...(19): siRNA sense strand
aguccugguugaagacaga

SEQ ID NO: 2354164 - RNA, 19 nt, Homo sapiens
  misc_RNA (1)...(19): siRNA sense strand
ggcccaaauucuugaccga

SEQ ID NO: 2354165 - RNA, 19 nt, Homo sapiens
  misc_RNA (1)...(19): siRNA sense strand
uuucaaugcucaugaccga

SEQ ID NO: 2354166 - RNA, 19 nt, Homo sapiens
  misc_RNA (1)...(19): siRNA sense strand
cccugauagcaaugagaau

SEQ ID NO: 2354167 - RNA, 19 nt, Homo sapiens
  misc_RNA (1)...(19): siRNA sense strand
agagugaaacuguacggaa

SEQ ID NO: 2354168 - RNA, 19 nt, Homo sapiens
  misc_RNA (1)...(19): siRNA sense strand
ccaaaguuccaggccgaaa

SEQ ID NO: 2354169 - RNA, 19 nt, Homo sapiens
  misc_RNA (1)...(19): siRNA sense strand
acggaaaaguggcauacaa

SEQ ID NO: 2354170 - RNA, 19 nt, Homo sapiens
  misc_RNA (1)...(19): siRNA sense strand
uggcauacaaauucuggaa

SEQ ID NO: 2354171 - RNA, 19 nt, Homo sapiens
  misc_RNA (1)...(19): siRNA sense strand
gggaaauaucaacagcaaa

SEQ ID NO: 2354172 - RNA, 19 nt, Homo sapiens
  misc_RNA (1)...(19): siRNA sense strand
ggaagauguaaaugacaau

SEQ ID NO: 2354173 - RNA, 19 nt, Homo sapiens
  misc_RNA (1)...(19): siRNA sense strand
aguuaaaguccuugagaac

SEQ ID NO: 2354174 - RNA, 19 nt, Homo sapiens
  misc_RNA (1)...(19): siRNA sense strand
agggcuauauugugggcaa

SEQ ID NO: 2354175 - RNA, 19 nt, Homo sapiens
  misc_RNA (1)...(19): siRNA sense strand
cggaaaaguggcauacaaa

SEQ ID NO: 2354176 - RNA, 19 nt, Homo sapiens
  misc_RNA (1)...(19): siRNA sense strand
agugaaacuguacggaaua

SEQ ID NO: 2354177 - RNA, 19 nt, Homo sapiens
  misc_RNA (1)...(19): siRNA sense strand
gcgaccuggaugagggaau

SEQ ID NO: 2354178 - RNA, 19 nt, Homo sapiens
  misc_RNA (1)...(19): siRNA sense strand
cgguggaagauguaaauga

SEQ ID NO: 2354179 - RNA, 19 nt, Homo sapiens
  misc_RNA (1)...(19): siRNA sense strand
augagggaaucaacggaaa

SEQ ID NO: 2354180 - RNA, 19 nt, Homo sapiens
  misc_RNA (1)...(19): siRNA sense strand
gugccugaagagacagaaa

SEQ ID NO: 2354181 - RNA, 19 nt, Homo sapiens
  misc_RNA (1)...(19): siRNA sense strand
ggauagaccgggaggagcu

SEQ ID NO: 2354182 - RNA, 19 nt, Homo sapiens
  misc_RNA (1)...(19): siRNA sense strand
auucaaggccagugagcca

SEQ ID NO: 2354183 - RNA, 19 nt, Homo sapiens
  misc_RNA (1)...(19): siRNA sense strand
acuguacggaauagaaaua

SEQ ID NO: 2354184 - RNA, 19 nt, Homo sapiens
  misc_RNA (1)...(19): siRNA sense strand
uaaugaaaauacuggggaa

SEQ ID NO: 2354185 - RNA, 19 nt, Homo sapiens
  misc_RNA (1)...(19): siRNA sense strand
gauugaaaggguggacaaa

SEQ ID NO: 2354186 - RNA, 19 nt, Homo sapiens
  misc_RNA (1)...(19): siRNA sense strand
cgaaagucuggaaguaaaa

SEQ ID NO: 2354187 - RNA, 19 nt, Homo sapiens
  misc_RNA (1)...(19): siRNA sense strand
cagucuaccucccggaaaa

SEQ ID NO: 2354188 - RNA, 19 nt, Homo sapiens
  misc_RNA (1)...(19): siRNA sense strand
cccaaauucuugaccgaga

SEQ ID NO: 2354189 - RNA, 19 nt, Homo sapiens
  misc_RNA (1)...(19): siRNA sense strand
caguuuagagauuugcaaa

SEQ ID NO: 2354190 - RNA, 19 nt, Homo sapiens
  misc_RNA (1)...(19): siRNA sense strand
gggcccugcuagauagaga

SEQ ID NO: 2354191 - RNA, 19 nt, Homo sapiens
  misc_RNA (1)...(19): siRNA sense strand
uggaaauacaagcugaaga

SEQ ID NO: 2354192 - RNA, 19 nt, Homo sapiens
  misc_RNA (1)...(19): siRNA sense strand
uguuuagcccagugagaga

SEQ ID NO: 2354193 - RNA, 19 nt, Homo sapiens
  misc_RNA (1)...(19): siRNA sense strand
ggacagagacucaggccag

SEQ ID NO: 2354194 - RNA, 19 nt, Homo sapiens
  misc_RNA (1)...(19): siRNA sense strand
aaacaacgccagagguacu

SEQ ID NO: 2354195 - RNA, 19 nt, Homo sapiens
  misc_RNA (1)...(19): siRNA sense strand
aguccugguugaagacaga

SEQ ID NO: 2354196 - RNA, 19 nt, Homo sapiens
  misc_RNA (1)...(19): siRNA sense strand
ggcccaaauucuugaccga

SEQ ID NO: 2354197 - RNA, 19 nt, Homo sapiens
  misc_RNA (1)...(19): siRNA sense strand
uuucaaugcucaugaccga

SEQ ID NO: 2354198 - RNA, 19 nt, Homo sapiens
  misc_RNA (1)...(19): siRNA sense strand
cccugauagcaaugagaau

SEQ ID NO: 2354199 - RNA, 19 nt, Homo sapiens
  misc_RNA (1)...(19): siRNA sense strand
agagugaaacuguacggaa

SEQ ID NO: 2354200 - RNA, 19 nt, Homo sapiens
  misc_RNA (1)...(19): siRNA sense strand
ccaaaguuccaggccgaaa

SEQ ID NO: 2354201 - RNA, 19 nt, Homo sapiens
  misc_RNA (1)...(19): siRNA sense strand
acggaaaaguggcauacaa

SEQ ID NO: 2354202 - RNA, 19 nt, Homo sapiens
  misc_RNA (1)...(19): siRNA sense strand
uggcauacaaauucuggaa

SEQ ID NO: 2354203 - RNA, 19 nt, Homo sapiens
  misc_RNA (1)...(19): siRNA sense strand
agacacaccucuugggaca

SEQ ID NO: 2354204 - RNA, 19 nt, Homo sapiens
  misc_RNA (1)...(19): siRNA sense strand
ggacaaagauucaggccag

SEQ ID NO: 2354205 - RNA, 19 nt, Homo sapiens
  misc_RNA (1)...(19): siRNA sense strand
gcuuaaggccagcgagcca

SEQ ID NO: 2354206 - RNA, 19 nt, Homo sapiens
  misc_RNA (1)...(19): siRNA sense strand
aaauggagguucaggcuca

SEQ ID NO: 2354207 - RNA, 19 nt, Homo sapiens
  misc_RNA (1)...(19): siRNA sense strand
ucuacaucgcugagaacaa

SEQ ID NO: 2354208 - RNA, 19 nt, Homo sapiens
  misc_RNA (1)...(19): siRNA sense strand
auuaugagcaguugagaga

SEQ ID NO: 2354209 - RNA, 19 nt, Homo sapiens
  misc_RNA (1)...(19): siRNA sense strand
aggugguggcgguggacaa

SEQ ID NO: 2354210 - RNA, 19 nt, Homo sapiens
  misc_RNA (1)...(19): siRNA sense strand
ugugcaaaguggagacgau

SEQ ID NO: 2354211 - RNA, 19 nt, Homo sapiens
  misc_RNA (1)...(19): siRNA sense strand
ccuacaagacagagauucu

SEQ ID NO: 2354212 - RNA, 19 nt, Homo sapiens
  misc_RNA (1)...(19): siRNA sense strand
gaauacagcuccugggguu

SEQ ID NO: 2354213 - RNA, 19 nt, Homo sapiens
  misc_RNA (1)...(19): siRNA sense strand
cagugguggaugugaauga

SEQ ID NO: 2354214 - RNA, 19 nt, Homo sapiens
  misc_RNA (1)...(19): siRNA sense strand
uggaaagaauggugaggug

SEQ ID NO: 2354215 - RNA, 19 nt, Homo sapiens
  misc_RNA (1)...(19): siRNA sense strand
ggaaagaauggugagguga

SEQ ID NO: 2354216 - RNA, 19 nt, Homo sapiens
  misc_RNA (1)...(19): siRNA sense strand
cagaagguggcuuggcgaa

SEQ ID NO: 2354217 - RNA, 19 nt, Homo sapiens
  misc_RNA (1)...(19): siRNA sense strand
gggaagagaucugcgcuca

SEQ ID NO: 2354218 - RNA, 19 nt, Homo sapiens
  misc_RNA (1)...(19): siRNA sense strand
ccucgcacuuugugggcau

SEQ ID NO: 2354219 - RNA, 19 nt, Homo sapiens
  misc_RNA (1)...(19): siRNA sense strand
gggcaggauagaccgggaa

SEQ ID NO: 2354220 - RNA, 19 nt, Homo sapiens
  misc_RNA (1)...(19): siRNA sense strand
acccuauagacguggaaau

SEQ ID NO: 2354221 - RNA, 19 nt, Homo sapiens
  misc_RNA (1)...(19): siRNA sense strand
cucgcuuacaggagaaaua

SEQ ID NO: 2354222 - RNA, 19 nt, Homo sapiens
  misc_RNA (1)...(19): siRNA sense strand
uguaaaugauaaugcucca

SEQ ID NO: 2354223 - RNA, 19 nt, Homo sapiens
  misc_RNA (1)...(19): siRNA sense strand
accacgacagugaggauaa

SEQ ID NO: 2354224 - RNA, 19 nt, Homo sapiens
  misc_RNA (1)...(19): siRNA sense strand
guggcagacaccaacgaua

SEQ ID NO: 2354225 - RNA, 19 nt, Homo sapiens
  misc_RNA (1)...(19): siRNA sense strand
acuaagagugacugcacau

SEQ ID NO: 2354226 - RNA, 19 nt, Homo sapiens
  misc_RNA (1)...(19): siRNA sense strand
agacacaccucuugggaca

SEQ ID NO: 2354227 - RNA, 19 nt, Homo sapiens
  misc_RNA (1)...(19): siRNA sense strand
ggacaaagauucaggccag

SEQ ID NO: 2354228 - RNA, 19 nt, Homo sapiens
  misc_RNA (1)...(19): siRNA sense strand
gcuuaaggccagcgagcca

SEQ ID NO: 2354229 - RNA, 19 nt, Homo sapiens
  misc_RNA (1)...(19): siRNA sense strand
aaauggagguucaggcuca

SEQ ID NO: 2354230 - RNA, 19 nt, Homo sapiens
  misc_RNA (1)...(19): siRNA sense strand
ucuacaucgcugagaacaa

SEQ ID NO: 2354231 - RNA, 19 nt, Homo sapiens
  misc_RNA (1)...(19): siRNA sense strand
auuaugagcaguugagaga

SEQ ID NO: 2354232 - RNA, 19 nt, Homo sapiens
  misc_RNA (1)...(19): siRNA sense strand
aggugguggcgguggacaa

SEQ ID NO: 2354233 - RNA, 19 nt, Homo sapiens
  misc_RNA (1)...(19): siRNA sense strand
ugugcaaaguggagacgau

SEQ ID NO: 2354234 - RNA, 19 nt, Homo sapiens
  misc_RNA (1)...(19): siRNA sense strand
ccuacaagacagagauucu

SEQ ID NO: 2354235 - RNA, 19 nt, Homo sapiens
  misc_RNA (1)...(19): siRNA sense strand
gaauacagcuccugggguu

SEQ ID NO: 2354236 - RNA, 19 nt, Homo sapiens
  misc_RNA (1)...(19): siRNA sense strand
cagugguggaugugaauga

SEQ ID NO: 2354237 - RNA, 19 nt, Homo sapiens
  misc_RNA (1)...(19): siRNA sense strand
uggaaagaauggugaggug

SEQ ID NO: 2354238 - RNA, 19 nt, Homo sapiens
  misc_RNA (1)...(19): siRNA sense strand
ggaaagaauggugagguga

SEQ ID NO: 2354239 - RNA, 19 nt, Homo sapiens
  misc_RNA (1)...(19): siRNA sense strand
cagaagguggcuuggcgaa

SEQ ID NO: 2354240 - RNA, 19 nt, Homo sapiens
  misc_RNA (1)...(19): siRNA sense strand
gggaagagaucugcgcuca

SEQ ID NO: 2354241 - RNA, 19 nt, Homo sapiens
  misc_RNA (1)...(19): siRNA sense strand
ccucgcacuuugugggcau

SEQ ID NO: 2354242 - RNA, 19 nt, Homo sapiens
  misc_RNA (1)...(19): siRNA sense strand
gggcaggauagaccgggaa

SEQ ID NO: 2354243 - RNA, 19 nt, Homo sapiens
  misc_RNA (1)...(19): siRNA sense strand
acccuauagacguggaaau

SEQ ID NO: 2354244 - RNA, 19 nt, Homo sapiens
  misc_RNA (1)...(19): siRNA sense strand
cucgcuuacaggagaaaua

SEQ ID NO: 2354245 - RNA, 19 nt, Homo sapiens
  misc_RNA (1)...(19): siRNA sense strand
uguaaaugauaaugcucca

SEQ ID NO: 2354246 - RNA, 19 nt, Homo sapiens
  misc_RNA (1)...(19): siRNA sense strand
accacgacagugaggauaa

SEQ ID NO: 2354247 - RNA, 19 nt, Homo sapiens
  misc_RNA (1)...(19): siRNA sense strand
guggcagacaccaacgaua

SEQ ID NO: 2354248 - RNA, 19 nt, Homo sapiens
  misc_RNA (1)...(19): siRNA sense strand
acuaagagugacugcacau

SEQ ID NO: 2354249 - RNA, 19 nt, Homo sapiens
  misc_RNA (1)...(19): siRNA sense strand
uuaucaaccaggagagcua

SEQ ID NO: 2354250 - RNA, 19 nt, Homo sapiens
  misc_RNA (1)...(19): siRNA sense strand
acuugaaacgaaaggagaa

SEQ ID NO: 2354251 - RNA, 19 nt, Homo sapiens
  misc_RNA (1)...(19): siRNA sense strand
aaguggaaauaguggacau

SEQ ID NO: 2354252 - RNA, 19 nt, Homo sapiens
  misc_RNA (1)...(19): siRNA sense strand
ggauagaccgcgaggagcu

SEQ ID NO: 2354253 - RNA, 19 nt, Homo sapiens
  misc_RNA (1)...(19): siRNA sense strand
uggcagacaccaacgacaa

SEQ ID NO: 2354254 - RNA, 19 nt, Homo sapiens
  misc_RNA (1)...(19): siRNA sense strand
gaaaggagaacccaggcaa

SEQ ID NO: 2354255 - RNA, 19 nt, Homo sapiens
  misc_RNA (1)...(19): siRNA sense strand
ccguggaaguggaaauagu

SEQ ID NO: 2354256 - RNA, 19 nt, Homo sapiens
  misc_RNA (1)...(19): siRNA sense strand
uguuuugacuggagaaauu

SEQ ID NO: 2354257 - RNA, 19 nt, Homo sapiens
  misc_RNA (1)...(19): siRNA sense strand
ggacaaaggaacaccaccu

SEQ ID NO: 2354258 - RNA, 19 nt, Homo sapiens
  misc_RNA (1)...(19): siRNA sense strand
cuuaaaggaagaauuggaa

SEQ ID NO: 2354259 - RNA, 19 nt, Homo sapiens
  misc_RNA (1)...(19): siRNA sense strand
uaaaggaagaauuggaagu

SEQ ID NO: 2354260 - RNA, 19 nt, Homo sapiens
  misc_RNA (1)...(19): siRNA sense strand
ugucaaugauaauguacca

SEQ ID NO: 2354261 - RNA, 19 nt, Homo sapiens
  misc_RNA (1)...(19): siRNA sense strand
agugacaaaugcagcucua

SEQ ID NO: 2354262 - RNA, 19 nt, Homo sapiens
  misc_RNA (1)...(19): siRNA sense strand
auuuaagcucagugguaau

SEQ ID NO: 2354263 - RNA, 19 nt, Homo sapiens
  misc_RNA (1)...(19): siRNA sense strand
acagaaaagaucucacaaa

SEQ ID NO: 2354264 - RNA, 19 nt, Homo sapiens
  misc_RNA (1)...(19): siRNA sense strand
cuucagggauuuaagcuca

SEQ ID NO: 2354265 - RNA, 19 nt, Homo sapiens
  misc_RNA (1)...(19): siRNA sense strand
agguauucuuguacaacau

SEQ ID NO: 2354266 - RNA, 19 nt, Homo sapiens
  misc_RNA (1)...(19): siRNA sense strand
cagucuauguccuugaaaa

SEQ ID NO: 2354267 - RNA, 19 nt, Homo sapiens
  misc_RNA (1)...(19): siRNA sense strand
gcacuuugugggcguggaa

SEQ ID NO: 2354268 - RNA, 19 nt, Homo sapiens
  misc_RNA (1)...(19): siRNA sense strand
uuaucaaccaggagagcua

SEQ ID NO: 2354269 - RNA, 19 nt, Homo sapiens
  misc_RNA (1)...(19): siRNA sense strand
acuugaaacgaaaggagaa

SEQ ID NO: 2354270 - RNA, 19 nt, Homo sapiens
  misc_RNA (1)...(19): siRNA sense strand
aaguggaaauaguggacau

SEQ ID NO: 2354271 - RNA, 19 nt, Homo sapiens
  misc_RNA (1)...(19): siRNA sense strand
ggauagaccgcgaggagcu

SEQ ID NO: 2354272 - RNA, 19 nt, Homo sapiens
  misc_RNA (1)...(19): siRNA sense strand
uggcagacaccaacgacaa

SEQ ID NO: 2354273 - RNA, 19 nt, Homo sapiens
  misc_RNA (1)...(19): siRNA sense strand
gaaaggagaacccaggcaa

SEQ ID NO: 2354274 - RNA, 19 nt, Homo sapiens
  misc_RNA (1)...(19): siRNA sense strand
ccguggaaguggaaauagu

SEQ ID NO: 2354275 - RNA, 19 nt, Homo sapiens
  misc_RNA (1)...(19): siRNA sense strand
uguuuugacuggagaaauu

SEQ ID NO: 2354276 - RNA, 19 nt, Homo sapiens
  misc_RNA (1)...(19): siRNA sense strand
ggacaaaggaacaccaccu

SEQ ID NO: 2354277 - RNA, 19 nt, Homo sapiens
  misc_RNA (1)...(19): siRNA sense strand
cuuaaaggaagaauuggaa

SEQ ID NO: 2354278 - RNA, 19 nt, Homo sapiens
  misc_RNA (1)...(19): siRNA sense strand
uaaaggaagaauuggaagu

SEQ ID NO: 2354279 - RNA, 19 nt, Homo sapiens
  misc_RNA (1)...(19): siRNA sense strand
ugucaaugauaauguacca

SEQ ID NO: 2354280 - RNA, 19 nt, Homo sapiens
  misc_RNA (1)...(19): siRNA sense strand
agugacaaaugcagcucua

SEQ ID NO: 2354281 - RNA, 19 nt, Homo sapiens
  misc_RNA (1)...(19): siRNA sense strand
auuuaagcucagugguaau

SEQ ID NO: 2354282 - RNA, 19 nt, Homo sapiens
  misc_RNA (1)...(19): siRNA sense strand
acagaaaagaucucacaaa

SEQ ID NO: 2354283 - RNA, 19 nt, Homo sapiens
  misc_RNA (1)...(19): siRNA sense strand
cuucagggauuuaagcuca

SEQ ID NO: 2354284 - RNA, 19 nt, Homo sapiens
  misc_RNA (1)...(19): siRNA sense strand
agguauucuuguacaacau

SEQ ID NO: 2354285 - RNA, 19 nt, Homo sapiens
  misc_RNA (1)...(19): siRNA sense strand
cagucuauguccuugaaaa

SEQ ID NO: 2354286 - RNA, 19 nt, Homo sapiens
  misc_RNA (1)...(19): siRNA sense strand
gcacuuugugggcguggaa

SEQ ID NO: 2354287 - RNA, 19 nt, Homo sapiens
  misc_RNA (1)...(19): siRNA sense strand
acaucuugguugagaacaa

SEQ ID NO: 2354288 - RNA, 19 nt, Homo sapiens
  misc_RNA (1)...(19): siRNA sense strand
ugaaaguagcagacguuaa

SEQ ID NO: 2354289 - RNA, 19 nt, Homo sapiens
  misc_RNA (1)...(19): siRNA sense strand
uggagaaaauggugagauu

SEQ ID NO: 2354290 - RNA, 19 nt, Homo sapiens
  misc_RNA (1)...(19): siRNA sense strand
ggacaaagauucaggccag

SEQ ID NO: 2354291 - RNA, 19 nt, Homo sapiens
  misc_RNA (1)...(19): siRNA sense strand
gcuuaaggccagcgagcca

SEQ ID NO: 2354292 - RNA, 19 nt, Homo sapiens
  misc_RNA (1)...(19): siRNA sense strand
gcgcuaaggugguggucac

SEQ ID NO: 2354293 - RNA, 19 nt, Homo sapiens
  misc_RNA (1)...(19): siRNA sense strand
cgacaauacgccugagauc

SEQ ID NO: 2354294 - RNA, 19 nt, Homo sapiens
  misc_RNA (1)...(19): siRNA sense strand
aaacaaagaagaacggcga

SEQ ID NO: 2354295 - RNA, 19 nt, Homo sapiens
  misc_RNA (1)...(19): siRNA sense strand
cccuagaccgcgagaaaga

SEQ ID NO: 2354296 - RNA, 19 nt, Homo sapiens
  misc_RNA (1)...(19): siRNA sense strand
aggugguagcgguggacaa

SEQ ID NO: 2354297 - RNA, 19 nt, Homo sapiens
  misc_RNA (1)...(19): siRNA sense strand
ugagggaauaaacgggaaa

SEQ ID NO: 2354298 - RNA, 19 nt, Homo sapiens
  misc_RNA (1)...(19): siRNA sense strand
ggauagaccgggaggagcu

SEQ ID NO: 2354299 - RNA, 19 nt, Homo sapiens
  misc_RNA (1)...(19): siRNA sense strand
acuuuaacaucuugguuga

SEQ ID NO: 2354300 - RNA, 19 nt, Homo sapiens
  misc_RNA (1)...(19): siRNA sense strand
agguagaugcaaacaaaga

SEQ ID NO: 2354301 - RNA, 19 nt, Homo sapiens
  misc_RNA (1)...(19): siRNA sense strand
agaugcaaacaaagaagaa

SEQ ID NO: 2354302 - RNA, 19 nt, Homo sapiens
  misc_RNA (1)...(19): siRNA sense strand
ccauugacccugaggaucu

SEQ ID NO: 2354303 - RNA, 19 nt, Homo sapiens
  misc_RNA (1)...(19): siRNA sense strand
agacugaggcgcuggcaca

SEQ ID NO: 2354304 - RNA, 19 nt, Homo sapiens
  misc_RNA (1)...(19): siRNA sense strand
agaaagagacuguucacga

SEQ ID NO: 2354305 - RNA, 19 nt, Homo sapiens
  misc_RNA (1)...(19): siRNA sense strand
gaccuacaguuguggguga

SEQ ID NO: 2354306 - RNA, 19 nt, Homo sapiens
  misc_RNA (1)...(19): siRNA sense strand
cguacaugauggugauucu

SEQ ID NO: 2354307 - RNA, 19 nt, Homo sapiens
  misc_RNA (1)...(19): siRNA sense strand
gaacauaccugugggcacu

SEQ ID NO: 2354308 - RNA, 19 nt, Homo sapiens
  misc_RNA (1)...(19): siRNA sense strand
cggauccagaugagggaau

SEQ ID NO: 2354309 - RNA, 19 nt, Homo sapiens
  misc_RNA (1)...(19): siRNA sense strand
agugaagagagcugugaga

SEQ ID NO: 2354310 - RNA, 19 nt, Homo sapiens
  misc_RNA (1)...(19): siRNA sense strand
gccccuagaccgcgagaaa

SEQ ID NO: 2354311 - RNA, 19 nt, Homo sapiens
  misc_RNA (1)...(19): siRNA sense strand
ucauggaagugguagcuca

SEQ ID NO: 2354312 - RNA, 19 nt, Homo sapiens
  misc_RNA (1)...(19): siRNA sense strand
cuugaaaguagcagacguu

SEQ ID NO: 2354313 - RNA, 19 nt, Homo sapiens
  misc_RNA (1)...(19): siRNA sense strand
gauccagaugagggaauaa

SEQ ID NO: 2354314 - RNA, 19 nt, Homo sapiens
  misc_RNA (1)...(19): siRNA sense strand
gcaacauagccaaggaccu

SEQ ID NO: 2354315 - RNA, 19 nt, Homo sapiens
  misc_RNA (1)...(19): siRNA sense strand
ccgaguacagcgugagugu

SEQ ID NO: 2354316 - RNA, 19 nt, Homo sapiens
  misc_RNA (1)...(19): siRNA sense strand
agggaauaaacgggaaauu

SEQ ID NO: 2354317 - RNA, 19 nt, Homo sapiens
  misc_RNA (1)...(19): siRNA sense strand
acaucuugguugagaacaa

SEQ ID NO: 2354318 - RNA, 19 nt, Homo sapiens
  misc_RNA (1)...(19): siRNA sense strand
ugaaaguagcagacguuaa

SEQ ID NO: 2354319 - RNA, 19 nt, Homo sapiens
  misc_RNA (1)...(19): siRNA sense strand
uggagaaaauggugagauu

SEQ ID NO: 2354320 - RNA, 19 nt, Homo sapiens
  misc_RNA (1)...(19): siRNA sense strand
ggacaaagauucaggccag

SEQ ID NO: 2354321 - RNA, 19 nt, Homo sapiens
  misc_RNA (1)...(19): siRNA sense strand
gcuuaaggccagcgagcca

SEQ ID NO: 2354322 - RNA, 19 nt, Homo sapiens
  misc_RNA (1)...(19): siRNA sense strand
gcgcuaaggugguggucac

SEQ ID NO: 2354323 - RNA, 19 nt, Homo sapiens
  misc_RNA (1)...(19): siRNA sense strand
cgacaauacgccugagauc

SEQ ID NO: 2354324 - RNA, 19 nt, Homo sapiens
  misc_RNA (1)...(19): siRNA sense strand
aaacaaagaagaacggcga

SEQ ID NO: 2354325 - RNA, 19 nt, Homo sapiens
  misc_RNA (1)...(19): siRNA sense strand
cccuagaccgcgagaaaga

SEQ ID NO: 2354326 - RNA, 19 nt, Homo sapiens
  misc_RNA (1)...(19): siRNA sense strand
aggugguagcgguggacaa

SEQ ID NO: 2354327 - RNA, 19 nt, Homo sapiens
  misc_RNA (1)...(19): siRNA sense strand
ugagggaauaaacgggaaa

SEQ ID NO: 2354328 - RNA, 19 nt, Homo sapiens
  misc_RNA (1)...(19): siRNA sense strand
ggauagaccgggaggagcu

SEQ ID NO: 2354329 - RNA, 19 nt, Homo sapiens
  misc_RNA (1)...(19): siRNA sense strand
acuuuaacaucuugguuga

SEQ ID NO: 2354330 - RNA, 19 nt, Homo sapiens
  misc_RNA (1)...(19): siRNA sense strand
agguagaugcaaacaaaga

SEQ ID NO: 2354331 - RNA, 19 nt, Homo sapiens
  misc_RNA (1)...(19): siRNA sense strand
agaugcaaacaaagaagaa

SEQ ID NO: 2354332 - RNA, 19 nt, Homo sapiens
  misc_RNA (1)...(19): siRNA sense strand
ccauugacccugaggaucu

SEQ ID NO: 2354333 - RNA, 19 nt, Homo sapiens
  misc_RNA (1)...(19): siRNA sense strand
agacugaggcgcuggcaca

SEQ ID NO: 2354334 - RNA, 19 nt, Homo sapiens
  misc_RNA (1)...(19): siRNA sense strand
agaaagagacuguucacga

SEQ ID NO: 2354335 - RNA, 19 nt, Homo sapiens
  misc_RNA (1)...(19): siRNA sense strand
gaccuacaguuguggguga

SEQ ID NO: 2354336 - RNA, 19 nt, Homo sapiens
  misc_RNA (1)...(19): siRNA sense strand
cguacaugauggugauucu

SEQ ID NO: 2354337 - RNA, 19 nt, Homo sapiens
  misc_RNA (1)...(19): siRNA sense strand
gaacauaccugugggcacu

SEQ ID NO: 2354338 - RNA, 19 nt, Homo sapiens
  misc_RNA (1)...(19): siRNA sense strand
cggauccagaugagggaau

SEQ ID NO: 2354339 - RNA, 19 nt, Homo sapiens
  misc_RNA (1)...(19): siRNA sense strand
agugaagagagcugugaga

SEQ ID NO: 2354340 - RNA, 19 nt, Homo sapiens
  misc_RNA (1)...(19): siRNA sense strand
gccccuagaccgcgagaaa

SEQ ID NO: 2354341 - RNA, 19 nt, Homo sapiens
  misc_RNA (1)...(19): siRNA sense strand
ucauggaagugguagcuca

SEQ ID NO: 2354342 - RNA, 19 nt, Homo sapiens
  misc_RNA (1)...(19): siRNA sense strand
cuugaaaguagcagacguu

SEQ ID NO: 2354343 - RNA, 19 nt, Homo sapiens
  misc_RNA (1)...(19): siRNA sense strand
gauccagaugagggaauaa

SEQ ID NO: 2354344 - RNA, 19 nt, Homo sapiens
  misc_RNA (1)...(19): siRNA sense strand
gcaacauagccaaggaccu

SEQ ID NO: 2354345 - RNA, 19 nt, Homo sapiens
  misc_RNA (1)...(19): siRNA sense strand
ccgaguacagcgugagugu

SEQ ID NO: 2354346 - RNA, 19 nt, Homo sapiens
  misc_RNA (1)...(19): siRNA sense strand
agggaauaaacgggaaauu

SEQ ID NO: 2354347 - RNA, 19 nt, Homo sapiens
  misc_RNA (1)...(19): siRNA sense strand
gggacagaacagagggaaa

SEQ ID NO: 2354348 - RNA, 19 nt, Homo sapiens
  misc_RNA (1)...(19): siRNA sense strand
ccggaaaguaagagacaaa

SEQ ID NO: 2354349 - RNA, 19 nt, Homo sapiens
  misc_RNA (1)...(19): siRNA sense strand
uugaaaagaccuauggaaa

SEQ ID NO: 2354350 - RNA, 19 nt, Homo sapiens
  misc_RNA (1)...(19): siRNA sense strand
ugaaaagaccuauggaaau

SEQ ID NO: 2354351 - RNA, 19 nt, Homo sapiens
  misc_RNA (1)...(19): siRNA sense strand
cuccaaacugugugacaaa

SEQ ID NO: 2354352 - RNA, 19 nt, Homo sapiens
  misc_RNA (1)...(19): siRNA sense strand
aggaaauggccuagucaca

SEQ ID NO: 2354353 - RNA, 19 nt, Homo sapiens
  misc_RNA (1)...(19): siRNA sense strand
agacaaaauaucacagcua

SEQ ID NO: 2354354 - RNA, 19 nt, Homo sapiens
  misc_RNA (1)...(19): siRNA sense strand
cgcucuagaucgcgaggaa

SEQ ID NO: 2354355 - RNA, 19 nt, Homo sapiens
  misc_RNA (1)...(19): siRNA sense strand
uguuugaggagcaggaaga

SEQ ID NO: 2354356 - RNA, 19 nt, Homo sapiens
  misc_RNA (1)...(19): siRNA sense strand
ggaaaguaagagacaaaau

SEQ ID NO: 2354357 - RNA, 19 nt, Homo sapiens
  misc_RNA (1)...(19): siRNA sense strand
gcgaggaagaggcgguuca

SEQ ID NO: 2354358 - RNA, 19 nt, Homo sapiens
  misc_RNA (1)...(19): siRNA sense strand
cguaaaagccacugaucca

SEQ ID NO: 2354359 - RNA, 19 nt, Homo sapiens
  misc_RNA (1)...(19): siRNA sense strand
ggacagagacucaggucag

SEQ ID NO: 2354360 - RNA, 19 nt, Homo sapiens
  misc_RNA (1)...(19): siRNA sense strand
aaacaaaaggagacccuaa

SEQ ID NO: 2354361 - RNA, 19 nt, Homo sapiens
  misc_RNA (1)...(19): siRNA sense strand
ggauagacagggaggagcu

SEQ ID NO: 2354362 - RNA, 19 nt, Homo sapiens
  misc_RNA (1)...(19): siRNA sense strand
ucucauaauacuuguggau

SEQ ID NO: 2354363 - RNA, 19 nt, Homo sapiens
  misc_RNA (1)...(19): siRNA sense strand
ggguacaguaauugcacuu

SEQ ID NO: 2354364 - RNA, 19 nt, Homo sapiens
  misc_RNA (1)...(19): siRNA sense strand
ugacagugacucaggagga

SEQ ID NO: 2354365 - RNA, 19 nt, Homo sapiens
  misc_RNA (1)...(19): siRNA sense strand
cagugacucaggaggaaau

SEQ ID NO: 2354366 - RNA, 19 nt, Homo sapiens
  misc_RNA (1)...(19): siRNA sense strand
ccaaagugguggcagugga

SEQ ID NO: 2354367 - RNA, 19 nt, Homo sapiens
  misc_RNA (1)...(19): siRNA sense strand
cucuagaucgcgaggaaga

SEQ ID NO: 2354368 - RNA, 19 nt, Homo sapiens
  misc_RNA (1)...(19): siRNA sense strand
aggaagaggcgguucacca

SEQ ID NO: 2354369 - RNA, 19 nt, Homo sapiens
  misc_RNA (1)...(19): siRNA sense strand
gaacguuccuguaggcacu

SEQ ID NO: 2354370 - RNA, 19 nt, Homo sapiens
  misc_RNA (1)...(19): siRNA sense strand
cgggagaguugugagaaaa

SEQ ID NO: 2354371 - RNA, 19 nt, Homo sapiens
  misc_RNA (1)...(19): siRNA sense strand
augaaggagccaauggaga

SEQ ID NO: 2354372 - RNA, 19 nt, Homo sapiens
  misc_RNA (1)...(19): siRNA sense strand
gggucuagauuaugaggac

SEQ ID NO: 2354373 - RNA, 19 nt, Homo sapiens
  misc_RNA (1)...(19): siRNA sense strand
ggaagaaggcucaguggug

SEQ ID NO: 2354374 - RNA, 19 nt, Homo sapiens
  misc_RNA (1)...(19): siRNA sense strand
aaggcucaguggugggcaa

SEQ ID NO: 2354375 - RNA, 19 nt, Homo sapiens
  misc_RNA (1)...(19): siRNA sense strand
ggucagaaugccuggcugu

SEQ ID NO: 2354376 - RNA, 19 nt, Homo sapiens
  misc_RNA (1)...(19): siRNA sense strand
acagaacacuggacaggga

SEQ ID NO: 2354377 - RNA, 19 nt, Homo sapiens
  misc_RNA (1)...(19): siRNA sense strand
cggguaggauagacaggga

SEQ ID NO: 2354378 - RNA, 19 nt, Homo sapiens
  misc_RNA (1)...(19): siRNA sense strand
gggacagaacagagggaaa

SEQ ID NO: 2354379 - RNA, 19 nt, Homo sapiens
  misc_RNA (1)...(19): siRNA sense strand
ccggaaaguaagagacaaa

SEQ ID NO: 2354380 - RNA, 19 nt, Homo sapiens
  misc_RNA (1)...(19): siRNA sense strand
uugaaaagaccuauggaaa

SEQ ID NO: 2354381 - RNA, 19 nt, Homo sapiens
  misc_RNA (1)...(19): siRNA sense strand
ugaaaagaccuauggaaau

SEQ ID NO: 2354382 - RNA, 19 nt, Homo sapiens
  misc_RNA (1)...(19): siRNA sense strand
cuccaaacugugugacaaa

SEQ ID NO: 2354383 - RNA, 19 nt, Homo sapiens
  misc_RNA (1)...(19): siRNA sense strand
aggaaauggccuagucaca

SEQ ID NO: 2354384 - RNA, 19 nt, Homo sapiens
  misc_RNA (1)...(19): siRNA sense strand
agacaaaauaucacagcua

SEQ ID NO: 2354385 - RNA, 19 nt, Homo sapiens
  misc_RNA (1)...(19): siRNA sense strand
cgcucuagaucgcgaggaa

SEQ ID NO: 2354386 - RNA, 19 nt, Homo sapiens
  misc_RNA (1)...(19): siRNA sense strand
uguuugaggagcaggaaga

SEQ ID NO: 2354387 - RNA, 19 nt, Homo sapiens
  misc_RNA (1)...(19): siRNA sense strand
ggaaaguaagagacaaaau

SEQ ID NO: 2354388 - RNA, 19 nt, Homo sapiens
  misc_RNA (1)...(19): siRNA sense strand
gcgaggaagaggcgguuca

SEQ ID NO: 2354389 - RNA, 19 nt, Homo sapiens
  misc_RNA (1)...(19): siRNA sense strand
cguaaaagccacugaucca

SEQ ID NO: 2354390 - RNA, 19 nt, Homo sapiens
  misc_RNA (1)...(19): siRNA sense strand
ggacagagacucaggucag

SEQ ID NO: 2354391 - RNA, 19 nt, Homo sapiens
  misc_RNA (1)...(19): siRNA sense strand
aaacaaaaggagacccuaa

SEQ ID NO: 2354392 - RNA, 19 nt, Homo sapiens
  misc_RNA (1)...(19): siRNA sense strand
ggauagacagggaggagcu

SEQ ID NO: 2354393 - RNA, 19 nt, Homo sapiens
  misc_RNA (1)...(19): siRNA sense strand
ucucauaauacuuguggau

SEQ ID NO: 2354394 - RNA, 19 nt, Homo sapiens
  misc_RNA (1)...(19): siRNA sense strand
ggguacaguaauugcacuu

SEQ ID NO: 2354395 - RNA, 19 nt, Homo sapiens
  misc_RNA (1)...(19): siRNA sense strand
ugacagugacucaggagga

SEQ ID NO: 2354396 - RNA, 19 nt, Homo sapiens
  misc_RNA (1)...(19): siRNA sense strand
cagugacucaggaggaaau

SEQ ID NO: 2354397 - RNA, 19 nt, Homo sapiens
  misc_RNA (1)...(19): siRNA sense strand
ccaaagugguggcagugga

SEQ ID NO: 2354398 - RNA, 19 nt, Homo sapiens
  misc_RNA (1)...(19): siRNA sense strand
cucuagaucgcgaggaaga

SEQ ID NO: 2354399 - RNA, 19 nt, Homo sapiens
  misc_RNA (1)...(19): siRNA sense strand
aggaagaggcgguucacca

SEQ ID NO: 2354400 - RNA, 19 nt, Homo sapiens
  misc_RNA (1)...(19): siRNA sense strand
gaacguuccuguaggcacu

SEQ ID NO: 2354401 - RNA, 19 nt, Homo sapiens
  misc_RNA (1)...(19): siRNA sense strand
cgggagaguugugagaaaa

SEQ ID NO: 2354402 - RNA, 19 nt, Homo sapiens
  misc_RNA (1)...(19): siRNA sense strand
augaaggagccaauggaga

SEQ ID NO: 2354403 - RNA, 19 nt, Homo sapiens
  misc_RNA (1)...(19): siRNA sense strand
gggucuagauuaugaggac

SEQ ID NO: 2354404 - RNA, 19 nt, Homo sapiens
  misc_RNA (1)...(19): siRNA sense strand
ggaagaaggcucaguggug

SEQ ID NO: 2354405 - RNA, 19 nt, Homo sapiens
  misc_RNA (1)...(19): siRNA sense strand
aaggcucaguggugggcaa

SEQ ID NO: 2354406 - RNA, 19 nt, Homo sapiens
  misc_RNA (1)...(19): siRNA sense strand
ggucagaaugccuggcugu

SEQ ID NO: 2354407 - RNA, 19 nt, Homo sapiens
  misc_RNA (1)...(19): siRNA sense strand
acagaacacuggacaggga

SEQ ID NO: 2354408 - RNA, 19 nt, Homo sapiens
  misc_RNA (1)...(19): siRNA sense strand
cggguaggauagacaggga

SEQ ID NO: 2354409 - RNA, 19 nt, Homo sapiens
  misc_RNA (1)...(19): siRNA sense strand
agauaaaaugccugggaaa

SEQ ID NO: 2354410 - RNA, 19 nt, Homo sapiens
  misc_RNA (1)...(19): siRNA sense strand
ggcccuggaccgugagaaa

SEQ ID NO: 2354411 - RNA, 19 nt, Homo sapiens
  misc_RNA (1)...(19): siRNA sense strand
ccgaaauggcagaggacug

SEQ ID NO: 2354412 - RNA, 19 nt, Homo sapiens
  misc_RNA (1)...(19): siRNA sense strand
ggauagaccgggaggagcu

SEQ ID NO: 2354413 - RNA, 19 nt, Homo sapiens
  misc_RNA (1)...(19): siRNA sense strand
aagucuagauuaugaggau

SEQ ID NO: 2354414 - RNA, 19 nt, Homo sapiens
  misc_RNA (1)...(19): siRNA sense strand
cgugugaguguuugggaga

SEQ ID NO: 2354415 - RNA, 19 nt, Homo sapiens
  misc_RNA (1)...(19): siRNA sense strand
caccguuggaagagaaauu

SEQ ID NO: 2354416 - RNA, 19 nt, Homo sapiens
  misc_RNA (1)...(19): siRNA sense strand
ccuucgacuacgagcaauu

SEQ ID NO: 2354417 - RNA, 19 nt, Homo sapiens
  misc_RNA (1)...(19): siRNA sense strand
auucaaugcucaagugucu

SEQ ID NO: 2354418 - RNA, 19 nt, Homo sapiens
  misc_RNA (1)...(19): siRNA sense strand
cggagaggauagaccggga

SEQ ID NO: 2354419 - RNA, 19 nt, Homo sapiens
  misc_RNA (1)...(19): siRNA sense strand
augccauguucuaugaaau

SEQ ID NO: 2354420 - RNA, 19 nt, Homo sapiens
  misc_RNA (1)...(19): siRNA sense strand
gucugaggagcuagauaaa

SEQ ID NO: 2354421 - RNA, 19 nt, Homo sapiens
  misc_RNA (1)...(19): siRNA sense strand
cugccauuuaaguuagaaa

SEQ ID NO: 2354422 - RNA, 19 nt, Homo sapiens
  misc_RNA (1)...(19): siRNA sense strand
ccgcgaacaaauaucagaa

SEQ ID NO: 2354423 - RNA, 19 nt, Homo sapiens
  misc_RNA (1)...(19): siRNA sense strand
cccaggacccagauagcaa

SEQ ID NO: 2354424 - RNA, 19 nt, Homo sapiens
  misc_RNA (1)...(19): siRNA sense strand
acuuaaagcuacuggugac

SEQ ID NO: 2354425 - RNA, 19 nt, Homo sapiens
  misc_RNA (1)...(19): siRNA sense strand
agauaaaaugccugggaaa

SEQ ID NO: 2354426 - RNA, 19 nt, Homo sapiens
  misc_RNA (1)...(19): siRNA sense strand
ggcccuggaccgugagaaa

SEQ ID NO: 2354427 - RNA, 19 nt, Homo sapiens
  misc_RNA (1)...(19): siRNA sense strand
ccgaaauggcagaggacug

SEQ ID NO: 2354428 - RNA, 19 nt, Homo sapiens
  misc_RNA (1)...(19): siRNA sense strand
ggauagaccgggaggagcu

SEQ ID NO: 2354429 - RNA, 19 nt, Homo sapiens
  misc_RNA (1)...(19): siRNA sense strand
aagucuagauuaugaggau

SEQ ID NO: 2354430 - RNA, 19 nt, Homo sapiens
  misc_RNA (1)...(19): siRNA sense strand
cgugugaguguuugggaga

SEQ ID NO: 2354431 - RNA, 19 nt, Homo sapiens
  misc_RNA (1)...(19): siRNA sense strand
caccguuggaagagaaauu

SEQ ID NO: 2354432 - RNA, 19 nt, Homo sapiens
  misc_RNA (1)...(19): siRNA sense strand
ccuucgacuacgagcaauu

SEQ ID NO: 2354433 - RNA, 19 nt, Homo sapiens
  misc_RNA (1)...(19): siRNA sense strand
auucaaugcucaagugucu

SEQ ID NO: 2354434 - RNA, 19 nt, Homo sapiens
  misc_RNA (1)...(19): siRNA sense strand
cggagaggauagaccggga

SEQ ID NO: 2354435 - RNA, 19 nt, Homo sapiens
  misc_RNA (1)...(19): siRNA sense strand
augccauguucuaugaaau

SEQ ID NO: 2354436 - RNA, 19 nt, Homo sapiens
  misc_RNA (1)...(19): siRNA sense strand
gucugaggagcuagauaaa

SEQ ID NO: 2354437 - RNA, 19 nt, Homo sapiens
  misc_RNA (1)...(19): siRNA sense strand
cugccauuuaaguuagaaa

SEQ ID NO: 2354438 - RNA, 19 nt, Homo sapiens
  misc_RNA (1)...(19): siRNA sense strand
ccgcgaacaaauaucagaa

SEQ ID NO: 2354439 - RNA, 19 nt, Homo sapiens
  misc_RNA (1)...(19): siRNA sense strand
cccaggacccagauagcaa

SEQ ID NO: 2354440 - RNA, 19 nt, Homo sapiens
  misc_RNA (1)...(19): siRNA sense strand
acuuaaagcuacuggugac

SEQ ID NO: 2354441 - RNA, 19 nt, Homo sapiens
  misc_RNA (1)...(19): siRNA sense strand
cgcuaaagauggagggaac

SEQ ID NO: 2354442 - RNA, 19 nt, Homo sapiens
  misc_RNA (1)...(19): siRNA sense strand
agagaaaagcccuggagaa

SEQ ID NO: 2354443 - RNA, 19 nt, Homo sapiens
  misc_RNA (1)...(19): siRNA sense strand
auucaguagagguggaaau

SEQ ID NO: 2354444 - RNA, 19 nt, Homo sapiens
  misc_RNA (1)...(19): siRNA sense strand
gcuuuggaguagaggaacu

SEQ ID NO: 2354445 - RNA, 19 nt, Homo sapiens
  misc_RNA (1)...(19): siRNA sense strand
gggaagagaucgacagagg

SEQ ID NO: 2354446 - RNA, 19 nt, Homo sapiens
  misc_RNA (1)...(19): siRNA sense strand
uagaaaagucaguagacaa

SEQ ID NO: 2354447 - RNA, 19 nt, Homo sapiens
  misc_RNA (1)...(19): siRNA sense strand
ucgcuuuggaguagaggaa

SEQ ID NO: 2354448 - RNA, 19 nt, Homo sapiens
  misc_RNA (1)...(19): siRNA sense strand
gcaacaucgccaaggacuu

SEQ ID NO: 2354449 - RNA, 19 nt, Homo sapiens
  misc_RNA (1)...(19): siRNA sense strand
ggauagaccgggaggagcu

SEQ ID NO: 2354450 - RNA, 19 nt, Homo sapiens
  misc_RNA (1)...(19): siRNA sense strand
acucgaagaagaaagagaa

SEQ ID NO: 2354451 - RNA, 19 nt, Homo sapiens
  misc_RNA (1)...(19): siRNA sense strand
agaaaagucaguagacaau

SEQ ID NO: 2354452 - RNA, 19 nt, Homo sapiens
  misc_RNA (1)...(19): siRNA sense strand
ccgcuaaagauggagggaa

SEQ ID NO: 2354453 - RNA, 19 nt, Homo sapiens
  misc_RNA (1)...(19): siRNA sense strand
cgaacaggauagaccggga

SEQ ID NO: 2354454 - RNA, 19 nt, Homo sapiens
  misc_RNA (1)...(19): siRNA sense strand
aggaagaggcuguucacca

SEQ ID NO: 2354455 - RNA, 19 nt, Homo sapiens
  misc_RNA (1)...(19): siRNA sense strand
cugacgcagaugagggcua

SEQ ID NO: 2354456 - RNA, 19 nt, Homo sapiens
  misc_RNA (1)...(19): siRNA sense strand
auuaugagcaguugcgaga

SEQ ID NO: 2354457 - RNA, 19 nt, Homo sapiens
  misc_RNA (1)...(19): siRNA sense strand
aagaaagagaagaaacguu

SEQ ID NO: 2354458 - RNA, 19 nt, Homo sapiens
  misc_RNA (1)...(19): siRNA sense strand
gaguagaggaacuggagcu

SEQ ID NO: 2354459 - RNA, 19 nt, Homo sapiens
  misc_RNA (1)...(19): siRNA sense strand
ggaggcagcuugacaggca

SEQ ID NO: 2354460 - RNA, 19 nt, Homo sapiens
  misc_RNA (1)...(19): siRNA sense strand
aagaagaaagagaagaaac

SEQ ID NO: 2354461 - RNA, 19 nt, Homo sapiens
  misc_RNA (1)...(19): siRNA sense strand
agguggaaauaacagauau

SEQ ID NO: 2354462 - RNA, 19 nt, Homo sapiens
  misc_RNA (1)...(19): siRNA sense strand
gcgugaagguccuggaugc

SEQ ID NO: 2354463 - RNA, 19 nt, Homo sapiens
  misc_RNA (1)...(19): siRNA sense strand
cgcuaaagauggagggaac

SEQ ID NO: 2354464 - RNA, 19 nt, Homo sapiens
  misc_RNA (1)...(19): siRNA sense strand
agagaaaagcccuggagaa

SEQ ID NO: 2354465 - RNA, 19 nt, Homo sapiens
  misc_RNA (1)...(19): siRNA sense strand
auucaguagagguggaaau

SEQ ID NO: 2354466 - RNA, 19 nt, Homo sapiens
  misc_RNA (1)...(19): siRNA sense strand
gcuuuggaguagaggaacu

SEQ ID NO: 2354467 - RNA, 19 nt, Homo sapiens
  misc_RNA (1)...(19): siRNA sense strand
gggaagagaucgacagagg

SEQ ID NO: 2354468 - RNA, 19 nt, Homo sapiens
  misc_RNA (1)...(19): siRNA sense strand
uagaaaagucaguagacaa

SEQ ID NO: 2354469 - RNA, 19 nt, Homo sapiens
  misc_RNA (1)...(19): siRNA sense strand
ucgcuuuggaguagaggaa

SEQ ID NO: 2354470 - RNA, 19 nt, Homo sapiens
  misc_RNA (1)...(19): siRNA sense strand
gcaacaucgccaaggacuu

SEQ ID NO: 2354471 - RNA, 19 nt, Homo sapiens
  misc_RNA (1)...(19): siRNA sense strand
ggauagaccgggaggagcu

SEQ ID NO: 2354472 - RNA, 19 nt, Homo sapiens
  misc_RNA (1)...(19): siRNA sense strand
acucgaagaagaaagagaa

SEQ ID NO: 2354473 - RNA, 19 nt, Homo sapiens
  misc_RNA (1)...(19): siRNA sense strand
agaaaagucaguagacaau

SEQ ID NO: 2354474 - RNA, 19 nt, Homo sapiens
  misc_RNA (1)...(19): siRNA sense strand
ccgcuaaagauggagggaa

SEQ ID NO: 2354475 - RNA, 19 nt, Homo sapiens
  misc_RNA (1)...(19): siRNA sense strand
cgaacaggauagaccggga

SEQ ID NO: 2354476 - RNA, 19 nt, Homo sapiens
  misc_RNA (1)...(19): siRNA sense strand
aggaagaggcuguucacca

SEQ ID NO: 2354477 - RNA, 19 nt, Homo sapiens
  misc_RNA (1)...(19): siRNA sense strand
cugacgcagaugagggcua

SEQ ID NO: 2354478 - RNA, 19 nt, Homo sapiens
  misc_RNA (1)...(19): siRNA sense strand
auuaugagcaguugcgaga

SEQ ID NO: 2354479 - RNA, 19 nt, Homo sapiens
  misc_RNA (1)...(19): siRNA sense strand
aagaaagagaagaaacguu

SEQ ID NO: 2354480 - RNA, 19 nt, Homo sapiens
  misc_RNA (1)...(19): siRNA sense strand
gaguagaggaacuggagcu

SEQ ID NO: 2354481 - RNA, 19 nt, Homo sapiens
  misc_RNA (1)...(19): siRNA sense strand
ggaggcagcuugacaggca

SEQ ID NO: 2354482 - RNA, 19 nt, Homo sapiens
  misc_RNA (1)...(19): siRNA sense strand
aagaagaaagagaagaaac

SEQ ID NO: 2354483 - RNA, 19 nt, Homo sapiens
  misc_RNA (1)...(19): siRNA sense strand
agguggaaauaacagauau

SEQ ID NO: 2354484 - RNA, 19 nt, Homo sapiens
  misc_RNA (1)...(19): siRNA sense strand
gcgugaagguccuggaugc

SEQ ID NO: 2354485 - RNA, 19 nt, Homo sapiens
  misc_RNA (1)...(19): siRNA sense strand
aaguuaagguacugaucaa

SEQ ID NO: 2354486 - RNA, 19 nt, Homo sapiens
  misc_RNA (1)...(19): siRNA sense strand
aauaacagcaauagaccaa

SEQ ID NO: 2354487 - RNA, 19 nt, Homo sapiens
  misc_RNA (1)...(19): siRNA sense strand
cagcaaugagaaugcacaa

SEQ ID NO: 2354488 - RNA, 19 nt, Homo sapiens
  misc_RNA (1)...(19): siRNA sense strand
uggcuaaaguuaagguacu

SEQ ID NO: 2354489 - RNA, 19 nt, Homo sapiens
  misc_RNA (1)...(19): siRNA sense strand
ccuuagacagagaagaaga

SEQ ID NO: 2354490 - RNA, 19 nt, Homo sapiens
  misc_RNA (1)...(19): siRNA sense strand
aggcacaauaccauauaaa

SEQ ID NO: 2354491 - RNA, 19 nt, Homo sapiens
  misc_RNA (1)...(19): siRNA sense strand
ggauagaccgggaggagcu

SEQ ID NO: 2354492 - RNA, 19 nt, Homo sapiens
  misc_RNA (1)...(19): siRNA sense strand
cugcagagucccuuagaca

SEQ ID NO: 2354493 - RNA, 19 nt, Homo sapiens
  misc_RNA (1)...(19): siRNA sense strand
ucccuuagacagagaagaa

SEQ ID NO: 2354494 - RNA, 19 nt, Homo sapiens
  misc_RNA (1)...(19): siRNA sense strand
acucaggagacaauggcua

SEQ ID NO: 2354495 - RNA, 19 nt, Homo sapiens
  misc_RNA (1)...(19): siRNA sense strand
agcaauagaccaaggaacu

SEQ ID NO: 2354496 - RNA, 19 nt, Homo sapiens
  misc_RNA (1)...(19): siRNA sense strand
gggacaugcaacugaaagu

SEQ ID NO: 2354497 - RNA, 19 nt, Homo sapiens
  misc_RNA (1)...(19): siRNA sense strand
gccggaagagacagacaaa

SEQ ID NO: 2354498 - RNA, 19 nt, Homo sapiens
  misc_RNA (1)...(19): siRNA sense strand
agacagagaagaagaagcu

SEQ ID NO: 2354499 - RNA, 19 nt, Homo sapiens
  misc_RNA (1)...(19): siRNA sense strand
gguggaugcaaaugacaau

SEQ ID NO: 2354500 - RNA, 19 nt, Homo sapiens
  misc_RNA (1)...(19): siRNA sense strand
auauaaauguccccgaaaa

SEQ ID NO: 2354501 - RNA, 19 nt, Homo sapiens
  misc_RNA (1)...(19): siRNA sense strand
cuuagacagagaagaagaa

SEQ ID NO: 2354502 - RNA, 19 nt, Homo sapiens
  misc_RNA (1)...(19): siRNA sense strand
cccacgacuuggacagcaa

SEQ ID NO: 2354503 - RNA, 19 nt, Homo sapiens
  misc_RNA (1)...(19): siRNA sense strand
cagcaauagaccaaggaac

SEQ ID NO: 2354504 - RNA, 19 nt, Homo sapiens
  misc_RNA (1)...(19): siRNA sense strand
cagcauuuacucaggcaca

SEQ ID NO: 2354505 - RNA, 19 nt, Homo sapiens
  misc_RNA (1)...(19): siRNA sense strand
ccuagaaguggcagcuuga

SEQ ID NO: 2354506 - RNA, 19 nt, Homo sapiens
  misc_RNA (1)...(19): siRNA sense strand
gguaaaugccacugacccu

SEQ ID NO: 2354507 - RNA, 19 nt, Homo sapiens
  misc_RNA (1)...(19): siRNA sense strand
gagaagaagaagcugucca

SEQ ID NO: 2354508 - RNA, 19 nt, Homo sapiens
  misc_RNA (1)...(19): siRNA sense strand
aagaagaagcuguccacca

SEQ ID NO: 2354509 - RNA, 19 nt, Homo sapiens
  misc_RNA (1)...(19): siRNA sense strand
ggcucauggcuaaaguuaa

SEQ ID NO: 2354510 - RNA, 19 nt, Homo sapiens
  misc_RNA (1)...(19): siRNA sense strand
ucacaauaacagcaauaga

SEQ ID NO: 2354511 - RNA, 19 nt, Homo sapiens
  misc_RNA (1)...(19): siRNA sense strand
aaguuaagguacugaucaa

SEQ ID NO: 2354512 - RNA, 19 nt, Homo sapiens
  misc_RNA (1)...(19): siRNA sense strand
aauaacagcaauagaccaa

SEQ ID NO: 2354513 - RNA, 19 nt, Homo sapiens
  misc_RNA (1)...(19): siRNA sense strand
cagcaaugagaaugcacaa

SEQ ID NO: 2354514 - RNA, 19 nt, Homo sapiens
  misc_RNA (1)...(19): siRNA sense strand
uggcuaaaguuaagguacu

SEQ ID NO: 2354515 - RNA, 19 nt, Homo sapiens
  misc_RNA (1)...(19): siRNA sense strand
ccuuagacagagaagaaga

SEQ ID NO: 2354516 - RNA, 19 nt, Homo sapiens
  misc_RNA (1)...(19): siRNA sense strand
aggcacaauaccauauaaa

SEQ ID NO: 2354517 - RNA, 19 nt, Homo sapiens
  misc_RNA (1)...(19): siRNA sense strand
ggauagaccgggaggagcu

SEQ ID NO: 2354518 - RNA, 19 nt, Homo sapiens
  misc_RNA (1)...(19): siRNA sense strand
cugcagagucccuuagaca

SEQ ID NO: 2354519 - RNA, 19 nt, Homo sapiens
  misc_RNA (1)...(19): siRNA sense strand
ucccuuagacagagaagaa

SEQ ID NO: 2354520 - RNA, 19 nt, Homo sapiens
  misc_RNA (1)...(19): siRNA sense strand
acucaggagacaauggcua

SEQ ID NO: 2354521 - RNA, 19 nt, Homo sapiens
  misc_RNA (1)...(19): siRNA sense strand
agcaauagaccaaggaacu

SEQ ID NO: 2354522 - RNA, 19 nt, Homo sapiens
  misc_RNA (1)...(19): siRNA sense strand
gggacaugcaacugaaagu

SEQ ID NO: 2354523 - RNA, 19 nt, Homo sapiens
  misc_RNA (1)...(19): siRNA sense strand
gccggaagagacagacaaa

SEQ ID NO: 2354524 - RNA, 19 nt, Homo sapiens
  misc_RNA (1)...(19): siRNA sense strand
agacagagaagaagaagcu

SEQ ID NO: 2354525 - RNA, 19 nt, Homo sapiens
  misc_RNA (1)...(19): siRNA sense strand
gguggaugcaaaugacaau

SEQ ID NO: 2354526 - RNA, 19 nt, Homo sapiens
  misc_RNA (1)...(19): siRNA sense strand
auauaaauguccccgaaaa

SEQ ID NO: 2354527 - RNA, 19 nt, Homo sapiens
  misc_RNA (1)...(19): siRNA sense strand
cuuagacagagaagaagaa

SEQ ID NO: 2354528 - RNA, 19 nt, Homo sapiens
  misc_RNA (1)...(19): siRNA sense strand
cccacgacuuggacagcaa

SEQ ID NO: 2354529 - RNA, 19 nt, Homo sapiens
  misc_RNA (1)...(19): siRNA sense strand
cagcaauagaccaaggaac

SEQ ID NO: 2354530 - RNA, 19 nt, Homo sapiens
  misc_RNA (1)...(19): siRNA sense strand
cagcauuuacucaggcaca

SEQ ID NO: 2354531 - RNA, 19 nt, Homo sapiens
  misc_RNA (1)...(19): siRNA sense strand
ccuagaaguggcagcuuga

SEQ ID NO: 2354532 - RNA, 19 nt, Homo sapiens
  misc_RNA (1)...(19): siRNA sense strand
gguaaaugccacugacccu

SEQ ID NO: 2354533 - RNA, 19 nt, Homo sapiens
  misc_RNA (1)...(19): siRNA sense strand
gagaagaagaagcugucca

SEQ ID NO: 2354534 - RNA, 19 nt, Homo sapiens
  misc_RNA (1)...(19): siRNA sense strand
aagaagaagcuguccacca

SEQ ID NO: 2354535 - RNA, 19 nt, Homo sapiens
  misc_RNA (1)...(19): siRNA sense strand
ggcucauggcuaaaguuaa

SEQ ID NO: 2354536 - RNA, 19 nt, Homo sapiens
  misc_RNA (1)...(19): siRNA sense strand
ucacaauaacagcaauaga

SEQ ID NO: 2354537 - RNA, 19 nt, Homo sapiens
  misc_RNA (1)...(19): siRNA sense strand
aaauacagcugaagggaca

SEQ ID NO: 2354538 - RNA, 19 nt, Homo sapiens
  misc_RNA (1)...(19): siRNA sense strand
cgccaguauuucaggacaa

SEQ ID NO: 2354539 - RNA, 19 nt, Homo sapiens
  misc_RNA (1)...(19): siRNA sense strand
uggcaaaggaucugggacu

SEQ ID NO: 2354540 - RNA, 19 nt, Homo sapiens
  misc_RNA (1)...(19): siRNA sense strand
agaucagagccgaguacaa

SEQ ID NO: 2354541 - RNA, 19 nt, Homo sapiens
  misc_RNA (1)...(19): siRNA sense strand
augagaaacuggaccgaga

SEQ ID NO: 2354542 - RNA, 19 nt, Homo sapiens
  misc_RNA (1)...(19): siRNA sense strand
cagagcuaguguuggacaa

SEQ ID NO: 2354543 - RNA, 19 nt, Homo sapiens
  misc_RNA (1)...(19): siRNA sense strand
cgggcugagcugagaguca

SEQ ID NO: 2354544 - RNA, 19 nt, Homo sapiens
  misc_RNA (1)...(19): siRNA sense strand
gggugguuuccgaugauaa

SEQ ID NO: 2354545 - RNA, 19 nt, Homo sapiens
  misc_RNA (1)...(19): siRNA sense strand
caguauuucaggacaaaga

SEQ ID NO: 2354546 - RNA, 19 nt, Homo sapiens
  misc_RNA (1)...(19): siRNA sense strand
ugauauauccagagcuagu

SEQ ID NO: 2354547 - RNA, 19 nt, Homo sapiens
  misc_RNA (1)...(19): siRNA sense strand
gggcagaagauguagacuc

SEQ ID NO: 2354548 - RNA, 19 nt, Homo sapiens
  misc_RNA (1)...(19): siRNA sense strand
ugggaggaagggugaagaa

SEQ ID NO: 2354549 - RNA, 19 nt, Homo sapiens
  misc_RNA (1)...(19): siRNA sense strand
ggguuuuaguggaaguauu

SEQ ID NO: 2354550 - RNA, 19 nt, Homo sapiens
  misc_RNA (1)...(19): siRNA sense strand
cggugaugaaggcaugaua

SEQ ID NO: 2354551 - RNA, 19 nt, Homo sapiens
  misc_RNA (1)...(19): siRNA sense strand
agggacagcauuuagacua

SEQ ID NO: 2354552 - RNA, 19 nt, Homo sapiens
  misc_RNA (1)...(19): siRNA sense strand
auggaggacuuaacgguau

SEQ ID NO: 2354553 - RNA, 19 nt, Homo sapiens
  misc_RNA (1)...(19): siRNA sense strand
agguaugggcagaagaugu

SEQ ID NO: 2354554 - RNA, 19 nt, Homo sapiens
  misc_RNA (1)...(19): siRNA sense strand
ggcugaaaaccgagcacaa

SEQ ID NO: 2354555 - RNA, 19 nt, Homo sapiens
  misc_RNA (1)...(19): siRNA sense strand
cggaaguauccuauucauu

SEQ ID NO: 2354556 - RNA, 19 nt, Homo sapiens
  misc_RNA (1)...(19): siRNA sense strand
agcauuuagacuagaaaga

SEQ ID NO: 2354557 - RNA, 19 nt, Homo sapiens
  misc_RNA (1)...(19): siRNA sense strand
acuagaaagagcacaggau

SEQ ID NO: 2354558 - RNA, 19 nt, Homo sapiens
  misc_RNA (1)...(19): siRNA sense strand
caguaugaggugugucuga

SEQ ID NO: 2354559 - RNA, 19 nt, Homo sapiens
  misc_RNA (1)...(19): siRNA sense strand
ggucauaacaguauccaaa

SEQ ID NO: 2354560 - RNA, 19 nt, Homo sapiens
  misc_RNA (1)...(19): siRNA sense strand
ugggaaagaaauagaggaa

SEQ ID NO: 2354561 - RNA, 19 nt, Homo sapiens
  misc_RNA (1)...(19): siRNA sense strand
aaauacagcugaagggaca

SEQ ID NO: 2354562 - RNA, 19 nt, Homo sapiens
  misc_RNA (1)...(19): siRNA sense strand
agagcaaagcugaguacaa

SEQ ID NO: 2354563 - RNA, 19 nt, Homo sapiens
  misc_RNA (1)...(19): siRNA sense strand
cggagaaaauggaaagaca

SEQ ID NO: 2354564 - RNA, 19 nt, Homo sapiens
  misc_RNA (1)...(19): siRNA sense strand
uggcaaaggaucugggacu

SEQ ID NO: 2354565 - RNA, 19 nt, Homo sapiens
  misc_RNA (1)...(19): siRNA sense strand
ccuaaugacugaaggugca

SEQ ID NO: 2354566 - RNA, 19 nt, Homo sapiens
  misc_RNA (1)...(19): siRNA sense strand
ggacccuguuccagagcua

SEQ ID NO: 2354567 - RNA, 19 nt, Homo sapiens
  misc_RNA (1)...(19): siRNA sense strand
augagaaacuggaccgaga

SEQ ID NO: 2354568 - RNA, 19 nt, Homo sapiens
  misc_RNA (1)...(19): siRNA sense strand
gacugaggaaacagagaaa

SEQ ID NO: 2354569 - RNA, 19 nt, Homo sapiens
  misc_RNA (1)...(19): siRNA sense strand
cagagcuaguguuggacaa

SEQ ID NO: 2354570 - RNA, 19 nt, Homo sapiens
  misc_RNA (1)...(19): siRNA sense strand
ggagaaaauggaaagacaa

SEQ ID NO: 2354571 - RNA, 19 nt, Homo sapiens
  misc_RNA (1)...(19): siRNA sense strand
gagaaaauggaaagacaau

SEQ ID NO: 2354572 - RNA, 19 nt, Homo sapiens
  misc_RNA (1)...(19): siRNA sense strand
aauuaguggcagugaugaa

SEQ ID NO: 2354573 - RNA, 19 nt, Homo sapiens
  misc_RNA (1)...(19): siRNA sense strand
gugucugacuggagguuca

SEQ ID NO: 2354574 - RNA, 19 nt, Homo sapiens
  misc_RNA (1)...(19): siRNA sense strand
gaggaaacagagaaaggau

SEQ ID NO: 2354575 - RNA, 19 nt, Homo sapiens
  misc_RNA (1)...(19): siRNA sense strand
cgggcugagcugagaguca

SEQ ID NO: 2354576 - RNA, 19 nt, Homo sapiens
  misc_RNA (1)...(19): siRNA sense strand
gggugguuuccgaugauaa

SEQ ID NO: 2354577 - RNA, 19 nt, Homo sapiens
  misc_RNA (1)...(19): siRNA sense strand
ugauauauccagagcuagu

SEQ ID NO: 2354578 - RNA, 19 nt, Homo sapiens
  misc_RNA (1)...(19): siRNA sense strand
ccuuauuguuaaagugucu

SEQ ID NO: 2354579 - RNA, 19 nt, Homo sapiens
  misc_RNA (1)...(19): siRNA sense strand
uggaaagacaauuugcuau

SEQ ID NO: 2354580 - RNA, 19 nt, Homo sapiens
  misc_RNA (1)...(19): siRNA sense strand
agggacagcauuuagacua

SEQ ID NO: 2354581 - RNA, 19 nt, Homo sapiens
  misc_RNA (1)...(19): siRNA sense strand
gauuaaagacagagacucc

SEQ ID NO: 2354582 - RNA, 19 nt, Homo sapiens
  misc_RNA (1)...(19): siRNA sense strand
cgccacagacagagacuca

SEQ ID NO: 2354583 - RNA, 19 nt, Homo sapiens
  misc_RNA (1)...(19): siRNA sense strand
agcauuuagacuagaaaga

SEQ ID NO: 2354584 - RNA, 19 nt, Homo sapiens
  misc_RNA (1)...(19): siRNA sense strand
acuagaaagagcacaggau

SEQ ID NO: 2354585 - RNA, 19 nt, Homo sapiens
  misc_RNA (1)...(19): siRNA sense strand
cagugaugaaggcaugaua

SEQ ID NO: 2354586 - RNA, 19 nt, Homo sapiens
  misc_RNA (1)...(19): siRNA sense strand
agacuuagauauaggccaa

SEQ ID NO: 2354587 - RNA, 19 nt, Homo sapiens
  misc_RNA (1)...(19): siRNA sense strand
acacaggagucaacggaga

SEQ ID NO: 2354588 - RNA, 19 nt, Homo sapiens
  misc_RNA (1)...(19): siRNA sense strand
cuucagaugagauaagcaa

SEQ ID NO: 2354589 - RNA, 19 nt, Homo sapiens
  misc_RNA (1)...(19): siRNA sense strand
aggagucaacggagagauu

SEQ ID NO: 2354590 - RNA, 19 nt, Homo sapiens
  misc_RNA (1)...(19): siRNA sense strand
augagaaauuggaccguga

SEQ ID NO: 2354591 - RNA, 19 nt, Homo sapiens
  misc_RNA (1)...(19): siRNA sense strand
cagagcuggugcuggacaa

SEQ ID NO: 2354592 - RNA, 19 nt, Homo sapiens
  misc_RNA (1)...(19): siRNA sense strand
agauauaggccaaaacaau

SEQ ID NO: 2354593 - RNA, 19 nt, Homo sapiens
  misc_RNA (1)...(19): siRNA sense strand
aaagcagagccgaguacaa

SEQ ID NO: 2354594 - RNA, 19 nt, Homo sapiens
  misc_RNA (1)...(19): siRNA sense strand
ugauagaugugaacgacca

SEQ ID NO: 2354595 - RNA, 19 nt, Homo sapiens
  misc_RNA (1)...(19): siRNA sense strand
ucagaugagauaagcaaaa

SEQ ID NO: 2354596 - RNA, 19 nt, Homo sapiens
  misc_RNA (1)...(19): siRNA sense strand
ccugagaaugcgccugaaa

SEQ ID NO: 2354597 - RNA, 19 nt, Homo sapiens
  misc_RNA (1)...(19): siRNA sense strand
aggagaaaaugggaaaaua

SEQ ID NO: 2354598 - RNA, 19 nt, Homo sapiens
  misc_RNA (1)...(19): siRNA sense strand
ggugaaaguaucagagagc

SEQ ID NO: 2354599 - RNA, 19 nt, Homo sapiens
  misc_RNA (1)...(19): siRNA sense strand
uggugcuggucaaggacaa

SEQ ID NO: 2354600 - RNA, 19 nt, Homo sapiens
  misc_RNA (1)...(19): siRNA sense strand
ccaaaacaauauugagaac

SEQ ID NO: 2354601 - RNA, 19 nt, Homo sapiens
  misc_RNA (1)...(19): siRNA sense strand
gguuaggguuguuuccaga

SEQ ID NO: 2354602 - RNA, 19 nt, Homo sapiens
  misc_RNA (1)...(19): siRNA sense strand
cagcccaauaccugagaau

SEQ ID NO: 2354603 - RNA, 19 nt, Homo sapiens
  misc_RNA (1)...(19): siRNA sense strand
ggcugguggugcuggucaa

SEQ ID NO: 2354604 - RNA, 19 nt, Homo sapiens
  misc_RNA (1)...(19): siRNA sense strand
cagccuucaguuaaaguaa

SEQ ID NO: 2354605 - RNA, 19 nt, Homo sapiens
  misc_RNA (1)...(19): siRNA sense strand
gggagaaacuagaccggga

SEQ ID NO: 2354606 - RNA, 19 nt, Homo sapiens
  misc_RNA (1)...(19): siRNA sense strand
cuuccgaauucgagauaga

SEQ ID NO: 2354607 - RNA, 19 nt, Homo sapiens
  misc_RNA (1)...(19): siRNA sense strand
uaaaugaagucacgggaga

SEQ ID NO: 2354608 - RNA, 19 nt, Homo sapiens
  misc_RNA (1)...(19): siRNA sense strand
gaaaauagccagccgggua

SEQ ID NO: 2354609 - RNA, 19 nt, Homo sapiens
  misc_RNA (1)...(19): siRNA sense strand
aauuauugauccaggacau

SEQ ID NO: 2354610 - RNA, 19 nt, Homo sapiens
  misc_RNA (1)...(19): siRNA sense strand
gaaaucauagugagggcaa

SEQ ID NO: 2354611 - RNA, 19 nt, Homo sapiens
  misc_RNA (1)...(19): siRNA sense strand
gagauuugcuucugaggga

SEQ ID NO: 2354612 - RNA, 19 nt, Homo sapiens
  misc_RNA (1)...(19): siRNA sense strand
agaccagcgcugaguacaa

SEQ ID NO: 2354613 - RNA, 19 nt, Homo sapiens
  misc_RNA (1)...(19): siRNA sense strand
ggagaaacuagaccgggaa

SEQ ID NO: 2354614 - RNA, 19 nt, Homo sapiens
  misc_RNA (1)...(19): siRNA sense strand
ucauagugagggcaagaaa

SEQ ID NO: 2354615 - RNA, 19 nt, Homo sapiens
  misc_RNA (1)...(19): siRNA sense strand
cugaaagggaagugcucuu

SEQ ID NO: 2354616 - RNA, 19 nt, Homo sapiens
  misc_RNA (1)...(19): siRNA sense strand
gggagaaauacuguugaaa

SEQ ID NO: 2354617 - RNA, 19 nt, Homo sapiens
  misc_RNA (1)...(19): siRNA sense strand
cgggagggaaguuaaggaa

SEQ ID NO: 2354618 - RNA, 19 nt, Homo sapiens
  misc_RNA (1)...(19): siRNA sense strand
aaggagaauuauugaucca

SEQ ID NO: 2354619 - RNA, 19 nt, Homo sapiens
  misc_RNA (1)...(19): siRNA sense strand
ugguggaugugaaugacaa

SEQ ID NO: 2354620 - RNA, 19 nt, Homo sapiens
  misc_RNA (1)...(19): siRNA sense strand
aaugaagucacgggagaaa

SEQ ID NO: 2354621 - RNA, 19 nt, Homo sapiens
  misc_RNA (1)...(19): siRNA sense strand
aggugguggaugugaauga

SEQ ID NO: 2354622 - RNA, 19 nt, Homo sapiens
  misc_RNA (1)...(19): siRNA sense strand
cggagaaaauggaaagaug

SEQ ID NO: 2354623 - RNA, 19 nt, Homo sapiens
  misc_RNA (1)...(19): siRNA sense strand
gagaaaauggaaagaugau

SEQ ID NO: 2354624 - RNA, 19 nt, Homo sapiens
  misc_RNA (1)...(19): siRNA sense strand
ggaucugggccugggaauu

SEQ ID NO: 2354625 - RNA, 19 nt, Homo sapiens
  misc_RNA (1)...(19): siRNA sense strand
gggccugggaauuggggaa

SEQ ID NO: 2354626 - RNA, 19 nt, Homo sapiens
  misc_RNA (1)...(19): siRNA sense strand
gagaauuauugauccagga

SEQ ID NO: 2354627 - RNA, 19 nt, Homo sapiens
  misc_RNA (1)...(19): siRNA sense strand
gagauagagauuccggaga

SEQ ID NO: 2354628 - RNA, 19 nt, Homo sapiens
  misc_RNA (1)...(19): siRNA sense strand
cauagugagggcaagaaau

SEQ ID NO: 2354629 - RNA, 19 nt, Homo sapiens
  misc_RNA (1)...(19): siRNA sense strand
gggacuaaggguagaggaa

SEQ ID NO: 2354630 - RNA, 19 nt, Homo sapiens
  misc_RNA (1)...(19): siRNA sense strand
gacuaaggguagaggaacu

SEQ ID NO: 2354631 - RNA, 19 nt, Homo sapiens
  misc_RNA (1)...(19): siRNA sense strand
ugggaaaugcugaggacuu

SEQ ID NO: 2354632 - RNA, 19 nt, Homo sapiens
  misc_RNA (1)...(19): siRNA sense strand
agaccagauccgaguacaa

SEQ ID NO: 2354633 - RNA, 19 nt, Homo sapiens
  misc_RNA (1)...(19): siRNA sense strand
uagcaaaggaucugggacu

SEQ ID NO: 2354634 - RNA, 19 nt, Homo sapiens
  misc_RNA (1)...(19): siRNA sense strand
ggaucugggacuaagggua

SEQ ID NO: 2354635 - RNA, 19 nt, Homo sapiens
  misc_RNA (1)...(19): siRNA sense strand
caaggauggcggaggccua

SEQ ID NO: 2354636 - RNA, 19 nt, Homo sapiens
  misc_RNA (1)...(19): siRNA sense strand
gugauaugcaacuggucaa

SEQ ID NO: 2354637 - RNA, 19 nt, Homo sapiens
  misc_RNA (1)...(19): siRNA sense strand
gggacagcccagauaaaca

SEQ ID NO: 2354638 - RNA, 19 nt, Homo sapiens
  misc_RNA (1)...(19): siRNA sense strand
cagggugcagagaggguua

SEQ ID NO: 2354639 - RNA, 19 nt, Homo sapiens
  misc_RNA (1)...(19): siRNA sense strand
gcuccguaucauagaugua

SEQ ID NO: 2354640 - RNA, 19 nt, Homo sapiens
  misc_RNA (1)...(19): siRNA sense strand
auucuguggcugaggaaaa

SEQ ID NO: 2354641 - RNA, 19 nt, Homo sapiens
  misc_RNA (1)...(19): siRNA sense strand
cgguauucuuugaaaauga

SEQ ID NO: 2354642 - RNA, 19 nt, Homo sapiens
  misc_RNA (1)...(19): siRNA sense strand
uggugcuggucaaggacaa

SEQ ID NO: 2354643 - RNA, 19 nt, Homo sapiens
  misc_RNA (1)...(19): siRNA sense strand
gugcagagaggguuagcga

SEQ ID NO: 2354644 - RNA, 19 nt, Homo sapiens
  misc_RNA (1)...(19): siRNA sense strand
agcaaaggaucugggacua

SEQ ID NO: 2354645 - RNA, 19 nt, Homo sapiens
  misc_RNA (1)...(19): siRNA sense strand
gcaccaacgcccagguaac

SEQ ID NO: 2354646 - RNA, 19 nt, Homo sapiens
  misc_RNA (1)...(19): siRNA sense strand
ggaaggaaguacccggaac

SEQ ID NO: 2354647 - RNA, 19 nt, Homo sapiens
  misc_RNA (1)...(19): siRNA sense strand
aggcgggaggagagcgauu

SEQ ID NO: 2354648 - RNA, 19 nt, Homo sapiens
  misc_RNA (1)...(19): siRNA sense strand
agagcgauuucuuagacaa

SEQ ID NO: 2354649 - RNA, 19 nt, Homo sapiens
  misc_RNA (1)...(19): siRNA sense strand
acuuggaugugggaagaaa

SEQ ID NO: 2354650 - RNA, 19 nt, Homo sapiens
  misc_RNA (1)...(19): siRNA sense strand
agagaggguuagcgaggca

SEQ ID NO: 2354651 - RNA, 19 nt, Homo sapiens
  misc_RNA (1)...(19): siRNA sense strand
ccguaucauagauguaaau

SEQ ID NO: 2354652 - RNA, 19 nt, Homo sapiens
  misc_RNA (1)...(19): siRNA sense strand
cgccacagacagagacuca

SEQ ID NO: 2354653 - RNA, 19 nt, Homo sapiens
  misc_RNA (1)...(19): siRNA sense strand
ggcugguggugcuggucaa

SEQ ID NO: 2354654 - RNA, 19 nt, Homo sapiens
  misc_RNA (1)...(19): siRNA sense strand
ccagaaaacuugcaggaca

SEQ ID NO: 2354655 - RNA, 19 nt, Homo sapiens
  misc_RNA (1)...(19): siRNA sense strand
cagggugcagagaggguua

SEQ ID NO: 2354656 - RNA, 19 nt, Homo sapiens
  misc_RNA (1)...(19): siRNA sense strand
gcuggagauaggagaacuu

SEQ ID NO: 2354657 - RNA, 19 nt, Homo sapiens
  misc_RNA (1)...(19): siRNA sense strand
agaccagauccgaauacaa

SEQ ID NO: 2354658 - RNA, 19 nt, Homo sapiens
  misc_RNA (1)...(19): siRNA sense strand
aagugauggauuugaauga

SEQ ID NO: 2354659 - RNA, 19 nt, Homo sapiens
  misc_RNA (1)...(19): siRNA sense strand
uggugcuggucaaggacaa

SEQ ID NO: 2354660 - RNA, 19 nt, Homo sapiens
  misc_RNA (1)...(19): siRNA sense strand
gugcagagaggguuagcga

SEQ ID NO: 2354661 - RNA, 19 nt, Homo sapiens
  misc_RNA (1)...(19): siRNA sense strand
aguaaauauucaggcgaca

SEQ ID NO: 2354662 - RNA, 19 nt, Homo sapiens
  misc_RNA (1)...(19): siRNA sense strand
ggaacuaacuaugucgaca

SEQ ID NO: 2354663 - RNA, 19 nt, Homo sapiens
  misc_RNA (1)...(19): siRNA sense strand
ggcugaaaaccgagcacaa

SEQ ID NO: 2354664 - RNA, 19 nt, Homo sapiens
  misc_RNA (1)...(19): siRNA sense strand
agagaggguuagcgaggca

SEQ ID NO: 2354665 - RNA, 19 nt, Homo sapiens
  misc_RNA (1)...(19): siRNA sense strand
auucaguggccgaggaaac

SEQ ID NO: 2354666 - RNA, 19 nt, Homo sapiens
  misc_RNA (1)...(19): siRNA sense strand
caucugaagacauucgcaa

SEQ ID NO: 2354667 - RNA, 19 nt, Homo sapiens
  misc_RNA (1)...(19): siRNA sense strand
cgggagaccagauccgaau

SEQ ID NO: 2354668 - RNA, 19 nt, Homo sapiens
  misc_RNA (1)...(19): siRNA sense strand
ggacuuggauguaggaacc

SEQ ID NO: 2354669 - RNA, 19 nt, Homo sapiens
  misc_RNA (1)...(19): siRNA sense strand
ggcugguggugcuggucaa

SEQ ID NO: 2354670 - RNA, 19 nt, Homo sapiens
  misc_RNA (1)...(19): siRNA sense strand
cagcaaaucaguggcggaa

SEQ ID NO: 2354671 - RNA, 19 nt, Homo sapiens
  misc_RNA (1)...(19): siRNA sense strand
cggcagacaugaucggugu

SEQ ID NO: 2354672 - RNA, 19 nt, Homo sapiens
  misc_RNA (1)...(19): siRNA sense strand
caucgagaucucacagcaa

SEQ ID NO: 2354673 - RNA, 19 nt, Homo sapiens
  misc_RNA (1)...(19): siRNA sense strand
gcgaaugaugucucgguga

SEQ ID NO: 2354674 - RNA, 19 nt, Homo sapiens
  misc_RNA (1)...(19): siRNA sense strand
agguggacuuugaagacuu

SEQ ID NO: 2354675 - RNA, 19 nt, Homo sapiens
  misc_RNA (1)...(19): siRNA sense strand
uggcagagacggcagacau

SEQ ID NO: 2354676 - RNA, 19 nt, Homo sapiens
  misc_RNA (1)...(19): siRNA sense strand
ccgaggagauugaagagcu

SEQ ID NO: 2354677 - RNA, 19 nt, Homo sapiens
  misc_RNA (1)...(19): siRNA sense strand
cagcaaaucaguggcggaa

SEQ ID NO: 2354678 - RNA, 19 nt, Homo sapiens
  misc_RNA (1)...(19): siRNA sense strand
cggcagacaugaucggugu

SEQ ID NO: 2354679 - RNA, 19 nt, Homo sapiens
  misc_RNA (1)...(19): siRNA sense strand
caucgagaucucacagcaa

SEQ ID NO: 2354680 - RNA, 19 nt, Homo sapiens
  misc_RNA (1)...(19): siRNA sense strand
gcgaaugaugucucgguga

SEQ ID NO: 2354681 - RNA, 19 nt, Homo sapiens
  misc_RNA (1)...(19): siRNA sense strand
agguggacuuugaagacuu

SEQ ID NO: 2354682 - RNA, 19 nt, Homo sapiens
  misc_RNA (1)...(19): siRNA sense strand
uggcagagacggcagacau

SEQ ID NO: 2354683 - RNA, 19 nt, Homo sapiens
  misc_RNA (1)...(19): siRNA sense strand
ccgaggagauugaagagcu

SEQ ID NO: 2354684 - RNA, 19 nt, Homo sapiens
  misc_RNA (1)...(19): siRNA sense strand
agaaaggggcugcgacaaa

SEQ ID NO: 2354685 - RNA, 19 nt, Homo sapiens
  misc_RNA (1)...(19): siRNA sense strand
aggagagcgagguggaaga

SEQ ID NO: 2354686 - RNA, 19 nt, Homo sapiens
  misc_RNA (1)...(19): siRNA sense strand
ccgaagaagaagacuacca

SEQ ID NO: 2354687 - RNA, 19 nt, Homo sapiens
  misc_RNA (1)...(19): siRNA sense strand
aguccaaagccgagagccu

SEQ ID NO: 2354688 - RNA, 19 nt, Homo sapiens
  misc_RNA (1)...(19): siRNA sense strand
agcaguucguagagggaga

SEQ ID NO: 2354689 - RNA, 19 nt, Homo sapiens
  misc_RNA (1)...(19): siRNA sense strand
agggagacgcgggaagaaa

SEQ ID NO: 2354690 - RNA, 19 nt, Homo sapiens
  misc_RNA (1)...(19): siRNA sense strand
gaagaaaggggcugcgaca

SEQ ID NO: 2354691 - RNA, 19 nt, Homo sapiens
  misc_RNA (1)...(19): siRNA sense strand
gacccgaagaagaagacua

SEQ ID NO: 2354692 - RNA, 19 nt, Homo sapiens
  misc_RNA (1)...(19): siRNA sense strand
cggaggcaggaaagaggaa

SEQ ID NO: 2354693 - RNA, 19 nt, Homo sapiens
  misc_RNA (1)...(19): siRNA sense strand
agguggccgagaagggaaa

SEQ ID NO: 2354694 - RNA, 19 nt, Homo sapiens
  misc_RNA (1)...(19): siRNA sense strand
caucugaggcagugcggaa

SEQ ID NO: 2354695 - RNA, 19 nt, Homo sapiens
  misc_RNA (1)...(19): siRNA sense strand
guguagagguagagauccu

SEQ ID NO: 2354696 - RNA, 19 nt, Homo sapiens
  misc_RNA (1)...(19): siRNA sense strand
ccacagacucgcagagcca

SEQ ID NO: 2354697 - RNA, 19 nt, Homo sapiens
  misc_RNA (1)...(19): siRNA sense strand
augaggacccugaggaaau

SEQ ID NO: 2354698 - RNA, 19 nt, Homo sapiens
  misc_RNA (1)...(19): siRNA sense strand
caaaagauugaccgagaaa

SEQ ID NO: 2354699 - RNA, 19 nt, Homo sapiens
  misc_RNA (1)...(19): siRNA sense strand
cugaaugugaagacccuaa

SEQ ID NO: 2354700 - RNA, 19 nt, Homo sapiens
  misc_RNA (1)...(19): siRNA sense strand
cugcuuacauccuagaaaa

SEQ ID NO: 2354701 - RNA, 19 nt, Homo sapiens
  misc_RNA (1)...(19): siRNA sense strand
ccgagaaagccuaugugga

SEQ ID NO: 2354702 - RNA, 19 nt, Homo sapiens
  misc_RNA (1)...(19): siRNA sense strand
ccguguagagguagagauc

SEQ ID NO: 2354703 - RNA, 19 nt, Homo sapiens
  misc_RNA (1)...(19): siRNA sense strand
caucugaggcagugcggaa

SEQ ID NO: 2354704 - RNA, 19 nt, Homo sapiens
  misc_RNA (1)...(19): siRNA sense strand
guguagagguagagauccu

SEQ ID NO: 2354705 - RNA, 19 nt, Homo sapiens
  misc_RNA (1)...(19): siRNA sense strand
ccacagacucgcagagcca

SEQ ID NO: 2354706 - RNA, 19 nt, Homo sapiens
  misc_RNA (1)...(19): siRNA sense strand
augaggacccugaggaaau

SEQ ID NO: 2354707 - RNA, 19 nt, Homo sapiens
  misc_RNA (1)...(19): siRNA sense strand
caaaagauugaccgagaaa

SEQ ID NO: 2354708 - RNA, 19 nt, Homo sapiens
  misc_RNA (1)...(19): siRNA sense strand
cugaaugugaagacccuaa

SEQ ID NO: 2354709 - RNA, 19 nt, Homo sapiens
  misc_RNA (1)...(19): siRNA sense strand
cugcuuacauccuagaaaa

SEQ ID NO: 2354710 - RNA, 19 nt, Homo sapiens
  misc_RNA (1)...(19): siRNA sense strand
ccgagaaagccuaugugga

SEQ ID NO: 2354711 - RNA, 19 nt, Homo sapiens
  misc_RNA (1)...(19): siRNA sense strand
ccguguagagguagagauc

SEQ ID NO: 2354712 - RNA, 19 nt, Homo sapiens
  misc_RNA (1)...(19): siRNA sense strand
gguuacaaugcuuggguuu

SEQ ID NO: 2354713 - RNA, 19 nt, Homo sapiens
  misc_RNA (1)...(19): siRNA sense strand
gaaaucuggcggugggcua

SEQ ID NO: 2354714 - RNA, 19 nt, Homo sapiens
  misc_RNA (1)...(19): siRNA sense strand
agacuuugagagugagaau

SEQ ID NO: 2354715 - RNA, 19 nt, Homo sapiens
  misc_RNA (1)...(19): siRNA sense strand
ccuuagaggaagacacuca

SEQ ID NO: 2354716 - RNA, 19 nt, Homo sapiens
  misc_RNA (1)...(19): siRNA sense strand
gugguaaaggauaguggua

SEQ ID NO: 2354717 - RNA, 19 nt, Homo sapiens
  misc_RNA (1)...(19): siRNA sense strand
ggucauugugguaaaggau

SEQ ID NO: 2354718 - RNA, 19 nt, Homo sapiens
  misc_RNA (1)...(19): siRNA sense strand
ggauccagacucaggguca

SEQ ID NO: 2354719 - RNA, 19 nt, Homo sapiens
  misc_RNA (1)...(19): siRNA sense strand
agaucguagaugugaauga

SEQ ID NO: 2354720 - RNA, 19 nt, Homo sapiens
  misc_RNA (1)...(19): siRNA sense strand
cgagagaagcaaucggacu

SEQ ID NO: 2354721 - RNA, 19 nt, Homo sapiens
  misc_RNA (1)...(19): siRNA sense strand
aggauuaguguguuggaga

SEQ ID NO: 2354722 - RNA, 19 nt, Homo sapiens
  misc_RNA (1)...(19): siRNA sense strand
cucaguacccacagaacua

SEQ ID NO: 2354723 - RNA, 19 nt, Homo sapiens
  misc_RNA (1)...(19): siRNA sense strand
gcuggagaggugaaccaaa

SEQ ID NO: 2354724 - RNA, 19 nt, Homo sapiens
  misc_RNA (1)...(19): siRNA sense strand
uugcacuggaugugaagaa

SEQ ID NO: 2354725 - RNA, 19 nt, Homo sapiens
  misc_RNA (1)...(19): siRNA sense strand
ccgaauccagcuaggguca

SEQ ID NO: 2354726 - RNA, 19 nt, Homo sapiens
  misc_RNA (1)...(19): siRNA sense strand
gagaggugaaccaaagaca

SEQ ID NO: 2354727 - RNA, 19 nt, Homo sapiens
  misc_RNA (1)...(19): siRNA sense strand
uagagaucguagaugugaa

SEQ ID NO: 2354728 - RNA, 19 nt, Homo sapiens
  misc_RNA (1)...(19): siRNA sense strand
gguuacaaugcuuggguuu

SEQ ID NO: 2354729 - RNA, 19 nt, Homo sapiens
  misc_RNA (1)...(19): siRNA sense strand
gaaaucuggcggugggcua

SEQ ID NO: 2354730 - RNA, 19 nt, Homo sapiens
  misc_RNA (1)...(19): siRNA sense strand
agacuuugagagugagaau

SEQ ID NO: 2354731 - RNA, 19 nt, Homo sapiens
  misc_RNA (1)...(19): siRNA sense strand
ccuuagaggaagacacuca

SEQ ID NO: 2354732 - RNA, 19 nt, Homo sapiens
  misc_RNA (1)...(19): siRNA sense strand
gugguaaaggauaguggua

SEQ ID NO: 2354733 - RNA, 19 nt, Homo sapiens
  misc_RNA (1)...(19): siRNA sense strand
ggucauugugguaaaggau

SEQ ID NO: 2354734 - RNA, 19 nt, Homo sapiens
  misc_RNA (1)...(19): siRNA sense strand
ggauccagacucaggguca

SEQ ID NO: 2354735 - RNA, 19 nt, Homo sapiens
  misc_RNA (1)...(19): siRNA sense strand
agaucguagaugugaauga

SEQ ID NO: 2354736 - RNA, 19 nt, Homo sapiens
  misc_RNA (1)...(19): siRNA sense strand
cgagagaagcaaucggacu

SEQ ID NO: 2354737 - RNA, 19 nt, Homo sapiens
  misc_RNA (1)...(19): siRNA sense strand
aggauuaguguguuggaga

SEQ ID NO: 2354738 - RNA, 19 nt, Homo sapiens
  misc_RNA (1)...(19): siRNA sense strand
cucaguacccacagaacua

SEQ ID NO: 2354739 - RNA, 19 nt, Homo sapiens
  misc_RNA (1)...(19): siRNA sense strand
gcuggagaggugaaccaaa

SEQ ID NO: 2354740 - RNA, 19 nt, Homo sapiens
  misc_RNA (1)...(19): siRNA sense strand
uugcacuggaugugaagaa

SEQ ID NO: 2354741 - RNA, 19 nt, Homo sapiens
  misc_RNA (1)...(19): siRNA sense strand
ccgaauccagcuaggguca

SEQ ID NO: 2354742 - RNA, 19 nt, Homo sapiens
  misc_RNA (1)...(19): siRNA sense strand
gagaggugaaccaaagaca

SEQ ID NO: 2354743 - RNA, 19 nt, Homo sapiens
  misc_RNA (1)...(19): siRNA sense strand
uagagaucguagaugugaa

SEQ ID NO: 2354744 - RNA, 19 nt, Homo sapiens
  misc_RNA (1)...(19): siRNA sense strand
agauaagaauccugguaau

SEQ ID NO: 2354745 - RNA, 19 nt, Homo sapiens
  misc_RNA (1)...(19): siRNA sense strand
gcguugaagcagauaagaa

SEQ ID NO: 2354746 - RNA, 19 nt, Homo sapiens
  misc_RNA (1)...(19): siRNA sense strand
ggaccaagacucaggggaa

SEQ ID NO: 2354747 - RNA, 19 nt, Homo sapiens
  misc_RNA (1)...(19): siRNA sense strand
cgcuaaggaucuagggcuu

SEQ ID NO: 2354748 - RNA, 19 nt, Homo sapiens
  misc_RNA (1)...(19): siRNA sense strand
guaugaauucgcugagcaa

SEQ ID NO: 2354749 - RNA, 19 nt, Homo sapiens
  misc_RNA (1)...(19): siRNA sense strand
augcaaagagagaagaaga

SEQ ID NO: 2354750 - RNA, 19 nt, Homo sapiens
  misc_RNA (1)...(19): siRNA sense strand
cgacagucuuucagcccua

SEQ ID NO: 2354751 - RNA, 19 nt, Homo sapiens
  misc_RNA (1)...(19): siRNA sense strand
augaauucgcugagcaaau

SEQ ID NO: 2354752 - RNA, 19 nt, Homo sapiens
  misc_RNA (1)...(19): siRNA sense strand
uguaagagauggaggacag

SEQ ID NO: 2354753 - RNA, 19 nt, Homo sapiens
  misc_RNA (1)...(19): siRNA sense strand
caauccugaugguggcaaa

SEQ ID NO: 2354754 - RNA, 19 nt, Homo sapiens
  misc_RNA (1)...(19): siRNA sense strand
uggaagcugugguggaaaa

SEQ ID NO: 2354755 - RNA, 19 nt, Homo sapiens
  misc_RNA (1)...(19): siRNA sense strand
acuaaguccuaacgaguau

SEQ ID NO: 2354756 - RNA, 19 nt, Homo sapiens
  misc_RNA (1)...(19): siRNA sense strand
gaacaggcgaggugcgcau

SEQ ID NO: 2354757 - RNA, 19 nt, Homo sapiens
  misc_RNA (1)...(19): siRNA sense strand
uuguagaaguuguagacga

SEQ ID NO: 2354758 - RNA, 19 nt, Homo sapiens
  misc_RNA (1)...(19): siRNA sense strand
uagaaguuguagacgaaaa

SEQ ID NO: 2354759 - RNA, 19 nt, Homo sapiens
  misc_RNA (1)...(19): siRNA sense strand
ccguuauccuccagcaaaa

SEQ ID NO: 2354760 - RNA, 19 nt, Homo sapiens
  misc_RNA (1)...(19): siRNA sense strand
agaaauaaucaucacguca

SEQ ID NO: 2354761 - RNA, 19 nt, Homo sapiens
  misc_RNA (1)...(19): siRNA sense strand
cuggauuacacuacaggaa

SEQ ID NO: 2354762 - RNA, 19 nt, Homo sapiens
  misc_RNA (1)...(19): siRNA sense strand
cgagaaacgcagagcgcuc

SEQ ID NO: 2354763 - RNA, 19 nt, Homo sapiens
  misc_RNA (1)...(19): siRNA sense strand
uggauuacacuacaggaaa

SEQ ID NO: 2354764 - RNA, 19 nt, Homo sapiens
  misc_RNA (1)...(19): siRNA sense strand
gaacguugcccuaugccua

SEQ ID NO: 2354765 - RNA, 19 nt, Homo sapiens
  misc_RNA (1)...(19): siRNA sense strand
caacuaaguccuaacgagu

SEQ ID NO: 2354766 - RNA, 19 nt, Homo sapiens
  misc_RNA (1)...(19): siRNA sense strand
gaccaagacucaggggaaa

SEQ ID NO: 2354767 - RNA, 19 nt, Homo sapiens
  misc_RNA (1)...(19): siRNA sense strand
gggcaucaacucagagauc

SEQ ID NO: 2354768 - RNA, 19 nt, Homo sapiens
  misc_RNA (1)...(19): siRNA sense strand
ccacacaagauaaccucaa

SEQ ID NO: 2354769 - RNA, 19 nt, Homo sapiens
  misc_RNA (1)...(19): siRNA sense strand
caaagagagaagaagaugu

SEQ ID NO: 2354770 - RNA, 19 nt, Homo sapiens
  misc_RNA (1)...(19): siRNA sense strand
gguacugcucagauaagaa

SEQ ID NO: 2354771 - RNA, 19 nt, Homo sapiens
  misc_RNA (1)...(19): siRNA sense strand
ccaacuacagugagggaac

SEQ ID NO: 2354772 - RNA, 19 nt, Homo sapiens
  misc_RNA (1)...(19): siRNA sense strand
cugaccaggacgagggcau

SEQ ID NO: 2354773 - RNA, 19 nt, Homo sapiens
  misc_RNA (1)...(19): siRNA sense strand
acaagauaaccucaacaaa

SEQ ID NO: 2354774 - RNA, 19 nt, Homo sapiens
  misc_RNA (1)...(19): siRNA sense strand
cugcagaagauccugauau

SEQ ID NO: 2354775 - RNA, 19 nt, Homo sapiens
  misc_RNA (1)...(19): siRNA sense strand
ugcaaagagagaagaagau

SEQ ID NO: 2354776 - RNA, 19 nt, Homo sapiens
  misc_RNA (1)...(19): siRNA sense strand
acaacagcccagaaauaau

SEQ ID NO: 2354777 - RNA, 19 nt, Homo sapiens
  misc_RNA (1)...(19): siRNA sense strand
auuccggaaagaugaaaua

SEQ ID NO: 2354778 - RNA, 19 nt, Homo sapiens
  misc_RNA (1)...(19): siRNA sense strand
uccggaaagaugaaauaaa

SEQ ID NO: 2354779 - RNA, 19 nt, Homo sapiens
  misc_RNA (1)...(19): siRNA sense strand
ccucaauuccggaaagaug

SEQ ID NO: 2354780 - RNA, 19 nt, Homo sapiens
  misc_RNA (1)...(19): siRNA sense strand
cggaaagaugaaauaaacu

SEQ ID NO: 2354781 - RNA, 19 nt, Homo sapiens
  misc_RNA (1)...(19): siRNA sense strand
gcagauagcuugcaagagg

SEQ ID NO: 2354782 - RNA, 19 nt, Homo sapiens
  misc_RNA (1)...(19): siRNA sense strand
agauaagaauccugguaau

SEQ ID NO: 2354783 - RNA, 19 nt, Homo sapiens
  misc_RNA (1)...(19): siRNA sense strand
gcguugaagcagauaagaa

SEQ ID NO: 2354784 - RNA, 19 nt, Homo sapiens
  misc_RNA (1)...(19): siRNA sense strand
ggaccaagacucaggggaa

SEQ ID NO: 2354785 - RNA, 19 nt, Homo sapiens
  misc_RNA (1)...(19): siRNA sense strand
cgcuaaggaucuagggcuu

SEQ ID NO: 2354786 - RNA, 19 nt, Homo sapiens
  misc_RNA (1)...(19): siRNA sense strand
guaugaauucgcugagcaa

SEQ ID NO: 2354787 - RNA, 19 nt, Homo sapiens
  misc_RNA (1)...(19): siRNA sense strand
augcaaagagagaagaaga

SEQ ID NO: 2354788 - RNA, 19 nt, Homo sapiens
  misc_RNA (1)...(19): siRNA sense strand
cgacagucuuucagcccua

SEQ ID NO: 2354789 - RNA, 19 nt, Homo sapiens
  misc_RNA (1)...(19): siRNA sense strand
augaauucgcugagcaaau

SEQ ID NO: 2354790 - RNA, 19 nt, Homo sapiens
  misc_RNA (1)...(19): siRNA sense strand
uguaagagauggaggacag

SEQ ID NO: 2354791 - RNA, 19 nt, Homo sapiens
  misc_RNA (1)...(19): siRNA sense strand
caauccugaugguggcaaa

SEQ ID NO: 2354792 - RNA, 19 nt, Homo sapiens
  misc_RNA (1)...(19): siRNA sense strand
uggaagcugugguggaaaa

SEQ ID NO: 2354793 - RNA, 19 nt, Homo sapiens
  misc_RNA (1)...(19): siRNA sense strand
acuaaguccuaacgaguau

SEQ ID NO: 2354794 - RNA, 19 nt, Homo sapiens
  misc_RNA (1)...(19): siRNA sense strand
gaacaggcgaggugcgcau

SEQ ID NO: 2354795 - RNA, 19 nt, Homo sapiens
  misc_RNA (1)...(19): siRNA sense strand
uuguagaaguuguagacga

SEQ ID NO: 2354796 - RNA, 19 nt, Homo sapiens
  misc_RNA (1)...(19): siRNA sense strand
uagaaguuguagacgaaaa

SEQ ID NO: 2354797 - RNA, 19 nt, Homo sapiens
  misc_RNA (1)...(19): siRNA sense strand
ccguuauccuccagcaaaa

SEQ ID NO: 2354798 - RNA, 19 nt, Homo sapiens
  misc_RNA (1)...(19): siRNA sense strand
agaaauaaucaucacguca

SEQ ID NO: 2354799 - RNA, 19 nt, Homo sapiens
  misc_RNA (1)...(19): siRNA sense strand
cuggauuacacuacaggaa

SEQ ID NO: 2354800 - RNA, 19 nt, Homo sapiens
  misc_RNA (1)...(19): siRNA sense strand
cgagaaacgcagagcgcuc

SEQ ID NO: 2354801 - RNA, 19 nt, Homo sapiens
  misc_RNA (1)...(19): siRNA sense strand
uggauuacacuacaggaaa

SEQ ID NO: 2354802 - RNA, 19 nt, Homo sapiens
  misc_RNA (1)...(19): siRNA sense strand
gaacguugcccuaugccua

SEQ ID NO: 2354803 - RNA, 19 nt, Homo sapiens
  misc_RNA (1)...(19): siRNA sense strand
caacuaaguccuaacgagu

SEQ ID NO: 2354804 - RNA, 19 nt, Homo sapiens
  misc_RNA (1)...(19): siRNA sense strand
gaccaagacucaggggaaa

SEQ ID NO: 2354805 - RNA, 19 nt, Homo sapiens
  misc_RNA (1)...(19): siRNA sense strand
gggcaucaacucagagauc

SEQ ID NO: 2354806 - RNA, 19 nt, Homo sapiens
  misc_RNA (1)...(19): siRNA sense strand
ccacacaagauaaccucaa

SEQ ID NO: 2354807 - RNA, 19 nt, Homo sapiens
  misc_RNA (1)...(19): siRNA sense strand
caaagagagaagaagaugu

SEQ ID NO: 2354808 - RNA, 19 nt, Homo sapiens
  misc_RNA (1)...(19): siRNA sense strand
gguacugcucagauaagaa

SEQ ID NO: 2354809 - RNA, 19 nt, Homo sapiens
  misc_RNA (1)...(19): siRNA sense strand
ccaacuacagugagggaac

SEQ ID NO: 2354810 - RNA, 19 nt, Homo sapiens
  misc_RNA (1)...(19): siRNA sense strand
cugaccaggacgagggcau

SEQ ID NO: 2354811 - RNA, 19 nt, Homo sapiens
  misc_RNA (1)...(19): siRNA sense strand
acaagauaaccucaacaaa

SEQ ID NO: 2354812 - RNA, 19 nt, Homo sapiens
  misc_RNA (1)...(19): siRNA sense strand
cugcagaagauccugauau

SEQ ID NO: 2354813 - RNA, 19 nt, Homo sapiens
  misc_RNA (1)...(19): siRNA sense strand
ugcaaagagagaagaagau

SEQ ID NO: 2354814 - RNA, 19 nt, Homo sapiens
  misc_RNA (1)...(19): siRNA sense strand
acaacagcccagaaauaau

SEQ ID NO: 2354815 - RNA, 19 nt, Homo sapiens
  misc_RNA (1)...(19): siRNA sense strand
auuccggaaagaugaaaua

SEQ ID NO: 2354816 - RNA, 19 nt, Homo sapiens
  misc_RNA (1)...(19): siRNA sense strand
uccggaaagaugaaauaaa

SEQ ID NO: 2354817 - RNA, 19 nt, Homo sapiens
  misc_RNA (1)...(19): siRNA sense strand
ccucaauuccggaaagaug

SEQ ID NO: 2354818 - RNA, 19 nt, Homo sapiens
  misc_RNA (1)...(19): siRNA sense strand
cggaaagaugaaauaaacu

SEQ ID NO: 2354819 - RNA, 19 nt, Homo sapiens
  misc_RNA (1)...(19): siRNA sense strand
gcagauagcuugcaagagg

SEQ ID NO: 2354820 - RNA, 19 nt, Homo sapiens
  misc_RNA (1)...(19): siRNA sense strand
gggucaaugcugagauaaa

SEQ ID NO: 2354821 - RNA, 19 nt, Homo sapiens
  misc_RNA (1)...(19): siRNA sense strand
ccauggaaguggaagcgaa

SEQ ID NO: 2354822 - RNA, 19 nt, Homo sapiens
  misc_RNA (1)...(19): siRNA sense strand
augcaaagagagaagaaga

SEQ ID NO: 2354823 - RNA, 19 nt, Homo sapiens
  misc_RNA (1)...(19): siRNA sense strand
uggaagcugugguggaaaa

SEQ ID NO: 2354824 - RNA, 19 nt, Homo sapiens
  misc_RNA (1)...(19): siRNA sense strand
cagguguaauauagaaaca

SEQ ID NO: 2354825 - RNA, 19 nt, Homo sapiens
  misc_RNA (1)...(19): siRNA sense strand
auggagaagucagguguaa

SEQ ID NO: 2354826 - RNA, 19 nt, Homo sapiens
  misc_RNA (1)...(19): siRNA sense strand
ucgcagacaacuugcaaga

SEQ ID NO: 2354827 - RNA, 19 nt, Homo sapiens
  misc_RNA (1)...(19): siRNA sense strand
cagacaacuugcaagagau

SEQ ID NO: 2354828 - RNA, 19 nt, Homo sapiens
  misc_RNA (1)...(19): siRNA sense strand
caaagagagaagaagaugu

SEQ ID NO: 2354829 - RNA, 19 nt, Homo sapiens
  misc_RNA (1)...(19): siRNA sense strand
ucgcugacaucaacgacaa

SEQ ID NO: 2354830 - RNA, 19 nt, Homo sapiens
  misc_RNA (1)...(19): siRNA sense strand
cagaauacaaugucaccau

SEQ ID NO: 2354831 - RNA, 19 nt, Homo sapiens
  misc_RNA (1)...(19): siRNA sense strand
ggaucuggauuucggagga

SEQ ID NO: 2354832 - RNA, 19 nt, Homo sapiens
  misc_RNA (1)...(19): siRNA sense strand
ugcaaagagagaagaagau

SEQ ID NO: 2354833 - RNA, 19 nt, Homo sapiens
  misc_RNA (1)...(19): siRNA sense strand
gguuagaguuaauuccgau

SEQ ID NO: 2354834 - RNA, 19 nt, Homo sapiens
  misc_RNA (1)...(19): siRNA sense strand
ugagaaaacagguaugauu

SEQ ID NO: 2354835 - RNA, 19 nt, Homo sapiens
  misc_RNA (1)...(19): siRNA sense strand
acaacagcccagaaauaau

SEQ ID NO: 2354836 - RNA, 19 nt, Homo sapiens
  misc_RNA (1)...(19): siRNA sense strand
ccaauaacuacuacaaacu

SEQ ID NO: 2354837 - RNA, 19 nt, Homo sapiens
  misc_RNA (1)...(19): siRNA sense strand
gucaaggauaccaaugaua

SEQ ID NO: 2354838 - RNA, 19 nt, Homo sapiens
  misc_RNA (1)...(19): siRNA sense strand
ugcaagagauacugccaga

SEQ ID NO: 2354839 - RNA, 19 nt, Homo sapiens
  misc_RNA (1)...(19): siRNA sense strand
gggucaaugcugagauaaa

SEQ ID NO: 2354840 - RNA, 19 nt, Homo sapiens
  misc_RNA (1)...(19): siRNA sense strand
ccauggaaguggaagcgaa

SEQ ID NO: 2354841 - RNA, 19 nt, Homo sapiens
  misc_RNA (1)...(19): siRNA sense strand
augcaaagagagaagaaga

SEQ ID NO: 2354842 - RNA, 19 nt, Homo sapiens
  misc_RNA (1)...(19): siRNA sense strand
uggaagcugugguggaaaa

SEQ ID NO: 2354843 - RNA, 19 nt, Homo sapiens
  misc_RNA (1)...(19): siRNA sense strand
cagguguaauauagaaaca

SEQ ID NO: 2354844 - RNA, 19 nt, Homo sapiens
  misc_RNA (1)...(19): siRNA sense strand
auggagaagucagguguaa

SEQ ID NO: 2354845 - RNA, 19 nt, Homo sapiens
  misc_RNA (1)...(19): siRNA sense strand
ucgcagacaacuugcaaga

SEQ ID NO: 2354846 - RNA, 19 nt, Homo sapiens
  misc_RNA (1)...(19): siRNA sense strand
cagacaacuugcaagagau

SEQ ID NO: 2354847 - RNA, 19 nt, Homo sapiens
  misc_RNA (1)...(19): siRNA sense strand
caaagagagaagaagaugu

SEQ ID NO: 2354848 - RNA, 19 nt, Homo sapiens
  misc_RNA (1)...(19): siRNA sense strand
ucgcugacaucaacgacaa

SEQ ID NO: 2354849 - RNA, 19 nt, Homo sapiens
  misc_RNA (1)...(19): siRNA sense strand
cagaauacaaugucaccau

SEQ ID NO: 2354850 - RNA, 19 nt, Homo sapiens
  misc_RNA (1)...(19): siRNA sense strand
ggaucuggauuucggagga

SEQ ID NO: 2354851 - RNA, 19 nt, Homo sapiens
  misc_RNA (1)...(19): siRNA sense strand
ugcaaagagagaagaagau

SEQ ID NO: 2354852 - RNA, 19 nt, Homo sapiens
  misc_RNA (1)...(19): siRNA sense strand
gguuagaguuaauuccgau

SEQ ID NO: 2354853 - RNA, 19 nt, Homo sapiens
  misc_RNA (1)...(19): siRNA sense strand
ugagaaaacagguaugauu

SEQ ID NO: 2354854 - RNA, 19 nt, Homo sapiens
  misc_RNA (1)...(19): siRNA sense strand
acaacagcccagaaauaau

SEQ ID NO: 2354855 - RNA, 19 nt, Homo sapiens
  misc_RNA (1)...(19): siRNA sense strand
ccaauaacuacuacaaacu

SEQ ID NO: 2354856 - RNA, 19 nt, Homo sapiens
  misc_RNA (1)...(19): siRNA sense strand
gucaaggauaccaaugaua

SEQ ID NO: 2354857 - RNA, 19 nt, Homo sapiens
  misc_RNA (1)...(19): siRNA sense strand
ugcaagagauacugccaga

SEQ ID NO: 2354858 - RNA, 19 nt, Homo sapiens
  misc_RNA (1)...(19): siRNA sense strand
ccuaaaauguagugagcaa

SEQ ID NO: 2354859 - RNA, 19 nt, Homo sapiens
  misc_RNA (1)...(19): siRNA sense strand
gggaaaauggggagguuaa

SEQ ID NO: 2354860 - RNA, 19 nt, Homo sapiens
  misc_RNA (1)...(19): siRNA sense strand
gcuuaaacucucugcagaa

SEQ ID NO: 2354861 - RNA, 19 nt, Homo sapiens
  misc_RNA (1)...(19): siRNA sense strand
gguaacagauggaacccua

SEQ ID NO: 2354862 - RNA, 19 nt, Homo sapiens
  misc_RNA (1)...(19): siRNA sense strand
gaucaaaauacaugaccaa

SEQ ID NO: 2354863 - RNA, 19 nt, Homo sapiens
  misc_RNA (1)...(19): siRNA sense strand
cgccaaaauucacgcaaaa

SEQ ID NO: 2354864 - RNA, 19 nt, Homo sapiens
  misc_RNA (1)...(19): siRNA sense strand
cggaacuggcacuggagaa

SEQ ID NO: 2354865 - RNA, 19 nt, Homo sapiens
  misc_RNA (1)...(19): siRNA sense strand
uucaaagagcggagaaauu

SEQ ID NO: 2354866 - RNA, 19 nt, Homo sapiens
  misc_RNA (1)...(19): siRNA sense strand
ugaccaagauucuggggaa

SEQ ID NO: 2354867 - RNA, 19 nt, Homo sapiens
  misc_RNA (1)...(19): siRNA sense strand
cuugaaaugauucuggaaa

SEQ ID NO: 2354868 - RNA, 19 nt, Homo sapiens
  misc_RNA (1)...(19): siRNA sense strand
acgugaauguggagaucga

SEQ ID NO: 2354869 - RNA, 19 nt, Homo sapiens
  misc_RNA (1)...(19): siRNA sense strand
aacccuagaccgagagcaa

SEQ ID NO: 2354870 - RNA, 19 nt, Homo sapiens
  misc_RNA (1)...(19): siRNA sense strand
acuagaaguagcagaagau

SEQ ID NO: 2354871 - RNA, 19 nt, Homo sapiens
  misc_RNA (1)...(19): siRNA sense strand
gguucagcguccaggaguu

SEQ ID NO: 2354872 - RNA, 19 nt, Homo sapiens
  misc_RNA (1)...(19): siRNA sense strand
cugcagaaguauaaacucu

SEQ ID NO: 2354873 - RNA, 19 nt, Homo sapiens
  misc_RNA (1)...(19): siRNA sense strand
cgagacguguacagaguca

SEQ ID NO: 2354874 - RNA, 19 nt, Homo sapiens
  misc_RNA (1)...(19): siRNA sense strand
cggagaaauuaccacucaa

SEQ ID NO: 2354875 - RNA, 19 nt, Homo sapiens
  misc_RNA (1)...(19): siRNA sense strand
gggaggagauaugcgggaa

SEQ ID NO: 2354876 - RNA, 19 nt, Homo sapiens
  misc_RNA (1)...(19): siRNA sense strand
aauucaaagagcggagaaa

SEQ ID NO: 2354877 - RNA, 19 nt, Homo sapiens
  misc_RNA (1)...(19): siRNA sense strand
gcagcaggcuagacaggga

SEQ ID NO: 2354878 - RNA, 19 nt, Homo sapiens
  misc_RNA (1)...(19): siRNA sense strand
ccuuagaccgggaacaaca

SEQ ID NO: 2354879 - RNA, 19 nt, Homo sapiens
  misc_RNA (1)...(19): siRNA sense strand
uggagaucgaggacauuaa

SEQ ID NO: 2354880 - RNA, 19 nt, Homo sapiens
  misc_RNA (1)...(19): siRNA sense strand
agauggaacccuagaccga

SEQ ID NO: 2354881 - RNA, 19 nt, Homo sapiens
  misc_RNA (1)...(19): siRNA sense strand
cauacuuuguggugauuca

SEQ ID NO: 2354882 - RNA, 19 nt, Homo sapiens
  misc_RNA (1)...(19): siRNA sense strand
ggcuagacagggaggagau

SEQ ID NO: 2354883 - RNA, 19 nt, Homo sapiens
  misc_RNA (1)...(19): siRNA sense strand
gaccaagauucuggggaaa

SEQ ID NO: 2354884 - RNA, 19 nt, Homo sapiens
  misc_RNA (1)...(19): siRNA sense strand
ugaccaagguaguggccgu

SEQ ID NO: 2354885 - RNA, 19 nt, Homo sapiens
  misc_RNA (1)...(19): siRNA sense strand
gcugcaaauaagugagucu

SEQ ID NO: 2354886 - RNA, 19 nt, Homo sapiens
  misc_RNA (1)...(19): siRNA sense strand
cugaccaagacgagggcau

SEQ ID NO: 2354887 - RNA, 19 nt, Homo sapiens
  misc_RNA (1)...(19): siRNA sense strand
cacuaauugcuuugaucaa

SEQ ID NO: 2354888 - RNA, 19 nt, Homo sapiens
  misc_RNA (1)...(19): siRNA sense strand
caggaggugcugccggaua

SEQ ID NO: 2354889 - RNA, 19 nt, Homo sapiens
  misc_RNA (1)...(19): siRNA sense strand
cuuuguaauuccagcgagu

SEQ ID NO: 2354890 - RNA, 19 nt, Homo sapiens
  misc_RNA (1)...(19): siRNA sense strand
gcuugugagcagcaggcua

SEQ ID NO: 2354891 - RNA, 19 nt, Homo sapiens
  misc_RNA (1)...(19): siRNA sense strand
cugaaaauccacugaacuu

SEQ ID NO: 2354892 - RNA, 19 nt, Homo sapiens
  misc_RNA (1)...(19): siRNA sense strand
accgggaacaacagaguua

SEQ ID NO: 2354893 - RNA, 19 nt, Homo sapiens
  misc_RNA (1)...(19): siRNA sense strand
gaauucaaagagcggagaa

SEQ ID NO: 2354894 - RNA, 19 nt, Homo sapiens
  misc_RNA (1)...(19): siRNA sense strand
ccuuauuuccacuuuguaa

SEQ ID NO: 2354895 - RNA, 19 nt, Homo sapiens
  misc_RNA (1)...(19): siRNA sense strand
acgccaaaauucacgcaaa

SEQ ID NO: 2354896 - RNA, 19 nt, Homo sapiens
  misc_RNA (1)...(19): siRNA sense strand
agaccaaggaauauucaau

SEQ ID NO: 2354897 - RNA, 19 nt, Homo sapiens
  misc_RNA (1)...(19): siRNA sense strand
ccuaaaauguagugagcaa

SEQ ID NO: 2354898 - RNA, 19 nt, Homo sapiens
  misc_RNA (1)...(19): siRNA sense strand
gggaaaauggggagguuaa

SEQ ID NO: 2354899 - RNA, 19 nt, Homo sapiens
  misc_RNA (1)...(19): siRNA sense strand
gcuuaaacucucugcagaa

SEQ ID NO: 2354900 - RNA, 19 nt, Homo sapiens
  misc_RNA (1)...(19): siRNA sense strand
gguaacagauggaacccua

SEQ ID NO: 2354901 - RNA, 19 nt, Homo sapiens
  misc_RNA (1)...(19): siRNA sense strand
gaucaaaauacaugaccaa

SEQ ID NO: 2354902 - RNA, 19 nt, Homo sapiens
  misc_RNA (1)...(19): siRNA sense strand
cgccaaaauucacgcaaaa

SEQ ID NO: 2354903 - RNA, 19 nt, Homo sapiens
  misc_RNA (1)...(19): siRNA sense strand
cggaacuggcacuggagaa

SEQ ID NO: 2354904 - RNA, 19 nt, Homo sapiens
  misc_RNA (1)...(19): siRNA sense strand
uucaaagagcggagaaauu

SEQ ID NO: 2354905 - RNA, 19 nt, Homo sapiens
  misc_RNA (1)...(19): siRNA sense strand
ugaccaagauucuggggaa

SEQ ID NO: 2354906 - RNA, 19 nt, Homo sapiens
  misc_RNA (1)...(19): siRNA sense strand
cuugaaaugauucuggaaa

SEQ ID NO: 2354907 - RNA, 19 nt, Homo sapiens
  misc_RNA (1)...(19): siRNA sense strand
acgugaauguggagaucga

SEQ ID NO: 2354908 - RNA, 19 nt, Homo sapiens
  misc_RNA (1)...(19): siRNA sense strand
aacccuagaccgagagcaa

SEQ ID NO: 2354909 - RNA, 19 nt, Homo sapiens
  misc_RNA (1)...(19): siRNA sense strand
acuagaaguagcagaagau

SEQ ID NO: 2354910 - RNA, 19 nt, Homo sapiens
  misc_RNA (1)...(19): siRNA sense strand
gguucagcguccaggaguu

SEQ ID NO: 2354911 - RNA, 19 nt, Homo sapiens
  misc_RNA (1)...(19): siRNA sense strand
cugcagaaguauaaacucu

SEQ ID NO: 2354912 - RNA, 19 nt, Homo sapiens
  misc_RNA (1)...(19): siRNA sense strand
cgagacguguacagaguca

SEQ ID NO: 2354913 - RNA, 19 nt, Homo sapiens
  misc_RNA (1)...(19): siRNA sense strand
cggagaaauuaccacucaa

SEQ ID NO: 2354914 - RNA, 19 nt, Homo sapiens
  misc_RNA (1)...(19): siRNA sense strand
gggaggagauaugcgggaa

SEQ ID NO: 2354915 - RNA, 19 nt, Homo sapiens
  misc_RNA (1)...(19): siRNA sense strand
aauucaaagagcggagaaa

SEQ ID NO: 2354916 - RNA, 19 nt, Homo sapiens
  misc_RNA (1)...(19): siRNA sense strand
gcagcaggcuagacaggga

SEQ ID NO: 2354917 - RNA, 19 nt, Homo sapiens
  misc_RNA (1)...(19): siRNA sense strand
ccuuagaccgggaacaaca

SEQ ID NO: 2354918 - RNA, 19 nt, Homo sapiens
  misc_RNA (1)...(19): siRNA sense strand
uggagaucgaggacauuaa

SEQ ID NO: 2354919 - RNA, 19 nt, Homo sapiens
  misc_RNA (1)...(19): siRNA sense strand
agauggaacccuagaccga

SEQ ID NO: 2354920 - RNA, 19 nt, Homo sapiens
  misc_RNA (1)...(19): siRNA sense strand
cauacuuuguggugauuca

SEQ ID NO: 2354921 - RNA, 19 nt, Homo sapiens
  misc_RNA (1)...(19): siRNA sense strand
ggcuagacagggaggagau

SEQ ID NO: 2354922 - RNA, 19 nt, Homo sapiens
  misc_RNA (1)...(19): siRNA sense strand
gaccaagauucuggggaaa

SEQ ID NO: 2354923 - RNA, 19 nt, Homo sapiens
  misc_RNA (1)...(19): siRNA sense strand
ugaccaagguaguggccgu

SEQ ID NO: 2354924 - RNA, 19 nt, Homo sapiens
  misc_RNA (1)...(19): siRNA sense strand
gcugcaaauaagugagucu

SEQ ID NO: 2354925 - RNA, 19 nt, Homo sapiens
  misc_RNA (1)...(19): siRNA sense strand
cugaccaagacgagggcau

SEQ ID NO: 2354926 - RNA, 19 nt, Homo sapiens
  misc_RNA (1)...(19): siRNA sense strand
cacuaauugcuuugaucaa

SEQ ID NO: 2354927 - RNA, 19 nt, Homo sapiens
  misc_RNA (1)...(19): siRNA sense strand
caggaggugcugccggaua

SEQ ID NO: 2354928 - RNA, 19 nt, Homo sapiens
  misc_RNA (1)...(19): siRNA sense strand
cuuuguaauuccagcgagu

SEQ ID NO: 2354929 - RNA, 19 nt, Homo sapiens
  misc_RNA (1)...(19): siRNA sense strand
gcuugugagcagcaggcua

SEQ ID NO: 2354930 - RNA, 19 nt, Homo sapiens
  misc_RNA (1)...(19): siRNA sense strand
cugaaaauccacugaacuu

SEQ ID NO: 2354931 - RNA, 19 nt, Homo sapiens
  misc_RNA (1)...(19): siRNA sense strand
accgggaacaacagaguua

SEQ ID NO: 2354932 - RNA, 19 nt, Homo sapiens
  misc_RNA (1)...(19): siRNA sense strand
gaauucaaagagcggagaa

SEQ ID NO: 2354933 - RNA, 19 nt, Homo sapiens
  misc_RNA (1)...(19): siRNA sense strand
ccuuauuuccacuuuguaa

SEQ ID NO: 2354934 - RNA, 19 nt, Homo sapiens
  misc_RNA (1)...(19): siRNA sense strand
acgccaaaauucacgcaaa

SEQ ID NO: 2354935 - RNA, 19 nt, Homo sapiens
  misc_RNA (1)...(19): siRNA sense strand
agaccaaggaauauucaau

SEQ ID NO: 2354936 - RNA, 19 nt, Homo sapiens
  misc_RNA (1)...(19): siRNA sense strand
ggaacuuacuugugagcga

SEQ ID NO: 2354937 - RNA, 19 nt, Homo sapiens
  misc_RNA (1)...(19): siRNA sense strand
ggucaauguugcagagaac

SEQ ID NO: 2354938 - RNA, 19 nt, Homo sapiens
  misc_RNA (1)...(19): siRNA sense strand
ggguuauugcagagaagaa

SEQ ID NO: 2354939 - RNA, 19 nt, Homo sapiens
  misc_RNA (1)...(19): siRNA sense strand
guauagaccgagaggagau

SEQ ID NO: 2354940 - RNA, 19 nt, Homo sapiens
  misc_RNA (1)...(19): siRNA sense strand
aguaaugacaauccagaaa

SEQ ID NO: 2354941 - RNA, 19 nt, Homo sapiens
  misc_RNA (1)...(19): siRNA sense strand
agcaaaggaugguggacau

SEQ ID NO: 2354942 - RNA, 19 nt, Homo sapiens
  misc_RNA (1)...(19): siRNA sense strand
caguagguacccagagcua

SEQ ID NO: 2354943 - RNA, 19 nt, Homo sapiens
  misc_RNA (1)...(19): siRNA sense strand
gacuuugaagagagagaua

SEQ ID NO: 2354944 - RNA, 19 nt, Homo sapiens
  misc_RNA (1)...(19): siRNA sense strand
gguuauugcagagaagaaa

SEQ ID NO: 2354945 - RNA, 19 nt, Homo sapiens
  misc_RNA (1)...(19): siRNA sense strand
uugaagagagagauagcua

SEQ ID NO: 2354946 - RNA, 19 nt, Homo sapiens
  misc_RNA (1)...(19): siRNA sense strand
ccguauagaccgagaggag

SEQ ID NO: 2354947 - RNA, 19 nt, Homo sapiens
  misc_RNA (1)...(19): siRNA sense strand
caggacauguacaggguca

SEQ ID NO: 2354948 - RNA, 19 nt, Homo sapiens
  misc_RNA (1)...(19): siRNA sense strand
agauagcuugcaagagaua

SEQ ID NO: 2354949 - RNA, 19 nt, Homo sapiens
  misc_RNA (1)...(19): siRNA sense strand
gguaauugucgcagaugca

SEQ ID NO: 2354950 - RNA, 19 nt, Homo sapiens
  misc_RNA (1)...(19): siRNA sense strand
caauugggguggaagcaaa

SEQ ID NO: 2354951 - RNA, 19 nt, Homo sapiens
  misc_RNA (1)...(19): siRNA sense strand
ccaacauauacaagaagau

SEQ ID NO: 2354952 - RNA, 19 nt, Homo sapiens
  misc_RNA (1)...(19): siRNA sense strand
uugaaaugguugcugaaaa

SEQ ID NO: 2354953 - RNA, 19 nt, Homo sapiens
  misc_RNA (1)...(19): siRNA sense strand
gguuugaaaguaaugacaa

SEQ ID NO: 2354954 - RNA, 19 nt, Homo sapiens
  misc_RNA (1)...(19): siRNA sense strand
uggagaaauccuaugccaa

SEQ ID NO: 2354955 - RNA, 19 nt, Homo sapiens
  misc_RNA (1)...(19): siRNA sense strand
gagaggagauuuguggcaa

SEQ ID NO: 2354956 - RNA, 19 nt, Homo sapiens
  misc_RNA (1)...(19): siRNA sense strand
ccgaaaucaucuaugccuu

SEQ ID NO: 2354957 - RNA, 19 nt, Homo sapiens
  misc_RNA (1)...(19): siRNA sense strand
acucaccacuauuggagaa

SEQ ID NO: 2354958 - RNA, 19 nt, Homo sapiens
  misc_RNA (1)...(19): siRNA sense strand
uggacuuugaagagagaga

SEQ ID NO: 2354959 - RNA, 19 nt, Homo sapiens
  misc_RNA (1)...(19): siRNA sense strand
ugcauguagcugagaacaa

SEQ ID NO: 2354960 - RNA, 19 nt, Homo sapiens
  misc_RNA (1)...(19): siRNA sense strand
uuggcaaggaagugagaca

SEQ ID NO: 2354961 - RNA, 19 nt, Homo sapiens
  misc_RNA (1)...(19): siRNA sense strand
uauuaaaagugauggccau

SEQ ID NO: 2354962 - RNA, 19 nt, Homo sapiens
  misc_RNA (1)...(19): siRNA sense strand
gagaacuggacuuugaaga

SEQ ID NO: 2354963 - RNA, 19 nt, Homo sapiens
  misc_RNA (1)...(19): siRNA sense strand
aagcaaaggaugguggaca

SEQ ID NO: 2354964 - RNA, 19 nt, Homo sapiens
  misc_RNA (1)...(19): siRNA sense strand
acaagaagaugcugagcug

SEQ ID NO: 2354965 - RNA, 19 nt, Homo sapiens
  misc_RNA (1)...(19): siRNA sense strand
uugacauggaugagggcau

SEQ ID NO: 2354966 - RNA, 19 nt, Homo sapiens
  misc_RNA (1)...(19): siRNA sense strand
ggagaaauccuaugccaac

SEQ ID NO: 2354967 - RNA, 19 nt, Homo sapiens
  misc_RNA (1)...(19): siRNA sense strand
ccacauuugcccuggaauc

SEQ ID NO: 2354968 - RNA, 19 nt, Homo sapiens
  misc_RNA (1)...(19): siRNA sense strand
cuuugauucagaaggagaa

SEQ ID NO: 2354969 - RNA, 19 nt, Homo sapiens
  misc_RNA (1)...(19): siRNA sense strand
ggaacuuacuugugagcga

SEQ ID NO: 2354970 - RNA, 19 nt, Homo sapiens
  misc_RNA (1)...(19): siRNA sense strand
ggucaauguugcagagaac

SEQ ID NO: 2354971 - RNA, 19 nt, Homo sapiens
  misc_RNA (1)...(19): siRNA sense strand
ggguuauugcagagaagaa

SEQ ID NO: 2354972 - RNA, 19 nt, Homo sapiens
  misc_RNA (1)...(19): siRNA sense strand
guauagaccgagaggagau

SEQ ID NO: 2354973 - RNA, 19 nt, Homo sapiens
  misc_RNA (1)...(19): siRNA sense strand
aguaaugacaauccagaaa

SEQ ID NO: 2354974 - RNA, 19 nt, Homo sapiens
  misc_RNA (1)...(19): siRNA sense strand
agcaaaggaugguggacau

SEQ ID NO: 2354975 - RNA, 19 nt, Homo sapiens
  misc_RNA (1)...(19): siRNA sense strand
caguagguacccagagcua

SEQ ID NO: 2354976 - RNA, 19 nt, Homo sapiens
  misc_RNA (1)...(19): siRNA sense strand
gacuuugaagagagagaua

SEQ ID NO: 2354977 - RNA, 19 nt, Homo sapiens
  misc_RNA (1)...(19): siRNA sense strand
gguuauugcagagaagaaa

SEQ ID NO: 2354978 - RNA, 19 nt, Homo sapiens
  misc_RNA (1)...(19): siRNA sense strand
uugaagagagagauagcua

SEQ ID NO: 2354979 - RNA, 19 nt, Homo sapiens
  misc_RNA (1)...(19): siRNA sense strand
ccguauagaccgagaggag

SEQ ID NO: 2354980 - RNA, 19 nt, Homo sapiens
  misc_RNA (1)...(19): siRNA sense strand
caggacauguacaggguca

SEQ ID NO: 2354981 - RNA, 19 nt, Homo sapiens
  misc_RNA (1)...(19): siRNA sense strand
agauagcuugcaagagaua

SEQ ID NO: 2354982 - RNA, 19 nt, Homo sapiens
  misc_RNA (1)...(19): siRNA sense strand
gguaauugucgcagaugca

SEQ ID NO: 2354983 - RNA, 19 nt, Homo sapiens
  misc_RNA (1)...(19): siRNA sense strand
caauugggguggaagcaaa

SEQ ID NO: 2354984 - RNA, 19 nt, Homo sapiens
  misc_RNA (1)...(19): siRNA sense strand
ccaacauauacaagaagau

SEQ ID NO: 2354985 - RNA, 19 nt, Homo sapiens
  misc_RNA (1)...(19): siRNA sense strand
uugaaaugguugcugaaaa

SEQ ID NO: 2354986 - RNA, 19 nt, Homo sapiens
  misc_RNA (1)...(19): siRNA sense strand
gguuugaaaguaaugacaa

SEQ ID NO: 2354987 - RNA, 19 nt, Homo sapiens
  misc_RNA (1)...(19): siRNA sense strand
uggagaaauccuaugccaa

SEQ ID NO: 2354988 - RNA, 19 nt, Homo sapiens
  misc_RNA (1)...(19): siRNA sense strand
gagaggagauuuguggcaa

SEQ ID NO: 2354989 - RNA, 19 nt, Homo sapiens
  misc_RNA (1)...(19): siRNA sense strand
ccgaaaucaucuaugccuu

SEQ ID NO: 2354990 - RNA, 19 nt, Homo sapiens
  misc_RNA (1)...(19): siRNA sense strand
acucaccacuauuggagaa

SEQ ID NO: 2354991 - RNA, 19 nt, Homo sapiens
  misc_RNA (1)...(19): siRNA sense strand
uggacuuugaagagagaga

SEQ ID NO: 2354992 - RNA, 19 nt, Homo sapiens
  misc_RNA (1)...(19): siRNA sense strand
ugcauguagcugagaacaa

SEQ ID NO: 2354993 - RNA, 19 nt, Homo sapiens
  misc_RNA (1)...(19): siRNA sense strand
uuggcaaggaagugagaca

SEQ ID NO: 2354994 - RNA, 19 nt, Homo sapiens
  misc_RNA (1)...(19): siRNA sense strand
uauuaaaagugauggccau

SEQ ID NO: 2354995 - RNA, 19 nt, Homo sapiens
  misc_RNA (1)...(19): siRNA sense strand
gagaacuggacuuugaaga

SEQ ID NO: 2354996 - RNA, 19 nt, Homo sapiens
  misc_RNA (1)...(19): siRNA sense strand
aagcaaaggaugguggaca

SEQ ID NO: 2354997 - RNA, 19 nt, Homo sapiens
  misc_RNA (1)...(19): siRNA sense strand
acaagaagaugcugagcug

SEQ ID NO: 2354998 - RNA, 19 nt, Homo sapiens
  misc_RNA (1)...(19): siRNA sense strand
uugacauggaugagggcau

SEQ ID NO: 2354999 - RNA, 19 nt, Homo sapiens
  misc_RNA (1)...(19): siRNA sense strand
ggagaaauccuaugccaac

SEQ ID NO: 2355000 - RNA, 19 nt, Homo sapiens
  misc_RNA (1)...(19): siRNA sense strand
ccacauuugcccuggaauc

SEQ ID NO: 2355001 - RNA, 19 nt, Homo sapiens
  misc_RNA (1)...(19): siRNA sense strand
cuuugauucagaaggagaa

SEQ ID NO: 2355002 - RNA, 19 nt, Homo sapiens
  misc_RNA (1)...(19): siRNA sense strand
auuacaaacuagugacaga

SEQ ID NO: 2355003 - RNA, 19 nt, Homo sapiens
  misc_RNA (1)...(19): siRNA sense strand
cagccaagacagaguucaa

SEQ ID NO: 2355004 - RNA, 19 nt, Homo sapiens
  misc_RNA (1)...(19): siRNA sense strand
cagugaucgccuugauaaa

SEQ ID NO: 2355005 - RNA, 19 nt, Homo sapiens
  misc_RNA (1)...(19): siRNA sense strand
aggcauaaacgcagagauc

SEQ ID NO: 2355006 - RNA, 19 nt, Homo sapiens
  misc_RNA (1)...(19): siRNA sense strand
gcauaaacgcagagaucac

SEQ ID NO: 2355007 - RNA, 19 nt, Homo sapiens
  misc_RNA (1)...(19): siRNA sense strand
uggacgaacaagugaaaca

SEQ ID NO: 2355008 - RNA, 19 nt, Homo sapiens
  misc_RNA (1)...(19): siRNA sense strand
ugacaaugccucuugggaa

SEQ ID NO: 2355009 - RNA, 19 nt, Homo sapiens
  misc_RNA (1)...(19): siRNA sense strand
uggagaaaauggagaaguu

SEQ ID NO: 2355010 - RNA, 19 nt, Homo sapiens
  misc_RNA (1)...(19): siRNA sense strand
ggguuagcgcggagaagga

SEQ ID NO: 2355011 - RNA, 19 nt, Homo sapiens
  misc_RNA (1)...(19): siRNA sense strand
gugacagaauagaccgaga

SEQ ID NO: 2355012 - RNA, 19 nt, Homo sapiens
  misc_RNA (1)...(19): siRNA sense strand
ggaugaaggcauaaacgca

SEQ ID NO: 2355013 - RNA, 19 nt, Homo sapiens
  misc_RNA (1)...(19): siRNA sense strand
ucauaauguggacgaacaa

SEQ ID NO: 2355014 - RNA, 19 nt, Homo sapiens
  misc_RNA (1)...(19): siRNA sense strand
ugggaaaugccaaguuuau

SEQ ID NO: 2355015 - RNA, 19 nt, Homo sapiens
  misc_RNA (1)...(19): siRNA sense strand
acuugugagugacagaaua

SEQ ID NO: 2355016 - RNA, 19 nt, Homo sapiens
  misc_RNA (1)...(19): siRNA sense strand
ccaauuacagugaggguac

SEQ ID NO: 2355017 - RNA, 19 nt, Homo sapiens
  misc_RNA (1)...(19): siRNA sense strand
gagaacagauaugcgggaa

SEQ ID NO: 2355018 - RNA, 19 nt, Homo sapiens
  misc_RNA (1)...(19): siRNA sense strand
caguauccaaguugaaauu

SEQ ID NO: 2355019 - RNA, 19 nt, Homo sapiens
  misc_RNA (1)...(19): siRNA sense strand
gacaaugccucuugggaac

SEQ ID NO: 2355020 - RNA, 19 nt, Homo sapiens
  misc_RNA (1)...(19): siRNA sense strand
ccucaaugacaaugcgcca

SEQ ID NO: 2355021 - RNA, 19 nt, Homo sapiens
  misc_RNA (1)...(19): siRNA sense strand
ggacacaacgcuuggcugu

SEQ ID NO: 2355022 - RNA, 19 nt, Homo sapiens
  misc_RNA (1)...(19): siRNA sense strand
cgcuauucaaacagacuaa

SEQ ID NO: 2355023 - RNA, 19 nt, Homo sapiens
  misc_RNA (1)...(19): siRNA sense strand
aaaacucggucguaggaaa

SEQ ID NO: 2355024 - RNA, 19 nt, Homo sapiens
  misc_RNA (1)...(19): siRNA sense strand
cugcaguauccaaguugaa

SEQ ID NO: 2355025 - RNA, 19 nt, Homo sapiens
  misc_RNA (1)...(19): siRNA sense strand
uagcaguaauugugcagga

SEQ ID NO: 2355026 - RNA, 19 nt, Homo sapiens
  misc_RNA (1)...(19): siRNA sense strand
gcaguauccaaguugaaau

SEQ ID NO: 2355027 - RNA, 19 nt, Homo sapiens
  misc_RNA (1)...(19): siRNA sense strand
gcaccuaaucuucgcggau

SEQ ID NO: 2355028 - RNA, 19 nt, Homo sapiens
  misc_RNA (1)...(19): siRNA sense strand
agcaaaagauccuggagau

SEQ ID NO: 2355029 - RNA, 19 nt, Homo sapiens
  misc_RNA (1)...(19): siRNA sense strand
uggagaaguuuacugccaa

SEQ ID NO: 2355030 - RNA, 19 nt, Homo sapiens
  misc_RNA (1)...(19): siRNA sense strand
aggagaucccagaauacaa

SEQ ID NO: 2355031 - RNA, 19 nt, Homo sapiens
  misc_RNA (1)...(19): siRNA sense strand
cgauugugcaccugaaguu

SEQ ID NO: 2355032 - RNA, 19 nt, Homo sapiens
  misc_RNA (1)...(19): siRNA sense strand
auuacaaacuagugacaga

SEQ ID NO: 2355033 - RNA, 19 nt, Homo sapiens
  misc_RNA (1)...(19): siRNA sense strand
cagccaagacagaguucaa

SEQ ID NO: 2355034 - RNA, 19 nt, Homo sapiens
  misc_RNA (1)...(19): siRNA sense strand
cagugaucgccuugauaaa

SEQ ID NO: 2355035 - RNA, 19 nt, Homo sapiens
  misc_RNA (1)...(19): siRNA sense strand
aggcauaaacgcagagauc

SEQ ID NO: 2355036 - RNA, 19 nt, Homo sapiens
  misc_RNA (1)...(19): siRNA sense strand
gcauaaacgcagagaucac

SEQ ID NO: 2355037 - RNA, 19 nt, Homo sapiens
  misc_RNA (1)...(19): siRNA sense strand
uggacgaacaagugaaaca

SEQ ID NO: 2355038 - RNA, 19 nt, Homo sapiens
  misc_RNA (1)...(19): siRNA sense strand
ugacaaugccucuugggaa

SEQ ID NO: 2355039 - RNA, 19 nt, Homo sapiens
  misc_RNA (1)...(19): siRNA sense strand
uggagaaaauggagaaguu

SEQ ID NO: 2355040 - RNA, 19 nt, Homo sapiens
  misc_RNA (1)...(19): siRNA sense strand
ggguuagcgcggagaagga

SEQ ID NO: 2355041 - RNA, 19 nt, Homo sapiens
  misc_RNA (1)...(19): siRNA sense strand
gugacagaauagaccgaga

SEQ ID NO: 2355042 - RNA, 19 nt, Homo sapiens
  misc_RNA (1)...(19): siRNA sense strand
ggaugaaggcauaaacgca

SEQ ID NO: 2355043 - RNA, 19 nt, Homo sapiens
  misc_RNA (1)...(19): siRNA sense strand
ucauaauguggacgaacaa

SEQ ID NO: 2355044 - RNA, 19 nt, Homo sapiens
  misc_RNA (1)...(19): siRNA sense strand
ugggaaaugccaaguuuau

SEQ ID NO: 2355045 - RNA, 19 nt, Homo sapiens
  misc_RNA (1)...(19): siRNA sense strand
acuugugagugacagaaua

SEQ ID NO: 2355046 - RNA, 19 nt, Homo sapiens
  misc_RNA (1)...(19): siRNA sense strand
ccaauuacagugaggguac

SEQ ID NO: 2355047 - RNA, 19 nt, Homo sapiens
  misc_RNA (1)...(19): siRNA sense strand
gagaacagauaugcgggaa

SEQ ID NO: 2355048 - RNA, 19 nt, Homo sapiens
  misc_RNA (1)...(19): siRNA sense strand
caguauccaaguugaaauu

SEQ ID NO: 2355049 - RNA, 19 nt, Homo sapiens
  misc_RNA (1)...(19): siRNA sense strand
gacaaugccucuugggaac

SEQ ID NO: 2355050 - RNA, 19 nt, Homo sapiens
  misc_RNA (1)...(19): siRNA sense strand
ccucaaugacaaugcgcca

SEQ ID NO: 2355051 - RNA, 19 nt, Homo sapiens
  misc_RNA (1)...(19): siRNA sense strand
ggacacaacgcuuggcugu

SEQ ID NO: 2355052 - RNA, 19 nt, Homo sapiens
  misc_RNA (1)...(19): siRNA sense strand
cgcuauucaaacagacuaa

SEQ ID NO: 2355053 - RNA, 19 nt, Homo sapiens
  misc_RNA (1)...(19): siRNA sense strand
aaaacucggucguaggaaa

SEQ ID NO: 2355054 - RNA, 19 nt, Homo sapiens
  misc_RNA (1)...(19): siRNA sense strand
cugcaguauccaaguugaa

SEQ ID NO: 2355055 - RNA, 19 nt, Homo sapiens
  misc_RNA (1)...(19): siRNA sense strand
uagcaguaauugugcagga

SEQ ID NO: 2355056 - RNA, 19 nt, Homo sapiens
  misc_RNA (1)...(19): siRNA sense strand
gcaguauccaaguugaaau

SEQ ID NO: 2355057 - RNA, 19 nt, Homo sapiens
  misc_RNA (1)...(19): siRNA sense strand
gcaccuaaucuucgcggau

SEQ ID NO: 2355058 - RNA, 19 nt, Homo sapiens
  misc_RNA (1)...(19): siRNA sense strand
agcaaaagauccuggagau

SEQ ID NO: 2355059 - RNA, 19 nt, Homo sapiens
  misc_RNA (1)...(19): siRNA sense strand
uggagaaguuuacugccaa

SEQ ID NO: 2355060 - RNA, 19 nt, Homo sapiens
  misc_RNA (1)...(19): siRNA sense strand
aggagaucccagaauacaa

SEQ ID NO: 2355061 - RNA, 19 nt, Homo sapiens
  misc_RNA (1)...(19): siRNA sense strand
cgauugugcaccugaaguu

SEQ ID NO: 2355062 - RNA, 19 nt, Homo sapiens
  misc_RNA (1)...(19): siRNA sense strand
agacaaggauucugggcaa

SEQ ID NO: 2355063 - RNA, 19 nt, Homo sapiens
  misc_RNA (1)...(19): siRNA sense strand
ggguuagugcagaggauua

SEQ ID NO: 2355064 - RNA, 19 nt, Homo sapiens
  misc_RNA (1)...(19): siRNA sense strand
cgguauuacugcuggaaaa

SEQ ID NO: 2355065 - RNA, 19 nt, Homo sapiens
  misc_RNA (1)...(19): siRNA sense strand
cgagagaagauuugcggaa

SEQ ID NO: 2355066 - RNA, 19 nt, Homo sapiens
  misc_RNA (1)...(19): siRNA sense strand
ggugauugcuggagcccua

SEQ ID NO: 2355067 - RNA, 19 nt, Homo sapiens
  misc_RNA (1)...(19): siRNA sense strand
augcagauguggaaggcaa

SEQ ID NO: 2355068 - RNA, 19 nt, Homo sapiens
  misc_RNA (1)...(19): siRNA sense strand
agcuaaggauggaggagua

SEQ ID NO: 2355069 - RNA, 19 nt, Homo sapiens
  misc_RNA (1)...(19): siRNA sense strand
cuguaauagcccucauaaa

SEQ ID NO: 2355070 - RNA, 19 nt, Homo sapiens
  misc_RNA (1)...(19): siRNA sense strand
caguaaugaagaucacaaa

SEQ ID NO: 2355071 - RNA, 19 nt, Homo sapiens
  misc_RNA (1)...(19): siRNA sense strand
uguuuagccaggagguaua

SEQ ID NO: 2355072 - RNA, 19 nt, Homo sapiens
  misc_RNA (1)...(19): siRNA sense strand
ggguuagccuccaagaaaa

SEQ ID NO: 2355073 - RNA, 19 nt, Homo sapiens
  misc_RNA (1)...(19): siRNA sense strand
cggaaggaaacuugagugu

SEQ ID NO: 2355074 - RNA, 19 nt, Homo sapiens
  misc_RNA (1)...(19): siRNA sense strand
ccgaaaugaugaaaaguca

SEQ ID NO: 2355075 - RNA, 19 nt, Homo sapiens
  misc_RNA (1)...(19): siRNA sense strand
agaccuuggaacuguaaua

SEQ ID NO: 2355076 - RNA, 19 nt, Homo sapiens
  misc_RNA (1)...(19): siRNA sense strand
gcggguuagugcagaggau

SEQ ID NO: 2355077 - RNA, 19 nt, Homo sapiens
  misc_RNA (1)...(19): siRNA sense strand
ugcaaaaggcauugacuua

SEQ ID NO: 2355078 - RNA, 19 nt, Homo sapiens
  misc_RNA (1)...(19): siRNA sense strand
acucgaaaacugcggguua

SEQ ID NO: 2355079 - RNA, 19 nt, Homo sapiens
  misc_RNA (1)...(19): siRNA sense strand
cagaccaggaugagggcau

SEQ ID NO: 2355080 - RNA, 19 nt, Homo sapiens
  misc_RNA (1)...(19): siRNA sense strand
uguugaguguggaagcuaa

SEQ ID NO: 2355081 - RNA, 19 nt, Homo sapiens
  misc_RNA (1)...(19): siRNA sense strand
caucacaaccaauggcaca

SEQ ID NO: 2355082 - RNA, 19 nt, Homo sapiens
  misc_RNA (1)...(19): siRNA sense strand
ccaguaaugaagaucacaa

SEQ ID NO: 2355083 - RNA, 19 nt, Homo sapiens
  misc_RNA (1)...(19): siRNA sense strand
gggcaaaauggcaugguga

SEQ ID NO: 2355084 - RNA, 19 nt, Homo sapiens
  misc_RNA (1)...(19): siRNA sense strand
ccucaaugacaaugcgcca

SEQ ID NO: 2355085 - RNA, 19 nt, Homo sapiens
  misc_RNA (1)...(19): siRNA sense strand
ggacacaacgcuuggcugu

SEQ ID NO: 2355086 - RNA, 19 nt, Homo sapiens
  misc_RNA (1)...(19): siRNA sense strand
gguaggauagaucgagaga

SEQ ID NO: 2355087 - RNA, 19 nt, Homo sapiens
  misc_RNA (1)...(19): siRNA sense strand
ucgaaacggucgcugaaaa

SEQ ID NO: 2355088 - RNA, 19 nt, Homo sapiens
  misc_RNA (1)...(19): siRNA sense strand
gcacauuggauuuugaaga

SEQ ID NO: 2355089 - RNA, 19 nt, Homo sapiens
  misc_RNA (1)...(19): siRNA sense strand
gaaggaaacuugagugugc

SEQ ID NO: 2355090 - RNA, 19 nt, Homo sapiens
  misc_RNA (1)...(19): siRNA sense strand
ggauucagaccuuggaacu

SEQ ID NO: 2355091 - RNA, 19 nt, Homo sapiens
  misc_RNA (1)...(19): siRNA sense strand
gcaccuaaucuucgcggau

SEQ ID NO: 2355092 - RNA, 19 nt, Homo sapiens
  misc_RNA (1)...(19): siRNA sense strand
ucucugucaacgaaggaaa

SEQ ID NO: 2355093 - RNA, 19 nt, Homo sapiens
  misc_RNA (1)...(19): siRNA sense strand
gagccagagaagccgaaau

SEQ ID NO: 2355094 - RNA, 19 nt, Homo sapiens
  misc_RNA (1)...(19): siRNA sense strand
aaauuguugacgagaauga

SEQ ID NO: 2355095 - RNA, 19 nt, Homo sapiens
  misc_RNA (1)...(19): siRNA sense strand
agacaaggauucugggcaa

SEQ ID NO: 2355096 - RNA, 19 nt, Homo sapiens
  misc_RNA (1)...(19): siRNA sense strand
ggguuagugcagaggauua

SEQ ID NO: 2355097 - RNA, 19 nt, Homo sapiens
  misc_RNA (1)...(19): siRNA sense strand
cgguauuacugcuggaaaa

SEQ ID NO: 2355098 - RNA, 19 nt, Homo sapiens
  misc_RNA (1)...(19): siRNA sense strand
cgagagaagauuugcggaa

SEQ ID NO: 2355099 - RNA, 19 nt, Homo sapiens
  misc_RNA (1)...(19): siRNA sense strand
ggugauugcuggagcccua

SEQ ID NO: 2355100 - RNA, 19 nt, Homo sapiens
  misc_RNA (1)...(19): siRNA sense strand
augcagauguggaaggcaa

SEQ ID NO: 2355101 - RNA, 19 nt, Homo sapiens
  misc_RNA (1)...(19): siRNA sense strand
agcuaaggauggaggagua

SEQ ID NO: 2355102 - RNA, 19 nt, Homo sapiens
  misc_RNA (1)...(19): siRNA sense strand
cuguaauagcccucauaaa

SEQ ID NO: 2355103 - RNA, 19 nt, Homo sapiens
  misc_RNA (1)...(19): siRNA sense strand
caguaaugaagaucacaaa

SEQ ID NO: 2355104 - RNA, 19 nt, Homo sapiens
  misc_RNA (1)...(19): siRNA sense strand
uguuuagccaggagguaua

SEQ ID NO: 2355105 - RNA, 19 nt, Homo sapiens
  misc_RNA (1)...(19): siRNA sense strand
ggguuagccuccaagaaaa

SEQ ID NO: 2355106 - RNA, 19 nt, Homo sapiens
  misc_RNA (1)...(19): siRNA sense strand
cggaaggaaacuugagugu

SEQ ID NO: 2355107 - RNA, 19 nt, Homo sapiens
  misc_RNA (1)...(19): siRNA sense strand
ccgaaaugaugaaaaguca

SEQ ID NO: 2355108 - RNA, 19 nt, Homo sapiens
  misc_RNA (1)...(19): siRNA sense strand
agaccuuggaacuguaaua

SEQ ID NO: 2355109 - RNA, 19 nt, Homo sapiens
  misc_RNA (1)...(19): siRNA sense strand
gcggguuagugcagaggau

SEQ ID NO: 2355110 - RNA, 19 nt, Homo sapiens
  misc_RNA (1)...(19): siRNA sense strand
ugcaaaaggcauugacuua

SEQ ID NO: 2355111 - RNA, 19 nt, Homo sapiens
  misc_RNA (1)...(19): siRNA sense strand
acucgaaaacugcggguua

SEQ ID NO: 2355112 - RNA, 19 nt, Homo sapiens
  misc_RNA (1)...(19): siRNA sense strand
cagaccaggaugagggcau

SEQ ID NO: 2355113 - RNA, 19 nt, Homo sapiens
  misc_RNA (1)...(19): siRNA sense strand
uguugaguguggaagcuaa

SEQ ID NO: 2355114 - RNA, 19 nt, Homo sapiens
  misc_RNA (1)...(19): siRNA sense strand
caucacaaccaauggcaca

SEQ ID NO: 2355115 - RNA, 19 nt, Homo sapiens
  misc_RNA (1)...(19): siRNA sense strand
ccaguaaugaagaucacaa

SEQ ID NO: 2355116 - RNA, 19 nt, Homo sapiens
  misc_RNA (1)...(19): siRNA sense strand
gggcaaaauggcaugguga

SEQ ID NO: 2355117 - RNA, 19 nt, Homo sapiens
  misc_RNA (1)...(19): siRNA sense strand
ccucaaugacaaugcgcca

SEQ ID NO: 2355118 - RNA, 19 nt, Homo sapiens
  misc_RNA (1)...(19): siRNA sense strand
ggacacaacgcuuggcugu

SEQ ID NO: 2355119 - RNA, 19 nt, Homo sapiens
  misc_RNA (1)...(19): siRNA sense strand
gguaggauagaucgagaga

SEQ ID NO: 2355120 - RNA, 19 nt, Homo sapiens
  misc_RNA (1)...(19): siRNA sense strand
ucgaaacggucgcugaaaa

SEQ ID NO: 2355121 - RNA, 19 nt, Homo sapiens
  misc_RNA (1)...(19): siRNA sense strand
gcacauuggauuuugaaga

SEQ ID NO: 2355122 - RNA, 19 nt, Homo sapiens
  misc_RNA (1)...(19): siRNA sense strand
gaaggaaacuugagugugc

SEQ ID NO: 2355123 - RNA, 19 nt, Homo sapiens
  misc_RNA (1)...(19): siRNA sense strand
ggauucagaccuuggaacu

SEQ ID NO: 2355124 - RNA, 19 nt, Homo sapiens
  misc_RNA (1)...(19): siRNA sense strand
gcaccuaaucuucgcggau

SEQ ID NO: 2355125 - RNA, 19 nt, Homo sapiens
  misc_RNA (1)...(19): siRNA sense strand
ucucugucaacgaaggaaa

SEQ ID NO: 2355126 - RNA, 19 nt, Homo sapiens
  misc_RNA (1)...(19): siRNA sense strand
gagccagagaagccgaaau

SEQ ID NO: 2355127 - RNA, 19 nt, Homo sapiens
  misc_RNA (1)...(19): siRNA sense strand
aaauuguugacgagaauga

SEQ ID NO: 2355128 - RNA, 19 nt, Homo sapiens
  misc_RNA (1)...(19): siRNA sense strand
aagccuggaccgagagaaa

SEQ ID NO: 2355129 - RNA, 19 nt, Homo sapiens
  misc_RNA (1)...(19): siRNA sense strand
gauggaaauucaaggccaa

SEQ ID NO: 2355130 - RNA, 19 nt, Homo sapiens
  misc_RNA (1)...(19): siRNA sense strand
ggacaaagauucaggccag

SEQ ID NO: 2355131 - RNA, 19 nt, Homo sapiens
  misc_RNA (1)...(19): siRNA sense strand
cuuagaacugagagugaua

SEQ ID NO: 2355132 - RNA, 19 nt, Homo sapiens
  misc_RNA (1)...(19): siRNA sense strand
gcagagugcuggacaggga

SEQ ID NO: 2355133 - RNA, 19 nt, Homo sapiens
  misc_RNA (1)...(19): siRNA sense strand
acggaguggagguggaaau

SEQ ID NO: 2355134 - RNA, 19 nt, Homo sapiens
  misc_RNA (1)...(19): siRNA sense strand
ucuaaaugugcaagaucaa

SEQ ID NO: 2355135 - RNA, 19 nt, Homo sapiens
  misc_RNA (1)...(19): siRNA sense strand
gauucuaugagauggaaau

SEQ ID NO: 2355136 - RNA, 19 nt, Homo sapiens
  misc_RNA (1)...(19): siRNA sense strand
ccguauaucgcgugagugu

SEQ ID NO: 2355137 - RNA, 19 nt, Homo sapiens
  misc_RNA (1)...(19): siRNA sense strand
ccuugaagauuuacggagu

SEQ ID NO: 2355138 - RNA, 19 nt, Homo sapiens
  misc_RNA (1)...(19): siRNA sense strand
ggauagaccgggaggagcu

SEQ ID NO: 2355139 - RNA, 19 nt, Homo sapiens
  misc_RNA (1)...(19): siRNA sense strand
ugaauguggcagaugacaa

SEQ ID NO: 2355140 - RNA, 19 nt, Homo sapiens
  misc_RNA (1)...(19): siRNA sense strand
aauauaacguugacagcca

SEQ ID NO: 2355141 - RNA, 19 nt, Homo sapiens
  misc_RNA (1)...(19): siRNA sense strand
agggaagccuggaccgaga

SEQ ID NO: 2355142 - RNA, 19 nt, Homo sapiens
  misc_RNA (1)...(19): siRNA sense strand
cgggaggagcucugugaga

SEQ ID NO: 2355143 - RNA, 19 nt, Homo sapiens
  misc_RNA (1)...(19): siRNA sense strand
uggugguccucgauguaaa

SEQ ID NO: 2355144 - RNA, 19 nt, Homo sapiens
  misc_RNA (1)...(19): siRNA sense strand
gugccagaagagaccgaaa

SEQ ID NO: 2355145 - RNA, 19 nt, Homo sapiens
  misc_RNA (1)...(19): siRNA sense strand
aggccaagaugguggaggu

SEQ ID NO: 2355146 - RNA, 19 nt, Homo sapiens
  misc_RNA (1)...(19): siRNA sense strand
ccaagaugguggaggucuc

SEQ ID NO: 2355147 - RNA, 19 nt, Homo sapiens
  misc_RNA (1)...(19): siRNA sense strand
gauaaaagucagugagcac

SEQ ID NO: 2355148 - RNA, 19 nt, Homo sapiens
  misc_RNA (1)...(19): siRNA sense strand
aggaggacgaaguggagau

SEQ ID NO: 2355149 - RNA, 19 nt, Homo sapiens
  misc_RNA (1)...(19): siRNA sense strand
cggauccagacgagggaau

SEQ ID NO: 2355150 - RNA, 19 nt, Homo sapiens
  misc_RNA (1)...(19): siRNA sense strand
ggauucacaaacuggagaa

SEQ ID NO: 2355151 - RNA, 19 nt, Homo sapiens
  misc_RNA (1)...(19): siRNA sense strand
agauggaaauucaaggcca

SEQ ID NO: 2355152 - RNA, 19 nt, Homo sapiens
  misc_RNA (1)...(19): siRNA sense strand
guaaaugaucacaucccaa

SEQ ID NO: 2355153 - RNA, 19 nt, Homo sapiens
  misc_RNA (1)...(19): siRNA sense strand
cuguuguggaugugaauga

SEQ ID NO: 2355154 - RNA, 19 nt, Homo sapiens
  misc_RNA (1)...(19): siRNA sense strand
aggugguugcgguggacaa

SEQ ID NO: 2355155 - RNA, 19 nt, Homo sapiens
  misc_RNA (1)...(19): siRNA sense strand
agcuaguacuggagggaag

SEQ ID NO: 2355156 - RNA, 19 nt, Homo sapiens
  misc_RNA (1)...(19): siRNA sense strand
gccuggaccgagagaaaga

SEQ ID NO: 2355157 - RNA, 19 nt, Homo sapiens
  misc_RNA (1)...(19): siRNA sense strand
ccaaggugguugcggugga

SEQ ID NO: 2355158 - RNA, 19 nt, Homo sapiens
  misc_RNA (1)...(19): siRNA sense strand
aagccuggaccgagagaaa

SEQ ID NO: 2355159 - RNA, 19 nt, Homo sapiens
  misc_RNA (1)...(19): siRNA sense strand
gauggaaauucaaggccaa

SEQ ID NO: 2355160 - RNA, 19 nt, Homo sapiens
  misc_RNA (1)...(19): siRNA sense strand
ggacaaagauucaggccag

SEQ ID NO: 2355161 - RNA, 19 nt, Homo sapiens
  misc_RNA (1)...(19): siRNA sense strand
cuuagaacugagagugaua

SEQ ID NO: 2355162 - RNA, 19 nt, Homo sapiens
  misc_RNA (1)...(19): siRNA sense strand
gcagagugcuggacaggga

SEQ ID NO: 2355163 - RNA, 19 nt, Homo sapiens
  misc_RNA (1)...(19): siRNA sense strand
acggaguggagguggaaau

SEQ ID NO: 2355164 - RNA, 19 nt, Homo sapiens
  misc_RNA (1)...(19): siRNA sense strand
ucuaaaugugcaagaucaa

SEQ ID NO: 2355165 - RNA, 19 nt, Homo sapiens
  misc_RNA (1)...(19): siRNA sense strand
gauucuaugagauggaaau

SEQ ID NO: 2355166 - RNA, 19 nt, Homo sapiens
  misc_RNA (1)...(19): siRNA sense strand
ccguauaucgcgugagugu

SEQ ID NO: 2355167 - RNA, 19 nt, Homo sapiens
  misc_RNA (1)...(19): siRNA sense strand
ccuugaagauuuacggagu

SEQ ID NO: 2355168 - RNA, 19 nt, Homo sapiens
  misc_RNA (1)...(19): siRNA sense strand
ggauagaccgggaggagcu

SEQ ID NO: 2355169 - RNA, 19 nt, Homo sapiens
  misc_RNA (1)...(19): siRNA sense strand
ugaauguggcagaugacaa

SEQ ID NO: 2355170 - RNA, 19 nt, Homo sapiens
  misc_RNA (1)...(19): siRNA sense strand
aauauaacguugacagcca

SEQ ID NO: 2355171 - RNA, 19 nt, Homo sapiens
  misc_RNA (1)...(19): siRNA sense strand
agggaagccuggaccgaga

SEQ ID NO: 2355172 - RNA, 19 nt, Homo sapiens
  misc_RNA (1)...(19): siRNA sense strand
cgggaggagcucugugaga

SEQ ID NO: 2355173 - RNA, 19 nt, Homo sapiens
  misc_RNA (1)...(19): siRNA sense strand
uggugguccucgauguaaa

SEQ ID NO: 2355174 - RNA, 19 nt, Homo sapiens
  misc_RNA (1)...(19): siRNA sense strand
gugccagaagagaccgaaa

SEQ ID NO: 2355175 - RNA, 19 nt, Homo sapiens
  misc_RNA (1)...(19): siRNA sense strand
aggccaagaugguggaggu

SEQ ID NO: 2355176 - RNA, 19 nt, Homo sapiens
  misc_RNA (1)...(19): siRNA sense strand
ccaagaugguggaggucuc

SEQ ID NO: 2355177 - RNA, 19 nt, Homo sapiens
  misc_RNA (1)...(19): siRNA sense strand
gauaaaagucagugagcac

SEQ ID NO: 2355178 - RNA, 19 nt, Homo sapiens
  misc_RNA (1)...(19): siRNA sense strand
aggaggacgaaguggagau

SEQ ID NO: 2355179 - RNA, 19 nt, Homo sapiens
  misc_RNA (1)...(19): siRNA sense strand
cggauccagacgagggaau

SEQ ID NO: 2355180 - RNA, 19 nt, Homo sapiens
  misc_RNA (1)...(19): siRNA sense strand
ggauucacaaacuggagaa

SEQ ID NO: 2355181 - RNA, 19 nt, Homo sapiens
  misc_RNA (1)...(19): siRNA sense strand
agauggaaauucaaggcca

SEQ ID NO: 2355182 - RNA, 19 nt, Homo sapiens
  misc_RNA (1)...(19): siRNA sense strand
guaaaugaucacaucccaa

SEQ ID NO: 2355183 - RNA, 19 nt, Homo sapiens
  misc_RNA (1)...(19): siRNA sense strand
cuguuguggaugugaauga

SEQ ID NO: 2355184 - RNA, 19 nt, Homo sapiens
  misc_RNA (1)...(19): siRNA sense strand
aggugguugcgguggacaa

SEQ ID NO: 2355185 - RNA, 19 nt, Homo sapiens
  misc_RNA (1)...(19): siRNA sense strand
agcuaguacuggagggaag

SEQ ID NO: 2355186 - RNA, 19 nt, Homo sapiens
  misc_RNA (1)...(19): siRNA sense strand
gccuggaccgagagaaaga

SEQ ID NO: 2355187 - RNA, 19 nt, Homo sapiens
  misc_RNA (1)...(19): siRNA sense strand
ccaaggugguugcggugga

SEQ ID NO: 2355188 - RNA, 19 nt, Homo sapiens
  misc_RNA (1)...(19): siRNA sense strand
aagccuggaccgagagaaa

SEQ ID NO: 2355189 - RNA, 19 nt, Homo sapiens
  misc_RNA (1)...(19): siRNA sense strand
gauggaaauucaaggccaa

SEQ ID NO: 2355190 - RNA, 19 nt, Homo sapiens
  misc_RNA (1)...(19): siRNA sense strand
ggacaaagauucaggccag

SEQ ID NO: 2355191 - RNA, 19 nt, Homo sapiens
  misc_RNA (1)...(19): siRNA sense strand
cuuagaacugagagugaua

SEQ ID NO: 2355192 - RNA, 19 nt, Homo sapiens
  misc_RNA (1)...(19): siRNA sense strand
gcagagugcuggacaggga

SEQ ID NO: 2355193 - RNA, 19 nt, Homo sapiens
  misc_RNA (1)...(19): siRNA sense strand
acggaguggagguggaaau

SEQ ID NO: 2355194 - RNA, 19 nt, Homo sapiens
  misc_RNA (1)...(19): siRNA sense strand
ucuaaaugugcaagaucaa

SEQ ID NO: 2355195 - RNA, 19 nt, Homo sapiens
  misc_RNA (1)...(19): siRNA sense strand
gauucuaugagauggaaau

SEQ ID NO: 2355196 - RNA, 19 nt, Homo sapiens
  misc_RNA (1)...(19): siRNA sense strand
ccguauaucgcgugagugu

SEQ ID NO: 2355197 - RNA, 19 nt, Homo sapiens
  misc_RNA (1)...(19): siRNA sense strand
ccuugaagauuuacggagu

SEQ ID NO: 2355198 - RNA, 19 nt, Homo sapiens
  misc_RNA (1)...(19): siRNA sense strand
ggauagaccgggaggagcu

SEQ ID NO: 2355199 - RNA, 19 nt, Homo sapiens
  misc_RNA (1)...(19): siRNA sense strand
ugaauguggcagaugacaa

SEQ ID NO: 2355200 - RNA, 19 nt, Homo sapiens
  misc_RNA (1)...(19): siRNA sense strand
aauauaacguugacagcca

SEQ ID NO: 2355201 - RNA, 19 nt, Homo sapiens
  misc_RNA (1)...(19): siRNA sense strand
agggaagccuggaccgaga

SEQ ID NO: 2355202 - RNA, 19 nt, Homo sapiens
  misc_RNA (1)...(19): siRNA sense strand
cgggaggagcucugugaga

SEQ ID NO: 2355203 - RNA, 19 nt, Homo sapiens
  misc_RNA (1)...(19): siRNA sense strand
uggugguccucgauguaaa

SEQ ID NO: 2355204 - RNA, 19 nt, Homo sapiens
  misc_RNA (1)...(19): siRNA sense strand
gugccagaagagaccgaaa

SEQ ID NO: 2355205 - RNA, 19 nt, Homo sapiens
  misc_RNA (1)...(19): siRNA sense strand
aggccaagaugguggaggu

SEQ ID NO: 2355206 - RNA, 19 nt, Homo sapiens
  misc_RNA (1)...(19): siRNA sense strand
ccaagaugguggaggucuc

SEQ ID NO: 2355207 - RNA, 19 nt, Homo sapiens
  misc_RNA (1)...(19): siRNA sense strand
gauaaaagucagugagcac

SEQ ID NO: 2355208 - RNA, 19 nt, Homo sapiens
  misc_RNA (1)...(19): siRNA sense strand
aggaggacgaaguggagau

SEQ ID NO: 2355209 - RNA, 19 nt, Homo sapiens
  misc_RNA (1)...(19): siRNA sense strand
cggauccagacgagggaau

SEQ ID NO: 2355210 - RNA, 19 nt, Homo sapiens
  misc_RNA (1)...(19): siRNA sense strand
ggauucacaaacuggagaa

SEQ ID NO: 2355211 - RNA, 19 nt, Homo sapiens
  misc_RNA (1)...(19): siRNA sense strand
agauggaaauucaaggcca

SEQ ID NO: 2355212 - RNA, 19 nt, Homo sapiens
  misc_RNA (1)...(19): siRNA sense strand
guaaaugaucacaucccaa

SEQ ID NO: 2355213 - RNA, 19 nt, Homo sapiens
  misc_RNA (1)...(19): siRNA sense strand
cuguuguggaugugaauga

SEQ ID NO: 2355214 - RNA, 19 nt, Homo sapiens
  misc_RNA (1)...(19): siRNA sense strand
aggugguugcgguggacaa

SEQ ID NO: 2355215 - RNA, 19 nt, Homo sapiens
  misc_RNA (1)...(19): siRNA sense strand
agcuaguacuggagggaag

SEQ ID NO: 2355216 - RNA, 19 nt, Homo sapiens
  misc_RNA (1)...(19): siRNA sense strand
gccuggaccgagagaaaga

SEQ ID NO: 2355217 - RNA, 19 nt, Homo sapiens
  misc_RNA (1)...(19): siRNA sense strand
ccaaggugguugcggugga

SEQ ID NO: 2355218 - RNA, 19 nt, Homo sapiens
  misc_RNA (1)...(19): siRNA sense strand
gcucaaaggaaucgcucaa

SEQ ID NO: 2355219 - RNA, 19 nt, Homo sapiens
  misc_RNA (1)...(19): siRNA sense strand
ccuauaucccagagaacaa

SEQ ID NO: 2355220 - RNA, 19 nt, Homo sapiens
  misc_RNA (1)...(19): siRNA sense strand
agaagauggaggagcauau

SEQ ID NO: 2355221 - RNA, 19 nt, Homo sapiens
  misc_RNA (1)...(19): siRNA sense strand
cgaaggugccaauggagaa

SEQ ID NO: 2355222 - RNA, 19 nt, Homo sapiens
  misc_RNA (1)...(19): siRNA sense strand
agugaguguuccugagaau

SEQ ID NO: 2355223 - RNA, 19 nt, Homo sapiens
  misc_RNA (1)...(19): siRNA sense strand
aagagaaugcccagauuau

SEQ ID NO: 2355224 - RNA, 19 nt, Homo sapiens
  misc_RNA (1)...(19): siRNA sense strand
ggauagaccgggaggagcu

SEQ ID NO: 2355225 - RNA, 19 nt, Homo sapiens
  misc_RNA (1)...(19): siRNA sense strand
agcagaagauggaggagca

SEQ ID NO: 2355226 - RNA, 19 nt, Homo sapiens
  misc_RNA (1)...(19): siRNA sense strand
guugauuacaguagaagau

SEQ ID NO: 2355227 - RNA, 19 nt, Homo sapiens
  misc_RNA (1)...(19): siRNA sense strand
cccuagaucgcgaggaaga

SEQ ID NO: 2355228 - RNA, 19 nt, Homo sapiens
  misc_RNA (1)...(19): siRNA sense strand
gggaacagucguagcccuu

SEQ ID NO: 2355229 - RNA, 19 nt, Homo sapiens
  misc_RNA (1)...(19): siRNA sense strand
caaaauuccaagcagaaaa

SEQ ID NO: 2355230 - RNA, 19 nt, Homo sapiens
  misc_RNA (1)...(19): siRNA sense strand
ugacugucuucgaugcaaa

SEQ ID NO: 2355231 - RNA, 19 nt, Homo sapiens
  misc_RNA (1)...(19): siRNA sense strand
ggugauacacagagcccuu

SEQ ID NO: 2355232 - RNA, 19 nt, Homo sapiens
  misc_RNA (1)...(19): siRNA sense strand
gcaacaucuccaaggacuu

SEQ ID NO: 2355233 - RNA, 19 nt, Homo sapiens
  misc_RNA (1)...(19): siRNA sense strand
cucccuagaucgcgaggaa

SEQ ID NO: 2355234 - RNA, 19 nt, Homo sapiens
  misc_RNA (1)...(19): siRNA sense strand
uagaaauacaagcagaaga

SEQ ID NO: 2355235 - RNA, 19 nt, Homo sapiens
  misc_RNA (1)...(19): siRNA sense strand
cugcaaaaguguugauuac

SEQ ID NO: 2355236 - RNA, 19 nt, Homo sapiens
  misc_RNA (1)...(19): siRNA sense strand
auuacagauuggugauaca

SEQ ID NO: 2355237 - RNA, 19 nt, Homo sapiens
  misc_RNA (1)...(19): siRNA sense strand
uggaagacagggugaaacu

SEQ ID NO: 2355238 - RNA, 19 nt, Homo sapiens
  misc_RNA (1)...(19): siRNA sense strand
aaggaaucgcucaaaggaa

SEQ ID NO: 2355239 - RNA, 19 nt, Homo sapiens
  misc_RNA (1)...(19): siRNA sense strand
gcucaaaggaaucgcucaa

SEQ ID NO: 2355240 - RNA, 19 nt, Homo sapiens
  misc_RNA (1)...(19): siRNA sense strand
ccuauaucccagagaacaa

SEQ ID NO: 2355241 - RNA, 19 nt, Homo sapiens
  misc_RNA (1)...(19): siRNA sense strand
agaagauggaggagcauau

SEQ ID NO: 2355242 - RNA, 19 nt, Homo sapiens
  misc_RNA (1)...(19): siRNA sense strand
cgaaggugccaauggagaa

SEQ ID NO: 2355243 - RNA, 19 nt, Homo sapiens
  misc_RNA (1)...(19): siRNA sense strand
agugaguguuccugagaau

SEQ ID NO: 2355244 - RNA, 19 nt, Homo sapiens
  misc_RNA (1)...(19): siRNA sense strand
aagagaaugcccagauuau

SEQ ID NO: 2355245 - RNA, 19 nt, Homo sapiens
  misc_RNA (1)...(19): siRNA sense strand
ggauagaccgggaggagcu

SEQ ID NO: 2355246 - RNA, 19 nt, Homo sapiens
  misc_RNA (1)...(19): siRNA sense strand
agcagaagauggaggagca

SEQ ID NO: 2355247 - RNA, 19 nt, Homo sapiens
  misc_RNA (1)...(19): siRNA sense strand
guugauuacaguagaagau

SEQ ID NO: 2355248 - RNA, 19 nt, Homo sapiens
  misc_RNA (1)...(19): siRNA sense strand
cccuagaucgcgaggaaga

SEQ ID NO: 2355249 - RNA, 19 nt, Homo sapiens
  misc_RNA (1)...(19): siRNA sense strand
gggaacagucguagcccuu

SEQ ID NO: 2355250 - RNA, 19 nt, Homo sapiens
  misc_RNA (1)...(19): siRNA sense strand
caaaauuccaagcagaaaa

SEQ ID NO: 2355251 - RNA, 19 nt, Homo sapiens
  misc_RNA (1)...(19): siRNA sense strand
ugacugucuucgaugcaaa

SEQ ID NO: 2355252 - RNA, 19 nt, Homo sapiens
  misc_RNA (1)...(19): siRNA sense strand
ggugauacacagagcccuu

SEQ ID NO: 2355253 - RNA, 19 nt, Homo sapiens
  misc_RNA (1)...(19): siRNA sense strand
gcaacaucuccaaggacuu

SEQ ID NO: 2355254 - RNA, 19 nt, Homo sapiens
  misc_RNA (1)...(19): siRNA sense strand
cucccuagaucgcgaggaa

SEQ ID NO: 2355255 - RNA, 19 nt, Homo sapiens
  misc_RNA (1)...(19): siRNA sense strand
uagaaauacaagcagaaga

SEQ ID NO: 2355256 - RNA, 19 nt, Homo sapiens
  misc_RNA (1)...(19): siRNA sense strand
cugcaaaaguguugauuac

SEQ ID NO: 2355257 - RNA, 19 nt, Homo sapiens
  misc_RNA (1)...(19): siRNA sense strand
auuacagauuggugauaca

SEQ ID NO: 2355258 - RNA, 19 nt, Homo sapiens
  misc_RNA (1)...(19): siRNA sense strand
uggaagacagggugaaacu

SEQ ID NO: 2355259 - RNA, 19 nt, Homo sapiens
  misc_RNA (1)...(19): siRNA sense strand
aaggaaucgcucaaaggaa

SEQ ID NO: 2355260 - RNA, 19 nt, Homo sapiens
  misc_RNA (1)...(19): siRNA sense strand
gcaaaugggaguuggcgaa

SEQ ID NO: 2355261 - RNA, 19 nt, Homo sapiens
  misc_RNA (1)...(19): siRNA sense strand
cagaaaaggacgagaucuu

SEQ ID NO: 2355262 - RNA, 19 nt, Homo sapiens
  misc_RNA (1)...(19): siRNA sense strand
cuguugugauggaggaaau

SEQ ID NO: 2355263 - RNA, 19 nt, Homo sapiens
  misc_RNA (1)...(19): siRNA sense strand
aggaagaggcagccagaca

SEQ ID NO: 2355264 - RNA, 19 nt, Homo sapiens
  misc_RNA (1)...(19): siRNA sense strand
acucagaagaugaagacuu

SEQ ID NO: 2355265 - RNA, 19 nt, Homo sapiens
  misc_RNA (1)...(19): siRNA sense strand
ugguuuacauacaggaaaa

SEQ ID NO: 2355266 - RNA, 19 nt, Homo sapiens
  misc_RNA (1)...(19): siRNA sense strand
ggacacaaaggaagaggca

SEQ ID NO: 2355267 - RNA, 19 nt, Homo sapiens
  misc_RNA (1)...(19): siRNA sense strand
cggacaucaacgaggccua

SEQ ID NO: 2355268 - RNA, 19 nt, Homo sapiens
  misc_RNA (1)...(19): siRNA sense strand
agguggacacaaaggaaga

SEQ ID NO: 2355269 - RNA, 19 nt, Homo sapiens
  misc_RNA (1)...(19): siRNA sense strand
acacaaaggaagaggcagc

SEQ ID NO: 2355270 - RNA, 19 nt, Homo sapiens
  misc_RNA (1)...(19): siRNA sense strand
ggaggaaaucagaagguug

SEQ ID NO: 2355271 - RNA, 19 nt, Homo sapiens
  misc_RNA (1)...(19): siRNA sense strand
cuucugauguagagcgacu

SEQ ID NO: 2355272 - RNA, 19 nt, Homo sapiens
  misc_RNA (1)...(19): siRNA sense strand
gcaaaugggaguuggcgaa

SEQ ID NO: 2355273 - RNA, 19 nt, Homo sapiens
  misc_RNA (1)...(19): siRNA sense strand
cagaaaaggacgagaucuu

SEQ ID NO: 2355274 - RNA, 19 nt, Homo sapiens
  misc_RNA (1)...(19): siRNA sense strand
cuguugugauggaggaaau

SEQ ID NO: 2355275 - RNA, 19 nt, Homo sapiens
  misc_RNA (1)...(19): siRNA sense strand
aggaagaggcagccagaca

SEQ ID NO: 2355276 - RNA, 19 nt, Homo sapiens
  misc_RNA (1)...(19): siRNA sense strand
ugguuuacauacaggaaaa

SEQ ID NO: 2355277 - RNA, 19 nt, Homo sapiens
  misc_RNA (1)...(19): siRNA sense strand
ggacacaaaggaagaggca

SEQ ID NO: 2355278 - RNA, 19 nt, Homo sapiens
  misc_RNA (1)...(19): siRNA sense strand
cggacaucaacgaggccua

SEQ ID NO: 2355279 - RNA, 19 nt, Homo sapiens
  misc_RNA (1)...(19): siRNA sense strand
agguggacacaaaggaaga

SEQ ID NO: 2355280 - RNA, 19 nt, Homo sapiens
  misc_RNA (1)...(19): siRNA sense strand
acacaaaggaagaggcagc

SEQ ID NO: 2355281 - RNA, 19 nt, Homo sapiens
  misc_RNA (1)...(19): siRNA sense strand
ggaggaaaucagaagguug

SEQ ID NO: 2355282 - RNA, 19 nt, Homo sapiens
  misc_RNA (1)...(19): siRNA sense strand
agaaaggggcugcgacaaa

SEQ ID NO: 2355283 - RNA, 19 nt, Homo sapiens
  misc_RNA (1)...(19): siRNA sense strand
uggaggaaccacugaguca

SEQ ID NO: 2355284 - RNA, 19 nt, Homo sapiens
  misc_RNA (1)...(19): siRNA sense strand
uggaggaaccacugaguca

SEQ ID NO: 2355285 - RNA, 19 nt, Homo sapiens
  misc_RNA (1)...(19): siRNA sense strand
uggaggaaccgcugaguca

SEQ ID NO: 2355286 - RNA, 19 nt, Homo sapiens
  misc_RNA (1)...(19): siRNA sense strand
uggaggaaccacugaguca

SEQ ID NO: 2355287 - RNA, 19 nt, Homo sapiens
  misc_RNA (1)...(19): siRNA sense strand
uggaggaaccacugaguca

SEQ ID NO: 2355288 - RNA, 19 nt, Homo sapiens
  misc_RNA (1)...(19): siRNA sense strand
aggagagcgagguggaaga

SEQ ID NO: 2355289 - RNA, 19 nt, Homo sapiens
  misc_RNA (1)...(19): siRNA sense strand
aggagagccagguggaaga

SEQ ID NO: 2355290 - RNA, 19 nt, Homo sapiens
  misc_RNA (1)...(19): siRNA sense strand
ccgaagaagaagacuacca

SEQ ID NO: 2355291 - RNA, 19 nt, Homo sapiens
  misc_RNA (1)...(19): siRNA sense strand
agcaguucguagagggaga

SEQ ID NO: 2355292 - RNA, 19 nt, Homo sapiens
  misc_RNA (1)...(19): siRNA sense strand
agggagacgcgggaagaaa

SEQ ID NO: 2355293 - RNA, 19 nt, Homo sapiens
  misc_RNA (1)...(19): siRNA sense strand
gaagaaaggggcugcgaca

SEQ ID NO: 2355294 - RNA, 19 nt, Homo sapiens
  misc_RNA (1)...(19): siRNA sense strand
aguccaaagccgagagccu

SEQ ID NO: 2355295 - RNA, 19 nt, Homo sapiens
  misc_RNA (1)...(19): siRNA sense strand
cggaggcaggaaagaggaa

SEQ ID NO: 2355296 - RNA, 19 nt, Homo sapiens
  misc_RNA (1)...(19): siRNA sense strand
aggagagcgagauggaaga

SEQ ID NO: 2355297 - RNA, 19 nt, Homo sapiens
  misc_RNA (1)...(19): siRNA sense strand
gcucaggaaucaugggcua

SEQ ID NO: 2355298 - RNA, 19 nt, Homo sapiens
  misc_RNA (1)...(19): siRNA sense strand
ccaacauagcuguggacaa

SEQ ID NO: 2355299 - RNA, 19 nt, Homo sapiens
  misc_RNA (1)...(19): siRNA sense strand
cuuugauggugaugagauu

SEQ ID NO: 2355300 - RNA, 19 nt, Homo sapiens
  misc_RNA (1)...(19): siRNA sense strand
gcuugaagaauuuggacga

SEQ ID NO: 2355301 - RNA, 19 nt, Homo sapiens
  misc_RNA (1)...(19): siRNA sense strand
gggcuaucaaagaagaaca

SEQ ID NO: 2355302 - RNA, 19 nt, Homo sapiens
  misc_RNA (1)...(19): siRNA sense strand
cuaucugaauccugaccaa

SEQ ID NO: 2355303 - RNA, 19 nt, Homo sapiens
  misc_RNA (1)...(19): siRNA sense strand
uggcaaagaaggagacggu

SEQ ID NO: 2355304 - RNA, 19 nt, Homo sapiens
  misc_RNA (1)...(19): siRNA sense strand
ggccauaaguggagucccu

SEQ ID NO: 2355305 - RNA, 19 nt, Homo sapiens
  misc_RNA (1)...(19): siRNA sense strand
gcgcaaaagcaaugcagca

SEQ ID NO: 2355306 - RNA, 19 nt, Homo sapiens
  misc_RNA (1)...(19): siRNA sense strand
uguuugacuuugaugguga

SEQ ID NO: 2355307 - RNA, 19 nt, Homo sapiens
  misc_RNA (1)...(19): siRNA sense strand
uggauauggcaaagaagga

SEQ ID NO: 2355308 - RNA, 19 nt, Homo sapiens
  misc_RNA (1)...(19): siRNA sense strand
gauauggcaaagaaggaga

SEQ ID NO: 2355309 - RNA, 19 nt, Homo sapiens
  misc_RNA (1)...(19): siRNA sense strand
aagacuaagaaguggguga

SEQ ID NO: 2355310 - RNA, 19 nt, Homo sapiens
  misc_RNA (1)...(19): siRNA sense strand
accaauaagaucagggaca

SEQ ID NO: 2355311 - RNA, 19 nt, Homo sapiens
  misc_RNA (1)...(19): siRNA sense strand
ccuuugagcgcuugggaga

SEQ ID NO: 2355312 - RNA, 19 nt, Homo sapiens
  misc_RNA (1)...(19): siRNA sense strand
ccaccaaugagaaggcuga

SEQ ID NO: 2355313 - RNA, 19 nt, Homo sapiens
  misc_RNA (1)...(19): siRNA sense strand
agacgaugcuggaggaggu

SEQ ID NO: 2355314 - RNA, 19 nt, Homo sapiens
  misc_RNA (1)...(19): siRNA sense strand
agaucugguucaacaacaa

SEQ ID NO: 2355315 - RNA, 19 nt, Homo sapiens
  misc_RNA (1)...(19): siRNA sense strand
auguguuggugcugaggaa

SEQ ID NO: 2355316 - RNA, 19 nt, Homo sapiens
  misc_RNA (1)...(19): siRNA sense strand
cugaaguggccaaggucuu

SEQ ID NO: 2355317 - RNA, 19 nt, Homo sapiens
  misc_RNA (1)...(19): siRNA sense strand
uuauugacauggugcggaa

SEQ ID NO: 2355318 - RNA, 19 nt, Homo sapiens
  misc_RNA (1)...(19): siRNA sense strand
ggaaccaggccauggcuga

SEQ ID NO: 2355319 - RNA, 19 nt, Homo sapiens
  misc_RNA (1)...(19): siRNA sense strand
ggaugaaggaagaaggcag

SEQ ID NO: 2355320 - RNA, 19 nt, Homo sapiens
  misc_RNA (1)...(19): siRNA sense strand
ccacggugacccagagcuu

SEQ ID NO: 2355321 - RNA, 19 nt, Homo sapiens
  misc_RNA (1)...(19): siRNA sense strand
guggacaccaggcaggaaa

SEQ ID NO: 2355322 - RNA, 19 nt, Homo sapiens
  misc_RNA (1)...(19): siRNA sense strand
cggcagacgucuucagccu

SEQ ID NO: 2355323 - RNA, 19 nt, Homo sapiens
  misc_RNA (1)...(19): siRNA sense strand
gcggagggaacaaacgcaa

SEQ ID NO: 2355324 - RNA, 19 nt, Homo sapiens
  misc_RNA (1)...(19): siRNA sense strand
cgaugcuggaggagguauu

SEQ ID NO: 2355325 - RNA, 19 nt, Homo sapiens
  misc_RNA (1)...(19): siRNA sense strand
aggagacagcgcuggagaa

SEQ ID NO: 2355326 - RNA, 19 nt, Homo sapiens
  misc_RNA (1)...(19): siRNA sense strand
ccuuugugcuugagcucuu

SEQ ID NO: 2355327 - RNA, 19 nt, Homo sapiens
  misc_RNA (1)...(19): siRNA sense strand
ggaucuacuccgugacacu

SEQ ID NO: 2355328 - RNA, 19 nt, Homo sapiens
  misc_RNA (1)...(19): siRNA sense strand
acaccgaagagcagaagga

SEQ ID NO: 2355329 - RNA, 19 nt, Homo sapiens
  misc_RNA (1)...(19): siRNA sense strand
gaaggaggcaggaguggga

SEQ ID NO: 2355330 - RNA, 19 nt, Homo sapiens
  misc_RNA (1)...(19): siRNA sense strand
aagacuaagaaguggguga

SEQ ID NO: 2355331 - RNA, 19 nt, Homo sapiens
  misc_RNA (1)...(19): siRNA sense strand
accaauaagaucagggaca

SEQ ID NO: 2355332 - RNA, 19 nt, Homo sapiens
  misc_RNA (1)...(19): siRNA sense strand
ccuuugagcgcuugggaga

SEQ ID NO: 2355333 - RNA, 19 nt, Homo sapiens
  misc_RNA (1)...(19): siRNA sense strand
ccaccaaugagaaggcuga

SEQ ID NO: 2355334 - RNA, 19 nt, Homo sapiens
  misc_RNA (1)...(19): siRNA sense strand
agacgaugcuggaggaggu

SEQ ID NO: 2355335 - RNA, 19 nt, Homo sapiens
  misc_RNA (1)...(19): siRNA sense strand
agaucugguucaacaacaa

SEQ ID NO: 2355336 - RNA, 19 nt, Homo sapiens
  misc_RNA (1)...(19): siRNA sense strand
auguguuggugcugaggaa

SEQ ID NO: 2355337 - RNA, 19 nt, Homo sapiens
  misc_RNA (1)...(19): siRNA sense strand
cugaaguggccaaggucuu

SEQ ID NO: 2355338 - RNA, 19 nt, Homo sapiens
  misc_RNA (1)...(19): siRNA sense strand
uuauugacauggugcggaa

SEQ ID NO: 2355339 - RNA, 19 nt, Homo sapiens
  misc_RNA (1)...(19): siRNA sense strand
ggaaccaggccauggcuga

SEQ ID NO: 2355340 - RNA, 19 nt, Homo sapiens
  misc_RNA (1)...(19): siRNA sense strand
ggaugaaggaagaaggcag

SEQ ID NO: 2355341 - RNA, 19 nt, Homo sapiens
  misc_RNA (1)...(19): siRNA sense strand
ccacggugacccagagcuu

SEQ ID NO: 2355342 - RNA, 19 nt, Homo sapiens
  misc_RNA (1)...(19): siRNA sense strand
guggacaccaggcaggaaa

SEQ ID NO: 2355343 - RNA, 19 nt, Homo sapiens
  misc_RNA (1)...(19): siRNA sense strand
cggcagacgucuucagccu

SEQ ID NO: 2355344 - RNA, 19 nt, Homo sapiens
  misc_RNA (1)...(19): siRNA sense strand
gcggagggaacaaacgcaa

SEQ ID NO: 2355345 - RNA, 19 nt, Homo sapiens
  misc_RNA (1)...(19): siRNA sense strand
cgaugcuggaggagguauu

SEQ ID NO: 2355346 - RNA, 19 nt, Homo sapiens
  misc_RNA (1)...(19): siRNA sense strand
aggagacagcgcuggagaa

SEQ ID NO: 2355347 - RNA, 19 nt, Homo sapiens
  misc_RNA (1)...(19): siRNA sense strand
ccuuugugcuugagcucuu

SEQ ID NO: 2355348 - RNA, 19 nt, Homo sapiens
  misc_RNA (1)...(19): siRNA sense strand
ggaucuacuccgugacacu

SEQ ID NO: 2355349 - RNA, 19 nt, Homo sapiens
  misc_RNA (1)...(19): siRNA sense strand
acaccgaagagcagaagga

SEQ ID NO: 2355350 - RNA, 19 nt, Homo sapiens
  misc_RNA (1)...(19): siRNA sense strand
gaaggaggcaggaguggga

SEQ ID NO: 2355351 - RNA, 19 nt, Homo sapiens
  misc_RNA (1)...(19): siRNA sense strand
guuaauaguuuucgggaca

SEQ ID NO: 2355352 - RNA, 19 nt, Homo sapiens
  misc_RNA (1)...(19): siRNA sense strand
agacagaagacacgggcau

SEQ ID NO: 2355353 - RNA, 19 nt, Homo sapiens
  misc_RNA (1)...(19): siRNA sense strand
gguugaaggaggagauucu

SEQ ID NO: 2355354 - RNA, 19 nt, Homo sapiens
  misc_RNA (1)...(19): siRNA sense strand
cugauucaugagagagaua

SEQ ID NO: 2355355 - RNA, 19 nt, Homo sapiens
  misc_RNA (1)...(19): siRNA sense strand
guggcaggaaugauggaaa

SEQ ID NO: 2355356 - RNA, 19 nt, Homo sapiens
  misc_RNA (1)...(19): siRNA sense strand
gggagaaggcugagcagac

SEQ ID NO: 2355357 - RNA, 19 nt, Homo sapiens
  misc_RNA (1)...(19): siRNA sense strand
cagagauggaggaugucaa

SEQ ID NO: 2355358 - RNA, 19 nt, Homo sapiens
  misc_RNA (1)...(19): siRNA sense strand
gcugcauggcugagagguu

SEQ ID NO: 2355359 - RNA, 19 nt, Homo sapiens
  misc_RNA (1)...(19): siRNA sense strand
ccgagaagaagcaacaaaa

SEQ ID NO: 2355360 - RNA, 19 nt, Homo sapiens
  misc_RNA (1)...(19): siRNA sense strand
cugagagguugaaggagga

SEQ ID NO: 2355361 - RNA, 19 nt, Homo sapiens
  misc_RNA (1)...(19): siRNA sense strand
agggagaggagucggccua

SEQ ID NO: 2355362 - RNA, 19 nt, Homo sapiens
  misc_RNA (1)...(19): siRNA sense strand
uaucauaggcugaaggaug

SEQ ID NO: 2355363 - RNA, 19 nt, Homo sapiens
  misc_RNA (1)...(19): siRNA sense strand
ucaccauauuagagaaucu

SEQ ID NO: 2355364 - RNA, 19 nt, Homo sapiens
  misc_RNA (1)...(19): siRNA sense strand
uggcaggaaugauggaaac

SEQ ID NO: 2355365 - RNA, 19 nt, Homo sapiens
  misc_RNA (1)...(19): siRNA sense strand
gcugagagguugaaggagg

SEQ ID NO: 2355366 - RNA, 19 nt, Homo sapiens
  misc_RNA (1)...(19): siRNA sense strand
cugccagcccagaguggaa

SEQ ID NO: 2355367 - RNA, 19 nt, Homo sapiens
  misc_RNA (1)...(19): siRNA sense strand
guucaccauauuagagaau

SEQ ID NO: 2355368 - RNA, 19 nt, Homo sapiens
  misc_RNA (1)...(19): siRNA sense strand
cagaugaaugugaaugaca

SEQ ID NO: 2355369 - RNA, 19 nt, Homo sapiens
  misc_RNA (1)...(19): siRNA sense strand
aggaaugauggaaaccuua

SEQ ID NO: 2355370 - RNA, 19 nt, Homo sapiens
  misc_RNA (1)...(19): siRNA sense strand
caagagaagcuuaugugga

SEQ ID NO: 2355371 - RNA, 19 nt, Homo sapiens
  misc_RNA (1)...(19): siRNA sense strand
cagacaagcgccagugcca

SEQ ID NO: 2355372 - RNA, 19 nt, Homo sapiens
  misc_RNA (1)...(19): siRNA sense strand
guuaauaguuuucgggaca

SEQ ID NO: 2355373 - RNA, 19 nt, Homo sapiens
  misc_RNA (1)...(19): siRNA sense strand
agacagaagacacgggcau

SEQ ID NO: 2355374 - RNA, 19 nt, Homo sapiens
  misc_RNA (1)...(19): siRNA sense strand
gguugaaggaggagauucu

SEQ ID NO: 2355375 - RNA, 19 nt, Homo sapiens
  misc_RNA (1)...(19): siRNA sense strand
cugauucaugagagagaua

SEQ ID NO: 2355376 - RNA, 19 nt, Homo sapiens
  misc_RNA (1)...(19): siRNA sense strand
guggcaggaaugauggaaa

SEQ ID NO: 2355377 - RNA, 19 nt, Homo sapiens
  misc_RNA (1)...(19): siRNA sense strand
gggagaaggcugagcagac

SEQ ID NO: 2355378 - RNA, 19 nt, Homo sapiens
  misc_RNA (1)...(19): siRNA sense strand
cagagauggaggaugucaa

SEQ ID NO: 2355379 - RNA, 19 nt, Homo sapiens
  misc_RNA (1)...(19): siRNA sense strand
gcugcauggcugagagguu

SEQ ID NO: 2355380 - RNA, 19 nt, Homo sapiens
  misc_RNA (1)...(19): siRNA sense strand
cggaaggauuucagcucca

SEQ ID NO: 2355381 - RNA, 19 nt, Homo sapiens
  misc_RNA (1)...(19): siRNA sense strand
ccgagaagaagcaacaaaa

SEQ ID NO: 2355382 - RNA, 19 nt, Homo sapiens
  misc_RNA (1)...(19): siRNA sense strand
cugagagguugaaggagga

SEQ ID NO: 2355383 - RNA, 19 nt, Homo sapiens
  misc_RNA (1)...(19): siRNA sense strand
agggagaggagucggccua

SEQ ID NO: 2355384 - RNA, 19 nt, Homo sapiens
  misc_RNA (1)...(19): siRNA sense strand
uaucauaggcugaaggaug

SEQ ID NO: 2355385 - RNA, 19 nt, Homo sapiens
  misc_RNA (1)...(19): siRNA sense strand
ucaccauauuagagaaucu

SEQ ID NO: 2355386 - RNA, 19 nt, Homo sapiens
  misc_RNA (1)...(19): siRNA sense strand
uggcaggaaugauggaaac

SEQ ID NO: 2355387 - RNA, 19 nt, Homo sapiens
  misc_RNA (1)...(19): siRNA sense strand
gcugagagguugaaggagg

SEQ ID NO: 2355388 - RNA, 19 nt, Homo sapiens
  misc_RNA (1)...(19): siRNA sense strand
cugccagcccagaguggaa

SEQ ID NO: 2355389 - RNA, 19 nt, Homo sapiens
  misc_RNA (1)...(19): siRNA sense strand
guucaccauauuagagaau

SEQ ID NO: 2355390 - RNA, 19 nt, Homo sapiens
  misc_RNA (1)...(19): siRNA sense strand
cagaugaaugugaaugaca

SEQ ID NO: 2355391 - RNA, 19 nt, Homo sapiens
  misc_RNA (1)...(19): siRNA sense strand
aggaaugauggaaaccuua

SEQ ID NO: 2355392 - RNA, 19 nt, Homo sapiens
  misc_RNA (1)...(19): siRNA sense strand
caagagaagcuuaugugga

SEQ ID NO: 2355393 - RNA, 19 nt, Homo sapiens
  misc_RNA (1)...(19): siRNA sense strand
cagacaagcgccagugcca

SEQ ID NO: 2355394 - RNA, 19 nt, Homo sapiens
  misc_RNA (1)...(19): siRNA sense strand
cugaagaaugugauacaau

SEQ ID NO: 2355395 - RNA, 19 nt, Homo sapiens
  misc_RNA (1)...(19): siRNA sense strand
ccagagaucagcaaggaca

SEQ ID NO: 2355396 - RNA, 19 nt, Homo sapiens
  misc_RNA (1)...(19): siRNA sense strand
cagagaucagcaaggacaa

SEQ ID NO: 2355397 - RNA, 19 nt, Homo sapiens
  misc_RNA (1)...(19): siRNA sense strand
gggagaagaaaauggcuuu

SEQ ID NO: 2355398 - RNA, 19 nt, Homo sapiens
  misc_RNA (1)...(19): siRNA sense strand
gaucauaugguaaaggaac

SEQ ID NO: 2355399 - RNA, 19 nt, Homo sapiens
  misc_RNA (1)...(19): siRNA sense strand
cugaagaaugugauacaau

SEQ ID NO: 2355400 - RNA, 19 nt, Homo sapiens
  misc_RNA (1)...(19): siRNA sense strand
ccagagaucagcaaggaca

SEQ ID NO: 2355401 - RNA, 19 nt, Homo sapiens
  misc_RNA (1)...(19): siRNA sense strand
cagagaucagcaaggacaa

SEQ ID NO: 2355402 - RNA, 19 nt, Homo sapiens
  misc_RNA (1)...(19): siRNA sense strand
gggagaagaaaauggcuuu

SEQ ID NO: 2355403 - RNA, 19 nt, Homo sapiens
  misc_RNA (1)...(19): siRNA sense strand
gaucauaugguaaaggaac

SEQ ID NO: 2355404 - RNA, 19 nt, Homo sapiens
  misc_RNA (1)...(19): siRNA sense strand
ggauaaucucaaagaguuu

SEQ ID NO: 2355405 - RNA, 19 nt, Homo sapiens
  misc_RNA (1)...(19): siRNA sense strand
gaaagaaccugaagagcca

SEQ ID NO: 2355406 - RNA, 19 nt, Homo sapiens
  misc_RNA (1)...(19): siRNA sense strand
gccugaaagccgagaacaa

SEQ ID NO: 2355407 - RNA, 19 nt, Homo sapiens
  misc_RNA (1)...(19): siRNA sense strand
ccugcagagucucgggaaa

SEQ ID NO: 2355408 - RNA, 19 nt, Homo sapiens
  misc_RNA (1)...(19): siRNA sense strand
ccaagggaaaggauggaaa

SEQ ID NO: 2355409 - RNA, 19 nt, Homo sapiens
  misc_RNA (1)...(19): siRNA sense strand
gcauacagaccgaggcaca

SEQ ID NO: 2355410 - RNA, 19 nt, Homo sapiens
  misc_RNA (1)...(19): siRNA sense strand
ccgcaguuaccgagaguuu

SEQ ID NO: 2355411 - RNA, 19 nt, Homo sapiens
  misc_RNA (1)...(19): siRNA sense strand
cagcaauggagguagcaau

SEQ ID NO: 2355412 - RNA, 19 nt, Homo sapiens
  misc_RNA (1)...(19): siRNA sense strand
agguggagguggagccgua

SEQ ID NO: 2355413 - RNA, 19 nt, Homo sapiens
  misc_RNA (1)...(19): siRNA sense strand
ccgagaguuucgaggagau

SEQ ID NO: 2355414 - RNA, 19 nt, Homo sapiens
  misc_RNA (1)...(19): siRNA sense strand
ggagaugguggaagggcau

SEQ ID NO: 2355415 - RNA, 19 nt, Homo sapiens
  misc_RNA (1)...(19): siRNA sense strand
cccugaagcagauggcaaa

SEQ ID NO: 2355416 - RNA, 19 nt, Homo sapiens
  misc_RNA (1)...(19): siRNA sense strand
gguucagaguaugaggaaa

SEQ ID NO: 2355417 - RNA, 19 nt, Homo sapiens
  misc_RNA (1)...(19): siRNA sense strand
gagaaggagcuaacagcau

SEQ ID NO: 2355418 - RNA, 19 nt, Homo sapiens
  misc_RNA (1)...(19): siRNA sense strand
gcucaagcgacucgaugaa

SEQ ID NO: 2355419 - RNA, 19 nt, Homo sapiens
  misc_RNA (1)...(19): siRNA sense strand
ggugaguggugguggcagu

SEQ ID NO: 2355420 - RNA, 19 nt, Homo sapiens
  misc_RNA (1)...(19): siRNA sense strand
guccagagauacaggcaca

SEQ ID NO: 2355421 - RNA, 19 nt, Homo sapiens
  misc_RNA (1)...(19): siRNA sense strand
ggguaaaguccugggcaca

SEQ ID NO: 2355422 - RNA, 19 nt, Homo sapiens
  misc_RNA (1)...(19): siRNA sense strand
ggcugggccuauaaagaaa

SEQ ID NO: 2355423 - RNA, 19 nt, Homo sapiens
  misc_RNA (1)...(19): siRNA sense strand
agagagagucgcacagaga

SEQ ID NO: 2355424 - RNA, 19 nt, Homo sapiens
  misc_RNA (1)...(19): siRNA sense strand
gguaaaguccugggcacaa

SEQ ID NO: 2355425 - RNA, 19 nt, Homo sapiens
  misc_RNA (1)...(19): siRNA sense strand
gcagugaugaaguggccaa

SEQ ID NO: 2355426 - RNA, 19 nt, Homo sapiens
  misc_RNA (1)...(19): siRNA sense strand
ggaaagggagucugccgaa

SEQ ID NO: 2355427 - RNA, 19 nt, Homo sapiens
  misc_RNA (1)...(19): siRNA sense strand
caccugaagaugaggauga

SEQ ID NO: 2355428 - RNA, 19 nt, Homo sapiens
  misc_RNA (1)...(19): siRNA sense strand
gccaaugaggaaugggaga

SEQ ID NO: 2355429 - RNA, 19 nt, Homo sapiens
  misc_RNA (1)...(19): siRNA sense strand
gggcaagcaaacaggagca

SEQ ID NO: 2355430 - RNA, 19 nt, Homo sapiens
  misc_RNA (1)...(19): siRNA sense strand
aguuggaucaggagaauga

SEQ ID NO: 2355431 - RNA, 19 nt, Homo sapiens
  misc_RNA (1)...(19): siRNA sense strand
augaaguggccaagauaca

SEQ ID NO: 2355432 - RNA, 19 nt, Homo sapiens
  misc_RNA (1)...(19): siRNA sense strand
ggaagaugggcgagacucu

SEQ ID NO: 2355433 - RNA, 19 nt, Homo sapiens
  misc_RNA (1)...(19): siRNA sense strand
ggguagcucucaagggcca

SEQ ID NO: 2355434 - RNA, 19 nt, Homo sapiens
  misc_RNA (1)...(19): siRNA sense strand
agggacuauucguaugaaa

SEQ ID NO: 2355435 - RNA, 19 nt, Homo sapiens
  misc_RNA (1)...(19): siRNA sense strand
ggguucagaguaugaggaa

SEQ ID NO: 2355436 - RNA, 19 nt, Homo sapiens
  misc_RNA (1)...(19): siRNA sense strand
ggccgacugccaagggaaa

SEQ ID NO: 2355437 - RNA, 19 nt, Homo sapiens
  misc_RNA (1)...(19): siRNA sense strand
ggacaaggagccuggguug

SEQ ID NO: 2355438 - RNA, 19 nt, Homo sapiens
  misc_RNA (1)...(19): siRNA sense strand
uggagaugguggaagggca

SEQ ID NO: 2355439 - RNA, 19 nt, Homo sapiens
  misc_RNA (1)...(19): siRNA sense strand
ccuuagagauccagaaacc

SEQ ID NO: 2355440 - RNA, 19 nt, Homo sapiens
  misc_RNA (1)...(19): siRNA sense strand
agggaaaggauggaaagaa

SEQ ID NO: 2355441 - RNA, 19 nt, Homo sapiens
  misc_RNA (1)...(19): siRNA sense strand
aguucagcgaugaggaaga

SEQ ID NO: 2355442 - RNA, 19 nt, Homo sapiens
  misc_RNA (1)...(19): siRNA sense strand
aaaccagaacucagaccaa

SEQ ID NO: 2355443 - RNA, 19 nt, Homo sapiens
  misc_RNA (1)...(19): siRNA sense strand
caguuuggcacuagugaca

SEQ ID NO: 2355444 - RNA, 19 nt, Homo sapiens
  misc_RNA (1)...(19): siRNA sense strand
gaaugaugaugguugggca

SEQ ID NO: 2355445 - RNA, 19 nt, Homo sapiens
  misc_RNA (1)...(19): siRNA sense strand
ucagaaacaggcagcgaga

SEQ ID NO: 2355446 - RNA, 19 nt, Homo sapiens
  misc_RNA (1)...(19): siRNA sense strand
cagcgagacccaugagagu

SEQ ID NO: 2355447 - RNA, 19 nt, Homo sapiens
  misc_RNA (1)...(19): siRNA sense strand
aagccgagaacaaaggcaa

SEQ ID NO: 2355448 - RNA, 19 nt, Homo sapiens
  misc_RNA (1)...(19): siRNA sense strand
cgaugaggaagaugggcga

SEQ ID NO: 2355449 - RNA, 19 nt, Homo sapiens
  misc_RNA (1)...(19): siRNA sense strand
cugcggaugaggaugacaa

SEQ ID NO: 2355450 - RNA, 19 nt, Homo sapiens
  misc_RNA (1)...(19): siRNA sense strand
ggacucagacuuacgccua

SEQ ID NO: 2355451 - RNA, 19 nt, Homo sapiens
  misc_RNA (1)...(19): siRNA sense strand
gcaaacaggagcaguccga

SEQ ID NO: 2355452 - RNA, 19 nt, Homo sapiens
  misc_RNA (1)...(19): siRNA sense strand
uggaagggcaucaagccua

SEQ ID NO: 2355453 - RNA, 19 nt, Homo sapiens
  misc_RNA (1)...(19): siRNA sense strand
gacaaggcugccaaggaaa

SEQ ID NO: 2355454 - RNA, 19 nt, Homo sapiens
  misc_RNA (1)...(19): siRNA sense strand
cuauucucaaagaggauaa

SEQ ID NO: 2355455 - RNA, 19 nt, Homo sapiens
  misc_RNA (1)...(19): siRNA sense strand
caguggaacuaaagccguu

SEQ ID NO: 2355456 - RNA, 19 nt, Homo sapiens
  misc_RNA (1)...(19): siRNA sense strand
cagagaaagaaccugaaga

SEQ ID NO: 2355457 - RNA, 19 nt, Homo sapiens
  misc_RNA (1)...(19): siRNA sense strand
cccaugaagagguugacua

SEQ ID NO: 2355458 - RNA, 19 nt, Homo sapiens
  misc_RNA (1)...(19): siRNA sense strand
ccgagagcguucagacagu

SEQ ID NO: 2355459 - RNA, 19 nt, Homo sapiens
  misc_RNA (1)...(19): siRNA sense strand
ggcagaguccagagauaca

SEQ ID NO: 2355460 - RNA, 19 nt, Homo sapiens
  misc_RNA (1)...(19): siRNA sense strand
gggagcagucgucguggaa

SEQ ID NO: 2355461 - RNA, 19 nt, Homo sapiens
  misc_RNA (1)...(19): siRNA sense strand
ggauaaucucaaagaguuu

SEQ ID NO: 2355462 - RNA, 19 nt, Homo sapiens
  misc_RNA (1)...(19): siRNA sense strand
gccugaaagccgagaacaa

SEQ ID NO: 2355463 - RNA, 19 nt, Homo sapiens
  misc_RNA (1)...(19): siRNA sense strand
ccaagggaaaggauggaaa

SEQ ID NO: 2355464 - RNA, 19 nt, Homo sapiens
  misc_RNA (1)...(19): siRNA sense strand
ccugcagagucucgggaaa

SEQ ID NO: 2355465 - RNA, 19 nt, Homo sapiens
  misc_RNA (1)...(19): siRNA sense strand
ccgcaguuaccgagaguuu

SEQ ID NO: 2355466 - RNA, 19 nt, Homo sapiens
  misc_RNA (1)...(19): siRNA sense strand
cagcaauggagguagcaau

SEQ ID NO: 2355467 - RNA, 19 nt, Homo sapiens
  misc_RNA (1)...(19): siRNA sense strand
agguggagguggagccgua

SEQ ID NO: 2355468 - RNA, 19 nt, Homo sapiens
  misc_RNA (1)...(19): siRNA sense strand
ccgagaguuucgaggagau

SEQ ID NO: 2355469 - RNA, 19 nt, Homo sapiens
  misc_RNA (1)...(19): siRNA sense strand
ggagaugguggaagggcau

SEQ ID NO: 2355470 - RNA, 19 nt, Homo sapiens
  misc_RNA (1)...(19): siRNA sense strand
cccugaagcagauggcaaa

SEQ ID NO: 2355471 - RNA, 19 nt, Homo sapiens
  misc_RNA (1)...(19): siRNA sense strand
gguucagaguaugaggaaa

SEQ ID NO: 2355472 - RNA, 19 nt, Homo sapiens
  misc_RNA (1)...(19): siRNA sense strand
gagaaggagcuaacagcau

SEQ ID NO: 2355473 - RNA, 19 nt, Homo sapiens
  misc_RNA (1)...(19): siRNA sense strand
gcucaagcgacucgaugaa

SEQ ID NO: 2355474 - RNA, 19 nt, Homo sapiens
  misc_RNA (1)...(19): siRNA sense strand
ggugaguggugguggcagu

SEQ ID NO: 2355475 - RNA, 19 nt, Homo sapiens
  misc_RNA (1)...(19): siRNA sense strand
guccagagauacaggcaca

SEQ ID NO: 2355476 - RNA, 19 nt, Homo sapiens
  misc_RNA (1)...(19): siRNA sense strand
ggguaaaguccugggcaca

SEQ ID NO: 2355477 - RNA, 19 nt, Homo sapiens
  misc_RNA (1)...(19): siRNA sense strand
ggcugggccuauaaagaaa

SEQ ID NO: 2355478 - RNA, 19 nt, Homo sapiens
  misc_RNA (1)...(19): siRNA sense strand
agagagagucgcacagaga

SEQ ID NO: 2355479 - RNA, 19 nt, Homo sapiens
  misc_RNA (1)...(19): siRNA sense strand
gguaaaguccugggcacaa

SEQ ID NO: 2355480 - RNA, 19 nt, Homo sapiens
  misc_RNA (1)...(19): siRNA sense strand
gcagugaugaaguggccaa

SEQ ID NO: 2355481 - RNA, 19 nt, Homo sapiens
  misc_RNA (1)...(19): siRNA sense strand
ggaaagggagucugccgaa

SEQ ID NO: 2355482 - RNA, 19 nt, Homo sapiens
  misc_RNA (1)...(19): siRNA sense strand
caccugaagaugaggauga

SEQ ID NO: 2355483 - RNA, 19 nt, Homo sapiens
  misc_RNA (1)...(19): siRNA sense strand
gccaaugaggaaugggaga

SEQ ID NO: 2355484 - RNA, 19 nt, Homo sapiens
  misc_RNA (1)...(19): siRNA sense strand
gggcaagcaaacaggagca

SEQ ID NO: 2355485 - RNA, 19 nt, Homo sapiens
  misc_RNA (1)...(19): siRNA sense strand
aguuggaucaggagaauga

SEQ ID NO: 2355486 - RNA, 19 nt, Homo sapiens
  misc_RNA (1)...(19): siRNA sense strand
augaaguggccaagauaca

SEQ ID NO: 2355487 - RNA, 19 nt, Homo sapiens
  misc_RNA (1)...(19): siRNA sense strand
ggaagaugggcgagacucu

SEQ ID NO: 2355488 - RNA, 19 nt, Homo sapiens
  misc_RNA (1)...(19): siRNA sense strand
ggguagcucucaagggcca

SEQ ID NO: 2355489 - RNA, 19 nt, Homo sapiens
  misc_RNA (1)...(19): siRNA sense strand
agggacuauucguaugaaa

SEQ ID NO: 2355490 - RNA, 19 nt, Homo sapiens
  misc_RNA (1)...(19): siRNA sense strand
ggguucagaguaugaggaa

SEQ ID NO: 2355491 - RNA, 19 nt, Homo sapiens
  misc_RNA (1)...(19): siRNA sense strand
ggccgacugccaagggaaa

SEQ ID NO: 2355492 - RNA, 19 nt, Homo sapiens
  misc_RNA (1)...(19): siRNA sense strand
ggacaaggagccuggguug

SEQ ID NO: 2355493 - RNA, 19 nt, Homo sapiens
  misc_RNA (1)...(19): siRNA sense strand
uggagaugguggaagggca

SEQ ID NO: 2355494 - RNA, 19 nt, Homo sapiens
  misc_RNA (1)...(19): siRNA sense strand
agggaaaggauggaaagaa

SEQ ID NO: 2355495 - RNA, 19 nt, Homo sapiens
  misc_RNA (1)...(19): siRNA sense strand
aguucagcgaugaggaaga

SEQ ID NO: 2355496 - RNA, 19 nt, Homo sapiens
  misc_RNA (1)...(19): siRNA sense strand
aaaccagaacucagaccaa

SEQ ID NO: 2355497 - RNA, 19 nt, Homo sapiens
  misc_RNA (1)...(19): siRNA sense strand
caguuuggcacuagugaca

SEQ ID NO: 2355498 - RNA, 19 nt, Homo sapiens
  misc_RNA (1)...(19): siRNA sense strand
gaaugaugaugguugggca

SEQ ID NO: 2355499 - RNA, 19 nt, Homo sapiens
  misc_RNA (1)...(19): siRNA sense strand
ucagaaacaggcagcgaga

SEQ ID NO: 2355500 - RNA, 19 nt, Homo sapiens
  misc_RNA (1)...(19): siRNA sense strand
cagcgagacccaugagagu

SEQ ID NO: 2355501 - RNA, 19 nt, Homo sapiens
  misc_RNA (1)...(19): siRNA sense strand
aagccgagaacaaaggcaa

SEQ ID NO: 2355502 - RNA, 19 nt, Homo sapiens
  misc_RNA (1)...(19): siRNA sense strand
cgaugaggaagaugggcga

SEQ ID NO: 2355503 - RNA, 19 nt, Homo sapiens
  misc_RNA (1)...(19): siRNA sense strand
cugcggaugaggaugacaa

SEQ ID NO: 2355504 - RNA, 19 nt, Homo sapiens
  misc_RNA (1)...(19): siRNA sense strand
ggacucagacuuacgccua

SEQ ID NO: 2355505 - RNA, 19 nt, Homo sapiens
  misc_RNA (1)...(19): siRNA sense strand
gcaaacaggagcaguccga

SEQ ID NO: 2355506 - RNA, 19 nt, Homo sapiens
  misc_RNA (1)...(19): siRNA sense strand
uggaagggcaucaagccua

SEQ ID NO: 2355507 - RNA, 19 nt, Homo sapiens
  misc_RNA (1)...(19): siRNA sense strand
gacaaggcugccaaggaaa

SEQ ID NO: 2355508 - RNA, 19 nt, Homo sapiens
  misc_RNA (1)...(19): siRNA sense strand
cuauucucaaagaggauaa

SEQ ID NO: 2355509 - RNA, 19 nt, Homo sapiens
  misc_RNA (1)...(19): siRNA sense strand
caguggaacuaaagccguu

SEQ ID NO: 2355510 - RNA, 19 nt, Homo sapiens
  misc_RNA (1)...(19): siRNA sense strand
cccaugaagagguugacua

SEQ ID NO: 2355511 - RNA, 19 nt, Homo sapiens
  misc_RNA (1)...(19): siRNA sense strand
ccgagagcguucagacagu

SEQ ID NO: 2355512 - RNA, 19 nt, Homo sapiens
  misc_RNA (1)...(19): siRNA sense strand
ggcagaguccagagauaca

SEQ ID NO: 2355513 - RNA, 19 nt, Homo sapiens
  misc_RNA (1)...(19): siRNA sense strand
gggagcagucgucguggaa

SEQ ID NO: 2355514 - RNA, 19 nt, Homo sapiens
  misc_RNA (1)...(19): siRNA sense strand
cgaaaccaguugaggagga

SEQ ID NO: 2355515 - RNA, 19 nt, Homo sapiens
  misc_RNA (1)...(19): siRNA sense strand
ggucggucgcugagaucaa

SEQ ID NO: 2355516 - RNA, 19 nt, Homo sapiens
  misc_RNA (1)...(19): siRNA sense strand
agcacaauguccaggguau

SEQ ID NO: 2355517 - RNA, 19 nt, Homo sapiens
  misc_RNA (1)...(19): siRNA sense strand
ugacagacuuucaggccca

SEQ ID NO: 2355518 - RNA, 19 nt, Homo sapiens
  misc_RNA (1)...(19): siRNA sense strand
ggggaaaugagcacagcaa

SEQ ID NO: 2355519 - RNA, 19 nt, Homo sapiens
  misc_RNA (1)...(19): siRNA sense strand
ugacaaaagaggaugcaga

SEQ ID NO: 2355520 - RNA, 19 nt, Homo sapiens
  misc_RNA (1)...(19): siRNA sense strand
ugaacaaacaguugaucca

SEQ ID NO: 2355521 - RNA, 19 nt, Homo sapiens
  misc_RNA (1)...(19): siRNA sense strand
augcagaguuagcugugaa

SEQ ID NO: 2355522 - RNA, 19 nt, Homo sapiens
  misc_RNA (1)...(19): siRNA sense strand
cagaguuagcugugaagca

SEQ ID NO: 2355523 - RNA, 19 nt, Homo sapiens
  misc_RNA (1)...(19): siRNA sense strand
ugacagaagugguggcugc

SEQ ID NO: 2355524 - RNA, 19 nt, Homo sapiens
  misc_RNA (1)...(19): siRNA sense strand
cggaagucgcugugcagaa

SEQ ID NO: 2355525 - RNA, 19 nt, Homo sapiens
  misc_RNA (1)...(19): siRNA sense strand
gugcagaagcagagaggag

SEQ ID NO: 2355526 - RNA, 19 nt, Homo sapiens
  misc_RNA (1)...(19): siRNA sense strand
cccugaagcuacaugggaa

SEQ ID NO: 2355527 - RNA, 19 nt, Homo sapiens
  misc_RNA (1)...(19): siRNA sense strand
ucuccgagcuccacgggaa

SEQ ID NO: 2355528 - RNA, 19 nt, Homo sapiens
  misc_RNA (1)...(19): siRNA sense strand
ugaacuugaccgagggauu

SEQ ID NO: 2355529 - RNA, 19 nt, Homo sapiens
  misc_RNA (1)...(19): siRNA sense strand
ccaucuuccucaacggcaa

SEQ ID NO: 2355530 - RNA, 19 nt, Homo sapiens
  misc_RNA (1)...(19): siRNA sense strand
cccacaaggccgacagcau

SEQ ID NO: 2355531 - RNA, 19 nt, Homo sapiens
  misc_RNA (1)...(19): siRNA sense strand
gagaguucuggcugggcaa

SEQ ID NO: 2355532 - RNA, 19 nt, Homo sapiens
  misc_RNA (1)...(19): siRNA sense strand
ccuucgugguccaguauga

SEQ ID NO: 2355533 - RNA, 19 nt, Homo sapiens
  misc_RNA (1)...(19): siRNA sense strand
ggaacugccacuacgccaa

SEQ ID NO: 2355534 - RNA, 19 nt, Homo sapiens
  misc_RNA (1)...(19): siRNA sense strand
gaggcuuugaggagaguga

SEQ ID NO: 2355535 - RNA, 19 nt, Homo sapiens
  misc_RNA (1)...(19): siRNA sense strand
ugaacuugaccgagggauu

SEQ ID NO: 2355536 - RNA, 19 nt, Homo sapiens
  misc_RNA (1)...(19): siRNA sense strand
ccaucuuccucaacggcaa

SEQ ID NO: 2355537 - RNA, 19 nt, Homo sapiens
  misc_RNA (1)...(19): siRNA sense strand
cccacaaggccgacagcau

SEQ ID NO: 2355538 - RNA, 19 nt, Homo sapiens
  misc_RNA (1)...(19): siRNA sense strand
gagaguucuggcugggcaa

SEQ ID NO: 2355539 - RNA, 19 nt, Homo sapiens
  misc_RNA (1)...(19): siRNA sense strand
ccuucgugguccaguauga

SEQ ID NO: 2355540 - RNA, 19 nt, Homo sapiens
  misc_RNA (1)...(19): siRNA sense strand
ggaacugccacuacgccaa

SEQ ID NO: 2355541 - RNA, 19 nt, Homo sapiens
  misc_RNA (1)...(19): siRNA sense strand
gaggcuuugaggagaguga

SEQ ID NO: 2355542 - RNA, 19 nt, Homo sapiens
  misc_RNA (1)...(19): siRNA sense strand
agaacaugauggaggugaa

SEQ ID NO: 2355543 - RNA, 19 nt, Homo sapiens
  misc_RNA (1)...(19): siRNA sense strand
cagaaaggaaacagagcau

SEQ ID NO: 2355544 - RNA, 19 nt, Homo sapiens
  misc_RNA (1)...(19): siRNA sense strand
acaugauggaggugaaauu

SEQ ID NO: 2355545 - RNA, 19 nt, Homo sapiens
  misc_RNA (1)...(19): siRNA sense strand
gcuuacaauuccagaaaau

SEQ ID NO: 2355546 - RNA, 19 nt, Homo sapiens
  misc_RNA (1)...(19): siRNA sense strand
gcaucguauuauugccaua

SEQ ID NO: 2355547 - RNA, 19 nt, Homo sapiens
  misc_RNA (1)...(19): siRNA sense strand
uaguuauggaagugugaaa

SEQ ID NO: 2355548 - RNA, 19 nt, Homo sapiens
  misc_RNA (1)...(19): siRNA sense strand
caucauuguguaagaguga

SEQ ID NO: 2355549 - RNA, 19 nt, Homo sapiens
  misc_RNA (1)...(19): siRNA sense strand
gcacaauggcuuuggaggu

SEQ ID NO: 2355550 - RNA, 19 nt, Homo sapiens
  misc_RNA (1)...(19): siRNA sense strand
guucaauuaaugaggcuau

SEQ ID NO: 2355551 - RNA, 19 nt, Homo sapiens
  misc_RNA (1)...(19): siRNA sense strand
uauuauugccauagacaga

SEQ ID NO: 2355552 - RNA, 19 nt, Homo sapiens
  misc_RNA (1)...(19): siRNA sense strand
gugcguaguauauuaacaa

SEQ ID NO: 2355553 - RNA, 19 nt, Homo sapiens
  misc_RNA (1)...(19): siRNA sense strand
ugcaaagcuuaguggccua

SEQ ID NO: 2355554 - RNA, 19 nt, Homo sapiens
  misc_RNA (1)...(19): siRNA sense strand
guuauggaagugugaaaga

SEQ ID NO: 2355555 - RNA, 19 nt, Homo sapiens
  misc_RNA (1)...(19): siRNA sense strand
cagaaaaugcugaaggcca

SEQ ID NO: 2355556 - RNA, 19 nt, Homo sapiens
  misc_RNA (1)...(19): siRNA sense strand
cacuguauuaccugggaua

SEQ ID NO: 2355557 - RNA, 19 nt, Homo sapiens
  misc_RNA (1)...(19): siRNA sense strand
acaacgacccagaaagcau

SEQ ID NO: 2355558 - RNA, 19 nt, Homo sapiens
  misc_RNA (1)...(19): siRNA sense strand
auacaauagccaggaagaa

SEQ ID NO: 2355559 - RNA, 19 nt, Homo sapiens
  misc_RNA (1)...(19): siRNA sense strand
ugacaggaacacagccuau

SEQ ID NO: 2355560 - RNA, 19 nt, Homo sapiens
  misc_RNA (1)...(19): siRNA sense strand
ugauggaaccccugacuaa

SEQ ID NO: 2355561 - RNA, 19 nt, Homo sapiens
  misc_RNA (1)...(19): siRNA sense strand
gggagguggcuguacugaa

SEQ ID NO: 2355562 - RNA, 19 nt, Homo sapiens
  misc_RNA (1)...(19): siRNA sense strand
cugggauacucauugaaau

SEQ ID NO: 2355563 - RNA, 19 nt, Homo sapiens
  misc_RNA (1)...(19): siRNA sense strand
agaacaugauggaggugaa

SEQ ID NO: 2355564 - RNA, 19 nt, Homo sapiens
  misc_RNA (1)...(19): siRNA sense strand
cagaaaggaaacagagcau

SEQ ID NO: 2355565 - RNA, 19 nt, Homo sapiens
  misc_RNA (1)...(19): siRNA sense strand
acaugauggaggugaaauu

SEQ ID NO: 2355566 - RNA, 19 nt, Homo sapiens
  misc_RNA (1)...(19): siRNA sense strand
gcuuacaauuccagaaaau

SEQ ID NO: 2355567 - RNA, 19 nt, Homo sapiens
  misc_RNA (1)...(19): siRNA sense strand
gcaucguauuauugccaua

SEQ ID NO: 2355568 - RNA, 19 nt, Homo sapiens
  misc_RNA (1)...(19): siRNA sense strand
uaguuauggaagugugaaa

SEQ ID NO: 2355569 - RNA, 19 nt, Homo sapiens
  misc_RNA (1)...(19): siRNA sense strand
caucauuguguaagaguga

SEQ ID NO: 2355570 - RNA, 19 nt, Homo sapiens
  misc_RNA (1)...(19): siRNA sense strand
gcacaauggcuuuggaggu

SEQ ID NO: 2355571 - RNA, 19 nt, Homo sapiens
  misc_RNA (1)...(19): siRNA sense strand
guucaauuaaugaggcuau

SEQ ID NO: 2355572 - RNA, 19 nt, Homo sapiens
  misc_RNA (1)...(19): siRNA sense strand
uauuauugccauagacaga

SEQ ID NO: 2355573 - RNA, 19 nt, Homo sapiens
  misc_RNA (1)...(19): siRNA sense strand
gugcguaguauauuaacaa

SEQ ID NO: 2355574 - RNA, 19 nt, Homo sapiens
  misc_RNA (1)...(19): siRNA sense strand
ugcaaagcuuaguggccua

SEQ ID NO: 2355575 - RNA, 19 nt, Homo sapiens
  misc_RNA (1)...(19): siRNA sense strand
guuauggaagugugaaaga

SEQ ID NO: 2355576 - RNA, 19 nt, Homo sapiens
  misc_RNA (1)...(19): siRNA sense strand
cagaaaaugcugaaggcca

SEQ ID NO: 2355577 - RNA, 19 nt, Homo sapiens
  misc_RNA (1)...(19): siRNA sense strand
cacuguauuaccugggaua

SEQ ID NO: 2355578 - RNA, 19 nt, Homo sapiens
  misc_RNA (1)...(19): siRNA sense strand
acaacgacccagaaagcau

SEQ ID NO: 2355579 - RNA, 19 nt, Homo sapiens
  misc_RNA (1)...(19): siRNA sense strand
auacaauagccaggaagaa

SEQ ID NO: 2355580 - RNA, 19 nt, Homo sapiens
  misc_RNA (1)...(19): siRNA sense strand
ugacaggaacacagccuau

SEQ ID NO: 2355581 - RNA, 19 nt, Homo sapiens
  misc_RNA (1)...(19): siRNA sense strand
ugauggaaccccugacuaa

SEQ ID NO: 2355582 - RNA, 19 nt, Homo sapiens
  misc_RNA (1)...(19): siRNA sense strand
gggagguggcuguacugaa

SEQ ID NO: 2355583 - RNA, 19 nt, Homo sapiens
  misc_RNA (1)...(19): siRNA sense strand
cugggauacucauugaaau

SEQ ID NO: 2355584 - RNA, 19 nt, Homo sapiens
  misc_RNA (1)...(19): siRNA sense strand
uaguagaagaccaggagaa

SEQ ID NO: 2355585 - RNA, 19 nt, Homo sapiens
  misc_RNA (1)...(19): siRNA sense strand
acuuaaaacucaagcagaa

SEQ ID NO: 2355586 - RNA, 19 nt, Homo sapiens
  misc_RNA (1)...(19): siRNA sense strand
caaaaugaugugauggaaa

SEQ ID NO: 2355587 - RNA, 19 nt, Homo sapiens
  misc_RNA (1)...(19): siRNA sense strand
gagaagagcuccaccagca

SEQ ID NO: 2355588 - RNA, 19 nt, Homo sapiens
  misc_RNA (1)...(19): siRNA sense strand
aagccaugguaaagaugaa

SEQ ID NO: 2355589 - RNA, 19 nt, Homo sapiens
  misc_RNA (1)...(19): siRNA sense strand
gugagagaaguaaggaaau

SEQ ID NO: 2355590 - RNA, 19 nt, Homo sapiens
  misc_RNA (1)...(19): siRNA sense strand
augaagaugcagucagaga

SEQ ID NO: 2355591 - RNA, 19 nt, Homo sapiens
  misc_RNA (1)...(19): siRNA sense strand
uuugaaaagccaugguaaa

SEQ ID NO: 2355592 - RNA, 19 nt, Homo sapiens
  misc_RNA (1)...(19): siRNA sense strand
ccaugguaaagaugaagaa

SEQ ID NO: 2355593 - RNA, 19 nt, Homo sapiens
  misc_RNA (1)...(19): siRNA sense strand
cugugagagaaguaaggaa

SEQ ID NO: 2355594 - RNA, 19 nt, Homo sapiens
  misc_RNA (1)...(19): siRNA sense strand
ccaaugggcugcaguggca

SEQ ID NO: 2355595 - RNA, 19 nt, Homo sapiens
  misc_RNA (1)...(19): siRNA sense strand
gcuuauuacucaacuggca

SEQ ID NO: 2355596 - RNA, 19 nt, Homo sapiens
  misc_RNA (1)...(19): siRNA sense strand
agaccaggagaaacugaaa

SEQ ID NO: 2355597 - RNA, 19 nt, Homo sapiens
  misc_RNA (1)...(19): siRNA sense strand
aagaagaggaagagaaaau

SEQ ID NO: 2355598 - RNA, 19 nt, Homo sapiens
  misc_RNA (1)...(19): siRNA sense strand
auguuaugguagauggaaa

SEQ ID NO: 2355599 - RNA, 19 nt, Homo sapiens
  misc_RNA (1)...(19): siRNA sense strand
gauaaagacacgaucgaga

SEQ ID NO: 2355600 - RNA, 19 nt, Homo sapiens
  misc_RNA (1)...(19): siRNA sense strand
cugccaauguuaugguaga

SEQ ID NO: 2355601 - RNA, 19 nt, Homo sapiens
  misc_RNA (1)...(19): siRNA sense strand
agugugugguggugggaga

SEQ ID NO: 2355602 - RNA, 19 nt, Homo sapiens
  misc_RNA (1)...(19): siRNA sense strand
uguuaugguagauggaaaa

SEQ ID NO: 2355603 - RNA, 19 nt, Homo sapiens
  misc_RNA (1)...(19): siRNA sense strand
ccaucauccuagugggaac

SEQ ID NO: 2355604 - RNA, 19 nt, Homo sapiens
  misc_RNA (1)...(19): siRNA sense strand
ugaucuuagggaugauaaa

SEQ ID NO: 2355605 - RNA, 19 nt, Homo sapiens
  misc_RNA (1)...(19): siRNA sense strand
caaugcauuuccuggagaa

SEQ ID NO: 2355606 - RNA, 19 nt, Homo sapiens
  misc_RNA (1)...(19): siRNA sense strand
ugcauuuccuggagaauau

SEQ ID NO: 2355607 - RNA, 19 nt, Homo sapiens
  misc_RNA (1)...(19): siRNA sense strand
gagaagaagcugacuccca

SEQ ID NO: 2355608 - RNA, 19 nt, Homo sapiens
  misc_RNA (1)...(19): siRNA sense strand
cugaaggagaagaagcuga

SEQ ID NO: 2355609 - RNA, 19 nt, Homo sapiens
  misc_RNA (1)...(19): siRNA sense strand
cccgugaagaagaggaaga

SEQ ID NO: 2355610 - RNA, 19 nt, Homo sapiens
  misc_RNA (1)...(19): siRNA sense strand
ccuugugaguccugcauca

SEQ ID NO: 2355611 - RNA, 19 nt, Homo sapiens
  misc_RNA (1)...(19): siRNA sense strand
uuacacaaccaaugcauuu

SEQ ID NO: 2355612 - RNA, 19 nt, Homo sapiens
  misc_RNA (1)...(19): siRNA sense strand
gggaacuaaacuugaucuu

SEQ ID NO: 2355613 - RNA, 19 nt, Homo sapiens
  misc_RNA (1)...(19): siRNA sense strand
gugcaaagugguauccuga

SEQ ID NO: 2355614 - RNA, 19 nt, Homo sapiens
  misc_RNA (1)...(19): siRNA sense strand
cgaucgagaaacugaagga

SEQ ID NO: 2355615 - RNA, 19 nt, Homo sapiens
  misc_RNA (1)...(19): siRNA sense strand
aagaagaggaagagaaaau

SEQ ID NO: 2355616 - RNA, 19 nt, Homo sapiens
  misc_RNA (1)...(19): siRNA sense strand
auguuaugguagauggaaa

SEQ ID NO: 2355617 - RNA, 19 nt, Homo sapiens
  misc_RNA (1)...(19): siRNA sense strand
gauaaagacacgaucgaga

SEQ ID NO: 2355618 - RNA, 19 nt, Homo sapiens
  misc_RNA (1)...(19): siRNA sense strand
cugccaauguuaugguaga

SEQ ID NO: 2355619 - RNA, 19 nt, Homo sapiens
  misc_RNA (1)...(19): siRNA sense strand
agugugugguggugggaga

SEQ ID NO: 2355620 - RNA, 19 nt, Homo sapiens
  misc_RNA (1)...(19): siRNA sense strand
uguuaugguagauggaaaa

SEQ ID NO: 2355621 - RNA, 19 nt, Homo sapiens
  misc_RNA (1)...(19): siRNA sense strand
ccaucauccuagugggaac

SEQ ID NO: 2355622 - RNA, 19 nt, Homo sapiens
  misc_RNA (1)...(19): siRNA sense strand
ugaucuuagggaugauaaa

SEQ ID NO: 2355623 - RNA, 19 nt, Homo sapiens
  misc_RNA (1)...(19): siRNA sense strand
caaugcauuuccuggagaa

SEQ ID NO: 2355624 - RNA, 19 nt, Homo sapiens
  misc_RNA (1)...(19): siRNA sense strand
ugcauuuccuggagaauau

SEQ ID NO: 2355625 - RNA, 19 nt, Homo sapiens
  misc_RNA (1)...(19): siRNA sense strand
gagaagaagcugacuccca

SEQ ID NO: 2355626 - RNA, 19 nt, Homo sapiens
  misc_RNA (1)...(19): siRNA sense strand
cugaaggagaagaagcuga

SEQ ID NO: 2355627 - RNA, 19 nt, Homo sapiens
  misc_RNA (1)...(19): siRNA sense strand
cccgugaagaagaggaaga

SEQ ID NO: 2355628 - RNA, 19 nt, Homo sapiens
  misc_RNA (1)...(19): siRNA sense strand
ccuugugaguccugcauca

SEQ ID NO: 2355629 - RNA, 19 nt, Homo sapiens
  misc_RNA (1)...(19): siRNA sense strand
uuacacaaccaaugcauuu

SEQ ID NO: 2355630 - RNA, 19 nt, Homo sapiens
  misc_RNA (1)...(19): siRNA sense strand
gggaacuaaacuugaucuu

SEQ ID NO: 2355631 - RNA, 19 nt, Homo sapiens
  misc_RNA (1)...(19): siRNA sense strand
gugcaaagugguauccuga

SEQ ID NO: 2355632 - RNA, 19 nt, Homo sapiens
  misc_RNA (1)...(19): siRNA sense strand
cgaucgagaaacugaagga

SEQ ID NO: 2355633 - RNA, 19 nt, Homo sapiens
  misc_RNA (1)...(19): siRNA sense strand
aagaagaggaagagaaaau

SEQ ID NO: 2355634 - RNA, 19 nt, Homo sapiens
  misc_RNA (1)...(19): siRNA sense strand
gauaaagacacgaucgaga

SEQ ID NO: 2355635 - RNA, 19 nt, Homo sapiens
  misc_RNA (1)...(19): siRNA sense strand
ccaucauccuagugggaac

SEQ ID NO: 2355636 - RNA, 19 nt, Homo sapiens
  misc_RNA (1)...(19): siRNA sense strand
ugaucuuagggaugauaaa

SEQ ID NO: 2355637 - RNA, 19 nt, Homo sapiens
  misc_RNA (1)...(19): siRNA sense strand
gagaagaagcugacuccca

SEQ ID NO: 2355638 - RNA, 19 nt, Homo sapiens
  misc_RNA (1)...(19): siRNA sense strand
cugaaggagaagaagcuga

SEQ ID NO: 2355639 - RNA, 19 nt, Homo sapiens
  misc_RNA (1)...(19): siRNA sense strand
cccgugaagaagaggaaga

SEQ ID NO: 2355640 - RNA, 19 nt, Homo sapiens
  misc_RNA (1)...(19): siRNA sense strand
ccuugugaguccugcauca

SEQ ID NO: 2355641 - RNA, 19 nt, Homo sapiens
  misc_RNA (1)...(19): siRNA sense strand
gggaacuaaacuugaucuu

SEQ ID NO: 2355642 - RNA, 19 nt, Homo sapiens
  misc_RNA (1)...(19): siRNA sense strand
gugcaaagugguauccuga

SEQ ID NO: 2355643 - RNA, 19 nt, Homo sapiens
  misc_RNA (1)...(19): siRNA sense strand
cgaucgagaaacugaagga

SEQ ID NO: 2355644 - RNA, 19 nt, Homo sapiens
  misc_RNA (1)...(19): siRNA sense strand
cugagaagcuagagggcca

SEQ ID NO: 2355645 - RNA, 19 nt, Homo sapiens
  misc_RNA (1)...(19): siRNA sense strand
acgucauauccgaggagaa

SEQ ID NO: 2355646 - RNA, 19 nt, Homo sapiens
  misc_RNA (1)...(19): siRNA sense strand
gagaaggaugagugcguca

SEQ ID NO: 2355647 - RNA, 19 nt, Homo sapiens
  misc_RNA (1)...(19): siRNA sense strand
gguacugugacgaguguau

SEQ ID NO: 2355648 - RNA, 19 nt, Homo sapiens
  misc_RNA (1)...(19): siRNA sense strand
ccaugaacaaccuggccaa

SEQ ID NO: 2355649 - RNA, 19 nt, Homo sapiens
  misc_RNA (1)...(19): siRNA sense strand
acuauaaccucgugcagga

SEQ ID NO: 2355650 - RNA, 19 nt, Homo sapiens
  misc_RNA (1)...(19): siRNA sense strand
cggcaaaaucugugaauug

SEQ ID NO: 2355651 - RNA, 19 nt, Homo sapiens
  misc_RNA (1)...(19): siRNA sense strand
cagaaaacccagaaagacu

SEQ ID NO: 2355652 - RNA, 19 nt, Homo sapiens
  misc_RNA (1)...(19): siRNA sense strand
agaaggggcugcuggggaa

SEQ ID NO: 2355653 - RNA, 19 nt, Homo sapiens
  misc_RNA (1)...(19): siRNA sense strand
gaacugaagcugcaggagu

SEQ ID NO: 2355654 - RNA, 19 nt, Homo sapiens
  misc_RNA (1)...(19): siRNA sense strand
cgucauagcaacugaggug

SEQ ID NO: 2355655 - RNA, 19 nt, Homo sapiens
  misc_RNA (1)...(19): siRNA sense strand
ugcaggaccucaaggguga

SEQ ID NO: 2355656 - RNA, 19 nt, Homo sapiens
  misc_RNA (1)...(19): siRNA sense strand
aggagaaggaugagugcgu

SEQ ID NO: 2355657 - RNA, 19 nt, Homo sapiens
  misc_RNA (1)...(19): siRNA sense strand
acucagggguggagaagca

SEQ ID NO: 2355658 - RNA, 19 nt, Homo sapiens
  misc_RNA (1)...(19): siRNA sense strand
cugagaaggcagugaccaa

SEQ ID NO: 2355659 - RNA, 19 nt, Homo sapiens
  misc_RNA (1)...(19): siRNA sense strand
aggaggaauuucaggguga

SEQ ID NO: 2355660 - RNA, 19 nt, Homo sapiens
  misc_RNA (1)...(19): siRNA sense strand
cucaagaggaccugggaga

SEQ ID NO: 2355661 - RNA, 19 nt, Homo sapiens
  misc_RNA (1)...(19): siRNA sense strand
ucauaaaucucaagaggac

SEQ ID NO: 2355662 - RNA, 19 nt, Homo sapiens
  misc_RNA (1)...(19): siRNA sense strand
cuaccauugcgcuguguaa

SEQ ID NO: 2355663 - RNA, 19 nt, Homo sapiens
  misc_RNA (1)...(19): siRNA sense strand
aggcagugaccaaggagga

SEQ ID NO: 2355664 - RNA, 19 nt, Homo sapiens
  misc_RNA (1)...(19): siRNA sense strand
acggaggcaucuuauguua

SEQ ID NO: 2355665 - RNA, 19 nt, Homo sapiens
  misc_RNA (1)...(19): siRNA sense strand
gcaccaaucuugacuucca

SEQ ID NO: 2355666 - RNA, 19 nt, Homo sapiens
  misc_RNA (1)...(19): siRNA sense strand
cagugaccaaggaggaauu

SEQ ID NO: 2355667 - RNA, 19 nt, Homo sapiens
  misc_RNA (1)...(19): siRNA sense strand
agagcaggccagaaggcaa

SEQ ID NO: 2355668 - RNA, 19 nt, Homo sapiens
  misc_RNA (1)...(19): siRNA sense strand
ucgcacagccagaagccaa

SEQ ID NO: 2355669 - RNA, 19 nt, Homo sapiens
  misc_RNA (1)...(19): siRNA sense strand
cugcggaagaagaggccau

SEQ ID NO: 2355670 - RNA, 19 nt, Homo sapiens
  misc_RNA (1)...(19): siRNA sense strand
ccucggacccucugagcau

SEQ ID NO: 2355671 - RNA, 19 nt, Homo sapiens
  misc_RNA (1)...(19): siRNA sense strand
uggcagagcuccacgggaa

SEQ ID NO: 2355672 - RNA, 19 nt, Homo sapiens
  misc_RNA (1)...(19): siRNA sense strand
ccaaaagggugaaggccaa

SEQ ID NO: 2355673 - RNA, 19 nt, Homo sapiens
  misc_RNA (1)...(19): siRNA sense strand
ggacaaacuggcagagcuc

SEQ ID NO: 2355674 - RNA, 19 nt, Homo sapiens
  misc_RNA (1)...(19): siRNA sense strand
gagcggaaggugugggaac

SEQ ID NO: 2355675 - RNA, 19 nt, Homo sapiens
  misc_RNA (1)...(19): siRNA sense strand
cguacgcggacaagggcaa

SEQ ID NO: 2355676 - RNA, 19 nt, Homo sapiens
  misc_RNA (1)...(19): siRNA sense strand
gggacaaacuggcagagcu

SEQ ID NO: 2355677 - RNA, 19 nt, Homo sapiens
  misc_RNA (1)...(19): siRNA sense strand
cuucaauggcaguuggcaa

SEQ ID NO: 2355678 - RNA, 19 nt, Homo sapiens
  misc_RNA (1)...(19): siRNA sense strand
agaauaugggcuagguuau

SEQ ID NO: 2355679 - RNA, 19 nt, Homo sapiens
  misc_RNA (1)...(19): siRNA sense strand
caacuacaucaaagggaau

SEQ ID NO: 2355680 - RNA, 19 nt, Homo sapiens
  misc_RNA (1)...(19): siRNA sense strand
ucaacuacaucaaagggaa

SEQ ID NO: 2355681 - RNA, 19 nt, Homo sapiens
  misc_RNA (1)...(19): siRNA sense strand
uaacaugacuccaguggga

SEQ ID NO: 2355682 - RNA, 19 nt, Homo sapiens
  misc_RNA (1)...(19): siRNA sense strand
gggaauauuacgauugcga

SEQ ID NO: 2355683 - RNA, 19 nt, Homo sapiens
  misc_RNA (1)...(19): siRNA sense strand
acuaaaggaaguauaccaa

SEQ ID NO: 2355684 - RNA, 19 nt, Homo sapiens
  misc_RNA (1)...(19): siRNA sense strand
ccugauuaugugcuggaaa

SEQ ID NO: 2355685 - RNA, 19 nt, Homo sapiens
  misc_RNA (1)...(19): siRNA sense strand
agcauaugguccugauuau

SEQ ID NO: 2355686 - RNA, 19 nt, Homo sapiens
  misc_RNA (1)...(19): siRNA sense strand
gguuaugacugcccagcca

SEQ ID NO: 2355687 - RNA, 19 nt, Homo sapiens
  misc_RNA (1)...(19): siRNA sense strand
acaugacuccagugggaau

SEQ ID NO: 2355688 - RNA, 19 nt, Homo sapiens
  misc_RNA (1)...(19): siRNA sense strand
cggaaugugcaaaguagca

SEQ ID NO: 2355689 - RNA, 19 nt, Homo sapiens
  misc_RNA (1)...(19): siRNA sense strand
ccuccaaagucaugaccgu

SEQ ID NO: 2355690 - RNA, 19 nt, Homo sapiens
  misc_RNA (1)...(19): siRNA sense strand
ggauggcauacaagaugaa

SEQ ID NO: 2355691 - RNA, 19 nt, Homo sapiens
  misc_RNA (1)...(19): siRNA sense strand
ggagaaagccugagcgauc

SEQ ID NO: 2355692 - RNA, 19 nt, Homo sapiens
  misc_RNA (1)...(19): siRNA sense strand
agcaaguggugguaggaaa

SEQ ID NO: 2355693 - RNA, 19 nt, Homo sapiens
  misc_RNA (1)...(19): siRNA sense strand
gugcaagucuacuggccua

SEQ ID NO: 2355694 - RNA, 19 nt, Homo sapiens
  misc_RNA (1)...(19): siRNA sense strand
auaaauucccuauggacaa

SEQ ID NO: 2355695 - RNA, 19 nt, Homo sapiens
  misc_RNA (1)...(19): siRNA sense strand
cagauggaacggugcggua

SEQ ID NO: 2355696 - RNA, 19 nt, Homo sapiens
  misc_RNA (1)...(19): siRNA sense strand
acaacaaugacaagagcga

SEQ ID NO: 2355697 - RNA, 19 nt, Homo sapiens
  misc_RNA (1)...(19): siRNA sense strand
accuggugguagagagcua

SEQ ID NO: 2355698 - RNA, 19 nt, Homo sapiens
  misc_RNA (1)...(19): siRNA sense strand
cuauuuaugucacgagcau

SEQ ID NO: 2355699 - RNA, 19 nt, Homo sapiens
  misc_RNA (1)...(19): siRNA sense strand
ugaacuugacccuggacua

SEQ ID NO: 2355700 - RNA, 19 nt, Homo sapiens
  misc_RNA (1)...(19): siRNA sense strand
cacuauuaccucuuggaua

SEQ ID NO: 2355701 - RNA, 19 nt, Homo sapiens
  misc_RNA (1)...(19): siRNA sense strand
ccuuaaugaugaugagcuc

SEQ ID NO: 2355702 - RNA, 19 nt, Homo sapiens
  misc_RNA (1)...(19): siRNA sense strand
augaugugacuguggagaa

SEQ ID NO: 2355703 - RNA, 19 nt, Homo sapiens
  misc_RNA (1)...(19): siRNA sense strand
caugagaaguugugggucc

SEQ ID NO: 2355704 - RNA, 19 nt, Homo sapiens
  misc_RNA (1)...(19): siRNA sense strand
cgguugaagacaucauauu

SEQ ID NO: 2355705 - RNA, 19 nt, Homo sapiens
  misc_RNA (1)...(19): siRNA sense strand
cugggaaggacgauuacua

SEQ ID NO: 2355706 - RNA, 19 nt, Homo sapiens
  misc_RNA (1)...(19): siRNA sense strand
gcaaguggugguaggaaac

SEQ ID NO: 2355707 - RNA, 19 nt, Homo sapiens
  misc_RNA (1)...(19): siRNA sense strand
uggcgagaagggugugcaa

SEQ ID NO: 2355708 - RNA, 19 nt, Homo sapiens
  misc_RNA (1)...(19): siRNA sense strand
caggagaggauguggaaaa

SEQ ID NO: 2355709 - RNA, 19 nt, Homo sapiens
  misc_RNA (1)...(19): siRNA sense strand
ggaagaaggaggagaggcu

SEQ ID NO: 2355710 - RNA, 19 nt, Homo sapiens
  misc_RNA (1)...(19): siRNA sense strand
ggaucugaacaacgagaaa

SEQ ID NO: 2355711 - RNA, 19 nt, Homo sapiens
  misc_RNA (1)...(19): siRNA sense strand
aggaagagaagaagcguga

SEQ ID NO: 2355712 - RNA, 19 nt, Homo sapiens
  misc_RNA (1)...(19): siRNA sense strand
gcuucgaggaucugaacaa

SEQ ID NO: 2355713 - RNA, 19 nt, Homo sapiens
  misc_RNA (1)...(19): siRNA sense strand
ugacaguagcccugagaca

SEQ ID NO: 2355714 - RNA, 19 nt, Homo sapiens
  misc_RNA (1)...(19): siRNA sense strand
aggagaagcuagacgagga

SEQ ID NO: 2355715 - RNA, 19 nt, Homo sapiens
  misc_RNA (1)...(19): siRNA sense strand
agcuagagcgagacgaaua

SEQ ID NO: 2355716 - RNA, 19 nt, Homo sapiens
  misc_RNA (1)...(19): siRNA sense strand
aggaggagaggcugcgaaa

SEQ ID NO: 2355717 - RNA, 19 nt, Homo sapiens
  misc_RNA (1)...(19): siRNA sense strand
gcaaacaggaggagaggcu

SEQ ID NO: 2355718 - RNA, 19 nt, Homo sapiens
  misc_RNA (1)...(19): siRNA sense strand
guaaaggagcugcaggaga

SEQ ID NO: 2355719 - RNA, 19 nt, Homo sapiens
  misc_RNA (1)...(19): siRNA sense strand
gaagaagaguccaaggauc

SEQ ID NO: 2355720 - RNA, 19 nt, Homo sapiens
  misc_RNA (1)...(19): siRNA sense strand
aagcacaaauggagcgguu

SEQ ID NO: 2355721 - RNA, 19 nt, Homo sapiens
  misc_RNA (1)...(19): siRNA sense strand
gaaaggaggaggagaggcu

SEQ ID NO: 2355722 - RNA, 19 nt, Homo sapiens
  misc_RNA (1)...(19): siRNA sense strand
aguuggagcagcaaguaaa

SEQ ID NO: 2355723 - RNA, 19 nt, Homo sapiens
  misc_RNA (1)...(19): siRNA sense strand
ccagcuagagcgagacgaa

SEQ ID NO: 2355724 - RNA, 19 nt, Homo sapiens
  misc_RNA (1)...(19): siRNA sense strand
aaucauugaaacagcagaa

SEQ ID NO: 2355725 - RNA, 19 nt, Homo sapiens
  misc_RNA (1)...(19): siRNA sense strand
ggagcagaggcuacgcaaa

SEQ ID NO: 2355726 - RNA, 19 nt, Homo sapiens
  misc_RNA (1)...(19): siRNA sense strand
aaggaagagcccugguauu

SEQ ID NO: 2355727 - RNA, 19 nt, Homo sapiens
  misc_RNA (1)...(19): siRNA sense strand
caguuggagcagcaaguaa

SEQ ID NO: 2355728 - RNA, 19 nt, Homo sapiens
  misc_RNA (1)...(19): siRNA sense strand
aaguccagcuagagcgaga

SEQ ID NO: 2355729 - RNA, 19 nt, Homo sapiens
  misc_RNA (1)...(19): siRNA sense strand
ggcaggagguggaaggucu

SEQ ID NO: 2355730 - RNA, 19 nt, Homo sapiens
  misc_RNA (1)...(19): siRNA sense strand
aaguaaaggagcugcagga

SEQ ID NO: 2355731 - RNA, 19 nt, Homo sapiens
  misc_RNA (1)...(19): siRNA sense strand
gaacaaaacgagaggcuuc

SEQ ID NO: 2355732 - RNA, 19 nt, Homo sapiens
  misc_RNA (1)...(19): siRNA sense strand
agggugagaggcugcgaaa

SEQ ID NO: 2355733 - RNA, 19 nt, Homo sapiens
  misc_RNA (1)...(19): siRNA sense strand
ccaugauguuagaagaauc

SEQ ID NO: 2355734 - RNA, 19 nt, Homo sapiens
  misc_RNA (1)...(19): siRNA sense strand
gaagaagcaaagaaaacaa

SEQ ID NO: 2355735 - RNA, 19 nt, Homo sapiens
  misc_RNA (1)...(19): siRNA sense strand
gguggaaggucuggaggga

SEQ ID NO: 2355736 - RNA, 19 nt, Homo sapiens
  misc_RNA (1)...(19): siRNA sense strand
agcaggaggugcagagagu

SEQ ID NO: 2355737 - RNA, 19 nt, Homo sapiens
  misc_RNA (1)...(19): siRNA sense strand
cgcuacaggagcaggguga

SEQ ID NO: 2355738 - RNA, 19 nt, Homo sapiens
  misc_RNA (1)...(19): siRNA sense strand
aguggagagacgagagcuu

SEQ ID NO: 2355739 - RNA, 19 nt, Homo sapiens
  misc_RNA (1)...(19): siRNA sense strand
uggaaaaggcagacuugaa

SEQ ID NO: 2355740 - RNA, 19 nt, Homo sapiens
  misc_RNA (1)...(19): siRNA sense strand
acgaauaugcuaaacacau

SEQ ID NO: 2355741 - RNA, 19 nt, Homo sapiens
  misc_RNA (1)...(19): siRNA sense strand
agcuacaagaugaggccaa

SEQ ID NO: 2355742 - RNA, 19 nt, Homo sapiens
  misc_RNA (1)...(19): siRNA sense strand
aggccaaacaccugaggca

SEQ ID NO: 2355743 - RNA, 19 nt, Homo sapiens
  misc_RNA (1)...(19): siRNA sense strand
agaagacgcuacaggagca

SEQ ID NO: 2355744 - RNA, 19 nt, Homo sapiens
  misc_RNA (1)...(19): siRNA sense strand
uggagcgguuagagacaau

SEQ ID NO: 2355745 - RNA, 19 nt, Homo sapiens
  misc_RNA (1)...(19): siRNA sense strand
gcgugacauacaucggaua

SEQ ID NO: 2355746 - RNA, 19 nt, Homo sapiens
  misc_RNA (1)...(19): siRNA sense strand
cuuacagcguauucaagaa

SEQ ID NO: 2355747 - RNA, 19 nt, Homo sapiens
  misc_RNA (1)...(19): siRNA sense strand
aggagauggaggacaacau

SEQ ID NO: 2355748 - RNA, 19 nt, Homo sapiens
  misc_RNA (1)...(19): siRNA sense strand
uggaagaagcaaagaaaac

SEQ ID NO: 2355749 - RNA, 19 nt, Homo sapiens
  misc_RNA (1)...(19): siRNA sense strand
cagcaaaggaagagcccug

SEQ ID NO: 2355750 - RNA, 19 nt, Homo sapiens
  misc_RNA (1)...(19): siRNA sense strand
aggaggagaggcuguggaa

SEQ ID NO: 2355751 - RNA, 19 nt, Homo sapiens
  misc_RNA (1)...(19): siRNA sense strand
gggaagaguuggaagguga

SEQ ID NO: 2355752 - RNA, 19 nt, Homo sapiens
  misc_RNA (1)...(19): siRNA sense strand
ucgaaauguccaugagaaa

SEQ ID NO: 2355753 - RNA, 19 nt, Homo sapiens
  misc_RNA (1)...(19): siRNA sense strand
cugcagaagugucaggaga

SEQ ID NO: 2355754 - RNA, 19 nt, Homo sapiens
  misc_RNA (1)...(19): siRNA sense strand
cagcaauguucuccgaaaa

SEQ ID NO: 2355755 - RNA, 19 nt, Homo sapiens
  misc_RNA (1)...(19): siRNA sense strand
acaacuuugaugugacuaa

SEQ ID NO: 2355756 - RNA, 19 nt, Homo sapiens
  misc_RNA (1)...(19): siRNA sense strand
cugacgaggcccugcagaa

SEQ ID NO: 2355757 - RNA, 19 nt, Homo sapiens
  misc_RNA (1)...(19): siRNA sense strand
gauacuauguuacaggaga

SEQ ID NO: 2355758 - RNA, 19 nt, Homo sapiens
  misc_RNA (1)...(19): siRNA sense strand
ucggaagauugcucagaau

SEQ ID NO: 2355759 - RNA, 19 nt, Homo sapiens
  misc_RNA (1)...(19): siRNA sense strand
guggacaaauacaagguga

SEQ ID NO: 2355760 - RNA, 19 nt, Homo sapiens
  misc_RNA (1)...(19): siRNA sense strand
gcgcacagucuaugggaac

SEQ ID NO: 2355761 - RNA, 19 nt, Homo sapiens
  misc_RNA (1)...(19): siRNA sense strand
auacuauguuacaggagau

SEQ ID NO: 2355762 - RNA, 19 nt, Homo sapiens
  misc_RNA (1)...(19): siRNA sense strand
gcagauuagagaaaagauu

SEQ ID NO: 2355763 - RNA, 19 nt, Homo sapiens
  misc_RNA (1)...(19): siRNA sense strand
aaucaugaggcgagugcuu

SEQ ID NO: 2355764 - RNA, 19 nt, Homo sapiens
  misc_RNA (1)...(19): siRNA sense strand
uguuaggcacaguggguga

SEQ ID NO: 2355765 - RNA, 19 nt, Homo sapiens
  misc_RNA (1)...(19): siRNA sense strand
gccuaugaucccagagcuu

SEQ ID NO: 2355766 - RNA, 19 nt, Homo sapiens
  misc_RNA (1)...(19): siRNA sense strand
cagcagagguggagucagc

SEQ ID NO: 2355767 - RNA, 19 nt, Homo sapiens
  misc_RNA (1)...(19): siRNA sense strand
ggagacauugccaaggaau

SEQ ID NO: 2355768 - RNA, 19 nt, Homo sapiens
  misc_RNA (1)...(19): siRNA sense strand
gggaugagugugagcccga

SEQ ID NO: 2355769 - RNA, 19 nt, Homo sapiens
  misc_RNA (1)...(19): siRNA sense strand
ugaaggagcuggcugacga

SEQ ID NO: 2355770 - RNA, 19 nt, Homo sapiens
  misc_RNA (1)...(19): siRNA sense strand
ugcagaagugucaggagaa

SEQ ID NO: 2355771 - RNA, 19 nt, Homo sapiens
  misc_RNA (1)...(19): siRNA sense strand
gggaagaguuggaagguga

SEQ ID NO: 2355772 - RNA, 19 nt, Homo sapiens
  misc_RNA (1)...(19): siRNA sense strand
ucgaaauguccaugagaaa

SEQ ID NO: 2355773 - RNA, 19 nt, Homo sapiens
  misc_RNA (1)...(19): siRNA sense strand
cugcagaagugucaggaga

SEQ ID NO: 2355774 - RNA, 19 nt, Homo sapiens
  misc_RNA (1)...(19): siRNA sense strand
cagcaauguucuccgaaaa

SEQ ID NO: 2355775 - RNA, 19 nt, Homo sapiens
  misc_RNA (1)...(19): siRNA sense strand
cugacgaggcccugcagaa

SEQ ID NO: 2355776 - RNA, 19 nt, Homo sapiens
  misc_RNA (1)...(19): siRNA sense strand
gauacuauguuacaggaga

SEQ ID NO: 2355777 - RNA, 19 nt, Homo sapiens
  misc_RNA (1)...(19): siRNA sense strand
ucggaagauugcucagaau

SEQ ID NO: 2355778 - RNA, 19 nt, Homo sapiens
  misc_RNA (1)...(19): siRNA sense strand
guggacaaauacaagguga

SEQ ID NO: 2355779 - RNA, 19 nt, Homo sapiens
  misc_RNA (1)...(19): siRNA sense strand
gcgcacagucuaugggaac

SEQ ID NO: 2355780 - RNA, 19 nt, Homo sapiens
  misc_RNA (1)...(19): siRNA sense strand
auacuauguuacaggagau

SEQ ID NO: 2355781 - RNA, 19 nt, Homo sapiens
  misc_RNA (1)...(19): siRNA sense strand
gcagauuagagaaaagauu

SEQ ID NO: 2355782 - RNA, 19 nt, Homo sapiens
  misc_RNA (1)...(19): siRNA sense strand
aaucaugaggcgagugcuu

SEQ ID NO: 2355783 - RNA, 19 nt, Homo sapiens
  misc_RNA (1)...(19): siRNA sense strand
uguuaggcacaguggguga

SEQ ID NO: 2355784 - RNA, 19 nt, Homo sapiens
  misc_RNA (1)...(19): siRNA sense strand
gccuaugaucccagagcuu

SEQ ID NO: 2355785 - RNA, 19 nt, Homo sapiens
  misc_RNA (1)...(19): siRNA sense strand
cagcagagguggagucagc

SEQ ID NO: 2355786 - RNA, 19 nt, Homo sapiens
  misc_RNA (1)...(19): siRNA sense strand
gggaugagugugagcccga

SEQ ID NO: 2355787 - RNA, 19 nt, Homo sapiens
  misc_RNA (1)...(19): siRNA sense strand
ugaaggagcuggcugacga

SEQ ID NO: 2355788 - RNA, 19 nt, Homo sapiens
  misc_RNA (1)...(19): siRNA sense strand
ugcagaagugucaggagaa

SEQ ID NO: 2355789 - RNA, 19 nt, Homo sapiens
  misc_RNA (1)...(19): siRNA sense strand
aggaggaggaggaggaaga

SEQ ID NO: 2355790 - RNA, 19 nt, Homo sapiens
  misc_RNA (1)...(19): siRNA sense strand
ggaagauuguagaggagga

SEQ ID NO: 2355791 - RNA, 19 nt, Homo sapiens
  misc_RNA (1)...(19): siRNA sense strand
gaggaagaggucagggcaa

SEQ ID NO: 2355792 - RNA, 19 nt, Homo sapiens
  misc_RNA (1)...(19): siRNA sense strand
gggaacaggaggaggagga

SEQ ID NO: 2355793 - RNA, 19 nt, Homo sapiens
  misc_RNA (1)...(19): siRNA sense strand
ggucagggcaagagagcca

SEQ ID NO: 2355794 - RNA, 19 nt, Homo sapiens
  misc_RNA (1)...(19): siRNA sense strand
cggcugaggcugaaggaga

SEQ ID NO: 2355795 - RNA, 19 nt, Homo sapiens
  misc_RNA (1)...(19): siRNA sense strand
ugugaaagcacuagggcau

SEQ ID NO: 2355796 - RNA, 19 nt, Homo sapiens
  misc_RNA (1)...(19): siRNA sense strand
gggagagcuuugagggcca

SEQ ID NO: 2355797 - RNA, 19 nt, Homo sapiens
  misc_RNA (1)...(19): siRNA sense strand
aggugguagugguggagaa

SEQ ID NO: 2355798 - RNA, 19 nt, Homo sapiens
  misc_RNA (1)...(19): siRNA sense strand
agggaagaggccagggcaa

SEQ ID NO: 2355799 - RNA, 19 nt, Homo sapiens
  misc_RNA (1)...(19): siRNA sense strand
cuuggaggccagaaagaaa

SEQ ID NO: 2355800 - RNA, 19 nt, Homo sapiens
  misc_RNA (1)...(19): siRNA sense strand
ccaaggagacugagccaga

SEQ ID NO: 2355801 - RNA, 19 nt, Homo sapiens
  misc_RNA (1)...(19): siRNA sense strand
cuggacaaccucaggcaaa

SEQ ID NO: 2355802 - RNA, 19 nt, Homo sapiens
  misc_RNA (1)...(19): siRNA sense strand
ggauggaagagcugguaca

SEQ ID NO: 2355803 - RNA, 19 nt, Homo sapiens
  misc_RNA (1)...(19): siRNA sense strand
agagaggaggccaggacaa

SEQ ID NO: 2355804 - RNA, 19 nt, Homo sapiens
  misc_RNA (1)...(19): siRNA sense strand
agagcaugcaggugggcaa

SEQ ID NO: 2355805 - RNA, 19 nt, Homo sapiens
  misc_RNA (1)...(19): siRNA sense strand
gcaaagaggagcaggagag

SEQ ID NO: 2355806 - RNA, 19 nt, Homo sapiens
  misc_RNA (1)...(19): siRNA sense strand
gagaagaggugguaguggu

SEQ ID NO: 2355807 - RNA, 19 nt, Homo sapiens
  misc_RNA (1)...(19): siRNA sense strand
agguggagcucaugggagu

SEQ ID NO: 2355808 - RNA, 19 nt, Homo sapiens
  misc_RNA (1)...(19): siRNA sense strand
gaggaaauacucaggagga

SEQ ID NO: 2355809 - RNA, 19 nt, Homo sapiens
  misc_RNA (1)...(19): siRNA sense strand
ggaaaggagaagagguggu

SEQ ID NO: 2355810 - RNA, 19 nt, Homo sapiens
  misc_RNA (1)...(19): siRNA sense strand
uuggauggcaggagagaga

SEQ ID NO: 2355811 - RNA, 19 nt, Homo sapiens
  misc_RNA (1)...(19): siRNA sense strand
caggcaaagaggaggcuga

SEQ ID NO: 2355812 - RNA, 19 nt, Homo sapiens
  misc_RNA (1)...(19): siRNA sense strand
ugaaagaacagaagaggcu

SEQ ID NO: 2355813 - RNA, 19 nt, Homo sapiens
  misc_RNA (1)...(19): siRNA sense strand
gaacagaagaggcugcuga

SEQ ID NO: 2355814 - RNA, 19 nt, Homo sapiens
  misc_RNA (1)...(19): siRNA sense strand
gagagagaacagagggaag

SEQ ID NO: 2355815 - RNA, 19 nt, Homo sapiens
  misc_RNA (1)...(19): siRNA sense strand
gcuuugagggccagguaga

SEQ ID NO: 2355816 - RNA, 19 nt, Homo sapiens
  misc_RNA (1)...(19): siRNA sense strand
aggaaauacucaggaggau

SEQ ID NO: 2355817 - RNA, 19 nt, Homo sapiens
  misc_RNA (1)...(19): siRNA sense strand
cgucacugggagaggccua

SEQ ID NO: 2355818 - RNA, 19 nt, Homo sapiens
  misc_RNA (1)...(19): siRNA sense strand
gcugggaacaggaggagga

SEQ ID NO: 2355819 - RNA, 19 nt, Homo sapiens
  misc_RNA (1)...(19): siRNA sense strand
guggaacugaggagggaga

SEQ ID NO: 2355820 - RNA, 19 nt, Homo sapiens
  misc_RNA (1)...(19): siRNA sense strand
gggagaggccuaugccaga

SEQ ID NO: 2355821 - RNA, 19 nt, Homo sapiens
  misc_RNA (1)...(19): siRNA sense strand
ggaagaggcagcagcagga

SEQ ID NO: 2355822 - RNA, 19 nt, Homo sapiens
  misc_RNA (1)...(19): siRNA sense strand
augaggaggcggaggcuga

SEQ ID NO: 2355823 - RNA, 19 nt, Homo sapiens
  misc_RNA (1)...(19): siRNA sense strand
aggaggaagcccaggagga

SEQ ID NO: 2355824 - RNA, 19 nt, Homo sapiens
  misc_RNA (1)...(19): siRNA sense strand
agaaagaaauccaaggcag

SEQ ID NO: 2355825 - RNA, 19 nt, Homo sapiens
  misc_RNA (1)...(19): siRNA sense strand
ggaagaggugacuggcaga

SEQ ID NO: 2355826 - RNA, 19 nt, Homo sapiens
  misc_RNA (1)...(19): siRNA sense strand
ggucccaagcagagaggca

SEQ ID NO: 2355827 - RNA, 19 nt, Homo sapiens
  misc_RNA (1)...(19): siRNA sense strand
ccagacuagcuguggccua

SEQ ID NO: 2355828 - RNA, 19 nt, Homo sapiens
  misc_RNA (1)...(19): siRNA sense strand
cgagaaaggacauggagag

SEQ ID NO: 2355829 - RNA, 19 nt, Homo sapiens
  misc_RNA (1)...(19): siRNA sense strand
cagggaagauuguagagga

SEQ ID NO: 2355830 - RNA, 19 nt, Homo sapiens
  misc_RNA (1)...(19): siRNA sense strand
gggcacugaaagaacagaa

SEQ ID NO: 2355831 - RNA, 19 nt, Homo sapiens
  misc_RNA (1)...(19): siRNA sense strand
gaaaggacauggagagagg

SEQ ID NO: 2355832 - RNA, 19 nt, Homo sapiens
  misc_RNA (1)...(19): siRNA sense strand
agagaagagaggcugagaa

SEQ ID NO: 2355833 - RNA, 19 nt, Homo sapiens
  misc_RNA (1)...(19): siRNA sense strand
aggcugaccugcugggagu

SEQ ID NO: 2355834 - RNA, 19 nt, Homo sapiens
  misc_RNA (1)...(19): siRNA sense strand
gaggagagagggagcagca

SEQ ID NO: 2355835 - RNA, 19 nt, Homo sapiens
  misc_RNA (1)...(19): siRNA sense strand
acgagaaaggacauggaga

SEQ ID NO: 2355836 - RNA, 19 nt, Homo sapiens
  misc_RNA (1)...(19): siRNA sense strand
gggcaagagagccagggau

SEQ ID NO: 2355837 - RNA, 19 nt, Homo sapiens
  misc_RNA (1)...(19): siRNA sense strand
ggaggcagaugcaggggaa

SEQ ID NO: 2355838 - RNA, 19 nt, Homo sapiens
  misc_RNA (1)...(19): siRNA sense strand
cagcagaggaagaggugac

SEQ ID NO: 2355839 - RNA, 19 nt, Homo sapiens
  misc_RNA (1)...(19): siRNA sense strand
gcagagggucucaugguga

SEQ ID NO: 2355840 - RNA, 19 nt, Homo sapiens
  misc_RNA (1)...(19): siRNA sense strand
gcagggauccaguggcuga

SEQ ID NO: 2355841 - RNA, 19 nt, Homo sapiens
  misc_RNA (1)...(19): siRNA sense strand
aaggacauggagagaggaa

SEQ ID NO: 2355842 - RNA, 19 nt, Homo sapiens
  misc_RNA (1)...(19): siRNA sense strand
ggccuaugccagagaaacu

SEQ ID NO: 2355843 - RNA, 19 nt, Homo sapiens
  misc_RNA (1)...(19): siRNA sense strand
ggcagcagcaggagagcau

SEQ ID NO: 2355844 - RNA, 19 nt, Homo sapiens
  misc_RNA (1)...(19): siRNA sense strand
ggagagagaacagagggaa

SEQ ID NO: 2355845 - RNA, 19 nt, Homo sapiens
  misc_RNA (1)...(19): siRNA sense strand
acucgaaagaaaaggaaga

SEQ ID NO: 2355846 - RNA, 19 nt, Homo sapiens
  misc_RNA (1)...(19): siRNA sense strand
cgaggaaucugcaggcgca

SEQ ID NO: 2355847 - RNA, 19 nt, Homo sapiens
  misc_RNA (1)...(19): siRNA sense strand
aagaagaggcuguuggaug

SEQ ID NO: 2355848 - RNA, 19 nt, Homo sapiens
  misc_RNA (1)...(19): siRNA sense strand
aaggagaagaggugguagu

SEQ ID NO: 2355849 - RNA, 19 nt, Homo sapiens
  misc_RNA (1)...(19): siRNA sense strand
gaguucuggcccugagcaa

SEQ ID NO: 2355850 - RNA, 19 nt, Homo sapiens
  misc_RNA (1)...(19): siRNA sense strand
aggagagagaacagaggga

SEQ ID NO: 2355851 - RNA, 19 nt, Homo sapiens
  misc_RNA (1)...(19): siRNA sense strand
ggcaagagagccagggaug

SEQ ID NO: 2355852 - RNA, 19 nt, Homo sapiens
  misc_RNA (1)...(19): siRNA sense strand
gcaaagaggaggcugaccu

SEQ ID NO: 2355853 - RNA, 19 nt, Homo sapiens
  misc_RNA (1)...(19): siRNA sense strand
uggagaggcugaaggcacu

SEQ ID NO: 2355854 - RNA, 19 nt, Homo sapiens
  misc_RNA (1)...(19): siRNA sense strand
aggaggaggaggaggaaga

SEQ ID NO: 2355855 - RNA, 19 nt, Homo sapiens
  misc_RNA (1)...(19): siRNA sense strand
ggaagauuguagaggagga

SEQ ID NO: 2355856 - RNA, 19 nt, Homo sapiens
  misc_RNA (1)...(19): siRNA sense strand
gaggaagaggucagggcaa

SEQ ID NO: 2355857 - RNA, 19 nt, Homo sapiens
  misc_RNA (1)...(19): siRNA sense strand
gggaacaggaggaggagga

SEQ ID NO: 2355858 - RNA, 19 nt, Homo sapiens
  misc_RNA (1)...(19): siRNA sense strand
ggucagggcaagagagcca

SEQ ID NO: 2355859 - RNA, 19 nt, Homo sapiens
  misc_RNA (1)...(19): siRNA sense strand
cggcugaggcugaaggaga

SEQ ID NO: 2355860 - RNA, 19 nt, Homo sapiens
  misc_RNA (1)...(19): siRNA sense strand
ugugaaagcacuagggcau

SEQ ID NO: 2355861 - RNA, 19 nt, Homo sapiens
  misc_RNA (1)...(19): siRNA sense strand
gggagagcuuugagggcca

SEQ ID NO: 2355862 - RNA, 19 nt, Homo sapiens
  misc_RNA (1)...(19): siRNA sense strand
aggugguagugguggagaa

SEQ ID NO: 2355863 - RNA, 19 nt, Homo sapiens
  misc_RNA (1)...(19): siRNA sense strand
agggaagaggccagggcaa

SEQ ID NO: 2355864 - RNA, 19 nt, Homo sapiens
  misc_RNA (1)...(19): siRNA sense strand
cuuggaggccagaaagaaa

SEQ ID NO: 2355865 - RNA, 19 nt, Homo sapiens
  misc_RNA (1)...(19): siRNA sense strand
ccaaggagacugagccaga

SEQ ID NO: 2355866 - RNA, 19 nt, Homo sapiens
  misc_RNA (1)...(19): siRNA sense strand
cuggacaaccucaggcaaa

SEQ ID NO: 2355867 - RNA, 19 nt, Homo sapiens
  misc_RNA (1)...(19): siRNA sense strand
ggauggaagagcugguaca

SEQ ID NO: 2355868 - RNA, 19 nt, Homo sapiens
  misc_RNA (1)...(19): siRNA sense strand
agagaggaggccaggacaa

SEQ ID NO: 2355869 - RNA, 19 nt, Homo sapiens
  misc_RNA (1)...(19): siRNA sense strand
agagcaugcaggugggcaa

SEQ ID NO: 2355870 - RNA, 19 nt, Homo sapiens
  misc_RNA (1)...(19): siRNA sense strand
gcaaagaggagcaggagag

SEQ ID NO: 2355871 - RNA, 19 nt, Homo sapiens
  misc_RNA (1)...(19): siRNA sense strand
gagaagaggugguaguggu

SEQ ID NO: 2355872 - RNA, 19 nt, Homo sapiens
  misc_RNA (1)...(19): siRNA sense strand
agguggagcucaugggagu

SEQ ID NO: 2355873 - RNA, 19 nt, Homo sapiens
  misc_RNA (1)...(19): siRNA sense strand
gaggaaauacucaggagga

SEQ ID NO: 2355874 - RNA, 19 nt, Homo sapiens
  misc_RNA (1)...(19): siRNA sense strand
ggaaaggagaagagguggu

SEQ ID NO: 2355875 - RNA, 19 nt, Homo sapiens
  misc_RNA (1)...(19): siRNA sense strand
uuggauggcaggagagaga

SEQ ID NO: 2355876 - RNA, 19 nt, Homo sapiens
  misc_RNA (1)...(19): siRNA sense strand
caggcaaagaggaggcuga

SEQ ID NO: 2355877 - RNA, 19 nt, Homo sapiens
  misc_RNA (1)...(19): siRNA sense strand
ugaaagaacagaagaggcu

SEQ ID NO: 2355878 - RNA, 19 nt, Homo sapiens
  misc_RNA (1)...(19): siRNA sense strand
gaacagaagaggcugcuga

SEQ ID NO: 2355879 - RNA, 19 nt, Homo sapiens
  misc_RNA (1)...(19): siRNA sense strand
gagagagaacagagggaag

SEQ ID NO: 2355880 - RNA, 19 nt, Homo sapiens
  misc_RNA (1)...(19): siRNA sense strand
gcuuugagggccagguaga

SEQ ID NO: 2355881 - RNA, 19 nt, Homo sapiens
  misc_RNA (1)...(19): siRNA sense strand
aggaaauacucaggaggau

SEQ ID NO: 2355882 - RNA, 19 nt, Homo sapiens
  misc_RNA (1)...(19): siRNA sense strand
cgucacugggagaggccua

SEQ ID NO: 2355883 - RNA, 19 nt, Homo sapiens
  misc_RNA (1)...(19): siRNA sense strand
gcugggaacaggaggagga

SEQ ID NO: 2355884 - RNA, 19 nt, Homo sapiens
  misc_RNA (1)...(19): siRNA sense strand
guggaacugaggagggaga

SEQ ID NO: 2355885 - RNA, 19 nt, Homo sapiens
  misc_RNA (1)...(19): siRNA sense strand
gggagaggccuaugccaga

SEQ ID NO: 2355886 - RNA, 19 nt, Homo sapiens
  misc_RNA (1)...(19): siRNA sense strand
ggaagaggcagcagcagga

SEQ ID NO: 2355887 - RNA, 19 nt, Homo sapiens
  misc_RNA (1)...(19): siRNA sense strand
augaggaggcggaggcuga

SEQ ID NO: 2355888 - RNA, 19 nt, Homo sapiens
  misc_RNA (1)...(19): siRNA sense strand
aggaggaagcccaggagga

SEQ ID NO: 2355889 - RNA, 19 nt, Homo sapiens
  misc_RNA (1)...(19): siRNA sense strand
agaaagaaauccaaggcag

SEQ ID NO: 2355890 - RNA, 19 nt, Homo sapiens
  misc_RNA (1)...(19): siRNA sense strand
ggaagaggugacuggcaga

SEQ ID NO: 2355891 - RNA, 19 nt, Homo sapiens
  misc_RNA (1)...(19): siRNA sense strand
ggucccaagcagagaggca

SEQ ID NO: 2355892 - RNA, 19 nt, Homo sapiens
  misc_RNA (1)...(19): siRNA sense strand
ccagacuagcuguggccua

SEQ ID NO: 2355893 - RNA, 19 nt, Homo sapiens
  misc_RNA (1)...(19): siRNA sense strand
cgagaaaggacauggagag

SEQ ID NO: 2355894 - RNA, 19 nt, Homo sapiens
  misc_RNA (1)...(19): siRNA sense strand
cagggaagauuguagagga

SEQ ID NO: 2355895 - RNA, 19 nt, Homo sapiens
  misc_RNA (1)...(19): siRNA sense strand
gggcacugaaagaacagaa

SEQ ID NO: 2355896 - RNA, 19 nt, Homo sapiens
  misc_RNA (1)...(19): siRNA sense strand
gaaaggacauggagagagg

SEQ ID NO: 2355897 - RNA, 19 nt, Homo sapiens
  misc_RNA (1)...(19): siRNA sense strand
agagaagagaggcugagaa

SEQ ID NO: 2355898 - RNA, 19 nt, Homo sapiens
  misc_RNA (1)...(19): siRNA sense strand
aggcugaccugcugggagu

SEQ ID NO: 2355899 - RNA, 19 nt, Homo sapiens
  misc_RNA (1)...(19): siRNA sense strand
gaggagagagggagcagca

SEQ ID NO: 2355900 - RNA, 19 nt, Homo sapiens
  misc_RNA (1)...(19): siRNA sense strand
acgagaaaggacauggaga

SEQ ID NO: 2355901 - RNA, 19 nt, Homo sapiens
  misc_RNA (1)...(19): siRNA sense strand
gggcaagagagccagggau

SEQ ID NO: 2355902 - RNA, 19 nt, Homo sapiens
  misc_RNA (1)...(19): siRNA sense strand
ggaggcagaugcaggggaa

SEQ ID NO: 2355903 - RNA, 19 nt, Homo sapiens
  misc_RNA (1)...(19): siRNA sense strand
cagcagaggaagaggugac

SEQ ID NO: 2355904 - RNA, 19 nt, Homo sapiens
  misc_RNA (1)...(19): siRNA sense strand
gcagagggucucaugguga

SEQ ID NO: 2355905 - RNA, 19 nt, Homo sapiens
  misc_RNA (1)...(19): siRNA sense strand
gcagggauccaguggcuga

SEQ ID NO: 2355906 - RNA, 19 nt, Homo sapiens
  misc_RNA (1)...(19): siRNA sense strand
aaggacauggagagaggaa

SEQ ID NO: 2355907 - RNA, 19 nt, Homo sapiens
  misc_RNA (1)...(19): siRNA sense strand
ggccuaugccagagaaacu

SEQ ID NO: 2355908 - RNA, 19 nt, Homo sapiens
  misc_RNA (1)...(19): siRNA sense strand
ggcagcagcaggagagcau

SEQ ID NO: 2355909 - RNA, 19 nt, Homo sapiens
  misc_RNA (1)...(19): siRNA sense strand
ggagagagaacagagggaa

SEQ ID NO: 2355910 - RNA, 19 nt, Homo sapiens
  misc_RNA (1)...(19): siRNA sense strand
acucgaaagaaaaggaaga

SEQ ID NO: 2355911 - RNA, 19 nt, Homo sapiens
  misc_RNA (1)...(19): siRNA sense strand
cgaggaaucugcaggcgca

SEQ ID NO: 2355912 - RNA, 19 nt, Homo sapiens
  misc_RNA (1)...(19): siRNA sense strand
aagaagaggcuguuggaug

SEQ ID NO: 2355913 - RNA, 19 nt, Homo sapiens
  misc_RNA (1)...(19): siRNA sense strand
aaggagaagaggugguagu

SEQ ID NO: 2355914 - RNA, 19 nt, Homo sapiens
  misc_RNA (1)...(19): siRNA sense strand
gaguucuggcccugagcaa

SEQ ID NO: 2355915 - RNA, 19 nt, Homo sapiens
  misc_RNA (1)...(19): siRNA sense strand
aggagagagaacagaggga

SEQ ID NO: 2355916 - RNA, 19 nt, Homo sapiens
  misc_RNA (1)...(19): siRNA sense strand
ggcaagagagccagggaug

SEQ ID NO: 2355917 - RNA, 19 nt, Homo sapiens
  misc_RNA (1)...(19): siRNA sense strand
gcaaagaggaggcugaccu

SEQ ID NO: 2355918 - RNA, 19 nt, Homo sapiens
  misc_RNA (1)...(19): siRNA sense strand
uggagaggcugaaggcacu

SEQ ID NO: 2355919 - RNA, 19 nt, Homo sapiens
  misc_RNA (1)...(19): siRNA sense strand
aguuuagggcucugagaaa

SEQ ID NO: 2355920 - RNA, 19 nt, Homo sapiens
  misc_RNA (1)...(19): siRNA sense strand
gagaagaucuggagcucga

SEQ ID NO: 2355921 - RNA, 19 nt, Homo sapiens
  misc_RNA (1)...(19): siRNA sense strand
ggugacugguacagagaau

SEQ ID NO: 2355922 - RNA, 19 nt, Homo sapiens
  misc_RNA (1)...(19): siRNA sense strand
gcuaaaucaaccagaaaca

SEQ ID NO: 2355923 - RNA, 19 nt, Homo sapiens
  misc_RNA (1)...(19): siRNA sense strand
guuuaugccaggaaauuaa

SEQ ID NO: 2355924 - RNA, 19 nt, Homo sapiens
  misc_RNA (1)...(19): siRNA sense strand
gggaagauaugaugcagca

SEQ ID NO: 2355925 - RNA, 19 nt, Homo sapiens
  misc_RNA (1)...(19): siRNA sense strand
ucauguacgugaagagcau

SEQ ID NO: 2355926 - RNA, 19 nt, Homo sapiens
  misc_RNA (1)...(19): siRNA sense strand
aggcuaaaucaaccagaaa

SEQ ID NO: 2355927 - RNA, 19 nt, Homo sapiens
  misc_RNA (1)...(19): siRNA sense strand
cagaaggacugcugccaga

SEQ ID NO: 2355928 - RNA, 19 nt, Homo sapiens
  misc_RNA (1)...(19): siRNA sense strand
uagaaauuccggagaagau

SEQ ID NO: 2355929 - RNA, 19 nt, Homo sapiens
  misc_RNA (1)...(19): siRNA sense strand
aguagcugccuaugagaaa

SEQ ID NO: 2355930 - RNA, 19 nt, Homo sapiens
  misc_RNA (1)...(19): siRNA sense strand
aucagagagcucagagaaa

SEQ ID NO: 2355931 - RNA, 19 nt, Homo sapiens
  misc_RNA (1)...(19): siRNA sense strand
ccaagggugacgaggugaa

SEQ ID NO: 2355932 - RNA, 19 nt, Homo sapiens
  misc_RNA (1)...(19): siRNA sense strand
acuccagaauugagaaagu

SEQ ID NO: 2355933 - RNA, 19 nt, Homo sapiens
  misc_RNA (1)...(19): siRNA sense strand
gaagcaagcucaugcccuu

SEQ ID NO: 2355934 - RNA, 19 nt, Homo sapiens
  misc_RNA (1)...(19): siRNA sense strand
agcagugcauccugggaaa

SEQ ID NO: 2355935 - RNA, 19 nt, Homo sapiens
  misc_RNA (1)...(19): siRNA sense strand
gcaagggaguuuagggcuc

SEQ ID NO: 2355936 - RNA, 19 nt, Homo sapiens
  misc_RNA (1)...(19): siRNA sense strand
acucgaaaggcuaaaucaa

SEQ ID NO: 2355937 - RNA, 19 nt, Homo sapiens
  misc_RNA (1)...(19): siRNA sense strand
gaaaacagggaaaggugaa

SEQ ID NO: 2355938 - RNA, 19 nt, Homo sapiens
  misc_RNA (1)...(19): siRNA sense strand
cgccacaccucaacagcaa

SEQ ID NO: 2355939 - RNA, 19 nt, Homo sapiens
  misc_RNA (1)...(19): siRNA sense strand
aggugaaaacucaggaaau

SEQ ID NO: 2355940 - RNA, 19 nt, Homo sapiens
  misc_RNA (1)...(19): siRNA sense strand
uggcaugcaucaagcacau

SEQ ID NO: 2355941 - RNA, 19 nt, Homo sapiens
  misc_RNA (1)...(19): siRNA sense strand
agcuagaaauucaggagga

SEQ ID NO: 2355942 - RNA, 19 nt, Homo sapiens
  misc_RNA (1)...(19): siRNA sense strand
gcacaagccaucagcccuu

SEQ ID NO: 2355943 - RNA, 19 nt, Homo sapiens
  misc_RNA (1)...(19): siRNA sense strand
ccaggaaauuaaucggguu

SEQ ID NO: 2355944 - RNA, 19 nt, Homo sapiens
  misc_RNA (1)...(19): siRNA sense strand
gauuaagaaagaaggugca

SEQ ID NO: 2355945 - RNA, 19 nt, Homo sapiens
  misc_RNA (1)...(19): siRNA sense strand
agacuccagaauugagaaa

SEQ ID NO: 2355946 - RNA, 19 nt, Homo sapiens
  misc_RNA (1)...(19): siRNA sense strand
gcucauuaguggaguugcu

SEQ ID NO: 2355947 - RNA, 19 nt, Homo sapiens
  misc_RNA (1)...(19): siRNA sense strand
ccaugaaagcacaagccau

SEQ ID NO: 2355948 - RNA, 19 nt, Homo sapiens
  misc_RNA (1)...(19): siRNA sense strand
cugaaaagcuguaugguuc

SEQ ID NO: 2355949 - RNA, 19 nt, Homo sapiens
  misc_RNA (1)...(19): siRNA sense strand
acauccacuuugaguacaa

SEQ ID NO: 2355950 - RNA, 19 nt, Homo sapiens
  misc_RNA (1)...(19): siRNA sense strand
cagagaaaccagcaaggga

SEQ ID NO: 2355951 - RNA, 19 nt, Homo sapiens
  misc_RNA (1)...(19): siRNA sense strand
agcagagcgugaugggcua

SEQ ID NO: 2355952 - RNA, 19 nt, Homo sapiens
  misc_RNA (1)...(19): siRNA sense strand
aggaauaccugaaagacac

SEQ ID NO: 2355953 - RNA, 19 nt, Homo sapiens
  misc_RNA (1)...(19): siRNA sense strand
gugaagagcaugaaggguc

SEQ ID NO: 2355954 - RNA, 19 nt, Homo sapiens
  misc_RNA (1)...(19): siRNA sense strand
cauuacaggagaugcugaa

SEQ ID NO: 2355955 - RNA, 19 nt, Homo sapiens
  misc_RNA (1)...(19): siRNA sense strand
acagcuugucagugaagaa

SEQ ID NO: 2355956 - RNA, 19 nt, Homo sapiens
  misc_RNA (1)...(19): siRNA sense strand
caugaagggucucgcggga

SEQ ID NO: 2355957 - RNA, 19 nt, Homo sapiens
  misc_RNA (1)...(19): siRNA sense strand
ggucuggagcagugcaguu

SEQ ID NO: 2355958 - RNA, 19 nt, Homo sapiens
  misc_RNA (1)...(19): siRNA sense strand
ugaagagcaugaagggucu

SEQ ID NO: 2355959 - RNA, 19 nt, Homo sapiens
  misc_RNA (1)...(19): siRNA sense strand
agggaaaggugaaaacuca

SEQ ID NO: 2355960 - RNA, 19 nt, Homo sapiens
  misc_RNA (1)...(19): siRNA sense strand
cugggaugagcuagaaauu

SEQ ID NO: 2355961 - RNA, 19 nt, Homo sapiens
  misc_RNA (1)...(19): siRNA sense strand
aaauucaggaggaggcaga

SEQ ID NO: 2355962 - RNA, 19 nt, Homo sapiens
  misc_RNA (1)...(19): siRNA sense strand
cagaaacaucgaaacaaaa

SEQ ID NO: 2355963 - RNA, 19 nt, Homo sapiens
  misc_RNA (1)...(19): siRNA sense strand
aggcaacuauucagaaacu

SEQ ID NO: 2355964 - RNA, 19 nt, Homo sapiens
  misc_RNA (1)...(19): siRNA sense strand
aaucagagagcucagagaa

SEQ ID NO: 2355965 - RNA, 19 nt, Homo sapiens
  misc_RNA (1)...(19): siRNA sense strand
gaguuuagggcucugagaa

SEQ ID NO: 2355966 - RNA, 19 nt, Homo sapiens
  misc_RNA (1)...(19): siRNA sense strand
aagcagaguuucaggcaga

SEQ ID NO: 2355967 - RNA, 19 nt, Homo sapiens
  misc_RNA (1)...(19): siRNA sense strand
cugcaggacaagugggaca

SEQ ID NO: 2355968 - RNA, 19 nt, Homo sapiens
  misc_RNA (1)...(19): siRNA sense strand
ccgucaugauagagaagau

SEQ ID NO: 2355969 - RNA, 19 nt, Homo sapiens
  misc_RNA (1)...(19): siRNA sense strand
gcaccaaccagcugggcau

SEQ ID NO: 2355970 - RNA, 19 nt, Homo sapiens
  misc_RNA (1)...(19): siRNA sense strand
ucaccaacaagaagggaau

SEQ ID NO: 2355971 - RNA, 19 nt, Homo sapiens
  misc_RNA (1)...(19): siRNA sense strand
aggacaagugggacagauu

SEQ ID NO: 2355972 - RNA, 19 nt, Homo sapiens
  misc_RNA (1)...(19): siRNA sense strand
gguacacaccugauggcaa

SEQ ID NO: 2355973 - RNA, 19 nt, Homo sapiens
  misc_RNA (1)...(19): siRNA sense strand
cagaauaacugccaggauc

SEQ ID NO: 2355974 - RNA, 19 nt, Homo sapiens
  misc_RNA (1)...(19): siRNA sense strand
cggcaaacggacagccuga

SEQ ID NO: 2355975 - RNA, 19 nt, Homo sapiens
  misc_RNA (1)...(19): siRNA sense strand
cagaggacgcugaggucuu

SEQ ID NO: 2355976 - RNA, 19 nt, Homo sapiens
  misc_RNA (1)...(19): siRNA sense strand
gagaagacccucaggcucu

SEQ ID NO: 2355977 - RNA, 19 nt, Homo sapiens
  misc_RNA (1)...(19): siRNA sense strand
ugguggagguggccgacaa

SEQ ID NO: 2355978 - RNA, 19 nt, Homo sapiens
  misc_RNA (1)...(19): siRNA sense strand
agaucgcacaggagagcaa

SEQ ID NO: 2355979 - RNA, 19 nt, Homo sapiens
  misc_RNA (1)...(19): siRNA sense strand
acagauucgucaagcgcau

SEQ ID NO: 2355980 - RNA, 19 nt, Homo sapiens
  misc_RNA (1)...(19): siRNA sense strand
acuucaacuuccuggucua

SEQ ID NO: 2355981 - RNA, 19 nt, Homo sapiens
  misc_RNA (1)...(19): siRNA sense strand
aagccguugcucagaauaa

SEQ ID NO: 2355982 - RNA, 19 nt, Homo sapiens
  misc_RNA (1)...(19): siRNA sense strand
ccuacauccuccugcucaa

SEQ ID NO: 2355983 - RNA, 19 nt, Homo sapiens
  misc_RNA (1)...(19): siRNA sense strand
gcacccggcucuuugggaa

SEQ ID NO: 2355984 - RNA, 19 nt, Homo sapiens
  misc_RNA (1)...(19): siRNA sense strand
ccgacaacacggccgacaa

SEQ ID NO: 2355985 - RNA, 19 nt, Homo sapiens
  misc_RNA (1)...(19): siRNA sense strand
ugauugaagacgggaagaa

SEQ ID NO: 2355986 - RNA, 19 nt, Homo sapiens
  misc_RNA (1)...(19): siRNA sense strand
acucggugcuggaggugau

SEQ ID NO: 2355987 - RNA, 19 nt, Homo sapiens
  misc_RNA (1)...(19): siRNA sense strand
ggaacaccaacgugggcau

SEQ ID NO: 2355988 - RNA, 19 nt, Homo sapiens
  misc_RNA (1)...(19): siRNA sense strand
gcucuaugaucgcaggagu

SEQ ID NO: 2355989 - RNA, 19 nt, Homo sapiens
  misc_RNA (1)...(19): siRNA sense strand
aagcagaguuucaggcaga

SEQ ID NO: 2355990 - RNA, 19 nt, Homo sapiens
  misc_RNA (1)...(19): siRNA sense strand
cugcaggacaagugggaca

SEQ ID NO: 2355991 - RNA, 19 nt, Homo sapiens
  misc_RNA (1)...(19): siRNA sense strand
ccgucaugauagagaagau

SEQ ID NO: 2355992 - RNA, 19 nt, Homo sapiens
  misc_RNA (1)...(19): siRNA sense strand
gcaccaaccagcugggcau

SEQ ID NO: 2355993 - RNA, 19 nt, Homo sapiens
  misc_RNA (1)...(19): siRNA sense strand
ucaccaacaagaagggaau

SEQ ID NO: 2355994 - RNA, 19 nt, Homo sapiens
  misc_RNA (1)...(19): siRNA sense strand
aggacaagugggacagauu

SEQ ID NO: 2355995 - RNA, 19 nt, Homo sapiens
  misc_RNA (1)...(19): siRNA sense strand
gguacacaccugauggcaa

SEQ ID NO: 2355996 - RNA, 19 nt, Homo sapiens
  misc_RNA (1)...(19): siRNA sense strand
cagaauaacugccaggauc

SEQ ID NO: 2355997 - RNA, 19 nt, Homo sapiens
  misc_RNA (1)...(19): siRNA sense strand
cggcaaacggacagccuga

SEQ ID NO: 2355998 - RNA, 19 nt, Homo sapiens
  misc_RNA (1)...(19): siRNA sense strand
cagaggacgcugaggucuu

SEQ ID NO: 2355999 - RNA, 19 nt, Homo sapiens
  misc_RNA (1)...(19): siRNA sense strand
gagaagacccucaggcucu

SEQ ID NO: 2356000 - RNA, 19 nt, Homo sapiens
  misc_RNA (1)...(19): siRNA sense strand
ugguggagguggccgacaa

SEQ ID NO: 2356001 - RNA, 19 nt, Homo sapiens
  misc_RNA (1)...(19): siRNA sense strand
agaucgcacaggagagcaa

SEQ ID NO: 2356002 - RNA, 19 nt, Homo sapiens
  misc_RNA (1)...(19): siRNA sense strand
acagauucgucaagcgcau

SEQ ID NO: 2356003 - RNA, 19 nt, Homo sapiens
  misc_RNA (1)...(19): siRNA sense strand
acuucaacuuccuggucua

SEQ ID NO: 2356004 - RNA, 19 nt, Homo sapiens
  misc_RNA (1)...(19): siRNA sense strand
aagccguugcucagaauaa

SEQ ID NO: 2356005 - RNA, 19 nt, Homo sapiens
  misc_RNA (1)...(19): siRNA sense strand
ccuacauccuccugcucaa

SEQ ID NO: 2356006 - RNA, 19 nt, Homo sapiens
  misc_RNA (1)...(19): siRNA sense strand
gcacccggcucuuugggaa

SEQ ID NO: 2356007 - RNA, 19 nt, Homo sapiens
  misc_RNA (1)...(19): siRNA sense strand
ccgacaacacggccgacaa

SEQ ID NO: 2356008 - RNA, 19 nt, Homo sapiens
  misc_RNA (1)...(19): siRNA sense strand
ugauugaagacgggaagaa

SEQ ID NO: 2356009 - RNA, 19 nt, Homo sapiens
  misc_RNA (1)...(19): siRNA sense strand
acucggugcuggaggugau

SEQ ID NO: 2356010 - RNA, 19 nt, Homo sapiens
  misc_RNA (1)...(19): siRNA sense strand
ggaacaccaacgugggcau

SEQ ID NO: 2356011 - RNA, 19 nt, Homo sapiens
  misc_RNA (1)...(19): siRNA sense strand
gcucuaugaucgcaggagu

SEQ ID NO: 2356012 - RNA, 19 nt, Homo sapiens
  misc_RNA (1)...(19): siRNA sense strand
aagcagaguuucaggcaga

SEQ ID NO: 2356013 - RNA, 19 nt, Homo sapiens
  misc_RNA (1)...(19): siRNA sense strand
cugcaggacaagugggaca

SEQ ID NO: 2356014 - RNA, 19 nt, Homo sapiens
  misc_RNA (1)...(19): siRNA sense strand
ccgucaugauagagaagau

SEQ ID NO: 2356015 - RNA, 19 nt, Homo sapiens
  misc_RNA (1)...(19): siRNA sense strand
gcaccaaccagcugggcau

SEQ ID NO: 2356016 - RNA, 19 nt, Homo sapiens
  misc_RNA (1)...(19): siRNA sense strand
ucaccaacaagaagggaau

SEQ ID NO: 2356017 - RNA, 19 nt, Homo sapiens
  misc_RNA (1)...(19): siRNA sense strand
aggacaagugggacagauu

SEQ ID NO: 2356018 - RNA, 19 nt, Homo sapiens
  misc_RNA (1)...(19): siRNA sense strand
gguacacaccugauggcaa

SEQ ID NO: 2356019 - RNA, 19 nt, Homo sapiens
  misc_RNA (1)...(19): siRNA sense strand
cagaauaacugccaggauc

SEQ ID NO: 2356020 - RNA, 19 nt, Homo sapiens
  misc_RNA (1)...(19): siRNA sense strand
cggcaaacggacagccuga

SEQ ID NO: 2356021 - RNA, 19 nt, Homo sapiens
  misc_RNA (1)...(19): siRNA sense strand
cagaggacgcugaggucuu

SEQ ID NO: 2356022 - RNA, 19 nt, Homo sapiens
  misc_RNA (1)...(19): siRNA sense strand
gagaagacccucaggcucu

SEQ ID NO: 2356023 - RNA, 19 nt, Homo sapiens
  misc_RNA (1)...(19): siRNA sense strand
ugguggagguggccgacaa

SEQ ID NO: 2356024 - RNA, 19 nt, Homo sapiens
  misc_RNA (1)...(19): siRNA sense strand
agaucgcacaggagagcaa

SEQ ID NO: 2356025 - RNA, 19 nt, Homo sapiens
  misc_RNA (1)...(19): siRNA sense strand
acagauucgucaagcgcau

SEQ ID NO: 2356026 - RNA, 19 nt, Homo sapiens
  misc_RNA (1)...(19): siRNA sense strand
acuucaacuuccuggucua

SEQ ID NO: 2356027 - RNA, 19 nt, Homo sapiens
  misc_RNA (1)...(19): siRNA sense strand
aagccguugcucagaauaa

SEQ ID NO: 2356028 - RNA, 19 nt, Homo sapiens
  misc_RNA (1)...(19): siRNA sense strand
ccuacauccuccugcucaa

SEQ ID NO: 2356029 - RNA, 19 nt, Homo sapiens
  misc_RNA (1)...(19): siRNA sense strand
gcacccggcucuuugggaa

SEQ ID NO: 2356030 - RNA, 19 nt, Homo sapiens
  misc_RNA (1)...(19): siRNA sense strand
ccgacaacacggccgacaa

SEQ ID NO: 2356031 - RNA, 19 nt, Homo sapiens
  misc_RNA (1)...(19): siRNA sense strand
ugauugaagacgggaagaa

SEQ ID NO: 2356032 - RNA, 19 nt, Homo sapiens
  misc_RNA (1)...(19): siRNA sense strand
acucggugcuggaggugau

SEQ ID NO: 2356033 - RNA, 19 nt, Homo sapiens
  misc_RNA (1)...(19): siRNA sense strand
ggaacaccaacgugggcau

SEQ ID NO: 2356034 - RNA, 19 nt, Homo sapiens
  misc_RNA (1)...(19): siRNA sense strand
gcucuaugaucgcaggagu

SEQ ID NO: 2356035 - RNA, 19 nt, Homo sapiens
  misc_RNA (1)...(19): siRNA sense strand
aagcagaguuucaggcaga

SEQ ID NO: 2356036 - RNA, 19 nt, Homo sapiens
  misc_RNA (1)...(19): siRNA sense strand
cugcaggacaagugggaca

SEQ ID NO: 2356037 - RNA, 19 nt, Homo sapiens
  misc_RNA (1)...(19): siRNA sense strand
ccgucaugauagagaagau

SEQ ID NO: 2356038 - RNA, 19 nt, Homo sapiens
  misc_RNA (1)...(19): siRNA sense strand
gcaccaaccagcugggcau

SEQ ID NO: 2356039 - RNA, 19 nt, Homo sapiens
  misc_RNA (1)...(19): siRNA sense strand
ucaccaacaagaagggaau

SEQ ID NO: 2356040 - RNA, 19 nt, Homo sapiens
  misc_RNA (1)...(19): siRNA sense strand
aggacaagugggacagauu

SEQ ID NO: 2356041 - RNA, 19 nt, Homo sapiens
  misc_RNA (1)...(19): siRNA sense strand
gguacacaccugauggcaa

SEQ ID NO: 2356042 - RNA, 19 nt, Homo sapiens
  misc_RNA (1)...(19): siRNA sense strand
cagaauaacugccaggauc

SEQ ID NO: 2356043 - RNA, 19 nt, Homo sapiens
  misc_RNA (1)...(19): siRNA sense strand
cggcaaacggacagccuga

SEQ ID NO: 2356044 - RNA, 19 nt, Homo sapiens
  misc_RNA (1)...(19): siRNA sense strand
cagaggacgcugaggucuu

SEQ ID NO: 2356045 - RNA, 19 nt, Homo sapiens
  misc_RNA (1)...(19): siRNA sense strand
gagaagacccucaggcucu

SEQ ID NO: 2356046 - RNA, 19 nt, Homo sapiens
  misc_RNA (1)...(19): siRNA sense strand
ugguggagguggccgacaa

SEQ ID NO: 2356047 - RNA, 19 nt, Homo sapiens
  misc_RNA (1)...(19): siRNA sense strand
agaucgcacaggagagcaa

SEQ ID NO: 2356048 - RNA, 19 nt, Homo sapiens
  misc_RNA (1)...(19): siRNA sense strand
acagauucgucaagcgcau

SEQ ID NO: 2356049 - RNA, 19 nt, Homo sapiens
  misc_RNA (1)...(19): siRNA sense strand
acuucaacuuccuggucua

SEQ ID NO: 2356050 - RNA, 19 nt, Homo sapiens
  misc_RNA (1)...(19): siRNA sense strand
aagccguugcucagaauaa

SEQ ID NO: 2356051 - RNA, 19 nt, Homo sapiens
  misc_RNA (1)...(19): siRNA sense strand
ccuacauccuccugcucaa

SEQ ID NO: 2356052 - RNA, 19 nt, Homo sapiens
  misc_RNA (1)...(19): siRNA sense strand
gcacccggcucuuugggaa

SEQ ID NO: 2356053 - RNA, 19 nt, Homo sapiens
  misc_RNA (1)...(19): siRNA sense strand
ccgacaacacggccgacaa

SEQ ID NO: 2356054 - RNA, 19 nt, Homo sapiens
  misc_RNA (1)...(19): siRNA sense strand
ugauugaagacgggaagaa

SEQ ID NO: 2356055 - RNA, 19 nt, Homo sapiens
  misc_RNA (1)...(19): siRNA sense strand
acucggugcuggaggugau

SEQ ID NO: 2356056 - RNA, 19 nt, Homo sapiens
  misc_RNA (1)...(19): siRNA sense strand
ggaacaccaacgugggcau

SEQ ID NO: 2356057 - RNA, 19 nt, Homo sapiens
  misc_RNA (1)...(19): siRNA sense strand
gcucuaugaucgcaggagu

SEQ ID NO: 2356058 - RNA, 19 nt, Homo sapiens
  misc_RNA (1)...(19): siRNA sense strand
acgaaagcccugagcggua

SEQ ID NO: 2356059 - RNA, 19 nt, Homo sapiens
  misc_RNA (1)...(19): siRNA sense strand
agggaaaagcugcaagaaa

SEQ ID NO: 2356060 - RNA, 19 nt, Homo sapiens
  misc_RNA (1)...(19): siRNA sense strand
agugagaaucugagcuuau

SEQ ID NO: 2356061 - RNA, 19 nt, Homo sapiens
  misc_RNA (1)...(19): siRNA sense strand
gcugcaagaaauaaagaca

SEQ ID NO: 2356062 - RNA, 19 nt, Homo sapiens
  misc_RNA (1)...(19): siRNA sense strand
guaccuggugcgaggccua

SEQ ID NO: 2356063 - RNA, 19 nt, Homo sapiens
  misc_RNA (1)...(19): siRNA sense strand
ugcuggaguucguggguga

SEQ ID NO: 2356064 - RNA, 19 nt, Homo sapiens
  misc_RNA (1)...(19): siRNA sense strand
ccacuaguauuucagguau

SEQ ID NO: 2356065 - RNA, 19 nt, Homo sapiens
  misc_RNA (1)...(19): siRNA sense strand
cagguaugcugcugaaagu

SEQ ID NO: 2356066 - RNA, 19 nt, Homo sapiens
  misc_RNA (1)...(19): siRNA sense strand
gcagucaacuccuggacca

SEQ ID NO: 2356067 - RNA, 19 nt, Homo sapiens
  misc_RNA (1)...(19): siRNA sense strand
ggcuguaagcagugggaac

SEQ ID NO: 2356068 - RNA, 19 nt, Homo sapiens
  misc_RNA (1)...(19): siRNA sense strand
uggaagugcaggugcggga

SEQ ID NO: 2356069 - RNA, 19 nt, Homo sapiens
  misc_RNA (1)...(19): siRNA sense strand
ugcaagaaauaaagacacu

SEQ ID NO: 2356070 - RNA, 19 nt, Homo sapiens
  misc_RNA (1)...(19): siRNA sense strand
ccuuacacuuggagggccu

SEQ ID NO: 2356071 - RNA, 19 nt, Homo sapiens
  misc_RNA (1)...(19): siRNA sense strand
cccagaugucuuagugcua

SEQ ID NO: 2356072 - RNA, 19 nt, Homo sapiens
  misc_RNA (1)...(19): siRNA sense strand
ugaaaagaccagugggcaa

SEQ ID NO: 2356073 - RNA, 19 nt, Homo sapiens
  misc_RNA (1)...(19): siRNA sense strand
cugcaaacgucuagugacu

SEQ ID NO: 2356074 - RNA, 19 nt, Homo sapiens
  misc_RNA (1)...(19): siRNA sense strand
gggagauccgagagaagua

SEQ ID NO: 2356075 - RNA, 19 nt, Homo sapiens
  misc_RNA (1)...(19): siRNA sense strand
gaucaguaccagacgguga

SEQ ID NO: 2356076 - RNA, 19 nt, Homo sapiens
  misc_RNA (1)...(19): siRNA sense strand
ugacucagcucgaggcaga

SEQ ID NO: 2356077 - RNA, 19 nt, Homo sapiens
  misc_RNA (1)...(19): siRNA sense strand
gggcaaugucucugucgaa

SEQ ID NO: 2356078 - RNA, 19 nt, Homo sapiens
  misc_RNA (1)...(19): siRNA sense strand
ccacugaaggcgaggucau

SEQ ID NO: 2356079 - RNA, 19 nt, Homo sapiens
  misc_RNA (1)...(19): siRNA sense strand
aggaggacuucaacagcaa

SEQ ID NO: 2356080 - RNA, 19 nt, Homo sapiens
  misc_RNA (1)...(19): siRNA sense strand
aauugaaacgggcaggaaa

SEQ ID NO: 2356081 - RNA, 19 nt, Homo sapiens
  misc_RNA (1)...(19): siRNA sense strand
ugaugagggcacaggucaa

SEQ ID NO: 2356082 - RNA, 19 nt, Homo sapiens
  misc_RNA (1)...(19): siRNA sense strand
gagagcagcuucuggcaca

SEQ ID NO: 2356083 - RNA, 19 nt, Homo sapiens
  misc_RNA (1)...(19): siRNA sense strand
auugaaacgggcaggaaau

SEQ ID NO: 2356084 - RNA, 19 nt, Homo sapiens
  misc_RNA (1)...(19): siRNA sense strand
augagaaacagaaggcaga

SEQ ID NO: 2356085 - RNA, 19 nt, Homo sapiens
  misc_RNA (1)...(19): siRNA sense strand
gaugagaacuucaaugcca

SEQ ID NO: 2356086 - RNA, 19 nt, Homo sapiens
  misc_RNA (1)...(19): siRNA sense strand
cugucgaacuggugccuuu

SEQ ID NO: 2356087 - RNA, 19 nt, Homo sapiens
  misc_RNA (1)...(19): siRNA sense strand
cagaugugcaagaugagaa

SEQ ID NO: 2356088 - RNA, 19 nt, Homo sapiens
  misc_RNA (1)...(19): siRNA sense strand
cuacacacguugggagaca

SEQ ID NO: 2356089 - RNA, 19 nt, Homo sapiens
  misc_RNA (1)...(19): siRNA sense strand
gugauggaugucagcauaa

SEQ ID NO: 2356090 - RNA, 19 nt, Homo sapiens
  misc_RNA (1)...(19): siRNA sense strand
acagcaaacacauggccaa

SEQ ID NO: 2356091 - RNA, 19 nt, Homo sapiens
  misc_RNA (1)...(19): siRNA sense strand
ggagcugcggcgugaaauu

SEQ ID NO: 2356092 - RNA, 19 nt, Homo sapiens
  misc_RNA (1)...(19): siRNA sense strand
ggagcugaccucaagggaa

SEQ ID NO: 2356093 - RNA, 19 nt, Homo sapiens
  misc_RNA (1)...(19): siRNA sense strand
cggccagugucgcugcaaa

SEQ ID NO: 2356094 - RNA, 19 nt, Homo sapiens
  misc_RNA (1)...(19): siRNA sense strand
cauuaugaccuucaagaca

SEQ ID NO: 2356095 - RNA, 19 nt, Homo sapiens
  misc_RNA (1)...(19): siRNA sense strand
gggcgcaggaguugcaaca

SEQ ID NO: 2356096 - RNA, 19 nt, Homo sapiens
  misc_RNA (1)...(19): siRNA sense strand
uggcagauguggaugcgau

SEQ ID NO: 2356097 - RNA, 19 nt, Homo sapiens
  misc_RNA (1)...(19): siRNA sense strand
ggcacguacuguaggagau

SEQ ID NO: 2356098 - RNA, 19 nt, Homo sapiens
  misc_RNA (1)...(19): siRNA sense strand
caaccaaggaccugcggga

SEQ ID NO: 2356099 - RNA, 19 nt, Homo sapiens
  misc_RNA (1)...(19): siRNA sense strand
agaccugacagaugugcaa

SEQ ID NO: 2356100 - RNA, 19 nt, Homo sapiens
  misc_RNA (1)...(19): siRNA sense strand
ggugaaagggcucggcagu

SEQ ID NO: 2356101 - RNA, 19 nt, Homo sapiens
  misc_RNA (1)...(19): siRNA sense strand
agaagaaacggcaggcagu

SEQ ID NO: 2356102 - RNA, 19 nt, Homo sapiens
  misc_RNA (1)...(19): siRNA sense strand
cggugaaggcccuagcuga

SEQ ID NO: 2356103 - RNA, 19 nt, Homo sapiens
  misc_RNA (1)...(19): siRNA sense strand
aggcaagggcagaacaacu

SEQ ID NO: 2356104 - RNA, 19 nt, Homo sapiens
  misc_RNA (1)...(19): siRNA sense strand
agcgggcacuggagaguaa

SEQ ID NO: 2356105 - RNA, 19 nt, Homo sapiens
  misc_RNA (1)...(19): siRNA sense strand
gcgagauaggcuugcacuu

SEQ ID NO: 2356106 - RNA, 19 nt, Homo sapiens
  misc_RNA (1)...(19): siRNA sense strand
gcacaaauccgcagcagug

SEQ ID NO: 2356107 - RNA, 19 nt, Homo sapiens
  misc_RNA (1)...(19): siRNA sense strand
gauccugauagcauugaaa

SEQ ID NO: 2356108 - RNA, 19 nt, Homo sapiens
  misc_RNA (1)...(19): siRNA sense strand
augagaacuucaaugccaa

SEQ ID NO: 2356109 - RNA, 19 nt, Homo sapiens
  misc_RNA (1)...(19): siRNA sense strand
ucacaauagcagcggagaa

SEQ ID NO: 2356110 - RNA, 19 nt, Homo sapiens
  misc_RNA (1)...(19): siRNA sense strand
aggaaauggagcauggaau

SEQ ID NO: 2356111 - RNA, 19 nt, Homo sapiens
  misc_RNA (1)...(19): siRNA sense strand
aggagaaggagcaggacca

SEQ ID NO: 2356112 - RNA, 19 nt, Homo sapiens
  misc_RNA (1)...(19): siRNA sense strand
gagcugaacucacggcuga

SEQ ID NO: 2356113 - RNA, 19 nt, Homo sapiens
  misc_RNA (1)...(19): siRNA sense strand
caacauugcuuaugggcug

SEQ ID NO: 2356114 - RNA, 19 nt, Homo sapiens
  misc_RNA (1)...(19): siRNA sense strand
guuucuuccaggagacuaa

SEQ ID NO: 2356115 - RNA, 19 nt, Homo sapiens
  misc_RNA (1)...(19): siRNA sense strand
cgugggagcugcagagaag

SEQ ID NO: 2356116 - RNA, 19 nt, Homo sapiens
  misc_RNA (1)...(19): siRNA sense strand
cuacauggaccgacagcca

SEQ ID NO: 2356117 - RNA, 19 nt, Homo sapiens
  misc_RNA (1)...(19): siRNA sense strand
agcaggaccaggugaacaa

SEQ ID NO: 2356118 - RNA, 19 nt, Homo sapiens
  misc_RNA (1)...(19): siRNA sense strand
ccaaugugcucuugcgaag

SEQ ID NO: 2356119 - RNA, 19 nt, Homo sapiens
  misc_RNA (1)...(19): siRNA sense strand
aggagcaggaccaggugaa

SEQ ID NO: 2356120 - RNA, 19 nt, Homo sapiens
  misc_RNA (1)...(19): siRNA sense strand
acacagauguaggggagaa

SEQ ID NO: 2356121 - RNA, 19 nt, Homo sapiens
  misc_RNA (1)...(19): siRNA sense strand
cuguauggcuucaugcuca

SEQ ID NO: 2356122 - RNA, 19 nt, Homo sapiens
  misc_RNA (1)...(19): siRNA sense strand
acauggaccgacagccaaa

SEQ ID NO: 2356123 - RNA, 19 nt, Homo sapiens
  misc_RNA (1)...(19): siRNA sense strand
ucacaauagcagcggagaa

SEQ ID NO: 2356124 - RNA, 19 nt, Homo sapiens
  misc_RNA (1)...(19): siRNA sense strand
aggaaauggagcauggaau

SEQ ID NO: 2356125 - RNA, 19 nt, Homo sapiens
  misc_RNA (1)...(19): siRNA sense strand
aggagaaggagcaggacca

SEQ ID NO: 2356126 - RNA, 19 nt, Homo sapiens
  misc_RNA (1)...(19): siRNA sense strand
gagcugaacucacggcuga

SEQ ID NO: 2356127 - RNA, 19 nt, Homo sapiens
  misc_RNA (1)...(19): siRNA sense strand
caacauugcuuaugggcug

SEQ ID NO: 2356128 - RNA, 19 nt, Homo sapiens
  misc_RNA (1)...(19): siRNA sense strand
guuucuuccaggagacuaa

SEQ ID NO: 2356129 - RNA, 19 nt, Homo sapiens
  misc_RNA (1)...(19): siRNA sense strand
cgugggagcugcagagaag

SEQ ID NO: 2356130 - RNA, 19 nt, Homo sapiens
  misc_RNA (1)...(19): siRNA sense strand
cuacauggaccgacagcca

SEQ ID NO: 2356131 - RNA, 19 nt, Homo sapiens
  misc_RNA (1)...(19): siRNA sense strand
agcaggaccaggugaacaa

SEQ ID NO: 2356132 - RNA, 19 nt, Homo sapiens
  misc_RNA (1)...(19): siRNA sense strand
ccaaugugcucuugcgaag

SEQ ID NO: 2356133 - RNA, 19 nt, Homo sapiens
  misc_RNA (1)...(19): siRNA sense strand
aggagcaggaccaggugaa

SEQ ID NO: 2356134 - RNA, 19 nt, Homo sapiens
  misc_RNA (1)...(19): siRNA sense strand
acacagauguaggggagaa

SEQ ID NO: 2356135 - RNA, 19 nt, Homo sapiens
  misc_RNA (1)...(19): siRNA sense strand
cuguauggcuucaugcuca

SEQ ID NO: 2356136 - RNA, 19 nt, Homo sapiens
  misc_RNA (1)...(19): siRNA sense strand
acauggaccgacagccaaa

SEQ ID NO: 2356137 - RNA, 19 nt, Homo sapiens
  misc_RNA (1)...(19): siRNA sense strand
aggaagaagaggagggaga

SEQ ID NO: 2356138 - RNA, 19 nt, Homo sapiens
  misc_RNA (1)...(19): siRNA sense strand
aggugaaaguggagaaauc

SEQ ID NO: 2356139 - RNA, 19 nt, Homo sapiens
  misc_RNA (1)...(19): siRNA sense strand
gagaagagucacauggaca

SEQ ID NO: 2356140 - RNA, 19 nt, Homo sapiens
  misc_RNA (1)...(19): siRNA sense strand
gcaugaagauccuacgaga

SEQ ID NO: 2356141 - RNA, 19 nt, Homo sapiens
  misc_RNA (1)...(19): siRNA sense strand
ugaaggugaaaguggagaa

SEQ ID NO: 2356142 - RNA, 19 nt, Homo sapiens
  misc_RNA (1)...(19): siRNA sense strand
gggaaaacacccucagaca

SEQ ID NO: 2356143 - RNA, 19 nt, Homo sapiens
  misc_RNA (1)...(19): siRNA sense strand
acucagaaagcaugaagau

SEQ ID NO: 2356144 - RNA, 19 nt, Homo sapiens
  misc_RNA (1)...(19): siRNA sense strand
gagagauguacgaacgaca

SEQ ID NO: 2356145 - RNA, 19 nt, Homo sapiens
  misc_RNA (1)...(19): siRNA sense strand
agaaaucagagcuggagau

SEQ ID NO: 2356146 - RNA, 19 nt, Homo sapiens
  misc_RNA (1)...(19): siRNA sense strand
ggagauggaugaugggcug

SEQ ID NO: 2356147 - RNA, 19 nt, Homo sapiens
  misc_RNA (1)...(19): siRNA sense strand
cagagguaaccaacagcaa

SEQ ID NO: 2356148 - RNA, 19 nt, Homo sapiens
  misc_RNA (1)...(19): siRNA sense strand
ccacacucaucuaucgcaa

SEQ ID NO: 2356149 - RNA, 19 nt, Homo sapiens
  misc_RNA (1)...(19): siRNA sense strand
cagcggaggaagaagagga

SEQ ID NO: 2356150 - RNA, 19 nt, Homo sapiens
  misc_RNA (1)...(19): siRNA sense strand
uggaugaggaagcugggaa

SEQ ID NO: 2356151 - RNA, 19 nt, Homo sapiens
  misc_RNA (1)...(19): siRNA sense strand
gagaaaucagagcuggaga

SEQ ID NO: 2356152 - RNA, 19 nt, Homo sapiens
  misc_RNA (1)...(19): siRNA sense strand
cugugaaggugaaagugga

SEQ ID NO: 2356153 - RNA, 19 nt, Homo sapiens
  misc_RNA (1)...(19): siRNA sense strand
gccaaucaggagugggaaa

SEQ ID NO: 2356154 - RNA, 19 nt, Homo sapiens
  misc_RNA (1)...(19): siRNA sense strand
aaagaagaugucagagaau

SEQ ID NO: 2356155 - RNA, 19 nt, Homo sapiens
  misc_RNA (1)...(19): siRNA sense strand
ugucagagaauuugcaaaa

SEQ ID NO: 2356156 - RNA, 19 nt, Homo sapiens
  misc_RNA (1)...(19): siRNA sense strand
auuccaugguaguggcaau

SEQ ID NO: 2356157 - RNA, 19 nt, Homo sapiens
  misc_RNA (1)...(19): siRNA sense strand
ggaacaucaaugaaagcau

SEQ ID NO: 2356158 - RNA, 19 nt, Homo sapiens
  misc_RNA (1)...(19): siRNA sense strand
uggguggguuuuagggaaa

SEQ ID NO: 2356159 - RNA, 19 nt, Homo sapiens
  misc_RNA (1)...(19): siRNA sense strand
gauucaaaugcuagagauc

SEQ ID NO: 2356160 - RNA, 19 nt, Homo sapiens
  misc_RNA (1)...(19): siRNA sense strand
uacaagaaacagagaacca

SEQ ID NO: 2356161 - RNA, 19 nt, Homo sapiens
  misc_RNA (1)...(19): siRNA sense strand
acguuaugaaaguggccaa

SEQ ID NO: 2356162 - RNA, 19 nt, Homo sapiens
  misc_RNA (1)...(19): siRNA sense strand
uaaaauaucucgaccccua

SEQ ID NO: 2356163 - RNA, 19 nt, Homo sapiens
  misc_RNA (1)...(19): siRNA sense strand
gcuuguaucagcauagaca

SEQ ID NO: 2356164 - RNA, 19 nt, Homo sapiens
  misc_RNA (1)...(19): siRNA sense strand
cagccaaucaggaguggga

SEQ ID NO: 2356165 - RNA, 19 nt, Homo sapiens
  misc_RNA (1)...(19): siRNA sense strand
gccaaucaggagugggaaa

SEQ ID NO: 2356166 - RNA, 19 nt, Homo sapiens
  misc_RNA (1)...(19): siRNA sense strand
aaagaagaugucagagaau

SEQ ID NO: 2356167 - RNA, 19 nt, Homo sapiens
  misc_RNA (1)...(19): siRNA sense strand
ugucagagaauuugcaaaa

SEQ ID NO: 2356168 - RNA, 19 nt, Homo sapiens
  misc_RNA (1)...(19): siRNA sense strand
auuccaugguaguggcaau

SEQ ID NO: 2356169 - RNA, 19 nt, Homo sapiens
  misc_RNA (1)...(19): siRNA sense strand
ggaacaucaaugaaagcau

SEQ ID NO: 2356170 - RNA, 19 nt, Homo sapiens
  misc_RNA (1)...(19): siRNA sense strand
uggguggguuuuagggaaa

SEQ ID NO: 2356171 - RNA, 19 nt, Homo sapiens
  misc_RNA (1)...(19): siRNA sense strand
gauucaaaugcuagagauc

SEQ ID NO: 2356172 - RNA, 19 nt, Homo sapiens
  misc_RNA (1)...(19): siRNA sense strand
uacaagaaacagagaacca

SEQ ID NO: 2356173 - RNA, 19 nt, Homo sapiens
  misc_RNA (1)...(19): siRNA sense strand
acguuaugaaaguggccaa

SEQ ID NO: 2356174 - RNA, 19 nt, Homo sapiens
  misc_RNA (1)...(19): siRNA sense strand
uaaaauaucucgaccccua

SEQ ID NO: 2356175 - RNA, 19 nt, Homo sapiens
  misc_RNA (1)...(19): siRNA sense strand
gcuuguaucagcauagaca

SEQ ID NO: 2356176 - RNA, 19 nt, Homo sapiens
  misc_RNA (1)...(19): siRNA sense strand
cagccaaucaggaguggga

SEQ ID NO: 2356177 - RNA, 19 nt, Homo sapiens
  misc_RNA (1)...(19): siRNA sense strand
guuaaaugcaagagaagaa

SEQ ID NO: 2356178 - RNA, 19 nt, Homo sapiens
  misc_RNA (1)...(19): siRNA sense strand
cgacuauaugaaagagaaa

SEQ ID NO: 2356179 - RNA, 19 nt, Homo sapiens
  misc_RNA (1)...(19): siRNA sense strand
gcauaagggaggaggaagu

SEQ ID NO: 2356180 - RNA, 19 nt, Homo sapiens
  misc_RNA (1)...(19): siRNA sense strand
caagagaagaacaggauau

SEQ ID NO: 2356181 - RNA, 19 nt, Homo sapiens
  misc_RNA (1)...(19): siRNA sense strand
ggcaaauggaagaaguaaa

SEQ ID NO: 2356182 - RNA, 19 nt, Homo sapiens
  misc_RNA (1)...(19): siRNA sense strand
gaguacagauuauggaaaa

SEQ ID NO: 2356183 - RNA, 19 nt, Homo sapiens
  misc_RNA (1)...(19): siRNA sense strand
augaagaaguaguagauga

SEQ ID NO: 2356184 - RNA, 19 nt, Homo sapiens
  misc_RNA (1)...(19): siRNA sense strand
ugaagaaguaguagaugaa

SEQ ID NO: 2356185 - RNA, 19 nt, Homo sapiens
  misc_RNA (1)...(19): siRNA sense strand
gcauugagccagagcugaa

SEQ ID NO: 2356186 - RNA, 19 nt, Homo sapiens
  misc_RNA (1)...(19): siRNA sense strand
uggaaaauaugaaggacua

SEQ ID NO: 2356187 - RNA, 19 nt, Homo sapiens
  misc_RNA (1)...(19): siRNA sense strand
ggagaaaaucagaguguga

SEQ ID NO: 2356188 - RNA, 19 nt, Homo sapiens
  misc_RNA (1)...(19): siRNA sense strand
caaacuuaucagaggagua

SEQ ID NO: 2356189 - RNA, 19 nt, Homo sapiens
  misc_RNA (1)...(19): siRNA sense strand
aaauaaggcaaauggaaga

SEQ ID NO: 2356190 - RNA, 19 nt, Homo sapiens
  misc_RNA (1)...(19): siRNA sense strand
gggcauaagggaggaggaa

SEQ ID NO: 2356191 - RNA, 19 nt, Homo sapiens
  misc_RNA (1)...(19): siRNA sense strand
gcuccaaaguguaaaagaa

SEQ ID NO: 2356192 - RNA, 19 nt, Homo sapiens
  misc_RNA (1)...(19): siRNA sense strand
gcacaacuaaagaaagcaa

SEQ ID NO: 2356193 - RNA, 19 nt, Homo sapiens
  misc_RNA (1)...(19): siRNA sense strand
uguucagaguucagggaau

SEQ ID NO: 2356194 - RNA, 19 nt, Homo sapiens
  misc_RNA (1)...(19): siRNA sense strand
aggaggugaugaagaagua

SEQ ID NO: 2356195 - RNA, 19 nt, Homo sapiens
  misc_RNA (1)...(19): siRNA sense strand
agauagaguuccuugugaa

SEQ ID NO: 2356196 - RNA, 19 nt, Homo sapiens
  misc_RNA (1)...(19): siRNA sense strand
uggcuaaagaguacagauu

SEQ ID NO: 2356197 - RNA, 19 nt, Homo sapiens
  misc_RNA (1)...(19): siRNA sense strand
aggaaaugcuccaaagugu

SEQ ID NO: 2356198 - RNA, 19 nt, Homo sapiens
  misc_RNA (1)...(19): siRNA sense strand
ccaaaguguaaaagaacaa

SEQ ID NO: 2356199 - RNA, 19 nt, Homo sapiens
  misc_RNA (1)...(19): siRNA sense strand
ccgacuauaugaaagagaa

SEQ ID NO: 2356200 - RNA, 19 nt, Homo sapiens
  misc_RNA (1)...(19): siRNA sense strand
gaacuauggcugaagcaga

SEQ ID NO: 2356201 - RNA, 19 nt, Homo sapiens
  misc_RNA (1)...(19): siRNA sense strand
ccaacuugcauuuaacaaa

SEQ ID NO: 2356202 - RNA, 19 nt, Homo sapiens
  misc_RNA (1)...(19): siRNA sense strand
gaauguagcucuucgacca

SEQ ID NO: 2356203 - RNA, 19 nt, Homo sapiens
  misc_RNA (1)...(19): siRNA sense strand
aguaguagaugaauaccaa

SEQ ID NO: 2356204 - RNA, 19 nt, Homo sapiens
  misc_RNA (1)...(19): siRNA sense strand
gugcaugaauguagcucuu

SEQ ID NO: 2356205 - RNA, 19 nt, Homo sapiens
  misc_RNA (1)...(19): siRNA sense strand
uggauaaagcauacaccaa

SEQ ID NO: 2356206 - RNA, 19 nt, Homo sapiens
  misc_RNA (1)...(19): siRNA sense strand
cauuuacucuuuaggacaa

SEQ ID NO: 2356207 - RNA, 19 nt, Homo sapiens
  misc_RNA (1)...(19): siRNA sense strand
agaaauccgauaagggaga

SEQ ID NO: 2356208 - RNA, 19 nt, Homo sapiens
  misc_RNA (1)...(19): siRNA sense strand
ggacuuggccaaaggucau

SEQ ID NO: 2356209 - RNA, 19 nt, Homo sapiens
  misc_RNA (1)...(19): siRNA sense strand
uggucaaagucaagaaauc

SEQ ID NO: 2356210 - RNA, 19 nt, Homo sapiens
  misc_RNA (1)...(19): siRNA sense strand
agguuaagguggucaaagu

SEQ ID NO: 2356211 - RNA, 19 nt, Homo sapiens
  misc_RNA (1)...(19): siRNA sense strand
caucaaaguaugccuggaa

SEQ ID NO: 2356212 - RNA, 19 nt, Homo sapiens
  misc_RNA (1)...(19): siRNA sense strand
acaaacaagaacuucguaa

SEQ ID NO: 2356213 - RNA, 19 nt, Homo sapiens
  misc_RNA (1)...(19): siRNA sense strand
gagacaaaauugauagcuu

SEQ ID NO: 2356214 - RNA, 19 nt, Homo sapiens
  misc_RNA (1)...(19): siRNA sense strand
uggccaaaggucauauaaa

SEQ ID NO: 2356215 - RNA, 19 nt, Homo sapiens
  misc_RNA (1)...(19): siRNA sense strand
ggucaugaucagaguucga

SEQ ID NO: 2356216 - RNA, 19 nt, Homo sapiens
  misc_RNA (1)...(19): siRNA sense strand
uuguuaauguggagaaagu

SEQ ID NO: 2356217 - RNA, 19 nt, Homo sapiens
  misc_RNA (1)...(19): siRNA sense strand
cgauaucuccggaagaaaa

SEQ ID NO: 2356218 - RNA, 19 nt, Homo sapiens
  misc_RNA (1)...(19): siRNA sense strand
ugacaggaggugaugaaga

SEQ ID NO: 2356219 - RNA, 19 nt, Homo sapiens
  misc_RNA (1)...(19): siRNA sense strand
cauccauuucauagagauu

SEQ ID NO: 2356220 - RNA, 19 nt, Homo sapiens
  misc_RNA (1)...(19): siRNA sense strand
gugaugaagaaguaguaga

SEQ ID NO: 2356221 - RNA, 19 nt, Homo sapiens
  misc_RNA (1)...(19): siRNA sense strand
ggacuaacaaagaauuaca

SEQ ID NO: 2356222 - RNA, 19 nt, Homo sapiens
  misc_RNA (1)...(19): siRNA sense strand
ccgauaagggagauuucua

SEQ ID NO: 2356223 - RNA, 19 nt, Homo sapiens
  misc_RNA (1)...(19): siRNA sense strand
cccuguuggauaugggaaa

SEQ ID NO: 2356224 - RNA, 19 nt, Homo sapiens
  misc_RNA (1)...(19): siRNA sense strand
uggaagaaguaaagaucuc

SEQ ID NO: 2356225 - RNA, 19 nt, Homo sapiens
  misc_RNA (1)...(19): siRNA sense strand
gggaugugguuaugaugga

SEQ ID NO: 2356226 - RNA, 19 nt, Homo sapiens
  misc_RNA (1)...(19): siRNA sense strand
cguaaagucauuaaggagu

SEQ ID NO: 2356227 - RNA, 19 nt, Homo sapiens
  misc_RNA (1)...(19): siRNA sense strand
ccacauggacuuggccaaa

SEQ ID NO: 2356228 - RNA, 19 nt, Homo sapiens
  misc_RNA (1)...(19): siRNA sense strand
ccuggauggaggaacauua

SEQ ID NO: 2356229 - RNA, 19 nt, Homo sapiens
  misc_RNA (1)...(19): siRNA sense strand
cagaggaguauuuguuaau

SEQ ID NO: 2356230 - RNA, 19 nt, Homo sapiens
  misc_RNA (1)...(19): siRNA sense strand
aagcugauggaguggcuaa

SEQ ID NO: 2356231 - RNA, 19 nt, Homo sapiens
  misc_RNA (1)...(19): siRNA sense strand
gaucaagaugacuggcaca

SEQ ID NO: 2356232 - RNA, 19 nt, Homo sapiens
  misc_RNA (1)...(19): siRNA sense strand
caaauaaggcaaauggaag

SEQ ID NO: 2356233 - RNA, 19 nt, Homo sapiens
  misc_RNA (1)...(19): siRNA sense strand
guuaaaugcaagagaagaa

SEQ ID NO: 2356234 - RNA, 19 nt, Homo sapiens
  misc_RNA (1)...(19): siRNA sense strand
cgacuauaugaaagagaaa

SEQ ID NO: 2356235 - RNA, 19 nt, Homo sapiens
  misc_RNA (1)...(19): siRNA sense strand
gcauaagggaggaggaagu

SEQ ID NO: 2356236 - RNA, 19 nt, Homo sapiens
  misc_RNA (1)...(19): siRNA sense strand
caagagaagaacaggauau

SEQ ID NO: 2356237 - RNA, 19 nt, Homo sapiens
  misc_RNA (1)...(19): siRNA sense strand
ggcaaauggaagaaguaaa

SEQ ID NO: 2356238 - RNA, 19 nt, Homo sapiens
  misc_RNA (1)...(19): siRNA sense strand
gaguacagauuauggaaaa

SEQ ID NO: 2356239 - RNA, 19 nt, Homo sapiens
  misc_RNA (1)...(19): siRNA sense strand
augaagaaguaguagauga

SEQ ID NO: 2356240 - RNA, 19 nt, Homo sapiens
  misc_RNA (1)...(19): siRNA sense strand
ugaagaaguaguagaugaa

SEQ ID NO: 2356241 - RNA, 19 nt, Homo sapiens
  misc_RNA (1)...(19): siRNA sense strand
gcauugagccagagcugaa

SEQ ID NO: 2356242 - RNA, 19 nt, Homo sapiens
  misc_RNA (1)...(19): siRNA sense strand
uggaaaauaugaaggacua

SEQ ID NO: 2356243 - RNA, 19 nt, Homo sapiens
  misc_RNA (1)...(19): siRNA sense strand
ggagaaaaucagaguguga

SEQ ID NO: 2356244 - RNA, 19 nt, Homo sapiens
  misc_RNA (1)...(19): siRNA sense strand
caaacuuaucagaggagua

SEQ ID NO: 2356245 - RNA, 19 nt, Homo sapiens
  misc_RNA (1)...(19): siRNA sense strand
aaauaaggcaaauggaaga

SEQ ID NO: 2356246 - RNA, 19 nt, Homo sapiens
  misc_RNA (1)...(19): siRNA sense strand
gggcauaagggaggaggaa

SEQ ID NO: 2356247 - RNA, 19 nt, Homo sapiens
  misc_RNA (1)...(19): siRNA sense strand
gcuccaaaguguaaaagaa

SEQ ID NO: 2356248 - RNA, 19 nt, Homo sapiens
  misc_RNA (1)...(19): siRNA sense strand
gcacaacuaaagaaagcaa

SEQ ID NO: 2356249 - RNA, 19 nt, Homo sapiens
  misc_RNA (1)...(19): siRNA sense strand
uguucagaguucagggaau

SEQ ID NO: 2356250 - RNA, 19 nt, Homo sapiens
  misc_RNA (1)...(19): siRNA sense strand
aggaggugaugaagaagua

SEQ ID NO: 2356251 - RNA, 19 nt, Homo sapiens
  misc_RNA (1)...(19): siRNA sense strand
agauagaguuccuugugaa

SEQ ID NO: 2356252 - RNA, 19 nt, Homo sapiens
  misc_RNA (1)...(19): siRNA sense strand
uggcuaaagaguacagauu

SEQ ID NO: 2356253 - RNA, 19 nt, Homo sapiens
  misc_RNA (1)...(19): siRNA sense strand
aggaaaugcuccaaagugu

SEQ ID NO: 2356254 - RNA, 19 nt, Homo sapiens
  misc_RNA (1)...(19): siRNA sense strand
ccaaaguguaaaagaacaa

SEQ ID NO: 2356255 - RNA, 19 nt, Homo sapiens
  misc_RNA (1)...(19): siRNA sense strand
ccgacuauaugaaagagaa

SEQ ID NO: 2356256 - RNA, 19 nt, Homo sapiens
  misc_RNA (1)...(19): siRNA sense strand
gaacuauggcugaagcaga

SEQ ID NO: 2356257 - RNA, 19 nt, Homo sapiens
  misc_RNA (1)...(19): siRNA sense strand
ccaacuugcauuuaacaaa

SEQ ID NO: 2356258 - RNA, 19 nt, Homo sapiens
  misc_RNA (1)...(19): siRNA sense strand
gaauguagcucuucgacca

SEQ ID NO: 2356259 - RNA, 19 nt, Homo sapiens
  misc_RNA (1)...(19): siRNA sense strand
aguaguagaugaauaccaa

SEQ ID NO: 2356260 - RNA, 19 nt, Homo sapiens
  misc_RNA (1)...(19): siRNA sense strand
gugcaugaauguagcucuu

SEQ ID NO: 2356261 - RNA, 19 nt, Homo sapiens
  misc_RNA (1)...(19): siRNA sense strand
uggauaaagcauacaccaa

SEQ ID NO: 2356262 - RNA, 19 nt, Homo sapiens
  misc_RNA (1)...(19): siRNA sense strand
cauuuacucuuuaggacaa

SEQ ID NO: 2356263 - RNA, 19 nt, Homo sapiens
  misc_RNA (1)...(19): siRNA sense strand
agaaauccgauaagggaga

SEQ ID NO: 2356264 - RNA, 19 nt, Homo sapiens
  misc_RNA (1)...(19): siRNA sense strand
ggacuuggccaaaggucau

SEQ ID NO: 2356265 - RNA, 19 nt, Homo sapiens
  misc_RNA (1)...(19): siRNA sense strand
uggucaaagucaagaaauc

SEQ ID NO: 2356266 - RNA, 19 nt, Homo sapiens
  misc_RNA (1)...(19): siRNA sense strand
agguuaagguggucaaagu

SEQ ID NO: 2356267 - RNA, 19 nt, Homo sapiens
  misc_RNA (1)...(19): siRNA sense strand
caucaaaguaugccuggaa

SEQ ID NO: 2356268 - RNA, 19 nt, Homo sapiens
  misc_RNA (1)...(19): siRNA sense strand
acaaacaagaacuucguaa

SEQ ID NO: 2356269 - RNA, 19 nt, Homo sapiens
  misc_RNA (1)...(19): siRNA sense strand
gagacaaaauugauagcuu

SEQ ID NO: 2356270 - RNA, 19 nt, Homo sapiens
  misc_RNA (1)...(19): siRNA sense strand
uggccaaaggucauauaaa

SEQ ID NO: 2356271 - RNA, 19 nt, Homo sapiens
  misc_RNA (1)...(19): siRNA sense strand
ggucaugaucagaguucga

SEQ ID NO: 2356272 - RNA, 19 nt, Homo sapiens
  misc_RNA (1)...(19): siRNA sense strand
uuguuaauguggagaaagu

SEQ ID NO: 2356273 - RNA, 19 nt, Homo sapiens
  misc_RNA (1)...(19): siRNA sense strand
cgauaucuccggaagaaaa

SEQ ID NO: 2356274 - RNA, 19 nt, Homo sapiens
  misc_RNA (1)...(19): siRNA sense strand
ugacaggaggugaugaaga

SEQ ID NO: 2356275 - RNA, 19 nt, Homo sapiens
  misc_RNA (1)...(19): siRNA sense strand
cauccauuucauagagauu

SEQ ID NO: 2356276 - RNA, 19 nt, Homo sapiens
  misc_RNA (1)...(19): siRNA sense strand
gugaugaagaaguaguaga

SEQ ID NO: 2356277 - RNA, 19 nt, Homo sapiens
  misc_RNA (1)...(19): siRNA sense strand
ggacuaacaaagaauuaca

SEQ ID NO: 2356278 - RNA, 19 nt, Homo sapiens
  misc_RNA (1)...(19): siRNA sense strand
ccgauaagggagauuucua

SEQ ID NO: 2356279 - RNA, 19 nt, Homo sapiens
  misc_RNA (1)...(19): siRNA sense strand
cccuguuggauaugggaaa

SEQ ID NO: 2356280 - RNA, 19 nt, Homo sapiens
  misc_RNA (1)...(19): siRNA sense strand
uggaagaaguaaagaucuc

SEQ ID NO: 2356281 - RNA, 19 nt, Homo sapiens
  misc_RNA (1)...(19): siRNA sense strand
gggaugugguuaugaugga

SEQ ID NO: 2356282 - RNA, 19 nt, Homo sapiens
  misc_RNA (1)...(19): siRNA sense strand
cguaaagucauuaaggagu

SEQ ID NO: 2356283 - RNA, 19 nt, Homo sapiens
  misc_RNA (1)...(19): siRNA sense strand
ccacauggacuuggccaaa

SEQ ID NO: 2356284 - RNA, 19 nt, Homo sapiens
  misc_RNA (1)...(19): siRNA sense strand
ccuggauggaggaacauua

SEQ ID NO: 2356285 - RNA, 19 nt, Homo sapiens
  misc_RNA (1)...(19): siRNA sense strand
cagaggaguauuuguuaau

SEQ ID NO: 2356286 - RNA, 19 nt, Homo sapiens
  misc_RNA (1)...(19): siRNA sense strand
aagcugauggaguggcuaa

SEQ ID NO: 2356287 - RNA, 19 nt, Homo sapiens
  misc_RNA (1)...(19): siRNA sense strand
gaucaagaugacuggcaca

SEQ ID NO: 2356288 - RNA, 19 nt, Homo sapiens
  misc_RNA (1)...(19): siRNA sense strand
caaauaaggcaaauggaag

SEQ ID NO: 2356289 - RNA, 19 nt, Homo sapiens
  misc_RNA (1)...(19): siRNA sense strand
uaaacaagcugcugggcaa

SEQ ID NO: 2356290 - RNA, 19 nt, Homo sapiens
  misc_RNA (1)...(19): siRNA sense strand
ggaacuacgcggagcgagu

SEQ ID NO: 2356291 - RNA, 19 nt, Homo sapiens
  misc_RNA (1)...(19): siRNA sense strand
cggcaaagugcgagcaaag

SEQ ID NO: 2356292 - RNA, 19 nt, Homo sapiens
  misc_RNA (1)...(19): siRNA sense strand
acgacgaggaguuaaacaa

SEQ ID NO: 2356293 - RNA, 19 nt, Homo sapiens
  misc_RNA (1)...(19): siRNA sense strand
gcaaagugaccaucgcuca

SEQ ID NO: 2356294 - RNA, 19 nt, Homo sapiens
  misc_RNA (1)...(19): siRNA sense strand
uaaacaagcugcugggcaa

SEQ ID NO: 2356295 - RNA, 19 nt, Homo sapiens
  misc_RNA (1)...(19): siRNA sense strand
ggaacuacgcggagcgagu

SEQ ID NO: 2356296 - RNA, 19 nt, Homo sapiens
  misc_RNA (1)...(19): siRNA sense strand
cggcaaagugcgagcaaag

SEQ ID NO: 2356297 - RNA, 19 nt, Homo sapiens
  misc_RNA (1)...(19): siRNA sense strand
acgacgaggaguuaaacaa

SEQ ID NO: 2356298 - RNA, 19 nt, Homo sapiens
  misc_RNA (1)...(19): siRNA sense strand
gcaaagugaccaucgcuca

SEQ ID NO: 2356299 - RNA, 19 nt, Homo sapiens
  misc_RNA (1)...(19): siRNA sense strand
aggcagaaauugagccacu

SEQ ID NO: 2356300 - RNA, 19 nt, Homo sapiens
  misc_RNA (1)...(19): siRNA sense strand
auuggaaagcagucaguaa

SEQ ID NO: 2356301 - RNA, 19 nt, Homo sapiens
  misc_RNA (1)...(19): siRNA sense strand
gcuucaucagcuagagaga

SEQ ID NO: 2356302 - RNA, 19 nt, Homo sapiens
  misc_RNA (1)...(19): siRNA sense strand
cagcauggcucaaagcaac

SEQ ID NO: 2356303 - RNA, 19 nt, Homo sapiens
  misc_RNA (1)...(19): siRNA sense strand
aggauuggaaacaaaggaa

SEQ ID NO: 2356304 - RNA, 19 nt, Homo sapiens
  misc_RNA (1)...(19): siRNA sense strand
ggacaggccuccuuggcaa

SEQ ID NO: 2356305 - RNA, 19 nt, Homo sapiens
  misc_RNA (1)...(19): siRNA sense strand
gcaugaaacucgacgcguu

SEQ ID NO: 2356306 - RNA, 19 nt, Homo sapiens
  misc_RNA (1)...(19): siRNA sense strand
ccgcaacagccaaguggaa

SEQ ID NO: 2356307 - RNA, 19 nt, Homo sapiens
  misc_RNA (1)...(19): siRNA sense strand
ccacauuuuaucaggaaua

SEQ ID NO: 2356308 - RNA, 19 nt, Homo sapiens
  misc_RNA (1)...(19): siRNA sense strand
cuaaaggucacguggguca

SEQ ID NO: 2356309 - RNA, 19 nt, Homo sapiens
  misc_RNA (1)...(19): siRNA sense strand
gcgauggcuacaagggcua

SEQ ID NO: 2356310 - RNA, 19 nt, Homo sapiens
  misc_RNA (1)...(19): siRNA sense strand
uggauuagaaagaucacaa

SEQ ID NO: 2356311 - RNA, 19 nt, Homo sapiens
  misc_RNA (1)...(19): siRNA sense strand
auaacaauccagaggacga

SEQ ID NO: 2356312 - RNA, 19 nt, Homo sapiens
  misc_RNA (1)...(19): siRNA sense strand
agaccagcagggugggcaa

SEQ ID NO: 2356313 - RNA, 19 nt, Homo sapiens
  misc_RNA (1)...(19): siRNA sense strand
gaauaacaauccagaggac

SEQ ID NO: 2356314 - RNA, 19 nt, Homo sapiens
  misc_RNA (1)...(19): siRNA sense strand
agccagugugggagaggua

SEQ ID NO: 2356315 - RNA, 19 nt, Homo sapiens
  misc_RNA (1)...(19): siRNA sense strand
ccaggaacgacguggucuu

SEQ ID NO: 2356316 - RNA, 19 nt, Homo sapiens
  misc_RNA (1)...(19): siRNA sense strand
gggucaaugcccacgccua

SEQ ID NO: 2356317 - RNA, 19 nt, Homo sapiens
  misc_RNA (1)...(19): siRNA sense strand
aaucaaggccacugcuaca

SEQ ID NO: 2356318 - RNA, 19 nt, Homo sapiens
  misc_RNA (1)...(19): siRNA sense strand
gcuggaaugacaagcccua

SEQ ID NO: 2356319 - RNA, 19 nt, Homo sapiens
  misc_RNA (1)...(19): siRNA sense strand
ggacaggccuccuuggcaa

SEQ ID NO: 2356320 - RNA, 19 nt, Homo sapiens
  misc_RNA (1)...(19): siRNA sense strand
gcaugaaacucgacgcguu

SEQ ID NO: 2356321 - RNA, 19 nt, Homo sapiens
  misc_RNA (1)...(19): siRNA sense strand
ccgcaacagccaaguggaa

SEQ ID NO: 2356322 - RNA, 19 nt, Homo sapiens
  misc_RNA (1)...(19): siRNA sense strand
ccacauuuuaucaggaaua

SEQ ID NO: 2356323 - RNA, 19 nt, Homo sapiens
  misc_RNA (1)...(19): siRNA sense strand
cuaaaggucacguggguca

SEQ ID NO: 2356324 - RNA, 19 nt, Homo sapiens
  misc_RNA (1)...(19): siRNA sense strand
gcgauggcuacaagggcua

SEQ ID NO: 2356325 - RNA, 19 nt, Homo sapiens
  misc_RNA (1)...(19): siRNA sense strand
uggauuagaaagaucacaa

SEQ ID NO: 2356326 - RNA, 19 nt, Homo sapiens
  misc_RNA (1)...(19): siRNA sense strand
auaacaauccagaggacga

SEQ ID NO: 2356327 - RNA, 19 nt, Homo sapiens
  misc_RNA (1)...(19): siRNA sense strand
agaccagcagggugggcaa

SEQ ID NO: 2356328 - RNA, 19 nt, Homo sapiens
  misc_RNA (1)...(19): siRNA sense strand
gaauaacaauccagaggac

SEQ ID NO: 2356329 - RNA, 19 nt, Homo sapiens
  misc_RNA (1)...(19): siRNA sense strand
agccagugugggagaggua

SEQ ID NO: 2356330 - RNA, 19 nt, Homo sapiens
  misc_RNA (1)...(19): siRNA sense strand
ccaggaacgacguggucuu

SEQ ID NO: 2356331 - RNA, 19 nt, Homo sapiens
  misc_RNA (1)...(19): siRNA sense strand
gggucaaugcccacgccua

SEQ ID NO: 2356332 - RNA, 19 nt, Homo sapiens
  misc_RNA (1)...(19): siRNA sense strand
aaucaaggccacugcuaca

SEQ ID NO: 2356333 - RNA, 19 nt, Homo sapiens
  misc_RNA (1)...(19): siRNA sense strand
gcuggaaugacaagcccua

SEQ ID NO: 2356334 - RNA, 19 nt, Homo sapiens
  misc_RNA (1)...(19): siRNA sense strand
ggacaggccuccuuggcaa

SEQ ID NO: 2356335 - RNA, 19 nt, Homo sapiens
  misc_RNA (1)...(19): siRNA sense strand
gcaugaaacucgacgcguu

SEQ ID NO: 2356336 - RNA, 19 nt, Homo sapiens
  misc_RNA (1)...(19): siRNA sense strand
ccgcaacagccaaguggaa

SEQ ID NO: 2356337 - RNA, 19 nt, Homo sapiens
  misc_RNA (1)...(19): siRNA sense strand
ccacauuuuaucaggaaua

SEQ ID NO: 2356338 - RNA, 19 nt, Homo sapiens
  misc_RNA (1)...(19): siRNA sense strand
cuaaaggucacguggguca

SEQ ID NO: 2356339 - RNA, 19 nt, Homo sapiens
  misc_RNA (1)...(19): siRNA sense strand
gcgauggcuacaagggcua

SEQ ID NO: 2356340 - RNA, 19 nt, Homo sapiens
  misc_RNA (1)...(19): siRNA sense strand
uggauuagaaagaucacaa

SEQ ID NO: 2356341 - RNA, 19 nt, Homo sapiens
  misc_RNA (1)...(19): siRNA sense strand
auaacaauccagaggacga

SEQ ID NO: 2356342 - RNA, 19 nt, Homo sapiens
  misc_RNA (1)...(19): siRNA sense strand
agaccagcagggugggcaa

SEQ ID NO: 2356343 - RNA, 19 nt, Homo sapiens
  misc_RNA (1)...(19): siRNA sense strand
gaauaacaauccagaggac

SEQ ID NO: 2356344 - RNA, 19 nt, Homo sapiens
  misc_RNA (1)...(19): siRNA sense strand
agccagugugggagaggua

SEQ ID NO: 2356345 - RNA, 19 nt, Homo sapiens
  misc_RNA (1)...(19): siRNA sense strand
ccaggaacgacguggucuu

SEQ ID NO: 2356346 - RNA, 19 nt, Homo sapiens
  misc_RNA (1)...(19): siRNA sense strand
gggucaaugcccacgccua

SEQ ID NO: 2356347 - RNA, 19 nt, Homo sapiens
  misc_RNA (1)...(19): siRNA sense strand
aaucaaggccacugcuaca

SEQ ID NO: 2356348 - RNA, 19 nt, Homo sapiens
  misc_RNA (1)...(19): siRNA sense strand
gcuggaaugacaagcccua

SEQ ID NO: 2356349 - RNA, 19 nt, Homo sapiens
  misc_RNA (1)...(19): siRNA sense strand
ccacauuuuaucaggaaua

SEQ ID NO: 2356350 - RNA, 19 nt, Homo sapiens
  misc_RNA (1)...(19): siRNA sense strand
cuaaaggucacguggguca

SEQ ID NO: 2356351 - RNA, 19 nt, Homo sapiens
  misc_RNA (1)...(19): siRNA sense strand
uggauuagaaagaucacaa

SEQ ID NO: 2356352 - RNA, 19 nt, Homo sapiens
  misc_RNA (1)...(19): siRNA sense strand
gggucaaugcccacgccua

SEQ ID NO: 2356353 - RNA, 19 nt, Homo sapiens
  misc_RNA (1)...(19): siRNA sense strand
ggacaggccuccuuggcaa

SEQ ID NO: 2356354 - RNA, 19 nt, Homo sapiens
  misc_RNA (1)...(19): siRNA sense strand
ccacauuuuaucaggaaua

SEQ ID NO: 2356355 - RNA, 19 nt, Homo sapiens
  misc_RNA (1)...(19): siRNA sense strand
cuaaaggucacguggguca

SEQ ID NO: 2356356 - RNA, 19 nt, Homo sapiens
  misc_RNA (1)...(19): siRNA sense strand
uggauuagaaagaucacaa

SEQ ID NO: 2356357 - RNA, 19 nt, Homo sapiens
  misc_RNA (1)...(19): siRNA sense strand
auaacaauccagaggacga

SEQ ID NO: 2356358 - RNA, 19 nt, Homo sapiens
  misc_RNA (1)...(19): siRNA sense strand
agaccagcagggugggcaa

SEQ ID NO: 2356359 - RNA, 19 nt, Homo sapiens
  misc_RNA (1)...(19): siRNA sense strand
gaauaacaauccagaggac

SEQ ID NO: 2356360 - RNA, 19 nt, Homo sapiens
  misc_RNA (1)...(19): siRNA sense strand
agccagugugggagaggua

SEQ ID NO: 2356361 - RNA, 19 nt, Homo sapiens
  misc_RNA (1)...(19): siRNA sense strand
gggucaaugcccacgccua

SEQ ID NO: 2356362 - RNA, 19 nt, Homo sapiens
  misc_RNA (1)...(19): siRNA sense strand
gcuggaaugacaagcccua

SEQ ID NO: 2356363 - RNA, 19 nt, Homo sapiens
  misc_RNA (1)...(19): siRNA sense strand
gcaccuaccugaugggaga

SEQ ID NO: 2356364 - RNA, 19 nt, Homo sapiens
  misc_RNA (1)...(19): siRNA sense strand
aagaagaguuagaggagga

SEQ ID NO: 2356365 - RNA, 19 nt, Homo sapiens
  misc_RNA (1)...(19): siRNA sense strand
cugcaaggaguguggcaaa

SEQ ID NO: 2356366 - RNA, 19 nt, Homo sapiens
  misc_RNA (1)...(19): siRNA sense strand
aagaagaagaagaguuaga

SEQ ID NO: 2356367 - RNA, 19 nt, Homo sapiens
  misc_RNA (1)...(19): siRNA sense strand
ccggaagaagauaggaaau

SEQ ID NO: 2356368 - RNA, 19 nt, Homo sapiens
  misc_RNA (1)...(19): siRNA sense strand
aguuagaggaggaggagga

SEQ ID NO: 2356369 - RNA, 19 nt, Homo sapiens
  misc_RNA (1)...(19): siRNA sense strand
agaccgugcaggagaagaa

SEQ ID NO: 2356370 - RNA, 19 nt, Homo sapiens
  misc_RNA (1)...(19): siRNA sense strand
agcaaagaguggagaaucu

SEQ ID NO: 2356371 - RNA, 19 nt, Homo sapiens
  misc_RNA (1)...(19): siRNA sense strand
ugacaagugaagaagaaga

SEQ ID NO: 2356372 - RNA, 19 nt, Homo sapiens
  misc_RNA (1)...(19): siRNA sense strand
cagucuugcuucaggguga

SEQ ID NO: 2356373 - RNA, 19 nt, Homo sapiens
  misc_RNA (1)...(19): siRNA sense strand
gggagcaguuugaugccaa

SEQ ID NO: 2356374 - RNA, 19 nt, Homo sapiens
  misc_RNA (1)...(19): siRNA sense strand
aguuugaugccaagaacaa

SEQ ID NO: 2356375 - RNA, 19 nt, Homo sapiens
  misc_RNA (1)...(19): siRNA sense strand
aggaggaggaggaggagga

SEQ ID NO: 2356376 - RNA, 19 nt, Homo sapiens
  misc_RNA (1)...(19): siRNA sense strand
cggcaggguucaaugcaga

SEQ ID NO: 2356377 - RNA, 19 nt, Homo sapiens
  misc_RNA (1)...(19): siRNA sense strand
cgaaaugcacacaugaaaa

SEQ ID NO: 2356378 - RNA, 19 nt, Homo sapiens
  misc_RNA (1)...(19): siRNA sense strand
uaacaaagcacuagccacu

SEQ ID NO: 2356379 - RNA, 19 nt, Homo sapiens
  misc_RNA (1)...(19): siRNA sense strand
aggaggacccggaagaaga

SEQ ID NO: 2356380 - RNA, 19 nt, Homo sapiens
  misc_RNA (1)...(19): siRNA sense strand
gcuccaugucccaguacua

SEQ ID NO: 2356381 - RNA, 19 nt, Homo sapiens
  misc_RNA (1)...(19): siRNA sense strand
uggcagaaaucaucgacga

SEQ ID NO: 2356382 - RNA, 19 nt, Homo sapiens
  misc_RNA (1)...(19): siRNA sense strand
aguccaagacgguggcuca

SEQ ID NO: 2356383 - RNA, 19 nt, Homo sapiens
  misc_RNA (1)...(19): siRNA sense strand
aguggguacuguucgguaa

SEQ ID NO: 2356384 - RNA, 19 nt, Homo sapiens
  misc_RNA (1)...(19): siRNA sense strand
ccagcaaagaguggagaau

SEQ ID NO: 2356385 - RNA, 19 nt, Homo sapiens
  misc_RNA (1)...(19): siRNA sense strand
uagaggaggaggaggagga

SEQ ID NO: 2356386 - RNA, 19 nt, Homo sapiens
  misc_RNA (1)...(19): siRNA sense strand
aagaagaagaguuagagga

SEQ ID NO: 2356387 - RNA, 19 nt, Homo sapiens
  misc_RNA (1)...(19): siRNA sense strand
aggaggaggacccggaaga

SEQ ID NO: 2356388 - RNA, 19 nt, Homo sapiens
  misc_RNA (1)...(19): siRNA sense strand
gaucaaaagccgaaaugca

SEQ ID NO: 2356389 - RNA, 19 nt, Homo sapiens
  misc_RNA (1)...(19): siRNA sense strand
aggaggaacaacagaggca

SEQ ID NO: 2356390 - RNA, 19 nt, Homo sapiens
  misc_RNA (1)...(19): siRNA sense strand
aggcugaaguuguggacac

SEQ ID NO: 2356391 - RNA, 19 nt, Homo sapiens
  misc_RNA (1)...(19): siRNA sense strand
ggccagaacuagaaaacca

SEQ ID NO: 2356392 - RNA, 19 nt, Homo sapiens
  misc_RNA (1)...(19): siRNA sense strand
cccggaagaagauaggaaa

SEQ ID NO: 2356393 - RNA, 19 nt, Homo sapiens
  misc_RNA (1)...(19): siRNA sense strand
gugucauggaagaggcuga

SEQ ID NO: 2356394 - RNA, 19 nt, Homo sapiens
  misc_RNA (1)...(19): siRNA sense strand
gaagaagauaggaaaucca

SEQ ID NO: 2356395 - RNA, 19 nt, Homo sapiens
  misc_RNA (1)...(19): siRNA sense strand
augucauccuuuagcaaau

SEQ ID NO: 2356396 - RNA, 19 nt, Homo sapiens
  misc_RNA (1)...(19): siRNA sense strand
ugucacagcacaugcaaca

SEQ ID NO: 2356397 - RNA, 19 nt, Homo sapiens
  misc_RNA (1)...(19): siRNA sense strand
acaggcagcaggaggaaca

SEQ ID NO: 2356398 - RNA, 19 nt, Homo sapiens
  misc_RNA (1)...(19): siRNA sense strand
gccacgauugagaggacua

SEQ ID NO: 2356399 - RNA, 19 nt, Homo sapiens
  misc_RNA (1)...(19): siRNA sense strand
gcaccuaccugaugggaga

SEQ ID NO: 2356400 - RNA, 19 nt, Homo sapiens
  misc_RNA (1)...(19): siRNA sense strand
aagaagaguuagaggagga

SEQ ID NO: 2356401 - RNA, 19 nt, Homo sapiens
  misc_RNA (1)...(19): siRNA sense strand
cugcaaggaguguggcaaa

SEQ ID NO: 2356402 - RNA, 19 nt, Homo sapiens
  misc_RNA (1)...(19): siRNA sense strand
aagaagaagaagaguuaga

SEQ ID NO: 2356403 - RNA, 19 nt, Homo sapiens
  misc_RNA (1)...(19): siRNA sense strand
ccggaagaagauaggaaau

SEQ ID NO: 2356404 - RNA, 19 nt, Homo sapiens
  misc_RNA (1)...(19): siRNA sense strand
aguuagaggaggaggagga

SEQ ID NO: 2356405 - RNA, 19 nt, Homo sapiens
  misc_RNA (1)...(19): siRNA sense strand
agaccgugcaggagaagaa

SEQ ID NO: 2356406 - RNA, 19 nt, Homo sapiens
  misc_RNA (1)...(19): siRNA sense strand
agcaaagaguggagaaucu

SEQ ID NO: 2356407 - RNA, 19 nt, Homo sapiens
  misc_RNA (1)...(19): siRNA sense strand
ugacaagugaagaagaaga

SEQ ID NO: 2356408 - RNA, 19 nt, Homo sapiens
  misc_RNA (1)...(19): siRNA sense strand
cagucuugcuucaggguga

SEQ ID NO: 2356409 - RNA, 19 nt, Homo sapiens
  misc_RNA (1)...(19): siRNA sense strand
gggagcaguuugaugccaa

SEQ ID NO: 2356410 - RNA, 19 nt, Homo sapiens
  misc_RNA (1)...(19): siRNA sense strand
aguuugaugccaagaacaa

SEQ ID NO: 2356411 - RNA, 19 nt, Homo sapiens
  misc_RNA (1)...(19): siRNA sense strand
aggaggaggaggaggagga

SEQ ID NO: 2356412 - RNA, 19 nt, Homo sapiens
  misc_RNA (1)...(19): siRNA sense strand
cggcaggguucaaugcaga

SEQ ID NO: 2356413 - RNA, 19 nt, Homo sapiens
  misc_RNA (1)...(19): siRNA sense strand
cgaaaugcacacaugaaaa

SEQ ID NO: 2356414 - RNA, 19 nt, Homo sapiens
  misc_RNA (1)...(19): siRNA sense strand
uaacaaagcacuagccacu

SEQ ID NO: 2356415 - RNA, 19 nt, Homo sapiens
  misc_RNA (1)...(19): siRNA sense strand
aggaggacccggaagaaga

SEQ ID NO: 2356416 - RNA, 19 nt, Homo sapiens
  misc_RNA (1)...(19): siRNA sense strand
gcuccaugucccaguacua

SEQ ID NO: 2356417 - RNA, 19 nt, Homo sapiens
  misc_RNA (1)...(19): siRNA sense strand
uggcagaaaucaucgacga

SEQ ID NO: 2356418 - RNA, 19 nt, Homo sapiens
  misc_RNA (1)...(19): siRNA sense strand
aguccaagacgguggcuca

SEQ ID NO: 2356419 - RNA, 19 nt, Homo sapiens
  misc_RNA (1)...(19): siRNA sense strand
aguggguacuguucgguaa

SEQ ID NO: 2356420 - RNA, 19 nt, Homo sapiens
  misc_RNA (1)...(19): siRNA sense strand
ccagcaaagaguggagaau

SEQ ID NO: 2356421 - RNA, 19 nt, Homo sapiens
  misc_RNA (1)...(19): siRNA sense strand
uagaggaggaggaggagga

SEQ ID NO: 2356422 - RNA, 19 nt, Homo sapiens
  misc_RNA (1)...(19): siRNA sense strand
aagaagaagaguuagagga

SEQ ID NO: 2356423 - RNA, 19 nt, Homo sapiens
  misc_RNA (1)...(19): siRNA sense strand
aggaggaggacccggaaga

SEQ ID NO: 2356424 - RNA, 19 nt, Homo sapiens
  misc_RNA (1)...(19): siRNA sense strand
gaucaaaagccgaaaugca

SEQ ID NO: 2356425 - RNA, 19 nt, Homo sapiens
  misc_RNA (1)...(19): siRNA sense strand
aggaggaacaacagaggca

SEQ ID NO: 2356426 - RNA, 19 nt, Homo sapiens
  misc_RNA (1)...(19): siRNA sense strand
aggcugaaguuguggacac

SEQ ID NO: 2356427 - RNA, 19 nt, Homo sapiens
  misc_RNA (1)...(19): siRNA sense strand
ggccagaacuagaaaacca

SEQ ID NO: 2356428 - RNA, 19 nt, Homo sapiens
  misc_RNA (1)...(19): siRNA sense strand
cccggaagaagauaggaaa

SEQ ID NO: 2356429 - RNA, 19 nt, Homo sapiens
  misc_RNA (1)...(19): siRNA sense strand
gugucauggaagaggcuga

SEQ ID NO: 2356430 - RNA, 19 nt, Homo sapiens
  misc_RNA (1)...(19): siRNA sense strand
gaagaagauaggaaaucca

SEQ ID NO: 2356431 - RNA, 19 nt, Homo sapiens
  misc_RNA (1)...(19): siRNA sense strand
augucauccuuuagcaaau

SEQ ID NO: 2356432 - RNA, 19 nt, Homo sapiens
  misc_RNA (1)...(19): siRNA sense strand
ugucacagcacaugcaaca

SEQ ID NO: 2356433 - RNA, 19 nt, Homo sapiens
  misc_RNA (1)...(19): siRNA sense strand
acaggcagcaggaggaaca

SEQ ID NO: 2356434 - RNA, 19 nt, Homo sapiens
  misc_RNA (1)...(19): siRNA sense strand
gccacgauugagaggacua

SEQ ID NO: 2356435 - RNA, 19 nt, Homo sapiens
  misc_RNA (1)...(19): siRNA sense strand
gcaccuaccugaugggaga

SEQ ID NO: 2356436 - RNA, 19 nt, Homo sapiens
  misc_RNA (1)...(19): siRNA sense strand
aagaagaguuagaggagga

SEQ ID NO: 2356437 - RNA, 19 nt, Homo sapiens
  misc_RNA (1)...(19): siRNA sense strand
cugcaaggaguguggcaaa

SEQ ID NO: 2356438 - RNA, 19 nt, Homo sapiens
  misc_RNA (1)...(19): siRNA sense strand
aagaagaagaagaguuaga

SEQ ID NO: 2356439 - RNA, 19 nt, Homo sapiens
  misc_RNA (1)...(19): siRNA sense strand
ccggaagaagauaggaaau

SEQ ID NO: 2356440 - RNA, 19 nt, Homo sapiens
  misc_RNA (1)...(19): siRNA sense strand
aguuagaggaggaggagga

SEQ ID NO: 2356441 - RNA, 19 nt, Homo sapiens
  misc_RNA (1)...(19): siRNA sense strand
agaccgugcaggagaagaa

SEQ ID NO: 2356442 - RNA, 19 nt, Homo sapiens
  misc_RNA (1)...(19): siRNA sense strand
agcaaagaguggagaaucu

SEQ ID NO: 2356443 - RNA, 19 nt, Homo sapiens
  misc_RNA (1)...(19): siRNA sense strand
ugacaagugaagaagaaga

SEQ ID NO: 2356444 - RNA, 19 nt, Homo sapiens
  misc_RNA (1)...(19): siRNA sense strand
cagucuugcuucaggguga

SEQ ID NO: 2356445 - RNA, 19 nt, Homo sapiens
  misc_RNA (1)...(19): siRNA sense strand
gggagcaguuugaugccaa

SEQ ID NO: 2356446 - RNA, 19 nt, Homo sapiens
  misc_RNA (1)...(19): siRNA sense strand
aguuugaugccaagaacaa

SEQ ID NO: 2356447 - RNA, 19 nt, Homo sapiens
  misc_RNA (1)...(19): siRNA sense strand
aggaggaggaggaggagga

SEQ ID NO: 2356448 - RNA, 19 nt, Homo sapiens
  misc_RNA (1)...(19): siRNA sense strand
cggcaggguucaaugcaga

SEQ ID NO: 2356449 - RNA, 19 nt, Homo sapiens
  misc_RNA (1)...(19): siRNA sense strand
cgaaaugcacacaugaaaa

SEQ ID NO: 2356450 - RNA, 19 nt, Homo sapiens
  misc_RNA (1)...(19): siRNA sense strand
uaacaaagcacuagccacu

SEQ ID NO: 2356451 - RNA, 19 nt, Homo sapiens
  misc_RNA (1)...(19): siRNA sense strand
aggaggacccggaagaaga

SEQ ID NO: 2356452 - RNA, 19 nt, Homo sapiens
  misc_RNA (1)...(19): siRNA sense strand
gcuccaugucccaguacua

SEQ ID NO: 2356453 - RNA, 19 nt, Homo sapiens
  misc_RNA (1)...(19): siRNA sense strand
uggcagaaaucaucgacga

SEQ ID NO: 2356454 - RNA, 19 nt, Homo sapiens
  misc_RNA (1)...(19): siRNA sense strand
aguccaagacgguggcuca

SEQ ID NO: 2356455 - RNA, 19 nt, Homo sapiens
  misc_RNA (1)...(19): siRNA sense strand
aguggguacuguucgguaa

SEQ ID NO: 2356456 - RNA, 19 nt, Homo sapiens
  misc_RNA (1)...(19): siRNA sense strand
ccagcaaagaguggagaau

SEQ ID NO: 2356457 - RNA, 19 nt, Homo sapiens
  misc_RNA (1)...(19): siRNA sense strand
uagaggaggaggaggagga

SEQ ID NO: 2356458 - RNA, 19 nt, Homo sapiens
  misc_RNA (1)...(19): siRNA sense strand
aagaagaagaguuagagga

SEQ ID NO: 2356459 - RNA, 19 nt, Homo sapiens
  misc_RNA (1)...(19): siRNA sense strand
aggaggaggacccggaaga

SEQ ID NO: 2356460 - RNA, 19 nt, Homo sapiens
  misc_RNA (1)...(19): siRNA sense strand
gaucaaaagccgaaaugca

SEQ ID NO: 2356461 - RNA, 19 nt, Homo sapiens
  misc_RNA (1)...(19): siRNA sense strand
aggaggaacaacagaggca

SEQ ID NO: 2356462 - RNA, 19 nt, Homo sapiens
  misc_RNA (1)...(19): siRNA sense strand
aggcugaaguuguggacac

SEQ ID NO: 2356463 - RNA, 19 nt, Homo sapiens
  misc_RNA (1)...(19): siRNA sense strand
ggcccaugguagugagaac

SEQ ID NO: 2356464 - RNA, 19 nt, Homo sapiens
  misc_RNA (1)...(19): siRNA sense strand
ggccagaacuagaaaacca

SEQ ID NO: 2356465 - RNA, 19 nt, Homo sapiens
  misc_RNA (1)...(19): siRNA sense strand
cccggaagaagauaggaaa

SEQ ID NO: 2356466 - RNA, 19 nt, Homo sapiens
  misc_RNA (1)...(19): siRNA sense strand
gugucauggaagaggcuga

SEQ ID NO: 2356467 - RNA, 19 nt, Homo sapiens
  misc_RNA (1)...(19): siRNA sense strand
gaagaagauaggaaaucca

SEQ ID NO: 2356468 - RNA, 19 nt, Homo sapiens
  misc_RNA (1)...(19): siRNA sense strand
augucauccuuuagcaaau

SEQ ID NO: 2356469 - RNA, 19 nt, Homo sapiens
  misc_RNA (1)...(19): siRNA sense strand
ugucacagcacaugcaaca

SEQ ID NO: 2356470 - RNA, 19 nt, Homo sapiens
  misc_RNA (1)...(19): siRNA sense strand
acaggcagcaggaggaaca

SEQ ID NO: 2356471 - RNA, 19 nt, Homo sapiens
  misc_RNA (1)...(19): siRNA sense strand
gccacgauugagaggacua

SEQ ID NO: 2356472 - RNA, 19 nt, Homo sapiens
  misc_RNA (1)...(19): siRNA sense strand
gaacaaugccacauggaca

SEQ ID NO: 2356473 - RNA, 19 nt, Homo sapiens
  misc_RNA (1)...(19): siRNA sense strand
gcuggaagguggagagccu

SEQ ID NO: 2356474 - RNA, 19 nt, Homo sapiens
  misc_RNA (1)...(19): siRNA sense strand
cccaaagucaagaaguauu

SEQ ID NO: 2356475 - RNA, 19 nt, Homo sapiens
  misc_RNA (1)...(19): siRNA sense strand
ggaggagcuacuagacaca

SEQ ID NO: 2356476 - RNA, 19 nt, Homo sapiens
  misc_RNA (1)...(19): siRNA sense strand
aggaaugagguuacagauu

SEQ ID NO: 2356477 - RNA, 19 nt, Homo sapiens
  misc_RNA (1)...(19): siRNA sense strand
guugcaaaccugacggaau

SEQ ID NO: 2356478 - RNA, 19 nt, Homo sapiens
  misc_RNA (1)...(19): siRNA sense strand
auaacuaaccaacuggaaa

SEQ ID NO: 2356479 - RNA, 19 nt, Homo sapiens
  misc_RNA (1)...(19): siRNA sense strand
uauacugauguuugggaaa

SEQ ID NO: 2356480 - RNA, 19 nt, Homo sapiens
  misc_RNA (1)...(19): siRNA sense strand
gagcaguuuguuaaggaau

SEQ ID NO: 2356481 - RNA, 19 nt, Homo sapiens
  misc_RNA (1)...(19): siRNA sense strand
cuaaacuuuuggaaggaaa

SEQ ID NO: 2356482 - RNA, 19 nt, Homo sapiens
  misc_RNA (1)...(19): siRNA sense strand
aaggaaaaguaaaggagga

SEQ ID NO: 2356483 - RNA, 19 nt, Homo sapiens
  misc_RNA (1)...(19): siRNA sense strand
acucaauguagaagaggga

SEQ ID NO: 2356484 - RNA, 19 nt, Homo sapiens
  misc_RNA (1)...(19): siRNA sense strand
ccgagaucucaaacauaaa

SEQ ID NO: 2356485 - RNA, 19 nt, Homo sapiens
  misc_RNA (1)...(19): siRNA sense strand
ugaugauguaauugugcaa

SEQ ID NO: 2356486 - RNA, 19 nt, Homo sapiens
  misc_RNA (1)...(19): siRNA sense strand
auguaauugugcaagguga

SEQ ID NO: 2356487 - RNA, 19 nt, Homo sapiens
  misc_RNA (1)...(19): siRNA sense strand
gggccauugcagcuauaaa

SEQ ID NO: 2356488 - RNA, 19 nt, Homo sapiens
  misc_RNA (1)...(19): siRNA sense strand
cauuugaagccauggggaa

SEQ ID NO: 2356489 - RNA, 19 nt, Homo sapiens
  misc_RNA (1)...(19): siRNA sense strand
ucaauguagaagagggacu

SEQ ID NO: 2356490 - RNA, 19 nt, Homo sapiens
  misc_RNA (1)...(19): siRNA sense strand
caggcaaauucaaccuaau

SEQ ID NO: 2356491 - RNA, 19 nt, Homo sapiens
  misc_RNA (1)...(19): siRNA sense strand
aggaaugagguuacagauu

SEQ ID NO: 2356492 - RNA, 19 nt, Homo sapiens
  misc_RNA (1)...(19): siRNA sense strand
guugcaaaccugacggaau

SEQ ID NO: 2356493 - RNA, 19 nt, Homo sapiens
  misc_RNA (1)...(19): siRNA sense strand
auaacuaaccaacuggaaa

SEQ ID NO: 2356494 - RNA, 19 nt, Homo sapiens
  misc_RNA (1)...(19): siRNA sense strand
uauacugauguuugggaaa

SEQ ID NO: 2356495 - RNA, 19 nt, Homo sapiens
  misc_RNA (1)...(19): siRNA sense strand
gagcaguuuguuaaggaau

SEQ ID NO: 2356496 - RNA, 19 nt, Homo sapiens
  misc_RNA (1)...(19): siRNA sense strand
cuaaacuuuuggaaggaaa

SEQ ID NO: 2356497 - RNA, 19 nt, Homo sapiens
  misc_RNA (1)...(19): siRNA sense strand
aaggaaaaguaaaggagga

SEQ ID NO: 2356498 - RNA, 19 nt, Homo sapiens
  misc_RNA (1)...(19): siRNA sense strand
acucaauguagaagaggga

SEQ ID NO: 2356499 - RNA, 19 nt, Homo sapiens
  misc_RNA (1)...(19): siRNA sense strand
ccgagaucucaaacauaaa

SEQ ID NO: 2356500 - RNA, 19 nt, Homo sapiens
  misc_RNA (1)...(19): siRNA sense strand
ugaugauguaauugugcaa

SEQ ID NO: 2356501 - RNA, 19 nt, Homo sapiens
  misc_RNA (1)...(19): siRNA sense strand
auguaauugugcaagguga

SEQ ID NO: 2356502 - RNA, 19 nt, Homo sapiens
  misc_RNA (1)...(19): siRNA sense strand
gggccauugcagcuauaaa

SEQ ID NO: 2356503 - RNA, 19 nt, Homo sapiens
  misc_RNA (1)...(19): siRNA sense strand
cauuugaagccauggggaa

SEQ ID NO: 2356504 - RNA, 19 nt, Homo sapiens
  misc_RNA (1)...(19): siRNA sense strand
ucaauguagaagagggacu

SEQ ID NO: 2356505 - RNA, 19 nt, Homo sapiens
  misc_RNA (1)...(19): siRNA sense strand
caggcaaauucaaccuaau

SEQ ID NO: 2356506 - RNA, 19 nt, Homo sapiens
  misc_RNA (1)...(19): siRNA sense strand
cuacaguggacuagaauau

SEQ ID NO: 2356507 - RNA, 19 nt, Homo sapiens
  misc_RNA (1)...(19): siRNA sense strand
cugcaaaacacuauggaaa

SEQ ID NO: 2356508 - RNA, 19 nt, Homo sapiens
  misc_RNA (1)...(19): siRNA sense strand
cgaaauggaaacugcaaau

SEQ ID NO: 2356509 - RNA, 19 nt, Homo sapiens
  misc_RNA (1)...(19): siRNA sense strand
ccguggaacuagaguggau

SEQ ID NO: 2356510 - RNA, 19 nt, Homo sapiens
  misc_RNA (1)...(19): siRNA sense strand
cagugaaaguuguggugga

SEQ ID NO: 2356511 - RNA, 19 nt, Homo sapiens
  misc_RNA (1)...(19): siRNA sense strand
gcgaaauggaaacugcaaa

SEQ ID NO: 2356512 - RNA, 19 nt, Homo sapiens
  misc_RNA (1)...(19): siRNA sense strand
uuaaggaagcugaagaaau

SEQ ID NO: 2356513 - RNA, 19 nt, Homo sapiens
  misc_RNA (1)...(19): siRNA sense strand
gcuccuugcccgagaacau

SEQ ID NO: 2356514 - RNA, 19 nt, Homo sapiens
  misc_RNA (1)...(19): siRNA sense strand
gggugaagaaacauuuaaa

SEQ ID NO: 2356515 - RNA, 19 nt, Homo sapiens
  misc_RNA (1)...(19): siRNA sense strand
gaaauuugacaaugcacua

SEQ ID NO: 2356516 - RNA, 19 nt, Homo sapiens
  misc_RNA (1)...(19): siRNA sense strand
cuauggaaaccuuggaaga

SEQ ID NO: 2356517 - RNA, 19 nt, Homo sapiens
  misc_RNA (1)...(19): siRNA sense strand
ggcaauauucagugacaga

SEQ ID NO: 2356518 - RNA, 19 nt, Homo sapiens
  misc_RNA (1)...(19): siRNA sense strand
auuuaaggaagcugaagaa

SEQ ID NO: 2356519 - RNA, 19 nt, Homo sapiens
  misc_RNA (1)...(19): siRNA sense strand
cuuuaucagucaaugagaa

SEQ ID NO: 2356520 - RNA, 19 nt, Homo sapiens
  misc_RNA (1)...(19): siRNA sense strand
gaucuauagcaauugggaa

SEQ ID NO: 2356521 - RNA, 19 nt, Homo sapiens
  misc_RNA (1)...(19): siRNA sense strand
cugaagaaguggugcaguc

SEQ ID NO: 2356522 - RNA, 19 nt, Homo sapiens
  misc_RNA (1)...(19): siRNA sense strand
gugaauuuaagaaggcaga

SEQ ID NO: 2356523 - RNA, 19 nt, Homo sapiens
  misc_RNA (1)...(19): siRNA sense strand
ccacguagcaacagcucau

SEQ ID NO: 2356524 - RNA, 19 nt, Homo sapiens
  misc_RNA (1)...(19): siRNA sense strand
gcuacaguggacuagaaua

SEQ ID NO: 2356525 - RNA, 19 nt, Homo sapiens
  misc_RNA (1)...(19): siRNA sense strand
gguugcuucaugugcgaaa

SEQ ID NO: 2356526 - RNA, 19 nt, Homo sapiens
  misc_RNA (1)...(19): siRNA sense strand
uggaaaccuuggaagacuu

SEQ ID NO: 2356527 - RNA, 19 nt, Homo sapiens
  misc_RNA (1)...(19): siRNA sense strand
uacugagagcuuuggauaa

SEQ ID NO: 2356528 - RNA, 19 nt, Homo sapiens
  misc_RNA (1)...(19): siRNA sense strand
cgaggcaaugaaagaaauu

SEQ ID NO: 2356529 - RNA, 19 nt, Homo sapiens
  misc_RNA (1)...(19): siRNA sense strand
cugucagucuguugcaauu

SEQ ID NO: 2356530 - RNA, 19 nt, Homo sapiens
  misc_RNA (1)...(19): siRNA sense strand
augaaaaugcugagaaacu

SEQ ID NO: 2356531 - RNA, 19 nt, Homo sapiens
  misc_RNA (1)...(19): siRNA sense strand
cuauagcaauugggaagaa

SEQ ID NO: 2356532 - RNA, 19 nt, Homo sapiens
  misc_RNA (1)...(19): siRNA sense strand
aagaaguggugcaguccuu

SEQ ID NO: 2356533 - RNA, 19 nt, Homo sapiens
  misc_RNA (1)...(19): siRNA sense strand
ggauaaaagacauuugcuu

SEQ ID NO: 2356534 - RNA, 19 nt, Homo sapiens
  misc_RNA (1)...(19): siRNA sense strand
guggacuagaauaugauua

SEQ ID NO: 2356535 - RNA, 19 nt, Homo sapiens
  misc_RNA (1)...(19): siRNA sense strand
caaagagggugaaagcacu

SEQ ID NO: 2356536 - RNA, 19 nt, Homo sapiens
  misc_RNA (1)...(19): siRNA sense strand
ccauuggaaauuacgagaa

SEQ ID NO: 2356537 - RNA, 19 nt, Homo sapiens
  misc_RNA (1)...(19): siRNA sense strand
uuggaaauuacgagaaagu

SEQ ID NO: 2356538 - RNA, 19 nt, Homo sapiens
  misc_RNA (1)...(19): siRNA sense strand
gaauaugauuaucgagguc

SEQ ID NO: 2356539 - RNA, 19 nt, Homo sapiens
  misc_RNA (1)...(19): siRNA sense strand
ccaagaagcaugugcgacu

SEQ ID NO: 2356540 - RNA, 19 nt, Homo sapiens
  misc_RNA (1)...(19): siRNA sense strand
gagauuacaucaaugccaa

SEQ ID NO: 2356541 - RNA, 19 nt, Homo sapiens
  misc_RNA (1)...(19): siRNA sense strand
ccgagagggcaaggagaaa

SEQ ID NO: 2356542 - RNA, 19 nt, Homo sapiens
  misc_RNA (1)...(19): siRNA sense strand
uggcagagguggaggagag

SEQ ID NO: 2356543 - RNA, 19 nt, Homo sapiens
  misc_RNA (1)...(19): siRNA sense strand
cagaauacacugugcggca

SEQ ID NO: 2356544 - RNA, 19 nt, Homo sapiens
  misc_RNA (1)...(19): siRNA sense strand
ccaucagacaccagaauca

SEQ ID NO: 2356545 - RNA, 19 nt, Homo sapiens
  misc_RNA (1)...(19): siRNA sense strand
acgggaaggagaaggucua

SEQ ID NO: 2356546 - RNA, 19 nt, Homo sapiens
  misc_RNA (1)...(19): siRNA sense strand
gugucggacuucugggaga

SEQ ID NO: 2356547 - RNA, 19 nt, Homo sapiens
  misc_RNA (1)...(19): siRNA sense strand
ggcuaugacgggaaggaga

SEQ ID NO: 2356548 - RNA, 19 nt, Homo sapiens
  misc_RNA (1)...(19): siRNA sense strand
aggagaaauguguccacua

SEQ ID NO: 2356549 - RNA, 19 nt, Homo sapiens
  misc_RNA (1)...(19): siRNA sense strand
ccauccaguaccaggaaga

SEQ ID NO: 2356550 - RNA, 19 nt, Homo sapiens
  misc_RNA (1)...(19): siRNA sense strand
ccaagaagcaugugcgacu

SEQ ID NO: 2356551 - RNA, 19 nt, Homo sapiens
  misc_RNA (1)...(19): siRNA sense strand
gagauuacaucaaugccaa

SEQ ID NO: 2356552 - RNA, 19 nt, Homo sapiens
  misc_RNA (1)...(19): siRNA sense strand
ccgagagggcaaggagaaa

SEQ ID NO: 2356553 - RNA, 19 nt, Homo sapiens
  misc_RNA (1)...(19): siRNA sense strand
uggcagagguggaggagag

SEQ ID NO: 2356554 - RNA, 19 nt, Homo sapiens
  misc_RNA (1)...(19): siRNA sense strand
cagaauacacugugcggca

SEQ ID NO: 2356555 - RNA, 19 nt, Homo sapiens
  misc_RNA (1)...(19): siRNA sense strand
ccaucagacaccagaauca

SEQ ID NO: 2356556 - RNA, 19 nt, Homo sapiens
  misc_RNA (1)...(19): siRNA sense strand
acgggaaggagaaggucua

SEQ ID NO: 2356557 - RNA, 19 nt, Homo sapiens
  misc_RNA (1)...(19): siRNA sense strand
gugucggacuucugggaga

SEQ ID NO: 2356558 - RNA, 19 nt, Homo sapiens
  misc_RNA (1)...(19): siRNA sense strand
ggcuaugacgggaaggaga

SEQ ID NO: 2356559 - RNA, 19 nt, Homo sapiens
  misc_RNA (1)...(19): siRNA sense strand
aggagaaauguguccacua

SEQ ID NO: 2356560 - RNA, 19 nt, Homo sapiens
  misc_RNA (1)...(19): siRNA sense strand
ccauccaguaccaggaaga

SEQ ID NO: 2356561 - RNA, 19 nt, Homo sapiens
  misc_RNA (1)...(19): siRNA sense strand
ccaagaagcaugugcgacu

SEQ ID NO: 2356562 - RNA, 19 nt, Homo sapiens
  misc_RNA (1)...(19): siRNA sense strand
gagauuacaucaaugccaa

SEQ ID NO: 2356563 - RNA, 19 nt, Homo sapiens
  misc_RNA (1)...(19): siRNA sense strand
ccgagagggcaaggagaaa

SEQ ID NO: 2356564 - RNA, 19 nt, Homo sapiens
  misc_RNA (1)...(19): siRNA sense strand
uggcagagguggaggagag

SEQ ID NO: 2356565 - RNA, 19 nt, Homo sapiens
  misc_RNA (1)...(19): siRNA sense strand
cagaauacacugugcggca

SEQ ID NO: 2356566 - RNA, 19 nt, Homo sapiens
  misc_RNA (1)...(19): siRNA sense strand
ccaucagacaccagaauca

SEQ ID NO: 2356567 - RNA, 19 nt, Homo sapiens
  misc_RNA (1)...(19): siRNA sense strand
acgggaaggagaaggucua

SEQ ID NO: 2356568 - RNA, 19 nt, Homo sapiens
  misc_RNA (1)...(19): siRNA sense strand
gugucggacuucugggaga

SEQ ID NO: 2356569 - RNA, 19 nt, Homo sapiens
  misc_RNA (1)...(19): siRNA sense strand
ggcuaugacgggaaggaga

SEQ ID NO: 2356570 - RNA, 19 nt, Homo sapiens
  misc_RNA (1)...(19): siRNA sense strand
aggagaaauguguccacua

SEQ ID NO: 2356571 - RNA, 19 nt, Homo sapiens
  misc_RNA (1)...(19): siRNA sense strand
ccauccaguaccaggaaga

SEQ ID NO: 2356572 - RNA, 19 nt, Homo sapiens
  misc_RNA (1)...(19): siRNA sense strand
ccuuguaguaagacaccaa

SEQ ID NO: 2356573 - RNA, 19 nt, Homo sapiens
  misc_RNA (1)...(19): siRNA sense strand
cagcagauuccaagccuca

SEQ ID NO: 2356574 - RNA, 19 nt, Homo sapiens
  misc_RNA (1)...(19): siRNA sense strand
ggucuuugcccauggagca

SEQ ID NO: 2356575 - RNA, 19 nt, Homo sapiens
  misc_RNA (1)...(19): siRNA sense strand
aagaauuugucguggaaaa

SEQ ID NO: 2356576 - RNA, 19 nt, Homo sapiens
  misc_RNA (1)...(19): siRNA sense strand
aagaauaauuggugccaca

SEQ ID NO: 2356577 - RNA, 19 nt, Homo sapiens
  misc_RNA (1)...(19): siRNA sense strand
cagaauggaaagaguaaaa

SEQ ID NO: 2356578 - RNA, 19 nt, Homo sapiens
  misc_RNA (1)...(19): siRNA sense strand
acguguagugaaugggaaa

SEQ ID NO: 2356579 - RNA, 19 nt, Homo sapiens
  misc_RNA (1)...(19): siRNA sense strand
acagcaaaucaaagaagaa

SEQ ID NO: 2356580 - RNA, 19 nt, Homo sapiens
  misc_RNA (1)...(19): siRNA sense strand
cagaauugauugaagcguu

SEQ ID NO: 2356581 - RNA, 19 nt, Homo sapiens
  misc_RNA (1)...(19): siRNA sense strand
cagacuuggugcuggcgaa

SEQ ID NO: 2356582 - RNA, 19 nt, Homo sapiens
  misc_RNA (1)...(19): siRNA sense strand
aacagaauggaaagaguaa

SEQ ID NO: 2356583 - RNA, 19 nt, Homo sapiens
  misc_RNA (1)...(19): siRNA sense strand
cugaaguggaagggauuua

SEQ ID NO: 2356584 - RNA, 19 nt, Homo sapiens
  misc_RNA (1)...(19): siRNA sense strand
gugaaucugaugacagcaa

SEQ ID NO: 2356585 - RNA, 19 nt, Homo sapiens
  misc_RNA (1)...(19): siRNA sense strand
cugaagaauuugucgugga

SEQ ID NO: 2356586 - RNA, 19 nt, Homo sapiens
  misc_RNA (1)...(19): siRNA sense strand
agugaaugggaaaguggaa

SEQ ID NO: 2356587 - RNA, 19 nt, Homo sapiens
  misc_RNA (1)...(19): siRNA sense strand
auuuacagaugcugacaau

SEQ ID NO: 2356588 - RNA, 19 nt, Homo sapiens
  misc_RNA (1)...(19): siRNA sense strand
aggauuugccagaggucuu

SEQ ID NO: 2356589 - RNA, 19 nt, Homo sapiens
  misc_RNA (1)...(19): siRNA sense strand
acuuggugcuggcgaaaga

SEQ ID NO: 2356590 - RNA, 19 nt, Homo sapiens
  misc_RNA (1)...(19): siRNA sense strand
cuugggaaccugaagaaaa

SEQ ID NO: 2356591 - RNA, 19 nt, Homo sapiens
  misc_RNA (1)...(19): siRNA sense strand
gaaucugaugacagcaaau

SEQ ID NO: 2356592 - RNA, 19 nt, Homo sapiens
  misc_RNA (1)...(19): siRNA sense strand
gaauauuuccugaagugga

SEQ ID NO: 2356593 - RNA, 19 nt, Homo sapiens
  misc_RNA (1)...(19): siRNA sense strand
gaaagauucagaugaggca

SEQ ID NO: 2356594 - RNA, 19 nt, Homo sapiens
  misc_RNA (1)...(19): siRNA sense strand
aagaauuugucguggaaaa

SEQ ID NO: 2356595 - RNA, 19 nt, Homo sapiens
  misc_RNA (1)...(19): siRNA sense strand
aagaauaauuggugccaca

SEQ ID NO: 2356596 - RNA, 19 nt, Homo sapiens
  misc_RNA (1)...(19): siRNA sense strand
cagaauggaaagaguaaaa

SEQ ID NO: 2356597 - RNA, 19 nt, Homo sapiens
  misc_RNA (1)...(19): siRNA sense strand
acguguagugaaugggaaa

SEQ ID NO: 2356598 - RNA, 19 nt, Homo sapiens
  misc_RNA (1)...(19): siRNA sense strand
acagcaaaucaaagaagaa

SEQ ID NO: 2356599 - RNA, 19 nt, Homo sapiens
  misc_RNA (1)...(19): siRNA sense strand
cagaauugauugaagcguu

SEQ ID NO: 2356600 - RNA, 19 nt, Homo sapiens
  misc_RNA (1)...(19): siRNA sense strand
cagacuuggugcuggcgaa

SEQ ID NO: 2356601 - RNA, 19 nt, Homo sapiens
  misc_RNA (1)...(19): siRNA sense strand
aacagaauggaaagaguaa

SEQ ID NO: 2356602 - RNA, 19 nt, Homo sapiens
  misc_RNA (1)...(19): siRNA sense strand
cugaaguggaagggauuua

SEQ ID NO: 2356603 - RNA, 19 nt, Homo sapiens
  misc_RNA (1)...(19): siRNA sense strand
gugaaucugaugacagcaa

SEQ ID NO: 2356604 - RNA, 19 nt, Homo sapiens
  misc_RNA (1)...(19): siRNA sense strand
cugaagaauuugucgugga

SEQ ID NO: 2356605 - RNA, 19 nt, Homo sapiens
  misc_RNA (1)...(19): siRNA sense strand
agugaaugggaaaguggaa

SEQ ID NO: 2356606 - RNA, 19 nt, Homo sapiens
  misc_RNA (1)...(19): siRNA sense strand
auuuacagaugcugacaau

SEQ ID NO: 2356607 - RNA, 19 nt, Homo sapiens
  misc_RNA (1)...(19): siRNA sense strand
aggauuugccagaggucuu

SEQ ID NO: 2356608 - RNA, 19 nt, Homo sapiens
  misc_RNA (1)...(19): siRNA sense strand
acuuggugcuggcgaaaga

SEQ ID NO: 2356609 - RNA, 19 nt, Homo sapiens
  misc_RNA (1)...(19): siRNA sense strand
cuugggaaccugaagaaaa

SEQ ID NO: 2356610 - RNA, 19 nt, Homo sapiens
  misc_RNA (1)...(19): siRNA sense strand
gaaucugaugacagcaaau

SEQ ID NO: 2356611 - RNA, 19 nt, Homo sapiens
  misc_RNA (1)...(19): siRNA sense strand
gaauauuuccugaagugga

SEQ ID NO: 2356612 - RNA, 19 nt, Homo sapiens
  misc_RNA (1)...(19): siRNA sense strand
gaaagauucagaugaggca

SEQ ID NO: 2356613 - RNA, 19 nt, Homo sapiens
  misc_RNA (1)...(19): siRNA sense strand
uggaaauggcccugaaauu

SEQ ID NO: 2356614 - RNA, 19 nt, Homo sapiens
  misc_RNA (1)...(19): siRNA sense strand
cauucaaaguucagcaaca

SEQ ID NO: 2356615 - RNA, 19 nt, Homo sapiens
  misc_RNA (1)...(19): siRNA sense strand
ugaaagagcuaucugguca

SEQ ID NO: 2356616 - RNA, 19 nt, Homo sapiens
  misc_RNA (1)...(19): siRNA sense strand
agacaaagaccaaaggcca

SEQ ID NO: 2356617 - RNA, 19 nt, Homo sapiens
  misc_RNA (1)...(19): siRNA sense strand
cuggacagguagugaauca

SEQ ID NO: 2356618 - RNA, 19 nt, Homo sapiens
  misc_RNA (1)...(19): siRNA sense strand
gacaaagaccaaaggccaa

SEQ ID NO: 2356619 - RNA, 19 nt, Homo sapiens
  misc_RNA (1)...(19): siRNA sense strand
gaacuauuggacagagaau

SEQ ID NO: 2356620 - RNA, 19 nt, Homo sapiens
  misc_RNA (1)...(19): siRNA sense strand
guugaaugauggugggaac

SEQ ID NO: 2356621 - RNA, 19 nt, Homo sapiens
  misc_RNA (1)...(19): siRNA sense strand
cguaacauacauugcuuaa

SEQ ID NO: 2356622 - RNA, 19 nt, Homo sapiens
  misc_RNA (1)...(19): siRNA sense strand
ggcacuaagaccuggaaau

SEQ ID NO: 2356623 - RNA, 19 nt, Homo sapiens
  misc_RNA (1)...(19): siRNA sense strand
acuauuggacagagaauuu

SEQ ID NO: 2356624 - RNA, 19 nt, Homo sapiens
  misc_RNA (1)...(19): siRNA sense strand
uggaguuaauguaguagaa

SEQ ID NO: 2356625 - RNA, 19 nt, Homo sapiens
  misc_RNA (1)...(19): siRNA sense strand
ggaauauugucgagcugga

SEQ ID NO: 2356626 - RNA, 19 nt, Homo sapiens
  misc_RNA (1)...(19): siRNA sense strand
caguguaagacuccaauaa

SEQ ID NO: 2356627 - RNA, 19 nt, Homo sapiens
  misc_RNA (1)...(19): siRNA sense strand
aggaacuauuggacagaga

SEQ ID NO: 2356628 - RNA, 19 nt, Homo sapiens
  misc_RNA (1)...(19): siRNA sense strand
cgaugugcauugaagcgaa

SEQ ID NO: 2356629 - RNA, 19 nt, Homo sapiens
  misc_RNA (1)...(19): siRNA sense strand
gcaacagaugcuucaacaa

SEQ ID NO: 2356630 - RNA, 19 nt, Homo sapiens
  misc_RNA (1)...(19): siRNA sense strand
accagaaguguuacagaua

SEQ ID NO: 2356631 - RNA, 19 nt, Homo sapiens
  misc_RNA (1)...(19): siRNA sense strand
aguccuugcuccuggugaa

SEQ ID NO: 2356632 - RNA, 19 nt, Homo sapiens
  misc_RNA (1)...(19): siRNA sense strand
agauuggagauuacagcaa

SEQ ID NO: 2356633 - RNA, 19 nt, Homo sapiens
  misc_RNA (1)...(19): siRNA sense strand
uagugauaauguaugggaa

SEQ ID NO: 2356634 - RNA, 19 nt, Homo sapiens
  misc_RNA (1)...(19): siRNA sense strand
cgguaaccauagaccaaaa

SEQ ID NO: 2356635 - RNA, 19 nt, Homo sapiens
  misc_RNA (1)...(19): siRNA sense strand
ccacagcagcauagaguac

SEQ ID NO: 2356636 - RNA, 19 nt, Homo sapiens
  misc_RNA (1)...(19): siRNA sense strand
cugaaauuuuauuggguca

SEQ ID NO: 2356637 - RNA, 19 nt, Homo sapiens
  misc_RNA (1)...(19): siRNA sense strand
cagcagggagauuggagau

SEQ ID NO: 2356638 - RNA, 19 nt, Homo sapiens
  misc_RNA (1)...(19): siRNA sense strand
gaagaggaacuauuggaca

SEQ ID NO: 2356639 - RNA, 19 nt, Homo sapiens
  misc_RNA (1)...(19): siRNA sense strand
ccagaauaacagauaccau

SEQ ID NO: 2356640 - RNA, 19 nt, Homo sapiens
  misc_RNA (1)...(19): siRNA sense strand
uggaagagucgcuggccga

SEQ ID NO: 2356641 - RNA, 19 nt, Homo sapiens
  misc_RNA (1)...(19): siRNA sense strand
agcgaauguaugucaauaa

SEQ ID NO: 2356642 - RNA, 19 nt, Homo sapiens
  misc_RNA (1)...(19): siRNA sense strand
gagcuggacagguagugaa

SEQ ID NO: 2356643 - RNA, 19 nt, Homo sapiens
  misc_RNA (1)...(19): siRNA sense strand
ggaucugaagguagaaaau

SEQ ID NO: 2356644 - RNA, 19 nt, Homo sapiens
  misc_RNA (1)...(19): siRNA sense strand
cucaauugcaccaagacaa

SEQ ID NO: 2356645 - RNA, 19 nt, Homo sapiens
  misc_RNA (1)...(19): siRNA sense strand
uggaaauggcccugaaauu

SEQ ID NO: 2356646 - RNA, 19 nt, Homo sapiens
  misc_RNA (1)...(19): siRNA sense strand
cauucaaaguucagcaaca

SEQ ID NO: 2356647 - RNA, 19 nt, Homo sapiens
  misc_RNA (1)...(19): siRNA sense strand
ugaaagagcuaucugguca

SEQ ID NO: 2356648 - RNA, 19 nt, Homo sapiens
  misc_RNA (1)...(19): siRNA sense strand
agacaaagaccaaaggcca

SEQ ID NO: 2356649 - RNA, 19 nt, Homo sapiens
  misc_RNA (1)...(19): siRNA sense strand
cuggacagguagugaauca

SEQ ID NO: 2356650 - RNA, 19 nt, Homo sapiens
  misc_RNA (1)...(19): siRNA sense strand
gacaaagaccaaaggccaa

SEQ ID NO: 2356651 - RNA, 19 nt, Homo sapiens
  misc_RNA (1)...(19): siRNA sense strand
gaacuauuggacagagaau

SEQ ID NO: 2356652 - RNA, 19 nt, Homo sapiens
  misc_RNA (1)...(19): siRNA sense strand
guugaaugauggugggaac

SEQ ID NO: 2356653 - RNA, 19 nt, Homo sapiens
  misc_RNA (1)...(19): siRNA sense strand
cguaacauacauugcuuaa

SEQ ID NO: 2356654 - RNA, 19 nt, Homo sapiens
  misc_RNA (1)...(19): siRNA sense strand
ggcacuaagaccuggaaau

SEQ ID NO: 2356655 - RNA, 19 nt, Homo sapiens
  misc_RNA (1)...(19): siRNA sense strand
acuauuggacagagaauuu

SEQ ID NO: 2356656 - RNA, 19 nt, Homo sapiens
  misc_RNA (1)...(19): siRNA sense strand
uggaguuaauguaguagaa

SEQ ID NO: 2356657 - RNA, 19 nt, Homo sapiens
  misc_RNA (1)...(19): siRNA sense strand
ggaauauugucgagcugga

SEQ ID NO: 2356658 - RNA, 19 nt, Homo sapiens
  misc_RNA (1)...(19): siRNA sense strand
caguguaagacuccaauaa

SEQ ID NO: 2356659 - RNA, 19 nt, Homo sapiens
  misc_RNA (1)...(19): siRNA sense strand
aggaacuauuggacagaga

SEQ ID NO: 2356660 - RNA, 19 nt, Homo sapiens
  misc_RNA (1)...(19): siRNA sense strand
cgaugugcauugaagcgaa

SEQ ID NO: 2356661 - RNA, 19 nt, Homo sapiens
  misc_RNA (1)...(19): siRNA sense strand
gcaacagaugcuucaacaa

SEQ ID NO: 2356662 - RNA, 19 nt, Homo sapiens
  misc_RNA (1)...(19): siRNA sense strand
accagaaguguuacagaua

SEQ ID NO: 2356663 - RNA, 19 nt, Homo sapiens
  misc_RNA (1)...(19): siRNA sense strand
aguccuugcuccuggugaa

SEQ ID NO: 2356664 - RNA, 19 nt, Homo sapiens
  misc_RNA (1)...(19): siRNA sense strand
agauuggagauuacagcaa

SEQ ID NO: 2356665 - RNA, 19 nt, Homo sapiens
  misc_RNA (1)...(19): siRNA sense strand
uagugauaauguaugggaa

SEQ ID NO: 2356666 - RNA, 19 nt, Homo sapiens
  misc_RNA (1)...(19): siRNA sense strand
cgguaaccauagaccaaaa

SEQ ID NO: 2356667 - RNA, 19 nt, Homo sapiens
  misc_RNA (1)...(19): siRNA sense strand
ccacagcagcauagaguac

SEQ ID NO: 2356668 - RNA, 19 nt, Homo sapiens
  misc_RNA (1)...(19): siRNA sense strand
cugaaauuuuauuggguca

SEQ ID NO: 2356669 - RNA, 19 nt, Homo sapiens
  misc_RNA (1)...(19): siRNA sense strand
cagcagggagauuggagau

SEQ ID NO: 2356670 - RNA, 19 nt, Homo sapiens
  misc_RNA (1)...(19): siRNA sense strand
gaagaggaacuauuggaca

SEQ ID NO: 2356671 - RNA, 19 nt, Homo sapiens
  misc_RNA (1)...(19): siRNA sense strand
ccagaauaacagauaccau

SEQ ID NO: 2356672 - RNA, 19 nt, Homo sapiens
  misc_RNA (1)...(19): siRNA sense strand
uggaagagucgcuggccga

SEQ ID NO: 2356673 - RNA, 19 nt, Homo sapiens
  misc_RNA (1)...(19): siRNA sense strand
agcgaauguaugucaauaa

SEQ ID NO: 2356674 - RNA, 19 nt, Homo sapiens
  misc_RNA (1)...(19): siRNA sense strand
gagcuggacagguagugaa

SEQ ID NO: 2356675 - RNA, 19 nt, Homo sapiens
  misc_RNA (1)...(19): siRNA sense strand
ggaucugaagguagaaaau

SEQ ID NO: 2356676 - RNA, 19 nt, Homo sapiens
  misc_RNA (1)...(19): siRNA sense strand
cucaauugcaccaagacaa

SEQ ID NO: 2356677 - RNA, 19 nt, Homo sapiens
  misc_RNA (1)...(19): siRNA sense strand
gcuacauggcgcuggcaga

SEQ ID NO: 2356678 - RNA, 19 nt, Homo sapiens
  misc_RNA (1)...(19): siRNA sense strand
ccaggaucucacagggauu

SEQ ID NO: 2356679 - RNA, 19 nt, Homo sapiens
  misc_RNA (1)...(19): siRNA sense strand
gcaaaauagacgagggcuc

SEQ ID NO: 2356680 - RNA, 19 nt, Homo sapiens
  misc_RNA (1)...(19): siRNA sense strand
cggaauuccaucugcggau

SEQ ID NO: 2356681 - RNA, 19 nt, Homo sapiens
  misc_RNA (1)...(19): siRNA sense strand
ucccgagcucagagaguaa

SEQ ID NO: 2356682 - RNA, 19 nt, Homo sapiens
  misc_RNA (1)...(19): siRNA sense strand
aucccaagauaguggugua

SEQ ID NO: 2356683 - RNA, 19 nt, Homo sapiens
  misc_RNA (1)...(19): siRNA sense strand
gcaucaagaaagcggugaa

SEQ ID NO: 2356684 - RNA, 19 nt, Homo sapiens
  misc_RNA (1)...(19): siRNA sense strand
cggugaagcagaagcagau

SEQ ID NO: 2356685 - RNA, 19 nt, Homo sapiens
  misc_RNA (1)...(19): siRNA sense strand
gcggugaagcagaagcaga

SEQ ID NO: 2356686 - RNA, 19 nt, Homo sapiens
  misc_RNA (1)...(19): siRNA sense strand
ccauugagguauacugcca

SEQ ID NO: 2356687 - RNA, 19 nt, Homo sapiens
  misc_RNA (1)...(19): siRNA sense strand
aaauaaaggcagaucccga

SEQ ID NO: 2356688 - RNA, 19 nt, Homo sapiens
  misc_RNA (1)...(19): siRNA sense strand
ccugugugauaauggucaa

SEQ ID NO: 2356689 - RNA, 19 nt, Homo sapiens
  misc_RNA (1)...(19): siRNA sense strand
augcaagauuacaggaauu

SEQ ID NO: 2356690 - RNA, 19 nt, Homo sapiens
  misc_RNA (1)...(19): siRNA sense strand
aaacaaaguucgaacagca

SEQ ID NO: 2356691 - RNA, 19 nt, Homo sapiens
  misc_RNA (1)...(19): siRNA sense strand
ccuaaguguugaaggaacu

SEQ ID NO: 2356692 - RNA, 19 nt, Homo sapiens
  misc_RNA (1)...(19): siRNA sense strand
augcaauguugugggauaa

SEQ ID NO: 2356693 - RNA, 19 nt, Homo sapiens
  misc_RNA (1)...(19): siRNA sense strand
cagaaggaucagaugaaaa

SEQ ID NO: 2356694 - RNA, 19 nt, Homo sapiens
  misc_RNA (1)...(19): siRNA sense strand
cagcacacuaucagagcua

SEQ ID NO: 2356695 - RNA, 19 nt, Homo sapiens
  misc_RNA (1)...(19): siRNA sense strand
caguaaaccuggcagcuga

SEQ ID NO: 2356696 - RNA, 19 nt, Homo sapiens
  misc_RNA (1)...(19): siRNA sense strand
cagaauauauggaagacgu

SEQ ID NO: 2356697 - RNA, 19 nt, Homo sapiens
  misc_RNA (1)...(19): siRNA sense strand
gcucaaaguuguaaaugcu

SEQ ID NO: 2356698 - RNA, 19 nt, Homo sapiens
  misc_RNA (1)...(19): siRNA sense strand
ucuuaugacagaaggauca

SEQ ID NO: 2356699 - RNA, 19 nt, Homo sapiens
  misc_RNA (1)...(19): siRNA sense strand
ucucaauaaucguugggau

SEQ ID NO: 2356700 - RNA, 19 nt, Homo sapiens
  misc_RNA (1)...(19): siRNA sense strand
agccagaauauauggaaga

SEQ ID NO: 2356701 - RNA, 19 nt, Homo sapiens
  misc_RNA (1)...(19): siRNA sense strand
agaauauauggaagacgua

SEQ ID NO: 2356702 - RNA, 19 nt, Homo sapiens
  misc_RNA (1)...(19): siRNA sense strand
uugaaggaacugauggaga

SEQ ID NO: 2356703 - RNA, 19 nt, Homo sapiens
  misc_RNA (1)...(19): siRNA sense strand
aaggaaguucuuagugcua

SEQ ID NO: 2356704 - RNA, 19 nt, Homo sapiens
  misc_RNA (1)...(19): siRNA sense strand
aguagacaguccaggcaca

SEQ ID NO: 2356705 - RNA, 19 nt, Homo sapiens
  misc_RNA (1)...(19): siRNA sense strand
aggacaagcagugggaaga

SEQ ID NO: 2356706 - RNA, 19 nt, Homo sapiens
  misc_RNA (1)...(19): siRNA sense strand
ugugaagacaguuaaucaa

SEQ ID NO: 2356707 - RNA, 19 nt, Homo sapiens
  misc_RNA (1)...(19): siRNA sense strand
augcaagauuacaggaauu

SEQ ID NO: 2356708 - RNA, 19 nt, Homo sapiens
  misc_RNA (1)...(19): siRNA sense strand
gugcaaugacagaugaaau

SEQ ID NO: 2356709 - RNA, 19 nt, Homo sapiens
  misc_RNA (1)...(19): siRNA sense strand
cuucagacccagcaagaaa

SEQ ID NO: 2356710 - RNA, 19 nt, Homo sapiens
  misc_RNA (1)...(19): siRNA sense strand
aaacaaaguucgaacagca

SEQ ID NO: 2356711 - RNA, 19 nt, Homo sapiens
  misc_RNA (1)...(19): siRNA sense strand
agauaaugcaucacaggaa

SEQ ID NO: 2356712 - RNA, 19 nt, Homo sapiens
  misc_RNA (1)...(19): siRNA sense strand
ccuaaguguugaaggaacu

SEQ ID NO: 2356713 - RNA, 19 nt, Homo sapiens
  misc_RNA (1)...(19): siRNA sense strand
gcuagauuacccaaagaaa

SEQ ID NO: 2356714 - RNA, 19 nt, Homo sapiens
  misc_RNA (1)...(19): siRNA sense strand
caucauuauuguuggagga

SEQ ID NO: 2356715 - RNA, 19 nt, Homo sapiens
  misc_RNA (1)...(19): siRNA sense strand
augcaauguugugggauaa

SEQ ID NO: 2356716 - RNA, 19 nt, Homo sapiens
  misc_RNA (1)...(19): siRNA sense strand
gaaauagaucaguuggaga

SEQ ID NO: 2356717 - RNA, 19 nt, Homo sapiens
  misc_RNA (1)...(19): siRNA sense strand
cagaaggaucagaugaaaa

SEQ ID NO: 2356718 - RNA, 19 nt, Homo sapiens
  misc_RNA (1)...(19): siRNA sense strand
cagcacacuaucagagcua

SEQ ID NO: 2356719 - RNA, 19 nt, Homo sapiens
  misc_RNA (1)...(19): siRNA sense strand
caguaaaccuggcagcuga

SEQ ID NO: 2356720 - RNA, 19 nt, Homo sapiens
  misc_RNA (1)...(19): siRNA sense strand
cuagauuacccaaagaaau

SEQ ID NO: 2356721 - RNA, 19 nt, Homo sapiens
  misc_RNA (1)...(19): siRNA sense strand
cagaauauauggaagacgu

SEQ ID NO: 2356722 - RNA, 19 nt, Homo sapiens
  misc_RNA (1)...(19): siRNA sense strand
gcucaaaguuguaaaugcu

SEQ ID NO: 2356723 - RNA, 19 nt, Homo sapiens
  misc_RNA (1)...(19): siRNA sense strand
cgaugaaguaaacgccuua

SEQ ID NO: 2356724 - RNA, 19 nt, Homo sapiens
  misc_RNA (1)...(19): siRNA sense strand
aaauaagcacauagaggau

SEQ ID NO: 2356725 - RNA, 19 nt, Homo sapiens
  misc_RNA (1)...(19): siRNA sense strand
uggaggagugauuuggaaa

SEQ ID NO: 2356726 - RNA, 19 nt, Homo sapiens
  misc_RNA (1)...(19): siRNA sense strand
ggaugguaugggaagaaau

SEQ ID NO: 2356727 - RNA, 19 nt, Homo sapiens
  misc_RNA (1)...(19): siRNA sense strand
ucuuaugacagaaggauca

SEQ ID NO: 2356728 - RNA, 19 nt, Homo sapiens
  misc_RNA (1)...(19): siRNA sense strand
ucucaauaaucguugggau

SEQ ID NO: 2356729 - RNA, 19 nt, Homo sapiens
  misc_RNA (1)...(19): siRNA sense strand
ccuuagugcuucagaccca

SEQ ID NO: 2356730 - RNA, 19 nt, Homo sapiens
  misc_RNA (1)...(19): siRNA sense strand
ggaggagugauuuggaaaa

SEQ ID NO: 2356731 - RNA, 19 nt, Homo sapiens
  misc_RNA (1)...(19): siRNA sense strand
agccagaauauauggaaga

SEQ ID NO: 2356732 - RNA, 19 nt, Homo sapiens
  misc_RNA (1)...(19): siRNA sense strand
ugcaaugacagaugaaauu

SEQ ID NO: 2356733 - RNA, 19 nt, Homo sapiens
  misc_RNA (1)...(19): siRNA sense strand
aguaaacgccuuagugcuu

SEQ ID NO: 2356734 - RNA, 19 nt, Homo sapiens
  misc_RNA (1)...(19): siRNA sense strand
agaauauauggaagacgua

SEQ ID NO: 2356735 - RNA, 19 nt, Homo sapiens
  misc_RNA (1)...(19): siRNA sense strand
ccgaugaaguaaacgccuu

SEQ ID NO: 2356736 - RNA, 19 nt, Homo sapiens
  misc_RNA (1)...(19): siRNA sense strand
uagaucaguuggagaaaau

SEQ ID NO: 2356737 - RNA, 19 nt, Homo sapiens
  misc_RNA (1)...(19): siRNA sense strand
ugguauacaggauaaacua

SEQ ID NO: 2356738 - RNA, 19 nt, Homo sapiens
  misc_RNA (1)...(19): siRNA sense strand
guuucuaccuucaagcaau

SEQ ID NO: 2356739 - RNA, 19 nt, Homo sapiens
  misc_RNA (1)...(19): siRNA sense strand
uugaaggaacugauggaga

SEQ ID NO: 2356740 - RNA, 19 nt, Homo sapiens
  misc_RNA (1)...(19): siRNA sense strand
aaggaaguucuuagugcua

SEQ ID NO: 2356741 - RNA, 19 nt, Homo sapiens
  misc_RNA (1)...(19): siRNA sense strand
gaggaugguaugggaagaa

SEQ ID NO: 2356742 - RNA, 19 nt, Homo sapiens
  misc_RNA (1)...(19): siRNA sense strand
cauuauuguuggaggagug

SEQ ID NO: 2356743 - RNA, 19 nt, Homo sapiens
  misc_RNA (1)...(19): siRNA sense strand
guaaacuaugcaacugaaa

SEQ ID NO: 2356744 - RNA, 19 nt, Homo sapiens
  misc_RNA (1)...(19): siRNA sense strand
aagcaaugaagaauccuaa

SEQ ID NO: 2356745 - RNA, 19 nt, Homo sapiens
  misc_RNA (1)...(19): siRNA sense strand
aguagacaguccaggcaca

SEQ ID NO: 2356746 - RNA, 19 nt, Homo sapiens
  misc_RNA (1)...(19): siRNA sense strand
aggauaaacuacauacacu

SEQ ID NO: 2356747 - RNA, 19 nt, Homo sapiens
  misc_RNA (1)...(19): siRNA sense strand
aggacaagcagugggaaga

SEQ ID NO: 2356748 - RNA, 19 nt, Homo sapiens
  misc_RNA (1)...(19): siRNA sense strand
agaaggugaaggagggaaa

SEQ ID NO: 2356749 - RNA, 19 nt, Homo sapiens
  misc_RNA (1)...(19): siRNA sense strand
gggugcaggaugagaacaa

SEQ ID NO: 2356750 - RNA, 19 nt, Homo sapiens
  misc_RNA (1)...(19): siRNA sense strand
gcaacauagaccagagcuu

SEQ ID NO: 2356751 - RNA, 19 nt, Homo sapiens
  misc_RNA (1)...(19): siRNA sense strand
agaagaaagaagaugacuu

SEQ ID NO: 2356752 - RNA, 19 nt, Homo sapiens
  misc_RNA (1)...(19): siRNA sense strand
gggauaagguggucgcucu

SEQ ID NO: 2356753 - RNA, 19 nt, Homo sapiens
  misc_RNA (1)...(19): siRNA sense strand
guggaaggacauugagcuu

SEQ ID NO: 2356754 - RNA, 19 nt, Homo sapiens
  misc_RNA (1)...(19): siRNA sense strand
aagucagggugcaggauga

SEQ ID NO: 2356755 - RNA, 19 nt, Homo sapiens
  misc_RNA (1)...(19): siRNA sense strand
auggacaaguggaaggaca

SEQ ID NO: 2356756 - RNA, 19 nt, Homo sapiens
  misc_RNA (1)...(19): siRNA sense strand
gagaggaggagcucggaca

SEQ ID NO: 2356757 - RNA, 19 nt, Homo sapiens
  misc_RNA (1)...(19): siRNA sense strand
ccucagugggucaguguga

SEQ ID NO: 2356758 - RNA, 19 nt, Homo sapiens
  misc_RNA (1)...(19): siRNA sense strand
uggacaaguggaaggacau

SEQ ID NO: 2356759 - RNA, 19 nt, Homo sapiens
  misc_RNA (1)...(19): siRNA sense strand
ggccacagccugaacgaga

SEQ ID NO: 2356760 - RNA, 19 nt, Homo sapiens
  misc_RNA (1)...(19): siRNA sense strand
gcucuguuacuauggacaa

SEQ ID NO: 2356761 - RNA, 19 nt, Homo sapiens
  misc_RNA (1)...(19): siRNA sense strand
gggagucgguaguaaggga

SEQ ID NO: 2356762 - RNA, 19 nt, Homo sapiens
  misc_RNA (1)...(19): siRNA sense strand
uuacuauggacaaguggaa

SEQ ID NO: 2356763 - RNA, 19 nt, Homo sapiens
  misc_RNA (1)...(19): siRNA sense strand
caggagaaguacaacagca

SEQ ID NO: 2356764 - RNA, 19 nt, Homo sapiens
  misc_RNA (1)...(19): siRNA sense strand
ccuugcaggagaaguacaa

SEQ ID NO: 2356765 - RNA, 19 nt, Homo sapiens
  misc_RNA (1)...(19): siRNA sense strand
cggacaaggcuuuugaaga

SEQ ID NO: 2356766 - RNA, 19 nt, Homo sapiens
  misc_RNA (1)...(19): siRNA sense strand
agaaggugaaggagggaaa

SEQ ID NO: 2356767 - RNA, 19 nt, Homo sapiens
  misc_RNA (1)...(19): siRNA sense strand
gggugcaggaugagaacaa

SEQ ID NO: 2356768 - RNA, 19 nt, Homo sapiens
  misc_RNA (1)...(19): siRNA sense strand
gcaacauagaccagagcuu

SEQ ID NO: 2356769 - RNA, 19 nt, Homo sapiens
  misc_RNA (1)...(19): siRNA sense strand
agaagaaagaagaugacuu

SEQ ID NO: 2356770 - RNA, 19 nt, Homo sapiens
  misc_RNA (1)...(19): siRNA sense strand
gggauaagguggucgcucu

SEQ ID NO: 2356771 - RNA, 19 nt, Homo sapiens
  misc_RNA (1)...(19): siRNA sense strand
guggaaggacauugagcuu

SEQ ID NO: 2356772 - RNA, 19 nt, Homo sapiens
  misc_RNA (1)...(19): siRNA sense strand
aagucagggugcaggauga

SEQ ID NO: 2356773 - RNA, 19 nt, Homo sapiens
  misc_RNA (1)...(19): siRNA sense strand
auggacaaguggaaggaca

SEQ ID NO: 2356774 - RNA, 19 nt, Homo sapiens
  misc_RNA (1)...(19): siRNA sense strand
gagaggaggagcucggaca

SEQ ID NO: 2356775 - RNA, 19 nt, Homo sapiens
  misc_RNA (1)...(19): siRNA sense strand
ccucagugggucaguguga

SEQ ID NO: 2356776 - RNA, 19 nt, Homo sapiens
  misc_RNA (1)...(19): siRNA sense strand
uggacaaguggaaggacau

SEQ ID NO: 2356777 - RNA, 19 nt, Homo sapiens
  misc_RNA (1)...(19): siRNA sense strand
ggccacagccugaacgaga

SEQ ID NO: 2356778 - RNA, 19 nt, Homo sapiens
  misc_RNA (1)...(19): siRNA sense strand
gcucuguuacuauggacaa

SEQ ID NO: 2356779 - RNA, 19 nt, Homo sapiens
  misc_RNA (1)...(19): siRNA sense strand
gggagucgguaguaaggga

SEQ ID NO: 2356780 - RNA, 19 nt, Homo sapiens
  misc_RNA (1)...(19): siRNA sense strand
uuacuauggacaaguggaa

SEQ ID NO: 2356781 - RNA, 19 nt, Homo sapiens
  misc_RNA (1)...(19): siRNA sense strand
caggagaaguacaacagca

SEQ ID NO: 2356782 - RNA, 19 nt, Homo sapiens
  misc_RNA (1)...(19): siRNA sense strand
ccuugcaggagaaguacaa

SEQ ID NO: 2356783 - RNA, 19 nt, Homo sapiens
  misc_RNA (1)...(19): siRNA sense strand
cggacaaggcuuuugaaga

SEQ ID NO: 2356784 - RNA, 19 nt, Homo sapiens
  misc_RNA (1)...(19): siRNA sense strand
ucuauuacuucaagggaaa

SEQ ID NO: 2356785 - RNA, 19 nt, Homo sapiens
  misc_RNA (1)...(19): siRNA sense strand
guauagaagagaagaauca

SEQ ID NO: 2356786 - RNA, 19 nt, Homo sapiens
  misc_RNA (1)...(19): siRNA sense strand
gaagaaaauagaagagcua

SEQ ID NO: 2356787 - RNA, 19 nt, Homo sapiens
  misc_RNA (1)...(19): siRNA sense strand
cagaaaagauuuaggucau

SEQ ID NO: 2356788 - RNA, 19 nt, Homo sapiens
  misc_RNA (1)...(19): siRNA sense strand
cuuuggacuuguuggaaua

SEQ ID NO: 2356789 - RNA, 19 nt, Homo sapiens
  misc_RNA (1)...(19): siRNA sense strand
aggcaugcuuucaggaauu

SEQ ID NO: 2356790 - RNA, 19 nt, Homo sapiens
  misc_RNA (1)...(19): siRNA sense strand
gaccaaacagugagaguau

SEQ ID NO: 2356791 - RNA, 19 nt, Homo sapiens
  misc_RNA (1)...(19): siRNA sense strand
agauuuaggucaugcucaa

SEQ ID NO: 2356792 - RNA, 19 nt, Homo sapiens
  misc_RNA (1)...(19): siRNA sense strand
gagaagaaucacuagaaaa

SEQ ID NO: 2356793 - RNA, 19 nt, Homo sapiens
  misc_RNA (1)...(19): siRNA sense strand
agcuuaagucuguggauaa

SEQ ID NO: 2356794 - RNA, 19 nt, Homo sapiens
  misc_RNA (1)...(19): siRNA sense strand
uaacauagaugaaggugga

SEQ ID NO: 2356795 - RNA, 19 nt, Homo sapiens
  misc_RNA (1)...(19): siRNA sense strand
ugggauagagagagaucaa

SEQ ID NO: 2356796 - RNA, 19 nt, Homo sapiens
  misc_RNA (1)...(19): siRNA sense strand
ugugaagaucuuacagaaa

SEQ ID NO: 2356797 - RNA, 19 nt, Homo sapiens
  misc_RNA (1)...(19): siRNA sense strand
aauauuauguucagggaca

SEQ ID NO: 2356798 - RNA, 19 nt, Homo sapiens
  misc_RNA (1)...(19): siRNA sense strand
cagcauggacaguuggcaa

SEQ ID NO: 2356799 - RNA, 19 nt, Homo sapiens
  misc_RNA (1)...(19): siRNA sense strand
ucaagaaagcuuuggacuu

SEQ ID NO: 2356800 - RNA, 19 nt, Homo sapiens
  misc_RNA (1)...(19): siRNA sense strand
caugcauacaguugggaua

SEQ ID NO: 2356801 - RNA, 19 nt, Homo sapiens
  misc_RNA (1)...(19): siRNA sense strand
aauagagcccugaaggaaa

SEQ ID NO: 2356802 - RNA, 19 nt, Homo sapiens
  misc_RNA (1)...(19): siRNA sense strand
gguaauaauacgccagcau

SEQ ID NO: 2356803 - RNA, 19 nt, Homo sapiens
  misc_RNA (1)...(19): siRNA sense strand
gcuuugaacaagagggagu

SEQ ID NO: 2356804 - RNA, 19 nt, Homo sapiens
  misc_RNA (1)...(19): siRNA sense strand
aggaaagcgaggcaaauua

SEQ ID NO: 2356805 - RNA, 19 nt, Homo sapiens
  misc_RNA (1)...(19): siRNA sense strand
ugaugaggaagaagauaua

SEQ ID NO: 2356806 - RNA, 19 nt, Homo sapiens
  misc_RNA (1)...(19): siRNA sense strand
gcuuuggacuuguuggaau

SEQ ID NO: 2356807 - RNA, 19 nt, Homo sapiens
  misc_RNA (1)...(19): siRNA sense strand
ccaaacagugagaguauga

SEQ ID NO: 2356808 - RNA, 19 nt, Homo sapiens
  misc_RNA (1)...(19): siRNA sense strand
agaaaaggcucaugcaaca

SEQ ID NO: 2356809 - RNA, 19 nt, Homo sapiens
  misc_RNA (1)...(19): siRNA sense strand
aggaaagauucaucagcau

SEQ ID NO: 2356810 - RNA, 19 nt, Homo sapiens
  misc_RNA (1)...(19): siRNA sense strand
aaacuauagcccaggaaga

SEQ ID NO: 2356811 - RNA, 19 nt, Homo sapiens
  misc_RNA (1)...(19): siRNA sense strand
augcaacacuucuggguuu

SEQ ID NO: 2356812 - RNA, 19 nt, Homo sapiens
  misc_RNA (1)...(19): siRNA sense strand
aggauaugcuacaagaaaa

SEQ ID NO: 2356813 - RNA, 19 nt, Homo sapiens
  misc_RNA (1)...(19): siRNA sense strand
aaacaucaguaaaugggaa

SEQ ID NO: 2356814 - RNA, 19 nt, Homo sapiens
  misc_RNA (1)...(19): siRNA sense strand
ggauauaaauagagcccug

SEQ ID NO: 2356815 - RNA, 19 nt, Homo sapiens
  misc_RNA (1)...(19): siRNA sense strand
gcucauuauuuggaagauu

SEQ ID NO: 2356816 - RNA, 19 nt, Homo sapiens
  misc_RNA (1)...(19): siRNA sense strand
caucaguaaaugggaauua

SEQ ID NO: 2356817 - RNA, 19 nt, Homo sapiens
  misc_RNA (1)...(19): siRNA sense strand
gguaucuggagaaaggaaa

SEQ ID NO: 2356818 - RNA, 19 nt, Homo sapiens
  misc_RNA (1)...(19): siRNA sense strand
gagaaaggaaagcgaggca

SEQ ID NO: 2356819 - RNA, 19 nt, Homo sapiens
  misc_RNA (1)...(19): siRNA sense strand
aagaaauggcugagcagga

SEQ ID NO: 2356820 - RNA, 19 nt, Homo sapiens
  misc_RNA (1)...(19): siRNA sense strand
cuccacaggaacugggaaa

SEQ ID NO: 2356821 - RNA, 19 nt, Homo sapiens
  misc_RNA (1)...(19): siRNA sense strand
cuuuaaugcacaaggagau

SEQ ID NO: 2356822 - RNA, 19 nt, Homo sapiens
  misc_RNA (1)...(19): siRNA sense strand
uggaauauauugaugagga

SEQ ID NO: 2356823 - RNA, 19 nt, Homo sapiens
  misc_RNA (1)...(19): siRNA sense strand
agaagauaaugguugccaa

SEQ ID NO: 2356824 - RNA, 19 nt, Homo sapiens
  misc_RNA (1)...(19): siRNA sense strand
ccacaggaacugggaaauu

SEQ ID NO: 2356825 - RNA, 19 nt, Homo sapiens
  misc_RNA (1)...(19): siRNA sense strand
ugaacaagagggaguauga

SEQ ID NO: 2356826 - RNA, 19 nt, Homo sapiens
  misc_RNA (1)...(19): siRNA sense strand
gcagaaaagauuuagguca

SEQ ID NO: 2356827 - RNA, 19 nt, Homo sapiens
  misc_RNA (1)...(19): siRNA sense strand
gcugguuacaugaaauuaa

SEQ ID NO: 2356828 - RNA, 19 nt, Homo sapiens
  misc_RNA (1)...(19): siRNA sense strand
uggcggagaaacagcuaaa

SEQ ID NO: 2356829 - RNA, 19 nt, Homo sapiens
  misc_RNA (1)...(19): siRNA sense strand
guccaguucugauggcaaa

SEQ ID NO: 2356830 - RNA, 19 nt, Homo sapiens
  misc_RNA (1)...(19): siRNA sense strand
aguacuuaccggaggugaa

SEQ ID NO: 2356831 - RNA, 19 nt, Homo sapiens
  misc_RNA (1)...(19): siRNA sense strand
aaacauuaccgaugcuauu

SEQ ID NO: 2356832 - RNA, 19 nt, Homo sapiens
  misc_RNA (1)...(19): siRNA sense strand
gucuauuacuucaagggaa

SEQ ID NO: 2356833 - RNA, 19 nt, Homo sapiens
  misc_RNA (1)...(19): siRNA sense strand
cuauagcccaggaagauaa

SEQ ID NO: 2356834 - RNA, 19 nt, Homo sapiens
  misc_RNA (1)...(19): siRNA sense strand
agcuagaagacaagaugaa

SEQ ID NO: 2356835 - RNA, 19 nt, Homo sapiens
  misc_RNA (1)...(19): siRNA sense strand
aacaagagggaguaugaaa

SEQ ID NO: 2356836 - RNA, 19 nt, Homo sapiens
  misc_RNA (1)...(19): siRNA sense strand
acaagagggaguaugaaau

SEQ ID NO: 2356837 - RNA, 19 nt, Homo sapiens
  misc_RNA (1)...(19): siRNA sense strand
ucaaguguucucugggaua

SEQ ID NO: 2356838 - RNA, 19 nt, Homo sapiens
  misc_RNA (1)...(19): siRNA sense strand
agaugauccaauugaagua

SEQ ID NO: 2356839 - RNA, 19 nt, Homo sapiens
  misc_RNA (1)...(19): siRNA sense strand
aagccuugcuggugaagau

SEQ ID NO: 2356840 - RNA, 19 nt, Homo sapiens
  misc_RNA (1)...(19): siRNA sense strand
gugaagauaccuacacaga

SEQ ID NO: 2356841 - RNA, 19 nt, Homo sapiens
  misc_RNA (1)...(19): siRNA sense strand
aggaauuggucgaaaaguu

SEQ ID NO: 2356842 - RNA, 19 nt, Homo sapiens
  misc_RNA (1)...(19): siRNA sense strand
ugugaacuaugaugugaaa

SEQ ID NO: 2356843 - RNA, 19 nt, Homo sapiens
  misc_RNA (1)...(19): siRNA sense strand
uggcugagcaggagcgcuu

SEQ ID NO: 2356844 - RNA, 19 nt, Homo sapiens
  misc_RNA (1)...(19): siRNA sense strand
ccaaaucugucaagggcaa

SEQ ID NO: 2356845 - RNA, 19 nt, Homo sapiens
  misc_RNA (1)...(19): siRNA sense strand
aggaauuaaugccuggaau

SEQ ID NO: 2356846 - RNA, 19 nt, Homo sapiens
  misc_RNA (1)...(19): siRNA sense strand
gcuuauguucuucgggauu

SEQ ID NO: 2356847 - RNA, 19 nt, Homo sapiens
  misc_RNA (1)...(19): siRNA sense strand
ucaaaggugacuuggccaa

SEQ ID NO: 2356848 - RNA, 19 nt, Homo sapiens
  misc_RNA (1)...(19): siRNA sense strand
ccaaaucugucaagggcaa

SEQ ID NO: 2356849 - RNA, 19 nt, Homo sapiens
  misc_RNA (1)...(19): siRNA sense strand
aggaauuaaugccuggaau

SEQ ID NO: 2356850 - RNA, 19 nt, Homo sapiens
  misc_RNA (1)...(19): siRNA sense strand
gcuuauguucuucgggauu

SEQ ID NO: 2356851 - RNA, 19 nt, Homo sapiens
  misc_RNA (1)...(19): siRNA sense strand
ucaaaggugacuuggccaa

SEQ ID NO: 2356852 - RNA, 19 nt, Homo sapiens
  misc_RNA (1)...(19): siRNA sense strand
cgcagaagaaggacggcaa

SEQ ID NO: 2356853 - RNA, 19 nt, Homo sapiens
  misc_RNA (1)...(19): siRNA sense strand
ucaacaagcugcugggcaa

SEQ ID NO: 2356854 - RNA, 19 nt, Homo sapiens
  misc_RNA (1)...(19): siRNA sense strand
cuaagaagacugagagcca

SEQ ID NO: 2356855 - RNA, 19 nt, Homo sapiens
  misc_RNA (1)...(19): siRNA sense strand
uggcaagcaaggcgguaaa

SEQ ID NO: 2356856 - RNA, 19 nt, Homo sapiens
  misc_RNA (1)...(19): siRNA sense strand
cgguaaagcucgcgccaag

SEQ ID NO: 2356857 - RNA, 19 nt, Homo sapiens
  misc_RNA (1)...(19): siRNA sense strand
acgacgaggagcucaacaa

SEQ ID NO: 2356858 - RNA, 19 nt, Homo sapiens
  misc_RNA (1)...(19): siRNA sense strand
cugccuaagaagacugaga

SEQ ID NO: 2356859 - RNA, 19 nt, Homo sapiens
  misc_RNA (1)...(19): siRNA sense strand
aagcaauaacccaagcaaa

SEQ ID NO: 2356860 - RNA, 19 nt, Homo sapiens
  misc_RNA (1)...(19): siRNA sense strand
gcuugaaagagaacagaga

SEQ ID NO: 2356861 - RNA, 19 nt, Homo sapiens
  misc_RNA (1)...(19): siRNA sense strand
uugaaagagaacagagaca

SEQ ID NO: 2356862 - RNA, 19 nt, Homo sapiens
  misc_RNA (1)...(19): siRNA sense strand
aguccgaguaugugaaauu

SEQ ID NO: 2356863 - RNA, 19 nt, Homo sapiens
  misc_RNA (1)...(19): siRNA sense strand
agcaauaacccaagcaaaa

SEQ ID NO: 2356864 - RNA, 19 nt, Homo sapiens
  misc_RNA (1)...(19): siRNA sense strand
ucuucuaauccaagcaaua

SEQ ID NO: 2356865 - RNA, 19 nt, Homo sapiens
  misc_RNA (1)...(19): siRNA sense strand
ucacagaguuagagagagg

SEQ ID NO: 2356866 - RNA, 19 nt, Homo sapiens
  misc_RNA (1)...(19): siRNA sense strand
cccaaaucuucuuagacaa

SEQ ID NO: 2356867 - RNA, 19 nt, Homo sapiens
  misc_RNA (1)...(19): siRNA sense strand
aagaauaagcacaccucaa

SEQ ID NO: 2356868 - RNA, 19 nt, Homo sapiens
  misc_RNA (1)...(19): siRNA sense strand
cuuaaguauucaucgaaga

SEQ ID NO: 2356869 - RNA, 19 nt, Homo sapiens
  misc_RNA (1)...(19): siRNA sense strand
guaucacauucuugcacaa

SEQ ID NO: 2356870 - RNA, 19 nt, Homo sapiens
  misc_RNA (1)...(19): siRNA sense strand
aagcaaaacuucagaugca

SEQ ID NO: 2356871 - RNA, 19 nt, Homo sapiens
  misc_RNA (1)...(19): siRNA sense strand
aauaaaauguugcggagau

SEQ ID NO: 2356872 - RNA, 19 nt, Homo sapiens
  misc_RNA (1)...(19): siRNA sense strand
gcagagaagcaggcaucaa

SEQ ID NO: 2356873 - RNA, 19 nt, Homo sapiens
  misc_RNA (1)...(19): siRNA sense strand
cagaauuccuucauggugu

SEQ ID NO: 2356874 - RNA, 19 nt, Homo sapiens
  misc_RNA (1)...(19): siRNA sense strand
ugauaguccugaaaacaaa

SEQ ID NO: 2356875 - RNA, 19 nt, Homo sapiens
  misc_RNA (1)...(19): siRNA sense strand
cauauuagcucuucuggga

SEQ ID NO: 2356876 - RNA, 19 nt, Homo sapiens
  misc_RNA (1)...(19): siRNA sense strand
gcaucaagauuacgcgaag

SEQ ID NO: 2356877 - RNA, 19 nt, Homo sapiens
  misc_RNA (1)...(19): siRNA sense strand
gaagagaggugaugcaagc

SEQ ID NO: 2356878 - RNA, 19 nt, Homo sapiens
  misc_RNA (1)...(19): siRNA sense strand
gcauaacaugggaacuauu

SEQ ID NO: 2356879 - RNA, 19 nt, Homo sapiens
  misc_RNA (1)...(19): siRNA sense strand
acagaagagaggugaugca

SEQ ID NO: 2356880 - RNA, 19 nt, Homo sapiens
  misc_RNA (1)...(19): siRNA sense strand
aagcaauaacccaagcaaa

SEQ ID NO: 2356881 - RNA, 19 nt, Homo sapiens
  misc_RNA (1)...(19): siRNA sense strand
gcuugaaagagaacagaga

SEQ ID NO: 2356882 - RNA, 19 nt, Homo sapiens
  misc_RNA (1)...(19): siRNA sense strand
uugaaagagaacagagaca

SEQ ID NO: 2356883 - RNA, 19 nt, Homo sapiens
  misc_RNA (1)...(19): siRNA sense strand
aguccgaguaugugaaauu

SEQ ID NO: 2356884 - RNA, 19 nt, Homo sapiens
  misc_RNA (1)...(19): siRNA sense strand
agcaauaacccaagcaaaa

SEQ ID NO: 2356885 - RNA, 19 nt, Homo sapiens
  misc_RNA (1)...(19): siRNA sense strand
ucuucuaauccaagcaaua

SEQ ID NO: 2356886 - RNA, 19 nt, Homo sapiens
  misc_RNA (1)...(19): siRNA sense strand
ucacagaguuagagagagg

SEQ ID NO: 2356887 - RNA, 19 nt, Homo sapiens
  misc_RNA (1)...(19): siRNA sense strand
cccaaaucuucuuagacaa

SEQ ID NO: 2356888 - RNA, 19 nt, Homo sapiens
  misc_RNA (1)...(19): siRNA sense strand
aagaauaagcacaccucaa

SEQ ID NO: 2356889 - RNA, 19 nt, Homo sapiens
  misc_RNA (1)...(19): siRNA sense strand
guaucacauucuugcacaa

SEQ ID NO: 2356890 - RNA, 19 nt, Homo sapiens
  misc_RNA (1)...(19): siRNA sense strand
aagcaaaacuucagaugca

SEQ ID NO: 2356891 - RNA, 19 nt, Homo sapiens
  misc_RNA (1)...(19): siRNA sense strand
aauaaaauguugcggagau

SEQ ID NO: 2356892 - RNA, 19 nt, Homo sapiens
  misc_RNA (1)...(19): siRNA sense strand
gcagagaagcaggcaucaa

SEQ ID NO: 2356893 - RNA, 19 nt, Homo sapiens
  misc_RNA (1)...(19): siRNA sense strand
cagaauuccuucauggugu

SEQ ID NO: 2356894 - RNA, 19 nt, Homo sapiens
  misc_RNA (1)...(19): siRNA sense strand
ugauaguccugaaaacaaa

SEQ ID NO: 2356895 - RNA, 19 nt, Homo sapiens
  misc_RNA (1)...(19): siRNA sense strand
cauauuagcucuucuggga

SEQ ID NO: 2356896 - RNA, 19 nt, Homo sapiens
  misc_RNA (1)...(19): siRNA sense strand
gcaucaagauuacgcgaag

SEQ ID NO: 2356897 - RNA, 19 nt, Homo sapiens
  misc_RNA (1)...(19): siRNA sense strand
gaagagaggugaugcaagc

SEQ ID NO: 2356898 - RNA, 19 nt, Homo sapiens
  misc_RNA (1)...(19): siRNA sense strand
gcauaacaugggaacuauu

SEQ ID NO: 2356899 - RNA, 19 nt, Homo sapiens
  misc_RNA (1)...(19): siRNA sense strand
acagaagagaggugaugca

SEQ ID NO: 2356900 - RNA, 19 nt, Homo sapiens
  misc_RNA (1)...(19): siRNA sense strand
aagcaauaacccaagcaaa

SEQ ID NO: 2356901 - RNA, 19 nt, Homo sapiens
  misc_RNA (1)...(19): siRNA sense strand
gcuugaaagagaacagaga

SEQ ID NO: 2356902 - RNA, 19 nt, Homo sapiens
  misc_RNA (1)...(19): siRNA sense strand
uugaaagagaacagagaca

SEQ ID NO: 2356903 - RNA, 19 nt, Homo sapiens
  misc_RNA (1)...(19): siRNA sense strand
aguccgaguaugugaaauu

SEQ ID NO: 2356904 - RNA, 19 nt, Homo sapiens
  misc_RNA (1)...(19): siRNA sense strand
agcaauaacccaagcaaaa

SEQ ID NO: 2356905 - RNA, 19 nt, Homo sapiens
  misc_RNA (1)...(19): siRNA sense strand
ucuucuaauccaagcaaua

SEQ ID NO: 2356906 - RNA, 19 nt, Homo sapiens
  misc_RNA (1)...(19): siRNA sense strand
ucacagaguuagagagagg

SEQ ID NO: 2356907 - RNA, 19 nt, Homo sapiens
  misc_RNA (1)...(19): siRNA sense strand
cccaaaucuucuuagacaa

SEQ ID NO: 2356908 - RNA, 19 nt, Homo sapiens
  misc_RNA (1)...(19): siRNA sense strand
aagaauaagcacaccucaa

SEQ ID NO: 2356909 - RNA, 19 nt, Homo sapiens
  misc_RNA (1)...(19): siRNA sense strand
cuuaaguauucaucgaaga

SEQ ID NO: 2356910 - RNA, 19 nt, Homo sapiens
  misc_RNA (1)...(19): siRNA sense strand
guaucacauucuugcacaa

SEQ ID NO: 2356911 - RNA, 19 nt, Homo sapiens
  misc_RNA (1)...(19): siRNA sense strand
aagcaaaacuucagaugca

SEQ ID NO: 2356912 - RNA, 19 nt, Homo sapiens
  misc_RNA (1)...(19): siRNA sense strand
aauaaaauguugcggagau

SEQ ID NO: 2356913 - RNA, 19 nt, Homo sapiens
  misc_RNA (1)...(19): siRNA sense strand
gcagagaagcaggcaucaa

SEQ ID NO: 2356914 - RNA, 19 nt, Homo sapiens
  misc_RNA (1)...(19): siRNA sense strand
cagaauuccuucauggugu

SEQ ID NO: 2356915 - RNA, 19 nt, Homo sapiens
  misc_RNA (1)...(19): siRNA sense strand
ugauaguccugaaaacaaa

SEQ ID NO: 2356916 - RNA, 19 nt, Homo sapiens
  misc_RNA (1)...(19): siRNA sense strand
cauauuagcucuucuggga

SEQ ID NO: 2356917 - RNA, 19 nt, Homo sapiens
  misc_RNA (1)...(19): siRNA sense strand
gcaucaagauuacgcgaag

SEQ ID NO: 2356918 - RNA, 19 nt, Homo sapiens
  misc_RNA (1)...(19): siRNA sense strand
gaagagaggugaugcaagc

SEQ ID NO: 2356919 - RNA, 19 nt, Homo sapiens
  misc_RNA (1)...(19): siRNA sense strand
gcauaacaugggaacuauu

SEQ ID NO: 2356920 - RNA, 19 nt, Homo sapiens
  misc_RNA (1)...(19): siRNA sense strand
acagaagagaggugaugca

SEQ ID NO: 2356921 - RNA, 19 nt, Homo sapiens
  misc_RNA (1)...(19): siRNA sense strand
cuuuaauugcucuggguaa

SEQ ID NO: 2356922 - RNA, 19 nt, Homo sapiens
  misc_RNA (1)...(19): siRNA sense strand
cgggaaaugaagaaaccaa

SEQ ID NO: 2356923 - RNA, 19 nt, Homo sapiens
  misc_RNA (1)...(19): siRNA sense strand
ggggaagaaaacagaacaa

SEQ ID NO: 2356924 - RNA, 19 nt, Homo sapiens
  misc_RNA (1)...(19): siRNA sense strand
uggucauauuugagaacau

SEQ ID NO: 2356925 - RNA, 19 nt, Homo sapiens
  misc_RNA (1)...(19): siRNA sense strand
agaaaacagaacaaggaaa

SEQ ID NO: 2356926 - RNA, 19 nt, Homo sapiens
  misc_RNA (1)...(19): siRNA sense strand
gcugauaagguucugggaa

SEQ ID NO: 2356927 - RNA, 19 nt, Homo sapiens
  misc_RNA (1)...(19): siRNA sense strand
augacagcaaugagagcaa

SEQ ID NO: 2356928 - RNA, 19 nt, Homo sapiens
  misc_RNA (1)...(19): siRNA sense strand
cccaauugucgcaaagauu

SEQ ID NO: 2356929 - RNA, 19 nt, Homo sapiens
  misc_RNA (1)...(19): siRNA sense strand
gagugugaaugcugaaaau

SEQ ID NO: 2356930 - RNA, 19 nt, Homo sapiens
  misc_RNA (1)...(19): siRNA sense strand
cuaaugaguaucagcacau

SEQ ID NO: 2356931 - RNA, 19 nt, Homo sapiens
  misc_RNA (1)...(19): siRNA sense strand
aggaaaguaggcuggguga

SEQ ID NO: 2356932 - RNA, 19 nt, Homo sapiens
  misc_RNA (1)...(19): siRNA sense strand
augaugaugaugacagcaa

SEQ ID NO: 2356933 - RNA, 19 nt, Homo sapiens
  misc_RNA (1)...(19): siRNA sense strand
acgucgggcuguccagaaa

SEQ ID NO: 2356934 - RNA, 19 nt, Homo sapiens
  misc_RNA (1)...(19): siRNA sense strand
acuaaugaguaucagcaca

SEQ ID NO: 2356935 - RNA, 19 nt, Homo sapiens
  misc_RNA (1)...(19): siRNA sense strand
ucaaaugggaagaaaauga

SEQ ID NO: 2356936 - RNA, 19 nt, Homo sapiens
  misc_RNA (1)...(19): siRNA sense strand
cuuuaauugcucuggguaa

SEQ ID NO: 2356937 - RNA, 19 nt, Homo sapiens
  misc_RNA (1)...(19): siRNA sense strand
cgggaaaugaagaaaccaa

SEQ ID NO: 2356938 - RNA, 19 nt, Homo sapiens
  misc_RNA (1)...(19): siRNA sense strand
ggggaagaaaacagaacaa

SEQ ID NO: 2356939 - RNA, 19 nt, Homo sapiens
  misc_RNA (1)...(19): siRNA sense strand
uggucauauuugagaacau

SEQ ID NO: 2356940 - RNA, 19 nt, Homo sapiens
  misc_RNA (1)...(19): siRNA sense strand
agaaaacagaacaaggaaa

SEQ ID NO: 2356941 - RNA, 19 nt, Homo sapiens
  misc_RNA (1)...(19): siRNA sense strand
gcugauaagguucugggaa

SEQ ID NO: 2356942 - RNA, 19 nt, Homo sapiens
  misc_RNA (1)...(19): siRNA sense strand
augacagcaaugagagcaa

SEQ ID NO: 2356943 - RNA, 19 nt, Homo sapiens
  misc_RNA (1)...(19): siRNA sense strand
cccaauugucgcaaagauu

SEQ ID NO: 2356944 - RNA, 19 nt, Homo sapiens
  misc_RNA (1)...(19): siRNA sense strand
gagugugaaugcugaaaau

SEQ ID NO: 2356945 - RNA, 19 nt, Homo sapiens
  misc_RNA (1)...(19): siRNA sense strand
cuaaugaguaucagcacau

SEQ ID NO: 2356946 - RNA, 19 nt, Homo sapiens
  misc_RNA (1)...(19): siRNA sense strand
aggaaaguaggcuggguga

SEQ ID NO: 2356947 - RNA, 19 nt, Homo sapiens
  misc_RNA (1)...(19): siRNA sense strand
augaugaugaugacagcaa

SEQ ID NO: 2356948 - RNA, 19 nt, Homo sapiens
  misc_RNA (1)...(19): siRNA sense strand
acgucgggcuguccagaaa

SEQ ID NO: 2356949 - RNA, 19 nt, Homo sapiens
  misc_RNA (1)...(19): siRNA sense strand
acuaaugaguaucagcaca

SEQ ID NO: 2356950 - RNA, 19 nt, Homo sapiens
  misc_RNA (1)...(19): siRNA sense strand
ucaaaugggaagaaaauga

SEQ ID NO: 2356951 - RNA, 19 nt, Homo sapiens
  misc_RNA (1)...(19): siRNA sense strand
cuuuaauugcucuggguaa

SEQ ID NO: 2356952 - RNA, 19 nt, Homo sapiens
  misc_RNA (1)...(19): siRNA sense strand
cgggaaaugaagaaaccaa

SEQ ID NO: 2356953 - RNA, 19 nt, Homo sapiens
  misc_RNA (1)...(19): siRNA sense strand
ggggaagaaaacagaacaa

SEQ ID NO: 2356954 - RNA, 19 nt, Homo sapiens
  misc_RNA (1)...(19): siRNA sense strand
uggucauauuugagaacau

SEQ ID NO: 2356955 - RNA, 19 nt, Homo sapiens
  misc_RNA (1)...(19): siRNA sense strand
agaaaacagaacaaggaaa

SEQ ID NO: 2356956 - RNA, 19 nt, Homo sapiens
  misc_RNA (1)...(19): siRNA sense strand
gcugauaagguucugggaa

SEQ ID NO: 2356957 - RNA, 19 nt, Homo sapiens
  misc_RNA (1)...(19): siRNA sense strand
augacagcaaugagagcaa

SEQ ID NO: 2356958 - RNA, 19 nt, Homo sapiens
  misc_RNA (1)...(19): siRNA sense strand
cccaauugucgcaaagauu

SEQ ID NO: 2356959 - RNA, 19 nt, Homo sapiens
  misc_RNA (1)...(19): siRNA sense strand
gagugugaaugcugaaaau

SEQ ID NO: 2356960 - RNA, 19 nt, Homo sapiens
  misc_RNA (1)...(19): siRNA sense strand
cuaaugaguaucagcacau

SEQ ID NO: 2356961 - RNA, 19 nt, Homo sapiens
  misc_RNA (1)...(19): siRNA sense strand
aggaaaguaggcuggguga

SEQ ID NO: 2356962 - RNA, 19 nt, Homo sapiens
  misc_RNA (1)...(19): siRNA sense strand
augaugaugaugacagcaa

SEQ ID NO: 2356963 - RNA, 19 nt, Homo sapiens
  misc_RNA (1)...(19): siRNA sense strand
acgucgggcuguccagaaa

SEQ ID NO: 2356964 - RNA, 19 nt, Homo sapiens
  misc_RNA (1)...(19): siRNA sense strand
acuaaugaguaucagcaca

SEQ ID NO: 2356965 - RNA, 19 nt, Homo sapiens
  misc_RNA (1)...(19): siRNA sense strand
ucaaaugggaagaaaauga

SEQ ID NO: 2356966 - RNA, 19 nt, Homo sapiens
  misc_RNA (1)...(19): siRNA sense strand
cuuaaaggucaaaggaaua

SEQ ID NO: 2356967 - RNA, 19 nt, Homo sapiens
  misc_RNA (1)...(19): siRNA sense strand
gggagaaagcauuagagaa

SEQ ID NO: 2356968 - RNA, 19 nt, Homo sapiens
  misc_RNA (1)...(19): siRNA sense strand
uguauauggugguggaaau

SEQ ID NO: 2356969 - RNA, 19 nt, Homo sapiens
  misc_RNA (1)...(19): siRNA sense strand
cggaaaagggaaauggaaa

SEQ ID NO: 2356970 - RNA, 19 nt, Homo sapiens
  misc_RNA (1)...(19): siRNA sense strand
uggaaauagagaugaacaa

SEQ ID NO: 2356971 - RNA, 19 nt, Homo sapiens
  misc_RNA (1)...(19): siRNA sense strand
gaacagagagaucgggaga

SEQ ID NO: 2356972 - RNA, 19 nt, Homo sapiens
  misc_RNA (1)...(19): siRNA sense strand
gagauagagaacagagaga

SEQ ID NO: 2356973 - RNA, 19 nt, Homo sapiens
  misc_RNA (1)...(19): siRNA sense strand
ugguggaaauagagaugaa

SEQ ID NO: 2356974 - RNA, 19 nt, Homo sapiens
  misc_RNA (1)...(19): siRNA sense strand
agaaaugauuggaggguug

SEQ ID NO: 2356975 - RNA, 19 nt, Homo sapiens
  misc_RNA (1)...(19): siRNA sense strand
aggcaaagugagaauacua

SEQ ID NO: 2356976 - RNA, 19 nt, Homo sapiens
  misc_RNA (1)...(19): siRNA sense strand
aagaauacguacaccgaau

SEQ ID NO: 2356977 - RNA, 19 nt, Homo sapiens
  misc_RNA (1)...(19): siRNA sense strand
uaucaauggcugagagguu

SEQ ID NO: 2356978 - RNA, 19 nt, Homo sapiens
  misc_RNA (1)...(19): siRNA sense strand
gggauauagugucggcaga

SEQ ID NO: 2356979 - RNA, 19 nt, Homo sapiens
  misc_RNA (1)...(19): siRNA sense strand
ugaccuaauacuuggaaau

SEQ ID NO: 2356980 - RNA, 19 nt, Homo sapiens
  misc_RNA (1)...(19): siRNA sense strand
gaauagaucuuauaggagu

SEQ ID NO: 2356981 - RNA, 19 nt, Homo sapiens
  misc_RNA (1)...(19): siRNA sense strand
caucaacggaaaagggaaa

SEQ ID NO: 2356982 - RNA, 19 nt, Homo sapiens
  misc_RNA (1)...(19): siRNA sense strand
ggaaagaccucaaggaagg

SEQ ID NO: 2356983 - RNA, 19 nt, Homo sapiens
  misc_RNA (1)...(19): siRNA sense strand
aaacaggcaaagugagaau

SEQ ID NO: 2356984 - RNA, 19 nt, Homo sapiens
  misc_RNA (1)...(19): siRNA sense strand
cgaauagggcgcacgggaa

SEQ ID NO: 2356985 - RNA, 19 nt, Homo sapiens
  misc_RNA (1)...(19): siRNA sense strand
cugagagguuugaggcaca

SEQ ID NO: 2356986 - RNA, 19 nt, Homo sapiens
  misc_RNA (1)...(19): siRNA sense strand
aagcaaaagcagugauaga

SEQ ID NO: 2356987 - RNA, 19 nt, Homo sapiens
  misc_RNA (1)...(19): siRNA sense strand
ugaacaaauagaagagcuu

SEQ ID NO: 2356988 - RNA, 19 nt, Homo sapiens
  misc_RNA (1)...(19): siRNA sense strand
ugucaaaaguagaagcaga

SEQ ID NO: 2356989 - RNA, 19 nt, Homo sapiens
  misc_RNA (1)...(19): siRNA sense strand
uggaaaagauggaagcaca

SEQ ID NO: 2356990 - RNA, 19 nt, Homo sapiens
  misc_RNA (1)...(19): siRNA sense strand
acuaauugcaacugaucua

SEQ ID NO: 2356991 - RNA, 19 nt, Homo sapiens
  misc_RNA (1)...(19): siRNA sense strand
ccauuguguugcaaggaau

SEQ ID NO: 2356992 - RNA, 19 nt, Homo sapiens
  misc_RNA (1)...(19): siRNA sense strand
ucgaaaagcuguugcggau

SEQ ID NO: 2356993 - RNA, 19 nt, Homo sapiens
  misc_RNA (1)...(19): siRNA sense strand
acaagaacaaccagaauca

SEQ ID NO: 2356994 - RNA, 19 nt, Homo sapiens
  misc_RNA (1)...(19): siRNA sense strand
guauauggugguggaaaua

SEQ ID NO: 2356995 - RNA, 19 nt, Homo sapiens
  misc_RNA (1)...(19): siRNA sense strand
gauugaaugaucugcaaau

SEQ ID NO: 2356996 - RNA, 19 nt, Homo sapiens
  misc_RNA (1)...(19): siRNA sense strand
gcagacaagauguuggaca

SEQ ID NO: 2356997 - RNA, 19 nt, Homo sapiens
  misc_RNA (1)...(19): siRNA sense strand
gauagagaacagagagauc

SEQ ID NO: 2356998 - RNA, 19 nt, Homo sapiens
  misc_RNA (1)...(19): siRNA sense strand
caauguuguugcaggagau

SEQ ID NO: 2356999 - RNA, 19 nt, Homo sapiens
  misc_RNA (1)...(19): siRNA sense strand
ccaccgaggaagagaaaug

SEQ ID NO: 2357000 - RNA, 19 nt, Homo sapiens
  misc_RNA (1)...(19): siRNA sense strand
gagaauacuaauugcaacu

SEQ ID NO: 2357001 - RNA, 19 nt, Homo sapiens
  misc_RNA (1)...(19): siRNA sense strand
aaauuagagaggaagguuu

SEQ ID NO: 2357002 - RNA, 19 nt, Homo sapiens
  misc_RNA (1)...(19): siRNA sense strand
ucggaguguuuguguauau

SEQ ID NO: 2357003 - RNA, 19 nt, Homo sapiens
  misc_RNA (1)...(19): siRNA sense strand
ggucguugcuagucggcga

SEQ ID NO: 2357004 - RNA, 19 nt, Homo sapiens
  misc_RNA (1)...(19): siRNA sense strand
aguuaugaccagugcuaca

SEQ ID NO: 2357005 - RNA, 19 nt, Homo sapiens
  misc_RNA (1)...(19): siRNA sense strand
gaacuuuaaaacaggcaaa

SEQ ID NO: 2357006 - RNA, 19 nt, Homo sapiens
  misc_RNA (1)...(19): siRNA sense strand
cuugaaggauggggagaaa

SEQ ID NO: 2357007 - RNA, 19 nt, Homo sapiens
  misc_RNA (1)...(19): siRNA sense strand
cauuguguugcaaggaaua

SEQ ID NO: 2357008 - RNA, 19 nt, Homo sapiens
  misc_RNA (1)...(19): siRNA sense strand
guguauauggugguggaaa

SEQ ID NO: 2357009 - RNA, 19 nt, Homo sapiens
  misc_RNA (1)...(19): siRNA sense strand
aggaagagaaauggaguca

SEQ ID NO: 2357010 - RNA, 19 nt, Homo sapiens
  misc_RNA (1)...(19): siRNA sense strand
cgggagaaagcauuagaga

SEQ ID NO: 2357011 - RNA, 19 nt, Homo sapiens
  misc_RNA (1)...(19): siRNA sense strand
ccacaauccaaauaauaca

SEQ ID NO: 2357012 - RNA, 19 nt, Homo sapiens
  misc_RNA (1)...(19): siRNA sense strand
caaugcaaacgaaagcaaa

SEQ ID NO: 2357013 - RNA, 19 nt, Homo sapiens
  misc_RNA (1)...(19): siRNA sense strand
guggaaauagagaugaaca

SEQ ID NO: 2357014 - RNA, 19 nt, Homo sapiens
  misc_RNA (1)...(19): siRNA sense strand
aauuguaaccaccgaggaa

SEQ ID NO: 2357015 - RNA, 19 nt, Homo sapiens
  misc_RNA (1)...(19): siRNA sense strand
aaauggagucacaugcaaa

SEQ ID NO: 2357016 - RNA, 19 nt, Homo sapiens
  misc_RNA (1)...(19): siRNA sense strand
ggaaaagggaaauggaaag

SEQ ID NO: 2357017 - RNA, 19 nt, Homo sapiens
  misc_RNA (1)...(19): siRNA sense strand
auggaaagaccucaaggaa

SEQ ID NO: 2357018 - RNA, 19 nt, Homo sapiens
  misc_RNA (1)...(19): siRNA sense strand
gauuugaaccccagauaau

SEQ ID NO: 2357019 - RNA, 19 nt, Homo sapiens
  misc_RNA (1)...(19): siRNA sense strand
cagagguggucgcuggaga

SEQ ID NO: 2357020 - RNA, 19 nt, Homo sapiens
  misc_RNA (1)...(19): siRNA sense strand
uagagaggaagguuugaaa

SEQ ID NO: 2357021 - RNA, 19 nt, Homo sapiens
  misc_RNA (1)...(19): siRNA sense strand
gugaagagagagugguaaa

SEQ ID NO: 2357022 - RNA, 19 nt, Homo sapiens
  misc_RNA (1)...(19): siRNA sense strand
cgugaagagaagaaagaua

SEQ ID NO: 2357023 - RNA, 19 nt, Homo sapiens
  misc_RNA (1)...(19): siRNA sense strand
cuaugaaagucaagagaca

SEQ ID NO: 2357024 - RNA, 19 nt, Homo sapiens
  misc_RNA (1)...(19): siRNA sense strand
aaguuaagcacaugagaaa

SEQ ID NO: 2357025 - RNA, 19 nt, Homo sapiens
  misc_RNA (1)...(19): siRNA sense strand
cgugaagagaggauggaaa

SEQ ID NO: 2357026 - RNA, 19 nt, Homo sapiens
  misc_RNA (1)...(19): siRNA sense strand
cgugaagagaagauggaaa

SEQ ID NO: 2357027 - RNA, 19 nt, Homo sapiens
  misc_RNA (1)...(19): siRNA sense strand
ggaaaauggccaacgaaaa

SEQ ID NO: 2357028 - RNA, 19 nt, Homo sapiens
  misc_RNA (1)...(19): siRNA sense strand
cgugaagagaagauaaaua

SEQ ID NO: 2357029 - RNA, 19 nt, Homo sapiens
  misc_RNA (1)...(19): siRNA sense strand
caugaagagaggauggaaa

SEQ ID NO: 2357030 - RNA, 19 nt, Homo sapiens
  misc_RNA (1)...(19): siRNA sense strand
gugaagagaagauggaaaa

SEQ ID NO: 2357031 - RNA, 19 nt, Homo sapiens
  misc_RNA (1)...(19): siRNA sense strand
cgugaagagagaauggaaa

SEQ ID NO: 2357032 - RNA, 19 nt, Homo sapiens
  misc_RNA (1)...(19): siRNA sense strand
gguuagacaaacaggaaga

SEQ ID NO: 2357033 - RNA, 19 nt, Homo sapiens
  misc_RNA (1)...(19): siRNA sense strand
gaggauaaauaacggccaa

SEQ ID NO: 2357034 - RNA, 19 nt, Homo sapiens
  misc_RNA (1)...(19): siRNA sense strand
ugugaagagaagauggaaa

SEQ ID NO: 2357035 - RNA, 19 nt, Homo sapiens
  misc_RNA (1)...(19): siRNA sense strand
ccugaggagaagauggaaa

SEQ ID NO: 2357036 - RNA, 19 nt, Homo sapiens
  misc_RNA (1)...(19): siRNA sense strand
gcaaugaguuccagggauc

SEQ ID NO: 2357037 - RNA, 19 nt, Homo sapiens
  misc_RNA (1)...(19): siRNA sense strand
ugugaagagaggauaaaua

SEQ ID NO: 2357038 - RNA, 19 nt, Homo sapiens
  misc_RNA (1)...(19): siRNA sense strand
gugaagagaggauggaaaa

SEQ ID NO: 2357039 - RNA, 19 nt, Homo sapiens
  misc_RNA (1)...(19): siRNA sense strand
gugaagagagaauggaaaa

SEQ ID NO: 2357040 - RNA, 19 nt, Homo sapiens
  misc_RNA (1)...(19): siRNA sense strand
gaagaaagauaacagccaa

SEQ ID NO: 2357041 - RNA, 19 nt, Homo sapiens
  misc_RNA (1)...(19): siRNA sense strand
gguaaauaaccaaccacua

SEQ ID NO: 2357042 - RNA, 19 nt, Homo sapiens
  misc_RNA (1)...(19): siRNA sense strand
ccagaaaauccaagagaca

SEQ ID NO: 2357043 - RNA, 19 nt, Homo sapiens
  misc_RNA (1)...(19): siRNA sense strand
cguauuaauaugacagaca

SEQ ID NO: 2357044 - RNA, 19 nt, Homo sapiens
  misc_RNA (1)...(19): siRNA sense strand
caugaagcaaggauggaaa

SEQ ID NO: 2357045 - RNA, 19 nt, Homo sapiens
  misc_RNA (1)...(19): siRNA sense strand
caggaggaggagauggaaa

SEQ ID NO: 2357046 - RNA, 19 nt, Homo sapiens
  misc_RNA (1)...(19): siRNA sense strand
gaagauaaauaacagccaa

SEQ ID NO: 2357047 - RNA, 19 nt, Homo sapiens
  misc_RNA (1)...(19): siRNA sense strand
gaagaugacaaauggccaa

SEQ ID NO: 2357048 - RNA, 19 nt, Homo sapiens
  misc_RNA (1)...(19): siRNA sense strand
gauaaauaugacaggacau

SEQ ID NO: 2357049 - RNA, 19 nt, Homo sapiens
  misc_RNA (1)...(19): siRNA sense strand
gugaacagaagauggaaaa

SEQ ID NO: 2357050 - RNA, 19 nt, Homo sapiens
  misc_RNA (1)...(19): siRNA sense strand
aggaggaggagauggaaaa

SEQ ID NO: 2357051 - RNA, 19 nt, Homo sapiens
  misc_RNA (1)...(19): siRNA sense strand
cuucacaagucucagcaaa

SEQ ID NO: 2357052 - RNA, 19 nt, Homo sapiens
  misc_RNA (1)...(19): siRNA sense strand
augaaagucaagagacaau

SEQ ID NO: 2357053 - RNA, 19 nt, Homo sapiens
  misc_RNA (1)...(19): siRNA sense strand
ucaucuaagagaaggaaga

SEQ ID NO: 2357054 - RNA, 19 nt, Homo sapiens
  misc_RNA (1)...(19): siRNA sense strand
acaaugucccugaggagaa

SEQ ID NO: 2357055 - RNA, 19 nt, Homo sapiens
  misc_RNA (1)...(19): siRNA sense strand
cuaagagaaggaagaguau

SEQ ID NO: 2357056 - RNA, 19 nt, Homo sapiens
  misc_RNA (1)...(19): siRNA sense strand
ugugaacagaagauggaaa

SEQ ID NO: 2357057 - RNA, 19 nt, Homo sapiens
  misc_RNA (1)...(19): siRNA sense strand
aagagaggauggaaaauaa

SEQ ID NO: 2357058 - RNA, 19 nt, Homo sapiens
  misc_RNA (1)...(19): siRNA sense strand
ugauaaauaugacaggaca

SEQ ID NO: 2357059 - RNA, 19 nt, Homo sapiens
  misc_RNA (1)...(19): siRNA sense strand
gcgcuuaaagaaauagauu

SEQ ID NO: 2357060 - RNA, 19 nt, Homo sapiens
  misc_RNA (1)...(19): siRNA sense strand
cagcaaaugaggagugaug

SEQ ID NO: 2357061 - RNA, 19 nt, Homo sapiens
  misc_RNA (1)...(19): siRNA sense strand
cugugaagagagaguggua

SEQ ID NO: 2357062 - RNA, 19 nt, Homo sapiens
  misc_RNA (1)...(19): siRNA sense strand
augaagagaggauggaaaa

SEQ ID NO: 2357063 - RNA, 19 nt, Homo sapiens
  misc_RNA (1)...(19): siRNA sense strand
augaggagaagaugacaaa

SEQ ID NO: 2357064 - RNA, 19 nt, Homo sapiens
  misc_RNA (1)...(19): siRNA sense strand
cugccuauguguuuacaaa

SEQ ID NO: 2357065 - RNA, 19 nt, Homo sapiens
  misc_RNA (1)...(19): siRNA sense strand
ggaaaaugaccaaccgcaa

SEQ ID NO: 2357066 - RNA, 19 nt, Homo sapiens
  misc_RNA (1)...(19): siRNA sense strand
guggaaacugugccaaaua

SEQ ID NO: 2357067 - RNA, 19 nt, Homo sapiens
  misc_RNA (1)...(19): siRNA sense strand
aguucgaagguuugggcaa

SEQ ID NO: 2357068 - RNA, 19 nt, Homo sapiens
  misc_RNA (1)...(19): siRNA sense strand
gggcaaaauuaugaaagaa

SEQ ID NO: 2357069 - RNA, 19 nt, Homo sapiens
  misc_RNA (1)...(19): siRNA sense strand
ccucgugguuagacaaaca

SEQ ID NO: 2357070 - RNA, 19 nt, Homo sapiens
  misc_RNA (1)...(19): siRNA sense strand
gugaagagaagauggaaag

SEQ ID NO: 2357071 - RNA, 19 nt, Homo sapiens
  misc_RNA (1)...(19): siRNA sense strand
ggaaaauaaccaaccacaa

SEQ ID NO: 2357072 - RNA, 19 nt, Homo sapiens
  misc_RNA (1)...(19): siRNA sense strand
caugaggagaagaugacaa

SEQ ID NO: 2357073 - RNA, 19 nt, Homo sapiens
  misc_RNA (1)...(19): siRNA sense strand
gcauuugugaagagaggau

SEQ ID NO: 2357074 - RNA, 19 nt, Homo sapiens
  misc_RNA (1)...(19): siRNA sense strand
cugaggagaagauggaaaa

SEQ ID NO: 2357075 - RNA, 19 nt, Homo sapiens
  misc_RNA (1)...(19): siRNA sense strand
uaguaaugaauuugcggua

SEQ ID NO: 2357076 - RNA, 19 nt, Homo sapiens
  misc_RNA (1)...(19): siRNA sense strand
ucagaaaaguuaagcacau

SEQ ID NO: 2357077 - RNA, 19 nt, Homo sapiens
  misc_RNA (1)...(19): siRNA sense strand
ccgugaagagagaauggaa

SEQ ID NO: 2357078 - RNA, 19 nt, Homo sapiens
  misc_RNA (1)...(19): siRNA sense strand
guccaugaagagaagauua

SEQ ID NO: 2357079 - RNA, 19 nt, Homo sapiens
  misc_RNA (1)...(19): siRNA sense strand
acaaaugaugggcagcaaa

SEQ ID NO: 2357080 - RNA, 19 nt, Homo sapiens
  misc_RNA (1)...(19): siRNA sense strand
ccugauaacaucuugucaa

SEQ ID NO: 2357081 - RNA, 19 nt, Homo sapiens
  misc_RNA (1)...(19): siRNA sense strand
gggcaugaauaccagggau

SEQ ID NO: 2357082 - RNA, 19 nt, Homo sapiens
  misc_RNA (1)...(19): siRNA sense strand
auuugugaagagaggauaa

SEQ ID NO: 2357083 - RNA, 19 nt, Homo sapiens
  misc_RNA (1)...(19): siRNA sense strand
agaagaaagauaacagcca

SEQ ID NO: 2357084 - RNA, 19 nt, Homo sapiens
  misc_RNA (1)...(19): siRNA sense strand
uccaugaagagaagauuaa

SEQ ID NO: 2357085 - RNA, 19 nt, Homo sapiens
  misc_RNA (1)...(19): siRNA sense strand
cuucagaauuuguaggaaa

SEQ ID NO: 2357086 - RNA, 19 nt, Homo sapiens
  misc_RNA (1)...(19): siRNA sense strand
gggcaauguuaauggaaau

SEQ ID NO: 2357087 - RNA, 19 nt, Homo sapiens
  misc_RNA (1)...(19): siRNA sense strand
cugaaagacuaaaggucaa

SEQ ID NO: 2357088 - RNA, 19 nt, Homo sapiens
  misc_RNA (1)...(19): siRNA sense strand
ucuaaaaccuggagacaaa

SEQ ID NO: 2357089 - RNA, 19 nt, Homo sapiens
  misc_RNA (1)...(19): siRNA sense strand
uugaaggacuggauagaaa

SEQ ID NO: 2357090 - RNA, 19 nt, Homo sapiens
  misc_RNA (1)...(19): siRNA sense strand
ccuugaaacgugaaaguaa

SEQ ID NO: 2357091 - RNA, 19 nt, Homo sapiens
  misc_RNA (1)...(19): siRNA sense strand
ggucaaagagcaaaagaaa

SEQ ID NO: 2357092 - RNA, 19 nt, Homo sapiens
  misc_RNA (1)...(19): siRNA sense strand
agucauaagucgaauaaca

SEQ ID NO: 2357093 - RNA, 19 nt, Homo sapiens
  misc_RNA (1)...(19): siRNA sense strand
gagcauguacauagacaaa

SEQ ID NO: 2357094 - RNA, 19 nt, Homo sapiens
  misc_RNA (1)...(19): siRNA sense strand
cuugaaacgugaaaguaaa

SEQ ID NO: 2357095 - RNA, 19 nt, Homo sapiens
  misc_RNA (1)...(19): siRNA sense strand
cuaaagaacaagaggagga

SEQ ID NO: 2357096 - RNA, 19 nt, Homo sapiens
  misc_RNA (1)...(19): siRNA sense strand
gugaaaauguggaggcuuu

SEQ ID NO: 2357097 - RNA, 19 nt, Homo sapiens
  misc_RNA (1)...(19): siRNA sense strand
auguggaggcuuugagaaa

SEQ ID NO: 2357098 - RNA, 19 nt, Homo sapiens
  misc_RNA (1)...(19): siRNA sense strand
cugcaggaaucaaacgaaa

SEQ ID NO: 2357099 - RNA, 19 nt, Homo sapiens
  misc_RNA (1)...(19): siRNA sense strand
aaucaaaacaugugggaau

SEQ ID NO: 2357100 - RNA, 19 nt, Homo sapiens
  misc_RNA (1)...(19): siRNA sense strand
guuaagauguaucggaaca

SEQ ID NO: 2357101 - RNA, 19 nt, Homo sapiens
  misc_RNA (1)...(19): siRNA sense strand
gauuaaugacagugacuau

SEQ ID NO: 2357102 - RNA, 19 nt, Homo sapiens
  misc_RNA (1)...(19): siRNA sense strand
cagcacauguggcgagcaa

SEQ ID NO: 2357103 - RNA, 19 nt, Homo sapiens
  misc_RNA (1)...(19): siRNA sense strand
ggaacgaacacaagaagau

SEQ ID NO: 2357104 - RNA, 19 nt, Homo sapiens
  misc_RNA (1)...(19): siRNA sense strand
caaagauaaccaagcuaaa

SEQ ID NO: 2357105 - RNA, 19 nt, Homo sapiens
  misc_RNA (1)...(19): siRNA sense strand
aagaacaagaggaggaaga

SEQ ID NO: 2357106 - RNA, 19 nt, Homo sapiens
  misc_RNA (1)...(19): siRNA sense strand
aacaagaggaggaagauaa

SEQ ID NO: 2357107 - RNA, 19 nt, Homo sapiens
  misc_RNA (1)...(19): siRNA sense strand
guggaggcuuugagaaauu

SEQ ID NO: 2357108 - RNA, 19 nt, Homo sapiens
  misc_RNA (1)...(19): siRNA sense strand
uggcauuuguccacaguua

SEQ ID NO: 2357109 - RNA, 19 nt, Homo sapiens
  misc_RNA (1)...(19): siRNA sense strand
gcugaaagacuaaagguca

SEQ ID NO: 2357110 - RNA, 19 nt, Homo sapiens
  misc_RNA (1)...(19): siRNA sense strand
aggaguuaucagagggcaa

SEQ ID NO: 2357111 - RNA, 19 nt, Homo sapiens
  misc_RNA (1)...(19): siRNA sense strand
cagagaaucauaagaucaa

SEQ ID NO: 2357112 - RNA, 19 nt, Homo sapiens
  misc_RNA (1)...(19): siRNA sense strand
gcagagaaucauaagauca

SEQ ID NO: 2357113 - RNA, 19 nt, Homo sapiens
  misc_RNA (1)...(19): siRNA sense strand
uccaaauggugcuggcaaa

SEQ ID NO: 2357114 - RNA, 19 nt, Homo sapiens
  misc_RNA (1)...(19): siRNA sense strand
gauagaaaaccuagaagua

SEQ ID NO: 2357115 - RNA, 19 nt, Homo sapiens
  misc_RNA (1)...(19): siRNA sense strand
ggaauuuggcuuacggaga

SEQ ID NO: 2357116 - RNA, 19 nt, Homo sapiens
  misc_RNA (1)...(19): siRNA sense strand
aaaauuaagugguggucaa

SEQ ID NO: 2357117 - RNA, 19 nt, Homo sapiens
  misc_RNA (1)...(19): siRNA sense strand
agauaggaaagcugugaua

SEQ ID NO: 2357118 - RNA, 19 nt, Homo sapiens
  misc_RNA (1)...(19): siRNA sense strand
aggagagaucuuaggacua

SEQ ID NO: 2357119 - RNA, 19 nt, Homo sapiens
  misc_RNA (1)...(19): siRNA sense strand
caguuaagauguaucggaa

SEQ ID NO: 2357120 - RNA, 19 nt, Homo sapiens
  misc_RNA (1)...(19): siRNA sense strand
cauauuggucaaagagcaa

SEQ ID NO: 2357121 - RNA, 19 nt, Homo sapiens
  misc_RNA (1)...(19): siRNA sense strand
agggcaauguuaauggaaa

SEQ ID NO: 2357122 - RNA, 19 nt, Homo sapiens
  misc_RNA (1)...(19): siRNA sense strand
agaacucacuaaagaacaa

SEQ ID NO: 2357123 - RNA, 19 nt, Homo sapiens
  misc_RNA (1)...(19): siRNA sense strand
gcuuauuggcauuucauua

SEQ ID NO: 2357124 - RNA, 19 nt, Homo sapiens
  misc_RNA (1)...(19): siRNA sense strand
ucaaagagcugauggguug

SEQ ID NO: 2357125 - RNA, 19 nt, Homo sapiens
  misc_RNA (1)...(19): siRNA sense strand
ggaaugagugcaagugaca

SEQ ID NO: 2357126 - RNA, 19 nt, Homo sapiens
  misc_RNA (1)...(19): siRNA sense strand
cuuucaaggacauggacaa

SEQ ID NO: 2357127 - RNA, 19 nt, Homo sapiens
  misc_RNA (1)...(19): siRNA sense strand
agauuauucuucagagaca

SEQ ID NO: 2357128 - RNA, 19 nt, Homo sapiens
  misc_RNA (1)...(19): siRNA sense strand
gugcaagugacaugaaaga

SEQ ID NO: 2357129 - RNA, 19 nt, Homo sapiens
  misc_RNA (1)...(19): siRNA sense strand
uggaaaaugcagagaauca

SEQ ID NO: 2357130 - RNA, 19 nt, Homo sapiens
  misc_RNA (1)...(19): siRNA sense strand
gucaaaggaaugagugcaa

SEQ ID NO: 2357131 - RNA, 19 nt, Homo sapiens
  misc_RNA (1)...(19): siRNA sense strand
caagaagugcagaagguuu

SEQ ID NO: 2357132 - RNA, 19 nt, Homo sapiens
  misc_RNA (1)...(19): siRNA sense strand
gguuauguuccaucaguua

SEQ ID NO: 2357133 - RNA, 19 nt, Homo sapiens
  misc_RNA (1)...(19): siRNA sense strand
aauaugaagaagugccuaa

SEQ ID NO: 2357134 - RNA, 19 nt, Homo sapiens
  misc_RNA (1)...(19): siRNA sense strand
gggucagauuacugccuua

SEQ ID NO: 2357135 - RNA, 19 nt, Homo sapiens
  misc_RNA (1)...(19): siRNA sense strand
acauauaccuggagcuacu

SEQ ID NO: 2357136 - RNA, 19 nt, Homo sapiens
  misc_RNA (1)...(19): siRNA sense strand
acuuaaacuuucaggucuu

SEQ ID NO: 2357137 - RNA, 19 nt, Homo sapiens
  misc_RNA (1)...(19): siRNA sense strand
cagaaagaagggugaaaau

SEQ ID NO: 2357138 - RNA, 19 nt, Homo sapiens
  misc_RNA (1)...(19): siRNA sense strand
ggaacaggaaagaguacau

SEQ ID NO: 2357139 - RNA, 19 nt, Homo sapiens
  misc_RNA (1)...(19): siRNA sense strand
agaguaguguucaggaaau

SEQ ID NO: 2357140 - RNA, 19 nt, Homo sapiens
  misc_RNA (1)...(19): siRNA sense strand
agaaguugaagcagaaauu

SEQ ID NO: 2357141 - RNA, 19 nt, Homo sapiens
  misc_RNA (1)...(19): siRNA sense strand
caccaugagccuuuggaaa

SEQ ID NO: 2357142 - RNA, 19 nt, Homo sapiens
  misc_RNA (1)...(19): siRNA sense strand
uggaaacaacagauguaua

SEQ ID NO: 2357143 - RNA, 19 nt, Homo sapiens
  misc_RNA (1)...(19): siRNA sense strand
ucuaaguaugcuagggaau

SEQ ID NO: 2357144 - RNA, 19 nt, Homo sapiens
  misc_RNA (1)...(19): siRNA sense strand
gccauaagaauuaguggua

SEQ ID NO: 2357145 - RNA, 19 nt, Homo sapiens
  misc_RNA (1)...(19): siRNA sense strand
gcugaaauguguugguucu

SEQ ID NO: 2357146 - RNA, 19 nt, Homo sapiens
  misc_RNA (1)...(19): siRNA sense strand
cuacauugcaggaacauuu

SEQ ID NO: 2357147 - RNA, 19 nt, Homo sapiens
  misc_RNA (1)...(19): siRNA sense strand
uuauacaguugaagaccaa

SEQ ID NO: 2357148 - RNA, 19 nt, Homo sapiens
  misc_RNA (1)...(19): siRNA sense strand
cauggaaaaugcagagaau

SEQ ID NO: 2357149 - RNA, 19 nt, Homo sapiens
  misc_RNA (1)...(19): siRNA sense strand
aggcagaucaauaagaaaa

SEQ ID NO: 2357150 - RNA, 19 nt, Homo sapiens
  misc_RNA (1)...(19): siRNA sense strand
cuucagaauuuguaggaaa

SEQ ID NO: 2357151 - RNA, 19 nt, Homo sapiens
  misc_RNA (1)...(19): siRNA sense strand
gggcaauguuaauggaaau

SEQ ID NO: 2357152 - RNA, 19 nt, Homo sapiens
  misc_RNA (1)...(19): siRNA sense strand
cugaaagacuaaaggucaa

SEQ ID NO: 2357153 - RNA, 19 nt, Homo sapiens
  misc_RNA (1)...(19): siRNA sense strand
ucuaaaaccuggagacaaa

SEQ ID NO: 2357154 - RNA, 19 nt, Homo sapiens
  misc_RNA (1)...(19): siRNA sense strand
uugaaggacuggauagaaa

SEQ ID NO: 2357155 - RNA, 19 nt, Homo sapiens
  misc_RNA (1)...(19): siRNA sense strand
ccuugaaacgugaaaguaa

SEQ ID NO: 2357156 - RNA, 19 nt, Homo sapiens
  misc_RNA (1)...(19): siRNA sense strand
ggucaaagagcaaaagaaa

SEQ ID NO: 2357157 - RNA, 19 nt, Homo sapiens
  misc_RNA (1)...(19): siRNA sense strand
agucauaagucgaauaaca

SEQ ID NO: 2357158 - RNA, 19 nt, Homo sapiens
  misc_RNA (1)...(19): siRNA sense strand
gagcauguacauagacaaa

SEQ ID NO: 2357159 - RNA, 19 nt, Homo sapiens
  misc_RNA (1)...(19): siRNA sense strand
cuugaaacgugaaaguaaa

SEQ ID NO: 2357160 - RNA, 19 nt, Homo sapiens
  misc_RNA (1)...(19): siRNA sense strand
cuaaagaacaagaggagga

SEQ ID NO: 2357161 - RNA, 19 nt, Homo sapiens
  misc_RNA (1)...(19): siRNA sense strand
gugaaaauguggaggcuuu

SEQ ID NO: 2357162 - RNA, 19 nt, Homo sapiens
  misc_RNA (1)...(19): siRNA sense strand
auguggaggcuuugagaaa

SEQ ID NO: 2357163 - RNA, 19 nt, Homo sapiens
  misc_RNA (1)...(19): siRNA sense strand
cugcaggaaucaaacgaaa

SEQ ID NO: 2357164 - RNA, 19 nt, Homo sapiens
  misc_RNA (1)...(19): siRNA sense strand
aaucaaaacaugugggaau

SEQ ID NO: 2357165 - RNA, 19 nt, Homo sapiens
  misc_RNA (1)...(19): siRNA sense strand
guuaagauguaucggaaca

SEQ ID NO: 2357166 - RNA, 19 nt, Homo sapiens
  misc_RNA (1)...(19): siRNA sense strand
gauuaaugacagugacuau

SEQ ID NO: 2357167 - RNA, 19 nt, Homo sapiens
  misc_RNA (1)...(19): siRNA sense strand
cagcacauguggcgagcaa

SEQ ID NO: 2357168 - RNA, 19 nt, Homo sapiens
  misc_RNA (1)...(19): siRNA sense strand
ggaacgaacacaagaagau

SEQ ID NO: 2357169 - RNA, 19 nt, Homo sapiens
  misc_RNA (1)...(19): siRNA sense strand
caaagauaaccaagcuaaa

SEQ ID NO: 2357170 - RNA, 19 nt, Homo sapiens
  misc_RNA (1)...(19): siRNA sense strand
aagaacaagaggaggaaga

SEQ ID NO: 2357171 - RNA, 19 nt, Homo sapiens
  misc_RNA (1)...(19): siRNA sense strand
aacaagaggaggaagauaa

SEQ ID NO: 2357172 - RNA, 19 nt, Homo sapiens
  misc_RNA (1)...(19): siRNA sense strand
guggaggcuuugagaaauu

SEQ ID NO: 2357173 - RNA, 19 nt, Homo sapiens
  misc_RNA (1)...(19): siRNA sense strand
uggcauuuguccacaguua

SEQ ID NO: 2357174 - RNA, 19 nt, Homo sapiens
  misc_RNA (1)...(19): siRNA sense strand
gcugaaagacuaaagguca

SEQ ID NO: 2357175 - RNA, 19 nt, Homo sapiens
  misc_RNA (1)...(19): siRNA sense strand
aggaguuaucagagggcaa

SEQ ID NO: 2357176 - RNA, 19 nt, Homo sapiens
  misc_RNA (1)...(19): siRNA sense strand
cagagaaucauaagaucaa

SEQ ID NO: 2357177 - RNA, 19 nt, Homo sapiens
  misc_RNA (1)...(19): siRNA sense strand
gcagagaaucauaagauca

SEQ ID NO: 2357178 - RNA, 19 nt, Homo sapiens
  misc_RNA (1)...(19): siRNA sense strand
uccaaauggugcuggcaaa

SEQ ID NO: 2357179 - RNA, 19 nt, Homo sapiens
  misc_RNA (1)...(19): siRNA sense strand
gauagaaaaccuagaagua

SEQ ID NO: 2357180 - RNA, 19 nt, Homo sapiens
  misc_RNA (1)...(19): siRNA sense strand
ggaauuuggcuuacggaga

SEQ ID NO: 2357181 - RNA, 19 nt, Homo sapiens
  misc_RNA (1)...(19): siRNA sense strand
aaaauuaagugguggucaa

SEQ ID NO: 2357182 - RNA, 19 nt, Homo sapiens
  misc_RNA (1)...(19): siRNA sense strand
agauaggaaagcugugaua

SEQ ID NO: 2357183 - RNA, 19 nt, Homo sapiens
  misc_RNA (1)...(19): siRNA sense strand
aggagagaucuuaggacua

SEQ ID NO: 2357184 - RNA, 19 nt, Homo sapiens
  misc_RNA (1)...(19): siRNA sense strand
caguuaagauguaucggaa

SEQ ID NO: 2357185 - RNA, 19 nt, Homo sapiens
  misc_RNA (1)...(19): siRNA sense strand
cauauuggucaaagagcaa

SEQ ID NO: 2357186 - RNA, 19 nt, Homo sapiens
  misc_RNA (1)...(19): siRNA sense strand
agggcaauguuaauggaaa

SEQ ID NO: 2357187 - RNA, 19 nt, Homo sapiens
  misc_RNA (1)...(19): siRNA sense strand
agaacucacuaaagaacaa

SEQ ID NO: 2357188 - RNA, 19 nt, Homo sapiens
  misc_RNA (1)...(19): siRNA sense strand
gcuuauuggcauuucauua

SEQ ID NO: 2357189 - RNA, 19 nt, Homo sapiens
  misc_RNA (1)...(19): siRNA sense strand
ucaaagagcugauggguug

SEQ ID NO: 2357190 - RNA, 19 nt, Homo sapiens
  misc_RNA (1)...(19): siRNA sense strand
ggaaugagugcaagugaca

SEQ ID NO: 2357191 - RNA, 19 nt, Homo sapiens
  misc_RNA (1)...(19): siRNA sense strand
cuuucaaggacauggacaa

SEQ ID NO: 2357192 - RNA, 19 nt, Homo sapiens
  misc_RNA (1)...(19): siRNA sense strand
agauuauucuucagagaca

SEQ ID NO: 2357193 - RNA, 19 nt, Homo sapiens
  misc_RNA (1)...(19): siRNA sense strand
gugcaagugacaugaaaga

SEQ ID NO: 2357194 - RNA, 19 nt, Homo sapiens
  misc_RNA (1)...(19): siRNA sense strand
uggaaaaugcagagaauca

SEQ ID NO: 2357195 - RNA, 19 nt, Homo sapiens
  misc_RNA (1)...(19): siRNA sense strand
gucaaaggaaugagugcaa

SEQ ID NO: 2357196 - RNA, 19 nt, Homo sapiens
  misc_RNA (1)...(19): siRNA sense strand
caagaagugcagaagguuu

SEQ ID NO: 2357197 - RNA, 19 nt, Homo sapiens
  misc_RNA (1)...(19): siRNA sense strand
gguuauguuccaucaguua

SEQ ID NO: 2357198 - RNA, 19 nt, Homo sapiens
  misc_RNA (1)...(19): siRNA sense strand
aauaugaagaagugccuaa

SEQ ID NO: 2357199 - RNA, 19 nt, Homo sapiens
  misc_RNA (1)...(19): siRNA sense strand
gggucagauuacugccuua

SEQ ID NO: 2357200 - RNA, 19 nt, Homo sapiens
  misc_RNA (1)...(19): siRNA sense strand
acauauaccuggagcuacu

SEQ ID NO: 2357201 - RNA, 19 nt, Homo sapiens
  misc_RNA (1)...(19): siRNA sense strand
acuuaaacuuucaggucuu

SEQ ID NO: 2357202 - RNA, 19 nt, Homo sapiens
  misc_RNA (1)...(19): siRNA sense strand
cagaaagaagggugaaaau

SEQ ID NO: 2357203 - RNA, 19 nt, Homo sapiens
  misc_RNA (1)...(19): siRNA sense strand
ggaacaggaaagaguacau

SEQ ID NO: 2357204 - RNA, 19 nt, Homo sapiens
  misc_RNA (1)...(19): siRNA sense strand
agaguaguguucaggaaau

SEQ ID NO: 2357205 - RNA, 19 nt, Homo sapiens
  misc_RNA (1)...(19): siRNA sense strand
agaaguugaagcagaaauu

SEQ ID NO: 2357206 - RNA, 19 nt, Homo sapiens
  misc_RNA (1)...(19): siRNA sense strand
caccaugagccuuuggaaa

SEQ ID NO: 2357207 - RNA, 19 nt, Homo sapiens
  misc_RNA (1)...(19): siRNA sense strand
uggaaacaacagauguaua

SEQ ID NO: 2357208 - RNA, 19 nt, Homo sapiens
  misc_RNA (1)...(19): siRNA sense strand
ucuaaguaugcuagggaau

SEQ ID NO: 2357209 - RNA, 19 nt, Homo sapiens
  misc_RNA (1)...(19): siRNA sense strand
gccauaagaauuaguggua

SEQ ID NO: 2357210 - RNA, 19 nt, Homo sapiens
  misc_RNA (1)...(19): siRNA sense strand
gcugaaauguguugguucu

SEQ ID NO: 2357211 - RNA, 19 nt, Homo sapiens
  misc_RNA (1)...(19): siRNA sense strand
cuacauugcaggaacauuu

SEQ ID NO: 2357212 - RNA, 19 nt, Homo sapiens
  misc_RNA (1)...(19): siRNA sense strand
uuauacaguugaagaccaa

SEQ ID NO: 2357213 - RNA, 19 nt, Homo sapiens
  misc_RNA (1)...(19): siRNA sense strand
cauggaaaaugcagagaau

SEQ ID NO: 2357214 - RNA, 19 nt, Homo sapiens
  misc_RNA (1)...(19): siRNA sense strand
aggcagaucaauaagaaaa

SEQ ID NO: 2357215 - RNA, 19 nt, Homo sapiens
  misc_RNA (1)...(19): siRNA sense strand
cagcaaaauaucuggaaua

SEQ ID NO: 2357216 - RNA, 19 nt, Homo sapiens
  misc_RNA (1)...(19): siRNA sense strand
gggcuaaagaagaagcaau

SEQ ID NO: 2357217 - RNA, 19 nt, Homo sapiens
  misc_RNA (1)...(19): siRNA sense strand
ucaaugaggaacagagcaa

SEQ ID NO: 2357218 - RNA, 19 nt, Homo sapiens
  misc_RNA (1)...(19): siRNA sense strand
gauagaaguguguggaaca

SEQ ID NO: 2357219 - RNA, 19 nt, Homo sapiens
  misc_RNA (1)...(19): siRNA sense strand
gugauaaaggcaaaguaaa

SEQ ID NO: 2357220 - RNA, 19 nt, Homo sapiens
  misc_RNA (1)...(19): siRNA sense strand
uguaauggagagagggcua

SEQ ID NO: 2357221 - RNA, 19 nt, Homo sapiens
  misc_RNA (1)...(19): siRNA sense strand
ggcuaaagaagaagcaauu

SEQ ID NO: 2357222 - RNA, 19 nt, Homo sapiens
  misc_RNA (1)...(19): siRNA sense strand
gagucaaauaucugaacua

SEQ ID NO: 2357223 - RNA, 19 nt, Homo sapiens
  misc_RNA (1)...(19): siRNA sense strand
uggcauuacaaaaggaaaa

SEQ ID NO: 2357224 - RNA, 19 nt, Homo sapiens
  misc_RNA (1)...(19): siRNA sense strand
ugugauaaaggcaaaguaa

SEQ ID NO: 2357225 - RNA, 19 nt, Homo sapiens
  misc_RNA (1)...(19): siRNA sense strand
ugacaguggaagugaggau

SEQ ID NO: 2357226 - RNA, 19 nt, Homo sapiens
  misc_RNA (1)...(19): siRNA sense strand
accuaugcuuucagaguaa

SEQ ID NO: 2357227 - RNA, 19 nt, Homo sapiens
  misc_RNA (1)...(19): siRNA sense strand
cgaaacuucacuuuggaaa

SEQ ID NO: 2357228 - RNA, 19 nt, Homo sapiens
  misc_RNA (1)...(19): siRNA sense strand
ccucuaagaaacuaagauu

SEQ ID NO: 2357229 - RNA, 19 nt, Homo sapiens
  misc_RNA (1)...(19): siRNA sense strand
agaacaugaaacagagaga

SEQ ID NO: 2357230 - RNA, 19 nt, Homo sapiens
  misc_RNA (1)...(19): siRNA sense strand
uggaagaguaccagggacu

SEQ ID NO: 2357231 - RNA, 19 nt, Homo sapiens
  misc_RNA (1)...(19): siRNA sense strand
gagauagaaguguguggaa

SEQ ID NO: 2357232 - RNA, 19 nt, Homo sapiens
  misc_RNA (1)...(19): siRNA sense strand
aacaugaaacagagagaau

SEQ ID NO: 2357233 - RNA, 19 nt, Homo sapiens
  misc_RNA (1)...(19): siRNA sense strand
guaaggaaagccaggugaa

SEQ ID NO: 2357234 - RNA, 19 nt, Homo sapiens
  misc_RNA (1)...(19): siRNA sense strand
cagagaucaaugaggaaca

SEQ ID NO: 2357235 - RNA, 19 nt, Homo sapiens
  misc_RNA (1)...(19): siRNA sense strand
uagacaaauuucagacuca

SEQ ID NO: 2357236 - RNA, 19 nt, Homo sapiens
  misc_RNA (1)...(19): siRNA sense strand
aaacagaguguaauggaga

SEQ ID NO: 2357237 - RNA, 19 nt, Homo sapiens
  misc_RNA (1)...(19): siRNA sense strand
ccaccucagaauacagaaa

SEQ ID NO: 2357238 - RNA, 19 nt, Homo sapiens
  misc_RNA (1)...(19): siRNA sense strand
auacagaaagccacagaau

SEQ ID NO: 2357239 - RNA, 19 nt, Homo sapiens
  misc_RNA (1)...(19): siRNA sense strand
caagaagugcuaaaggaga

SEQ ID NO: 2357240 - RNA, 19 nt, Homo sapiens
  misc_RNA (1)...(19): siRNA sense strand
agagaguagagcuggauuu

SEQ ID NO: 2357241 - RNA, 19 nt, Homo sapiens
  misc_RNA (1)...(19): siRNA sense strand
gauauggaucagaugaaau

SEQ ID NO: 2357242 - RNA, 19 nt, Homo sapiens
  misc_RNA (1)...(19): siRNA sense strand
guucuggaagagaggaaau

SEQ ID NO: 2357243 - RNA, 19 nt, Homo sapiens
  misc_RNA (1)...(19): siRNA sense strand
aguccuugcagcagagaau

SEQ ID NO: 2357244 - RNA, 19 nt, Homo sapiens
  misc_RNA (1)...(19): siRNA sense strand
ugagcaagacagugggcau

SEQ ID NO: 2357245 - RNA, 19 nt, Homo sapiens
  misc_RNA (1)...(19): siRNA sense strand
uuuggaaacuauuguggaa

SEQ ID NO: 2357246 - RNA, 19 nt, Homo sapiens
  misc_RNA (1)...(19): siRNA sense strand
aggaacagagcaaaguuua

SEQ ID NO: 2357247 - RNA, 19 nt, Homo sapiens
  misc_RNA (1)...(19): siRNA sense strand
cuacaucauuggagauacu

SEQ ID NO: 2357248 - RNA, 19 nt, Homo sapiens
  misc_RNA (1)...(19): siRNA sense strand
guguaaguugggugguaau

SEQ ID NO: 2357249 - RNA, 19 nt, Homo sapiens
  misc_RNA (1)...(19): siRNA sense strand
guguggaacaaguaaaaua

SEQ ID NO: 2357250 - RNA, 19 nt, Homo sapiens
  misc_RNA (1)...(19): siRNA sense strand
guccaagauaugagcaaga

SEQ ID NO: 2357251 - RNA, 19 nt, Homo sapiens
  misc_RNA (1)...(19): siRNA sense strand
gcaaggagcuguuuaccca

SEQ ID NO: 2357252 - RNA, 19 nt, Homo sapiens
  misc_RNA (1)...(19): siRNA sense strand
uggauaaaauugaccgaau

SEQ ID NO: 2357253 - RNA, 19 nt, Homo sapiens
  misc_RNA (1)...(19): siRNA sense strand
aaugaaagaaacagagugu

SEQ ID NO: 2357254 - RNA, 19 nt, Homo sapiens
  misc_RNA (1)...(19): siRNA sense strand
guucuugaauaucggaaaa

SEQ ID NO: 2357255 - RNA, 19 nt, Homo sapiens
  misc_RNA (1)...(19): siRNA sense strand
cggaaaaucaauagagaug

SEQ ID NO: 2357256 - RNA, 19 nt, Homo sapiens
  misc_RNA (1)...(19): siRNA sense strand
agaagaagcaauuacacau

SEQ ID NO: 2357257 - RNA, 19 nt, Homo sapiens
  misc_RNA (1)...(19): siRNA sense strand
cagaauacagaaagccaca

SEQ ID NO: 2357258 - RNA, 19 nt, Homo sapiens
  misc_RNA (1)...(19): siRNA sense strand
uagacgugccagagaucaa

SEQ ID NO: 2357259 - RNA, 19 nt, Homo sapiens
  misc_RNA (1)...(19): siRNA sense strand
gccagagaucaaugaggaa

SEQ ID NO: 2357260 - RNA, 19 nt, Homo sapiens
  misc_RNA (1)...(19): siRNA sense strand
cagaaaaggauaaagcuga

SEQ ID NO: 2357261 - RNA, 19 nt, Homo sapiens
  misc_RNA (1)...(19): siRNA sense strand
auuaaugggcaguggagga

SEQ ID NO: 2357262 - RNA, 19 nt, Homo sapiens
  misc_RNA (1)...(19): siRNA sense strand
acuacuaacuucagaccca

SEQ ID NO: 2357263 - RNA, 19 nt, Homo sapiens
  misc_RNA (1)...(19): siRNA sense strand
guguggaaccauauucaua

SEQ ID NO: 2357264 - RNA, 19 nt, Homo sapiens
  misc_RNA (1)...(19): siRNA sense strand
ccaggugaagagucaaaua

SEQ ID NO: 2357265 - RNA, 19 nt, Homo sapiens
  misc_RNA (1)...(19): siRNA sense strand
aagaagaagcaauuacaca

SEQ ID NO: 2357266 - RNA, 19 nt, Homo sapiens
  misc_RNA (1)...(19): siRNA sense strand
cauggaauugauagcuaaa

SEQ ID NO: 2357267 - RNA, 19 nt, Homo sapiens
  misc_RNA (1)...(19): siRNA sense strand
caagguuaccauuaagaau

SEQ ID NO: 2357268 - RNA, 19 nt, Homo sapiens
  misc_RNA (1)...(19): siRNA sense strand
ugcugaacuugaagagaga

SEQ ID NO: 2357269 - RNA, 19 nt, Homo sapiens
  misc_RNA (1)...(19): siRNA sense strand
acacaagcuuagacuacau

SEQ ID NO: 2357270 - RNA, 19 nt, Homo sapiens
  misc_RNA (1)...(19): siRNA sense strand
uuuccuugacugugauaaa

SEQ ID NO: 2357271 - RNA, 19 nt, Homo sapiens
  misc_RNA (1)...(19): siRNA sense strand
guuaaaucuacaagcaaga

SEQ ID NO: 2357272 - RNA, 19 nt, Homo sapiens
  misc_RNA (1)...(19): siRNA sense strand
guguuaaaucuacaagcaa

SEQ ID NO: 2357273 - RNA, 19 nt, Homo sapiens
  misc_RNA (1)...(19): siRNA sense strand
cagauuauggggagagaga

SEQ ID NO: 2357274 - RNA, 19 nt, Homo sapiens
  misc_RNA (1)...(19): siRNA sense strand
cgcagacgaaagaagaaua

SEQ ID NO: 2357275 - RNA, 19 nt, Homo sapiens
  misc_RNA (1)...(19): siRNA sense strand
gcgcagacgaaagaagaau

SEQ ID NO: 2357276 - RNA, 19 nt, Homo sapiens
  misc_RNA (1)...(19): siRNA sense strand
uccuauuggagguguuaaa

SEQ ID NO: 2357277 - RNA, 19 nt, Homo sapiens
  misc_RNA (1)...(19): siRNA sense strand
guuaaaucuacaagcaaga

SEQ ID NO: 2357278 - RNA, 19 nt, Homo sapiens
  misc_RNA (1)...(19): siRNA sense strand
guguuaaaucuacaagcaa

SEQ ID NO: 2357279 - RNA, 19 nt, Homo sapiens
  misc_RNA (1)...(19): siRNA sense strand
cagauuauggggagagaga

SEQ ID NO: 2357280 - RNA, 19 nt, Homo sapiens
  misc_RNA (1)...(19): siRNA sense strand
cgcagacgaaagaagaaua

SEQ ID NO: 2357281 - RNA, 19 nt, Homo sapiens
  misc_RNA (1)...(19): siRNA sense strand
gcgcagacgaaagaagaau

SEQ ID NO: 2357282 - RNA, 19 nt, Homo sapiens
  misc_RNA (1)...(19): siRNA sense strand
uccuauuggagguguuaaa

SEQ ID NO: 2357283 - RNA, 19 nt, Homo sapiens
  misc_RNA (1)...(19): siRNA sense strand
guuaaaucuacaagcaaga

SEQ ID NO: 2357284 - RNA, 19 nt, Homo sapiens
  misc_RNA (1)...(19): siRNA sense strand
guguuaaaucuacaagcaa

SEQ ID NO: 2357285 - RNA, 19 nt, Homo sapiens
  misc_RNA (1)...(19): siRNA sense strand
cagauuauggggagagaga

SEQ ID NO: 2357286 - RNA, 19 nt, Homo sapiens
  misc_RNA (1)...(19): siRNA sense strand
cgcagacgaaagaagaaua

SEQ ID NO: 2357287 - RNA, 19 nt, Homo sapiens
  misc_RNA (1)...(19): siRNA sense strand
gcgcagacgaaagaagaau

SEQ ID NO: 2357288 - RNA, 19 nt, Homo sapiens
  misc_RNA (1)...(19): siRNA sense strand
uccuauuggagguguuaaa

SEQ ID NO: 2357289 - RNA, 19 nt, Homo sapiens
  misc_RNA (1)...(19): siRNA sense strand
cagcaagagaugagcaaau

SEQ ID NO: 2357290 - RNA, 19 nt, Homo sapiens
  misc_RNA (1)...(19): siRNA sense strand
cggcaggauuauugaacau

SEQ ID NO: 2357291 - RNA, 19 nt, Homo sapiens
  misc_RNA (1)...(19): siRNA sense strand
agaagaugauggacggaau

SEQ ID NO: 2357292 - RNA, 19 nt, Homo sapiens
  misc_RNA (1)...(19): siRNA sense strand
ccguaaaaugcgaggcuua

SEQ ID NO: 2357293 - RNA, 19 nt, Homo sapiens
  misc_RNA (1)...(19): siRNA sense strand
aagugaauuuccagagaau

SEQ ID NO: 2357294 - RNA, 19 nt, Homo sapiens
  misc_RNA (1)...(19): siRNA sense strand
ggugaaacaaagagaaucu

SEQ ID NO: 2357295 - RNA, 19 nt, Homo sapiens
  misc_RNA (1)...(19): siRNA sense strand
ggagacagaugguccggaa

SEQ ID NO: 2357296 - RNA, 19 nt, Homo sapiens
  misc_RNA (1)...(19): siRNA sense strand
gcuuacagguccaugguga

SEQ ID NO: 2357297 - RNA, 19 nt, Homo sapiens
  misc_RNA (1)...(19): siRNA sense strand
uuucagaauuggugggagu

SEQ ID NO: 2357298 - RNA, 19 nt, Homo sapiens
  misc_RNA (1)...(19): siRNA sense strand
ggacaagcccugcuggaga

SEQ ID NO: 2357299 - RNA, 19 nt, Homo sapiens
  misc_RNA (1)...(19): siRNA sense strand
gagaaagacugguuugcca

SEQ ID NO: 2357300 - RNA, 19 nt, Homo sapiens
  misc_RNA (1)...(19): siRNA sense strand
gaagcgauauggaggcgaa

SEQ ID NO: 2357301 - RNA, 19 nt, Homo sapiens
  misc_RNA (1)...(19): siRNA sense strand
cuguagaggugccaagaga

SEQ ID NO: 2357302 - RNA, 19 nt, Homo sapiens
  misc_RNA (1)...(19): siRNA sense strand
agagaugagcaaauacaaa

SEQ ID NO: 2357303 - RNA, 19 nt, Homo sapiens
  misc_RNA (1)...(19): siRNA sense strand
caucauccgaguagaggaa

SEQ ID NO: 2357304 - RNA, 19 nt, Homo sapiens
  misc_RNA (1)...(19): siRNA sense strand
cugcaaaaggagacguuua

SEQ ID NO: 2357305 - RNA, 19 nt, Homo sapiens
  misc_RNA (1)...(19): siRNA sense strand
augcgaggcuuaagugaau

SEQ ID NO: 2357306 - RNA, 19 nt, Homo sapiens
  misc_RNA (1)...(19): siRNA sense strand
aggaggugucugaaauaaa

SEQ ID NO: 2357307 - RNA, 19 nt, Homo sapiens
  misc_RNA (1)...(19): siRNA sense strand
cuggugaaacaaagagaau

SEQ ID NO: 2357308 - RNA, 19 nt, Homo sapiens
  misc_RNA (1)...(19): siRNA sense strand
ccagaauggagaagaugau

SEQ ID NO: 2357309 - RNA, 19 nt, Homo sapiens
  misc_RNA (1)...(19): siRNA sense strand
agauguuggucguggaacu

SEQ ID NO: 2357310 - RNA, 19 nt, Homo sapiens
  misc_RNA (1)...(19): siRNA sense strand
uuucuguggucaagggauu

SEQ ID NO: 2357311 - RNA, 19 nt, Homo sapiens
  misc_RNA (1)...(19): siRNA sense strand
uuaccacagaagagcgaaa

SEQ ID NO: 2357312 - RNA, 19 nt, Homo sapiens
  misc_RNA (1)...(19): siRNA sense strand
gagacagcccagaggaagu

SEQ ID NO: 2357313 - RNA, 19 nt, Homo sapiens
  misc_RNA (1)...(19): siRNA sense strand
gcgaaaacaucugucgaaa

SEQ ID NO: 2357314 - RNA, 19 nt, Homo sapiens
  misc_RNA (1)...(19): siRNA sense strand
cugcagugauauugggaag

SEQ ID NO: 2357315 - RNA, 19 nt, Homo sapiens
  misc_RNA (1)...(19): siRNA sense strand
uggagacagcccagaggaa

SEQ ID NO: 2357316 - RNA, 19 nt, Homo sapiens
  misc_RNA (1)...(19): siRNA sense strand
caggaggaggugucugaaa

SEQ ID NO: 2357317 - RNA, 19 nt, Homo sapiens
  misc_RNA (1)...(19): siRNA sense strand
acggagacacugugaacau

SEQ ID NO: 2357318 - RNA, 19 nt, Homo sapiens
  misc_RNA (1)...(19): siRNA sense strand
gauuauugaacauggggaa

SEQ ID NO: 2357319 - RNA, 19 nt, Homo sapiens
  misc_RNA (1)...(19): siRNA sense strand
gcgaaggggcugaaagcau

SEQ ID NO: 2357320 - RNA, 19 nt, Homo sapiens
  misc_RNA (1)...(19): siRNA sense strand
uugaggaaguguuagucua

SEQ ID NO: 2357321 - RNA, 19 nt, Homo sapiens
  misc_RNA (1)...(19): siRNA sense strand
agagccaggaugagaaaga

SEQ ID NO: 2357322 - RNA, 19 nt, Homo sapiens
  misc_RNA (1)...(19): siRNA sense strand
gggccaagaagcaugacuu

SEQ ID NO: 2357323 - RNA, 19 nt, Homo sapiens
  misc_RNA (1)...(19): siRNA sense strand
ccaagcgguuugaggaacu

SEQ ID NO: 2357324 - RNA, 19 nt, Homo sapiens
  misc_RNA (1)...(19): siRNA sense strand
guuggauucuuuacagcaa

SEQ ID NO: 2357325 - RNA, 19 nt, Homo sapiens
  misc_RNA (1)...(19): siRNA sense strand
ccucccaacuucagagcca

SEQ ID NO: 2357326 - RNA, 19 nt, Homo sapiens
  misc_RNA (1)...(19): siRNA sense strand
gcugaaagcaugaugggcu

SEQ ID NO: 2357327 - RNA, 19 nt, Homo sapiens
  misc_RNA (1)...(19): siRNA sense strand
ccuacuaugccaaguugaa

SEQ ID NO: 2357328 - RNA, 19 nt, Homo sapiens
  misc_RNA (1)...(19): siRNA sense strand
ggagaaugugccugaaauc

SEQ ID NO: 2357329 - RNA, 19 nt, Homo sapiens
  misc_RNA (1)...(19): siRNA sense strand
agaaagacugguuugccaa

SEQ ID NO: 2357330 - RNA, 19 nt, Homo sapiens
  misc_RNA (1)...(19): siRNA sense strand
gcgauuacucuccagacaa

SEQ ID NO: 2357331 - RNA, 19 nt, Homo sapiens
  misc_RNA (1)...(19): siRNA sense strand
acacauaugcagagcaccu

SEQ ID NO: 2357332 - RNA, 19 nt, Homo sapiens
  misc_RNA (1)...(19): siRNA sense strand
augccaaguugaaugauca

SEQ ID NO: 2357333 - RNA, 19 nt, Homo sapiens
  misc_RNA (1)...(19): siRNA sense strand
cguggaacuuucagucaga

SEQ ID NO: 2357334 - RNA, 19 nt, Homo sapiens
  misc_RNA (1)...(19): siRNA sense strand
cuuccacacggcaggauua

SEQ ID NO: 2357335 - RNA, 19 nt, Homo sapiens
  misc_RNA (1)...(19): siRNA sense strand
ccucauugcuggcggacuc

SEQ ID NO: 2357336 - RNA, 19 nt, Homo sapiens
  misc_RNA (1)...(19): siRNA sense strand
ucuaaguggccaagauguu

SEQ ID NO: 2357337 - RNA, 19 nt, Homo sapiens
  misc_RNA (1)...(19): siRNA sense strand
gcacaguucacuugcacca

SEQ ID NO: 2357338 - RNA, 19 nt, Homo sapiens
  misc_RNA (1)...(19): siRNA sense strand
augaagauauccucgccaa

SEQ ID NO: 2357339 - RNA, 19 nt, Homo sapiens
  misc_RNA (1)...(19): siRNA sense strand
cuggagaaugugccugaaa

SEQ ID NO: 2357340 - RNA, 19 nt, Homo sapiens
  misc_RNA (1)...(19): siRNA sense strand
gaugugugacagugcggaa

SEQ ID NO: 2357341 - RNA, 19 nt, Homo sapiens
  misc_RNA (1)...(19): siRNA sense strand
aagaagaaggacugggaga

SEQ ID NO: 2357342 - RNA, 19 nt, Homo sapiens
  misc_RNA (1)...(19): siRNA sense strand
gaagaugacuggacaggga

SEQ ID NO: 2357343 - RNA, 19 nt, Homo sapiens
  misc_RNA (1)...(19): siRNA sense strand
gagcacaagaagagccaga

SEQ ID NO: 2357344 - RNA, 19 nt, Homo sapiens
  misc_RNA (1)...(19): siRNA sense strand
agggauggagagugaggaa

SEQ ID NO: 2357345 - RNA, 19 nt, Homo sapiens
  misc_RNA (1)...(19): siRNA sense strand
aaggaaggcaugaaggaga

SEQ ID NO: 2357346 - RNA, 19 nt, Homo sapiens
  misc_RNA (1)...(19): siRNA sense strand
aagaagagccagaaggaag

SEQ ID NO: 2357347 - RNA, 19 nt, Homo sapiens
  misc_RNA (1)...(19): siRNA sense strand
agagugaggaagaaaauaa

SEQ ID NO: 2357348 - RNA, 19 nt, Homo sapiens
  misc_RNA (1)...(19): siRNA sense strand
gcgaaacucaacagcaaaa

SEQ ID NO: 2357349 - RNA, 19 nt, Homo sapiens
  misc_RNA (1)...(19): siRNA sense strand
ggagagugaggaagaaaau

SEQ ID NO: 2357350 - RNA, 19 nt, Homo sapiens
  misc_RNA (1)...(19): siRNA sense strand
aggaauggauuguggucgu

SEQ ID NO: 2357351 - RNA, 19 nt, Homo sapiens
  misc_RNA (1)...(19): siRNA sense strand
guuccuuggagcagaguga

SEQ ID NO: 2357352 - RNA, 19 nt, Homo sapiens
  misc_RNA (1)...(19): siRNA sense strand
ccaggaggcaacaggcgaa

SEQ ID NO: 2357353 - RNA, 19 nt, Homo sapiens
  misc_RNA (1)...(19): siRNA sense strand
agauuauggagcacaagaa

SEQ ID NO: 2357354 - RNA, 19 nt, Homo sapiens
  misc_RNA (1)...(19): siRNA sense strand
gguuacuggaacugcagaa

SEQ ID NO: 2357355 - RNA, 19 nt, Homo sapiens
  misc_RNA (1)...(19): siRNA sense strand
cugucaagaaguuaccaaa

SEQ ID NO: 2357356 - RNA, 19 nt, Homo sapiens
  misc_RNA (1)...(19): siRNA sense strand
agcagauuauggagcacaa

SEQ ID NO: 2357357 - RNA, 19 nt, Homo sapiens
  misc_RNA (1)...(19): siRNA sense strand
augaugaagaaauggacau

SEQ ID NO: 2357358 - RNA, 19 nt, Homo sapiens
  misc_RNA (1)...(19): siRNA sense strand
ucgugugcccuguuggaaa

SEQ ID NO: 2357359 - RNA, 19 nt, Homo sapiens
  misc_RNA (1)...(19): siRNA sense strand
ggaugauguuaaugagcaa

SEQ ID NO: 2357360 - RNA, 19 nt, Homo sapiens
  misc_RNA (1)...(19): siRNA sense strand
aggaaagacacaaugcuaa

SEQ ID NO: 2357361 - RNA, 19 nt, Homo sapiens
  misc_RNA (1)...(19): siRNA sense strand
auaaauuaaccguggaaca

SEQ ID NO: 2357362 - RNA, 19 nt, Homo sapiens
  misc_RNA (1)...(19): siRNA sense strand
caggaugaagagagaguuu

SEQ ID NO: 2357363 - RNA, 19 nt, Homo sapiens
  misc_RNA (1)...(19): siRNA sense strand
gugcauucaaagagugcua

SEQ ID NO: 2357364 - RNA, 19 nt, Homo sapiens
  misc_RNA (1)...(19): siRNA sense strand
agugcuaccuggaggguga

SEQ ID NO: 2357365 - RNA, 19 nt, Homo sapiens
  misc_RNA (1)...(19): siRNA sense strand
gagcaaaaccccacggaca

SEQ ID NO: 2357366 - RNA, 19 nt, Homo sapiens
  misc_RNA (1)...(19): siRNA sense strand
gcgcaggaagcaaggcaau

SEQ ID NO: 2357367 - RNA, 19 nt, Homo sapiens
  misc_RNA (1)...(19): siRNA sense strand
caauaguuugggaugaaua

SEQ ID NO: 2357368 - RNA, 19 nt, Homo sapiens
  misc_RNA (1)...(19): siRNA sense strand
cagcauucgaggaaagaca

SEQ ID NO: 2357369 - RNA, 19 nt, Homo sapiens
  misc_RNA (1)...(19): siRNA sense strand
aggaacaugaaguggaaaa

SEQ ID NO: 2357370 - RNA, 19 nt, Homo sapiens
  misc_RNA (1)...(19): siRNA sense strand
aggcaauaguuugggauga

SEQ ID NO: 2357371 - RNA, 19 nt, Homo sapiens
  misc_RNA (1)...(19): siRNA sense strand
cggcagcugaugugaagaa

SEQ ID NO: 2357372 - RNA, 19 nt, Homo sapiens
  misc_RNA (1)...(19): siRNA sense strand
gguugaaggaucugggugu

SEQ ID NO: 2357373 - RNA, 19 nt, Homo sapiens
  misc_RNA (1)...(19): siRNA sense strand
gaacagcgguugaaggauc

SEQ ID NO: 2357374 - RNA, 19 nt, Homo sapiens
  misc_RNA (1)...(19): siRNA sense strand
gaagaaacgucaaccggga

SEQ ID NO: 2357375 - RNA, 19 nt, Homo sapiens
  misc_RNA (1)...(19): siRNA sense strand
uguucacacuuaaaggaaa

SEQ ID NO: 2357376 - RNA, 19 nt, Homo sapiens
  misc_RNA (1)...(19): siRNA sense strand
cggaauguggauuuauuaa

SEQ ID NO: 2357377 - RNA, 19 nt, Homo sapiens
  misc_RNA (1)...(19): siRNA sense strand
ccguggaacaggaguuuau

SEQ ID NO: 2357378 - RNA, 19 nt, Homo sapiens
  misc_RNA (1)...(19): siRNA sense strand
ugaucaagguguuaagacu

SEQ ID NO: 2357379 - RNA, 19 nt, Homo sapiens
  misc_RNA (1)...(19): siRNA sense strand
ggauauaaucgcugaaaac

SEQ ID NO: 2357380 - RNA, 19 nt, Homo sapiens
  misc_RNA (1)...(19): siRNA sense strand
acauauugaccuuacacaa

SEQ ID NO: 2357381 - RNA, 19 nt, Homo sapiens
  misc_RNA (1)...(19): siRNA sense strand
guauguguacaguggguau

SEQ ID NO: 2357382 - RNA, 19 nt, Homo sapiens
  misc_RNA (1)...(19): siRNA sense strand
aggagaaugcgcucggcaa

SEQ ID NO: 2357383 - RNA, 19 nt, Homo sapiens
  misc_RNA (1)...(19): siRNA sense strand
ugauaaauuaaccguggaa

SEQ ID NO: 2357384 - RNA, 19 nt, Homo sapiens
  misc_RNA (1)...(19): siRNA sense strand
cuccaauccguguguaaua

SEQ ID NO: 2357385 - RNA, 19 nt, Homo sapiens
  misc_RNA (1)...(19): siRNA sense strand
ccuuacacaaccuggagaa

SEQ ID NO: 2357386 - RNA, 19 nt, Homo sapiens
  misc_RNA (1)...(19): siRNA sense strand
gcguaaccuucgcugaaau

SEQ ID NO: 2357387 - RNA, 19 nt, Homo sapiens
  misc_RNA (1)...(19): siRNA sense strand
acaggaagccagaauucaa

SEQ ID NO: 2357388 - RNA, 19 nt, Homo sapiens
  misc_RNA (1)...(19): siRNA sense strand
gggagaaaaccgagugacu

SEQ ID NO: 2357389 - RNA, 19 nt, Homo sapiens
  misc_RNA (1)...(19): siRNA sense strand
gauaagaacuucaacgcag

SEQ ID NO: 2357390 - RNA, 19 nt, Homo sapiens
  misc_RNA (1)...(19): siRNA sense strand
guguaauagugggcucaaa

SEQ ID NO: 2357391 - RNA, 19 nt, Homo sapiens
  misc_RNA (1)...(19): siRNA sense strand
guuuacaggaagccagaau

SEQ ID NO: 2357392 - RNA, 19 nt, Homo sapiens
  misc_RNA (1)...(19): siRNA sense strand
cuggaauagacacugauaa

SEQ ID NO: 2357393 - RNA, 19 nt, Homo sapiens
  misc_RNA (1)...(19): siRNA sense strand
uggaauagacacugauaag

SEQ ID NO: 2357394 - RNA, 19 nt, Homo sapiens
  misc_RNA (1)...(19): siRNA sense strand
cugcaagcucuguauggaa

SEQ ID NO: 2357395 - RNA, 19 nt, Homo sapiens
  misc_RNA (1)...(19): siRNA sense strand
cugcagcauucgaggaaag

SEQ ID NO: 2357396 - RNA, 19 nt, Homo sapiens
  misc_RNA (1)...(19): siRNA sense strand
accuaaacguguugcgcga

SEQ ID NO: 2357397 - RNA, 19 nt, Homo sapiens
  misc_RNA (1)...(19): siRNA sense strand
acacugauaaggucaacaa

SEQ ID NO: 2357398 - RNA, 19 nt, Homo sapiens
  misc_RNA (1)...(19): siRNA sense strand
ugaagauagacgaggccca

SEQ ID NO: 2357399 - RNA, 19 nt, Homo sapiens
  misc_RNA (1)...(19): siRNA sense strand
acugauaaggucaacaauu

SEQ ID NO: 2357400 - RNA, 19 nt, Homo sapiens
  misc_RNA (1)...(19): siRNA sense strand
gggcagaaacaauuaccca

SEQ ID NO: 2357401 - RNA, 19 nt, Homo sapiens
  misc_RNA (1)...(19): siRNA sense strand
uggauauaaucgcugaaaa

SEQ ID NO: 2357402 - RNA, 19 nt, Homo sapiens
  misc_RNA (1)...(19): siRNA sense strand
ggaugaagagagaguuuac

SEQ ID NO: 2357403 - RNA, 19 nt, Homo sapiens
  misc_RNA (1)...(19): siRNA sense strand
ccacggaagcaaagaagcu

SEQ ID NO: 2357404 - RNA, 19 nt, Homo sapiens
  misc_RNA (1)...(19): siRNA sense strand
ggaagaguguagaagcaga

SEQ ID NO: 2357405 - RNA, 19 nt, Homo sapiens
  misc_RNA (1)...(19): siRNA sense strand
acacaaaguugaaggcuac

SEQ ID NO: 2357406 - RNA, 19 nt, Homo sapiens
  misc_RNA (1)...(19): siRNA sense strand
gaagaggacuggaagacga

SEQ ID NO: 2357407 - RNA, 19 nt, Homo sapiens
  misc_RNA (1)...(19): siRNA sense strand
guguagaagcagaacccaa

SEQ ID NO: 2357408 - RNA, 19 nt, Homo sapiens
  misc_RNA (1)...(19): siRNA sense strand
gggacaaauguguguugaa

SEQ ID NO: 2357409 - RNA, 19 nt, Homo sapiens
  misc_RNA (1)...(19): siRNA sense strand
gagaagaagaacagcaaac

SEQ ID NO: 2357410 - RNA, 19 nt, Homo sapiens
  misc_RNA (1)...(19): siRNA sense strand
uacacaaaguugaaggcua

SEQ ID NO: 2357411 - RNA, 19 nt, Homo sapiens
  misc_RNA (1)...(19): siRNA sense strand
acagaagagaagaagaaca

SEQ ID NO: 2357412 - RNA, 19 nt, Homo sapiens
  misc_RNA (1)...(19): siRNA sense strand
aagagaagaagaacagcaa

SEQ ID NO: 2357413 - RNA, 19 nt, Homo sapiens
  misc_RNA (1)...(19): siRNA sense strand
aucaagaaacacagaacaa

SEQ ID NO: 2357414 - RNA, 19 nt, Homo sapiens
  misc_RNA (1)...(19): siRNA sense strand
ggggaagaguguagaagca

SEQ ID NO: 2357415 - RNA, 19 nt, Homo sapiens
  misc_RNA (1)...(19): siRNA sense strand
uugaacacaaugaggcaua

SEQ ID NO: 2357416 - RNA, 19 nt, Homo sapiens
  misc_RNA (1)...(19): siRNA sense strand
gguccaagucagaagagga

SEQ ID NO: 2357417 - RNA, 19 nt, Homo sapiens
  misc_RNA (1)...(19): siRNA sense strand
aggcauauacauggacaaa

SEQ ID NO: 2357418 - RNA, 19 nt, Homo sapiens
  misc_RNA (1)...(19): siRNA sense strand
agacaaagacauggagagu

SEQ ID NO: 2357419 - RNA, 19 nt, Homo sapiens
  misc_RNA (1)...(19): siRNA sense strand
aaauggagagauagaucaa

SEQ ID NO: 2357420 - RNA, 19 nt, Homo sapiens
  misc_RNA (1)...(19): siRNA sense strand
cuccaauggcaucaagaaa

SEQ ID NO: 2357421 - RNA, 19 nt, Homo sapiens
  misc_RNA (1)...(19): siRNA sense strand
gaagagaagaagaacagca

SEQ ID NO: 2357422 - RNA, 19 nt, Homo sapiens
  misc_RNA (1)...(19): siRNA sense strand
uggaaaauggagagauaga

SEQ ID NO: 2357423 - RNA, 19 nt, Homo sapiens
  misc_RNA (1)...(19): siRNA sense strand
uugcaaugguuuugaauga

SEQ ID NO: 2357424 - RNA, 19 nt, Homo sapiens
  misc_RNA (1)...(19): siRNA sense strand
acaucagagccauggaaaa

SEQ ID NO: 2357425 - RNA, 19 nt, Homo sapiens
  misc_RNA (1)...(19): siRNA sense strand
gaggcauauacauggacaa

SEQ ID NO: 2357426 - RNA, 19 nt, Homo sapiens
  misc_RNA (1)...(19): siRNA sense strand
ccaccugcugugugcauaa

SEQ ID NO: 2357427 - RNA, 19 nt, Homo sapiens
  misc_RNA (1)...(19): siRNA sense strand
aggaauuacacaaaguuga

SEQ ID NO: 2357428 - RNA, 19 nt, Homo sapiens
  misc_RNA (1)...(19): siRNA sense strand
agacugugguggcggagau

SEQ ID NO: 2357429 - RNA, 19 nt, Homo sapiens
  misc_RNA (1)...(19): siRNA sense strand
ucagaagaggacuggaaga

SEQ ID NO: 2357430 - RNA, 19 nt, Homo sapiens
  misc_RNA (1)...(19): siRNA sense strand
aagcagaacccaaaggaac

SEQ ID NO: 2357431 - RNA, 19 nt, Homo sapiens
  misc_RNA (1)...(19): siRNA sense strand
caucagagccauggaaaau

SEQ ID NO: 2357432 - RNA, 19 nt, Homo sapiens
  misc_RNA (1)...(19): siRNA sense strand
gguaaacuguggaucgaac

SEQ ID NO: 2357433 - RNA, 19 nt, Homo sapiens
  misc_RNA (1)...(19): siRNA sense strand
caucaagaaacacagaaca

SEQ ID NO: 2357434 - RNA, 19 nt, Homo sapiens
  misc_RNA (1)...(19): siRNA sense strand
ggaagaguguagaagcaga

SEQ ID NO: 2357435 - RNA, 19 nt, Homo sapiens
  misc_RNA (1)...(19): siRNA sense strand
acacaaaguugaaggcuac

SEQ ID NO: 2357436 - RNA, 19 nt, Homo sapiens
  misc_RNA (1)...(19): siRNA sense strand
gaagaggacuggaagacga

SEQ ID NO: 2357437 - RNA, 19 nt, Homo sapiens
  misc_RNA (1)...(19): siRNA sense strand
guguagaagcagaacccaa

SEQ ID NO: 2357438 - RNA, 19 nt, Homo sapiens
  misc_RNA (1)...(19): siRNA sense strand
gggacaaauguguguugaa

SEQ ID NO: 2357439 - RNA, 19 nt, Homo sapiens
  misc_RNA (1)...(19): siRNA sense strand
gagaagaagaacagcaaac

SEQ ID NO: 2357440 - RNA, 19 nt, Homo sapiens
  misc_RNA (1)...(19): siRNA sense strand
ugaagaggaaggagagcau

SEQ ID NO: 2357441 - RNA, 19 nt, Homo sapiens
  misc_RNA (1)...(19): siRNA sense strand
uacacaaaguugaaggcua

SEQ ID NO: 2357442 - RNA, 19 nt, Homo sapiens
  misc_RNA (1)...(19): siRNA sense strand
acagaagagaagaagaaca

SEQ ID NO: 2357443 - RNA, 19 nt, Homo sapiens
  misc_RNA (1)...(19): siRNA sense strand
aagagaagaagaacagcaa

SEQ ID NO: 2357444 - RNA, 19 nt, Homo sapiens
  misc_RNA (1)...(19): siRNA sense strand
acagaauguccgaagaaaa

SEQ ID NO: 2357445 - RNA, 19 nt, Homo sapiens
  misc_RNA (1)...(19): siRNA sense strand
gcauuugggcaguagaaaa

SEQ ID NO: 2357446 - RNA, 19 nt, Homo sapiens
  misc_RNA (1)...(19): siRNA sense strand
aucaagaaacacagaacaa

SEQ ID NO: 2357447 - RNA, 19 nt, Homo sapiens
  misc_RNA (1)...(19): siRNA sense strand
ggggaagaguguagaagca

SEQ ID NO: 2357448 - RNA, 19 nt, Homo sapiens
  misc_RNA (1)...(19): siRNA sense strand
uugaacacaaugaggcaua

SEQ ID NO: 2357449 - RNA, 19 nt, Homo sapiens
  misc_RNA (1)...(19): siRNA sense strand
gguccaagucagaagagga

SEQ ID NO: 2357450 - RNA, 19 nt, Homo sapiens
  misc_RNA (1)...(19): siRNA sense strand
aagaggaaggagagcauuu

SEQ ID NO: 2357451 - RNA, 19 nt, Homo sapiens
  misc_RNA (1)...(19): siRNA sense strand
aggcauauacauggacaaa

SEQ ID NO: 2357452 - RNA, 19 nt, Homo sapiens
  misc_RNA (1)...(19): siRNA sense strand
agacaaagacauggagagu

SEQ ID NO: 2357453 - RNA, 19 nt, Homo sapiens
  misc_RNA (1)...(19): siRNA sense strand
aaauggagagauagaucaa

SEQ ID NO: 2357454 - RNA, 19 nt, Homo sapiens
  misc_RNA (1)...(19): siRNA sense strand
cuccaauggcaucaagaaa

SEQ ID NO: 2357455 - RNA, 19 nt, Homo sapiens
  misc_RNA (1)...(19): siRNA sense strand
aauuggaacaagagcaaga

SEQ ID NO: 2357456 - RNA, 19 nt, Homo sapiens
  misc_RNA (1)...(19): siRNA sense strand
gaagagaagaagaacagca

SEQ ID NO: 2357457 - RNA, 19 nt, Homo sapiens
  misc_RNA (1)...(19): siRNA sense strand
uggaaaauggagagauaga

SEQ ID NO: 2357458 - RNA, 19 nt, Homo sapiens
  misc_RNA (1)...(19): siRNA sense strand
ccgaaaggucccugaguag

SEQ ID NO: 2357459 - RNA, 19 nt, Homo sapiens
  misc_RNA (1)...(19): siRNA sense strand
uugcaaugguuuugaauga

SEQ ID NO: 2357460 - RNA, 19 nt, Homo sapiens
  misc_RNA (1)...(19): siRNA sense strand
acaucagagccauggaaaa

SEQ ID NO: 2357461 - RNA, 19 nt, Homo sapiens
  misc_RNA (1)...(19): siRNA sense strand
agacugugguggcggagau

SEQ ID NO: 2357462 - RNA, 19 nt, Homo sapiens
  misc_RNA (1)...(19): siRNA sense strand
gaggcauauacauggacaa

SEQ ID NO: 2357463 - RNA, 19 nt, Homo sapiens
  misc_RNA (1)...(19): siRNA sense strand
ccaccugcugugugcauaa

SEQ ID NO: 2357464 - RNA, 19 nt, Homo sapiens
  misc_RNA (1)...(19): siRNA sense strand
aggaauuacacaaaguuga

SEQ ID NO: 2357465 - RNA, 19 nt, Homo sapiens
  misc_RNA (1)...(19): siRNA sense strand
uggaacaagagcaagaaaa

SEQ ID NO: 2357466 - RNA, 19 nt, Homo sapiens
  misc_RNA (1)...(19): siRNA sense strand
ucagaagaggacuggaaga

SEQ ID NO: 2357467 - RNA, 19 nt, Homo sapiens
  misc_RNA (1)...(19): siRNA sense strand
aagcagaacccaaaggaac

SEQ ID NO: 2357468 - RNA, 19 nt, Homo sapiens
  misc_RNA (1)...(19): siRNA sense strand
caucagagccauggaaaau

SEQ ID NO: 2357469 - RNA, 19 nt, Homo sapiens
  misc_RNA (1)...(19): siRNA sense strand
caucaagaaacacagaaca

SEQ ID NO: 2357470 - RNA, 19 nt, Homo sapiens
  misc_RNA (1)...(19): siRNA sense strand
gguaaacuguggaucgaac

SEQ ID NO: 2357471 - RNA, 19 nt, Homo sapiens
  misc_RNA (1)...(19): siRNA sense strand
ggaagaguguagaagcaga

SEQ ID NO: 2357472 - RNA, 19 nt, Homo sapiens
  misc_RNA (1)...(19): siRNA sense strand
acacaaaguugaaggcuac

SEQ ID NO: 2357473 - RNA, 19 nt, Homo sapiens
  misc_RNA (1)...(19): siRNA sense strand
gaagaggacuggaagacga

SEQ ID NO: 2357474 - RNA, 19 nt, Homo sapiens
  misc_RNA (1)...(19): siRNA sense strand
guguagaagcagaacccaa

SEQ ID NO: 2357475 - RNA, 19 nt, Homo sapiens
  misc_RNA (1)...(19): siRNA sense strand
gggacaaauguguguugaa

SEQ ID NO: 2357476 - RNA, 19 nt, Homo sapiens
  misc_RNA (1)...(19): siRNA sense strand
gagaagaagaacagcaaac

SEQ ID NO: 2357477 - RNA, 19 nt, Homo sapiens
  misc_RNA (1)...(19): siRNA sense strand
ugaagaggaaggagagcau

SEQ ID NO: 2357478 - RNA, 19 nt, Homo sapiens
  misc_RNA (1)...(19): siRNA sense strand
uacacaaaguugaaggcua

SEQ ID NO: 2357479 - RNA, 19 nt, Homo sapiens
  misc_RNA (1)...(19): siRNA sense strand
acagaagagaagaagaaca

SEQ ID NO: 2357480 - RNA, 19 nt, Homo sapiens
  misc_RNA (1)...(19): siRNA sense strand
aagagaagaagaacagcaa

SEQ ID NO: 2357481 - RNA, 19 nt, Homo sapiens
  misc_RNA (1)...(19): siRNA sense strand
acagaauguccgaagaaaa

SEQ ID NO: 2357482 - RNA, 19 nt, Homo sapiens
  misc_RNA (1)...(19): siRNA sense strand
gcauuugggcaguagaaaa

SEQ ID NO: 2357483 - RNA, 19 nt, Homo sapiens
  misc_RNA (1)...(19): siRNA sense strand
aucaagaaacacagaacaa

SEQ ID NO: 2357484 - RNA, 19 nt, Homo sapiens
  misc_RNA (1)...(19): siRNA sense strand
ggggaagaguguagaagca

SEQ ID NO: 2357485 - RNA, 19 nt, Homo sapiens
  misc_RNA (1)...(19): siRNA sense strand
uugaacacaaugaggcaua

SEQ ID NO: 2357486 - RNA, 19 nt, Homo sapiens
  misc_RNA (1)...(19): siRNA sense strand
gguccaagucagaagagga

SEQ ID NO: 2357487 - RNA, 19 nt, Homo sapiens
  misc_RNA (1)...(19): siRNA sense strand
aagaggaaggagagcauuu

SEQ ID NO: 2357488 - RNA, 19 nt, Homo sapiens
  misc_RNA (1)...(19): siRNA sense strand
aggcauauacauggacaaa

SEQ ID NO: 2357489 - RNA, 19 nt, Homo sapiens
  misc_RNA (1)...(19): siRNA sense strand
agacaaagacauggagagu

SEQ ID NO: 2357490 - RNA, 19 nt, Homo sapiens
  misc_RNA (1)...(19): siRNA sense strand
aaauggagagauagaucaa

SEQ ID NO: 2357491 - RNA, 19 nt, Homo sapiens
  misc_RNA (1)...(19): siRNA sense strand
cuccaauggcaucaagaaa

SEQ ID NO: 2357492 - RNA, 19 nt, Homo sapiens
  misc_RNA (1)...(19): siRNA sense strand
aauuggaacaagagcaaga

SEQ ID NO: 2357493 - RNA, 19 nt, Homo sapiens
  misc_RNA (1)...(19): siRNA sense strand
gaagagaagaagaacagca

SEQ ID NO: 2357494 - RNA, 19 nt, Homo sapiens
  misc_RNA (1)...(19): siRNA sense strand
uggaaaauggagagauaga

SEQ ID NO: 2357495 - RNA, 19 nt, Homo sapiens
  misc_RNA (1)...(19): siRNA sense strand
ccgaaaggucccugaguag

SEQ ID NO: 2357496 - RNA, 19 nt, Homo sapiens
  misc_RNA (1)...(19): siRNA sense strand
uugcaaugguuuugaauga

SEQ ID NO: 2357497 - RNA, 19 nt, Homo sapiens
  misc_RNA (1)...(19): siRNA sense strand
acaucagagccauggaaaa

SEQ ID NO: 2357498 - RNA, 19 nt, Homo sapiens
  misc_RNA (1)...(19): siRNA sense strand
agacugugguggcggagau

SEQ ID NO: 2357499 - RNA, 19 nt, Homo sapiens
  misc_RNA (1)...(19): siRNA sense strand
gaggcauauacauggacaa

SEQ ID NO: 2357500 - RNA, 19 nt, Homo sapiens
  misc_RNA (1)...(19): siRNA sense strand
ccaccugcugugugcauaa

SEQ ID NO: 2357501 - RNA, 19 nt, Homo sapiens
  misc_RNA (1)...(19): siRNA sense strand
aggaauuacacaaaguuga

SEQ ID NO: 2357502 - RNA, 19 nt, Homo sapiens
  misc_RNA (1)...(19): siRNA sense strand
uggaacaagagcaagaaaa

SEQ ID NO: 2357503 - RNA, 19 nt, Homo sapiens
  misc_RNA (1)...(19): siRNA sense strand
ucagaagaggacuggaaga

SEQ ID NO: 2357504 - RNA, 19 nt, Homo sapiens
  misc_RNA (1)...(19): siRNA sense strand
aagcagaacccaaaggaac

SEQ ID NO: 2357505 - RNA, 19 nt, Homo sapiens
  misc_RNA (1)...(19): siRNA sense strand
caucagagccauggaaaau

SEQ ID NO: 2357506 - RNA, 19 nt, Homo sapiens
  misc_RNA (1)...(19): siRNA sense strand
caucaagaaacacagaaca

SEQ ID NO: 2357507 - RNA, 19 nt, Homo sapiens
  misc_RNA (1)...(19): siRNA sense strand
gguaaacuguggaucgaac

SEQ ID NO: 2357508 - RNA, 19 nt, Homo sapiens
  misc_RNA (1)...(19): siRNA sense strand
gcaaggaauaugagcgcuu

SEQ ID NO: 2357509 - RNA, 19 nt, Homo sapiens
  misc_RNA (1)...(19): siRNA sense strand
ggucaauauuagugagcug

SEQ ID NO: 2357510 - RNA, 19 nt, Homo sapiens
  misc_RNA (1)...(19): siRNA sense strand
cgacuguggcuuugagcau

SEQ ID NO: 2357511 - RNA, 19 nt, Homo sapiens
  misc_RNA (1)...(19): siRNA sense strand
gagaagaaccggaagcucu

SEQ ID NO: 2357512 - RNA, 19 nt, Homo sapiens
  misc_RNA (1)...(19): siRNA sense strand
aggaugaagaggugcugaa

SEQ ID NO: 2357513 - RNA, 19 nt, Homo sapiens
  misc_RNA (1)...(19): siRNA sense strand
uggagaucuucguggauga

SEQ ID NO: 2357514 - RNA, 19 nt, Homo sapiens
  misc_RNA (1)...(19): siRNA sense strand
cuaucaagaaggaugaaga

SEQ ID NO: 2357515 - RNA, 19 nt, Homo sapiens
  misc_RNA (1)...(19): siRNA sense strand
gagcagaacuucccagcca

SEQ ID NO: 2357516 - RNA, 19 nt, Homo sapiens
  misc_RNA (1)...(19): siRNA sense strand
ccgaugagaaugaugccaa

SEQ ID NO: 2357517 - RNA, 19 nt, Homo sapiens
  misc_RNA (1)...(19): siRNA sense strand
cugccaagaaggaugucaa

SEQ ID NO: 2357518 - RNA, 19 nt, Homo sapiens
  misc_RNA (1)...(19): siRNA sense strand
acaucgagcgggugaacau

SEQ ID NO: 2357519 - RNA, 19 nt, Homo sapiens
  misc_RNA (1)...(19): siRNA sense strand
gaauggauguccugugcca

SEQ ID NO: 2357520 - RNA, 19 nt, Homo sapiens
  misc_RNA (1)...(19): siRNA sense strand
uuucagaucagcaaggaau

SEQ ID NO: 2357521 - RNA, 19 nt, Homo sapiens
  misc_RNA (1)...(19): siRNA sense strand
caagaaggaugaagaggug

SEQ ID NO: 2357522 - RNA, 19 nt, Homo sapiens
  misc_RNA (1)...(19): siRNA sense strand
augaagaugaugaggugga

SEQ ID NO: 2357523 - RNA, 19 nt, Homo sapiens
  misc_RNA (1)...(19): siRNA sense strand
gcauggacaucgagcgggu

SEQ ID NO: 2357524 - RNA, 19 nt, Homo sapiens
  misc_RNA (1)...(19): siRNA sense strand
agcuacuaguggagcagaa

SEQ ID NO: 2357525 - RNA, 19 nt, Homo sapiens
  misc_RNA (1)...(19): siRNA sense strand
agaucuucguggaugauga

SEQ ID NO: 2357526 - RNA, 19 nt, Homo sapiens
  misc_RNA (1)...(19): siRNA sense strand
gcaaggaauaugagcgcuu

SEQ ID NO: 2357527 - RNA, 19 nt, Homo sapiens
  misc_RNA (1)...(19): siRNA sense strand
ggucaauauuagugagcug

SEQ ID NO: 2357528 - RNA, 19 nt, Homo sapiens
  misc_RNA (1)...(19): siRNA sense strand
cgacuguggcuuugagcau

SEQ ID NO: 2357529 - RNA, 19 nt, Homo sapiens
  misc_RNA (1)...(19): siRNA sense strand
gagaagaaccggaagcucu

SEQ ID NO: 2357530 - RNA, 19 nt, Homo sapiens
  misc_RNA (1)...(19): siRNA sense strand
aggaugaagaggugcugaa

SEQ ID NO: 2357531 - RNA, 19 nt, Homo sapiens
  misc_RNA (1)...(19): siRNA sense strand
uggagaucuucguggauga

SEQ ID NO: 2357532 - RNA, 19 nt, Homo sapiens
  misc_RNA (1)...(19): siRNA sense strand
cuaucaagaaggaugaaga

SEQ ID NO: 2357533 - RNA, 19 nt, Homo sapiens
  misc_RNA (1)...(19): siRNA sense strand
gagcagaacuucccagcca

SEQ ID NO: 2357534 - RNA, 19 nt, Homo sapiens
  misc_RNA (1)...(19): siRNA sense strand
ccgaugagaaugaugccaa

SEQ ID NO: 2357535 - RNA, 19 nt, Homo sapiens
  misc_RNA (1)...(19): siRNA sense strand
cugccaagaaggaugucaa

SEQ ID NO: 2357536 - RNA, 19 nt, Homo sapiens
  misc_RNA (1)...(19): siRNA sense strand
acaucgagcgggugaacau

SEQ ID NO: 2357537 - RNA, 19 nt, Homo sapiens
  misc_RNA (1)...(19): siRNA sense strand
gaauggauguccugugcca

SEQ ID NO: 2357538 - RNA, 19 nt, Homo sapiens
  misc_RNA (1)...(19): siRNA sense strand
uuucagaucagcaaggaau

SEQ ID NO: 2357539 - RNA, 19 nt, Homo sapiens
  misc_RNA (1)...(19): siRNA sense strand
caagaaggaugaagaggug

SEQ ID NO: 2357540 - RNA, 19 nt, Homo sapiens
  misc_RNA (1)...(19): siRNA sense strand
augaagaugaugaggugga

SEQ ID NO: 2357541 - RNA, 19 nt, Homo sapiens
  misc_RNA (1)...(19): siRNA sense strand
gcauggacaucgagcgggu

SEQ ID NO: 2357542 - RNA, 19 nt, Homo sapiens
  misc_RNA (1)...(19): siRNA sense strand
agcuacuaguggagcagaa

SEQ ID NO: 2357543 - RNA, 19 nt, Homo sapiens
  misc_RNA (1)...(19): siRNA sense strand
agaucuucguggaugauga

SEQ ID NO: 2357544 - RNA, 19 nt, Homo sapiens
  misc_RNA (1)...(19): siRNA sense strand
agaaggagcgcgagagaaa

SEQ ID NO: 2357545 - RNA, 19 nt, Homo sapiens
  misc_RNA (1)...(19): siRNA sense strand
gugaagaagaggaggaaga

SEQ ID NO: 2357546 - RNA, 19 nt, Homo sapiens
  misc_RNA (1)...(19): siRNA sense strand
ugacaaugaaggagacaaa

SEQ ID NO: 2357547 - RNA, 19 nt, Homo sapiens
  misc_RNA (1)...(19): siRNA sense strand
gcuuaaagaggaagaagaa

SEQ ID NO: 2357548 - RNA, 19 nt, Homo sapiens
  misc_RNA (1)...(19): siRNA sense strand
cagugaaggugaugaggaa

SEQ ID NO: 2357549 - RNA, 19 nt, Homo sapiens
  misc_RNA (1)...(19): siRNA sense strand
uaacauagaaagugggaau

SEQ ID NO: 2357550 - RNA, 19 nt, Homo sapiens
  misc_RNA (1)...(19): siRNA sense strand
cuguagaaguuauggaaca

SEQ ID NO: 2357551 - RNA, 19 nt, Homo sapiens
  misc_RNA (1)...(19): siRNA sense strand
agaaaggacagaagggcaa

SEQ ID NO: 2357552 - RNA, 19 nt, Homo sapiens
  misc_RNA (1)...(19): siRNA sense strand
gagaagaggaagaacguau

SEQ ID NO: 2357553 - RNA, 19 nt, Homo sapiens
  misc_RNA (1)...(19): siRNA sense strand
cugcggaagcugaaagaaa

SEQ ID NO: 2357554 - RNA, 19 nt, Homo sapiens
  misc_RNA (1)...(19): siRNA sense strand
agggaagacauuagauaaa

SEQ ID NO: 2357555 - RNA, 19 nt, Homo sapiens
  misc_RNA (1)...(19): siRNA sense strand
ugauaaugauagcgaagaa

SEQ ID NO: 2357556 - RNA, 19 nt, Homo sapiens
  misc_RNA (1)...(19): siRNA sense strand
cgaagaauuggaagauaaa

SEQ ID NO: 2357557 - RNA, 19 nt, Homo sapiens
  misc_RNA (1)...(19): siRNA sense strand
gaguuaaagcagacacuaa

SEQ ID NO: 2357558 - RNA, 19 nt, Homo sapiens
  misc_RNA (1)...(19): siRNA sense strand
uggugaaaguggugaugaa

SEQ ID NO: 2357559 - RNA, 19 nt, Homo sapiens
  misc_RNA (1)...(19): siRNA sense strand
aggaagaagaggaagaaga

SEQ ID NO: 2357560 - RNA, 19 nt, Homo sapiens
  misc_RNA (1)...(19): siRNA sense strand
agaugaagaaagugaagaa

SEQ ID NO: 2357561 - RNA, 19 nt, Homo sapiens
  misc_RNA (1)...(19): siRNA sense strand
gcaucaaagcugacagaga

SEQ ID NO: 2357562 - RNA, 19 nt, Homo sapiens
  misc_RNA (1)...(19): siRNA sense strand
aagaaagacagaagagaga

SEQ ID NO: 2357563 - RNA, 19 nt, Homo sapiens
  misc_RNA (1)...(19): siRNA sense strand
gggagaaagugaaggcagu

SEQ ID NO: 2357564 - RNA, 19 nt, Homo sapiens
  misc_RNA (1)...(19): siRNA sense strand
ccaaagaacaggagccuca

SEQ ID NO: 2357565 - RNA, 19 nt, Homo sapiens
  misc_RNA (1)...(19): siRNA sense strand
agaagaagauacugaggau

SEQ ID NO: 2357566 - RNA, 19 nt, Homo sapiens
  misc_RNA (1)...(19): siRNA sense strand
aggaggaagaggagggaga

SEQ ID NO: 2357567 - RNA, 19 nt, Homo sapiens
  misc_RNA (1)...(19): siRNA sense strand
aggaagaagaagaugaaga

SEQ ID NO: 2357568 - RNA, 19 nt, Homo sapiens
  misc_RNA (1)...(19): siRNA sense strand
aggaauuacgagugaagaa

SEQ ID NO: 2357569 - RNA, 19 nt, Homo sapiens
  misc_RNA (1)...(19): siRNA sense strand
agaagagagaagaggaaga

SEQ ID NO: 2357570 - RNA, 19 nt, Homo sapiens
  misc_RNA (1)...(19): siRNA sense strand
gagagaagccagagccaga

SEQ ID NO: 2357571 - RNA, 19 nt, Homo sapiens
  misc_RNA (1)...(19): siRNA sense strand
aggaggaggaggaggaaga

SEQ ID NO: 2357572 - RNA, 19 nt, Homo sapiens
  misc_RNA (1)...(19): siRNA sense strand
aggaggaagaagaggaaga

SEQ ID NO: 2357573 - RNA, 19 nt, Homo sapiens
  misc_RNA (1)...(19): siRNA sense strand
acagaagagagaagaggaa

SEQ ID NO: 2357574 - RNA, 19 nt, Homo sapiens
  misc_RNA (1)...(19): siRNA sense strand
cugaagaggaggaggagga

SEQ ID NO: 2357575 - RNA, 19 nt, Homo sapiens
  misc_RNA (1)...(19): siRNA sense strand
aggaugaggauaacaguaa

SEQ ID NO: 2357576 - RNA, 19 nt, Homo sapiens
  misc_RNA (1)...(19): siRNA sense strand
ggcuaagcuuaaagaggaa

SEQ ID NO: 2357577 - RNA, 19 nt, Homo sapiens
  misc_RNA (1)...(19): siRNA sense strand
aagaaauggcugauaguuu

SEQ ID NO: 2357578 - RNA, 19 nt, Homo sapiens
  misc_RNA (1)...(19): siRNA sense strand
uaacuaaaucccagagaga

SEQ ID NO: 2357579 - RNA, 19 nt, Homo sapiens
  misc_RNA (1)...(19): siRNA sense strand
aagaaagggcuuaugacaa

SEQ ID NO: 2357580 - RNA, 19 nt, Homo sapiens
  misc_RNA (1)...(19): siRNA sense strand
agaguuagaaacagguaaa

SEQ ID NO: 2357581 - RNA, 19 nt, Homo sapiens
  misc_RNA (1)...(19): siRNA sense strand
gugaaggugaugaggaaga

SEQ ID NO: 2357582 - RNA, 19 nt, Homo sapiens
  misc_RNA (1)...(19): siRNA sense strand
aaucauuguuccuggagua

SEQ ID NO: 2357583 - RNA, 19 nt, Homo sapiens
  misc_RNA (1)...(19): siRNA sense strand
cugcagaagaugacaauga

SEQ ID NO: 2357584 - RNA, 19 nt, Homo sapiens
  misc_RNA (1)...(19): siRNA sense strand
ucaaauaagaagugggaug

SEQ ID NO: 2357585 - RNA, 19 nt, Homo sapiens
  misc_RNA (1)...(19): siRNA sense strand
gaggaagaggagggagaaa

SEQ ID NO: 2357586 - RNA, 19 nt, Homo sapiens
  misc_RNA (1)...(19): siRNA sense strand
augaaaugcagaagaguga

SEQ ID NO: 2357587 - RNA, 19 nt, Homo sapiens
  misc_RNA (1)...(19): siRNA sense strand
ucaaaagucaaaagggaaa

SEQ ID NO: 2357588 - RNA, 19 nt, Homo sapiens
  misc_RNA (1)...(19): siRNA sense strand
ggucagaggaggaugagga

SEQ ID NO: 2357589 - RNA, 19 nt, Homo sapiens
  misc_RNA (1)...(19): siRNA sense strand
cagggaagacauuagauaa

SEQ ID NO: 2357590 - RNA, 19 nt, Homo sapiens
  misc_RNA (1)...(19): siRNA sense strand
agaaaacaaugaagaggaa

SEQ ID NO: 2357591 - RNA, 19 nt, Homo sapiens
  misc_RNA (1)...(19): siRNA sense strand
agugaugaggagacagaaa

SEQ ID NO: 2357592 - RNA, 19 nt, Homo sapiens
  misc_RNA (1)...(19): siRNA sense strand
aguuauggaacaaggagua

SEQ ID NO: 2357593 - RNA, 19 nt, Homo sapiens
  misc_RNA (1)...(19): siRNA sense strand
aaucugagaaauagaggaa

SEQ ID NO: 2357594 - RNA, 19 nt, Homo sapiens
  misc_RNA (1)...(19): siRNA sense strand
ggaagaggagggagaaagu

SEQ ID NO: 2357595 - RNA, 19 nt, Homo sapiens
  misc_RNA (1)...(19): siRNA sense strand
ggaaaagaccuggagaaaa

SEQ ID NO: 2357596 - RNA, 19 nt, Homo sapiens
  misc_RNA (1)...(19): siRNA sense strand
aagaagaugaagaaaguga

SEQ ID NO: 2357597 - RNA, 19 nt, Homo sapiens
  misc_RNA (1)...(19): siRNA sense strand
ugaucggacuaaagaagaa

SEQ ID NO: 2357598 - RNA, 19 nt, Homo sapiens
  misc_RNA (1)...(19): siRNA sense strand
uggaaaagaccuggagaaa

SEQ ID NO: 2357599 - RNA, 19 nt, Homo sapiens
  misc_RNA (1)...(19): siRNA sense strand
ugcaagaagcucuggcuaa

SEQ ID NO: 2357600 - RNA, 19 nt, Homo sapiens
  misc_RNA (1)...(19): siRNA sense strand
cacaggugauggagguuaa

SEQ ID NO: 2357601 - RNA, 19 nt, Homo sapiens
  misc_RNA (1)...(19): siRNA sense strand
caagaagaauuuaagcaca

SEQ ID NO: 2357602 - RNA, 19 nt, Homo sapiens
  misc_RNA (1)...(19): siRNA sense strand
ggaagaagaaagacagaag

SEQ ID NO: 2357603 - RNA, 19 nt, Homo sapiens
  misc_RNA (1)...(19): siRNA sense strand
aggaggaggaggaagaaga

SEQ ID NO: 2357604 - RNA, 19 nt, Homo sapiens
  misc_RNA (1)...(19): siRNA sense strand
gugaugaggaagaugaaaa

SEQ ID NO: 2357605 - RNA, 19 nt, Homo sapiens
  misc_RNA (1)...(19): siRNA sense strand
cuaaagaagaaagggcuua

SEQ ID NO: 2357606 - RNA, 19 nt, Homo sapiens
  misc_RNA (1)...(19): siRNA sense strand
gagaauugaacgagaugca

SEQ ID NO: 2357607 - RNA, 19 nt, Homo sapiens
  misc_RNA (1)...(19): siRNA sense strand
ccaccuacaaccaggacaa

SEQ ID NO: 2357608 - RNA, 19 nt, Homo sapiens
  misc_RNA (1)...(19): siRNA sense strand
gggcagggaaagaaagacu

SEQ ID NO: 2357609 - RNA, 19 nt, Homo sapiens
  misc_RNA (1)...(19): siRNA sense strand
acacaaggcuuuuggagga

SEQ ID NO: 2357610 - RNA, 19 nt, Homo sapiens
  misc_RNA (1)...(19): siRNA sense strand
cggccaacucagucaccaa

SEQ ID NO: 2357611 - RNA, 19 nt, Homo sapiens
  misc_RNA (1)...(19): siRNA sense strand
cugucacugauguggauaa

SEQ ID NO: 2357612 - RNA, 19 nt, Homo sapiens
  misc_RNA (1)...(19): siRNA sense strand
ggcaaggagaacaaaccaa

SEQ ID NO: 2357613 - RNA, 19 nt, Homo sapiens
  misc_RNA (1)...(19): siRNA sense strand
cugcugaaguggaccgagu

SEQ ID NO: 2357614 - RNA, 19 nt, Homo sapiens
  misc_RNA (1)...(19): siRNA sense strand
cugugguggccgugugcua

SEQ ID NO: 2357615 - RNA, 19 nt, Homo sapiens
  misc_RNA (1)...(19): siRNA sense strand
ccuacaaccaggacaacga

SEQ ID NO: 2357616 - RNA, 19 nt, Homo sapiens
  misc_RNA (1)...(19): siRNA sense strand
ccaucaccuccaagggcaa

SEQ ID NO: 2357617 - RNA, 19 nt, Homo sapiens
  misc_RNA (1)...(19): siRNA sense strand
ggaugaaggcagaagggaa

SEQ ID NO: 2357618 - RNA, 19 nt, Homo sapiens
  misc_RNA (1)...(19): siRNA sense strand
ggagaaggaugaaggcaga

SEQ ID NO: 2357619 - RNA, 19 nt, Homo sapiens
  misc_RNA (1)...(19): siRNA sense strand
gugccauauuugagggauu

SEQ ID NO: 2357620 - RNA, 19 nt, Homo sapiens
  misc_RNA (1)...(19): siRNA sense strand
gauaauaaccucacggaag

SEQ ID NO: 2357621 - RNA, 19 nt, Homo sapiens
  misc_RNA (1)...(19): siRNA sense strand
cagagaugacggagcccaa

SEQ ID NO: 2357622 - RNA, 19 nt, Homo sapiens
  misc_RNA (1)...(19): siRNA sense strand
gggagcuggacguggaaaa

SEQ ID NO: 2357623 - RNA, 19 nt, Homo sapiens
  misc_RNA (1)...(19): siRNA sense strand
agggaaauggucaaggaga

SEQ ID NO: 2357624 - RNA, 19 nt, Homo sapiens
  misc_RNA (1)...(19): siRNA sense strand
ggaucgggaacgaaaccaa

SEQ ID NO: 2357625 - RNA, 19 nt, Homo sapiens
  misc_RNA (1)...(19): siRNA sense strand
ggauacagggagacgggca

SEQ ID NO: 2357626 - RNA, 19 nt, Homo sapiens
  misc_RNA (1)...(19): siRNA sense strand
agauaauaaccucacggaa

SEQ ID NO: 2357627 - RNA, 19 nt, Homo sapiens
  misc_RNA (1)...(19): siRNA sense strand
cuggcuggauacagggaga

SEQ ID NO: 2357628 - RNA, 19 nt, Homo sapiens
  misc_RNA (1)...(19): siRNA sense strand
gggaaaagucugcaaucuu

SEQ ID NO: 2357629 - RNA, 19 nt, Homo sapiens
  misc_RNA (1)...(19): siRNA sense strand
uggaaaaugccaagcugua

SEQ ID NO: 2357630 - RNA, 19 nt, Homo sapiens
  misc_RNA (1)...(19): siRNA sense strand
ugguggaggaagaaaggau

SEQ ID NO: 2357631 - RNA, 19 nt, Homo sapiens
  misc_RNA (1)...(19): siRNA sense strand
ggaugaaggcagaagggaa

SEQ ID NO: 2357632 - RNA, 19 nt, Homo sapiens
  misc_RNA (1)...(19): siRNA sense strand
ggagaaggaugaaggcaga

SEQ ID NO: 2357633 - RNA, 19 nt, Homo sapiens
  misc_RNA (1)...(19): siRNA sense strand
gugccauauuugagggauu

SEQ ID NO: 2357634 - RNA, 19 nt, Homo sapiens
  misc_RNA (1)...(19): siRNA sense strand
gauaauaaccucacggaag

SEQ ID NO: 2357635 - RNA, 19 nt, Homo sapiens
  misc_RNA (1)...(19): siRNA sense strand
cagagaugacggagcccaa

SEQ ID NO: 2357636 - RNA, 19 nt, Homo sapiens
  misc_RNA (1)...(19): siRNA sense strand
gggagcuggacguggaaaa

SEQ ID NO: 2357637 - RNA, 19 nt, Homo sapiens
  misc_RNA (1)...(19): siRNA sense strand
agggaaauggucaaggaga

SEQ ID NO: 2357638 - RNA, 19 nt, Homo sapiens
  misc_RNA (1)...(19): siRNA sense strand
ggaucgggaacgaaaccaa

SEQ ID NO: 2357639 - RNA, 19 nt, Homo sapiens
  misc_RNA (1)...(19): siRNA sense strand
ggauacagggagacgggca

SEQ ID NO: 2357640 - RNA, 19 nt, Homo sapiens
  misc_RNA (1)...(19): siRNA sense strand
agauaauaaccucacggaa

SEQ ID NO: 2357641 - RNA, 19 nt, Homo sapiens
  misc_RNA (1)...(19): siRNA sense strand
cuggcuggauacagggaga

SEQ ID NO: 2357642 - RNA, 19 nt, Homo sapiens
  misc_RNA (1)...(19): siRNA sense strand
gggaaaagucugcaaucuu

SEQ ID NO: 2357643 - RNA, 19 nt, Homo sapiens
  misc_RNA (1)...(19): siRNA sense strand
uggaaaaugccaagcugua

SEQ ID NO: 2357644 - RNA, 19 nt, Homo sapiens
  misc_RNA (1)...(19): siRNA sense strand
ugguggaggaagaaaggau

SEQ ID NO: 2357645 - RNA, 19 nt, Homo sapiens
  misc_RNA (1)...(19): siRNA sense strand
guaugaaaugggaaagaaa

SEQ ID NO: 2357646 - RNA, 19 nt, Homo sapiens
  misc_RNA (1)...(19): siRNA sense strand
uggaguaugaaaugggaaa

SEQ ID NO: 2357647 - RNA, 19 nt, Homo sapiens
  misc_RNA (1)...(19): siRNA sense strand
uguaaaugcagcaggaaga

SEQ ID NO: 2357648 - RNA, 19 nt, Homo sapiens
  misc_RNA (1)...(19): siRNA sense strand
uugauacagcagagagaaa

SEQ ID NO: 2357649 - RNA, 19 nt, Homo sapiens
  misc_RNA (1)...(19): siRNA sense strand
cuaaagaggaguuugccaa

SEQ ID NO: 2357650 - RNA, 19 nt, Homo sapiens
  misc_RNA (1)...(19): siRNA sense strand
agacaaaggcauuuccaau

SEQ ID NO: 2357651 - RNA, 19 nt, Homo sapiens
  misc_RNA (1)...(19): siRNA sense strand
uggaugaggcccaaagcaa

SEQ ID NO: 2357652 - RNA, 19 nt, Homo sapiens
  misc_RNA (1)...(19): siRNA sense strand
ggaacagagagucaagcaa

SEQ ID NO: 2357653 - RNA, 19 nt, Homo sapiens
  misc_RNA (1)...(19): siRNA sense strand
cgggaaaugcggacacaga

SEQ ID NO: 2357654 - RNA, 19 nt, Homo sapiens
  misc_RNA (1)...(19): siRNA sense strand
gguugaggaagcuggagaa

SEQ ID NO: 2357655 - RNA, 19 nt, Homo sapiens
  misc_RNA (1)...(19): siRNA sense strand
uggaggaugauuugggaau

SEQ ID NO: 2357656 - RNA, 19 nt, Homo sapiens
  misc_RNA (1)...(19): siRNA sense strand
ccaaauacguaaugccucu

SEQ ID NO: 2357657 - RNA, 19 nt, Homo sapiens
  misc_RNA (1)...(19): siRNA sense strand
cuaccaaguacaaggcaga

SEQ ID NO: 2357658 - RNA, 19 nt, Homo sapiens
  misc_RNA (1)...(19): siRNA sense strand
ugggauaauuccugagaac

SEQ ID NO: 2357659 - RNA, 19 nt, Homo sapiens
  misc_RNA (1)...(19): siRNA sense strand
gaacuauuuaagagacaga

SEQ ID NO: 2357660 - RNA, 19 nt, Homo sapiens
  misc_RNA (1)...(19): siRNA sense strand
gagguggacagcaaggaaa

SEQ ID NO: 2357661 - RNA, 19 nt, Homo sapiens
  misc_RNA (1)...(19): siRNA sense strand
uuguagagaugcaggcuca

SEQ ID NO: 2357662 - RNA, 19 nt, Homo sapiens
  misc_RNA (1)...(19): siRNA sense strand
ccucuaauguaaagcacca

SEQ ID NO: 2357663 - RNA, 19 nt, Homo sapiens
  misc_RNA (1)...(19): siRNA sense strand
guuguuaccaagaggauga

SEQ ID NO: 2357664 - RNA, 19 nt, Homo sapiens
  misc_RNA (1)...(19): siRNA sense strand
agagauaaacauucuggaa

SEQ ID NO: 2357665 - RNA, 19 nt, Homo sapiens
  misc_RNA (1)...(19): siRNA sense strand
caaggauagaugaugaaau

SEQ ID NO: 2357666 - RNA, 19 nt, Homo sapiens
  misc_RNA (1)...(19): siRNA sense strand
ccaaguacaaggcagacaa

SEQ ID NO: 2357667 - RNA, 19 nt, Homo sapiens
  misc_RNA (1)...(19): siRNA sense strand
cugaauucuccaaccaaua

SEQ ID NO: 2357668 - RNA, 19 nt, Homo sapiens
  misc_RNA (1)...(19): siRNA sense strand
ggguggaacaucugaacca

SEQ ID NO: 2357669 - RNA, 19 nt, Homo sapiens
  misc_RNA (1)...(19): siRNA sense strand
uugacuuucuggagcuaaa

SEQ ID NO: 2357670 - RNA, 19 nt, Homo sapiens
  misc_RNA (1)...(19): siRNA sense strand
augaauuucugaagcugaa

SEQ ID NO: 2357671 - RNA, 19 nt, Homo sapiens
  misc_RNA (1)...(19): siRNA sense strand
gaugaggauuccagcuaca

SEQ ID NO: 2357672 - RNA, 19 nt, Homo sapiens
  misc_RNA (1)...(19): siRNA sense strand
gaguaugaaaugggaaaga

SEQ ID NO: 2357673 - RNA, 19 nt, Homo sapiens
  misc_RNA (1)...(19): siRNA sense strand
ccaacuucauuaagggagu

SEQ ID NO: 2357674 - RNA, 19 nt, Homo sapiens
  misc_RNA (1)...(19): siRNA sense strand
cuccaaggauagaugauga

SEQ ID NO: 2357675 - RNA, 19 nt, Homo sapiens
  misc_RNA (1)...(19): siRNA sense strand
aauugauacagcagagaga

SEQ ID NO: 2357676 - RNA, 19 nt, Homo sapiens
  misc_RNA (1)...(19): siRNA sense strand
gacuuuaggacuucugaaa

SEQ ID NO: 2357677 - RNA, 19 nt, Homo sapiens
  misc_RNA (1)...(19): siRNA sense strand
auuuauugugguugaggaa

SEQ ID NO: 2357678 - RNA, 19 nt, Homo sapiens
  misc_RNA (1)...(19): siRNA sense strand
cucuagugcucuuggugua

SEQ ID NO: 2357679 - RNA, 19 nt, Homo sapiens
  misc_RNA (1)...(19): siRNA sense strand
aauucaaaggugccaauaa

SEQ ID NO: 2357680 - RNA, 19 nt, Homo sapiens
  misc_RNA (1)...(19): siRNA sense strand
ggguagaacuaucccugau

SEQ ID NO: 2357681 - RNA, 19 nt, Homo sapiens
  misc_RNA (1)...(19): siRNA sense strand
cuucauuaagggaguuuau

SEQ ID NO: 2357682 - RNA, 19 nt, Homo sapiens
  misc_RNA (1)...(19): siRNA sense strand
gugcaaaagaagagcuagu

SEQ ID NO: 2357683 - RNA, 19 nt, Homo sapiens
  misc_RNA (1)...(19): siRNA sense strand
acguaaugccucuaaugua

SEQ ID NO: 2357684 - RNA, 19 nt, Homo sapiens
  misc_RNA (1)...(19): siRNA sense strand
guggaacaucugaaccaaa

SEQ ID NO: 2357685 - RNA, 19 nt, Homo sapiens
  misc_RNA (1)...(19): siRNA sense strand
ccaagugguaccaguucua

SEQ ID NO: 2357686 - RNA, 19 nt, Homo sapiens
  misc_RNA (1)...(19): siRNA sense strand
cugagaagcaagauggaac

SEQ ID NO: 2357687 - RNA, 19 nt, Homo sapiens
  misc_RNA (1)...(19): siRNA sense strand
aguaugaaaugggaaagaa

SEQ ID NO: 2357688 - RNA, 19 nt, Homo sapiens
  misc_RNA (1)...(19): siRNA sense strand
ugguguuauuugugcuauu

SEQ ID NO: 2357689 - RNA, 19 nt, Homo sapiens
  misc_RNA (1)...(19): siRNA sense strand
caaugcuguauuagaacua

SEQ ID NO: 2357690 - RNA, 19 nt, Homo sapiens
  misc_RNA (1)...(19): siRNA sense strand
acuccgaaguccuaaauca

SEQ ID NO: 2357691 - RNA, 19 nt, Homo sapiens
  misc_RNA (1)...(19): siRNA sense strand
cugaugaggauuccagcua

SEQ ID NO: 2357692 - RNA, 19 nt, Homo sapiens
  misc_RNA (1)...(19): siRNA sense strand
uuuauggacccaaggcuua

SEQ ID NO: 2357693 - RNA, 19 nt, Homo sapiens
  misc_RNA (1)...(19): siRNA sense strand
cuggacuucuggaggauga

SEQ ID NO: 2357694 - RNA, 19 nt, Homo sapiens
  misc_RNA (1)...(19): siRNA sense strand
gaaaauuacuaaagaggag

SEQ ID NO: 2357695 - RNA, 19 nt, Homo sapiens
  misc_RNA (1)...(19): siRNA sense strand
guugcuaaaagaugggaua

SEQ ID NO: 2357696 - RNA, 19 nt, Homo sapiens
  misc_RNA (1)...(19): siRNA sense strand
guuuauggacccaaggcuu

SEQ ID NO: 2357697 - RNA, 19 nt, Homo sapiens
  misc_RNA (1)...(19): siRNA sense strand
gcaugcauggaguaugaaa

SEQ ID NO: 2357698 - RNA, 19 nt, Homo sapiens
  misc_RNA (1)...(19): siRNA sense strand
ggagguggacagcaaggaa

SEQ ID NO: 2357699 - RNA, 19 nt, Homo sapiens
  misc_RNA (1)...(19): siRNA sense strand
auuugaugacucugugaua

SEQ ID NO: 2357700 - RNA, 19 nt, Homo sapiens
  misc_RNA (1)...(19): siRNA sense strand
aaaugcagcaggaagauau

SEQ ID NO: 2357701 - RNA, 19 nt, Homo sapiens
  misc_RNA (1)...(19): siRNA sense strand
gccaauaacacggaccaaa

SEQ ID NO: 2357702 - RNA, 19 nt, Homo sapiens
  misc_RNA (1)...(19): siRNA sense strand
guaugaaaugggaaagaaa

SEQ ID NO: 2357703 - RNA, 19 nt, Homo sapiens
  misc_RNA (1)...(19): siRNA sense strand
uggaguaugaaaugggaaa

SEQ ID NO: 2357704 - RNA, 19 nt, Homo sapiens
  misc_RNA (1)...(19): siRNA sense strand
uguaaaugcagcaggaaga

SEQ ID NO: 2357705 - RNA, 19 nt, Homo sapiens
  misc_RNA (1)...(19): siRNA sense strand
uugauacagcagagagaaa

SEQ ID NO: 2357706 - RNA, 19 nt, Homo sapiens
  misc_RNA (1)...(19): siRNA sense strand
cuaaagaggaguuugccaa

SEQ ID NO: 2357707 - RNA, 19 nt, Homo sapiens
  misc_RNA (1)...(19): siRNA sense strand
agacaaaggcauuuccaau

SEQ ID NO: 2357708 - RNA, 19 nt, Homo sapiens
  misc_RNA (1)...(19): siRNA sense strand
uggaugaggcccaaagcaa

SEQ ID NO: 2357709 - RNA, 19 nt, Homo sapiens
  misc_RNA (1)...(19): siRNA sense strand
ggaacagagagucaagcaa

SEQ ID NO: 2357710 - RNA, 19 nt, Homo sapiens
  misc_RNA (1)...(19): siRNA sense strand
cgggaaaugcggacacaga

SEQ ID NO: 2357711 - RNA, 19 nt, Homo sapiens
  misc_RNA (1)...(19): siRNA sense strand
gguugaggaagcuggagaa

SEQ ID NO: 2357712 - RNA, 19 nt, Homo sapiens
  misc_RNA (1)...(19): siRNA sense strand
uggaggaugauuugggaau

SEQ ID NO: 2357713 - RNA, 19 nt, Homo sapiens
  misc_RNA (1)...(19): siRNA sense strand
ccaaauacguaaugccucu

SEQ ID NO: 2357714 - RNA, 19 nt, Homo sapiens
  misc_RNA (1)...(19): siRNA sense strand
cuaccaaguacaaggcaga

SEQ ID NO: 2357715 - RNA, 19 nt, Homo sapiens
  misc_RNA (1)...(19): siRNA sense strand
ugggauaauuccugagaac

SEQ ID NO: 2357716 - RNA, 19 nt, Homo sapiens
  misc_RNA (1)...(19): siRNA sense strand
gaacuauuuaagagacaga

SEQ ID NO: 2357717 - RNA, 19 nt, Homo sapiens
  misc_RNA (1)...(19): siRNA sense strand
gagguggacagcaaggaaa

SEQ ID NO: 2357718 - RNA, 19 nt, Homo sapiens
  misc_RNA (1)...(19): siRNA sense strand
uuguagagaugcaggcuca

SEQ ID NO: 2357719 - RNA, 19 nt, Homo sapiens
  misc_RNA (1)...(19): siRNA sense strand
ccucuaauguaaagcacca

SEQ ID NO: 2357720 - RNA, 19 nt, Homo sapiens
  misc_RNA (1)...(19): siRNA sense strand
guuguuaccaagaggauga

SEQ ID NO: 2357721 - RNA, 19 nt, Homo sapiens
  misc_RNA (1)...(19): siRNA sense strand
agagauaaacauucuggaa

SEQ ID NO: 2357722 - RNA, 19 nt, Homo sapiens
  misc_RNA (1)...(19): siRNA sense strand
caaggauagaugaugaaau

SEQ ID NO: 2357723 - RNA, 19 nt, Homo sapiens
  misc_RNA (1)...(19): siRNA sense strand
ccaaguacaaggcagacaa

SEQ ID NO: 2357724 - RNA, 19 nt, Homo sapiens
  misc_RNA (1)...(19): siRNA sense strand
cugaauucuccaaccaaua

SEQ ID NO: 2357725 - RNA, 19 nt, Homo sapiens
  misc_RNA (1)...(19): siRNA sense strand
ggguggaacaucugaacca

SEQ ID NO: 2357726 - RNA, 19 nt, Homo sapiens
  misc_RNA (1)...(19): siRNA sense strand
uugacuuucuggagcuaaa

SEQ ID NO: 2357727 - RNA, 19 nt, Homo sapiens
  misc_RNA (1)...(19): siRNA sense strand
augaauuucugaagcugaa

SEQ ID NO: 2357728 - RNA, 19 nt, Homo sapiens
  misc_RNA (1)...(19): siRNA sense strand
gaugaggauuccagcuaca

SEQ ID NO: 2357729 - RNA, 19 nt, Homo sapiens
  misc_RNA (1)...(19): siRNA sense strand
gaguaugaaaugggaaaga

SEQ ID NO: 2357730 - RNA, 19 nt, Homo sapiens
  misc_RNA (1)...(19): siRNA sense strand
ccaacuucauuaagggagu

SEQ ID NO: 2357731 - RNA, 19 nt, Homo sapiens
  misc_RNA (1)...(19): siRNA sense strand
cuccaaggauagaugauga

SEQ ID NO: 2357732 - RNA, 19 nt, Homo sapiens
  misc_RNA (1)...(19): siRNA sense strand
aauugauacagcagagaga

SEQ ID NO: 2357733 - RNA, 19 nt, Homo sapiens
  misc_RNA (1)...(19): siRNA sense strand
gacuuuaggacuucugaaa

SEQ ID NO: 2357734 - RNA, 19 nt, Homo sapiens
  misc_RNA (1)...(19): siRNA sense strand
auuuauugugguugaggaa

SEQ ID NO: 2357735 - RNA, 19 nt, Homo sapiens
  misc_RNA (1)...(19): siRNA sense strand
cucuagugcucuuggugua

SEQ ID NO: 2357736 - RNA, 19 nt, Homo sapiens
  misc_RNA (1)...(19): siRNA sense strand
aauucaaaggugccaauaa

SEQ ID NO: 2357737 - RNA, 19 nt, Homo sapiens
  misc_RNA (1)...(19): siRNA sense strand
ggguagaacuaucccugau

SEQ ID NO: 2357738 - RNA, 19 nt, Homo sapiens
  misc_RNA (1)...(19): siRNA sense strand
cuucauuaagggaguuuau

SEQ ID NO: 2357739 - RNA, 19 nt, Homo sapiens
  misc_RNA (1)...(19): siRNA sense strand
gugcaaaagaagagcuagu

SEQ ID NO: 2357740 - RNA, 19 nt, Homo sapiens
  misc_RNA (1)...(19): siRNA sense strand
acguaaugccucuaaugua

SEQ ID NO: 2357741 - RNA, 19 nt, Homo sapiens
  misc_RNA (1)...(19): siRNA sense strand
guggaacaucugaaccaaa

SEQ ID NO: 2357742 - RNA, 19 nt, Homo sapiens
  misc_RNA (1)...(19): siRNA sense strand
ccaagugguaccaguucua

SEQ ID NO: 2357743 - RNA, 19 nt, Homo sapiens
  misc_RNA (1)...(19): siRNA sense strand
cugagaagcaagauggaac

SEQ ID NO: 2357744 - RNA, 19 nt, Homo sapiens
  misc_RNA (1)...(19): siRNA sense strand
aguaugaaaugggaaagaa

SEQ ID NO: 2357745 - RNA, 19 nt, Homo sapiens
  misc_RNA (1)...(19): siRNA sense strand
ugguguuauuugugcuauu

SEQ ID NO: 2357746 - RNA, 19 nt, Homo sapiens
  misc_RNA (1)...(19): siRNA sense strand
caaugcuguauuagaacua

SEQ ID NO: 2357747 - RNA, 19 nt, Homo sapiens
  misc_RNA (1)...(19): siRNA sense strand
acuccgaaguccuaaauca

SEQ ID NO: 2357748 - RNA, 19 nt, Homo sapiens
  misc_RNA (1)...(19): siRNA sense strand
cugaugaggauuccagcua

SEQ ID NO: 2357749 - RNA, 19 nt, Homo sapiens
  misc_RNA (1)...(19): siRNA sense strand
uuuauggacccaaggcuua

SEQ ID NO: 2357750 - RNA, 19 nt, Homo sapiens
  misc_RNA (1)...(19): siRNA sense strand
cuggacuucuggaggauga

SEQ ID NO: 2357751 - RNA, 19 nt, Homo sapiens
  misc_RNA (1)...(19): siRNA sense strand
gaaaauuacuaaagaggag

SEQ ID NO: 2357752 - RNA, 19 nt, Homo sapiens
  misc_RNA (1)...(19): siRNA sense strand
guugcuaaaagaugggaua

SEQ ID NO: 2357753 - RNA, 19 nt, Homo sapiens
  misc_RNA (1)...(19): siRNA sense strand
guuuauggacccaaggcuu

SEQ ID NO: 2357754 - RNA, 19 nt, Homo sapiens
  misc_RNA (1)...(19): siRNA sense strand
gcaugcauggaguaugaaa

SEQ ID NO: 2357755 - RNA, 19 nt, Homo sapiens
  misc_RNA (1)...(19): siRNA sense strand
ggagguggacagcaaggaa

SEQ ID NO: 2357756 - RNA, 19 nt, Homo sapiens
  misc_RNA (1)...(19): siRNA sense strand
auuugaugacucugugaua

SEQ ID NO: 2357757 - RNA, 19 nt, Homo sapiens
  misc_RNA (1)...(19): siRNA sense strand
aaaugcagcaggaagauau

SEQ ID NO: 2357758 - RNA, 19 nt, Homo sapiens
  misc_RNA (1)...(19): siRNA sense strand
gccaauaacacggaccaaa

SEQ ID NO: 2357759 - RNA, 19 nt, Homo sapiens
  misc_RNA (1)...(19): siRNA sense strand
guucaaugccaggaggaaa

SEQ ID NO: 2357760 - RNA, 19 nt, Homo sapiens
  misc_RNA (1)...(19): siRNA sense strand
ggaaacaagaagagcgaug

SEQ ID NO: 2357761 - RNA, 19 nt, Homo sapiens
  misc_RNA (1)...(19): siRNA sense strand
aucagaagcuggagcguga

SEQ ID NO: 2357762 - RNA, 19 nt, Homo sapiens
  misc_RNA (1)...(19): siRNA sense strand
ggaggaaacugaagggagc

SEQ ID NO: 2357763 - RNA, 19 nt, Homo sapiens
  misc_RNA (1)...(19): siRNA sense strand
gcaucucagaggagggaca

SEQ ID NO: 2357764 - RNA, 19 nt, Homo sapiens
  misc_RNA (1)...(19): siRNA sense strand
ucuucgaggaauugggcaa

SEQ ID NO: 2357765 - RNA, 19 nt, Homo sapiens
  misc_RNA (1)...(19): siRNA sense strand
cgggauggcaaauggcaga

SEQ ID NO: 2357766 - RNA, 19 nt, Homo sapiens
  misc_RNA (1)...(19): siRNA sense strand
ccgcagugaagcuggcaga

SEQ ID NO: 2357767 - RNA, 19 nt, Homo sapiens
  misc_RNA (1)...(19): siRNA sense strand
ccccagaagugcugcggaa

SEQ ID NO: 2357768 - RNA, 19 nt, Homo sapiens
  misc_RNA (1)...(19): siRNA sense strand
ggggaaacaagaagagcga

SEQ ID NO: 2357769 - RNA, 19 nt, Homo sapiens
  misc_RNA (1)...(19): siRNA sense strand
ccugaugggcgacgaguca

SEQ ID NO: 2357770 - RNA, 19 nt, Homo sapiens
  misc_RNA (1)...(19): siRNA sense strand
cguucugggaugaggacca

SEQ ID NO: 2357771 - RNA, 19 nt, Homo sapiens
  misc_RNA (1)...(19): siRNA sense strand
ccuccaagcucaagggugc

SEQ ID NO: 2357772 - RNA, 19 nt, Homo sapiens
  misc_RNA (1)...(19): siRNA sense strand
guucaaugccaggaggaaa

SEQ ID NO: 2357773 - RNA, 19 nt, Homo sapiens
  misc_RNA (1)...(19): siRNA sense strand
ggaaacaagaagagcgaug

SEQ ID NO: 2357774 - RNA, 19 nt, Homo sapiens
  misc_RNA (1)...(19): siRNA sense strand
aucagaagcuggagcguga

SEQ ID NO: 2357775 - RNA, 19 nt, Homo sapiens
  misc_RNA (1)...(19): siRNA sense strand
ggaggaaacugaagggagc

SEQ ID NO: 2357776 - RNA, 19 nt, Homo sapiens
  misc_RNA (1)...(19): siRNA sense strand
gcaucucagaggagggaca

SEQ ID NO: 2357777 - RNA, 19 nt, Homo sapiens
  misc_RNA (1)...(19): siRNA sense strand
ucuucgaggaauugggcaa

SEQ ID NO: 2357778 - RNA, 19 nt, Homo sapiens
  misc_RNA (1)...(19): siRNA sense strand
cgggauggcaaauggcaga

SEQ ID NO: 2357779 - RNA, 19 nt, Homo sapiens
  misc_RNA (1)...(19): siRNA sense strand
ccgcagugaagcuggcaga

SEQ ID NO: 2357780 - RNA, 19 nt, Homo sapiens
  misc_RNA (1)...(19): siRNA sense strand
ccccagaagugcugcggaa

SEQ ID NO: 2357781 - RNA, 19 nt, Homo sapiens
  misc_RNA (1)...(19): siRNA sense strand
ggggaaacaagaagagcga

SEQ ID NO: 2357782 - RNA, 19 nt, Homo sapiens
  misc_RNA (1)...(19): siRNA sense strand
ccugaugggcgacgaguca

SEQ ID NO: 2357783 - RNA, 19 nt, Homo sapiens
  misc_RNA (1)...(19): siRNA sense strand
cguucugggaugaggacca

SEQ ID NO: 2357784 - RNA, 19 nt, Homo sapiens
  misc_RNA (1)...(19): siRNA sense strand
ccuccaagcucaagggugc

SEQ ID NO: 2357785 - RNA, 19 nt, Homo sapiens
  misc_RNA (1)...(19): siRNA sense strand
acaaagaauuuaagggcuu

SEQ ID NO: 2357786 - RNA, 19 nt, Homo sapiens
  misc_RNA (1)...(19): siRNA sense strand
uggcaauaagacugaguua

SEQ ID NO: 2357787 - RNA, 19 nt, Homo sapiens
  misc_RNA (1)...(19): siRNA sense strand
auguaguccuggugagaau

SEQ ID NO: 2357788 - RNA, 19 nt, Homo sapiens
  misc_RNA (1)...(19): siRNA sense strand
cugaaaaggagguagaaau

SEQ ID NO: 2357789 - RNA, 19 nt, Homo sapiens
  misc_RNA (1)...(19): siRNA sense strand
aguuauuagucgaucgaga

SEQ ID NO: 2357790 - RNA, 19 nt, Homo sapiens
  misc_RNA (1)...(19): siRNA sense strand
auuaaaagugccugaguaa

SEQ ID NO: 2357791 - RNA, 19 nt, Homo sapiens
  misc_RNA (1)...(19): siRNA sense strand
uggugagaauuuauggcaa

SEQ ID NO: 2357792 - RNA, 19 nt, Homo sapiens
  misc_RNA (1)...(19): siRNA sense strand
uugcagaugaagacauuaa

SEQ ID NO: 2357793 - RNA, 19 nt, Homo sapiens
  misc_RNA (1)...(19): siRNA sense strand
agauagagaacuacagagu

SEQ ID NO: 2357794 - RNA, 19 nt, Homo sapiens
  misc_RNA (1)...(19): siRNA sense strand
gggacugaaguuacugaaa

SEQ ID NO: 2357795 - RNA, 19 nt, Homo sapiens
  misc_RNA (1)...(19): siRNA sense strand
ggauacaacuaccuggcau

SEQ ID NO: 2357796 - RNA, 19 nt, Homo sapiens
  misc_RNA (1)...(19): siRNA sense strand
ucucauucccacaggauuu

SEQ ID NO: 2357797 - RNA, 19 nt, Homo sapiens
  misc_RNA (1)...(19): siRNA sense strand
cggaggugcccaagcugaa

SEQ ID NO: 2357798 - RNA, 19 nt, Homo sapiens
  misc_RNA (1)...(19): siRNA sense strand
acaaugagaaacaagguga

SEQ ID NO: 2357799 - RNA, 19 nt, Homo sapiens
  misc_RNA (1)...(19): siRNA sense strand
agaaacaaggugauguaca

SEQ ID NO: 2357800 - RNA, 19 nt, Homo sapiens
  misc_RNA (1)...(19): siRNA sense strand
agucgaucgagaugaggaa

SEQ ID NO: 2357801 - RNA, 19 nt, Homo sapiens
  misc_RNA (1)...(19): siRNA sense strand
cauucaagucaaucaguuu

SEQ ID NO: 2357802 - RNA, 19 nt, Homo sapiens
  misc_RNA (1)...(19): siRNA sense strand
auuuauacaaggagaagca

SEQ ID NO: 2357803 - RNA, 19 nt, Homo sapiens
  misc_RNA (1)...(19): siRNA sense strand
auuuaagggcuuugggacu

SEQ ID NO: 2357804 - RNA, 19 nt, Homo sapiens
  misc_RNA (1)...(19): siRNA sense strand
caggauuugcagaugaaga

SEQ ID NO: 2357805 - RNA, 19 nt, Homo sapiens
  misc_RNA (1)...(19): siRNA sense strand
gggaaacaccauggaggau

SEQ ID NO: 2357806 - RNA, 19 nt, Homo sapiens
  misc_RNA (1)...(19): siRNA sense strand
guuugauuuccuuggguau

SEQ ID NO: 2357807 - RNA, 19 nt, Homo sapiens
  misc_RNA (1)...(19): siRNA sense strand
auccaaagcaugucugcaa

SEQ ID NO: 2357808 - RNA, 19 nt, Homo sapiens
  misc_RNA (1)...(19): siRNA sense strand
agacgaaacuugucggcuu

SEQ ID NO: 2357809 - RNA, 19 nt, Homo sapiens
  misc_RNA (1)...(19): siRNA sense strand
cagcaagaauucagggauc

SEQ ID NO: 2357810 - RNA, 19 nt, Homo sapiens
  misc_RNA (1)...(19): siRNA sense strand
gcgcaguggugaaccgcuu

SEQ ID NO: 2357811 - RNA, 19 nt, Homo sapiens
  misc_RNA (1)...(19): siRNA sense strand
auggaguugucuaaggaau

SEQ ID NO: 2357812 - RNA, 19 nt, Homo sapiens
  misc_RNA (1)...(19): siRNA sense strand
aagagacaguuuauggaga

SEQ ID NO: 2357813 - RNA, 19 nt, Homo sapiens
  misc_RNA (1)...(19): siRNA sense strand
ggcaagaaacgcaggccca

SEQ ID NO: 2357814 - RNA, 19 nt, Homo sapiens
  misc_RNA (1)...(19): siRNA sense strand
aggaauguggcuucggcua

SEQ ID NO: 2357815 - RNA, 19 nt, Homo sapiens
  misc_RNA (1)...(19): siRNA sense strand
gaauaugcccacagagccu

SEQ ID NO: 2357816 - RNA, 19 nt, Homo sapiens
  misc_RNA (1)...(19): siRNA sense strand
agacgaaacuugucggcuu

SEQ ID NO: 2357817 - RNA, 19 nt, Homo sapiens
  misc_RNA (1)...(19): siRNA sense strand
cagcaagaauucagggauc

SEQ ID NO: 2357818 - RNA, 19 nt, Homo sapiens
  misc_RNA (1)...(19): siRNA sense strand
gcgcaguggugaaccgcuu

SEQ ID NO: 2357819 - RNA, 19 nt, Homo sapiens
  misc_RNA (1)...(19): siRNA sense strand
auggaguugucuaaggaau

SEQ ID NO: 2357820 - RNA, 19 nt, Homo sapiens
  misc_RNA (1)...(19): siRNA sense strand
aagagacaguuuauggaga

SEQ ID NO: 2357821 - RNA, 19 nt, Homo sapiens
  misc_RNA (1)...(19): siRNA sense strand
ggcaagaaacgcaggccca

SEQ ID NO: 2357822 - RNA, 19 nt, Homo sapiens
  misc_RNA (1)...(19): siRNA sense strand
aggaauguggcuucggcua

SEQ ID NO: 2357823 - RNA, 19 nt, Homo sapiens
  misc_RNA (1)...(19): siRNA sense strand
gaauaugcccacagagccu

SEQ ID NO: 2357824 - RNA, 19 nt, Homo sapiens
  misc_RNA (1)...(19): siRNA sense strand
gucuauacgcugaagaaau

SEQ ID NO: 2357825 - RNA, 19 nt, Homo sapiens
  misc_RNA (1)...(19): siRNA sense strand
ugaagaaauuugacccgau

SEQ ID NO: 2357826 - RNA, 19 nt, Homo sapiens
  misc_RNA (1)...(19): siRNA sense strand
ccagcaagaugcaggagga

SEQ ID NO: 2357827 - RNA, 19 nt, Homo sapiens
  misc_RNA (1)...(19): siRNA sense strand
ccuucaucaucgagcucaa

SEQ ID NO: 2357828 - RNA, 19 nt, Homo sapiens
  misc_RNA (1)...(19): siRNA sense strand
agguaugauguuugugaau

SEQ ID NO: 2357829 - RNA, 19 nt, Homo sapiens
  misc_RNA (1)...(19): siRNA sense strand
gugauggagcugaggagga

SEQ ID NO: 2357830 - RNA, 19 nt, Homo sapiens
  misc_RNA (1)...(19): siRNA sense strand
cugaggaggauguagcauu

SEQ ID NO: 2357831 - RNA, 19 nt, Homo sapiens
  misc_RNA (1)...(19): siRNA sense strand
guuucaucccacaggcuaa

SEQ ID NO: 2357832 - RNA, 19 nt, Homo sapiens
  misc_RNA (1)...(19): siRNA sense strand
cuccagagcccgagacagu

SEQ ID NO: 2357833 - RNA, 19 nt, Homo sapiens
  misc_RNA (1)...(19): siRNA sense strand
guuccugggcagagagaaa

SEQ ID NO: 2357834 - RNA, 19 nt, Homo sapiens
  misc_RNA (1)...(19): siRNA sense strand
ccgacaaggcugcaggaaa

SEQ ID NO: 2357835 - RNA, 19 nt, Homo sapiens
  misc_RNA (1)...(19): siRNA sense strand
gcauaugaauuguggagga

SEQ ID NO: 2357836 - RNA, 19 nt, Homo sapiens
  misc_RNA (1)...(19): siRNA sense strand
ggaggaaccuggaggagga

SEQ ID NO: 2357837 - RNA, 19 nt, Homo sapiens
  misc_RNA (1)...(19): siRNA sense strand
acgaaguagacaagcuaua

SEQ ID NO: 2357838 - RNA, 19 nt, Homo sapiens
  misc_RNA (1)...(19): siRNA sense strand
agaugugagcugugaugaa

SEQ ID NO: 2357839 - RNA, 19 nt, Homo sapiens
  misc_RNA (1)...(19): siRNA sense strand
cgggagagcaccagcuaca

SEQ ID NO: 2357840 - RNA, 19 nt, Homo sapiens
  misc_RNA (1)...(19): siRNA sense strand
ugagauggugcuugaggaa

SEQ ID NO: 2357841 - RNA, 19 nt, Homo sapiens
  misc_RNA (1)...(19): siRNA sense strand
agcuauacaagguggagaa

SEQ ID NO: 2357842 - RNA, 19 nt, Homo sapiens
  misc_RNA (1)...(19): siRNA sense strand
uggagaguaaagugagcaa

SEQ ID NO: 2357843 - RNA, 19 nt, Homo sapiens
  misc_RNA (1)...(19): siRNA sense strand
ggauuuauucauugaggca

SEQ ID NO: 2357844 - RNA, 19 nt, Homo sapiens
  misc_RNA (1)...(19): siRNA sense strand
ugcuugaggaagagggaau

SEQ ID NO: 2357845 - RNA, 19 nt, Homo sapiens
  misc_RNA (1)...(19): siRNA sense strand
aauccaucaugaagaagaa

SEQ ID NO: 2357846 - RNA, 19 nt, Homo sapiens
  misc_RNA (1)...(19): siRNA sense strand
ugagcaagcuggugaccga

SEQ ID NO: 2357847 - RNA, 19 nt, Homo sapiens
  misc_RNA (1)...(19): siRNA sense strand
auuuauucauugaggcaga

SEQ ID NO: 2357848 - RNA, 19 nt, Homo sapiens
  misc_RNA (1)...(19): siRNA sense strand
ccucagcuccaaugaacaa

SEQ ID NO: 2357849 - RNA, 19 nt, Homo sapiens
  misc_RNA (1)...(19): siRNA sense strand
caagaauaugcgauacauu

SEQ ID NO: 2357850 - RNA, 19 nt, Homo sapiens
  misc_RNA (1)...(19): siRNA sense strand
gggcagagagaaaggcuac

SEQ ID NO: 2357851 - RNA, 19 nt, Homo sapiens
  misc_RNA (1)...(19): siRNA sense strand
uggacagagauguggacuu

SEQ ID NO: 2357852 - RNA, 19 nt, Homo sapiens
  misc_RNA (1)...(19): siRNA sense strand
ggaucaacacuguagcuca

SEQ ID NO: 2357853 - RNA, 19 nt, Homo sapiens
  misc_RNA (1)...(19): siRNA sense strand
aggccaugagugaggugaa

SEQ ID NO: 2357854 - RNA, 19 nt, Homo sapiens
  misc_RNA (1)...(19): siRNA sense strand
aagagggaaucuauggaga

SEQ ID NO: 2357855 - RNA, 19 nt, Homo sapiens
  misc_RNA (1)...(19): siRNA sense strand
caggugucgccuauagaaa

SEQ ID NO: 2357856 - RNA, 19 nt, Homo sapiens
  misc_RNA (1)...(19): siRNA sense strand
ccaguaugaucgccggaga

SEQ ID NO: 2357857 - RNA, 19 nt, Homo sapiens
  misc_RNA (1)...(19): siRNA sense strand
gcuaaucaagacugagcau

SEQ ID NO: 2357858 - RNA, 19 nt, Homo sapiens
  misc_RNA (1)...(19): siRNA sense strand
ccgaacucgcaaauacaaa

SEQ ID NO: 2357859 - RNA, 19 nt, Homo sapiens
  misc_RNA (1)...(19): siRNA sense strand
aggaggaggaggauggcga

SEQ ID NO: 2357860 - RNA, 19 nt, Homo sapiens
  misc_RNA (1)...(19): siRNA sense strand
uacucaaugccgaggacaa

SEQ ID NO: 2357861 - RNA, 19 nt, Homo sapiens
  misc_RNA (1)...(19): siRNA sense strand
ccggagaggcauggacauu

SEQ ID NO: 2357862 - RNA, 19 nt, Homo sapiens
  misc_RNA (1)...(19): siRNA sense strand
ugaagaggcuggcucgaga

SEQ ID NO: 2357863 - RNA, 19 nt, Homo sapiens
  misc_RNA (1)...(19): siRNA sense strand
caauugugcuucuugguca

SEQ ID NO: 2357864 - RNA, 19 nt, Homo sapiens
  misc_RNA (1)...(19): siRNA sense strand
gaggaggaggauggcgaaa

SEQ ID NO: 2357865 - RNA, 19 nt, Homo sapiens
  misc_RNA (1)...(19): siRNA sense strand
aggauuuccaggagcuaau

SEQ ID NO: 2357866 - RNA, 19 nt, Homo sapiens
  misc_RNA (1)...(19): siRNA sense strand
ggguucaacauccgggaga

SEQ ID NO: 2357867 - RNA, 19 nt, Homo sapiens
  misc_RNA (1)...(19): siRNA sense strand
cauucacagauaugacuaa

SEQ ID NO: 2357868 - RNA, 19 nt, Homo sapiens
  misc_RNA (1)...(19): siRNA sense strand
cauucaaccaacagagcaa

SEQ ID NO: 2357869 - RNA, 19 nt, Homo sapiens
  misc_RNA (1)...(19): siRNA sense strand
ggaaauuugaagacgacau

SEQ ID NO: 2357870 - RNA, 19 nt, Homo sapiens
  misc_RNA (1)...(19): siRNA sense strand
aagaaagcacagagcugaa

SEQ ID NO: 2357871 - RNA, 19 nt, Homo sapiens
  misc_RNA (1)...(19): siRNA sense strand
gugggaaauuugaagacga

SEQ ID NO: 2357872 - RNA, 19 nt, Homo sapiens
  misc_RNA (1)...(19): siRNA sense strand
gggagaacuagguguggga

SEQ ID NO: 2357873 - RNA, 19 nt, Homo sapiens
  misc_RNA (1)...(19): siRNA sense strand
ccaagaaagcacagagcug

SEQ ID NO: 2357874 - RNA, 19 nt, Homo sapiens
  misc_RNA (1)...(19): siRNA sense strand
ggaaggagcagguggaguc

SEQ ID NO: 2357875 - RNA, 19 nt, Homo sapiens
  misc_RNA (1)...(19): siRNA sense strand
gcaaggacuacuaugccua

SEQ ID NO: 2357876 - RNA, 19 nt, Homo sapiens
  misc_RNA (1)...(19): siRNA sense strand
uugaagacgacauugacaa

SEQ ID NO: 2357877 - RNA, 19 nt, Homo sapiens
  misc_RNA (1)...(19): siRNA sense strand
agcacagagcugaacaaua

SEQ ID NO: 2357878 - RNA, 19 nt, Homo sapiens
  misc_RNA (1)...(19): siRNA sense strand
gaaacuucauugaugccaa

SEQ ID NO: 2357879 - RNA, 19 nt, Homo sapiens
  misc_RNA (1)...(19): siRNA sense strand
ccaaagaccuggaucagcu

SEQ ID NO: 2357880 - RNA, 19 nt, Homo sapiens
  misc_RNA (1)...(19): siRNA sense strand
augccaaagaccuggauca

SEQ ID NO: 2357881 - RNA, 19 nt, Homo sapiens
  misc_RNA (1)...(19): siRNA sense strand
ccaucgugcuggagggcaa

SEQ ID NO: 2357882 - RNA, 19 nt, Homo sapiens
  misc_RNA (1)...(19): siRNA sense strand
accuagauaaagaggauaa

SEQ ID NO: 2357883 - RNA, 19 nt, Homo sapiens
  misc_RNA (1)...(19): siRNA sense strand
ggacaaagauguuacucgu

SEQ ID NO: 2357884 - RNA, 19 nt, Homo sapiens
  misc_RNA (1)...(19): siRNA sense strand
cuuuguagcaccaagaaaa

SEQ ID NO: 2357885 - RNA, 19 nt, Homo sapiens
  misc_RNA (1)...(19): siRNA sense strand
acaaagauguuacucguga

SEQ ID NO: 2357886 - RNA, 19 nt, Homo sapiens
  misc_RNA (1)...(19): siRNA sense strand
cggagugugcagagagaaa

SEQ ID NO: 2357887 - RNA, 19 nt, Homo sapiens
  misc_RNA (1)...(19): siRNA sense strand
uggaagaacaagaggauca

SEQ ID NO: 2357888 - RNA, 19 nt, Homo sapiens
  misc_RNA (1)...(19): siRNA sense strand
auucaaauguggaagaaca

SEQ ID NO: 2357889 - RNA, 19 nt, Homo sapiens
  misc_RNA (1)...(19): siRNA sense strand
agaugaaagaagugacgaa

SEQ ID NO: 2357890 - RNA, 19 nt, Homo sapiens
  misc_RNA (1)...(19): siRNA sense strand
aggaaagggaagaagaaca

SEQ ID NO: 2357891 - RNA, 19 nt, Homo sapiens
  misc_RNA (1)...(19): siRNA sense strand
ggugagaagccuuacgaau

SEQ ID NO: 2357892 - RNA, 19 nt, Homo sapiens
  misc_RNA (1)...(19): siRNA sense strand
cuguggaguugcaggauau

SEQ ID NO: 2357893 - RNA, 19 nt, Homo sapiens
  misc_RNA (1)...(19): siRNA sense strand
gccugaaggaggaggaaaa

SEQ ID NO: 2357894 - RNA, 19 nt, Homo sapiens
  misc_RNA (1)...(19): siRNA sense strand
gagaagagguucaagugca

SEQ ID NO: 2357895 - RNA, 19 nt, Homo sapiens
  misc_RNA (1)...(19): siRNA sense strand
agccagagucaaagaggaa

SEQ ID NO: 2357896 - RNA, 19 nt, Homo sapiens
  misc_RNA (1)...(19): siRNA sense strand
guggagaacucguccgaca

SEQ ID NO: 2357897 - RNA, 19 nt, Homo sapiens
  misc_RNA (1)...(19): siRNA sense strand
aagaaugagaagagguuca

SEQ ID NO: 2357898 - RNA, 19 nt, Homo sapiens
  misc_RNA (1)...(19): siRNA sense strand
gcgaagggauggaaggaag

SEQ ID NO: 2357899 - RNA, 19 nt, Homo sapiens
  misc_RNA (1)...(19): siRNA sense strand
agaaagacaaagggagcaa

SEQ ID NO: 2357900 - RNA, 19 nt, Homo sapiens
  misc_RNA (1)...(19): siRNA sense strand
acaagaaagaggaagcaga

SEQ ID NO: 2357901 - RNA, 19 nt, Homo sapiens
  misc_RNA (1)...(19): siRNA sense strand
ucgaggaagagcaggagaa

SEQ ID NO: 2357902 - RNA, 19 nt, Homo sapiens
  misc_RNA (1)...(19): siRNA sense strand
gcagaaacacggcgaaaau

SEQ ID NO: 2357903 - RNA, 19 nt, Homo sapiens
  misc_RNA (1)...(19): siRNA sense strand
gggaagaagaacaagaaag

SEQ ID NO: 2357904 - RNA, 19 nt, Homo sapiens
  misc_RNA (1)...(19): siRNA sense strand
cagagaaaccacagccaga

SEQ ID NO: 2357905 - RNA, 19 nt, Homo sapiens
  misc_RNA (1)...(19): siRNA sense strand
ucaggaaagggaagaagaa

SEQ ID NO: 2357906 - RNA, 19 nt, Homo sapiens
  misc_RNA (1)...(19): siRNA sense strand
caaguaaauugaagcgcca

SEQ ID NO: 2357907 - RNA, 19 nt, Homo sapiens
  misc_RNA (1)...(19): siRNA sense strand
ggccauuaguauccagcaa

SEQ ID NO: 2357908 - RNA, 19 nt, Homo sapiens
  misc_RNA (1)...(19): siRNA sense strand
agcuaugccagcagagaua

SEQ ID NO: 2357909 - RNA, 19 nt, Homo sapiens
  misc_RNA (1)...(19): siRNA sense strand
agucaaagaggaaguggau

SEQ ID NO: 2357910 - RNA, 19 nt, Homo sapiens
  misc_RNA (1)...(19): siRNA sense strand
aggaagaaguggagcuggu

SEQ ID NO: 2357911 - RNA, 19 nt, Homo sapiens
  misc_RNA (1)...(19): siRNA sense strand
cugcagaaacacggcgaaa

SEQ ID NO: 2357912 - RNA, 19 nt, Homo sapiens
  misc_RNA (1)...(19): siRNA sense strand
aggagaagaaccaguuauu

SEQ ID NO: 2357913 - RNA, 19 nt, Homo sapiens
  misc_RNA (1)...(19): siRNA sense strand
cugaaagaacaaaggagca

SEQ ID NO: 2357914 - RNA, 19 nt, Homo sapiens
  misc_RNA (1)...(19): siRNA sense strand
gugcagagagaaagaccau

SEQ ID NO: 2357915 - RNA, 19 nt, Homo sapiens
  misc_RNA (1)...(19): siRNA sense strand
augaaagaagugacgaaau

SEQ ID NO: 2357916 - RNA, 19 nt, Homo sapiens
  misc_RNA (1)...(19): siRNA sense strand
agagauaccuacaagcuga

SEQ ID NO: 2357917 - RNA, 19 nt, Homo sapiens
  misc_RNA (1)...(19): siRNA sense strand
gcaauaaauguuuccgaca

SEQ ID NO: 2357918 - RNA, 19 nt, Homo sapiens
  misc_RNA (1)...(19): siRNA sense strand
ccuacaagcugaaacgcca

SEQ ID NO: 2357919 - RNA, 19 nt, Homo sapiens
  misc_RNA (1)...(19): siRNA sense strand
agaaagaggaagcagacca

SEQ ID NO: 2357920 - RNA, 19 nt, Homo sapiens
  misc_RNA (1)...(19): siRNA sense strand
ccugucgccugcagagaaa

SEQ ID NO: 2357921 - RNA, 19 nt, Homo sapiens
  misc_RNA (1)...(19): siRNA sense strand
uggccagugaagacaguaa

SEQ ID NO: 2357922 - RNA, 19 nt, Homo sapiens
  misc_RNA (1)...(19): siRNA sense strand
guuaacacccacacaggaa

SEQ ID NO: 2357923 - RNA, 19 nt, Homo sapiens
  misc_RNA (1)...(19): siRNA sense strand
cugaaacgccacaugagaa

SEQ ID NO: 2357924 - RNA, 19 nt, Homo sapiens
  misc_RNA (1)...(19): siRNA sense strand
auaagaaugagaagagguu

SEQ ID NO: 2357925 - RNA, 19 nt, Homo sapiens
  misc_RNA (1)...(19): siRNA sense strand
aaccacagccagagucaaa

SEQ ID NO: 2357926 - RNA, 19 nt, Homo sapiens
  misc_RNA (1)...(19): siRNA sense strand
cuagugaguuggaggccga

SEQ ID NO: 2357927 - RNA, 19 nt, Homo sapiens
  misc_RNA (1)...(19): siRNA sense strand
caaauguggaagaacaaga

SEQ ID NO: 2357928 - RNA, 19 nt, Homo sapiens
  misc_RNA (1)...(19): siRNA sense strand
ggaagaacaagaggaucaa

SEQ ID NO: 2357929 - RNA, 19 nt, Homo sapiens
  misc_RNA (1)...(19): siRNA sense strand
ccaguguggaggcaaguaa

SEQ ID NO: 2357930 - RNA, 19 nt, Homo sapiens
  misc_RNA (1)...(19): siRNA sense strand
agggaagaagaacaagaaa

SEQ ID NO: 2357931 - RNA, 19 nt, Homo sapiens
  misc_RNA (1)...(19): siRNA sense strand
uggaaacaaugucaggaga

SEQ ID NO: 2357932 - RNA, 19 nt, Homo sapiens
  misc_RNA (1)...(19): siRNA sense strand
gagugugcagagagaaaga

SEQ ID NO: 2357933 - RNA, 19 nt, Homo sapiens
  misc_RNA (1)...(19): siRNA sense strand
aguuauuggcugaaagaac

SEQ ID NO: 2357934 - RNA, 19 nt, Homo sapiens
  misc_RNA (1)...(19): siRNA sense strand
agaaccaguuauuggcuga

SEQ ID NO: 2357935 - RNA, 19 nt, Homo sapiens
  misc_RNA (1)...(19): siRNA sense strand
uguggaagaacaagaggau

SEQ ID NO: 2357936 - RNA, 19 nt, Homo sapiens
  misc_RNA (1)...(19): siRNA sense strand
ccagagucaaagaggaagu

SEQ ID NO: 2357937 - RNA, 19 nt, Homo sapiens
  misc_RNA (1)...(19): siRNA sense strand
gagucaaagaggaagugga

SEQ ID NO: 2357938 - RNA, 19 nt, Homo sapiens
  misc_RNA (1)...(19): siRNA sense strand
gcugaaaaggccaaaucua

SEQ ID NO: 2357939 - RNA, 19 nt, Homo sapiens
  misc_RNA (1)...(19): siRNA sense strand
uuaaauguuccaugugcaa

SEQ ID NO: 2357940 - RNA, 19 nt, Homo sapiens
  misc_RNA (1)...(19): siRNA sense strand
ccucauucagcaccagaaa

SEQ ID NO: 2357941 - RNA, 19 nt, Homo sapiens
  misc_RNA (1)...(19): siRNA sense strand
cugcacagacauucggaga

SEQ ID NO: 2357942 - RNA, 19 nt, Homo sapiens
  misc_RNA (1)...(19): siRNA sense strand
gcucuagaggagaauguga

SEQ ID NO: 2357943 - RNA, 19 nt, Homo sapiens
  misc_RNA (1)...(19): siRNA sense strand
ucaaagaaagacaaaggga

SEQ ID NO: 2357944 - RNA, 19 nt, Homo sapiens
  misc_RNA (1)...(19): siRNA sense strand
aaagacaaagggagcaaaa

SEQ ID NO: 2357945 - RNA, 19 nt, Homo sapiens
  misc_RNA (1)...(19): siRNA sense strand
uggagauguucgagggcga

SEQ ID NO: 2357946 - RNA, 19 nt, Homo sapiens
  misc_RNA (1)...(19): siRNA sense strand
gggaugaucuggaugagca

SEQ ID NO: 2357947 - RNA, 19 nt, Homo sapiens
  misc_RNA (1)...(19): siRNA sense strand
ugaagaaugugaaggaggu

SEQ ID NO: 2357948 - RNA, 19 nt, Homo sapiens
  misc_RNA (1)...(19): siRNA sense strand
ccucugacacgguggagau

SEQ ID NO: 2357949 - RNA, 19 nt, Homo sapiens
  misc_RNA (1)...(19): siRNA sense strand
ggacguggcugaagaggug

SEQ ID NO: 2357950 - RNA, 19 nt, Homo sapiens
  misc_RNA (1)...(19): siRNA sense strand
uggagauguucgagggcga

SEQ ID NO: 2357951 - RNA, 19 nt, Homo sapiens
  misc_RNA (1)...(19): siRNA sense strand
gggaugaucuggaugagca

SEQ ID NO: 2357952 - RNA, 19 nt, Homo sapiens
  misc_RNA (1)...(19): siRNA sense strand
ugaagaaugugaaggaggu

SEQ ID NO: 2357953 - RNA, 19 nt, Homo sapiens
  misc_RNA (1)...(19): siRNA sense strand
ccucugacacgguggagau

SEQ ID NO: 2357954 - RNA, 19 nt, Homo sapiens
  misc_RNA (1)...(19): siRNA sense strand
ggacguggcugaagaggug

SEQ ID NO: 2357955 - RNA, 19 nt, Homo sapiens
  misc_RNA (1)...(19): siRNA sense strand
uggagauguucgagggcga

SEQ ID NO: 2357956 - RNA, 19 nt, Homo sapiens
  misc_RNA (1)...(19): siRNA sense strand
gggaugaucuggaugagca

SEQ ID NO: 2357957 - RNA, 19 nt, Homo sapiens
  misc_RNA (1)...(19): siRNA sense strand
ugaagaaugugaaggaggu

SEQ ID NO: 2357958 - RNA, 19 nt, Homo sapiens
  misc_RNA (1)...(19): siRNA sense strand
ccucugacacgguggagau

SEQ ID NO: 2357959 - RNA, 19 nt, Homo sapiens
  misc_RNA (1)...(19): siRNA sense strand
ggacguggcugaagaggug

SEQ ID NO: 2357960 - RNA, 19 nt, Homo sapiens
  misc_RNA (1)...(19): siRNA sense strand
ggaagaaauuaaaggggaa

SEQ ID NO: 2357961 - RNA, 19 nt, Homo sapiens
  misc_RNA (1)...(19): siRNA sense strand
cccuaaaacuguuggaaga

SEQ ID NO: 2357962 - RNA, 19 nt, Homo sapiens
  misc_RNA (1)...(19): siRNA sense strand
ucguaaaggacuucguaau

SEQ ID NO: 2357963 - RNA, 19 nt, Homo sapiens
  misc_RNA (1)...(19): siRNA sense strand
aggcagaucuguugcagga

SEQ ID NO: 2357964 - RNA, 19 nt, Homo sapiens
  misc_RNA (1)...(19): siRNA sense strand
cuugaagguuaccgagaga

SEQ ID NO: 2357965 - RNA, 19 nt, Homo sapiens
  misc_RNA (1)...(19): siRNA sense strand
gauccaaaugagagaccuu

SEQ ID NO: 2357966 - RNA, 19 nt, Homo sapiens
  misc_RNA (1)...(19): siRNA sense strand
acugaacuguuuaggaaaa

SEQ ID NO: 2357967 - RNA, 19 nt, Homo sapiens
  misc_RNA (1)...(19): siRNA sense strand
cccucaaauuagauaaaga

SEQ ID NO: 2357968 - RNA, 19 nt, Homo sapiens
  misc_RNA (1)...(19): siRNA sense strand
cuugcagcguucugauaaa

SEQ ID NO: 2357969 - RNA, 19 nt, Homo sapiens
  misc_RNA (1)...(19): siRNA sense strand
ggggaaauacuguugaaau

SEQ ID NO: 2357970 - RNA, 19 nt, Homo sapiens
  misc_RNA (1)...(19): siRNA sense strand
ugaagguuaccgagagaca

SEQ ID NO: 2357971 - RNA, 19 nt, Homo sapiens
  misc_RNA (1)...(19): siRNA sense strand
auuaugaaggcuuggaaaa

SEQ ID NO: 2357972 - RNA, 19 nt, Homo sapiens
  misc_RNA (1)...(19): siRNA sense strand
cugaacauggagagacuuu

SEQ ID NO: 2357973 - RNA, 19 nt, Homo sapiens
  misc_RNA (1)...(19): siRNA sense strand
auggagagacuuuggcuau

SEQ ID NO: 2357974 - RNA, 19 nt, Homo sapiens
  misc_RNA (1)...(19): siRNA sense strand
augaacagaagcaguacaa

SEQ ID NO: 2357975 - RNA, 19 nt, Homo sapiens
  misc_RNA (1)...(19): siRNA sense strand
gaagaaauuaaaggggaaa

SEQ ID NO: 2357976 - RNA, 19 nt, Homo sapiens
  misc_RNA (1)...(19): siRNA sense strand
gauuaaaagaagccaguga

SEQ ID NO: 2357977 - RNA, 19 nt, Homo sapiens
  misc_RNA (1)...(19): siRNA sense strand
gugauaaacuuuuggugga

SEQ ID NO: 2357978 - RNA, 19 nt, Homo sapiens
  misc_RNA (1)...(19): siRNA sense strand
gcacuuuagaagagaggcu

SEQ ID NO: 2357979 - RNA, 19 nt, Homo sapiens
  misc_RNA (1)...(19): siRNA sense strand
guuuguucguaaaggacuu

SEQ ID NO: 2357980 - RNA, 19 nt, Homo sapiens
  misc_RNA (1)...(19): siRNA sense strand
uauuaugaaggcuuggaaa

SEQ ID NO: 2357981 - RNA, 19 nt, Homo sapiens
  misc_RNA (1)...(19): siRNA sense strand
uguugaaauugggaagauu

SEQ ID NO: 2357982 - RNA, 19 nt, Homo sapiens
  misc_RNA (1)...(19): siRNA sense strand
gcuauaaaauguuaccgaa

SEQ ID NO: 2357983 - RNA, 19 nt, Homo sapiens
  misc_RNA (1)...(19): siRNA sense strand
ugaagaaauuaguaagcag

SEQ ID NO: 2357984 - RNA, 19 nt, Homo sapiens
  misc_RNA (1)...(19): siRNA sense strand
ggaagaaauuaaaggggaa

SEQ ID NO: 2357985 - RNA, 19 nt, Homo sapiens
  misc_RNA (1)...(19): siRNA sense strand
ggacaguauucuuuggcuu

SEQ ID NO: 2357986 - RNA, 19 nt, Homo sapiens
  misc_RNA (1)...(19): siRNA sense strand
cccuaaaacuguuggaaga

SEQ ID NO: 2357987 - RNA, 19 nt, Homo sapiens
  misc_RNA (1)...(19): siRNA sense strand
ucguaaaggacuucguaau

SEQ ID NO: 2357988 - RNA, 19 nt, Homo sapiens
  misc_RNA (1)...(19): siRNA sense strand
aggcagaucuguugcagga

SEQ ID NO: 2357989 - RNA, 19 nt, Homo sapiens
  misc_RNA (1)...(19): siRNA sense strand
cuugaagguuaccgagaga

SEQ ID NO: 2357990 - RNA, 19 nt, Homo sapiens
  misc_RNA (1)...(19): siRNA sense strand
gauccaaaugagagaccuu

SEQ ID NO: 2357991 - RNA, 19 nt, Homo sapiens
  misc_RNA (1)...(19): siRNA sense strand
acugaacuguuuaggaaaa

SEQ ID NO: 2357992 - RNA, 19 nt, Homo sapiens
  misc_RNA (1)...(19): siRNA sense strand
cccucaaauuagauaaaga

SEQ ID NO: 2357993 - RNA, 19 nt, Homo sapiens
  misc_RNA (1)...(19): siRNA sense strand
ggcacagcacuuugauaaa

SEQ ID NO: 2357994 - RNA, 19 nt, Homo sapiens
  misc_RNA (1)...(19): siRNA sense strand
cuugcagcguucugauaaa

SEQ ID NO: 2357995 - RNA, 19 nt, Homo sapiens
  misc_RNA (1)...(19): siRNA sense strand
ggggaaauacuguugaaau

SEQ ID NO: 2357996 - RNA, 19 nt, Homo sapiens
  misc_RNA (1)...(19): siRNA sense strand
ugaagguuaccgagagaca

SEQ ID NO: 2357997 - RNA, 19 nt, Homo sapiens
  misc_RNA (1)...(19): siRNA sense strand
auuaugaaggcuuggaaaa

SEQ ID NO: 2357998 - RNA, 19 nt, Homo sapiens
  misc_RNA (1)...(19): siRNA sense strand
cugaacauggagagacuuu

SEQ ID NO: 2357999 - RNA, 19 nt, Homo sapiens
  misc_RNA (1)...(19): siRNA sense strand
auggagagacuuuggcuau

SEQ ID NO: 2358000 - RNA, 19 nt, Homo sapiens
  misc_RNA (1)...(19): siRNA sense strand
gaagaaauuaaaggggaaa

SEQ ID NO: 2358001 - RNA, 19 nt, Homo sapiens
  misc_RNA (1)...(19): siRNA sense strand
gauuaaaagaagccaguga

SEQ ID NO: 2358002 - RNA, 19 nt, Homo sapiens
  misc_RNA (1)...(19): siRNA sense strand
augaacagaagcaguacaa

SEQ ID NO: 2358003 - RNA, 19 nt, Homo sapiens
  misc_RNA (1)...(19): siRNA sense strand
gugauaaacuuuuggugga

SEQ ID NO: 2358004 - RNA, 19 nt, Homo sapiens
  misc_RNA (1)...(19): siRNA sense strand
gcacuuuagaagagaggcu

SEQ ID NO: 2358005 - RNA, 19 nt, Homo sapiens
  misc_RNA (1)...(19): siRNA sense strand
guuuguucguaaaggacuu

SEQ ID NO: 2358006 - RNA, 19 nt, Homo sapiens
  misc_RNA (1)...(19): siRNA sense strand
uauuaugaaggcuuggaaa

SEQ ID NO: 2358007 - RNA, 19 nt, Homo sapiens
  misc_RNA (1)...(19): siRNA sense strand
ucuuaaaacgugugacuuu

SEQ ID NO: 2358008 - RNA, 19 nt, Homo sapiens
  misc_RNA (1)...(19): siRNA sense strand
uguugaaauugggaagauu

SEQ ID NO: 2358009 - RNA, 19 nt, Homo sapiens
  misc_RNA (1)...(19): siRNA sense strand
gcuauaaaauguuaccgaa

SEQ ID NO: 2358010 - RNA, 19 nt, Homo sapiens
  misc_RNA (1)...(19): siRNA sense strand
ugaagaaauuaguaagcag

SEQ ID NO: 2358011 - RNA, 19 nt, Homo sapiens
  misc_RNA (1)...(19): siRNA sense strand
guucagaggaguuggacca

SEQ ID NO: 2358012 - RNA, 19 nt, Homo sapiens
  misc_RNA (1)...(19): siRNA sense strand
cagaccucacaaagagaaa

SEQ ID NO: 2358013 - RNA, 19 nt, Homo sapiens
  misc_RNA (1)...(19): siRNA sense strand
guucagaggaguuggacca

SEQ ID NO: 2358014 - RNA, 19 nt, Homo sapiens
  misc_RNA (1)...(19): siRNA sense strand
cagaccucacaaagagaaa

SEQ ID NO: 2358015 - RNA, 19 nt, Homo sapiens
  misc_RNA (1)...(19): siRNA sense strand
agaagaugggagagagauu

SEQ ID NO: 2358016 - RNA, 19 nt, Homo sapiens
  misc_RNA (1)...(19): siRNA sense strand
guggaagauaucagaggaa

SEQ ID NO: 2358017 - RNA, 19 nt, Homo sapiens
  misc_RNA (1)...(19): siRNA sense strand
aaagaagaugggagagaga

SEQ ID NO: 2358018 - RNA, 19 nt, Homo sapiens
  misc_RNA (1)...(19): siRNA sense strand
agauaaaucaaaugagcca

SEQ ID NO: 2358019 - RNA, 19 nt, Homo sapiens
  misc_RNA (1)...(19): siRNA sense strand
auccaaagaagaugggaga

SEQ ID NO: 2358020 - RNA, 19 nt, Homo sapiens
  misc_RNA (1)...(19): siRNA sense strand
ucagagacuucaaggugga

SEQ ID NO: 2358021 - RNA, 19 nt, Homo sapiens
  misc_RNA (1)...(19): siRNA sense strand
agaagaugggagagagauu

SEQ ID NO: 2358022 - RNA, 19 nt, Homo sapiens
  misc_RNA (1)...(19): siRNA sense strand
guggaagauaucagaggaa

SEQ ID NO: 2358023 - RNA, 19 nt, Homo sapiens
  misc_RNA (1)...(19): siRNA sense strand
aaagaagaugggagagaga

SEQ ID NO: 2358024 - RNA, 19 nt, Homo sapiens
  misc_RNA (1)...(19): siRNA sense strand
agauaaaucaaaugagcca

SEQ ID NO: 2358025 - RNA, 19 nt, Homo sapiens
  misc_RNA (1)...(19): siRNA sense strand
auccaaagaagaugggaga

SEQ ID NO: 2358026 - RNA, 19 nt, Homo sapiens
  misc_RNA (1)...(19): siRNA sense strand
guguuaucaucgaggaacu

SEQ ID NO: 2358027 - RNA, 19 nt, Homo sapiens
  misc_RNA (1)...(19): siRNA sense strand
acagauaccuucagagggu

SEQ ID NO: 2358028 - RNA, 19 nt, Homo sapiens
  misc_RNA (1)...(19): siRNA sense strand
gcgaagaauggcacaggga

SEQ ID NO: 2358029 - RNA, 19 nt, Homo sapiens
  misc_RNA (1)...(19): siRNA sense strand
cgaagaauggcacagggaa

SEQ ID NO: 2358030 - RNA, 19 nt, Homo sapiens
  misc_RNA (1)...(19): siRNA sense strand
cuuaauugccccaggaaca

SEQ ID NO: 2358031 - RNA, 19 nt, Homo sapiens
  misc_RNA (1)...(19): siRNA sense strand
agggauggcgagaaguauu

SEQ ID NO: 2358032 - RNA, 19 nt, Homo sapiens
  misc_RNA (1)...(19): siRNA sense strand
ucagagacuucaaggugga

SEQ ID NO: 2358033 - RNA, 19 nt, Homo sapiens
  misc_RNA (1)...(19): siRNA sense strand
agacaagcaagaagggaga

SEQ ID NO: 2358034 - RNA, 19 nt, Homo sapiens
  misc_RNA (1)...(19): siRNA sense strand
cuucauuugcauacggaaa

SEQ ID NO: 2358035 - RNA, 19 nt, Homo sapiens
  misc_RNA (1)...(19): siRNA sense strand
gcaccgaagaagugaaaau

SEQ ID NO: 2358036 - RNA, 19 nt, Homo sapiens
  misc_RNA (1)...(19): siRNA sense strand
aagcaagaagggagaccua

SEQ ID NO: 2358037 - RNA, 19 nt, Homo sapiens
  misc_RNA (1)...(19): siRNA sense strand
uguucuugguguugggcaa

SEQ ID NO: 2358038 - RNA, 19 nt, Homo sapiens
  misc_RNA (1)...(19): siRNA sense strand
agauaugugcccuggagaa

SEQ ID NO: 2358039 - RNA, 19 nt, Homo sapiens
  misc_RNA (1)...(19): siRNA sense strand
aacaaauagacauggacaa

SEQ ID NO: 2358040 - RNA, 19 nt, Homo sapiens
  misc_RNA (1)...(19): siRNA sense strand
aaacaaauagacauggaca

SEQ ID NO: 2358041 - RNA, 19 nt, Homo sapiens
  misc_RNA (1)...(19): siRNA sense strand
guguugggcaagucauaaa

SEQ ID NO: 2358042 - RNA, 19 nt, Homo sapiens
  misc_RNA (1)...(19): siRNA sense strand
cauacggaaaggaaggcua

SEQ ID NO: 2358043 - RNA, 19 nt, Homo sapiens
  misc_RNA (1)...(19): siRNA sense strand
aggcaagauuccaccggau

SEQ ID NO: 2358044 - RNA, 19 nt, Homo sapiens
  misc_RNA (1)...(19): siRNA sense strand
ccaaaggaccacggagcau

SEQ ID NO: 2358045 - RNA, 19 nt, Homo sapiens
  misc_RNA (1)...(19): siRNA sense strand
agacaagcaagaagggaga

SEQ ID NO: 2358046 - RNA, 19 nt, Homo sapiens
  misc_RNA (1)...(19): siRNA sense strand
cuucauuugcauacggaaa

SEQ ID NO: 2358047 - RNA, 19 nt, Homo sapiens
  misc_RNA (1)...(19): siRNA sense strand
gcaccgaagaagugaaaau

SEQ ID NO: 2358048 - RNA, 19 nt, Homo sapiens
  misc_RNA (1)...(19): siRNA sense strand
aagcaagaagggagaccua

SEQ ID NO: 2358049 - RNA, 19 nt, Homo sapiens
  misc_RNA (1)...(19): siRNA sense strand
uguucuugguguugggcaa

SEQ ID NO: 2358050 - RNA, 19 nt, Homo sapiens
  misc_RNA (1)...(19): siRNA sense strand
agauaugugcccuggagaa

SEQ ID NO: 2358051 - RNA, 19 nt, Homo sapiens
  misc_RNA (1)...(19): siRNA sense strand
aacaaauagacauggacaa

SEQ ID NO: 2358052 - RNA, 19 nt, Homo sapiens
  misc_RNA (1)...(19): siRNA sense strand
aaacaaauagacauggaca

SEQ ID NO: 2358053 - RNA, 19 nt, Homo sapiens
  misc_RNA (1)...(19): siRNA sense strand
guguugggcaagucauaaa

SEQ ID NO: 2358054 - RNA, 19 nt, Homo sapiens
  misc_RNA (1)...(19): siRNA sense strand
cauacggaaaggaaggcua

SEQ ID NO: 2358055 - RNA, 19 nt, Homo sapiens
  misc_RNA (1)...(19): siRNA sense strand
aggcaagauuccaccggau

SEQ ID NO: 2358056 - RNA, 19 nt, Homo sapiens
  misc_RNA (1)...(19): siRNA sense strand
ccaaaggaccacggagcau

SEQ ID NO: 2358057 - RNA, 19 nt, Homo sapiens
  misc_RNA (1)...(19): siRNA sense strand
aagucgaagaugagaauau

SEQ ID NO: 2358058 - RNA, 19 nt, Homo sapiens
  misc_RNA (1)...(19): siRNA sense strand
acuacaaagccgaagucaa

SEQ ID NO: 2358059 - RNA, 19 nt, Homo sapiens
  misc_RNA (1)...(19): siRNA sense strand
ccacaguuccauaagguga

SEQ ID NO: 2358060 - RNA, 19 nt, Homo sapiens
  misc_RNA (1)...(19): siRNA sense strand
ucggaaaauugaaggcuau

SEQ ID NO: 2358061 - RNA, 19 nt, Homo sapiens
  misc_RNA (1)...(19): siRNA sense strand
gugaaugcccacauggaga

SEQ ID NO: 2358062 - RNA, 19 nt, Homo sapiens
  misc_RNA (1)...(19): siRNA sense strand
ccaacaaccaagaugagga

SEQ ID NO: 2358063 - RNA, 19 nt, Homo sapiens
  misc_RNA (1)...(19): siRNA sense strand
acaaucaacuguagaccca

SEQ ID NO: 2358064 - RNA, 19 nt, Homo sapiens
  misc_RNA (1)...(19): siRNA sense strand
gggccauaguggacagcgu

SEQ ID NO: 2358065 - RNA, 19 nt, Homo sapiens
  misc_RNA (1)...(19): siRNA sense strand
caagguuacugguugccua

SEQ ID NO: 2358066 - RNA, 19 nt, Homo sapiens
  misc_RNA (1)...(19): siRNA sense strand
guccaaugacuucggaaaa

SEQ ID NO: 2358067 - RNA, 19 nt, Homo sapiens
  misc_RNA (1)...(19): siRNA sense strand
uuucggagcugguggccuu

SEQ ID NO: 2358068 - RNA, 19 nt, Homo sapiens
  misc_RNA (1)...(19): siRNA sense strand
aagucgaagaugagaauau

SEQ ID NO: 2358069 - RNA, 19 nt, Homo sapiens
  misc_RNA (1)...(19): siRNA sense strand
acuacaaagccgaagucaa

SEQ ID NO: 2358070 - RNA, 19 nt, Homo sapiens
  misc_RNA (1)...(19): siRNA sense strand
ccacaguuccauaagguga

SEQ ID NO: 2358071 - RNA, 19 nt, Homo sapiens
  misc_RNA (1)...(19): siRNA sense strand
ucggaaaauugaaggcuau

SEQ ID NO: 2358072 - RNA, 19 nt, Homo sapiens
  misc_RNA (1)...(19): siRNA sense strand
gugaaugcccacauggaga

SEQ ID NO: 2358073 - RNA, 19 nt, Homo sapiens
  misc_RNA (1)...(19): siRNA sense strand
ccaacaaccaagaugagga

SEQ ID NO: 2358074 - RNA, 19 nt, Homo sapiens
  misc_RNA (1)...(19): siRNA sense strand
acaaucaacuguagaccca

SEQ ID NO: 2358075 - RNA, 19 nt, Homo sapiens
  misc_RNA (1)...(19): siRNA sense strand
gggccauaguggacagcgu

SEQ ID NO: 2358076 - RNA, 19 nt, Homo sapiens
  misc_RNA (1)...(19): siRNA sense strand
caagguuacugguugccua

SEQ ID NO: 2358077 - RNA, 19 nt, Homo sapiens
  misc_RNA (1)...(19): siRNA sense strand
guccaaugacuucggaaaa

SEQ ID NO: 2358078 - RNA, 19 nt, Homo sapiens
  misc_RNA (1)...(19): siRNA sense strand
uuucggagcugguggccuu

SEQ ID NO: 2358079 - RNA, 19 nt, Homo sapiens
  misc_RNA (1)...(19): siRNA sense strand
gagaaggggaggugggaaa

SEQ ID NO: 2358080 - RNA, 19 nt, Homo sapiens
  misc_RNA (1)...(19): siRNA sense strand
cagccaaauacguggaaga

SEQ ID NO: 2358081 - RNA, 19 nt, Homo sapiens
  misc_RNA (1)...(19): siRNA sense strand
uggaagacaaagagaagau

SEQ ID NO: 2358082 - RNA, 19 nt, Homo sapiens
  misc_RNA (1)...(19): siRNA sense strand
gaacaaugcaguuggugga

SEQ ID NO: 2358083 - RNA, 19 nt, Homo sapiens
  misc_RNA (1)...(19): siRNA sense strand
gugaagaccuauugcagca

SEQ ID NO: 2358084 - RNA, 19 nt, Homo sapiens
  misc_RNA (1)...(19): siRNA sense strand
ccuucagcgacgagggcaa

SEQ ID NO: 2358085 - RNA, 19 nt, Homo sapiens
  misc_RNA (1)...(19): siRNA sense strand
aguucugagacuugacaaa

SEQ ID NO: 2358086 - RNA, 19 nt, Homo sapiens
  misc_RNA (1)...(19): siRNA sense strand
uagugaagcuccugggacu

SEQ ID NO: 2358087 - RNA, 19 nt, Homo sapiens
  misc_RNA (1)...(19): siRNA sense strand
gguuacgaguucugagacu

SEQ ID NO: 2358088 - RNA, 19 nt, Homo sapiens
  misc_RNA (1)...(19): siRNA sense strand
acaaacggucuguggugaa

SEQ ID NO: 2358089 - RNA, 19 nt, Homo sapiens
  misc_RNA (1)...(19): siRNA sense strand
ucacuggagaugagaacau

SEQ ID NO: 2358090 - RNA, 19 nt, Homo sapiens
  misc_RNA (1)...(19): siRNA sense strand
acguggaagacaaagagaa

SEQ ID NO: 2358091 - RNA, 19 nt, Homo sapiens
  misc_RNA (1)...(19): siRNA sense strand
gggacaggggcaaggagaa

SEQ ID NO: 2358092 - RNA, 19 nt, Homo sapiens
  misc_RNA (1)...(19): siRNA sense strand
ccucaggaaguuagggacu

SEQ ID NO: 2358093 - RNA, 19 nt, Homo sapiens
  misc_RNA (1)...(19): siRNA sense strand
cguggaagacaaagagaag

SEQ ID NO: 2358094 - RNA, 19 nt, Homo sapiens
  misc_RNA (1)...(19): siRNA sense strand
aguugguggagcuggcaaa

SEQ ID NO: 2358095 - RNA, 19 nt, Homo sapiens
  misc_RNA (1)...(19): siRNA sense strand
cgucaucacugcugcgacu

SEQ ID NO: 2358096 - RNA, 19 nt, Homo sapiens
  misc_RNA (1)...(19): siRNA sense strand
cggccaggcugcaaaagaa

SEQ ID NO: 2358097 - RNA, 19 nt, Homo sapiens
  misc_RNA (1)...(19): siRNA sense strand
aguuagggacuuucagaga

SEQ ID NO: 2358098 - RNA, 19 nt, Homo sapiens
  misc_RNA (1)...(19): siRNA sense strand
cuuagaaggcacagagaga

SEQ ID NO: 2358099 - RNA, 19 nt, Homo sapiens
  misc_RNA (1)...(19): siRNA sense strand
gaauggaagaucaggguca

SEQ ID NO: 2358100 - RNA, 19 nt, Homo sapiens
  misc_RNA (1)...(19): siRNA sense strand
uagaaggcacagagagaau

SEQ ID NO: 2358101 - RNA, 19 nt, Homo sapiens
  misc_RNA (1)...(19): siRNA sense strand
auucuugguccuagaguaa

SEQ ID NO: 2358102 - RNA, 19 nt, Homo sapiens
  misc_RNA (1)...(19): siRNA sense strand
cugaaaagggagugauuau

SEQ ID NO: 2358103 - RNA, 19 nt, Homo sapiens
  misc_RNA (1)...(19): siRNA sense strand
uggagaaauccuucgaaau

SEQ ID NO: 2358104 - RNA, 19 nt, Homo sapiens
  misc_RNA (1)...(19): siRNA sense strand
ccuucgaaaugcagagagu

SEQ ID NO: 2358105 - RNA, 19 nt, Homo sapiens
  misc_RNA (1)...(19): siRNA sense strand
gguccuagaguaaggcaca

SEQ ID NO: 2358106 - RNA, 19 nt, Homo sapiens
  misc_RNA (1)...(19): siRNA sense strand
gcuuacuggagaagugauu

SEQ ID NO: 2358107 - RNA, 19 nt, Homo sapiens
  misc_RNA (1)...(19): siRNA sense strand
aauccggaaaggaagaaua

SEQ ID NO: 2358108 - RNA, 19 nt, Homo sapiens
  misc_RNA (1)...(19): siRNA sense strand
gaaaggaagaauauggaug

SEQ ID NO: 2358109 - RNA, 19 nt, Homo sapiens
  misc_RNA (1)...(19): siRNA sense strand
ccacacucuaaauggagaa

SEQ ID NO: 2358110 - RNA, 19 nt, Homo sapiens
  misc_RNA (1)...(19): siRNA sense strand
aggcacagagagaauggaa

SEQ ID NO: 2358111 - RNA, 19 nt, Homo sapiens
  misc_RNA (1)...(19): siRNA sense strand
guguguguugauagauuaa

SEQ ID NO: 2358112 - RNA, 19 nt, Homo sapiens
  misc_RNA (1)...(19): siRNA sense strand
cuuagaaggcacagagaga

SEQ ID NO: 2358113 - RNA, 19 nt, Homo sapiens
  misc_RNA (1)...(19): siRNA sense strand
gaauggaagaucaggguca

SEQ ID NO: 2358114 - RNA, 19 nt, Homo sapiens
  misc_RNA (1)...(19): siRNA sense strand
uagaaggcacagagagaau

SEQ ID NO: 2358115 - RNA, 19 nt, Homo sapiens
  misc_RNA (1)...(19): siRNA sense strand
auucuugguccuagaguaa

SEQ ID NO: 2358116 - RNA, 19 nt, Homo sapiens
  misc_RNA (1)...(19): siRNA sense strand
cugaaaagggagugauuau

SEQ ID NO: 2358117 - RNA, 19 nt, Homo sapiens
  misc_RNA (1)...(19): siRNA sense strand
uggagaaauccuucgaaau

SEQ ID NO: 2358118 - RNA, 19 nt, Homo sapiens
  misc_RNA (1)...(19): siRNA sense strand
ccuucgaaaugcagagagu

SEQ ID NO: 2358119 - RNA, 19 nt, Homo sapiens
  misc_RNA (1)...(19): siRNA sense strand
gguccuagaguaaggcaca

SEQ ID NO: 2358120 - RNA, 19 nt, Homo sapiens
  misc_RNA (1)...(19): siRNA sense strand
gcuuacuggagaagugauu

SEQ ID NO: 2358121 - RNA, 19 nt, Homo sapiens
  misc_RNA (1)...(19): siRNA sense strand
aauccggaaaggaagaaua

SEQ ID NO: 2358122 - RNA, 19 nt, Homo sapiens
  misc_RNA (1)...(19): siRNA sense strand
gaaaggaagaauauggaug

SEQ ID NO: 2358123 - RNA, 19 nt, Homo sapiens
  misc_RNA (1)...(19): siRNA sense strand
ccacacucuaaauggagaa

SEQ ID NO: 2358124 - RNA, 19 nt, Homo sapiens
  misc_RNA (1)...(19): siRNA sense strand
aggcacagagagaauggaa

SEQ ID NO: 2358125 - RNA, 19 nt, Homo sapiens
  misc_RNA (1)...(19): siRNA sense strand
guguguguugauagauuaa

SEQ ID NO: 2358126 - RNA, 19 nt, Homo sapiens
  misc_RNA (1)...(19): siRNA sense strand
aagcaagagcugagggaga

SEQ ID NO: 2358127 - RNA, 19 nt, Homo sapiens
  misc_RNA (1)...(19): siRNA sense strand
ugaaagaccuggugcggga

SEQ ID NO: 2358128 - RNA, 19 nt, Homo sapiens
  misc_RNA (1)...(19): siRNA sense strand
ccaucaggaaggugaaaga

SEQ ID NO: 2358129 - RNA, 19 nt, Homo sapiens
  misc_RNA (1)...(19): siRNA sense strand
aggcagagcuccuggcugu

SEQ ID NO: 2358130 - RNA, 19 nt, Homo sapiens
  misc_RNA (1)...(19): siRNA sense strand
caggaagacuacaggcagu

SEQ ID NO: 2358131 - RNA, 19 nt, Homo sapiens
  misc_RNA (1)...(19): siRNA sense strand
gagcugagggagaacgaga

SEQ ID NO: 2358132 - RNA, 19 nt, Homo sapiens
  misc_RNA (1)...(19): siRNA sense strand
aagguagaucagaagauaa

SEQ ID NO: 2358133 - RNA, 19 nt, Homo sapiens
  misc_RNA (1)...(19): siRNA sense strand
gagagaagguacugugccu

SEQ ID NO: 2358134 - RNA, 19 nt, Homo sapiens
  misc_RNA (1)...(19): siRNA sense strand
uggaugacuauguagcaaa

SEQ ID NO: 2358135 - RNA, 19 nt, Homo sapiens
  misc_RNA (1)...(19): siRNA sense strand
gaacuauggcugaagguag

SEQ ID NO: 2358136 - RNA, 19 nt, Homo sapiens
  misc_RNA (1)...(19): siRNA sense strand
gaaaagugccacagggaac

SEQ ID NO: 2358137 - RNA, 19 nt, Homo sapiens
  misc_RNA (1)...(19): siRNA sense strand
ggaaaagugccacagggaa

SEQ ID NO: 2358138 - RNA, 19 nt, Homo sapiens
  misc_RNA (1)...(19): siRNA sense strand
agggagaacgagaguaacu

SEQ ID NO: 2358139 - RNA, 19 nt, Homo sapiens
  misc_RNA (1)...(19): siRNA sense strand
gauaauggugagagagaca

SEQ ID NO: 2358140 - RNA, 19 nt, Homo sapiens
  misc_RNA (1)...(19): siRNA sense strand
ggaaaaucaaggaagaaaa

SEQ ID NO: 2358141 - RNA, 19 nt, Homo sapiens
  misc_RNA (1)...(19): siRNA sense strand
auguggaaguggagaguau

SEQ ID NO: 2358142 - RNA, 19 nt, Homo sapiens
  misc_RNA (1)...(19): siRNA sense strand
ccgugauaauggugagaga

SEQ ID NO: 2358143 - RNA, 19 nt, Homo sapiens
  misc_RNA (1)...(19): siRNA sense strand
augagaaaguacugaaaga

SEQ ID NO: 2358144 - RNA, 19 nt, Homo sapiens
  misc_RNA (1)...(19): siRNA sense strand
gugauaauggugagagaga

SEQ ID NO: 2358145 - RNA, 19 nt, Homo sapiens
  misc_RNA (1)...(19): siRNA sense strand
gaaagagauggaagggcua

SEQ ID NO: 2358146 - RNA, 19 nt, Homo sapiens
  misc_RNA (1)...(19): siRNA sense strand
gggacgggaaguagaggaa

SEQ ID NO: 2358147 - RNA, 19 nt, Homo sapiens
  misc_RNA (1)...(19): siRNA sense strand
ccgacaaaucagauggaga

SEQ ID NO: 2358148 - RNA, 19 nt, Homo sapiens
  misc_RNA (1)...(19): siRNA sense strand
gccacaauuaaaugagaaa

SEQ ID NO: 2358149 - RNA, 19 nt, Homo sapiens
  misc_RNA (1)...(19): siRNA sense strand
ccagugaagaugauggcua

SEQ ID NO: 2358150 - RNA, 19 nt, Homo sapiens
  misc_RNA (1)...(19): siRNA sense strand
gagacaacaaugaagaaaa

SEQ ID NO: 2358151 - RNA, 19 nt, Homo sapiens
  misc_RNA (1)...(19): siRNA sense strand
cagaaaagcaaucacaaaa

SEQ ID NO: 2358152 - RNA, 19 nt, Homo sapiens
  misc_RNA (1)...(19): siRNA sense strand
caguacaaacuaaggauga

SEQ ID NO: 2358153 - RNA, 19 nt, Homo sapiens
  misc_RNA (1)...(19): siRNA sense strand
aggacauggaucaagauaa

SEQ ID NO: 2358154 - RNA, 19 nt, Homo sapiens
  misc_RNA (1)...(19): siRNA sense strand
ugaaagagauggaagggcu

SEQ ID NO: 2358155 - RNA, 19 nt, Homo sapiens
  misc_RNA (1)...(19): siRNA sense strand
ugacagugacaccgacaaa

SEQ ID NO: 2358156 - RNA, 19 nt, Homo sapiens
  misc_RNA (1)...(19): siRNA sense strand
aagaagaacaugaaggaac

SEQ ID NO: 2358157 - RNA, 19 nt, Homo sapiens
  misc_RNA (1)...(19): siRNA sense strand
cugaaagacaagcguaaaa

SEQ ID NO: 2358158 - RNA, 19 nt, Homo sapiens
  misc_RNA (1)...(19): siRNA sense strand
ggaguuuaacccagugcaa

SEQ ID NO: 2358159 - RNA, 19 nt, Homo sapiens
  misc_RNA (1)...(19): siRNA sense strand
auugagaaagcuagaagua

SEQ ID NO: 2358160 - RNA, 19 nt, Homo sapiens
  misc_RNA (1)...(19): siRNA sense strand
cgaaaggaagcccggaaga

SEQ ID NO: 2358161 - RNA, 19 nt, Homo sapiens
  misc_RNA (1)...(19): siRNA sense strand
ccuggaaaaucaaggaaga

SEQ ID NO: 2358162 - RNA, 19 nt, Homo sapiens
  misc_RNA (1)...(19): siRNA sense strand
acauggagaaauuggauga

SEQ ID NO: 2358163 - RNA, 19 nt, Homo sapiens
  misc_RNA (1)...(19): siRNA sense strand
aguuuaacccagugcaaca

SEQ ID NO: 2358164 - RNA, 19 nt, Homo sapiens
  misc_RNA (1)...(19): siRNA sense strand
gcgugaaaccuuugaacgu

SEQ ID NO: 2358165 - RNA, 19 nt, Homo sapiens
  misc_RNA (1)...(19): siRNA sense strand
agcuagaaguagaauauga

SEQ ID NO: 2358166 - RNA, 19 nt, Homo sapiens
  misc_RNA (1)...(19): siRNA sense strand
uuucagaggacgaugauga

SEQ ID NO: 2358167 - RNA, 19 nt, Homo sapiens
  misc_RNA (1)...(19): siRNA sense strand
cagaggacgaugaugaaga

SEQ ID NO: 2358168 - RNA, 19 nt, Homo sapiens
  misc_RNA (1)...(19): siRNA sense strand
ucacuaaucccaaggcaga

SEQ ID NO: 2358169 - RNA, 19 nt, Homo sapiens
  misc_RNA (1)...(19): siRNA sense strand
uacugaaagacaagcguaa

SEQ ID NO: 2358170 - RNA, 19 nt, Homo sapiens
  misc_RNA (1)...(19): siRNA sense strand
aaucagauggagaaaguga

SEQ ID NO: 2358171 - RNA, 19 nt, Homo sapiens
  misc_RNA (1)...(19): siRNA sense strand
agaaauuggaugaaaugga

SEQ ID NO: 2358172 - RNA, 19 nt, Homo sapiens
  misc_RNA (1)...(19): siRNA sense strand
ucguauggcaggucaagaa

SEQ ID NO: 2358173 - RNA, 19 nt, Homo sapiens
  misc_RNA (1)...(19): siRNA sense strand
aaagcagcauaaagaggaa

SEQ ID NO: 2358174 - RNA, 19 nt, Homo sapiens
  misc_RNA (1)...(19): siRNA sense strand
aggucugaguguacgguuu

SEQ ID NO: 2358175 - RNA, 19 nt, Homo sapiens
  misc_RNA (1)...(19): siRNA sense strand
acagauaauccgagacaug

SEQ ID NO: 2358176 - RNA, 19 nt, Homo sapiens
  misc_RNA (1)...(19): siRNA sense strand
agauaagcaugaugacagu

SEQ ID NO: 2358177 - RNA, 19 nt, Homo sapiens
  misc_RNA (1)...(19): siRNA sense strand
aauccgagacauggagaaa

SEQ ID NO: 2358178 - RNA, 19 nt, Homo sapiens
  misc_RNA (1)...(19): siRNA sense strand
ugccaaagcagcacccaaa

SEQ ID NO: 2358179 - RNA, 19 nt, Homo sapiens
  misc_RNA (1)...(19): siRNA sense strand
agauaugccuggaaaauca

SEQ ID NO: 2358180 - RNA, 19 nt, Homo sapiens
  misc_RNA (1)...(19): siRNA sense strand
gcauaaagaggaaucccau

SEQ ID NO: 2358181 - RNA, 19 nt, Homo sapiens
  misc_RNA (1)...(19): siRNA sense strand
auggagaaauuggaugaaa

SEQ ID NO: 2358182 - RNA, 19 nt, Homo sapiens
  misc_RNA (1)...(19): siRNA sense strand
gugagagagacaacaauga

SEQ ID NO: 2358183 - RNA, 19 nt, Homo sapiens
  misc_RNA (1)...(19): siRNA sense strand
agagagacaacaaugaaga

SEQ ID NO: 2358184 - RNA, 19 nt, Homo sapiens
  misc_RNA (1)...(19): siRNA sense strand
cucaagucgugcagaugua

SEQ ID NO: 2358185 - RNA, 19 nt, Homo sapiens
  misc_RNA (1)...(19): siRNA sense strand
uggaaaaucaaggaagaaa

SEQ ID NO: 2358186 - RNA, 19 nt, Homo sapiens
  misc_RNA (1)...(19): siRNA sense strand
gaugauguuucuagcacca

SEQ ID NO: 2358187 - RNA, 19 nt, Homo sapiens
  misc_RNA (1)...(19): siRNA sense strand
aggacgaugaugaagauga

SEQ ID NO: 2358188 - RNA, 19 nt, Homo sapiens
  misc_RNA (1)...(19): siRNA sense strand
gacaaaucagauggagaaa

SEQ ID NO: 2358189 - RNA, 19 nt, Homo sapiens
  misc_RNA (1)...(19): siRNA sense strand
ggaaaauaccagaggaauu

SEQ ID NO: 2358190 - RNA, 19 nt, Homo sapiens
  misc_RNA (1)...(19): siRNA sense strand
ggaugauaugggaguauaa

SEQ ID NO: 2358191 - RNA, 19 nt, Homo sapiens
  misc_RNA (1)...(19): siRNA sense strand
ugauaagcuuaaugaggaa

SEQ ID NO: 2358192 - RNA, 19 nt, Homo sapiens
  misc_RNA (1)...(19): siRNA sense strand
ucucuaagccacaggaauu

SEQ ID NO: 2358193 - RNA, 19 nt, Homo sapiens
  misc_RNA (1)...(19): siRNA sense strand
uggaagaacaggugccauu

SEQ ID NO: 2358194 - RNA, 19 nt, Homo sapiens
  misc_RNA (1)...(19): siRNA sense strand
gugcugugacccagaauaa

SEQ ID NO: 2358195 - RNA, 19 nt, Homo sapiens
  misc_RNA (1)...(19): siRNA sense strand
ggaugcuaaagaagaaaua

SEQ ID NO: 2358196 - RNA, 19 nt, Homo sapiens
  misc_RNA (1)...(19): siRNA sense strand
acauaauauagcaggaaca

SEQ ID NO: 2358197 - RNA, 19 nt, Homo sapiens
  misc_RNA (1)...(19): siRNA sense strand
caacaauugaacagauaga

SEQ ID NO: 2358198 - RNA, 19 nt, Homo sapiens
  misc_RNA (1)...(19): siRNA sense strand
cagacucagaugaaagaaa

SEQ ID NO: 2358199 - RNA, 19 nt, Homo sapiens
  misc_RNA (1)...(19): siRNA sense strand
ugguaaucgauguggaaaa

SEQ ID NO: 2358200 - RNA, 19 nt, Homo sapiens
  misc_RNA (1)...(19): siRNA sense strand
ccaccuacuuucagugaca

SEQ ID NO: 2358201 - RNA, 19 nt, Homo sapiens
  misc_RNA (1)...(19): siRNA sense strand
ccaacagaagccacagaua

SEQ ID NO: 2358202 - RNA, 19 nt, Homo sapiens
  misc_RNA (1)...(19): siRNA sense strand
ggacauguaacguggucau

SEQ ID NO: 2358203 - RNA, 19 nt, Homo sapiens
  misc_RNA (1)...(19): siRNA sense strand
aagaacagauacaaggaca

SEQ ID NO: 2358204 - RNA, 19 nt, Homo sapiens
  misc_RNA (1)...(19): siRNA sense strand
acaagaaaugagaacacaa

SEQ ID NO: 2358205 - RNA, 19 nt, Homo sapiens
  misc_RNA (1)...(19): siRNA sense strand
ggaugaacaagcaagaaca

SEQ ID NO: 2358206 - RNA, 19 nt, Homo sapiens
  misc_RNA (1)...(19): siRNA sense strand
caacuaucaaacuaggaaa

SEQ ID NO: 2358207 - RNA, 19 nt, Homo sapiens
  misc_RNA (1)...(19): siRNA sense strand
guccauugcuagacauaau

SEQ ID NO: 2358208 - RNA, 19 nt, Homo sapiens
  misc_RNA (1)...(19): siRNA sense strand
cugauuuaucugaaggcaa

SEQ ID NO: 2358209 - RNA, 19 nt, Homo sapiens
  misc_RNA (1)...(19): siRNA sense strand
gugacaagagagaacaaau

SEQ ID NO: 2358210 - RNA, 19 nt, Homo sapiens
  misc_RNA (1)...(19): siRNA sense strand
auuaaagacuccuucacaa

SEQ ID NO: 2358211 - RNA, 19 nt, Homo sapiens
  misc_RNA (1)...(19): siRNA sense strand
cagugcaggcuguggaaga

SEQ ID NO: 2358212 - RNA, 19 nt, Homo sapiens
  misc_RNA (1)...(19): siRNA sense strand
ugggaaaauaccagaggaa

SEQ ID NO: 2358213 - RNA, 19 nt, Homo sapiens
  misc_RNA (1)...(19): siRNA sense strand
cugauggagugaaugaaau

SEQ ID NO: 2358214 - RNA, 19 nt, Homo sapiens
  misc_RNA (1)...(19): siRNA sense strand
agaagauugucuaccaaau

SEQ ID NO: 2358215 - RNA, 19 nt, Homo sapiens
  misc_RNA (1)...(19): siRNA sense strand
ugaaaugugcauagaaugu

SEQ ID NO: 2358216 - RNA, 19 nt, Homo sapiens
  misc_RNA (1)...(19): siRNA sense strand
cuugauaaccucugaaaau

SEQ ID NO: 2358217 - RNA, 19 nt, Homo sapiens
  misc_RNA (1)...(19): siRNA sense strand
ugaucacagccgaguuaaa

SEQ ID NO: 2358218 - RNA, 19 nt, Homo sapiens
  misc_RNA (1)...(19): siRNA sense strand
ccuuuagcaaauacaguaa

SEQ ID NO: 2358219 - RNA, 19 nt, Homo sapiens
  misc_RNA (1)...(19): siRNA sense strand
cgagaauuugagaugggaa

SEQ ID NO: 2358220 - RNA, 19 nt, Homo sapiens
  misc_RNA (1)...(19): siRNA sense strand
ugauggagugaaugaaauu

SEQ ID NO: 2358221 - RNA, 19 nt, Homo sapiens
  misc_RNA (1)...(19): siRNA sense strand
uguugauguuagugaagau

SEQ ID NO: 2358222 - RNA, 19 nt, Homo sapiens
  misc_RNA (1)...(19): siRNA sense strand
ccauagauuauacguggaa

SEQ ID NO: 2358223 - RNA, 19 nt, Homo sapiens
  misc_RNA (1)...(19): siRNA sense strand
uacaaacaaaggagcaaua

SEQ ID NO: 2358224 - RNA, 19 nt, Homo sapiens
  misc_RNA (1)...(19): siRNA sense strand
cggugauacuucccagaau

SEQ ID NO: 2358225 - RNA, 19 nt, Homo sapiens
  misc_RNA (1)...(19): siRNA sense strand
caaaggaccaagagaucca

SEQ ID NO: 2358226 - RNA, 19 nt, Homo sapiens
  misc_RNA (1)...(19): siRNA sense strand
agaacagauacaaggacau

SEQ ID NO: 2358227 - RNA, 19 nt, Homo sapiens
  misc_RNA (1)...(19): siRNA sense strand
cauuugugccauagauuau

SEQ ID NO: 2358228 - RNA, 19 nt, Homo sapiens
  misc_RNA (1)...(19): siRNA sense strand
gggaacacacuuuugaaua

SEQ ID NO: 2358229 - RNA, 19 nt, Homo sapiens
  misc_RNA (1)...(19): siRNA sense strand
cagugacaagagagaacaa

SEQ ID NO: 2358230 - RNA, 19 nt, Homo sapiens
  misc_RNA (1)...(19): siRNA sense strand
uguaauggccugccgagaa

SEQ ID NO: 2358231 - RNA, 19 nt, Homo sapiens
  misc_RNA (1)...(19): siRNA sense strand
cgguuaagaagauugucua

SEQ ID NO: 2358232 - RNA, 19 nt, Homo sapiens
  misc_RNA (1)...(19): siRNA sense strand
aguacaaacaaaggagcaa

SEQ ID NO: 2358233 - RNA, 19 nt, Homo sapiens
  misc_RNA (1)...(19): siRNA sense strand
aacagaagccacagauauu

SEQ ID NO: 2358234 - RNA, 19 nt, Homo sapiens
  misc_RNA (1)...(19): siRNA sense strand
auuugagaugggaaggaaa

SEQ ID NO: 2358235 - RNA, 19 nt, Homo sapiens
  misc_RNA (1)...(19): siRNA sense strand
augauaagcuuaaugagga

SEQ ID NO: 2358236 - RNA, 19 nt, Homo sapiens
  misc_RNA (1)...(19): siRNA sense strand
gaauaggggacaugcaauu

SEQ ID NO: 2358237 - RNA, 19 nt, Homo sapiens
  misc_RNA (1)...(19): siRNA sense strand
ugaaaaugccauacccaua

SEQ ID NO: 2358238 - RNA, 19 nt, Homo sapiens
  misc_RNA (1)...(19): siRNA sense strand
cauaauauagcaggaacaa

SEQ ID NO: 2358239 - RNA, 19 nt, Homo sapiens
  misc_RNA (1)...(19): siRNA sense strand
gaggaugauaugggaguau

SEQ ID NO: 2358240 - RNA, 19 nt, Homo sapiens
  misc_RNA (1)...(19): siRNA sense strand
augagaacacaaaggcauu

SEQ ID NO: 2358241 - RNA, 19 nt, Homo sapiens
  misc_RNA (1)...(19): siRNA sense strand
cuacuguguggcaggacaa

SEQ ID NO: 2358242 - RNA, 19 nt, Homo sapiens
  misc_RNA (1)...(19): siRNA sense strand
ucuaaaugucggugauacu

SEQ ID NO: 2358243 - RNA, 19 nt, Homo sapiens
  misc_RNA (1)...(19): siRNA sense strand
agacacaccuccaaggcca

SEQ ID NO: 2358244 - RNA, 19 nt, Homo sapiens
  misc_RNA (1)...(19): siRNA sense strand
ccacuaguacugaaagcau

SEQ ID NO: 2358245 - RNA, 19 nt, Homo sapiens
  misc_RNA (1)...(19): siRNA sense strand
agauguugauguuagugaa

SEQ ID NO: 2358246 - RNA, 19 nt, Homo sapiens
  misc_RNA (1)...(19): siRNA sense strand
ccugaaagaacuccugaau

SEQ ID NO: 2358247 - RNA, 19 nt, Homo sapiens
  misc_RNA (1)...(19): siRNA sense strand
gagaauuugagaugggaag

SEQ ID NO: 2358248 - RNA, 19 nt, Homo sapiens
  misc_RNA (1)...(19): siRNA sense strand
aaugagaacacaaaggcau

SEQ ID NO: 2358249 - RNA, 19 nt, Homo sapiens
  misc_RNA (1)...(19): siRNA sense strand
caguacaaacaaaggagca

SEQ ID NO: 2358250 - RNA, 19 nt, Homo sapiens
  misc_RNA (1)...(19): siRNA sense strand
ccgcaguugccuuguugaa

SEQ ID NO: 2358251 - RNA, 19 nt, Homo sapiens
  misc_RNA (1)...(19): siRNA sense strand
agaagaagaaugugggcaa

SEQ ID NO: 2358252 - RNA, 19 nt, Homo sapiens
  misc_RNA (1)...(19): siRNA sense strand
uggaaucaguucagcguga

SEQ ID NO: 2358253 - RNA, 19 nt, Homo sapiens
  misc_RNA (1)...(19): siRNA sense strand
ccugaaacccaugggcaaa

SEQ ID NO: 2358254 - RNA, 19 nt, Homo sapiens
  misc_RNA (1)...(19): siRNA sense strand
agaugcaggagaagaagaa

SEQ ID NO: 2358255 - RNA, 19 nt, Homo sapiens
  misc_RNA (1)...(19): siRNA sense strand
acuacguggaugagaucaa

SEQ ID NO: 2358256 - RNA, 19 nt, Homo sapiens
  misc_RNA (1)...(19): siRNA sense strand
cagauacugccaagggcua

SEQ ID NO: 2358257 - RNA, 19 nt, Homo sapiens
  misc_RNA (1)...(19): siRNA sense strand
aacagaugcaggagaagaa

SEQ ID NO: 2358258 - RNA, 19 nt, Homo sapiens
  misc_RNA (1)...(19): siRNA sense strand
ccagcaagcacgaggcacu

SEQ ID NO: 2358259 - RNA, 19 nt, Homo sapiens
  misc_RNA (1)...(19): siRNA sense strand
cugacuacguggaugagau

SEQ ID NO: 2358260 - RNA, 19 nt, Homo sapiens
  misc_RNA (1)...(19): siRNA sense strand
ccaugaaacagaugcagga

SEQ ID NO: 2358261 - RNA, 19 nt, Homo sapiens
  misc_RNA (1)...(19): siRNA sense strand
gaggcuacgacaaggugaa

SEQ ID NO: 2358262 - RNA, 19 nt, Homo sapiens
  misc_RNA (1)...(19): siRNA sense strand
guggaugagaucaagaaga

SEQ ID NO: 2358263 - RNA, 19 nt, Homo sapiens
  misc_RNA (1)...(19): siRNA sense strand
uccugaaacccaugggcaa

SEQ ID NO: 2358264 - RNA, 19 nt, Homo sapiens
  misc_RNA (1)...(19): siRNA sense strand
aaaccgaggcagcgagcga

SEQ ID NO: 2358265 - RNA, 19 nt, Homo sapiens
  misc_RNA (1)...(19): siRNA sense strand
aguacuacgagaaggacaa

SEQ ID NO: 2358266 - RNA, 19 nt, Homo sapiens
  misc_RNA (1)...(19): siRNA sense strand
acgagaaggacaaggagau

SEQ ID NO: 2358267 - RNA, 19 nt, Homo sapiens
  misc_RNA (1)...(19): siRNA sense strand
agaucaaguacuacgagaa

SEQ ID NO: 2358268 - RNA, 19 nt, Homo sapiens
  misc_RNA (1)...(19): siRNA sense strand
ccaucaacgagguggacga

SEQ ID NO: 2358269 - RNA, 19 nt, Homo sapiens
  misc_RNA (1)...(19): siRNA sense strand
ggauccacaucgagaaaau

SEQ ID NO: 2358270 - RNA, 19 nt, Homo sapiens
  misc_RNA (1)...(19): siRNA sense strand
ccggcuacacggagagaca

SEQ ID NO: 2358271 - RNA, 19 nt, Homo sapiens
  misc_RNA (1)...(19): siRNA sense strand
gaagugaauuugcuggaca

SEQ ID NO: 2358272 - RNA, 19 nt, Homo sapiens
  misc_RNA (1)...(19): siRNA sense strand
gugacugaguacauggaga

SEQ ID NO: 2358273 - RNA, 19 nt, Homo sapiens
  misc_RNA (1)...(19): siRNA sense strand
caagaaagccaguuccuca

SEQ ID NO: 2358274 - RNA, 19 nt, Homo sapiens
  misc_RNA (1)...(19): siRNA sense strand
agaagaagauccugggcag

SEQ ID NO: 2358275 - RNA, 19 nt, Homo sapiens
  misc_RNA (1)...(19): siRNA sense strand
cgucccaggugguggugau

SEQ ID NO: 2358276 - RNA, 19 nt, Homo sapiens
  misc_RNA (1)...(19): siRNA sense strand
gagaucaaguacuacgaga

SEQ ID NO: 2358277 - RNA, 19 nt, Homo sapiens
  misc_RNA (1)...(19): siRNA sense strand
ugugggaggugcuggccua

SEQ ID NO: 2358278 - RNA, 19 nt, Homo sapiens
  misc_RNA (1)...(19): siRNA sense strand
gcucuguggaggaggggua

SEQ ID NO: 2358279 - RNA, 19 nt, Homo sapiens
  misc_RNA (1)...(19): siRNA sense strand
gcaugaacgcccaggacgu

SEQ ID NO: 2358280 - RNA, 19 nt, Homo sapiens
  misc_RNA (1)...(19): siRNA sense strand
cggacgaggagaagaugca

SEQ ID NO: 2358281 - RNA, 19 nt, Homo sapiens
  misc_RNA (1)...(19): siRNA sense strand
ccuacuggaacaugaccaa

SEQ ID NO: 2358282 - RNA, 19 nt, Homo sapiens
  misc_RNA (1)...(19): siRNA sense strand
gaacaugaccaaccgggau

SEQ ID NO: 2358283 - RNA, 19 nt, Homo sapiens
  misc_RNA (1)...(19): siRNA sense strand
ggaauaaaggguagugcca

SEQ ID NO: 2358284 - RNA, 19 nt, Homo sapiens
  misc_RNA (1)...(19): siRNA sense strand
acguggaagagaagacaaa

SEQ ID NO: 2358285 - RNA, 19 nt, Homo sapiens
  misc_RNA (1)...(19): siRNA sense strand
cuuauaaggaagaggagga

SEQ ID NO: 2358286 - RNA, 19 nt, Homo sapiens
  misc_RNA (1)...(19): siRNA sense strand
cagaaugaucggaacgaca

SEQ ID NO: 2358287 - RNA, 19 nt, Homo sapiens
  misc_RNA (1)...(19): siRNA sense strand
auaaggaagaggaggacuu

SEQ ID NO: 2358288 - RNA, 19 nt, Homo sapiens
  misc_RNA (1)...(19): siRNA sense strand
ggaucaaggcaaccgggaa

SEQ ID NO: 2358289 - RNA, 19 nt, Homo sapiens
  misc_RNA (1)...(19): siRNA sense strand
acucuguguuugugaacuu

SEQ ID NO: 2358290 - RNA, 19 nt, Homo sapiens
  misc_RNA (1)...(19): siRNA sense strand
aauaaaggguagugccauc

SEQ ID NO: 2358291 - RNA, 19 nt, Homo sapiens
  misc_RNA (1)...(19): siRNA sense strand
uguuacaaguaccggauca

SEQ ID NO: 2358292 - RNA, 19 nt, Homo sapiens
  misc_RNA (1)...(19): siRNA sense strand
cccuggaguacguggaaga

SEQ ID NO: 2358293 - RNA, 19 nt, Homo sapiens
  misc_RNA (1)...(19): siRNA sense strand
acaucuaacuggaagcaca

SEQ ID NO: 2358294 - RNA, 19 nt, Homo sapiens
  misc_RNA (1)...(19): siRNA sense strand
uggaaguaacaaagacaca

SEQ ID NO: 2358295 - RNA, 19 nt, Homo sapiens
  misc_RNA (1)...(19): siRNA sense strand
cugcuaaagaacuugguau

SEQ ID NO: 2358296 - RNA, 19 nt, Homo sapiens
  misc_RNA (1)...(19): siRNA sense strand
guaaacacuucuaagggca

SEQ ID NO: 2358297 - RNA, 19 nt, Homo sapiens
  misc_RNA (1)...(19): siRNA sense strand
cguugauguuccaaaggau

SEQ ID NO: 2358298 - RNA, 19 nt, Homo sapiens
  misc_RNA (1)...(19): siRNA sense strand
cauggaaguaacaaagaca

SEQ ID NO: 2358299 - RNA, 19 nt, Homo sapiens
  misc_RNA (1)...(19): siRNA sense strand
caguaugaaaugagaacac

SEQ ID NO: 2358300 - RNA, 19 nt, Homo sapiens
  misc_RNA (1)...(19): siRNA sense strand
acugaaagcauuaaagcua

SEQ ID NO: 2358301 - RNA, 19 nt, Homo sapiens
  misc_RNA (1)...(19): siRNA sense strand
gcuuugacauuguggguga

SEQ ID NO: 2358302 - RNA, 19 nt, Homo sapiens
  misc_RNA (1)...(19): siRNA sense strand
agauuuacuuguugggaga

SEQ ID NO: 2358303 - RNA, 19 nt, Homo sapiens
  misc_RNA (1)...(19): siRNA sense strand
ccaguacgcaagugggaaa

SEQ ID NO: 2358304 - RNA, 19 nt, Homo sapiens
  misc_RNA (1)...(19): siRNA sense strand
gaagaaaggagaagcagca

SEQ ID NO: 2358305 - RNA, 19 nt, Homo sapiens
  misc_RNA (1)...(19): siRNA sense strand
agguauugcaggaaagaga

SEQ ID NO: 2358306 - RNA, 19 nt, Homo sapiens
  misc_RNA (1)...(19): siRNA sense strand
gggugguuguguaggaaaa

SEQ ID NO: 2358307 - RNA, 19 nt, Homo sapiens
  misc_RNA (1)...(19): siRNA sense strand
acggaaugguggaagugua

SEQ ID NO: 2358308 - RNA, 19 nt, Homo sapiens
  misc_RNA (1)...(19): siRNA sense strand
cggaaugguggaaguguau

SEQ ID NO: 2358309 - RNA, 19 nt, Homo sapiens
  misc_RNA (1)...(19): siRNA sense strand
cauccaaaccaguacgcaa

SEQ ID NO: 2358310 - RNA, 19 nt, Homo sapiens
  misc_RNA (1)...(19): siRNA sense strand
aguauaagguauugcagga

SEQ ID NO: 2358311 - RNA, 19 nt, Homo sapiens
  misc_RNA (1)...(19): siRNA sense strand
uugaaaguaccuacagaaa

SEQ ID NO: 2358312 - RNA, 19 nt, Homo sapiens
  misc_RNA (1)...(19): siRNA sense strand
acccaaagcuggaguacca

SEQ ID NO: 2358313 - RNA, 19 nt, Homo sapiens
  misc_RNA (1)...(19): siRNA sense strand
gccucaagacacagagcua

SEQ ID NO: 2358314 - RNA, 19 nt, Homo sapiens
  misc_RNA (1)...(19): siRNA sense strand
uggcaugaagaaaggagaa

SEQ ID NO: 2358315 - RNA, 19 nt, Homo sapiens
  misc_RNA (1)...(19): siRNA sense strand
cagccuuaucuuagaggua

SEQ ID NO: 2358316 - RNA, 19 nt, Homo sapiens
  misc_RNA (1)...(19): siRNA sense strand
cuuuauugaucaugacaga

SEQ ID NO: 2358317 - RNA, 19 nt, Homo sapiens
  misc_RNA (1)...(19): siRNA sense strand
acauauucaggcuggguua

SEQ ID NO: 2358318 - RNA, 19 nt, Homo sapiens
  misc_RNA (1)...(19): siRNA sense strand
aaguggaccaggagaagaa

SEQ ID NO: 2358319 - RNA, 19 nt, Homo sapiens
  misc_RNA (1)...(19): siRNA sense strand
aaucaggagaugcagaaua

SEQ ID NO: 2358320 - RNA, 19 nt, Homo sapiens
  misc_RNA (1)...(19): siRNA sense strand
aaauaaagaugaugccagu

SEQ ID NO: 2358321 - RNA, 19 nt, Homo sapiens
  misc_RNA (1)...(19): siRNA sense strand
ugcaggaaagagagaauua

SEQ ID NO: 2358322 - RNA, 19 nt, Homo sapiens
  misc_RNA (1)...(19): siRNA sense strand
ggugguuauuggagaucau

SEQ ID NO: 2358323 - RNA, 19 nt, Homo sapiens
  misc_RNA (1)...(19): siRNA sense strand
gcugugauucugagucaaa

SEQ ID NO: 2358324 - RNA, 19 nt, Homo sapiens
  misc_RNA (1)...(19): siRNA sense strand
augaauacacugacccuaa

SEQ ID NO: 2358325 - RNA, 19 nt, Homo sapiens
  misc_RNA (1)...(19): siRNA sense strand
caugaagaaaggagaagca

SEQ ID NO: 2358326 - RNA, 19 nt, Homo sapiens
  misc_RNA (1)...(19): siRNA sense strand
gauuagaggcuucacaaaa

SEQ ID NO: 2358327 - RNA, 19 nt, Homo sapiens
  misc_RNA (1)...(19): siRNA sense strand
ucauaaggaaaguggacca

SEQ ID NO: 2358328 - RNA, 19 nt, Homo sapiens
  misc_RNA (1)...(19): siRNA sense strand
gaccaggagaagaacuaaa

SEQ ID NO: 2358329 - RNA, 19 nt, Homo sapiens
  misc_RNA (1)...(19): siRNA sense strand
guaacaucucagaagacua

SEQ ID NO: 2358330 - RNA, 19 nt, Homo sapiens
  misc_RNA (1)...(19): siRNA sense strand
cuacagaaaaggagaggga

SEQ ID NO: 2358331 - RNA, 19 nt, Homo sapiens
  misc_RNA (1)...(19): siRNA sense strand
uacagauucaugagggaaa

SEQ ID NO: 2358332 - RNA, 19 nt, Homo sapiens
  misc_RNA (1)...(19): siRNA sense strand
gagcccauucauaaggaaa

SEQ ID NO: 2358333 - RNA, 19 nt, Homo sapiens
  misc_RNA (1)...(19): siRNA sense strand
aguuggaacauuugcagua

SEQ ID NO: 2358334 - RNA, 19 nt, Homo sapiens
  misc_RNA (1)...(19): siRNA sense strand
gcucagaguuuuacaggga

SEQ ID NO: 2358335 - RNA, 19 nt, Homo sapiens
  misc_RNA (1)...(19): siRNA sense strand
uggaccaggagaagaacua

SEQ ID NO: 2358336 - RNA, 19 nt, Homo sapiens
  misc_RNA (1)...(19): siRNA sense strand
uccaagaauucaacccaaa

SEQ ID NO: 2358337 - RNA, 19 nt, Homo sapiens
  misc_RNA (1)...(19): siRNA sense strand
ccuacaggaagaauacaaa

SEQ ID NO: 2358338 - RNA, 19 nt, Homo sapiens
  misc_RNA (1)...(19): siRNA sense strand
uggaaauggcggugacucu

SEQ ID NO: 2358339 - RNA, 19 nt, Homo sapiens
  misc_RNA (1)...(19): siRNA sense strand
acucaagauucgcucaauu

SEQ ID NO: 2358340 - RNA, 19 nt, Homo sapiens
  misc_RNA (1)...(19): siRNA sense strand
caggagaugcagaauaaaa

SEQ ID NO: 2358341 - RNA, 19 nt, Homo sapiens
  misc_RNA (1)...(19): siRNA sense strand
agauuagaggcuucacaaa

SEQ ID NO: 2358342 - RNA, 19 nt, Homo sapiens
  misc_RNA (1)...(19): siRNA sense strand
agugcaaguuacaucuaua

SEQ ID NO: 2358343 - RNA, 19 nt, Homo sapiens
  misc_RNA (1)...(19): siRNA sense strand
uagcacuacacaauggaaa

SEQ ID NO: 2358344 - RNA, 19 nt, Homo sapiens
  misc_RNA (1)...(19): siRNA sense strand
acagaaaaggagagggagu

SEQ ID NO: 2358345 - RNA, 19 nt, Homo sapiens
  misc_RNA (1)...(19): siRNA sense strand
cuuaauacagagugauguu

SEQ ID NO: 2358346 - RNA, 19 nt, Homo sapiens
  misc_RNA (1)...(19): siRNA sense strand
gaaaggagaagcagcagca

SEQ ID NO: 2358347 - RNA, 19 nt, Homo sapiens
  misc_RNA (1)...(19): siRNA sense strand
ucaacacaccucaggagaa

SEQ ID NO: 2358348 - RNA, 19 nt, Homo sapiens
  misc_RNA (1)...(19): siRNA sense strand
ugucuuagcacuacacaau

SEQ ID NO: 2358349 - RNA, 19 nt, Homo sapiens
  misc_RNA (1)...(19): siRNA sense strand
ucucaaucaagcaaagcaa

SEQ ID NO: 2358350 - RNA, 19 nt, Homo sapiens
  misc_RNA (1)...(19): siRNA sense strand
uggcuaagaaagugcaguu

SEQ ID NO: 2358351 - RNA, 19 nt, Homo sapiens
  misc_RNA (1)...(19): siRNA sense strand
gggaaauucaaaaugagaa

SEQ ID NO: 2358352 - RNA, 19 nt, Homo sapiens
  misc_RNA (1)...(19): siRNA sense strand
gauucugagucaaacgaca

SEQ ID NO: 2358353 - RNA, 19 nt, Homo sapiens
  misc_RNA (1)...(19): siRNA sense strand
cuugaaaguaccuacagaa

SEQ ID NO: 2358354 - RNA, 19 nt, Homo sapiens
  misc_RNA (1)...(19): siRNA sense strand
ccauuauugugacugcaaa

SEQ ID NO: 2358355 - RNA, 19 nt, Homo sapiens
  misc_RNA (1)...(19): siRNA sense strand
acugcaaagaccaacauua

SEQ ID NO: 2358356 - RNA, 19 nt, Homo sapiens
  misc_RNA (1)...(19): siRNA sense strand
acggaaaacuugcgcuuau

SEQ ID NO: 2358357 - RNA, 19 nt, Homo sapiens
  misc_RNA (1)...(19): siRNA sense strand
aggaaagagagaauuauca

SEQ ID NO: 2358358 - RNA, 19 nt, Homo sapiens
  misc_RNA (1)...(19): siRNA sense strand
agauuuacuugauguggau

SEQ ID NO: 2358359 - RNA, 19 nt, Homo sapiens
  misc_RNA (1)...(19): siRNA sense strand
cauuugcaguauaagguau

SEQ ID NO: 2358360 - RNA, 19 nt, Homo sapiens
  misc_RNA (1)...(19): siRNA sense strand
agagguacagacugcaaua

SEQ ID NO: 2358361 - RNA, 19 nt, Homo sapiens
  misc_RNA (1)...(19): siRNA sense strand
gaagcuaauuccugccuca

SEQ ID NO: 2358362 - RNA, 19 nt, Homo sapiens
  misc_RNA (1)...(19): siRNA sense strand
acugaaagcauuaaagcua

SEQ ID NO: 2358363 - RNA, 19 nt, Homo sapiens
  misc_RNA (1)...(19): siRNA sense strand
gcuuugacauuguggguga

SEQ ID NO: 2358364 - RNA, 19 nt, Homo sapiens
  misc_RNA (1)...(19): siRNA sense strand
agauuuacuuguugggaga

SEQ ID NO: 2358365 - RNA, 19 nt, Homo sapiens
  misc_RNA (1)...(19): siRNA sense strand
ccaguacgcaagugggaaa

SEQ ID NO: 2358366 - RNA, 19 nt, Homo sapiens
  misc_RNA (1)...(19): siRNA sense strand
gaagaaaggagaagcagca

SEQ ID NO: 2358367 - RNA, 19 nt, Homo sapiens
  misc_RNA (1)...(19): siRNA sense strand
agguauugcaggaaagaga

SEQ ID NO: 2358368 - RNA, 19 nt, Homo sapiens
  misc_RNA (1)...(19): siRNA sense strand
gggugguuguguaggaaaa

SEQ ID NO: 2358369 - RNA, 19 nt, Homo sapiens
  misc_RNA (1)...(19): siRNA sense strand
acggaaugguggaagugua

SEQ ID NO: 2358370 - RNA, 19 nt, Homo sapiens
  misc_RNA (1)...(19): siRNA sense strand
cggaaugguggaaguguau

SEQ ID NO: 2358371 - RNA, 19 nt, Homo sapiens
  misc_RNA (1)...(19): siRNA sense strand
cauccaaaccaguacgcaa

SEQ ID NO: 2358372 - RNA, 19 nt, Homo sapiens
  misc_RNA (1)...(19): siRNA sense strand
aguauaagguauugcagga

SEQ ID NO: 2358373 - RNA, 19 nt, Homo sapiens
  misc_RNA (1)...(19): siRNA sense strand
uugaaaguaccuacagaaa

SEQ ID NO: 2358374 - RNA, 19 nt, Homo sapiens
  misc_RNA (1)...(19): siRNA sense strand
acccaaagcuggaguacca

SEQ ID NO: 2358375 - RNA, 19 nt, Homo sapiens
  misc_RNA (1)...(19): siRNA sense strand
gccucaagacacagagcua

SEQ ID NO: 2358376 - RNA, 19 nt, Homo sapiens
  misc_RNA (1)...(19): siRNA sense strand
uggcaugaagaaaggagaa

SEQ ID NO: 2358377 - RNA, 19 nt, Homo sapiens
  misc_RNA (1)...(19): siRNA sense strand
cagccuuaucuuagaggua

SEQ ID NO: 2358378 - RNA, 19 nt, Homo sapiens
  misc_RNA (1)...(19): siRNA sense strand
cuuuauugaucaugacaga

SEQ ID NO: 2358379 - RNA, 19 nt, Homo sapiens
  misc_RNA (1)...(19): siRNA sense strand
acauauucaggcuggguua

SEQ ID NO: 2358380 - RNA, 19 nt, Homo sapiens
  misc_RNA (1)...(19): siRNA sense strand
aaguggaccaggagaagaa

SEQ ID NO: 2358381 - RNA, 19 nt, Homo sapiens
  misc_RNA (1)...(19): siRNA sense strand
aaucaggagaugcagaaua

SEQ ID NO: 2358382 - RNA, 19 nt, Homo sapiens
  misc_RNA (1)...(19): siRNA sense strand
aaauaaagaugaugccagu

SEQ ID NO: 2358383 - RNA, 19 nt, Homo sapiens
  misc_RNA (1)...(19): siRNA sense strand
ugcaggaaagagagaauua

SEQ ID NO: 2358384 - RNA, 19 nt, Homo sapiens
  misc_RNA (1)...(19): siRNA sense strand
ggugguuauuggagaucau

SEQ ID NO: 2358385 - RNA, 19 nt, Homo sapiens
  misc_RNA (1)...(19): siRNA sense strand
gcugugauucugagucaaa

SEQ ID NO: 2358386 - RNA, 19 nt, Homo sapiens
  misc_RNA (1)...(19): siRNA sense strand
augaauacacugacccuaa

SEQ ID NO: 2358387 - RNA, 19 nt, Homo sapiens
  misc_RNA (1)...(19): siRNA sense strand
caugaagaaaggagaagca

SEQ ID NO: 2358388 - RNA, 19 nt, Homo sapiens
  misc_RNA (1)...(19): siRNA sense strand
gauuagaggcuucacaaaa

SEQ ID NO: 2358389 - RNA, 19 nt, Homo sapiens
  misc_RNA (1)...(19): siRNA sense strand
ucauaaggaaaguggacca

SEQ ID NO: 2358390 - RNA, 19 nt, Homo sapiens
  misc_RNA (1)...(19): siRNA sense strand
gaccaggagaagaacuaaa

SEQ ID NO: 2358391 - RNA, 19 nt, Homo sapiens
  misc_RNA (1)...(19): siRNA sense strand
guaacaucucagaagacua

SEQ ID NO: 2358392 - RNA, 19 nt, Homo sapiens
  misc_RNA (1)...(19): siRNA sense strand
cuacagaaaaggagaggga

SEQ ID NO: 2358393 - RNA, 19 nt, Homo sapiens
  misc_RNA (1)...(19): siRNA sense strand
uacagauucaugagggaaa

SEQ ID NO: 2358394 - RNA, 19 nt, Homo sapiens
  misc_RNA (1)...(19): siRNA sense strand
gagcccauucauaaggaaa

SEQ ID NO: 2358395 - RNA, 19 nt, Homo sapiens
  misc_RNA (1)...(19): siRNA sense strand
aguuggaacauuugcagua

SEQ ID NO: 2358396 - RNA, 19 nt, Homo sapiens
  misc_RNA (1)...(19): siRNA sense strand
gcucagaguuuuacaggga

SEQ ID NO: 2358397 - RNA, 19 nt, Homo sapiens
  misc_RNA (1)...(19): siRNA sense strand
uggaccaggagaagaacua

SEQ ID NO: 2358398 - RNA, 19 nt, Homo sapiens
  misc_RNA (1)...(19): siRNA sense strand
uccaagaauucaacccaaa

SEQ ID NO: 2358399 - RNA, 19 nt, Homo sapiens
  misc_RNA (1)...(19): siRNA sense strand
ccuacaggaagaauacaaa

SEQ ID NO: 2358400 - RNA, 19 nt, Homo sapiens
  misc_RNA (1)...(19): siRNA sense strand
uggaaauggcggugacucu

SEQ ID NO: 2358401 - RNA, 19 nt, Homo sapiens
  misc_RNA (1)...(19): siRNA sense strand
acucaagauucgcucaauu

SEQ ID NO: 2358402 - RNA, 19 nt, Homo sapiens
  misc_RNA (1)...(19): siRNA sense strand
caggagaugcagaauaaaa

SEQ ID NO: 2358403 - RNA, 19 nt, Homo sapiens
  misc_RNA (1)...(19): siRNA sense strand
agauuagaggcuucacaaa

SEQ ID NO: 2358404 - RNA, 19 nt, Homo sapiens
  misc_RNA (1)...(19): siRNA sense strand
agugcaaguuacaucuaua

SEQ ID NO: 2358405 - RNA, 19 nt, Homo sapiens
  misc_RNA (1)...(19): siRNA sense strand
uagcacuacacaauggaaa

SEQ ID NO: 2358406 - RNA, 19 nt, Homo sapiens
  misc_RNA (1)...(19): siRNA sense strand
acagaaaaggagagggagu

SEQ ID NO: 2358407 - RNA, 19 nt, Homo sapiens
  misc_RNA (1)...(19): siRNA sense strand
cuuaauacagagugauguu

SEQ ID NO: 2358408 - RNA, 19 nt, Homo sapiens
  misc_RNA (1)...(19): siRNA sense strand
gaaaggagaagcagcagca

SEQ ID NO: 2358409 - RNA, 19 nt, Homo sapiens
  misc_RNA (1)...(19): siRNA sense strand
ucaacacaccucaggagaa

SEQ ID NO: 2358410 - RNA, 19 nt, Homo sapiens
  misc_RNA (1)...(19): siRNA sense strand
ugucuuagcacuacacaau

SEQ ID NO: 2358411 - RNA, 19 nt, Homo sapiens
  misc_RNA (1)...(19): siRNA sense strand
ucucaaucaagcaaagcaa

SEQ ID NO: 2358412 - RNA, 19 nt, Homo sapiens
  misc_RNA (1)...(19): siRNA sense strand
uggcuaagaaagugcaguu

SEQ ID NO: 2358413 - RNA, 19 nt, Homo sapiens
  misc_RNA (1)...(19): siRNA sense strand
gggaaauucaaaaugagaa

SEQ ID NO: 2358414 - RNA, 19 nt, Homo sapiens
  misc_RNA (1)...(19): siRNA sense strand
gauucugagucaaacgaca

SEQ ID NO: 2358415 - RNA, 19 nt, Homo sapiens
  misc_RNA (1)...(19): siRNA sense strand
cuugaaaguaccuacagaa

SEQ ID NO: 2358416 - RNA, 19 nt, Homo sapiens
  misc_RNA (1)...(19): siRNA sense strand
ccauuauugugacugcaaa

SEQ ID NO: 2358417 - RNA, 19 nt, Homo sapiens
  misc_RNA (1)...(19): siRNA sense strand
acugcaaagaccaacauua

SEQ ID NO: 2358418 - RNA, 19 nt, Homo sapiens
  misc_RNA (1)...(19): siRNA sense strand
acggaaaacuugcgcuuau

SEQ ID NO: 2358419 - RNA, 19 nt, Homo sapiens
  misc_RNA (1)...(19): siRNA sense strand
aggaaagagagaauuauca

SEQ ID NO: 2358420 - RNA, 19 nt, Homo sapiens
  misc_RNA (1)...(19): siRNA sense strand
agauuuacuugauguggau

SEQ ID NO: 2358421 - RNA, 19 nt, Homo sapiens
  misc_RNA (1)...(19): siRNA sense strand
cauuugcaguauaagguau

SEQ ID NO: 2358422 - RNA, 19 nt, Homo sapiens
  misc_RNA (1)...(19): siRNA sense strand
agagguacagacugcaaua

SEQ ID NO: 2358423 - RNA, 19 nt, Homo sapiens
  misc_RNA (1)...(19): siRNA sense strand
gaagcuaauuccugccuca

SEQ ID NO: 2358424 - RNA, 19 nt, Homo sapiens
  misc_RNA (1)...(19): siRNA sense strand
ccaaagaagacauggcgaa

SEQ ID NO: 2358425 - RNA, 19 nt, Homo sapiens
  misc_RNA (1)...(19): siRNA sense strand
uugaagaagcaaagaggaa

SEQ ID NO: 2358426 - RNA, 19 nt, Homo sapiens
  misc_RNA (1)...(19): siRNA sense strand
cgcagauaacaguggaaua

SEQ ID NO: 2358427 - RNA, 19 nt, Homo sapiens
  misc_RNA (1)...(19): siRNA sense strand
gaagagaagcugcggcuga

SEQ ID NO: 2358428 - RNA, 19 nt, Homo sapiens
  misc_RNA (1)...(19): siRNA sense strand
ggaacaagcuucagacccu

SEQ ID NO: 2358429 - RNA, 19 nt, Homo sapiens
  misc_RNA (1)...(19): siRNA sense strand
ggugcaacuucgugcucaa

SEQ ID NO: 2358430 - RNA, 19 nt, Homo sapiens
  misc_RNA (1)...(19): siRNA sense strand
ccgacgagaucuuccgcaa

SEQ ID NO: 2358431 - RNA, 19 nt, Homo sapiens
  misc_RNA (1)...(19): siRNA sense strand
auucaacgguacagcacaa

SEQ ID NO: 2358432 - RNA, 19 nt, Homo sapiens
  misc_RNA (1)...(19): siRNA sense strand
gcgaagagccugcugcaca

SEQ ID NO: 2358433 - RNA, 19 nt, Homo sapiens
  misc_RNA (1)...(19): siRNA sense strand
ucgugaagguggagacgga

SEQ ID NO: 2358434 - RNA, 19 nt, Homo sapiens
  misc_RNA (1)...(19): siRNA sense strand
cgaagaaguuugacgagcu

SEQ ID NO: 2358435 - RNA, 19 nt, Homo sapiens
  misc_RNA (1)...(19): siRNA sense strand
ugaaaggagcugagcagga

SEQ ID NO: 2358436 - RNA, 19 nt, Homo sapiens
  misc_RNA (1)...(19): siRNA sense strand
cggaaaggacacagaacgu

SEQ ID NO: 2358437 - RNA, 19 nt, Homo sapiens
  misc_RNA (1)...(19): siRNA sense strand
gcuacuccuuagagggaca

SEQ ID NO: 2358438 - RNA, 19 nt, Homo sapiens
  misc_RNA (1)...(19): siRNA sense strand
gaaaggacacagaacguga

SEQ ID NO: 2358439 - RNA, 19 nt, Homo sapiens
  misc_RNA (1)...(19): siRNA sense strand
cuaugagauuucaguucaa

SEQ ID NO: 2358440 - RNA, 19 nt, Homo sapiens
  misc_RNA (1)...(19): siRNA sense strand
gagaauaccuacaucgaag

SEQ ID NO: 2358441 - RNA, 19 nt, Homo sapiens
  misc_RNA (1)...(19): siRNA sense strand
ucgucaacacagagaccaa

SEQ ID NO: 2358442 - RNA, 19 nt, Homo sapiens
  misc_RNA (1)...(19): siRNA sense strand
aaagugaagcagcgggaga

SEQ ID NO: 2358443 - RNA, 19 nt, Homo sapiens
  misc_RNA (1)...(19): siRNA sense strand
ccaaagugaagcagcggga

SEQ ID NO: 2358444 - RNA, 19 nt, Homo sapiens
  misc_RNA (1)...(19): siRNA sense strand
ccuuaauuuucgcagauaa

SEQ ID NO: 2358445 - RNA, 19 nt, Homo sapiens
  misc_RNA (1)...(19): siRNA sense strand
uggagaacgccaagcgcuu

SEQ ID NO: 2358446 - RNA, 19 nt, Homo sapiens
  misc_RNA (1)...(19): siRNA sense strand
uggacaugcuggugcggga

SEQ ID NO: 2358447 - RNA, 19 nt, Homo sapiens
  misc_RNA (1)...(19): siRNA sense strand
gaaauggaccggcuggaga

SEQ ID NO: 2358448 - RNA, 19 nt, Homo sapiens
  misc_RNA (1)...(19): siRNA sense strand
ugaaagucgacaaggagga

SEQ ID NO: 2358449 - RNA, 19 nt, Homo sapiens
  misc_RNA (1)...(19): siRNA sense strand
ggcagaaguacuggaacaa

SEQ ID NO: 2358450 - RNA, 19 nt, Homo sapiens
  misc_RNA (1)...(19): siRNA sense strand
acuucgugcucaagaacau

SEQ ID NO: 2358451 - RNA, 19 nt, Homo sapiens
  misc_RNA (1)...(19): siRNA sense strand
gaguggcuucagagauuaa

SEQ ID NO: 2358452 - RNA, 19 nt, Homo sapiens
  misc_RNA (1)...(19): siRNA sense strand
ucaucguggcagagcguau

SEQ ID NO: 2358453 - RNA, 19 nt, Homo sapiens
  misc_RNA (1)...(19): siRNA sense strand
aggucauccuggcgugcaa

SEQ ID NO: 2358454 - RNA, 19 nt, Homo sapiens
  misc_RNA (1)...(19): siRNA sense strand
ugguggucaucgagggcau

SEQ ID NO: 2358455 - RNA, 19 nt, Homo sapiens
  misc_RNA (1)...(19): siRNA sense strand
ucauuaaucugguggcuca

SEQ ID NO: 2358456 - RNA, 19 nt, Homo sapiens
  misc_RNA (1)...(19): siRNA sense strand
cuguuaagcuguaaggauc

SEQ ID NO: 2358457 - RNA, 19 nt, Homo sapiens
  misc_RNA (1)...(19): siRNA sense strand
aggcuuuauuauucagcua

SEQ ID NO: 2358458 - RNA, 19 nt, Homo sapiens
  misc_RNA (1)...(19): siRNA sense strand
guaaggaucacguggggua

SEQ ID NO: 2358459 - RNA, 19 nt, Homo sapiens
  misc_RNA (1)...(19): siRNA sense strand
uggcaaucgcgguuaucaa

SEQ ID NO: 2358460 - RNA, 19 nt, Homo sapiens
  misc_RNA (1)...(19): siRNA sense strand
ccaguguccggguaggaaa

SEQ ID NO: 2358461 - RNA, 19 nt, Homo sapiens
  misc_RNA (1)...(19): siRNA sense strand
cgcuaaauuguccaggaaa

SEQ ID NO: 2358462 - RNA, 19 nt, Homo sapiens
  misc_RNA (1)...(19): siRNA sense strand
ucucuacauccucgggaaa

SEQ ID NO: 2358463 - RNA, 19 nt, Homo sapiens
  misc_RNA (1)...(19): siRNA sense strand
aagaagaaccuuugccgga

SEQ ID NO: 2358464 - RNA, 19 nt, Homo sapiens
  misc_RNA (1)...(19): siRNA sense strand
cuaaauuguccaggaaaca

SEQ ID NO: 2358465 - RNA, 19 nt, Homo sapiens
  misc_RNA (1)...(19): siRNA sense strand
cguccaagaucaagcggca

SEQ ID NO: 2358466 - RNA, 19 nt, Homo sapiens
  misc_RNA (1)...(19): siRNA sense strand
gggaggacuacacgcgcua

SEQ ID NO: 2358467 - RNA, 19 nt, Homo sapiens
  misc_RNA (1)...(19): siRNA sense strand
aguacaaugaggagcgcga

SEQ ID NO: 2358468 - RNA, 19 nt, Homo sapiens
  misc_RNA (1)...(19): siRNA sense strand
uggucgaggugaugagaaa

SEQ ID NO: 2358469 - RNA, 19 nt, Homo sapiens
  misc_RNA (1)...(19): siRNA sense strand
caguaaagugccugaguau

SEQ ID NO: 2358470 - RNA, 19 nt, Homo sapiens
  misc_RNA (1)...(19): siRNA sense strand
ggaauuugucugaagggua

SEQ ID NO: 2358471 - RNA, 19 nt, Homo sapiens
  misc_RNA (1)...(19): siRNA sense strand
gguacaagccaaaggucau

SEQ ID NO: 2358472 - RNA, 19 nt, Homo sapiens
  misc_RNA (1)...(19): siRNA sense strand
augcauuauauguggacaa

SEQ ID NO: 2358473 - RNA, 19 nt, Homo sapiens
  misc_RNA (1)...(19): siRNA sense strand
aguccaacaagaaaggaaa

SEQ ID NO: 2358474 - RNA, 19 nt, Homo sapiens
  misc_RNA (1)...(19): siRNA sense strand
ggguacaagccaaagguca

SEQ ID NO: 2358475 - RNA, 19 nt, Homo sapiens
  misc_RNA (1)...(19): siRNA sense strand
caauguaucugaaggggaa

SEQ ID NO: 2358476 - RNA, 19 nt, Homo sapiens
  misc_RNA (1)...(19): siRNA sense strand
agaaaguugaagccaguaa

SEQ ID NO: 2358477 - RNA, 19 nt, Homo sapiens
  misc_RNA (1)...(19): siRNA sense strand
cagggaagacagaaaucaa

SEQ ID NO: 2358478 - RNA, 19 nt, Homo sapiens
  misc_RNA (1)...(19): siRNA sense strand
acaagaaaggaaaggcuga

SEQ ID NO: 2358479 - RNA, 19 nt, Homo sapiens
  misc_RNA (1)...(19): siRNA sense strand
ggugaugagaaacggaaaa

SEQ ID NO: 2358480 - RNA, 19 nt, Homo sapiens
  misc_RNA (1)...(19): siRNA sense strand
aauaaaggcacuucggaca

SEQ ID NO: 2358481 - RNA, 19 nt, Homo sapiens
  misc_RNA (1)...(19): siRNA sense strand
ccaucaggucgcuggauuu

SEQ ID NO: 2358482 - RNA, 19 nt, Homo sapiens
  misc_RNA (1)...(19): siRNA sense strand
ucagaaaguugaagccagu

SEQ ID NO: 2358483 - RNA, 19 nt, Homo sapiens
  misc_RNA (1)...(19): siRNA sense strand
uauuaagaaagcugccaaa

SEQ ID NO: 2358484 - RNA, 19 nt, Homo sapiens
  misc_RNA (1)...(19): siRNA sense strand
gaguccaacaagaaaggaa

SEQ ID NO: 2358485 - RNA, 19 nt, Homo sapiens
  misc_RNA (1)...(19): siRNA sense strand
ggauaugacaauggagcuu

SEQ ID NO: 2358486 - RNA, 19 nt, Homo sapiens
  misc_RNA (1)...(19): siRNA sense strand
aaaacagcaaagagggaua

SEQ ID NO: 2358487 - RNA, 19 nt, Homo sapiens
  misc_RNA (1)...(19): siRNA sense strand
ccagguaccucaagggaag

SEQ ID NO: 2358488 - RNA, 19 nt, Homo sapiens
  misc_RNA (1)...(19): siRNA sense strand
ucaacgaauuacagaccau

SEQ ID NO: 2358489 - RNA, 19 nt, Homo sapiens
  misc_RNA (1)...(19): siRNA sense strand
agggaagacagaaaucaaa

SEQ ID NO: 2358490 - RNA, 19 nt, Homo sapiens
  misc_RNA (1)...(19): siRNA sense strand
gggaagacagaaaucaaaa

SEQ ID NO: 2358491 - RNA, 19 nt, Homo sapiens
  misc_RNA (1)...(19): siRNA sense strand
acgcauggaagaaagaaga

SEQ ID NO: 2358492 - RNA, 19 nt, Homo sapiens
  misc_RNA (1)...(19): siRNA sense strand
aggugaugagaaacggaaa

SEQ ID NO: 2358493 - RNA, 19 nt, Homo sapiens
  misc_RNA (1)...(19): siRNA sense strand
cgggaacgcauggaagaaa

SEQ ID NO: 2358494 - RNA, 19 nt, Homo sapiens
  misc_RNA (1)...(19): siRNA sense strand
acucuaggcuuaacagcau

SEQ ID NO: 2358495 - RNA, 19 nt, Homo sapiens
  misc_RNA (1)...(19): siRNA sense strand
ugauucagaugauggcgaa

SEQ ID NO: 2358496 - RNA, 19 nt, Homo sapiens
  misc_RNA (1)...(19): siRNA sense strand
acuuaaaccgggaacgcau

SEQ ID NO: 2358497 - RNA, 19 nt, Homo sapiens
  misc_RNA (1)...(19): siRNA sense strand
agacaaagcugccacucca

SEQ ID NO: 2358498 - RNA, 19 nt, Homo sapiens
  misc_RNA (1)...(19): siRNA sense strand
guuccuggguacaagccaa

SEQ ID NO: 2358499 - RNA, 19 nt, Homo sapiens
  misc_RNA (1)...(19): siRNA sense strand
caacaagaaaggaaaggcu

SEQ ID NO: 2358500 - RNA, 19 nt, Homo sapiens
  misc_RNA (1)...(19): siRNA sense strand
gccaaaggucauuccaaau

SEQ ID NO: 2358501 - RNA, 19 nt, Homo sapiens
  misc_RNA (1)...(19): siRNA sense strand
caagaaaggaaaggcugaa

SEQ ID NO: 2358502 - RNA, 19 nt, Homo sapiens
  misc_RNA (1)...(19): siRNA sense strand
cccaaaugcaacaacagaa

SEQ ID NO: 2358503 - RNA, 19 nt, Homo sapiens
  misc_RNA (1)...(19): siRNA sense strand
uggucgaggugaugagaaa

SEQ ID NO: 2358504 - RNA, 19 nt, Homo sapiens
  misc_RNA (1)...(19): siRNA sense strand
caguaaagugccugaguau

SEQ ID NO: 2358505 - RNA, 19 nt, Homo sapiens
  misc_RNA (1)...(19): siRNA sense strand
ggaauuugucugaagggua

SEQ ID NO: 2358506 - RNA, 19 nt, Homo sapiens
  misc_RNA (1)...(19): siRNA sense strand
gguacaagccaaaggucau

SEQ ID NO: 2358507 - RNA, 19 nt, Homo sapiens
  misc_RNA (1)...(19): siRNA sense strand
augcauuauauguggacaa

SEQ ID NO: 2358508 - RNA, 19 nt, Homo sapiens
  misc_RNA (1)...(19): siRNA sense strand
aguccaacaagaaaggaaa

SEQ ID NO: 2358509 - RNA, 19 nt, Homo sapiens
  misc_RNA (1)...(19): siRNA sense strand
ggguacaagccaaagguca

SEQ ID NO: 2358510 - RNA, 19 nt, Homo sapiens
  misc_RNA (1)...(19): siRNA sense strand
caauguaucugaaggggaa

SEQ ID NO: 2358511 - RNA, 19 nt, Homo sapiens
  misc_RNA (1)...(19): siRNA sense strand
agaaaguugaagccaguaa

SEQ ID NO: 2358512 - RNA, 19 nt, Homo sapiens
  misc_RNA (1)...(19): siRNA sense strand
cagggaagacagaaaucaa

SEQ ID NO: 2358513 - RNA, 19 nt, Homo sapiens
  misc_RNA (1)...(19): siRNA sense strand
acaagaaaggaaaggcuga

SEQ ID NO: 2358514 - RNA, 19 nt, Homo sapiens
  misc_RNA (1)...(19): siRNA sense strand
ggugaugagaaacggaaaa

SEQ ID NO: 2358515 - RNA, 19 nt, Homo sapiens
  misc_RNA (1)...(19): siRNA sense strand
aauaaaggcacuucggaca

SEQ ID NO: 2358516 - RNA, 19 nt, Homo sapiens
  misc_RNA (1)...(19): siRNA sense strand
ccaucaggucgcuggauuu

SEQ ID NO: 2358517 - RNA, 19 nt, Homo sapiens
  misc_RNA (1)...(19): siRNA sense strand
ucagaaaguugaagccagu

SEQ ID NO: 2358518 - RNA, 19 nt, Homo sapiens
  misc_RNA (1)...(19): siRNA sense strand
uauuaagaaagcugccaaa

SEQ ID NO: 2358519 - RNA, 19 nt, Homo sapiens
  misc_RNA (1)...(19): siRNA sense strand
gaguccaacaagaaaggaa

SEQ ID NO: 2358520 - RNA, 19 nt, Homo sapiens
  misc_RNA (1)...(19): siRNA sense strand
ggauaugacaauggagcuu

SEQ ID NO: 2358521 - RNA, 19 nt, Homo sapiens
  misc_RNA (1)...(19): siRNA sense strand
aaaacagcaaagagggaua

SEQ ID NO: 2358522 - RNA, 19 nt, Homo sapiens
  misc_RNA (1)...(19): siRNA sense strand
ccagguaccucaagggaag

SEQ ID NO: 2358523 - RNA, 19 nt, Homo sapiens
  misc_RNA (1)...(19): siRNA sense strand
ucaacgaauuacagaccau

SEQ ID NO: 2358524 - RNA, 19 nt, Homo sapiens
  misc_RNA (1)...(19): siRNA sense strand
agggaagacagaaaucaaa

SEQ ID NO: 2358525 - RNA, 19 nt, Homo sapiens
  misc_RNA (1)...(19): siRNA sense strand
gggaagacagaaaucaaaa

SEQ ID NO: 2358526 - RNA, 19 nt, Homo sapiens
  misc_RNA (1)...(19): siRNA sense strand
acgcauggaagaaagaaga

SEQ ID NO: 2358527 - RNA, 19 nt, Homo sapiens
  misc_RNA (1)...(19): siRNA sense strand
aggugaugagaaacggaaa

SEQ ID NO: 2358528 - RNA, 19 nt, Homo sapiens
  misc_RNA (1)...(19): siRNA sense strand
cgggaacgcauggaagaaa

SEQ ID NO: 2358529 - RNA, 19 nt, Homo sapiens
  misc_RNA (1)...(19): siRNA sense strand
acucuaggcuuaacagcau

SEQ ID NO: 2358530 - RNA, 19 nt, Homo sapiens
  misc_RNA (1)...(19): siRNA sense strand
ugauucagaugauggcgaa

SEQ ID NO: 2358531 - RNA, 19 nt, Homo sapiens
  misc_RNA (1)...(19): siRNA sense strand
acuuaaaccgggaacgcau

SEQ ID NO: 2358532 - RNA, 19 nt, Homo sapiens
  misc_RNA (1)...(19): siRNA sense strand
agacaaagcugccacucca

SEQ ID NO: 2358533 - RNA, 19 nt, Homo sapiens
  misc_RNA (1)...(19): siRNA sense strand
guuccuggguacaagccaa

SEQ ID NO: 2358534 - RNA, 19 nt, Homo sapiens
  misc_RNA (1)...(19): siRNA sense strand
caacaagaaaggaaaggcu

SEQ ID NO: 2358535 - RNA, 19 nt, Homo sapiens
  misc_RNA (1)...(19): siRNA sense strand
gccaaaggucauuccaaau

SEQ ID NO: 2358536 - RNA, 19 nt, Homo sapiens
  misc_RNA (1)...(19): siRNA sense strand
caagaaaggaaaggcugaa

SEQ ID NO: 2358537 - RNA, 19 nt, Homo sapiens
  misc_RNA (1)...(19): siRNA sense strand
cccaaaugcaacaacagaa

SEQ ID NO: 2358538 - RNA, 19 nt, Homo sapiens
  misc_RNA (1)...(19): siRNA sense strand
caugauaguuucugggaca

SEQ ID NO: 2358539 - RNA, 19 nt, Homo sapiens
  misc_RNA (1)...(19): siRNA sense strand
aaaccaaguuguaagggaa

SEQ ID NO: 2358540 - RNA, 19 nt, Homo sapiens
  misc_RNA (1)...(19): siRNA sense strand
ccagaagaccugagcguca

SEQ ID NO: 2358541 - RNA, 19 nt, Homo sapiens
  misc_RNA (1)...(19): siRNA sense strand
cagaaaauugggaaagaaa

SEQ ID NO: 2358542 - RNA, 19 nt, Homo sapiens
  misc_RNA (1)...(19): siRNA sense strand
caguaaauucaaagagcuu

SEQ ID NO: 2358543 - RNA, 19 nt, Homo sapiens
  misc_RNA (1)...(19): siRNA sense strand
gggaauugagggaggagca

SEQ ID NO: 2358544 - RNA, 19 nt, Homo sapiens
  misc_RNA (1)...(19): siRNA sense strand
gcuuauggucaaacagaau

SEQ ID NO: 2358545 - RNA, 19 nt, Homo sapiens
  misc_RNA (1)...(19): siRNA sense strand
acaaucagucugugggaau

SEQ ID NO: 2358546 - RNA, 19 nt, Homo sapiens
  misc_RNA (1)...(19): siRNA sense strand
ggacagugauggcuggcuu

SEQ ID NO: 2358547 - RNA, 19 nt, Homo sapiens
  misc_RNA (1)...(19): siRNA sense strand
ggaucuacgauaagguaca

SEQ ID NO: 2358548 - RNA, 19 nt, Homo sapiens
  misc_RNA (1)...(19): siRNA sense strand
uagaagacuugcagaaaau

SEQ ID NO: 2358549 - RNA, 19 nt, Homo sapiens
  misc_RNA (1)...(19): siRNA sense strand
agaauaggccagaguggau

SEQ ID NO: 2358550 - RNA, 19 nt, Homo sapiens
  misc_RNA (1)...(19): siRNA sense strand
gcaauuacgugaagcugga

SEQ ID NO: 2358551 - RNA, 19 nt, Homo sapiens
  misc_RNA (1)...(19): siRNA sense strand
gagaauacauugcaccaga

SEQ ID NO: 2358552 - RNA, 19 nt, Homo sapiens
  misc_RNA (1)...(19): siRNA sense strand
gagcagaguaccuggguuc

SEQ ID NO: 2358553 - RNA, 19 nt, Homo sapiens
  misc_RNA (1)...(19): siRNA sense strand
ugauagggaauguagagaa

SEQ ID NO: 2358554 - RNA, 19 nt, Homo sapiens
  misc_RNA (1)...(19): siRNA sense strand
cagugaauaaugaaggaga

SEQ ID NO: 2358555 - RNA, 19 nt, Homo sapiens
  misc_RNA (1)...(19): siRNA sense strand
gaauaaugaaggagagguc

SEQ ID NO: 2358556 - RNA, 19 nt, Homo sapiens
  misc_RNA (1)...(19): siRNA sense strand
ugggaaagaaaguggccuu

SEQ ID NO: 2358557 - RNA, 19 nt, Homo sapiens
  misc_RNA (1)...(19): siRNA sense strand
guaaauucaaagagcuuca

SEQ ID NO: 2358558 - RNA, 19 nt, Homo sapiens
  misc_RNA (1)...(19): siRNA sense strand
ccuauaugaugcugagaac

SEQ ID NO: 2358559 - RNA, 19 nt, Homo sapiens
  misc_RNA (1)...(19): siRNA sense strand
cccaaaggagccaugauaa

SEQ ID NO: 2358560 - RNA, 19 nt, Homo sapiens
  misc_RNA (1)...(19): siRNA sense strand
ggaauguagagaaaggcuu

SEQ ID NO: 2358561 - RNA, 19 nt, Homo sapiens
  misc_RNA (1)...(19): siRNA sense strand
ccaaaggagccaugauaac

SEQ ID NO: 2358562 - RNA, 19 nt, Homo sapiens
  misc_RNA (1)...(19): siRNA sense strand
ucucaaauguguggagcau

SEQ ID NO: 2358563 - RNA, 19 nt, Homo sapiens
  misc_RNA (1)...(19): siRNA sense strand
guacagcuguggagccaga

SEQ ID NO: 2358564 - RNA, 19 nt, Homo sapiens
  misc_RNA (1)...(19): siRNA sense strand
caggagucaaccaguguua

SEQ ID NO: 2358565 - RNA, 19 nt, Homo sapiens
  misc_RNA (1)...(19): siRNA sense strand
cauuggugcugauagggaa

SEQ ID NO: 2358566 - RNA, 19 nt, Homo sapiens
  misc_RNA (1)...(19): siRNA sense strand
gaaccuaggcaaagagcac

SEQ ID NO: 2358567 - RNA, 19 nt, Homo sapiens
  misc_RNA (1)...(19): siRNA sense strand
acgauaagguacaaaauga

SEQ ID NO: 2358568 - RNA, 19 nt, Homo sapiens
  misc_RNA (1)...(19): siRNA sense strand
ggguuucccagaagaacaa

SEQ ID NO: 2358569 - RNA, 19 nt, Homo sapiens
  misc_RNA (1)...(19): siRNA sense strand
cgaauggaacucugaagau

SEQ ID NO: 2358570 - RNA, 19 nt, Homo sapiens
  misc_RNA (1)...(19): siRNA sense strand
uguaugaagcuuaugguca

SEQ ID NO: 2358571 - RNA, 19 nt, Homo sapiens
  misc_RNA (1)...(19): siRNA sense strand
gcuucacacaggagacauu

SEQ ID NO: 2358572 - RNA, 19 nt, Homo sapiens
  misc_RNA (1)...(19): siRNA sense strand
cggcaucuuugcucagaau

SEQ ID NO: 2358573 - RNA, 19 nt, Homo sapiens
  misc_RNA (1)...(19): siRNA sense strand
uugcaaagauccaggacag

SEQ ID NO: 2358574 - RNA, 19 nt, Homo sapiens
  misc_RNA (1)...(19): siRNA sense strand
gaaaauugggaaagaaagu

SEQ ID NO: 2358575 - RNA, 19 nt, Homo sapiens
  misc_RNA (1)...(19): siRNA sense strand
gcucagaauaggccagagu

SEQ ID NO: 2358576 - RNA, 19 nt, Homo sapiens
  misc_RNA (1)...(19): siRNA sense strand
cuuacaaacaggugucuga

SEQ ID NO: 2358577 - RNA, 19 nt, Homo sapiens
  misc_RNA (1)...(19): siRNA sense strand
agaguggaauugagaucuu

SEQ ID NO: 2358578 - RNA, 19 nt, Homo sapiens
  misc_RNA (1)...(19): siRNA sense strand
ccugcuugggauauagaaa

SEQ ID NO: 2358579 - RNA, 19 nt, Homo sapiens
  misc_RNA (1)...(19): siRNA sense strand
gggcggaaggguucgugua

SEQ ID NO: 2358580 - RNA, 19 nt, Homo sapiens
  misc_RNA (1)...(19): siRNA sense strand
ccgaauggaacucugaaga

SEQ ID NO: 2358581 - RNA, 19 nt, Homo sapiens
  misc_RNA (1)...(19): siRNA sense strand
gcugauaucgccaugguga

SEQ ID NO: 2358582 - RNA, 19 nt, Homo sapiens
  misc_RNA (1)...(19): siRNA sense strand
ggcaaagagcacuucagaa

SEQ ID NO: 2358583 - RNA, 19 nt, Homo sapiens
  misc_RNA (1)...(19): siRNA sense strand
augaacuacuuuacaguga

SEQ ID NO: 2358584 - RNA, 19 nt, Homo sapiens
  misc_RNA (1)...(19): siRNA sense strand
auacauugcaccagagaag

SEQ ID NO: 2358585 - RNA, 19 nt, Homo sapiens
  misc_RNA (1)...(19): siRNA sense strand
gaaaauaucuacaacagga

SEQ ID NO: 2358586 - RNA, 19 nt, Homo sapiens
  misc_RNA (1)...(19): siRNA sense strand
ggggagagcuuacggucau

SEQ ID NO: 2358587 - RNA, 19 nt, Homo sapiens
  misc_RNA (1)...(19): siRNA sense strand
caugauaguuucugggaca

SEQ ID NO: 2358588 - RNA, 19 nt, Homo sapiens
  misc_RNA (1)...(19): siRNA sense strand
aaaccaaguuguaagggaa

SEQ ID NO: 2358589 - RNA, 19 nt, Homo sapiens
  misc_RNA (1)...(19): siRNA sense strand
ccagaagaccugagcguca

SEQ ID NO: 2358590 - RNA, 19 nt, Homo sapiens
  misc_RNA (1)...(19): siRNA sense strand
cagaaaauugggaaagaaa

SEQ ID NO: 2358591 - RNA, 19 nt, Homo sapiens
  misc_RNA (1)...(19): siRNA sense strand
caguaaauucaaagagcuu

SEQ ID NO: 2358592 - RNA, 19 nt, Homo sapiens
  misc_RNA (1)...(19): siRNA sense strand
gggaauugagggaggagca

SEQ ID NO: 2358593 - RNA, 19 nt, Homo sapiens
  misc_RNA (1)...(19): siRNA sense strand
gcuuauggucaaacagaau

SEQ ID NO: 2358594 - RNA, 19 nt, Homo sapiens
  misc_RNA (1)...(19): siRNA sense strand
acaaucagucugugggaau

SEQ ID NO: 2358595 - RNA, 19 nt, Homo sapiens
  misc_RNA (1)...(19): siRNA sense strand
ggacagugauggcuggcuu

SEQ ID NO: 2358596 - RNA, 19 nt, Homo sapiens
  misc_RNA (1)...(19): siRNA sense strand
ggaucuacgauaagguaca

SEQ ID NO: 2358597 - RNA, 19 nt, Homo sapiens
  misc_RNA (1)...(19): siRNA sense strand
uagaagacuugcagaaaau

SEQ ID NO: 2358598 - RNA, 19 nt, Homo sapiens
  misc_RNA (1)...(19): siRNA sense strand
agaauaggccagaguggau

SEQ ID NO: 2358599 - RNA, 19 nt, Homo sapiens
  misc_RNA (1)...(19): siRNA sense strand
gcaauuacgugaagcugga

SEQ ID NO: 2358600 - RNA, 19 nt, Homo sapiens
  misc_RNA (1)...(19): siRNA sense strand
gagaauacauugcaccaga

SEQ ID NO: 2358601 - RNA, 19 nt, Homo sapiens
  misc_RNA (1)...(19): siRNA sense strand
gagcagaguaccuggguuc

SEQ ID NO: 2358602 - RNA, 19 nt, Homo sapiens
  misc_RNA (1)...(19): siRNA sense strand
ugauagggaauguagagaa

SEQ ID NO: 2358603 - RNA, 19 nt, Homo sapiens
  misc_RNA (1)...(19): siRNA sense strand
cagugaauaaugaaggaga

SEQ ID NO: 2358604 - RNA, 19 nt, Homo sapiens
  misc_RNA (1)...(19): siRNA sense strand
gaauaaugaaggagagguc

SEQ ID NO: 2358605 - RNA, 19 nt, Homo sapiens
  misc_RNA (1)...(19): siRNA sense strand
ugggaaagaaaguggccuu

SEQ ID NO: 2358606 - RNA, 19 nt, Homo sapiens
  misc_RNA (1)...(19): siRNA sense strand
guaaauucaaagagcuuca

SEQ ID NO: 2358607 - RNA, 19 nt, Homo sapiens
  misc_RNA (1)...(19): siRNA sense strand
ccuauaugaugcugagaac

SEQ ID NO: 2358608 - RNA, 19 nt, Homo sapiens
  misc_RNA (1)...(19): siRNA sense strand
cccaaaggagccaugauaa

SEQ ID NO: 2358609 - RNA, 19 nt, Homo sapiens
  misc_RNA (1)...(19): siRNA sense strand
ggaauguagagaaaggcuu

SEQ ID NO: 2358610 - RNA, 19 nt, Homo sapiens
  misc_RNA (1)...(19): siRNA sense strand
ccaaaggagccaugauaac

SEQ ID NO: 2358611 - RNA, 19 nt, Homo sapiens
  misc_RNA (1)...(19): siRNA sense strand
ucucaaauguguggagcau

SEQ ID NO: 2358612 - RNA, 19 nt, Homo sapiens
  misc_RNA (1)...(19): siRNA sense strand
guacagcuguggagccaga

SEQ ID NO: 2358613 - RNA, 19 nt, Homo sapiens
  misc_RNA (1)...(19): siRNA sense strand
caggagucaaccaguguua

SEQ ID NO: 2358614 - RNA, 19 nt, Homo sapiens
  misc_RNA (1)...(19): siRNA sense strand
cauuggugcugauagggaa

SEQ ID NO: 2358615 - RNA, 19 nt, Homo sapiens
  misc_RNA (1)...(19): siRNA sense strand
gaaccuaggcaaagagcac

SEQ ID NO: 2358616 - RNA, 19 nt, Homo sapiens
  misc_RNA (1)...(19): siRNA sense strand
acgauaagguacaaaauga

SEQ ID NO: 2358617 - RNA, 19 nt, Homo sapiens
  misc_RNA (1)...(19): siRNA sense strand
ggguuucccagaagaacaa

SEQ ID NO: 2358618 - RNA, 19 nt, Homo sapiens
  misc_RNA (1)...(19): siRNA sense strand
cgaauggaacucugaagau

SEQ ID NO: 2358619 - RNA, 19 nt, Homo sapiens
  misc_RNA (1)...(19): siRNA sense strand
uguaugaagcuuaugguca

SEQ ID NO: 2358620 - RNA, 19 nt, Homo sapiens
  misc_RNA (1)...(19): siRNA sense strand
gcuucacacaggagacauu

SEQ ID NO: 2358621 - RNA, 19 nt, Homo sapiens
  misc_RNA (1)...(19): siRNA sense strand
cggcaucuuugcucagaau

SEQ ID NO: 2358622 - RNA, 19 nt, Homo sapiens
  misc_RNA (1)...(19): siRNA sense strand
uugcaaagauccaggacag

SEQ ID NO: 2358623 - RNA, 19 nt, Homo sapiens
  misc_RNA (1)...(19): siRNA sense strand
gaaaauugggaaagaaagu

SEQ ID NO: 2358624 - RNA, 19 nt, Homo sapiens
  misc_RNA (1)...(19): siRNA sense strand
gcucagaauaggccagagu

SEQ ID NO: 2358625 - RNA, 19 nt, Homo sapiens
  misc_RNA (1)...(19): siRNA sense strand
cuuacaaacaggugucuga

SEQ ID NO: 2358626 - RNA, 19 nt, Homo sapiens
  misc_RNA (1)...(19): siRNA sense strand
agaguggaauugagaucuu

SEQ ID NO: 2358627 - RNA, 19 nt, Homo sapiens
  misc_RNA (1)...(19): siRNA sense strand
ccugcuugggauauagaaa

SEQ ID NO: 2358628 - RNA, 19 nt, Homo sapiens
  misc_RNA (1)...(19): siRNA sense strand
gggcggaaggguucgugua

SEQ ID NO: 2358629 - RNA, 19 nt, Homo sapiens
  misc_RNA (1)...(19): siRNA sense strand
ccgaauggaacucugaaga

SEQ ID NO: 2358630 - RNA, 19 nt, Homo sapiens
  misc_RNA (1)...(19): siRNA sense strand
gcugauaucgccaugguga

SEQ ID NO: 2358631 - RNA, 19 nt, Homo sapiens
  misc_RNA (1)...(19): siRNA sense strand
ggcaaagagcacuucagaa

SEQ ID NO: 2358632 - RNA, 19 nt, Homo sapiens
  misc_RNA (1)...(19): siRNA sense strand
augaacuacuuuacaguga

SEQ ID NO: 2358633 - RNA, 19 nt, Homo sapiens
  misc_RNA (1)...(19): siRNA sense strand
auacauugcaccagagaag

SEQ ID NO: 2358634 - RNA, 19 nt, Homo sapiens
  misc_RNA (1)...(19): siRNA sense strand
gaaaauaucuacaacagga

SEQ ID NO: 2358635 - RNA, 19 nt, Homo sapiens
  misc_RNA (1)...(19): siRNA sense strand
ggggagagcuuacggucau

SEQ ID NO: 2358636 - RNA, 19 nt, Homo sapiens
  misc_RNA (1)...(19): siRNA sense strand
caugauaguuucugggaca

SEQ ID NO: 2358637 - RNA, 19 nt, Homo sapiens
  misc_RNA (1)...(19): siRNA sense strand
aaaccaaguuguaagggaa

SEQ ID NO: 2358638 - RNA, 19 nt, Homo sapiens
  misc_RNA (1)...(19): siRNA sense strand
ccagaagaccugagcguca

SEQ ID NO: 2358639 - RNA, 19 nt, Homo sapiens
  misc_RNA (1)...(19): siRNA sense strand
cagaaaauugggaaagaaa

SEQ ID NO: 2358640 - RNA, 19 nt, Homo sapiens
  misc_RNA (1)...(19): siRNA sense strand
caguaaauucaaagagcuu

SEQ ID NO: 2358641 - RNA, 19 nt, Homo sapiens
  misc_RNA (1)...(19): siRNA sense strand
gggaauugagggaggagca

SEQ ID NO: 2358642 - RNA, 19 nt, Homo sapiens
  misc_RNA (1)...(19): siRNA sense strand
gcuuauggucaaacagaau

SEQ ID NO: 2358643 - RNA, 19 nt, Homo sapiens
  misc_RNA (1)...(19): siRNA sense strand
acaaucagucugugggaau

SEQ ID NO: 2358644 - RNA, 19 nt, Homo sapiens
  misc_RNA (1)...(19): siRNA sense strand
ggacagugauggcuggcuu

SEQ ID NO: 2358645 - RNA, 19 nt, Homo sapiens
  misc_RNA (1)...(19): siRNA sense strand
ggaucuacgauaagguaca

SEQ ID NO: 2358646 - RNA, 19 nt, Homo sapiens
  misc_RNA (1)...(19): siRNA sense strand
uagaagacuugcagaaaau

SEQ ID NO: 2358647 - RNA, 19 nt, Homo sapiens
  misc_RNA (1)...(19): siRNA sense strand
agaauaggccagaguggau

SEQ ID NO: 2358648 - RNA, 19 nt, Homo sapiens
  misc_RNA (1)...(19): siRNA sense strand
gcaauuacgugaagcugga

SEQ ID NO: 2358649 - RNA, 19 nt, Homo sapiens
  misc_RNA (1)...(19): siRNA sense strand
gagaauacauugcaccaga

SEQ ID NO: 2358650 - RNA, 19 nt, Homo sapiens
  misc_RNA (1)...(19): siRNA sense strand
gagcagaguaccuggguuc

SEQ ID NO: 2358651 - RNA, 19 nt, Homo sapiens
  misc_RNA (1)...(19): siRNA sense strand
ugauagggaauguagagaa

SEQ ID NO: 2358652 - RNA, 19 nt, Homo sapiens
  misc_RNA (1)...(19): siRNA sense strand
cagugaauaaugaaggaga

SEQ ID NO: 2358653 - RNA, 19 nt, Homo sapiens
  misc_RNA (1)...(19): siRNA sense strand
gaauaaugaaggagagguc

SEQ ID NO: 2358654 - RNA, 19 nt, Homo sapiens
  misc_RNA (1)...(19): siRNA sense strand
ugggaaagaaaguggccuu

SEQ ID NO: 2358655 - RNA, 19 nt, Homo sapiens
  misc_RNA (1)...(19): siRNA sense strand
guaaauucaaagagcuuca

SEQ ID NO: 2358656 - RNA, 19 nt, Homo sapiens
  misc_RNA (1)...(19): siRNA sense strand
ccuauaugaugcugagaac

SEQ ID NO: 2358657 - RNA, 19 nt, Homo sapiens
  misc_RNA (1)...(19): siRNA sense strand
cccaaaggagccaugauaa

SEQ ID NO: 2358658 - RNA, 19 nt, Homo sapiens
  misc_RNA (1)...(19): siRNA sense strand
ggaauguagagaaaggcuu

SEQ ID NO: 2358659 - RNA, 19 nt, Homo sapiens
  misc_RNA (1)...(19): siRNA sense strand
ccaaaggagccaugauaac

SEQ ID NO: 2358660 - RNA, 19 nt, Homo sapiens
  misc_RNA (1)...(19): siRNA sense strand
ucucaaauguguggagcau

SEQ ID NO: 2358661 - RNA, 19 nt, Homo sapiens
  misc_RNA (1)...(19): siRNA sense strand
guacagcuguggagccaga

SEQ ID NO: 2358662 - RNA, 19 nt, Homo sapiens
  misc_RNA (1)...(19): siRNA sense strand
caggagucaaccaguguua

SEQ ID NO: 2358663 - RNA, 19 nt, Homo sapiens
  misc_RNA (1)...(19): siRNA sense strand
cauuggugcugauagggaa

SEQ ID NO: 2358664 - RNA, 19 nt, Homo sapiens
  misc_RNA (1)...(19): siRNA sense strand
gaaccuaggcaaagagcac

SEQ ID NO: 2358665 - RNA, 19 nt, Homo sapiens
  misc_RNA (1)...(19): siRNA sense strand
acgauaagguacaaaauga

SEQ ID NO: 2358666 - RNA, 19 nt, Homo sapiens
  misc_RNA (1)...(19): siRNA sense strand
ggguuucccagaagaacaa

SEQ ID NO: 2358667 - RNA, 19 nt, Homo sapiens
  misc_RNA (1)...(19): siRNA sense strand
cgaauggaacucugaagau

SEQ ID NO: 2358668 - RNA, 19 nt, Homo sapiens
  misc_RNA (1)...(19): siRNA sense strand
uguaugaagcuuaugguca

SEQ ID NO: 2358669 - RNA, 19 nt, Homo sapiens
  misc_RNA (1)...(19): siRNA sense strand
gcuucacacaggagacauu

SEQ ID NO: 2358670 - RNA, 19 nt, Homo sapiens
  misc_RNA (1)...(19): siRNA sense strand
cggcaucuuugcucagaau

SEQ ID NO: 2358671 - RNA, 19 nt, Homo sapiens
  misc_RNA (1)...(19): siRNA sense strand
uugcaaagauccaggacag

SEQ ID NO: 2358672 - RNA, 19 nt, Homo sapiens
  misc_RNA (1)...(19): siRNA sense strand
gaaaauugggaaagaaagu

SEQ ID NO: 2358673 - RNA, 19 nt, Homo sapiens
  misc_RNA (1)...(19): siRNA sense strand
gcucagaauaggccagagu

SEQ ID NO: 2358674 - RNA, 19 nt, Homo sapiens
  misc_RNA (1)...(19): siRNA sense strand
cuuacaaacaggugucuga

SEQ ID NO: 2358675 - RNA, 19 nt, Homo sapiens
  misc_RNA (1)...(19): siRNA sense strand
agaguggaauugagaucuu

SEQ ID NO: 2358676 - RNA, 19 nt, Homo sapiens
  misc_RNA (1)...(19): siRNA sense strand
ccugcuugggauauagaaa

SEQ ID NO: 2358677 - RNA, 19 nt, Homo sapiens
  misc_RNA (1)...(19): siRNA sense strand
gggcggaaggguucgugua

SEQ ID NO: 2358678 - RNA, 19 nt, Homo sapiens
  misc_RNA (1)...(19): siRNA sense strand
ccgaauggaacucugaaga

SEQ ID NO: 2358679 - RNA, 19 nt, Homo sapiens
  misc_RNA (1)...(19): siRNA sense strand
gcugauaucgccaugguga

SEQ ID NO: 2358680 - RNA, 19 nt, Homo sapiens
  misc_RNA (1)...(19): siRNA sense strand
ggcaaagagcacuucagaa

SEQ ID NO: 2358681 - RNA, 19 nt, Homo sapiens
  misc_RNA (1)...(19): siRNA sense strand
augaacuacuuuacaguga

SEQ ID NO: 2358682 - RNA, 19 nt, Homo sapiens
  misc_RNA (1)...(19): siRNA sense strand
auacauugcaccagagaag

SEQ ID NO: 2358683 - RNA, 19 nt, Homo sapiens
  misc_RNA (1)...(19): siRNA sense strand
gaaaauaucuacaacagga

SEQ ID NO: 2358684 - RNA, 19 nt, Homo sapiens
  misc_RNA (1)...(19): siRNA sense strand
ggggagagcuuacggucau

SEQ ID NO: 2358685 - RNA, 19 nt, Homo sapiens
  misc_RNA (1)...(19): siRNA sense strand
ccauguaccucuucggcaa

SEQ ID NO: 2358686 - RNA, 19 nt, Homo sapiens
  misc_RNA (1)...(19): siRNA sense strand
gagagaaagaugagagcuc

SEQ ID NO: 2358687 - RNA, 19 nt, Homo sapiens
  misc_RNA (1)...(19): siRNA sense strand
ccgccaagucacacaggaa

SEQ ID NO: 2358688 - RNA, 19 nt, Homo sapiens
  misc_RNA (1)...(19): siRNA sense strand
ucguggcaucagagagaaa

SEQ ID NO: 2358689 - RNA, 19 nt, Homo sapiens
  misc_RNA (1)...(19): siRNA sense strand
gccaagucacacaggaaga

SEQ ID NO: 2358690 - RNA, 19 nt, Homo sapiens
  misc_RNA (1)...(19): siRNA sense strand
uucaagagguggaagcuga

SEQ ID NO: 2358691 - RNA, 19 nt, Homo sapiens
  misc_RNA (1)...(19): siRNA sense strand
gggaagaggacgaggcaga

SEQ ID NO: 2358692 - RNA, 19 nt, Homo sapiens
  misc_RNA (1)...(19): siRNA sense strand
aggacgaggcagaggaaau

SEQ ID NO: 2358693 - RNA, 19 nt, Homo sapiens
  misc_RNA (1)...(19): siRNA sense strand
auuaaaugguccuggugaa

SEQ ID NO: 2358694 - RNA, 19 nt, Homo sapiens
  misc_RNA (1)...(19): siRNA sense strand
uggaagcgagauagagaaa

SEQ ID NO: 2358695 - RNA, 19 nt, Homo sapiens
  misc_RNA (1)...(19): siRNA sense strand
aaucaacguaagagagcua

SEQ ID NO: 2358696 - RNA, 19 nt, Homo sapiens
  misc_RNA (1)...(19): siRNA sense strand
aagaagagaagguugaaaa

SEQ ID NO: 2358697 - RNA, 19 nt, Homo sapiens
  misc_RNA (1)...(19): siRNA sense strand
uuguaagaucagagaguca

SEQ ID NO: 2358698 - RNA, 19 nt, Homo sapiens
  misc_RNA (1)...(19): siRNA sense strand
caauaggagaaaugauaca

SEQ ID NO: 2358699 - RNA, 19 nt, Homo sapiens
  misc_RNA (1)...(19): siRNA sense strand
agguguauccuguggaaga

SEQ ID NO: 2358700 - RNA, 19 nt, Homo sapiens
  misc_RNA (1)...(19): siRNA sense strand
aagaaaaccgggaaacaaa

SEQ ID NO: 2358701 - RNA, 19 nt, Homo sapiens
  misc_RNA (1)...(19): siRNA sense strand
uggaugagaaaaugagaaa

SEQ ID NO: 2358702 - RNA, 19 nt, Homo sapiens
  misc_RNA (1)...(19): siRNA sense strand
augucaaccugaagcaaau

SEQ ID NO: 2358703 - RNA, 19 nt, Homo sapiens
  misc_RNA (1)...(19): siRNA sense strand
agaucagagagucaagaaa

SEQ ID NO: 2358704 - RNA, 19 nt, Homo sapiens
  misc_RNA (1)...(19): siRNA sense strand
aagagaaguaacagugaca

SEQ ID NO: 2358705 - RNA, 19 nt, Homo sapiens
  misc_RNA (1)...(19): siRNA sense strand
agucaaguaaucaacguaa

SEQ ID NO: 2358706 - RNA, 19 nt, Homo sapiens
  misc_RNA (1)...(19): siRNA sense strand
aagaguauauuaagcguca

SEQ ID NO: 2358707 - RNA, 19 nt, Homo sapiens
  misc_RNA (1)...(19): siRNA sense strand
uggugaaaggacugaucaa

SEQ ID NO: 2358708 - RNA, 19 nt, Homo sapiens
  misc_RNA (1)...(19): siRNA sense strand
gccacaaaauagaaaagaa

SEQ ID NO: 2358709 - RNA, 19 nt, Homo sapiens
  misc_RNA (1)...(19): siRNA sense strand
uggccaacaccaagugaau

SEQ ID NO: 2358710 - RNA, 19 nt, Homo sapiens
  misc_RNA (1)...(19): siRNA sense strand
uagaaaauuuggaacgaga

SEQ ID NO: 2358711 - RNA, 19 nt, Homo sapiens
  misc_RNA (1)...(19): siRNA sense strand
agaacauggugaaaggacu

SEQ ID NO: 2358712 - RNA, 19 nt, Homo sapiens
  misc_RNA (1)...(19): siRNA sense strand
ucuuagaggcacugaagga

SEQ ID NO: 2358713 - RNA, 19 nt, Homo sapiens
  misc_RNA (1)...(19): siRNA sense strand
agagaagguugaaaagaga

SEQ ID NO: 2358714 - RNA, 19 nt, Homo sapiens
  misc_RNA (1)...(19): siRNA sense strand
aaguaaucaacguaagaga

SEQ ID NO: 2358715 - RNA, 19 nt, Homo sapiens
  misc_RNA (1)...(19): siRNA sense strand
uaucaagaacauggugaaa

SEQ ID NO: 2358716 - RNA, 19 nt, Homo sapiens
  misc_RNA (1)...(19): siRNA sense strand
aucagagagucaagaaaga

SEQ ID NO: 2358717 - RNA, 19 nt, Homo sapiens
  misc_RNA (1)...(19): siRNA sense strand
guugaaaagagaaguaaca

SEQ ID NO: 2358718 - RNA, 19 nt, Homo sapiens
  misc_RNA (1)...(19): siRNA sense strand
uguuguaagaucagagagu

SEQ ID NO: 2358719 - RNA, 19 nt, Homo sapiens
  misc_RNA (1)...(19): siRNA sense strand
aggagaaaugauacacgaa

SEQ ID NO: 2358720 - RNA, 19 nt, Homo sapiens
  misc_RNA (1)...(19): siRNA sense strand
uuaucaagaacauggugaa

SEQ ID NO: 2358721 - RNA, 19 nt, Homo sapiens
  misc_RNA (1)...(19): siRNA sense strand
gggaagaggacgaggcaga

SEQ ID NO: 2358722 - RNA, 19 nt, Homo sapiens
  misc_RNA (1)...(19): siRNA sense strand
aggacgaggcagaggaaau

SEQ ID NO: 2358723 - RNA, 19 nt, Homo sapiens
  misc_RNA (1)...(19): siRNA sense strand
auuaaaugguccuggugaa

SEQ ID NO: 2358724 - RNA, 19 nt, Homo sapiens
  misc_RNA (1)...(19): siRNA sense strand
uggaagcgagauagagaaa

SEQ ID NO: 2358725 - RNA, 19 nt, Homo sapiens
  misc_RNA (1)...(19): siRNA sense strand
aaucaacguaagagagcua

SEQ ID NO: 2358726 - RNA, 19 nt, Homo sapiens
  misc_RNA (1)...(19): siRNA sense strand
aagaagagaagguugaaaa

SEQ ID NO: 2358727 - RNA, 19 nt, Homo sapiens
  misc_RNA (1)...(19): siRNA sense strand
uuguaagaucagagaguca

SEQ ID NO: 2358728 - RNA, 19 nt, Homo sapiens
  misc_RNA (1)...(19): siRNA sense strand
caauaggagaaaugauaca

SEQ ID NO: 2358729 - RNA, 19 nt, Homo sapiens
  misc_RNA (1)...(19): siRNA sense strand
agguguauccuguggaaga

SEQ ID NO: 2358730 - RNA, 19 nt, Homo sapiens
  misc_RNA (1)...(19): siRNA sense strand
aagaaaaccgggaaacaaa

SEQ ID NO: 2358731 - RNA, 19 nt, Homo sapiens
  misc_RNA (1)...(19): siRNA sense strand
uggaugagaaaaugagaaa

SEQ ID NO: 2358732 - RNA, 19 nt, Homo sapiens
  misc_RNA (1)...(19): siRNA sense strand
augucaaccugaagcaaau

SEQ ID NO: 2358733 - RNA, 19 nt, Homo sapiens
  misc_RNA (1)...(19): siRNA sense strand
agaucagagagucaagaaa

SEQ ID NO: 2358734 - RNA, 19 nt, Homo sapiens
  misc_RNA (1)...(19): siRNA sense strand
aagagaaguaacagugaca

SEQ ID NO: 2358735 - RNA, 19 nt, Homo sapiens
  misc_RNA (1)...(19): siRNA sense strand
agucaaguaaucaacguaa

SEQ ID NO: 2358736 - RNA, 19 nt, Homo sapiens
  misc_RNA (1)...(19): siRNA sense strand
aagaguauauuaagcguca

SEQ ID NO: 2358737 - RNA, 19 nt, Homo sapiens
  misc_RNA (1)...(19): siRNA sense strand
uggugaaaggacugaucaa

SEQ ID NO: 2358738 - RNA, 19 nt, Homo sapiens
  misc_RNA (1)...(19): siRNA sense strand
gccacaaaauagaaaagaa

SEQ ID NO: 2358739 - RNA, 19 nt, Homo sapiens
  misc_RNA (1)...(19): siRNA sense strand
uggccaacaccaagugaau

SEQ ID NO: 2358740 - RNA, 19 nt, Homo sapiens
  misc_RNA (1)...(19): siRNA sense strand
uagaaaauuuggaacgaga

SEQ ID NO: 2358741 - RNA, 19 nt, Homo sapiens
  misc_RNA (1)...(19): siRNA sense strand
agaacauggugaaaggacu

SEQ ID NO: 2358742 - RNA, 19 nt, Homo sapiens
  misc_RNA (1)...(19): siRNA sense strand
ucuuagaggcacugaagga

SEQ ID NO: 2358743 - RNA, 19 nt, Homo sapiens
  misc_RNA (1)...(19): siRNA sense strand
agagaagguugaaaagaga

SEQ ID NO: 2358744 - RNA, 19 nt, Homo sapiens
  misc_RNA (1)...(19): siRNA sense strand
aaguaaucaacguaagaga

SEQ ID NO: 2358745 - RNA, 19 nt, Homo sapiens
  misc_RNA (1)...(19): siRNA sense strand
uaucaagaacauggugaaa

SEQ ID NO: 2358746 - RNA, 19 nt, Homo sapiens
  misc_RNA (1)...(19): siRNA sense strand
aucagagagucaagaaaga

SEQ ID NO: 2358747 - RNA, 19 nt, Homo sapiens
  misc_RNA (1)...(19): siRNA sense strand
guugaaaagagaaguaaca

SEQ ID NO: 2358748 - RNA, 19 nt, Homo sapiens
  misc_RNA (1)...(19): siRNA sense strand
uguuguaagaucagagagu

SEQ ID NO: 2358749 - RNA, 19 nt, Homo sapiens
  misc_RNA (1)...(19): siRNA sense strand
aggagaaaugauacacgaa

SEQ ID NO: 2358750 - RNA, 19 nt, Homo sapiens
  misc_RNA (1)...(19): siRNA sense strand
uuaucaagaacauggugaa

SEQ ID NO: 2358751 - RNA, 19 nt, Homo sapiens
  misc_RNA (1)...(19): siRNA sense strand
gggaagaggacgaggcaga

SEQ ID NO: 2358752 - RNA, 19 nt, Homo sapiens
  misc_RNA (1)...(19): siRNA sense strand
aggacgaggcagaggaaau

SEQ ID NO: 2358753 - RNA, 19 nt, Homo sapiens
  misc_RNA (1)...(19): siRNA sense strand
auuaaaugguccuggugaa

SEQ ID NO: 2358754 - RNA, 19 nt, Homo sapiens
  misc_RNA (1)...(19): siRNA sense strand
uggaagcgagauagagaaa

SEQ ID NO: 2358755 - RNA, 19 nt, Homo sapiens
  misc_RNA (1)...(19): siRNA sense strand
aaucaacguaagagagcua

SEQ ID NO: 2358756 - RNA, 19 nt, Homo sapiens
  misc_RNA (1)...(19): siRNA sense strand
aagaagagaagguugaaaa

SEQ ID NO: 2358757 - RNA, 19 nt, Homo sapiens
  misc_RNA (1)...(19): siRNA sense strand
uuguaagaucagagaguca

SEQ ID NO: 2358758 - RNA, 19 nt, Homo sapiens
  misc_RNA (1)...(19): siRNA sense strand
caauaggagaaaugauaca

SEQ ID NO: 2358759 - RNA, 19 nt, Homo sapiens
  misc_RNA (1)...(19): siRNA sense strand
agguguauccuguggaaga

SEQ ID NO: 2358760 - RNA, 19 nt, Homo sapiens
  misc_RNA (1)...(19): siRNA sense strand
aagaaaaccgggaaacaaa

SEQ ID NO: 2358761 - RNA, 19 nt, Homo sapiens
  misc_RNA (1)...(19): siRNA sense strand
uggaugagaaaaugagaaa

SEQ ID NO: 2358762 - RNA, 19 nt, Homo sapiens
  misc_RNA (1)...(19): siRNA sense strand
augucaaccugaagcaaau

SEQ ID NO: 2358763 - RNA, 19 nt, Homo sapiens
  misc_RNA (1)...(19): siRNA sense strand
agaucagagagucaagaaa

SEQ ID NO: 2358764 - RNA, 19 nt, Homo sapiens
  misc_RNA (1)...(19): siRNA sense strand
aagagaaguaacagugaca

SEQ ID NO: 2358765 - RNA, 19 nt, Homo sapiens
  misc_RNA (1)...(19): siRNA sense strand
agucaaguaaucaacguaa

SEQ ID NO: 2358766 - RNA, 19 nt, Homo sapiens
  misc_RNA (1)...(19): siRNA sense strand
aagaguauauuaagcguca

SEQ ID NO: 2358767 - RNA, 19 nt, Homo sapiens
  misc_RNA (1)...(19): siRNA sense strand
uggugaaaggacugaucaa

SEQ ID NO: 2358768 - RNA, 19 nt, Homo sapiens
  misc_RNA (1)...(19): siRNA sense strand
gccacaaaauagaaaagaa

SEQ ID NO: 2358769 - RNA, 19 nt, Homo sapiens
  misc_RNA (1)...(19): siRNA sense strand
uggccaacaccaagugaau

SEQ ID NO: 2358770 - RNA, 19 nt, Homo sapiens
  misc_RNA (1)...(19): siRNA sense strand
uagaaaauuuggaacgaga

SEQ ID NO: 2358771 - RNA, 19 nt, Homo sapiens
  misc_RNA (1)...(19): siRNA sense strand
agaacauggugaaaggacu

SEQ ID NO: 2358772 - RNA, 19 nt, Homo sapiens
  misc_RNA (1)...(19): siRNA sense strand
ucuuagaggcacugaagga

SEQ ID NO: 2358773 - RNA, 19 nt, Homo sapiens
  misc_RNA (1)...(19): siRNA sense strand
agagaagguugaaaagaga

SEQ ID NO: 2358774 - RNA, 19 nt, Homo sapiens
  misc_RNA (1)...(19): siRNA sense strand
aaguaaucaacguaagaga

SEQ ID NO: 2358775 - RNA, 19 nt, Homo sapiens
  misc_RNA (1)...(19): siRNA sense strand
uaucaagaacauggugaaa

SEQ ID NO: 2358776 - RNA, 19 nt, Homo sapiens
  misc_RNA (1)...(19): siRNA sense strand
aucagagagucaagaaaga

SEQ ID NO: 2358777 - RNA, 19 nt, Homo sapiens
  misc_RNA (1)...(19): siRNA sense strand
guugaaaagagaaguaaca

SEQ ID NO: 2358778 - RNA, 19 nt, Homo sapiens
  misc_RNA (1)...(19): siRNA sense strand
uguuguaagaucagagagu

SEQ ID NO: 2358779 - RNA, 19 nt, Homo sapiens
  misc_RNA (1)...(19): siRNA sense strand
aggagaaaugauacacgaa

SEQ ID NO: 2358780 - RNA, 19 nt, Homo sapiens
  misc_RNA (1)...(19): siRNA sense strand
uuaucaagaacauggugaa

SEQ ID NO: 2358781 - RNA, 19 nt, Homo sapiens
  misc_RNA (1)...(19): siRNA sense strand
gggaagugguggagaccca

SEQ ID NO: 2358782 - RNA, 19 nt, Homo sapiens
  misc_RNA (1)...(19): siRNA sense strand
ccgaaagaucacaggccua

SEQ ID NO: 2358783 - RNA, 19 nt, Homo sapiens
  misc_RNA (1)...(19): siRNA sense strand
gaguuguuccgaagagcaa

SEQ ID NO: 2358784 - RNA, 19 nt, Homo sapiens
  misc_RNA (1)...(19): siRNA sense strand
cguuggaaccugaagcaca

SEQ ID NO: 2358785 - RNA, 19 nt, Homo sapiens
  misc_RNA (1)...(19): siRNA sense strand
cugaaggaguuguuccgaa

SEQ ID NO: 2358786 - RNA, 19 nt, Homo sapiens
  misc_RNA (1)...(19): siRNA sense strand
ccgucaagcccaucuacaa

SEQ ID NO: 2358787 - RNA, 19 nt, Homo sapiens
  misc_RNA (1)...(19): siRNA sense strand
uggaagaagcagaaaggaa

SEQ ID NO: 2358788 - RNA, 19 nt, Homo sapiens
  misc_RNA (1)...(19): siRNA sense strand
cauugaagauacuggaaaa

SEQ ID NO: 2358789 - RNA, 19 nt, Homo sapiens
  misc_RNA (1)...(19): siRNA sense strand
acagaaaagagguggaauu

SEQ ID NO: 2358790 - RNA, 19 nt, Homo sapiens
  misc_RNA (1)...(19): siRNA sense strand
cauugaggauauuggaaaa

SEQ ID NO: 2358791 - RNA, 19 nt, Homo sapiens
  misc_RNA (1)...(19): siRNA sense strand
acuugugaaucuaggaaau

SEQ ID NO: 2358792 - RNA, 19 nt, Homo sapiens
  misc_RNA (1)...(19): siRNA sense strand
caguaaggcaggcuguaaa

SEQ ID NO: 2358793 - RNA, 19 nt, Homo sapiens
  misc_RNA (1)...(19): siRNA sense strand
ccauugaagauacuggaaa

SEQ ID NO: 2358794 - RNA, 19 nt, Homo sapiens
  misc_RNA (1)...(19): siRNA sense strand
ucauugaggauauuggaaa

SEQ ID NO: 2358795 - RNA, 19 nt, Homo sapiens
  misc_RNA (1)...(19): siRNA sense strand
gaguuaauuugauugggaa

SEQ ID NO: 2358796 - RNA, 19 nt, Homo sapiens
  misc_RNA (1)...(19): siRNA sense strand
ggaagaagcagaaaggaag

SEQ ID NO: 2358797 - RNA, 19 nt, Homo sapiens
  misc_RNA (1)...(19): siRNA sense strand
ucaugaagagucaggaauu

SEQ ID NO: 2358798 - RNA, 19 nt, Homo sapiens
  misc_RNA (1)...(19): siRNA sense strand
aagcagaaaggaaguggaa

SEQ ID NO: 2358799 - RNA, 19 nt, Homo sapiens
  misc_RNA (1)...(19): siRNA sense strand
ggaagauggucgugauccu

SEQ ID NO: 2358800 - RNA, 19 nt, Homo sapiens
  misc_RNA (1)...(19): siRNA sense strand
uugacaggcuggagauaga

SEQ ID NO: 2358801 - RNA, 19 nt, Homo sapiens
  misc_RNA (1)...(19): siRNA sense strand
cuuaauaauaccugccauu

SEQ ID NO: 2358802 - RNA, 19 nt, Homo sapiens
  misc_RNA (1)...(19): siRNA sense strand
ccacugaaugggaagguga

SEQ ID NO: 2358803 - RNA, 19 nt, Homo sapiens
  misc_RNA (1)...(19): siRNA sense strand
ccacaaagcugcaagaagg

SEQ ID NO: 2358804 - RNA, 19 nt, Homo sapiens
  misc_RNA (1)...(19): siRNA sense strand
ucuggagaauauagaguuu

SEQ ID NO: 2358805 - RNA, 19 nt, Homo sapiens
  misc_RNA (1)...(19): siRNA sense strand
caggagacacaguacuaaa

SEQ ID NO: 2358806 - RNA, 19 nt, Homo sapiens
  misc_RNA (1)...(19): siRNA sense strand
ccuuaauugcuaugaggau

SEQ ID NO: 2358807 - RNA, 19 nt, Homo sapiens
  misc_RNA (1)...(19): siRNA sense strand
acauggaauucgaacccaa

SEQ ID NO: 2358808 - RNA, 19 nt, Homo sapiens
  misc_RNA (1)...(19): siRNA sense strand
ccgaaaauccuguggagca

SEQ ID NO: 2358809 - RNA, 19 nt, Homo sapiens
  misc_RNA (1)...(19): siRNA sense strand
ggaguuaauuugauuggga

SEQ ID NO: 2358810 - RNA, 19 nt, Homo sapiens
  misc_RNA (1)...(19): siRNA sense strand
cccuagagauccagaaauc

SEQ ID NO: 2358811 - RNA, 19 nt, Homo sapiens
  misc_RNA (1)...(19): siRNA sense strand
gcgccuauaccauccgaaa

SEQ ID NO: 2358812 - RNA, 19 nt, Homo sapiens
  misc_RNA (1)...(19): siRNA sense strand
uggaggaugcagacaggaa

SEQ ID NO: 2358813 - RNA, 19 nt, Homo sapiens
  misc_RNA (1)...(19): siRNA sense strand
caagaaaagccaacaugaa

SEQ ID NO: 2358814 - RNA, 19 nt, Homo sapiens
  misc_RNA (1)...(19): siRNA sense strand
ccggcuggagauugaauua

SEQ ID NO: 2358815 - RNA, 19 nt, Homo sapiens
  misc_RNA (1)...(19): siRNA sense strand
ugaaugggaaggugacgaa

SEQ ID NO: 2358816 - RNA, 19 nt, Homo sapiens
  misc_RNA (1)...(19): siRNA sense strand
uagacuuacugaaaggaga

SEQ ID NO: 2358817 - RNA, 19 nt, Homo sapiens
  misc_RNA (1)...(19): siRNA sense strand
ucacccaagaauacaguua

SEQ ID NO: 2358818 - RNA, 19 nt, Homo sapiens
  misc_RNA (1)...(19): siRNA sense strand
ggaguauaugaaugugaau

SEQ ID NO: 2358819 - RNA, 19 nt, Homo sapiens
  misc_RNA (1)...(19): siRNA sense strand
aguugaaggaugcgggagu

SEQ ID NO: 2358820 - RNA, 19 nt, Homo sapiens
  misc_RNA (1)...(19): siRNA sense strand
ccaaacaaaggcagaguac

SEQ ID NO: 2358821 - RNA, 19 nt, Homo sapiens
  misc_RNA (1)...(19): siRNA sense strand
acgcaaacacuuuauguca

SEQ ID NO: 2358822 - RNA, 19 nt, Homo sapiens
  misc_RNA (1)...(19): siRNA sense strand
gaacccaaacaaaggcaga

SEQ ID NO: 2358823 - RNA, 19 nt, Homo sapiens
  misc_RNA (1)...(19): siRNA sense strand
acaucuacgcugacaauga

SEQ ID NO: 2358824 - RNA, 19 nt, Homo sapiens
  misc_RNA (1)...(19): siRNA sense strand
ggauaauguuugcagcuuc

SEQ ID NO: 2358825 - RNA, 19 nt, Homo sapiens
  misc_RNA (1)...(19): siRNA sense strand
gaagaagcagaaaggaagu

SEQ ID NO: 2358826 - RNA, 19 nt, Homo sapiens
  misc_RNA (1)...(19): siRNA sense strand
ucucaugaagagucaggaa

SEQ ID NO: 2358827 - RNA, 19 nt, Homo sapiens
  misc_RNA (1)...(19): siRNA sense strand
ucuuguuugccgagcuaaa

SEQ ID NO: 2358828 - RNA, 19 nt, Homo sapiens
  misc_RNA (1)...(19): siRNA sense strand
gguggaauuaauuguucaa

SEQ ID NO: 2358829 - RNA, 19 nt, Homo sapiens
  misc_RNA (1)...(19): siRNA sense strand
auauagucuuguagaagca

SEQ ID NO: 2358830 - RNA, 19 nt, Homo sapiens
  misc_RNA (1)...(19): siRNA sense strand
uggaagaagcagaaaggaa

SEQ ID NO: 2358831 - RNA, 19 nt, Homo sapiens
  misc_RNA (1)...(19): siRNA sense strand
cauugaagauacuggaaaa

SEQ ID NO: 2358832 - RNA, 19 nt, Homo sapiens
  misc_RNA (1)...(19): siRNA sense strand
acagaaaagagguggaauu

SEQ ID NO: 2358833 - RNA, 19 nt, Homo sapiens
  misc_RNA (1)...(19): siRNA sense strand
cauugaggauauuggaaaa

SEQ ID NO: 2358834 - RNA, 19 nt, Homo sapiens
  misc_RNA (1)...(19): siRNA sense strand
acuugugaaucuaggaaau

SEQ ID NO: 2358835 - RNA, 19 nt, Homo sapiens
  misc_RNA (1)...(19): siRNA sense strand
caguaaggcaggcuguaaa

SEQ ID NO: 2358836 - RNA, 19 nt, Homo sapiens
  misc_RNA (1)...(19): siRNA sense strand
ccauugaagauacuggaaa

SEQ ID NO: 2358837 - RNA, 19 nt, Homo sapiens
  misc_RNA (1)...(19): siRNA sense strand
ucauugaggauauuggaaa

SEQ ID NO: 2358838 - RNA, 19 nt, Homo sapiens
  misc_RNA (1)...(19): siRNA sense strand
gaguuaauuugauugggaa

SEQ ID NO: 2358839 - RNA, 19 nt, Homo sapiens
  misc_RNA (1)...(19): siRNA sense strand
ggaagaagcagaaaggaag

SEQ ID NO: 2358840 - RNA, 19 nt, Homo sapiens
  misc_RNA (1)...(19): siRNA sense strand
ucaugaagagucaggaauu

SEQ ID NO: 2358841 - RNA, 19 nt, Homo sapiens
  misc_RNA (1)...(19): siRNA sense strand
aagcagaaaggaaguggaa

SEQ ID NO: 2358842 - RNA, 19 nt, Homo sapiens
  misc_RNA (1)...(19): siRNA sense strand
ggaagauggucgugauccu

SEQ ID NO: 2358843 - RNA, 19 nt, Homo sapiens
  misc_RNA (1)...(19): siRNA sense strand
uugacaggcuggagauaga

SEQ ID NO: 2358844 - RNA, 19 nt, Homo sapiens
  misc_RNA (1)...(19): siRNA sense strand
cuuaauaauaccugccauu

SEQ ID NO: 2358845 - RNA, 19 nt, Homo sapiens
  misc_RNA (1)...(19): siRNA sense strand
ccacugaaugggaagguga

SEQ ID NO: 2358846 - RNA, 19 nt, Homo sapiens
  misc_RNA (1)...(19): siRNA sense strand
ccacaaagcugcaagaagg

SEQ ID NO: 2358847 - RNA, 19 nt, Homo sapiens
  misc_RNA (1)...(19): siRNA sense strand
ucuggagaauauagaguuu

SEQ ID NO: 2358848 - RNA, 19 nt, Homo sapiens
  misc_RNA (1)...(19): siRNA sense strand
caggagacacaguacuaaa

SEQ ID NO: 2358849 - RNA, 19 nt, Homo sapiens
  misc_RNA (1)...(19): siRNA sense strand
ccuuaauugcuaugaggau

SEQ ID NO: 2358850 - RNA, 19 nt, Homo sapiens
  misc_RNA (1)...(19): siRNA sense strand
acauggaauucgaacccaa

SEQ ID NO: 2358851 - RNA, 19 nt, Homo sapiens
  misc_RNA (1)...(19): siRNA sense strand
ccgaaaauccuguggagca

SEQ ID NO: 2358852 - RNA, 19 nt, Homo sapiens
  misc_RNA (1)...(19): siRNA sense strand
ggaguuaauuugauuggga

SEQ ID NO: 2358853 - RNA, 19 nt, Homo sapiens
  misc_RNA (1)...(19): siRNA sense strand
cccuagagauccagaaauc

SEQ ID NO: 2358854 - RNA, 19 nt, Homo sapiens
  misc_RNA (1)...(19): siRNA sense strand
gcgccuauaccauccgaaa

SEQ ID NO: 2358855 - RNA, 19 nt, Homo sapiens
  misc_RNA (1)...(19): siRNA sense strand
uggaggaugcagacaggaa

SEQ ID NO: 2358856 - RNA, 19 nt, Homo sapiens
  misc_RNA (1)...(19): siRNA sense strand
caagaaaagccaacaugaa

SEQ ID NO: 2358857 - RNA, 19 nt, Homo sapiens
  misc_RNA (1)...(19): siRNA sense strand
ccggcuggagauugaauua

SEQ ID NO: 2358858 - RNA, 19 nt, Homo sapiens
  misc_RNA (1)...(19): siRNA sense strand
ugaaugggaaggugacgaa

SEQ ID NO: 2358859 - RNA, 19 nt, Homo sapiens
  misc_RNA (1)...(19): siRNA sense strand
uagacuuacugaaaggaga

SEQ ID NO: 2358860 - RNA, 19 nt, Homo sapiens
  misc_RNA (1)...(19): siRNA sense strand
ucacccaagaauacaguua

SEQ ID NO: 2358861 - RNA, 19 nt, Homo sapiens
  misc_RNA (1)...(19): siRNA sense strand
ggaguauaugaaugugaau

SEQ ID NO: 2358862 - RNA, 19 nt, Homo sapiens
  misc_RNA (1)...(19): siRNA sense strand
aguugaaggaugcgggagu

SEQ ID NO: 2358863 - RNA, 19 nt, Homo sapiens
  misc_RNA (1)...(19): siRNA sense strand
ccaaacaaaggcagaguac

SEQ ID NO: 2358864 - RNA, 19 nt, Homo sapiens
  misc_RNA (1)...(19): siRNA sense strand
acgcaaacacuuuauguca

SEQ ID NO: 2358865 - RNA, 19 nt, Homo sapiens
  misc_RNA (1)...(19): siRNA sense strand
gaacccaaacaaaggcaga

SEQ ID NO: 2358866 - RNA, 19 nt, Homo sapiens
  misc_RNA (1)...(19): siRNA sense strand
acaucuacgcugacaauga

SEQ ID NO: 2358867 - RNA, 19 nt, Homo sapiens
  misc_RNA (1)...(19): siRNA sense strand
ggauaauguuugcagcuuc

SEQ ID NO: 2358868 - RNA, 19 nt, Homo sapiens
  misc_RNA (1)...(19): siRNA sense strand
gaagaagcagaaaggaagu

SEQ ID NO: 2358869 - RNA, 19 nt, Homo sapiens
  misc_RNA (1)...(19): siRNA sense strand
ucucaugaagagucaggaa

SEQ ID NO: 2358870 - RNA, 19 nt, Homo sapiens
  misc_RNA (1)...(19): siRNA sense strand
ucuuguuugccgagcuaaa

SEQ ID NO: 2358871 - RNA, 19 nt, Homo sapiens
  misc_RNA (1)...(19): siRNA sense strand
gguggaauuaauuguucaa

SEQ ID NO: 2358872 - RNA, 19 nt, Homo sapiens
  misc_RNA (1)...(19): siRNA sense strand
auauagucuuguagaagca

SEQ ID NO: 2358873 - RNA, 19 nt, Homo sapiens
  misc_RNA (1)...(19): siRNA sense strand
ucggaaucaugcugggcua

SEQ ID NO: 2358874 - RNA, 19 nt, Homo sapiens
  misc_RNA (1)...(19): siRNA sense strand
cggcaauggcaacgaguac

SEQ ID NO: 2358875 - RNA, 19 nt, Homo sapiens
  misc_RNA (1)...(19): siRNA sense strand
cggggaacguggagagaaa

SEQ ID NO: 2358876 - RNA, 19 nt, Homo sapiens
  misc_RNA (1)...(19): siRNA sense strand
ggaagggagccaagggaga

SEQ ID NO: 2358877 - RNA, 19 nt, Homo sapiens
  misc_RNA (1)...(19): siRNA sense strand
ccaaagggaacaaggguga

SEQ ID NO: 2358878 - RNA, 19 nt, Homo sapiens
  misc_RNA (1)...(19): siRNA sense strand
ggaacgaggugcagcagga

SEQ ID NO: 2358879 - RNA, 19 nt, Homo sapiens
  misc_RNA (1)...(19): siRNA sense strand
agguguggcuggagaggau

SEQ ID NO: 2358880 - RNA, 19 nt, Homo sapiens
  misc_RNA (1)...(19): siRNA sense strand
aagaaggaacaaaggguga

SEQ ID NO: 2358881 - RNA, 19 nt, Homo sapiens
  misc_RNA (1)...(19): siRNA sense strand
cugucugcuucaugggaua

SEQ ID NO: 2358882 - RNA, 19 nt, Homo sapiens
  misc_RNA (1)...(19): siRNA sense strand
agggcugaagggagagaaa

SEQ ID NO: 2358883 - RNA, 19 nt, Homo sapiens
  misc_RNA (1)...(19): siRNA sense strand
agaaggagcuggaaugcga

SEQ ID NO: 2358884 - RNA, 19 nt, Homo sapiens
  misc_RNA (1)...(19): siRNA sense strand
aggcgaggauggugagcca

SEQ ID NO: 2358885 - RNA, 19 nt, Homo sapiens
  misc_RNA (1)...(19): siRNA sense strand
cagaagggugagaugggua

SEQ ID NO: 2358886 - RNA, 19 nt, Homo sapiens
  misc_RNA (1)...(19): siRNA sense strand
acauaggcgugaaagguga

SEQ ID NO: 2358887 - RNA, 19 nt, Homo sapiens
  misc_RNA (1)...(19): siRNA sense strand
ccaaagaggagaagugggu

SEQ ID NO: 2358888 - RNA, 19 nt, Homo sapiens
  misc_RNA (1)...(19): siRNA sense strand
gggugagaagggugaggau

SEQ ID NO: 2358889 - RNA, 19 nt, Homo sapiens
  misc_RNA (1)...(19): siRNA sense strand
aggauggagacaaggguga

SEQ ID NO: 2358890 - RNA, 19 nt, Homo sapiens
  misc_RNA (1)...(19): siRNA sense strand
aggccgaccuggagcuaca

SEQ ID NO: 2358891 - RNA, 19 nt, Homo sapiens
  misc_RNA (1)...(19): siRNA sense strand
ugauggagcccgagggaug

SEQ ID NO: 2358892 - RNA, 19 nt, Homo sapiens
  misc_RNA (1)...(19): siRNA sense strand
gggagagaaaggagagccu

SEQ ID NO: 2358893 - RNA, 19 nt, Homo sapiens
  misc_RNA (1)...(19): siRNA sense strand
gggcgaaguuggagucccu

SEQ ID NO: 2358894 - RNA, 19 nt, Homo sapiens
  misc_RNA (1)...(19): siRNA sense strand
caaaggagccacaggccca

SEQ ID NO: 2358895 - RNA, 19 nt, Homo sapiens
  misc_RNA (1)...(19): siRNA sense strand
ccaagggagagaagggcca

SEQ ID NO: 2358896 - RNA, 19 nt, Homo sapiens
  misc_RNA (1)...(19): siRNA sense strand
ggucaaggguguggacgga

SEQ ID NO: 2358897 - RNA, 19 nt, Homo sapiens
  misc_RNA (1)...(19): siRNA sense strand
ccaaaggugaugaaggaac

SEQ ID NO: 2358898 - RNA, 19 nt, Homo sapiens
  misc_RNA (1)...(19): siRNA sense strand
agaaaggugucccagguga

SEQ ID NO: 2358899 - RNA, 19 nt, Homo sapiens
  misc_RNA (1)...(19): siRNA sense strand
cagaagggcaccaaaggga

SEQ ID NO: 2358900 - RNA, 19 nt, Homo sapiens
  misc_RNA (1)...(19): siRNA sense strand
ccaagggagagaagggugu

SEQ ID NO: 2358901 - RNA, 19 nt, Homo sapiens
  misc_RNA (1)...(19): siRNA sense strand
auucagaugcccaagaaga

SEQ ID NO: 2358902 - RNA, 19 nt, Homo sapiens
  misc_RNA (1)...(19): siRNA sense strand
ggaggagaucuuuggcuca

SEQ ID NO: 2358903 - RNA, 19 nt, Homo sapiens
  misc_RNA (1)...(19): siRNA sense strand
ggagaagggagaaacagga

SEQ ID NO: 2358904 - RNA, 19 nt, Homo sapiens
  misc_RNA (1)...(19): siRNA sense strand
agaagggugagauggguau

SEQ ID NO: 2358905 - RNA, 19 nt, Homo sapiens
  misc_RNA (1)...(19): siRNA sense strand
gggaaagaccccaaaacca

SEQ ID NO: 2358906 - RNA, 19 nt, Homo sapiens
  misc_RNA (1)...(19): siRNA sense strand
ugaaaggagagucuggaga

SEQ ID NO: 2358907 - RNA, 19 nt, Homo sapiens
  misc_RNA (1)...(19): siRNA sense strand
aggaacaagaggauucaau

SEQ ID NO: 2358908 - RNA, 19 nt, Homo sapiens
  misc_RNA (1)...(19): siRNA sense strand
augcuggagccaagggaga

SEQ ID NO: 2358909 - RNA, 19 nt, Homo sapiens
  misc_RNA (1)...(19): siRNA sense strand
cggggaacguggagagaaa

SEQ ID NO: 2358910 - RNA, 19 nt, Homo sapiens
  misc_RNA (1)...(19): siRNA sense strand
ggaagggagccaagggaga

SEQ ID NO: 2358911 - RNA, 19 nt, Homo sapiens
  misc_RNA (1)...(19): siRNA sense strand
ccaaagggaacaaggguga

SEQ ID NO: 2358912 - RNA, 19 nt, Homo sapiens
  misc_RNA (1)...(19): siRNA sense strand
ggaacgaggugcagcagga

SEQ ID NO: 2358913 - RNA, 19 nt, Homo sapiens
  misc_RNA (1)...(19): siRNA sense strand
agguguggcuggagaggau

SEQ ID NO: 2358914 - RNA, 19 nt, Homo sapiens
  misc_RNA (1)...(19): siRNA sense strand
aagaaggaacaaaggguga

SEQ ID NO: 2358915 - RNA, 19 nt, Homo sapiens
  misc_RNA (1)...(19): siRNA sense strand
cugucugcuucaugggaua

SEQ ID NO: 2358916 - RNA, 19 nt, Homo sapiens
  misc_RNA (1)...(19): siRNA sense strand
agggcugaagggagagaaa

SEQ ID NO: 2358917 - RNA, 19 nt, Homo sapiens
  misc_RNA (1)...(19): siRNA sense strand
agaaggagcuggaaugcga

SEQ ID NO: 2358918 - RNA, 19 nt, Homo sapiens
  misc_RNA (1)...(19): siRNA sense strand
aggcgaggauggugagcca

SEQ ID NO: 2358919 - RNA, 19 nt, Homo sapiens
  misc_RNA (1)...(19): siRNA sense strand
cagaagggugagaugggua

SEQ ID NO: 2358920 - RNA, 19 nt, Homo sapiens
  misc_RNA (1)...(19): siRNA sense strand
acauaggcgugaaagguga

SEQ ID NO: 2358921 - RNA, 19 nt, Homo sapiens
  misc_RNA (1)...(19): siRNA sense strand
ccaaagaggagaagugggu

SEQ ID NO: 2358922 - RNA, 19 nt, Homo sapiens
  misc_RNA (1)...(19): siRNA sense strand
gggugagaagggugaggau

SEQ ID NO: 2358923 - RNA, 19 nt, Homo sapiens
  misc_RNA (1)...(19): siRNA sense strand
aggauggagacaaggguga

SEQ ID NO: 2358924 - RNA, 19 nt, Homo sapiens
  misc_RNA (1)...(19): siRNA sense strand
aggccgaccuggagcuaca

SEQ ID NO: 2358925 - RNA, 19 nt, Homo sapiens
  misc_RNA (1)...(19): siRNA sense strand
ugauggagcccgagggaug

SEQ ID NO: 2358926 - RNA, 19 nt, Homo sapiens
  misc_RNA (1)...(19): siRNA sense strand
gggagagaaaggagagccu

SEQ ID NO: 2358927 - RNA, 19 nt, Homo sapiens
  misc_RNA (1)...(19): siRNA sense strand
gggcgaaguuggagucccu

SEQ ID NO: 2358928 - RNA, 19 nt, Homo sapiens
  misc_RNA (1)...(19): siRNA sense strand
caaaggagccacaggccca

SEQ ID NO: 2358929 - RNA, 19 nt, Homo sapiens
  misc_RNA (1)...(19): siRNA sense strand
ccaagggagagaagggcca

SEQ ID NO: 2358930 - RNA, 19 nt, Homo sapiens
  misc_RNA (1)...(19): siRNA sense strand
ggucaaggguguggacgga

SEQ ID NO: 2358931 - RNA, 19 nt, Homo sapiens
  misc_RNA (1)...(19): siRNA sense strand
ccaaaggugaugaaggaac

SEQ ID NO: 2358932 - RNA, 19 nt, Homo sapiens
  misc_RNA (1)...(19): siRNA sense strand
agaaaggugucccagguga

SEQ ID NO: 2358933 - RNA, 19 nt, Homo sapiens
  misc_RNA (1)...(19): siRNA sense strand
cagaagggcaccaaaggga

SEQ ID NO: 2358934 - RNA, 19 nt, Homo sapiens
  misc_RNA (1)...(19): siRNA sense strand
ccaagggagagaagggugu

SEQ ID NO: 2358935 - RNA, 19 nt, Homo sapiens
  misc_RNA (1)...(19): siRNA sense strand
auucagaugcccaagaaga

SEQ ID NO: 2358936 - RNA, 19 nt, Homo sapiens
  misc_RNA (1)...(19): siRNA sense strand
ggaggagaucuuuggcuca

SEQ ID NO: 2358937 - RNA, 19 nt, Homo sapiens
  misc_RNA (1)...(19): siRNA sense strand
ggagaagggagaaacagga

SEQ ID NO: 2358938 - RNA, 19 nt, Homo sapiens
  misc_RNA (1)...(19): siRNA sense strand
agaagggugagauggguau

SEQ ID NO: 2358939 - RNA, 19 nt, Homo sapiens
  misc_RNA (1)...(19): siRNA sense strand
gggaaagaccccaaaacca

SEQ ID NO: 2358940 - RNA, 19 nt, Homo sapiens
  misc_RNA (1)...(19): siRNA sense strand
ugaaaggagagucuggaga

SEQ ID NO: 2358941 - RNA, 19 nt, Homo sapiens
  misc_RNA (1)...(19): siRNA sense strand
aggaacaagaggauucaau

SEQ ID NO: 2358942 - RNA, 19 nt, Homo sapiens
  misc_RNA (1)...(19): siRNA sense strand
augcuggagccaagggaga

SEQ ID NO: 2358943 - RNA, 19 nt, Homo sapiens
  misc_RNA (1)...(19): siRNA sense strand
cggggaacguggagagaaa

SEQ ID NO: 2358944 - RNA, 19 nt, Homo sapiens
  misc_RNA (1)...(19): siRNA sense strand
ggaagggagccaagggaga

SEQ ID NO: 2358945 - RNA, 19 nt, Homo sapiens
  misc_RNA (1)...(19): siRNA sense strand
ccaaagggaacaaggguga

SEQ ID NO: 2358946 - RNA, 19 nt, Homo sapiens
  misc_RNA (1)...(19): siRNA sense strand
ggaacgaggugcagcagga

SEQ ID NO: 2358947 - RNA, 19 nt, Homo sapiens
  misc_RNA (1)...(19): siRNA sense strand
agguguggcuggagaggau

SEQ ID NO: 2358948 - RNA, 19 nt, Homo sapiens
  misc_RNA (1)...(19): siRNA sense strand
aagaaggaacaaaggguga

SEQ ID NO: 2358949 - RNA, 19 nt, Homo sapiens
  misc_RNA (1)...(19): siRNA sense strand
cugucugcuucaugggaua

SEQ ID NO: 2358950 - RNA, 19 nt, Homo sapiens
  misc_RNA (1)...(19): siRNA sense strand
agggcugaagggagagaaa

SEQ ID NO: 2358951 - RNA, 19 nt, Homo sapiens
  misc_RNA (1)...(19): siRNA sense strand
agaaggagcuggaaugcga

SEQ ID NO: 2358952 - RNA, 19 nt, Homo sapiens
  misc_RNA (1)...(19): siRNA sense strand
aggcgaggauggugagcca

SEQ ID NO: 2358953 - RNA, 19 nt, Homo sapiens
  misc_RNA (1)...(19): siRNA sense strand
cagaagggugagaugggua

SEQ ID NO: 2358954 - RNA, 19 nt, Homo sapiens
  misc_RNA (1)...(19): siRNA sense strand
acauaggcgugaaagguga

SEQ ID NO: 2358955 - RNA, 19 nt, Homo sapiens
  misc_RNA (1)...(19): siRNA sense strand
ccaaagaggagaagugggu

SEQ ID NO: 2358956 - RNA, 19 nt, Homo sapiens
  misc_RNA (1)...(19): siRNA sense strand
gggugagaagggugaggau

SEQ ID NO: 2358957 - RNA, 19 nt, Homo sapiens
  misc_RNA (1)...(19): siRNA sense strand
aggauggagacaaggguga

SEQ ID NO: 2358958 - RNA, 19 nt, Homo sapiens
  misc_RNA (1)...(19): siRNA sense strand
aggccgaccuggagcuaca

SEQ ID NO: 2358959 - RNA, 19 nt, Homo sapiens
  misc_RNA (1)...(19): siRNA sense strand
ugauggagcccgagggaug

SEQ ID NO: 2358960 - RNA, 19 nt, Homo sapiens
  misc_RNA (1)...(19): siRNA sense strand
gggagagaaaggagagccu

SEQ ID NO: 2358961 - RNA, 19 nt, Homo sapiens
  misc_RNA (1)...(19): siRNA sense strand
gggcgaaguuggagucccu

SEQ ID NO: 2358962 - RNA, 19 nt, Homo sapiens
  misc_RNA (1)...(19): siRNA sense strand
caaaggagccacaggccca

SEQ ID NO: 2358963 - RNA, 19 nt, Homo sapiens
  misc_RNA (1)...(19): siRNA sense strand
ccaagggagagaagggcca

SEQ ID NO: 2358964 - RNA, 19 nt, Homo sapiens
  misc_RNA (1)...(19): siRNA sense strand
ggucaaggguguggacgga

SEQ ID NO: 2358965 - RNA, 19 nt, Homo sapiens
  misc_RNA (1)...(19): siRNA sense strand
ccaaaggugaugaaggaac

SEQ ID NO: 2358966 - RNA, 19 nt, Homo sapiens
  misc_RNA (1)...(19): siRNA sense strand
agaaaggugucccagguga

SEQ ID NO: 2358967 - RNA, 19 nt, Homo sapiens
  misc_RNA (1)...(19): siRNA sense strand
cagaagggcaccaaaggga

SEQ ID NO: 2358968 - RNA, 19 nt, Homo sapiens
  misc_RNA (1)...(19): siRNA sense strand
ccaagggagagaagggugu

SEQ ID NO: 2358969 - RNA, 19 nt, Homo sapiens
  misc_RNA (1)...(19): siRNA sense strand
auucagaugcccaagaaga

SEQ ID NO: 2358970 - RNA, 19 nt, Homo sapiens
  misc_RNA (1)...(19): siRNA sense strand
ggaggagaucuuuggcuca

SEQ ID NO: 2358971 - RNA, 19 nt, Homo sapiens
  misc_RNA (1)...(19): siRNA sense strand
ggagaagggagaaacagga

SEQ ID NO: 2358972 - RNA, 19 nt, Homo sapiens
  misc_RNA (1)...(19): siRNA sense strand
agaagggugagauggguau

SEQ ID NO: 2358973 - RNA, 19 nt, Homo sapiens
  misc_RNA (1)...(19): siRNA sense strand
gggaaagaccccaaaacca

SEQ ID NO: 2358974 - RNA, 19 nt, Homo sapiens
  misc_RNA (1)...(19): siRNA sense strand
ugaaaggagagucuggaga

SEQ ID NO: 2358975 - RNA, 19 nt, Homo sapiens
  misc_RNA (1)...(19): siRNA sense strand
aggaacaagaggauucaau

SEQ ID NO: 2358976 - RNA, 19 nt, Homo sapiens
  misc_RNA (1)...(19): siRNA sense strand
augcuggagccaagggaga

SEQ ID NO: 2358977 - RNA, 19 nt, Homo sapiens
  misc_RNA (1)...(19): siRNA sense strand
augaagaggacgaagaaga

SEQ ID NO: 2358978 - RNA, 19 nt, Homo sapiens
  misc_RNA (1)...(19): siRNA sense strand
ggacagacucggagcagga

SEQ ID NO: 2358979 - RNA, 19 nt, Homo sapiens
  misc_RNA (1)...(19): siRNA sense strand
ggacgaagagauugggaag

SEQ ID NO: 2358980 - RNA, 19 nt, Homo sapiens
  misc_RNA (1)...(19): siRNA sense strand
cugaugaagaggacgaaga

SEQ ID NO: 2358981 - RNA, 19 nt, Homo sapiens
  misc_RNA (1)...(19): siRNA sense strand
cggacgaagagauugggaa

SEQ ID NO: 2358982 - RNA, 19 nt, Homo sapiens
  misc_RNA (1)...(19): siRNA sense strand
cgaaaagcaaggacaagaa

SEQ ID NO: 2358983 - RNA, 19 nt, Homo sapiens
  misc_RNA (1)...(19): siRNA sense strand
cggugggaugggaacgaaa

SEQ ID NO: 2358984 - RNA, 19 nt, Homo sapiens
  misc_RNA (1)...(19): siRNA sense strand
agcaagaagaagaaguaca

SEQ ID NO: 2358985 - RNA, 19 nt, Homo sapiens
  misc_RNA (1)...(19): siRNA sense strand
ccggaagaacggugggaug

SEQ ID NO: 2358986 - RNA, 19 nt, Homo sapiens
  misc_RNA (1)...(19): siRNA sense strand
ugaaggaccugguggcauc

SEQ ID NO: 2358987 - RNA, 19 nt, Homo sapiens
  misc_RNA (1)...(19): siRNA sense strand
cagcagaagucauuggcua

SEQ ID NO: 2358988 - RNA, 19 nt, Homo sapiens
  misc_RNA (1)...(19): siRNA sense strand
ccaccaagaagcagacaaa

SEQ ID NO: 2358989 - RNA, 19 nt, Homo sapiens
  misc_RNA (1)...(19): siRNA sense strand
aagcaauuauggugacaaa

SEQ ID NO: 2358990 - RNA, 19 nt, Homo sapiens
  misc_RNA (1)...(19): siRNA sense strand
agaacaaacuuuagagacu

SEQ ID NO: 2358991 - RNA, 19 nt, Homo sapiens
  misc_RNA (1)...(19): siRNA sense strand
cugaagaaguugagaguag

SEQ ID NO: 2358992 - RNA, 19 nt, Homo sapiens
  misc_RNA (1)...(19): siRNA sense strand
guagaagagaaguuggaua

SEQ ID NO: 2358993 - RNA, 19 nt, Homo sapiens
  misc_RNA (1)...(19): siRNA sense strand
cauuacagaagcugagaaa

SEQ ID NO: 2358994 - RNA, 19 nt, Homo sapiens
  misc_RNA (1)...(19): siRNA sense strand
acagaaagucagagacaga

SEQ ID NO: 2358995 - RNA, 19 nt, Homo sapiens
  misc_RNA (1)...(19): siRNA sense strand
aagacaaaguagugaaguu

SEQ ID NO: 2358996 - RNA, 19 nt, Homo sapiens
  misc_RNA (1)...(19): siRNA sense strand
uguggaagauaaacagaaa

SEQ ID NO: 2358997 - RNA, 19 nt, Homo sapiens
  misc_RNA (1)...(19): siRNA sense strand
uagaagagaaguuggauau

SEQ ID NO: 2358998 - RNA, 19 nt, Homo sapiens
  misc_RNA (1)...(19): siRNA sense strand
gcauggaaaccuugaucaa

SEQ ID NO: 2358999 - RNA, 19 nt, Homo sapiens
  misc_RNA (1)...(19): siRNA sense strand
aaacagaaagucagagaca

SEQ ID NO: 2359000 - RNA, 19 nt, Homo sapiens
  misc_RNA (1)...(19): siRNA sense strand
cguuugacuuugaagacaa

SEQ ID NO: 2359001 - RNA, 19 nt, Homo sapiens
  misc_RNA (1)...(19): siRNA sense strand
gcagcuugucucagaaaua

SEQ ID NO: 2359002 - RNA, 19 nt, Homo sapiens
  misc_RNA (1)...(19): siRNA sense strand
caucauuggaaguuacaaa

SEQ ID NO: 2359003 - RNA, 19 nt, Homo sapiens
  misc_RNA (1)...(19): siRNA sense strand
ugaugaacguacagauuau

SEQ ID NO: 2359004 - RNA, 19 nt, Homo sapiens
  misc_RNA (1)...(19): siRNA sense strand
agaaagucagagacagaaa

SEQ ID NO: 2359005 - RNA, 19 nt, Homo sapiens
  misc_RNA (1)...(19): siRNA sense strand
uuacagaagcugagaaaau

SEQ ID NO: 2359006 - RNA, 19 nt, Homo sapiens
  misc_RNA (1)...(19): siRNA sense strand
ggaugaagagggauaucaa

SEQ ID NO: 2359007 - RNA, 19 nt, Homo sapiens
  misc_RNA (1)...(19): siRNA sense strand
ccuaugaagacuaugcaaa

SEQ ID NO: 2359008 - RNA, 19 nt, Homo sapiens
  misc_RNA (1)...(19): siRNA sense strand
ggaacuaugcaguguaaca

SEQ ID NO: 2359009 - RNA, 19 nt, Homo sapiens
  misc_RNA (1)...(19): siRNA sense strand
agucagagacagaaaugua

SEQ ID NO: 2359010 - RNA, 19 nt, Homo sapiens
  misc_RNA (1)...(19): siRNA sense strand
caguauuaaacauggagaa

SEQ ID NO: 2359011 - RNA, 19 nt, Homo sapiens
  misc_RNA (1)...(19): siRNA sense strand
uagugaaguuguaugcaaa

SEQ ID NO: 2359012 - RNA, 19 nt, Homo sapiens
  misc_RNA (1)...(19): siRNA sense strand
guacaucacuugaggccuu

SEQ ID NO: 2359013 - RNA, 19 nt, Homo sapiens
  misc_RNA (1)...(19): siRNA sense strand
aaaucugacuugaaggaau

SEQ ID NO: 2359014 - RNA, 19 nt, Homo sapiens
  misc_RNA (1)...(19): siRNA sense strand
guuugaugaacuagaacaa

SEQ ID NO: 2359015 - RNA, 19 nt, Homo sapiens
  misc_RNA (1)...(19): siRNA sense strand
ggaagucaucgcagaggaa

SEQ ID NO: 2359016 - RNA, 19 nt, Homo sapiens
  misc_RNA (1)...(19): siRNA sense strand
ugggauaucaagaaguuaa

SEQ ID NO: 2359017 - RNA, 19 nt, Homo sapiens
  misc_RNA (1)...(19): siRNA sense strand
ccugggacauaaagaacua

SEQ ID NO: 2359018 - RNA, 19 nt, Homo sapiens
  misc_RNA (1)...(19): siRNA sense strand
ggaagcauucauugagcua

SEQ ID NO: 2359019 - RNA, 19 nt, Homo sapiens
  misc_RNA (1)...(19): siRNA sense strand
guuugcauguggaagauaa

SEQ ID NO: 2359020 - RNA, 19 nt, Homo sapiens
  misc_RNA (1)...(19): siRNA sense strand
cagaaucuccauaugguaa

SEQ ID NO: 2359021 - RNA, 19 nt, Homo sapiens
  misc_RNA (1)...(19): siRNA sense strand
caguauacaaggaaagcuu

SEQ ID NO: 2359022 - RNA, 19 nt, Homo sapiens
  misc_RNA (1)...(19): siRNA sense strand
gagaauuagccaaagaguu

SEQ ID NO: 2359023 - RNA, 19 nt, Homo sapiens
  misc_RNA (1)...(19): siRNA sense strand
gcuaguucugaaugggaua

SEQ ID NO: 2359024 - RNA, 19 nt, Homo sapiens
  misc_RNA (1)...(19): siRNA sense strand
agcagaagucauuggcuaa

SEQ ID NO: 2359025 - RNA, 19 nt, Homo sapiens
  misc_RNA (1)...(19): siRNA sense strand
ucagaauguucaaguccaa

SEQ ID NO: 2359026 - RNA, 19 nt, Homo sapiens
  misc_RNA (1)...(19): siRNA sense strand
agucuuuauugcagaguca

SEQ ID NO: 2359027 - RNA, 19 nt, Homo sapiens
  misc_RNA (1)...(19): siRNA sense strand
cuaugaagacuaugcaaaa

SEQ ID NO: 2359028 - RNA, 19 nt, Homo sapiens
  misc_RNA (1)...(19): siRNA sense strand
guaugugagugcagaaagu

SEQ ID NO: 2359029 - RNA, 19 nt, Homo sapiens
  misc_RNA (1)...(19): siRNA sense strand
ggauuguguuccagaaugu

SEQ ID NO: 2359030 - RNA, 19 nt, Homo sapiens
  misc_RNA (1)...(19): siRNA sense strand
aguugagaguagugaaagu

SEQ ID NO: 2359031 - RNA, 19 nt, Homo sapiens
  misc_RNA (1)...(19): siRNA sense strand
ccuacaucaccaagacuua

SEQ ID NO: 2359032 - RNA, 19 nt, Homo sapiens
  misc_RNA (1)...(19): siRNA sense strand
agaacacaauccagguaau

SEQ ID NO: 2359033 - RNA, 19 nt, Homo sapiens
  misc_RNA (1)...(19): siRNA sense strand
cagagacagaaauguaaua

SEQ ID NO: 2359034 - RNA, 19 nt, Homo sapiens
  misc_RNA (1)...(19): siRNA sense strand
cugaaugggauaucaagaa

SEQ ID NO: 2359035 - RNA, 19 nt, Homo sapiens
  misc_RNA (1)...(19): siRNA sense strand
agggagaauuagccaaaga

SEQ ID NO: 2359036 - RNA, 19 nt, Homo sapiens
  misc_RNA (1)...(19): siRNA sense strand
guaguuugucugagaauga

SEQ ID NO: 2359037 - RNA, 19 nt, Homo sapiens
  misc_RNA (1)...(19): siRNA sense strand
agauauaagcagugauccu

SEQ ID NO: 2359038 - RNA, 19 nt, Homo sapiens
  misc_RNA (1)...(19): siRNA sense strand
auggaaaccuugaucaaaa

SEQ ID NO: 2359039 - RNA, 19 nt, Homo sapiens
  misc_RNA (1)...(19): siRNA sense strand
gcaucauggagguguguca

SEQ ID NO: 2359040 - RNA, 19 nt, Homo sapiens
  misc_RNA (1)...(19): siRNA sense strand
caaagaagugugucgccua

SEQ ID NO: 2359041 - RNA, 19 nt, Homo sapiens
  misc_RNA (1)...(19): siRNA sense strand
ugaaagugugacagaugaa

SEQ ID NO: 2359042 - RNA, 19 nt, Homo sapiens
  misc_RNA (1)...(19): siRNA sense strand
gauuacaggaagcagcuaa

SEQ ID NO: 2359043 - RNA, 19 nt, Homo sapiens
  misc_RNA (1)...(19): siRNA sense strand
ggguuuuaaugaagagaca

SEQ ID NO: 2359044 - RNA, 19 nt, Homo sapiens
  misc_RNA (1)...(19): siRNA sense strand
cugaugaagaugaugauga

SEQ ID NO: 2359045 - RNA, 19 nt, Homo sapiens
  misc_RNA (1)...(19): siRNA sense strand
cucagaaguaagugaauuu

SEQ ID NO: 2359046 - RNA, 19 nt, Homo sapiens
  misc_RNA (1)...(19): siRNA sense strand
agugaaggcaucaagggaa

SEQ ID NO: 2359047 - RNA, 19 nt, Homo sapiens
  misc_RNA (1)...(19): siRNA sense strand
accaaaugauccugcaauu

SEQ ID NO: 2359048 - RNA, 19 nt, Homo sapiens
  misc_RNA (1)...(19): siRNA sense strand
ucccagaaguggaugugaa

SEQ ID NO: 2359049 - RNA, 19 nt, Homo sapiens
  misc_RNA (1)...(19): siRNA sense strand
cagcagaagucauuggcua

SEQ ID NO: 2359050 - RNA, 19 nt, Homo sapiens
  misc_RNA (1)...(19): siRNA sense strand
ccaccaagaagcagacaaa

SEQ ID NO: 2359051 - RNA, 19 nt, Homo sapiens
  misc_RNA (1)...(19): siRNA sense strand
aagcaauuauggugacaaa

SEQ ID NO: 2359052 - RNA, 19 nt, Homo sapiens
  misc_RNA (1)...(19): siRNA sense strand
agaacaaacuuuagagacu

SEQ ID NO: 2359053 - RNA, 19 nt, Homo sapiens
  misc_RNA (1)...(19): siRNA sense strand
cugaagaaguugagaguag

SEQ ID NO: 2359054 - RNA, 19 nt, Homo sapiens
  misc_RNA (1)...(19): siRNA sense strand
guagaagagaaguuggaua

SEQ ID NO: 2359055 - RNA, 19 nt, Homo sapiens
  misc_RNA (1)...(19): siRNA sense strand
cauuacagaagcugagaaa

SEQ ID NO: 2359056 - RNA, 19 nt, Homo sapiens
  misc_RNA (1)...(19): siRNA sense strand
acagaaagucagagacaga

SEQ ID NO: 2359057 - RNA, 19 nt, Homo sapiens
  misc_RNA (1)...(19): siRNA sense strand
aagacaaaguagugaaguu

SEQ ID NO: 2359058 - RNA, 19 nt, Homo sapiens
  misc_RNA (1)...(19): siRNA sense strand
uguggaagauaaacagaaa

SEQ ID NO: 2359059 - RNA, 19 nt, Homo sapiens
  misc_RNA (1)...(19): siRNA sense strand
uagaagagaaguuggauau

SEQ ID NO: 2359060 - RNA, 19 nt, Homo sapiens
  misc_RNA (1)...(19): siRNA sense strand
gcauggaaaccuugaucaa

SEQ ID NO: 2359061 - RNA, 19 nt, Homo sapiens
  misc_RNA (1)...(19): siRNA sense strand
aaacagaaagucagagaca

SEQ ID NO: 2359062 - RNA, 19 nt, Homo sapiens
  misc_RNA (1)...(19): siRNA sense strand
cguuugacuuugaagacaa

SEQ ID NO: 2359063 - RNA, 19 nt, Homo sapiens
  misc_RNA (1)...(19): siRNA sense strand
gcagcuugucucagaaaua

SEQ ID NO: 2359064 - RNA, 19 nt, Homo sapiens
  misc_RNA (1)...(19): siRNA sense strand
caucauuggaaguuacaaa

SEQ ID NO: 2359065 - RNA, 19 nt, Homo sapiens
  misc_RNA (1)...(19): siRNA sense strand
ugaugaacguacagauuau

SEQ ID NO: 2359066 - RNA, 19 nt, Homo sapiens
  misc_RNA (1)...(19): siRNA sense strand
agaaagucagagacagaaa

SEQ ID NO: 2359067 - RNA, 19 nt, Homo sapiens
  misc_RNA (1)...(19): siRNA sense strand
uuacagaagcugagaaaau

SEQ ID NO: 2359068 - RNA, 19 nt, Homo sapiens
  misc_RNA (1)...(19): siRNA sense strand
ggaugaagagggauaucaa

SEQ ID NO: 2359069 - RNA, 19 nt, Homo sapiens
  misc_RNA (1)...(19): siRNA sense strand
ccuaugaagacuaugcaaa

SEQ ID NO: 2359070 - RNA, 19 nt, Homo sapiens
  misc_RNA (1)...(19): siRNA sense strand
ggaacuaugcaguguaaca

SEQ ID NO: 2359071 - RNA, 19 nt, Homo sapiens
  misc_RNA (1)...(19): siRNA sense strand
agucagagacagaaaugua

SEQ ID NO: 2359072 - RNA, 19 nt, Homo sapiens
  misc_RNA (1)...(19): siRNA sense strand
caguauuaaacauggagaa

SEQ ID NO: 2359073 - RNA, 19 nt, Homo sapiens
  misc_RNA (1)...(19): siRNA sense strand
uagugaaguuguaugcaaa

SEQ ID NO: 2359074 - RNA, 19 nt, Homo sapiens
  misc_RNA (1)...(19): siRNA sense strand
guacaucacuugaggccuu

SEQ ID NO: 2359075 - RNA, 19 nt, Homo sapiens
  misc_RNA (1)...(19): siRNA sense strand
aaaucugacuugaaggaau

SEQ ID NO: 2359076 - RNA, 19 nt, Homo sapiens
  misc_RNA (1)...(19): siRNA sense strand
guuugaugaacuagaacaa

SEQ ID NO: 2359077 - RNA, 19 nt, Homo sapiens
  misc_RNA (1)...(19): siRNA sense strand
ggaagucaucgcagaggaa

SEQ ID NO: 2359078 - RNA, 19 nt, Homo sapiens
  misc_RNA (1)...(19): siRNA sense strand
ugggauaucaagaaguuaa

SEQ ID NO: 2359079 - RNA, 19 nt, Homo sapiens
  misc_RNA (1)...(19): siRNA sense strand
ccugggacauaaagaacua

SEQ ID NO: 2359080 - RNA, 19 nt, Homo sapiens
  misc_RNA (1)...(19): siRNA sense strand
ggaagcauucauugagcua

SEQ ID NO: 2359081 - RNA, 19 nt, Homo sapiens
  misc_RNA (1)...(19): siRNA sense strand
guuugcauguggaagauaa

SEQ ID NO: 2359082 - RNA, 19 nt, Homo sapiens
  misc_RNA (1)...(19): siRNA sense strand
cagaaucuccauaugguaa

SEQ ID NO: 2359083 - RNA, 19 nt, Homo sapiens
  misc_RNA (1)...(19): siRNA sense strand
caguauacaaggaaagcuu

SEQ ID NO: 2359084 - RNA, 19 nt, Homo sapiens
  misc_RNA (1)...(19): siRNA sense strand
gagaauuagccaaagaguu

SEQ ID NO: 2359085 - RNA, 19 nt, Homo sapiens
  misc_RNA (1)...(19): siRNA sense strand
gcuaguucugaaugggaua

SEQ ID NO: 2359086 - RNA, 19 nt, Homo sapiens
  misc_RNA (1)...(19): siRNA sense strand
agcagaagucauuggcuaa

SEQ ID NO: 2359087 - RNA, 19 nt, Homo sapiens
  misc_RNA (1)...(19): siRNA sense strand
ucagaauguucaaguccaa

SEQ ID NO: 2359088 - RNA, 19 nt, Homo sapiens
  misc_RNA (1)...(19): siRNA sense strand
agucuuuauugcagaguca

SEQ ID NO: 2359089 - RNA, 19 nt, Homo sapiens
  misc_RNA (1)...(19): siRNA sense strand
cuaugaagacuaugcaaaa

SEQ ID NO: 2359090 - RNA, 19 nt, Homo sapiens
  misc_RNA (1)...(19): siRNA sense strand
guaugugagugcagaaagu

SEQ ID NO: 2359091 - RNA, 19 nt, Homo sapiens
  misc_RNA (1)...(19): siRNA sense strand
ggauuguguuccagaaugu

SEQ ID NO: 2359092 - RNA, 19 nt, Homo sapiens
  misc_RNA (1)...(19): siRNA sense strand
aguugagaguagugaaagu

SEQ ID NO: 2359093 - RNA, 19 nt, Homo sapiens
  misc_RNA (1)...(19): siRNA sense strand
ccuacaucaccaagacuua

SEQ ID NO: 2359094 - RNA, 19 nt, Homo sapiens
  misc_RNA (1)...(19): siRNA sense strand
agaacacaauccagguaau

SEQ ID NO: 2359095 - RNA, 19 nt, Homo sapiens
  misc_RNA (1)...(19): siRNA sense strand
cagagacagaaauguaaua

SEQ ID NO: 2359096 - RNA, 19 nt, Homo sapiens
  misc_RNA (1)...(19): siRNA sense strand
cugaaugggauaucaagaa

SEQ ID NO: 2359097 - RNA, 19 nt, Homo sapiens
  misc_RNA (1)...(19): siRNA sense strand
agggagaauuagccaaaga

SEQ ID NO: 2359098 - RNA, 19 nt, Homo sapiens
  misc_RNA (1)...(19): siRNA sense strand
guaguuugucugagaauga

SEQ ID NO: 2359099 - RNA, 19 nt, Homo sapiens
  misc_RNA (1)...(19): siRNA sense strand
agauauaagcagugauccu

SEQ ID NO: 2359100 - RNA, 19 nt, Homo sapiens
  misc_RNA (1)...(19): siRNA sense strand
auggaaaccuugaucaaaa

SEQ ID NO: 2359101 - RNA, 19 nt, Homo sapiens
  misc_RNA (1)...(19): siRNA sense strand
gcaucauggagguguguca

SEQ ID NO: 2359102 - RNA, 19 nt, Homo sapiens
  misc_RNA (1)...(19): siRNA sense strand
caaagaagugugucgccua

SEQ ID NO: 2359103 - RNA, 19 nt, Homo sapiens
  misc_RNA (1)...(19): siRNA sense strand
ugaaagugugacagaugaa

SEQ ID NO: 2359104 - RNA, 19 nt, Homo sapiens
  misc_RNA (1)...(19): siRNA sense strand
gauuacaggaagcagcuaa

SEQ ID NO: 2359105 - RNA, 19 nt, Homo sapiens
  misc_RNA (1)...(19): siRNA sense strand
ggguuuuaaugaagagaca

SEQ ID NO: 2359106 - RNA, 19 nt, Homo sapiens
  misc_RNA (1)...(19): siRNA sense strand
cugaugaagaugaugauga

SEQ ID NO: 2359107 - RNA, 19 nt, Homo sapiens
  misc_RNA (1)...(19): siRNA sense strand
cucagaaguaagugaauuu

SEQ ID NO: 2359108 - RNA, 19 nt, Homo sapiens
  misc_RNA (1)...(19): siRNA sense strand
agugaaggcaucaagggaa

SEQ ID NO: 2359109 - RNA, 19 nt, Homo sapiens
  misc_RNA (1)...(19): siRNA sense strand
accaaaugauccugcaauu

SEQ ID NO: 2359110 - RNA, 19 nt, Homo sapiens
  misc_RNA (1)...(19): siRNA sense strand
ucccagaaguggaugugaa

SEQ ID NO: 2359111 - RNA, 19 nt, Homo sapiens
  misc_RNA (1)...(19): siRNA sense strand
uguuaaugcuugaugggau

SEQ ID NO: 2359112 - RNA, 19 nt, Homo sapiens
  misc_RNA (1)...(19): siRNA sense strand
agacaaaguaaaagugaca

SEQ ID NO: 2359113 - RNA, 19 nt, Homo sapiens
  misc_RNA (1)...(19): siRNA sense strand
aggccauggcaaagcacaa

SEQ ID NO: 2359114 - RNA, 19 nt, Homo sapiens
  misc_RNA (1)...(19): siRNA sense strand
ggccuaucucccagacaaa

SEQ ID NO: 2359115 - RNA, 19 nt, Homo sapiens
  misc_RNA (1)...(19): siRNA sense strand
agucuaacaaacugaguca

SEQ ID NO: 2359116 - RNA, 19 nt, Homo sapiens
  misc_RNA (1)...(19): siRNA sense strand
cguuaaugaaacuggaucu

SEQ ID NO: 2359117 - RNA, 19 nt, Homo sapiens
  misc_RNA (1)...(19): siRNA sense strand
guuaaugcuugaugggaug

SEQ ID NO: 2359118 - RNA, 19 nt, Homo sapiens
  misc_RNA (1)...(19): siRNA sense strand
ccaaacacaaacugagcca

SEQ ID NO: 2359119 - RNA, 19 nt, Homo sapiens
  misc_RNA (1)...(19): siRNA sense strand
agauagcguuaaugaaacu

SEQ ID NO: 2359120 - RNA, 19 nt, Homo sapiens
  misc_RNA (1)...(19): siRNA sense strand
gcacauuauccaucccgua

SEQ ID NO: 2359121 - RNA, 19 nt, Homo sapiens
  misc_RNA (1)...(19): siRNA sense strand
uguuaaugcuugaugggau

SEQ ID NO: 2359122 - RNA, 19 nt, Homo sapiens
  misc_RNA (1)...(19): siRNA sense strand
agacaaaguaaaagugaca

SEQ ID NO: 2359123 - RNA, 19 nt, Homo sapiens
  misc_RNA (1)...(19): siRNA sense strand
aggccauggcaaagcacaa

SEQ ID NO: 2359124 - RNA, 19 nt, Homo sapiens
  misc_RNA (1)...(19): siRNA sense strand
ggccuaucucccagacaaa

SEQ ID NO: 2359125 - RNA, 19 nt, Homo sapiens
  misc_RNA (1)...(19): siRNA sense strand
agucuaacaaacugaguca

SEQ ID NO: 2359126 - RNA, 19 nt, Homo sapiens
  misc_RNA (1)...(19): siRNA sense strand
cguuaaugaaacuggaucu

SEQ ID NO: 2359127 - RNA, 19 nt, Homo sapiens
  misc_RNA (1)...(19): siRNA sense strand
guuaaugcuugaugggaug

SEQ ID NO: 2359128 - RNA, 19 nt, Homo sapiens
  misc_RNA (1)...(19): siRNA sense strand
ccaaacacaaacugagcca

SEQ ID NO: 2359129 - RNA, 19 nt, Homo sapiens
  misc_RNA (1)...(19): siRNA sense strand
agauagcguuaaugaaacu

SEQ ID NO: 2359130 - RNA, 19 nt, Homo sapiens
  misc_RNA (1)...(19): siRNA sense strand
gcacauuauccaucccgua

SEQ ID NO: 2359131 - RNA, 19 nt, Homo sapiens
  misc_RNA (1)...(19): siRNA sense strand
caguaaaggaaaagacaaa

SEQ ID NO: 2359132 - RNA, 19 nt, Homo sapiens
  misc_RNA (1)...(19): siRNA sense strand
ccacuaaggccgaagcaga

SEQ ID NO: 2359133 - RNA, 19 nt, Homo sapiens
  misc_RNA (1)...(19): siRNA sense strand
ccuucagauucuugaccaa

SEQ ID NO: 2359134 - RNA, 19 nt, Homo sapiens
  misc_RNA (1)...(19): siRNA sense strand
gcugaaauuauuaggaaac

SEQ ID NO: 2359135 - RNA, 19 nt, Homo sapiens
  misc_RNA (1)...(19): siRNA sense strand
guguaaucucacugcuuaa

SEQ ID NO: 2359136 - RNA, 19 nt, Homo sapiens
  misc_RNA (1)...(19): siRNA sense strand
uggagagacaguaaaggaa

SEQ ID NO: 2359137 - RNA, 19 nt, Homo sapiens
  misc_RNA (1)...(19): siRNA sense strand
aggaaccgguggagggcuu

SEQ ID NO: 2359138 - RNA, 19 nt, Homo sapiens
  misc_RNA (1)...(19): siRNA sense strand
acuucaaggcgcauauuaa

SEQ ID NO: 2359139 - RNA, 19 nt, Homo sapiens
  misc_RNA (1)...(19): siRNA sense strand
augaagaugaggaggagga

SEQ ID NO: 2359140 - RNA, 19 nt, Homo sapiens
  misc_RNA (1)...(19): siRNA sense strand
uucaggaaauggagagaca

SEQ ID NO: 2359141 - RNA, 19 nt, Homo sapiens
  misc_RNA (1)...(19): siRNA sense strand
caggaaauggagagacagu

SEQ ID NO: 2359142 - RNA, 19 nt, Homo sapiens
  misc_RNA (1)...(19): siRNA sense strand
cagauuugcuuuacgacga

SEQ ID NO: 2359143 - RNA, 19 nt, Homo sapiens
  misc_RNA (1)...(19): siRNA sense strand
augaugaagaugaggagga

SEQ ID NO: 2359144 - RNA, 19 nt, Homo sapiens
  misc_RNA (1)...(19): siRNA sense strand
cccugaugcucgagcugaa

SEQ ID NO: 2359145 - RNA, 19 nt, Homo sapiens
  misc_RNA (1)...(19): siRNA sense strand
caucaaaacuaaagugccu

SEQ ID NO: 2359146 - RNA, 19 nt, Homo sapiens
  misc_RNA (1)...(19): siRNA sense strand
guaaaggaaaagacaaaga

SEQ ID NO: 2359147 - RNA, 19 nt, Homo sapiens
  misc_RNA (1)...(19): siRNA sense strand
gaacauacuuggagagagc

SEQ ID NO: 2359148 - RNA, 19 nt, Homo sapiens
  misc_RNA (1)...(19): siRNA sense strand
cgaaaagucccgaggaaca

SEQ ID NO: 2359149 - RNA, 19 nt, Homo sapiens
  misc_RNA (1)...(19): siRNA sense strand
ugauaauuguguuggacau

SEQ ID NO: 2359150 - RNA, 19 nt, Homo sapiens
  misc_RNA (1)...(19): siRNA sense strand
ggagaaaaugagagaggau

SEQ ID NO: 2359151 - RNA, 19 nt, Homo sapiens
  misc_RNA (1)...(19): siRNA sense strand
ugaaagaagagcuggagga

SEQ ID NO: 2359152 - RNA, 19 nt, Homo sapiens
  misc_RNA (1)...(19): siRNA sense strand
cugaauauggggagagaga

SEQ ID NO: 2359153 - RNA, 19 nt, Homo sapiens
  misc_RNA (1)...(19): siRNA sense strand
uggaggaagaggagaaaau

SEQ ID NO: 2359154 - RNA, 19 nt, Homo sapiens
  misc_RNA (1)...(19): siRNA sense strand
cgaggaacauacuuggaga

SEQ ID NO: 2359155 - RNA, 19 nt, Homo sapiens
  misc_RNA (1)...(19): siRNA sense strand
agcuggaggaagaggagaa

SEQ ID NO: 2359156 - RNA, 19 nt, Homo sapiens
  misc_RNA (1)...(19): siRNA sense strand
gggagagagaugaaagaag

SEQ ID NO: 2359157 - RNA, 19 nt, Homo sapiens
  misc_RNA (1)...(19): siRNA sense strand
agaugaaagaagagcugga

SEQ ID NO: 2359158 - RNA, 19 nt, Homo sapiens
  misc_RNA (1)...(19): siRNA sense strand
acauacuuggagagagcua

SEQ ID NO: 2359159 - RNA, 19 nt, Homo sapiens
  misc_RNA (1)...(19): siRNA sense strand
acucagauaucuuguggga

SEQ ID NO: 2359160 - RNA, 19 nt, Homo sapiens
  misc_RNA (1)...(19): siRNA sense strand
cccgaaaagucccgaggaa

SEQ ID NO: 2359161 - RNA, 19 nt, Homo sapiens
  misc_RNA (1)...(19): siRNA sense strand
gcuggaggaagaggagaaa

SEQ ID NO: 2359162 - RNA, 19 nt, Homo sapiens
  misc_RNA (1)...(19): siRNA sense strand
ugugggagcuucaggagga

SEQ ID NO: 2359163 - RNA, 19 nt, Homo sapiens
  misc_RNA (1)...(19): siRNA sense strand
ucgcaaaaguguugggcau

SEQ ID NO: 2359164 - RNA, 19 nt, Homo sapiens
  misc_RNA (1)...(19): siRNA sense strand
ccauaugacuugacccaca

SEQ ID NO: 2359165 - RNA, 19 nt, Homo sapiens
  misc_RNA (1)...(19): siRNA sense strand
cucuagagaagaugcgaaa

SEQ ID NO: 2359166 - RNA, 19 nt, Homo sapiens
  misc_RNA (1)...(19): siRNA sense strand
gaucaagaggaaagagaac

SEQ ID NO: 2359167 - RNA, 19 nt, Homo sapiens
  misc_RNA (1)...(19): siRNA sense strand
gcguugugaauuugaagaa

SEQ ID NO: 2359168 - RNA, 19 nt, Homo sapiens
  misc_RNA (1)...(19): siRNA sense strand
gccaaaaguaagaagagaa

SEQ ID NO: 2359169 - RNA, 19 nt, Homo sapiens
  misc_RNA (1)...(19): siRNA sense strand
cggaguuuacagaaggcaa

SEQ ID NO: 2359170 - RNA, 19 nt, Homo sapiens
  misc_RNA (1)...(19): siRNA sense strand
gcgaauagccacugccaac

SEQ ID NO: 2359171 - RNA, 19 nt, Homo sapiens
  misc_RNA (1)...(19): siRNA sense strand
cggaaaguacugagcccau

SEQ ID NO: 2359172 - RNA, 19 nt, Homo sapiens
  misc_RNA (1)...(19): siRNA sense strand
ccuggacauuugagcgaau

SEQ ID NO: 2359173 - RNA, 19 nt, Homo sapiens
  misc_RNA (1)...(19): siRNA sense strand
agaucaagaggaaagagaa

SEQ ID NO: 2359174 - RNA, 19 nt, Homo sapiens
  misc_RNA (1)...(19): siRNA sense strand
aaguaagaagagaaccuaa

SEQ ID NO: 2359175 - RNA, 19 nt, Homo sapiens
  misc_RNA (1)...(19): siRNA sense strand
ccaagaacauguuugccau

SEQ ID NO: 2359176 - RNA, 19 nt, Homo sapiens
  misc_RNA (1)...(19): siRNA sense strand
cgaaaagaucaagaggaaa

SEQ ID NO: 2359177 - RNA, 19 nt, Homo sapiens
  misc_RNA (1)...(19): siRNA sense strand
aagaucaagaggaaagaga

SEQ ID NO: 2359178 - RNA, 19 nt, Homo sapiens
  misc_RNA (1)...(19): siRNA sense strand
ccgccuuguuguagagaug

SEQ ID NO: 2359179 - RNA, 19 nt, Homo sapiens
  misc_RNA (1)...(19): siRNA sense strand
gcacggaagacgagagcca

SEQ ID NO: 2359180 - RNA, 19 nt, Homo sapiens
  misc_RNA (1)...(19): siRNA sense strand
gggacaaagaggaggccca

SEQ ID NO: 2359181 - RNA, 19 nt, Homo sapiens
  misc_RNA (1)...(19): siRNA sense strand
cuguggaugugaaggucaa

SEQ ID NO: 2359182 - RNA, 19 nt, Homo sapiens
  misc_RNA (1)...(19): siRNA sense strand
ggaucaucuucgaguacca

SEQ ID NO: 2359183 - RNA, 19 nt, Homo sapiens
  misc_RNA (1)...(19): siRNA sense strand
cggaaaagauccaggcccu

SEQ ID NO: 2359184 - RNA, 19 nt, Homo sapiens
  misc_RNA (1)...(19): siRNA sense strand
acaucugccugaagagcuu

SEQ ID NO: 2359185 - RNA, 19 nt, Homo sapiens
  misc_RNA (1)...(19): siRNA sense strand
aagaggaggcccagaugau

SEQ ID NO: 2359186 - RNA, 19 nt, Homo sapiens
  misc_RNA (1)...(19): siRNA sense strand
gggacaaagaggaggccca

SEQ ID NO: 2359187 - RNA, 19 nt, Homo sapiens
  misc_RNA (1)...(19): siRNA sense strand
ggaucaucuucgaguacca

SEQ ID NO: 2359188 - RNA, 19 nt, Homo sapiens
  misc_RNA (1)...(19): siRNA sense strand
ucaucaaaugcauggacaa

SEQ ID NO: 2359189 - RNA, 19 nt, Homo sapiens
  misc_RNA (1)...(19): siRNA sense strand
ucgaaauccccaaggagua

SEQ ID NO: 2359190 - RNA, 19 nt, Homo sapiens
  misc_RNA (1)...(19): siRNA sense strand
ccgaacagcagcagcagca

SEQ ID NO: 2359191 - RNA, 19 nt, Homo sapiens
  misc_RNA (1)...(19): siRNA sense strand
aagucaggaccaagaauga

SEQ ID NO: 2359192 - RNA, 19 nt, Homo sapiens
  misc_RNA (1)...(19): siRNA sense strand
ggacaaacacacaggaaaa

SEQ ID NO: 2359193 - RNA, 19 nt, Homo sapiens
  misc_RNA (1)...(19): siRNA sense strand
ccugaaaguaugaugauaa

SEQ ID NO: 2359194 - RNA, 19 nt, Homo sapiens
  misc_RNA (1)...(19): siRNA sense strand
aguaagagucauacgaaua

SEQ ID NO: 2359195 - RNA, 19 nt, Homo sapiens
  misc_RNA (1)...(19): siRNA sense strand
aggcaaaggcucagcaaaa

SEQ ID NO: 2359196 - RNA, 19 nt, Homo sapiens
  misc_RNA (1)...(19): siRNA sense strand
ccaucagaauauuggcaaa

SEQ ID NO: 2359197 - RNA, 19 nt, Homo sapiens
  misc_RNA (1)...(19): siRNA sense strand
aagaaauccaagaggacaa

SEQ ID NO: 2359198 - RNA, 19 nt, Homo sapiens
  misc_RNA (1)...(19): siRNA sense strand
gagacaaauucguggggaa

SEQ ID NO: 2359199 - RNA, 19 nt, Homo sapiens
  misc_RNA (1)...(19): siRNA sense strand
caacauagcaaaagaucaa

SEQ ID NO: 2359200 - RNA, 19 nt, Homo sapiens
  misc_RNA (1)...(19): siRNA sense strand
caguaagagucauacgaau

SEQ ID NO: 2359201 - RNA, 19 nt, Homo sapiens
  misc_RNA (1)...(19): siRNA sense strand
gccuggaagugcugauaaa

SEQ ID NO: 2359202 - RNA, 19 nt, Homo sapiens
  misc_RNA (1)...(19): siRNA sense strand
cagugaaacaacagucaaa

SEQ ID NO: 2359203 - RNA, 19 nt, Homo sapiens
  misc_RNA (1)...(19): siRNA sense strand
cugaaaagauugaggaaac

SEQ ID NO: 2359204 - RNA, 19 nt, Homo sapiens
  misc_RNA (1)...(19): siRNA sense strand
ggaggaaaucaaacagcua

SEQ ID NO: 2359205 - RNA, 19 nt, Homo sapiens
  misc_RNA (1)...(19): siRNA sense strand
ugaagaaguacuugugaau

SEQ ID NO: 2359206 - RNA, 19 nt, Homo sapiens
  misc_RNA (1)...(19): siRNA sense strand
cccucuaaaugaagcgaua

SEQ ID NO: 2359207 - RNA, 19 nt, Homo sapiens
  misc_RNA (1)...(19): siRNA sense strand
ggugaaauauuuaaaggga

SEQ ID NO: 2359208 - RNA, 19 nt, Homo sapiens
  misc_RNA (1)...(19): siRNA sense strand
cugaagaaguacuugugaa

SEQ ID NO: 2359209 - RNA, 19 nt, Homo sapiens
  misc_RNA (1)...(19): siRNA sense strand
gguuauguugucagugaaa

SEQ ID NO: 2359210 - RNA, 19 nt, Homo sapiens
  misc_RNA (1)...(19): siRNA sense strand
uuacaaaggcaaaggcuca

SEQ ID NO: 2359211 - RNA, 19 nt, Homo sapiens
  misc_RNA (1)...(19): siRNA sense strand
agucaaaucagaagaaguu

SEQ ID NO: 2359212 - RNA, 19 nt, Homo sapiens
  misc_RNA (1)...(19): siRNA sense strand
aggacaaacacacaggaaa

SEQ ID NO: 2359213 - RNA, 19 nt, Homo sapiens
  misc_RNA (1)...(19): siRNA sense strand
gagacaucaucuagcagaa

SEQ ID NO: 2359214 - RNA, 19 nt, Homo sapiens
  misc_RNA (1)...(19): siRNA sense strand
caaucaaagcagaaaggau

SEQ ID NO: 2359215 - RNA, 19 nt, Homo sapiens
  misc_RNA (1)...(19): siRNA sense strand
ucucagaagacgccgauaa

SEQ ID NO: 2359216 - RNA, 19 nt, Homo sapiens
  misc_RNA (1)...(19): siRNA sense strand
gaaauaaguuuaaguccca

SEQ ID NO: 2359217 - RNA, 19 nt, Homo sapiens
  misc_RNA (1)...(19): siRNA sense strand
uggagaagaaccaaauuaa

SEQ ID NO: 2359218 - RNA, 19 nt, Homo sapiens
  misc_RNA (1)...(19): siRNA sense strand
cagaaagugaggaagauga

SEQ ID NO: 2359219 - RNA, 19 nt, Homo sapiens
  misc_RNA (1)...(19): siRNA sense strand
ggaggaaucaaaugaccaa

SEQ ID NO: 2359220 - RNA, 19 nt, Homo sapiens
  misc_RNA (1)...(19): siRNA sense strand
agaaagugaggaagaugaa

SEQ ID NO: 2359221 - RNA, 19 nt, Homo sapiens
  misc_RNA (1)...(19): siRNA sense strand
ccaaacuggcaaauacaaa

SEQ ID NO: 2359222 - RNA, 19 nt, Homo sapiens
  misc_RNA (1)...(19): siRNA sense strand
cuguggagcugcaguaaga

SEQ ID NO: 2359223 - RNA, 19 nt, Homo sapiens
  misc_RNA (1)...(19): siRNA sense strand
ggguguggcucugaggaaa

SEQ ID NO: 2359224 - RNA, 19 nt, Homo sapiens
  misc_RNA (1)...(19): siRNA sense strand
auaaagaagccauccgcaa

SEQ ID NO: 2359225 - RNA, 19 nt, Homo sapiens
  misc_RNA (1)...(19): siRNA sense strand
gaaggaaaucagucauaau

SEQ ID NO: 2359226 - RNA, 19 nt, Homo sapiens
  misc_RNA (1)...(19): siRNA sense strand
guuaccaaguuucgggaau

SEQ ID NO: 2359227 - RNA, 19 nt, Homo sapiens
  misc_RNA (1)...(19): siRNA sense strand
cggugaagaaggauauaga

SEQ ID NO: 2359228 - RNA, 19 nt, Homo sapiens
  misc_RNA (1)...(19): siRNA sense strand
uuuaaagggaggaaaucaa

SEQ ID NO: 2359229 - RNA, 19 nt, Homo sapiens
  misc_RNA (1)...(19): siRNA sense strand
acagagaaggcaagauaca

SEQ ID NO: 2359230 - RNA, 19 nt, Homo sapiens
  misc_RNA (1)...(19): siRNA sense strand
uggcaaaacagaugaugaa

SEQ ID NO: 2359231 - RNA, 19 nt, Homo sapiens
  misc_RNA (1)...(19): siRNA sense strand
cgaauguugccaaguuuaa

SEQ ID NO: 2359232 - RNA, 19 nt, Homo sapiens
  misc_RNA (1)...(19): siRNA sense strand
acucaauaacacugacaau

SEQ ID NO: 2359233 - RNA, 19 nt, Homo sapiens
  misc_RNA (1)...(19): siRNA sense strand
uggaauaaaccaagcucuu

SEQ ID NO: 2359234 - RNA, 19 nt, Homo sapiens
  misc_RNA (1)...(19): siRNA sense strand
gagcacaauuacuucggaa

SEQ ID NO: 2359235 - RNA, 19 nt, Homo sapiens
  misc_RNA (1)...(19): siRNA sense strand
augaagcgauauugaaaga

SEQ ID NO: 2359236 - RNA, 19 nt, Homo sapiens
  misc_RNA (1)...(19): siRNA sense strand
gugauugcguuguguucaa

SEQ ID NO: 2359237 - RNA, 19 nt, Homo sapiens
  misc_RNA (1)...(19): siRNA sense strand
cagcauuugaaucagguua

SEQ ID NO: 2359238 - RNA, 19 nt, Homo sapiens
  misc_RNA (1)...(19): siRNA sense strand
agacaaauucguggggaaa

SEQ ID NO: 2359239 - RNA, 19 nt, Homo sapiens
  misc_RNA (1)...(19): siRNA sense strand
acagaauauuguugaccuu

SEQ ID NO: 2359240 - RNA, 19 nt, Homo sapiens
  misc_RNA (1)...(19): siRNA sense strand
aguuggugcuugugcagua

SEQ ID NO: 2359241 - RNA, 19 nt, Homo sapiens
  misc_RNA (1)...(19): siRNA sense strand
caaaauuaccagagaugau

SEQ ID NO: 2359242 - RNA, 19 nt, Homo sapiens
  misc_RNA (1)...(19): siRNA sense strand
cuggagaagaaccaaauua

SEQ ID NO: 2359243 - RNA, 19 nt, Homo sapiens
  misc_RNA (1)...(19): siRNA sense strand
gcgaauguugccaaguuua

SEQ ID NO: 2359244 - RNA, 19 nt, Homo sapiens
  misc_RNA (1)...(19): siRNA sense strand
acaaaaggucacuggagaa

SEQ ID NO: 2359245 - RNA, 19 nt, Homo sapiens
  misc_RNA (1)...(19): siRNA sense strand
gcagauuugccaucagaau

SEQ ID NO: 2359246 - RNA, 19 nt, Homo sapiens
  misc_RNA (1)...(19): siRNA sense strand
cuuguuacuuauugccaaa

SEQ ID NO: 2359247 - RNA, 19 nt, Homo sapiens
  misc_RNA (1)...(19): siRNA sense strand
gguguggcucugaggaaau

SEQ ID NO: 2359248 - RNA, 19 nt, Homo sapiens
  misc_RNA (1)...(19): siRNA sense strand
guuuggaacuuauugucaa

SEQ ID NO: 2359249 - RNA, 19 nt, Homo sapiens
  misc_RNA (1)...(19): siRNA sense strand
caaaagaaauccaagagga

SEQ ID NO: 2359250 - RNA, 19 nt, Homo sapiens
  misc_RNA (1)...(19): siRNA sense strand
agucauaauccucaaauca

SEQ ID NO: 2359251 - RNA, 19 nt, Homo sapiens
  misc_RNA (1)...(19): siRNA sense strand
aaucaaagcagaaaggauc

SEQ ID NO: 2359252 - RNA, 19 nt, Homo sapiens
  misc_RNA (1)...(19): siRNA sense strand
ggacuuaagcccuuggcca

SEQ ID NO: 2359253 - RNA, 19 nt, Homo sapiens
  misc_RNA (1)...(19): siRNA sense strand
gcagaugagccgaugacca

SEQ ID NO: 2359254 - RNA, 19 nt, Homo sapiens
  misc_RNA (1)...(19): siRNA sense strand
ugaucguggaggagggaca

SEQ ID NO: 2359255 - RNA, 19 nt, Homo sapiens
  misc_RNA (1)...(19): siRNA sense strand
aacugaaagaaguggauga

SEQ ID NO: 2359256 - RNA, 19 nt, Homo sapiens
  misc_RNA (1)...(19): siRNA sense strand
gcaagguaacaaaucggaa

SEQ ID NO: 2359257 - RNA, 19 nt, Homo sapiens
  misc_RNA (1)...(19): siRNA sense strand
gugucaagacugugggaaa

SEQ ID NO: 2359258 - RNA, 19 nt, Homo sapiens
  misc_RNA (1)...(19): siRNA sense strand
augcagugaaugugguaaa

SEQ ID NO: 2359259 - RNA, 19 nt, Homo sapiens
  misc_RNA (1)...(19): siRNA sense strand
aguucauucuggagagaga

SEQ ID NO: 2359260 - RNA, 19 nt, Homo sapiens
  misc_RNA (1)...(19): siRNA sense strand
cgaaagaagaaacagccua

SEQ ID NO: 2359261 - RNA, 19 nt, Homo sapiens
  misc_RNA (1)...(19): siRNA sense strand
aggacaaagcgaaagaaga

SEQ ID NO: 2359262 - RNA, 19 nt, Homo sapiens
  misc_RNA (1)...(19): siRNA sense strand
ggacauggguggaaucgca

SEQ ID NO: 2359263 - RNA, 19 nt, Homo sapiens
  misc_RNA (1)...(19): siRNA sense strand
gugaaaggcaaaaggccaa

SEQ ID NO: 2359264 - RNA, 19 nt, Homo sapiens
  misc_RNA (1)...(19): siRNA sense strand
gaagagcugugaaaggcaa

SEQ ID NO: 2359265 - RNA, 19 nt, Homo sapiens
  misc_RNA (1)...(19): siRNA sense strand
gugucaggacuguggaaaa

SEQ ID NO: 2359266 - RNA, 19 nt, Homo sapiens
  misc_RNA (1)...(19): siRNA sense strand
ggaaaggccuucacccaga

SEQ ID NO: 2359267 - RNA, 19 nt, Homo sapiens
  misc_RNA (1)...(19): siRNA sense strand
ccacaauaggacaaagcga

SEQ ID NO: 2359268 - RNA, 19 nt, Homo sapiens
  misc_RNA (1)...(19): siRNA sense strand
cacaauaggacaaagcgaa

SEQ ID NO: 2359269 - RNA, 19 nt, Homo sapiens
  misc_RNA (1)...(19): siRNA sense strand
cuagaaaacgauugcgcaa

SEQ ID NO: 2359270 - RNA, 19 nt, Homo sapiens
  misc_RNA (1)...(19): siRNA sense strand
guucagagcucuucccuca

SEQ ID NO: 2359271 - RNA, 19 nt, Homo sapiens
  misc_RNA (1)...(19): siRNA sense strand
cugaggagccagugaccuu

SEQ ID NO: 2359272 - RNA, 19 nt, Homo sapiens
  misc_RNA (1)...(19): siRNA sense strand
agacugugggaaaggauuu

SEQ ID NO: 2359273 - RNA, 19 nt, Homo sapiens
  misc_RNA (1)...(19): siRNA sense strand
aggauguggcuguggacuu

SEQ ID NO: 2359274 - RNA, 19 nt, Homo sapiens
  misc_RNA (1)...(19): siRNA sense strand
aaauaaagaguuagcucca

SEQ ID NO: 2359275 - RNA, 19 nt, Homo sapiens
  misc_RNA (1)...(19): siRNA sense strand
gugcauaagaaaauccaua

SEQ ID NO: 2359276 - RNA, 19 nt, Homo sapiens
  misc_RNA (1)...(19): siRNA sense strand
agguccaacagcagggcaa

SEQ ID NO: 2359277 - RNA, 19 nt, Homo sapiens
  misc_RNA (1)...(19): siRNA sense strand
augugaugcuggagaccuu

SEQ ID NO: 2359278 - RNA, 19 nt, Homo sapiens
  misc_RNA (1)...(19): siRNA sense strand
cuacauuagaagauaccuu

SEQ ID NO: 2359279 - RNA, 19 nt, Homo sapiens
  misc_RNA (1)...(19): siRNA sense strand
guguugaagcagauggagu

SEQ ID NO: 2359280 - RNA, 19 nt, Homo sapiens
  misc_RNA (1)...(19): siRNA sense strand
aggaggagaagcaggagga

SEQ ID NO: 2359281 - RNA, 19 nt, Homo sapiens
  misc_RNA (1)...(19): siRNA sense strand
gugucaagacugugggaaa

SEQ ID NO: 2359282 - RNA, 19 nt, Homo sapiens
  misc_RNA (1)...(19): siRNA sense strand
augcagugaaugugguaaa

SEQ ID NO: 2359283 - RNA, 19 nt, Homo sapiens
  misc_RNA (1)...(19): siRNA sense strand
aguucauucuggagagaga

SEQ ID NO: 2359284 - RNA, 19 nt, Homo sapiens
  misc_RNA (1)...(19): siRNA sense strand
cgaaagaagaaacagccua

SEQ ID NO: 2359285 - RNA, 19 nt, Homo sapiens
  misc_RNA (1)...(19): siRNA sense strand
aggacaaagcgaaagaaga

SEQ ID NO: 2359286 - RNA, 19 nt, Homo sapiens
  misc_RNA (1)...(19): siRNA sense strand
ggacauggguggaaucgca

SEQ ID NO: 2359287 - RNA, 19 nt, Homo sapiens
  misc_RNA (1)...(19): siRNA sense strand
gugaaaggcaaaaggccaa

SEQ ID NO: 2359288 - RNA, 19 nt, Homo sapiens
  misc_RNA (1)...(19): siRNA sense strand
gaagagcugugaaaggcaa

SEQ ID NO: 2359289 - RNA, 19 nt, Homo sapiens
  misc_RNA (1)...(19): siRNA sense strand
gugucaggacuguggaaaa

SEQ ID NO: 2359290 - RNA, 19 nt, Homo sapiens
  misc_RNA (1)...(19): siRNA sense strand
ggaaaggccuucacccaga

SEQ ID NO: 2359291 - RNA, 19 nt, Homo sapiens
  misc_RNA (1)...(19): siRNA sense strand
ccacaauaggacaaagcga

SEQ ID NO: 2359292 - RNA, 19 nt, Homo sapiens
  misc_RNA (1)...(19): siRNA sense strand
cacaauaggacaaagcgaa

SEQ ID NO: 2359293 - RNA, 19 nt, Homo sapiens
  misc_RNA (1)...(19): siRNA sense strand
cuagaaaacgauugcgcaa

SEQ ID NO: 2359294 - RNA, 19 nt, Homo sapiens
  misc_RNA (1)...(19): siRNA sense strand
guucagagcucuucccuca

SEQ ID NO: 2359295 - RNA, 19 nt, Homo sapiens
  misc_RNA (1)...(19): siRNA sense strand
cugaggagccagugaccuu

SEQ ID NO: 2359296 - RNA, 19 nt, Homo sapiens
  misc_RNA (1)...(19): siRNA sense strand
agacugugggaaaggauuu

SEQ ID NO: 2359297 - RNA, 19 nt, Homo sapiens
  misc_RNA (1)...(19): siRNA sense strand
aggauguggcuguggacuu

SEQ ID NO: 2359298 - RNA, 19 nt, Homo sapiens
  misc_RNA (1)...(19): siRNA sense strand
aaauaaagaguuagcucca

SEQ ID NO: 2359299 - RNA, 19 nt, Homo sapiens
  misc_RNA (1)...(19): siRNA sense strand
gugcauaagaaaauccaua

SEQ ID NO: 2359300 - RNA, 19 nt, Homo sapiens
  misc_RNA (1)...(19): siRNA sense strand
agguccaacagcagggcaa

SEQ ID NO: 2359301 - RNA, 19 nt, Homo sapiens
  misc_RNA (1)...(19): siRNA sense strand
augugaugcuggagaccuu

SEQ ID NO: 2359302 - RNA, 19 nt, Homo sapiens
  misc_RNA (1)...(19): siRNA sense strand
cuacauuagaagauaccuu

SEQ ID NO: 2359303 - RNA, 19 nt, Homo sapiens
  misc_RNA (1)...(19): siRNA sense strand
guguugaagcagauggagu

SEQ ID NO: 2359304 - RNA, 19 nt, Homo sapiens
  misc_RNA (1)...(19): siRNA sense strand
aggaggagaagcaggagga

SEQ ID NO: 2359305 - RNA, 19 nt, Homo sapiens
  misc_RNA (1)...(19): siRNA sense strand
gugucaagacugugggaaa

SEQ ID NO: 2359306 - RNA, 19 nt, Homo sapiens
  misc_RNA (1)...(19): siRNA sense strand
augcagugaaugugguaaa

SEQ ID NO: 2359307 - RNA, 19 nt, Homo sapiens
  misc_RNA (1)...(19): siRNA sense strand
aguucauucuggagagaga

SEQ ID NO: 2359308 - RNA, 19 nt, Homo sapiens
  misc_RNA (1)...(19): siRNA sense strand
cgaaagaagaaacagccua

SEQ ID NO: 2359309 - RNA, 19 nt, Homo sapiens
  misc_RNA (1)...(19): siRNA sense strand
aggacaaagcgaaagaaga

SEQ ID NO: 2359310 - RNA, 19 nt, Homo sapiens
  misc_RNA (1)...(19): siRNA sense strand
ggacauggguggaaucgca

SEQ ID NO: 2359311 - RNA, 19 nt, Homo sapiens
  misc_RNA (1)...(19): siRNA sense strand
gugaaaggcaaaaggccaa

SEQ ID NO: 2359312 - RNA, 19 nt, Homo sapiens
  misc_RNA (1)...(19): siRNA sense strand
gaagagcugugaaaggcaa

SEQ ID NO: 2359313 - RNA, 19 nt, Homo sapiens
  misc_RNA (1)...(19): siRNA sense strand
gugucaggacuguggaaaa

SEQ ID NO: 2359314 - RNA, 19 nt, Homo sapiens
  misc_RNA (1)...(19): siRNA sense strand
ggaaaggccuucacccaga

SEQ ID NO: 2359315 - RNA, 19 nt, Homo sapiens
  misc_RNA (1)...(19): siRNA sense strand
ccacaauaggacaaagcga

SEQ ID NO: 2359316 - RNA, 19 nt, Homo sapiens
  misc_RNA (1)...(19): siRNA sense strand
cacaauaggacaaagcgaa

SEQ ID NO: 2359317 - RNA, 19 nt, Homo sapiens
  misc_RNA (1)...(19): siRNA sense strand
cuagaaaacgauugcgcaa

SEQ ID NO: 2359318 - RNA, 19 nt, Homo sapiens
  misc_RNA (1)...(19): siRNA sense strand
guucagagcucuucccuca

SEQ ID NO: 2359319 - RNA, 19 nt, Homo sapiens
  misc_RNA (1)...(19): siRNA sense strand
cugaggagccagugaccuu

SEQ ID NO: 2359320 - RNA, 19 nt, Homo sapiens
  misc_RNA (1)...(19): siRNA sense strand
agacugugggaaaggauuu

SEQ ID NO: 2359321 - RNA, 19 nt, Homo sapiens
  misc_RNA (1)...(19): siRNA sense strand
aggauguggcuguggacuu

SEQ ID NO: 2359322 - RNA, 19 nt, Homo sapiens
  misc_RNA (1)...(19): siRNA sense strand
aaauaaagaguuagcucca

SEQ ID NO: 2359323 - RNA, 19 nt, Homo sapiens
  misc_RNA (1)...(19): siRNA sense strand
gugcauaagaaaauccaua

SEQ ID NO: 2359324 - RNA, 19 nt, Homo sapiens
  misc_RNA (1)...(19): siRNA sense strand
agguccaacagcagggcaa

SEQ ID NO: 2359325 - RNA, 19 nt, Homo sapiens
  misc_RNA (1)...(19): siRNA sense strand
augugaugcuggagaccuu

SEQ ID NO: 2359326 - RNA, 19 nt, Homo sapiens
  misc_RNA (1)...(19): siRNA sense strand
cuacauuagaagauaccuu

SEQ ID NO: 2359327 - RNA, 19 nt, Homo sapiens
  misc_RNA (1)...(19): siRNA sense strand
guguugaagcagauggagu

SEQ ID NO: 2359328 - RNA, 19 nt, Homo sapiens
  misc_RNA (1)...(19): siRNA sense strand
aggaggagaagcaggagga

SEQ ID NO: 2359329 - RNA, 19 nt, Homo sapiens
  misc_RNA (1)...(19): siRNA sense strand
agguagagguggagaugaa

SEQ ID NO: 2359330 - RNA, 19 nt, Homo sapiens
  misc_RNA (1)...(19): siRNA sense strand
ugaagaacauugagggaga

SEQ ID NO: 2359331 - RNA, 19 nt, Homo sapiens
  misc_RNA (1)...(19): siRNA sense strand
agauaaugcugguguucaa

SEQ ID NO: 2359332 - RNA, 19 nt, Homo sapiens
  misc_RNA (1)...(19): siRNA sense strand
ugauggaauuucagagcaa

SEQ ID NO: 2359333 - RNA, 19 nt, Homo sapiens
  misc_RNA (1)...(19): siRNA sense strand
ggaaaguagcauugaaaau

SEQ ID NO: 2359334 - RNA, 19 nt, Homo sapiens
  misc_RNA (1)...(19): siRNA sense strand
gccaagaaacugagcagaa

SEQ ID NO: 2359335 - RNA, 19 nt, Homo sapiens
  misc_RNA (1)...(19): siRNA sense strand
uggauaagguagaggugga

SEQ ID NO: 2359336 - RNA, 19 nt, Homo sapiens
  misc_RNA (1)...(19): siRNA sense strand
cugagaaggucuuggagga

SEQ ID NO: 2359337 - RNA, 19 nt, Homo sapiens
  misc_RNA (1)...(19): siRNA sense strand
ccaaggagcccauggccaa

SEQ ID NO: 2359338 - RNA, 19 nt, Homo sapiens
  misc_RNA (1)...(19): siRNA sense strand
aaggaaauaacuuggcaaa

SEQ ID NO: 2359339 - RNA, 19 nt, Homo sapiens
  misc_RNA (1)...(19): siRNA sense strand
gaugaagacaugugaggau

SEQ ID NO: 2359340 - RNA, 19 nt, Homo sapiens
  misc_RNA (1)...(19): siRNA sense strand
ccucaaaagaagaaccaaa

SEQ ID NO: 2359341 - RNA, 19 nt, Homo sapiens
  misc_RNA (1)...(19): siRNA sense strand
cagccaguacuuugagaaa

SEQ ID NO: 2359342 - RNA, 19 nt, Homo sapiens
  misc_RNA (1)...(19): siRNA sense strand
ggcagaugcuacagacaau

SEQ ID NO: 2359343 - RNA, 19 nt, Homo sapiens
  misc_RNA (1)...(19): siRNA sense strand
ccaacuggcagcagaguga

SEQ ID NO: 2359344 - RNA, 19 nt, Homo sapiens
  misc_RNA (1)...(19): siRNA sense strand
cugcagaaucagacagcuu

SEQ ID NO: 2359345 - RNA, 19 nt, Homo sapiens
  misc_RNA (1)...(19): siRNA sense strand
ugagugaagccauggagaa

SEQ ID NO: 2359346 - RNA, 19 nt, Homo sapiens
  misc_RNA (1)...(19): siRNA sense strand
agucauggaaauucugaaa

SEQ ID NO: 2359347 - RNA, 19 nt, Homo sapiens
  misc_RNA (1)...(19): siRNA sense strand
uggaacauguugugcugaa

SEQ ID NO: 2359348 - RNA, 19 nt, Homo sapiens
  misc_RNA (1)...(19): siRNA sense strand
agaagcuggugauggaauu

SEQ ID NO: 2359349 - RNA, 19 nt, Homo sapiens
  misc_RNA (1)...(19): siRNA sense strand
aagaugaacacuuggacau

SEQ ID NO: 2359350 - RNA, 19 nt, Homo sapiens
  misc_RNA (1)...(19): siRNA sense strand
gcauucugguugaagguga

SEQ ID NO: 2359351 - RNA, 19 nt, Homo sapiens
  misc_RNA (1)...(19): siRNA sense strand
cagggagacugcugugaau

SEQ ID NO: 2359352 - RNA, 19 nt, Homo sapiens
  misc_RNA (1)...(19): siRNA sense strand
ccuuggacuuugagggaac

SEQ ID NO: 2359353 - RNA, 19 nt, Homo sapiens
  misc_RNA (1)...(19): siRNA sense strand
aggagaggccacauagcaa

SEQ ID NO: 2359354 - RNA, 19 nt, Homo sapiens
  misc_RNA (1)...(19): siRNA sense strand
ccaucaagauucacuccaa

SEQ ID NO: 2359355 - RNA, 19 nt, Homo sapiens
  misc_RNA (1)...(19): siRNA sense strand
ggacuuugagggaacagaa

SEQ ID NO: 2359356 - RNA, 19 nt, Homo sapiens
  misc_RNA (1)...(19): siRNA sense strand
ccgaaaaggugguggaagg

SEQ ID NO: 2359357 - RNA, 19 nt, Homo sapiens
  misc_RNA (1)...(19): siRNA sense strand
uguggcagcuccagggcua

SEQ ID NO: 2359358 - RNA, 19 nt, Homo sapiens
  misc_RNA (1)...(19): siRNA sense strand
ugauguuccuguuggauga

SEQ ID NO: 2359359 - RNA, 19 nt, Homo sapiens
  misc_RNA (1)...(19): siRNA sense strand
ggauguagcagauguucau

SEQ ID NO: 2359360 - RNA, 19 nt, Homo sapiens
  misc_RNA (1)...(19): siRNA sense strand
ccacauagcaauggagaac

SEQ ID NO: 2359361 - RNA, 19 nt, Homo sapiens
  misc_RNA (1)...(19): siRNA sense strand
gcugaagaggagugaugau

SEQ ID NO: 2359362 - RNA, 19 nt, Homo sapiens
  misc_RNA (1)...(19): siRNA sense strand
agucagcccaucaaagaaa

SEQ ID NO: 2359363 - RNA, 19 nt, Homo sapiens
  misc_RNA (1)...(19): siRNA sense strand
cuggaagauucaagucaga

SEQ ID NO: 2359364 - RNA, 19 nt, Homo sapiens
  misc_RNA (1)...(19): siRNA sense strand
aggcagaugcuacagacaa

SEQ ID NO: 2359365 - RNA, 19 nt, Homo sapiens
  misc_RNA (1)...(19): siRNA sense strand
cagcaagcccugagaaggu

SEQ ID NO: 2359366 - RNA, 19 nt, Homo sapiens
  misc_RNA (1)...(19): siRNA sense strand
cuuucaaaugucucagaua

SEQ ID NO: 2359367 - RNA, 19 nt, Homo sapiens
  misc_RNA (1)...(19): siRNA sense strand
ugaauauggcuuugccgaa

SEQ ID NO: 2359368 - RNA, 19 nt, Homo sapiens
  misc_RNA (1)...(19): siRNA sense strand
cagaaaacuucaaaggcca

SEQ ID NO: 2359369 - RNA, 19 nt, Homo sapiens
  misc_RNA (1)...(19): siRNA sense strand
ucuuggaggaugaggagau

SEQ ID NO: 2359370 - RNA, 19 nt, Homo sapiens
  misc_RNA (1)...(19): siRNA sense strand
ugaccaaccuggagcugga

SEQ ID NO: 2359371 - RNA, 19 nt, Homo sapiens
  misc_RNA (1)...(19): siRNA sense strand
gcaguagugguauggacaa

SEQ ID NO: 2359372 - RNA, 19 nt, Homo sapiens
  misc_RNA (1)...(19): siRNA sense strand
gcuggaggauguagcagau

SEQ ID NO: 2359373 - RNA, 19 nt, Homo sapiens
  misc_RNA (1)...(19): siRNA sense strand
cuaaggauacagagucaau

SEQ ID NO: 2359374 - RNA, 19 nt, Homo sapiens
  misc_RNA (1)...(19): siRNA sense strand
gccacauagcaauggagaa

SEQ ID NO: 2359375 - RNA, 19 nt, Homo sapiens
  misc_RNA (1)...(19): siRNA sense strand
gggcagagaucgaaugacc

SEQ ID NO: 2359376 - RNA, 19 nt, Homo sapiens
  misc_RNA (1)...(19): siRNA sense strand
ggguggaugaccuggacau

SEQ ID NO: 2359377 - RNA, 19 nt, Homo sapiens
  misc_RNA (1)...(19): siRNA sense strand
cugaaguggcucugcuuau

SEQ ID NO: 2359378 - RNA, 19 nt, Homo sapiens
  misc_RNA (1)...(19): siRNA sense strand
cuccagggcuauaguguca

SEQ ID NO: 2359379 - RNA, 19 nt, Homo sapiens
  misc_RNA (1)...(19): siRNA sense strand
cuuacagaagucauggaaa

SEQ ID NO: 2359380 - RNA, 19 nt, Homo sapiens
  misc_RNA (1)...(19): siRNA sense strand
ccuaaggcuuccugggauc

SEQ ID NO: 2359381 - RNA, 19 nt, Homo sapiens
  misc_RNA (1)...(19): siRNA sense strand
agacugaacaugacuugaa

SEQ ID NO: 2359382 - RNA, 19 nt, Homo sapiens
  misc_RNA (1)...(19): siRNA sense strand
agggaagggccaugaggca

SEQ ID NO: 2359383 - RNA, 19 nt, Homo sapiens
  misc_RNA (1)...(19): siRNA sense strand
ggcccuucuuggaggauga

SEQ ID NO: 2359384 - RNA, 19 nt, Homo sapiens
  misc_RNA (1)...(19): siRNA sense strand
cagcaucacccuaaaggau

SEQ ID NO: 2359385 - RNA, 19 nt, Homo sapiens
  misc_RNA (1)...(19): siRNA sense strand
ccaccaugcacaagauguu

SEQ ID NO: 2359386 - RNA, 19 nt, Homo sapiens
  misc_RNA (1)...(19): siRNA sense strand
uggacaaaguugaagacac

SEQ ID NO: 2359387 - RNA, 19 nt, Homo sapiens
  misc_RNA (1)...(19): siRNA sense strand
gcaaaauggagaaguggca

SEQ ID NO: 2359388 - RNA, 19 nt, Homo sapiens
  misc_RNA (1)...(19): siRNA sense strand
cugaagaaauacaaggaga

SEQ ID NO: 2359389 - RNA, 19 nt, Homo sapiens
  misc_RNA (1)...(19): siRNA sense strand
aggaauuagcagaagacau

SEQ ID NO: 2359390 - RNA, 19 nt, Homo sapiens
  misc_RNA (1)...(19): siRNA sense strand
agaaaaggaauuagcagaa

SEQ ID NO: 2359391 - RNA, 19 nt, Homo sapiens
  misc_RNA (1)...(19): siRNA sense strand
gagaaaaggaauuagcaga

SEQ ID NO: 2359392 - RNA, 19 nt, Homo sapiens
  misc_RNA (1)...(19): siRNA sense strand
aggccgaggcagagaucau

SEQ ID NO: 2359393 - RNA, 19 nt, Homo sapiens
  misc_RNA (1)...(19): siRNA sense strand
aaauacaaggagaaagaca

SEQ ID NO: 2359394 - RNA, 19 nt, Homo sapiens
  misc_RNA (1)...(19): siRNA sense strand
cuuaugauuugauggccaa

SEQ ID NO: 2359395 - RNA, 19 nt, Homo sapiens
  misc_RNA (1)...(19): siRNA sense strand
cgucacaggcacaaaggau

SEQ ID NO: 2359396 - RNA, 19 nt, Homo sapiens
  misc_RNA (1)...(19): siRNA sense strand
cagaggaggaggagcagca

SEQ ID NO: 2359397 - RNA, 19 nt, Homo sapiens
  misc_RNA (1)...(19): siRNA sense strand
acugauaacaagaaggcca

SEQ ID NO: 2359398 - RNA, 19 nt, Homo sapiens
  misc_RNA (1)...(19): siRNA sense strand
acgauauacacaagcaaaa

SEQ ID NO: 2359399 - RNA, 19 nt, Homo sapiens
  misc_RNA (1)...(19): siRNA sense strand
uuaugaaagaugagccaga

SEQ ID NO: 2359400 - RNA, 19 nt, Homo sapiens
  misc_RNA (1)...(19): siRNA sense strand
acuuaugauuugauggcca

SEQ ID NO: 2359401 - RNA, 19 nt, Homo sapiens
  misc_RNA (1)...(19): siRNA sense strand
cauuaugaaagaugagcca

SEQ ID NO: 2359402 - RNA, 19 nt, Homo sapiens
  misc_RNA (1)...(19): siRNA sense strand
guacaacacaucagggaag

SEQ ID NO: 2359403 - RNA, 19 nt, Homo sapiens
  misc_RNA (1)...(19): siRNA sense strand
gggaagaguuggcugagcu

SEQ ID NO: 2359404 - RNA, 19 nt, Homo sapiens
  misc_RNA (1)...(19): siRNA sense strand
caguggaagagaaagccaa

SEQ ID NO: 2359405 - RNA, 19 nt, Homo sapiens
  misc_RNA (1)...(19): siRNA sense strand
cgcagaacagacaggaauu

SEQ ID NO: 2359406 - RNA, 19 nt, Homo sapiens
  misc_RNA (1)...(19): siRNA sense strand
caaaagagaucuaccagga

SEQ ID NO: 2359407 - RNA, 19 nt, Homo sapiens
  misc_RNA (1)...(19): siRNA sense strand
ggaacugguuucuuggcaa

SEQ ID NO: 2359408 - RNA, 19 nt, Homo sapiens
  misc_RNA (1)...(19): siRNA sense strand
ccucaagucccgagaucca

SEQ ID NO: 2359409 - RNA, 19 nt, Homo sapiens
  misc_RNA (1)...(19): siRNA sense strand
caauggaagacaaaggcuu

SEQ ID NO: 2359410 - RNA, 19 nt, Homo sapiens
  misc_RNA (1)...(19): siRNA sense strand
ggagaugaccauaugggua

SEQ ID NO: 2359411 - RNA, 19 nt, Homo sapiens
  misc_RNA (1)...(19): siRNA sense strand
gggcaagccuucaggugca

SEQ ID NO: 2359412 - RNA, 19 nt, Homo sapiens
  misc_RNA (1)...(19): siRNA sense strand
gaagaaaguuguagcaagg

SEQ ID NO: 2359413 - RNA, 19 nt, Homo sapiens
  misc_RNA (1)...(19): siRNA sense strand
gcagaaaagcugaugacga

SEQ ID NO: 2359414 - RNA, 19 nt, Homo sapiens
  misc_RNA (1)...(19): siRNA sense strand
gagagaugaaauugcaaca

SEQ ID NO: 2359415 - RNA, 19 nt, Homo sapiens
  misc_RNA (1)...(19): siRNA sense strand
ccauauggguagaucccuu

SEQ ID NO: 2359416 - RNA, 19 nt, Homo sapiens
  misc_RNA (1)...(19): siRNA sense strand
aaauagaagacuuugcaga

SEQ ID NO: 2359417 - RNA, 19 nt, Homo sapiens
  misc_RNA (1)...(19): siRNA sense strand
ugaagaaaguuguagcaag

SEQ ID NO: 2359418 - RNA, 19 nt, Homo sapiens
  misc_RNA (1)...(19): siRNA sense strand
cuucaggugcaucaggaua

SEQ ID NO: 2359419 - RNA, 19 nt, Homo sapiens
  misc_RNA (1)...(19): siRNA sense strand
gggaacuauaucaacaaau

SEQ ID NO: 2359420 - RNA, 19 nt, Homo sapiens
  misc_RNA (1)...(19): siRNA sense strand
gcagaugggaggaauggga

SEQ ID NO: 2359421 - RNA, 19 nt, Homo sapiens
  misc_RNA (1)...(19): siRNA sense strand
caguauaugcggaggugaa

SEQ ID NO: 2359422 - RNA, 19 nt, Homo sapiens
  misc_RNA (1)...(19): siRNA sense strand
ccuuggaacuguuggaaaa

SEQ ID NO: 2359423 - RNA, 19 nt, Homo sapiens
  misc_RNA (1)...(19): siRNA sense strand
uggcuaaggcugugcaaau

SEQ ID NO: 2359424 - RNA, 19 nt, Homo sapiens
  misc_RNA (1)...(19): siRNA sense strand
aacagaaaggguagggaaa

SEQ ID NO: 2359425 - RNA, 19 nt, Homo sapiens
  misc_RNA (1)...(19): siRNA sense strand
aggcgaggguaaagaccaa

SEQ ID NO: 2359426 - RNA, 19 nt, Homo sapiens
  misc_RNA (1)...(19): siRNA sense strand
agaccugccauguggaaua

SEQ ID NO: 2359427 - RNA, 19 nt, Homo sapiens
  misc_RNA (1)...(19): siRNA sense strand
aaacagaaaggguagggaa

SEQ ID NO: 2359428 - RNA, 19 nt, Homo sapiens
  misc_RNA (1)...(19): siRNA sense strand
gggagguaguagauacaau

SEQ ID NO: 2359429 - RNA, 19 nt, Homo sapiens
  misc_RNA (1)...(19): siRNA sense strand
ggaauguacaguagcucaa

SEQ ID NO: 2359430 - RNA, 19 nt, Homo sapiens
  misc_RNA (1)...(19): siRNA sense strand
guaauauaguggcaggaca

SEQ ID NO: 2359431 - RNA, 19 nt, Homo sapiens
  misc_RNA (1)...(19): siRNA sense strand
cuguagucaugcaggaauu

SEQ ID NO: 2359432 - RNA, 19 nt, Homo sapiens
  misc_RNA (1)...(19): siRNA sense strand
gggacaaaugaaacaggua

SEQ ID NO: 2359433 - RNA, 19 nt, Homo sapiens
  misc_RNA (1)...(19): siRNA sense strand
agauaaaacagaaagggua

SEQ ID NO: 2359434 - RNA, 19 nt, Homo sapiens
  misc_RNA (1)...(19): siRNA sense strand
gaauaaaacaguagccaca

SEQ ID NO: 2359435 - RNA, 19 nt, Homo sapiens
  misc_RNA (1)...(19): siRNA sense strand
cagaaacaauguagggaag

SEQ ID NO: 2359436 - RNA, 19 nt, Homo sapiens
  misc_RNA (1)...(19): siRNA sense strand
ugcaaaacuuggaggaauu

SEQ ID NO: 2359437 - RNA, 19 nt, Homo sapiens
  misc_RNA (1)...(19): siRNA sense strand
gcaauauggaggccggaau

SEQ ID NO: 2359438 - RNA, 19 nt, Homo sapiens
  misc_RNA (1)...(19): siRNA sense strand
ucagaaacaauguagggaa

SEQ ID NO: 2359439 - RNA, 19 nt, Homo sapiens
  misc_RNA (1)...(19): siRNA sense strand
ggacagaugaaacgaaaau

SEQ ID NO: 2359440 - RNA, 19 nt, Homo sapiens
  misc_RNA (1)...(19): siRNA sense strand
ggaagaagauuaccggcca

SEQ ID NO: 2359441 - RNA, 19 nt, Homo sapiens
  misc_RNA (1)...(19): siRNA sense strand
cuuguagcauuuagggcaa

SEQ ID NO: 2359442 - RNA, 19 nt, Homo sapiens
  misc_RNA (1)...(19): siRNA sense strand
caagaagcucacagacaau

SEQ ID NO: 2359443 - RNA, 19 nt, Homo sapiens
  misc_RNA (1)...(19): siRNA sense strand
caucaaaggcccucggugu

SEQ ID NO: 2359444 - RNA, 19 nt, Homo sapiens
  misc_RNA (1)...(19): siRNA sense strand
cuuauauuguggugcaaaa

SEQ ID NO: 2359445 - RNA, 19 nt, Homo sapiens
  misc_RNA (1)...(19): siRNA sense strand
cuaccaauuggacgggaua

SEQ ID NO: 2359446 - RNA, 19 nt, Homo sapiens
  misc_RNA (1)...(19): siRNA sense strand
cagacaguguggagccuau

SEQ ID NO: 2359447 - RNA, 19 nt, Homo sapiens
  misc_RNA (1)...(19): siRNA sense strand
ugacuaacaugguucgaga

SEQ ID NO: 2359448 - RNA, 19 nt, Homo sapiens
  misc_RNA (1)...(19): siRNA sense strand
agaucaugacagugcggaa

SEQ ID NO: 2359449 - RNA, 19 nt, Homo sapiens
  misc_RNA (1)...(19): siRNA sense strand
gguucagauuccuaaaaua

SEQ ID NO: 2359450 - RNA, 19 nt, Homo sapiens
  misc_RNA (1)...(19): siRNA sense strand
gguaugauggcaaaagaaa

SEQ ID NO: 2359451 - RNA, 19 nt, Homo sapiens
  misc_RNA (1)...(19): siRNA sense strand
acucgaggucuguaauaua

SEQ ID NO: 2359452 - RNA, 19 nt, Homo sapiens
  misc_RNA (1)...(19): siRNA sense strand
ucucuaaggaugcaggaau

SEQ ID NO: 2359453 - RNA, 19 nt, Homo sapiens
  misc_RNA (1)...(19): siRNA sense strand
gugaaacguguuggagaua

SEQ ID NO: 2359454 - RNA, 19 nt, Homo sapiens
  misc_RNA (1)...(19): siRNA sense strand
acaucaaugaacagaccaa

SEQ ID NO: 2359455 - RNA, 19 nt, Homo sapiens
  misc_RNA (1)...(19): siRNA sense strand
cguaaaaucucuaaggaug

SEQ ID NO: 2359456 - RNA, 19 nt, Homo sapiens
  misc_RNA (1)...(19): siRNA sense strand
aggugaaacguguuggaga

SEQ ID NO: 2359457 - RNA, 19 nt, Homo sapiens
  misc_RNA (1)...(19): siRNA sense strand
uaacaugguucgagagcug

SEQ ID NO: 2359458 - RNA, 19 nt, Homo sapiens
  misc_RNA (1)...(19): siRNA sense strand
gccagaacuaauagcaauu

SEQ ID NO: 2359459 - RNA, 19 nt, Homo sapiens
  misc_RNA (1)...(19): siRNA sense strand
agauuaccggccaggaaua

SEQ ID NO: 2359460 - RNA, 19 nt, Homo sapiens
  misc_RNA (1)...(19): siRNA sense strand
ccacaaugaucaaagcuac

SEQ ID NO: 2359461 - RNA, 19 nt, Homo sapiens
  misc_RNA (1)...(19): siRNA sense strand
gaacaaaagcauacauacu

SEQ ID NO: 2359462 - RNA, 19 nt, Homo sapiens
  misc_RNA (1)...(19): siRNA sense strand
ccugaagauaaaugcaaaa

SEQ ID NO: 2359463 - RNA, 19 nt, Homo sapiens
  misc_RNA (1)...(19): siRNA sense strand
cggcacuucaagaugcaaa

SEQ ID NO: 2359464 - RNA, 19 nt, Homo sapiens
  misc_RNA (1)...(19): siRNA sense strand
aggaauuaacaaugugcuu

SEQ ID NO: 2359465 - RNA, 19 nt, Homo sapiens
  misc_RNA (1)...(19): siRNA sense strand
guggauauuaagccugaaa

SEQ ID NO: 2359466 - RNA, 19 nt, Homo sapiens
  misc_RNA (1)...(19): siRNA sense strand
gugucaaauuuaccaaaga

SEQ ID NO: 2359467 - RNA, 19 nt, Homo sapiens
  misc_RNA (1)...(19): siRNA sense strand
caaagaaaucagaggucuc

SEQ ID NO: 2359468 - RNA, 19 nt, Homo sapiens
  misc_RNA (1)...(19): siRNA sense strand
ggucuguaauauaguggca

SEQ ID NO: 2359469 - RNA, 19 nt, Homo sapiens
  misc_RNA (1)...(19): siRNA sense strand
aauuaaaguuugggcaguu

SEQ ID NO: 2359470 - RNA, 19 nt, Homo sapiens
  misc_RNA (1)...(19): siRNA sense strand
agggaaaaguggcaaugua

SEQ ID NO: 2359471 - RNA, 19 nt, Homo sapiens
  misc_RNA (1)...(19): siRNA sense strand
gcauuuagggcaagguauc

SEQ ID NO: 2359472 - RNA, 19 nt, Homo sapiens
  misc_RNA (1)...(19): siRNA sense strand
guauagucugcaacugaaa

SEQ ID NO: 2359473 - RNA, 19 nt, Homo sapiens
  misc_RNA (1)...(19): siRNA sense strand
cgauguaucaagaagcuca

SEQ ID NO: 2359474 - RNA, 19 nt, Homo sapiens
  misc_RNA (1)...(19): siRNA sense strand
gcguaaaaucucuaaggau

SEQ ID NO: 2359475 - RNA, 19 nt, Homo sapiens
  misc_RNA (1)...(19): siRNA sense strand
augcaggaauucagggaac

SEQ ID NO: 2359476 - RNA, 19 nt, Homo sapiens
  misc_RNA (1)...(19): siRNA sense strand
ucuccaagugggacaagaa

SEQ ID NO: 2359477 - RNA, 19 nt, Homo sapiens
  misc_RNA (1)...(19): siRNA sense strand
agacaggaagagaucagua

SEQ ID NO: 2359478 - RNA, 19 nt, Homo sapiens
  misc_RNA (1)...(19): siRNA sense strand
gugugagguuuuagacauu

SEQ ID NO: 2359479 - RNA, 19 nt, Homo sapiens
  misc_RNA (1)...(19): siRNA sense strand
guggaaacgaaaugacaaa

SEQ ID NO: 2359480 - RNA, 19 nt, Homo sapiens
  misc_RNA (1)...(19): siRNA sense strand
agaacaaaauggagccaaa

SEQ ID NO: 2359481 - RNA, 19 nt, Homo sapiens
  misc_RNA (1)...(19): siRNA sense strand
cagaaauugaggagaacau

SEQ ID NO: 2359482 - RNA, 19 nt, Homo sapiens
  misc_RNA (1)...(19): siRNA sense strand
agacauugaaccuggagaa

SEQ ID NO: 2359483 - RNA, 19 nt, Homo sapiens
  misc_RNA (1)...(19): siRNA sense strand
ccugugagauuuaggccua

SEQ ID NO: 2359484 - RNA, 19 nt, Homo sapiens
  misc_RNA (1)...(19): siRNA sense strand
cgaacagauguaaugguaa

SEQ ID NO: 2359485 - RNA, 19 nt, Homo sapiens
  misc_RNA (1)...(19): siRNA sense strand
gaauaaaaugcaggagaaa

SEQ ID NO: 2359486 - RNA, 19 nt, Homo sapiens
  misc_RNA (1)...(19): siRNA sense strand
gcuacuuagacauggagaa

SEQ ID NO: 2359487 - RNA, 19 nt, Homo sapiens
  misc_RNA (1)...(19): siRNA sense strand
agaugaacacuuggagaaa

SEQ ID NO: 2359488 - RNA, 19 nt, Homo sapiens
  misc_RNA (1)...(19): siRNA sense strand
caggagaaauggaggcaag

SEQ ID NO: 2359489 - RNA, 19 nt, Homo sapiens
  misc_RNA (1)...(19): siRNA sense strand
uagaauuacugguggguug

SEQ ID NO: 2359490 - RNA, 19 nt, Homo sapiens
  misc_RNA (1)...(19): siRNA sense strand
gugucaacuggucgagaua

SEQ ID NO: 2359491 - RNA, 19 nt, Homo sapiens
  misc_RNA (1)...(19): siRNA sense strand
aggaaggcaggaagaacua

SEQ ID NO: 2359492 - RNA, 19 nt, Homo sapiens
  misc_RNA (1)...(19): siRNA sense strand
gagauggguucuuuggaga

SEQ ID NO: 2359493 - RNA, 19 nt, Homo sapiens
  misc_RNA (1)...(19): siRNA sense strand
aauaaugaguucugcgagu

SEQ ID NO: 2359494 - RNA, 19 nt, Homo sapiens
  misc_RNA (1)...(19): siRNA sense strand
gucaacuggucgagauaca

SEQ ID NO: 2359495 - RNA, 19 nt, Homo sapiens
  misc_RNA (1)...(19): siRNA sense strand
ccuguuaucaauagcaaau

SEQ ID NO: 2359496 - RNA, 19 nt, Homo sapiens
  misc_RNA (1)...(19): siRNA sense strand
gcucuaacacugaugcaga

SEQ ID NO: 2359497 - RNA, 19 nt, Homo sapiens
  misc_RNA (1)...(19): siRNA sense strand
auauggacucagagaaaca

SEQ ID NO: 2359498 - RNA, 19 nt, Homo sapiens
  misc_RNA (1)...(19): siRNA sense strand
acaaaauggagccaaaaua

SEQ ID NO: 2359499 - RNA, 19 nt, Homo sapiens
  misc_RNA (1)...(19): siRNA sense strand
caaggaacucugugaaaau

SEQ ID NO: 2359500 - RNA, 19 nt, Homo sapiens
  misc_RNA (1)...(19): siRNA sense strand
uuaaaggaaggcaggaaga

SEQ ID NO: 2359501 - RNA, 19 nt, Homo sapiens
  misc_RNA (1)...(19): siRNA sense strand
gcgaaugggcacggcacua

SEQ ID NO: 2359502 - RNA, 19 nt, Homo sapiens
  misc_RNA (1)...(19): siRNA sense strand
ggugaauggcaggagaaau

SEQ ID NO: 2359503 - RNA, 19 nt, Homo sapiens
  misc_RNA (1)...(19): siRNA sense strand
acucgggauuugaaggaca

SEQ ID NO: 2359504 - RNA, 19 nt, Homo sapiens
  misc_RNA (1)...(19): siRNA sense strand
guggugaauggcaggagaa

SEQ ID NO: 2359505 - RNA, 19 nt, Homo sapiens
  misc_RNA (1)...(19): siRNA sense strand
cugugaaaaugaugaccua

SEQ ID NO: 2359506 - RNA, 19 nt, Homo sapiens
  misc_RNA (1)...(19): siRNA sense strand
ggaaacgaaaugacaaaau

SEQ ID NO: 2359507 - RNA, 19 nt, Homo sapiens
  misc_RNA (1)...(19): siRNA sense strand
cagcagaaucaaucaaaau

SEQ ID NO: 2359508 - RNA, 19 nt, Homo sapiens
  misc_RNA (1)...(19): siRNA sense strand
gggauuugaaggacagagu

SEQ ID NO: 2359509 - RNA, 19 nt, Homo sapiens
  misc_RNA (1)...(19): siRNA sense strand
auguuugacuucaggcgaa

SEQ ID NO: 2359510 - RNA, 19 nt, Homo sapiens
  misc_RNA (1)...(19): siRNA sense strand
cagcaugugugaaggcucu

SEQ ID NO: 2359511 - RNA, 19 nt, Homo sapiens
  misc_RNA (1)...(19): siRNA sense strand
uauuaaaggaaggcaggaa

SEQ ID NO: 2359512 - RNA, 19 nt, Homo sapiens
  misc_RNA (1)...(19): siRNA sense strand
gguggugaauggcaggaga

SEQ ID NO: 2359513 - RNA, 19 nt, Homo sapiens
  misc_RNA (1)...(19): siRNA sense strand
aguggaaacgaaaugacaa

SEQ ID NO: 2359514 - RNA, 19 nt, Homo sapiens
  misc_RNA (1)...(19): siRNA sense strand
guggaaacgaaaugacaaa

SEQ ID NO: 2359515 - RNA, 19 nt, Homo sapiens
  misc_RNA (1)...(19): siRNA sense strand
agaacaaaauggagccaaa

SEQ ID NO: 2359516 - RNA, 19 nt, Homo sapiens
  misc_RNA (1)...(19): siRNA sense strand
cagaaauugaggagaacau

SEQ ID NO: 2359517 - RNA, 19 nt, Homo sapiens
  misc_RNA (1)...(19): siRNA sense strand
agacauugaaccuggagaa

SEQ ID NO: 2359518 - RNA, 19 nt, Homo sapiens
  misc_RNA (1)...(19): siRNA sense strand
ccugugagauuuaggccua

SEQ ID NO: 2359519 - RNA, 19 nt, Homo sapiens
  misc_RNA (1)...(19): siRNA sense strand
cgaacagauguaaugguaa

SEQ ID NO: 2359520 - RNA, 19 nt, Homo sapiens
  misc_RNA (1)...(19): siRNA sense strand
gaauaaaaugcaggagaaa

SEQ ID NO: 2359521 - RNA, 19 nt, Homo sapiens
  misc_RNA (1)...(19): siRNA sense strand
gcuacuuagacauggagaa

SEQ ID NO: 2359522 - RNA, 19 nt, Homo sapiens
  misc_RNA (1)...(19): siRNA sense strand
agaugaacacuuggagaaa

SEQ ID NO: 2359523 - RNA, 19 nt, Homo sapiens
  misc_RNA (1)...(19): siRNA sense strand
caggagaaauggaggcaag

SEQ ID NO: 2359524 - RNA, 19 nt, Homo sapiens
  misc_RNA (1)...(19): siRNA sense strand
uagaauuacugguggguug

SEQ ID NO: 2359525 - RNA, 19 nt, Homo sapiens
  misc_RNA (1)...(19): siRNA sense strand
gugucaacuggucgagaua

SEQ ID NO: 2359526 - RNA, 19 nt, Homo sapiens
  misc_RNA (1)...(19): siRNA sense strand
aggaaggcaggaagaacua

SEQ ID NO: 2359527 - RNA, 19 nt, Homo sapiens
  misc_RNA (1)...(19): siRNA sense strand
gagauggguucuuuggaga

SEQ ID NO: 2359528 - RNA, 19 nt, Homo sapiens
  misc_RNA (1)...(19): siRNA sense strand
aauaaugaguucugcgagu

SEQ ID NO: 2359529 - RNA, 19 nt, Homo sapiens
  misc_RNA (1)...(19): siRNA sense strand
gucaacuggucgagauaca

SEQ ID NO: 2359530 - RNA, 19 nt, Homo sapiens
  misc_RNA (1)...(19): siRNA sense strand
ccuguuaucaauagcaaau

SEQ ID NO: 2359531 - RNA, 19 nt, Homo sapiens
  misc_RNA (1)...(19): siRNA sense strand
gcucuaacacugaugcaga

SEQ ID NO: 2359532 - RNA, 19 nt, Homo sapiens
  misc_RNA (1)...(19): siRNA sense strand
auauggacucagagaaaca

SEQ ID NO: 2359533 - RNA, 19 nt, Homo sapiens
  misc_RNA (1)...(19): siRNA sense strand
acaaaauggagccaaaaua

SEQ ID NO: 2359534 - RNA, 19 nt, Homo sapiens
  misc_RNA (1)...(19): siRNA sense strand
caaggaacucugugaaaau

SEQ ID NO: 2359535 - RNA, 19 nt, Homo sapiens
  misc_RNA (1)...(19): siRNA sense strand
uuaaaggaaggcaggaaga

SEQ ID NO: 2359536 - RNA, 19 nt, Homo sapiens
  misc_RNA (1)...(19): siRNA sense strand
gcgaaugggcacggcacua

SEQ ID NO: 2359537 - RNA, 19 nt, Homo sapiens
  misc_RNA (1)...(19): siRNA sense strand
ggugaauggcaggagaaau

SEQ ID NO: 2359538 - RNA, 19 nt, Homo sapiens
  misc_RNA (1)...(19): siRNA sense strand
acucgggauuugaaggaca

SEQ ID NO: 2359539 - RNA, 19 nt, Homo sapiens
  misc_RNA (1)...(19): siRNA sense strand
guggugaauggcaggagaa

SEQ ID NO: 2359540 - RNA, 19 nt, Homo sapiens
  misc_RNA (1)...(19): siRNA sense strand
cugugaaaaugaugaccua

SEQ ID NO: 2359541 - RNA, 19 nt, Homo sapiens
  misc_RNA (1)...(19): siRNA sense strand
ggaaacgaaaugacaaaau

SEQ ID NO: 2359542 - RNA, 19 nt, Homo sapiens
  misc_RNA (1)...(19): siRNA sense strand
cagcagaaucaaucaaaau

SEQ ID NO: 2359543 - RNA, 19 nt, Homo sapiens
  misc_RNA (1)...(19): siRNA sense strand
gggauuugaaggacagagu

SEQ ID NO: 2359544 - RNA, 19 nt, Homo sapiens
  misc_RNA (1)...(19): siRNA sense strand
auguuugacuucaggcgaa

SEQ ID NO: 2359545 - RNA, 19 nt, Homo sapiens
  misc_RNA (1)...(19): siRNA sense strand
cagcaugugugaaggcucu

SEQ ID NO: 2359546 - RNA, 19 nt, Homo sapiens
  misc_RNA (1)...(19): siRNA sense strand
uauuaaaggaaggcaggaa

SEQ ID NO: 2359547 - RNA, 19 nt, Homo sapiens
  misc_RNA (1)...(19): siRNA sense strand
gguggugaauggcaggaga

SEQ ID NO: 2359548 - RNA, 19 nt, Homo sapiens
  misc_RNA (1)...(19): siRNA sense strand
aguggaaacgaaaugacaa

SEQ ID NO: 2359549 - RNA, 19 nt, Homo sapiens
  misc_RNA (1)...(19): siRNA sense strand
aggcagaagccguggugaa

SEQ ID NO: 2359550 - RNA, 19 nt, Homo sapiens
  misc_RNA (1)...(19): siRNA sense strand
cuaaggaggaggaggaaga

SEQ ID NO: 2359551 - RNA, 19 nt, Homo sapiens
  misc_RNA (1)...(19): siRNA sense strand
aggaggaggaggaggagaa

SEQ ID NO: 2359552 - RNA, 19 nt, Homo sapiens
  misc_RNA (1)...(19): siRNA sense strand
guuugaagacugagauaau

SEQ ID NO: 2359553 - RNA, 19 nt, Homo sapiens
  misc_RNA (1)...(19): siRNA sense strand
aggaagaggaggaggagga

SEQ ID NO: 2359554 - RNA, 19 nt, Homo sapiens
  misc_RNA (1)...(19): siRNA sense strand
uggcggaauugaagaggaa

SEQ ID NO: 2359555 - RNA, 19 nt, Homo sapiens
  misc_RNA (1)...(19): siRNA sense strand
cugaagugcaagaugauaa

SEQ ID NO: 2359556 - RNA, 19 nt, Homo sapiens
  misc_RNA (1)...(19): siRNA sense strand
agaagguggcugaggcuaa

SEQ ID NO: 2359557 - RNA, 19 nt, Homo sapiens
  misc_RNA (1)...(19): siRNA sense strand
ugucagauguugaggacga

SEQ ID NO: 2359558 - RNA, 19 nt, Homo sapiens
  misc_RNA (1)...(19): siRNA sense strand
aagcaaaggcacuggacau

SEQ ID NO: 2359559 - RNA, 19 nt, Homo sapiens
  misc_RNA (1)...(19): siRNA sense strand
gcggaauugaagaggaaga

SEQ ID NO: 2359560 - RNA, 19 nt, Homo sapiens
  misc_RNA (1)...(19): siRNA sense strand
gaauugaagaggaagaaaa

SEQ ID NO: 2359561 - RNA, 19 nt, Homo sapiens
  misc_RNA (1)...(19): siRNA sense strand
auaaagaggaggaggagga

SEQ ID NO: 2359562 - RNA, 19 nt, Homo sapiens
  misc_RNA (1)...(19): siRNA sense strand
uggcgaaggagacggguua

SEQ ID NO: 2359563 - RNA, 19 nt, Homo sapiens
  misc_RNA (1)...(19): siRNA sense strand
gagaggaagaugaagguga

SEQ ID NO: 2359564 - RNA, 19 nt, Homo sapiens
  misc_RNA (1)...(19): siRNA sense strand
aagaggaggaggaggaaca

SEQ ID NO: 2359565 - RNA, 19 nt, Homo sapiens
  misc_RNA (1)...(19): siRNA sense strand
guaagaaggagguggagca

SEQ ID NO: 2359566 - RNA, 19 nt, Homo sapiens
  misc_RNA (1)...(19): siRNA sense strand
gguuugugcaagaggaaaa

SEQ ID NO: 2359567 - RNA, 19 nt, Homo sapiens
  misc_RNA (1)...(19): siRNA sense strand
ggaagaagagagcugggaa

SEQ ID NO: 2359568 - RNA, 19 nt, Homo sapiens
  misc_RNA (1)...(19): siRNA sense strand
caguacuagcagugaggaa

SEQ ID NO: 2359569 - RNA, 19 nt, Homo sapiens
  misc_RNA (1)...(19): siRNA sense strand
gaggcuaaggcuagaaaga

SEQ ID NO: 2359570 - RNA, 19 nt, Homo sapiens
  misc_RNA (1)...(19): siRNA sense strand
caagaagcugaaagaacaa

SEQ ID NO: 2359571 - RNA, 19 nt, Homo sapiens
  misc_RNA (1)...(19): siRNA sense strand
cguaaggaacaaaagaaaa

SEQ ID NO: 2359572 - RNA, 19 nt, Homo sapiens
  misc_RNA (1)...(19): siRNA sense strand
ccaucaagaagguggcuga

SEQ ID NO: 2359573 - RNA, 19 nt, Homo sapiens
  misc_RNA (1)...(19): siRNA sense strand
uggcagaaaugaaggccca

SEQ ID NO: 2359574 - RNA, 19 nt, Homo sapiens
  misc_RNA (1)...(19): siRNA sense strand
ggaaguaacacaaggggau

SEQ ID NO: 2359575 - RNA, 19 nt, Homo sapiens
  misc_RNA (1)...(19): siRNA sense strand
guuacuaagaagaagccaa

SEQ ID NO: 2359576 - RNA, 19 nt, Homo sapiens
  misc_RNA (1)...(19): siRNA sense strand
ugaugacggguuugagaua

SEQ ID NO: 2359577 - RNA, 19 nt, Homo sapiens
  misc_RNA (1)...(19): siRNA sense strand
gcagaaagcccgagccuug

SEQ ID NO: 2359578 - RNA, 19 nt, Homo sapiens
  misc_RNA (1)...(19): siRNA sense strand
aggaggaggaagaggagga

SEQ ID NO: 2359579 - RNA, 19 nt, Homo sapiens
  misc_RNA (1)...(19): siRNA sense strand
aggaggaagaggaggagga

SEQ ID NO: 2359580 - RNA, 19 nt, Homo sapiens
  misc_RNA (1)...(19): siRNA sense strand
aaaagaagcuguugcguga

SEQ ID NO: 2359581 - RNA, 19 nt, Homo sapiens
  misc_RNA (1)...(19): siRNA sense strand
augauaaagaggaggagga

SEQ ID NO: 2359582 - RNA, 19 nt, Homo sapiens
  misc_RNA (1)...(19): siRNA sense strand
ccgaugaggcccuggagau

SEQ ID NO: 2359583 - RNA, 19 nt, Homo sapiens
  misc_RNA (1)...(19): siRNA sense strand
gggaagaaaaggauggcau

SEQ ID NO: 2359584 - RNA, 19 nt, Homo sapiens
  misc_RNA (1)...(19): siRNA sense strand
uggccaagaagcugaaaga

SEQ ID NO: 2359585 - RNA, 19 nt, Homo sapiens
  misc_RNA (1)...(19): siRNA sense strand
gccaagaagcugaaagaac

SEQ ID NO: 2359586 - RNA, 19 nt, Homo sapiens
  misc_RNA (1)...(19): siRNA sense strand
guacuagcagugaggaaga

SEQ ID NO: 2359587 - RNA, 19 nt, Homo sapiens
  misc_RNA (1)...(19): siRNA sense strand
uauugaggacccagcgaaa

SEQ ID NO: 2359588 - RNA, 19 nt, Homo sapiens
  misc_RNA (1)...(19): siRNA sense strand
acguaaggaacaaaagaaa

SEQ ID NO: 2359589 - RNA, 19 nt, Homo sapiens
  misc_RNA (1)...(19): siRNA sense strand
gggcaaaguuggcaagagc

SEQ ID NO: 2359590 - RNA, 19 nt, Homo sapiens
  misc_RNA (1)...(19): siRNA sense strand
gaagaagagagcugggaac

SEQ ID NO: 2359591 - RNA, 19 nt, Homo sapiens
  misc_RNA (1)...(19): siRNA sense strand
ggaauugaagaggaagaaa

SEQ ID NO: 2359592 - RNA, 19 nt, Homo sapiens
  misc_RNA (1)...(19): siRNA sense strand
aagaggaggaggaggagga

SEQ ID NO: 2359593 - RNA, 19 nt, Homo sapiens
  misc_RNA (1)...(19): siRNA sense strand
cuguuugaagacugagaua

SEQ ID NO: 2359594 - RNA, 19 nt, Homo sapiens
  misc_RNA (1)...(19): siRNA sense strand
ggauaugagugcagcagac

SEQ ID NO: 2359595 - RNA, 19 nt, Homo sapiens
  misc_RNA (1)...(19): siRNA sense strand
cuacaagaaggcugggcuu

SEQ ID NO: 2359596 - RNA, 19 nt, Homo sapiens
  misc_RNA (1)...(19): siRNA sense strand
ggaaggagcugaagaccug

SEQ ID NO: 2359597 - RNA, 19 nt, Homo sapiens
  misc_RNA (1)...(19): siRNA sense strand
cggaauugaagaggaagaa

SEQ ID NO: 2359598 - RNA, 19 nt, Homo sapiens
  misc_RNA (1)...(19): siRNA sense strand
ggaugauaucuauguguca

SEQ ID NO: 2359599 - RNA, 19 nt, Homo sapiens
  misc_RNA (1)...(19): siRNA sense strand
ugguaccacuggaggaaaa

SEQ ID NO: 2359600 - RNA, 19 nt, Homo sapiens
  misc_RNA (1)...(19): siRNA sense strand
ggccuaagucagaugauga

SEQ ID NO: 2359601 - RNA, 19 nt, Homo sapiens
  misc_RNA (1)...(19): siRNA sense strand
ggaagaaggcagaagccgu

SEQ ID NO: 2359602 - RNA, 19 nt, Homo sapiens
  misc_RNA (1)...(19): siRNA sense strand
guucaggcuaagaccguua

SEQ ID NO: 2359603 - RNA, 19 nt, Homo sapiens
  misc_RNA (1)...(19): siRNA sense strand
cagaggagcuggcaggagu

SEQ ID NO: 2359604 - RNA, 19 nt, Homo sapiens
  misc_RNA (1)...(19): siRNA sense strand
gcaagaugauaaagaggag

SEQ ID NO: 2359605 - RNA, 19 nt, Homo sapiens
  misc_RNA (1)...(19): siRNA sense strand
gcuaaggcuagaaagaaaa

SEQ ID NO: 2359606 - RNA, 19 nt, Homo sapiens
  misc_RNA (1)...(19): siRNA sense strand
ggaggaugcugaagaggcu

SEQ ID NO: 2359607 - RNA, 19 nt, Homo sapiens
  misc_RNA (1)...(19): siRNA sense strand
agaccuuggcagaaaugaa

SEQ ID NO: 2359608 - RNA, 19 nt, Homo sapiens
  misc_RNA (1)...(19): siRNA sense strand
uggugaacacaguggacau

SEQ ID NO: 2359609 - RNA, 19 nt, Homo sapiens
  misc_RNA (1)...(19): siRNA sense strand
agaugaaggugaugaggag

SEQ ID NO: 2359610 - RNA, 19 nt, Homo sapiens
  misc_RNA (1)...(19): siRNA sense strand
ucaccaguuauuagaggaa

SEQ ID NO: 2359611 - RNA, 19 nt, Homo sapiens
  misc_RNA (1)...(19): siRNA sense strand
uauuagaggaaguaacaca

SEQ ID NO: 2359612 - RNA, 19 nt, Homo sapiens
  misc_RNA (1)...(19): siRNA sense strand
agcaggugguggugauaaa

SEQ ID NO: 2359613 - RNA, 19 nt, Homo sapiens
  misc_RNA (1)...(19): siRNA sense strand
gauaaaggauaaauaccca

SEQ ID NO: 2359614 - RNA, 19 nt, Homo sapiens
  misc_RNA (1)...(19): siRNA sense strand
gaaagaacaucucaggaag

SEQ ID NO: 2359615 - RNA, 19 nt, Homo sapiens
  misc_RNA (1)...(19): siRNA sense strand
aguugaaagcagaguguaa

SEQ ID NO: 2359616 - RNA, 19 nt, Homo sapiens
  misc_RNA (1)...(19): siRNA sense strand
cuggaaacacacaggaaga

SEQ ID NO: 2359617 - RNA, 19 nt, Homo sapiens
  misc_RNA (1)...(19): siRNA sense strand
agcaggugguggugauaaa

SEQ ID NO: 2359618 - RNA, 19 nt, Homo sapiens
  misc_RNA (1)...(19): siRNA sense strand
agagaaagagaucaggcaa

SEQ ID NO: 2359619 - RNA, 19 nt, Homo sapiens
  misc_RNA (1)...(19): siRNA sense strand
acacaggaagagaaagaga

SEQ ID NO: 2359620 - RNA, 19 nt, Homo sapiens
  misc_RNA (1)...(19): siRNA sense strand
gagaaagagaucaggcaac

SEQ ID NO: 2359621 - RNA, 19 nt, Homo sapiens
  misc_RNA (1)...(19): siRNA sense strand
gauaaaggauaaauaccca

SEQ ID NO: 2359622 - RNA, 19 nt, Homo sapiens
  misc_RNA (1)...(19): siRNA sense strand
ugugcugguuggugagaca

SEQ ID NO: 2359623 - RNA, 19 nt, Homo sapiens
  misc_RNA (1)...(19): siRNA sense strand
cgggugugcugguugguga

SEQ ID NO: 2359624 - RNA, 19 nt, Homo sapiens
  misc_RNA (1)...(19): siRNA sense strand
aggaagagaaagagaucag

SEQ ID NO: 2359625 - RNA, 19 nt, Homo sapiens
  misc_RNA (1)...(19): siRNA sense strand
agcaggugguggugauaaa

SEQ ID NO: 2359626 - RNA, 19 nt, Homo sapiens
  misc_RNA (1)...(19): siRNA sense strand
gauaaaggauaaauaccca

SEQ ID NO: 2359627 - RNA, 19 nt, Homo sapiens
  misc_RNA (1)...(19): siRNA sense strand
gaaagaacaucucaggaag

SEQ ID NO: 2359628 - RNA, 19 nt, Homo sapiens
  misc_RNA (1)...(19): siRNA sense strand
cuggaaacacacaggaaga

SEQ ID NO: 2359629 - RNA, 19 nt, Homo sapiens
  misc_RNA (1)...(19): siRNA sense strand
agcaggugguggugauaaa

SEQ ID NO: 2359630 - RNA, 19 nt, Homo sapiens
  misc_RNA (1)...(19): siRNA sense strand
agagaaagagaucaggcaa

SEQ ID NO: 2359631 - RNA, 19 nt, Homo sapiens
  misc_RNA (1)...(19): siRNA sense strand
acacaggaagagaaagaga

SEQ ID NO: 2359632 - RNA, 19 nt, Homo sapiens
  misc_RNA (1)...(19): siRNA sense strand
gagaaagagaucaggcaac

SEQ ID NO: 2359633 - RNA, 19 nt, Homo sapiens
  misc_RNA (1)...(19): siRNA sense strand
gauaaaggauaaauaccca

SEQ ID NO: 2359634 - RNA, 19 nt, Homo sapiens
  misc_RNA (1)...(19): siRNA sense strand
gaaagaacaucucaggaag

SEQ ID NO: 2359635 - RNA, 19 nt, Homo sapiens
  misc_RNA (1)...(19): siRNA sense strand
aggaagagaaagagaucag

SEQ ID NO: 2359636 - RNA, 19 nt, Homo sapiens
  misc_RNA (1)...(19): siRNA sense strand
aguugaaagcagaguguaa

SEQ ID NO: 2359637 - RNA, 19 nt, Homo sapiens
  misc_RNA (1)...(19): siRNA sense strand
cuggaaacacacaggaaga

SEQ ID NO: 2359638 - RNA, 19 nt, Homo sapiens
  misc_RNA (1)...(19): siRNA sense strand
agcaggugguggugauaaa

SEQ ID NO: 2359639 - RNA, 19 nt, Homo sapiens
  misc_RNA (1)...(19): siRNA sense strand
agagaaagagaucaggcaa

SEQ ID NO: 2359640 - RNA, 19 nt, Homo sapiens
  misc_RNA (1)...(19): siRNA sense strand
acacaggaagagaaagaga

SEQ ID NO: 2359641 - RNA, 19 nt, Homo sapiens
  misc_RNA (1)...(19): siRNA sense strand
gagaaagagaucaggcaac

SEQ ID NO: 2359642 - RNA, 19 nt, Homo sapiens
  misc_RNA (1)...(19): siRNA sense strand
gauaaaggauaaauaccca

SEQ ID NO: 2359643 - RNA, 19 nt, Homo sapiens
  misc_RNA (1)...(19): siRNA sense strand
ugugcugguuggugagaca

SEQ ID NO: 2359644 - RNA, 19 nt, Homo sapiens
  misc_RNA (1)...(19): siRNA sense strand
cgggugugcugguugguga

SEQ ID NO: 2359645 - RNA, 19 nt, Homo sapiens
  misc_RNA (1)...(19): siRNA sense strand
gaaagaacaucucaggaag

SEQ ID NO: 2359646 - RNA, 19 nt, Homo sapiens
  misc_RNA (1)...(19): siRNA sense strand
aggaagagaaagagaucag

SEQ ID NO: 2359647 - RNA, 19 nt, Homo sapiens
  misc_RNA (1)...(19): siRNA sense strand
aagaagaagcaaaggcacu

SEQ ID NO: 2359648 - RNA, 19 nt, Homo sapiens
  misc_RNA (1)...(19): siRNA sense strand
gauaaauccaaguguggga

SEQ ID NO: 2359649 - RNA, 19 nt, Homo sapiens
  misc_RNA (1)...(19): siRNA sense strand
agaagaagguggaaggcga

SEQ ID NO: 2359650 - RNA, 19 nt, Homo sapiens
  misc_RNA (1)...(19): siRNA sense strand
ugucagagcuggaggcagu

SEQ ID NO: 2359651 - RNA, 19 nt, Homo sapiens
  misc_RNA (1)...(19): siRNA sense strand
aggcagugauggagaagca

SEQ ID NO: 2359652 - RNA, 19 nt, Homo sapiens
  misc_RNA (1)...(19): siRNA sense strand
uggaaggcgagguggaaau

SEQ ID NO: 2359653 - RNA, 19 nt, Homo sapiens
  misc_RNA (1)...(19): siRNA sense strand
agaaacagcuacagcacga

SEQ ID NO: 2359654 - RNA, 19 nt, Homo sapiens
  misc_RNA (1)...(19): siRNA sense strand
ucgacgacguagagagcuu

SEQ ID NO: 2359655 - RNA, 19 nt, Homo sapiens
  misc_RNA (1)...(19): siRNA sense strand
agguggaaauggaggucau

SEQ ID NO: 2359656 - RNA, 19 nt, Homo sapiens
  misc_RNA (1)...(19): siRNA sense strand
uggagaagcaaaagaagaa

SEQ ID NO: 2359657 - RNA, 19 nt, Homo sapiens
  misc_RNA (1)...(19): siRNA sense strand
aggaggaguugcagcgcga

SEQ ID NO: 2359658 - RNA, 19 nt, Homo sapiens
  misc_RNA (1)...(19): siRNA sense strand
cagugauggagaagcaaaa

SEQ ID NO: 2359659 - RNA, 19 nt, Homo sapiens
  misc_RNA (1)...(19): siRNA sense strand
agaaagugucagagcugga

SEQ ID NO: 2359660 - RNA, 19 nt, Homo sapiens
  misc_RNA (1)...(19): siRNA sense strand
uggaggacaaagagaaagu

SEQ ID NO: 2359661 - RNA, 19 nt, Homo sapiens
  misc_RNA (1)...(19): siRNA sense strand
agaagaagguggaaggcga

SEQ ID NO: 2359662 - RNA, 19 nt, Homo sapiens
  misc_RNA (1)...(19): siRNA sense strand
ugucagagcuggaggcagu

SEQ ID NO: 2359663 - RNA, 19 nt, Homo sapiens
  misc_RNA (1)...(19): siRNA sense strand
aggcagugauggagaagca

SEQ ID NO: 2359664 - RNA, 19 nt, Homo sapiens
  misc_RNA (1)...(19): siRNA sense strand
uggaaggcgagguggaaau

SEQ ID NO: 2359665 - RNA, 19 nt, Homo sapiens
  misc_RNA (1)...(19): siRNA sense strand
agaaacagcuacagcacga

SEQ ID NO: 2359666 - RNA, 19 nt, Homo sapiens
  misc_RNA (1)...(19): siRNA sense strand
ucgacgacguagagagcuu

SEQ ID NO: 2359667 - RNA, 19 nt, Homo sapiens
  misc_RNA (1)...(19): siRNA sense strand
agguggaaauggaggucau

SEQ ID NO: 2359668 - RNA, 19 nt, Homo sapiens
  misc_RNA (1)...(19): siRNA sense strand
uggagaagcaaaagaagaa

SEQ ID NO: 2359669 - RNA, 19 nt, Homo sapiens
  misc_RNA (1)...(19): siRNA sense strand
aggaggaguugcagcgcga

SEQ ID NO: 2359670 - RNA, 19 nt, Homo sapiens
  misc_RNA (1)...(19): siRNA sense strand
cagugauggagaagcaaaa

SEQ ID NO: 2359671 - RNA, 19 nt, Homo sapiens
  misc_RNA (1)...(19): siRNA sense strand
agaaagugucagagcugga

SEQ ID NO: 2359672 - RNA, 19 nt, Homo sapiens
  misc_RNA (1)...(19): siRNA sense strand
uggaggacaaagagaaagu

SEQ ID NO: 2359673 - RNA, 19 nt, Homo sapiens
  misc_RNA (1)...(19): siRNA sense strand
agaagaagguggaaggcga

SEQ ID NO: 2359674 - RNA, 19 nt, Homo sapiens
  misc_RNA (1)...(19): siRNA sense strand
ugucagagcuggaggcagu

SEQ ID NO: 2359675 - RNA, 19 nt, Homo sapiens
  misc_RNA (1)...(19): siRNA sense strand
aggcagugauggagaagca

SEQ ID NO: 2359676 - RNA, 19 nt, Homo sapiens
  misc_RNA (1)...(19): siRNA sense strand
uggaaggcgagguggaaau

SEQ ID NO: 2359677 - RNA, 19 nt, Homo sapiens
  misc_RNA (1)...(19): siRNA sense strand
agaaacagcuacagcacga

SEQ ID NO: 2359678 - RNA, 19 nt, Homo sapiens
  misc_RNA (1)...(19): siRNA sense strand
ucgacgacguagagagcuu

SEQ ID NO: 2359679 - RNA, 19 nt, Homo sapiens
  misc_RNA (1)...(19): siRNA sense strand
agguggaaauggaggucau

SEQ ID NO: 2359680 - RNA, 19 nt, Homo sapiens
  misc_RNA (1)...(19): siRNA sense strand
uggagaagcaaaagaagaa

SEQ ID NO: 2359681 - RNA, 19 nt, Homo sapiens
  misc_RNA (1)...(19): siRNA sense strand
aggaggaguugcagcgcga

SEQ ID NO: 2359682 - RNA, 19 nt, Homo sapiens
  misc_RNA (1)...(19): siRNA sense strand
cagugauggagaagcaaaa

SEQ ID NO: 2359683 - RNA, 19 nt, Homo sapiens
  misc_RNA (1)...(19): siRNA sense strand
agaaagugucagagcugga

SEQ ID NO: 2359684 - RNA, 19 nt, Homo sapiens
  misc_RNA (1)...(19): siRNA sense strand
uggaggacaaagagaaagu

SEQ ID NO: 2359685 - RNA, 19 nt, Homo sapiens
  misc_RNA (1)...(19): siRNA sense strand
uggagaacgcggugcucaa

SEQ ID NO: 2359686 - RNA, 19 nt, Homo sapiens
  misc_RNA (1)...(19): siRNA sense strand
ucagaauggcaaugacaau

SEQ ID NO: 2359687 - RNA, 19 nt, Homo sapiens
  misc_RNA (1)...(19): siRNA sense strand
cagcaguaucuggaggaaa

SEQ ID NO: 2359688 - RNA, 19 nt, Homo sapiens
  misc_RNA (1)...(19): siRNA sense strand
cagcugaucagaauggcaa

SEQ ID NO: 2359689 - RNA, 19 nt, Homo sapiens
  misc_RNA (1)...(19): siRNA sense strand
uggcaaugacaaugagaac

SEQ ID NO: 2359690 - RNA, 19 nt, Homo sapiens
  misc_RNA (1)...(19): siRNA sense strand
uggagaacgcggugcucaa

SEQ ID NO: 2359691 - RNA, 19 nt, Homo sapiens
  misc_RNA (1)...(19): siRNA sense strand
ucagaauggcaaugacaau

SEQ ID NO: 2359692 - RNA, 19 nt, Homo sapiens
  misc_RNA (1)...(19): siRNA sense strand
cagcaguaucuggaggaaa

SEQ ID NO: 2359693 - RNA, 19 nt, Homo sapiens
  misc_RNA (1)...(19): siRNA sense strand
cagcugaucagaauggcaa

SEQ ID NO: 2359694 - RNA, 19 nt, Homo sapiens
  misc_RNA (1)...(19): siRNA sense strand
uggcaaugacaaugagaac

SEQ ID NO: 2359695 - RNA, 19 nt, Homo sapiens
  misc_RNA (1)...(19): siRNA sense strand
uggagaacgcggugcucaa

SEQ ID NO: 2359696 - RNA, 19 nt, Homo sapiens
  misc_RNA (1)...(19): siRNA sense strand
ucagaauggcaaugacaau

SEQ ID NO: 2359697 - RNA, 19 nt, Homo sapiens
  misc_RNA (1)...(19): siRNA sense strand
cagcaguaucuggaggaaa

SEQ ID NO: 2359698 - RNA, 19 nt, Homo sapiens
  misc_RNA (1)...(19): siRNA sense strand
cagcugaucagaauggcaa

SEQ ID NO: 2359699 - RNA, 19 nt, Homo sapiens
  misc_RNA (1)...(19): siRNA sense strand
uggcaaugacaaugagaac

SEQ ID NO: 2359700 - RNA, 19 nt, Homo sapiens
  misc_RNA (1)...(19): siRNA sense strand
cauaguggucagagaguua

SEQ ID NO: 2359701 - RNA, 19 nt, Homo sapiens
  misc_RNA (1)...(19): siRNA sense strand
gcgccauaguagcagguaa

SEQ ID NO: 2359702 - RNA, 19 nt, Homo sapiens
  misc_RNA (1)...(19): siRNA sense strand
gugaaaagaagaagaguuu

SEQ ID NO: 2359703 - RNA, 19 nt, Homo sapiens
  misc_RNA (1)...(19): siRNA sense strand
ugggcugaauggagaaaua

SEQ ID NO: 2359704 - RNA, 19 nt, Homo sapiens
  misc_RNA (1)...(19): siRNA sense strand
gugcaugaucuuugaauau

SEQ ID NO: 2359705 - RNA, 19 nt, Homo sapiens
  misc_RNA (1)...(19): siRNA sense strand
auacaggauuuaugaggaa

SEQ ID NO: 2359706 - RNA, 19 nt, Homo sapiens
  misc_RNA (1)...(19): siRNA sense strand
gguguaaccgcgagaagaa

SEQ ID NO: 2359707 - RNA, 19 nt, Homo sapiens
  misc_RNA (1)...(19): siRNA sense strand
gguagaagcaagagaugga

SEQ ID NO: 2359708 - RNA, 19 nt, Homo sapiens
  misc_RNA (1)...(19): siRNA sense strand
gcaccaaaugaaugcuaaa

SEQ ID NO: 2359709 - RNA, 19 nt, Homo sapiens
  misc_RNA (1)...(19): siRNA sense strand
uuguaguaaacgaggauaa

SEQ ID NO: 2359710 - RNA, 19 nt, Homo sapiens
  misc_RNA (1)...(19): siRNA sense strand
cagccaaaacuguggguua

SEQ ID NO: 2359711 - RNA, 19 nt, Homo sapiens
  misc_RNA (1)...(19): siRNA sense strand
cagguaaugaggagaauau

SEQ ID NO: 2359712 - RNA, 19 nt, Homo sapiens
  misc_RNA (1)...(19): siRNA sense strand
aaguugaagugcuggauau

SEQ ID NO: 2359713 - RNA, 19 nt, Homo sapiens
  misc_RNA (1)...(19): siRNA sense strand
uggucagaguucaggacaa

SEQ ID NO: 2359714 - RNA, 19 nt, Homo sapiens
  misc_RNA (1)...(19): siRNA sense strand
acaccaucuuggagaguuu

SEQ ID NO: 2359715 - RNA, 19 nt, Homo sapiens
  misc_RNA (1)...(19): siRNA sense strand
caucaaaccacgugccaga

SEQ ID NO: 2359716 - RNA, 19 nt, Homo sapiens
  misc_RNA (1)...(19): siRNA sense strand
ccaaaauuauggagacuuu

SEQ ID NO: 2359717 - RNA, 19 nt, Homo sapiens
  misc_RNA (1)...(19): siRNA sense strand
ccucagaaucuuugaucau

SEQ ID NO: 2359718 - RNA, 19 nt, Homo sapiens
  misc_RNA (1)...(19): siRNA sense strand
caguuaucauucaggacaa

SEQ ID NO: 2359719 - RNA, 19 nt, Homo sapiens
  misc_RNA (1)...(19): siRNA sense strand
uagauaggcuguuggguga

SEQ ID NO: 2359720 - RNA, 19 nt, Homo sapiens
  misc_RNA (1)...(19): siRNA sense strand
gugcaguguugcugguuau

SEQ ID NO: 2359721 - RNA, 19 nt, Homo sapiens
  misc_RNA (1)...(19): siRNA sense strand
cgccauaguagcagguaau

SEQ ID NO: 2359722 - RNA, 19 nt, Homo sapiens
  misc_RNA (1)...(19): siRNA sense strand
ggaagaugauuuugacaau

SEQ ID NO: 2359723 - RNA, 19 nt, Homo sapiens
  misc_RNA (1)...(19): siRNA sense strand
ggaacagaggguuggauca

SEQ ID NO: 2359724 - RNA, 19 nt, Homo sapiens
  misc_RNA (1)...(19): siRNA sense strand
caauaucagccaagaccaa

SEQ ID NO: 2359725 - RNA, 19 nt, Homo sapiens
  misc_RNA (1)...(19): siRNA sense strand
cugaaaauuaugaggaaga

SEQ ID NO: 2359726 - RNA, 19 nt, Homo sapiens
  misc_RNA (1)...(19): siRNA sense strand
agaaaagagaucugaguau

SEQ ID NO: 2359727 - RNA, 19 nt, Homo sapiens
  misc_RNA (1)...(19): siRNA sense strand
ggacagugcauuugaucca

SEQ ID NO: 2359728 - RNA, 19 nt, Homo sapiens
  misc_RNA (1)...(19): siRNA sense strand
ggacaaggauucugggcug

SEQ ID NO: 2359729 - RNA, 19 nt, Homo sapiens
  misc_RNA (1)...(19): siRNA sense strand
gucacaagaauaagggcaa

SEQ ID NO: 2359730 - RNA, 19 nt, Homo sapiens
  misc_RNA (1)...(19): siRNA sense strand
acaucagagucuugaggau

SEQ ID NO: 2359731 - RNA, 19 nt, Homo sapiens
  misc_RNA (1)...(19): siRNA sense strand
ccucauguccccuggaaaa

SEQ ID NO: 2359732 - RNA, 19 nt, Homo sapiens
  misc_RNA (1)...(19): siRNA sense strand
agaccaaguuuucgaggaa

SEQ ID NO: 2359733 - RNA, 19 nt, Homo sapiens
  misc_RNA (1)...(19): siRNA sense strand
ggcaggagacagugauuau

SEQ ID NO: 2359734 - RNA, 19 nt, Homo sapiens
  misc_RNA (1)...(19): siRNA sense strand
uacaauugaccgugaacaa

SEQ ID NO: 2359735 - RNA, 19 nt, Homo sapiens
  misc_RNA (1)...(19): siRNA sense strand
gcuggauauuaaugacaau

SEQ ID NO: 2359736 - RNA, 19 nt, Homo sapiens
  misc_RNA (1)...(19): siRNA sense strand
uagcagguaaugaggagaa

SEQ ID NO: 2359737 - RNA, 19 nt, Homo sapiens
  misc_RNA (1)...(19): siRNA sense strand
acaaauauuccaggagcua

SEQ ID NO: 2359738 - RNA, 19 nt, Homo sapiens
  misc_RNA (1)...(19): siRNA sense strand
agugcaugaucuuugaaua

SEQ ID NO: 2359739 - RNA, 19 nt, Homo sapiens
  misc_RNA (1)...(19): siRNA sense strand
aguuagaucgggagcugaa

SEQ ID NO: 2359740 - RNA, 19 nt, Homo sapiens
  misc_RNA (1)...(19): siRNA sense strand
aauaagggcaauugacaga

SEQ ID NO: 2359741 - RNA, 19 nt, Homo sapiens
  misc_RNA (1)...(19): siRNA sense strand
ucaacaguuuggugacaau

SEQ ID NO: 2359742 - RNA, 19 nt, Homo sapiens
  misc_RNA (1)...(19): siRNA sense strand
ucuucugauuauaggagua

SEQ ID NO: 2359743 - RNA, 19 nt, Homo sapiens
  misc_RNA (1)...(19): siRNA sense strand
ggugaaaagaagaagaguu

SEQ ID NO: 2359744 - RNA, 19 nt, Homo sapiens
  misc_RNA (1)...(19): siRNA sense strand
ugaacaacugugccagaaa

SEQ ID NO: 2359745 - RNA, 19 nt, Homo sapiens
  misc_RNA (1)...(19): siRNA sense strand
gaucgggagcugaagucaa

SEQ ID NO: 2359746 - RNA, 19 nt, Homo sapiens
  misc_RNA (1)...(19): siRNA sense strand
agauugauguucaggcuca

SEQ ID NO: 2359747 - RNA, 19 nt, Homo sapiens
  misc_RNA (1)...(19): siRNA sense strand
acagcaaugacuucaguaa

SEQ ID NO: 2359748 - RNA, 19 nt, Homo sapiens
  misc_RNA (1)...(19): siRNA sense strand
gaaagagggcagaugggca

SEQ ID NO: 2359749 - RNA, 19 nt, Homo sapiens
  misc_RNA (1)...(19): siRNA sense strand
aagcaaguggauuaugaaa

SEQ ID NO: 2359750 - RNA, 19 nt, Homo sapiens
  misc_RNA (1)...(19): siRNA sense strand
aagcaacugguaagcaaua

SEQ ID NO: 2359751 - RNA, 19 nt, Homo sapiens
  misc_RNA (1)...(19): siRNA sense strand
ccuucaagacauggacaaa

SEQ ID NO: 2359752 - RNA, 19 nt, Homo sapiens
  misc_RNA (1)...(19): siRNA sense strand
aaucuuaacuaaugccaca

SEQ ID NO: 2359753 - RNA, 19 nt, Homo sapiens
  misc_RNA (1)...(19): siRNA sense strand
agaaaucaccauucccaaa

SEQ ID NO: 2359754 - RNA, 19 nt, Homo sapiens
  misc_RNA (1)...(19): siRNA sense strand
gggcuacaauugaccguga

SEQ ID NO: 2359755 - RNA, 19 nt, Homo sapiens
  misc_RNA (1)...(19): siRNA sense strand
gaucaguaauugcaagacu

SEQ ID NO: 2359756 - RNA, 19 nt, Homo sapiens
  misc_RNA (1)...(19): siRNA sense strand
cagucucucuacagugaaa

SEQ ID NO: 2359757 - RNA, 19 nt, Homo sapiens
  misc_RNA (1)...(19): siRNA sense strand
cuuucaugucacaagaaua

SEQ ID NO: 2359758 - RNA, 19 nt, Homo sapiens
  misc_RNA (1)...(19): siRNA sense strand
agaauaagggcaauugaca

SEQ ID NO: 2359759 - RNA, 19 nt, Homo sapiens
  misc_RNA (1)...(19): siRNA sense strand
ugaacugguggcagagauu

SEQ ID NO: 2359760 - RNA, 19 nt, Homo sapiens
  misc_RNA (1)...(19): siRNA sense strand
aaacgaggauaauggggaa

SEQ ID NO: 2359761 - RNA, 19 nt, Homo sapiens
  misc_RNA (1)...(19): siRNA sense strand
uuuucaagcaaguggauua

SEQ ID NO: 2359762 - RNA, 19 nt, Homo sapiens
  misc_RNA (1)...(19): siRNA sense strand
cugaauggagaaauaguuu

SEQ ID NO: 2359763 - RNA, 19 nt, Homo sapiens
  misc_RNA (1)...(19): siRNA sense strand
ccaucuaugcccucagaau

SEQ ID NO: 2359764 - RNA, 19 nt, Homo sapiens
  misc_RNA (1)...(19): siRNA sense strand
ggaggaagcccgaagcaac

SEQ ID NO: 2359765 - RNA, 19 nt, Homo sapiens
  misc_RNA (1)...(19): siRNA sense strand
gaaauuaacaucaaccuca

SEQ ID NO: 2359766 - RNA, 19 nt, Homo sapiens
  misc_RNA (1)...(19): siRNA sense strand
acuaaugccacacuggaua

SEQ ID NO: 2359767 - RNA, 19 nt, Homo sapiens
  misc_RNA (1)...(19): siRNA sense strand
agaucugaguauaguuuga

SEQ ID NO: 2359768 - RNA, 19 nt, Homo sapiens
  misc_RNA (1)...(19): siRNA sense strand
ucacaagaauaagggcaau

SEQ ID NO: 2359769 - RNA, 19 nt, Homo sapiens
  misc_RNA (1)...(19): siRNA sense strand
guggacagucucagggaca

SEQ ID NO: 2359770 - RNA, 19 nt, Homo sapiens
  misc_RNA (1)...(19): siRNA sense strand
cagaaaagagaaagagcca

SEQ ID NO: 2359771 - RNA, 19 nt, Homo sapiens
  misc_RNA (1)...(19): siRNA sense strand
gguuagagauguucuugau

SEQ ID NO: 2359772 - RNA, 19 nt, Homo sapiens
  misc_RNA (1)...(19): siRNA sense strand
gaaaagagaaagagccagu

SEQ ID NO: 2359773 - RNA, 19 nt, Homo sapiens
  misc_RNA (1)...(19): siRNA sense strand
uugagacaguagaagagaa

SEQ ID NO: 2359774 - RNA, 19 nt, Homo sapiens
  misc_RNA (1)...(19): siRNA sense strand
aguucaaucuucuggcuca

SEQ ID NO: 2359775 - RNA, 19 nt, Homo sapiens
  misc_RNA (1)...(19): siRNA sense strand
ggaaauacuaagaagcuca

SEQ ID NO: 2359776 - RNA, 19 nt, Homo sapiens
  misc_RNA (1)...(19): siRNA sense strand
gggcaaaugcguuggugca

SEQ ID NO: 2359777 - RNA, 19 nt, Homo sapiens
  misc_RNA (1)...(19): siRNA sense strand
aguauaaagaugagugcuu

SEQ ID NO: 2359778 - RNA, 19 nt, Homo sapiens
  misc_RNA (1)...(19): siRNA sense strand
gggaagacacagaugagga

SEQ ID NO: 2359779 - RNA, 19 nt, Homo sapiens
  misc_RNA (1)...(19): siRNA sense strand
cggagauggugaaagucau

SEQ ID NO: 2359780 - RNA, 19 nt, Homo sapiens
  misc_RNA (1)...(19): siRNA sense strand
ccgaaguguuugucaggca

SEQ ID NO: 2359781 - RNA, 19 nt, Homo sapiens
  misc_RNA (1)...(19): siRNA sense strand
gauccugaguggcugggaa

SEQ ID NO: 2359782 - RNA, 19 nt, Homo sapiens
  misc_RNA (1)...(19): siRNA sense strand
ucaucaacaagcugggcua

SEQ ID NO: 2359783 - RNA, 19 nt, Homo sapiens
  misc_RNA (1)...(19): siRNA sense strand
acaauaagcuggagugugc

SEQ ID NO: 2359784 - RNA, 19 nt, Homo sapiens
  misc_RNA (1)...(19): siRNA sense strand
cuaagaagcucaucaccga

SEQ ID NO: 2359785 - RNA, 19 nt, Homo sapiens
  misc_RNA (1)...(19): siRNA sense strand
aaucuaaaucugagugacu

SEQ ID NO: 2359786 - RNA, 19 nt, Homo sapiens
  misc_RNA (1)...(19): siRNA sense strand
augaaaggcaacuguguca

SEQ ID NO: 2359787 - RNA, 19 nt, Homo sapiens
  misc_RNA (1)...(19): siRNA sense strand
cuauccaggucucggguga

SEQ ID NO: 2359788 - RNA, 19 nt, Homo sapiens
  misc_RNA (1)...(19): siRNA sense strand
ucgcagagugugaguggga

SEQ ID NO: 2359789 - RNA, 19 nt, Homo sapiens
  misc_RNA (1)...(19): siRNA sense strand
aagacacagaugaggauga

SEQ ID NO: 2359790 - RNA, 19 nt, Homo sapiens
  misc_RNA (1)...(19): siRNA sense strand
cagaugaggaugaaccuga

SEQ ID NO: 2359791 - RNA, 19 nt, Homo sapiens
  misc_RNA (1)...(19): siRNA sense strand
agaaagauccacagagcug

SEQ ID NO: 2359792 - RNA, 19 nt, Homo sapiens
  misc_RNA (1)...(19): siRNA sense strand
ggaugugagaucuggaaaa

SEQ ID NO: 2359793 - RNA, 19 nt, Homo sapiens
  misc_RNA (1)...(19): siRNA sense strand
gcagaaauuacaaggccau

SEQ ID NO: 2359794 - RNA, 19 nt, Homo sapiens
  misc_RNA (1)...(19): siRNA sense strand
ugucugguuccgaggauaa

SEQ ID NO: 2359795 - RNA, 19 nt, Homo sapiens
  misc_RNA (1)...(19): siRNA sense strand
gcuugucauccuacagaaa

SEQ ID NO: 2359796 - RNA, 19 nt, Homo sapiens
  misc_RNA (1)...(19): siRNA sense strand
caaauguacucuuguggga

SEQ ID NO: 2359797 - RNA, 19 nt, Homo sapiens
  misc_RNA (1)...(19): siRNA sense strand
ggugaaaacaggaaagugu

SEQ ID NO: 2359798 - RNA, 19 nt, Homo sapiens
  misc_RNA (1)...(19): siRNA sense strand
gggaugugagaucuggaaa

SEQ ID NO: 2359799 - RNA, 19 nt, Homo sapiens
  misc_RNA (1)...(19): siRNA sense strand
agaaaacacucuaugguca

SEQ ID NO: 2359800 - RNA, 19 nt, Homo sapiens
  misc_RNA (1)...(19): siRNA sense strand
aauuaugggaugugagauc

SEQ ID NO: 2359801 - RNA, 19 nt, Homo sapiens
  misc_RNA (1)...(19): siRNA sense strand
caagagacgccaaagcaca

SEQ ID NO: 2359802 - RNA, 19 nt, Homo sapiens
  misc_RNA (1)...(19): siRNA sense strand
agggaagggccgagaacua

SEQ ID NO: 2359803 - RNA, 19 nt, Homo sapiens
  misc_RNA (1)...(19): siRNA sense strand
cauccuaccuggagcgcua

SEQ ID NO: 2359804 - RNA, 19 nt, Homo sapiens
  misc_RNA (1)...(19): siRNA sense strand
acgaacuguaucugggaaa

SEQ ID NO: 2359805 - RNA, 19 nt, Homo sapiens
  misc_RNA (1)...(19): siRNA sense strand
ggggugacacugugggaaa

SEQ ID NO: 2359806 - RNA, 19 nt, Homo sapiens
  misc_RNA (1)...(19): siRNA sense strand
cgggauggcaagaagguca

SEQ ID NO: 2359807 - RNA, 19 nt, Homo sapiens
  misc_RNA (1)...(19): siRNA sense strand
gaaagcgacuggaggcuga

SEQ ID NO: 2359808 - RNA, 19 nt, Homo sapiens
  misc_RNA (1)...(19): siRNA sense strand
ccuucaggacuuugaggaa

SEQ ID NO: 2359809 - RNA, 19 nt, Homo sapiens
  misc_RNA (1)...(19): siRNA sense strand
uggcugagggcaugggcua

SEQ ID NO: 2359810 - RNA, 19 nt, Homo sapiens
  misc_RNA (1)...(19): siRNA sense strand
ccuaugacccugugagcga

SEQ ID NO: 2359811 - RNA, 19 nt, Homo sapiens
  misc_RNA (1)...(19): siRNA sense strand
gugaagaggaggaaggccu

SEQ ID NO: 2359812 - RNA, 19 nt, Homo sapiens
  misc_RNA (1)...(19): siRNA sense strand
cggacaggauugacgaacu

SEQ ID NO: 2359813 - RNA, 19 nt, Homo sapiens
  misc_RNA (1)...(19): siRNA sense strand
cagaacagcuucauccaca

SEQ ID NO: 2359814 - RNA, 19 nt, Homo sapiens
  misc_RNA (1)...(19): siRNA sense strand
uggcccaggaugaggauga

SEQ ID NO: 2359815 - RNA, 19 nt, Homo sapiens
  misc_RNA (1)...(19): siRNA sense strand
agccagaagccauggacga

SEQ ID NO: 2359816 - RNA, 19 nt, Homo sapiens
  misc_RNA (1)...(19): siRNA sense strand
acuuugaggaaccggacaa

SEQ ID NO: 2359817 - RNA, 19 nt, Homo sapiens
  misc_RNA (1)...(19): siRNA sense strand
gcaucuaggaggggugaaa

SEQ ID NO: 2359818 - RNA, 19 nt, Homo sapiens
  misc_RNA (1)...(19): siRNA sense strand
gcugagaagagaagagcaa

SEQ ID NO: 2359819 - RNA, 19 nt, Homo sapiens
  misc_RNA (1)...(19): siRNA sense strand
gagaagagcaagaagacga

SEQ ID NO: 2359820 - RNA, 19 nt, Homo sapiens
  misc_RNA (1)...(19): siRNA sense strand
aggaacaguuagagcccaa

SEQ ID NO: 2359821 - RNA, 19 nt, Homo sapiens
  misc_RNA (1)...(19): siRNA sense strand
guuugaaggaaguguggaa

SEQ ID NO: 2359822 - RNA, 19 nt, Homo sapiens
  misc_RNA (1)...(19): siRNA sense strand
ugagaagagaagagcaaga

SEQ ID NO: 2359823 - RNA, 19 nt, Homo sapiens
  misc_RNA (1)...(19): siRNA sense strand
aggaaguauuacaaaguga

SEQ ID NO: 2359824 - RNA, 19 nt, Homo sapiens
  misc_RNA (1)...(19): siRNA sense strand
gcgccauauguuugugaua

SEQ ID NO: 2359825 - RNA, 19 nt, Homo sapiens
  misc_RNA (1)...(19): siRNA sense strand
ggaaagaccagcagcucca

SEQ ID NO: 2359826 - RNA, 19 nt, Homo sapiens
  misc_RNA (1)...(19): siRNA sense strand
ccacgugguagaaggaaca

SEQ ID NO: 2359827 - RNA, 19 nt, Homo sapiens
  misc_RNA (1)...(19): siRNA sense strand
gcuuacaguuugaaggaag

SEQ ID NO: 2359828 - RNA, 19 nt, Homo sapiens
  misc_RNA (1)...(19): siRNA sense strand
gcacauuauagcugagaag

SEQ ID NO: 2359829 - RNA, 19 nt, Homo sapiens
  misc_RNA (1)...(19): siRNA sense strand
ucaaauuagucaacgacca

SEQ ID NO: 2359830 - RNA, 19 nt, Homo sapiens
  misc_RNA (1)...(19): siRNA sense strand
cuguagaaucccaaaugua

SEQ ID NO: 2359831 - RNA, 19 nt, Homo sapiens
  misc_RNA (1)...(19): siRNA sense strand
aagagcaagaagacgauua

SEQ ID NO: 2359832 - RNA, 19 nt, Homo sapiens
  misc_RNA (1)...(19): siRNA sense strand
gggaggaugacgauggcau

SEQ ID NO: 2359833 - RNA, 19 nt, Homo sapiens
  misc_RNA (1)...(19): siRNA sense strand
ucgcuguguuacugaagaa

SEQ ID NO: 2359834 - RNA, 19 nt, Homo sapiens
  misc_RNA (1)...(19): siRNA sense strand
aggaaguguggaaguauau

SEQ ID NO: 2359835 - RNA, 19 nt, Homo sapiens
  misc_RNA (1)...(19): siRNA sense strand
ucacaaagauggcagcugu

SEQ ID NO: 2359836 - RNA, 19 nt, Homo sapiens
  misc_RNA (1)...(19): siRNA sense strand
acaugaauauagggaaaca

SEQ ID NO: 2359837 - RNA, 19 nt, Homo sapiens
  misc_RNA (1)...(19): siRNA sense strand
augaugucuuggaaguuaa

SEQ ID NO: 2359838 - RNA, 19 nt, Homo sapiens
  misc_RNA (1)...(19): siRNA sense strand
caaagauggcagcuguaau

SEQ ID NO: 2359839 - RNA, 19 nt, Homo sapiens
  misc_RNA (1)...(19): siRNA sense strand
cuguguuacugaagaaugu

SEQ ID NO: 2359840 - RNA, 19 nt, Homo sapiens
  misc_RNA (1)...(19): siRNA sense strand
auuaaaugauccagacauc

SEQ ID NO: 2359841 - RNA, 19 nt, Homo sapiens
  misc_RNA (1)...(19): siRNA sense strand
gcugagaagagaagagcaa

SEQ ID NO: 2359842 - RNA, 19 nt, Homo sapiens
  misc_RNA (1)...(19): siRNA sense strand
gagaagagcaagaagacga

SEQ ID NO: 2359843 - RNA, 19 nt, Homo sapiens
  misc_RNA (1)...(19): siRNA sense strand
aggaacaguuagagcccaa

SEQ ID NO: 2359844 - RNA, 19 nt, Homo sapiens
  misc_RNA (1)...(19): siRNA sense strand
guuugaaggaaguguggaa

SEQ ID NO: 2359845 - RNA, 19 nt, Homo sapiens
  misc_RNA (1)...(19): siRNA sense strand
ugagaagagaagagcaaga

SEQ ID NO: 2359846 - RNA, 19 nt, Homo sapiens
  misc_RNA (1)...(19): siRNA sense strand
aggaaguauuacaaaguga

SEQ ID NO: 2359847 - RNA, 19 nt, Homo sapiens
  misc_RNA (1)...(19): siRNA sense strand
gcgccauauguuugugaua

SEQ ID NO: 2359848 - RNA, 19 nt, Homo sapiens
  misc_RNA (1)...(19): siRNA sense strand
ggaaagaccagcagcucca

SEQ ID NO: 2359849 - RNA, 19 nt, Homo sapiens
  misc_RNA (1)...(19): siRNA sense strand
ccacgugguagaaggaaca

SEQ ID NO: 2359850 - RNA, 19 nt, Homo sapiens
  misc_RNA (1)...(19): siRNA sense strand
gcuuacaguuugaaggaag

SEQ ID NO: 2359851 - RNA, 19 nt, Homo sapiens
  misc_RNA (1)...(19): siRNA sense strand
gcacauuauagcugagaag

SEQ ID NO: 2359852 - RNA, 19 nt, Homo sapiens
  misc_RNA (1)...(19): siRNA sense strand
ucaaauuagucaacgacca

SEQ ID NO: 2359853 - RNA, 19 nt, Homo sapiens
  misc_RNA (1)...(19): siRNA sense strand
cuguagaaucccaaaugua

SEQ ID NO: 2359854 - RNA, 19 nt, Homo sapiens
  misc_RNA (1)...(19): siRNA sense strand
aagagcaagaagacgauua

SEQ ID NO: 2359855 - RNA, 19 nt, Homo sapiens
  misc_RNA (1)...(19): siRNA sense strand
gggaggaugacgauggcau

SEQ ID NO: 2359856 - RNA, 19 nt, Homo sapiens
  misc_RNA (1)...(19): siRNA sense strand
ucgcuguguuacugaagaa

SEQ ID NO: 2359857 - RNA, 19 nt, Homo sapiens
  misc_RNA (1)...(19): siRNA sense strand
aggaaguguggaaguauau

SEQ ID NO: 2359858 - RNA, 19 nt, Homo sapiens
  misc_RNA (1)...(19): siRNA sense strand
ucacaaagauggcagcugu

SEQ ID NO: 2359859 - RNA, 19 nt, Homo sapiens
  misc_RNA (1)...(19): siRNA sense strand
acaugaauauagggaaaca

SEQ ID NO: 2359860 - RNA, 19 nt, Homo sapiens
  misc_RNA (1)...(19): siRNA sense strand
augaugucuuggaaguuaa

SEQ ID NO: 2359861 - RNA, 19 nt, Homo sapiens
  misc_RNA (1)...(19): siRNA sense strand
caaagauggcagcuguaau

SEQ ID NO: 2359862 - RNA, 19 nt, Homo sapiens
  misc_RNA (1)...(19): siRNA sense strand
cuguguuacugaagaaugu

SEQ ID NO: 2359863 - RNA, 19 nt, Homo sapiens
  misc_RNA (1)...(19): siRNA sense strand
auuaaaugauccagacauc

SEQ ID NO: 2359864 - RNA, 19 nt, Homo sapiens
  misc_RNA (1)...(19): siRNA sense strand
gcugagaagagaagagcaa

SEQ ID NO: 2359865 - RNA, 19 nt, Homo sapiens
  misc_RNA (1)...(19): siRNA sense strand
gagaagagcaagaagacga

SEQ ID NO: 2359866 - RNA, 19 nt, Homo sapiens
  misc_RNA (1)...(19): siRNA sense strand
aggaacaguuagagcccaa

SEQ ID NO: 2359867 - RNA, 19 nt, Homo sapiens
  misc_RNA (1)...(19): siRNA sense strand
guuugaaggaaguguggaa

SEQ ID NO: 2359868 - RNA, 19 nt, Homo sapiens
  misc_RNA (1)...(19): siRNA sense strand
ugagaagagaagagcaaga

SEQ ID NO: 2359869 - RNA, 19 nt, Homo sapiens
  misc_RNA (1)...(19): siRNA sense strand
aggaaguauuacaaaguga

SEQ ID NO: 2359870 - RNA, 19 nt, Homo sapiens
  misc_RNA (1)...(19): siRNA sense strand
gcgccauauguuugugaua

SEQ ID NO: 2359871 - RNA, 19 nt, Homo sapiens
  misc_RNA (1)...(19): siRNA sense strand
ggaaagaccagcagcucca

SEQ ID NO: 2359872 - RNA, 19 nt, Homo sapiens
  misc_RNA (1)...(19): siRNA sense strand
ccacgugguagaaggaaca

SEQ ID NO: 2359873 - RNA, 19 nt, Homo sapiens
  misc_RNA (1)...(19): siRNA sense strand
gcuuacaguuugaaggaag

SEQ ID NO: 2359874 - RNA, 19 nt, Homo sapiens
  misc_RNA (1)...(19): siRNA sense strand
gcacauuauagcugagaag

SEQ ID NO: 2359875 - RNA, 19 nt, Homo sapiens
  misc_RNA (1)...(19): siRNA sense strand
ucaaauuagucaacgacca

SEQ ID NO: 2359876 - RNA, 19 nt, Homo sapiens
  misc_RNA (1)...(19): siRNA sense strand
cuguagaaucccaaaugua

SEQ ID NO: 2359877 - RNA, 19 nt, Homo sapiens
  misc_RNA (1)...(19): siRNA sense strand
aagagcaagaagacgauua

SEQ ID NO: 2359878 - RNA, 19 nt, Homo sapiens
  misc_RNA (1)...(19): siRNA sense strand
gggaggaugacgauggcau

SEQ ID NO: 2359879 - RNA, 19 nt, Homo sapiens
  misc_RNA (1)...(19): siRNA sense strand
ucgcuguguuacugaagaa

SEQ ID NO: 2359880 - RNA, 19 nt, Homo sapiens
  misc_RNA (1)...(19): siRNA sense strand
aggaaguguggaaguauau

SEQ ID NO: 2359881 - RNA, 19 nt, Homo sapiens
  misc_RNA (1)...(19): siRNA sense strand
ucacaaagauggcagcugu

SEQ ID NO: 2359882 - RNA, 19 nt, Homo sapiens
  misc_RNA (1)...(19): siRNA sense strand
acaugaauauagggaaaca

SEQ ID NO: 2359883 - RNA, 19 nt, Homo sapiens
  misc_RNA (1)...(19): siRNA sense strand
augaugucuuggaaguuaa

SEQ ID NO: 2359884 - RNA, 19 nt, Homo sapiens
  misc_RNA (1)...(19): siRNA sense strand
caaagauggcagcuguaau

SEQ ID NO: 2359885 - RNA, 19 nt, Homo sapiens
  misc_RNA (1)...(19): siRNA sense strand
cuguguuacugaagaaugu

SEQ ID NO: 2359886 - RNA, 19 nt, Homo sapiens
  misc_RNA (1)...(19): siRNA sense strand
auuaaaugauccagacauc

SEQ ID NO: 2359887 - RNA, 19 nt, Homo sapiens
  misc_RNA (1)...(19): siRNA sense strand
ucguuaaggcugaugagaa

SEQ ID NO: 2359888 - RNA, 19 nt, Homo sapiens
  misc_RNA (1)...(19): siRNA sense strand
ggacuuaccuugcaagcga

SEQ ID NO: 2359889 - RNA, 19 nt, Homo sapiens
  misc_RNA (1)...(19): siRNA sense strand
gauaagggccuguccgaga

SEQ ID NO: 2359890 - RNA, 19 nt, Homo sapiens
  misc_RNA (1)...(19): siRNA sense strand
cccaagggugugagaggaa

SEQ ID NO: 2359891 - RNA, 19 nt, Homo sapiens
  misc_RNA (1)...(19): siRNA sense strand
cgauggagacugugccgua

SEQ ID NO: 2359892 - RNA, 19 nt, Homo sapiens
  misc_RNA (1)...(19): siRNA sense strand
agcugaaaauugagaacaa

SEQ ID NO: 2359893 - RNA, 19 nt, Homo sapiens
  misc_RNA (1)...(19): siRNA sense strand
gcaugaaccccaagaccaa

SEQ ID NO: 2359894 - RNA, 19 nt, Homo sapiens
  misc_RNA (1)...(19): siRNA sense strand
cgcuacaaguucugugaca

SEQ ID NO: 2359895 - RNA, 19 nt, Homo sapiens
  misc_RNA (1)...(19): siRNA sense strand
ccaaaagcaucaugaggca

SEQ ID NO: 2359896 - RNA, 19 nt, Homo sapiens
  misc_RNA (1)...(19): siRNA sense strand
uggcccgacugcagagcaa

SEQ ID NO: 2359897 - RNA, 19 nt, Homo sapiens
  misc_RNA (1)...(19): siRNA sense strand
agguaaaagucacaggcau

SEQ ID NO: 2359898 - RNA, 19 nt, Homo sapiens
  misc_RNA (1)...(19): siRNA sense strand
caggaaggcuguaugucca

SEQ ID NO: 2359899 - RNA, 19 nt, Homo sapiens
  misc_RNA (1)...(19): siRNA sense strand
gguaaaagucacaggcaug

SEQ ID NO: 2359900 - RNA, 19 nt, Homo sapiens
  misc_RNA (1)...(19): siRNA sense strand
gaauggggacuguggagaa

SEQ ID NO: 2359901 - RNA, 19 nt, Homo sapiens
  misc_RNA (1)...(19): siRNA sense strand
gggcagugugcaagccaaa

SEQ ID NO: 2359902 - RNA, 19 nt, Homo sapiens
  misc_RNA (1)...(19): siRNA sense strand
aggaaauacgaaauggauu

SEQ ID NO: 2359903 - RNA, 19 nt, Homo sapiens
  misc_RNA (1)...(19): siRNA sense strand
augaagaaauacagccaga

SEQ ID NO: 2359904 - RNA, 19 nt, Homo sapiens
  misc_RNA (1)...(19): siRNA sense strand
agacacaaagccugcgaau

SEQ ID NO: 2359905 - RNA, 19 nt, Homo sapiens
  misc_RNA (1)...(19): siRNA sense strand
caaugaagaaauacagcca

SEQ ID NO: 2359906 - RNA, 19 nt, Homo sapiens
  misc_RNA (1)...(19): siRNA sense strand
aagaguaugaagaggcaau

SEQ ID NO: 2359907 - RNA, 19 nt, Homo sapiens
  misc_RNA (1)...(19): siRNA sense strand
ccagagagcauucaggaga

SEQ ID NO: 2359908 - RNA, 19 nt, Homo sapiens
  misc_RNA (1)...(19): siRNA sense strand
gaugaagagugucggcuca

SEQ ID NO: 2359909 - RNA, 19 nt, Homo sapiens
  misc_RNA (1)...(19): siRNA sense strand
ggaugacuccagagagcau

SEQ ID NO: 2359910 - RNA, 19 nt, Homo sapiens
  misc_RNA (1)...(19): siRNA sense strand
cgaucaaggcugacccuga

SEQ ID NO: 2359911 - RNA, 19 nt, Homo sapiens
  misc_RNA (1)...(19): siRNA sense strand
gcacuaugcaggucagcca

SEQ ID NO: 2359912 - RNA, 19 nt, Homo sapiens
  misc_RNA (1)...(19): siRNA sense strand
aggcugacccugaugguga

SEQ ID NO: 2359913 - RNA, 19 nt, Homo sapiens
  misc_RNA (1)...(19): siRNA sense strand
ugaagaguaugaagaggca

SEQ ID NO: 2359914 - RNA, 19 nt, Homo sapiens
  misc_RNA (1)...(19): siRNA sense strand
cuguguacccagagaccau

SEQ ID NO: 2359915 - RNA, 19 nt, Homo sapiens
  misc_RNA (1)...(19): siRNA sense strand
aagaguaugaagaggcaau

SEQ ID NO: 2359916 - RNA, 19 nt, Homo sapiens
  misc_RNA (1)...(19): siRNA sense strand
ccagagagcauucaggaga

SEQ ID NO: 2359917 - RNA, 19 nt, Homo sapiens
  misc_RNA (1)...(19): siRNA sense strand
gaugaagagugucggcuca

SEQ ID NO: 2359918 - RNA, 19 nt, Homo sapiens
  misc_RNA (1)...(19): siRNA sense strand
ggaugacuccagagagcau

SEQ ID NO: 2359919 - RNA, 19 nt, Homo sapiens
  misc_RNA (1)...(19): siRNA sense strand
cgaugaaaugagucugauu

SEQ ID NO: 2359920 - RNA, 19 nt, Homo sapiens
  misc_RNA (1)...(19): siRNA sense strand
cgaucaaggcugacccuga

SEQ ID NO: 2359921 - RNA, 19 nt, Homo sapiens
  misc_RNA (1)...(19): siRNA sense strand
gcacuaugcaggucagcca

SEQ ID NO: 2359922 - RNA, 19 nt, Homo sapiens
  misc_RNA (1)...(19): siRNA sense strand
aggcugacccugaugguga

SEQ ID NO: 2359923 - RNA, 19 nt, Homo sapiens
  misc_RNA (1)...(19): siRNA sense strand
gcaccaaguggauugccaa

SEQ ID NO: 2359924 - RNA, 19 nt, Homo sapiens
  misc_RNA (1)...(19): siRNA sense strand
ugaagaguaugaagaggca

SEQ ID NO: 2359925 - RNA, 19 nt, Homo sapiens
  misc_RNA (1)...(19): siRNA sense strand
cuguguacccagagaccau

SEQ ID NO: 2359926 - RNA, 19 nt, Homo sapiens
  misc_RNA (1)...(19): siRNA sense strand
aagaguaugaagaggcaau

SEQ ID NO: 2359927 - RNA, 19 nt, Homo sapiens
  misc_RNA (1)...(19): siRNA sense strand
ccagagagcauucaggaga

SEQ ID NO: 2359928 - RNA, 19 nt, Homo sapiens
  misc_RNA (1)...(19): siRNA sense strand
gaugaagagugucggcuca

SEQ ID NO: 2359929 - RNA, 19 nt, Homo sapiens
  misc_RNA (1)...(19): siRNA sense strand
ggaugacuccagagagcau

SEQ ID NO: 2359930 - RNA, 19 nt, Homo sapiens
  misc_RNA (1)...(19): siRNA sense strand
cgaugaaaugagucugauu

SEQ ID NO: 2359931 - RNA, 19 nt, Homo sapiens
  misc_RNA (1)...(19): siRNA sense strand
cgaucaaggcugacccuga

SEQ ID NO: 2359932 - RNA, 19 nt, Homo sapiens
  misc_RNA (1)...(19): siRNA sense strand
gcacuaugcaggucagcca

SEQ ID NO: 2359933 - RNA, 19 nt, Homo sapiens
  misc_RNA (1)...(19): siRNA sense strand
aggcugacccugaugguga

SEQ ID NO: 2359934 - RNA, 19 nt, Homo sapiens
  misc_RNA (1)...(19): siRNA sense strand
gcaccaaguggauugccaa

SEQ ID NO: 2359935 - RNA, 19 nt, Homo sapiens
  misc_RNA (1)...(19): siRNA sense strand
ugaagaguaugaagaggca

SEQ ID NO: 2359936 - RNA, 19 nt, Homo sapiens
  misc_RNA (1)...(19): siRNA sense strand
cuguguacccagagaccau

SEQ ID NO: 2359937 - RNA, 19 nt, Homo sapiens
  misc_RNA (1)...(19): siRNA sense strand
gccguaaaaucgagguaaa

SEQ ID NO: 2359938 - RNA, 19 nt, Homo sapiens
  misc_RNA (1)...(19): siRNA sense strand
cugaaaacacggaaaacaa

SEQ ID NO: 2359939 - RNA, 19 nt, Homo sapiens
  misc_RNA (1)...(19): siRNA sense strand
cgagguaaauaaugccaca

SEQ ID NO: 2359940 - RNA, 19 nt, Homo sapiens
  misc_RNA (1)...(19): siRNA sense strand
uauacaaauggcuggaaau

SEQ ID NO: 2359941 - RNA, 19 nt, Homo sapiens
  misc_RNA (1)...(19): siRNA sense strand
gggagaaauuacacggcac

SEQ ID NO: 2359942 - RNA, 19 nt, Homo sapiens
  misc_RNA (1)...(19): siRNA sense strand
aggccaaccaggagggauc

SEQ ID NO: 2359943 - RNA, 19 nt, Homo sapiens
  misc_RNA (1)...(19): siRNA sense strand
guuuggucaauuugguaaa

SEQ ID NO: 2359944 - RNA, 19 nt, Homo sapiens
  misc_RNA (1)...(19): siRNA sense strand
gccguaaaaucgagguaaa

SEQ ID NO: 2359945 - RNA, 19 nt, Homo sapiens
  misc_RNA (1)...(19): siRNA sense strand
cugaaaacacggaaaacaa

SEQ ID NO: 2359946 - RNA, 19 nt, Homo sapiens
  misc_RNA (1)...(19): siRNA sense strand
cgagguaaauaaugccaca

SEQ ID NO: 2359947 - RNA, 19 nt, Homo sapiens
  misc_RNA (1)...(19): siRNA sense strand
uauacaaauggcuggaaau

SEQ ID NO: 2359948 - RNA, 19 nt, Homo sapiens
  misc_RNA (1)...(19): siRNA sense strand
gggagaaauuacacggcac

SEQ ID NO: 2359949 - RNA, 19 nt, Homo sapiens
  misc_RNA (1)...(19): siRNA sense strand
aggccaaccaggagggauc

SEQ ID NO: 2359950 - RNA, 19 nt, Homo sapiens
  misc_RNA (1)...(19): siRNA sense strand
guuuggucaauuugguaaa

SEQ ID NO: 2359951 - RNA, 19 nt, Homo sapiens
  misc_RNA (1)...(19): siRNA sense strand
gccguaaaaucgagguaaa

SEQ ID NO: 2359952 - RNA, 19 nt, Homo sapiens
  misc_RNA (1)...(19): siRNA sense strand
cugaaaacacggaaaacaa

SEQ ID NO: 2359953 - RNA, 19 nt, Homo sapiens
  misc_RNA (1)...(19): siRNA sense strand
cgagguaaauaaugccaca

SEQ ID NO: 2359954 - RNA, 19 nt, Homo sapiens
  misc_RNA (1)...(19): siRNA sense strand
uauacaaauggcuggaaau

SEQ ID NO: 2359955 - RNA, 19 nt, Homo sapiens
  misc_RNA (1)...(19): siRNA sense strand
gggagaaauuacacggcac

SEQ ID NO: 2359956 - RNA, 19 nt, Homo sapiens
  misc_RNA (1)...(19): siRNA sense strand
aggccaaccaggagggauc

SEQ ID NO: 2359957 - RNA, 19 nt, Homo sapiens
  misc_RNA (1)...(19): siRNA sense strand
guuuggucaauuugguaaa

SEQ ID NO: 2359958 - RNA, 19 nt, Homo sapiens
  misc_RNA (1)...(19): siRNA sense strand
gccguaaaaucgagguaaa

SEQ ID NO: 2359959 - RNA, 19 nt, Homo sapiens
  misc_RNA (1)...(19): siRNA sense strand
cugaaaacacggaaaacaa

SEQ ID NO: 2359960 - RNA, 19 nt, Homo sapiens
  misc_RNA (1)...(19): siRNA sense strand
cgagguaaauaaugccaca

SEQ ID NO: 2359961 - RNA, 19 nt, Homo sapiens
  misc_RNA (1)...(19): siRNA sense strand
uauacaaauggcuggaaau

SEQ ID NO: 2359962 - RNA, 19 nt, Homo sapiens
  misc_RNA (1)...(19): siRNA sense strand
gggagaaauuacacggcac

SEQ ID NO: 2359963 - RNA, 19 nt, Homo sapiens
  misc_RNA (1)...(19): siRNA sense strand
aggccaaccaggagggauc

SEQ ID NO: 2359964 - RNA, 19 nt, Homo sapiens
  misc_RNA (1)...(19): siRNA sense strand
guuuggucaauuugguaaa

SEQ ID NO: 2359965 - RNA, 19 nt, Homo sapiens
  misc_RNA (1)...(19): siRNA sense strand
ggguaggacaaguggaaau

SEQ ID NO: 2359966 - RNA, 19 nt, Homo sapiens
  misc_RNA (1)...(19): siRNA sense strand
ucgagagaacagagagaaa

SEQ ID NO: 2359967 - RNA, 19 nt, Homo sapiens
  misc_RNA (1)...(19): siRNA sense strand
gagagaaauuugaagcguu

SEQ ID NO: 2359968 - RNA, 19 nt, Homo sapiens
  misc_RNA (1)...(19): siRNA sense strand
uggaaguagcugaugaaga

SEQ ID NO: 2359969 - RNA, 19 nt, Homo sapiens
  misc_RNA (1)...(19): siRNA sense strand
acaggaauggguaggacaa

SEQ ID NO: 2359970 - RNA, 19 nt, Homo sapiens
  misc_RNA (1)...(19): siRNA sense strand
cuucgagagaacagagaga

SEQ ID NO: 2359971 - RNA, 19 nt, Homo sapiens
  misc_RNA (1)...(19): siRNA sense strand
cuuauguacaggaaagauu

SEQ ID NO: 2359972 - RNA, 19 nt, Homo sapiens
  misc_RNA (1)...(19): siRNA sense strand
ucacuaucuucgagagaac

SEQ ID NO: 2359973 - RNA, 19 nt, Homo sapiens
  misc_RNA (1)...(19): siRNA sense strand
guuggaaguagcugaugaa

SEQ ID NO: 2359974 - RNA, 19 nt, Homo sapiens
  misc_RNA (1)...(19): siRNA sense strand
guaaaauugugauggaacu

SEQ ID NO: 2359975 - RNA, 19 nt, Homo sapiens
  misc_RNA (1)...(19): siRNA sense strand
aaguagcugaugaagauaa

SEQ ID NO: 2359976 - RNA, 19 nt, Homo sapiens
  misc_RNA (1)...(19): siRNA sense strand
cuucacaaguaacagaaaa

SEQ ID NO: 2359977 - RNA, 19 nt, Homo sapiens
  misc_RNA (1)...(19): siRNA sense strand
ggguaggacaaguggaaau

SEQ ID NO: 2359978 - RNA, 19 nt, Homo sapiens
  misc_RNA (1)...(19): siRNA sense strand
ucgagagaacagagagaaa

SEQ ID NO: 2359979 - RNA, 19 nt, Homo sapiens
  misc_RNA (1)...(19): siRNA sense strand
gagagaaauuugaagcguu

SEQ ID NO: 2359980 - RNA, 19 nt, Homo sapiens
  misc_RNA (1)...(19): siRNA sense strand
uggaaguagcugaugaaga

SEQ ID NO: 2359981 - RNA, 19 nt, Homo sapiens
  misc_RNA (1)...(19): siRNA sense strand
acaggaauggguaggacaa

SEQ ID NO: 2359982 - RNA, 19 nt, Homo sapiens
  misc_RNA (1)...(19): siRNA sense strand
cuucgagagaacagagaga

SEQ ID NO: 2359983 - RNA, 19 nt, Homo sapiens
  misc_RNA (1)...(19): siRNA sense strand
cuuauguacaggaaagauu

SEQ ID NO: 2359984 - RNA, 19 nt, Homo sapiens
  misc_RNA (1)...(19): siRNA sense strand
ucacuaucuucgagagaac

SEQ ID NO: 2359985 - RNA, 19 nt, Homo sapiens
  misc_RNA (1)...(19): siRNA sense strand
guuggaaguagcugaugaa

SEQ ID NO: 2359986 - RNA, 19 nt, Homo sapiens
  misc_RNA (1)...(19): siRNA sense strand
guaaaauugugauggaacu

SEQ ID NO: 2359987 - RNA, 19 nt, Homo sapiens
  misc_RNA (1)...(19): siRNA sense strand
aaguagcugaugaagauaa

SEQ ID NO: 2359988 - RNA, 19 nt, Homo sapiens
  misc_RNA (1)...(19): siRNA sense strand
cuucacaaguaacagaaaa

SEQ ID NO: 2359989 - RNA, 19 nt, Homo sapiens
  misc_RNA (1)...(19): siRNA sense strand
aggaguggucggacagaaa

SEQ ID NO: 2359990 - RNA, 19 nt, Homo sapiens
  misc_RNA (1)...(19): siRNA sense strand
gggugcuggacgagaggaa

SEQ ID NO: 2359991 - RNA, 19 nt, Homo sapiens
  misc_RNA (1)...(19): siRNA sense strand
ccuccaagcacgugccaga

SEQ ID NO: 2359992 - RNA, 19 nt, Homo sapiens
  misc_RNA (1)...(19): siRNA sense strand
cuggagaagaugagcgaag

SEQ ID NO: 2359993 - RNA, 19 nt, Homo sapiens
  misc_RNA (1)...(19): siRNA sense strand
cuguauaaggauggaguga

SEQ ID NO: 2359994 - RNA, 19 nt, Homo sapiens
  misc_RNA (1)...(19): siRNA sense strand
cugcaagagauuauuugaa

SEQ ID NO: 2359995 - RNA, 19 nt, Homo sapiens
  misc_RNA (1)...(19): siRNA sense strand
aggacgugguugaggaauu

SEQ ID NO: 2359996 - RNA, 19 nt, Homo sapiens
  misc_RNA (1)...(19): siRNA sense strand
ccaaggacgugguugagga

SEQ ID NO: 2359997 - RNA, 19 nt, Homo sapiens
  misc_RNA (1)...(19): siRNA sense strand
ucauugagauguaccgaga

SEQ ID NO: 2359998 - RNA, 19 nt, Homo sapiens
  misc_RNA (1)...(19): siRNA sense strand
ccgugugcagagugugaaa

SEQ ID NO: 2359999 - RNA, 19 nt, Homo sapiens
  misc_RNA (1)...(19): siRNA sense strand
aggaauucagcgauuuaua

SEQ ID NO: 2360000 - RNA, 19 nt, Homo sapiens
  misc_RNA (1)...(19): siRNA sense strand
gagcaggguuucacggaug

SEQ ID NO: 2360001 - RNA, 19 nt, Homo sapiens
  misc_RNA (1)...(19): siRNA sense strand
aggacgugguugaggaauu

SEQ ID NO: 2360002 - RNA, 19 nt, Homo sapiens
  misc_RNA (1)...(19): siRNA sense strand
ccaaggacgugguugagga

SEQ ID NO: 2360003 - RNA, 19 nt, Homo sapiens
  misc_RNA (1)...(19): siRNA sense strand
ucauugagauguaccgaga

SEQ ID NO: 2360004 - RNA, 19 nt, Homo sapiens
  misc_RNA (1)...(19): siRNA sense strand
ccgugugcagagugugaaa

SEQ ID NO: 2360005 - RNA, 19 nt, Homo sapiens
  misc_RNA (1)...(19): siRNA sense strand
aggaauucagcgauuuaua

SEQ ID NO: 2360006 - RNA, 19 nt, Homo sapiens
  misc_RNA (1)...(19): siRNA sense strand
gagcaggguuucacggaug

SEQ ID NO: 2360007 - RNA, 19 nt, Homo sapiens
  misc_RNA (1)...(19): siRNA sense strand
aggacgugguugaggaauu

SEQ ID NO: 2360008 - RNA, 19 nt, Homo sapiens
  misc_RNA (1)...(19): siRNA sense strand
ccaaggacgugguugagga

SEQ ID NO: 2360009 - RNA, 19 nt, Homo sapiens
  misc_RNA (1)...(19): siRNA sense strand
ucauugagauguaccgaga

SEQ ID NO: 2360010 - RNA, 19 nt, Homo sapiens
  misc_RNA (1)...(19): siRNA sense strand
ccgugugcagagugugaaa

SEQ ID NO: 2360011 - RNA, 19 nt, Homo sapiens
  misc_RNA (1)...(19): siRNA sense strand
aggaauucagcgauuuaua

SEQ ID NO: 2360012 - RNA, 19 nt, Homo sapiens
  misc_RNA (1)...(19): siRNA sense strand
gagcaggguuucacggaug

SEQ ID NO: 2360013 - RNA, 19 nt, Homo sapiens
  misc_RNA (1)...(19): siRNA sense strand
aggacgugguugaggaauu

SEQ ID NO: 2360014 - RNA, 19 nt, Homo sapiens
  misc_RNA (1)...(19): siRNA sense strand
ccaaggacgugguugagga

SEQ ID NO: 2360015 - RNA, 19 nt, Homo sapiens
  misc_RNA (1)...(19): siRNA sense strand
ucauugagauguaccgaga

SEQ ID NO: 2360016 - RNA, 19 nt, Homo sapiens
  misc_RNA (1)...(19): siRNA sense strand
ccgugugcagagugugaaa

SEQ ID NO: 2360017 - RNA, 19 nt, Homo sapiens
  misc_RNA (1)...(19): siRNA sense strand
aggaauucagcgauuuaua

SEQ ID NO: 2360018 - RNA, 19 nt, Homo sapiens
  misc_RNA (1)...(19): siRNA sense strand
gagcaggguuucacggaug

SEQ ID NO: 2360019 - RNA, 19 nt, Homo sapiens
  misc_RNA (1)...(19): siRNA sense strand
aggacgugguugaggaauu

SEQ ID NO: 2360020 - RNA, 19 nt, Homo sapiens
  misc_RNA (1)...(19): siRNA sense strand
ccaaggacgugguugagga

SEQ ID NO: 2360021 - RNA, 19 nt, Homo sapiens
  misc_RNA (1)...(19): siRNA sense strand
ucauugagauguaccgaga

SEQ ID NO: 2360022 - RNA, 19 nt, Homo sapiens
  misc_RNA (1)...(19): siRNA sense strand
ccgugugcagagugugaaa

SEQ ID NO: 2360023 - RNA, 19 nt, Homo sapiens
  misc_RNA (1)...(19): siRNA sense strand
aggaauucagcgauuuaua

SEQ ID NO: 2360024 - RNA, 19 nt, Homo sapiens
  misc_RNA (1)...(19): siRNA sense strand
gagcaggguuucacggaug

SEQ ID NO: 2360025 - RNA, 19 nt, Homo sapiens
  misc_RNA (1)...(19): siRNA sense strand
gguaauuauucgaggugga

SEQ ID NO: 2360026 - RNA, 19 nt, Homo sapiens
  misc_RNA (1)...(19): siRNA sense strand
aggaauacaagaaggcaga

SEQ ID NO: 2360027 - RNA, 19 nt, Homo sapiens
  misc_RNA (1)...(19): siRNA sense strand
aaggaagagaauugaguuu

SEQ ID NO: 2360028 - RNA, 19 nt, Homo sapiens
  misc_RNA (1)...(19): siRNA sense strand
uauucgagguggaggacau

SEQ ID NO: 2360029 - RNA, 19 nt, Homo sapiens
  misc_RNA (1)...(19): siRNA sense strand
ggaaauaugugccagccau

SEQ ID NO: 2360030 - RNA, 19 nt, Homo sapiens
  misc_RNA (1)...(19): siRNA sense strand
agucuuaugcagggaaaua

SEQ ID NO: 2360031 - RNA, 19 nt, Homo sapiens
  misc_RNA (1)...(19): siRNA sense strand
agaacugguuugaggccuu

SEQ ID NO: 2360032 - RNA, 19 nt, Homo sapiens
  misc_RNA (1)...(19): siRNA sense strand
gaacacaucaggaagcaga

SEQ ID NO: 2360033 - RNA, 19 nt, Homo sapiens
  misc_RNA (1)...(19): siRNA sense strand
guaacaugaccuugcguga

SEQ ID NO: 2360034 - RNA, 19 nt, Homo sapiens
  misc_RNA (1)...(19): siRNA sense strand
agaagauacaguacaguca

SEQ ID NO: 2360035 - RNA, 19 nt, Homo sapiens
  misc_RNA (1)...(19): siRNA sense strand
ucuuuaaaucugacaguga

SEQ ID NO: 2360036 - RNA, 19 nt, Homo sapiens
  misc_RNA (1)...(19): siRNA sense strand
gugagagaggugaagauca

SEQ ID NO: 2360037 - RNA, 19 nt, Homo sapiens
  misc_RNA (1)...(19): siRNA sense strand
augcagaauuccuguacca

SEQ ID NO: 2360038 - RNA, 19 nt, Homo sapiens
  misc_RNA (1)...(19): siRNA sense strand
ugaugauacccacggauau

SEQ ID NO: 2360039 - RNA, 19 nt, Homo sapiens
  misc_RNA (1)...(19): siRNA sense strand
acggauaugcagucaauga

SEQ ID NO: 2360040 - RNA, 19 nt, Homo sapiens
  misc_RNA (1)...(19): siRNA sense strand
cugugagagaggugaagau

SEQ ID NO: 2360041 - RNA, 19 nt, Homo sapiens
  misc_RNA (1)...(19): siRNA sense strand
caaauuggcuuguuggaug

SEQ ID NO: 2360042 - RNA, 19 nt, Homo sapiens
  misc_RNA (1)...(19): siRNA sense strand
uugaaaaguacuugcgaga

SEQ ID NO: 2360043 - RNA, 19 nt, Homo sapiens
  misc_RNA (1)...(19): siRNA sense strand
gguaauuauucgaggugga

SEQ ID NO: 2360044 - RNA, 19 nt, Homo sapiens
  misc_RNA (1)...(19): siRNA sense strand
aggaauacaagaaggcaga

SEQ ID NO: 2360045 - RNA, 19 nt, Homo sapiens
  misc_RNA (1)...(19): siRNA sense strand
aaggaagagaauugaguuu

SEQ ID NO: 2360046 - RNA, 19 nt, Homo sapiens
  misc_RNA (1)...(19): siRNA sense strand
uauucgagguggaggacau

SEQ ID NO: 2360047 - RNA, 19 nt, Homo sapiens
  misc_RNA (1)...(19): siRNA sense strand
ggaaauaugugccagccau

SEQ ID NO: 2360048 - RNA, 19 nt, Homo sapiens
  misc_RNA (1)...(19): siRNA sense strand
agucuuaugcagggaaaua

SEQ ID NO: 2360049 - RNA, 19 nt, Homo sapiens
  misc_RNA (1)...(19): siRNA sense strand
agaacugguuugaggccuu

SEQ ID NO: 2360050 - RNA, 19 nt, Homo sapiens
  misc_RNA (1)...(19): siRNA sense strand
gaacacaucaggaagcaga

SEQ ID NO: 2360051 - RNA, 19 nt, Homo sapiens
  misc_RNA (1)...(19): siRNA sense strand
guaacaugaccuugcguga

SEQ ID NO: 2360052 - RNA, 19 nt, Homo sapiens
  misc_RNA (1)...(19): siRNA sense strand
agaagauacaguacaguca

SEQ ID NO: 2360053 - RNA, 19 nt, Homo sapiens
  misc_RNA (1)...(19): siRNA sense strand
ucuuuaaaucugacaguga

SEQ ID NO: 2360054 - RNA, 19 nt, Homo sapiens
  misc_RNA (1)...(19): siRNA sense strand
gugagagaggugaagauca

SEQ ID NO: 2360055 - RNA, 19 nt, Homo sapiens
  misc_RNA (1)...(19): siRNA sense strand
augcagaauuccuguacca

SEQ ID NO: 2360056 - RNA, 19 nt, Homo sapiens
  misc_RNA (1)...(19): siRNA sense strand
ugaugauacccacggauau

SEQ ID NO: 2360057 - RNA, 19 nt, Homo sapiens
  misc_RNA (1)...(19): siRNA sense strand
acggauaugcagucaauga

SEQ ID NO: 2360058 - RNA, 19 nt, Homo sapiens
  misc_RNA (1)...(19): siRNA sense strand
cugugagagaggugaagau

SEQ ID NO: 2360059 - RNA, 19 nt, Homo sapiens
  misc_RNA (1)...(19): siRNA sense strand
caaauuggcuuguuggaug

SEQ ID NO: 2360060 - RNA, 19 nt, Homo sapiens
  misc_RNA (1)...(19): siRNA sense strand
uugaaaaguacuugcgaga

SEQ ID NO: 2360061 - RNA, 19 nt, Homo sapiens
  misc_RNA (1)...(19): siRNA sense strand
cugcaaagccagaggacuu

SEQ ID NO: 2360062 - RNA, 19 nt, Homo sapiens
  misc_RNA (1)...(19): siRNA sense strand
acaacaacguagaagaaaa

SEQ ID NO: 2360063 - RNA, 19 nt, Homo sapiens
  misc_RNA (1)...(19): siRNA sense strand
ccgggaagacccagagcaa

SEQ ID NO: 2360064 - RNA, 19 nt, Homo sapiens
  misc_RNA (1)...(19): siRNA sense strand
cuggagagcccuacgggua

SEQ ID NO: 2360065 - RNA, 19 nt, Homo sapiens
  misc_RNA (1)...(19): siRNA sense strand
ggugaagaaacaagagagu

SEQ ID NO: 2360066 - RNA, 19 nt, Homo sapiens
  misc_RNA (1)...(19): siRNA sense strand
aggacgaggcuguggcuau

SEQ ID NO: 2360067 - RNA, 19 nt, Homo sapiens
  misc_RNA (1)...(19): siRNA sense strand
ggaagauggaggcgcugaa

SEQ ID NO: 2360068 - RNA, 19 nt, Homo sapiens
  misc_RNA (1)...(19): siRNA sense strand
ccaggaaagcuaagagucu

SEQ ID NO: 2360069 - RNA, 19 nt, Homo sapiens
  misc_RNA (1)...(19): siRNA sense strand
ccuauaagcaagacgacga

SEQ ID NO: 2360070 - RNA, 19 nt, Homo sapiens
  misc_RNA (1)...(19): siRNA sense strand
cagugugcguggagaagau

SEQ ID NO: 2360071 - RNA, 19 nt, Homo sapiens
  misc_RNA (1)...(19): siRNA sense strand
cgaggagggaggaagaaga

SEQ ID NO: 2360072 - RNA, 19 nt, Homo sapiens
  misc_RNA (1)...(19): siRNA sense strand
caacaggaguacaugacca

SEQ ID NO: 2360073 - RNA, 19 nt, Homo sapiens
  misc_RNA (1)...(19): siRNA sense strand
ucaccaagccagggagcua

SEQ ID NO: 2360074 - RNA, 19 nt, Homo sapiens
  misc_RNA (1)...(19): siRNA sense strand
cggacaucccaaagauuau

SEQ ID NO: 2360075 - RNA, 19 nt, Homo sapiens
  misc_RNA (1)...(19): siRNA sense strand
ggaagcaagcacagggugu

SEQ ID NO: 2360076 - RNA, 19 nt, Homo sapiens
  misc_RNA (1)...(19): siRNA sense strand
cucacaacguggagaagau

SEQ ID NO: 2360077 - RNA, 19 nt, Homo sapiens
  misc_RNA (1)...(19): siRNA sense strand
ugaacauggagcuggaaga

SEQ ID NO: 2360078 - RNA, 19 nt, Homo sapiens
  misc_RNA (1)...(19): siRNA sense strand
cguccagggcugugaacca

SEQ ID NO: 2360079 - RNA, 19 nt, Homo sapiens
  misc_RNA (1)...(19): siRNA sense strand
cugcaggacuacaaggguu

SEQ ID NO: 2360080 - RNA, 19 nt, Homo sapiens
  misc_RNA (1)...(19): siRNA sense strand
gcauccauccugaggugaa

SEQ ID NO: 2360081 - RNA, 19 nt, Homo sapiens
  misc_RNA (1)...(19): siRNA sense strand
ggucaagagcggaagcaag

SEQ ID NO: 2360082 - RNA, 19 nt, Homo sapiens
  misc_RNA (1)...(19): siRNA sense strand
cuucaggacuggacgucau

SEQ ID NO: 2360083 - RNA, 19 nt, Homo sapiens
  misc_RNA (1)...(19): siRNA sense strand
cccaagagcaccugaacca

SEQ ID NO: 2360084 - RNA, 19 nt, Homo sapiens
  misc_RNA (1)...(19): siRNA sense strand
auccugaggugaagaaaca

SEQ ID NO: 2360085 - RNA, 19 nt, Homo sapiens
  misc_RNA (1)...(19): siRNA sense strand
agaucacguuucagaccaa

SEQ ID NO: 2360086 - RNA, 19 nt, Homo sapiens
  misc_RNA (1)...(19): siRNA sense strand
gggaaggugcugagcuacu

SEQ ID NO: 2360087 - RNA, 19 nt, Homo sapiens
  misc_RNA (1)...(19): siRNA sense strand
cagcagaaggugaauggca

SEQ ID NO: 2360088 - RNA, 19 nt, Homo sapiens
  misc_RNA (1)...(19): siRNA sense strand
agcagaaggugaauggcau

SEQ ID NO: 2360089 - RNA, 19 nt, Homo sapiens
  misc_RNA (1)...(19): siRNA sense strand
guggagaagaugugugaag

SEQ ID NO: 2360090 - RNA, 19 nt, Homo sapiens
  misc_RNA (1)...(19): siRNA sense strand
ccaggaagauggaggcgcu

SEQ ID NO: 2360091 - RNA, 19 nt, Homo sapiens
  misc_RNA (1)...(19): siRNA sense strand
gugaauggcauccuggaga

SEQ ID NO: 2360092 - RNA, 19 nt, Homo sapiens
  misc_RNA (1)...(19): siRNA sense strand
gcuacaucuuugagcuguu

SEQ ID NO: 2360093 - RNA, 19 nt, Homo sapiens
  misc_RNA (1)...(19): siRNA sense strand
cugcaaagccagaggacuu

SEQ ID NO: 2360094 - RNA, 19 nt, Homo sapiens
  misc_RNA (1)...(19): siRNA sense strand
acaacaacguagaagaaaa

SEQ ID NO: 2360095 - RNA, 19 nt, Homo sapiens
  misc_RNA (1)...(19): siRNA sense strand
ccgggaagacccagagcaa

SEQ ID NO: 2360096 - RNA, 19 nt, Homo sapiens
  misc_RNA (1)...(19): siRNA sense strand
cuggagagcccuacgggua

SEQ ID NO: 2360097 - RNA, 19 nt, Homo sapiens
  misc_RNA (1)...(19): siRNA sense strand
ggugaagaaacaagagagu

SEQ ID NO: 2360098 - RNA, 19 nt, Homo sapiens
  misc_RNA (1)...(19): siRNA sense strand
aggacgaggcuguggcuau

SEQ ID NO: 2360099 - RNA, 19 nt, Homo sapiens
  misc_RNA (1)...(19): siRNA sense strand
ggaagauggaggcgcugaa

SEQ ID NO: 2360100 - RNA, 19 nt, Homo sapiens
  misc_RNA (1)...(19): siRNA sense strand
ccaggaaagcuaagagucu

SEQ ID NO: 2360101 - RNA, 19 nt, Homo sapiens
  misc_RNA (1)...(19): siRNA sense strand
ccuauaagcaagacgacga

SEQ ID NO: 2360102 - RNA, 19 nt, Homo sapiens
  misc_RNA (1)...(19): siRNA sense strand
cagugugcguggagaagau

SEQ ID NO: 2360103 - RNA, 19 nt, Homo sapiens
  misc_RNA (1)...(19): siRNA sense strand
cgaggagggaggaagaaga

SEQ ID NO: 2360104 - RNA, 19 nt, Homo sapiens
  misc_RNA (1)...(19): siRNA sense strand
caacaggaguacaugacca

SEQ ID NO: 2360105 - RNA, 19 nt, Homo sapiens
  misc_RNA (1)...(19): siRNA sense strand
ucaccaagccagggagcua

SEQ ID NO: 2360106 - RNA, 19 nt, Homo sapiens
  misc_RNA (1)...(19): siRNA sense strand
cggacaucccaaagauuau

SEQ ID NO: 2360107 - RNA, 19 nt, Homo sapiens
  misc_RNA (1)...(19): siRNA sense strand
ggaagcaagcacagggugu

SEQ ID NO: 2360108 - RNA, 19 nt, Homo sapiens
  misc_RNA (1)...(19): siRNA sense strand
cucacaacguggagaagau

SEQ ID NO: 2360109 - RNA, 19 nt, Homo sapiens
  misc_RNA (1)...(19): siRNA sense strand
ugaacauggagcuggaaga

SEQ ID NO: 2360110 - RNA, 19 nt, Homo sapiens
  misc_RNA (1)...(19): siRNA sense strand
cguccagggcugugaacca

SEQ ID NO: 2360111 - RNA, 19 nt, Homo sapiens
  misc_RNA (1)...(19): siRNA sense strand
cugcaggacuacaaggguu

SEQ ID NO: 2360112 - RNA, 19 nt, Homo sapiens
  misc_RNA (1)...(19): siRNA sense strand
gcauccauccugaggugaa

SEQ ID NO: 2360113 - RNA, 19 nt, Homo sapiens
  misc_RNA (1)...(19): siRNA sense strand
ggucaagagcggaagcaag

SEQ ID NO: 2360114 - RNA, 19 nt, Homo sapiens
  misc_RNA (1)...(19): siRNA sense strand
cuucaggacuggacgucau

SEQ ID NO: 2360115 - RNA, 19 nt, Homo sapiens
  misc_RNA (1)...(19): siRNA sense strand
cccaagagcaccugaacca

SEQ ID NO: 2360116 - RNA, 19 nt, Homo sapiens
  misc_RNA (1)...(19): siRNA sense strand
auccugaggugaagaaaca

SEQ ID NO: 2360117 - RNA, 19 nt, Homo sapiens
  misc_RNA (1)...(19): siRNA sense strand
agaucacguuucagaccaa

SEQ ID NO: 2360118 - RNA, 19 nt, Homo sapiens
  misc_RNA (1)...(19): siRNA sense strand
gggaaggugcugagcuacu

SEQ ID NO: 2360119 - RNA, 19 nt, Homo sapiens
  misc_RNA (1)...(19): siRNA sense strand
cagcagaaggugaauggca

SEQ ID NO: 2360120 - RNA, 19 nt, Homo sapiens
  misc_RNA (1)...(19): siRNA sense strand
agcagaaggugaauggcau

SEQ ID NO: 2360121 - RNA, 19 nt, Homo sapiens
  misc_RNA (1)...(19): siRNA sense strand
guggagaagaugugugaag

SEQ ID NO: 2360122 - RNA, 19 nt, Homo sapiens
  misc_RNA (1)...(19): siRNA sense strand
ccaggaagauggaggcgcu

SEQ ID NO: 2360123 - RNA, 19 nt, Homo sapiens
  misc_RNA (1)...(19): siRNA sense strand
gugaauggcauccuggaga

SEQ ID NO: 2360124 - RNA, 19 nt, Homo sapiens
  misc_RNA (1)...(19): siRNA sense strand
gcuacaucuuugagcuguu

SEQ ID NO: 2360125 - RNA, 19 nt, Homo sapiens
  misc_RNA (1)...(19): siRNA sense strand
gagaaaugggugccggaga

SEQ ID NO: 2360126 - RNA, 19 nt, Homo sapiens
  misc_RNA (1)...(19): siRNA sense strand
aagaaaagccagugccuga

SEQ ID NO: 2360127 - RNA, 19 nt, Homo sapiens
  misc_RNA (1)...(19): siRNA sense strand
cagccaaagaagucuaaaa

SEQ ID NO: 2360128 - RNA, 19 nt, Homo sapiens
  misc_RNA (1)...(19): siRNA sense strand
gagaagaugucaaaguccu

SEQ ID NO: 2360129 - RNA, 19 nt, Homo sapiens
  misc_RNA (1)...(19): siRNA sense strand
uggacaaaugcaaagaaaa

SEQ ID NO: 2360130 - RNA, 19 nt, Homo sapiens
  misc_RNA (1)...(19): siRNA sense strand
cagcuauuuaggacagaaa

SEQ ID NO: 2360131 - RNA, 19 nt, Homo sapiens
  misc_RNA (1)...(19): siRNA sense strand
gcuauuuaggacagaaaca

SEQ ID NO: 2360132 - RNA, 19 nt, Homo sapiens
  misc_RNA (1)...(19): siRNA sense strand
ggcuauaaucuaugaaacu

SEQ ID NO: 2360133 - RNA, 19 nt, Homo sapiens
  misc_RNA (1)...(19): siRNA sense strand
cuacauaugcauuaaggca

SEQ ID NO: 2360134 - RNA, 19 nt, Homo sapiens
  misc_RNA (1)...(19): siRNA sense strand
augaaguggaagaaagauu

SEQ ID NO: 2360135 - RNA, 19 nt, Homo sapiens
  misc_RNA (1)...(19): siRNA sense strand
caugcaaacuugugggaac

SEQ ID NO: 2360136 - RNA, 19 nt, Homo sapiens
  misc_RNA (1)...(19): siRNA sense strand
gcggauuggacuuaagcau

SEQ ID NO: 2360137 - RNA, 19 nt, Homo sapiens
  misc_RNA (1)...(19): siRNA sense strand
ucaaagaggagcaggcgca

SEQ ID NO: 2360138 - RNA, 19 nt, Homo sapiens
  misc_RNA (1)...(19): siRNA sense strand
gggagaucaaagaggagca

SEQ ID NO: 2360139 - RNA, 19 nt, Homo sapiens
  misc_RNA (1)...(19): siRNA sense strand
ccgcaggcgcauagagauc

SEQ ID NO: 2360140 - RNA, 19 nt, Homo sapiens
  misc_RNA (1)...(19): siRNA sense strand
ccaaacugcacaugagcca

SEQ ID NO: 2360141 - RNA, 19 nt, Homo sapiens
  misc_RNA (1)...(19): siRNA sense strand
cgcaggaugaaguggaaga

SEQ ID NO: 2360142 - RNA, 19 nt, Homo sapiens
  misc_RNA (1)...(19): siRNA sense strand
gcuaagagcaguggggaga

SEQ ID NO: 2360143 - RNA, 19 nt, Homo sapiens
  misc_RNA (1)...(19): siRNA sense strand
aggccaagauccaagauaa

SEQ ID NO: 2360144 - RNA, 19 nt, Homo sapiens
  misc_RNA (1)...(19): siRNA sense strand
ggccaagauccaagauaaa

SEQ ID NO: 2360145 - RNA, 19 nt, Homo sapiens
  misc_RNA (1)...(19): siRNA sense strand
ucgaaaaugugaaggccaa

SEQ ID NO: 2360146 - RNA, 19 nt, Homo sapiens
  misc_RNA (1)...(19): siRNA sense strand
ucgaaaaugugaaggccaa

SEQ ID NO: 2360147 - RNA, 19 nt, Homo sapiens
  misc_RNA (1)...(19): siRNA sense strand
ucgaaaaugugaaggccaa

SEQ ID NO: 2360148 - RNA, 19 nt, Homo sapiens
  misc_RNA (1)...(19): siRNA sense strand
ccaagauccaagauaaaga

SEQ ID NO: 2360149 - RNA, 19 nt, Homo sapiens
  misc_RNA (1)...(19): siRNA sense strand
gugaagacccugaccggca

SEQ ID NO: 2360150 - RNA, 19 nt, Homo sapiens
  misc_RNA (1)...(19): siRNA sense strand
gugaagacccugaccggca

SEQ ID NO: 2360151 - RNA, 19 nt, Homo sapiens
  misc_RNA (1)...(19): siRNA sense strand
gaaguggagcccagugaca

SEQ ID NO: 2360152 - RNA, 19 nt, Homo sapiens
  misc_RNA (1)...(19): siRNA sense strand
agaagaagcccgagaccga

SEQ ID NO: 2360153 - RNA, 19 nt, Homo sapiens
  misc_RNA (1)...(19): siRNA sense strand
ugaugggaaauuugagaaa

SEQ ID NO: 2360154 - RNA, 19 nt, Homo sapiens
  misc_RNA (1)...(19): siRNA sense strand
ccuucagacgaaagagauu

SEQ ID NO: 2360155 - RNA, 19 nt, Homo sapiens
  misc_RNA (1)...(19): siRNA sense strand
gggaagugccugaagacgu

SEQ ID NO: 2360156 - RNA, 19 nt, Homo sapiens
  misc_RNA (1)...(19): siRNA sense strand
ggauaugggaugugaaaac

SEQ ID NO: 2360157 - RNA, 19 nt, Homo sapiens
  misc_RNA (1)...(19): siRNA sense strand
gaggagaagaagcccgaga

SEQ ID NO: 2360158 - RNA, 19 nt, Homo sapiens
  misc_RNA (1)...(19): siRNA sense strand
agacgaaagagauuguaca

SEQ ID NO: 2360159 - RNA, 19 nt, Homo sapiens
  misc_RNA (1)...(19): siRNA sense strand
gggacuacagcaaggggaa

SEQ ID NO: 2360160 - RNA, 19 nt, Homo sapiens
  misc_RNA (1)...(19): siRNA sense strand
uggccacaagaaugagaaa

SEQ ID NO: 2360161 - RNA, 19 nt, Homo sapiens
  misc_RNA (1)...(19): siRNA sense strand
agauaugggacgugagcuc

SEQ ID NO: 2360162 - RNA, 19 nt, Homo sapiens
  misc_RNA (1)...(19): siRNA sense strand
agaagaagcccgagaccga

SEQ ID NO: 2360163 - RNA, 19 nt, Homo sapiens
  misc_RNA (1)...(19): siRNA sense strand
ugaugggaaauuugagaaa

SEQ ID NO: 2360164 - RNA, 19 nt, Homo sapiens
  misc_RNA (1)...(19): siRNA sense strand
ccuucagacgaaagagauu

SEQ ID NO: 2360165 - RNA, 19 nt, Homo sapiens
  misc_RNA (1)...(19): siRNA sense strand
gggaagugccugaagacgu

SEQ ID NO: 2360166 - RNA, 19 nt, Homo sapiens
  misc_RNA (1)...(19): siRNA sense strand
ggauaugggaugugaaaac

SEQ ID NO: 2360167 - RNA, 19 nt, Homo sapiens
  misc_RNA (1)...(19): siRNA sense strand
gaggagaagaagcccgaga

SEQ ID NO: 2360168 - RNA, 19 nt, Homo sapiens
  misc_RNA (1)...(19): siRNA sense strand
agacgaaagagauuguaca

SEQ ID NO: 2360169 - RNA, 19 nt, Homo sapiens
  misc_RNA (1)...(19): siRNA sense strand
gggacuacagcaaggggaa

SEQ ID NO: 2360170 - RNA, 19 nt, Homo sapiens
  misc_RNA (1)...(19): siRNA sense strand
uggccacaagaaugagaaa

SEQ ID NO: 2360171 - RNA, 19 nt, Homo sapiens
  misc_RNA (1)...(19): siRNA sense strand
agauaugggacgugagcuc

SEQ ID NO: 2360172 - RNA, 19 nt, Homo sapiens
  misc_RNA (1)...(19): siRNA sense strand
gagacagagcucagggaau

SEQ ID NO: 2360173 - RNA, 19 nt, Homo sapiens
  misc_RNA (1)...(19): siRNA sense strand
ggucuugacuggagcacga

SEQ ID NO: 2360174 - RNA, 19 nt, Homo sapiens
  misc_RNA (1)...(19): siRNA sense strand
gggcaggacuugaguggcu

SEQ ID NO: 2360175 - RNA, 19 nt, Homo sapiens
  misc_RNA (1)...(19): siRNA sense strand
ugucaaauuuaaagaccca

SEQ ID NO: 2360176 - RNA, 19 nt, Homo sapiens
  misc_RNA (1)...(19): siRNA sense strand
ggacgagggcagaaccaca

SEQ ID NO: 2360177 - RNA, 19 nt, Homo sapiens
  misc_RNA (1)...(19): siRNA sense strand
cgguggaauuccucacaau

SEQ ID NO: 2360178 - RNA, 19 nt, Homo sapiens
  misc_RNA (1)...(19): siRNA sense strand
acgaacaaucaguggacca

SEQ ID NO: 2360179 - RNA, 19 nt, Homo sapiens
  misc_RNA (1)...(19): siRNA sense strand
ccgaaggaaggauggcaga

SEQ ID NO: 2360180 - RNA, 19 nt, Homo sapiens
  misc_RNA (1)...(19): siRNA sense strand
agcgauaacaguaaaucaa

SEQ ID NO: 2360181 - RNA, 19 nt, Homo sapiens
  misc_RNA (1)...(19): siRNA sense strand
gucucgaggcuuuggguuu

SEQ ID NO: 2360182 - RNA, 19 nt, Homo sapiens
  misc_RNA (1)...(19): siRNA sense strand
agauauuugucgguggaau

SEQ ID NO: 2360183 - RNA, 19 nt, Homo sapiens
  misc_RNA (1)...(19): siRNA sense strand
gagacagagcucagggaau

SEQ ID NO: 2360184 - RNA, 19 nt, Homo sapiens
  misc_RNA (1)...(19): siRNA sense strand
ggucuugacuggagcacga

SEQ ID NO: 2360185 - RNA, 19 nt, Homo sapiens
  misc_RNA (1)...(19): siRNA sense strand
ugucaaauuuaaagaccca

SEQ ID NO: 2360186 - RNA, 19 nt, Homo sapiens
  misc_RNA (1)...(19): siRNA sense strand
cgguggaauuccucacaau

SEQ ID NO: 2360187 - RNA, 19 nt, Homo sapiens
  misc_RNA (1)...(19): siRNA sense strand
acgaacaaucaguggacca

SEQ ID NO: 2360188 - RNA, 19 nt, Homo sapiens
  misc_RNA (1)...(19): siRNA sense strand
ccgaaggaaggauggcaga

SEQ ID NO: 2360189 - RNA, 19 nt, Homo sapiens
  misc_RNA (1)...(19): siRNA sense strand
agcgauaacaguaaaucaa

SEQ ID NO: 2360190 - RNA, 19 nt, Homo sapiens
  misc_RNA (1)...(19): siRNA sense strand
gucucgaggcuuuggguuu

SEQ ID NO: 2360191 - RNA, 19 nt, Homo sapiens
  misc_RNA (1)...(19): siRNA sense strand
agauauuugucgguggaau

SEQ ID NO: 2360192 - RNA, 19 nt, Homo sapiens
  misc_RNA (1)...(19): siRNA sense strand
aggcagagaagaugggcua

SEQ ID NO: 2360193 - RNA, 19 nt, Homo sapiens
  misc_RNA (1)...(19): siRNA sense strand
ccaagaagcuagugcggca

SEQ ID NO: 2360194 - RNA, 19 nt, Homo sapiens
  misc_RNA (1)...(19): siRNA sense strand
cagaaauuguggaggcugu

SEQ ID NO: 2360195 - RNA, 19 nt, Homo sapiens
  misc_RNA (1)...(19): siRNA sense strand
ggcuaaagcaauagaccca

SEQ ID NO: 2360196 - RNA, 19 nt, Homo sapiens
  misc_RNA (1)...(19): siRNA sense strand
gaagauaucaaauggcuga

SEQ ID NO: 2360197 - RNA, 19 nt, Homo sapiens
  misc_RNA (1)...(19): siRNA sense strand
augugaaagucaucgacaa

SEQ ID NO: 2360198 - RNA, 19 nt, Homo sapiens
  misc_RNA (1)...(19): siRNA sense strand
augaagaaacuuuggcuga

SEQ ID NO: 2360199 - RNA, 19 nt, Homo sapiens
  misc_RNA (1)...(19): siRNA sense strand
aaacauggcuugaauggga

SEQ ID NO: 2360200 - RNA, 19 nt, Homo sapiens
  misc_RNA (1)...(19): siRNA sense strand
ccucgagauacuaaaggaa

SEQ ID NO: 2360201 - RNA, 19 nt, Homo sapiens
  misc_RNA (1)...(19): siRNA sense strand
uggaagggaagguggaagu

SEQ ID NO: 2360202 - RNA, 19 nt, Homo sapiens
  misc_RNA (1)...(19): siRNA sense strand
cugagaagacugacaucau

SEQ ID NO: 2360203 - RNA, 19 nt, Homo sapiens
  misc_RNA (1)...(19): siRNA sense strand
cgagauacuaaaggaagaa

SEQ ID NO: 2360204 - RNA, 19 nt, Homo sapiens
  misc_RNA (1)...(19): siRNA sense strand
ggaagcugguccugaggca

SEQ ID NO: 2360205 - RNA, 19 nt, Homo sapiens
  misc_RNA (1)...(19): siRNA sense strand
gauucaaacugccgccaca

SEQ ID NO: 2360206 - RNA, 19 nt, Homo sapiens
  misc_RNA (1)...(19): siRNA sense strand
caauugaagaaguggcgga

SEQ ID NO: 2360207 - RNA, 19 nt, Homo sapiens
  misc_RNA (1)...(19): siRNA sense strand
gucuggaugaugugcguaa

SEQ ID NO: 2360208 - RNA, 19 nt, Homo sapiens
  misc_RNA (1)...(19): siRNA sense strand
agacugacaucauugccaa

SEQ ID NO: 2360209 - RNA, 19 nt, Homo sapiens
  misc_RNA (1)...(19): siRNA sense strand
ggaugaugugcguaacaga

SEQ ID NO: 2360210 - RNA, 19 nt, Homo sapiens
  misc_RNA (1)...(19): siRNA sense strand
aagacauuggugaggaaaa

SEQ ID NO: 2360211 - RNA, 19 nt, Homo sapiens
  misc_RNA (1)...(19): siRNA sense strand
acaagaagaugaaggucca

SEQ ID NO: 2360212 - RNA, 19 nt, Homo sapiens
  misc_RNA (1)...(19): siRNA sense strand
agagaauggaucagaaaau

SEQ ID NO: 2360213 - RNA, 19 nt, Homo sapiens
  misc_RNA (1)...(19): siRNA sense strand
gucuggaguuuuagagaau

SEQ ID NO: 2360214 - RNA, 19 nt, Homo sapiens
  misc_RNA (1)...(19): siRNA sense strand
uggcagaggugguggcaga

SEQ ID NO: 2360215 - RNA, 19 nt, Homo sapiens
  misc_RNA (1)...(19): siRNA sense strand
aggccgaggaggaggaaga

SEQ ID NO: 2360216 - RNA, 19 nt, Homo sapiens
  misc_RNA (1)...(19): siRNA sense strand
uuucagagggagaggacau

SEQ ID NO: 2360217 - RNA, 19 nt, Homo sapiens
  misc_RNA (1)...(19): siRNA sense strand
aggaggaggaagaggagga

SEQ ID NO: 2360218 - RNA, 19 nt, Homo sapiens
  misc_RNA (1)...(19): siRNA sense strand
uggaugaaauauuuggaca

SEQ ID NO: 2360219 - RNA, 19 nt, Homo sapiens
  misc_RNA (1)...(19): siRNA sense strand
uuggaaaaguggaugaaau

SEQ ID NO: 2360220 - RNA, 19 nt, Homo sapiens
  misc_RNA (1)...(19): siRNA sense strand
aagaggaggagguggcaga

SEQ ID NO: 2360221 - RNA, 19 nt, Homo sapiens
  misc_RNA (1)...(19): siRNA sense strand
uggcagaggcggugguuuu

SEQ ID NO: 2360222 - RNA, 19 nt, Homo sapiens
  misc_RNA (1)...(19): siRNA sense strand
guguagucuuauuaggaga

SEQ ID NO: 2360223 - RNA, 19 nt, Homo sapiens
  misc_RNA (1)...(19): siRNA sense strand
uggaagaggagguggaggu

SEQ ID NO: 2360224 - RNA, 19 nt, Homo sapiens
  misc_RNA (1)...(19): siRNA sense strand
cauauaagcugcugccacu

SEQ ID NO: 2360225 - RNA, 19 nt, Homo sapiens
  misc_RNA (1)...(19): siRNA sense strand
ccgaggaggaggaagagga

SEQ ID NO: 2360226 - RNA, 19 nt, Homo sapiens
  misc_RNA (1)...(19): siRNA sense strand
gguggugguuucagaggga

SEQ ID NO: 2360227 - RNA, 19 nt, Homo sapiens
  misc_RNA (1)...(19): siRNA sense strand
ucagaaaacaugaaggcuu

SEQ ID NO: 2360228 - RNA, 19 nt, Homo sapiens
  misc_RNA (1)...(19): siRNA sense strand
uggcagaggugguggcaga

SEQ ID NO: 2360229 - RNA, 19 nt, Homo sapiens
  misc_RNA (1)...(19): siRNA sense strand
aggccgaggaggaggaaga

SEQ ID NO: 2360230 - RNA, 19 nt, Homo sapiens
  misc_RNA (1)...(19): siRNA sense strand
uuucagagggagaggacau

SEQ ID NO: 2360231 - RNA, 19 nt, Homo sapiens
  misc_RNA (1)...(19): siRNA sense strand
aggaggaggaagaggagga

SEQ ID NO: 2360232 - RNA, 19 nt, Homo sapiens
  misc_RNA (1)...(19): siRNA sense strand
uggaugaaauauuuggaca

SEQ ID NO: 2360233 - RNA, 19 nt, Homo sapiens
  misc_RNA (1)...(19): siRNA sense strand
uuggaaaaguggaugaaau

SEQ ID NO: 2360234 - RNA, 19 nt, Homo sapiens
  misc_RNA (1)...(19): siRNA sense strand
aagaggaggagguggcaga

SEQ ID NO: 2360235 - RNA, 19 nt, Homo sapiens
  misc_RNA (1)...(19): siRNA sense strand
uggcagaggcggugguuuu

SEQ ID NO: 2360236 - RNA, 19 nt, Homo sapiens
  misc_RNA (1)...(19): siRNA sense strand
guguagucuuauuaggaga

SEQ ID NO: 2360237 - RNA, 19 nt, Homo sapiens
  misc_RNA (1)...(19): siRNA sense strand
uggaagaggagguggaggu

SEQ ID NO: 2360238 - RNA, 19 nt, Homo sapiens
  misc_RNA (1)...(19): siRNA sense strand
cauauaagcugcugccacu

SEQ ID NO: 2360239 - RNA, 19 nt, Homo sapiens
  misc_RNA (1)...(19): siRNA sense strand
ccgaggaggaggaagagga

SEQ ID NO: 2360240 - RNA, 19 nt, Homo sapiens
  misc_RNA (1)...(19): siRNA sense strand
gguggugguuucagaggga

SEQ ID NO: 2360241 - RNA, 19 nt, Homo sapiens
  misc_RNA (1)...(19): siRNA sense strand
ucagaaaacaugaaggcuu

SEQ ID NO: 2360242 - RNA, 19 nt, Homo sapiens
  misc_RNA (1)...(19): siRNA sense strand
ccuuauaaauggagugcau

SEQ ID NO: 2360243 - RNA, 19 nt, Homo sapiens
  misc_RNA (1)...(19): siRNA sense strand
cugaaacggccgagcacaa

SEQ ID NO: 2360244 - RNA, 19 nt, Homo sapiens
  misc_RNA (1)...(19): siRNA sense strand
acucaaggaauuugccaua

SEQ ID NO: 2360245 - RNA, 19 nt, Homo sapiens
  misc_RNA (1)...(19): siRNA sense strand
ggacuaaauuucuggagcu

SEQ ID NO: 2360246 - RNA, 19 nt, Homo sapiens
  misc_RNA (1)...(19): siRNA sense strand
gcuacgaggcggacaccaa

SEQ ID NO: 2360247 - RNA, 19 nt, Homo sapiens
  misc_RNA (1)...(19): siRNA sense strand
ggucuggacaagcgaggaa

SEQ ID NO: 2360248 - RNA, 19 nt, Homo sapiens
  misc_RNA (1)...(19): siRNA sense strand
aggccaugcugaaggacuu

SEQ ID NO: 2360249 - RNA, 19 nt, Homo sapiens
  misc_RNA (1)...(19): siRNA sense strand
ccgaggaagaggacgugaa

SEQ ID NO: 2360250 - RNA, 19 nt, Homo sapiens
  misc_RNA (1)...(19): siRNA sense strand
acauggagaaggaggcuau

SEQ ID NO: 2360251 - RNA, 19 nt, Homo sapiens
  misc_RNA (1)...(19): siRNA sense strand
ccgacaugcugcagaccau

SEQ ID NO: 2360252 - RNA, 19 nt, Homo sapiens
  misc_RNA (1)...(19): siRNA sense strand
aagauguauucgccggaaa

SEQ ID NO: 2360253 - RNA, 19 nt, Homo sapiens
  misc_RNA (1)...(19): siRNA sense strand
cuucagagcuggagugcag

SEQ ID NO: 2360254 - RNA, 19 nt, Homo sapiens
  misc_RNA (1)...(19): siRNA sense strand
aggaagaggacgugaagac

SEQ ID NO: 2360255 - RNA, 19 nt, Homo sapiens
  misc_RNA (1)...(19): siRNA sense strand
ggaaguuucuuuaagcuca

SEQ ID NO: 2360256 - RNA, 19 nt, Homo sapiens
  misc_RNA (1)...(19): siRNA sense strand
uggcacaaacggagaacca

SEQ ID NO: 2360257 - RNA, 19 nt, Homo sapiens
  misc_RNA (1)...(19): siRNA sense strand
uagauguggugcuggaaaa

SEQ ID NO: 2360258 - RNA, 19 nt, Homo sapiens
  misc_RNA (1)...(19): siRNA sense strand
cggcuggccaggacugaaa

SEQ ID NO: 2360259 - RNA, 19 nt, Homo sapiens
  misc_RNA (1)...(19): siRNA sense strand
aaauagauguggugcugga

SEQ ID NO: 2360260 - RNA, 19 nt, Homo sapiens
  misc_RNA (1)...(19): siRNA sense strand
uugcauuucaggaggucaa

SEQ ID NO: 2360261 - RNA, 19 nt, Homo sapiens
  misc_RNA (1)...(19): siRNA sense strand
ucacauggccgauggcuca

SEQ ID NO: 2360262 - RNA, 19 nt, Homo sapiens
  misc_RNA (1)...(19): siRNA sense strand
gcucauggaagcaacucaa

SEQ ID NO: 2360263 - RNA, 19 nt, Homo sapiens
  misc_RNA (1)...(19): siRNA sense strand
ggaaagugaccaagagacc

SEQ ID NO: 2360264 - RNA, 19 nt, Homo sapiens
  misc_RNA (1)...(19): siRNA sense strand
uggagaaaaucaaagucaa

SEQ ID NO: 2360265 - RNA, 19 nt, Homo sapiens
  misc_RNA (1)...(19): siRNA sense strand
agaauuuccaagaagaaca

SEQ ID NO: 2360266 - RNA, 19 nt, Homo sapiens
  misc_RNA (1)...(19): siRNA sense strand
ccagagacacccugaggca

SEQ ID NO: 2360267 - RNA, 19 nt, Homo sapiens
  misc_RNA (1)...(19): siRNA sense strand
gagaacugaaacaggagau

SEQ ID NO: 2360268 - RNA, 19 nt, Homo sapiens
  misc_RNA (1)...(19): siRNA sense strand
acacaauugccucggagau

SEQ ID NO: 2360269 - RNA, 19 nt, Homo sapiens
  misc_RNA (1)...(19): siRNA sense strand
gagaacaacucagggagga

SEQ ID NO: 2360270 - RNA, 19 nt, Homo sapiens
  misc_RNA (1)...(19): siRNA sense strand
aggagaacaaggagugcca

SEQ ID NO: 2360271 - RNA, 19 nt, Homo sapiens
  misc_RNA (1)...(19): siRNA sense strand
gccauaaaggaaagcacau

SEQ ID NO: 2360272 - RNA, 19 nt, Homo sapiens
  misc_RNA (1)...(19): siRNA sense strand
cagucaaccauaacaaaca

SEQ ID NO: 2360273 - RNA, 19 nt, Homo sapiens
  misc_RNA (1)...(19): siRNA sense strand
agaagaacaagcagcgcga

SEQ ID NO: 2360274 - RNA, 19 nt, Homo sapiens
  misc_RNA (1)...(19): siRNA sense strand
cuacaaacgcaucaagaac

SEQ ID NO: 2360275 - RNA, 19 nt, Homo sapiens
  misc_RNA (1)...(19): siRNA sense strand
ggauagagaauaaaggaga

SEQ ID NO: 2360276 - RNA, 19 nt, Homo sapiens
  misc_RNA (1)...(19): siRNA sense strand
cagaaauggaacugaaaga

SEQ ID NO: 2360277 - RNA, 19 nt, Homo sapiens
  misc_RNA (1)...(19): siRNA sense strand
gaguauaacaugagcggga

SEQ ID NO: 2360278 - RNA, 19 nt, Homo sapiens
  misc_RNA (1)...(19): siRNA sense strand
cggagaagacaucuggaaa

SEQ ID NO: 2360279 - RNA, 19 nt, Homo sapiens
  misc_RNA (1)...(19): siRNA sense strand
ggacaagaguaucugguca

SEQ ID NO: 2360280 - RNA, 19 nt, Homo sapiens
  misc_RNA (1)...(19): siRNA sense strand
cuggaaagacagugacaau

SEQ ID NO: 2360281 - RNA, 19 nt, Homo sapiens
  misc_RNA (1)...(19): siRNA sense strand
ccagauagacuuagaaaau

SEQ ID NO: 2360282 - RNA, 19 nt, Homo sapiens
  misc_RNA (1)...(19): siRNA sense strand
ugucaaauuacaaggagaa

SEQ ID NO: 2360283 - RNA, 19 nt, Homo sapiens
  misc_RNA (1)...(19): siRNA sense strand
guuucaaggacaagaguau

SEQ ID NO: 2360284 - RNA, 19 nt, Homo sapiens
  misc_RNA (1)...(19): siRNA sense strand
aaaggaaggaagaaguaaa

SEQ ID NO: 2360285 - RNA, 19 nt, Homo sapiens
  misc_RNA (1)...(19): siRNA sense strand
gagacuggguggaggcuga

SEQ ID NO: 2360286 - RNA, 19 nt, Homo sapiens
  misc_RNA (1)...(19): siRNA sense strand
ccacaggaccagagaagca

SEQ ID NO: 2360287 - RNA, 19 nt, Homo sapiens
  misc_RNA (1)...(19): siRNA sense strand
agagaauaaaggagacauu

SEQ ID NO: 2360288 - RNA, 19 nt, Homo sapiens
  misc_RNA (1)...(19): siRNA sense strand
acauauaauaggaccacaa

SEQ ID NO: 2360289 - RNA, 19 nt, Homo sapiens
  misc_RNA (1)...(19): siRNA sense strand
cgauuuugcugaagaacaa

SEQ ID NO: 2360290 - RNA, 19 nt, Homo sapiens
  misc_RNA (1)...(19): siRNA sense strand
cagcagaaaccaugggagu

SEQ ID NO: 2360291 - RNA, 19 nt, Homo sapiens
  misc_RNA (1)...(19): siRNA sense strand
ugacaauaauagaggcugu

SEQ ID NO: 2360292 - RNA, 19 nt, Homo sapiens
  misc_RNA (1)...(19): siRNA sense strand
cuccacaagugacgggaaa

SEQ ID NO: 2360293 - RNA, 19 nt, Homo sapiens
  misc_RNA (1)...(19): siRNA sense strand
ucugaauguuggacaggaa

SEQ ID NO: 2360294 - RNA, 19 nt, Homo sapiens
  misc_RNA (1)...(19): siRNA sense strand
cugaagaacaaaggugaua

SEQ ID NO: 2360295 - RNA, 19 nt, Homo sapiens
  misc_RNA (1)...(19): siRNA sense strand
augcagaaauggaacugaa

SEQ ID NO: 2360296 - RNA, 19 nt, Homo sapiens
  misc_RNA (1)...(19): siRNA sense strand
cauuaaauagccacacaaa

SEQ ID NO: 2360297 - RNA, 19 nt, Homo sapiens
  misc_RNA (1)...(19): siRNA sense strand
uggaacugaaagaguauaa

SEQ ID NO: 2360298 - RNA, 19 nt, Homo sapiens
  misc_RNA (1)...(19): siRNA sense strand
ugcugauagugcugggaaa

SEQ ID NO: 2360299 - RNA, 19 nt, Homo sapiens
  misc_RNA (1)...(19): siRNA sense strand
ccuaaaggaaggaagaagu

SEQ ID NO: 2360300 - RNA, 19 nt, Homo sapiens
  misc_RNA (1)...(19): siRNA sense strand
agagcaguuuggugaacaa

SEQ ID NO: 2360301 - RNA, 19 nt, Homo sapiens
  misc_RNA (1)...(19): siRNA sense strand
ccacaagugacgggaaauu

SEQ ID NO: 2360302 - RNA, 19 nt, Homo sapiens
  misc_RNA (1)...(19): siRNA sense strand
agaggaguuucaaggacaa

SEQ ID NO: 2360303 - RNA, 19 nt, Homo sapiens
  misc_RNA (1)...(19): siRNA sense strand
cgauuggguagaugaaauu

SEQ ID NO: 2360304 - RNA, 19 nt, Homo sapiens
  misc_RNA (1)...(19): siRNA sense strand
gaucaguagaggaguuuca

SEQ ID NO: 2360305 - RNA, 19 nt, Homo sapiens
  misc_RNA (1)...(19): siRNA sense strand
gcagagacggagaagacau

SEQ ID NO: 2360306 - RNA, 19 nt, Homo sapiens
  misc_RNA (1)...(19): siRNA sense strand
gcacagaaaaggaacucaa

SEQ ID NO: 2360307 - RNA, 19 nt, Homo sapiens
  misc_RNA (1)...(19): siRNA sense strand
gacugagauucaugaagaa

SEQ ID NO: 2360308 - RNA, 19 nt, Homo sapiens
  misc_RNA (1)...(19): siRNA sense strand
uuaccaaauaggagugaga

SEQ ID NO: 2360309 - RNA, 19 nt, Homo sapiens
  misc_RNA (1)...(19): siRNA sense strand
ugauugcaguuguggaaga

SEQ ID NO: 2360310 - RNA, 19 nt, Homo sapiens
  misc_RNA (1)...(19): siRNA sense strand
gggcgauaccuugaaguaa

SEQ ID NO: 2360311 - RNA, 19 nt, Homo sapiens
  misc_RNA (1)...(19): siRNA sense strand
ucucuacgcaggugauaaa

SEQ ID NO: 2360312 - RNA, 19 nt, Homo sapiens
  misc_RNA (1)...(19): siRNA sense strand
ccugcagguucgaggagau

SEQ ID NO: 2360313 - RNA, 19 nt, Homo sapiens
  misc_RNA (1)...(19): siRNA sense strand
ucagaauucuuuugcguaa

SEQ ID NO: 2360314 - RNA, 19 nt, Homo sapiens
  misc_RNA (1)...(19): siRNA sense strand
uagaggaguuucaaggaca

SEQ ID NO: 2360315 - RNA, 19 nt, Homo sapiens
  misc_RNA (1)...(19): siRNA sense strand
ggguguuagaggaaagcau

SEQ ID NO: 2360316 - RNA, 19 nt, Homo sapiens
  misc_RNA (1)...(19): siRNA sense strand
ugaaacugccagaugggua

SEQ ID NO: 2360317 - RNA, 19 nt, Homo sapiens
  misc_RNA (1)...(19): siRNA sense strand
agaacaaaggugauauuga

SEQ ID NO: 2360318 - RNA, 19 nt, Homo sapiens
  misc_RNA (1)...(19): siRNA sense strand
ggugaucuggauagagaau

SEQ ID NO: 2360319 - RNA, 19 nt, Homo sapiens
  misc_RNA (1)...(19): siRNA sense strand
gccauuacuugcagagcuu

SEQ ID NO: 2360320 - RNA, 19 nt, Homo sapiens
  misc_RNA (1)...(19): siRNA sense strand
agugauugcaguuguggaa

SEQ ID NO: 2360321 - RNA, 19 nt, Homo sapiens
  misc_RNA (1)...(19): siRNA sense strand
gcugaagaacaaaggugau

SEQ ID NO: 2360322 - RNA, 19 nt, Homo sapiens
  misc_RNA (1)...(19): siRNA sense strand
augucaaauuacaaggaga

SEQ ID NO: 2360323 - RNA, 19 nt, Homo sapiens
  misc_RNA (1)...(19): siRNA sense strand
gaucaucuuaagaaggaau

SEQ ID NO: 2360324 - RNA, 19 nt, Homo sapiens
  misc_RNA (1)...(19): siRNA sense strand
gcuacgugacugagauuca

SEQ ID NO: 2360325 - RNA, 19 nt, Homo sapiens
  misc_RNA (1)...(19): siRNA sense strand
gauucaugaagaagaugua

SEQ ID NO: 2360326 - RNA, 19 nt, Homo sapiens
  misc_RNA (1)...(19): siRNA sense strand
uugcaguuguggaagaaaa

SEQ ID NO: 2360327 - RNA, 19 nt, Homo sapiens
  misc_RNA (1)...(19): siRNA sense strand
ccaucgaauacaucagcua

SEQ ID NO: 2360328 - RNA, 19 nt, Homo sapiens
  misc_RNA (1)...(19): siRNA sense strand
agagaugagcgauugggua

SEQ ID NO: 2360329 - RNA, 19 nt, Homo sapiens
  misc_RNA (1)...(19): siRNA sense strand
gagcgauuggguagaugaa

SEQ ID NO: 2360330 - RNA, 19 nt, Homo sapiens
  misc_RNA (1)...(19): siRNA sense strand
aagcaagaaagauggaguu

SEQ ID NO: 2360331 - RNA, 19 nt, Homo sapiens
  misc_RNA (1)...(19): siRNA sense strand
cgucaaaccguauugcaga

SEQ ID NO: 2360332 - RNA, 19 nt, Homo sapiens
  misc_RNA (1)...(19): siRNA sense strand
ggugaacaacagaggaauc

SEQ ID NO: 2360333 - RNA, 19 nt, Homo sapiens
  misc_RNA (1)...(19): siRNA sense strand
uagaaaauguguggaacaa

SEQ ID NO: 2360334 - RNA, 19 nt, Homo sapiens
  misc_RNA (1)...(19): siRNA sense strand
ugaugguacaggaagggaa

SEQ ID NO: 2360335 - RNA, 19 nt, Homo sapiens
  misc_RNA (1)...(19): siRNA sense strand
aggaagggaacguggaaag

SEQ ID NO: 2360336 - RNA, 19 nt, Homo sapiens
  misc_RNA (1)...(19): siRNA sense strand
ugaugguacaggaagggaa

SEQ ID NO: 2360337 - RNA, 19 nt, Homo sapiens
  misc_RNA (1)...(19): siRNA sense strand
aggaagggaacguggaaag

SEQ ID NO: 2360338 - RNA, 19 nt, Homo sapiens
  misc_RNA (1)...(19): siRNA sense strand
cugugaagaucuggagcaa

SEQ ID NO: 2360339 - RNA, 19 nt, Homo sapiens
  misc_RNA (1)...(19): siRNA sense strand
gggagcaguucuaccgcua

SEQ ID NO: 2360340 - RNA, 19 nt, Homo sapiens
  misc_RNA (1)...(19): siRNA sense strand
ggcacgaggauguggucaa

SEQ ID NO: 2360341 - RNA, 19 nt, Homo sapiens
  misc_RNA (1)...(19): siRNA sense strand
ucauagacauacacggaca

SEQ ID NO: 2360342 - RNA, 19 nt, Homo sapiens
  misc_RNA (1)...(19): siRNA sense strand
ggaacaagcccuaugacgu

SEQ ID NO: 2360343 - RNA, 19 nt, Homo sapiens
  misc_RNA (1)...(19): siRNA sense strand
cccuacaacuggagcuaca

SEQ ID NO: 2360344 - RNA, 19 nt, Homo sapiens
  misc_RNA (1)...(19): siRNA sense strand
guguuuggcuguuggcuca

SEQ ID NO: 2360345 - RNA, 19 nt, Homo sapiens
  misc_RNA (1)...(19): siRNA sense strand
cgucauagacauacacgga

SEQ ID NO: 2360346 - RNA, 19 nt, Homo sapiens
  misc_RNA (1)...(19): siRNA sense strand
caccaaucgcggaggagau

SEQ ID NO: 2360347 - RNA, 19 nt, Homo sapiens
  misc_RNA (1)...(19): siRNA sense strand
gugaagaucuggagcaacg

SEQ ID NO: 2360348 - RNA, 19 nt, Homo sapiens
  misc_RNA (1)...(19): siRNA sense strand
cugugaagaucuggagcaa

SEQ ID NO: 2360349 - RNA, 19 nt, Homo sapiens
  misc_RNA (1)...(19): siRNA sense strand
gggagcaguucuaccgcua

SEQ ID NO: 2360350 - RNA, 19 nt, Homo sapiens
  misc_RNA (1)...(19): siRNA sense strand
ggaacaagcccuaugacgu

SEQ ID NO: 2360351 - RNA, 19 nt, Homo sapiens
  misc_RNA (1)...(19): siRNA sense strand
cccuacaacuggagcuaca

SEQ ID NO: 2360352 - RNA, 19 nt, Homo sapiens
  misc_RNA (1)...(19): siRNA sense strand
guguuuggcuguuggcuca

SEQ ID NO: 2360353 - RNA, 19 nt, Homo sapiens
  misc_RNA (1)...(19): siRNA sense strand
gugaagaucuggagcaacg

SEQ ID NO: 2360354 - RNA, 19 nt, Homo sapiens
  misc_RNA (1)...(19): siRNA sense strand
cugugaagaucuggagcaa

SEQ ID NO: 2360355 - RNA, 19 nt, Homo sapiens
  misc_RNA (1)...(19): siRNA sense strand
gggagcaguucuaccgcua

SEQ ID NO: 2360356 - RNA, 19 nt, Homo sapiens
  misc_RNA (1)...(19): siRNA sense strand
cccuacaacuggagcuaca

SEQ ID NO: 2360357 - RNA, 19 nt, Homo sapiens
  misc_RNA (1)...(19): siRNA sense strand
gugaagaucuggagcaacg

SEQ ID NO: 2360358 - RNA, 19 nt, Homo sapiens
  misc_RNA (1)...(19): siRNA sense strand
aagaaguaguggauggcaa

SEQ ID NO: 2360359 - RNA, 19 nt, Homo sapiens
  misc_RNA (1)...(19): siRNA sense strand
guuuguuggcaaugagaaa

SEQ ID NO: 2360360 - RNA, 19 nt, Homo sapiens
  misc_RNA (1)...(19): siRNA sense strand
uggaaggagaagacguaaa

SEQ ID NO: 2360361 - RNA, 19 nt, Homo sapiens
  misc_RNA (1)...(19): siRNA sense strand
ggaggaagucgauggccua

SEQ ID NO: 2360362 - RNA, 19 nt, Homo sapiens
  misc_RNA (1)...(19): siRNA sense strand
aagucaaagagguggaaga

SEQ ID NO: 2360363 - RNA, 19 nt, Homo sapiens
  misc_RNA (1)...(19): siRNA sense strand
acauggaacgccagaacaa

SEQ ID NO: 2360364 - RNA, 19 nt, Homo sapiens
  misc_RNA (1)...(19): siRNA sense strand
agugcauauuacagacaaa

SEQ ID NO: 2360365 - RNA, 19 nt, Homo sapiens
  misc_RNA (1)...(19): siRNA sense strand
augaaaugaggcagaagua

SEQ ID NO: 2360366 - RNA, 19 nt, Homo sapiens
  misc_RNA (1)...(19): siRNA sense strand
ugagacugagagaggaaua

SEQ ID NO: 2360367 - RNA, 19 nt, Homo sapiens
  misc_RNA (1)...(19): siRNA sense strand
agauagaacuccaguccca

SEQ ID NO: 2360368 - RNA, 19 nt, Homo sapiens
  misc_RNA (1)...(19): siRNA sense strand
augaaugaaaugaggcaga

SEQ ID NO: 2360369 - RNA, 19 nt, Homo sapiens
  misc_RNA (1)...(19): siRNA sense strand
agaaaauggccaugcagaa

SEQ ID NO: 2360370 - RNA, 19 nt, Homo sapiens
  misc_RNA (1)...(19): siRNA sense strand
cucccagagccuugagaua

SEQ ID NO: 2360371 - RNA, 19 nt, Homo sapiens
  misc_RNA (1)...(19): siRNA sense strand
gcacccuggaagagagaga

SEQ ID NO: 2360372 - RNA, 19 nt, Homo sapiens
  misc_RNA (1)...(19): siRNA sense strand
agucaaagagguggaagaa

SEQ ID NO: 2360373 - RNA, 19 nt, Homo sapiens
  misc_RNA (1)...(19): siRNA sense strand
uaugagacugagagaggaa

SEQ ID NO: 2360374 - RNA, 19 nt, Homo sapiens
  misc_RNA (1)...(19): siRNA sense strand
ggaguaacauggaacgcca

SEQ ID NO: 2360375 - RNA, 19 nt, Homo sapiens
  misc_RNA (1)...(19): siRNA sense strand
aagucauggcccagaagaa

SEQ ID NO: 2360376 - RNA, 19 nt, Homo sapiens
  misc_RNA (1)...(19): siRNA sense strand
aguuaagcacccuggaaga

SEQ ID NO: 2360377 - RNA, 19 nt, Homo sapiens
  misc_RNA (1)...(19): siRNA sense strand
auaaagaaaaccaggaaga

SEQ ID NO: 2360378 - RNA, 19 nt, Homo sapiens
  misc_RNA (1)...(19): siRNA sense strand
cugcaaauugauaaugcua

SEQ ID NO: 2360379 - RNA, 19 nt, Homo sapiens
  misc_RNA (1)...(19): siRNA sense strand
aggcagaaguaugaaguca

SEQ ID NO: 2360380 - RNA, 19 nt, Homo sapiens
  misc_RNA (1)...(19): siRNA sense strand
gaauaaagaccuagcucuc

SEQ ID NO: 2360381 - RNA, 19 nt, Homo sapiens
  misc_RNA (1)...(19): siRNA sense strand
augcagauucggaguaaca

SEQ ID NO: 2360382 - RNA, 19 nt, Homo sapiens
  misc_RNA (1)...(19): siRNA sense strand
cagacaaauugaagagcug

SEQ ID NO: 2360383 - RNA, 19 nt, Homo sapiens
  misc_RNA (1)...(19): siRNA sense strand
gggaccuguuuguuggcaa

SEQ ID NO: 2360384 - RNA, 19 nt, Homo sapiens
  misc_RNA (1)...(19): siRNA sense strand
agaacaacgaauaccauau

SEQ ID NO: 2360385 - RNA, 19 nt, Homo sapiens
  misc_RNA (1)...(19): siRNA sense strand
uacacaagcaucugggcaa

SEQ ID NO: 2360386 - RNA, 19 nt, Homo sapiens
  misc_RNA (1)...(19): siRNA sense strand
acccuggaagagagagaua

SEQ ID NO: 2360387 - RNA, 19 nt, Homo sapiens
  misc_RNA (1)...(19): siRNA sense strand
caaagagguggaagaaaau

SEQ ID NO: 2360388 - RNA, 19 nt, Homo sapiens
  misc_RNA (1)...(19): siRNA sense strand
cgugcaagaaguaguggau

SEQ ID NO: 2360389 - RNA, 19 nt, Homo sapiens
  misc_RNA (1)...(19): siRNA sense strand
auuaaaaggaacugagguu

SEQ ID NO: 2360390 - RNA, 19 nt, Homo sapiens
  misc_RNA (1)...(19): siRNA sense strand
gucaaagagguggaagaaa

SEQ ID NO: 2360391 - RNA, 19 nt, Homo sapiens
  misc_RNA (1)...(19): siRNA sense strand
gcaaagaggccaauguuua

SEQ ID NO: 2360392 - RNA, 19 nt, Homo sapiens
  misc_RNA (1)...(19): siRNA sense strand
augccaugauugugaauaa

SEQ ID NO: 2360393 - RNA, 19 nt, Homo sapiens
  misc_RNA (1)...(19): siRNA sense strand
caucaaaccuggugaccca

SEQ ID NO: 2360394 - RNA, 19 nt, Homo sapiens
  misc_RNA (1)...(19): siRNA sense strand
augaggaggcagaggaaau

SEQ ID NO: 2360395 - RNA, 19 nt, Homo sapiens
  misc_RNA (1)...(19): siRNA sense strand
ggaagaggguuguucgaca

SEQ ID NO: 2360396 - RNA, 19 nt, Homo sapiens
  misc_RNA (1)...(19): siRNA sense strand
gaauaaggccucuugggaa

SEQ ID NO: 2360397 - RNA, 19 nt, Homo sapiens
  misc_RNA (1)...(19): siRNA sense strand
ggcuagaacuggaagcaga

SEQ ID NO: 2360398 - RNA, 19 nt, Homo sapiens
  misc_RNA (1)...(19): siRNA sense strand
uuuaagguguugagagaga

SEQ ID NO: 2360399 - RNA, 19 nt, Homo sapiens
  misc_RNA (1)...(19): siRNA sense strand
gggaaaguuuugugaugua

SEQ ID NO: 2360400 - RNA, 19 nt, Homo sapiens
  misc_RNA (1)...(19): siRNA sense strand
ggauaaggaucuugcucca

SEQ ID NO: 2360401 - RNA, 19 nt, Homo sapiens
  misc_RNA (1)...(19): siRNA sense strand
agaacuuagcauugggcaa

SEQ ID NO: 2360402 - RNA, 19 nt, Homo sapiens
  misc_RNA (1)...(19): siRNA sense strand
gauaagaccaaaauggaaa

SEQ ID NO: 2360403 - RNA, 19 nt, Homo sapiens
  misc_RNA (1)...(19): siRNA sense strand
uguuaaaggcugcuggcua

SEQ ID NO: 2360404 - RNA, 19 nt, Homo sapiens
  misc_RNA (1)...(19): siRNA sense strand
caucaaaggaaaagaggau

SEQ ID NO: 2360405 - RNA, 19 nt, Homo sapiens
  misc_RNA (1)...(19): siRNA sense strand
aguuagaugacgauggauu

SEQ ID NO: 2360406 - RNA, 19 nt, Homo sapiens
  misc_RNA (1)...(19): siRNA sense strand
ggaaaauucaaguguguuu

SEQ ID NO: 2360407 - RNA, 19 nt, Homo sapiens
  misc_RNA (1)...(19): siRNA sense strand
ccaugaggaggcagaggaa

SEQ ID NO: 2360408 - RNA, 19 nt, Homo sapiens
  misc_RNA (1)...(19): siRNA sense strand
caucaaagugugcaguaau

SEQ ID NO: 2360409 - RNA, 19 nt, Homo sapiens
  misc_RNA (1)...(19): siRNA sense strand
acaucaaagugugcaguaa

SEQ ID NO: 2360410 - RNA, 19 nt, Homo sapiens
  misc_RNA (1)...(19): siRNA sense strand
gcuaauuggaacuauggaa

SEQ ID NO: 2360411 - RNA, 19 nt, Homo sapiens
  misc_RNA (1)...(19): siRNA sense strand
ccuuagaauacuuugguga

SEQ ID NO: 2360412 - RNA, 19 nt, Homo sapiens
  misc_RNA (1)...(19): siRNA sense strand
ucgcuaucuuugaggauga

SEQ ID NO: 2360413 - RNA, 19 nt, Homo sapiens
  misc_RNA (1)...(19): siRNA sense strand
ccucagagucccuugguga

SEQ ID NO: 2360414 - RNA, 19 nt, Homo sapiens
  misc_RNA (1)...(19): siRNA sense strand
cugacaauuugaugaggau

SEQ ID NO: 2360415 - RNA, 19 nt, Homo sapiens
  misc_RNA (1)...(19): siRNA sense strand
gaacuauggaacagaucuu

SEQ ID NO: 2360416 - RNA, 19 nt, Homo sapiens
  misc_RNA (1)...(19): siRNA sense strand
ggaacgaggcuuugcccau

SEQ ID NO: 2360417 - RNA, 19 nt, Homo sapiens
  misc_RNA (1)...(19): siRNA sense strand
aagaagagcuaauuggaac

SEQ ID NO: 2360418 - RNA, 19 nt, Homo sapiens
  misc_RNA (1)...(19): siRNA sense strand
accaaugccagauggguaa

SEQ ID NO: 2360419 - RNA, 19 nt, Homo sapiens
  misc_RNA (1)...(19): siRNA sense strand
auuuuaagguguugagaga

SEQ ID NO: 2360420 - RNA, 19 nt, Homo sapiens
  misc_RNA (1)...(19): siRNA sense strand
ccgcaugaccauugggaug

SEQ ID NO: 2360421 - RNA, 19 nt, Homo sapiens
  misc_RNA (1)...(19): siRNA sense strand
guuaaaggcugcuggcuac

SEQ ID NO: 2360422 - RNA, 19 nt, Homo sapiens
  misc_RNA (1)...(19): siRNA sense strand
gcuuuuagcucaugguaca

SEQ ID NO: 2360423 - RNA, 19 nt, Homo sapiens
  misc_RNA (1)...(19): siRNA sense strand
cugccaugcgcaacagaaa

SEQ ID NO: 2360424 - RNA, 19 nt, Homo sapiens
  misc_RNA (1)...(19): siRNA sense strand
caaagaggccaauguuuau

SEQ ID NO: 2360425 - RNA, 19 nt, Homo sapiens
  misc_RNA (1)...(19): siRNA sense strand
caauguuuauccagcagaa

SEQ ID NO: 2360426 - RNA, 19 nt, Homo sapiens
  misc_RNA (1)...(19): siRNA sense strand
ugauuaugccucggagaaa

SEQ ID NO: 2360427 - RNA, 19 nt, Homo sapiens
  misc_RNA (1)...(19): siRNA sense strand
ugggcaaagaagagcuaau

SEQ ID NO: 2360428 - RNA, 19 nt, Homo sapiens
  misc_RNA (1)...(19): siRNA sense strand
gaagaaauguccagggugg

SEQ ID NO: 2360429 - RNA, 19 nt, Homo sapiens
  misc_RNA (1)...(19): siRNA sense strand
ggaaguugacagcugauau

SEQ ID NO: 2360430 - RNA, 19 nt, Homo sapiens
  misc_RNA (1)...(19): siRNA sense strand
ccacggaacauguaccaau

SEQ ID NO: 2360431 - RNA, 19 nt, Homo sapiens
  misc_RNA (1)...(19): siRNA sense strand
ccuccauguaugauuauua

SEQ ID NO: 2360432 - RNA, 19 nt, Homo sapiens
  misc_RNA (1)...(19): siRNA sense strand
aauaaggccucuugggaac

SEQ ID NO: 2360433 - RNA, 19 nt, Homo sapiens
  misc_RNA (1)...(19): siRNA sense strand
cggcugaggacaugccuuu

SEQ ID NO: 2360434 - RNA, 19 nt, Homo sapiens
  misc_RNA (1)...(19): siRNA sense strand
gggaagaaauguccagggu

SEQ ID NO: 2360435 - RNA, 19 nt, Homo sapiens
  misc_RNA (1)...(19): siRNA sense strand
ccuuaacuaccuaggugaa

SEQ ID NO: 2360436 - RNA, 19 nt, Homo sapiens
  misc_RNA (1)...(19): siRNA sense strand
uaagguguugagagagaaa

SEQ ID NO: 2360437 - RNA, 19 nt, Homo sapiens
  misc_RNA (1)...(19): siRNA sense strand
guggauaacaucaaagugu

SEQ ID NO: 2360438 - RNA, 19 nt, Homo sapiens
  misc_RNA (1)...(19): siRNA sense strand
ucaaaggaaaagaggauga

SEQ ID NO: 2360439 - RNA, 19 nt, Homo sapiens
  misc_RNA (1)...(19): siRNA sense strand
aggagcucaucaaaggaaa

SEQ ID NO: 2360440 - RNA, 19 nt, Homo sapiens
  misc_RNA (1)...(19): siRNA sense strand
ucuucauaggagugguuua

SEQ ID NO: 2360441 - RNA, 19 nt, Homo sapiens
  misc_RNA (1)...(19): siRNA sense strand
cuguguagucgcagugaca

SEQ ID NO: 2360442 - RNA, 19 nt, Homo sapiens
  misc_RNA (1)...(19): siRNA sense strand
ccaucugcaaagaggccaa

SEQ ID NO: 2360443 - RNA, 19 nt, Homo sapiens
  misc_RNA (1)...(19): siRNA sense strand
ggaucuugcuccaggcauc

SEQ ID NO: 2360444 - RNA, 19 nt, Homo sapiens
  misc_RNA (1)...(19): siRNA sense strand
ggaacagaucuucaugaau

SEQ ID NO: 2360445 - RNA, 19 nt, Homo sapiens
  misc_RNA (1)...(19): siRNA sense strand
gggcagaagggcauuuuaa

SEQ ID NO: 2360446 - RNA, 19 nt, Homo sapiens
  misc_RNA (1)...(19): siRNA sense strand
uagccaaaggagagugcau

SEQ ID NO: 2360447 - RNA, 19 nt, Homo sapiens
  misc_RNA (1)...(19): siRNA sense strand
uguuaaggauuguaaugga

SEQ ID NO: 2360448 - RNA, 19 nt, Homo sapiens
  misc_RNA (1)...(19): siRNA sense strand
ugguacggccugugcagaa

SEQ ID NO: 2360449 - RNA, 19 nt, Homo sapiens
  misc_RNA (1)...(19): siRNA sense strand
uagcauugggcaaagaaga

SEQ ID NO: 2360450 - RNA, 19 nt, Homo sapiens
  misc_RNA (1)...(19): siRNA sense strand
agaaaauuguguuguggau

SEQ ID NO: 2360451 - RNA, 19 nt, Homo sapiens
  misc_RNA (1)...(19): siRNA sense strand
caucaaagugaaacuggau

SEQ ID NO: 2360452 - RNA, 19 nt, Homo sapiens
  misc_RNA (1)...(19): siRNA sense strand
agaccaaaauggaaaacca

SEQ ID NO: 2360453 - RNA, 19 nt, Homo sapiens
  misc_RNA (1)...(19): siRNA sense strand
guggaaaauucaagugugu

SEQ ID NO: 2360454 - RNA, 19 nt, Homo sapiens
  misc_RNA (1)...(19): siRNA sense strand
caaauuucaaguaaggaca

SEQ ID NO: 2360455 - RNA, 19 nt, Homo sapiens
  misc_RNA (1)...(19): siRNA sense strand
aagugaaacuggauguugu

SEQ ID NO: 2360456 - RNA, 19 nt, Homo sapiens
  misc_RNA (1)...(19): siRNA sense strand
gaggaaauauggagaggga

SEQ ID NO: 2360457 - RNA, 19 nt, Homo sapiens
  misc_RNA (1)...(19): siRNA sense strand
caaaaguaguagaaagcaa

SEQ ID NO: 2360458 - RNA, 19 nt, Homo sapiens
  misc_RNA (1)...(19): siRNA sense strand
agaaagaagaguaggaacu

SEQ ID NO: 2360459 - RNA, 19 nt, Homo sapiens
  misc_RNA (1)...(19): siRNA sense strand
guagaaagcaaaaggacaa

SEQ ID NO: 2360460 - RNA, 19 nt, Homo sapiens
  misc_RNA (1)...(19): siRNA sense strand
aaagaaagcagaagagcca

SEQ ID NO: 2360461 - RNA, 19 nt, Homo sapiens
  misc_RNA (1)...(19): siRNA sense strand
aagaauugcagcaggaaaa

SEQ ID NO: 2360462 - RNA, 19 nt, Homo sapiens
  misc_RNA (1)...(19): siRNA sense strand
agagaaacgacgaggagca

SEQ ID NO: 2360463 - RNA, 19 nt, Homo sapiens
  misc_RNA (1)...(19): siRNA sense strand
gcaacagcgcagaggcuau

SEQ ID NO: 2360464 - RNA, 19 nt, Homo sapiens
  misc_RNA (1)...(19): siRNA sense strand
ugauaaucucucagaaaga

SEQ ID NO: 2360465 - RNA, 19 nt, Homo sapiens
  misc_RNA (1)...(19): siRNA sense strand
agcaaaaggacaagaacaa

SEQ ID NO: 2360466 - RNA, 19 nt, Homo sapiens
  misc_RNA (1)...(19): siRNA sense strand
agaucuggcgugaggaaau

SEQ ID NO: 2360467 - RNA, 19 nt, Homo sapiens
  misc_RNA (1)...(19): siRNA sense strand
cggcaaaaguaguagaaag

SEQ ID NO: 2360468 - RNA, 19 nt, Homo sapiens
  misc_RNA (1)...(19): siRNA sense strand
aggaggaggaggaggagga

SEQ ID NO: 2360469 - RNA, 19 nt, Homo sapiens
  misc_RNA (1)...(19): siRNA sense strand
aggaggaggaggaggagga

SEQ ID NO: 2360470 - RNA, 19 nt, Homo sapiens
  misc_RNA (1)...(19): siRNA sense strand
aaagacagauggaggacca

SEQ ID NO: 2360471 - RNA, 19 nt, Homo sapiens
  misc_RNA (1)...(19): siRNA sense strand
gacaagaauugcagcagga

SEQ ID NO: 2360472 - RNA, 19 nt, Homo sapiens
  misc_RNA (1)...(19): siRNA sense strand
aggaacugcucgagugcca

SEQ ID NO: 2360473 - RNA, 19 nt, Homo sapiens
  misc_RNA (1)...(19): siRNA sense strand
ggagcagauggcagaaaca

SEQ ID NO: 2360474 - RNA, 19 nt, Homo sapiens
  misc_RNA (1)...(19): siRNA sense strand
cugaggagcagauggcaga

SEQ ID NO: 2360475 - RNA, 19 nt, Homo sapiens
  misc_RNA (1)...(19): siRNA sense strand
gcgugaggaaauauggaga

SEQ ID NO: 2360476 - RNA, 19 nt, Homo sapiens
  misc_RNA (1)...(19): siRNA sense strand
gugguaaugauguugaaau

SEQ ID NO: 2360477 - RNA, 19 nt, Homo sapiens
  misc_RNA (1)...(19): siRNA sense strand
acugaagcuaauuuggaua

SEQ ID NO: 2360478 - RNA, 19 nt, Homo sapiens
  misc_RNA (1)...(19): siRNA sense strand
gcaacauggaacccagcaa

SEQ ID NO: 2360479 - RNA, 19 nt, Homo sapiens
  misc_RNA (1)...(19): siRNA sense strand
aagaaagaaagaagaguag

SEQ ID NO: 2360480 - RNA, 19 nt, Homo sapiens
  misc_RNA (1)...(19): siRNA sense strand
ggcuuugggaagaagacaa

SEQ ID NO: 2360481 - RNA, 19 nt, Homo sapiens
  misc_RNA (1)...(19): siRNA sense strand
uugaaaaggaacaugacaa

SEQ ID NO: 2360482 - RNA, 19 nt, Homo sapiens
  misc_RNA (1)...(19): siRNA sense strand
acuuuaaagaagcagaaga

SEQ ID NO: 2360483 - RNA, 19 nt, Homo sapiens
  misc_RNA (1)...(19): siRNA sense strand
aagacaagaauuugagauc

SEQ ID NO: 2360484 - RNA, 19 nt, Homo sapiens
  misc_RNA (1)...(19): siRNA sense strand
caguugagaacgauauaca

SEQ ID NO: 2360485 - RNA, 19 nt, Homo sapiens
  misc_RNA (1)...(19): siRNA sense strand
aggacaagaacaauaacuu

SEQ ID NO: 2360486 - RNA, 19 nt, Homo sapiens
  misc_RNA (1)...(19): siRNA sense strand
gaggaaauauggagaggga

SEQ ID NO: 2360487 - RNA, 19 nt, Homo sapiens
  misc_RNA (1)...(19): siRNA sense strand
caaaaguaguagaaagcaa

SEQ ID NO: 2360488 - RNA, 19 nt, Homo sapiens
  misc_RNA (1)...(19): siRNA sense strand
agaaagaagaguaggaacu

SEQ ID NO: 2360489 - RNA, 19 nt, Homo sapiens
  misc_RNA (1)...(19): siRNA sense strand
guagaaagcaaaaggacaa

SEQ ID NO: 2360490 - RNA, 19 nt, Homo sapiens
  misc_RNA (1)...(19): siRNA sense strand
aaagaaagcagaagagcca

SEQ ID NO: 2360491 - RNA, 19 nt, Homo sapiens
  misc_RNA (1)...(19): siRNA sense strand
aagaauugcagcaggaaaa

SEQ ID NO: 2360492 - RNA, 19 nt, Homo sapiens
  misc_RNA (1)...(19): siRNA sense strand
agagaaacgacgaggagca

SEQ ID NO: 2360493 - RNA, 19 nt, Homo sapiens
  misc_RNA (1)...(19): siRNA sense strand
gcaacagcgcagaggcuau

SEQ ID NO: 2360494 - RNA, 19 nt, Homo sapiens
  misc_RNA (1)...(19): siRNA sense strand
ugauaaucucucagaaaga

SEQ ID NO: 2360495 - RNA, 19 nt, Homo sapiens
  misc_RNA (1)...(19): siRNA sense strand
agcaaaaggacaagaacaa

SEQ ID NO: 2360496 - RNA, 19 nt, Homo sapiens
  misc_RNA (1)...(19): siRNA sense strand
agaucuggcgugaggaaau

SEQ ID NO: 2360497 - RNA, 19 nt, Homo sapiens
  misc_RNA (1)...(19): siRNA sense strand
cggcaaaaguaguagaaag

SEQ ID NO: 2360498 - RNA, 19 nt, Homo sapiens
  misc_RNA (1)...(19): siRNA sense strand
aggaggaggaggaggagga

SEQ ID NO: 2360499 - RNA, 19 nt, Homo sapiens
  misc_RNA (1)...(19): siRNA sense strand
aggaggaggaggaggagga

SEQ ID NO: 2360500 - RNA, 19 nt, Homo sapiens
  misc_RNA (1)...(19): siRNA sense strand
aaagacagauggaggacca

SEQ ID NO: 2360501 - RNA, 19 nt, Homo sapiens
  misc_RNA (1)...(19): siRNA sense strand
gacaagaauugcagcagga

SEQ ID NO: 2360502 - RNA, 19 nt, Homo sapiens
  misc_RNA (1)...(19): siRNA sense strand
aggaacugcucgagugcca

SEQ ID NO: 2360503 - RNA, 19 nt, Homo sapiens
  misc_RNA (1)...(19): siRNA sense strand
ggagcagauggcagaaaca

SEQ ID NO: 2360504 - RNA, 19 nt, Homo sapiens
  misc_RNA (1)...(19): siRNA sense strand
cugaggagcagauggcaga

SEQ ID NO: 2360505 - RNA, 19 nt, Homo sapiens
  misc_RNA (1)...(19): siRNA sense strand
gcgugaggaaauauggaga

SEQ ID NO: 2360506 - RNA, 19 nt, Homo sapiens
  misc_RNA (1)...(19): siRNA sense strand
gugguaaugauguugaaau

SEQ ID NO: 2360507 - RNA, 19 nt, Homo sapiens
  misc_RNA (1)...(19): siRNA sense strand
acugaagcuaauuuggaua

SEQ ID NO: 2360508 - RNA, 19 nt, Homo sapiens
  misc_RNA (1)...(19): siRNA sense strand
gcaacauggaacccagcaa

SEQ ID NO: 2360509 - RNA, 19 nt, Homo sapiens
  misc_RNA (1)...(19): siRNA sense strand
aagaaagaaagaagaguag

SEQ ID NO: 2360510 - RNA, 19 nt, Homo sapiens
  misc_RNA (1)...(19): siRNA sense strand
ggcuuugggaagaagacaa

SEQ ID NO: 2360511 - RNA, 19 nt, Homo sapiens
  misc_RNA (1)...(19): siRNA sense strand
uugaaaaggaacaugacaa

SEQ ID NO: 2360512 - RNA, 19 nt, Homo sapiens
  misc_RNA (1)...(19): siRNA sense strand
acuuuaaagaagcagaaga

SEQ ID NO: 2360513 - RNA, 19 nt, Homo sapiens
  misc_RNA (1)...(19): siRNA sense strand
aagacaagaauuugagauc

SEQ ID NO: 2360514 - RNA, 19 nt, Homo sapiens
  misc_RNA (1)...(19): siRNA sense strand
caguugagaacgauauaca

SEQ ID NO: 2360515 - RNA, 19 nt, Homo sapiens
  misc_RNA (1)...(19): siRNA sense strand
aggacaagaacaauaacuu

SEQ ID NO: 2360516 - RNA, 19 nt, Homo sapiens
  misc_RNA (1)...(19): siRNA sense strand
aggauaagggugacagcaa

SEQ ID NO: 2360517 - RNA, 19 nt, Homo sapiens
  misc_RNA (1)...(19): siRNA sense strand
acuucaaggauaaggguga

SEQ ID NO: 2360518 - RNA, 19 nt, Homo sapiens
  misc_RNA (1)...(19): siRNA sense strand
gcauguucauugagcgcuu

SEQ ID NO: 2360519 - RNA, 19 nt, Homo sapiens
  misc_RNA (1)...(19): siRNA sense strand
agugaagacaccuguacaa

SEQ ID NO: 2360520 - RNA, 19 nt, Homo sapiens
  misc_RNA (1)...(19): siRNA sense strand
uggaggagagcgaggacuu

SEQ ID NO: 2360521 - RNA, 19 nt, Homo sapiens
  misc_RNA (1)...(19): siRNA sense strand
ggguggcaagagcgggaaa

SEQ ID NO: 2360522 - RNA, 19 nt, Homo sapiens
  misc_RNA (1)...(19): siRNA sense strand
auacaaacacuucaggaca

SEQ ID NO: 2360523 - RNA, 19 nt, Homo sapiens
  misc_RNA (1)...(19): siRNA sense strand
cauuaugaccgaacaggau

SEQ ID NO: 2360524 - RNA, 19 nt, Homo sapiens
  misc_RNA (1)...(19): siRNA sense strand
ggauaagggugacagcaac

SEQ ID NO: 2360525 - RNA, 19 nt, Homo sapiens
  misc_RNA (1)...(19): siRNA sense strand
auggagauacauuggauuu

SEQ ID NO: 2360526 - RNA, 19 nt, Homo sapiens
  misc_RNA (1)...(19): siRNA sense strand
uugacaauguguugcccaa

SEQ ID NO: 2360527 - RNA, 19 nt, Homo sapiens
  misc_RNA (1)...(19): siRNA sense strand
gagaagagcugcauccaug

SEQ ID NO: 2360528 - RNA, 19 nt, Homo sapiens
  misc_RNA (1)...(19): siRNA sense strand
cgccucaggugguggagau

SEQ ID NO: 2360529 - RNA, 19 nt, Homo sapiens
  misc_RNA (1)...(19): siRNA sense strand
ggacagaaauugaagguuc

SEQ ID NO: 2360530 - RNA, 19 nt, Homo sapiens
  misc_RNA (1)...(19): siRNA sense strand
ucgacaugaagaagagaaa

SEQ ID NO: 2360531 - RNA, 19 nt, Homo sapiens
  misc_RNA (1)...(19): siRNA sense strand
cagaaauauggaagugaca

SEQ ID NO: 2360532 - RNA, 19 nt, Homo sapiens
  misc_RNA (1)...(19): siRNA sense strand
ucuagagaagagacagaaa

SEQ ID NO: 2360533 - RNA, 19 nt, Homo sapiens
  misc_RNA (1)...(19): siRNA sense strand
gcuaaaugaucuacagccu

SEQ ID NO: 2360534 - RNA, 19 nt, Homo sapiens
  misc_RNA (1)...(19): siRNA sense strand
gucaaaggaaucagggaca

SEQ ID NO: 2360535 - RNA, 19 nt, Homo sapiens
  misc_RNA (1)...(19): siRNA sense strand
aguugaugauggcaguaaa

SEQ ID NO: 2360536 - RNA, 19 nt, Homo sapiens
  misc_RNA (1)...(19): siRNA sense strand
aguaaagaucagaccucaa

SEQ ID NO: 2360537 - RNA, 19 nt, Homo sapiens
  misc_RNA (1)...(19): siRNA sense strand
augccaaaggccagaaaga

SEQ ID NO: 2360538 - RNA, 19 nt, Homo sapiens
  misc_RNA (1)...(19): siRNA sense strand
auuauuuacucgagaagca

SEQ ID NO: 2360539 - RNA, 19 nt, Homo sapiens
  misc_RNA (1)...(19): siRNA sense strand
agugauaguaguugaugau

SEQ ID NO: 2360540 - RNA, 19 nt, Homo sapiens
  misc_RNA (1)...(19): siRNA sense strand
gaucuacagccuuggccua

SEQ ID NO: 2360541 - RNA, 19 nt, Homo sapiens
  misc_RNA (1)...(19): siRNA sense strand
aaucaaauggcuauagcau

SEQ ID NO: 2360542 - RNA, 19 nt, Homo sapiens
  misc_RNA (1)...(19): siRNA sense strand
uaucuagagaagagacaga

SEQ ID NO: 2360543 - RNA, 19 nt, Homo sapiens
  misc_RNA (1)...(19): siRNA sense strand
gcuaucuagagaagagaca

SEQ ID NO: 2360544 - RNA, 19 nt, Homo sapiens
  misc_RNA (1)...(19): siRNA sense strand
augaagugauaguaguuga

SEQ ID NO: 2360545 - RNA, 19 nt, Homo sapiens
  misc_RNA (1)...(19): siRNA sense strand
aagugauaguaguugauga

SEQ ID NO: 2360546 - RNA, 19 nt, Homo sapiens
  misc_RNA (1)...(19): siRNA sense strand
uggccuaaucaaauggcua

SEQ ID NO: 2360547 - RNA, 19 nt, Homo sapiens
  misc_RNA (1)...(19): siRNA sense strand
gcuugagcaaacucggaaa

SEQ ID NO: 2360548 - RNA, 19 nt, Homo sapiens
  misc_RNA (1)...(19): siRNA sense strand
agaagagacagaaacgaga

SEQ ID NO: 2360549 - RNA, 19 nt, Homo sapiens
  misc_RNA (1)...(19): siRNA sense strand
gggcauuugauguagaacu

SEQ ID NO: 2360550 - RNA, 19 nt, Homo sapiens
  misc_RNA (1)...(19): siRNA sense strand
gugugauaacccuggugaa

SEQ ID NO: 2360551 - RNA, 19 nt, Homo sapiens
  misc_RNA (1)...(19): siRNA sense strand
gcuggcuacaaauggguaa

SEQ ID NO: 2360552 - RNA, 19 nt, Homo sapiens
  misc_RNA (1)...(19): siRNA sense strand
gagcgauuagaauggguau

SEQ ID NO: 2360553 - RNA, 19 nt, Homo sapiens
  misc_RNA (1)...(19): siRNA sense strand
ggacaaggaccgaggcaga

SEQ ID NO: 2360554 - RNA, 19 nt, Homo sapiens
  misc_RNA (1)...(19): siRNA sense strand
ccauaaugaaugaggacca

SEQ ID NO: 2360555 - RNA, 19 nt, Homo sapiens
  misc_RNA (1)...(19): siRNA sense strand
augaagaggaggagcaaca

SEQ ID NO: 2360556 - RNA, 19 nt, Homo sapiens
  misc_RNA (1)...(19): siRNA sense strand
aggaggagcaacagaaaca

SEQ ID NO: 2360557 - RNA, 19 nt, Homo sapiens
  misc_RNA (1)...(19): siRNA sense strand
ggagaagaucagugggaag

SEQ ID NO: 2360558 - RNA, 19 nt, Homo sapiens
  misc_RNA (1)...(19): siRNA sense strand
acagugaccacgaggacaa

SEQ ID NO: 2360559 - RNA, 19 nt, Homo sapiens
  misc_RNA (1)...(19): siRNA sense strand
gcccaaaaggugugaucaa

SEQ ID NO: 2360560 - RNA, 19 nt, Homo sapiens
  misc_RNA (1)...(19): siRNA sense strand
auggaaaggcugaucaaga

SEQ ID NO: 2360561 - RNA, 19 nt, Homo sapiens
  misc_RNA (1)...(19): siRNA sense strand
uggaugaagaggaggagca

SEQ ID NO: 2360562 - RNA, 19 nt, Homo sapiens
  misc_RNA (1)...(19): siRNA sense strand
aggauagcgaccuggaaau

SEQ ID NO: 2360563 - RNA, 19 nt, Homo sapiens
  misc_RNA (1)...(19): siRNA sense strand
cuauagcagcagugaggau

SEQ ID NO: 2360564 - RNA, 19 nt, Homo sapiens
  misc_RNA (1)...(19): siRNA sense strand
augaagaguuucugcagca

SEQ ID NO: 2360565 - RNA, 19 nt, Homo sapiens
  misc_RNA (1)...(19): siRNA sense strand
agauggaaaggcugaucaa

SEQ ID NO: 2360566 - RNA, 19 nt, Homo sapiens
  misc_RNA (1)...(19): siRNA sense strand
caggagaagaucaguggga

SEQ ID NO: 2360567 - RNA, 19 nt, Homo sapiens
  misc_RNA (1)...(19): siRNA sense strand
cgggagauggaaaggcuga

SEQ ID NO: 2360568 - RNA, 19 nt, Homo sapiens
  misc_RNA (1)...(19): siRNA sense strand
agcaacagaaacagaaaga

SEQ ID NO: 2360569 - RNA, 19 nt, Homo sapiens
  misc_RNA (1)...(19): siRNA sense strand
caacagaaacagaaagacc

SEQ ID NO: 2360570 - RNA, 19 nt, Homo sapiens
  misc_RNA (1)...(19): siRNA sense strand
aggagaagaucagugggaa

SEQ ID NO: 2360571 - RNA, 19 nt, Homo sapiens
  misc_RNA (1)...(19): siRNA sense strand
gaauggaagagaugcggca

SEQ ID NO: 2360572 - RNA, 19 nt, Homo sapiens
  misc_RNA (1)...(19): siRNA sense strand
ccggaaagcaucugagcca

SEQ ID NO: 2360573 - RNA, 19 nt, Homo sapiens
  misc_RNA (1)...(19): siRNA sense strand
ucaaguucaaugaggagaa

SEQ ID NO: 2360574 - RNA, 19 nt, Homo sapiens
  misc_RNA (1)...(19): siRNA sense strand
gggaggacauuguggacac

SEQ ID NO: 2360575 - RNA, 19 nt, Homo sapiens
  misc_RNA (1)...(19): siRNA sense strand
ccaugaacucgaaagugaa

SEQ ID NO: 2360576 - RNA, 19 nt, Homo sapiens
  misc_RNA (1)...(19): siRNA sense strand
gggacagagcacaggaaag

SEQ ID NO: 2360577 - RNA, 19 nt, Homo sapiens
  misc_RNA (1)...(19): siRNA sense strand
cuugugauguaaaggugaa

SEQ ID NO: 2360578 - RNA, 19 nt, Homo sapiens
  misc_RNA (1)...(19): siRNA sense strand
gggaacacaaagagaaggu

SEQ ID NO: 2360579 - RNA, 19 nt, Homo sapiens
  misc_RNA (1)...(19): siRNA sense strand
ccggaaagcaucugagcca

SEQ ID NO: 2360580 - RNA, 19 nt, Homo sapiens
  misc_RNA (1)...(19): siRNA sense strand
ucaaguucaaugaggagaa

SEQ ID NO: 2360581 - RNA, 19 nt, Homo sapiens
  misc_RNA (1)...(19): siRNA sense strand
gggaggacauuguggacac

SEQ ID NO: 2360582 - RNA, 19 nt, Homo sapiens
  misc_RNA (1)...(19): siRNA sense strand
ccaugaacucgaaagugaa

SEQ ID NO: 2360583 - RNA, 19 nt, Homo sapiens
  misc_RNA (1)...(19): siRNA sense strand
gggacagagcacaggaaag

SEQ ID NO: 2360584 - RNA, 19 nt, Homo sapiens
  misc_RNA (1)...(19): siRNA sense strand
cuugugauguaaaggugaa

SEQ ID NO: 2360585 - RNA, 19 nt, Homo sapiens
  misc_RNA (1)...(19): siRNA sense strand
gggaacacaaagagaaggu

SEQ ID NO: 2360586 - RNA, 19 nt, Homo sapiens
  misc_RNA (1)...(19): siRNA sense strand
ccggaaagcaucugagcca

SEQ ID NO: 2360587 - RNA, 19 nt, Homo sapiens
  misc_RNA (1)...(19): siRNA sense strand
ucaaguucaaugaggagaa

SEQ ID NO: 2360588 - RNA, 19 nt, Homo sapiens
  misc_RNA (1)...(19): siRNA sense strand
gggaggacauuguggacac

SEQ ID NO: 2360589 - RNA, 19 nt, Homo sapiens
  misc_RNA (1)...(19): siRNA sense strand
ccaugaacucgaaagugaa

SEQ ID NO: 2360590 - RNA, 19 nt, Homo sapiens
  misc_RNA (1)...(19): siRNA sense strand
gggacagagcacaggaaag

SEQ ID NO: 2360591 - RNA, 19 nt, Homo sapiens
  misc_RNA (1)...(19): siRNA sense strand
cuugugauguaaaggugaa

SEQ ID NO: 2360592 - RNA, 19 nt, Homo sapiens
  misc_RNA (1)...(19): siRNA sense strand
gggaacacaaagagaaggu

SEQ ID NO: 2360593 - RNA, 19 nt, Homo sapiens
  misc_RNA (1)...(19): siRNA sense strand
ccggaaagcaucugagcca

SEQ ID NO: 2360594 - RNA, 19 nt, Homo sapiens
  misc_RNA (1)...(19): siRNA sense strand
ucaaguucaaugaggagaa

SEQ ID NO: 2360595 - RNA, 19 nt, Homo sapiens
  misc_RNA (1)...(19): siRNA sense strand
gggaggacauuguggacac

SEQ ID NO: 2360596 - RNA, 19 nt, Homo sapiens
  misc_RNA (1)...(19): siRNA sense strand
ccaugaacucgaaagugaa

SEQ ID NO: 2360597 - RNA, 19 nt, Homo sapiens
  misc_RNA (1)...(19): siRNA sense strand
gggacagagcacaggaaag

SEQ ID NO: 2360598 - RNA, 19 nt, Homo sapiens
  misc_RNA (1)...(19): siRNA sense strand
cuugugauguaaaggugaa

SEQ ID NO: 2360599 - RNA, 19 nt, Homo sapiens
  misc_RNA (1)...(19): siRNA sense strand
gggaacacaaagagaaggu

SEQ ID NO: 2360600 - RNA, 19 nt, Homo sapiens
  misc_RNA (1)...(19): siRNA sense strand
ccggaaagcaucugagcca

SEQ ID NO: 2360601 - RNA, 19 nt, Homo sapiens
  misc_RNA (1)...(19): siRNA sense strand
ucaaguucaaugaggagaa

SEQ ID NO: 2360602 - RNA, 19 nt, Homo sapiens
  misc_RNA (1)...(19): siRNA sense strand
gggaggacauuguggacac

SEQ ID NO: 2360603 - RNA, 19 nt, Homo sapiens
  misc_RNA (1)...(19): siRNA sense strand
ccaugaacucgaaagugaa

SEQ ID NO: 2360604 - RNA, 19 nt, Homo sapiens
  misc_RNA (1)...(19): siRNA sense strand
gggacagagcacaggaaag

SEQ ID NO: 2360605 - RNA, 19 nt, Homo sapiens
  misc_RNA (1)...(19): siRNA sense strand
cuugugauguaaaggugaa

SEQ ID NO: 2360606 - RNA, 19 nt, Homo sapiens
  misc_RNA (1)...(19): siRNA sense strand
gggaacacaaagagaaggu

SEQ ID NO: 2360607 - RNA, 19 nt, Homo sapiens
  misc_RNA (1)...(19): siRNA sense strand
ccggaaagcaucugagcca

SEQ ID NO: 2360608 - RNA, 19 nt, Homo sapiens
  misc_RNA (1)...(19): siRNA sense strand
ucaaguucaaugaggagaa

SEQ ID NO: 2360609 - RNA, 19 nt, Homo sapiens
  misc_RNA (1)...(19): siRNA sense strand
gggaggacauuguggacac

SEQ ID NO: 2360610 - RNA, 19 nt, Homo sapiens
  misc_RNA (1)...(19): siRNA sense strand
ccaugaacucgaaagugaa

SEQ ID NO: 2360611 - RNA, 19 nt, Homo sapiens
  misc_RNA (1)...(19): siRNA sense strand
gggacagagcacaggaaag

SEQ ID NO: 2360612 - RNA, 19 nt, Homo sapiens
  misc_RNA (1)...(19): siRNA sense strand
cuugugauguaaaggugaa

SEQ ID NO: 2360613 - RNA, 19 nt, Homo sapiens
  misc_RNA (1)...(19): siRNA sense strand
gggaacacaaagagaaggu

SEQ ID NO: 2360614 - RNA, 19 nt, Homo sapiens
  misc_RNA (1)...(19): siRNA sense strand
gcaccauggcugaggaaac

SEQ ID NO: 2360615 - RNA, 19 nt, Homo sapiens
  misc_RNA (1)...(19): siRNA sense strand
gcuagaaaaggaagaacaa

SEQ ID NO: 2360616 - RNA, 19 nt, Homo sapiens
  misc_RNA (1)...(19): siRNA sense strand
cuguuacaauggaggaaga

SEQ ID NO: 2360617 - RNA, 19 nt, Homo sapiens
  misc_RNA (1)...(19): siRNA sense strand
guggauaacgacaagaaaa

SEQ ID NO: 2360618 - RNA, 19 nt, Homo sapiens
  misc_RNA (1)...(19): siRNA sense strand
cagcaguucuugagcggca

SEQ ID NO: 2360619 - RNA, 19 nt, Homo sapiens
  misc_RNA (1)...(19): siRNA sense strand
guauugaugcugaggggaa

SEQ ID NO: 2360620 - RNA, 19 nt, Homo sapiens
  misc_RNA (1)...(19): siRNA sense strand
ggaaagaacaaucagcagu

SEQ ID NO: 2360621 - RNA, 19 nt, Homo sapiens
  misc_RNA (1)...(19): siRNA sense strand
ccaagcaaguacagcgagu

SEQ ID NO: 2360622 - RNA, 19 nt, Homo sapiens
  misc_RNA (1)...(19): siRNA sense strand
aagguuugccggugggauu

SEQ ID NO: 2360623 - RNA, 19 nt, Homo sapiens
  misc_RNA (1)...(19): siRNA sense strand
cgguggauaacgacaagaa

SEQ ID NO: 2360624 - RNA, 19 nt, Homo sapiens
  misc_RNA (1)...(19): siRNA sense strand
agaacaaaucccagaugga

SEQ ID NO: 2360625 - RNA, 19 nt, Homo sapiens
  misc_RNA (1)...(19): siRNA sense strand
ggacagaucuccaaccgca

SEQ ID NO: 2360626 - RNA, 19 nt, Homo sapiens
  misc_RNA (1)...(19): siRNA sense strand
aacaaaucccagauggaau

SEQ ID NO: 2360627 - RNA, 19 nt, Homo sapiens
  misc_RNA (1)...(19): siRNA sense strand
ccguggaugccuuugacua

SEQ ID NO: 2360628 - RNA, 19 nt, Homo sapiens
  misc_RNA (1)...(19): siRNA sense strand
gcaccauggcugaggaaac

SEQ ID NO: 2360629 - RNA, 19 nt, Homo sapiens
  misc_RNA (1)...(19): siRNA sense strand
gcuagaaaaggaagaacaa

SEQ ID NO: 2360630 - RNA, 19 nt, Homo sapiens
  misc_RNA (1)...(19): siRNA sense strand
cuguuacaauggaggaaga

SEQ ID NO: 2360631 - RNA, 19 nt, Homo sapiens
  misc_RNA (1)...(19): siRNA sense strand
guggauaacgacaagaaaa

SEQ ID NO: 2360632 - RNA, 19 nt, Homo sapiens
  misc_RNA (1)...(19): siRNA sense strand
cagcaguucuugagcggca

SEQ ID NO: 2360633 - RNA, 19 nt, Homo sapiens
  misc_RNA (1)...(19): siRNA sense strand
guauugaugcugaggggaa

SEQ ID NO: 2360634 - RNA, 19 nt, Homo sapiens
  misc_RNA (1)...(19): siRNA sense strand
ggaaagaacaaucagcagu

SEQ ID NO: 2360635 - RNA, 19 nt, Homo sapiens
  misc_RNA (1)...(19): siRNA sense strand
ccaagcaaguacagcgagu

SEQ ID NO: 2360636 - RNA, 19 nt, Homo sapiens
  misc_RNA (1)...(19): siRNA sense strand
aagguuugccggugggauu

SEQ ID NO: 2360637 - RNA, 19 nt, Homo sapiens
  misc_RNA (1)...(19): siRNA sense strand
cgguggauaacgacaagaa

SEQ ID NO: 2360638 - RNA, 19 nt, Homo sapiens
  misc_RNA (1)...(19): siRNA sense strand
agaacaaaucccagaugga

SEQ ID NO: 2360639 - RNA, 19 nt, Homo sapiens
  misc_RNA (1)...(19): siRNA sense strand
ggacagaucuccaaccgca

SEQ ID NO: 2360640 - RNA, 19 nt, Homo sapiens
  misc_RNA (1)...(19): siRNA sense strand
aacaaaucccagauggaau

SEQ ID NO: 2360641 - RNA, 19 nt, Homo sapiens
  misc_RNA (1)...(19): siRNA sense strand
ccguggaugccuuugacua

SEQ ID NO: 2360642 - RNA, 19 nt, Homo sapiens
  misc_RNA (1)...(19): siRNA sense strand
aggagaaagccgaggaaga

SEQ ID NO: 2360643 - RNA, 19 nt, Homo sapiens
  misc_RNA (1)...(19): siRNA sense strand
ggauaaaagaacagaaaga

SEQ ID NO: 2360644 - RNA, 19 nt, Homo sapiens
  misc_RNA (1)...(19): siRNA sense strand
cagaugaggaagagggaga

SEQ ID NO: 2360645 - RNA, 19 nt, Homo sapiens
  misc_RNA (1)...(19): siRNA sense strand
ccgaggagaaggaggaaaa

SEQ ID NO: 2360646 - RNA, 19 nt, Homo sapiens
  misc_RNA (1)...(19): siRNA sense strand
aagaggaagaugaggaaga

SEQ ID NO: 2360647 - RNA, 19 nt, Homo sapiens
  misc_RNA (1)...(19): siRNA sense strand
aggaagaugaggaagaaga

SEQ ID NO: 2360648 - RNA, 19 nt, Homo sapiens
  misc_RNA (1)...(19): siRNA sense strand
ccuggagaggacagagaaa

SEQ ID NO: 2360649 - RNA, 19 nt, Homo sapiens
  misc_RNA (1)...(19): siRNA sense strand
aguaaaggagccaggaaga

SEQ ID NO: 2360650 - RNA, 19 nt, Homo sapiens
  misc_RNA (1)...(19): siRNA sense strand
gcauguauggugagcgaga

SEQ ID NO: 2360651 - RNA, 19 nt, Homo sapiens
  misc_RNA (1)...(19): siRNA sense strand
gugccaacccagugaugaa

SEQ ID NO: 2360652 - RNA, 19 nt, Homo sapiens
  misc_RNA (1)...(19): siRNA sense strand
aggagaggacacagaggaa

SEQ ID NO: 2360653 - RNA, 19 nt, Homo sapiens
  misc_RNA (1)...(19): siRNA sense strand
aggaagaugaggacaguga

SEQ ID NO: 2360654 - RNA, 19 nt, Homo sapiens
  misc_RNA (1)...(19): siRNA sense strand
uggagaggacagagaaaca

SEQ ID NO: 2360655 - RNA, 19 nt, Homo sapiens
  misc_RNA (1)...(19): siRNA sense strand
cagccgaggaugaaagaga

SEQ ID NO: 2360656 - RNA, 19 nt, Homo sapiens
  misc_RNA (1)...(19): siRNA sense strand
uggaaaagagacagaggaa

SEQ ID NO: 2360657 - RNA, 19 nt, Homo sapiens
  misc_RNA (1)...(19): siRNA sense strand
gcugaagaggagggaguua

SEQ ID NO: 2360658 - RNA, 19 nt, Homo sapiens
  misc_RNA (1)...(19): siRNA sense strand
aagcuggccuggagggaga

SEQ ID NO: 2360659 - RNA, 19 nt, Homo sapiens
  misc_RNA (1)...(19): siRNA sense strand
cuguaaagaaagaagcuca

SEQ ID NO: 2360660 - RNA, 19 nt, Homo sapiens
  misc_RNA (1)...(19): siRNA sense strand
gggauaucgaccuggaaaa

SEQ ID NO: 2360661 - RNA, 19 nt, Homo sapiens
  misc_RNA (1)...(19): siRNA sense strand
aggaggaggacgaugaaga

SEQ ID NO: 2360662 - RNA, 19 nt, Homo sapiens
  misc_RNA (1)...(19): siRNA sense strand
aggaagaggaagaugagga

SEQ ID NO: 2360663 - RNA, 19 nt, Homo sapiens
  misc_RNA (1)...(19): siRNA sense strand
aggaagagggagaagcuga

SEQ ID NO: 2360664 - RNA, 19 nt, Homo sapiens
  misc_RNA (1)...(19): siRNA sense strand
uggcauguauggugagcga

SEQ ID NO: 2360665 - RNA, 19 nt, Homo sapiens
  misc_RNA (1)...(19): siRNA sense strand
agaaacugggaaaggagaa

SEQ ID NO: 2360666 - RNA, 19 nt, Homo sapiens
  misc_RNA (1)...(19): siRNA sense strand
cagcugagaaggauggaga

SEQ ID NO: 2360667 - RNA, 19 nt, Homo sapiens
  misc_RNA (1)...(19): siRNA sense strand
aggaggaagaugaggaugu

SEQ ID NO: 2360668 - RNA, 19 nt, Homo sapiens
  misc_RNA (1)...(19): siRNA sense strand
aggaagaagaugaggacag

SEQ ID NO: 2360669 - RNA, 19 nt, Homo sapiens
  misc_RNA (1)...(19): siRNA sense strand
aggaaaaggcacacgaaga

SEQ ID NO: 2360670 - RNA, 19 nt, Homo sapiens
  misc_RNA (1)...(19): siRNA sense strand
cugaagaggagggaguuaa

SEQ ID NO: 2360671 - RNA, 19 nt, Homo sapiens
  misc_RNA (1)...(19): siRNA sense strand
gagaggacacagaggagga

SEQ ID NO: 2360672 - RNA, 19 nt, Homo sapiens
  misc_RNA (1)...(19): siRNA sense strand
gagaggacacggaggagga

SEQ ID NO: 2360673 - RNA, 19 nt, Homo sapiens
  misc_RNA (1)...(19): siRNA sense strand
agacagaggaagaggaagc

SEQ ID NO: 2360674 - RNA, 19 nt, Homo sapiens
  misc_RNA (1)...(19): siRNA sense strand
auguggauagugaggauaa

SEQ ID NO: 2360675 - RNA, 19 nt, Homo sapiens
  misc_RNA (1)...(19): siRNA sense strand
cuggaucagaugaggaaga

SEQ ID NO: 2360676 - RNA, 19 nt, Homo sapiens
  misc_RNA (1)...(19): siRNA sense strand
agaugaggacagugauaca

SEQ ID NO: 2360677 - RNA, 19 nt, Homo sapiens
  misc_RNA (1)...(19): siRNA sense strand
acgaugaagaagcuguaaa

SEQ ID NO: 2360678 - RNA, 19 nt, Homo sapiens
  misc_RNA (1)...(19): siRNA sense strand
cagaagcagccuuaggaga

SEQ ID NO: 2360679 - RNA, 19 nt, Homo sapiens
  misc_RNA (1)...(19): siRNA sense strand
aagccgaggaagagggagu

SEQ ID NO: 2360680 - RNA, 19 nt, Homo sapiens
  misc_RNA (1)...(19): siRNA sense strand
aagaggagggaguuaacaa

SEQ ID NO: 2360681 - RNA, 19 nt, Homo sapiens
  misc_RNA (1)...(19): siRNA sense strand
cguccgaggagaaggagga

SEQ ID NO: 2360682 - RNA, 19 nt, Homo sapiens
  misc_RNA (1)...(19): siRNA sense strand
auagugaggauaaggaaga

SEQ ID NO: 2360683 - RNA, 19 nt, Homo sapiens
  misc_RNA (1)...(19): siRNA sense strand
aggaagagggaguugcuga

SEQ ID NO: 2360684 - RNA, 19 nt, Homo sapiens
  misc_RNA (1)...(19): siRNA sense strand
cuuaggagaagcugaguca

SEQ ID NO: 2360685 - RNA, 19 nt, Homo sapiens
  misc_RNA (1)...(19): siRNA sense strand
gggaagucaauuugcagau

SEQ ID NO: 2360686 - RNA, 19 nt, Homo sapiens
  misc_RNA (1)...(19): siRNA sense strand
cggcucaagcgcccagaaa

SEQ ID NO: 2360687 - RNA, 19 nt, Homo sapiens
  misc_RNA (1)...(19): siRNA sense strand
gggaguugcugaagaggag

SEQ ID NO: 2360688 - RNA, 19 nt, Homo sapiens
  misc_RNA (1)...(19): siRNA sense strand
uugcugaagaggagggagu

SEQ ID NO: 2360689 - RNA, 19 nt, Homo sapiens
  misc_RNA (1)...(19): siRNA sense strand
aaucaagccacggaggaua

SEQ ID NO: 2360690 - RNA, 19 nt, Homo sapiens
  misc_RNA (1)...(19): siRNA sense strand
agaaagaaguaaaggagcc

SEQ ID NO: 2360691 - RNA, 19 nt, Homo sapiens
  misc_RNA (1)...(19): siRNA sense strand
aggaagaggaagcugcuga

SEQ ID NO: 2360692 - RNA, 19 nt, Homo sapiens
  misc_RNA (1)...(19): siRNA sense strand
aggaauaugcagaggaguu

SEQ ID NO: 2360693 - RNA, 19 nt, Homo sapiens
  misc_RNA (1)...(19): siRNA sense strand
agaagagcucagauagaaa

SEQ ID NO: 2360694 - RNA, 19 nt, Homo sapiens
  misc_RNA (1)...(19): siRNA sense strand
gcuacaucgccguggagua

SEQ ID NO: 2360695 - RNA, 19 nt, Homo sapiens
  misc_RNA (1)...(19): siRNA sense strand
ggaaugaauggcugcgaca

SEQ ID NO: 2360696 - RNA, 19 nt, Homo sapiens
  misc_RNA (1)...(19): siRNA sense strand
aggcagaggaauaugcaga

SEQ ID NO: 2360697 - RNA, 19 nt, Homo sapiens
  misc_RNA (1)...(19): siRNA sense strand
ccgcagauacuuggagaau

SEQ ID NO: 2360698 - RNA, 19 nt, Homo sapiens
  misc_RNA (1)...(19): siRNA sense strand
gcagaggaguucaggaccu

SEQ ID NO: 2360699 - RNA, 19 nt, Homo sapiens
  misc_RNA (1)...(19): siRNA sense strand
ucagauagaaacagaggga

SEQ ID NO: 2360700 - RNA, 19 nt, Homo sapiens
  misc_RNA (1)...(19): siRNA sense strand
caguauugggaguggacca

SEQ ID NO: 2360701 - RNA, 19 nt, Homo sapiens
  misc_RNA (1)...(19): siRNA sense strand
gggcaucguugcuggccuu

SEQ ID NO: 2360702 - RNA, 19 nt, Homo sapiens
  misc_RNA (1)...(19): siRNA sense strand
gugauguggaggaagaaga

SEQ ID NO: 2360703 - RNA, 19 nt, Homo sapiens
  misc_RNA (1)...(19): siRNA sense strand
agauagaaacagagggagc

SEQ ID NO: 2360704 - RNA, 19 nt, Homo sapiens
  misc_RNA (1)...(19): siRNA sense strand
caggguacgccaaggccaa

SEQ ID NO: 2360705 - RNA, 19 nt, Homo sapiens
  misc_RNA (1)...(19): siRNA sense strand
cuucuaugaggcagaggaa

SEQ ID NO: 2360706 - RNA, 19 nt, Homo sapiens
  misc_RNA (1)...(19): siRNA sense strand
gauacuuggagaaugggaa

SEQ ID NO: 2360707 - RNA, 19 nt, Homo sapiens
  misc_RNA (1)...(19): siRNA sense strand
ggugccuucuggagaggaa

SEQ ID NO: 2360708 - RNA, 19 nt, Homo sapiens
  misc_RNA (1)...(19): siRNA sense strand
agccguggguggagcaaga

SEQ ID NO: 2360709 - RNA, 19 nt, Homo sapiens
  misc_RNA (1)...(19): siRNA sense strand
aggccaacgcacagacuga

SEQ ID NO: 2360710 - RNA, 19 nt, Homo sapiens
  misc_RNA (1)...(19): siRNA sense strand
acguagacgacacgcaauu

SEQ ID NO: 2360711 - RNA, 19 nt, Homo sapiens
  misc_RNA (1)...(19): siRNA sense strand
guacguagacgacacgcaa

SEQ ID NO: 2360712 - RNA, 19 nt, Homo sapiens
  misc_RNA (1)...(19): siRNA sense strand
aguuacaggaugagauaca

SEQ ID NO: 2360713 - RNA, 19 nt, Homo sapiens
  misc_RNA (1)...(19): siRNA sense strand
uaguguggcaggagguaua

SEQ ID NO: 2360714 - RNA, 19 nt, Homo sapiens
  misc_RNA (1)...(19): siRNA sense strand
guggagaagcugagacagu

SEQ ID NO: 2360715 - RNA, 19 nt, Homo sapiens
  misc_RNA (1)...(19): siRNA sense strand
ccaugaugcaggagaugau

SEQ ID NO: 2360716 - RNA, 19 nt, Homo sapiens
  misc_RNA (1)...(19): siRNA sense strand
ccgaggagucaguagcaau

SEQ ID NO: 2360717 - RNA, 19 nt, Homo sapiens
  misc_RNA (1)...(19): siRNA sense strand
uuccaaacuuucuggguau

SEQ ID NO: 2360718 - RNA, 19 nt, Homo sapiens
  misc_RNA (1)...(19): siRNA sense strand
gagcauuccugguggcuac

SEQ ID NO: 2360719 - RNA, 19 nt, Homo sapiens
  misc_RNA (1)...(19): siRNA sense strand
guuacagacacaugcacua

SEQ ID NO: 2360720 - RNA, 19 nt, Homo sapiens
  misc_RNA (1)...(19): siRNA sense strand
aggcucagguagcaggcaa

SEQ ID NO: 2360721 - RNA, 19 nt, Homo sapiens
  misc_RNA (1)...(19): siRNA sense strand
ccggaaauuaugcggcaga

SEQ ID NO: 2360722 - RNA, 19 nt, Homo sapiens
  misc_RNA (1)...(19): siRNA sense strand
ggccaaagguggagaagcc

SEQ ID NO: 2360723 - RNA, 19 nt, Homo sapiens
  misc_RNA (1)...(19): siRNA sense strand
cuguggagaagcugagaca

SEQ ID NO: 2360724 - RNA, 19 nt, Homo sapiens
  misc_RNA (1)...(19): siRNA sense strand
cuccacaguuacaggauga

SEQ ID NO: 2360725 - RNA, 19 nt, Homo sapiens
  misc_RNA (1)...(19): siRNA sense strand
ucugaaucgugaagccaau

SEQ ID NO: 2360726 - RNA, 19 nt, Homo sapiens
  misc_RNA (1)...(19): siRNA sense strand
auucuuaacaacccggaaa

SEQ ID NO: 2360727 - RNA, 19 nt, Homo sapiens
  misc_RNA (1)...(19): siRNA sense strand
caguagcaaucaagggaag

SEQ ID NO: 2360728 - RNA, 19 nt, Homo sapiens
  misc_RNA (1)...(19): siRNA sense strand
gcaaugagaagcugggcaa

SEQ ID NO: 2360729 - RNA, 19 nt, Homo sapiens
  misc_RNA (1)...(19): siRNA sense strand
ucuuuaaucuagugggcaa

SEQ ID NO: 2360730 - RNA, 19 nt, Homo sapiens
  misc_RNA (1)...(19): siRNA sense strand
gcaagucugugguggccaa

SEQ ID NO: 2360731 - RNA, 19 nt, Homo sapiens
  misc_RNA (1)...(19): siRNA sense strand
gcaagaagguccuggucac

SEQ ID NO: 2360732 - RNA, 19 nt, Homo sapiens
  misc_RNA (1)...(19): siRNA sense strand
guuccagaagagugagcua

SEQ ID NO: 2360733 - RNA, 19 nt, Homo sapiens
  misc_RNA (1)...(19): siRNA sense strand
gggaugcagucaauggaca

SEQ ID NO: 2360734 - RNA, 19 nt, Homo sapiens
  misc_RNA (1)...(19): siRNA sense strand
ggguauucugggcaugaaa

SEQ ID NO: 2360735 - RNA, 19 nt, Homo sapiens
  misc_RNA (1)...(19): siRNA sense strand
ucauggaagaauugguaga

SEQ ID NO: 2360736 - RNA, 19 nt, Homo sapiens
  misc_RNA (1)...(19): siRNA sense strand
ugguagauaaucauggcaa

SEQ ID NO: 2360737 - RNA, 19 nt, Homo sapiens
  misc_RNA (1)...(19): siRNA sense strand
ggaugagauggcaguugaa

SEQ ID NO: 2360738 - RNA, 19 nt, Homo sapiens
  misc_RNA (1)...(19): siRNA sense strand
gucacauaacuuuggacaa

SEQ ID NO: 2360739 - RNA, 19 nt, Homo sapiens
  misc_RNA (1)...(19): siRNA sense strand
uugaagaggaugacaccau

SEQ ID NO: 2360740 - RNA, 19 nt, Homo sapiens
  misc_RNA (1)...(19): siRNA sense strand
cuacaauggaggaaaggau

SEQ ID NO: 2360741 - RNA, 19 nt, Homo sapiens
  misc_RNA (1)...(19): siRNA sense strand
ccaaggcugcagagggaau

SEQ ID NO: 2360742 - RNA, 19 nt, Homo sapiens
  misc_RNA (1)...(19): siRNA sense strand
gcugggaaguggaagagca

SEQ ID NO: 2360743 - RNA, 19 nt, Homo sapiens
  misc_RNA (1)...(19): siRNA sense strand
gaggcugggaaguggaaga

SEQ ID NO: 2360744 - RNA, 19 nt, Homo sapiens
  misc_RNA (1)...(19): siRNA sense strand
cgguugacacggauggaaa

SEQ ID NO: 2360745 - RNA, 19 nt, Homo sapiens
  misc_RNA (1)...(19): siRNA sense strand
aggaggaggcccaguacaa

SEQ ID NO: 2360746 - RNA, 19 nt, Homo sapiens
  misc_RNA (1)...(19): siRNA sense strand
acgaggaguucgcgaggau

SEQ ID NO: 2360747 - RNA, 19 nt, Homo sapiens
  misc_RNA (1)...(19): siRNA sense strand
aggaggagcuggacgccau

SEQ ID NO: 2360748 - RNA, 19 nt, Homo sapiens
  misc_RNA (1)...(19): siRNA sense strand
ucuccgagguugacagcga

SEQ ID NO: 2360749 - RNA, 19 nt, Homo sapiens
  misc_RNA (1)...(19): siRNA sense strand
ccacaggaugggagggaau

SEQ ID NO: 2360750 - RNA, 19 nt, Homo sapiens
  misc_RNA (1)...(19): siRNA sense strand
aagagaagagacugagaaa

SEQ ID NO: 2360751 - RNA, 19 nt, Homo sapiens
  misc_RNA (1)...(19): siRNA sense strand
ccucaagagaagagacuga

SEQ ID NO: 2360752 - RNA, 19 nt, Homo sapiens
  misc_RNA (1)...(19): siRNA sense strand
gaagaauaaacaaggccaa

SEQ ID NO: 2360753 - RNA, 19 nt, Homo sapiens
  misc_RNA (1)...(19): siRNA sense strand
ggaugagggaagacagaga

SEQ ID NO: 2360754 - RNA, 19 nt, Homo sapiens
  misc_RNA (1)...(19): siRNA sense strand
ucgaaaugaaagaagggaa

SEQ ID NO: 2360755 - RNA, 19 nt, Homo sapiens
  misc_RNA (1)...(19): siRNA sense strand
gggauauaucggagcugaa

SEQ ID NO: 2360756 - RNA, 19 nt, Homo sapiens
  misc_RNA (1)...(19): siRNA sense strand
ugguggcccuggagagaaa

SEQ ID NO: 2360757 - RNA, 19 nt, Homo sapiens
  misc_RNA (1)...(19): siRNA sense strand
cgaaaugaaagaagggaag

SEQ ID NO: 2360758 - RNA, 19 nt, Homo sapiens
  misc_RNA (1)...(19): siRNA sense strand
ggcuaaacuuggacagguu

SEQ ID NO: 2360759 - RNA, 19 nt, Homo sapiens
  misc_RNA (1)...(19): siRNA sense strand
agaacaguccacaguguaa

SEQ ID NO: 2360760 - RNA, 19 nt, Homo sapiens
  misc_RNA (1)...(19): siRNA sense strand
cauaaugaaggauggucaa

SEQ ID NO: 2360761 - RNA, 19 nt, Homo sapiens
  misc_RNA (1)...(19): siRNA sense strand
gggagaaaucagaggcuuc

SEQ ID NO: 2360762 - RNA, 19 nt, Homo sapiens
  misc_RNA (1)...(19): siRNA sense strand
ggagcaugggauuggagua

SEQ ID NO: 2360763 - RNA, 19 nt, Homo sapiens
  misc_RNA (1)...(19): siRNA sense strand
ggacagaaccauuugcacu

SEQ ID NO: 2360764 - RNA, 19 nt, Homo sapiens
  misc_RNA (1)...(19): siRNA sense strand
augaaagaagggaagguuu

SEQ ID NO: 2360765 - RNA, 19 nt, Homo sapiens
  misc_RNA (1)...(19): siRNA sense strand
ucagaaucaaugaagcaaa

SEQ ID NO: 2360766 - RNA, 19 nt, Homo sapiens
  misc_RNA (1)...(19): siRNA sense strand
caguaugaccaguguuuga

SEQ ID NO: 2360767 - RNA, 19 nt, Homo sapiens
  misc_RNA (1)...(19): siRNA sense strand
aggcaguaucucacauuua

SEQ ID NO: 2360768 - RNA, 19 nt, Homo sapiens
  misc_RNA (1)...(19): siRNA sense strand
ggauuuaacaugguggcaa

SEQ ID NO: 2360769 - RNA, 19 nt, Homo sapiens
  misc_RNA (1)...(19): siRNA sense strand
gccucauguugaaggagua

SEQ ID NO: 2360770 - RNA, 19 nt, Homo sapiens
  misc_RNA (1)...(19): siRNA sense strand
agguuuaauucaagcacga

SEQ ID NO: 2360771 - RNA, 19 nt, Homo sapiens
  misc_RNA (1)...(19): siRNA sense strand
ugauauaccuugaugccca

SEQ ID NO: 2360772 - RNA, 19 nt, Homo sapiens
  misc_RNA (1)...(19): siRNA sense strand
aauucaagcacgaaguauu

SEQ ID NO: 2360773 - RNA, 19 nt, Homo sapiens
  misc_RNA (1)...(19): siRNA sense strand
aagaauaaacaaggccaaa

SEQ ID NO: 2360774 - RNA, 19 nt, Homo sapiens
  misc_RNA (1)...(19): siRNA sense strand
agguuuggugggaugaaua

SEQ ID NO: 2360775 - RNA, 19 nt, Homo sapiens
  misc_RNA (1)...(19): siRNA sense strand
aaucagaggcuucgaaacu

SEQ ID NO: 2360776 - RNA, 19 nt, Homo sapiens
  misc_RNA (1)...(19): siRNA sense strand
cagaaagauaucaugcaga

SEQ ID NO: 2360777 - RNA, 19 nt, Homo sapiens
  misc_RNA (1)...(19): siRNA sense strand
cauggaagaaauagcuuau

SEQ ID NO: 2360778 - RNA, 19 nt, Homo sapiens
  misc_RNA (1)...(19): siRNA sense strand
gggaaaugaauaacaucca

SEQ ID NO: 2360779 - RNA, 19 nt, Homo sapiens
  misc_RNA (1)...(19): siRNA sense strand
gauuuaacaugguggcaag

SEQ ID NO: 2360780 - RNA, 19 nt, Homo sapiens
  misc_RNA (1)...(19): siRNA sense strand
cauaaauggcaacacauau

SEQ ID NO: 2360781 - RNA, 19 nt, Homo sapiens
  misc_RNA (1)...(19): siRNA sense strand
auggcagugugguggcaaa

SEQ ID NO: 2360782 - RNA, 19 nt, Homo sapiens
  misc_RNA (1)...(19): siRNA sense strand
ucuccaacucugaagaauu

SEQ ID NO: 2360783 - RNA, 19 nt, Homo sapiens
  misc_RNA (1)...(19): siRNA sense strand
caggaugagggaagacaga

SEQ ID NO: 2360784 - RNA, 19 nt, Homo sapiens
  misc_RNA (1)...(19): siRNA sense strand
aggaauggcaguacuucaa

SEQ ID NO: 2360785 - RNA, 19 nt, Homo sapiens
  misc_RNA (1)...(19): siRNA sense strand
agccagcauuaaagaguuu

SEQ ID NO: 2360786 - RNA, 19 nt, Homo sapiens
  misc_RNA (1)...(19): siRNA sense strand
ccgaggcggcaauggacua

SEQ ID NO: 2360787 - RNA, 19 nt, Homo sapiens
  misc_RNA (1)...(19): siRNA sense strand
aguccacaguguaauuaaa

SEQ ID NO: 2360788 - RNA, 19 nt, Homo sapiens
  misc_RNA (1)...(19): siRNA sense strand
uggugaugaagauggguau

SEQ ID NO: 2360789 - RNA, 19 nt, Homo sapiens
  misc_RNA (1)...(19): siRNA sense strand
ucauggaagaaauagcuua

SEQ ID NO: 2360790 - RNA, 19 nt, Homo sapiens
  misc_RNA (1)...(19): siRNA sense strand
aauugugacuccaguaaaa

SEQ ID NO: 2360791 - RNA, 19 nt, Homo sapiens
  misc_RNA (1)...(19): siRNA sense strand
ucauguugaaggaguagaa

SEQ ID NO: 2360792 - RNA, 19 nt, Homo sapiens
  misc_RNA (1)...(19): siRNA sense strand
ggagagaaagccaagccau

SEQ ID NO: 2360793 - RNA, 19 nt, Homo sapiens
  misc_RNA (1)...(19): siRNA sense strand
uuggacagguuuugauaua

SEQ ID NO: 2360794 - RNA, 19 nt, Homo sapiens
  misc_RNA (1)...(19): siRNA sense strand
uguuagaguuguggagguu

SEQ ID NO: 2360795 - RNA, 19 nt, Homo sapiens
  misc_RNA (1)...(19): siRNA sense strand
ccagaauucaaacaagcaa

SEQ ID NO: 2360796 - RNA, 19 nt, Homo sapiens
  misc_RNA (1)...(19): siRNA sense strand
cagaauucaaacaagcaau

SEQ ID NO: 2360797 - RNA, 19 nt, Homo sapiens
  misc_RNA (1)...(19): siRNA sense strand
gaauuuaaggaauggcagu

SEQ ID NO: 2360798 - RNA, 19 nt, Homo sapiens
  misc_RNA (1)...(19): siRNA sense strand
gggauaaguucauagcaga

SEQ ID NO: 2360799 - RNA, 19 nt, Homo sapiens
  misc_RNA (1)...(19): siRNA sense strand
gaaacagacuggcagggua

SEQ ID NO: 2360800 - RNA, 19 nt, Homo sapiens
  misc_RNA (1)...(19): siRNA sense strand
ccuguuggagagugagaaa

SEQ ID NO: 2360801 - RNA, 19 nt, Homo sapiens
  misc_RNA (1)...(19): siRNA sense strand
ggauaaguucauagcagau

SEQ ID NO: 2360802 - RNA, 19 nt, Homo sapiens
  misc_RNA (1)...(19): siRNA sense strand
aggaaguagcucagaaguu

SEQ ID NO: 2360803 - RNA, 19 nt, Homo sapiens
  misc_RNA (1)...(19): siRNA sense strand
gauccaaagauguggcugu

SEQ ID NO: 2360804 - RNA, 19 nt, Homo sapiens
  misc_RNA (1)...(19): siRNA sense strand
ucgcagaauccauccgaau

SEQ ID NO: 2360805 - RNA, 19 nt, Homo sapiens
  misc_RNA (1)...(19): siRNA sense strand
gugccaaaggcuuguccua

SEQ ID NO: 2360806 - RNA, 19 nt, Homo sapiens
  misc_RNA (1)...(19): siRNA sense strand
cuuccacgccggagaaaca

SEQ ID NO: 2360807 - RNA, 19 nt, Homo sapiens
  misc_RNA (1)...(19): siRNA sense strand
ucucuaaccaggugcugaa

SEQ ID NO: 2360808 - RNA, 19 nt, Homo sapiens
  misc_RNA (1)...(19): siRNA sense strand
gggauaaguucauagcaga

SEQ ID NO: 2360809 - RNA, 19 nt, Homo sapiens
  misc_RNA (1)...(19): siRNA sense strand
gaaacagacuggcagggua

SEQ ID NO: 2360810 - RNA, 19 nt, Homo sapiens
  misc_RNA (1)...(19): siRNA sense strand
ccuguuggagagugagaaa

SEQ ID NO: 2360811 - RNA, 19 nt, Homo sapiens
  misc_RNA (1)...(19): siRNA sense strand
ggauaaguucauagcagau

SEQ ID NO: 2360812 - RNA, 19 nt, Homo sapiens
  misc_RNA (1)...(19): siRNA sense strand
aggaaguagcucagaaguu

SEQ ID NO: 2360813 - RNA, 19 nt, Homo sapiens
  misc_RNA (1)...(19): siRNA sense strand
gauccaaagauguggcugu

SEQ ID NO: 2360814 - RNA, 19 nt, Homo sapiens
  misc_RNA (1)...(19): siRNA sense strand
ucgcagaauccauccgaau

SEQ ID NO: 2360815 - RNA, 19 nt, Homo sapiens
  misc_RNA (1)...(19): siRNA sense strand
gugccaaaggcuuguccua

SEQ ID NO: 2360816 - RNA, 19 nt, Homo sapiens
  misc_RNA (1)...(19): siRNA sense strand
cuuccacgccggagaaaca

SEQ ID NO: 2360817 - RNA, 19 nt, Homo sapiens
  misc_RNA (1)...(19): siRNA sense strand
ucucuaaccaggugcugaa

SEQ ID NO: 2360818 - RNA, 19 nt, Homo sapiens
  misc_RNA (1)...(19): siRNA sense strand
ccacaguaccagagggcaa

SEQ ID NO: 2360819 - RNA, 19 nt, Homo sapiens
  misc_RNA (1)...(19): siRNA sense strand
gugccaaggaugaggauga

SEQ ID NO: 2360820 - RNA, 19 nt, Homo sapiens
  misc_RNA (1)...(19): siRNA sense strand
gggccaaagugacaggcaa

SEQ ID NO: 2360821 - RNA, 19 nt, Homo sapiens
  misc_RNA (1)...(19): siRNA sense strand
uggaaaaggggaagacaaa

SEQ ID NO: 2360822 - RNA, 19 nt, Homo sapiens
  misc_RNA (1)...(19): siRNA sense strand
auggaaagcaauaccgaua

SEQ ID NO: 2360823 - RNA, 19 nt, Homo sapiens
  misc_RNA (1)...(19): siRNA sense strand
uuaugaaggcuuagagcuu

SEQ ID NO: 2360824 - RNA, 19 nt, Homo sapiens
  misc_RNA (1)...(19): siRNA sense strand
caucaugaagugcggagaa

SEQ ID NO: 2360825 - RNA, 19 nt, Homo sapiens
  misc_RNA (1)...(19): siRNA sense strand
gagaagacuuauauccaca

SEQ ID NO: 2360826 - RNA, 19 nt, Homo sapiens
  misc_RNA (1)...(19): siRNA sense strand
guggaaaaggggaagacaa

SEQ ID NO: 2360827 - RNA, 19 nt, Homo sapiens
  misc_RNA (1)...(19): siRNA sense strand
gucuauuacaggagcaaau

SEQ ID NO: 2360828 - RNA, 19 nt, Homo sapiens
  misc_RNA (1)...(19): siRNA sense strand
augcagaagugggcacaaa

SEQ ID NO: 2360829 - RNA, 19 nt, Homo sapiens
  misc_RNA (1)...(19): siRNA sense strand
gcaaauaccugagaagcga

SEQ ID NO: 2360830 - RNA, 19 nt, Homo sapiens
  misc_RNA (1)...(19): siRNA sense strand
gcucauucuggaugccaaa

SEQ ID NO: 2360831 - RNA, 19 nt, Homo sapiens
  misc_RNA (1)...(19): siRNA sense strand
ggauuauucauuacagaca

SEQ ID NO: 2360832 - RNA, 19 nt, Homo sapiens
  misc_RNA (1)...(19): siRNA sense strand
ggaguaaucuuaucagcca

SEQ ID NO: 2360833 - RNA, 19 nt, Homo sapiens
  misc_RNA (1)...(19): siRNA sense strand
gaacagcgggacagggcuu

SEQ ID NO: 2360834 - RNA, 19 nt, Homo sapiens
  misc_RNA (1)...(19): siRNA sense strand
cagacaacugccugaucaa

SEQ ID NO: 2360835 - RNA, 19 nt, Homo sapiens
  misc_RNA (1)...(19): siRNA sense strand
accaauuacaucaggaaaa

SEQ ID NO: 2360836 - RNA, 19 nt, Homo sapiens
  misc_RNA (1)...(19): siRNA sense strand
cagccuuucagguuggaua

SEQ ID NO: 2360837 - RNA, 19 nt, Homo sapiens
  misc_RNA (1)...(19): siRNA sense strand
gaccaauuacaucaggaaa

SEQ ID NO: 2360838 - RNA, 19 nt, Homo sapiens
  misc_RNA (1)...(19): siRNA sense strand
accaggacuucaaggagaa

SEQ ID NO: 2360839 - RNA, 19 nt, Homo sapiens
  misc_RNA (1)...(19): siRNA sense strand
ggagcaaauaccugagaag

SEQ ID NO: 2360840 - RNA, 19 nt, Homo sapiens
  misc_RNA (1)...(19): siRNA sense strand
agggaggagaagacuuaua

SEQ ID NO: 2360841 - RNA, 19 nt, Homo sapiens
  misc_RNA (1)...(19): siRNA sense strand
aggaugaggaugacggagu

SEQ ID NO: 2360842 - RNA, 19 nt, Homo sapiens
  misc_RNA (1)...(19): siRNA sense strand
aagaagauggccaagucua

SEQ ID NO: 2360843 - RNA, 19 nt, Homo sapiens
  misc_RNA (1)...(19): siRNA sense strand
gugucugaguuuggaacaa

SEQ ID NO: 2360844 - RNA, 19 nt, Homo sapiens
  misc_RNA (1)...(19): siRNA sense strand
uuggagucaccgagaacua

SEQ ID NO: 2360845 - RNA, 19 nt, Homo sapiens
  misc_RNA (1)...(19): siRNA sense strand
gcucacaauggaaagcaau

SEQ ID NO: 2360846 - RNA, 19 nt, Homo sapiens
  misc_RNA (1)...(19): siRNA sense strand
ccgauaugucuuugcuaca

SEQ ID NO: 2360847 - RNA, 19 nt, Homo sapiens
  misc_RNA (1)...(19): siRNA sense strand
agaccaauuacaucaggaa

SEQ ID NO: 2360848 - RNA, 19 nt, Homo sapiens
  misc_RNA (1)...(19): siRNA sense strand
aaccaggacuucaaggaga

SEQ ID NO: 2360849 - RNA, 19 nt, Homo sapiens
  misc_RNA (1)...(19): siRNA sense strand
cagaaauagaguugaggaa

SEQ ID NO: 2360850 - RNA, 19 nt, Homo sapiens
  misc_RNA (1)...(19): siRNA sense strand
gugugaagcuugaagggaa

SEQ ID NO: 2360851 - RNA, 19 nt, Homo sapiens
  misc_RNA (1)...(19): siRNA sense strand
ugugaagcuugaagggaaa

SEQ ID NO: 2360852 - RNA, 19 nt, Homo sapiens
  misc_RNA (1)...(19): siRNA sense strand
agggaaagaacuugaagaa

SEQ ID NO: 2360853 - RNA, 19 nt, Homo sapiens
  misc_RNA (1)...(19): siRNA sense strand
gaugaaaggugaaggcagu

SEQ ID NO: 2360854 - RNA, 19 nt, Homo sapiens
  misc_RNA (1)...(19): siRNA sense strand
caacaaaaggccaugaaaa

SEQ ID NO: 2360855 - RNA, 19 nt, Homo sapiens
  misc_RNA (1)...(19): siRNA sense strand
ugagagugauauugaggaa

SEQ ID NO: 2360856 - RNA, 19 nt, Homo sapiens
  misc_RNA (1)...(19): siRNA sense strand
uuuagaagaaggagaacua

SEQ ID NO: 2360857 - RNA, 19 nt, Homo sapiens
  misc_RNA (1)...(19): siRNA sense strand
uuugaaagguaaaggacau

SEQ ID NO: 2360858 - RNA, 19 nt, Homo sapiens
  misc_RNA (1)...(19): siRNA sense strand
aggugaaggcagucguaaa

SEQ ID NO: 2360859 - RNA, 19 nt, Homo sapiens
  misc_RNA (1)...(19): siRNA sense strand
gugaagaaagugagaucau

SEQ ID NO: 2360860 - RNA, 19 nt, Homo sapiens
  misc_RNA (1)...(19): siRNA sense strand
agguggaacaauauggaaa

SEQ ID NO: 2360861 - RNA, 19 nt, Homo sapiens
  misc_RNA (1)...(19): siRNA sense strand
cuugaagaauacuuggaaa

SEQ ID NO: 2360862 - RNA, 19 nt, Homo sapiens
  misc_RNA (1)...(19): siRNA sense strand
uuaucaaaccagaggauuu

SEQ ID NO: 2360863 - RNA, 19 nt, Homo sapiens
  misc_RNA (1)...(19): siRNA sense strand
uagaagaaggagaacuaaa

SEQ ID NO: 2360864 - RNA, 19 nt, Homo sapiens
  misc_RNA (1)...(19): siRNA sense strand
agauggagaagaagaaauu

SEQ ID NO: 2360865 - RNA, 19 nt, Homo sapiens
  misc_RNA (1)...(19): siRNA sense strand
acuucgaggugauggaaau

SEQ ID NO: 2360866 - RNA, 19 nt, Homo sapiens
  misc_RNA (1)...(19): siRNA sense strand
guuacaaugugguggaguu

SEQ ID NO: 2360867 - RNA, 19 nt, Homo sapiens
  misc_RNA (1)...(19): siRNA sense strand
guugaugccacuagugaaa

SEQ ID NO: 2360868 - RNA, 19 nt, Homo sapiens
  misc_RNA (1)...(19): siRNA sense strand
agaaauagaguugaggaaa

SEQ ID NO: 2360869 - RNA, 19 nt, Homo sapiens
  misc_RNA (1)...(19): siRNA sense strand
agaauggaugagugauaaa

SEQ ID NO: 2360870 - RNA, 19 nt, Homo sapiens
  misc_RNA (1)...(19): siRNA sense strand
aaaagaaacaggugaagaa

SEQ ID NO: 2360871 - RNA, 19 nt, Homo sapiens
  misc_RNA (1)...(19): siRNA sense strand
gcuugaagggaaagaacuu

SEQ ID NO: 2360872 - RNA, 19 nt, Homo sapiens
  misc_RNA (1)...(19): siRNA sense strand
gggaaagauauuaaagugu

SEQ ID NO: 2360873 - RNA, 19 nt, Homo sapiens
  misc_RNA (1)...(19): siRNA sense strand
gagaagacucagagaugca

SEQ ID NO: 2360874 - RNA, 19 nt, Homo sapiens
  misc_RNA (1)...(19): siRNA sense strand
ucauaugauagguggaaca

SEQ ID NO: 2360875 - RNA, 19 nt, Homo sapiens
  misc_RNA (1)...(19): siRNA sense strand
gcaaauuagaaucugguuu

SEQ ID NO: 2360876 - RNA, 19 nt, Homo sapiens
  misc_RNA (1)...(19): siRNA sense strand
agguagaauggaugaguga

SEQ ID NO: 2360877 - RNA, 19 nt, Homo sapiens
  misc_RNA (1)...(19): siRNA sense strand
ucaaagauggagaagaaga

SEQ ID NO: 2360878 - RNA, 19 nt, Homo sapiens
  misc_RNA (1)...(19): siRNA sense strand
augagcagcuucugacaaa

SEQ ID NO: 2360879 - RNA, 19 nt, Homo sapiens
  misc_RNA (1)...(19): siRNA sense strand
gggaaagaacuugaagaau

SEQ ID NO: 2360880 - RNA, 19 nt, Homo sapiens
  misc_RNA (1)...(19): siRNA sense strand
caaaagaggcagauauaga

SEQ ID NO: 2360881 - RNA, 19 nt, Homo sapiens
  misc_RNA (1)...(19): siRNA sense strand
ggaugauggagaagacuca

SEQ ID NO: 2360882 - RNA, 19 nt, Homo sapiens
  misc_RNA (1)...(19): siRNA sense strand
cccucagauucuagcguua

SEQ ID NO: 2360883 - RNA, 19 nt, Homo sapiens
  misc_RNA (1)...(19): siRNA sense strand
aggugauggaaauguguua

SEQ ID NO: 2360884 - RNA, 19 nt, Homo sapiens
  misc_RNA (1)...(19): siRNA sense strand
aacuaaaggaugauggaga

SEQ ID NO: 2360885 - RNA, 19 nt, Homo sapiens
  misc_RNA (1)...(19): siRNA sense strand
ugaauuuguaggaggugua

SEQ ID NO: 2360886 - RNA, 19 nt, Homo sapiens
  misc_RNA (1)...(19): siRNA sense strand
gaaaauagucaaagaugga

SEQ ID NO: 2360887 - RNA, 19 nt, Homo sapiens
  misc_RNA (1)...(19): siRNA sense strand
aggcagucguaaaggaagu

SEQ ID NO: 2360888 - RNA, 19 nt, Homo sapiens
  misc_RNA (1)...(19): siRNA sense strand
gguggaacaauauggaaaa

SEQ ID NO: 2360889 - RNA, 19 nt, Homo sapiens
  misc_RNA (1)...(19): siRNA sense strand
gucaaaagaggcagauaua

SEQ ID NO: 2360890 - RNA, 19 nt, Homo sapiens
  misc_RNA (1)...(19): siRNA sense strand
agauaugagaguuuccaaa

SEQ ID NO: 2360891 - RNA, 19 nt, Homo sapiens
  misc_RNA (1)...(19): siRNA sense strand
gcucauaagacgaagcaug

SEQ ID NO: 2360892 - RNA, 19 nt, Homo sapiens
  misc_RNA (1)...(19): siRNA sense strand
cccagaagaaagaauuaaa

SEQ ID NO: 2360893 - RNA, 19 nt, Homo sapiens
  misc_RNA (1)...(19): siRNA sense strand
uuaaaguguacaugccaaa

SEQ ID NO: 2360894 - RNA, 19 nt, Homo sapiens
  misc_RNA (1)...(19): siRNA sense strand
gauaaaauacagcagcuaa

SEQ ID NO: 2360895 - RNA, 19 nt, Homo sapiens
  misc_RNA (1)...(19): siRNA sense strand
uguacagccuagaagaaaa

SEQ ID NO: 2360896 - RNA, 19 nt, Homo sapiens
  misc_RNA (1)...(19): siRNA sense strand
ccguguaccuagcccuaaa

SEQ ID NO: 2360897 - RNA, 19 nt, Homo sapiens
  misc_RNA (1)...(19): siRNA sense strand
agaaggagaacuaaaggau

SEQ ID NO: 2360898 - RNA, 19 nt, Homo sapiens
  misc_RNA (1)...(19): siRNA sense strand
gcuaaaauucucucagauu

SEQ ID NO: 2360899 - RNA, 19 nt, Homo sapiens
  misc_RNA (1)...(19): siRNA sense strand
guuaauagcaguggacaca

SEQ ID NO: 2360900 - RNA, 19 nt, Homo sapiens
  misc_RNA (1)...(19): siRNA sense strand
cagaacuacuccugggacu

SEQ ID NO: 2360901 - RNA, 19 nt, Homo sapiens
  misc_RNA (1)...(19): siRNA sense strand
aaacaggugaagaaaguga

SEQ ID NO: 2360902 - RNA, 19 nt, Homo sapiens
  misc_RNA (1)...(19): siRNA sense strand
ggucauaugauagguggaa

SEQ ID NO: 2360903 - RNA, 19 nt, Homo sapiens
  misc_RNA (1)...(19): siRNA sense strand
aagauggagaagaagaaau

SEQ ID NO: 2360904 - RNA, 19 nt, Homo sapiens
  misc_RNA (1)...(19): siRNA sense strand
aggugaagaaagugagauc

SEQ ID NO: 2360905 - RNA, 19 nt, Homo sapiens
  misc_RNA (1)...(19): siRNA sense strand
gccaaagcuacaugaaaca

SEQ ID NO: 2360906 - RNA, 19 nt, Homo sapiens
  misc_RNA (1)...(19): siRNA sense strand
agucaaaagaggcagauau

SEQ ID NO: 2360907 - RNA, 19 nt, Homo sapiens
  misc_RNA (1)...(19): siRNA sense strand
cagugaugagagugauauu

SEQ ID NO: 2360908 - RNA, 19 nt, Homo sapiens
  misc_RNA (1)...(19): siRNA sense strand
aggcaaaagaugcugaauu

SEQ ID NO: 2360909 - RNA, 19 nt, Homo sapiens
  misc_RNA (1)...(19): siRNA sense strand
agauauagauuccagugau

SEQ ID NO: 2360910 - RNA, 19 nt, Homo sapiens
  misc_RNA (1)...(19): siRNA sense strand
gauuaucaaaccagaggau

SEQ ID NO: 2360911 - RNA, 19 nt, Homo sapiens
  misc_RNA (1)...(19): siRNA sense strand
uggagaagacucagagaug

SEQ ID NO: 2360912 - RNA, 19 nt, Homo sapiens
  misc_RNA (1)...(19): siRNA sense strand
ggaacaaccuggugaccgu

SEQ ID NO: 2360913 - RNA, 19 nt, Homo sapiens
  misc_RNA (1)...(19): siRNA sense strand
auaugugggccgagggaga

SEQ ID NO: 2360914 - RNA, 19 nt, Homo sapiens
  misc_RNA (1)...(19): siRNA sense strand
ccugcaaauacuagaugua

SEQ ID NO: 2360915 - RNA, 19 nt, Homo sapiens
  misc_RNA (1)...(19): siRNA sense strand
uggcagacuggguguacaa

SEQ ID NO: 2360916 - RNA, 19 nt, Homo sapiens
  misc_RNA (1)...(19): siRNA sense strand
aggccaaggagcugcgaga

SEQ ID NO: 2360917 - RNA, 19 nt, Homo sapiens
  misc_RNA (1)...(19): siRNA sense strand
gcucgaugugggcggaaau

SEQ ID NO: 2360918 - RNA, 19 nt, Homo sapiens
  misc_RNA (1)...(19): siRNA sense strand
ccacccuggaagagcuaaa

SEQ ID NO: 2360919 - RNA, 19 nt, Homo sapiens
  misc_RNA (1)...(19): siRNA sense strand
ccuucguggucuucgacaa

SEQ ID NO: 2360920 - RNA, 19 nt, Homo sapiens
  misc_RNA (1)...(19): siRNA sense strand
gcaaggacgucguggugcu

SEQ ID NO: 2360921 - RNA, 19 nt, Homo sapiens
  misc_RNA (1)...(19): siRNA sense strand
cuucguggucuucgacaaa

SEQ ID NO: 2360922 - RNA, 19 nt, Homo sapiens
  misc_RNA (1)...(19): siRNA sense strand
ggaacaaccuggugaccgu

SEQ ID NO: 2360923 - RNA, 19 nt, Homo sapiens
  misc_RNA (1)...(19): siRNA sense strand
auaugugggccgagggaga

SEQ ID NO: 2360924 - RNA, 19 nt, Homo sapiens
  misc_RNA (1)...(19): siRNA sense strand
ccugcaaauacuagaugua

SEQ ID NO: 2360925 - RNA, 19 nt, Homo sapiens
  misc_RNA (1)...(19): siRNA sense strand
uggcagacuggguguacaa

SEQ ID NO: 2360926 - RNA, 19 nt, Homo sapiens
  misc_RNA (1)...(19): siRNA sense strand
aggccaaggagcugcgaga

SEQ ID NO: 2360927 - RNA, 19 nt, Homo sapiens
  misc_RNA (1)...(19): siRNA sense strand
gcucgaugugggcggaaau

SEQ ID NO: 2360928 - RNA, 19 nt, Homo sapiens
  misc_RNA (1)...(19): siRNA sense strand
ccacccuggaagagcuaaa

SEQ ID NO: 2360929 - RNA, 19 nt, Homo sapiens
  misc_RNA (1)...(19): siRNA sense strand
ccuucguggucuucgacaa

SEQ ID NO: 2360930 - RNA, 19 nt, Homo sapiens
  misc_RNA (1)...(19): siRNA sense strand
gcaaggacgucguggugcu

SEQ ID NO: 2360931 - RNA, 19 nt, Homo sapiens
  misc_RNA (1)...(19): siRNA sense strand
cuucguggucuucgacaaa

SEQ ID NO: 2360932 - RNA, 19 nt, Homo sapiens
  misc_RNA (1)...(19): siRNA sense strand
agugagagucuguggguga

SEQ ID NO: 2360933 - RNA, 19 nt, Homo sapiens
  misc_RNA (1)...(19): siRNA sense strand
caacauggaucaaaggagu

SEQ ID NO: 2360934 - RNA, 19 nt, Homo sapiens
  misc_RNA (1)...(19): siRNA sense strand
ugguggacguuaaggaaaa

SEQ ID NO: 2360935 - RNA, 19 nt, Homo sapiens
  misc_RNA (1)...(19): siRNA sense strand
acaauaaacucgugggcug

SEQ ID NO: 2360936 - RNA, 19 nt, Homo sapiens
  misc_RNA (1)...(19): siRNA sense strand
acaccgaacugcugcgaca

SEQ ID NO: 2360937 - RNA, 19 nt, Homo sapiens
  misc_RNA (1)...(19): siRNA sense strand
agcagaugguggacguuaa

SEQ ID NO: 2360938 - RNA, 19 nt, Homo sapiens
  misc_RNA (1)...(19): siRNA sense strand
gguaugugacagugagagu

SEQ ID NO: 2360939 - RNA, 19 nt, Homo sapiens
  misc_RNA (1)...(19): siRNA sense strand
ccuuguaucucauggagga

SEQ ID NO: 2360940 - RNA, 19 nt, Homo sapiens
  misc_RNA (1)...(19): siRNA sense strand
cgguggauacggauagaca

SEQ ID NO: 2360941 - RNA, 19 nt, Homo sapiens
  misc_RNA (1)...(19): siRNA sense strand
ccaagcagaugguggacgu

SEQ ID NO: 2360942 - RNA, 19 nt, Homo sapiens
  misc_RNA (1)...(19): siRNA sense strand
agauggaaccagugcuuaa

SEQ ID NO: 2360943 - RNA, 19 nt, Homo sapiens
  misc_RNA (1)...(19): siRNA sense strand
auaagaaagucaaggggaa

SEQ ID NO: 2360944 - RNA, 19 nt, Homo sapiens
  misc_RNA (1)...(19): siRNA sense strand
gaggaauggaggagagacu

SEQ ID NO: 2360945 - RNA, 19 nt, Homo sapiens
  misc_RNA (1)...(19): siRNA sense strand
ggaugaucaaagaagcaaa

SEQ ID NO: 2360946 - RNA, 19 nt, Homo sapiens
  misc_RNA (1)...(19): siRNA sense strand
gcaucagagaucucaguaa

SEQ ID NO: 2360947 - RNA, 19 nt, Homo sapiens
  misc_RNA (1)...(19): siRNA sense strand
auguugaugcauugagaua

SEQ ID NO: 2360948 - RNA, 19 nt, Homo sapiens
  misc_RNA (1)...(19): siRNA sense strand
aggagaaccaagauaaauu

SEQ ID NO: 2360949 - RNA, 19 nt, Homo sapiens
  misc_RNA (1)...(19): siRNA sense strand
ggaauauggacgugucaca

SEQ ID NO: 2360950 - RNA, 19 nt, Homo sapiens
  misc_RNA (1)...(19): siRNA sense strand
cuggauuguucucgggauu

SEQ ID NO: 2360951 - RNA, 19 nt, Homo sapiens
  misc_RNA (1)...(19): siRNA sense strand
ucaaagaagcaaagcagga

SEQ ID NO: 2360952 - RNA, 19 nt, Homo sapiens
  misc_RNA (1)...(19): siRNA sense strand
ugaaauaccugauggcucu

SEQ ID NO: 2360953 - RNA, 19 nt, Homo sapiens
  misc_RNA (1)...(19): siRNA sense strand
cagauugugaugagccaua

SEQ ID NO: 2360954 - RNA, 19 nt, Homo sapiens
  misc_RNA (1)...(19): siRNA sense strand
cagaguucgaauugagauu

SEQ ID NO: 2360955 - RNA, 19 nt, Homo sapiens
  misc_RNA (1)...(19): siRNA sense strand
gcuauugagaagaaagcau

SEQ ID NO: 2360956 - RNA, 19 nt, Homo sapiens
  misc_RNA (1)...(19): siRNA sense strand
ccuaaacagaguucgaauu

SEQ ID NO: 2360957 - RNA, 19 nt, Homo sapiens
  misc_RNA (1)...(19): siRNA sense strand
uggcuaugguggaugauca

SEQ ID NO: 2360958 - RNA, 19 nt, Homo sapiens
  misc_RNA (1)...(19): siRNA sense strand
agacagcagcuuuggcaau

SEQ ID NO: 2360959 - RNA, 19 nt, Homo sapiens
  misc_RNA (1)...(19): siRNA sense strand
acaagaacgcugcagagaa

SEQ ID NO: 2360960 - RNA, 19 nt, Homo sapiens
  misc_RNA (1)...(19): siRNA sense strand
caguggcagugcagagaga

SEQ ID NO: 2360961 - RNA, 19 nt, Homo sapiens
  misc_RNA (1)...(19): siRNA sense strand
gguuauugaagaagaugga

SEQ ID NO: 2360962 - RNA, 19 nt, Homo sapiens
  misc_RNA (1)...(19): siRNA sense strand
cauuagaaaaggagaacca

SEQ ID NO: 2360963 - RNA, 19 nt, Homo sapiens
  misc_RNA (1)...(19): siRNA sense strand
aagcaaagcaggaagcauc

SEQ ID NO: 2360964 - RNA, 19 nt, Homo sapiens
  misc_RNA (1)...(19): siRNA sense strand
cauaauaaagccuguacca

SEQ ID NO: 2360965 - RNA, 19 nt, Homo sapiens
  misc_RNA (1)...(19): siRNA sense strand
ugaagaagauggaaccagu

SEQ ID NO: 2360966 - RNA, 19 nt, Homo sapiens
  misc_RNA (1)...(19): siRNA sense strand
aaaaggagaaccaagauaa

SEQ ID NO: 2360967 - RNA, 19 nt, Homo sapiens
  misc_RNA (1)...(19): siRNA sense strand
ccuuauaauacuaccuuca

SEQ ID NO: 2360968 - RNA, 19 nt, Homo sapiens
  misc_RNA (1)...(19): siRNA sense strand
gaauaaaauugaaggugac

SEQ ID NO: 2360969 - RNA, 19 nt, Homo sapiens
  misc_RNA (1)...(19): siRNA sense strand
gaucaaagaagcaaagcag

SEQ ID NO: 2360970 - RNA, 19 nt, Homo sapiens
  misc_RNA (1)...(19): siRNA sense strand
ccauaucagguuacucaaa

SEQ ID NO: 2360971 - RNA, 19 nt, Homo sapiens
  misc_RNA (1)...(19): siRNA sense strand
ggcuaugguggaugaucaa

SEQ ID NO: 2360972 - RNA, 19 nt, Homo sapiens
  misc_RNA (1)...(19): siRNA sense strand
cccugcaguuacagaggaa

SEQ ID NO: 2360973 - RNA, 19 nt, Homo sapiens
  misc_RNA (1)...(19): siRNA sense strand
caggaugagcaaagaggaa

SEQ ID NO: 2360974 - RNA, 19 nt, Homo sapiens
  misc_RNA (1)...(19): siRNA sense strand
agauggugucaaagagaaa

SEQ ID NO: 2360975 - RNA, 19 nt, Homo sapiens
  misc_RNA (1)...(19): siRNA sense strand
guacagaauuaaaagggaa

SEQ ID NO: 2360976 - RNA, 19 nt, Homo sapiens
  misc_RNA (1)...(19): siRNA sense strand
ggaugagcaaagaggaaga

SEQ ID NO: 2360977 - RNA, 19 nt, Homo sapiens
  misc_RNA (1)...(19): siRNA sense strand
ugaaccaguccgagugaaa

SEQ ID NO: 2360978 - RNA, 19 nt, Homo sapiens
  misc_RNA (1)...(19): siRNA sense strand
aagaagaagauggaggaaa

SEQ ID NO: 2360979 - RNA, 19 nt, Homo sapiens
  misc_RNA (1)...(19): siRNA sense strand
acacaaaaguggaccaaga

SEQ ID NO: 2360980 - RNA, 19 nt, Homo sapiens
  misc_RNA (1)...(19): siRNA sense strand
augaugacaacaaggaaua

SEQ ID NO: 2360981 - RNA, 19 nt, Homo sapiens
  misc_RNA (1)...(19): siRNA sense strand
gugacaauccugaagaaga

SEQ ID NO: 2360982 - RNA, 19 nt, Homo sapiens
  misc_RNA (1)...(19): siRNA sense strand
ugaacaaagcagaagacuu

SEQ ID NO: 2360983 - RNA, 19 nt, Homo sapiens
  misc_RNA (1)...(19): siRNA sense strand
ggaaauuacacaugugaac

SEQ ID NO: 2360984 - RNA, 19 nt, Homo sapiens
  misc_RNA (1)...(19): siRNA sense strand
caugcuagucaguggagaa

SEQ ID NO: 2360985 - RNA, 19 nt, Homo sapiens
  misc_RNA (1)...(19): siRNA sense strand
uugaagaacuggcagguca

SEQ ID NO: 2360986 - RNA, 19 nt, Homo sapiens
  misc_RNA (1)...(19): siRNA sense strand
gcacuuuggagcugaugaa

SEQ ID NO: 2360987 - RNA, 19 nt, Homo sapiens
  misc_RNA (1)...(19): siRNA sense strand
gcacuguugcagagguuau

SEQ ID NO: 2360988 - RNA, 19 nt, Homo sapiens
  misc_RNA (1)...(19): siRNA sense strand
cggauucaguggagagucu

SEQ ID NO: 2360989 - RNA, 19 nt, Homo sapiens
  misc_RNA (1)...(19): siRNA sense strand
ccuucagauucaaugcaaa

SEQ ID NO: 2360990 - RNA, 19 nt, Homo sapiens
  misc_RNA (1)...(19): siRNA sense strand
acuaaagcguagcaucaaa

SEQ ID NO: 2360991 - RNA, 19 nt, Homo sapiens
  misc_RNA (1)...(19): siRNA sense strand
ccugauguugugugguaua

SEQ ID NO: 2360992 - RNA, 19 nt, Homo sapiens
  misc_RNA (1)...(19): siRNA sense strand
cuucagauucaaugcaaau

SEQ ID NO: 2360993 - RNA, 19 nt, Homo sapiens
  misc_RNA (1)...(19): siRNA sense strand
gcauaauaauacagaaagg

SEQ ID NO: 2360994 - RNA, 19 nt, Homo sapiens
  misc_RNA (1)...(19): siRNA sense strand
augaaaugcccaucaagaa

SEQ ID NO: 2360995 - RNA, 19 nt, Homo sapiens
  misc_RNA (1)...(19): siRNA sense strand
guugugugguauaaggaau

SEQ ID NO: 2360996 - RNA, 19 nt, Homo sapiens
  misc_RNA (1)...(19): siRNA sense strand
cugaagauggugucaaaga

SEQ ID NO: 2360997 - RNA, 19 nt, Homo sapiens
  misc_RNA (1)...(19): siRNA sense strand
uugauugaguguacagaau

SEQ ID NO: 2360998 - RNA, 19 nt, Homo sapiens
  misc_RNA (1)...(19): siRNA sense strand
aggcuuaugugguacaaaa

SEQ ID NO: 2360999 - RNA, 19 nt, Homo sapiens
  misc_RNA (1)...(19): siRNA sense strand
cuugacuguugcagagaau

SEQ ID NO: 2361000 - RNA, 19 nt, Homo sapiens
  misc_RNA (1)...(19): siRNA sense strand
gaaucaggccugugcuaca

SEQ ID NO: 2361001 - RNA, 19 nt, Homo sapiens
  misc_RNA (1)...(19): siRNA sense strand
cagacauggaugacuuuaa

SEQ ID NO: 2361002 - RNA, 19 nt, Homo sapiens
  misc_RNA (1)...(19): siRNA sense strand
auaaggaaugcaagccaaa

SEQ ID NO: 2361003 - RNA, 19 nt, Homo sapiens
  misc_RNA (1)...(19): siRNA sense strand
uauaaggaaugcaagccaa

SEQ ID NO: 2361004 - RNA, 19 nt, Homo sapiens
  misc_RNA (1)...(19): siRNA sense strand
cuuuggagcugaugaaacu

SEQ ID NO: 2361005 - RNA, 19 nt, Homo sapiens
  misc_RNA (1)...(19): siRNA sense strand
agucaguggagaaaucaaa

SEQ ID NO: 2361006 - RNA, 19 nt, Homo sapiens
  misc_RNA (1)...(19): siRNA sense strand
caggaauuucacaggaaca

SEQ ID NO: 2361007 - RNA, 19 nt, Homo sapiens
  misc_RNA (1)...(19): siRNA sense strand
cugaucaaguggaagggau

SEQ ID NO: 2361008 - RNA, 19 nt, Homo sapiens
  misc_RNA (1)...(19): siRNA sense strand
ccuuaauaacacccugaaa

SEQ ID NO: 2361009 - RNA, 19 nt, Homo sapiens
  misc_RNA (1)...(19): siRNA sense strand
acagaaaggaaaugcucuu

SEQ ID NO: 2361010 - RNA, 19 nt, Homo sapiens
  misc_RNA (1)...(19): siRNA sense strand
aagaaguucaagaagaaga

SEQ ID NO: 2361011 - RNA, 19 nt, Homo sapiens
  misc_RNA (1)...(19): siRNA sense strand
acaaggaauaugaugccua

SEQ ID NO: 2361012 - RNA, 19 nt, Homo sapiens
  misc_RNA (1)...(19): siRNA sense strand
cccaggaauuucacaggaa

SEQ ID NO: 2361013 - RNA, 19 nt, Homo sapiens
  misc_RNA (1)...(19): siRNA sense strand
acauauugcaugaaggugu

SEQ ID NO: 2361014 - RNA, 19 nt, Homo sapiens
  misc_RNA (1)...(19): siRNA sense strand
ugacuguugcagagaauga

SEQ ID NO: 2361015 - RNA, 19 nt, Homo sapiens
  misc_RNA (1)...(19): siRNA sense strand
ucaagaagaagauggagga

SEQ ID NO: 2361016 - RNA, 19 nt, Homo sapiens
  misc_RNA (1)...(19): siRNA sense strand
aggaaaacuuguaagacga

SEQ ID NO: 2361017 - RNA, 19 nt, Homo sapiens
  misc_RNA (1)...(19): siRNA sense strand
uggguaagccucugaacau

SEQ ID NO: 2361018 - RNA, 19 nt, Homo sapiens
  misc_RNA (1)...(19): siRNA sense strand
gaauuaaaagggaaaguga

SEQ ID NO: 2361019 - RNA, 19 nt, Homo sapiens
  misc_RNA (1)...(19): siRNA sense strand
cugaaagauacccaggaau

SEQ ID NO: 2361020 - RNA, 19 nt, Homo sapiens
  misc_RNA (1)...(19): siRNA sense strand
uagcuuuaccagugauauu

SEQ ID NO: 2361021 - RNA, 19 nt, Homo sapiens
  misc_RNA (1)...(19): siRNA sense strand
cugugacaauccugaagaa

SEQ ID NO: 2361022 - RNA, 19 nt, Homo sapiens
  misc_RNA (1)...(19): siRNA sense strand
aggcacuguugcagagguu

SEQ ID NO: 2361023 - RNA, 19 nt, Homo sapiens
  misc_RNA (1)...(19): siRNA sense strand
uagauguccagcuggguaa

SEQ ID NO: 2361024 - RNA, 19 nt, Homo sapiens
  misc_RNA (1)...(19): siRNA sense strand
gggcuauggaagaaugaaa

SEQ ID NO: 2361025 - RNA, 19 nt, Homo sapiens
  misc_RNA (1)...(19): siRNA sense strand
gggcagugauaaagagacu

SEQ ID NO: 2361026 - RNA, 19 nt, Homo sapiens
  misc_RNA (1)...(19): siRNA sense strand
gagcuuagccugagggugu

SEQ ID NO: 2361027 - RNA, 19 nt, Homo sapiens
  misc_RNA (1)...(19): siRNA sense strand
gaaauuagcucugaggcaa

SEQ ID NO: 2361028 - RNA, 19 nt, Homo sapiens
  misc_RNA (1)...(19): siRNA sense strand
cuucuaaaggcaauggaaa

SEQ ID NO: 2361029 - RNA, 19 nt, Homo sapiens
  misc_RNA (1)...(19): siRNA sense strand
ucucgauuguugaaggaaa

SEQ ID NO: 2361030 - RNA, 19 nt, Homo sapiens
  misc_RNA (1)...(19): siRNA sense strand
uugcaggaucugaaagaaa

SEQ ID NO: 2361031 - RNA, 19 nt, Homo sapiens
  misc_RNA (1)...(19): siRNA sense strand
cgggaggagcugucauaaa

SEQ ID NO: 2361032 - RNA, 19 nt, Homo sapiens
  misc_RNA (1)...(19): siRNA sense strand
auggagaacuaaagguaca

SEQ ID NO: 2361033 - RNA, 19 nt, Homo sapiens
  misc_RNA (1)...(19): siRNA sense strand
ccgcaacacuggcugggaa

SEQ ID NO: 2361034 - RNA, 19 nt, Homo sapiens
  misc_RNA (1)...(19): siRNA sense strand
guggaugauuucagcucaa

SEQ ID NO: 2361035 - RNA, 19 nt, Homo sapiens
  misc_RNA (1)...(19): siRNA sense strand
agguacacuuggaugagaa

SEQ ID NO: 2361036 - RNA, 19 nt, Homo sapiens
  misc_RNA (1)...(19): siRNA sense strand
ugaaauuagcucugaggca

SEQ ID NO: 2361037 - RNA, 19 nt, Homo sapiens
  misc_RNA (1)...(19): siRNA sense strand
cagcagacguggucgccau

SEQ ID NO: 2361038 - RNA, 19 nt, Homo sapiens
  misc_RNA (1)...(19): siRNA sense strand
acuuggaugagaagauuaa

SEQ ID NO: 2361039 - RNA, 19 nt, Homo sapiens
  misc_RNA (1)...(19): siRNA sense strand
ccgaaaucuggauggauga

SEQ ID NO: 2361040 - RNA, 19 nt, Homo sapiens
  misc_RNA (1)...(19): siRNA sense strand
cagaauggcacuccgggaa

SEQ ID NO: 2361041 - RNA, 19 nt, Homo sapiens
  misc_RNA (1)...(19): siRNA sense strand
cucgauuguugaaggaaau

SEQ ID NO: 2361042 - RNA, 19 nt, Homo sapiens
  misc_RNA (1)...(19): siRNA sense strand
aggaaaucaucuuggugga

SEQ ID NO: 2361043 - RNA, 19 nt, Homo sapiens
  misc_RNA (1)...(19): siRNA sense strand
cuucaaacuggauaaguau

SEQ ID NO: 2361044 - RNA, 19 nt, Homo sapiens
  misc_RNA (1)...(19): siRNA sense strand
caucuauggaggagagaac

SEQ ID NO: 2361045 - RNA, 19 nt, Homo sapiens
  misc_RNA (1)...(19): siRNA sense strand
ucauaaacagagauaccaa

SEQ ID NO: 2361046 - RNA, 19 nt, Homo sapiens
  misc_RNA (1)...(19): siRNA sense strand
agaauggcacuccgggaaa

SEQ ID NO: 2361047 - RNA, 19 nt, Homo sapiens
  misc_RNA (1)...(19): siRNA sense strand
cugaagagggcgaaagaug

SEQ ID NO: 2361048 - RNA, 19 nt, Homo sapiens
  misc_RNA (1)...(19): siRNA sense strand
gagacaaagaagcacaaaa

SEQ ID NO: 2361049 - RNA, 19 nt, Homo sapiens
  misc_RNA (1)...(19): siRNA sense strand
gcaauggaaaccaagguga

SEQ ID NO: 2361050 - RNA, 19 nt, Homo sapiens
  misc_RNA (1)...(19): siRNA sense strand
uggaaaccaaggugaauga

SEQ ID NO: 2361051 - RNA, 19 nt, Homo sapiens
  misc_RNA (1)...(19): siRNA sense strand
guauccaggacuacugaaa

SEQ ID NO: 2361052 - RNA, 19 nt, Homo sapiens
  misc_RNA (1)...(19): siRNA sense strand
agguggaauugcaggaucu

SEQ ID NO: 2361053 - RNA, 19 nt, Homo sapiens
  misc_RNA (1)...(19): siRNA sense strand
uggaauugcaggaucugaa

SEQ ID NO: 2361054 - RNA, 19 nt, Homo sapiens
  misc_RNA (1)...(19): siRNA sense strand
acaccuucaaacuggauaa

SEQ ID NO: 2361055 - RNA, 19 nt, Homo sapiens
  misc_RNA (1)...(19): siRNA sense strand
ccucagugucauucucaua

SEQ ID NO: 2361056 - RNA, 19 nt, Homo sapiens
  misc_RNA (1)...(19): siRNA sense strand
aaaugaaacucuucccaca

SEQ ID NO: 2361057 - RNA, 19 nt, Homo sapiens
  misc_RNA (1)...(19): siRNA sense strand
ggauaaguaugaacuggca

SEQ ID NO: 2361058 - RNA, 19 nt, Homo sapiens
  misc_RNA (1)...(19): siRNA sense strand
gaggagagaacguggagcu

SEQ ID NO: 2361059 - RNA, 19 nt, Homo sapiens
  misc_RNA (1)...(19): siRNA sense strand
agcacaaacacauggucua

SEQ ID NO: 2361060 - RNA, 19 nt, Homo sapiens
  misc_RNA (1)...(19): siRNA sense strand
ucuggauggaugagcacaa

SEQ ID NO: 2361061 - RNA, 19 nt, Homo sapiens
  misc_RNA (1)...(19): siRNA sense strand
uguugaauauggugguaaa

SEQ ID NO: 2361062 - RNA, 19 nt, Homo sapiens
  misc_RNA (1)...(19): siRNA sense strand
ucaaaggacugaagggagu

SEQ ID NO: 2361063 - RNA, 19 nt, Homo sapiens
  misc_RNA (1)...(19): siRNA sense strand
uagaacaacucaagggcuu

SEQ ID NO: 2361064 - RNA, 19 nt, Homo sapiens
  misc_RNA (1)...(19): siRNA sense strand
augauggaccucaggaaua

SEQ ID NO: 2361065 - RNA, 19 nt, Homo sapiens
  misc_RNA (1)...(19): siRNA sense strand
uggaagauuuucagaagaa

SEQ ID NO: 2361066 - RNA, 19 nt, Homo sapiens
  misc_RNA (1)...(19): siRNA sense strand
augaaacaccugaaggcaa

SEQ ID NO: 2361067 - RNA, 19 nt, Homo sapiens
  misc_RNA (1)...(19): siRNA sense strand
aaguacuucucauggauaa

SEQ ID NO: 2361068 - RNA, 19 nt, Homo sapiens
  misc_RNA (1)...(19): siRNA sense strand
gcuaauaauauguaccuga

SEQ ID NO: 2361069 - RNA, 19 nt, Homo sapiens
  misc_RNA (1)...(19): siRNA sense strand
aaucaauagcagacaugaa

SEQ ID NO: 2361070 - RNA, 19 nt, Homo sapiens
  misc_RNA (1)...(19): siRNA sense strand
ccucaggaauaaagguguu

SEQ ID NO: 2361071 - RNA, 19 nt, Homo sapiens
  misc_RNA (1)...(19): siRNA sense strand
uugcuaaaccaguggacau

SEQ ID NO: 2361072 - RNA, 19 nt, Homo sapiens
  misc_RNA (1)...(19): siRNA sense strand
gugcguuaagcaagugaua

SEQ ID NO: 2361073 - RNA, 19 nt, Homo sapiens
  misc_RNA (1)...(19): siRNA sense strand
gguuucagagguugagcaa

SEQ ID NO: 2361074 - RNA, 19 nt, Homo sapiens
  misc_RNA (1)...(19): siRNA sense strand
cagcacacucagagacaga

SEQ ID NO: 2361075 - RNA, 19 nt, Homo sapiens
  misc_RNA (1)...(19): siRNA sense strand
aaccaaaagaacagcaaaa

SEQ ID NO: 2361076 - RNA, 19 nt, Homo sapiens
  misc_RNA (1)...(19): siRNA sense strand
gcauaaacaacaaucggau

SEQ ID NO: 2361077 - RNA, 19 nt, Homo sapiens
  misc_RNA (1)...(19): siRNA sense strand
uuucaaagcaugugacagu

SEQ ID NO: 2361078 - RNA, 19 nt, Homo sapiens
  misc_RNA (1)...(19): siRNA sense strand
uggcugaagcugaugaaca

SEQ ID NO: 2361079 - RNA, 19 nt, Homo sapiens
  misc_RNA (1)...(19): siRNA sense strand
agucauuggcugaagcuga

SEQ ID NO: 2361080 - RNA, 19 nt, Homo sapiens
  misc_RNA (1)...(19): siRNA sense strand
cuacaaaggagaaugugga

SEQ ID NO: 2361081 - RNA, 19 nt, Homo sapiens
  misc_RNA (1)...(19): siRNA sense strand
ucaguaaagacuuaagaga

SEQ ID NO: 2361082 - RNA, 19 nt, Homo sapiens
  misc_RNA (1)...(19): siRNA sense strand
uaaacgagucagaggaagu

SEQ ID NO: 2361083 - RNA, 19 nt, Homo sapiens
  misc_RNA (1)...(19): siRNA sense strand
aguaaugugaucagcaaga

SEQ ID NO: 2361084 - RNA, 19 nt, Homo sapiens
  misc_RNA (1)...(19): siRNA sense strand
agacuugcagagugcguua

SEQ ID NO: 2361085 - RNA, 19 nt, Homo sapiens
  misc_RNA (1)...(19): siRNA sense strand
gauaaagagacgacuggca

SEQ ID NO: 2361086 - RNA, 19 nt, Homo sapiens
  misc_RNA (1)...(19): siRNA sense strand
ccaaaaugauagaggacag

SEQ ID NO: 2361087 - RNA, 19 nt, Homo sapiens
  misc_RNA (1)...(19): siRNA sense strand
uagcagacaugaaggcguu

SEQ ID NO: 2361088 - RNA, 19 nt, Homo sapiens
  misc_RNA (1)...(19): siRNA sense strand
acugaagggaguagaaaau

SEQ ID NO: 2361089 - RNA, 19 nt, Homo sapiens
  misc_RNA (1)...(19): siRNA sense strand
agaagaaaccaaaagaaca

SEQ ID NO: 2361090 - RNA, 19 nt, Homo sapiens
  misc_RNA (1)...(19): siRNA sense strand
acgugaagucauuggcuga

SEQ ID NO: 2361091 - RNA, 19 nt, Homo sapiens
  misc_RNA (1)...(19): siRNA sense strand
ggaaguuguggcugagguu

SEQ ID NO: 2361092 - RNA, 19 nt, Homo sapiens
  misc_RNA (1)...(19): siRNA sense strand
aacaggaaguuguggcuga

SEQ ID NO: 2361093 - RNA, 19 nt, Homo sapiens
  misc_RNA (1)...(19): siRNA sense strand
gggaguagaaaauguauau

SEQ ID NO: 2361094 - RNA, 19 nt, Homo sapiens
  misc_RNA (1)...(19): siRNA sense strand
aucgagagaucaugaaaca

SEQ ID NO: 2361095 - RNA, 19 nt, Homo sapiens
  misc_RNA (1)...(19): siRNA sense strand
cugcagaaccccaaaguga

SEQ ID NO: 2361096 - RNA, 19 nt, Homo sapiens
  misc_RNA (1)...(19): siRNA sense strand
ccccaaagugacagaguuu

SEQ ID NO: 2361097 - RNA, 19 nt, Homo sapiens
  misc_RNA (1)...(19): siRNA sense strand
acaugaaggcguuuguuga

SEQ ID NO: 2361098 - RNA, 19 nt, Homo sapiens
  misc_RNA (1)...(19): siRNA sense strand
acucagaggacgagggcga

SEQ ID NO: 2361099 - RNA, 19 nt, Homo sapiens
  misc_RNA (1)...(19): siRNA sense strand
aguccgaggaggaggagaa

SEQ ID NO: 2361100 - RNA, 19 nt, Homo sapiens
  misc_RNA (1)...(19): siRNA sense strand
cuguggagguguucgggaa

SEQ ID NO: 2361101 - RNA, 19 nt, Homo sapiens
  misc_RNA (1)...(19): siRNA sense strand
cugccaaguccgaggagga

SEQ ID NO: 2361102 - RNA, 19 nt, Homo sapiens
  misc_RNA (1)...(19): siRNA sense strand
uguauaucacagagccaaa

SEQ ID NO: 2361103 - RNA, 19 nt, Homo sapiens
  misc_RNA (1)...(19): siRNA sense strand
ugaagaagcagcaaggcga

SEQ ID NO: 2361104 - RNA, 19 nt, Homo sapiens
  misc_RNA (1)...(19): siRNA sense strand
ccgaggaggaggagaagcu

SEQ ID NO: 2361105 - RNA, 19 nt, Homo sapiens
  misc_RNA (1)...(19): siRNA sense strand
augaaugaacuaauggaga

SEQ ID NO: 2361106 - RNA, 19 nt, Homo sapiens
  misc_RNA (1)...(19): siRNA sense strand
acgacuacucagaggacga

SEQ ID NO: 2361107 - RNA, 19 nt, Homo sapiens
  misc_RNA (1)...(19): siRNA sense strand
ggaugauuguggcagcaga

SEQ ID NO: 2361108 - RNA, 19 nt, Homo sapiens
  misc_RNA (1)...(19): siRNA sense strand
ggaugauuguggcagcaga

SEQ ID NO: 2361109 - RNA, 19 nt, Homo sapiens
  misc_RNA (1)...(19): siRNA sense strand
gggaaacaguacugggagu

SEQ ID NO: 2361110 - RNA, 19 nt, Homo sapiens
  misc_RNA (1)...(19): siRNA sense strand
ugacgauggcgaggagaaa

SEQ ID NO: 2361111 - RNA, 19 nt, Homo sapiens
  misc_RNA (1)...(19): siRNA sense strand
acuauacggcugagugcaa

SEQ ID NO: 2361112 - RNA, 19 nt, Homo sapiens
  misc_RNA (1)...(19): siRNA sense strand
gcacagacuauacggcuga

SEQ ID NO: 2361113 - RNA, 19 nt, Homo sapiens
  misc_RNA (1)...(19): siRNA sense strand
gggacagcugggaggacau

SEQ ID NO: 2361114 - RNA, 19 nt, Homo sapiens
  misc_RNA (1)...(19): siRNA sense strand
gaaauaucucugacggcuu

SEQ ID NO: 2361115 - RNA, 19 nt, Homo sapiens
  misc_RNA (1)...(19): siRNA sense strand
augacgauggcgaggagaa

SEQ ID NO: 2361116 - RNA, 19 nt, Homo sapiens
  misc_RNA (1)...(19): siRNA sense strand
uucugaaaccugaggaaga

SEQ ID NO: 2361117 - RNA, 19 nt, Homo sapiens
  misc_RNA (1)...(19): siRNA sense strand
ggcccaguccaaagggaau

SEQ ID NO: 2361118 - RNA, 19 nt, Homo sapiens
  misc_RNA (1)...(19): siRNA sense strand
gaggaugaguacacggucu

SEQ ID NO: 2361119 - RNA, 19 nt, Homo sapiens
  misc_RNA (1)...(19): siRNA sense strand
gcaucuacaucucaggcau

SEQ ID NO: 2361120 - RNA, 19 nt, Homo sapiens
  misc_RNA (1)...(19): siRNA sense strand
aggaugaguacacggucua

SEQ ID NO: 2361121 - RNA, 19 nt, Homo sapiens
  misc_RNA (1)...(19): siRNA sense strand
cgugaaagcggaugaaaau

SEQ ID NO: 2361122 - RNA, 19 nt, Homo sapiens
  misc_RNA (1)...(19): siRNA sense strand
ucgugaaagcggaugaaaa

SEQ ID NO: 2361123 - RNA, 19 nt, Homo sapiens
  misc_RNA (1)...(19): siRNA sense strand
aggagcaccgugaggcaaa

SEQ ID NO: 2361124 - RNA, 19 nt, Homo sapiens
  misc_RNA (1)...(19): siRNA sense strand
cugccgacgaucacagaua

SEQ ID NO: 2361125 - RNA, 19 nt, Homo sapiens
  misc_RNA (1)...(19): siRNA sense strand
agaauaaucccuuugccaa

SEQ ID NO: 2361126 - RNA, 19 nt, Homo sapiens
  misc_RNA (1)...(19): siRNA sense strand
acgaagugggcacggaaau

SEQ ID NO: 2361127 - RNA, 19 nt, Homo sapiens
  misc_RNA (1)...(19): siRNA sense strand
gagaauaaucccuuugcca

SEQ ID NO: 2361128 - RNA, 19 nt, Homo sapiens
  misc_RNA (1)...(19): siRNA sense strand
ugaaagagaacuguggcua

SEQ ID NO: 2361129 - RNA, 19 nt, Homo sapiens
  misc_RNA (1)...(19): siRNA sense strand
aguuacaaagugaagguga

SEQ ID NO: 2361130 - RNA, 19 nt, Homo sapiens
  misc_RNA (1)...(19): siRNA sense strand
ucccaauaccagugugaga

SEQ ID NO: 2361131 - RNA, 19 nt, Homo sapiens
  misc_RNA (1)...(19): siRNA sense strand
cgugaaagcggaugaaaau

SEQ ID NO: 2361132 - RNA, 19 nt, Homo sapiens
  misc_RNA (1)...(19): siRNA sense strand
ucgugaaagcggaugaaaa

SEQ ID NO: 2361133 - RNA, 19 nt, Homo sapiens
  misc_RNA (1)...(19): siRNA sense strand
aggagcaccgugaggcaaa

SEQ ID NO: 2361134 - RNA, 19 nt, Homo sapiens
  misc_RNA (1)...(19): siRNA sense strand
cugccgacgaucacagaua

SEQ ID NO: 2361135 - RNA, 19 nt, Homo sapiens
  misc_RNA (1)...(19): siRNA sense strand
agaauaaucccuuugccaa

SEQ ID NO: 2361136 - RNA, 19 nt, Homo sapiens
  misc_RNA (1)...(19): siRNA sense strand
acgaagugggcacggaaau

SEQ ID NO: 2361137 - RNA, 19 nt, Homo sapiens
  misc_RNA (1)...(19): siRNA sense strand
gagaauaaucccuuugcca

SEQ ID NO: 2361138 - RNA, 19 nt, Homo sapiens
  misc_RNA (1)...(19): siRNA sense strand
ugaaagagaacuguggcua

SEQ ID NO: 2361139 - RNA, 19 nt, Homo sapiens
  misc_RNA (1)...(19): siRNA sense strand
aguuacaaagugaagguga

SEQ ID NO: 2361140 - RNA, 19 nt, Homo sapiens
  misc_RNA (1)...(19): siRNA sense strand
ucccaauaccagugugaga

SEQ ID NO: 2361141 - RNA, 19 nt, Homo sapiens
  misc_RNA (1)...(19): siRNA sense strand
cgugaaagcggaugaaaau

SEQ ID NO: 2361142 - RNA, 19 nt, Homo sapiens
  misc_RNA (1)...(19): siRNA sense strand
ucgugaaagcggaugaaaa

SEQ ID NO: 2361143 - RNA, 19 nt, Homo sapiens
  misc_RNA (1)...(19): siRNA sense strand
aggagcaccgugaggcaaa

SEQ ID NO: 2361144 - RNA, 19 nt, Homo sapiens
  misc_RNA (1)...(19): siRNA sense strand
cugccgacgaucacagaua

SEQ ID NO: 2361145 - RNA, 19 nt, Homo sapiens
  misc_RNA (1)...(19): siRNA sense strand
agaauaaucccuuugccaa

SEQ ID NO: 2361146 - RNA, 19 nt, Homo sapiens
  misc_RNA (1)...(19): siRNA sense strand
acgaagugggcacggaaau

SEQ ID NO: 2361147 - RNA, 19 nt, Homo sapiens
  misc_RNA (1)...(19): siRNA sense strand
gagaauaaucccuuugcca

SEQ ID NO: 2361148 - RNA, 19 nt, Homo sapiens
  misc_RNA (1)...(19): siRNA sense strand
ugaaagagaacuguggcua

SEQ ID NO: 2361149 - RNA, 19 nt, Homo sapiens
  misc_RNA (1)...(19): siRNA sense strand
aguuacaaagugaagguga

SEQ ID NO: 2361150 - RNA, 19 nt, Homo sapiens
  misc_RNA (1)...(19): siRNA sense strand
ucccaauaccagugugaga

SEQ ID NO: 2361151 - RNA, 19 nt, Homo sapiens
  misc_RNA (1)...(19): siRNA sense strand
cgugaaagcggaugaaaau

SEQ ID NO: 2361152 - RNA, 19 nt, Homo sapiens
  misc_RNA (1)...(19): siRNA sense strand
ucgugaaagcggaugaaaa

SEQ ID NO: 2361153 - RNA, 19 nt, Homo sapiens
  misc_RNA (1)...(19): siRNA sense strand
aggagcaccgugaggcaaa

SEQ ID NO: 2361154 - RNA, 19 nt, Homo sapiens
  misc_RNA (1)...(19): siRNA sense strand
cugccgacgaucacagaua

SEQ ID NO: 2361155 - RNA, 19 nt, Homo sapiens
  misc_RNA (1)...(19): siRNA sense strand
agaauaaucccuuugccaa

SEQ ID NO: 2361156 - RNA, 19 nt, Homo sapiens
  misc_RNA (1)...(19): siRNA sense strand
acgaagugggcacggaaau

SEQ ID NO: 2361157 - RNA, 19 nt, Homo sapiens
  misc_RNA (1)...(19): siRNA sense strand
gagaauaaucccuuugcca

SEQ ID NO: 2361158 - RNA, 19 nt, Homo sapiens
  misc_RNA (1)...(19): siRNA sense strand
ugaaagagaacuguggcua

SEQ ID NO: 2361159 - RNA, 19 nt, Homo sapiens
  misc_RNA (1)...(19): siRNA sense strand
aguuacaaagugaagguga

SEQ ID NO: 2361160 - RNA, 19 nt, Homo sapiens
  misc_RNA (1)...(19): siRNA sense strand
ucccaauaccagugugaga

SEQ ID NO: 2361161 - RNA, 19 nt, Homo sapiens
  misc_RNA (1)...(19): siRNA sense strand
augagaugguggugaagaa

SEQ ID NO: 2361162 - RNA, 19 nt, Homo sapiens
  misc_RNA (1)...(19): siRNA sense strand
ggaugaagaccaaagguga

SEQ ID NO: 2361163 - RNA, 19 nt, Homo sapiens
  misc_RNA (1)...(19): siRNA sense strand
gggaaaauuuuguggcuga

SEQ ID NO: 2361164 - RNA, 19 nt, Homo sapiens
  misc_RNA (1)...(19): siRNA sense strand
ggaucaagguggagagcug

SEQ ID NO: 2361165 - RNA, 19 nt, Homo sapiens
  misc_RNA (1)...(19): siRNA sense strand
gagcagaggaugaagacca

SEQ ID NO: 2361166 - RNA, 19 nt, Homo sapiens
  misc_RNA (1)...(19): siRNA sense strand
gcagagaggagguggccau

SEQ ID NO: 2361167 - RNA, 19 nt, Homo sapiens
  misc_RNA (1)...(19): siRNA sense strand
augaauaaggugaagaaga

SEQ ID NO: 2361168 - RNA, 19 nt, Homo sapiens
  misc_RNA (1)...(19): siRNA sense strand
cuuuaaacgucauggagca

SEQ ID NO: 2361169 - RNA, 19 nt, Homo sapiens
  misc_RNA (1)...(19): siRNA sense strand
gguugaagcuuauugcaga

SEQ ID NO: 2361170 - RNA, 19 nt, Homo sapiens
  misc_RNA (1)...(19): siRNA sense strand
guggauugcaguugggaga

SEQ ID NO: 2361171 - RNA, 19 nt, Homo sapiens
  misc_RNA (1)...(19): siRNA sense strand
cuuggaaagaugugagaca

SEQ ID NO: 2361172 - RNA, 19 nt, Homo sapiens
  misc_RNA (1)...(19): siRNA sense strand
gcauugggguugagcgaau

SEQ ID NO: 2361173 - RNA, 19 nt, Homo sapiens
  misc_RNA (1)...(19): siRNA sense strand
ccauagauaaacuagacaa

SEQ ID NO: 2361174 - RNA, 19 nt, Homo sapiens
  misc_RNA (1)...(19): siRNA sense strand
gagcaaauguuucaggauc

SEQ ID NO: 2361175 - RNA, 19 nt, Homo sapiens
  misc_RNA (1)...(19): siRNA sense strand
ccaaaggguaccagggauc

SEQ ID NO: 2361176 - RNA, 19 nt, Homo sapiens
  misc_RNA (1)...(19): siRNA sense strand
ccagacuaucccagaacaa

SEQ ID NO: 2361177 - RNA, 19 nt, Homo sapiens
  misc_RNA (1)...(19): siRNA sense strand
augaugggcuggugggcau

SEQ ID NO: 2361178 - RNA, 19 nt, Homo sapiens
  misc_RNA (1)...(19): siRNA sense strand
ggaucuuaguccucagcau

SEQ ID NO: 2361179 - RNA, 19 nt, Homo sapiens
  misc_RNA (1)...(19): siRNA sense strand
ugacugagaaguauggaga

SEQ ID NO: 2361180 - RNA, 19 nt, Homo sapiens
  misc_RNA (1)...(19): siRNA sense strand
gaaucaaggcagagaugcu

SEQ ID NO: 2361181 - RNA, 19 nt, Homo sapiens
  misc_RNA (1)...(19): siRNA sense strand
augcagaguguuugaagau

SEQ ID NO: 2361182 - RNA, 19 nt, Homo sapiens
  misc_RNA (1)...(19): siRNA sense strand
gugagcaagaacugaaaga

SEQ ID NO: 2361183 - RNA, 19 nt, Homo sapiens
  misc_RNA (1)...(19): siRNA sense strand
agcagaggaugaagaccaa

SEQ ID NO: 2361184 - RNA, 19 nt, Homo sapiens
  misc_RNA (1)...(19): siRNA sense strand
agcauaugguugugaggga

SEQ ID NO: 2361185 - RNA, 19 nt, Homo sapiens
  misc_RNA (1)...(19): siRNA sense strand
agaccaaaggugagaaggu

SEQ ID NO: 2361186 - RNA, 19 nt, Homo sapiens
  misc_RNA (1)...(19): siRNA sense strand
cguuaucuggccaugaaua

SEQ ID NO: 2361187 - RNA, 19 nt, Homo sapiens
  misc_RNA (1)...(19): siRNA sense strand
aauaaggugaagaagauga

SEQ ID NO: 2361188 - RNA, 19 nt, Homo sapiens
  misc_RNA (1)...(19): siRNA sense strand
ggugcggacuacagagacu

SEQ ID NO: 2361189 - RNA, 19 nt, Homo sapiens
  misc_RNA (1)...(19): siRNA sense strand
ugaaagaaggggucaucaa

SEQ ID NO: 2361190 - RNA, 19 nt, Homo sapiens
  misc_RNA (1)...(19): siRNA sense strand
cauaugguugugagggaga

SEQ ID NO: 2361191 - RNA, 19 nt, Homo sapiens
  misc_RNA (1)...(19): siRNA sense strand
gagcccaaccauaguccaa

SEQ ID NO: 2361192 - RNA, 19 nt, Homo sapiens
  misc_RNA (1)...(19): siRNA sense strand
gggaagaggugaagaauga

SEQ ID NO: 2361193 - RNA, 19 nt, Homo sapiens
  misc_RNA (1)...(19): siRNA sense strand
agaaugagauggugggaga

SEQ ID NO: 2361194 - RNA, 19 nt, Homo sapiens
  misc_RNA (1)...(19): siRNA sense strand
gagaagaccuuguggagga

SEQ ID NO: 2361195 - RNA, 19 nt, Homo sapiens
  misc_RNA (1)...(19): siRNA sense strand
gguaaacgaucgacgcauu

SEQ ID NO: 2361196 - RNA, 19 nt, Homo sapiens
  misc_RNA (1)...(19): siRNA sense strand
caguagacaagcuggacaa

SEQ ID NO: 2361197 - RNA, 19 nt, Homo sapiens
  misc_RNA (1)...(19): siRNA sense strand
cugaagaucaugugcgaga

SEQ ID NO: 2361198 - RNA, 19 nt, Homo sapiens
  misc_RNA (1)...(19): siRNA sense strand
ccugggaagaggugaagaa

SEQ ID NO: 2361199 - RNA, 19 nt, Homo sapiens
  misc_RNA (1)...(19): siRNA sense strand
aaggaaacacugaugggaa

SEQ ID NO: 2361200 - RNA, 19 nt, Homo sapiens
  misc_RNA (1)...(19): siRNA sense strand
agaagaagcugcuagagga

SEQ ID NO: 2361201 - RNA, 19 nt, Homo sapiens
  misc_RNA (1)...(19): siRNA sense strand
gggaauucuaccaguguga

SEQ ID NO: 2361202 - RNA, 19 nt, Homo sapiens
  misc_RNA (1)...(19): siRNA sense strand
cugcuagaggaaagacuaa

SEQ ID NO: 2361203 - RNA, 19 nt, Homo sapiens
  misc_RNA (1)...(19): siRNA sense strand
augaauaaacugaccaaca

SEQ ID NO: 2361204 - RNA, 19 nt, Homo sapiens
  misc_RNA (1)...(19): siRNA sense strand
ugaccaacauuaaacgcua

SEQ ID NO: 2361205 - RNA, 19 nt, Homo sapiens
  misc_RNA (1)...(19): siRNA sense strand
gguggauguccgaagagaa

SEQ ID NO: 2361206 - RNA, 19 nt, Homo sapiens
  misc_RNA (1)...(19): siRNA sense strand
ucgaggaggagguggcgaa

SEQ ID NO: 2361207 - RNA, 19 nt, Homo sapiens
  misc_RNA (1)...(19): siRNA sense strand
ccagcaacaugguggggua

SEQ ID NO: 2361208 - RNA, 19 nt, Homo sapiens
  misc_RNA (1)...(19): siRNA sense strand
aacagaaauuugugcucaa

SEQ ID NO: 2361209 - RNA, 19 nt, Homo sapiens
  misc_RNA (1)...(19): siRNA sense strand
gcgagaagguguuugacgu

SEQ ID NO: 2361210 - RNA, 19 nt, Homo sapiens
  misc_RNA (1)...(19): siRNA sense strand
gacuagaggcuuuggagga

SEQ ID NO: 2361211 - RNA, 19 nt, Homo sapiens
  misc_RNA (1)...(19): siRNA sense strand
aggcuuuggaggagaagau

SEQ ID NO: 2361212 - RNA, 19 nt, Homo sapiens
  misc_RNA (1)...(19): siRNA sense strand
agaggaaagacuaaagcuu

SEQ ID NO: 2361213 - RNA, 19 nt, Homo sapiens
  misc_RNA (1)...(19): siRNA sense strand
ggaacagagacuagaggcu

SEQ ID NO: 2361214 - RNA, 19 nt, Homo sapiens
  misc_RNA (1)...(19): siRNA sense strand
acuuccuggucaagguaaa

SEQ ID NO: 2361215 - RNA, 19 nt, Homo sapiens
  misc_RNA (1)...(19): siRNA sense strand
gaggagaagauacggacca

SEQ ID NO: 2361216 - RNA, 19 nt, Homo sapiens
  misc_RNA (1)...(19): siRNA sense strand
accacauagcaaagguaua

SEQ ID NO: 2361217 - RNA, 19 nt, Homo sapiens
  misc_RNA (1)...(19): siRNA sense strand
uguccugggaagaggugaa

SEQ ID NO: 2361218 - RNA, 19 nt, Homo sapiens
  misc_RNA (1)...(19): siRNA sense strand
gaauucuaccagugugauu

SEQ ID NO: 2361219 - RNA, 19 nt, Homo sapiens
  misc_RNA (1)...(19): siRNA sense strand
ggguccugaugaaagcaaa

SEQ ID NO: 2361220 - RNA, 19 nt, Homo sapiens
  misc_RNA (1)...(19): siRNA sense strand
uguacaagaagaacccaaa

SEQ ID NO: 2361221 - RNA, 19 nt, Homo sapiens
  misc_RNA (1)...(19): siRNA sense strand
ggaggaaaucaaaaggaga

SEQ ID NO: 2361222 - RNA, 19 nt, Homo sapiens
  misc_RNA (1)...(19): siRNA sense strand
ggucaagguaaacgaucga

SEQ ID NO: 2361223 - RNA, 19 nt, Homo sapiens
  misc_RNA (1)...(19): siRNA sense strand
gaagaggugaagaaugaga

SEQ ID NO: 2361224 - RNA, 19 nt, Homo sapiens
  misc_RNA (1)...(19): siRNA sense strand
aagaccuuguggaggaaau

SEQ ID NO: 2361225 - RNA, 19 nt, Homo sapiens
  misc_RNA (1)...(19): siRNA sense strand
caguguggcugcuggagga

SEQ ID NO: 2361226 - RNA, 19 nt, Homo sapiens
  misc_RNA (1)...(19): siRNA sense strand
gcauugggguggagcggau

SEQ ID NO: 2361227 - RNA, 19 nt, Homo sapiens
  misc_RNA (1)...(19): siRNA sense strand
ggaucaaggcugagcugcu

SEQ ID NO: 2361228 - RNA, 19 nt, Homo sapiens
  misc_RNA (1)...(19): siRNA sense strand
uggaguacaacuucaacaa

SEQ ID NO: 2361229 - RNA, 19 nt, Homo sapiens
  misc_RNA (1)...(19): siRNA sense strand
uggaguacaacuucaacaa

SEQ ID NO: 2361230 - RNA, 19 nt, Homo sapiens
  misc_RNA (1)...(19): siRNA sense strand
uggaguacaacuucaacaa

SEQ ID NO: 2361231 - RNA, 19 nt, Homo sapiens
  misc_RNA (1)...(19): siRNA sense strand
aggaggaaauggagcgcaa

SEQ ID NO: 2361232 - RNA, 19 nt, Homo sapiens
  misc_RNA (1)...(19): siRNA sense strand
aggagaaccaaaugagaau

SEQ ID NO: 2361233 - RNA, 19 nt, Homo sapiens
  misc_RNA (1)...(19): siRNA sense strand
agaaguacguggagcggau

SEQ ID NO: 2361234 - RNA, 19 nt, Homo sapiens
  misc_RNA (1)...(19): siRNA sense strand
ggaucguggaggaggccaa

SEQ ID NO: 2361235 - RNA, 19 nt, Homo sapiens
  misc_RNA (1)...(19): siRNA sense strand
uguuugagaauguggacaa

SEQ ID NO: 2361236 - RNA, 19 nt, Homo sapiens
  misc_RNA (1)...(19): siRNA sense strand
ccagagagaccuuggagga

SEQ ID NO: 2361237 - RNA, 19 nt, Homo sapiens
  misc_RNA (1)...(19): siRNA sense strand
ggguagacgagucagaaaa

SEQ ID NO: 2361238 - RNA, 19 nt, Homo sapiens
  misc_RNA (1)...(19): siRNA sense strand
cccuguacacgaugggaaa

SEQ ID NO: 2361239 - RNA, 19 nt, Homo sapiens
  misc_RNA (1)...(19): siRNA sense strand
aagagaggaucguggagga

SEQ ID NO: 2361240 - RNA, 19 nt, Homo sapiens
  misc_RNA (1)...(19): siRNA sense strand
gggaaaggagacaugcgua

SEQ ID NO: 2361241 - RNA, 19 nt, Homo sapiens
  misc_RNA (1)...(19): siRNA sense strand
cuagaaaaggagaaccaaa

SEQ ID NO: 2361242 - RNA, 19 nt, Homo sapiens
  misc_RNA (1)...(19): siRNA sense strand
ucuugaaaggcaacauuaa

SEQ ID NO: 2361243 - RNA, 19 nt, Homo sapiens
  misc_RNA (1)...(19): siRNA sense strand
aggacuucuugaaaggcaa

SEQ ID NO: 2361244 - RNA, 19 nt, Homo sapiens
  misc_RNA (1)...(19): siRNA sense strand
acauuaagaaggagcuguu

SEQ ID NO: 2361245 - RNA, 19 nt, Homo sapiens
  misc_RNA (1)...(19): siRNA sense strand
agaacgagccggagcuacu

SEQ ID NO: 2361246 - RNA, 19 nt, Homo sapiens
  misc_RNA (1)...(19): siRNA sense strand
uagaaaaggagaaccaaau

SEQ ID NO: 2361247 - RNA, 19 nt, Homo sapiens
  misc_RNA (1)...(19): siRNA sense strand
ggaccaaggaagcacacga

SEQ ID NO: 2361248 - RNA, 19 nt, Homo sapiens
  misc_RNA (1)...(19): siRNA sense strand
gggguagacgagucagaaa

SEQ ID NO: 2361249 - RNA, 19 nt, Homo sapiens
  misc_RNA (1)...(19): siRNA sense strand
ggaugaacgcccuggaccu

SEQ ID NO: 2361250 - RNA, 19 nt, Homo sapiens
  misc_RNA (1)...(19): siRNA sense strand
ggacaaucuuuccggugga

SEQ ID NO: 2361251 - RNA, 19 nt, Homo sapiens
  misc_RNA (1)...(19): siRNA sense strand
cgacaagaccccaucgaau

SEQ ID NO: 2361252 - RNA, 19 nt, Homo sapiens
  misc_RNA (1)...(19): siRNA sense strand
ggacaaucuuuccggugga

SEQ ID NO: 2361253 - RNA, 19 nt, Homo sapiens
  misc_RNA (1)...(19): siRNA sense strand
cgacaagaccccaucgaau

SEQ ID NO: 2361254 - RNA, 19 nt, Homo sapiens
  misc_RNA (1)...(19): siRNA sense strand
ggacaaucuuuccggugga

SEQ ID NO: 2361255 - RNA, 19 nt, Homo sapiens
  misc_RNA (1)...(19): siRNA sense strand
cgacaagaccccaucgaau

SEQ ID NO: 2361256 - RNA, 19 nt, Homo sapiens
  misc_RNA (1)...(19): siRNA sense strand
ggacaaucuuuccggugga

SEQ ID NO: 2361257 - RNA, 19 nt, Homo sapiens
  misc_RNA (1)...(19): siRNA sense strand
cgacaagaccccaucgaau

SEQ ID NO: 2361258 - RNA, 19 nt, Homo sapiens
  misc_RNA (1)...(19): siRNA sense strand
ggacaaucuuuccggugga

SEQ ID NO: 2361259 - RNA, 19 nt, Homo sapiens
  misc_RNA (1)...(19): siRNA sense strand
cgacaagaccccaucgaau

SEQ ID NO: 2361260 - RNA, 19 nt, Homo sapiens
  misc_RNA (1)...(19): siRNA sense strand
ggacaaucuuuccggugga

SEQ ID NO: 2361261 - RNA, 19 nt, Homo sapiens
  misc_RNA (1)...(19): siRNA sense strand
cgacaagaccccaucgaau

SEQ ID NO: 2361262 - RNA, 19 nt, Homo sapiens
  misc_RNA (1)...(19): siRNA sense strand
ggacaaucuuuccggugga

SEQ ID NO: 2361263 - RNA, 19 nt, Homo sapiens
  misc_RNA (1)...(19): siRNA sense strand
cgacaagaccccaucgaau

SEQ ID NO: 2361264 - RNA, 19 nt, Homo sapiens
  misc_RNA (1)...(19): siRNA sense strand
ggacaaucuuuccggugga

SEQ ID NO: 2361265 - RNA, 19 nt, Homo sapiens
  misc_RNA (1)...(19): siRNA sense strand
cgacaagaccccaucgaau

SEQ ID NO: 2361266 - RNA, 19 nt, Homo sapiens
  misc_RNA (1)...(19): siRNA sense strand
cggaagagcagaaagggaa

SEQ ID NO: 2361267 - RNA, 19 nt, Homo sapiens
  misc_RNA (1)...(19): siRNA sense strand
cuguggagaagcaggauaa

SEQ ID NO: 2361268 - RNA, 19 nt, Homo sapiens
  misc_RNA (1)...(19): siRNA sense strand
gaagcaggauaaugaaaca

SEQ ID NO: 2361269 - RNA, 19 nt, Homo sapiens
  misc_RNA (1)...(19): siRNA sense strand
uggagaagcaggauaauga

SEQ ID NO: 2361270 - RNA, 19 nt, Homo sapiens
  misc_RNA (1)...(19): siRNA sense strand
gagaagcaggauaaugaaa

SEQ ID NO: 2361271 - RNA, 19 nt, Homo sapiens
  misc_RNA (1)...(19): siRNA sense strand
gugcuguggaagaggaaga

SEQ ID NO: 2361272 - RNA, 19 nt, Homo sapiens
  misc_RNA (1)...(19): siRNA sense strand
gcguauagcucuuacucca

SEQ ID NO: 2361273 - RNA, 19 nt, Homo sapiens
  misc_RNA (1)...(19): siRNA sense strand
ccggaagagcagaaaggga

SEQ ID NO: 2361274 - RNA, 19 nt, Homo sapiens
  misc_RNA (1)...(19): siRNA sense strand
ccuacaaacaagucguuga

SEQ ID NO: 2361275 - RNA, 19 nt, Homo sapiens
  misc_RNA (1)...(19): siRNA sense strand
cagaaagggaaguguccga

SEQ ID NO: 2361276 - RNA, 19 nt, Homo sapiens
  misc_RNA (1)...(19): siRNA sense strand
gggccagcguauagcucuu

SEQ ID NO: 2361277 - RNA, 19 nt, Homo sapiens
  misc_RNA (1)...(19): siRNA sense strand
uggaacaaugauucugaaa

SEQ ID NO: 2361278 - RNA, 19 nt, Homo sapiens
  misc_RNA (1)...(19): siRNA sense strand
acacagcagcaauggcaau

SEQ ID NO: 2361279 - RNA, 19 nt, Homo sapiens
  misc_RNA (1)...(19): siRNA sense strand
ccuucaucgugcuguggaa

SEQ ID NO: 2361280 - RNA, 19 nt, Homo sapiens
  misc_RNA (1)...(19): siRNA sense strand
ggauucaaaugcuagcaga

SEQ ID NO: 2361281 - RNA, 19 nt, Homo sapiens
  misc_RNA (1)...(19): siRNA sense strand
gcaaaauacaggaggacag

SEQ ID NO: 2361282 - RNA, 19 nt, Homo sapiens
  misc_RNA (1)...(19): siRNA sense strand
uggugauguccuugcaaau

SEQ ID NO: 2361283 - RNA, 19 nt, Homo sapiens
  misc_RNA (1)...(19): siRNA sense strand
ugaaaagaacggagcuuga

SEQ ID NO: 2361284 - RNA, 19 nt, Homo sapiens
  misc_RNA (1)...(19): siRNA sense strand
caacuugggccaugggcuu

SEQ ID NO: 2361285 - RNA, 19 nt, Homo sapiens
  misc_RNA (1)...(19): siRNA sense strand
gcucaagcaccauggcuca

SEQ ID NO: 2361286 - RNA, 19 nt, Homo sapiens
  misc_RNA (1)...(19): siRNA sense strand
ccuagaacgccuacgggau

SEQ ID NO: 2361287 - RNA, 19 nt, Homo sapiens
  misc_RNA (1)...(19): siRNA sense strand
gggcaguuggugaagcaga

SEQ ID NO: 2361288 - RNA, 19 nt, Homo sapiens
  misc_RNA (1)...(19): siRNA sense strand
gcuaugaggugguugggcu

SEQ ID NO: 2361289 - RNA, 19 nt, Homo sapiens
  misc_RNA (1)...(19): siRNA sense strand
agaccauggcggaggugaa

SEQ ID NO: 2361290 - RNA, 19 nt, Homo sapiens
  misc_RNA (1)...(19): siRNA sense strand
agaagauggugcugcccaa

SEQ ID NO: 2361291 - RNA, 19 nt, Homo sapiens
  misc_RNA (1)...(19): siRNA sense strand
aguugaaaucugaggccau

SEQ ID NO: 2361292 - RNA, 19 nt, Homo sapiens
  misc_RNA (1)...(19): siRNA sense strand
gccgcaaggugaagagcca

SEQ ID NO: 2361293 - RNA, 19 nt, Homo sapiens
  misc_RNA (1)...(19): siRNA sense strand
ccuuucaguccguguuuaa

SEQ ID NO: 2361294 - RNA, 19 nt, Homo sapiens
  misc_RNA (1)...(19): siRNA sense strand
aagaaaauggcgacaagaa

SEQ ID NO: 2361295 - RNA, 19 nt, Homo sapiens
  misc_RNA (1)...(19): siRNA sense strand
uggcggaggugaagcagca

SEQ ID NO: 2361296 - RNA, 19 nt, Homo sapiens
  misc_RNA (1)...(19): siRNA sense strand
cggccagcgaguacgacua

SEQ ID NO: 2361297 - RNA, 19 nt, Homo sapiens
  misc_RNA (1)...(19): siRNA sense strand
aguacgacuacgugagcuu

SEQ ID NO: 2361298 - RNA, 19 nt, Homo sapiens
  misc_RNA (1)...(19): siRNA sense strand
cguaauugaugguuggcaa

SEQ ID NO: 2361299 - RNA, 19 nt, Homo sapiens
  misc_RNA (1)...(19): siRNA sense strand
guacaaacuugcagcccaa

SEQ ID NO: 2361300 - RNA, 19 nt, Homo sapiens
  misc_RNA (1)...(19): siRNA sense strand
ccgaagaugacgacgaaga

SEQ ID NO: 2361301 - RNA, 19 nt, Homo sapiens
  misc_RNA (1)...(19): siRNA sense strand
gcagacucccugagagcaa

SEQ ID NO: 2361302 - RNA, 19 nt, Homo sapiens
  misc_RNA (1)...(19): siRNA sense strand
ugacauuccugaagccgaa

SEQ ID NO: 2361303 - RNA, 19 nt, Homo sapiens
  misc_RNA (1)...(19): siRNA sense strand
uggucgggcugaaggacaa

SEQ ID NO: 2361304 - RNA, 19 nt, Homo sapiens
  misc_RNA (1)...(19): siRNA sense strand
gcgcucuguaagaaagaaa

SEQ ID NO: 2361305 - RNA, 19 nt, Homo sapiens
  misc_RNA (1)...(19): siRNA sense strand
gggcugaaggacaaggaca

SEQ ID NO: 2361306 - RNA, 19 nt, Homo sapiens
  misc_RNA (1)...(19): siRNA sense strand
ugaacuuguuguuggacau

SEQ ID NO: 2361307 - RNA, 19 nt, Homo sapiens
  misc_RNA (1)...(19): siRNA sense strand
ugcagaucuuugaggacaa

SEQ ID NO: 2361308 - RNA, 19 nt, Homo sapiens
  misc_RNA (1)...(19): siRNA sense strand
ccgcguaauaauggacaaa

SEQ ID NO: 2361309 - RNA, 19 nt, Homo sapiens
  misc_RNA (1)...(19): siRNA sense strand
ggaccaugaagcuugggaa

SEQ ID NO: 2361310 - RNA, 19 nt, Homo sapiens
  misc_RNA (1)...(19): siRNA sense strand
gugaagacuguuugcccua

SEQ ID NO: 2361311 - RNA, 19 nt, Homo sapiens
  misc_RNA (1)...(19): siRNA sense strand
gcagguucucacagguuua

SEQ ID NO: 2361312 - RNA, 19 nt, Homo sapiens
  misc_RNA (1)...(19): siRNA sense strand
uugaguacaugaagggcau

SEQ ID NO: 2361313 - RNA, 19 nt, Homo sapiens
  misc_RNA (1)...(19): siRNA sense strand
uguuggacauagugcaaga

SEQ ID NO: 2361314 - RNA, 19 nt, Homo sapiens
  misc_RNA (1)...(19): siRNA sense strand
uggacgagguggugacugu

SEQ ID NO: 2361315 - RNA, 19 nt, Homo sapiens
  misc_RNA (1)...(19): siRNA sense strand
uggacauagugcaagauca

SEQ ID NO: 2361316 - RNA, 19 nt, Homo sapiens
  misc_RNA (1)...(19): siRNA sense strand
uggugagagagcagcgcaa

SEQ ID NO: 2361317 - RNA, 19 nt, Homo sapiens
  misc_RNA (1)...(19): siRNA sense strand
cgaagaugacgacgaagau

SEQ ID NO: 2361318 - RNA, 19 nt, Homo sapiens
  misc_RNA (1)...(19): siRNA sense strand
aagaugacgacgaagauga

SEQ ID NO: 2361319 - RNA, 19 nt, Homo sapiens
  misc_RNA (1)...(19): siRNA sense strand
cccucaugguauugauauu

SEQ ID NO: 2361320 - RNA, 19 nt, Homo sapiens
  misc_RNA (1)...(19): siRNA sense strand
uccaaauagcagaguccua

SEQ ID NO: 2361321 - RNA, 19 nt, Homo sapiens
  misc_RNA (1)...(19): siRNA sense strand
uggaaaacgugaagacugu

SEQ ID NO: 2361322 - RNA, 19 nt, Homo sapiens
  misc_RNA (1)...(19): siRNA sense strand
aggcggaggacgagacacu

SEQ ID NO: 2361323 - RNA, 19 nt, Homo sapiens
  misc_RNA (1)...(19): siRNA sense strand
uguuugaccgagacauaaa

SEQ ID NO: 2361324 - RNA, 19 nt, Homo sapiens
  misc_RNA (1)...(19): siRNA sense strand
ggucugcagccaagggcau

SEQ ID NO: 2361325 - RNA, 19 nt, Homo sapiens
  misc_RNA (1)...(19): siRNA sense strand
guuguuggacauagugcaa

SEQ ID NO: 2361326 - RNA, 19 nt, Homo sapiens
  misc_RNA (1)...(19): siRNA sense strand
uggacaaauaccaggagca

SEQ ID NO: 2361327 - RNA, 19 nt, Homo sapiens
  misc_RNA (1)...(19): siRNA sense strand
ucucacagguuuaagagca

SEQ ID NO: 2361328 - RNA, 19 nt, Homo sapiens
  misc_RNA (1)...(19): siRNA sense strand
caugaugagcgcagcgaaa

SEQ ID NO: 2361329 - RNA, 19 nt, Homo sapiens
  misc_RNA (1)...(19): siRNA sense strand
ggauaaaacagaaaggaga

SEQ ID NO: 2361330 - RNA, 19 nt, Homo sapiens
  misc_RNA (1)...(19): siRNA sense strand
auuacagacacuuggauaa

SEQ ID NO: 2361331 - RNA, 19 nt, Homo sapiens
  misc_RNA (1)...(19): siRNA sense strand
agccagaagaaguggauga

SEQ ID NO: 2361332 - RNA, 19 nt, Homo sapiens
  misc_RNA (1)...(19): siRNA sense strand
gagccggaugcuaguguaa

SEQ ID NO: 2361333 - RNA, 19 nt, Homo sapiens
  misc_RNA (1)...(19): siRNA sense strand
aaugaaagucucacggaca

SEQ ID NO: 2361334 - RNA, 19 nt, Homo sapiens
  misc_RNA (1)...(19): siRNA sense strand
acacuauagcucucugaaa

SEQ ID NO: 2361335 - RNA, 19 nt, Homo sapiens
  misc_RNA (1)...(19): siRNA sense strand
aauuacagacacuuggaua

SEQ ID NO: 2361336 - RNA, 19 nt, Homo sapiens
  misc_RNA (1)...(19): siRNA sense strand
ggucacaacuucaugguuc

SEQ ID NO: 2361337 - RNA, 19 nt, Homo sapiens
  misc_RNA (1)...(19): siRNA sense strand
guuacaaugaagacugcua

SEQ ID NO: 2361338 - RNA, 19 nt, Homo sapiens
  misc_RNA (1)...(19): siRNA sense strand
aaaagaaguacucgaacaa

SEQ ID NO: 2361339 - RNA, 19 nt, Homo sapiens
  misc_RNA (1)...(19): siRNA sense strand
aaaacagaaaggagaguau

SEQ ID NO: 2361340 - RNA, 19 nt, Homo sapiens
  misc_RNA (1)...(19): siRNA sense strand
ugaugagcgcagcgaaauu

SEQ ID NO: 2361341 - RNA, 19 nt, Homo sapiens
  misc_RNA (1)...(19): siRNA sense strand
cuucaugguucgaaauuuu

SEQ ID NO: 2361342 - RNA, 19 nt, Homo sapiens
  misc_RNA (1)...(19): siRNA sense strand
aacagaaaggagaguauuu

SEQ ID NO: 2361343 - RNA, 19 nt, Homo sapiens
  misc_RNA (1)...(19): siRNA sense strand
auaaagaacugaagcagga

SEQ ID NO: 2361344 - RNA, 19 nt, Homo sapiens
  misc_RNA (1)...(19): siRNA sense strand
augaggacuucgaggagaa

SEQ ID NO: 2361345 - RNA, 19 nt, Homo sapiens
  misc_RNA (1)...(19): siRNA sense strand
cggaacaggagaagcaaca

SEQ ID NO: 2361346 - RNA, 19 nt, Homo sapiens
  misc_RNA (1)...(19): siRNA sense strand
ggaaggagcucaucgagga

SEQ ID NO: 2361347 - RNA, 19 nt, Homo sapiens
  misc_RNA (1)...(19): siRNA sense strand
auauaagucacgagcagaa

SEQ ID NO: 2361348 - RNA, 19 nt, Homo sapiens
  misc_RNA (1)...(19): siRNA sense strand
ccauauaagucacgagcag

SEQ ID NO: 2361349 - RNA, 19 nt, Homo sapiens
  misc_RNA (1)...(19): siRNA sense strand
gaacaggacuucagaggag

SEQ ID NO: 2361350 - RNA, 19 nt, Homo sapiens
  misc_RNA (1)...(19): siRNA sense strand
caaagcggacugugggcaa

SEQ ID NO: 2361351 - RNA, 19 nt, Homo sapiens
  misc_RNA (1)...(19): siRNA sense strand
ugaauaaagaacugaagca

SEQ ID NO: 2361352 - RNA, 19 nt, Homo sapiens
  misc_RNA (1)...(19): siRNA sense strand
gcuccauaucgcaaagcaa

SEQ ID NO: 2361353 - RNA, 19 nt, Homo sapiens
  misc_RNA (1)...(19): siRNA sense strand
ccgaugaagacaugaagga

SEQ ID NO: 2361354 - RNA, 19 nt, Homo sapiens
  misc_RNA (1)...(19): siRNA sense strand
augugaaccugcugaguca

SEQ ID NO: 2361355 - RNA, 19 nt, Homo sapiens
  misc_RNA (1)...(19): siRNA sense strand
gcgaucaacagaauggcua

SEQ ID NO: 2361356 - RNA, 19 nt, Homo sapiens
  misc_RNA (1)...(19): siRNA sense strand
gccaaugggcccuggacau

SEQ ID NO: 2361357 - RNA, 19 nt, Homo sapiens
  misc_RNA (1)...(19): siRNA sense strand
cugcugaagaacaggacuu

SEQ ID NO: 2361358 - RNA, 19 nt, Homo sapiens
  misc_RNA (1)...(19): siRNA sense strand
caacagaaacaaagggagc

SEQ ID NO: 2361359 - RNA, 19 nt, Homo sapiens
  misc_RNA (1)...(19): siRNA sense strand
cuguaaugaagcagcauca

SEQ ID NO: 2361360 - RNA, 19 nt, Homo sapiens
  misc_RNA (1)...(19): siRNA sense strand
aggagaagcaacaguuuca

SEQ ID NO: 2361361 - RNA, 19 nt, Homo sapiens
  misc_RNA (1)...(19): siRNA sense strand
acaaagagcccuugcaggu

SEQ ID NO: 2361362 - RNA, 19 nt, Homo sapiens
  misc_RNA (1)...(19): siRNA sense strand
ucgcggaacaggagaagca

SEQ ID NO: 2361363 - RNA, 19 nt, Homo sapiens
  misc_RNA (1)...(19): siRNA sense strand
gagcaggaguggaaggagc

SEQ ID NO: 2361364 - RNA, 19 nt, Homo sapiens
  misc_RNA (1)...(19): siRNA sense strand
gcugggaaucugaugccaa

SEQ ID NO: 2361365 - RNA, 19 nt, Homo sapiens
  misc_RNA (1)...(19): siRNA sense strand
ucacuugaauggaggcagu

SEQ ID NO: 2361366 - RNA, 19 nt, Homo sapiens
  misc_RNA (1)...(19): siRNA sense strand
gaaucagaacuccgcgaau

SEQ ID NO: 2361367 - RNA, 19 nt, Homo sapiens
  misc_RNA (1)...(19): siRNA sense strand
ggcuagacucucucaacaa

SEQ ID NO: 2361368 - RNA, 19 nt, Homo sapiens
  misc_RNA (1)...(19): siRNA sense strand
gcaagaacaguuaggcucu

SEQ ID NO: 2361369 - RNA, 19 nt, Homo sapiens
  misc_RNA (1)...(19): siRNA sense strand
aucagaacuccgcgaauaa

SEQ ID NO: 2361370 - RNA, 19 nt, Homo sapiens
  misc_RNA (1)...(19): siRNA sense strand
agaaacaaagggagcagca

SEQ ID NO: 2361371 - RNA, 19 nt, Homo sapiens
  misc_RNA (1)...(19): siRNA sense strand
gaaaaugucuagcccgcaa

SEQ ID NO: 2361372 - RNA, 19 nt, Homo sapiens
  misc_RNA (1)...(19): siRNA sense strand
caguaguacaagagccuaa

SEQ ID NO: 2361373 - RNA, 19 nt, Homo sapiens
  misc_RNA (1)...(19): siRNA sense strand
cugcaauauggaaggaaau

SEQ ID NO: 2361374 - RNA, 19 nt, Homo sapiens
  misc_RNA (1)...(19): siRNA sense strand
ggaauguuaucgaaggaca

SEQ ID NO: 2361375 - RNA, 19 nt, Homo sapiens
  misc_RNA (1)...(19): siRNA sense strand
uuugauaugaugagggaau

SEQ ID NO: 2361376 - RNA, 19 nt, Homo sapiens
  misc_RNA (1)...(19): siRNA sense strand
cauucagagaucaggaaga

SEQ ID NO: 2361377 - RNA, 19 nt, Homo sapiens
  misc_RNA (1)...(19): siRNA sense strand
cccauaugccaguggaaaa

SEQ ID NO: 2361378 - RNA, 19 nt, Homo sapiens
  misc_RNA (1)...(19): siRNA sense strand
aagccuaagcccuggucua

SEQ ID NO: 2361379 - RNA, 19 nt, Homo sapiens
  misc_RNA (1)...(19): siRNA sense strand
aggagauucagguggucaa

SEQ ID NO: 2361380 - RNA, 19 nt, Homo sapiens
  misc_RNA (1)...(19): siRNA sense strand
aggaagaggacuuggagcu

SEQ ID NO: 2361381 - RNA, 19 nt, Homo sapiens
  misc_RNA (1)...(19): siRNA sense strand
guuagaaaggagaaaagua

SEQ ID NO: 2361382 - RNA, 19 nt, Homo sapiens
  misc_RNA (1)...(19): siRNA sense strand
auaugaagccaguaguaca

SEQ ID NO: 2361383 - RNA, 19 nt, Homo sapiens
  misc_RNA (1)...(19): siRNA sense strand
agauauguuagaaaggaga

SEQ ID NO: 2361384 - RNA, 19 nt, Homo sapiens
  misc_RNA (1)...(19): siRNA sense strand
gcacuuuugaugugaauau

SEQ ID NO: 2361385 - RNA, 19 nt, Homo sapiens
  misc_RNA (1)...(19): siRNA sense strand
guuuaacugaacagcaaau

SEQ ID NO: 2361386 - RNA, 19 nt, Homo sapiens
  misc_RNA (1)...(19): siRNA sense strand
ggauaggaaaugaugggau

SEQ ID NO: 2361387 - RNA, 19 nt, Homo sapiens
  misc_RNA (1)...(19): siRNA sense strand
cugggagagaugaggauuu

SEQ ID NO: 2361388 - RNA, 19 nt, Homo sapiens
  misc_RNA (1)...(19): siRNA sense strand
cggagaggaccaaggcuga

SEQ ID NO: 2361389 - RNA, 19 nt, Homo sapiens
  misc_RNA (1)...(19): siRNA sense strand
cuaauuaaauggauccuga

SEQ ID NO: 2361390 - RNA, 19 nt, Homo sapiens
  misc_RNA (1)...(19): siRNA sense strand
ggaccaaggcugaagcuac

SEQ ID NO: 2361391 - RNA, 19 nt, Homo sapiens
  misc_RNA (1)...(19): siRNA sense strand
gaugaagcggagaggacca

SEQ ID NO: 2361392 - RNA, 19 nt, Homo sapiens
  misc_RNA (1)...(19): siRNA sense strand
augaagaagagucuggaga

SEQ ID NO: 2361393 - RNA, 19 nt, Homo sapiens
  misc_RNA (1)...(19): siRNA sense strand
aguacaaagaggagaauga

SEQ ID NO: 2361394 - RNA, 19 nt, Homo sapiens
  misc_RNA (1)...(19): siRNA sense strand
agaaguacaaagaggagaa

SEQ ID NO: 2361395 - RNA, 19 nt, Homo sapiens
  misc_RNA (1)...(19): siRNA sense strand
cugaaauagugaucggaca

SEQ ID NO: 2361396 - RNA, 19 nt, Homo sapiens
  misc_RNA (1)...(19): siRNA sense strand
aggaaauacuggaaugacu

SEQ ID NO: 2361397 - RNA, 19 nt, Homo sapiens
  misc_RNA (1)...(19): siRNA sense strand
auguagaagccuuggacuu

SEQ ID NO: 2361398 - RNA, 19 nt, Homo sapiens
  misc_RNA (1)...(19): siRNA sense strand
aaggcgaggcccagguaaa

SEQ ID NO: 2361399 - RNA, 19 nt, Homo sapiens
  misc_RNA (1)...(19): siRNA sense strand
cuuaagaaggcgaggccca

SEQ ID NO: 2361400 - RNA, 19 nt, Homo sapiens
  misc_RNA (1)...(19): siRNA sense strand
ugagaaagcucuagaccug

SEQ ID NO: 2361401 - RNA, 19 nt, Homo sapiens
  misc_RNA (1)...(19): siRNA sense strand
cuggaaugacugugagcca

SEQ ID NO: 2361402 - RNA, 19 nt, Homo sapiens
  misc_RNA (1)...(19): siRNA sense strand
caaacauccucuaaagcca

SEQ ID NO: 2361403 - RNA, 19 nt, Homo sapiens
  misc_RNA (1)...(19): siRNA sense strand
ggccaauaccaaagauagu

SEQ ID NO: 2361404 - RNA, 19 nt, Homo sapiens
  misc_RNA (1)...(19): siRNA sense strand
cugguuacuucguggacuu

SEQ ID NO: 2361405 - RNA, 19 nt, Homo sapiens
  misc_RNA (1)...(19): siRNA sense strand
agguaauagcuacaagaca

SEQ ID NO: 2361406 - RNA, 19 nt, Homo sapiens
  misc_RNA (1)...(19): siRNA sense strand
cuauggaccuugugaccca

SEQ ID NO: 2361407 - RNA, 19 nt, Homo sapiens
  misc_RNA (1)...(19): siRNA sense strand
uugaggauacugagcgcua

SEQ ID NO: 2361408 - RNA, 19 nt, Homo sapiens
  misc_RNA (1)...(19): siRNA sense strand
ccaugauuuccaagacuau

SEQ ID NO: 2361409 - RNA, 19 nt, Homo sapiens
  misc_RNA (1)...(19): siRNA sense strand
aagagugagaggaggggaa

SEQ ID NO: 2361410 - RNA, 19 nt, Homo sapiens
  misc_RNA (1)...(19): siRNA sense strand
gaguaaagauaaaggcgau

SEQ ID NO: 2361411 - RNA, 19 nt, Homo sapiens
  misc_RNA (1)...(19): siRNA sense strand
cuugauauuugguuggaaa

SEQ ID NO: 2361412 - RNA, 19 nt, Homo sapiens
  misc_RNA (1)...(19): siRNA sense strand
cugcagacucagaggauuu

SEQ ID NO: 2361413 - RNA, 19 nt, Homo sapiens
  misc_RNA (1)...(19): siRNA sense strand
ggagcuugauggaggaaca

SEQ ID NO: 2361414 - RNA, 19 nt, Homo sapiens
  misc_RNA (1)...(19): siRNA sense strand
gugaagaaucugucggaga

SEQ ID NO: 2361415 - RNA, 19 nt, Homo sapiens
  misc_RNA (1)...(19): siRNA sense strand
gggccaacgucaaggagga

SEQ ID NO: 2361416 - RNA, 19 nt, Homo sapiens
  misc_RNA (1)...(19): siRNA sense strand
ccugaagcuuuguggguga

SEQ ID NO: 2361417 - RNA, 19 nt, Homo sapiens
  misc_RNA (1)...(19): siRNA sense strand
uggaacacguggagcaaga

SEQ ID NO: 2361418 - RNA, 19 nt, Homo sapiens
  misc_RNA (1)...(19): siRNA sense strand
augcugaaggaaagaguaa

SEQ ID NO: 2361419 - RNA, 19 nt, Homo sapiens
  misc_RNA (1)...(19): siRNA sense strand
acaugguggugcagggcaa

SEQ ID NO: 2361420 - RNA, 19 nt, Homo sapiens
  misc_RNA (1)...(19): siRNA sense strand
agggcaagcgcaugaguaa

SEQ ID NO: 2361421 - RNA, 19 nt, Homo sapiens
  misc_RNA (1)...(19): siRNA sense strand
cagaaaugaaagagaaauc

SEQ ID NO: 2361422 - RNA, 19 nt, Homo sapiens
  misc_RNA (1)...(19): siRNA sense strand
agacaaugacaaggaguua

SEQ ID NO: 2361423 - RNA, 19 nt, Homo sapiens
  misc_RNA (1)...(19): siRNA sense strand
acagaaggucagagagcau

SEQ ID NO: 2361424 - RNA, 19 nt, Homo sapiens
  misc_RNA (1)...(19): siRNA sense strand
uggccgaggugcugagaga

SEQ ID NO: 2361425 - RNA, 19 nt, Homo sapiens
  misc_RNA (1)...(19): siRNA sense strand
uggccuggauggagagaga

SEQ ID NO: 2361426 - RNA, 19 nt, Homo sapiens
  misc_RNA (1)...(19): siRNA sense strand
gcucugaggcuuagggcca

SEQ ID NO: 2361427 - RNA, 19 nt, Homo sapiens
  misc_RNA (1)...(19): siRNA sense strand
ugacauuuguggugcugaa

SEQ ID NO: 2361428 - RNA, 19 nt, Homo sapiens
  misc_RNA (1)...(19): siRNA sense strand
cagugaacuugauggacau

SEQ ID NO: 2361429 - RNA, 19 nt, Homo sapiens
  misc_RNA (1)...(19): siRNA sense strand
ggacuauagcccagugcuu

SEQ ID NO: 2361430 - RNA, 19 nt, Homo sapiens
  misc_RNA (1)...(19): siRNA sense strand
ccacccuccugcugggaaa

SEQ ID NO: 2361431 - RNA, 19 nt, Homo sapiens
  misc_RNA (1)...(19): siRNA sense strand
aaaagauggacuuggguaa

SEQ ID NO: 2361432 - RNA, 19 nt, Homo sapiens
  misc_RNA (1)...(19): siRNA sense strand
ccaaugugaccuacagcaa

SEQ ID NO: 2361433 - RNA, 19 nt, Homo sapiens
  misc_RNA (1)...(19): siRNA sense strand
gggaugagguccaggagac

SEQ ID NO: 2361434 - RNA, 19 nt, Homo sapiens
  misc_RNA (1)...(19): siRNA sense strand
ucagugaacuugauggaca

SEQ ID NO: 2361435 - RNA, 19 nt, Homo sapiens
  misc_RNA (1)...(19): siRNA sense strand
ccacccaccucaaggaaca

SEQ ID NO: 2361436 - RNA, 19 nt, Homo sapiens
  misc_RNA (1)...(19): siRNA sense strand
aagcuuugcccaaggacua

SEQ ID NO: 2361437 - RNA, 19 nt, Homo sapiens
  misc_RNA (1)...(19): siRNA sense strand
gugcuugcucugaggcuua

SEQ ID NO: 2361438 - RNA, 19 nt, Homo sapiens
  misc_RNA (1)...(19): siRNA sense strand
gggcauuaagucuaagaga

SEQ ID NO: 2361439 - RNA, 19 nt, Homo sapiens
  misc_RNA (1)...(19): siRNA sense strand
cagcacaagcuuugcccaa

SEQ ID NO: 2361440 - RNA, 19 nt, Homo sapiens
  misc_RNA (1)...(19): siRNA sense strand
gcgauauggagguguacau

SEQ ID NO: 2361441 - RNA, 19 nt, Homo sapiens
  misc_RNA (1)...(19): siRNA sense strand
gccaaaagcacgucaaaau

SEQ ID NO: 2361442 - RNA, 19 nt, Homo sapiens
  misc_RNA (1)...(19): siRNA sense strand
gagacaagauggagacgcu

SEQ ID NO: 2361443 - RNA, 19 nt, Homo sapiens
  misc_RNA (1)...(19): siRNA sense strand
cggcauucacaaagacaca

SEQ ID NO: 2361444 - RNA, 19 nt, Homo sapiens
  misc_RNA (1)...(19): siRNA sense strand
gagucagcugugagaggaa

SEQ ID NO: 2361445 - RNA, 19 nt, Homo sapiens
  misc_RNA (1)...(19): siRNA sense strand
ggaccugcguuuuggagaa

SEQ ID NO: 2361446 - RNA, 19 nt, Homo sapiens
  misc_RNA (1)...(19): siRNA sense strand
acagagaaacccagaaacu

SEQ ID NO: 2361447 - RNA, 19 nt, Homo sapiens
  misc_RNA (1)...(19): siRNA sense strand
cagacaaugacaaggaguu

SEQ ID NO: 2361448 - RNA, 19 nt, Homo sapiens
  misc_RNA (1)...(19): siRNA sense strand
ggggagaggucauccgaau

SEQ ID NO: 2361449 - RNA, 19 nt, Homo sapiens
  misc_RNA (1)...(19): siRNA sense strand
agacccaggccauggcuaa

SEQ ID NO: 2361450 - RNA, 19 nt, Homo sapiens
  misc_RNA (1)...(19): siRNA sense strand
cggagaauaucgagauccu

SEQ ID NO: 2361451 - RNA, 19 nt, Homo sapiens
  misc_RNA (1)...(19): siRNA sense strand
gcacgaagaaacagcagca

SEQ ID NO: 2361452 - RNA, 19 nt, Homo sapiens
  misc_RNA (1)...(19): siRNA sense strand
uggcagcagaugagaccua

SEQ ID NO: 2361453 - RNA, 19 nt, Homo sapiens
  misc_RNA (1)...(19): siRNA sense strand
gugcgagacaagauggaga

SEQ ID NO: 2361454 - RNA, 19 nt, Homo sapiens
  misc_RNA (1)...(19): siRNA sense strand
uggagagccauuugggauu

SEQ ID NO: 2361455 - RNA, 19 nt, Homo sapiens
  misc_RNA (1)...(19): siRNA sense strand
aguaaagauaaaggcgaua

SEQ ID NO: 2361456 - RNA, 19 nt, Homo sapiens
  misc_RNA (1)...(19): siRNA sense strand
caacagaccagaagagccu

SEQ ID NO: 2361457 - RNA, 19 nt, Homo sapiens
  misc_RNA (1)...(19): siRNA sense strand
ggagcagaacacuggaaaa

SEQ ID NO: 2361458 - RNA, 19 nt, Homo sapiens
  misc_RNA (1)...(19): siRNA sense strand
gggcaagcgcaugaguaaa

SEQ ID NO: 2361459 - RNA, 19 nt, Homo sapiens
  misc_RNA (1)...(19): siRNA sense strand
gcuaugaauuugugccacu

SEQ ID NO: 2361460 - RNA, 19 nt, Homo sapiens
  misc_RNA (1)...(19): siRNA sense strand
agaaucugucggagaauau

SEQ ID NO: 2361461 - RNA, 19 nt, Homo sapiens
  misc_RNA (1)...(19): siRNA sense strand
ugguggaagaugucauuua

SEQ ID NO: 2361462 - RNA, 19 nt, Homo sapiens
  misc_RNA (1)...(19): siRNA sense strand
ugaguaaccuguaugguca

SEQ ID NO: 2361463 - RNA, 19 nt, Homo sapiens
  misc_RNA (1)...(19): siRNA sense strand
gcgcaugaguaaagagacg

SEQ ID NO: 2361464 - RNA, 19 nt, Homo sapiens
  misc_RNA (1)...(19): siRNA sense strand
guuaaugccagcaaagaca

SEQ ID NO: 2361465 - RNA, 19 nt, Homo sapiens
  misc_RNA (1)...(19): siRNA sense strand
gaguggacgaugaggagga

SEQ ID NO: 2361466 - RNA, 19 nt, Homo sapiens
  misc_RNA (1)...(19): siRNA sense strand
gggcaaacucacuguguac

SEQ ID NO: 2361467 - RNA, 19 nt, Homo sapiens
  misc_RNA (1)...(19): siRNA sense strand
aggaucaggccaaggugaa

SEQ ID NO: 2361468 - RNA, 19 nt, Homo sapiens
  misc_RNA (1)...(19): siRNA sense strand
caccugaggcagugaccaa

SEQ ID NO: 2361469 - RNA, 19 nt, Homo sapiens
  misc_RNA (1)...(19): siRNA sense strand
agaaacagcagcagggaug

SEQ ID NO: 2361470 - RNA, 19 nt, Homo sapiens
  misc_RNA (1)...(19): siRNA sense strand
gaguaaagauaaaggcgau

SEQ ID NO: 2361471 - RNA, 19 nt, Homo sapiens
  misc_RNA (1)...(19): siRNA sense strand
cugcagacucagaggauuu

SEQ ID NO: 2361472 - RNA, 19 nt, Homo sapiens
  misc_RNA (1)...(19): siRNA sense strand
ggagcuugauggaggaaca

SEQ ID NO: 2361473 - RNA, 19 nt, Homo sapiens
  misc_RNA (1)...(19): siRNA sense strand
gugaagaaucugucggaga

SEQ ID NO: 2361474 - RNA, 19 nt, Homo sapiens
  misc_RNA (1)...(19): siRNA sense strand
gggccaacgucaaggagga

SEQ ID NO: 2361475 - RNA, 19 nt, Homo sapiens
  misc_RNA (1)...(19): siRNA sense strand
ccugaagcuuuguggguga

SEQ ID NO: 2361476 - RNA, 19 nt, Homo sapiens
  misc_RNA (1)...(19): siRNA sense strand
uggaacacguggagcaaga

SEQ ID NO: 2361477 - RNA, 19 nt, Homo sapiens
  misc_RNA (1)...(19): siRNA sense strand
augcugaaggaaagaguaa

SEQ ID NO: 2361478 - RNA, 19 nt, Homo sapiens
  misc_RNA (1)...(19): siRNA sense strand
cagaaaugaaagagaaauc

SEQ ID NO: 2361479 - RNA, 19 nt, Homo sapiens
  misc_RNA (1)...(19): siRNA sense strand
agacaaugacaaggaguua

SEQ ID NO: 2361480 - RNA, 19 nt, Homo sapiens
  misc_RNA (1)...(19): siRNA sense strand
acagaaggucagagagcau

SEQ ID NO: 2361481 - RNA, 19 nt, Homo sapiens
  misc_RNA (1)...(19): siRNA sense strand
uggccgaggugcugagaga

SEQ ID NO: 2361482 - RNA, 19 nt, Homo sapiens
  misc_RNA (1)...(19): siRNA sense strand
uggccuggauggagagaga

SEQ ID NO: 2361483 - RNA, 19 nt, Homo sapiens
  misc_RNA (1)...(19): siRNA sense strand
gcucugaggcuuagggcca

SEQ ID NO: 2361484 - RNA, 19 nt, Homo sapiens
  misc_RNA (1)...(19): siRNA sense strand
cagugaacuugauggacau

SEQ ID NO: 2361485 - RNA, 19 nt, Homo sapiens
  misc_RNA (1)...(19): siRNA sense strand
ccacccuccugcugggaaa

SEQ ID NO: 2361486 - RNA, 19 nt, Homo sapiens
  misc_RNA (1)...(19): siRNA sense strand
aaaagauggacuuggguaa

SEQ ID NO: 2361487 - RNA, 19 nt, Homo sapiens
  misc_RNA (1)...(19): siRNA sense strand
ccaaugugaccuacagcaa

SEQ ID NO: 2361488 - RNA, 19 nt, Homo sapiens
  misc_RNA (1)...(19): siRNA sense strand
gggaugagguccaggagac

SEQ ID NO: 2361489 - RNA, 19 nt, Homo sapiens
  misc_RNA (1)...(19): siRNA sense strand
ucagugaacuugauggaca

SEQ ID NO: 2361490 - RNA, 19 nt, Homo sapiens
  misc_RNA (1)...(19): siRNA sense strand
gugcuugcucugaggcuua

SEQ ID NO: 2361491 - RNA, 19 nt, Homo sapiens
  misc_RNA (1)...(19): siRNA sense strand
gcgauauggagguguacau

SEQ ID NO: 2361492 - RNA, 19 nt, Homo sapiens
  misc_RNA (1)...(19): siRNA sense strand
gagacaagauggagacgcu

SEQ ID NO: 2361493 - RNA, 19 nt, Homo sapiens
  misc_RNA (1)...(19): siRNA sense strand
cggcauucacaaagacaca

SEQ ID NO: 2361494 - RNA, 19 nt, Homo sapiens
  misc_RNA (1)...(19): siRNA sense strand
gagucagcugugagaggaa

SEQ ID NO: 2361495 - RNA, 19 nt, Homo sapiens
  misc_RNA (1)...(19): siRNA sense strand
ggaccugcguuuuggagaa

SEQ ID NO: 2361496 - RNA, 19 nt, Homo sapiens
  misc_RNA (1)...(19): siRNA sense strand
acagagaaacccagaaacu

SEQ ID NO: 2361497 - RNA, 19 nt, Homo sapiens
  misc_RNA (1)...(19): siRNA sense strand
cagacaaugacaaggaguu

SEQ ID NO: 2361498 - RNA, 19 nt, Homo sapiens
  misc_RNA (1)...(19): siRNA sense strand
ggggagaggucauccgaau

SEQ ID NO: 2361499 - RNA, 19 nt, Homo sapiens
  misc_RNA (1)...(19): siRNA sense strand
agacccaggccauggcuaa

SEQ ID NO: 2361500 - RNA, 19 nt, Homo sapiens
  misc_RNA (1)...(19): siRNA sense strand
cggagaauaucgagauccu

SEQ ID NO: 2361501 - RNA, 19 nt, Homo sapiens
  misc_RNA (1)...(19): siRNA sense strand
uggcagcagaugagaccua

SEQ ID NO: 2361502 - RNA, 19 nt, Homo sapiens
  misc_RNA (1)...(19): siRNA sense strand
gugcgagacaagauggaga

SEQ ID NO: 2361503 - RNA, 19 nt, Homo sapiens
  misc_RNA (1)...(19): siRNA sense strand
uggagagccauuugggauu

SEQ ID NO: 2361504 - RNA, 19 nt, Homo sapiens
  misc_RNA (1)...(19): siRNA sense strand
aguaaagauaaaggcgaua

SEQ ID NO: 2361505 - RNA, 19 nt, Homo sapiens
  misc_RNA (1)...(19): siRNA sense strand
caacagaccagaagagccu

SEQ ID NO: 2361506 - RNA, 19 nt, Homo sapiens
  misc_RNA (1)...(19): siRNA sense strand
ggagcagaacacuggaaaa

SEQ ID NO: 2361507 - RNA, 19 nt, Homo sapiens
  misc_RNA (1)...(19): siRNA sense strand
gcuaugaauuugugccacu

SEQ ID NO: 2361508 - RNA, 19 nt, Homo sapiens
  misc_RNA (1)...(19): siRNA sense strand
agaaucugucggagaauau

SEQ ID NO: 2361509 - RNA, 19 nt, Homo sapiens
  misc_RNA (1)...(19): siRNA sense strand
ugguggaagaugucauuua

SEQ ID NO: 2361510 - RNA, 19 nt, Homo sapiens
  misc_RNA (1)...(19): siRNA sense strand
guuaaugccagcaaagaca

SEQ ID NO: 2361511 - RNA, 19 nt, Homo sapiens
  misc_RNA (1)...(19): siRNA sense strand
aggaucaggccaaggugaa

SEQ ID NO: 2361512 - RNA, 19 nt, Homo sapiens
  misc_RNA (1)...(19): siRNA sense strand
caccugaggcagugaccaa

SEQ ID NO: 2361513 - RNA, 19 nt, Homo sapiens
  misc_RNA (1)...(19): siRNA sense strand
gcagcuguguugagaggca

SEQ ID NO: 2361514 - RNA, 19 nt, Homo sapiens
  misc_RNA (1)...(19): siRNA sense strand
gagcagaacacuggaaaau

SEQ ID NO: 2361515 - RNA, 19 nt, Homo sapiens
  misc_RNA (1)...(19): siRNA sense strand
guguugaggauguagcauu

SEQ ID NO: 2361516 - RNA, 19 nt, Homo sapiens
  misc_RNA (1)...(19): siRNA sense strand
ccguggauauaaagaucau

SEQ ID NO: 2361517 - RNA, 19 nt, Homo sapiens
  misc_RNA (1)...(19): siRNA sense strand
guucacaucuccuggggaa

SEQ ID NO: 2361518 - RNA, 19 nt, Homo sapiens
  misc_RNA (1)...(19): siRNA sense strand
cacuuggagaggagaacaa

SEQ ID NO: 2361519 - RNA, 19 nt, Homo sapiens
  misc_RNA (1)...(19): siRNA sense strand
aggcagugaccaaggaugu

SEQ ID NO: 2361520 - RNA, 19 nt, Homo sapiens
  misc_RNA (1)...(19): siRNA sense strand
ccuccaugcugaaccaaga

SEQ ID NO: 2361521 - RNA, 19 nt, Homo sapiens
  misc_RNA (1)...(19): siRNA sense strand
uggaggaacaggagugacu

SEQ ID NO: 2361522 - RNA, 19 nt, Homo sapiens
  misc_RNA (1)...(19): siRNA sense strand
aaggcgauauggaggugua

SEQ ID NO: 2361523 - RNA, 19 nt, Homo sapiens
  misc_RNA (1)...(19): siRNA sense strand
cauccgaaucagagccaca

SEQ ID NO: 2361524 - RNA, 19 nt, Homo sapiens
  misc_RNA (1)...(19): siRNA sense strand
aggucacagugcuggaaga

SEQ ID NO: 2361525 - RNA, 19 nt, Homo sapiens
  misc_RNA (1)...(19): siRNA sense strand
uguauggccuggauggaga

SEQ ID NO: 2361526 - RNA, 19 nt, Homo sapiens
  misc_RNA (1)...(19): siRNA sense strand
cccacgagcaagugagcuu

SEQ ID NO: 2361527 - RNA, 19 nt, Homo sapiens
  misc_RNA (1)...(19): siRNA sense strand
agaguaaagauaaaggcga

SEQ ID NO: 2361528 - RNA, 19 nt, Homo sapiens
  misc_RNA (1)...(19): siRNA sense strand
cuggaugccugcagacuca

SEQ ID NO: 2361529 - RNA, 19 nt, Homo sapiens
  misc_RNA (1)...(19): siRNA sense strand
cggccaucgugguauguga

SEQ ID NO: 2361530 - RNA, 19 nt, Homo sapiens
  misc_RNA (1)...(19): siRNA sense strand
agugguauuuccugugcaa

SEQ ID NO: 2361531 - RNA, 19 nt, Homo sapiens
  misc_RNA (1)...(19): siRNA sense strand
aaagauggacuuggguaaa

SEQ ID NO: 2361532 - RNA, 19 nt, Homo sapiens
  misc_RNA (1)...(19): siRNA sense strand
cugaugguguccagugaga

SEQ ID NO: 2361533 - RNA, 19 nt, Homo sapiens
  misc_RNA (1)...(19): siRNA sense strand
ugggaugaaugcugaagga

SEQ ID NO: 2361534 - RNA, 19 nt, Homo sapiens
  misc_RNA (1)...(19): siRNA sense strand
gcugaaggaaagaguaaag

SEQ ID NO: 2361535 - RNA, 19 nt, Homo sapiens
  misc_RNA (1)...(19): siRNA sense strand
cgaaauaugcuuugcccaa

SEQ ID NO: 2361536 - RNA, 19 nt, Homo sapiens
  misc_RNA (1)...(19): siRNA sense strand
agggaauguucuuggcuaa

SEQ ID NO: 2361537 - RNA, 19 nt, Homo sapiens
  misc_RNA (1)...(19): siRNA sense strand
gggagaucuuggagcaaau

SEQ ID NO: 2361538 - RNA, 19 nt, Homo sapiens
  misc_RNA (1)...(19): siRNA sense strand
caaagaacaaagaggucaa

SEQ ID NO: 2361539 - RNA, 19 nt, Homo sapiens
  misc_RNA (1)...(19): siRNA sense strand
gcuaagagauggagggcag

SEQ ID NO: 2361540 - RNA, 19 nt, Homo sapiens
  misc_RNA (1)...(19): siRNA sense strand
uagcagggauaaagggaau

SEQ ID NO: 2361541 - RNA, 19 nt, Homo sapiens
  misc_RNA (1)...(19): siRNA sense strand
ggagaaaacaaaaggucaa

SEQ ID NO: 2361542 - RNA, 19 nt, Homo sapiens
  misc_RNA (1)...(19): siRNA sense strand
cuaugagguagcagggaua

SEQ ID NO: 2361543 - RNA, 19 nt, Homo sapiens
  misc_RNA (1)...(19): siRNA sense strand
cgacuaugguuaugagcga

SEQ ID NO: 2361544 - RNA, 19 nt, Homo sapiens
  misc_RNA (1)...(19): siRNA sense strand
ucgcaguauaugaggaauu

SEQ ID NO: 2361545 - RNA, 19 nt, Homo sapiens
  misc_RNA (1)...(19): siRNA sense strand
ccugaguggaggagggaca

SEQ ID NO: 2361546 - RNA, 19 nt, Homo sapiens
  misc_RNA (1)...(19): siRNA sense strand
gcagcuugggacagaguua

SEQ ID NO: 2361547 - RNA, 19 nt, Homo sapiens
  misc_RNA (1)...(19): siRNA sense strand
aaauaaagaaccagaccuu

SEQ ID NO: 2361548 - RNA, 19 nt, Homo sapiens
  misc_RNA (1)...(19): siRNA sense strand
uggucaaaguagauuacaa

SEQ ID NO: 2361549 - RNA, 19 nt, Homo sapiens
  misc_RNA (1)...(19): siRNA sense strand
cugaauggcagcuggucaa

SEQ ID NO: 2361550 - RNA, 19 nt, Homo sapiens
  misc_RNA (1)...(19): siRNA sense strand
ccacaacagcagcgugauu

SEQ ID NO: 2361551 - RNA, 19 nt, Homo sapiens
  misc_RNA (1)...(19): siRNA sense strand
ggucaaauaaagaaccaga

SEQ ID NO: 2361552 - RNA, 19 nt, Homo sapiens
  misc_RNA (1)...(19): siRNA sense strand
caguacacuucgagcugaa

SEQ ID NO: 2361553 - RNA, 19 nt, Homo sapiens
  misc_RNA (1)...(19): siRNA sense strand
gaacaaggacacaacguca

SEQ ID NO: 2361554 - RNA, 19 nt, Homo sapiens
  misc_RNA (1)...(19): siRNA sense strand
cggaaguguaugcaaggaa

SEQ ID NO: 2361555 - RNA, 19 nt, Homo sapiens
  misc_RNA (1)...(19): siRNA sense strand
ggauggaggagcugagacu

SEQ ID NO: 2361556 - RNA, 19 nt, Homo sapiens
  misc_RNA (1)...(19): siRNA sense strand
gaagggagaucuuggagca

SEQ ID NO: 2361557 - RNA, 19 nt, Homo sapiens
  misc_RNA (1)...(19): siRNA sense strand
cugaugaccuggagcagau

SEQ ID NO: 2361558 - RNA, 19 nt, Homo sapiens
  misc_RNA (1)...(19): siRNA sense strand
gcuaacaagaagauugaca

SEQ ID NO: 2361559 - RNA, 19 nt, Homo sapiens
  misc_RNA (1)...(19): siRNA sense strand
ucauaguggcaucagguaa

SEQ ID NO: 2361560 - RNA, 19 nt, Homo sapiens
  misc_RNA (1)...(19): siRNA sense strand
cuaacaagaagauugacaa

SEQ ID NO: 2361561 - RNA, 19 nt, Homo sapiens
  misc_RNA (1)...(19): siRNA sense strand
cagcaaagacacagcucca

SEQ ID NO: 2361562 - RNA, 19 nt, Homo sapiens
  misc_RNA (1)...(19): siRNA sense strand
ugcaauuagaagaggguga

SEQ ID NO: 2361563 - RNA, 19 nt, Homo sapiens
  misc_RNA (1)...(19): siRNA sense strand
ugaccgugcagguggacaa

SEQ ID NO: 2361564 - RNA, 19 nt, Homo sapiens
  misc_RNA (1)...(19): siRNA sense strand
uggcaguguucgucaucua

SEQ ID NO: 2361565 - RNA, 19 nt, Homo sapiens
  misc_RNA (1)...(19): siRNA sense strand
accaacaagcguaagauaa

SEQ ID NO: 2361566 - RNA, 19 nt, Homo sapiens
  misc_RNA (1)...(19): siRNA sense strand
ggagaagauggcagcuuau

SEQ ID NO: 2361567 - RNA, 19 nt, Homo sapiens
  misc_RNA (1)...(19): siRNA sense strand
cauaguggcaucagguaau

SEQ ID NO: 2361568 - RNA, 19 nt, Homo sapiens
  misc_RNA (1)...(19): siRNA sense strand
ugagaagcugaaugauaaa

SEQ ID NO: 2361569 - RNA, 19 nt, Homo sapiens
  misc_RNA (1)...(19): siRNA sense strand
ggcauacagucaagaccaa

SEQ ID NO: 2361570 - RNA, 19 nt, Homo sapiens
  misc_RNA (1)...(19): siRNA sense strand
gcggagcggaucaggagaa

SEQ ID NO: 2361571 - RNA, 19 nt, Homo sapiens
  misc_RNA (1)...(19): siRNA sense strand
agauaauguuacucacaga

SEQ ID NO: 2361572 - RNA, 19 nt, Homo sapiens
  misc_RNA (1)...(19): siRNA sense strand
cagucaagaccaaaaguua

SEQ ID NO: 2361573 - RNA, 19 nt, Homo sapiens
  misc_RNA (1)...(19): siRNA sense strand
gagaauguccagagcagca

SEQ ID NO: 2361574 - RNA, 19 nt, Homo sapiens
  misc_RNA (1)...(19): siRNA sense strand
guuaugagcgacacagcaa

SEQ ID NO: 2361575 - RNA, 19 nt, Homo sapiens
  misc_RNA (1)...(19): siRNA sense strand
ccacaaagaacaaagaggu

SEQ ID NO: 2361576 - RNA, 19 nt, Homo sapiens
  misc_RNA (1)...(19): siRNA sense strand
cuuuggaggucaaccgauu

SEQ ID NO: 2361577 - RNA, 19 nt, Homo sapiens
  misc_RNA (1)...(19): siRNA sense strand
ccagaacuguggaugguca

SEQ ID NO: 2361578 - RNA, 19 nt, Homo sapiens
  misc_RNA (1)...(19): siRNA sense strand
gaguuuugaugaagggaga

SEQ ID NO: 2361579 - RNA, 19 nt, Homo sapiens
  misc_RNA (1)...(19): siRNA sense strand
ugauagacggugugccgaa

SEQ ID NO: 2361580 - RNA, 19 nt, Homo sapiens
  misc_RNA (1)...(19): siRNA sense strand
cuacaagacacaaagacca

SEQ ID NO: 2361581 - RNA, 19 nt, Homo sapiens
  misc_RNA (1)...(19): siRNA sense strand
ccaaacaagaagacuggau

SEQ ID NO: 2361582 - RNA, 19 nt, Homo sapiens
  misc_RNA (1)...(19): siRNA sense strand
cggaucaggagaaggcaga

SEQ ID NO: 2361583 - RNA, 19 nt, Homo sapiens
  misc_RNA (1)...(19): siRNA sense strand
aagaagggguuguaccaaa

SEQ ID NO: 2361584 - RNA, 19 nt, Homo sapiens
  misc_RNA (1)...(19): siRNA sense strand
uaucagcaccgaugagaau

SEQ ID NO: 2361585 - RNA, 19 nt, Homo sapiens
  misc_RNA (1)...(19): siRNA sense strand
caaccuaugagaagcugaa

SEQ ID NO: 2361586 - RNA, 19 nt, Homo sapiens
  misc_RNA (1)...(19): siRNA sense strand
gcugaauuugggagaagau

SEQ ID NO: 2361587 - RNA, 19 nt, Homo sapiens
  misc_RNA (1)...(19): siRNA sense strand
aguccugguugcuaugaaa

SEQ ID NO: 2361588 - RNA, 19 nt, Homo sapiens
  misc_RNA (1)...(19): siRNA sense strand
agaacuguacagaggccaa

SEQ ID NO: 2361589 - RNA, 19 nt, Homo sapiens
  misc_RNA (1)...(19): siRNA sense strand
uagaagagggugauguuca

SEQ ID NO: 2361590 - RNA, 19 nt, Homo sapiens
  misc_RNA (1)...(19): siRNA sense strand
caucgcaguauaugaggaa

SEQ ID NO: 2361591 - RNA, 19 nt, Homo sapiens
  misc_RNA (1)...(19): siRNA sense strand
ggaucaagguggaguccug

SEQ ID NO: 2361592 - RNA, 19 nt, Homo sapiens
  misc_RNA (1)...(19): siRNA sense strand
agggagaucuuggagcaaa

SEQ ID NO: 2361593 - RNA, 19 nt, Homo sapiens
  misc_RNA (1)...(19): siRNA sense strand
ccgaugagaaucagguguu

SEQ ID NO: 2361594 - RNA, 19 nt, Homo sapiens
  misc_RNA (1)...(19): siRNA sense strand
acucauucaaacagggaaa

SEQ ID NO: 2361595 - RNA, 19 nt, Homo sapiens
  misc_RNA (1)...(19): siRNA sense strand
uauuaagacaacugaggaa

SEQ ID NO: 2361596 - RNA, 19 nt, Homo sapiens
  misc_RNA (1)...(19): siRNA sense strand
cugcaggagagaaggucaa

SEQ ID NO: 2361597 - RNA, 19 nt, Homo sapiens
  misc_RNA (1)...(19): siRNA sense strand
cugcuuuggcccagggaau

SEQ ID NO: 2361598 - RNA, 19 nt, Homo sapiens
  misc_RNA (1)...(19): siRNA sense strand
aguuacacucugaggauau

SEQ ID NO: 2361599 - RNA, 19 nt, Homo sapiens
  misc_RNA (1)...(19): siRNA sense strand
agggaaagcgacugaacuu

SEQ ID NO: 2361600 - RNA, 19 nt, Homo sapiens
  misc_RNA (1)...(19): siRNA sense strand
gaauaugaccugugagcuc

SEQ ID NO: 2361601 - RNA, 19 nt, Homo sapiens
  misc_RNA (1)...(19): siRNA sense strand
cgaaacagggaaagcgacu

SEQ ID NO: 2361602 - RNA, 19 nt, Homo sapiens
  misc_RNA (1)...(19): siRNA sense strand
uggaggaugcagaugacaa

SEQ ID NO: 2361603 - RNA, 19 nt, Homo sapiens
  misc_RNA (1)...(19): siRNA sense strand
cuggacaccuagagaaaau

SEQ ID NO: 2361604 - RNA, 19 nt, Homo sapiens
  misc_RNA (1)...(19): siRNA sense strand
aucuggacaccuagagaaa

SEQ ID NO: 2361605 - RNA, 19 nt, Homo sapiens
  misc_RNA (1)...(19): siRNA sense strand
cauugauggugaacgggau

SEQ ID NO: 2361606 - RNA, 19 nt, Homo sapiens
  misc_RNA (1)...(19): siRNA sense strand
ccugaagauggaagacaca

SEQ ID NO: 2361607 - RNA, 19 nt, Homo sapiens
  misc_RNA (1)...(19): siRNA sense strand
cuaauccgaaacagggaaa

SEQ ID NO: 2361608 - RNA, 19 nt, Homo sapiens
  misc_RNA (1)...(19): siRNA sense strand
uuaagacaacugaggaaca

SEQ ID NO: 2361609 - RNA, 19 nt, Homo sapiens
  misc_RNA (1)...(19): siRNA sense strand
acaugcagaucgugggaga

SEQ ID NO: 2361610 - RNA, 19 nt, Homo sapiens
  misc_RNA (1)...(19): siRNA sense strand
acuuagagcaggagauguu

SEQ ID NO: 2361611 - RNA, 19 nt, Homo sapiens
  misc_RNA (1)...(19): siRNA sense strand
agucgaaauuccaggucuu

SEQ ID NO: 2361612 - RNA, 19 nt, Homo sapiens
  misc_RNA (1)...(19): siRNA sense strand
aagcaggagaagcggagaa

SEQ ID NO: 2361613 - RNA, 19 nt, Homo sapiens
  misc_RNA (1)...(19): siRNA sense strand
agaucaaagcugugguguu

SEQ ID NO: 2361614 - RNA, 19 nt, Homo sapiens
  misc_RNA (1)...(19): siRNA sense strand
cuucauugacauuugcaaa

SEQ ID NO: 2361615 - RNA, 19 nt, Homo sapiens
  misc_RNA (1)...(19): siRNA sense strand
ggcaaaaggucaucgccaa

SEQ ID NO: 2361616 - RNA, 19 nt, Homo sapiens
  misc_RNA (1)...(19): siRNA sense strand
augcagaucgugggagaaa

SEQ ID NO: 2361617 - RNA, 19 nt, Homo sapiens
  misc_RNA (1)...(19): siRNA sense strand
gggacuuagagcaggagau

SEQ ID NO: 2361618 - RNA, 19 nt, Homo sapiens
  misc_RNA (1)...(19): siRNA sense strand
acucagagaucuucaggca

SEQ ID NO: 2361619 - RNA, 19 nt, Homo sapiens
  misc_RNA (1)...(19): siRNA sense strand
ccauggaggcugagaggcu

SEQ ID NO: 2361620 - RNA, 19 nt, Homo sapiens
  misc_RNA (1)...(19): siRNA sense strand
ggacaugaguggagucagc

SEQ ID NO: 2361621 - RNA, 19 nt, Homo sapiens
  misc_RNA (1)...(19): siRNA sense strand
gggagagaaacuucgcaau

SEQ ID NO: 2361622 - RNA, 19 nt, Homo sapiens
  misc_RNA (1)...(19): siRNA sense strand
augugaaucccaagaccua

SEQ ID NO: 2361623 - RNA, 19 nt, Homo sapiens
  misc_RNA (1)...(19): siRNA sense strand
aggaagagcaagcuggacu

SEQ ID NO: 2361624 - RNA, 19 nt, Homo sapiens
  misc_RNA (1)...(19): siRNA sense strand
acaugcagaucgugggaga

SEQ ID NO: 2361625 - RNA, 19 nt, Homo sapiens
  misc_RNA (1)...(19): siRNA sense strand
acuuagagcaggagauguu

SEQ ID NO: 2361626 - RNA, 19 nt, Homo sapiens
  misc_RNA (1)...(19): siRNA sense strand
agucgaaauuccaggucuu

SEQ ID NO: 2361627 - RNA, 19 nt, Homo sapiens
  misc_RNA (1)...(19): siRNA sense strand
aagcaggagaagcggagaa

SEQ ID NO: 2361628 - RNA, 19 nt, Homo sapiens
  misc_RNA (1)...(19): siRNA sense strand
agaucaaagcugugguguu

SEQ ID NO: 2361629 - RNA, 19 nt, Homo sapiens
  misc_RNA (1)...(19): siRNA sense strand
cuucauugacauuugcaaa

SEQ ID NO: 2361630 - RNA, 19 nt, Homo sapiens
  misc_RNA (1)...(19): siRNA sense strand
ggcaaaaggucaucgccaa

SEQ ID NO: 2361631 - RNA, 19 nt, Homo sapiens
  misc_RNA (1)...(19): siRNA sense strand
augcagaucgugggagaaa

SEQ ID NO: 2361632 - RNA, 19 nt, Homo sapiens
  misc_RNA (1)...(19): siRNA sense strand
gggacuuagagcaggagau

SEQ ID NO: 2361633 - RNA, 19 nt, Homo sapiens
  misc_RNA (1)...(19): siRNA sense strand
acucagagaucuucaggca

SEQ ID NO: 2361634 - RNA, 19 nt, Homo sapiens
  misc_RNA (1)...(19): siRNA sense strand
ccauggaggcugagaggcu

SEQ ID NO: 2361635 - RNA, 19 nt, Homo sapiens
  misc_RNA (1)...(19): siRNA sense strand
ggacaugaguggagucagc

SEQ ID NO: 2361636 - RNA, 19 nt, Homo sapiens
  misc_RNA (1)...(19): siRNA sense strand
aacagaaggacaaguacaa

SEQ ID NO: 2361637 - RNA, 19 nt, Homo sapiens
  misc_RNA (1)...(19): siRNA sense strand
gggagagaaacuucgcaau

SEQ ID NO: 2361638 - RNA, 19 nt, Homo sapiens
  misc_RNA (1)...(19): siRNA sense strand
augugaaucccaagaccua

SEQ ID NO: 2361639 - RNA, 19 nt, Homo sapiens
  misc_RNA (1)...(19): siRNA sense strand
aggaagagcaagcuggacu

SEQ ID NO: 2361640 - RNA, 19 nt, Homo sapiens
  misc_RNA (1)...(19): siRNA sense strand
agggaaaucaauuggagaa

SEQ ID NO: 2361641 - RNA, 19 nt, Homo sapiens
  misc_RNA (1)...(19): siRNA sense strand
guuuacauacagaaggaaa

SEQ ID NO: 2361642 - RNA, 19 nt, Homo sapiens
  misc_RNA (1)...(19): siRNA sense strand
ugguauggaucuuagggaa

SEQ ID NO: 2361643 - RNA, 19 nt, Homo sapiens
  misc_RNA (1)...(19): siRNA sense strand
ccaaagaauaccaacgcau

SEQ ID NO: 2361644 - RNA, 19 nt, Homo sapiens
  misc_RNA (1)...(19): siRNA sense strand
gggaaaucaauuggagaau

SEQ ID NO: 2361645 - RNA, 19 nt, Homo sapiens
  misc_RNA (1)...(19): siRNA sense strand
cgguuaaugaccagacuuu

SEQ ID NO: 2361646 - RNA, 19 nt, Homo sapiens
  misc_RNA (1)...(19): siRNA sense strand
cuucaguugcauugggauu

SEQ ID NO: 2361647 - RNA, 19 nt, Homo sapiens
  misc_RNA (1)...(19): siRNA sense strand
aaggaaauucuaaaggaga

SEQ ID NO: 2361648 - RNA, 19 nt, Homo sapiens
  misc_RNA (1)...(19): siRNA sense strand
cacaaauggguguaggaga

SEQ ID NO: 2361649 - RNA, 19 nt, Homo sapiens
  misc_RNA (1)...(19): siRNA sense strand
aggagaagggaaaucaauu

SEQ ID NO: 2361650 - RNA, 19 nt, Homo sapiens
  misc_RNA (1)...(19): siRNA sense strand
uggauaacacaguggucau

SEQ ID NO: 2361651 - RNA, 19 nt, Homo sapiens
  misc_RNA (1)...(19): siRNA sense strand
ugaagagaauggaacgguu

SEQ ID NO: 2361652 - RNA, 19 nt, Homo sapiens
  misc_RNA (1)...(19): siRNA sense strand
gggcagaauucauugacuc

SEQ ID NO: 2361653 - RNA, 19 nt, Homo sapiens
  misc_RNA (1)...(19): siRNA sense strand
aagagaauggaacgguuaa

SEQ ID NO: 2361654 - RNA, 19 nt, Homo sapiens
  misc_RNA (1)...(19): siRNA sense strand
gguauggaucuuagggaag

SEQ ID NO: 2361655 - RNA, 19 nt, Homo sapiens
  misc_RNA (1)...(19): siRNA sense strand
uauccaaguaugaagauca

SEQ ID NO: 2361656 - RNA, 19 nt, Homo sapiens
  misc_RNA (1)...(19): siRNA sense strand
cuacugagcaacuggagga

SEQ ID NO: 2361657 - RNA, 19 nt, Homo sapiens
  misc_RNA (1)...(19): siRNA sense strand
agggaaaucaauuggagaa

SEQ ID NO: 2361658 - RNA, 19 nt, Homo sapiens
  misc_RNA (1)...(19): siRNA sense strand
guuuacauacagaaggaaa

SEQ ID NO: 2361659 - RNA, 19 nt, Homo sapiens
  misc_RNA (1)...(19): siRNA sense strand
ugguauggaucuuagggaa

SEQ ID NO: 2361660 - RNA, 19 nt, Homo sapiens
  misc_RNA (1)...(19): siRNA sense strand
ccaaagaauaccaacgcau

SEQ ID NO: 2361661 - RNA, 19 nt, Homo sapiens
  misc_RNA (1)...(19): siRNA sense strand
gggaaaucaauuggagaau

SEQ ID NO: 2361662 - RNA, 19 nt, Homo sapiens
  misc_RNA (1)...(19): siRNA sense strand
cgguuaaugaccagacuuu

SEQ ID NO: 2361663 - RNA, 19 nt, Homo sapiens
  misc_RNA (1)...(19): siRNA sense strand
cuucaguugcauugggauu

SEQ ID NO: 2361664 - RNA, 19 nt, Homo sapiens
  misc_RNA (1)...(19): siRNA sense strand
aaggaaauucuaaaggaga

SEQ ID NO: 2361665 - RNA, 19 nt, Homo sapiens
  misc_RNA (1)...(19): siRNA sense strand
cacaaauggguguaggaga

SEQ ID NO: 2361666 - RNA, 19 nt, Homo sapiens
  misc_RNA (1)...(19): siRNA sense strand
aggagaagggaaaucaauu

SEQ ID NO: 2361667 - RNA, 19 nt, Homo sapiens
  misc_RNA (1)...(19): siRNA sense strand
uggauaacacaguggucau

SEQ ID NO: 2361668 - RNA, 19 nt, Homo sapiens
  misc_RNA (1)...(19): siRNA sense strand
ugaagagaauggaacgguu

SEQ ID NO: 2361669 - RNA, 19 nt, Homo sapiens
  misc_RNA (1)...(19): siRNA sense strand
gggcagaauucauugacuc

SEQ ID NO: 2361670 - RNA, 19 nt, Homo sapiens
  misc_RNA (1)...(19): siRNA sense strand
aagagaauggaacgguuaa

SEQ ID NO: 2361671 - RNA, 19 nt, Homo sapiens
  misc_RNA (1)...(19): siRNA sense strand
gguauggaucuuagggaag

SEQ ID NO: 2361672 - RNA, 19 nt, Homo sapiens
  misc_RNA (1)...(19): siRNA sense strand
uauccaaguaugaagauca

SEQ ID NO: 2361673 - RNA, 19 nt, Homo sapiens
  misc_RNA (1)...(19): siRNA sense strand
cuacugagcaacuggagga

SEQ ID NO: 2361674 - RNA, 19 nt, Homo sapiens
  misc_RNA (1)...(19): siRNA sense strand
agggaaaucaauuggagaa

SEQ ID NO: 2361675 - RNA, 19 nt, Homo sapiens
  misc_RNA (1)...(19): siRNA sense strand
ccaaagaauaccaacgcau

SEQ ID NO: 2361676 - RNA, 19 nt, Homo sapiens
  misc_RNA (1)...(19): siRNA sense strand
gggaaaucaauuggagaau

SEQ ID NO: 2361677 - RNA, 19 nt, Homo sapiens
  misc_RNA (1)...(19): siRNA sense strand
cgguuaaugaccagacuuu

SEQ ID NO: 2361678 - RNA, 19 nt, Homo sapiens
  misc_RNA (1)...(19): siRNA sense strand
cuucaguugcauugggauu

SEQ ID NO: 2361679 - RNA, 19 nt, Homo sapiens
  misc_RNA (1)...(19): siRNA sense strand
aaggaaauucuaaaggaga

SEQ ID NO: 2361680 - RNA, 19 nt, Homo sapiens
  misc_RNA (1)...(19): siRNA sense strand
cacaaauggguguaggaga

SEQ ID NO: 2361681 - RNA, 19 nt, Homo sapiens
  misc_RNA (1)...(19): siRNA sense strand
aggagaagggaaaucaauu

SEQ ID NO: 2361682 - RNA, 19 nt, Homo sapiens
  misc_RNA (1)...(19): siRNA sense strand
uggauaacacaguggucau

SEQ ID NO: 2361683 - RNA, 19 nt, Homo sapiens
  misc_RNA (1)...(19): siRNA sense strand
ugaagagaauggaacgguu

SEQ ID NO: 2361684 - RNA, 19 nt, Homo sapiens
  misc_RNA (1)...(19): siRNA sense strand
gggcagaauucauugacuc

SEQ ID NO: 2361685 - RNA, 19 nt, Homo sapiens
  misc_RNA (1)...(19): siRNA sense strand
aagagaauggaacgguuaa

SEQ ID NO: 2361686 - RNA, 19 nt, Homo sapiens
  misc_RNA (1)...(19): siRNA sense strand
cuacugagcaacuggagga

SEQ ID NO: 2361687 - RNA, 19 nt, Homo sapiens
  misc_RNA (1)...(19): siRNA sense strand
gggaaucucugaugccaca

SEQ ID NO: 2361688 - RNA, 19 nt, Homo sapiens
  misc_RNA (1)...(19): siRNA sense strand
guacagaaauggagggcaa

SEQ ID NO: 2361689 - RNA, 19 nt, Homo sapiens
  misc_RNA (1)...(19): siRNA sense strand
caacagagccagcaggagu

SEQ ID NO: 2361690 - RNA, 19 nt, Homo sapiens
  misc_RNA (1)...(19): siRNA sense strand
gcaacaaagugaugggagc

SEQ ID NO: 2361691 - RNA, 19 nt, Homo sapiens
  misc_RNA (1)...(19): siRNA sense strand
ccuaccagcucuaugggaa

SEQ ID NO: 2361692 - RNA, 19 nt, Homo sapiens
  misc_RNA (1)...(19): siRNA sense strand
agucgguggugguggaguu

SEQ ID NO: 2361693 - RNA, 19 nt, Homo sapiens
  misc_RNA (1)...(19): siRNA sense strand
ccuggauggagcuggacaa

SEQ ID NO: 2361694 - RNA, 19 nt, Homo sapiens
  misc_RNA (1)...(19): siRNA sense strand
uggaguaccugcugaggca

SEQ ID NO: 2361695 - RNA, 19 nt, Homo sapiens
  misc_RNA (1)...(19): siRNA sense strand
agcuggagucagugggaau

SEQ ID NO: 2361696 - RNA, 19 nt, Homo sapiens
  misc_RNA (1)...(19): siRNA sense strand
cagcaggagaugugcagca

SEQ ID NO: 2361697 - RNA, 19 nt, Homo sapiens
  misc_RNA (1)...(19): siRNA sense strand
ccaugugaucaaacgguau

SEQ ID NO: 2361698 - RNA, 19 nt, Homo sapiens
  misc_RNA (1)...(19): siRNA sense strand
cagaaauggagggcaaaga

SEQ ID NO: 2361699 - RNA, 19 nt, Homo sapiens
  misc_RNA (1)...(19): siRNA sense strand
ggaaguucagugaggccau

SEQ ID NO: 2361700 - RNA, 19 nt, Homo sapiens
  misc_RNA (1)...(19): siRNA sense strand
gguacuggcugaugcgaca

SEQ ID NO: 2361701 - RNA, 19 nt, Homo sapiens
  misc_RNA (1)...(19): siRNA sense strand
cgggaaaucagcaagguca

SEQ ID NO: 2361702 - RNA, 19 nt, Homo sapiens
  misc_RNA (1)...(19): siRNA sense strand
gggaaaucagcaaggucau

SEQ ID NO: 2361703 - RNA, 19 nt, Homo sapiens
  misc_RNA (1)...(19): siRNA sense strand
gaagaugagcugcuggaga

SEQ ID NO: 2361704 - RNA, 19 nt, Homo sapiens
  misc_RNA (1)...(19): siRNA sense strand
agaagaagucauaggucgu

SEQ ID NO: 2361705 - RNA, 19 nt, Homo sapiens
  misc_RNA (1)...(19): siRNA sense strand
ccaggaaugcaccggaaaa

SEQ ID NO: 2361706 - RNA, 19 nt, Homo sapiens
  misc_RNA (1)...(19): siRNA sense strand
aaagacaguaagaggaagu

SEQ ID NO: 2361707 - RNA, 19 nt, Homo sapiens
  misc_RNA (1)...(19): siRNA sense strand
gagaggagcugacagggua

SEQ ID NO: 2361708 - RNA, 19 nt, Homo sapiens
  misc_RNA (1)...(19): siRNA sense strand
gguacuggcugaugcgaca

SEQ ID NO: 2361709 - RNA, 19 nt, Homo sapiens
  misc_RNA (1)...(19): siRNA sense strand
cccugaaggccgaggaaca

SEQ ID NO: 2361710 - RNA, 19 nt, Homo sapiens
  misc_RNA (1)...(19): siRNA sense strand
gaacaaucucucaggagga

SEQ ID NO: 2361711 - RNA, 19 nt, Homo sapiens
  misc_RNA (1)...(19): siRNA sense strand
cgggaaaucagcaagguca

SEQ ID NO: 2361712 - RNA, 19 nt, Homo sapiens
  misc_RNA (1)...(19): siRNA sense strand
gggaaaucagcaaggucau

SEQ ID NO: 2361713 - RNA, 19 nt, Homo sapiens
  misc_RNA (1)...(19): siRNA sense strand
gaagaugagcugcuggaga

SEQ ID NO: 2361714 - RNA, 19 nt, Homo sapiens
  misc_RNA (1)...(19): siRNA sense strand
aggaggacuuugagcgacu

SEQ ID NO: 2361715 - RNA, 19 nt, Homo sapiens
  misc_RNA (1)...(19): siRNA sense strand
agacgagaucuaugagcuu

SEQ ID NO: 2361716 - RNA, 19 nt, Homo sapiens
  misc_RNA (1)...(19): siRNA sense strand
aagccuaccuucugcgaca

SEQ ID NO: 2361717 - RNA, 19 nt, Homo sapiens
  misc_RNA (1)...(19): siRNA sense strand
ccugaaggccgaggaacaa

SEQ ID NO: 2361718 - RNA, 19 nt, Homo sapiens
  misc_RNA (1)...(19): siRNA sense strand
agaagaagucauaggucgu

SEQ ID NO: 2361719 - RNA, 19 nt, Homo sapiens
  misc_RNA (1)...(19): siRNA sense strand
ugguggagucuguguucaa

SEQ ID NO: 2361720 - RNA, 19 nt, Homo sapiens
  misc_RNA (1)...(19): siRNA sense strand
cagcuguggcuccgaggaa

SEQ ID NO: 2361721 - RNA, 19 nt, Homo sapiens
  misc_RNA (1)...(19): siRNA sense strand
ccaggaaugcaccggaaaa

SEQ ID NO: 2361722 - RNA, 19 nt, Homo sapiens
  misc_RNA (1)...(19): siRNA sense strand
aaagacaguaagaggaagu

SEQ ID NO: 2361723 - RNA, 19 nt, Homo sapiens
  misc_RNA (1)...(19): siRNA sense strand
gagaggagcugacagggua

SEQ ID NO: 2361724 - RNA, 19 nt, Homo sapiens
  misc_RNA (1)...(19): siRNA sense strand
gguacuggcugaugcgaca

SEQ ID NO: 2361725 - RNA, 19 nt, Homo sapiens
  misc_RNA (1)...(19): siRNA sense strand
cccugaaggccgaggaaca

SEQ ID NO: 2361726 - RNA, 19 nt, Homo sapiens
  misc_RNA (1)...(19): siRNA sense strand
gaacaaucucucaggagga

SEQ ID NO: 2361727 - RNA, 19 nt, Homo sapiens
  misc_RNA (1)...(19): siRNA sense strand
cgggaaaucagcaagguca

SEQ ID NO: 2361728 - RNA, 19 nt, Homo sapiens
  misc_RNA (1)...(19): siRNA sense strand
gggaaaucagcaaggucau

SEQ ID NO: 2361729 - RNA, 19 nt, Homo sapiens
  misc_RNA (1)...(19): siRNA sense strand
gaagaugagcugcuggaga

SEQ ID NO: 2361730 - RNA, 19 nt, Homo sapiens
  misc_RNA (1)...(19): siRNA sense strand
aggaggacuuugagcgacu

SEQ ID NO: 2361731 - RNA, 19 nt, Homo sapiens
  misc_RNA (1)...(19): siRNA sense strand
agacgagaucuaugagcuu

SEQ ID NO: 2361732 - RNA, 19 nt, Homo sapiens
  misc_RNA (1)...(19): siRNA sense strand
aagccuaccuucugcgaca

SEQ ID NO: 2361733 - RNA, 19 nt, Homo sapiens
  misc_RNA (1)...(19): siRNA sense strand
ccugaaggccgaggaacaa

SEQ ID NO: 2361734 - RNA, 19 nt, Homo sapiens
  misc_RNA (1)...(19): siRNA sense strand
agaagaagucauaggucgu

SEQ ID NO: 2361735 - RNA, 19 nt, Homo sapiens
  misc_RNA (1)...(19): siRNA sense strand
ugguggagucuguguucaa

SEQ ID NO: 2361736 - RNA, 19 nt, Homo sapiens
  misc_RNA (1)...(19): siRNA sense strand
cagcuguggcuccgaggaa

SEQ ID NO: 2361737 - RNA, 19 nt, Homo sapiens
  misc_RNA (1)...(19): siRNA sense strand
ccaggaaugcaccggaaaa

SEQ ID NO: 2361738 - RNA, 19 nt, Homo sapiens
  misc_RNA (1)...(19): siRNA sense strand
aaagacaguaagaggaagu

SEQ ID NO: 2361739 - RNA, 19 nt, Homo sapiens
  misc_RNA (1)...(19): siRNA sense strand
gagaggagcugacagggua

SEQ ID NO: 2361740 - RNA, 19 nt, Homo sapiens
  misc_RNA (1)...(19): siRNA sense strand
gguacuggcugaugcgaca

SEQ ID NO: 2361741 - RNA, 19 nt, Homo sapiens
  misc_RNA (1)...(19): siRNA sense strand
cccugaaggccgaggaaca

SEQ ID NO: 2361742 - RNA, 19 nt, Homo sapiens
  misc_RNA (1)...(19): siRNA sense strand
gaacaaucucucaggagga

SEQ ID NO: 2361743 - RNA, 19 nt, Homo sapiens
  misc_RNA (1)...(19): siRNA sense strand
cgggaaaucagcaagguca

SEQ ID NO: 2361744 - RNA, 19 nt, Homo sapiens
  misc_RNA (1)...(19): siRNA sense strand
gggaaaucagcaaggucau

SEQ ID NO: 2361745 - RNA, 19 nt, Homo sapiens
  misc_RNA (1)...(19): siRNA sense strand
gaagaugagcugcuggaga

SEQ ID NO: 2361746 - RNA, 19 nt, Homo sapiens
  misc_RNA (1)...(19): siRNA sense strand
aggaggacuuugagcgacu

SEQ ID NO: 2361747 - RNA, 19 nt, Homo sapiens
  misc_RNA (1)...(19): siRNA sense strand
agacgagaucuaugagcuu

SEQ ID NO: 2361748 - RNA, 19 nt, Homo sapiens
  misc_RNA (1)...(19): siRNA sense strand
aagccuaccuucugcgaca

SEQ ID NO: 2361749 - RNA, 19 nt, Homo sapiens
  misc_RNA (1)...(19): siRNA sense strand
ccugaaggccgaggaacaa

SEQ ID NO: 2361750 - RNA, 19 nt, Homo sapiens
  misc_RNA (1)...(19): siRNA sense strand
agaagaagucauaggucgu

SEQ ID NO: 2361751 - RNA, 19 nt, Homo sapiens
  misc_RNA (1)...(19): siRNA sense strand
ugguggagucuguguucaa

SEQ ID NO: 2361752 - RNA, 19 nt, Homo sapiens
  misc_RNA (1)...(19): siRNA sense strand
cagcuguggcuccgaggaa

SEQ ID NO: 2361753 - RNA, 19 nt, Homo sapiens
  misc_RNA (1)...(19): siRNA sense strand
ccaggaaugcaccggaaaa

SEQ ID NO: 2361754 - RNA, 19 nt, Homo sapiens
  misc_RNA (1)...(19): siRNA sense strand
aaagacaguaagaggaagu

SEQ ID NO: 2361755 - RNA, 19 nt, Homo sapiens
  misc_RNA (1)...(19): siRNA sense strand
ugaugaagcagguggagga

SEQ ID NO: 2361756 - RNA, 19 nt, Homo sapiens
  misc_RNA (1)...(19): siRNA sense strand
ucgccaaagugaacagcau

SEQ ID NO: 2361757 - RNA, 19 nt, Homo sapiens
  misc_RNA (1)...(19): siRNA sense strand
ggcgcaaggaggagauaga

SEQ ID NO: 2361758 - RNA, 19 nt, Homo sapiens
  misc_RNA (1)...(19): siRNA sense strand
ugguggacugugagggcua

SEQ ID NO: 2361759 - RNA, 19 nt, Homo sapiens
  misc_RNA (1)...(19): siRNA sense strand
aagcgcagaucaaggccaa

SEQ ID NO: 2361760 - RNA, 19 nt, Homo sapiens
  misc_RNA (1)...(19): siRNA sense strand
ccgcaaacugggucagagu

SEQ ID NO: 2361761 - RNA, 19 nt, Homo sapiens
  misc_RNA (1)...(19): siRNA sense strand
gcagaaugaucacaaggca

SEQ ID NO: 2361762 - RNA, 19 nt, Homo sapiens
  misc_RNA (1)...(19): siRNA sense strand
cugugaacacccagaacuu

SEQ ID NO: 2361763 - RNA, 19 nt, Homo sapiens
  misc_RNA (1)...(19): siRNA sense strand
aggaagaguuauugggacu

SEQ ID NO: 2361764 - RNA, 19 nt, Homo sapiens
  misc_RNA (1)...(19): siRNA sense strand
gggcauuggagaugaggau

SEQ ID NO: 2361765 - RNA, 19 nt, Homo sapiens
  misc_RNA (1)...(19): siRNA sense strand
ccuucggagucaagaguau

SEQ ID NO: 2361766 - RNA, 19 nt, Homo sapiens
  misc_RNA (1)...(19): siRNA sense strand
caugcaagcuguucggcaa

SEQ ID NO: 2361767 - RNA, 19 nt, Homo sapiens
  misc_RNA (1)...(19): siRNA sense strand
gaagaaaucuggcggcagu

SEQ ID NO: 2361768 - RNA, 19 nt, Homo sapiens
  misc_RNA (1)...(19): siRNA sense strand
ccagugauguccacggcaa

SEQ ID NO: 2361769 - RNA, 19 nt, Homo sapiens
  misc_RNA (1)...(19): siRNA sense strand
aggagagagcaguuagaga

SEQ ID NO: 2361770 - RNA, 19 nt, Homo sapiens
  misc_RNA (1)...(19): siRNA sense strand
agguagaacagaggagaga

SEQ ID NO: 2361771 - RNA, 19 nt, Homo sapiens
  misc_RNA (1)...(19): siRNA sense strand
augcgaugcuggcggguca

SEQ ID NO: 2361772 - RNA, 19 nt, Homo sapiens
  misc_RNA (1)...(19): siRNA sense strand
guugaugaacugaugguga

SEQ ID NO: 2361773 - RNA, 19 nt, Homo sapiens
  misc_RNA (1)...(19): siRNA sense strand
agaaagucuccaagaagga

SEQ ID NO: 2361774 - RNA, 19 nt, Homo sapiens
  misc_RNA (1)...(19): siRNA sense strand
guaccauugcccaguggaa

SEQ ID NO: 2361775 - RNA, 19 nt, Homo sapiens
  misc_RNA (1)...(19): siRNA sense strand
cuuuaugcucagacgguau

SEQ ID NO: 2361776 - RNA, 19 nt, Homo sapiens
  misc_RNA (1)...(19): siRNA sense strand
gugaagaaaucuggcggca

SEQ ID NO: 2361777 - RNA, 19 nt, Homo sapiens
  misc_RNA (1)...(19): siRNA sense strand
cuucgagggcauuggagau

SEQ ID NO: 2361778 - RNA, 19 nt, Homo sapiens
  misc_RNA (1)...(19): siRNA sense strand
gcgucaagaaggaggaaga

SEQ ID NO: 2361779 - RNA, 19 nt, Homo sapiens
  misc_RNA (1)...(19): siRNA sense strand
gugaauuugcaaagaagaa

SEQ ID NO: 2361780 - RNA, 19 nt, Homo sapiens
  misc_RNA (1)...(19): siRNA sense strand
agaaggaugcugaggaaga

SEQ ID NO: 2361781 - RNA, 19 nt, Homo sapiens
  misc_RNA (1)...(19): siRNA sense strand
acaugauggacgagggcua

SEQ ID NO: 2361782 - RNA, 19 nt, Homo sapiens
  misc_RNA (1)...(19): siRNA sense strand
aggacugggaagagagcaa

SEQ ID NO: 2361783 - RNA, 19 nt, Homo sapiens
  misc_RNA (1)...(19): siRNA sense strand
cgggauagaaguaggcaca

SEQ ID NO: 2361784 - RNA, 19 nt, Homo sapiens
  misc_RNA (1)...(19): siRNA sense strand
gggaagaugaccagaggca

SEQ ID NO: 2361785 - RNA, 19 nt, Homo sapiens
  misc_RNA (1)...(19): siRNA sense strand
cugcaguggaagaacaaua

SEQ ID NO: 2361786 - RNA, 19 nt, Homo sapiens
  misc_RNA (1)...(19): siRNA sense strand
ccggaaagacagacauuau

SEQ ID NO: 2361787 - RNA, 19 nt, Homo sapiens
  misc_RNA (1)...(19): siRNA sense strand
agagcgagauggaggguca

SEQ ID NO: 2361788 - RNA, 19 nt, Homo sapiens
  misc_RNA (1)...(19): siRNA sense strand
gggagcagaaggagcgcaa

SEQ ID NO: 2361789 - RNA, 19 nt, Homo sapiens
  misc_RNA (1)...(19): siRNA sense strand
cagagaacaccuugaucaa

SEQ ID NO: 2361790 - RNA, 19 nt, Homo sapiens
  misc_RNA (1)...(19): siRNA sense strand
gagcagaaggagcgcaaga

SEQ ID NO: 2361791 - RNA, 19 nt, Homo sapiens
  misc_RNA (1)...(19): siRNA sense strand
gaagaaaaggauuggaaga

SEQ ID NO: 2361792 - RNA, 19 nt, Homo sapiens
  misc_RNA (1)...(19): siRNA sense strand
ccacgauggaugcggagaa

SEQ ID NO: 2361793 - RNA, 19 nt, Homo sapiens
  misc_RNA (1)...(19): siRNA sense strand
ccacagugcccgagaucca

SEQ ID NO: 2361794 - RNA, 19 nt, Homo sapiens
  misc_RNA (1)...(19): siRNA sense strand
ccugaaacggagagagcga

SEQ ID NO: 2361795 - RNA, 19 nt, Homo sapiens
  misc_RNA (1)...(19): siRNA sense strand
gcguagcagcagaagaaau

SEQ ID NO: 2361796 - RNA, 19 nt, Homo sapiens
  misc_RNA (1)...(19): siRNA sense strand
gacagaucaaugaggauaa

SEQ ID NO: 2361797 - RNA, 19 nt, Homo sapiens
  misc_RNA (1)...(19): siRNA sense strand
cgauggaugcggagaaguu

SEQ ID NO: 2361798 - RNA, 19 nt, Homo sapiens
  misc_RNA (1)...(19): siRNA sense strand
cagauaaagcugugacgga

SEQ ID NO: 2361799 - RNA, 19 nt, Homo sapiens
  misc_RNA (1)...(19): siRNA sense strand
gucgagaggaggagaguga

SEQ ID NO: 2361800 - RNA, 19 nt, Homo sapiens
  misc_RNA (1)...(19): siRNA sense strand
agaaggaggaagagccaga

SEQ ID NO: 2361801 - RNA, 19 nt, Homo sapiens
  misc_RNA (1)...(19): siRNA sense strand
cuucugaccuccaggccaa

SEQ ID NO: 2361802 - RNA, 19 nt, Homo sapiens
  misc_RNA (1)...(19): siRNA sense strand
cccgagauccagaggacua

SEQ ID NO: 2361803 - RNA, 19 nt, Homo sapiens
  misc_RNA (1)...(19): siRNA sense strand
gauaacgagcgcugggaga

SEQ ID NO: 2361804 - RNA, 19 nt, Homo sapiens
  misc_RNA (1)...(19): siRNA sense strand
gggaccaaacugggagaua

SEQ ID NO: 2361805 - RNA, 19 nt, Homo sapiens
  misc_RNA (1)...(19): siRNA sense strand
gauucugguuauugcaaau

SEQ ID NO: 2361806 - RNA, 19 nt, Homo sapiens
  misc_RNA (1)...(19): siRNA sense strand
aggauuggaagaaggagaa

SEQ ID NO: 2361807 - RNA, 19 nt, Homo sapiens
  misc_RNA (1)...(19): siRNA sense strand
aggaugggaagguggacua

SEQ ID NO: 2361808 - RNA, 19 nt, Homo sapiens
  misc_RNA (1)...(19): siRNA sense strand
augcuaaggccaugcggaa

SEQ ID NO: 2361809 - RNA, 19 nt, Homo sapiens
  misc_RNA (1)...(19): siRNA sense strand
gcagcagaucagagcgaga

SEQ ID NO: 2361810 - RNA, 19 nt, Homo sapiens
  misc_RNA (1)...(19): siRNA sense strand
agacagaucaaugaggaua

SEQ ID NO: 2361811 - RNA, 19 nt, Homo sapiens
  misc_RNA (1)...(19): siRNA sense strand
aggacuuugaagaggacaa

SEQ ID NO: 2361812 - RNA, 19 nt, Homo sapiens
  misc_RNA (1)...(19): siRNA sense strand
gggacagagaugagcggga

SEQ ID NO: 2361813 - RNA, 19 nt, Homo sapiens
  misc_RNA (1)...(19): siRNA sense strand
ggucaguguuucaggcucu

SEQ ID NO: 2361814 - RNA, 19 nt, Homo sapiens
  misc_RNA (1)...(19): siRNA sense strand
auauaaugggcgucaagaa

SEQ ID NO: 2361815 - RNA, 19 nt, Homo sapiens
  misc_RNA (1)...(19): siRNA sense strand
aggaggaagagccagauaa

SEQ ID NO: 2361816 - RNA, 19 nt, Homo sapiens
  misc_RNA (1)...(19): siRNA sense strand
acuacaggacagagcagaa

SEQ ID NO: 2361817 - RNA, 19 nt, Homo sapiens
  misc_RNA (1)...(19): siRNA sense strand
uggugugagcgaagaguuu

SEQ ID NO: 2361818 - RNA, 19 nt, Homo sapiens
  misc_RNA (1)...(19): siRNA sense strand
aaggauuggaagaaggaga

SEQ ID NO: 2361819 - RNA, 19 nt, Homo sapiens
  misc_RNA (1)...(19): siRNA sense strand
ggacagagaugagcgggau

SEQ ID NO: 2361820 - RNA, 19 nt, Homo sapiens
  misc_RNA (1)...(19): siRNA sense strand
aggcaagccgaucgggauu

SEQ ID NO: 2361821 - RNA, 19 nt, Homo sapiens
  misc_RNA (1)...(19): siRNA sense strand
ugucaguggccaagagagu

SEQ ID NO: 2361822 - RNA, 19 nt, Homo sapiens
  misc_RNA (1)...(19): siRNA sense strand
auguuuaccugcaguggaa

SEQ ID NO: 2361823 - RNA, 19 nt, Homo sapiens
  misc_RNA (1)...(19): siRNA sense strand
gacagagaugagcgggaua

SEQ ID NO: 2361824 - RNA, 19 nt, Homo sapiens
  misc_RNA (1)...(19): siRNA sense strand
gaagaugaccagaggcaag

SEQ ID NO: 2361825 - RNA, 19 nt, Homo sapiens
  misc_RNA (1)...(19): siRNA sense strand
ggagacagaucaaugagga

SEQ ID NO: 2361826 - RNA, 19 nt, Homo sapiens
  misc_RNA (1)...(19): siRNA sense strand
gagacagaucaaugaggau

SEQ ID NO: 2361827 - RNA, 19 nt, Homo sapiens
  misc_RNA (1)...(19): siRNA sense strand
caagaaggaggaagagcca

SEQ ID NO: 2361828 - RNA, 19 nt, Homo sapiens
  misc_RNA (1)...(19): siRNA sense strand
agagcaaggaugaccagaa

SEQ ID NO: 2361829 - RNA, 19 nt, Homo sapiens
  misc_RNA (1)...(19): siRNA sense strand
ucggaaaggcagccagaca

SEQ ID NO: 2361830 - RNA, 19 nt, Homo sapiens
  misc_RNA (1)...(19): siRNA sense strand
ggacuggacuugcuggcuu

SEQ ID NO: 2361831 - RNA, 19 nt, Homo sapiens
  misc_RNA (1)...(19): siRNA sense strand
acaugaagagaaagagcga

SEQ ID NO: 2361832 - RNA, 19 nt, Homo sapiens
  misc_RNA (1)...(19): siRNA sense strand
ccuacaaggacugggaaga

SEQ ID NO: 2361833 - RNA, 19 nt, Homo sapiens
  misc_RNA (1)...(19): siRNA sense strand
aaacagaagcagaagcgca

SEQ ID NO: 2361834 - RNA, 19 nt, Homo sapiens
  misc_RNA (1)...(19): siRNA sense strand
gaagaugguuacacggacu

SEQ ID NO: 2361835 - RNA, 19 nt, Homo sapiens
  misc_RNA (1)...(19): siRNA sense strand
aaggagaaaucgcgggauc

SEQ ID NO: 2361836 - RNA, 19 nt, Homo sapiens
  misc_RNA (1)...(19): siRNA sense strand
agaaguaggcacagcagca

SEQ ID NO: 2361837 - RNA, 19 nt, Homo sapiens
  misc_RNA (1)...(19): siRNA sense strand
ugcauaaacagaagcagaa

SEQ ID NO: 2361838 - RNA, 19 nt, Homo sapiens
  misc_RNA (1)...(19): siRNA sense strand
cugccauggaggaggagau

SEQ ID NO: 2361839 - RNA, 19 nt, Homo sapiens
  misc_RNA (1)...(19): siRNA sense strand
ggauuggaagaaggagaaa

SEQ ID NO: 2361840 - RNA, 19 nt, Homo sapiens
  misc_RNA (1)...(19): siRNA sense strand
gagacaaaccgcaugcuca

SEQ ID NO: 2361841 - RNA, 19 nt, Homo sapiens
  misc_RNA (1)...(19): siRNA sense strand
ccaaacugggagauauaau

SEQ ID NO: 2361842 - RNA, 19 nt, Homo sapiens
  misc_RNA (1)...(19): siRNA sense strand
aggcaauagaagagaacaa

SEQ ID NO: 2361843 - RNA, 19 nt, Homo sapiens
  misc_RNA (1)...(19): siRNA sense strand
uaaaauggcagaagagaaa

SEQ ID NO: 2361844 - RNA, 19 nt, Homo sapiens
  misc_RNA (1)...(19): siRNA sense strand
guaaaauggcagaagagaa

SEQ ID NO: 2361845 - RNA, 19 nt, Homo sapiens
  misc_RNA (1)...(19): siRNA sense strand
aggugaaagaacuggagaa

SEQ ID NO: 2361846 - RNA, 19 nt, Homo sapiens
  misc_RNA (1)...(19): siRNA sense strand
agaacaacaacuucaguaa

SEQ ID NO: 2361847 - RNA, 19 nt, Homo sapiens
  misc_RNA (1)...(19): siRNA sense strand
acauugaagaagugcggaa

SEQ ID NO: 2361848 - RNA, 19 nt, Homo sapiens
  misc_RNA (1)...(19): siRNA sense strand
gaacaacaacuucaguaaa

SEQ ID NO: 2361849 - RNA, 19 nt, Homo sapiens
  misc_RNA (1)...(19): siRNA sense strand
ggaagaacaaagaauccaa

SEQ ID NO: 2361850 - RNA, 19 nt, Homo sapiens
  misc_RNA (1)...(19): siRNA sense strand
gugcggaagaacaaagaau

SEQ ID NO: 2361851 - RNA, 19 nt, Homo sapiens
  misc_RNA (1)...(19): siRNA sense strand
ccacaaaauggaagcuaau

SEQ ID NO: 2361852 - RNA, 19 nt, Homo sapiens
  misc_RNA (1)...(19): siRNA sense strand
cuaauaaagagaaccgaga

SEQ ID NO: 2361853 - RNA, 19 nt, Homo sapiens
  misc_RNA (1)...(19): siRNA sense strand
cgagagaaggauaagcaca

SEQ ID NO: 2361854 - RNA, 19 nt, Homo sapiens
  misc_RNA (1)...(19): siRNA sense strand
cugauauccaggugaaaga

SEQ ID NO: 2361855 - RNA, 19 nt, Homo sapiens
  misc_RNA (1)...(19): siRNA sense strand
cugagaaacgagagcacga

SEQ ID NO: 2361856 - RNA, 19 nt, Homo sapiens
  misc_RNA (1)...(19): siRNA sense strand
gaagagaaacugacccaca

SEQ ID NO: 2361857 - RNA, 19 nt, Homo sapiens
  misc_RNA (1)...(19): siRNA sense strand
cagaagagaaacugaccca

SEQ ID NO: 2361858 - RNA, 19 nt, Homo sapiens
  misc_RNA (1)...(19): siRNA sense strand
aagagaaccgagaggcaca

SEQ ID NO: 2361859 - RNA, 19 nt, Homo sapiens
  misc_RNA (1)...(19): siRNA sense strand
agaacaaagaauccaaaga

SEQ ID NO: 2361860 - RNA, 19 nt, Homo sapiens
  misc_RNA (1)...(19): siRNA sense strand
cgagacugaagcugacuaa

SEQ ID NO: 2361861 - RNA, 19 nt, Homo sapiens
  misc_RNA (1)...(19): siRNA sense strand
uaaagagaaccgagaggca

SEQ ID NO: 2361862 - RNA, 19 nt, Homo sapiens
  misc_RNA (1)...(19): siRNA sense strand
guuugcgagagaaggauaa

SEQ ID NO: 2361863 - RNA, 19 nt, Homo sapiens
  misc_RNA (1)...(19): siRNA sense strand
ccaaagacccugcugacga

SEQ ID NO: 2361864 - RNA, 19 nt, Homo sapiens
  misc_RNA (1)...(19): siRNA sense strand
ccuccaaagaagaaggauc

SEQ ID NO: 2361865 - RNA, 19 nt, Homo sapiens
  misc_RNA (1)...(19): siRNA sense strand
ugaaagaacuggagaagcg

SEQ ID NO: 2361866 - RNA, 19 nt, Homo sapiens
  misc_RNA (1)...(19): siRNA sense strand
gagaacaacaacuucagua

SEQ ID NO: 2361867 - RNA, 19 nt, Homo sapiens
  misc_RNA (1)...(19): siRNA sense strand
cccacaaaauggaagcuaa

SEQ ID NO: 2361868 - RNA, 19 nt, Homo sapiens
  misc_RNA (1)...(19): siRNA sense strand
cccaugaagcugaggucuu

SEQ ID NO: 2361869 - RNA, 19 nt, Homo sapiens
  misc_RNA (1)...(19): siRNA sense strand
cguuugcgagagaaggaua

SEQ ID NO: 2361870 - RNA, 19 nt, Homo sapiens
  misc_RNA (1)...(19): siRNA sense strand
gaagaacaaagaauccaaa

SEQ ID NO: 2361871 - RNA, 19 nt, Homo sapiens
  misc_RNA (1)...(19): siRNA sense strand
agaaacgagagcacgagaa

SEQ ID NO: 2361872 - RNA, 19 nt, Homo sapiens
  misc_RNA (1)...(19): siRNA sense strand
cuccaaagaagaaggaucu

SEQ ID NO: 2361873 - RNA, 19 nt, Homo sapiens
  misc_RNA (1)...(19): siRNA sense strand
aggcaauagaagagaacaa

SEQ ID NO: 2361874 - RNA, 19 nt, Homo sapiens
  misc_RNA (1)...(19): siRNA sense strand
uaaaauggcagaagagaaa

SEQ ID NO: 2361875 - RNA, 19 nt, Homo sapiens
  misc_RNA (1)...(19): siRNA sense strand
guaaaauggcagaagagaa

SEQ ID NO: 2361876 - RNA, 19 nt, Homo sapiens
  misc_RNA (1)...(19): siRNA sense strand
aggugaaagaacuggagaa

SEQ ID NO: 2361877 - RNA, 19 nt, Homo sapiens
  misc_RNA (1)...(19): siRNA sense strand
agaacaacaacuucaguaa

SEQ ID NO: 2361878 - RNA, 19 nt, Homo sapiens
  misc_RNA (1)...(19): siRNA sense strand
acauugaagaagugcggaa

SEQ ID NO: 2361879 - RNA, 19 nt, Homo sapiens
  misc_RNA (1)...(19): siRNA sense strand
gaacaacaacuucaguaaa

SEQ ID NO: 2361880 - RNA, 19 nt, Homo sapiens
  misc_RNA (1)...(19): siRNA sense strand
ggaagaacaaagaauccaa

SEQ ID NO: 2361881 - RNA, 19 nt, Homo sapiens
  misc_RNA (1)...(19): siRNA sense strand
gugcggaagaacaaagaau

SEQ ID NO: 2361882 - RNA, 19 nt, Homo sapiens
  misc_RNA (1)...(19): siRNA sense strand
ccacaaaauggaagcuaau

SEQ ID NO: 2361883 - RNA, 19 nt, Homo sapiens
  misc_RNA (1)...(19): siRNA sense strand
cuaauaaagagaaccgaga

SEQ ID NO: 2361884 - RNA, 19 nt, Homo sapiens
  misc_RNA (1)...(19): siRNA sense strand
cgagagaaggauaagcaca

SEQ ID NO: 2361885 - RNA, 19 nt, Homo sapiens
  misc_RNA (1)...(19): siRNA sense strand
cugauauccaggugaaaga

SEQ ID NO: 2361886 - RNA, 19 nt, Homo sapiens
  misc_RNA (1)...(19): siRNA sense strand
cugagaaacgagagcacga

SEQ ID NO: 2361887 - RNA, 19 nt, Homo sapiens
  misc_RNA (1)...(19): siRNA sense strand
gaagagaaacugacccaca

SEQ ID NO: 2361888 - RNA, 19 nt, Homo sapiens
  misc_RNA (1)...(19): siRNA sense strand
cagaagagaaacugaccca

SEQ ID NO: 2361889 - RNA, 19 nt, Homo sapiens
  misc_RNA (1)...(19): siRNA sense strand
aagagaaccgagaggcaca

SEQ ID NO: 2361890 - RNA, 19 nt, Homo sapiens
  misc_RNA (1)...(19): siRNA sense strand
agaacaaagaauccaaaga

SEQ ID NO: 2361891 - RNA, 19 nt, Homo sapiens
  misc_RNA (1)...(19): siRNA sense strand
cgagacugaagcugacuaa

SEQ ID NO: 2361892 - RNA, 19 nt, Homo sapiens
  misc_RNA (1)...(19): siRNA sense strand
uaaagagaaccgagaggca

SEQ ID NO: 2361893 - RNA, 19 nt, Homo sapiens
  misc_RNA (1)...(19): siRNA sense strand
guuugcgagagaaggauaa

SEQ ID NO: 2361894 - RNA, 19 nt, Homo sapiens
  misc_RNA (1)...(19): siRNA sense strand
ccaaagacccugcugacga

SEQ ID NO: 2361895 - RNA, 19 nt, Homo sapiens
  misc_RNA (1)...(19): siRNA sense strand
ccuccaaagaagaaggauc

SEQ ID NO: 2361896 - RNA, 19 nt, Homo sapiens
  misc_RNA (1)...(19): siRNA sense strand
ugaaagaacuggagaagcg

SEQ ID NO: 2361897 - RNA, 19 nt, Homo sapiens
  misc_RNA (1)...(19): siRNA sense strand
gagaacaacaacuucagua

SEQ ID NO: 2361898 - RNA, 19 nt, Homo sapiens
  misc_RNA (1)...(19): siRNA sense strand
cccacaaaauggaagcuaa

SEQ ID NO: 2361899 - RNA, 19 nt, Homo sapiens
  misc_RNA (1)...(19): siRNA sense strand
cccaugaagcugaggucuu

SEQ ID NO: 2361900 - RNA, 19 nt, Homo sapiens
  misc_RNA (1)...(19): siRNA sense strand
cguuugcgagagaaggaua

SEQ ID NO: 2361901 - RNA, 19 nt, Homo sapiens
  misc_RNA (1)...(19): siRNA sense strand
gaagaacaaagaauccaaa

SEQ ID NO: 2361902 - RNA, 19 nt, Homo sapiens
  misc_RNA (1)...(19): siRNA sense strand
agaaacgagagcacgagaa

SEQ ID NO: 2361903 - RNA, 19 nt, Homo sapiens
  misc_RNA (1)...(19): siRNA sense strand
cuccaaagaagaaggaucu

SEQ ID NO: 2361904 - RNA, 19 nt, Homo sapiens
  misc_RNA (1)...(19): siRNA sense strand
aggcaauagaagagaacaa

SEQ ID NO: 2361905 - RNA, 19 nt, Homo sapiens
  misc_RNA (1)...(19): siRNA sense strand
uaaaauggcagaagagaaa

SEQ ID NO: 2361906 - RNA, 19 nt, Homo sapiens
  misc_RNA (1)...(19): siRNA sense strand
guaaaauggcagaagagaa

SEQ ID NO: 2361907 - RNA, 19 nt, Homo sapiens
  misc_RNA (1)...(19): siRNA sense strand
aggugaaagaacuggagaa

SEQ ID NO: 2361908 - RNA, 19 nt, Homo sapiens
  misc_RNA (1)...(19): siRNA sense strand
agaacaacaacuucaguaa

SEQ ID NO: 2361909 - RNA, 19 nt, Homo sapiens
  misc_RNA (1)...(19): siRNA sense strand
acauugaagaagugcggaa

SEQ ID NO: 2361910 - RNA, 19 nt, Homo sapiens
  misc_RNA (1)...(19): siRNA sense strand
gaacaacaacuucaguaaa

SEQ ID NO: 2361911 - RNA, 19 nt, Homo sapiens
  misc_RNA (1)...(19): siRNA sense strand
ggaagaacaaagaauccaa

SEQ ID NO: 2361912 - RNA, 19 nt, Homo sapiens
  misc_RNA (1)...(19): siRNA sense strand
gugcggaagaacaaagaau

SEQ ID NO: 2361913 - RNA, 19 nt, Homo sapiens
  misc_RNA (1)...(19): siRNA sense strand
ccacaaaauggaagcuaau

SEQ ID NO: 2361914 - RNA, 19 nt, Homo sapiens
  misc_RNA (1)...(19): siRNA sense strand
cuaauaaagagaaccgaga

SEQ ID NO: 2361915 - RNA, 19 nt, Homo sapiens
  misc_RNA (1)...(19): siRNA sense strand
cgagagaaggauaagcaca

SEQ ID NO: 2361916 - RNA, 19 nt, Homo sapiens
  misc_RNA (1)...(19): siRNA sense strand
cugauauccaggugaaaga

SEQ ID NO: 2361917 - RNA, 19 nt, Homo sapiens
  misc_RNA (1)...(19): siRNA sense strand
cugagaaacgagagcacga

SEQ ID NO: 2361918 - RNA, 19 nt, Homo sapiens
  misc_RNA (1)...(19): siRNA sense strand
gaagagaaacugacccaca

SEQ ID NO: 2361919 - RNA, 19 nt, Homo sapiens
  misc_RNA (1)...(19): siRNA sense strand
cagaagagaaacugaccca

SEQ ID NO: 2361920 - RNA, 19 nt, Homo sapiens
  misc_RNA (1)...(19): siRNA sense strand
aagagaaccgagaggcaca

SEQ ID NO: 2361921 - RNA, 19 nt, Homo sapiens
  misc_RNA (1)...(19): siRNA sense strand
agaacaaagaauccaaaga

SEQ ID NO: 2361922 - RNA, 19 nt, Homo sapiens
  misc_RNA (1)...(19): siRNA sense strand
cgagacugaagcugacuaa

SEQ ID NO: 2361923 - RNA, 19 nt, Homo sapiens
  misc_RNA (1)...(19): siRNA sense strand
uaaagagaaccgagaggca

SEQ ID NO: 2361924 - RNA, 19 nt, Homo sapiens
  misc_RNA (1)...(19): siRNA sense strand
guuugcgagagaaggauaa

SEQ ID NO: 2361925 - RNA, 19 nt, Homo sapiens
  misc_RNA (1)...(19): siRNA sense strand
ccaaagacccugcugacga

SEQ ID NO: 2361926 - RNA, 19 nt, Homo sapiens
  misc_RNA (1)...(19): siRNA sense strand
ccuccaaagaagaaggauc

SEQ ID NO: 2361927 - RNA, 19 nt, Homo sapiens
  misc_RNA (1)...(19): siRNA sense strand
ugaaagaacuggagaagcg

SEQ ID NO: 2361928 - RNA, 19 nt, Homo sapiens
  misc_RNA (1)...(19): siRNA sense strand
gagaacaacaacuucagua

SEQ ID NO: 2361929 - RNA, 19 nt, Homo sapiens
  misc_RNA (1)...(19): siRNA sense strand
cccacaaaauggaagcuaa

SEQ ID NO: 2361930 - RNA, 19 nt, Homo sapiens
  misc_RNA (1)...(19): siRNA sense strand
cccaugaagcugaggucuu

SEQ ID NO: 2361931 - RNA, 19 nt, Homo sapiens
  misc_RNA (1)...(19): siRNA sense strand
cguuugcgagagaaggaua

SEQ ID NO: 2361932 - RNA, 19 nt, Homo sapiens
  misc_RNA (1)...(19): siRNA sense strand
gaagaacaaagaauccaaa

SEQ ID NO: 2361933 - RNA, 19 nt, Homo sapiens
  misc_RNA (1)...(19): siRNA sense strand
agaaacgagagcacgagaa

SEQ ID NO: 2361934 - RNA, 19 nt, Homo sapiens
  misc_RNA (1)...(19): siRNA sense strand
cuccaaagaagaaggaucu

SEQ ID NO: 2361935 - RNA, 19 nt, Homo sapiens
  misc_RNA (1)...(19): siRNA sense strand
acccagagguggaggccaa

SEQ ID NO: 2361936 - RNA, 19 nt, Homo sapiens
  misc_RNA (1)...(19): siRNA sense strand
gcuuugacuaugaggacaa

SEQ ID NO: 2361937 - RNA, 19 nt, Homo sapiens
  misc_RNA (1)...(19): siRNA sense strand
acacagaggcagugaucca

SEQ ID NO: 2361938 - RNA, 19 nt, Homo sapiens
  misc_RNA (1)...(19): siRNA sense strand
gcaagaaccggcagcccaa

SEQ ID NO: 2361939 - RNA, 19 nt, Homo sapiens
  misc_RNA (1)...(19): siRNA sense strand
ugcaggaggaggagaagaa

SEQ ID NO: 2361940 - RNA, 19 nt, Homo sapiens
  misc_RNA (1)...(19): siRNA sense strand
gggucaacaaggacaccaa

SEQ ID NO: 2361941 - RNA, 19 nt, Homo sapiens
  misc_RNA (1)...(19): siRNA sense strand
gcacugagaccgugagcac

SEQ ID NO: 2361942 - RNA, 19 nt, Homo sapiens
  misc_RNA (1)...(19): siRNA sense strand
gauaagaaggggcaguuua

SEQ ID NO: 2361943 - RNA, 19 nt, Homo sapiens
  misc_RNA (1)...(19): siRNA sense strand
ccaagguccaugaggagau

SEQ ID NO: 2361944 - RNA, 19 nt, Homo sapiens
  misc_RNA (1)...(19): siRNA sense strand
ugaagaucagugagcgcua

SEQ ID NO: 2361945 - RNA, 19 nt, Homo sapiens
  misc_RNA (1)...(19): siRNA sense strand
aggccaagguccaugagga

SEQ ID NO: 2361946 - RNA, 19 nt, Homo sapiens
  misc_RNA (1)...(19): siRNA sense strand
aggcagugauccacgagau

SEQ ID NO: 2361947 - RNA, 19 nt, Homo sapiens
  misc_RNA (1)...(19): siRNA sense strand
gguuuggcccacaggguca

SEQ ID NO: 2361948 - RNA, 19 nt, Homo sapiens
  misc_RNA (1)...(19): siRNA sense strand
caguuuaagaagagugaug

SEQ ID NO: 2361949 - RNA, 19 nt, Homo sapiens
  misc_RNA (1)...(19): siRNA sense strand
ccaugaggagauugacaga

SEQ ID NO: 2361950 - RNA, 19 nt, Homo sapiens
  misc_RNA (1)...(19): siRNA sense strand
uugacagagugaucggcaa

SEQ ID NO: 2361951 - RNA, 19 nt, Homo sapiens
  misc_RNA (1)...(19): siRNA sense strand
aggugaaagaagaggagaa

SEQ ID NO: 2361952 - RNA, 19 nt, Homo sapiens
  misc_RNA (1)...(19): siRNA sense strand
gugaagaggaagaggagga

SEQ ID NO: 2361953 - RNA, 19 nt, Homo sapiens
  misc_RNA (1)...(19): siRNA sense strand
guuagaagcugaagggaug

SEQ ID NO: 2361954 - RNA, 19 nt, Homo sapiens
  misc_RNA (1)...(19): siRNA sense strand
aggaagaagagauguuaau

SEQ ID NO: 2361955 - RNA, 19 nt, Homo sapiens
  misc_RNA (1)...(19): siRNA sense strand
aaagaagaggagaaugaaa

SEQ ID NO: 2361956 - RNA, 19 nt, Homo sapiens
  misc_RNA (1)...(19): siRNA sense strand
gaagagaggaagaagacga

SEQ ID NO: 2361957 - RNA, 19 nt, Homo sapiens
  misc_RNA (1)...(19): siRNA sense strand
gagaggaagaagacgaaaa

SEQ ID NO: 2361958 - RNA, 19 nt, Homo sapiens
  misc_RNA (1)...(19): siRNA sense strand
uaaaagaagagaaggagaa

SEQ ID NO: 2361959 - RNA, 19 nt, Homo sapiens
  misc_RNA (1)...(19): siRNA sense strand
ggugaaagaagaggagaau

SEQ ID NO: 2361960 - RNA, 19 nt, Homo sapiens
  misc_RNA (1)...(19): siRNA sense strand
aauuagagaggaugaggaa

SEQ ID NO: 2361961 - RNA, 19 nt, Homo sapiens
  misc_RNA (1)...(19): siRNA sense strand
cauacagaucaaagggauu

SEQ ID NO: 2361962 - RNA, 19 nt, Homo sapiens
  misc_RNA (1)...(19): siRNA sense strand
agguggaggugaaagaaga

SEQ ID NO: 2361963 - RNA, 19 nt, Homo sapiens
  misc_RNA (1)...(19): siRNA sense strand
gcacagauaucuugggcac

SEQ ID NO: 2361964 - RNA, 19 nt, Homo sapiens
  misc_RNA (1)...(19): siRNA sense strand
uguuagaagcugaagggau

SEQ ID NO: 2361965 - RNA, 19 nt, Homo sapiens
  misc_RNA (1)...(19): siRNA sense strand
agguaaaagaagagaagga

SEQ ID NO: 2361966 - RNA, 19 nt, Homo sapiens
  misc_RNA (1)...(19): siRNA sense strand
ugaagaaacaugaugcaga

SEQ ID NO: 2361967 - RNA, 19 nt, Homo sapiens
  misc_RNA (1)...(19): siRNA sense strand
agaaccaaauacagaccaa

SEQ ID NO: 2361968 - RNA, 19 nt, Homo sapiens
  misc_RNA (1)...(19): siRNA sense strand
agaaaaucagggaagguaa

SEQ ID NO: 2361969 - RNA, 19 nt, Homo sapiens
  misc_RNA (1)...(19): siRNA sense strand
aagagaaggagaagaagga

SEQ ID NO: 2361970 - RNA, 19 nt, Homo sapiens
  misc_RNA (1)...(19): siRNA sense strand
gauggaaggauguggaacu

SEQ ID NO: 2361971 - RNA, 19 nt, Homo sapiens
  misc_RNA (1)...(19): siRNA sense strand
aaggaagagaggaagaaga

SEQ ID NO: 2361972 - RNA, 19 nt, Homo sapiens
  misc_RNA (1)...(19): siRNA sense strand
aggaggaagaagagauguu

SEQ ID NO: 2361973 - RNA, 19 nt, Homo sapiens
  misc_RNA (1)...(19): siRNA sense strand
uggcguaguaguaggacau

SEQ ID NO: 2361974 - RNA, 19 nt, Homo sapiens
  misc_RNA (1)...(19): siRNA sense strand
aagaggaagaggaggagga

SEQ ID NO: 2361975 - RNA, 19 nt, Homo sapiens
  misc_RNA (1)...(19): siRNA sense strand
cuuaauuggcacaugaaga

SEQ ID NO: 2361976 - RNA, 19 nt, Homo sapiens
  misc_RNA (1)...(19): siRNA sense strand
aaguggaaguagaggugga

SEQ ID NO: 2361977 - RNA, 19 nt, Homo sapiens
  misc_RNA (1)...(19): siRNA sense strand
guaaaagaagagaaggaga

SEQ ID NO: 2361978 - RNA, 19 nt, Homo sapiens
  misc_RNA (1)...(19): siRNA sense strand
caguauguccguugugaga

SEQ ID NO: 2361979 - RNA, 19 nt, Homo sapiens
  misc_RNA (1)...(19): siRNA sense strand
aggaaauuaaaguggaagu

SEQ ID NO: 2361980 - RNA, 19 nt, Homo sapiens
  misc_RNA (1)...(19): siRNA sense strand
gagaagaaggacagcguag

SEQ ID NO: 2361981 - RNA, 19 nt, Homo sapiens
  misc_RNA (1)...(19): siRNA sense strand
aggacagcguaguggcaca

SEQ ID NO: 2361982 - RNA, 19 nt, Homo sapiens
  misc_RNA (1)...(19): siRNA sense strand
aggaggaggaagaagagau

SEQ ID NO: 2361983 - RNA, 19 nt, Homo sapiens
  misc_RNA (1)...(19): siRNA sense strand
augaaauuagagaggauga

SEQ ID NO: 2361984 - RNA, 19 nt, Homo sapiens
  misc_RNA (1)...(19): siRNA sense strand
aggaagaagacgaaaagau

SEQ ID NO: 2361985 - RNA, 19 nt, Homo sapiens
  misc_RNA (1)...(19): siRNA sense strand
ucauacagaucaaagggau

SEQ ID NO: 2361986 - RNA, 19 nt, Homo sapiens
  misc_RNA (1)...(19): siRNA sense strand
gauaaagaucccaaggaag

SEQ ID NO: 2361987 - RNA, 19 nt, Homo sapiens
  misc_RNA (1)...(19): siRNA sense strand
auccaagagaugagaccua

SEQ ID NO: 2361988 - RNA, 19 nt, Homo sapiens
  misc_RNA (1)...(19): siRNA sense strand
ccaaagccacggagaaaau

SEQ ID NO: 2361989 - RNA, 19 nt, Homo sapiens
  misc_RNA (1)...(19): siRNA sense strand
cgucuccaguucagggcaa

SEQ ID NO: 2361990 - RNA, 19 nt, Homo sapiens
  misc_RNA (1)...(19): siRNA sense strand
uagagguggaggugaaaga

SEQ ID NO: 2361991 - RNA, 19 nt, Homo sapiens
  misc_RNA (1)...(19): siRNA sense strand
aagcugaagggaugucaaa

SEQ ID NO: 2361992 - RNA, 19 nt, Homo sapiens
  misc_RNA (1)...(19): siRNA sense strand
aaucagugaagaggagaua

SEQ ID NO: 2361993 - RNA, 19 nt, Homo sapiens
  misc_RNA (1)...(19): siRNA sense strand
aaggagaagaaggaaauua

SEQ ID NO: 2361994 - RNA, 19 nt, Homo sapiens
  misc_RNA (1)...(19): siRNA sense strand
aaauuugagaagaaggaca

SEQ ID NO: 2361995 - RNA, 19 nt, Homo sapiens
  misc_RNA (1)...(19): siRNA sense strand
ugauguuggagaagagcau

SEQ ID NO: 2361996 - RNA, 19 nt, Homo sapiens
  misc_RNA (1)...(19): siRNA sense strand
aggagauaccauucaaaga

SEQ ID NO: 2361997 - RNA, 19 nt, Homo sapiens
  misc_RNA (1)...(19): siRNA sense strand
ccccaaagccacggagaaa

SEQ ID NO: 2361998 - RNA, 19 nt, Homo sapiens
  misc_RNA (1)...(19): siRNA sense strand
cagggaagguaaaagaaga

SEQ ID NO: 2361999 - RNA, 19 nt, Homo sapiens
  misc_RNA (1)...(19): siRNA sense strand
aagagaggaagaagacgaa

SEQ ID NO: 2362000 - RNA, 19 nt, Homo sapiens
  misc_RNA (1)...(19): siRNA sense strand
aggagaaugaaauuagaga

SEQ ID NO: 2362001 - RNA, 19 nt, Homo sapiens
  misc_RNA (1)...(19): siRNA sense strand
augugagaucuguggauuu

SEQ ID NO: 2362002 - RNA, 19 nt, Homo sapiens
  misc_RNA (1)...(19): siRNA sense strand
agaaggaaauuaaagugga

SEQ ID NO: 2362003 - RNA, 19 nt, Homo sapiens
  misc_RNA (1)...(19): siRNA sense strand
agggauuauaucugugaau

SEQ ID NO: 2362004 - RNA, 19 nt, Homo sapiens
  misc_RNA (1)...(19): siRNA sense strand
ggaagguaaaagaagagaa

SEQ ID NO: 2362005 - RNA, 19 nt, Homo sapiens
  misc_RNA (1)...(19): siRNA sense strand
ccaucgugauacagagaac

SEQ ID NO: 2362006 - RNA, 19 nt, Homo sapiens
  misc_RNA (1)...(19): siRNA sense strand
aagagauguuaaucaguga

SEQ ID NO: 2362007 - RNA, 19 nt, Homo sapiens
  misc_RNA (1)...(19): siRNA sense strand
gaagaaacaugaugcagac

SEQ ID NO: 2362008 - RNA, 19 nt, Homo sapiens
  misc_RNA (1)...(19): siRNA sense strand
aggugaaagaagaggagaa

SEQ ID NO: 2362009 - RNA, 19 nt, Homo sapiens
  misc_RNA (1)...(19): siRNA sense strand
gugaagaggaagaggagga

SEQ ID NO: 2362010 - RNA, 19 nt, Homo sapiens
  misc_RNA (1)...(19): siRNA sense strand
guuagaagcugaagggaug

SEQ ID NO: 2362011 - RNA, 19 nt, Homo sapiens
  misc_RNA (1)...(19): siRNA sense strand
aggaagaagagauguuaau

SEQ ID NO: 2362012 - RNA, 19 nt, Homo sapiens
  misc_RNA (1)...(19): siRNA sense strand
aaagaagaggagaaugaaa

SEQ ID NO: 2362013 - RNA, 19 nt, Homo sapiens
  misc_RNA (1)...(19): siRNA sense strand
gaagagaggaagaagacga

SEQ ID NO: 2362014 - RNA, 19 nt, Homo sapiens
  misc_RNA (1)...(19): siRNA sense strand
gagaggaagaagacgaaaa

SEQ ID NO: 2362015 - RNA, 19 nt, Homo sapiens
  misc_RNA (1)...(19): siRNA sense strand
uaaaagaagagaaggagaa

SEQ ID NO: 2362016 - RNA, 19 nt, Homo sapiens
  misc_RNA (1)...(19): siRNA sense strand
ggugaaagaagaggagaau

SEQ ID NO: 2362017 - RNA, 19 nt, Homo sapiens
  misc_RNA (1)...(19): siRNA sense strand
aauuagagaggaugaggaa

SEQ ID NO: 2362018 - RNA, 19 nt, Homo sapiens
  misc_RNA (1)...(19): siRNA sense strand
cauacagaucaaagggauu

SEQ ID NO: 2362019 - RNA, 19 nt, Homo sapiens
  misc_RNA (1)...(19): siRNA sense strand
agguggaggugaaagaaga

SEQ ID NO: 2362020 - RNA, 19 nt, Homo sapiens
  misc_RNA (1)...(19): siRNA sense strand
gcacagauaucuugggcac

SEQ ID NO: 2362021 - RNA, 19 nt, Homo sapiens
  misc_RNA (1)...(19): siRNA sense strand
uguuagaagcugaagggau

SEQ ID NO: 2362022 - RNA, 19 nt, Homo sapiens
  misc_RNA (1)...(19): siRNA sense strand
agguaaaagaagagaagga

SEQ ID NO: 2362023 - RNA, 19 nt, Homo sapiens
  misc_RNA (1)...(19): siRNA sense strand
ugaagaaacaugaugcaga

SEQ ID NO: 2362024 - RNA, 19 nt, Homo sapiens
  misc_RNA (1)...(19): siRNA sense strand
agaaccaaauacagaccaa

SEQ ID NO: 2362025 - RNA, 19 nt, Homo sapiens
  misc_RNA (1)...(19): siRNA sense strand
agaaaaucagggaagguaa

SEQ ID NO: 2362026 - RNA, 19 nt, Homo sapiens
  misc_RNA (1)...(19): siRNA sense strand
aagagaaggagaagaagga

SEQ ID NO: 2362027 - RNA, 19 nt, Homo sapiens
  misc_RNA (1)...(19): siRNA sense strand
gauggaaggauguggaacu

SEQ ID NO: 2362028 - RNA, 19 nt, Homo sapiens
  misc_RNA (1)...(19): siRNA sense strand
aaggaagagaggaagaaga

SEQ ID NO: 2362029 - RNA, 19 nt, Homo sapiens
  misc_RNA (1)...(19): siRNA sense strand
aggaggaagaagagauguu

SEQ ID NO: 2362030 - RNA, 19 nt, Homo sapiens
  misc_RNA (1)...(19): siRNA sense strand
uggcguaguaguaggacau

SEQ ID NO: 2362031 - RNA, 19 nt, Homo sapiens
  misc_RNA (1)...(19): siRNA sense strand
aagaggaagaggaggagga

SEQ ID NO: 2362032 - RNA, 19 nt, Homo sapiens
  misc_RNA (1)...(19): siRNA sense strand
cuuaauuggcacaugaaga

SEQ ID NO: 2362033 - RNA, 19 nt, Homo sapiens
  misc_RNA (1)...(19): siRNA sense strand
aaguggaaguagaggugga

SEQ ID NO: 2362034 - RNA, 19 nt, Homo sapiens
  misc_RNA (1)...(19): siRNA sense strand
guaaaagaagagaaggaga

SEQ ID NO: 2362035 - RNA, 19 nt, Homo sapiens
  misc_RNA (1)...(19): siRNA sense strand
caguauguccguugugaga

SEQ ID NO: 2362036 - RNA, 19 nt, Homo sapiens
  misc_RNA (1)...(19): siRNA sense strand
aggaaauuaaaguggaagu

SEQ ID NO: 2362037 - RNA, 19 nt, Homo sapiens
  misc_RNA (1)...(19): siRNA sense strand
gagaagaaggacagcguag

SEQ ID NO: 2362038 - RNA, 19 nt, Homo sapiens
  misc_RNA (1)...(19): siRNA sense strand
aggacagcguaguggcaca

SEQ ID NO: 2362039 - RNA, 19 nt, Homo sapiens
  misc_RNA (1)...(19): siRNA sense strand
aggaggaggaagaagagau

SEQ ID NO: 2362040 - RNA, 19 nt, Homo sapiens
  misc_RNA (1)...(19): siRNA sense strand
augaaauuagagaggauga

SEQ ID NO: 2362041 - RNA, 19 nt, Homo sapiens
  misc_RNA (1)...(19): siRNA sense strand
aggaagaagacgaaaagau

SEQ ID NO: 2362042 - RNA, 19 nt, Homo sapiens
  misc_RNA (1)...(19): siRNA sense strand
ucauacagaucaaagggau

SEQ ID NO: 2362043 - RNA, 19 nt, Homo sapiens
  misc_RNA (1)...(19): siRNA sense strand
gauaaagaucccaaggaag

SEQ ID NO: 2362044 - RNA, 19 nt, Homo sapiens
  misc_RNA (1)...(19): siRNA sense strand
auccaagagaugagaccua

SEQ ID NO: 2362045 - RNA, 19 nt, Homo sapiens
  misc_RNA (1)...(19): siRNA sense strand
ccaaagccacggagaaaau

SEQ ID NO: 2362046 - RNA, 19 nt, Homo sapiens
  misc_RNA (1)...(19): siRNA sense strand
cgucuccaguucagggcaa

SEQ ID NO: 2362047 - RNA, 19 nt, Homo sapiens
  misc_RNA (1)...(19): siRNA sense strand
uagagguggaggugaaaga

SEQ ID NO: 2362048 - RNA, 19 nt, Homo sapiens
  misc_RNA (1)...(19): siRNA sense strand
aagcugaagggaugucaaa

SEQ ID NO: 2362049 - RNA, 19 nt, Homo sapiens
  misc_RNA (1)...(19): siRNA sense strand
aaucagugaagaggagaua

SEQ ID NO: 2362050 - RNA, 19 nt, Homo sapiens
  misc_RNA (1)...(19): siRNA sense strand
aaggagaagaaggaaauua

SEQ ID NO: 2362051 - RNA, 19 nt, Homo sapiens
  misc_RNA (1)...(19): siRNA sense strand
aaauuugagaagaaggaca

SEQ ID NO: 2362052 - RNA, 19 nt, Homo sapiens
  misc_RNA (1)...(19): siRNA sense strand
ugauguuggagaagagcau

SEQ ID NO: 2362053 - RNA, 19 nt, Homo sapiens
  misc_RNA (1)...(19): siRNA sense strand
aggagauaccauucaaaga

SEQ ID NO: 2362054 - RNA, 19 nt, Homo sapiens
  misc_RNA (1)...(19): siRNA sense strand
ccccaaagccacggagaaa

SEQ ID NO: 2362055 - RNA, 19 nt, Homo sapiens
  misc_RNA (1)...(19): siRNA sense strand
cagggaagguaaaagaaga

SEQ ID NO: 2362056 - RNA, 19 nt, Homo sapiens
  misc_RNA (1)...(19): siRNA sense strand
aagagaggaagaagacgaa

SEQ ID NO: 2362057 - RNA, 19 nt, Homo sapiens
  misc_RNA (1)...(19): siRNA sense strand
aggagaaugaaauuagaga

SEQ ID NO: 2362058 - RNA, 19 nt, Homo sapiens
  misc_RNA (1)...(19): siRNA sense strand
augugagaucuguggauuu

SEQ ID NO: 2362059 - RNA, 19 nt, Homo sapiens
  misc_RNA (1)...(19): siRNA sense strand
agaaggaaauuaaagugga

SEQ ID NO: 2362060 - RNA, 19 nt, Homo sapiens
  misc_RNA (1)...(19): siRNA sense strand
agggauuauaucugugaau

SEQ ID NO: 2362061 - RNA, 19 nt, Homo sapiens
  misc_RNA (1)...(19): siRNA sense strand
ggaagguaaaagaagagaa

SEQ ID NO: 2362062 - RNA, 19 nt, Homo sapiens
  misc_RNA (1)...(19): siRNA sense strand
ccaucgugauacagagaac

SEQ ID NO: 2362063 - RNA, 19 nt, Homo sapiens
  misc_RNA (1)...(19): siRNA sense strand
aagagauguuaaucaguga

SEQ ID NO: 2362064 - RNA, 19 nt, Homo sapiens
  misc_RNA (1)...(19): siRNA sense strand
gaagaaacaugaugcagac

SEQ ID NO: 2362065 - RNA, 19 nt, Homo sapiens
  misc_RNA (1)...(19): siRNA sense strand
augaguacuccgagaucaa

SEQ ID NO: 2362066 - RNA, 19 nt, Homo sapiens
  misc_RNA (1)...(19): siRNA sense strand
ugugaaggaugaaggggaa

SEQ ID NO: 2362067 - RNA, 19 nt, Homo sapiens
  misc_RNA (1)...(19): siRNA sense strand
aggaaauggaacuacauau

SEQ ID NO: 2362068 - RNA, 19 nt, Homo sapiens
  misc_RNA (1)...(19): siRNA sense strand
uggaaaagugcaagaggau

SEQ ID NO: 2362069 - RNA, 19 nt, Homo sapiens
  misc_RNA (1)...(19): siRNA sense strand
cagaggaaggagagaucca

SEQ ID NO: 2362070 - RNA, 19 nt, Homo sapiens
  misc_RNA (1)...(19): siRNA sense strand
uuucaguccuggagggcca

SEQ ID NO: 2362071 - RNA, 19 nt, Homo sapiens
  misc_RNA (1)...(19): siRNA sense strand
caggcauggaggacgcaaa

SEQ ID NO: 2362072 - RNA, 19 nt, Homo sapiens
  misc_RNA (1)...(19): siRNA sense strand
cuuccaaggagauggcaca

SEQ ID NO: 2362073 - RNA, 19 nt, Homo sapiens
  misc_RNA (1)...(19): siRNA sense strand
cauccacaaccuugaggaa

SEQ ID NO: 2362074 - RNA, 19 nt, Homo sapiens
  misc_RNA (1)...(19): siRNA sense strand
gaagaaaucggcaaggcca

SEQ ID NO: 2362075 - RNA, 19 nt, Homo sapiens
  misc_RNA (1)...(19): siRNA sense strand
guggaaaagugcaagagga

SEQ ID NO: 2362076 - RNA, 19 nt, Homo sapiens
  misc_RNA (1)...(19): siRNA sense strand
ggcuaugaguacuccgaga

SEQ ID NO: 2362077 - RNA, 19 nt, Homo sapiens
  misc_RNA (1)...(19): siRNA sense strand
augaguacuccgagaucaa

SEQ ID NO: 2362078 - RNA, 19 nt, Homo sapiens
  misc_RNA (1)...(19): siRNA sense strand
ugugaaggaugaaggggaa

SEQ ID NO: 2362079 - RNA, 19 nt, Homo sapiens
  misc_RNA (1)...(19): siRNA sense strand
aggaaauggaacuacauau

SEQ ID NO: 2362080 - RNA, 19 nt, Homo sapiens
  misc_RNA (1)...(19): siRNA sense strand
uggaaaagugcaagaggau

SEQ ID NO: 2362081 - RNA, 19 nt, Homo sapiens
  misc_RNA (1)...(19): siRNA sense strand
cagaggaaggagagaucca

SEQ ID NO: 2362082 - RNA, 19 nt, Homo sapiens
  misc_RNA (1)...(19): siRNA sense strand
uuucaguccuggagggcca

SEQ ID NO: 2362083 - RNA, 19 nt, Homo sapiens
  misc_RNA (1)...(19): siRNA sense strand
caggcauggaggacgcaaa

SEQ ID NO: 2362084 - RNA, 19 nt, Homo sapiens
  misc_RNA (1)...(19): siRNA sense strand
cuuccaaggagauggcaca

SEQ ID NO: 2362085 - RNA, 19 nt, Homo sapiens
  misc_RNA (1)...(19): siRNA sense strand
cauccacaaccuugaggaa

SEQ ID NO: 2362086 - RNA, 19 nt, Homo sapiens
  misc_RNA (1)...(19): siRNA sense strand
gaagaaaucggcaaggcca

SEQ ID NO: 2362087 - RNA, 19 nt, Homo sapiens
  misc_RNA (1)...(19): siRNA sense strand
guggaaaagugcaagagga

SEQ ID NO: 2362088 - RNA, 19 nt, Homo sapiens
  misc_RNA (1)...(19): siRNA sense strand
ggcuaugaguacuccgaga

SEQ ID NO: 2362089 - RNA, 19 nt, Homo sapiens
  misc_RNA (1)...(19): siRNA sense strand
gagcaaagacuaugacguc

SEQ ID NO: 2362090 - RNA, 19 nt, Homo sapiens
  misc_RNA (1)...(19): siRNA sense strand
cagccuaccucacaggaca

SEQ ID NO: 2362091 - RNA, 19 nt, Homo sapiens
  misc_RNA (1)...(19): siRNA sense strand
gagcaaagacuaugacguc

SEQ ID NO: 2362092 - RNA, 19 nt, Homo sapiens
  misc_RNA (1)...(19): siRNA sense strand
cagccuaccucacaggaca

SEQ ID NO: 2362093 - RNA, 19 nt, Homo sapiens
  misc_RNA (1)...(19): siRNA sense strand
agaaauggguugugggcca

SEQ ID NO: 2362094 - RNA, 19 nt, Homo sapiens
  misc_RNA (1)...(19): siRNA sense strand
agaaauugaugcagggcuu

SEQ ID NO: 2362095 - RNA, 19 nt, Homo sapiens
  misc_RNA (1)...(19): siRNA sense strand
agacagugaagaagggaau

SEQ ID NO: 2362096 - RNA, 19 nt, Homo sapiens
  misc_RNA (1)...(19): siRNA sense strand
agaggaagggcuaggcaua

SEQ ID NO: 2362097 - RNA, 19 nt, Homo sapiens
  misc_RNA (1)...(19): siRNA sense strand
uggaaggaagaaugggaaa

SEQ ID NO: 2362098 - RNA, 19 nt, Homo sapiens
  misc_RNA (1)...(19): siRNA sense strand
agugaugggaauaaagaaa

SEQ ID NO: 2362099 - RNA, 19 nt, Homo sapiens
  misc_RNA (1)...(19): siRNA sense strand
ucacuagaaaugagaacaa

SEQ ID NO: 2362100 - RNA, 19 nt, Homo sapiens
  misc_RNA (1)...(19): siRNA sense strand
acuggaaacugaagcggaa

SEQ ID NO: 2362101 - RNA, 19 nt, Homo sapiens
  misc_RNA (1)...(19): siRNA sense strand
aggcagaaagugaugggaa

SEQ ID NO: 2362102 - RNA, 19 nt, Homo sapiens
  misc_RNA (1)...(19): siRNA sense strand
auucagaggcagaaaguga

SEQ ID NO: 2362103 - RNA, 19 nt, Homo sapiens
  misc_RNA (1)...(19): siRNA sense strand
agggcuaggcauagaguau

SEQ ID NO: 2362104 - RNA, 19 nt, Homo sapiens
  misc_RNA (1)...(19): siRNA sense strand
ccaccaagacagggacuaa

SEQ ID NO: 2362105 - RNA, 19 nt, Homo sapiens
  misc_RNA (1)...(19): siRNA sense strand
ggcucaauguauaggauca

SEQ ID NO: 2362106 - RNA, 19 nt, Homo sapiens
  misc_RNA (1)...(19): siRNA sense strand
gauuuggagcugagugauu

SEQ ID NO: 2362107 - RNA, 19 nt, Homo sapiens
  misc_RNA (1)...(19): siRNA sense strand
gccuagagaugaagaccau

SEQ ID NO: 2362108 - RNA, 19 nt, Homo sapiens
  misc_RNA (1)...(19): siRNA sense strand
cugagaagguaaaggacgu

SEQ ID NO: 2362109 - RNA, 19 nt, Homo sapiens
  misc_RNA (1)...(19): siRNA sense strand
acaacaaaauacaggaaca

SEQ ID NO: 2362110 - RNA, 19 nt, Homo sapiens
  misc_RNA (1)...(19): siRNA sense strand
ugacaaaugcacuugaaaa

SEQ ID NO: 2362111 - RNA, 19 nt, Homo sapiens
  misc_RNA (1)...(19): siRNA sense strand
ggaaggaagaaugggaaaa

SEQ ID NO: 2362112 - RNA, 19 nt, Homo sapiens
  misc_RNA (1)...(19): siRNA sense strand
agugaagaagggaaugaua

SEQ ID NO: 2362113 - RNA, 19 nt, Homo sapiens
  misc_RNA (1)...(19): siRNA sense strand
guccgaaaucugugcuaua

SEQ ID NO: 2362114 - RNA, 19 nt, Homo sapiens
  misc_RNA (1)...(19): siRNA sense strand
gcugauacauggaaggaag

SEQ ID NO: 2362115 - RNA, 19 nt, Homo sapiens
  misc_RNA (1)...(19): siRNA sense strand
ccacagggcuaaagagcag

SEQ ID NO: 2362116 - RNA, 19 nt, Homo sapiens
  misc_RNA (1)...(19): siRNA sense strand
ccaaaggaggaugaagaaa

SEQ ID NO: 2362117 - RNA, 19 nt, Homo sapiens
  misc_RNA (1)...(19): siRNA sense strand
auguauaggaucaagucaa

SEQ ID NO: 2362118 - RNA, 19 nt, Homo sapiens
  misc_RNA (1)...(19): siRNA sense strand
ggauuauagcugagaaggu

SEQ ID NO: 2362119 - RNA, 19 nt, Homo sapiens
  misc_RNA (1)...(19): siRNA sense strand
ccuagaugagggagacgaa

SEQ ID NO: 2362120 - RNA, 19 nt, Homo sapiens
  misc_RNA (1)...(19): siRNA sense strand
cagccuucucucaggauua

SEQ ID NO: 2362121 - RNA, 19 nt, Homo sapiens
  misc_RNA (1)...(19): siRNA sense strand
uuuaaagagaccaccaaua

SEQ ID NO: 2362122 - RNA, 19 nt, Homo sapiens
  misc_RNA (1)...(19): siRNA sense strand
cugcugagguauuccggaa

SEQ ID NO: 2362123 - RNA, 19 nt, Homo sapiens
  misc_RNA (1)...(19): siRNA sense strand
cagauuuggagcugaguga

SEQ ID NO: 2362124 - RNA, 19 nt, Homo sapiens
  misc_RNA (1)...(19): siRNA sense strand
augauaagcagacgagaga

SEQ ID NO: 2362125 - RNA, 19 nt, Homo sapiens
  misc_RNA (1)...(19): siRNA sense strand
ggaacaugcaggugccuca

SEQ ID NO: 2362126 - RNA, 19 nt, Homo sapiens
  misc_RNA (1)...(19): siRNA sense strand
gcuauuaccucuuugcuga

SEQ ID NO: 2362127 - RNA, 19 nt, Homo sapiens
  misc_RNA (1)...(19): siRNA sense strand
ugagacagaggaagggcua

SEQ ID NO: 2362128 - RNA, 19 nt, Homo sapiens
  misc_RNA (1)...(19): siRNA sense strand
gauaagcagacgagagaag

SEQ ID NO: 2362129 - RNA, 19 nt, Homo sapiens
  misc_RNA (1)...(19): siRNA sense strand
ccacagaaaccgaucagca

SEQ ID NO: 2362130 - RNA, 19 nt, Homo sapiens
  misc_RNA (1)...(19): siRNA sense strand
agggagacgaagugaaguu

SEQ ID NO: 2362131 - RNA, 19 nt, Homo sapiens
  misc_RNA (1)...(19): siRNA sense strand
cagugacaguucagacgaa

SEQ ID NO: 2362132 - RNA, 19 nt, Homo sapiens
  misc_RNA (1)...(19): siRNA sense strand
acaucaacaucauggaguu

SEQ ID NO: 2362133 - RNA, 19 nt, Homo sapiens
  misc_RNA (1)...(19): siRNA sense strand
cagacagugaagaagggaa

SEQ ID NO: 2362134 - RNA, 19 nt, Homo sapiens
  misc_RNA (1)...(19): siRNA sense strand
aggaaagauagcucagaca

SEQ ID NO: 2362135 - RNA, 19 nt, Homo sapiens
  misc_RNA (1)...(19): siRNA sense strand
acuucuggcucaauguaua

SEQ ID NO: 2362136 - RNA, 19 nt, Homo sapiens
  misc_RNA (1)...(19): siRNA sense strand
ccccagaagaccacagaaa

SEQ ID NO: 2362137 - RNA, 19 nt, Homo sapiens
  misc_RNA (1)...(19): siRNA sense strand
gcuuguauucagugcucua

SEQ ID NO: 2362138 - RNA, 19 nt, Homo sapiens
  misc_RNA (1)...(19): siRNA sense strand
gggcagcuggucugggaau

SEQ ID NO: 2362139 - RNA, 19 nt, Homo sapiens
  misc_RNA (1)...(19): siRNA sense strand
aguagguccuuuaaagaga

SEQ ID NO: 2362140 - RNA, 19 nt, Homo sapiens
  misc_RNA (1)...(19): siRNA sense strand
ccaaaugaacacaagaaac

SEQ ID NO: 2362141 - RNA, 19 nt, Homo sapiens
  misc_RNA (1)...(19): siRNA sense strand
gcacagaagcuucgggagc

SEQ ID NO: 2362142 - RNA, 19 nt, Homo sapiens
  misc_RNA (1)...(19): siRNA sense strand
gcucaauguauaggaucaa

SEQ ID NO: 2362143 - RNA, 19 nt, Homo sapiens
  misc_RNA (1)...(19): siRNA sense strand
gcuccuguguccugggcau

SEQ ID NO: 2362144 - RNA, 19 nt, Homo sapiens
  misc_RNA (1)...(19): siRNA sense strand
uggaagauguggccgcaga

SEQ ID NO: 2362145 - RNA, 19 nt, Homo sapiens
  misc_RNA (1)...(19): siRNA sense strand
ugugauaaguguaacgucu

SEQ ID NO: 2362146 - RNA, 19 nt, Homo sapiens
  misc_RNA (1)...(19): siRNA sense strand
caggcagaaacuuggagaa

SEQ ID NO: 2362147 - RNA, 19 nt, Homo sapiens
  misc_RNA (1)...(19): siRNA sense strand
acucgaaugagaauguuua

SEQ ID NO: 2362148 - RNA, 19 nt, Homo sapiens
  misc_RNA (1)...(19): siRNA sense strand
ccuugguacgaguggaaga

SEQ ID NO: 2362149 - RNA, 19 nt, Homo sapiens
  misc_RNA (1)...(19): siRNA sense strand
aaacugaagcggaaaagua

SEQ ID NO: 2362150 - RNA, 19 nt, Homo sapiens
  misc_RNA (1)...(19): siRNA sense strand
cagggcagcuuuagaaaau

SEQ ID NO: 2362151 - RNA, 19 nt, Homo sapiens
  misc_RNA (1)...(19): siRNA sense strand
caguagaaguccuggaacg

SEQ ID NO: 2362152 - RNA, 19 nt, Homo sapiens
  misc_RNA (1)...(19): siRNA sense strand
guguaacgucugugugcau

SEQ ID NO: 2362153 - RNA, 19 nt, Homo sapiens
  misc_RNA (1)...(19): siRNA sense strand
gggagcuggaggaggaguu

SEQ ID NO: 2362154 - RNA, 19 nt, Homo sapiens
  misc_RNA (1)...(19): siRNA sense strand
aaauacaggaacagaucuu

SEQ ID NO: 2362155 - RNA, 19 nt, Homo sapiens
  misc_RNA (1)...(19): siRNA sense strand
aaagaaagguggagcccug

SEQ ID NO: 2362156 - RNA, 19 nt, Homo sapiens
  misc_RNA (1)...(19): siRNA sense strand
uaaagaagcugaugcgcaa

SEQ ID NO: 2362157 - RNA, 19 nt, Homo sapiens
  misc_RNA (1)...(19): siRNA sense strand
cgacagaggcuggaggaga

SEQ ID NO: 2362158 - RNA, 19 nt, Homo sapiens
  misc_RNA (1)...(19): siRNA sense strand
ggaggaagaagaucgggaa

SEQ ID NO: 2362159 - RNA, 19 nt, Homo sapiens
  misc_RNA (1)...(19): siRNA sense strand
guaaagaagcugaugcgca

SEQ ID NO: 2362160 - RNA, 19 nt, Homo sapiens
  misc_RNA (1)...(19): siRNA sense strand
aggaccagguggaggaagu

SEQ ID NO: 2362161 - RNA, 19 nt, Homo sapiens
  misc_RNA (1)...(19): siRNA sense strand
gggaaguaaagaagcugau

SEQ ID NO: 2362162 - RNA, 19 nt, Homo sapiens
  misc_RNA (1)...(19): siRNA sense strand
caguauauaaaguucgaga

SEQ ID NO: 2362163 - RNA, 19 nt, Homo sapiens
  misc_RNA (1)...(19): siRNA sense strand
aaguguuccuaauggagaa

SEQ ID NO: 2362164 - RNA, 19 nt, Homo sapiens
  misc_RNA (1)...(19): siRNA sense strand
agaaggaccagguggagga

SEQ ID NO: 2362165 - RNA, 19 nt, Homo sapiens
  misc_RNA (1)...(19): siRNA sense strand
agaauucagcagaggaguu

SEQ ID NO: 2362166 - RNA, 19 nt, Homo sapiens
  misc_RNA (1)...(19): siRNA sense strand
ccuagugaccagcggcgaa

SEQ ID NO: 2362167 - RNA, 19 nt, Homo sapiens
  misc_RNA (1)...(19): siRNA sense strand
cagcagaggaguuugccuu

SEQ ID NO: 2362168 - RNA, 19 nt, Homo sapiens
  misc_RNA (1)...(19): siRNA sense strand
uggagaaggaccaggugga

SEQ ID NO: 2362169 - RNA, 19 nt, Homo sapiens
  misc_RNA (1)...(19): siRNA sense strand
agaauucagcagaggaguu

SEQ ID NO: 2362170 - RNA, 19 nt, Homo sapiens
  misc_RNA (1)...(19): siRNA sense strand
ccuagugaccagcggcgaa

SEQ ID NO: 2362171 - RNA, 19 nt, Homo sapiens
  misc_RNA (1)...(19): siRNA sense strand
cagcagaggaguuugccuu

SEQ ID NO: 2362172 - RNA, 19 nt, Homo sapiens
  misc_RNA (1)...(19): siRNA sense strand
uaaagaagcugaugcgcaa

SEQ ID NO: 2362173 - RNA, 19 nt, Homo sapiens
  misc_RNA (1)...(19): siRNA sense strand
cgacagaggcuggaggaga

SEQ ID NO: 2362174 - RNA, 19 nt, Homo sapiens
  misc_RNA (1)...(19): siRNA sense strand
ggaggaagaagaucgggaa

SEQ ID NO: 2362175 - RNA, 19 nt, Homo sapiens
  misc_RNA (1)...(19): siRNA sense strand
guaaagaagcugaugcgca

SEQ ID NO: 2362176 - RNA, 19 nt, Homo sapiens
  misc_RNA (1)...(19): siRNA sense strand
aggaccagguggaggaagu

SEQ ID NO: 2362177 - RNA, 19 nt, Homo sapiens
  misc_RNA (1)...(19): siRNA sense strand
gggaaguaaagaagcugau

SEQ ID NO: 2362178 - RNA, 19 nt, Homo sapiens
  misc_RNA (1)...(19): siRNA sense strand
caguauauaaaguucgaga

SEQ ID NO: 2362179 - RNA, 19 nt, Homo sapiens
  misc_RNA (1)...(19): siRNA sense strand
aaguguuccuaauggagaa

SEQ ID NO: 2362180 - RNA, 19 nt, Homo sapiens
  misc_RNA (1)...(19): siRNA sense strand
agaaggaccagguggagga

SEQ ID NO: 2362181 - RNA, 19 nt, Homo sapiens
  misc_RNA (1)...(19): siRNA sense strand
agaauucagcagaggaguu

SEQ ID NO: 2362182 - RNA, 19 nt, Homo sapiens
  misc_RNA (1)...(19): siRNA sense strand
ccuagugaccagcggcgaa

SEQ ID NO: 2362183 - RNA, 19 nt, Homo sapiens
  misc_RNA (1)...(19): siRNA sense strand
cagcagaggaguuugccuu

SEQ ID NO: 2362184 - RNA, 19 nt, Homo sapiens
  misc_RNA (1)...(19): siRNA sense strand
uggagaaggaccaggugga

SEQ ID NO: 2362185 - RNA, 19 nt, Homo sapiens
  misc_RNA (1)...(19): siRNA sense strand
cagaagaguucaacccaga

SEQ ID NO: 2362186 - RNA, 19 nt, Homo sapiens
  misc_RNA (1)...(19): siRNA sense strand
ggaacaaaacccaggcaca

SEQ ID NO: 2362187 - RNA, 19 nt, Homo sapiens
  misc_RNA (1)...(19): siRNA sense strand
uuggagagggccuggcaaa

SEQ ID NO: 2362188 - RNA, 19 nt, Homo sapiens
  misc_RNA (1)...(19): siRNA sense strand
cgcuaccacugcugggaaa

SEQ ID NO: 2362189 - RNA, 19 nt, Homo sapiens
  misc_RNA (1)...(19): siRNA sense strand
gagaaggcgaggagcugau

SEQ ID NO: 2362190 - RNA, 19 nt, Homo sapiens
  misc_RNA (1)...(19): siRNA sense strand
uggcaaaagcggagcucuu

SEQ ID NO: 2362191 - RNA, 19 nt, Homo sapiens
  misc_RNA (1)...(19): siRNA sense strand
uggcacaggaggaacaaaa

SEQ ID NO: 2362192 - RNA, 19 nt, Homo sapiens
  misc_RNA (1)...(19): siRNA sense strand
ugaagauggcacaggagga

SEQ ID NO: 2362193 - RNA, 19 nt, Homo sapiens
  misc_RNA (1)...(19): siRNA sense strand
ucaggaagcaugaggcguu

SEQ ID NO: 2362194 - RNA, 19 nt, Homo sapiens
  misc_RNA (1)...(19): siRNA sense strand
agauggcacaggaggaaca

SEQ ID NO: 2362195 - RNA, 19 nt, Homo sapiens
  misc_RNA (1)...(19): siRNA sense strand
ggguacgugaggagcugaa

SEQ ID NO: 2362196 - RNA, 19 nt, Homo sapiens
  misc_RNA (1)...(19): siRNA sense strand
gcggaagaguugagagcca

SEQ ID NO: 2362197 - RNA, 19 nt, Homo sapiens
  misc_RNA (1)...(19): siRNA sense strand
aagaagaucugaaagggaa

SEQ ID NO: 2362198 - RNA, 19 nt, Homo sapiens
  misc_RNA (1)...(19): siRNA sense strand
gaaggaaggagcaaggaca

SEQ ID NO: 2362199 - RNA, 19 nt, Homo sapiens
  misc_RNA (1)...(19): siRNA sense strand
ugcaaagggaugaggauga

SEQ ID NO: 2362200 - RNA, 19 nt, Homo sapiens
  misc_RNA (1)...(19): siRNA sense strand
ggagagagaaagugaggcu

SEQ ID NO: 2362201 - RNA, 19 nt, Homo sapiens
  misc_RNA (1)...(19): siRNA sense strand
aaggaaggagcaaggacaa

SEQ ID NO: 2362202 - RNA, 19 nt, Homo sapiens
  misc_RNA (1)...(19): siRNA sense strand
aagaaauucaccaaggcua

SEQ ID NO: 2362203 - RNA, 19 nt, Homo sapiens
  misc_RNA (1)...(19): siRNA sense strand
aaagugaggucaagggcca

SEQ ID NO: 2362204 - RNA, 19 nt, Homo sapiens
  misc_RNA (1)...(19): siRNA sense strand
gauugaaagaagaucugaa

SEQ ID NO: 2362205 - RNA, 19 nt, Homo sapiens
  misc_RNA (1)...(19): siRNA sense strand
cggaagaguugagagccaa

SEQ ID NO: 2362206 - RNA, 19 nt, Homo sapiens
  misc_RNA (1)...(19): siRNA sense strand
aggaaggagcaaggacaaa

SEQ ID NO: 2362207 - RNA, 19 nt, Homo sapiens
  misc_RNA (1)...(19): siRNA sense strand
gugugaagacguggagcua

SEQ ID NO: 2362208 - RNA, 19 nt, Homo sapiens
  misc_RNA (1)...(19): siRNA sense strand
uuaacugggaccugcgaaa

SEQ ID NO: 2362209 - RNA, 19 nt, Homo sapiens
  misc_RNA (1)...(19): siRNA sense strand
gggaaggauuuaacuggga

SEQ ID NO: 2362210 - RNA, 19 nt, Homo sapiens
  misc_RNA (1)...(19): siRNA sense strand
ucgcagacgauauugacaa

SEQ ID NO: 2362211 - RNA, 19 nt, Homo sapiens
  misc_RNA (1)...(19): siRNA sense strand
aggcggagagagaaaguga

SEQ ID NO: 2362212 - RNA, 19 nt, Homo sapiens
  misc_RNA (1)...(19): siRNA sense strand
cugaaagggaacauugaca

SEQ ID NO: 2362213 - RNA, 19 nt, Homo sapiens
  misc_RNA (1)...(19): siRNA sense strand
aaagaagaucugaaaggga

SEQ ID NO: 2362214 - RNA, 19 nt, Homo sapiens
  misc_RNA (1)...(19): siRNA sense strand
augaggaagagaaggcaga

SEQ ID NO: 2362215 - RNA, 19 nt, Homo sapiens
  misc_RNA (1)...(19): siRNA sense strand
ggaaggaguuaagggagca

SEQ ID NO: 2362216 - RNA, 19 nt, Homo sapiens
  misc_RNA (1)...(19): siRNA sense strand
agagaauuucccagauuga

SEQ ID NO: 2362217 - RNA, 19 nt, Homo sapiens
  misc_RNA (1)...(19): siRNA sense strand
gaggcuuacuggaaggagu

SEQ ID NO: 2362218 - RNA, 19 nt, Homo sapiens
  misc_RNA (1)...(19): siRNA sense strand
cuaagaagcuggagcagga

SEQ ID NO: 2362219 - RNA, 19 nt, Homo sapiens
  misc_RNA (1)...(19): siRNA sense strand
gcuucauggcuauggucaa

SEQ ID NO: 2362220 - RNA, 19 nt, Homo sapiens
  misc_RNA (1)...(19): siRNA sense strand
aagaaauguggcuucgaaa

SEQ ID NO: 2362221 - RNA, 19 nt, Homo sapiens
  misc_RNA (1)...(19): siRNA sense strand
gcucucagcaacugggaca

SEQ ID NO: 2362222 - RNA, 19 nt, Homo sapiens
  misc_RNA (1)...(19): siRNA sense strand
ucaagaauuuuguggccaa

SEQ ID NO: 2362223 - RNA, 19 nt, Homo sapiens
  misc_RNA (1)...(19): siRNA sense strand
ugcacaaguuugagcuaga

SEQ ID NO: 2362224 - RNA, 19 nt, Homo sapiens
  misc_RNA (1)...(19): siRNA sense strand
aagcaauucagcagcaaga

SEQ ID NO: 2362225 - RNA, 19 nt, Homo sapiens
  misc_RNA (1)...(19): siRNA sense strand
acaaagauuccaugccaga

SEQ ID NO: 2362226 - RNA, 19 nt, Homo sapiens
  misc_RNA (1)...(19): siRNA sense strand
gcuggaagcaccuggagga

SEQ ID NO: 2362227 - RNA, 19 nt, Homo sapiens
  misc_RNA (1)...(19): siRNA sense strand
ugacaaagauuccaugcca

SEQ ID NO: 2362228 - RNA, 19 nt, Homo sapiens
  misc_RNA (1)...(19): siRNA sense strand
gcagaggaacugagagcac

SEQ ID NO: 2362229 - RNA, 19 nt, Homo sapiens
  misc_RNA (1)...(19): siRNA sense strand
acaccaaagaggacagucu

SEQ ID NO: 2362230 - RNA, 19 nt, Homo sapiens
  misc_RNA (1)...(19): siRNA sense strand
ucaaggaucuucaugccua

SEQ ID NO: 2362231 - RNA, 19 nt, Homo sapiens
  misc_RNA (1)...(19): siRNA sense strand
ggucaagcagagagaacga

SEQ ID NO: 2362232 - RNA, 19 nt, Homo sapiens
  misc_RNA (1)...(19): siRNA sense strand
uuaaggaaguuaugcguga

SEQ ID NO: 2362233 - RNA, 19 nt, Homo sapiens
  misc_RNA (1)...(19): siRNA sense strand
agcuggaagugguggucaa

SEQ ID NO: 2362234 - RNA, 19 nt, Homo sapiens
  misc_RNA (1)...(19): siRNA sense strand
accaaauacuuccgggaga

SEQ ID NO: 2362235 - RNA, 19 nt, Homo sapiens
  misc_RNA (1)...(19): siRNA sense strand
gcuucgugcccuugcaaau

SEQ ID NO: 2362236 - RNA, 19 nt, Homo sapiens
  misc_RNA (1)...(19): siRNA sense strand
cacacaaaccauugggagu

SEQ ID NO: 2362237 - RNA, 19 nt, Homo sapiens
  misc_RNA (1)...(19): siRNA sense strand
ggucaagcagagagaacga

SEQ ID NO: 2362238 - RNA, 19 nt, Homo sapiens
  misc_RNA (1)...(19): siRNA sense strand
uuaaggaaguuaugcguga

SEQ ID NO: 2362239 - RNA, 19 nt, Homo sapiens
  misc_RNA (1)...(19): siRNA sense strand
agcuggaagugguggucaa

SEQ ID NO: 2362240 - RNA, 19 nt, Homo sapiens
  misc_RNA (1)...(19): siRNA sense strand
accaaauacuuccgggaga

SEQ ID NO: 2362241 - RNA, 19 nt, Homo sapiens
  misc_RNA (1)...(19): siRNA sense strand
gcuucgugcccuugcaaau

SEQ ID NO: 2362242 - RNA, 19 nt, Homo sapiens
  misc_RNA (1)...(19): siRNA sense strand
cacacaaaccauugggagu

SEQ ID NO: 2362243 - RNA, 19 nt, Homo sapiens
  misc_RNA (1)...(19): siRNA sense strand
ggucaagcagagagaacga

SEQ ID NO: 2362244 - RNA, 19 nt, Homo sapiens
  misc_RNA (1)...(19): siRNA sense strand
uuaaggaaguuaugcguga

SEQ ID NO: 2362245 - RNA, 19 nt, Homo sapiens
  misc_RNA (1)...(19): siRNA sense strand
agcuggaagugguggucaa

SEQ ID NO: 2362246 - RNA, 19 nt, Homo sapiens
  misc_RNA (1)...(19): siRNA sense strand
accaaauacuuccgggaga

SEQ ID NO: 2362247 - RNA, 19 nt, Homo sapiens
  misc_RNA (1)...(19): siRNA sense strand
gcuucgugcccuugcaaau

SEQ ID NO: 2362248 - RNA, 19 nt, Homo sapiens
  misc_RNA (1)...(19): siRNA sense strand
cacacaaaccauugggagu

SEQ ID NO: 2362249 - RNA, 19 nt, Homo sapiens
  misc_RNA (1)...(19): siRNA sense strand
ggucaagcagagagaacga

SEQ ID NO: 2362250 - RNA, 19 nt, Homo sapiens
  misc_RNA (1)...(19): siRNA sense strand
uuaaggaaguuaugcguga

SEQ ID NO: 2362251 - RNA, 19 nt, Homo sapiens
  misc_RNA (1)...(19): siRNA sense strand
agcuggaagugguggucaa

SEQ ID NO: 2362252 - RNA, 19 nt, Homo sapiens
  misc_RNA (1)...(19): siRNA sense strand
accaaauacuuccgggaga

SEQ ID NO: 2362253 - RNA, 19 nt, Homo sapiens
  misc_RNA (1)...(19): siRNA sense strand
gcuucgugcccuugcaaau

SEQ ID NO: 2362254 - RNA, 19 nt, Homo sapiens
  misc_RNA (1)...(19): siRNA sense strand
cacacaaaccauugggagu

SEQ ID NO: 2362255 - RNA, 19 nt, Homo sapiens
  misc_RNA (1)...(19): siRNA sense strand
ggucaagcagagagaacga

SEQ ID NO: 2362256 - RNA, 19 nt, Homo sapiens
  misc_RNA (1)...(19): siRNA sense strand
uuaaggaaguuaugcguga

SEQ ID NO: 2362257 - RNA, 19 nt, Homo sapiens
  misc_RNA (1)...(19): siRNA sense strand
agcuggaagugguggucaa

SEQ ID NO: 2362258 - RNA, 19 nt, Homo sapiens
  misc_RNA (1)...(19): siRNA sense strand
cacacaaaccauugggagu

SEQ ID NO: 2362259 - RNA, 19 nt, Homo sapiens
  misc_RNA (1)...(19): siRNA sense strand
ggucaagcagagagaacga

SEQ ID NO: 2362260 - RNA, 19 nt, Homo sapiens
  misc_RNA (1)...(19): siRNA sense strand
uuaaggaaguuaugcguga

SEQ ID NO: 2362261 - RNA, 19 nt, Homo sapiens
  misc_RNA (1)...(19): siRNA sense strand
agcuggaagugguggucaa

SEQ ID NO: 2362262 - RNA, 19 nt, Homo sapiens
  misc_RNA (1)...(19): siRNA sense strand
cacacaaaccauugggagu

SEQ ID NO: 2362263 - RNA, 19 nt, Homo sapiens
  misc_RNA (1)...(19): siRNA sense strand
cgaaaauggcagaggaaga

SEQ ID NO: 2362264 - RNA, 19 nt, Homo sapiens
  misc_RNA (1)...(19): siRNA sense strand
ccaucaaggcccugagcaa

SEQ ID NO: 2362265 - RNA, 19 nt, Homo sapiens
  misc_RNA (1)...(19): siRNA sense strand
gggagaagaucuuggagga

SEQ ID NO: 2362266 - RNA, 19 nt, Homo sapiens
  misc_RNA (1)...(19): siRNA sense strand
aggccaagaaggagagaau

SEQ ID NO: 2362267 - RNA, 19 nt, Homo sapiens
  misc_RNA (1)...(19): siRNA sense strand
agaaugaggcagugggaca

SEQ ID NO: 2362268 - RNA, 19 nt, Homo sapiens
  misc_RNA (1)...(19): siRNA sense strand
agaaggagagaaugagcaa

SEQ ID NO: 2362269 - RNA, 19 nt, Homo sapiens
  misc_RNA (1)...(19): siRNA sense strand
ggguggaggacaugaugaa

SEQ ID NO: 2362270 - RNA, 19 nt, Homo sapiens
  misc_RNA (1)...(19): siRNA sense strand
aggcugaggaggagauaga

SEQ ID NO: 2362271 - RNA, 19 nt, Homo sapiens
  misc_RNA (1)...(19): siRNA sense strand
agaagaucuuggaggacuu

SEQ ID NO: 2362272 - RNA, 19 nt, Homo sapiens
  misc_RNA (1)...(19): siRNA sense strand
gggaaauccaacucgguau

SEQ ID NO: 2362273 - RNA, 19 nt, Homo sapiens
  misc_RNA (1)...(19): siRNA sense strand
cggagaagagcgagaucca

SEQ ID NO: 2362274 - RNA, 19 nt, Homo sapiens
  misc_RNA (1)...(19): siRNA sense strand
caucaugaccacagagauc

SEQ ID NO: 2362275 - RNA, 19 nt, Homo sapiens
  misc_RNA (1)...(19): siRNA sense strand
ucaagaaaggcauggacuu

SEQ ID NO: 2362276 - RNA, 19 nt, Homo sapiens
  misc_RNA (1)...(19): siRNA sense strand
augcagauacagaaggaga

SEQ ID NO: 2362277 - RNA, 19 nt, Homo sapiens
  misc_RNA (1)...(19): siRNA sense strand
gcaaagacagcaaggccca

SEQ ID NO: 2362278 - RNA, 19 nt, Homo sapiens
  misc_RNA (1)...(19): siRNA sense strand
ccacagagaccuuugccau

SEQ ID NO: 2362279 - RNA, 19 nt, Homo sapiens
  misc_RNA (1)...(19): siRNA sense strand
accagacgguggaggaauu

SEQ ID NO: 2362280 - RNA, 19 nt, Homo sapiens
  misc_RNA (1)...(19): siRNA sense strand
guggaggacaugaugaaga

SEQ ID NO: 2362281 - RNA, 19 nt, Homo sapiens
  misc_RNA (1)...(19): siRNA sense strand
gaguagaggugcuccgaac

SEQ ID NO: 2362282 - RNA, 19 nt, Homo sapiens
  misc_RNA (1)...(19): siRNA sense strand
uggcagaggaagacggauc

SEQ ID NO: 2362283 - RNA, 19 nt, Homo sapiens
  misc_RNA (1)...(19): siRNA sense strand
gggagcgaaugcagauaca

SEQ ID NO: 2362284 - RNA, 19 nt, Homo sapiens
  misc_RNA (1)...(19): siRNA sense strand
agaaggagauggagcggcu

SEQ ID NO: 2362285 - RNA, 19 nt, Homo sapiens
  misc_RNA (1)...(19): siRNA sense strand
gggugacgaggaugagaau

SEQ ID NO: 2362286 - RNA, 19 nt, Homo sapiens
  misc_RNA (1)...(19): siRNA sense strand
ucucaggagcagugggcca

SEQ ID NO: 2362287 - RNA, 19 nt, Homo sapiens
  misc_RNA (1)...(19): siRNA sense strand
augcagcuguggaggccaa

SEQ ID NO: 2362288 - RNA, 19 nt, Homo sapiens
  misc_RNA (1)...(19): siRNA sense strand
agauacagaaggagaugga

SEQ ID NO: 2362289 - RNA, 19 nt, Homo sapiens
  misc_RNA (1)...(19): siRNA sense strand
aggagauagacuuugagaa

SEQ ID NO: 2362290 - RNA, 19 nt, Homo sapiens
  misc_RNA (1)...(19): siRNA sense strand
gagcuuuggaggagccuga

SEQ ID NO: 2362291 - RNA, 19 nt, Homo sapiens
  misc_RNA (1)...(19): siRNA sense strand
ccaaagacacccaaccaca

SEQ ID NO: 2362292 - RNA, 19 nt, Homo sapiens
  misc_RNA (1)...(19): siRNA sense strand
aggaugagaaugaggcagu

SEQ ID NO: 2362293 - RNA, 19 nt, Homo sapiens
  misc_RNA (1)...(19): siRNA sense strand
gcucagauguuauucggga

SEQ ID NO: 2362294 - RNA, 19 nt, Homo sapiens
  misc_RNA (1)...(19): siRNA sense strand
ccucaagcagggaauagaa

SEQ ID NO: 2362295 - RNA, 19 nt, Homo sapiens
  misc_RNA (1)...(19): siRNA sense strand
acacacgggaggaggcuga

SEQ ID NO: 2362296 - RNA, 19 nt, Homo sapiens
  misc_RNA (1)...(19): siRNA sense strand
cuguggaggccaagaagga

SEQ ID NO: 2362297 - RNA, 19 nt, Homo sapiens
  misc_RNA (1)...(19): siRNA sense strand
gagaagaucuuggaggacu

SEQ ID NO: 2362298 - RNA, 19 nt, Homo sapiens
  misc_RNA (1)...(19): siRNA sense strand
guggaggccaagaaggaga

SEQ ID NO: 2362299 - RNA, 19 nt, Homo sapiens
  misc_RNA (1)...(19): siRNA sense strand
gugauaagcccuuguccca

SEQ ID NO: 2362300 - RNA, 19 nt, Homo sapiens
  misc_RNA (1)...(19): siRNA sense strand
ucuuggaggacuucagcaa

SEQ ID NO: 2362301 - RNA, 19 nt, Homo sapiens
  misc_RNA (1)...(19): siRNA sense strand
agccaaaauucaagaagga

SEQ ID NO: 2362302 - RNA, 19 nt, Homo sapiens
  misc_RNA (1)...(19): siRNA sense strand
cggaaaaggaagaggcaaa

SEQ ID NO: 2362303 - RNA, 19 nt, Homo sapiens
  misc_RNA (1)...(19): siRNA sense strand
aggaagaagagaagaaaga

SEQ ID NO: 2362304 - RNA, 19 nt, Homo sapiens
  misc_RNA (1)...(19): siRNA sense strand
ccaaagaagcugugggugu

SEQ ID NO: 2362305 - RNA, 19 nt, Homo sapiens
  misc_RNA (1)...(19): siRNA sense strand
aggucaaggucaaggucaa

SEQ ID NO: 2362306 - RNA, 19 nt, Homo sapiens
  misc_RNA (1)...(19): siRNA sense strand
gcaucaacuucaagcggaa

SEQ ID NO: 2362307 - RNA, 19 nt, Homo sapiens
  misc_RNA (1)...(19): siRNA sense strand
agaagaaagaagaagaaga

SEQ ID NO: 2362308 - RNA, 19 nt, Homo sapiens
  misc_RNA (1)...(19): siRNA sense strand
acgaggaagaagagaagaa

SEQ ID NO: 2362309 - RNA, 19 nt, Homo sapiens
  misc_RNA (1)...(19): siRNA sense strand
gugaugaggaagaggauga

SEQ ID NO: 2362310 - RNA, 19 nt, Homo sapiens
  misc_RNA (1)...(19): siRNA sense strand
cgguggaagcuaagagaga

SEQ ID NO: 2362311 - RNA, 19 nt, Homo sapiens
  misc_RNA (1)...(19): siRNA sense strand
gcguugaggcagagagcuu

SEQ ID NO: 2362312 - RNA, 19 nt, Homo sapiens
  misc_RNA (1)...(19): siRNA sense strand
cagcagcauuccagggcaa

SEQ ID NO: 2362313 - RNA, 19 nt, Homo sapiens
  misc_RNA (1)...(19): siRNA sense strand
ggguagaggagaagauguu

SEQ ID NO: 2362314 - RNA, 19 nt, Homo sapiens
  misc_RNA (1)...(19): siRNA sense strand
agagaagaaagaagaagaa

SEQ ID NO: 2362315 - RNA, 19 nt, Homo sapiens
  misc_RNA (1)...(19): siRNA sense strand
ggagaagagaaggaagaaa

SEQ ID NO: 2362316 - RNA, 19 nt, Homo sapiens
  misc_RNA (1)...(19): siRNA sense strand
agggagaagagaaggaaga

SEQ ID NO: 2362317 - RNA, 19 nt, Homo sapiens
  misc_RNA (1)...(19): siRNA sense strand
gcccagacuucgaggacau

SEQ ID NO: 2362318 - RNA, 19 nt, Homo sapiens
  misc_RNA (1)...(19): siRNA sense strand
acaacgacuaugagagcaa

SEQ ID NO: 2362319 - RNA, 19 nt, Homo sapiens
  misc_RNA (1)...(19): siRNA sense strand
aagcaguagugguggcaga

SEQ ID NO: 2362320 - RNA, 19 nt, Homo sapiens
  misc_RNA (1)...(19): siRNA sense strand
ggcaaguauuugugaagau

SEQ ID NO: 2362321 - RNA, 19 nt, Homo sapiens
  misc_RNA (1)...(19): siRNA sense strand
aggaagaggaugaggugca

SEQ ID NO: 2362322 - RNA, 19 nt, Homo sapiens
  misc_RNA (1)...(19): siRNA sense strand
gguucagcguugaggcaga

SEQ ID NO: 2362323 - RNA, 19 nt, Homo sapiens
  misc_RNA (1)...(19): siRNA sense strand
aagagaagaaagaagaaga

SEQ ID NO: 2362324 - RNA, 19 nt, Homo sapiens
  misc_RNA (1)...(19): siRNA sense strand
cagaagcagcugugacaau

SEQ ID NO: 2362325 - RNA, 19 nt, Homo sapiens
  misc_RNA (1)...(19): siRNA sense strand
agaagagaagaaagaagaa

SEQ ID NO: 2362326 - RNA, 19 nt, Homo sapiens
  misc_RNA (1)...(19): siRNA sense strand
acaaggagggagaagagaa

SEQ ID NO: 2362327 - RNA, 19 nt, Homo sapiens
  misc_RNA (1)...(19): siRNA sense strand
gcgcauggcucgaugugga

SEQ ID NO: 2362328 - RNA, 19 nt, Homo sapiens
  misc_RNA (1)...(19): siRNA sense strand
agcuauaugagaaaggaaa

SEQ ID NO: 2362329 - RNA, 19 nt, Homo sapiens
  misc_RNA (1)...(19): siRNA sense strand
cugacaagcgggagaaguu

SEQ ID NO: 2362330 - RNA, 19 nt, Homo sapiens
  misc_RNA (1)...(19): siRNA sense strand
uggaggacauggugggcau

SEQ ID NO: 2362331 - RNA, 19 nt, Homo sapiens
  misc_RNA (1)...(19): siRNA sense strand
agauggaacgacuggcuaa

SEQ ID NO: 2362332 - RNA, 19 nt, Homo sapiens
  misc_RNA (1)...(19): siRNA sense strand
acgcaaaggucguggaucc

SEQ ID NO: 2362333 - RNA, 19 nt, Homo sapiens
  misc_RNA (1)...(19): siRNA sense strand
agaagagaaggaagaaaga

SEQ ID NO: 2362334 - RNA, 19 nt, Homo sapiens
  misc_RNA (1)...(19): siRNA sense strand
cguccgagacugagagugu

SEQ ID NO: 2362335 - RNA, 19 nt, Homo sapiens
  misc_RNA (1)...(19): siRNA sense strand
gggcagaacgaguggacac

SEQ ID NO: 2362336 - RNA, 19 nt, Homo sapiens
  misc_RNA (1)...(19): siRNA sense strand
cgagaucagcagugaggau

SEQ ID NO: 2362337 - RNA, 19 nt, Homo sapiens
  misc_RNA (1)...(19): siRNA sense strand
ccaccugugaugaggaaga

SEQ ID NO: 2362338 - RNA, 19 nt, Homo sapiens
  misc_RNA (1)...(19): siRNA sense strand
ccggaaacggggugaggaa

SEQ ID NO: 2362339 - RNA, 19 nt, Homo sapiens
  misc_RNA (1)...(19): siRNA sense strand
guguauaccggaaguguga

SEQ ID NO: 2362340 - RNA, 19 nt, Homo sapiens
  misc_RNA (1)...(19): siRNA sense strand
gggaauccgacgaggagga

SEQ ID NO: 2362341 - RNA, 19 nt, Homo sapiens
  misc_RNA (1)...(19): siRNA sense strand
cagacuggcagcuggaaau

SEQ ID NO: 2362342 - RNA, 19 nt, Homo sapiens
  misc_RNA (1)...(19): siRNA sense strand
gaggaaaguuggcaggaug

SEQ ID NO: 2362343 - RNA, 19 nt, Homo sapiens
  misc_RNA (1)...(19): siRNA sense strand
aggaacagaagcuggauga

SEQ ID NO: 2362344 - RNA, 19 nt, Homo sapiens
  misc_RNA (1)...(19): siRNA sense strand
cagcuauaugagaaaggaa

SEQ ID NO: 2362345 - RNA, 19 nt, Homo sapiens
  misc_RNA (1)...(19): siRNA sense strand
gggagaagagaaggaagaa

SEQ ID NO: 2362346 - RNA, 19 nt, Homo sapiens
  misc_RNA (1)...(19): siRNA sense strand
uguaagagcuguggggcaa

SEQ ID NO: 2362347 - RNA, 19 nt, Homo sapiens
  misc_RNA (1)...(19): siRNA sense strand
gagaacucugaucgagaaa

SEQ ID NO: 2362348 - RNA, 19 nt, Homo sapiens
  misc_RNA (1)...(19): siRNA sense strand
ggcagaagcagcugugaca

SEQ ID NO: 2362349 - RNA, 19 nt, Homo sapiens
  misc_RNA (1)...(19): siRNA sense strand
augacgaggaagaagagaa

SEQ ID NO: 2362350 - RNA, 19 nt, Homo sapiens
  misc_RNA (1)...(19): siRNA sense strand
ccgacgaggaggaguuuca

SEQ ID NO: 2362351 - RNA, 19 nt, Homo sapiens
  misc_RNA (1)...(19): siRNA sense strand
cccaagaggagcaggagga

SEQ ID NO: 2362352 - RNA, 19 nt, Homo sapiens
  misc_RNA (1)...(19): siRNA sense strand
auguggacuucgagggcau

SEQ ID NO: 2362353 - RNA, 19 nt, Homo sapiens
  misc_RNA (1)...(19): siRNA sense strand
uggaugacgaggaagaaga

SEQ ID NO: 2362354 - RNA, 19 nt, Homo sapiens
  misc_RNA (1)...(19): siRNA sense strand
gugccgaauucuggaguau

SEQ ID NO: 2362355 - RNA, 19 nt, Homo sapiens
  misc_RNA (1)...(19): siRNA sense strand
ggaugaagauggagaggcc

SEQ ID NO: 2362356 - RNA, 19 nt, Homo sapiens
  misc_RNA (1)...(19): siRNA sense strand
cagaugauaaagagaacca

SEQ ID NO: 2362357 - RNA, 19 nt, Homo sapiens
  misc_RNA (1)...(19): siRNA sense strand
aagaggagcaggaggaauc

SEQ ID NO: 2362358 - RNA, 19 nt, Homo sapiens
  misc_RNA (1)...(19): siRNA sense strand
ugucugggguagaggagaa

SEQ ID NO: 2362359 - RNA, 19 nt, Homo sapiens
  misc_RNA (1)...(19): siRNA sense strand
ugccagaaccugaggagca

SEQ ID NO: 2362360 - RNA, 19 nt, Homo sapiens
  misc_RNA (1)...(19): siRNA sense strand
cagaugaagacuacgagau

SEQ ID NO: 2362361 - RNA, 19 nt, Homo sapiens
  misc_RNA (1)...(19): siRNA sense strand
cugcugaagcugcuagaau

SEQ ID NO: 2362362 - RNA, 19 nt, Homo sapiens
  misc_RNA (1)...(19): siRNA sense strand
ggagacagcaggaaccaga

SEQ ID NO: 2362363 - RNA, 19 nt, Homo sapiens
  misc_RNA (1)...(19): siRNA sense strand
gcuuggcaguggcggguuu

SEQ ID NO: 2362364 - RNA, 19 nt, Homo sapiens
  misc_RNA (1)...(19): siRNA sense strand
ugaucgagaaagugcaaga

SEQ ID NO: 2362365 - RNA, 19 nt, Homo sapiens
  misc_RNA (1)...(19): siRNA sense strand
acguggagggccagaaaca

SEQ ID NO: 2362366 - RNA, 19 nt, Homo sapiens
  misc_RNA (1)...(19): siRNA sense strand
ggaagaaaguccugggccc

SEQ ID NO: 2362367 - RNA, 19 nt, Homo sapiens
  misc_RNA (1)...(19): siRNA sense strand
gagcaacgggccacagaca

SEQ ID NO: 2362368 - RNA, 19 nt, Homo sapiens
  misc_RNA (1)...(19): siRNA sense strand
augagucgguggaagcuaa

SEQ ID NO: 2362369 - RNA, 19 nt, Homo sapiens
  misc_RNA (1)...(19): siRNA sense strand
ggacgauagugaagacgcu

SEQ ID NO: 2362370 - RNA, 19 nt, Homo sapiens
  misc_RNA (1)...(19): siRNA sense strand
gcaaaggacuccacgagcu

SEQ ID NO: 2362371 - RNA, 19 nt, Homo sapiens
  misc_RNA (1)...(19): siRNA sense strand
cuaugaagacaacgacuau

SEQ ID NO: 2362372 - RNA, 19 nt, Homo sapiens
  misc_RNA (1)...(19): siRNA sense strand
cagaggagaaccagaccau

SEQ ID NO: 2362373 - RNA, 19 nt, Homo sapiens
  misc_RNA (1)...(19): siRNA sense strand
gguuuagccgugugaggau

SEQ ID NO: 2362374 - RNA, 19 nt, Homo sapiens
  misc_RNA (1)...(19): siRNA sense strand
gaggagaaggagaagguga

SEQ ID NO: 2362375 - RNA, 19 nt, Homo sapiens
  misc_RNA (1)...(19): siRNA sense strand
cagugguggcagugacaaa

SEQ ID NO: 2362376 - RNA, 19 nt, Homo sapiens
  misc_RNA (1)...(19): siRNA sense strand
ggcuggaggagaaggagaa

SEQ ID NO: 2362377 - RNA, 19 nt, Homo sapiens
  misc_RNA (1)...(19): siRNA sense strand
cagcuaugguagugguagu

SEQ ID NO: 2362378 - RNA, 19 nt, Homo sapiens
  misc_RNA (1)...(19): siRNA sense strand
ggacaagggucucgccaac

SEQ ID NO: 2362379 - RNA, 19 nt, Homo sapiens
  misc_RNA (1)...(19): siRNA sense strand
aggagaaggagaaggugau

SEQ ID NO: 2362380 - RNA, 19 nt, Homo sapiens
  misc_RNA (1)...(19): siRNA sense strand
gggagaaggagcaggaggu

SEQ ID NO: 2362381 - RNA, 19 nt, Homo sapiens
  misc_RNA (1)...(19): siRNA sense strand
ugagugagaucgugggacu

SEQ ID NO: 2362382 - RNA, 19 nt, Homo sapiens
  misc_RNA (1)...(19): siRNA sense strand
gggagaaggaggagcagcu

SEQ ID NO: 2362383 - RNA, 19 nt, Homo sapiens
  misc_RNA (1)...(19): siRNA sense strand
agaagcagcugcaggagga

SEQ ID NO: 2362384 - RNA, 19 nt, Homo sapiens
  misc_RNA (1)...(19): siRNA sense strand
ccaugaagagcguggguac

SEQ ID NO: 2362385 - RNA, 19 nt, Homo sapiens
  misc_RNA (1)...(19): siRNA sense strand
ucaaaggcggacuggacaa

SEQ ID NO: 2362386 - RNA, 19 nt, Homo sapiens
  misc_RNA (1)...(19): siRNA sense strand
uggagauguaccagcgcaa

SEQ ID NO: 2362387 - RNA, 19 nt, Homo sapiens
  misc_RNA (1)...(19): siRNA sense strand
caaugggacuccugaggga

SEQ ID NO: 2362388 - RNA, 19 nt, Homo sapiens
  misc_RNA (1)...(19): siRNA sense strand
cagcagcagugguggcagu

SEQ ID NO: 2362389 - RNA, 19 nt, Homo sapiens
  misc_RNA (1)...(19): siRNA sense strand
cggaugugucgcagaaguu

SEQ ID NO: 2362390 - RNA, 19 nt, Homo sapiens
  misc_RNA (1)...(19): siRNA sense strand
cugucguacccaagaauuu

SEQ ID NO: 2362391 - RNA, 19 nt, Homo sapiens
  misc_RNA (1)...(19): siRNA sense strand
acaagaagcagcugcagga

SEQ ID NO: 2362392 - RNA, 19 nt, Homo sapiens
  misc_RNA (1)...(19): siRNA sense strand
gaaacuaagugggaggugu

SEQ ID NO: 2362393 - RNA, 19 nt, Homo sapiens
  misc_RNA (1)...(19): siRNA sense strand
gggcaagaccauuggggaa

SEQ ID NO: 2362394 - RNA, 19 nt, Homo sapiens
  misc_RNA (1)...(19): siRNA sense strand
ugaagaaguuaguuggcau

SEQ ID NO: 2362395 - RNA, 19 nt, Homo sapiens
  misc_RNA (1)...(19): siRNA sense strand
agacaagaugggagggcca

SEQ ID NO: 2362396 - RNA, 19 nt, Homo sapiens
  misc_RNA (1)...(19): siRNA sense strand
ccagaagaguuuauccaga

SEQ ID NO: 2362397 - RNA, 19 nt, Homo sapiens
  misc_RNA (1)...(19): siRNA sense strand
uugccaagguguugcccaa

SEQ ID NO: 2362398 - RNA, 19 nt, Homo sapiens
  misc_RNA (1)...(19): siRNA sense strand
gggaaaaucugccugguga

SEQ ID NO: 2362399 - RNA, 19 nt, Homo sapiens
  misc_RNA (1)...(19): siRNA sense strand
acgccuuguugcagggcuu

SEQ ID NO: 2362400 - RNA, 19 nt, Homo sapiens
  misc_RNA (1)...(19): siRNA sense strand
caucagugguuuaugccaa

SEQ ID NO: 2362401 - RNA, 19 nt, Homo sapiens
  misc_RNA (1)...(19): siRNA sense strand
cgauggagggagacggauu

SEQ ID NO: 2362402 - RNA, 19 nt, Homo sapiens
  misc_RNA (1)...(19): siRNA sense strand
acucaagugccaagccaaa

SEQ ID NO: 2362403 - RNA, 19 nt, Homo sapiens
  misc_RNA (1)...(19): siRNA sense strand
acuauuacccagagaacau

SEQ ID NO: 2362404 - RNA, 19 nt, Homo sapiens
  misc_RNA (1)...(19): siRNA sense strand
ggacaauucuaguguggac

SEQ ID NO: 2362405 - RNA, 19 nt, Homo sapiens
  misc_RNA (1)...(19): siRNA sense strand
cagagaacaucaaacccaa

SEQ ID NO: 2362406 - RNA, 19 nt, Homo sapiens
  misc_RNA (1)...(19): siRNA sense strand
auuuccagacaaagagaua

SEQ ID NO: 2362407 - RNA, 19 nt, Homo sapiens
  misc_RNA (1)...(19): siRNA sense strand
ggucuuagaugguacgcgu

SEQ ID NO: 2362408 - RNA, 19 nt, Homo sapiens
  misc_RNA (1)...(19): siRNA sense strand
acaucaaacccaaacccaa

SEQ ID NO: 2362409 - RNA, 19 nt, Homo sapiens
  misc_RNA (1)...(19): siRNA sense strand
cuaaauggcuggcacagga

SEQ ID NO: 2362410 - RNA, 19 nt, Homo sapiens
  misc_RNA (1)...(19): siRNA sense strand
gagaauggcuggaccacuc

SEQ ID NO: 2362411 - RNA, 19 nt, Homo sapiens
  misc_RNA (1)...(19): siRNA sense strand
caucagugguuuaugccaa

SEQ ID NO: 2362412 - RNA, 19 nt, Homo sapiens
  misc_RNA (1)...(19): siRNA sense strand
cgauggagggagacggauu

SEQ ID NO: 2362413 - RNA, 19 nt, Homo sapiens
  misc_RNA (1)...(19): siRNA sense strand
acucaagugccaagccaaa

SEQ ID NO: 2362414 - RNA, 19 nt, Homo sapiens
  misc_RNA (1)...(19): siRNA sense strand
acuauuacccagagaacau

SEQ ID NO: 2362415 - RNA, 19 nt, Homo sapiens
  misc_RNA (1)...(19): siRNA sense strand
ggacaauucuaguguggac

SEQ ID NO: 2362416 - RNA, 19 nt, Homo sapiens
  misc_RNA (1)...(19): siRNA sense strand
cagagaacaucaaacccaa

SEQ ID NO: 2362417 - RNA, 19 nt, Homo sapiens
  misc_RNA (1)...(19): siRNA sense strand
auuuccagacaaagagaua

SEQ ID NO: 2362418 - RNA, 19 nt, Homo sapiens
  misc_RNA (1)...(19): siRNA sense strand
ggucuuagaugguacgcgu

SEQ ID NO: 2362419 - RNA, 19 nt, Homo sapiens
  misc_RNA (1)...(19): siRNA sense strand
acaucaaacccaaacccaa

SEQ ID NO: 2362420 - RNA, 19 nt, Homo sapiens
  misc_RNA (1)...(19): siRNA sense strand
cuaaauggcuggcacagga

SEQ ID NO: 2362421 - RNA, 19 nt, Homo sapiens
  misc_RNA (1)...(19): siRNA sense strand
gagaauggcuggaccacuc

SEQ ID NO: 2362422 - RNA, 19 nt, Homo sapiens
  misc_RNA (1)...(19): siRNA sense strand
caucagugguuuaugccaa

SEQ ID NO: 2362423 - RNA, 19 nt, Homo sapiens
  misc_RNA (1)...(19): siRNA sense strand
cgauggagggagacggauu

SEQ ID NO: 2362424 - RNA, 19 nt, Homo sapiens
  misc_RNA (1)...(19): siRNA sense strand
acucaagugccaagccaaa

SEQ ID NO: 2362425 - RNA, 19 nt, Homo sapiens
  misc_RNA (1)...(19): siRNA sense strand
acuauuacccagagaacau

SEQ ID NO: 2362426 - RNA, 19 nt, Homo sapiens
  misc_RNA (1)...(19): siRNA sense strand
ggacaauucuaguguggac

SEQ ID NO: 2362427 - RNA, 19 nt, Homo sapiens
  misc_RNA (1)...(19): siRNA sense strand
cagagaacaucaaacccaa

SEQ ID NO: 2362428 - RNA, 19 nt, Homo sapiens
  misc_RNA (1)...(19): siRNA sense strand
auuuccagacaaagagaua

SEQ ID NO: 2362429 - RNA, 19 nt, Homo sapiens
  misc_RNA (1)...(19): siRNA sense strand
ggucuuagaugguacgcgu

SEQ ID NO: 2362430 - RNA, 19 nt, Homo sapiens
  misc_RNA (1)...(19): siRNA sense strand
acaucaaacccaaacccaa

SEQ ID NO: 2362431 - RNA, 19 nt, Homo sapiens
  misc_RNA (1)...(19): siRNA sense strand
cuaaauggcuggcacagga

SEQ ID NO: 2362432 - RNA, 19 nt, Homo sapiens
  misc_RNA (1)...(19): siRNA sense strand
gagaauggcuggaccacuc

SEQ ID NO: 2362433 - RNA, 19 nt, Homo sapiens
  misc_RNA (1)...(19): siRNA sense strand
agaccaaguucaagggcau

SEQ ID NO: 2362434 - RNA, 19 nt, Homo sapiens
  misc_RNA (1)...(19): siRNA sense strand
guaucuugcauuagggaau

SEQ ID NO: 2362435 - RNA, 19 nt, Homo sapiens
  misc_RNA (1)...(19): siRNA sense strand
cggagaaguucccggucau

SEQ ID NO: 2362436 - RNA, 19 nt, Homo sapiens
  misc_RNA (1)...(19): siRNA sense strand
agagcaagauagacggcuu

SEQ ID NO: 2362437 - RNA, 19 nt, Homo sapiens
  misc_RNA (1)...(19): siRNA sense strand
gcggagaaguucccgguca

SEQ ID NO: 2362438 - RNA, 19 nt, Homo sapiens
  misc_RNA (1)...(19): siRNA sense strand
ccacguucagaaagguaaa

SEQ ID NO: 2362439 - RNA, 19 nt, Homo sapiens
  misc_RNA (1)...(19): siRNA sense strand
ccgagaaggacgagauggu

SEQ ID NO: 2362440 - RNA, 19 nt, Homo sapiens
  misc_RNA (1)...(19): siRNA sense strand
ccaagaagauggacgacag

SEQ ID NO: 2362441 - RNA, 19 nt, Homo sapiens
  misc_RNA (1)...(19): siRNA sense strand
ccuccuaugugcaggugau

SEQ ID NO: 2362442 - RNA, 19 nt, Homo sapiens
  misc_RNA (1)...(19): siRNA sense strand
cagccaaggcagcgaugau

SEQ ID NO: 2362443 - RNA, 19 nt, Homo sapiens
  misc_RNA (1)...(19): siRNA sense strand
gagcauacccggaccucga

SEQ ID NO: 2362444 - RNA, 19 nt, Homo sapiens
  misc_RNA (1)...(19): siRNA sense strand
cuagaguguaaguuggauu

SEQ ID NO: 2362445 - RNA, 19 nt, Homo sapiens
  misc_RNA (1)...(19): siRNA sense strand
ucaccaagaagauggacga

SEQ ID NO: 2362446 - RNA, 19 nt, Homo sapiens
  misc_RNA (1)...(19): siRNA sense strand
agguggagagcaagauaga

SEQ ID NO: 2362447 - RNA, 19 nt, Homo sapiens
  misc_RNA (1)...(19): siRNA sense strand
uggcuaacuucccggacau

SEQ ID NO: 2362448 - RNA, 19 nt, Homo sapiens
  misc_RNA (1)...(19): siRNA sense strand
cggaaguuguacaggccca

SEQ ID NO: 2362449 - RNA, 19 nt, Homo sapiens
  misc_RNA (1)...(19): siRNA sense strand
gcucaaggaaaggaagaca

SEQ ID NO: 2362450 - RNA, 19 nt, Homo sapiens
  misc_RNA (1)...(19): siRNA sense strand
cggaaguuguacaggccca

SEQ ID NO: 2362451 - RNA, 19 nt, Homo sapiens
  misc_RNA (1)...(19): siRNA sense strand
gcucaaggaaaggaagaca

SEQ ID NO: 2362452 - RNA, 19 nt, Homo sapiens
  misc_RNA (1)...(19): siRNA sense strand
ccaugaguuucaagcggaa

SEQ ID NO: 2362453 - RNA, 19 nt, Homo sapiens
  misc_RNA (1)...(19): siRNA sense strand
augaaauggccgugaaaau

SEQ ID NO: 2362454 - RNA, 19 nt, Homo sapiens
  misc_RNA (1)...(19): siRNA sense strand
cuaugaaauggccgugaaa

SEQ ID NO: 2362455 - RNA, 19 nt, Homo sapiens
  misc_RNA (1)...(19): siRNA sense strand
gcugguuuauggagcaauu

SEQ ID NO: 2362456 - RNA, 19 nt, Homo sapiens
  misc_RNA (1)...(19): siRNA sense strand
ccgugaaaaugccugaaaa

SEQ ID NO: 2362457 - RNA, 19 nt, Homo sapiens
  misc_RNA (1)...(19): siRNA sense strand
guaaaccuauugauggcaa

SEQ ID NO: 2362458 - RNA, 19 nt, Homo sapiens
  misc_RNA (1)...(19): siRNA sense strand
uugccaagaaucaaagaau

SEQ ID NO: 2362459 - RNA, 19 nt, Homo sapiens
  misc_RNA (1)...(19): siRNA sense strand
gguacaugguaguaaaccu

SEQ ID NO: 2362460 - RNA, 19 nt, Homo sapiens
  misc_RNA (1)...(19): siRNA sense strand
gaggagauccagaggguca

SEQ ID NO: 2362461 - RNA, 19 nt, Homo sapiens
  misc_RNA (1)...(19): siRNA sense strand
cgguguucgugaaggagaa

SEQ ID NO: 2362462 - RNA, 19 nt, Homo sapiens
  misc_RNA (1)...(19): siRNA sense strand
cagaggaggcagagggugu

SEQ ID NO: 2362463 - RNA, 19 nt, Homo sapiens
  misc_RNA (1)...(19): siRNA sense strand
cuacagagcgaacgggaga

SEQ ID NO: 2362464 - RNA, 19 nt, Homo sapiens
  misc_RNA (1)...(19): siRNA sense strand
acguggaggugaaggacau

SEQ ID NO: 2362465 - RNA, 19 nt, Homo sapiens
  misc_RNA (1)...(19): siRNA sense strand
cauacgagcugcagccaga

SEQ ID NO: 2362466 - RNA, 19 nt, Homo sapiens
  misc_RNA (1)...(19): siRNA sense strand
auguggacguggaggugaa

SEQ ID NO: 2362467 - RNA, 19 nt, Homo sapiens
  misc_RNA (1)...(19): siRNA sense strand
ugaagaaaguagagcacac

SEQ ID NO: 2362468 - RNA, 19 nt, Homo sapiens
  misc_RNA (1)...(19): siRNA sense strand
cggugaaauuaccagaaaa

SEQ ID NO: 2362469 - RNA, 19 nt, Homo sapiens
  misc_RNA (1)...(19): siRNA sense strand
acgcugacgcgcaggagaa

SEQ ID NO: 2362470 - RNA, 19 nt, Homo sapiens
  misc_RNA (1)...(19): siRNA sense strand
gugaaggacauuaacgaca

SEQ ID NO: 2362471 - RNA, 19 nt, Homo sapiens
  misc_RNA (1)...(19): siRNA sense strand
uggacuuguauuacggaaa

SEQ ID NO: 2362472 - RNA, 19 nt, Homo sapiens
  misc_RNA (1)...(19): siRNA sense strand
acuuuuagacagagaagaa

SEQ ID NO: 2362473 - RNA, 19 nt, Homo sapiens
  misc_RNA (1)...(19): siRNA sense strand
ucaucacgguacuggacaa

SEQ ID NO: 2362474 - RNA, 19 nt, Homo sapiens
  misc_RNA (1)...(19): siRNA sense strand
uggccgacgugaacgacaa

SEQ ID NO: 2362475 - RNA, 19 nt, Homo sapiens
  misc_RNA (1)...(19): siRNA sense strand
cagauuuagacgaaggcuu

SEQ ID NO: 2362476 - RNA, 19 nt, Homo sapiens
  misc_RNA (1)...(19): siRNA sense strand
acggaaacuuuuagacaga

SEQ ID NO: 2362477 - RNA, 19 nt, Homo sapiens
  misc_RNA (1)...(19): siRNA sense strand
ccccaaugccucagauuua

SEQ ID NO: 2362478 - RNA, 19 nt, Homo sapiens
  misc_RNA (1)...(19): siRNA sense strand
cggagagcggcaaggugua

SEQ ID NO: 2362479 - RNA, 19 nt, Homo sapiens
  misc_RNA (1)...(19): siRNA sense strand
uuguggaaguuguggaugu

SEQ ID NO: 2362480 - RNA, 19 nt, Homo sapiens
  misc_RNA (1)...(19): siRNA sense strand
uggaggugaaggacauuaa

SEQ ID NO: 2362481 - RNA, 19 nt, Homo sapiens
  misc_RNA (1)...(19): siRNA sense strand
cccuguauacggugaaauu

SEQ ID NO: 2362482 - RNA, 19 nt, Homo sapiens
  misc_RNA (1)...(19): siRNA sense strand
agaccgaccucauggccuu

SEQ ID NO: 2362483 - RNA, 19 nt, Homo sapiens
  misc_RNA (1)...(19): siRNA sense strand
ggaaacuuuuagacagaga

SEQ ID NO: 2362484 - RNA, 19 nt, Homo sapiens
  misc_RNA (1)...(19): siRNA sense strand
gaggagauccagaggguca

SEQ ID NO: 2362485 - RNA, 19 nt, Homo sapiens
  misc_RNA (1)...(19): siRNA sense strand
cgguguucgugaaggagaa

SEQ ID NO: 2362486 - RNA, 19 nt, Homo sapiens
  misc_RNA (1)...(19): siRNA sense strand
cagaggaggcagagggugu

SEQ ID NO: 2362487 - RNA, 19 nt, Homo sapiens
  misc_RNA (1)...(19): siRNA sense strand
cuacagagcgaacgggaga

SEQ ID NO: 2362488 - RNA, 19 nt, Homo sapiens
  misc_RNA (1)...(19): siRNA sense strand
acguggaggugaaggacau

SEQ ID NO: 2362489 - RNA, 19 nt, Homo sapiens
  misc_RNA (1)...(19): siRNA sense strand
cauacgagcugcagccaga

SEQ ID NO: 2362490 - RNA, 19 nt, Homo sapiens
  misc_RNA (1)...(19): siRNA sense strand
auguggacguggaggugaa

SEQ ID NO: 2362491 - RNA, 19 nt, Homo sapiens
  misc_RNA (1)...(19): siRNA sense strand
ugaagaaaguagagcacac

SEQ ID NO: 2362492 - RNA, 19 nt, Homo sapiens
  misc_RNA (1)...(19): siRNA sense strand
cggugaaauuaccagaaaa

SEQ ID NO: 2362493 - RNA, 19 nt, Homo sapiens
  misc_RNA (1)...(19): siRNA sense strand
acgcugacgcgcaggagaa

SEQ ID NO: 2362494 - RNA, 19 nt, Homo sapiens
  misc_RNA (1)...(19): siRNA sense strand
gugaaggacauuaacgaca

SEQ ID NO: 2362495 - RNA, 19 nt, Homo sapiens
  misc_RNA (1)...(19): siRNA sense strand
uggacuuguauuacggaaa

SEQ ID NO: 2362496 - RNA, 19 nt, Homo sapiens
  misc_RNA (1)...(19): siRNA sense strand
acuuuuagacagagaagaa

SEQ ID NO: 2362497 - RNA, 19 nt, Homo sapiens
  misc_RNA (1)...(19): siRNA sense strand
ucaucacgguacuggacaa

SEQ ID NO: 2362498 - RNA, 19 nt, Homo sapiens
  misc_RNA (1)...(19): siRNA sense strand
uggccgacgugaacgacaa

SEQ ID NO: 2362499 - RNA, 19 nt, Homo sapiens
  misc_RNA (1)...(19): siRNA sense strand
cagauuuagacgaaggcuu

SEQ ID NO: 2362500 - RNA, 19 nt, Homo sapiens
  misc_RNA (1)...(19): siRNA sense strand
acggaaacuuuuagacaga

SEQ ID NO: 2362501 - RNA, 19 nt, Homo sapiens
  misc_RNA (1)...(19): siRNA sense strand
ccccaaugccucagauuua

SEQ ID NO: 2362502 - RNA, 19 nt, Homo sapiens
  misc_RNA (1)...(19): siRNA sense strand
cggagagcggcaaggugua

SEQ ID NO: 2362503 - RNA, 19 nt, Homo sapiens
  misc_RNA (1)...(19): siRNA sense strand
uuguggaaguuguggaugu

SEQ ID NO: 2362504 - RNA, 19 nt, Homo sapiens
  misc_RNA (1)...(19): siRNA sense strand
uggaggugaaggacauuaa

SEQ ID NO: 2362505 - RNA, 19 nt, Homo sapiens
  misc_RNA (1)...(19): siRNA sense strand
cccuguauacggugaaauu

SEQ ID NO: 2362506 - RNA, 19 nt, Homo sapiens
  misc_RNA (1)...(19): siRNA sense strand
agaccgaccucauggccuu

SEQ ID NO: 2362507 - RNA, 19 nt, Homo sapiens
  misc_RNA (1)...(19): siRNA sense strand
ggaaacuuuuagacagaga

SEQ ID NO: 2362508 - RNA, 19 nt, Homo sapiens
  misc_RNA (1)...(19): siRNA sense strand
gcuucaagacauuuggaau

SEQ ID NO: 2362509 - RNA, 19 nt, Homo sapiens
  misc_RNA (1)...(19): siRNA sense strand
auuucaugcuaaagggaga

SEQ ID NO: 2362510 - RNA, 19 nt, Homo sapiens
  misc_RNA (1)...(19): siRNA sense strand
cuaugagaguagggaguuu

SEQ ID NO: 2362511 - RNA, 19 nt, Homo sapiens
  misc_RNA (1)...(19): siRNA sense strand
gggacuucacugaggacuu

SEQ ID NO: 2362512 - RNA, 19 nt, Homo sapiens
  misc_RNA (1)...(19): siRNA sense strand
acaggaacacuaaggucaa

SEQ ID NO: 2362513 - RNA, 19 nt, Homo sapiens
  misc_RNA (1)...(19): siRNA sense strand
cuucaagacauuuggaauc

SEQ ID NO: 2362514 - RNA, 19 nt, Homo sapiens
  misc_RNA (1)...(19): siRNA sense strand
augaugucuuuguggguau

SEQ ID NO: 2362515 - RNA, 19 nt, Homo sapiens
  misc_RNA (1)...(19): siRNA sense strand
agaacaaauacuagccaaa

SEQ ID NO: 2362516 - RNA, 19 nt, Homo sapiens
  misc_RNA (1)...(19): siRNA sense strand
ucuuuggaguaguggagaa

SEQ ID NO: 2362517 - RNA, 19 nt, Homo sapiens
  misc_RNA (1)...(19): siRNA sense strand
ggggaauuguucagcaaau

SEQ ID NO: 2362518 - RNA, 19 nt, Homo sapiens
  misc_RNA (1)...(19): siRNA sense strand
gggugugaccuggaagaaa

SEQ ID NO: 2362519 - RNA, 19 nt, Homo sapiens
  misc_RNA (1)...(19): siRNA sense strand
ucaggagaucaguuggaaa

SEQ ID NO: 2362520 - RNA, 19 nt, Homo sapiens
  misc_RNA (1)...(19): siRNA sense strand
gugucauggccuugcagaa

SEQ ID NO: 2362521 - RNA, 19 nt, Homo sapiens
  misc_RNA (1)...(19): siRNA sense strand
aagaacaaauacuagccaa

SEQ ID NO: 2362522 - RNA, 19 nt, Homo sapiens
  misc_RNA (1)...(19): siRNA sense strand
gcuucaaguccaaagagau

SEQ ID NO: 2362523 - RNA, 19 nt, Homo sapiens
  misc_RNA (1)...(19): siRNA sense strand
uuggaguaguggagaagga

SEQ ID NO: 2362524 - RNA, 19 nt, Homo sapiens
  misc_RNA (1)...(19): siRNA sense strand
agaacaaauacuagccaaa

SEQ ID NO: 2362525 - RNA, 19 nt, Homo sapiens
  misc_RNA (1)...(19): siRNA sense strand
ucuuuggaguaguggagaa

SEQ ID NO: 2362526 - RNA, 19 nt, Homo sapiens
  misc_RNA (1)...(19): siRNA sense strand
ggggaauuguucagcaaau

SEQ ID NO: 2362527 - RNA, 19 nt, Homo sapiens
  misc_RNA (1)...(19): siRNA sense strand
gggugugaccuggaagaaa

SEQ ID NO: 2362528 - RNA, 19 nt, Homo sapiens
  misc_RNA (1)...(19): siRNA sense strand
ucaggagaucaguuggaaa

SEQ ID NO: 2362529 - RNA, 19 nt, Homo sapiens
  misc_RNA (1)...(19): siRNA sense strand
gugucauggccuugcagaa

SEQ ID NO: 2362530 - RNA, 19 nt, Homo sapiens
  misc_RNA (1)...(19): siRNA sense strand
aagaacaaauacuagccaa

SEQ ID NO: 2362531 - RNA, 19 nt, Homo sapiens
  misc_RNA (1)...(19): siRNA sense strand
gcuucaaguccaaagagau

SEQ ID NO: 2362532 - RNA, 19 nt, Homo sapiens
  misc_RNA (1)...(19): siRNA sense strand
uuggaguaguggagaagga

SEQ ID NO: 2362533 - RNA, 19 nt, Homo sapiens
  misc_RNA (1)...(19): siRNA sense strand
agaacaaauacuagccaaa

SEQ ID NO: 2362534 - RNA, 19 nt, Homo sapiens
  misc_RNA (1)...(19): siRNA sense strand
ucuuuggaguaguggagaa

SEQ ID NO: 2362535 - RNA, 19 nt, Homo sapiens
  misc_RNA (1)...(19): siRNA sense strand
ggggaauuguucagcaaau

SEQ ID NO: 2362536 - RNA, 19 nt, Homo sapiens
  misc_RNA (1)...(19): siRNA sense strand
gggugugaccuggaagaaa

SEQ ID NO: 2362537 - RNA, 19 nt, Homo sapiens
  misc_RNA (1)...(19): siRNA sense strand
ucaggagaucaguuggaaa

SEQ ID NO: 2362538 - RNA, 19 nt, Homo sapiens
  misc_RNA (1)...(19): siRNA sense strand
gugucauggccuugcagaa

SEQ ID NO: 2362539 - RNA, 19 nt, Homo sapiens
  misc_RNA (1)...(19): siRNA sense strand
aagaacaaauacuagccaa

SEQ ID NO: 2362540 - RNA, 19 nt, Homo sapiens
  misc_RNA (1)...(19): siRNA sense strand
gcuucaaguccaaagagau

SEQ ID NO: 2362541 - RNA, 19 nt, Homo sapiens
  misc_RNA (1)...(19): siRNA sense strand
uuggaguaguggagaagga

SEQ ID NO: 2362542 - RNA, 19 nt, Homo sapiens
  misc_RNA (1)...(19): siRNA sense strand
agaacaaauacuagccaaa

SEQ ID NO: 2362543 - RNA, 19 nt, Homo sapiens
  misc_RNA (1)...(19): siRNA sense strand
ucuuuggaguaguggagaa

SEQ ID NO: 2362544 - RNA, 19 nt, Homo sapiens
  misc_RNA (1)...(19): siRNA sense strand
ggggaauuguucagcaaau

SEQ ID NO: 2362545 - RNA, 19 nt, Homo sapiens
  misc_RNA (1)...(19): siRNA sense strand
gggugugaccuggaagaaa

SEQ ID NO: 2362546 - RNA, 19 nt, Homo sapiens
  misc_RNA (1)...(19): siRNA sense strand
ucaggagaucaguuggaaa

SEQ ID NO: 2362547 - RNA, 19 nt, Homo sapiens
  misc_RNA (1)...(19): siRNA sense strand
gugucauggccuugcagaa

SEQ ID NO: 2362548 - RNA, 19 nt, Homo sapiens
  misc_RNA (1)...(19): siRNA sense strand
aagaacaaauacuagccaa

SEQ ID NO: 2362549 - RNA, 19 nt, Homo sapiens
  misc_RNA (1)...(19): siRNA sense strand
gcuucaaguccaaagagau

SEQ ID NO: 2362550 - RNA, 19 nt, Homo sapiens
  misc_RNA (1)...(19): siRNA sense strand
uuggaguaguggagaagga

SEQ ID NO: 2362551 - RNA, 19 nt, Homo sapiens
  misc_RNA (1)...(19): siRNA sense strand
cggccaaggaacagcauuu

SEQ ID NO: 2362552 - RNA, 19 nt, Homo sapiens
  misc_RNA (1)...(19): siRNA sense strand
ccggauaguuggugggcag

SEQ ID NO: 2362553 - RNA, 19 nt, Homo sapiens
  misc_RNA (1)...(19): siRNA sense strand
cgccaagguagcugaguuu

SEQ ID NO: 2362554 - RNA, 19 nt, Homo sapiens
  misc_RNA (1)...(19): siRNA sense strand
cggauaugcuccaggacac

SEQ ID NO: 2362555 - RNA, 19 nt, Homo sapiens
  misc_RNA (1)...(19): siRNA sense strand
cggugcagguguuggcuca

SEQ ID NO: 2362556 - RNA, 19 nt, Homo sapiens
  misc_RNA (1)...(19): siRNA sense strand
ccuugcaggaugaggagau

SEQ ID NO: 2362557 - RNA, 19 nt, Homo sapiens
  misc_RNA (1)...(19): siRNA sense strand
uguaagaagugcacggaga

SEQ ID NO: 2362558 - RNA, 19 nt, Homo sapiens
  misc_RNA (1)...(19): siRNA sense strand
ccaaaggaucagaggagca

SEQ ID NO: 2362559 - RNA, 19 nt, Homo sapiens
  misc_RNA (1)...(19): siRNA sense strand
gagagaagaacuuugccaa

SEQ ID NO: 2362560 - RNA, 19 nt, Homo sapiens
  misc_RNA (1)...(19): siRNA sense strand
cugaaggagaaguacgaca

SEQ ID NO: 2362561 - RNA, 19 nt, Homo sapiens
  misc_RNA (1)...(19): siRNA sense strand
ccaaggaguuuguggaugc

SEQ ID NO: 2362562 - RNA, 19 nt, Homo sapiens
  misc_RNA (1)...(19): siRNA sense strand
cccgggagcgagagaagaa

SEQ ID NO: 2362563 - RNA, 19 nt, Homo sapiens
  misc_RNA (1)...(19): siRNA sense strand
acaacguggaguacggcua

SEQ ID NO: 2362564 - RNA, 19 nt, Homo sapiens
  misc_RNA (1)...(19): siRNA sense strand
ccgacuacugccugcgcaa

SEQ ID NO: 2362565 - RNA, 19 nt, Homo sapiens
  misc_RNA (1)...(19): siRNA sense strand
uguaagaagugcacggaga

SEQ ID NO: 2362566 - RNA, 19 nt, Homo sapiens
  misc_RNA (1)...(19): siRNA sense strand
ccaaaggaucagaggagca

SEQ ID NO: 2362567 - RNA, 19 nt, Homo sapiens
  misc_RNA (1)...(19): siRNA sense strand
gagagaagaacuuugccaa

SEQ ID NO: 2362568 - RNA, 19 nt, Homo sapiens
  misc_RNA (1)...(19): siRNA sense strand
cugaaggagaaguacgaca

SEQ ID NO: 2362569 - RNA, 19 nt, Homo sapiens
  misc_RNA (1)...(19): siRNA sense strand
ccaaggaguuuguggaugc

SEQ ID NO: 2362570 - RNA, 19 nt, Homo sapiens
  misc_RNA (1)...(19): siRNA sense strand
cccgggagcgagagaagaa

SEQ ID NO: 2362571 - RNA, 19 nt, Homo sapiens
  misc_RNA (1)...(19): siRNA sense strand
acaacguggaguacggcua

SEQ ID NO: 2362572 - RNA, 19 nt, Homo sapiens
  misc_RNA (1)...(19): siRNA sense strand
ccgacuacugccugcgcaa

SEQ ID NO: 2362573 - RNA, 19 nt, Homo sapiens
  misc_RNA (1)...(19): siRNA sense strand
aggaagaagcaaauggaca

SEQ ID NO: 2362574 - RNA, 19 nt, Homo sapiens
  misc_RNA (1)...(19): siRNA sense strand
augauuaggaagaagcaaa

SEQ ID NO: 2362575 - RNA, 19 nt, Homo sapiens
  misc_RNA (1)...(19): siRNA sense strand
cugaaaaugauuaggaaga

SEQ ID NO: 2362576 - RNA, 19 nt, Homo sapiens
  misc_RNA (1)...(19): siRNA sense strand
acuugaaacugcacggaga

SEQ ID NO: 2362577 - RNA, 19 nt, Homo sapiens
  misc_RNA (1)...(19): siRNA sense strand
uggccgacuccuaaagaaa

SEQ ID NO: 2362578 - RNA, 19 nt, Homo sapiens
  misc_RNA (1)...(19): siRNA sense strand
ccuaagucuuugggagauu

SEQ ID NO: 2362579 - RNA, 19 nt, Homo sapiens
  misc_RNA (1)...(19): siRNA sense strand
agagaaacaaggaacucaa

SEQ ID NO: 2362580 - RNA, 19 nt, Homo sapiens
  misc_RNA (1)...(19): siRNA sense strand
uugaugaaagggagagaca

SEQ ID NO: 2362581 - RNA, 19 nt, Homo sapiens
  misc_RNA (1)...(19): siRNA sense strand
ccgcugaauaaggaggaaa

SEQ ID NO: 2362582 - RNA, 19 nt, Homo sapiens
  misc_RNA (1)...(19): siRNA sense strand
ugauuaggaagaagcaaau

SEQ ID NO: 2362583 - RNA, 19 nt, Homo sapiens
  misc_RNA (1)...(19): siRNA sense strand
cggagagaaacaaggaacu

SEQ ID NO: 2362584 - RNA, 19 nt, Homo sapiens
  misc_RNA (1)...(19): siRNA sense strand
cgugaaggcaggaaugcuu

SEQ ID NO: 2362585 - RNA, 19 nt, Homo sapiens
  misc_RNA (1)...(19): siRNA sense strand
ugccaggguuugagguuca

SEQ ID NO: 2362586 - RNA, 19 nt, Homo sapiens
  misc_RNA (1)...(19): siRNA sense strand
caguuugaugaaagggaga

SEQ ID NO: 2362587 - RNA, 19 nt, Homo sapiens
  misc_RNA (1)...(19): siRNA sense strand
gaacccaacuguaucccaa

SEQ ID NO: 2362588 - RNA, 19 nt, Homo sapiens
  misc_RNA (1)...(19): siRNA sense strand
aggcaauucaguggauuua

SEQ ID NO: 2362589 - RNA, 19 nt, Homo sapiens
  misc_RNA (1)...(19): siRNA sense strand
accuaagggcaaagagcuu

SEQ ID NO: 2362590 - RNA, 19 nt, Homo sapiens
  misc_RNA (1)...(19): siRNA sense strand
gcguggagaggaagcgcau

SEQ ID NO: 2362591 - RNA, 19 nt, Homo sapiens
  misc_RNA (1)...(19): siRNA sense strand
agaaacaggaggagcucaa

SEQ ID NO: 2362592 - RNA, 19 nt, Homo sapiens
  misc_RNA (1)...(19): siRNA sense strand
aggaggagcucaaccggaa

SEQ ID NO: 2362593 - RNA, 19 nt, Homo sapiens
  misc_RNA (1)...(19): siRNA sense strand
guauaaggcuuuccggagu

SEQ ID NO: 2362594 - RNA, 19 nt, Homo sapiens
  misc_RNA (1)...(19): siRNA sense strand
ugaagaaacaggaggagcu

SEQ ID NO: 2362595 - RNA, 19 nt, Homo sapiens
  misc_RNA (1)...(19): siRNA sense strand
gcuucuguguggaaaccaa

SEQ ID NO: 2362596 - RNA, 19 nt, Homo sapiens
  misc_RNA (1)...(19): siRNA sense strand
agaaacaggaggagcucaa

SEQ ID NO: 2362597 - RNA, 19 nt, Homo sapiens
  misc_RNA (1)...(19): siRNA sense strand
aggaggagcucaaccggaa

SEQ ID NO: 2362598 - RNA, 19 nt, Homo sapiens
  misc_RNA (1)...(19): siRNA sense strand
guauaaggcuuuccggagu

SEQ ID NO: 2362599 - RNA, 19 nt, Homo sapiens
  misc_RNA (1)...(19): siRNA sense strand
ugaagaaacaggaggagcu

SEQ ID NO: 2362600 - RNA, 19 nt, Homo sapiens
  misc_RNA (1)...(19): siRNA sense strand
gcuucuguguggaaaccaa

SEQ ID NO: 2362601 - RNA, 19 nt, Homo sapiens
  misc_RNA (1)...(19): siRNA sense strand
gaugcagagaugaaggaaa

SEQ ID NO: 2362602 - RNA, 19 nt, Homo sapiens
  misc_RNA (1)...(19): siRNA sense strand
aguugaaggaagaggagau

SEQ ID NO: 2362603 - RNA, 19 nt, Homo sapiens
  misc_RNA (1)...(19): siRNA sense strand
gcguagagauugaggaagg

SEQ ID NO: 2362604 - RNA, 19 nt, Homo sapiens
  misc_RNA (1)...(19): siRNA sense strand
ugaaagaggugacgcacga

SEQ ID NO: 2362605 - RNA, 19 nt, Homo sapiens
  misc_RNA (1)...(19): siRNA sense strand
gagcaguaccuuagggaug

SEQ ID NO: 2362606 - RNA, 19 nt, Homo sapiens
  misc_RNA (1)...(19): siRNA sense strand
ggaagaacauccaggacuc

SEQ ID NO: 2362607 - RNA, 19 nt, Homo sapiens
  misc_RNA (1)...(19): siRNA sense strand
cgagaaagacgaagagcug

SEQ ID NO: 2362608 - RNA, 19 nt, Homo sapiens
  misc_RNA (1)...(19): siRNA sense strand
caugcgagguggugaggga

SEQ ID NO: 2362609 - RNA, 19 nt, Homo sapiens
  misc_RNA (1)...(19): siRNA sense strand
ugaaggaagaggagaucca

SEQ ID NO: 2362610 - RNA, 19 nt, Homo sapiens
  misc_RNA (1)...(19): siRNA sense strand
uggagaagaugcaggccca

SEQ ID NO: 2362611 - RNA, 19 nt, Homo sapiens
  misc_RNA (1)...(19): siRNA sense strand
caucccagucauuggcaaa

SEQ ID NO: 2362612 - RNA, 19 nt, Homo sapiens
  misc_RNA (1)...(19): siRNA sense strand
agucauuggcaaagcggau

SEQ ID NO: 2362613 - RNA, 19 nt, Homo sapiens
  misc_RNA (1)...(19): siRNA sense strand
cugaugaagaugaagacuu

SEQ ID NO: 2362614 - RNA, 19 nt, Homo sapiens
  misc_RNA (1)...(19): siRNA sense strand
ccaaccagcugcaccgcaa

SEQ ID NO: 2362615 - RNA, 19 nt, Homo sapiens
  misc_RNA (1)...(19): siRNA sense strand
ccgagaagcugauccgcga

SEQ ID NO: 2362616 - RNA, 19 nt, Homo sapiens
  misc_RNA (1)...(19): siRNA sense strand
cagagaugaaggaaagcau

SEQ ID NO: 2362617 - RNA, 19 nt, Homo sapiens
  misc_RNA (1)...(19): siRNA sense strand
cccaaaugcagcagagcca

SEQ ID NO: 2362618 - RNA, 19 nt, Homo sapiens
  misc_RNA (1)...(19): siRNA sense strand
gcgagaaagacgaagagcu

SEQ ID NO: 2362619 - RNA, 19 nt, Homo sapiens
  misc_RNA (1)...(19): siRNA sense strand
cggaagaacauccaggacu

SEQ ID NO: 2362620 - RNA, 19 nt, Homo sapiens
  misc_RNA (1)...(19): siRNA sense strand
ccgggcaguacacgagaaa

SEQ ID NO: 2362621 - RNA, 19 nt, Homo sapiens
  misc_RNA (1)...(19): siRNA sense strand
aggaagaggagauccacau

SEQ ID NO: 2362622 - RNA, 19 nt, Homo sapiens
  misc_RNA (1)...(19): siRNA sense strand
cgggaucaguugaaggaag

SEQ ID NO: 2362623 - RNA, 19 nt, Homo sapiens
  misc_RNA (1)...(19): siRNA sense strand
gggcauucgucuugguaaa

SEQ ID NO: 2362624 - RNA, 19 nt, Homo sapiens
  misc_RNA (1)...(19): siRNA sense strand
caucagucuuaguggaaua

SEQ ID NO: 2362625 - RNA, 19 nt, Homo sapiens
  misc_RNA (1)...(19): siRNA sense strand
ccuuauugaugcagagauu

SEQ ID NO: 2362626 - RNA, 19 nt, Homo sapiens
  misc_RNA (1)...(19): siRNA sense strand
ccauagaacucgagcucuu

SEQ ID NO: 2362627 - RNA, 19 nt, Homo sapiens
  misc_RNA (1)...(19): siRNA sense strand
cugaauagaugcagcucaa

SEQ ID NO: 2362628 - RNA, 19 nt, Homo sapiens
  misc_RNA (1)...(19): siRNA sense strand
gaggaauauuuaagaguga

SEQ ID NO: 2362629 - RNA, 19 nt, Homo sapiens
  misc_RNA (1)...(19): siRNA sense strand
caacaauaucacugagcua

SEQ ID NO: 2362630 - RNA, 19 nt, Homo sapiens
  misc_RNA (1)...(19): siRNA sense strand
ggaaauaaugagagugguu

SEQ ID NO: 2362631 - RNA, 19 nt, Homo sapiens
  misc_RNA (1)...(19): siRNA sense strand
aagcagauuugaugugaaa

SEQ ID NO: 2362632 - RNA, 19 nt, Homo sapiens
  misc_RNA (1)...(19): siRNA sense strand
acuagaugcuuuagaacua

SEQ ID NO: 2362633 - RNA, 19 nt, Homo sapiens
  misc_RNA (1)...(19): siRNA sense strand
ugauauugcuugacaguau

SEQ ID NO: 2362634 - RNA, 19 nt, Homo sapiens
  misc_RNA (1)...(19): siRNA sense strand
aagaaaggaaugacaguua

SEQ ID NO: 2362635 - RNA, 19 nt, Homo sapiens
  misc_RNA (1)...(19): siRNA sense strand
gugaagaaauguugaaacu

SEQ ID NO: 2362636 - RNA, 19 nt, Homo sapiens
  misc_RNA (1)...(19): siRNA sense strand
cagcuaaggacuuugguaa

SEQ ID NO: 2362637 - RNA, 19 nt, Homo sapiens
  misc_RNA (1)...(19): siRNA sense strand
aagugaaguuccugugaua

SEQ ID NO: 2362638 - RNA, 19 nt, Homo sapiens
  misc_RNA (1)...(19): siRNA sense strand
gggacauguuguuggaaaa

SEQ ID NO: 2362639 - RNA, 19 nt, Homo sapiens
  misc_RNA (1)...(19): siRNA sense strand
aaacagacgaguugggauu

SEQ ID NO: 2362640 - RNA, 19 nt, Homo sapiens
  misc_RNA (1)...(19): siRNA sense strand
cugauaacgugcugaguuu

SEQ ID NO: 2362641 - RNA, 19 nt, Homo sapiens
  misc_RNA (1)...(19): siRNA sense strand
uggaauuguucuugaguca

SEQ ID NO: 2362642 - RNA, 19 nt, Homo sapiens
  misc_RNA (1)...(19): siRNA sense strand
cuugaaaguuauagaacga

SEQ ID NO: 2362643 - RNA, 19 nt, Homo sapiens
  misc_RNA (1)...(19): siRNA sense strand
ugaaaaugcuggagagcuu

SEQ ID NO: 2362644 - RNA, 19 nt, Homo sapiens
  misc_RNA (1)...(19): siRNA sense strand
auuuaagagugaucggaaa

SEQ ID NO: 2362645 - RNA, 19 nt, Homo sapiens
  misc_RNA (1)...(19): siRNA sense strand
ugagaaaacugcagaaaga

SEQ ID NO: 2362646 - RNA, 19 nt, Homo sapiens
  misc_RNA (1)...(19): siRNA sense strand
aagacaaucugcagaagaa

SEQ ID NO: 2362647 - RNA, 19 nt, Homo sapiens
  misc_RNA (1)...(19): siRNA sense strand
ccaagaaagaccucauuaa

SEQ ID NO: 2362648 - RNA, 19 nt, Homo sapiens
  misc_RNA (1)...(19): siRNA sense strand
gauuaagggucuguggaaa

SEQ ID NO: 2362649 - RNA, 19 nt, Homo sapiens
  misc_RNA (1)...(19): siRNA sense strand
ucuuguggcuggagauuua

SEQ ID NO: 2362650 - RNA, 19 nt, Homo sapiens
  misc_RNA (1)...(19): siRNA sense strand
guuacaaacuaauggagau

SEQ ID NO: 2362651 - RNA, 19 nt, Homo sapiens
  misc_RNA (1)...(19): siRNA sense strand
cuauggaauaagagaggua

SEQ ID NO: 2362652 - RNA, 19 nt, Homo sapiens
  misc_RNA (1)...(19): siRNA sense strand
ggaaaaugcuacaacacua

SEQ ID NO: 2362653 - RNA, 19 nt, Homo sapiens
  misc_RNA (1)...(19): siRNA sense strand
aacaagagcuggaggcaga

SEQ ID NO: 2362654 - RNA, 19 nt, Homo sapiens
  misc_RNA (1)...(19): siRNA sense strand
uuuacaaggucaagucaaa

SEQ ID NO: 2362655 - RNA, 19 nt, Homo sapiens
  misc_RNA (1)...(19): siRNA sense strand
ugaaacagcaccuggaaau

SEQ ID NO: 2362656 - RNA, 19 nt, Homo sapiens
  misc_RNA (1)...(19): siRNA sense strand
acaaacuaauggagaugaa

SEQ ID NO: 2362657 - RNA, 19 nt, Homo sapiens
  misc_RNA (1)...(19): siRNA sense strand
aagaaauagccgaagucaa

SEQ ID NO: 2362658 - RNA, 19 nt, Homo sapiens
  misc_RNA (1)...(19): siRNA sense strand
ccuaaagaaggaaugauua

SEQ ID NO: 2362659 - RNA, 19 nt, Homo sapiens
  misc_RNA (1)...(19): siRNA sense strand
cuacaacacuacugcacaa

SEQ ID NO: 2362660 - RNA, 19 nt, Homo sapiens
  misc_RNA (1)...(19): siRNA sense strand
gcaaagaaguuccagcuga

SEQ ID NO: 2362661 - RNA, 19 nt, Homo sapiens
  misc_RNA (1)...(19): siRNA sense strand
uuuaauggcuguagagcuu

SEQ ID NO: 2362662 - RNA, 19 nt, Homo sapiens
  misc_RNA (1)...(19): siRNA sense strand
uagcugaaagcaagagaua

SEQ ID NO: 2362663 - RNA, 19 nt, Homo sapiens
  misc_RNA (1)...(19): siRNA sense strand
ucaagaagaugaagcccua

SEQ ID NO: 2362664 - RNA, 19 nt, Homo sapiens
  misc_RNA (1)...(19): siRNA sense strand
gcgaugaauaccaacaaua

SEQ ID NO: 2362665 - RNA, 19 nt, Homo sapiens
  misc_RNA (1)...(19): siRNA sense strand
ggcaaaugacuuaaguuua

SEQ ID NO: 2362666 - RNA, 19 nt, Homo sapiens
  misc_RNA (1)...(19): siRNA sense strand
gauguuucuuaguggauua

SEQ ID NO: 2362667 - RNA, 19 nt, Homo sapiens
  misc_RNA (1)...(19): siRNA sense strand
gcugaaagcaagagauauc

SEQ ID NO: 2362668 - RNA, 19 nt, Homo sapiens
  misc_RNA (1)...(19): siRNA sense strand
gugaaaaguuauuuggaga

SEQ ID NO: 2362669 - RNA, 19 nt, Homo sapiens
  misc_RNA (1)...(19): siRNA sense strand
cuggaagcucauagauaaa

SEQ ID NO: 2362670 - RNA, 19 nt, Homo sapiens
  misc_RNA (1)...(19): siRNA sense strand
agccaaagcuccugaaguu

SEQ ID NO: 2362671 - RNA, 19 nt, Homo sapiens
  misc_RNA (1)...(19): siRNA sense strand
ggucaagucaaaucauaua

SEQ ID NO: 2362672 - RNA, 19 nt, Homo sapiens
  misc_RNA (1)...(19): siRNA sense strand
ggacugugccugaaggaca

SEQ ID NO: 2362673 - RNA, 19 nt, Homo sapiens
  misc_RNA (1)...(19): siRNA sense strand
ccgaagucaaugaaauuaa

SEQ ID NO: 2362674 - RNA, 19 nt, Homo sapiens
  misc_RNA (1)...(19): siRNA sense strand
gugaaguuccugugauaau

SEQ ID NO: 2362675 - RNA, 19 nt, Homo sapiens
  misc_RNA (1)...(19): siRNA sense strand
uggacuagauguugagcuu

SEQ ID NO: 2362676 - RNA, 19 nt, Homo sapiens
  misc_RNA (1)...(19): siRNA sense strand
augaugaauuuguggugaa

SEQ ID NO: 2362677 - RNA, 19 nt, Homo sapiens
  misc_RNA (1)...(19): siRNA sense strand
aggagaacuuugaggucuu

SEQ ID NO: 2362678 - RNA, 19 nt, Homo sapiens
  misc_RNA (1)...(19): siRNA sense strand
agcugaacacugaggaaua

SEQ ID NO: 2362679 - RNA, 19 nt, Homo sapiens
  misc_RNA (1)...(19): siRNA sense strand
uggcaaaugacuuaaguuu

SEQ ID NO: 2362680 - RNA, 19 nt, Homo sapiens
  misc_RNA (1)...(19): siRNA sense strand
caaagaaguuccagcugau

SEQ ID NO: 2362681 - RNA, 19 nt, Homo sapiens
  misc_RNA (1)...(19): siRNA sense strand
uugcugaagcugagaguuu

SEQ ID NO: 2362682 - RNA, 19 nt, Homo sapiens
  misc_RNA (1)...(19): siRNA sense strand
uuuacgaggcuauggaaua

SEQ ID NO: 2362683 - RNA, 19 nt, Homo sapiens
  misc_RNA (1)...(19): siRNA sense strand
agaagaaggacgaauguga

SEQ ID NO: 2362684 - RNA, 19 nt, Homo sapiens
  misc_RNA (1)...(19): siRNA sense strand
agaugaagcccuacgaaga

SEQ ID NO: 2362685 - RNA, 19 nt, Homo sapiens
  misc_RNA (1)...(19): siRNA sense strand
gugaaauucugaagauguu

SEQ ID NO: 2362686 - RNA, 19 nt, Homo sapiens
  misc_RNA (1)...(19): siRNA sense strand
uggagcaacuggugaaaca

SEQ ID NO: 2362687 - RNA, 19 nt, Homo sapiens
  misc_RNA (1)...(19): siRNA sense strand
ggagaaugucuguagcgaa

SEQ ID NO: 2362688 - RNA, 19 nt, Homo sapiens
  misc_RNA (1)...(19): siRNA sense strand
agaaagacaaucugcagaa

SEQ ID NO: 2362689 - RNA, 19 nt, Homo sapiens
  misc_RNA (1)...(19): siRNA sense strand
caucaaaacagcacugaaa

SEQ ID NO: 2362690 - RNA, 19 nt, Homo sapiens
  misc_RNA (1)...(19): siRNA sense strand
ggccaaagcccuugagaug

SEQ ID NO: 2362691 - RNA, 19 nt, Homo sapiens
  misc_RNA (1)...(19): siRNA sense strand
agauuuagcaagugaaguu

SEQ ID NO: 2362692 - RNA, 19 nt, Homo sapiens
  misc_RNA (1)...(19): siRNA sense strand
gaauuaacugauaaggcaa

SEQ ID NO: 2362693 - RNA, 19 nt, Homo sapiens
  misc_RNA (1)...(19): siRNA sense strand
auggaauaagagagguaaa

SEQ ID NO: 2362694 - RNA, 19 nt, Homo sapiens
  misc_RNA (1)...(19): siRNA sense strand
ggcaagaaugcuucagaca

SEQ ID NO: 2362695 - RNA, 19 nt, Homo sapiens
  misc_RNA (1)...(19): siRNA sense strand
ggcaagaaugcuucagaca

SEQ ID NO: 2362696 - RNA, 19 nt, Homo sapiens
  misc_RNA (1)...(19): siRNA sense strand
ggcaagaaugcuucagaca

SEQ ID NO: 2362697 - RNA, 19 nt, Homo sapiens
  misc_RNA (1)...(19): siRNA sense strand
ggcaagaaugcuucagaca

SEQ ID NO: 2362698 - RNA, 19 nt, Homo sapiens
  misc_RNA (1)...(19): siRNA sense strand
aaacaauucuuaugggcaa

SEQ ID NO: 2362699 - RNA, 19 nt, Homo sapiens
  misc_RNA (1)...(19): siRNA sense strand
cggauaaaggagaagucua

SEQ ID NO: 2362700 - RNA, 19 nt, Homo sapiens
  misc_RNA (1)...(19): siRNA sense strand
gugcaguguuaaacggaga

SEQ ID NO: 2362701 - RNA, 19 nt, Homo sapiens
  misc_RNA (1)...(19): siRNA sense strand
uguuaaacggagaaggaca

SEQ ID NO: 2362702 - RNA, 19 nt, Homo sapiens
  misc_RNA (1)...(19): siRNA sense strand
guuaaacggagaaggacau

SEQ ID NO: 2362703 - RNA, 19 nt, Homo sapiens
  misc_RNA (1)...(19): siRNA sense strand
gcuauggaauucuugggaa

SEQ ID NO: 2362704 - RNA, 19 nt, Homo sapiens
  misc_RNA (1)...(19): siRNA sense strand
gagucuucagcaugggaaa

SEQ ID NO: 2362705 - RNA, 19 nt, Homo sapiens
  misc_RNA (1)...(19): siRNA sense strand
gaucauagucuguuccuga

SEQ ID NO: 2362706 - RNA, 19 nt, Homo sapiens
  misc_RNA (1)...(19): siRNA sense strand
agucuguuccugacggaua

SEQ ID NO: 2362707 - RNA, 19 nt, Homo sapiens
  misc_RNA (1)...(19): siRNA sense strand
ucuuaugggcaauguggaa

SEQ ID NO: 2362708 - RNA, 19 nt, Homo sapiens
  misc_RNA (1)...(19): siRNA sense strand
aguguuaaacggagaagga

SEQ ID NO: 2362709 - RNA, 19 nt, Homo sapiens
  misc_RNA (1)...(19): siRNA sense strand
caggagccggaaagauaaa

SEQ ID NO: 2362710 - RNA, 19 nt, Homo sapiens
  misc_RNA (1)...(19): siRNA sense strand
guggaagaaagguggucga

SEQ ID NO: 2362711 - RNA, 19 nt, Homo sapiens
  misc_RNA (1)...(19): siRNA sense strand
aaacaauucuuaugggcaa

SEQ ID NO: 2362712 - RNA, 19 nt, Homo sapiens
  misc_RNA (1)...(19): siRNA sense strand
cggauaaaggagaagucua

SEQ ID NO: 2362713 - RNA, 19 nt, Homo sapiens
  misc_RNA (1)...(19): siRNA sense strand
gugcaguguuaaacggaga

SEQ ID NO: 2362714 - RNA, 19 nt, Homo sapiens
  misc_RNA (1)...(19): siRNA sense strand
uguuaaacggagaaggaca

SEQ ID NO: 2362715 - RNA, 19 nt, Homo sapiens
  misc_RNA (1)...(19): siRNA sense strand
guuaaacggagaaggacau

SEQ ID NO: 2362716 - RNA, 19 nt, Homo sapiens
  misc_RNA (1)...(19): siRNA sense strand
gcuauggaauucuugggaa

SEQ ID NO: 2362717 - RNA, 19 nt, Homo sapiens
  misc_RNA (1)...(19): siRNA sense strand
gagucuucagcaugggaaa

SEQ ID NO: 2362718 - RNA, 19 nt, Homo sapiens
  misc_RNA (1)...(19): siRNA sense strand
gaucauagucuguuccuga

SEQ ID NO: 2362719 - RNA, 19 nt, Homo sapiens
  misc_RNA (1)...(19): siRNA sense strand
agucuguuccugacggaua

SEQ ID NO: 2362720 - RNA, 19 nt, Homo sapiens
  misc_RNA (1)...(19): siRNA sense strand
ucuuaugggcaauguggaa

SEQ ID NO: 2362721 - RNA, 19 nt, Homo sapiens
  misc_RNA (1)...(19): siRNA sense strand
aguguuaaacggagaagga

SEQ ID NO: 2362722 - RNA, 19 nt, Homo sapiens
  misc_RNA (1)...(19): siRNA sense strand
caggagccggaaagauaaa

SEQ ID NO: 2362723 - RNA, 19 nt, Homo sapiens
  misc_RNA (1)...(19): siRNA sense strand
guggaagaaagguggucga

SEQ ID NO: 2362724 - RNA, 19 nt, Homo sapiens
  misc_RNA (1)...(19): siRNA sense strand
ccgaagaccucaaggcgaa

SEQ ID NO: 2362725 - RNA, 19 nt, Homo sapiens
  misc_RNA (1)...(19): siRNA sense strand
agaagaugguggagagcca

SEQ ID NO: 2362726 - RNA, 19 nt, Homo sapiens
  misc_RNA (1)...(19): siRNA sense strand
ggcagaacgugcuggguga

SEQ ID NO: 2362727 - RNA, 19 nt, Homo sapiens
  misc_RNA (1)...(19): siRNA sense strand
uggcagaggaggagcagca

SEQ ID NO: 2362728 - RNA, 19 nt, Homo sapiens
  misc_RNA (1)...(19): siRNA sense strand
acaggaaggagaagggcga

SEQ ID NO: 2362729 - RNA, 19 nt, Homo sapiens
  misc_RNA (1)...(19): siRNA sense strand
acgugaacaggaaggagaa

SEQ ID NO: 2362730 - RNA, 19 nt, Homo sapiens
  misc_RNA (1)...(19): siRNA sense strand
aggaggagcuggaggugcu

SEQ ID NO: 2362731 - RNA, 19 nt, Homo sapiens
  misc_RNA (1)...(19): siRNA sense strand
ccgccaacccugagcugau

SEQ ID NO: 2362732 - RNA, 19 nt, Homo sapiens
  misc_RNA (1)...(19): siRNA sense strand
ccccagaaguugugccuau

SEQ ID NO: 2362733 - RNA, 19 nt, Homo sapiens
  misc_RNA (1)...(19): siRNA sense strand
uggagaagucacuggagca

SEQ ID NO: 2362734 - RNA, 19 nt, Homo sapiens
  misc_RNA (1)...(19): siRNA sense strand
cgggacugguagagacacu

SEQ ID NO: 2362735 - RNA, 19 nt, Homo sapiens
  misc_RNA (1)...(19): siRNA sense strand
ccuuaaaugguguggacaa

SEQ ID NO: 2362736 - RNA, 19 nt, Homo sapiens
  misc_RNA (1)...(19): siRNA sense strand
gaacagaacaaccgggaga

SEQ ID NO: 2362737 - RNA, 19 nt, Homo sapiens
  misc_RNA (1)...(19): siRNA sense strand
cuucagggcucaagggaga

SEQ ID NO: 2362738 - RNA, 19 nt, Homo sapiens
  misc_RNA (1)...(19): siRNA sense strand
gggugaaaugggugccaaa

SEQ ID NO: 2362739 - RNA, 19 nt, Homo sapiens
  misc_RNA (1)...(19): siRNA sense strand
aaauaagggaagugaugaa

SEQ ID NO: 2362740 - RNA, 19 nt, Homo sapiens
  misc_RNA (1)...(19): siRNA sense strand
cuuaaaugguguggacaaa

SEQ ID NO: 2362741 - RNA, 19 nt, Homo sapiens
  misc_RNA (1)...(19): siRNA sense strand
aggaagacauggaaaggau

SEQ ID NO: 2362742 - RNA, 19 nt, Homo sapiens
  misc_RNA (1)...(19): siRNA sense strand
acagggaauuccagggcaa

SEQ ID NO: 2362743 - RNA, 19 nt, Homo sapiens
  misc_RNA (1)...(19): siRNA sense strand
aagcuaugauucaggagaa

SEQ ID NO: 2362744 - RNA, 19 nt, Homo sapiens
  misc_RNA (1)...(19): siRNA sense strand
ugggauuuauggagaauau

SEQ ID NO: 2362745 - RNA, 19 nt, Homo sapiens
  misc_RNA (1)...(19): siRNA sense strand
uggguauccuggagaacaa

SEQ ID NO: 2362746 - RNA, 19 nt, Homo sapiens
  misc_RNA (1)...(19): siRNA sense strand
gggccaaaagggagaaauu

SEQ ID NO: 2362747 - RNA, 19 nt, Homo sapiens
  misc_RNA (1)...(19): siRNA sense strand
cguaauuaauggcucacaa

SEQ ID NO: 2362748 - RNA, 19 nt, Homo sapiens
  misc_RNA (1)...(19): siRNA sense strand
gggucaaaagggagaaaau

SEQ ID NO: 2362749 - RNA, 19 nt, Homo sapiens
  misc_RNA (1)...(19): siRNA sense strand
ucucuuaguaacagaacaa

SEQ ID NO: 2362750 - RNA, 19 nt, Homo sapiens
  misc_RNA (1)...(19): siRNA sense strand
gaguggaagaauuagaaau

SEQ ID NO: 2362751 - RNA, 19 nt, Homo sapiens
  misc_RNA (1)...(19): siRNA sense strand
gggagaaccugguguccga

SEQ ID NO: 2362752 - RNA, 19 nt, Homo sapiens
  misc_RNA (1)...(19): siRNA sense strand
gugucuacucaaagauuua

SEQ ID NO: 2362753 - RNA, 19 nt, Homo sapiens
  misc_RNA (1)...(19): siRNA sense strand
ggauaugaaguaacaucaa

SEQ ID NO: 2362754 - RNA, 19 nt, Homo sapiens
  misc_RNA (1)...(19): siRNA sense strand
cagcguaauuaauggcuca

SEQ ID NO: 2362755 - RNA, 19 nt, Homo sapiens
  misc_RNA (1)...(19): siRNA sense strand
agagggucccagaggauua

SEQ ID NO: 2362756 - RNA, 19 nt, Homo sapiens
  misc_RNA (1)...(19): siRNA sense strand
caaaggagaaccagggcga

SEQ ID NO: 2362757 - RNA, 19 nt, Homo sapiens
  misc_RNA (1)...(19): siRNA sense strand
cccagaaaacuuugaaaua

SEQ ID NO: 2362758 - RNA, 19 nt, Homo sapiens
  misc_RNA (1)...(19): siRNA sense strand
ucagggaauugcagggaca

SEQ ID NO: 2362759 - RNA, 19 nt, Homo sapiens
  misc_RNA (1)...(19): siRNA sense strand
uggaauaagcaaagaaggu

SEQ ID NO: 2362760 - RNA, 19 nt, Homo sapiens
  misc_RNA (1)...(19): siRNA sense strand
uguaauaagagcccagcua

SEQ ID NO: 2362761 - RNA, 19 nt, Homo sapiens
  misc_RNA (1)...(19): siRNA sense strand
cuacuuaggaggaaacaca

SEQ ID NO: 2362762 - RNA, 19 nt, Homo sapiens
  misc_RNA (1)...(19): siRNA sense strand
guauuuguccuccgggaaa

SEQ ID NO: 2362763 - RNA, 19 nt, Homo sapiens
  misc_RNA (1)...(19): siRNA sense strand
aggccuaccaggaagaaau

SEQ ID NO: 2362764 - RNA, 19 nt, Homo sapiens
  misc_RNA (1)...(19): siRNA sense strand
uguaauugccagaagagau

SEQ ID NO: 2362765 - RNA, 19 nt, Homo sapiens
  misc_RNA (1)...(19): siRNA sense strand
cagaaaaggaccaaacuau

SEQ ID NO: 2362766 - RNA, 19 nt, Homo sapiens
  misc_RNA (1)...(19): siRNA sense strand
gggaaaaccaggacuucaa

SEQ ID NO: 2362767 - RNA, 19 nt, Homo sapiens
  misc_RNA (1)...(19): siRNA sense strand
aggacuaccagguuacaaa

SEQ ID NO: 2362768 - RNA, 19 nt, Homo sapiens
  misc_RNA (1)...(19): siRNA sense strand
acaccgggaucuaagggaa

SEQ ID NO: 2362769 - RNA, 19 nt, Homo sapiens
  misc_RNA (1)...(19): siRNA sense strand
ccagagggucccagaggau

SEQ ID NO: 2362770 - RNA, 19 nt, Homo sapiens
  misc_RNA (1)...(19): siRNA sense strand
aaguuggagugguucaaua

SEQ ID NO: 2362771 - RNA, 19 nt, Homo sapiens
  misc_RNA (1)...(19): siRNA sense strand
aaggauggauuaaugggua

SEQ ID NO: 2362772 - RNA, 19 nt, Homo sapiens
  misc_RNA (1)...(19): siRNA sense strand
uauucaaguuggagugguu

SEQ ID NO: 2362773 - RNA, 19 nt, Homo sapiens
  misc_RNA (1)...(19): siRNA sense strand
caaaaggugaaaaggggaa

SEQ ID NO: 2362774 - RNA, 19 nt, Homo sapiens
  misc_RNA (1)...(19): siRNA sense strand
ccgaggugccauuggauca

SEQ ID NO: 2362775 - RNA, 19 nt, Homo sapiens
  misc_RNA (1)...(19): siRNA sense strand
cuccaggacagcaaggaaa

SEQ ID NO: 2362776 - RNA, 19 nt, Homo sapiens
  misc_RNA (1)...(19): siRNA sense strand
acaaaggaaaucaagguga

SEQ ID NO: 2362777 - RNA, 19 nt, Homo sapiens
  misc_RNA (1)...(19): siRNA sense strand
cagaacaauuuauucgaca

SEQ ID NO: 2362778 - RNA, 19 nt, Homo sapiens
  misc_RNA (1)...(19): siRNA sense strand
aggaggaaacacaaagaca

SEQ ID NO: 2362779 - RNA, 19 nt, Homo sapiens
  misc_RNA (1)...(19): siRNA sense strand
ggaaacacaaagacaggga

SEQ ID NO: 2362780 - RNA, 19 nt, Homo sapiens
  misc_RNA (1)...(19): siRNA sense strand
ggaugcagcucaagcagca

SEQ ID NO: 2362781 - RNA, 19 nt, Homo sapiens
  misc_RNA (1)...(19): siRNA sense strand
aggaauacaaggagcucga

SEQ ID NO: 2362782 - RNA, 19 nt, Homo sapiens
  misc_RNA (1)...(19): siRNA sense strand
aguggcagcucgugaugaa

SEQ ID NO: 2362783 - RNA, 19 nt, Homo sapiens
  misc_RNA (1)...(19): siRNA sense strand
gagauggugacaaggguga

SEQ ID NO: 2362784 - RNA, 19 nt, Homo sapiens
  misc_RNA (1)...(19): siRNA sense strand
uggagaaccaggaagacau

SEQ ID NO: 2362785 - RNA, 19 nt, Homo sapiens
  misc_RNA (1)...(19): siRNA sense strand
aagcagcaagagauaguaa

SEQ ID NO: 2362786 - RNA, 19 nt, Homo sapiens
  misc_RNA (1)...(19): siRNA sense strand
agaaacagaagaugccgaa

SEQ ID NO: 2362787 - RNA, 19 nt, Homo sapiens
  misc_RNA (1)...(19): siRNA sense strand
ccaaaggagacaaaggauc

SEQ ID NO: 2362788 - RNA, 19 nt, Homo sapiens
  misc_RNA (1)...(19): siRNA sense strand
cuaugauucaggagaacau

SEQ ID NO: 2362789 - RNA, 19 nt, Homo sapiens
  misc_RNA (1)...(19): siRNA sense strand
gacuaagauagcaguggua

SEQ ID NO: 2362790 - RNA, 19 nt, Homo sapiens
  misc_RNA (1)...(19): siRNA sense strand
augugagauuccuggauuu

SEQ ID NO: 2362791 - RNA, 19 nt, Homo sapiens
  misc_RNA (1)...(19): siRNA sense strand
uaagggaagcaaaggugaa

SEQ ID NO: 2362792 - RNA, 19 nt, Homo sapiens
  misc_RNA (1)...(19): siRNA sense strand
ugaaaggggauuugauauu

SEQ ID NO: 2362793 - RNA, 19 nt, Homo sapiens
  misc_RNA (1)...(19): siRNA sense strand
gucaagaaaauuugggauu

SEQ ID NO: 2362794 - RNA, 19 nt, Homo sapiens
  misc_RNA (1)...(19): siRNA sense strand
agaagaagaaagugagcau

SEQ ID NO: 2362795 - RNA, 19 nt, Homo sapiens
  misc_RNA (1)...(19): siRNA sense strand
gguaugaguuuaaagccaa

SEQ ID NO: 2362796 - RNA, 19 nt, Homo sapiens
  misc_RNA (1)...(19): siRNA sense strand
cgguaugaguuuaaagcca

SEQ ID NO: 2362797 - RNA, 19 nt, Homo sapiens
  misc_RNA (1)...(19): siRNA sense strand
aguuuaaagccaagaacau

SEQ ID NO: 2362798 - RNA, 19 nt, Homo sapiens
  misc_RNA (1)...(19): siRNA sense strand
gcaucugcuuugaggccaa

SEQ ID NO: 2362799 - RNA, 19 nt, Homo sapiens
  misc_RNA (1)...(19): siRNA sense strand
gaagauggagagagcgaga

SEQ ID NO: 2362800 - RNA, 19 nt, Homo sapiens
  misc_RNA (1)...(19): siRNA sense strand
auggagagagcgagaggaa

SEQ ID NO: 2362801 - RNA, 19 nt, Homo sapiens
  misc_RNA (1)...(19): siRNA sense strand
aggaagauggagagagcga

SEQ ID NO: 2362802 - RNA, 19 nt, Homo sapiens
  misc_RNA (1)...(19): siRNA sense strand
uggucaagcaggugcaaga

SEQ ID NO: 2362803 - RNA, 19 nt, Homo sapiens
  misc_RNA (1)...(19): siRNA sense strand
agaacaucaagaagaagaa

SEQ ID NO: 2362804 - RNA, 19 nt, Homo sapiens
  misc_RNA (1)...(19): siRNA sense strand
ccaggaagauggagagagc

SEQ ID NO: 2362805 - RNA, 19 nt, Homo sapiens
  misc_RNA (1)...(19): siRNA sense strand
ccaacacggacgagagcga

SEQ ID NO: 2362806 - RNA, 19 nt, Homo sapiens
  misc_RNA (1)...(19): siRNA sense strand
augcagauggccaggaaga

SEQ ID NO: 2362807 - RNA, 19 nt, Homo sapiens
  misc_RNA (1)...(19): siRNA sense strand
acaucaagaagaagaaagu

SEQ ID NO: 2362808 - RNA, 19 nt, Homo sapiens
  misc_RNA (1)...(19): siRNA sense strand
aggccugggcacagagaca

SEQ ID NO: 2362809 - RNA, 19 nt, Homo sapiens
  misc_RNA (1)...(19): siRNA sense strand
ucuagaugcuguagggaag

SEQ ID NO: 2362810 - RNA, 19 nt, Homo sapiens
  misc_RNA (1)...(19): siRNA sense strand
aucaagaagaagaaaguga

SEQ ID NO: 2362811 - RNA, 19 nt, Homo sapiens
  misc_RNA (1)...(19): siRNA sense strand
gggaaugauguccuggaau

SEQ ID NO: 2362812 - RNA, 19 nt, Homo sapiens
  misc_RNA (1)...(19): siRNA sense strand
aauccaagaagaagagcca

SEQ ID NO: 2362813 - RNA, 19 nt, Homo sapiens
  misc_RNA (1)...(19): siRNA sense strand
agagccaagcuaugagaau

SEQ ID NO: 2362814 - RNA, 19 nt, Homo sapiens
  misc_RNA (1)...(19): siRNA sense strand
cgccagaagaugagugaaa

SEQ ID NO: 2362815 - RNA, 19 nt, Homo sapiens
  misc_RNA (1)...(19): siRNA sense strand
caucaugaccagaggaaau

SEQ ID NO: 2362816 - RNA, 19 nt, Homo sapiens
  misc_RNA (1)...(19): siRNA sense strand
agaugaggacgaugagaaa

SEQ ID NO: 2362817 - RNA, 19 nt, Homo sapiens
  misc_RNA (1)...(19): siRNA sense strand
cagcacuucccuagagaaa

SEQ ID NO: 2362818 - RNA, 19 nt, Homo sapiens
  misc_RNA (1)...(19): siRNA sense strand
cuugauuaccugaggagaa

SEQ ID NO: 2362819 - RNA, 19 nt, Homo sapiens
  misc_RNA (1)...(19): siRNA sense strand
gggaauaugacgaagagga

SEQ ID NO: 2362820 - RNA, 19 nt, Homo sapiens
  misc_RNA (1)...(19): siRNA sense strand
gcucgggaacucugggaua

SEQ ID NO: 2362821 - RNA, 19 nt, Homo sapiens
  misc_RNA (1)...(19): siRNA sense strand
gaggaaggcgugagcgaga

SEQ ID NO: 2362822 - RNA, 19 nt, Homo sapiens
  misc_RNA (1)...(19): siRNA sense strand
ggaaagagcucauggugac

SEQ ID NO: 2362823 - RNA, 19 nt, Homo sapiens
  misc_RNA (1)...(19): siRNA sense strand
cagaugaggacgaugagaa

SEQ ID NO: 2362824 - RNA, 19 nt, Homo sapiens
  misc_RNA (1)...(19): siRNA sense strand
gggaguacgagugggaaua

SEQ ID NO: 2362825 - RNA, 19 nt, Homo sapiens
  misc_RNA (1)...(19): siRNA sense strand
cuaucaacgucuaugacua

SEQ ID NO: 2362826 - RNA, 19 nt, Homo sapiens
  misc_RNA (1)...(19): siRNA sense strand
uggcagaauaucaagcaua

SEQ ID NO: 2362827 - RNA, 19 nt, Homo sapiens
  misc_RNA (1)...(19): siRNA sense strand
guuaaggcggcuaggacaa

SEQ ID NO: 2362828 - RNA, 19 nt, Homo sapiens
  misc_RNA (1)...(19): siRNA sense strand
ugaugaagauggacggcau

SEQ ID NO: 2362829 - RNA, 19 nt, Homo sapiens
  misc_RNA (1)...(19): siRNA sense strand
gucaaugagcagagaauga

SEQ ID NO: 2362830 - RNA, 19 nt, Homo sapiens
  misc_RNA (1)...(19): siRNA sense strand
augacgaagaggaggagaa

SEQ ID NO: 2362831 - RNA, 19 nt, Homo sapiens
  misc_RNA (1)...(19): siRNA sense strand
gugucaaugagcagagaau

SEQ ID NO: 2362832 - RNA, 19 nt, Homo sapiens
  misc_RNA (1)...(19): siRNA sense strand
gaguauuacaaccuggaaa

SEQ ID NO: 2362833 - RNA, 19 nt, Homo sapiens
  misc_RNA (1)...(19): siRNA sense strand
cugagaagaaagcguuaaa

SEQ ID NO: 2362834 - RNA, 19 nt, Homo sapiens
  misc_RNA (1)...(19): siRNA sense strand
uggugggauuggucagaaa

SEQ ID NO: 2362835 - RNA, 19 nt, Homo sapiens
  misc_RNA (1)...(19): siRNA sense strand
uaacauuuggcuagaguau

SEQ ID NO: 2362836 - RNA, 19 nt, Homo sapiens
  misc_RNA (1)...(19): siRNA sense strand
gggauauagcuguucagaa

SEQ ID NO: 2362837 - RNA, 19 nt, Homo sapiens
  misc_RNA (1)...(19): siRNA sense strand
ugaaagugcgauuguggaa

SEQ ID NO: 2362838 - RNA, 19 nt, Homo sapiens
  misc_RNA (1)...(19): siRNA sense strand
caaugagaguggugaucca

SEQ ID NO: 2362839 - RNA, 19 nt, Homo sapiens
  misc_RNA (1)...(19): siRNA sense strand
acugcuacguggaguuuaa

SEQ ID NO: 2362840 - RNA, 19 nt, Homo sapiens
  misc_RNA (1)...(19): siRNA sense strand
gguuaaggcggcuaggaca

SEQ ID NO: 2362841 - RNA, 19 nt, Homo sapiens
  misc_RNA (1)...(19): siRNA sense strand
ucaaaguggcaaucagcaa

SEQ ID NO: 2362842 - RNA, 19 nt, Homo sapiens
  misc_RNA (1)...(19): siRNA sense strand
uggaaagagcucaugguga

SEQ ID NO: 2362843 - RNA, 19 nt, Homo sapiens
  misc_RNA (1)...(19): siRNA sense strand
cgucgcaggcugugaugaa

SEQ ID NO: 2362844 - RNA, 19 nt, Homo sapiens
  misc_RNA (1)...(19): siRNA sense strand
ugacgaagaggaggagaaa

SEQ ID NO: 2362845 - RNA, 19 nt, Homo sapiens
  misc_RNA (1)...(19): siRNA sense strand
ugaagcaggagguggaaga

SEQ ID NO: 2362846 - RNA, 19 nt, Homo sapiens
  misc_RNA (1)...(19): siRNA sense strand
augaggacgaugagaaaga

SEQ ID NO: 2362847 - RNA, 19 nt, Homo sapiens
  misc_RNA (1)...(19): siRNA sense strand
gcaccaaggcuggcagaau

SEQ ID NO: 2362848 - RNA, 19 nt, Homo sapiens
  misc_RNA (1)...(19): siRNA sense strand
acguggaguuuaaagaaga

SEQ ID NO: 2362849 - RNA, 19 nt, Homo sapiens
  misc_RNA (1)...(19): siRNA sense strand
gaagaaaucuguaaggcuc

SEQ ID NO: 2362850 - RNA, 19 nt, Homo sapiens
  misc_RNA (1)...(19): siRNA sense strand
ugggaaaugugcugccgua

SEQ ID NO: 2362851 - RNA, 19 nt, Homo sapiens
  misc_RNA (1)...(19): siRNA sense strand
aggaggaaggcgugagcga

SEQ ID NO: 2362852 - RNA, 19 nt, Homo sapiens
  misc_RNA (1)...(19): siRNA sense strand
aggagguggaagagcguuu

SEQ ID NO: 2362853 - RNA, 19 nt, Homo sapiens
  misc_RNA (1)...(19): siRNA sense strand
ccuguguggauaagagcaa

SEQ ID NO: 2362854 - RNA, 19 nt, Homo sapiens
  misc_RNA (1)...(19): siRNA sense strand
uugagaaagccgugaagga

SEQ ID NO: 2362855 - RNA, 19 nt, Homo sapiens
  misc_RNA (1)...(19): siRNA sense strand
ggggaguacgagugggaau

SEQ ID NO: 2362856 - RNA, 19 nt, Homo sapiens
  misc_RNA (1)...(19): siRNA sense strand
aggauggccuggacagaga

SEQ ID NO: 2362857 - RNA, 19 nt, Homo sapiens
  misc_RNA (1)...(19): siRNA sense strand
cccugcagcuggagaaaca

SEQ ID NO: 2362858 - RNA, 19 nt, Homo sapiens
  misc_RNA (1)...(19): siRNA sense strand
cugacggagaggaggauga

SEQ ID NO: 2362859 - RNA, 19 nt, Homo sapiens
  misc_RNA (1)...(19): siRNA sense strand
agaagaaaaggcugaacaa

SEQ ID NO: 2362860 - RNA, 19 nt, Homo sapiens
  misc_RNA (1)...(19): siRNA sense strand
uugagagacuggaggagca

SEQ ID NO: 2362861 - RNA, 19 nt, Homo sapiens
  misc_RNA (1)...(19): siRNA sense strand
ccuagaucgacaacugaaa

SEQ ID NO: 2362862 - RNA, 19 nt, Homo sapiens
  misc_RNA (1)...(19): siRNA sense strand
gagacauggaguugaucau

SEQ ID NO: 2362863 - RNA, 19 nt, Homo sapiens
  misc_RNA (1)...(19): siRNA sense strand
cuuuagaagauugggauau

SEQ ID NO: 2362864 - RNA, 19 nt, Homo sapiens
  misc_RNA (1)...(19): siRNA sense strand
agagaagcgcggagcagau

SEQ ID NO: 2362865 - RNA, 19 nt, Homo sapiens
  misc_RNA (1)...(19): siRNA sense strand
ggaaaugccaaguacgcca

SEQ ID NO: 2362866 - RNA, 19 nt, Homo sapiens
  misc_RNA (1)...(19): siRNA sense strand
cugccuugucccagacuua

SEQ ID NO: 2362867 - RNA, 19 nt, Homo sapiens
  misc_RNA (1)...(19): siRNA sense strand
ugacuaucaaagagaacau

SEQ ID NO: 2362868 - RNA, 19 nt, Homo sapiens
  misc_RNA (1)...(19): siRNA sense strand
ccagaagaugagugaaauc

SEQ ID NO: 2362869 - RNA, 19 nt, Homo sapiens
  misc_RNA (1)...(19): siRNA sense strand
cauccaggccacugauuau

SEQ ID NO: 2362870 - RNA, 19 nt, Homo sapiens
  misc_RNA (1)...(19): siRNA sense strand
ccuuagugccagagaaaga

SEQ ID NO: 2362871 - RNA, 19 nt, Homo sapiens
  misc_RNA (1)...(19): siRNA sense strand
gggcggugaacgagagaau

SEQ ID NO: 2362872 - RNA, 19 nt, Homo sapiens
  misc_RNA (1)...(19): siRNA sense strand
augcauaacaucagggaca

SEQ ID NO: 2362873 - RNA, 19 nt, Homo sapiens
  misc_RNA (1)...(19): siRNA sense strand
ggaaauacauguaccccaa

SEQ ID NO: 2362874 - RNA, 19 nt, Homo sapiens
  misc_RNA (1)...(19): siRNA sense strand
cuccuuagugccagagaaa

SEQ ID NO: 2362875 - RNA, 19 nt, Homo sapiens
  misc_RNA (1)...(19): siRNA sense strand
ucaucauguuccugggaga

SEQ ID NO: 2362876 - RNA, 19 nt, Homo sapiens
  misc_RNA (1)...(19): siRNA sense strand
cugggaaaucugugggcau

SEQ ID NO: 2362877 - RNA, 19 nt, Homo sapiens
  misc_RNA (1)...(19): siRNA sense strand
auguggaguaugagaguga

SEQ ID NO: 2362878 - RNA, 19 nt, Homo sapiens
  misc_RNA (1)...(19): siRNA sense strand
ccauccagauccugcggaa

SEQ ID NO: 2362879 - RNA, 19 nt, Homo sapiens
  misc_RNA (1)...(19): siRNA sense strand
gugaccaccacgagaguga

SEQ ID NO: 2362880 - RNA, 19 nt, Homo sapiens
  misc_RNA (1)...(19): siRNA sense strand
gggacauugacgugaucau

SEQ ID NO: 2362881 - RNA, 19 nt, Homo sapiens
  misc_RNA (1)...(19): siRNA sense strand
uggacuaccuauugggucu

SEQ ID NO: 2362882 - RNA, 19 nt, Homo sapiens
  misc_RNA (1)...(19): siRNA sense strand
gcacggaacuccugacccu

SEQ ID NO: 2362883 - RNA, 19 nt, Homo sapiens
  misc_RNA (1)...(19): siRNA sense strand
ggaagaaccccaaaggcuu

SEQ ID NO: 2362884 - RNA, 19 nt, Homo sapiens
  misc_RNA (1)...(19): siRNA sense strand
gcguccacgagcagaacua

SEQ ID NO: 2362885 - RNA, 19 nt, Homo sapiens
  misc_RNA (1)...(19): siRNA sense strand
agugccagagaaagagaaa

SEQ ID NO: 2362886 - RNA, 19 nt, Homo sapiens
  misc_RNA (1)...(19): siRNA sense strand
cuggcgagaccaagcgcaa

SEQ ID NO: 2362887 - RNA, 19 nt, Homo sapiens
  misc_RNA (1)...(19): siRNA sense strand
gcuguaaggacaucgccua

SEQ ID NO: 2362888 - RNA, 19 nt, Homo sapiens
  misc_RNA (1)...(19): siRNA sense strand
uggacuaugcucacaacaa

SEQ ID NO: 2362889 - RNA, 19 nt, Homo sapiens
  misc_RNA (1)...(19): siRNA sense strand
gcgccauagccgaguguga

SEQ ID NO: 2362890 - RNA, 19 nt, Homo sapiens
  misc_RNA (1)...(19): siRNA sense strand
ucgaugagcugcaccgcaa

SEQ ID NO: 2362891 - RNA, 19 nt, Homo sapiens
  misc_RNA (1)...(19): siRNA sense strand
gauugauuucccagcuaua

SEQ ID NO: 2362892 - RNA, 19 nt, Homo sapiens
  misc_RNA (1)...(19): siRNA sense strand
ugguguuagugcagaaagu

SEQ ID NO: 2362893 - RNA, 19 nt, Homo sapiens
  misc_RNA (1)...(19): siRNA sense strand
cgucgugugguuuggagaa

SEQ ID NO: 2362894 - RNA, 19 nt, Homo sapiens
  misc_RNA (1)...(19): siRNA sense strand
gcgccauagccgaguguga

SEQ ID NO: 2362895 - RNA, 19 nt, Homo sapiens
  misc_RNA (1)...(19): siRNA sense strand
ucgaugagcugcaccgcaa

SEQ ID NO: 2362896 - RNA, 19 nt, Homo sapiens
  misc_RNA (1)...(19): siRNA sense strand
gauugauuucccagcuaua

SEQ ID NO: 2362897 - RNA, 19 nt, Homo sapiens
  misc_RNA (1)...(19): siRNA sense strand
ugguguuagugcagaaagu

SEQ ID NO: 2362898 - RNA, 19 nt, Homo sapiens
  misc_RNA (1)...(19): siRNA sense strand
cgucgugugguuuggagaa

SEQ ID NO: 2362899 - RNA, 19 nt, Homo sapiens
  misc_RNA (1)...(19): siRNA sense strand
ggaaagagauggaaggaga

SEQ ID NO: 2362900 - RNA, 19 nt, Homo sapiens
  misc_RNA (1)...(19): siRNA sense strand
ucaaaauggagcaggaaaa

SEQ ID NO: 2362901 - RNA, 19 nt, Homo sapiens
  misc_RNA (1)...(19): siRNA sense strand
acgaauuugugcaggagaa

SEQ ID NO: 2362902 - RNA, 19 nt, Homo sapiens
  misc_RNA (1)...(19): siRNA sense strand
uggaaauaugcuacagaua

SEQ ID NO: 2362903 - RNA, 19 nt, Homo sapiens
  misc_RNA (1)...(19): siRNA sense strand
uuguggaggaguugagaaa

SEQ ID NO: 2362904 - RNA, 19 nt, Homo sapiens
  misc_RNA (1)...(19): siRNA sense strand
aggaaaaggacaaccaaaa

SEQ ID NO: 2362905 - RNA, 19 nt, Homo sapiens
  misc_RNA (1)...(19): siRNA sense strand
ccugaaaucuguugaugau

SEQ ID NO: 2362906 - RNA, 19 nt, Homo sapiens
  misc_RNA (1)...(19): siRNA sense strand
cuacaugaugacaaagaau

SEQ ID NO: 2362907 - RNA, 19 nt, Homo sapiens
  misc_RNA (1)...(19): siRNA sense strand
uuacagaacuuuaaccuga

SEQ ID NO: 2362908 - RNA, 19 nt, Homo sapiens
  misc_RNA (1)...(19): siRNA sense strand
gagaaggacuugcccgcau

SEQ ID NO: 2362909 - RNA, 19 nt, Homo sapiens
  misc_RNA (1)...(19): siRNA sense strand
ccacaauuuuacagaacuu

SEQ ID NO: 2362910 - RNA, 19 nt, Homo sapiens
  misc_RNA (1)...(19): siRNA sense strand
gcuggaacagagacaacaa

SEQ ID NO: 2362911 - RNA, 19 nt, Homo sapiens
  misc_RNA (1)...(19): siRNA sense strand
ugauaauggagaggaguuu

SEQ ID NO: 2362912 - RNA, 19 nt, Homo sapiens
  misc_RNA (1)...(19): siRNA sense strand
cuaaaguccaggaagagau

SEQ ID NO: 2362913 - RNA, 19 nt, Homo sapiens
  misc_RNA (1)...(19): siRNA sense strand
cagauagauguuaaggaca

SEQ ID NO: 2362914 - RNA, 19 nt, Homo sapiens
  misc_RNA (1)...(19): siRNA sense strand
uguuaaggacaucugcaaa

SEQ ID NO: 2362915 - RNA, 19 nt, Homo sapiens
  misc_RNA (1)...(19): siRNA sense strand
ccaggaagagauugaucau

SEQ ID NO: 2362916 - RNA, 19 nt, Homo sapiens
  misc_RNA (1)...(19): siRNA sense strand
cccagaggucacagcuaaa

SEQ ID NO: 2362917 - RNA, 19 nt, Homo sapiens
  misc_RNA (1)...(19): siRNA sense strand
gauugauaauggagaggag

SEQ ID NO: 2362918 - RNA, 19 nt, Homo sapiens
  misc_RNA (1)...(19): siRNA sense strand
ggaaagagauggaaggaga

SEQ ID NO: 2362919 - RNA, 19 nt, Homo sapiens
  misc_RNA (1)...(19): siRNA sense strand
ucaaaauggagcaggaaaa

SEQ ID NO: 2362920 - RNA, 19 nt, Homo sapiens
  misc_RNA (1)...(19): siRNA sense strand
uggaaauaugcuacagaua

SEQ ID NO: 2362921 - RNA, 19 nt, Homo sapiens
  misc_RNA (1)...(19): siRNA sense strand
uuguggaggaguugagaaa

SEQ ID NO: 2362922 - RNA, 19 nt, Homo sapiens
  misc_RNA (1)...(19): siRNA sense strand
aggaaaaggacaaccaaaa

SEQ ID NO: 2362923 - RNA, 19 nt, Homo sapiens
  misc_RNA (1)...(19): siRNA sense strand
gcuggaacagagacaacaa

SEQ ID NO: 2362924 - RNA, 19 nt, Homo sapiens
  misc_RNA (1)...(19): siRNA sense strand
ugauaauggagaggaguuu

SEQ ID NO: 2362925 - RNA, 19 nt, Homo sapiens
  misc_RNA (1)...(19): siRNA sense strand
cuaaaguccaggaagagau

SEQ ID NO: 2362926 - RNA, 19 nt, Homo sapiens
  misc_RNA (1)...(19): siRNA sense strand
cagauagauguuaaggaca

SEQ ID NO: 2362927 - RNA, 19 nt, Homo sapiens
  misc_RNA (1)...(19): siRNA sense strand
uguuaaggacaucugcaaa

SEQ ID NO: 2362928 - RNA, 19 nt, Homo sapiens
  misc_RNA (1)...(19): siRNA sense strand
ccaggaagagauugaucau

SEQ ID NO: 2362929 - RNA, 19 nt, Homo sapiens
  misc_RNA (1)...(19): siRNA sense strand
cccagaggucacagcuaaa

SEQ ID NO: 2362930 - RNA, 19 nt, Homo sapiens
  misc_RNA (1)...(19): siRNA sense strand
gauugauaauggagaggag

SEQ ID NO: 2362931 - RNA, 19 nt, Homo sapiens
  misc_RNA (1)...(19): siRNA sense strand
aggcaagauuacaggggaa

SEQ ID NO: 2362932 - RNA, 19 nt, Homo sapiens
  misc_RNA (1)...(19): siRNA sense strand
cugagaaggcucuagggaa

SEQ ID NO: 2362933 - RNA, 19 nt, Homo sapiens
  misc_RNA (1)...(19): siRNA sense strand
gcguauagcagccagguga

SEQ ID NO: 2362934 - RNA, 19 nt, Homo sapiens
  misc_RNA (1)...(19): siRNA sense strand
cuguugaggacgugcagaa

SEQ ID NO: 2362935 - RNA, 19 nt, Homo sapiens
  misc_RNA (1)...(19): siRNA sense strand
gggacugccaggagguaca

SEQ ID NO: 2362936 - RNA, 19 nt, Homo sapiens
  misc_RNA (1)...(19): siRNA sense strand
aggauagggcacagguaca

SEQ ID NO: 2362937 - RNA, 19 nt, Homo sapiens
  misc_RNA (1)...(19): siRNA sense strand
cguacaaagcgaccgagaa

SEQ ID NO: 2362938 - RNA, 19 nt, Homo sapiens
  misc_RNA (1)...(19): siRNA sense strand
augcacaaaggaagaaauu

SEQ ID NO: 2362939 - RNA, 19 nt, Homo sapiens
  misc_RNA (1)...(19): siRNA sense strand
auggaagagugacggguga

SEQ ID NO: 2362940 - RNA, 19 nt, Homo sapiens
  misc_RNA (1)...(19): siRNA sense strand
ugaacuuggaucagaagau

SEQ ID NO: 2362941 - RNA, 19 nt, Homo sapiens
  misc_RNA (1)...(19): siRNA sense strand
cgggugaagcagauguuga

SEQ ID NO: 2362942 - RNA, 19 nt, Homo sapiens
  misc_RNA (1)...(19): siRNA sense strand
ggaaagaaauggaaggaga

SEQ ID NO: 2362943 - RNA, 19 nt, Homo sapiens
  misc_RNA (1)...(19): siRNA sense strand
uaacagaggauuuggaauu

SEQ ID NO: 2362944 - RNA, 19 nt, Homo sapiens
  misc_RNA (1)...(19): siRNA sense strand
ugaaaauggagaaggaaaa

SEQ ID NO: 2362945 - RNA, 19 nt, Homo sapiens
  misc_RNA (1)...(19): siRNA sense strand
aaucaauggacaugaacaa

SEQ ID NO: 2362946 - RNA, 19 nt, Homo sapiens
  misc_RNA (1)...(19): siRNA sense strand
uuguggaggaguugagaaa

SEQ ID NO: 2362947 - RNA, 19 nt, Homo sapiens
  misc_RNA (1)...(19): siRNA sense strand
caaccaaccaucugaauuu

SEQ ID NO: 2362948 - RNA, 19 nt, Homo sapiens
  misc_RNA (1)...(19): siRNA sense strand
aggaagagauugaacgugu

SEQ ID NO: 2362949 - RNA, 19 nt, Homo sapiens
  misc_RNA (1)...(19): siRNA sense strand
augaaaauggagaaggaaa

SEQ ID NO: 2362950 - RNA, 19 nt, Homo sapiens
  misc_RNA (1)...(19): siRNA sense strand
acagagacgacaagcacaa

SEQ ID NO: 2362951 - RNA, 19 nt, Homo sapiens
  misc_RNA (1)...(19): siRNA sense strand
agauagguauuaaggacau

SEQ ID NO: 2362952 - RNA, 19 nt, Homo sapiens
  misc_RNA (1)...(19): siRNA sense strand
agagauugaacgugugauu

SEQ ID NO: 2362953 - RNA, 19 nt, Homo sapiens
  misc_RNA (1)...(19): siRNA sense strand
ugaaagagcuaacagagga

SEQ ID NO: 2362954 - RNA, 19 nt, Homo sapiens
  misc_RNA (1)...(19): siRNA sense strand
uuacagaacuuuaaccuga

SEQ ID NO: 2362955 - RNA, 19 nt, Homo sapiens
  misc_RNA (1)...(19): siRNA sense strand
cuauugaaagcuuggaaaa

SEQ ID NO: 2362956 - RNA, 19 nt, Homo sapiens
  misc_RNA (1)...(19): siRNA sense strand
cagauagguauuaaggaca

SEQ ID NO: 2362957 - RNA, 19 nt, Homo sapiens
  misc_RNA (1)...(19): siRNA sense strand
auuaaggacaucagcaaau

SEQ ID NO: 2362958 - RNA, 19 nt, Homo sapiens
  misc_RNA (1)...(19): siRNA sense strand
caccaagaaucaauggaca

SEQ ID NO: 2362959 - RNA, 19 nt, Homo sapiens
  misc_RNA (1)...(19): siRNA sense strand
ugaugaaaauggagaagga

SEQ ID NO: 2362960 - RNA, 19 nt, Homo sapiens
  misc_RNA (1)...(19): siRNA sense strand
augcaagacaggagccaca

SEQ ID NO: 2362961 - RNA, 19 nt, Homo sapiens
  misc_RNA (1)...(19): siRNA sense strand
gaaacuaucucauucccaa

SEQ ID NO: 2362962 - RNA, 19 nt, Homo sapiens
  misc_RNA (1)...(19): siRNA sense strand
uggagaaggaaaagcacaa

SEQ ID NO: 2362963 - RNA, 19 nt, Homo sapiens
  misc_RNA (1)...(19): siRNA sense strand
cuucugugcuacaugacaa

SEQ ID NO: 2362964 - RNA, 19 nt, Homo sapiens
  misc_RNA (1)...(19): siRNA sense strand
ccacuggcugaaagagcua

SEQ ID NO: 2362965 - RNA, 19 nt, Homo sapiens
  misc_RNA (1)...(19): siRNA sense strand
cuaaaguccaggaagagau

SEQ ID NO: 2362966 - RNA, 19 nt, Homo sapiens
  misc_RNA (1)...(19): siRNA sense strand
acuauugaaagcuuggaaa

SEQ ID NO: 2362967 - RNA, 19 nt, Homo sapiens
  misc_RNA (1)...(19): siRNA sense strand
uauuaaggacaucagcaaa

SEQ ID NO: 2362968 - RNA, 19 nt, Homo sapiens
  misc_RNA (1)...(19): siRNA sense strand
accaagaaucaauggacau

SEQ ID NO: 2362969 - RNA, 19 nt, Homo sapiens
  misc_RNA (1)...(19): siRNA sense strand
gggacagagacgacaagca

SEQ ID NO: 2362970 - RNA, 19 nt, Homo sapiens
  misc_RNA (1)...(19): siRNA sense strand
cccagaggucacagcuaaa

SEQ ID NO: 2362971 - RNA, 19 nt, Homo sapiens
  misc_RNA (1)...(19): siRNA sense strand
cuaacagaggauuuggaau

SEQ ID NO: 2362972 - RNA, 19 nt, Homo sapiens
  misc_RNA (1)...(19): siRNA sense strand
augucaaguuugugaucaa

SEQ ID NO: 2362973 - RNA, 19 nt, Homo sapiens
  misc_RNA (1)...(19): siRNA sense strand
gccaauacaccuaugguca

SEQ ID NO: 2362974 - RNA, 19 nt, Homo sapiens
  misc_RNA (1)...(19): siRNA sense strand
gcucagaggauuaugugca

SEQ ID NO: 2362975 - RNA, 19 nt, Homo sapiens
  misc_RNA (1)...(19): siRNA sense strand
ugaugcagcuuguggacca

SEQ ID NO: 2362976 - RNA, 19 nt, Homo sapiens
  misc_RNA (1)...(19): siRNA sense strand
caaggaugguggccggaga

SEQ ID NO: 2362977 - RNA, 19 nt, Homo sapiens
  misc_RNA (1)...(19): siRNA sense strand
uggcaguggcuauggaagu

SEQ ID NO: 2362978 - RNA, 19 nt, Homo sapiens
  misc_RNA (1)...(19): siRNA sense strand
ugcuaauggcaguggcuau

SEQ ID NO: 2362979 - RNA, 19 nt, Homo sapiens
  misc_RNA (1)...(19): siRNA sense strand
agaaguucacagagcucua

SEQ ID NO: 2362980 - RNA, 19 nt, Homo sapiens
  misc_RNA (1)...(19): siRNA sense strand
gccaauacaccuaugguca

SEQ ID NO: 2362981 - RNA, 19 nt, Homo sapiens
  misc_RNA (1)...(19): siRNA sense strand
caaggaugguggccggaga

SEQ ID NO: 2362982 - RNA, 19 nt, Homo sapiens
  misc_RNA (1)...(19): siRNA sense strand
uggcaguggcuauggaagu

SEQ ID NO: 2362983 - RNA, 19 nt, Homo sapiens
  misc_RNA (1)...(19): siRNA sense strand
ugcuaauggcaguggcuau

SEQ ID NO: 2362984 - RNA, 19 nt, Homo sapiens
  misc_RNA (1)...(19): siRNA sense strand
agaaguucacagagcucua

SEQ ID NO: 2362985 - RNA, 19 nt, Homo sapiens
  misc_RNA (1)...(19): siRNA sense strand
cucaagaagcagugggaaa

SEQ ID NO: 2362986 - RNA, 19 nt, Homo sapiens
  misc_RNA (1)...(19): siRNA sense strand
ccuaaaugggagagggcau

SEQ ID NO: 2362987 - RNA, 19 nt, Homo sapiens
  misc_RNA (1)...(19): siRNA sense strand
gguuugaagaggaauuaaa

SEQ ID NO: 2362988 - RNA, 19 nt, Homo sapiens
  misc_RNA (1)...(19): siRNA sense strand
aggagguggugguggauuu

SEQ ID NO: 2362989 - RNA, 19 nt, Homo sapiens
  misc_RNA (1)...(19): siRNA sense strand
uguauuaaccaauggagaa

SEQ ID NO: 2362990 - RNA, 19 nt, Homo sapiens
  misc_RNA (1)...(19): siRNA sense strand
cagaaaauaauguggagaa

SEQ ID NO: 2362991 - RNA, 19 nt, Homo sapiens
  misc_RNA (1)...(19): siRNA sense strand
ugauaaagcgaaugcaaca

SEQ ID NO: 2362992 - RNA, 19 nt, Homo sapiens
  misc_RNA (1)...(19): siRNA sense strand
cuuguaugucugugaaaua

SEQ ID NO: 2362993 - RNA, 19 nt, Homo sapiens
  misc_RNA (1)...(19): siRNA sense strand
augaugaagaugagaguga

SEQ ID NO: 2362994 - RNA, 19 nt, Homo sapiens
  misc_RNA (1)...(19): siRNA sense strand
ccggaugacccuaaggaau

SEQ ID NO: 2362995 - RNA, 19 nt, Homo sapiens
  misc_RNA (1)...(19): siRNA sense strand
ugaugaugauaaagcgaau

SEQ ID NO: 2362996 - RNA, 19 nt, Homo sapiens
  misc_RNA (1)...(19): siRNA sense strand
uagaacagccagaggccua

SEQ ID NO: 2362997 - RNA, 19 nt, Homo sapiens
  misc_RNA (1)...(19): siRNA sense strand
cuuaagaagaaccgaaaga

SEQ ID NO: 2362998 - RNA, 19 nt, Homo sapiens
  misc_RNA (1)...(19): siRNA sense strand
agaagaaagugccgagacu

SEQ ID NO: 2362999 - RNA, 19 nt, Homo sapiens
  misc_RNA (1)...(19): siRNA sense strand
gccgagacuacuaaagaaa

SEQ ID NO: 2363000 - RNA, 19 nt, Homo sapiens
  misc_RNA (1)...(19): siRNA sense strand
gcagaauaccccaggauuu

SEQ ID NO: 2363001 - RNA, 19 nt, Homo sapiens
  misc_RNA (1)...(19): siRNA sense strand
gguuauugaugaagcugau

SEQ ID NO: 2363002 - RNA, 19 nt, Homo sapiens
  misc_RNA (1)...(19): siRNA sense strand
ucaaauugcggcagcggaa

SEQ ID NO: 2363003 - RNA, 19 nt, Homo sapiens
  misc_RNA (1)...(19): siRNA sense strand
ugaagaggaauuaaagcaa

SEQ ID NO: 2363004 - RNA, 19 nt, Homo sapiens
  misc_RNA (1)...(19): siRNA sense strand
auggaaagcaaaagcaaaa

SEQ ID NO: 2363005 - RNA, 19 nt, Homo sapiens
  misc_RNA (1)...(19): siRNA sense strand
gaaacuugguaaugggauc

SEQ ID NO: 2363006 - RNA, 19 nt, Homo sapiens
  misc_RNA (1)...(19): siRNA sense strand
cugaagaaacaaugggaag

SEQ ID NO: 2363007 - RNA, 19 nt, Homo sapiens
  misc_RNA (1)...(19): siRNA sense strand
gcauaaaaguaucagacca

SEQ ID NO: 2363008 - RNA, 19 nt, Homo sapiens
  misc_RNA (1)...(19): siRNA sense strand
gggaaguagaaagguuaaa

SEQ ID NO: 2363009 - RNA, 19 nt, Homo sapiens
  misc_RNA (1)...(19): siRNA sense strand
gaaaacacucugaaggcaa

SEQ ID NO: 2363010 - RNA, 19 nt, Homo sapiens
  misc_RNA (1)...(19): siRNA sense strand
gugucugguuauugaugaa

SEQ ID NO: 2363011 - RNA, 19 nt, Homo sapiens
  misc_RNA (1)...(19): siRNA sense strand
agaagaucgagaagcggaa

SEQ ID NO: 2363012 - RNA, 19 nt, Homo sapiens
  misc_RNA (1)...(19): siRNA sense strand
aagcagugggaaauauaaa

SEQ ID NO: 2363013 - RNA, 19 nt, Homo sapiens
  misc_RNA (1)...(19): siRNA sense strand
caacaguaaugaaggcaag

SEQ ID NO: 2363014 - RNA, 19 nt, Homo sapiens
  misc_RNA (1)...(19): siRNA sense strand
ggugaaugaugcugagccu

SEQ ID NO: 2363015 - RNA, 19 nt, Homo sapiens
  misc_RNA (1)...(19): siRNA sense strand
aagcacagaaacuugguaa

SEQ ID NO: 2363016 - RNA, 19 nt, Homo sapiens
  misc_RNA (1)...(19): siRNA sense strand
caaaauaagcguacaacca

SEQ ID NO: 2363017 - RNA, 19 nt, Homo sapiens
  misc_RNA (1)...(19): siRNA sense strand
augggaaguagaaagguua

SEQ ID NO: 2363018 - RNA, 19 nt, Homo sapiens
  misc_RNA (1)...(19): siRNA sense strand
aagggaaaucugaagaaga

SEQ ID NO: 2363019 - RNA, 19 nt, Homo sapiens
  misc_RNA (1)...(19): siRNA sense strand
gggaaaucugaagaagaaa

SEQ ID NO: 2363020 - RNA, 19 nt, Homo sapiens
  misc_RNA (1)...(19): siRNA sense strand
aagaagaagcuuauggucu

SEQ ID NO: 2363021 - RNA, 19 nt, Homo sapiens
  misc_RNA (1)...(19): siRNA sense strand
agaaacaaugggaaguaga

SEQ ID NO: 2363022 - RNA, 19 nt, Homo sapiens
  misc_RNA (1)...(19): siRNA sense strand
agcgagaggacuagacauu

SEQ ID NO: 2363023 - RNA, 19 nt, Homo sapiens
  misc_RNA (1)...(19): siRNA sense strand
aggaagcauauaagucaua

SEQ ID NO: 2363024 - RNA, 19 nt, Homo sapiens
  misc_RNA (1)...(19): siRNA sense strand
cuguauuaaccaauggaga

SEQ ID NO: 2363025 - RNA, 19 nt, Homo sapiens
  misc_RNA (1)...(19): siRNA sense strand
ugauaauggguggcaguaa

SEQ ID NO: 2363026 - RNA, 19 nt, Homo sapiens
  misc_RNA (1)...(19): siRNA sense strand
cugcguaagaagaucgaga

SEQ ID NO: 2363027 - RNA, 19 nt, Homo sapiens
  misc_RNA (1)...(19): siRNA sense strand
ugggaaguagaaagguuaa

SEQ ID NO: 2363028 - RNA, 19 nt, Homo sapiens
  misc_RNA (1)...(19): siRNA sense strand
aaccgaaagaagaagcuua

SEQ ID NO: 2363029 - RNA, 19 nt, Homo sapiens
  misc_RNA (1)...(19): siRNA sense strand
aagcaaaauaagcguacaa

SEQ ID NO: 2363030 - RNA, 19 nt, Homo sapiens
  misc_RNA (1)...(19): siRNA sense strand
aucugaacgucaacaguaa

SEQ ID NO: 2363031 - RNA, 19 nt, Homo sapiens
  misc_RNA (1)...(19): siRNA sense strand
uggauuuggcuaccagaaa

SEQ ID NO: 2363032 - RNA, 19 nt, Homo sapiens
  misc_RNA (1)...(19): siRNA sense strand
aaugggaaguagaaagguu

SEQ ID NO: 2363033 - RNA, 19 nt, Homo sapiens
  misc_RNA (1)...(19): siRNA sense strand
gccagauaaugaugaagau

SEQ ID NO: 2363034 - RNA, 19 nt, Homo sapiens
  misc_RNA (1)...(19): siRNA sense strand
aaacaaugggaaguagaaa

SEQ ID NO: 2363035 - RNA, 19 nt, Homo sapiens
  misc_RNA (1)...(19): siRNA sense strand
ugaaugaugcugagccuga

SEQ ID NO: 2363036 - RNA, 19 nt, Homo sapiens
  misc_RNA (1)...(19): siRNA sense strand
uaaugaaggcaagcagaaa

SEQ ID NO: 2363037 - RNA, 19 nt, Homo sapiens
  misc_RNA (1)...(19): siRNA sense strand
aacugaaaacaaagggaaa

SEQ ID NO: 2363038 - RNA, 19 nt, Homo sapiens
  misc_RNA (1)...(19): siRNA sense strand
agucagcccaggaagcaua

SEQ ID NO: 2363039 - RNA, 19 nt, Homo sapiens
  misc_RNA (1)...(19): siRNA sense strand
ucaacaguaaugaaggcaa

SEQ ID NO: 2363040 - RNA, 19 nt, Homo sapiens
  misc_RNA (1)...(19): siRNA sense strand
cugaaggcaauaaaagaaa

SEQ ID NO: 2363041 - RNA, 19 nt, Homo sapiens
  misc_RNA (1)...(19): siRNA sense strand
aagcauagucugagcggaa

SEQ ID NO: 2363042 - RNA, 19 nt, Homo sapiens
  misc_RNA (1)...(19): siRNA sense strand
gcugaguggccgagagauu

SEQ ID NO: 2363043 - RNA, 19 nt, Homo sapiens
  misc_RNA (1)...(19): siRNA sense strand
ccaacaaucuggagcggau

SEQ ID NO: 2363044 - RNA, 19 nt, Homo sapiens
  misc_RNA (1)...(19): siRNA sense strand
guuaggaccaggagggcaa

SEQ ID NO: 2363045 - RNA, 19 nt, Homo sapiens
  misc_RNA (1)...(19): siRNA sense strand
agaucaaaauggaggaaga

SEQ ID NO: 2363046 - RNA, 19 nt, Homo sapiens
  misc_RNA (1)...(19): siRNA sense strand
ccaacagccucgagcgcau

SEQ ID NO: 2363047 - RNA, 19 nt, Homo sapiens
  misc_RNA (1)...(19): siRNA sense strand
ccaacagccucgagcgcau

SEQ ID NO: 2363048 - RNA, 19 nt, Homo sapiens
  misc_RNA (1)...(19): siRNA sense strand
ucaagauggaagagagcau

SEQ ID NO: 2363049 - RNA, 19 nt, Homo sapiens
  misc_RNA (1)...(19): siRNA sense strand
uggaagacuuggaagcaca

SEQ ID NO: 2363050 - RNA, 19 nt, Homo sapiens
  misc_RNA (1)...(19): siRNA sense strand
aaugagaagaggaaggaga

SEQ ID NO: 2363051 - RNA, 19 nt, Homo sapiens
  misc_RNA (1)...(19): siRNA sense strand
gaaggaaagucaaggggau

SEQ ID NO: 2363052 - RNA, 19 nt, Homo sapiens
  misc_RNA (1)...(19): siRNA sense strand
aagaagauccugaugguga

SEQ ID NO: 2363053 - RNA, 19 nt, Homo sapiens
  misc_RNA (1)...(19): siRNA sense strand
augccaaucaccugaauaa

SEQ ID NO: 2363054 - RNA, 19 nt, Homo sapiens
  misc_RNA (1)...(19): siRNA sense strand
ugaauaaaggcaucggaau

SEQ ID NO: 2363055 - RNA, 19 nt, Homo sapiens
  misc_RNA (1)...(19): siRNA sense strand
ugguggagcuggaggccau

SEQ ID NO: 2363056 - RNA, 19 nt, Homo sapiens
  misc_RNA (1)...(19): siRNA sense strand
uggaagaugcuaaaggaca

SEQ ID NO: 2363057 - RNA, 19 nt, Homo sapiens
  misc_RNA (1)...(19): siRNA sense strand
augagaagaggaaggagaa

SEQ ID NO: 2363058 - RNA, 19 nt, Homo sapiens
  misc_RNA (1)...(19): siRNA sense strand
gaaugggaauggaaggcau

SEQ ID NO: 2363059 - RNA, 19 nt, Homo sapiens
  misc_RNA (1)...(19): siRNA sense strand
gagaagaggaaggagaaaa

SEQ ID NO: 2363060 - RNA, 19 nt, Homo sapiens
  misc_RNA (1)...(19): siRNA sense strand
aaacauaggucccgcagga

SEQ ID NO: 2363061 - RNA, 19 nt, Homo sapiens
  misc_RNA (1)...(19): siRNA sense strand
augaacaugggcaggauaa

SEQ ID NO: 2363062 - RNA, 19 nt, Homo sapiens
  misc_RNA (1)...(19): siRNA sense strand
gcuuugagccauaugccaa

SEQ ID NO: 2363063 - RNA, 19 nt, Homo sapiens
  misc_RNA (1)...(19): siRNA sense strand
aggcaaucgcuuugagcca

SEQ ID NO: 2363064 - RNA, 19 nt, Homo sapiens
  misc_RNA (1)...(19): siRNA sense strand
uggaagaaacugaaggaag

SEQ ID NO: 2363065 - RNA, 19 nt, Homo sapiens
  misc_RNA (1)...(19): siRNA sense strand
ugagaagaggaaggagaaa

SEQ ID NO: 2363066 - RNA, 19 nt, Homo sapiens
  misc_RNA (1)...(19): siRNA sense strand
cugaauaaaggcaucggaa

SEQ ID NO: 2363067 - RNA, 19 nt, Homo sapiens
  misc_RNA (1)...(19): siRNA sense strand
acguucgaauugauagaaa

SEQ ID NO: 2363068 - RNA, 19 nt, Homo sapiens
  misc_RNA (1)...(19): siRNA sense strand
gcauugagcgcaugggcca

SEQ ID NO: 2363069 - RNA, 19 nt, Homo sapiens
  misc_RNA (1)...(19): siRNA sense strand
gggcaggauaaaugaaauc

SEQ ID NO: 2363070 - RNA, 19 nt, Homo sapiens
  misc_RNA (1)...(19): siRNA sense strand
ccuccagcauugagcgcau

SEQ ID NO: 2363071 - RNA, 19 nt, Homo sapiens
  misc_RNA (1)...(19): siRNA sense strand
gcauagucugagcggaaga

SEQ ID NO: 2363072 - RNA, 19 nt, Homo sapiens
  misc_RNA (1)...(19): siRNA sense strand
acugaagagaggagagauc

SEQ ID NO: 2363073 - RNA, 19 nt, Homo sapiens
  misc_RNA (1)...(19): siRNA sense strand
ugaagagaggagagaucau

SEQ ID NO: 2363074 - RNA, 19 nt, Homo sapiens
  misc_RNA (1)...(19): siRNA sense strand
cggaaguccuaaacaagca

SEQ ID NO: 2363075 - RNA, 19 nt, Homo sapiens
  misc_RNA (1)...(19): siRNA sense strand
ucaagauggagaaugggaa

SEQ ID NO: 2363076 - RNA, 19 nt, Homo sapiens
  misc_RNA (1)...(19): siRNA sense strand
acuaaaagauacagagccu

SEQ ID NO: 2363077 - RNA, 19 nt, Homo sapiens
  misc_RNA (1)...(19): siRNA sense strand
gcuucggccuugagcgcau

SEQ ID NO: 2363078 - RNA, 19 nt, Homo sapiens
  misc_RNA (1)...(19): siRNA sense strand
agaaacugaaggaaguauu

SEQ ID NO: 2363079 - RNA, 19 nt, Homo sapiens
  misc_RNA (1)...(19): siRNA sense strand
gcauggugcccgcagguau

SEQ ID NO: 2363080 - RNA, 19 nt, Homo sapiens
  misc_RNA (1)...(19): siRNA sense strand
cuuaauggacgcugaagga

SEQ ID NO: 2363081 - RNA, 19 nt, Homo sapiens
  misc_RNA (1)...(19): siRNA sense strand
acuuggaagcacaguauuu

SEQ ID NO: 2363082 - RNA, 19 nt, Homo sapiens
  misc_RNA (1)...(19): siRNA sense strand
ccaggagagcaaugcaaaa

SEQ ID NO: 2363083 - RNA, 19 nt, Homo sapiens
  misc_RNA (1)...(19): siRNA sense strand
uggaauaggcacuguuacu

SEQ ID NO: 2363084 - RNA, 19 nt, Homo sapiens
  misc_RNA (1)...(19): siRNA sense strand
augaauggcaugaagcuga

SEQ ID NO: 2363085 - RNA, 19 nt, Homo sapiens
  misc_RNA (1)...(19): siRNA sense strand
gcuggaagaaacugaagga

SEQ ID NO: 2363086 - RNA, 19 nt, Homo sapiens
  misc_RNA (1)...(19): siRNA sense strand
aaugggaauggaaggcaua

SEQ ID NO: 2363087 - RNA, 19 nt, Homo sapiens
  misc_RNA (1)...(19): siRNA sense strand
gagagauugacguucgaau

SEQ ID NO: 2363088 - RNA, 19 nt, Homo sapiens
  misc_RNA (1)...(19): siRNA sense strand
aagcauagucugagcggaa

SEQ ID NO: 2363089 - RNA, 19 nt, Homo sapiens
  misc_RNA (1)...(19): siRNA sense strand
gcugaguggccgagagauu

SEQ ID NO: 2363090 - RNA, 19 nt, Homo sapiens
  misc_RNA (1)...(19): siRNA sense strand
ccaacaaucuggagcggau

SEQ ID NO: 2363091 - RNA, 19 nt, Homo sapiens
  misc_RNA (1)...(19): siRNA sense strand
guuaggaccaggagggcaa

SEQ ID NO: 2363092 - RNA, 19 nt, Homo sapiens
  misc_RNA (1)...(19): siRNA sense strand
agaucaaaauggaggaaga

SEQ ID NO: 2363093 - RNA, 19 nt, Homo sapiens
  misc_RNA (1)...(19): siRNA sense strand
ccaacagccucgagcgcau

SEQ ID NO: 2363094 - RNA, 19 nt, Homo sapiens
  misc_RNA (1)...(19): siRNA sense strand
ccaacagccucgagcgcau

SEQ ID NO: 2363095 - RNA, 19 nt, Homo sapiens
  misc_RNA (1)...(19): siRNA sense strand
ucaagauggaagagagcau

SEQ ID NO: 2363096 - RNA, 19 nt, Homo sapiens
  misc_RNA (1)...(19): siRNA sense strand
uggaagacuuggaagcaca

SEQ ID NO: 2363097 - RNA, 19 nt, Homo sapiens
  misc_RNA (1)...(19): siRNA sense strand
aaugagaagaggaaggaga

SEQ ID NO: 2363098 - RNA, 19 nt, Homo sapiens
  misc_RNA (1)...(19): siRNA sense strand
gaaggaaagucaaggggau

SEQ ID NO: 2363099 - RNA, 19 nt, Homo sapiens
  misc_RNA (1)...(19): siRNA sense strand
aagaagauccugaugguga

SEQ ID NO: 2363100 - RNA, 19 nt, Homo sapiens
  misc_RNA (1)...(19): siRNA sense strand
augccaaucaccugaauaa

SEQ ID NO: 2363101 - RNA, 19 nt, Homo sapiens
  misc_RNA (1)...(19): siRNA sense strand
ugaauaaaggcaucggaau

SEQ ID NO: 2363102 - RNA, 19 nt, Homo sapiens
  misc_RNA (1)...(19): siRNA sense strand
ugguggagcuggaggccau

SEQ ID NO: 2363103 - RNA, 19 nt, Homo sapiens
  misc_RNA (1)...(19): siRNA sense strand
uggaagaugcuaaaggaca

SEQ ID NO: 2363104 - RNA, 19 nt, Homo sapiens
  misc_RNA (1)...(19): siRNA sense strand
augagaagaggaaggagaa

SEQ ID NO: 2363105 - RNA, 19 nt, Homo sapiens
  misc_RNA (1)...(19): siRNA sense strand
gaaugggaauggaaggcau

SEQ ID NO: 2363106 - RNA, 19 nt, Homo sapiens
  misc_RNA (1)...(19): siRNA sense strand
gagaagaggaaggagaaaa

SEQ ID NO: 2363107 - RNA, 19 nt, Homo sapiens
  misc_RNA (1)...(19): siRNA sense strand
aaacauaggucccgcagga

SEQ ID NO: 2363108 - RNA, 19 nt, Homo sapiens
  misc_RNA (1)...(19): siRNA sense strand
augaacaugggcaggauaa

SEQ ID NO: 2363109 - RNA, 19 nt, Homo sapiens
  misc_RNA (1)...(19): siRNA sense strand
gcuuugagccauaugccaa

SEQ ID NO: 2363110 - RNA, 19 nt, Homo sapiens
  misc_RNA (1)...(19): siRNA sense strand
aggcaaucgcuuugagcca

SEQ ID NO: 2363111 - RNA, 19 nt, Homo sapiens
  misc_RNA (1)...(19): siRNA sense strand
uggaagaaacugaaggaag

SEQ ID NO: 2363112 - RNA, 19 nt, Homo sapiens
  misc_RNA (1)...(19): siRNA sense strand
ugagaagaggaaggagaaa

SEQ ID NO: 2363113 - RNA, 19 nt, Homo sapiens
  misc_RNA (1)...(19): siRNA sense strand
cugaauaaaggcaucggaa

SEQ ID NO: 2363114 - RNA, 19 nt, Homo sapiens
  misc_RNA (1)...(19): siRNA sense strand
acguucgaauugauagaaa

SEQ ID NO: 2363115 - RNA, 19 nt, Homo sapiens
  misc_RNA (1)...(19): siRNA sense strand
gcauugagcgcaugggcca

SEQ ID NO: 2363116 - RNA, 19 nt, Homo sapiens
  misc_RNA (1)...(19): siRNA sense strand
gggcaggauaaaugaaauc

SEQ ID NO: 2363117 - RNA, 19 nt, Homo sapiens
  misc_RNA (1)...(19): siRNA sense strand
ccuccagcauugagcgcau

SEQ ID NO: 2363118 - RNA, 19 nt, Homo sapiens
  misc_RNA (1)...(19): siRNA sense strand
gcauagucugagcggaaga

SEQ ID NO: 2363119 - RNA, 19 nt, Homo sapiens
  misc_RNA (1)...(19): siRNA sense strand
acugaagagaggagagauc

SEQ ID NO: 2363120 - RNA, 19 nt, Homo sapiens
  misc_RNA (1)...(19): siRNA sense strand
ugaagagaggagagaucau

SEQ ID NO: 2363121 - RNA, 19 nt, Homo sapiens
  misc_RNA (1)...(19): siRNA sense strand
cggaaguccuaaacaagca

SEQ ID NO: 2363122 - RNA, 19 nt, Homo sapiens
  misc_RNA (1)...(19): siRNA sense strand
ucaagauggagaaugggaa

SEQ ID NO: 2363123 - RNA, 19 nt, Homo sapiens
  misc_RNA (1)...(19): siRNA sense strand
acuaaaagauacagagccu

SEQ ID NO: 2363124 - RNA, 19 nt, Homo sapiens
  misc_RNA (1)...(19): siRNA sense strand
gcuucggccuugagcgcau

SEQ ID NO: 2363125 - RNA, 19 nt, Homo sapiens
  misc_RNA (1)...(19): siRNA sense strand
agaaacugaaggaaguauu

SEQ ID NO: 2363126 - RNA, 19 nt, Homo sapiens
  misc_RNA (1)...(19): siRNA sense strand
gcauggugcccgcagguau

SEQ ID NO: 2363127 - RNA, 19 nt, Homo sapiens
  misc_RNA (1)...(19): siRNA sense strand
cuuaauggacgcugaagga

SEQ ID NO: 2363128 - RNA, 19 nt, Homo sapiens
  misc_RNA (1)...(19): siRNA sense strand
acuuggaagcacaguauuu

SEQ ID NO: 2363129 - RNA, 19 nt, Homo sapiens
  misc_RNA (1)...(19): siRNA sense strand
ccaggagagcaaugcaaaa

SEQ ID NO: 2363130 - RNA, 19 nt, Homo sapiens
  misc_RNA (1)...(19): siRNA sense strand
uggaauaggcacuguuacu

SEQ ID NO: 2363131 - RNA, 19 nt, Homo sapiens
  misc_RNA (1)...(19): siRNA sense strand
augaauggcaugaagcuga

SEQ ID NO: 2363132 - RNA, 19 nt, Homo sapiens
  misc_RNA (1)...(19): siRNA sense strand
gcuggaagaaacugaagga

SEQ ID NO: 2363133 - RNA, 19 nt, Homo sapiens
  misc_RNA (1)...(19): siRNA sense strand
aaugggaauggaaggcaua

SEQ ID NO: 2363134 - RNA, 19 nt, Homo sapiens
  misc_RNA (1)...(19): siRNA sense strand
gagagauugacguucgaau

SEQ ID NO: 2363135 - RNA, 19 nt, Homo sapiens
  misc_RNA (1)...(19): siRNA sense strand
gagaagaaccugaagcuca

SEQ ID NO: 2363136 - RNA, 19 nt, Homo sapiens
  misc_RNA (1)...(19): siRNA sense strand
aggagaagcagcugcggaa

SEQ ID NO: 2363137 - RNA, 19 nt, Homo sapiens
  misc_RNA (1)...(19): siRNA sense strand
ccaagaagcugcugggcuc

SEQ ID NO: 2363138 - RNA, 19 nt, Homo sapiens
  misc_RNA (1)...(19): siRNA sense strand
acaccaagucugugaaaau

SEQ ID NO: 2363139 - RNA, 19 nt, Homo sapiens
  misc_RNA (1)...(19): siRNA sense strand
gugaaaauccugauggaca

SEQ ID NO: 2363140 - RNA, 19 nt, Homo sapiens
  misc_RNA (1)...(19): siRNA sense strand
cguggagauccgaaggaau

SEQ ID NO: 2363141 - RNA, 19 nt, Homo sapiens
  misc_RNA (1)...(19): siRNA sense strand
acgaaguggccaagaagga

SEQ ID NO: 2363142 - RNA, 19 nt, Homo sapiens
  misc_RNA (1)...(19): siRNA sense strand
gccaaguucugcagcgaga

SEQ ID NO: 2363143 - RNA, 19 nt, Homo sapiens
  misc_RNA (1)...(19): siRNA sense strand
aggaaugaaauccggaaga

SEQ ID NO: 2363144 - RNA, 19 nt, Homo sapiens
  misc_RNA (1)...(19): siRNA sense strand
uggccaagaaggagaagca

SEQ ID NO: 2363145 - RNA, 19 nt, Homo sapiens
  misc_RNA (1)...(19): siRNA sense strand
agaacugcuucgaggagga

SEQ ID NO: 2363146 - RNA, 19 nt, Homo sapiens
  misc_RNA (1)...(19): siRNA sense strand
caggauuucuacagggugu

SEQ ID NO: 2363147 - RNA, 19 nt, Homo sapiens
  misc_RNA (1)...(19): siRNA sense strand
uggaggagaaagugaacca

SEQ ID NO: 2363148 - RNA, 19 nt, Homo sapiens
  misc_RNA (1)...(19): siRNA sense strand
aggagaaagugaaccaacu

SEQ ID NO: 2363149 - RNA, 19 nt, Homo sapiens
  misc_RNA (1)...(19): siRNA sense strand
ugaaccaacugaaggagga

SEQ ID NO: 2363150 - RNA, 19 nt, Homo sapiens
  misc_RNA (1)...(19): siRNA sense strand
gcuucgaggaggagcucau

SEQ ID NO: 2363151 - RNA, 19 nt, Homo sapiens
  misc_RNA (1)...(19): siRNA sense strand
ccaagaaggagaagcagcu

SEQ ID NO: 2363152 - RNA, 19 nt, Homo sapiens
  misc_RNA (1)...(19): siRNA sense strand
aagaggaagaagagggaga

SEQ ID NO: 2363153 - RNA, 19 nt, Homo sapiens
  misc_RNA (1)...(19): siRNA sense strand
ccguaaugcacaagggacu

SEQ ID NO: 2363154 - RNA, 19 nt, Homo sapiens
  misc_RNA (1)...(19): siRNA sense strand
ggaagaggaagaagaggga

SEQ ID NO: 2363155 - RNA, 19 nt, Homo sapiens
  misc_RNA (1)...(19): siRNA sense strand
ccgaguggacaaugaggaa

SEQ ID NO: 2363156 - RNA, 19 nt, Homo sapiens
  misc_RNA (1)...(19): siRNA sense strand
gguggugggaacagagcua

SEQ ID NO: 2363157 - RNA, 19 nt, Homo sapiens
  misc_RNA (1)...(19): siRNA sense strand
gguucuugccagaugacaa

SEQ ID NO: 2363158 - RNA, 19 nt, Homo sapiens
  misc_RNA (1)...(19): siRNA sense strand
ccaacaacuggcaaagaau

SEQ ID NO: 2363159 - RNA, 19 nt, Homo sapiens
  misc_RNA (1)...(19): siRNA sense strand
gcacaauuccaucgaggca

SEQ ID NO: 2363160 - RNA, 19 nt, Homo sapiens
  misc_RNA (1)...(19): siRNA sense strand
augaggaagaggaagaaga

SEQ ID NO: 2363161 - RNA, 19 nt, Homo sapiens
  misc_RNA (1)...(19): siRNA sense strand
aacaacuggcaaagaauaa

SEQ ID NO: 2363162 - RNA, 19 nt, Homo sapiens
  misc_RNA (1)...(19): siRNA sense strand
accuuuaaucuguuggaaa

SEQ ID NO: 2363163 - RNA, 19 nt, Homo sapiens
  misc_RNA (1)...(19): siRNA sense strand
cugacaacuugcugaaaau

SEQ ID NO: 2363164 - RNA, 19 nt, Homo sapiens
  misc_RNA (1)...(19): siRNA sense strand
ucuagaaggugguagccga

SEQ ID NO: 2363165 - RNA, 19 nt, Homo sapiens
  misc_RNA (1)...(19): siRNA sense strand
cggaauucuccaaucauau

SEQ ID NO: 2363166 - RNA, 19 nt, Homo sapiens
  misc_RNA (1)...(19): siRNA sense strand
gagaaggagggcuggaaac

SEQ ID NO: 2363167 - RNA, 19 nt, Homo sapiens
  misc_RNA (1)...(19): siRNA sense strand
gggaaauucuuacgcugga

SEQ ID NO: 2363168 - RNA, 19 nt, Homo sapiens
  misc_RNA (1)...(19): siRNA sense strand
gugguagccgaguggacaa

SEQ ID NO: 2363169 - RNA, 19 nt, Homo sapiens
  misc_RNA (1)...(19): siRNA sense strand
ugaaaauaugcaaggccaa

SEQ ID NO: 2363170 - RNA, 19 nt, Homo sapiens
  misc_RNA (1)...(19): siRNA sense strand
agaauaaccuguuggcccu

SEQ ID NO: 2363171 - RNA, 19 nt, Homo sapiens
  misc_RNA (1)...(19): siRNA sense strand
aagaggaagaagagggaga

SEQ ID NO: 2363172 - RNA, 19 nt, Homo sapiens
  misc_RNA (1)...(19): siRNA sense strand
ccguaaugcacaagggacu

SEQ ID NO: 2363173 - RNA, 19 nt, Homo sapiens
  misc_RNA (1)...(19): siRNA sense strand
ggaagaggaagaagaggga

SEQ ID NO: 2363174 - RNA, 19 nt, Homo sapiens
  misc_RNA (1)...(19): siRNA sense strand
ccgaguggacaaugaggaa

SEQ ID NO: 2363175 - RNA, 19 nt, Homo sapiens
  misc_RNA (1)...(19): siRNA sense strand
gguggugggaacagagcua

SEQ ID NO: 2363176 - RNA, 19 nt, Homo sapiens
  misc_RNA (1)...(19): siRNA sense strand
gguucuugccagaugacaa

SEQ ID NO: 2363177 - RNA, 19 nt, Homo sapiens
  misc_RNA (1)...(19): siRNA sense strand
ccaacaacuggcaaagaau

SEQ ID NO: 2363178 - RNA, 19 nt, Homo sapiens
  misc_RNA (1)...(19): siRNA sense strand
gcacaauuccaucgaggca

SEQ ID NO: 2363179 - RNA, 19 nt, Homo sapiens
  misc_RNA (1)...(19): siRNA sense strand
augaggaagaggaagaaga

SEQ ID NO: 2363180 - RNA, 19 nt, Homo sapiens
  misc_RNA (1)...(19): siRNA sense strand
aacaacuggcaaagaauaa

SEQ ID NO: 2363181 - RNA, 19 nt, Homo sapiens
  misc_RNA (1)...(19): siRNA sense strand
accuuuaaucuguuggaaa

SEQ ID NO: 2363182 - RNA, 19 nt, Homo sapiens
  misc_RNA (1)...(19): siRNA sense strand
cugacaacuugcugaaaau

SEQ ID NO: 2363183 - RNA, 19 nt, Homo sapiens
  misc_RNA (1)...(19): siRNA sense strand
ucuagaaggugguagccga

SEQ ID NO: 2363184 - RNA, 19 nt, Homo sapiens
  misc_RNA (1)...(19): siRNA sense strand
cggaauucuccaaucauau

SEQ ID NO: 2363185 - RNA, 19 nt, Homo sapiens
  misc_RNA (1)...(19): siRNA sense strand
gagaaggagggcuggaaac

SEQ ID NO: 2363186 - RNA, 19 nt, Homo sapiens
  misc_RNA (1)...(19): siRNA sense strand
gggaaauucuuacgcugga

SEQ ID NO: 2363187 - RNA, 19 nt, Homo sapiens
  misc_RNA (1)...(19): siRNA sense strand
gugguagccgaguggacaa

SEQ ID NO: 2363188 - RNA, 19 nt, Homo sapiens
  misc_RNA (1)...(19): siRNA sense strand
ugaaaauaugcaaggccaa

SEQ ID NO: 2363189 - RNA, 19 nt, Homo sapiens
  misc_RNA (1)...(19): siRNA sense strand
agaauaaccuguuggcccu

SEQ ID NO: 2363190 - RNA, 19 nt, Homo sapiens
  misc_RNA (1)...(19): siRNA sense strand
aagaggaagaagagggaga

SEQ ID NO: 2363191 - RNA, 19 nt, Homo sapiens
  misc_RNA (1)...(19): siRNA sense strand
ccguaaugcacaagggacu

SEQ ID NO: 2363192 - RNA, 19 nt, Homo sapiens
  misc_RNA (1)...(19): siRNA sense strand
ggaagaggaagaagaggga

SEQ ID NO: 2363193 - RNA, 19 nt, Homo sapiens
  misc_RNA (1)...(19): siRNA sense strand
ccgaguggacaaugaggaa

SEQ ID NO: 2363194 - RNA, 19 nt, Homo sapiens
  misc_RNA (1)...(19): siRNA sense strand
gguggugggaacagagcua

SEQ ID NO: 2363195 - RNA, 19 nt, Homo sapiens
  misc_RNA (1)...(19): siRNA sense strand
gguucuugccagaugacaa

SEQ ID NO: 2363196 - RNA, 19 nt, Homo sapiens
  misc_RNA (1)...(19): siRNA sense strand
ccaacaacuggcaaagaau

SEQ ID NO: 2363197 - RNA, 19 nt, Homo sapiens
  misc_RNA (1)...(19): siRNA sense strand
gcacaauuccaucgaggca

SEQ ID NO: 2363198 - RNA, 19 nt, Homo sapiens
  misc_RNA (1)...(19): siRNA sense strand
augaggaagaggaagaaga

SEQ ID NO: 2363199 - RNA, 19 nt, Homo sapiens
  misc_RNA (1)...(19): siRNA sense strand
aacaacuggcaaagaauaa

SEQ ID NO: 2363200 - RNA, 19 nt, Homo sapiens
  misc_RNA (1)...(19): siRNA sense strand
accuuuaaucuguuggaaa

SEQ ID NO: 2363201 - RNA, 19 nt, Homo sapiens
  misc_RNA (1)...(19): siRNA sense strand
cugacaacuugcugaaaau

SEQ ID NO: 2363202 - RNA, 19 nt, Homo sapiens
  misc_RNA (1)...(19): siRNA sense strand
ucuagaaggugguagccga

SEQ ID NO: 2363203 - RNA, 19 nt, Homo sapiens
  misc_RNA (1)...(19): siRNA sense strand
cggaauucuccaaucauau

SEQ ID NO: 2363204 - RNA, 19 nt, Homo sapiens
  misc_RNA (1)...(19): siRNA sense strand
gagaaggagggcuggaaac

SEQ ID NO: 2363205 - RNA, 19 nt, Homo sapiens
  misc_RNA (1)...(19): siRNA sense strand
gggaaauucuuacgcugga

SEQ ID NO: 2363206 - RNA, 19 nt, Homo sapiens
  misc_RNA (1)...(19): siRNA sense strand
gugguagccgaguggacaa

SEQ ID NO: 2363207 - RNA, 19 nt, Homo sapiens
  misc_RNA (1)...(19): siRNA sense strand
ugaaaauaugcaaggccaa

SEQ ID NO: 2363208 - RNA, 19 nt, Homo sapiens
  misc_RNA (1)...(19): siRNA sense strand
agaauaaccuguuggcccu

SEQ ID NO: 2363209 - RNA, 19 nt, Homo sapiens
  misc_RNA (1)...(19): siRNA sense strand
ccuaguauucccagagaaa

SEQ ID NO: 2363210 - RNA, 19 nt, Homo sapiens
  misc_RNA (1)...(19): siRNA sense strand
gggaaugagccacgggaau

SEQ ID NO: 2363211 - RNA, 19 nt, Homo sapiens
  misc_RNA (1)...(19): siRNA sense strand
ugcaagaaacuuacagaaa

SEQ ID NO: 2363212 - RNA, 19 nt, Homo sapiens
  misc_RNA (1)...(19): siRNA sense strand
gcacaaauguacaugguuc

SEQ ID NO: 2363213 - RNA, 19 nt, Homo sapiens
  misc_RNA (1)...(19): siRNA sense strand
caguuuaaauacagaacga

SEQ ID NO: 2363214 - RNA, 19 nt, Homo sapiens
  misc_RNA (1)...(19): siRNA sense strand
agagggaucucgugggaca

SEQ ID NO: 2363215 - RNA, 19 nt, Homo sapiens
  misc_RNA (1)...(19): siRNA sense strand
cagcauauucaggaagaaa

SEQ ID NO: 2363216 - RNA, 19 nt, Homo sapiens
  misc_RNA (1)...(19): siRNA sense strand
ugagcaagguccaguaaaa

SEQ ID NO: 2363217 - RNA, 19 nt, Homo sapiens
  misc_RNA (1)...(19): siRNA sense strand
gaguacagcaagagggauc

SEQ ID NO: 2363218 - RNA, 19 nt, Homo sapiens
  misc_RNA (1)...(19): siRNA sense strand
uaguauucccagagaaaca

SEQ ID NO: 2363219 - RNA, 19 nt, Homo sapiens
  misc_RNA (1)...(19): siRNA sense strand
cagaacgaccaauggauau

SEQ ID NO: 2363220 - RNA, 19 nt, Homo sapiens
  misc_RNA (1)...(19): siRNA sense strand
ggauauagcuccggcagga

SEQ ID NO: 2363221 - RNA, 19 nt, Homo sapiens
  misc_RNA (1)...(19): siRNA sense strand
guacgaagguccaacacca

SEQ ID NO: 2363222 - RNA, 19 nt, Homo sapiens
  misc_RNA (1)...(19): siRNA sense strand
cgggaaguuaucagaucaa

SEQ ID NO: 2363223 - RNA, 19 nt, Homo sapiens
  misc_RNA (1)...(19): siRNA sense strand
gugcaagaaacuuacagaa

SEQ ID NO: 2363224 - RNA, 19 nt, Homo sapiens
  misc_RNA (1)...(19): siRNA sense strand
cagaacaagcagaagcuca

SEQ ID NO: 2363225 - RNA, 19 nt, Homo sapiens
  misc_RNA (1)...(19): siRNA sense strand
gcagauuauuugcaagcga

SEQ ID NO: 2363226 - RNA, 19 nt, Homo sapiens
  misc_RNA (1)...(19): siRNA sense strand
agauuauuugcaagcgaaa

SEQ ID NO: 2363227 - RNA, 19 nt, Homo sapiens
  misc_RNA (1)...(19): siRNA sense strand
acucuaugauguucaggaa

SEQ ID NO: 2363228 - RNA, 19 nt, Homo sapiens
  misc_RNA (1)...(19): siRNA sense strand
cagauuauuugcaagcgaa

SEQ ID NO: 2363229 - RNA, 19 nt, Homo sapiens
  misc_RNA (1)...(19): siRNA sense strand
ggaaguuaucagaucaaca

SEQ ID NO: 2363230 - RNA, 19 nt, Homo sapiens
  misc_RNA (1)...(19): siRNA sense strand
gaaagaugggaaugagcca

SEQ ID NO: 2363231 - RNA, 19 nt, Homo sapiens
  misc_RNA (1)...(19): siRNA sense strand
caucagggcagcacagaca

SEQ ID NO: 2363232 - RNA, 19 nt, Homo sapiens
  misc_RNA (1)...(19): siRNA sense strand
acagagguuuauugaugaa

SEQ ID NO: 2363233 - RNA, 19 nt, Homo sapiens
  misc_RNA (1)...(19): siRNA sense strand
acaagcagaagcucagaaa

SEQ ID NO: 2363234 - RNA, 19 nt, Homo sapiens
  misc_RNA (1)...(19): siRNA sense strand
cugcagagaaacucaucua

SEQ ID NO: 2363235 - RNA, 19 nt, Homo sapiens
  misc_RNA (1)...(19): siRNA sense strand
aauacugcuuggaaaggaa

SEQ ID NO: 2363236 - RNA, 19 nt, Homo sapiens
  misc_RNA (1)...(19): siRNA sense strand
cuuaaaggaacuucagcau

SEQ ID NO: 2363237 - RNA, 19 nt, Homo sapiens
  misc_RNA (1)...(19): siRNA sense strand
aaaucaagugucaguggua

SEQ ID NO: 2363238 - RNA, 19 nt, Homo sapiens
  misc_RNA (1)...(19): siRNA sense strand
gcuuggaaaggaaauuaaa

SEQ ID NO: 2363239 - RNA, 19 nt, Homo sapiens
  misc_RNA (1)...(19): siRNA sense strand
ccucuuagugcaaggaagu

SEQ ID NO: 2363240 - RNA, 19 nt, Homo sapiens
  misc_RNA (1)...(19): siRNA sense strand
acaaauacugcuuggaaag

SEQ ID NO: 2363241 - RNA, 19 nt, Homo sapiens
  misc_RNA (1)...(19): siRNA sense strand
gaauggacuuugaagcguu

SEQ ID NO: 2363242 - RNA, 19 nt, Homo sapiens
  misc_RNA (1)...(19): siRNA sense strand
agucgaaagaugggaauga

SEQ ID NO: 2363243 - RNA, 19 nt, Homo sapiens
  misc_RNA (1)...(19): siRNA sense strand
agaaucugaacgaacgaua

SEQ ID NO: 2363244 - RNA, 19 nt, Homo sapiens
  misc_RNA (1)...(19): siRNA sense strand
ugucaguaccgggaaguua

SEQ ID NO: 2363245 - RNA, 19 nt, Homo sapiens
  misc_RNA (1)...(19): siRNA sense strand
ggguggagcagcugguguu

SEQ ID NO: 2363246 - RNA, 19 nt, Homo sapiens
  misc_RNA (1)...(19): siRNA sense strand
aaggaaucauccacagaga

SEQ ID NO: 2363247 - RNA, 19 nt, Homo sapiens
  misc_RNA (1)...(19): siRNA sense strand
ccgggaaguuaucagauca

SEQ ID NO: 2363248 - RNA, 19 nt, Homo sapiens
  misc_RNA (1)...(19): siRNA sense strand
gaugagauguuucagcaga

SEQ ID NO: 2363249 - RNA, 19 nt, Homo sapiens
  misc_RNA (1)...(19): siRNA sense strand
caagaaacuuacagaaaag

SEQ ID NO: 2363250 - RNA, 19 nt, Homo sapiens
  misc_RNA (1)...(19): siRNA sense strand
ccuacucaaauaaggaauu

SEQ ID NO: 2363251 - RNA, 19 nt, Homo sapiens
  misc_RNA (1)...(19): siRNA sense strand
agaacgaccaauggauaua

SEQ ID NO: 2363252 - RNA, 19 nt, Homo sapiens
  misc_RNA (1)...(19): siRNA sense strand
ucugaacgaacgauauaaa

SEQ ID NO: 2363253 - RNA, 19 nt, Homo sapiens
  misc_RNA (1)...(19): siRNA sense strand
uggaagagauugaugccua

SEQ ID NO: 2363254 - RNA, 19 nt, Homo sapiens
  misc_RNA (1)...(19): siRNA sense strand
uggaggaacugcugcgcua

SEQ ID NO: 2363255 - RNA, 19 nt, Homo sapiens
  misc_RNA (1)...(19): siRNA sense strand
agauggagcuacugggagu

SEQ ID NO: 2363256 - RNA, 19 nt, Homo sapiens
  misc_RNA (1)...(19): siRNA sense strand
gggcaaggacaucgagacu

SEQ ID NO: 2363257 - RNA, 19 nt, Homo sapiens
  misc_RNA (1)...(19): siRNA sense strand
cagaggagcuguuuggcuu

SEQ ID NO: 2363258 - RNA, 19 nt, Homo sapiens
  misc_RNA (1)...(19): siRNA sense strand
ggacagugcugaaggugcu

SEQ ID NO: 2363259 - RNA, 19 nt, Homo sapiens
  misc_RNA (1)...(19): siRNA sense strand
gugccgcagcuaugggaua

SEQ ID NO: 2363260 - RNA, 19 nt, Homo sapiens
  misc_RNA (1)...(19): siRNA sense strand
ccaaacagcacgacggauc

SEQ ID NO: 2363261 - RNA, 19 nt, Homo sapiens
  misc_RNA (1)...(19): siRNA sense strand
cugccaagauggagcuacu

SEQ ID NO: 2363262 - RNA, 19 nt, Homo sapiens
  misc_RNA (1)...(19): siRNA sense strand
agggcaaguucaaggagca

SEQ ID NO: 2363263 - RNA, 19 nt, Homo sapiens
  misc_RNA (1)...(19): siRNA sense strand
ucauagggcuggagcugga

SEQ ID NO: 2363264 - RNA, 19 nt, Homo sapiens
  misc_RNA (1)...(19): siRNA sense strand
ccgccaaguaugacuccaa

SEQ ID NO: 2363265 - RNA, 19 nt, Homo sapiens
  misc_RNA (1)...(19): siRNA sense strand
agcguggguuugagggcaa

SEQ ID NO: 2363266 - RNA, 19 nt, Homo sapiens
  misc_RNA (1)...(19): siRNA sense strand
acgaagacaaggagagaca

SEQ ID NO: 2363267 - RNA, 19 nt, Homo sapiens
  misc_RNA (1)...(19): siRNA sense strand
gcuacuuggaggaggacaa

SEQ ID NO: 2363268 - RNA, 19 nt, Homo sapiens
  misc_RNA (1)...(19): siRNA sense strand
ccaacuacugggagcgcua

SEQ ID NO: 2363269 - RNA, 19 nt, Homo sapiens
  misc_RNA (1)...(19): siRNA sense strand
acaacgaggaggaggagga

SEQ ID NO: 2363270 - RNA, 19 nt, Homo sapiens
  misc_RNA (1)...(19): siRNA sense strand
ccaacuacaacgaggagga

SEQ ID NO: 2363271 - RNA, 19 nt, Homo sapiens
  misc_RNA (1)...(19): siRNA sense strand
gcgaggugaaguauggcaa

SEQ ID NO: 2363272 - RNA, 19 nt, Homo sapiens
  misc_RNA (1)...(19): siRNA sense strand
acuacaacgaggaggagga

SEQ ID NO: 2363273 - RNA, 19 nt, Homo sapiens
  misc_RNA (1)...(19): siRNA sense strand
acaaggagagacaggacuu

SEQ ID NO: 2363274 - RNA, 19 nt, Homo sapiens
  misc_RNA (1)...(19): siRNA sense strand
cugguaucgccuugggcua

SEQ ID NO: 2363275 - RNA, 19 nt, Homo sapiens
  misc_RNA (1)...(19): siRNA sense strand
cauuugaccuggagcggua

SEQ ID NO: 2363276 - RNA, 19 nt, Homo sapiens
  misc_RNA (1)...(19): siRNA sense strand
agguggugcugguggagaa

SEQ ID NO: 2363277 - RNA, 19 nt, Homo sapiens
  misc_RNA (1)...(19): siRNA sense strand
gcagacagcaccagccaca

SEQ ID NO: 2363278 - RNA, 19 nt, Homo sapiens
  misc_RNA (1)...(19): siRNA sense strand
cuuuaaugcugaugagaca

SEQ ID NO: 2363279 - RNA, 19 nt, Homo sapiens
  misc_RNA (1)...(19): siRNA sense strand
gaggaaaggugauguggca

SEQ ID NO: 2363280 - RNA, 19 nt, Homo sapiens
  misc_RNA (1)...(19): siRNA sense strand
cagugaagcaggaagugaa

SEQ ID NO: 2363281 - RNA, 19 nt, Homo sapiens
  misc_RNA (1)...(19): siRNA sense strand
ggacaugguggcuggcgaa

SEQ ID NO: 2363282 - RNA, 19 nt, Homo sapiens
  misc_RNA (1)...(19): siRNA sense strand
cgaaaauaccagugaagca

SEQ ID NO: 2363283 - RNA, 19 nt, Homo sapiens
  misc_RNA (1)...(19): siRNA sense strand
agcaggaagugaagaugaa

SEQ ID NO: 2363284 - RNA, 19 nt, Homo sapiens
  misc_RNA (1)...(19): siRNA sense strand
uggacaauuaaauggcaua

SEQ ID NO: 2363285 - RNA, 19 nt, Homo sapiens
  misc_RNA (1)...(19): siRNA sense strand
guggugaaauguuggcaga

SEQ ID NO: 2363286 - RNA, 19 nt, Homo sapiens
  misc_RNA (1)...(19): siRNA sense strand
augaaaagagugacacaaa

SEQ ID NO: 2363287 - RNA, 19 nt, Homo sapiens
  misc_RNA (1)...(19): siRNA sense strand
cagacaucauccaggacau

SEQ ID NO: 2363288 - RNA, 19 nt, Homo sapiens
  misc_RNA (1)...(19): siRNA sense strand
aaaugaaaguugugggagc

SEQ ID NO: 2363289 - RNA, 19 nt, Homo sapiens
  misc_RNA (1)...(19): siRNA sense strand
gcaucgucccuauggaauu

SEQ ID NO: 2363290 - RNA, 19 nt, Homo sapiens
  misc_RNA (1)...(19): siRNA sense strand
aggcaagaggaaaggugau

SEQ ID NO: 2363291 - RNA, 19 nt, Homo sapiens
  misc_RNA (1)...(19): siRNA sense strand
aucaagaagagguggacau

SEQ ID NO: 2363292 - RNA, 19 nt, Homo sapiens
  misc_RNA (1)...(19): siRNA sense strand
cagugggcuuggaugacaa

SEQ ID NO: 2363293 - RNA, 19 nt, Homo sapiens
  misc_RNA (1)...(19): siRNA sense strand
ugaagcaggaagugaagau

SEQ ID NO: 2363294 - RNA, 19 nt, Homo sapiens
  misc_RNA (1)...(19): siRNA sense strand
guggaugccaggaugaaga

SEQ ID NO: 2363295 - RNA, 19 nt, Homo sapiens
  misc_RNA (1)...(19): siRNA sense strand
uggaauuugcagaauguga

SEQ ID NO: 2363296 - RNA, 19 nt, Homo sapiens
  misc_RNA (1)...(19): siRNA sense strand
aagcaggaagugaagauga

SEQ ID NO: 2363297 - RNA, 19 nt, Homo sapiens
  misc_RNA (1)...(19): siRNA sense strand
ccguaaaggcaaagaaaga

SEQ ID NO: 2363298 - RNA, 19 nt, Homo sapiens
  misc_RNA (1)...(19): siRNA sense strand
guuaaugguugaagagcaa

SEQ ID NO: 2363299 - RNA, 19 nt, Homo sapiens
  misc_RNA (1)...(19): siRNA sense strand
cagaaagaacagaagauaa

SEQ ID NO: 2363300 - RNA, 19 nt, Homo sapiens
  misc_RNA (1)...(19): siRNA sense strand
ggaacaugaagcagagaua

SEQ ID NO: 2363301 - RNA, 19 nt, Homo sapiens
  misc_RNA (1)...(19): siRNA sense strand
ggaaaggaaucaagagcga

SEQ ID NO: 2363302 - RNA, 19 nt, Homo sapiens
  misc_RNA (1)...(19): siRNA sense strand
ugaauuaacaggaggacua

SEQ ID NO: 2363303 - RNA, 19 nt, Homo sapiens
  misc_RNA (1)...(19): siRNA sense strand
gcaaagaaaaggaggagaa

SEQ ID NO: 2363304 - RNA, 19 nt, Homo sapiens
  misc_RNA (1)...(19): siRNA sense strand
gugaaagggaagaaagauu

SEQ ID NO: 2363305 - RNA, 19 nt, Homo sapiens
  misc_RNA (1)...(19): siRNA sense strand
caacagugaacuagaacaa

SEQ ID NO: 2363306 - RNA, 19 nt, Homo sapiens
  misc_RNA (1)...(19): siRNA sense strand
aagaaaaggaggagaaaau

SEQ ID NO: 2363307 - RNA, 19 nt, Homo sapiens
  misc_RNA (1)...(19): siRNA sense strand
ccaaauacagugaagacaa

SEQ ID NO: 2363308 - RNA, 19 nt, Homo sapiens
  misc_RNA (1)...(19): siRNA sense strand
gggaagagggagaaggcau

SEQ ID NO: 2363309 - RNA, 19 nt, Homo sapiens
  misc_RNA (1)...(19): siRNA sense strand
ggaagaacacagaaagaca

SEQ ID NO: 2363310 - RNA, 19 nt, Homo sapiens
  misc_RNA (1)...(19): siRNA sense strand
agaacaacucugaagauaa

SEQ ID NO: 2363311 - RNA, 19 nt, Homo sapiens
  misc_RNA (1)...(19): siRNA sense strand
cuuaaggaacagugugaaa

SEQ ID NO: 2363312 - RNA, 19 nt, Homo sapiens
  misc_RNA (1)...(19): siRNA sense strand
agacuaugagcaagagaaa

SEQ ID NO: 2363313 - RNA, 19 nt, Homo sapiens
  misc_RNA (1)...(19): siRNA sense strand
aagcaaugguagacaaaga

SEQ ID NO: 2363314 - RNA, 19 nt, Homo sapiens
  misc_RNA (1)...(19): siRNA sense strand
acaaagaauuagaagcuga

SEQ ID NO: 2363315 - RNA, 19 nt, Homo sapiens
  misc_RNA (1)...(19): siRNA sense strand
ucucaaacauguagcaaaa

SEQ ID NO: 2363316 - RNA, 19 nt, Homo sapiens
  misc_RNA (1)...(19): siRNA sense strand
agaacauccagaagaaaua

SEQ ID NO: 2363317 - RNA, 19 nt, Homo sapiens
  misc_RNA (1)...(19): siRNA sense strand
aaggaaagaguuagaagaa

SEQ ID NO: 2363318 - RNA, 19 nt, Homo sapiens
  misc_RNA (1)...(19): siRNA sense strand
aggaaagaguuagaagaaa

SEQ ID NO: 2363319 - RNA, 19 nt, Homo sapiens
  misc_RNA (1)...(19): siRNA sense strand
uaagaaaugugaaagggaa

SEQ ID NO: 2363320 - RNA, 19 nt, Homo sapiens
  misc_RNA (1)...(19): siRNA sense strand
agaacgagguccuucgaaa

SEQ ID NO: 2363321 - RNA, 19 nt, Homo sapiens
  misc_RNA (1)...(19): siRNA sense strand
gaaaguucucuuaaggaaa

SEQ ID NO: 2363322 - RNA, 19 nt, Homo sapiens
  misc_RNA (1)...(19): siRNA sense strand
cuacaaaguccgaguucau

SEQ ID NO: 2363323 - RNA, 19 nt, Homo sapiens
  misc_RNA (1)...(19): siRNA sense strand
agucaaacacuuagaagau

SEQ ID NO: 2363324 - RNA, 19 nt, Homo sapiens
  misc_RNA (1)...(19): siRNA sense strand
aagaauuagagcugguuaa

SEQ ID NO: 2363325 - RNA, 19 nt, Homo sapiens
  misc_RNA (1)...(19): siRNA sense strand
gguugaagagcaagauaau

SEQ ID NO: 2363326 - RNA, 19 nt, Homo sapiens
  misc_RNA (1)...(19): siRNA sense strand
gaaaaggaggagaaaauaa

SEQ ID NO: 2363327 - RNA, 19 nt, Homo sapiens
  misc_RNA (1)...(19): siRNA sense strand
caauacagucagagaacau

SEQ ID NO: 2363328 - RNA, 19 nt, Homo sapiens
  misc_RNA (1)...(19): siRNA sense strand
ugggaagaaaguagagcaa

SEQ ID NO: 2363329 - RNA, 19 nt, Homo sapiens
  misc_RNA (1)...(19): siRNA sense strand
ugaaauaacaucagagaag

SEQ ID NO: 2363330 - RNA, 19 nt, Homo sapiens
  misc_RNA (1)...(19): siRNA sense strand
aagaagaauugguucagaa

SEQ ID NO: 2363331 - RNA, 19 nt, Homo sapiens
  misc_RNA (1)...(19): siRNA sense strand
agguagugaaagagagaga

SEQ ID NO: 2363332 - RNA, 19 nt, Homo sapiens
  misc_RNA (1)...(19): siRNA sense strand
caguaaaagaguuggaaga

SEQ ID NO: 2363333 - RNA, 19 nt, Homo sapiens
  misc_RNA (1)...(19): siRNA sense strand
gugaaaaccuacagcaaga

SEQ ID NO: 2363334 - RNA, 19 nt, Homo sapiens
  misc_RNA (1)...(19): siRNA sense strand
guaaaagaguuggaagaaa

SEQ ID NO: 2363335 - RNA, 19 nt, Homo sapiens
  misc_RNA (1)...(19): siRNA sense strand
aacaugaagcagagauaaa

SEQ ID NO: 2363336 - RNA, 19 nt, Homo sapiens
  misc_RNA (1)...(19): siRNA sense strand
cagaagacagugaagagaa

SEQ ID NO: 2363337 - RNA, 19 nt, Homo sapiens
  misc_RNA (1)...(19): siRNA sense strand
acagagaaguacagagucu

SEQ ID NO: 2363338 - RNA, 19 nt, Homo sapiens
  misc_RNA (1)...(19): siRNA sense strand
cauaaagaaccuucaagaa

SEQ ID NO: 2363339 - RNA, 19 nt, Homo sapiens
  misc_RNA (1)...(19): siRNA sense strand
agaaaugggaucagaaguu

SEQ ID NO: 2363340 - RNA, 19 nt, Homo sapiens
  misc_RNA (1)...(19): siRNA sense strand
gagccaaagcaaugguaga

SEQ ID NO: 2363341 - RNA, 19 nt, Homo sapiens
  misc_RNA (1)...(19): siRNA sense strand
aaagaaacagcuucagaaa

SEQ ID NO: 2363342 - RNA, 19 nt, Homo sapiens
  misc_RNA (1)...(19): siRNA sense strand
caggaagaacacagaaaga

SEQ ID NO: 2363343 - RNA, 19 nt, Homo sapiens
  misc_RNA (1)...(19): siRNA sense strand
accaagaagaggugaaaga

SEQ ID NO: 2363344 - RNA, 19 nt, Homo sapiens
  misc_RNA (1)...(19): siRNA sense strand
ugaaagaguugaugugcca

SEQ ID NO: 2363345 - RNA, 19 nt, Homo sapiens
  misc_RNA (1)...(19): siRNA sense strand
caaugugaggcaagugaaa

SEQ ID NO: 2363346 - RNA, 19 nt, Homo sapiens
  misc_RNA (1)...(19): siRNA sense strand
aaacaguugaguagggauu

SEQ ID NO: 2363347 - RNA, 19 nt, Homo sapiens
  misc_RNA (1)...(19): siRNA sense strand
gaacagaagauaaaggaac

SEQ ID NO: 2363348 - RNA, 19 nt, Homo sapiens
  misc_RNA (1)...(19): siRNA sense strand
gcgcuaaacaagaaaggga

SEQ ID NO: 2363349 - RNA, 19 nt, Homo sapiens
  misc_RNA (1)...(19): siRNA sense strand
gggagaaggcauggagaca

SEQ ID NO: 2363350 - RNA, 19 nt, Homo sapiens
  misc_RNA (1)...(19): siRNA sense strand
cugcuuaacucucccgaaa

SEQ ID NO: 2363351 - RNA, 19 nt, Homo sapiens
  misc_RNA (1)...(19): siRNA sense strand
acgggaagacuuagaguuu

SEQ ID NO: 2363352 - RNA, 19 nt, Homo sapiens
  misc_RNA (1)...(19): siRNA sense strand
caaagcaaugguagacaaa

SEQ ID NO: 2363353 - RNA, 19 nt, Homo sapiens
  misc_RNA (1)...(19): siRNA sense strand
agauagaagauuuggagca

SEQ ID NO: 2363354 - RNA, 19 nt, Homo sapiens
  misc_RNA (1)...(19): siRNA sense strand
caugauacacugcuagaaa

SEQ ID NO: 2363355 - RNA, 19 nt, Homo sapiens
  misc_RNA (1)...(19): siRNA sense strand
gagaacaugaugaugaaau

SEQ ID NO: 2363356 - RNA, 19 nt, Homo sapiens
  misc_RNA (1)...(19): siRNA sense strand
aguacagagucuuaaggaa

SEQ ID NO: 2363357 - RNA, 19 nt, Homo sapiens
  misc_RNA (1)...(19): siRNA sense strand
aggcaaagaaagaacuaga

SEQ ID NO: 2363358 - RNA, 19 nt, Homo sapiens
  misc_RNA (1)...(19): siRNA sense strand
agacaaagaauuagaagcu

SEQ ID NO: 2363359 - RNA, 19 nt, Homo sapiens
  misc_RNA (1)...(19): siRNA sense strand
ccguaaaggcaaagaaaga

SEQ ID NO: 2363360 - RNA, 19 nt, Homo sapiens
  misc_RNA (1)...(19): siRNA sense strand
guuaaugguugaagagcaa

SEQ ID NO: 2363361 - RNA, 19 nt, Homo sapiens
  misc_RNA (1)...(19): siRNA sense strand
cagaaagaacagaagauaa

SEQ ID NO: 2363362 - RNA, 19 nt, Homo sapiens
  misc_RNA (1)...(19): siRNA sense strand
ggaacaugaagcagagaua

SEQ ID NO: 2363363 - RNA, 19 nt, Homo sapiens
  misc_RNA (1)...(19): siRNA sense strand
ggaaaggaaucaagagcga

SEQ ID NO: 2363364 - RNA, 19 nt, Homo sapiens
  misc_RNA (1)...(19): siRNA sense strand
ugaauuaacaggaggacua

SEQ ID NO: 2363365 - RNA, 19 nt, Homo sapiens
  misc_RNA (1)...(19): siRNA sense strand
gcaaagaaaaggaggagaa

SEQ ID NO: 2363366 - RNA, 19 nt, Homo sapiens
  misc_RNA (1)...(19): siRNA sense strand
gugaaagggaagaaagauu

SEQ ID NO: 2363367 - RNA, 19 nt, Homo sapiens
  misc_RNA (1)...(19): siRNA sense strand
caacagugaacuagaacaa

SEQ ID NO: 2363368 - RNA, 19 nt, Homo sapiens
  misc_RNA (1)...(19): siRNA sense strand
aagaaaaggaggagaaaau

SEQ ID NO: 2363369 - RNA, 19 nt, Homo sapiens
  misc_RNA (1)...(19): siRNA sense strand
ccaaauacagugaagacaa

SEQ ID NO: 2363370 - RNA, 19 nt, Homo sapiens
  misc_RNA (1)...(19): siRNA sense strand
gggaagagggagaaggcau

SEQ ID NO: 2363371 - RNA, 19 nt, Homo sapiens
  misc_RNA (1)...(19): siRNA sense strand
ggaagaacacagaaagaca

SEQ ID NO: 2363372 - RNA, 19 nt, Homo sapiens
  misc_RNA (1)...(19): siRNA sense strand
agaacaacucugaagauaa

SEQ ID NO: 2363373 - RNA, 19 nt, Homo sapiens
  misc_RNA (1)...(19): siRNA sense strand
cuuaaggaacagugugaaa

SEQ ID NO: 2363374 - RNA, 19 nt, Homo sapiens
  misc_RNA (1)...(19): siRNA sense strand
agacuaugagcaagagaaa

SEQ ID NO: 2363375 - RNA, 19 nt, Homo sapiens
  misc_RNA (1)...(19): siRNA sense strand
aagcaaugguagacaaaga

SEQ ID NO: 2363376 - RNA, 19 nt, Homo sapiens
  misc_RNA (1)...(19): siRNA sense strand
acaaagaauuagaagcuga

SEQ ID NO: 2363377 - RNA, 19 nt, Homo sapiens
  misc_RNA (1)...(19): siRNA sense strand
ucucaaacauguagcaaaa

SEQ ID NO: 2363378 - RNA, 19 nt, Homo sapiens
  misc_RNA (1)...(19): siRNA sense strand
agaacauccagaagaaaua

SEQ ID NO: 2363379 - RNA, 19 nt, Homo sapiens
  misc_RNA (1)...(19): siRNA sense strand
aaggaaagaguuagaagaa

SEQ ID NO: 2363380 - RNA, 19 nt, Homo sapiens
  misc_RNA (1)...(19): siRNA sense strand
aggaaagaguuagaagaaa

SEQ ID NO: 2363381 - RNA, 19 nt, Homo sapiens
  misc_RNA (1)...(19): siRNA sense strand
uaagaaaugugaaagggaa

SEQ ID NO: 2363382 - RNA, 19 nt, Homo sapiens
  misc_RNA (1)...(19): siRNA sense strand
agaacgagguccuucgaaa

SEQ ID NO: 2363383 - RNA, 19 nt, Homo sapiens
  misc_RNA (1)...(19): siRNA sense strand
aagcagagacugagcaaca

SEQ ID NO: 2363384 - RNA, 19 nt, Homo sapiens
  misc_RNA (1)...(19): siRNA sense strand
gaaaguucucuuaaggaaa

SEQ ID NO: 2363385 - RNA, 19 nt, Homo sapiens
  misc_RNA (1)...(19): siRNA sense strand
cuacaaaguccgaguucau

SEQ ID NO: 2363386 - RNA, 19 nt, Homo sapiens
  misc_RNA (1)...(19): siRNA sense strand
agucaaacacuuagaagau

SEQ ID NO: 2363387 - RNA, 19 nt, Homo sapiens
  misc_RNA (1)...(19): siRNA sense strand
aagaauuagagcugguuaa

SEQ ID NO: 2363388 - RNA, 19 nt, Homo sapiens
  misc_RNA (1)...(19): siRNA sense strand
gguugaagagcaagauaau

SEQ ID NO: 2363389 - RNA, 19 nt, Homo sapiens
  misc_RNA (1)...(19): siRNA sense strand
gaaaaggaggagaaaauaa

SEQ ID NO: 2363390 - RNA, 19 nt, Homo sapiens
  misc_RNA (1)...(19): siRNA sense strand
caauacagucagagaacau

SEQ ID NO: 2363391 - RNA, 19 nt, Homo sapiens
  misc_RNA (1)...(19): siRNA sense strand
ugggaagaaaguagagcaa

SEQ ID NO: 2363392 - RNA, 19 nt, Homo sapiens
  misc_RNA (1)...(19): siRNA sense strand
ugaaauaacaucagagaag

SEQ ID NO: 2363393 - RNA, 19 nt, Homo sapiens
  misc_RNA (1)...(19): siRNA sense strand
aagaagaauugguucagaa

SEQ ID NO: 2363394 - RNA, 19 nt, Homo sapiens
  misc_RNA (1)...(19): siRNA sense strand
agguagugaaagagagaga

SEQ ID NO: 2363395 - RNA, 19 nt, Homo sapiens
  misc_RNA (1)...(19): siRNA sense strand
caguaaaagaguuggaaga

SEQ ID NO: 2363396 - RNA, 19 nt, Homo sapiens
  misc_RNA (1)...(19): siRNA sense strand
gugaaaaccuacagcaaga

SEQ ID NO: 2363397 - RNA, 19 nt, Homo sapiens
  misc_RNA (1)...(19): siRNA sense strand
guaaaagaguuggaagaaa

SEQ ID NO: 2363398 - RNA, 19 nt, Homo sapiens
  misc_RNA (1)...(19): siRNA sense strand
aacaugaagcagagauaaa

SEQ ID NO: 2363399 - RNA, 19 nt, Homo sapiens
  misc_RNA (1)...(19): siRNA sense strand
cagaagacagugaagagaa

SEQ ID NO: 2363400 - RNA, 19 nt, Homo sapiens
  misc_RNA (1)...(19): siRNA sense strand
aaaugaagcaagagguuga

SEQ ID NO: 2363401 - RNA, 19 nt, Homo sapiens
  misc_RNA (1)...(19): siRNA sense strand
acagagaaguacagagucu

SEQ ID NO: 2363402 - RNA, 19 nt, Homo sapiens
  misc_RNA (1)...(19): siRNA sense strand
cauaaagaaccuucaagaa

SEQ ID NO: 2363403 - RNA, 19 nt, Homo sapiens
  misc_RNA (1)...(19): siRNA sense strand
agaaaugggaucagaaguu

SEQ ID NO: 2363404 - RNA, 19 nt, Homo sapiens
  misc_RNA (1)...(19): siRNA sense strand
gagccaaagcaaugguaga

SEQ ID NO: 2363405 - RNA, 19 nt, Homo sapiens
  misc_RNA (1)...(19): siRNA sense strand
aaagaaacagcuucagaaa

SEQ ID NO: 2363406 - RNA, 19 nt, Homo sapiens
  misc_RNA (1)...(19): siRNA sense strand
caggaagaacacagaaaga

SEQ ID NO: 2363407 - RNA, 19 nt, Homo sapiens
  misc_RNA (1)...(19): siRNA sense strand
accaagaagaggugaaaga

SEQ ID NO: 2363408 - RNA, 19 nt, Homo sapiens
  misc_RNA (1)...(19): siRNA sense strand
ugaaagaguugaugugcca

SEQ ID NO: 2363409 - RNA, 19 nt, Homo sapiens
  misc_RNA (1)...(19): siRNA sense strand
caaugugaggcaagugaaa

SEQ ID NO: 2363410 - RNA, 19 nt, Homo sapiens
  misc_RNA (1)...(19): siRNA sense strand
aaacaguugaguagggauu

SEQ ID NO: 2363411 - RNA, 19 nt, Homo sapiens
  misc_RNA (1)...(19): siRNA sense strand
gaacagaagauaaaggaac

SEQ ID NO: 2363412 - RNA, 19 nt, Homo sapiens
  misc_RNA (1)...(19): siRNA sense strand
gcgcuaaacaagaaaggga

SEQ ID NO: 2363413 - RNA, 19 nt, Homo sapiens
  misc_RNA (1)...(19): siRNA sense strand
gggagaaggcauggagaca

SEQ ID NO: 2363414 - RNA, 19 nt, Homo sapiens
  misc_RNA (1)...(19): siRNA sense strand
cugcuuaacucucccgaaa

SEQ ID NO: 2363415 - RNA, 19 nt, Homo sapiens
  misc_RNA (1)...(19): siRNA sense strand
acgggaagacuuagaguuu

SEQ ID NO: 2363416 - RNA, 19 nt, Homo sapiens
  misc_RNA (1)...(19): siRNA sense strand
caaagcaaugguagacaaa

SEQ ID NO: 2363417 - RNA, 19 nt, Homo sapiens
  misc_RNA (1)...(19): siRNA sense strand
agauagaagauuuggagca

SEQ ID NO: 2363418 - RNA, 19 nt, Homo sapiens
  misc_RNA (1)...(19): siRNA sense strand
caugauacacugcuagaaa

SEQ ID NO: 2363419 - RNA, 19 nt, Homo sapiens
  misc_RNA (1)...(19): siRNA sense strand
gagaacaugaugaugaaau

SEQ ID NO: 2363420 - RNA, 19 nt, Homo sapiens
  misc_RNA (1)...(19): siRNA sense strand
aagaaagaaccaaaggaaa

SEQ ID NO: 2363421 - RNA, 19 nt, Homo sapiens
  misc_RNA (1)...(19): siRNA sense strand
cagaauccaaggagggaaa

SEQ ID NO: 2363422 - RNA, 19 nt, Homo sapiens
  misc_RNA (1)...(19): siRNA sense strand
agacaagaugccaaagaaa

SEQ ID NO: 2363423 - RNA, 19 nt, Homo sapiens
  misc_RNA (1)...(19): siRNA sense strand
cagugaaaauggagaaauu

SEQ ID NO: 2363424 - RNA, 19 nt, Homo sapiens
  misc_RNA (1)...(19): siRNA sense strand
agaaagaaccaaaggaaac

SEQ ID NO: 2363425 - RNA, 19 nt, Homo sapiens
  misc_RNA (1)...(19): siRNA sense strand
gugaaagacaagaugccaa

SEQ ID NO: 2363426 - RNA, 19 nt, Homo sapiens
  misc_RNA (1)...(19): siRNA sense strand
ggugaaaucggguggagau

SEQ ID NO: 2363427 - RNA, 19 nt, Homo sapiens
  misc_RNA (1)...(19): siRNA sense strand
cuuaaagggucuagaaccu

SEQ ID NO: 2363428 - RNA, 19 nt, Homo sapiens
  misc_RNA (1)...(19): siRNA sense strand
cgucaaagaagaaaggugu

SEQ ID NO: 2363429 - RNA, 19 nt, Homo sapiens
  misc_RNA (1)...(19): siRNA sense strand
cgaaggagaaagaaauaca

SEQ ID NO: 2363430 - RNA, 19 nt, Homo sapiens
  misc_RNA (1)...(19): siRNA sense strand
guaccauagugaagcccaa

SEQ ID NO: 2363431 - RNA, 19 nt, Homo sapiens
  misc_RNA (1)...(19): siRNA sense strand
ccucagaccagaucgcaaa

SEQ ID NO: 2363432 - RNA, 19 nt, Homo sapiens
  misc_RNA (1)...(19): siRNA sense strand
caaaugaugucuaugccua

SEQ ID NO: 2363433 - RNA, 19 nt, Homo sapiens
  misc_RNA (1)...(19): siRNA sense strand
agaagaaagguguucacaa

SEQ ID NO: 2363434 - RNA, 19 nt, Homo sapiens
  misc_RNA (1)...(19): siRNA sense strand
gggugaauuaauacaagaa

SEQ ID NO: 2363435 - RNA, 19 nt, Homo sapiens
  misc_RNA (1)...(19): siRNA sense strand
agagagaaagcaugaccaa

SEQ ID NO: 2363436 - RNA, 19 nt, Homo sapiens
  misc_RNA (1)...(19): siRNA sense strand
cugaaguggaccuggauga

SEQ ID NO: 2363437 - RNA, 19 nt, Homo sapiens
  misc_RNA (1)...(19): siRNA sense strand
agaagaauguaaagagccu

SEQ ID NO: 2363438 - RNA, 19 nt, Homo sapiens
  misc_RNA (1)...(19): siRNA sense strand
cuguggaacuggaaugaca

SEQ ID NO: 2363439 - RNA, 19 nt, Homo sapiens
  misc_RNA (1)...(19): siRNA sense strand
aaaacgaaggagaaagaaa

SEQ ID NO: 2363440 - RNA, 19 nt, Homo sapiens
  misc_RNA (1)...(19): siRNA sense strand
aguccugggugaaagacaa

SEQ ID NO: 2363441 - RNA, 19 nt, Homo sapiens
  misc_RNA (1)...(19): siRNA sense strand
cgacaugacccguggcuac

SEQ ID NO: 2363442 - RNA, 19 nt, Homo sapiens
  misc_RNA (1)...(19): siRNA sense strand
cuugaaagaagaagaaugu

SEQ ID NO: 2363443 - RNA, 19 nt, Homo sapiens
  misc_RNA (1)...(19): siRNA sense strand
aaaagaaaccagagaaguu

SEQ ID NO: 2363444 - RNA, 19 nt, Homo sapiens
  misc_RNA (1)...(19): siRNA sense strand
ggacaauaaccaagucgga

SEQ ID NO: 2363445 - RNA, 19 nt, Homo sapiens
  misc_RNA (1)...(19): siRNA sense strand
ucuuggaaacagagacaau

SEQ ID NO: 2363446 - RNA, 19 nt, Homo sapiens
  misc_RNA (1)...(19): siRNA sense strand
gggucuagaaccugaaguu

SEQ ID NO: 2363447 - RNA, 19 nt, Homo sapiens
  misc_RNA (1)...(19): siRNA sense strand
ggcgaaagagagaaagcau

SEQ ID NO: 2363448 - RNA, 19 nt, Homo sapiens
  misc_RNA (1)...(19): siRNA sense strand
agacugaagaagaauauga

SEQ ID NO: 2363449 - RNA, 19 nt, Homo sapiens
  misc_RNA (1)...(19): siRNA sense strand
acaguugaguccuggguga

SEQ ID NO: 2363450 - RNA, 19 nt, Homo sapiens
  misc_RNA (1)...(19): siRNA sense strand
agucggaugcuuugggaca

SEQ ID NO: 2363451 - RNA, 19 nt, Homo sapiens
  misc_RNA (1)...(19): siRNA sense strand
aggagacugaagaagaaua

SEQ ID NO: 2363452 - RNA, 19 nt, Homo sapiens
  misc_RNA (1)...(19): siRNA sense strand
aacgaaggagaaagaaaua

SEQ ID NO: 2363453 - RNA, 19 nt, Homo sapiens
  misc_RNA (1)...(19): siRNA sense strand
ccaccaggguauagcaaag

SEQ ID NO: 2363454 - RNA, 19 nt, Homo sapiens
  misc_RNA (1)...(19): siRNA sense strand
aauccaaaccggcagcuaa

SEQ ID NO: 2363455 - RNA, 19 nt, Homo sapiens
  misc_RNA (1)...(19): siRNA sense strand
cacagagaagugauagaaa

SEQ ID NO: 2363456 - RNA, 19 nt, Homo sapiens
  misc_RNA (1)...(19): siRNA sense strand
gugauaacggagaagcuuu

SEQ ID NO: 2363457 - RNA, 19 nt, Homo sapiens
  misc_RNA (1)...(19): siRNA sense strand
gaaagaaauacaaacagga

SEQ ID NO: 2363458 - RNA, 19 nt, Homo sapiens
  misc_RNA (1)...(19): siRNA sense strand
agagaaagcaugaccaaac

SEQ ID NO: 2363459 - RNA, 19 nt, Homo sapiens
  misc_RNA (1)...(19): siRNA sense strand
aguuccagacuguagaaua

SEQ ID NO: 2363460 - RNA, 19 nt, Homo sapiens
  misc_RNA (1)...(19): siRNA sense strand
gguaauucccagugaggac

SEQ ID NO: 2363461 - RNA, 19 nt, Homo sapiens
  misc_RNA (1)...(19): siRNA sense strand
gagagaaagcaugaccaaa

SEQ ID NO: 2363462 - RNA, 19 nt, Homo sapiens
  misc_RNA (1)...(19): siRNA sense strand
uugaggagacugaagaaga

SEQ ID NO: 2363463 - RNA, 19 nt, Homo sapiens
  misc_RNA (1)...(19): siRNA sense strand
aaguauuccagaagagcuu

SEQ ID NO: 2363464 - RNA, 19 nt, Homo sapiens
  misc_RNA (1)...(19): siRNA sense strand
acaagaugccaaagaaauc

SEQ ID NO: 2363465 - RNA, 19 nt, Homo sapiens
  misc_RNA (1)...(19): siRNA sense strand
aagaaauacaaacaggaca

SEQ ID NO: 2363466 - RNA, 19 nt, Homo sapiens
  misc_RNA (1)...(19): siRNA sense strand
ggaccauuuaccuguggaa

SEQ ID NO: 2363467 - RNA, 19 nt, Homo sapiens
  misc_RNA (1)...(19): siRNA sense strand
gauccaaagagaaagugau

SEQ ID NO: 2363468 - RNA, 19 nt, Homo sapiens
  misc_RNA (1)...(19): siRNA sense strand
auccaaagagaaagugauu

SEQ ID NO: 2363469 - RNA, 19 nt, Homo sapiens
  misc_RNA (1)...(19): siRNA sense strand
ccuugaaagaagaagaaug

SEQ ID NO: 2363470 - RNA, 19 nt, Homo sapiens
  misc_RNA (1)...(19): siRNA sense strand
auccaaaccggcagcuaaa

SEQ ID NO: 2363471 - RNA, 19 nt, Homo sapiens
  misc_RNA (1)...(19): siRNA sense strand
cccuggacuuauagacaau

SEQ ID NO: 2363472 - RNA, 19 nt, Homo sapiens
  misc_RNA (1)...(19): siRNA sense strand
caucauccuaggacagcua

SEQ ID NO: 2363473 - RNA, 19 nt, Homo sapiens
  misc_RNA (1)...(19): siRNA sense strand
caucagugaaguugagaag

SEQ ID NO: 2363474 - RNA, 19 nt, Homo sapiens
  misc_RNA (1)...(19): siRNA sense strand
gcuugcaaguauuccagaa

SEQ ID NO: 2363475 - RNA, 19 nt, Homo sapiens
  misc_RNA (1)...(19): siRNA sense strand
ugaccaaacagcugccaga

SEQ ID NO: 2363476 - RNA, 19 nt, Homo sapiens
  misc_RNA (1)...(19): siRNA sense strand
acauaagagugauggaaau

SEQ ID NO: 2363477 - RNA, 19 nt, Homo sapiens
  misc_RNA (1)...(19): siRNA sense strand
cagcaugaugggaaagaaa

SEQ ID NO: 2363478 - RNA, 19 nt, Homo sapiens
  misc_RNA (1)...(19): siRNA sense strand
ggaaaggagaccuggaaaa

SEQ ID NO: 2363479 - RNA, 19 nt, Homo sapiens
  misc_RNA (1)...(19): siRNA sense strand
ggugagaagaaguggugua

SEQ ID NO: 2363480 - RNA, 19 nt, Homo sapiens
  misc_RNA (1)...(19): siRNA sense strand
aggacaaagaugaaagcaa

SEQ ID NO: 2363481 - RNA, 19 nt, Homo sapiens
  misc_RNA (1)...(19): siRNA sense strand
acaucauggagaagagaua

SEQ ID NO: 2363482 - RNA, 19 nt, Homo sapiens
  misc_RNA (1)...(19): siRNA sense strand
ggacaggaggcaagagcau

SEQ ID NO: 2363483 - RNA, 19 nt, Homo sapiens
  misc_RNA (1)...(19): siRNA sense strand
agaaagauguuuaagcaga

SEQ ID NO: 2363484 - RNA, 19 nt, Homo sapiens
  misc_RNA (1)...(19): siRNA sense strand
acucgaagaagaagagcaa

SEQ ID NO: 2363485 - RNA, 19 nt, Homo sapiens
  misc_RNA (1)...(19): siRNA sense strand
ucauugaacccgugaagaa

SEQ ID NO: 2363486 - RNA, 19 nt, Homo sapiens
  misc_RNA (1)...(19): siRNA sense strand
gcacaguaauggaaggacu

SEQ ID NO: 2363487 - RNA, 19 nt, Homo sapiens
  misc_RNA (1)...(19): siRNA sense strand
gggagaagugggagaggca

SEQ ID NO: 2363488 - RNA, 19 nt, Homo sapiens
  misc_RNA (1)...(19): siRNA sense strand
acacacacccaaaggcaaa

SEQ ID NO: 2363489 - RNA, 19 nt, Homo sapiens
  misc_RNA (1)...(19): siRNA sense strand
ccaaaggcaaagaaggcaa

SEQ ID NO: 2363490 - RNA, 19 nt, Homo sapiens
  misc_RNA (1)...(19): siRNA sense strand
cugaaagccaugaagaaau

SEQ ID NO: 2363491 - RNA, 19 nt, Homo sapiens
  misc_RNA (1)...(19): siRNA sense strand
gcaacaaccccgagccaaa

SEQ ID NO: 2363492 - RNA, 19 nt, Homo sapiens
  misc_RNA (1)...(19): siRNA sense strand
gagaagugggagaggcaca

SEQ ID NO: 2363493 - RNA, 19 nt, Homo sapiens
  misc_RNA (1)...(19): siRNA sense strand
cuucaagauacgcgagauu

SEQ ID NO: 2363494 - RNA, 19 nt, Homo sapiens
  misc_RNA (1)...(19): siRNA sense strand
aaauauugcacuggagaaa

SEQ ID NO: 2363495 - RNA, 19 nt, Homo sapiens
  misc_RNA (1)...(19): siRNA sense strand
aggcagaaaguuccagaaa

SEQ ID NO: 2363496 - RNA, 19 nt, Homo sapiens
  misc_RNA (1)...(19): siRNA sense strand
cacaauugcccaugagcua

SEQ ID NO: 2363497 - RNA, 19 nt, Homo sapiens
  misc_RNA (1)...(19): siRNA sense strand
gugggaaacuggagcaagu

SEQ ID NO: 2363498 - RNA, 19 nt, Homo sapiens
  misc_RNA (1)...(19): siRNA sense strand
agcaggaggaagagagauu

SEQ ID NO: 2363499 - RNA, 19 nt, Homo sapiens
  misc_RNA (1)...(19): siRNA sense strand
ccugccagacugugagaaa

SEQ ID NO: 2363500 - RNA, 19 nt, Homo sapiens
  misc_RNA (1)...(19): siRNA sense strand
ggagaagagauaugggaac

SEQ ID NO: 2363501 - RNA, 19 nt, Homo sapiens
  misc_RNA (1)...(19): siRNA sense strand
gcaccaacauuucggcaga

SEQ ID NO: 2363502 - RNA, 19 nt, Homo sapiens
  misc_RNA (1)...(19): siRNA sense strand
agagauggguggagacacu

SEQ ID NO: 2363503 - RNA, 19 nt, Homo sapiens
  misc_RNA (1)...(19): siRNA sense strand
uuaccugaauggaggguuu

SEQ ID NO: 2363504 - RNA, 19 nt, Homo sapiens
  misc_RNA (1)...(19): siRNA sense strand
agccagaacccucaggaaa

SEQ ID NO: 2363505 - RNA, 19 nt, Homo sapiens
  misc_RNA (1)...(19): siRNA sense strand
aagaaaggcuugaagucca

SEQ ID NO: 2363506 - RNA, 19 nt, Homo sapiens
  misc_RNA (1)...(19): siRNA sense strand
acugaaagccaugaagaaa

SEQ ID NO: 2363507 - RNA, 19 nt, Homo sapiens
  misc_RNA (1)...(19): siRNA sense strand
agaaaggcuugaaguccaa

SEQ ID NO: 2363508 - RNA, 19 nt, Homo sapiens
  misc_RNA (1)...(19): siRNA sense strand
ccaaugagucuguguggau

SEQ ID NO: 2363509 - RNA, 19 nt, Homo sapiens
  misc_RNA (1)...(19): siRNA sense strand
ccucaggaaagacggcaaa

SEQ ID NO: 2363510 - RNA, 19 nt, Homo sapiens
  misc_RNA (1)...(19): siRNA sense strand
ugucauauggcuugcacua

SEQ ID NO: 2363511 - RNA, 19 nt, Homo sapiens
  misc_RNA (1)...(19): siRNA sense strand
agaaaguuccagaaaccaa

SEQ ID NO: 2363512 - RNA, 19 nt, Homo sapiens
  misc_RNA (1)...(19): siRNA sense strand
ccaaaaggagcaagggaca

SEQ ID NO: 2363513 - RNA, 19 nt, Homo sapiens
  misc_RNA (1)...(19): siRNA sense strand
agaucagaguaccuggaaa

SEQ ID NO: 2363514 - RNA, 19 nt, Homo sapiens
  misc_RNA (1)...(19): siRNA sense strand
ccaagugcagcgaggagua

SEQ ID NO: 2363515 - RNA, 19 nt, Homo sapiens
  misc_RNA (1)...(19): siRNA sense strand
ugucuguauuaauggcaua

SEQ ID NO: 2363516 - RNA, 19 nt, Homo sapiens
  misc_RNA (1)...(19): siRNA sense strand
cuggcuggaaagugggaaa

SEQ ID NO: 2363517 - RNA, 19 nt, Homo sapiens
  misc_RNA (1)...(19): siRNA sense strand
cacugaaagccaugaagaa

SEQ ID NO: 2363518 - RNA, 19 nt, Homo sapiens
  misc_RNA (1)...(19): siRNA sense strand
gcucagaggacugggugua

SEQ ID NO: 2363519 - RNA, 19 nt, Homo sapiens
  misc_RNA (1)...(19): siRNA sense strand
ccaaugggagacagaagaa

SEQ ID NO: 2363520 - RNA, 19 nt, Homo sapiens
  misc_RNA (1)...(19): siRNA sense strand
caacaugaaccaaacaaaa

SEQ ID NO: 2363521 - RNA, 19 nt, Homo sapiens
  misc_RNA (1)...(19): siRNA sense strand
acgagcagcaggaggaaga

SEQ ID NO: 2363522 - RNA, 19 nt, Homo sapiens
  misc_RNA (1)...(19): siRNA sense strand
gagcaagggacauaagagu

SEQ ID NO: 2363523 - RNA, 19 nt, Homo sapiens
  misc_RNA (1)...(19): siRNA sense strand
ggaaauugagggagcugga

SEQ ID NO: 2363524 - RNA, 19 nt, Homo sapiens
  misc_RNA (1)...(19): siRNA sense strand
agaaagauggccuugacaa

SEQ ID NO: 2363525 - RNA, 19 nt, Homo sapiens
  misc_RNA (1)...(19): siRNA sense strand
ccaguggaaaguacagaaa

SEQ ID NO: 2363526 - RNA, 19 nt, Homo sapiens
  misc_RNA (1)...(19): siRNA sense strand
cacacuggaucgucggaaa

SEQ ID NO: 2363527 - RNA, 19 nt, Homo sapiens
  misc_RNA (1)...(19): siRNA sense strand
ggaaaaggguggagugcac

SEQ ID NO: 2363528 - RNA, 19 nt, Homo sapiens
  misc_RNA (1)...(19): siRNA sense strand
agaagagcaaggacugaaa

SEQ ID NO: 2363529 - RNA, 19 nt, Homo sapiens
  misc_RNA (1)...(19): siRNA sense strand
ccuacaagaaugaacucua

SEQ ID NO: 2363530 - RNA, 19 nt, Homo sapiens
  misc_RNA (1)...(19): siRNA sense strand
caguggaacgggaacuaua

SEQ ID NO: 2363531 - RNA, 19 nt, Homo sapiens
  misc_RNA (1)...(19): siRNA sense strand
aggaaaggagaccuggaaa

SEQ ID NO: 2363532 - RNA, 19 nt, Homo sapiens
  misc_RNA (1)...(19): siRNA sense strand
auaccaugggagugagaau

SEQ ID NO: 2363533 - RNA, 19 nt, Homo sapiens
  misc_RNA (1)...(19): siRNA sense strand
ggaaauauugcacuggaga

SEQ ID NO: 2363534 - RNA, 19 nt, Homo sapiens
  misc_RNA (1)...(19): siRNA sense strand
cauaagagugauggaaauu

SEQ ID NO: 2363535 - RNA, 19 nt, Homo sapiens
  misc_RNA (1)...(19): siRNA sense strand
uggagaagagauaugggaa

SEQ ID NO: 2363536 - RNA, 19 nt, Homo sapiens
  misc_RNA (1)...(19): siRNA sense strand
agaaggaaggaucugguua

SEQ ID NO: 2363537 - RNA, 19 nt, Homo sapiens
  misc_RNA (1)...(19): siRNA sense strand
aaauugagggagcuggaaa

SEQ ID NO: 2363538 - RNA, 19 nt, Homo sapiens
  misc_RNA (1)...(19): siRNA sense strand
uggacagagugcaguguga

SEQ ID NO: 2363539 - RNA, 19 nt, Homo sapiens
  misc_RNA (1)...(19): siRNA sense strand
ugacaaauauagauggcaa

SEQ ID NO: 2363540 - RNA, 19 nt, Homo sapiens
  misc_RNA (1)...(19): siRNA sense strand
ggcaaaagcauuagugaaa

SEQ ID NO: 2363541 - RNA, 19 nt, Homo sapiens
  misc_RNA (1)...(19): siRNA sense strand
guauuagccaccagagaaa

SEQ ID NO: 2363542 - RNA, 19 nt, Homo sapiens
  misc_RNA (1)...(19): siRNA sense strand
ggccagaaacuguggucaa

SEQ ID NO: 2363543 - RNA, 19 nt, Homo sapiens
  misc_RNA (1)...(19): siRNA sense strand
agacauucacagaguuaaa

SEQ ID NO: 2363544 - RNA, 19 nt, Homo sapiens
  misc_RNA (1)...(19): siRNA sense strand
ccaacaugucucuaagaaa

SEQ ID NO: 2363545 - RNA, 19 nt, Homo sapiens
  misc_RNA (1)...(19): siRNA sense strand
gacaaauauagauggcaaa

SEQ ID NO: 2363546 - RNA, 19 nt, Homo sapiens
  misc_RNA (1)...(19): siRNA sense strand
ucuaaaugcgggaagaaau

SEQ ID NO: 2363547 - RNA, 19 nt, Homo sapiens
  misc_RNA (1)...(19): siRNA sense strand
aaacauauucagaggucau

SEQ ID NO: 2363548 - RNA, 19 nt, Homo sapiens
  misc_RNA (1)...(19): siRNA sense strand
gagaaaagcuauaagucca

SEQ ID NO: 2363549 - RNA, 19 nt, Homo sapiens
  misc_RNA (1)...(19): siRNA sense strand
uggcacaggguuaggaaaa

SEQ ID NO: 2363550 - RNA, 19 nt, Homo sapiens
  misc_RNA (1)...(19): siRNA sense strand
uguaagcuucauugagaaa

SEQ ID NO: 2363551 - RNA, 19 nt, Homo sapiens
  misc_RNA (1)...(19): siRNA sense strand
caugaugguuggaugguca

SEQ ID NO: 2363552 - RNA, 19 nt, Homo sapiens
  misc_RNA (1)...(19): siRNA sense strand
ggacacaaauuucuggguu

SEQ ID NO: 2363553 - RNA, 19 nt, Homo sapiens
  misc_RNA (1)...(19): siRNA sense strand
ggucaaugcacacaaacau

SEQ ID NO: 2363554 - RNA, 19 nt, Homo sapiens
  misc_RNA (1)...(19): siRNA sense strand
auaacagacugaagagugu

SEQ ID NO: 2363555 - RNA, 19 nt, Homo sapiens
  misc_RNA (1)...(19): siRNA sense strand
caugauucucuguggguga

SEQ ID NO: 2363556 - RNA, 19 nt, Homo sapiens
  misc_RNA (1)...(19): siRNA sense strand
cugaaagcucuccuggaaa

SEQ ID NO: 2363557 - RNA, 19 nt, Homo sapiens
  misc_RNA (1)...(19): siRNA sense strand
ucucaggaugcuaggucaa

SEQ ID NO: 2363558 - RNA, 19 nt, Homo sapiens
  misc_RNA (1)...(19): siRNA sense strand
ccaaucuagagaaggaaga

SEQ ID NO: 2363559 - RNA, 19 nt, Homo sapiens
  misc_RNA (1)...(19): siRNA sense strand
uggcaaaagcauuagugaa

SEQ ID NO: 2363560 - RNA, 19 nt, Homo sapiens
  misc_RNA (1)...(19): siRNA sense strand
cugcagacauucacagagu

SEQ ID NO: 2363561 - RNA, 19 nt, Homo sapiens
  misc_RNA (1)...(19): siRNA sense strand
cguucaucuccacgaauua

SEQ ID NO: 2363562 - RNA, 19 nt, Homo sapiens
  misc_RNA (1)...(19): siRNA sense strand
cagguaucauaaacugaaa

SEQ ID NO: 2363563 - RNA, 19 nt, Homo sapiens
  misc_RNA (1)...(19): siRNA sense strand
uggaauggcccaaggauag

SEQ ID NO: 2363564 - RNA, 19 nt, Homo sapiens
  misc_RNA (1)...(19): siRNA sense strand
gcccaaggauaggcguaaa

SEQ ID NO: 2363565 - RNA, 19 nt, Homo sapiens
  misc_RNA (1)...(19): siRNA sense strand
uaagaaagguucccgcaga

SEQ ID NO: 2363566 - RNA, 19 nt, Homo sapiens
  misc_RNA (1)...(19): siRNA sense strand
acaacacacccuuggaaca

SEQ ID NO: 2363567 - RNA, 19 nt, Homo sapiens
  misc_RNA (1)...(19): siRNA sense strand
gaugcuaggucaaugcaca

SEQ ID NO: 2363568 - RNA, 19 nt, Homo sapiens
  misc_RNA (1)...(19): siRNA sense strand
ccaccagagaaauguauga

SEQ ID NO: 2363569 - RNA, 19 nt, Homo sapiens
  misc_RNA (1)...(19): siRNA sense strand
gaagaguguaacuugguau

SEQ ID NO: 2363570 - RNA, 19 nt, Homo sapiens
  misc_RNA (1)...(19): siRNA sense strand
ggaaaacaacccaagaaca

SEQ ID NO: 2363571 - RNA, 19 nt, Homo sapiens
  misc_RNA (1)...(19): siRNA sense strand
acauagaaaaccugacaau

SEQ ID NO: 2363572 - RNA, 19 nt, Homo sapiens
  misc_RNA (1)...(19): siRNA sense strand
ugacaauaucaaaugcaca

SEQ ID NO: 2363573 - RNA, 19 nt, Homo sapiens
  misc_RNA (1)...(19): siRNA sense strand
ggaucugagucaaaaucua

SEQ ID NO: 2363574 - RNA, 19 nt, Homo sapiens
  misc_RNA (1)...(19): siRNA sense strand
guucagagcugccaggaag

SEQ ID NO: 2363575 - RNA, 19 nt, Homo sapiens
  misc_RNA (1)...(19): siRNA sense strand
cagaagaaagggaacugau

SEQ ID NO: 2363576 - RNA, 19 nt, Homo sapiens
  misc_RNA (1)...(19): siRNA sense strand
gggugaagaaugaauugau

SEQ ID NO: 2363577 - RNA, 19 nt, Homo sapiens
  misc_RNA (1)...(19): siRNA sense strand
gguauuuacuggcaggucu

SEQ ID NO: 2363578 - RNA, 19 nt, Homo sapiens
  misc_RNA (1)...(19): siRNA sense strand
ucucagguauuuagaucuu

SEQ ID NO: 2363579 - RNA, 19 nt, Homo sapiens
  misc_RNA (1)...(19): siRNA sense strand
cucuaaaugcgggaagaaa

SEQ ID NO: 2363580 - RNA, 19 nt, Homo sapiens
  misc_RNA (1)...(19): siRNA sense strand
cauugugguuauuaugcua

SEQ ID NO: 2363581 - RNA, 19 nt, Homo sapiens
  misc_RNA (1)...(19): siRNA sense strand
ccaacuugcaugugagaca

SEQ ID NO: 2363582 - RNA, 19 nt, Homo sapiens
  misc_RNA (1)...(19): siRNA sense strand
cugccgagcuggaacgcaa

SEQ ID NO: 2363583 - RNA, 19 nt, Homo sapiens
  misc_RNA (1)...(19): siRNA sense strand
agagacaaaugcagcgaca

SEQ ID NO: 2363584 - RNA, 19 nt, Homo sapiens
  misc_RNA (1)...(19): siRNA sense strand
uggccugguucucgggcaa

SEQ ID NO: 2363585 - RNA, 19 nt, Homo sapiens
  misc_RNA (1)...(19): siRNA sense strand
agacaaaugcagcgacaac

SEQ ID NO: 2363586 - RNA, 19 nt, Homo sapiens
  misc_RNA (1)...(19): siRNA sense strand
cggacccaguggauguaaa

SEQ ID NO: 2363587 - RNA, 19 nt, Homo sapiens
  misc_RNA (1)...(19): siRNA sense strand
gcagaacacuguagccaac

SEQ ID NO: 2363588 - RNA, 19 nt, Homo sapiens
  misc_RNA (1)...(19): siRNA sense strand
cuggaguauucaaggagaa

SEQ ID NO: 2363589 - RNA, 19 nt, Homo sapiens
  misc_RNA (1)...(19): siRNA sense strand
gcacagaggaggaacgaac

SEQ ID NO: 2363590 - RNA, 19 nt, Homo sapiens
  misc_RNA (1)...(19): siRNA sense strand
uguacauauuggagcaaaa

SEQ ID NO: 2363591 - RNA, 19 nt, Homo sapiens
  misc_RNA (1)...(19): siRNA sense strand
gacuaguauuccuggguau

SEQ ID NO: 2363592 - RNA, 19 nt, Homo sapiens
  misc_RNA (1)...(19): siRNA sense strand
gggauuaaguacauuggga

SEQ ID NO: 2363593 - RNA, 19 nt, Homo sapiens
  misc_RNA (1)...(19): siRNA sense strand
cgguaugaucuuuggaugu

SEQ ID NO: 2363594 - RNA, 19 nt, Homo sapiens
  misc_RNA (1)...(19): siRNA sense strand
ggcucugauaaguggauua

SEQ ID NO: 2363595 - RNA, 19 nt, Homo sapiens
  misc_RNA (1)...(19): siRNA sense strand
gauuaaguacauugggacu

SEQ ID NO: 2363596 - RNA, 19 nt, Homo sapiens
  misc_RNA (1)...(19): siRNA sense strand
aaggccaccucuaaggaaa

SEQ ID NO: 2363597 - RNA, 19 nt, Homo sapiens
  misc_RNA (1)...(19): siRNA sense strand
ggacuaguauuccugggua

SEQ ID NO: 2363598 - RNA, 19 nt, Homo sapiens
  misc_RNA (1)...(19): siRNA sense strand
uggaguauucaaggagaaa

SEQ ID NO: 2363599 - RNA, 19 nt, Homo sapiens
  misc_RNA (1)...(19): siRNA sense strand
ugaagagggauuaaguaca

SEQ ID NO: 2363600 - RNA, 19 nt, Homo sapiens
  misc_RNA (1)...(19): siRNA sense strand
gauuagaaguaguugguca

SEQ ID NO: 2363601 - RNA, 19 nt, Homo sapiens
  misc_RNA (1)...(19): siRNA sense strand
acagaaauggacagugaaa

SEQ ID NO: 2363602 - RNA, 19 nt, Homo sapiens
  misc_RNA (1)...(19): siRNA sense strand
gauaaaaucgauuggggaa

SEQ ID NO: 2363603 - RNA, 19 nt, Homo sapiens
  misc_RNA (1)...(19): siRNA sense strand
ccuaaugagaaguguuauu

SEQ ID NO: 2363604 - RNA, 19 nt, Homo sapiens
  misc_RNA (1)...(19): siRNA sense strand
gcauuauuguugugggacu

SEQ ID NO: 2363605 - RNA, 19 nt, Homo sapiens
  misc_RNA (1)...(19): siRNA sense strand
ugauaaaagcaaugacgua

SEQ ID NO: 2363606 - RNA, 19 nt, Homo sapiens
  misc_RNA (1)...(19): siRNA sense strand
caaugacguauuauggaaa

SEQ ID NO: 2363607 - RNA, 19 nt, Homo sapiens
  misc_RNA (1)...(19): siRNA sense strand
cuuuggagcaagaugcaua

SEQ ID NO: 2363608 - RNA, 19 nt, Homo sapiens
  misc_RNA (1)...(19): siRNA sense strand
cacauauggauuagaagua

SEQ ID NO: 2363609 - RNA, 19 nt, Homo sapiens
  misc_RNA (1)...(19): siRNA sense strand
aauacaguuccgagauuua

SEQ ID NO: 2363610 - RNA, 19 nt, Homo sapiens
  misc_RNA (1)...(19): siRNA sense strand
uugugggacugaagggaau

SEQ ID NO: 2363611 - RNA, 19 nt, Homo sapiens
  misc_RNA (1)...(19): siRNA sense strand
ggacgcuucccaagagcaa

SEQ ID NO: 2363612 - RNA, 19 nt, Homo sapiens
  misc_RNA (1)...(19): siRNA sense strand
ggauugucccucagaacau

SEQ ID NO: 2363613 - RNA, 19 nt, Homo sapiens
  misc_RNA (1)...(19): siRNA sense strand
guuaaagagcugaaugaac

SEQ ID NO: 2363614 - RNA, 19 nt, Homo sapiens
  misc_RNA (1)...(19): siRNA sense strand
uggaaaacacauauggauu

SEQ ID NO: 2363615 - RNA, 19 nt, Homo sapiens
  misc_RNA (1)...(19): siRNA sense strand
uguuuguaccauagcuaua

SEQ ID NO: 2363616 - RNA, 19 nt, Homo sapiens
  misc_RNA (1)...(19): siRNA sense strand
gugaagacagaaauggaca

SEQ ID NO: 2363617 - RNA, 19 nt, Homo sapiens
  misc_RNA (1)...(19): siRNA sense strand
uggcaacugcaaugaagaa

SEQ ID NO: 2363618 - RNA, 19 nt, Homo sapiens
  misc_RNA (1)...(19): siRNA sense strand
cuucuugggaggugugauu

SEQ ID NO: 2363619 - RNA, 19 nt, Homo sapiens
  misc_RNA (1)...(19): siRNA sense strand
gggaauaugggucaguaca

SEQ ID NO: 2363620 - RNA, 19 nt, Homo sapiens
  misc_RNA (1)...(19): siRNA sense strand
uuguuaaagagcugaauga

SEQ ID NO: 2363621 - RNA, 19 nt, Homo sapiens
  misc_RNA (1)...(19): siRNA sense strand
aagcauuauuguuguggga

SEQ ID NO: 2363622 - RNA, 19 nt, Homo sapiens
  misc_RNA (1)...(19): siRNA sense strand
aggcaggaguguggaugua

SEQ ID NO: 2363623 - RNA, 19 nt, Homo sapiens
  misc_RNA (1)...(19): siRNA sense strand
caauaugcuuugcugccaa

SEQ ID NO: 2363624 - RNA, 19 nt, Homo sapiens
  misc_RNA (1)...(19): siRNA sense strand
gggacugaagggaaugcua

SEQ ID NO: 2363625 - RNA, 19 nt, Homo sapiens
  misc_RNA (1)...(19): siRNA sense strand
acaugauccaaaaggaaaa

SEQ ID NO: 2363626 - RNA, 19 nt, Homo sapiens
  misc_RNA (1)...(19): siRNA sense strand
uguacagcuuccuugauaa

SEQ ID NO: 2363627 - RNA, 19 nt, Homo sapiens
  misc_RNA (1)...(19): siRNA sense strand
ggauaaaaucgauugggga

SEQ ID NO: 2363628 - RNA, 19 nt, Homo sapiens
  misc_RNA (1)...(19): siRNA sense strand
ccuggauugcaguggauuu

SEQ ID NO: 2363629 - RNA, 19 nt, Homo sapiens
  misc_RNA (1)...(19): siRNA sense strand
gauaauguuggcaguucaa

SEQ ID NO: 2363630 - RNA, 19 nt, Homo sapiens
  misc_RNA (1)...(19): siRNA sense strand
gagccugugaucagcgcaa

SEQ ID NO: 2363631 - RNA, 19 nt, Homo sapiens
  misc_RNA (1)...(19): siRNA sense strand
uaucagcaagugugaacaa

SEQ ID NO: 2363632 - RNA, 19 nt, Homo sapiens
  misc_RNA (1)...(19): siRNA sense strand
gcuuaauucccuauccaau

SEQ ID NO: 2363633 - RNA, 19 nt, Homo sapiens
  misc_RNA (1)...(19): siRNA sense strand
gauuagaaguaguugguca

SEQ ID NO: 2363634 - RNA, 19 nt, Homo sapiens
  misc_RNA (1)...(19): siRNA sense strand
acagaaauggacagugaaa

SEQ ID NO: 2363635 - RNA, 19 nt, Homo sapiens
  misc_RNA (1)...(19): siRNA sense strand
gauaaaaucgauuggggaa

SEQ ID NO: 2363636 - RNA, 19 nt, Homo sapiens
  misc_RNA (1)...(19): siRNA sense strand
ccuaaugagaaguguuauu

SEQ ID NO: 2363637 - RNA, 19 nt, Homo sapiens
  misc_RNA (1)...(19): siRNA sense strand
gcauuauuguugugggacu

SEQ ID NO: 2363638 - RNA, 19 nt, Homo sapiens
  misc_RNA (1)...(19): siRNA sense strand
ugauaaaagcaaugacgua

SEQ ID NO: 2363639 - RNA, 19 nt, Homo sapiens
  misc_RNA (1)...(19): siRNA sense strand
caaugacguauuauggaaa

SEQ ID NO: 2363640 - RNA, 19 nt, Homo sapiens
  misc_RNA (1)...(19): siRNA sense strand
cuuuggagcaagaugcaua

SEQ ID NO: 2363641 - RNA, 19 nt, Homo sapiens
  misc_RNA (1)...(19): siRNA sense strand
cacauauggauuagaagua

SEQ ID NO: 2363642 - RNA, 19 nt, Homo sapiens
  misc_RNA (1)...(19): siRNA sense strand
aauacaguuccgagauuua

SEQ ID NO: 2363643 - RNA, 19 nt, Homo sapiens
  misc_RNA (1)...(19): siRNA sense strand
uugugggacugaagggaau

SEQ ID NO: 2363644 - RNA, 19 nt, Homo sapiens
  misc_RNA (1)...(19): siRNA sense strand
ggacgcuucccaagagcaa

SEQ ID NO: 2363645 - RNA, 19 nt, Homo sapiens
  misc_RNA (1)...(19): siRNA sense strand
ggauugucccucagaacau

SEQ ID NO: 2363646 - RNA, 19 nt, Homo sapiens
  misc_RNA (1)...(19): siRNA sense strand
guuaaagagcugaaugaac

SEQ ID NO: 2363647 - RNA, 19 nt, Homo sapiens
  misc_RNA (1)...(19): siRNA sense strand
uggaaaacacauauggauu

SEQ ID NO: 2363648 - RNA, 19 nt, Homo sapiens
  misc_RNA (1)...(19): siRNA sense strand
uguuuguaccauagcuaua

SEQ ID NO: 2363649 - RNA, 19 nt, Homo sapiens
  misc_RNA (1)...(19): siRNA sense strand
gugaagacagaaauggaca

SEQ ID NO: 2363650 - RNA, 19 nt, Homo sapiens
  misc_RNA (1)...(19): siRNA sense strand
uggcaacugcaaugaagaa

SEQ ID NO: 2363651 - RNA, 19 nt, Homo sapiens
  misc_RNA (1)...(19): siRNA sense strand
cuucuugggaggugugauu

SEQ ID NO: 2363652 - RNA, 19 nt, Homo sapiens
  misc_RNA (1)...(19): siRNA sense strand
gggaauaugggucaguaca

SEQ ID NO: 2363653 - RNA, 19 nt, Homo sapiens
  misc_RNA (1)...(19): siRNA sense strand
uuguuaaagagcugaauga

SEQ ID NO: 2363654 - RNA, 19 nt, Homo sapiens
  misc_RNA (1)...(19): siRNA sense strand
aagcauuauuguuguggga

SEQ ID NO: 2363655 - RNA, 19 nt, Homo sapiens
  misc_RNA (1)...(19): siRNA sense strand
aggcaggaguguggaugua

SEQ ID NO: 2363656 - RNA, 19 nt, Homo sapiens
  misc_RNA (1)...(19): siRNA sense strand
caauaugcuuugcugccaa

SEQ ID NO: 2363657 - RNA, 19 nt, Homo sapiens
  misc_RNA (1)...(19): siRNA sense strand
gggacugaagggaaugcua

SEQ ID NO: 2363658 - RNA, 19 nt, Homo sapiens
  misc_RNA (1)...(19): siRNA sense strand
acaugauccaaaaggaaaa

SEQ ID NO: 2363659 - RNA, 19 nt, Homo sapiens
  misc_RNA (1)...(19): siRNA sense strand
uguacagcuuccuugauaa

SEQ ID NO: 2363660 - RNA, 19 nt, Homo sapiens
  misc_RNA (1)...(19): siRNA sense strand
ggauaaaaucgauugggga

SEQ ID NO: 2363661 - RNA, 19 nt, Homo sapiens
  misc_RNA (1)...(19): siRNA sense strand
ccuggauugcaguggauuu

SEQ ID NO: 2363662 - RNA, 19 nt, Homo sapiens
  misc_RNA (1)...(19): siRNA sense strand
gauaauguuggcaguucaa

SEQ ID NO: 2363663 - RNA, 19 nt, Homo sapiens
  misc_RNA (1)...(19): siRNA sense strand
gagccugugaucagcgcaa

SEQ ID NO: 2363664 - RNA, 19 nt, Homo sapiens
  misc_RNA (1)...(19): siRNA sense strand
uaucagcaagugugaacaa

SEQ ID NO: 2363665 - RNA, 19 nt, Homo sapiens
  misc_RNA (1)...(19): siRNA sense strand
gcuuaauucccuauccaau

SEQ ID NO: 2363666 - RNA, 19 nt, Homo sapiens
  misc_RNA (1)...(19): siRNA sense strand
acgagaaagacaaggacaa

SEQ ID NO: 2363667 - RNA, 19 nt, Homo sapiens
  misc_RNA (1)...(19): siRNA sense strand
acgaaagauaccugaacaa

SEQ ID NO: 2363668 - RNA, 19 nt, Homo sapiens
  misc_RNA (1)...(19): siRNA sense strand
ccaaagguucugagugaga

SEQ ID NO: 2363669 - RNA, 19 nt, Homo sapiens
  misc_RNA (1)...(19): siRNA sense strand
cagucaaggcuccaagaaa

SEQ ID NO: 2363670 - RNA, 19 nt, Homo sapiens
  misc_RNA (1)...(19): siRNA sense strand
ggaaacuaucagaacuuaa

SEQ ID NO: 2363671 - RNA, 19 nt, Homo sapiens
  misc_RNA (1)...(19): siRNA sense strand
cuuaaauguaauuggccaa

SEQ ID NO: 2363672 - RNA, 19 nt, Homo sapiens
  misc_RNA (1)...(19): siRNA sense strand
aagccauaaacgaaagaua

SEQ ID NO: 2363673 - RNA, 19 nt, Homo sapiens
  misc_RNA (1)...(19): siRNA sense strand
acagugaauaugugaacaa

SEQ ID NO: 2363674 - RNA, 19 nt, Homo sapiens
  misc_RNA (1)...(19): siRNA sense strand
guuacgaagagcagaguga

SEQ ID NO: 2363675 - RNA, 19 nt, Homo sapiens
  misc_RNA (1)...(19): siRNA sense strand
gcuccaagaaagugagacu

SEQ ID NO: 2363676 - RNA, 19 nt, Homo sapiens
  misc_RNA (1)...(19): siRNA sense strand
gccaaagccauaaacgaaa

SEQ ID NO: 2363677 - RNA, 19 nt, Homo sapiens
  misc_RNA (1)...(19): siRNA sense strand
cgugguugcuaacgcgaaa

SEQ ID NO: 2363678 - RNA, 19 nt, Homo sapiens
  misc_RNA (1)...(19): siRNA sense strand
guguggaagacgaugggaa

SEQ ID NO: 2363679 - RNA, 19 nt, Homo sapiens
  misc_RNA (1)...(19): siRNA sense strand
augagagauuugauggcaa

SEQ ID NO: 2363680 - RNA, 19 nt, Homo sapiens
  misc_RNA (1)...(19): siRNA sense strand
aaggacaaauccagggaca

SEQ ID NO: 2363681 - RNA, 19 nt, Homo sapiens
  misc_RNA (1)...(19): siRNA sense strand
gaagauauauacuggguuc

SEQ ID NO: 2363682 - RNA, 19 nt, Homo sapiens
  misc_RNA (1)...(19): siRNA sense strand
agccaaagccauaaacgaa

SEQ ID NO: 2363683 - RNA, 19 nt, Homo sapiens
  misc_RNA (1)...(19): siRNA sense strand
uguggaagacgaugggaau

SEQ ID NO: 2363684 - RNA, 19 nt, Homo sapiens
  misc_RNA (1)...(19): siRNA sense strand
ccaagcagcaggaguucaa

SEQ ID NO: 2363685 - RNA, 19 nt, Homo sapiens
  misc_RNA (1)...(19): siRNA sense strand
cccuagaagaggagaacca

SEQ ID NO: 2363686 - RNA, 19 nt, Homo sapiens
  misc_RNA (1)...(19): siRNA sense strand
aaaggagcacuaugagaaa

SEQ ID NO: 2363687 - RNA, 19 nt, Homo sapiens
  misc_RNA (1)...(19): siRNA sense strand
ggagaagcgcagagagccu

SEQ ID NO: 2363688 - RNA, 19 nt, Homo sapiens
  misc_RNA (1)...(19): siRNA sense strand
uugaggaagaacagaauuu

SEQ ID NO: 2363689 - RNA, 19 nt, Homo sapiens
  misc_RNA (1)...(19): siRNA sense strand
agugaagcaaauagccaaa

SEQ ID NO: 2363690 - RNA, 19 nt, Homo sapiens
  misc_RNA (1)...(19): siRNA sense strand
cggcucugcacgagaaaga

SEQ ID NO: 2363691 - RNA, 19 nt, Homo sapiens
  misc_RNA (1)...(19): siRNA sense strand
cuggaugcauacagugaau

SEQ ID NO: 2363692 - RNA, 19 nt, Homo sapiens
  misc_RNA (1)...(19): siRNA sense strand
cagaucuucucuugaggaa

SEQ ID NO: 2363693 - RNA, 19 nt, Homo sapiens
  misc_RNA (1)...(19): siRNA sense strand
aaacacuagcagagaaguu

SEQ ID NO: 2363694 - RNA, 19 nt, Homo sapiens
  misc_RNA (1)...(19): siRNA sense strand
aaggaaacuaucagaacuu

SEQ ID NO: 2363695 - RNA, 19 nt, Homo sapiens
  misc_RNA (1)...(19): siRNA sense strand
uggccaagcagcaggaguu

SEQ ID NO: 2363696 - RNA, 19 nt, Homo sapiens
  misc_RNA (1)...(19): siRNA sense strand
gcagguuguaagaagauau

SEQ ID NO: 2363697 - RNA, 19 nt, Homo sapiens
  misc_RNA (1)...(19): siRNA sense strand
gugaaaagaacuacguaga

SEQ ID NO: 2363698 - RNA, 19 nt, Homo sapiens
  misc_RNA (1)...(19): siRNA sense strand
acuuaaauguaauuggcca

SEQ ID NO: 2363699 - RNA, 19 nt, Homo sapiens
  misc_RNA (1)...(19): siRNA sense strand
gagaaagacaaggacaaau

SEQ ID NO: 2363700 - RNA, 19 nt, Homo sapiens
  misc_RNA (1)...(19): siRNA sense strand
gaguggaggagcugguuca

SEQ ID NO: 2363701 - RNA, 19 nt, Homo sapiens
  misc_RNA (1)...(19): siRNA sense strand
agugggacuccguggaaau

SEQ ID NO: 2363702 - RNA, 19 nt, Homo sapiens
  misc_RNA (1)...(19): siRNA sense strand
ggaugaagguggaaacagc

SEQ ID NO: 2363703 - RNA, 19 nt, Homo sapiens
  misc_RNA (1)...(19): siRNA sense strand
agaggauuuuggagcaaua

SEQ ID NO: 2363704 - RNA, 19 nt, Homo sapiens
  misc_RNA (1)...(19): siRNA sense strand
gggcugguucuguguggaa

SEQ ID NO: 2363705 - RNA, 19 nt, Homo sapiens
  misc_RNA (1)...(19): siRNA sense strand
cgaaacacuagcagagaag

SEQ ID NO: 2363706 - RNA, 19 nt, Homo sapiens
  misc_RNA (1)...(19): siRNA sense strand
aggacgaagaccagaagga

SEQ ID NO: 2363707 - RNA, 19 nt, Homo sapiens
  misc_RNA (1)...(19): siRNA sense strand
ccguggaaaugauaggcga

SEQ ID NO: 2363708 - RNA, 19 nt, Homo sapiens
  misc_RNA (1)...(19): siRNA sense strand
ucuacagccugaugaugaa

SEQ ID NO: 2363709 - RNA, 19 nt, Homo sapiens
  misc_RNA (1)...(19): siRNA sense strand
ucaucaguguggagacuca

SEQ ID NO: 2363710 - RNA, 19 nt, Homo sapiens
  misc_RNA (1)...(19): siRNA sense strand
cagguuguaagaagauaua

SEQ ID NO: 2363711 - RNA, 19 nt, Homo sapiens
  misc_RNA (1)...(19): siRNA sense strand
acacuagcagagaaguuaa

SEQ ID NO: 2363712 - RNA, 19 nt, Homo sapiens
  misc_RNA (1)...(19): siRNA sense strand
acagaggagagauuguuaa

SEQ ID NO: 2363713 - RNA, 19 nt, Homo sapiens
  misc_RNA (1)...(19): siRNA sense strand
uggaagacgaugggaauca

SEQ ID NO: 2363714 - RNA, 19 nt, Homo sapiens
  misc_RNA (1)...(19): siRNA sense strand
agugagaggaagcugaaga

SEQ ID NO: 2363715 - RNA, 19 nt, Homo sapiens
  misc_RNA (1)...(19): siRNA sense strand
caggacaugcugaagaaca

SEQ ID NO: 2363716 - RNA, 19 nt, Homo sapiens
  misc_RNA (1)...(19): siRNA sense strand
ccacagaagagcagcccaa

SEQ ID NO: 2363717 - RNA, 19 nt, Homo sapiens
  misc_RNA (1)...(19): siRNA sense strand
aggaagaagaagaggagga

SEQ ID NO: 2363718 - RNA, 19 nt, Homo sapiens
  misc_RNA (1)...(19): siRNA sense strand
aagaagaggaggaggacga

SEQ ID NO: 2363719 - RNA, 19 nt, Homo sapiens
  misc_RNA (1)...(19): siRNA sense strand
aagaagaagaggaggagga

SEQ ID NO: 2363720 - RNA, 19 nt, Homo sapiens
  misc_RNA (1)...(19): siRNA sense strand
acgaugacgaggaggaaaa

SEQ ID NO: 2363721 - RNA, 19 nt, Homo sapiens
  misc_RNA (1)...(19): siRNA sense strand
gggaggaagaagaagagga

SEQ ID NO: 2363722 - RNA, 19 nt, Homo sapiens
  misc_RNA (1)...(19): siRNA sense strand
ucaggaaagccaagcgaga

SEQ ID NO: 2363723 - RNA, 19 nt, Homo sapiens
  misc_RNA (1)...(19): siRNA sense strand
ugacgggcuccgaggacua

SEQ ID NO: 2363724 - RNA, 19 nt, Homo sapiens
  misc_RNA (1)...(19): siRNA sense strand
ggacagguggugaagcuga

SEQ ID NO: 2363725 - RNA, 19 nt, Homo sapiens
  misc_RNA (1)...(19): siRNA sense strand
cagacagaccuuuccgaau

SEQ ID NO: 2363726 - RNA, 19 nt, Homo sapiens
  misc_RNA (1)...(19): siRNA sense strand
aggaggaggacgaugacga

SEQ ID NO: 2363727 - RNA, 19 nt, Homo sapiens
  misc_RNA (1)...(19): siRNA sense strand
aggacgaugacgaggagga

SEQ ID NO: 2363728 - RNA, 19 nt, Homo sapiens
  misc_RNA (1)...(19): siRNA sense strand
ucacauggacugcuggaga

SEQ ID NO: 2363729 - RNA, 19 nt, Homo sapiens
  misc_RNA (1)...(19): siRNA sense strand
cagaaaugcaagaugaaaa

SEQ ID NO: 2363730 - RNA, 19 nt, Homo sapiens
  misc_RNA (1)...(19): siRNA sense strand
acacagaauuuauuggcuu

SEQ ID NO: 2363731 - RNA, 19 nt, Homo sapiens
  misc_RNA (1)...(19): siRNA sense strand
aggaagcagaagagcagua

SEQ ID NO: 2363732 - RNA, 19 nt, Homo sapiens
  misc_RNA (1)...(19): siRNA sense strand
acugcaauguggaugaaaa

SEQ ID NO: 2363733 - RNA, 19 nt, Homo sapiens
  misc_RNA (1)...(19): siRNA sense strand
aguccuggaauuagagaaa

SEQ ID NO: 2363734 - RNA, 19 nt, Homo sapiens
  misc_RNA (1)...(19): siRNA sense strand
cgaaggagaaggaucgaga

SEQ ID NO: 2363735 - RNA, 19 nt, Homo sapiens
  misc_RNA (1)...(19): siRNA sense strand
caauuauaacggaggggaa

SEQ ID NO: 2363736 - RNA, 19 nt, Homo sapiens
  misc_RNA (1)...(19): siRNA sense strand
ugaaauggaagaaggacca

SEQ ID NO: 2363737 - RNA, 19 nt, Homo sapiens
  misc_RNA (1)...(19): siRNA sense strand
uccuggaauuagagaaaga

SEQ ID NO: 2363738 - RNA, 19 nt, Homo sapiens
  misc_RNA (1)...(19): siRNA sense strand
cuaccugacccgaaggaga

SEQ ID NO: 2363739 - RNA, 19 nt, Homo sapiens
  misc_RNA (1)...(19): siRNA sense strand
ggaagaaggaccaccgacu

SEQ ID NO: 2363740 - RNA, 19 nt, Homo sapiens
  misc_RNA (1)...(19): siRNA sense strand
gaaauuuccuccaugcgaa

SEQ ID NO: 2363741 - RNA, 19 nt, Homo sapiens
  misc_RNA (1)...(19): siRNA sense strand
cuaacuacaucgauccgaa

SEQ ID NO: 2363742 - RNA, 19 nt, Homo sapiens
  misc_RNA (1)...(19): siRNA sense strand
uggaauuagagaaagaguu

SEQ ID NO: 2363743 - RNA, 19 nt, Homo sapiens
  misc_RNA (1)...(19): siRNA sense strand
aguccuggaauuagagaaa

SEQ ID NO: 2363744 - RNA, 19 nt, Homo sapiens
  misc_RNA (1)...(19): siRNA sense strand
cgaaggagaaggaucgaga

SEQ ID NO: 2363745 - RNA, 19 nt, Homo sapiens
  misc_RNA (1)...(19): siRNA sense strand
caauuauaacggaggggaa

SEQ ID NO: 2363746 - RNA, 19 nt, Homo sapiens
  misc_RNA (1)...(19): siRNA sense strand
ugaaauggaagaaggacca

SEQ ID NO: 2363747 - RNA, 19 nt, Homo sapiens
  misc_RNA (1)...(19): siRNA sense strand
uccuggaauuagagaaaga

SEQ ID NO: 2363748 - RNA, 19 nt, Homo sapiens
  misc_RNA (1)...(19): siRNA sense strand
cuaccugacccgaaggaga

SEQ ID NO: 2363749 - RNA, 19 nt, Homo sapiens
  misc_RNA (1)...(19): siRNA sense strand
ggaagaaggaccaccgacu

SEQ ID NO: 2363750 - RNA, 19 nt, Homo sapiens
  misc_RNA (1)...(19): siRNA sense strand
gaaauuuccuccaugcgaa

SEQ ID NO: 2363751 - RNA, 19 nt, Homo sapiens
  misc_RNA (1)...(19): siRNA sense strand
cuaacuacaucgauccgaa

SEQ ID NO: 2363752 - RNA, 19 nt, Homo sapiens
  misc_RNA (1)...(19): siRNA sense strand
uggaauuagagaaagaguu

SEQ ID NO: 2363753 - RNA, 19 nt, Homo sapiens
  misc_RNA (1)...(19): siRNA sense strand
aggugaacuuccaggagua

SEQ ID NO: 2363754 - RNA, 19 nt, Homo sapiens
  misc_RNA (1)...(19): siRNA sense strand
uggaagacuuggaccggaa

SEQ ID NO: 2363755 - RNA, 19 nt, Homo sapiens
  misc_RNA (1)...(19): siRNA sense strand
ggaacaaggaccaggaggu

SEQ ID NO: 2363756 - RNA, 19 nt, Homo sapiens
  misc_RNA (1)...(19): siRNA sense strand
gcugaaauugcaaggcuga

SEQ ID NO: 2363757 - RNA, 19 nt, Homo sapiens
  misc_RNA (1)...(19): siRNA sense strand
ugagcaagaaggagcugaa

SEQ ID NO: 2363758 - RNA, 19 nt, Homo sapiens
  misc_RNA (1)...(19): siRNA sense strand
gcucgaagcugcaggaugc

SEQ ID NO: 2363759 - RNA, 19 nt, Homo sapiens
  misc_RNA (1)...(19): siRNA sense strand
gagagaagcugcagcguca

SEQ ID NO: 2363760 - RNA, 19 nt, Homo sapiens
  misc_RNA (1)...(19): siRNA sense strand
gaacaaacccugcggcaca

SEQ ID NO: 2363761 - RNA, 19 nt, Homo sapiens
  misc_RNA (1)...(19): siRNA sense strand
uggagugagagaugagaaa

SEQ ID NO: 2363762 - RNA, 19 nt, Homo sapiens
  misc_RNA (1)...(19): siRNA sense strand
acaagaugaugguggccua

SEQ ID NO: 2363763 - RNA, 19 nt, Homo sapiens
  misc_RNA (1)...(19): siRNA sense strand
agugcaaggaugugaacaa

SEQ ID NO: 2363764 - RNA, 19 nt, Homo sapiens
  misc_RNA (1)...(19): siRNA sense strand
cagacuggguuguagggaa

SEQ ID NO: 2363765 - RNA, 19 nt, Homo sapiens
  misc_RNA (1)...(19): siRNA sense strand
cuacgaugcagaugagcaa

SEQ ID NO: 2363766 - RNA, 19 nt, Homo sapiens
  misc_RNA (1)...(19): siRNA sense strand
uggcagaaauccaucguga

SEQ ID NO: 2363767 - RNA, 19 nt, Homo sapiens
  misc_RNA (1)...(19): siRNA sense strand
gcaaguacugucuggguga

SEQ ID NO: 2363768 - RNA, 19 nt, Homo sapiens
  misc_RNA (1)...(19): siRNA sense strand
aggagaaggcgcuggacga

SEQ ID NO: 2363769 - RNA, 19 nt, Homo sapiens
  misc_RNA (1)...(19): siRNA sense strand
gggaaauucuacaagugga

SEQ ID NO: 2363770 - RNA, 19 nt, Homo sapiens
  misc_RNA (1)...(19): siRNA sense strand
accaugacggcgugggaaa

SEQ ID NO: 2363771 - RNA, 19 nt, Homo sapiens
  misc_RNA (1)...(19): siRNA sense strand
cuuucagcauggagucaaa

SEQ ID NO: 2363772 - RNA, 19 nt, Homo sapiens
  misc_RNA (1)...(19): siRNA sense strand
cugaagagugcaaggaugu

SEQ ID NO: 2363773 - RNA, 19 nt, Homo sapiens
  misc_RNA (1)...(19): siRNA sense strand
gcggaaugugugagcgcga

SEQ ID NO: 2363774 - RNA, 19 nt, Homo sapiens
  misc_RNA (1)...(19): siRNA sense strand
gcucacgugccuagcggaa

SEQ ID NO: 2363775 - RNA, 19 nt, Homo sapiens
  misc_RNA (1)...(19): siRNA sense strand
agacuggguuguagggaac

SEQ ID NO: 2363776 - RNA, 19 nt, Homo sapiens
  misc_RNA (1)...(19): siRNA sense strand
ggaaugugugagcgcgaga

SEQ ID NO: 2363777 - RNA, 19 nt, Homo sapiens
  misc_RNA (1)...(19): siRNA sense strand
ccugaagagugcaaggaug

SEQ ID NO: 2363778 - RNA, 19 nt, Homo sapiens
  misc_RNA (1)...(19): siRNA sense strand
caacagaaaugccugguga

SEQ ID NO: 2363779 - RNA, 19 nt, Homo sapiens
  misc_RNA (1)...(19): siRNA sense strand
agaagaaugccguggacca

SEQ ID NO: 2363780 - RNA, 19 nt, Homo sapiens
  misc_RNA (1)...(19): siRNA sense strand
gaugagaagaucaagccua

SEQ ID NO: 2363781 - RNA, 19 nt, Homo sapiens
  misc_RNA (1)...(19): siRNA sense strand
uugcagaugagaagaucaa

SEQ ID NO: 2363782 - RNA, 19 nt, Homo sapiens
  misc_RNA (1)...(19): siRNA sense strand
ucgucaaagaaguagaauu

SEQ ID NO: 2363783 - RNA, 19 nt, Homo sapiens
  misc_RNA (1)...(19): siRNA sense strand
acuucuaagacaagaccaa

SEQ ID NO: 2363784 - RNA, 19 nt, Homo sapiens
  misc_RNA (1)...(19): siRNA sense strand
uguuguacggguagaagaa

SEQ ID NO: 2363785 - RNA, 19 nt, Homo sapiens
  misc_RNA (1)...(19): siRNA sense strand
gucuauacgagcagugaau

SEQ ID NO: 2363786 - RNA, 19 nt, Homo sapiens
  misc_RNA (1)...(19): siRNA sense strand
caaguguguuguacgggua

SEQ ID NO: 2363787 - RNA, 19 nt, Homo sapiens
  misc_RNA (1)...(19): siRNA sense strand
agugaauugcagaugagaa

SEQ ID NO: 2363788 - RNA, 19 nt, Homo sapiens
  misc_RNA (1)...(19): siRNA sense strand
ggauguuucaaauaggaau

SEQ ID NO: 2363789 - RNA, 19 nt, Homo sapiens
  misc_RNA (1)...(19): siRNA sense strand
aggaggagaccgaaaacaa

SEQ ID NO: 2363790 - RNA, 19 nt, Homo sapiens
  misc_RNA (1)...(19): siRNA sense strand
ugcuuuaagugaauggaau

SEQ ID NO: 2363791 - RNA, 19 nt, Homo sapiens
  misc_RNA (1)...(19): siRNA sense strand
ugguguuagagaaguuaua

SEQ ID NO: 2363792 - RNA, 19 nt, Homo sapiens
  misc_RNA (1)...(19): siRNA sense strand
ggcgaggaggagaccgaaa

SEQ ID NO: 2363793 - RNA, 19 nt, Homo sapiens
  misc_RNA (1)...(19): siRNA sense strand
gaaaacaacgacagcgaga

SEQ ID NO: 2363794 - RNA, 19 nt, Homo sapiens
  misc_RNA (1)...(19): siRNA sense strand
acagcgagaccgcggagaa

SEQ ID NO: 2363795 - RNA, 19 nt, Homo sapiens
  misc_RNA (1)...(19): siRNA sense strand
ccgaaaacaacgacagcga

SEQ ID NO: 2363796 - RNA, 19 nt, Homo sapiens
  misc_RNA (1)...(19): siRNA sense strand
ugaaaguguuagauuggca

SEQ ID NO: 2363797 - RNA, 19 nt, Homo sapiens
  misc_RNA (1)...(19): siRNA sense strand
agguagaacaugagaagca

SEQ ID NO: 2363798 - RNA, 19 nt, Homo sapiens
  misc_RNA (1)...(19): siRNA sense strand
caguacaagugaaggcaca

SEQ ID NO: 2363799 - RNA, 19 nt, Homo sapiens
  misc_RNA (1)...(19): siRNA sense strand
acuccaggcugauaggaaa

SEQ ID NO: 2363800 - RNA, 19 nt, Homo sapiens
  misc_RNA (1)...(19): siRNA sense strand
cagcaaaaggagaaggaga

SEQ ID NO: 2363801 - RNA, 19 nt, Homo sapiens
  misc_RNA (1)...(19): siRNA sense strand
ugaugagauuucuggucaa

SEQ ID NO: 2363802 - RNA, 19 nt, Homo sapiens
  misc_RNA (1)...(19): siRNA sense strand
ugaacaaacugcaagagga

SEQ ID NO: 2363803 - RNA, 19 nt, Homo sapiens
  misc_RNA (1)...(19): siRNA sense strand
ggauuuacuggcuggguca

SEQ ID NO: 2363804 - RNA, 19 nt, Homo sapiens
  misc_RNA (1)...(19): siRNA sense strand
ccguaagaagagacgcaau

SEQ ID NO: 2363805 - RNA, 19 nt, Homo sapiens
  misc_RNA (1)...(19): siRNA sense strand
cuagaggaggagaagaauu

SEQ ID NO: 2363806 - RNA, 19 nt, Homo sapiens
  misc_RNA (1)...(19): siRNA sense strand
gcggaaucugguggagaaa

SEQ ID NO: 2363807 - RNA, 19 nt, Homo sapiens
  misc_RNA (1)...(19): siRNA sense strand
acaaacugcaagaggaagu

SEQ ID NO: 2363808 - RNA, 19 nt, Homo sapiens
  misc_RNA (1)...(19): siRNA sense strand
cugaagaccaagcagaaca

SEQ ID NO: 2363809 - RNA, 19 nt, Homo sapiens
  misc_RNA (1)...(19): siRNA sense strand
cccugaagaccaagcagaa

SEQ ID NO: 2363810 - RNA, 19 nt, Homo sapiens
  misc_RNA (1)...(19): siRNA sense strand
gggucaugagggaacggaa

SEQ ID NO: 2363811 - RNA, 19 nt, Homo sapiens
  misc_RNA (1)...(19): siRNA sense strand
agguagaacaugagaagca

SEQ ID NO: 2363812 - RNA, 19 nt, Homo sapiens
  misc_RNA (1)...(19): siRNA sense strand
caguacaagugaaggcaca

SEQ ID NO: 2363813 - RNA, 19 nt, Homo sapiens
  misc_RNA (1)...(19): siRNA sense strand
cagcaaaaggagaaggaga

SEQ ID NO: 2363814 - RNA, 19 nt, Homo sapiens
  misc_RNA (1)...(19): siRNA sense strand
ugaacaaacugcaagagga

SEQ ID NO: 2363815 - RNA, 19 nt, Homo sapiens
  misc_RNA (1)...(19): siRNA sense strand
ggauuuacuggcuggguca

SEQ ID NO: 2363816 - RNA, 19 nt, Homo sapiens
  misc_RNA (1)...(19): siRNA sense strand
ccguaagaagagacgcaau

SEQ ID NO: 2363817 - RNA, 19 nt, Homo sapiens
  misc_RNA (1)...(19): siRNA sense strand
cuagaggaggagaagaauu

SEQ ID NO: 2363818 - RNA, 19 nt, Homo sapiens
  misc_RNA (1)...(19): siRNA sense strand
gcggaaucugguggagaaa

SEQ ID NO: 2363819 - RNA, 19 nt, Homo sapiens
  misc_RNA (1)...(19): siRNA sense strand
acaaacugcaagaggaagu

SEQ ID NO: 2363820 - RNA, 19 nt, Homo sapiens
  misc_RNA (1)...(19): siRNA sense strand
cugaagaccaagcagaaca

SEQ ID NO: 2363821 - RNA, 19 nt, Homo sapiens
  misc_RNA (1)...(19): siRNA sense strand
cccugaagaccaagcagaa

SEQ ID NO: 2363822 - RNA, 19 nt, Homo sapiens
  misc_RNA (1)...(19): siRNA sense strand
gggucaugagggaacggaa

SEQ ID NO: 2363823 - RNA, 19 nt, Homo sapiens
  misc_RNA (1)...(19): siRNA sense strand
gagaauggguuuuggggaa

SEQ ID NO: 2363824 - RNA, 19 nt, Homo sapiens
  misc_RNA (1)...(19): siRNA sense strand
cgacaggaagucagggaau

SEQ ID NO: 2363825 - RNA, 19 nt, Homo sapiens
  misc_RNA (1)...(19): siRNA sense strand
cuuauaaggaccuggagaa

SEQ ID NO: 2363826 - RNA, 19 nt, Homo sapiens
  misc_RNA (1)...(19): siRNA sense strand
cguuggaaggugaggaaca

SEQ ID NO: 2363827 - RNA, 19 nt, Homo sapiens
  misc_RNA (1)...(19): siRNA sense strand
aaucaaggucacagagaca

SEQ ID NO: 2363828 - RNA, 19 nt, Homo sapiens
  misc_RNA (1)...(19): siRNA sense strand
cugccuagagagaggacaa

SEQ ID NO: 2363829 - RNA, 19 nt, Homo sapiens
  misc_RNA (1)...(19): siRNA sense strand
gaaccuuccuggagagcca

SEQ ID NO: 2363830 - RNA, 19 nt, Homo sapiens
  misc_RNA (1)...(19): siRNA sense strand
ugcaaagcacggagagcaa

SEQ ID NO: 2363831 - RNA, 19 nt, Homo sapiens
  misc_RNA (1)...(19): siRNA sense strand
ggaccagaugacagccaaa

SEQ ID NO: 2363832 - RNA, 19 nt, Homo sapiens
  misc_RNA (1)...(19): siRNA sense strand
acggaggcacagagacaaa

SEQ ID NO: 2363833 - RNA, 19 nt, Homo sapiens
  misc_RNA (1)...(19): siRNA sense strand
cuguaaugagaauggguuu

SEQ ID NO: 2363834 - RNA, 19 nt, Homo sapiens
  misc_RNA (1)...(19): siRNA sense strand
ggagagaucugguccgcca

SEQ ID NO: 2363835 - RNA, 19 nt, Homo sapiens
  misc_RNA (1)...(19): siRNA sense strand
gccaaugugccgaggaguu

SEQ ID NO: 2363836 - RNA, 19 nt, Homo sapiens
  misc_RNA (1)...(19): siRNA sense strand
gcuuauaaggaccuggaga

SEQ ID NO: 2363837 - RNA, 19 nt, Homo sapiens
  misc_RNA (1)...(19): siRNA sense strand
gcuccugcaacaagggcua

SEQ ID NO: 2363838 - RNA, 19 nt, Homo sapiens
  misc_RNA (1)...(19): siRNA sense strand
ccucaguaucugcaagaga

SEQ ID NO: 2363839 - RNA, 19 nt, Homo sapiens
  misc_RNA (1)...(19): siRNA sense strand
gaacaugcccuucggggaa

SEQ ID NO: 2363840 - RNA, 19 nt, Homo sapiens
  misc_RNA (1)...(19): siRNA sense strand
guguuuggguauagccuga

SEQ ID NO: 2363841 - RNA, 19 nt, Homo sapiens
  misc_RNA (1)...(19): siRNA sense strand
aaacugaccaacagcgaga

SEQ ID NO: 2363842 - RNA, 19 nt, Homo sapiens
  misc_RNA (1)...(19): siRNA sense strand
guucaucagcuuugagacu

SEQ ID NO: 2363843 - RNA, 19 nt, Homo sapiens
  misc_RNA (1)...(19): siRNA sense strand
uggaguacacgcuggccaa

SEQ ID NO: 2363844 - RNA, 19 nt, Homo sapiens
  misc_RNA (1)...(19): siRNA sense strand
uuauaaggaccuggagaau

SEQ ID NO: 2363845 - RNA, 19 nt, Homo sapiens
  misc_RNA (1)...(19): siRNA sense strand
gcgugauaggcgggaacaa

SEQ ID NO: 2363846 - RNA, 19 nt, Homo sapiens
  misc_RNA (1)...(19): siRNA sense strand
ugaccaacagcgagaucau

SEQ ID NO: 2363847 - RNA, 19 nt, Homo sapiens
  misc_RNA (1)...(19): siRNA sense strand
gaggaagaucacagagcua

SEQ ID NO: 2363848 - RNA, 19 nt, Homo sapiens
  misc_RNA (1)...(19): siRNA sense strand
ccauugagucaguggauga

SEQ ID NO: 2363849 - RNA, 19 nt, Homo sapiens
  misc_RNA (1)...(19): siRNA sense strand
ccaccaugaacgaguacua

SEQ ID NO: 2363850 - RNA, 19 nt, Homo sapiens
  misc_RNA (1)...(19): siRNA sense strand
uggagauccugaagcgcaa

SEQ ID NO: 2363851 - RNA, 19 nt, Homo sapiens
  misc_RNA (1)...(19): siRNA sense strand
ugguagaauuggaaggucu

SEQ ID NO: 2363852 - RNA, 19 nt, Homo sapiens
  misc_RNA (1)...(19): siRNA sense strand
cgggagaaggugauugauu

SEQ ID NO: 2363853 - RNA, 19 nt, Homo sapiens
  misc_RNA (1)...(19): siRNA sense strand
aguacuaucggcagcgaaa

SEQ ID NO: 2363854 - RNA, 19 nt, Homo sapiens
  misc_RNA (1)...(19): siRNA sense strand
auuuaaugcugaaggggaa

SEQ ID NO: 2363855 - RNA, 19 nt, Homo sapiens
  misc_RNA (1)...(19): siRNA sense strand
cugcagaaaccauguguca

SEQ ID NO: 2363856 - RNA, 19 nt, Homo sapiens
  misc_RNA (1)...(19): siRNA sense strand
ggagcugaucgcuaggaaa

SEQ ID NO: 2363857 - RNA, 19 nt, Homo sapiens
  misc_RNA (1)...(19): siRNA sense strand
accaggagauggaaggcaa

SEQ ID NO: 2363858 - RNA, 19 nt, Homo sapiens
  misc_RNA (1)...(19): siRNA sense strand
ccaacuacgcuuugaaaau

SEQ ID NO: 2363859 - RNA, 19 nt, Homo sapiens
  misc_RNA (1)...(19): siRNA sense strand
aguuccaguuccagagauu

SEQ ID NO: 2363860 - RNA, 19 nt, Homo sapiens
  misc_RNA (1)...(19): siRNA sense strand
aggccaaggucgaagugga

SEQ ID NO: 2363861 - RNA, 19 nt, Homo sapiens
  misc_RNA (1)...(19): siRNA sense strand
cuucaugcuucuagccuau

SEQ ID NO: 2363862 - RNA, 19 nt, Homo sapiens
  misc_RNA (1)...(19): siRNA sense strand
agagcacagaggagggaau

SEQ ID NO: 2363863 - RNA, 19 nt, Homo sapiens
  misc_RNA (1)...(19): siRNA sense strand
cagcgaaacugcaaccuca

SEQ ID NO: 2363864 - RNA, 19 nt, Homo sapiens
  misc_RNA (1)...(19): siRNA sense strand
gggcauucacgcugaucau

SEQ ID NO: 2363865 - RNA, 19 nt, Homo sapiens
  misc_RNA (1)...(19): siRNA sense strand
gagccuggagugggagaaa

SEQ ID NO: 2363866 - RNA, 19 nt, Homo sapiens
  misc_RNA (1)...(19): siRNA sense strand
ccaaggucgaaguggacau

SEQ ID NO: 2363867 - RNA, 19 nt, Homo sapiens
  misc_RNA (1)...(19): siRNA sense strand
gguagaauuggaaggucuu

SEQ ID NO: 2363868 - RNA, 19 nt, Homo sapiens
  misc_RNA (1)...(19): siRNA sense strand
cguucauaugggacgcaaa

SEQ ID NO: 2363869 - RNA, 19 nt, Homo sapiens
  misc_RNA (1)...(19): siRNA sense strand
aggagagccuggaguggga

SEQ ID NO: 2363870 - RNA, 19 nt, Homo sapiens
  misc_RNA (1)...(19): siRNA sense strand
gaacugaaccggagccaag

SEQ ID NO: 2363871 - RNA, 19 nt, Homo sapiens
  misc_RNA (1)...(19): siRNA sense strand
gcugaacgggagaagguga

SEQ ID NO: 2363872 - RNA, 19 nt, Homo sapiens
  misc_RNA (1)...(19): siRNA sense strand
gagaacaaccgccuggaga

SEQ ID NO: 2363873 - RNA, 19 nt, Homo sapiens
  misc_RNA (1)...(19): siRNA sense strand
gcaggagaacugugaccau

SEQ ID NO: 2363874 - RNA, 19 nt, Homo sapiens
  misc_RNA (1)...(19): siRNA sense strand
gccaggagauggugaccga

SEQ ID NO: 2363875 - RNA, 19 nt, Homo sapiens
  misc_RNA (1)...(19): siRNA sense strand
aggucgaaguggacaucuu

SEQ ID NO: 2363876 - RNA, 19 nt, Homo sapiens
  misc_RNA (1)...(19): siRNA sense strand
agcaaaggccagaggucca

SEQ ID NO: 2363877 - RNA, 19 nt, Homo sapiens
  misc_RNA (1)...(19): siRNA sense strand
agaacaaccgccuggagau

SEQ ID NO: 2363878 - RNA, 19 nt, Homo sapiens
  misc_RNA (1)...(19): siRNA sense strand
gcgcaaauggugggaagga

SEQ ID NO: 2363879 - RNA, 19 nt, Homo sapiens
  misc_RNA (1)...(19): siRNA sense strand
ucacagagcuaaaggccug

SEQ ID NO: 2363880 - RNA, 19 nt, Homo sapiens
  misc_RNA (1)...(19): siRNA sense strand
cggaacuggcuguggcauu

SEQ ID NO: 2363881 - RNA, 19 nt, Homo sapiens
  misc_RNA (1)...(19): siRNA sense strand
cagaccagcuccugcggaa

SEQ ID NO: 2363882 - RNA, 19 nt, Homo sapiens
  misc_RNA (1)...(19): siRNA sense strand
gagaggaagaggagggaga

SEQ ID NO: 2363883 - RNA, 19 nt, Homo sapiens
  misc_RNA (1)...(19): siRNA sense strand
aguucaagcuggaggcuca

SEQ ID NO: 2363884 - RNA, 19 nt, Homo sapiens
  misc_RNA (1)...(19): siRNA sense strand
ccagagaagccgaggguac

SEQ ID NO: 2363885 - RNA, 19 nt, Homo sapiens
  misc_RNA (1)...(19): siRNA sense strand
agaccgggaacguggcuaa

SEQ ID NO: 2363886 - RNA, 19 nt, Homo sapiens
  misc_RNA (1)...(19): siRNA sense strand
acgacgacgcggaggagau

SEQ ID NO: 2363887 - RNA, 19 nt, Homo sapiens
  misc_RNA (1)...(19): siRNA sense strand
ugggagacgucaagggcaa

SEQ ID NO: 2363888 - RNA, 19 nt, Homo sapiens
  misc_RNA (1)...(19): siRNA sense strand
ccaagaaagugaagggcug

SEQ ID NO: 2363889 - RNA, 19 nt, Homo sapiens
  misc_RNA (1)...(19): siRNA sense strand
ggucaguggagaaggugau

SEQ ID NO: 2363890 - RNA, 19 nt, Homo sapiens
  misc_RNA (1)...(19): siRNA sense strand
cgagggagguacaugguca

SEQ ID NO: 2363891 - RNA, 19 nt, Homo sapiens
  misc_RNA (1)...(19): siRNA sense strand
caugaaaggacccagggaa

SEQ ID NO: 2363892 - RNA, 19 nt, Homo sapiens
  misc_RNA (1)...(19): siRNA sense strand
ccaaggacauccaugccaa

SEQ ID NO: 2363893 - RNA, 19 nt, Homo sapiens
  misc_RNA (1)...(19): siRNA sense strand
ugcaagugcuggaggacga

SEQ ID NO: 2363894 - RNA, 19 nt, Homo sapiens
  misc_RNA (1)...(19): siRNA sense strand
gcaucuaugugguggacgu

SEQ ID NO: 2363895 - RNA, 19 nt, Homo sapiens
  misc_RNA (1)...(19): siRNA sense strand
cugugaugcugcagguuga

SEQ ID NO: 2363896 - RNA, 19 nt, Homo sapiens
  misc_RNA (1)...(19): siRNA sense strand
uggaggacgaggaacuaaa

SEQ ID NO: 2363897 - RNA, 19 nt, Homo sapiens
  misc_RNA (1)...(19): siRNA sense strand
ugauguagacacaguaaaa

SEQ ID NO: 2363898 - RNA, 19 nt, Homo sapiens
  misc_RNA (1)...(19): siRNA sense strand
acaaggucauugagcccaa

SEQ ID NO: 2363899 - RNA, 19 nt, Homo sapiens
  misc_RNA (1)...(19): siRNA sense strand
gugaaggggacaugggaga

SEQ ID NO: 2363900 - RNA, 19 nt, Homo sapiens
  misc_RNA (1)...(19): siRNA sense strand
acgucaagggcaauggcaa

SEQ ID NO: 2363901 - RNA, 19 nt, Homo sapiens
  misc_RNA (1)...(19): siRNA sense strand
ggcuacgaaaugugggaau

SEQ ID NO: 2363902 - RNA, 19 nt, Homo sapiens
  misc_RNA (1)...(19): siRNA sense strand
gggcuuauucccuuggaga

SEQ ID NO: 2363903 - RNA, 19 nt, Homo sapiens
  misc_RNA (1)...(19): siRNA sense strand
augaaaggacccagggaag

SEQ ID NO: 2363904 - RNA, 19 nt, Homo sapiens
  misc_RNA (1)...(19): siRNA sense strand
agaauuuacaggaggaaaa

SEQ ID NO: 2363905 - RNA, 19 nt, Homo sapiens
  misc_RNA (1)...(19): siRNA sense strand
aaggaaaggaaguuggaau

SEQ ID NO: 2363906 - RNA, 19 nt, Homo sapiens
  misc_RNA (1)...(19): siRNA sense strand
ggaaggaggaggaggugca

SEQ ID NO: 2363907 - RNA, 19 nt, Homo sapiens
  misc_RNA (1)...(19): siRNA sense strand
cugaaggaucgaaggauga

SEQ ID NO: 2363908 - RNA, 19 nt, Homo sapiens
  misc_RNA (1)...(19): siRNA sense strand
aggaggaggaggugcaaca

SEQ ID NO: 2363909 - RNA, 19 nt, Homo sapiens
  misc_RNA (1)...(19): siRNA sense strand
accaggagaaagaaagaaa

SEQ ID NO: 2363910 - RNA, 19 nt, Homo sapiens
  misc_RNA (1)...(19): siRNA sense strand
acagauugaaugagcaaga

SEQ ID NO: 2363911 - RNA, 19 nt, Homo sapiens
  misc_RNA (1)...(19): siRNA sense strand
gcugaaggaucgaaggaug

SEQ ID NO: 2363912 - RNA, 19 nt, Homo sapiens
  misc_RNA (1)...(19): siRNA sense strand
gagaaauaugggagggcac

SEQ ID NO: 2363913 - RNA, 19 nt, Homo sapiens
  misc_RNA (1)...(19): siRNA sense strand
ugaaugagcaagagggcgu

SEQ ID NO: 2363914 - RNA, 19 nt, Homo sapiens
  misc_RNA (1)...(19): siRNA sense strand
cagaauuuacaggaggaaa

SEQ ID NO: 2363915 - RNA, 19 nt, Homo sapiens
  misc_RNA (1)...(19): siRNA sense strand
auaccuuggaacagcauaa

SEQ ID NO: 2363916 - RNA, 19 nt, Homo sapiens
  misc_RNA (1)...(19): siRNA sense strand
aggaaaggaaguuggaaug

SEQ ID NO: 2363917 - RNA, 19 nt, Homo sapiens
  misc_RNA (1)...(19): siRNA sense strand
ugguuuaucuucauggaga

SEQ ID NO: 2363918 - RNA, 19 nt, Homo sapiens
  misc_RNA (1)...(19): siRNA sense strand
ggcagaauuuacaggagga

SEQ ID NO: 2363919 - RNA, 19 nt, Homo sapiens
  misc_RNA (1)...(19): siRNA sense strand
acauagaggcugcuguaca

SEQ ID NO: 2363920 - RNA, 19 nt, Homo sapiens
  misc_RNA (1)...(19): siRNA sense strand
gcugaccaggagaaagaaa

SEQ ID NO: 2363921 - RNA, 19 nt, Homo sapiens
  misc_RNA (1)...(19): siRNA sense strand
gaggaaaaggaaaggaagu

SEQ ID NO: 2363922 - RNA, 19 nt, Homo sapiens
  misc_RNA (1)...(19): siRNA sense strand
ccucauuaaccaacugaca

SEQ ID NO: 2363923 - RNA, 19 nt, Homo sapiens
  misc_RNA (1)...(19): siRNA sense strand
cagaacgccuagaaaggga

SEQ ID NO: 2363924 - RNA, 19 nt, Homo sapiens
  misc_RNA (1)...(19): siRNA sense strand
aaguuaaggcuguacgaga

SEQ ID NO: 2363925 - RNA, 19 nt, Homo sapiens
  misc_RNA (1)...(19): siRNA sense strand
ucgcacaaguuaaggcugu

SEQ ID NO: 2363926 - RNA, 19 nt, Homo sapiens
  misc_RNA (1)...(19): siRNA sense strand
uguacgagagagaugacua

SEQ ID NO: 2363927 - RNA, 19 nt, Homo sapiens
  misc_RNA (1)...(19): siRNA sense strand
cggcugagucguugagcaa

SEQ ID NO: 2363928 - RNA, 19 nt, Homo sapiens
  misc_RNA (1)...(19): siRNA sense strand
aggaaaagugauugaacaa

SEQ ID NO: 2363929 - RNA, 19 nt, Homo sapiens
  misc_RNA (1)...(19): siRNA sense strand
ugauugaacaaaugggcaa

SEQ ID NO: 2363930 - RNA, 19 nt, Homo sapiens
  misc_RNA (1)...(19): siRNA sense strand
cugcagugauugagcgcuu

SEQ ID NO: 2363931 - RNA, 19 nt, Homo sapiens
  misc_RNA (1)...(19): siRNA sense strand
uggacgagauugagaaaau

SEQ ID NO: 2363932 - RNA, 19 nt, Homo sapiens
  misc_RNA (1)...(19): siRNA sense strand
uuaucaaacugaagcguga

SEQ ID NO: 2363933 - RNA, 19 nt, Homo sapiens
  misc_RNA (1)...(19): siRNA sense strand
acgagaaguuccaggccuu

SEQ ID NO: 2363934 - RNA, 19 nt, Homo sapiens
  misc_RNA (1)...(19): siRNA sense strand
uggaaagaggccagaagau

SEQ ID NO: 2363935 - RNA, 19 nt, Homo sapiens
  misc_RNA (1)...(19): siRNA sense strand
aaaucaaaccagauaccaa

SEQ ID NO: 2363936 - RNA, 19 nt, Homo sapiens
  misc_RNA (1)...(19): siRNA sense strand
acacagaugauuuggacga

SEQ ID NO: 2363937 - RNA, 19 nt, Homo sapiens
  misc_RNA (1)...(19): siRNA sense strand
uugaagacucuguguggaa

SEQ ID NO: 2363938 - RNA, 19 nt, Homo sapiens
  misc_RNA (1)...(19): siRNA sense strand
ccaaacaggaaaagugauu

SEQ ID NO: 2363939 - RNA, 19 nt, Homo sapiens
  misc_RNA (1)...(19): siRNA sense strand
ugucaagaccaaugccaau

SEQ ID NO: 2363940 - RNA, 19 nt, Homo sapiens
  misc_RNA (1)...(19): siRNA sense strand
aguuccaggccuuguguaa

SEQ ID NO: 2363941 - RNA, 19 nt, Homo sapiens
  misc_RNA (1)...(19): siRNA sense strand
ugaacagaauccaggagca

SEQ ID NO: 2363942 - RNA, 19 nt, Homo sapiens
  misc_RNA (1)...(19): siRNA sense strand
ccgagagggcaaagagaag

SEQ ID NO: 2363943 - RNA, 19 nt, Homo sapiens
  misc_RNA (1)...(19): siRNA sense strand
aacugaagcgugaggaaga

SEQ ID NO: 2363944 - RNA, 19 nt, Homo sapiens
  misc_RNA (1)...(19): siRNA sense strand
aagaagagaaagaggacag

SEQ ID NO: 2363945 - RNA, 19 nt, Homo sapiens
  misc_RNA (1)...(19): siRNA sense strand
gauugaacaaaugggcaaa

SEQ ID NO: 2363946 - RNA, 19 nt, Homo sapiens
  misc_RNA (1)...(19): siRNA sense strand
augauuuggacgagauuga

SEQ ID NO: 2363947 - RNA, 19 nt, Homo sapiens
  misc_RNA (1)...(19): siRNA sense strand
augaagaagagaaagagga

SEQ ID NO: 2363948 - RNA, 19 nt, Homo sapiens
  misc_RNA (1)...(19): siRNA sense strand
gagaaagaggacagagcug

SEQ ID NO: 2363949 - RNA, 19 nt, Homo sapiens
  misc_RNA (1)...(19): siRNA sense strand
agauacaagagaacgcauu

SEQ ID NO: 2363950 - RNA, 19 nt, Homo sapiens
  misc_RNA (1)...(19): siRNA sense strand
agaagaaggugcugcagaa

SEQ ID NO: 2363951 - RNA, 19 nt, Homo sapiens
  misc_RNA (1)...(19): siRNA sense strand
cagaagugcugucgcccaa

SEQ ID NO: 2363952 - RNA, 19 nt, Homo sapiens
  misc_RNA (1)...(19): siRNA sense strand
ucuggagggagcaggguua

SEQ ID NO: 2363953 - RNA, 19 nt, Homo sapiens
  misc_RNA (1)...(19): siRNA sense strand
cugcagaucuggagggagc

SEQ ID NO: 2363954 - RNA, 19 nt, Homo sapiens
  misc_RNA (1)...(19): siRNA sense strand
cagacaacaucgugggcac

SEQ ID NO: 2363955 - RNA, 19 nt, Homo sapiens
  misc_RNA (1)...(19): siRNA sense strand
uggcagaggcagagaugcu

SEQ ID NO: 2363956 - RNA, 19 nt, Homo sapiens
  misc_RNA (1)...(19): siRNA sense strand
gaacauccccagaaggcaa

SEQ ID NO: 2363957 - RNA, 19 nt, Homo sapiens
  misc_RNA (1)...(19): siRNA sense strand
uggaaguacaccagaccuu

SEQ ID NO: 2363958 - RNA, 19 nt, Homo sapiens
  misc_RNA (1)...(19): siRNA sense strand
aggacauaaagauggucua

SEQ ID NO: 2363959 - RNA, 19 nt, Homo sapiens
  misc_RNA (1)...(19): siRNA sense strand
gagaaggcgcugaggagga

SEQ ID NO: 2363960 - RNA, 19 nt, Homo sapiens
  misc_RNA (1)...(19): siRNA sense strand
uggaacagcaagugguaga

SEQ ID NO: 2363961 - RNA, 19 nt, Homo sapiens
  misc_RNA (1)...(19): siRNA sense strand
auuuagaagaagagaacca

SEQ ID NO: 2363962 - RNA, 19 nt, Homo sapiens
  misc_RNA (1)...(19): siRNA sense strand
cugauauccuguugggcau

SEQ ID NO: 2363963 - RNA, 19 nt, Homo sapiens
  misc_RNA (1)...(19): siRNA sense strand
aagaggaggcggaagccaa

SEQ ID NO: 2363964 - RNA, 19 nt, Homo sapiens
  misc_RNA (1)...(19): siRNA sense strand
agagaaaacucauggccuu

SEQ ID NO: 2363965 - RNA, 19 nt, Homo sapiens
  misc_RNA (1)...(19): siRNA sense strand
agauuuagaagaagagaac

SEQ ID NO: 2363966 - RNA, 19 nt, Homo sapiens
  misc_RNA (1)...(19): siRNA sense strand
uagaagaagagaaccaaaa

SEQ ID NO: 2363967 - RNA, 19 nt, Homo sapiens
  misc_RNA (1)...(19): siRNA sense strand
aggcggaagccaaggggaa

SEQ ID NO: 2363968 - RNA, 19 nt, Homo sapiens
  misc_RNA (1)...(19): siRNA sense strand
gccuuguaguugagaacca

SEQ ID NO: 2363969 - RNA, 19 nt, Homo sapiens
  misc_RNA (1)...(19): siRNA sense strand
gggcaaaggcagaggugug

SEQ ID NO: 2363970 - RNA, 19 nt, Homo sapiens
  misc_RNA (1)...(19): siRNA sense strand
ucuggagggagcaggguua

SEQ ID NO: 2363971 - RNA, 19 nt, Homo sapiens
  misc_RNA (1)...(19): siRNA sense strand
cugcagaucuggagggagc

SEQ ID NO: 2363972 - RNA, 19 nt, Homo sapiens
  misc_RNA (1)...(19): siRNA sense strand
cagacaacaucgugggcac

SEQ ID NO: 2363973 - RNA, 19 nt, Homo sapiens
  misc_RNA (1)...(19): siRNA sense strand
ugccggaggauguggagaa

SEQ ID NO: 2363974 - RNA, 19 nt, Homo sapiens
  misc_RNA (1)...(19): siRNA sense strand
ggugacaacuguauccaga

SEQ ID NO: 2363975 - RNA, 19 nt, Homo sapiens
  misc_RNA (1)...(19): siRNA sense strand
uggcagaggcagagaugcu

SEQ ID NO: 2363976 - RNA, 19 nt, Homo sapiens
  misc_RNA (1)...(19): siRNA sense strand
acucaagaggacauaaaga

SEQ ID NO: 2363977 - RNA, 19 nt, Homo sapiens
  misc_RNA (1)...(19): siRNA sense strand
gaacauccccagaaggcaa

SEQ ID NO: 2363978 - RNA, 19 nt, Homo sapiens
  misc_RNA (1)...(19): siRNA sense strand
cagaugugcugucgcccaa

SEQ ID NO: 2363979 - RNA, 19 nt, Homo sapiens
  misc_RNA (1)...(19): siRNA sense strand
aggacauaaagauggucua

SEQ ID NO: 2363980 - RNA, 19 nt, Homo sapiens
  misc_RNA (1)...(19): siRNA sense strand
ccucaacacuacacaggca

SEQ ID NO: 2363981 - RNA, 19 nt, Homo sapiens
  misc_RNA (1)...(19): siRNA sense strand
uagaagccaucaaggccaa

SEQ ID NO: 2363982 - RNA, 19 nt, Homo sapiens
  misc_RNA (1)...(19): siRNA sense strand
ccucacuuucagagcgauu

SEQ ID NO: 2363983 - RNA, 19 nt, Homo sapiens
  misc_RNA (1)...(19): siRNA sense strand
aguuaaagcugcugugcau

SEQ ID NO: 2363984 - RNA, 19 nt, Homo sapiens
  misc_RNA (1)...(19): siRNA sense strand
agacugaagcccaggaaga

SEQ ID NO: 2363985 - RNA, 19 nt, Homo sapiens
  misc_RNA (1)...(19): siRNA sense strand
aggugaaucugguuguaaa

SEQ ID NO: 2363986 - RNA, 19 nt, Homo sapiens
  misc_RNA (1)...(19): siRNA sense strand
agacaaaaccagacuuaaa

SEQ ID NO: 2363987 - RNA, 19 nt, Homo sapiens
  misc_RNA (1)...(19): siRNA sense strand
acaaaagcuuccugugaaa

SEQ ID NO: 2363988 - RNA, 19 nt, Homo sapiens
  misc_RNA (1)...(19): siRNA sense strand
ccucuuuauucuugaugaa

SEQ ID NO: 2363989 - RNA, 19 nt, Homo sapiens
  misc_RNA (1)...(19): siRNA sense strand
caggcaauccgaagagcaa

SEQ ID NO: 2363990 - RNA, 19 nt, Homo sapiens
  misc_RNA (1)...(19): siRNA sense strand
acaaaguacaugagagauc

SEQ ID NO: 2363991 - RNA, 19 nt, Homo sapiens
  misc_RNA (1)...(19): siRNA sense strand
gugaaaagccacucagaau

SEQ ID NO: 2363992 - RNA, 19 nt, Homo sapiens
  misc_RNA (1)...(19): siRNA sense strand
ggggagaggaagaaaauau

SEQ ID NO: 2363993 - RNA, 19 nt, Homo sapiens
  misc_RNA (1)...(19): siRNA sense strand
aggaaaagacucagcauuu

SEQ ID NO: 2363994 - RNA, 19 nt, Homo sapiens
  misc_RNA (1)...(19): siRNA sense strand
ugguagaggauuaugaaca

SEQ ID NO: 2363995 - RNA, 19 nt, Homo sapiens
  misc_RNA (1)...(19): siRNA sense strand
gagcacaacauuuggcuga

SEQ ID NO: 2363996 - RNA, 19 nt, Homo sapiens
  misc_RNA (1)...(19): siRNA sense strand
uaaagagggguuagagaaa

SEQ ID NO: 2363997 - RNA, 19 nt, Homo sapiens
  misc_RNA (1)...(19): siRNA sense strand
uggaaggcuuagaguguca

SEQ ID NO: 2363998 - RNA, 19 nt, Homo sapiens
  misc_RNA (1)...(19): siRNA sense strand
ucauauugcuguuggaucu

SEQ ID NO: 2363999 - RNA, 19 nt, Homo sapiens
  misc_RNA (1)...(19): siRNA sense strand
cccauuaucacaagacaaa

SEQ ID NO: 2364000 - RNA, 19 nt, Homo sapiens
  misc_RNA (1)...(19): siRNA sense strand
cauuggauugggagacaua

SEQ ID NO: 2364001 - RNA, 19 nt, Homo sapiens
  misc_RNA (1)...(19): siRNA sense strand
auggcuuccucuagaaaua

SEQ ID NO: 2364002 - RNA, 19 nt, Homo sapiens
  misc_RNA (1)...(19): siRNA sense strand
ccaccaaauggaagugaca

SEQ ID NO: 2364003 - RNA, 19 nt, Homo sapiens
  misc_RNA (1)...(19): siRNA sense strand
ggagcaaauaaauuggauu

SEQ ID NO: 2364004 - RNA, 19 nt, Homo sapiens
  misc_RNA (1)...(19): siRNA sense strand
guaaacagaugcuggcagu

SEQ ID NO: 2364005 - RNA, 19 nt, Homo sapiens
  misc_RNA (1)...(19): siRNA sense strand
guuugaagcaguauuacaa

SEQ ID NO: 2364006 - RNA, 19 nt, Homo sapiens
  misc_RNA (1)...(19): siRNA sense strand
agacauacaugcaucggau

SEQ ID NO: 2364007 - RNA, 19 nt, Homo sapiens
  misc_RNA (1)...(19): siRNA sense strand
gauaaucagcugaaagacu

SEQ ID NO: 2364008 - RNA, 19 nt, Homo sapiens
  misc_RNA (1)...(19): siRNA sense strand
auucauacccuuuggcaca

SEQ ID NO: 2364009 - RNA, 19 nt, Homo sapiens
  misc_RNA (1)...(19): siRNA sense strand
gggaugugcuguuggcgga

SEQ ID NO: 2364010 - RNA, 19 nt, Homo sapiens
  misc_RNA (1)...(19): siRNA sense strand
gcagcuuaucacaugaaua

SEQ ID NO: 2364011 - RNA, 19 nt, Homo sapiens
  misc_RNA (1)...(19): siRNA sense strand
aggcaauaugaaucagaau

SEQ ID NO: 2364012 - RNA, 19 nt, Homo sapiens
  misc_RNA (1)...(19): siRNA sense strand
ggauugaugcugagaaggu

SEQ ID NO: 2364013 - RNA, 19 nt, Homo sapiens
  misc_RNA (1)...(19): siRNA sense strand
gcuaagcagagccggagaa

SEQ ID NO: 2364014 - RNA, 19 nt, Homo sapiens
  misc_RNA (1)...(19): siRNA sense strand
gagaaauugcuguacagau

SEQ ID NO: 2364015 - RNA, 19 nt, Homo sapiens
  misc_RNA (1)...(19): siRNA sense strand
ggugaaucugguuguaaau

SEQ ID NO: 2364016 - RNA, 19 nt, Homo sapiens
  misc_RNA (1)...(19): siRNA sense strand
agagcuuacuacagggcau

SEQ ID NO: 2364017 - RNA, 19 nt, Homo sapiens
  misc_RNA (1)...(19): siRNA sense strand
cagaauuaagcaacucaua

SEQ ID NO: 2364018 - RNA, 19 nt, Homo sapiens
  misc_RNA (1)...(19): siRNA sense strand
gcagcuuccaggagcaaau

SEQ ID NO: 2364019 - RNA, 19 nt, Homo sapiens
  misc_RNA (1)...(19): siRNA sense strand
gcuuccaggagcaaauaaa

SEQ ID NO: 2364020 - RNA, 19 nt, Homo sapiens
  misc_RNA (1)...(19): siRNA sense strand
cggugcagcucaaggccau

SEQ ID NO: 2364021 - RNA, 19 nt, Homo sapiens
  misc_RNA (1)...(19): siRNA sense strand
gauggaagaauguguggau

SEQ ID NO: 2364022 - RNA, 19 nt, Homo sapiens
  misc_RNA (1)...(19): siRNA sense strand
ggcaauccgaagagcaaau

SEQ ID NO: 2364023 - RNA, 19 nt, Homo sapiens
  misc_RNA (1)...(19): siRNA sense strand
aauggaaggcuuagagugu

SEQ ID NO: 2364024 - RNA, 19 nt, Homo sapiens
  misc_RNA (1)...(19): siRNA sense strand
auugggauguggaaguuaa

SEQ ID NO: 2364025 - RNA, 19 nt, Homo sapiens
  misc_RNA (1)...(19): siRNA sense strand
guuagagaaaccuguggaa

SEQ ID NO: 2364026 - RNA, 19 nt, Homo sapiens
  misc_RNA (1)...(19): siRNA sense strand
ggaucuccuggcagaauua

SEQ ID NO: 2364027 - RNA, 19 nt, Homo sapiens
  misc_RNA (1)...(19): siRNA sense strand
uggaagaauguguggauug

SEQ ID NO: 2364028 - RNA, 19 nt, Homo sapiens
  misc_RNA (1)...(19): siRNA sense strand
ggaauccagaugaagacaa

SEQ ID NO: 2364029 - RNA, 19 nt, Homo sapiens
  misc_RNA (1)...(19): siRNA sense strand
aagcagagccggagaaacc

SEQ ID NO: 2364030 - RNA, 19 nt, Homo sapiens
  misc_RNA (1)...(19): siRNA sense strand
gguuugaagcaguauuaca

SEQ ID NO: 2364031 - RNA, 19 nt, Homo sapiens
  misc_RNA (1)...(19): siRNA sense strand
guaccauuggauugggaga

SEQ ID NO: 2364032 - RNA, 19 nt, Homo sapiens
  misc_RNA (1)...(19): siRNA sense strand
agugauucuuacagcucaa

SEQ ID NO: 2364033 - RNA, 19 nt, Homo sapiens
  misc_RNA (1)...(19): siRNA sense strand
agucauacuuggaaggcuc

SEQ ID NO: 2364034 - RNA, 19 nt, Homo sapiens
  misc_RNA (1)...(19): siRNA sense strand
caagacaaaaccagacuua

SEQ ID NO: 2364035 - RNA, 19 nt, Homo sapiens
  misc_RNA (1)...(19): siRNA sense strand
cgucuugaugcuauggcua

SEQ ID NO: 2364036 - RNA, 19 nt, Homo sapiens
  misc_RNA (1)...(19): siRNA sense strand
ucugagagugacagugauu

SEQ ID NO: 2364037 - RNA, 19 nt, Homo sapiens
  misc_RNA (1)...(19): siRNA sense strand
ucccagagcaaaggaaaua

SEQ ID NO: 2364038 - RNA, 19 nt, Homo sapiens
  misc_RNA (1)...(19): siRNA sense strand
gcacauacuuggagggaga

SEQ ID NO: 2364039 - RNA, 19 nt, Homo sapiens
  misc_RNA (1)...(19): siRNA sense strand
gugaagaccaugaccgaca

SEQ ID NO: 2364040 - RNA, 19 nt, Homo sapiens
  misc_RNA (1)...(19): siRNA sense strand
cagaaaucuuauacagcca

SEQ ID NO: 2364041 - RNA, 19 nt, Homo sapiens
  misc_RNA (1)...(19): siRNA sense strand
ggagacaaccucaggagca

SEQ ID NO: 2364042 - RNA, 19 nt, Homo sapiens
  misc_RNA (1)...(19): siRNA sense strand
gagugaagaccaugaccga

SEQ ID NO: 2364043 - RNA, 19 nt, Homo sapiens
  misc_RNA (1)...(19): siRNA sense strand
gugaaaacccugaagaacu

SEQ ID NO: 2364044 - RNA, 19 nt, Homo sapiens
  misc_RNA (1)...(19): siRNA sense strand
cagccaaaucaaggaggaa

SEQ ID NO: 2364045 - RNA, 19 nt, Homo sapiens
  misc_RNA (1)...(19): siRNA sense strand
uggaagacuacguuaacuu

SEQ ID NO: 2364046 - RNA, 19 nt, Homo sapiens
  misc_RNA (1)...(19): siRNA sense strand
ugguacugcacaagaguga

SEQ ID NO: 2364047 - RNA, 19 nt, Homo sapiens
  misc_RNA (1)...(19): siRNA sense strand
gcacauacuuggagggaga

SEQ ID NO: 2364048 - RNA, 19 nt, Homo sapiens
  misc_RNA (1)...(19): siRNA sense strand
gugaagaccaugaccgaca

SEQ ID NO: 2364049 - RNA, 19 nt, Homo sapiens
  misc_RNA (1)...(19): siRNA sense strand
cagaaaucuuauacagcca

SEQ ID NO: 2364050 - RNA, 19 nt, Homo sapiens
  misc_RNA (1)...(19): siRNA sense strand
ggagacaaccucaggagca

SEQ ID NO: 2364051 - RNA, 19 nt, Homo sapiens
  misc_RNA (1)...(19): siRNA sense strand
gagugaagaccaugaccga

SEQ ID NO: 2364052 - RNA, 19 nt, Homo sapiens
  misc_RNA (1)...(19): siRNA sense strand
gugaaaacccugaagaacu

SEQ ID NO: 2364053 - RNA, 19 nt, Homo sapiens
  misc_RNA (1)...(19): siRNA sense strand
cagccaaaucaaggaggaa

SEQ ID NO: 2364054 - RNA, 19 nt, Homo sapiens
  misc_RNA (1)...(19): siRNA sense strand
uggaagacuacguuaacuu

SEQ ID NO: 2364055 - RNA, 19 nt, Homo sapiens
  misc_RNA (1)...(19): siRNA sense strand
ugguacugcacaagaguga

SEQ ID NO: 2364056 - RNA, 19 nt, Homo sapiens
  misc_RNA (1)...(19): siRNA sense strand
ccgugaaggugcaggacga

SEQ ID NO: 2364057 - RNA, 19 nt, Homo sapiens
  misc_RNA (1)...(19): siRNA sense strand
aggacgacuuuguggagau

SEQ ID NO: 2364058 - RNA, 19 nt, Homo sapiens
  misc_RNA (1)...(19): siRNA sense strand
acaacgagcgccaggacga

SEQ ID NO: 2364059 - RNA, 19 nt, Homo sapiens
  misc_RNA (1)...(19): siRNA sense strand
guguaaaggaacugcgaga

SEQ ID NO: 2364060 - RNA, 19 nt, Homo sapiens
  misc_RNA (1)...(19): siRNA sense strand
ggccuaaacuccuggcaga

SEQ ID NO: 2364061 - RNA, 19 nt, Homo sapiens
  misc_RNA (1)...(19): siRNA sense strand
accgagacauagaggaaau

SEQ ID NO: 2364062 - RNA, 19 nt, Homo sapiens
  misc_RNA (1)...(19): siRNA sense strand
gggauggacgaguggacuu

SEQ ID NO: 2364063 - RNA, 19 nt, Homo sapiens
  misc_RNA (1)...(19): siRNA sense strand
acaaggacaaggauggcua

SEQ ID NO: 2364064 - RNA, 19 nt, Homo sapiens
  misc_RNA (1)...(19): siRNA sense strand
ugcgagaggcuaugaggaa

SEQ ID NO: 2364065 - RNA, 19 nt, Homo sapiens
  misc_RNA (1)...(19): siRNA sense strand
uugaagaguuuguccggau

SEQ ID NO: 2364066 - RNA, 19 nt, Homo sapiens
  misc_RNA (1)...(19): siRNA sense strand
cagcagauaugauuggugu

SEQ ID NO: 2364067 - RNA, 19 nt, Homo sapiens
  misc_RNA (1)...(19): siRNA sense strand
agaggaaauugaagagcuc

SEQ ID NO: 2364068 - RNA, 19 nt, Homo sapiens
  misc_RNA (1)...(19): siRNA sense strand
gcaccagugagcugcgaga

SEQ ID NO: 2364069 - RNA, 19 nt, Homo sapiens
  misc_RNA (1)...(19): siRNA sense strand
guguaaaggaacugcgaga

SEQ ID NO: 2364070 - RNA, 19 nt, Homo sapiens
  misc_RNA (1)...(19): siRNA sense strand
ggccuaaacuccuggcaga

SEQ ID NO: 2364071 - RNA, 19 nt, Homo sapiens
  misc_RNA (1)...(19): siRNA sense strand
accgagacauagaggaaau

SEQ ID NO: 2364072 - RNA, 19 nt, Homo sapiens
  misc_RNA (1)...(19): siRNA sense strand
gggauggacgaguggacuu

SEQ ID NO: 2364073 - RNA, 19 nt, Homo sapiens
  misc_RNA (1)...(19): siRNA sense strand
acaaggacaaggauggcua

SEQ ID NO: 2364074 - RNA, 19 nt, Homo sapiens
  misc_RNA (1)...(19): siRNA sense strand
ugcgagaggcuaugaggaa

SEQ ID NO: 2364075 - RNA, 19 nt, Homo sapiens
  misc_RNA (1)...(19): siRNA sense strand
uugaagaguuuguccggau

SEQ ID NO: 2364076 - RNA, 19 nt, Homo sapiens
  misc_RNA (1)...(19): siRNA sense strand
cagcagauaugauuggugu

SEQ ID NO: 2364077 - RNA, 19 nt, Homo sapiens
  misc_RNA (1)...(19): siRNA sense strand
agaggaaauugaagagcuc

SEQ ID NO: 2364078 - RNA, 19 nt, Homo sapiens
  misc_RNA (1)...(19): siRNA sense strand
gcaccagugagcugcgaga

SEQ ID NO: 2364079 - RNA, 19 nt, Homo sapiens
  misc_RNA (1)...(19): siRNA sense strand
gggaagaaauaguaggaga

SEQ ID NO: 2364080 - RNA, 19 nt, Homo sapiens
  misc_RNA (1)...(19): siRNA sense strand
cguuaaggucugggauaaa

SEQ ID NO: 2364081 - RNA, 19 nt, Homo sapiens
  misc_RNA (1)...(19): siRNA sense strand
acgcaauggccaagguuca

SEQ ID NO: 2364082 - RNA, 19 nt, Homo sapiens
  misc_RNA (1)...(19): siRNA sense strand
aguaagaaucuaugaggca

SEQ ID NO: 2364083 - RNA, 19 nt, Homo sapiens
  misc_RNA (1)...(19): siRNA sense strand
ugaaaguggugauuggcau

SEQ ID NO: 2364084 - RNA, 19 nt, Homo sapiens
  misc_RNA (1)...(19): siRNA sense strand
aaugaaaacaccaggaaau

SEQ ID NO: 2364085 - RNA, 19 nt, Homo sapiens
  misc_RNA (1)...(19): siRNA sense strand
gaucagagcguuaaggucu

SEQ ID NO: 2364086 - RNA, 19 nt, Homo sapiens
  misc_RNA (1)...(19): siRNA sense strand
uggaagacacauaguggau

SEQ ID NO: 2364087 - RNA, 19 nt, Homo sapiens
  misc_RNA (1)...(19): siRNA sense strand
agaugauggguguguaaga

SEQ ID NO: 2364088 - RNA, 19 nt, Homo sapiens
  misc_RNA (1)...(19): siRNA sense strand
agcguuaaggucugggaua

SEQ ID NO: 2364089 - RNA, 19 nt, Homo sapiens
  misc_RNA (1)...(19): siRNA sense strand
ggauaaaagugaaaguggu

SEQ ID NO: 2364090 - RNA, 19 nt, Homo sapiens
  misc_RNA (1)...(19): siRNA sense strand
guguguaagauuguggaaa

SEQ ID NO: 2364091 - RNA, 19 nt, Homo sapiens
  misc_RNA (1)...(19): siRNA sense strand
gcuagcuggaagacacaua

SEQ ID NO: 2364092 - RNA, 19 nt, Homo sapiens
  misc_RNA (1)...(19): siRNA sense strand
aaucauaauucucaggucu

SEQ ID NO: 2364093 - RNA, 19 nt, Homo sapiens
  misc_RNA (1)...(19): siRNA sense strand
ugcuguaugggaagaaaua

SEQ ID NO: 2364094 - RNA, 19 nt, Homo sapiens
  misc_RNA (1)...(19): siRNA sense strand
aguuggaauauaacaggaa

SEQ ID NO: 2364095 - RNA, 19 nt, Homo sapiens
  misc_RNA (1)...(19): siRNA sense strand
gaauauaacaggaacggug

SEQ ID NO: 2364096 - RNA, 19 nt, Homo sapiens
  misc_RNA (1)...(19): siRNA sense strand
ccuuagaagaugauguaau

SEQ ID NO: 2364097 - RNA, 19 nt, Homo sapiens
  misc_RNA (1)...(19): siRNA sense strand
gguuaaaauccaagguuau

SEQ ID NO: 2364098 - RNA, 19 nt, Homo sapiens
  misc_RNA (1)...(19): siRNA sense strand
ugaccugacaagagagaau

SEQ ID NO: 2364099 - RNA, 19 nt, Homo sapiens
  misc_RNA (1)...(19): siRNA sense strand
caucgguaugcaugagaaa

SEQ ID NO: 2364100 - RNA, 19 nt, Homo sapiens
  misc_RNA (1)...(19): siRNA sense strand
ugguuaaaauccaagguua

SEQ ID NO: 2364101 - RNA, 19 nt, Homo sapiens
  misc_RNA (1)...(19): siRNA sense strand
uggacuuggucaugcgcaa

SEQ ID NO: 2364102 - RNA, 19 nt, Homo sapiens
  misc_RNA (1)...(19): siRNA sense strand
guuauuggugagagagaca

SEQ ID NO: 2364103 - RNA, 19 nt, Homo sapiens
  misc_RNA (1)...(19): siRNA sense strand
uggaagaauguauggacuu

SEQ ID NO: 2364104 - RNA, 19 nt, Homo sapiens
  misc_RNA (1)...(19): siRNA sense strand
ugacaagagagaaugugaa

SEQ ID NO: 2364105 - RNA, 19 nt, Homo sapiens
  misc_RNA (1)...(19): siRNA sense strand
gacuguuauuggugagaga

SEQ ID NO: 2364106 - RNA, 19 nt, Homo sapiens
  misc_RNA (1)...(19): siRNA sense strand
ugaccaaugaaucgggcua

SEQ ID NO: 2364107 - RNA, 19 nt, Homo sapiens
  misc_RNA (1)...(19): siRNA sense strand
ucgccauggugaugaugaa

SEQ ID NO: 2364108 - RNA, 19 nt, Homo sapiens
  misc_RNA (1)...(19): siRNA sense strand
cccuaauguugaagaggca

SEQ ID NO: 2364109 - RNA, 19 nt, Homo sapiens
  misc_RNA (1)...(19): siRNA sense strand
augauguaaucgauggcua

SEQ ID NO: 2364110 - RNA, 19 nt, Homo sapiens
  misc_RNA (1)...(19): siRNA sense strand
ccugaauauuggaaggaug

SEQ ID NO: 2364111 - RNA, 19 nt, Homo sapiens
  misc_RNA (1)...(19): siRNA sense strand
gagaagucugucaaggauu

SEQ ID NO: 2364112 - RNA, 19 nt, Homo sapiens
  misc_RNA (1)...(19): siRNA sense strand
gggacaaacauuauccuga

SEQ ID NO: 2364113 - RNA, 19 nt, Homo sapiens
  misc_RNA (1)...(19): siRNA sense strand
gcaggaaaguacaucgcca

SEQ ID NO: 2364114 - RNA, 19 nt, Homo sapiens
  misc_RNA (1)...(19): siRNA sense strand
agaaacuggaagaauguau

SEQ ID NO: 2364115 - RNA, 19 nt, Homo sapiens
  misc_RNA (1)...(19): siRNA sense strand
cuaauguugaagaggcaau

SEQ ID NO: 2364116 - RNA, 19 nt, Homo sapiens
  misc_RNA (1)...(19): siRNA sense strand
cuguuauuggugagagaga

SEQ ID NO: 2364117 - RNA, 19 nt, Homo sapiens
  misc_RNA (1)...(19): siRNA sense strand
ggagaauucaugcgagucu

SEQ ID NO: 2364118 - RNA, 19 nt, Homo sapiens
  misc_RNA (1)...(19): siRNA sense strand
agagaaacuggaagaaugu

SEQ ID NO: 2364119 - RNA, 19 nt, Homo sapiens
  misc_RNA (1)...(19): siRNA sense strand
aaugugaaccagugcauau

SEQ ID NO: 2364120 - RNA, 19 nt, Homo sapiens
  misc_RNA (1)...(19): siRNA sense strand
guugauuuuagcagagaaa

SEQ ID NO: 2364121 - RNA, 19 nt, Homo sapiens
  misc_RNA (1)...(19): siRNA sense strand
ccacagaagagaaacugga

SEQ ID NO: 2364122 - RNA, 19 nt, Homo sapiens
  misc_RNA (1)...(19): siRNA sense strand
agagaaacguggugaccug

SEQ ID NO: 2364123 - RNA, 19 nt, Homo sapiens
  misc_RNA (1)...(19): siRNA sense strand
ggauuuccacagaagagaa

SEQ ID NO: 2364124 - RNA, 19 nt, Homo sapiens
  misc_RNA (1)...(19): siRNA sense strand
cuggaagaauguauggacu

SEQ ID NO: 2364125 - RNA, 19 nt, Homo sapiens
  misc_RNA (1)...(19): siRNA sense strand
ccccaaacccaaugaauuu

SEQ ID NO: 2364126 - RNA, 19 nt, Homo sapiens
  misc_RNA (1)...(19): siRNA sense strand
ugaagacauugcaaggaca

SEQ ID NO: 2364127 - RNA, 19 nt, Homo sapiens
  misc_RNA (1)...(19): siRNA sense strand
ccuuagaagaugauguaau

SEQ ID NO: 2364128 - RNA, 19 nt, Homo sapiens
  misc_RNA (1)...(19): siRNA sense strand
gguuaaaauccaagguuau

SEQ ID NO: 2364129 - RNA, 19 nt, Homo sapiens
  misc_RNA (1)...(19): siRNA sense strand
ugaccugacaagagagaau

SEQ ID NO: 2364130 - RNA, 19 nt, Homo sapiens
  misc_RNA (1)...(19): siRNA sense strand
caucgguaugcaugagaaa

SEQ ID NO: 2364131 - RNA, 19 nt, Homo sapiens
  misc_RNA (1)...(19): siRNA sense strand
ugguuaaaauccaagguua

SEQ ID NO: 2364132 - RNA, 19 nt, Homo sapiens
  misc_RNA (1)...(19): siRNA sense strand
uggacuuggucaugcgcaa

SEQ ID NO: 2364133 - RNA, 19 nt, Homo sapiens
  misc_RNA (1)...(19): siRNA sense strand
guuauuggugagagagaca

SEQ ID NO: 2364134 - RNA, 19 nt, Homo sapiens
  misc_RNA (1)...(19): siRNA sense strand
uggaagaauguauggacuu

SEQ ID NO: 2364135 - RNA, 19 nt, Homo sapiens
  misc_RNA (1)...(19): siRNA sense strand
ugacaagagagaaugugaa

SEQ ID NO: 2364136 - RNA, 19 nt, Homo sapiens
  misc_RNA (1)...(19): siRNA sense strand
gacuguuauuggugagaga

SEQ ID NO: 2364137 - RNA, 19 nt, Homo sapiens
  misc_RNA (1)...(19): siRNA sense strand
ugaccaaugaaucgggcua

SEQ ID NO: 2364138 - RNA, 19 nt, Homo sapiens
  misc_RNA (1)...(19): siRNA sense strand
ucgccauggugaugaugaa

SEQ ID NO: 2364139 - RNA, 19 nt, Homo sapiens
  misc_RNA (1)...(19): siRNA sense strand
cccuaauguugaagaggca

SEQ ID NO: 2364140 - RNA, 19 nt, Homo sapiens
  misc_RNA (1)...(19): siRNA sense strand
augauguaaucgauggcua

SEQ ID NO: 2364141 - RNA, 19 nt, Homo sapiens
  misc_RNA (1)...(19): siRNA sense strand
ccugaauauuggaaggaug

SEQ ID NO: 2364142 - RNA, 19 nt, Homo sapiens
  misc_RNA (1)...(19): siRNA sense strand
gagaagucugucaaggauu

SEQ ID NO: 2364143 - RNA, 19 nt, Homo sapiens
  misc_RNA (1)...(19): siRNA sense strand
gggacaaacauuauccuga

SEQ ID NO: 2364144 - RNA, 19 nt, Homo sapiens
  misc_RNA (1)...(19): siRNA sense strand
gcaggaaaguacaucgcca

SEQ ID NO: 2364145 - RNA, 19 nt, Homo sapiens
  misc_RNA (1)...(19): siRNA sense strand
agaaacuggaagaauguau

SEQ ID NO: 2364146 - RNA, 19 nt, Homo sapiens
  misc_RNA (1)...(19): siRNA sense strand
cuaauguugaagaggcaau

SEQ ID NO: 2364147 - RNA, 19 nt, Homo sapiens
  misc_RNA (1)...(19): siRNA sense strand
cuguuauuggugagagaga

SEQ ID NO: 2364148 - RNA, 19 nt, Homo sapiens
  misc_RNA (1)...(19): siRNA sense strand
ggagaauucaugcgagucu

SEQ ID NO: 2364149 - RNA, 19 nt, Homo sapiens
  misc_RNA (1)...(19): siRNA sense strand
agagaaacuggaagaaugu

SEQ ID NO: 2364150 - RNA, 19 nt, Homo sapiens
  misc_RNA (1)...(19): siRNA sense strand
aaugugaaccagugcauau

SEQ ID NO: 2364151 - RNA, 19 nt, Homo sapiens
  misc_RNA (1)...(19): siRNA sense strand
guugauuuuagcagagaaa

SEQ ID NO: 2364152 - RNA, 19 nt, Homo sapiens
  misc_RNA (1)...(19): siRNA sense strand
ccacagaagagaaacugga

SEQ ID NO: 2364153 - RNA, 19 nt, Homo sapiens
  misc_RNA (1)...(19): siRNA sense strand
agagaaacguggugaccug

SEQ ID NO: 2364154 - RNA, 19 nt, Homo sapiens
  misc_RNA (1)...(19): siRNA sense strand
ggauuuccacagaagagaa

SEQ ID NO: 2364155 - RNA, 19 nt, Homo sapiens
  misc_RNA (1)...(19): siRNA sense strand
cuggaagaauguauggacu

SEQ ID NO: 2364156 - RNA, 19 nt, Homo sapiens
  misc_RNA (1)...(19): siRNA sense strand
ccccaaacccaaugaauuu

SEQ ID NO: 2364157 - RNA, 19 nt, Homo sapiens
  misc_RNA (1)...(19): siRNA sense strand
ugaagacauugcaaggaca

SEQ ID NO: 2364158 - RNA, 19 nt, Homo sapiens
  misc_RNA (1)...(19): siRNA sense strand
ccgaggagcuugaggugca

SEQ ID NO: 2364159 - RNA, 19 nt, Homo sapiens
  misc_RNA (1)...(19): siRNA sense strand
ccugauuauaacugguuua

SEQ ID NO: 2364160 - RNA, 19 nt, Homo sapiens
  misc_RNA (1)...(19): siRNA sense strand
ggcuagaaaguuuggguca

SEQ ID NO: 2364161 - RNA, 19 nt, Homo sapiens
  misc_RNA (1)...(19): siRNA sense strand
ggguuaucgcuuugcagua

SEQ ID NO: 2364162 - RNA, 19 nt, Homo sapiens
  misc_RNA (1)...(19): siRNA sense strand
gaagaaauguacaagcugu

SEQ ID NO: 2364163 - RNA, 19 nt, Homo sapiens
  misc_RNA (1)...(19): siRNA sense strand
ucugaaaacaggaggcaau

SEQ ID NO: 2364164 - RNA, 19 nt, Homo sapiens
  misc_RNA (1)...(19): siRNA sense strand
ccucauaaaauucgggaca

SEQ ID NO: 2364165 - RNA, 19 nt, Homo sapiens
  misc_RNA (1)...(19): siRNA sense strand
gcuaaagaagaaauguaca

SEQ ID NO: 2364166 - RNA, 19 nt, Homo sapiens
  misc_RNA (1)...(19): siRNA sense strand
aggucaaucuuuauguaca

SEQ ID NO: 2364167 - RNA, 19 nt, Homo sapiens
  misc_RNA (1)...(19): siRNA sense strand
gcaucagccaggaggagca

SEQ ID NO: 2364168 - RNA, 19 nt, Homo sapiens
  misc_RNA (1)...(19): siRNA sense strand
ggauaaaguuggaagcaga

SEQ ID NO: 2364169 - RNA, 19 nt, Homo sapiens
  misc_RNA (1)...(19): siRNA sense strand
acaacaaaguagagaggau

SEQ ID NO: 2364170 - RNA, 19 nt, Homo sapiens
  misc_RNA (1)...(19): siRNA sense strand
acgaugaggauguggacaa

SEQ ID NO: 2364171 - RNA, 19 nt, Homo sapiens
  misc_RNA (1)...(19): siRNA sense strand
gugaaaagucugaugacaa

SEQ ID NO: 2364172 - RNA, 19 nt, Homo sapiens
  misc_RNA (1)...(19): siRNA sense strand
ggaaggaggucaugcagga

SEQ ID NO: 2364173 - RNA, 19 nt, Homo sapiens
  misc_RNA (1)...(19): siRNA sense strand
gacaacaagucaugggaga

SEQ ID NO: 2364174 - RNA, 19 nt, Homo sapiens
  misc_RNA (1)...(19): siRNA sense strand
ccugagaaauugaaggagu

SEQ ID NO: 2364175 - RNA, 19 nt, Homo sapiens
  misc_RNA (1)...(19): siRNA sense strand
uuuauaaggugauuggcaa

SEQ ID NO: 2364176 - RNA, 19 nt, Homo sapiens
  misc_RNA (1)...(19): siRNA sense strand
caacaugagggcagcaaaa

SEQ ID NO: 2364177 - RNA, 19 nt, Homo sapiens
  misc_RNA (1)...(19): siRNA sense strand
uuauaaggugauuggcaaa

SEQ ID NO: 2364178 - RNA, 19 nt, Homo sapiens
  misc_RNA (1)...(19): siRNA sense strand
acuccuaugaugagaagua

SEQ ID NO: 2364179 - RNA, 19 nt, Homo sapiens
  misc_RNA (1)...(19): siRNA sense strand
caucacugugccugagaaa

SEQ ID NO: 2364180 - RNA, 19 nt, Homo sapiens
  misc_RNA (1)...(19): siRNA sense strand
agacaaucggagagaaaau

SEQ ID NO: 2364181 - RNA, 19 nt, Homo sapiens
  misc_RNA (1)...(19): siRNA sense strand
augaggauguggacaacaa

SEQ ID NO: 2364182 - RNA, 19 nt, Homo sapiens
  misc_RNA (1)...(19): siRNA sense strand
cgauaugggcaaaccaaga

SEQ ID NO: 2364183 - RNA, 19 nt, Homo sapiens
  misc_RNA (1)...(19): siRNA sense strand
ugagaaccuccgagagauu

SEQ ID NO: 2364184 - RNA, 19 nt, Homo sapiens
  misc_RNA (1)...(19): siRNA sense strand
guaagaagcuugaccugga

SEQ ID NO: 2364185 - RNA, 19 nt, Homo sapiens
  misc_RNA (1)...(19): siRNA sense strand
ccaucaaagaagcagaaga

SEQ ID NO: 2364186 - RNA, 19 nt, Homo sapiens
  misc_RNA (1)...(19): siRNA sense strand
gaagaacuuuauaagguga

SEQ ID NO: 2364187 - RNA, 19 nt, Homo sapiens
  misc_RNA (1)...(19): siRNA sense strand
cugaagaaccuaugcagca

SEQ ID NO: 2364188 - RNA, 19 nt, Homo sapiens
  misc_RNA (1)...(19): siRNA sense strand
uguucuaauugcacggauu

SEQ ID NO: 2364189 - RNA, 19 nt, Homo sapiens
  misc_RNA (1)...(19): siRNA sense strand
accaagaagaugauggaca

SEQ ID NO: 2364190 - RNA, 19 nt, Homo sapiens
  misc_RNA (1)...(19): siRNA sense strand
gcagcaagacaaucggaga

SEQ ID NO: 2364191 - RNA, 19 nt, Homo sapiens
  misc_RNA (1)...(19): siRNA sense strand
uggcaaaggcagugaaaag

SEQ ID NO: 2364192 - RNA, 19 nt, Homo sapiens
  misc_RNA (1)...(19): siRNA sense strand
gaauauugucucagguucu

SEQ ID NO: 2364193 - RNA, 19 nt, Homo sapiens
  misc_RNA (1)...(19): siRNA sense strand
aguuggaagcagagcgguu

SEQ ID NO: 2364194 - RNA, 19 nt, Homo sapiens
  misc_RNA (1)...(19): siRNA sense strand
uggugaaggcagacagcga

SEQ ID NO: 2364195 - RNA, 19 nt, Homo sapiens
  misc_RNA (1)...(19): siRNA sense strand
uggugaugguagauggcuu

SEQ ID NO: 2364196 - RNA, 19 nt, Homo sapiens
  misc_RNA (1)...(19): siRNA sense strand
ggugauuggcaaaggcagu

SEQ ID NO: 2364197 - RNA, 19 nt, Homo sapiens
  misc_RNA (1)...(19): siRNA sense strand
cuucuguacccaucaguaa

SEQ ID NO: 2364198 - RNA, 19 nt, Homo sapiens
  misc_RNA (1)...(19): siRNA sense strand
gagaaguaccugauugcca

SEQ ID NO: 2364199 - RNA, 19 nt, Homo sapiens
  misc_RNA (1)...(19): siRNA sense strand
ucgaauccgauaugggcaa

SEQ ID NO: 2364200 - RNA, 19 nt, Homo sapiens
  misc_RNA (1)...(19): siRNA sense strand
uggagaacuaccagacaga

SEQ ID NO: 2364201 - RNA, 19 nt, Homo sapiens
  misc_RNA (1)...(19): siRNA sense strand
agaaagcagcagcaagaga

SEQ ID NO: 2364202 - RNA, 19 nt, Homo sapiens
  misc_RNA (1)...(19): siRNA sense strand
ugaaagucucacaaaucaa

SEQ ID NO: 2364203 - RNA, 19 nt, Homo sapiens
  misc_RNA (1)...(19): siRNA sense strand
gggacaagguggaggagca

SEQ ID NO: 2364204 - RNA, 19 nt, Homo sapiens
  misc_RNA (1)...(19): siRNA sense strand
gcauggaggaggaggagga

SEQ ID NO: 2364205 - RNA, 19 nt, Homo sapiens
  misc_RNA (1)...(19): siRNA sense strand
ggaugaauguauugaccca

SEQ ID NO: 2364206 - RNA, 19 nt, Homo sapiens
  misc_RNA (1)...(19): siRNA sense strand
aggaggaggaggaggagga

SEQ ID NO: 2364207 - RNA, 19 nt, Homo sapiens
  misc_RNA (1)...(19): siRNA sense strand
gagaagaccagcagcgacu

SEQ ID NO: 2364208 - RNA, 19 nt, Homo sapiens
  misc_RNA (1)...(19): siRNA sense strand
acaccaaggcacagaggga

SEQ ID NO: 2364209 - RNA, 19 nt, Homo sapiens
  misc_RNA (1)...(19): siRNA sense strand
cugauaacugugaagaaau

SEQ ID NO: 2364210 - RNA, 19 nt, Homo sapiens
  misc_RNA (1)...(19): siRNA sense strand
cugaggagcaggaggagga

SEQ ID NO: 2364211 - RNA, 19 nt, Homo sapiens
  misc_RNA (1)...(19): siRNA sense strand
uggaggaggaggaggagga

SEQ ID NO: 2364212 - RNA, 19 nt, Homo sapiens
  misc_RNA (1)...(19): siRNA sense strand
ccgaauauuaucaagggau

SEQ ID NO: 2364213 - RNA, 19 nt, Homo sapiens
  misc_RNA (1)...(19): siRNA sense strand
cgaauauuaucaagggaug

SEQ ID NO: 2364214 - RNA, 19 nt, Homo sapiens
  misc_RNA (1)...(19): siRNA sense strand
gugccggaguugaugguga

SEQ ID NO: 2364215 - RNA, 19 nt, Homo sapiens
  misc_RNA (1)...(19): siRNA sense strand
aagccagacgagagggaca

SEQ ID NO: 2364216 - RNA, 19 nt, Homo sapiens
  misc_RNA (1)...(19): siRNA sense strand
cauaauuuucagugggcua

SEQ ID NO: 2364217 - RNA, 19 nt, Homo sapiens
  misc_RNA (1)...(19): siRNA sense strand
guaaaucauucucgaggca

SEQ ID NO: 2364218 - RNA, 19 nt, Homo sapiens
  misc_RNA (1)...(19): siRNA sense strand
aggacacggaugaggauga

SEQ ID NO: 2364219 - RNA, 19 nt, Homo sapiens
  misc_RNA (1)...(19): siRNA sense strand
aggaggaggacacggauga

SEQ ID NO: 2364220 - RNA, 19 nt, Homo sapiens
  misc_RNA (1)...(19): siRNA sense strand
uuuuagaccccgagaagaa

SEQ ID NO: 2364221 - RNA, 19 nt, Homo sapiens
  misc_RNA (1)...(19): siRNA sense strand
cgauagagaagacgcggga

SEQ ID NO: 2364222 - RNA, 19 nt, Homo sapiens
  misc_RNA (1)...(19): siRNA sense strand
agaucgugccggagcucaa

SEQ ID NO: 2364223 - RNA, 19 nt, Homo sapiens
  misc_RNA (1)...(19): siRNA sense strand
aggcggagaccgagucaca

SEQ ID NO: 2364224 - RNA, 19 nt, Homo sapiens
  misc_RNA (1)...(19): siRNA sense strand
cggaguugauggugagcuc

SEQ ID NO: 2364225 - RNA, 19 nt, Homo sapiens
  misc_RNA (1)...(19): siRNA sense strand
agaagaucgccaagcugua

SEQ ID NO: 2364226 - RNA, 19 nt, Homo sapiens
  misc_RNA (1)...(19): siRNA sense strand
agaggaggccugaggagca

SEQ ID NO: 2364227 - RNA, 19 nt, Homo sapiens
  misc_RNA (1)...(19): siRNA sense strand
accaaggcacagagggaga

SEQ ID NO: 2364228 - RNA, 19 nt, Homo sapiens
  misc_RNA (1)...(19): siRNA sense strand
gggacaagguggaggagca

SEQ ID NO: 2364229 - RNA, 19 nt, Homo sapiens
  misc_RNA (1)...(19): siRNA sense strand
gcauggaggaggaggagga

SEQ ID NO: 2364230 - RNA, 19 nt, Homo sapiens
  misc_RNA (1)...(19): siRNA sense strand
ggaugaauguauugaccca

SEQ ID NO: 2364231 - RNA, 19 nt, Homo sapiens
  misc_RNA (1)...(19): siRNA sense strand
aggaggaggaggaggagga

SEQ ID NO: 2364232 - RNA, 19 nt, Homo sapiens
  misc_RNA (1)...(19): siRNA sense strand
gagaagaccagcagcgacu

SEQ ID NO: 2364233 - RNA, 19 nt, Homo sapiens
  misc_RNA (1)...(19): siRNA sense strand
acaccaaggcacagaggga

SEQ ID NO: 2364234 - RNA, 19 nt, Homo sapiens
  misc_RNA (1)...(19): siRNA sense strand
cugauaacugugaagaaau

SEQ ID NO: 2364235 - RNA, 19 nt, Homo sapiens
  misc_RNA (1)...(19): siRNA sense strand
cugaggagcaggaggagga

SEQ ID NO: 2364236 - RNA, 19 nt, Homo sapiens
  misc_RNA (1)...(19): siRNA sense strand
uggaggaggaggaggagga

SEQ ID NO: 2364237 - RNA, 19 nt, Homo sapiens
  misc_RNA (1)...(19): siRNA sense strand
ccgaauauuaucaagggau

SEQ ID NO: 2364238 - RNA, 19 nt, Homo sapiens
  misc_RNA (1)...(19): siRNA sense strand
cgaauauuaucaagggaug

SEQ ID NO: 2364239 - RNA, 19 nt, Homo sapiens
  misc_RNA (1)...(19): siRNA sense strand
gugccggaguugaugguga

SEQ ID NO: 2364240 - RNA, 19 nt, Homo sapiens
  misc_RNA (1)...(19): siRNA sense strand
aagccagacgagagggaca

SEQ ID NO: 2364241 - RNA, 19 nt, Homo sapiens
  misc_RNA (1)...(19): siRNA sense strand
cauaauuuucagugggcua

SEQ ID NO: 2364242 - RNA, 19 nt, Homo sapiens
  misc_RNA (1)...(19): siRNA sense strand
guaaaucauucucgaggca

SEQ ID NO: 2364243 - RNA, 19 nt, Homo sapiens
  misc_RNA (1)...(19): siRNA sense strand
aggacacggaugaggauga

SEQ ID NO: 2364244 - RNA, 19 nt, Homo sapiens
  misc_RNA (1)...(19): siRNA sense strand
aggaggaggacacggauga

SEQ ID NO: 2364245 - RNA, 19 nt, Homo sapiens
  misc_RNA (1)...(19): siRNA sense strand
uuuuagaccccgagaagaa

SEQ ID NO: 2364246 - RNA, 19 nt, Homo sapiens
  misc_RNA (1)...(19): siRNA sense strand
cgauagagaagacgcggga

SEQ ID NO: 2364247 - RNA, 19 nt, Homo sapiens
  misc_RNA (1)...(19): siRNA sense strand
agaucgugccggagcucaa

SEQ ID NO: 2364248 - RNA, 19 nt, Homo sapiens
  misc_RNA (1)...(19): siRNA sense strand
aggcggagaccgagucaca

SEQ ID NO: 2364249 - RNA, 19 nt, Homo sapiens
  misc_RNA (1)...(19): siRNA sense strand
cggaguugauggugagcuc

SEQ ID NO: 2364250 - RNA, 19 nt, Homo sapiens
  misc_RNA (1)...(19): siRNA sense strand
agaagaucgccaagcugua

SEQ ID NO: 2364251 - RNA, 19 nt, Homo sapiens
  misc_RNA (1)...(19): siRNA sense strand
agaggaggccugaggagca

SEQ ID NO: 2364252 - RNA, 19 nt, Homo sapiens
  misc_RNA (1)...(19): siRNA sense strand
accaaggcacagagggaga

SEQ ID NO: 2364253 - RNA, 19 nt, Homo sapiens
  misc_RNA (1)...(19): siRNA sense strand
gagaagaggaggaggagga

SEQ ID NO: 2364254 - RNA, 19 nt, Homo sapiens
  misc_RNA (1)...(19): siRNA sense strand
aggaagaagaggaggagga

SEQ ID NO: 2364255 - RNA, 19 nt, Homo sapiens
  misc_RNA (1)...(19): siRNA sense strand
ugaagaagcuccaggacca

SEQ ID NO: 2364256 - RNA, 19 nt, Homo sapiens
  misc_RNA (1)...(19): siRNA sense strand
augaggaggaagagggaga

SEQ ID NO: 2364257 - RNA, 19 nt, Homo sapiens
  misc_RNA (1)...(19): siRNA sense strand
uggcgaagcuggagcagga

SEQ ID NO: 2364258 - RNA, 19 nt, Homo sapiens
  misc_RNA (1)...(19): siRNA sense strand
aggcaaagggagaagcuga

SEQ ID NO: 2364259 - RNA, 19 nt, Homo sapiens
  misc_RNA (1)...(19): siRNA sense strand
aaguggaaguggagaggga

SEQ ID NO: 2364260 - RNA, 19 nt, Homo sapiens
  misc_RNA (1)...(19): siRNA sense strand
agggagaagaggaggagga

SEQ ID NO: 2364261 - RNA, 19 nt, Homo sapiens
  misc_RNA (1)...(19): siRNA sense strand
gagacaaaauucagggcuu

SEQ ID NO: 2364262 - RNA, 19 nt, Homo sapiens
  misc_RNA (1)...(19): siRNA sense strand
aggaggaagaggaggaagu

SEQ ID NO: 2364263 - RNA, 19 nt, Homo sapiens
  misc_RNA (1)...(19): siRNA sense strand
cggacgaagaugaggaauc

SEQ ID NO: 2364264 - RNA, 19 nt, Homo sapiens
  misc_RNA (1)...(19): siRNA sense strand
gggcaaggucuacugggaa

SEQ ID NO: 2364265 - RNA, 19 nt, Homo sapiens
  misc_RNA (1)...(19): siRNA sense strand
cugugaagaggaagggaga

SEQ ID NO: 2364266 - RNA, 19 nt, Homo sapiens
  misc_RNA (1)...(19): siRNA sense strand
aggaggaggaagaggagga

SEQ ID NO: 2364267 - RNA, 19 nt, Homo sapiens
  misc_RNA (1)...(19): siRNA sense strand
cggccguccucauggagaa

SEQ ID NO: 2364268 - RNA, 19 nt, Homo sapiens
  misc_RNA (1)...(19): siRNA sense strand
aggaagagggagaagagga

SEQ ID NO: 2364269 - RNA, 19 nt, Homo sapiens
  misc_RNA (1)...(19): siRNA sense strand
acgcagagucacaggaacu

SEQ ID NO: 2364270 - RNA, 19 nt, Homo sapiens
  misc_RNA (1)...(19): siRNA sense strand
gggaagcugcugagagacu

SEQ ID NO: 2364271 - RNA, 19 nt, Homo sapiens
  misc_RNA (1)...(19): siRNA sense strand
caaaguugugcgagcgaca

SEQ ID NO: 2364272 - RNA, 19 nt, Homo sapiens
  misc_RNA (1)...(19): siRNA sense strand
gcuuccaggcaaagggaga

SEQ ID NO: 2364273 - RNA, 19 nt, Homo sapiens
  misc_RNA (1)...(19): siRNA sense strand
ggcaguacauuguggcuga

SEQ ID NO: 2364274 - RNA, 19 nt, Homo sapiens
  misc_RNA (1)...(19): siRNA sense strand
aagaggaagaagaggagga

SEQ ID NO: 2364275 - RNA, 19 nt, Homo sapiens
  misc_RNA (1)...(19): siRNA sense strand
gggaagcugcugugcguga

SEQ ID NO: 2364276 - RNA, 19 nt, Homo sapiens
  misc_RNA (1)...(19): siRNA sense strand
augaagaggaagaagagga

SEQ ID NO: 2364277 - RNA, 19 nt, Homo sapiens
  misc_RNA (1)...(19): siRNA sense strand
aggggaagcugcugagaga

SEQ ID NO: 2364278 - RNA, 19 nt, Homo sapiens
  misc_RNA (1)...(19): siRNA sense strand
aggaagaggaggaaguucu

SEQ ID NO: 2364279 - RNA, 19 nt, Homo sapiens
  misc_RNA (1)...(19): siRNA sense strand
augcaggacacgagagacu

SEQ ID NO: 2364280 - RNA, 19 nt, Homo sapiens
  misc_RNA (1)...(19): siRNA sense strand
ugcugagagacuuggaaua

SEQ ID NO: 2364281 - RNA, 19 nt, Homo sapiens
  misc_RNA (1)...(19): siRNA sense strand
uauaagacagugagcguca

SEQ ID NO: 2364282 - RNA, 19 nt, Homo sapiens
  misc_RNA (1)...(19): siRNA sense strand
ggaugaggaggaagaggga

SEQ ID NO: 2364283 - RNA, 19 nt, Homo sapiens
  misc_RNA (1)...(19): siRNA sense strand
gcaacgaggccugagggaa

SEQ ID NO: 2364284 - RNA, 19 nt, Homo sapiens
  misc_RNA (1)...(19): siRNA sense strand
aauauaagacagugagcgu

SEQ ID NO: 2364285 - RNA, 19 nt, Homo sapiens
  misc_RNA (1)...(19): siRNA sense strand
gggaaguggaaguggagag

SEQ ID NO: 2364286 - RNA, 19 nt, Homo sapiens
  misc_RNA (1)...(19): siRNA sense strand
acugugaggacgacgggaa

SEQ ID NO: 2364287 - RNA, 19 nt, Homo sapiens
  misc_RNA (1)...(19): siRNA sense strand
auucagggcuuccaggcaa

SEQ ID NO: 2364288 - RNA, 19 nt, Homo sapiens
  misc_RNA (1)...(19): siRNA sense strand
acacgagagacuuccuaaa

SEQ ID NO: 2364289 - RNA, 19 nt, Homo sapiens
  misc_RNA (1)...(19): siRNA sense strand
aggaggaggaggaagagga

SEQ ID NO: 2364290 - RNA, 19 nt, Homo sapiens
  misc_RNA (1)...(19): siRNA sense strand
acuggaagugcgugaccua

SEQ ID NO: 2364291 - RNA, 19 nt, Homo sapiens
  misc_RNA (1)...(19): siRNA sense strand
ggcaaagggagaagcugau

SEQ ID NO: 2364292 - RNA, 19 nt, Homo sapiens
  misc_RNA (1)...(19): siRNA sense strand
ggaagagggagaagaggag

SEQ ID NO: 2364293 - RNA, 19 nt, Homo sapiens
  misc_RNA (1)...(19): siRNA sense strand
ucaccaacgcagagucaca

SEQ ID NO: 2364294 - RNA, 19 nt, Homo sapiens
  misc_RNA (1)...(19): siRNA sense strand
augcaggaguuuagagaga

SEQ ID NO: 2364295 - RNA, 19 nt, Homo sapiens
  misc_RNA (1)...(19): siRNA sense strand
ccaaaaugccaguaugcaa

SEQ ID NO: 2364296 - RNA, 19 nt, Homo sapiens
  misc_RNA (1)...(19): siRNA sense strand
guggaaaaguauaacaaga

SEQ ID NO: 2364297 - RNA, 19 nt, Homo sapiens
  misc_RNA (1)...(19): siRNA sense strand
cuuuggugguacugaacaa

SEQ ID NO: 2364298 - RNA, 19 nt, Homo sapiens
  misc_RNA (1)...(19): siRNA sense strand
cggaauuccuuguggagac

SEQ ID NO: 2364299 - RNA, 19 nt, Homo sapiens
  misc_RNA (1)...(19): siRNA sense strand
uagaagggagugugcggaa

SEQ ID NO: 2364300 - RNA, 19 nt, Homo sapiens
  misc_RNA (1)...(19): siRNA sense strand
aacuagucgauguggauaa

SEQ ID NO: 2364301 - RNA, 19 nt, Homo sapiens
  misc_RNA (1)...(19): siRNA sense strand
ccauuguauuucugcaaca

SEQ ID NO: 2364302 - RNA, 19 nt, Homo sapiens
  misc_RNA (1)...(19): siRNA sense strand
ugaccuggcaacuuggaaa

SEQ ID NO: 2364303 - RNA, 19 nt, Homo sapiens
  misc_RNA (1)...(19): siRNA sense strand
gcagcugauuugugggauc

SEQ ID NO: 2364304 - RNA, 19 nt, Homo sapiens
  misc_RNA (1)...(19): siRNA sense strand
uggaaacuaguaagaggaa

SEQ ID NO: 2364305 - RNA, 19 nt, Homo sapiens
  misc_RNA (1)...(19): siRNA sense strand
cagucagugggaagacaua

SEQ ID NO: 2364306 - RNA, 19 nt, Homo sapiens
  misc_RNA (1)...(19): siRNA sense strand
gcucuuucucgcuuggaua

SEQ ID NO: 2364307 - RNA, 19 nt, Homo sapiens
  misc_RNA (1)...(19): siRNA sense strand
gcaaaggacacuuggggca

SEQ ID NO: 2364308 - RNA, 19 nt, Homo sapiens
  misc_RNA (1)...(19): siRNA sense strand
gucagugggaagacauaaa

SEQ ID NO: 2364309 - RNA, 19 nt, Homo sapiens
  misc_RNA (1)...(19): siRNA sense strand
augcaggaguuuagagaga

SEQ ID NO: 2364310 - RNA, 19 nt, Homo sapiens
  misc_RNA (1)...(19): siRNA sense strand
ccaaaaugccaguaugcaa

SEQ ID NO: 2364311 - RNA, 19 nt, Homo sapiens
  misc_RNA (1)...(19): siRNA sense strand
guggaaaaguauaacaaga

SEQ ID NO: 2364312 - RNA, 19 nt, Homo sapiens
  misc_RNA (1)...(19): siRNA sense strand
cuuuggugguacugaacaa

SEQ ID NO: 2364313 - RNA, 19 nt, Homo sapiens
  misc_RNA (1)...(19): siRNA sense strand
cggaauuccuuguggagac

SEQ ID NO: 2364314 - RNA, 19 nt, Homo sapiens
  misc_RNA (1)...(19): siRNA sense strand
uagaagggagugugcggaa

SEQ ID NO: 2364315 - RNA, 19 nt, Homo sapiens
  misc_RNA (1)...(19): siRNA sense strand
aacuagucgauguggauaa

SEQ ID NO: 2364316 - RNA, 19 nt, Homo sapiens
  misc_RNA (1)...(19): siRNA sense strand
ccauuguauuucugcaaca

SEQ ID NO: 2364317 - RNA, 19 nt, Homo sapiens
  misc_RNA (1)...(19): siRNA sense strand
ugaccuggcaacuuggaaa

SEQ ID NO: 2364318 - RNA, 19 nt, Homo sapiens
  misc_RNA (1)...(19): siRNA sense strand
gcagcugauuugugggauc

SEQ ID NO: 2364319 - RNA, 19 nt, Homo sapiens
  misc_RNA (1)...(19): siRNA sense strand
uggaaacuaguaagaggaa

SEQ ID NO: 2364320 - RNA, 19 nt, Homo sapiens
  misc_RNA (1)...(19): siRNA sense strand
cagucagugggaagacaua

SEQ ID NO: 2364321 - RNA, 19 nt, Homo sapiens
  misc_RNA (1)...(19): siRNA sense strand
gcucuuucucgcuuggaua

SEQ ID NO: 2364322 - RNA, 19 nt, Homo sapiens
  misc_RNA (1)...(19): siRNA sense strand
gcaaaggacacuuggggca

SEQ ID NO: 2364323 - RNA, 19 nt, Homo sapiens
  misc_RNA (1)...(19): siRNA sense strand
gucagugggaagacauaaa

SEQ ID NO: 2364324 - RNA, 19 nt, Homo sapiens
  misc_RNA (1)...(19): siRNA sense strand
aagaggaggagcaggcaga

SEQ ID NO: 2364325 - RNA, 19 nt, Homo sapiens
  misc_RNA (1)...(19): siRNA sense strand
aagaggaggagcaggcaga

SEQ ID NO: 2364326 - RNA, 19 nt, Homo sapiens
  misc_RNA (1)...(19): siRNA sense strand
ccaucaagaaggagaccaa

SEQ ID NO: 2364327 - RNA, 19 nt, Homo sapiens
  misc_RNA (1)...(19): siRNA sense strand
cgguggagacggugaacau

SEQ ID NO: 2364328 - RNA, 19 nt, Homo sapiens
  misc_RNA (1)...(19): siRNA sense strand
gcaaccgggagguggacaa

SEQ ID NO: 2364329 - RNA, 19 nt, Homo sapiens
  misc_RNA (1)...(19): siRNA sense strand
gcaagaugacucagcgcau

SEQ ID NO: 2364330 - RNA, 19 nt, Homo sapiens
  misc_RNA (1)...(19): siRNA sense strand
gggagauuucuuuagacaa

SEQ ID NO: 2364331 - RNA, 19 nt, Homo sapiens
  misc_RNA (1)...(19): siRNA sense strand
uggacaacgacgaggagga

SEQ ID NO: 2364332 - RNA, 19 nt, Homo sapiens
  misc_RNA (1)...(19): siRNA sense strand
ggggagauuucuuuagaca

SEQ ID NO: 2364333 - RNA, 19 nt, Homo sapiens
  misc_RNA (1)...(19): siRNA sense strand
ggaaaauggugaagaaaau

SEQ ID NO: 2364334 - RNA, 19 nt, Homo sapiens
  misc_RNA (1)...(19): siRNA sense strand
cggaaaauggugaagaaaa

SEQ ID NO: 2364335 - RNA, 19 nt, Homo sapiens
  misc_RNA (1)...(19): siRNA sense strand
gacugaaggaguugaaaga

SEQ ID NO: 2364336 - RNA, 19 nt, Homo sapiens
  misc_RNA (1)...(19): siRNA sense strand
aagucgggaucgucgguaa

SEQ ID NO: 2364337 - RNA, 19 nt, Homo sapiens
  misc_RNA (1)...(19): siRNA sense strand
guaccaagaaagucgggau

SEQ ID NO: 2364338 - RNA, 19 nt, Homo sapiens
  misc_RNA (1)...(19): siRNA sense strand
ugaaggaguugaaagacca

SEQ ID NO: 2364339 - RNA, 19 nt, Homo sapiens
  misc_RNA (1)...(19): siRNA sense strand
ggcaaaaccaagaugaaga

SEQ ID NO: 2364340 - RNA, 19 nt, Homo sapiens
  misc_RNA (1)...(19): siRNA sense strand
agucgggaucgucgguaaa

SEQ ID NO: 2364341 - RNA, 19 nt, Homo sapiens
  misc_RNA (1)...(19): siRNA sense strand
gugaagaggaccuggccaa

SEQ ID NO: 2364342 - RNA, 19 nt, Homo sapiens
  misc_RNA (1)...(19): siRNA sense strand
ggucagaugcagagagcgu

SEQ ID NO: 2364343 - RNA, 19 nt, Homo sapiens
  misc_RNA (1)...(19): siRNA sense strand
acaagaaugaugaugggaa

SEQ ID NO: 2364344 - RNA, 19 nt, Homo sapiens
  misc_RNA (1)...(19): siRNA sense strand
gguccagguggcagaggaa

SEQ ID NO: 2364345 - RNA, 19 nt, Homo sapiens
  misc_RNA (1)...(19): siRNA sense strand
caagaaugaugaugggaag

SEQ ID NO: 2364346 - RNA, 19 nt, Homo sapiens
  misc_RNA (1)...(19): siRNA sense strand
gugaagaggaccuggccaa

SEQ ID NO: 2364347 - RNA, 19 nt, Homo sapiens
  misc_RNA (1)...(19): siRNA sense strand
ggucagaugcagagagcgu

SEQ ID NO: 2364348 - RNA, 19 nt, Homo sapiens
  misc_RNA (1)...(19): siRNA sense strand
acaagaaugaugaugggaa

SEQ ID NO: 2364349 - RNA, 19 nt, Homo sapiens
  misc_RNA (1)...(19): siRNA sense strand
gguccagguggcagaggaa

SEQ ID NO: 2364350 - RNA, 19 nt, Homo sapiens
  misc_RNA (1)...(19): siRNA sense strand
caagaaugaugaugggaag

SEQ ID NO: 2364351 - RNA, 19 nt, Homo sapiens
  misc_RNA (1)...(19): siRNA sense strand
cguuaugacaggaagcaga

SEQ ID NO: 2364352 - RNA, 19 nt, Homo sapiens
  misc_RNA (1)...(19): siRNA sense strand
auaaagugacacaguacaa

SEQ ID NO: 2364353 - RNA, 19 nt, Homo sapiens
  misc_RNA (1)...(19): siRNA sense strand
cucuguacgcccagggaaa

SEQ ID NO: 2364354 - RNA, 19 nt, Homo sapiens
  misc_RNA (1)...(19): siRNA sense strand
gcuaaaacuacaaagaaga

SEQ ID NO: 2364355 - RNA, 19 nt, Homo sapiens
  misc_RNA (1)...(19): siRNA sense strand
ucuaagagaaugcuggcua

SEQ ID NO: 2364356 - RNA, 19 nt, Homo sapiens
  misc_RNA (1)...(19): siRNA sense strand
gaguggcuauggugggcaa

SEQ ID NO: 2364357 - RNA, 19 nt, Homo sapiens
  misc_RNA (1)...(19): siRNA sense strand
cacaguacaagaagggcaa

SEQ ID NO: 2364358 - RNA, 19 nt, Homo sapiens
  misc_RNA (1)...(19): siRNA sense strand
ccauaaagugacacaguac

SEQ ID NO: 2364359 - RNA, 19 nt, Homo sapiens
  misc_RNA (1)...(19): siRNA sense strand
gaagauugugcuaaggcuu

SEQ ID NO: 2364360 - RNA, 19 nt, Homo sapiens
  misc_RNA (1)...(19): siRNA sense strand
acacaguacaagaagggca

SEQ ID NO: 2364361 - RNA, 19 nt, Homo sapiens
  misc_RNA (1)...(19): siRNA sense strand
auaagaagagaaagggcca

SEQ ID NO: 2364362 - RNA, 19 nt, Homo sapiens
  misc_RNA (1)...(19): siRNA sense strand
acugcagaucuaagagaau

SEQ ID NO: 2364363 - RNA, 19 nt, Homo sapiens
  misc_RNA (1)...(19): siRNA sense strand
agagaaagggccaagugau

SEQ ID NO: 2364364 - RNA, 19 nt, Homo sapiens
  misc_RNA (1)...(19): siRNA sense strand
augaacaacgugaccguaa

SEQ ID NO: 2364365 - RNA, 19 nt, Homo sapiens
  misc_RNA (1)...(19): siRNA sense strand
ccgcagcuccuguggaaaa

SEQ ID NO: 2364366 - RNA, 19 nt, Homo sapiens
  misc_RNA (1)...(19): siRNA sense strand
ccucuguggacaaguacaa

SEQ ID NO: 2364367 - RNA, 19 nt, Homo sapiens
  misc_RNA (1)...(19): siRNA sense strand
ccgcgugcauaauggccaa

SEQ ID NO: 2364368 - RNA, 19 nt, Homo sapiens
  misc_RNA (1)...(19): siRNA sense strand
cagugaacuacgacaccaa

SEQ ID NO: 2364369 - RNA, 19 nt, Homo sapiens
  misc_RNA (1)...(19): siRNA sense strand
guggacaaguacaacguga

SEQ ID NO: 2364370 - RNA, 19 nt, Homo sapiens
  misc_RNA (1)...(19): siRNA sense strand
cugccuucucagugaacua

SEQ ID NO: 2364371 - RNA, 19 nt, Homo sapiens
  misc_RNA (1)...(19): siRNA sense strand
cgacaaaagcugaggguuu

SEQ ID NO: 2364372 - RNA, 19 nt, Homo sapiens
  misc_RNA (1)...(19): siRNA sense strand
gcgcaaaguggcagagcua

SEQ ID NO: 2364373 - RNA, 19 nt, Homo sapiens
  misc_RNA (1)...(19): siRNA sense strand
caaagaugcuagaggaaaa

SEQ ID NO: 2364374 - RNA, 19 nt, Homo sapiens
  misc_RNA (1)...(19): siRNA sense strand
agacagagaagaaggcaaa

SEQ ID NO: 2364375 - RNA, 19 nt, Homo sapiens
  misc_RNA (1)...(19): siRNA sense strand
aggaagaggacgcgacaaa

SEQ ID NO: 2364376 - RNA, 19 nt, Homo sapiens
  misc_RNA (1)...(19): siRNA sense strand
ggaucaggccuuagaacaa

SEQ ID NO: 2364377 - RNA, 19 nt, Homo sapiens
  misc_RNA (1)...(19): siRNA sense strand
gggcugaaacagaggaaga

SEQ ID NO: 2364378 - RNA, 19 nt, Homo sapiens
  misc_RNA (1)...(19): siRNA sense strand
aggagagaucauagggaaa

SEQ ID NO: 2364379 - RNA, 19 nt, Homo sapiens
  misc_RNA (1)...(19): siRNA sense strand
agaaggaaccugagccaaa

SEQ ID NO: 2364380 - RNA, 19 nt, Homo sapiens
  misc_RNA (1)...(19): siRNA sense strand
gcagagacuuagagcaaaa

SEQ ID NO: 2364381 - RNA, 19 nt, Homo sapiens
  misc_RNA (1)...(19): siRNA sense strand
uggcagagcuagaggagga

SEQ ID NO: 2364382 - RNA, 19 nt, Homo sapiens
  misc_RNA (1)...(19): siRNA sense strand
aagaagaacaugugaugaa

SEQ ID NO: 2364383 - RNA, 19 nt, Homo sapiens
  misc_RNA (1)...(19): siRNA sense strand
caccagaggaagaggacaa

SEQ ID NO: 2364384 - RNA, 19 nt, Homo sapiens
  misc_RNA (1)...(19): siRNA sense strand
agaaggaggagaagaggaa

SEQ ID NO: 2364385 - RNA, 19 nt, Homo sapiens
  misc_RNA (1)...(19): siRNA sense strand
cagcaaggacagaggccua

SEQ ID NO: 2364386 - RNA, 19 nt, Homo sapiens
  misc_RNA (1)...(19): siRNA sense strand
agaaugaggcugugaaaca
